United States Patent Application Publication US 2005/0244851 A1 - sequence listing, part 147

SEQ ID NO: 5740214 - DNA, 25 bp, Homo sapien
cacggctcctcgattttggagcggc

SEQ ID NO: 5740215 - DNA, 25 bp, Homo sapien
aatgcttccgctgacgaaatgttca

SEQ ID NO: 5740216 - DNA, 25 bp, Homo sapien
aatcctgaaggaggagctgccaggg

SEQ ID NO: 5740217 - DNA, 25 bp, Homo sapien
aggccgaccgctgcagcctcttcat

SEQ ID NO: 5740218 - DNA, 25 bp, Homo sapien
ccagggacaggcagccaccatgagc

SEQ ID NO: 5740219 - DNA, 25 bp, Homo sapien
atcacctaccacaactggcgccacg

SEQ ID NO: 5740220 - DNA, 25 bp, Homo sapien
cagcacgatcacgtgatccacctga

SEQ ID NO: 5740221 - DNA, 25 bp, Homo sapien
ccaggttcaagcgattctcgtgcct

SEQ ID NO: 5740222 - DNA, 25 bp, Homo sapien
agatggagtcttgctctgtcaccca

SEQ ID NO: 5740223 - DNA, 25 bp, Homo sapien
gagatcctgcccatgttcgaccgac

SEQ ID NO: 5740224 - DNA, 25 bp, Homo sapien
tgcctcagcctcctgagtagctggg

SEQ ID NO: 5740225 - DNA, 25 bp, Homo sapien
gacatcgaccaccgcggcaccaaca

SEQ ID NO: 5740226 - DNA, 25 bp, Homo sapien
gttcaaatttcaggaaggggccctg

SEQ ID NO: 5740227 - DNA, 25 bp, Homo sapien
tggtcctttaccacgtgaagtgcga

SEQ ID NO: 5740228 - DNA, 25 bp, Homo sapien
ttcccacaccctcagccgatcactg

SEQ ID NO: 5740229 - DNA, 25 bp, Homo sapien
tggccctgtacttcaagaagagagc

SEQ ID NO: 5740230 - DNA, 25 bp, Homo sapien
acaagctggagaaccgcaaggacat

SEQ ID NO: 5740231 - DNA, 25 bp, Homo sapien
agctgggtggagtacctgtccctgg

SEQ ID NO: 5740232 - DNA, 25 bp, Homo sapien
gcgacagcctccgggacctctgcca

SEQ ID NO: 5740233 - DNA, 25 bp, Homo sapien
ttctccatcagcaaagggtaccgga

SEQ ID NO: 5740234 - DNA, 25 bp, Homo sapien
ccggaacaaggcggccgagctcccc

SEQ ID NO: 5740235 - DNA, 25 bp, Homo sapien
tccacaactgcgagacgcgccgcgg

SEQ ID NO: 5740236 - DNA, 25 bp, Homo sapien
ggacaggcagccaccatgagcctca

SEQ ID NO: 5740237 - DNA, 25 bp, Homo sapien
tttttttgagatggagtcttgctct

SEQ ID NO: 5740238 - DNA, 25 bp, Homo sapien
cggacctggaggccttcgccatggt

SEQ ID NO: 5740239 - DNA, 25 bp, Homo sapien
aagctacgtggcagaaagcggcttt

SEQ ID NO: 5740240 - DNA, 25 bp, Homo sapien
gtgaaggctctggaggagaaggagg

SEQ ID NO: 5740241 - DNA, 25 bp, Homo sapien
acggtgcgggcctacctcaactgcg

SEQ ID NO: 5740242 - DNA, 25 bp, Homo sapien
gtcaaatgtggcatccagatgtact

SEQ ID NO: 5740243 - DNA, 25 bp, Homo sapien
gtgatccacctgatggacatcgcca

SEQ ID NO: 5740244 - DNA, 25 bp, Homo sapien
ctgaaccggcggcagcacgatcacg

SEQ ID NO: 5740245 - DNA, 25 bp, Homo sapien
ctgaagccaactgtgaataaactgt

SEQ ID NO: 5740246 - DNA, 25 bp, Homo sapien
ttcagtacagatggggtttcaccat

SEQ ID NO: 5740247 - DNA, 25 bp, Homo sapien
cctttaccacgtgaagtgcgacagg

SEQ ID NO: 5740248 - DNA, 25 bp, Homo sapien
ctggtgccccccgactccgagatcg

SEQ ID NO: 5740249 - DNA, 25 bp, Homo sapien
cgggaaattgtcttctacaaagtga

SEQ ID NO: 5740250 - DNA, 25 bp, Homo sapien
tggccgggaaattgtcttctacaaa

SEQ ID NO: 5740251 - DNA, 25 bp, Homo sapien
ctgctgtggtcggccaacaaggtgt

SEQ ID NO: 5740252 - DNA, 25 bp, Homo sapien
acatctacgaattccacttctctga

SEQ ID NO: 5740253 - DNA, 25 bp, Homo sapien
ccaccatgagcctcagtgaggagca

SEQ ID NO: 5740254 - DNA, 25 bp, Homo sapien
gaggacgggtgcccgccggactgcg

SEQ ID NO: 5740255 - DNA, 25 bp, Homo sapien
ctgatgggagagtcccagccgtact

SEQ ID NO: 5740256 - DNA, 25 bp, Homo sapien
agcgaagacgaagatgtgttcttga

SEQ ID NO: 5740257 - DNA, 25 bp, Homo sapien
cgcctcagcttcctgaagtgctggg

SEQ ID NO: 5740258 - DNA, 25 bp, Homo sapien
gcgcctggggaaggagcctgctgac

SEQ ID NO: 5740259 - DNA, 25 bp, Homo sapien
acgttgtacctgaagatctatcacc

SEQ ID NO: 5740260 - DNA, 25 bp, Homo sapien
tggacatgaccaaggagaaggaatt

SEQ ID NO: 5740261 - DNA, 25 bp, Homo sapien
agcatcaacatggagcgcgtggtct

SEQ ID NO: 5740262 - DNA, 25 bp, Homo sapien
caataggaaagagtggaaggcgctg

SEQ ID NO: 5740263 - DNA, 25 bp, Homo sapien
accctcctgcaggccgaccgctgca

SEQ ID NO: 5740264 - DNA, 25 bp, Homo sapien
ctgggccctggccagcggccttcca

SEQ ID NO: 5740265 - DNA, 25 bp, Homo sapien
gaagagagcgatgtttcagaagatc

SEQ ID NO: 5740266 - DNA, 25 bp, Homo sapien
tttataaactgaagccaactgtgaa

SEQ ID NO: 5740267 - DNA, 25 bp, Homo sapien
ggacgagatccagctcatcctgcca

SEQ ID NO: 5740268 - DNA, 25 bp, Homo sapien
aagctggagaaccgcaaggacatcg

SEQ ID NO: 5740269 - DNA, 25 bp, Homo sapien
ctgatgagtatgaggccaaagtgaa

SEQ ID NO: 5740270 - DNA, 25 bp, Homo sapien
cagaaatttgcaatggcggcccagc

SEQ ID NO: 5740271 - DNA, 25 bp, Homo sapien
gacaagatgaacaagctggagaacc

SEQ ID NO: 5740272 - DNA, 25 bp, Homo sapien
aaattgtcttctacaaagtgatcga

SEQ ID NO: 5740273 - DNA, 25 bp, Homo sapien
gaactggacctggtcaaatgtggca

SEQ ID NO: 5740274 - DNA, 25 bp, Homo sapien
cacccgcctcagcttcctgaagtgc

SEQ ID NO: 5740275 - DNA, 25 bp, Homo sapien
tttgtattttcagtacagatggggt

SEQ ID NO: 5740276 - DNA, 25 bp, Homo sapien
tattgggcaggctggtctcgaactc

SEQ ID NO: 5740277 - DNA, 25 bp, Homo sapien
gcggcaccacctggagtttgggaag

SEQ ID NO: 5740278 - DNA, 25 bp, Homo sapien
gatcagcagcccattcctatgatgg

SEQ ID NO: 5740279 - DNA, 25 bp, Homo sapien
gcccggagctttctggaccagaacc

SEQ ID NO: 5740280 - DNA, 25 bp, Homo sapien
catgtaccgccagcgcaacggcgtg

SEQ ID NO: 5740281 - DNA, 25 bp, Homo sapien
ctgaagtgctgggattacaggcatg

SEQ ID NO: 5740282 - DNA, 25 bp, Homo sapien
atggcagtgaacaagctcaacggcc

SEQ ID NO: 5740283 - DNA, 25 bp, Homo sapien
gcaccaacaacctgtaccagatgaa

SEQ ID NO: 5740284 - DNA, 25 bp, Homo sapien
gcgaaatcctgaaggaggagctgcc

SEQ ID NO: 5740285 - DNA, 25 bp, Homo sapien
aagagtggaaggcgctggctgatga

SEQ ID NO: 5740286 - DNA, 25 bp, Homo sapien
ggctgctgagttctgggagcaaggt

SEQ ID NO: 5740287 - DNA, 25 bp, Homo sapien
aatgtggccgcggcctgcgaggacg

SEQ ID NO: 5740288 - DNA, 25 bp, Homo sapien
cttcctgaagtgctgggattacagg

SEQ ID NO: 5740289 - DNA, 25 bp, Homo sapien
aggagaaggaattttttgacgtgtg

SEQ ID NO: 5740290 - DNA, 25 bp, Homo sapien
ctccagggacaggcagccaccatga

SEQ ID NO: 5740291 - DNA, 25 bp, Homo sapien
atcatcgccacggacctggccctgt

SEQ ID NO: 5740292 - DNA, 25 bp, Homo sapien
acagttcctgggctggtcagtgatg

SEQ ID NO: 5740293 - DNA, 25 bp, Homo sapien
ctggagtttgggaagttcctgctct

SEQ ID NO: 5740294 - DNA, 25 bp, Homo sapien
aactgagccctgagaatgtggccgc

SEQ ID NO: 5740295 - DNA, 25 bp, Homo sapien
catggagcgcgtggtcttcaaggtc

SEQ ID NO: 5740296 - DNA, 25 bp, Homo sapien
gggcttcatcgacttcgtgtgcaca

SEQ ID NO: 5740297 - DNA, 25 bp, Homo sapien
gaccggcaaactgaagagctactac

SEQ ID NO: 5740298 - DNA, 25 bp, Homo sapien
caatggcggcccagcacccaagtct

SEQ ID NO: 5740299 - DNA, 25 bp, Homo sapien
ttctacaaagtgatcgactacatcc

SEQ ID NO: 5740300 - DNA, 25 bp, Homo sapien
acctgaattttgccacgttgtacct

SEQ ID NO: 5740301 - DNA, 25 bp, Homo sapien
acccactaggatttgggttctgcct

SEQ ID NO: 5740302 - DNA, 25 bp, Homo sapien
ttcaccagcgaagacgaagatgtgt

SEQ ID NO: 5740303 - DNA, 25 bp, Homo sapien
agcctgctgactgcgatgaggacga

SEQ ID NO: 5740304 - DNA, 25 bp, Homo sapien
tgtacttcaagaagagagcgatgtt

SEQ ID NO: 5740305 - DNA, 25 bp, Homo sapien
ctgctggagctggtgcaggatatgc

SEQ ID NO: 5740306 - DNA, 25 bp, Homo sapien
ccacaactggcgccacggcttcaac

SEQ ID NO: 5740307 - DNA, 25 bp, Homo sapien
ttgtgggagtcgccacattttacaa

SEQ ID NO: 5740308 - DNA, 25 bp, Homo sapien
ggagatcgtcatggccatgatgatg

SEQ ID NO: 5740309 - DNA, 25 bp, Homo sapien
ccattcttcaccagcgaagacgaag

SEQ ID NO: 5740310 - DNA, 25 bp, Homo sapien
ccgccggactgcgacagcctccggg

SEQ ID NO: 5740311 - DNA, 25 bp, Homo sapien
gtcgcacttctcgtggctgctgagt

SEQ ID NO: 5740312 - DNA, 25 bp, Homo sapien
tcctcgattttggagcggcaccacc

SEQ ID NO: 5740313 - DNA, 25 bp, Homo sapien
ccaactgtgaataaactgtagccta

SEQ ID NO: 5740314 - DNA, 25 bp, Homo sapien
ttctacacggtgcgggcctacctca

SEQ ID NO: 5740315 - DNA, 25 bp, Homo sapien
gatcacgtgatccacctgatggaca

SEQ ID NO: 5740316 - DNA, 25 bp, Homo sapien
tcctgagtagctgggactacaggcg

SEQ ID NO: 5740317 - DNA, 25 bp, Homo sapien
tacatcctccacggcaaggaggaga

SEQ ID NO: 5740318 - DNA, 25 bp, Homo sapien
agtcccagccgtactcgggcccacg

SEQ ID NO: 5740319 - DNA, 25 bp, Homo sapien
ggcaaggaggagatcaaggtcattc

SEQ ID NO: 5740320 - DNA, 25 bp, Homo sapien
gggcgaaatcctgaaggaggagctg

SEQ ID NO: 5740321 - DNA, 25 bp, Homo sapien
caggtgatcacccgcctcagcttcc

SEQ ID NO: 5740322 - DNA, 25 bp, Homo sapien
ctcactgcaacctccacctcccagg

SEQ ID NO: 5740323 - DNA, 25 bp, Homo sapien
accgcggcaccaacaacctgtacca

SEQ ID NO: 5740324 - DNA, 25 bp, Homo sapien
ggccgagctggccaccaggcttttc

SEQ ID NO: 5740325 - DNA, 25 bp, Homo sapien
gactgcctggtgccccccgactccg

SEQ ID NO: 5740326 - DNA, 25 bp, Homo sapien
agtgatgaacaccgacacctacgac

SEQ ID NO: 5740327 - DNA, 25 bp, Homo sapien
cctcttcatgtaccgccagcgcaac

SEQ ID NO: 5740328 - DNA, 25 bp, Homo sapien
ggacatcgccatcatcgccacggac

SEQ ID NO: 5740329 - DNA, 25 bp, Homo sapien
ctatgatggaccggaacaaggcggc

SEQ ID NO: 5740330 - DNA, 25 bp, Homo sapien
gcgacctgtctgccatcaccaagcc

SEQ ID NO: 5740331 - DNA, 25 bp, Homo sapien
gaccaccgcggcaccaacaacctgt

SEQ ID NO: 5740332 - DNA, 25 bp, Homo sapien
cggcccattcttcaccagcgaagac

SEQ ID NO: 5740333 - DNA, 25 bp, Homo sapien
acgacaagatgaacaagctggagaa

SEQ ID NO: 5740334 - DNA, 25 bp, Homo sapien
acctggagtgcaccgaactggacct

SEQ ID NO: 5740335 - DNA, 25 bp, Homo sapien
agctcactgcaacctccacctccca

SEQ ID NO: 5740336 - DNA, 25 bp, Homo sapien
aactaccaggacaagaagagctggg

SEQ ID NO: 5740337 - DNA, 25 bp, Homo sapien
cccatcgtcaacaagaaggaggaga

SEQ ID NO: 5740338 - DNA, 25 bp, Homo sapien
cagggcccaccacatttgacatcta

SEQ ID NO: 5740339 - DNA, 25 bp, Homo sapien
ccaagccctgggaagtccagagcaa

SEQ ID NO: 5740340 - DNA, 25 bp, Homo sapien
tattttcagtacagatggggtttca

SEQ ID NO: 5740341 - DNA, 25 bp, Homo sapien
cagcgtctccagggacaggcagcca

SEQ ID NO: 5740342 - DNA, 25 bp, Homo sapien
agagagcgatgtttcagaagatcgt

SEQ ID NO: 5740343 - DNA, 25 bp, Homo sapien
gtcccatggggaccctatggctccc

SEQ ID NO: 5740344 - DNA, 25 bp, Homo sapien
cgacagggacgagatccagctcatc

SEQ ID NO: 5740345 - DNA, 25 bp, Homo sapien
acctacgacaagatgaacaagctgg

SEQ ID NO: 5740346 - DNA, 25 bp, Homo sapien
cgcggcctgcgaggacgggtgcccg

SEQ ID NO: 5740347 - DNA, 25 bp, Homo sapien
ctcatttgctgacgagctcactgac

SEQ ID NO: 5740348 - DNA, 25 bp, Homo sapien
tacacggacctggaggccttcgcca

SEQ ID NO: 5740349 - DNA, 25 bp, Homo sapien
ctgcgagcggtactccgtgggcctc

SEQ ID NO: 5740350 - DNA, 25 bp, Homo sapien
gtgccgtggcacgatctcagctcac

SEQ ID NO: 5740351 - DNA, 25 bp, Homo sapien
caaggagaaggaattttttgacgtg

SEQ ID NO: 5740352 - DNA, 25 bp, Homo sapien
ccctcaatcttcacccactaggatt

SEQ ID NO: 5740353 - DNA, 25 bp, Homo sapien
ttcacgctgctcatgaccggcaaac

SEQ ID NO: 5740354 - DNA, 25 bp, Homo sapien
acgtcgaggacgtggccgagtgccc

SEQ ID NO: 5740355 - DNA, 25 bp, Homo sapien
ccgccagtactttgggaagaaactg

SEQ ID NO: 5740356 - DNA, 25 bp, Homo sapien
cgaggttctcatggagtccctgaca

SEQ ID NO: 5740357 - DNA, 25 bp, Homo sapien
atgaccggcaaactgaagagctact

SEQ ID NO: 5740358 - DNA, 25 bp, Homo sapien
gccctgggaagtccagagcaaggtc

SEQ ID NO: 5740359 - DNA, 25 bp, Homo sapien
ctgaagatcattctggatattttaa

SEQ ID NO: 5740360 - DNA, 25 bp, Homo sapien
ggagtccctgacacagttcctgggc

SEQ ID NO: 5740361 - DNA, 25 bp, Homo sapien
ctacgacaagatgaacaagctggag

SEQ ID NO: 5740362 - DNA, 25 bp, Homo sapien
gcacattcgtgtacaaggagttctc

SEQ ID NO: 5740363 - DNA, 25 bp, Homo sapien
ggaaattgtcttctacaaagtgatc

SEQ ID NO: 5740364 - DNA, 25 bp, Homo sapien
gacaaagaatatgctggccacaccc

SEQ ID NO: 5740365 - DNA, 25 bp, Homo sapien
ggaggactgcctggtgccccccgac

SEQ ID NO: 5740366 - DNA, 25 bp, Homo sapien
caagaactaccaggacaagaagagc

SEQ ID NO: 5740367 - DNA, 25 bp, Homo sapien
tttgggaagaaactgagccctgaga

SEQ ID NO: 5740368 - DNA, 25 bp, Homo sapien
cctggtgcggttcctgttctccatc

SEQ ID NO: 5740369 - DNA, 25 bp, Homo sapien
ggctcatcaagaatgtgctgtccat

SEQ ID NO: 5740370 - DNA, 25 bp, Homo sapien
ctaccaggacaagaagagctgggtg

SEQ ID NO: 5740371 - DNA, 25 bp, Homo sapien
cggctttatttgtaacatcatgaat

SEQ ID NO: 5740372 - DNA, 25 bp, Homo sapien
ggagtacctgtccctggagacgacc

SEQ ID NO: 5740373 - DNA, 25 bp, Homo sapien
attgtcttctacaaagtgatcgact

SEQ ID NO: 5740374 - DNA, 25 bp, Homo sapien
gccgagtgccctcacttcagctcat

SEQ ID NO: 5740375 - DNA, 25 bp, Homo sapien
ctgcccatgttcgaccgactgcaga

SEQ ID NO: 5740376 - DNA, 25 bp, Homo sapien
attccacttctctgacctggagtgc

SEQ ID NO: 5740377 - DNA, 25 bp, Homo sapien
cccatcatgaatggcaaagacgtcg

SEQ ID NO: 5740378 - DNA, 25 bp, Homo sapien
aggacatggtcctttaccacgtgaa

SEQ ID NO: 5740379 - DNA, 25 bp, Homo sapien
ctgagtagctgggactacaggcgcc

SEQ ID NO: 5740380 - DNA, 25 bp, Homo sapien
ctcgtttccacgaagagatcctgcc

SEQ ID NO: 5740381 - DNA, 25 bp, Homo sapien
agaaccccttggctaagctccacgg

SEQ ID NO: 5740382 - DNA, 25 bp, Homo sapien
gaacgtcgaggacgtggccgagtgc

SEQ ID NO: 5740383 - DNA, 25 bp, Homo sapien
tgccatgacatcgaccaccgcggca

SEQ ID NO: 5740384 - DNA, 25 bp, Homo sapien
cgtggatgagtccaagaactaccag

SEQ ID NO: 5740385 - DNA, 25 bp, Homo sapien
ggctaatttttgtattttcagtaca

SEQ ID NO: 5740386 - DNA, 25 bp, Homo sapien
ctcagccgatcactgggccctggcc

SEQ ID NO: 5740387 - DNA, 25 bp, Homo sapien
aagcgattctcgtgcctcagcctcc

SEQ ID NO: 5740388 - DNA, 25 bp, Homo sapien
atggctaatttttgtattttcagta

SEQ ID NO: 5740389 - DNA, 25 bp, Homo sapien
aagacaaagaatatgctggccacac

SEQ ID NO: 5740390 - DNA, 25 bp, Homo sapien
tttgacatctacgaattccacttct

SEQ ID NO: 5740391 - DNA, 25 bp, Homo sapien
ccgactccgagatcgtcttcccact

SEQ ID NO: 5740392 - DNA, 25 bp, Homo sapien
actggacctggtcaaatgtggcatc

SEQ ID NO: 5740393 - DNA, 25 bp, Homo sapien
tggccgcggcctgcgaggacgggtg

SEQ ID NO: 5740394 - DNA, 25 bp, Homo sapien
ctgcgatgaggacgagctgggcgaa

SEQ ID NO: 5740395 - DNA, 25 bp, Homo sapien
gcgtggtccgaaagttccagatccc

SEQ ID NO: 5740396 - DNA, 25 bp, Homo sapien
ggcaccacctggagtttgggaagtt

SEQ ID NO: 5740397 - DNA, 25 bp, Homo sapien
gagcagcagcgtctccagggacagg

SEQ ID NO: 5740398 - DNA, 25 bp, Homo sapien
acaggcatgagccaccacgcccagc

SEQ ID NO: 5740399 - DNA, 25 bp, Homo sapien
gagaaggaattttttgacgtgtggt

SEQ ID NO: 5740400 - DNA, 25 bp, Homo sapien
acgcacgcctgatggccgggaaatt

SEQ ID NO: 5740401 - DNA, 25 bp, Homo sapien
cctgtacttcaagaagagagcgatg

SEQ ID NO: 5740402 - DNA, 25 bp, Homo sapien
tggatcagcagcccattcctatgat

SEQ ID NO: 5740403 - DNA, 25 bp, Homo sapien
acaacctgtaccagatgaagtccca

SEQ ID NO: 5740404 - DNA, 25 bp, Homo sapien
acatcatgaatgcttccgctgacga

SEQ ID NO: 5740405 - DNA, 25 bp, Homo sapien
gcctgcgaggacgggtgcccgccgg

SEQ ID NO: 5740406 - DNA, 25 bp, Homo sapien
ttcctgttctccatcagcaaagggt

SEQ ID NO: 5740407 - DNA, 25 bp, Homo sapien
cagtactttgggaagaaactgagcc

SEQ ID NO: 5740408 - DNA, 25 bp, Homo sapien
cagcgtgcagccggacagcgtcctg

SEQ ID NO: 5740409 - DNA, 25 bp, Homo sapien
taccgccagcgcaacggcgtggccg

SEQ ID NO: 5740410 - DNA, 25 bp, Homo sapien
aggttcaagcgattctcgtgcctca

SEQ ID NO: 5740411 - DNA, 25 bp, Homo sapien
tgacttggaaaggacagtcttggat

SEQ ID NO: 5740412 - DNA, 25 bp, Homo sapien
ggaacaaggcggccgagctccccaa

SEQ ID NO: 5740413 - DNA, 25 bp, Homo sapien
gagattgtgggagtcgccacatttt

SEQ ID NO: 5740414 - DNA, 25 bp, Homo sapien
aacatggagcgcgtggtcttcaagg

SEQ ID NO: 5740415 - DNA, 25 bp, Homo sapien
cttcgtgtgcacattcgtgtacaag

SEQ ID NO: 5740416 - DNA, 25 bp, Homo sapien
aacaataggaaagagtggaaggcgc

SEQ ID NO: 5740417 - DNA, 25 bp, Homo sapien
tcggaggagaccctgaacatctacc

SEQ ID NO: 5740418 - DNA, 25 bp, Homo sapien
gttcgaccgactgcagaacaatagg

SEQ ID NO: 5740419 - DNA, 25 bp, Homo sapien
tcagctcactgcaacctccacctcc

SEQ ID NO: 5740420 - DNA, 25 bp, Homo sapien
gcaggccgaccgctgcagcctcttc

SEQ ID NO: 5740421 - DNA, 25 bp, Homo sapien
tgccccccgactccgagatcgtctt

SEQ ID NO: 5740422 - DNA, 25 bp, Homo sapien
gcgtgcagccggacagcgtcctgga

SEQ ID NO: 5740423 - DNA, 25 bp, Homo sapien
cggactgcgacagcctccgggacct

SEQ ID NO: 5740424 - DNA, 25 bp, Homo sapien
tacctcaactgcgagcggtactccg

SEQ ID NO: 5740425 - DNA, 25 bp, Homo sapien
acagcgtcctggaggactgcctggt

SEQ ID NO: 5740426 - DNA, 25 bp, Homo sapien
tctcatggagtccctgacacagttc

SEQ ID NO: 5740427 - DNA, 25 bp, Homo sapien
tggtgaacgtcgaggacgtggccga

SEQ ID NO: 5740428 - DNA, 25 bp, Homo sapien
tggaggccttcgccatggtgacagc

SEQ ID NO: 5740429 - DNA, 25 bp, Homo sapien
cctcctgagtagctgggactacagg

SEQ ID NO: 5740430 - DNA, 25 bp, Homo sapien
agatgtactacgagctgggcgtggt

SEQ ID NO: 5740431 - DNA, 25 bp, Homo sapien
aaggcgctggctgatgagtatgagg

SEQ ID NO: 5740432 - DNA, 25 bp, Homo sapien
agtccaagaactaccaggacaagaa

SEQ ID NO: 5740433 - DNA, 25 bp, Homo sapien
aaatgttcaaatttcaggaaggggc

SEQ ID NO: 5740434 - DNA, 25 bp, Homo sapien
tgaccaaggagaaggaattttttga

SEQ ID NO: 5740435 - DNA, 25 bp, Homo sapien
accacatttgacatctacgaattcc

SEQ ID NO: 5740436 - DNA, 25 bp, Homo sapien
ggtcttcaaggtcctgcggcgcctc

SEQ ID NO: 5740437 - DNA, 25 bp, Homo sapien
ccctgaacatctaccagaacctgaa

SEQ ID NO: 5740438 - DNA, 25 bp, Homo sapien
gagccaccacgcccagcctgttttt

SEQ ID NO: 5740439 - DNA, 25 bp, Homo sapien
aagcccaagaaaatgactgaagatc

SEQ ID NO: 5740440 - DNA, 25 bp, Homo sapien
cgctgctggagctggtgcaggatat

SEQ ID NO: 5740441 - DNA, 25 bp, Homo sapien
tctggaccagaaccccgattttgcc

SEQ ID NO: 5740442 - DNA, 25 bp, Homo sapien
actgcgagacgcgccgcggccaggt

SEQ ID NO: 5740443 - DNA, 25 bp, Homo sapien
gaggagatcaaggtcattcccacac

SEQ ID NO: 5740444 - DNA, 25 bp, Homo sapien
tgcgggcctacctcaactgcgagcg

SEQ ID NO: 5740445 - DNA, 25 bp, Homo sapien
gccgaccgctgcagcctcttcatgt

SEQ ID NO: 5740446 - DNA, 25 bp, Homo sapien
ccccccgactccgagatcgtcttcc

SEQ ID NO: 5740447 - DNA, 25 bp, Homo sapien
tgtggccgcggcctgcgaggacggg

SEQ ID NO: 5740448 - DNA, 25 bp, Homo sapien
gtggaggagagcacggcgctgctgg

SEQ ID NO: 5740449 - DNA, 25 bp, Homo sapien
catcgccacggacctggccctgtac

SEQ ID NO: 5740450 - DNA, 25 bp, Homo sapien
cgggcctacctcaactgcgagcggt

SEQ ID NO: 5740451 - DNA, 25 bp, Homo sapien
gtgcagccggacagcgtcctggagg

SEQ ID NO: 5740452 - DNA, 25 bp, Homo sapien
cgtgcctcagcctcctgagtagctg

SEQ ID NO: 5740453 - DNA, 25 bp, Homo sapien
gcccaccacatttgacatctacgaa

SEQ ID NO: 5740454 - DNA, 25 bp, Homo sapien
ggagttctctcgtttccacgaagag

SEQ ID NO: 5740455 - DNA, 25 bp, Homo sapien
cgactacatcctccacggcaaggag

SEQ ID NO: 5740456 - DNA, 25 bp, Homo sapien
tctctgacctggagtgcaccgaact

SEQ ID NO: 5740457 - DNA, 25 bp, Homo sapien
aagaaaatgactgaagatcattctg

SEQ ID NO: 5740458 - DNA, 25 bp, Homo sapien
gcccaagaaaatgactgaagatcat

SEQ ID NO: 5740459 - DNA, 25 bp, Homo sapien
tgaagatctatcacctgagctacct

SEQ ID NO: 5740460 - DNA, 25 bp, Homo sapien
gctacgtggcagaaagcggctttat

SEQ ID NO: 5740461 - DNA, 25 bp, Homo sapien
ctgctgtatcctgtgagcactggtc

SEQ ID NO: 5740462 - DNA, 25 bp, Homo sapien
aaatgactgaagatcattctggata

SEQ ID NO: 5740463 - DNA, 25 bp, Homo sapien
ctgagccctgagaatgtggccgcgg

SEQ ID NO: 5740464 - DNA, 25 bp, Homo sapien
aaggtgacttggaaaggacagtctt

SEQ ID NO: 5740465 - DNA, 25 bp, Homo sapien
atatgctggccacacccatcatgaa

SEQ ID NO: 5740466 - DNA, 25 bp, Homo sapien
catcgaccaccgcggcaccaacaac

SEQ ID NO: 5740467 - DNA, 25 bp, Homo sapien
cacttctctgacctggagtgcaccg

SEQ ID NO: 5740468 - DNA, 25 bp, Homo sapien
aatttcaggaaggggccctggacga

SEQ ID NO: 5740469 - DNA, 25 bp, Homo sapien
ctacacggtgcgggcctacctcaac

SEQ ID NO: 5740470 - DNA, 25 bp, Homo sapien
actggtcccatggggaccctatggc

SEQ ID NO: 5740471 - DNA, 25 bp, Homo sapien
tgtggtcggccaacaaggtgtttga

SEQ ID NO: 5740472 - DNA, 25 bp, Homo sapien
agacgatgttcacgctgctcatgac

SEQ ID NO: 5740473 - DNA, 25 bp, Homo sapien
gaatggcaaagacgtcgtggcggtg

SEQ ID NO: 5740474 - DNA, 25 bp, Homo sapien
ggtgccccccgactccgagatcgtc

SEQ ID NO: 5740475 - DNA, 25 bp, Homo sapien
atcacccgcctcagcttcctgaagt

SEQ ID NO: 5740476 - DNA, 25 bp, Homo sapien
gcagaacaataggaaagagtggaag

SEQ ID NO: 5740477 - DNA, 25 bp, Homo sapien
aggacgagctgggcgaaatcctgaa

SEQ ID NO: 5740478 - DNA, 25 bp, Homo sapien
ctcgattttggagcggcaccacctg

SEQ ID NO: 5740479 - DNA, 25 bp, Homo sapien
tggaccagaaccccgattttgcccg

SEQ ID NO: 5740480 - DNA, 25 bp, Homo sapien
tcatggccatgatgatgacagcctg

SEQ ID NO: 5740481 - DNA, 25 bp, Homo sapien
caaagtgaaggctctggaggagaag

SEQ ID NO: 5740482 - DNA, 25 bp, Homo sapien
agtcttcaacctgctgtatcctgtg

SEQ ID NO: 5740483 - DNA, 25 bp, Homo sapien
tcagtgaggagcaggcccggagctt

SEQ ID NO: 5740484 - DNA, 25 bp, Homo sapien
ccagcacccaagtcttcaacctgct

SEQ ID NO: 5740485 - DNA, 25 bp, Homo sapien
ctgccagggcccaccacatttgaca

SEQ ID NO: 5740486 - DNA, 25 bp, Homo sapien
ggaaggcgctggctgatgagtatga

SEQ ID NO: 5740487 - DNA, 25 bp, Homo sapien
ccgccagcgcaacggcgtggccgag

SEQ ID NO: 5740488 - DNA, 25 bp, Homo sapien
cttggatcagcagcccattcctatg

SEQ ID NO: 5740489 - DNA, 25 bp, Homo sapien
atgagccaccacgcccagcctgttt

SEQ ID NO: 5740490 - DNA, 25 bp, Homo sapien
gcgcaacggcgtggccgagctggcc

SEQ ID NO: 5740491 - DNA, 25 bp, Homo sapien
caaactgaagagctactacacggac

SEQ ID NO: 5740492 - DNA, 25 bp, Homo sapien
cctgggctggtcagtgatgaacacc

SEQ ID NO: 5740493 - DNA, 25 bp, Homo sapien
ccagcctgtttttataaactgaagc

SEQ ID NO: 5740494 - DNA, 25 bp, Homo sapien
acaggacatggtcctttaccacgtg

SEQ ID NO: 5740495 - DNA, 25 bp, Homo sapien
gaattttttgacgtgtggtctgtgc

SEQ ID NO: 5740496 - DNA, 25 bp, Homo sapien
cgcacttctcgtggctgctgagttc

SEQ ID NO: 5740497 - DNA, 25 bp, Homo sapien
aggaggagatcaaggtcattcccac

SEQ ID NO: 5740498 - DNA, 25 bp, Homo sapien
ccagaaccccttggctaagctccac

SEQ ID NO: 5740499 - DNA, 25 bp, Homo sapien
ggtggcagccaagaaaggcacagaa

SEQ ID NO: 5740500 - DNA, 25 bp, Homo sapien
ctgaacatctaccagaacctgaacc

SEQ ID NO: 5740501 - DNA, 25 bp, Homo sapien
agagcgatgtttcagaagatcgtgg

SEQ ID NO: 5740502 - DNA, 25 bp, Homo sapien
agaaggaggagattgtgggagtcgc

SEQ ID NO: 5740503 - DNA, 25 bp, Homo sapien
gtggaaggcgctggctgatgagtat

SEQ ID NO: 5740504 - DNA, 25 bp, Homo sapien
gcgagcggtactccgtgggcctcct

SEQ ID NO: 5740505 - DNA, 25 bp, Homo sapien
aggagcaggcccggagctttctgga

SEQ ID NO: 5740506 - DNA, 25 bp, Homo sapien
agtgcgacagggacgagatccagct

SEQ ID NO: 5740507 - DNA, 25 bp, Homo sapien
agccggacagcgtcctggaggactg

SEQ ID NO: 5740508 - DNA, 25 bp, Homo sapien
gggccctggccagcggccttccaag

SEQ ID NO: 5740509 - DNA, 25 bp, Homo sapien
ggctggtcagtgatgaacaccgaca

SEQ ID NO: 5740510 - DNA, 25 bp, Homo sapien
accaaaaagatggtgaacgtcgagg

SEQ ID NO: 5740511 - DNA, 25 bp, Homo sapien
acgaacaggacgaggttctcatgga

SEQ ID NO: 5740512 - DNA, 25 bp, Homo sapien
tttgaggagctgacggacatcgaga

SEQ ID NO: 5740513 - DNA, 25 bp, Homo sapien
ggaagccctttgacgaacaggacga

SEQ ID NO: 5740514 - DNA, 25 bp, Homo sapien
gccagggcccaccacatttgacatc

SEQ ID NO: 5740515 - DNA, 25 bp, Homo sapien
gggtggctcatcaagaatgtgctgt

SEQ ID NO: 5740516 - DNA, 25 bp, Homo sapien
taggatttgggttctgcctgtggct

SEQ ID NO: 5740517 - DNA, 25 bp, Homo sapien
cgtttccacgaagagatcctgccca

SEQ ID NO: 5740518 - DNA, 25 bp, Homo sapien
catggggaccctatggctccctcaa

SEQ ID NO: 5740519 - DNA, 25 bp, Homo sapien
ctgcgacagcctccgggacctctgc

SEQ ID NO: 5740520 - DNA, 25 bp, Homo sapien
cgattttgcccgccagtactttggg

SEQ ID NO: 5740521 - DNA, 25 bp, Homo sapien
atggcaaagacgtcgtggcggtgat

SEQ ID NO: 5740522 - DNA, 25 bp, Homo sapien
caccagcgaagacgaagatgtgttc

SEQ ID NO: 5740523 - DNA, 25 bp, Homo sapien
ggccttccaagctacgtggcagaaa

SEQ ID NO: 5740524 - DNA, 25 bp, Homo sapien
gacctctgccaggtggaggagagca

SEQ ID NO: 5740525 - DNA, 25 bp, Homo sapien
tcgtgggccacgtggctcagaccaa

SEQ ID NO: 5740526 - DNA, 25 bp, Homo sapien
caggaggtcctggtgcggttcctgt

SEQ ID NO: 5740527 - DNA, 25 bp, Homo sapien
gtactttgggaagaaactgagccct

SEQ ID NO: 5740528 - DNA, 25 bp, Homo sapien
cggcaccaacaacctgtaccagatg

SEQ ID NO: 5740529 - DNA, 25 bp, Homo sapien
tgctgactgcgatgaggacgagctg

SEQ ID NO: 5740530 - DNA, 25 bp, Homo sapien
tcctgcaggccgaccgctgcagcct

SEQ ID NO: 5740531 - DNA, 25 bp, Homo sapien
ccacggcaaggaggagatcaaggtc

SEQ ID NO: 5740532 - DNA, 25 bp, Homo sapien
ataggaaagagtggaaggcgctggc

SEQ ID NO: 5740533 - DNA, 25 bp, Homo sapien
aaccccttggctaagctccacggct

SEQ ID NO: 5740534 - DNA, 25 bp, Homo sapien
cggcccagcacccaagtcttcaacc

SEQ ID NO: 5740535 - DNA, 25 bp, Homo sapien
aagacgaagatgtgttcttgaagta

SEQ ID NO: 5740536 - DNA, 25 bp, Homo sapien
ggacaagaagagctgggtggagtac

SEQ ID NO: 5740537 - DNA, 25 bp, Homo sapien
gtcttggatcagcagcccattccta

SEQ ID NO: 5740538 - DNA, 25 bp, Homo sapien
ctatggctccctcaatcttcaccca

SEQ ID NO: 5740539 - DNA, 25 bp, Homo sapien
tgacctcaggtgatcacccgcctca

SEQ ID NO: 5740540 - DNA, 25 bp, Homo sapien
gcttttcagcgtgcagccggacagc

SEQ ID NO: 5740541 - DNA, 25 bp, Homo sapien
gcacgatcacgtgatccacctgatg

SEQ ID NO: 5740542 - DNA, 25 bp, Homo sapien
ctcctggacatgaccaaggagaagg

SEQ ID NO: 5740543 - DNA, 25 bp, Homo sapien
cggagaatcacctaccacaactggc

SEQ ID NO: 5740544 - DNA, 25 bp, Homo sapien
acggcgctgctggagctggtgcagg

SEQ ID NO: 5740545 - DNA, 25 bp, Homo sapien
tgaggccaaagtgaaggctctggag

SEQ ID NO: 5740546 - DNA, 25 bp, Homo sapien
gtgggccacgtggctcagaccaaaa

SEQ ID NO: 5740547 - DNA, 25 bp, Homo sapien
aggaggaggaggagagggtggcagc

SEQ ID NO: 5740548 - DNA, 25 bp, Homo sapien
tggagcagcagcgtctccagggaca

SEQ ID NO: 5740549 - DNA, 25 bp, Homo sapien
gggtgcccgccggactgcgacagcc

SEQ ID NO: 5740550 - DNA, 25 bp, Homo sapien
ccgactgcagaacaataggaaagag

SEQ ID NO: 5740551 - DNA, 25 bp, Homo sapien
gatggaccggaacaaggcggccgag

SEQ ID NO: 5740552 - DNA, 25 bp, Homo sapien
atgttcgaccgactgcagaacaata

SEQ ID NO: 5740553 - DNA, 25 bp, Homo sapien
tggctatttgctacaagaggttagg

SEQ ID NO: 5740554 - DNA, 25 bp, Homo sapien
gatcctgcccatgttcgaccgactg

SEQ ID NO: 5740555 - DNA, 25 bp, Homo sapien
tgggaagaaactgagccctgagaat

SEQ ID NO: 5740556 - DNA, 25 bp, Homo sapien
aggcagccaccatgagcctcagtga

SEQ ID NO: 5740557 - DNA, 25 bp, Homo sapien
agggacaggcagccaccatgagcct

SEQ ID NO: 5740558 - DNA, 25 bp, Homo sapien
aagggtaccggagaatcacctacca

SEQ ID NO: 5740559 - DNA, 25 bp, Homo sapien
tcctccacggcaaggaggagatcaa

SEQ ID NO: 5740560 - DNA, 25 bp, Homo sapien
tgagtccaagaactaccaggacaag

SEQ ID NO: 5740561 - DNA, 25 bp, Homo sapien
gccggactgcgacagcctccgggac

SEQ ID NO: 5740562 - DNA, 25 bp, Homo sapien
tatcacctgagctacctccacaact

SEQ ID NO: 5740563 - DNA, 25 bp, Homo sapien
tgggctggtcagtgatgaacaccga

SEQ ID NO: 5740564 - DNA, 25 bp, Homo sapien
ctgtgaataaactgtagcctacaaa

SEQ ID NO: 5740565 - DNA, 25 bp, Homo sapien
ggagtttgggaagttcctgctctcg

SEQ ID NO: 5740566 - DNA, 25 bp, Homo sapien
gccgcggcctgcgaggacgggtgcc

SEQ ID NO: 5740567 - DNA, 25 bp, Homo sapien
cgggaagccctttgacgaacaggac

SEQ ID NO: 5740568 - DNA, 25 bp, Homo sapien
ggctaagctccacggctcctcgatt

SEQ ID NO: 5740569 - DNA, 25 bp, Homo sapien
tgctgacgagctcactgactacaag

SEQ ID NO: 5740570 - DNA, 25 bp, Homo sapien
agatcgtcatggccatgatgatgac

SEQ ID NO: 5740571 - DNA, 25 bp, Homo sapien
tgacagccggcctgtgccatgacat

SEQ ID NO: 5740572 - DNA, 25 bp, Homo sapien
accagaacctgaaccggcggcagca

SEQ ID NO: 5740573 - DNA, 25 bp, Homo sapien
ccctatggctccctcaatcttcacc

SEQ ID NO: 5740574 - DNA, 25 bp, Homo sapien
tcacctgagctacctccacaactgc

SEQ ID NO: 5740575 - DNA, 25 bp, Homo sapien
tttttttttttgagatggagtcttg

SEQ ID NO: 5740576 - DNA, 25 bp, Homo sapien
agagtcccagccgtactcgggccca

SEQ ID NO: 5740577 - DNA, 25 bp, Homo sapien
tccaagaactaccaggacaagaaga

SEQ ID NO: 5740578 - DNA, 25 bp, Homo sapien
catcgcacaggacatggtcctttac

SEQ ID NO: 5740579 - DNA, 25 bp, Homo sapien
agatgaacaagctggagaaccgcaa

SEQ ID NO: 5740580 - DNA, 25 bp, Homo sapien
gattacaggcatgagccaccacgcc

SEQ ID NO: 5740581 - DNA, 25 bp, Homo sapien
tcaacggcccattcttcaccagcga

SEQ ID NO: 5740582 - DNA, 25 bp, Homo sapien
tctgtcacccaggctggagtgccgt

SEQ ID NO: 5740583 - DNA, 25 bp, Homo sapien
ttccagatcccccaggaggtcctgg

SEQ ID NO: 5740584 - DNA, 25 bp, Homo sapien
gaacaagctggagaaccgcaaggac

SEQ ID NO: 5740585 - DNA, 25 bp, Homo sapien
gcagcagcgtctccagggacaggca

SEQ ID NO: 5740586 - DNA, 25 bp, Homo sapien
agcgtcctggaggactgcctggtgc

SEQ ID NO: 5740587 - DNA, 25 bp, Homo sapien
gccctttgacgaacaggacgaggtt

SEQ ID NO: 5740588 - DNA, 25 bp, Homo sapien
ggcttcaacgtggcccagacgatgt

SEQ ID NO: 5740589 - DNA, 25 bp, Homo sapien
cagaacctgaaccggcggcagcacg

SEQ ID NO: 5740590 - DNA, 25 bp, Homo sapien
cgaagagatcctgcccatgttcgac

SEQ ID NO: 5740591 - DNA, 25 bp, Homo sapien
accggcggcagcacgatcacgtgat

SEQ ID NO: 5740592 - DNA, 25 bp, Homo sapien
tctcggaggagaccctgaacatcta

SEQ ID NO: 5740593 - DNA, 25 bp, Homo sapien
gggaccctatggctccctcaatctt

SEQ ID NO: 5740594 - DNA, 25 bp, Homo sapien
cacggacctggaggccttcgccatg

SEQ ID NO: 5740595 - DNA, 25 bp, Homo sapien
gcttcatcgacttcgtgtgcacatt

SEQ ID NO: 5740596 - DNA, 25 bp, Homo sapien
aggagattgtgggagtcgccacatt

SEQ ID NO: 5740597 - DNA, 25 bp, Homo sapien
ccctcagccgatcactgggccctgg

SEQ ID NO: 5740598 - DNA, 25 bp, Homo sapien
ctacaaagtgatcgactacatcctc

SEQ ID NO: 5740599 - DNA, 25 bp, Homo sapien
cctgagaatgtggccgcggcctgcg

SEQ ID NO: 5740600 - DNA, 25 bp, Homo sapien
agccggcctgtgccatgacatcgac

SEQ ID NO: 5740601 - DNA, 25 bp, Homo sapien
ccacattttacaacaggaaagacgg

SEQ ID NO: 5740602 - DNA, 25 bp, Homo sapien
gagctggccaccaggcttttcagcg

SEQ ID NO: 5740603 - DNA, 25 bp, Homo sapien
cgccatcatcgccacggacctggcc

SEQ ID NO: 5740604 - DNA, 25 bp, Homo sapien
ttcaaggtcctgcggcgcctctgca

SEQ ID NO: 5740605 - DNA, 25 bp, Homo sapien
catcaacatggagcgcgtggtcttc

SEQ ID NO: 5740606 - DNA, 25 bp, Homo sapien
ccaccgcggcaccaacaacctgtac

SEQ ID NO: 5740607 - DNA, 25 bp, Homo sapien
ttgctctgtcacccaggctggagtg

SEQ ID NO: 5740608 - DNA, 25 bp, Homo sapien
tttttgagatggagtcttgctctgt

SEQ ID NO: 5740609 - DNA, 25 bp, Homo sapien
gccctgagaatgtggccgcggcctg

SEQ ID NO: 5740610 - DNA, 25 bp, Homo sapien
ggagctgccagggcccaccacattt

SEQ ID NO: 5740611 - DNA, 25 bp, Homo sapien
ccacgcccagcctgtttttataaac

SEQ ID NO: 5740612 - DNA, 25 bp, Homo sapien
gaaggaggagctgccagggcccacc

SEQ ID NO: 5740613 - DNA, 25 bp, Homo sapien
cgaggacgtggccgagtgccctcac

SEQ ID NO: 5740614 - DNA, 25 bp, Homo sapien
ctgacgaaatgttcaaatttcagga

SEQ ID NO: 5740615 - DNA, 25 bp, Homo sapien
ccttccaagctacgtggcagaaagc

SEQ ID NO: 5740616 - DNA, 25 bp, Homo sapien
gtctcgaactcctgacctcaggtga

SEQ ID NO: 5740617 - DNA, 25 bp, Homo sapien
cctggagacgacccggaaggagatc

SEQ ID NO: 5740618 - DNA, 25 bp, Homo sapien
tgtgctgatgggagagtcccagccg

SEQ ID NO: 5740619 - DNA, 25 bp, Homo sapien
ggaagcccaagaaaatgactgaaga

SEQ ID NO: 5740620 - DNA, 25 bp, Homo sapien
tcctatgatggaccggaacaaggcg

SEQ ID NO: 5740621 - DNA, 25 bp, Homo sapien
agctttctggaccagaaccccgatt

SEQ ID NO: 5740622 - DNA, 25 bp, Homo sapien
aagaaaggcacagaaatttgcaatg

SEQ ID NO: 5740623 - DNA, 25 bp, Homo sapien
agcggctttatttgtaacatcatga

SEQ ID NO: 5740624 - DNA, 25 bp, Homo sapien
ctgcaacctccacctcccaggttca

SEQ ID NO: 5740625 - DNA, 25 bp, Homo sapien
ggcaaagacgtcgtggcggtgatca

SEQ ID NO: 5740626 - DNA, 25 bp, Homo sapien
ggtgacagccggcctgtgccatgac

SEQ ID NO: 5740627 - DNA, 25 bp, Homo sapien
ccaagaaaatgactgaagatcattc

SEQ ID NO: 5740628 - DNA, 25 bp, Homo sapien
atcagcaaagggtaccggagaatca

SEQ ID NO: 5740629 - DNA, 25 bp, Homo sapien
tgcaggagagcatcaacatggagcg

SEQ ID NO: 5740630 - DNA, 25 bp, Homo sapien
cgatcactgggccctggccagcggc

SEQ ID NO: 5740631 - DNA, 25 bp, Homo sapien
gaggccttcgccatggtgacagccg

SEQ ID NO: 5740632 - DNA, 25 bp, Homo sapien
tccacctgatggacatcgccatcat

SEQ ID NO: 5740633 - DNA, 25 bp, Homo sapien
cgtggcacgatctcagctcactgca

SEQ ID NO: 5740634 - DNA, 25 bp, Homo sapien
tggccaccaggcttttcagcgtgca

SEQ ID NO: 5740635 - DNA, 25 bp, Homo sapien
acaaggagttctctcgtttccacga

SEQ ID NO: 5740636 - DNA, 25 bp, Homo sapien
aaggagttctctcgtttccacgaag

SEQ ID NO: 5740637 - DNA, 25 bp, Homo sapien
attcttcaccagcgaagacgaagat

SEQ ID NO: 5740638 - DNA, 25 bp, Homo sapien
tgtggctatttgctacaagaggtta

SEQ ID NO: 5740639 - DNA, 25 bp, Homo sapien
cctgaagatctatcacctgagctac

SEQ ID NO: 5740640 - DNA, 25 bp, Homo sapien
gacctggccctgtacttcaagaaga

SEQ ID NO: 5740641 - DNA, 25 bp, Homo sapien
gatgaggacgagctgggcgaaatcc

SEQ ID NO: 5740642 - DNA, 25 bp, Homo sapien
tactccgtgggcctcctggacatga

SEQ ID NO: 5740643 - DNA, 25 bp, Homo sapien
gagcacggcgctgctggagctggtg

SEQ ID NO: 5740644 - DNA, 25 bp, Homo sapien
gacctgtctgccatcaccaagccct

SEQ ID NO: 5740645 - DNA, 25 bp, Homo sapien
gatccacctgatggacatcgccatc

SEQ ID NO: 5740646 - DNA, 25 bp, Homo sapien
cctgtctgccatcaccaagccctgg

SEQ ID NO: 5740647 - DNA, 25 bp, Homo sapien
ttttacaacaggaaagacgggaagc

SEQ ID NO: 5740648 - DNA, 25 bp, Homo sapien
ccacgcacgcctgatggccgggaaa

SEQ ID NO: 5740649 - DNA, 25 bp, Homo sapien
ggacgggtgcccgccggactgcgac

SEQ ID NO: 5740650 - DNA, 25 bp, Homo sapien
ccatgttcgaccgactgcagaacaa

SEQ ID NO: 5740651 - DNA, 25 bp, Homo sapien
acctgaaccggcggcagcacgatca

SEQ ID NO: 5740652 - DNA, 25 bp, Homo sapien
gaccggaacaaggcggccgagctcc

SEQ ID NO: 5740653 - DNA, 25 bp, Homo sapien
ccagatgaagtcccagaaccccttg

SEQ ID NO: 5740654 - DNA, 25 bp, Homo sapien
gaacaccgacacctacgacaagatg

SEQ ID NO: 5740655 - DNA, 25 bp, Homo sapien
gattgtgggagtcgccacattttac

SEQ ID NO: 5740656 - DNA, 25 bp, Homo sapien
atctacgaattccacttctctgacc

SEQ ID NO: 5740657 - DNA, 25 bp, Homo sapien
ggtgacttggaaaggacagtcttgg

SEQ ID NO: 5740658 - DNA, 25 bp, Homo sapien
tgtcacccaggctggagtgccgtgg

SEQ ID NO: 5740659 - DNA, 25 bp, Homo sapien
aactgaagagctactacacggacct

SEQ ID NO: 5740660 - DNA, 25 bp, Homo sapien
tggagaaccgcaaggacatcgcaca

SEQ ID NO: 5740661 - DNA, 25 bp, Homo sapien
gaattttgccacgttgtacctgaag

SEQ ID NO: 5740662 - DNA, 25 bp, Homo sapien
acgcctgatggccgggaaattgtct

SEQ ID NO: 5740663 - DNA, 25 bp, Homo sapien
tgtcttctacaaagtgatcgactac

SEQ ID NO: 5740664 - DNA, 25 bp, Homo sapien
tggagctggtgcaggatatgcagga

SEQ ID NO: 5740665 - DNA, 25 bp, Homo sapien
agaaagcggctttatttgtaacatc

SEQ ID NO: 5740666 - DNA, 25 bp, Homo sapien
cgtggcagaaagcggctttatttgt

SEQ ID NO: 5740667 - DNA, 25 bp, Homo sapien
cacccatcatgaatggcaaagacgt

SEQ ID NO: 5740668 - DNA, 25 bp, Homo sapien
tacctgtccctggagacgacccgga

SEQ ID NO: 5740669 - DNA, 25 bp, Homo sapien
atggagtcttgctctgtcacccagg

SEQ ID NO: 5740670 - DNA, 25 bp, Homo sapien
tcgtgtacaaggagttctctcgttt

SEQ ID NO: 5740671 - DNA, 25 bp, Homo sapien
agatcgtggatgagtccaagaacta

SEQ ID NO: 5740672 - DNA, 25 bp, Homo sapien
agttcctgggctggtcagtgatgaa

SEQ ID NO: 5740673 - DNA, 25 bp, Homo sapien
agacgcgccgcggccaggtgctgct

SEQ ID NO: 5740674 - DNA, 25 bp, Homo sapien
acgtgaagtgcgacagggacgagat

SEQ ID NO: 5740675 - DNA, 25 bp, Homo sapien
gaagtcccagaaccccttggctaag

SEQ ID NO: 5740676 - DNA, 25 bp, Homo sapien
actggacatcggggtcgtgggccac

SEQ ID NO: 5740677 - DNA, 25 bp, Homo sapien
cctgtaccagatgaagtcccagaac

SEQ ID NO: 5740678 - DNA, 25 bp, Homo sapien
aagttcctgctctcggaggagaccc

SEQ ID NO: 5740679 - DNA, 25 bp, Homo sapien
aagatctatcacctgagctacctcc

SEQ ID NO: 5740680 - DNA, 25 bp, Homo sapien
ggtctgtgctgatgggagagtccca

SEQ ID NO: 5740681 - DNA, 25 bp, Homo sapien
gaccagaaccccgattttgcccgcc

SEQ ID NO: 5740682 - DNA, 25 bp, Homo sapien
cgcggcaccaacaacctgtaccaga

SEQ ID NO: 5740683 - DNA, 25 bp, Homo sapien
acctgagctacctccacaactgcga

SEQ ID NO: 5740684 - DNA, 25 bp, Homo sapien
ccagacgatgttcacgctgctcatg

SEQ ID NO: 5740685 - DNA, 25 bp, Homo sapien
tcacccactaggatttgggttctgc

SEQ ID NO: 5740686 - DNA, 25 bp, Homo sapien
ctgaattttgccacgttgtacctga

SEQ ID NO: 5740687 - DNA, 25 bp, Homo sapien
caaagaatatgctggccacacccat

SEQ ID NO: 5740688 - DNA, 25 bp, Homo sapien
gacatcgcacaggacatggtccttt

SEQ ID NO: 5740689 - DNA, 25 bp, Homo sapien
aggaaagagtggaaggcgctggctg

SEQ ID NO: 5740690 - DNA, 25 bp, Homo sapien
gaacctgaaccggcggcagcacgat

SEQ ID NO: 5740691 - DNA, 25 bp, Homo sapien
tgatggacatcgccatcatcgccac

SEQ ID NO: 5740692 - DNA, 25 bp, Homo sapien
ctgcaggccgaccgctgcagcctct

SEQ ID NO: 5740693 - DNA, 25 bp, Homo sapien
gggactacaggcgcccaccaccaca

SEQ ID NO: 5740694 - DNA, 25 bp, Homo sapien
ctccgggacctctgccaggtggagg

SEQ ID NO: 5740695 - DNA, 25 bp, Homo sapien
atcctgccaaccagagcgcgcctgg

SEQ ID NO: 5740696 - DNA, 25 bp, Homo sapien
cggtgatcatggcagtgaacaagct

SEQ ID NO: 5740697 - DNA, 25 bp, Homo sapien
gttgtacctgaagatctatcacctg

SEQ ID NO: 5740698 - DNA, 25 bp, Homo sapien
accgacacctacgacaagatgaaca

SEQ ID NO: 5740699 - DNA, 25 bp, Homo sapien
cggacctggccctgtacttcaagaa

SEQ ID NO: 5740700 - DNA, 25 bp, Homo sapien
cccaggaggtcctggtgcggttcct

SEQ ID NO: 5740701 - DNA, 25 bp, Homo sapien
aacggcccattcttcaccagcgaag

SEQ ID NO: 5740702 - DNA, 25 bp, Homo sapien
tggagcgcgtggtcttcaaggtcct

SEQ ID NO: 5740703 - DNA, 25 bp, Homo sapien
cctggacatgaccaaggagaaggaa

SEQ ID NO: 5740704 - DNA, 25 bp, Homo sapien
tggtcccatggggaccctatggctc

SEQ ID NO: 5740705 - DNA, 25 bp, Homo sapien
acacggtgcgggcctacctcaactg

SEQ ID NO: 5740706 - DNA, 25 bp, Homo sapien
gcggcagcacgatcacgtgatccac

SEQ ID NO: 5740707 - DNA, 25 bp, Homo sapien
cttcagctcatttgctgacgagctc

SEQ ID NO: 5740708 - DNA, 25 bp, Homo sapien
gagtagctgggactacaggcgccca

SEQ ID NO: 5740709 - DNA, 25 bp, Homo sapien
gttctgcctgtggctatttgctaca

SEQ ID NO: 5740710 - DNA, 25 bp, Homo sapien
cagcgcaacggcgtggccgagctgg

SEQ ID NO: 5740711 - DNA, 25 bp, Homo sapien
catttgacatctacgaattccactt

SEQ ID NO: 5740712 - DNA, 25 bp, Homo sapien
gcgattctcgtgcctcagcctcctg

SEQ ID NO: 5740713 - DNA, 25 bp, Homo sapien
tggcccagacgatgttcacgctgct

SEQ ID NO: 5740714 - DNA, 25 bp, Homo sapien
atcgccatcatcgccacggacctgg

SEQ ID NO: 5740715 - DNA, 25 bp, Homo sapien
acattttacaacaggaaagacggga

SEQ ID NO: 5740716 - DNA, 25 bp, Homo sapien
ccctggacgactccgggtggctcat

SEQ ID NO: 5740717 - DNA, 25 bp, Homo sapien
tcccaggttcaagcgattctcgtgc

SEQ ID NO: 5740718 - DNA, 25 bp, Homo sapien
gccacgtggctcagaccaaaaagat

SEQ ID NO: 5740719 - DNA, 25 bp, Homo sapien
gacgaggttctcatggagtccctga

SEQ ID NO: 5740720 - DNA, 25 bp, Homo sapien
gcggtactccgtgggcctcctggac

SEQ ID NO: 5740721 - DNA, 25 bp, Homo sapien
gtgagcactggtcccatggggaccc

SEQ ID NO: 5740722 - DNA, 25 bp, Homo sapien
ccatcagcaaagggtaccggagaat

SEQ ID NO: 5740723 - DNA, 25 bp, Homo sapien
ggcagtgaacaagctcaacggccca

SEQ ID NO: 5740724 - DNA, 25 bp, Homo sapien
atggacatcgccatcatcgccacgg

SEQ ID NO: 5740725 - DNA, 25 bp, Homo sapien
tgtttgaggagctgacggacatcga

SEQ ID NO: 5740726 - DNA, 25 bp, Homo sapien
ccaagctacgtggcagaaagcggct

SEQ ID NO: 5740727 - DNA, 25 bp, Homo sapien
ttcagaagatcgtggatgagtccaa

SEQ ID NO: 5740728 - DNA, 25 bp, Homo sapien
tccacttctctgacctggagtgcac

SEQ ID NO: 5740729 - DNA, 25 bp, Homo sapien
atttgggttctgcctgtggctattt

SEQ ID NO: 5740730 - DNA, 25 bp, Homo sapien
gctggagaaccgcaaggacatcgca

SEQ ID NO: 5740731 - DNA, 25 bp, Homo sapien
gtcgccacattttacaacaggaaag

SEQ ID NO: 5740732 - DNA, 25 bp, Homo sapien
gtgaacgtcgaggacgtggccgagt

SEQ ID NO: 5740733 - DNA, 25 bp, Homo sapien
ccagatcccccaggaggtcctggtg

SEQ ID NO: 5740734 - DNA, 25 bp, Homo sapien
gagctggtgcaggatatgcaggaga

SEQ ID NO: 5740735 - DNA, 25 bp, Homo sapien
tgcccgccagtactttgggaagaaa

SEQ ID NO: 5740736 - DNA, 25 bp, Homo sapien
cattcccacaccctcagccgatcac

SEQ ID NO: 5740737 - DNA, 25 bp, Homo sapien
tcagcctcctgagtagctgggacta

SEQ ID NO: 5740738 - DNA, 25 bp, Homo sapien
gcctggtgccccccgactccgagat

SEQ ID NO: 5740739 - DNA, 25 bp, Homo sapien
gcggccttccaagctacgtggcaga

SEQ ID NO: 5740740 - DNA, 25 bp, Homo sapien
atgtactacgagctgggcgtggtcc

SEQ ID NO: 5740741 - DNA, 25 bp, Homo sapien
ccctcacttcagctcatttgctgac

SEQ ID NO: 5740742 - DNA, 25 bp, Homo sapien
tcaactgcgagcggtactccgtggg

SEQ ID NO: 5740743 - DNA, 25 bp, Homo sapien
agcctcagtgaggagcaggcccgga

SEQ ID NO: 5740744 - DNA, 25 bp, Homo sapien
tcgccacggacctggccctgtactt

SEQ ID NO: 5740745 - DNA, 25 bp, Homo sapien
gccaacaaggtgtttgaggagctga

SEQ ID NO: 5740746 - DNA, 25 bp, Homo sapien
cctggccctgtacttcaagaagaga

SEQ ID NO: 5740747 - DNA, 25 bp, Homo sapien
tggaccggaacaaggcggccgagct

SEQ ID NO: 5740748 - DNA, 25 bp, Homo sapien
ctcactgactacaagacaaagaata

SEQ ID NO: 5740749 - DNA, 25 bp, Homo sapien
tttgacgtgtggtctgtgctgatgg

SEQ ID NO: 5740750 - DNA, 25 bp, Homo sapien
tccacggctcctcgattttggagcg

SEQ ID NO: 5740751 - DNA, 25 bp, Homo sapien
caactgcgagacgcgccgcggccag

SEQ ID NO: 5740752 - DNA, 25 bp, Homo sapien
aactggcgccacggcttcaacgtgg

SEQ ID NO: 5740753 - DNA, 25 bp, Homo sapien
aactcctgacctcaggtgatcaccc

SEQ ID NO: 5740754 - DNA, 25 bp, Homo sapien
aggagctgacggacatcgagaggca

SEQ ID NO: 5740755 - DNA, 25 bp, Homo sapien
cacctcccaggttcaagcgattctc

SEQ ID NO: 5740756 - DNA, 25 bp, Homo sapien
cctgtggctatttgctacaagaggt

SEQ ID NO: 5740757 - DNA, 25 bp, Homo sapien
tcagtgatgaacaccgacacctacg

SEQ ID NO: 5740758 - DNA, 25 bp, Homo sapien
cacgaagagatcctgcccatgttcg

SEQ ID NO: 5740759 - DNA, 25 bp, Homo sapien
tatgcaggagagcatcaacatggag

SEQ ID NO: 5740760 - DNA, 25 bp, Homo sapien
aagagatcctgcccatgttcgaccg

SEQ ID NO: 5740761 - DNA, 25 bp, Homo sapien
tcacccaggctggagtgccgtggca

SEQ ID NO: 5740762 - DNA, 25 bp, Homo sapien
ttggctaagctccacggctcctcga

SEQ ID NO: 5740763 - DNA, 25 bp, Homo sapien
gaattccacttctctgacctggagt

SEQ ID NO: 5740764 - DNA, 25 bp, Homo sapien
tggtcggccaacaaggtgtttgagg

SEQ ID NO: 5740765 - DNA, 25 bp, Homo sapien
tcttcaaggtcctgcggcgcctctg

SEQ ID NO: 5740766 - DNA, 25 bp, Homo sapien
aacctccacctcccaggttcaagcg

SEQ ID NO: 5740767 - DNA, 25 bp, Homo sapien
ccacaaggccttctacacggtgcgg

SEQ ID NO: 5740768 - DNA, 25 bp, Homo sapien
taacatcatgaatgcttccgctgac

SEQ ID NO: 5740769 - DNA, 25 bp, Homo sapien
cctgccaaccagagcgcgcctgggg

SEQ ID NO: 5740770 - DNA, 25 bp, Homo sapien
cggcgcctctgcaccctcctgcagg

SEQ ID NO: 5740771 - DNA, 25 bp, Homo sapien
tcagaccaaaaagatggtgaacgtc

SEQ ID NO: 5740772 - DNA, 25 bp, Homo sapien
ccagaaccccgattttgcccgccag

SEQ ID NO: 5740773 - DNA, 25 bp, Homo sapien
cacagaaatttgcaatggcggccca

SEQ ID NO: 5740774 - DNA, 25 bp, Homo sapien
tggagcggcaccacctggagtttgg

SEQ ID NO: 5740775 - DNA, 25 bp, Homo sapien
gccgggaaattgtcttctacaaagt

SEQ ID NO: 5740776 - DNA, 25 bp, Homo sapien
tgcggcgcctctgcaccctcctgca

SEQ ID NO: 5740777 - DNA, 25 bp, Homo sapien
tcctgcccatgttcgaccgactgca

SEQ ID NO: 5740778 - DNA, 25 bp, Homo sapien
atgttcaaatttcaggaaggggccc

SEQ ID NO: 5740779 - DNA, 25 bp, Homo sapien
agcttcctgaagtgctgggattaca

SEQ ID NO: 5740780 - DNA, 25 bp, Homo sapien
gagcgcgcctggggaaggagcctgc

SEQ ID NO: 5740781 - DNA, 25 bp, Homo sapien
ccatcaccaagccctgggaagtcca

SEQ ID NO: 5740782 - DNA, 25 bp, Homo sapien
gctggccacacccatcatgaatggc

SEQ ID NO: 5740783 - DNA, 25 bp, Homo sapien
cctgttctccatcagcaaagggtac

SEQ ID NO: 5740784 - DNA, 25 bp, Homo sapien
ccagagcaaggtcgcacttctcgtg

SEQ ID NO: 5740785 - DNA, 25 bp, Homo sapien
gaagtgctgggattacaggcatgag

SEQ ID NO: 5740786 - DNA, 25 bp, Homo sapien
cctgtttttataaactgaagccaac

SEQ ID NO: 5740787 - DNA, 25 bp, Homo sapien
ggacatcgagaggcagttccacaag

SEQ ID NO: 5740788 - DNA, 25 bp, Homo sapien
ctgaagagctactacacggacctgg

SEQ ID NO: 5740789 - DNA, 25 bp, Homo sapien
acattcgtgtacaaggagttctctc

SEQ ID NO: 5740790 - DNA, 25 bp, Homo sapien
cgctgacgaaatgttcaaatttcag

SEQ ID NO: 5740791 - DNA, 25 bp, Homo sapien
tccgctgacgaaatgttcaaatttc

SEQ ID NO: 5740792 - DNA, 25 bp, Homo sapien
tcctggaggactgcctggtgccccc

SEQ ID NO: 5740793 - DNA, 25 bp, Homo sapien
gttctcatggagtccctgacacagt

SEQ ID NO: 5740794 - DNA, 25 bp, Homo sapien
ccgggtggctcatcaagaatgtgct

SEQ ID NO: 5740795 - DNA, 25 bp, Homo sapien
aggaggagctgccagggcccaccac

SEQ ID NO: 5740796 - DNA, 25 bp, Homo sapien
actacgagctgggcgtggtccgaaa

SEQ ID NO: 5740797 - DNA, 25 bp, Homo sapien
aaggaggagattgtgggagtcgcca

SEQ ID NO: 5740798 - DNA, 25 bp, Homo sapien
tcctgaagtgctgggattacaggca

SEQ ID NO: 5740799 - DNA, 25 bp, Homo sapien
gggacctctgccaggtggaggagag

SEQ ID NO: 5740800 - DNA, 25 bp, Homo sapien
aagacgggaagccctttgacgaaca

SEQ ID NO: 5740801 - DNA, 25 bp, Homo sapien
gagtcgccacattttacaacaggaa

SEQ ID NO: 5740802 - DNA, 25 bp, Homo sapien
aggagagcacggcgctgctggagct

SEQ ID NO: 5740803 - DNA, 25 bp, Homo sapien
tcgggcccacgcacgcctgatggcc

SEQ ID NO: 5740804 - DNA, 25 bp, Homo sapien
tcagcagcccattcctatgatggac

SEQ ID NO: 5740805 - DNA, 25 bp, Homo sapien
agggtggcagccaagaaaggcacag

SEQ ID NO: 5740806 - DNA, 25 bp, Homo sapien
cgaccgctgcagcctcttcatgtac

SEQ ID NO: 5740807 - DNA, 25 bp, Homo sapien
tatcctgtgagcactggtcccatgg

SEQ ID NO: 5740808 - DNA, 25 bp, Homo sapien
tggatgagtccaagaactaccagga

SEQ ID NO: 5740809 - DNA, 25 bp, Homo sapien
cctgacacagttcctgggctggtca

SEQ ID NO: 5740810 - DNA, 25 bp, Homo sapien
acaaggtgtttgaggagctgacgga

SEQ ID NO: 5740811 - DNA, 25 bp, Homo sapien
attttgccacgttgtacctgaagat

SEQ ID NO: 5740812 - DNA, 25 bp, Homo sapien
ttctcgtgcctcagcctcctgagta

SEQ ID NO: 5740813 - DNA, 25 bp, Homo sapien
gcccagacgatgttcacgctgctca

SEQ ID NO: 5740814 - DNA, 25 bp, Homo sapien
gctctcggaggagaccctgaacatc

SEQ ID NO: 5740815 - DNA, 25 bp, Homo sapien
aactgcgagcggtactccgtgggcc

SEQ ID NO: 5740816 - DNA, 25 bp, Homo sapien
gcctccgggacctctgccaggtgga

SEQ ID NO: 5740817 - DNA, 25 bp, Homo sapien
acgaattccacttctctgacctgga

SEQ ID NO: 5740818 - DNA, 25 bp, Homo sapien
ctcctgacctcaggtgatcacccgc

SEQ ID NO: 5740819 - DNA, 25 bp, Homo sapien
gggcctcctggacatgaccaaggag

SEQ ID NO: 5740820 - DNA, 25 bp, Homo sapien
tggccgagtgccctcacttcagctc

SEQ ID NO: 5740821 - DNA, 25 bp, Homo sapien
atcattctggatattttaatttttt

SEQ ID NO: 5740822 - DNA, 25 bp, Homo sapien
gaaactgagccctgagaatgtggcc

SEQ ID NO: 5740823 - DNA, 25 bp, Homo sapien
agatcaaggtcattcccacaccctc

SEQ ID NO: 5740824 - DNA, 25 bp, Homo sapien
ccggcaaactgaagagctactacac

SEQ ID NO: 5740825 - DNA, 25 bp, Homo sapien
tgccctcacttcagctcatttgctg

SEQ ID NO: 5740826 - DNA, 25 bp, Homo sapien
cttcccactggacatcggggtcgtg

SEQ ID NO: 5740827 - DNA, 25 bp, Homo sapien
acgactccgggtggctcatcaagaa

SEQ ID NO: 5740828 - DNA, 25 bp, Homo sapien
aggcggccgagctccccaagctgca

SEQ ID NO: 5740829 - DNA, 25 bp, Homo sapien
tctatcacctgagctacctccacaa

SEQ ID NO: 5740830 - DNA, 25 bp, Homo sapien
cagtgaacaagctcaacggcccatt

SEQ ID NO: 5740831 - DNA, 25 bp, Homo sapien
aactgaagccaactgtgaataaact

SEQ ID NO: 5740832 - DNA, 25 bp, Homo sapien
caacaacctgtaccagatgaagtcc

SEQ ID NO: 5740833 - DNA, 25 bp, Homo sapien
tgcttccgctgacgaaatgttcaaa

SEQ ID NO: 5740834 - DNA, 25 bp, Homo sapien
ccacctggagtttgggaagttcctg

SEQ ID NO: 5740835 - DNA, 25 bp, Homo sapien
tggggaccctatggctccctcaatc

SEQ ID NO: 5740836 - DNA, 25 bp, Homo sapien
tcaacatggagcgcgtggtcttcaa

SEQ ID NO: 5740837 - DNA, 25 bp, Homo sapien
ttcaacctgctgtatcctgtgagca

SEQ ID NO: 5740838 - DNA, 25 bp, Homo sapien
ctggcgccacggcttcaacgtggcc

SEQ ID NO: 5740839 - DNA, 25 bp, Homo sapien
gtactcgggcccacgcacgcctgat

SEQ ID NO: 5740840 - DNA, 25 bp, Homo sapien
gctatttgctacaagaggttaggaa

SEQ ID NO: 5740841 - DNA, 25 bp, Homo sapien
gacatcggggtcgtgggccacgtgg

SEQ ID NO: 5740842 - DNA, 25 bp, Homo sapien
tctcagctcactgcaacctccacct

SEQ ID NO: 5740843 - DNA, 25 bp, Homo sapien
cttcaacgtggcccagacgatgttc

SEQ ID NO: 5740844 - DNA, 25 bp, Homo sapien
gtggtctgtgctgatgggagagtcc

SEQ ID NO: 5740845 - DNA, 25 bp, Homo sapien
aggcgcccaccaccacacatggcta

SEQ ID NO: 5740846 - DNA, 25 bp, Homo sapien
ccttggctaagctccacggctcctc

SEQ ID NO: 5740847 - DNA, 25 bp, Homo sapien
ggccttcgccatggtgacagccggc

SEQ ID NO: 5740848 - DNA, 25 bp, Homo sapien
ccagatgtactacgagctgggcgtg

SEQ ID NO: 5740849 - DNA, 25 bp, Homo sapien
tggctcagaccaaaaagatggtgaa

SEQ ID NO: 5740850 - DNA, 25 bp, Homo sapien
aggccaaagtgaaggctctggagga

SEQ ID NO: 5740851 - DNA, 25 bp, Homo sapien
ggttcctgttctccatcagcaaagg

SEQ ID NO: 5740852 - DNA, 25 bp, Homo sapien
caaagacgtcgtggcggtgatcatg

SEQ ID NO: 5740853 - DNA, 25 bp, Homo sapien
tgcctgtggctatttgctacaagag

SEQ ID NO: 5740854 - DNA, 25 bp, Homo sapien
aggacatcgcacaggacatggtcct

SEQ ID NO: 5740855 - DNA, 25 bp, Homo sapien
tgtattttcagtacagatggggttt

SEQ ID NO: 5740856 - DNA, 25 bp, Homo sapien
cggcgtggccgagctggccaccagg

SEQ ID NO: 5740857 - DNA, 25 bp, Homo sapien
tcgaccaccgcggcaccaacaacct

SEQ ID NO: 5740858 - DNA, 25 bp, Homo sapien
cgatgtttcagaagatcgtggatga

SEQ ID NO: 5740859 - DNA, 25 bp, Homo sapien
atcccccaggaggtcctggtgcggt

SEQ ID NO: 5740860 - DNA, 25 bp, Homo sapien
gcgcgcctggggaaggagcctgctg

SEQ ID NO: 5740861 - DNA, 25 bp, Homo sapien
agtcttgctctgtcacccaggctgg

SEQ ID NO: 5740862 - DNA, 25 bp, Homo sapien
ggaggtcctggtgcggttcctgttc

SEQ ID NO: 5740863 - DNA, 25 bp, Homo sapien
cctccacctcccaggttcaagcgat

SEQ ID NO: 5740864 - DNA, 25 bp, Homo sapien
agagctactacacggacctggaggc

SEQ ID NO: 5740865 - DNA, 25 bp, Homo sapien
atccagatgtactacgagctgggcg

SEQ ID NO: 5740866 - DNA, 25 bp, Homo sapien
cgtggcccagacgatgttcacgctg

SEQ ID NO: 5740867 - DNA, 25 bp, Homo sapien
cggctcctcgattttggagcggcac

SEQ ID NO: 5740868 - DNA, 25 bp, Homo sapien
tttgagatggagtcttgctctgtca

SEQ ID NO: 5740869 - DNA, 25 bp, Homo sapien
tgtacctgaagatctatcacctgag

SEQ ID NO: 5740870 - DNA, 25 bp, Homo sapien
gggcccaccacatttgacatctacg

SEQ ID NO: 5740871 - DNA, 25 bp, Homo sapien
aagtgaaggctctggaggagaagga

SEQ ID NO: 5740872 - DNA, 25 bp, Homo sapien
gcatccagatgtactacgagctggg

SEQ ID NO: 5740873 - DNA, 25 bp, Homo sapien
tcaggaaggggccctggacgactcc

SEQ ID NO: 5740874 - DNA, 25 bp, Homo sapien
tccacctcccaggttcaagcgattc

SEQ ID NO: 5740875 - DNA, 25 bp, Homo sapien
tctgtgctgatgggagagtcccagc

SEQ ID NO: 5740876 - DNA, 25 bp, Homo sapien
cgccacattttacaacaggaaagac

SEQ ID NO: 5740877 - DNA, 25 bp, Homo sapien
gctgtatcctgtgagcactggtccc

SEQ ID NO: 5740878 - DNA, 25 bp, Homo sapien
gcaacctccacctcccaggttcaag

SEQ ID NO: 5740879 - DNA, 25 bp, Homo sapien
gtcattcccacaccctcagccgatc

SEQ ID NO: 5740880 - DNA, 25 bp, Homo sapien
tggagacgacccggaaggagatcgt

SEQ ID NO: 5740881 - DNA, 25 bp, Homo sapien
cagcggccttccaagctacgtggca

SEQ ID NO: 5740882 - DNA, 25 bp, Homo sapien
caccctcagccgatcactgggccct

SEQ ID NO: 5740883 - DNA, 25 bp, Homo sapien
ggtccgaaagttccagatcccccag

SEQ ID NO: 5740884 - DNA, 25 bp, Homo sapien
tgggaagttcctgctctcggaggag

SEQ ID NO: 5740885 - DNA, 25 bp, Homo sapien
accatgagcctcagtgaggagcagg

SEQ ID NO: 5740886 - DNA, 25 bp, Homo sapien
aagaatatgctggccacacccatca

SEQ ID NO: 5740887 - DNA, 25 bp, Homo sapien
gaaatcctgaaggaggagctgccag

SEQ ID NO: 5740888 - DNA, 25 bp, Homo sapien
cacgtggctcagaccaaaaagatgg

SEQ ID NO: 5740889 - DNA, 25 bp, Homo sapien
gactgcgatgaggacgagctgggcg

SEQ ID NO: 5740890 - DNA, 25 bp, Homo sapien
acccaggctggagtgccgtggcacg

SEQ ID NO: 5740891 - DNA, 25 bp, Homo sapien
gacgagctgggcgaaatcctgaagg

SEQ ID NO: 5740892 - DNA, 25 bp, Homo sapien
tgggaagtccagagcaaggtcgcac

SEQ ID NO: 5740893 - DNA, 25 bp, Homo sapien
tggcagaaagcggctttatttgtaa

SEQ ID NO: 5740894 - DNA, 25 bp, Homo sapien
acagccggcctgtgccatgacatcg

SEQ ID NO: 5740895 - DNA, 25 bp, Homo sapien
tgagtatgaggccaaagtgaaggct

SEQ ID NO: 5740896 - DNA, 25 bp, Homo sapien
tacctgaagatctatcacctgagct

SEQ ID NO: 5740897 - DNA, 25 bp, Homo sapien
tgatgaacaccgacacctacgacaa

SEQ ID NO: 5740898 - DNA, 25 bp, Homo sapien
gcggttcctgttctccatcagcaaa

SEQ ID NO: 5740899 - DNA, 25 bp, Homo sapien
caggtgctgctgtggtcggccaaca

SEQ ID NO: 5740900 - DNA, 25 bp, Homo sapien
gacctggaggccttcgccatggtga

SEQ ID NO: 5740901 - DNA, 25 bp, Homo sapien
acatctaccagaacctgaaccggcg

SEQ ID NO: 5740902 - DNA, 25 bp, Homo sapien
ggaaaggacagtcttggatcagcag

SEQ ID NO: 5740903 - DNA, 25 bp, Homo sapien
gagctacctccacaactgcgagacg

SEQ ID NO: 5740904 - DNA, 25 bp, Homo sapien
ctgacgagctcactgactacaagac

SEQ ID NO: 5740905 - DNA, 25 bp, Homo sapien
gtgctgtccatgcccatcgtcaaca

SEQ ID NO: 5740906 - DNA, 25 bp, Homo sapien
gctcatcctgccaaccagagcgcgc

SEQ ID NO: 5740907 - DNA, 25 bp, Homo sapien
gccaccacgcccagcctgtttttat

SEQ ID NO: 5740908 - DNA, 25 bp, Homo sapien
tggagtgccgtggcacgatctcagc

SEQ ID NO: 5740909 - DNA, 25 bp, Homo sapien
gggattacaggcatgagccaccacg

SEQ ID NO: 5740910 - DNA, 25 bp, Homo sapien
acaggcagccaccatgagcctcagt

SEQ ID NO: 5740911 - DNA, 25 bp, Homo sapien
acaccgacacctacgacaagatgaa

SEQ ID NO: 5740912 - DNA, 25 bp, Homo sapien
tgtaccgccagcgcaacggcgtggc

SEQ ID NO: 5740913 - DNA, 25 bp, Homo sapien
ccggaaggagatcgtcatggccatg

SEQ ID NO: 5740914 - DNA, 25 bp, Homo sapien
ggcggtgatcatggcagtgaacaag

SEQ ID NO: 5740915 - DNA, 25 bp, Homo sapien
tgccaaccagagcgcgcctggggaa

SEQ ID NO: 5740916 - DNA, 25 bp, Homo sapien
actcgggcccacgcacgcctgatgg

SEQ ID NO: 5740917 - DNA, 25 bp, Homo sapien
acgatcacgtgatccacctgatgga

SEQ ID NO: 5740918 - DNA, 25 bp, Homo sapien
tgccacgttgtacctgaagatctat

SEQ ID NO: 5740919 - DNA, 25 bp, Homo sapien
gctttatttgtaacatcatgaatgc

SEQ ID NO: 5740920 - DNA, 25 bp, Homo sapien
atcgagaggcagttccacaaggcct

SEQ ID NO: 5740921 - DNA, 25 bp, Homo sapien
ggagagggtggcagccaagaaaggc

SEQ ID NO: 5740922 - DNA, 25 bp, Homo sapien
ctgactgcgatgaggacgagctggg

SEQ ID NO: 5740923 - DNA, 25 bp, Homo sapien
ttggaaaggacagtcttggatcagc

SEQ ID NO: 5740924 - DNA, 25 bp, Homo sapien
gcgaggacgggtgcccgccggactg

SEQ ID NO: 5740925 - DNA, 25 bp, Homo sapien
ctggtcagtgatgaacaccgacacc

SEQ ID NO: 5740926 - DNA, 25 bp, Homo sapien
accaggacaagaagagctgggtgga

SEQ ID NO: 5740927 - DNA, 25 bp, Homo sapien
ggagatcaaggtcattcccacaccc

SEQ ID NO: 5740928 - DNA, 25 bp, Homo sapien
gcagccaagaaaggcacagaaattt

SEQ ID NO: 5740929 - DNA, 25 bp, Homo sapien
gctctgtcacccaggctggagtgcc

SEQ ID NO: 5740930 - DNA, 25 bp, Homo sapien
gagcgcgtggtcttcaaggtcctgc

SEQ ID NO: 5740931 - DNA, 25 bp, Homo sapien
actaggatttgggttctgcctgtgg

SEQ ID NO: 5740932 - DNA, 25 bp, Homo sapien
accatattgggcaggctggtctcga

SEQ ID NO: 5740933 - DNA, 25 bp, Homo sapien
acggcaaggaggagatcaaggtcat

SEQ ID NO: 5740934 - DNA, 25 bp, Homo sapien
ccttcgccatggtgacagccggcct

SEQ ID NO: 5740935 - DNA, 25 bp, Homo sapien
acacagttcctgggctggtcagtga

SEQ ID NO: 5740936 - DNA, 25 bp, Homo sapien
gaggaggaggagagggtggcagcca

SEQ ID NO: 5740937 - DNA, 25 bp, Homo sapien
aaagtgatcgactacatcctccacg

SEQ ID NO: 5740938 - DNA, 25 bp, Homo sapien
agaccaaaaagatggtgaacgtcga

SEQ ID NO: 5740939 - DNA, 25 bp, Homo sapien
agctgggactacaggcgcccaccac

SEQ ID NO: 5740940 - DNA, 25 bp, Homo sapien
ggcaaactgaagagctactacacgg

SEQ ID NO: 5740941 - DNA, 25 bp, Homo sapien
tgggagagtcccagccgtactcggg

SEQ ID NO: 5740942 - DNA, 25 bp, Homo sapien
catggtcctttaccacgtgaagtgc

SEQ ID NO: 5740943 - DNA, 25 bp, Homo sapien
aggcatgagccaccacgcccagcct

SEQ ID NO: 5740944 - DNA, 25 bp, Homo sapien
gcccaccaccacacatggctaattt

SEQ ID NO: 5740945 - DNA, 25 bp, Homo sapien
tggcatccagatgtactacgagctg

SEQ ID NO: 5740946 - DNA, 25 bp, Homo sapien
gtgaataaactgtagcctacaaaaa

SEQ ID NO: 5740947 - DNA, 25 bp, Homo sapien
agaaccccgattttgcccgccagta

SEQ ID NO: 5740948 - DNA, 25 bp, Homo sapien
ctgcgacctgtctgccatcaccaag

SEQ ID NO: 5740949 - DNA, 25 bp, Homo sapien
cacacccatcatgaatggcaaagac

SEQ ID NO: 5740950 - DNA, 25 bp, Homo sapien
gtgcccgccggactgcgacagcctc

SEQ ID NO: 5740951 - DNA, 25 bp, Homo sapien
atgacagcctgcgacctgtctgcca

SEQ ID NO: 5740952 - DNA, 25 bp, Homo sapien
gaacatctaccagaacctgaaccgg

SEQ ID NO: 5740953 - DNA, 25 bp, Homo sapien
attttgcccgccagtactttgggaa

SEQ ID NO: 5740954 - DNA, 25 bp, Homo sapien
gacgggaagccctttgacgaacagg

SEQ ID NO: 5740955 - DNA, 25 bp, Homo sapien
caacctgctgtatcctgtgagcact

SEQ ID NO: 5740956 - DNA, 25 bp, Homo sapien
gagagcacggcgctgctggagctgg

SEQ ID NO: 5740957 - DNA, 25 bp, Homo sapien
tcttgctctgtcacccaggctggag

SEQ ID NO: 5740958 - DNA, 25 bp, Homo sapien
tgagaatgtggccgcggcctgcgag

SEQ ID NO: 5740959 - DNA, 25 bp, Homo sapien
cacccaagtcttcaacctgctgtat

SEQ ID NO: 5740960 - DNA, 25 bp, Homo sapien
cgtcatggccatgatgatgacagcc

SEQ ID NO: 5740961 - DNA, 25 bp, Homo sapien
tcccagaaccccttggctaagctcc

SEQ ID NO: 5740962 - DNA, 25 bp, Homo sapien
gctcatgaccggcaaactgaagagc

SEQ ID NO: 5740963 - DNA, 25 bp, Homo sapien
gcctctgcaccctcctgcaggccga

SEQ ID NO: 5740964 - DNA, 25 bp, Homo sapien
catcgtcaacaagaaggaggagatt

SEQ ID NO: 5740965 - DNA, 25 bp, Homo sapien
acggacatcgagaggcagttccaca

SEQ ID NO: 5740966 - DNA, 25 bp, Homo sapien
acaaggccttctacacggtgcgggc

SEQ ID NO: 5740967 - DNA, 25 bp, Homo sapien
gccaaagtgaaggctctggaggaga

SEQ ID NO: 5740968 - DNA, 25 bp, Homo sapien
caaatgtggcatccagatgtactac

SEQ ID NO: 5740969 - DNA, 25 bp, Homo sapien
cgtcctggaggactgcctggtgccc

SEQ ID NO: 5740970 - DNA, 25 bp, Homo sapien
ggatttgggttctgcctgtggctat

SEQ ID NO: 5740971 - DNA, 25 bp, Homo sapien
gaaggaattttttgacgtgtggtct

SEQ ID NO: 5740972 - DNA, 25 bp, Homo sapien
acgtgtggtctgtgctgatgggaga

SEQ ID NO: 5740973 - DNA, 25 bp, Homo sapien
gagatccagctcatcctgccaacca

SEQ ID NO: 5740974 - DNA, 25 bp, Homo sapien
gtgatcatggcagtgaacaagctca

SEQ ID NO: 5740975 - DNA, 25 bp, Homo sapien
aggttctcatggagtccctgacaca

SEQ ID NO: 5740976 - DNA, 25 bp, Homo sapien
tgtgttcttgaagtacctgaatttt

SEQ ID NO: 5740977 - DNA, 25 bp, Homo sapien
ccgagctccccaagctgcaagtggg

SEQ ID NO: 5740978 - DNA, 25 bp, Homo sapien
agttctgggagcaaggtgacttgga

SEQ ID NO: 5740979 - DNA, 25 bp, Homo sapien
tcgcacaggacatggtcctttacca

SEQ ID NO: 5740980 - DNA, 25 bp, Homo sapien
agcacccaagtcttcaacctgctgt

SEQ ID NO: 5740981 - DNA, 25 bp, Homo sapien
gacagcctgcgacctgtctgccatc

SEQ ID NO: 5740982 - DNA, 25 bp, Homo sapien
gtggctgctgagttctgggagcaag

SEQ ID NO: 5740983 - DNA, 25 bp, Homo sapien
ggtgtttgaggagctgacggacatc

SEQ ID NO: 5740984 - DNA, 25 bp, Homo sapien
ctggacgactccgggtggctcatca

SEQ ID NO: 5740985 - DNA, 25 bp, Homo sapien
ccattcctatgatggaccggaacaa

SEQ ID NO: 5740986 - DNA, 25 bp, Homo sapien
aggcttttcagcgtgcagccggaca

SEQ ID NO: 5740987 - DNA, 25 bp, Homo sapien
gggcccacgcacgcctgatggccgg

SEQ ID NO: 5740988 - DNA, 25 bp, Homo sapien
cttcaagaagagagcgatgtttcag

SEQ ID NO: 5740989 - DNA, 25 bp, Homo sapien
caacaaggtgtttgaggagctgacg

SEQ ID NO: 5740990 - DNA, 25 bp, Homo sapien
cggccaacaaggtgtttgaggagct

SEQ ID NO: 5740991 - DNA, 25 bp, Homo sapien
gcgcccaccaccacacatggctaat

SEQ ID NO: 5740992 - DNA, 25 bp, Homo sapien
cgaaatgttcaaatttcaggaaggg

SEQ ID NO: 5740993 - DNA, 25 bp, Homo sapien
tggccagcggccttccaagctacgt

SEQ ID NO: 5740994 - DNA, 25 bp, Homo sapien
gacgagctcactgactacaagacaa

SEQ ID NO: 5740995 - DNA, 25 bp, Homo sapien
aatgtggcatccagatgtactacga

SEQ ID NO: 5740996 - DNA, 25 bp, Homo sapien
ctggggaaggagcctgctgactgcg

SEQ ID NO: 5740997 - DNA, 25 bp, Homo sapien
tgaggagcaggcccggagctttctg

SEQ ID NO: 5740998 - DNA, 25 bp, Homo sapien
atggctccctcaatcttcacccact

SEQ ID NO: 5740999 - DNA, 25 bp, Homo sapien
atcactgggccctggccagcggcct

SEQ ID NO: 5741000 - DNA, 25 bp, Homo sapien
gaacaagctcaacggcccattcttc

SEQ ID NO: 5741001 - DNA, 25 bp, Homo sapien
ccacggcttcaacgtggcccagacg

SEQ ID NO: 5741002 - DNA, 25 bp, Homo sapien
ccacacatggctaatttttgtattt

SEQ ID NO: 5741003 - DNA, 25 bp, Homo sapien
cgattttggagcggcaccacctgga

SEQ ID NO: 5741004 - DNA, 25 bp, Homo sapien
cctcagcctcctgagtagctgggac

SEQ ID NO: 5741005 - DNA, 25 bp, Homo sapien
gactccgggtggctcatcaagaatg

SEQ ID NO: 5741006 - DNA, 25 bp, Homo sapien
ctggagtgcaccgaactggacctgg

SEQ ID NO: 5741007 - DNA, 25 bp, Homo sapien
ggtgatcacccgcctcagcttcctg

SEQ ID NO: 5741008 - DNA, 25 bp, Homo sapien
cgaaagttccagatcccccaggagg

SEQ ID NO: 5741009 - DNA, 25 bp, Homo sapien
agatcccccaggaggtcctggtgcg

SEQ ID NO: 5741010 - DNA, 25 bp, Homo sapien
catgcccatcgtcaacaagaaggag

SEQ ID NO: 5741011 - DNA, 25 bp, Homo sapien
aaggagatcgtcatggccatgatga

SEQ ID NO: 5741012 - DNA, 25 bp, Homo sapien
ctacaggcgcccaccaccacacatg

SEQ ID NO: 5741013 - DNA, 25 bp, Homo sapien
aggactgcctggtgccccccgactc

SEQ ID NO: 5741014 - DNA, 25 bp, Homo sapien
agctgcaagtgggcttcatcgactt

SEQ ID NO: 5741015 - DNA, 25 bp, Homo sapien
tggcacgatctcagctcactgcaac

SEQ ID NO: 5741016 - DNA, 25 bp, Homo sapien
cccgcctcagcttcctgaagtgctg

SEQ ID NO: 5741017 - DNA, 25 bp, Homo sapien
attttggagcggcaccacctggagt

SEQ ID NO: 5741018 - DNA, 25 bp, Homo sapien
cctgggaagtccagagcaaggtcgc

SEQ ID NO: 5741019 - DNA, 25 bp, Homo sapien
aagaagagctgggtggagtacctgt

SEQ ID NO: 5741020 - DNA, 25 bp, Homo sapien
agcctcttcatgtaccgccagcgca

SEQ ID NO: 5741021 - DNA, 25 bp, Homo sapien
tatgaggccaaagtgaaggctctgg

SEQ ID NO: 5741022 - DNA, 25 bp, Homo sapien
cctacctcaactgcgagcggtactc

SEQ ID NO: 5741023 - DNA, 25 bp, Homo sapien
gacagcctccgggacctctgccagg

SEQ ID NO: 5741024 - DNA, 25 bp, Homo sapien
tacctccacaactgcgagacgcgcc

SEQ ID NO: 5741025 - DNA, 25 bp, Homo sapien
aatttgcaatggcggcccagcaccc

SEQ ID NO: 5741026 - DNA, 25 bp, Homo sapien
gctccccaagctgcaagtgggcttc

SEQ ID NO: 5741027 - DNA, 25 bp, Homo sapien
gtacctgaattttgccacgttgtac

SEQ ID NO: 5741028 - DNA, 25 bp, Homo sapien
cgtggccgagtgccctcacttcagc

SEQ ID NO: 5741029 - DNA, 25 bp, Homo sapien
agtgctgggattacaggcatgagcc

SEQ ID NO: 5741030 - DNA, 25 bp, Homo sapien
gcgcgtggtcttcaaggtcctgcgg

SEQ ID NO: 5741031 - DNA, 25 bp, Homo sapien
cctccacaactgcgagacgcgccgc

SEQ ID NO: 5741032 - DNA, 25 bp, Homo sapien
ggaaggagatcgtcatggccatgat

SEQ ID NO: 5741033 - DNA, 25 bp, Homo sapien
caagtcttcaacctgctgtatcctg

SEQ ID NO: 5741034 - DNA, 25 bp, Homo sapien
ctgcgaggacgggtgcccgccggac

SEQ ID NO: 5741035 - DNA, 25 bp, Homo sapien
gtgcacattcgtgtacaaggagttc

SEQ ID NO: 5741036 - DNA, 25 bp, Homo sapien
caccacgcccagcctgtttttataa

SEQ ID NO: 5741037 - DNA, 25 bp, Homo sapien
caccaagccctgggaagtccagagc

SEQ ID NO: 5741038 - DNA, 25 bp, Homo sapien
gttaggaagcccaagaaaatgactg

SEQ ID NO: 5741039 - DNA, 25 bp, Homo sapien
cgccacggcttcaacgtggcccaga

SEQ ID NO: 5741040 - DNA, 25 bp, Homo sapien
gaccctatggctccctcaatcttca

SEQ ID NO: 5741041 - DNA, 25 bp, Homo sapien
catttgctgacgagctcactgacta

SEQ ID NO: 5741042 - DNA, 25 bp, Homo sapien
gccaggtgctgctgtggtcggccaa

SEQ ID NO: 5741043 - DNA, 25 bp, Homo sapien
aggaattttttgacgtgtggtctgt

SEQ ID NO: 5741044 - DNA, 25 bp, Homo sapien
tttatttgtaacatcatgaatgctt

SEQ ID NO: 5741045 - DNA, 25 bp, Homo sapien
cagcctccgggacctctgccaggtg

SEQ ID NO: 5741046 - DNA, 25 bp, Homo sapien
ccgtgggcctcctggacatgaccaa

SEQ ID NO: 5741047 - DNA, 25 bp, Homo sapien
acaagaggttaggaagcccaagaaa

SEQ ID NO: 5741048 - DNA, 25 bp, Homo sapien
aggtcattcccacaccctcagccga

SEQ ID NO: 5741049 - DNA, 25 bp, Homo sapien
caacaagaaggaggagattgtggga

SEQ ID NO: 5741050 - DNA, 25 bp, Homo sapien
tttccacgaagagatcctgcccatg

SEQ ID NO: 5741051 - DNA, 25 bp, Homo sapien
caaggtcgcacttctcgtggctgct

SEQ ID NO: 5741052 - DNA, 25 bp, Homo sapien
taccacgtgaagtgcgacagggacg

SEQ ID NO: 5741053 - DNA, 25 bp, Homo sapien
tggtgcaggatatgcaggagagcat

SEQ ID NO: 5741054 - DNA, 25 bp, Homo sapien
ctacgaattccacttctctgacctg

SEQ ID NO: 5741055 - DNA, 25 bp, Homo sapien
tctgcctgtggctatttgctacaag

SEQ ID NO: 5741056 - DNA, 25 bp, Homo sapien
ccccttggctaagctccacggctcc

SEQ ID NO: 5741057 - DNA, 25 bp, Homo sapien
agaatgtggccgcggcctgcgagga

SEQ ID NO: 5741058 - DNA, 25 bp, Homo sapien
tttcaccatattgggcaggctggtc

SEQ ID NO: 5741059 - DNA, 25 bp, Homo sapien
cagaagatcgtggatgagtccaaga

SEQ ID NO: 5741060 - DNA, 25 bp, Homo sapien
ttcctgggctggtcagtgatgaaca

SEQ ID NO: 5741061 - DNA, 25 bp, Homo sapien
gagtgccgtggcacgatctcagctc

SEQ ID NO: 5741062 - DNA, 25 bp, Homo sapien
ctctcgtttccacgaagagatcctg

SEQ ID NO: 5741063 - DNA, 25 bp, Homo sapien
gagctccccaagctgcaagtgggct

SEQ ID NO: 5741064 - DNA, 25 bp, Homo sapien
cacttcagctcatttgctgacgagc

SEQ ID NO: 5741065 - DNA, 25 bp, Homo sapien
gcaagtgggcttcatcgacttcgtg

SEQ ID NO: 5741066 - DNA, 25 bp, Homo sapien
acatggctaatttttgtattttcag

SEQ ID NO: 5741067 - DNA, 25 bp, Homo sapien
cccatggggaccctatggctccctc

SEQ ID NO: 5741068 - DNA, 25 bp, Homo sapien
ctgcaagtgggcttcatcgacttcg

SEQ ID NO: 5741069 - DNA, 25 bp, Homo sapien
acgcccagcctgtttttataaactg

SEQ ID NO: 5741070 - DNA, 25 bp, Homo sapien
caccacacatggctaatttttgtat

SEQ ID NO: 5741071 - DNA, 25 bp, Homo sapien
acctggagtttgggaagttcctgct

SEQ ID NO: 5741072 - DNA, 25 bp, Homo sapien
gttcaagcgattctcgtgcctcagc

SEQ ID NO: 5741073 - DNA, 25 bp, Homo sapien
cactgactacaagacaaagaatatg

SEQ ID NO: 5741074 - DNA, 25 bp, Homo sapien
gctcaacggcccattcttcaccagc

SEQ ID NO: 5741075 - DNA, 25 bp, Homo sapien
cctgcggcgcctctgcaccctcctg

SEQ ID NO: 5741076 - DNA, 25 bp, Homo sapien
cgtcgtggcggtgatcatggcagtg

SEQ ID NO: 5741077 - DNA, 25 bp, Homo sapien
gcatgagccaccacgcccagcctgt

SEQ ID NO: 5741078 - DNA, 25 bp, Homo sapien
atgaatggcaaagacgtcgtggcgg

SEQ ID NO: 5741079 - DNA, 25 bp, Homo sapien
cccaagtcttcaacctgctgtatcc

SEQ ID NO: 5741080 - DNA, 25 bp, Homo sapien
tgttcacgctgctcatgaccggcaa

SEQ ID NO: 5741081 - DNA, 25 bp, Homo sapien
ttcatgtaccgccagcgcaacggcg

SEQ ID NO: 5741082 - DNA, 25 bp, Homo sapien
tcatcctgccaaccagagcgcgcct

SEQ ID NO: 5741083 - DNA, 25 bp, Homo sapien
caccgaactggacctggtcaaatgt

SEQ ID NO: 5741084 - DNA, 25 bp, Homo sapien
tttgcaatggcggcccagcacccaa

SEQ ID NO: 5741085 - DNA, 25 bp, Homo sapien
gccctgtacttcaagaagagagcga

SEQ ID NO: 5741086 - DNA, 25 bp, Homo sapien
gtactacgagctgggcgtggtccga

SEQ ID NO: 5741087 - DNA, 25 bp, Homo sapien
cttcacccactaggatttgggttct

SEQ ID NO: 5741088 - DNA, 25 bp, Homo sapien
aagccctttgacgaacaggacgagg

SEQ ID NO: 5741089 - DNA, 25 bp, Homo sapien
tggtcaaatgtggcatccagatgta

SEQ ID NO: 5741090 - DNA, 25 bp, Homo sapien
ggagagcatcaacatggagcgcgtg

SEQ ID NO: 5741091 - DNA, 25 bp, Homo sapien
agccaagaaaggcacagaaatttgc

SEQ ID NO: 5741092 - DNA, 25 bp, Homo sapien
ccagcgaagacgaagatgtgttctt

SEQ ID NO: 5741093 - DNA, 25 bp, Homo sapien
ctgctctcggaggagaccctgaaca

SEQ ID NO: 5741094 - DNA, 25 bp, Homo sapien
cctcccaggttcaagcgattctcgt

SEQ ID NO: 5741095 - DNA, 25 bp, Homo sapien
ggccatgatgatgacagcctgcgac

SEQ ID NO: 5741096 - DNA, 25 bp, Homo sapien
tatttgtaacatcatgaatgcttcc

SEQ ID NO: 5741097 - DNA, 25 bp, Homo sapien
ggaggagattgtgggagtcgccaca

SEQ ID NO: 5741098 - DNA, 25 bp, Homo sapien
ctaccagaacctgaaccggcggcag

SEQ ID NO: 5741099 - DNA, 25 bp, Homo sapien
agatggggtttcaccatattgggca

SEQ ID NO: 5741100 - DNA, 25 bp, Homo sapien
catgagcctcagtgaggagcaggcc

SEQ ID NO: 5741101 - DNA, 25 bp, Homo sapien
gaagagctactacacggacctggag

SEQ ID NO: 5741102 - DNA, 25 bp, Homo sapien
atcaccaagccctgggaagtccaga

SEQ ID NO: 5741103 - DNA, 25 bp, Homo sapien
tcatggcagtgaacaagctcaacgg

SEQ ID NO: 5741104 - DNA, 25 bp, Homo sapien
gcaaagggtaccggagaatcaccta

SEQ ID NO: 5741105 - DNA, 25 bp, Homo sapien
ctacaagacaaagaatatgctggcc

SEQ ID NO: 5741106 - DNA, 25 bp, Homo sapien
cagcaaagggtaccggagaatcacc

SEQ ID NO: 5741107 - DNA, 25 bp, Homo sapien
tcagctcatttgctgacgagctcac

SEQ ID NO: 5741108 - DNA, 25 bp, Homo sapien
gaggagagggtggcagccaagaaag

SEQ ID NO: 5741109 - DNA, 25 bp, Homo sapien
gatctatcacctgagctacctccac

SEQ ID NO: 5741110 - DNA, 25 bp, Homo sapien
atgatgatgacagcctgcgacctgt

SEQ ID NO: 5741111 - DNA, 25 bp, Homo sapien
acagatggggtttcaccatattggg

SEQ ID NO: 5741112 - DNA, 25 bp, Homo sapien
gatggtgaacgtcgaggacgtggcc

SEQ ID NO: 5741113 - DNA, 25 bp, Homo sapien
ctccgggtggctcatcaagaatgtg

SEQ ID NO: 5741114 - DNA, 25 bp, Homo sapien
acagggacgagatccagctcatcct

SEQ ID NO: 5741115 - DNA, 25 bp, Homo sapien
caaggtcattcccacaccctcagcc

SEQ ID NO: 5741116 - DNA, 25 bp, Homo sapien
gtggtcttcaaggtcctgcggcgcc

SEQ ID NO: 5741117 - DNA, 25 bp, Homo sapien
tccctgacacagttcctgggctggt

SEQ ID NO: 5741118 - DNA, 25 bp, Homo sapien
gatatgcaggagagcatcaacatgg

SEQ ID NO: 5741119 - DNA, 25 bp, Homo sapien
tttctggaccagaaccccgattttg

SEQ ID NO: 5741120 - DNA, 25 bp, Homo sapien
taccacaactggcgccacggcttca

SEQ ID NO: 5741121 - DNA, 25 bp, Homo sapien
ttacaggcatgagccaccacgccca

SEQ ID NO: 5741122 - DNA, 25 bp, Homo sapien
ggagagtcccagccgtactcgggcc

SEQ ID NO: 5741123 - DNA, 25 bp, Homo sapien
ccaggtggaggagagcacggcgctg

SEQ ID NO: 5741124 - DNA, 25 bp, Homo sapien
cgacccggaaggagatcgtcatggc

SEQ ID NO: 5741125 - DNA, 25 bp, Homo sapien
agtgatcgactacatcctccacggc

SEQ ID NO: 5741126 - DNA, 25 bp, Homo sapien
agttccagatcccccaggaggtcct

SEQ ID NO: 5741127 - DNA, 25 bp, Homo sapien
tggacctggtcaaatgtggcatcca

SEQ ID NO: 5741128 - DNA, 25 bp, Homo sapien
tgagatggagtcttgctctgtcacc

SEQ ID NO: 5741129 - DNA, 25 bp, Homo sapien
gacagtcttggatcagcagcccatt

SEQ ID NO: 5741130 - DNA, 25 bp, Homo sapien
taggaagcccaagaaaatgactgaa

SEQ ID NO: 5741131 - DNA, 25 bp, Homo sapien
agctgggcgaaatcctgaaggagga

SEQ ID NO: 5741132 - DNA, 25 bp, Homo sapien
atgatggaccggaacaaggcggccg

SEQ ID NO: 5741133 - DNA, 25 bp, Homo sapien
gctggtctcgaactcctgacctcag

SEQ ID NO: 5741134 - DNA, 25 bp, Homo sapien
gaatgtgctgtccatgcccatcgtc

SEQ ID NO: 5741135 - DNA, 25 bp, Homo sapien
agccaccatgagcctcagtgaggag

SEQ ID NO: 5741136 - DNA, 25 bp, Homo sapien
gtcaacaagaaggaggagattgtgg

SEQ ID NO: 5741137 - DNA, 25 bp, Homo sapien
cgctgcagcctcttcatgtaccgcc

SEQ ID NO: 5741138 - DNA, 25 bp, Homo sapien
cagtacagatggggtttcaccatat

SEQ ID NO: 5741139 - DNA, 25 bp, Homo sapien
tgacacagttcctgggctggtcagt

SEQ ID NO: 5741140 - DNA, 25 bp, Homo sapien
gcgtggccgagctggccaccaggct

SEQ ID NO: 5741141 - DNA, 25 bp, Homo sapien
gtctccagggacaggcagccaccat

SEQ ID NO: 5741142 - DNA, 25 bp, Homo sapien
acgagatccagctcatcctgccaac

SEQ ID NO: 5741143 - DNA, 25 bp, Homo sapien
cgctgctcatgaccggcaaactgaa

SEQ ID NO: 5741144 - DNA, 25 bp, Homo sapien
gcctggggaaggagcctgctgactg

SEQ ID NO: 5741145 - DNA, 25 bp, Homo sapien
tcctgaaggaggagctgccagggcc

SEQ ID NO: 5741146 - DNA, 25 bp, Homo sapien
tccgaaagttccagatcccccagga

SEQ ID NO: 5741147 - DNA, 25 bp, Homo sapien
tgtccatgcccatcgtcaacaagaa

SEQ ID NO: 5741148 - DNA, 25 bp, Homo sapien
atgctggccacacccatcatgaatg

SEQ ID NO: 5741149 - DNA, 25 bp, Homo sapien
acaagaagagctgggtggagtacct

SEQ ID NO: 5741150 - DNA, 25 bp, Homo sapien
tgttcttgaagtacctgaattttgc

SEQ ID NO: 5741151 - DNA, 25 bp, Homo sapien
cgagctgggcgtggtccgaaagttc

SEQ ID NO: 5741152 - DNA, 25 bp, Homo sapien
cacctaccacaactggcgccacggc

SEQ ID NO: 5741153 - DNA, 25 bp, Homo sapien
gctggccaccaggcttttcagcgtg

SEQ ID NO: 5741154 - DNA, 25 bp, Homo sapien
tccatgcccatcgtcaacaagaagg

SEQ ID NO: 5741155 - DNA, 25 bp, Homo sapien
gggtaccggagaatcacctaccaca

SEQ ID NO: 5741156 - DNA, 25 bp, Homo sapien
ctcacttcagctcatttgctgacga

SEQ ID NO: 5741157 - DNA, 25 bp, Homo sapien
gccaccaggcttttcagcgtgcagc

SEQ ID NO: 5741158 - DNA, 25 bp, Homo sapien
tttttgacgtgtggtctgtgctgat

SEQ ID NO: 5741159 - DNA, 25 bp, Homo sapien
catattgggcaggctggtctcgaac

SEQ ID NO: 5741160 - DNA, 25 bp, Homo sapien
ccacgttgtacctgaagatctatca

SEQ ID NO: 5741161 - DNA, 25 bp, Homo sapien
gcaggcccggagctttctggaccag

SEQ ID NO: 5741162 - DNA, 25 bp, Homo sapien
aggttaggaagcccaagaaaatgac

SEQ ID NO: 5741163 - DNA, 25 bp, Homo sapien
caggagagcatcaacatggagcgcg

SEQ ID NO: 5741164 - DNA, 25 bp, Homo sapien
gtgtacaaggagttctctcgtttcc

SEQ ID NO: 5741165 - DNA, 25 bp, Homo sapien
catgaccaaggagaaggaatttttt

SEQ ID NO: 5741166 - DNA, 25 bp, Homo sapien
gaagtgcgacagggacgagatccag

SEQ ID NO: 5741167 - DNA, 25 bp, Homo sapien
gaagatcgtggatgagtccaagaac

SEQ ID NO: 5741168 - DNA, 25 bp, Homo sapien
tgaatgcttccgctgacgaaatgtt

SEQ ID NO: 5741169 - DNA, 25 bp, Homo sapien
tctgccaggtggaggagagcacggc

SEQ ID NO: 5741170 - DNA, 25 bp, Homo sapien
aatttttgtattttcagtacagatg

SEQ ID NO: 5741171 - DNA, 25 bp, Homo sapien
atcgtcatggccatgatgatgacag

SEQ ID NO: 5741172 - DNA, 25 bp, Homo sapien
tgacggacatcgagaggcagttcca

SEQ ID NO: 5741173 - DNA, 25 bp, Homo sapien
ctgcaccctcctgcaggccgaccgc

SEQ ID NO: 5741174 - DNA, 25 bp, Homo sapien
acttggaaaggacagtcttggatca

SEQ ID NO: 5741175 - DNA, 25 bp, Homo sapien
agtatgaggccaaagtgaaggctct

SEQ ID NO: 5741176 - DNA, 25 bp, Homo sapien
cacggacctggccctgtacttcaag

SEQ ID NO: 5741177 - DNA, 25 bp, Homo sapien
ggtcagtgatgaacaccgacaccta

SEQ ID NO: 5741178 - DNA, 25 bp, Homo sapien
gacgaagatgtgttcttgaagtacc

SEQ ID NO: 5741179 - DNA, 25 bp, Homo sapien
cgagctgggcgaaatcctgaaggag

SEQ ID NO: 5741180 - DNA, 25 bp, Homo sapien
ctgactacaagacaaagaatatgct

SEQ ID NO: 5741181 - DNA, 25 bp, Homo sapien
caggacaagaagagctgggtggagt

SEQ ID NO: 5741182 - DNA, 25 bp, Homo sapien
acccggaaggagatcgtcatggcca

SEQ ID NO: 5741183 - DNA, 25 bp, Homo sapien
tgcaccgaactggacctggtcaaat

SEQ ID NO: 5741184 - DNA, 25 bp, Homo sapien
cttctctgacctggagtgcaccgaa

SEQ ID NO: 5741185 - DNA, 25 bp, Homo sapien
acacctacgacaagatgaacaagct

SEQ ID NO: 5741186 - DNA, 25 bp, Homo sapien
caaccagagcgcgcctggggaagga

SEQ ID NO: 5741187 - DNA, 25 bp, Homo sapien
tttgacgaacaggacgaggttctca

SEQ ID NO: 5741188 - DNA, 25 bp, Homo sapien
gagaatcacctaccacaactggcgc

SEQ ID NO: 5741189 - DNA, 25 bp, Homo sapien
aaggtgtttgaggagctgacggaca

SEQ ID NO: 5741190 - DNA, 25 bp, Homo sapien
ggcacagaaatttgcaatggcggcc

SEQ ID NO: 5741191 - DNA, 25 bp, Homo sapien
gagtggaaggcgctggctgatgagt

SEQ ID NO: 5741192 - DNA, 25 bp, Homo sapien
tcgtggctgctgagttctgggagca

SEQ ID NO: 5741193 - DNA, 25 bp, Homo sapien
gactgcgacagcctccgggacctct

SEQ ID NO: 5741194 - DNA, 25 bp, Homo sapien
gcccattcttcaccagcgaagacga

SEQ ID NO: 5741195 - DNA, 25 bp, Homo sapien
gctgtggtcggccaacaaggtgttt

SEQ ID NO: 5741196 - DNA, 25 bp, Homo sapien
ccgggacctctgccaggtggaggag

SEQ ID NO: 5741197 - DNA, 25 bp, Homo sapien
gccgtggcacgatctcagctcactg

SEQ ID NO: 5741198 - DNA, 25 bp, Homo sapien
agtttgggaagttcctgctctcgga

SEQ ID NO: 5741199 - DNA, 25 bp, Homo sapien
gccagcggccttccaagctacgtgg

SEQ ID NO: 5741200 - DNA, 25 bp, Homo sapien
aacctgtaccagatgaagtcccaga

SEQ ID NO: 5741201 - DNA, 25 bp, Homo sapien
ctgcctggtgccccccgactccgag

SEQ ID NO: 5741202 - DNA, 25 bp, Homo sapien
cgcggccaggtgctgctgtggtcgg

SEQ ID NO: 5741203 - DNA, 25 bp, Homo sapien
gtcggccaacaaggtgtttgaggag

SEQ ID NO: 5741204 - DNA, 25 bp, Homo sapien
cggccaggtgctgctgtggtcggcc

SEQ ID NO: 5741205 - DNA, 25 bp, Homo sapien
gtaccggagaatcacctaccacaac

SEQ ID NO: 5741206 - DNA, 25 bp, Homo sapien
ttcatcgacttcgtgtgcacattcg

SEQ ID NO: 5741207 - DNA, 25 bp, Homo sapien
ggaagtccagagcaaggtcgcactt

SEQ ID NO: 5741208 - DNA, 25 bp, Homo sapien
aagtacctgaattttgccacgttgt

SEQ ID NO: 5741209 - DNA, 25 bp, Homo sapien
gcgtggtcttcaaggtcctgcggcg

SEQ ID NO: 5741210 - DNA, 25 bp, Homo sapien
gcctcctggacatgaccaaggagaa

SEQ ID NO: 5741211 - DNA, 25 bp, Homo sapien
ccacgtgaagtgcgacagggacgag

SEQ ID NO: 5741212 - DNA, 25 bp, Homo sapien
gttcctgctctcggaggagaccctg

SEQ ID NO: 5741213 - DNA, 25 bp, Homo sapien
acaggcgcccaccaccacacatggc

SEQ ID NO: 5741214 - DNA, 25 bp, Homo sapien
tcatgaatggcaaagacgtcgtggc

SEQ ID NO: 5741215 - DNA, 25 bp, Homo sapien
ttctctcgtttccacgaagagatcc

SEQ ID NO: 5741216 - DNA, 25 bp, Homo sapien
cgaactcctgacctcaggtgatcac

SEQ ID NO: 5741217 - DNA, 25 bp, Homo sapien
ctcatcaagaatgtgctgtccatgc

SEQ ID NO: 5741218 - DNA, 25 bp, Homo sapien
gcagccggacagcgtcctggaggac

SEQ ID NO: 5741219 - DNA, 25 bp, Homo sapien
ctgcagcctcttcatgtaccgccag

SEQ ID NO: 5741220 - DNA, 25 bp, Homo sapien
ggcctgtgccatgacatcgaccacc

SEQ ID NO: 5741221 - DNA, 25 bp, Homo sapien
ggaaagacgggaagccctttgacga

SEQ ID NO: 5741222 - DNA, 25 bp, Homo sapien
agcctgtttttataaactgaagcca

SEQ ID NO: 5741223 - DNA, 25 bp, Homo sapien
aactgtgaataaactgtagcctaca

SEQ ID NO: 5741224 - DNA, 25 bp, Homo sapien
atcaaggtcattcccacaccctcag

SEQ ID NO: 5741225 - DNA, 25 bp, Homo sapien
atggcggcccagcacccaagtcttc

SEQ ID NO: 5741226 - DNA, 25 bp, Homo sapien
gcagaaagcggctttatttgtaaca

SEQ ID NO: 5741227 - DNA, 25 bp, Homo sapien
attttttgacgtgtggtctgtgctg

SEQ ID NO: 5741228 - DNA, 25 bp, Homo sapien
aaggagcctgctgactgcgatgagg

SEQ ID NO: 5741229 - DNA, 25 bp, Homo sapien
agtgcaccgaactggacctggtcaa

SEQ ID NO: 5741230 - DNA, 25 bp, Homo sapien
tgtttttataaactgaagccaactg

SEQ ID NO: 5741231 - DNA, 25 bp, Homo sapien
tgacgtgtggtctgtgctgatggga

SEQ ID NO: 5741232 - DNA, 25 bp, Homo sapien
tgccaggtggaggagagcacggcgc

SEQ ID NO: 5741233 - DNA, 25 bp, Homo sapien
aggacagtcttggatcagcagccca

SEQ ID NO: 5741234 - DNA, 25 bp, Homo sapien
acgggtgcccgccggactgcgacag

SEQ ID NO: 5741235 - DNA, 25 bp, Homo sapien
ctgggcgtggtccgaaagttccaga

SEQ ID NO: 5741236 - DNA, 25 bp, Homo sapien
ttcagcgtgcagccggacagcgtcc

SEQ ID NO: 5741237 - DNA, 25 bp, Homo sapien
cgagacgcgccgcggccaggtgctg

SEQ ID NO: 5741238 - DNA, 25 bp, Homo sapien
cctgacctcaggtgatcacccgcct

SEQ ID NO: 5741239 - DNA, 25 bp, Homo sapien
agctgggcgtggtccgaaagttcca

SEQ ID NO: 5741240 - DNA, 25 bp, Homo sapien
tcctgctctcggaggagaccctgaa

SEQ ID NO: 5741241 - DNA, 25 bp, Homo sapien
gtacagatggggtttcaccatattg

SEQ ID NO: 5741242 - DNA, 25 bp, Homo sapien
aggatatgcaggagagcatcaacat

SEQ ID NO: 5741243 - DNA, 25 bp, Homo sapien
ggtcgtgggccacgtggctcagacc

SEQ ID NO: 5741244 - DNA, 25 bp, Homo sapien
ggaagaaactgagccctgagaatgt

SEQ ID NO: 5741245 - DNA, 25 bp, Homo sapien
cagtcttggatcagcagcccattcc

SEQ ID NO: 5741246 - DNA, 25 bp, Homo sapien
tgtccctggagacgacccggaagga

SEQ ID NO: 5741247 - DNA, 25 bp, Homo sapien
agcagcccattcctatgatggaccg

SEQ ID NO: 5741248 - DNA, 25 bp, Homo sapien
aagtccagagcaaggtcgcacttct

SEQ ID NO: 5741249 - DNA, 25 bp, Homo sapien
gtgggcttcatcgacttcgtgtgca

SEQ ID NO: 5741250 - DNA, 25 bp, Homo sapien
gtgggagtcgccacattttacaaca

SEQ ID NO: 5741251 - DNA, 25 bp, Homo sapien
tttgctgacgagctcactgactaca

SEQ ID NO: 5741252 - DNA, 25 bp, Homo sapien
cgaagatgtgttcttgaagtacctg

SEQ ID NO: 5741253 - DNA, 25 bp, Homo sapien
tgctgggattacaggcatgagccac

SEQ ID NO: 5741254 - DNA, 25 bp, Homo sapien
gactccgagatcgtcttcccactgg

SEQ ID NO: 5741255 - DNA, 25 bp, Homo sapien
ctccgagatcgtcttcccactggac

SEQ ID NO: 5741256 - DNA, 25 bp, Homo sapien
aggacgaggttctcatggagtccct

SEQ ID NO: 5741257 - DNA, 25 bp, Homo sapien
caaggcggccgagctccccaagctg

SEQ ID NO: 5741258 - DNA, 25 bp, Homo sapien
gaataaactgtagcctacaaaaaaa

SEQ ID NO: 5741259 - DNA, 25 bp, Homo sapien
ccttctacacggtgcgggcctacct

SEQ ID NO: 5741260 - DNA, 25 bp, Homo sapien
agaggcagttccacaaggccttcta

SEQ ID NO: 5741261 - DNA, 25 bp, Homo sapien
cagcccattcctatgatggaccgga

SEQ ID NO: 5741262 - DNA, 25 bp, Homo sapien
ccccgactccgagatcgtcttccca

SEQ ID NO: 5741263 - DNA, 25 bp, Homo sapien
aacgtggcccagacgatgttcacgc

SEQ ID NO: 5741264 - DNA, 25 bp, Homo sapien
ctccctcaatcttcacccactagga

SEQ ID NO: 5741265 - DNA, 25 bp, Homo sapien
aaagcggctttatttgtaacatcat

SEQ ID NO: 5741266 - DNA, 25 bp, Homo sapien
gcccacgcacgcctgatggccggga

SEQ ID NO: 5741267 - DNA, 25 bp, Homo sapien
tgccatcaccaagccctgggaagtc

SEQ ID NO: 5741268 - DNA, 25 bp, Homo sapien
acctgctgtatcctgtgagcactgg

SEQ ID NO: 5741269 - DNA, 25 bp, Homo sapien
tccagctcatcctgccaaccagagc

SEQ ID NO: 5741270 - DNA, 25 bp, Homo sapien
agtcccagaaccccttggctaagct

SEQ ID NO: 5741271 - DNA, 25 bp, Homo sapien
gatccagctcatcctgccaaccaga

SEQ ID NO: 5741272 - DNA, 25 bp, Homo sapien
gacgacccggaaggagatcgtcatg

SEQ ID NO: 5741273 - DNA, 25 bp, Homo sapien
gattctcgtgcctcagcctcctgag

SEQ ID NO: 5741274 - DNA, 25 bp, Homo sapien
ccatggtgacagccggcctgtgcca

SEQ ID NO: 5741275 - DNA, 25 bp, Homo sapien
gcaccctcctgcaggccgaccgctg

SEQ ID NO: 5741276 - DNA, 25 bp, Homo sapien
gtggctcatcaagaatgtgctgtcc

SEQ ID NO: 5741277 - DNA, 25 bp, Homo sapien
ctgatggccgggaaattgtcttcta

SEQ ID NO: 5741278 - DNA, 25 bp, Homo sapien
aagtgggcttcatcgacttcgtgtg

SEQ ID NO: 5741279 - DNA, 25 bp, Homo sapien
ggagcctgctgactgcgatgaggac

SEQ ID NO: 5741280 - DNA, 25 bp, Homo sapien
gatcgtcttcccactggacatcggg

SEQ ID NO: 5741281 - DNA, 25 bp, Homo sapien
ctgctcatgaccggcaaactgaaga

SEQ ID NO: 5741282 - DNA, 25 bp, Homo sapien
tcgtcaacaagaaggaggagattgt

SEQ ID NO: 5741283 - DNA, 25 bp, Homo sapien
tttttttttgagatggagtcttgct

SEQ ID NO: 5741284 - DNA, 25 bp, Homo sapien
cacctgatggacatcgccatcatcg

SEQ ID NO: 5741285 - DNA, 25 bp, Homo sapien
gctcagaccaaaaagatggtgaacg

SEQ ID NO: 5741286 - DNA, 25 bp, Homo sapien
acacatggctaatttttgtattttc

SEQ ID NO: 5741287 - DNA, 25 bp, Homo sapien
cctgtgccatgacatcgaccaccgc

SEQ ID NO: 5741288 - DNA, 25 bp, Homo sapien
caagaaggaggagattgtgggagtc

SEQ ID NO: 5741289 - DNA, 25 bp, Homo sapien
aagccctgggaagtccagagcaagg

SEQ ID NO: 5741290 - DNA, 25 bp, Homo sapien
caagatgaacaagctggagaaccgc

SEQ ID NO: 5741291 - DNA, 25 bp, Homo sapien
tataaactgaagccaactgtgaata

SEQ ID NO: 5741292 - DNA, 25 bp, Homo sapien
cacttctcgtggctgctgagttctg

SEQ ID NO: 5741293 - DNA, 25 bp, Homo sapien
agccaactgtgaataaactgtagcc

SEQ ID NO: 5741294 - DNA, 25 bp, Homo sapien
cctgtccctggagacgacccggaag

SEQ ID NO: 5741295 - DNA, 25 bp, Homo sapien
ttctgggagcaaggtgacttggaaa

SEQ ID NO: 5741296 - DNA, 25 bp, Homo sapien
ggaggaggagagggtggcagccaag

SEQ ID NO: 5741297 - DNA, 25 bp, Homo sapien
gaaccgcaaggacatcgcacaggac

SEQ ID NO: 5741298 - DNA, 25 bp, Homo sapien
tgcgagacgcgccgcggccaggtgc

SEQ ID NO: 5741299 - DNA, 25 bp, Homo sapien
atcttcacccactaggatttgggtt

SEQ ID NO: 5741300 - DNA, 25 bp, Homo sapien
gtcctgcggcgcctctgcaccctcc

SEQ ID NO: 5741301 - DNA, 25 bp, Homo sapien
tgagttctgggagcaaggtgacttg

SEQ ID NO: 5741302 - DNA, 25 bp, Homo sapien
ccgagatcgtcttcccactggacat

SEQ ID NO: 5741303 - DNA, 25 bp, Homo sapien
agttccacaaggccttctacacggt

SEQ ID NO: 5741304 - DNA, 25 bp, Homo sapien
ggggccctggacgactccgggtggc

SEQ ID NO: 5741305 - DNA, 25 bp, Homo sapien
ggggtcgtgggccacgtggctcaga

SEQ ID NO: 5741306 - DNA, 25 bp, Homo sapien
aagctccacggctcctcgattttgg

SEQ ID NO: 5741307 - DNA, 25 bp, Homo sapien
tttttataaactgaagccaactgtg

SEQ ID NO: 5741308 - DNA, 25 bp, Homo sapien
tggccacacccatcatgaatggcaa

SEQ ID NO: 5741309 - DNA, 25 bp, Homo sapien
agtccctgacacagttcctgggctg

SEQ ID NO: 5741310 - DNA, 25 bp, Homo sapien
gcacggcgctgctggagctggtgca

SEQ ID NO: 5741311 - DNA, 25 bp, Homo sapien
gctggagctggtgcaggatatgcag

SEQ ID NO: 5741312 - DNA, 25 bp, Homo sapien
gaaccggcggcagcacgatcacgtg

SEQ ID NO: 5741313 - DNA, 25 bp, Homo sapien
gcactggtcccatggggaccctatg

SEQ ID NO: 5741314 - DNA, 25 bp, Homo sapien
aggaggagagggtggcagccaagaa

SEQ ID NO: 5741315 - DNA, 25 bp, Homo sapien
ccatcatcgccacggacctggccct

SEQ ID NO: 5741316 - DNA, 25 bp, Homo sapien
gagcaaggtgacttggaaaggacag

SEQ ID NO: 5741317 - DNA, 25 bp, Homo sapien
tggtctcgaactcctgacctcaggt

SEQ ID NO: 5741318 - DNA, 25 bp, Homo sapien
caccacctggagtttgggaagttcc

SEQ ID NO: 5741319 - DNA, 25 bp, Homo sapien
gtttcagaagatcgtggatgagtcc

SEQ ID NO: 5741320 - DNA, 25 bp, Homo sapien
gatgatgacagcctgcgacctgtct

SEQ ID NO: 5741321 - DNA, 25 bp, Homo sapien
gcaacggcgtggccgagctggccac

SEQ ID NO: 5741322 - DNA, 25 bp, Homo sapien
gcccagcacccaagtcttcaacctg

SEQ ID NO: 5741323 - DNA, 25 bp, Homo sapien
attcgtgtacaaggagttctctcgt

SEQ ID NO: 5741324 - DNA, 25 bp, Homo sapien
ggcggcccagcacccaagtcttcaa

SEQ ID NO: 5741325 - DNA, 25 bp, Homo sapien
atgacatcgaccaccgcggcaccaa

SEQ ID NO: 5741326 - DNA, 25 bp, Homo sapien
gagaccctgaacatctaccagaacc

SEQ ID NO: 5741327 - DNA, 25 bp, Homo sapien
gtagctgggactacaggcgcccacc

SEQ ID NO: 5741328 - DNA, 25 bp, Homo sapien
caatcttcacccactaggatttggg

SEQ ID NO: 5741329 - DNA, 25 bp, Homo sapien
acggcttcaacgtggcccagacgat

SEQ ID NO: 5741330 - DNA, 25 bp, Homo sapien
ctgggactacaggcgcccaccacca

SEQ ID NO: 5741331 - DNA, 25 bp, Homo sapien
tttggagcggcaccacctggagttt

SEQ ID NO: 5741332 - DNA, 25 bp, Homo sapien
cgtggctcagaccaaaaagatggtg

SEQ ID NO: 5741333 - DNA, 25 bp, Homo sapien
tcaagcgattctcgtgcctcagcct

SEQ ID NO: 5741334 - DNA, 25 bp, Homo sapien
tcttcatgtaccgccagcgcaacgg

SEQ ID NO: 5741335 - DNA, 25 bp, Homo sapien
tcaaatttcaggaaggggccctgga

SEQ ID NO: 5741336 - DNA, 25 bp, Homo sapien
gcccagcctgtttttataaactgaa

SEQ ID NO: 5741337 - DNA, 25 bp, Homo sapien
aagatgtgttcttgaagtacctgaa

SEQ ID NO: 5741338 - DNA, 25 bp, Homo sapien
gccctggccagcggccttccaagct

SEQ ID NO: 5741339 - DNA, 25 bp, Homo sapien
cgagaggcagttccacaaggccttc

SEQ ID NO: 5741340 - DNA, 25 bp, Homo sapien
ctccacggcaaggaggagatcaagg

SEQ ID NO: 5741341 - DNA, 25 bp, Homo sapien
gatctcagctcactgcaacctccac

SEQ ID NO: 5741342 - DNA, 25 bp, Homo sapien
ttccacaaggccttctacacggtgc

SEQ ID NO: 5741343 - DNA, 25 bp, Homo sapien
ccaccaccacacatggctaattttt

SEQ ID NO: 5741344 - DNA, 25 bp, Homo sapien
gtggccgagctggccaccaggcttt

SEQ ID NO: 5741345 - DNA, 25 bp, Homo sapien
cgtgcctggagcagcagcgtctcca

SEQ ID NO: 5741346 - DNA, 25 bp, Homo sapien
catcgacttcgtgtgcacattcgtg

SEQ ID NO: 5741347 - DNA, 25 bp, Homo sapien
catcctccacggcaaggaggagatc

SEQ ID NO: 5741348 - DNA, 25 bp, Homo sapien
taaactgaagccaactgtgaataaa

SEQ ID NO: 5741349 - DNA, 25 bp, Homo sapien
tcggggtcgtgggccacgtggctca

SEQ ID NO: 5741350 - DNA, 25 bp, Homo sapien
tcgacttcgtgtgcacattcgtgta

SEQ ID NO: 5741351 - DNA, 25 bp, Homo sapien
agctcactgactacaagacaaagaa

SEQ ID NO: 5741352 - DNA, 25 bp, Homo sapien
tctgccatcaccaagccctgggaag

SEQ ID NO: 5741353 - DNA, 25 bp, Homo sapien
caccaggcttttcagcgtgcagccg

SEQ ID NO: 5741354 - DNA, 25 bp, Homo sapien
aaaagatggtgaacgtcgaggacgt

SEQ ID NO: 5741355 - DNA, 25 bp, Homo sapien
gcgccgcggccaggtgctgctgtgg

SEQ ID NO: 5741356 - DNA, 25 bp, Homo sapien
ttcgccatggtgacagccggcctgt

SEQ ID NO: 5741357 - DNA, 25 bp, Homo sapien
accaacaacctgtaccagatgaagt

SEQ ID NO: 5741358 - DNA, 25 bp, Homo sapien
ggcgctgctggagctggtgcaggat

SEQ ID NO: 5741359 - DNA, 25 bp, Homo sapien
gacatggtcctttaccacgtgaagt

SEQ ID NO: 5741360 - DNA, 25 bp, Homo sapien
cctaccacaactggcgccacggctt

SEQ ID NO: 5741361 - DNA, 25 bp, Homo sapien
gatgagtatgaggccaaagtgaagg

SEQ ID NO: 5741362 - DNA, 25 bp, Homo sapien
agcgatgtttcagaagatcgtggat

SEQ ID NO: 5741363 - DNA, 25 bp, Homo sapien
agtacctgtccctggagacgacccg

SEQ ID NO: 5741364 - DNA, 25 bp, Homo sapien
gtgaagtgcgacagggacgagatcc

SEQ ID NO: 5741365 - DNA, 25 bp, Homo sapien
catgaatgcttccgctgacgaaatg

SEQ ID NO: 5741366 - DNA, 25 bp, Homo sapien
atctaccagaacctgaaccggcggc

SEQ ID NO: 5741367 - DNA, 25 bp, Homo sapien
tttgctacaagaggttaggaagccc

SEQ ID NO: 5741368 - DNA, 25 bp, Homo sapien
acaggacgaggttctcatggagtcc

SEQ ID NO: 5741369 - DNA, 25 bp, Homo sapien
ctcaatcttcacccactaggatttg

SEQ ID NO: 5741370 - DNA, 25 bp, Homo sapien
cctcctgcaggccgaccgctgcagc

SEQ ID NO: 5741371 - DNA, 25 bp, Homo sapien
gaatatgctggccacacccatcatg

SEQ ID NO: 5741372 - DNA, 25 bp, Homo sapien
ggcagcacgatcacgtgatccacct

SEQ ID NO: 5741373 - DNA, 25 bp, Homo sapien
catcatgaatggcaaagacgtcgtg

SEQ ID NO: 5741374 - DNA, 25 bp, Homo sapien
acaactggcgccacggcttcaacgt

SEQ ID NO: 5741375 - DNA, 25 bp, Homo sapien
gtcttcccactggacatcggggtcg

SEQ ID NO: 5741376 - DNA, 25 bp, Homo sapien
ggctgatgagtatgaggccaaagtg

SEQ ID NO: 5741377 - DNA, 25 bp, Homo sapien
caagctgcaagtgggcttcatcgac

SEQ ID NO: 5741378 - DNA, 25 bp, Homo sapien
agctactacacggacctggaggcct

SEQ ID NO: 5741379 - DNA, 25 bp, Homo sapien
gcagttccacaaggccttctacacg

SEQ ID NO: 5741380 - DNA, 25 bp, Homo sapien
tcgtcagcggaagcattcatgatgt

SEQ ID NO: 5741381 - DNA, 25 bp, Homo sapien
acgtagcttggaaggccgctggcca

SEQ ID NO: 5741382 - DNA, 25 bp, Homo sapien
gatgccacatttgaccaggtccagt

SEQ ID NO: 5741383 - DNA, 25 bp, Homo sapien
agcatattctttgtcttgtagtcag

SEQ ID NO: 5741384 - DNA, 25 bp, Homo sapien
tcgtcctcatcgcagtcagcaggct

SEQ ID NO: 5741385 - DNA, 25 bp, Homo sapien
cgtctgggccacgttgaagccgtgg

SEQ ID NO: 5741386 - DNA, 25 bp, Homo sapien
acattctcagggctcagtttcttcc

SEQ ID NO: 5741387 - DNA, 25 bp, Homo sapien
ttcgtagatgtcaaatgtggtgggc

SEQ ID NO: 5741388 - DNA, 25 bp, Homo sapien
agcccacttgcagcttggggagctc

SEQ ID NO: 5741389 - DNA, 25 bp, Homo sapien
cggctgtcaccatggcgaaggcctc

SEQ ID NO: 5741390 - DNA, 25 bp, Homo sapien
tggtaaaggaccatgtcctgtgcga

SEQ ID NO: 5741391 - DNA, 25 bp, Homo sapien
gcaaatttctgtgcctttcttggct

SEQ ID NO: 5741392 - DNA, 25 bp, Homo sapien
ctgaaaatacaaaaattagccatgt

SEQ ID NO: 5741393 - DNA, 25 bp, Homo sapien
gtaccctttgctgatggagaacagg

SEQ ID NO: 5741394 - DNA, 25 bp, Homo sapien
cggtcatgagcagcgtgaacatcgt

SEQ ID NO: 5741395 - DNA, 25 bp, Homo sapien
gggaccagtgctcacaggatacagc

SEQ ID NO: 5741396 - DNA, 25 bp, Homo sapien
ttaaaatatccagaatgatcttcag

SEQ ID NO: 5741397 - DNA, 25 bp, Homo sapien
tctgggccacgttgaagccgtggcg

SEQ ID NO: 5741398 - DNA, 25 bp, Homo sapien
ttccccaggcgcgctctggttggca

SEQ ID NO: 5741399 - DNA, 25 bp, Homo sapien
atacagcaggttgaagacttgggtg

SEQ ID NO: 5741400 - DNA, 25 bp, Homo sapien
aggtcgcaggctgtcatcatcatgg

SEQ ID NO: 5741401 - DNA, 25 bp, Homo sapien
gtggagcttagccaaggggttctgg

SEQ ID NO: 5741402 - DNA, 25 bp, Homo sapien
gggttctgggacttcatctggtaca

SEQ ID NO: 5741403 - DNA, 25 bp, Homo sapien
actccacccagctcttcttgtcctg

SEQ ID NO: 5741404 - DNA, 25 bp, Homo sapien
ggtgggccctggcagctcctccttc

SEQ ID NO: 5741405 - DNA, 25 bp, Homo sapien
cacccgtcctcgcaggccgcggcca

SEQ ID NO: 5741406 - DNA, 25 bp, Homo sapien
tggttggcaggatgagctggatctc

SEQ ID NO: 5741407 - DNA, 25 bp, Homo sapien
ttcaggaagctgaggcgggtgatca

SEQ ID NO: 5741408 - DNA, 25 bp, Homo sapien
ctcccagaactcagcagccacgaga

SEQ ID NO: 5741409 - DNA, 25 bp, Homo sapien
tgtactgaaaatacaaaaattagcc

SEQ ID NO: 5741410 - DNA, 25 bp, Homo sapien
gctgaagtgagggcactcggccacg

SEQ ID NO: 5741411 - DNA, 25 bp, Homo sapien
gtcgcaggctgtcatcatcatggcc

SEQ ID NO: 5741412 - DNA, 25 bp, Homo sapien
cgccgttgcgctggcggtacatgaa

SEQ ID NO: 5741413 - DNA, 25 bp, Homo sapien
aggtccgtggcgatgatggcgatgt

SEQ ID NO: 5741414 - DNA, 25 bp, Homo sapien
cctggcagaggtcccggaggctgtc

SEQ ID NO: 5741415 - DNA, 25 bp, Homo sapien
tttctgccacgtagcttggaaggcc

SEQ ID NO: 5741416 - DNA, 25 bp, Homo sapien
acaatctcctccttcttgttgacga

SEQ ID NO: 5741417 - DNA, 25 bp, Homo sapien
cagcacagaccacacgtcaaaaaat

SEQ ID NO: 5741418 - DNA, 25 bp, Homo sapien
cctggtggccagctcggccacgccg

SEQ ID NO: 5741419 - DNA, 25 bp, Homo sapien
cagcgtgaacatcgtctgggccacg

SEQ ID NO: 5741420 - DNA, 25 bp, Homo sapien
ctttgtcttgtagtcagtgagctcg

SEQ ID NO: 5741421 - DNA, 25 bp, Homo sapien
gaatgatcttcagtcattttcttgg

SEQ ID NO: 5741422 - DNA, 25 bp, Homo sapien
tgtacacgaatgtgcacacgaagtc

SEQ ID NO: 5741423 - DNA, 25 bp, Homo sapien
tagatgttcagggtctcctccgaga

SEQ ID NO: 5741424 - DNA, 25 bp, Homo sapien
gaaggccgctggccagggcccagtg

SEQ ID NO: 5741425 - DNA, 25 bp, Homo sapien
gcacttcacgtggtaaaggaccatg

SEQ ID NO: 5741426 - DNA, 25 bp, Homo sapien
cctgttcgtcaaagggcttcccgtc

SEQ ID NO: 5741427 - DNA, 25 bp, Homo sapien
gaacaggaaccgcaccaggacctcc

SEQ ID NO: 5741428 - DNA, 25 bp, Homo sapien
gaaggccttgtggaactgcctctcg

SEQ ID NO: 5741429 - DNA, 25 bp, Homo sapien
tgctgatggagaacaggaaccgcac

SEQ ID NO: 5741430 - DNA, 25 bp, Homo sapien
cgggcctgctcctcactgaggctca

SEQ ID NO: 5741431 - DNA, 25 bp, Homo sapien
aatttgaacatttcgtcagcggaag

SEQ ID NO: 5741432 - DNA, 25 bp, Homo sapien
cctcgacgttcaccatctttttggt

SEQ ID NO: 5741433 - DNA, 25 bp, Homo sapien
ggtgattctccggtaccctttgctg

SEQ ID NO: 5741434 - DNA, 25 bp, Homo sapien
acagcacattcttgatgagccaccc

SEQ ID NO: 5741435 - DNA, 25 bp, Homo sapien
cccagctcgtcctcatcgcagtcag

SEQ ID NO: 5741436 - DNA, 25 bp, Homo sapien
agcctgcccaatatggtgaaacccc

SEQ ID NO: 5741437 - DNA, 25 bp, Homo sapien
ggccacattctcagggctcagtttc

SEQ ID NO: 5741438 - DNA, 25 bp, Homo sapien
gtccagtgggaagacgatctcggag

SEQ ID NO: 5741439 - DNA, 25 bp, Homo sapien
acaggcagaacccaaatcctagtgg

SEQ ID NO: 5741440 - DNA, 25 bp, Homo sapien
gctcgtagtacatctggatgccaca

SEQ ID NO: 5741441 - DNA, 25 bp, Homo sapien
ctcgcaggccgcggccacattctca

SEQ ID NO: 5741442 - DNA, 25 bp, Homo sapien
gcgactcccacaatctcctccttct

SEQ ID NO: 5741443 - DNA, 25 bp, Homo sapien
gagaatcgcttgaacctgggaggtg

SEQ ID NO: 5741444 - DNA, 25 bp, Homo sapien
aatcggggttctggtccagaaagct

SEQ ID NO: 5741445 - DNA, 25 bp, Homo sapien
atagatcttcaggtacaacgtggca

SEQ ID NO: 5741446 - DNA, 25 bp, Homo sapien
acttcacgtggtaaaggaccatgtc

SEQ ID NO: 5741447 - DNA, 25 bp, Homo sapien
caggttctggtagatgttcagggtc

SEQ ID NO: 5741448 - DNA, 25 bp, Homo sapien
ggtacttcaagaacacatcttcgtc

SEQ ID NO: 5741449 - DNA, 25 bp, Homo sapien
cacgtgatcgtgctgccgccggttc

SEQ ID NO: 5741450 - DNA, 25 bp, Homo sapien
aacctcgtcctgttcgtcaaagggc

SEQ ID NO: 5741451 - DNA, 25 bp, Homo sapien
ttacaaataaagccgctttctgcca

SEQ ID NO: 5741452 - DNA, 25 bp, Homo sapien
aaattagccatgtgtggtggtgggc

SEQ ID NO: 5741453 - DNA, 25 bp, Homo sapien
gaacacatcttcgtcttcgctggtg

SEQ ID NO: 5741454 - DNA, 25 bp, Homo sapien
aggatgagctggatctcgtccctgt

SEQ ID NO: 5741455 - DNA, 25 bp, Homo sapien
gtcctgtgcgatgtccttgcggttc

SEQ ID NO: 5741456 - DNA, 25 bp, Homo sapien
ggctgctgatccaagactgtccttt

SEQ ID NO: 5741457 - DNA, 25 bp, Homo sapien
gtcctccaggacgctgtccggctgc

SEQ ID NO: 5741458 - DNA, 25 bp, Homo sapien
aagtcgatgaagcccacttgcagct

SEQ ID NO: 5741459 - DNA, 25 bp, Homo sapien
agcaagactccatctcaaaaaaaaa

SEQ ID NO: 5741460 - DNA, 25 bp, Homo sapien
tctcagggctcagtttcttcccaaa

SEQ ID NO: 5741461 - DNA, 25 bp, Homo sapien
tgtggtaggtgattctccggtaccc

SEQ ID NO: 5741462 - DNA, 25 bp, Homo sapien
actccatgagaacctcgtcctgttc

SEQ ID NO: 5741463 - DNA, 25 bp, Homo sapien
accacgcgctccatgttgatgctct

SEQ ID NO: 5741464 - DNA, 25 bp, Homo sapien
aacctgggaggtggaggttgcagtg

SEQ ID NO: 5741465 - DNA, 25 bp, Homo sapien
caaggggttctgggacttcatctgg

SEQ ID NO: 5741466 - DNA, 25 bp, Homo sapien
gatcactttgtagaagacaatttcc

SEQ ID NO: 5741467 - DNA, 25 bp, Homo sapien
cgatgaagcccacttgcagcttggg

SEQ ID NO: 5741468 - DNA, 25 bp, Homo sapien
atcataggaatgggctgctgatcca

SEQ ID NO: 5741469 - DNA, 25 bp, Homo sapien
tgcctctcgatgtccgtcagctcct

SEQ ID NO: 5741470 - DNA, 25 bp, Homo sapien
ctgatggagaacaggaaccgcacca

SEQ ID NO: 5741471 - DNA, 25 bp, Homo sapien
cggggggcaccaggcagtcctccag

SEQ ID NO: 5741472 - DNA, 25 bp, Homo sapien
ctcctccacctggcagaggtcccgg

SEQ ID NO: 5741473 - DNA, 25 bp, Homo sapien
tagtcccagctactcaggaggctga

SEQ ID NO: 5741474 - DNA, 25 bp, Homo sapien
gcagaggtcccggaggctgtcgcag

SEQ ID NO: 5741475 - DNA, 25 bp, Homo sapien
ctttcctgttgtaaaatgtggcgac

SEQ ID NO: 5741476 - DNA, 25 bp, Homo sapien
aaacaggctgggcgtggtggctcat

SEQ ID NO: 5741477 - DNA, 25 bp, Homo sapien
tggagacgctgctgctccaggcacg

SEQ ID NO: 5741478 - DNA, 25 bp, Homo sapien
cagctcctccttcaggatttcgccc

SEQ ID NO: 5741479 - DNA, 25 bp, Homo sapien
tctccttccgggtcgtctccaggga

SEQ ID NO: 5741480 - DNA, 25 bp, Homo sapien
cagcaggctccttccccaggcgcgc

SEQ ID NO: 5741481 - DNA, 25 bp, Homo sapien
gaagaggctgcagcggtcggcctgc

SEQ ID NO: 5741482 - DNA, 25 bp, Homo sapien
gaacatcgtctgggccacgttgaag

SEQ ID NO: 5741483 - DNA, 25 bp, Homo sapien
tttttttgtaggctacagtttattc

SEQ ID NO: 5741484 - DNA, 25 bp, Homo sapien
gcggcgcgtctcgcagttgtggagg

SEQ ID NO: 5741485 - DNA, 25 bp, Homo sapien
gctactcaggaggctgaggcacgag

SEQ ID NO: 5741486 - DNA, 25 bp, Homo sapien
tgcaggagggtgcagaggcgccgca

SEQ ID NO: 5741487 - DNA, 25 bp, Homo sapien
cggtccatcataggaatgggctgct

SEQ ID NO: 5741488 - DNA, 25 bp, Homo sapien
cttggtgatggcagacaggtcgcag

SEQ ID NO: 5741489 - DNA, 25 bp, Homo sapien
tggtcgatgtcatggcacaggccgg

SEQ ID NO: 5741490 - DNA, 25 bp, Homo sapien
tcgaggagccgtggagcttagccaa

SEQ ID NO: 5741491 - DNA, 25 bp, Homo sapien
tgttcatcttgtcgtaggtgtcggt

SEQ ID NO: 5741492 - DNA, 25 bp, Homo sapien
acaacgtggcaaaattcaggtactt

SEQ ID NO: 5741493 - DNA, 25 bp, Homo sapien
tccaggtggtgccgctccaaaatcg

SEQ ID NO: 5741494 - DNA, 25 bp, Homo sapien
agagcaagactccatctcaaaaaaa

SEQ ID NO: 5741495 - DNA, 25 bp, Homo sapien
aggtccagttcggtgcactccaggt

SEQ ID NO: 5741496 - DNA, 25 bp, Homo sapien
cacacgaagtcgatgaagcccactt

SEQ ID NO: 5741497 - DNA, 25 bp, Homo sapien
cttcaagaacacatcttcgtcttcg

SEQ ID NO: 5741498 - DNA, 25 bp, Homo sapien
acagcagcacctggccgcggcgcgt

SEQ ID NO: 5741499 - DNA, 25 bp, Homo sapien
tcatgtccaggaggcccacggagta

SEQ ID NO: 5741500 - DNA, 25 bp, Homo sapien
tccacccagctcttcttgtcctggt

SEQ ID NO: 5741501 - DNA, 25 bp, Homo sapien
gtggaaacgagagaactccttgtac

SEQ ID NO: 5741502 - DNA, 25 bp, Homo sapien
ggctcagtttcttcccaaagtactg

SEQ ID NO: 5741503 - DNA, 25 bp, Homo sapien
aaactccaggtggtgccgctccaaa

SEQ ID NO: 5741504 - DNA, 25 bp, Homo sapien
tccactctttcctattgttctgcag

SEQ ID NO: 5741505 - DNA, 25 bp, Homo sapien
ctccagcctgggtgacagagcaaga

SEQ ID NO: 5741506 - DNA, 25 bp, Homo sapien
tttcttgggcttcctaacctcttgt

SEQ ID NO: 5741507 - DNA, 25 bp, Homo sapien
cctccacctggcagaggtcccggag

SEQ ID NO: 5741508 - DNA, 25 bp, Homo sapien
cagtttcttcccaaagtactggcgg

SEQ ID NO: 5741509 - DNA, 25 bp, Homo sapien
tgggccctggcagctcctccttcag

SEQ ID NO: 5741510 - DNA, 25 bp, Homo sapien
cctgggaggtggaggttgcagtgag

SEQ ID NO: 5741511 - DNA, 25 bp, Homo sapien
gtgtgggaatgaccttgatctcctc

SEQ ID NO: 5741512 - DNA, 25 bp, Homo sapien
cggtcgaacatgggcaggatctctt

SEQ ID NO: 5741513 - DNA, 25 bp, Homo sapien
ctgaaacatcgctctcttcttgaag

SEQ ID NO: 5741514 - DNA, 25 bp, Homo sapien
caagtcaccttgctcccagaactca

SEQ ID NO: 5741515 - DNA, 25 bp, Homo sapien
cggccacgccgttgcgctggcggta

SEQ ID NO: 5741516 - DNA, 25 bp, Homo sapien
tggcgactcccacaatctcctcctt

SEQ ID NO: 5741517 - DNA, 25 bp, Homo sapien
tggcacaggccggctgtcaccatgg

SEQ ID NO: 5741518 - DNA, 25 bp, Homo sapien
ttcggtgcactccaggtcagagaag

SEQ ID NO: 5741519 - DNA, 25 bp, Homo sapien
cacgaccccgatgtccagtgggaag

SEQ ID NO: 5741520 - DNA, 25 bp, Homo sapien
gttgtggtaggtgattctccggtac

SEQ ID NO: 5741521 - DNA, 25 bp, Homo sapien
caagactccatctcaaaaaaaaaaa

SEQ ID NO: 5741522 - DNA, 25 bp, Homo sapien
gatggagaacaggaaccgcaccagg

SEQ ID NO: 5741523 - DNA, 25 bp, Homo sapien
aagccgtggcgccagttgtggtagg

SEQ ID NO: 5741524 - DNA, 25 bp, Homo sapien
gggcttcctaacctcttgtagcaaa

SEQ ID NO: 5741525 - DNA, 25 bp, Homo sapien
agaccacacgtcaaaaaattccttc

SEQ ID NO: 5741526 - DNA, 25 bp, Homo sapien
aggctgaggcacgagaatcgcttga

SEQ ID NO: 5741527 - DNA, 25 bp, Homo sapien
gatcttcagtcattttcttgggctt

SEQ ID NO: 5741528 - DNA, 25 bp, Homo sapien
ggacttcatctggtacaggttgttg

SEQ ID NO: 5741529 - DNA, 25 bp, Homo sapien
atgggtgtggccagcatattctttg

SEQ ID NO: 5741530 - DNA, 25 bp, Homo sapien
cctgcccaatatggtgaaaccccat

SEQ ID NO: 5741531 - DNA, 25 bp, Homo sapien
tcctccttgccgtggaggatgtagt

SEQ ID NO: 5741532 - DNA, 25 bp, Homo sapien
ttctggtagatgttcagggtctcct

SEQ ID NO: 5741533 - DNA, 25 bp, Homo sapien
attcatgatgttacaaataaagccg

SEQ ID NO: 5741534 - DNA, 25 bp, Homo sapien
cgtgtagaaggccttgtggaactgc

SEQ ID NO: 5741535 - DNA, 25 bp, Homo sapien
tctgagccacgtggcccacgacccc

SEQ ID NO: 5741536 - DNA, 25 bp, Homo sapien
agcctgggtgacagagcaagactcc

SEQ ID NO: 5741537 - DNA, 25 bp, Homo sapien
gccgctccaaaatcgaggagccgtg

SEQ ID NO: 5741538 - DNA, 25 bp, Homo sapien
aaaattccttctccttggtcatgtc

SEQ ID NO: 5741539 - DNA, 25 bp, Homo sapien
gtaggcccgcaccgtgtagaaggcc

SEQ ID NO: 5741540 - DNA, 25 bp, Homo sapien
gacgatgggcatggacagcacattc

SEQ ID NO: 5741541 - DNA, 25 bp, Homo sapien
cacacgtcaaaaaattccttctcct

SEQ ID NO: 5741542 - DNA, 25 bp, Homo sapien
aggaaccgcaccaggacctcctggg

SEQ ID NO: 5741543 - DNA, 25 bp, Homo sapien
agagaagtggaattcgtagatgtca

SEQ ID NO: 5741544 - DNA, 25 bp, Homo sapien
ggatctcgtccctgtcgcacttcac

SEQ ID NO: 5741545 - DNA, 25 bp, Homo sapien
aggagttcgagaccagcctgcccaa

SEQ ID NO: 5741546 - DNA, 25 bp, Homo sapien
tcaggtggatcacgtgatcgtgctg

SEQ ID NO: 5741547 - DNA, 25 bp, Homo sapien
gcacagaccacacgtcaaaaaattc

SEQ ID NO: 5741548 - DNA, 25 bp, Homo sapien
gaggctgtcgcagtccggcgggcac

SEQ ID NO: 5741549 - DNA, 25 bp, Homo sapien
gcagacaggtcgcaggctgtcatca

SEQ ID NO: 5741550 - DNA, 25 bp, Homo sapien
cggtacatgaagaggctgcagcggt

SEQ ID NO: 5741551 - DNA, 25 bp, Homo sapien
cgcttgaacctgggaggtggaggtt

SEQ ID NO: 5741552 - DNA, 25 bp, Homo sapien
aagactgtcctttccaagtcacctt

SEQ ID NO: 5741553 - DNA, 25 bp, Homo sapien
cgagtacggctgggactctcccatc

SEQ ID NO: 5741554 - DNA, 25 bp, Homo sapien
gccttccactctttcctattgttct

SEQ ID NO: 5741555 - DNA, 25 bp, Homo sapien
accaggcagtcctccaggacgctgt

SEQ ID NO: 5741556 - DNA, 25 bp, Homo sapien
ctacagtttattcacagttggcttc

SEQ ID NO: 5741557 - DNA, 25 bp, Homo sapien
gctgcctgtccctggagacgctgct

SEQ ID NO: 5741558 - DNA, 25 bp, Homo sapien
agctcggccacgccgttgcgctggc

SEQ ID NO: 5741559 - DNA, 25 bp, Homo sapien
gttggcttcagtttataaaaacagg

SEQ ID NO: 5741560 - DNA, 25 bp, Homo sapien
gctggtgaagaatgggccgttgagc

SEQ ID NO: 5741561 - DNA, 25 bp, Homo sapien
tagggtccccatgggaccagtgctc

SEQ ID NO: 5741562 - DNA, 25 bp, Homo sapien
tcaggagttcgagaccagcctgccc

SEQ ID NO: 5741563 - DNA, 25 bp, Homo sapien
cccagctactcaggaggctgaggca

SEQ ID NO: 5741564 - DNA, 25 bp, Homo sapien
atgggcatggacagcacattcttga

SEQ ID NO: 5741565 - DNA, 25 bp, Homo sapien
ccatcaggcgtgcgtgggcccgagt

SEQ ID NO: 5741566 - DNA, 25 bp, Homo sapien
tgcgatgtccttgcggttctccagc

SEQ ID NO: 5741567 - DNA, 25 bp, Homo sapien
ttcttgttgacgatgggcatggaca

SEQ ID NO: 5741568 - DNA, 25 bp, Homo sapien
ttggtgccgcggtggtcgatgtcat

SEQ ID NO: 5741569 - DNA, 25 bp, Homo sapien
tgccgcggtggtcgatgtcatggca

SEQ ID NO: 5741570 - DNA, 25 bp, Homo sapien
tcctagtgggtgaagattgagggag

SEQ ID NO: 5741571 - DNA, 25 bp, Homo sapien
ttgaagacttgggtgctgggccgcc

SEQ ID NO: 5741572 - DNA, 25 bp, Homo sapien
ccggcgggcacccgtcctcgcaggc

SEQ ID NO: 5741573 - DNA, 25 bp, Homo sapien
ccacgtggcccacgaccccgatgtc

SEQ ID NO: 5741574 - DNA, 25 bp, Homo sapien
actttcggaccacgcccagctcgta

SEQ ID NO: 5741575 - DNA, 25 bp, Homo sapien
tgccacgtagcttggaaggccgctg

SEQ ID NO: 5741576 - DNA, 25 bp, Homo sapien
tcaccatggcgaaggcctccaggtc

SEQ ID NO: 5741577 - DNA, 25 bp, Homo sapien
ttgaagaccacgcgctccatgttga

SEQ ID NO: 5741578 - DNA, 25 bp, Homo sapien
acttgggtgctgggccgccattgca

SEQ ID NO: 5741579 - DNA, 25 bp, Homo sapien
ccaggtccagttcggtgcactccag

SEQ ID NO: 5741580 - DNA, 25 bp, Homo sapien
gtacaggttgttggtgccgcggtgg

SEQ ID NO: 5741581 - DNA, 25 bp, Homo sapien
gcatatcctgcaccagctccagcag

SEQ ID NO: 5741582 - DNA, 25 bp, Homo sapien
agctccagcagcgccgtgctctcct

SEQ ID NO: 5741583 - DNA, 25 bp, Homo sapien
tctggatgccacatttgaccaggtc

SEQ ID NO: 5741584 - DNA, 25 bp, Homo sapien
atgtcctgtgcgatgtccttgcggt

SEQ ID NO: 5741585 - DNA, 25 bp, Homo sapien
agcaggaacttcccaaactccaggt

SEQ ID NO: 5741586 - DNA, 25 bp, Homo sapien
ccgtggagcttagccaaggggttct

SEQ ID NO: 5741587 - DNA, 25 bp, Homo sapien
gtcggtcgaacatgggcaggatctc

SEQ ID NO: 5741588 - DNA, 25 bp, Homo sapien
aggccgctggccagggcccagtgat

SEQ ID NO: 5741589 - DNA, 25 bp, Homo sapien
gagaccagcctgcccaatatggtga

SEQ ID NO: 5741590 - DNA, 25 bp, Homo sapien
cgcccagctcgtagtacatctggat

SEQ ID NO: 5741591 - DNA, 25 bp, Homo sapien
gtcagtgagctcgtcagcaaatgag

SEQ ID NO: 5741592 - DNA, 25 bp, Homo sapien
ggtcaggagttcgagaccagcctgc

SEQ ID NO: 5741593 - DNA, 25 bp, Homo sapien
cgtggcgccagttgtggtaggtgat

SEQ ID NO: 5741594 - DNA, 25 bp, Homo sapien
catgcctgtaatcccagcacttcag

SEQ ID NO: 5741595 - DNA, 25 bp, Homo sapien
aacttcccaaactccaggtggtgcc

SEQ ID NO: 5741596 - DNA, 25 bp, Homo sapien
cttgtacacgaatgtgcacacgaag

SEQ ID NO: 5741597 - DNA, 25 bp, Homo sapien
ctccttcttgttgacgatgggcatg

SEQ ID NO: 5741598 - DNA, 25 bp, Homo sapien
agagcaggaacttcccaaactccag

SEQ ID NO: 5741599 - DNA, 25 bp, Homo sapien
gggagccatagggtccccatgggac

SEQ ID NO: 5741600 - DNA, 25 bp, Homo sapien
tttcttcccaaagtactggcgggca

SEQ ID NO: 5741601 - DNA, 25 bp, Homo sapien
tcccacaatctcctccttcttgttg

SEQ ID NO: 5741602 - DNA, 25 bp, Homo sapien
tccaggacgctgtccggctgcacgc

SEQ ID NO: 5741603 - DNA, 25 bp, Homo sapien
gaccagtgctcacaggatacagcag

SEQ ID NO: 5741604 - DNA, 25 bp, Homo sapien
cttgttggccgaccacagcagcacc

SEQ ID NO: 5741605 - DNA, 25 bp, Homo sapien
tctggttggcaggatgagctggatc

SEQ ID NO: 5741606 - DNA, 25 bp, Homo sapien
gcatggacagcacattcttgatgag

SEQ ID NO: 5741607 - DNA, 25 bp, Homo sapien
aggttgcagtgagctgagatcgtgc

SEQ ID NO: 5741608 - DNA, 25 bp, Homo sapien
catcaggtggatcacgtgatcgtgc

SEQ ID NO: 5741609 - DNA, 25 bp, Homo sapien
cgatgatggcgatgtccatcaggtg

SEQ ID NO: 5741610 - DNA, 25 bp, Homo sapien
ctggcggtacatgaagaggctgcag

SEQ ID NO: 5741611 - DNA, 25 bp, Homo sapien
cacccagctcttcttgtcctggtag

SEQ ID NO: 5741612 - DNA, 25 bp, Homo sapien
aatttcccggccatcaggcgtgcgt

SEQ ID NO: 5741613 - DNA, 25 bp, Homo sapien
caggagggtgcagaggcgccgcagg

SEQ ID NO: 5741614 - DNA, 25 bp, Homo sapien
tgcgctggcggtacatgaagaggct

SEQ ID NO: 5741615 - DNA, 25 bp, Homo sapien
acatttgaccaggtccagttcggtg

SEQ ID NO: 5741616 - DNA, 25 bp, Homo sapien
ctgaaatttgaacatttcgtcagcg

SEQ ID NO: 5741617 - DNA, 25 bp, Homo sapien
tggaggatgtagtcgatcactttgt

SEQ ID NO: 5741618 - DNA, 25 bp, Homo sapien
gaggatgtagtcgatcactttgtag

SEQ ID NO: 5741619 - DNA, 25 bp, Homo sapien
tgagcagcgtgaacatcgtctgggc

SEQ ID NO: 5741620 - DNA, 25 bp, Homo sapien
attagccatgtgtggtggtgggcgc

SEQ ID NO: 5741621 - DNA, 25 bp, Homo sapien
caatatggtgaaaccccatctgtac

SEQ ID NO: 5741622 - DNA, 25 bp, Homo sapien
cgtagatgtcaaatgtggtgggccc

SEQ ID NO: 5741623 - DNA, 25 bp, Homo sapien
ttctgtgcctttcttggctgccacc

SEQ ID NO: 5741624 - DNA, 25 bp, Homo sapien
agctcggccgccttgttccggtcca

SEQ ID NO: 5741625 - DNA, 25 bp, Homo sapien
gatggcgatgtccatcaggtggatc

SEQ ID NO: 5741626 - DNA, 25 bp, Homo sapien
gctgggactctcccatcagcacaga

SEQ ID NO: 5741627 - DNA, 25 bp, Homo sapien
ggtgaaaccccatctgtactgaaaa

SEQ ID NO: 5741628 - DNA, 25 bp, Homo sapien
ccaggtccgtgtagtagctcttcag

SEQ ID NO: 5741629 - DNA, 25 bp, Homo sapien
ctccttgccgtggaggatgtagtcg

SEQ ID NO: 5741630 - DNA, 25 bp, Homo sapien
gtcgatgaagcccacttgcagcttg

SEQ ID NO: 5741631 - DNA, 25 bp, Homo sapien
acgagagaactccttgtacacgaat

SEQ ID NO: 5741632 - DNA, 25 bp, Homo sapien
ggcgggcacccgtcctcgcaggccg

SEQ ID NO: 5741633 - DNA, 25 bp, Homo sapien
cgaacatgggcaggatctcttcgtg

SEQ ID NO: 5741634 - DNA, 25 bp, Homo sapien
tctcctccttgccgtggaggatgta

SEQ ID NO: 5741635 - DNA, 25 bp, Homo sapien
tggacttcccagggcttggtgatgg

SEQ ID NO: 5741636 - DNA, 25 bp, Homo sapien
ttgacgatgggcatggacagcacat

SEQ ID NO: 5741637 - DNA, 25 bp, Homo sapien
tccttgtacacgaatgtgcacacga

SEQ ID NO: 5741638 - DNA, 25 bp, Homo sapien
gcagttgtggaggtagctcaggtga

SEQ ID NO: 5741639 - DNA, 25 bp, Homo sapien
ttcaggttctggtagatgttcaggg

SEQ ID NO: 5741640 - DNA, 25 bp, Homo sapien
actgaccagcccaggaactgtgtca

SEQ ID NO: 5741641 - DNA, 25 bp, Homo sapien
gcgaccttgctctggacttcccagg

SEQ ID NO: 5741642 - DNA, 25 bp, Homo sapien
tgctctcctccacctggcagaggtc

SEQ ID NO: 5741643 - DNA, 25 bp, Homo sapien
tggcgatgtccatcaggtggatcac

SEQ ID NO: 5741644 - DNA, 25 bp, Homo sapien
caggatacagcaggttgaagacttg

SEQ ID NO: 5741645 - DNA, 25 bp, Homo sapien
ttcaccatctttttggtctgagcca

SEQ ID NO: 5741646 - DNA, 25 bp, Homo sapien
cagtcagcaggctccttccccaggc

SEQ ID NO: 5741647 - DNA, 25 bp, Homo sapien
ggaccacgcccagctcgtagtacat

SEQ ID NO: 5741648 - DNA, 25 bp, Homo sapien
gatcttctgaaacatcgctctcttc

SEQ ID NO: 5741649 - DNA, 25 bp, Homo sapien
tgggaagacgatctcggagtcgggg

SEQ ID NO: 5741650 - DNA, 25 bp, Homo sapien
gtcattttcttgggcttcctaacct

SEQ ID NO: 5741651 - DNA, 25 bp, Homo sapien
ggccgaccacagcagcacctggccg

SEQ ID NO: 5741652 - DNA, 25 bp, Homo sapien
catcttgtcgtaggtgtcggtgttc

SEQ ID NO: 5741653 - DNA, 25 bp, Homo sapien
ctgctgatccaagactgtcctttcc

SEQ ID NO: 5741654 - DNA, 25 bp, Homo sapien
ggtagatgttcagggtctcctccga

SEQ ID NO: 5741655 - DNA, 25 bp, Homo sapien
caggtacttcaagaacacatcttcg

SEQ ID NO: 5741656 - DNA, 25 bp, Homo sapien
gagggagccatagggtccccatggg

SEQ ID NO: 5741657 - DNA, 25 bp, Homo sapien
aaaccccatctgtactgaaaataca

SEQ ID NO: 5741658 - DNA, 25 bp, Homo sapien
tgctcccagaactcagcagccacga

SEQ ID NO: 5741659 - DNA, 25 bp, Homo sapien
cagtcggtcgaacatgggcaggatc

SEQ ID NO: 5741660 - DNA, 25 bp, Homo sapien
aggaccttgaagaccacgcgctcca

SEQ ID NO: 5741661 - DNA, 25 bp, Homo sapien
acttcaggaagctgaggcgggtgat

SEQ ID NO: 5741662 - DNA, 25 bp, Homo sapien
ttcactgccatgatcaccgccacga

SEQ ID NO: 5741663 - DNA, 25 bp, Homo sapien
ctgtcatcatcatggccatgacgat

SEQ ID NO: 5741664 - DNA, 25 bp, Homo sapien
ccagcagcgccgtgctctcctccac

SEQ ID NO: 5741665 - DNA, 25 bp, Homo sapien
atcgtgccacggcactccagcctgg

SEQ ID NO: 5741666 - DNA, 25 bp, Homo sapien
tgggcaggatctcttcgtggaaacg

SEQ ID NO: 5741667 - DNA, 25 bp, Homo sapien
atcatggccatgacgatctccttcc

SEQ ID NO: 5741668 - DNA, 25 bp, Homo sapien
atcagccagcgccttccactctttc

SEQ ID NO: 5741669 - DNA, 25 bp, Homo sapien
atgtggtgggccctggcagctcctc

SEQ ID NO: 5741670 - DNA, 25 bp, Homo sapien
aaatttctgtgcctttcttggctgc

SEQ ID NO: 5741671 - DNA, 25 bp, Homo sapien
ggcctgctcctcactgaggctcatg

SEQ ID NO: 5741672 - DNA, 25 bp, Homo sapien
tctggacttcccagggcttggtgat

SEQ ID NO: 5741673 - DNA, 25 bp, Homo sapien
tttcggaccacgcccagctcgtagt

SEQ ID NO: 5741674 - DNA, 25 bp, Homo sapien
tcaccttgctcccagaactcagcag

SEQ ID NO: 5741675 - DNA, 25 bp, Homo sapien
ctccagggacaggtactccacccag

SEQ ID NO: 5741676 - DNA, 25 bp, Homo sapien
cccagctcgtagtacatctggatgc

SEQ ID NO: 5741677 - DNA, 25 bp, Homo sapien
aagacgatctcggagtcggggggca

SEQ ID NO: 5741678 - DNA, 25 bp, Homo sapien
tcatcgcagtcagcaggctccttcc

SEQ ID NO: 5741679 - DNA, 25 bp, Homo sapien
aattcaggtacttcaagaacacatc

SEQ ID NO: 5741680 - DNA, 25 bp, Homo sapien
ccacggcactccagcctgggtgaca

SEQ ID NO: 5741681 - DNA, 25 bp, Homo sapien
ggaattcgtagatgtcaaatgtggt

SEQ ID NO: 5741682 - DNA, 25 bp, Homo sapien
tacttcaagaacacatcttcgtctt

SEQ ID NO: 5741683 - DNA, 25 bp, Homo sapien
cttgaagtacagggccaggtccgtg

SEQ ID NO: 5741684 - DNA, 25 bp, Homo sapien
gctgcagcggtcggcctgcaggagg

SEQ ID NO: 5741685 - DNA, 25 bp, Homo sapien
ccaggaggcccacggagtaccgctc

SEQ ID NO: 5741686 - DNA, 25 bp, Homo sapien
ttggggagctcggccgccttgttcc

SEQ ID NO: 5741687 - DNA, 25 bp, Homo sapien
tcatactcatcagccagcgccttcc

SEQ ID NO: 5741688 - DNA, 25 bp, Homo sapien
ccgtggcgatgatggcgatgtccat

SEQ ID NO: 5741689 - DNA, 25 bp, Homo sapien
aagctgaggcgggtgatcacctgag

SEQ ID NO: 5741690 - DNA, 25 bp, Homo sapien
cgcagtcagcaggctccttccccag

SEQ ID NO: 5741691 - DNA, 25 bp, Homo sapien
aatgtggcgactcccacaatctcct

SEQ ID NO: 5741692 - DNA, 25 bp, Homo sapien
tcaggtacaacgtggcaaaattcag

SEQ ID NO: 5741693 - DNA, 25 bp, Homo sapien
cagtgagctgagatcgtgccacggc

SEQ ID NO: 5741694 - DNA, 25 bp, Homo sapien
gtactccacccagctcttcttgtcc

SEQ ID NO: 5741695 - DNA, 25 bp, Homo sapien
tgaggcacgagaatcgcttgaacct

SEQ ID NO: 5741696 - DNA, 25 bp, Homo sapien
gagacgctgctgctccaggcacgca

SEQ ID NO: 5741697 - DNA, 25 bp, Homo sapien
ccagtgctcacaggatacagcaggt

SEQ ID NO: 5741698 - DNA, 25 bp, Homo sapien
ttcctattgttctgcagtcggtcga

SEQ ID NO: 5741699 - DNA, 25 bp, Homo sapien
gccgccggttcaggttctggtagat

SEQ ID NO: 5741700 - DNA, 25 bp, Homo sapien
ctctttcctattgttctgcagtcgg

SEQ ID NO: 5741701 - DNA, 25 bp, Homo sapien
tcctcgcaggccgcggccacattct

SEQ ID NO: 5741702 - DNA, 25 bp, Homo sapien
cgtcagctcctcaaacaccttgttg

SEQ ID NO: 5741703 - DNA, 25 bp, Homo sapien
tcgtggaaacgagagaactccttgt

SEQ ID NO: 5741704 - DNA, 25 bp, Homo sapien
ctggcgggcaaaatcggggttctgg

SEQ ID NO: 5741705 - DNA, 25 bp, Homo sapien
ttcatctggtacaggttgttggtgc

SEQ ID NO: 5741706 - DNA, 25 bp, Homo sapien
atactcatcagccagcgccttccac

SEQ ID NO: 5741707 - DNA, 25 bp, Homo sapien
tcgctctcttcttgaagtacagggc

SEQ ID NO: 5741708 - DNA, 25 bp, Homo sapien
caggatctcttcgtggaaacgagag

SEQ ID NO: 5741709 - DNA, 25 bp, Homo sapien
atcgtctgggccacgttgaagccgt

SEQ ID NO: 5741710 - DNA, 25 bp, Homo sapien
caaaatcggggttctggtccagaaa

SEQ ID NO: 5741711 - DNA, 25 bp, Homo sapien
agcaggttgaagacttgggtgctgg

SEQ ID NO: 5741712 - DNA, 25 bp, Homo sapien
ttgctctggacttcccagggcttgg

SEQ ID NO: 5741713 - DNA, 25 bp, Homo sapien
ggccgcggccacattctcagggctc

SEQ ID NO: 5741714 - DNA, 25 bp, Homo sapien
aggttgttggtgccgcggtggtcga

SEQ ID NO: 5741715 - DNA, 25 bp, Homo sapien
actccttgtacacgaatgtgcacac

SEQ ID NO: 5741716 - DNA, 25 bp, Homo sapien
gtccagttcggtgcactccaggtca

SEQ ID NO: 5741717 - DNA, 25 bp, Homo sapien
caggcgtgcgtgggcccgagtacgg

SEQ ID NO: 5741718 - DNA, 25 bp, Homo sapien
cccgatgtccagtgggaagacgatc

SEQ ID NO: 5741719 - DNA, 25 bp, Homo sapien
tccagggccccttcctgaaatttga

SEQ ID NO: 5741720 - DNA, 25 bp, Homo sapien
tgccacatttgaccaggtccagttc

SEQ ID NO: 5741721 - DNA, 25 bp, Homo sapien
ggaggctgaggcacgagaatcgctt

SEQ ID NO: 5741722 - DNA, 25 bp, Homo sapien
ggagccgtggagcttagccaagggg

SEQ ID NO: 5741723 - DNA, 25 bp, Homo sapien
gttgaggtaggcccgcaccgtgtag

SEQ ID NO: 5741724 - DNA, 25 bp, Homo sapien
tcctgggggatctggaactttcgga

SEQ ID NO: 5741725 - DNA, 25 bp, Homo sapien
gcaggctccttccccaggcgcgctc

SEQ ID NO: 5741726 - DNA, 25 bp, Homo sapien
agtgggtgaagattgagggagccat

SEQ ID NO: 5741727 - DNA, 25 bp, Homo sapien
tgaggcgggtgatcacctgaggtca

SEQ ID NO: 5741728 - DNA, 25 bp, Homo sapien
agccttcactttggcctcatactca

SEQ ID NO: 5741729 - DNA, 25 bp, Homo sapien
ctggtccagaaagctccgggcctgc

SEQ ID NO: 5741730 - DNA, 25 bp, Homo sapien
ttgccattcatgatgggtgtggcca

SEQ ID NO: 5741731 - DNA, 25 bp, Homo sapien
cctgtccctggagacgctgctgctc

SEQ ID NO: 5741732 - DNA, 25 bp, Homo sapien
atgtccttgcggttctccagcttgt

SEQ ID NO: 5741733 - DNA, 25 bp, Homo sapien
aagtacagggccaggtccgtggcga

SEQ ID NO: 5741734 - DNA, 25 bp, Homo sapien
cagcacctggccgcggcgcgtctcg

SEQ ID NO: 5741735 - DNA, 25 bp, Homo sapien
agggccaggtccgtggcgatgatgg

SEQ ID NO: 5741736 - DNA, 25 bp, Homo sapien
gaagcccacttgcagcttggggagc

SEQ ID NO: 5741737 - DNA, 25 bp, Homo sapien
ccaaactccaggtggtgccgctcca

SEQ ID NO: 5741738 - DNA, 25 bp, Homo sapien
ctgaggtcaggagttcgagaccagc

SEQ ID NO: 5741739 - DNA, 25 bp, Homo sapien
accgcaccaggacctcctgggggat

SEQ ID NO: 5741740 - DNA, 25 bp, Homo sapien
cctctcgatgtccgtcagctcctca

SEQ ID NO: 5741741 - DNA, 25 bp, Homo sapien
tgccacggcactccagcctgggtga

SEQ ID NO: 5741742 - DNA, 25 bp, Homo sapien
gcaggaccttgaagaccacgcgctc

SEQ ID NO: 5741743 - DNA, 25 bp, Homo sapien
ctgccgccggttcaggttctggtag

SEQ ID NO: 5741744 - DNA, 25 bp, Homo sapien
ccttcttgttgacgatgggcatgga

SEQ ID NO: 5741745 - DNA, 25 bp, Homo sapien
tgacgatctccttccgggtcgtctc

SEQ ID NO: 5741746 - DNA, 25 bp, Homo sapien
tgtccggctgcacgctgaaaagcct

SEQ ID NO: 5741747 - DNA, 25 bp, Homo sapien
cagtttgccggtcatgagcagcgtg

SEQ ID NO: 5741748 - DNA, 25 bp, Homo sapien
gtggaggttgcagtgagctgagatc

SEQ ID NO: 5741749 - DNA, 25 bp, Homo sapien
tgcagcttggggagctcggccgcct

SEQ ID NO: 5741750 - DNA, 25 bp, Homo sapien
gtgaagaatgggccgttgagcttgt

SEQ ID NO: 5741751 - DNA, 25 bp, Homo sapien
ttgccggtcatgagcagcgtgaaca

SEQ ID NO: 5741752 - DNA, 25 bp, Homo sapien
aaatgagctgaagtgagggcactcg

SEQ ID NO: 5741753 - DNA, 25 bp, Homo sapien
gttgatgctctcctgcatatcctgc

SEQ ID NO: 5741754 - DNA, 25 bp, Homo sapien
tcagagaagtggaattcgtagatgt

SEQ ID NO: 5741755 - DNA, 25 bp, Homo sapien
gtgatcggctgagggtgtgggaatg

SEQ ID NO: 5741756 - DNA, 25 bp, Homo sapien
gcgaaggcctccaggtccgtgtagt

SEQ ID NO: 5741757 - DNA, 25 bp, Homo sapien
agccgctttctgccacgtagcttgg

SEQ ID NO: 5741758 - DNA, 25 bp, Homo sapien
gtccaggaggcccacggagtaccgc

SEQ ID NO: 5741759 - DNA, 25 bp, Homo sapien
ctagtgggtgaagattgagggagcc

SEQ ID NO: 5741760 - DNA, 25 bp, Homo sapien
tgcacgctgaaaagcctggtggcca

SEQ ID NO: 5741761 - DNA, 25 bp, Homo sapien
tcgctggtgaagaatgggccgttga

SEQ ID NO: 5741762 - DNA, 25 bp, Homo sapien
ctttttggtctgagccacgtggccc

SEQ ID NO: 5741763 - DNA, 25 bp, Homo sapien
ttgccgtggaggatgtagtcgatca

SEQ ID NO: 5741764 - DNA, 25 bp, Homo sapien
ggcagtcctccaggacgctgtccgg

SEQ ID NO: 5741765 - DNA, 25 bp, Homo sapien
tccggctgcacgctgaaaagcctgg

SEQ ID NO: 5741766 - DNA, 25 bp, Homo sapien
gaggagccgtggagcttagccaagg

SEQ ID NO: 5741767 - DNA, 25 bp, Homo sapien
gatcacctgaggtcaggagttcgag

SEQ ID NO: 5741768 - DNA, 25 bp, Homo sapien
cgtgatcgtgctgccgccggttcag

SEQ ID NO: 5741769 - DNA, 25 bp, Homo sapien
gccgtggcgccagttgtggtaggtg

SEQ ID NO: 5741770 - DNA, 25 bp, Homo sapien
gatctggaactttcggaccacgccc

SEQ ID NO: 5741771 - DNA, 25 bp, Homo sapien
atgatggcgatgtccatcaggtgga

SEQ ID NO: 5741772 - DNA, 25 bp, Homo sapien
agaacctcgtcctgttcgtcaaagg

SEQ ID NO: 5741773 - DNA, 25 bp, Homo sapien
gtaaaatgtggcgactcccacaatc

SEQ ID NO: 5741774 - DNA, 25 bp, Homo sapien
cgccggttcaggttctggtagatgt

SEQ ID NO: 5741775 - DNA, 25 bp, Homo sapien
atgatgttacaaataaagccgcttt

SEQ ID NO: 5741776 - DNA, 25 bp, Homo sapien
gcgcgctctggttggcaggatgagc

SEQ ID NO: 5741777 - DNA, 25 bp, Homo sapien
ggatacagcaggttgaagacttggg

SEQ ID NO: 5741778 - DNA, 25 bp, Homo sapien
agggcccagtgatcggctgagggtg

SEQ ID NO: 5741779 - DNA, 25 bp, Homo sapien
cctattgttctgcagtcggtcgaac

SEQ ID NO: 5741780 - DNA, 25 bp, Homo sapien
tccaagtcaccttgctcccagaact

SEQ ID NO: 5741781 - DNA, 25 bp, Homo sapien
acagaccacacgtcaaaaaattcct

SEQ ID NO: 5741782 - DNA, 25 bp, Homo sapien
ctcggccacgccgttgcgctggcgg

SEQ ID NO: 5741783 - DNA, 25 bp, Homo sapien
tgtggaactgcctctcgatgtccgt

SEQ ID NO: 5741784 - DNA, 25 bp, Homo sapien
tgctcacaggatacagcaggttgaa

SEQ ID NO: 5741785 - DNA, 25 bp, Homo sapien
ttcctgttgtaaaatgtggcgactc

SEQ ID NO: 5741786 - DNA, 25 bp, Homo sapien
tggcgaaggcctccaggtccgtgta

SEQ ID NO: 5741787 - DNA, 25 bp, Homo sapien
atctttttggtctgagccacgtggc

SEQ ID NO: 5741788 - DNA, 25 bp, Homo sapien
cggagtcggggggcaccaggcagtc

SEQ ID NO: 5741789 - DNA, 25 bp, Homo sapien
cgaccccgatgtccagtgggaagac

SEQ ID NO: 5741790 - DNA, 25 bp, Homo sapien
aggtggatcacgtgatcgtgctgcc

SEQ ID NO: 5741791 - DNA, 25 bp, Homo sapien
catggcgaaggcctccaggtccgtg

SEQ ID NO: 5741792 - DNA, 25 bp, Homo sapien
gggcactcggccacgtcctcgacgt

SEQ ID NO: 5741793 - DNA, 25 bp, Homo sapien
caccagctccagcagcgccgtgctc

SEQ ID NO: 5741794 - DNA, 25 bp, Homo sapien
agctcaggtgatagatcttcaggta

SEQ ID NO: 5741795 - DNA, 25 bp, Homo sapien
cctgcaccagctccagcagcgccgt

SEQ ID NO: 5741796 - DNA, 25 bp, Homo sapien
atggtgaaaccccatctgtactgaa

SEQ ID NO: 5741797 - DNA, 25 bp, Homo sapien
tggccatgacgatctccttccgggt

SEQ ID NO: 5741798 - DNA, 25 bp, Homo sapien
gctcttcagtttgccggtcatgagc

SEQ ID NO: 5741799 - DNA, 25 bp, Homo sapien
ggtagttcttggactcatccacgat

SEQ ID NO: 5741800 - DNA, 25 bp, Homo sapien
atatcctgcaccagctccagcagcg

SEQ ID NO: 5741801 - DNA, 25 bp, Homo sapien
gtcgcagtccggcgggcacccgtcc

SEQ ID NO: 5741802 - DNA, 25 bp, Homo sapien
gggcttcccgtctttcctgttgtaa

SEQ ID NO: 5741803 - DNA, 25 bp, Homo sapien
atgttgatgctctcctgcatatcct

SEQ ID NO: 5741804 - DNA, 25 bp, Homo sapien
cgtggtaaaggaccatgtcctgtgc

SEQ ID NO: 5741805 - DNA, 25 bp, Homo sapien
caccgccacgacgtctttgccattc

SEQ ID NO: 5741806 - DNA, 25 bp, Homo sapien
tcttcttgtcctggtagttcttgga

SEQ ID NO: 5741807 - DNA, 25 bp, Homo sapien
cagttgtggtaggtgattctccggt

SEQ ID NO: 5741808 - DNA, 25 bp, Homo sapien
gggtgatcacctgaggtcaggagtt

SEQ ID NO: 5741809 - DNA, 25 bp, Homo sapien
tccctggagacgctgctgctccagg

SEQ ID NO: 5741810 - DNA, 25 bp, Homo sapien
aacccaaatcctagtgggtgaagat

SEQ ID NO: 5741811 - DNA, 25 bp, Homo sapien
aaaaaattccttctccttggtcatg

SEQ ID NO: 5741812 - DNA, 25 bp, Homo sapien
gaggtcaggagttcgagaccagcct

SEQ ID NO: 5741813 - DNA, 25 bp, Homo sapien
catttcgtcagcggaagcattcatg

SEQ ID NO: 5741814 - DNA, 25 bp, Homo sapien
catctggatgccacatttgaccagg

SEQ ID NO: 5741815 - DNA, 25 bp, Homo sapien
ccaggtccgtggcgatgatggcgat

SEQ ID NO: 5741816 - DNA, 25 bp, Homo sapien
tctccggtaccctttgctgatggag

SEQ ID NO: 5741817 - DNA, 25 bp, Homo sapien
gtgtagtagctcttcagtttgccgg

SEQ ID NO: 5741818 - DNA, 25 bp, Homo sapien
ttcagtttgccggtcatgagcagcg

SEQ ID NO: 5741819 - DNA, 25 bp, Homo sapien
ggacagcacattcttgatgagccac

SEQ ID NO: 5741820 - DNA, 25 bp, Homo sapien
ccgcggccacattctcagggctcag

SEQ ID NO: 5741821 - DNA, 25 bp, Homo sapien
cccagcacttcaggaagctgaggcg

SEQ ID NO: 5741822 - DNA, 25 bp, Homo sapien
agagccttcactttggcctcatact

SEQ ID NO: 5741823 - DNA, 25 bp, Homo sapien
cgggtcgtctccagggacaggtact

SEQ ID NO: 5741824 - DNA, 25 bp, Homo sapien
aggacctcctgggggatctggaact

SEQ ID NO: 5741825 - DNA, 25 bp, Homo sapien
ggactcatccacgatcttctgaaac

SEQ ID NO: 5741826 - DNA, 25 bp, Homo sapien
catctggtacaggttgttggtgccg

SEQ ID NO: 5741827 - DNA, 25 bp, Homo sapien
gaagaatgggccgttgagcttgttc

SEQ ID NO: 5741828 - DNA, 25 bp, Homo sapien
ctgtcctttccaagtcaccttgctc

SEQ ID NO: 5741829 - DNA, 25 bp, Homo sapien
ggtgggcgcctgtagtcccagctac

SEQ ID NO: 5741830 - DNA, 25 bp, Homo sapien
tcatcatggccatgacgatctcctt

SEQ ID NO: 5741831 - DNA, 25 bp, Homo sapien
ttgaccaggtccagttcggtgcact

SEQ ID NO: 5741832 - DNA, 25 bp, Homo sapien
tccgtcagctcctcaaacaccttgt

SEQ ID NO: 5741833 - DNA, 25 bp, Homo sapien
catctgtactgaaaatacaaaaatt

SEQ ID NO: 5741834 - DNA, 25 bp, Homo sapien
tgatcgtgctgccgccggttcaggt

SEQ ID NO: 5741835 - DNA, 25 bp, Homo sapien
cagctcttcttgtcctggtagttct

SEQ ID NO: 5741836 - DNA, 25 bp, Homo sapien
tcttcccaaagtactggcgggcaaa

SEQ ID NO: 5741837 - DNA, 25 bp, Homo sapien
tgaggtaggcccgcaccgtgtagaa

SEQ ID NO: 5741838 - DNA, 25 bp, Homo sapien
accgtgtagaaggccttgtggaact

SEQ ID NO: 5741839 - DNA, 25 bp, Homo sapien
tgggcccgagtacggctgggactct

SEQ ID NO: 5741840 - DNA, 25 bp, Homo sapien
tgcctgtccctggagacgctgctgc

SEQ ID NO: 5741841 - DNA, 25 bp, Homo sapien
tactcaggaggctgaggcacgagaa

SEQ ID NO: 5741842 - DNA, 25 bp, Homo sapien
acagcaggttgaagacttgggtgct

SEQ ID NO: 5741843 - DNA, 25 bp, Homo sapien
cgccttgttccggtccatcatagga

SEQ ID NO: 5741844 - DNA, 25 bp, Homo sapien
ggttcaggttctggtagatgttcag

SEQ ID NO: 5741845 - DNA, 25 bp, Homo sapien
ggcggtacatgaagaggctgcagcg

SEQ ID NO: 5741846 - DNA, 25 bp, Homo sapien
ggtgtcggtgttcatcactgaccag

SEQ ID NO: 5741847 - DNA, 25 bp, Homo sapien
catcgctctcttcttgaagtacagg

SEQ ID NO: 5741848 - DNA, 25 bp, Homo sapien
gtcccggaggctgtcgcagtccggc

SEQ ID NO: 5741849 - DNA, 25 bp, Homo sapien
aggaggcccacggagtaccgctcgc

SEQ ID NO: 5741850 - DNA, 25 bp, Homo sapien
cgagagcaggaacttcccaaactcc

SEQ ID NO: 5741851 - DNA, 25 bp, Homo sapien
tcccggccatcaggcgtgcgtgggc

SEQ ID NO: 5741852 - DNA, 25 bp, Homo sapien
aggaccatgtcctgtgcgatgtcct

SEQ ID NO: 5741853 - DNA, 25 bp, Homo sapien
gctttctgccacgtagcttggaagg

SEQ ID NO: 5741854 - DNA, 25 bp, Homo sapien
cggccgccttgttccggtccatcat

SEQ ID NO: 5741855 - DNA, 25 bp, Homo sapien
gaactgcctctcgatgtccgtcagc

SEQ ID NO: 5741856 - DNA, 25 bp, Homo sapien
cttgctcccagaactcagcagccac

SEQ ID NO: 5741857 - DNA, 25 bp, Homo sapien
gaccttgaagaccacgcgctccatg

SEQ ID NO: 5741858 - DNA, 25 bp, Homo sapien
tcttctgaaacatcgctctcttctt

SEQ ID NO: 5741859 - DNA, 25 bp, Homo sapien
ctccatgttgatgctctcctgcata

SEQ ID NO: 5741860 - DNA, 25 bp, Homo sapien
ggtgttcatcactgaccagcccagg

SEQ ID NO: 5741861 - DNA, 25 bp, Homo sapien
ggatgtagtcgatcactttgtagaa

SEQ ID NO: 5741862 - DNA, 25 bp, Homo sapien
gtggcccacgaccccgatgtccagt

SEQ ID NO: 5741863 - DNA, 25 bp, Homo sapien
ggcctgcaggagggtgcagaggcgc

SEQ ID NO: 5741864 - DNA, 25 bp, Homo sapien
cccaaatcctagtgggtgaagattg

SEQ ID NO: 5741865 - DNA, 25 bp, Homo sapien
cctgttgtaaaatgtggcgactccc

SEQ ID NO: 5741866 - DNA, 25 bp, Homo sapien
ttgggtgctgggccgccattgcaaa

SEQ ID NO: 5741867 - DNA, 25 bp, Homo sapien
tgattctccggtaccctttgctgat

SEQ ID NO: 5741868 - DNA, 25 bp, Homo sapien
cgatgtccttgcggttctccagctt

SEQ ID NO: 5741869 - DNA, 25 bp, Homo sapien
gcattcatgatgttacaaataaagc

SEQ ID NO: 5741870 - DNA, 25 bp, Homo sapien
gccattgcaaatttctgtgcctttc

SEQ ID NO: 5741871 - DNA, 25 bp, Homo sapien
actcatcagccagcgccttccactc

SEQ ID NO: 5741872 - DNA, 25 bp, Homo sapien
acgagaatcgcttgaacctgggagg

SEQ ID NO: 5741873 - DNA, 25 bp, Homo sapien
acgatctccttccgggtcgtctcca

SEQ ID NO: 5741874 - DNA, 25 bp, Homo sapien
gccgctggccagggcccagtgatcg

SEQ ID NO: 5741875 - DNA, 25 bp, Homo sapien
gaaaagcctggtggccagctcggcc

SEQ ID NO: 5741876 - DNA, 25 bp, Homo sapien
cccacggagtaccgctcgcagttga

SEQ ID NO: 5741877 - DNA, 25 bp, Homo sapien
gaactttcggaccacgcccagctcg

SEQ ID NO: 5741878 - DNA, 25 bp, Homo sapien
tggatgccacatttgaccaggtcca

SEQ ID NO: 5741879 - DNA, 25 bp, Homo sapien
cgacgtctttgccattcatgatggg

SEQ ID NO: 5741880 - DNA, 25 bp, Homo sapien
cactttggcctcatactcatcagcc

SEQ ID NO: 5741881 - DNA, 25 bp, Homo sapien
tggtaggtgattctccggtaccctt

SEQ ID NO: 5741882 - DNA, 25 bp, Homo sapien
ttgatctcctccttgccgtggagga

SEQ ID NO: 5741883 - DNA, 25 bp, Homo sapien
tccttccgggtcgtctccagggaca

SEQ ID NO: 5741884 - DNA, 25 bp, Homo sapien
tcctggtagttcttggactcatcca

SEQ ID NO: 5741885 - DNA, 25 bp, Homo sapien
tggcttcagtttataaaaacaggct

SEQ ID NO: 5741886 - DNA, 25 bp, Homo sapien
tcttgggcttcctaacctcttgtag

SEQ ID NO: 5741887 - DNA, 25 bp, Homo sapien
atgtcatggcacaggccggctgtca

SEQ ID NO: 5741888 - DNA, 25 bp, Homo sapien
agtagctcttcagtttgccggtcat

SEQ ID NO: 5741889 - DNA, 25 bp, Homo sapien
acacatcttcgtcttcgctggtgaa

SEQ ID NO: 5741890 - DNA, 25 bp, Homo sapien
ggagtcgtccagggccccttcctga

SEQ ID NO: 5741891 - DNA, 25 bp, Homo sapien
aggctcatggtggctgcctgtccct

SEQ ID NO: 5741892 - DNA, 25 bp, Homo sapien
tgtcaccatggcgaaggcctccagg

SEQ ID NO: 5741893 - DNA, 25 bp, Homo sapien
gcggccacattctcagggctcagtt

SEQ ID NO: 5741894 - DNA, 25 bp, Homo sapien
cgtaggtgtcggtgttcatcactga

SEQ ID NO: 5741895 - DNA, 25 bp, Homo sapien
ttgttccggtccatcataggaatgg

SEQ ID NO: 5741896 - DNA, 25 bp, Homo sapien
cttgtagcaaatagccacaggcaga

SEQ ID NO: 5741897 - DNA, 25 bp, Homo sapien
gccattcatgatgggtgtggccagc

SEQ ID NO: 5741898 - DNA, 25 bp, Homo sapien
tgtccatcaggtggatcacgtgatc

SEQ ID NO: 5741899 - DNA, 25 bp, Homo sapien
ccgtctttcctgttgtaaaatgtgg

SEQ ID NO: 5741900 - DNA, 25 bp, Homo sapien
tttcgtcagcggaagcattcatgat

SEQ ID NO: 5741901 - DNA, 25 bp, Homo sapien
cctccaggacgctgtccggctgcac

SEQ ID NO: 5741902 - DNA, 25 bp, Homo sapien
aagctccgggcctgctcctcactga

SEQ ID NO: 5741903 - DNA, 25 bp, Homo sapien
tgatccaagactgtcctttccaagt

SEQ ID NO: 5741904 - DNA, 25 bp, Homo sapien
gtcttgtagtcagtgagctcgtcag

SEQ ID NO: 5741905 - DNA, 25 bp, Homo sapien
ggcccacggagtaccgctcgcagtt

SEQ ID NO: 5741906 - DNA, 25 bp, Homo sapien
ctttggcctcatactcatcagccag

SEQ ID NO: 5741907 - DNA, 25 bp, Homo sapien
ggatctcttcgtggaaacgagagaa

SEQ ID NO: 5741908 - DNA, 25 bp, Homo sapien
agacaatttcccggccatcaggcgt

SEQ ID NO: 5741909 - DNA, 25 bp, Homo sapien
gtacatgaagaggctgcagcggtcg

SEQ ID NO: 5741910 - DNA, 25 bp, Homo sapien
aggccggctgtcaccatggcgaagg

SEQ ID NO: 5741911 - DNA, 25 bp, Homo sapien
ccgtgtagtagctcttcagtttgcc

SEQ ID NO: 5741912 - DNA, 25 bp, Homo sapien
gtcatgagcagcgtgaacatcgtct

SEQ ID NO: 5741913 - DNA, 25 bp, Homo sapien
agcagcgccgtgctctcctccacct

SEQ ID NO: 5741914 - DNA, 25 bp, Homo sapien
gtgaacatcgtctgggccacgttga

SEQ ID NO: 5741915 - DNA, 25 bp, Homo sapien
acgtctttgccattcatgatgggtg

SEQ ID NO: 5741916 - DNA, 25 bp, Homo sapien
cttgtggaactgcctctcgatgtcc

SEQ ID NO: 5741917 - DNA, 25 bp, Homo sapien
gtgagctgagatcgtgccacggcac

SEQ ID NO: 5741918 - DNA, 25 bp, Homo sapien
tcccgtctttcctgttgtaaaatgt

SEQ ID NO: 5741919 - DNA, 25 bp, Homo sapien
acctcttgtagcaaatagccacagg

SEQ ID NO: 5741920 - DNA, 25 bp, Homo sapien
gtccgtgtagtagctcttcagtttg

SEQ ID NO: 5741921 - DNA, 25 bp, Homo sapien
ggtgaagattgagggagccataggg

SEQ ID NO: 5741922 - DNA, 25 bp, Homo sapien
gaaacatcgctctcttcttgaagta

SEQ ID NO: 5741923 - DNA, 25 bp, Homo sapien
acaggtactccacccagctcttctt

SEQ ID NO: 5741924 - DNA, 25 bp, Homo sapien
gagctgaagtgagggcactcggcca

SEQ ID NO: 5741925 - DNA, 25 bp, Homo sapien
ggccaggtccgtggcgatgatggcg

SEQ ID NO: 5741926 - DNA, 25 bp, Homo sapien
gtccgtggcgatgatggcgatgtcc

SEQ ID NO: 5741927 - DNA, 25 bp, Homo sapien
gtgggaatgaccttgatctcctcct

SEQ ID NO: 5741928 - DNA, 25 bp, Homo sapien
ctccagagccttcactttggcctca

SEQ ID NO: 5741929 - DNA, 25 bp, Homo sapien
cagtgatcggctgagggtgtgggaa

SEQ ID NO: 5741930 - DNA, 25 bp, Homo sapien
accatggcgaaggcctccaggtccg

SEQ ID NO: 5741931 - DNA, 25 bp, Homo sapien
tgtgtggtggtgggcgcctgtagtc

SEQ ID NO: 5741932 - DNA, 25 bp, Homo sapien
ttcaggtacttcaagaacacatctt

SEQ ID NO: 5741933 - DNA, 25 bp, Homo sapien
ccacatttgaccaggtccagttcgg

SEQ ID NO: 5741934 - DNA, 25 bp, Homo sapien
cctcctgggggatctggaactttcg

SEQ ID NO: 5741935 - DNA, 25 bp, Homo sapien
cattcatgatgggtgtggccagcat

SEQ ID NO: 5741936 - DNA, 25 bp, Homo sapien
ggcgatgatggcgatgtccatcagg

SEQ ID NO: 5741937 - DNA, 25 bp, Homo sapien
ccacagcagcacctggccgcggcgc

SEQ ID NO: 5741938 - DNA, 25 bp, Homo sapien
cacggagtaccgctcgcagttgagg

SEQ ID NO: 5741939 - DNA, 25 bp, Homo sapien
actccaggtcagagaagtggaattc

SEQ ID NO: 5741940 - DNA, 25 bp, Homo sapien
ggcactccagcctgggtgacagagc

SEQ ID NO: 5741941 - DNA, 25 bp, Homo sapien
ccagagccttcactttggcctcata

SEQ ID NO: 5741942 - DNA, 25 bp, Homo sapien
gtggtgggccctggcagctcctcct

SEQ ID NO: 5741943 - DNA, 25 bp, Homo sapien
gctcttcttgtcctggtagttcttg

SEQ ID NO: 5741944 - DNA, 25 bp, Homo sapien
cagccacgagaagtgcgaccttgct

SEQ ID NO: 5741945 - DNA, 25 bp, Homo sapien
aaaaaattaaaatatccagaatgat

SEQ ID NO: 5741946 - DNA, 25 bp, Homo sapien
atgaagcccacttgcagcttgggga

SEQ ID NO: 5741947 - DNA, 25 bp, Homo sapien
gtggatcacgtgatcgtgctgccgc

SEQ ID NO: 5741948 - DNA, 25 bp, Homo sapien
gcacctggccgcggcgcgtctcgca

SEQ ID NO: 5741949 - DNA, 25 bp, Homo sapien
ctccagcagcgccgtgctctcctcc

SEQ ID NO: 5741950 - DNA, 25 bp, Homo sapien
gagggtgtgggaatgaccttgatct

SEQ ID NO: 5741951 - DNA, 25 bp, Homo sapien
gggcaccaggcagtcctccaggacg

SEQ ID NO: 5741952 - DNA, 25 bp, Homo sapien
gcactcggccacgtcctcgacgttc

SEQ ID NO: 5741953 - DNA, 25 bp, Homo sapien
gaggcgccgcaggaccttgaagacc

SEQ ID NO: 5741954 - DNA, 25 bp, Homo sapien
tttcccggccatcaggcgtgcgtgg

SEQ ID NO: 5741955 - DNA, 25 bp, Homo sapien
agctggatctcgtccctgtcgcact

SEQ ID NO: 5741956 - DNA, 25 bp, Homo sapien
cacctggcagaggtcccggaggctg

SEQ ID NO: 5741957 - DNA, 25 bp, Homo sapien
ctcctccttctcctccagagccttc

SEQ ID NO: 5741958 - DNA, 25 bp, Homo sapien
tagaagacaatttcccggccatcag

SEQ ID NO: 5741959 - DNA, 25 bp, Homo sapien
ctctcctccacctggcagaggtccc

SEQ ID NO: 5741960 - DNA, 25 bp, Homo sapien
ggtgatagatcttcaggtacaacgt

SEQ ID NO: 5741961 - DNA, 25 bp, Homo sapien
gtacaacgtggcaaaattcaggtac

SEQ ID NO: 5741962 - DNA, 25 bp, Homo sapien
acgtcctcgacgttcaccatctttt

SEQ ID NO: 5741963 - DNA, 25 bp, Homo sapien
cctttccaagtcaccttgctcccag

SEQ ID NO: 5741964 - DNA, 25 bp, Homo sapien
gaactccttgtacacgaatgtgcac

SEQ ID NO: 5741965 - DNA, 25 bp, Homo sapien
cccgtcctcgcaggccgcggccaca

SEQ ID NO: 5741966 - DNA, 25 bp, Homo sapien
gcacgagaatcgcttgaacctggga

SEQ ID NO: 5741967 - DNA, 25 bp, Homo sapien
ccgccacgacgtctttgccattcat

SEQ ID NO: 5741968 - DNA, 25 bp, Homo sapien
ttcacgtggtaaaggaccatgtcct

SEQ ID NO: 5741969 - DNA, 25 bp, Homo sapien
tgttcactgccatgatcaccgccac

SEQ ID NO: 5741970 - DNA, 25 bp, Homo sapien
ccagcatattctttgtcttgtagtc

SEQ ID NO: 5741971 - DNA, 25 bp, Homo sapien
cccagaactcagcagccacgagaag

SEQ ID NO: 5741972 - DNA, 25 bp, Homo sapien
agctcctcaaacaccttgttggccg

SEQ ID NO: 5741973 - DNA, 25 bp, Homo sapien
cagcgccgtgctctcctccacctgg

SEQ ID NO: 5741974 - DNA, 25 bp, Homo sapien
tgggccacgttgaagccgtggcgcc

SEQ ID NO: 5741975 - DNA, 25 bp, Homo sapien
agaggctgcagcggtcggcctgcag

SEQ ID NO: 5741976 - DNA, 25 bp, Homo sapien
gttgttggtgccgcggtggtcgatg

SEQ ID NO: 5741977 - DNA, 25 bp, Homo sapien
ggcccacgaccccgatgtccagtgg

SEQ ID NO: 5741978 - DNA, 25 bp, Homo sapien
tgtagtcagtgagctcgtcagcaaa

SEQ ID NO: 5741979 - DNA, 25 bp, Homo sapien
ggaggttgcagtgagctgagatcgt

SEQ ID NO: 5741980 - DNA, 25 bp, Homo sapien
acagggccaggtccgtggcgatgat

SEQ ID NO: 5741981 - DNA, 25 bp, Homo sapien
ttggcctcatactcatcagccagcg

SEQ ID NO: 5741982 - DNA, 25 bp, Homo sapien
cgcgtctcgcagttgtggaggtagc

SEQ ID NO: 5741983 - DNA, 25 bp, Homo sapien
tgttgacgatgggcatggacagcac

SEQ ID NO: 5741984 - DNA, 25 bp, Homo sapien
cttagccaaggggttctgggacttc

SEQ ID NO: 5741985 - DNA, 25 bp, Homo sapien
ccagttcggtgcactccaggtcaga

SEQ ID NO: 5741986 - DNA, 25 bp, Homo sapien
agccacaggcagaacccaaatccta

SEQ ID NO: 5741987 - DNA, 25 bp, Homo sapien
ctccaggtccgtgtagtagctcttc

SEQ ID NO: 5741988 - DNA, 25 bp, Homo sapien
ggccgttgagcttgttcactgccat

SEQ ID NO: 5741989 - DNA, 25 bp, Homo sapien
tcatccacgatcttctgaaacatcg

SEQ ID NO: 5741990 - DNA, 25 bp, Homo sapien
atctcggagtcggggggcaccaggc

SEQ ID NO: 5741991 - DNA, 25 bp, Homo sapien
ttctgaaacatcgctctcttcttga

SEQ ID NO: 5741992 - DNA, 25 bp, Homo sapien
gttgcagtgagctgagatcgtgcca

SEQ ID NO: 5741993 - DNA, 25 bp, Homo sapien
acaggccggctgtcaccatggcgaa

SEQ ID NO: 5741994 - DNA, 25 bp, Homo sapien
ccagcctgcccaatatggtgaaacc

SEQ ID NO: 5741995 - DNA, 25 bp, Homo sapien
gcccgcaccgtgtagaaggccttgt

SEQ ID NO: 5741996 - DNA, 25 bp, Homo sapien
aatgtgcacacgaagtcgatgaagc

SEQ ID NO: 5741997 - DNA, 25 bp, Homo sapien
gatgtcaaatgtggtgggccctggc

SEQ ID NO: 5741998 - DNA, 25 bp, Homo sapien
gcacttcaggaagctgaggcgggtg

SEQ ID NO: 5741999 - DNA, 25 bp, Homo sapien
ttgtcgtaggtgtcggtgttcatca

SEQ ID NO: 5742000 - DNA, 25 bp, Homo sapien
tgatagatcttcaggtacaacgtgg

SEQ ID NO: 5742001 - DNA, 25 bp, Homo sapien
tccttccccaggcgcgctctggttg

SEQ ID NO: 5742002 - DNA, 25 bp, Homo sapien
gtccccatgggaccagtgctcacag

SEQ ID NO: 5742003 - DNA, 25 bp, Homo sapien
ctgcatatcctgcaccagctccagc

SEQ ID NO: 5742004 - DNA, 25 bp, Homo sapien
gtttgccggtcatgagcagcgtgaa

SEQ ID NO: 5742005 - DNA, 25 bp, Homo sapien
ccacaatctcctccttcttgttgac

SEQ ID NO: 5742006 - DNA, 25 bp, Homo sapien
ggcgcgtctcgcagttgtggaggta

SEQ ID NO: 5742007 - DNA, 25 bp, Homo sapien
catggcacaggccggctgtcaccat

SEQ ID NO: 5742008 - DNA, 25 bp, Homo sapien
aggctgggcgtggtggctcatgcct

SEQ ID NO: 5742009 - DNA, 25 bp, Homo sapien
atccacgatcttctgaaacatcgct

SEQ ID NO: 5742010 - DNA, 25 bp, Homo sapien
tagccaaggggttctgggacttcat

SEQ ID NO: 5742011 - DNA, 25 bp, Homo sapien
cgcgctccatgttgatgctctcctg

SEQ ID NO: 5742012 - DNA, 25 bp, Homo sapien
gccgtggaggatgtagtcgatcact

SEQ ID NO: 5742013 - DNA, 25 bp, Homo sapien
cagctcgtcctcatcgcagtcagca

SEQ ID NO: 5742014 - DNA, 25 bp, Homo sapien
tttccaagtcaccttgctcccagaa

SEQ ID NO: 5742015 - DNA, 25 bp, Homo sapien
gggcatggacagcacattcttgatg

SEQ ID NO: 5742016 - DNA, 25 bp, Homo sapien
cttcgtcttcgctggtgaagaatgg

SEQ ID NO: 5742017 - DNA, 25 bp, Homo sapien
ggtgacagagcaagactccatctca

SEQ ID NO: 5742018 - DNA, 25 bp, Homo sapien
actcatccacgatcttctgaaacat

SEQ ID NO: 5742019 - DNA, 25 bp, Homo sapien
aggtagctcaggtgatagatcttca

SEQ ID NO: 5742020 - DNA, 25 bp, Homo sapien
caggttgaagacttgggtgctgggc

SEQ ID NO: 5742021 - DNA, 25 bp, Homo sapien
ctcgcagttgaggtaggcccgcacc

SEQ ID NO: 5742022 - DNA, 25 bp, Homo sapien
tcctccttcaggatttcgcccagct

SEQ ID NO: 5742023 - DNA, 25 bp, Homo sapien
gcgccgtgctctcctccacctggca

SEQ ID NO: 5742024 - DNA, 25 bp, Homo sapien
ggacgctgtccggctgcacgctgaa

SEQ ID NO: 5742025 - DNA, 25 bp, Homo sapien
gcacaggccggctgtcaccatggcg

SEQ ID NO: 5742026 - DNA, 25 bp, Homo sapien
ctggcagctcctccttcaggatttc

SEQ ID NO: 5742027 - DNA, 25 bp, Homo sapien
actgtgtcagggactccatgagaac

SEQ ID NO: 5742028 - DNA, 25 bp, Homo sapien
tctcttcttgaagtacagggccagg

SEQ ID NO: 5742029 - DNA, 25 bp, Homo sapien
ggagctcggccgccttgttccggtc

SEQ ID NO: 5742030 - DNA, 25 bp, Homo sapien
gtcctttccaagtcaccttgctccc

SEQ ID NO: 5742031 - DNA, 25 bp, Homo sapien
acaggctgggcgtggtggctcatgc

SEQ ID NO: 5742032 - DNA, 25 bp, Homo sapien
ttataaaaacaggctgggcgtggtg

SEQ ID NO: 5742033 - DNA, 25 bp, Homo sapien
aaatacaaaaattagccatgtgtgg

SEQ ID NO: 5742034 - DNA, 25 bp, Homo sapien
ccgctttctgccacgtagcttggaa

SEQ ID NO: 5742035 - DNA, 25 bp, Homo sapien
gccacgacgtctttgccattcatga

SEQ ID NO: 5742036 - DNA, 25 bp, Homo sapien
cgaatgtgcacacgaagtcgatgaa

SEQ ID NO: 5742037 - DNA, 25 bp, Homo sapien
ggttctccagcttgttcatcttgtc

SEQ ID NO: 5742038 - DNA, 25 bp, Homo sapien
cgagaagtgcgaccttgctctggac

SEQ ID NO: 5742039 - DNA, 25 bp, Homo sapien
tggaactttcggaccacgcccagct

SEQ ID NO: 5742040 - DNA, 25 bp, Homo sapien
gcttcctaacctcttgtagcaaata

SEQ ID NO: 5742041 - DNA, 25 bp, Homo sapien
tcgagaccagcctgcccaatatggt

SEQ ID NO: 5742042 - DNA, 25 bp, Homo sapien
cccatctgtactgaaaatacaaaaa

SEQ ID NO: 5742043 - DNA, 25 bp, Homo sapien
agtacggctgggactctcccatcag

SEQ ID NO: 5742044 - DNA, 25 bp, Homo sapien
cctccgagagcaggaacttcccaaa

SEQ ID NO: 5742045 - DNA, 25 bp, Homo sapien
gtcatggcacaggccggctgtcacc

SEQ ID NO: 5742046 - DNA, 25 bp, Homo sapien
ttctccagcttgttcatcttgtcgt

SEQ ID NO: 5742047 - DNA, 25 bp, Homo sapien
ggagggtgcagaggcgccgcaggac

SEQ ID NO: 5742048 - DNA, 25 bp, Homo sapien
cgggcaaaatcggggttctggtcca

SEQ ID NO: 5742049 - DNA, 25 bp, Homo sapien
gctccgggcctgctcctcactgagg

SEQ ID NO: 5742050 - DNA, 25 bp, Homo sapien
taacctcttgtagcaaatagccaca

SEQ ID NO: 5742051 - DNA, 25 bp, Homo sapien
gcaggatgagctggatctcgtccct

SEQ ID NO: 5742052 - DNA, 25 bp, Homo sapien
tcatggtggctgcctgtccctggag

SEQ ID NO: 5742053 - DNA, 25 bp, Homo sapien
gctgccaccctctcctcctcctcct

SEQ ID NO: 5742054 - DNA, 25 bp, Homo sapien
gaaaatacaaaaattagccatgtgt

SEQ ID NO: 5742055 - DNA, 25 bp, Homo sapien
tgggaggtggaggttgcagtgagct

SEQ ID NO: 5742056 - DNA, 25 bp, Homo sapien
gttgaagccgtggcgccagttgtgg

SEQ ID NO: 5742057 - DNA, 25 bp, Homo sapien
cgccgcaggaccttgaagaccacgc

SEQ ID NO: 5742058 - DNA, 25 bp, Homo sapien
accacgcccagctcgtagtacatct

SEQ ID NO: 5742059 - DNA, 25 bp, Homo sapien
ttctttgtcttgtagtcagtgagct

SEQ ID NO: 5742060 - DNA, 25 bp, Homo sapien
cgctggccagggcccagtgatcggc

SEQ ID NO: 5742061 - DNA, 25 bp, Homo sapien
cagaatgatcttcagtcattttctt

SEQ ID NO: 5742062 - DNA, 25 bp, Homo sapien
aggcccgcaccgtgtagaaggcctt

SEQ ID NO: 5742063 - DNA, 25 bp, Homo sapien
catgagcagcgtgaacatcgtctgg

SEQ ID NO: 5742064 - DNA, 25 bp, Homo sapien
tctgtactgaaaatacaaaaattag

SEQ ID NO: 5742065 - DNA, 25 bp, Homo sapien
ggctgagggtgtgggaatgaccttg

SEQ ID NO: 5742066 - DNA, 25 bp, Homo sapien
accgctcgcagttgaggtaggcccg

SEQ ID NO: 5742067 - DNA, 25 bp, Homo sapien
gctcgtcctcatcgcagtcagcagg

SEQ ID NO: 5742068 - DNA, 25 bp, Homo sapien
taggtgattctccggtaccctttgc

SEQ ID NO: 5742069 - DNA, 25 bp, Homo sapien
ttggccgaccacagcagcacctggc

SEQ ID NO: 5742070 - DNA, 25 bp, Homo sapien
atgggaccagtgctcacaggataca

SEQ ID NO: 5742071 - DNA, 25 bp, Homo sapien
ccggttcaggttctggtagatgttc

SEQ ID NO: 5742072 - DNA, 25 bp, Homo sapien
ctggccgcggcgcgtctcgcagttg

SEQ ID NO: 5742073 - DNA, 25 bp, Homo sapien
tctcgcagttgtggaggtagctcag

SEQ ID NO: 5742074 - DNA, 25 bp, Homo sapien
tcttcagtttgccggtcatgagcag

SEQ ID NO: 5742075 - DNA, 25 bp, Homo sapien
gtggtgggcgcctgtagtcccagct

SEQ ID NO: 5742076 - DNA, 25 bp, Homo sapien
gcgctctggttggcaggatgagctg

SEQ ID NO: 5742077 - DNA, 25 bp, Homo sapien
gaccagcctgcccaatatggtgaaa

SEQ ID NO: 5742078 - DNA, 25 bp, Homo sapien
tgtccgtcagctcctcaaacacctt

SEQ ID NO: 5742079 - DNA, 25 bp, Homo sapien
aggctccttccccaggcgcgctctg

SEQ ID NO: 5742080 - DNA, 25 bp, Homo sapien
ggcaggatctcttcgtggaaacgag

SEQ ID NO: 5742081 - DNA, 25 bp, Homo sapien
ggatcacgtgatcgtgctgccgccg

SEQ ID NO: 5742082 - DNA, 25 bp, Homo sapien
actttgtagaagacaatttcccggc

SEQ ID NO: 5742083 - DNA, 25 bp, Homo sapien
ttcacagttggcttcagtttataaa

SEQ ID NO: 5742084 - DNA, 25 bp, Homo sapien
ttcttggctgccaccctctcctcct

SEQ ID NO: 5742085 - DNA, 25 bp, Homo sapien
tcactgaccagcccaggaactgtgt

SEQ ID NO: 5742086 - DNA, 25 bp, Homo sapien
tcgtcttcgctggtgaagaatgggc

SEQ ID NO: 5742087 - DNA, 25 bp, Homo sapien
tgtaggctacagtttattcacagtt

SEQ ID NO: 5742088 - DNA, 25 bp, Homo sapien
catgtgtggtggtgggcgcctgtag

SEQ ID NO: 5742089 - DNA, 25 bp, Homo sapien
cattttcttgggcttcctaacctct

SEQ ID NO: 5742090 - DNA, 25 bp, Homo sapien
aggtaggcccgcaccgtgtagaagg

SEQ ID NO: 5742091 - DNA, 25 bp, Homo sapien
cacgccgttgcgctggcggtacatg

SEQ ID NO: 5742092 - DNA, 25 bp, Homo sapien
tgaagtacagggccaggtccgtggc

SEQ ID NO: 5742093 - DNA, 25 bp, Homo sapien
cgaagtcgatgaagcccacttgcag

SEQ ID NO: 5742094 - DNA, 25 bp, Homo sapien
gatgagctggatctcgtccctgtcg

SEQ ID NO: 5742095 - DNA, 25 bp, Homo sapien
gtccttgcggttctccagcttgttc

SEQ ID NO: 5742096 - DNA, 25 bp, Homo sapien
ccaggacctcctgggggatctggaa

SEQ ID NO: 5742097 - DNA, 25 bp, Homo sapien
tcatgatgttacaaataaagccgct

SEQ ID NO: 5742098 - DNA, 25 bp, Homo sapien
gtgatggcagacaggtcgcaggctg

SEQ ID NO: 5742099 - DNA, 25 bp, Homo sapien
gctctcctgcatatcctgcaccagc

SEQ ID NO: 5742100 - DNA, 25 bp, Homo sapien
agacttgggtgctgggccgccattg

SEQ ID NO: 5742101 - DNA, 25 bp, Homo sapien
agcttgttcactgccatgatcaccg

SEQ ID NO: 5742102 - DNA, 25 bp, Homo sapien
tgggtgaagattgagggagccatag

SEQ ID NO: 5742103 - DNA, 25 bp, Homo sapien
cggagtaccgctcgcagttgaggta

SEQ ID NO: 5742104 - DNA, 25 bp, Homo sapien
acctggccgcggcgcgtctcgcagt

SEQ ID NO: 5742105 - DNA, 25 bp, Homo sapien
ctccttggtcatgtccaggaggccc

SEQ ID NO: 5742106 - DNA, 25 bp, Homo sapien
agcctggtggccagctcggccacgc

SEQ ID NO: 5742107 - DNA, 25 bp, Homo sapien
aaaatgtggcgactcccacaatctc

SEQ ID NO: 5742108 - DNA, 25 bp, Homo sapien
ttggtctgagccacgtggcccacga

SEQ ID NO: 5742109 - DNA, 25 bp, Homo sapien
ccagggacaggtactccacccagct

SEQ ID NO: 5742110 - DNA, 25 bp, Homo sapien
ggtccagaaagctccgggcctgctc

SEQ ID NO: 5742111 - DNA, 25 bp, Homo sapien
gcccaggaactgtgtcagggactcc

SEQ ID NO: 5742112 - DNA, 25 bp, Homo sapien
ccatgttgatgctctcctgcatatc

SEQ ID NO: 5742113 - DNA, 25 bp, Homo sapien
tgtaatcccagcacttcaggaagct

SEQ ID NO: 5742114 - DNA, 25 bp, Homo sapien
tcaaagggcttcccgtctttcctgt

SEQ ID NO: 5742115 - DNA, 25 bp, Homo sapien
catgagaacctcgtcctgttcgtca

SEQ ID NO: 5742116 - DNA, 25 bp, Homo sapien
agatcttcaggtacaacgtggcaaa

SEQ ID NO: 5742117 - DNA, 25 bp, Homo sapien
tggcaaaattcaggtacttcaagaa

SEQ ID NO: 5742118 - DNA, 25 bp, Homo sapien
tggtgatggcagacaggtcgcaggc

SEQ ID NO: 5742119 - DNA, 25 bp, Homo sapien
tgggactctcccatcagcacagacc

SEQ ID NO: 5742120 - DNA, 25 bp, Homo sapien
gtcctcatcgcagtcagcaggctcc

SEQ ID NO: 5742121 - DNA, 25 bp, Homo sapien
gccgccttgttccggtccatcatag

SEQ ID NO: 5742122 - DNA, 25 bp, Homo sapien
ttcatgatgggtgtggccagcatat

SEQ ID NO: 5742123 - DNA, 25 bp, Homo sapien
cacgaagtcgatgaagcccacttgc

SEQ ID NO: 5742124 - DNA, 25 bp, Homo sapien
tggctgccaccctctcctcctcctc

SEQ ID NO: 5742125 - DNA, 25 bp, Homo sapien
tggagaacaggaaccgcaccaggac

SEQ ID NO: 5742126 - DNA, 25 bp, Homo sapien
gccatagggtccccatgggaccagt

SEQ ID NO: 5742127 - DNA, 25 bp, Homo sapien
cgcagtccggcgggcacccgtcctc

SEQ ID NO: 5742128 - DNA, 25 bp, Homo sapien
caggcagtcctccaggacgctgtcc

SEQ ID NO: 5742129 - DNA, 25 bp, Homo sapien
tgtcggtgttcatcactgaccagcc

SEQ ID NO: 5742130 - DNA, 25 bp, Homo sapien
cccttcctgaaatttgaacatttcg

SEQ ID NO: 5742131 - DNA, 25 bp, Homo sapien
aattaaaatatccagaatgatcttc

SEQ ID NO: 5742132 - DNA, 25 bp, Homo sapien
tcacctgaggtcaggagttcgagac

SEQ ID NO: 5742133 - DNA, 25 bp, Homo sapien
ttcagggtctcctccgagagcagga

SEQ ID NO: 5742134 - DNA, 25 bp, Homo sapien
agtttattcacagttggcttcagtt

SEQ ID NO: 5742135 - DNA, 25 bp, Homo sapien
aggtccgtgtagtagctcttcagtt

SEQ ID NO: 5742136 - DNA, 25 bp, Homo sapien
gtcctcgacgttcaccatctttttg

SEQ ID NO: 5742137 - DNA, 25 bp, Homo sapien
agtgggaagacgatctcggagtcgg

SEQ ID NO: 5742138 - DNA, 25 bp, Homo sapien
aaaaattagccatgtgtggtggtgg

SEQ ID NO: 5742139 - DNA, 25 bp, Homo sapien
ctgtcgcagtccggcgggcacccgt

SEQ ID NO: 5742140 - DNA, 25 bp, Homo sapien
tgtgcgatgtccttgcggttctcca

SEQ ID NO: 5742141 - DNA, 25 bp, Homo sapien
ggctgtcgcagtccggcgggcaccc

SEQ ID NO: 5742142 - DNA, 25 bp, Homo sapien
ggttctggtccagaaagctccgggc

SEQ ID NO: 5742143 - DNA, 25 bp, Homo sapien
catcactgaccagcccaggaactgt

SEQ ID NO: 5742144 - DNA, 25 bp, Homo sapien
cagcggtcggcctgcaggagggtgc

SEQ ID NO: 5742145 - DNA, 25 bp, Homo sapien
tcccaaactccaggtggtgccgctc

SEQ ID NO: 5742146 - DNA, 25 bp, Homo sapien
aatgggctgctgatccaagactgtc

SEQ ID NO: 5742147 - DNA, 25 bp, Homo sapien
tcctccagagccttcactttggcct

SEQ ID NO: 5742148 - DNA, 25 bp, Homo sapien
gtcgtaggtgtcggtgttcatcact

SEQ ID NO: 5742149 - DNA, 25 bp, Homo sapien
ccatctttttggtctgagccacgtg

SEQ ID NO: 5742150 - DNA, 25 bp, Homo sapien
gatctcctccttgccgtggaggatg

SEQ ID NO: 5742151 - DNA, 25 bp, Homo sapien
gaggcccacggagtaccgctcgcag

SEQ ID NO: 5742152 - DNA, 25 bp, Homo sapien
gactgtcctttccaagtcaccttgc

SEQ ID NO: 5742153 - DNA, 25 bp, Homo sapien
gttcttggactcatccacgatcttc

SEQ ID NO: 5742154 - DNA, 25 bp, Homo sapien
cctgcaggagggtgcagaggcgccg

SEQ ID NO: 5742155 - DNA, 25 bp, Homo sapien
ttctggtccagaaagctccgggcct

SEQ ID NO: 5742156 - DNA, 25 bp, Homo sapien
atcagcacagaccacacgtcaaaaa

SEQ ID NO: 5742157 - DNA, 25 bp, Homo sapien
cgtggaggatgtagtcgatcacttt

SEQ ID NO: 5742158 - DNA, 25 bp, Homo sapien
ccacattctcagggctcagtttctt

SEQ ID NO: 5742159 - DNA, 25 bp, Homo sapien
tctggtacaggttgttggtgccgcg

SEQ ID NO: 5742160 - DNA, 25 bp, Homo sapien
gttccggtccatcataggaatgggc

SEQ ID NO: 5742161 - DNA, 25 bp, Homo sapien
ggccgccattgcaaatttctgtgcc

SEQ ID NO: 5742162 - DNA, 25 bp, Homo sapien
gtacagggccaggtccgtggcgatg

SEQ ID NO: 5742163 - DNA, 25 bp, Homo sapien
atcccagcacttcaggaagctgagg

SEQ ID NO: 5742164 - DNA, 25 bp, Homo sapien
ataaagccgctttctgccacgtagc

SEQ ID NO: 5742165 - DNA, 25 bp, Homo sapien
gggtccccatgggaccagtgctcac

SEQ ID NO: 5742166 - DNA, 25 bp, Homo sapien
catgggcaggatctcttcgtggaaa

SEQ ID NO: 5742167 - DNA, 25 bp, Homo sapien
ccacaggcagaacccaaatcctagt

SEQ ID NO: 5742168 - DNA, 25 bp, Homo sapien
cttcgtggaaacgagagaactcctt

SEQ ID NO: 5742169 - DNA, 25 bp, Homo sapien
caccatctttttggtctgagccacg

SEQ ID NO: 5742170 - DNA, 25 bp, Homo sapien
tgttacaaataaagccgctttctgc

SEQ ID NO: 5742171 - DNA, 25 bp, Homo sapien
atcttcgtcttcgctggtgaagaat

SEQ ID NO: 5742172 - DNA, 25 bp, Homo sapien
cttgttcatcttgtcgtaggtgtcg

SEQ ID NO: 5742173 - DNA, 25 bp, Homo sapien
cccagtgatcggctgagggtgtggg

SEQ ID NO: 5742174 - DNA, 25 bp, Homo sapien
tcggggttctggtccagaaagctcc

SEQ ID NO: 5742175 - DNA, 25 bp, Homo sapien
gcagaacccaaatcctagtgggtga

SEQ ID NO: 5742176 - DNA, 25 bp, Homo sapien
gtctccagggacaggtactccaccc

SEQ ID NO: 5742177 - DNA, 25 bp, Homo sapien
aatgggccgttgagcttgttcactg

SEQ ID NO: 5742178 - DNA, 25 bp, Homo sapien
tttttgtaggctacagtttattcac

SEQ ID NO: 5742179 - DNA, 25 bp, Homo sapien
atgagctgaagtgagggcactcggc

SEQ ID NO: 5742180 - DNA, 25 bp, Homo sapien
agcttgttcatcttgtcgtaggtgt

SEQ ID NO: 5742181 - DNA, 25 bp, Homo sapien
ggcgtgcgtgggcccgagtacggct

SEQ ID NO: 5742182 - DNA, 25 bp, Homo sapien
aaacaccttgttggccgaccacagc

SEQ ID NO: 5742183 - DNA, 25 bp, Homo sapien
gtggcgatgatggcgatgtccatca

SEQ ID NO: 5742184 - DNA, 25 bp, Homo sapien
gaaagctccgggcctgctcctcact

SEQ ID NO: 5742185 - DNA, 25 bp, Homo sapien
gtggaattcgtagatgtcaaatgtg

SEQ ID NO: 5742186 - DNA, 25 bp, Homo sapien
acaaaaattagccatgtgtggtggt

SEQ ID NO: 5742187 - DNA, 25 bp, Homo sapien
ttcttgtcctggtagttcttggact

SEQ ID NO: 5742188 - DNA, 25 bp, Homo sapien
gaccttgatctcctccttgccgtgg

SEQ ID NO: 5742189 - DNA, 25 bp, Homo sapien
ttgtaaaatgtggcgactcccacaa

SEQ ID NO: 5742190 - DNA, 25 bp, Homo sapien
attctcagggctcagtttcttccca

SEQ ID NO: 5742191 - DNA, 25 bp, Homo sapien
cccgagtacggctgggactctccca

SEQ ID NO: 5742192 - DNA, 25 bp, Homo sapien
tgttcagggtctcctccgagagcag

SEQ ID NO: 5742193 - DNA, 25 bp, Homo sapien
actctcccatcagcacagaccacac

SEQ ID NO: 5742194 - DNA, 25 bp, Homo sapien
tcgcagttgtggaggtagctcaggt

SEQ ID NO: 5742195 - DNA, 25 bp, Homo sapien
ggaagcattcatgatgttacaaata

SEQ ID NO: 5742196 - DNA, 25 bp, Homo sapien
aggtcccggaggctgtcgcagtccg

SEQ ID NO: 5742197 - DNA, 25 bp, Homo sapien
caggaacttcccaaactccaggtgg

SEQ ID NO: 5742198 - DNA, 25 bp, Homo sapien
ggcacccgtcctcgcaggccgcggc

SEQ ID NO: 5742199 - DNA, 25 bp, Homo sapien
tgcccaatatggtgaaaccccatct

SEQ ID NO: 5742200 - DNA, 25 bp, Homo sapien
gatggcagacaggtcgcaggctgtc

SEQ ID NO: 5742201 - DNA, 25 bp, Homo sapien
tttgaacatttcgtcagcggaagca

SEQ ID NO: 5742202 - DNA, 25 bp, Homo sapien
gggatctggaactttcggaccacgc

SEQ ID NO: 5742203 - DNA, 25 bp, Homo sapien
cacgacgtctttgccattcatgatg

SEQ ID NO: 5742204 - DNA, 25 bp, Homo sapien
gttctgcagtcggtcgaacatgggc

SEQ ID NO: 5742205 - DNA, 25 bp, Homo sapien
gtgctgggccgccattgcaaatttc

SEQ ID NO: 5742206 - DNA, 25 bp, Homo sapien
ctgagggtgtgggaatgaccttgat

SEQ ID NO: 5742207 - DNA, 25 bp, Homo sapien
aggcctccaggtccgtgtagtagct

SEQ ID NO: 5742208 - DNA, 25 bp, Homo sapien
cgtggcaaaattcaggtacttcaag

SEQ ID NO: 5742209 - DNA, 25 bp, Homo sapien
agtcgtccagggccccttcctgaaa

SEQ ID NO: 5742210 - DNA, 25 bp, Homo sapien
gtcccagctactcaggaggctgagg

SEQ ID NO: 5742211 - DNA, 25 bp, Homo sapien
aagcattcatgatgttacaaataaa

SEQ ID NO: 5742212 - DNA, 25 bp, Homo sapien
cgtgcgtgggcccgagtacggctgg

SEQ ID NO: 5742213 - DNA, 25 bp, Homo sapien
cttcctgaaatttgaacatttcgtc

SEQ ID NO: 5742214 - DNA, 25 bp, Homo sapien
ctcctccgagagcaggaacttccca

SEQ ID NO: 5742215 - DNA, 25 bp, Homo sapien
tattctttgtcttgtagtcagtgag

SEQ ID NO: 5742216 - DNA, 25 bp, Homo sapien
tggtgaagaatgggccgttgagctt

SEQ ID NO: 5742217 - DNA, 25 bp, Homo sapien
cgctgaaaagcctggtggccagctc

SEQ ID NO: 5742218 - DNA, 25 bp, Homo sapien
ggatttcgcccagctcgtcctcatc

SEQ ID NO: 5742219 - DNA, 25 bp, Homo sapien
tgtagtcccagctactcaggaggct

SEQ ID NO: 5742220 - DNA, 25 bp, Homo sapien
ggccgcggcgcgtctcgcagttgtg

SEQ ID NO: 5742221 - DNA, 25 bp, Homo sapien
tcctgcatatcctgcaccagctcca

SEQ ID NO: 5742222 - DNA, 25 bp, Homo sapien
tggaaggccgctggccagggcccag

SEQ ID NO: 5742223 - DNA, 25 bp, Homo sapien
tgggacttcatctggtacaggttgt

SEQ ID NO: 5742224 - DNA, 25 bp, Homo sapien
ccacgttgaagccgtggcgccagtt

SEQ ID NO: 5742225 - DNA, 25 bp, Homo sapien
ttggtcatgtccaggaggcccacgg

SEQ ID NO: 5742226 - DNA, 25 bp, Homo sapien
tacatctggatgccacatttgacca

SEQ ID NO: 5742227 - DNA, 25 bp, Homo sapien
ggccctggcagctcctccttcagga

SEQ ID NO: 5742228 - DNA, 25 bp, Homo sapien
ggccatcaggcgtgcgtgggcccga

SEQ ID NO: 5742229 - DNA, 25 bp, Homo sapien
cccggaggctgtcgcagtccggcgg

SEQ ID NO: 5742230 - DNA, 25 bp, Homo sapien
ccgcaccgtgtagaaggccttgtgg

SEQ ID NO: 5742231 - DNA, 25 bp, Homo sapien
aggcacgagaatcgcttgaacctgg

SEQ ID NO: 5742232 - DNA, 25 bp, Homo sapien
cttgttcactgccatgatcaccgcc

SEQ ID NO: 5742233 - DNA, 25 bp, Homo sapien
cttgtagtcagtgagctcgtcagca

SEQ ID NO: 5742234 - DNA, 25 bp, Homo sapien
tcggcctgcaggagggtgcagaggc

SEQ ID NO: 5742235 - DNA, 25 bp, Homo sapien
agttgtggaggtagctcaggtgata

SEQ ID NO: 5742236 - DNA, 25 bp, Homo sapien
agaccacgcgctccatgttgatgct

SEQ ID NO: 5742237 - DNA, 25 bp, Homo sapien
tccagaatgatcttcagtcattttc

SEQ ID NO: 5742238 - DNA, 25 bp, Homo sapien
gcggtggtcgatgtcatggcacagg

SEQ ID NO: 5742239 - DNA, 25 bp, Homo sapien
gccgtgctctcctccacctggcaga

SEQ ID NO: 5742240 - DNA, 25 bp, Homo sapien
tgtccctggagacgctgctgctcca

SEQ ID NO: 5742241 - DNA, 25 bp, Homo sapien
agaacccaaatcctagtgggtgaag

SEQ ID NO: 5742242 - DNA, 25 bp, Homo sapien
gggccccttcctgaaatttgaacat

SEQ ID NO: 5742243 - DNA, 25 bp, Homo sapien
cttccactctttcctattgttctgc

SEQ ID NO: 5742244 - DNA, 25 bp, Homo sapien
gcgccagttgtggtaggtgattctc

SEQ ID NO: 5742245 - DNA, 25 bp, Homo sapien
acaaataaagccgctttctgccacg

SEQ ID NO: 5742246 - DNA, 25 bp, Homo sapien
ctttcttggctgccaccctctcctc

SEQ ID NO: 5742247 - DNA, 25 bp, Homo sapien
gcaaaattcaggtacttcaagaaca

SEQ ID NO: 5742248 - DNA, 25 bp, Homo sapien
ctcgtccctgtcgcacttcacgtgg

SEQ ID NO: 5742249 - DNA, 25 bp, Homo sapien
gccggtcatgagcagcgtgaacatc

SEQ ID NO: 5742250 - DNA, 25 bp, Homo sapien
cagcacttcaggaagctgaggcggg

SEQ ID NO: 5742251 - DNA, 25 bp, Homo sapien
cacttgcagcttggggagctcggcc

SEQ ID NO: 5742252 - DNA, 25 bp, Homo sapien
cttcccagggcttggtgatggcaga

SEQ ID NO: 5742253 - DNA, 25 bp, Homo sapien
accttgttggccgaccacagcagca

SEQ ID NO: 5742254 - DNA, 25 bp, Homo sapien
ggcgccgcaggaccttgaagaccac

SEQ ID NO: 5742255 - DNA, 25 bp, Homo sapien
gttctgggacttcatctggtacagg

SEQ ID NO: 5742256 - DNA, 25 bp, Homo sapien
cagctactcaggaggctgaggcacg

SEQ ID NO: 5742257 - DNA, 25 bp, Homo sapien
gtcagcaaatgagctgaagtgaggg

SEQ ID NO: 5742258 - DNA, 25 bp, Homo sapien
ggttctggtagatgttcagggtctc

SEQ ID NO: 5742259 - DNA, 25 bp, Homo sapien
actcagcagccacgagaagtgcgac

SEQ ID NO: 5742260 - DNA, 25 bp, Homo sapien
tgcaccagctccagcagcgccgtgc

SEQ ID NO: 5742261 - DNA, 25 bp, Homo sapien
gccagcgccttccactctttcctat

SEQ ID NO: 5742262 - DNA, 25 bp, Homo sapien
cagcgccttccactctttcctattg

SEQ ID NO: 5742263 - DNA, 25 bp, Homo sapien
gcttcagtttataaaaacaggctgg

SEQ ID NO: 5742264 - DNA, 25 bp, Homo sapien
gagccacccggagtcgtccagggcc

SEQ ID NO: 5742265 - DNA, 25 bp, Homo sapien
tgtcagggactccatgagaacctcg

SEQ ID NO: 5742266 - DNA, 25 bp, Homo sapien
tagttcttggactcatccacgatct

SEQ ID NO: 5742267 - DNA, 25 bp, Homo sapien
gtcgatgtcatggcacaggccggct

SEQ ID NO: 5742268 - DNA, 25 bp, Homo sapien
cctccttctcctccagagccttcac

SEQ ID NO: 5742269 - DNA, 25 bp, Homo sapien
cactccagcctgggtgacagagcaa

SEQ ID NO: 5742270 - DNA, 25 bp, Homo sapien
tctcctccagagccttcactttggc

SEQ ID NO: 5742271 - DNA, 25 bp, Homo sapien
cagccagcgccttccactctttcct

SEQ ID NO: 5742272 - DNA, 25 bp, Homo sapien
tgaacatttcgtcagcggaagcatt

SEQ ID NO: 5742273 - DNA, 25 bp, Homo sapien
gtagcttggaaggccgctggccagg

SEQ ID NO: 5742274 - DNA, 25 bp, Homo sapien
cctcatcgcagtcagcaggctcctt

SEQ ID NO: 5742275 - DNA, 25 bp, Homo sapien
gtgtggccagcatattctttgtctt

SEQ ID NO: 5742276 - DNA, 25 bp, Homo sapien
cttgaacctgggaggtggaggttgc

SEQ ID NO: 5742277 - DNA, 25 bp, Homo sapien
tgagccacgtggcccacgaccccga

SEQ ID NO: 5742278 - DNA, 25 bp, Homo sapien
tgctcctcactgaggctcatggtgg

SEQ ID NO: 5742279 - DNA, 25 bp, Homo sapien
caggaagctgaggcgggtgatcacc

SEQ ID NO: 5742280 - DNA, 25 bp, Homo sapien
tccaggtcagagaagtggaattcgt

SEQ ID NO: 5742281 - DNA, 25 bp, Homo sapien
gcgtgaacatcgtctgggccacgtt

SEQ ID NO: 5742282 - DNA, 25 bp, Homo sapien
acaatttcccggccatcaggcgtgc

SEQ ID NO: 5742283 - DNA, 25 bp, Homo sapien
cttggctgccaccctctcctcctcc

SEQ ID NO: 5742284 - DNA, 25 bp, Homo sapien
tcttgtcgtaggtgtcggtgttcat

SEQ ID NO: 5742285 - DNA, 25 bp, Homo sapien
gtcttcgctggtgaagaatgggccg

SEQ ID NO: 5742286 - DNA, 25 bp, Homo sapien
cttcaggtacaacgtggcaaaattc

SEQ ID NO: 5742287 - DNA, 25 bp, Homo sapien
ggtcgtctccagggacaggtactcc

SEQ ID NO: 5742288 - DNA, 25 bp, Homo sapien
acggcactccagcctgggtgacaga

SEQ ID NO: 5742289 - DNA, 25 bp, Homo sapien
tcaagaacacatcttcgtcttcgct

SEQ ID NO: 5742290 - DNA, 25 bp, Homo sapien
ggtcatgtccaggaggcccacggag

SEQ ID NO: 5742291 - DNA, 25 bp, Homo sapien
ccttgatctcctccttgccgtggag

SEQ ID NO: 5742292 - DNA, 25 bp, Homo sapien
cacgtcaaaaaattccttctccttg

SEQ ID NO: 5742293 - DNA, 25 bp, Homo sapien
ttctccttggtcatgtccaggaggc

SEQ ID NO: 5742294 - DNA, 25 bp, Homo sapien
gagctgagatcgtgccacggcactc

SEQ ID NO: 5742295 - DNA, 25 bp, Homo sapien
cacgcgctccatgttgatgctctcc

SEQ ID NO: 5742296 - DNA, 25 bp, Homo sapien
tctcgatgtccgtcagctcctcaaa

SEQ ID NO: 5742297 - DNA, 25 bp, Homo sapien
tccgggcctgctcctcactgaggct

SEQ ID NO: 5742298 - DNA, 25 bp, Homo sapien
cggctgcacgctgaaaagcctggtg

SEQ ID NO: 5742299 - DNA, 25 bp, Homo sapien
cgatctcggagtcggggggcaccag

SEQ ID NO: 5742300 - DNA, 25 bp, Homo sapien
ggaatgggctgctgatccaagactg

SEQ ID NO: 5742301 - DNA, 25 bp, Homo sapien
ggcgcctgtagtcccagctactcag

SEQ ID NO: 5742302 - DNA, 25 bp, Homo sapien
cgcctgtagtcccagctactcagga

SEQ ID NO: 5742303 - DNA, 25 bp, Homo sapien
cagtccggcgggcacccgtcctcgc

SEQ ID NO: 5742304 - DNA, 25 bp, Homo sapien
ctggtagttcttggactcatccacg

SEQ ID NO: 5742305 - DNA, 25 bp, Homo sapien
atcgcagtcagcaggctccttcccc

SEQ ID NO: 5742306 - DNA, 25 bp, Homo sapien
tgatgctctcctgcatatcctgcac

SEQ ID NO: 5742307 - DNA, 25 bp, Homo sapien
gtggccagctcggccacgccgttgc

SEQ ID NO: 5742308 - DNA, 25 bp, Homo sapien
tggaactgcctctcgatgtccgtca

SEQ ID NO: 5742309 - DNA, 25 bp, Homo sapien
aagaacacatcttcgtcttcgctgg

SEQ ID NO: 5742310 - DNA, 25 bp, Homo sapien
tccatgagaacctcgtcctgttcgt

SEQ ID NO: 5742311 - DNA, 25 bp, Homo sapien
cccaatatggtgaaaccccatctgt

SEQ ID NO: 5742312 - DNA, 25 bp, Homo sapien
ggtcggcctgcaggagggtgcagag

SEQ ID NO: 5742313 - DNA, 25 bp, Homo sapien
gtgagggcactcggccacgtcctcg

SEQ ID NO: 5742314 - DNA, 25 bp, Homo sapien
ctccttcaggatttcgcccagctcg

SEQ ID NO: 5742315 - DNA, 25 bp, Homo sapien
accttgctcccagaactcagcagcc

SEQ ID NO: 5742316 - DNA, 25 bp, Homo sapien
gagctcgtcagcaaatgagctgaag

SEQ ID NO: 5742317 - DNA, 25 bp, Homo sapien
tcagctcctcaaacaccttgttggc

SEQ ID NO: 5742318 - DNA, 25 bp, Homo sapien
atttgaccaggtccagttcggtgca

SEQ ID NO: 5742319 - DNA, 25 bp, Homo sapien
ttgtcttgtagtcagtgagctcgtc

SEQ ID NO: 5742320 - DNA, 25 bp, Homo sapien
cgcccagctcgtcctcatcgcagtc

SEQ ID NO: 5742321 - DNA, 25 bp, Homo sapien
aacgtggcaaaattcaggtacttca

SEQ ID NO: 5742322 - DNA, 25 bp, Homo sapien
gctcatggtggctgcctgtccctgg

SEQ ID NO: 5742323 - DNA, 25 bp, Homo sapien
gcactccaggtcagagaagtggaat

SEQ ID NO: 5742324 - DNA, 25 bp, Homo sapien
cacattcttgatgagccacccggag

SEQ ID NO: 5742325 - DNA, 25 bp, Homo sapien
actgcctctcgatgtccgtcagctc

SEQ ID NO: 5742326 - DNA, 25 bp, Homo sapien
cagaggcgccgcaggaccttgaaga

SEQ ID NO: 5742327 - DNA, 25 bp, Homo sapien
ccagggcttggtgatggcagacagg

SEQ ID NO: 5742328 - DNA, 25 bp, Homo sapien
gatgttacaaataaagccgctttct

SEQ ID NO: 5742329 - DNA, 25 bp, Homo sapien
ccagggcccagtgatcggctgaggg

SEQ ID NO: 5742330 - DNA, 25 bp, Homo sapien
gtgatcacctgaggtcaggagttcg

SEQ ID NO: 5742331 - DNA, 25 bp, Homo sapien
gctgagatcgtgccacggcactcca

SEQ ID NO: 5742332 - DNA, 25 bp, Homo sapien
tgggcgcctgtagtcccagctactc

SEQ ID NO: 5742333 - DNA, 25 bp, Homo sapien
aggcagaacccaaatcctagtgggt

SEQ ID NO: 5742334 - DNA, 25 bp, Homo sapien
ggcgggcaaaatcggggttctggtc

SEQ ID NO: 5742335 - DNA, 25 bp, Homo sapien
tcttggactcatccacgatcttctg

SEQ ID NO: 5742336 - DNA, 25 bp, Homo sapien
atctcttcgtggaaacgagagaact

SEQ ID NO: 5742337 - DNA, 25 bp, Homo sapien
cgcagttgaggtaggcccgcaccgt

SEQ ID NO: 5742338 - DNA, 25 bp, Homo sapien
ggttgaagacttgggtgctgggccg

SEQ ID NO: 5742339 - DNA, 25 bp, Homo sapien
aggggttctgggacttcatctggta

SEQ ID NO: 5742340 - DNA, 25 bp, Homo sapien
tggcagacaggtcgcaggctgtcat

SEQ ID NO: 5742341 - DNA, 25 bp, Homo sapien
ctcggagtcggggggcaccaggcag

SEQ ID NO: 5742342 - DNA, 25 bp, Homo sapien
gttgagcttgttcactgccatgatc

SEQ ID NO: 5742343 - DNA, 25 bp, Homo sapien
gcaccaggcagtcctccaggacgct

SEQ ID NO: 5742344 - DNA, 25 bp, Homo sapien
cgtgctgccgccggttcaggttctg

SEQ ID NO: 5742345 - DNA, 25 bp, Homo sapien
actccaggtggtgccgctccaaaat

SEQ ID NO: 5742346 - DNA, 25 bp, Homo sapien
acaccttgttggccgaccacagcag

SEQ ID NO: 5742347 - DNA, 25 bp, Homo sapien
gtcgaacatgggcaggatctcttcg

SEQ ID NO: 5742348 - DNA, 25 bp, Homo sapien
ggacaggtactccacccagctcttc

SEQ ID NO: 5742349 - DNA, 25 bp, Homo sapien
tgtcgcacttcacgtggtaaaggac

SEQ ID NO: 5742350 - DNA, 25 bp, Homo sapien
ttgggcttcctaacctcttgtagca

SEQ ID NO: 5742351 - DNA, 25 bp, Homo sapien
cgctccaaaatcgaggagccgtgga

SEQ ID NO: 5742352 - DNA, 25 bp, Homo sapien
tggctgcctgtccctggagacgctg

SEQ ID NO: 5742353 - DNA, 25 bp, Homo sapien
cggaggctgtcgcagtccggcgggc

SEQ ID NO: 5742354 - DNA, 25 bp, Homo sapien
ggaagctgaggcgggtgatcacctg

SEQ ID NO: 5742355 - DNA, 25 bp, Homo sapien
gccacgagaagtgcgaccttgctct

SEQ ID NO: 5742356 - DNA, 25 bp, Homo sapien
gggtgtggccagcatattctttgtc

SEQ ID NO: 5742357 - DNA, 25 bp, Homo sapien
gagggcactcggccacgtcctcgac

SEQ ID NO: 5742358 - DNA, 25 bp, Homo sapien
aaatagccacaggcagaacccaaat

SEQ ID NO: 5742359 - DNA, 25 bp, Homo sapien
tccgagagcaggaacttcccaaact

SEQ ID NO: 5742360 - DNA, 25 bp, Homo sapien
tcccagggcttggtgatggcagaca

SEQ ID NO: 5742361 - DNA, 25 bp, Homo sapien
acatgaagaggctgcagcggtcggc

SEQ ID NO: 5742362 - DNA, 25 bp, Homo sapien
ctcacaggatacagcaggttgaaga

SEQ ID NO: 5742363 - DNA, 25 bp, Homo sapien
cagcggaagcattcatgatgttaca

SEQ ID NO: 5742364 - DNA, 25 bp, Homo sapien
tggcgccagttgtggtaggtgattc

SEQ ID NO: 5742365 - DNA, 25 bp, Homo sapien
gctgcacgctgaaaagcctggtggc

SEQ ID NO: 5742366 - DNA, 25 bp, Homo sapien
tcgtcctgttcgtcaaagggcttcc

SEQ ID NO: 5742367 - DNA, 25 bp, Homo sapien
aggcgcgctctggttggcaggatga

SEQ ID NO: 5742368 - DNA, 25 bp, Homo sapien
ccatcagcacagaccacacgtcaaa

SEQ ID NO: 5742369 - DNA, 25 bp, Homo sapien
ttcatcttgtcgtaggtgtcggtgt

SEQ ID NO: 5742370 - DNA, 25 bp, Homo sapien
atcgcttgaacctgggaggtggagg

SEQ ID NO: 5742371 - DNA, 25 bp, Homo sapien
acaggttgttggtgccgcggtggtc

SEQ ID NO: 5742372 - DNA, 25 bp, Homo sapien
ccgaccacagcagcacctggccgcg

SEQ ID NO: 5742373 - DNA, 25 bp, Homo sapien
gagttcgagaccagcctgcccaata

SEQ ID NO: 5742374 - DNA, 25 bp, Homo sapien
ctcagtttcttcccaaagtactggc

SEQ ID NO: 5742375 - DNA, 25 bp, Homo sapien
tgagcttgttcactgccatgatcac

SEQ ID NO: 5742376 - DNA, 25 bp, Homo sapien
gttggcaggatgagctggatctcgt

SEQ ID NO: 5742377 - DNA, 25 bp, Homo sapien
tgtggcgactcccacaatctcctcc

SEQ ID NO: 5742378 - DNA, 25 bp, Homo sapien
tgatcaccgccacgacgtctttgcc

SEQ ID NO: 5742379 - DNA, 25 bp, Homo sapien
ggtcagagaagtggaattcgtagat

SEQ ID NO: 5742380 - DNA, 25 bp, Homo sapien
agaagtgcgaccttgctctggactt

SEQ ID NO: 5742381 - DNA, 25 bp, Homo sapien
agcttagccaaggggttctgggact

SEQ ID NO: 5742382 - DNA, 25 bp, Homo sapien
atggtggctgcctgtccctggagac

SEQ ID NO: 5742383 - DNA, 25 bp, Homo sapien
ccccaggcgcgctctggttggcagg

SEQ ID NO: 5742384 - DNA, 25 bp, Homo sapien
tgagatcgtgccacggcactccagc

SEQ ID NO: 5742385 - DNA, 25 bp, Homo sapien
cttcccaaactccaggtggtgccgc

SEQ ID NO: 5742386 - DNA, 25 bp, Homo sapien
cctcaaacaccttgttggccgacca

SEQ ID NO: 5742387 - DNA, 25 bp, Homo sapien
tattgttctgcagtcggtcgaacat

SEQ ID NO: 5742388 - DNA, 25 bp, Homo sapien
cagtcctccaggacgctgtccggct

SEQ ID NO: 5742389 - DNA, 25 bp, Homo sapien
aaagcctggtggccagctcggccac

SEQ ID NO: 5742390 - DNA, 25 bp, Homo sapien
cagtcattttcttgggcttcctaac

SEQ ID NO: 5742391 - DNA, 25 bp, Homo sapien
agcagcacctggccgcggcgcgtct

SEQ ID NO: 5742392 - DNA, 25 bp, Homo sapien
tggtggccagctcggccacgccgtt

SEQ ID NO: 5742393 - DNA, 25 bp, Homo sapien
cgtgggcccgagtacggctgggact

SEQ ID NO: 5742394 - DNA, 25 bp, Homo sapien
gggtctcctccgagagcaggaactt

SEQ ID NO: 5742395 - DNA, 25 bp, Homo sapien
ttcttgaagtacagggccaggtccg

SEQ ID NO: 5742396 - DNA, 25 bp, Homo sapien
atgatcttcagtcattttcttgggc

SEQ ID NO: 5742397 - DNA, 25 bp, Homo sapien
ccgcggcgcgtctcgcagttgtgga

SEQ ID NO: 5742398 - DNA, 25 bp, Homo sapien
aaaaacaggctgggcgtggtggctc

SEQ ID NO: 5742399 - DNA, 25 bp, Homo sapien
aaaattcaggtacttcaagaacaca

SEQ ID NO: 5742400 - DNA, 25 bp, Homo sapien
ggtggtcgatgtcatggcacaggcc

SEQ ID NO: 5742401 - DNA, 25 bp, Homo sapien
gctctcttcttgaagtacagggcca

SEQ ID NO: 5742402 - DNA, 25 bp, Homo sapien
atcttcaggtacaacgtggcaaaat

SEQ ID NO: 5742403 - DNA, 25 bp, Homo sapien
atctcgtccctgtcgcacttcacgt

SEQ ID NO: 5742404 - DNA, 25 bp, Homo sapien
ggggttctggtccagaaagctccgg

SEQ ID NO: 5742405 - DNA, 25 bp, Homo sapien
ccgttgcgctggcggtacatgaaga

SEQ ID NO: 5742406 - DNA, 25 bp, Homo sapien
tagaaggccttgtggaactgcctct

SEQ ID NO: 5742407 - DNA, 25 bp, Homo sapien
ctcctcaaacaccttgttggccgac

SEQ ID NO: 5742408 - DNA, 25 bp, Homo sapien
ctcggccgccttgttccggtccatc

SEQ ID NO: 5742409 - DNA, 25 bp, Homo sapien
tgtagaagacaatttcccggccatc

SEQ ID NO: 5742410 - DNA, 25 bp, Homo sapien
cttcgctggtgaagaatgggccgtt

SEQ ID NO: 5742411 - DNA, 25 bp, Homo sapien
ctcatgcctgtaatcccagcacttc

SEQ ID NO: 5742412 - DNA, 25 bp, Homo sapien
cagcaaatgagctgaagtgagggca

SEQ ID NO: 5742413 - DNA, 25 bp, Homo sapien
tagctcttcagtttgccggtcatga

SEQ ID NO: 5742414 - DNA, 25 bp, Homo sapien
gtgcctttcttggctgccaccctct

SEQ ID NO: 5742415 - DNA, 25 bp, Homo sapien
cctgctcctcactgaggctcatggt

SEQ ID NO: 5742416 - DNA, 25 bp, Homo sapien
tcaaatgtggtgggccctggcagct

SEQ ID NO: 5742417 - DNA, 25 bp, Homo sapien
gccacccggagtcgtccagggcccc

SEQ ID NO: 5742418 - DNA, 25 bp, Homo sapien
actcggccacgtcctcgacgttcac

SEQ ID NO: 5742419 - DNA, 25 bp, Homo sapien
tgcagcggtcggcctgcaggagggt

SEQ ID NO: 5742420 - DNA, 25 bp, Homo sapien
gcggtcggcctgcaggagggtgcag

SEQ ID NO: 5742421 - DNA, 25 bp, Homo sapien
ctgaaaagcctggtggccagctcgg

SEQ ID NO: 5742422 - DNA, 25 bp, Homo sapien
acaggaaccgcaccaggacctcctg

SEQ ID NO: 5742423 - DNA, 25 bp, Homo sapien
cgatgtcatggcacaggccggctgt

SEQ ID NO: 5742424 - DNA, 25 bp, Homo sapien
tcatcagccagcgccttccactctt

SEQ ID NO: 5742425 - DNA, 25 bp, Homo sapien
acgatcttctgaaacatcgctctct

SEQ ID NO: 5742426 - DNA, 25 bp, Homo sapien
tccatcaggtggatcacgtgatcgt

SEQ ID NO: 5742427 - DNA, 25 bp, Homo sapien
acaggtcgcaggctgtcatcatcat

SEQ ID NO: 5742428 - DNA, 25 bp, Homo sapien
acatcgtctgggccacgttgaagcc

SEQ ID NO: 5742429 - DNA, 25 bp, Homo sapien
cctaacctcttgtagcaaatagcca

SEQ ID NO: 5742430 - DNA, 25 bp, Homo sapien
tcaaacaccttgttggccgaccaca

SEQ ID NO: 5742431 - DNA, 25 bp, Homo sapien
tcgcacttcacgtggtaaaggacca

SEQ ID NO: 5742432 - DNA, 25 bp, Homo sapien
ctttgccattcatgatgggtgtggc

SEQ ID NO: 5742433 - DNA, 25 bp, Homo sapien
ggctacagtttattcacagttggct

SEQ ID NO: 5742434 - DNA, 25 bp, Homo sapien
tctcctccttcttgttgacgatggg

SEQ ID NO: 5742435 - DNA, 25 bp, Homo sapien
tcttcagtcattttcttgggcttcc

SEQ ID NO: 5742436 - DNA, 25 bp, Homo sapien
ggccagctcggccacgccgttgcgc

SEQ ID NO: 5742437 - DNA, 25 bp, Homo sapien
tgtcctggtagttcttggactcatc

SEQ ID NO: 5742438 - DNA, 25 bp, Homo sapien
tccggtccatcataggaatgggctg

SEQ ID NO: 5742439 - DNA, 25 bp, Homo sapien
gggggatctggaactttcggaccac

SEQ ID NO: 5742440 - DNA, 25 bp, Homo sapien
ctgggggatctggaactttcggacc

SEQ ID NO: 5742441 - DNA, 25 bp, Homo sapien
tcctgaaatttgaacatttcgtcag

SEQ ID NO: 5742442 - DNA, 25 bp, Homo sapien
caggacgctgtccggctgcacgctg

SEQ ID NO: 5742443 - DNA, 25 bp, Homo sapien
ttcatcactgaccagcccaggaact

SEQ ID NO: 5742444 - DNA, 25 bp, Homo sapien
gaagaccacgcgctccatgttgatg

SEQ ID NO: 5742445 - DNA, 25 bp, Homo sapien
aggtggaggttgcagtgagctgaga

SEQ ID NO: 5742446 - DNA, 25 bp, Homo sapien
ccaggcgcgctctggttggcaggat

SEQ ID NO: 5742447 - DNA, 25 bp, Homo sapien
cctcatactcatcagccagcgcctt

SEQ ID NO: 5742448 - DNA, 25 bp, Homo sapien
tcgtccagggccccttcctgaaatt

SEQ ID NO: 5742449 - DNA, 25 bp, Homo sapien
ataaaaacaggctgggcgtggtggc

SEQ ID NO: 5742450 - DNA, 25 bp, Homo sapien
gccatgtgtggtggtgggcgcctgt

SEQ ID NO: 5742451 - DNA, 25 bp, Homo sapien
tcgtcagcaaatgagctgaagtgag

SEQ ID NO: 5742452 - DNA, 25 bp, Homo sapien
gaccacagcagcacctggccgcggc

SEQ ID NO: 5742453 - DNA, 25 bp, Homo sapien
taggtgtcggtgttcatcactgacc

SEQ ID NO: 5742454 - DNA, 25 bp, Homo sapien
gtaaaggaccatgtcctgtgcgatg

SEQ ID NO: 5742455 - DNA, 25 bp, Homo sapien
ggccagcatattctttgtcttgtag

SEQ ID NO: 5742456 - DNA, 25 bp, Homo sapien
atcctgcaccagctccagcagcgcc

SEQ ID NO: 5742457 - DNA, 25 bp, Homo sapien
tgcagtcggtcgaacatgggcagga

SEQ ID NO: 5742458 - DNA, 25 bp, Homo sapien
ccatgtcctgtgcgatgtccttgcg

SEQ ID NO: 5742459 - DNA, 25 bp, Homo sapien
atgctctcctgcatatcctgcacca

SEQ ID NO: 5742460 - DNA, 25 bp, Homo sapien
cgctccatgttgatgctctcctgca

SEQ ID NO: 5742461 - DNA, 25 bp, Homo sapien
cgtgccacggcactccagcctgggt

SEQ ID NO: 5742462 - DNA, 25 bp, Homo sapien
ggccagggcccagtgatcggctgag

SEQ ID NO: 5742463 - DNA, 25 bp, Homo sapien
aaaggaccatgtcctgtgcgatgtc

SEQ ID NO: 5742464 - DNA, 25 bp, Homo sapien
cctgtgcgatgtccttgcggttctc

SEQ ID NO: 5742465 - DNA, 25 bp, Homo sapien
ccttcactttggcctcatactcatc

SEQ ID NO: 5742466 - DNA, 25 bp, Homo sapien
gagtcggggggcaccaggcagtcct

SEQ ID NO: 5742467 - DNA, 25 bp, Homo sapien
gattgagggagccatagggtcccca

SEQ ID NO: 5742468 - DNA, 25 bp, Homo sapien
cagcttggggagctcggccgccttg

SEQ ID NO: 5742469 - DNA, 25 bp, Homo sapien
caggtggtgccgctccaaaatcgag

SEQ ID NO: 5742470 - DNA, 25 bp, Homo sapien
tgttggtgccgcggtggtcgatgtc

SEQ ID NO: 5742471 - DNA, 25 bp, Homo sapien
agggctcagtttcttcccaaagtac

SEQ ID NO: 5742472 - DNA, 25 bp, Homo sapien
gtccatcataggaatgggctgctga

SEQ ID NO: 5742473 - DNA, 25 bp, Homo sapien
accagcccaggaactgtgtcaggga

SEQ ID NO: 5742474 - DNA, 25 bp, Homo sapien
gtgcactccaggtcagagaagtgga

SEQ ID NO: 5742475 - DNA, 25 bp, Homo sapien
aggctgcagcggtcggcctgcagga

SEQ ID NO: 5742476 - DNA, 25 bp, Homo sapien
aacatcgctctcttcttgaagtaca

SEQ ID NO: 5742477 - DNA, 25 bp, Homo sapien
tgagctggatctcgtccctgtcgca

SEQ ID NO: 5742478 - DNA, 25 bp, Homo sapien
cctcgtcctgttcgtcaaagggctt

SEQ ID NO: 5742479 - DNA, 25 bp, Homo sapien
cttccgggtcgtctccagggacagg

SEQ ID NO: 5742480 - DNA, 25 bp, Homo sapien
gaatgaccttgatctcctccttgcc

SEQ ID NO: 5742481 - DNA, 25 bp, Homo sapien
accctttgctgatggagaacaggaa

SEQ ID NO: 5742482 - DNA, 25 bp, Homo sapien
caggctgtcatcatcatggccatga

SEQ ID NO: 5742483 - DNA, 25 bp, Homo sapien
gctgggccgccattgcaaatttctg

SEQ ID NO: 5742484 - DNA, 25 bp, Homo sapien
gcgccttccactctttcctattgtt

SEQ ID NO: 5742485 - DNA, 25 bp, Homo sapien
agcttggaaggccgctggccagggc

SEQ ID NO: 5742486 - DNA, 25 bp, Homo sapien
atttcgcccagctcgtcctcatcgc

SEQ ID NO: 5742487 - DNA, 25 bp, Homo sapien
aacatgggcaggatctcttcgtgga

SEQ ID NO: 5742488 - DNA, 25 bp, Homo sapien
aatctcctccttcttgttgacgatg

SEQ ID NO: 5742489 - DNA, 25 bp, Homo sapien
gccatgacgatctccttccgggtcg

SEQ ID NO: 5742490 - DNA, 25 bp, Homo sapien
aatatccagaatgatcttcagtcat

SEQ ID NO: 5742491 - DNA, 25 bp, Homo sapien
ttgcggttctccagcttgttcatct

SEQ ID NO: 5742492 - DNA, 25 bp, Homo sapien
gccatgatcaccgccacgacgtctt

SEQ ID NO: 5742493 - DNA, 25 bp, Homo sapien
tgaagtgagggcactcggccacgtc

SEQ ID NO: 5742494 - DNA, 25 bp, Homo sapien
gtagtacatctggatgccacatttg

SEQ ID NO: 5742495 - DNA, 25 bp, Homo sapien
tctggaactttcggaccacgcccag

SEQ ID NO: 5742496 - DNA, 25 bp, Homo sapien
ccaagactgtcctttccaagtcacc

SEQ ID NO: 5742497 - DNA, 25 bp, Homo sapien
atttctgtgcctttcttggctgcca

SEQ ID NO: 5742498 - DNA, 25 bp, Homo sapien
acatcttcgtcttcgctggtgaaga

SEQ ID NO: 5742499 - DNA, 25 bp, Homo sapien
cccacttgcagcttggggagctcgg

SEQ ID NO: 5742500 - DNA, 25 bp, Homo sapien
ctttcctattgttctgcagtcggtc

SEQ ID NO: 5742501 - DNA, 25 bp, Homo sapien
cgtctcgcagttgtggaggtagctc

SEQ ID NO: 5742502 - DNA, 25 bp, Homo sapien
tgttggccgaccacagcagcacctg

SEQ ID NO: 5742503 - DNA, 25 bp, Homo sapien
tgatgagccacccggagtcgtccag

SEQ ID NO: 5742504 - DNA, 25 bp, Homo sapien
gagaactccttgtacacgaatgtgc

SEQ ID NO: 5742505 - DNA, 25 bp, Homo sapien
caggtgatagatcttcaggtacaac

SEQ ID NO: 5742506 - DNA, 25 bp, Homo sapien
cccagctcttcttgtcctggtagtt

SEQ ID NO: 5742507 - DNA, 25 bp, Homo sapien
ggaaacgagagaactccttgtacac

SEQ ID NO: 5742508 - DNA, 25 bp, Homo sapien
ggcctcatactcatcagccagcgcc

SEQ ID NO: 5742509 - DNA, 25 bp, Homo sapien
cggctgggactctcccatcagcaca

SEQ ID NO: 5742510 - DNA, 25 bp, Homo sapien
ccacgtagcttggaaggccgctggc

SEQ ID NO: 5742511 - DNA, 25 bp, Homo sapien
gaccttgctctggacttcccagggc

SEQ ID NO: 5742512 - DNA, 25 bp, Homo sapien
gaaggcctccaggtccgtgtagtag

SEQ ID NO: 5742513 - DNA, 25 bp, Homo sapien
tccttctcctccagagccttcactt

SEQ ID NO: 5742514 - DNA, 25 bp, Homo sapien
agggacaggtactccacccagctct

SEQ ID NO: 5742515 - DNA, 25 bp, Homo sapien
gcaaatgagctgaagtgagggcact

SEQ ID NO: 5742516 - DNA, 25 bp, Homo sapien
agaatgggccgttgagcttgttcac

SEQ ID NO: 5742517 - DNA, 25 bp, Homo sapien
gatctccttccgggtcgtctccagg

SEQ ID NO: 5742518 - DNA, 25 bp, Homo sapien
tgaaaccccatctgtactgaaaata

SEQ ID NO: 5742519 - DNA, 25 bp, Homo sapien
atggacagcacattcttgatgagcc

SEQ ID NO: 5742520 - DNA, 25 bp, Homo sapien
caaagtactggcgggcaaaatcggg

SEQ ID NO: 5742521 - DNA, 25 bp, Homo sapien
ggctcatgcctgtaatcccagcact

SEQ ID NO: 5742522 - DNA, 25 bp, Homo sapien
aattccttctccttggtcatgtcca

SEQ ID NO: 5742523 - DNA, 25 bp, Homo sapien
gtgcgaccttgctctggacttccca

SEQ ID NO: 5742524 - DNA, 25 bp, Homo sapien
ccccatgggaccagtgctcacagga

SEQ ID NO: 5742525 - DNA, 25 bp, Homo sapien
atacaaaaattagccatgtgtggtg

SEQ ID NO: 5742526 - DNA, 25 bp, Homo sapien
gggtgtgggaatgaccttgatctcc

SEQ ID NO: 5742527 - DNA, 25 bp, Homo sapien
catcatcatggccatgacgatctcc

SEQ ID NO: 5742528 - DNA, 25 bp, Homo sapien
gcgggtgatcacctgaggtcaggag

SEQ ID NO: 5742529 - DNA, 25 bp, Homo sapien
acagagcaagactccatctcaaaaa

SEQ ID NO: 5742530 - DNA, 25 bp, Homo sapien
tctgcagtcggtcgaacatgggcag

SEQ ID NO: 5742531 - DNA, 25 bp, Homo sapien
tgttgtaaaatgtggcgactcccac

SEQ ID NO: 5742532 - DNA, 25 bp, Homo sapien
tcggccacgtcctcgacgttcacca

SEQ ID NO: 5742533 - DNA, 25 bp, Homo sapien
cccaaagtactggcgggcaaaatcg

SEQ ID NO: 5742534 - DNA, 25 bp, Homo sapien
tcgtcaaagggcttcccgtctttcc

SEQ ID NO: 5742535 - DNA, 25 bp, Homo sapien
accccgatgtccagtgggaagacga

SEQ ID NO: 5742536 - DNA, 25 bp, Homo sapien
tgcctgtaatcccagcacttcagga

SEQ ID NO: 5742537 - DNA, 25 bp, Homo sapien
tattcacagttggcttcagtttata

SEQ ID NO: 5742538 - DNA, 25 bp, Homo sapien
tgtgtcagggactccatgagaacct

SEQ ID NO: 5742539 - DNA, 25 bp, Homo sapien
gctcctccttcaggatttcgcccag

SEQ ID NO: 5742540 - DNA, 25 bp, Homo sapien
gccagttgtggtaggtgattctccg

SEQ ID NO: 5742541 - DNA, 25 bp, Homo sapien
ttccttctccttggtcatgtccagg

SEQ ID NO: 5742542 - DNA, 25 bp, Homo sapien
tctgccacgtagcttggaaggccgc

SEQ ID NO: 5742543 - DNA, 25 bp, Homo sapien
gatcggctgagggtgtgggaatgac

SEQ ID NO: 5742544 - DNA, 25 bp, Homo sapien
aacatttcgtcagcggaagcattca

SEQ ID NO: 5742545 - DNA, 25 bp, Homo sapien
tgaagccgtggcgccagttgtggta

SEQ ID NO: 5742546 - DNA, 25 bp, Homo sapien
agccacgtggcccacgaccccgatg

SEQ ID NO: 5742547 - DNA, 25 bp, Homo sapien
tgcagtgagctgagatcgtgccacg

SEQ ID NO: 5742548 - DNA, 25 bp, Homo sapien
ttgtggaggtagctcaggtgataga

SEQ ID NO: 5742549 - DNA, 25 bp, Homo sapien
tgctgccgccggttcaggttctggt

SEQ ID NO: 5742550 - DNA, 25 bp, Homo sapien
gccccttcctgaaatttgaacattt

SEQ ID NO: 5742551 - DNA, 25 bp, Homo sapien
tggtggctcatgcctgtaatcccag

SEQ ID NO: 5742552 - DNA, 25 bp, Homo sapien
ccttgttccggtccatcataggaat

SEQ ID NO: 5742553 - DNA, 25 bp, Homo sapien
ctgccatgatcaccgccacgacgtc

SEQ ID NO: 5742554 - DNA, 25 bp, Homo sapien
tctcctgcatatcctgcaccagctc

SEQ ID NO: 5742555 - DNA, 25 bp, Homo sapien
cgtgctctcctccacctggcagagg

SEQ ID NO: 5742556 - DNA, 25 bp, Homo sapien
ggtggctgcctgtccctggagacgc

SEQ ID NO: 5742557 - DNA, 25 bp, Homo sapien
gctcgtcagcaaatgagctgaagtg

SEQ ID NO: 5742558 - DNA, 25 bp, Homo sapien
tgacagagcaagactccatctcaaa

SEQ ID NO: 5742559 - DNA, 25 bp, Homo sapien
aagtggaattcgtagatgtcaaatg

SEQ ID NO: 5742560 - DNA, 25 bp, Homo sapien
ggcttggtgatggcagacaggtcgc

SEQ ID NO: 5742561 - DNA, 25 bp, Homo sapien
tgggccgccattgcaaatttctgtg

SEQ ID NO: 5742562 - DNA, 25 bp, Homo sapien
agccgtggagcttagccaaggggtt

SEQ ID NO: 5742563 - DNA, 25 bp, Homo sapien
ccggccatcaggcgtgcgtgggccc

SEQ ID NO: 5742564 - DNA, 25 bp, Homo sapien
tcgatgtccgtcagctcctcaaaca

SEQ ID NO: 5742565 - DNA, 25 bp, Homo sapien
ccttgcggttctccagcttgttcat

SEQ ID NO: 5742566 - DNA, 25 bp, Homo sapien
aaaattaaaatatccagaatgatct

SEQ ID NO: 5742567 - DNA, 25 bp, Homo sapien
ggcaaaatcggggttctggtccaga

SEQ ID NO: 5742568 - DNA, 25 bp, Homo sapien
cactgccatgatcaccgccacgacg

SEQ ID NO: 5742569 - DNA, 25 bp, Homo sapien
gatgtccgtcagctcctcaaacacc

SEQ ID NO: 5742570 - DNA, 25 bp, Homo sapien
gcttggggagctcggccgccttgtt

SEQ ID NO: 5742571 - DNA, 25 bp, Homo sapien
atgagccacccggagtcgtccaggg

SEQ ID NO: 5742572 - DNA, 25 bp, Homo sapien
cataggaatgggctgctgatccaag

SEQ ID NO: 5742573 - DNA, 25 bp, Homo sapien
atgaagaggctgcagcggtcggcct

SEQ ID NO: 5742574 - DNA, 25 bp, Homo sapien
gtgagctcgtcagcaaatgagctga

SEQ ID NO: 5742575 - DNA, 25 bp, Homo sapien
caggatttcgcccagctcgtcctca

SEQ ID NO: 5742576 - DNA, 25 bp, Homo sapien
tacacgaatgtgcacacgaagtcga

SEQ ID NO: 5742577 - DNA, 25 bp, Homo sapien
catattctttgtcttgtagtcagtg

SEQ ID NO: 5742578 - DNA, 25 bp, Homo sapien
aattcgtagatgtcaaatgtggtgg

SEQ ID NO: 5742579 - DNA, 25 bp, Homo sapien
ccagtgggaagacgatctcggagtc

SEQ ID NO: 5742580 - DNA, 25 bp, Homo sapien
cagtgagctcgtcagcaaatgagct

SEQ ID NO: 5742581 - DNA, 25 bp, Homo sapien
gtctcctccgagagcaggaacttcc

SEQ ID NO: 5742582 - DNA, 25 bp, Homo sapien
tagccatgtgtggtggtgggcgcct

SEQ ID NO: 5742583 - DNA, 25 bp, Homo sapien
ttcaggatttcgcccagctcgtcct

SEQ ID NO: 5742584 - DNA, 25 bp, Homo sapien
ggactccatgagaacctcgtcctgt

SEQ ID NO: 5742585 - DNA, 25 bp, Homo sapien
ccctggcagctcctccttcaggatt

SEQ ID NO: 5742586 - DNA, 25 bp, Homo sapien
cattcttgatgagccacccggagtc

SEQ ID NO: 5742587 - DNA, 25 bp, Homo sapien
aggaactgtgtcagggactccatga

SEQ ID NO: 5742588 - DNA, 25 bp, Homo sapien
ctggatctcgtccctgtcgcacttc

SEQ ID NO: 5742589 - DNA, 25 bp, Homo sapien
caggccgcggccacattctcagggc

SEQ ID NO: 5742590 - DNA, 25 bp, Homo sapien
cacgtggtaaaggaccatgtcctgt

SEQ ID NO: 5742591 - DNA, 25 bp, Homo sapien
ttgagggagccatagggtccccatg

SEQ ID NO: 5742592 - DNA, 25 bp, Homo sapien
attctccggtaccctttgctgatgg

SEQ ID NO: 5742593 - DNA, 25 bp, Homo sapien
cgcaggccgcggccacattctcagg

SEQ ID NO: 5742594 - DNA, 25 bp, Homo sapien
cagaaagctccgggcctgctcctca

SEQ ID NO: 5742595 - DNA, 25 bp, Homo sapien
ctccaaaatcgaggagccgtggagc

SEQ ID NO: 5742596 - DNA, 25 bp, Homo sapien
cagggtctcctccgagagcaggaac

SEQ ID NO: 5742597 - DNA, 25 bp, Homo sapien
gaatcgcttgaacctgggaggtgga

SEQ ID NO: 5742598 - DNA, 25 bp, Homo sapien
gaaatttgaacatttcgtcagcgga

SEQ ID NO: 5742599 - DNA, 25 bp, Homo sapien
tcagggctcagtttcttcccaaagt

SEQ ID NO: 5742600 - DNA, 25 bp, Homo sapien
ggccacgttgaagccgtggcgccag

SEQ ID NO: 5742601 - DNA, 25 bp, Homo sapien
cagctcgtagtacatctggatgcca

SEQ ID NO: 5742602 - DNA, 25 bp, Homo sapien
aatcctagtgggtgaagattgaggg

SEQ ID NO: 5742603 - DNA, 25 bp, Homo sapien
gtggctcatgcctgtaatcccagca

SEQ ID NO: 5742604 - DNA, 25 bp, Homo sapien
taatcccagcacttcaggaagctga

SEQ ID NO: 5742605 - DNA, 25 bp, Homo sapien
tgaacctgggaggtggaggttgcag

SEQ ID NO: 5742606 - DNA, 25 bp, Homo sapien
gcaaatagccacaggcagaacccaa

SEQ ID NO: 5742607 - DNA, 25 bp, Homo sapien
tgatgggtgtggccagcatattctt

SEQ ID NO: 5742608 - DNA, 25 bp, Homo sapien
cattgcaaatttctgtgcctttctt

SEQ ID NO: 5742609 - DNA, 25 bp, Homo sapien
cactctttcctattgttctgcagtc

SEQ ID NO: 5742610 - DNA, 25 bp, Homo sapien
gccggctgtcaccatggcgaaggcc

SEQ ID NO: 5742611 - DNA, 25 bp, Homo sapien
gcggaagcattcatgatgttacaaa

SEQ ID NO: 5742612 - DNA, 25 bp, Homo sapien
aggtacaacgtggcaaaattcaggt

SEQ ID NO: 5742613 - DNA, 25 bp, Homo sapien
tcgatcactttgtagaagacaattt

SEQ ID NO: 5742614 - DNA, 25 bp, Homo sapien
atgtagtcgatcactttgtagaaga

SEQ ID NO: 5742615 - DNA, 25 bp, Homo sapien
tgagaacctcgtcctgttcgtcaaa

SEQ ID NO: 5742616 - DNA, 25 bp, Homo sapien
atgtccaggaggcccacggagtacc

SEQ ID NO: 5742617 - DNA, 25 bp, Homo sapien
ccagctccagcagcgccgtgctctc

SEQ ID NO: 5742618 - DNA, 25 bp, Homo sapien
gtctttgccattcatgatgggtgtg

SEQ ID NO: 5742619 - DNA, 25 bp, Homo sapien
cagaactcagcagccacgagaagtg

SEQ ID NO: 5742620 - DNA, 25 bp, Homo sapien
tcctccttcttgttgacgatgggca

SEQ ID NO: 5742621 - DNA, 25 bp, Homo sapien
ggcccagtgatcggctgagggtgtg

SEQ ID NO: 5742622 - DNA, 25 bp, Homo sapien
cggtgcactccaggtcagagaagtg

SEQ ID NO: 5742623 - DNA, 25 bp, Homo sapien
cttgcagcttggggagctcggccgc

SEQ ID NO: 5742624 - DNA, 25 bp, Homo sapien
taggaatgggctgctgatccaagac

SEQ ID NO: 5742625 - DNA, 25 bp, Homo sapien
atcacgtgatcgtgctgccgccggt

SEQ ID NO: 5742626 - DNA, 25 bp, Homo sapien
gacctcctgggggatctggaacttt

SEQ ID NO: 5742627 - DNA, 25 bp, Homo sapien
ggggagctcggccgccttgttccgg

SEQ ID NO: 5742628 - DNA, 25 bp, Homo sapien
tgtcaaatgtggtgggccctggcag

SEQ ID NO: 5742629 - DNA, 25 bp, Homo sapien
gtcatcatcatggccatgacgatct

SEQ ID NO: 5742630 - DNA, 25 bp, Homo sapien
gctgggcgtggtggctcatgcctgt

SEQ ID NO: 5742631 - DNA, 25 bp, Homo sapien
tcgacgttcaccatctttttggtct

SEQ ID NO: 5742632 - DNA, 25 bp, Homo sapien
tcggctgagggtgtgggaatgacct

SEQ ID NO: 5742633 - DNA, 25 bp, Homo sapien
ctcttcgtggaaacgagagaactcc

SEQ ID NO: 5742634 - DNA, 25 bp, Homo sapien
agcagcgtgaacatcgtctgggcca

SEQ ID NO: 5742635 - DNA, 25 bp, Homo sapien
ttggactcatccacgatcttctgaa

SEQ ID NO: 5742636 - DNA, 25 bp, Homo sapien
ccaggaactgtgtcagggactccat

SEQ ID NO: 5742637 - DNA, 25 bp, Homo sapien
tcgtctccagggacaggtactccac

SEQ ID NO: 5742638 - DNA, 25 bp, Homo sapien
gacgttcaccatctttttggtctga

SEQ ID NO: 5742639 - DNA, 25 bp, Homo sapien
tcccatcagcacagaccacacgtca

SEQ ID NO: 5742640 - DNA, 25 bp, Homo sapien
gcctccaggtccgtgtagtagctct

SEQ ID NO: 5742641 - DNA, 25 bp, Homo sapien
cctttgctgatggagaacaggaacc

SEQ ID NO: 5742642 - DNA, 25 bp, Homo sapien
acctgaggtcaggagttcgagacca

SEQ ID NO: 5742643 - DNA, 25 bp, Homo sapien
ccagcctgggtgacagagcaagact

SEQ ID NO: 5742644 - DNA, 25 bp, Homo sapien
ggaggtagctcaggtgatagatctt

SEQ ID NO: 5742645 - DNA, 25 bp, Homo sapien
cagtttataaaaacaggctgggcgt

SEQ ID NO: 5742646 - DNA, 25 bp, Homo sapien
tcagggactccatgagaacctcgtc

SEQ ID NO: 5742647 - DNA, 25 bp, Homo sapien
actgaggctcatggtggctgcctgt

SEQ ID NO: 5742648 - DNA, 25 bp, Homo sapien
tgggccgttgagcttgttcactgcc

SEQ ID NO: 5742649 - DNA, 25 bp, Homo sapien
agaagtggaattcgtagatgtcaaa

SEQ ID NO: 5742650 - DNA, 25 bp, Homo sapien
cagttggcttcagtttataaaaaca

SEQ ID NO: 5742651 - DNA, 25 bp, Homo sapien
cctggagacgctgctgctccaggca

SEQ ID NO: 5742652 - DNA, 25 bp, Homo sapien
tgttcgtcaaagggcttcccgtctt

SEQ ID NO: 5742653 - DNA, 25 bp, Homo sapien
cttctcctccagagccttcactttg

SEQ ID NO: 5742654 - DNA, 25 bp, Homo sapien
ggaggtggaggttgcagtgagctga

SEQ ID NO: 5742655 - DNA, 25 bp, Homo sapien
gaccatgtcctgtgcgatgtccttg

SEQ ID NO: 5742656 - DNA, 25 bp, Homo sapien
cacgaatgtgcacacgaagtcgatg

SEQ ID NO: 5742657 - DNA, 25 bp, Homo sapien
gccaaggggttctgggacttcatct

SEQ ID NO: 5742658 - DNA, 25 bp, Homo sapien
cctgtcgcacttcacgtggtaaagg

SEQ ID NO: 5742659 - DNA, 25 bp, Homo sapien
ttcccaaagtactggcgggcaaaat

SEQ ID NO: 5742660 - DNA, 25 bp, Homo sapien
ctcctcactgaggctcatggtggct

SEQ ID NO: 5742661 - DNA, 25 bp, Homo sapien
cttgatgagccacccggagtcgtcc

SEQ ID NO: 5742662 - DNA, 25 bp, Homo sapien
cgatgggcatggacagcacattctt

SEQ ID NO: 5742663 - DNA, 25 bp, Homo sapien
cttgtcctggtagttcttggactca

SEQ ID NO: 5742664 - DNA, 25 bp, Homo sapien
tagtcagtgagctcgtcagcaaatg

SEQ ID NO: 5742665 - DNA, 25 bp, Homo sapien
gtcagcggaagcattcatgatgtta

SEQ ID NO: 5742666 - DNA, 25 bp, Homo sapien
aaaatatccagaatgatcttcagtc

SEQ ID NO: 5742667 - DNA, 25 bp, Homo sapien
atgtccagtgggaagacgatctcgg

SEQ ID NO: 5742668 - DNA, 25 bp, Homo sapien
gcaccgtgtagaaggccttgtggaa

SEQ ID NO: 5742669 - DNA, 25 bp, Homo sapien
gtcggggggcaccaggcagtcctcc

SEQ ID NO: 5742670 - DNA, 25 bp, Homo sapien
aagtgcgaccttgctctggacttcc

SEQ ID NO: 5742671 - DNA, 25 bp, Homo sapien
aaataaagccgctttctgccacgta

SEQ ID NO: 5742672 - DNA, 25 bp, Homo sapien
ggaagacgatctcggagtcgggggg

SEQ ID NO: 5742673 - DNA, 25 bp, Homo sapien
tggcaggatgagctggatctcgtcc

SEQ ID NO: 5742674 - DNA, 25 bp, Homo sapien
ccgttgagcttgttcactgccatga

SEQ ID NO: 5742675 - DNA, 25 bp, Homo sapien
tgaagattgagggagccatagggtc

SEQ ID NO: 5742676 - DNA, 25 bp, Homo sapien
cgtggtggctcatgcctgtaatccc

SEQ ID NO: 5742677 - DNA, 25 bp, Homo sapien
tctgggacttcatctggtacaggtt

SEQ ID NO: 5742678 - DNA, 25 bp, Homo sapien
cgggcacccgtcctcgcaggccgcg

SEQ ID NO: 5742679 - DNA, 25 bp, Homo sapien
catagggtccccatgggaccagtgc

SEQ ID NO: 5742680 - DNA, 25 bp, Homo sapien
cctcactgaggctcatggtggctgc

SEQ ID NO: 5742681 - DNA, 25 bp, Homo sapien
acgtggcccacgaccccgatgtcca

SEQ ID NO: 5742682 - DNA, 25 bp, Homo sapien
gctgatccaagactgtcctttccaa

SEQ ID NO: 5742683 - DNA, 25 bp, Homo sapien
ggaacttcccaaactccaggtggtg

SEQ ID NO: 5742684 - DNA, 25 bp, Homo sapien
gagaacaggaaccgcaccaggacct

SEQ ID NO: 5742685 - DNA, 25 bp, Homo sapien
gcctttcttggctgccaccctctcc

SEQ ID NO: 5742686 - DNA, 25 bp, Homo sapien
ctcttgtagcaaatagccacaggca

SEQ ID NO: 5742687 - DNA, 25 bp, Homo sapien
gctctggttggcaggatgagctgga

SEQ ID NO: 5742688 - DNA, 25 bp, Homo sapien
tatccagaatgatcttcagtcattt

SEQ ID NO: 5742689 - DNA, 25 bp, Homo sapien
cagcccaggaactgtgtcagggact

SEQ ID NO: 5742690 - DNA, 25 bp, Homo sapien
gtaccgctcgcagttgaggtaggcc

SEQ ID NO: 5742691 - DNA, 25 bp, Homo sapien
acagtttattcacagttggcttcag

SEQ ID NO: 5742692 - DNA, 25 bp, Homo sapien
gggggcaccaggcagtcctccagga

SEQ ID NO: 5742693 - DNA, 25 bp, Homo sapien
accccatctgtactgaaaatacaaa

SEQ ID NO: 5742694 - DNA, 25 bp, Homo sapien
cacgcccagctcgtagtacatctgg

SEQ ID NO: 5742695 - DNA, 25 bp, Homo sapien
ggcagctcctccttcaggatttcgc

SEQ ID NO: 5742696 - DNA, 25 bp, Homo sapien
tactgaaaatacaaaaattagccat

SEQ ID NO: 5742697 - DNA, 25 bp, Homo sapien
gtagtagctcttcagtttgccggtc

SEQ ID NO: 5742698 - DNA, 25 bp, Homo sapien
gctgtcaccatggcgaaggcctcca

SEQ ID NO: 5742699 - DNA, 25 bp, Homo sapien
ttttggtctgagccacgtggcccac

SEQ ID NO: 5742700 - DNA, 25 bp, Homo sapien
gaactcagcagccacgagaagtgcg

SEQ ID NO: 5742701 - DNA, 25 bp, Homo sapien
tcagcagccacgagaagtgcgacct

SEQ ID NO: 5742702 - DNA, 25 bp, Homo sapien
gtctttcctgttgtaaaatgtggcg

SEQ ID NO: 5742703 - DNA, 25 bp, Homo sapien
agggactccatgagaacctcgtcct

SEQ ID NO: 5742704 - DNA, 25 bp, Homo sapien
agggtgcagaggcgccgcaggacct

SEQ ID NO: 5742705 - DNA, 25 bp, Homo sapien
ggagcttagccaaggggttctggga

SEQ ID NO: 5742706 - DNA, 25 bp, Homo sapien
cacgctgaaaagcctggtggccagc

SEQ ID NO: 5742707 - DNA, 25 bp, Homo sapien
ctcaggaggctgaggcacgagaatc

SEQ ID NO: 5742708 - DNA, 25 bp, Homo sapien
aggtactccacccagctcttcttgt

SEQ ID NO: 5742709 - DNA, 25 bp, Homo sapien
cctgtaatcccagcacttcaggaag

SEQ ID NO: 5742710 - DNA, 25 bp, Homo sapien
tcactttgtagaagacaatttcccg

SEQ ID NO: 5742711 - DNA, 25 bp, Homo sapien
cgcaccaggacctcctgggggatct

SEQ ID NO: 5742712 - DNA, 25 bp, Homo sapien
ccagctcggccacgccgttgcgctg

SEQ ID NO: 5742713 - DNA, 25 bp, Homo sapien
agtcaccttgctcccagaactcagc

SEQ ID NO: 5742714 - DNA, 25 bp, Homo sapien
tgcagaggcgccgcaggaccttgaa

SEQ ID NO: 5742715 - DNA, 25 bp, Homo sapien
gaagacaatttcccggccatcaggc

SEQ ID NO: 5742716 - DNA, 25 bp, Homo sapien
ttcctaacctcttgtagcaaatagc

SEQ ID NO: 5742717 - DNA, 25 bp, Homo sapien
ctggtagatgttcagggtctcctcc

SEQ ID NO: 5742718 - DNA, 25 bp, Homo sapien
tactggcgggcaaaatcggggttct

SEQ ID NO: 5742719 - DNA, 25 bp, Homo sapien
ctcaggtgatagatcttcaggtaca

SEQ ID NO: 5742720 - DNA, 25 bp, Homo sapien
ccttggtcatgtccaggaggcccac

SEQ ID NO: 5742721 - DNA, 25 bp, Homo sapien
cttgttgacgatgggcatggacagc

SEQ ID NO: 5742722 - DNA, 25 bp, Homo sapien
acgttgaagccgtggcgccagttgt

SEQ ID NO: 5742723 - DNA, 25 bp, Homo sapien
gtttataaaaacaggctgggcgtgg

SEQ ID NO: 5742724 - DNA, 25 bp, Homo sapien
tcactgaggctcatggtggctgcct

SEQ ID NO: 5742725 - DNA, 25 bp, Homo sapien
ccttcaggatttcgcccagctcgtc

SEQ ID NO: 5742726 - DNA, 25 bp, Homo sapien
tcggaccacgcccagctcgtagtac

SEQ ID NO: 5742727 - DNA, 25 bp, Homo sapien
tccggtaccctttgctgatggagaa

SEQ ID NO: 5742728 - DNA, 25 bp, Homo sapien
atgaccttgatctcctccttgccgt

SEQ ID NO: 5742729 - DNA, 25 bp, Homo sapien
ttcgcccagctcgtcctcatcgcag

SEQ ID NO: 5742730 - DNA, 25 bp, Homo sapien
gggaatgaccttgatctcctccttg

SEQ ID NO: 5742731 - DNA, 25 bp, Homo sapien
aggcgggtgatcacctgaggtcagg

SEQ ID NO: 5742732 - DNA, 25 bp, Homo sapien
ggcccgagtacggctgggactctcc

SEQ ID NO: 5742733 - DNA, 25 bp, Homo sapien
ggtgccgcggtggtcgatgtcatgg

SEQ ID NO: 5742734 - DNA, 25 bp, Homo sapien
cagggccccttcctgaaatttgaac

SEQ ID NO: 5742735 - DNA, 25 bp, Homo sapien
gtagtcgatcactttgtagaagaca

SEQ ID NO: 5742736 - DNA, 25 bp, Homo sapien
ccagcttgttcatcttgtcgtaggt

SEQ ID NO: 5742737 - DNA, 25 bp, Homo sapien
tgtagcaaatagccacaggcagaac

SEQ ID NO: 5742738 - DNA, 25 bp, Homo sapien
gtcagcaggctccttccccaggcgc

SEQ ID NO: 5742739 - DNA, 25 bp, Homo sapien
caggtcagagaagtggaattcgtag

SEQ ID NO: 5742740 - DNA, 25 bp, Homo sapien
agaggtcccggaggctgtcgcagtc

SEQ ID NO: 5742741 - DNA, 25 bp, Homo sapien
tggcagaggtcccggaggctgtcgc

SEQ ID NO: 5742742 - DNA, 25 bp, Homo sapien
ttcttgatgagccacccggagtcgt

SEQ ID NO: 5742743 - DNA, 25 bp, Homo sapien
tagatgtcaaatgtggtgggccctg

SEQ ID NO: 5742744 - DNA, 25 bp, Homo sapien
aagtgagggcactcggccacgtcct

SEQ ID NO: 5742745 - DNA, 25 bp, Homo sapien
ggtggtgccgctccaaaatcgagga

SEQ ID NO: 5742746 - DNA, 25 bp, Homo sapien
cagttgaggtaggcccgcaccgtgt

SEQ ID NO: 5742747 - DNA, 25 bp, Homo sapien
atcaggcgtgcgtgggcccgagtac

SEQ ID NO: 5742748 - DNA, 25 bp, Homo sapien
tgaccagcccaggaactgtgtcagg

SEQ ID NO: 5742749 - DNA, 25 bp, Homo sapien
agcacattcttgatgagccacccgg

SEQ ID NO: 5742750 - DNA, 25 bp, Homo sapien
tcgtagtacatctggatgccacatt

SEQ ID NO: 5742751 - DNA, 25 bp, Homo sapien
ttcactttggcctcatactcatcag

SEQ ID NO: 5742752 - DNA, 25 bp, Homo sapien
ggctgtcatcatcatggccatgacg

SEQ ID NO: 5742753 - DNA, 25 bp, Homo sapien
aggccttgtggaactgcctctcgat

SEQ ID NO: 5742754 - DNA, 25 bp, Homo sapien
acgctgtccggctgcacgctgaaaa

SEQ ID NO: 5742755 - DNA, 25 bp, Homo sapien
cggtaccctttgctgatggagaaca

SEQ ID NO: 5742756 - DNA, 25 bp, Homo sapien
cgtcctcgcaggccgcggccacatt

SEQ ID NO: 5742757 - DNA, 25 bp, Homo sapien
ccttctccttggtcatgtccaggag

SEQ ID NO: 5742758 - DNA, 25 bp, Homo sapien
tagcaaatagccacaggcagaaccc

SEQ ID NO: 5742759 - DNA, 25 bp, Homo sapien
tgcacacgaagtcgatgaagcccac

SEQ ID NO: 5742760 - DNA, 25 bp, Homo sapien
ctgtgcctttcttggctgccaccct

SEQ ID NO: 5742761 - DNA, 25 bp, Homo sapien
gtcctgttcgtcaaagggcttcccg

SEQ ID NO: 5742762 - DNA, 25 bp, Homo sapien
cgttcaccatctttttggtctgagc

SEQ ID NO: 5742763 - DNA, 25 bp, Homo sapien
tcttcttgaagtacagggccaggtc

SEQ ID NO: 5742764 - DNA, 25 bp, Homo sapien
gccacgccgttgcgctggcggtaca

SEQ ID NO: 5742765 - DNA, 25 bp, Homo sapien
atagccacaggcagaacccaaatcc

SEQ ID NO: 5742766 - DNA, 25 bp, Homo sapien
aaacgagagaactccttgtacacga

SEQ ID NO: 5742767 - DNA, 25 bp, Homo sapien
ggactctcccatcagcacagaccac

SEQ ID NO: 5742768 - DNA, 25 bp, Homo sapien
agacaggtcgcaggctgtcatcatc

SEQ ID NO: 5742769 - DNA, 25 bp, Homo sapien
ctccagcttgttcatcttgtcgtag

SEQ ID NO: 5742770 - DNA, 25 bp, Homo sapien
agttcggtgcactccaggtcagaga

SEQ ID NO: 5742771 - DNA, 25 bp, Homo sapien
tccctgtcgcacttcacgtggtaaa

SEQ ID NO: 5742772 - DNA, 25 bp, Homo sapien
cctgtagtcccagctactcaggagg

SEQ ID NO: 5742773 - DNA, 25 bp, Homo sapien
ccgcaggaccttgaagaccacgcgc

SEQ ID NO: 5742774 - DNA, 25 bp, Homo sapien
agatcgtgccacggcactccagcct

SEQ ID NO: 5742775 - DNA, 25 bp, Homo sapien
agcagccacgagaagtgcgaccttg

SEQ ID NO: 5742776 - DNA, 25 bp, Homo sapien
caaatcctagtgggtgaagattgag

SEQ ID NO: 5742777 - DNA, 25 bp, Homo sapien
gaccaggtccagttcggtgcactcc

SEQ ID NO: 5742778 - DNA, 25 bp, Homo sapien
gaagacttgggtgctgggccgccat

SEQ ID NO: 5742779 - DNA, 25 bp, Homo sapien
ggtgcagaggcgccgcaggaccttg

SEQ ID NO: 5742780 - DNA, 25 bp, Homo sapien
gacttcccagggcttggtgatggca

SEQ ID NO: 5742781 - DNA, 25 bp, Homo sapien
catgacgatctccttccgggtcgtc

SEQ ID NO: 5742782 - DNA, 25 bp, Homo sapien
tccgggtcgtctccagggacaggta

SEQ ID NO: 5742783 - DNA, 25 bp, Homo sapien
tgggcgtggtggctcatgcctgtaa

SEQ ID NO: 5742784 - DNA, 25 bp, Homo sapien
gatgtccatcaggtggatcacgtga

SEQ ID NO: 5742785 - DNA, 25 bp, Homo sapien
ccaaaatcgaggagccgtggagctt

SEQ ID NO: 5742786 - DNA, 25 bp, Homo sapien
aagattgagggagccatagggtccc

SEQ ID NO: 5742787 - DNA, 25 bp, Homo sapien
acttcatctggtacaggttgttggt

SEQ ID NO: 5742788 - DNA, 25 bp, Homo sapien
tttgtaggctacagtttattcacag

SEQ ID NO: 5742789 - DNA, 25 bp, Homo sapien
tgcgtgggcccgagtacggctggga

SEQ ID NO: 5742790 - DNA, 25 bp, Homo sapien
tcaaaaaattccttctccttggtca

SEQ ID NO: 5742791 - DNA, 25 bp, Homo sapien
tgggtgacagagcaagactccatct

SEQ ID NO: 5742792 - DNA, 25 bp, Homo sapien
gcgatgtccatcaggtggatcacgt

SEQ ID NO: 5742793 - DNA, 25 bp, Homo sapien
cacaggatacagcaggttgaagact

SEQ ID NO: 5742794 - DNA, 25 bp, Homo sapien
cacagttggcttcagtttataaaaa

SEQ ID NO: 5742795 - DNA, 25 bp, Homo sapien
aaaatcgaggagccgtggagcttag

SEQ ID NO: 5742796 - DNA, 25 bp, Homo sapien
gagtaccgctcgcagttgaggtagg

SEQ ID NO: 5742797 - DNA, 25 bp, Homo sapien
tccacctggcagaggtcccggaggc

SEQ ID NO: 5742798 - DNA, 25 bp, Homo sapien
tttgtagaagacaatttcccggcca

SEQ ID NO: 5742799 - DNA, 25 bp, Homo sapien
tcggtgttcatcactgaccagccca

SEQ ID NO: 5742800 - DNA, 25 bp, Homo sapien
ccgcggtggtcgatgtcatggcaca

SEQ ID NO: 5742801 - DNA, 25 bp, Homo sapien
ccttgaagaccacgcgctccatgtt

SEQ ID NO: 5742802 - DNA, 25 bp, Homo sapien
cgctcgcagttgaggtaggcccgca

SEQ ID NO: 5742803 - DNA, 25 bp, Homo sapien
ttcagtcattttcttgggcttccta

SEQ ID NO: 5742804 - DNA, 25 bp, Homo sapien
agtacatctggatgccacatttgac

SEQ ID NO: 5742805 - DNA, 25 bp, Homo sapien
gcttcccgtctttcctgttgtaaaa

SEQ ID NO: 5742806 - DNA, 25 bp, Homo sapien
gctgaggcacgagaatcgcttgaac

SEQ ID NO: 5742807 - DNA, 25 bp, Homo sapien
gacgatctcggagtcggggggcacc

SEQ ID NO: 5742808 - DNA, 25 bp, Homo sapien
cgcaggctgtcatcatcatggccat

SEQ ID NO: 5742809 - DNA, 25 bp, Homo sapien
ccacgatcttctgaaacatcgctct

SEQ ID NO: 5742810 - DNA, 25 bp, Homo sapien
atccaagactgtcctttccaagtca

SEQ ID NO: 5742811 - DNA, 25 bp, Homo sapien
gtgccgctccaaaatcgaggagccg

SEQ ID NO: 5742812 - DNA, 25 bp, Homo sapien
tttgctgatggagaacaggaaccgc

SEQ ID NO: 5742813 - DNA, 25 bp, Homo sapien
atcgtgctgccgccggttcaggttc

SEQ ID NO: 5742814 - DNA, 25 bp, Homo sapien
gggtgctgggccgccattgcaaatt

SEQ ID NO: 5742815 - DNA, 25 bp, Homo sapien
gctgtccggctgcacgctgaaaagc

SEQ ID NO: 5742816 - DNA, 25 bp, Homo sapien
tccagaaagctccgggcctgctcct

SEQ ID NO: 5742817 - DNA, 25 bp, Homo sapien
atatggtgaaaccccatctgtactg

SEQ ID NO: 5742818 - DNA, 25 bp, Homo sapien
cttggaaggccgctggccagggccc

SEQ ID NO: 5742819 - DNA, 25 bp, Homo sapien
gatgttcagggtctcctccgagagc

SEQ ID NO: 5742820 - DNA, 25 bp, Homo sapien
caccaggacctcctgggggatctgg

SEQ ID NO: 5742821 - DNA, 25 bp, Homo sapien
ccatcataggaatgggctgctgatc

SEQ ID NO: 5742822 - DNA, 25 bp, Homo sapien
tgtgcacacgaagtcgatgaagccc

SEQ ID NO: 5742823 - DNA, 25 bp, Homo sapien
gaaccgcaccaggacctcctggggg

SEQ ID NO: 5742824 - DNA, 25 bp, Homo sapien
gttcgagaccagcctgcccaatatg

SEQ ID NO: 5742825 - DNA, 25 bp, Homo sapien
ctggccagggcccagtgatcggctg

SEQ ID NO: 5742826 - DNA, 25 bp, Homo sapien
agtcgatcactttgtagaagacaat

SEQ ID NO: 5742827 - DNA, 25 bp, Homo sapien
cctgggtgacagagcaagactccat

SEQ ID NO: 5742828 - DNA, 25 bp, Homo sapien
ttgcaaatttctgtgcctttcttgg

SEQ ID NO: 5742829 - DNA, 25 bp, Homo sapien
catgatcaccgccacgacgtctttg

SEQ ID NO: 5742830 - DNA, 25 bp, Homo sapien
agggcttggtgatggcagacaggtc

SEQ ID NO: 5742831 - DNA, 25 bp, Homo sapien
tctcccatcagcacagaccacacgt

SEQ ID NO: 5742832 - DNA, 25 bp, Homo sapien
ccgccattgcaaatttctgtgcctt

SEQ ID NO: 5742833 - DNA, 25 bp, Homo sapien
gctctggacttcccagggcttggtg

SEQ ID NO: 5742834 - DNA, 25 bp, Homo sapien
ccacgtcctcgacgttcaccatctt

SEQ ID NO: 5742835 - DNA, 25 bp, Homo sapien
gtggaggtagctcaggtgatagatc

SEQ ID NO: 5742836 - DNA, 25 bp, Homo sapien
aatcgaggagccgtggagcttagcc

SEQ ID NO: 5742837 - DNA, 25 bp, Homo sapien
ccttgctctggacttcccagggctt

SEQ ID NO: 5742838 - DNA, 25 bp, Homo sapien
tgtggtggtgggcgcctgtagtccc

SEQ ID NO: 5742839 - DNA, 25 bp, Homo sapien
tgaggctcatggtggctgcctgtcc

SEQ ID NO: 5742840 - DNA, 25 bp, Homo sapien
gttgcgctggcggtacatgaagagg

SEQ ID NO: 5742841 - DNA, 25 bp, Homo sapien
ccatgggaccagtgctcacaggata

SEQ ID NO: 5742842 - DNA, 25 bp, Homo sapien
gcggttctccagcttgttcatcttg

SEQ ID NO: 5742843 - DNA, 25 bp, Homo sapien
accacacgtcaaaaaattccttctc

SEQ ID NO: 5742844 - DNA, 25 bp, Homo sapien
aaatgtggtgggccctggcagctcc

SEQ ID NO: 5742845 - DNA, 25 bp, Homo sapien
tttattcacagttggcttcagttta

SEQ ID NO: 5742846 - DNA, 25 bp, Homo sapien
tggtacaggttgttggtgccgcggt

SEQ ID NO: 5742847 - DNA, 25 bp, Homo sapien
gactcccacaatctcctccttcttg

SEQ ID NO: 5742848 - DNA, 25 bp, Homo sapien
gtccggcgggcacccgtcctcgcag

SEQ ID NO: 5742849 - DNA, 25 bp, Homo sapien
caggaggctgaggcacgagaatcgc

SEQ ID NO: 5742850 - DNA, 25 bp, Homo sapien
tgttcatcactgaccagcccaggaa

SEQ ID NO: 5742851 - DNA, 25 bp, Homo sapien
gctgaggcgggtgatcacctgaggt

SEQ ID NO: 5742852 - DNA, 25 bp, Homo sapien
gagagaactccttgtacacgaatgt

SEQ ID NO: 5742853 - DNA, 25 bp, Homo sapien
tgggctgctgatccaagactgtcct

SEQ ID NO: 5742854 - DNA, 25 bp, Homo sapien
ttcagtttataaaaacaggctgggc

SEQ ID NO: 5742855 - DNA, 25 bp, Homo sapien
catggccatgacgatctccttccgg

SEQ ID NO: 5742856 - DNA, 25 bp, Homo sapien
tggtgccgctccaaaatcgaggagc

SEQ ID NO: 5742857 - DNA, 25 bp, Homo sapien
cgctggcggtacatgaagaggctgc

SEQ ID NO: 5742858 - DNA, 25 bp, Homo sapien
cgatgtccagtgggaagacgatctc

SEQ ID NO: 5742859 - DNA, 25 bp, Homo sapien
catgatgggtgtggccagcatattc

SEQ ID NO: 5742860 - DNA, 25 bp, Homo sapien
atcaccgccacgacgtctttgccat

SEQ ID NO: 5742861 - DNA, 25 bp, Homo sapien
tggtggtgggcgcctgtagtcccag

SEQ ID NO: 5742862 - DNA, 25 bp, Homo sapien
ggccacgtcctcgacgttcaccatc

SEQ ID NO: 5742863 - DNA, 25 bp, Homo sapien
ggtctgagccacgtggcccacgacc

SEQ ID NO: 5742864 - DNA, 25 bp, Homo sapien
cacgagaagtgcgaccttgctctgg

SEQ ID NO: 5742865 - DNA, 25 bp, Homo sapien
ccttgccgtggaggatgtagtcgat

SEQ ID NO: 5742866 - DNA, 25 bp, Homo sapien
gccttgtggaactgcctctcgatgt

SEQ ID NO: 5742867 - DNA, 25 bp, Homo sapien
gagccatagggtccccatgggacca

SEQ ID NO: 5742868 - DNA, 25 bp, Homo sapien
gaactgtgtcagggactccatgaga

SEQ ID NO: 5742869 - DNA, 25 bp, Homo sapien
gtagctcaggtgatagatcttcagg

SEQ ID NO: 5742870 - DNA, 25 bp, Homo sapien
ttgttctgcagtcggtcgaacatgg

SEQ ID NO: 5742871 - DNA, 25 bp, Homo sapien
cgtccctgtcgcacttcacgtggta

SEQ ID NO: 5742872 - DNA, 25 bp, Homo sapien
gtggccagcatattctttgtcttgt

SEQ ID NO: 5742873 - DNA, 25 bp, Homo sapien
tgtagaaggccttgtggaactgcct

SEQ ID NO: 5742874 - DNA, 25 bp, Homo sapien
aaagccgctttctgccacgtagctt

SEQ ID NO: 5742875 - DNA, 25 bp, Homo sapien
ggcgtggtggctcatgcctgtaatc

SEQ ID NO: 5742876 - DNA, 25 bp, Homo sapien
tacggctgggactctcccatcagca

SEQ ID NO: 5742877 - DNA, 25 bp, Homo sapien
taggctacagtttattcacagttgg

SEQ ID NO: 5742878 - DNA, 25 bp, Homo sapien
agtgctcacaggatacagcaggttg

SEQ ID NO: 5742879 - DNA, 25 bp, Homo sapien
gaagtcgagagtgctccgtctacct

SEQ ID NO: 5742880 - DNA, 25 bp, Homo sapien
aggtagacggagcactctcgacttc

SEQ ID NO: 5742881 - DNA, 25 bp, Homo sapien
aggtctagaccgagattcaattact

SEQ ID NO: 5742882 - DNA, 25 bp, Homo sapien
agtaattgaatctcggtctagacct

SEQ ID NO: 5742883 - DNA, 25 bp, Homo sapien
agagacgacggtcatctcagcccaa

SEQ ID NO: 5742884 - DNA, 25 bp, Homo sapien
ttgggctgagatgaccgtcgtctct

SEQ ID NO: 5742885 - DNA, 25 bp, Homo sapien
tccggaccgcgagtgtgcgaatgtc

SEQ ID NO: 5742886 - DNA, 25 bp, Homo sapien
gacattcgcacactcgcggtccgga

SEQ ID NO: 5742887 - DNA, 25 bp, Homo sapien
ctcgggtgctcgaacgtccaacaac

SEQ ID NO: 5742888 - DNA, 25 bp, Homo sapien
gttgttggacgttcgagcacccgag

SEQ ID NO: 5742889 - DNA, 25 bp, Homo sapien
tcggtgccgtatcctcggttgaact

SEQ ID NO: 5742890 - DNA, 25 bp, Homo sapien
agttcaaccgaggatacggcaccga

SEQ ID NO: 5742891 - DNA, 25 bp, Homo sapien
ttagtaaacgtaactgacattttat

SEQ ID NO: 5742892 - DNA, 25 bp, Homo sapien
ataaaatgtcagttacgtttactaa

SEQ ID NO: 5742893 - DNA, 25 bp, Homo sapien
tccgtgcggacggtggcagtgtctt

SEQ ID NO: 5742894 - DNA, 25 bp, Homo sapien
aagacactgccaccgtccgcacgga

SEQ ID NO: 5742895 - DNA, 25 bp, Homo sapien
tttaagtacttaggacaattttata

SEQ ID NO: 5742896 - DNA, 25 bp, Homo sapien
tataaaattgtcctaagtacttaaa

SEQ ID NO: 5742897 - DNA, 25 bp, Homo sapien
cggtccgtgcacgtggacctgtgct

SEQ ID NO: 5742898 - DNA, 25 bp, Homo sapien
agcacaggtccacgtgcacggaccg

SEQ ID NO: 5742899 - DNA, 25 bp, Homo sapien
tccggactggcaggttccgagccga

SEQ ID NO: 5742900 - DNA, 25 bp, Homo sapien
tcggctcggaacctgccagtccgga

SEQ ID NO: 5742901 - DNA, 25 bp, Homo sapien
gtcgaggccggtttagacccaccag

SEQ ID NO: 5742902 - DNA, 25 bp, Homo sapien
ctggtgggtctaaaccggcctcgac

SEQ ID NO: 5742903 - DNA, 25 bp, Homo sapien
gcgggacggatctcaacccctggac

SEQ ID NO: 5742904 - DNA, 25 bp, Homo sapien
gtccaggggttgagatccgtcccgc

SEQ ID NO: 5742905 - DNA, 25 bp, Homo sapien
cttggacacggacgcggaaacccca

SEQ ID NO: 5742906 - DNA, 25 bp, Homo sapien
tggggtttccgcgtccgtgtccaag

SEQ ID NO: 5742907 - DNA, 25 bp, Homo sapien
cctccctcccgaaggcctcgtcgta

SEQ ID NO: 5742908 - DNA, 25 bp, Homo sapien
tacgacgaggccttcgggagggagg

SEQ ID NO: 5742909 - DNA, 25 bp, Homo sapien
accgcgggcggggcttcgctgaaag

SEQ ID NO: 5742910 - DNA, 25 bp, Homo sapien
ctttcagcgaagccccgcccgcggt

SEQ ID NO: 5742911 - DNA, 25 bp, Homo sapien
cccgacccggcctctgaccgcgggc

SEQ ID NO: 5742912 - DNA, 25 bp, Homo sapien
gcccgcggtcagaggccgggtcggg

SEQ ID NO: 5742913 - DNA, 25 bp, Homo sapien
cgccgccgcggacctacggccgggc

SEQ ID NO: 5742914 - DNA, 25 bp, Homo sapien
gcccggccgtaggtccgcggcggcg

SEQ ID NO: 5742915 - DNA, 25 bp, Homo sapien
gtaggtgatggaacgttattaggat

SEQ ID NO: 5742916 - DNA, 25 bp, Homo sapien
atcctaataacgttccatcacctac

SEQ ID NO: 5742917 - DNA, 25 bp, Homo sapien
cgcgcgggctgcaccgcgcgcgctg

SEQ ID NO: 5742918 - DNA, 25 bp, Homo sapien
cagcgcgcgcggtgcagcccgcgcg

SEQ ID NO: 5742919 - DNA, 25 bp, Homo sapien
tcgccgccgcgcgggctgcaccgcg

SEQ ID NO: 5742920 - DNA, 25 bp, Homo sapien
cgcggtgcagcccgcgcggcggcga

SEQ ID NO: 5742921 - DNA, 25 bp, Homo sapien
accgtgtcgacggaactccagacgg

SEQ ID NO: 5742922 - DNA, 25 bp, Homo sapien
ccgtctggagttccgtcgacacggt

SEQ ID NO: 5742923 - DNA, 25 bp, Homo sapien
caacctcaaggacgcgttaccaaaa

SEQ ID NO: 5742924 - DNA, 25 bp, Homo sapien
ttttggtaacgcgtccttgaggttg

SEQ ID NO: 5742925 - DNA, 25 bp, Homo sapien
cctgtacgcgaaagggtcctgtaga

SEQ ID NO: 5742926 - DNA, 25 bp, Homo sapien
tctacaggaccctttcgcgtacagg

SEQ ID NO: 5742927 - DNA, 25 bp, Homo sapien
cactactgaaaacggttgttgctcc

SEQ ID NO: 5742928 - DNA, 25 bp, Homo sapien
ggagcaacaaccgttttcagtagtg

SEQ ID NO: 5742929 - DNA, 25 bp, Homo sapien
cgaccctcaccttgggtcaccgacc

SEQ ID NO: 5742930 - DNA, 25 bp, Homo sapien
ggtcggtgacccaaggtgagggtcg

SEQ ID NO: 5742931 - DNA, 25 bp, Homo sapien
ctgtgttatcgtaaatgaattagac

SEQ ID NO: 5742932 - DNA, 25 bp, Homo sapien
gtctaattcatttacgataacacag

SEQ ID NO: 5742933 - DNA, 25 bp, Homo sapien
tatatcagctcacaattctttaccc

SEQ ID NO: 5742934 - DNA, 25 bp, Homo sapien
gggtaaagaattgtgagctgatata

SEQ ID NO: 5742935 - DNA, 25 bp, Homo sapien
acctcgtggtggttaaggtccgaca

SEQ ID NO: 5742936 - DNA, 25 bp, Homo sapien
tgtcggaccttaaccaccacgaggt

SEQ ID NO: 5742937 - DNA, 25 bp, Homo sapien
tgttaatagatttcgtataaggaaa

SEQ ID NO: 5742938 - DNA, 25 bp, Homo sapien
tttccttatacgaaatctattaaca

SEQ ID NO: 5742939 - DNA, 25 bp, Homo sapien
ctgtctgctttatggagcgcgcggt

SEQ ID NO: 5742940 - DNA, 25 bp, Homo sapien
accgcgcgctccataaagcagacag

SEQ ID NO: 5742941 - DNA, 25 bp, Homo sapien
gatgtgacgatgaactaagtctaag

SEQ ID NO: 5742942 - DNA, 25 bp, Homo sapien
cttagacttagttcatcgtcacatc

SEQ ID NO: 5742943 - DNA, 25 bp, Homo sapien
taatttctaggtcgaaatgatccgt

SEQ ID NO: 5742944 - DNA, 25 bp, Homo sapien
acggatcatttcgacctagaaatta

SEQ ID NO: 5742945 - DNA, 25 bp, Homo sapien
tgtcccgaggcctgatctgtcgtgg

SEQ ID NO: 5742946 - DNA, 25 bp, Homo sapien
ccacgacagatcaggcctcgggaca

SEQ ID NO: 5742947 - DNA, 25 bp, Homo sapien
acccgtctgccggacggcagcgcgc

SEQ ID NO: 5742948 - DNA, 25 bp, Homo sapien
gcgcgctgccgtccggcagacgggt

SEQ ID NO: 5742949 - DNA, 25 bp, Homo sapien
ccaccgtgcccacccgtctgccgga

SEQ ID NO: 5742950 - DNA, 25 bp, Homo sapien
tccggcagacgggtgggcacggtgg

SEQ ID NO: 5742951 - DNA, 25 bp, Homo sapien
ccgaaccaccagaactgagacttac

SEQ ID NO: 5742952 - DNA, 25 bp, Homo sapien
gtaagtctcagttctggtggttcgg

SEQ ID NO: 5742953 - DNA, 25 bp, Homo sapien
tgctcctcgggaaggcgaccttaaa

SEQ ID NO: 5742954 - DNA, 25 bp, Homo sapien
tttaaggtcgccttcccgaggagca

SEQ ID NO: 5742955 - DNA, 25 bp, Homo sapien
cgttcgtcctctactattgccttat

SEQ ID NO: 5742956 - DNA, 25 bp, Homo sapien
ataaggcaatagtagaggacgaacg

SEQ ID NO: 5742957 - DNA, 25 bp, Homo sapien
gaccctcctcaatgcgtccgtccca

SEQ ID NO: 5742958 - DNA, 25 bp, Homo sapien
tgggacggacgcattgaggagggtc

SEQ ID NO: 5742959 - DNA, 25 bp, Homo sapien
tcgacacccctcctcggtactcgag

SEQ ID NO: 5742960 - DNA, 25 bp, Homo sapien
ctcgagtaccgaggaggggtgtcga

SEQ ID NO: 5742961 - DNA, 25 bp, Homo sapien
tactcccctgactcttgatttactc

SEQ ID NO: 5742962 - DNA, 25 bp, Homo sapien
gagtaaatcaagagtcaggggagta

SEQ ID NO: 5742963 - DNA, 25 bp, Homo sapien
ccaatccccacggcggccgtggcgt

SEQ ID NO: 5742964 - DNA, 25 bp, Homo sapien
acgccacggccgccgtggggattgg

SEQ ID NO: 5742965 - DNA, 25 bp, Homo sapien
tcgcggcctccttcgccgccggagg

SEQ ID NO: 5742966 - DNA, 25 bp, Homo sapien
cctccggcggcgaaggaggccgcga

SEQ ID NO: 5742967 - DNA, 25 bp, Homo sapien
gcagaggggcccttcgcgaggcgag

SEQ ID NO: 5742968 - DNA, 25 bp, Homo sapien
ctcgcctcgcgaagggcccctctgc

SEQ ID NO: 5742969 - DNA, 25 bp, Homo sapien
gaccgtagtccccgctggtgtcgta

SEQ ID NO: 5742970 - DNA, 25 bp, Homo sapien
tacgacaccagcggggactacggtc

SEQ ID NO: 5742971 - DNA, 25 bp, Homo sapien
aatatggtaaatactcccacagcca

SEQ ID NO: 5742972 - DNA, 25 bp, Homo sapien
tggctgtgggagtatttaccatatt

SEQ ID NO: 5742973 - DNA, 25 bp, Homo sapien
cgtggacggccgactcccttcggga

SEQ ID NO: 5742974 - DNA, 25 bp, Homo sapien
tcccgaagggagtcggccgtccacg

SEQ ID NO: 5742975 - DNA, 25 bp, Homo sapien
aagtacttgaagtgatatacacaac

SEQ ID NO: 5742976 - DNA, 25 bp, Homo sapien
gttgtgtatatcacttcaagtactt

SEQ ID NO: 5742977 - DNA, 25 bp, Homo sapien
tcatcgaatcattgggtctcatttt

SEQ ID NO: 5742978 - DNA, 25 bp, Homo sapien
aaaatgagacccaatgattcgatga

SEQ ID NO: 5742979 - DNA, 25 bp, Homo sapien
cctgtctggactggttgaacccaat

SEQ ID NO: 5742980 - DNA, 25 bp, Homo sapien
attgggttcaaccagtccagacagg

SEQ ID NO: 5742981 - DNA, 25 bp, Homo sapien
atcggaggtgagtccacacagggct

SEQ ID NO: 5742982 - DNA, 25 bp, Homo sapien
agccctgtgtggactcacctccgat

SEQ ID NO: 5742983 - DNA, 25 bp, Homo sapien
tgtggcctactacgtgggtcccgca

SEQ ID NO: 5742984 - DNA, 25 bp, Homo sapien
tgcgggacccacgtagtaggccaca

SEQ ID NO: 5742985 - DNA, 25 bp, Homo sapien
caggatgaaggaactgacgacagac

SEQ ID NO: 5742986 - DNA, 25 bp, Homo sapien
gtctgtcgtcagttccttcatcctg

SEQ ID NO: 5742987 - DNA, 25 bp, Homo sapien
ggaccgactgtgtccgggtccacac

SEQ ID NO: 5742988 - DNA, 25 bp, Homo sapien
gtgtggacccggacacagtcggtcc

SEQ ID NO: 5742989 - DNA, 25 bp, Homo sapien
caaacatggtcaagacgtattaaac

SEQ ID NO: 5742990 - DNA, 25 bp, Homo sapien
gtttaatacgtcttgaccatgtttg

SEQ ID NO: 5742991 - DNA, 25 bp, Homo sapien
gtacatatacaaacatggtcaagac

SEQ ID NO: 5742992 - DNA, 25 bp, Homo sapien
gtcttgaccatgtttgtatatgtac

SEQ ID NO: 5742993 - DNA, 25 bp, Homo sapien
gacgtcgcgggcggcgcgcggtgag

SEQ ID NO: 5742994 - DNA, 25 bp, Homo sapien
ctcaccgcgcgccgcccgcgacgtc

SEQ ID NO: 5742995 - DNA, 25 bp, Homo sapien
cgacgtcgcgggcggcgcgcggtga

SEQ ID NO: 5742996 - DNA, 25 bp, Homo sapien
tcaccgcgcgccgcccgcgacgtcg

SEQ ID NO: 5742997 - DNA, 25 bp, Homo sapien
gcccgacgtcgcgggcggcgcgcgg

SEQ ID NO: 5742998 - DNA, 25 bp, Homo sapien
ccgcgcgccgcccgcgacgtcgggc

SEQ ID NO: 5742999 - DNA, 25 bp, Homo sapien
aaagtgtaatcttacttctgataaa

SEQ ID NO: 5743000 - DNA, 25 bp, Homo sapien
tttatcagaagtaagattacacttt

SEQ ID NO: 5743001 - DNA, 25 bp, Homo sapien
ccgtagtagttctcgataaaagagt

SEQ ID NO: 5743002 - DNA, 25 bp, Homo sapien
actcttttatcgagaactactacgg

SEQ ID NO: 5743003 - DNA, 25 bp, Homo sapien
acagagaccgtcatttgttggtgtc

SEQ ID NO: 5743004 - DNA, 25 bp, Homo sapien
gacaccaacaaatgacggtctctgt

SEQ ID NO: 5743005 - DNA, 25 bp, Homo sapien
ggaagtgtttacagactcttttcag

SEQ ID NO: 5743006 - DNA, 25 bp, Homo sapien
ctgaaaagagtctgtaaacacttcc

SEQ ID NO: 5743007 - DNA, 25 bp, Homo sapien
agtattaaccctaacagttaatcag

SEQ ID NO: 5743008 - DNA, 25 bp, Homo sapien
ctgattaactgttagggttaatact

SEQ ID NO: 5743009 - DNA, 25 bp, Homo sapien
aggactcccgaaacacgggtggatg

SEQ ID NO: 5743010 - DNA, 25 bp, Homo sapien
catccacccgtgtttcgggagtcct

SEQ ID NO: 5743011 - DNA, 25 bp, Homo sapien
gggctccgctggtcggccggacaga

SEQ ID NO: 5743012 - DNA, 25 bp, Homo sapien
tctgtccggccgaccagcggagccc

SEQ ID NO: 5743013 - DNA, 25 bp, Homo sapien
agtctactactgagtgtctattaaa

SEQ ID NO: 5743014 - DNA, 25 bp, Homo sapien
tttaatagacactcagtagtagact

SEQ ID NO: 5743015 - DNA, 25 bp, Homo sapien
gggaccctcggacctacggatccgc

SEQ ID NO: 5743016 - DNA, 25 bp, Homo sapien
gcggatccgtaggtccgagggtccc

SEQ ID NO: 5743017 - DNA, 25 bp, Homo sapien
acaagtgacccaagattgtggtttg

SEQ ID NO: 5743018 - DNA, 25 bp, Homo sapien
caaaccacaatcttgggtcacttgt

SEQ ID NO: 5743019 - DNA, 25 bp, Homo sapien
agtcggtccaccaaggatagttaag

SEQ ID NO: 5743020 - DNA, 25 bp, Homo sapien
cttaactatccttggtggaccgact

SEQ ID NO: 5743021 - DNA, 25 bp, Homo sapien
ccacttcgtatctgaccacatactg

SEQ ID NO: 5743022 - DNA, 25 bp, Homo sapien
cagtatgtggtcagatacgaagtgg

SEQ ID NO: 5743023 - DNA, 25 bp, Homo sapien
ttataagagatattcttcttgtttt

SEQ ID NO: 5743024 - DNA, 25 bp, Homo sapien
aaaacaagaagaatatctcttataa

SEQ ID NO: 5743025 - DNA, 25 bp, Homo sapien
aattataagagatattcttcttgtt

SEQ ID NO: 5743026 - DNA, 25 bp, Homo sapien
aacaagaagaatatctcttataatt

SEQ ID NO: 5743027 - DNA, 25 bp, Homo sapien
gacacagtcaagggcatcacggacc

SEQ ID NO: 5743028 - DNA, 25 bp, Homo sapien
ggtccgtgatgcccttgactgtgtc

SEQ ID NO: 5743029 - DNA, 25 bp, Homo sapien
gcccccgacgccgggacgctccgta

SEQ ID NO: 5743030 - DNA, 25 bp, Homo sapien
tacggagcgtcccggcgtcgggggc

SEQ ID NO: 5743031 - DNA, 25 bp, Homo sapien
cgctacgtctggtcaccttccgtga

SEQ ID NO: 5743032 - DNA, 25 bp, Homo sapien
tcacggaaggtgaccagacgtagcg

SEQ ID NO: 5743033 - DNA, 25 bp, Homo sapien
gtcgcgtccgccacgtcgagccggt

SEQ ID NO: 5743034 - DNA, 25 bp, Homo sapien
accggctcgacgtggcggacgcgac

SEQ ID NO: 5743035 - DNA, 25 bp, Homo sapien
actcggcggacgtcgctgaagccga

SEQ ID NO: 5743036 - DNA, 25 bp, Homo sapien
tcggcttcagcgacgtccgccgagt

SEQ ID NO: 5743037 - DNA, 25 bp, Homo sapien
tccttctaagggtgtccagtcccag

SEQ ID NO: 5743038 - DNA, 25 bp, Homo sapien
ctgggactggacacccttagaagga

SEQ ID NO: 5743039 - DNA, 25 bp, Homo sapien
acacgtcgtgggttggcaggaccac

SEQ ID NO: 5743040 - DNA, 25 bp, Homo sapien
gtggtcctgccaacccacgacgtgt

SEQ ID NO: 5743041 - DNA, 25 bp, Homo sapien
ctctgttttctgctttggacgaaat

SEQ ID NO: 5743042 - DNA, 25 bp, Homo sapien
atttcgtccaaagcagaaaacagag

SEQ ID NO: 5743043 - DNA, 25 bp, Homo sapien
ttcttgcctgaaagtcggagcccgg

SEQ ID NO: 5743044 - DNA, 25 bp, Homo sapien
ccgggctccgactttcaggcaagaa

SEQ ID NO: 5743045 - DNA, 25 bp, Homo sapien
tagttttcataggagttcctataaa

SEQ ID NO: 5743046 - DNA, 25 bp, Homo sapien
tttataggaactcctatgaaaacta

SEQ ID NO: 5743047 - DNA, 25 bp, Homo sapien
accttaggcttacacatccgttcac

SEQ ID NO: 5743048 - DNA, 25 bp, Homo sapien
gtgaacggatgtgtaagcctaaggt

SEQ ID NO: 5743049 - DNA, 25 bp, Homo sapien
cgtcgggccgcgtcgacgtccgagt

SEQ ID NO: 5743050 - DNA, 25 bp, Homo sapien
actcggacgtcgacgcggcccgacg

SEQ ID NO: 5743051 - DNA, 25 bp, Homo sapien
caccccgggcgcgtcgggccgcgtc

SEQ ID NO: 5743052 - DNA, 25 bp, Homo sapien
gacgcggcccgacgcgcccggggtg

SEQ ID NO: 5743053 - DNA, 25 bp, Homo sapien
tgtataaaggtttttgaaaatcgat

SEQ ID NO: 5743054 - DNA, 25 bp, Homo sapien
atcgattttcaaaaacctttataca

SEQ ID NO: 5743055 - DNA, 25 bp, Homo sapien
ggaaacaagggctagggagtccacc

SEQ ID NO: 5743056 - DNA, 25 bp, Homo sapien
ggtggactccctagcccttgtttcc

SEQ ID NO: 5743057 - DNA, 25 bp, Homo sapien
gatcggagctcgtcctcccaggtgt

SEQ ID NO: 5743058 - DNA, 25 bp, Homo sapien
acacctgggaggacgagctccgatc

SEQ ID NO: 5743059 - DNA, 25 bp, Homo sapien
gacttaagaacgtgaacgtacactt

SEQ ID NO: 5743060 - DNA, 25 bp, Homo sapien
aagtgtacgttcacgttcttaagtc

SEQ ID NO: 5743061 - DNA, 25 bp, Homo sapien
ggtcgtcgagacctgccggtgtccg

SEQ ID NO: 5743062 - DNA, 25 bp, Homo sapien
cggacaccggcaggtctcgacgacc

SEQ ID NO: 5743063 - DNA, 25 bp, Homo sapien
cggcagagaatcactccagaggttt

SEQ ID NO: 5743064 - DNA, 25 bp, Homo sapien
aaacctctggagtgattctctgccg

SEQ ID NO: 5743065 - DNA, 25 bp, Homo sapien
gaccgagcctcctgctgacccgtgc

SEQ ID NO: 5743066 - DNA, 25 bp, Homo sapien
gcacgggtcagcaggaggctcggtc

SEQ ID NO: 5743067 - DNA, 25 bp, Homo sapien
ctgcctgtccggacgtaagggtaca

SEQ ID NO: 5743068 - DNA, 25 bp, Homo sapien
tgtacccttacgtccggacaggcag

SEQ ID NO: 5743069 - DNA, 25 bp, Homo sapien
gaaaaggtctaaacgaggtagagaa

SEQ ID NO: 5743070 - DNA, 25 bp, Homo sapien
ttctctacctcgtttagaccttttc

SEQ ID NO: 5743071 - DNA, 25 bp, Homo sapien
accaccagacgtctcgacggggccc

SEQ ID NO: 5743072 - DNA, 25 bp, Homo sapien
gggccccgtcgagacgtctggtggt

SEQ ID NO: 5743073 - DNA, 25 bp, Homo sapien
accagtattgactaccagttccgaa

SEQ ID NO: 5743074 - DNA, 25 bp, Homo sapien
ttcggaactggtagtcaatactggt

SEQ ID NO: 5743075 - DNA, 25 bp, Homo sapien
gtatctatctaccatttacgagtcg

SEQ ID NO: 5743076 - DNA, 25 bp, Homo sapien
cgactcgtaaatggtagatagatac

SEQ ID NO: 5743077 - DNA, 25 bp, Homo sapien
agccgcaaaccctgagccgcgaggg

SEQ ID NO: 5743078 - DNA, 25 bp, Homo sapien
ccctcgcggctcagggtttgcggct

SEQ ID NO: 5743079 - DNA, 25 bp, Homo sapien
aagtggagaaacagataaacaagac

SEQ ID NO: 5743080 - DNA, 25 bp, Homo sapien
gtcttgtttatctgtttctccactt

SEQ ID NO: 5743081 - DNA, 25 bp, Homo sapien
gggccgcagtgtggccggagggctc

SEQ ID NO: 5743082 - DNA, 25 bp, Homo sapien
gagccctccggccacactgcggccc

SEQ ID NO: 5743083 - DNA, 25 bp, Homo sapien
acctatctagtctgtacctcgtttt

SEQ ID NO: 5743084 - DNA, 25 bp, Homo sapien
aaaacgaggtacagactagataggt

SEQ ID NO: 5743085 - DNA, 25 bp, Homo sapien
ttagaaagacaactggtttttgtgt

SEQ ID NO: 5743086 - DNA, 25 bp, Homo sapien
acacaaaaaccagttgtctttctaa

SEQ ID NO: 5743087 - DNA, 25 bp, Homo sapien
ttgggtaccgccataggggccaccg

SEQ ID NO: 5743088 - DNA, 25 bp, Homo sapien
cggtggcccctatggcggtacccaa

SEQ ID NO: 5743089 - DNA, 25 bp, Homo sapien
tttaaatttggtgagtcttctaaat

SEQ ID NO: 5743090 - DNA, 25 bp, Homo sapien
atttagaagactcaccaaatttaaa

SEQ ID NO: 5743091 - DNA, 25 bp, Homo sapien
ttcggaaggacaaaggatgggagat

SEQ ID NO: 5743092 - DNA, 25 bp, Homo sapien
atctcccatcctttgtccttccgaa

SEQ ID NO: 5743093 - DNA, 25 bp, Homo sapien
cccgggtcaggtgtggggcgtgact

SEQ ID NO: 5743094 - DNA, 25 bp, Homo sapien
agtcacgccccacacctgacccggg

SEQ ID NO: 5743095 - DNA, 25 bp, Homo sapien
agggtaggctccgacccatggtgta

SEQ ID NO: 5743096 - DNA, 25 bp, Homo sapien
tacaccatgggtcggagcctaccct

SEQ ID NO: 5743097 - DNA, 25 bp, Homo sapien
cgacccccacagtcgactggtcctg

SEQ ID NO: 5743098 - DNA, 25 bp, Homo sapien
caggaccagtcgactgtgggggtcg

SEQ ID NO: 5743099 - DNA, 25 bp, Homo sapien
aaaaggacgtcaaaatttcgagtca

SEQ ID NO: 5743100 - DNA, 25 bp, Homo sapien
tgactcgaaattttgacgtcctttt

SEQ ID NO: 5743101 - DNA, 25 bp, Homo sapien
gtaccggtaccacgaatctgagaac

SEQ ID NO: 5743102 - DNA, 25 bp, Homo sapien
gttctcagattcgtggtaccggtac

SEQ ID NO: 5743103 - DNA, 25 bp, Homo sapien
accccacatccgctgtcctctcgtc

SEQ ID NO: 5743104 - DNA, 25 bp, Homo sapien
gacgagaggacagcggatgtggggt

SEQ ID NO: 5743105 - DNA, 25 bp, Homo sapien
tccctctcgccccatcaactcccag

SEQ ID NO: 5743106 - DNA, 25 bp, Homo sapien
ctgggagttgatggggcgagaggga

SEQ ID NO: 5743107 - DNA, 25 bp, Homo sapien
agtcggggctctggctgagaccctt

SEQ ID NO: 5743108 - DNA, 25 bp, Homo sapien
aagggtctcagccagagccccgact

SEQ ID NO: 5743109 - DNA, 25 bp, Homo sapien
ggagtcggggctctggctgagaccc

SEQ ID NO: 5743110 - DNA, 25 bp, Homo sapien
gggtctcagccagagccccgactcc

SEQ ID NO: 5743111 - DNA, 25 bp, Homo sapien
taagctggacggaccacgggattgt

SEQ ID NO: 5743112 - DNA, 25 bp, Homo sapien
acaatcccgtggtccgtccagctta

SEQ ID NO: 5743113 - DNA, 25 bp, Homo sapien
agaggccagcagttttctcgttgag

SEQ ID NO: 5743114 - DNA, 25 bp, Homo sapien
ctcaacgagaaaactgctggcctct

SEQ ID NO: 5743115 - DNA, 25 bp, Homo sapien
aatatgtaaccactttgtgaaccat

SEQ ID NO: 5743116 - DNA, 25 bp, Homo sapien
atggttcacaaagtggttacatatt

SEQ ID NO: 5743117 - DNA, 25 bp, Homo sapien
taatatgtaaccactttgtgaacca

SEQ ID NO: 5743118 - DNA, 25 bp, Homo sapien
tggttcacaaagtggttacatatta

SEQ ID NO: 5743119 - DNA, 25 bp, Homo sapien
ctccgaccgctccgtccgtgtcgta

SEQ ID NO: 5743120 - DNA, 25 bp, Homo sapien
tacgacacggacggagcggtcggag

SEQ ID NO: 5743121 - DNA, 25 bp, Homo sapien
caatctagaaagaagtcatttctgg

SEQ ID NO: 5743122 - DNA, 25 bp, Homo sapien
ccagaaatgacttctttctagattg

SEQ ID NO: 5743123 - DNA, 25 bp, Homo sapien
gaagaggaaatgtaacgagagatgg

SEQ ID NO: 5743124 - DNA, 25 bp, Homo sapien
ccatctctcgttacatttcctcttc

SEQ ID NO: 5743125 - DNA, 25 bp, Homo sapien
aaggtgttcgttcttacgctaaggc

SEQ ID NO: 5743126 - DNA, 25 bp, Homo sapien
gccttagcgtaagaacgaacacctt

SEQ ID NO: 5743127 - DNA, 25 bp, Homo sapien
catgtattagtacaggaaaacaaag

SEQ ID NO: 5743128 - DNA, 25 bp, Homo sapien
ctttgttttcctgtactaatacatg

SEQ ID NO: 5743129 - DNA, 25 bp, Homo sapien
gttacatcacgagacacaactaccc

SEQ ID NO: 5743130 - DNA, 25 bp, Homo sapien
gggtagttgtgtctcgtgatgtaac

SEQ ID NO: 5743131 - DNA, 25 bp, Homo sapien
aggaccgaggacacctgtagctcct

SEQ ID NO: 5743132 - DNA, 25 bp, Homo sapien
aggagctacaggtgtcctcggtcct

SEQ ID NO: 5743133 - DNA, 25 bp, Homo sapien
gacaccaggggctccagggcctcga

SEQ ID NO: 5743134 - DNA, 25 bp, Homo sapien
tcgaggccctggagcccctggtgtc

SEQ ID NO: 5743135 - DNA, 25 bp, Homo sapien
cggtgcgacaccaggggctccaggg

SEQ ID NO: 5743136 - DNA, 25 bp, Homo sapien
ccctggagcccctggtgtcgcaccg

SEQ ID NO: 5743137 - DNA, 25 bp, Homo sapien
tgagttcgggaagtcagcgacgtct

SEQ ID NO: 5743138 - DNA, 25 bp, Homo sapien
agacgtcgctgacttcccgaactca

SEQ ID NO: 5743139 - DNA, 25 bp, Homo sapien
ccttacgtccactggcaggggtgta

SEQ ID NO: 5743140 - DNA, 25 bp, Homo sapien
tacacccctgccagtggacgtaagg

SEQ ID NO: 5743141 - DNA, 25 bp, Homo sapien
ttgaccgtctatggcgagacgtccg

SEQ ID NO: 5743142 - DNA, 25 bp, Homo sapien
cggacgtctcgccatagacggtcaa

SEQ ID NO: 5743143 - DNA, 25 bp, Homo sapien
gggcgctaggatgcccgcgtcggca

SEQ ID NO: 5743144 - DNA, 25 bp, Homo sapien
tgccgacgcgggcatcctagcgccc

SEQ ID NO: 5743145 - DNA, 25 bp, Homo sapien
ggcgcgcgggcgctaggatgcccgc

SEQ ID NO: 5743146 - DNA, 25 bp, Homo sapien
gcgggcatcctagcgcccgcgcgcc

SEQ ID NO: 5743147 - DNA, 25 bp, Homo sapien
cgtctggggcgtccatcggcgccgc

SEQ ID NO: 5743148 - DNA, 25 bp, Homo sapien
gcggcgccgatggacgccccagacg

SEQ ID NO: 5743149 - DNA, 25 bp, Homo sapien
tcaccggtgtcgcaagtgggcctct

SEQ ID NO: 5743150 - DNA, 25 bp, Homo sapien
agaggcccacttgcgacaccggtga

SEQ ID NO: 5743151 - DNA, 25 bp, Homo sapien
gtcaggaggtttctgggcgagctta

SEQ ID NO: 5743152 - DNA, 25 bp, Homo sapien
taagctcgcccagaaacctcctgac

SEQ ID NO: 5743153 - DNA, 25 bp, Homo sapien
gggtcccgggtcctgccggctggat

SEQ ID NO: 5743154 - DNA, 25 bp, Homo sapien
atccagccggcaggacccgggaccc

SEQ ID NO: 5743155 - DNA, 25 bp, Homo sapien
ctcgtccacgggtcgtcggaaacga

SEQ ID NO: 5743156 - DNA, 25 bp, Homo sapien
tcgtttccgacgacccgtggacgag

SEQ ID NO: 5743157 - DNA, 25 bp, Homo sapien
caaccacaggtatcatttcatcttg

SEQ ID NO: 5743158 - DNA, 25 bp, Homo sapien
caagatgaaatgatacctgtggttg

SEQ ID NO: 5743159 - DNA, 25 bp, Homo sapien
agagtcccggtatcaaagaagaagg

SEQ ID NO: 5743160 - DNA, 25 bp, Homo sapien
ccttcttctttgataccgggactct

SEQ ID NO: 5743161 - DNA, 25 bp, Homo sapien
aggtcacgggcagtgacgggcgagg

SEQ ID NO: 5743162 - DNA, 25 bp, Homo sapien
cctcgcccgtcactgcccgtgacct

SEQ ID NO: 5743163 - DNA, 25 bp, Homo sapien
ggtcacgggcagtgacgggcgaggt

SEQ ID NO: 5743164 - DNA, 25 bp, Homo sapien
acctcgcccgtcactgcccgtgacc

SEQ ID NO: 5743165 - DNA, 25 bp, Homo sapien
aatacgatcaggttataaaaccagt

SEQ ID NO: 5743166 - DNA, 25 bp, Homo sapien
actggttttataacctgatcgtatt

SEQ ID NO: 5743167 - DNA, 25 bp, Homo sapien
ggtgtaagggattgtcgaaccggac

SEQ ID NO: 5743168 - DNA, 25 bp, Homo sapien
gtccggttcgacaatcccttacacc

SEQ ID NO: 5743169 - DNA, 25 bp, Homo sapien
gtagtccccaggagacatcgaacgg

SEQ ID NO: 5743170 - DNA, 25 bp, Homo sapien
ccgttcgatgtctcctggggactac

SEQ ID NO: 5743171 - DNA, 25 bp, Homo sapien
gtgggacccggtatccttctccacc

SEQ ID NO: 5743172 - DNA, 25 bp, Homo sapien
ggtggagaaggataccgggtcccac

SEQ ID NO: 5743173 - DNA, 25 bp, Homo sapien
cgggtgaaatgacactccgaaccga

SEQ ID NO: 5743174 - DNA, 25 bp, Homo sapien
tcggttcggagtgtcatttcacccg

SEQ ID NO: 5743175 - DNA, 25 bp, Homo sapien
gtcgggtcgttcctcaccgacgtca

SEQ ID NO: 5743176 - DNA, 25 bp, Homo sapien
tgacgtcggtgaggaacgacccgac

SEQ ID NO: 5743177 - DNA, 25 bp, Homo sapien
ttttaagtagttctcggaatcgaaa

SEQ ID NO: 5743178 - DNA, 25 bp, Homo sapien
tttcgattccgagaactacttaaaa

SEQ ID NO: 5743179 - DNA, 25 bp, Homo sapien
aacacaacttaattgatagttcaac

SEQ ID NO: 5743180 - DNA, 25 bp, Homo sapien
gttgaactatcaattaagttgtgtt

SEQ ID NO: 5743181 - DNA, 25 bp, Homo sapien
aagaggtctacgatgaaaggactcc

SEQ ID NO: 5743182 - DNA, 25 bp, Homo sapien
ggagtcctttcatcgtagacctctt

SEQ ID NO: 5743183 - DNA, 25 bp, Homo sapien
aatactcagttctaacataaattgt

SEQ ID NO: 5743184 - DNA, 25 bp, Homo sapien
acaatttatgttagaactgagtatt

SEQ ID NO: 5743185 - DNA, 25 bp, Homo sapien
gtcgacccgggcctactacgtggtg

SEQ ID NO: 5743186 - DNA, 25 bp, Homo sapien
caccacgtagtaggcccgggtcgac

SEQ ID NO: 5743187 - DNA, 25 bp, Homo sapien
aatctacgagaattcataagagaaa

SEQ ID NO: 5743188 - DNA, 25 bp, Homo sapien
tttctcttatgaattctcgtagatt

SEQ ID NO: 5743189 - DNA, 25 bp, Homo sapien
gcgataccgatcgtaagccgctttt

SEQ ID NO: 5743190 - DNA, 25 bp, Homo sapien
aaaagcggcttacgatcggtatcgc

SEQ ID NO: 5743191 - DNA, 25 bp, Homo sapien
ggcacctcgggaccctcgctgggaa

SEQ ID NO: 5743192 - DNA, 25 bp, Homo sapien
ttcccagcgagggtcccgaggtgcc

SEQ ID NO: 5743193 - DNA, 25 bp, Homo sapien
gtcgagtacgggtcctgagggttct

SEQ ID NO: 5743194 - DNA, 25 bp, Homo sapien
agaaccctcaggacccgtactcgac

SEQ ID NO: 5743195 - DNA, 25 bp, Homo sapien
taccaggtcctaattacccataagt

SEQ ID NO: 5743196 - DNA, 25 bp, Homo sapien
acttatgggtaattaggacctggta

SEQ ID NO: 5743197 - DNA, 25 bp, Homo sapien
gttacgctcgtataaggtcttgtcg

SEQ ID NO: 5743198 - DNA, 25 bp, Homo sapien
cgacaagaccttatacgagcgtaac

SEQ ID NO: 5743199 - DNA, 25 bp, Homo sapien
gcttcaggaggtgccaggggacggg

SEQ ID NO: 5743200 - DNA, 25 bp, Homo sapien
cccgtcccctggcacctcctgaagc

SEQ ID NO: 5743201 - DNA, 25 bp, Homo sapien
ctagacgggcacctcactacttgaa

SEQ ID NO: 5743202 - DNA, 25 bp, Homo sapien
ttcaagtagtgaggtgcccgtctag

SEQ ID NO: 5743203 - DNA, 25 bp, Homo sapien
gtcgccttcgcgcccttcctcgacg

SEQ ID NO: 5743204 - DNA, 25 bp, Homo sapien
cgtcgaggaagggcgcgaaggcgac

SEQ ID NO: 5743205 - DNA, 25 bp, Homo sapien
gcccgacctcgcgaaattttttgct

SEQ ID NO: 5743206 - DNA, 25 bp, Homo sapien
agcaaaaaatttcgcgaggtcgggc

SEQ ID NO: 5743207 - DNA, 25 bp, Homo sapien
ccgtcacacgttcctcgcaccccgt

SEQ ID NO: 5743208 - DNA, 25 bp, Homo sapien
acggggtgcgaggaacgtgtgacgg

SEQ ID NO: 5743209 - DNA, 25 bp, Homo sapien
acagtggtacttcggcccttcgtcc

SEQ ID NO: 5743210 - DNA, 25 bp, Homo sapien
ggacgaagggccgaagtaccactgt

SEQ ID NO: 5743211 - DNA, 25 bp, Homo sapien
gtcgtccgggtccaccagccccgcc

SEQ ID NO: 5743212 - DNA, 25 bp, Homo sapien
ggcggggctggtggacccggacgac

SEQ ID NO: 5743213 - DNA, 25 bp, Homo sapien
tgttcaattgtaaacgtgacacgaa

SEQ ID NO: 5743214 - DNA, 25 bp, Homo sapien
ttcgtgtcacgtttacaattgaaca

SEQ ID NO: 5743215 - DNA, 25 bp, Homo sapien
aaaaatagagtttactaaagtgatg

SEQ ID NO: 5743216 - DNA, 25 bp, Homo sapien
catcactttagtaaactctattttt

SEQ ID NO: 5743217 - DNA, 25 bp, Homo sapien
gtggacccaggatgcctctcccgtt

SEQ ID NO: 5743218 - DNA, 25 bp, Homo sapien
aacgggagaggcatcctgggtccac

SEQ ID NO: 5743219 - DNA, 25 bp, Homo sapien
gacgggggcgtcgactgaatctccc

SEQ ID NO: 5743220 - DNA, 25 bp, Homo sapien
gggagattcagtcgacgcccccgtc

SEQ ID NO: 5743221 - DNA, 25 bp, Homo sapien
atacaaattatttgttgttttcagt

SEQ ID NO: 5743222 - DNA, 25 bp, Homo sapien
actgaaaacaacaaataatttgtat

SEQ ID NO: 5743223 - DNA, 25 bp, Homo sapien
accggctccgagaccgccgtgactc

SEQ ID NO: 5743224 - DNA, 25 bp, Homo sapien
gagtcacggcggtctcggagccggt

SEQ ID NO: 5743225 - DNA, 25 bp, Homo sapien
caccggctccgagaccgccgtgact

SEQ ID NO: 5743226 - DNA, 25 bp, Homo sapien
agtcacggcggtctcggagccggtg

SEQ ID NO: 5743227 - DNA, 25 bp, Homo sapien
acctctggtgtgttcgggtcgcacg

SEQ ID NO: 5743228 - DNA, 25 bp, Homo sapien
cgtgcgacccgaacacaccagaggt

SEQ ID NO: 5743229 - DNA, 25 bp, Homo sapien
tttcgtgtcttgaaccaagttgagt

SEQ ID NO: 5743230 - DNA, 25 bp, Homo sapien
actcaacttggttcaagacacgaaa

SEQ ID NO: 5743231 - DNA, 25 bp, Homo sapien
gacaggttcagcagaaacccgtgtc

SEQ ID NO: 5743232 - DNA, 25 bp, Homo sapien
gacacgggtttctgctgaacctgtc

SEQ ID NO: 5743233 - DNA, 25 bp, Homo sapien
gacagtaggtagttaggtataaaaa

SEQ ID NO: 5743234 - DNA, 25 bp, Homo sapien
tttttatacctaactacctactgtc

SEQ ID NO: 5743235 - DNA, 25 bp, Homo sapien
gactgaaatactgatatagctttag

SEQ ID NO: 5743236 - DNA, 25 bp, Homo sapien
ctaaagctatatcagtatttcagtc

SEQ ID NO: 5743237 - DNA, 25 bp, Homo sapien
accctgtcggggtggggcatcggtc

SEQ ID NO: 5743238 - DNA, 25 bp, Homo sapien
gaccgatgccccaccccgacagggt

SEQ ID NO: 5743239 - DNA, 25 bp, Homo sapien
aacctaacttgaatagtcttaaaga

SEQ ID NO: 5743240 - DNA, 25 bp, Homo sapien
tctttaagactattcaagttaggtt

SEQ ID NO: 5743241 - DNA, 25 bp, Homo sapien
tcgaggtccgggtaacgacagtgcc

SEQ ID NO: 5743242 - DNA, 25 bp, Homo sapien
ggcactgtcgttacccggacctcga

SEQ ID NO: 5743243 - DNA, 25 bp, Homo sapien
cacatcttttagtcgtaacatttat

SEQ ID NO: 5743244 - DNA, 25 bp, Homo sapien
ataaatgttacgactaaaagatgtg

SEQ ID NO: 5743245 - DNA, 25 bp, Homo sapien
tccccggcatgagcgtcgcagaggt

SEQ ID NO: 5743246 - DNA, 25 bp, Homo sapien
acctctgcgacgctcatgccgggga

SEQ ID NO: 5743247 - DNA, 25 bp, Homo sapien
acagggccctgtcacggccatgctt

SEQ ID NO: 5743248 - DNA, 25 bp, Homo sapien
aagcatggccgtgacagggccctgt

SEQ ID NO: 5743249 - DNA, 25 bp, Homo sapien
caacctttggccaaaggagtgaaag

SEQ ID NO: 5743250 - DNA, 25 bp, Homo sapien
accccaaacagctgcggagtacaca

SEQ ID NO: 5743251 - DNA, 25 bp, Homo sapien
tgcccctgaggtgtctcctgactac

SEQ ID NO: 5743252 - DNA, 25 bp, Homo sapien
gcaggccctttcttcctgctgacaa

SEQ ID NO: 5743253 - DNA, 25 bp, Homo sapien
tgttgcccctgaggtgtctcctgac

SEQ ID NO: 5743254 - DNA, 25 bp, Homo sapien
tccgtgagcccctgcagtttcctgg

SEQ ID NO: 5743255 - DNA, 25 bp, Homo sapien
cacatggtctctacggaggaaagct

SEQ ID NO: 5743256 - DNA, 25 bp, Homo sapien
catgaccccaggacagacgcagtgg

SEQ ID NO: 5743257 - DNA, 25 bp, Homo sapien
agcatcctcatgaccccaggacaga

SEQ ID NO: 5743258 - DNA, 25 bp, Homo sapien
atgttcttggcacagcagaagtgtt

SEQ ID NO: 5743259 - DNA, 25 bp, Homo sapien
gtcgtcaacctcagcatcctcatga

SEQ ID NO: 5743260 - DNA, 25 bp, Homo sapien
actggctccctcatgttcttggcac

SEQ ID NO: 5743261 - DNA, 25 bp, Homo sapien
gtactctgggcctgtgctgttgccc

SEQ ID NO: 5743262 - DNA, 25 bp, Homo sapien
ctgacaaaacactggctccctcatg

SEQ ID NO: 5743263 - DNA, 25 bp, Homo sapien
ctgggcctgtgctgttgcccctgag

SEQ ID NO: 5743264 - DNA, 25 bp, Homo sapien
aatcgagaagtacagaaatgtccca

SEQ ID NO: 5743265 - DNA, 25 bp, Homo sapien
accagataggtctcgggaaggcaat

SEQ ID NO: 5743266 - DNA, 25 bp, Homo sapien
attgccttcccgagacctatctggt

SEQ ID NO: 5743267 - DNA, 25 bp, Homo sapien
aagattcagagtactgccaaaacct

SEQ ID NO: 5743268 - DNA, 25 bp, Homo sapien
aggttttggcagtactctgaatctt

SEQ ID NO: 5743269 - DNA, 25 bp, Homo sapien
gtcccttggcggtcgaggcgtcccg

SEQ ID NO: 5743270 - DNA, 25 bp, Homo sapien
cgggacgcctcgaccgccaagggac

SEQ ID NO: 5743271 - DNA, 25 bp, Homo sapien
agttcctgtaacaagttgaacaaaa

SEQ ID NO: 5743272 - DNA, 25 bp, Homo sapien
ttttgttcaacttgttacaggaact

SEQ ID NO: 5743273 - DNA, 25 bp, Homo sapien
attaagtactacaactcgaagtgta

SEQ ID NO: 5743274 - DNA, 25 bp, Homo sapien
tacacttcgagttgtagtacttaat

SEQ ID NO: 5743275 - DNA, 25 bp, Homo sapien
actactggtctggggtgggaggagt

SEQ ID NO: 5743276 - DNA, 25 bp, Homo sapien
actcctcccaccccagaccagtagt

SEQ ID NO: 5743277 - DNA, 25 bp, Homo sapien
gtgcgccagggcacacaccgtacgt

SEQ ID NO: 5743278 - DNA, 25 bp, Homo sapien
acgtacggtgtgtgccctggcgcac

SEQ ID NO: 5743279 - DNA, 25 bp, Homo sapien
acttacatctatcgacatctttaag

SEQ ID NO: 5743280 - DNA, 25 bp, Homo sapien
cttaaagatgtcgatagatgtaagt

SEQ ID NO: 5743281 - DNA, 25 bp, Homo sapien
acttgactatcactgtaacattaac

SEQ ID NO: 5743282 - DNA, 25 bp, Homo sapien
gttaatgttacagtgatagtcaagt

SEQ ID NO: 5743283 - DNA, 25 bp, Homo sapien
acggggcggtgtggccggtcgcggc

SEQ ID NO: 5743284 - DNA, 25 bp, Homo sapien
gccgcgaccggccacaccgccccgt

SEQ ID NO: 5743285 - DNA, 25 bp, Homo sapien
tgacatttgggccttcacggacttt

SEQ ID NO: 5743286 - DNA, 25 bp, Homo sapien
aaagtccgtgaaggcccaaatgtca

SEQ ID NO: 5743287 - DNA, 25 bp, Homo sapien
tctgttattgtagacttgcgtccac

SEQ ID NO: 5743288 - DNA, 25 bp, Homo sapien
gtggacgcaagtctacaataacaga

SEQ ID NO: 5743289 - DNA, 25 bp, Homo sapien
aaaatagattcaggtgtaaaaagag

SEQ ID NO: 5743290 - DNA, 25 bp, Homo sapien
ctctttttacacctgaatctatttt

SEQ ID NO: 5743291 - DNA, 25 bp, Homo sapien
ttcttttcgtaagagttaagactcg

SEQ ID NO: 5743292 - DNA, 25 bp, Homo sapien
cgagtcttaactcttacgaaaagaa

SEQ ID NO: 5743293 - DNA, 25 bp, Homo sapien
ggctgccgcctctttcgcccgacgc

SEQ ID NO: 5743294 - DNA, 25 bp, Homo sapien
gcgtcgggcgaaagaggcggcagcc

SEQ ID NO: 5743295 - DNA, 25 bp, Homo sapien
cgggctgccgcctctttcgcccgac

SEQ ID NO: 5743296 - DNA, 25 bp, Homo sapien
gtcgggcgaaagaggcggcagcccg

SEQ ID NO: 5743297 - DNA, 25 bp, Homo sapien
acagaacagacttagtgacaattat

SEQ ID NO: 5743298 - DNA, 25 bp, Homo sapien
ataattgtcactaagtctgttctgt

SEQ ID NO: 5743299 - DNA, 25 bp, Homo sapien
caggggtcaagaatgtccctgtcgg

SEQ ID NO: 5743300 - DNA, 25 bp, Homo sapien
ccgacagggacattcttgacccctg

SEQ ID NO: 5743301 - DNA, 25 bp, Homo sapien
tcctggaggtgaccagcccacagtc

SEQ ID NO: 5743302 - DNA, 25 bp, Homo sapien
gactgtgggctggtcacctccagga

SEQ ID NO: 5743303 - DNA, 25 bp, Homo sapien
cactggacggggtgcgacggcggtg

SEQ ID NO: 5743304 - DNA, 25 bp, Homo sapien
caccgccgtcgcaccccgtccagtg

SEQ ID NO: 5743305 - DNA, 25 bp, Homo sapien
agttggcgtcatatgtccgtgtagg

SEQ ID NO: 5743306 - DNA, 25 bp, Homo sapien
cctacacggacatatgacgccaact

SEQ ID NO: 5743307 - DNA, 25 bp, Homo sapien
gaggccgcccaggagctgggccggt

SEQ ID NO: 5743308 - DNA, 25 bp, Homo sapien
accggcccagctcctgggcggcctc

SEQ ID NO: 5743309 - DNA, 25 bp, Homo sapien
cccgaccagtgaggccgcccaggag

SEQ ID NO: 5743310 - DNA, 25 bp, Homo sapien
ctcctgggcggcctcactggtcggg

SEQ ID NO: 5743311 - DNA, 25 bp, Homo sapien
cccaggggtcagtcacgggccgagg

SEQ ID NO: 5743312 - DNA, 25 bp, Homo sapien
cctcggcccgtgactgacccctggg

SEQ ID NO: 5743313 - DNA, 25 bp, Homo sapien
acgttatgacgttaaccgaaggcaa

SEQ ID NO: 5743314 - DNA, 25 bp, Homo sapien
ttgccttcggttaacgtcataacgt

SEQ ID NO: 5743315 - DNA, 25 bp, Homo sapien
gcccctccggaatctagaaagaaat

SEQ ID NO: 5743316 - DNA, 25 bp, Homo sapien
atttctttctagattccggaggggc

SEQ ID NO: 5743317 - DNA, 25 bp, Homo sapien
acgcacaaggagaattcacctttag

SEQ ID NO: 5743318 - DNA, 25 bp, Homo sapien
ctaaaggtgaattctccttgtgcgt

SEQ ID NO: 5743319 - DNA, 25 bp, Homo sapien
gacgttcctgccgtcccggccgagt

SEQ ID NO: 5743320 - DNA, 25 bp, Homo sapien
actcggccgggacggcaggaacgtc

SEQ ID NO: 5743321 - DNA, 25 bp, Homo sapien
tttaacgttcatactattttatcat

SEQ ID NO: 5743322 - DNA, 25 bp, Homo sapien
atgataaaatagtatgaacgttaaa

SEQ ID NO: 5743323 - DNA, 25 bp, Homo sapien
ggtcgagtatactaggtagcaccga

SEQ ID NO: 5743324 - DNA, 25 bp, Homo sapien
tcggtgctacctagtatactcgacc

SEQ ID NO: 5743325 - DNA, 25 bp, Homo sapien
ggacgtacatcggacgggtccacgt

SEQ ID NO: 5743326 - DNA, 25 bp, Homo sapien
acgtggacccgtccgatgtacgtcc

SEQ ID NO: 5743327 - DNA, 25 bp, Homo sapien
ttacagtactattttaacacaataa

SEQ ID NO: 5743328 - DNA, 25 bp, Homo sapien
ttattgtgttaaaatagtactgtaa

SEQ ID NO: 5743329 - DNA, 25 bp, Homo sapien
cgattcattctactttaactatgaa

SEQ ID NO: 5743330 - DNA, 25 bp, Homo sapien
ttcatagttaaagtagaatgaatcg

SEQ ID NO: 5743331 - DNA, 25 bp, Homo sapien
actcaaagactttaccatgctcact

SEQ ID NO: 5743332 - DNA, 25 bp, Homo sapien
agtgagcatggtaaagtctttgagt

SEQ ID NO: 5743333 - DNA, 25 bp, Homo sapien
cgacagtggcgggagagacactaaa

SEQ ID NO: 5743334 - DNA, 25 bp, Homo sapien
tttagtgtctctcccgccactgtcg

SEQ ID NO: 5743335 - DNA, 25 bp, Homo sapien
actttaagcgtaaatttacattctg

SEQ ID NO: 5743336 - DNA, 25 bp, Homo sapien
cagaatgtaaatttacgcttaaagt

SEQ ID NO: 5743337 - DNA, 25 bp, Homo sapien
tgacgttcggagagcccctcctggg

SEQ ID NO: 5743338 - DNA, 25 bp, Homo sapien
cccaggaggggctctccgaacgtca

SEQ ID NO: 5743339 - DNA, 25 bp, Homo sapien
gtcattatttagtttcattactaaa

SEQ ID NO: 5743340 - DNA, 25 bp, Homo sapien
tttagtaatgaaactaaataatgac

SEQ ID NO: 5743341 - DNA, 25 bp, Homo sapien
gctcagaatacaaatgatactacct

SEQ ID NO: 5743342 - DNA, 25 bp, Homo sapien
aggtagtatcatttgtattctgagc

SEQ ID NO: 5743343 - DNA, 25 bp, Homo sapien
tttattctagatagacgtccttacg

SEQ ID NO: 5743344 - DNA, 25 bp, Homo sapien
cgtaaggacgtctatctagaataaa

SEQ ID NO: 5743345 - DNA, 25 bp, Homo sapien
gtcctcacgggcacaacagctcggg

SEQ ID NO: 5743346 - DNA, 25 bp, Homo sapien
cccgagctgttgtgcccgtgaggac

SEQ ID NO: 5743347 - DNA, 25 bp, Homo sapien
ggtatcccgtcatcgtgaaccccga

SEQ ID NO: 5743348 - DNA, 25 bp, Homo sapien
tcggggttcacgatgacgggatacc

SEQ ID NO: 5743349 - DNA, 25 bp, Homo sapien
ccgtattgagccctcagaacccgag

SEQ ID NO: 5743350 - DNA, 25 bp, Homo sapien
ctcgggttctgagggctcaatacgg

SEQ ID NO: 5743351 - DNA, 25 bp, Homo sapien
atctagaaatcgcttataaaacgtt

SEQ ID NO: 5743352 - DNA, 25 bp, Homo sapien
aacgttttataagcgatttctagat

SEQ ID NO: 5743353 - DNA, 25 bp, Homo sapien
aagtgcagggtgaagtcgtgtgact

SEQ ID NO: 5743354 - DNA, 25 bp, Homo sapien
agtcacacgacttcaccctgcactt

SEQ ID NO: 5743355 - DNA, 25 bp, Homo sapien
ccatctaagggccacgtaacatagt

SEQ ID NO: 5743356 - DNA, 25 bp, Homo sapien
actatgttacgtggcccttagatgg

SEQ ID NO: 5743357 - DNA, 25 bp, Homo sapien
tggactgggaccaagggtgggtcgt

SEQ ID NO: 5743358 - DNA, 25 bp, Homo sapien
acgacccacccttggtcccagtcca

SEQ ID NO: 5743359 - DNA, 25 bp, Homo sapien
tccgggccgtgcaggagtggaaatg

SEQ ID NO: 5743360 - DNA, 25 bp, Homo sapien
catttccactcctgcacggcccgga

SEQ ID NO: 5743361 - DNA, 25 bp, Homo sapien
acgtcaccggtatttcgacctgaga

SEQ ID NO: 5743362 - DNA, 25 bp, Homo sapien
tctcaggtcgaaataccggtgacgt

SEQ ID NO: 5743363 - DNA, 25 bp, Homo sapien
tgctcgctcccagggtcgccggccg

SEQ ID NO: 5743364 - DNA, 25 bp, Homo sapien
cggccggcgaccctgggagcgagca

SEQ ID NO: 5743365 - DNA, 25 bp, Homo sapien
gacggtagtacacccgatacgacgg

SEQ ID NO: 5743366 - DNA, 25 bp, Homo sapien
ccgtcgtatcgggtgtactaccgtc

SEQ ID NO: 5743367 - DNA, 25 bp, Homo sapien
tcgctcgtatctgtggacgtgaaac

SEQ ID NO: 5743368 - DNA, 25 bp, Homo sapien
gtttcacgtccacagatacgagcga

SEQ ID NO: 5743369 - DNA, 25 bp, Homo sapien
gcgcgagccgctccgcccgggcgcc

SEQ ID NO: 5743370 - DNA, 25 bp, Homo sapien
ggcgcccgggcggagcggctcgcgc

SEQ ID NO: 5743371 - DNA, 25 bp, Homo sapien
cgtcccttcgcccaccgcgtgcgta

SEQ ID NO: 5743372 - DNA, 25 bp, Homo sapien
tacgcacgcggtgggcgaagggacg

SEQ ID NO: 5743373 - DNA, 25 bp, Homo sapien
ccgcgggagacgtcccttcgcccac

SEQ ID NO: 5743374 - DNA, 25 bp, Homo sapien
gtgggcgaagggacgtctcccgcgg

SEQ ID NO: 5743375 - DNA, 25 bp, Homo sapien
gggcgccgcgggagacgtcccttcg

SEQ ID NO: 5743376 - DNA, 25 bp, Homo sapien
cgaagggacgtctcccgcggcgccc

SEQ ID NO: 5743377 - DNA, 25 bp, Homo sapien
cgggcgggcctctaacgcggctcga

SEQ ID NO: 5743378 - DNA, 25 bp, Homo sapien
tcgagccgcgttagaggcccgcccg

SEQ ID NO: 5743379 - DNA, 25 bp, Homo sapien
acaacagccaaggtgggactcagtc

SEQ ID NO: 5743380 - DNA, 25 bp, Homo sapien
gactgagtcccaccttggctgttgt

SEQ ID NO: 5743381 - DNA, 25 bp, Homo sapien
gactacgcgggcttgcgccgcggcg

SEQ ID NO: 5743382 - DNA, 25 bp, Homo sapien
cgccgcggcgcaagcccgcgtagtc

SEQ ID NO: 5743383 - DNA, 25 bp, Homo sapien
gggccatccggacccgagacgcaat

SEQ ID NO: 5743384 - DNA, 25 bp, Homo sapien
attgcgtctcgggtccggatggccc

SEQ ID NO: 5743385 - DNA, 25 bp, Homo sapien
tcatagacgaacgaggcatggccac

SEQ ID NO: 5743386 - DNA, 25 bp, Homo sapien
gtggccatgcctcgttcgtctatga

SEQ ID NO: 5743387 - DNA, 25 bp, Homo sapien
cacctgaccgtcctcggtcggagga

SEQ ID NO: 5743388 - DNA, 25 bp, Homo sapien
tcctccgaccgaggacggtcaggtg

SEQ ID NO: 5743389 - DNA, 25 bp, Homo sapien
gggcggcacacggaccctggccgta

SEQ ID NO: 5743390 - DNA, 25 bp, Homo sapien
tacggccagggtccgtgtgccgccc

SEQ ID NO: 5743391 - DNA, 25 bp, Homo sapien
gcgggcggcacacggaccctggccg

SEQ ID NO: 5743392 - DNA, 25 bp, Homo sapien
cggccagggtccgtgtgccgcccgc

SEQ ID NO: 5743393 - DNA, 25 bp, Homo sapien
cgttttacgtcgtagtgttacgtga

SEQ ID NO: 5743394 - DNA, 25 bp, Homo sapien
tcacgtaacactacgacgtaaaacg

SEQ ID NO: 5743395 - DNA, 25 bp, Homo sapien
tctccgactcgtcacccctcctccg

SEQ ID NO: 5743396 - DNA, 25 bp, Homo sapien
cggaggaggggtgacgagtcggaga

SEQ ID NO: 5743397 - DNA, 25 bp, Homo sapien
ctcaagtaaaaagggtaactcatag

SEQ ID NO: 5743398 - DNA, 25 bp, Homo sapien
ctatgagttaccctttttacttgag

SEQ ID NO: 5743399 - DNA, 25 bp, Homo sapien
cgagagggcgctgcaaacgaaagga

SEQ ID NO: 5743400 - DNA, 25 bp, Homo sapien
tcctttcgtttgcagcgccctctcg

SEQ ID NO: 5743401 - DNA, 25 bp, Homo sapien
gtcggaccatctcttccactttcga

SEQ ID NO: 5743402 - DNA, 25 bp, Homo sapien
tcgaaagtggaagagatggtccgac

SEQ ID NO: 5743403 - DNA, 25 bp, Homo sapien
atgtggtgtctactaactgttgaac

SEQ ID NO: 5743404 - DNA, 25 bp, Homo sapien
gttcaacagttagtagacaccacat

SEQ ID NO: 5743405 - DNA, 25 bp, Homo sapien
gcccggagcggctggtgggtcgccc

SEQ ID NO: 5743406 - DNA, 25 bp, Homo sapien
gggcgacccaccagccgctccgggc

SEQ ID NO: 5743407 - DNA, 25 bp, Homo sapien
ggcccggagcggctggtgggtcgcc

SEQ ID NO: 5743408 - DNA, 25 bp, Homo sapien
ggcgacccaccagccgctccgggcc

SEQ ID NO: 5743409 - DNA, 25 bp, Homo sapien
tggcgtcgagctgcgccgcgggggc

SEQ ID NO: 5743410 - DNA, 25 bp, Homo sapien
gcccccgcggcgcagctcgacgcca

SEQ ID NO: 5743411 - DNA, 25 bp, Homo sapien
ccctggcgtcgagctgcgccgcggg

SEQ ID NO: 5743412 - DNA, 25 bp, Homo sapien
cccgcggcgcagctcgacgccaggg

SEQ ID NO: 5743413 - DNA, 25 bp, Homo sapien
gtgcgacatgacgttcctcttctag

SEQ ID NO: 5743414 - DNA, 25 bp, Homo sapien
ctagaagaggaacgtcatgtcgcac

SEQ ID NO: 5743415 - DNA, 25 bp, Homo sapien
gcgaccgccaaaccggcgctccgcg

SEQ ID NO: 5743416 - DNA, 25 bp, Homo sapien
cgcggagcgccggtttggcggtcgc

SEQ ID NO: 5743417 - DNA, 25 bp, Homo sapien
gggcgaccgccaaaccggcgctccg

SEQ ID NO: 5743418 - DNA, 25 bp, Homo sapien
cggagcgccggtttggcggtcgccc

SEQ ID NO: 5743419 - DNA, 25 bp, Homo sapien
ggtcataaaagactgaattaggaat

SEQ ID NO: 5743420 - DNA, 25 bp, Homo sapien
attcctaattcagtcttttatgacc

SEQ ID NO: 5743421 - DNA, 25 bp, Homo sapien
taaggtgattatacaagtcaaaaag

SEQ ID NO: 5743422 - DNA, 25 bp, Homo sapien
ctttttgacttgtataatcacctta

SEQ ID NO: 5743423 - DNA, 25 bp, Homo sapien
ttaagtccatttctctatacggata

SEQ ID NO: 5743424 - DNA, 25 bp, Homo sapien
tatccgtatagagaaatggacttaa

SEQ ID NO: 5743425 - DNA, 25 bp, Homo sapien
tttcccgactatagactcgggagaa

SEQ ID NO: 5743426 - DNA, 25 bp, Homo sapien
ttctcccgagtctatagtcgggaaa

SEQ ID NO: 5743427 - DNA, 25 bp, Homo sapien
gtcgaggcgtctcccgcgaggcgtc

SEQ ID NO: 5743428 - DNA, 25 bp, Homo sapien
gacgcctcgcgggagacgcctcgac

SEQ ID NO: 5743429 - DNA, 25 bp, Homo sapien
tctccgtgagttgacgggtcgttat

SEQ ID NO: 5743430 - DNA, 25 bp, Homo sapien
ataacgacccgtcaactcacggaga

SEQ ID NO: 5743431 - DNA, 25 bp, Homo sapien
tgtgcccgacctcccagtagcacca

SEQ ID NO: 5743432 - DNA, 25 bp, Homo sapien
tggtgctactgggaggtcgggcaca

SEQ ID NO: 5743433 - DNA, 25 bp, Homo sapien
attccttccgttcatcaatcccgtg

SEQ ID NO: 5743434 - DNA, 25 bp, Homo sapien
cacgggattgatgaacggaaggaat

SEQ ID NO: 5743435 - DNA, 25 bp, Homo sapien
taaggaaaagccatctctttggagt

SEQ ID NO: 5743436 - DNA, 25 bp, Homo sapien
actccaaagagatggcttttcctta

SEQ ID NO: 5743437 - DNA, 25 bp, Homo sapien
ttgctgccggcttggagacgggtcg

SEQ ID NO: 5743438 - DNA, 25 bp, Homo sapien
cgacccgtctccaagccggcagcaa

SEQ ID NO: 5743439 - DNA, 25 bp, Homo sapien
acgtctccgactgcgccccgtcccg

SEQ ID NO: 5743440 - DNA, 25 bp, Homo sapien
cgggacggggcgcagtcggagacgt

SEQ ID NO: 5743441 - DNA, 25 bp, Homo sapien
caagatactcaaccacgtaaggtgt

SEQ ID NO: 5743442 - DNA, 25 bp, Homo sapien
acaccttacgtggttgagtatcttg

SEQ ID NO: 5743443 - DNA, 25 bp, Homo sapien
ataacaagacatatactatttatgt

SEQ ID NO: 5743444 - DNA, 25 bp, Homo sapien
acataaatagtatatgtcttgttat

SEQ ID NO: 5743445 - DNA, 25 bp, Homo sapien
gttaatataacaagacatatactat

SEQ ID NO: 5743446 - DNA, 25 bp, Homo sapien
atagtatatgtcttgttatattaac

SEQ ID NO: 5743447 - DNA, 25 bp, Homo sapien
acgttaatataacaagacatatact

SEQ ID NO: 5743448 - DNA, 25 bp, Homo sapien
agtatatgtcttgttatattaacgt

SEQ ID NO: 5743449 - DNA, 25 bp, Homo sapien
ggggccaccggcgtagcgtgagggg

SEQ ID NO: 5743450 - DNA, 25 bp, Homo sapien
cccctcacgctacgccggtggcccc

SEQ ID NO: 5743451 - DNA, 25 bp, Homo sapien
cgggactgtcggtctcatcaccttt

SEQ ID NO: 5743452 - DNA, 25 bp, Homo sapien
aaaggtgatgagaccgacagtcccg

SEQ ID NO: 5743453 - DNA, 25 bp, Homo sapien
ctgtcgccacggtccgcccgtccct

SEQ ID NO: 5743454 - DNA, 25 bp, Homo sapien
agggacgggcggaccgtggcgacag

SEQ ID NO: 5743455 - DNA, 25 bp, Homo sapien
gtgactaccctacctactaacctcg

SEQ ID NO: 5743456 - DNA, 25 bp, Homo sapien
cgaggttagtaggtagggtagtcac

SEQ ID NO: 5743457 - DNA, 25 bp, Homo sapien
cctaagtccaaagtgcagttaaagt

SEQ ID NO: 5743458 - DNA, 25 bp, Homo sapien
actttaactgcactttggacttagg

SEQ ID NO: 5743459 - DNA, 25 bp, Homo sapien
atgaggcaacagtgtgtacattgaa

SEQ ID NO: 5743460 - DNA, 25 bp, Homo sapien
ttcaatgtacacactgttgcctcat

SEQ ID NO: 5743461 - DNA, 25 bp, Homo sapien
atattccacggtccagtctgagaag

SEQ ID NO: 5743462 - DNA, 25 bp, Homo sapien
cttctcagactggaccgtggaatat

SEQ ID NO: 5743463 - DNA, 25 bp, Homo sapien
aggagacgacctgttaaggtaaaga

SEQ ID NO: 5743464 - DNA, 25 bp, Homo sapien
tctttaccttaacaggtcgtctcct

SEQ ID NO: 5743465 - DNA, 25 bp, Homo sapien
gtagaacgactgttagaacaagaac

SEQ ID NO: 5743466 - DNA, 25 bp, Homo sapien
gttcttgttctaacagtcgttctac

SEQ ID NO: 5743467 - DNA, 25 bp, Homo sapien
cacgggatgatcttcctccccacgg

SEQ ID NO: 5743468 - DNA, 25 bp, Homo sapien
ccgtggggaggaagatcatcccgtg

SEQ ID NO: 5743469 - DNA, 25 bp, Homo sapien
ggcccgtgcgtcatcgactgtgatg

SEQ ID NO: 5743470 - DNA, 25 bp, Homo sapien
catcacagtcgatgacgcacgggcc

SEQ ID NO: 5743471 - DNA, 25 bp, Homo sapien
gtccggggtctccactatcccgagg

SEQ ID NO: 5743472 - DNA, 25 bp, Homo sapien
cctcgggatagtggagaccccggac

SEQ ID NO: 5743473 - DNA, 25 bp, Homo sapien
actcctggagaaggttagggaccac

SEQ ID NO: 5743474 - DNA, 25 bp, Homo sapien
gtggtccctaaccttctccaggagt

SEQ ID NO: 5743475 - DNA, 25 bp, Homo sapien
tgctaccttggtgcgtggacccgct

SEQ ID NO: 5743476 - DNA, 25 bp, Homo sapien
agcgggtccacgcaccaaggtagca

SEQ ID NO: 5743477 - DNA, 25 bp, Homo sapien
cggacctcccctcgccagcacggag

SEQ ID NO: 5743478 - DNA, 25 bp, Homo sapien
ctccgtgctggcgaggggaggtccg

SEQ ID NO: 5743479 - DNA, 25 bp, Homo sapien
cctgtgcagtccctcatcccgtcgg

SEQ ID NO: 5743480 - DNA, 25 bp, Homo sapien
ccgacgggatgagggactgcacagg

SEQ ID NO: 5743481 - DNA, 25 bp, Homo sapien
tgtgcagtccctcatcccgtcgggg

SEQ ID NO: 5743482 - DNA, 25 bp, Homo sapien
ccccgacgggatgagggactgcaca

SEQ ID NO: 5743483 - DNA, 25 bp, Homo sapien
gcggtcctgggcgtcgcgcgtcggg

SEQ ID NO: 5743484 - DNA, 25 bp, Homo sapien
cccgacgcgcgacgcccaggaccgc

SEQ ID NO: 5743485 - DNA, 25 bp, Homo sapien
agtacatggtgaagtggtccgacga

SEQ ID NO: 5743486 - DNA, 25 bp, Homo sapien
tcgtcggaccacttcaccatgtact

SEQ ID NO: 5743487 - DNA, 25 bp, Homo sapien
ttctttacagacatactacaatgaa

SEQ ID NO: 5743488 - DNA, 25 bp, Homo sapien
ttcattgtagtatgtctgtaaagaa

SEQ ID NO: 5743489 - DNA, 25 bp, Homo sapien
aatgtttagatagtcatagaaattt

SEQ ID NO: 5743490 - DNA, 25 bp, Homo sapien
aaatttctatgactatctaaacatt

SEQ ID NO: 5743491 - DNA, 25 bp, Homo sapien
tcttcgacgtcgacaggccgtgggt

SEQ ID NO: 5743492 - DNA, 25 bp, Homo sapien
acccacggcctgtcgacgtcgaaga

SEQ ID NO: 5743493 - DNA, 25 bp, Homo sapien
atttgtactgctttaatagacctat

SEQ ID NO: 5743494 - DNA, 25 bp, Homo sapien
ataggtctattaaagcagtacaaat

SEQ ID NO: 5743495 - DNA, 25 bp, Homo sapien
gggccgaccgctcccgagctccaca

SEQ ID NO: 5743496 - DNA, 25 bp, Homo sapien
tgtggagctcgggagcggtcggccc

SEQ ID NO: 5743497 - DNA, 25 bp, Homo sapien
tgtataaattggtgaaccaacatta

SEQ ID NO: 5743498 - DNA, 25 bp, Homo sapien
taatgttggttcaccaatttataca

SEQ ID NO: 5743499 - DNA, 25 bp, Homo sapien
gttcgatgagtgaacctattaccac

SEQ ID NO: 5743500 - DNA, 25 bp, Homo sapien
gtggtaataggttcactcatcgaac

SEQ ID NO: 5743501 - DNA, 25 bp, Homo sapien
ttcggcgtctagtccggggggcctc

SEQ ID NO: 5743502 - DNA, 25 bp, Homo sapien
gaggccccccggactagacgccgaa

SEQ ID NO: 5743503 - DNA, 25 bp, Homo sapien
tccacttaagtagtcctttcaggta

SEQ ID NO: 5743504 - DNA, 25 bp, Homo sapien
tacctgaaaggactacttaagtgga

SEQ ID NO: 5743505 - DNA, 25 bp, Homo sapien
gactcgggggccgttctcaggtccg

SEQ ID NO: 5743506 - DNA, 25 bp, Homo sapien
cggacctgagaacggcccccgagtc

SEQ ID NO: 5743507 - DNA, 25 bp, Homo sapien
agtcacgtaatgacggttaacacag

SEQ ID NO: 5743508 - DNA, 25 bp, Homo sapien
ctgtgttaaccgtcattacgtgact

SEQ ID NO: 5743509 - DNA, 25 bp, Homo sapien
ggcacgagcagggtggtacccggtc

SEQ ID NO: 5743510 - DNA, 25 bp, Homo sapien
gaccgggtaccaccctgctcgtgcc

SEQ ID NO: 5743511 - DNA, 25 bp, Homo sapien
acgtccccagtcttcacgtcggagt

SEQ ID NO: 5743512 - DNA, 25 bp, Homo sapien
actccgacgtgaagactggggacgt

SEQ ID NO: 5743513 - DNA, 25 bp, Homo sapien
tatatcgtaacagaaaccgaaagtt

SEQ ID NO: 5743514 - DNA, 25 bp, Homo sapien
aactttcggtttctgttacgatata

SEQ ID NO: 5743515 - DNA, 25 bp, Homo sapien
tagaagaagtatcttcagtcaactt

SEQ ID NO: 5743516 - DNA, 25 bp, Homo sapien
aagttgactgaagatacttcttcta

SEQ ID NO: 5743517 - DNA, 25 bp, Homo sapien
ggtgggtttcatgaacctctgccgg

SEQ ID NO: 5743518 - DNA, 25 bp, Homo sapien
ccggcagaggttcatgaaacccacc

SEQ ID NO: 5743519 - DNA, 25 bp, Homo sapien
gaactaagtgtaccctcttgcaaaa

SEQ ID NO: 5743520 - DNA, 25 bp, Homo sapien
ttttgcaagagggtacacttagttc

SEQ ID NO: 5743521 - DNA, 25 bp, Homo sapien
tatctgactaggaaatacttattgg

SEQ ID NO: 5743522 - DNA, 25 bp, Homo sapien
ccaataagtatttcctagtcagata

SEQ ID NO: 5743523 - DNA, 25 bp, Homo sapien
accggggttctacagacggaccata

SEQ ID NO: 5743524 - DNA, 25 bp, Homo sapien
tatggtccgtctgtagaaccccggt

SEQ ID NO: 5743525 - DNA, 25 bp, Homo sapien
tacacttagtagtaattataatcag

SEQ ID NO: 5743526 - DNA, 25 bp, Homo sapien
ctgattataattactactaagtgta

SEQ ID NO: 5743527 - DNA, 25 bp, Homo sapien
ggacggaggcctactaaaacatcat

SEQ ID NO: 5743528 - DNA, 25 bp, Homo sapien
atgatgttttagtaggcctccgtcc

SEQ ID NO: 5743529 - DNA, 25 bp, Homo sapien
cgaacgtaatacatcaatttatgag

SEQ ID NO: 5743530 - DNA, 25 bp, Homo sapien
ctcataaattgatgtattacgttcg

SEQ ID NO: 5743531 - DNA, 25 bp, Homo sapien
agaccgcgtctgtcgtagtcgctgc

SEQ ID NO: 5743532 - DNA, 25 bp, Homo sapien
gcagcgactacgacagacgcggtct

SEQ ID NO: 5743533 - DNA, 25 bp, Homo sapien
gcgaagggggcagctgaggcgtgag

SEQ ID NO: 5743534 - DNA, 25 bp, Homo sapien
ctcacgcctcagctgcccccttcgc

SEQ ID NO: 5743535 - DNA, 25 bp, Homo sapien
tagtaattaatgtaggttaccttaa

SEQ ID NO: 5743536 - DNA, 25 bp, Homo sapien
ttaaggtaacctacattaattacta

SEQ ID NO: 5743537 - DNA, 25 bp, Homo sapien
tgggggaactggagcttcggccgag

SEQ ID NO: 5743538 - DNA, 25 bp, Homo sapien
ctcggccgaagctccagttccccca

SEQ ID NO: 5743539 - DNA, 25 bp, Homo sapien
cgtccgtgacttatcgcttggagac

SEQ ID NO: 5743540 - DNA, 25 bp, Homo sapien
gtctccaagcgataagtcacggacg

SEQ ID NO: 5743541 - DNA, 25 bp, Homo sapien
ttccacctatacctacgttcagtcg

SEQ ID NO: 5743542 - DNA, 25 bp, Homo sapien
cgactgaacgtaggtataggtggaa

SEQ ID NO: 5743543 - DNA, 25 bp, Homo sapien
tgtcccgaacgacggctcctgacca

SEQ ID NO: 5743544 - DNA, 25 bp, Homo sapien
tggtcaggagccgtcgttcgggaca

SEQ ID NO: 5743545 - DNA, 25 bp, Homo sapien
gacgttacaccactcgtagtgacaa

SEQ ID NO: 5743546 - DNA, 25 bp, Homo sapien
ttgtcactacgagtggtgtaacgtc

SEQ ID NO: 5743547 - DNA, 25 bp, Homo sapien
ccgtaggaggtgtccaccggcgggc

SEQ ID NO: 5743548 - DNA, 25 bp, Homo sapien
gcccgccggtggacacctcctacgg

SEQ ID NO: 5743549 - DNA, 25 bp, Homo sapien
tccctctctcgcccgggtcggacga

SEQ ID NO: 5743550 - DNA, 25 bp, Homo sapien
tcgtccgacccgggcgagagaggga

SEQ ID NO: 5743551 - DNA, 25 bp, Homo sapien
tcatgtttggtataacaaagattag

SEQ ID NO: 5743552 - DNA, 25 bp, Homo sapien
ctaatctttgttataccaaacatga

SEQ ID NO: 5743553 - DNA, 25 bp, Homo sapien
ttacctgtgcagaaagagttaattt

SEQ ID NO: 5743554 - DNA, 25 bp, Homo sapien
aaattaactctttctgcacaggtaa

SEQ ID NO: 5743555 - DNA, 25 bp, Homo sapien
acggggcgacggctgggtgagaagg

SEQ ID NO: 5743556 - DNA, 25 bp, Homo sapien
ccttctcacccagccgtcgccccgt

SEQ ID NO: 5743557 - DNA, 25 bp, Homo sapien
tggtccaactgatgggtgacgacgt

SEQ ID NO: 5743558 - DNA, 25 bp, Homo sapien
acgtcgtcacccatcagttggacca

SEQ ID NO: 5743559 - DNA, 25 bp, Homo sapien
gccgtgccgaggccgagaggcatcc

SEQ ID NO: 5743560 - DNA, 25 bp, Homo sapien
ggatgcctctcggcctcggcacggc

SEQ ID NO: 5743561 - DNA, 25 bp, Homo sapien
tacgagaactagtgaagggtgtgac

SEQ ID NO: 5743562 - DNA, 25 bp, Homo sapien
gtcacacccttcactagttctcgta

SEQ ID NO: 5743563 - DNA, 25 bp, Homo sapien
ggacgtccccggatgtcaggcggta

SEQ ID NO: 5743564 - DNA, 25 bp, Homo sapien
taccgcctgacatccggggacgtcc

SEQ ID NO: 5743565 - DNA, 25 bp, Homo sapien
gaacgagcagagcactaaaccccta

SEQ ID NO: 5743566 - DNA, 25 bp, Homo sapien
taggggtttagtgctctgctcgttc

SEQ ID NO: 5743567 - DNA, 25 bp, Homo sapien
gctcggggcgtcggcgagtccgggt

SEQ ID NO: 5743568 - DNA, 25 bp, Homo sapien
acccggactcgccgacgccccgagc

SEQ ID NO: 5743569 - DNA, 25 bp, Homo sapien
cagtgtccctgtcgccgtgagtgcc

SEQ ID NO: 5743570 - DNA, 25 bp, Homo sapien
ggcactcacggcgacagggacactg

SEQ ID NO: 5743571 - DNA, 25 bp, Homo sapien
aagggacatcggtggatctgaggtc

SEQ ID NO: 5743572 - DNA, 25 bp, Homo sapien
gacctcagatccaccgatgtccctt

SEQ ID NO: 5743573 - DNA, 25 bp, Homo sapien
tagtcaaaatactaaaaagtcacca

SEQ ID NO: 5743574 - DNA, 25 bp, Homo sapien
tggtgactttttagtattttgacta

SEQ ID NO: 5743575 - DNA, 25 bp, Homo sapien
gtgttattgaagtaactgtctcacc

SEQ ID NO: 5743576 - DNA, 25 bp, Homo sapien
ggtgagacagttacttcaataacac

SEQ ID NO: 5743577 - DNA, 25 bp, Homo sapien
agtccagaacttccattcgccttgg

SEQ ID NO: 5743578 - DNA, 25 bp, Homo sapien
ccaaggcgaatggaagttctggact

SEQ ID NO: 5743579 - DNA, 25 bp, Homo sapien
gaatctgtggcgtttgagcccaagg

SEQ ID NO: 5743580 - DNA, 25 bp, Homo sapien
ccttgggctcaaacgccacagattc

SEQ ID NO: 5743581 - DNA, 25 bp, Homo sapien
cgccaccaccaccggccccgcctac

SEQ ID NO: 5743582 - DNA, 25 bp, Homo sapien
gtaggcggggccggtggtggtggcg

SEQ ID NO: 5743583 - DNA, 25 bp, Homo sapien
taaaatcatatgaactcgtttgaaa

SEQ ID NO: 5743584 - DNA, 25 bp, Homo sapien
tttcaaacgagttcatatgatttta

SEQ ID NO: 5743585 - DNA, 25 bp, Homo sapien
taggggattccaaacgtcggcgtcg

SEQ ID NO: 5743586 - DNA, 25 bp, Homo sapien
cgacgccgacgtttggaatccccta

SEQ ID NO: 5743587 - DNA, 25 bp, Homo sapien
atcctgccggacacagggaacggag

SEQ ID NO: 5743588 - DNA, 25 bp, Homo sapien
ctccgttccctgtgtccggcaggat

SEQ ID NO: 5743589 - DNA, 25 bp, Homo sapien
gaacctcgatattacgtgcaccgac

SEQ ID NO: 5743590 - DNA, 25 bp, Homo sapien
gtcggtgcacgtaatatcgaggttc

SEQ ID NO: 5743591 - DNA, 25 bp, Homo sapien
gggtcgcggttcgtaggcccactca

SEQ ID NO: 5743592 - DNA, 25 bp, Homo sapien
tgagtgggcctacgaaccgcgaccc

SEQ ID NO: 5743593 - DNA, 25 bp, Homo sapien
taaattagcacaatgtgaattgtct

SEQ ID NO: 5743594 - DNA, 25 bp, Homo sapien
agacaattcacattgtgctaattta

SEQ ID NO: 5743595 - DNA, 25 bp, Homo sapien
gcagaatagtcagtagaaatgatac

SEQ ID NO: 5743596 - DNA, 25 bp, Homo sapien
gtatcatttctactgactattctgc

SEQ ID NO: 5743597 - DNA, 25 bp, Homo sapien
caatcttcttggtacccaacttccg

SEQ ID NO: 5743598 - DNA, 25 bp, Homo sapien
cggaagttgggtaccaagaagattg

SEQ ID NO: 5743599 - DNA, 25 bp, Homo sapien
aactatctcacacggtggaagaggc

SEQ ID NO: 5743600 - DNA, 25 bp, Homo sapien
gcctcttccaccgtgtgagatagtt

SEQ ID NO: 5743601 - DNA, 25 bp, Homo sapien
aattatgtatttattgtgttagact

SEQ ID NO: 5743602 - DNA, 25 bp, Homo sapien
agtctaacacaataaatacataatt

SEQ ID NO: 5743603 - DNA, 25 bp, Homo sapien
gccactactgctctaagaactttaa

SEQ ID NO: 5743604 - DNA, 25 bp, Homo sapien
ttaaagttcttagagcagtagtggc

SEQ ID NO: 5743605 - DNA, 25 bp, Homo sapien
cgaaaacggtttgcagtacagctat

SEQ ID NO: 5743606 - DNA, 25 bp, Homo sapien
atagctgtactgcaaaccgttttcg

SEQ ID NO: 5743607 - DNA, 25 bp, Homo sapien
cctagtacttgtgcccgggagaggg

SEQ ID NO: 5743608 - DNA, 25 bp, Homo sapien
ccctctcccgggcacaagtactagg

SEQ ID NO: 5743609 - DNA, 25 bp, Homo sapien
cccaacagacctgcgcctccggcgg

SEQ ID NO: 5743610 - DNA, 25 bp, Homo sapien
ccgccggaggcgcaggtctgttggg

SEQ ID NO: 5743611 - DNA, 25 bp, Homo sapien
gggcctaagcgcgaggcctaagcgg

SEQ ID NO: 5743612 - DNA, 25 bp, Homo sapien
ccgcttaggcctcgcgcttaggccc

SEQ ID NO: 5743613 - DNA, 25 bp, Homo sapien
agggcgtcggaggtgttcggtcggc

SEQ ID NO: 5743614 - DNA, 25 bp, Homo sapien
gccgaccgaacacctccgacgccct

SEQ ID NO: 5743615 - DNA, 25 bp, Homo sapien
cgaagggcgacgacccaaagaagcg

SEQ ID NO: 5743616 - DNA, 25 bp, Homo sapien
cgcttctttgggtcgtcgcccttcg

SEQ ID NO: 5743617 - DNA, 25 bp, Homo sapien
ggtcgagacacgacacccggtctcg

SEQ ID NO: 5743618 - DNA, 25 bp, Homo sapien
cgagaccgggtgtcgtgtctcgacc

SEQ ID NO: 5743619 - DNA, 25 bp, Homo sapien
ggttcagtctgacctgtcgaataaa

SEQ ID NO: 5743620 - DNA, 25 bp, Homo sapien
tttattcgacaggtcagactgaacc

SEQ ID NO: 5743621 - DNA, 25 bp, Homo sapien
taagagtccatttaaggctgggtgt

SEQ ID NO: 5743622 - DNA, 25 bp, Homo sapien
acacccagccttaaatggactctta

SEQ ID NO: 5743623 - DNA, 25 bp, Homo sapien
gagtaaataagaaagctacaggaaa

SEQ ID NO: 5743624 - DNA, 25 bp, Homo sapien
tttcctgtagctttcttatttactc

SEQ ID NO: 5743625 - DNA, 25 bp, Homo sapien
ccacaccggcgaccccatgcgacgg

SEQ ID NO: 5743626 - DNA, 25 bp, Homo sapien
ccgtcgcatggggtcgccggtgtgg

SEQ ID NO: 5743627 - DNA, 25 bp, Homo sapien
accctatactggtgattgtagttaa

SEQ ID NO: 5743628 - DNA, 25 bp, Homo sapien
ttaactacaatcaccagtatagggt

SEQ ID NO: 5743629 - DNA, 25 bp, Homo sapien
gaacgtcaacggatgttaacataat

SEQ ID NO: 5743630 - DNA, 25 bp, Homo sapien
attatgttaacatccgttgacgttc

SEQ ID NO: 5743631 - DNA, 25 bp, Homo sapien
gggcgacaccgaagggtcgacggac

SEQ ID NO: 5743632 - DNA, 25 bp, Homo sapien
gtccgtcgacccttcggtgtcgccc

SEQ ID NO: 5743633 - DNA, 25 bp, Homo sapien
ctctattttaaacttcatattcctt

SEQ ID NO: 5743634 - DNA, 25 bp, Homo sapien
aaggaatatgaagtttaaaatagag

SEQ ID NO: 5743635 - DNA, 25 bp, Homo sapien
gcttgcagcggcactattacggtgc

SEQ ID NO: 5743636 - DNA, 25 bp, Homo sapien
gcaccgtaatagtgccgctgcaagc

SEQ ID NO: 5743637 - DNA, 25 bp, Homo sapien
ttttaataatgaatcactctcacgt

SEQ ID NO: 5743638 - DNA, 25 bp, Homo sapien
acgtgagagtgattcattattaaaa

SEQ ID NO: 5743639 - DNA, 25 bp, Homo sapien
tatgtaaagataagacgctcgacgt

SEQ ID NO: 5743640 - DNA, 25 bp, Homo sapien
acgtcgagcgtcttatctttacata

SEQ ID NO: 5743641 - DNA, 25 bp, Homo sapien
gtctgtagactctcttgaagcccgt

SEQ ID NO: 5743642 - DNA, 25 bp, Homo sapien
acgggcttcaagagagtctacagac

SEQ ID NO: 5743643 - DNA, 25 bp, Homo sapien
gtatttttattctttttagatctag

SEQ ID NO: 5743644 - DNA, 25 bp, Homo sapien
ctagatctaaaaagaataaaaatac

SEQ ID NO: 5743645 - DNA, 25 bp, Homo sapien
cgttgttaggtaaaggcctactcca

SEQ ID NO: 5743646 - DNA, 25 bp, Homo sapien
tggagtaggcctttacctaacaacg

SEQ ID NO: 5743647 - DNA, 25 bp, Homo sapien
accgaagaatcagttgggaacagct

SEQ ID NO: 5743648 - DNA, 25 bp, Homo sapien
agctgttcccaactgattcttcggt

SEQ ID NO: 5743649 - DNA, 25 bp, Homo sapien
ggttcgacgaccacactccctaggt

SEQ ID NO: 5743650 - DNA, 25 bp, Homo sapien
acctagggagtgtggtcgtcgaacc

SEQ ID NO: 5743651 - DNA, 25 bp, Homo sapien
ctcgaacccctcagaccgctgcgga

SEQ ID NO: 5743652 - DNA, 25 bp, Homo sapien
tccgcagcggtctgaggggttcgag

SEQ ID NO: 5743653 - DNA, 25 bp, Homo sapien
gacgacgcacgtcgatcgggacacg

SEQ ID NO: 5743654 - DNA, 25 bp, Homo sapien
cgtgtcccgatcgacgtgcgtcgtc

SEQ ID NO: 5743655 - DNA, 25 bp, Homo sapien
gagggtgacatgaggaacccccgaa

SEQ ID NO: 5743656 - DNA, 25 bp, Homo sapien
ttcgggggttcctcatgtcaccctc

SEQ ID NO: 5743657 - DNA, 25 bp, Homo sapien
caactatcgagcctctggaaatcat

SEQ ID NO: 5743658 - DNA, 25 bp, Homo sapien
atgatttccagaggctcgatagttg

SEQ ID NO: 5743659 - DNA, 25 bp, Homo sapien
tacgggagcacgacgggccttagac

SEQ ID NO: 5743660 - DNA, 25 bp, Homo sapien
gtctaaggcccgtcgtgctcccgta

SEQ ID NO: 5743661 - DNA, 25 bp, Homo sapien
aactggtaccgaaagctggcgatac

SEQ ID NO: 5743662 - DNA, 25 bp, Homo sapien
gtatcgccagctttcggtaccagtt

SEQ ID NO: 5743663 - DNA, 25 bp, Homo sapien
ggtgtcggaggagctcctatcgctc

SEQ ID NO: 5743664 - DNA, 25 bp, Homo sapien
gagcgataggagctcctccgacacc

SEQ ID NO: 5743665 - DNA, 25 bp, Homo sapien
taaaatggcaattcaacgacgtaaa

SEQ ID NO: 5743666 - DNA, 25 bp, Homo sapien
tttacgtcgttgaattgccatttta

SEQ ID NO: 5743667 - DNA, 25 bp, Homo sapien
ctcacagagtgggttcgatgggtaa

SEQ ID NO: 5743668 - DNA, 25 bp, Homo sapien
ttacccatcgaacccactctgtgag

SEQ ID NO: 5743669 - DNA, 25 bp, Homo sapien
aagaataagactggtaatgatcgta

SEQ ID NO: 5743670 - DNA, 25 bp, Homo sapien
tacgatcattaccagtcttattctt

SEQ ID NO: 5743671 - DNA, 25 bp, Homo sapien
ctcgaccgctccctggtcgggtcct

SEQ ID NO: 5743672 - DNA, 25 bp, Homo sapien
aggacccgaccagggagcggtcgag

SEQ ID NO: 5743673 - DNA, 25 bp, Homo sapien
aagttttatgtcgtgcaatagaaat

SEQ ID NO: 5743674 - DNA, 25 bp, Homo sapien
atttctattgcacgacataaaactt

SEQ ID NO: 5743675 - DNA, 25 bp, Homo sapien
cccctacgaacaccgacacacagtc

SEQ ID NO: 5743676 - DNA, 25 bp, Homo sapien
gactgtgtgtcggtgttcgtagggg

SEQ ID NO: 5743677 - DNA, 25 bp, Homo sapien
ggttcacactaagggtaggtgggtg

SEQ ID NO: 5743678 - DNA, 25 bp, Homo sapien
cacccacctacccttagtgtgaacc

SEQ ID NO: 5743679 - DNA, 25 bp, Homo sapien
ggagcacccgcggaggggcaaggta

SEQ ID NO: 5743680 - DNA, 25 bp, Homo sapien
taccttgcccctccgcgggtgctcc

SEQ ID NO: 5743681 - DNA, 25 bp, Homo sapien
gaaaagagtattctaaaacttcaag

SEQ ID NO: 5743682 - DNA, 25 bp, Homo sapien
cttgaagttttagaatactcttttc

SEQ ID NO: 5743683 - DNA, 25 bp, Homo sapien
ccactcctctttaccgcccagaccc

SEQ ID NO: 5743684 - DNA, 25 bp, Homo sapien
gggtctgggcggtaaagaggagtgg

SEQ ID NO: 5743685 - DNA, 25 bp, Homo sapien
tgtagaaaacggtgtttcctaggac

SEQ ID NO: 5743686 - DNA, 25 bp, Homo sapien
gtcctaggaaacaccgttttctaca

SEQ ID NO: 5743687 - DNA, 25 bp, Homo sapien
gggtcgggctctgcggaccccaggg

SEQ ID NO: 5743688 - DNA, 25 bp, Homo sapien
ccctggggtccgcagagcccgaccc

SEQ ID NO: 5743689 - DNA, 25 bp, Homo sapien
aaagtttcatgcttctatgttgaag

SEQ ID NO: 5743690 - DNA, 25 bp, Homo sapien
cttcaacatagaagcatgaaacttt

SEQ ID NO: 5743691 - DNA, 25 bp, Homo sapien
ggtgagtcgtaaacaaacttaattg

SEQ ID NO: 5743692 - DNA, 25 bp, Homo sapien
caattaagtttgtttacgactcacc

SEQ ID NO: 5743693 - DNA, 25 bp, Homo sapien
gagcctgtttctcggtccagacatg

SEQ ID NO: 5743694 - DNA, 25 bp, Homo sapien
catgtctggaccgagaaacaggctc

SEQ ID NO: 5743695 - DNA, 25 bp, Homo sapien
tcagccccggaggatcggtgcgact

SEQ ID NO: 5743696 - DNA, 25 bp, Homo sapien
agtcgcaccgatcctccggggctga

SEQ ID NO: 5743697 - DNA, 25 bp, Homo sapien
ggtatctcactcgttccaaggtagg

SEQ ID NO: 5743698 - DNA, 25 bp, Homo sapien
cctaccttggaacgagtgagatacc

SEQ ID NO: 5743699 - DNA, 25 bp, Homo sapien
cagtggaacaaaataccagggacag

SEQ ID NO: 5743700 - DNA, 25 bp, Homo sapien
ctgtccctggtattttgttccactg

SEQ ID NO: 5743701 - DNA, 25 bp, Homo sapien
tcagggatccggggtctaggcggag

SEQ ID NO: 5743702 - DNA, 25 bp, Homo sapien
ctccgcctagaccccggatccctga

SEQ ID NO: 5743703 - DNA, 25 bp, Homo sapien
gagtcgtcataacaattctccttag

SEQ ID NO: 5743704 - DNA, 25 bp, Homo sapien
ctaaggagaattgttatgacgactc

SEQ ID NO: 5743705 - DNA, 25 bp, Homo sapien
ggccagtcccacatatggaagttaa

SEQ ID NO: 5743706 - DNA, 25 bp, Homo sapien
ttaacttccatatgtgggactggcc

SEQ ID NO: 5743707 - DNA, 25 bp, Homo sapien
gactgggaacaggaggttctccaac

SEQ ID NO: 5743708 - DNA, 25 bp, Homo sapien
gttggagaacctcctgttcccagtc

SEQ ID NO: 5743709 - DNA, 25 bp, Homo sapien
ccggaaggccctgtcatccgagaat

SEQ ID NO: 5743710 - DNA, 25 bp, Homo sapien
attctcggatgacagggccttccgg

SEQ ID NO: 5743711 - DNA, 25 bp, Homo sapien
tactttgtttgttagatacttctac

SEQ ID NO: 5743712 - DNA, 25 bp, Homo sapien
gtagaagtatctaacaaacaaagta

SEQ ID NO: 5743713 - DNA, 25 bp, Homo sapien
aaggacgtggtgtcttgtcgtcaga

SEQ ID NO: 5743714 - DNA, 25 bp, Homo sapien
tctgacgacaagacaccacgtcctt

SEQ ID NO: 5743715 - DNA, 25 bp, Homo sapien
tcttttcgagtatctggtagggcgt

SEQ ID NO: 5743716 - DNA, 25 bp, Homo sapien
acgccctaccagatactcgaaaaga

SEQ ID NO: 5743717 - DNA, 25 bp, Homo sapien
gaccacgtaagctccacgacactgg

SEQ ID NO: 5743718 - DNA, 25 bp, Homo sapien
ccagtgtcgtggagcttacgtggtc

SEQ ID NO: 5743719 - DNA, 25 bp, Homo sapien
ttttgtatgtaagagagaacgcgaa

SEQ ID NO: 5743720 - DNA, 25 bp, Homo sapien
ttcgcgttctctcttacatacaaaa

SEQ ID NO: 5743721 - DNA, 25 bp, Homo sapien
aaccgtaacgtttataatcatctct

SEQ ID NO: 5743722 - DNA, 25 bp, Homo sapien
agagatgattataaacgttacggtt

SEQ ID NO: 5743723 - DNA, 25 bp, Homo sapien
gagcctgctacaacctttactgccg

SEQ ID NO: 5743724 - DNA, 25 bp, Homo sapien
cggcagtaaaggttgtagcaggctc

SEQ ID NO: 5743725 - DNA, 25 bp, Homo sapien
ctcctcttcggccccggacgccagg

SEQ ID NO: 5743726 - DNA, 25 bp, Homo sapien
cctggcgtccggggccgaagaggag

SEQ ID NO: 5743727 - DNA, 25 bp, Homo sapien
gtccgtggggtaccctgtcatgtat

SEQ ID NO: 5743728 - DNA, 25 bp, Homo sapien
atacatgacagggtaccccacggac

SEQ ID NO: 5743729 - DNA, 25 bp, Homo sapien
gacggggacgtgggtatcttctccg

SEQ ID NO: 5743730 - DNA, 25 bp, Homo sapien
cggagaagatacccacgtccccgtc

SEQ ID NO: 5743731 - DNA, 25 bp, Homo sapien
gagagtgaatccgtcttcaatctat

SEQ ID NO: 5743732 - DNA, 25 bp, Homo sapien
atagattgaagacggattcactctc

SEQ ID NO: 5743733 - DNA, 25 bp, Homo sapien
aggtccgggcgcactcaccgtcgtg

SEQ ID NO: 5743734 - DNA, 25 bp, Homo sapien
cacgacggtgagtgcgcccggacct

SEQ ID NO: 5743735 - DNA, 25 bp, Homo sapien
gtccgcacaaggtccaccccgacac

SEQ ID NO: 5743736 - DNA, 25 bp, Homo sapien
gtgtcggggtggaccttgtgcggac

SEQ ID NO: 5743737 - DNA, 25 bp, Homo sapien
cctccgagacgggtcgcagggacgg

SEQ ID NO: 5743738 - DNA, 25 bp, Homo sapien
ccgtccctgcgacccgtctcggagg

SEQ ID NO: 5743739 - DNA, 25 bp, Homo sapien
agaaagtcaactgttaacgactaat

SEQ ID NO: 5743740 - DNA, 25 bp, Homo sapien
attagtcgttaacagttgactttct

SEQ ID NO: 5743741 - DNA, 25 bp, Homo sapien
taagaagtccgttatagtcattgtt

SEQ ID NO: 5743742 - DNA, 25 bp, Homo sapien
aacaatgactataacggacttctta

SEQ ID NO: 5743743 - DNA, 25 bp, Homo sapien
tactggctattcttattaatgaact

SEQ ID NO: 5743744 - DNA, 25 bp, Homo sapien
agttcattaataagaatagccagta

SEQ ID NO: 5743745 - DNA, 25 bp, Homo sapien
gttgagactggctgagacggactct

SEQ ID NO: 5743746 - DNA, 25 bp, Homo sapien
agagtccgtctcagccagtctcaac

SEQ ID NO: 5743747 - DNA, 25 bp, Homo sapien
catggggtagtcgaccttagttccc

SEQ ID NO: 5743748 - DNA, 25 bp, Homo sapien
gggaactaaggtcgactaccccatg

SEQ ID NO: 5743749 - DNA, 25 bp, Homo sapien
ataacgtcctcctaaggcctttgaa

SEQ ID NO: 5743750 - DNA, 25 bp, Homo sapien
ttcaaaggccttaggaggacgttat

SEQ ID NO: 5743751 - DNA, 25 bp, Homo sapien
taagtagttcaaagtgacattaatg

SEQ ID NO: 5743752 - DNA, 25 bp, Homo sapien
cattaatgtcactttgaactactta

SEQ ID NO: 5743753 - DNA, 25 bp, Homo sapien
gtgcggtacttctaccgacggagga

SEQ ID NO: 5743754 - DNA, 25 bp, Homo sapien
tcctccgtcggtagaagtaccgcac

SEQ ID NO: 5743755 - DNA, 25 bp, Homo sapien
ataaattagacacgttcactataaa

SEQ ID NO: 5743756 - DNA, 25 bp, Homo sapien
tttatagtgaacgtgtctaatttat

SEQ ID NO: 5743757 - DNA, 25 bp, Homo sapien
ctgcccgtccgaaggcccctgacgc

SEQ ID NO: 5743758 - DNA, 25 bp, Homo sapien
gcgtcaggggccttcggacgggcag

SEQ ID NO: 5743759 - DNA, 25 bp, Homo sapien
cccggtacatcgaccgtggcaccat

SEQ ID NO: 5743760 - DNA, 25 bp, Homo sapien
atggtgccacggtcgatgtaccggg

SEQ ID NO: 5743761 - DNA, 25 bp, Homo sapien
attctctaagggaagattgtagtcg

SEQ ID NO: 5743762 - DNA, 25 bp, Homo sapien
cgactacaatcttcccttagagaat

SEQ ID NO: 5743763 - DNA, 25 bp, Homo sapien
aaaagatcacgaccttaagacacag

SEQ ID NO: 5743764 - DNA, 25 bp, Homo sapien
ctgtgtcttaaggtcgtgatctttt

SEQ ID NO: 5743765 - DNA, 25 bp, Homo sapien
tatttgtccacgtacgtaatgttgg

SEQ ID NO: 5743766 - DNA, 25 bp, Homo sapien
ccaacattacgtacgtggacaaata

SEQ ID NO: 5743767 - DNA, 25 bp, Homo sapien
gtctgtgaccacagctcctcggttt

SEQ ID NO: 5743768 - DNA, 25 bp, Homo sapien
aaaccgaggagctgtggtcacagac

SEQ ID NO: 5743769 - DNA, 25 bp, Homo sapien
cgtcgaccgtccctgcccctgggtc

SEQ ID NO: 5743770 - DNA, 25 bp, Homo sapien
gacccaggggcagggacggtcgacg

SEQ ID NO: 5743771 - DNA, 25 bp, Homo sapien
gcgggggccagtcgacgcggcgtgc

SEQ ID NO: 5743772 - DNA, 25 bp, Homo sapien
gcacgccgcgtcgactggcccccgc

SEQ ID NO: 5743773 - DNA, 25 bp, Homo sapien
gaccattggatgtgacggatgtcga

SEQ ID NO: 5743774 - DNA, 25 bp, Homo sapien
tcgacatccgtcacatccaatggtc

SEQ ID NO: 5743775 - DNA, 25 bp, Homo sapien
acgtcggggctttccgatgtcacaa

SEQ ID NO: 5743776 - DNA, 25 bp, Homo sapien
ttgtgacatcggaaagccccgacgt

SEQ ID NO: 5743777 - DNA, 25 bp, Homo sapien
gcgcgccggccgcgacgggcgtgat

SEQ ID NO: 5743778 - DNA, 25 bp, Homo sapien
atcacgcccgtcgcggccggcgcgc

SEQ ID NO: 5743779 - DNA, 25 bp, Homo sapien
gcgccggccgcgacgggcgtgattg

SEQ ID NO: 5743780 - DNA, 25 bp, Homo sapien
caatcacgcccgtcgcggccggcgc

SEQ ID NO: 5743781 - DNA, 25 bp, Homo sapien
agactcacagatttacaggagaaag

SEQ ID NO: 5743782 - DNA, 25 bp, Homo sapien
ctttctcctgtaaatctgtgagtct

SEQ ID NO: 5743783 - DNA, 25 bp, Homo sapien
gggcaaagtacacgtagttttacac

SEQ ID NO: 5743784 - DNA, 25 bp, Homo sapien
gtgtaaaactacgtgtactttgccc

SEQ ID NO: 5743785 - DNA, 25 bp, Homo sapien
ggtccccgaactctttctatggcga

SEQ ID NO: 5743786 - DNA, 25 bp, Homo sapien
tcgccatagaaagagttcggggacc

SEQ ID NO: 5743787 - DNA, 25 bp, Homo sapien
atagttataacgtatcctacttaag

SEQ ID NO: 5743788 - DNA, 25 bp, Homo sapien
cttaagtaggatacgttataactat

SEQ ID NO: 5743789 - DNA, 25 bp, Homo sapien
gagacgaaacgatattcgtgcaaag

SEQ ID NO: 5743790 - DNA, 25 bp, Homo sapien
ctttgcacgaatatcgtttcgtctc

SEQ ID NO: 5743791 - DNA, 25 bp, Homo sapien
gagcacgtgactcttagacgaagaa

SEQ ID NO: 5743792 - DNA, 25 bp, Homo sapien
ttcttcgtctaagagtcacgtgctc

SEQ ID NO: 5743793 - DNA, 25 bp, Homo sapien
ttgtctttgtcagtgtttgtcgtta

SEQ ID NO: 5743794 - DNA, 25 bp, Homo sapien
taacgacaaacactgacaaagacaa

SEQ ID NO: 5743795 - DNA, 25 bp, Homo sapien
ctttcctacccacaaacattgtcac

SEQ ID NO: 5743796 - DNA, 25 bp, Homo sapien
gtgacaatgtttgtgggtaggaaag

SEQ ID NO: 5743797 - DNA, 25 bp, Homo sapien
acacctgccgttctccgtaccctac

SEQ ID NO: 5743798 - DNA, 25 bp, Homo sapien
gtagggtacggagaacggcaggtgt

SEQ ID NO: 5743799 - DNA, 25 bp, Homo sapien
gagttccacccacagccgagtccca

SEQ ID NO: 5743800 - DNA, 25 bp, Homo sapien
tgggactcggctgtgggtggaactc

SEQ ID NO: 5743801 - DNA, 25 bp, Homo sapien
tacgtccgtccaagaacattttcca

SEQ ID NO: 5743802 - DNA, 25 bp, Homo sapien
tggaaaatgttcttggacggacgta

SEQ ID NO: 5743803 - DNA, 25 bp, Homo sapien
gtgagacaatgttcccagtgagacg

SEQ ID NO: 5743804 - DNA, 25 bp, Homo sapien
cgtctcactgggaacattgtctcac

SEQ ID NO: 5743805 - DNA, 25 bp, Homo sapien
aataattatattcatggtaaagggt

SEQ ID NO: 5743806 - DNA, 25 bp, Homo sapien
accctttaccatgaatataattatt

SEQ ID NO: 5743807 - DNA, 25 bp, Homo sapien
gggctcggcgcttcttggccccgcg

SEQ ID NO: 5743808 - DNA, 25 bp, Homo sapien
cgcggggccaagaagcgccgagccc

SEQ ID NO: 5743809 - DNA, 25 bp, Homo sapien
cggaggcccactgactacgggacag

SEQ ID NO: 5743810 - DNA, 25 bp, Homo sapien
ctgtcccgtagtcagtgggcctccg

SEQ ID NO: 5743811 - DNA, 25 bp, Homo sapien
ctagatcggaatattctgtaattcg

SEQ ID NO: 5743812 - DNA, 25 bp, Homo sapien
cgaattacagaatattccgatctag

SEQ ID NO: 5743813 - DNA, 25 bp, Homo sapien
gtttaggtgttaggtaagcaaacaa

SEQ ID NO: 5743814 - DNA, 25 bp, Homo sapien
ttgtttgcttacctaacacctaaac

SEQ ID NO: 5743815 - DNA, 25 bp, Homo sapien
cggctgtgttgaagagacgtcctcg

SEQ ID NO: 5743816 - DNA, 25 bp, Homo sapien
cgaggacgtctcttcaacacagccg

SEQ ID NO: 5743817 - DNA, 25 bp, Homo sapien
ccggtttcacggtcggtgccgtctc

SEQ ID NO: 5743818 - DNA, 25 bp, Homo sapien
gagacggcaccgaccgtgaaaccgg

SEQ ID NO: 5743819 - DNA, 25 bp, Homo sapien
gggtatttagatccatgtctcatcc

SEQ ID NO: 5743820 - DNA, 25 bp, Homo sapien
ggatgagacatggatctaaataccc

SEQ ID NO: 5743821 - DNA, 25 bp, Homo sapien
gcgtcggtcgggtaggcttgggcgg

SEQ ID NO: 5743822 - DNA, 25 bp, Homo sapien
ccgcccaagcctacccgaccgacgc

SEQ ID NO: 5743823 - DNA, 25 bp, Homo sapien
gttcaaactccagtttaatctttag

SEQ ID NO: 5743824 - DNA, 25 bp, Homo sapien
ctaaagattaaactggagtttgaac

SEQ ID NO: 5743825 - DNA, 25 bp, Homo sapien
ggtgcctcgacgtcccgtcaaccct

SEQ ID NO: 5743826 - DNA, 25 bp, Homo sapien
agggttgacgggacgtcgaggcacc

SEQ ID NO: 5743827 - DNA, 25 bp, Homo sapien
ctccgaaggtacaggtttttacata

SEQ ID NO: 5743828 - DNA, 25 bp, Homo sapien
tatgtaaaaacctgtaccttcggag

SEQ ID NO: 5743829 - DNA, 25 bp, Homo sapien
agactcccgcatcactgggcgaggt

SEQ ID NO: 5743830 - DNA, 25 bp, Homo sapien
acctcgcccagtgatgcgggagtct

SEQ ID NO: 5743831 - DNA, 25 bp, Homo sapien
gtagtctcttattctagaacgaaga

SEQ ID NO: 5743832 - DNA, 25 bp, Homo sapien
tcttcgttctagaataagagactac

SEQ ID NO: 5743833 - DNA, 25 bp, Homo sapien
aatcaactataactcgagtagaaat

SEQ ID NO: 5743834 - DNA, 25 bp, Homo sapien
atttctactcgagttatagttgatt

SEQ ID NO: 5743835 - DNA, 25 bp, Homo sapien
acactactacacacgcattttctta

SEQ ID NO: 5743836 - DNA, 25 bp, Homo sapien
taagaaaatgcgtgtgtagtagtgt

SEQ ID NO: 5743837 - DNA, 25 bp, Homo sapien
cccttcgtcggcgtcaggggctttc

SEQ ID NO: 5743838 - DNA, 25 bp, Homo sapien
gaaagcccctgacgccgacgaaggg

SEQ ID NO: 5743839 - DNA, 25 bp, Homo sapien
acatcagtggacagacggcgggtgt

SEQ ID NO: 5743840 - DNA, 25 bp, Homo sapien
acacccgccgtctgtccactgatgt

SEQ ID NO: 5743841 - DNA, 25 bp, Homo sapien
ccgtcgtcgggtcccatgttgcccc

SEQ ID NO: 5743842 - DNA, 25 bp, Homo sapien
ggggcaacatgggacccgacgacgg

SEQ ID NO: 5743843 - DNA, 25 bp, Homo sapien
gaaagtcggtcttagggtctacggc

SEQ ID NO: 5743844 - DNA, 25 bp, Homo sapien
gccgtagaccctaagaccgactttc

SEQ ID NO: 5743845 - DNA, 25 bp, Homo sapien
gccacgtccctcgtaggcgtggtcc

SEQ ID NO: 5743846 - DNA, 25 bp, Homo sapien
ggaccacgcctacgagggacgtggc

SEQ ID NO: 5743847 - DNA, 25 bp, Homo sapien
ccggtcgtgctagtcccccgccgcc

SEQ ID NO: 5743848 - DNA, 25 bp, Homo sapien
ggcggcgggggactagcacgaccgg

SEQ ID NO: 5743849 - DNA, 25 bp, Homo sapien
cagttctctcaattatggcccatgt

SEQ ID NO: 5743850 - DNA, 25 bp, Homo sapien
acatgggccataattgagagaactg

SEQ ID NO: 5743851 - DNA, 25 bp, Homo sapien
tcttagacttctttctatacacggg

SEQ ID NO: 5743852 - DNA, 25 bp, Homo sapien
cccgtgtatagaaagaagtctaaga

SEQ ID NO: 5743853 - DNA, 25 bp, Homo sapien
gggacgctcgcgaaacggtcccact

SEQ ID NO: 5743854 - DNA, 25 bp, Homo sapien
agtgggaccgtttcgcgagcgtccc

SEQ ID NO: 5743855 - DNA, 25 bp, Homo sapien
ggtgaaactttatccttgtcctatg

SEQ ID NO: 5743856 - DNA, 25 bp, Homo sapien
cataggacaaggataaagtttcacc

SEQ ID NO: 5743857 - DNA, 25 bp, Homo sapien
ccctacaagtgcaggaactcgggtg

SEQ ID NO: 5743858 - DNA, 25 bp, Homo sapien
cacccgagttcctgcacttgtaggg

SEQ ID NO: 5743859 - DNA, 25 bp, Homo sapien
atttcctcagctattggcggttcag

SEQ ID NO: 5743860 - DNA, 25 bp, Homo sapien
ctgaaccgccaatagctgaggaaat

SEQ ID NO: 5743861 - DNA, 25 bp, Homo sapien
tggtcgttgttagccagttacggaa

SEQ ID NO: 5743862 - DNA, 25 bp, Homo sapien
ttccgtaactggctaacaacgacca

SEQ ID NO: 5743863 - DNA, 25 bp, Homo sapien
cgagacagtccctccagggtcggcg

SEQ ID NO: 5743864 - DNA, 25 bp, Homo sapien
cgccgaccctggagggactgtctcg

SEQ ID NO: 5743865 - DNA, 25 bp, Homo sapien
gtcggactcctgtggcgctggagac

SEQ ID NO: 5743866 - DNA, 25 bp, Homo sapien
gtctccagcgccacaggagtccgac

SEQ ID NO: 5743867 - DNA, 25 bp, Homo sapien
cctcgttcggaggtgtcgccgagga

SEQ ID NO: 5743868 - DNA, 25 bp, Homo sapien
tcctcggcgacacctccgaacgagg

SEQ ID NO: 5743869 - DNA, 25 bp, Homo sapien
tcgtcaagcaaggagtgtgcgtgac

SEQ ID NO: 5743870 - DNA, 25 bp, Homo sapien
gtcacgcacactccttgcttgacga

SEQ ID NO: 5743871 - DNA, 25 bp, Homo sapien
ccgacacttgacattcattgaaact

SEQ ID NO: 5743872 - DNA, 25 bp, Homo sapien
agtttcaatgaatgtcaagtgtcgg

SEQ ID NO: 5743873 - DNA, 25 bp, Homo sapien
ctgagggcaccggaaggccgactac

SEQ ID NO: 5743874 - DNA, 25 bp, Homo sapien
gtagtcggccttccggtgccctcag

SEQ ID NO: 5743875 - DNA, 25 bp, Homo sapien
cggtcgcggaaggaccagaaagtcc

SEQ ID NO: 5743876 - DNA, 25 bp, Homo sapien
ggactttctggtccttccgcgaccg

SEQ ID NO: 5743877 - DNA, 25 bp, Homo sapien
tgtgaccgtatgaggtttgttccga

SEQ ID NO: 5743878 - DNA, 25 bp, Homo sapien
tcggaacaaacctcatacggtcaca

SEQ ID NO: 5743879 - DNA, 25 bp, Homo sapien
ccgtgcgggaggagtgacccgtgtc

SEQ ID NO: 5743880 - DNA, 25 bp, Homo sapien
gacacgggtcactcctcccgcacgg

SEQ ID NO: 5743881 - DNA, 25 bp, Homo sapien
ctcaccggtcaccggcaacgaccgt

SEQ ID NO: 5743882 - DNA, 25 bp, Homo sapien
acggtcgttgccggtgaccggtgag

SEQ ID NO: 5743883 - DNA, 25 bp, Homo sapien
caccccgcgcccctgtgagacggac

SEQ ID NO: 5743884 - DNA, 25 bp, Homo sapien
gtccgtctcacaggggcgcggggtg

SEQ ID NO: 5743885 - DNA, 25 bp, Homo sapien
ccataaatcacgtatctctatttgt

SEQ ID NO: 5743886 - DNA, 25 bp, Homo sapien
acaaatagagatacgtgatttatgg

SEQ ID NO: 5743887 - DNA, 25 bp, Homo sapien
ctggtacctgtcctcgacgacgcac

SEQ ID NO: 5743888 - DNA, 25 bp, Homo sapien
gtgcgtcgtcgaggacaggtaccag

SEQ ID NO: 5743889 - DNA, 25 bp, Homo sapien
gtccagggccagtcggagggtcgga

SEQ ID NO: 5743890 - DNA, 25 bp, Homo sapien
tccgaccctccgactggccctggac

SEQ ID NO: 5743891 - DNA, 25 bp, Homo sapien
cgggcgggtcgagccgctcgccgcc

SEQ ID NO: 5743892 - DNA, 25 bp, Homo sapien
ggcggcgagcggctcgacccgcccg

SEQ ID NO: 5743893 - DNA, 25 bp, Homo sapien
tcgggcgggtcgagccgctcgccgc

SEQ ID NO: 5743894 - DNA, 25 bp, Homo sapien
gcggcgagcggctcgacccgcccga

SEQ ID NO: 5743895 - DNA, 25 bp, Homo sapien
gaccagggcacgagcgccacggcgg

SEQ ID NO: 5743896 - DNA, 25 bp, Homo sapien
ccgccgtggcgctcgtgccctggtc

SEQ ID NO: 5743897 - DNA, 25 bp, Homo sapien
tggtccgacgcaatcaaccaggaga

SEQ ID NO: 5743898 - DNA, 25 bp, Homo sapien
tctcctggttgattgcgtcggacca

SEQ ID NO: 5743899 - DNA, 25 bp, Homo sapien
gtaaaaacacgaggaattgctgaac

SEQ ID NO: 5743900 - DNA, 25 bp, Homo sapien
gttcagcaattcctcgtgtttttac

SEQ ID NO: 5743901 - DNA, 25 bp, Homo sapien
taaataaactttcaaacgacaggtc

SEQ ID NO: 5743902 - DNA, 25 bp, Homo sapien
gacctgtcgtttgaaagtttattta

SEQ ID NO: 5743903 - DNA, 25 bp, Homo sapien
gattaatcgtcatacaaaacttttt

SEQ ID NO: 5743904 - DNA, 25 bp, Homo sapien
aaaaagttttgtatgacgattaatc

SEQ ID NO: 5743905 - DNA, 25 bp, Homo sapien
ccgaggtacgccgacggccccgatc

SEQ ID NO: 5743906 - DNA, 25 bp, Homo sapien
gatcggggccgtcggcgtacctcgg

SEQ ID NO: 5743907 - DNA, 25 bp, Homo sapien
ataattaacaaaatctctagactct

SEQ ID NO: 5743908 - DNA, 25 bp, Homo sapien
agagtctagagattttgttaattat

SEQ ID NO: 5743909 - DNA, 25 bp, Homo sapien
ccgcctaggacgtcgaagactgtcc

SEQ ID NO: 5743910 - DNA, 25 bp, Homo sapien
ggacagtcttcgacgtcctaggcgg

SEQ ID NO: 5743911 - DNA, 25 bp, Homo sapien
cacggacgttagtgagcccacccgg

SEQ ID NO: 5743912 - DNA, 25 bp, Homo sapien
ccgggtgggctcactaacgtccgtg

SEQ ID NO: 5743913 - DNA, 25 bp, Homo sapien
gcacacatgaagtgtcgaggcgaat

SEQ ID NO: 5743914 - DNA, 25 bp, Homo sapien
attcgcctcgacacttcatgtgtgc

SEQ ID NO: 5743915 - DNA, 25 bp, Homo sapien
ccctacgtgcggtcccgatgcccgt

SEQ ID NO: 5743916 - DNA, 25 bp, Homo sapien
acgggcatcgggaccgcacgtaggg

SEQ ID NO: 5743917 - DNA, 25 bp, Homo sapien
aacaggactcatgaattattctatt

SEQ ID NO: 5743918 - DNA, 25 bp, Homo sapien
aatagaataattcatgagtcctgtt

SEQ ID NO: 5743919 - DNA, 25 bp, Homo sapien
cttttcgccatctcttatgacgtag

SEQ ID NO: 5743920 - DNA, 25 bp, Homo sapien
ctacgtcataagagatggcgaaaag

SEQ ID NO: 5743921 - DNA, 25 bp, Homo sapien
tataacaatgtatcagaataaccca

SEQ ID NO: 5743922 - DNA, 25 bp, Homo sapien
tgggttattctgatacattgttata

SEQ ID NO: 5743923 - DNA, 25 bp, Homo sapien
cagtcgggtaccgaacgcggttcag

SEQ ID NO: 5743924 - DNA, 25 bp, Homo sapien
ctgaaccgcgttcggtacccgactg

SEQ ID NO: 5743925 - DNA, 25 bp, Homo sapien
gaaatcgtttagataacgaagaagg

SEQ ID NO: 5743926 - DNA, 25 bp, Homo sapien
ccttcttcgttatctaaacgatttc

SEQ ID NO: 5743927 - DNA, 25 bp, Homo sapien
aggaaatcgtttagataacgaagaa

SEQ ID NO: 5743928 - DNA, 25 bp, Homo sapien
ttcttcgttatctaaacgatttcct

SEQ ID NO: 5743929 - DNA, 25 bp, Homo sapien
actcgaacacatccgaagttcacct

SEQ ID NO: 5743930 - DNA, 25 bp, Homo sapien
aggtgaacttcggatgtgttcgagt

SEQ ID NO: 5743931 - DNA, 25 bp, Homo sapien
gaaggtcattcagcacatgtcgaag

SEQ ID NO: 5743932 - DNA, 25 bp, Homo sapien
cttcgacatgtgctgaatgaccttc

SEQ ID NO: 5743933 - DNA, 25 bp, Homo sapien
cggtcctcgcccggctccgcgccgc

SEQ ID NO: 5743934 - DNA, 25 bp, Homo sapien
gcggcgcggagccgggcgaggaccg

SEQ ID NO: 5743935 - DNA, 25 bp, Homo sapien
caccgcggtcctcgcccggctccgc

SEQ ID NO: 5743936 - DNA, 25 bp, Homo sapien
gcggagccgggcgaggaccgcggtg

SEQ ID NO: 5743937 - DNA, 25 bp, Homo sapien
actactgaaagtcccgtggagaaag

SEQ ID NO: 5743938 - DNA, 25 bp, Homo sapien
ctttctccacgggactttcagtagt

SEQ ID NO: 5743939 - DNA, 25 bp, Homo sapien
gacccacgtggcccacggacggccg

SEQ ID NO: 5743940 - DNA, 25 bp, Homo sapien
cggccgtccgtgggccacgtgggtc

SEQ ID NO: 5743941 - DNA, 25 bp, Homo sapien
tgtttcaatgattacaatattttac

SEQ ID NO: 5743942 - DNA, 25 bp, Homo sapien
gtaaaatattgtaatcattgaaaca

SEQ ID NO: 5743943 - DNA, 25 bp, Homo sapien
tcctgtttcaatgattacaatattt

SEQ ID NO: 5743944 - DNA, 25 bp, Homo sapien
aaatattgtaatcattgaaacagga

SEQ ID NO: 5743945 - DNA, 25 bp, Homo sapien
cacaaccacaatcataatcacaacc

SEQ ID NO: 5743946 - DNA, 25 bp, Homo sapien
ggttgtgattatgattgtggttgtg

SEQ ID NO: 5743947 - DNA, 25 bp, Homo sapien
agttgaaaaggtattacattttcac

SEQ ID NO: 5743948 - DNA, 25 bp, Homo sapien
gtgaaaatgtaataccttttcaact

SEQ ID NO: 5743949 - DNA, 25 bp, Homo sapien
gccccgtcaggagcttctgtcaggg

SEQ ID NO: 5743950 - DNA, 25 bp, Homo sapien
ccctgacagaagctcctgacggggc

SEQ ID NO: 5743951 - DNA, 25 bp, Homo sapien
ggacgagctctgattgttggttgac

SEQ ID NO: 5743952 - DNA, 25 bp, Homo sapien
gtcaaccaacaatcagagctcgtcc

SEQ ID NO: 5743953 - DNA, 25 bp, Homo sapien
tcttaggacacaagatgtcagtttc

SEQ ID NO: 5743954 - DNA, 25 bp, Homo sapien
gaaactgacatcttgtgtcctaaga

SEQ ID NO: 5743955 - DNA, 25 bp, Homo sapien
gtgggagctcaatacggacggagaa

SEQ ID NO: 5743956 - DNA, 25 bp, Homo sapien
ttctccgtccgtattgagctcccac

SEQ ID NO: 5743957 - DNA, 25 bp, Homo sapien
cagacattgagaggtcttacttctc

SEQ ID NO: 5743958 - DNA, 25 bp, Homo sapien
gagaagtaagacctctcaatgtctg

SEQ ID NO: 5743959 - DNA, 25 bp, Homo sapien
tacgacgcctccaactgtgacgact

SEQ ID NO: 5743960 - DNA, 25 bp, Homo sapien
agtcgtcacagttggaggcgtcgta

SEQ ID NO: 5743961 - DNA, 25 bp, Homo sapien
acattttacatcaaatattattcga

SEQ ID NO: 5743962 - DNA, 25 bp, Homo sapien
tcgaataatatttgatgtaaaatgt

SEQ ID NO: 5743963 - DNA, 25 bp, Homo sapien
ttacatcaaatattattcgaactat

SEQ ID NO: 5743964 - DNA, 25 bp, Homo sapien
atagttcgaataatatttgatgtaa

SEQ ID NO: 5743965 - DNA, 25 bp, Homo sapien
attttacatcaaatattattcgaac

SEQ ID NO: 5743966 - DNA, 25 bp, Homo sapien
gttcgaataatatttgatgtaaaat

SEQ ID NO: 5743967 - DNA, 25 bp, Homo sapien
caccggtgtctgttcggggcttatg

SEQ ID NO: 5743968 - DNA, 25 bp, Homo sapien
cataagccccgaacagacaccggtg

SEQ ID NO: 5743969 - DNA, 25 bp, Homo sapien
gctcggtgcaaaccgtcgtctctaa

SEQ ID NO: 5743970 - DNA, 25 bp, Homo sapien
ttagagacgacggtttgcaccgagc

SEQ ID NO: 5743971 - DNA, 25 bp, Homo sapien
ggcaaagggctctgacgcccgtcgc

SEQ ID NO: 5743972 - DNA, 25 bp, Homo sapien
gcgacgggcgtcagagccctttgcc

SEQ ID NO: 5743973 - DNA, 25 bp, Homo sapien
ccagggtgaaaggtggaccgttcat

SEQ ID NO: 5743974 - DNA, 25 bp, Homo sapien
atgaacggtccacctttcaccctgg

SEQ ID NO: 5743975 - DNA, 25 bp, Homo sapien
gtccctagcttaaaaatacacgcag

SEQ ID NO: 5743976 - DNA, 25 bp, Homo sapien
ctgcgtgtatttttaagctagggac

SEQ ID NO: 5743977 - DNA, 25 bp, Homo sapien
ttcccaataatgactcaacgtaccg

SEQ ID NO: 5743978 - DNA, 25 bp, Homo sapien
cggtacgttgagtcattattgggaa

SEQ ID NO: 5743979 - DNA, 25 bp, Homo sapien
accgcactgggcatcgtcgactggt

SEQ ID NO: 5743980 - DNA, 25 bp, Homo sapien
accagtcgacgatgcccagtgcggt

SEQ ID NO: 5743981 - DNA, 25 bp, Homo sapien
tacgaagtgcttgtttagataaaat

SEQ ID NO: 5743982 - DNA, 25 bp, Homo sapien
attttatctaaacaagcacttcgta

SEQ ID NO: 5743983 - DNA, 25 bp, Homo sapien
tccgtatactcgtaaggagtaaaag

SEQ ID NO: 5743984 - DNA, 25 bp, Homo sapien
cttttactccttacgagtatacgga

SEQ ID NO: 5743985 - DNA, 25 bp, Homo sapien
tgaaaattaaccgatattacacact

SEQ ID NO: 5743986 - DNA, 25 bp, Homo sapien
agtgtgtaatatcggttaattttca

SEQ ID NO: 5743987 - DNA, 25 bp, Homo sapien
ggcgacatcctaatcctcggtctgt

SEQ ID NO: 5743988 - DNA, 25 bp, Homo sapien
acagaccgaggattaggatgtcgcc

SEQ ID NO: 5743989 - DNA, 25 bp, Homo sapien
cagaatgagattcggtagatcggtt

SEQ ID NO: 5743990 - DNA, 25 bp, Homo sapien
aaccgatctaccgaatctcattctg

SEQ ID NO: 5743991 - DNA, 25 bp, Homo sapien
acacatatcccgggtcttcagggtc

SEQ ID NO: 5743992 - DNA, 25 bp, Homo sapien
gaccctgaagacccgggatatgtgt

SEQ ID NO: 5743993 - DNA, 25 bp, Homo sapien
ttgagggaagcggaaggctcttctc

SEQ ID NO: 5743994 - DNA, 25 bp, Homo sapien
gagaagagccttccgcttccctcaa

SEQ ID NO: 5743995 - DNA, 25 bp, Homo sapien
cagtccatgaatattgagtttaaat

SEQ ID NO: 5743996 - DNA, 25 bp, Homo sapien
atttaaactcaatattcatggactg

SEQ ID NO: 5743997 - DNA, 25 bp, Homo sapien
tgccgggagggactcggagagcggg

SEQ ID NO: 5743998 - DNA, 25 bp, Homo sapien
cccgctctccgagtccctcccggca

SEQ ID NO: 5743999 - DNA, 25 bp, Homo sapien
tgaccgaaagtatctctcggtaggg

SEQ ID NO: 5744000 - DNA, 25 bp, Homo sapien
ccctaccgagagatactttcggtca

SEQ ID NO: 5744001 - DNA, 25 bp, Homo sapien
gaccaactaatcgatgttctaaggg

SEQ ID NO: 5744002 - DNA, 25 bp, Homo sapien
cccttagaacatcgattagttggtc

SEQ ID NO: 5744003 - DNA, 25 bp, Homo sapien
ataaccatgtgtaagacaaagagaa

SEQ ID NO: 5744004 - DNA, 25 bp, Homo sapien
ttctctttgtcttacacatggttat

SEQ ID NO: 5744005 - DNA, 25 bp, Homo sapien
gtgtccggggcggtcagggaggctg

SEQ ID NO: 5744006 - DNA, 25 bp, Homo sapien
cagcctccctgaccgccccggacac

SEQ ID NO: 5744007 - DNA, 25 bp, Homo sapien
gggccttccgcgaggcgcgaccgag

SEQ ID NO: 5744008 - DNA, 25 bp, Homo sapien
ctcggtcgcgcctcgcggaaggccc

SEQ ID NO: 5744009 - DNA, 25 bp, Homo sapien
cggtggctcagcttccactgcaact

SEQ ID NO: 5744010 - DNA, 25 bp, Homo sapien
agttgcagtggaagctgagccaccg

SEQ ID NO: 5744011 - DNA, 25 bp, Homo sapien
gtgtccgaagactactattattaag

SEQ ID NO: 5744012 - DNA, 25 bp, Homo sapien
cttaataatagtagtcttcggacac

SEQ ID NO: 5744013 - DNA, 25 bp, Homo sapien
accgccggcgagctagccgtggagg

SEQ ID NO: 5744014 - DNA, 25 bp, Homo sapien
cctccacggctagctcgccggcggt

SEQ ID NO: 5744015 - DNA, 25 bp, Homo sapien
acgccgaggtcagacgcggctcctg

SEQ ID NO: 5744016 - DNA, 25 bp, Homo sapien
caggagccgcgtctgacctcggcgt

SEQ ID NO: 5744017 - DNA, 25 bp, Homo sapien
gatttcgtgtaattcgtagtattaa

SEQ ID NO: 5744018 - DNA, 25 bp, Homo sapien
ttaatactacgaattacacgaaatc

SEQ ID NO: 5744019 - DNA, 25 bp, Homo sapien
tcaccccggccgtgcctgtcaccag

SEQ ID NO: 5744020 - DNA, 25 bp, Homo sapien
ctggtgacaggcacggccggggtga

SEQ ID NO: 5744021 - DNA, 25 bp, Homo sapien
acccttctcaggctcctgatcttga

SEQ ID NO: 5744022 - DNA, 25 bp, Homo sapien
tcaagatcaggagcctgagaagggt

SEQ ID NO: 5744023 - DNA, 25 bp, Homo sapien
catctgtatctttgaaatcaccaag

SEQ ID NO: 5744024 - DNA, 25 bp, Homo sapien
cttggtgatttcaaagatacagatg

SEQ ID NO: 5744025 - DNA, 25 bp, Homo sapien
acgtcgttgactctatacattaaga

SEQ ID NO: 5744026 - DNA, 25 bp, Homo sapien
tcttaatgtatagagtcaacgacgt

SEQ ID NO: 5744027 - DNA, 25 bp, Homo sapien
ccatagagcaacatcggagtaggac

SEQ ID NO: 5744028 - DNA, 25 bp, Homo sapien
gtcctactccgatgttgctctatgg

SEQ ID NO: 5744029 - DNA, 25 bp, Homo sapien
tattataaatgttcctacctaaaaa

SEQ ID NO: 5744030 - DNA, 25 bp, Homo sapien
tttttaggtaggaacatttataata

SEQ ID NO: 5744031 - DNA, 25 bp, Homo sapien
ggaccgtgcgggtccggtctaggct

SEQ ID NO: 5744032 - DNA, 25 bp, Homo sapien
agcctagaccggacccgcacggtcc

SEQ ID NO: 5744033 - DNA, 25 bp, Homo sapien
ggtgcgtccccatggccgtgtccgt

SEQ ID NO: 5744034 - DNA, 25 bp, Homo sapien
acggacacggccatggggacgcacc

SEQ ID NO: 5744035 - DNA, 25 bp, Homo sapien
gtgtaaaccgaaactgagataagag

SEQ ID NO: 5744036 - DNA, 25 bp, Homo sapien
ctcttatctcagtttcggtttacac

SEQ ID NO: 5744037 - DNA, 25 bp, Homo sapien
atagtaaacttcaaatagtaagtca

SEQ ID NO: 5744038 - DNA, 25 bp, Homo sapien
tgacttactatttgaagtttactat

SEQ ID NO: 5744039 - DNA, 25 bp, Homo sapien
gaaatcaccagtttactaaggttgt

SEQ ID NO: 5744040 - DNA, 25 bp, Homo sapien
acaaccttagtaaactggtgatttc

SEQ ID NO: 5744041 - DNA, 25 bp, Homo sapien
tacgatcaggatagtctttacaact

SEQ ID NO: 5744042 - DNA, 25 bp, Homo sapien
agttgtaaagactatcctgatcgta

SEQ ID NO: 5744043 - DNA, 25 bp, Homo sapien
aacaattttatcataataccgagta

SEQ ID NO: 5744044 - DNA, 25 bp, Homo sapien
tactcggtattatgataaaattgtt

SEQ ID NO: 5744045 - DNA, 25 bp, Homo sapien
aaacaattttatcataataccgagt

SEQ ID NO: 5744046 - DNA, 25 bp, Homo sapien
actcggtattatgataaaattgttt

SEQ ID NO: 5744047 - DNA, 25 bp, Homo sapien
ggccccgcctctggtccacgggcag

SEQ ID NO: 5744048 - DNA, 25 bp, Homo sapien
ctgcccgtggaccagaggcggggcc

SEQ ID NO: 5744049 - DNA, 25 bp, Homo sapien
ttaccaacttaatgatgggaaagat

SEQ ID NO: 5744050 - DNA, 25 bp, Homo sapien
atctttcccatcattaagttggtaa

SEQ ID NO: 5744051 - DNA, 25 bp, Homo sapien
cgggattccgttaccgatctcgttc

SEQ ID NO: 5744052 - DNA, 25 bp, Homo sapien
gaacgagatcggtaacggaatcccg

SEQ ID NO: 5744053 - DNA, 25 bp, Homo sapien
agtctcaccttcttacgggaccagg

SEQ ID NO: 5744054 - DNA, 25 bp, Homo sapien
cctggtcccgtaagaaggtgagact

SEQ ID NO: 5744055 - DNA, 25 bp, Homo sapien
ccgtaggaggccagggtgtctcctt

SEQ ID NO: 5744056 - DNA, 25 bp, Homo sapien
aaggagacaccctggcctcctacgg

SEQ ID NO: 5744057 - DNA, 25 bp, Homo sapien
tgacccgtacgagccgtcgggccct

SEQ ID NO: 5744058 - DNA, 25 bp, Homo sapien
agggcccgacggctcgtacgggtca

SEQ ID NO: 5744059 - DNA, 25 bp, Homo sapien
gacaactacgtacactccagccggt

SEQ ID NO: 5744060 - DNA, 25 bp, Homo sapien
accggctggagtgtacgtagttgtc

SEQ ID NO: 5744061 - DNA, 25 bp, Homo sapien
ggcgctcgcgggggtcaccggcgtc

SEQ ID NO: 5744062 - DNA, 25 bp, Homo sapien
gacgccggtgacccccgcgagcgcc

SEQ ID NO: 5744063 - DNA, 25 bp, Homo sapien
gggcgctcgcgggggtcaccggcgt

SEQ ID NO: 5744064 - DNA, 25 bp, Homo sapien
acgccggtgacccccgcgagcgccc

SEQ ID NO: 5744065 - DNA, 25 bp, Homo sapien
cgggcgctcgcgggggtcaccggcg

SEQ ID NO: 5744066 - DNA, 25 bp, Homo sapien
cgccggtgacccccgcgagcgcccg

SEQ ID NO: 5744067 - DNA, 25 bp, Homo sapien
gcgctcgcgggggtcaccggcgtca

SEQ ID NO: 5744068 - DNA, 25 bp, Homo sapien
tgacgccggtgacccccgcgagcgc

SEQ ID NO: 5744069 - DNA, 25 bp, Homo sapien
gagccccgtttcaacacggtcgaag

SEQ ID NO: 5744070 - DNA, 25 bp, Homo sapien
cttcgaccgtgttgaaacggggctc

SEQ ID NO: 5744071 - DNA, 25 bp, Homo sapien
taaacagggtacgagagaattggag

SEQ ID NO: 5744072 - DNA, 25 bp, Homo sapien
ctccaattctctcgtaccctgttta

SEQ ID NO: 5744073 - DNA, 25 bp, Homo sapien
cgtccggcgggtcggttgtggtgca

SEQ ID NO: 5744074 - DNA, 25 bp, Homo sapien
tgcaccacaaccgacccgccggacg

SEQ ID NO: 5744075 - DNA, 25 bp, Homo sapien
ctaacatcggtcaagtggtcataat

SEQ ID NO: 5744076 - DNA, 25 bp, Homo sapien
attatgaccacttgaccgatgttag

SEQ ID NO: 5744077 - DNA, 25 bp, Homo sapien
tgacggtccaaacgtcctccgagaa

SEQ ID NO: 5744078 - DNA, 25 bp, Homo sapien
ttctcggaggacgtttggaccgtca

SEQ ID NO: 5744079 - DNA, 25 bp, Homo sapien
gacccgcacaccgagaacgtgggtc

SEQ ID NO: 5744080 - DNA, 25 bp, Homo sapien
gacccacgttctcggtgtgcgggtc

SEQ ID NO: 5744081 - DNA, 25 bp, Homo sapien
gtcccagtcaaaataatatttagta

SEQ ID NO: 5744082 - DNA, 25 bp, Homo sapien
tactaaatattattttgactgggac

SEQ ID NO: 5744083 - DNA, 25 bp, Homo sapien
ggacgtgcaacgtcctggcgggcgg

SEQ ID NO: 5744084 - DNA, 25 bp, Homo sapien
ccgcccgccaggacgttgcacgtcc

SEQ ID NO: 5744085 - DNA, 25 bp, Homo sapien
aagcataacctggtaatgttgataa

SEQ ID NO: 5744086 - DNA, 25 bp, Homo sapien
ttatcaacattaccaggttatgctt

SEQ ID NO: 5744087 - DNA, 25 bp, Homo sapien
agaaggtccactctgctacgcctag

SEQ ID NO: 5744088 - DNA, 25 bp, Homo sapien
ctaggcgtagcagagtggaccttct

SEQ ID NO: 5744089 - DNA, 25 bp, Homo sapien
gggaagtcactccagtgctccgggt

SEQ ID NO: 5744090 - DNA, 25 bp, Homo sapien
acccggagcactggagtgacttccc

SEQ ID NO: 5744091 - DNA, 25 bp, Homo sapien
gcctcctgggcagcggtccgacgcg

SEQ ID NO: 5744092 - DNA, 25 bp, Homo sapien
cgcgtcggaccgctgcccaggaggc

SEQ ID NO: 5744093 - DNA, 25 bp, Homo sapien
ctgggcagcggtccgacgcggggtg

SEQ ID NO: 5744094 - DNA, 25 bp, Homo sapien
caccccgcgtcggaccgctgcccag

SEQ ID NO: 5744095 - DNA, 25 bp, Homo sapien
cgtccgtcccgtctgggtctggtcc

SEQ ID NO: 5744096 - DNA, 25 bp, Homo sapien
ggaccagacccagacgggacggacg

SEQ ID NO: 5744097 - DNA, 25 bp, Homo sapien
agcgggaggtcaggcgtcgcaagcg

SEQ ID NO: 5744098 - DNA, 25 bp, Homo sapien
cgcttgcgacgcctgacctcccgct

SEQ ID NO: 5744099 - DNA, 25 bp, Homo sapien
tgcccccaatattcatatgacagtt

SEQ ID NO: 5744100 - DNA, 25 bp, Homo sapien
aactgtcatatgaatattgggggca

SEQ ID NO: 5744101 - DNA, 25 bp, Homo sapien
gagtccacctttaaatccagtgaaa

SEQ ID NO: 5744102 - DNA, 25 bp, Homo sapien
tttcactggatttaaaggtggactc

SEQ ID NO: 5744103 - DNA, 25 bp, Homo sapien
actgctggtatacaagacttaacag

SEQ ID NO: 5744104 - DNA, 25 bp, Homo sapien
ctgttaagtcttgtataccagcagt

SEQ ID NO: 5744105 - DNA, 25 bp, Homo sapien
aaagtcaaacacaaggtataataat

SEQ ID NO: 5744106 - DNA, 25 bp, Homo sapien
attattataccttgtgtttgacttt

SEQ ID NO: 5744107 - DNA, 25 bp, Homo sapien
gagggaatttattaagtgcgtatag

SEQ ID NO: 5744108 - DNA, 25 bp, Homo sapien
ctatacgcacttaataaattccctc

SEQ ID NO: 5744109 - DNA, 25 bp, Homo sapien
ataaaggtattaagactcagtctca

SEQ ID NO: 5744110 - DNA, 25 bp, Homo sapien
tgagactgagtcttaatacctttat

SEQ ID NO: 5744111 - DNA, 25 bp, Homo sapien
acgtcttcgtggtcggcgcccaggg

SEQ ID NO: 5744112 - DNA, 25 bp, Homo sapien
ccctgggcgccgaccacgaagacgt

SEQ ID NO: 5744113 - DNA, 25 bp, Homo sapien
catcgccggtgtgccgtatgtcgcg

SEQ ID NO: 5744114 - DNA, 25 bp, Homo sapien
cgcgacatacggcacaccggcgatg

SEQ ID NO: 5744115 - DNA, 25 bp, Homo sapien
ctaaaacttcttcctcactcaggag

SEQ ID NO: 5744116 - DNA, 25 bp, Homo sapien
ctcctgagtgaggaagaagttttag

SEQ ID NO: 5744117 - DNA, 25 bp, Homo sapien
gaaccataacctaagtcgaaacaaa

SEQ ID NO: 5744118 - DNA, 25 bp, Homo sapien
tttgtttcgacttaggttatggttc

SEQ ID NO: 5744119 - DNA, 25 bp, Homo sapien
gttagtagctaaacaactgacttgt

SEQ ID NO: 5744120 - DNA, 25 bp, Homo sapien
acaagtcagttgtttagctactaac

SEQ ID NO: 5744121 - DNA, 25 bp, Homo sapien
acggaacgttgtgtgccgggagtag

SEQ ID NO: 5744122 - DNA, 25 bp, Homo sapien
ctactcccggcacacaacgttccgt

SEQ ID NO: 5744123 - DNA, 25 bp, Homo sapien
gacctgtgcaccaggagcggacctc

SEQ ID NO: 5744124 - DNA, 25 bp, Homo sapien
gaggtccgctcctggtgcacaggtc

SEQ ID NO: 5744125 - DNA, 25 bp, Homo sapien
gtcgaggatcgaggacggcactttc

SEQ ID NO: 5744126 - DNA, 25 bp, Homo sapien
gaaagtgccgtcctcgatcctcgac

SEQ ID NO: 5744127 - DNA, 25 bp, Homo sapien
tcctactcatccttagtcgtttcat

SEQ ID NO: 5744128 - DNA, 25 bp, Homo sapien
atgaaacgactaaggatgagtagga

SEQ ID NO: 5744129 - DNA, 25 bp, Homo sapien
gtcggtcgtacgagttcaccctcgt

SEQ ID NO: 5744130 - DNA, 25 bp, Homo sapien
acgagggtgaactcgtacgaccgac

SEQ ID NO: 5744131 - DNA, 25 bp, Homo sapien
gaagtcgaataattaacccaaagac

SEQ ID NO: 5744132 - DNA, 25 bp, Homo sapien
gtctttgggttaattattcgacttc

SEQ ID NO: 5744133 - DNA, 25 bp, Homo sapien
atatcagtgttctcattgaaaagta

SEQ ID NO: 5744134 - DNA, 25 bp, Homo sapien
tacttttcaatgagaacactgatat

SEQ ID NO: 5744135 - DNA, 25 bp, Homo sapien
cgacgagaacggtcctgagggactg

SEQ ID NO: 5744136 - DNA, 25 bp, Homo sapien
cagtccctcaggaccgttctcgtcg

SEQ ID NO: 5744137 - DNA, 25 bp, Homo sapien
taccttaatacccacactggcaaag

SEQ ID NO: 5744138 - DNA, 25 bp, Homo sapien
ctttgccagtgtgggtattaaggta

SEQ ID NO: 5744139 - DNA, 25 bp, Homo sapien
ggctcgtggctcctgggtccaccgg

SEQ ID NO: 5744140 - DNA, 25 bp, Homo sapien
ccggtggacccaggagccacgagcc

SEQ ID NO: 5744141 - DNA, 25 bp, Homo sapien
cggctcgtggctcctgggtccaccg

SEQ ID NO: 5744142 - DNA, 25 bp, Homo sapien
cggtggacccaggagccacgagccg

SEQ ID NO: 5744143 - DNA, 25 bp, Homo sapien
acggctcgtggctcctgggtccacc

SEQ ID NO: 5744144 - DNA, 25 bp, Homo sapien
ggtggacccaggagccacgagccgt

SEQ ID NO: 5744145 - DNA, 25 bp, Homo sapien
ggcctgccgcggaagcccttccgag

SEQ ID NO: 5744146 - DNA, 25 bp, Homo sapien
ctcggaagggcttccgcggcaggcc

SEQ ID NO: 5744147 - DNA, 25 bp, Homo sapien
acgacgacctgctgtgccacggcga

SEQ ID NO: 5744148 - DNA, 25 bp, Homo sapien
tcgccgtggcacagcaggtcgtcgt

SEQ ID NO: 5744149 - DNA, 25 bp, Homo sapien
cgactgataagggctaaacctgtgg

SEQ ID NO: 5744150 - DNA, 25 bp, Homo sapien
ccacaggtttagcccttatcagtcg

SEQ ID NO: 5744151 - DNA, 25 bp, Homo sapien
gacgtcccttctccgccgtccgtcg

SEQ ID NO: 5744152 - DNA, 25 bp, Homo sapien
cgacggacggcggagaagggacgtc

SEQ ID NO: 5744153 - DNA, 25 bp, Homo sapien
aggtaaacggtgagagcggtggagg

SEQ ID NO: 5744154 - DNA, 25 bp, Homo sapien
cctccaccgctctcaccgtttacct

SEQ ID NO: 5744155 - DNA, 25 bp, Homo sapien
cttaagtctacaagaagcctaatac

SEQ ID NO: 5744156 - DNA, 25 bp, Homo sapien
gtattaggcttcttgtagacttaag

SEQ ID NO: 5744157 - DNA, 25 bp, Homo sapien
ccgggcctgactgggggcgtcgtcg

SEQ ID NO: 5744158 - DNA, 25 bp, Homo sapien
cgacgacgcccccagtcaggcccgg

SEQ ID NO: 5744159 - DNA, 25 bp, Homo sapien
gtcggccaggaacggcgaaggaggg

SEQ ID NO: 5744160 - DNA, 25 bp, Homo sapien
ccctccttcgccgttcctggccgac

SEQ ID NO: 5744161 - DNA, 25 bp, Homo sapien
acggcggtcaccctcagcgtgcccc

SEQ ID NO: 5744162 - DNA, 25 bp, Homo sapien
ggggcacgctgagggtgaccgccgt

SEQ ID NO: 5744163 - DNA, 25 bp, Homo sapien
gacggcggtcaccctcagcgtgccc

SEQ ID NO: 5744164 - DNA, 25 bp, Homo sapien
gggcacgctgagggtgaccgccgtc

SEQ ID NO: 5744165 - DNA, 25 bp, Homo sapien
gtttcctcccagacagaaaggatgg

SEQ ID NO: 5744166 - DNA, 25 bp, Homo sapien
ccatcctttctgtctgggaggaaac

SEQ ID NO: 5744167 - DNA, 25 bp, Homo sapien
cacacctatcctcggaccgacccga

SEQ ID NO: 5744168 - DNA, 25 bp, Homo sapien
tcgggtcggtccgaggataggtgtg

SEQ ID NO: 5744169 - DNA, 25 bp, Homo sapien
attcgtgcacaagtcacagtggagg

SEQ ID NO: 5744170 - DNA, 25 bp, Homo sapien
cctccactgtgacttgtgcacgaat

SEQ ID NO: 5744171 - DNA, 25 bp, Homo sapien
gttcttcgaattatattgtctttcc

SEQ ID NO: 5744172 - DNA, 25 bp, Homo sapien
ggaaagacaatataattcgaagaac

SEQ ID NO: 5744173 - DNA, 25 bp, Homo sapien
atctttgaaggttatcacaccggta

SEQ ID NO: 5744174 - DNA, 25 bp, Homo sapien
taccggtgtgataaccttcaaagat

SEQ ID NO: 5744175 - DNA, 25 bp, Homo sapien
ctttcaccactaggtccgtcctggt

SEQ ID NO: 5744176 - DNA, 25 bp, Homo sapien
accaggacggacctagtggtgaaag

SEQ ID NO: 5744177 - DNA, 25 bp, Homo sapien
ggtgacgggacccctagccacctgg

SEQ ID NO: 5744178 - DNA, 25 bp, Homo sapien
ccaggtggctaggggtcccgtcacc

SEQ ID NO: 5744179 - DNA, 25 bp, Homo sapien
ctgaaacgacattcctaaaagagct

SEQ ID NO: 5744180 - DNA, 25 bp, Homo sapien
agctcttttaggaatgtcgtttcag

SEQ ID NO: 5744181 - DNA, 25 bp, Homo sapien
tcctcgagtcggcagcaccccagtg

SEQ ID NO: 5744182 - DNA, 25 bp, Homo sapien
cactggggtgctgccgactcgagga

SEQ ID NO: 5744183 - DNA, 25 bp, Homo sapien
ctcagtccgggtcgacgccccgtgg

SEQ ID NO: 5744184 - DNA, 25 bp, Homo sapien
ccacggggcgtcgacccggactgag

SEQ ID NO: 5744185 - DNA, 25 bp, Homo sapien
ggttataggataactggttgtcagc

SEQ ID NO: 5744186 - DNA, 25 bp, Homo sapien
gctgacaaccagttatcctataacc

SEQ ID NO: 5744187 - DNA, 25 bp, Homo sapien
gcgtaggcgcgtttcatgcggaggg

SEQ ID NO: 5744188 - DNA, 25 bp, Homo sapien
ccctccgcatgaaacgcgcctacgc

SEQ ID NO: 5744189 - DNA, 25 bp, Homo sapien
gggcgcccctgtgtaaagacagcct

SEQ ID NO: 5744190 - DNA, 25 bp, Homo sapien
aggctgtctttacacaggggcgccc

SEQ ID NO: 5744191 - DNA, 25 bp, Homo sapien
tgaggcaggacaagacgccgagcac

SEQ ID NO: 5744192 - DNA, 25 bp, Homo sapien
gtgctcggcgtcttgtcctgcctca

SEQ ID NO: 5744193 - DNA, 25 bp, Homo sapien
gaccccgcagcgtcgtcctccggtc

SEQ ID NO: 5744194 - DNA, 25 bp, Homo sapien
gaccggaggacgacgctgcggggtc

SEQ ID NO: 5744195 - DNA, 25 bp, Homo sapien
agtcgtacaaaagtgatacgttcgg

SEQ ID NO: 5744196 - DNA, 25 bp, Homo sapien
ccgaacgtatcacttttgtacgact

SEQ ID NO: 5744197 - DNA, 25 bp, Homo sapien
cgaccctcgttgaccggtgattggc

SEQ ID NO: 5744198 - DNA, 25 bp, Homo sapien
gccaatcaccggtcaacgagggtcg

SEQ ID NO: 5744199 - DNA, 25 bp, Homo sapien
ttaacaatcaggtatatattattct

SEQ ID NO: 5744200 - DNA, 25 bp, Homo sapien
agaataatatatacctgattgttaa

SEQ ID NO: 5744201 - DNA, 25 bp, Homo sapien
tttccagtataaagtttcatatgtg

SEQ ID NO: 5744202 - DNA, 25 bp, Homo sapien
cacatatgaaactttatactggaaa

SEQ ID NO: 5744203 - DNA, 25 bp, Homo sapien
gctgccagggcgtcgagggtgttac

SEQ ID NO: 5744204 - DNA, 25 bp, Homo sapien
gtaacaccctcgacgccctggcagc

SEQ ID NO: 5744205 - DNA, 25 bp, Homo sapien
ctcgcgagagcacccgcccgcgttc

SEQ ID NO: 5744206 - DNA, 25 bp, Homo sapien
gaacgcgggcgggtgctctcgcgag

SEQ ID NO: 5744207 - DNA, 25 bp, Homo sapien
cggaggtcgcatcccgtcggagaac

SEQ ID NO: 5744208 - DNA, 25 bp, Homo sapien
gttctccgacgggatgcgacctccg

SEQ ID NO: 5744209 - DNA, 25 bp, Homo sapien
gccgccacccccgacggcacgggtc

SEQ ID NO: 5744210 - DNA, 25 bp, Homo sapien
gacccgtgccgtcgggggtggcggc

SEQ ID NO: 5744211 - DNA, 25 bp, Homo sapien
tcgccgccacccccgacggcacggg

SEQ ID NO: 5744212 - DNA, 25 bp, Homo sapien
cccgtgccgtcgggggtggcggcga

SEQ ID NO: 5744213 - DNA, 25 bp, Homo sapien
gtccgttacagcaccagactcttgg

SEQ ID NO: 5744214 - DNA, 25 bp, Homo sapien
ccaagagtctggtgctgtaacggac

SEQ ID NO: 5744215 - DNA, 25 bp, Homo sapien
ttgaggactcaccactttgccgacg

SEQ ID NO: 5744216 - DNA, 25 bp, Homo sapien
cgtcggcaaagtggtgagtcctcaa

SEQ ID NO: 5744217 - DNA, 25 bp, Homo sapien
tgaacgatggaggaagtccactgaa

SEQ ID NO: 5744218 - DNA, 25 bp, Homo sapien
ttcagtggacttcctccatcgttca

SEQ ID NO: 5744219 - DNA, 25 bp, Homo sapien
tcttgtctgctcctctgtcggtcgt

SEQ ID NO: 5744220 - DNA, 25 bp, Homo sapien
acgaccgacagaggagcagacaaga

SEQ ID NO: 5744221 - DNA, 25 bp, Homo sapien
gcgggcgacgtcacaccggacttcg

SEQ ID NO: 5744222 - DNA, 25 bp, Homo sapien
cgaagtccggtgtgacgtcgcccgc

SEQ ID NO: 5744223 - DNA, 25 bp, Homo sapien
cctggtcgctggagcggcctgactt

SEQ ID NO: 5744224 - DNA, 25 bp, Homo sapien
aagtcaggccgctccagcgaccagg

SEQ ID NO: 5744225 - DNA, 25 bp, Homo sapien
tgccgggccccctgccgtacagccg

SEQ ID NO: 5744226 - DNA, 25 bp, Homo sapien
cggctgtacggcagggggcccggca

SEQ ID NO: 5744227 - DNA, 25 bp, Homo sapien
aggtttcagagtctctcactcagac

SEQ ID NO: 5744228 - DNA, 25 bp, Homo sapien
gtctgagtgagagactctgaaacct

SEQ ID NO: 5744229 - DNA, 25 bp, Homo sapien
agggaggtgtattgccacatactaa

SEQ ID NO: 5744230 - DNA, 25 bp, Homo sapien
ttagtatgtggcaatacacctccct

SEQ ID NO: 5744231 - DNA, 25 bp, Homo sapien
ttaaatgacaagacacatggtagtg

SEQ ID NO: 5744232 - DNA, 25 bp, Homo sapien
cactaccatgtgtcttgtcatttaa

SEQ ID NO: 5744233 - DNA, 25 bp, Homo sapien
gtaatacgataaatgtcccaaataa

SEQ ID NO: 5744234 - DNA, 25 bp, Homo sapien
ttatttgggacatttatcgtattac

SEQ ID NO: 5744235 - DNA, 25 bp, Homo sapien
atcacatgtaaacaatttaagttag

SEQ ID NO: 5744236 - DNA, 25 bp, Homo sapien
ctaacttaaattgtttacatgtgat

SEQ ID NO: 5744237 - DNA, 25 bp, Homo sapien
aaggggtggtgcgaagtcggtgtcc

SEQ ID NO: 5744238 - DNA, 25 bp, Homo sapien
ggacaccgacttcgcaccacccctt

SEQ ID NO: 5744239 - DNA, 25 bp, Homo sapien
gtccttcgacgatggcctcagtggt

SEQ ID NO: 5744240 - DNA, 25 bp, Homo sapien
accactgaggccatcgtcgaaggac

SEQ ID NO: 5744241 - DNA, 25 bp, Homo sapien
tctctacgggtatcaaaaaacatgg

SEQ ID NO: 5744242 - DNA, 25 bp, Homo sapien
ccatgttttttgatacccgtagaga

SEQ ID NO: 5744243 - DNA, 25 bp, Homo sapien
cttctggtatggacttttacgaaat

SEQ ID NO: 5744244 - DNA, 25 bp, Homo sapien
atttcgtaaaagtccataccagaag

SEQ ID NO: 5744245 - DNA, 25 bp, Homo sapien
aacaggaatgataggatacagaaac

SEQ ID NO: 5744246 - DNA, 25 bp, Homo sapien
gtttctgtatcctatcattcctgtt

SEQ ID NO: 5744247 - DNA, 25 bp, Homo sapien
aaagatatttcaaatcggaaagtcg

SEQ ID NO: 5744248 - DNA, 25 bp, Homo sapien
cgactttccgatttgaaatatcttt

SEQ ID NO: 5744249 - DNA, 25 bp, Homo sapien
aagtcgaagtggaaatagaacaagt

SEQ ID NO: 5744250 - DNA, 25 bp, Homo sapien
acttgttctatttccacttcgactt

SEQ ID NO: 5744251 - DNA, 25 bp, Homo sapien
tcccggcaggtcacggagccgaaga

SEQ ID NO: 5744252 - DNA, 25 bp, Homo sapien
tcttcggctccgtgacctgccggga

SEQ ID NO: 5744253 - DNA, 25 bp, Homo sapien
ggaaatatttgtcattagaaagaat

SEQ ID NO: 5744254 - DNA, 25 bp, Homo sapien
attctttctaatgacaaatatttcc

SEQ ID NO: 5744255 - DNA, 25 bp, Homo sapien
gattaagtctagttaatgatcatgt

SEQ ID NO: 5744256 - DNA, 25 bp, Homo sapien
acatgatcattaactagacttaatc

SEQ ID NO: 5744257 - DNA, 25 bp, Homo sapien
accggtcccgggatctcaaggtcca

SEQ ID NO: 5744258 - DNA, 25 bp, Homo sapien
tggaccttgagatcccgggaccggt

SEQ ID NO: 5744259 - DNA, 25 bp, Homo sapien
gaccgtcacgagttgtctgccgtca

SEQ ID NO: 5744260 - DNA, 25 bp, Homo sapien
tgacggcagacaactcgtgacggtc

SEQ ID NO: 5744261 - DNA, 25 bp, Homo sapien
gagacagcaatttcaggacccctag

SEQ ID NO: 5744262 - DNA, 25 bp, Homo sapien
ctaggggtcctgaaattgctgtctc

SEQ ID NO: 5744263 - DNA, 25 bp, Homo sapien
gacagggtgtcccctcgtccgcgac

SEQ ID NO: 5744264 - DNA, 25 bp, Homo sapien
gtcgcggacgaggggacaccctgtc

SEQ ID NO: 5744265 - DNA, 25 bp, Homo sapien
ttggaccgcggggccttctcgggac

SEQ ID NO: 5744266 - DNA, 25 bp, Homo sapien
gtcccgagaaggccccgcggtccaa

SEQ ID NO: 5744267 - DNA, 25 bp, Homo sapien
gtctgtagtcaaagacaccgtaacc

SEQ ID NO: 5744268 - DNA, 25 bp, Homo sapien
ggttacggtgtctttgactacagac

SEQ ID NO: 5744269 - DNA, 25 bp, Homo sapien
ggagcgggacattcgtgccggggac

SEQ ID NO: 5744270 - DNA, 25 bp, Homo sapien
gtccccggcacgaatgtcccgctcc

SEQ ID NO: 5744271 - DNA, 25 bp, Homo sapien
aggaaatcacccaggtgtcgcttag

SEQ ID NO: 5744272 - DNA, 25 bp, Homo sapien
ctaagcgacacctgggtgatttcct

SEQ ID NO: 5744273 - DNA, 25 bp, Homo sapien
caacaggaggaataaacgaacgacg

SEQ ID NO: 5744274 - DNA, 25 bp, Homo sapien
cgtcgttcgtttattcctcctgttg

SEQ ID NO: 5744275 - DNA, 25 bp, Homo sapien
aagactttacgcgtccagaggaatt

SEQ ID NO: 5744276 - DNA, 25 bp, Homo sapien
aattcctctggacgcgtaaagtctt

SEQ ID NO: 5744277 - DNA, 25 bp, Homo sapien
ctccggctcaagtgaaagcggcact

SEQ ID NO: 5744278 - DNA, 25 bp, Homo sapien
agtgccgctttcacttgagccggag

SEQ ID NO: 5744279 - DNA, 25 bp, Homo sapien
gcggcggccggctaaaggaggcgcc

SEQ ID NO: 5744280 - DNA, 25 bp, Homo sapien
ggcgcctcctttagccggccgccgc

SEQ ID NO: 5744281 - DNA, 25 bp, Homo sapien
tcggttgtagcgaccccactgtcac

SEQ ID NO: 5744282 - DNA, 25 bp, Homo sapien
gtgacagtggggtcgctacaaccga

SEQ ID NO: 5744283 - DNA, 25 bp, Homo sapien
aggaggagtctctattgcctcgccc

SEQ ID NO: 5744284 - DNA, 25 bp, Homo sapien
gggcgaggcaatagagactcctcct

SEQ ID NO: 5744285 - DNA, 25 bp, Homo sapien
acaaatatagactccttagatgaag

SEQ ID NO: 5744286 - DNA, 25 bp, Homo sapien
cttcatctaaggagtctatatttgt

SEQ ID NO: 5744287 - DNA, 25 bp, Homo sapien
tgttactattaacattgaacacaaa

SEQ ID NO: 5744288 - DNA, 25 bp, Homo sapien
tttgtgttcaatgttaatagtaaca

SEQ ID NO: 5744289 - DNA, 25 bp, Homo sapien
aggatttatattacgtgtgtttgta

SEQ ID NO: 5744290 - DNA, 25 bp, Homo sapien
tacaaacacacgtaatataaatcct

SEQ ID NO: 5744291 - DNA, 25 bp, Homo sapien
ccaattaaagggtctcgagaaatat

SEQ ID NO: 5744292 - DNA, 25 bp, Homo sapien
atatttctcgagaccctttaattgg

SEQ ID NO: 5744293 - DNA, 25 bp, Homo sapien
atactaattccaatccttataaaac

SEQ ID NO: 5744294 - DNA, 25 bp, Homo sapien
gttttataaggattggaattagtat

SEQ ID NO: 5744295 - DNA, 25 bp, Homo sapien
tattattttcagacatccgaattct

SEQ ID NO: 5744296 - DNA, 25 bp, Homo sapien
agaattcggatgtctgaaaataata

SEQ ID NO: 5744297 - DNA, 25 bp, Homo sapien
tggtcctctagaagactcacgctag

SEQ ID NO: 5744298 - DNA, 25 bp, Homo sapien
ctagcgtgagtcttctagaggacca

SEQ ID NO: 5744299 - DNA, 25 bp, Homo sapien
gataacgtgttgttaacgactaacc

SEQ ID NO: 5744300 - DNA, 25 bp, Homo sapien
ggttagtcgttaacaacacgttatc

SEQ ID NO: 5744301 - DNA, 25 bp, Homo sapien
gggcgacacgagtcccctcaccctc

SEQ ID NO: 5744302 - DNA, 25 bp, Homo sapien
gagggtgaggggactcgtgtcgccc

SEQ ID NO: 5744303 - DNA, 25 bp, Homo sapien
gaccaacgaatccaccgacaagaga

SEQ ID NO: 5744304 - DNA, 25 bp, Homo sapien
tctcttgtcggtggattcgttggtc

SEQ ID NO: 5744305 - DNA, 25 bp, Homo sapien
ccggacaccatgacaggctcggaag

SEQ ID NO: 5744306 - DNA, 25 bp, Homo sapien
cttccgagcctgtcatggtgtccgg

SEQ ID NO: 5744307 - DNA, 25 bp, Homo sapien
ggtgtgtgtccgagcgtgtgtcggg

SEQ ID NO: 5744308 - DNA, 25 bp, Homo sapien
cccgacacacgctcggacacacacc

SEQ ID NO: 5744309 - DNA, 25 bp, Homo sapien
tatcgaagtgtctagtcgagaccct

SEQ ID NO: 5744310 - DNA, 25 bp, Homo sapien
agggtctcgactagacacttcgata

SEQ ID NO: 5744311 - DNA, 25 bp, Homo sapien
atagtcacctttaacgagaaagtag

SEQ ID NO: 5744312 - DNA, 25 bp, Homo sapien
ctactttctcgttaaaggtgactat

SEQ ID NO: 5744313 - DNA, 25 bp, Homo sapien
aggagagaacacgtccccctactag

SEQ ID NO: 5744314 - DNA, 25 bp, Homo sapien
ctagtagggggacgtgttctctcct

SEQ ID NO: 5744315 - DNA, 25 bp, Homo sapien
gaacataagaaattagatcgaaata

SEQ ID NO: 5744316 - DNA, 25 bp, Homo sapien
tatttcgatctaatttcttatgttc

SEQ ID NO: 5744317 - DNA, 25 bp, Homo sapien
attccaaggagacacgtaaccaccg

SEQ ID NO: 5744318 - DNA, 25 bp, Homo sapien
cggtggttacgtgtctccttggaat

SEQ ID NO: 5744319 - DNA, 25 bp, Homo sapien
gggagccctgaccacacctcggact

SEQ ID NO: 5744320 - DNA, 25 bp, Homo sapien
agtccgaggtgtggtcagggctccc

SEQ ID NO: 5744321 - DNA, 25 bp, Homo sapien
gagaccgtgaccaacaagggtggca

SEQ ID NO: 5744322 - DNA, 25 bp, Homo sapien
tgccacccttgttggtcacggtctc

SEQ ID NO: 5744323 - DNA, 25 bp, Homo sapien
ggtgtcaccccgaccgtcagtcggg

SEQ ID NO: 5744324 - DNA, 25 bp, Homo sapien
cccgactgacggtcggggtgacacc

SEQ ID NO: 5744325 - DNA, 25 bp, Homo sapien
attatacatacataaatgtttcgta

SEQ ID NO: 5744326 - DNA, 25 bp, Homo sapien
tacgaaacatttatgtatgtataat

SEQ ID NO: 5744327 - DNA, 25 bp, Homo sapien
gattatacatacataaatgtttcgt

SEQ ID NO: 5744328 - DNA, 25 bp, Homo sapien
acgaaacatttatgtatgtataatc

SEQ ID NO: 5744329 - DNA, 25 bp, Homo sapien
acccgtctaacgtctcctgactcgt

SEQ ID NO: 5744330 - DNA, 25 bp, Homo sapien
acgagtcaggagacgttagacgggt

SEQ ID NO: 5744331 - DNA, 25 bp, Homo sapien
ttggtcatccggacgaggctcctag

SEQ ID NO: 5744332 - DNA, 25 bp, Homo sapien
ctaggagcctcgtccggatgaccaa

SEQ ID NO: 5744333 - DNA, 25 bp, Homo sapien
aaagataactgtcctgtagttagta

SEQ ID NO: 5744334 - DNA, 25 bp, Homo sapien
tactaactacaggacagttatcttt

SEQ ID NO: 5744335 - DNA, 25 bp, Homo sapien
agtctttggttctattctgtctctt

SEQ ID NO: 5744336 - DNA, 25 bp, Homo sapien
aagagacagaatagaaccaaagact

SEQ ID NO: 5744337 - DNA, 25 bp, Homo sapien
gacccatcgtcgctatcgcgactga

SEQ ID NO: 5744338 - DNA, 25 bp, Homo sapien
tcagtcgcgatagcgacgatgggtc

SEQ ID NO: 5744339 - DNA, 25 bp, Homo sapien
cctcgaaaacgtgaggaccttccag

SEQ ID NO: 5744340 - DNA, 25 bp, Homo sapien
ctggaaggtcctcacgttttcgagg

SEQ ID NO: 5744341 - DNA, 25 bp, Homo sapien
tcggggacgcggtccagggttcacg

SEQ ID NO: 5744342 - DNA, 25 bp, Homo sapien
cgtgaaccctggaccgcgtccccga

SEQ ID NO: 5744343 - DNA, 25 bp, Homo sapien
atatccacctactacaggttgaaag

SEQ ID NO: 5744344 - DNA, 25 bp, Homo sapien
ctttcaacctgtagtaggtggatat

SEQ ID NO: 5744345 - DNA, 25 bp, Homo sapien
cccctgacgaataccccagtggtgt

SEQ ID NO: 5744346 - DNA, 25 bp, Homo sapien
acaccactggggtattcgtcagggg

SEQ ID NO: 5744347 - DNA, 25 bp, Homo sapien
gacgacattgaaagaagacgcccct

SEQ ID NO: 5744348 - DNA, 25 bp, Homo sapien
aggggcgtcttctttcaatgtcgtc

SEQ ID NO: 5744349 - DNA, 25 bp, Homo sapien
gaaacaaaggccattttcgacttcg

SEQ ID NO: 5744350 - DNA, 25 bp, Homo sapien
cgaagtcgaaaatggcctttgtttc

SEQ ID NO: 5744351 - DNA, 25 bp, Homo sapien
tcccgtgtggcgaccacgggttaga

SEQ ID NO: 5744352 - DNA, 25 bp, Homo sapien
tctaacccgtggtcgccacacggga

SEQ ID NO: 5744353 - DNA, 25 bp, Homo sapien
accgtctcgaggagcacgtggggtg

SEQ ID NO: 5744354 - DNA, 25 bp, Homo sapien
caccccacgtgctcctcgagacggt

SEQ ID NO: 5744355 - DNA, 25 bp, Homo sapien
tataccgaaactatgaaaaccaaaa

SEQ ID NO: 5744356 - DNA, 25 bp, Homo sapien
ttttggttttcatagtttcggtata

SEQ ID NO: 5744357 - DNA, 25 bp, Homo sapien
gtgtcggccgacaacggttcggtac

SEQ ID NO: 5744358 - DNA, 25 bp, Homo sapien
gtaccgaaccgttgtcggccgacac

SEQ ID NO: 5744359 - DNA, 25 bp, Homo sapien
tacgggtggtgcccggcaccgtccg

SEQ ID NO: 5744360 - DNA, 25 bp, Homo sapien
cggacggtgccgggcaccacccgta

SEQ ID NO: 5744361 - DNA, 25 bp, Homo sapien
gaaattatagtttattcttttggta

SEQ ID NO: 5744362 - DNA, 25 bp, Homo sapien
taccaaaagaataaactataatttc

SEQ ID NO: 5744363 - DNA, 25 bp, Homo sapien
aaggaacgtcgaaacaatagttata

SEQ ID NO: 5744364 - DNA, 25 bp, Homo sapien
tataactattgtttcgacgttcctt

SEQ ID NO: 5744365 - DNA, 25 bp, Homo sapien
gtgggtggtagggacagaagtcgtc

SEQ ID NO: 5744366 - DNA, 25 bp, Homo sapien
gacgacttctgtccctaccacccac

SEQ ID NO: 5744367 - DNA, 25 bp, Homo sapien
gacgtgagggcgcagggcgcccgag

SEQ ID NO: 5744368 - DNA, 25 bp, Homo sapien
ctcgggcgccctgcgccctcacgtc

SEQ ID NO: 5744369 - DNA, 25 bp, Homo sapien
gaccgtggacgtgagggcgcagggc

SEQ ID NO: 5744370 - DNA, 25 bp, Homo sapien
gccctgcgccctcacgtccacggtc

SEQ ID NO: 5744371 - DNA, 25 bp, Homo sapien
cggcgagcgtgatcccccgcggtcc

SEQ ID NO: 5744372 - DNA, 25 bp, Homo sapien
ggaccgcgggggatcacgctcgccg

SEQ ID NO: 5744373 - DNA, 25 bp, Homo sapien
cgtggagctcccctgcggcgagcgt

SEQ ID NO: 5744374 - DNA, 25 bp, Homo sapien
acgctcgccgcaggggagctccacg

SEQ ID NO: 5744375 - DNA, 25 bp, Homo sapien
cccgccccggcgcagagccctcgct

SEQ ID NO: 5744376 - DNA, 25 bp, Homo sapien
agcgagggctctgcgccggggcggg

SEQ ID NO: 5744377 - DNA, 25 bp, Homo sapien
tattttgtgtaattcgcttaacgaa

SEQ ID NO: 5744378 - DNA, 25 bp, Homo sapien
ttcgttaagcgaattacacaaaata

SEQ ID NO: 5744379 - DNA, 25 bp, Homo sapien
gacgggccggacaccatagacagtg

SEQ ID NO: 5744380 - DNA, 25 bp, Homo sapien
cactgtctatggtgtccggcccgtc

SEQ ID NO: 5744381 - DNA, 25 bp, Homo sapien
gtccgaccgggcgtgggcagcccgg

SEQ ID NO: 5744382 - DNA, 25 bp, Homo sapien
ccgggctgcccacgcccggtcggac

SEQ ID NO: 5744383 - DNA, 25 bp, Homo sapien
gggcgtgggcagcccggacgcctgg

SEQ ID NO: 5744384 - DNA, 25 bp, Homo sapien
ccaggcgtccgggctgcccacgccc

SEQ ID NO: 5744385 - DNA, 25 bp, Homo sapien
cgggcgtgggcagcccggacgcctg

SEQ ID NO: 5744386 - DNA, 25 bp, Homo sapien
caggcgtccgggctgcccacgcccg

SEQ ID NO: 5744387 - DNA, 25 bp, Homo sapien
acttagttccggacttagaagagac

SEQ ID NO: 5744388 - DNA, 25 bp, Homo sapien
gtctcttctaagtccggaactaagt

SEQ ID NO: 5744389 - DNA, 25 bp, Homo sapien
tcgaagaaataaagatcggaacgaa

SEQ ID NO: 5744390 - DNA, 25 bp, Homo sapien
ttcgttccgatctttatttcttcga

SEQ ID NO: 5744391 - DNA, 25 bp, Homo sapien
ttaggaataatatgtgaggtcgtgt

SEQ ID NO: 5744392 - DNA, 25 bp, Homo sapien
acacgacctcacatattattcctaa

SEQ ID NO: 5744393 - DNA, 25 bp, Homo sapien
gatcattgatataagaaagatacct

SEQ ID NO: 5744394 - DNA, 25 bp, Homo sapien
aggtatctttcttatatcaatgatc

SEQ ID NO: 5744395 - DNA, 25 bp, Homo sapien
ccccgacgccctgggtgagtgaccg

SEQ ID NO: 5744396 - DNA, 25 bp, Homo sapien
cggtcactcacccagggcgtcgggg

SEQ ID NO: 5744397 - DNA, 25 bp, Homo sapien
cataaggtcttagggtcgccttacc

SEQ ID NO: 5744398 - DNA, 25 bp, Homo sapien
ggtaaggcgaccctaagaccttatg

SEQ ID NO: 5744399 - DNA, 25 bp, Homo sapien
tacagtcaaccgaataatagattcc

SEQ ID NO: 5744400 - DNA, 25 bp, Homo sapien
ggaatctattattcggttgactgta

SEQ ID NO: 5744401 - DNA, 25 bp, Homo sapien
gaccccacgccccgtccacgcgccg

SEQ ID NO: 5744402 - DNA, 25 bp, Homo sapien
cggcgcgtggacggggcgtggggtc

SEQ ID NO: 5744403 - DNA, 25 bp, Homo sapien
ctattaatcttaatctcctggtacc

SEQ ID NO: 5744404 - DNA, 25 bp, Homo sapien
ggtaccaggagattaagattaatag

SEQ ID NO: 5744405 - DNA, 25 bp, Homo sapien
tcaatctgtggggaccgcttttaat

SEQ ID NO: 5744406 - DNA, 25 bp, Homo sapien
attaaaagcggtccccacagattga

SEQ ID NO: 5744407 - DNA, 25 bp, Homo sapien
cagagaatttactgaaaacgtatgt

SEQ ID NO: 5744408 - DNA, 25 bp, Homo sapien
acatacgttttcagtaaattctctg

SEQ ID NO: 5744409 - DNA, 25 bp, Homo sapien
actagtacggtgtgaacaaatctga

SEQ ID NO: 5744410 - DNA, 25 bp, Homo sapien
tcagatttgttcacaccgtactagt

SEQ ID NO: 5744411 - DNA, 25 bp, Homo sapien
gtcgatcccctacgaactggtgcca

SEQ ID NO: 5744412 - DNA, 25 bp, Homo sapien
tggcaccagttcgtaggggatcgac

SEQ ID NO: 5744413 - DNA, 25 bp, Homo sapien
gattagatatcgtagattgtagacc

SEQ ID NO: 5744414 - DNA, 25 bp, Homo sapien
ggtctacaatctacgatatctaatc

SEQ ID NO: 5744415 - DNA, 25 bp, Homo sapien
ttaattcttcatacactgtccttat

SEQ ID NO: 5744416 - DNA, 25 bp, Homo sapien
ataaggacagtgtatgaagaattaa

SEQ ID NO: 5744417 - DNA, 25 bp, Homo sapien
acgggtaggtcgattgtcatcatct

SEQ ID NO: 5744418 - DNA, 25 bp, Homo sapien
agatgatgacaatcgacctacccgt

SEQ ID NO: 5744419 - DNA, 25 bp, Homo sapien
catctagagtaactgaaatagtttt

SEQ ID NO: 5744420 - DNA, 25 bp, Homo sapien
aaaactatttcagttactctagatg

SEQ ID NO: 5744421 - DNA, 25 bp, Homo sapien
cacagtgccggggtcggttactccg

SEQ ID NO: 5744422 - DNA, 25 bp, Homo sapien
cggagtaaccgaccccggcactgtg

SEQ ID NO: 5744423 - DNA, 25 bp, Homo sapien
gttctgcttgtgctgccctgtgctg

SEQ ID NO: 5744424 - DNA, 25 bp, Homo sapien
cagcacagggcagcacaagcagaac

SEQ ID NO: 5744425 - DNA, 25 bp, Homo sapien
tacattttaacaacgactgtgaata

SEQ ID NO: 5744426 - DNA, 25 bp, Homo sapien
tattcacagtcgttgttaaaatgta

SEQ ID NO: 5744427 - DNA, 25 bp, Homo sapien
aagatactaaaagtcctcgtctttg

SEQ ID NO: 5744428 - DNA, 25 bp, Homo sapien
caaagacgaggacttttagtatctt

SEQ ID NO: 5744429 - DNA, 25 bp, Homo sapien
tgacgtcggcggcagtagggccggg

SEQ ID NO: 5744430 - DNA, 25 bp, Homo sapien
cccggccctactgccgccgacgtca

SEQ ID NO: 5744431 - DNA, 25 bp, Homo sapien
gtcggcggcagtagggccgggacct

SEQ ID NO: 5744432 - DNA, 25 bp, Homo sapien
aggtcccggccctactgccgccgac

SEQ ID NO: 5744433 - DNA, 25 bp, Homo sapien
ggtccacggacagtcgttttcaacg

SEQ ID NO: 5744434 - DNA, 25 bp, Homo sapien
cgttgaaaacgactgtccgtggacc

SEQ ID NO: 5744435 - DNA, 25 bp, Homo sapien
taattatacaaagactaattgtcaa

SEQ ID NO: 5744436 - DNA, 25 bp, Homo sapien
ttgacaattagtctttgtataatta

SEQ ID NO: 5744437 - DNA, 25 bp, Homo sapien
gacttctgggtcctccggtatcacg

SEQ ID NO: 5744438 - DNA, 25 bp, Homo sapien
cgtgataccggaggacccagaagtc

SEQ ID NO: 5744439 - DNA, 25 bp, Homo sapien
cgtccttcgtccacattaatctgct

SEQ ID NO: 5744440 - DNA, 25 bp, Homo sapien
agcagattaatgtggacgaaggacg

SEQ ID NO: 5744441 - DNA, 25 bp, Homo sapien
gacatgccgaggcactcgtggtcct

SEQ ID NO: 5744442 - DNA, 25 bp, Homo sapien
aggaccacgagtgcctcggcatgtc

SEQ ID NO: 5744443 - DNA, 25 bp, Homo sapien
gataggtaactagtcgagacccact

SEQ ID NO: 5744444 - DNA, 25 bp, Homo sapien
agtgggtctcgactagttacctatc

SEQ ID NO: 5744445 - DNA, 25 bp, Homo sapien
cgagggcacgccgtggccgggatcg

SEQ ID NO: 5744446 - DNA, 25 bp, Homo sapien
cgatcccggccacggcgtgccctcg

SEQ ID NO: 5744447 - DNA, 25 bp, Homo sapien
actacaaatgataaaagttcaggta

SEQ ID NO: 5744448 - DNA, 25 bp, Homo sapien
tacctgaacttttatcatttgtagt

SEQ ID NO: 5744449 - DNA, 25 bp, Homo sapien
agttcttggttgtcctcggacgaca

SEQ ID NO: 5744450 - DNA, 25 bp, Homo sapien
tgtcgtccgaggacaaccaagaact

SEQ ID NO: 5744451 - DNA, 25 bp, Homo sapien
acttttctggttgatccactttgta

SEQ ID NO: 5744452 - DNA, 25 bp, Homo sapien
tacaaagtggatcaaccagaaaagt

SEQ ID NO: 5744453 - DNA, 25 bp, Homo sapien
gatgtgcctcgcaatcgtcgtcgac

SEQ ID NO: 5744454 - DNA, 25 bp, Homo sapien
gtcgacgacgattgcgaggcacatc

SEQ ID NO: 5744455 - DNA, 25 bp, Homo sapien
ccggacgcctcgcacttgagacggg

SEQ ID NO: 5744456 - DNA, 25 bp, Homo sapien
cccgtctcaagtgcgaggcgtccgg

SEQ ID NO: 5744457 - DNA, 25 bp, Homo sapien
tccggacgcctcgcacttgagacgg

SEQ ID NO: 5744458 - DNA, 25 bp, Homo sapien
ccgtctcaagtgcgaggcgtccgga

SEQ ID NO: 5744459 - DNA, 25 bp, Homo sapien
tctggaaagattctatattaaaagt

SEQ ID NO: 5744460 - DNA, 25 bp, Homo sapien
acttttaatatagaatctttccaga

SEQ ID NO: 5744461 - DNA, 25 bp, Homo sapien
tgtggtccataaagacccatgtacg

SEQ ID NO: 5744462 - DNA, 25 bp, Homo sapien
cgtacatgggtctttatggaccaca

SEQ ID NO: 5744463 - DNA, 25 bp, Homo sapien
caaaatataacattacttaacattc

SEQ ID NO: 5744464 - DNA, 25 bp, Homo sapien
gaatgttaagtaatgttatattttg

SEQ ID NO: 5744465 - DNA, 25 bp, Homo sapien
gctcggggtgaggtcgccggcgact

SEQ ID NO: 5744466 - DNA, 25 bp, Homo sapien
agtcgccggcgacctcaccccgagc

SEQ ID NO: 5744467 - DNA, 25 bp, Homo sapien
agtcgacgtcccgtgtgtgctcggg

SEQ ID NO: 5744468 - DNA, 25 bp, Homo sapien
cccgagcacacacgggacgtcgact

SEQ ID NO: 5744469 - DNA, 25 bp, Homo sapien
gacaacggacctaacccgtgaggag

SEQ ID NO: 5744470 - DNA, 25 bp, Homo sapien
ctcctcacgggttaggtccgttgtc

SEQ ID NO: 5744471 - DNA, 25 bp, Homo sapien
aaggttacattacattggtacaaac

SEQ ID NO: 5744472 - DNA, 25 bp, Homo sapien
gtttgtaccaatgtaatgtaacctt

SEQ ID NO: 5744473 - DNA, 25 bp, Homo sapien
ctccatcataaaactagggataaac

SEQ ID NO: 5744474 - DNA, 25 bp, Homo sapien
gtttatccctagttttatgatggag

SEQ ID NO: 5744475 - DNA, 25 bp, Homo sapien
gtgaccccttgaacatcctctatgt

SEQ ID NO: 5744476 - DNA, 25 bp, Homo sapien
acatagaggatgttcaaggggtcac

SEQ ID NO: 5744477 - DNA, 25 bp, Homo sapien
ctacagtctgtggtcaccaagaaag

SEQ ID NO: 5744478 - DNA, 25 bp, Homo sapien
ctttcttggtgaccacagactgtag

SEQ ID NO: 5744479 - DNA, 25 bp, Homo sapien
cagaccaaccggggcgtcgggaaca

SEQ ID NO: 5744480 - DNA, 25 bp, Homo sapien
tgttcccgacgccccggttggtctg

SEQ ID NO: 5744481 - DNA, 25 bp, Homo sapien
tagtgagcaccagagtcgtcgtacc

SEQ ID NO: 5744482 - DNA, 25 bp, Homo sapien
ggtacgacgactctggtgctcacta

SEQ ID NO: 5744483 - DNA, 25 bp, Homo sapien
ttttcgacttctaatcatataaagt

SEQ ID NO: 5744484 - DNA, 25 bp, Homo sapien
actttatatgattagaagtcgaaaa

SEQ ID NO: 5744485 - DNA, 25 bp, Homo sapien
aagagggtacacgaagagtctttat

SEQ ID NO: 5744486 - DNA, 25 bp, Homo sapien
ataaagactcttcgtgtaccctctt

SEQ ID NO: 5744487 - DNA, 25 bp, Homo sapien
tcgtctgcaggaaccacctgccaag

SEQ ID NO: 5744488 - DNA, 25 bp, Homo sapien
cttggcaggtggttcctgcagacga

SEQ ID NO: 5744489 - DNA, 25 bp, Homo sapien
acctgggctatgaatttccaatctt

SEQ ID NO: 5744490 - DNA, 25 bp, Homo sapien
cgtcttctacctgccctccgactgc

SEQ ID NO: 5744491 - DNA, 25 bp, Homo sapien
atcaaagaagccatccaaagtgtca

SEQ ID NO: 5744492 - DNA, 25 bp, Homo sapien
aatttccaatcttcaacaacctgtt

SEQ ID NO: 5744493 - DNA, 25 bp, Homo sapien
atcgatctggtcctgatcggctctt

SEQ ID NO: 5744494 - DNA, 25 bp, Homo sapien
gtgctgtccctctctgctttgtcac

SEQ ID NO: 5744495 - DNA, 25 bp, Homo sapien
ccagatcatggagaccaacctgtgg

SEQ ID NO: 5744496 - DNA, 25 bp, Homo sapien
tcaaggactattgggagagcggcga

SEQ ID NO: 5744497 - DNA, 25 bp, Homo sapien
cgacatcaagtacaactgctgcgag

SEQ ID NO: 5744498 - DNA, 25 bp, Homo sapien
gggctacccctgccaggacgggatg

SEQ ID NO: 5744499 - DNA, 25 bp, Homo sapien
gatgctgtgctgtccctctctgctt

SEQ ID NO: 5744500 - DNA, 25 bp, Homo sapien
gggctatgaatttccaatcttcaac

SEQ ID NO: 5744501 - DNA, 25 bp, Homo sapien
ggaagccagacattgtgctgtataa

SEQ ID NO: 5744502 - DNA, 25 bp, Homo sapien
gaaacccagcggcggcgaagcggag

SEQ ID NO: 5744503 - DNA, 25 bp, Homo sapien
accgcacgtacgccccgccccgcgc

SEQ ID NO: 5744504 - DNA, 25 bp, Homo sapien
gactgtattcttgaacctgctcccc

SEQ ID NO: 5744505 - DNA, 25 bp, Homo sapien
cctcccgcgggtccgagggcgctgg

SEQ ID NO: 5744506 - DNA, 25 bp, Homo sapien
ccatcgtcatcaccgtcttcgtgct

SEQ ID NO: 5744507 - DNA, 25 bp, Homo sapien
cgatctggtcctgatcggctcttcc

SEQ ID NO: 5744508 - DNA, 25 bp, Homo sapien
cgccgccgcggctgctgctgctgct

SEQ ID NO: 5744509 - DNA, 25 bp, Homo sapien
ttgaagattacaatgagatcatccg

SEQ ID NO: 5744510 - DNA, 25 bp, Homo sapien
tctttaagagctcctgtaaaatcga

SEQ ID NO: 5744511 - DNA, 25 bp, Homo sapien
ctgctcatctccttcctcactgtgc

SEQ ID NO: 5744512 - DNA, 25 bp, Homo sapien
gatcaagaacctgggctatgaattt

SEQ ID NO: 5744513 - DNA, 25 bp, Homo sapien
tggcgcagcttcactccggatggtt

SEQ ID NO: 5744514 - DNA, 25 bp, Homo sapien
tccccagggtcatgttcatgaccag

SEQ ID NO: 5744515 - DNA, 25 bp, Homo sapien
gatcatccggcctgtagccaacgtg

SEQ ID NO: 5744516 - DNA, 25 bp, Homo sapien
gcagagttcatgcgtgtccctgcac

SEQ ID NO: 5744517 - DNA, 25 bp, Homo sapien
acgtgtctgacccagtcatcatcca

SEQ ID NO: 5744518 - DNA, 25 bp, Homo sapien
catcccttccacctcgctggtcatc

SEQ ID NO: 5744519 - DNA, 25 bp, Homo sapien
ttggagagtacctcctgttcaccat

SEQ ID NO: 5744520 - DNA, 25 bp, Homo sapien
cacagaagatctggaagccagacat

SEQ ID NO: 5744521 - DNA, 25 bp, Homo sapien
ccctgcctgctcatctccttcctca

SEQ ID NO: 5744522 - DNA, 25 bp, Homo sapien
gcaacgctcagaagccgaggcccct

SEQ ID NO: 5744523 - DNA, 25 bp, Homo sapien
tcaacaacctgttaggaaaaaaata

SEQ ID NO: 5744524 - DNA, 25 bp, Homo sapien
gaccgtccgggtccgcggccagccc

SEQ ID NO: 5744525 - DNA, 25 bp, Homo sapien
tgtaccatgaagttcggttcctggt

SEQ ID NO: 5744526 - DNA, 25 bp, Homo sapien
agatctggaagccagacattgtgct

SEQ ID NO: 5744527 - DNA, 25 bp, Homo sapien
gagggcgctggaaacccagcggcgg

SEQ ID NO: 5744528 - DNA, 25 bp, Homo sapien
tcttgaacctgctccccagggtcat

SEQ ID NO: 5744529 - DNA, 25 bp, Homo sapien
cagtcatcatccatttcgaggtgtc

SEQ ID NO: 5744530 - DNA, 25 bp, Homo sapien
gcggagaaggagctcgcccggcgct

SEQ ID NO: 5744531 - DNA, 25 bp, Homo sapien
atctggtcctgatcggctcttccat

SEQ ID NO: 5744532 - DNA, 25 bp, Homo sapien
aaagccccaggctacaaacacgaca

SEQ ID NO: 5744533 - DNA, 25 bp, Homo sapien
actccggatggttcctgtcctcccg

SEQ ID NO: 5744534 - DNA, 25 bp, Homo sapien
cccggaaacctgggacagaaactga

SEQ ID NO: 5744535 - DNA, 25 bp, Homo sapien
tttccaggtggacgacaagaccaaa

SEQ ID NO: 5744536 - DNA, 25 bp, Homo sapien
gggagagcggcgagtgggccatcat

SEQ ID NO: 5744537 - DNA, 25 bp, Homo sapien
gagatccaacaattgaaacgaaaag

SEQ ID NO: 5744538 - DNA, 25 bp, Homo sapien
tcttctacctgccctccgactgcgg

SEQ ID NO: 5744539 - DNA, 25 bp, Homo sapien
cgcccgcccgcccgcgcctggcgca

SEQ ID NO: 5744540 - DNA, 25 bp, Homo sapien
actattgggagagcggcgagtgggc

SEQ ID NO: 5744541 - DNA, 25 bp, Homo sapien
ggtggacgacaagaccaaagcctta

SEQ ID NO: 5744542 - DNA, 25 bp, Homo sapien
tctagttctgaatctgttgatgctg

SEQ ID NO: 5744543 - DNA, 25 bp, Homo sapien
cgcggggagaggccgtctctgcgac

SEQ ID NO: 5744544 - DNA, 25 bp, Homo sapien
gcccggccaccagccatgggctctg

SEQ ID NO: 5744545 - DNA, 25 bp, Homo sapien
atccgatcaagaacctgggctatga

SEQ ID NO: 5744546 - DNA, 25 bp, Homo sapien
ctatggtggggcagagttcatgcgt

SEQ ID NO: 5744547 - DNA, 25 bp, Homo sapien
caatttcagtgctaacctcacgaga

SEQ ID NO: 5744548 - DNA, 25 bp, Homo sapien
tcccgaccgtccgggtccgcggcca

SEQ ID NO: 5744549 - DNA, 25 bp, Homo sapien
aaagccttactcaagtacactgggg

SEQ ID NO: 5744550 - DNA, 25 bp, Homo sapien
cccagtcatcatccatttcgaggtg

SEQ ID NO: 5744551 - DNA, 25 bp, Homo sapien
ttgagcggctgtttgaagattacaa

SEQ ID NO: 5744552 - DNA, 25 bp, Homo sapien
gtctggggtctgcgctggagccgcg

SEQ ID NO: 5744553 - DNA, 25 bp, Homo sapien
ggtgaagactgtattcttgaacctg

SEQ ID NO: 5744554 - DNA, 25 bp, Homo sapien
gccggccggagcacccagcccggcg

SEQ ID NO: 5744555 - DNA, 25 bp, Homo sapien
gaggaacaaaaagcccaagagatcc

SEQ ID NO: 5744556 - DNA, 25 bp, Homo sapien
aaagaaaagtccacagaaacatccg

SEQ ID NO: 5744557 - DNA, 25 bp, Homo sapien
tgctgtgctgtccctctctgctttg

SEQ ID NO: 5744558 - DNA, 25 bp, Homo sapien
aaccccgacgacacacacaatgccc

SEQ ID NO: 5744559 - DNA, 25 bp, Homo sapien
gcccaagagatccaacaattgaaac

SEQ ID NO: 5744560 - DNA, 25 bp, Homo sapien
tgaagactgtattcttgaacctgct

SEQ ID NO: 5744561 - DNA, 25 bp, Homo sapien
tctccttcctggtggtggtgacagc

SEQ ID NO: 5744562 - DNA, 25 bp, Homo sapien
ggcccctctacggtgccgagctctc

SEQ ID NO: 5744563 - DNA, 25 bp, Homo sapien
cttcgtgctcaacgtgcactacaga

SEQ ID NO: 5744564 - DNA, 25 bp, Homo sapien
gaagccgaggcccctctacggtgcc

SEQ ID NO: 5744565 - DNA, 25 bp, Homo sapien
cgcctggcgcagcttcactccggat

SEQ ID NO: 5744566 - DNA, 25 bp, Homo sapien
ctcacgagaagctctagttctgaat

SEQ ID NO: 5744567 - DNA, 25 bp, Homo sapien
ggttactgccaccaccgcaggataa

SEQ ID NO: 5744568 - DNA, 25 bp, Homo sapien
catgcgtgtccctgcacagaagatc

SEQ ID NO: 5744569 - DNA, 25 bp, Homo sapien
gaaatggaacccctctgactatggt

SEQ ID NO: 5744570 - DNA, 25 bp, Homo sapien
agccttactcaagtacactggggag

SEQ ID NO: 5744571 - DNA, 25 bp, Homo sapien
aggtctggggtctgcgctggagccg

SEQ ID NO: 5744572 - DNA, 25 bp, Homo sapien
tgctgctgtctctgctgccagtggc

SEQ ID NO: 5744573 - DNA, 25 bp, Homo sapien
gacggtgtttctcctggtgatcact

SEQ ID NO: 5744574 - DNA, 25 bp, Homo sapien
ggggaggtgacttggatacctccgg

SEQ ID NO: 5744575 - DNA, 25 bp, Homo sapien
gcggcgagtgggccatcatcaaagc

SEQ ID NO: 5744576 - DNA, 25 bp, Homo sapien
caatgagatcatccggcctgtagcc

SEQ ID NO: 5744577 - DNA, 25 bp, Homo sapien
aagtacactggggaggtgacttgga

SEQ ID NO: 5744578 - DNA, 25 bp, Homo sapien
cctggcgcagcttcactccggatgg

SEQ ID NO: 5744579 - DNA, 25 bp, Homo sapien
ccaggacgggatgtgtggttactgc

SEQ ID NO: 5744580 - DNA, 25 bp, Homo sapien
cccgcccgcgcctggcgcagcttca

SEQ ID NO: 5744581 - DNA, 25 bp, Homo sapien
acactggggaggtgacttggatacc

SEQ ID NO: 5744582 - DNA, 25 bp, Homo sapien
atgaagtaaaccagatcatggagac

SEQ ID NO: 5744583 - DNA, 25 bp, Homo sapien
ggaacaaaaagcccaagagatccaa

SEQ ID NO: 5744584 - DNA, 25 bp, Homo sapien
gttagcgtctctcctacggcgcccg

SEQ ID NO: 5744585 - DNA, 25 bp, Homo sapien
gctcaagcaaatctggaatgactac

SEQ ID NO: 5744586 - DNA, 25 bp, Homo sapien
gtaaccttgtccatcgtcatcaccg

SEQ ID NO: 5744587 - DNA, 25 bp, Homo sapien
atccggcctgtagccaacgtgtctg

SEQ ID NO: 5744588 - DNA, 25 bp, Homo sapien
cccaaccccctgcgggagctgcaca

SEQ ID NO: 5744589 - DNA, 25 bp, Homo sapien
ccgcgcgtctccgcccgcacggctc

SEQ ID NO: 5744590 - DNA, 25 bp, Homo sapien
ctgacggtgtttctcctggtgatca

SEQ ID NO: 5744591 - DNA, 25 bp, Homo sapien
tccgggtccgcggccagcccggcca

SEQ ID NO: 5744592 - DNA, 25 bp, Homo sapien
catactcgctgtacatccggcgcct

SEQ ID NO: 5744593 - DNA, 25 bp, Homo sapien
tacggcgcccgcctagcccggtggt

SEQ ID NO: 5744594 - DNA, 25 bp, Homo sapien
gcacggctccaggtctggggtctgc

SEQ ID NO: 5744595 - DNA, 25 bp, Homo sapien
tgcactacagaaccccgacgacaca

SEQ ID NO: 5744596 - DNA, 25 bp, Homo sapien
tgccaccaccgcaggataaaaatct

SEQ ID NO: 5744597 - DNA, 25 bp, Homo sapien
atctccttcctcactgtgctcgtct

SEQ ID NO: 5744598 - DNA, 25 bp, Homo sapien
cgagtgggccatcatcaaagcccca

SEQ ID NO: 5744599 - DNA, 25 bp, Homo sapien
ggaggtgacttggatacctccggcc

SEQ ID NO: 5744600 - DNA, 25 bp, Homo sapien
ctgtgcatttctgtcctcctctccc

SEQ ID NO: 5744601 - DNA, 25 bp, Homo sapien
gtggatgaagtaaaccagatcatgg

SEQ ID NO: 5744602 - DNA, 25 bp, Homo sapien
caggtggacgacaagaccaaagcct

SEQ ID NO: 5744603 - DNA, 25 bp, Homo sapien
cccgcccgcccgcccgcgcctggcg

SEQ ID NO: 5744604 - DNA, 25 bp, Homo sapien
agtgggccatcatcaaagccccagg

SEQ ID NO: 5744605 - DNA, 25 bp, Homo sapien
gggcaacgctcagaagccgaggccc

SEQ ID NO: 5744606 - DNA, 25 bp, Homo sapien
ccgcaggataaaaatctccaatttc

SEQ ID NO: 5744607 - DNA, 25 bp, Homo sapien
aagagatccaacaattgaaacgaaa

SEQ ID NO: 5744608 - DNA, 25 bp, Homo sapien
acaaaatgaagccaaagaggaacaa

SEQ ID NO: 5744609 - DNA, 25 bp, Homo sapien
acaatgctgttggggatttccaggt

SEQ ID NO: 5744610 - DNA, 25 bp, Homo sapien
ggaatgactacaagctgaaatggaa

SEQ ID NO: 5744611 - DNA, 25 bp, Homo sapien
ggccagggcctcagaggctgagcac

SEQ ID NO: 5744612 - DNA, 25 bp, Homo sapien
agaaaagtccacagaaacatccgat

SEQ ID NO: 5744613 - DNA, 25 bp, Homo sapien
tgcaaggagggctacccctgccagg

SEQ ID NO: 5744614 - DNA, 25 bp, Homo sapien
aagcccaagagatccaacaattgaa

SEQ ID NO: 5744615 - DNA, 25 bp, Homo sapien
cattgtgctgtataacaatgctgtt

SEQ ID NO: 5744616 - DNA, 25 bp, Homo sapien
gtgttagcgtctctcctacggcgcc

SEQ ID NO: 5744617 - DNA, 25 bp, Homo sapien
gaacctgctccccagggtcatgttc

SEQ ID NO: 5744618 - DNA, 25 bp, Homo sapien
cagaagatctggaagccagacattg

SEQ ID NO: 5744619 - DNA, 25 bp, Homo sapien
acatccgatcaagaacctgggctat

SEQ ID NO: 5744620 - DNA, 25 bp, Homo sapien
caggccaacaagcaacgagggcaac

SEQ ID NO: 5744621 - DNA, 25 bp, Homo sapien
agaaactgagtccctctccttcctg

SEQ ID NO: 5744622 - DNA, 25 bp, Homo sapien
gctgtccctctctgctttgtcacca

SEQ ID NO: 5744623 - DNA, 25 bp, Homo sapien
tacaatgagatcatccggcctgtag

SEQ ID NO: 5744624 - DNA, 25 bp, Homo sapien
aaaagcccaagagatccaacaattg

SEQ ID NO: 5744625 - DNA, 25 bp, Homo sapien
ctgcgaggagatctaccccgacatc

SEQ ID NO: 5744626 - DNA, 25 bp, Homo sapien
gccgcggctgctgctgctgctgctg

SEQ ID NO: 5744627 - DNA, 25 bp, Homo sapien
ttgggagagcggcgagtgggccatc

SEQ ID NO: 5744628 - DNA, 25 bp, Homo sapien
gctgcaaggagggctacccctgcca

SEQ ID NO: 5744629 - DNA, 25 bp, Homo sapien
cagtggccagggcctcagaggctga

SEQ ID NO: 5744630 - DNA, 25 bp, Homo sapien
tcaccatgatttttgtaaccttgtc

SEQ ID NO: 5744631 - DNA, 25 bp, Homo sapien
tgctttgtcaccagaaatcaaagaa

SEQ ID NO: 5744632 - DNA, 25 bp, Homo sapien
cgtcatcaccgtcttcgtgctcaac

SEQ ID NO: 5744633 - DNA, 25 bp, Homo sapien
agaagctctagttctgaatctgttg

SEQ ID NO: 5744634 - DNA, 25 bp, Homo sapien
acgaaaagaaaagtccacagaaaca

SEQ ID NO: 5744635 - DNA, 25 bp, Homo sapien
aaactgagtccctctccttcctggt

SEQ ID NO: 5744636 - DNA, 25 bp, Homo sapien
tgagcaccgtctatttgagcggctg

SEQ ID NO: 5744637 - DNA, 25 bp, Homo sapien
gatcactgagaccatcccttccacc

SEQ ID NO: 5744638 - DNA, 25 bp, Homo sapien
gcgctggaaacccagcggcggcgaa

SEQ ID NO: 5744639 - DNA, 25 bp, Homo sapien
cttgttctacaccatcaacctcatc

SEQ ID NO: 5744640 - DNA, 25 bp, Homo sapien
tagttctgaatctgttgatgctgtg

SEQ ID NO: 5744641 - DNA, 25 bp, Homo sapien
ctaccgcacgtacgccccgccccgc

SEQ ID NO: 5744642 - DNA, 25 bp, Homo sapien
cccttgttctacaccatcaacctca

SEQ ID NO: 5744643 - DNA, 25 bp, Homo sapien
cccgcccgcccgcgcctggcgcagc

SEQ ID NO: 5744644 - DNA, 25 bp, Homo sapien
ctctcgctgcccctggcgctgtcgc

SEQ ID NO: 5744645 - DNA, 25 bp, Homo sapien
agccatccaaagtgtcaagtatatt

SEQ ID NO: 5744646 - DNA, 25 bp, Homo sapien
gaaaatatgaaagcacaaaatgaag

SEQ ID NO: 5744647 - DNA, 25 bp, Homo sapien
ccagggcctcagaggctgagcaccg

SEQ ID NO: 5744648 - DNA, 25 bp, Homo sapien
cgctggtcatccccctgattggaga

SEQ ID NO: 5744649 - DNA, 25 bp, Homo sapien
gagggctacccctgccaggacggga

SEQ ID NO: 5744650 - DNA, 25 bp, Homo sapien
ccccgccccgcgcacgcccgcccgc

SEQ ID NO: 5744651 - DNA, 25 bp, Homo sapien
cctccggccatctttaagagctcct

SEQ ID NO: 5744652 - DNA, 25 bp, Homo sapien
aggcgaaaatcgatctggtcctgat

SEQ ID NO: 5744653 - DNA, 25 bp, Homo sapien
ctccttcctcactgtgctcgtcttc

SEQ ID NO: 5744654 - DNA, 25 bp, Homo sapien
gtgtggttactgccaccaccgcagg

SEQ ID NO: 5744655 - DNA, 25 bp, Homo sapien
ttctgtcctcctctccctgacggtg

SEQ ID NO: 5744656 - DNA, 25 bp, Homo sapien
gtattcttgaacctgctccccaggg

SEQ ID NO: 5744657 - DNA, 25 bp, Homo sapien
aacgtgcactacagaaccccgacga

SEQ ID NO: 5744658 - DNA, 25 bp, Homo sapien
ctgcgaccgccgcgcccgctcccga

SEQ ID NO: 5744659 - DNA, 25 bp, Homo sapien
gtccatcgtcatcaccgtcttcgtg

SEQ ID NO: 5744660 - DNA, 25 bp, Homo sapien
ccggcgcctgcccttgttctacacc

SEQ ID NO: 5744661 - DNA, 25 bp, Homo sapien
tgaaacgaaaagaaaagtccacaga

SEQ ID NO: 5744662 - DNA, 25 bp, Homo sapien
atccatttcgaggtgtccatgtctc

SEQ ID NO: 5744663 - DNA, 25 bp, Homo sapien
atggtggggcagagttcatgcgtgt

SEQ ID NO: 5744664 - DNA, 25 bp, Homo sapien
acgtgacctacttcccgtttgatta

SEQ ID NO: 5744665 - DNA, 25 bp, Homo sapien
caaagaggaacaaaaagcccaagag

SEQ ID NO: 5744666 - DNA, 25 bp, Homo sapien
gtgtttctcctggtgatcactgaga

SEQ ID NO: 5744667 - DNA, 25 bp, Homo sapien
ccccgacgacacacacaatgccctc

SEQ ID NO: 5744668 - DNA, 25 bp, Homo sapien
gtgagaaggtgaccctgtgcatttc

SEQ ID NO: 5744669 - DNA, 25 bp, Homo sapien
ccatttcgaggtgtccatgtctcag

SEQ ID NO: 5744670 - DNA, 25 bp, Homo sapien
tagcccggtggtcccaaccccctgc

SEQ ID NO: 5744671 - DNA, 25 bp, Homo sapien
aaagtgtcaagtatattgctgaaaa

SEQ ID NO: 5744672 - DNA, 25 bp, Homo sapien
gggtccgagggcgctggaaacccag

SEQ ID NO: 5744673 - DNA, 25 bp, Homo sapien
gggcagagttcatgcgtgtccctgc

SEQ ID NO: 5744674 - DNA, 25 bp, Homo sapien
tgaagccaaagaggaacaaaaagcc

SEQ ID NO: 5744675 - DNA, 25 bp, Homo sapien
ttcatgcgtgtccctgcacagaaga

SEQ ID NO: 5744676 - DNA, 25 bp, Homo sapien
cctccgactgcggtgagaaggtgac

SEQ ID NO: 5744677 - DNA, 25 bp, Homo sapien
ctcctggtgatcactgagaccatcc

SEQ ID NO: 5744678 - DNA, 25 bp, Homo sapien
cagccatgggctctggcccgctctc

SEQ ID NO: 5744679 - DNA, 25 bp, Homo sapien
gagagcggcgagtgggccatcatca

SEQ ID NO: 5744680 - DNA, 25 bp, Homo sapien
cggcgaagcggagaggagccccgcg

SEQ ID NO: 5744681 - DNA, 25 bp, Homo sapien
gcgaccgccgcgcccgctcccgacc

SEQ ID NO: 5744682 - DNA, 25 bp, Homo sapien
gctcatctccttcctcactgtgctc

SEQ ID NO: 5744683 - DNA, 25 bp, Homo sapien
aagaccaaagccttactcaagtaca

SEQ ID NO: 5744684 - DNA, 25 bp, Homo sapien
ggagccccgcgcgtctccgcccgca

SEQ ID NO: 5744685 - DNA, 25 bp, Homo sapien
gattaccaaaactgtaccatgaagt

SEQ ID NO: 5744686 - DNA, 25 bp, Homo sapien
ccaccaccgcaggataaaaatctcc

SEQ ID NO: 5744687 - DNA, 25 bp, Homo sapien
tccaggtggacgacaagaccaaagc

SEQ ID NO: 5744688 - DNA, 25 bp, Homo sapien
tacggtgccgagctctcaaatctga

SEQ ID NO: 5744689 - DNA, 25 bp, Homo sapien
gacctacttcccgtttgattaccaa

SEQ ID NO: 5744690 - DNA, 25 bp, Homo sapien
cagcggcggcgaagcggagaggagc

SEQ ID NO: 5744691 - DNA, 25 bp, Homo sapien
ctgcctgctcatctccttcctcact

SEQ ID NO: 5744692 - DNA, 25 bp, Homo sapien
gtgaaggtggatgaagtaaaccaga

SEQ ID NO: 5744693 - DNA, 25 bp, Homo sapien
agatctaccccgacatcacatactc

SEQ ID NO: 5744694 - DNA, 25 bp, Homo sapien
gaagattacaatgagatcatccggc

SEQ ID NO: 5744695 - DNA, 25 bp, Homo sapien
caactgctgcgaggagatctacccc

SEQ ID NO: 5744696 - DNA, 25 bp, Homo sapien
tctgttgatgctgtgctgtccctct

SEQ ID NO: 5744697 - DNA, 25 bp, Homo sapien
tcaacctcatcatcccctgcctgct

SEQ ID NO: 5744698 - DNA, 25 bp, Homo sapien
gacgccgccggccggagcacccagc

SEQ ID NO: 5744699 - DNA, 25 bp, Homo sapien
actacaagctgaaatggaacccctc

SEQ ID NO: 5744700 - DNA, 25 bp, Homo sapien
caagtacaactgctgcgaggagatc

SEQ ID NO: 5744701 - DNA, 25 bp, Homo sapien
aggtggatgaagtaaaccagatcat

SEQ ID NO: 5744702 - DNA, 25 bp, Homo sapien
tgctcagatctggtcggacgccgcc

SEQ ID NO: 5744703 - DNA, 25 bp, Homo sapien
gtggccagggcctcagaggctgagc

SEQ ID NO: 5744704 - DNA, 25 bp, Homo sapien
cacctgctcagatctggtcggacgc

SEQ ID NO: 5744705 - DNA, 25 bp, Homo sapien
gcacccagcccggcggagaaggagc

SEQ ID NO: 5744706 - DNA, 25 bp, Homo sapien
gctcccgaccgtccgggtccgcggc

SEQ ID NO: 5744707 - DNA, 25 bp, Homo sapien
cctcactgtgctcgtcttctacctg

SEQ ID NO: 5744708 - DNA, 25 bp, Homo sapien
cgcccggcgctggggactgggacct

SEQ ID NO: 5744709 - DNA, 25 bp, Homo sapien
ttcccctaccgcacgtacgccccgc

SEQ ID NO: 5744710 - DNA, 25 bp, Homo sapien
ctgtcctcctctccctgacggtgtt

SEQ ID NO: 5744711 - DNA, 25 bp, Homo sapien
ccaaaggctgcaaggagggctaccc

SEQ ID NO: 5744712 - DNA, 25 bp, Homo sapien
gctgctgctgctgctgctgctgtct

SEQ ID NO: 5744713 - DNA, 25 bp, Homo sapien
caaacacgacatcaagtacaactgc

SEQ ID NO: 5744714 - DNA, 25 bp, Homo sapien
tctgaattgcttcagccgcgcagag

SEQ ID NO: 5744715 - DNA, 25 bp, Homo sapien
agaccatcccttccacctcgctggt

SEQ ID NO: 5744716 - DNA, 25 bp, Homo sapien
ttgattaccaaaactgtaccatgaa

SEQ ID NO: 5744717 - DNA, 25 bp, Homo sapien
ccggccaccagccatgggctctggc

SEQ ID NO: 5744718 - DNA, 25 bp, Homo sapien
caacgtgtctgacccagtcatcatc

SEQ ID NO: 5744719 - DNA, 25 bp, Homo sapien
cacgagaagctctagttctgaatct

SEQ ID NO: 5744720 - DNA, 25 bp, Homo sapien
aacctcaaggactattgggagagcg

SEQ ID NO: 5744721 - DNA, 25 bp, Homo sapien
gataaggcgaaaatcgatctggtcc

SEQ ID NO: 5744722 - DNA, 25 bp, Homo sapien
tagccaacgtgtctgacccagtcat

SEQ ID NO: 5744723 - DNA, 25 bp, Homo sapien
cgcccgcccgcccgcccgcgcctgg

SEQ ID NO: 5744724 - DNA, 25 bp, Homo sapien
ttactgccaccaccgcaggataaaa

SEQ ID NO: 5744725 - DNA, 25 bp, Homo sapien
ctggcgctgtcgccgccgcggctgc

SEQ ID NO: 5744726 - DNA, 25 bp, Homo sapien
caagcaacgagggcaacgctcagaa

SEQ ID NO: 5744727 - DNA, 25 bp, Homo sapien
catcaaagccccaggctacaaacac

SEQ ID NO: 5744728 - DNA, 25 bp, Homo sapien
cagcccggccaccagccatgggctc

SEQ ID NO: 5744729 - DNA, 25 bp, Homo sapien
tgacagcacctgctcagatctggtc

SEQ ID NO: 5744730 - DNA, 25 bp, Homo sapien
ctgttcaccatgatttttgtaacct

SEQ ID NO: 5744731 - DNA, 25 bp, Homo sapien
ttgcttcagccgcgcagagtccaaa

SEQ ID NO: 5744732 - DNA, 25 bp, Homo sapien
taaaaatctccaatttcagtgctaa

SEQ ID NO: 5744733 - DNA, 25 bp, Homo sapien
gactgggacctggagccccttcccc

SEQ ID NO: 5744734 - DNA, 25 bp, Homo sapien
ccgacgacacacacaatgccctcat

SEQ ID NO: 5744735 - DNA, 25 bp, Homo sapien
ctgcccctggcgctgtcgccgccgc

SEQ ID NO: 5744736 - DNA, 25 bp, Homo sapien
gaggccgtctctgcgaccgccgcgc

SEQ ID NO: 5744737 - DNA, 25 bp, Homo sapien
gccaaagaggaacaaaaagcccaag

SEQ ID NO: 5744738 - DNA, 25 bp, Homo sapien
gtttgattaccaaaactgtaccatg

SEQ ID NO: 5744739 - DNA, 25 bp, Homo sapien
aatctgaattgcttcagccgcgcag

SEQ ID NO: 5744740 - DNA, 25 bp, Homo sapien
tggggactgggacctggagcccctt

SEQ ID NO: 5744741 - DNA, 25 bp, Homo sapien
gaagccatccaaagtgtcaagtata

SEQ ID NO: 5744742 - DNA, 25 bp, Homo sapien
ctacgataaggcgaaaatcgatctg

SEQ ID NO: 5744743 - DNA, 25 bp, Homo sapien
aatgccctcatgggtgaagactgta

SEQ ID NO: 5744744 - DNA, 25 bp, Homo sapien
ctcagatctggtcggacgccgccgg

SEQ ID NO: 5744745 - DNA, 25 bp, Homo sapien
tcactgagaccatcccttccacctc

SEQ ID NO: 5744746 - DNA, 25 bp, Homo sapien
ttgatgctgtgctgtccctctctgc

SEQ ID NO: 5744747 - DNA, 25 bp, Homo sapien
cgacgtgacctacttcccgtttgat

SEQ ID NO: 5744748 - DNA, 25 bp, Homo sapien
gcaaatctggaatgactacaagctg

SEQ ID NO: 5744749 - DNA, 25 bp, Homo sapien
cgacacacacaatgccctcatgggt

SEQ ID NO: 5744750 - DNA, 25 bp, Homo sapien
ctgttggggatttccaggtggacga

SEQ ID NO: 5744751 - DNA, 25 bp, Homo sapien
accccctgcgggagctgcacacgcc

SEQ ID NO: 5744752 - DNA, 25 bp, Homo sapien
agcggagaggagccccgcgcgtctc

SEQ ID NO: 5744753 - DNA, 25 bp, Homo sapien
cctgccaggacgggatgtgtggtta

SEQ ID NO: 5744754 - DNA, 25 bp, Homo sapien
ctcagaagccgaggcccctctacgg

SEQ ID NO: 5744755 - DNA, 25 bp, Homo sapien
gatttccaggtggacgacaagacca

SEQ ID NO: 5744756 - DNA, 25 bp, Homo sapien
ttgtgctgtataacaatgctgttgg

SEQ ID NO: 5744757 - DNA, 25 bp, Homo sapien
agcaccgtctatttgagcggctgtt

SEQ ID NO: 5744758 - DNA, 25 bp, Homo sapien
caaatctgaattgcttcagccgcgc

SEQ ID NO: 5744759 - DNA, 25 bp, Homo sapien
ggtggtcccaaccccctgcgggagc

SEQ ID NO: 5744760 - DNA, 25 bp, Homo sapien
tgcggtgagaaggtgaccctgtgca

SEQ ID NO: 5744761 - DNA, 25 bp, Homo sapien
aaaggctgcaaggagggctacccct

SEQ ID NO: 5744762 - DNA, 25 bp, Homo sapien
gcccgcacggctccaggtctggggt

SEQ ID NO: 5744763 - DNA, 25 bp, Homo sapien
ctctgcgaccgccgcgcccgctccc

SEQ ID NO: 5744764 - DNA, 25 bp, Homo sapien
cggccatctttaagagctcctgtaa

SEQ ID NO: 5744765 - DNA, 25 bp, Homo sapien
caagctgaaatggaacccctctgac

SEQ ID NO: 5744766 - DNA, 25 bp, Homo sapien
tgagtccctctccttcctggtggtg

SEQ ID NO: 5744767 - DNA, 25 bp, Homo sapien
atcaccgtcttcgtgctcaacgtgc

SEQ ID NO: 5744768 - DNA, 25 bp, Homo sapien
ctctcctacggcgcccgcctagccc

SEQ ID NO: 5744769 - DNA, 25 bp, Homo sapien
cgcgcctggcgcagcttcactccgg

SEQ ID NO: 5744770 - DNA, 25 bp, Homo sapien
ccgtttgattaccaaaactgtacca

SEQ ID NO: 5744771 - DNA, 25 bp, Homo sapien
accagccatgggctctggcccgctc

SEQ ID NO: 5744772 - DNA, 25 bp, Homo sapien
gtctatttgagcggctgtttgaaga

SEQ ID NO: 5744773 - DNA, 25 bp, Homo sapien
gcacaaaatgaagccaaagaggaac

SEQ ID NO: 5744774 - DNA, 25 bp, Homo sapien
aggtgacttggatacctccggccat

SEQ ID NO: 5744775 - DNA, 25 bp, Homo sapien
ctctcaaatctgaattgcttcagcc

SEQ ID NO: 5744776 - DNA, 25 bp, Homo sapien
cagacattgtgctgtataacaatgc

SEQ ID NO: 5744777 - DNA, 25 bp, Homo sapien
agagctcctgtaaaatcgacgtgac

SEQ ID NO: 5744778 - DNA, 25 bp, Homo sapien
gtttgaagattacaatgagatcatc

SEQ ID NO: 5744779 - DNA, 25 bp, Homo sapien
ggagatctaccccgacatcacatac

SEQ ID NO: 5744780 - DNA, 25 bp, Homo sapien
agttcatgcgtgtccctgcacagaa

SEQ ID NO: 5744781 - DNA, 25 bp, Homo sapien
ggcgagtgggccatcatcaaagccc

SEQ ID NO: 5744782 - DNA, 25 bp, Homo sapien
gataaaaatctccaatttcagtgct

SEQ ID NO: 5744783 - DNA, 25 bp, Homo sapien
cttcctggtggtggtgacagcacct

SEQ ID NO: 5744784 - DNA, 25 bp, Homo sapien
gctacaaacacgacatcaagtacaa

SEQ ID NO: 5744785 - DNA, 25 bp, Homo sapien
ggtcatccccctgattggagagtac

SEQ ID NO: 5744786 - DNA, 25 bp, Homo sapien
acaagaccaaagccttactcaagta

SEQ ID NO: 5744787 - DNA, 25 bp, Homo sapien
ttgtcaccagaaatcaaagaagcca

SEQ ID NO: 5744788 - DNA, 25 bp, Homo sapien
ctcgctgtacatccggcgcctgccc

SEQ ID NO: 5744789 - DNA, 25 bp, Homo sapien
tctgctttgtcaccagaaatcaaag

SEQ ID NO: 5744790 - DNA, 25 bp, Homo sapien
tggagccgcgcggggagaggccgtc

SEQ ID NO: 5744791 - DNA, 25 bp, Homo sapien
tcctggtggtggtgacagcacctgc

SEQ ID NO: 5744792 - DNA, 25 bp, Homo sapien
ggtggggcagagttcatgcgtgtcc

SEQ ID NO: 5744793 - DNA, 25 bp, Homo sapien
ctgaaatggaacccctctgactatg

SEQ ID NO: 5744794 - DNA, 25 bp, Homo sapien
agtaaaccagatcatggagaccaac

SEQ ID NO: 5744795 - DNA, 25 bp, Homo sapien
tggttcctgtcctcccgcgggtccg

SEQ ID NO: 5744796 - DNA, 25 bp, Homo sapien
tggtgaaggtggatgaagtaaacca

SEQ ID NO: 5744797 - DNA, 25 bp, Homo sapien
tctctgctttgtcaccagaaatcaa

SEQ ID NO: 5744798 - DNA, 25 bp, Homo sapien
tgaccaggccaacaagcaacgaggg

SEQ ID NO: 5744799 - DNA, 25 bp, Homo sapien
cgggatgtgtggttactgccaccac

SEQ ID NO: 5744800 - DNA, 25 bp, Homo sapien
ggcggcgaagcggagaggagccccg

SEQ ID NO: 5744801 - DNA, 25 bp, Homo sapien
tggagccccttcccctaccgcacgt

SEQ ID NO: 5744802 - DNA, 25 bp, Homo sapien
tgaatctgttgatgctgtgctgtcc

SEQ ID NO: 5744803 - DNA, 25 bp, Homo sapien
actcaagtacactggggaggtgact

SEQ ID NO: 5744804 - DNA, 25 bp, Homo sapien
tcatccccctgattggagagtacct

SEQ ID NO: 5744805 - DNA, 25 bp, Homo sapien
tcatcatcccctgcctgctcatctc

SEQ ID NO: 5744806 - DNA, 25 bp, Homo sapien
gcgaaaatcgatctggtcctgatcg

SEQ ID NO: 5744807 - DNA, 25 bp, Homo sapien
tccaatttcagtgctaacctcacga

SEQ ID NO: 5744808 - DNA, 25 bp, Homo sapien
cggctgctgctgctgctgctgctgt

SEQ ID NO: 5744809 - DNA, 25 bp, Homo sapien
gcccctggcgctgtcgccgccgcgg

SEQ ID NO: 5744810 - DNA, 25 bp, Homo sapien
atgaaagcacaaaatgaagccaaag

SEQ ID NO: 5744811 - DNA, 25 bp, Homo sapien
cggccggagcacccagcccggcgga

SEQ ID NO: 5744812 - DNA, 25 bp, Homo sapien
tggctcaagcaaatctggaatgact

SEQ ID NO: 5744813 - DNA, 25 bp, Homo sapien
agccccaggctacaaacacgacatc

SEQ ID NO: 5744814 - DNA, 25 bp, Homo sapien
gccccgcgcacgcccgcccgcccgc

SEQ ID NO: 5744815 - DNA, 25 bp, Homo sapien
ccatgtctcagctggtgaaggtgga

SEQ ID NO: 5744816 - DNA, 25 bp, Homo sapien
gggatttccaggtggacgacaagac

SEQ ID NO: 5744817 - DNA, 25 bp, Homo sapien
gctgtctctgctgccagtggccagg

SEQ ID NO: 5744818 - DNA, 25 bp, Homo sapien
gtggttactgccaccaccgcaggat

SEQ ID NO: 5744819 - DNA, 25 bp, Homo sapien
tggtcccaaccccctgcgggagctg

SEQ ID NO: 5744820 - DNA, 25 bp, Homo sapien
cagctggtgaaggtggatgaagtaa

SEQ ID NO: 5744821 - DNA, 25 bp, Homo sapien
acatcaagtacaactgctgcgagga

SEQ ID NO: 5744822 - DNA, 25 bp, Homo sapien
tacaaacacgacatcaagtacaact

SEQ ID NO: 5744823 - DNA, 25 bp, Homo sapien
caaaaagcccaagagatccaacaat

SEQ ID NO: 5744824 - DNA, 25 bp, Homo sapien
atttgagcggctgtttgaagattac

SEQ ID NO: 5744825 - DNA, 25 bp, Homo sapien
ttcccgtttgattaccaaaactgta

SEQ ID NO: 5744826 - DNA, 25 bp, Homo sapien
aacgctcagaagccgaggcccctct

SEQ ID NO: 5744827 - DNA, 25 bp, Homo sapien
gagatcatccggcctgtagccaacg

SEQ ID NO: 5744828 - DNA, 25 bp, Homo sapien
gccagacattgtgctgtataacaat

SEQ ID NO: 5744829 - DNA, 25 bp, Homo sapien
gacttggatacctccggccatcttt

SEQ ID NO: 5744830 - DNA, 25 bp, Homo sapien
atcatcaaagccccaggctacaaac

SEQ ID NO: 5744831 - DNA, 25 bp, Homo sapien
attacaatgagatcatccggcctgt

SEQ ID NO: 5744832 - DNA, 25 bp, Homo sapien
tggggatttccaggtggacgacaag

SEQ ID NO: 5744833 - DNA, 25 bp, Homo sapien
agaaatcaaagaagccatccaaagt

SEQ ID NO: 5744834 - DNA, 25 bp, Homo sapien
cctgcgggagctgcacacgccccgg

SEQ ID NO: 5744835 - DNA, 25 bp, Homo sapien
aagactgtattcttgaacctgctcc

SEQ ID NO: 5744836 - DNA, 25 bp, Homo sapien
gtcttcgtgctcaacgtgcactaca

SEQ ID NO: 5744837 - DNA, 25 bp, Homo sapien
cgcgcagagtccaaaggctgcaagg

SEQ ID NO: 5744838 - DNA, 25 bp, Homo sapien
gtgctcaacgtgcactacagaaccc

SEQ ID NO: 5744839 - DNA, 25 bp, Homo sapien
ggccgtctctgcgaccgccgcgccc

SEQ ID NO: 5744840 - DNA, 25 bp, Homo sapien
tggatacctccggccatctttaaga

SEQ ID NO: 5744841 - DNA, 25 bp, Homo sapien
acccagcccggcggagaaggagctc

SEQ ID NO: 5744842 - DNA, 25 bp, Homo sapien
cggacgccgccggccggagcaccca

SEQ ID NO: 5744843 - DNA, 25 bp, Homo sapien
caaaactgtaccatgaagttcggtt

SEQ ID NO: 5744844 - DNA, 25 bp, Homo sapien
tgaatttccaatcttcaacaacctg

SEQ ID NO: 5744845 - DNA, 25 bp, Homo sapien
gagcggcgagtgggccatcatcaaa

SEQ ID NO: 5744846 - DNA, 25 bp, Homo sapien
gctggggactgggacctggagcccc

SEQ ID NO: 5744847 - DNA, 25 bp, Homo sapien
ctgtttgaagattacaatgagatca

SEQ ID NO: 5744848 - DNA, 25 bp, Homo sapien
tgggtgaagactgtattcttgaacc

SEQ ID NO: 5744849 - DNA, 25 bp, Homo sapien
tctgctgccagtggccagggcctca

SEQ ID NO: 5744850 - DNA, 25 bp, Homo sapien
catgatttttgtaaccttgtccatc

SEQ ID NO: 5744851 - DNA, 25 bp, Homo sapien
aatggaacccctctgactatggtgg

SEQ ID NO: 5744852 - DNA, 25 bp, Homo sapien
ctcctgtaaaatcgacgtgacctac

SEQ ID NO: 5744853 - DNA, 25 bp, Homo sapien
ccaggtctggggtctgcgctggagc

SEQ ID NO: 5744854 - DNA, 25 bp, Homo sapien
gcacacgccccggaaacctgggaca

SEQ ID NO: 5744855 - DNA, 25 bp, Homo sapien
ctgctgctgctgctgctgtctctgc

SEQ ID NO: 5744856 - DNA, 25 bp, Homo sapien
acctgccctccgactgcggtgagaa

SEQ ID NO: 5744857 - DNA, 25 bp, Homo sapien
gtgacttggatacctccggccatct

SEQ ID NO: 5744858 - DNA, 25 bp, Homo sapien
gttctgaatctgttgatgctgtgct

SEQ ID NO: 5744859 - DNA, 25 bp, Homo sapien
catctttaagagctcctgtaaaatc

SEQ ID NO: 5744860 - DNA, 25 bp, Homo sapien
agttcggttcctggtcctacgataa

SEQ ID NO: 5744861 - DNA, 25 bp, Homo sapien
gtgctgtataacaatgctgttgggg

SEQ ID NO: 5744862 - DNA, 25 bp, Homo sapien
gccctccgactgcggtgagaaggtg

SEQ ID NO: 5744863 - DNA, 25 bp, Homo sapien
ccaaagccttactcaagtacactgg

SEQ ID NO: 5744864 - DNA, 25 bp, Homo sapien
cctcagaggctgagcaccgtctatt

SEQ ID NO: 5744865 - DNA, 25 bp, Homo sapien
cagagtccaaaggctgcaaggaggg

SEQ ID NO: 5744866 - DNA, 25 bp, Homo sapien
agaaacatccgatcaagaacctggg

SEQ ID NO: 5744867 - DNA, 25 bp, Homo sapien
ccatcatcaaagccccaggctacaa

SEQ ID NO: 5744868 - DNA, 25 bp, Homo sapien
tgctgctgctgctgctgctgtctct

SEQ ID NO: 5744869 - DNA, 25 bp, Homo sapien
atccggcgcctgcccttgttctaca

SEQ ID NO: 5744870 - DNA, 25 bp, Homo sapien
aagaggaacaaaaagcccaagagat

SEQ ID NO: 5744871 - DNA, 25 bp, Homo sapien
aaaatctccaatttcagtgctaacc

SEQ ID NO: 5744872 - DNA, 25 bp, Homo sapien
aaatcaaagaagccatccaaagtgt

SEQ ID NO: 5744873 - DNA, 25 bp, Homo sapien
ccgccccgcgcacgcccgcccgccc

SEQ ID NO: 5744874 - DNA, 25 bp, Homo sapien
acgagggcaacgctcagaagccgag

SEQ ID NO: 5744875 - DNA, 25 bp, Homo sapien
ctacaccatcaacctcatcatcccc

SEQ ID NO: 5744876 - DNA, 25 bp, Homo sapien
tgtgctcgtcttctacctgccctcc

SEQ ID NO: 5744877 - DNA, 25 bp, Homo sapien
agtacctcctgttcaccatgatttt

SEQ ID NO: 5744878 - DNA, 25 bp, Homo sapien
accaaaactgtaccatgaagttcgg

SEQ ID NO: 5744879 - DNA, 25 bp, Homo sapien
ctacctgccctccgactgcggtgag

SEQ ID NO: 5744880 - DNA, 25 bp, Homo sapien
ccgccggccggagcacccagcccgg

SEQ ID NO: 5744881 - DNA, 25 bp, Homo sapien
gagccgcgcggggagaggccgtctc

SEQ ID NO: 5744882 - DNA, 25 bp, Homo sapien
atcatcccctgcctgctcatctcct

SEQ ID NO: 5744883 - DNA, 25 bp, Homo sapien
ttgtccatcgtcatcaccgtcttcg

SEQ ID NO: 5744884 - DNA, 25 bp, Homo sapien
gtctcagctggtgaaggtggatgaa

SEQ ID NO: 5744885 - DNA, 25 bp, Homo sapien
ggactattgggagagcggcgagtgg

SEQ ID NO: 5744886 - DNA, 25 bp, Homo sapien
ctacagaaccccgacgacacacaca

SEQ ID NO: 5744887 - DNA, 25 bp, Homo sapien
cggccagcccggccaccagccatgg

SEQ ID NO: 5744888 - DNA, 25 bp, Homo sapien
ttcggttcctggtcctacgataagg

SEQ ID NO: 5744889 - DNA, 25 bp, Homo sapien
aaatatgaaagcacaaaatgaagcc

SEQ ID NO: 5744890 - DNA, 25 bp, Homo sapien
gtacactggggaggtgacttggata

SEQ ID NO: 5744891 - DNA, 25 bp, Homo sapien
gtctctgcgaccgccgcgcccgctc

SEQ ID NO: 5744892 - DNA, 25 bp, Homo sapien
agggcctcagaggctgagcaccgtc

SEQ ID NO: 5744893 - DNA, 25 bp, Homo sapien
ggcccgctctcgctgcccctggcgc

SEQ ID NO: 5744894 - DNA, 25 bp, Homo sapien
aggctgcaaggagggctacccctgc

SEQ ID NO: 5744895 - DNA, 25 bp, Homo sapien
aagctctagttctgaatctgttgat

SEQ ID NO: 5744896 - DNA, 25 bp, Homo sapien
cctctctgctttgtcaccagaaatc

SEQ ID NO: 5744897 - DNA, 25 bp, Homo sapien
gagccccttcccctaccgcacgtac

SEQ ID NO: 5744898 - DNA, 25 bp, Homo sapien
ctgattggagagtacctcctgttca

SEQ ID NO: 5744899 - DNA, 25 bp, Homo sapien
agctcgcccggcgctggggactggg

SEQ ID NO: 5744900 - DNA, 25 bp, Homo sapien
taaaccagatcatggagaccaacct

SEQ ID NO: 5744901 - DNA, 25 bp, Homo sapien
acagaaacatccgatcaagaacctg

SEQ ID NO: 5744902 - DNA, 25 bp, Homo sapien
aaactgtaccatgaagttcggttcc

SEQ ID NO: 5744903 - DNA, 25 bp, Homo sapien
gcggcggcgaagcggagaggagccc

SEQ ID NO: 5744904 - DNA, 25 bp, Homo sapien
aacctcatcatcccctgcctgctca

SEQ ID NO: 5744905 - DNA, 25 bp, Homo sapien
aatgaagccaaagaggaacaaaaag

SEQ ID NO: 5744906 - DNA, 25 bp, Homo sapien
gtccttcccagggtgtgttagcgtc

SEQ ID NO: 5744907 - DNA, 25 bp, Homo sapien
gtgatcactgagaccatcccttcca

SEQ ID NO: 5744908 - DNA, 25 bp, Homo sapien
gtttctcctggtgatcactgagacc

SEQ ID NO: 5744909 - DNA, 25 bp, Homo sapien
aaatcgatctggtcctgatcggctc

SEQ ID NO: 5744910 - DNA, 25 bp, Homo sapien
tctccaatttcagtgctaacctcac

SEQ ID NO: 5744911 - DNA, 25 bp, Homo sapien
catgaccaggccaacaagcaacgag

SEQ ID NO: 5744912 - DNA, 25 bp, Homo sapien
catcatccatttcgaggtgtccatg

SEQ ID NO: 5744913 - DNA, 25 bp, Homo sapien
ccttgtccatcgtcatcaccgtctt

SEQ ID NO: 5744914 - DNA, 25 bp, Homo sapien
aggagggctacccctgccaggacgg

SEQ ID NO: 5744915 - DNA, 25 bp, Homo sapien
gaaagcacaaaatgaagccaaagag

SEQ ID NO: 5744916 - DNA, 25 bp, Homo sapien
taaaatcgacgtgacctacttcccg

SEQ ID NO: 5744917 - DNA, 25 bp, Homo sapien
cagtgctaacctcacgagaagctct

SEQ ID NO: 5744918 - DNA, 25 bp, Homo sapien
cccctgcgggagctgcacacgcccc

SEQ ID NO: 5744919 - DNA, 25 bp, Homo sapien
tgtctctgctgccagtggccagggc

SEQ ID NO: 5744920 - DNA, 25 bp, Homo sapien
ttcccagggtgtgttagcgtctctc

SEQ ID NO: 5744921 - DNA, 25 bp, Homo sapien
cctggagccccttcccctaccgcac

SEQ ID NO: 5744922 - DNA, 25 bp, Homo sapien
aatgactacaagctgaaatggaacc

SEQ ID NO: 5744923 - DNA, 25 bp, Homo sapien
ttcgaggtgtccatgtctcagctgg

SEQ ID NO: 5744924 - DNA, 25 bp, Homo sapien
gccaacgtgtctgacccagtcatca

SEQ ID NO: 5744925 - DNA, 25 bp, Homo sapien
acctgctccccagggtcatgttcat

SEQ ID NO: 5744926 - DNA, 25 bp, Homo sapien
tgtggctcaagcaaatctggaatga

SEQ ID NO: 5744927 - DNA, 25 bp, Homo sapien
cggtgccgagctctcaaatctgaat

SEQ ID NO: 5744928 - DNA, 25 bp, Homo sapien
taccatgaagttcggttcctggtcc

SEQ ID NO: 5744929 - DNA, 25 bp, Homo sapien
gatacctccggccatctttaagagc

SEQ ID NO: 5744930 - DNA, 25 bp, Homo sapien
gcgaggagatctaccccgacatcac

SEQ ID NO: 5744931 - DNA, 25 bp, Homo sapien
gcccgcctagcccggtggtcccaac

SEQ ID NO: 5744932 - DNA, 25 bp, Homo sapien
agcccggcggagaaggagctcgccc

SEQ ID NO: 5744933 - DNA, 25 bp, Homo sapien
gccatgggctctggcccgctctcgc

SEQ ID NO: 5744934 - DNA, 25 bp, Homo sapien
actgctgcgaggagatctaccccga

SEQ ID NO: 5744935 - DNA, 25 bp, Homo sapien
actgagtccctctccttcctggtgg

SEQ ID NO: 5744936 - DNA, 25 bp, Homo sapien
gaggagccccgcgcgtctccgcccg

SEQ ID NO: 5744937 - DNA, 25 bp, Homo sapien
ctgctgtctctgctgccagtggcca

SEQ ID NO: 5744938 - DNA, 25 bp, Homo sapien
cctcatcatcccctgcctgctcatc

SEQ ID NO: 5744939 - DNA, 25 bp, Homo sapien
tggtggtgacagcacctgctcagat

SEQ ID NO: 5744940 - DNA, 25 bp, Homo sapien
ctgcacacgccccggaaacctggga

SEQ ID NO: 5744941 - DNA, 25 bp, Homo sapien
gtgtccatgtctcagctggtgaagg

SEQ ID NO: 5744942 - DNA, 25 bp, Homo sapien
gggtgtgttagcgtctctcctacgg

SEQ ID NO: 5744943 - DNA, 25 bp, Homo sapien
tcactgtgctcgtcttctacctgcc

SEQ ID NO: 5744944 - DNA, 25 bp, Homo sapien
ccgcgggtccgagggcgctggaaac

SEQ ID NO: 5744945 - DNA, 25 bp, Homo sapien
ttaccaaaactgtaccatgaagttc

SEQ ID NO: 5744946 - DNA, 25 bp, Homo sapien
gaacctgggctatgaatttccaatc

SEQ ID NO: 5744947 - DNA, 25 bp, Homo sapien
gcgtctccgcccgcacggctccagg

SEQ ID NO: 5744948 - DNA, 25 bp, Homo sapien
tatgaatttccaatcttcaacaacc

SEQ ID NO: 5744949 - DNA, 25 bp, Homo sapien
aggataaaaatctccaatttcagtg

SEQ ID NO: 5744950 - DNA, 25 bp, Homo sapien
cgcacgtacgccccgccccgcgcac

SEQ ID NO: 5744951 - DNA, 25 bp, Homo sapien
tgcccttgttctacaccatcaacct

SEQ ID NO: 5744952 - DNA, 25 bp, Homo sapien
acacaatgccctcatgggtgaagac

SEQ ID NO: 5744953 - DNA, 25 bp, Homo sapien
tattgggagagcggcgagtgggcca

SEQ ID NO: 5744954 - DNA, 25 bp, Homo sapien
tattgctgaaaatatgaaagcacaa

SEQ ID NO: 5744955 - DNA, 25 bp, Homo sapien
aaggactattgggagagcggcgagt

SEQ ID NO: 5744956 - DNA, 25 bp, Homo sapien
gctggaaacccagcggcggcgaagc

SEQ ID NO: 5744957 - DNA, 25 bp, Homo sapien
atttctgtcctcctctccctgacgg

SEQ ID NO: 5744958 - DNA, 25 bp, Homo sapien
tgctgccagtggccagggcctcaga

SEQ ID NO: 5744959 - DNA, 25 bp, Homo sapien
gtccaaaggctgcaaggagggctac

SEQ ID NO: 5744960 - DNA, 25 bp, Homo sapien
gtgcatttctgtcctcctctccctg

SEQ ID NO: 5744961 - DNA, 25 bp, Homo sapien
gccagcccggccaccagccatgggc

SEQ ID NO: 5744962 - DNA, 25 bp, Homo sapien
atcatggagaccaacctgtggctca

SEQ ID NO: 5744963 - DNA, 25 bp, Homo sapien
taacaatgctgttggggatttccag

SEQ ID NO: 5744964 - DNA, 25 bp, Homo sapien
tgggacagaaactgagtccctctcc

SEQ ID NO: 5744965 - DNA, 25 bp, Homo sapien
ggagctcgcccggcgctggggactg

SEQ ID NO: 5744966 - DNA, 25 bp, Homo sapien
cgccccgccccgcgcacgcccgccc

SEQ ID NO: 5744967 - DNA, 25 bp, Homo sapien
cgctcagaagccgaggcccctctac

SEQ ID NO: 5744968 - DNA, 25 bp, Homo sapien
gagaaggtgaccctgtgcatttctg

SEQ ID NO: 5744969 - DNA, 25 bp, Homo sapien
ggtggtggtgacagcacctgctcag

SEQ ID NO: 5744970 - DNA, 25 bp, Homo sapien
cacgcccgcccgcccgcccgcgcct

SEQ ID NO: 5744971 - DNA, 25 bp, Homo sapien
ccaacctgtggctcaagcaaatctg

SEQ ID NO: 5744972 - DNA, 25 bp, Homo sapien
cgcccgcgcctggcgcagcttcact

SEQ ID NO: 5744973 - DNA, 25 bp, Homo sapien
gcgcccgcctagcccggtggtccca

SEQ ID NO: 5744974 - DNA, 25 bp, Homo sapien
tacaagctgaaatggaacccctctg

SEQ ID NO: 5744975 - DNA, 25 bp, Homo sapien
tagcgtctctcctacggcgcccgcc

SEQ ID NO: 5744976 - DNA, 25 bp, Homo sapien
cctacggcgcccgcctagcccggtg

SEQ ID NO: 5744977 - DNA, 25 bp, Homo sapien
cccagcggcggcgaagcggagagga

SEQ ID NO: 5744978 - DNA, 25 bp, Homo sapien
caccagaaatcaaagaagccatcca

SEQ ID NO: 5744979 - DNA, 25 bp, Homo sapien
tcccgcgggtccgagggcgctggaa

SEQ ID NO: 5744980 - DNA, 25 bp, Homo sapien
cccggcgctggggactgggacctgg

SEQ ID NO: 5744981 - DNA, 25 bp, Homo sapien
tcccctgcctgctcatctccttcct

SEQ ID NO: 5744982 - DNA, 25 bp, Homo sapien
tgctgctgctgctgtctctgctgcc

SEQ ID NO: 5744983 - DNA, 25 bp, Homo sapien
ttgtaaccttgtccatcgtcatcac

SEQ ID NO: 5744984 - DNA, 25 bp, Homo sapien
ttccacctcgctggtcatccccctg

SEQ ID NO: 5744985 - DNA, 25 bp, Homo sapien
ctttgtcaccagaaatcaaagaagc

SEQ ID NO: 5744986 - DNA, 25 bp, Homo sapien
cctgtagccaacgtgtctgacccag

SEQ ID NO: 5744987 - DNA, 25 bp, Homo sapien
gctggtgaaggtggatgaagtaaac

SEQ ID NO: 5744988 - DNA, 25 bp, Homo sapien
ggctcttccatgaacctcaaggact

SEQ ID NO: 5744989 - DNA, 25 bp, Homo sapien
tcaaagccccaggctacaaacacga

SEQ ID NO: 5744990 - DNA, 25 bp, Homo sapien
tcctggtcctacgataaggcgaaaa

SEQ ID NO: 5744991 - DNA, 25 bp, Homo sapien
ctggaatgactacaagctgaaatgg

SEQ ID NO: 5744992 - DNA, 25 bp, Homo sapien
gcctgctcatctccttcctcactgt

SEQ ID NO: 5744993 - DNA, 25 bp, Homo sapien
actgcggtgagaaggtgaccctgtg

SEQ ID NO: 5744994 - DNA, 25 bp, Homo sapien
tacaactgctgcgaggagatctacc

SEQ ID NO: 5744995 - DNA, 25 bp, Homo sapien
catgggtgaagactgtattcttgaa

SEQ ID NO: 5744996 - DNA, 25 bp, Homo sapien
gaggagatctaccccgacatcacat

SEQ ID NO: 5744997 - DNA, 25 bp, Homo sapien
agaggctgagcaccgtctatttgag

SEQ ID NO: 5744998 - DNA, 25 bp, Homo sapien
acaccatcaacctcatcatcccctg

SEQ ID NO: 5744999 - DNA, 25 bp, Homo sapien
tcctctccctgacggtgtttctcct

SEQ ID NO: 5745000 - DNA, 25 bp, Homo sapien
tccctctccttcctggtggtggtga

SEQ ID NO: 5745001 - DNA, 25 bp, Homo sapien
aaccagatcatggagaccaacctgt

SEQ ID NO: 5745002 - DNA, 25 bp, Homo sapien
gcagcttcactccggatggttcctg

SEQ ID NO: 5745003 - DNA, 25 bp, Homo sapien
cagaagccgaggcccctctacggtg

SEQ ID NO: 5745004 - DNA, 25 bp, Homo sapien
tgtccctgcacagaagatctggaag

SEQ ID NO: 5745005 - DNA, 25 bp, Homo sapien
actgtgctcgtcttctacctgccct

SEQ ID NO: 5745006 - DNA, 25 bp, Homo sapien
cgggtccgcggccagcccggccacc

SEQ ID NO: 5745007 - DNA, 25 bp, Homo sapien
ttcagccgcgcagagtccaaaggct

SEQ ID NO: 5745008 - DNA, 25 bp, Homo sapien
tgaattgcttcagccgcgcagagtc

SEQ ID NO: 5745009 - DNA, 25 bp, Homo sapien
aagaacctgggctatgaatttccaa

SEQ ID NO: 5745010 - DNA, 25 bp, Homo sapien
accatcccttccacctcgctggtca

SEQ ID NO: 5745011 - DNA, 25 bp, Homo sapien
atcgtcatcaccgtcttcgtgctca

SEQ ID NO: 5745012 - DNA, 25 bp, Homo sapien
cgacaagaccaaagccttactcaag

SEQ ID NO: 5745013 - DNA, 25 bp, Homo sapien
cctggtgatcactgagaccatccct

SEQ ID NO: 5745014 - DNA, 25 bp, Homo sapien
ctccctgacggtgtttctcctggtg

SEQ ID NO: 5745015 - DNA, 25 bp, Homo sapien
ggctctggcccgctctcgctgcccc

SEQ ID NO: 5745016 - DNA, 25 bp, Homo sapien
ttctacaccatcaacctcatcatcc

SEQ ID NO: 5745017 - DNA, 25 bp, Homo sapien
caccgtcttcgtgctcaacgtgcac

SEQ ID NO: 5745018 - DNA, 25 bp, Homo sapien
cgcagagtccaaaggctgcaaggag

SEQ ID NO: 5745019 - DNA, 25 bp, Homo sapien
cggttcctggtcctacgataaggcg

SEQ ID NO: 5745020 - DNA, 25 bp, Homo sapien
ggacagaaactgagtccctctcctt

SEQ ID NO: 5745021 - DNA, 25 bp, Homo sapien
ctaccccgacatcacatactcgctg

SEQ ID NO: 5745022 - DNA, 25 bp, Homo sapien
tctgaatctgttgatgctgtgctgt

SEQ ID NO: 5745023 - DNA, 25 bp, Homo sapien
ctatttgagcggctgtttgaagatt

SEQ ID NO: 5745024 - DNA, 25 bp, Homo sapien
cacatactcgctgtacatccggcgc

SEQ ID NO: 5745025 - DNA, 25 bp, Homo sapien
ctgtattcttgaacctgctccccag

SEQ ID NO: 5745026 - DNA, 25 bp, Homo sapien
tttaagagctcctgtaaaatcgacg

SEQ ID NO: 5745027 - DNA, 25 bp, Homo sapien
tacctcctgttcaccatgatttttg

SEQ ID NO: 5745028 - DNA, 25 bp, Homo sapien
gactatggtggggcagagttcatgc

SEQ ID NO: 5745029 - DNA, 25 bp, Homo sapien
ctcgctggtcatccccctgattgga

SEQ ID NO: 5745030 - DNA, 25 bp, Homo sapien
gttggggatttccaggtggacgaca

SEQ ID NO: 5745031 - DNA, 25 bp, Homo sapien
ggagaaggagctcgcccggcgctgg

SEQ ID NO: 5745032 - DNA, 25 bp, Homo sapien
gtcatgttcatgaccaggccaacaa

SEQ ID NO: 5745033 - DNA, 25 bp, Homo sapien
gatcggctcttccatgaacctcaag

SEQ ID NO: 5745034 - DNA, 25 bp, Homo sapien
cggcggagaaggagctcgcccggcg

SEQ ID NO: 5745035 - DNA, 25 bp, Homo sapien
taaggcgaaaatcgatctggtcctg

SEQ ID NO: 5745036 - DNA, 25 bp, Homo sapien
cgctgcccctggcgctgtcgccgcc

SEQ ID NO: 5745037 - DNA, 25 bp, Homo sapien
ccccgcgcgtctccgcccgcacggc

SEQ ID NO: 5745038 - DNA, 25 bp, Homo sapien
caaagaagccatccaaagtgtcaag

SEQ ID NO: 5745039 - DNA, 25 bp, Homo sapien
atctaccccgacatcacatactcgc

SEQ ID NO: 5745040 - DNA, 25 bp, Homo sapien
tcctgtcctcccgcgggtccgaggg

SEQ ID NO: 5745041 - DNA, 25 bp, Homo sapien
ggctgtttgaagattacaatgagat

SEQ ID NO: 5745042 - DNA, 25 bp, Homo sapien
tggggcagagttcatgcgtgtccct

SEQ ID NO: 5745043 - DNA, 25 bp, Homo sapien
gaaggtgaccctgtgcatttctgtc

SEQ ID NO: 5745044 - DNA, 25 bp, Homo sapien
attgaaacgaaaagaaaagtccaca

SEQ ID NO: 5745045 - DNA, 25 bp, Homo sapien
cacgtacgccccgccccgcgcacgc

SEQ ID NO: 5745046 - DNA, 25 bp, Homo sapien
ctgaaaatatgaaagcacaaaatga

SEQ ID NO: 5745047 - DNA, 25 bp, Homo sapien
gtacatccggcgcctgcccttgttc

SEQ ID NO: 5745048 - DNA, 25 bp, Homo sapien
tgccaggacgggatgtgtggttact

SEQ ID NO: 5745049 - DNA, 25 bp, Homo sapien
ctggtcatccccctgattggagagt

SEQ ID NO: 5745050 - DNA, 25 bp, Homo sapien
cgggagctgcacacgccccggaaac

SEQ ID NO: 5745051 - DNA, 25 bp, Homo sapien
gagaccaacctgtggctcaagcaaa

SEQ ID NO: 5745052 - DNA, 25 bp, Homo sapien
atttcgaggtgtccatgtctcagct

SEQ ID NO: 5745053 - DNA, 25 bp, Homo sapien
atccaaagtgtcaagtatattgctg

SEQ ID NO: 5745054 - DNA, 25 bp, Homo sapien
tgtcaagtatattgctgaaaatatg

SEQ ID NO: 5745055 - DNA, 25 bp, Homo sapien
gtgaccctgtgcatttctgtcctcc

SEQ ID NO: 5745056 - DNA, 25 bp, Homo sapien
gaccgccgcgcccgctcccgaccgt

SEQ ID NO: 5745057 - DNA, 25 bp, Homo sapien
agccccgcgcgtctccgcccgcacg

SEQ ID NO: 5745058 - DNA, 25 bp, Homo sapien
tccttcctggtggtggtgacagcac

SEQ ID NO: 5745059 - DNA, 25 bp, Homo sapien
catcaacctcatcatcccctgcctg

SEQ ID NO: 5745060 - DNA, 25 bp, Homo sapien
gtcatcatccatttcgaggtgtcca

SEQ ID NO: 5745061 - DNA, 25 bp, Homo sapien
ccgaccgtccgggtccgcggccagc

SEQ ID NO: 5745062 - DNA, 25 bp, Homo sapien
ctgtgctgtccctctctgctttgtc

SEQ ID NO: 5745063 - DNA, 25 bp, Homo sapien
gtcctcctctccctgacggtgtttc

SEQ ID NO: 5745064 - DNA, 25 bp, Homo sapien
gcgcgtctccgcccgcacggctcca

SEQ ID NO: 5745065 - DNA, 25 bp, Homo sapien
cgtacgccccgccccgcgcacgccc

SEQ ID NO: 5745066 - DNA, 25 bp, Homo sapien
ctgatcggctcttccatgaacctca

SEQ ID NO: 5745067 - DNA, 25 bp, Homo sapien
ccaaagtgtcaagtatattgctgaa

SEQ ID NO: 5745068 - DNA, 25 bp, Homo sapien
tccggccatctttaagagctcctgt

SEQ ID NO: 5745069 - DNA, 25 bp, Homo sapien
ccgcacggctccaggtctggggtct

SEQ ID NO: 5745070 - DNA, 25 bp, Homo sapien
gctgctgctgctgctgtctctgctg

SEQ ID NO: 5745071 - DNA, 25 bp, Homo sapien
agcttcactccggatggttcctgtc

SEQ ID NO: 5745072 - DNA, 25 bp, Homo sapien
gtctctcctacggcgcccgcctagc

SEQ ID NO: 5745073 - DNA, 25 bp, Homo sapien
cggggagaggccgtctctgcgaccg

SEQ ID NO: 5745074 - DNA, 25 bp, Homo sapien
ggccaacaagcaacgagggcaacgc

SEQ ID NO: 5745075 - DNA, 25 bp, Homo sapien
gtggtgacagcacctgctcagatct

SEQ ID NO: 5745076 - DNA, 25 bp, Homo sapien
aagccagacattgtgctgtataaca

SEQ ID NO: 5745077 - DNA, 25 bp, Homo sapien
ggtcctgatcggctcttccatgaac

SEQ ID NO: 5745078 - DNA, 25 bp, Homo sapien
ctgctgctgctgtctctgctgccag

SEQ ID NO: 5745079 - DNA, 25 bp, Homo sapien
ggctccaggtctggggtctgcgctg

SEQ ID NO: 5745080 - DNA, 25 bp, Homo sapien
tccaatcttcaacaacctgttagga

SEQ ID NO: 5745081 - DNA, 25 bp, Homo sapien
gtgctaacctcacgagaagctctag

SEQ ID NO: 5745082 - DNA, 25 bp, Homo sapien
ccacagaaacatccgatcaagaacc

SEQ ID NO: 5745083 - DNA, 25 bp, Homo sapien
cggcgcccgcctagcccggtggtcc

SEQ ID NO: 5745084 - DNA, 25 bp, Homo sapien
catggagaccaacctgtggctcaag

SEQ ID NO: 5745085 - DNA, 25 bp, Homo sapien
atttcagtgctaacctcacgagaag

SEQ ID NO: 5745086 - DNA, 25 bp, Homo sapien
gctaacctcacgagaagctctagtt

SEQ ID NO: 5745087 - DNA, 25 bp, Homo sapien
ccctggcgctgtcgccgccgcggct

SEQ ID NO: 5745088 - DNA, 25 bp, Homo sapien
agtatattgctgaaaatatgaaagc

SEQ ID NO: 5745089 - DNA, 25 bp, Homo sapien
cctgcacagaagatctggaagccag

SEQ ID NO: 5745090 - DNA, 25 bp, Homo sapien
tcctgttcaccatgatttttgtaac

SEQ ID NO: 5745091 - DNA, 25 bp, Homo sapien
gtcccaaccccctgcgggagctgca

SEQ ID NO: 5745092 - DNA, 25 bp, Homo sapien
gctgctgctgtctctgctgccagtg

SEQ ID NO: 5745093 - DNA, 25 bp, Homo sapien
acagaaccccgacgacacacacaat

SEQ ID NO: 5745094 - DNA, 25 bp, Homo sapien
tcctgatcggctcttccatgaacct

SEQ ID NO: 5745095 - DNA, 25 bp, Homo sapien
gagggcaacgctcagaagccgaggc

SEQ ID NO: 5745096 - DNA, 25 bp, Homo sapien
aaatctggaatgactacaagctgaa

SEQ ID NO: 5745097 - DNA, 25 bp, Homo sapien
cgtccgggtccgcggccagcccggc

SEQ ID NO: 5745098 - DNA, 25 bp, Homo sapien
gtcgccgccgcggctgctgctgctg

SEQ ID NO: 5745099 - DNA, 25 bp, Homo sapien
gtccgagggcgctggaaacccagcg

SEQ ID NO: 5745100 - DNA, 25 bp, Homo sapien
caacgagggcaacgctcagaagccg

SEQ ID NO: 5745101 - DNA, 25 bp, Homo sapien
gcgggtccgagggcgctggaaaccc

SEQ ID NO: 5745102 - DNA, 25 bp, Homo sapien
gacattgtgctgtataacaatgctg

SEQ ID NO: 5745103 - DNA, 25 bp, Homo sapien
cgcacgcccgcccgcccgcccgcgc

SEQ ID NO: 5745104 - DNA, 25 bp, Homo sapien
tgttgatgctgtgctgtccctctct

SEQ ID NO: 5745105 - DNA, 25 bp, Homo sapien
ctggaagccagacattgtgctgtat

SEQ ID NO: 5745106 - DNA, 25 bp, Homo sapien
cccctctacggtgccgagctctcaa

SEQ ID NO: 5745107 - DNA, 25 bp, Homo sapien
cgctgtacatccggcgcctgccctt

SEQ ID NO: 5745108 - DNA, 25 bp, Homo sapien
ctgggacctggagccccttccccta

SEQ ID NO: 5745109 - DNA, 25 bp, Homo sapien
tgaacctcaaggactattgggagag

SEQ ID NO: 5745110 - DNA, 25 bp, Homo sapien
ccgtcttcgtgctcaacgtgcacta

SEQ ID NO: 5745111 - DNA, 25 bp, Homo sapien
tgcacagaagatctggaagccagac

SEQ ID NO: 5745112 - DNA, 25 bp, Homo sapien
tcctacgataaggcgaaaatcgatc

SEQ ID NO: 5745113 - DNA, 25 bp, Homo sapien
agcaacgagggcaacgctcagaagc

SEQ ID NO: 5745114 - DNA, 25 bp, Homo sapien
ccgagggcgctggaaacccagcggc

SEQ ID NO: 5745115 - DNA, 25 bp, Homo sapien
gaaaatcgatctggtcctgatcggc

SEQ ID NO: 5745116 - DNA, 25 bp, Homo sapien
gaggcccctctacggtgccgagctc

SEQ ID NO: 5745117 - DNA, 25 bp, Homo sapien
tggagaccaacctgtggctcaagca

SEQ ID NO: 5745118 - DNA, 25 bp, Homo sapien
aatctccaatttcagtgctaacctc

SEQ ID NO: 5745119 - DNA, 25 bp, Homo sapien
cgcccgcccgcgcctggcgcagctt

SEQ ID NO: 5745120 - DNA, 25 bp, Homo sapien
cgactgcggtgagaaggtgaccctg

SEQ ID NO: 5745121 - DNA, 25 bp, Homo sapien
tgcgtgtccctgcacagaagatctg

SEQ ID NO: 5745122 - DNA, 25 bp, Homo sapien
ccgccgcgcccgctcccgaccgtcc

SEQ ID NO: 5745123 - DNA, 25 bp, Homo sapien
gaagtaaaccagatcatggagacca

SEQ ID NO: 5745124 - DNA, 25 bp, Homo sapien
agctgaaatggaacccctctgacta

SEQ ID NO: 5745125 - DNA, 25 bp, Homo sapien
cagggtgtgttagcgtctctcctac

SEQ ID NO: 5745126 - DNA, 25 bp, Homo sapien
ccagaaatcaaagaagccatccaaa

SEQ ID NO: 5745127 - DNA, 25 bp, Homo sapien
aattgcttcagccgcgcagagtcca

SEQ ID NO: 5745128 - DNA, 25 bp, Homo sapien
gatctggtcggacgccgccggccgg

SEQ ID NO: 5745129 - DNA, 25 bp, Homo sapien
acagcacctgctcagatctggtcgg

SEQ ID NO: 5745130 - DNA, 25 bp, Homo sapien
cgacatcacatactcgctgtacatc

SEQ ID NO: 5745131 - DNA, 25 bp, Homo sapien
aacctgtggctcaagcaaatctgga

SEQ ID NO: 5745132 - DNA, 25 bp, Homo sapien
gcgcagcttcactccggatggttcc

SEQ ID NO: 5745133 - DNA, 25 bp, Homo sapien
catcccctgcctgctcatctccttc

SEQ ID NO: 5745134 - DNA, 25 bp, Homo sapien
aatctgttgatgctgtgctgtccct

SEQ ID NO: 5745135 - DNA, 25 bp, Homo sapien
cccggcggagaaggagctcgcccgg

SEQ ID NO: 5745136 - DNA, 25 bp, Homo sapien
gcttcagccgcgcagagtccaaagg

SEQ ID NO: 5745137 - DNA, 25 bp, Homo sapien
gcgctggggactgggacctggagcc

SEQ ID NO: 5745138 - DNA, 25 bp, Homo sapien
ctggtcctgatcggctcttccatga

SEQ ID NO: 5745139 - DNA, 25 bp, Homo sapien
agagtacctcctgttcaccatgatt

SEQ ID NO: 5745140 - DNA, 25 bp, Homo sapien
atcaagtacaactgctgcgaggaga

SEQ ID NO: 5745141 - DNA, 25 bp, Homo sapien
tcggctcttccatgaacctcaagga

SEQ ID NO: 5745142 - DNA, 25 bp, Homo sapien
acacacacaatgccctcatgggtga

SEQ ID NO: 5745143 - DNA, 25 bp, Homo sapien
gccagtggccagggcctcagaggct

SEQ ID NO: 5745144 - DNA, 25 bp, Homo sapien
ccagcccggcggagaaggagctcgc

SEQ ID NO: 5745145 - DNA, 25 bp, Homo sapien
cctcctctccctgacggtgtttctc

SEQ ID NO: 5745146 - DNA, 25 bp, Homo sapien
ggggtctgcgctggagccgcgcggg

SEQ ID NO: 5745147 - DNA, 25 bp, Homo sapien
atcacatactcgctgtacatccggc

SEQ ID NO: 5745148 - DNA, 25 bp, Homo sapien
ctcaaatctgaattgcttcagccgc

SEQ ID NO: 5745149 - DNA, 25 bp, Homo sapien
gtgtctgacccagtcatcatccatt

SEQ ID NO: 5745150 - DNA, 25 bp, Homo sapien
ggtgacagcacctgctcagatctgg

SEQ ID NO: 5745151 - DNA, 25 bp, Homo sapien
tcccttccacctcgctggtcatccc

SEQ ID NO: 5745152 - DNA, 25 bp, Homo sapien
tcgtgctcaacgtgcactacagaac

SEQ ID NO: 5745153 - DNA, 25 bp, Homo sapien
aagcacaaaatgaagccaaagagga

SEQ ID NO: 5745154 - DNA, 25 bp, Homo sapien
tcagaggctgagcaccgtctatttg

SEQ ID NO: 5745155 - DNA, 25 bp, Homo sapien
ctggtggtggtgacagcacctgctc

SEQ ID NO: 5745156 - DNA, 25 bp, Homo sapien
gtccatgtctcagctggtgaaggtg

SEQ ID NO: 5745157 - DNA, 25 bp, Homo sapien
atctggaatgactacaagctgaaat

SEQ ID NO: 5745158 - DNA, 25 bp, Homo sapien
cgagaagctctagttctgaatctgt

SEQ ID NO: 5745159 - DNA, 25 bp, Homo sapien
cgcggccagcccggccaccagccat

SEQ ID NO: 5745160 - DNA, 25 bp, Homo sapien
tggaacccctctgactatggtgggg

SEQ ID NO: 5745161 - DNA, 25 bp, Homo sapien
aagtccacagaaacatccgatcaag

SEQ ID NO: 5745162 - DNA, 25 bp, Homo sapien
agatcatggagaccaacctgtggct

SEQ ID NO: 5745163 - DNA, 25 bp, Homo sapien
gagcggctgtttgaagattacaatg

SEQ ID NO: 5745164 - DNA, 25 bp, Homo sapien
atgtctcagctggtgaaggtggatg

SEQ ID NO: 5745165 - DNA, 25 bp, Homo sapien
cgcggctgctgctgctgctgctgct

SEQ ID NO: 5745166 - DNA, 25 bp, Homo sapien
agctgcacacgccccggaaacctgg

SEQ ID NO: 5745167 - DNA, 25 bp, Homo sapien
tggacgacaagaccaaagccttact

SEQ ID NO: 5745168 - DNA, 25 bp, Homo sapien
acgataaggcgaaaatcgatctggt

SEQ ID NO: 5745169 - DNA, 25 bp, Homo sapien
atgaagttcggttcctggtcctacg

SEQ ID NO: 5745170 - DNA, 25 bp, Homo sapien
gctatgaatttccaatcttcaacaa

SEQ ID NO: 5745171 - DNA, 25 bp, Homo sapien
actgagaccatcccttccacctcgc

SEQ ID NO: 5745172 - DNA, 25 bp, Homo sapien
ttgaacctgctccccagggtcatgt

SEQ ID NO: 5745173 - DNA, 25 bp, Homo sapien
cctctccttcctggtggtggtgaca

SEQ ID NO: 5745174 - DNA, 25 bp, Homo sapien
gctccccagggtcatgttcatgacc

SEQ ID NO: 5745175 - DNA, 25 bp, Homo sapien
tgctgttggggatttccaggtggac

SEQ ID NO: 5745176 - DNA, 25 bp, Homo sapien
gttcctgtcctcccgcgggtccgag

SEQ ID NO: 5745177 - DNA, 25 bp, Homo sapien
gaccaacctgtggctcaagcaaatc

SEQ ID NO: 5745178 - DNA, 25 bp, Homo sapien
gaagatctggaagccagacattgtg

SEQ ID NO: 5745179 - DNA, 25 bp, Homo sapien
agaaccccgacgacacacacaatgc

SEQ ID NO: 5745180 - DNA, 25 bp, Homo sapien
ggcctgtagccaacgtgtctgaccc

SEQ ID NO: 5745181 - DNA, 25 bp, Homo sapien
tgtataacaatgctgttggggattt

SEQ ID NO: 5745182 - DNA, 25 bp, Homo sapien
accatcaacctcatcatcccctgcc

SEQ ID NO: 5745183 - DNA, 25 bp, Homo sapien
aacaaaaagcccaagagatccaaca

SEQ ID NO: 5745184 - DNA, 25 bp, Homo sapien
gacccagtcatcatccatttcgagg

SEQ ID NO: 5745185 - DNA, 25 bp, Homo sapien
aaccttgtccatcgtcatcaccgtc

SEQ ID NO: 5745186 - DNA, 25 bp, Homo sapien
ctctggcccgctctcgctgcccctg

SEQ ID NO: 5745187 - DNA, 25 bp, Homo sapien
catgaacctcaaggactattgggag

SEQ ID NO: 5745188 - DNA, 25 bp, Homo sapien
ctggggtctgcgctggagccgcgcg

SEQ ID NO: 5745189 - DNA, 25 bp, Homo sapien
agattacaatgagatcatccggcct

SEQ ID NO: 5745190 - DNA, 25 bp, Homo sapien
agctctcaaatctgaattgcttcag

SEQ ID NO: 5745191 - DNA, 25 bp, Homo sapien
cctgtggctcaagcaaatctggaat

SEQ ID NO: 5745192 - DNA, 25 bp, Homo sapien
tggaaacccagcggcggcgaagcgg

SEQ ID NO: 5745193 - DNA, 25 bp, Homo sapien
ctgactatggtggggcagagttcat

SEQ ID NO: 5745194 - DNA, 25 bp, Homo sapien
accaccgcaggataaaaatctccaa

SEQ ID NO: 5745195 - DNA, 25 bp, Homo sapien
ctgtcgccgccgcggctgctgctgc

SEQ ID NO: 5745196 - DNA, 25 bp, Homo sapien
cgtgtccctgcacagaagatctgga

SEQ ID NO: 5745197 - DNA, 25 bp, Homo sapien
cccagggtcatgttcatgaccaggc

SEQ ID NO: 5745198 - DNA, 25 bp, Homo sapien
gcaggataaaaatctccaatttcag

SEQ ID NO: 5745199 - DNA, 25 bp, Homo sapien
cccagggtgtgttagcgtctctcct

SEQ ID NO: 5745200 - DNA, 25 bp, Homo sapien
caaggagggctacccctgccaggac

SEQ ID NO: 5745201 - DNA, 25 bp, Homo sapien
tactcgctgtacatccggcgcctgc

SEQ ID NO: 5745202 - DNA, 25 bp, Homo sapien
ccctgacggtgtttctcctggtgat

SEQ ID NO: 5745203 - DNA, 25 bp, Homo sapien
tgatttttgtaaccttgtccatcgt

SEQ ID NO: 5745204 - DNA, 25 bp, Homo sapien
atttttgtaaccttgtccatcgtca

SEQ ID NO: 5745205 - DNA, 25 bp, Homo sapien
gaagcggagaggagccccgcgcgtc

SEQ ID NO: 5745206 - DNA, 25 bp, Homo sapien
aacccagcggcggcgaagcggagag

SEQ ID NO: 5745207 - DNA, 25 bp, Homo sapien
gaccctgtgcatttctgtcctcctc

SEQ ID NO: 5745208 - DNA, 25 bp, Homo sapien
gctgtataacaatgctgttggggat

SEQ ID NO: 5745209 - DNA, 25 bp, Homo sapien
gaaacctgggacagaaactgagtcc

SEQ ID NO: 5745210 - DNA, 25 bp, Homo sapien
gtctgacccagtcatcatccatttc

SEQ ID NO: 5745211 - DNA, 25 bp, Homo sapien
aggacgggatgtgtggttactgcca

SEQ ID NO: 5745212 - DNA, 25 bp, Homo sapien
ggtcctacgataaggcgaaaatcga

SEQ ID NO: 5745213 - DNA, 25 bp, Homo sapien
cctgctcagatctggtcggacgccg

SEQ ID NO: 5745214 - DNA, 25 bp, Homo sapien
acatcacatactcgctgtacatccg

SEQ ID NO: 5745215 - DNA, 25 bp, Homo sapien
acatccggcgcctgcccttgttcta

SEQ ID NO: 5745216 - DNA, 25 bp, Homo sapien
aaaagtccacagaaacatccgatca

SEQ ID NO: 5745217 - DNA, 25 bp, Homo sapien
tcatccggcctgtagccaacgtgtc

SEQ ID NO: 5745218 - DNA, 25 bp, Homo sapien
acctcgctggtcatccccctgattg

SEQ ID NO: 5745219 - DNA, 25 bp, Homo sapien
caccgcaggataaaaatctccaatt

SEQ ID NO: 5745220 - DNA, 25 bp, Homo sapien
ggatgtgtggttactgccaccaccg

SEQ ID NO: 5745221 - DNA, 25 bp, Homo sapien
acagaaactgagtccctctccttcc

SEQ ID NO: 5745222 - DNA, 25 bp, Homo sapien
ctgtacatccggcgcctgcccttgt

SEQ ID NO: 5745223 - DNA, 25 bp, Homo sapien
taacctcacgagaagctctagttct

SEQ ID NO: 5745224 - DNA, 25 bp, Homo sapien
ctcgctgcccctggcgctgtcgccg

SEQ ID NO: 5745225 - DNA, 25 bp, Homo sapien
caatcttcaacaacctgttaggaaa

SEQ ID NO: 5745226 - DNA, 25 bp, Homo sapien
tgtccctctctgctttgtcaccaga

SEQ ID NO: 5745227 - DNA, 25 bp, Homo sapien
gttcaccatgatttttgtaaccttg

SEQ ID NO: 5745228 - DNA, 25 bp, Homo sapien
gcggctgtttgaagattacaatgag

SEQ ID NO: 5745229 - DNA, 25 bp, Homo sapien
ccttcccagggtgtgttagcgtctc

SEQ ID NO: 5745230 - DNA, 25 bp, Homo sapien
caattgaaacgaaaagaaaagtcca

SEQ ID NO: 5745231 - DNA, 25 bp, Homo sapien
tgtaaaatcgacgtgacctacttcc

SEQ ID NO: 5745232 - DNA, 25 bp, Homo sapien
cctcctgttcaccatgatttttgta

SEQ ID NO: 5745233 - DNA, 25 bp, Homo sapien
gacgacacacacaatgccctcatgg

SEQ ID NO: 5745234 - DNA, 25 bp, Homo sapien
tcatctccttcctcactgtgctcgt

SEQ ID NO: 5745235 - DNA, 25 bp, Homo sapien
cagggtcatgttcatgaccaggcca

SEQ ID NO: 5745236 - DNA, 25 bp, Homo sapien
accccgacatcacatactcgctgta

SEQ ID NO: 5745237 - DNA, 25 bp, Homo sapien
agtccctctccttcctggtggtggt

SEQ ID NO: 5745238 - DNA, 25 bp, Homo sapien
gggactgggacctggagccccttcc

SEQ ID NO: 5745239 - DNA, 25 bp, Homo sapien
gctctagttctgaatctgttgatgc

SEQ ID NO: 5745240 - DNA, 25 bp, Homo sapien
ccttccacctcgctggtcatccccc

SEQ ID NO: 5745241 - DNA, 25 bp, Homo sapien
cttccatgaacctcaaggactattg

SEQ ID NO: 5745242 - DNA, 25 bp, Homo sapien
cccgcgcctggcgcagcttcactcc

SEQ ID NO: 5745243 - DNA, 25 bp, Homo sapien
cccgctctcgctgcccctggcgctg

SEQ ID NO: 5745244 - DNA, 25 bp, Homo sapien
tacccctgccaggacgggatgtgtg

SEQ ID NO: 5745245 - DNA, 25 bp, Homo sapien
cttcactccggatggttcctgtcct

SEQ ID NO: 5745246 - DNA, 25 bp, Homo sapien
ctgtcctcccgcgggtccgagggcg

SEQ ID NO: 5745247 - DNA, 25 bp, Homo sapien
gacgggatgtgtggttactgccacc

SEQ ID NO: 5745248 - DNA, 25 bp, Homo sapien
ccgtctatttgagcggctgtttgaa

SEQ ID NO: 5745249 - DNA, 25 bp, Homo sapien
atccccctgattggagagtacctcc

SEQ ID NO: 5745250 - DNA, 25 bp, Homo sapien
gtctccgcccgcacggctccaggtc

SEQ ID NO: 5745251 - DNA, 25 bp, Homo sapien
aaacatccgatcaagaacctgggct

SEQ ID NO: 5745252 - DNA, 25 bp, Homo sapien
acaatgccctcatgggtgaagactg

SEQ ID NO: 5745253 - DNA, 25 bp, Homo sapien
cctcaaggactattgggagagcggc

SEQ ID NO: 5745254 - DNA, 25 bp, Homo sapien
atatgaaagcacaaaatgaagccaa

SEQ ID NO: 5745255 - DNA, 25 bp, Homo sapien
ttttgtaaccttgtccatcgtcatc

SEQ ID NO: 5745256 - DNA, 25 bp, Homo sapien
taagagctcctgtaaaatcgacgtg

SEQ ID NO: 5745257 - DNA, 25 bp, Homo sapien
gcgcccgctcccgaccgtccgggtc

SEQ ID NO: 5745258 - DNA, 25 bp, Homo sapien
gttcctggtcctacgataaggcgaa

SEQ ID NO: 5745259 - DNA, 25 bp, Homo sapien
cggagcacccagcccggcggagaag

SEQ ID NO: 5745260 - DNA, 25 bp, Homo sapien
cctgcccttgttctacaccatcaac

SEQ ID NO: 5745261 - DNA, 25 bp, Homo sapien
gccgcgcggggagaggccgtctctg

SEQ ID NO: 5745262 - DNA, 25 bp, Homo sapien
gggcgctggaaacccagcggcggcg

SEQ ID NO: 5745263 - DNA, 25 bp, Homo sapien
gagaggccgtctctgcgaccgccgc

SEQ ID NO: 5745264 - DNA, 25 bp, Homo sapien
gaccaaagccttactcaagtacact

SEQ ID NO: 5745265 - DNA, 25 bp, Homo sapien
gccatctttaagagctcctgtaaaa

SEQ ID NO: 5745266 - DNA, 25 bp, Homo sapien
ccacctcgctggtcatccccctgat

SEQ ID NO: 5745267 - DNA, 25 bp, Homo sapien
acccctctgactatggtggggcaga

SEQ ID NO: 5745268 - DNA, 25 bp, Homo sapien
atgagatcatccggcctgtagccaa

SEQ ID NO: 5745269 - DNA, 25 bp, Homo sapien
gagaggagccccgcgcgtctccgcc

SEQ ID NO: 5745270 - DNA, 25 bp, Homo sapien
cggcgctggggactgggacctggag

SEQ ID NO: 5745271 - DNA, 25 bp, Homo sapien
actgccaccaccgcaggataaaaat

SEQ ID NO: 5745272 - DNA, 25 bp, Homo sapien
cgtgcactacagaaccccgacgaca

SEQ ID NO: 5745273 - DNA, 25 bp, Homo sapien
ttctacctgccctccgactgcggtg

SEQ ID NO: 5745274 - DNA, 25 bp, Homo sapien
cagccgcgcagagtccaaaggctgc

SEQ ID NO: 5745275 - DNA, 25 bp, Homo sapien
cgctgtcgccgccgcggctgctgct

SEQ ID NO: 5745276 - DNA, 25 bp, Homo sapien
cactacagaaccccgacgacacaca

SEQ ID NO: 5745277 - DNA, 25 bp, Homo sapien
acacacaatgccctcatgggtgaag

SEQ ID NO: 5745278 - DNA, 25 bp, Homo sapien
atcgacgtgacctacttcccgtttg

SEQ ID NO: 5745279 - DNA, 25 bp, Homo sapien
agcacctgctcagatctggtcggac

SEQ ID NO: 5745280 - DNA, 25 bp, Homo sapien
aacctgggacagaaactgagtccct

SEQ ID NO: 5745281 - DNA, 25 bp, Homo sapien
ctcagctggtgaaggtggatgaagt

SEQ ID NO: 5745282 - DNA, 25 bp, Homo sapien
aagcaaatctggaatgactacaagc

SEQ ID NO: 5745283 - DNA, 25 bp, Homo sapien
ctcctacggcgcccgcctagcccgg

SEQ ID NO: 5745284 - DNA, 25 bp, Homo sapien
gagcacccagcccggcggagaagga

SEQ ID NO: 5745285 - DNA, 25 bp, Homo sapien
ccgatcaagaacctgggctatgaat

SEQ ID NO: 5745286 - DNA, 25 bp, Homo sapien
acggctccaggtctggggtctgcgc

SEQ ID NO: 5745287 - DNA, 25 bp, Homo sapien
tccatgaacctcaaggactattggg

SEQ ID NO: 5745288 - DNA, 25 bp, Homo sapien
ccgtctctgcgaccgccgcgcccgc

SEQ ID NO: 5745289 - DNA, 25 bp, Homo sapien
ctcgtcttctacctgccctccgact

SEQ ID NO: 5745290 - DNA, 25 bp, Homo sapien
ccctgtgcatttctgtcctcctctc

SEQ ID NO: 5745291 - DNA, 25 bp, Homo sapien
agctcctgtaaaatcgacgtgacct

SEQ ID NO: 5745292 - DNA, 25 bp, Homo sapien
gggtcatgttcatgaccaggccaac

SEQ ID NO: 5745293 - DNA, 25 bp, Homo sapien
ttcctcactgtgctcgtcttctacc

SEQ ID NO: 5745294 - DNA, 25 bp, Homo sapien
ttcatgaccaggccaacaagcaacg

SEQ ID NO: 5745295 - DNA, 25 bp, Homo sapien
gattggagagtacctcctgttcacc

SEQ ID NO: 5745296 - DNA, 25 bp, Homo sapien
tccgcggccagcccggccaccagcc

SEQ ID NO: 5745297 - DNA, 25 bp, Homo sapien
cgctctcgctgcccctggcgctgtc

SEQ ID NO: 5745298 - DNA, 25 bp, Homo sapien
ccaggctacaaacacgacatcaagt

SEQ ID NO: 5745299 - DNA, 25 bp, Homo sapien
cggtgtttctcctggtgatcactga

SEQ ID NO: 5745300 - DNA, 25 bp, Homo sapien
ctcatgggtgaagactgtattcttg

SEQ ID NO: 5745301 - DNA, 25 bp, Homo sapien
aggtgtccatgtctcagctggtgaa

SEQ ID NO: 5745302 - DNA, 25 bp, Homo sapien
agtgtcaagtatattgctgaaaata

SEQ ID NO: 5745303 - DNA, 25 bp, Homo sapien
aacaagcaacgagggcaacgctcag

SEQ ID NO: 5745304 - DNA, 25 bp, Homo sapien
gctacccctgccaggacgggatgtg

SEQ ID NO: 5745305 - DNA, 25 bp, Homo sapien
ccgcccgcacggctccaggtctggg

SEQ ID NO: 5745306 - DNA, 25 bp, Homo sapien
tcaagcaaatctggaatgactacaa

SEQ ID NO: 5745307 - DNA, 25 bp, Homo sapien
ccttactcaagtacactggggaggt

SEQ ID NO: 5745308 - DNA, 25 bp, Homo sapien
gaaaagaaaagtccacagaaacatc

SEQ ID NO: 5745309 - DNA, 25 bp, Homo sapien
gtgacctacttcccgtttgattacc

SEQ ID NO: 5745310 - DNA, 25 bp, Homo sapien
tctacggtgccgagctctcaaatct

SEQ ID NO: 5745311 - DNA, 25 bp, Homo sapien
atgtgtggttactgccaccaccgca

SEQ ID NO: 5745312 - DNA, 25 bp, Homo sapien
tgctgcgaggagatctaccccgaca

SEQ ID NO: 5745313 - DNA, 25 bp, Homo sapien
tgagaccatcccttccacctcgctg

SEQ ID NO: 5745314 - DNA, 25 bp, Homo sapien
gacgacaagaccaaagccttactca

SEQ ID NO: 5745315 - DNA, 25 bp, Homo sapien
tgactacaagctgaaatggaacccc

SEQ ID NO: 5745316 - DNA, 25 bp, Homo sapien
cagatctggtcggacgccgccggcc

SEQ ID NO: 5745317 - DNA, 25 bp, Homo sapien
caaccccctgcgggagctgcacacg

SEQ ID NO: 5745318 - DNA, 25 bp, Homo sapien
aacacgacatcaagtacaactgctg

SEQ ID NO: 5745319 - DNA, 25 bp, Homo sapien
ctgccctccgactgcggtgagaagg

SEQ ID NO: 5745320 - DNA, 25 bp, Homo sapien
aggtgaccctgtgcatttctgtcct

SEQ ID NO: 5745321 - DNA, 25 bp, Homo sapien
tcaacgtgcactacagaaccccgac

SEQ ID NO: 5745322 - DNA, 25 bp, Homo sapien
tctgcgctggagccgcgcggggaga

SEQ ID NO: 5745323 - DNA, 25 bp, Homo sapien
acacgccccggaaacctgggacaga

SEQ ID NO: 5745324 - DNA, 25 bp, Homo sapien
cgaggtgtccatgtctcagctggtg

SEQ ID NO: 5745325 - DNA, 25 bp, Homo sapien
actggggaggtgacttggatacctc

SEQ ID NO: 5745326 - DNA, 25 bp, Homo sapien
agaaggagctcgcccggcgctgggg

SEQ ID NO: 5745327 - DNA, 25 bp, Homo sapien
ccccaggctacaaacacgacatcaa

SEQ ID NO: 5745328 - DNA, 25 bp, Homo sapien
ccaagagatccaacaattgaaacga

SEQ ID NO: 5745329 - DNA, 25 bp, Homo sapien
cgcctgcccttgttctacaccatca

SEQ ID NO: 5745330 - DNA, 25 bp, Homo sapien
tggtgatcactgagaccatcccttc

SEQ ID NO: 5745331 - DNA, 25 bp, Homo sapien
ccttcctcactgtgctcgtcttcta

SEQ ID NO: 5745332 - DNA, 25 bp, Homo sapien
tataacaatgctgttggggatttcc

SEQ ID NO: 5745333 - DNA, 25 bp, Homo sapien
actgtaccatgaagttcggttcctg

SEQ ID NO: 5745334 - DNA, 25 bp, Homo sapien
ctctccctgacggtgtttctcctgg

SEQ ID NO: 5745335 - DNA, 25 bp, Homo sapien
gtgtgttagcgtctctcctacggcg

SEQ ID NO: 5745336 - DNA, 25 bp, Homo sapien
ttcagtgctaacctcacgagaagct

SEQ ID NO: 5745337 - DNA, 25 bp, Homo sapien
atctggaagccagacattgtgctgt

SEQ ID NO: 5745338 - DNA, 25 bp, Homo sapien
gatggttcctgtcctcccgcgggtc

SEQ ID NO: 5745339 - DNA, 25 bp, Homo sapien
ccgaggcccctctacggtgccgagc

SEQ ID NO: 5745340 - DNA, 25 bp, Homo sapien
cctctacggtgccgagctctcaaat

SEQ ID NO: 5745341 - DNA, 25 bp, Homo sapien
cggaaacctgggacagaaactgagt

SEQ ID NO: 5745342 - DNA, 25 bp, Homo sapien
cccctgccaggacgggatgtgtggt

SEQ ID NO: 5745343 - DNA, 25 bp, Homo sapien
cggatggttcctgtcctcccgcggg

SEQ ID NO: 5745344 - DNA, 25 bp, Homo sapien
cttggatacctccggccatctttaa

SEQ ID NO: 5745345 - DNA, 25 bp, Homo sapien
tgcgggagctgcacacgccccggaa

SEQ ID NO: 5745346 - DNA, 25 bp, Homo sapien
gacctggagccccttcccctaccgc

SEQ ID NO: 5745347 - DNA, 25 bp, Homo sapien
gtcggacgccgccggccggagcacc

SEQ ID NO: 5745348 - DNA, 25 bp, Homo sapien
ggccatcatcaaagccccaggctac

SEQ ID NO: 5745349 - DNA, 25 bp, Homo sapien
cgagctctcaaatctgaattgcttc

SEQ ID NO: 5745350 - DNA, 25 bp, Homo sapien
ccggcctgtagccaacgtgtctgac

SEQ ID NO: 5745351 - DNA, 25 bp, Homo sapien
gaacccctctgactatggtggggca

SEQ ID NO: 5745352 - DNA, 25 bp, Homo sapien
tacctccggccatctttaagagctc

SEQ ID NO: 5745353 - DNA, 25 bp, Homo sapien
tacgccccgccccgcgcacgcccgc

SEQ ID NO: 5745354 - DNA, 25 bp, Homo sapien
gatccaacaattgaaacgaaaagaa

SEQ ID NO: 5745355 - DNA, 25 bp, Homo sapien
tgggccatcatcaaagccccaggct

SEQ ID NO: 5745356 - DNA, 25 bp, Homo sapien
ggatgaagtaaaccagatcatggag

SEQ ID NO: 5745357 - DNA, 25 bp, Homo sapien
gaagttcggttcctggtcctacgat

SEQ ID NO: 5745358 - DNA, 25 bp, Homo sapien
catgttcatgaccaggccaacaagc

SEQ ID NO: 5745359 - DNA, 25 bp, Homo sapien
gtgccgagctctcaaatctgaattg

SEQ ID NO: 5745360 - DNA, 25 bp, Homo sapien
gctcaacgtgcactacagaaccccg

SEQ ID NO: 5745361 - DNA, 25 bp, Homo sapien
tttccaatcttcaacaacctgttag

SEQ ID NO: 5745362 - DNA, 25 bp, Homo sapien
ccaccagccatgggctctggcccgc

SEQ ID NO: 5745363 - DNA, 25 bp, Homo sapien
tccgactgcggtgagaaggtgaccc

SEQ ID NO: 5745364 - DNA, 25 bp, Homo sapien
tcatcaccgtcttcgtgctcaacgt

SEQ ID NO: 5745365 - DNA, 25 bp, Homo sapien
tctctgctgccagtggccagggcct

SEQ ID NO: 5745366 - DNA, 25 bp, Homo sapien
accatgatttttgtaaccttgtcca

SEQ ID NO: 5745367 - DNA, 25 bp, Homo sapien
ccgccgcggctgctgctgctgctgc

SEQ ID NO: 5745368 - DNA, 25 bp, Homo sapien
agtacaactgctgcgaggagatcta

SEQ ID NO: 5745369 - DNA, 25 bp, Homo sapien
tccctgcacagaagatctggaagcc

SEQ ID NO: 5745370 - DNA, 25 bp, Homo sapien
aggctgagcaccgtctatttgagcg

SEQ ID NO: 5745371 - DNA, 25 bp, Homo sapien
ccaacaagcaacgagggcaacgctc

SEQ ID NO: 5745372 - DNA, 25 bp, Homo sapien
ggtccgcggccagcccggccaccag

SEQ ID NO: 5745373 - DNA, 25 bp, Homo sapien
gggagaggccgtctctgcgaccgcc

SEQ ID NO: 5745374 - DNA, 25 bp, Homo sapien
atcttcaacaacctgttaggaaaaa

SEQ ID NO: 5745375 - DNA, 25 bp, Homo sapien
ggcgcctgcccttgttctacaccat

SEQ ID NO: 5745376 - DNA, 25 bp, Homo sapien
tgtagccaacgtgtctgacccagtc

SEQ ID NO: 5745377 - DNA, 25 bp, Homo sapien
agccgaggcccctctacggtgccga

SEQ ID NO: 5745378 - DNA, 25 bp, Homo sapien
cccgcgcacgcccgcccgcccgccc

SEQ ID NO: 5745379 - DNA, 25 bp, Homo sapien
ccccctgattggagagtacctcctg

SEQ ID NO: 5745380 - DNA, 25 bp, Homo sapien
tgctcgtcttctacctgccctccga

SEQ ID NO: 5745381 - DNA, 25 bp, Homo sapien
tgggctctggcccgctctcgctgcc

SEQ ID NO: 5745382 - DNA, 25 bp, Homo sapien
cggagaggagccccgcgcgtctccg

SEQ ID NO: 5745383 - DNA, 25 bp, Homo sapien
cccgacatcacatactcgctgtaca

SEQ ID NO: 5745384 - DNA, 25 bp, Homo sapien
cgccgccggccggagcacccagccc

SEQ ID NO: 5745385 - DNA, 25 bp, Homo sapien
tgccctcatgggtgaagactgtatt

SEQ ID NO: 5745386 - DNA, 25 bp, Homo sapien
gagtccaaaggctgcaaggagggct

SEQ ID NO: 5745387 - DNA, 25 bp, Homo sapien
tctggtcggacgccgccggccggag

SEQ ID NO: 5745388 - DNA, 25 bp, Homo sapien
gaaggtggatgaagtaaaccagatc

SEQ ID NO: 5745389 - DNA, 25 bp, Homo sapien
ttctcctggtgatcactgagaccat

SEQ ID NO: 5745390 - DNA, 25 bp, Homo sapien
ctggcccgctctcgctgcccctggc

SEQ ID NO: 5745391 - DNA, 25 bp, Homo sapien
tatattgctgaaaatatgaaagcac

SEQ ID NO: 5745392 - DNA, 25 bp, Homo sapien
gccccttcccctaccgcacgtacgc

SEQ ID NO: 5745393 - DNA, 25 bp, Homo sapien
gccgagctctcaaatctgaattgct

SEQ ID NO: 5745394 - DNA, 25 bp, Homo sapien
gcgtctctcctacggcgcccgccta

SEQ ID NO: 5745395 - DNA, 25 bp, Homo sapien
ctggtcctacgataaggcgaaaatc

SEQ ID NO: 5745396 - DNA, 25 bp, Homo sapien
cgcgcacgcccgcccgcccgcccgc

SEQ ID NO: 5745397 - DNA, 25 bp, Homo sapien
attcttgaacctgctccccagggtc

SEQ ID NO: 5745398 - DNA, 25 bp, Homo sapien
gtcctcccgcgggtccgagggcgct

SEQ ID NO: 5745399 - DNA, 25 bp, Homo sapien
tcaagaacctgggctatgaatttcc

SEQ ID NO: 5745400 - DNA, 25 bp, Homo sapien
aaaatgaagccaaagaggaacaaaa

SEQ ID NO: 5745401 - DNA, 25 bp, Homo sapien
ggcctcagaggctgagcaccgtcta

SEQ ID NO: 5745402 - DNA, 25 bp, Homo sapien
gccggagcacccagcccggcggaga

SEQ ID NO: 5745403 - DNA, 25 bp, Homo sapien
acctcacgagaagctctagttctga

SEQ ID NO: 5745404 - DNA, 25 bp, Homo sapien
accaggccaacaagcaacgagggca

SEQ ID NO: 5745405 - DNA, 25 bp, Homo sapien
cgcgcggggagaggccgtctctgcg

SEQ ID NO: 5745406 - DNA, 25 bp, Homo sapien
tccctctctgctttgtcaccagaaa

SEQ ID NO: 5745407 - DNA, 25 bp, Homo sapien
ccatccaaagtgtcaagtatattgc

SEQ ID NO: 5745408 - DNA, 25 bp, Homo sapien
caccgtctatttgagcggctgtttg

SEQ ID NO: 5745409 - DNA, 25 bp, Homo sapien
ccctcatgggtgaagactgtattct

SEQ ID NO: 5745410 - DNA, 25 bp, Homo sapien
gctgagcaccgtctatttgagcggc

SEQ ID NO: 5745411 - DNA, 25 bp, Homo sapien
gcatttctgtcctcctctccctgac

SEQ ID NO: 5745412 - DNA, 25 bp, Homo sapien
gtccacagaaacatccgatcaagaa

SEQ ID NO: 5745413 - DNA, 25 bp, Homo sapien
tgttctacaccatcaacctcatcat

SEQ ID NO: 5745414 - DNA, 25 bp, Homo sapien
aaggagctcgcccggcgctggggac

SEQ ID NO: 5745415 - DNA, 25 bp, Homo sapien
catgggctctggcccgctctcgctg

SEQ ID NO: 5745416 - DNA, 25 bp, Homo sapien
cctgtaaaatcgacgtgacctactt

SEQ ID NO: 5745417 - DNA, 25 bp, Homo sapien
aagaagccatccaaagtgtcaagta

SEQ ID NO: 5745418 - DNA, 25 bp, Homo sapien
ttactcaagtacactggggaggtga

SEQ ID NO: 5745419 - DNA, 25 bp, Homo sapien
gtcaccagaaatcaaagaagccatc

SEQ ID NO: 5745420 - DNA, 25 bp, Homo sapien
gccgcgcccgctcccgaccgtccgg

SEQ ID NO: 5745421 - DNA, 25 bp, Homo sapien
ctgccagtggccagggcctcagagg

SEQ ID NO: 5745422 - DNA, 25 bp, Homo sapien
agagttcatgcgtgtccctgcacag

SEQ ID NO: 5745423 - DNA, 25 bp, Homo sapien
cggtgagaaggtgaccctgtgcatt

SEQ ID NO: 5745424 - DNA, 25 bp, Homo sapien
ctgacccagtcatcatccatttcga

SEQ ID NO: 5745425 - DNA, 25 bp, Homo sapien
ccatgaagttcggttcctggtccta

SEQ ID NO: 5745426 - DNA, 25 bp, Homo sapien
ctgggctatgaatttccaatcttca

SEQ ID NO: 5745427 - DNA, 25 bp, Homo sapien
ggcgctgtcgccgccgcggctgctg

SEQ ID NO: 5745428 - DNA, 25 bp, Homo sapien
gcgaagcggagaggagccccgcgcg

SEQ ID NO: 5745429 - DNA, 25 bp, Homo sapien
ggccaccagccatgggctctggccc

SEQ ID NO: 5745430 - DNA, 25 bp, Homo sapien
ctcttccatgaacctcaaggactat

SEQ ID NO: 5745431 - DNA, 25 bp, Homo sapien
tcatccatttcgaggtgtccatgtc

SEQ ID NO: 5745432 - DNA, 25 bp, Homo sapien
tgttcatgaccaggccaacaagcaa

SEQ ID NO: 5745433 - DNA, 25 bp, Homo sapien
tcactccggatggttcctgtcctcc

SEQ ID NO: 5745434 - DNA, 25 bp, Homo sapien
aatgctgttggggatttccaggtgg

SEQ ID NO: 5745435 - DNA, 25 bp, Homo sapien
ggagctgcacacgccccggaaacct

SEQ ID NO: 5745436 - DNA, 25 bp, Homo sapien
gccgcgcagagtccaaaggctgcaa

SEQ ID NO: 5745437 - DNA, 25 bp, Homo sapien
cacgacatcaagtacaactgctgcg

SEQ ID NO: 5745438 - DNA, 25 bp, Homo sapien
aagccaaagaggaacaaaaagccca

SEQ ID NO: 5745439 - DNA, 25 bp, Homo sapien
ctcgcccggcgctggggactgggac

SEQ ID NO: 5745440 - DNA, 25 bp, Homo sapien
ccctgattggagagtacctcctgtt

SEQ ID NO: 5745441 - DNA, 25 bp, Homo sapien
ggagagtacctcctgttcaccatga

SEQ ID NO: 5745442 - DNA, 25 bp, Homo sapien
ctgctccccagggtcatgttcatga

SEQ ID NO: 5745443 - DNA, 25 bp, Homo sapien
cctgggacagaaactgagtccctct

SEQ ID NO: 5745444 - DNA, 25 bp, Homo sapien
ctccgcccgcacggctccaggtctg

SEQ ID NO: 5745445 - DNA, 25 bp, Homo sapien
aggctacaaacacgacatcaagtac

SEQ ID NO: 5745446 - DNA, 25 bp, Homo sapien
ctccaggtctggggtctgcgctgga

SEQ ID NO: 5745447 - DNA, 25 bp, Homo sapien
tggtcggacgccgccggccggagca

SEQ ID NO: 5745448 - DNA, 25 bp, Homo sapien
ggtctgcgctggagccgcgcgggga

SEQ ID NO: 5745449 - DNA, 25 bp, Homo sapien
tccggatggttcctgtcctcccgcg

SEQ ID NO: 5745450 - DNA, 25 bp, Homo sapien
tggatgatgactgggtcagacacgt

SEQ ID NO: 5745451 - DNA, 25 bp, Homo sapien
tgcggtggtggcagtaaccacacat

SEQ ID NO: 5745452 - DNA, 25 bp, Homo sapien
gtttcaattgttggatctcttgggc

SEQ ID NO: 5745453 - DNA, 25 bp, Homo sapien
gaaattggagatttttatcctgcgg

SEQ ID NO: 5745454 - DNA, 25 bp, Homo sapien
acatgaccctggggagcaggttcaa

SEQ ID NO: 5745455 - DNA, 25 bp, Homo sapien
aattggagatttttatcctgcggtg

SEQ ID NO: 5745456 - DNA, 25 bp, Homo sapien
tgaggttgatggtgtagaacaaggg

SEQ ID NO: 5745457 - DNA, 25 bp, Homo sapien
tttgatgatggcccactcgccgctc

SEQ ID NO: 5745458 - DNA, 25 bp, Homo sapien
agtgaggaaggagatgagcaggcag

SEQ ID NO: 5745459 - DNA, 25 bp, Homo sapien
acaggagctcttaaagatggccgga

SEQ ID NO: 5745460 - DNA, 25 bp, Homo sapien
cgcagcagttgtacttgatgtcgtg

SEQ ID NO: 5745461 - DNA, 25 bp, Homo sapien
gcgcagaccccagacctggagccgt

SEQ ID NO: 5745462 - DNA, 25 bp, Homo sapien
ggcaccgtagaggggcctcggcttc

SEQ ID NO: 5745463 - DNA, 25 bp, Homo sapien
gtagtcattccagatttgcttgagc

SEQ ID NO: 5745464 - DNA, 25 bp, Homo sapien
tcttcaaacagccgctcaaatagac

SEQ ID NO: 5745465 - DNA, 25 bp, Homo sapien
ccagcgccctcggacccgcgggagg

SEQ ID NO: 5745466 - DNA, 25 bp, Homo sapien
tacttgagtaaggctttggtcttgt

SEQ ID NO: 5745467 - DNA, 25 bp, Homo sapien
gtgctcagcctctgaggccctggcc

SEQ ID NO: 5745468 - DNA, 25 bp, Homo sapien
aggggtagccctccttgcagccttt

SEQ ID NO: 5745469 - DNA, 25 bp, Homo sapien
gaggggttccatttcagcttgtagt

SEQ ID NO: 5745470 - DNA, 25 bp, Homo sapien
tgatctcattgtaatcttcaaacag

SEQ ID NO: 5745471 - DNA, 25 bp, Homo sapien
agccctccttgcagcctttggactc

SEQ ID NO: 5745472 - DNA, 25 bp, Homo sapien
ccgaacttcatggtacagttttggt

SEQ ID NO: 5745473 - DNA, 25 bp, Homo sapien
tggatggcttctttgatttctggtg

SEQ ID NO: 5745474 - DNA, 25 bp, Homo sapien
ctccttgcagcctttggactctgcg

SEQ ID NO: 5745475 - DNA, 25 bp, Homo sapien
cgttggctacaggccggatgatctc

SEQ ID NO: 5745476 - DNA, 25 bp, Homo sapien
cggatgatctcattgtaatcttcaa

SEQ ID NO: 5745477 - DNA, 25 bp, Homo sapien
ttcaccagctgagacatggacacct

SEQ ID NO: 5745478 - DNA, 25 bp, Homo sapien
gactgggtcagacacgttggctaca

SEQ ID NO: 5745479 - DNA, 25 bp, Homo sapien
cacgtcgattttacaggagctctta

SEQ ID NO: 5745480 - DNA, 25 bp, Homo sapien
ttttatcctgcggtggtggcagtaa

SEQ ID NO: 5745481 - DNA, 25 bp, Homo sapien
tgttggatctcttgggctttttgtt

SEQ ID NO: 5745482 - DNA, 25 bp, Homo sapien
cgctctcccaatagtccttgaggtt

SEQ ID NO: 5745483 - DNA, 25 bp, Homo sapien
tcctaacaggttgttgaagattgga

SEQ ID NO: 5745484 - DNA, 25 bp, Homo sapien
gaagcaattcagatttgagagctcg

SEQ ID NO: 5745485 - DNA, 25 bp, Homo sapien
cacaatgtctggcttccagatcttc

SEQ ID NO: 5745486 - DNA, 25 bp, Homo sapien
atcagggggatgaccagcgaggtgg

SEQ ID NO: 5745487 - DNA, 25 bp, Homo sapien
gagccgtgcgggcggagacgcgcgg

SEQ ID NO: 5745488 - DNA, 25 bp, Homo sapien
gtgcagggacacgcatgaactctgc

SEQ ID NO: 5745489 - DNA, 25 bp, Homo sapien
tgcagctcccgcagggggttgggac

SEQ ID NO: 5745490 - DNA, 25 bp, Homo sapien
catattttcagcaatatacttgaca

SEQ ID NO: 5745491 - DNA, 25 bp, Homo sapien
gccactggcagcagagacagcagca

SEQ ID NO: 5745492 - DNA, 25 bp, Homo sapien
gggcgtgcgcggggcggggcgtacg

SEQ ID NO: 5745493 - DNA, 25 bp, Homo sapien
tcatggtgaacaggaggtactctcc

SEQ ID NO: 5745494 - DNA, 25 bp, Homo sapien
gcgcggggcggggcgtacgtgcggt

SEQ ID NO: 5745495 - DNA, 25 bp, Homo sapien
ctcaaatagacggtgctcagcctct

SEQ ID NO: 5745496 - DNA, 25 bp, Homo sapien
ttcaattgttggatctcttgggctt

SEQ ID NO: 5745497 - DNA, 25 bp, Homo sapien
gcaggcgccggatgtacagcgagta

SEQ ID NO: 5745498 - DNA, 25 bp, Homo sapien
tgccccaccatagtcagaggggttc

SEQ ID NO: 5745499 - DNA, 25 bp, Homo sapien
ttaaagatggccggaggtatccaag

SEQ ID NO: 5745500 - DNA, 25 bp, Homo sapien
caccgtcagggagaggaggacagaa

SEQ ID NO: 5745501 - DNA, 25 bp, Homo sapien
tctcgtgaggttagcactgaaattg

SEQ ID NO: 5745502 - DNA, 25 bp, Homo sapien
cttttcgtttcaattgttggatctc

SEQ ID NO: 5745503 - DNA, 25 bp, Homo sapien
tccttctccgccgggctgggtgctc

SEQ ID NO: 5745504 - DNA, 25 bp, Homo sapien
tgagtaaggctttggtcttgtcgtc

SEQ ID NO: 5745505 - DNA, 25 bp, Homo sapien
aagtaggtcacgtcgattttacagg

SEQ ID NO: 5745506 - DNA, 25 bp, Homo sapien
ttttcagcaatatacttgacacttt

SEQ ID NO: 5745507 - DNA, 25 bp, Homo sapien
ccgcttcgccgccgctgggtttcca

SEQ ID NO: 5745508 - DNA, 25 bp, Homo sapien
acactttggatggcttctttgattt

SEQ ID NO: 5745509 - DNA, 25 bp, Homo sapien
cagcagccgcggcggcgacagcgcc

SEQ ID NO: 5745510 - DNA, 25 bp, Homo sapien
cgtgcgggcggagacgcgcggggct

SEQ ID NO: 5745511 - DNA, 25 bp, Homo sapien
agggactcagtttctgtcccaggtt

SEQ ID NO: 5745512 - DNA, 25 bp, Homo sapien
tcagtttctgtcccaggtttccggg

SEQ ID NO: 5745513 - DNA, 25 bp, Homo sapien
ctctttggcttcattttgtgctttc

SEQ ID NO: 5745514 - DNA, 25 bp, Homo sapien
caaaaatcatggtgaacaggaggta

SEQ ID NO: 5745515 - DNA, 25 bp, Homo sapien
gtagaggggcctcggcttctgagcg

SEQ ID NO: 5745516 - DNA, 25 bp, Homo sapien
aagctgcgccaggcgcgggcgggcg

SEQ ID NO: 5745517 - DNA, 25 bp, Homo sapien
atgtctggcttccagatcttctgtg

SEQ ID NO: 5745518 - DNA, 25 bp, Homo sapien
cacacatcccgtcctggcaggggta

SEQ ID NO: 5745519 - DNA, 25 bp, Homo sapien
aaatccccaacagcattgttataca

SEQ ID NO: 5745520 - DNA, 25 bp, Homo sapien
tccaccttcaccagctgagacatgg

SEQ ID NO: 5745521 - DNA, 25 bp, Homo sapien
agacgagcacagtgaggaaggagat

SEQ ID NO: 5745522 - DNA, 25 bp, Homo sapien
ttcttgatcggatgtttctgtggac

SEQ ID NO: 5745523 - DNA, 25 bp, Homo sapien
gaggtggaagggatggtctcagtga

SEQ ID NO: 5745524 - DNA, 25 bp, Homo sapien
gagctcttaaagatggccggaggta

SEQ ID NO: 5745525 - DNA, 25 bp, Homo sapien
caattcagatttgagagctcggcac

SEQ ID NO: 5745526 - DNA, 25 bp, Homo sapien
gattttcgccttatcgtaggaccag

SEQ ID NO: 5745527 - DNA, 25 bp, Homo sapien
attcatagcccaggttcttgatcgg

SEQ ID NO: 5745528 - DNA, 25 bp, Homo sapien
gagagctcggcaccgtagaggggcc

SEQ ID NO: 5745529 - DNA, 25 bp, Homo sapien
ctggtcatgaacatgaccctgggga

SEQ ID NO: 5745530 - DNA, 25 bp, Homo sapien
gaacaagggcaggcgccggatgtac

SEQ ID NO: 5745531 - DNA, 25 bp, Homo sapien
gggtagccctccttgcagcctttgg

SEQ ID NO: 5745532 - DNA, 25 bp, Homo sapien
cgttgcttgttggcctggtcatgaa

SEQ ID NO: 5745533 - DNA, 25 bp, Homo sapien
aaggggctccaggtcccagtcccca

SEQ ID NO: 5745534 - DNA, 25 bp, Homo sapien
ggaccagatcgattttcgccttatc

SEQ ID NO: 5745535 - DNA, 25 bp, Homo sapien
agtaaggctttggtcttgtcgtcca

SEQ ID NO: 5745536 - DNA, 25 bp, Homo sapien
ctctgcgcggctgaagcaattcaga

SEQ ID NO: 5745537 - DNA, 25 bp, Homo sapien
atgtgatgtcggggtagatctcctc

SEQ ID NO: 5745538 - DNA, 25 bp, Homo sapien
gagacgcgcggggctcctctccgct

SEQ ID NO: 5745539 - DNA, 25 bp, Homo sapien
tcgtgaggttagcactgaaattgga

SEQ ID NO: 5745540 - DNA, 25 bp, Homo sapien
ggaaccgaacttcatggtacagttt

SEQ ID NO: 5745541 - DNA, 25 bp, Homo sapien
agattcagaactagagcttctcgtg

SEQ ID NO: 5745542 - DNA, 25 bp, Homo sapien
gccagagcccatggctggtggccgg

SEQ ID NO: 5745543 - DNA, 25 bp, Homo sapien
accaggaaggagagggactcagttt

SEQ ID NO: 5745544 - DNA, 25 bp, Homo sapien
tgagcacgaagacggtgatgacgat

SEQ ID NO: 5745545 - DNA, 25 bp, Homo sapien
agatggccggaggtatccaagtcac

SEQ ID NO: 5745546 - DNA, 25 bp, Homo sapien
aagcagagagggacagcacagcatc

SEQ ID NO: 5745547 - DNA, 25 bp, Homo sapien
agggatggtctcagtgatcaccagg

SEQ ID NO: 5745548 - DNA, 25 bp, Homo sapien
gagacggcctctccccgcgcggctc

SEQ ID NO: 5745549 - DNA, 25 bp, Homo sapien
tgaccagcgaggtggaagggatggt

SEQ ID NO: 5745550 - DNA, 25 bp, Homo sapien
ctcgttgcttgttggcctggtcatg

SEQ ID NO: 5745551 - DNA, 25 bp, Homo sapien
ttatcctgcggtggtggcagtaacc

SEQ ID NO: 5745552 - DNA, 25 bp, Homo sapien
ccagcgccgggcgagctccttctcc

SEQ ID NO: 5745553 - DNA, 25 bp, Homo sapien
accacacatcccgtcctggcagggg

SEQ ID NO: 5745554 - DNA, 25 bp, Homo sapien
ttgtagtcattccagatttgcttga

SEQ ID NO: 5745555 - DNA, 25 bp, Homo sapien
aggcgccggatgtacagcgagtatg

SEQ ID NO: 5745556 - DNA, 25 bp, Homo sapien
atttgagagctcggcaccgtagagg

SEQ ID NO: 5745557 - DNA, 25 bp, Homo sapien
cagatttgcttgagccacaggttgg

SEQ ID NO: 5745558 - DNA, 25 bp, Homo sapien
ctcggcttctgagcgttgccctcgt

SEQ ID NO: 5745559 - DNA, 25 bp, Homo sapien
gctcctctccgcttcgccgccgctg

SEQ ID NO: 5745560 - DNA, 25 bp, Homo sapien
gatgaggttgatggtgtagaacaag

SEQ ID NO: 5745561 - DNA, 25 bp, Homo sapien
gggatgaccagcgaggtggaaggga

SEQ ID NO: 5745562 - DNA, 25 bp, Homo sapien
ctccccagtgtacttgagtaaggct

SEQ ID NO: 5745563 - DNA, 25 bp, Homo sapien
cacctcgaaatggatgatgactggg

SEQ ID NO: 5745564 - DNA, 25 bp, Homo sapien
tgtcgtcggggttctgtagtgcacg

SEQ ID NO: 5745565 - DNA, 25 bp, Homo sapien
ctctcccaatagtccttgaggttca

SEQ ID NO: 5745566 - DNA, 25 bp, Homo sapien
ggtagatctcctcgcagcagttgta

SEQ ID NO: 5745567 - DNA, 25 bp, Homo sapien
cggggttctgtagtgcacgttgagc

SEQ ID NO: 5745568 - DNA, 25 bp, Homo sapien
ccttcaccagctgagacatggacac

SEQ ID NO: 5745569 - DNA, 25 bp, Homo sapien
acacgcatgaactctgccccaccat

SEQ ID NO: 5745570 - DNA, 25 bp, Homo sapien
catggacacctcgaaatggatgatg

SEQ ID NO: 5745571 - DNA, 25 bp, Homo sapien
ttatacagcacaatgtctggcttcc

SEQ ID NO: 5745572 - DNA, 25 bp, Homo sapien
agagggactcagtttctgtcccagg

SEQ ID NO: 5745573 - DNA, 25 bp, Homo sapien
caccgggctaggcgggcgccgtagg

SEQ ID NO: 5745574 - DNA, 25 bp, Homo sapien
gcagagacagcagcagcagcagcag

SEQ ID NO: 5745575 - DNA, 25 bp, Homo sapien
gtgtttgtagcctggggctttgatg

SEQ ID NO: 5745576 - DNA, 25 bp, Homo sapien
tcgaaatggatgatgactgggtcag

SEQ ID NO: 5745577 - DNA, 25 bp, Homo sapien
ccatccggagtgaagctgcgccagg

SEQ ID NO: 5745578 - DNA, 25 bp, Homo sapien
ccatgatctggtttacttcatccac

SEQ ID NO: 5745579 - DNA, 25 bp, Homo sapien
acgagcacagtgaggaaggagatga

SEQ ID NO: 5745580 - DNA, 25 bp, Homo sapien
tcgtccacctggaaatccccaacag

SEQ ID NO: 5745581 - DNA, 25 bp, Homo sapien
tggtctccatgatctggtttacttc

SEQ ID NO: 5745582 - DNA, 25 bp, Homo sapien
tggtcttgtcgtccacctggaaatc

SEQ ID NO: 5745583 - DNA, 25 bp, Homo sapien
gatgtcgtgtttgtagcctggggct

SEQ ID NO: 5745584 - DNA, 25 bp, Homo sapien
ctggcagcagagacagcagcagcag

SEQ ID NO: 5745585 - DNA, 25 bp, Homo sapien
gtgctttcatattttcagcaatata

SEQ ID NO: 5745586 - DNA, 25 bp, Homo sapien
agcctggggctttgatgatggccca

SEQ ID NO: 5745587 - DNA, 25 bp, Homo sapien
ctgagcgttgccctcgttgcttgtt

SEQ ID NO: 5745588 - DNA, 25 bp, Homo sapien
cttgacactttggatggcttctttg

SEQ ID NO: 5745589 - DNA, 25 bp, Homo sapien
cggtcgcagagacggcctctccccg

SEQ ID NO: 5745590 - DNA, 25 bp, Homo sapien
aactagagcttctcgtgaggttagc

SEQ ID NO: 5745591 - DNA, 25 bp, Homo sapien
gagagacgctaacacaccctgggaa

SEQ ID NO: 5745592 - DNA, 25 bp, Homo sapien
cgccttatcgtaggaccaggaaccg

SEQ ID NO: 5745593 - DNA, 25 bp, Homo sapien
cttgggctttttgttcctctttggc

SEQ ID NO: 5745594 - DNA, 25 bp, Homo sapien
ggaggtactctccaatcagggggat

SEQ ID NO: 5745595 - DNA, 25 bp, Homo sapien
ttccagcgccctcggacccgcggga

SEQ ID NO: 5745596 - DNA, 25 bp, Homo sapien
ttctgagcgttgccctcgttgcttg

SEQ ID NO: 5745597 - DNA, 25 bp, Homo sapien
gcgccggatgtacagcgagtatgtg

SEQ ID NO: 5745598 - DNA, 25 bp, Homo sapien
ggatggtctcagtgatcaccaggag

SEQ ID NO: 5745599 - DNA, 25 bp, Homo sapien
gtgatgacgatggacaaggttacaa

SEQ ID NO: 5745600 - DNA, 25 bp, Homo sapien
cccgcgcggctccagcgcagacccc

SEQ ID NO: 5745601 - DNA, 25 bp, Homo sapien
ggcgggcgccgtaggagagacgcta

SEQ ID NO: 5745602 - DNA, 25 bp, Homo sapien
gcttgtagtcattccagatttgctt

SEQ ID NO: 5745603 - DNA, 25 bp, Homo sapien
tgccctcgttgcttgttggcctggt

SEQ ID NO: 5745604 - DNA, 25 bp, Homo sapien
taggcgggcgccgtaggagagacgc

SEQ ID NO: 5745605 - DNA, 25 bp, Homo sapien
gatgacgatggacaaggttacaaaa

SEQ ID NO: 5745606 - DNA, 25 bp, Homo sapien
ttatcgtaggaccaggaaccgaact

SEQ ID NO: 5745607 - DNA, 25 bp, Homo sapien
ccatggctggtggccgggctggccg

SEQ ID NO: 5745608 - DNA, 25 bp, Homo sapien
gacggcctctccccgcgcggctcca

SEQ ID NO: 5745609 - DNA, 25 bp, Homo sapien
ggaggacaggaaccatccggagtga

SEQ ID NO: 5745610 - DNA, 25 bp, Homo sapien
ccagctgagacatggacacctcgaa

SEQ ID NO: 5745611 - DNA, 25 bp, Homo sapien
agtccttgaggttcatggaagagcc

SEQ ID NO: 5745612 - DNA, 25 bp, Homo sapien
cctggcaggggtagccctccttgca

SEQ ID NO: 5745613 - DNA, 25 bp, Homo sapien
tccagcgcagaccccagacctggag

SEQ ID NO: 5745614 - DNA, 25 bp, Homo sapien
cagcttgtagtcattccagatttgc

SEQ ID NO: 5745615 - DNA, 25 bp, Homo sapien
aggggcctcggcttctgagcgttgc

SEQ ID NO: 5745616 - DNA, 25 bp, Homo sapien
tccccgcgcggctccagcgcagacc

SEQ ID NO: 5745617 - DNA, 25 bp, Homo sapien
aggacagaaatgcacagggtcacct

SEQ ID NO: 5745618 - DNA, 25 bp, Homo sapien
ggttccatttcagcttgtagtcatt

SEQ ID NO: 5745619 - DNA, 25 bp, Homo sapien
gcgggcgggcgtgcgcggggcgggg

SEQ ID NO: 5745620 - DNA, 25 bp, Homo sapien
gcctggtcatgaacatgaccctggg

SEQ ID NO: 5745621 - DNA, 25 bp, Homo sapien
tgcgggcggagacgcgcggggctcc

SEQ ID NO: 5745622 - DNA, 25 bp, Homo sapien
ggccggaggtatccaagtcacctcc

SEQ ID NO: 5745623 - DNA, 25 bp, Homo sapien
tggtacagttttggtaatcaaacgg

SEQ ID NO: 5745624 - DNA, 25 bp, Homo sapien
cgaagacggtgatgacgatggacaa

SEQ ID NO: 5745625 - DNA, 25 bp, Homo sapien
ccaggtttccggggcgtgtgcagct

SEQ ID NO: 5745626 - DNA, 25 bp, Homo sapien
tgtgcagctcccgcagggggttggg

SEQ ID NO: 5745627 - DNA, 25 bp, Homo sapien
gacgctaacacaccctgggaaggac

SEQ ID NO: 5745628 - DNA, 25 bp, Homo sapien
gctgtcaccaccaccaggaaggaga

SEQ ID NO: 5745629 - DNA, 25 bp, Homo sapien
agatttgagagctcggcaccgtaga

SEQ ID NO: 5745630 - DNA, 25 bp, Homo sapien
gtaggagagacgctaacacaccctg

SEQ ID NO: 5745631 - DNA, 25 bp, Homo sapien
tagatctcctcgcagcagttgtact

SEQ ID NO: 5745632 - DNA, 25 bp, Homo sapien
gggagaggaggacagaaatgcacag

SEQ ID NO: 5745633 - DNA, 25 bp, Homo sapien
cgcgcggggctcctctccgcttcgc

SEQ ID NO: 5745634 - DNA, 25 bp, Homo sapien
agggacagcacagcatcaacagatt

SEQ ID NO: 5745635 - DNA, 25 bp, Homo sapien
gcagagagggacagcacagcatcaa

SEQ ID NO: 5745636 - DNA, 25 bp, Homo sapien
gggctggccgcggacccggacggtc

SEQ ID NO: 5745637 - DNA, 25 bp, Homo sapien
aacaccgtcagggagaggaggacag

SEQ ID NO: 5745638 - DNA, 25 bp, Homo sapien
gtgcgcggggcggggcgtacgtgcg

SEQ ID NO: 5745639 - DNA, 25 bp, Homo sapien
ggttcaagaatacagtcttcaccca

SEQ ID NO: 5745640 - DNA, 25 bp, Homo sapien
ggggttccatttcagcttgtagtca

SEQ ID NO: 5745641 - DNA, 25 bp, Homo sapien
gttacaaaaatcatggtgaacagga

SEQ ID NO: 5745642 - DNA, 25 bp, Homo sapien
tggccactggcagcagagacagcag

SEQ ID NO: 5745643 - DNA, 25 bp, Homo sapien
gtacttgatgtcgtgtttgtagcct

SEQ ID NO: 5745644 - DNA, 25 bp, Homo sapien
tcggggtagatctcctcgcagcagt

SEQ ID NO: 5745645 - DNA, 25 bp, Homo sapien
acaggttggtctccatgatctggtt

SEQ ID NO: 5745646 - DNA, 25 bp, Homo sapien
gaggttagcactgaaattggagatt

SEQ ID NO: 5745647 - DNA, 25 bp, Homo sapien
ggggtagatctcctcgcagcagttg

SEQ ID NO: 5745648 - DNA, 25 bp, Homo sapien
ttacttcatccaccttcaccagctg

SEQ ID NO: 5745649 - DNA, 25 bp, Homo sapien
cagggtcaccttctcaccgcagtcg

SEQ ID NO: 5745650 - DNA, 25 bp, Homo sapien
ccctggggagcaggttcaagaatac

SEQ ID NO: 5745651 - DNA, 25 bp, Homo sapien
ccactcgccgctctcccaatagtcc

SEQ ID NO: 5745652 - DNA, 25 bp, Homo sapien
tgcacagggtcaccttctcaccgca

SEQ ID NO: 5745653 - DNA, 25 bp, Homo sapien
ggccggcggcgtccgaccagatctg

SEQ ID NO: 5745654 - DNA, 25 bp, Homo sapien
atagtccttgaggttcatggaagag

SEQ ID NO: 5745655 - DNA, 25 bp, Homo sapien
gaagacgagcacagtgaggaaggag

SEQ ID NO: 5745656 - DNA, 25 bp, Homo sapien
aaccatccggagtgaagctgcgcca

SEQ ID NO: 5745657 - DNA, 25 bp, Homo sapien
caaggttacaaaaatcatggtgaac

SEQ ID NO: 5745658 - DNA, 25 bp, Homo sapien
ggcttccagatcttctgtgcaggga

SEQ ID NO: 5745659 - DNA, 25 bp, Homo sapien
gatctcctcgcagcagttgtacttg

SEQ ID NO: 5745660 - DNA, 25 bp, Homo sapien
tgtgtgtcgtcggggttctgtagtg

SEQ ID NO: 5745661 - DNA, 25 bp, Homo sapien
ccggcggcgtccgaccagatctgag

SEQ ID NO: 5745662 - DNA, 25 bp, Homo sapien
tatccaagtcacctccccagtgtac

SEQ ID NO: 5745663 - DNA, 25 bp, Homo sapien
cggtggtggcagtaaccacacatcc

SEQ ID NO: 5745664 - DNA, 25 bp, Homo sapien
ggttagcactgaaattggagatttt

SEQ ID NO: 5745665 - DNA, 25 bp, Homo sapien
aggagaaacaccgtcagggagagga

SEQ ID NO: 5745666 - DNA, 25 bp, Homo sapien
acagcacaatgtctggcttccagat

SEQ ID NO: 5745667 - DNA, 25 bp, Homo sapien
ctccatgatctggtttacttcatcc

SEQ ID NO: 5745668 - DNA, 25 bp, Homo sapien
ttacaggagctcttaaagatggccg

SEQ ID NO: 5745669 - DNA, 25 bp, Homo sapien
ttggatctcttgggctttttgttcc

SEQ ID NO: 5745670 - DNA, 25 bp, Homo sapien
ccggacggtcgggagcgggcgcggc

SEQ ID NO: 5745671 - DNA, 25 bp, Homo sapien
gactctgcgcggctgaagcaattca

SEQ ID NO: 5745672 - DNA, 25 bp, Homo sapien
cagcaatatacttgacactttggat

SEQ ID NO: 5745673 - DNA, 25 bp, Homo sapien
gcggggcggggcgtacgtgcggtag

SEQ ID NO: 5745674 - DNA, 25 bp, Homo sapien
ctccgcttcgccgccgctgggtttc

SEQ ID NO: 5745675 - DNA, 25 bp, Homo sapien
ggatgatgaggttgatggtgtagaa

SEQ ID NO: 5745676 - DNA, 25 bp, Homo sapien
atttcagcttgtagtcattccagat

SEQ ID NO: 5745677 - DNA, 25 bp, Homo sapien
ttgtacttgatgtcgtgtttgtagc

SEQ ID NO: 5745678 - DNA, 25 bp, Homo sapien
gcatcaacagattcagaactagagc

SEQ ID NO: 5745679 - DNA, 25 bp, Homo sapien
ctacaggccggatgatctcattgta

SEQ ID NO: 5745680 - DNA, 25 bp, Homo sapien
cgtgtgcagctcccgcagggggttg

SEQ ID NO: 5745681 - DNA, 25 bp, Homo sapien
ggtagaagacgagcacagtgaggaa

SEQ ID NO: 5745682 - DNA, 25 bp, Homo sapien
tcgattttcgccttatcgtaggacc

SEQ ID NO: 5745683 - DNA, 25 bp, Homo sapien
cagaggggttccatttcagcttgta

SEQ ID NO: 5745684 - DNA, 25 bp, Homo sapien
gagatgagcaggcaggggatgatga

SEQ ID NO: 5745685 - DNA, 25 bp, Homo sapien
cgatcaggaccagatcgattttcgc

SEQ ID NO: 5745686 - DNA, 25 bp, Homo sapien
ggtcatgaacatgaccctggggagc

SEQ ID NO: 5745687 - DNA, 25 bp, Homo sapien
gacagcgccaggggcagcgagagcg

SEQ ID NO: 5745688 - DNA, 25 bp, Homo sapien
tccgccgggctgggtgctccggccg

SEQ ID NO: 5745689 - DNA, 25 bp, Homo sapien
ttgatttctggtgacaaagcagaga

SEQ ID NO: 5745690 - DNA, 25 bp, Homo sapien
ttgtaatcttcaaacagccgctcaa

SEQ ID NO: 5745691 - DNA, 25 bp, Homo sapien
aggttacaaaaatcatggtgaacag

SEQ ID NO: 5745692 - DNA, 25 bp, Homo sapien
tcgtcggggttctgtagtgcacgtt

SEQ ID NO: 5745693 - DNA, 25 bp, Homo sapien
cccagtccccagcgccgggcgagct

SEQ ID NO: 5745694 - DNA, 25 bp, Homo sapien
tggaagggatggtctcagtgatcac

SEQ ID NO: 5745695 - DNA, 25 bp, Homo sapien
tccagatcttctgtgcagggacacg

SEQ ID NO: 5745696 - DNA, 25 bp, Homo sapien
tttggactctgcgcggctgaagcaa

SEQ ID NO: 5745697 - DNA, 25 bp, Homo sapien
cgccgggcgagctccttctccgccg

SEQ ID NO: 5745698 - DNA, 25 bp, Homo sapien
acctccccagtgtacttgagtaagg

SEQ ID NO: 5745699 - DNA, 25 bp, Homo sapien
ccggaggtatccaagtcacctcccc

SEQ ID NO: 5745700 - DNA, 25 bp, Homo sapien
tcggagggcaggtagaagacgagca

SEQ ID NO: 5745701 - DNA, 25 bp, Homo sapien
gttggcctggtcatgaacatgaccc

SEQ ID NO: 5745702 - DNA, 25 bp, Homo sapien
tcggcaccgtagaggggcctcggct

SEQ ID NO: 5745703 - DNA, 25 bp, Homo sapien
ttgtgctttcatattttcagcaata

SEQ ID NO: 5745704 - DNA, 25 bp, Homo sapien
actctccaatcagggggatgaccag

SEQ ID NO: 5745705 - DNA, 25 bp, Homo sapien
gacagaaatgcacagggtcaccttc

SEQ ID NO: 5745706 - DNA, 25 bp, Homo sapien
gcgggcgggcgggcgggcgtgcgcg

SEQ ID NO: 5745707 - DNA, 25 bp, Homo sapien
caacagattcagaactagagcttct

SEQ ID NO: 5745708 - DNA, 25 bp, Homo sapien
tgaggaaggagatgagcaggcaggg

SEQ ID NO: 5745709 - DNA, 25 bp, Homo sapien
cgcgggaggacaggaaccatccgga

SEQ ID NO: 5745710 - DNA, 25 bp, Homo sapien
tattttcagcaatatacttgacact

SEQ ID NO: 5745711 - DNA, 25 bp, Homo sapien
ttttgttcctctttggcttcatttt

SEQ ID NO: 5745712 - DNA, 25 bp, Homo sapien
atttttatcctgcggtggtggcagt

SEQ ID NO: 5745713 - DNA, 25 bp, Homo sapien
ggttcttgatcggatgtttctgtgg

SEQ ID NO: 5745714 - DNA, 25 bp, Homo sapien
tgacgatggacaaggttacaaaaat

SEQ ID NO: 5745715 - DNA, 25 bp, Homo sapien
tacaaaaatcatggtgaacaggagg

SEQ ID NO: 5745716 - DNA, 25 bp, Homo sapien
gtccccagcgccgggcgagctcctt

SEQ ID NO: 5745717 - DNA, 25 bp, Homo sapien
ttcatccaccttcaccagctgagac

SEQ ID NO: 5745718 - DNA, 25 bp, Homo sapien
aggaaggagatgagcaggcagggga

SEQ ID NO: 5745719 - DNA, 25 bp, Homo sapien
aaagatggccggaggtatccaagtc

SEQ ID NO: 5745720 - DNA, 25 bp, Homo sapien
cagatcttctgtgcagggacacgca

SEQ ID NO: 5745721 - DNA, 25 bp, Homo sapien
taggaccaggaaccgaacttcatgg

SEQ ID NO: 5745722 - DNA, 25 bp, Homo sapien
cacagcatcaacagattcagaacta

SEQ ID NO: 5745723 - DNA, 25 bp, Homo sapien
tctcctcgcagcagttgtacttgat

SEQ ID NO: 5745724 - DNA, 25 bp, Homo sapien
gcgcggctgaagcaattcagatttg

SEQ ID NO: 5745725 - DNA, 25 bp, Homo sapien
tgatggtgtagaacaagggcaggcg

SEQ ID NO: 5745726 - DNA, 25 bp, Homo sapien
gagcacagtgaggaaggagatgagc

SEQ ID NO: 5745727 - DNA, 25 bp, Homo sapien
ttccatttcagcttgtagtcattcc

SEQ ID NO: 5745728 - DNA, 25 bp, Homo sapien
ccgggctaggcgggcgccgtaggag

SEQ ID NO: 5745729 - DNA, 25 bp, Homo sapien
ccccaccatagtcagaggggttcca

SEQ ID NO: 5745730 - DNA, 25 bp, Homo sapien
tgtcccaggtttccggggcgtgtgc

SEQ ID NO: 5745731 - DNA, 25 bp, Homo sapien
gacccgcgggaggacaggaaccatc

SEQ ID NO: 5745732 - DNA, 25 bp, Homo sapien
gacctggagccgtgcgggcggagac

SEQ ID NO: 5745733 - DNA, 25 bp, Homo sapien
gaacttcatggtacagttttggtaa

SEQ ID NO: 5745734 - DNA, 25 bp, Homo sapien
gcggcggcgacagcgccaggggcag

SEQ ID NO: 5745735 - DNA, 25 bp, Homo sapien
ctggggagcaggttcaagaatacag

SEQ ID NO: 5745736 - DNA, 25 bp, Homo sapien
tagaagacgagcacagtgaggaagg

SEQ ID NO: 5745737 - DNA, 25 bp, Homo sapien
gggcctcggcttctgagcgttgccc

SEQ ID NO: 5745738 - DNA, 25 bp, Homo sapien
tccagatttgcttgagccacaggtt

SEQ ID NO: 5745739 - DNA, 25 bp, Homo sapien
ggacagcacagcatcaacagattca

SEQ ID NO: 5745740 - DNA, 25 bp, Homo sapien
tggactctgcgcggctgaagcaatt

SEQ ID NO: 5745741 - DNA, 25 bp, Homo sapien
tggagccgtgcgggcggagacgcgc

SEQ ID NO: 5745742 - DNA, 25 bp, Homo sapien
cagcagcagcagccgcggcggcgac

SEQ ID NO: 5745743 - DNA, 25 bp, Homo sapien
gacccggacggtcgggagcgggcgc

SEQ ID NO: 5745744 - DNA, 25 bp, Homo sapien
ggaagagccgatcaggaccagatcg

SEQ ID NO: 5745745 - DNA, 25 bp, Homo sapien
cctggagccgtgcgggcggagacgc

SEQ ID NO: 5745746 - DNA, 25 bp, Homo sapien
gtactctccaatcagggggatgacc

SEQ ID NO: 5745747 - DNA, 25 bp, Homo sapien
acgatggacaaggttacaaaaatca

SEQ ID NO: 5745748 - DNA, 25 bp, Homo sapien
cagcagttgtacttgatgtcgtgtt

SEQ ID NO: 5745749 - DNA, 25 bp, Homo sapien
atgagggcattgtgtgtgtcgtcgg

SEQ ID NO: 5745750 - DNA, 25 bp, Homo sapien
ccaggagaaacaccgtcagggagag

SEQ ID NO: 5745751 - DNA, 25 bp, Homo sapien
caggaaccatccggagtgaagctgc

SEQ ID NO: 5745752 - DNA, 25 bp, Homo sapien
atgatctggtttacttcatccacct

SEQ ID NO: 5745753 - DNA, 25 bp, Homo sapien
ggggcagcgagagcgggccagagcc

SEQ ID NO: 5745754 - DNA, 25 bp, Homo sapien
gcttcgccgccgctgggtttccagc

SEQ ID NO: 5745755 - DNA, 25 bp, Homo sapien
caccgcagtcggagggcaggtagaa

SEQ ID NO: 5745756 - DNA, 25 bp, Homo sapien
agcaggcaggggatgatgaggttga

SEQ ID NO: 5745757 - DNA, 25 bp, Homo sapien
agaccccagacctggagccgtgcgg

SEQ ID NO: 5745758 - DNA, 25 bp, Homo sapien
ggactcagtttctgtcccaggtttc

SEQ ID NO: 5745759 - DNA, 25 bp, Homo sapien
gctgggtgctccggccggcggcgtc

SEQ ID NO: 5745760 - DNA, 25 bp, Homo sapien
gatgatgactgggtcagacacgttg

SEQ ID NO: 5745761 - DNA, 25 bp, Homo sapien
gccaggggcagcgagagcgggccag

SEQ ID NO: 5745762 - DNA, 25 bp, Homo sapien
gtttacttcatccaccttcaccagc

SEQ ID NO: 5745763 - DNA, 25 bp, Homo sapien
aatatacttgacactttggatggct

SEQ ID NO: 5745764 - DNA, 25 bp, Homo sapien
ccggccggcggcgtccgaccagatc

SEQ ID NO: 5745765 - DNA, 25 bp, Homo sapien
ccgtcctggcaggggtagccctcct

SEQ ID NO: 5745766 - DNA, 25 bp, Homo sapien
tttttcctaacaggttgttgaagat

SEQ ID NO: 5745767 - DNA, 25 bp, Homo sapien
gcagtcggagggcaggtagaagacg

SEQ ID NO: 5745768 - DNA, 25 bp, Homo sapien
gcgaggtggaagggatggtctcagt

SEQ ID NO: 5745769 - DNA, 25 bp, Homo sapien
ggtgaacaggaggtactctccaatc

SEQ ID NO: 5745770 - DNA, 25 bp, Homo sapien
tgtttctgtggacttttcttttcgt

SEQ ID NO: 5745771 - DNA, 25 bp, Homo sapien
ggctttttgttcctctttggcttca

SEQ ID NO: 5745772 - DNA, 25 bp, Homo sapien
gttcctctttggcttcattttgtgc

SEQ ID NO: 5745773 - DNA, 25 bp, Homo sapien
gggcaggcgccggatgtacagcgag

SEQ ID NO: 5745774 - DNA, 25 bp, Homo sapien
acagcacagcatcaacagattcaga

SEQ ID NO: 5745775 - DNA, 25 bp, Homo sapien
tgagccacaggttggtctccatgat

SEQ ID NO: 5745776 - DNA, 25 bp, Homo sapien
atagcccaggttcttgatcggatgt

SEQ ID NO: 5745777 - DNA, 25 bp, Homo sapien
ggtgtagaacaagggcaggcgccgg

SEQ ID NO: 5745778 - DNA, 25 bp, Homo sapien
ccttatcgtaggaccaggaaccgaa

SEQ ID NO: 5745779 - DNA, 25 bp, Homo sapien
tctgccccaccatagtcagaggggt

SEQ ID NO: 5745780 - DNA, 25 bp, Homo sapien
gccgtgcgggcggagacgcgcgggg

SEQ ID NO: 5745781 - DNA, 25 bp, Homo sapien
gaccctggggagcaggttcaagaat

SEQ ID NO: 5745782 - DNA, 25 bp, Homo sapien
actttggatggcttctttgatttct

SEQ ID NO: 5745783 - DNA, 25 bp, Homo sapien
tagaacaagggcaggcgccggatgt

SEQ ID NO: 5745784 - DNA, 25 bp, Homo sapien
cttgagccacaggttggtctccatg

SEQ ID NO: 5745785 - DNA, 25 bp, Homo sapien
caggaaggagagggactcagtttct

SEQ ID NO: 5745786 - DNA, 25 bp, Homo sapien
cgcgcggctccagcgcagaccccag

SEQ ID NO: 5745787 - DNA, 25 bp, Homo sapien
ggcggcgacagcgccaggggcagcg

SEQ ID NO: 5745788 - DNA, 25 bp, Homo sapien
accagatcgattttcgccttatcgt

SEQ ID NO: 5745789 - DNA, 25 bp, Homo sapien
aggctttggtcttgtcgtccacctg

SEQ ID NO: 5745790 - DNA, 25 bp, Homo sapien
tccaatcagggggatgaccagcgag

SEQ ID NO: 5745791 - DNA, 25 bp, Homo sapien
gacaaagcagagagggacagcacag

SEQ ID NO: 5745792 - DNA, 25 bp, Homo sapien
tggcaggggtagccctccttgcagc

SEQ ID NO: 5745793 - DNA, 25 bp, Homo sapien
cgggcgccgtaggagagacgctaac

SEQ ID NO: 5745794 - DNA, 25 bp, Homo sapien
caggtagaagacgagcacagtgagg

SEQ ID NO: 5745795 - DNA, 25 bp, Homo sapien
gatgtacagcgagtatgtgatgtcg

SEQ ID NO: 5745796 - DNA, 25 bp, Homo sapien
atctcttgggctttttgttcctctt

SEQ ID NO: 5745797 - DNA, 25 bp, Homo sapien
gggcgggcgggcgggcgtgcgcggg

SEQ ID NO: 5745798 - DNA, 25 bp, Homo sapien
gccgcggacccggacggtcgggagc

SEQ ID NO: 5745799 - DNA, 25 bp, Homo sapien
aaccgaacttcatggtacagttttg

SEQ ID NO: 5745800 - DNA, 25 bp, Homo sapien
ttcaaacagccgctcaaatagacgg

SEQ ID NO: 5745801 - DNA, 25 bp, Homo sapien
cggcgacagcgccaggggcagcgag

SEQ ID NO: 5745802 - DNA, 25 bp, Homo sapien
tctgaggccctggccactggcagca

SEQ ID NO: 5745803 - DNA, 25 bp, Homo sapien
cggcttctgagcgttgccctcgttg

SEQ ID NO: 5745804 - DNA, 25 bp, Homo sapien
gcggtaggggaaggggctccaggtc

SEQ ID NO: 5745805 - DNA, 25 bp, Homo sapien
ggaggacagaaatgcacagggtcac

SEQ ID NO: 5745806 - DNA, 25 bp, Homo sapien
tgtacttgagtaaggctttggtctt

SEQ ID NO: 5745807 - DNA, 25 bp, Homo sapien
tgggtgctccggccggcggcgtccg

SEQ ID NO: 5745808 - DNA, 25 bp, Homo sapien
gattggaaattcatagcccaggttc

SEQ ID NO: 5745809 - DNA, 25 bp, Homo sapien
ctttgatttctggtgacaaagcaga

SEQ ID NO: 5745810 - DNA, 25 bp, Homo sapien
gacacgttggctacaggccggatga

SEQ ID NO: 5745811 - DNA, 25 bp, Homo sapien
gcagcagcagccgcggcggcgacag

SEQ ID NO: 5745812 - DNA, 25 bp, Homo sapien
ctgaaattggagatttttatcctgc

SEQ ID NO: 5745813 - DNA, 25 bp, Homo sapien
atgaccctggggagcaggttcaaga

SEQ ID NO: 5745814 - DNA, 25 bp, Homo sapien
gtcaccttctcaccgcagtcggagg

SEQ ID NO: 5745815 - DNA, 25 bp, Homo sapien
agcactgaaattggagatttttatc

SEQ ID NO: 5745816 - DNA, 25 bp, Homo sapien
gttggtctccatgatctggtttact

SEQ ID NO: 5745817 - DNA, 25 bp, Homo sapien
tccaagtcacctccccagtgtactt

SEQ ID NO: 5745818 - DNA, 25 bp, Homo sapien
ccgccgctgggtttccagcgccctc

SEQ ID NO: 5745819 - DNA, 25 bp, Homo sapien
ttgttcctctttggcttcattttgt

SEQ ID NO: 5745820 - DNA, 25 bp, Homo sapien
attgttatacagcacaatgtctggc

SEQ ID NO: 5745821 - DNA, 25 bp, Homo sapien
actcgccgctctcccaatagtcctt

SEQ ID NO: 5745822 - DNA, 25 bp, Homo sapien
accatagtcagaggggttccatttc

SEQ ID NO: 5745823 - DNA, 25 bp, Homo sapien
ggagagggactcagtttctgtccca

SEQ ID NO: 5745824 - DNA, 25 bp, Homo sapien
tgaacaggaggtactctccaatcag

SEQ ID NO: 5745825 - DNA, 25 bp, Homo sapien
gcgggcgtgcgcggggcggggcgta

SEQ ID NO: 5745826 - DNA, 25 bp, Homo sapien
gggtttccagcgccctcggacccgc

SEQ ID NO: 5745827 - DNA, 25 bp, Homo sapien
gtgcggtaggggaaggggctccagg

SEQ ID NO: 5745828 - DNA, 25 bp, Homo sapien
gcgacagcgccaggggcagcgagag

SEQ ID NO: 5745829 - DNA, 25 bp, Homo sapien
gccgggctggccgcggacccggacg

SEQ ID NO: 5745830 - DNA, 25 bp, Homo sapien
agctgagacatggacacctcgaaat

SEQ ID NO: 5745831 - DNA, 25 bp, Homo sapien
caaatagacggtgctcagcctctga

SEQ ID NO: 5745832 - DNA, 25 bp, Homo sapien
attccagatttgcttgagccacagg

SEQ ID NO: 5745833 - DNA, 25 bp, Homo sapien
tttgcttgagccacaggttggtctc

SEQ ID NO: 5745834 - DNA, 25 bp, Homo sapien
agcagcagccgcggcggcgacagcg

SEQ ID NO: 5745835 - DNA, 25 bp, Homo sapien
cttccagatcttctgtgcagggaca

SEQ ID NO: 5745836 - DNA, 25 bp, Homo sapien
gctttggtcttgtcgtccacctgga

SEQ ID NO: 5745837 - DNA, 25 bp, Homo sapien
gtaggtcacgtcgattttacaggag

SEQ ID NO: 5745838 - DNA, 25 bp, Homo sapien
gacatggacacctcgaaatggatga

SEQ ID NO: 5745839 - DNA, 25 bp, Homo sapien
agcaggttcaagaatacagtcttca

SEQ ID NO: 5745840 - DNA, 25 bp, Homo sapien
gtcggggttctgtagtgcacgttga

SEQ ID NO: 5745841 - DNA, 25 bp, Homo sapien
caccgtagaggggcctcggcttctg

SEQ ID NO: 5745842 - DNA, 25 bp, Homo sapien
tctggtgacaaagcagagagggaca

SEQ ID NO: 5745843 - DNA, 25 bp, Homo sapien
tacagcgagtatgtgatgtcggggt

SEQ ID NO: 5745844 - DNA, 25 bp, Homo sapien
gggcgcggcggtcgcagagacggcc

SEQ ID NO: 5745845 - DNA, 25 bp, Homo sapien
agaggggcctcggcttctgagcgtt

SEQ ID NO: 5745846 - DNA, 25 bp, Homo sapien
ccggggcgtgtgcagctcccgcagg

SEQ ID NO: 5745847 - DNA, 25 bp, Homo sapien
aagagccgatcaggaccagatcgat

SEQ ID NO: 5745848 - DNA, 25 bp, Homo sapien
atggtctcagtgatcaccaggagaa

SEQ ID NO: 5745849 - DNA, 25 bp, Homo sapien
aacagccgctcaaatagacggtgct

SEQ ID NO: 5745850 - DNA, 25 bp, Homo sapien
tacttgacactttggatggcttctt

SEQ ID NO: 5745851 - DNA, 25 bp, Homo sapien
gttctgtagtgcacgttgagcacga

SEQ ID NO: 5745852 - DNA, 25 bp, Homo sapien
gggccagagcccatggctggtggcc

SEQ ID NO: 5745853 - DNA, 25 bp, Homo sapien
gagctccttctccgccgggctgggt

SEQ ID NO: 5745854 - DNA, 25 bp, Homo sapien
cgccgtaggagagacgctaacacac

SEQ ID NO: 5745855 - DNA, 25 bp, Homo sapien
agccacaggttggtctccatgatct

SEQ ID NO: 5745856 - DNA, 25 bp, Homo sapien
tgaggccctggccactggcagcaga

SEQ ID NO: 5745857 - DNA, 25 bp, Homo sapien
cagcgccaggggcagcgagagcggg

SEQ ID NO: 5745858 - DNA, 25 bp, Homo sapien
caggaccagatcgattttcgcctta

SEQ ID NO: 5745859 - DNA, 25 bp, Homo sapien
atctgagcaggtgctgtcaccacca

SEQ ID NO: 5745860 - DNA, 25 bp, Homo sapien
atggccggaggtatccaagtcacct

SEQ ID NO: 5745861 - DNA, 25 bp, Homo sapien
gtcagggagaggaggacagaaatgc

SEQ ID NO: 5745862 - DNA, 25 bp, Homo sapien
aggagatgagcaggcaggggatgat

SEQ ID NO: 5745863 - DNA, 25 bp, Homo sapien
tagtgcacgttgagcacgaagacgg

SEQ ID NO: 5745864 - DNA, 25 bp, Homo sapien
gtaatcttcaaacagccgctcaaat

SEQ ID NO: 5745865 - DNA, 25 bp, Homo sapien
tcatgaacatgaccctggggagcag

SEQ ID NO: 5745866 - DNA, 25 bp, Homo sapien
tttcctaacaggttgttgaagattg

SEQ ID NO: 5745867 - DNA, 25 bp, Homo sapien
cacatcccgtcctggcaggggtagc

SEQ ID NO: 5745868 - DNA, 25 bp, Homo sapien
ttctcaccgcagtcggagggcaggt

SEQ ID NO: 5745869 - DNA, 25 bp, Homo sapien
cagacctggagccgtgcgggcggag

SEQ ID NO: 5745870 - DNA, 25 bp, Homo sapien
gctaggcgggcgccgtaggagagac

SEQ ID NO: 5745871 - DNA, 25 bp, Homo sapien
gcagccgcggcggcgacagcgccag

SEQ ID NO: 5745872 - DNA, 25 bp, Homo sapien
ggggagcaggttcaagaatacagtc

SEQ ID NO: 5745873 - DNA, 25 bp, Homo sapien
cctcgaaatggatgatgactgggtc

SEQ ID NO: 5745874 - DNA, 25 bp, Homo sapien
atgatggcccactcgccgctctccc

SEQ ID NO: 5745875 - DNA, 25 bp, Homo sapien
tgtcgtgtttgtagcctggggcttt

SEQ ID NO: 5745876 - DNA, 25 bp, Homo sapien
ccgtagaggggcctcggcttctgag

SEQ ID NO: 5745877 - DNA, 25 bp, Homo sapien
cagcagcagcagcagcagccgcggc

SEQ ID NO: 5745878 - DNA, 25 bp, Homo sapien
cgggaggacaggaaccatccggagt

SEQ ID NO: 5745879 - DNA, 25 bp, Homo sapien
tgtacagcgagtatgtgatgtcggg

SEQ ID NO: 5745880 - DNA, 25 bp, Homo sapien
ggtggaagggatggtctcagtgatc

SEQ ID NO: 5745881 - DNA, 25 bp, Homo sapien
ttggagatttttatcctgcggtggt

SEQ ID NO: 5745882 - DNA, 25 bp, Homo sapien
gcggctgaagcaattcagatttgag

SEQ ID NO: 5745883 - DNA, 25 bp, Homo sapien
tacagtcttcacccatgagggcatt

SEQ ID NO: 5745884 - DNA, 25 bp, Homo sapien
gtctccatgatctggtttacttcat

SEQ ID NO: 5745885 - DNA, 25 bp, Homo sapien
gcagttgtacttgatgtcgtgtttg

SEQ ID NO: 5745886 - DNA, 25 bp, Homo sapien
gagcgggcgcggcggtcgcagagac

SEQ ID NO: 5745887 - DNA, 25 bp, Homo sapien
tggccgggctggccgcggacccgga

SEQ ID NO: 5745888 - DNA, 25 bp, Homo sapien
tctccccgcgcggctccagcgcaga

SEQ ID NO: 5745889 - DNA, 25 bp, Homo sapien
agcctctgaggccctggccactggc

SEQ ID NO: 5745890 - DNA, 25 bp, Homo sapien
ggcgtgtgcagctcccgcagggggt

SEQ ID NO: 5745891 - DNA, 25 bp, Homo sapien
gagggcattgtgtgtgtcgtcgggg

SEQ ID NO: 5745892 - DNA, 25 bp, Homo sapien
ggcaggtagaagacgagcacagtga

SEQ ID NO: 5745893 - DNA, 25 bp, Homo sapien
tctcagtgatcaccaggagaaacac

SEQ ID NO: 5745894 - DNA, 25 bp, Homo sapien
cccaggttcttgatcggatgtttct

SEQ ID NO: 5745895 - DNA, 25 bp, Homo sapien
acccatgagggcattgtgtgtgtcg

SEQ ID NO: 5745896 - DNA, 25 bp, Homo sapien
agttgtacttgatgtcgtgtttgta

SEQ ID NO: 5745897 - DNA, 25 bp, Homo sapien
gagagcgggccagagcccatggctg

SEQ ID NO: 5745898 - DNA, 25 bp, Homo sapien
gtgacaaagcagagagggacagcac

SEQ ID NO: 5745899 - DNA, 25 bp, Homo sapien
gcaggggtagccctccttgcagcct

SEQ ID NO: 5745900 - DNA, 25 bp, Homo sapien
ggcaggggatgatgaggttgatggt

SEQ ID NO: 5745901 - DNA, 25 bp, Homo sapien
tcttctgtgcagggacacgcatgaa

SEQ ID NO: 5745902 - DNA, 25 bp, Homo sapien
acagcagcagcagcagcagcagccg

SEQ ID NO: 5745903 - DNA, 25 bp, Homo sapien
ctaacaggttgttgaagattggaaa

SEQ ID NO: 5745904 - DNA, 25 bp, Homo sapien
gtgatgtcggggtagatctcctcgc

SEQ ID NO: 5745905 - DNA, 25 bp, Homo sapien
taggggaaggggctccaggtcccag

SEQ ID NO: 5745906 - DNA, 25 bp, Homo sapien
tcgtttcaattgttggatctcttgg

SEQ ID NO: 5745907 - DNA, 25 bp, Homo sapien
ccccagcgccgggcgagctccttct

SEQ ID NO: 5745908 - DNA, 25 bp, Homo sapien
gatcgattttcgccttatcgtagga

SEQ ID NO: 5745909 - DNA, 25 bp, Homo sapien
agcctttggactctgcgcggctgaa

SEQ ID NO: 5745910 - DNA, 25 bp, Homo sapien
ccccaacagcattgttatacagcac

SEQ ID NO: 5745911 - DNA, 25 bp, Homo sapien
taatcaaacgggaagtaggtcacgt

SEQ ID NO: 5745912 - DNA, 25 bp, Homo sapien
ggggctccaggtcccagtccccagc

SEQ ID NO: 5745913 - DNA, 25 bp, Homo sapien
cttgtcgtccacctggaaatcccca

SEQ ID NO: 5745914 - DNA, 25 bp, Homo sapien
gggagcgggcgcggcggtcgcagag

SEQ ID NO: 5745915 - DNA, 25 bp, Homo sapien
cgggcggagacgcgcggggctcctc

SEQ ID NO: 5745916 - DNA, 25 bp, Homo sapien
cagtcttcacccatgagggcattgt

SEQ ID NO: 5745917 - DNA, 25 bp, Homo sapien
gcccatggctggtggccgggctggc

SEQ ID NO: 5745918 - DNA, 25 bp, Homo sapien
atcaggaccagatcgattttcgcct

SEQ ID NO: 5745919 - DNA, 25 bp, Homo sapien
agagggacagcacagcatcaacaga

SEQ ID NO: 5745920 - DNA, 25 bp, Homo sapien
gcgggcgcggcggtcgcagagacgg

SEQ ID NO: 5745921 - DNA, 25 bp, Homo sapien
cggtgatgacgatggacaaggttac

SEQ ID NO: 5745922 - DNA, 25 bp, Homo sapien
ggaagtaggtcacgtcgattttaca

SEQ ID NO: 5745923 - DNA, 25 bp, Homo sapien
gccggatgtacagcgagtatgtgat

SEQ ID NO: 5745924 - DNA, 25 bp, Homo sapien
gagtatgtgatgtcggggtagatct

SEQ ID NO: 5745925 - DNA, 25 bp, Homo sapien
ctcgcagcagttgtacttgatgtcg

SEQ ID NO: 5745926 - DNA, 25 bp, Homo sapien
gggcgggcgggcgtgcgcggggcgg

SEQ ID NO: 5745927 - DNA, 25 bp, Homo sapien
agcgccgggcgagctccttctccgc

SEQ ID NO: 5745928 - DNA, 25 bp, Homo sapien
ccagatctgagcaggtgctgtcacc

SEQ ID NO: 5745929 - DNA, 25 bp, Homo sapien
gcattgtgtgtgtcgtcggggttct

SEQ ID NO: 5745930 - DNA, 25 bp, Homo sapien
atgaacatgaccctggggagcaggt

SEQ ID NO: 5745931 - DNA, 25 bp, Homo sapien
acgtgcggtaggggaaggggctcca

SEQ ID NO: 5745932 - DNA, 25 bp, Homo sapien
aatcatggtgaacaggaggtactct

SEQ ID NO: 5745933 - DNA, 25 bp, Homo sapien
tggcccactcgccgctctcccaata

SEQ ID NO: 5745934 - DNA, 25 bp, Homo sapien
gccctggccactggcagcagagaca

SEQ ID NO: 5745935 - DNA, 25 bp, Homo sapien
catagtcagaggggttccatttcag

SEQ ID NO: 5745936 - DNA, 25 bp, Homo sapien
ttctgtgcagggacacgcatgaact

SEQ ID NO: 5745937 - DNA, 25 bp, Homo sapien
ctggaaatccccaacagcattgtta

SEQ ID NO: 5745938 - DNA, 25 bp, Homo sapien
gagaggaggacagaaatgcacaggg

SEQ ID NO: 5745939 - DNA, 25 bp, Homo sapien
atcaccaggagaaacaccgtcaggg

SEQ ID NO: 5745940 - DNA, 25 bp, Homo sapien
gttgatggtgtagaacaagggcagg

SEQ ID NO: 5745941 - DNA, 25 bp, Homo sapien
cgccaggcgcgggcgggcgggcggg

SEQ ID NO: 5745942 - DNA, 25 bp, Homo sapien
ctcggacccgcgggaggacaggaac

SEQ ID NO: 5745943 - DNA, 25 bp, Homo sapien
cttctccgccgggctgggtgctccg

SEQ ID NO: 5745944 - DNA, 25 bp, Homo sapien
cactgaaattggagatttttatcct

SEQ ID NO: 5745945 - DNA, 25 bp, Homo sapien
cgccgggctgggtgctccggccggc

SEQ ID NO: 5745946 - DNA, 25 bp, Homo sapien
gcggggcgtacgtgcggtaggggaa

SEQ ID NO: 5745947 - DNA, 25 bp, Homo sapien
agagcttctcgtgaggttagcactg

SEQ ID NO: 5745948 - DNA, 25 bp, Homo sapien
ccagtgtacttgagtaaggctttgg

SEQ ID NO: 5745949 - DNA, 25 bp, Homo sapien
ttggaaattcatagcccaggttctt

SEQ ID NO: 5745950 - DNA, 25 bp, Homo sapien
ccgcggcggcgacagcgccaggggc

SEQ ID NO: 5745951 - DNA, 25 bp, Homo sapien
gcatgaactctgccccaccatagtc

SEQ ID NO: 5745952 - DNA, 25 bp, Homo sapien
attgttggatctcttgggctttttg

SEQ ID NO: 5745953 - DNA, 25 bp, Homo sapien
atcaacagattcagaactagagctt

SEQ ID NO: 5745954 - DNA, 25 bp, Homo sapien
gctttgatgatggcccactcgccgc

SEQ ID NO: 5745955 - DNA, 25 bp, Homo sapien
tgtgtcgtcggggttctgtagtgca

SEQ ID NO: 5745956 - DNA, 25 bp, Homo sapien
ccacctggaaatccccaacagcatt

SEQ ID NO: 5745957 - DNA, 25 bp, Homo sapien
gcttctttgatttctggtgacaaag

SEQ ID NO: 5745958 - DNA, 25 bp, Homo sapien
aacaggaggtactctccaatcaggg

SEQ ID NO: 5745959 - DNA, 25 bp, Homo sapien
gtctggcttccagatcttctgtgca

SEQ ID NO: 5745960 - DNA, 25 bp, Homo sapien
cagcatcaacagattcagaactaga

SEQ ID NO: 5745961 - DNA, 25 bp, Homo sapien
ctgtgcagggacacgcatgaactct

SEQ ID NO: 5745962 - DNA, 25 bp, Homo sapien
ttgcttgttggcctggtcatgaaca

SEQ ID NO: 5745963 - DNA, 25 bp, Homo sapien
ttggtaatcaaacgggaagtaggtc

SEQ ID NO: 5745964 - DNA, 25 bp, Homo sapien
aatagacggtgctcagcctctgagg

SEQ ID NO: 5745965 - DNA, 25 bp, Homo sapien
gatcttctgtgcagggacacgcatg

SEQ ID NO: 5745966 - DNA, 25 bp, Homo sapien
ggcgccgtaggagagacgctaacac

SEQ ID NO: 5745967 - DNA, 25 bp, Homo sapien
caggggatgatgaggttgatggtgt

SEQ ID NO: 5745968 - DNA, 25 bp, Homo sapien
gtagccctccttgcagcctttggac

SEQ ID NO: 5745969 - DNA, 25 bp, Homo sapien
ctgagcaggtgctgtcaccaccacc

SEQ ID NO: 5745970 - DNA, 25 bp, Homo sapien
tcagatttgagagctcggcaccgta

SEQ ID NO: 5745971 - DNA, 25 bp, Homo sapien
actcagtttctgtcccaggtttccg

SEQ ID NO: 5745972 - DNA, 25 bp, Homo sapien
acagtgaggaaggagatgagcaggc

SEQ ID NO: 5745973 - DNA, 25 bp, Homo sapien
caatcagggggatgaccagcgaggt

SEQ ID NO: 5745974 - DNA, 25 bp, Homo sapien
gcttctgagcgttgccctcgttgct

SEQ ID NO: 5745975 - DNA, 25 bp, Homo sapien
gcagggacacgcatgaactctgccc

SEQ ID NO: 5745976 - DNA, 25 bp, Homo sapien
atggaagagccgatcaggaccagat

SEQ ID NO: 5745977 - DNA, 25 bp, Homo sapien
aggtttccggggcgtgtgcagctcc

SEQ ID NO: 5745978 - DNA, 25 bp, Homo sapien
tgttatacagcacaatgtctggctt

SEQ ID NO: 5745979 - DNA, 25 bp, Homo sapien
ttcaagaatacagtcttcacccatg

SEQ ID NO: 5745980 - DNA, 25 bp, Homo sapien
tgtcggggtagatctcctcgcagca

SEQ ID NO: 5745981 - DNA, 25 bp, Homo sapien
caccttctcaccgcagtcggagggc

SEQ ID NO: 5745982 - DNA, 25 bp, Homo sapien
gcgagctccttctccgccgggctgg

SEQ ID NO: 5745983 - DNA, 25 bp, Homo sapien
agtgtacttgagtaaggctttggtc

SEQ ID NO: 5745984 - DNA, 25 bp, Homo sapien
ggaccaggaaccgaacttcatggta

SEQ ID NO: 5745985 - DNA, 25 bp, Homo sapien
gcgtacgtgcggtaggggaaggggc

SEQ ID NO: 5745986 - DNA, 25 bp, Homo sapien
gcgcgggcgggcgggcgggcgtgcg

SEQ ID NO: 5745987 - DNA, 25 bp, Homo sapien
aggccctggccactggcagcagaga

SEQ ID NO: 5745988 - DNA, 25 bp, Homo sapien
aatcttcaaacagccgctcaaatag

SEQ ID NO: 5745989 - DNA, 25 bp, Homo sapien
gctttcatattttcagcaatatact

SEQ ID NO: 5745990 - DNA, 25 bp, Homo sapien
aagggcaggcgccggatgtacagcg

SEQ ID NO: 5745991 - DNA, 25 bp, Homo sapien
cattgtaatcttcaaacagccgctc

SEQ ID NO: 5745992 - DNA, 25 bp, Homo sapien
gtccacctggaaatccccaacagca

SEQ ID NO: 5745993 - DNA, 25 bp, Homo sapien
cctggggctttgatgatggcccact

SEQ ID NO: 5745994 - DNA, 25 bp, Homo sapien
atcctgcggtggtggcagtaaccac

SEQ ID NO: 5745995 - DNA, 25 bp, Homo sapien
gacggtgctcagcctctgaggccct

SEQ ID NO: 5745996 - DNA, 25 bp, Homo sapien
cagcgaggtggaagggatggtctca

SEQ ID NO: 5745997 - DNA, 25 bp, Homo sapien
gacaggaaccatccggagtgaagct

SEQ ID NO: 5745998 - DNA, 25 bp, Homo sapien
gatgtcggggtagatctcctcgcag

SEQ ID NO: 5745999 - DNA, 25 bp, Homo sapien
attcagatttgagagctcggcaccg

SEQ ID NO: 5746000 - DNA, 25 bp, Homo sapien
ctctccgcttcgccgccgctgggtt

SEQ ID NO: 5746001 - DNA, 25 bp, Homo sapien
aggacaggaaccatccggagtgaag

SEQ ID NO: 5746002 - DNA, 25 bp, Homo sapien
gtcagacacgttggctacaggccgg

SEQ ID NO: 5746003 - DNA, 25 bp, Homo sapien
gctccagcgcagaccccagacctgg

SEQ ID NO: 5746004 - DNA, 25 bp, Homo sapien
gaagggatggtctcagtgatcacca

SEQ ID NO: 5746005 - DNA, 25 bp, Homo sapien
tggcagtaaccacacatcccgtcct

SEQ ID NO: 5746006 - DNA, 25 bp, Homo sapien
tggacaaggttacaaaaatcatggt

SEQ ID NO: 5746007 - DNA, 25 bp, Homo sapien
tccttgaggttcatggaagagccga

SEQ ID NO: 5746008 - DNA, 25 bp, Homo sapien
caattgttggatctcttgggctttt

SEQ ID NO: 5746009 - DNA, 25 bp, Homo sapien
cgccctcggacccgcgggaggacag

SEQ ID NO: 5746010 - DNA, 25 bp, Homo sapien
ggatctcttgggctttttgttcctc

SEQ ID NO: 5746011 - DNA, 25 bp, Homo sapien
ccgaccagatctgagcaggtgctgt

SEQ ID NO: 5746012 - DNA, 25 bp, Homo sapien
tagtcagaggggttccatttcagct

SEQ ID NO: 5746013 - DNA, 25 bp, Homo sapien
tgagcaggcaggggatgatgaggtt

SEQ ID NO: 5746014 - DNA, 25 bp, Homo sapien
gcgttgccctcgttgcttgttggcc

SEQ ID NO: 5746015 - DNA, 25 bp, Homo sapien
ttctttgatttctggtgacaaagca

SEQ ID NO: 5746016 - DNA, 25 bp, Homo sapien
gaggtatccaagtcacctccccagt

SEQ ID NO: 5746017 - DNA, 25 bp, Homo sapien
acctggaaatccccaacagcattgt

SEQ ID NO: 5746018 - DNA, 25 bp, Homo sapien
ttgtagcctggggctttgatgatgg

SEQ ID NO: 5746019 - DNA, 25 bp, Homo sapien
gcagaccccagacctggagccgtgc

SEQ ID NO: 5746020 - DNA, 25 bp, Homo sapien
gatgatctcattgtaatcttcaaac

SEQ ID NO: 5746021 - DNA, 25 bp, Homo sapien
ggcagcagagacagcagcagcagca

SEQ ID NO: 5746022 - DNA, 25 bp, Homo sapien
tgtgtgtgtcgtcggggttctgtag

SEQ ID NO: 5746023 - DNA, 25 bp, Homo sapien
cccagacctggagccgtgcgggcgg

SEQ ID NO: 5746024 - DNA, 25 bp, Homo sapien
gtcttgtcgtccacctggaaatccc

SEQ ID NO: 5746025 - DNA, 25 bp, Homo sapien
cgcagagacggcctctccccgcgcg

SEQ ID NO: 5746026 - DNA, 25 bp, Homo sapien
aagacggtgatgacgatggacaagg

SEQ ID NO: 5746027 - DNA, 25 bp, Homo sapien
cccaatagtccttgaggttcatgga

SEQ ID NO: 5746028 - DNA, 25 bp, Homo sapien
ggacacgcatgaactctgccccacc

SEQ ID NO: 5746029 - DNA, 25 bp, Homo sapien
agagacagcagcagcagcagcagca

SEQ ID NO: 5746030 - DNA, 25 bp, Homo sapien
aaggagagggactcagtttctgtcc

SEQ ID NO: 5746031 - DNA, 25 bp, Homo sapien
atccggagtgaagctgcgccaggcg

SEQ ID NO: 5746032 - DNA, 25 bp, Homo sapien
ggcttcattttgtgctttcatattt

SEQ ID NO: 5746033 - DNA, 25 bp, Homo sapien
ggtggccgggctggccgcggacccg

SEQ ID NO: 5746034 - DNA, 25 bp, Homo sapien
cctttggactctgcgcggctgaagc

SEQ ID NO: 5746035 - DNA, 25 bp, Homo sapien
gcagcctttggactctgcgcggctg

SEQ ID NO: 5746036 - DNA, 25 bp, Homo sapien
ggttgttgaagattggaaattcata

SEQ ID NO: 5746037 - DNA, 25 bp, Homo sapien
atcgtaggaccaggaaccgaacttc

SEQ ID NO: 5746038 - DNA, 25 bp, Homo sapien
ctttttgttcctctttggcttcatt

SEQ ID NO: 5746039 - DNA, 25 bp, Homo sapien
ggctgaagcaattcagatttgagag

SEQ ID NO: 5746040 - DNA, 25 bp, Homo sapien
gatgagcaggcaggggatgatgagg

SEQ ID NO: 5746041 - DNA, 25 bp, Homo sapien
ccgggctgggtgctccggccggcgg

SEQ ID NO: 5746042 - DNA, 25 bp, Homo sapien
ggaaggggctccaggtcccagtccc

SEQ ID NO: 5746043 - DNA, 25 bp, Homo sapien
ttggctacaggccggatgatctcat

SEQ ID NO: 5746044 - DNA, 25 bp, Homo sapien
ggagtgaagctgcgccaggcgcggg

SEQ ID NO: 5746045 - DNA, 25 bp, Homo sapien
gcacgttgagcacgaagacggtgat

SEQ ID NO: 5746046 - DNA, 25 bp, Homo sapien
ccttgcagcctttggactctgcgcg

SEQ ID NO: 5746047 - DNA, 25 bp, Homo sapien
agcagcagcagcagccgcggcggcg

SEQ ID NO: 5746048 - DNA, 25 bp, Homo sapien
tgggaccaccgggctaggcgggcgc

SEQ ID NO: 5746049 - DNA, 25 bp, Homo sapien
gagacgctaacacaccctgggaagg

SEQ ID NO: 5746050 - DNA, 25 bp, Homo sapien
tatttttttcctaacaggttgttga

SEQ ID NO: 5746051 - DNA, 25 bp, Homo sapien
ggaaatccccaacagcattgttata

SEQ ID NO: 5746052 - DNA, 25 bp, Homo sapien
gtcccagtccccagcgccgggcgag

SEQ ID NO: 5746053 - DNA, 25 bp, Homo sapien
tacagttttggtaatcaaacgggaa

SEQ ID NO: 5746054 - DNA, 25 bp, Homo sapien
ggaaattcatagcccaggttcttga

SEQ ID NO: 5746055 - DNA, 25 bp, Homo sapien
gacacctcgaaatggatgatgactg

SEQ ID NO: 5746056 - DNA, 25 bp, Homo sapien
caaagcagagagggacagcacagca

SEQ ID NO: 5746057 - DNA, 25 bp, Homo sapien
tgaagctgcgccaggcgcgggcggg

SEQ ID NO: 5746058 - DNA, 25 bp, Homo sapien
gctccttctccgccgggctgggtgc

SEQ ID NO: 5746059 - DNA, 25 bp, Homo sapien
aggttgatggtgtagaacaagggca

SEQ ID NO: 5746060 - DNA, 25 bp, Homo sapien
tctgtggacttttcttttcgtttca

SEQ ID NO: 5746061 - DNA, 25 bp, Homo sapien
ttggcttcattttgtgctttcatat

SEQ ID NO: 5746062 - DNA, 25 bp, Homo sapien
ctgaagcaattcagatttgagagct

SEQ ID NO: 5746063 - DNA, 25 bp, Homo sapien
caagaatacagtcttcacccatgag

SEQ ID NO: 5746064 - DNA, 25 bp, Homo sapien
cggacccgcgggaggacaggaacca

SEQ ID NO: 5746065 - DNA, 25 bp, Homo sapien
ccatttcagcttgtagtcattccag

SEQ ID NO: 5746066 - DNA, 25 bp, Homo sapien
cttcacccatgagggcattgtgtgt

SEQ ID NO: 5746067 - DNA, 25 bp, Homo sapien
aggtactctccaatcagggggatga

SEQ ID NO: 5746068 - DNA, 25 bp, Homo sapien
gtcttcacccatgagggcattgtgt

SEQ ID NO: 5746069 - DNA, 25 bp, Homo sapien
agtgatcaccaggagaaacaccgtc

SEQ ID NO: 5746070 - DNA, 25 bp, Homo sapien
gagctcggcaccgtagaggggcctc

SEQ ID NO: 5746071 - DNA, 25 bp, Homo sapien
atggtgtagaacaagggcaggcgcc

SEQ ID NO: 5746072 - DNA, 25 bp, Homo sapien
cggagacgcgcggggctcctctccg

SEQ ID NO: 5746073 - DNA, 25 bp, Homo sapien
tgatgactgggtcagacacgttggc

SEQ ID NO: 5746074 - DNA, 25 bp, Homo sapien
gatggacaaggttacaaaaatcatg

SEQ ID NO: 5746075 - DNA, 25 bp, Homo sapien
tgggctttttgttcctctttggctt

SEQ ID NO: 5746076 - DNA, 25 bp, Homo sapien
agaactagagcttctcgtgaggtta

SEQ ID NO: 5746077 - DNA, 25 bp, Homo sapien
cagcgagagcgggccagagcccatg

SEQ ID NO: 5746078 - DNA, 25 bp, Homo sapien
tcccaggtttccggggcgtgtgcag

SEQ ID NO: 5746079 - DNA, 25 bp, Homo sapien
tgtggacttttcttttcgtttcaat

SEQ ID NO: 5746080 - DNA, 25 bp, Homo sapien
agaatacagtcttcacccatgaggg

SEQ ID NO: 5746081 - DNA, 25 bp, Homo sapien
gctcttaaagatggccggaggtatc

SEQ ID NO: 5746082 - DNA, 25 bp, Homo sapien
ggggatgatgaggttgatggtgtag

SEQ ID NO: 5746083 - DNA, 25 bp, Homo sapien
cttcattttgtgctttcatattttc

SEQ ID NO: 5746084 - DNA, 25 bp, Homo sapien
tctggtttacttcatccaccttcac

SEQ ID NO: 5746085 - DNA, 25 bp, Homo sapien
acttcatggtacagttttggtaatc

SEQ ID NO: 5746086 - DNA, 25 bp, Homo sapien
ctagagcttctcgtgaggttagcac

SEQ ID NO: 5746087 - DNA, 25 bp, Homo sapien
ggacggtcgggagcgggcgcggcgg

SEQ ID NO: 5746088 - DNA, 25 bp, Homo sapien
ggtggcagtaaccacacatcccgtc

SEQ ID NO: 5746089 - DNA, 25 bp, Homo sapien
accagcgaggtggaagggatggtct

SEQ ID NO: 5746090 - DNA, 25 bp, Homo sapien
gtgaggttagcactgaaattggaga

SEQ ID NO: 5746091 - DNA, 25 bp, Homo sapien
tttggtcttgtcgtccacctggaaa

SEQ ID NO: 5746092 - DNA, 25 bp, Homo sapien
gaaatggatgatgactgggtcagac

SEQ ID NO: 5746093 - DNA, 25 bp, Homo sapien
cgggaagtaggtcacgtcgatttta

SEQ ID NO: 5746094 - DNA, 25 bp, Homo sapien
gtgctgtcaccaccaccaggaagga

SEQ ID NO: 5746095 - DNA, 25 bp, Homo sapien
aatacagtcttcacccatgagggca

SEQ ID NO: 5746096 - DNA, 25 bp, Homo sapien
gcgggcgggcgggcgtgcgcggggc

SEQ ID NO: 5746097 - DNA, 25 bp, Homo sapien
cagcagagacagcagcagcagcagc

SEQ ID NO: 5746098 - DNA, 25 bp, Homo sapien
cttctcgtgaggttagcactgaaat

SEQ ID NO: 5746099 - DNA, 25 bp, Homo sapien
accaccaccaggaaggagagggact

SEQ ID NO: 5746100 - DNA, 25 bp, Homo sapien
gttgccctcgttgcttgttggcctg

SEQ ID NO: 5746101 - DNA, 25 bp, Homo sapien
caccagctgagacatggacacctcg

SEQ ID NO: 5746102 - DNA, 25 bp, Homo sapien
agacagcagcagcagcagcagcagc

SEQ ID NO: 5746103 - DNA, 25 bp, Homo sapien
tcctcgcagcagttgtacttgatgt

SEQ ID NO: 5746104 - DNA, 25 bp, Homo sapien
caatgtctggcttccagatcttctg

SEQ ID NO: 5746105 - DNA, 25 bp, Homo sapien
tttcgtttcaattgttggatctctt

SEQ ID NO: 5746106 - DNA, 25 bp, Homo sapien
gccgctgggtttccagcgccctcgg

SEQ ID NO: 5746107 - DNA, 25 bp, Homo sapien
aatggatgatgactgggtcagacac

SEQ ID NO: 5746108 - DNA, 25 bp, Homo sapien
caccttcaccagctgagacatggac

SEQ ID NO: 5746109 - DNA, 25 bp, Homo sapien
cggcgtccgaccagatctgagcagg

SEQ ID NO: 5746110 - DNA, 25 bp, Homo sapien
tggcctggtcatgaacatgaccctg

SEQ ID NO: 5746111 - DNA, 25 bp, Homo sapien
gcgcggcggtcgcagagacggcctc

SEQ ID NO: 5746112 - DNA, 25 bp, Homo sapien
cggatgtacagcgagtatgtgatgt

SEQ ID NO: 5746113 - DNA, 25 bp, Homo sapien
tcacccatgagggcattgtgtgtgt

SEQ ID NO: 5746114 - DNA, 25 bp, Homo sapien
gacaaggttacaaaaatcatggtga

SEQ ID NO: 5746115 - DNA, 25 bp, Homo sapien
cagagcccatggctggtggccgggc

SEQ ID NO: 5746116 - DNA, 25 bp, Homo sapien
gggctgggtgctccggccggcggcg

SEQ ID NO: 5746117 - DNA, 25 bp, Homo sapien
tcatagcccaggttcttgatcggat

SEQ ID NO: 5746118 - DNA, 25 bp, Homo sapien
gggtcagacacgttggctacaggcc

SEQ ID NO: 5746119 - DNA, 25 bp, Homo sapien
gcgagtatgtgatgtcggggtagat

SEQ ID NO: 5746120 - DNA, 25 bp, Homo sapien
tgtagaacaagggcaggcgccggat

SEQ ID NO: 5746121 - DNA, 25 bp, Homo sapien
gacggtgatgacgatggacaaggtt

SEQ ID NO: 5746122 - DNA, 25 bp, Homo sapien
gtgcacgttgagcacgaagacggtg

SEQ ID NO: 5746123 - DNA, 25 bp, Homo sapien
atggctggtggccgggctggccgcg

SEQ ID NO: 5746124 - DNA, 25 bp, Homo sapien
cttgagtaaggctttggtcttgtcg

SEQ ID NO: 5746125 - DNA, 25 bp, Homo sapien
gcgtgcgcggggcggggcgtacgtg

SEQ ID NO: 5746126 - DNA, 25 bp, Homo sapien
ggctacaggccggatgatctcattg

SEQ ID NO: 5746127 - DNA, 25 bp, Homo sapien
tcgccgctctcccaatagtccttga

SEQ ID NO: 5746128 - DNA, 25 bp, Homo sapien
acttgatgtcgtgtttgtagcctgg

SEQ ID NO: 5746129 - DNA, 25 bp, Homo sapien
ttgttgaagattggaaattcatagc

SEQ ID NO: 5746130 - DNA, 25 bp, Homo sapien
gagcgggccagagcccatggctggt

SEQ ID NO: 5746131 - DNA, 25 bp, Homo sapien
tcagtgatcaccaggagaaacaccg

SEQ ID NO: 5746132 - DNA, 25 bp, Homo sapien
tgctccggccggcggcgtccgacca

SEQ ID NO: 5746133 - DNA, 25 bp, Homo sapien
aacagcattgttatacagcacaatg

SEQ ID NO: 5746134 - DNA, 25 bp, Homo sapien
tggtgacaaagcagagagggacagc

SEQ ID NO: 5746135 - DNA, 25 bp, Homo sapien
atgatgaggttgatggtgtagaaca

SEQ ID NO: 5746136 - DNA, 25 bp, Homo sapien
ccacaggttggtctccatgatctgg

SEQ ID NO: 5746137 - DNA, 25 bp, Homo sapien
cagaaatgcacagggtcaccttctc

SEQ ID NO: 5746138 - DNA, 25 bp, Homo sapien
cttgatcggatgtttctgtggactt

SEQ ID NO: 5746139 - DNA, 25 bp, Homo sapien
atcggatgtttctgtggacttttct

SEQ ID NO: 5746140 - DNA, 25 bp, Homo sapien
attcagaactagagcttctcgtgag

SEQ ID NO: 5746141 - DNA, 25 bp, Homo sapien
caatagtccttgaggttcatggaag

SEQ ID NO: 5746142 - DNA, 25 bp, Homo sapien
agtcattccagatttgcttgagcca

SEQ ID NO: 5746143 - DNA, 25 bp, Homo sapien
ggggaaggggctccaggtcccagtc

SEQ ID NO: 5746144 - DNA, 25 bp, Homo sapien
tgacactttggatggcttctttgat

SEQ ID NO: 5746145 - DNA, 25 bp, Homo sapien
ccccagtgtacttgagtaaggcttt

SEQ ID NO: 5746146 - DNA, 25 bp, Homo sapien
ctgggtcagacacgttggctacagg

SEQ ID NO: 5746147 - DNA, 25 bp, Homo sapien
gctgcgccaggcgcgggcgggcggg

SEQ ID NO: 5746148 - DNA, 25 bp, Homo sapien
cacagggtcaccttctcaccgcagt

SEQ ID NO: 5746149 - DNA, 25 bp, Homo sapien
catggtacagttttggtaatcaaac

SEQ ID NO: 5746150 - DNA, 25 bp, Homo sapien
cggctccagcgcagaccccagacct

SEQ ID NO: 5746151 - DNA, 25 bp, Homo sapien
agcccaggttcttgatcggatgttt

SEQ ID NO: 5746152 - DNA, 25 bp, Homo sapien
ggagatttttatcctgcggtggtgg

SEQ ID NO: 5746153 - DNA, 25 bp, Homo sapien
ttgagagctcggcaccgtagagggg

SEQ ID NO: 5746154 - DNA, 25 bp, Homo sapien
gagcccatggctggtggccgggctg

SEQ ID NO: 5746155 - DNA, 25 bp, Homo sapien
atggtgaacaggaggtactctccaa

SEQ ID NO: 5746156 - DNA, 25 bp, Homo sapien
gcctcggcttctgagcgttgccctc

SEQ ID NO: 5746157 - DNA, 25 bp, Homo sapien
cagcattgttatacagcacaatgtc

SEQ ID NO: 5746158 - DNA, 25 bp, Homo sapien
aatgcacagggtcaccttctcaccg

SEQ ID NO: 5746159 - DNA, 25 bp, Homo sapien
tgtcgtccacctggaaatccccaac

SEQ ID NO: 5746160 - DNA, 25 bp, Homo sapien
caggaggtactctccaatcaggggg

SEQ ID NO: 5746161 - DNA, 25 bp, Homo sapien
gctcggcaccgtagaggggcctcgg

SEQ ID NO: 5746162 - DNA, 25 bp, Homo sapien
gagccgatcaggaccagatcgattt

SEQ ID NO: 5746163 - DNA, 25 bp, Homo sapien
ttcagcttgtagtcattccagattt

SEQ ID NO: 5746164 - DNA, 25 bp, Homo sapien
gcaatatacttgacactttggatgg

SEQ ID NO: 5746165 - DNA, 25 bp, Homo sapien
cgctgggtttccagcgccctcggac

SEQ ID NO: 5746166 - DNA, 25 bp, Homo sapien
gatctggtttacttcatccaccttc

SEQ ID NO: 5746167 - DNA, 25 bp, Homo sapien
tgatcaccaggagaaacaccgtcag

SEQ ID NO: 5746168 - DNA, 25 bp, Homo sapien
gcattgttatacagcacaatgtctg

SEQ ID NO: 5746169 - DNA, 25 bp, Homo sapien
ttcagcaatatacttgacactttgg

SEQ ID NO: 5746170 - DNA, 25 bp, Homo sapien
cttgaggttcatggaagagccgatc

SEQ ID NO: 5746171 - DNA, 25 bp, Homo sapien
gtttgtagcctggggctttgatgat

SEQ ID NO: 5746172 - DNA, 25 bp, Homo sapien
ggagcaggttcaagaatacagtctt

SEQ ID NO: 5746173 - DNA, 25 bp, Homo sapien
gagaaacaccgtcagggagaggagg

SEQ ID NO: 5746174 - DNA, 25 bp, Homo sapien
gtacgtgcggtaggggaaggggctc

SEQ ID NO: 5746175 - DNA, 25 bp, Homo sapien
gcaggtgctgtcaccaccaccagga

SEQ ID NO: 5746176 - DNA, 25 bp, Homo sapien
ggagggcaggtagaagacgagcaca

SEQ ID NO: 5746177 - DNA, 25 bp, Homo sapien
tctccgccgggctgggtgctccggc

SEQ ID NO: 5746178 - DNA, 25 bp, Homo sapien
catcccgtcctggcaggggtagccc

SEQ ID NO: 5746179 - DNA, 25 bp, Homo sapien
ctccggccggcggcgtccgaccaga

SEQ ID NO: 5746180 - DNA, 25 bp, Homo sapien
gtcagaggggttccatttcagcttg

SEQ ID NO: 5746181 - DNA, 25 bp, Homo sapien
ctggtggccgggctggccgcggacc

SEQ ID NO: 5746182 - DNA, 25 bp, Homo sapien
agcacaatgtctggcttccagatct

SEQ ID NO: 5746183 - DNA, 25 bp, Homo sapien
agcaattcagatttgagagctcggc

SEQ ID NO: 5746184 - DNA, 25 bp, Homo sapien
caggttcaagaatacagtcttcacc

SEQ ID NO: 5746185 - DNA, 25 bp, Homo sapien
ccggagtgaagctgcgccaggcgcg

SEQ ID NO: 5746186 - DNA, 25 bp, Homo sapien
aaaatcatggtgaacaggaggtact

SEQ ID NO: 5746187 - DNA, 25 bp, Homo sapien
gaaggagatgagcaggcaggggatg

SEQ ID NO: 5746188 - DNA, 25 bp, Homo sapien
tagacggtgctcagcctctgaggcc

SEQ ID NO: 5746189 - DNA, 25 bp, Homo sapien
cgtcgattttacaggagctcttaaa

SEQ ID NO: 5746190 - DNA, 25 bp, Homo sapien
tctgtcccaggtttccggggcgtgt

SEQ ID NO: 5746191 - DNA, 25 bp, Homo sapien
gatggcccactcgccgctctcccaa

SEQ ID NO: 5746192 - DNA, 25 bp, Homo sapien
gcccactcgccgctctcccaatagt

SEQ ID NO: 5746193 - DNA, 25 bp, Homo sapien
gggctcctctccgcttcgccgccgc

SEQ ID NO: 5746194 - DNA, 25 bp, Homo sapien
caggcaggggatgatgaggttgatg

SEQ ID NO: 5746195 - DNA, 25 bp, Homo sapien
cagccgctcaaatagacggtgctca

SEQ ID NO: 5746196 - DNA, 25 bp, Homo sapien
ctcaccgcagtcggagggcaggtag

SEQ ID NO: 5746197 - DNA, 25 bp, Homo sapien
agccgcggcggcgacagcgccaggg

SEQ ID NO: 5746198 - DNA, 25 bp, Homo sapien
gccgctctcccaatagtccttgagg

SEQ ID NO: 5746199 - DNA, 25 bp, Homo sapien
gcacagtgaggaaggagatgagcag

SEQ ID NO: 5746200 - DNA, 25 bp, Homo sapien
tggcttctttgatttctggtgacaa

SEQ ID NO: 5746201 - DNA, 25 bp, Homo sapien
gggcgggcgtgcgcggggcggggcg

SEQ ID NO: 5746202 - DNA, 25 bp, Homo sapien
gcagtaaccacacatcccgtcctgg

SEQ ID NO: 5746203 - DNA, 25 bp, Homo sapien
gtttccggggcgtgtgcagctcccg

SEQ ID NO: 5746204 - DNA, 25 bp, Homo sapien
ctgggtttccagcgccctcggaccc

SEQ ID NO: 5746205 - DNA, 25 bp, Homo sapien
gggctttgatgatggcccactcgcc

SEQ ID NO: 5746206 - DNA, 25 bp, Homo sapien
cactggcagcagagacagcagcagc

SEQ ID NO: 5746207 - DNA, 25 bp, Homo sapien
tggacacctcgaaatggatgatgac

SEQ ID NO: 5746208 - DNA, 25 bp, Homo sapien
ttcgccgccgctgggtttccagcgc

SEQ ID NO: 5746209 - DNA, 25 bp, Homo sapien
agggacacgcatgaactctgcccca

SEQ ID NO: 5746210 - DNA, 25 bp, Homo sapien
atctcattgtaatcttcaaacagcc

SEQ ID NO: 5746211 - DNA, 25 bp, Homo sapien
ggtaatcaaacgggaagtaggtcac

SEQ ID NO: 5746212 - DNA, 25 bp, Homo sapien
cacgttggctacaggccggatgatc

SEQ ID NO: 5746213 - DNA, 25 bp, Homo sapien
tggtttacttcatccaccttcacca

SEQ ID NO: 5746214 - DNA, 25 bp, Homo sapien
accaggaaccgaacttcatggtaca

SEQ ID NO: 5746215 - DNA, 25 bp, Homo sapien
aggtgctgtcaccaccaccaggaag

SEQ ID NO: 5746216 - DNA, 25 bp, Homo sapien
agtaaccacacatcccgtcctggca

SEQ ID NO: 5746217 - DNA, 25 bp, Homo sapien
ccttctcaccgcagtcggagggcag

SEQ ID NO: 5746218 - DNA, 25 bp, Homo sapien
gcgggccagagcccatggctggtgg

SEQ ID NO: 5746219 - DNA, 25 bp, Homo sapien
gatgaccagcgaggtggaagggatg

SEQ ID NO: 5746220 - DNA, 25 bp, Homo sapien
gccgatcaggaccagatcgattttc

SEQ ID NO: 5746221 - DNA, 25 bp, Homo sapien
tgaggttcatggaagagccgatcag

SEQ ID NO: 5746222 - DNA, 25 bp, Homo sapien
gggcattgtgtgtgtcgtcggggtt

SEQ ID NO: 5746223 - DNA, 25 bp, Homo sapien
ggaccaccgggctaggcgggcgccg

SEQ ID NO: 5746224 - DNA, 25 bp, Homo sapien
aggtcccagtccccagcgccgggcg

SEQ ID NO: 5746225 - DNA, 25 bp, Homo sapien
atccccaacagcattgttatacagc

SEQ ID NO: 5746226 - DNA, 25 bp, Homo sapien
acttcatccaccttcaccagctgag

SEQ ID NO: 5746227 - DNA, 25 bp, Homo sapien
gctcagcctctgaggccctggccac

SEQ ID NO: 5746228 - DNA, 25 bp, Homo sapien
cctgcggtggtggcagtaaccacac

SEQ ID NO: 5746229 - DNA, 25 bp, Homo sapien
ttagcactgaaattggagattttta

SEQ ID NO: 5746230 - DNA, 25 bp, Homo sapien
ggtatccaagtcacctccccagtgt

SEQ ID NO: 5746231 - DNA, 25 bp, Homo sapien
cagggggatgaccagcgaggtggaa

SEQ ID NO: 5746232 - DNA, 25 bp, Homo sapien
tcattttgtgctttcatattttcag

SEQ ID NO: 5746233 - DNA, 25 bp, Homo sapien
gagcaggtgctgtcaccaccaccag

SEQ ID NO: 5746234 - DNA, 25 bp, Homo sapien
gatgtttctgtggacttttcttttc

SEQ ID NO: 5746235 - DNA, 25 bp, Homo sapien
agcagcagcagcagcagcagccgcg

SEQ ID NO: 5746236 - DNA, 25 bp, Homo sapien
tgcttgagccacaggttggtctcca

SEQ ID NO: 5746237 - DNA, 25 bp, Homo sapien
ccctccttgcagcctttggactctg

SEQ ID NO: 5746238 - DNA, 25 bp, Homo sapien
ggtcgggagcgggcgcggcggtcgc

SEQ ID NO: 5746239 - DNA, 25 bp, Homo sapien
cagctcccgcagggggttgggacca

SEQ ID NO: 5746240 - DNA, 25 bp, Homo sapien
gcgtccgaccagatctgagcaggtg

SEQ ID NO: 5746241 - DNA, 25 bp, Homo sapien
cagggagaggaggacagaaatgcac

SEQ ID NO: 5746242 - DNA, 25 bp, Homo sapien
agatctgagcaggtgctgtcaccac

SEQ ID NO: 5746243 - DNA, 25 bp, Homo sapien
tggggctttgatgatggcccactcg

SEQ ID NO: 5746244 - DNA, 25 bp, Homo sapien
ggaaggagagggactcagtttctgt

SEQ ID NO: 5746245 - DNA, 25 bp, Homo sapien
ctccaggtcccagtccccagcgccg

SEQ ID NO: 5746246 - DNA, 25 bp, Homo sapien
aggagagacgctaacacaccctggg

SEQ ID NO: 5746247 - DNA, 25 bp, Homo sapien
ggcggtcgcagagacggcctctccc

SEQ ID NO: 5746248 - DNA, 25 bp, Homo sapien
tgatgatggcccactcgccgctctc

SEQ ID NO: 5746249 - DNA, 25 bp, Homo sapien
gcagggggttgggaccaccgggcta

SEQ ID NO: 5746250 - DNA, 25 bp, Homo sapien
ccgcagtcggagggcaggtagaaga

SEQ ID NO: 5746251 - DNA, 25 bp, Homo sapien
ttttacaggagctcttaaagatggc

SEQ ID NO: 5746252 - DNA, 25 bp, Homo sapien
cggggctcctctccgcttcgccgcc

SEQ ID NO: 5746253 - DNA, 25 bp, Homo sapien
accaccgggctaggcgggcgccgta

SEQ ID NO: 5746254 - DNA, 25 bp, Homo sapien
caaacagccgctcaaatagacggtg

SEQ ID NO: 5746255 - DNA, 25 bp, Homo sapien
ctgcgcggctgaagcaattcagatt

SEQ ID NO: 5746256 - DNA, 25 bp, Homo sapien
cagcgagtatgtgatgtcggggtag

SEQ ID NO: 5746257 - DNA, 25 bp, Homo sapien
cacgaagacggtgatgacgatggac

SEQ ID NO: 5746258 - DNA, 25 bp, Homo sapien
ggctggtggccgggctggccgcgga

SEQ ID NO: 5746259 - DNA, 25 bp, Homo sapien
ccgtaggagagacgctaacacaccc

SEQ ID NO: 5746260 - DNA, 25 bp, Homo sapien
tcacctccccagtgtacttgagtaa

SEQ ID NO: 5746261 - DNA, 25 bp, Homo sapien
cctctgaggccctggccactggcag

SEQ ID NO: 5746262 - DNA, 25 bp, Homo sapien
cggtgctcagcctctgaggccctgg

SEQ ID NO: 5746263 - DNA, 25 bp, Homo sapien
agatttttatcctgcggtggtggca

SEQ ID NO: 5746264 - DNA, 25 bp, Homo sapien
ttttcgccttatcgtaggaccagga

SEQ ID NO: 5746265 - DNA, 25 bp, Homo sapien
tgtagtgcacgttgagcacgaagac

SEQ ID NO: 5746266 - DNA, 25 bp, Homo sapien
aggccggatgatctcattgtaatct

SEQ ID NO: 5746267 - DNA, 25 bp, Homo sapien
gcgagagcgggccagagcccatggc

SEQ ID NO: 5746268 - DNA, 25 bp, Homo sapien
tgaagattggaaattcatagcccag

SEQ ID NO: 5746269 - DNA, 25 bp, Homo sapien
gagcgttgccctcgttgcttgttgg

SEQ ID NO: 5746270 - DNA, 25 bp, Homo sapien
gttgaagattggaaattcatagccc

SEQ ID NO: 5746271 - DNA, 25 bp, Homo sapien
cagagacggcctctccccgcgcggc

SEQ ID NO: 5746272 - DNA, 25 bp, Homo sapien
ccaacagcattgttatacagcacaa

SEQ ID NO: 5746273 - DNA, 25 bp, Homo sapien
gatggcttctttgatttctggtgac

SEQ ID NO: 5746274 - DNA, 25 bp, Homo sapien
attgtgtgtgtcgtcggggttctgt

SEQ ID NO: 5746275 - DNA, 25 bp, Homo sapien
ctcccaatagtccttgaggttcatg

SEQ ID NO: 5746276 - DNA, 25 bp, Homo sapien
ctgagacatggacacctcgaaatgg

SEQ ID NO: 5746277 - DNA, 25 bp, Homo sapien
caggttcttgatcggatgtttctgt

SEQ ID NO: 5746278 - DNA, 25 bp, Homo sapien
tcatggaagagccgatcaggaccag

SEQ ID NO: 5746279 - DNA, 25 bp, Homo sapien
gaaatgcacagggtcaccttctcac

SEQ ID NO: 5746280 - DNA, 25 bp, Homo sapien
atgactgggtcagacacgttggcta

SEQ ID NO: 5746281 - DNA, 25 bp, Homo sapien
cagacacgttggctacaggccggat

SEQ ID NO: 5746282 - DNA, 25 bp, Homo sapien
tatacttgacactttggatggcttc

SEQ ID NO: 5746283 - DNA, 25 bp, Homo sapien
ttcttttcgtttcaattgttggatc

SEQ ID NO: 5746284 - DNA, 25 bp, Homo sapien
caccaccaggaaggagagggactca

SEQ ID NO: 5746285 - DNA, 25 bp, Homo sapien
ttgcagcctttggactctgcgcggc

SEQ ID NO: 5746286 - DNA, 25 bp, Homo sapien
gtttccagcgccctcggacccgcgg

SEQ ID NO: 5746287 - DNA, 25 bp, Homo sapien
cccgcgggaggacaggaaccatccg

SEQ ID NO: 5746288 - DNA, 25 bp, Homo sapien
tcgtgtttgtagcctggggctttga

SEQ ID NO: 5746289 - DNA, 25 bp, Homo sapien
caggaaccgaacttcatggtacagt

SEQ ID NO: 5746290 - DNA, 25 bp, Homo sapien
gggtcaccttctcaccgcagtcgga

SEQ ID NO: 5746291 - DNA, 25 bp, Homo sapien
gtagcctggggctttgatgatggcc

SEQ ID NO: 5746292 - DNA, 25 bp, Homo sapien
agtcacctccccagtgtacttgagt

SEQ ID NO: 5746293 - DNA, 25 bp, Homo sapien
agcttctcgtgaggttagcactgaa

SEQ ID NO: 5746294 - DNA, 25 bp, Homo sapien
tcaccaccaccaggaaggagaggga

SEQ ID NO: 5746295 - DNA, 25 bp, Homo sapien
gtcacgtcgattttacaggagctct

SEQ ID NO: 5746296 - DNA, 25 bp, Homo sapien
gggcgagctccttctccgccgggct

SEQ ID NO: 5746297 - DNA, 25 bp, Homo sapien
ttgttggcctggtcatgaacatgac

SEQ ID NO: 5746298 - DNA, 25 bp, Homo sapien
agcacgaagacggtgatgacgatgg

SEQ ID NO: 5746299 - DNA, 25 bp, Homo sapien
ctcattgtaatcttcaaacagccgc

SEQ ID NO: 5746300 - DNA, 25 bp, Homo sapien
tgatcggatgtttctgtggactttt

SEQ ID NO: 5746301 - DNA, 25 bp, Homo sapien
gttgagcacgaagacggtgatgacg

SEQ ID NO: 5746302 - DNA, 25 bp, Homo sapien
gaaacaccgtcagggagaggaggac

SEQ ID NO: 5746303 - DNA, 25 bp, Homo sapien
ggcagcgagagcgggccagagccca

SEQ ID NO: 5746304 - DNA, 25 bp, Homo sapien
tggacttttcttttcgtttcaattg

SEQ ID NO: 5746305 - DNA, 25 bp, Homo sapien
caccaggagaaacaccgtcagggag

SEQ ID NO: 5746306 - DNA, 25 bp, Homo sapien
tcagcctctgaggccctggccactg

SEQ ID NO: 5746307 - DNA, 25 bp, Homo sapien
ggtgctccggccggcggcgtccgac

SEQ ID NO: 5746308 - DNA, 25 bp, Homo sapien
caggttgttgaagattggaaattca

SEQ ID NO: 5746309 - DNA, 25 bp, Homo sapien
gtcctggcaggggtagccctccttg

SEQ ID NO: 5746310 - DNA, 25 bp, Homo sapien
ccatgagggcattgtgtgtgtcgtc

SEQ ID NO: 5746311 - DNA, 25 bp, Homo sapien
ccaccaggaaggagagggactcagt

SEQ ID NO: 5746312 - DNA, 25 bp, Homo sapien
gtggtggcagtaaccacacatcccg

SEQ ID NO: 5746313 - DNA, 25 bp, Homo sapien
gtcgcagagacggcctctccccgcg

SEQ ID NO: 5746314 - DNA, 25 bp, Homo sapien
agagagggacagcacagcatcaaca

SEQ ID NO: 5746315 - DNA, 25 bp, Homo sapien
tcccgtcctggcaggggtagccctc

SEQ ID NO: 5746316 - DNA, 25 bp, Homo sapien
tctgtagtgcacgttgagcacgaag

SEQ ID NO: 5746317 - DNA, 25 bp, Homo sapien
atacagcacaatgtctggcttccag

SEQ ID NO: 5746318 - DNA, 25 bp, Homo sapien
gaggaggacagaaatgcacagggtc

SEQ ID NO: 5746319 - DNA, 25 bp, Homo sapien
aaattcatagcccaggttcttgatc

SEQ ID NO: 5746320 - DNA, 25 bp, Homo sapien
ttcatggtacagttttggtaatcaa

SEQ ID NO: 5746321 - DNA, 25 bp, Homo sapien
gttgggaccaccgggctaggcgggc

SEQ ID NO: 5746322 - DNA, 25 bp, Homo sapien
tcagaactagagcttctcgtgaggt

SEQ ID NO: 5746323 - DNA, 25 bp, Homo sapien
ctcttgggctttttgttcctctttg

SEQ ID NO: 5746324 - DNA, 25 bp, Homo sapien
ccaggtcccagtccccagcgccggg

SEQ ID NO: 5746325 - DNA, 25 bp, Homo sapien
tcttaaagatggccggaggtatcca

SEQ ID NO: 5746326 - DNA, 25 bp, Homo sapien
cctggccactggcagcagagacagc

SEQ ID NO: 5746327 - DNA, 25 bp, Homo sapien
agggcaggtagaagacgagcacagt

SEQ ID NO: 5746328 - DNA, 25 bp, Homo sapien
ccctcggacccgcgggaggacagga

SEQ ID NO: 5746329 - DNA, 25 bp, Homo sapien
gccgctcaaatagacggtgctcagc

SEQ ID NO: 5746330 - DNA, 25 bp, Homo sapien
ggctccaggtcccagtccccagcgc

SEQ ID NO: 5746331 - DNA, 25 bp, Homo sapien
gttcatggaagagccgatcaggacc

SEQ ID NO: 5746332 - DNA, 25 bp, Homo sapien
agtcggagggcaggtagaagacgag

SEQ ID NO: 5746333 - DNA, 25 bp, Homo sapien
ggggcgtgtgcagctcccgcagggg

SEQ ID NO: 5746334 - DNA, 25 bp, Homo sapien
gacgcgcggggctcctctccgcttc

SEQ ID NO: 5746335 - DNA, 25 bp, Homo sapien
gtccgaccagatctgagcaggtgct

SEQ ID NO: 5746336 - DNA, 25 bp, Homo sapien
tcattccagatttgcttgagccaca

SEQ ID NO: 5746337 - DNA, 25 bp, Homo sapien
acaggccggatgatctcattgtaat

SEQ ID NO: 5746338 - DNA, 25 bp, Homo sapien
cgcggggctcctctccgcttcgccg

SEQ ID NO: 5746339 - DNA, 25 bp, Homo sapien
aacaggttgttgaagattggaaatt

SEQ ID NO: 5746340 - DNA, 25 bp, Homo sapien
tggccgcggacccggacggtcggga

SEQ ID NO: 5746341 - DNA, 25 bp, Homo sapien
tttctggtgacaaagcagagaggga

SEQ ID NO: 5746342 - DNA, 25 bp, Homo sapien
tgtcaccaccaccaggaaggagagg

SEQ ID NO: 5746343 - DNA, 25 bp, Homo sapien
acaagggcaggcgccggatgtacag

SEQ ID NO: 5746344 - DNA, 25 bp, Homo sapien
ctttggcttcattttgtgctttcat

SEQ ID NO: 5746345 - DNA, 25 bp, Homo sapien
cgtaggaccaggaaccgaacttcat

SEQ ID NO: 5746346 - DNA, 25 bp, Homo sapien
ccgggcgagctccttctccgccggg

SEQ ID NO: 5746347 - DNA, 25 bp, Homo sapien
ggtctcagtgatcaccaggagaaac

SEQ ID NO: 5746348 - DNA, 25 bp, Homo sapien
agcgccctcggacccgcgggaggac

SEQ ID NO: 5746349 - DNA, 25 bp, Homo sapien
taaccacacatcccgtcctggcagg

SEQ ID NO: 5746350 - DNA, 25 bp, Homo sapien
atgaactctgccccaccatagtcag

SEQ ID NO: 5746351 - DNA, 25 bp, Homo sapien
ccaccatagtcagaggggttccatt

SEQ ID NO: 5746352 - DNA, 25 bp, Homo sapien
ggaaccatccggagtgaagctgcgc

SEQ ID NO: 5746353 - DNA, 25 bp, Homo sapien
gcgccaggggcagcgagagcgggcc

SEQ ID NO: 5746354 - DNA, 25 bp, Homo sapien
ccaggcgcgggcgggcgggcgggcg

SEQ ID NO: 5746355 - DNA, 25 bp, Homo sapien
taaggctttggtcttgtcgtccacc

SEQ ID NO: 5746356 - DNA, 25 bp, Homo sapien
gggttctgtagtgcacgttgagcac

SEQ ID NO: 5746357 - DNA, 25 bp, Homo sapien
tcgattttacaggagctcttaaaga

SEQ ID NO: 5746358 - DNA, 25 bp, Homo sapien
ggcggagacgcgcggggctcctctc

SEQ ID NO: 5746359 - DNA, 25 bp, Homo sapien
gtatgtgatgtcggggtagatctcc

SEQ ID NO: 5746360 - DNA, 25 bp, Homo sapien
gaccagatctgagcaggtgctgtca

SEQ ID NO: 5746361 - DNA, 25 bp, Homo sapien
cggatgtttctgtggacttttcttt

SEQ ID NO: 5746362 - DNA, 25 bp, Homo sapien
gccggatgatctcattgtaatcttc

SEQ ID NO: 5746363 - DNA, 25 bp, Homo sapien
gaacatgaccctggggagcaggttc

SEQ ID NO: 5746364 - DNA, 25 bp, Homo sapien
tttggatggcttctttgatttctgg

SEQ ID NO: 5746365 - DNA, 25 bp, Homo sapien
accccagacctggagccgtgcgggc

SEQ ID NO: 5746366 - DNA, 25 bp, Homo sapien
ttccggggcgtgtgcagctcccgca

SEQ ID NO: 5746367 - DNA, 25 bp, Homo sapien
gcagcagcagcagcagccgcggcgg

SEQ ID NO: 5746368 - DNA, 25 bp, Homo sapien
cagatcgattttcgccttatcgtag

SEQ ID NO: 5746369 - DNA, 25 bp, Homo sapien
gggggatgaccagcgaggtggaagg

SEQ ID NO: 5746370 - DNA, 25 bp, Homo sapien
gatttgcttgagccacaggttggtc

SEQ ID NO: 5746371 - DNA, 25 bp, Homo sapien
agcacagcatcaacagattcagaac

SEQ ID NO: 5746372 - DNA, 25 bp, Homo sapien
acgcatgaactctgccccaccatag

SEQ ID NO: 5746373 - DNA, 25 bp, Homo sapien
caaacgggaagtaggtcacgtcgat

SEQ ID NO: 5746374 - DNA, 25 bp, Homo sapien
aggcgcgggcgggcgggcgggcgtg

SEQ ID NO: 5746375 - DNA, 25 bp, Homo sapien
aggagctcttaaagatggccggagg

SEQ ID NO: 5746376 - DNA, 25 bp, Homo sapien
ttgatgtcgtgtttgtagcctgggg

SEQ ID NO: 5746377 - DNA, 25 bp, Homo sapien
aggtcacgtcgattttacaggagct

SEQ ID NO: 5746378 - DNA, 25 bp, Homo sapien
aagattggaaattcatagcccaggt

SEQ ID NO: 5746379 - DNA, 25 bp, Homo sapien
gattttacaggagctcttaaagatg

SEQ ID NO: 5746380 - DNA, 25 bp, Homo sapien
tcgggagcgggcgcggcggtcgcag

SEQ ID NO: 5746381 - DNA, 25 bp, Homo sapien
ttcgccttatcgtaggaccaggaac

SEQ ID NO: 5746382 - DNA, 25 bp, Homo sapien
acgttgagcacgaagacggtgatga

SEQ ID NO: 5746383 - DNA, 25 bp, Homo sapien
atcaaacgggaagtaggtcacgtcg

SEQ ID NO: 5746384 - DNA, 25 bp, Homo sapien
aggttcatggaagagccgatcagga

SEQ ID NO: 5746385 - DNA, 25 bp, Homo sapien
gcttgttggcctggtcatgaacatg

SEQ ID NO: 5746386 - DNA, 25 bp, Homo sapien
ccgtcagggagaggaggacagaaat

SEQ ID NO: 5746387 - DNA, 25 bp, Homo sapien
cagcgcagaccccagacctggagcc

SEQ ID NO: 5746388 - DNA, 25 bp, Homo sapien
tcctctttggcttcattttgtgctt

SEQ ID NO: 5746389 - DNA, 25 bp, Homo sapien
caggggcagcgagagcgggccagag

SEQ ID NO: 5746390 - DNA, 25 bp, Homo sapien
tctccaatcagggggatgaccagcg

SEQ ID NO: 5746391 - DNA, 25 bp, Homo sapien
tcctctccgcttcgccgccgctggg

SEQ ID NO: 5746392 - DNA, 25 bp, Homo sapien
gatttctggtgacaaagcagagagg

SEQ ID NO: 5746393 - DNA, 25 bp, Homo sapien
gcggcggtcgcagagacggcctctc

SEQ ID NO: 5746394 - DNA, 25 bp, Homo sapien
acggtcgggagcgggcgcggcggtc

SEQ ID NO: 5746395 - DNA, 25 bp, Homo sapien
cgcggctccagcgcagaccccagac

SEQ ID NO: 5746396 - DNA, 25 bp, Homo sapien
cgccgccgctgggtttccagcgccc

SEQ ID NO: 5746397 - DNA, 25 bp, Homo sapien
aggttggtctccatgatctggttta

SEQ ID NO: 5746398 - DNA, 25 bp, Homo sapien
ccctcgttgcttgttggcctggtca

SEQ ID NO: 5746399 - DNA, 25 bp, Homo sapien
agtgaagctgcgccaggcgcgggcg

SEQ ID NO: 5746400 - DNA, 25 bp, Homo sapien
gagacatggacacctcgaaatggat

SEQ ID NO: 5746401 - DNA, 25 bp, Homo sapien
cagtccccagcgccgggcgagctcc

SEQ ID NO: 5746402 - DNA, 25 bp, Homo sapien
ggcggcgtccgaccagatctgagca

SEQ ID NO: 5746403 - DNA, 25 bp, Homo sapien
cgctcaaatagacggtgctcagcct

SEQ ID NO: 5746404 - DNA, 25 bp, Homo sapien
acagattcagaactagagcttctcg

SEQ ID NO: 5746405 - DNA, 25 bp, Homo sapien
gggctaggcgggcgccgtaggagag

SEQ ID NO: 5746406 - DNA, 25 bp, Homo sapien
gctggccgcggacccggacggtcgg

SEQ ID NO: 5746407 - DNA, 25 bp, Homo sapien
catccaccttcaccagctgagacat

SEQ ID NO: 5746408 - DNA, 25 bp, Homo sapien
tgcgccaggcgcgggcgggcgggcg

SEQ ID NO: 5746409 - DNA, 25 bp, Homo sapien
ctggcttccagatcttctgtgcagg

SEQ ID NO: 5746410 - DNA, 25 bp, Homo sapien
gctcccgcagggggttgggaccacc

SEQ ID NO: 5746411 - DNA, 25 bp, Homo sapien
aagtttcgtcccaaggatcattcgt

SEQ ID NO: 5746412 - DNA, 25 bp, Homo sapien
acgaatgatccttgggacgaaactt

SEQ ID NO: 5746413 - DNA, 25 bp, Homo sapien
ctagggctggcaccgctgctggcgc

SEQ ID NO: 5746414 - DNA, 25 bp, Homo sapien
aaatattacaaatgaaatgggtgaa

SEQ ID NO: 5746415 - DNA, 25 bp, Homo sapien
ttgttagagaatacggcaaatggga

SEQ ID NO: 5746416 - DNA, 25 bp, Homo sapien
tgtaaaaatatagtttgggtcccca

SEQ ID NO: 5746417 - DNA, 25 bp, Homo sapien
tgagctcacgggcaccgttcaaata

SEQ ID NO: 5746418 - DNA, 25 bp, Homo sapien
gtaaatgctcttctctcctacaagc

SEQ ID NO: 5746419 - DNA, 25 bp, Homo sapien
cgctggtggatgtcaacgtgtacct

SEQ ID NO: 5746420 - DNA, 25 bp, Homo sapien
tacaacgcgtggctttcgtacgagc

SEQ ID NO: 5746421 - DNA, 25 bp, Homo sapien
ctgttggcgcctagggctggcaccg

SEQ ID NO: 5746422 - DNA, 25 bp, Homo sapien
gaataagagaagcagcaggacttta

SEQ ID NO: 5746423 - DNA, 25 bp, Homo sapien
ataggagtaaatgctcttctctcct

SEQ ID NO: 5746424 - DNA, 25 bp, Homo sapien
gcgcgccaggaaagcccacgctggt

SEQ ID NO: 5746425 - DNA, 25 bp, Homo sapien
ttatctcaaggtccagactccgcag

SEQ ID NO: 5746426 - DNA, 25 bp, Homo sapien
aactgctgaggttaatttgttactg

SEQ ID NO: 5746427 - DNA, 25 bp, Homo sapien
tgagctggtggtgaccgcacgggac

SEQ ID NO: 5746428 - DNA, 25 bp, Homo sapien
catcccgttccgcgtggggctatac

SEQ ID NO: 5746429 - DNA, 25 bp, Homo sapien
atacaggcaaatgatgaactaagcg

SEQ ID NO: 5746430 - DNA, 25 bp, Homo sapien
gcacgacacgtgccctagacgaggc

SEQ ID NO: 5746431 - DNA, 25 bp, Homo sapien
cccgccaatatttccaatgacagta

SEQ ID NO: 5746432 - DNA, 25 bp, Homo sapien
gtcagcgtgggatgcggacgcgcag

SEQ ID NO: 5746433 - DNA, 25 bp, Homo sapien
cgtccccgaggaggccaaacacggc

SEQ ID NO: 5746434 - DNA, 25 bp, Homo sapien
aagagaagcagcaggactttaacag

SEQ ID NO: 5746435 - DNA, 25 bp, Homo sapien
catctgatgcagatataggagtaaa

SEQ ID NO: 5746436 - DNA, 25 bp, Homo sapien
tagagagggagcgtaaagctatttt

SEQ ID NO: 5746437 - DNA, 25 bp, Homo sapien
tgctccctgacgccccacgtccctt

SEQ ID NO: 5746438 - DNA, 25 bp, Homo sapien
gccctagcttatctcaaggtccaga

SEQ ID NO: 5746439 - DNA, 25 bp, Homo sapien
tgttggtgctcacggtgctgctgta

SEQ ID NO: 5746440 - DNA, 25 bp, Homo sapien
aaacgcttctgatgcagatgaagga

SEQ ID NO: 5746441 - DNA, 25 bp, Homo sapien
ttctcggatcgaccgggaggagctg

SEQ ID NO: 5746442 - DNA, 25 bp, Homo sapien
gaatcaaggctgcttgattctcggt

SEQ ID NO: 5746443 - DNA, 25 bp, Homo sapien
cggccagctccgctactccgtcccc

SEQ ID NO: 5746444 - DNA, 25 bp, Homo sapien
tagtttgggtccccacatagtgaaa

SEQ ID NO: 5746445 - DNA, 25 bp, Homo sapien
gagtaaatgctcttctctcctacaa

SEQ ID NO: 5746446 - DNA, 25 bp, Homo sapien
ggacctggggctggagctggaggag

SEQ ID NO: 5746447 - DNA, 25 bp, Homo sapien
ggtgcgcgcagtggacgctgactca

SEQ ID NO: 5746448 - DNA, 25 bp, Homo sapien
gccgtggtcggtgggtgcagggcac

SEQ ID NO: 5746449 - DNA, 25 bp, Homo sapien
agagcgtgtcagcctatgagctggt

SEQ ID NO: 5746450 - DNA, 25 bp, Homo sapien
tgcgcgcagtggacgctgactcagg

SEQ ID NO: 5746451 - DNA, 25 bp, Homo sapien
gcggtgctcggtgccacccaccgag

SEQ ID NO: 5746452 - DNA, 25 bp, Homo sapien
cacgctggtgtgctccagcgccgtg

SEQ ID NO: 5746453 - DNA, 25 bp, Homo sapien
gtggacatcaatgataacacaccag

SEQ ID NO: 5746454 - DNA, 25 bp, Homo sapien
tccgtccccgaggaggccaaacacg

SEQ ID NO: 5746455 - DNA, 25 bp, Homo sapien
gtgctgctgtacactgcgctgcggt

SEQ ID NO: 5746456 - DNA, 25 bp, Homo sapien
gactagaatatttaaatttttgcaa

SEQ ID NO: 5746457 - DNA, 25 bp, Homo sapien
tacaagctcagctccagtgagtttt

SEQ ID NO: 5746458 - DNA, 25 bp, Homo sapien
gacacggggaccttctggaggtaaa

SEQ ID NO: 5746459 - DNA, 25 bp, Homo sapien
caaggtccagactccgcagaagaga

SEQ ID NO: 5746460 - DNA, 25 bp, Homo sapien
ttttaaatggctaccattatgtctt

SEQ ID NO: 5746461 - DNA, 25 bp, Homo sapien
atctgcagaatggcattttgtttgt

SEQ ID NO: 5746462 - DNA, 25 bp, Homo sapien
gatgaaaataactttatggatatag

SEQ ID NO: 5746463 - DNA, 25 bp, Homo sapien
ttcgcacagcctgagtacacagtat

SEQ ID NO: 5746464 - DNA, 25 bp, Homo sapien
gctgactcaggctacaacgcgtggc

SEQ ID NO: 5746465 - DNA, 25 bp, Homo sapien
ccctgacgccccacgtccctttcaa

SEQ ID NO: 5746466 - DNA, 25 bp, Homo sapien
gtttgtgtgagtgtagttcttcaat

SEQ ID NO: 5746467 - DNA, 25 bp, Homo sapien
cgggcgtgggtgggcgccgcgggct

SEQ ID NO: 5746468 - DNA, 25 bp, Homo sapien
ctctcctacaagctcagctccagtg

SEQ ID NO: 5746469 - DNA, 25 bp, Homo sapien
aaacacggcaccttcgtgggccgca

SEQ ID NO: 5746470 - DNA, 25 bp, Homo sapien
gttcgtgctggacgagaacgacaac

SEQ ID NO: 5746471 - DNA, 25 bp, Homo sapien
tcccatctcaggggaaatcagaact

SEQ ID NO: 5746472 - DNA, 25 bp, Homo sapien
attcttcctccttttttccaatgtg

SEQ ID NO: 5746473 - DNA, 25 bp, Homo sapien
catgctcttctaatttgatcaaaac

SEQ ID NO: 5746474 - DNA, 25 bp, Homo sapien
gaggtgatcgtggacaggccgctgc

SEQ ID NO: 5746475 - DNA, 25 bp, Homo sapien
cgcgcaggacctggggctggagctg

SEQ ID NO: 5746476 - DNA, 25 bp, Homo sapien
tcttctctcctacaagctcagctcc

SEQ ID NO: 5746477 - DNA, 25 bp, Homo sapien
ctggaccacgaggaagtggagctgc

SEQ ID NO: 5746478 - DNA, 25 bp, Homo sapien
tcaggtcactgcaactgacaaagga

SEQ ID NO: 5746479 - DNA, 25 bp, Homo sapien
cgtggtcggtgggtgcagggcacgt

SEQ ID NO: 5746480 - DNA, 25 bp, Homo sapien
gccagctccgctactccgtccccga

SEQ ID NO: 5746481 - DNA, 25 bp, Homo sapien
gcaaatgatgaactaagcgaatctt

SEQ ID NO: 5746482 - DNA, 25 bp, Homo sapien
tacgagattcaggtcactgcaactg

SEQ ID NO: 5746483 - DNA, 25 bp, Homo sapien
gacaatgaaccaacttttgcccaat

SEQ ID NO: 5746484 - DNA, 25 bp, Homo sapien
actactcgttggtgctggacagcgc

SEQ ID NO: 5746485 - DNA, 25 bp, Homo sapien
acagagaggaaactgctgaggttaa

SEQ ID NO: 5746486 - DNA, 25 bp, Homo sapien
tggtgccgtggtcggtgggtgcagg

SEQ ID NO: 5746487 - DNA, 25 bp, Homo sapien
tcggatcgcgactctggtacgaatg

SEQ ID NO: 5746488 - DNA, 25 bp, Homo sapien
gttaagttaaacgcttctgatgcag

SEQ ID NO: 5746489 - DNA, 25 bp, Homo sapien
tgctgcattccccatctgtacatta

SEQ ID NO: 5746490 - DNA, 25 bp, Homo sapien
ggacccccccaagacggacctcatg

SEQ ID NO: 5746491 - DNA, 25 bp, Homo sapien
cgctggacagagaggaaactgctga

SEQ ID NO: 5746492 - DNA, 25 bp, Homo sapien
ctagaatatttaaatttttgcaaaa

SEQ ID NO: 5746493 - DNA, 25 bp, Homo sapien
gtggctttcgtacgagcttcagctg

SEQ ID NO: 5746494 - DNA, 25 bp, Homo sapien
tcttcacggtgtcagcgtgggatgc

SEQ ID NO: 5746495 - DNA, 25 bp, Homo sapien
gtggccgacgtgaacgacaacgcgc

SEQ ID NO: 5746496 - DNA, 25 bp, Homo sapien
tccagtgagtttttcttcctagata

SEQ ID NO: 5746497 - DNA, 25 bp, Homo sapien
caacccgccgggctgccacatcttc

SEQ ID NO: 5746498 - DNA, 25 bp, Homo sapien
ttttccatgtggaagtggaggtgaa

SEQ ID NO: 5746499 - DNA, 25 bp, Homo sapien
acttgtggacatcaatgataacaca

SEQ ID NO: 5746500 - DNA, 25 bp, Homo sapien
tgctggcgcagtgagtgagctggtg

SEQ ID NO: 5746501 - DNA, 25 bp, Homo sapien
agctcagctccagtgagtttttctt

SEQ ID NO: 5746502 - DNA, 25 bp, Homo sapien
aataacgtctctctcacttcccatc

SEQ ID NO: 5746503 - DNA, 25 bp, Homo sapien
agggcacgtggtggcgaaggtgcgc

SEQ ID NO: 5746504 - DNA, 25 bp, Homo sapien
ggacattgtaaaatttcattaaaac

SEQ ID NO: 5746505 - DNA, 25 bp, Homo sapien
aattactactcgttggtgctggaca

SEQ ID NO: 5746506 - DNA, 25 bp, Homo sapien
gcgggatgcgggcgtgccgcctctg

SEQ ID NO: 5746507 - DNA, 25 bp, Homo sapien
agcatctgatgcagatataggagta

SEQ ID NO: 5746508 - DNA, 25 bp, Homo sapien
catcgccatctgcgcggtatccagc

SEQ ID NO: 5746509 - DNA, 25 bp, Homo sapien
gtggcgaaggtgcgcgcagtggacg

SEQ ID NO: 5746510 - DNA, 25 bp, Homo sapien
gcgttgtcgagctacgtttcggtgc

SEQ ID NO: 5746511 - DNA, 25 bp, Homo sapien
gcgcgggatgcgggcgtgccgcctc

SEQ ID NO: 5746512 - DNA, 25 bp, Homo sapien
cttcctagatatacaggcaaatgat

SEQ ID NO: 5746513 - DNA, 25 bp, Homo sapien
cactgttggcgcctagggctggcac

SEQ ID NO: 5746514 - DNA, 25 bp, Homo sapien
ctctggtttctgtttgattcagaaa

SEQ ID NO: 5746515 - DNA, 25 bp, Homo sapien
agaggcggcagagggtgtgctctgg

SEQ ID NO: 5746516 - DNA, 25 bp, Homo sapien
ccccaagacggacctcatggccttc

SEQ ID NO: 5746517 - DNA, 25 bp, Homo sapien
aacccgccaatatttccaatgacag

SEQ ID NO: 5746518 - DNA, 25 bp, Homo sapien
gatgcggacgcgcaggagaacgcgc

SEQ ID NO: 5746519 - DNA, 25 bp, Homo sapien
tggaggtgatcgtggacaggccgct

SEQ ID NO: 5746520 - DNA, 25 bp, Homo sapien
gcgcgttgtcgagctacgtttcggt

SEQ ID NO: 5746521 - DNA, 25 bp, Homo sapien
gagtttttcttcctagatatacagg

SEQ ID NO: 5746522 - DNA, 25 bp, Homo sapien
tgcagatgaaggaccgaacagcgag

SEQ ID NO: 5746523 - DNA, 25 bp, Homo sapien
ggtttctgtttgattcagaaatttg

SEQ ID NO: 5746524 - DNA, 25 bp, Homo sapien
cggacctcatggccttcagccctag

SEQ ID NO: 5746525 - DNA, 25 bp, Homo sapien
acagcgccctggaccgcgagagcgt

SEQ ID NO: 5746526 - DNA, 25 bp, Homo sapien
gggacgggggctcgccttcactgtg

SEQ ID NO: 5746527 - DNA, 25 bp, Homo sapien
tttcattaaaacttgtggacatcaa

SEQ ID NO: 5746528 - DNA, 25 bp, Homo sapien
tgcggacgcgcaggagaacgcgctg

SEQ ID NO: 5746529 - DNA, 25 bp, Homo sapien
gcattttgtttgtgaattctcggat

SEQ ID NO: 5746530 - DNA, 25 bp, Homo sapien
agcggcgggtgggcgagcgcgcgtt

SEQ ID NO: 5746531 - DNA, 25 bp, Homo sapien
ggggctcgccttcactgtgggccac

SEQ ID NO: 5746532 - DNA, 25 bp, Homo sapien
actatacagactaagtttaccatag

SEQ ID NO: 5746533 - DNA, 25 bp, Homo sapien
tctcggtttcctctagagggagcat

SEQ ID NO: 5746534 - DNA, 25 bp, Homo sapien
aagacggacctcatggccttcagcc

SEQ ID NO: 5746535 - DNA, 25 bp, Homo sapien
cctcgacaccgcctactcgtgctgg

SEQ ID NO: 5746536 - DNA, 25 bp, Homo sapien
acgtgacgctgcaggtgttcgtgct

SEQ ID NO: 5746537 - DNA, 25 bp, Homo sapien
atacctggtaaatgaaaatattaca

SEQ ID NO: 5746538 - DNA, 25 bp, Homo sapien
ctcctacaagctcagctccagtgag

SEQ ID NO: 5746539 - DNA, 25 bp, Homo sapien
gacacgtgccctagacgaggctgac

SEQ ID NO: 5746540 - DNA, 25 bp, Homo sapien
cttgcctcttgaaactattgtctaa

SEQ ID NO: 5746541 - DNA, 25 bp, Homo sapien
gggtgggcgagcgcgcgttgtcgag

SEQ ID NO: 5746542 - DNA, 25 bp, Homo sapien
ggtgatcgtggacaggccgctgcag

SEQ ID NO: 5746543 - DNA, 25 bp, Homo sapien
agaacgacaacgcgccggcactgtt

SEQ ID NO: 5746544 - DNA, 25 bp, Homo sapien
gtgatgtgtcctccactatacagac

SEQ ID NO: 5746545 - DNA, 25 bp, Homo sapien
ggagctgtgcgggcggagcgcggaa

SEQ ID NO: 5746546 - DNA, 25 bp, Homo sapien
cgccccacgtccctttcaagctggt

SEQ ID NO: 5746547 - DNA, 25 bp, Homo sapien
cctagcttatctcaaggtccagact

SEQ ID NO: 5746548 - DNA, 25 bp, Homo sapien
gtgctggtgaaggaccacggcgaac

SEQ ID NO: 5746549 - DNA, 25 bp, Homo sapien
tttttccaatgtgcttgatgtcaat

SEQ ID NO: 5746550 - DNA, 25 bp, Homo sapien
gtacacagtattcgtgaaggagaac

SEQ ID NO: 5746551 - DNA, 25 bp, Homo sapien
ttcgtacgagcttcagctgggtact

SEQ ID NO: 5746552 - DNA, 25 bp, Homo sapien
agcctgttggtgctcacggtgctgc

SEQ ID NO: 5746553 - DNA, 25 bp, Homo sapien
aaggtattagatgtaaatgacaatg

SEQ ID NO: 5746554 - DNA, 25 bp, Homo sapien
cgccggcgttcgcacagcctgagta

SEQ ID NO: 5746555 - DNA, 25 bp, Homo sapien
agcaacgtgacgctgcaggtgttcg

SEQ ID NO: 5746556 - DNA, 25 bp, Homo sapien
ttgaaactattgtctaacaagactc

SEQ ID NO: 5746557 - DNA, 25 bp, Homo sapien
gcagaatggcattttgtttgtgaat

SEQ ID NO: 5746558 - DNA, 25 bp, Homo sapien
tcattgctctcatcacggtgtcgga

SEQ ID NO: 5746559 - DNA, 25 bp, Homo sapien
agggagcatctgatgcagatatagg

SEQ ID NO: 5746560 - DNA, 25 bp, Homo sapien
caccgctgctggcgcagtgagtgag

SEQ ID NO: 5746561 - DNA, 25 bp, Homo sapien
ctgtacactgcgctgcggtgctcgg

SEQ ID NO: 5746562 - DNA, 25 bp, Homo sapien
aatgaaatgggtgaaaatggaattc

SEQ ID NO: 5746563 - DNA, 25 bp, Homo sapien
catagatcccatctcaggggaaatc

SEQ ID NO: 5746564 - DNA, 25 bp, Homo sapien
ctctcatcacggtgtcggatcgcga

SEQ ID NO: 5746565 - DNA, 25 bp, Homo sapien
cggtgctgctgtacactgcgctgcg

SEQ ID NO: 5746566 - DNA, 25 bp, Homo sapien
gtactgatgctatgccaaataaata

SEQ ID NO: 5746567 - DNA, 25 bp, Homo sapien
ctcacgggcaccgttcaaatactta

SEQ ID NO: 5746568 - DNA, 25 bp, Homo sapien
ctggaggtaaatctgcagaatggca

SEQ ID NO: 5746569 - DNA, 25 bp, Homo sapien
tgccctagacgaggctgactcccct

SEQ ID NO: 5746570 - DNA, 25 bp, Homo sapien
gggtactggcagcgctcgcatcccg

SEQ ID NO: 5746571 - DNA, 25 bp, Homo sapien
ctgttccgggtggcgtccaaaagac

SEQ ID NO: 5746572 - DNA, 25 bp, Homo sapien
ccgaatcaaggctgcttgattctcg

SEQ ID NO: 5746573 - DNA, 25 bp, Homo sapien
agctctcagaatcagaatacgtagg

SEQ ID NO: 5746574 - DNA, 25 bp, Homo sapien
ctaagcgaatctttgtctctcgtgc

SEQ ID NO: 5746575 - DNA, 25 bp, Homo sapien
gtcttctatcagaaggggccgaggg

SEQ ID NO: 5746576 - DNA, 25 bp, Homo sapien
gtgagctggtgccgtggtcggtggg

SEQ ID NO: 5746577 - DNA, 25 bp, Homo sapien
gcgcgcgcgccaggaaagcccacgc

SEQ ID NO: 5746578 - DNA, 25 bp, Homo sapien
gtttttcttcctagatatacaggca

SEQ ID NO: 5746579 - DNA, 25 bp, Homo sapien
gaccacggcgaaccagcgttgacag

SEQ ID NO: 5746580 - DNA, 25 bp, Homo sapien
tcccgttccgcgtggggctatacac

SEQ ID NO: 5746581 - DNA, 25 bp, Homo sapien
aacgcgctggtgtcctactcgctgg

SEQ ID NO: 5746582 - DNA, 25 bp, Homo sapien
gcgcgcgccaggaaagcccacgctg

SEQ ID NO: 5746583 - DNA, 25 bp, Homo sapien
actttatggatataggaggcaagga

SEQ ID NO: 5746584 - DNA, 25 bp, Homo sapien
gttttggtttttgtgtgtgtgtgtt

SEQ ID NO: 5746585 - DNA, 25 bp, Homo sapien
gcagttccaggtgagcgcgcgggat

SEQ ID NO: 5746586 - DNA, 25 bp, Homo sapien
tactcgttggtgctggacagcgccc

SEQ ID NO: 5746587 - DNA, 25 bp, Homo sapien
acaaatgaaatgggtgaaaatggaa

SEQ ID NO: 5746588 - DNA, 25 bp, Homo sapien
gagcggcaaggtgtacgcgctgcag

SEQ ID NO: 5746589 - DNA, 25 bp, Homo sapien
tccacgtggaggtgatcgtggacag

SEQ ID NO: 5746590 - DNA, 25 bp, Homo sapien
tggtacgaatggacatgtcacctgc

SEQ ID NO: 5746591 - DNA, 25 bp, Homo sapien
tgaattctcggatcgaccgggagga

SEQ ID NO: 5746592 - DNA, 25 bp, Homo sapien
atgacagtaaagactatccggtttc

SEQ ID NO: 5746593 - DNA, 25 bp, Homo sapien
tagtgtcgttggtggaaagtggcca

SEQ ID NO: 5746594 - DNA, 25 bp, Homo sapien
acaacccgccaatatttccaatgac

SEQ ID NO: 5746595 - DNA, 25 bp, Homo sapien
ttttgcccaatcagtttacaaagta

SEQ ID NO: 5746596 - DNA, 25 bp, Homo sapien
gcgctgcagccgctggaccacgagg

SEQ ID NO: 5746597 - DNA, 25 bp, Homo sapien
aagactatccggtttcccgaatcaa

SEQ ID NO: 5746598 - DNA, 25 bp, Homo sapien
gtgtcgttggtggaaagtggccagg

SEQ ID NO: 5746599 - DNA, 25 bp, Homo sapien
gggccaccaccagcgtgtccatcga

SEQ ID NO: 5746600 - DNA, 25 bp, Homo sapien
gggtggcgtccaaaagacacgggga

SEQ ID NO: 5746601 - DNA, 25 bp, Homo sapien
gctatacacgggtgagatcagcacg

SEQ ID NO: 5746602 - DNA, 25 bp, Homo sapien
aggaccacggcgaaccagcgttgac

SEQ ID NO: 5746603 - DNA, 25 bp, Homo sapien
actcgtgctggtgaaggaccacggc

SEQ ID NO: 5746604 - DNA, 25 bp, Homo sapien
cgcaggagaacgcgctggtgtccta

SEQ ID NO: 5746605 - DNA, 25 bp, Homo sapien
atggaattcttcctccttttttcca

SEQ ID NO: 5746606 - DNA, 25 bp, Homo sapien
atcgctggacagagaggaaactgct

SEQ ID NO: 5746607 - DNA, 25 bp, Homo sapien
tctaatttgatcaaaacattgagga

SEQ ID NO: 5746608 - DNA, 25 bp, Homo sapien
ccggcgttcgcacagcctgagtaca

SEQ ID NO: 5746609 - DNA, 25 bp, Homo sapien
ctgtgggccaccaccagcgtgtcca

SEQ ID NO: 5746610 - DNA, 25 bp, Homo sapien
ggagcggcgggtgggcgagcgcgcg

SEQ ID NO: 5746611 - DNA, 25 bp, Homo sapien
gaaccaacttttgcccaatcagttt

SEQ ID NO: 5746612 - DNA, 25 bp, Homo sapien
cttcagctgggtactggcagcgctc

SEQ ID NO: 5746613 - DNA, 25 bp, Homo sapien
ccctttcaagctggtgtccaccttc

SEQ ID NO: 5746614 - DNA, 25 bp, Homo sapien
gcgcgcgttgtcgagctacgtttcg

SEQ ID NO: 5746615 - DNA, 25 bp, Homo sapien
aagtcctacgagattcaggtcactg

SEQ ID NO: 5746616 - DNA, 25 bp, Homo sapien
gtcctacgagattcaggtcactgca

SEQ ID NO: 5746617 - DNA, 25 bp, Homo sapien
ggtggtgaccgcacgggacgggggc

SEQ ID NO: 5746618 - DNA, 25 bp, Homo sapien
tgccgcgcctgttccgggtggcgtc

SEQ ID NO: 5746619 - DNA, 25 bp, Homo sapien
gttaatttgttactggtggctactg

SEQ ID NO: 5746620 - DNA, 25 bp, Homo sapien
cacgaggaagtggagctgctgcagt

SEQ ID NO: 5746621 - DNA, 25 bp, Homo sapien
tgtacctgatcatcgccatctgcgc

SEQ ID NO: 5746622 - DNA, 25 bp, Homo sapien
gacagtaaagactatccggtttccc

SEQ ID NO: 5746623 - DNA, 25 bp, Homo sapien
actcgctggtggagcggcgggtggg

SEQ ID NO: 5746624 - DNA, 25 bp, Homo sapien
gtaaaatttcattaaaacttgtgga

SEQ ID NO: 5746625 - DNA, 25 bp, Homo sapien
gcgggtgggcgagcgcgcgttgtcg

SEQ ID NO: 5746626 - DNA, 25 bp, Homo sapien
agttaaacgcttctgatgcagatga

SEQ ID NO: 5746627 - DNA, 25 bp, Homo sapien
agattcaggtcactgcaactgacaa

SEQ ID NO: 5746628 - DNA, 25 bp, Homo sapien
ttgttactggtggctactgatgggg

SEQ ID NO: 5746629 - DNA, 25 bp, Homo sapien
tagatcccatctcaggggaaatcag

SEQ ID NO: 5746630 - DNA, 25 bp, Homo sapien
ttctattctgctgcattccccatct

SEQ ID NO: 5746631 - DNA, 25 bp, Homo sapien
tttgattcagaaatttggtgggttt

SEQ ID NO: 5746632 - DNA, 25 bp, Homo sapien
agacattttgaagactttggaattt

SEQ ID NO: 5746633 - DNA, 25 bp, Homo sapien
tgcgcggtatccagcctgttggtgc

SEQ ID NO: 5746634 - DNA, 25 bp, Homo sapien
ggcgaaggtgcgcgcagtggacgct

SEQ ID NO: 5746635 - DNA, 25 bp, Homo sapien
ggccgctgcaggttttccatgtgga

SEQ ID NO: 5746636 - DNA, 25 bp, Homo sapien
aaatcgctggacagagaggaaactg

SEQ ID NO: 5746637 - DNA, 25 bp, Homo sapien
tgaaagtactctggtttctgtttga

SEQ ID NO: 5746638 - DNA, 25 bp, Homo sapien
ctattctgctgcattccccatctgt

SEQ ID NO: 5746639 - DNA, 25 bp, Homo sapien
acaacgcgccggcactgttggcgcc

SEQ ID NO: 5746640 - DNA, 25 bp, Homo sapien
tcgtgctggacgagaacgacaacgc

SEQ ID NO: 5746641 - DNA, 25 bp, Homo sapien
ctgcaggtgttcgtgctggacgaga

SEQ ID NO: 5746642 - DNA, 25 bp, Homo sapien
gccgctggaccacgaggaagtggag

SEQ ID NO: 5746643 - DNA, 25 bp, Homo sapien
ctggcaccgctgctggcgcagtgag

SEQ ID NO: 5746644 - DNA, 25 bp, Homo sapien
ggacgctgactcaggctacaacgcg

SEQ ID NO: 5746645 - DNA, 25 bp, Homo sapien
gggctatacacgggtgagatcagca

SEQ ID NO: 5746646 - DNA, 25 bp, Homo sapien
gtgaccgcacgggacgggggctcgc

SEQ ID NO: 5746647 - DNA, 25 bp, Homo sapien
aaggaaccccttcaatgtcaggaca

SEQ ID NO: 5746648 - DNA, 25 bp, Homo sapien
tactcgcagcagaggcggcagaggg

SEQ ID NO: 5746649 - DNA, 25 bp, Homo sapien
cggggaccttctggaggtaaatctg

SEQ ID NO: 5746650 - DNA, 25 bp, Homo sapien
tatgaagaagcaaagtcctacgaga

SEQ ID NO: 5746651 - DNA, 25 bp, Homo sapien
acgcttccctgggcactgtcattgc

SEQ ID NO: 5746652 - DNA, 25 bp, Homo sapien
gatcccatctcaggggaaatcagaa

SEQ ID NO: 5746653 - DNA, 25 bp, Homo sapien
cccaccgagggtgcgcgcgcgccag

SEQ ID NO: 5746654 - DNA, 25 bp, Homo sapien
ctattttcactagattgattttttg

SEQ ID NO: 5746655 - DNA, 25 bp, Homo sapien
ctccctgacgccccacgtccctttc

SEQ ID NO: 5746656 - DNA, 25 bp, Homo sapien
ggagctggtgccgcgcctgttccgg

SEQ ID NO: 5746657 - DNA, 25 bp, Homo sapien
ggcaaacctgagctcacgggcaccg

SEQ ID NO: 5746658 - DNA, 25 bp, Homo sapien
gggagctggtcttactcgcagcaga

SEQ ID NO: 5746659 - DNA, 25 bp, Homo sapien
cagcgccgtggggagctggtcttac

SEQ ID NO: 5746660 - DNA, 25 bp, Homo sapien
ggattggtaatggcgtcttctatca

SEQ ID NO: 5746661 - DNA, 25 bp, Homo sapien
ggtgctcacggtgctgctgtacact

SEQ ID NO: 5746662 - DNA, 25 bp, Homo sapien
tgggccgcatcgcgcaggacctggg

SEQ ID NO: 5746663 - DNA, 25 bp, Homo sapien
gtttttgtgtgtgtgtgtttgtgtg

SEQ ID NO: 5746664 - DNA, 25 bp, Homo sapien
atgtactgatgctatgccaaataaa

SEQ ID NO: 5746665 - DNA, 25 bp, Homo sapien
aaagcccacgctggtgtgctccagc

SEQ ID NO: 5746666 - DNA, 25 bp, Homo sapien
ggaagtggaggtgaaggacattaac

SEQ ID NO: 5746667 - DNA, 25 bp, Homo sapien
cgccgcgggctcagaggctacgctg

SEQ ID NO: 5746668 - DNA, 25 bp, Homo sapien
tctgctcctcgcagcctgggaggtg

SEQ ID NO: 5746669 - DNA, 25 bp, Homo sapien
cgtgccctagacgaggctgactccc

SEQ ID NO: 5746670 - DNA, 25 bp, Homo sapien
agctgtgcgggcggagcgcggaatg

SEQ ID NO: 5746671 - DNA, 25 bp, Homo sapien
tttatggatataggaggcaaggaaa

SEQ ID NO: 5746672 - DNA, 25 bp, Homo sapien
aagactcttggcaaagacattttga

SEQ ID NO: 5746673 - DNA, 25 bp, Homo sapien
gggaaaattagattatgaagaagca

SEQ ID NO: 5746674 - DNA, 25 bp, Homo sapien
ccgggaggagctgtgcgggcggagc

SEQ ID NO: 5746675 - DNA, 25 bp, Homo sapien
tgggggcaaacctgagctcacgggc

SEQ ID NO: 5746676 - DNA, 25 bp, Homo sapien
tgttttctattctgctgcattcccc

SEQ ID NO: 5746677 - DNA, 25 bp, Homo sapien
cccctcgacaccgcctactcgtgct

SEQ ID NO: 5746678 - DNA, 25 bp, Homo sapien
ccgaggggcctggacacggctgctc

SEQ ID NO: 5746679 - DNA, 25 bp, Homo sapien
ttctctcctacaagctcagctccag

SEQ ID NO: 5746680 - DNA, 25 bp, Homo sapien
gcggaggaataagagaagcagcagg

SEQ ID NO: 5746681 - DNA, 25 bp, Homo sapien
ttaaacgcttctgatgcagatgaag

SEQ ID NO: 5746682 - DNA, 25 bp, Homo sapien
atcgcgcaggacctggggctggagc

SEQ ID NO: 5746683 - DNA, 25 bp, Homo sapien
aaacagctctcagaatcagaatacg

SEQ ID NO: 5746684 - DNA, 25 bp, Homo sapien
cccacgctggtgtgctccagcgccg

SEQ ID NO: 5746685 - DNA, 25 bp, Homo sapien
ctcggtgccacccaccgagggtgcg

SEQ ID NO: 5746686 - DNA, 25 bp, Homo sapien
gcactgtcattgctctcatcacggt

SEQ ID NO: 5746687 - DNA, 25 bp, Homo sapien
cgctgcaggtgttcgtgctggacga

SEQ ID NO: 5746688 - DNA, 25 bp, Homo sapien
cagctccagtgagtttttcttccta

SEQ ID NO: 5746689 - DNA, 25 bp, Homo sapien
gagtgagctggtgccgtggtcggtg

SEQ ID NO: 5746690 - DNA, 25 bp, Homo sapien
aggatgaaaataactttatggatat

SEQ ID NO: 5746691 - DNA, 25 bp, Homo sapien
ttcaagaattactactcgttggtgc

SEQ ID NO: 5746692 - DNA, 25 bp, Homo sapien
tggcgtcttctatcagaaggggccg

SEQ ID NO: 5746693 - DNA, 25 bp, Homo sapien
gccaggaaagcccacgctggtgtgc

SEQ ID NO: 5746694 - DNA, 25 bp, Homo sapien
ctctcacttcccatctcagagaacg

SEQ ID NO: 5746695 - DNA, 25 bp, Homo sapien
aacgtgtacctgatcatcgccatct

SEQ ID NO: 5746696 - DNA, 25 bp, Homo sapien
ggaccacgaggaagtggagctgctg

SEQ ID NO: 5746697 - DNA, 25 bp, Homo sapien
gagggtgcgcgcgcgccaggaaagc

SEQ ID NO: 5746698 - DNA, 25 bp, Homo sapien
ggatcgcgactctggtacgaatgga

SEQ ID NO: 5746699 - DNA, 25 bp, Homo sapien
ccctgggcactgtcattgctctcat

SEQ ID NO: 5746700 - DNA, 25 bp, Homo sapien
gcaaagacattttgaagactttgga

SEQ ID NO: 5746701 - DNA, 25 bp, Homo sapien
ttttcacttcacagatgtactgatg

SEQ ID NO: 5746702 - DNA, 25 bp, Homo sapien
ccaccagcgtgtccatcgaggtggc

SEQ ID NO: 5746703 - DNA, 25 bp, Homo sapien
gcgccgtggggagctggtcttactc

SEQ ID NO: 5746704 - DNA, 25 bp, Homo sapien
gcgtcttctatcagaaggggccgag

SEQ ID NO: 5746705 - DNA, 25 bp, Homo sapien
taatttgttactggtggctactgat

SEQ ID NO: 5746706 - DNA, 25 bp, Homo sapien
gagagggagcgtaaagctattttca

SEQ ID NO: 5746707 - DNA, 25 bp, Homo sapien
cattaacgacaacccgccaatattt

SEQ ID NO: 5746708 - DNA, 25 bp, Homo sapien
aaacttgtggacatcaatgataaca

SEQ ID NO: 5746709 - DNA, 25 bp, Homo sapien
ctcttctaatttgatcaaaacattg

SEQ ID NO: 5746710 - DNA, 25 bp, Homo sapien
tttctgtttgattcagaaatttggt

SEQ ID NO: 5746711 - DNA, 25 bp, Homo sapien
gcccaatcagtttacaaagtaaaat

SEQ ID NO: 5746712 - DNA, 25 bp, Homo sapien
cgggggctcgccttcactgtgggcc

SEQ ID NO: 5746713 - DNA, 25 bp, Homo sapien
cagccgctggaccacgaggaagtgg

SEQ ID NO: 5746714 - DNA, 25 bp, Homo sapien
tccaatgacagtaaagactatccgg

SEQ ID NO: 5746715 - DNA, 25 bp, Homo sapien
ccgcgcctgttccgggtggcgtcca

SEQ ID NO: 5746716 - DNA, 25 bp, Homo sapien
cagccctagcttatctcaaggtcca

SEQ ID NO: 5746717 - DNA, 25 bp, Homo sapien
ttctggaggtaaatctgcagaatgg

SEQ ID NO: 5746718 - DNA, 25 bp, Homo sapien
gctacgctggtggatgtcaacgtgt

SEQ ID NO: 5746719 - DNA, 25 bp, Homo sapien
gggcggagcgcggaatgtagcatcc

SEQ ID NO: 5746720 - DNA, 25 bp, Homo sapien
gctgcaggttttccatgtggaagtg

SEQ ID NO: 5746721 - DNA, 25 bp, Homo sapien
gaatacggcaaatgggaccttagtg

SEQ ID NO: 5746722 - DNA, 25 bp, Homo sapien
ctgcaactgacaaaggaaccccttc

SEQ ID NO: 5746723 - DNA, 25 bp, Homo sapien
tcgctggtggagcggcgggtgggcg

SEQ ID NO: 5746724 - DNA, 25 bp, Homo sapien
gtgctggacgagaacgacaacgcgc

SEQ ID NO: 5746725 - DNA, 25 bp, Homo sapien
gcaaaacatgctcttctaatttgat

SEQ ID NO: 5746726 - DNA, 25 bp, Homo sapien
gcctactcgtgctggtgaaggacca

SEQ ID NO: 5746727 - DNA, 25 bp, Homo sapien
gcagggcacgtggtggcgaaggtgc

SEQ ID NO: 5746728 - DNA, 25 bp, Homo sapien
tcggtagtgatgtgtcctccactat

SEQ ID NO: 5746729 - DNA, 25 bp, Homo sapien
agaggctacgctggtggatgtcaac

SEQ ID NO: 5746730 - DNA, 25 bp, Homo sapien
ctcggatcgaccgggaggagctgtg

SEQ ID NO: 5746731 - DNA, 25 bp, Homo sapien
ccacggcgaaccagcgttgacagcc

SEQ ID NO: 5746732 - DNA, 25 bp, Homo sapien
gtccaaaagacacggggaccttctg

SEQ ID NO: 5746733 - DNA, 25 bp, Homo sapien
tgatcgtggacaggccgctgcaggt

SEQ ID NO: 5746734 - DNA, 25 bp, Homo sapien
ctggaccgcgagagcgtgtcagcct

SEQ ID NO: 5746735 - DNA, 25 bp, Homo sapien
cgtgccgcctctgggcagcaacgtg

SEQ ID NO: 5746736 - DNA, 25 bp, Homo sapien
acagatgtactgatgctatgccaaa

SEQ ID NO: 5746737 - DNA, 25 bp, Homo sapien
cgagagcgtgtcagcctatgagctg

SEQ ID NO: 5746738 - DNA, 25 bp, Homo sapien
gcaactgacaaaggaaccccttcaa

SEQ ID NO: 5746739 - DNA, 25 bp, Homo sapien
tgatgctatgccaaataaatattga

SEQ ID NO: 5746740 - DNA, 25 bp, Homo sapien
cggtgtcagcgtgggatgcggacgc

SEQ ID NO: 5746741 - DNA, 25 bp, Homo sapien
caatgataacacaccagaagtctca

SEQ ID NO: 5746742 - DNA, 25 bp, Homo sapien
cacgtgccctagacgaggctgactc

SEQ ID NO: 5746743 - DNA, 25 bp, Homo sapien
taatttgatcaaaacattgaggatt

SEQ ID NO: 5746744 - DNA, 25 bp, Homo sapien
caacgcgtggctttcgtacgagctt

SEQ ID NO: 5746745 - DNA, 25 bp, Homo sapien
ggctgccacatcttcacggtgtcag

SEQ ID NO: 5746746 - DNA, 25 bp, Homo sapien
agacgaggctgactcccctcgacac

SEQ ID NO: 5746747 - DNA, 25 bp, Homo sapien
tgaactaagcgaatctttgtctctc

SEQ ID NO: 5746748 - DNA, 25 bp, Homo sapien
cgtgggtgggcgccgcgggctcaga

SEQ ID NO: 5746749 - DNA, 25 bp, Homo sapien
gtgtgagtgtagttcttcaatagag

SEQ ID NO: 5746750 - DNA, 25 bp, Homo sapien
ctgccacatcttcacggtgtcagcg

SEQ ID NO: 5746751 - DNA, 25 bp, Homo sapien
tcgaccgggaggagctgtgcgggcg

SEQ ID NO: 5746752 - DNA, 25 bp, Homo sapien
cctacgagattcaggtcactgcaac

SEQ ID NO: 5746753 - DNA, 25 bp, Homo sapien
gggagcgtaaagctattttcactag

SEQ ID NO: 5746754 - DNA, 25 bp, Homo sapien
tagagaatacggcaaatgggacctt

SEQ ID NO: 5746755 - DNA, 25 bp, Homo sapien
tcagaggctacgctggtggatgtca

SEQ ID NO: 5746756 - DNA, 25 bp, Homo sapien
attccccatctgtacattaaaatac

SEQ ID NO: 5746757 - DNA, 25 bp, Homo sapien
ctgatgcagatgaaggaccgaacag

SEQ ID NO: 5746758 - DNA, 25 bp, Homo sapien
gtgggccaccaccagcgtgtccatc

SEQ ID NO: 5746759 - DNA, 25 bp, Homo sapien
aaaacatgctcttctaatttgatca

SEQ ID NO: 5746760 - DNA, 25 bp, Homo sapien
gctgcagccgctggaccacgaggaa

SEQ ID NO: 5746761 - DNA, 25 bp, Homo sapien
ggtgccgcgcctgttccgggtggcg

SEQ ID NO: 5746762 - DNA, 25 bp, Homo sapien
agactccgcagaagagaaacagctc

SEQ ID NO: 5746763 - DNA, 25 bp, Homo sapien
aaaatttcattaaaacttgtggaca

SEQ ID NO: 5746764 - DNA, 25 bp, Homo sapien
cacggccaccgtgttagtgtcgttg

SEQ ID NO: 5746765 - DNA, 25 bp, Homo sapien
acgaatggacatgtcacctgctccc

SEQ ID NO: 5746766 - DNA, 25 bp, Homo sapien
gctggagctggaggagctggtgccg

SEQ ID NO: 5746767 - DNA, 25 bp, Homo sapien
ggctggcaccgctgctggcgcagtg

SEQ ID NO: 5746768 - DNA, 25 bp, Homo sapien
tcttcctccttttttccaatgtgct

SEQ ID NO: 5746769 - DNA, 25 bp, Homo sapien
cgtgtacctgatcatcgccatctgc

SEQ ID NO: 5746770 - DNA, 25 bp, Homo sapien
ctggtgtgctccagcgccgtgggga

SEQ ID NO: 5746771 - DNA, 25 bp, Homo sapien
gccatctgcgcggtatccagcctgt

SEQ ID NO: 5746772 - DNA, 25 bp, Homo sapien
ttgatcaaaacattgaggattggta

SEQ ID NO: 5746773 - DNA, 25 bp, Homo sapien
ggtgtgctctggggaggaccccccc

SEQ ID NO: 5746774 - DNA, 25 bp, Homo sapien
ggcgttcgcacagcctgagtacaca

SEQ ID NO: 5746775 - DNA, 25 bp, Homo sapien
ctgtgcgggcggagcgcggaatgta

SEQ ID NO: 5746776 - DNA, 25 bp, Homo sapien
ctggacagcgccctggaccgcgaga

SEQ ID NO: 5746777 - DNA, 25 bp, Homo sapien
gcaggtgttcgtgctggacgagaac

SEQ ID NO: 5746778 - DNA, 25 bp, Homo sapien
ccgcctactcgtgctggtgaaggac

SEQ ID NO: 5746779 - DNA, 25 bp, Homo sapien
ggtgggcgccgcgggctcagaggct

SEQ ID NO: 5746780 - DNA, 25 bp, Homo sapien
agtattcgtgaaggagaacaacccg

SEQ ID NO: 5746781 - DNA, 25 bp, Homo sapien
cacggtgtcagcgtgggatgcggac

SEQ ID NO: 5746782 - DNA, 25 bp, Homo sapien
gcgtggctttcgtacgagcttcagc

SEQ ID NO: 5746783 - DNA, 25 bp, Homo sapien
gtggccaggcacccaaggcctcgtc

SEQ ID NO: 5746784 - DNA, 25 bp, Homo sapien
aggtgttcgtgctggacgagaacga

SEQ ID NO: 5746785 - DNA, 25 bp, Homo sapien
cattgaggattggtaatggcgtctt

SEQ ID NO: 5746786 - DNA, 25 bp, Homo sapien
ctactcgtgctggtgaaggaccacg

SEQ ID NO: 5746787 - DNA, 25 bp, Homo sapien
ggccaggcacccaaggcctcgtcgc

SEQ ID NO: 5746788 - DNA, 25 bp, Homo sapien
agcttgcctcttgaaactattgtct

SEQ ID NO: 5746789 - DNA, 25 bp, Homo sapien
ctcaggggaaatcagaactaaggga

SEQ ID NO: 5746790 - DNA, 25 bp, Homo sapien
gaggggcctggacacggctgctctc

SEQ ID NO: 5746791 - DNA, 25 bp, Homo sapien
atgctatgccaaataaatattgaat

SEQ ID NO: 5746792 - DNA, 25 bp, Homo sapien
atggctaccattatgtctttatata

SEQ ID NO: 5746793 - DNA, 25 bp, Homo sapien
gtggggagcggccagctccgctact

SEQ ID NO: 5746794 - DNA, 25 bp, Homo sapien
ttcgtgggccgcatcgcgcaggacc

SEQ ID NO: 5746795 - DNA, 25 bp, Homo sapien
atgtaaatgacaatgaaccaacttt

SEQ ID NO: 5746796 - DNA, 25 bp, Homo sapien
gttagagaatacggcaaatgggacc

SEQ ID NO: 5746797 - DNA, 25 bp, Homo sapien
ctgagtacacagtattcgtgaagga

SEQ ID NO: 5746798 - DNA, 25 bp, Homo sapien
acaaacaggatgaaaataactttat

SEQ ID NO: 5746799 - DNA, 25 bp, Homo sapien
gtgagtttttcttcctagatataca

SEQ ID NO: 5746800 - DNA, 25 bp, Homo sapien
gagaagcagcaggactttaacagag

SEQ ID NO: 5746801 - DNA, 25 bp, Homo sapien
gtggaagtggaggtgaaggacatta

SEQ ID NO: 5746802 - DNA, 25 bp, Homo sapien
gacacggctgctctcgcttctgctc

SEQ ID NO: 5746803 - DNA, 25 bp, Homo sapien
acgggacgggggctcgccttcactg

SEQ ID NO: 5746804 - DNA, 25 bp, Homo sapien
acgcgctgcagccgctggaccacga

SEQ ID NO: 5746805 - DNA, 25 bp, Homo sapien
gaggagctgtgcgggcggagcgcgg

SEQ ID NO: 5746806 - DNA, 25 bp, Homo sapien
ctcagctccagtgagtttttcttcc

SEQ ID NO: 5746807 - DNA, 25 bp, Homo sapien
ttttcttcctagatatacaggcaaa

SEQ ID NO: 5746808 - DNA, 25 bp, Homo sapien
aacatgctcttctaatttgatcaaa

SEQ ID NO: 5746809 - DNA, 25 bp, Homo sapien
aacgcgccggcactgttggcgccta

SEQ ID NO: 5746810 - DNA, 25 bp, Homo sapien
cagcgagattgtgtattcactcggt

SEQ ID NO: 5746811 - DNA, 25 bp, Homo sapien
gacctcatggccttcagccctagct

SEQ ID NO: 5746812 - DNA, 25 bp, Homo sapien
agatatacaggcaaatgatgaacta

SEQ ID NO: 5746813 - DNA, 25 bp, Homo sapien
acccaaggcctcgtcgcgggcgtgg

SEQ ID NO: 5746814 - DNA, 25 bp, Homo sapien
ggtgctcggtgccacccaccgaggg

SEQ ID NO: 5746815 - DNA, 25 bp, Homo sapien
gtccccacatagtgaaagtactctg

SEQ ID NO: 5746816 - DNA, 25 bp, Homo sapien
ttcttcaatagagagggagcgtaaa

SEQ ID NO: 5746817 - DNA, 25 bp, Homo sapien
tcaggctacaacgcgtggctttcgt

SEQ ID NO: 5746818 - DNA, 25 bp, Homo sapien
ggtttcccgaatcaaggctgcttga

SEQ ID NO: 5746819 - DNA, 25 bp, Homo sapien
cgaggaggccaaacacggcaccttc

SEQ ID NO: 5746820 - DNA, 25 bp, Homo sapien
gtcttactcgcagcagaggcggcag

SEQ ID NO: 5746821 - DNA, 25 bp, Homo sapien
gctggtgaaggaccacggcgaacca

SEQ ID NO: 5746822 - DNA, 25 bp, Homo sapien
gtgccacccaccgagggtgcgcgcg

SEQ ID NO: 5746823 - DNA, 25 bp, Homo sapien
cctgctccctgacgccccacgtccc

SEQ ID NO: 5746824 - DNA, 25 bp, Homo sapien
accattatgtctttatatattaaat

SEQ ID NO: 5746825 - DNA, 25 bp, Homo sapien
cctcgtcgcgggcgtgggtgggcgc

SEQ ID NO: 5746826 - DNA, 25 bp, Homo sapien
gtaggaaagatatggaacttcaatc

SEQ ID NO: 5746827 - DNA, 25 bp, Homo sapien
tcagctgggtactggcagcgctcgc

SEQ ID NO: 5746828 - DNA, 25 bp, Homo sapien
aaggtgcgcgcagtggacgctgact

SEQ ID NO: 5746829 - DNA, 25 bp, Homo sapien
tcgccatctgcgcggtatccagcct

SEQ ID NO: 5746830 - DNA, 25 bp, Homo sapien
gggcagcaacgtgacgctgcaggtg

SEQ ID NO: 5746831 - DNA, 25 bp, Homo sapien
ctcgcagcagaggcggcagagggtg

SEQ ID NO: 5746832 - DNA, 25 bp, Homo sapien
ggagaacaacccgccgggctgccac

SEQ ID NO: 5746833 - DNA, 25 bp, Homo sapien
gtactggcagcgctcgcatcccgtt

SEQ ID NO: 5746834 - DNA, 25 bp, Homo sapien
gatgcagatgaaggaccgaacagcg

SEQ ID NO: 5746835 - DNA, 25 bp, Homo sapien
atgtagcatccacgtggaggtgatc

SEQ ID NO: 5746836 - DNA, 25 bp, Homo sapien
agcatccacgtggaggtgatcgtgg

SEQ ID NO: 5746837 - DNA, 25 bp, Homo sapien
acggcgaaccagcgttgacagccac

SEQ ID NO: 5746838 - DNA, 25 bp, Homo sapien
ccaggtgagcgcgcgggatgcgggc

SEQ ID NO: 5746839 - DNA, 25 bp, Homo sapien
cgaggtggccgacgtgaacgacaac

SEQ ID NO: 5746840 - DNA, 25 bp, Homo sapien
ccctggaccgcgagagcgtgtcagc

SEQ ID NO: 5746841 - DNA, 25 bp, Homo sapien
ctccactatacagactaagtttacc

SEQ ID NO: 5746842 - DNA, 25 bp, Homo sapien
gtccagactccgcagaagagaaaca

SEQ ID NO: 5746843 - DNA, 25 bp, Homo sapien
ctcgtgctggggaaatcgctggaca

SEQ ID NO: 5746844 - DNA, 25 bp, Homo sapien
gtattcactcggtagtgatgtgtcc

SEQ ID NO: 5746845 - DNA, 25 bp, Homo sapien
aaatgggtgaaaatggaattcttcc

SEQ ID NO: 5746846 - DNA, 25 bp, Homo sapien
ccggcactgttggcgcctagggctg

SEQ ID NO: 5746847 - DNA, 25 bp, Homo sapien
ctgggtactggcagcgctcgcatcc

SEQ ID NO: 5746848 - DNA, 25 bp, Homo sapien
acacagtattcgtgaaggagaacaa

SEQ ID NO: 5746849 - DNA, 25 bp, Homo sapien
gccacccaccgagggtgcgcgcgcg

SEQ ID NO: 5746850 - DNA, 25 bp, Homo sapien
tcggtttcctctagagggagcatct

SEQ ID NO: 5746851 - DNA, 25 bp, Homo sapien
aaaatatagtttgggtccccacata

SEQ ID NO: 5746852 - DNA, 25 bp, Homo sapien
cacggctgctctcgcttctgctcct

SEQ ID NO: 5746853 - DNA, 25 bp, Homo sapien
agcggccagctccgctactccgtcc

SEQ ID NO: 5746854 - DNA, 25 bp, Homo sapien
gactcccctcgacaccgcctactcg

SEQ ID NO: 5746855 - DNA, 25 bp, Homo sapien
cgggctgccacatcttcacggtgtc

SEQ ID NO: 5746856 - DNA, 25 bp, Homo sapien
caacgtgacgctgcaggtgttcgtg

SEQ ID NO: 5746857 - DNA, 25 bp, Homo sapien
tggagctggaggagctggtgccgcg

SEQ ID NO: 5746858 - DNA, 25 bp, Homo sapien
ggctaccattatgtctttatatatt

SEQ ID NO: 5746859 - DNA, 25 bp, Homo sapien
tggaggagctggtgccgcgcctgtt

SEQ ID NO: 5746860 - DNA, 25 bp, Homo sapien
ggacagcgccctggaccgcgagagc

SEQ ID NO: 5746861 - DNA, 25 bp, Homo sapien
ccgacgtgaacgacaacgcgccggc

SEQ ID NO: 5746862 - DNA, 25 bp, Homo sapien
aagatatggaacttcaatcttcaaa

SEQ ID NO: 5746863 - DNA, 25 bp, Homo sapien
ttgggtccccacatagtgaaagtac

SEQ ID NO: 5746864 - DNA, 25 bp, Homo sapien
accatagatcccatctcaggggaaa

SEQ ID NO: 5746865 - DNA, 25 bp, Homo sapien
gctggtcttactcgcagcagaggcg

SEQ ID NO: 5746866 - DNA, 25 bp, Homo sapien
ccaaaagacacggggaccttctgga

SEQ ID NO: 5746867 - DNA, 25 bp, Homo sapien
ccccacgtccctttcaagctggtgt

SEQ ID NO: 5746868 - DNA, 25 bp, Homo sapien
gaaagtggccaggcacccaaggcct

SEQ ID NO: 5746869 - DNA, 25 bp, Homo sapien
cttactcgcagcagaggcggcagag

SEQ ID NO: 5746870 - DNA, 25 bp, Homo sapien
agtggttaagttaaacgcttctgat

SEQ ID NO: 5746871 - DNA, 25 bp, Homo sapien
aggagtaaatgctcttctctcctac

SEQ ID NO: 5746872 - DNA, 25 bp, Homo sapien
atcagcacgacacgtgccctagacg

SEQ ID NO: 5746873 - DNA, 25 bp, Homo sapien
gttggcgcctagggctggcaccgct

SEQ ID NO: 5746874 - DNA, 25 bp, Homo sapien
tggtgaccgcacgggacgggggctc

SEQ ID NO: 5746875 - DNA, 25 bp, Homo sapien
cttttttccaatgtgcttgatgtca

SEQ ID NO: 5746876 - DNA, 25 bp, Homo sapien
gacgccccacgtccctttcaagctg

SEQ ID NO: 5746877 - DNA, 25 bp, Homo sapien
gttgtcgagctacgtttcggtgcac

SEQ ID NO: 5746878 - DNA, 25 bp, Homo sapien
ggaggaataagagaagcagcaggac

SEQ ID NO: 5746879 - DNA, 25 bp, Homo sapien
gattgattttttgtttagacaaaca

SEQ ID NO: 5746880 - DNA, 25 bp, Homo sapien
ccgagggtgcgcgcgcgccaggaaa

SEQ ID NO: 5746881 - DNA, 25 bp, Homo sapien
agcgccctggaccgcgagagcgtgt

SEQ ID NO: 5746882 - DNA, 25 bp, Homo sapien
gtccctttcaagctggtgtccacct

SEQ ID NO: 5746883 - DNA, 25 bp, Homo sapien
cgcgccggcactgttggcgcctagg

SEQ ID NO: 5746884 - DNA, 25 bp, Homo sapien
gtacgcgctgcagccgctggaccac

SEQ ID NO: 5746885 - DNA, 25 bp, Homo sapien
acaacgcgccggcgttcgcacagcc

SEQ ID NO: 5746886 - DNA, 25 bp, Homo sapien
cgcgccggcgttcgcacagcctgag

SEQ ID NO: 5746887 - DNA, 25 bp, Homo sapien
ctagagggagcatctgatgcagata

SEQ ID NO: 5746888 - DNA, 25 bp, Homo sapien
tggtgaaggaccacggcgaaccagc

SEQ ID NO: 5746889 - DNA, 25 bp, Homo sapien
tactctggtttctgtttgattcaga

SEQ ID NO: 5746890 - DNA, 25 bp, Homo sapien
aacgcgccggcgttcgcacagcctg

SEQ ID NO: 5746891 - DNA, 25 bp, Homo sapien
aatggcattttgtttgtgaattctc

SEQ ID NO: 5746892 - DNA, 25 bp, Homo sapien
cggtgccacccaccgagggtgcgcg

SEQ ID NO: 5746893 - DNA, 25 bp, Homo sapien
gagactagaatatttaaatttttgc

SEQ ID NO: 5746894 - DNA, 25 bp, Homo sapien
ttgtgtattcactcggtagtgatgt

SEQ ID NO: 5746895 - DNA, 25 bp, Homo sapien
atggccttcagccctagcttatctc

SEQ ID NO: 5746896 - DNA, 25 bp, Homo sapien
gtctctctcacttcccatctcagag

SEQ ID NO: 5746897 - DNA, 25 bp, Homo sapien
tgtcaatgatcattttgtaaaaata

SEQ ID NO: 5746898 - DNA, 25 bp, Homo sapien
gactaagtttaccatagatcccatc

SEQ ID NO: 5746899 - DNA, 25 bp, Homo sapien
ggtgagatcagcacgacacgtgccc

SEQ ID NO: 5746900 - DNA, 25 bp, Homo sapien
tttgtgaattctcggatcgaccggg

SEQ ID NO: 5746901 - DNA, 25 bp, Homo sapien
gatgaactaagcgaatctttgtctc

SEQ ID NO: 5746902 - DNA, 25 bp, Homo sapien
cgtgtcagcctatgagctggtggtg

SEQ ID NO: 5746903 - DNA, 25 bp, Homo sapien
gaattcttcctccttttttccaatg

SEQ ID NO: 5746904 - DNA, 25 bp, Homo sapien
ggtgtccaccttcaagaattactac

SEQ ID NO: 5746905 - DNA, 25 bp, Homo sapien
gcagcaacgtgacgctgcaggtgtt

SEQ ID NO: 5746906 - DNA, 25 bp, Homo sapien
ctctgggcagcaacgtgacgctgca

SEQ ID NO: 5746907 - DNA, 25 bp, Homo sapien
cgaaccagcgttgacagccacggcc

SEQ ID NO: 5746908 - DNA, 25 bp, Homo sapien
cgcacagcctgagtacacagtattc

SEQ ID NO: 5746909 - DNA, 25 bp, Homo sapien
tcctccactatacagactaagttta

SEQ ID NO: 5746910 - DNA, 25 bp, Homo sapien
attaaaacttgtggacatcaatgat

SEQ ID NO: 5746911 - DNA, 25 bp, Homo sapien
ttcagccctagcttatctcaaggtc

SEQ ID NO: 5746912 - DNA, 25 bp, Homo sapien
ctcttggcaaagacattttgaagac

SEQ ID NO: 5746913 - DNA, 25 bp, Homo sapien
ctcgcatcccgttccgcgtggggct

SEQ ID NO: 5746914 - DNA, 25 bp, Homo sapien
ttaacgacaacccgccaatatttcc

SEQ ID NO: 5746915 - DNA, 25 bp, Homo sapien
aattgttagagaatacggcaaatgg

SEQ ID NO: 5746916 - DNA, 25 bp, Homo sapien
tggcaaagacattttgaagactttg

SEQ ID NO: 5746917 - DNA, 25 bp, Homo sapien
cactgcaactgacaaaggaacccct

SEQ ID NO: 5746918 - DNA, 25 bp, Homo sapien
cagtgagtttttcttcctagatata

SEQ ID NO: 5746919 - DNA, 25 bp, Homo sapien
gatataggaggcaaggaaagttttt

SEQ ID NO: 5746920 - DNA, 25 bp, Homo sapien
gggatgcggacgcgcaggagaacgc

SEQ ID NO: 5746921 - DNA, 25 bp, Homo sapien
agttcttcaatagagagggagcgta

SEQ ID NO: 5746922 - DNA, 25 bp, Homo sapien
gcctagggctggcaccgctgctggc

SEQ ID NO: 5746923 - DNA, 25 bp, Homo sapien
ccgccgggctgccacatcttcacgg

SEQ ID NO: 5746924 - DNA, 25 bp, Homo sapien
gcgccaggaaagcccacgctggtgt

SEQ ID NO: 5746925 - DNA, 25 bp, Homo sapien
cttggcaaagacattttgaagactt

SEQ ID NO: 5746926 - DNA, 25 bp, Homo sapien
ttttgtgtgtgtgtgtttgtgtgag

SEQ ID NO: 5746927 - DNA, 25 bp, Homo sapien
caccgagggtgcgcgcgcgccagga

SEQ ID NO: 5746928 - DNA, 25 bp, Homo sapien
gtgtgtgtgtgtttgtgtgagtgta

SEQ ID NO: 5746929 - DNA, 25 bp, Homo sapien
tcaacgtgtacctgatcatcgccat

SEQ ID NO: 5746930 - DNA, 25 bp, Homo sapien
taacgtctctctcacttcccatctc

SEQ ID NO: 5746931 - DNA, 25 bp, Homo sapien
accgcgagagcgtgtcagcctatga

SEQ ID NO: 5746932 - DNA, 25 bp, Homo sapien
gtgtacgcgctgcagccgctggacc

SEQ ID NO: 5746933 - DNA, 25 bp, Homo sapien
ggcacgtggtggcgaaggtgcgcgc

SEQ ID NO: 5746934 - DNA, 25 bp, Homo sapien
gctggacgagaacgacaacgcgccg

SEQ ID NO: 5746935 - DNA, 25 bp, Homo sapien
tgaagactttggaattttcacttca

SEQ ID NO: 5746936 - DNA, 25 bp, Homo sapien
gaaggacattaacgacaacccgcca

SEQ ID NO: 5746937 - DNA, 25 bp, Homo sapien
gtgacgctgcaggtgttcgtgctgg

SEQ ID NO: 5746938 - DNA, 25 bp, Homo sapien
tgatgcagatataggagtaaatgct

SEQ ID NO: 5746939 - DNA, 25 bp, Homo sapien
ctgcagttccaggtgagcgcgcggg

SEQ ID NO: 5746940 - DNA, 25 bp, Homo sapien
aaagctattttcactagattgattt

SEQ ID NO: 5746941 - DNA, 25 bp, Homo sapien
ccgcctctgggcagcaacgtgacgc

SEQ ID NO: 5746942 - DNA, 25 bp, Homo sapien
agatgtactgatgctatgccaaata

SEQ ID NO: 5746943 - DNA, 25 bp, Homo sapien
actgcgctgcggtgctcggtgccac

SEQ ID NO: 5746944 - DNA, 25 bp, Homo sapien
gtgttagtgtcgttggtggaaagtg

SEQ ID NO: 5746945 - DNA, 25 bp, Homo sapien
actccgcagaagagaaacagctctc

SEQ ID NO: 5746946 - DNA, 25 bp, Homo sapien
cggagagcggcaaggtgtacgcgct

SEQ ID NO: 5746947 - DNA, 25 bp, Homo sapien
tggttaagttaaacgcttctgatgc

SEQ ID NO: 5746948 - DNA, 25 bp, Homo sapien
gcgggctcagaggctacgctggtgg

SEQ ID NO: 5746949 - DNA, 25 bp, Homo sapien
agctcacgggcaccgttcaaatact

SEQ ID NO: 5746950 - DNA, 25 bp, Homo sapien
tccccgaggaggccaaacacggcac

SEQ ID NO: 5746951 - DNA, 25 bp, Homo sapien
actctggtacgaatggacatgtcac

SEQ ID NO: 5746952 - DNA, 25 bp, Homo sapien
gctcagaggctacgctggtggatgt

SEQ ID NO: 5746953 - DNA, 25 bp, Homo sapien
cgacaacccgccaatatttccaatg

SEQ ID NO: 5746954 - DNA, 25 bp, Homo sapien
acactgcgctgcggtgctcggtgcc

SEQ ID NO: 5746955 - DNA, 25 bp, Homo sapien
agctattttcactagattgattttt

SEQ ID NO: 5746956 - DNA, 25 bp, Homo sapien
gaagtctcaataacgtctctctcac

SEQ ID NO: 5746957 - DNA, 25 bp, Homo sapien
acggcaaatgggaccttagtggtta

SEQ ID NO: 5746958 - DNA, 25 bp, Homo sapien
actgtcattgctctcatcacggtgt

SEQ ID NO: 5746959 - DNA, 25 bp, Homo sapien
acaggatgaaaataactttatggat

SEQ ID NO: 5746960 - DNA, 25 bp, Homo sapien
gtgcagggcacgtggtggcgaaggt

SEQ ID NO: 5746961 - DNA, 25 bp, Homo sapien
gcgcctagggctggcaccgctgctg

SEQ ID NO: 5746962 - DNA, 25 bp, Homo sapien
attggtaatggcgtcttctatcaga

SEQ ID NO: 5746963 - DNA, 25 bp, Homo sapien
gctccgctactccgtccccgaggag

SEQ ID NO: 5746964 - DNA, 25 bp, Homo sapien
cagcgtgggatgcggacgcgcagga

SEQ ID NO: 5746965 - DNA, 25 bp, Homo sapien
ctggtggctactgatgggggcaaac

SEQ ID NO: 5746966 - DNA, 25 bp, Homo sapien
ttaccatagatcccatctcagggga

SEQ ID NO: 5746967 - DNA, 25 bp, Homo sapien
gatgtcaatgatcattttgtaaaaa

SEQ ID NO: 5746968 - DNA, 25 bp, Homo sapien
aaatgacaatgaaccaacttttgcc

SEQ ID NO: 5746969 - DNA, 25 bp, Homo sapien
aggaagtggagctgctgcagttcca

SEQ ID NO: 5746970 - DNA, 25 bp, Homo sapien
aaataaacattgttttctattctgc

SEQ ID NO: 5746971 - DNA, 25 bp, Homo sapien
gctccagtgagtttttcttcctaga

SEQ ID NO: 5746972 - DNA, 25 bp, Homo sapien
atctttgtctctcgtgctggggaaa

SEQ ID NO: 5746973 - DNA, 25 bp, Homo sapien
tgaaggagaacaacccgccgggctg

SEQ ID NO: 5746974 - DNA, 25 bp, Homo sapien
tgcgctgcggtgctcggtgccaccc

SEQ ID NO: 5746975 - DNA, 25 bp, Homo sapien
tgtctaacaagactcttggcaaaga

SEQ ID NO: 5746976 - DNA, 25 bp, Homo sapien
agcgctcgcatcccgttccgcgtgg

SEQ ID NO: 5746977 - DNA, 25 bp, Homo sapien
gctacgtttcggtgcacgcggagag

SEQ ID NO: 5746978 - DNA, 25 bp, Homo sapien
aaacaggatgaaaataactttatgg

SEQ ID NO: 5746979 - DNA, 25 bp, Homo sapien
aaccagcgttgacagccacggccac

SEQ ID NO: 5746980 - DNA, 25 bp, Homo sapien
ccccttcaatgtcaggacattgtaa

SEQ ID NO: 5746981 - DNA, 25 bp, Homo sapien
gtagttcttcaatagagagggagcg

SEQ ID NO: 5746982 - DNA, 25 bp, Homo sapien
ggcaaggaaagtttttaaatggcta

SEQ ID NO: 5746983 - DNA, 25 bp, Homo sapien
gtcactgcaactgacaaaggaaccc

SEQ ID NO: 5746984 - DNA, 25 bp, Homo sapien
gtaaagctattttcactagattgat

SEQ ID NO: 5746985 - DNA, 25 bp, Homo sapien
cgctggaccacgaggaagtggagct

SEQ ID NO: 5746986 - DNA, 25 bp, Homo sapien
cgtgctggggaaatcgctggacaga

SEQ ID NO: 5746987 - DNA, 25 bp, Homo sapien
acttcaatcttcaaatccagcttgc

SEQ ID NO: 5746988 - DNA, 25 bp, Homo sapien
aggtgagcgcgcgggatgcgggcgt

SEQ ID NO: 5746989 - DNA, 25 bp, Homo sapien
tccgcgtggggctatacacgggtga

SEQ ID NO: 5746990 - DNA, 25 bp, Homo sapien
aagtttttaaatggctaccattatg

SEQ ID NO: 5746991 - DNA, 25 bp, Homo sapien
cggatcgaccgggaggagctgtgcg

SEQ ID NO: 5746992 - DNA, 25 bp, Homo sapien
ttgtgtgtgtgtgtttgtgtgagtg

SEQ ID NO: 5746993 - DNA, 25 bp, Homo sapien
ctttgtctctcgtgctggggaaatc

SEQ ID NO: 5746994 - DNA, 25 bp, Homo sapien
cttctgctcctcgcagcctgggagg

SEQ ID NO: 5746995 - DNA, 25 bp, Homo sapien
tccagcgccgtggggagctggtctt

SEQ ID NO: 5746996 - DNA, 25 bp, Homo sapien
gcgagattgtgtattcactcggtag

SEQ ID NO: 5746997 - DNA, 25 bp, Homo sapien
tttcctctagagggagcatctgatg

SEQ ID NO: 5746998 - DNA, 25 bp, Homo sapien
agctggtgccgcgcctgttccgggt

SEQ ID NO: 5746999 - DNA, 25 bp, Homo sapien
gtatccagcctgttggtgctcacgg

SEQ ID NO: 5747000 - DNA, 25 bp, Homo sapien
ccgcatcgcgcaggacctggggctg

SEQ ID NO: 5747001 - DNA, 25 bp, Homo sapien
gccaccgtgttagtgtcgttggtgg

SEQ ID NO: 5747002 - DNA, 25 bp, Homo sapien
cgccttcactgtgggccaccaccag

SEQ ID NO: 5747003 - DNA, 25 bp, Homo sapien
gacgggggctcgccttcactgtggg

SEQ ID NO: 5747004 - DNA, 25 bp, Homo sapien
gatgaaggaccgaacagcgagattg

SEQ ID NO: 5747005 - DNA, 25 bp, Homo sapien
gaacttcaatcttcaaatccagctt

SEQ ID NO: 5747006 - DNA, 25 bp, Homo sapien
ccgcacgggacgggggctcgccttc

SEQ ID NO: 5747007 - DNA, 25 bp, Homo sapien
ggaaatcgctggacagagaggaaac

SEQ ID NO: 5747008 - DNA, 25 bp, Homo sapien
cggccaccgtgttagtgtcgttggt

SEQ ID NO: 5747009 - DNA, 25 bp, Homo sapien
ataaacattgttttctattctgctg

SEQ ID NO: 5747010 - DNA, 25 bp, Homo sapien
catctgcgcggtatccagcctgttg

SEQ ID NO: 5747011 - DNA, 25 bp, Homo sapien
ttaacagagactagaatatttaaat

SEQ ID NO: 5747012 - DNA, 25 bp, Homo sapien
gtgtttgtgtgagtgtagttcttca

SEQ ID NO: 5747013 - DNA, 25 bp, Homo sapien
ttgttgttgttttggtttttgtgtg

SEQ ID NO: 5747014 - DNA, 25 bp, Homo sapien
cagccacggccaccgtgttagtgtc

SEQ ID NO: 5747015 - DNA, 25 bp, Homo sapien
tttgtttgtgaattctcggatcgac

SEQ ID NO: 5747016 - DNA, 25 bp, Homo sapien
cagcctgagtacacagtattcgtga

SEQ ID NO: 5747017 - DNA, 25 bp, Homo sapien
gtggcgtccaaaagacacggggacc

SEQ ID NO: 5747018 - DNA, 25 bp, Homo sapien
aagcgaatctttgtctctcgtgctg

SEQ ID NO: 5747019 - DNA, 25 bp, Homo sapien
acttttgcccaatcagtttacaaag

SEQ ID NO: 5747020 - DNA, 25 bp, Homo sapien
tacgctggtggatgtcaacgtgtac

SEQ ID NO: 5747021 - DNA, 25 bp, Homo sapien
ggtattagatgtaaatgacaatgaa

SEQ ID NO: 5747022 - DNA, 25 bp, Homo sapien
cacgggtgagatcagcacgacacgt

SEQ ID NO: 5747023 - DNA, 25 bp, Homo sapien
ccccacatagtgaaagtactctggt

SEQ ID NO: 5747024 - DNA, 25 bp, Homo sapien
gactatccggtttcccgaatcaagg

SEQ ID NO: 5747025 - DNA, 25 bp, Homo sapien
gtgaaggaccacggcgaaccagcgt

SEQ ID NO: 5747026 - DNA, 25 bp, Homo sapien
tggggctatacacgggtgagatcag

SEQ ID NO: 5747027 - DNA, 25 bp, Homo sapien
caccttcaagaattactactcgttg

SEQ ID NO: 5747028 - DNA, 25 bp, Homo sapien
gctgctctcgcttctgctcctcgca

SEQ ID NO: 5747029 - DNA, 25 bp, Homo sapien
ggccgaggggcctggacacggctgc

SEQ ID NO: 5747030 - DNA, 25 bp, Homo sapien
aaaacattgaggattggtaatggcg

SEQ ID NO: 5747031 - DNA, 25 bp, Homo sapien
gggtgcgcgcgcgccaggaaagccc

SEQ ID NO: 5747032 - DNA, 25 bp, Homo sapien
acagtattcgtgaaggagaacaacc

SEQ ID NO: 5747033 - DNA, 25 bp, Homo sapien
atgtggaagtggaggtgaaggacat

SEQ ID NO: 5747034 - DNA, 25 bp, Homo sapien
cgaaggtgcgcgcagtggacgctga

SEQ ID NO: 5747035 - DNA, 25 bp, Homo sapien
tggagctgctgcagttccaggtgag

SEQ ID NO: 5747036 - DNA, 25 bp, Homo sapien
gccgggctgccacatcttcacggtg

SEQ ID NO: 5747037 - DNA, 25 bp, Homo sapien
gagggagcgtaaagctattttcact

SEQ ID NO: 5747038 - DNA, 25 bp, Homo sapien
agatataggagtaaatgctcttctc

SEQ ID NO: 5747039 - DNA, 25 bp, Homo sapien
acgaggctgactcccctcgacaccg

SEQ ID NO: 5747040 - DNA, 25 bp, Homo sapien
tatggaacttcaatcttcaaatcca

SEQ ID NO: 5747041 - DNA, 25 bp, Homo sapien
gaagcaaagtcctacgagattcagg

SEQ ID NO: 5747042 - DNA, 25 bp, Homo sapien
atcatcgccatctgcgcggtatcca

SEQ ID NO: 5747043 - DNA, 25 bp, Homo sapien
aagtggaggtgaaggacattaacga

SEQ ID NO: 5747044 - DNA, 25 bp, Homo sapien
aggctgcttgattctcggtttcctc

SEQ ID NO: 5747045 - DNA, 25 bp, Homo sapien
ccgttccgcgtggggctatacacgg

SEQ ID NO: 5747046 - DNA, 25 bp, Homo sapien
aggactttaacagagactagaatat

SEQ ID NO: 5747047 - DNA, 25 bp, Homo sapien
cttgattctcggtttcctctagagg

SEQ ID NO: 5747048 - DNA, 25 bp, Homo sapien
tattagatgtaaatgacaatgaacc

SEQ ID NO: 5747049 - DNA, 25 bp, Homo sapien
gcctgttccgggtggcgtccaaaag

SEQ ID NO: 5747050 - DNA, 25 bp, Homo sapien
gcctctgggcagcaacgtgacgctg

SEQ ID NO: 5747051 - DNA, 25 bp, Homo sapien
gtgaaggacattaacgacaacccgc

SEQ ID NO: 5747052 - DNA, 25 bp, Homo sapien
ctcacggtgctgctgtacactgcgc

SEQ ID NO: 5747053 - DNA, 25 bp, Homo sapien
atcgaggtggccgacgtgaacgaca

SEQ ID NO: 5747054 - DNA, 25 bp, Homo sapien
cgagcttcagctgggtactggcagc

SEQ ID NO: 5747055 - DNA, 25 bp, Homo sapien
ggaaccccttcaatgtcaggacatt

SEQ ID NO: 5747056 - DNA, 25 bp, Homo sapien
tataggaggcaaggaaagtttttaa

SEQ ID NO: 5747057 - DNA, 25 bp, Homo sapien
gaggctgactcccctcgacaccgcc

SEQ ID NO: 5747058 - DNA, 25 bp, Homo sapien
acacggcaccttcgtgggccgcatc

SEQ ID NO: 5747059 - DNA, 25 bp, Homo sapien
gcagaggcggcagagggtgtgctct

SEQ ID NO: 5747060 - DNA, 25 bp, Homo sapien
gaccgcacgggacgggggctcgcct

SEQ ID NO: 5747061 - DNA, 25 bp, Homo sapien
ggaaatcagaactaagggaaaatta

SEQ ID NO: 5747062 - DNA, 25 bp, Homo sapien
ggaggtgaaggacattaacgacaac

SEQ ID NO: 5747063 - DNA, 25 bp, Homo sapien
tgggtgggcgccgcgggctcagagg

SEQ ID NO: 5747064 - DNA, 25 bp, Homo sapien
ttagattatgaagaagcaaagtcct

SEQ ID NO: 5747065 - DNA, 25 bp, Homo sapien
gcttccctgggcactgtcattgctc

SEQ ID NO: 5747066 - DNA, 25 bp, Homo sapien
cgtgggccgcatcgcgcaggacctg

SEQ ID NO: 5747067 - DNA, 25 bp, Homo sapien
cgtgaacgacaacgcgccggcgttc

SEQ ID NO: 5747068 - DNA, 25 bp, Homo sapien
gagctggaggagctggtgccgcgcc

SEQ ID NO: 5747069 - DNA, 25 bp, Homo sapien
cgactctggtacgaatggacatgtc

SEQ ID NO: 5747070 - DNA, 25 bp, Homo sapien
gggtgaaaatggaattcttcctcct

SEQ ID NO: 5747071 - DNA, 25 bp, Homo sapien
agctgggtactggcagcgctcgcat

SEQ ID NO: 5747072 - DNA, 25 bp, Homo sapien
gaggcaaggaaagtttttaaatggc

SEQ ID NO: 5747073 - DNA, 25 bp, Homo sapien
cgcggtatccagcctgttggtgctc

SEQ ID NO: 5747074 - DNA, 25 bp, Homo sapien
gacgtgaacgacaacgcgccggcgt

SEQ ID NO: 5747075 - DNA, 25 bp, Homo sapien
gatgtgtcctccactatacagacta

SEQ ID NO: 5747076 - DNA, 25 bp, Homo sapien
tcaaaacattgaggattggtaatgg

SEQ ID NO: 5747077 - DNA, 25 bp, Homo sapien
gcgtaaagctattttcactagattg

SEQ ID NO: 5747078 - DNA, 25 bp, Homo sapien
gaggagctggtgccgcgcctgttcc

SEQ ID NO: 5747079 - DNA, 25 bp, Homo sapien
aattttcacttcacagatgtactga

SEQ ID NO: 5747080 - DNA, 25 bp, Homo sapien
gccaccaccagcgtgtccatcgagg

SEQ ID NO: 5747081 - DNA, 25 bp, Homo sapien
catcttcacggtgtcagcgtgggat

SEQ ID NO: 5747082 - DNA, 25 bp, Homo sapien
cgttgacagccacggccaccgtgtt

SEQ ID NO: 5747083 - DNA, 25 bp, Homo sapien
gtgagtgagctggtgccgtggtcgg

SEQ ID NO: 5747084 - DNA, 25 bp, Homo sapien
cccgaggaggccaaacacggcacct

SEQ ID NO: 5747085 - DNA, 25 bp, Homo sapien
tgtcctactcgctggtggagcggcg

SEQ ID NO: 5747086 - DNA, 25 bp, Homo sapien
gaccttctggaggtaaatctgcaga

SEQ ID NO: 5747087 - DNA, 25 bp, Homo sapien
aatatagtttgggtccccacatagt

SEQ ID NO: 5747088 - DNA, 25 bp, Homo sapien
cacggtgctgctgtacactgcgctg

SEQ ID NO: 5747089 - DNA, 25 bp, Homo sapien
gatcgaccgggaggagctgtgcggg

SEQ ID NO: 5747090 - DNA, 25 bp, Homo sapien
ttagacaaacaggatgaaaataact

SEQ ID NO: 5747091 - DNA, 25 bp, Homo sapien
gcagatataggagtaaatgctcttc

SEQ ID NO: 5747092 - DNA, 25 bp, Homo sapien
gccgtggggagctggtcttactcgc

SEQ ID NO: 5747093 - DNA, 25 bp, Homo sapien
gggtgcagggcacgtggtggcgaag

SEQ ID NO: 5747094 - DNA, 25 bp, Homo sapien
gccacatcttcacggtgtcagcgtg

SEQ ID NO: 5747095 - DNA, 25 bp, Homo sapien
ttaaatggctaccattatgtcttta

SEQ ID NO: 5747096 - DNA, 25 bp, Homo sapien
tcattaaaacttgtggacatcaatg

SEQ ID NO: 5747097 - DNA, 25 bp, Homo sapien
caagctggtgtccaccttcaagaat

SEQ ID NO: 5747098 - DNA, 25 bp, Homo sapien
aggcacccaaggcctcgtcgcgggc

SEQ ID NO: 5747099 - DNA, 25 bp, Homo sapien
gacagccacggccaccgtgttagtg

SEQ ID NO: 5747100 - DNA, 25 bp, Homo sapien
tacttattaaggtattagatgtaaa

SEQ ID NO: 5747101 - DNA, 25 bp, Homo sapien
acgcttctgatgcagatgaaggacc

SEQ ID NO: 5747102 - DNA, 25 bp, Homo sapien
atgataacacaccagaagtctcaat

SEQ ID NO: 5747103 - DNA, 25 bp, Homo sapien
agaatatttaaatttttgcaaaaca

SEQ ID NO: 5747104 - DNA, 25 bp, Homo sapien
gctggaggagctggtgccgcgcctg

SEQ ID NO: 5747105 - DNA, 25 bp, Homo sapien
atcttcaaatccagcttgcctcttg

SEQ ID NO: 5747106 - DNA, 25 bp, Homo sapien
ttgcaaaacatgctcttctaatttg

SEQ ID NO: 5747107 - DNA, 25 bp, Homo sapien
cttctaatttgatcaaaacattgag

SEQ ID NO: 5747108 - DNA, 25 bp, Homo sapien
agaagcggaggaataagagaagcag

SEQ ID NO: 5747109 - DNA, 25 bp, Homo sapien
gtcaggacattgtaaaatttcatta

SEQ ID NO: 5747110 - DNA, 25 bp, Homo sapien
aatttcattaaaacttgtggacatc

SEQ ID NO: 5747111 - DNA, 25 bp, Homo sapien
aagactttggaattttcacttcaca

SEQ ID NO: 5747112 - DNA, 25 bp, Homo sapien
ctctcagaatcagaatacgtaggaa

SEQ ID NO: 5747113 - DNA, 25 bp, Homo sapien
caagaattactactcgttggtgctg

SEQ ID NO: 5747114 - DNA, 25 bp, Homo sapien
tccgctactccgtccccgaggaggc

SEQ ID NO: 5747115 - DNA, 25 bp, Homo sapien
cgctggtgtcctactcgctggtgga

SEQ ID NO: 5747116 - DNA, 25 bp, Homo sapien
gatgcgggcgtgccgcctctgggca

SEQ ID NO: 5747117 - DNA, 25 bp, Homo sapien
tgccgcctctgggcagcaacgtgac

SEQ ID NO: 5747118 - DNA, 25 bp, Homo sapien
gtgcgcgcgcgccaggaaagcccac

SEQ ID NO: 5747119 - DNA, 25 bp, Homo sapien
tcgtcgcgggcgtgggtgggcgccg

SEQ ID NO: 5747120 - DNA, 25 bp, Homo sapien
gtcgttggtggaaagtggccaggca

SEQ ID NO: 5747121 - DNA, 25 bp, Homo sapien
ggctttcgtacgagcttcagctggg

SEQ ID NO: 5747122 - DNA, 25 bp, Homo sapien
tgagatcagcacgacacgtgcccta

SEQ ID NO: 5747123 - DNA, 25 bp, Homo sapien
actcggtagtgatgtgtcctccact

SEQ ID NO: 5747124 - DNA, 25 bp, Homo sapien
ttgtttagacaaacaggatgaaaat

SEQ ID NO: 5747125 - DNA, 25 bp, Homo sapien
gattgtgtattcactcggtagtgat

SEQ ID NO: 5747126 - DNA, 25 bp, Homo sapien
ggggaaatcgctggacagagaggaa

SEQ ID NO: 5747127 - DNA, 25 bp, Homo sapien
gagtacacagtattcgtgaaggaga

SEQ ID NO: 5747128 - DNA, 25 bp, Homo sapien
ccttcaatgtcaggacattgtaaaa

SEQ ID NO: 5747129 - DNA, 25 bp, Homo sapien
gcgtgtccatcgaggtggccgacgt

SEQ ID NO: 5747130 - DNA, 25 bp, Homo sapien
aatagctaccaaataaacattgttt

SEQ ID NO: 5747131 - DNA, 25 bp, Homo sapien
cgtggacaggccgctgcaggttttc

SEQ ID NO: 5747132 - DNA, 25 bp, Homo sapien
attcaggtcactgcaactgacaaag

SEQ ID NO: 5747133 - DNA, 25 bp, Homo sapien
agcccacgctggtgtgctccagcgc

SEQ ID NO: 5747134 - DNA, 25 bp, Homo sapien
ccggtttcccgaatcaaggctgctt

SEQ ID NO: 5747135 - DNA, 25 bp, Homo sapien
gtttgggtccccacatagtgaaagt

SEQ ID NO: 5747136 - DNA, 25 bp, Homo sapien
gaatcagaatacgtaggaaagatat

SEQ ID NO: 5747137 - DNA, 25 bp, Homo sapien
tgctggggaaatcgctggacagaga

SEQ ID NO: 5747138 - DNA, 25 bp, Homo sapien
gctgcttgattctcggtttcctcta

SEQ ID NO: 5747139 - DNA, 25 bp, Homo sapien
attctgctgcattccccatctgtac

SEQ ID NO: 5747140 - DNA, 25 bp, Homo sapien
tgtttgattcagaaatttggtgggt

SEQ ID NO: 5747141 - DNA, 25 bp, Homo sapien
attctcggtttcctctagagggagc

SEQ ID NO: 5747142 - DNA, 25 bp, Homo sapien
tgactcaggctacaacgcgtggctt

SEQ ID NO: 5747143 - DNA, 25 bp, Homo sapien
gggctcagaggctacgctggtggat

SEQ ID NO: 5747144 - DNA, 25 bp, Homo sapien
cattgtaaaatttcattaaaacttg

SEQ ID NO: 5747145 - DNA, 25 bp, Homo sapien
acggcaccttcgtgggccgcatcgc

SEQ ID NO: 5747146 - DNA, 25 bp, Homo sapien
tagctaccaaataaacattgttttc

SEQ ID NO: 5747147 - DNA, 25 bp, Homo sapien
ttcaatcttcaaatccagcttgcct

SEQ ID NO: 5747148 - DNA, 25 bp, Homo sapien
acatagtgaaagtactctggtttct

SEQ ID NO: 5747149 - DNA, 25 bp, Homo sapien
ctgacgccccacgtccctttcaagc

SEQ ID NO: 5747150 - DNA, 25 bp, Homo sapien
gtggaggtgaaggacattaacgaca

SEQ ID NO: 5747151 - DNA, 25 bp, Homo sapien
ctggtttctgtttgattcagaaatt

SEQ ID NO: 5747152 - DNA, 25 bp, Homo sapien
cgttggtgctggacagcgccctgga

SEQ ID NO: 5747153 - DNA, 25 bp, Homo sapien
tccaatgtgcttgatgtcaatgatc

SEQ ID NO: 5747154 - DNA, 25 bp, Homo sapien
aaatgctcttctctcctacaagctc

SEQ ID NO: 5747155 - DNA, 25 bp, Homo sapien
cagaagtctcaataacgtctctctc

SEQ ID NO: 5747156 - DNA, 25 bp, Homo sapien
tacgagcttcagctgggtactggca

SEQ ID NO: 5747157 - DNA, 25 bp, Homo sapien
gtgtgtgtgtttgtgtgagtgtagt

SEQ ID NO: 5747158 - DNA, 25 bp, Homo sapien
aggaaagatatggaacttcaatctt

SEQ ID NO: 5747159 - DNA, 25 bp, Homo sapien
gctgctggcgcagtgagtgagctgg

SEQ ID NO: 5747160 - DNA, 25 bp, Homo sapien
taaaacttgtggacatcaatgataa

SEQ ID NO: 5747161 - DNA, 25 bp, Homo sapien
gactttaacagagactagaatattt

SEQ ID NO: 5747162 - DNA, 25 bp, Homo sapien
ctcgttggtgctggacagcgccctg

SEQ ID NO: 5747163 - DNA, 25 bp, Homo sapien
atgggtgaaaatggaattcttcctc

SEQ ID NO: 5747164 - DNA, 25 bp, Homo sapien
aaggcctcgtcgcgggcgtgggtgg

SEQ ID NO: 5747165 - DNA, 25 bp, Homo sapien
gtgtccatcgaggtggccgacgtga

SEQ ID NO: 5747166 - DNA, 25 bp, Homo sapien
ttttttgtttagacaaacaggatga

SEQ ID NO: 5747167 - DNA, 25 bp, Homo sapien
acgctgactcaggctacaacgcgtg

SEQ ID NO: 5747168 - DNA, 25 bp, Homo sapien
ggcaccttcgtgggccgcatcgcgc

SEQ ID NO: 5747169 - DNA, 25 bp, Homo sapien
cagctccgctactccgtccccgagg

SEQ ID NO: 5747170 - DNA, 25 bp, Homo sapien
ccactatacagactaagtttaccat

SEQ ID NO: 5747171 - DNA, 25 bp, Homo sapien
tggcgcctagggctggcaccgctgc

SEQ ID NO: 5747172 - DNA, 25 bp, Homo sapien
tgctctcgcttctgctcctcgcagc

SEQ ID NO: 5747173 - DNA, 25 bp, Homo sapien
tttccaatgtgcttgatgtcaatga

SEQ ID NO: 5747174 - DNA, 25 bp, Homo sapien
cgcatcccgttccgcgtggggctat

SEQ ID NO: 5747175 - DNA, 25 bp, Homo sapien
gtgcttgatgtcaatgatcattttg

SEQ ID NO: 5747176 - DNA, 25 bp, Homo sapien
caaaggaaccccttcaatgtcagga

SEQ ID NO: 5747177 - DNA, 25 bp, Homo sapien
ttgtaaaatttcattaaaacttgtg

SEQ ID NO: 5747178 - DNA, 25 bp, Homo sapien
ctcagagaacgcttccctgggcact

SEQ ID NO: 5747179 - DNA, 25 bp, Homo sapien
cgaggaagtggagctgctgcagttc

SEQ ID NO: 5747180 - DNA, 25 bp, Homo sapien
ggggcaaacctgagctcacgggcac

SEQ ID NO: 5747181 - DNA, 25 bp, Homo sapien
cgcggagagcggcaaggtgtacgcg

SEQ ID NO: 5747182 - DNA, 25 bp, Homo sapien
ctggcgcagtgagtgagctggtgcc

SEQ ID NO: 5747183 - DNA, 25 bp, Homo sapien
gaacgcttccctgggcactgtcatt

SEQ ID NO: 5747184 - DNA, 25 bp, Homo sapien
tacagactaagtttaccatagatcc

SEQ ID NO: 5747185 - DNA, 25 bp, Homo sapien
ctactccgtccccgaggaggccaaa

SEQ ID NO: 5747186 - DNA, 25 bp, Homo sapien
ctggggaaatcgctggacagagagg

SEQ ID NO: 5747187 - DNA, 25 bp, Homo sapien
cgccctggaccgcgagagcgtgtca

SEQ ID NO: 5747188 - DNA, 25 bp, Homo sapien
aacgacaacccgccaatatttccaa

SEQ ID NO: 5747189 - DNA, 25 bp, Homo sapien
tggaaagtggccaggcacccaaggc

SEQ ID NO: 5747190 - DNA, 25 bp, Homo sapien
tgtccaccttcaagaattactactc

SEQ ID NO: 5747191 - DNA, 25 bp, Homo sapien
ttacaaatgaaatgggtgaaaatgg

SEQ ID NO: 5747192 - DNA, 25 bp, Homo sapien
ggttttccatgtggaagtggaggtg

SEQ ID NO: 5747193 - DNA, 25 bp, Homo sapien
accacgaggaagtggagctgctgca

SEQ ID NO: 5747194 - DNA, 25 bp, Homo sapien
caccgtgttagtgtcgttggtggaa

SEQ ID NO: 5747195 - DNA, 25 bp, Homo sapien
ccaaggcctcgtcgcgggcgtgggt

SEQ ID NO: 5747196 - DNA, 25 bp, Homo sapien
tgaggttaatttgttactggtggct

SEQ ID NO: 5747197 - DNA, 25 bp, Homo sapien
gtgtagttcttcaatagagagggag

SEQ ID NO: 5747198 - DNA, 25 bp, Homo sapien
gagattgtgtattcactcggtagtg

SEQ ID NO: 5747199 - DNA, 25 bp, Homo sapien
gtgagcgcgcgggatgcgggcgtgc

SEQ ID NO: 5747200 - DNA, 25 bp, Homo sapien
ggagcggccagctccgctactccgt

SEQ ID NO: 5747201 - DNA, 25 bp, Homo sapien
tcccatctcagagaacgcttccctg

SEQ ID NO: 5747202 - DNA, 25 bp, Homo sapien
aacagagactagaatatttaaattt

SEQ ID NO: 5747203 - DNA, 25 bp, Homo sapien
tgttgttttggtttttgtgtgtgtg

SEQ ID NO: 5747204 - DNA, 25 bp, Homo sapien
tagcttatctcaaggtccagactcc

SEQ ID NO: 5747205 - DNA, 25 bp, Homo sapien
atttgttactggtggctactgatgg

SEQ ID NO: 5747206 - DNA, 25 bp, Homo sapien
ctgatgggggcaaacctgagctcac

SEQ ID NO: 5747207 - DNA, 25 bp, Homo sapien
aattagattatgaagaagcaaagtc

SEQ ID NO: 5747208 - DNA, 25 bp, Homo sapien
tgcagccgctggaccacgaggaagt

SEQ ID NO: 5747209 - DNA, 25 bp, Homo sapien
gcgaatctttgtctctcgtgctggg

SEQ ID NO: 5747210 - DNA, 25 bp, Homo sapien
aaatccagcttgcctcttgaaacta

SEQ ID NO: 5747211 - DNA, 25 bp, Homo sapien
aaaattgttagagaatacggcaaat

SEQ ID NO: 5747212 - DNA, 25 bp, Homo sapien
atcaaggctgcttgattctcggttt

SEQ ID NO: 5747213 - DNA, 25 bp, Homo sapien
tgctgtacactgcgctgcggtgctc

SEQ ID NO: 5747214 - DNA, 25 bp, Homo sapien
tgcctcttgaaactattgtctaaca

SEQ ID NO: 5747215 - DNA, 25 bp, Homo sapien
gctgaggttaatttgttactggtgg

SEQ ID NO: 5747216 - DNA, 25 bp, Homo sapien
ctcatcacggtgtcggatcgcgact

SEQ ID NO: 5747217 - DNA, 25 bp, Homo sapien
ggcgaaccagcgttgacagccacgg

SEQ ID NO: 5747218 - DNA, 25 bp, Homo sapien
ctatccggtttcccgaatcaaggct

SEQ ID NO: 5747219 - DNA, 25 bp, Homo sapien
cgcgactctggtacgaatggacatg

SEQ ID NO: 5747220 - DNA, 25 bp, Homo sapien
atatacaggcaaatgatgaactaag

SEQ ID NO: 5747221 - DNA, 25 bp, Homo sapien
ttgtctctcgtgctggggaaatcgc

SEQ ID NO: 5747222 - DNA, 25 bp, Homo sapien
cacgggcaccgttcaaatacttatt

SEQ ID NO: 5747223 - DNA, 25 bp, Homo sapien
cacgtggtggcgaaggtgcgcgcag

SEQ ID NO: 5747224 - DNA, 25 bp, Homo sapien
agtactctggtttctgtttgattca

SEQ ID NO: 5747225 - DNA, 25 bp, Homo sapien
ggtggctactgatgggggcaaacct

SEQ ID NO: 5747226 - DNA, 25 bp, Homo sapien
tactggtggctactgatgggggcaa

SEQ ID NO: 5747227 - DNA, 25 bp, Homo sapien
cgcagtgagtgagctggtgccgtgg

SEQ ID NO: 5747228 - DNA, 25 bp, Homo sapien
agagaaacagctctcagaatcagaa

SEQ ID NO: 5747229 - DNA, 25 bp, Homo sapien
ccttcagccctagcttatctcaagg

SEQ ID NO: 5747230 - DNA, 25 bp, Homo sapien
gggcactgtcattgctctcatcacg

SEQ ID NO: 5747231 - DNA, 25 bp, Homo sapien
aagtttaccatagatcccatctcag

SEQ ID NO: 5747232 - DNA, 25 bp, Homo sapien
cgagattcaggtcactgcaactgac

SEQ ID NO: 5747233 - DNA, 25 bp, Homo sapien
aagcggaggaataagagaagcagca

SEQ ID NO: 5747234 - DNA, 25 bp, Homo sapien
cagagactagaatatttaaattttt

SEQ ID NO: 5747235 - DNA, 25 bp, Homo sapien
ggcgtgccgcctctgggcagcaacg

SEQ ID NO: 5747236 - DNA, 25 bp, Homo sapien
cctgttggtgctcacggtgctgctg

SEQ ID NO: 5747237 - DNA, 25 bp, Homo sapien
cgtgaaggagaacaacccgccgggc

SEQ ID NO: 5747238 - DNA, 25 bp, Homo sapien
gtgtgtgtttgtgtgagtgtagttc

SEQ ID NO: 5747239 - DNA, 25 bp, Homo sapien
tatttccaatgacagtaaagactat

SEQ ID NO: 5747240 - DNA, 25 bp, Homo sapien
aactaagcgaatctttgtctctcgt

SEQ ID NO: 5747241 - DNA, 25 bp, Homo sapien
ggggcctggacacggctgctctcgc

SEQ ID NO: 5747242 - DNA, 25 bp, Homo sapien
cgtggaggtgatcgtggacaggccg

SEQ ID NO: 5747243 - DNA, 25 bp, Homo sapien
cacttcccatctcagagaacgcttc

SEQ ID NO: 5747244 - DNA, 25 bp, Homo sapien
gtgaaaatggaattcttcctccttt

SEQ ID NO: 5747245 - DNA, 25 bp, Homo sapien
caccgttcaaatacttattaaggta

SEQ ID NO: 5747246 - DNA, 25 bp, Homo sapien
tctgtttgattcagaaatttggtgg

SEQ ID NO: 5747247 - DNA, 25 bp, Homo sapien
ctgcggtgctcggtgccacccaccg

SEQ ID NO: 5747248 - DNA, 25 bp, Homo sapien
atctcagagaacgcttccctgggca

SEQ ID NO: 5747249 - DNA, 25 bp, Homo sapien
gagagcggcaaggtgtacgcgctgc

SEQ ID NO: 5747250 - DNA, 25 bp, Homo sapien
accagcgtgtccatcgaggtggccg

SEQ ID NO: 5747251 - DNA, 25 bp, Homo sapien
cagcgtgtccatcgaggtggccgac

SEQ ID NO: 5747252 - DNA, 25 bp, Homo sapien
gggaggagctgtgcgggcggagcgc

SEQ ID NO: 5747253 - DNA, 25 bp, Homo sapien
ttcgtgaaggagaacaacccgccgg

SEQ ID NO: 5747254 - DNA, 25 bp, Homo sapien
gggatgcgggcgtgccgcctctggg

SEQ ID NO: 5747255 - DNA, 25 bp, Homo sapien
gatgtcaacgtgtacctgatcatcg

SEQ ID NO: 5747256 - DNA, 25 bp, Homo sapien
ctgcattccccatctgtacattaaa

SEQ ID NO: 5747257 - DNA, 25 bp, Homo sapien
taactttatggatataggaggcaag

SEQ ID NO: 5747258 - DNA, 25 bp, Homo sapien
cacctgctccctgacgccccacgtc

SEQ ID NO: 5747259 - DNA, 25 bp, Homo sapien
cctggacacggctgctctcgcttct

SEQ ID NO: 5747260 - DNA, 25 bp, Homo sapien
tgcgggcgtgccgcctctgggcagc

SEQ ID NO: 5747261 - DNA, 25 bp, Homo sapien
aaaataactttatggatataggagg

SEQ ID NO: 5747262 - DNA, 25 bp, Homo sapien
aaagacattttgaagactttggaat

SEQ ID NO: 5747263 - DNA, 25 bp, Homo sapien
ctagatatacaggcaaatgatgaac

SEQ ID NO: 5747264 - DNA, 25 bp, Homo sapien
tctcaataacgtctctctcacttcc

SEQ ID NO: 5747265 - DNA, 25 bp, Homo sapien
gtgagtgtagttcttcaatagagag

SEQ ID NO: 5747266 - DNA, 25 bp, Homo sapien
gagtgtagttcttcaatagagaggg

SEQ ID NO: 5747267 - DNA, 25 bp, Homo sapien
cctcttgaaactattgtctaacaag

SEQ ID NO: 5747268 - DNA, 25 bp, Homo sapien
gatgggggcaaacctgagctcacgg

SEQ ID NO: 5747269 - DNA, 25 bp, Homo sapien
ccgctgcaggttttccatgtggaag

SEQ ID NO: 5747270 - DNA, 25 bp, Homo sapien
tttccaatgacagtaaagactatcc

SEQ ID NO: 5747271 - DNA, 25 bp, Homo sapien
gcctgagtacacagtattcgtgaag

SEQ ID NO: 5747272 - DNA, 25 bp, Homo sapien
ggacatgtcacctgctccctgacgc

SEQ ID NO: 5747273 - DNA, 25 bp, Homo sapien
ggaaagcccacgctggtgtgctcca

SEQ ID NO: 5747274 - DNA, 25 bp, Homo sapien
aacattgaggattggtaatggcgtc

SEQ ID NO: 5747275 - DNA, 25 bp, Homo sapien
tattaaggtattagatgtaaatgac

SEQ ID NO: 5747276 - DNA, 25 bp, Homo sapien
cctcatggccttcagccctagctta

SEQ ID NO: 5747277 - DNA, 25 bp, Homo sapien
gctactgatgggggcaaacctgagc

SEQ ID NO: 5747278 - DNA, 25 bp, Homo sapien
tggggagctggtcttactcgcagca

SEQ ID NO: 5747279 - DNA, 25 bp, Homo sapien
tgaaggaccgaacagcgagattgtg

SEQ ID NO: 5747280 - DNA, 25 bp, Homo sapien
tcttgaaactattgtctaacaagac

SEQ ID NO: 5747281 - DNA, 25 bp, Homo sapien
cgccaatatttccaatgacagtaaa

SEQ ID NO: 5747282 - DNA, 25 bp, Homo sapien
cgaacagcgagattgtgtattcact

SEQ ID NO: 5747283 - DNA, 25 bp, Homo sapien
tgtgctccagcgccgtggggagctg

SEQ ID NO: 5747284 - DNA, 25 bp, Homo sapien
taacacaccagaagtctcaataacg

SEQ ID NO: 5747285 - DNA, 25 bp, Homo sapien
gagctggtcttactcgcagcagagg

SEQ ID NO: 5747286 - DNA, 25 bp, Homo sapien
gtgccgtggtcggtgggtgcagggc

SEQ ID NO: 5747287 - DNA, 25 bp, Homo sapien
caccaccagcgtgtccatcgaggtg

SEQ ID NO: 5747288 - DNA, 25 bp, Homo sapien
cagtgagtgagctggtgccgtggtc

SEQ ID NO: 5747289 - DNA, 25 bp, Homo sapien
gtgtcagcgtgggatgcggacgcgc

SEQ ID NO: 5747290 - DNA, 25 bp, Homo sapien
attgaatagctaccaaataaacatt

SEQ ID NO: 5747291 - DNA, 25 bp, Homo sapien
gctcttctctcctacaagctcagct

SEQ ID NO: 5747292 - DNA, 25 bp, Homo sapien
cagcacgacacgtgccctagacgag

SEQ ID NO: 5747293 - DNA, 25 bp, Homo sapien
taccaaataaacattgttttctatt

SEQ ID NO: 5747294 - DNA, 25 bp, Homo sapien
atgaaccaacttttgcccaatcagt

SEQ ID NO: 5747295 - DNA, 25 bp, Homo sapien
cgctggtgtgctccagcgccgtggg

SEQ ID NO: 5747296 - DNA, 25 bp, Homo sapien
ccttcactgtgggccaccaccagcg

SEQ ID NO: 5747297 - DNA, 25 bp, Homo sapien
ttagatgtaaatgacaatgaaccaa

SEQ ID NO: 5747298 - DNA, 25 bp, Homo sapien
tgtcgagctacgtttcggtgcacgc

SEQ ID NO: 5747299 - DNA, 25 bp, Homo sapien
ctcaaggtccagactccgcagaaga

SEQ ID NO: 5747300 - DNA, 25 bp, Homo sapien
ctggacagagaggaaactgctgagg

SEQ ID NO: 5747301 - DNA, 25 bp, Homo sapien
attcactcggtagtgatgtgtcctc

SEQ ID NO: 5747302 - DNA, 25 bp, Homo sapien
tgctgcagttccaggtgagcgcgcg

SEQ ID NO: 5747303 - DNA, 25 bp, Homo sapien
ttgtgtgagtgtagttcttcaatag

SEQ ID NO: 5747304 - DNA, 25 bp, Homo sapien
gactcttggcaaagacattttgaag

SEQ ID NO: 5747305 - DNA, 25 bp, Homo sapien
tgtcattgctctcatcacggtgtcg

SEQ ID NO: 5747306 - DNA, 25 bp, Homo sapien
tatagtttgggtccccacatagtga

SEQ ID NO: 5747307 - DNA, 25 bp, Homo sapien
tcctctagagggagcatctgatgca

SEQ ID NO: 5747308 - DNA, 25 bp, Homo sapien
ttcacttcacagatgtactgatgct

SEQ ID NO: 5747309 - DNA, 25 bp, Homo sapien
gtaatggcgtcttctatcagaaggg

SEQ ID NO: 5747310 - DNA, 25 bp, Homo sapien
ccagcttgcctcttgaaactattgt

SEQ ID NO: 5747311 - DNA, 25 bp, Homo sapien
acgtctctctcacttcccatctcag

SEQ ID NO: 5747312 - DNA, 25 bp, Homo sapien
atcgcgactctggtacgaatggaca

SEQ ID NO: 5747313 - DNA, 25 bp, Homo sapien
cagatgaaggaccgaacagcgagat

SEQ ID NO: 5747314 - DNA, 25 bp, Homo sapien
tcccgaatcaaggctgcttgattct

SEQ ID NO: 5747315 - DNA, 25 bp, Homo sapien
tatgagctggtggtgaccgcacggg

SEQ ID NO: 5747316 - DNA, 25 bp, Homo sapien
tggctactgatgggggcaaacctga

SEQ ID NO: 5747317 - DNA, 25 bp, Homo sapien
gccacggccaccgtgttagtgtcgt

SEQ ID NO: 5747318 - DNA, 25 bp, Homo sapien
ctgcagaatggcattttgtttgtga

SEQ ID NO: 5747319 - DNA, 25 bp, Homo sapien
ccttctggaggtaaatctgcagaat

SEQ ID NO: 5747320 - DNA, 25 bp, Homo sapien
tacgtttcggtgcacgcggagagcg

SEQ ID NO: 5747321 - DNA, 25 bp, Homo sapien
tttcactagattgattttttgttta

SEQ ID NO: 5747322 - DNA, 25 bp, Homo sapien
acaccagaagtctcaataacgtctc

SEQ ID NO: 5747323 - DNA, 25 bp, Homo sapien
caatcttcaaatccagcttgcctct

SEQ ID NO: 5747324 - DNA, 25 bp, Homo sapien
tcacagatgtactgatgctatgcca

SEQ ID NO: 5747325 - DNA, 25 bp, Homo sapien
gtgtgtttgtgtgagtgtagttctt

SEQ ID NO: 5747326 - DNA, 25 bp, Homo sapien
gcattccccatctgtacattaaaat

SEQ ID NO: 5747327 - DNA, 25 bp, Homo sapien
ggcactgttggcgcctagggctggc

SEQ ID NO: 5747328 - DNA, 25 bp, Homo sapien
ccctagacgaggctgactcccctcg

SEQ ID NO: 5747329 - DNA, 25 bp, Homo sapien
agattatgaagaagcaaagtcctac

SEQ ID NO: 5747330 - DNA, 25 bp, Homo sapien
gtaaatctgcagaatggcattttgt

SEQ ID NO: 5747331 - DNA, 25 bp, Homo sapien
cacgtggaggtgatcgtggacaggc

SEQ ID NO: 5747332 - DNA, 25 bp, Homo sapien
atgacaatgaaccaacttttgccca

SEQ ID NO: 5747333 - DNA, 25 bp, Homo sapien
tcatggccttcagccctagcttatc

SEQ ID NO: 5747334 - DNA, 25 bp, Homo sapien
ctttcgtacgagcttcagctgggta

SEQ ID NO: 5747335 - DNA, 25 bp, Homo sapien
tgctcctcgcagcctgggaggtggg

SEQ ID NO: 5747336 - DNA, 25 bp, Homo sapien
aggtgaaggacattaacgacaaccc

SEQ ID NO: 5747337 - DNA, 25 bp, Homo sapien
gtgttcgtgctggacgagaacgaca

SEQ ID NO: 5747338 - DNA, 25 bp, Homo sapien
agatgtaaatgacaatgaaccaact

SEQ ID NO: 5747339 - DNA, 25 bp, Homo sapien
caggccgctgcaggttttccatgtg

SEQ ID NO: 5747340 - DNA, 25 bp, Homo sapien
aggtgtacgcgctgcagccgctgga

SEQ ID NO: 5747341 - DNA, 25 bp, Homo sapien
aggctacgctggtggatgtcaacgt

SEQ ID NO: 5747342 - DNA, 25 bp, Homo sapien
tggacgagaacgacaacgcgccggc

SEQ ID NO: 5747343 - DNA, 25 bp, Homo sapien
tgctcttctaatttgatcaaaacat

SEQ ID NO: 5747344 - DNA, 25 bp, Homo sapien
tatacacgggtgagatcagcacgac

SEQ ID NO: 5747345 - DNA, 25 bp, Homo sapien
gagaacgcttccctgggcactgtca

SEQ ID NO: 5747346 - DNA, 25 bp, Homo sapien
actcaggctacaacgcgtggctttc

SEQ ID NO: 5747347 - DNA, 25 bp, Homo sapien
tggcagcgctcgcatcccgttccgc

SEQ ID NO: 5747348 - DNA, 25 bp, Homo sapien
aggtggggagcggccagctccgcta

SEQ ID NO: 5747349 - DNA, 25 bp, Homo sapien
gctacaacgcgtggctttcgtacga

SEQ ID NO: 5747350 - DNA, 25 bp, Homo sapien
cgttcaaatacttattaaggtatta

SEQ ID NO: 5747351 - DNA, 25 bp, Homo sapien
caggagaacgcgctggtgtcctact

SEQ ID NO: 5747352 - DNA, 25 bp, Homo sapien
gcttatctcaaggtccagactccgc

SEQ ID NO: 5747353 - DNA, 25 bp, Homo sapien
tccttttttccaatgtgcttgatgt

SEQ ID NO: 5747354 - DNA, 25 bp, Homo sapien
gtagcatccacgtggaggtgatcgt

SEQ ID NO: 5747355 - DNA, 25 bp, Homo sapien
ccgctgctggcgcagtgagtgagct

SEQ ID NO: 5747356 - DNA, 25 bp, Homo sapien
atccggtttcccgaatcaaggctgc

SEQ ID NO: 5747357 - DNA, 25 bp, Homo sapien
gttccgggtggcgtccaaaagacac

SEQ ID NO: 5747358 - DNA, 25 bp, Homo sapien
ggccaaacacggcaccttcgtgggc

SEQ ID NO: 5747359 - DNA, 25 bp, Homo sapien
aggtcactgcaactgacaaaggaac

SEQ ID NO: 5747360 - DNA, 25 bp, Homo sapien
ctggtggatgtcaacgtgtacctga

SEQ ID NO: 5747361 - DNA, 25 bp, Homo sapien
agaattactactcgttggtgctgga

SEQ ID NO: 5747362 - DNA, 25 bp, Homo sapien
gacgagaacgacaacgcgccggcac

SEQ ID NO: 5747363 - DNA, 25 bp, Homo sapien
aatatttccaatgacagtaaagact

SEQ ID NO: 5747364 - DNA, 25 bp, Homo sapien
ttcactgtgggccaccaccagcgtg

SEQ ID NO: 5747365 - DNA, 25 bp, Homo sapien
taaagactatccggtttcccgaatc

SEQ ID NO: 5747366 - DNA, 25 bp, Homo sapien
aacgacaacgcgccggcactgttgg

SEQ ID NO: 5747367 - DNA, 25 bp, Homo sapien
cctccttttttccaatgtgcttgat

SEQ ID NO: 5747368 - DNA, 25 bp, Homo sapien
cttcccatctcagagaacgcttccc

SEQ ID NO: 5747369 - DNA, 25 bp, Homo sapien
acattttgaagactttggaattttc

SEQ ID NO: 5747370 - DNA, 25 bp, Homo sapien
gaaggaccacggcgaaccagcgttg

SEQ ID NO: 5747371 - DNA, 25 bp, Homo sapien
ttaaatttttgcaaaacatgctctt

SEQ ID NO: 5747372 - DNA, 25 bp, Homo sapien
acaggcaaatgatgaactaagcgaa

SEQ ID NO: 5747373 - DNA, 25 bp, Homo sapien
ctaagtttaccatagatcccatctc

SEQ ID NO: 5747374 - DNA, 25 bp, Homo sapien
ttttgtttagacaaacaggatgaaa

SEQ ID NO: 5747375 - DNA, 25 bp, Homo sapien
tgcttgattctcggtttcctctaga

SEQ ID NO: 5747376 - DNA, 25 bp, Homo sapien
acattgttttctattctgctgcatt

SEQ ID NO: 5747377 - DNA, 25 bp, Homo sapien
ccgtgttagtgtcgttggtggaaag

SEQ ID NO: 5747378 - DNA, 25 bp, Homo sapien
tagtgatgtgtcctccactatacag

SEQ ID NO: 5747379 - DNA, 25 bp, Homo sapien
gtgtattcactcggtagtgatgtgt

SEQ ID NO: 5747380 - DNA, 25 bp, Homo sapien
aggaataagagaagcagcaggactt

SEQ ID NO: 5747381 - DNA, 25 bp, Homo sapien
gagctacgtttcggtgcacgcggag

SEQ ID NO: 5747382 - DNA, 25 bp, Homo sapien
cgcgtggggctatacacgggtgaga

SEQ ID NO: 5747383 - DNA, 25 bp, Homo sapien
ggcaccgctgctggcgcagtgagtg

SEQ ID NO: 5747384 - DNA, 25 bp, Homo sapien
ggggagcggccagctccgctactcc

SEQ ID NO: 5747385 - DNA, 25 bp, Homo sapien
ttcttcctagatatacaggcaaatg

SEQ ID NO: 5747386 - DNA, 25 bp, Homo sapien
aagacacggggaccttctggaggta

SEQ ID NO: 5747387 - DNA, 25 bp, Homo sapien
agaacgcgctggtgtcctactcgct

SEQ ID NO: 5747388 - DNA, 25 bp, Homo sapien
agctggtggtgaccgcacgggacgg

SEQ ID NO: 5747389 - DNA, 25 bp, Homo sapien
tggtggcgaaggtgcgcgcagtgga

SEQ ID NO: 5747390 - DNA, 25 bp, Homo sapien
gtttaccatagatcccatctcaggg

SEQ ID NO: 5747391 - DNA, 25 bp, Homo sapien
ggagcgcggaatgtagcatccacgt

SEQ ID NO: 5747392 - DNA, 25 bp, Homo sapien
tttggtttttgtgtgtgtgtgtttg

SEQ ID NO: 5747393 - DNA, 25 bp, Homo sapien
cgacaacgcgccggcactgttggcg

SEQ ID NO: 5747394 - DNA, 25 bp, Homo sapien
ggaggtaaatctgcagaatggcatt

SEQ ID NO: 5747395 - DNA, 25 bp, Homo sapien
cctacaagctcagctccagtgagtt

SEQ ID NO: 5747396 - DNA, 25 bp, Homo sapien
gttgttgttttggtttttgtgtgtg

SEQ ID NO: 5747397 - DNA, 25 bp, Homo sapien
tgattctcggtttcctctagaggga

SEQ ID NO: 5747398 - DNA, 25 bp, Homo sapien
agtggagctgctgcagttccaggtg

SEQ ID NO: 5747399 - DNA, 25 bp, Homo sapien
aaatattgaatagctaccaaataaa

SEQ ID NO: 5747400 - DNA, 25 bp, Homo sapien
gaggacccccccaagacggacctca

SEQ ID NO: 5747401 - DNA, 25 bp, Homo sapien
agcagcaggactttaacagagacta

SEQ ID NO: 5747402 - DNA, 25 bp, Homo sapien
attgttttctattctgctgcattcc

SEQ ID NO: 5747403 - DNA, 25 bp, Homo sapien
cgagaacgacaacgcgccggcactg

SEQ ID NO: 5747404 - DNA, 25 bp, Homo sapien
ttccaggtgagcgcgcgggatgcgg

SEQ ID NO: 5747405 - DNA, 25 bp, Homo sapien
gattttttgtttagacaaacaggat

SEQ ID NO: 5747406 - DNA, 25 bp, Homo sapien
caaggctgcttgattctcggtttcc

SEQ ID NO: 5747407 - DNA, 25 bp, Homo sapien
caggacctggggctggagctggagg

SEQ ID NO: 5747408 - DNA, 25 bp, Homo sapien
acgtccctttcaagctggtgtccac

SEQ ID NO: 5747409 - DNA, 25 bp, Homo sapien
gcgggcggagcgcggaatgtagcat

SEQ ID NO: 5747410 - DNA, 25 bp, Homo sapien
tctaacaagactcttggcaaagaca

SEQ ID NO: 5747411 - DNA, 25 bp, Homo sapien
ctttcaagctggtgtccaccttcaa

SEQ ID NO: 5747412 - DNA, 25 bp, Homo sapien
gctggtgccgtggtcggtgggtgca

SEQ ID NO: 5747413 - DNA, 25 bp, Homo sapien
tgctctggggaggacccccccaaga

SEQ ID NO: 5747414 - DNA, 25 bp, Homo sapien
cacagcctgagtacacagtattcgt

SEQ ID NO: 5747415 - DNA, 25 bp, Homo sapien
cacgcggagagcggcaaggtgtacg

SEQ ID NO: 5747416 - DNA, 25 bp, Homo sapien
atattgaatagctaccaaataaaca

SEQ ID NO: 5747417 - DNA, 25 bp, Homo sapien
tggatataggaggcaaggaaagttt

SEQ ID NO: 5747418 - DNA, 25 bp, Homo sapien
aactgacaaaggaaccccttcaatg

SEQ ID NO: 5747419 - DNA, 25 bp, Homo sapien
tccgcagaagagaaacagctctcag

SEQ ID NO: 5747420 - DNA, 25 bp, Homo sapien
tcactagattgattttttgtttaga

SEQ ID NO: 5747421 - DNA, 25 bp, Homo sapien
gcgagcgcgcgttgtcgagctacgt

SEQ ID NO: 5747422 - DNA, 25 bp, Homo sapien
ctgctgaggttaatttgttactggt

SEQ ID NO: 5747423 - DNA, 25 bp, Homo sapien
tcgagctacgtttcggtgcacgcgg

SEQ ID NO: 5747424 - DNA, 25 bp, Homo sapien
aacctgagctcacgggcaccgttca

SEQ ID NO: 5747425 - DNA, 25 bp, Homo sapien
ttgaggattggtaatggcgtcttct

SEQ ID NO: 5747426 - DNA, 25 bp, Homo sapien
ggaattttcacttcacagatgtact

SEQ ID NO: 5747427 - DNA, 25 bp, Homo sapien
acggtgtcggatcgcgactctggta

SEQ ID NO: 5747428 - DNA, 25 bp, Homo sapien
tgtttgtgaattctcggatcgaccg

SEQ ID NO: 5747429 - DNA, 25 bp, Homo sapien
ggtttcctctagagggagcatctga

SEQ ID NO: 5747430 - DNA, 25 bp, Homo sapien
agttccaggtgagcgcgcgggatgc

SEQ ID NO: 5747431 - DNA, 25 bp, Homo sapien
ctctcgtgctggggaaatcgctgga

SEQ ID NO: 5747432 - DNA, 25 bp, Homo sapien
cttcacagatgtactgatgctatgc

SEQ ID NO: 5747433 - DNA, 25 bp, Homo sapien
gtcggtgggtgcagggcacgtggtg

SEQ ID NO: 5747434 - DNA, 25 bp, Homo sapien
cactgtgggccaccaccagcgtgtc

SEQ ID NO: 5747435 - DNA, 25 bp, Homo sapien
gcgtgggatgcggacgcgcaggaga

SEQ ID NO: 5747436 - DNA, 25 bp, Homo sapien
gcggagcgcggaatgtagcatccac

SEQ ID NO: 5747437 - DNA, 25 bp, Homo sapien
attatgaagaagcaaagtcctacga

SEQ ID NO: 5747438 - DNA, 25 bp, Homo sapien
ggaccgaacagcgagattgtgtatt

SEQ ID NO: 5747439 - DNA, 25 bp, Homo sapien
tacctgatcatcgccatctgcgcgg

SEQ ID NO: 5747440 - DNA, 25 bp, Homo sapien
aggtggccgacgtgaacgacaacgc

SEQ ID NO: 5747441 - DNA, 25 bp, Homo sapien
ggaggtggggagcggccagctccgc

SEQ ID NO: 5747442 - DNA, 25 bp, Homo sapien
atgtcaggacattgtaaaatttcat

SEQ ID NO: 5747443 - DNA, 25 bp, Homo sapien
cctgagctcacgggcaccgttcaaa

SEQ ID NO: 5747444 - DNA, 25 bp, Homo sapien
ccatcgaggtggccgacgtgaacga

SEQ ID NO: 5747445 - DNA, 25 bp, Homo sapien
ggacagagaggaaactgctgaggtt

SEQ ID NO: 5747446 - DNA, 25 bp, Homo sapien
accgaacagcgagattgtgtattca

SEQ ID NO: 5747447 - DNA, 25 bp, Homo sapien
gggctggagctggaggagctggtgc

SEQ ID NO: 5747448 - DNA, 25 bp, Homo sapien
ctgggcagcaacgtgacgctgcagg

SEQ ID NO: 5747449 - DNA, 25 bp, Homo sapien
acagctctcagaatcagaatacgta

SEQ ID NO: 5747450 - DNA, 25 bp, Homo sapien
tggtggagcggcgggtgggcgagcg

SEQ ID NO: 5747451 - DNA, 25 bp, Homo sapien
ggtggaaagtggccaggcacccaag

SEQ ID NO: 5747452 - DNA, 25 bp, Homo sapien
agaacaacccgccgggctgccacat

SEQ ID NO: 5747453 - DNA, 25 bp, Homo sapien
aggctacaacgcgtggctttcgtac

SEQ ID NO: 5747454 - DNA, 25 bp, Homo sapien
gacaccgcctactcgtgctggtgaa

SEQ ID NO: 5747455 - DNA, 25 bp, Homo sapien
tgctcacggtgctgctgtacactgc

SEQ ID NO: 5747456 - DNA, 25 bp, Homo sapien
accagaagtctcaataacgtctctc

SEQ ID NO: 5747457 - DNA, 25 bp, Homo sapien
gctgctgtacactgcgctgcggtgc

SEQ ID NO: 5747458 - DNA, 25 bp, Homo sapien
tctgtacattaaaatacctggtaaa

SEQ ID NO: 5747459 - DNA, 25 bp, Homo sapien
ctgggcactgtcattgctctcatca

SEQ ID NO: 5747460 - DNA, 25 bp, Homo sapien
gtaaatgacaatgaaccaacttttg

SEQ ID NO: 5747461 - DNA, 25 bp, Homo sapien
gttactggtggctactgatgggggc

SEQ ID NO: 5747462 - DNA, 25 bp, Homo sapien
tagattgattttttgtttagacaaa

SEQ ID NO: 5747463 - DNA, 25 bp, Homo sapien
ttgacagccacggccaccgtgttag

SEQ ID NO: 5747464 - DNA, 25 bp, Homo sapien
ggagcatctgatgcagatataggag

SEQ ID NO: 5747465 - DNA, 25 bp, Homo sapien
taaaaatatagtttgggtccccaca

SEQ ID NO: 5747466 - DNA, 25 bp, Homo sapien
gacgctgcaggtgttcgtgctggac

SEQ ID NO: 5747467 - DNA, 25 bp, Homo sapien
atgctcttctctcctacaagctcag

SEQ ID NO: 5747468 - DNA, 25 bp, Homo sapien
tggtcttactcgcagcagaggcggc

SEQ ID NO: 5747469 - DNA, 25 bp, Homo sapien
tcagcctatgagctggtggtgaccg

SEQ ID NO: 5747470 - DNA, 25 bp, Homo sapien
ttggtgctggacagcgccctggacc

SEQ ID NO: 5747471 - DNA, 25 bp, Homo sapien
caagctcagctccagtgagtttttc

SEQ ID NO: 5747472 - DNA, 25 bp, Homo sapien
ccaatatttccaatgacagtaaaga

SEQ ID NO: 5747473 - DNA, 25 bp, Homo sapien
ggcaccgttcaaatacttattaagg

SEQ ID NO: 5747474 - DNA, 25 bp, Homo sapien
gttagtgtcgttggtggaaagtggc

SEQ ID NO: 5747475 - DNA, 25 bp, Homo sapien
cgcagcagaggcggcagagggtgtg

SEQ ID NO: 5747476 - DNA, 25 bp, Homo sapien
cagtaaagactatccggtttcccga

SEQ ID NO: 5747477 - DNA, 25 bp, Homo sapien
ccccccaagacggacctcatggcct

SEQ ID NO: 5747478 - DNA, 25 bp, Homo sapien
gctgctgcagttccaggtgagcgcg

SEQ ID NO: 5747479 - DNA, 25 bp, Homo sapien
cgctcgcatcccgttccgcgtgggg

SEQ ID NO: 5747480 - DNA, 25 bp, Homo sapien
gaggccaaacacggcaccttcgtgg

SEQ ID NO: 5747481 - DNA, 25 bp, Homo sapien
atgtcacctgctccctgacgcccca

SEQ ID NO: 5747482 - DNA, 25 bp, Homo sapien
ctctcgcttctgctcctcgcagcct

SEQ ID NO: 5747483 - DNA, 25 bp, Homo sapien
aggcaaatgatgaactaagcgaatc

SEQ ID NO: 5747484 - DNA, 25 bp, Homo sapien
atttaaatttttgcaaaacatgctc

SEQ ID NO: 5747485 - DNA, 25 bp, Homo sapien
ggccgcatcgcgcaggacctggggc

SEQ ID NO: 5747486 - DNA, 25 bp, Homo sapien
ccaagacggacctcatggccttcag

SEQ ID NO: 5747487 - DNA, 25 bp, Homo sapien
actgatgctatgccaaataaatatt

SEQ ID NO: 5747488 - DNA, 25 bp, Homo sapien
aagtaaaattgttagagaatacggc

SEQ ID NO: 5747489 - DNA, 25 bp, Homo sapien
ctcagaatcagaatacgtaggaaag

SEQ ID NO: 5747490 - DNA, 25 bp, Homo sapien
agagggagcatctgatgcagatata

SEQ ID NO: 5747491 - DNA, 25 bp, Homo sapien
caacttttgcccaatcagtttacaa

SEQ ID NO: 5747492 - DNA, 25 bp, Homo sapien
gaatggacatgtcacctgctccctg

SEQ ID NO: 5747493 - DNA, 25 bp, Homo sapien
agggctggcaccgctgctggcgcag

SEQ ID NO: 5747494 - DNA, 25 bp, Homo sapien
cacatcttcacggtgtcagcgtggg

SEQ ID NO: 5747495 - DNA, 25 bp, Homo sapien
caaggtgtacgcgctgcagccgctg

SEQ ID NO: 5747496 - DNA, 25 bp, Homo sapien
gacgcgcaggagaacgcgctggtgt

SEQ ID NO: 5747497 - DNA, 25 bp, Homo sapien
cgctgcggtgctcggtgccacccac

SEQ ID NO: 5747498 - DNA, 25 bp, Homo sapien
atatttaaatttttgcaaaacatgc

SEQ ID NO: 5747499 - DNA, 25 bp, Homo sapien
cccatctgtacattaaaatacctgg

SEQ ID NO: 5747500 - DNA, 25 bp, Homo sapien
ggcaaggtgtacgcgctgcagccgc

SEQ ID NO: 5747501 - DNA, 25 bp, Homo sapien
ccatctcagagaacgcttccctggg

SEQ ID NO: 5747502 - DNA, 25 bp, Homo sapien
ggccttcagccctagcttatctcaa

SEQ ID NO: 5747503 - DNA, 25 bp, Homo sapien
aagaagcaaagtcctacgagattca

SEQ ID NO: 5747504 - DNA, 25 bp, Homo sapien
tgtcagcctatgagctggtggtgac

SEQ ID NO: 5747505 - DNA, 25 bp, Homo sapien
gaatctttgtctctcgtgctgggga

SEQ ID NO: 5747506 - DNA, 25 bp, Homo sapien
tgggcgccgcgggctcagaggctac

SEQ ID NO: 5747507 - DNA, 25 bp, Homo sapien
ccgcgggctcagaggctacgctggt

SEQ ID NO: 5747508 - DNA, 25 bp, Homo sapien
caaacctgagctcacgggcaccgtt

SEQ ID NO: 5747509 - DNA, 25 bp, Homo sapien
atccagcttgcctcttgaaactatt

SEQ ID NO: 5747510 - DNA, 25 bp, Homo sapien
tcggtgcacgcggagagcggcaagg

SEQ ID NO: 5747511 - DNA, 25 bp, Homo sapien
gaagtggagctgctgcagttccagg

SEQ ID NO: 5747512 - DNA, 25 bp, Homo sapien
atgatgaactaagcgaatctttgtc

SEQ ID NO: 5747513 - DNA, 25 bp, Homo sapien
agcaaagtcctacgagattcaggtc

SEQ ID NO: 5747514 - DNA, 25 bp, Homo sapien
ggagaacgcgctggtgtcctactcg

SEQ ID NO: 5747515 - DNA, 25 bp, Homo sapien
tatggatataggaggcaaggaaagt

SEQ ID NO: 5747516 - DNA, 25 bp, Homo sapien
aattctcggatcgaccgggaggagc

SEQ ID NO: 5747517 - DNA, 25 bp, Homo sapien
tcaaatccagcttgcctcttgaaac

SEQ ID NO: 5747518 - DNA, 25 bp, Homo sapien
agcgcggaatgtagcatccacgtgg

SEQ ID NO: 5747519 - DNA, 25 bp, Homo sapien
cgggtgagatcagcacgacacgtgc

SEQ ID NO: 5747520 - DNA, 25 bp, Homo sapien
cagaatcagaatacgtaggaaagat

SEQ ID NO: 5747521 - DNA, 25 bp, Homo sapien
gagcgtaaagctattttcactagat

SEQ ID NO: 5747522 - DNA, 25 bp, Homo sapien
caggttttccatgtggaagtggagg

SEQ ID NO: 5747523 - DNA, 25 bp, Homo sapien
tcgacaccgcctactcgtgctggtg

SEQ ID NO: 5747524 - DNA, 25 bp, Homo sapien
tgaaatgggtgaaaatggaattctt

SEQ ID NO: 5747525 - DNA, 25 bp, Homo sapien
atcgtggacaggccgctgcaggttt

SEQ ID NO: 5747526 - DNA, 25 bp, Homo sapien
ttgttttggtttttgtgtgtgtgtg

SEQ ID NO: 5747527 - DNA, 25 bp, Homo sapien
cgccggcactgttggcgcctagggc

SEQ ID NO: 5747528 - DNA, 25 bp, Homo sapien
tggtcggtgggtgcagggcacgtgg

SEQ ID NO: 5747529 - DNA, 25 bp, Homo sapien
ctcccctcgacaccgcctactcgtg

SEQ ID NO: 5747530 - DNA, 25 bp, Homo sapien
tctgcgcggtatccagcctgttggt

SEQ ID NO: 5747531 - DNA, 25 bp, Homo sapien
acacaccagaagtctcaataacgtc

SEQ ID NO: 5747532 - DNA, 25 bp, Homo sapien
cggaatgtagcatccacgtggaggt

SEQ ID NO: 5747533 - DNA, 25 bp, Homo sapien
ctggtgtccaccttcaagaattact

SEQ ID NO: 5747534 - DNA, 25 bp, Homo sapien
ctaccattatgtctttatatattaa

SEQ ID NO: 5747535 - DNA, 25 bp, Homo sapien
cctatgagctggtggtgaccgcacg

SEQ ID NO: 5747536 - DNA, 25 bp, Homo sapien
actggcagcgctcgcatcccgttcc

SEQ ID NO: 5747537 - DNA, 25 bp, Homo sapien
catccacgtggaggtgatcgtggac

SEQ ID NO: 5747538 - DNA, 25 bp, Homo sapien
gagcgcgcgggatgcgggcgtgccg

SEQ ID NO: 5747539 - DNA, 25 bp, Homo sapien
aacgacaacgcgccggcgttcgcac

SEQ ID NO: 5747540 - DNA, 25 bp, Homo sapien
aggtccagactccgcagaagagaaa

SEQ ID NO: 5747541 - DNA, 25 bp, Homo sapien
ggtagtgatgtgtcctccactatac

SEQ ID NO: 5747542 - DNA, 25 bp, Homo sapien
ccttcgtgggccgcatcgcgcagga

SEQ ID NO: 5747543 - DNA, 25 bp, Homo sapien
ttcacggtgtcagcgtgggatgcgg

SEQ ID NO: 5747544 - DNA, 25 bp, Homo sapien
ataagagaagcagcaggactttaac

SEQ ID NO: 5747545 - DNA, 25 bp, Homo sapien
cgcagtggacgctgactcaggctac

SEQ ID NO: 5747546 - DNA, 25 bp, Homo sapien
ggcgtgggtgggcgccgcgggctca

SEQ ID NO: 5747547 - DNA, 25 bp, Homo sapien
atttttgcaaaacatgctcttctaa

SEQ ID NO: 5747548 - DNA, 25 bp, Homo sapien
gagcgcgcgttgtcgagctacgttt

SEQ ID NO: 5747549 - DNA, 25 bp, Homo sapien
aaatttttgcaaaacatgctcttct

SEQ ID NO: 5747550 - DNA, 25 bp, Homo sapien
gctaccaaataaacattgttttcta

SEQ ID NO: 5747551 - DNA, 25 bp, Homo sapien
ccaaataaacattgttttctattct

SEQ ID NO: 5747552 - DNA, 25 bp, Homo sapien
gacaaaggaaccccttcaatgtcag

SEQ ID NO: 5747553 - DNA, 25 bp, Homo sapien
ggcctggacacggctgctctcgctt

SEQ ID NO: 5747554 - DNA, 25 bp, Homo sapien
ttccctgggcactgtcattgctctc

SEQ ID NO: 5747555 - DNA, 25 bp, Homo sapien
ttgtggacatcaatgataacacacc

SEQ ID NO: 5747556 - DNA, 25 bp, Homo sapien
ccagactccgcagaagagaaacagc

SEQ ID NO: 5747557 - DNA, 25 bp, Homo sapien
ttttctattctgctgcattccccat

SEQ ID NO: 5747558 - DNA, 25 bp, Homo sapien
atcagaatacgtaggaaagatatgg

SEQ ID NO: 5747559 - DNA, 25 bp, Homo sapien
atccagcctgttggtgctcacggtg

SEQ ID NO: 5747560 - DNA, 25 bp, Homo sapien
gaaagtttttaaatggctaccatta

SEQ ID NO: 5747561 - DNA, 25 bp, Homo sapien
agaggaaactgctgaggttaatttg

SEQ ID NO: 5747562 - DNA, 25 bp, Homo sapien
aactattgtctaacaagactcttgg

SEQ ID NO: 5747563 - DNA, 25 bp, Homo sapien
cgcggaatgtagcatccacgtggag

SEQ ID NO: 5747564 - DNA, 25 bp, Homo sapien
cggctgctctcgcttctgctcctcg

SEQ ID NO: 5747565 - DNA, 25 bp, Homo sapien
ctggtgccgcgcctgttccgggtgg

SEQ ID NO: 5747566 - DNA, 25 bp, Homo sapien
aggaggccaaacacggcaccttcgt

SEQ ID NO: 5747567 - DNA, 25 bp, Homo sapien
gcgcgcgggatgcgggcgtgccgcc

SEQ ID NO: 5747568 - DNA, 25 bp, Homo sapien
acatgtcacctgctccctgacgccc

SEQ ID NO: 5747569 - DNA, 25 bp, Homo sapien
gcaggactttaacagagactagaat

SEQ ID NO: 5747570 - DNA, 25 bp, Homo sapien
cggacgcgcaggagaacgcgctggt

SEQ ID NO: 5747571 - DNA, 25 bp, Homo sapien
taagttaaacgcttctgatgcagat

SEQ ID NO: 5747572 - DNA, 25 bp, Homo sapien
gacggacctcatggccttcagccct

SEQ ID NO: 5747573 - DNA, 25 bp, Homo sapien
ctactcgctggtggagcggcgggtg

SEQ ID NO: 5747574 - DNA, 25 bp, Homo sapien
gaggattggtaatggcgtcttctat

SEQ ID NO: 5747575 - DNA, 25 bp, Homo sapien
agctggtgtccaccttcaagaatta

SEQ ID NO: 5747576 - DNA, 25 bp, Homo sapien
acgacacgtgccctagacgaggctg

SEQ ID NO: 5747577 - DNA, 25 bp, Homo sapien
ggtgtgctccagcgccgtggggagc

SEQ ID NO: 5747578 - DNA, 25 bp, Homo sapien
atagtgaaagtactctggtttctgt

SEQ ID NO: 5747579 - DNA, 25 bp, Homo sapien
aggacattaacgacaacccgccaat

SEQ ID NO: 5747580 - DNA, 25 bp, Homo sapien
gataacacaccagaagtctcaataa

SEQ ID NO: 5747581 - DNA, 25 bp, Homo sapien
ttggtggaaagtggccaggcaccca

SEQ ID NO: 5747582 - DNA, 25 bp, Homo sapien
agtctcaataacgtctctctcactt

SEQ ID NO: 5747583 - DNA, 25 bp, Homo sapien
agcgtgtcagcctatgagctggtgg

SEQ ID NO: 5747584 - DNA, 25 bp, Homo sapien
ccagcgttgacagccacggccaccg

SEQ ID NO: 5747585 - DNA, 25 bp, Homo sapien
gggcgagcgcgcgttgtcgagctac

SEQ ID NO: 5747586 - DNA, 25 bp, Homo sapien
gaagcagcaggactttaacagagac

SEQ ID NO: 5747587 - DNA, 25 bp, Homo sapien
caggacattgtaaaatttcattaaa

SEQ ID NO: 5747588 - DNA, 25 bp, Homo sapien
cgtacgagcttcagctgggtactgg

SEQ ID NO: 5747589 - DNA, 25 bp, Homo sapien
attgctctcatcacggtgtcggatc

SEQ ID NO: 5747590 - DNA, 25 bp, Homo sapien
atgtgcttgatgtcaatgatcattt

SEQ ID NO: 5747591 - DNA, 25 bp, Homo sapien
gtggagcggcgggtgggcgagcgcg

SEQ ID NO: 5747592 - DNA, 25 bp, Homo sapien
gtccatcgaggtggccgacgtgaac

SEQ ID NO: 5747593 - DNA, 25 bp, Homo sapien
ttcctccttttttccaatgtgcttg

SEQ ID NO: 5747594 - DNA, 25 bp, Homo sapien
tcaataacgtctctctcacttccca

SEQ ID NO: 5747595 - DNA, 25 bp, Homo sapien
gcacccaaggcctcgtcgcgggcgt

SEQ ID NO: 5747596 - DNA, 25 bp, Homo sapien
ctttaacagagactagaatatttaa

SEQ ID NO: 5747597 - DNA, 25 bp, Homo sapien
gaaactattgtctaacaagactctt

SEQ ID NO: 5747598 - DNA, 25 bp, Homo sapien
cttcaaatccagcttgcctcttgaa

SEQ ID NO: 5747599 - DNA, 25 bp, Homo sapien
atacgtaggaaagatatggaacttc

SEQ ID NO: 5747600 - DNA, 25 bp, Homo sapien
gagctgctgcagttccaggtgagcg

SEQ ID NO: 5747601 - DNA, 25 bp, Homo sapien
caatgaaccaacttttgcccaatca

SEQ ID NO: 5747602 - DNA, 25 bp, Homo sapien
agtgaaagtactctggtttctgttt

SEQ ID NO: 5747603 - DNA, 25 bp, Homo sapien
gcgcctgttccgggtggcgtccaaa

SEQ ID NO: 5747604 - DNA, 25 bp, Homo sapien
tgtgtcctccactatacagactaag

SEQ ID NO: 5747605 - DNA, 25 bp, Homo sapien
ccatctcaggggaaatcagaactaa

SEQ ID NO: 5747606 - DNA, 25 bp, Homo sapien
tggacacggctgctctcgcttctgc

SEQ ID NO: 5747607 - DNA, 25 bp, Homo sapien
aaataaatattgaatagctaccaaa

SEQ ID NO: 5747608 - DNA, 25 bp, Homo sapien
ggtggatgtcaacgtgtacctgatc

SEQ ID NO: 5747609 - DNA, 25 bp, Homo sapien
tccccatctgtacattaaaatacct

SEQ ID NO: 5747610 - DNA, 25 bp, Homo sapien
acgcgtggctttcgtacgagcttca

SEQ ID NO: 5747611 - DNA, 25 bp, Homo sapien
gaagagaaacagctctcagaatcag

SEQ ID NO: 5747612 - DNA, 25 bp, Homo sapien
ttgatgtcaatgatcattttgtaaa

SEQ ID NO: 5747613 - DNA, 25 bp, Homo sapien
ataaatattgaatagctaccaaata

SEQ ID NO: 5747614 - DNA, 25 bp, Homo sapien
ttgattttttgtttagacaaacagg

SEQ ID NO: 5747615 - DNA, 25 bp, Homo sapien
tgaacgacaacgcgccggcgttcgc

SEQ ID NO: 5747616 - DNA, 25 bp, Homo sapien
gtgggtgcagggcacgtggtggcga

SEQ ID NO: 5747617 - DNA, 25 bp, Homo sapien
aaatgatgaactaagcgaatctttg

SEQ ID NO: 5747618 - DNA, 25 bp, Homo sapien
ggcgccgcgggctcagaggctacgc

SEQ ID NO: 5747619 - DNA, 25 bp, Homo sapien
agcttcagctgggtactggcagcgc

SEQ ID NO: 5747620 - DNA, 25 bp, Homo sapien
ttggaattttcacttcacagatgta

SEQ ID NO: 5747621 - DNA, 25 bp, Homo sapien
aaacattgttttctattctgctgca

SEQ ID NO: 5747622 - DNA, 25 bp, Homo sapien
tgctctcatcacggtgtcggatcgc

SEQ ID NO: 5747623 - DNA, 25 bp, Homo sapien
ttttgcaaaacatgctcttctaatt

SEQ ID NO: 5747624 - DNA, 25 bp, Homo sapien
cggtatccagcctgttggtgctcac

SEQ ID NO: 5747625 - DNA, 25 bp, Homo sapien
aggttaatttgttactggtggctac

SEQ ID NO: 5747626 - DNA, 25 bp, Homo sapien
ctattgtctaacaagactcttggca

SEQ ID NO: 5747627 - DNA, 25 bp, Homo sapien
tcactcggtagtgatgtgtcctcca

SEQ ID NO: 5747628 - DNA, 25 bp, Homo sapien
aaagtactctggtttctgtttgatt

SEQ ID NO: 5747629 - DNA, 25 bp, Homo sapien
ccatgtggaagtggaggtgaaggac

SEQ ID NO: 5747630 - DNA, 25 bp, Homo sapien
tactgatgggggcaaacctgagctc

SEQ ID NO: 5747631 - DNA, 25 bp, Homo sapien
agatcagcacgacacgtgccctaga

SEQ ID NO: 5747632 - DNA, 25 bp, Homo sapien
gcggcaaggtgtacgcgctgcagcc

SEQ ID NO: 5747633 - DNA, 25 bp, Homo sapien
atgcagatataggagtaaatgctct

SEQ ID NO: 5747634 - DNA, 25 bp, Homo sapien
gaatgtagcatccacgtggaggtga

SEQ ID NO: 5747635 - DNA, 25 bp, Homo sapien
cacggggaccttctggaggtaaatc

SEQ ID NO: 5747636 - DNA, 25 bp, Homo sapien
ccaaacacggcaccttcgtgggccg

SEQ ID NO: 5747637 - DNA, 25 bp, Homo sapien
attttgtttgtgaattctcggatcg

SEQ ID NO: 5747638 - DNA, 25 bp, Homo sapien
aaatggctaccattatgtctttata

SEQ ID NO: 5747639 - DNA, 25 bp, Homo sapien
atctcaaggtccagactccgcagaa

SEQ ID NO: 5747640 - DNA, 25 bp, Homo sapien
ctctagagggagcatctgatgcaga

SEQ ID NO: 5747641 - DNA, 25 bp, Homo sapien
cagcagaggcggcagagggtgtgct

SEQ ID NO: 5747642 - DNA, 25 bp, Homo sapien
cgcgcaggagaacgcgctggtgtcc

SEQ ID NO: 5747643 - DNA, 25 bp, Homo sapien
ggctgactcccctcgacaccgccta

SEQ ID NO: 5747644 - DNA, 25 bp, Homo sapien
tgtcaacgtgtacctgatcatcgcc

SEQ ID NO: 5747645 - DNA, 25 bp, Homo sapien
ccaaataaatattgaatagctacca

SEQ ID NO: 5747646 - DNA, 25 bp, Homo sapien
ctggtggtgaccgcacgggacgggg

SEQ ID NO: 5747647 - DNA, 25 bp, Homo sapien
attttcactagattgattttttgtt

SEQ ID NO: 5747648 - DNA, 25 bp, Homo sapien
cgcaggacctggggctggagctgga

SEQ ID NO: 5747649 - DNA, 25 bp, Homo sapien
caccgcctactcgtgctggtgaagg

SEQ ID NO: 5747650 - DNA, 25 bp, Homo sapien
cggcgggtgggcgagcgcgcgttgt

SEQ ID NO: 5747651 - DNA, 25 bp, Homo sapien
tttgaagactttggaattttcactt

SEQ ID NO: 5747652 - DNA, 25 bp, Homo sapien
ggtgctggacagcgccctggaccgc

SEQ ID NO: 5747653 - DNA, 25 bp, Homo sapien
ccacatagtgaaagtactctggttt

SEQ ID NO: 5747654 - DNA, 25 bp, Homo sapien
gtttagacaaacaggatgaaaataa

SEQ ID NO: 5747655 - DNA, 25 bp, Homo sapien
ctggtgtcctactcgctggtggagc

SEQ ID NO: 5747656 - DNA, 25 bp, Homo sapien
ggccgacgtgaacgacaacgcgccg

SEQ ID NO: 5747657 - DNA, 25 bp, Homo sapien
gtacactgcgctgcggtgctcggtg

SEQ ID NO: 5747658 - DNA, 25 bp, Homo sapien
gatcaaaacattgaggattggtaat

SEQ ID NO: 5747659 - DNA, 25 bp, Homo sapien
tgtcctccactatacagactaagtt

SEQ ID NO: 5747660 - DNA, 25 bp, Homo sapien
actccgtccccgaggaggccaaaca

SEQ ID NO: 5747661 - DNA, 25 bp, Homo sapien
tctgatgcagatataggagtaaatg

SEQ ID NO: 5747662 - DNA, 25 bp, Homo sapien
tgcacgcggagagcggcaaggtgta

SEQ ID NO: 5747663 - DNA, 25 bp, Homo sapien
tcgtgctggtgaaggaccacggcga

SEQ ID NO: 5747664 - DNA, 25 bp, Homo sapien
agagggtgtgctctggggaggaccc

SEQ ID NO: 5747665 - DNA, 25 bp, Homo sapien
attgtctaacaagactcttggcaaa

SEQ ID NO: 5747666 - DNA, 25 bp, Homo sapien
cttcaatagagagggagcgtaaagc

SEQ ID NO: 5747667 - DNA, 25 bp, Homo sapien
ttccatgtggaagtggaggtgaagg

SEQ ID NO: 5747668 - DNA, 25 bp, Homo sapien
tggcattttgtttgtgaattctcgg

SEQ ID NO: 5747669 - DNA, 25 bp, Homo sapien
tatacagactaagtttaccatagat

SEQ ID NO: 5747670 - DNA, 25 bp, Homo sapien
gtgggatgcggacgcgcaggagaac

SEQ ID NO: 5747671 - DNA, 25 bp, Homo sapien
tggtaatggcgtcttctatcagaag

SEQ ID NO: 5747672 - DNA, 25 bp, Homo sapien
tgtacattaaaatacctggtaaatg

SEQ ID NO: 5747673 - DNA, 25 bp, Homo sapien
ccttcaagaattactactcgttggt

SEQ ID NO: 5747674 - DNA, 25 bp, Homo sapien
tcctagatatacaggcaaatgatga

SEQ ID NO: 5747675 - DNA, 25 bp, Homo sapien
ttgcccaatcagtttacaaagtaaa

SEQ ID NO: 5747676 - DNA, 25 bp, Homo sapien
aataactttatggatataggaggca

SEQ ID NO: 5747677 - DNA, 25 bp, Homo sapien
ctgactcccctcgacaccgcctact

SEQ ID NO: 5747678 - DNA, 25 bp, Homo sapien
cgcttctgctcctcgcagcctggga

SEQ ID NO: 5747679 - DNA, 25 bp, Homo sapien
gggtccccacatagtgaaagtactc

SEQ ID NO: 5747680 - DNA, 25 bp, Homo sapien
tcaatagagagggagcgtaaagcta

SEQ ID NO: 5747681 - DNA, 25 bp, Homo sapien
tgcaggttttccatgtggaagtgga

SEQ ID NO: 5747682 - DNA, 25 bp, Homo sapien
tacacgggtgagatcagcacgacac

SEQ ID NO: 5747683 - DNA, 25 bp, Homo sapien
acccgccgggctgccacatcttcac

SEQ ID NO: 5747684 - DNA, 25 bp, Homo sapien
gacaggccgctgcaggttttccatg

SEQ ID NO: 5747685 - DNA, 25 bp, Homo sapien
caggaaagcccacgctggtgtgctc

SEQ ID NO: 5747686 - DNA, 25 bp, Homo sapien
agaaacagctctcagaatcagaata

SEQ ID NO: 5747687 - DNA, 25 bp, Homo sapien
gttccgcgtggggctatacacgggt

SEQ ID NO: 5747688 - DNA, 25 bp, Homo sapien
gaaactgctgaggttaatttgttac

SEQ ID NO: 5747689 - DNA, 25 bp, Homo sapien
cgcgagagcgtgtcagcctatgagc

SEQ ID NO: 5747690 - DNA, 25 bp, Homo sapien
ggaccgcgagagcgtgtcagcctat

SEQ ID NO: 5747691 - DNA, 25 bp, Homo sapien
gtacgaatggacatgtcacctgctc

SEQ ID NO: 5747692 - DNA, 25 bp, Homo sapien
aatagagagggagcgtaaagctatt

SEQ ID NO: 5747693 - DNA, 25 bp, Homo sapien
acctggggctggagctggaggagct

SEQ ID NO: 5747694 - DNA, 25 bp, Homo sapien
gagaatacggcaaatgggaccttag

SEQ ID NO: 5747695 - DNA, 25 bp, Homo sapien
tgctggacagcgccctggaccgcga

SEQ ID NO: 5747696 - DNA, 25 bp, Homo sapien
cagaatacgtaggaaagatatggaa

SEQ ID NO: 5747697 - DNA, 25 bp, Homo sapien
gcttctgatgcagatgaaggaccga

SEQ ID NO: 5747698 - DNA, 25 bp, Homo sapien
gaatacgtaggaaagatatggaact

SEQ ID NO: 5747699 - DNA, 25 bp, Homo sapien
aaatacctggtaaatgaaaatatta

SEQ ID NO: 5747700 - DNA, 25 bp, Homo sapien
tgtgaattctcggatcgaccgggag

SEQ ID NO: 5747701 - DNA, 25 bp, Homo sapien
caatgacagtaaagactatccggtt

SEQ ID NO: 5747702 - DNA, 25 bp, Homo sapien
gtgcgggcggagcgcggaatgtagc

SEQ ID NO: 5747703 - DNA, 25 bp, Homo sapien
cgtggtggcgaaggtgcgcgcagtg

SEQ ID NO: 5747704 - DNA, 25 bp, Homo sapien
atggacatgtcacctgctccctgac

SEQ ID NO: 5747705 - DNA, 25 bp, Homo sapien
gtttttaaatggctaccattatgtc

SEQ ID NO: 5747706 - DNA, 25 bp, Homo sapien
atttgatcaaaacattgaggattgg

SEQ ID NO: 5747707 - DNA, 25 bp, Homo sapien
tgccaaataaatattgaatagctac

SEQ ID NO: 5747708 - DNA, 25 bp, Homo sapien
ccaggcacccaaggcctcgtcgcgg

SEQ ID NO: 5747709 - DNA, 25 bp, Homo sapien
ggtgtcctactcgctggtggagcgg

SEQ ID NO: 5747710 - DNA, 25 bp, Homo sapien
cgcagaagagaaacagctctcagaa

SEQ ID NO: 5747711 - DNA, 25 bp, Homo sapien
aggtaaatctgcagaatggcatttt

SEQ ID NO: 5747712 - DNA, 25 bp, Homo sapien
gactttggaattttcacttcacaga

SEQ ID NO: 5747713 - DNA, 25 bp, Homo sapien
agaatggcattttgtttgtgaattc

SEQ ID NO: 5747714 - DNA, 25 bp, Homo sapien
cgggcaccgttcaaatacttattaa

SEQ ID NO: 5747715 - DNA, 25 bp, Homo sapien
ggcaaatgggaccttagtggttaag

SEQ ID NO: 5747716 - DNA, 25 bp, Homo sapien
aatggcgtcttctatcagaaggggc

SEQ ID NO: 5747717 - DNA, 25 bp, Homo sapien
agacaaacaggatgaaaataacttt

SEQ ID NO: 5747718 - DNA, 25 bp, Homo sapien
tgtgctctggggaggacccccccaa

SEQ ID NO: 5747719 - DNA, 25 bp, Homo sapien
gcatcgcgcaggacctggggctgga

SEQ ID NO: 5747720 - DNA, 25 bp, Homo sapien
atacggcaaatgggaccttagtggt

SEQ ID NO: 5747721 - DNA, 25 bp, Homo sapien
aaatctgcagaatggcattttgttt

SEQ ID NO: 5747722 - DNA, 25 bp, Homo sapien
ccagcctgttggtgctcacggtgct

SEQ ID NO: 5747723 - DNA, 25 bp, Homo sapien
cgcgcagtggacgctgactcaggct

SEQ ID NO: 5747724 - DNA, 25 bp, Homo sapien
gaaagatatggaacttcaatcttca

SEQ ID NO: 5747725 - DNA, 25 bp, Homo sapien
cacccaccgagggtgcgcgcgcgcc

SEQ ID NO: 5747726 - DNA, 25 bp, Homo sapien
tgattcagaaatttggtgggttttt

SEQ ID NO: 5747727 - DNA, 25 bp, Homo sapien
cgggcgtgccgcctctgggcagcaa

SEQ ID NO: 5747728 - DNA, 25 bp, Homo sapien
cgttcgcacagcctgagtacacagt

SEQ ID NO: 5747729 - DNA, 25 bp, Homo sapien
ggacatcaatgataacacaccagaa

SEQ ID NO: 5747730 - DNA, 25 bp, Homo sapien
gtaaaattgttagagaatacggcaa

SEQ ID NO: 5747731 - DNA, 25 bp, Homo sapien
ctcacttcccatctcagagaacgct

SEQ ID NO: 5747732 - DNA, 25 bp, Homo sapien
cgtggggctatacacgggtgagatc

SEQ ID NO: 5747733 - DNA, 25 bp, Homo sapien
agcctatgagctggtggtgaccgca

SEQ ID NO: 5747734 - DNA, 25 bp, Homo sapien
ttactactcgttggtgctggacagc

SEQ ID NO: 5747735 - DNA, 25 bp, Homo sapien
ctctctcacttcccatctcagagaa

SEQ ID NO: 5747736 - DNA, 25 bp, Homo sapien
gcacgggacgggggctcgccttcac

SEQ ID NO: 5747737 - DNA, 25 bp, Homo sapien
tatgccaaataaatattgaatagct

SEQ ID NO: 5747738 - DNA, 25 bp, Homo sapien
tgaagaagcaaagtcctacgagatt

SEQ ID NO: 5747739 - DNA, 25 bp, Homo sapien
ggctcgccttcactgtgggccacca

SEQ ID NO: 5747740 - DNA, 25 bp, Homo sapien
tccaccttcaagaattactactcgt

SEQ ID NO: 5747741 - DNA, 25 bp, Homo sapien
gacattaacgacaacccgccaatat

SEQ ID NO: 5747742 - DNA, 25 bp, Homo sapien
caccttcgtgggccgcatcgcgcag

SEQ ID NO: 5747743 - DNA, 25 bp, Homo sapien
attttgaagactttggaattttcac

SEQ ID NO: 5747744 - DNA, 25 bp, Homo sapien
gctatgccaaataaatattgaatag

SEQ ID NO: 5747745 - DNA, 25 bp, Homo sapien
tctgctgcattccccatctgtacat

SEQ ID NO: 5747746 - DNA, 25 bp, Homo sapien
catctgtacattaaaatacctggta

SEQ ID NO: 5747747 - DNA, 25 bp, Homo sapien
caaagtcctacgagattcaggtcac

SEQ ID NO: 5747748 - DNA, 25 bp, Homo sapien
acaagactcttggcaaagacatttt

SEQ ID NO: 5747749 - DNA, 25 bp, Homo sapien
cgacaacgcgccggcgttcgcacag

SEQ ID NO: 5747750 - DNA, 25 bp, Homo sapien
aacagcgagattgtgtattcactcg

SEQ ID NO: 5747751 - DNA, 25 bp, Homo sapien
tttcccgaatcaaggctgcttgatt

SEQ ID NO: 5747752 - DNA, 25 bp, Homo sapien
aaccccttcaatgtcaggacattgt

SEQ ID NO: 5747753 - DNA, 25 bp, Homo sapien
tattcgtgaaggagaacaacccgcc

SEQ ID NO: 5747754 - DNA, 25 bp, Homo sapien
caatgtcaggacattgtaaaatttc

SEQ ID NO: 5747755 - DNA, 25 bp, Homo sapien
ggtgcacgcggagagcggcaaggtg

SEQ ID NO: 5747756 - DNA, 25 bp, Homo sapien
accaacttttgcccaatcagtttac

SEQ ID NO: 5747757 - DNA, 25 bp, Homo sapien
tggaacttcaatcttcaaatccagc

SEQ ID NO: 5747758 - DNA, 25 bp, Homo sapien
taacaagactcttggcaaagacatt

SEQ ID NO: 5747759 - DNA, 25 bp, Homo sapien
gcgtccaaaagacacggggaccttc

SEQ ID NO: 5747760 - DNA, 25 bp, Homo sapien
gggaccttctggaggtaaatctgca

SEQ ID NO: 5747761 - DNA, 25 bp, Homo sapien
atcaatgataacacaccagaagtct

SEQ ID NO: 5747762 - DNA, 25 bp, Homo sapien
ttcaagctggtgtccaccttcaaga

SEQ ID NO: 5747763 - DNA, 25 bp, Homo sapien
ctgacaaaggaaccccttcaatgtc

SEQ ID NO: 5747764 - DNA, 25 bp, Homo sapien
cctgatcatcgccatctgcgcggta

SEQ ID NO: 5747765 - DNA, 25 bp, Homo sapien
ctagacgaggctgactcccctcgac

SEQ ID NO: 5747766 - DNA, 25 bp, Homo sapien
caaagtaaaattgttagagaatacg

SEQ ID NO: 5747767 - DNA, 25 bp, Homo sapien
ggcgcagtgagtgagctggtgccgt

SEQ ID NO: 5747768 - DNA, 25 bp, Homo sapien
tggacaggccgctgcaggttttcca

SEQ ID NO: 5747769 - DNA, 25 bp, Homo sapien
cggtgggtgcagggcacgtggtggc

SEQ ID NO: 5747770 - DNA, 25 bp, Homo sapien
agggtgtgctctggggaggaccccc

SEQ ID NO: 5747771 - DNA, 25 bp, Homo sapien
gcagcgctcgcatcccgttccgcgt

SEQ ID NO: 5747772 - DNA, 25 bp, Homo sapien
aaggaccgaacagcgagattgtgta

SEQ ID NO: 5747773 - DNA, 25 bp, Homo sapien
atctcaggggaaatcagaactaagg

SEQ ID NO: 5747774 - DNA, 25 bp, Homo sapien
cagtggacgctgactcaggctacaa

SEQ ID NO: 5747775 - DNA, 25 bp, Homo sapien
tgtcggatcgcgactctggtacgaa

SEQ ID NO: 5747776 - DNA, 25 bp, Homo sapien
tccgggtggcgtccaaaagacacgg

SEQ ID NO: 5747777 - DNA, 25 bp, Homo sapien
gtggacgctgactcaggctacaacg

SEQ ID NO: 5747778 - DNA, 25 bp, Homo sapien
catcacggtgtcggatcgcgactct

SEQ ID NO: 5747779 - DNA, 25 bp, Homo sapien
ttagtggttaagttaaacgcttctg

SEQ ID NO: 5747780 - DNA, 25 bp, Homo sapien
acgtaggaaagatatggaacttcaa

SEQ ID NO: 5747781 - DNA, 25 bp, Homo sapien
actagattgattttttgtttagaca

SEQ ID NO: 5747782 - DNA, 25 bp, Homo sapien
cgtggggagctggtcttactcgcag

SEQ ID NO: 5747783 - DNA, 25 bp, Homo sapien
gagctggtgccgtggtcggtgggtg

SEQ ID NO: 5747784 - DNA, 25 bp, Homo sapien
cgtttcggtgcacgcggagagcggc

SEQ ID NO: 5747785 - DNA, 25 bp, Homo sapien
tcctactcgctggtggagcggcggg

SEQ ID NO: 5747786 - DNA, 25 bp, Homo sapien
cacttcacagatgtactgatgctat

SEQ ID NO: 5747787 - DNA, 25 bp, Homo sapien
acatcaatgataacacaccagaagt

SEQ ID NO: 5747788 - DNA, 25 bp, Homo sapien
cagcaggactttaacagagactaga

SEQ ID NO: 5747789 - DNA, 25 bp, Homo sapien
tggatgtcaacgtgtacctgatcat

SEQ ID NO: 5747790 - DNA, 25 bp, Homo sapien
tcacggtgtcggatcgcgactctgg

SEQ ID NO: 5747791 - DNA, 25 bp, Homo sapien
tgatcatcgccatctgcgcggtatc

SEQ ID NO: 5747792 - DNA, 25 bp, Homo sapien
tggtttttgtgtgtgtgtgtttgtg

SEQ ID NO: 5747793 - DNA, 25 bp, Homo sapien
gaccgggaggagctgtgcgggcgga

SEQ ID NO: 5747794 - DNA, 25 bp, Homo sapien
aggaaactgctgaggttaatttgtt

SEQ ID NO: 5747795 - DNA, 25 bp, Homo sapien
caatgtgcttgatgtcaatgatcat

SEQ ID NO: 5747796 - DNA, 25 bp, Homo sapien
tgaaaataactttatggatatagga

SEQ ID NO: 5747797 - DNA, 25 bp, Homo sapien
gtcacctgctccctgacgccccacg

SEQ ID NO: 5747798 - DNA, 25 bp, Homo sapien
gctggtggagcggcgggtgggcgag

SEQ ID NO: 5747799 - DNA, 25 bp, Homo sapien
agcgttgacagccacggccaccgtg

SEQ ID NO: 5747800 - DNA, 25 bp, Homo sapien
cagagaacgcttccctgggcactgt

SEQ ID NO: 5747801 - DNA, 25 bp, Homo sapien
aaggagaacaacccgccgggctgcc

SEQ ID NO: 5747802 - DNA, 25 bp, Homo sapien
gcttgatgtcaatgatcattttgta

SEQ ID NO: 5747803 - DNA, 25 bp, Homo sapien
ttctgatgcagatgaaggaccgaac

SEQ ID NO: 5747804 - DNA, 25 bp, Homo sapien
cagactaagtttaccatagatccca

SEQ ID NO: 5747805 - DNA, 25 bp, Homo sapien
ctcgcttctgctcctcgcagcctgg

SEQ ID NO: 5747806 - DNA, 25 bp, Homo sapien
ggcctcgtcgcgggcgtgggtgggc

SEQ ID NO: 5747807 - DNA, 25 bp, Homo sapien
tctggtacgaatggacatgtcacct

SEQ ID NO: 5747808 - DNA, 25 bp, Homo sapien
gatatggaacttcaatcttcaaatc

SEQ ID NO: 5747809 - DNA, 25 bp, Homo sapien
acccccccaagacggacctcatggc

SEQ ID NO: 5747810 - DNA, 25 bp, Homo sapien
atataggagtaaatgctcttctctc

SEQ ID NO: 5747811 - DNA, 25 bp, Homo sapien
ttggtgctcacggtgctgctgtaca

SEQ ID NO: 5747812 - DNA, 25 bp, Homo sapien
cagaagagaaacagctctcagaatc

SEQ ID NO: 5747813 - DNA, 25 bp, Homo sapien
tgctcggtgccacccaccgagggtg

SEQ ID NO: 5747814 - DNA, 25 bp, Homo sapien
aagtggccaggcacccaaggcctcg

SEQ ID NO: 5747815 - DNA, 25 bp, Homo sapien
agagaggaaactgctgaggttaatt

SEQ ID NO: 5747816 - DNA, 25 bp, Homo sapien
gtgggcgagcgcgcgttgtcgagct

SEQ ID NO: 5747817 - DNA, 25 bp, Homo sapien
tgaatagctaccaaataaacattgt

SEQ ID NO: 5747818 - DNA, 25 bp, Homo sapien
ttaaggtattagatgtaaatgacaa

SEQ ID NO: 5747819 - DNA, 25 bp, Homo sapien
tttcggtgcacgcggagagcggcaa

SEQ ID NO: 5747820 - DNA, 25 bp, Homo sapien
gtctctcgtgctggggaaatcgctg

SEQ ID NO: 5747821 - DNA, 25 bp, Homo sapien
ccacgtccctttcaagctggtgtcc

SEQ ID NO: 5747822 - DNA, 25 bp, Homo sapien
ggtgtcggatcgcgactctggtacg

SEQ ID NO: 5747823 - DNA, 25 bp, Homo sapien
cgttggtggaaagtggccaggcacc

SEQ ID NO: 5747824 - DNA, 25 bp, Homo sapien
aacaacccgccgggctgccacatct

SEQ ID NO: 5747825 - DNA, 25 bp, Homo sapien
ctttggaattttcacttcacagatg

SEQ ID NO: 5747826 - DNA, 25 bp, Homo sapien
ctcgccttcactgtgggccaccacc

SEQ ID NO: 5747827 - DNA, 25 bp, Homo sapien
cgctactccgtccccgaggaggcca

SEQ ID NO: 5747828 - DNA, 25 bp, Homo sapien
cgcgctggtgtcctactcgctggtg

SEQ ID NO: 5747829 - DNA, 25 bp, Homo sapien
ttctctgagatgggaagtgagagag

SEQ ID NO: 5747830 - DNA, 25 bp, Homo sapien
tctgatagaagacgccattaccaat

SEQ ID NO: 5747831 - DNA, 25 bp, Homo sapien
tgttagacaatagtttcaagaggca

SEQ ID NO: 5747832 - DNA, 25 bp, Homo sapien
gcccgcatcccgcgcgctcacctgg

SEQ ID NO: 5747833 - DNA, 25 bp, Homo sapien
ccgcatcccgcgcgctcacctggaa

SEQ ID NO: 5747834 - DNA, 25 bp, Homo sapien
ctgtcattggaaatattggcgggtt

SEQ ID NO: 5747835 - DNA, 25 bp, Homo sapien
caggcgcggcaccagctcctccagc

SEQ ID NO: 5747836 - DNA, 25 bp, Homo sapien
gcatcccacgctgacaccgtgaaga

SEQ ID NO: 5747837 - DNA, 25 bp, Homo sapien
tttgaagattgaagttccatatctt

SEQ ID NO: 5747838 - DNA, 25 bp, Homo sapien
ctcccggtcgatccgagaattcaca

SEQ ID NO: 5747839 - DNA, 25 bp, Homo sapien
ctatggtaaacttagtctgtatagt

SEQ ID NO: 5747840 - DNA, 25 bp, Homo sapien
cgctccctctctattgaagaactac

SEQ ID NO: 5747841 - DNA, 25 bp, Homo sapien
aaactttccttgcctcctatatcca

SEQ ID NO: 5747842 - DNA, 25 bp, Homo sapien
ccgtgagctcaggtttgcccccatc

SEQ ID NO: 5747843 - DNA, 25 bp, Homo sapien
ctctgagatgggaagtgagagagac

SEQ ID NO: 5747844 - DNA, 25 bp, Homo sapien
cagttgcagtgacctgaatctcgta

SEQ ID NO: 5747845 - DNA, 25 bp, Homo sapien
gcgcgatgcggcccacgaaggtgcc

SEQ ID NO: 5747846 - DNA, 25 bp, Homo sapien
tgctgcgagtaagaccagctcccca

SEQ ID NO: 5747847 - DNA, 25 bp, Homo sapien
cgcacagctcctcccggtcgatccg

SEQ ID NO: 5747848 - DNA, 25 bp, Homo sapien
tttgaacggtgcccgtgagctcagg

SEQ ID NO: 5747849 - DNA, 25 bp, Homo sapien
ccattaccaatcctcaatgttttga

SEQ ID NO: 5747850 - DNA, 25 bp, Homo sapien
ttgaaggtggacaccagcttgaaag

SEQ ID NO: 5747851 - DNA, 25 bp, Homo sapien
gcatgttttgcaaaaatttaaatat

SEQ ID NO: 5747852 - DNA, 25 bp, Homo sapien
gcgagtaagaccagctccccacggc

SEQ ID NO: 5747853 - DNA, 25 bp, Homo sapien
ggtgtgttatcattgatgtccacaa

SEQ ID NO: 5747854 - DNA, 25 bp, Homo sapien
gcggagtctggaccttgagataagc

SEQ ID NO: 5747855 - DNA, 25 bp, Homo sapien
gtagcctctgagcccgcggcgccca

SEQ ID NO: 5747856 - DNA, 25 bp, Homo sapien
tgggcaaaagttggttcattgtcat

SEQ ID NO: 5747857 - DNA, 25 bp, Homo sapien
gcgatttccccagcacgagagacaa

SEQ ID NO: 5747858 - DNA, 25 bp, Homo sapien
gaggaagaattccattttcacccat

SEQ ID NO: 5747859 - DNA, 25 bp, Homo sapien
caatctcgctgttcggtccttcatc

SEQ ID NO: 5747860 - DNA, 25 bp, Homo sapien
cgcttagttcatcatttgcctgtat

SEQ ID NO: 5747861 - DNA, 25 bp, Homo sapien
agatgctccctctagaggaaaccga

SEQ ID NO: 5747862 - DNA, 25 bp, Homo sapien
acttctggtgtgttatcattgatgt

SEQ ID NO: 5747863 - DNA, 25 bp, Homo sapien
aaatattggcgggttgtcgttaatg

SEQ ID NO: 5747864 - DNA, 25 bp, Homo sapien
gtttcctctctgtccagcgatttcc

SEQ ID NO: 5747865 - DNA, 25 bp, Homo sapien
cctgcacccaccgaccacggcacca

SEQ ID NO: 5747866 - DNA, 25 bp, Homo sapien
gttaaagtcctgctgcttctcttat

SEQ ID NO: 5747867 - DNA, 25 bp, Homo sapien
tcttgggggggtcctccccagagca

SEQ ID NO: 5747868 - DNA, 25 bp, Homo sapien
tcagcagtttcctctctgtccagcg

SEQ ID NO: 5747869 - DNA, 25 bp, Homo sapien
tttcatcctgtttgtctaaacaaaa

SEQ ID NO: 5747870 - DNA, 25 bp, Homo sapien
aggcgagcccccgtcccgtgcggtc

SEQ ID NO: 5747871 - DNA, 25 bp, Homo sapien
ggtccagggcgctgtccagcaccaa

SEQ ID NO: 5747872 - DNA, 25 bp, Homo sapien
tgcggcccacgaaggtgccgtgttt

SEQ ID NO: 5747873 - DNA, 25 bp, Homo sapien
agtctggaccttgagataagctagg

SEQ ID NO: 5747874 - DNA, 25 bp, Homo sapien
ctgagagctgtttctcttctgcgga

SEQ ID NO: 5747875 - DNA, 25 bp, Homo sapien
gtcggccacctcgatggacacgctg

SEQ ID NO: 5747876 - DNA, 25 bp, Homo sapien
ccgaccacggcaccagctcactcac

SEQ ID NO: 5747877 - DNA, 25 bp, Homo sapien
ccctctgccgcctctgctgcgagta

SEQ ID NO: 5747878 - DNA, 25 bp, Homo sapien
aaaaatttaaatattctagtctctg

SEQ ID NO: 5747879 - DNA, 25 bp, Homo sapien
ccagagcacaccctctgccgcctct

SEQ ID NO: 5747880 - DNA, 25 bp, Homo sapien
atcccgcgcgctcacctggaactgc

SEQ ID NO: 5747881 - DNA, 25 bp, Homo sapien
gcctcctcggggacggagtagcgga

SEQ ID NO: 5747882 - DNA, 25 bp, Homo sapien
gttgtcgttaatgtccttcacctcc

SEQ ID NO: 5747883 - DNA, 25 bp, Homo sapien
cctgctgcttctcttattcctccgc

SEQ ID NO: 5747884 - DNA, 25 bp, Homo sapien
gttgacatccaccagcgtagcctct

SEQ ID NO: 5747885 - DNA, 25 bp, Homo sapien
aggctggataccgcgcagatggcga

SEQ ID NO: 5747886 - DNA, 25 bp, Homo sapien
ctttcctacgtattctgattctgag

SEQ ID NO: 5747887 - DNA, 25 bp, Homo sapien
gacgtggggcgtcagggagcaggtg

SEQ ID NO: 5747888 - DNA, 25 bp, Homo sapien
tcctgcgcgtccgcatcccacgctg

SEQ ID NO: 5747889 - DNA, 25 bp, Homo sapien
tggaactgcagcagctccacttcct

SEQ ID NO: 5747890 - DNA, 25 bp, Homo sapien
acacatcactaccgagtgaatacac

SEQ ID NO: 5747891 - DNA, 25 bp, Homo sapien
ttaacctcagcagtttcctctctgt

SEQ ID NO: 5747892 - DNA, 25 bp, Homo sapien
tagtttcaagaggcaagctggattt

SEQ ID NO: 5747893 - DNA, 25 bp, Homo sapien
aggagagaagagcatttactcctat

SEQ ID NO: 5747894 - DNA, 25 bp, Homo sapien
cactaacacggtggccgtggctgtc

SEQ ID NO: 5747895 - DNA, 25 bp, Homo sapien
cgccgctccaccagcgagtaggaca

SEQ ID NO: 5747896 - DNA, 25 bp, Homo sapien
gcgccagcagcggtgccagccctag

SEQ ID NO: 5747897 - DNA, 25 bp, Homo sapien
gtagctcgacaacgcgcgctcgccc

SEQ ID NO: 5747898 - DNA, 25 bp, Homo sapien
tctggaccttgagataagctagggc

SEQ ID NO: 5747899 - DNA, 25 bp, Homo sapien
atagccccacgcggaacgggatgcg

SEQ ID NO: 5747900 - DNA, 25 bp, Homo sapien
ggatgcgagcgctgccagtacccag

SEQ ID NO: 5747901 - DNA, 25 bp, Homo sapien
tatttatttggcatagcatcagtac

SEQ ID NO: 5747902 - DNA, 25 bp, Homo sapien
tttactttgtaaactgattgggcaa

SEQ ID NO: 5747903 - DNA, 25 bp, Homo sapien
caaacacacacacacaaaaaccaaa

SEQ ID NO: 5747904 - DNA, 25 bp, Homo sapien
aagggacgtggggcgtcagggagca

SEQ ID NO: 5747905 - DNA, 25 bp, Homo sapien
tttggcatagcatcagtacatctgt

SEQ ID NO: 5747906 - DNA, 25 bp, Homo sapien
ttgccgctctccgcgtgcaccgaaa

SEQ ID NO: 5747907 - DNA, 25 bp, Homo sapien
agacaatagtttcaagaggcaagct

SEQ ID NO: 5747908 - DNA, 25 bp, Homo sapien
acaacgcgcgctcgcccacccgccg

SEQ ID NO: 5747909 - DNA, 25 bp, Homo sapien
cctggccactttccaccaacgacac

SEQ ID NO: 5747910 - DNA, 25 bp, Homo sapien
gtctgtatagtggaggacacatcac

SEQ ID NO: 5747911 - DNA, 25 bp, Homo sapien
tactcctatatctgcatcagatgct

SEQ ID NO: 5747912 - DNA, 25 bp, Homo sapien
gaccacggcaccagctcactcactg

SEQ ID NO: 5747913 - DNA, 25 bp, Homo sapien
ccacggcaccagctcactcactgcg

SEQ ID NO: 5747914 - DNA, 25 bp, Homo sapien
gtcagcctcgtctagggcacgtgtc

SEQ ID NO: 5747915 - DNA, 25 bp, Homo sapien
tgaatacacaatctcgctgttcggt

SEQ ID NO: 5747916 - DNA, 25 bp, Homo sapien
tgggatctatggtaaacttagtctg

SEQ ID NO: 5747917 - DNA, 25 bp, Homo sapien
attttcatcctgtttgtctaaacaa

SEQ ID NO: 5747918 - DNA, 25 bp, Homo sapien
ccgtgtatagccccacgcggaacgg

SEQ ID NO: 5747919 - DNA, 25 bp, Homo sapien
caatctagtgaaaatagctttacgc

SEQ ID NO: 5747920 - DNA, 25 bp, Homo sapien
ggggaatgcagcagaatagaaaaca

SEQ ID NO: 5747921 - DNA, 25 bp, Homo sapien
gatgtccacaagttttaatgaaatt

SEQ ID NO: 5747922 - DNA, 25 bp, Homo sapien
gagatgggatctatggtaaacttag

SEQ ID NO: 5747923 - DNA, 25 bp, Homo sapien
tccagcggctgcagcgcgtacacct

SEQ ID NO: 5747924 - DNA, 25 bp, Homo sapien
taccagagtcgcgatccgacaccgt

SEQ ID NO: 5747925 - DNA, 25 bp, Homo sapien
cgctcacctggaactgcagcagctc

SEQ ID NO: 5747926 - DNA, 25 bp, Homo sapien
tcaatatttatttggcatagcatca

SEQ ID NO: 5747927 - DNA, 25 bp, Homo sapien
aatcaaacagaaaccagagtacttt

SEQ ID NO: 5747928 - DNA, 25 bp, Homo sapien
cgaggggagtcagcctcgtctaggg

SEQ ID NO: 5747929 - DNA, 25 bp, Homo sapien
gccgtggtccttcaccagcacgagt

SEQ ID NO: 5747930 - DNA, 25 bp, Homo sapien
atgagagcaatgacagtgcccaggg

SEQ ID NO: 5747931 - DNA, 25 bp, Homo sapien
ctcggtgggtggcaccgagcaccgc

SEQ ID NO: 5747932 - DNA, 25 bp, Homo sapien
tttaccaggtattttaatgtacaga

SEQ ID NO: 5747933 - DNA, 25 bp, Homo sapien
caaattaacctcagcagtttcctct

SEQ ID NO: 5747934 - DNA, 25 bp, Homo sapien
ggtccccgtgtcttttggacgccac

SEQ ID NO: 5747935 - DNA, 25 bp, Homo sapien
ggcgatgatcaggtacacgttgaca

SEQ ID NO: 5747936 - DNA, 25 bp, Homo sapien
tcacaaacaaaatgccattctgcag

SEQ ID NO: 5747937 - DNA, 25 bp, Homo sapien
gtagcctgagtcagcgtccactgcg

SEQ ID NO: 5747938 - DNA, 25 bp, Homo sapien
agtgtacagcagcaccgtgagcacc

SEQ ID NO: 5747939 - DNA, 25 bp, Homo sapien
aaaatagctttacgctccctctcta

SEQ ID NO: 5747940 - DNA, 25 bp, Homo sapien
cagggcgctgtccagcaccaacgag

SEQ ID NO: 5747941 - DNA, 25 bp, Homo sapien
ccgtgagcaccaacaggctggatac

SEQ ID NO: 5747942 - DNA, 25 bp, Homo sapien
gtatagccccacgcggaacgggatg

SEQ ID NO: 5747943 - DNA, 25 bp, Homo sapien
aaggtcccatttgccgtattctcta

SEQ ID NO: 5747944 - DNA, 25 bp, Homo sapien
cacacaaaaaccaaaacaacaacaa

SEQ ID NO: 5747945 - DNA, 25 bp, Homo sapien
acgtggatgctacattccgcgctcc

SEQ ID NO: 5747946 - DNA, 25 bp, Homo sapien
atgctccctctagaggaaaccgaga

SEQ ID NO: 5747947 - DNA, 25 bp, Homo sapien
cagcgtgggctttcctggcgcgcgc

SEQ ID NO: 5747948 - DNA, 25 bp, Homo sapien
gctgaagctcgtacgaaagccacgc

SEQ ID NO: 5747949 - DNA, 25 bp, Homo sapien
cgagtaggacaccagcgcgttctcc

SEQ ID NO: 5747950 - DNA, 25 bp, Homo sapien
aacaaattaacctcagcagtttcct

SEQ ID NO: 5747951 - DNA, 25 bp, Homo sapien
gcagcggtgccagccctaggcgcca

SEQ ID NO: 5747952 - DNA, 25 bp, Homo sapien
cggcgcgttgtcgttctcgtccagc

SEQ ID NO: 5747953 - DNA, 25 bp, Homo sapien
gtggctgtcaacgctggttcgccgt

SEQ ID NO: 5747954 - DNA, 25 bp, Homo sapien
cctaggcgccaacagtgccggcgcg

SEQ ID NO: 5747955 - DNA, 25 bp, Homo sapien
tcctttgtcagttgcagtgacctga

SEQ ID NO: 5747956 - DNA, 25 bp, Homo sapien
caacaggctggataccgcgcagatg

SEQ ID NO: 5747957 - DNA, 25 bp, Homo sapien
ggatgctacattccgcgctccgccc

SEQ ID NO: 5747958 - DNA, 25 bp, Homo sapien
cgggatgcgagcgctgccagtaccc

SEQ ID NO: 5747959 - DNA, 25 bp, Homo sapien
cgcgtacaccttgccgctctccgcg

SEQ ID NO: 5747960 - DNA, 25 bp, Homo sapien
gcgtgggctttcctggcgcgcgcgc

SEQ ID NO: 5747961 - DNA, 25 bp, Homo sapien
gtatagtggaggacacatcactacc

SEQ ID NO: 5747962 - DNA, 25 bp, Homo sapien
caccctcggtgggtggcaccgagca

SEQ ID NO: 5747963 - DNA, 25 bp, Homo sapien
actgtgtactcaggctgtgcgaacg

SEQ ID NO: 5747964 - DNA, 25 bp, Homo sapien
agagcacaccctctgccgcctctgc

SEQ ID NO: 5747965 - DNA, 25 bp, Homo sapien
cctacgtattctgattctgagagct

SEQ ID NO: 5747966 - DNA, 25 bp, Homo sapien
ggctgaaggccatgaggtccgtctt

SEQ ID NO: 5747967 - DNA, 25 bp, Homo sapien
gctccgcccgcacagctcctcccgg

SEQ ID NO: 5747968 - DNA, 25 bp, Homo sapien
gtggcccacagtgaaggcgagcccc

SEQ ID NO: 5747969 - DNA, 25 bp, Homo sapien
ccaccagcgtagcctctgagcccgc

SEQ ID NO: 5747970 - DNA, 25 bp, Homo sapien
tcacgtcggccacctcgatggacac

SEQ ID NO: 5747971 - DNA, 25 bp, Homo sapien
gaattcacaaacaaaatgccattct

SEQ ID NO: 5747972 - DNA, 25 bp, Homo sapien
tacattccgcgctccgcccgcacag

SEQ ID NO: 5747973 - DNA, 25 bp, Homo sapien
cccagcacgagagacaaagattcgc

SEQ ID NO: 5747974 - DNA, 25 bp, Homo sapien
acatcaagcacattggaaaaaagga

SEQ ID NO: 5747975 - DNA, 25 bp, Homo sapien
cattcgtaccagagtcgcgatccga

SEQ ID NO: 5747976 - DNA, 25 bp, Homo sapien
tatttggtagctattcaatatttat

SEQ ID NO: 5747977 - DNA, 25 bp, Homo sapien
ccgctccaccagcgagtaggacacc

SEQ ID NO: 5747978 - DNA, 25 bp, Homo sapien
caggctgtgcgaacgccggcgcgtt

SEQ ID NO: 5747979 - DNA, 25 bp, Homo sapien
cgccattaccaatcctcaatgtttt

SEQ ID NO: 5747980 - DNA, 25 bp, Homo sapien
ctagtgaaaatagctttacgctccc

SEQ ID NO: 5747981 - DNA, 25 bp, Homo sapien
caaaagttggttcattgtcatttac

SEQ ID NO: 5747982 - DNA, 25 bp, Homo sapien
ctcactcactgcgccagcagcggtg

SEQ ID NO: 5747983 - DNA, 25 bp, Homo sapien
atggtaaacttagtctgtatagtgg

SEQ ID NO: 5747984 - DNA, 25 bp, Homo sapien
taatattttcatttaccaggtattt

SEQ ID NO: 5747985 - DNA, 25 bp, Homo sapien
tccttgcctcctatatccataaagt

SEQ ID NO: 5747986 - DNA, 25 bp, Homo sapien
ttgtaaactgattgggcaaaagttg

SEQ ID NO: 5747987 - DNA, 25 bp, Homo sapien
gggaagcgttctctgagatgggaag

SEQ ID NO: 5747988 - DNA, 25 bp, Homo sapien
taagtatttgaacggtgcccgtgag

SEQ ID NO: 5747989 - DNA, 25 bp, Homo sapien
atctagtgaaaatagctttacgctc

SEQ ID NO: 5747990 - DNA, 25 bp, Homo sapien
aacttagtctgtatagtggaggaca

SEQ ID NO: 5747991 - DNA, 25 bp, Homo sapien
cagatttacctccagaaggtccccg

SEQ ID NO: 5747992 - DNA, 25 bp, Homo sapien
caccctctgccgcctctgctgcgag

SEQ ID NO: 5747993 - DNA, 25 bp, Homo sapien
atgtggcagcccggcgggttgttct

SEQ ID NO: 5747994 - DNA, 25 bp, Homo sapien
tcgttaatgtccttcacctccactt

SEQ ID NO: 5747995 - DNA, 25 bp, Homo sapien
ccacgaaggtgccgtgtttggcctc

SEQ ID NO: 5747996 - DNA, 25 bp, Homo sapien
cgcccgcacagctcctcccggtcga

SEQ ID NO: 5747997 - DNA, 25 bp, Homo sapien
gccgcctctgctgcgagtaagacca

SEQ ID NO: 5747998 - DNA, 25 bp, Homo sapien
ccagcgagtaggacaccagcgcgtt

SEQ ID NO: 5747999 - DNA, 25 bp, Homo sapien
cacccgccgctccaccagcgagtag

SEQ ID NO: 5748000 - DNA, 25 bp, Homo sapien
catctgtgaagtgaaaattccaaag

SEQ ID NO: 5748001 - DNA, 25 bp, Homo sapien
ccaggctgcgaggagcagaagcgag

SEQ ID NO: 5748002 - DNA, 25 bp, Homo sapien
atgttttgatcaaattagaagagca

SEQ ID NO: 5748003 - DNA, 25 bp, Homo sapien
tggtccttcaccagcacgagtaggc

SEQ ID NO: 5748004 - DNA, 25 bp, Homo sapien
tccagctccagccccaggtcctgcg

SEQ ID NO: 5748005 - DNA, 25 bp, Homo sapien
tcgggaaaccggatagtctttactg

SEQ ID NO: 5748006 - DNA, 25 bp, Homo sapien
aggtgacatgtccattcgtaccaga

SEQ ID NO: 5748007 - DNA, 25 bp, Homo sapien
gttcatcatttgcctgtatatctag

SEQ ID NO: 5748008 - DNA, 25 bp, Homo sapien
cctgaatctcgtaggactttgcttc

SEQ ID NO: 5748009 - DNA, 25 bp, Homo sapien
accagagtactttcactatgtgggg

SEQ ID NO: 5748010 - DNA, 25 bp, Homo sapien
ccaccaaatttctgaatcaaacaga

SEQ ID NO: 5748011 - DNA, 25 bp, Homo sapien
gagaagagcatttactcctatatct

SEQ ID NO: 5748012 - DNA, 25 bp, Homo sapien
gacactaacacggtggccgtggctg

SEQ ID NO: 5748013 - DNA, 25 bp, Homo sapien
gctttacgctccctctctattgaag

SEQ ID NO: 5748014 - DNA, 25 bp, Homo sapien
tccagccccaggtcctgcgcgatgc

SEQ ID NO: 5748015 - DNA, 25 bp, Homo sapien
ttaatatataaagacataatggtag

SEQ ID NO: 5748016 - DNA, 25 bp, Homo sapien
accagcttgaaagggacgtggggcg

SEQ ID NO: 5748017 - DNA, 25 bp, Homo sapien
ctgcgagtaagaccagctccccacg

SEQ ID NO: 5748018 - DNA, 25 bp, Homo sapien
atttaaatattctagtctctgttaa

SEQ ID NO: 5748019 - DNA, 25 bp, Homo sapien
acaccgtgatgagagcaatgacagt

SEQ ID NO: 5748020 - DNA, 25 bp, Homo sapien
ccacgcggaacgggatgcgagcgct

SEQ ID NO: 5748021 - DNA, 25 bp, Homo sapien
cacagtgaaggcgagcccccgtccc

SEQ ID NO: 5748022 - DNA, 25 bp, Homo sapien
agcatttactcctatatctgcatca

SEQ ID NO: 5748023 - DNA, 25 bp, Homo sapien
taggcgccaacagtgccggcgcgtt

SEQ ID NO: 5748024 - DNA, 25 bp, Homo sapien
agtgcccagggaagcgttctctgag

SEQ ID NO: 5748025 - DNA, 25 bp, Homo sapien
gggaaaccggatagtctttactgtc

SEQ ID NO: 5748026 - DNA, 25 bp, Homo sapien
tttactgtcattggaaatattggcg

SEQ ID NO: 5748027 - DNA, 25 bp, Homo sapien
atagaagacgccattaccaatcctc

SEQ ID NO: 5748028 - DNA, 25 bp, Homo sapien
cagcgcgttctcctgcgcgtccgca

SEQ ID NO: 5748029 - DNA, 25 bp, Homo sapien
cagccccaggtcctgcgcgatgcgg

SEQ ID NO: 5748030 - DNA, 25 bp, Homo sapien
gttcctttgtcagttgcagtgacct

SEQ ID NO: 5748031 - DNA, 25 bp, Homo sapien
agcccgcggcgcccacccacgcccg

SEQ ID NO: 5748032 - DNA, 25 bp, Homo sapien
cctgtttgtctaaacaaaaaatcaa

SEQ ID NO: 5748033 - DNA, 25 bp, Homo sapien
gagctcaggtttgcccccatcagta

SEQ ID NO: 5748034 - DNA, 25 bp, Homo sapien
cagcacgagagacaaagattcgctt

SEQ ID NO: 5748035 - DNA, 25 bp, Homo sapien
attctgcagatttacctccagaagg

SEQ ID NO: 5748036 - DNA, 25 bp, Homo sapien
gagagctgtttctcttctgcggagt

SEQ ID NO: 5748037 - DNA, 25 bp, Homo sapien
taaccactaaggtcccatttgccgt

SEQ ID NO: 5748038 - DNA, 25 bp, Homo sapien
agtggaggacacatcactaccgagt

SEQ ID NO: 5748039 - DNA, 25 bp, Homo sapien
cagctccccacggcgctggagcaca

SEQ ID NO: 5748040 - DNA, 25 bp, Homo sapien
ccacgcccgcgacgaggccttgggt

SEQ ID NO: 5748041 - DNA, 25 bp, Homo sapien
gtgtatagccccacgcggaacggga

SEQ ID NO: 5748042 - DNA, 25 bp, Homo sapien
agcacattggaaaaaaggaggaaga

SEQ ID NO: 5748043 - DNA, 25 bp, Homo sapien
ttttgcaaaaatttaaatattctag

SEQ ID NO: 5748044 - DNA, 25 bp, Homo sapien
gagagaagagcatttactcctatat

SEQ ID NO: 5748045 - DNA, 25 bp, Homo sapien
caccgtgagcaccaacaggctggat

SEQ ID NO: 5748046 - DNA, 25 bp, Homo sapien
tcttctgcggagtctggaccttgag

SEQ ID NO: 5748047 - DNA, 25 bp, Homo sapien
acgtagctcgacaacgcgcgctcgc

SEQ ID NO: 5748048 - DNA, 25 bp, Homo sapien
gccgtattctctaacaattttactt

SEQ ID NO: 5748049 - DNA, 25 bp, Homo sapien
aaacagaaaccagagtactttcact

SEQ ID NO: 5748050 - DNA, 25 bp, Homo sapien
tcctgcgcgatgcggcccacgaagg

SEQ ID NO: 5748051 - DNA, 25 bp, Homo sapien
cacgcgttgtagcctgagtcagcgt

SEQ ID NO: 5748052 - DNA, 25 bp, Homo sapien
ctgattctgagagctgtttctcttc

SEQ ID NO: 5748053 - DNA, 25 bp, Homo sapien
agcagtttcctctctgtccagcgat

SEQ ID NO: 5748054 - DNA, 25 bp, Homo sapien
tatataaagacataatggtagccat

SEQ ID NO: 5748055 - DNA, 25 bp, Homo sapien
aaacaatgtttatttggtagctatt

SEQ ID NO: 5748056 - DNA, 25 bp, Homo sapien
caacgctggttcgccgtggtccttc

SEQ ID NO: 5748057 - DNA, 25 bp, Homo sapien
accagcgtgggctttcctggcgcgc

SEQ ID NO: 5748058 - DNA, 25 bp, Homo sapien
taatgtccttcacctccacttccac

SEQ ID NO: 5748059 - DNA, 25 bp, Homo sapien
aagattgaagttccatatctttcct

SEQ ID NO: 5748060 - DNA, 25 bp, Homo sapien
cactgcgcgcaccttcgccaccacg

SEQ ID NO: 5748061 - DNA, 25 bp, Homo sapien
aagattcgcttagttcatcatttgc

SEQ ID NO: 5748062 - DNA, 25 bp, Homo sapien
gaaggccatgaggtccgtcttgggg

SEQ ID NO: 5748063 - DNA, 25 bp, Homo sapien
cgtaccagagtcgcgatccgacacc

SEQ ID NO: 5748064 - DNA, 25 bp, Homo sapien
tccagggcgctgtccagcaccaacg

SEQ ID NO: 5748065 - DNA, 25 bp, Homo sapien
gcagtgtacagcagcaccgtgagca

SEQ ID NO: 5748066 - DNA, 25 bp, Homo sapien
gcgacgaggccttgggtgcctggcc

SEQ ID NO: 5748067 - DNA, 25 bp, Homo sapien
tctcctgcgcgtccgcatcccacgc

SEQ ID NO: 5748068 - DNA, 25 bp, Homo sapien
caggtcctgcgcgatgcggcccacg

SEQ ID NO: 5748069 - DNA, 25 bp, Homo sapien
tgagtcagcgtccactgcgcgcacc

SEQ ID NO: 5748070 - DNA, 25 bp, Homo sapien
cgtggtccttcaccagcacgagtag

SEQ ID NO: 5748071 - DNA, 25 bp, Homo sapien
tctgagcccgcggcgcccacccacg

SEQ ID NO: 5748072 - DNA, 25 bp, Homo sapien
gctggataccgcgcagatggcgatg

SEQ ID NO: 5748073 - DNA, 25 bp, Homo sapien
ggcgccaacagtgccggcgcgttgt

SEQ ID NO: 5748074 - DNA, 25 bp, Homo sapien
cgtgctgatctcacccgtgtatagc

SEQ ID NO: 5748075 - DNA, 25 bp, Homo sapien
ctattcaatatttatttggcatagc

SEQ ID NO: 5748076 - DNA, 25 bp, Homo sapien
ctcactgcgccagcagcggtgccag

SEQ ID NO: 5748077 - DNA, 25 bp, Homo sapien
tcaggtttgcccccatcagtagcca

SEQ ID NO: 5748078 - DNA, 25 bp, Homo sapien
aaagttggttcattgtcatttacat

SEQ ID NO: 5748079 - DNA, 25 bp, Homo sapien
cggcgcgttgtcgttcacgtcggcc

SEQ ID NO: 5748080 - DNA, 25 bp, Homo sapien
ccgcgctccgcccgcacagctcctc

SEQ ID NO: 5748081 - DNA, 25 bp, Homo sapien
accagcgtagcctctgagcccgcgg

SEQ ID NO: 5748082 - DNA, 25 bp, Homo sapien
ggaacaggcgcggcaccagctcctc

SEQ ID NO: 5748083 - DNA, 25 bp, Homo sapien
ttcattgtcatttacatctaatacc

SEQ ID NO: 5748084 - DNA, 25 bp, Homo sapien
atgcgagcgctgccagtacccagct

SEQ ID NO: 5748085 - DNA, 25 bp, Homo sapien
acgatcacctccacgtggatgctac

SEQ ID NO: 5748086 - DNA, 25 bp, Homo sapien
accgcagcgcagtgtacagcagcac

SEQ ID NO: 5748087 - DNA, 25 bp, Homo sapien
tagtctctgttaaagtcctgctgct

SEQ ID NO: 5748088 - DNA, 25 bp, Homo sapien
tgaagattgaagttccatatctttc

SEQ ID NO: 5748089 - DNA, 25 bp, Homo sapien
cacagctcctcccggtcgatccgag

SEQ ID NO: 5748090 - DNA, 25 bp, Homo sapien
caagttttaatgaaattttacaatg

SEQ ID NO: 5748091 - DNA, 25 bp, Homo sapien
gcccccgtcccgtgcggtcaccacc

SEQ ID NO: 5748092 - DNA, 25 bp, Homo sapien
gtgaaaattccaaagtcttcaaaat

SEQ ID NO: 5748093 - DNA, 25 bp, Homo sapien
aaactgattgggcaaaagttggttc

SEQ ID NO: 5748094 - DNA, 25 bp, Homo sapien
gagcaccaacaggctggataccgcg

SEQ ID NO: 5748095 - DNA, 25 bp, Homo sapien
gtgggctttcctggcgcgcgcgcac

SEQ ID NO: 5748096 - DNA, 25 bp, Homo sapien
gatcattgacatcaagcacattgga

SEQ ID NO: 5748097 - DNA, 25 bp, Homo sapien
ttattttcatcctgtttgtctaaac

SEQ ID NO: 5748098 - DNA, 25 bp, Homo sapien
gggggggtcctccccagagcacacc

SEQ ID NO: 5748099 - DNA, 25 bp, Homo sapien
gctgcccagaggcggcacgcccgca

SEQ ID NO: 5748100 - DNA, 25 bp, Homo sapien
gttgtcgttctcgtccagcacgaac

SEQ ID NO: 5748101 - DNA, 25 bp, Homo sapien
gccagccctaggcgccaacagtgcc

SEQ ID NO: 5748102 - DNA, 25 bp, Homo sapien
caaagtcttcaaaatgtctttgcca

SEQ ID NO: 5748103 - DNA, 25 bp, Homo sapien
ccggatagtctttactgtcattgga

SEQ ID NO: 5748104 - DNA, 25 bp, Homo sapien
acgacactaacacggtggccgtggc

SEQ ID NO: 5748105 - DNA, 25 bp, Homo sapien
gcggagctggccgctccccacctcc

SEQ ID NO: 5748106 - DNA, 25 bp, Homo sapien
cttagttcatcatttgcctgtatat

SEQ ID NO: 5748107 - DNA, 25 bp, Homo sapien
cgcgcgcaccctcggtgggtggcac

SEQ ID NO: 5748108 - DNA, 25 bp, Homo sapien
atattggcgggttgtcgttaatgtc

SEQ ID NO: 5748109 - DNA, 25 bp, Homo sapien
gcgaacgccggcgcgttgtcgttca

SEQ ID NO: 5748110 - DNA, 25 bp, Homo sapien
gaaaacaatgtttatttggtagcta

SEQ ID NO: 5748111 - DNA, 25 bp, Homo sapien
gatccgacaccgtgatgagagcaat

SEQ ID NO: 5748112 - DNA, 25 bp, Homo sapien
tggaggacacatcactaccgagtga

SEQ ID NO: 5748113 - DNA, 25 bp, Homo sapien
gtcttttggacgccacccggaacag

SEQ ID NO: 5748114 - DNA, 25 bp, Homo sapien
gccgtgtttggcctcctcggggacg

SEQ ID NO: 5748115 - DNA, 25 bp, Homo sapien
attccaaagtcttcaaaatgtcttt

SEQ ID NO: 5748116 - DNA, 25 bp, Homo sapien
gttctccttcacgaatactgtgtac

SEQ ID NO: 5748117 - DNA, 25 bp, Homo sapien
tctaaacaaaaaatcaatctagtga

SEQ ID NO: 5748118 - DNA, 25 bp, Homo sapien
acgttgacatccaccagcgtagcct

SEQ ID NO: 5748119 - DNA, 25 bp, Homo sapien
ccgcatcccacgctgacaccgtgaa

SEQ ID NO: 5748120 - DNA, 25 bp, Homo sapien
accagtaacaaattaacctcagcag

SEQ ID NO: 5748121 - DNA, 25 bp, Homo sapien
tggccactttccaccaacgacacta

SEQ ID NO: 5748122 - DNA, 25 bp, Homo sapien
gtacgaaagccacgcgttgtagcct

SEQ ID NO: 5748123 - DNA, 25 bp, Homo sapien
aatagctttacgctccctctctatt

SEQ ID NO: 5748124 - DNA, 25 bp, Homo sapien
cagcgtagcctctgagcccgcggcg

SEQ ID NO: 5748125 - DNA, 25 bp, Homo sapien
agaagagcatgttttgcaaaaattt

SEQ ID NO: 5748126 - DNA, 25 bp, Homo sapien
ccaacagtgccggcgcgttgtcgtt

SEQ ID NO: 5748127 - DNA, 25 bp, Homo sapien
ggtggtggcccacagtgaaggcgag

SEQ ID NO: 5748128 - DNA, 25 bp, Homo sapien
gccggcgcgttgtcgttcacgtcgg

SEQ ID NO: 5748129 - DNA, 25 bp, Homo sapien
gcagaagcgagagcagccgtgtcca

SEQ ID NO: 5748130 - DNA, 25 bp, Homo sapien
ggcgcgcgcgcaccctcggtgggtg

SEQ ID NO: 5748131 - DNA, 25 bp, Homo sapien
gtaggagagaagagcatttactcct

SEQ ID NO: 5748132 - DNA, 25 bp, Homo sapien
aagtcttcaaaatgtctttgccaag

SEQ ID NO: 5748133 - DNA, 25 bp, Homo sapien
cacacacaaaaaccaaaacaacaac

SEQ ID NO: 5748134 - DNA, 25 bp, Homo sapien
gtagtaattcttgaaggtggacacc

SEQ ID NO: 5748135 - DNA, 25 bp, Homo sapien
caagaggcaagctggatttgaagat

SEQ ID NO: 5748136 - DNA, 25 bp, Homo sapien
taatgaaattttacaatgtcctgac

SEQ ID NO: 5748137 - DNA, 25 bp, Homo sapien
cccaggtcctgcgcgatgcggccca

SEQ ID NO: 5748138 - DNA, 25 bp, Homo sapien
gagcgctgccagtacccagctgaag

SEQ ID NO: 5748139 - DNA, 25 bp, Homo sapien
ttagaagagcatgttttgcaaaaat

SEQ ID NO: 5748140 - DNA, 25 bp, Homo sapien
gtgcgaacgccggcgcgttgtcgtt

SEQ ID NO: 5748141 - DNA, 25 bp, Homo sapien
tccccagcacgagagacaaagattc

SEQ ID NO: 5748142 - DNA, 25 bp, Homo sapien
ggctgtgcgaacgccggcgcgttgt

SEQ ID NO: 5748143 - DNA, 25 bp, Homo sapien
cagtgacctgaatctcgtaggactt

SEQ ID NO: 5748144 - DNA, 25 bp, Homo sapien
cgcctctgctgcgagtaagaccagc

SEQ ID NO: 5748145 - DNA, 25 bp, Homo sapien
aaacctgcagcggcctgtccacgat

SEQ ID NO: 5748146 - DNA, 25 bp, Homo sapien
atctatggtaaacttagtctgtata

SEQ ID NO: 5748147 - DNA, 25 bp, Homo sapien
accgtgatgagagcaatgacagtgc

SEQ ID NO: 5748148 - DNA, 25 bp, Homo sapien
cacggcgctggagcacaccagcgtg

SEQ ID NO: 5748149 - DNA, 25 bp, Homo sapien
tcgcgatccgacaccgtgatgagag

SEQ ID NO: 5748150 - DNA, 25 bp, Homo sapien
tcaggtacacgttgacatccaccag

SEQ ID NO: 5748151 - DNA, 25 bp, Homo sapien
acgctctcgcggtccagggcgctgt

SEQ ID NO: 5748152 - DNA, 25 bp, Homo sapien
gctcctcccggtcgatccgagaatt

SEQ ID NO: 5748153 - DNA, 25 bp, Homo sapien
ctcggccccttctgatagaagacgc

SEQ ID NO: 5748154 - DNA, 25 bp, Homo sapien
gctcgtacgaaagccacgcgttgta

SEQ ID NO: 5748155 - DNA, 25 bp, Homo sapien
ctgacaccgtgaagatgtggcagcc

SEQ ID NO: 5748156 - DNA, 25 bp, Homo sapien
tgcacccaccgaccacggcaccagc

SEQ ID NO: 5748157 - DNA, 25 bp, Homo sapien
gcgatccgacaccgtgatgagagca

SEQ ID NO: 5748158 - DNA, 25 bp, Homo sapien
gaacgccggcgcgttgtcgttcacg

SEQ ID NO: 5748159 - DNA, 25 bp, Homo sapien
actttccttgcctcctatatccata

SEQ ID NO: 5748160 - DNA, 25 bp, Homo sapien
tataaagacataatggtagccattt

SEQ ID NO: 5748161 - DNA, 25 bp, Homo sapien
atcccacgctgacaccgtgaagatg

SEQ ID NO: 5748162 - DNA, 25 bp, Homo sapien
cgggttgttctccttcacgaatact

SEQ ID NO: 5748163 - DNA, 25 bp, Homo sapien
agccttgattcgggaaaccggatag

SEQ ID NO: 5748164 - DNA, 25 bp, Homo sapien
ccgcgtgcaccgaaacgtagctcga

SEQ ID NO: 5748165 - DNA, 25 bp, Homo sapien
ggcccacagtgaaggcgagcccccg

SEQ ID NO: 5748166 - DNA, 25 bp, Homo sapien
gcagccgtgtccaggcccctcggcc

SEQ ID NO: 5748167 - DNA, 25 bp, Homo sapien
caccaccagctcataggctgacacg

SEQ ID NO: 5748168 - DNA, 25 bp, Homo sapien
gcgcgttctcctgcgcgtccgcatc

SEQ ID NO: 5748169 - DNA, 25 bp, Homo sapien
atccaccagcgtagcctctgagccc

SEQ ID NO: 5748170 - DNA, 25 bp, Homo sapien
atcactaccgagtgaatacacaatc

SEQ ID NO: 5748171 - DNA, 25 bp, Homo sapien
tcgccaccacgtgccctgcacccac

SEQ ID NO: 5748172 - DNA, 25 bp, Homo sapien
tttcccctgagatgggatctatggt

SEQ ID NO: 5748173 - DNA, 25 bp, Homo sapien
tctgcatcagatgctccctctagag

SEQ ID NO: 5748174 - DNA, 25 bp, Homo sapien
cctccacttccacatggaaaacctg

SEQ ID NO: 5748175 - DNA, 25 bp, Homo sapien
ccattttcacccatttcatttgtaa

SEQ ID NO: 5748176 - DNA, 25 bp, Homo sapien
gggagtcagcctcgtctagggcacg

SEQ ID NO: 5748177 - DNA, 25 bp, Homo sapien
gcgctgtccagcaccaacgagtagt

SEQ ID NO: 5748178 - DNA, 25 bp, Homo sapien
ttccatatctttcctacgtattctg

SEQ ID NO: 5748179 - DNA, 25 bp, Homo sapien
cagaaggtccccgtgtcttttggac

SEQ ID NO: 5748180 - DNA, 25 bp, Homo sapien
aaaaacccaccaaatttctgaatca

SEQ ID NO: 5748181 - DNA, 25 bp, Homo sapien
gacattgaaggggttcctttgtcag

SEQ ID NO: 5748182 - DNA, 25 bp, Homo sapien
ggtccttcatctgcatcagaagcgt

SEQ ID NO: 5748183 - DNA, 25 bp, Homo sapien
cggtgtcgaggggagtcagcctcgt

SEQ ID NO: 5748184 - DNA, 25 bp, Homo sapien
gcaatgacagtgcccagggaagcgt

SEQ ID NO: 5748185 - DNA, 25 bp, Homo sapien
atggcgatgatcaggtacacgttga

SEQ ID NO: 5748186 - DNA, 25 bp, Homo sapien
gaaggcgagcccccgtcccgtgcgg

SEQ ID NO: 5748187 - DNA, 25 bp, Homo sapien
cacccaccgaccacggcaccagctc

SEQ ID NO: 5748188 - DNA, 25 bp, Homo sapien
aacacctgcagcgtcacgttgctgc

SEQ ID NO: 5748189 - DNA, 25 bp, Homo sapien
ccgcgcagatggcgatgatcaggta

SEQ ID NO: 5748190 - DNA, 25 bp, Homo sapien
gtggcaccgagcaccgcagcgcagt

SEQ ID NO: 5748191 - DNA, 25 bp, Homo sapien
gctgcgaggagcagaagcgagagca

SEQ ID NO: 5748192 - DNA, 25 bp, Homo sapien
aatgacagtgcccagggaagcgttc

SEQ ID NO: 5748193 - DNA, 25 bp, Homo sapien
tttccttgcctcctatatccataaa

SEQ ID NO: 5748194 - DNA, 25 bp, Homo sapien
acgaaagccacgcgttgtagcctga

SEQ ID NO: 5748195 - DNA, 25 bp, Homo sapien
tcccaggctgcgaggagcagaagcg

SEQ ID NO: 5748196 - DNA, 25 bp, Homo sapien
gcgagagcagccgtgtccaggcccc

SEQ ID NO: 5748197 - DNA, 25 bp, Homo sapien
ccaccagtaacaaattaacctcagc

SEQ ID NO: 5748198 - DNA, 25 bp, Homo sapien
aagagcatgttttgcaaaaatttaa

SEQ ID NO: 5748199 - DNA, 25 bp, Homo sapien
caccagcgagtaggacaccagcgcg

SEQ ID NO: 5748200 - DNA, 25 bp, Homo sapien
gttctcctgcgcgtccgcatcccac

SEQ ID NO: 5748201 - DNA, 25 bp, Homo sapien
tctgtgaagtgaaaattccaaagtc

SEQ ID NO: 5748202 - DNA, 25 bp, Homo sapien
atactgtgtactcaggctgtgcgaa

SEQ ID NO: 5748203 - DNA, 25 bp, Homo sapien
atctttcctacgtattctgattctg

SEQ ID NO: 5748204 - DNA, 25 bp, Homo sapien
cttttggacgccacccggaacaggc

SEQ ID NO: 5748205 - DNA, 25 bp, Homo sapien
cgaaacgtagctcgacaacgcgcgc

SEQ ID NO: 5748206 - DNA, 25 bp, Homo sapien
tggttcgccgtggtccttcaccagc

SEQ ID NO: 5748207 - DNA, 25 bp, Homo sapien
ccccatcagtagccaccagtaacaa

SEQ ID NO: 5748208 - DNA, 25 bp, Homo sapien
cacattggaaaaaaggaggaagaat

SEQ ID NO: 5748209 - DNA, 25 bp, Homo sapien
cattccgcgctccgcccgcacagct

SEQ ID NO: 5748210 - DNA, 25 bp, Homo sapien
tggaaaaaaggaggaagaattccat

SEQ ID NO: 5748211 - DNA, 25 bp, Homo sapien
gtgagcaccaacaggctggataccg

SEQ ID NO: 5748212 - DNA, 25 bp, Homo sapien
ttattgagacttctggtgtgttatc

SEQ ID NO: 5748213 - DNA, 25 bp, Homo sapien
tacgtattctgattctgagagctgt

SEQ ID NO: 5748214 - DNA, 25 bp, Homo sapien
caccttgccgctctccgcgtgcacc

SEQ ID NO: 5748215 - DNA, 25 bp, Homo sapien
tcgttctcgtccagcacgaacacct

SEQ ID NO: 5748216 - DNA, 25 bp, Homo sapien
tacacaatctcgctgttcggtcctt

SEQ ID NO: 5748217 - DNA, 25 bp, Homo sapien
accagcgcgttctcctgcgcgtccg

SEQ ID NO: 5748218 - DNA, 25 bp, Homo sapien
attctagtctctgttaaagtcctgc

SEQ ID NO: 5748219 - DNA, 25 bp, Homo sapien
ctgcgcgtccgcatcccacgctgac

SEQ ID NO: 5748220 - DNA, 25 bp, Homo sapien
cccagggaagcgttctctgagatgg

SEQ ID NO: 5748221 - DNA, 25 bp, Homo sapien
ctcctcggggacggagtagcggagc

SEQ ID NO: 5748222 - DNA, 25 bp, Homo sapien
aggccttgggtgcctggccactttc

SEQ ID NO: 5748223 - DNA, 25 bp, Homo sapien
aagaattccattttcacccatttca

SEQ ID NO: 5748224 - DNA, 25 bp, Homo sapien
ctattgaagaactacactcacacaa

SEQ ID NO: 5748225 - DNA, 25 bp, Homo sapien
ttagttctgatttcccctgagatgg

SEQ ID NO: 5748226 - DNA, 25 bp, Homo sapien
ctttgtaaactgattgggcaaaagt

SEQ ID NO: 5748227 - DNA, 25 bp, Homo sapien
gggtcctccccagagcacaccctct

SEQ ID NO: 5748228 - DNA, 25 bp, Homo sapien
aaacgtagctcgacaacgcgcgctc

SEQ ID NO: 5748229 - DNA, 25 bp, Homo sapien
tggagcacaccagcgtgggctttcc

SEQ ID NO: 5748230 - DNA, 25 bp, Homo sapien
acagaaaccagagtactttcactat

SEQ ID NO: 5748231 - DNA, 25 bp, Homo sapien
ccaggtattttaatgtacagatggg

SEQ ID NO: 5748232 - DNA, 25 bp, Homo sapien
tagtctgtatagtggaggacacatc

SEQ ID NO: 5748233 - DNA, 25 bp, Homo sapien
tatctaggaagaaaaactcactgga

SEQ ID NO: 5748234 - DNA, 25 bp, Homo sapien
tactttgtaaactgattgggcaaaa

SEQ ID NO: 5748235 - DNA, 25 bp, Homo sapien
gacaccgtgaagatgtggcagcccg

SEQ ID NO: 5748236 - DNA, 25 bp, Homo sapien
cagccctaggcgccaacagtgccgg

SEQ ID NO: 5748237 - DNA, 25 bp, Homo sapien
cggcacgcccgcatcccgcgcgctc

SEQ ID NO: 5748238 - DNA, 25 bp, Homo sapien
gctccctctagaggaaaccgagaat

SEQ ID NO: 5748239 - DNA, 25 bp, Homo sapien
ccctcggccccttctgatagaagac

SEQ ID NO: 5748240 - DNA, 25 bp, Homo sapien
gagcacaccagcgtgggctttcctg

SEQ ID NO: 5748241 - DNA, 25 bp, Homo sapien
atttaatatataaagacataatggt

SEQ ID NO: 5748242 - DNA, 25 bp, Homo sapien
tcgtccagcacgaacacctgcagcg

SEQ ID NO: 5748243 - DNA, 25 bp, Homo sapien
gccagcagcggtgccagccctaggc

SEQ ID NO: 5748244 - DNA, 25 bp, Homo sapien
ctggtgtgttatcattgatgtccac

SEQ ID NO: 5748245 - DNA, 25 bp, Homo sapien
ttaaaaactttccttgcctcctata

SEQ ID NO: 5748246 - DNA, 25 bp, Homo sapien
gcgttgtcgttctcgtccagcacga

SEQ ID NO: 5748247 - DNA, 25 bp, Homo sapien
agctagggctgaaggccatgaggtc

SEQ ID NO: 5748248 - DNA, 25 bp, Homo sapien
agttctgatttcccctgagatggga

SEQ ID NO: 5748249 - DNA, 25 bp, Homo sapien
cagcagcggtgccagccctaggcgc

SEQ ID NO: 5748250 - DNA, 25 bp, Homo sapien
ctgacattgaaggggttcctttgtc

SEQ ID NO: 5748251 - DNA, 25 bp, Homo sapien
cttcatctgcatcagaagcgtttaa

SEQ ID NO: 5748252 - DNA, 25 bp, Homo sapien
cagggaagcgttctctgagatggga

SEQ ID NO: 5748253 - DNA, 25 bp, Homo sapien
aacacacacacacaaaaaccaaaac

SEQ ID NO: 5748254 - DNA, 25 bp, Homo sapien
aacaggcgcggcaccagctcctcca

SEQ ID NO: 5748255 - DNA, 25 bp, Homo sapien
gccttgggtgcctggccactttcca

SEQ ID NO: 5748256 - DNA, 25 bp, Homo sapien
aggctgacacgctctcgcggtccag

SEQ ID NO: 5748257 - DNA, 25 bp, Homo sapien
gcgcgcaccttcgccaccacgtgcc

SEQ ID NO: 5748258 - DNA, 25 bp, Homo sapien
caaattagaagagcatgttttgcaa

SEQ ID NO: 5748259 - DNA, 25 bp, Homo sapien
gattgaagttccatatctttcctac

SEQ ID NO: 5748260 - DNA, 25 bp, Homo sapien
ctctattgaagaactacactcacac

SEQ ID NO: 5748261 - DNA, 25 bp, Homo sapien
gacgccattaccaatcctcaatgtt

SEQ ID NO: 5748262 - DNA, 25 bp, Homo sapien
cccacctcccaggctgcgaggagca

SEQ ID NO: 5748263 - DNA, 25 bp, Homo sapien
tgtcctgacattgaaggggttcctt

SEQ ID NO: 5748264 - DNA, 25 bp, Homo sapien
ggcggcacgcccgcatcccgcgcgc

SEQ ID NO: 5748265 - DNA, 25 bp, Homo sapien
ctcgcccacccgccgctccaccagc

SEQ ID NO: 5748266 - DNA, 25 bp, Homo sapien
agtagcggagctggccgctccccac

SEQ ID NO: 5748267 - DNA, 25 bp, Homo sapien
tcccatttgccgtattctctaacaa

SEQ ID NO: 5748268 - DNA, 25 bp, Homo sapien
tctcacccgtgtatagccccacgcg

SEQ ID NO: 5748269 - DNA, 25 bp, Homo sapien
gccacgcgttgtagcctgagtcagc

SEQ ID NO: 5748270 - DNA, 25 bp, Homo sapien
cagcgatttccccagcacgagagac

SEQ ID NO: 5748271 - DNA, 25 bp, Homo sapien
atgatcaggtacacgttgacatcca

SEQ ID NO: 5748272 - DNA, 25 bp, Homo sapien
cactcacacaaacacacacacacaa

SEQ ID NO: 5748273 - DNA, 25 bp, Homo sapien
gccccaggtcctgcgcgatgcggcc

SEQ ID NO: 5748274 - DNA, 25 bp, Homo sapien
ctctccgcgtgcaccgaaacgtagc

SEQ ID NO: 5748275 - DNA, 25 bp, Homo sapien
gagacgttattgagacttctggtgt

SEQ ID NO: 5748276 - DNA, 25 bp, Homo sapien
cccagaggcggcacgcccgcatccc

SEQ ID NO: 5748277 - DNA, 25 bp, Homo sapien
agaggcaagctggatttgaagattg

SEQ ID NO: 5748278 - DNA, 25 bp, Homo sapien
ctgcggagtctggaccttgagataa

SEQ ID NO: 5748279 - DNA, 25 bp, Homo sapien
cctcccaggctgcgaggagcagaag

SEQ ID NO: 5748280 - DNA, 25 bp, Homo sapien
tttttacaaaatgatcattgacatc

SEQ ID NO: 5748281 - DNA, 25 bp, Homo sapien
ttctggtgtgttatcattgatgtcc

SEQ ID NO: 5748282 - DNA, 25 bp, Homo sapien
agcggtgccagccctaggcgccaac

SEQ ID NO: 5748283 - DNA, 25 bp, Homo sapien
aatctcgtaggactttgcttcttca

SEQ ID NO: 5748284 - DNA, 25 bp, Homo sapien
gcatcagaagcgtttaacttaacca

SEQ ID NO: 5748285 - DNA, 25 bp, Homo sapien
gtggatgctacattccgcgctccgc

SEQ ID NO: 5748286 - DNA, 25 bp, Homo sapien
agcatcagtacatctgtgaagtgaa

SEQ ID NO: 5748287 - DNA, 25 bp, Homo sapien
tctagggcacgtgtcgtgctgatct

SEQ ID NO: 5748288 - DNA, 25 bp, Homo sapien
gaggcggcacgcccgcatcccgcgc

SEQ ID NO: 5748289 - DNA, 25 bp, Homo sapien
tgtttatttggtagctattcaatat

SEQ ID NO: 5748290 - DNA, 25 bp, Homo sapien
ccatatctttcctacgtattctgat

SEQ ID NO: 5748291 - DNA, 25 bp, Homo sapien
aagtcctgctgcttctcttattcct

SEQ ID NO: 5748292 - DNA, 25 bp, Homo sapien
acccggaacaggcgcggcaccagct

SEQ ID NO: 5748293 - DNA, 25 bp, Homo sapien
agctcactcactgcgccagcagcgg

SEQ ID NO: 5748294 - DNA, 25 bp, Homo sapien
gcgcccacccacgcccgcgacgagg

SEQ ID NO: 5748295 - DNA, 25 bp, Homo sapien
ccaccagctcataggctgacacgct

SEQ ID NO: 5748296 - DNA, 25 bp, Homo sapien
cccgcacagctcctcccggtcgatc

SEQ ID NO: 5748297 - DNA, 25 bp, Homo sapien
gctcaggtttgcccccatcagtagc

SEQ ID NO: 5748298 - DNA, 25 bp, Homo sapien
gccccttctgatagaagacgccatt

SEQ ID NO: 5748299 - DNA, 25 bp, Homo sapien
acgcccgcgacgaggccttgggtgc

SEQ ID NO: 5748300 - DNA, 25 bp, Homo sapien
tccctctagaggaaaccgagaatca

SEQ ID NO: 5748301 - DNA, 25 bp, Homo sapien
cggccccttctgatagaagacgcca

SEQ ID NO: 5748302 - DNA, 25 bp, Homo sapien
cagtgccggcgcgttgtcgttctcg

SEQ ID NO: 5748303 - DNA, 25 bp, Homo sapien
gatgggaagtgagagagacgttatt

SEQ ID NO: 5748304 - DNA, 25 bp, Homo sapien
cctctctgtccagcgatttccccag

SEQ ID NO: 5748305 - DNA, 25 bp, Homo sapien
cacgctggtggtggcccacagtgaa

SEQ ID NO: 5748306 - DNA, 25 bp, Homo sapien
tcagtacatctgtgaagtgaaaatt

SEQ ID NO: 5748307 - DNA, 25 bp, Homo sapien
gtgcaccgaaacgtagctcgacaac

SEQ ID NO: 5748308 - DNA, 25 bp, Homo sapien
agagtcgcgatccgacaccgtgatg

SEQ ID NO: 5748309 - DNA, 25 bp, Homo sapien
cagtaacaaattaacctcagcagtt

SEQ ID NO: 5748310 - DNA, 25 bp, Homo sapien
caacgagtagtaattcttgaaggtg

SEQ ID NO: 5748311 - DNA, 25 bp, Homo sapien
gggttgtcgttaatgtccttcacct

SEQ ID NO: 5748312 - DNA, 25 bp, Homo sapien
accaacgagtagtaattcttgaagg

SEQ ID NO: 5748313 - DNA, 25 bp, Homo sapien
aggtattttaatgtacagatgggga

SEQ ID NO: 5748314 - DNA, 25 bp, Homo sapien
cactaccgagtgaatacacaatctc

SEQ ID NO: 5748315 - DNA, 25 bp, Homo sapien
tttctcttctgcggagtctggacct

SEQ ID NO: 5748316 - DNA, 25 bp, Homo sapien
tgaatctcgtaggactttgcttctt

SEQ ID NO: 5748317 - DNA, 25 bp, Homo sapien
tgaagtgaaaattccaaagtcttca

SEQ ID NO: 5748318 - DNA, 25 bp, Homo sapien
ggaagaaaaactcactggagctgag

SEQ ID NO: 5748319 - DNA, 25 bp, Homo sapien
ccaccaacgacactaacacggtggc

SEQ ID NO: 5748320 - DNA, 25 bp, Homo sapien
taggaagaaaaactcactggagctg

SEQ ID NO: 5748321 - DNA, 25 bp, Homo sapien
ccggcgggttgttctccttcacgaa

SEQ ID NO: 5748322 - DNA, 25 bp, Homo sapien
cgccaacagtgccggcgcgttgtcg

SEQ ID NO: 5748323 - DNA, 25 bp, Homo sapien
ggctgcagcgcgtacaccttgccgc

SEQ ID NO: 5748324 - DNA, 25 bp, Homo sapien
cttgcctcctatatccataaagtta

SEQ ID NO: 5748325 - DNA, 25 bp, Homo sapien
gacatgtccattcgtaccagagtcg

SEQ ID NO: 5748326 - DNA, 25 bp, Homo sapien
taccgcgcagatggcgatgatcagg

SEQ ID NO: 5748327 - DNA, 25 bp, Homo sapien
tctgcagatttacctccagaaggtc

SEQ ID NO: 5748328 - DNA, 25 bp, Homo sapien
tggggacccaaactatatttttaca

SEQ ID NO: 5748329 - DNA, 25 bp, Homo sapien
tcgccgtggtccttcaccagcacga

SEQ ID NO: 5748330 - DNA, 25 bp, Homo sapien
cgtgcggtcaccaccagctcatagg

SEQ ID NO: 5748331 - DNA, 25 bp, Homo sapien
tcagatgctccctctagaggaaacc

SEQ ID NO: 5748332 - DNA, 25 bp, Homo sapien
aaacaaaatgccattctgcagattt

SEQ ID NO: 5748333 - DNA, 25 bp, Homo sapien
tggcctcctcggggacggagtagcg

SEQ ID NO: 5748334 - DNA, 25 bp, Homo sapien
caccgagcaccgcagcgcagtgtac

SEQ ID NO: 5748335 - DNA, 25 bp, Homo sapien
gggcgtcagggagcaggtgacatgt

SEQ ID NO: 5748336 - DNA, 25 bp, Homo sapien
aggggttcctttgtcagttgcagtg

SEQ ID NO: 5748337 - DNA, 25 bp, Homo sapien
tcgtacgaaagccacgcgttgtagc

SEQ ID NO: 5748338 - DNA, 25 bp, Homo sapien
acaatagtttcaagaggcaagctgg

SEQ ID NO: 5748339 - DNA, 25 bp, Homo sapien
gggacgtggggcgtcagggagcagg

SEQ ID NO: 5748340 - DNA, 25 bp, Homo sapien
tttgtctaaacaaaaaatcaatcta

SEQ ID NO: 5748341 - DNA, 25 bp, Homo sapien
gagaattcacaaacaaaatgccatt

SEQ ID NO: 5748342 - DNA, 25 bp, Homo sapien
aggaggaagaattccattttcaccc

SEQ ID NO: 5748343 - DNA, 25 bp, Homo sapien
ccgtgaagatgtggcagcccggcgg

SEQ ID NO: 5748344 - DNA, 25 bp, Homo sapien
tagaggaaaccgagaatcaagcagc

SEQ ID NO: 5748345 - DNA, 25 bp, Homo sapien
attgagacttctggtgtgttatcat

SEQ ID NO: 5748346 - DNA, 25 bp, Homo sapien
cacttccacatggaaaacctgcagc

SEQ ID NO: 5748347 - DNA, 25 bp, Homo sapien
cacctcccaggctgcgaggagcaga

SEQ ID NO: 5748348 - DNA, 25 bp, Homo sapien
ttgcccccatcagtagccaccagta

SEQ ID NO: 5748349 - DNA, 25 bp, Homo sapien
gcatcccgcgcgctcacctggaact

SEQ ID NO: 5748350 - DNA, 25 bp, Homo sapien
aaaaactttccttgcctcctatatc

SEQ ID NO: 5748351 - DNA, 25 bp, Homo sapien
cgttattgagacttctggtgtgtta

SEQ ID NO: 5748352 - DNA, 25 bp, Homo sapien
gtccttcaccagcacgagtaggcgg

SEQ ID NO: 5748353 - DNA, 25 bp, Homo sapien
tagaaaacaatgtttatttggtagc

SEQ ID NO: 5748354 - DNA, 25 bp, Homo sapien
cggtcgatccgagaattcacaaaca

SEQ ID NO: 5748355 - DNA, 25 bp, Homo sapien
acacgttgacatccaccagcgtagc

SEQ ID NO: 5748356 - DNA, 25 bp, Homo sapien
gcgtcagggagcaggtgacatgtcc

SEQ ID NO: 5748357 - DNA, 25 bp, Homo sapien
cacggtggccgtggctgtcaacgct

SEQ ID NO: 5748358 - DNA, 25 bp, Homo sapien
tgaagctcgtacgaaagccacgcgt

SEQ ID NO: 5748359 - DNA, 25 bp, Homo sapien
atgtacagatggggaatgcagcaga

SEQ ID NO: 5748360 - DNA, 25 bp, Homo sapien
accttcgccaccacgtgccctgcac

SEQ ID NO: 5748361 - DNA, 25 bp, Homo sapien
ggaacgggatgcgagcgctgccagt

SEQ ID NO: 5748362 - DNA, 25 bp, Homo sapien
tttggcctcctcggggacggagtag

SEQ ID NO: 5748363 - DNA, 25 bp, Homo sapien
agtaggcggtgtcgaggggagtcag

SEQ ID NO: 5748364 - DNA, 25 bp, Homo sapien
ggtcccatttgccgtattctctaac

SEQ ID NO: 5748365 - DNA, 25 bp, Homo sapien
gcgcgttgtcgttctcgtccagcac

SEQ ID NO: 5748366 - DNA, 25 bp, Homo sapien
gcaaaaatttaaatattctagtctc

SEQ ID NO: 5748367 - DNA, 25 bp, Homo sapien
tggataccgcgcagatggcgatgat

SEQ ID NO: 5748368 - DNA, 25 bp, Homo sapien
ctgtgcgaacgccggcgcgttgtcg

SEQ ID NO: 5748369 - DNA, 25 bp, Homo sapien
gcttgtaggagagaagagcatttac

SEQ ID NO: 5748370 - DNA, 25 bp, Homo sapien
tccagcgatttccccagcacgagag

SEQ ID NO: 5748371 - DNA, 25 bp, Homo sapien
cacgaacacctgcagcgtcacgttg

SEQ ID NO: 5748372 - DNA, 25 bp, Homo sapien
tgtacagcagcaccgtgagcaccaa

SEQ ID NO: 5748373 - DNA, 25 bp, Homo sapien
attggcgggttgtcgttaatgtcct

SEQ ID NO: 5748374 - DNA, 25 bp, Homo sapien
acttcctcgtggtccagcggctgca

SEQ ID NO: 5748375 - DNA, 25 bp, Homo sapien
ggcggtgtcgaggggagtcagcctc

SEQ ID NO: 5748376 - DNA, 25 bp, Homo sapien
tcgtggtccagcggctgcagcgcgt

SEQ ID NO: 5748377 - DNA, 25 bp, Homo sapien
tgtctaaacaaaaaatcaatctagt

SEQ ID NO: 5748378 - DNA, 25 bp, Homo sapien
cctcggggacggagtagcggagctg

SEQ ID NO: 5748379 - DNA, 25 bp, Homo sapien
ctcacctggaactgcagcagctcca

SEQ ID NO: 5748380 - DNA, 25 bp, Homo sapien
tgcagcgtcacgttgctgcccagag

SEQ ID NO: 5748381 - DNA, 25 bp, Homo sapien
taggacaccagcgcgttctcctgcg

SEQ ID NO: 5748382 - DNA, 25 bp, Homo sapien
aagctcgtacgaaagccacgcgttg

SEQ ID NO: 5748383 - DNA, 25 bp, Homo sapien
cctctgctgcgagtaagaccagctc

SEQ ID NO: 5748384 - DNA, 25 bp, Homo sapien
gtgccagccctaggcgccaacagtg

SEQ ID NO: 5748385 - DNA, 25 bp, Homo sapien
ttatcattgatgtccacaagtttta

SEQ ID NO: 5748386 - DNA, 25 bp, Homo sapien
tgaatcaaacagaaaccagagtact

SEQ ID NO: 5748387 - DNA, 25 bp, Homo sapien
tcgttcacgtcggccacctcgatgg

SEQ ID NO: 5748388 - DNA, 25 bp, Homo sapien
ttgtcatttacatctaataccttaa

SEQ ID NO: 5748389 - DNA, 25 bp, Homo sapien
tgacatcaagcacattggaaaaaag

SEQ ID NO: 5748390 - DNA, 25 bp, Homo sapien
gcgtcacgttgctgcccagaggcgg

SEQ ID NO: 5748391 - DNA, 25 bp, Homo sapien
taagctagggctgaaggccatgagg

SEQ ID NO: 5748392 - DNA, 25 bp, Homo sapien
gagcaatgacagtgcccagggaagc

SEQ ID NO: 5748393 - DNA, 25 bp, Homo sapien
acgtgtcgtgctgatctcacccgtg

SEQ ID NO: 5748394 - DNA, 25 bp, Homo sapien
ggtaaacttagtctgtatagtggag

SEQ ID NO: 5748395 - DNA, 25 bp, Homo sapien
gtcttgttagacaatagtttcaaga

SEQ ID NO: 5748396 - DNA, 25 bp, Homo sapien
tttggacgccacccggaacaggcgc

SEQ ID NO: 5748397 - DNA, 25 bp, Homo sapien
gttttgatcaaattagaagagcatg

SEQ ID NO: 5748398 - DNA, 25 bp, Homo sapien
aggctgcgaggagcagaagcgagag

SEQ ID NO: 5748399 - DNA, 25 bp, Homo sapien
aggtggacaccagcttgaaagggac

SEQ ID NO: 5748400 - DNA, 25 bp, Homo sapien
accagctcataggctgacacgctct

SEQ ID NO: 5748401 - DNA, 25 bp, Homo sapien
gcggtccagggcgctgtccagcacc

SEQ ID NO: 5748402 - DNA, 25 bp, Homo sapien
acatcactaccgagtgaatacacaa

SEQ ID NO: 5748403 - DNA, 25 bp, Homo sapien
aaaaatcaatctagtgaaaatagct

SEQ ID NO: 5748404 - DNA, 25 bp, Homo sapien
gtggccgtggctgtcaacgctggtt

SEQ ID NO: 5748405 - DNA, 25 bp, Homo sapien
aaaccagagtactttcactatgtgg

SEQ ID NO: 5748406 - DNA, 25 bp, Homo sapien
acccaccaaatttctgaatcaaaca

SEQ ID NO: 5748407 - DNA, 25 bp, Homo sapien
gatttcccctgagatgggatctatg

SEQ ID NO: 5748408 - DNA, 25 bp, Homo sapien
tgcctgtatatctaggaagaaaaac

SEQ ID NO: 5748409 - DNA, 25 bp, Homo sapien
cggtggccgtggctgtcaacgctgg

SEQ ID NO: 5748410 - DNA, 25 bp, Homo sapien
aagaactacactcacacaaacacac

SEQ ID NO: 5748411 - DNA, 25 bp, Homo sapien
atgatcattgacatcaagcacattg

SEQ ID NO: 5748412 - DNA, 25 bp, Homo sapien
cctcgtggtccagcggctgcagcgc

SEQ ID NO: 5748413 - DNA, 25 bp, Homo sapien
gagagagacgttattgagacttctg

SEQ ID NO: 5748414 - DNA, 25 bp, Homo sapien
gttctcgtccagcacgaacacctgc

SEQ ID NO: 5748415 - DNA, 25 bp, Homo sapien
ccaatcctcaatgttttgatcaaat

SEQ ID NO: 5748416 - DNA, 25 bp, Homo sapien
taatgtacagatggggaatgcagca

SEQ ID NO: 5748417 - DNA, 25 bp, Homo sapien
gacgttattgagacttctggtgtgt

SEQ ID NO: 5748418 - DNA, 25 bp, Homo sapien
gtggcagcccggcgggttgttctcc

SEQ ID NO: 5748419 - DNA, 25 bp, Homo sapien
tgtggggacccaaactatattttta

SEQ ID NO: 5748420 - DNA, 25 bp, Homo sapien
ccttagttctgatttcccctgagat

SEQ ID NO: 5748421 - DNA, 25 bp, Homo sapien
tatttttacaaaatgatcattgaca

SEQ ID NO: 5748422 - DNA, 25 bp, Homo sapien
accaacgacactaacacggtggccg

SEQ ID NO: 5748423 - DNA, 25 bp, Homo sapien
aatgtttatttggtagctattcaat

SEQ ID NO: 5748424 - DNA, 25 bp, Homo sapien
cccgtgcggtcaccaccagctcata

SEQ ID NO: 5748425 - DNA, 25 bp, Homo sapien
ccttgagataagctagggctgaagg

SEQ ID NO: 5748426 - DNA, 25 bp, Homo sapien
tgagcccgcggcgcccacccacgcc

SEQ ID NO: 5748427 - DNA, 25 bp, Homo sapien
cactggagctgagcttgtaggagag

SEQ ID NO: 5748428 - DNA, 25 bp, Homo sapien
atagcatcagtacatctgtgaagtg

SEQ ID NO: 5748429 - DNA, 25 bp, Homo sapien
tgaggtccgtcttgggggggtcctc

SEQ ID NO: 5748430 - DNA, 25 bp, Homo sapien
ttgccgtattctctaacaattttac

SEQ ID NO: 5748431 - DNA, 25 bp, Homo sapien
cctcctatatccataaagttatttt

SEQ ID NO: 5748432 - DNA, 25 bp, Homo sapien
gcgagcccccgtcccgtgcggtcac

SEQ ID NO: 5748433 - DNA, 25 bp, Homo sapien
tgatgagagcaatgacagtgcccag

SEQ ID NO: 5748434 - DNA, 25 bp, Homo sapien
gcctcgtctagggcacgtgtcgtgc

SEQ ID NO: 5748435 - DNA, 25 bp, Homo sapien
gatcaggtacacgttgacatccacc

SEQ ID NO: 5748436 - DNA, 25 bp, Homo sapien
gaattccattttcacccatttcatt

SEQ ID NO: 5748437 - DNA, 25 bp, Homo sapien
ggggacggagtagcggagctggccg

SEQ ID NO: 5748438 - DNA, 25 bp, Homo sapien
gaaaacctgcagcggcctgtccacg

SEQ ID NO: 5748439 - DNA, 25 bp, Homo sapien
cctctgagcccgcggcgcccaccca

SEQ ID NO: 5748440 - DNA, 25 bp, Homo sapien
cgaggagcagaagcgagagcagccg

SEQ ID NO: 5748441 - DNA, 25 bp, Homo sapien
gtgggtggcaccgagcaccgcagcg

SEQ ID NO: 5748442 - DNA, 25 bp, Homo sapien
caccgaccacggcaccagctcactc

SEQ ID NO: 5748443 - DNA, 25 bp, Homo sapien
atcaatctagtgaaaatagctttac

SEQ ID NO: 5748444 - DNA, 25 bp, Homo sapien
aatgtctttgccaagagtcttgtta

SEQ ID NO: 5748445 - DNA, 25 bp, Homo sapien
gtgaagatgtggcagcccggcgggt

SEQ ID NO: 5748446 - DNA, 25 bp, Homo sapien
agacttctggtgtgttatcattgat

SEQ ID NO: 5748447 - DNA, 25 bp, Homo sapien
cccgccgctccaccagcgagtagga

SEQ ID NO: 5748448 - DNA, 25 bp, Homo sapien
agctgagcttgtaggagagaagagc

SEQ ID NO: 5748449 - DNA, 25 bp, Homo sapien
ggttgttctccttcacgaatactgt

SEQ ID NO: 5748450 - DNA, 25 bp, Homo sapien
gagtaagaccagctccccacggcgc

SEQ ID NO: 5748451 - DNA, 25 bp, Homo sapien
gcaagctggatttgaagattgaagt

SEQ ID NO: 5748452 - DNA, 25 bp, Homo sapien
accaacaggctggataccgcgcaga

SEQ ID NO: 5748453 - DNA, 25 bp, Homo sapien
tagggcacgtgtcgtgctgatctca

SEQ ID NO: 5748454 - DNA, 25 bp, Homo sapien
tccacaagttttaatgaaattttac

SEQ ID NO: 5748455 - DNA, 25 bp, Homo sapien
cctatatctgcatcagatgctccct

SEQ ID NO: 5748456 - DNA, 25 bp, Homo sapien
gtcgatccgagaattcacaaacaaa

SEQ ID NO: 5748457 - DNA, 25 bp, Homo sapien
ctggagctgagcttgtaggagagaa

SEQ ID NO: 5748458 - DNA, 25 bp, Homo sapien
cagggagcaggtgacatgtccattc

SEQ ID NO: 5748459 - DNA, 25 bp, Homo sapien
ttggaaatattggcgggttgtcgtt

SEQ ID NO: 5748460 - DNA, 25 bp, Homo sapien
cgtattctctaacaattttactttg

SEQ ID NO: 5748461 - DNA, 25 bp, Homo sapien
tttaatgtacagatggggaatgcag

SEQ ID NO: 5748462 - DNA, 25 bp, Homo sapien
tgtactcaggctgtgcgaacgccgg

SEQ ID NO: 5748463 - DNA, 25 bp, Homo sapien
tgcagatttacctccagaaggtccc

SEQ ID NO: 5748464 - DNA, 25 bp, Homo sapien
atagtctttactgtcattggaaata

SEQ ID NO: 5748465 - DNA, 25 bp, Homo sapien
ctgcagcgcgtacaccttgccgctc

SEQ ID NO: 5748466 - DNA, 25 bp, Homo sapien
aaaccgagaatcaagcagccttgat

SEQ ID NO: 5748467 - DNA, 25 bp, Homo sapien
cgcgcgctcacctggaactgcagca

SEQ ID NO: 5748468 - DNA, 25 bp, Homo sapien
tcccttagttctgatttcccctgag

SEQ ID NO: 5748469 - DNA, 25 bp, Homo sapien
catttaccaggtattttaatgtaca

SEQ ID NO: 5748470 - DNA, 25 bp, Homo sapien
gtttgcccccatcagtagccaccag

SEQ ID NO: 5748471 - DNA, 25 bp, Homo sapien
cgcaccctcggtgggtggcaccgag

SEQ ID NO: 5748472 - DNA, 25 bp, Homo sapien
gccctgcacccaccgaccacggcac

SEQ ID NO: 5748473 - DNA, 25 bp, Homo sapien
cagtttcctctctgtccagcgattt

SEQ ID NO: 5748474 - DNA, 25 bp, Homo sapien
gtgccgtgtttggcctcctcgggga

SEQ ID NO: 5748475 - DNA, 25 bp, Homo sapien
tattctgattctgagagctgtttct

SEQ ID NO: 5748476 - DNA, 25 bp, Homo sapien
ccttgattcgggaaaccggatagtc

SEQ ID NO: 5748477 - DNA, 25 bp, Homo sapien
aaatattctagtctctgttaaagtc

SEQ ID NO: 5748478 - DNA, 25 bp, Homo sapien
gcaccaacgagtagtaattcttgaa

SEQ ID NO: 5748479 - DNA, 25 bp, Homo sapien
aatagtttcaagaggcaagctggat

SEQ ID NO: 5748480 - DNA, 25 bp, Homo sapien
agttggttcattgtcatttacatct

SEQ ID NO: 5748481 - DNA, 25 bp, Homo sapien
cagtagccaccagtaacaaattaac

SEQ ID NO: 5748482 - DNA, 25 bp, Homo sapien
agtcagcgtccactgcgcgcacctt

SEQ ID NO: 5748483 - DNA, 25 bp, Homo sapien
gcggctgcagcgcgtacaccttgcc

SEQ ID NO: 5748484 - DNA, 25 bp, Homo sapien
acccacgcccgcgacgaggccttgg

SEQ ID NO: 5748485 - DNA, 25 bp, Homo sapien
tacccagctgaagctcgtacgaaag

SEQ ID NO: 5748486 - DNA, 25 bp, Homo sapien
cagcaccaacgagtagtaattcttg

SEQ ID NO: 5748487 - DNA, 25 bp, Homo sapien
taattttcccttagttctgatttcc

SEQ ID NO: 5748488 - DNA, 25 bp, Homo sapien
gatttacctccagaaggtccccgtg

SEQ ID NO: 5748489 - DNA, 25 bp, Homo sapien
ataaagttattttcatcctgtttgt

SEQ ID NO: 5748490 - DNA, 25 bp, Homo sapien
accgaaacgtagctcgacaacgcgc

SEQ ID NO: 5748491 - DNA, 25 bp, Homo sapien
ctgtatagtggaggacacatcacta

SEQ ID NO: 5748492 - DNA, 25 bp, Homo sapien
ctgcgccagcagcggtgccagccct

SEQ ID NO: 5748493 - DNA, 25 bp, Homo sapien
gcagcaccgtgagcaccaacaggct

SEQ ID NO: 5748494 - DNA, 25 bp, Homo sapien
tctagaggaaaccgagaatcaagca

SEQ ID NO: 5748495 - DNA, 25 bp, Homo sapien
ccttcaccagcacgagtaggcggtg

SEQ ID NO: 5748496 - DNA, 25 bp, Homo sapien
cacgctgacaccgtgaagatgtggc

SEQ ID NO: 5748497 - DNA, 25 bp, Homo sapien
gccctaggcgccaacagtgccggcg

SEQ ID NO: 5748498 - DNA, 25 bp, Homo sapien
ccatcagtagccaccagtaacaaat

SEQ ID NO: 5748499 - DNA, 25 bp, Homo sapien
cctgtatatctaggaagaaaaactc

SEQ ID NO: 5748500 - DNA, 25 bp, Homo sapien
actatgtggggacccaaactatatt

SEQ ID NO: 5748501 - DNA, 25 bp, Homo sapien
tgcagcagctccacttcctcgtggt

SEQ ID NO: 5748502 - DNA, 25 bp, Homo sapien
acaaaatgccattctgcagatttac

SEQ ID NO: 5748503 - DNA, 25 bp, Homo sapien
ccacccacgcccgcgacgaggcctt

SEQ ID NO: 5748504 - DNA, 25 bp, Homo sapien
ctccacgtggatgctacattccgcg

SEQ ID NO: 5748505 - DNA, 25 bp, Homo sapien
tgcggtcaccaccagctcataggct

SEQ ID NO: 5748506 - DNA, 25 bp, Homo sapien
attttaatgtacagatggggaatgc

SEQ ID NO: 5748507 - DNA, 25 bp, Homo sapien
cgagaatcaagcagccttgattcgg

SEQ ID NO: 5748508 - DNA, 25 bp, Homo sapien
cccaccgaccacggcaccagctcac

SEQ ID NO: 5748509 - DNA, 25 bp, Homo sapien
accaaatttctgaatcaaacagaaa

SEQ ID NO: 5748510 - DNA, 25 bp, Homo sapien
tgacatccaccagcgtagcctctga

SEQ ID NO: 5748511 - DNA, 25 bp, Homo sapien
catgtccattcgtaccagagtcgcg

SEQ ID NO: 5748512 - DNA, 25 bp, Homo sapien
ctttgtcagttgcagtgacctgaat

SEQ ID NO: 5748513 - DNA, 25 bp, Homo sapien
tgcatcagatgctccctctagagga

SEQ ID NO: 5748514 - DNA, 25 bp, Homo sapien
aaacccaccaaatttctgaatcaaa

SEQ ID NO: 5748515 - DNA, 25 bp, Homo sapien
ctcacacaaacacacacacacaaaa

SEQ ID NO: 5748516 - DNA, 25 bp, Homo sapien
cactgcgccagcagcggtgccagcc

SEQ ID NO: 5748517 - DNA, 25 bp, Homo sapien
cggtcaccaccagctcataggctga

SEQ ID NO: 5748518 - DNA, 25 bp, Homo sapien
gaggaaaccgagaatcaagcagcct

SEQ ID NO: 5748519 - DNA, 25 bp, Homo sapien
cactttccaccaacgacactaacac

SEQ ID NO: 5748520 - DNA, 25 bp, Homo sapien
aatgtcctgacattgaaggggttcc

SEQ ID NO: 5748521 - DNA, 25 bp, Homo sapien
tccacatggaaaacctgcagcggcc

SEQ ID NO: 5748522 - DNA, 25 bp, Homo sapien
ctcctatatctgcatcagatgctcc

SEQ ID NO: 5748523 - DNA, 25 bp, Homo sapien
taggcggtgtcgaggggagtcagcc

SEQ ID NO: 5748524 - DNA, 25 bp, Homo sapien
taatggtagccatttaaaaactttc

SEQ ID NO: 5748525 - DNA, 25 bp, Homo sapien
agaatcaagcagccttgattcggga

SEQ ID NO: 5748526 - DNA, 25 bp, Homo sapien
tcggtccttcatctgcatcagaagc

SEQ ID NO: 5748527 - DNA, 25 bp, Homo sapien
ttgttctccttcacgaatactgtgt

SEQ ID NO: 5748528 - DNA, 25 bp, Homo sapien
caaaatgatcattgacatcaagcac

SEQ ID NO: 5748529 - DNA, 25 bp, Homo sapien
tgttttgcaaaaatttaaatattct

SEQ ID NO: 5748530 - DNA, 25 bp, Homo sapien
tcaaacagaaaccagagtactttca

SEQ ID NO: 5748531 - DNA, 25 bp, Homo sapien
tcaagcagccttgattcgggaaacc

SEQ ID NO: 5748532 - DNA, 25 bp, Homo sapien
gtctctgttaaagtcctgctgcttc

SEQ ID NO: 5748533 - DNA, 25 bp, Homo sapien
gctctcgcggtccagggcgctgtcc

SEQ ID NO: 5748534 - DNA, 25 bp, Homo sapien
gcgtgcaccgaaacgtagctcgaca

SEQ ID NO: 5748535 - DNA, 25 bp, Homo sapien
gttaatgtccttcacctccacttcc

SEQ ID NO: 5748536 - DNA, 25 bp, Homo sapien
agccaccagtaacaaattaacctca

SEQ ID NO: 5748537 - DNA, 25 bp, Homo sapien
ccccgtcccgtgcggtcaccaccag

SEQ ID NO: 5748538 - DNA, 25 bp, Homo sapien
tactcaggctgtgcgaacgccggcg

SEQ ID NO: 5748539 - DNA, 25 bp, Homo sapien
gatgggatctatggtaaacttagtc

SEQ ID NO: 5748540 - DNA, 25 bp, Homo sapien
gcttgaaagggacgtggggcgtcag

SEQ ID NO: 5748541 - DNA, 25 bp, Homo sapien
caacgacactaacacggtggccgtg

SEQ ID NO: 5748542 - DNA, 25 bp, Homo sapien
ttgaaagggacgtggggcgtcaggg

SEQ ID NO: 5748543 - DNA, 25 bp, Homo sapien
tttgatcaaattagaagagcatgtt

SEQ ID NO: 5748544 - DNA, 25 bp, Homo sapien
agtcgcgatccgacaccgtgatgag

SEQ ID NO: 5748545 - DNA, 25 bp, Homo sapien
attcacaaacaaaatgccattctgc

SEQ ID NO: 5748546 - DNA, 25 bp, Homo sapien
tttccccagcacgagagacaaagat

SEQ ID NO: 5748547 - DNA, 25 bp, Homo sapien
agggctgaaggccatgaggtccgtc

SEQ ID NO: 5748548 - DNA, 25 bp, Homo sapien
ccctctctattgaagaactacactc

SEQ ID NO: 5748549 - DNA, 25 bp, Homo sapien
ctgttaaagtcctgctgcttctctt

SEQ ID NO: 5748550 - DNA, 25 bp, Homo sapien
tctgtccagcgatttccccagcacg

SEQ ID NO: 5748551 - DNA, 25 bp, Homo sapien
acgcccgcatcccgcgcgctcacct

SEQ ID NO: 5748552 - DNA, 25 bp, Homo sapien
gtactttcactatgtggggacccaa

SEQ ID NO: 5748553 - DNA, 25 bp, Homo sapien
taaagtcctgctgcttctcttattc

SEQ ID NO: 5748554 - DNA, 25 bp, Homo sapien
ggcaccgagcaccgcagcgcagtgt

SEQ ID NO: 5748555 - DNA, 25 bp, Homo sapien
agcctctgagcccgcggcgcccacc

SEQ ID NO: 5748556 - DNA, 25 bp, Homo sapien
acgtcggccacctcgatggacacgc

SEQ ID NO: 5748557 - DNA, 25 bp, Homo sapien
gctggagcacaccagcgtgggcttt

SEQ ID NO: 5748558 - DNA, 25 bp, Homo sapien
tgaacggtgcccgtgagctcaggtt

SEQ ID NO: 5748559 - DNA, 25 bp, Homo sapien
tctcttctgcggagtctggaccttg

SEQ ID NO: 5748560 - DNA, 25 bp, Homo sapien
gttttaatgaaattttacaatgtcc

SEQ ID NO: 5748561 - DNA, 25 bp, Homo sapien
ctccctctctattgaagaactacac

SEQ ID NO: 5748562 - DNA, 25 bp, Homo sapien
gcccgcgacgaggccttgggtgcct

SEQ ID NO: 5748563 - DNA, 25 bp, Homo sapien
taaacttagtctgtatagtggagga

SEQ ID NO: 5748564 - DNA, 25 bp, Homo sapien
cgatgatcaggtacacgttgacatc

SEQ ID NO: 5748565 - DNA, 25 bp, Homo sapien
ttcgtaccagagtcgcgatccgaca

SEQ ID NO: 5748566 - DNA, 25 bp, Homo sapien
gcctgtccacgatcacctccacgtg

SEQ ID NO: 5748567 - DNA, 25 bp, Homo sapien
ctggtggtggcccacagtgaaggcg

SEQ ID NO: 5748568 - DNA, 25 bp, Homo sapien
ctatatccataaagttattttcatc

SEQ ID NO: 5748569 - DNA, 25 bp, Homo sapien
aatgccattctgcagatttacctcc

SEQ ID NO: 5748570 - DNA, 25 bp, Homo sapien
aagccacgcgttgtagcctgagtca

SEQ ID NO: 5748571 - DNA, 25 bp, Homo sapien
cagcagcaccgtgagcaccaacagg

SEQ ID NO: 5748572 - DNA, 25 bp, Homo sapien
tggaccttgagataagctagggctg

SEQ ID NO: 5748573 - DNA, 25 bp, Homo sapien
ctccacttcctcgtggtccagcggc

SEQ ID NO: 5748574 - DNA, 25 bp, Homo sapien
gtcctgctgcttctcttattcctcc

SEQ ID NO: 5748575 - DNA, 25 bp, Homo sapien
attaccaatcctcaatgttttgatc

SEQ ID NO: 5748576 - DNA, 25 bp, Homo sapien
gcgcgtccgcatcccacgctgacac

SEQ ID NO: 5748577 - DNA, 25 bp, Homo sapien
gcacaccagcgtgggctttcctggc

SEQ ID NO: 5748578 - DNA, 25 bp, Homo sapien
cagctgaagctcgtacgaaagccac

SEQ ID NO: 5748579 - DNA, 25 bp, Homo sapien
actttcactatgtggggacccaaac

SEQ ID NO: 5748580 - DNA, 25 bp, Homo sapien
gtcagggagcaggtgacatgtccat

SEQ ID NO: 5748581 - DNA, 25 bp, Homo sapien
gggttcctttgtcagttgcagtgac

SEQ ID NO: 5748582 - DNA, 25 bp, Homo sapien
tcatcatttgcctgtatatctagga

SEQ ID NO: 5748583 - DNA, 25 bp, Homo sapien
gcgcaccttcgccaccacgtgccct

SEQ ID NO: 5748584 - DNA, 25 bp, Homo sapien
aatcctcaatgttttgatcaaatta

SEQ ID NO: 5748585 - DNA, 25 bp, Homo sapien
aaccggatagtctttactgtcattg

SEQ ID NO: 5748586 - DNA, 25 bp, Homo sapien
gtgtcttttggacgccacccggaac

SEQ ID NO: 5748587 - DNA, 25 bp, Homo sapien
agtaattcttgaaggtggacaccag

SEQ ID NO: 5748588 - DNA, 25 bp, Homo sapien
cagagtactttcactatgtggggac

SEQ ID NO: 5748589 - DNA, 25 bp, Homo sapien
gagtactttcactatgtggggaccc

SEQ ID NO: 5748590 - DNA, 25 bp, Homo sapien
aattaacctcagcagtttcctctct

SEQ ID NO: 5748591 - DNA, 25 bp, Homo sapien
cgcgcgcgcaccctcggtgggtggc

SEQ ID NO: 5748592 - DNA, 25 bp, Homo sapien
catttgcctgtatatctaggaagaa

SEQ ID NO: 5748593 - DNA, 25 bp, Homo sapien
tgatagaagacgccattaccaatcc

SEQ ID NO: 5748594 - DNA, 25 bp, Homo sapien
gaccttgagataagctagggctgaa

SEQ ID NO: 5748595 - DNA, 25 bp, Homo sapien
cgaggccttgggtgcctggccactt

SEQ ID NO: 5748596 - DNA, 25 bp, Homo sapien
atgctacattccgcgctccgcccgc

SEQ ID NO: 5748597 - DNA, 25 bp, Homo sapien
atcagtagccaccagtaacaaatta

SEQ ID NO: 5748598 - DNA, 25 bp, Homo sapien
ggcgcggcaccagctcctccagctc

SEQ ID NO: 5748599 - DNA, 25 bp, Homo sapien
gactttgcttcttcataatctaatt

SEQ ID NO: 5748600 - DNA, 25 bp, Homo sapien
gagagcaatgacagtgcccagggaa

SEQ ID NO: 5748601 - DNA, 25 bp, Homo sapien
caaaaaatcaatctagtgaaaatag

SEQ ID NO: 5748602 - DNA, 25 bp, Homo sapien
agtctttactgtcattggaaatatt

SEQ ID NO: 5748603 - DNA, 25 bp, Homo sapien
ggcagcccggcgggttgttctcctt

SEQ ID NO: 5748604 - DNA, 25 bp, Homo sapien
acccgtgtatagccccacgcggaac

SEQ ID NO: 5748605 - DNA, 25 bp, Homo sapien
tggacacgctggtggtggcccacag

SEQ ID NO: 5748606 - DNA, 25 bp, Homo sapien
tggtagctattcaatatttatttgg

SEQ ID NO: 5748607 - DNA, 25 bp, Homo sapien
cttcgccaccacgtgccctgcaccc

SEQ ID NO: 5748608 - DNA, 25 bp, Homo sapien
ttcctcgtggtccagcggctgcagc

SEQ ID NO: 5748609 - DNA, 25 bp, Homo sapien
cacctgcagcgtcacgttgctgccc

SEQ ID NO: 5748610 - DNA, 25 bp, Homo sapien
agcgttctctgagatgggaagtgag

SEQ ID NO: 5748611 - DNA, 25 bp, Homo sapien
ccgtcccgtgcggtcaccaccagct

SEQ ID NO: 5748612 - DNA, 25 bp, Homo sapien
tacgctccctctctattgaagaact

SEQ ID NO: 5748613 - DNA, 25 bp, Homo sapien
gccatgaggtccgtcttgggggggt

SEQ ID NO: 5748614 - DNA, 25 bp, Homo sapien
tctcgtaggactttgcttcttcata

SEQ ID NO: 5748615 - DNA, 25 bp, Homo sapien
aaaatgccattctgcagatttacct

SEQ ID NO: 5748616 - DNA, 25 bp, Homo sapien
gctggatttgaagattgaagttcca

SEQ ID NO: 5748617 - DNA, 25 bp, Homo sapien
cgctgacaccgtgaagatgtggcag

SEQ ID NO: 5748618 - DNA, 25 bp, Homo sapien
taccttaataagtatttgaacggtg

SEQ ID NO: 5748619 - DNA, 25 bp, Homo sapien
atcctgtttgtctaaacaaaaaatc

SEQ ID NO: 5748620 - DNA, 25 bp, Homo sapien
agcgagtaggacaccagcgcgttct

SEQ ID NO: 5748621 - DNA, 25 bp, Homo sapien
tgcctggccactttccaccaacgac

SEQ ID NO: 5748622 - DNA, 25 bp, Homo sapien
ccccacgcggaacgggatgcgagcg

SEQ ID NO: 5748623 - DNA, 25 bp, Homo sapien
cccacccgccgctccaccagcgagt

SEQ ID NO: 5748624 - DNA, 25 bp, Homo sapien
cgccacccggaacaggcgcggcacc

SEQ ID NO: 5748625 - DNA, 25 bp, Homo sapien
ggaaatattggcgggttgtcgttaa

SEQ ID NO: 5748626 - DNA, 25 bp, Homo sapien
gggtggcaccgagcaccgcagcgca

SEQ ID NO: 5748627 - DNA, 25 bp, Homo sapien
tccccacggcgctggagcacaccag

SEQ ID NO: 5748628 - DNA, 25 bp, Homo sapien
cgtccactgcgcgcaccttcgccac

SEQ ID NO: 5748629 - DNA, 25 bp, Homo sapien
ttcctctctgtccagcgatttcccc

SEQ ID NO: 5748630 - DNA, 25 bp, Homo sapien
aagagtcttgttagacaatagtttc

SEQ ID NO: 5748631 - DNA, 25 bp, Homo sapien
agtgaaaatagctttacgctccctc

SEQ ID NO: 5748632 - DNA, 25 bp, Homo sapien
gagcaccgcagcgcagtgtacagca

SEQ ID NO: 5748633 - DNA, 25 bp, Homo sapien
gagcatgttttgcaaaaatttaaat

SEQ ID NO: 5748634 - DNA, 25 bp, Homo sapien
acgagagacaaagattcgcttagtt

SEQ ID NO: 5748635 - DNA, 25 bp, Homo sapien
cggtgccagccctaggcgccaacag

SEQ ID NO: 5748636 - DNA, 25 bp, Homo sapien
cagcccggcgggttgttctccttca

SEQ ID NO: 5748637 - DNA, 25 bp, Homo sapien
aggtacacgttgacatccaccagcg

SEQ ID NO: 5748638 - DNA, 25 bp, Homo sapien
cgctcgcccacccgccgctccacca

SEQ ID NO: 5748639 - DNA, 25 bp, Homo sapien
cagctcataggctgacacgctctcg

SEQ ID NO: 5748640 - DNA, 25 bp, Homo sapien
tgtccattcgtaccagagtcgcgat

SEQ ID NO: 5748641 - DNA, 25 bp, Homo sapien
tccttcatctgcatcagaagcgttt

SEQ ID NO: 5748642 - DNA, 25 bp, Homo sapien
tgtcgttctcgtccagcacgaacac

SEQ ID NO: 5748643 - DNA, 25 bp, Homo sapien
ttagacaatagtttcaagaggcaag

SEQ ID NO: 5748644 - DNA, 25 bp, Homo sapien
gctccaccagcgagtaggacaccag

SEQ ID NO: 5748645 - DNA, 25 bp, Homo sapien
catggaaaacctgcagcggcctgtc

SEQ ID NO: 5748646 - DNA, 25 bp, Homo sapien
ccttcacctccacttccacatggaa

SEQ ID NO: 5748647 - DNA, 25 bp, Homo sapien
gtgacatgtccattcgtaccagagt

SEQ ID NO: 5748648 - DNA, 25 bp, Homo sapien
cacgttgctgcccagaggcggcacg

SEQ ID NO: 5748649 - DNA, 25 bp, Homo sapien
ttctgatttcccctgagatgggatc

SEQ ID NO: 5748650 - DNA, 25 bp, Homo sapien
tccagcaccaacgagtagtaattct

SEQ ID NO: 5748651 - DNA, 25 bp, Homo sapien
ggatagtctttactgtcattggaaa

SEQ ID NO: 5748652 - DNA, 25 bp, Homo sapien
gctccagccccaggtcctgcgcgat

SEQ ID NO: 5748653 - DNA, 25 bp, Homo sapien
atccataaagttattttcatcctgt

SEQ ID NO: 5748654 - DNA, 25 bp, Homo sapien
tatgtggggacccaaactatatttt

SEQ ID NO: 5748655 - DNA, 25 bp, Homo sapien
ctcctccagctccagccccaggtcc

SEQ ID NO: 5748656 - DNA, 25 bp, Homo sapien
gcgtagcctctgagcccgcggcgcc

SEQ ID NO: 5748657 - DNA, 25 bp, Homo sapien
ctgcatcagaagcgtttaacttaac

SEQ ID NO: 5748658 - DNA, 25 bp, Homo sapien
tccccgtgtcttttggacgccaccc

SEQ ID NO: 5748659 - DNA, 25 bp, Homo sapien
ggatctatggtaaacttagtctgta

SEQ ID NO: 5748660 - DNA, 25 bp, Homo sapien
agcacgagtaggcggtgtcgagggg

SEQ ID NO: 5748661 - DNA, 25 bp, Homo sapien
ccacttcctcgtggtccagcggctg

SEQ ID NO: 5748662 - DNA, 25 bp, Homo sapien
gccatttaaaaactttccttgcctc

SEQ ID NO: 5748663 - DNA, 25 bp, Homo sapien
gccgctctccgcgtgcaccgaaacg

SEQ ID NO: 5748664 - DNA, 25 bp, Homo sapien
agaagacgccattaccaatcctcaa

SEQ ID NO: 5748665 - DNA, 25 bp, Homo sapien
gccactttccaccaacgacactaac

SEQ ID NO: 5748666 - DNA, 25 bp, Homo sapien
cccggtcgatccgagaattcacaaa

SEQ ID NO: 5748667 - DNA, 25 bp, Homo sapien
tatatctgcatcagatgctccctct

SEQ ID NO: 5748668 - DNA, 25 bp, Homo sapien
tcctggcgcgcgcgcaccctcggtg

SEQ ID NO: 5748669 - DNA, 25 bp, Homo sapien
ccagcacgagtaggcggtgtcgagg

SEQ ID NO: 5748670 - DNA, 25 bp, Homo sapien
ctgtcaacgctggttcgccgtggtc

SEQ ID NO: 5748671 - DNA, 25 bp, Homo sapien
actgattgggcaaaagttggttcat

SEQ ID NO: 5748672 - DNA, 25 bp, Homo sapien
ccggaacaggcgcggcaccagctcc

SEQ ID NO: 5748673 - DNA, 25 bp, Homo sapien
gcaccagctcctccagctccagccc

SEQ ID NO: 5748674 - DNA, 25 bp, Homo sapien
agcctgagtcagcgtccactgcgcg

SEQ ID NO: 5748675 - DNA, 25 bp, Homo sapien
tgtccacaagttttaatgaaatttt

SEQ ID NO: 5748676 - DNA, 25 bp, Homo sapien
aagcagccttgattcgggaaaccgg

SEQ ID NO: 5748677 - DNA, 25 bp, Homo sapien
cggcctgtccacgatcacctccacg

SEQ ID NO: 5748678 - DNA, 25 bp, Homo sapien
accgagaatcaagcagccttgattc

SEQ ID NO: 5748679 - DNA, 25 bp, Homo sapien
gcgggttgtcgttaatgtccttcac

SEQ ID NO: 5748680 - DNA, 25 bp, Homo sapien
tccttcacgaatactgtgtactcag

SEQ ID NO: 5748681 - DNA, 25 bp, Homo sapien
cagcagaatagaaaacaatgtttat

SEQ ID NO: 5748682 - DNA, 25 bp, Homo sapien
ccttgccgctctccgcgtgcaccga

SEQ ID NO: 5748683 - DNA, 25 bp, Homo sapien
agtacatctgtgaagtgaaaattcc

SEQ ID NO: 5748684 - DNA, 25 bp, Homo sapien
tatatctaggaagaaaaactcactg

SEQ ID NO: 5748685 - DNA, 25 bp, Homo sapien
acgctggttcgccgtggtccttcac

SEQ ID NO: 5748686 - DNA, 25 bp, Homo sapien
gattcgcttagttcatcatttgcct

SEQ ID NO: 5748687 - DNA, 25 bp, Homo sapien
gtgtcgaggggagtcagcctcgtct

SEQ ID NO: 5748688 - DNA, 25 bp, Homo sapien
gcccccatcagtagccaccagtaac

SEQ ID NO: 5748689 - DNA, 25 bp, Homo sapien
cagcgtcacgttgctgcccagaggc

SEQ ID NO: 5748690 - DNA, 25 bp, Homo sapien
ttccgcgctccgcccgcacagctcc

SEQ ID NO: 5748691 - DNA, 25 bp, Homo sapien
tacaccttgccgctctccgcgtgca

SEQ ID NO: 5748692 - DNA, 25 bp, Homo sapien
agtatttgaacggtgcccgtgagct

SEQ ID NO: 5748693 - DNA, 25 bp, Homo sapien
ccaagagtcttgttagacaatagtt

SEQ ID NO: 5748694 - DNA, 25 bp, Homo sapien
gttgtcgttcacgtcggccacctcg

SEQ ID NO: 5748695 - DNA, 25 bp, Homo sapien
ctctgttaaagtcctgctgcttctc

SEQ ID NO: 5748696 - DNA, 25 bp, Homo sapien
gaaagccacgcgttgtagcctgagt

SEQ ID NO: 5748697 - DNA, 25 bp, Homo sapien
acaccagcgtgggctttcctggcgc

SEQ ID NO: 5748698 - DNA, 25 bp, Homo sapien
tgtatatctaggaagaaaaactcac

SEQ ID NO: 5748699 - DNA, 25 bp, Homo sapien
tgccattctgcagatttacctccag

SEQ ID NO: 5748700 - DNA, 25 bp, Homo sapien
gaactgcagcagctccacttcctcg

SEQ ID NO: 5748701 - DNA, 25 bp, Homo sapien
tcccctgagatgggatctatggtaa

SEQ ID NO: 5748702 - DNA, 25 bp, Homo sapien
gcaccaacaggctggataccgcgca

SEQ ID NO: 5748703 - DNA, 25 bp, Homo sapien
acagtgcccagggaagcgttctctg

SEQ ID NO: 5748704 - DNA, 25 bp, Homo sapien
ttccaccaacgacactaacacggtg

SEQ ID NO: 5748705 - DNA, 25 bp, Homo sapien
taaacaaaaaatcaatctagtgaaa

SEQ ID NO: 5748706 - DNA, 25 bp, Homo sapien
ataggctgacacgctctcgcggtcc

SEQ ID NO: 5748707 - DNA, 25 bp, Homo sapien
gagataagctagggctgaaggccat

SEQ ID NO: 5748708 - DNA, 25 bp, Homo sapien
tgagacttctggtgtgttatcattg

SEQ ID NO: 5748709 - DNA, 25 bp, Homo sapien
cccacgctgacaccgtgaagatgtg

SEQ ID NO: 5748710 - DNA, 25 bp, Homo sapien
tgtccagcaccaacgagtagtaatt

SEQ ID NO: 5748711 - DNA, 25 bp, Homo sapien
agaatagaaaacaatgtttatttgg

SEQ ID NO: 5748712 - DNA, 25 bp, Homo sapien
ccatttgccgtattctctaacaatt

SEQ ID NO: 5748713 - DNA, 25 bp, Homo sapien
ccacccggaacaggcgcggcaccag

SEQ ID NO: 5748714 - DNA, 25 bp, Homo sapien
ccacgtgccctgcacccaccgacca

SEQ ID NO: 5748715 - DNA, 25 bp, Homo sapien
gtccacgatcacctccacgtggatg

SEQ ID NO: 5748716 - DNA, 25 bp, Homo sapien
atttgccgtattctctaacaatttt

SEQ ID NO: 5748717 - DNA, 25 bp, Homo sapien
gcaccttcgccaccacgtgccctgc

SEQ ID NO: 5748718 - DNA, 25 bp, Homo sapien
cttcaaaatgtctttgccaagagtc

SEQ ID NO: 5748719 - DNA, 25 bp, Homo sapien
tcactatgtggggacccaaactata

SEQ ID NO: 5748720 - DNA, 25 bp, Homo sapien
gaaattttacaatgtcctgacattg

SEQ ID NO: 5748721 - DNA, 25 bp, Homo sapien
cgcgcaccctcggtgggtggcaccg

SEQ ID NO: 5748722 - DNA, 25 bp, Homo sapien
tctccttcacgaatactgtgtactc

SEQ ID NO: 5748723 - DNA, 25 bp, Homo sapien
aaatttaaatattctagtctctgtt

SEQ ID NO: 5748724 - DNA, 25 bp, Homo sapien
tccgcccgcacagctcctcccggtc

SEQ ID NO: 5748725 - DNA, 25 bp, Homo sapien
gcccgtgagctcaggtttgccccca

SEQ ID NO: 5748726 - DNA, 25 bp, Homo sapien
cagctccagccccaggtcctgcgcg

SEQ ID NO: 5748727 - DNA, 25 bp, Homo sapien
aggggagtcagcctcgtctagggca

SEQ ID NO: 5748728 - DNA, 25 bp, Homo sapien
taataccttaataagtatttgaacg

SEQ ID NO: 5748729 - DNA, 25 bp, Homo sapien
cgttgctgcccagaggcggcacgcc

SEQ ID NO: 5748730 - DNA, 25 bp, Homo sapien
cattggaaatattggcgggttgtcg

SEQ ID NO: 5748731 - DNA, 25 bp, Homo sapien
cacacaaacacacacacacaaaaac

SEQ ID NO: 5748732 - DNA, 25 bp, Homo sapien
aagacataatggtagccatttaaaa

SEQ ID NO: 5748733 - DNA, 25 bp, Homo sapien
aaattccaaagtcttcaaaatgtct

SEQ ID NO: 5748734 - DNA, 25 bp, Homo sapien
ctaccgagtgaatacacaatctcgc

SEQ ID NO: 5748735 - DNA, 25 bp, Homo sapien
cggcaccagctcctccagctccagc

SEQ ID NO: 5748736 - DNA, 25 bp, Homo sapien
acatccaccagcgtagcctctgagc

SEQ ID NO: 5748737 - DNA, 25 bp, Homo sapien
tacaaaatgatcattgacatcaagc

SEQ ID NO: 5748738 - DNA, 25 bp, Homo sapien
ggcaccagctcactcactgcgccag

SEQ ID NO: 5748739 - DNA, 25 bp, Homo sapien
cactcactgcgccagcagcggtgcc

SEQ ID NO: 5748740 - DNA, 25 bp, Homo sapien
ctgcttctcttattcctccgcttct

SEQ ID NO: 5748741 - DNA, 25 bp, Homo sapien
cacaagttttaatgaaattttacaa

SEQ ID NO: 5748742 - DNA, 25 bp, Homo sapien
gcgctccgcccgcacagctcctccc

SEQ ID NO: 5748743 - DNA, 25 bp, Homo sapien
cggccacctcgatggacacgctggt

SEQ ID NO: 5748744 - DNA, 25 bp, Homo sapien
ggacaccagcgcgttctcctgcgcg

SEQ ID NO: 5748745 - DNA, 25 bp, Homo sapien
agtgaatacacaatctcgctgttcg

SEQ ID NO: 5748746 - DNA, 25 bp, Homo sapien
aagcgagagcagccgtgtccaggcc

SEQ ID NO: 5748747 - DNA, 25 bp, Homo sapien
aaagttattttcatcctgtttgtct

SEQ ID NO: 5748748 - DNA, 25 bp, Homo sapien
ttgtcagttgcagtgacctgaatct

SEQ ID NO: 5748749 - DNA, 25 bp, Homo sapien
gcgcgttgtcgttcacgtcggccac

SEQ ID NO: 5748750 - DNA, 25 bp, Homo sapien
agcggcctgtccacgatcacctcca

SEQ ID NO: 5748751 - DNA, 25 bp, Homo sapien
gaaggtgccgtgtttggcctcctcg

SEQ ID NO: 5748752 - DNA, 25 bp, Homo sapien
gggctttcctggcgcgcgcgcaccc

SEQ ID NO: 5748753 - DNA, 25 bp, Homo sapien
cgcccacccgccgctccaccagcga

SEQ ID NO: 5748754 - DNA, 25 bp, Homo sapien
gatggacacgctggtggtggcccac

SEQ ID NO: 5748755 - DNA, 25 bp, Homo sapien
tagccatttaaaaactttccttgcc

SEQ ID NO: 5748756 - DNA, 25 bp, Homo sapien
gaactacactcacacaaacacacac

SEQ ID NO: 5748757 - DNA, 25 bp, Homo sapien
gcgtccgcatcccacgctgacaccg

SEQ ID NO: 5748758 - DNA, 25 bp, Homo sapien
tcaaaatgtctttgccaagagtctt

SEQ ID NO: 5748759 - DNA, 25 bp, Homo sapien
cggtgggtggcaccgagcaccgcag

SEQ ID NO: 5748760 - DNA, 25 bp, Homo sapien
tcataggctgacacgctctcgcggt

SEQ ID NO: 5748761 - DNA, 25 bp, Homo sapien
gtgtcgtgctgatctcacccgtgta

SEQ ID NO: 5748762 - DNA, 25 bp, Homo sapien
gctgccagtacccagctgaagctcg

SEQ ID NO: 5748763 - DNA, 25 bp, Homo sapien
gaaggggttcctttgtcagttgcag

SEQ ID NO: 5748764 - DNA, 25 bp, Homo sapien
gattctgagagctgtttctcttctg

SEQ ID NO: 5748765 - DNA, 25 bp, Homo sapien
cgagtgaatacacaatctcgctgtt

SEQ ID NO: 5748766 - DNA, 25 bp, Homo sapien
gcgttgtcgttcacgtcggccacct

SEQ ID NO: 5748767 - DNA, 25 bp, Homo sapien
atatctttcctacgtattctgattc

SEQ ID NO: 5748768 - DNA, 25 bp, Homo sapien
tttcctggcgcgcgcgcaccctcgg

SEQ ID NO: 5748769 - DNA, 25 bp, Homo sapien
tcacctccacgtggatgctacattc

SEQ ID NO: 5748770 - DNA, 25 bp, Homo sapien
aaatcaatctagtgaaaatagcttt

SEQ ID NO: 5748771 - DNA, 25 bp, Homo sapien
tgtgttatcattgatgtccacaagt

SEQ ID NO: 5748772 - DNA, 25 bp, Homo sapien
tgccagtacccagctgaagctcgta

SEQ ID NO: 5748773 - DNA, 25 bp, Homo sapien
aaaggaggaagaattccattttcac

SEQ ID NO: 5748774 - DNA, 25 bp, Homo sapien
aagtgaaaattccaaagtcttcaaa

SEQ ID NO: 5748775 - DNA, 25 bp, Homo sapien
gctgacacgctctcgcggtccaggg

SEQ ID NO: 5748776 - DNA, 25 bp, Homo sapien
aatacacaatctcgctgttcggtcc

SEQ ID NO: 5748777 - DNA, 25 bp, Homo sapien
acctgcagcggcctgtccacgatca

SEQ ID NO: 5748778 - DNA, 25 bp, Homo sapien
gctcataggctgacacgctctcgcg

SEQ ID NO: 5748779 - DNA, 25 bp, Homo sapien
tactgtcattggaaatattggcggg

SEQ ID NO: 5748780 - DNA, 25 bp, Homo sapien
ctctctattgaagaactacactcac

SEQ ID NO: 5748781 - DNA, 25 bp, Homo sapien
gctccccacggcgctggagcacacc

SEQ ID NO: 5748782 - DNA, 25 bp, Homo sapien
cgatccgagaattcacaaacaaaat

SEQ ID NO: 5748783 - DNA, 25 bp, Homo sapien
aacgcgcgctcgcccacccgccgct

SEQ ID NO: 5748784 - DNA, 25 bp, Homo sapien
tcatctgcatcagaagcgtttaact

SEQ ID NO: 5748785 - DNA, 25 bp, Homo sapien
tcacgaatactgtgtactcaggctg

SEQ ID NO: 5748786 - DNA, 25 bp, Homo sapien
gcggaacgggatgcgagcgctgcca

SEQ ID NO: 5748787 - DNA, 25 bp, Homo sapien
cgcggcaccagctcctccagctcca

SEQ ID NO: 5748788 - DNA, 25 bp, Homo sapien
caccagctcactcactgcgccagca

SEQ ID NO: 5748789 - DNA, 25 bp, Homo sapien
ctttccaccaacgacactaacacgg

SEQ ID NO: 5748790 - DNA, 25 bp, Homo sapien
gaagatgtggcagcccggcgggttg

SEQ ID NO: 5748791 - DNA, 25 bp, Homo sapien
gtaacaaattaacctcagcagtttc

SEQ ID NO: 5748792 - DNA, 25 bp, Homo sapien
acggagtagcggagctggccgctcc

SEQ ID NO: 5748793 - DNA, 25 bp, Homo sapien
cgtctagggcacgtgtcgtgctgat

SEQ ID NO: 5748794 - DNA, 25 bp, Homo sapien
aattagaagagcatgttttgcaaaa

SEQ ID NO: 5748795 - DNA, 25 bp, Homo sapien
ggagtctggaccttgagataagcta

SEQ ID NO: 5748796 - DNA, 25 bp, Homo sapien
atattctagtctctgttaaagtcct

SEQ ID NO: 5748797 - DNA, 25 bp, Homo sapien
tctcgtccagcacgaacacctgcag

SEQ ID NO: 5748798 - DNA, 25 bp, Homo sapien
atctcgctgttcggtccttcatctg

SEQ ID NO: 5748799 - DNA, 25 bp, Homo sapien
agcaccgtgagcaccaacaggctgg

SEQ ID NO: 5748800 - DNA, 25 bp, Homo sapien
actacactcacacaaacacacacac

SEQ ID NO: 5748801 - DNA, 25 bp, Homo sapien
acgtgccctgcacccaccgaccacg

SEQ ID NO: 5748802 - DNA, 25 bp, Homo sapien
ccagtacccagctgaagctcgtacg

SEQ ID NO: 5748803 - DNA, 25 bp, Homo sapien
tttacatctaataccttaataagta

SEQ ID NO: 5748804 - DNA, 25 bp, Homo sapien
aggactttgcttcttcataatctaa

SEQ ID NO: 5748805 - DNA, 25 bp, Homo sapien
cctggaactgcagcagctccacttc

SEQ ID NO: 5748806 - DNA, 25 bp, Homo sapien
gtccagcacgaacacctgcagcgtc

SEQ ID NO: 5748807 - DNA, 25 bp, Homo sapien
ttctgcggagtctggaccttgagat

SEQ ID NO: 5748808 - DNA, 25 bp, Homo sapien
ttcgcttagttcatcatttgcctgt

SEQ ID NO: 5748809 - DNA, 25 bp, Homo sapien
gagcttgtaggagagaagagcattt

SEQ ID NO: 5748810 - DNA, 25 bp, Homo sapien
ctccgcgtgcaccgaaacgtagctc

SEQ ID NO: 5748811 - DNA, 25 bp, Homo sapien
aacggtgcccgtgagctcaggtttg

SEQ ID NO: 5748812 - DNA, 25 bp, Homo sapien
cagcttgaaagggacgtggggcgtc

SEQ ID NO: 5748813 - DNA, 25 bp, Homo sapien
ctagggctgaaggccatgaggtccg

SEQ ID NO: 5748814 - DNA, 25 bp, Homo sapien
gctacattccgcgctccgcccgcac

SEQ ID NO: 5748815 - DNA, 25 bp, Homo sapien
tgcttcttcataatctaattttccc

SEQ ID NO: 5748816 - DNA, 25 bp, Homo sapien
ggaagtgagagagacgttattgaga

SEQ ID NO: 5748817 - DNA, 25 bp, Homo sapien
cacctggaactgcagcagctccact

SEQ ID NO: 5748818 - DNA, 25 bp, Homo sapien
gttcggtccttcatctgcatcagaa

SEQ ID NO: 5748819 - DNA, 25 bp, Homo sapien
gcgcagatggcgatgatcaggtaca

SEQ ID NO: 5748820 - DNA, 25 bp, Homo sapien
tatttgaacggtgcccgtgagctca

SEQ ID NO: 5748821 - DNA, 25 bp, Homo sapien
ctgtccacgatcacctccacgtgga

SEQ ID NO: 5748822 - DNA, 25 bp, Homo sapien
ctgatttcccctgagatgggatcta

SEQ ID NO: 5748823 - DNA, 25 bp, Homo sapien
tttgccaagagtcttgttagacaat

SEQ ID NO: 5748824 - DNA, 25 bp, Homo sapien
ctgcagcggcctgtccacgatcacc

SEQ ID NO: 5748825 - DNA, 25 bp, Homo sapien
gggagcaggtgacatgtccattcgt

SEQ ID NO: 5748826 - DNA, 25 bp, Homo sapien
ttgcaaaaatttaaatattctagtc

SEQ ID NO: 5748827 - DNA, 25 bp, Homo sapien
cattgaaggggttcctttgtcagtt

SEQ ID NO: 5748828 - DNA, 25 bp, Homo sapien
gcgttctcctgcgcgtccgcatccc

SEQ ID NO: 5748829 - DNA, 25 bp, Homo sapien
gtcaacgctggttcgccgtggtcct

SEQ ID NO: 5748830 - DNA, 25 bp, Homo sapien
cctgcagcgtcacgttgctgcccag

SEQ ID NO: 5748831 - DNA, 25 bp, Homo sapien
ccacgatcacctccacgtggatgct

SEQ ID NO: 5748832 - DNA, 25 bp, Homo sapien
tcgatggacacgctggtggtggccc

SEQ ID NO: 5748833 - DNA, 25 bp, Homo sapien
agatggcgatgatcaggtacacgtt

SEQ ID NO: 5748834 - DNA, 25 bp, Homo sapien
atcatttgcctgtatatctaggaag

SEQ ID NO: 5748835 - DNA, 25 bp, Homo sapien
cgcagcgcagtgtacagcagcaccg

SEQ ID NO: 5748836 - DNA, 25 bp, Homo sapien
gtttcaagaggcaagctggatttga

SEQ ID NO: 5748837 - DNA, 25 bp, Homo sapien
cagctcctcccggtcgatccgagaa

SEQ ID NO: 5748838 - DNA, 25 bp, Homo sapien
ggcaaaagttggttcattgtcattt

SEQ ID NO: 5748839 - DNA, 25 bp, Homo sapien
gagctgtttctcttctgcggagtct

SEQ ID NO: 5748840 - DNA, 25 bp, Homo sapien
acacgctctcgcggtccagggcgct

SEQ ID NO: 5748841 - DNA, 25 bp, Homo sapien
gaagcgttctctgagatgggaagtg

SEQ ID NO: 5748842 - DNA, 25 bp, Homo sapien
ccttaataagtatttgaacggtgcc

SEQ ID NO: 5748843 - DNA, 25 bp, Homo sapien
gaaggtccccgtgtcttttggacgc

SEQ ID NO: 5748844 - DNA, 25 bp, Homo sapien
cggcgctggagcacaccagcgtggg

SEQ ID NO: 5748845 - DNA, 25 bp, Homo sapien
atggggaatgcagcagaatagaaaa

SEQ ID NO: 5748846 - DNA, 25 bp, Homo sapien
tgcagtgacctgaatctcgtaggac

SEQ ID NO: 5748847 - DNA, 25 bp, Homo sapien
agcacgaacacctgcagcgtcacgt

SEQ ID NO: 5748848 - DNA, 25 bp, Homo sapien
gtagccaccagtaacaaattaacct

SEQ ID NO: 5748849 - DNA, 25 bp, Homo sapien
aacgggatgcgagcgctgccagtac

SEQ ID NO: 5748850 - DNA, 25 bp, Homo sapien
cccagctgaagctcgtacgaaagcc

SEQ ID NO: 5748851 - DNA, 25 bp, Homo sapien
tgcgaggagcagaagcgagagcagc

SEQ ID NO: 5748852 - DNA, 25 bp, Homo sapien
cttgttagacaatagtttcaagagg

SEQ ID NO: 5748853 - DNA, 25 bp, Homo sapien
tgtttgtctaaacaaaaaatcaatc

SEQ ID NO: 5748854 - DNA, 25 bp, Homo sapien
ctctgccgcctctgctgcgagtaag

SEQ ID NO: 5748855 - DNA, 25 bp, Homo sapien
tgttatcattgatgtccacaagttt

SEQ ID NO: 5748856 - DNA, 25 bp, Homo sapien
gtacagatggggaatgcagcagaat

SEQ ID NO: 5748857 - DNA, 25 bp, Homo sapien
agtacccagctgaagctcgtacgaa

SEQ ID NO: 5748858 - DNA, 25 bp, Homo sapien
ggaaaccgagaatcaagcagccttg

SEQ ID NO: 5748859 - DNA, 25 bp, Homo sapien
gatctcacccgtgtatagccccacg

SEQ ID NO: 5748860 - DNA, 25 bp, Homo sapien
gcagctccacttcctcgtggtccag

SEQ ID NO: 5748861 - DNA, 25 bp, Homo sapien
acaccagcgcgttctcctgcgcgtc

SEQ ID NO: 5748862 - DNA, 25 bp, Homo sapien
tgacagtgcccagggaagcgttctc

SEQ ID NO: 5748863 - DNA, 25 bp, Homo sapien
cgaacacctgcagcgtcacgttgct

SEQ ID NO: 5748864 - DNA, 25 bp, Homo sapien
tgcagcagaatagaaaacaatgttt

SEQ ID NO: 5748865 - DNA, 25 bp, Homo sapien
gcgcagtgtacagcagcaccgtgag

SEQ ID NO: 5748866 - DNA, 25 bp, Homo sapien
gtcgaggggagtcagcctcgtctag

SEQ ID NO: 5748867 - DNA, 25 bp, Homo sapien
gctggttcgccgtggtccttcacca

SEQ ID NO: 5748868 - DNA, 25 bp, Homo sapien
gtcacgttgctgcccagaggcggca

SEQ ID NO: 5748869 - DNA, 25 bp, Homo sapien
gataagctagggctgaaggccatga

SEQ ID NO: 5748870 - DNA, 25 bp, Homo sapien
gctgtccagcaccaacgagtagtaa

SEQ ID NO: 5748871 - DNA, 25 bp, Homo sapien
agatggggaatgcagcagaatagaa

SEQ ID NO: 5748872 - DNA, 25 bp, Homo sapien
attcttgaaggtggacaccagcttg

SEQ ID NO: 5748873 - DNA, 25 bp, Homo sapien
cataatggtagccatttaaaaactt

SEQ ID NO: 5748874 - DNA, 25 bp, Homo sapien
tccaaagtcttcaaaatgtctttgc

SEQ ID NO: 5748875 - DNA, 25 bp, Homo sapien
ggagtagcggagctggccgctcccc

SEQ ID NO: 5748876 - DNA, 25 bp, Homo sapien
cgcgttgtagcctgagtcagcgtcc

SEQ ID NO: 5748877 - DNA, 25 bp, Homo sapien
gtcccgtgcggtcaccaccagctca

SEQ ID NO: 5748878 - DNA, 25 bp, Homo sapien
tcctatatccataaagttattttca

SEQ ID NO: 5748879 - DNA, 25 bp, Homo sapien
catcagatgctccctctagaggaaa

SEQ ID NO: 5748880 - DNA, 25 bp, Homo sapien
cagcagctccacttcctcgtggtcc

SEQ ID NO: 5748881 - DNA, 25 bp, Homo sapien
tctttgccaagagtcttgttagaca

SEQ ID NO: 5748882 - DNA, 25 bp, Homo sapien
gtgaaggcgagcccccgtcccgtgc

SEQ ID NO: 5748883 - DNA, 25 bp, Homo sapien
aatgcagcagaatagaaaacaatgt

SEQ ID NO: 5748884 - DNA, 25 bp, Homo sapien
tctttactgtcattggaaatattgg

SEQ ID NO: 5748885 - DNA, 25 bp, Homo sapien
tggaaaacctgcagcggcctgtcca

SEQ ID NO: 5748886 - DNA, 25 bp, Homo sapien
ccagcacgaacacctgcagcgtcac

SEQ ID NO: 5748887 - DNA, 25 bp, Homo sapien
cgacaccgtgatgagagcaatgaca

SEQ ID NO: 5748888 - DNA, 25 bp, Homo sapien
gaaaaactcactggagctgagcttg

SEQ ID NO: 5748889 - DNA, 25 bp, Homo sapien
ccgagcaccgcagcgcagtgtacag

SEQ ID NO: 5748890 - DNA, 25 bp, Homo sapien
aggcaagctggatttgaagattgaa

SEQ ID NO: 5748891 - DNA, 25 bp, Homo sapien
tgtaatattttcatttaccaggtat

SEQ ID NO: 5748892 - DNA, 25 bp, Homo sapien
gatttgaagattgaagttccatatc

SEQ ID NO: 5748893 - DNA, 25 bp, Homo sapien
atgtccttcacctccacttccacat

SEQ ID NO: 5748894 - DNA, 25 bp, Homo sapien
ctggcgcgcgcgcaccctcggtggg

SEQ ID NO: 5748895 - DNA, 25 bp, Homo sapien
tatctgcatcagatgctccctctag

SEQ ID NO: 5748896 - DNA, 25 bp, Homo sapien
tacctccagaaggtccccgtgtctt

SEQ ID NO: 5748897 - DNA, 25 bp, Homo sapien
catgaggtccgtcttgggggggtcc

SEQ ID NO: 5748898 - DNA, 25 bp, Homo sapien
caccagcacgagtaggcggtgtcga

SEQ ID NO: 5748899 - DNA, 25 bp, Homo sapien
agaagcgagagcagccgtgtccagg

SEQ ID NO: 5748900 - DNA, 25 bp, Homo sapien
gaaaccggatagtctttactgtcat

SEQ ID NO: 5748901 - DNA, 25 bp, Homo sapien
ggtgcctggccactttccaccaacg

SEQ ID NO: 5748902 - DNA, 25 bp, Homo sapien
gggcacgtgtcgtgctgatctcacc

SEQ ID NO: 5748903 - DNA, 25 bp, Homo sapien
ggttcattgtcatttacatctaata

SEQ ID NO: 5748904 - DNA, 25 bp, Homo sapien
taattcttgaaggtggacaccagct

SEQ ID NO: 5748905 - DNA, 25 bp, Homo sapien
cgagtaggcggtgtcgaggggagtc

SEQ ID NO: 5748906 - DNA, 25 bp, Homo sapien
aatcaagcagccttgattcgggaaa

SEQ ID NO: 5748907 - DNA, 25 bp, Homo sapien
gacacgctggtggtggcccacagtg

SEQ ID NO: 5748908 - DNA, 25 bp, Homo sapien
gtcagttgcagtgacctgaatctcg

SEQ ID NO: 5748909 - DNA, 25 bp, Homo sapien
tacagcagcaccgtgagcaccaaca

SEQ ID NO: 5748910 - DNA, 25 bp, Homo sapien
cggcgcccacccacgcccgcgacga

SEQ ID NO: 5748911 - DNA, 25 bp, Homo sapien
tcggggacggagtagcggagctggc

SEQ ID NO: 5748912 - DNA, 25 bp, Homo sapien
cctgagtcagcgtccactgcgcgca

SEQ ID NO: 5748913 - DNA, 25 bp, Homo sapien
agtaggacaccagcgcgttctcctg

SEQ ID NO: 5748914 - DNA, 25 bp, Homo sapien
cacgagtaggcggtgtcgaggggag

SEQ ID NO: 5748915 - DNA, 25 bp, Homo sapien
agctccacttcctcgtggtccagcg

SEQ ID NO: 5748916 - DNA, 25 bp, Homo sapien
ggaatgcagcagaatagaaaacaat

SEQ ID NO: 5748917 - DNA, 25 bp, Homo sapien
aatatttatttggcatagcatcagt

SEQ ID NO: 5748918 - DNA, 25 bp, Homo sapien
gcacgtgtcgtgctgatctcacccg

SEQ ID NO: 5748919 - DNA, 25 bp, Homo sapien
tagctttacgctccctctctattga

SEQ ID NO: 5748920 - DNA, 25 bp, Homo sapien
gagagacgttattgagacttctggt

SEQ ID NO: 5748921 - DNA, 25 bp, Homo sapien
agctattcaatatttatttggcata

SEQ ID NO: 5748922 - DNA, 25 bp, Homo sapien
acaatgtcctgacattgaaggggtt

SEQ ID NO: 5748923 - DNA, 25 bp, Homo sapien
caccgtgaagatgtggcagcccggc

SEQ ID NO: 5748924 - DNA, 25 bp, Homo sapien
gagtcttgttagacaatagtttcaa

SEQ ID NO: 5748925 - DNA, 25 bp, Homo sapien
ctgttcggtccttcatctgcatcag

SEQ ID NO: 5748926 - DNA, 25 bp, Homo sapien
gccacctcgatggacacgctggtgg

SEQ ID NO: 5748927 - DNA, 25 bp, Homo sapien
ggtccagcggctgcagcgcgtacac

SEQ ID NO: 5748928 - DNA, 25 bp, Homo sapien
tgcccagggaagcgttctctgagat

SEQ ID NO: 5748929 - DNA, 25 bp, Homo sapien
gacaaagattcgcttagttcatcat

SEQ ID NO: 5748930 - DNA, 25 bp, Homo sapien
gatgcggcccacgaaggtgccgtgt

SEQ ID NO: 5748931 - DNA, 25 bp, Homo sapien
cacctcgatggacacgctggtggtg

SEQ ID NO: 5748932 - DNA, 25 bp, Homo sapien
gcccacgaaggtgccgtgtttggcc

SEQ ID NO: 5748933 - DNA, 25 bp, Homo sapien
ccctgagatgggatctatggtaaac

SEQ ID NO: 5748934 - DNA, 25 bp, Homo sapien
cttagtctgtatagtggaggacaca

SEQ ID NO: 5748935 - DNA, 25 bp, Homo sapien
aatttctgaatcaaacagaaaccag

SEQ ID NO: 5748936 - DNA, 25 bp, Homo sapien
cggcccacgaaggtgccgtgtttgg

SEQ ID NO: 5748937 - DNA, 25 bp, Homo sapien
tagttcatcatttgcctgtatatct

SEQ ID NO: 5748938 - DNA, 25 bp, Homo sapien
aacctcagcagtttcctctctgtcc

SEQ ID NO: 5748939 - DNA, 25 bp, Homo sapien
ctaaggtcccatttgccgtattctc

SEQ ID NO: 5748940 - DNA, 25 bp, Homo sapien
cttgggtgcctggccactttccacc

SEQ ID NO: 5748941 - DNA, 25 bp, Homo sapien
cggtgcccgtgagctcaggtttgcc

SEQ ID NO: 5748942 - DNA, 25 bp, Homo sapien
gttcgccgtggtccttcaccagcac

SEQ ID NO: 5748943 - DNA, 25 bp, Homo sapien
tttggtagctattcaatatttattt

SEQ ID NO: 5748944 - DNA, 25 bp, Homo sapien
ttgaaggggttcctttgtcagttgc

SEQ ID NO: 5748945 - DNA, 25 bp, Homo sapien
tacactcacacaaacacacacacac

SEQ ID NO: 5748946 - DNA, 25 bp, Homo sapien
tgtgtactcaggctgtgcgaacgcc

SEQ ID NO: 5748947 - DNA, 25 bp, Homo sapien
aacaaaaaatcaatctagtgaaaat

SEQ ID NO: 5748948 - DNA, 25 bp, Homo sapien
cagtgaaggcgagcccccgtcccgt

SEQ ID NO: 5748949 - DNA, 25 bp, Homo sapien
acctccacgtggatgctacattccg

SEQ ID NO: 5748950 - DNA, 25 bp, Homo sapien
ctcaatgttttgatcaaattagaag

SEQ ID NO: 5748951 - DNA, 25 bp, Homo sapien
acgaaggtgccgtgtttggcctcct

SEQ ID NO: 5748952 - DNA, 25 bp, Homo sapien
gtaagaccagctccccacggcgctg

SEQ ID NO: 5748953 - DNA, 25 bp, Homo sapien
cgtggggcgtcagggagcaggtgac

SEQ ID NO: 5748954 - DNA, 25 bp, Homo sapien
atcaagcacattggaaaaaaggagg

SEQ ID NO: 5748955 - DNA, 25 bp, Homo sapien
gcccacccacgcccgcgacgaggcc

SEQ ID NO: 5748956 - DNA, 25 bp, Homo sapien
tggatttgaagattgaagttccata

SEQ ID NO: 5748957 - DNA, 25 bp, Homo sapien
tccagaaggtccccgtgtcttttgg

SEQ ID NO: 5748958 - DNA, 25 bp, Homo sapien
ctgagcttgtaggagagaagagcat

SEQ ID NO: 5748959 - DNA, 25 bp, Homo sapien
gtacacgttgacatccaccagcgta

SEQ ID NO: 5748960 - DNA, 25 bp, Homo sapien
gcagcgcgtacaccttgccgctctc

SEQ ID NO: 5748961 - DNA, 25 bp, Homo sapien
aaatgatcattgacatcaagcacat

SEQ ID NO: 5748962 - DNA, 25 bp, Homo sapien
atcagaagcgtttaacttaaccact

SEQ ID NO: 5748963 - DNA, 25 bp, Homo sapien
atcaaattagaagagcatgttttgc

SEQ ID NO: 5748964 - DNA, 25 bp, Homo sapien
tgtcgttaatgtccttcacctccac

SEQ ID NO: 5748965 - DNA, 25 bp, Homo sapien
gcagcggcctgtccacgatcacctc

SEQ ID NO: 5748966 - DNA, 25 bp, Homo sapien
ctgcgcgatgcggcccacgaaggtg

SEQ ID NO: 5748967 - DNA, 25 bp, Homo sapien
ttgagataagctagggctgaaggcc

SEQ ID NO: 5748968 - DNA, 25 bp, Homo sapien
ccattctgcagatttacctccagaa

SEQ ID NO: 5748969 - DNA, 25 bp, Homo sapien
aagtgagagagacgttattgagact

SEQ ID NO: 5748970 - DNA, 25 bp, Homo sapien
ccataaagttattttcatcctgttt

SEQ ID NO: 5748971 - DNA, 25 bp, Homo sapien
agaaaccagagtactttcactatgt

SEQ ID NO: 5748972 - DNA, 25 bp, Homo sapien
gcatagcatcagtacatctgtgaag

SEQ ID NO: 5748973 - DNA, 25 bp, Homo sapien
cccacagtgaaggcgagcccccgtc

SEQ ID NO: 5748974 - DNA, 25 bp, Homo sapien
tctgctgcgagtaagaccagctccc

SEQ ID NO: 5748975 - DNA, 25 bp, Homo sapien
catttactcctatatctgcatcaga

SEQ ID NO: 5748976 - DNA, 25 bp, Homo sapien
ccagctcactcactgcgccagcagc

SEQ ID NO: 5748977 - DNA, 25 bp, Homo sapien
cacatggaaaacctgcagcggcctg

SEQ ID NO: 5748978 - DNA, 25 bp, Homo sapien
ctcaggctgtgcgaacgccggcgcg

SEQ ID NO: 5748979 - DNA, 25 bp, Homo sapien
cactaaggtcccatttgccgtattc

SEQ ID NO: 5748980 - DNA, 25 bp, Homo sapien
agcgcgtacaccttgccgctctccg

SEQ ID NO: 5748981 - DNA, 25 bp, Homo sapien
aagctggatttgaagattgaagttc

SEQ ID NO: 5748982 - DNA, 25 bp, Homo sapien
gtcatttacatctaataccttaata

SEQ ID NO: 5748983 - DNA, 25 bp, Homo sapien
cattgtcatttacatctaatacctt

SEQ ID NO: 5748984 - DNA, 25 bp, Homo sapien
ccctcggtgggtggcaccgagcacc

SEQ ID NO: 5748985 - DNA, 25 bp, Homo sapien
ttctgattctgagagctgtttctct

SEQ ID NO: 5748986 - DNA, 25 bp, Homo sapien
tgccaagagtcttgttagacaatag

SEQ ID NO: 5748987 - DNA, 25 bp, Homo sapien
cctcagcagtttcctctctgtccag

SEQ ID NO: 5748988 - DNA, 25 bp, Homo sapien
aggtgccgtgtttggcctcctcggg

SEQ ID NO: 5748989 - DNA, 25 bp, Homo sapien
gcagccttgattcgggaaaccggat

SEQ ID NO: 5748990 - DNA, 25 bp, Homo sapien
tctctgtccagcgatttccccagca

SEQ ID NO: 5748991 - DNA, 25 bp, Homo sapien
cagcctcgtctagggcacgtgtcgt

SEQ ID NO: 5748992 - DNA, 25 bp, Homo sapien
atccgagaattcacaaacaaaatgc

SEQ ID NO: 5748993 - DNA, 25 bp, Homo sapien
atctgcatcagaagcgtttaactta

SEQ ID NO: 5748994 - DNA, 25 bp, Homo sapien
gttcacgtcggccacctcgatggac

SEQ ID NO: 5748995 - DNA, 25 bp, Homo sapien
ccgagaattcacaaacaaaatgcca

SEQ ID NO: 5748996 - DNA, 25 bp, Homo sapien
attgaagaactacactcacacaaac

SEQ ID NO: 5748997 - DNA, 25 bp, Homo sapien
attcaatatttatttggcatagcat

SEQ ID NO: 5748998 - DNA, 25 bp, Homo sapien
ccacgtggatgctacattccgcgct

SEQ ID NO: 5748999 - DNA, 25 bp, Homo sapien
aacagtgccggcgcgttgtcgttct

SEQ ID NO: 5749000 - DNA, 25 bp, Homo sapien
cagaagcgtttaacttaaccactaa

SEQ ID NO: 5749001 - DNA, 25 bp, Homo sapien
tccattcgtaccagagtcgcgatcc

SEQ ID NO: 5749002 - DNA, 25 bp, Homo sapien
gagcccccgtcccgtgcggtcacca

SEQ ID NO: 5749003 - DNA, 25 bp, Homo sapien
tctcgcggtccagggcgctgtccag

SEQ ID NO: 5749004 - DNA, 25 bp, Homo sapien
tgtcgttcacgtcggccacctcgat

SEQ ID NO: 5749005 - DNA, 25 bp, Homo sapien
aacacggtggccgtggctgtcaacg

SEQ ID NO: 5749006 - DNA, 25 bp, Homo sapien
ggctgtcaacgctggttcgccgtgg

SEQ ID NO: 5749007 - DNA, 25 bp, Homo sapien
tcagcgtccactgcgcgcaccttcg

SEQ ID NO: 5749008 - DNA, 25 bp, Homo sapien
tagcggagctggccgctccccacct

SEQ ID NO: 5749009 - DNA, 25 bp, Homo sapien
tgaaaatagctttacgctccctctc

SEQ ID NO: 5749010 - DNA, 25 bp, Homo sapien
ctgagatgggaagtgagagagacgt

SEQ ID NO: 5749011 - DNA, 25 bp, Homo sapien
ggaagaattccattttcacccattt

SEQ ID NO: 5749012 - DNA, 25 bp, Homo sapien
gtccttcacctccacttccacatgg

SEQ ID NO: 5749013 - DNA, 25 bp, Homo sapien
tcacccgtgtatagccccacgcgga

SEQ ID NO: 5749014 - DNA, 25 bp, Homo sapien
gtgacctgaatctcgtaggactttg

SEQ ID NO: 5749015 - DNA, 25 bp, Homo sapien
tgatcaaattagaagagcatgtttt

SEQ ID NO: 5749016 - DNA, 25 bp, Homo sapien
gcacgagagacaaagattcgcttag

SEQ ID NO: 5749017 - DNA, 25 bp, Homo sapien
gtgagagagacgttattgagacttc

SEQ ID NO: 5749018 - DNA, 25 bp, Homo sapien
aactcactggagctgagcttgtagg

SEQ ID NO: 5749019 - DNA, 25 bp, Homo sapien
ttttacaatgtcctgacattgaagg

SEQ ID NO: 5749020 - DNA, 25 bp, Homo sapien
gagatgggaagtgagagagacgtta

SEQ ID NO: 5749021 - DNA, 25 bp, Homo sapien
ttacaatgtcctgacattgaagggg

SEQ ID NO: 5749022 - DNA, 25 bp, Homo sapien
gcacgcccgcatcccgcgcgctcac

SEQ ID NO: 5749023 - DNA, 25 bp, Homo sapien
cccttctgatagaagacgccattac

SEQ ID NO: 5749024 - DNA, 25 bp, Homo sapien
gcagaatagaaaacaatgtttattt

SEQ ID NO: 5749025 - DNA, 25 bp, Homo sapien
acaccagcttgaaagggacgtgggg

SEQ ID NO: 5749026 - DNA, 25 bp, Homo sapien
gtcattggaaatattggcgggttgt

SEQ ID NO: 5749027 - DNA, 25 bp, Homo sapien
tctgaatcaaacagaaaccagagta

SEQ ID NO: 5749028 - DNA, 25 bp, Homo sapien
tcattgacatcaagcacattggaaa

SEQ ID NO: 5749029 - DNA, 25 bp, Homo sapien
catcagtacatctgtgaagtgaaaa

SEQ ID NO: 5749030 - DNA, 25 bp, Homo sapien
gtcgtgctgatctcacccgtgtata

SEQ ID NO: 5749031 - DNA, 25 bp, Homo sapien
gcaccgaaacgtagctcgacaacgc

SEQ ID NO: 5749032 - DNA, 25 bp, Homo sapien
gctttcctggcgcgcgcgcaccctc

SEQ ID NO: 5749033 - DNA, 25 bp, Homo sapien
caagcacattggaaaaaaggaggaa

SEQ ID NO: 5749034 - DNA, 25 bp, Homo sapien
acagatggggaatgcagcagaatag

SEQ ID NO: 5749035 - DNA, 25 bp, Homo sapien
ggagctgagcttgtaggagagaaga

SEQ ID NO: 5749036 - DNA, 25 bp, Homo sapien
cgttctctgagatgggaagtgagag

SEQ ID NO: 5749037 - DNA, 25 bp, Homo sapien
cttcacgaatactgtgtactcaggc

SEQ ID NO: 5749038 - DNA, 25 bp, Homo sapien
ttgtagcctgagtcagcgtccactg

SEQ ID NO: 5749039 - DNA, 25 bp, Homo sapien
taaagacataatggtagccatttaa

SEQ ID NO: 5749040 - DNA, 25 bp, Homo sapien
gaatactgtgtactcaggctgtgcg

SEQ ID NO: 5749041 - DNA, 25 bp, Homo sapien
gaagagcatttactcctatatctgc

SEQ ID NO: 5749042 - DNA, 25 bp, Homo sapien
ttgggggggtcctccccagagcaca

SEQ ID NO: 5749043 - DNA, 25 bp, Homo sapien
ccgtgtcttttggacgccacccgga

SEQ ID NO: 5749044 - DNA, 25 bp, Homo sapien
ggcgggttgttctccttcacgaata

SEQ ID NO: 5749045 - DNA, 25 bp, Homo sapien
aaaactcactggagctgagcttgta

SEQ ID NO: 5749046 - DNA, 25 bp, Homo sapien
gtggacaccagcttgaaagggacgt

SEQ ID NO: 5749047 - DNA, 25 bp, Homo sapien
agttccatatctttcctacgtattc

SEQ ID NO: 5749048 - DNA, 25 bp, Homo sapien
acaaacaaaatgccattctgcagat

SEQ ID NO: 5749049 - DNA, 25 bp, Homo sapien
gtgagctcaggtttgcccccatcag

SEQ ID NO: 5749050 - DNA, 25 bp, Homo sapien
ttgattcgggaaaccggatagtctt

SEQ ID NO: 5749051 - DNA, 25 bp, Homo sapien
tccactgcgcgcaccttcgccacca

SEQ ID NO: 5749052 - DNA, 25 bp, Homo sapien
gggcgctgtccagcaccaacgagta

SEQ ID NO: 5749053 - DNA, 25 bp, Homo sapien
cgctgttcggtccttcatctgcatc

SEQ ID NO: 5749054 - DNA, 25 bp, Homo sapien
gggggtcctccccagagcacaccct

SEQ ID NO: 5749055 - DNA, 25 bp, Homo sapien
cagaggcggcacgcccgcatcccgc

SEQ ID NO: 5749056 - DNA, 25 bp, Homo sapien
cttctgatagaagacgccattacca

SEQ ID NO: 5749057 - DNA, 25 bp, Homo sapien
ggtcctgcgcgatgcggcccacgaa

SEQ ID NO: 5749058 - DNA, 25 bp, Homo sapien
atatccataaagttattttcatcct

SEQ ID NO: 5749059 - DNA, 25 bp, Homo sapien
cacctccacttccacatggaaaacc

SEQ ID NO: 5749060 - DNA, 25 bp, Homo sapien
tgaagaactacactcacacaaacac

SEQ ID NO: 5749061 - DNA, 25 bp, Homo sapien
gtgccctgcacccaccgaccacggc

SEQ ID NO: 5749062 - DNA, 25 bp, Homo sapien
aggagcagaagcgagagcagccgtg

SEQ ID NO: 5749063 - DNA, 25 bp, Homo sapien
cattgatgtccacaagttttaatga

SEQ ID NO: 5749064 - DNA, 25 bp, Homo sapien
ttaaatattctagtctctgttaaag

SEQ ID NO: 5749065 - DNA, 25 bp, Homo sapien
ctcgacaacgcgcgctcgcccaccc

SEQ ID NO: 5749066 - DNA, 25 bp, Homo sapien
agttattttcatcctgtttgtctaa

SEQ ID NO: 5749067 - DNA, 25 bp, Homo sapien
gaggacacatcactaccgagtgaat

SEQ ID NO: 5749068 - DNA, 25 bp, Homo sapien
taccaatcctcaatgttttgatcaa

SEQ ID NO: 5749069 - DNA, 25 bp, Homo sapien
attgacatcaagcacattggaaaaa

SEQ ID NO: 5749070 - DNA, 25 bp, Homo sapien
ttccattttcacccatttcatttgt

SEQ ID NO: 5749071 - DNA, 25 bp, Homo sapien
ctgagatgggatctatggtaaactt

SEQ ID NO: 5749072 - DNA, 25 bp, Homo sapien
tggacgccacccggaacaggcgcgg

SEQ ID NO: 5749073 - DNA, 25 bp, Homo sapien
cgcgctcacctggaactgcagcagc

SEQ ID NO: 5749074 - DNA, 25 bp, Homo sapien
tgcctcctatatccataaagttatt

SEQ ID NO: 5749075 - DNA, 25 bp, Homo sapien
gcccggcgggttgttctccttcacg

SEQ ID NO: 5749076 - DNA, 25 bp, Homo sapien
ttgatgtccacaagttttaatgaaa

SEQ ID NO: 5749077 - DNA, 25 bp, Homo sapien
cctccagctccagccccaggtcctg

SEQ ID NO: 5749078 - DNA, 25 bp, Homo sapien
cgacaacgcgcgctcgcccacccgc

SEQ ID NO: 5749079 - DNA, 25 bp, Homo sapien
aatatataaagacataatggtagcc

SEQ ID NO: 5749080 - DNA, 25 bp, Homo sapien
atcattgatgtccacaagttttaat

SEQ ID NO: 5749081 - DNA, 25 bp, Homo sapien
gtaggactttgcttcttcataatct

SEQ ID NO: 5749082 - DNA, 25 bp, Homo sapien
gacctgaatctcgtaggactttgct

SEQ ID NO: 5749083 - DNA, 25 bp, Homo sapien
taccaggtattttaatgtacagatg

SEQ ID NO: 5749084 - DNA, 25 bp, Homo sapien
tttctgaatcaaacagaaaccagag

SEQ ID NO: 5749085 - DNA, 25 bp, Homo sapien
gtgccggcgcgttgtcgttctcgtc

SEQ ID NO: 5749086 - DNA, 25 bp, Homo sapien
tgtctttgccaagagtcttgttaga

SEQ ID NO: 5749087 - DNA, 25 bp, Homo sapien
tcgcggtccagggcgctgtccagca

SEQ ID NO: 5749088 - DNA, 25 bp, Homo sapien
gacataatggtagccatttaaaaac

SEQ ID NO: 5749089 - DNA, 25 bp, Homo sapien
gtcaccaccagctcataggctgaca

SEQ ID NO: 5749090 - DNA, 25 bp, Homo sapien
gcgatgcggcccacgaaggtgccgt

SEQ ID NO: 5749091 - DNA, 25 bp, Homo sapien
cgcgctcgcccacccgccgctccac

SEQ ID NO: 5749092 - DNA, 25 bp, Homo sapien
gtagctattcaatatttatttggca

SEQ ID NO: 5749093 - DNA, 25 bp, Homo sapien
cagcgcagtgtacagcagcaccgtg

SEQ ID NO: 5749094 - DNA, 25 bp, Homo sapien
gtgcccgtgagctcaggtttgcccc

SEQ ID NO: 5749095 - DNA, 25 bp, Homo sapien
gcgagcgctgccagtacccagctga

SEQ ID NO: 5749096 - DNA, 25 bp, Homo sapien
gtccgcatcccacgctgacaccgtg

SEQ ID NO: 5749097 - DNA, 25 bp, Homo sapien
caaatttctgaatcaaacagaaacc

SEQ ID NO: 5749098 - DNA, 25 bp, Homo sapien
acaatgtttatttggtagctattca

SEQ ID NO: 5749099 - DNA, 25 bp, Homo sapien
tccacttccacatggaaaacctgca

SEQ ID NO: 5749100 - DNA, 25 bp, Homo sapien
tttactcctatatctgcatcagatg

SEQ ID NO: 5749101 - DNA, 25 bp, Homo sapien
tctagtctctgttaaagtcctgctg

SEQ ID NO: 5749102 - DNA, 25 bp, Homo sapien
gcaccgcagcgcagtgtacagcagc

SEQ ID NO: 5749103 - DNA, 25 bp, Homo sapien
tggtggcccacagtgaaggcgagcc

SEQ ID NO: 5749104 - DNA, 25 bp, Homo sapien
ttcctacgtattctgattctgagag

SEQ ID NO: 5749105 - DNA, 25 bp, Homo sapien
cgctggtggtggcccacagtgaagg

SEQ ID NO: 5749106 - DNA, 25 bp, Homo sapien
tctaggaagaaaaactcactggagc

SEQ ID NO: 5749107 - DNA, 25 bp, Homo sapien
agatgtggcagcccggcgggttgtt

SEQ ID NO: 5749108 - DNA, 25 bp, Homo sapien
caaagattcgcttagttcatcattt

SEQ ID NO: 5749109 - DNA, 25 bp, Homo sapien
aggtttgcccccatcagtagccacc

SEQ ID NO: 5749110 - DNA, 25 bp, Homo sapien
gctgtttctcttctgcggagtctgg

SEQ ID NO: 5749111 - DNA, 25 bp, Homo sapien
cgcgcgctcgcccacccgccgctcc

SEQ ID NO: 5749112 - DNA, 25 bp, Homo sapien
gtattttaatgtacagatggggaat

SEQ ID NO: 5749113 - DNA, 25 bp, Homo sapien
ttgctgcccagaggcggcacgcccg

SEQ ID NO: 5749114 - DNA, 25 bp, Homo sapien
cgtattctgattctgagagctgttt

SEQ ID NO: 5749115 - DNA, 25 bp, Homo sapien
accgagtgaatacacaatctcgctg

SEQ ID NO: 5749116 - DNA, 25 bp, Homo sapien
tttatttggtagctattcaatattt

SEQ ID NO: 5749117 - DNA, 25 bp, Homo sapien
acgagtagtaattcttgaaggtgga

SEQ ID NO: 5749118 - DNA, 25 bp, Homo sapien
tgctgatctcacccgtgtatagccc

SEQ ID NO: 5749119 - DNA, 25 bp, Homo sapien
tgacacgctctcgcggtccagggcg

SEQ ID NO: 5749120 - DNA, 25 bp, Homo sapien
cacacacacaaaaaccaaaacaaca

SEQ ID NO: 5749121 - DNA, 25 bp, Homo sapien
tacatctgtgaagtgaaaattccaa

SEQ ID NO: 5749122 - DNA, 25 bp, Homo sapien
gaaagggacgtggggcgtcagggag

SEQ ID NO: 5749123 - DNA, 25 bp, Homo sapien
ttcacctccacttccacatggaaaa

SEQ ID NO: 5749124 - DNA, 25 bp, Homo sapien
gaagttccatatctttcctacgtat

SEQ ID NO: 5749125 - DNA, 25 bp, Homo sapien
gagcagccgtgtccaggcccctcgg

SEQ ID NO: 5749126 - DNA, 25 bp, Homo sapien
ccgtggctgtcaacgctggttcgcc

SEQ ID NO: 5749127 - DNA, 25 bp, Homo sapien
gccggcgcgttgtcgttctcgtcca

SEQ ID NO: 5749128 - DNA, 25 bp, Homo sapien
tgggaagtgagagagacgttattga

SEQ ID NO: 5749129 - DNA, 25 bp, Homo sapien
ccagagtcgcgatccgacaccgtga

SEQ ID NO: 5749130 - DNA, 25 bp, Homo sapien
gcagatggcgatgatcaggtacacg

SEQ ID NO: 5749131 - DNA, 25 bp, Homo sapien
gatttccccagcacgagagacaaag

SEQ ID NO: 5749132 - DNA, 25 bp, Homo sapien
cacaaacacacacacacaaaaacca

SEQ ID NO: 5749133 - DNA, 25 bp, Homo sapien
ttcacccatttcatttgtaatattt

SEQ ID NO: 5749134 - DNA, 25 bp, Homo sapien
gatcacctccacgtggatgctacat

SEQ ID NO: 5749135 - DNA, 25 bp, Homo sapien
attgggcaaaagttggttcattgtc

SEQ ID NO: 5749136 - DNA, 25 bp, Homo sapien
tttgcctgtatatctaggaagaaaa

SEQ ID NO: 5749137 - DNA, 25 bp, Homo sapien
cgttgtagcctgagtcagcgtccac

SEQ ID NO: 5749138 - DNA, 25 bp, Homo sapien
gagcagaagcgagagcagccgtgtc

SEQ ID NO: 5749139 - DNA, 25 bp, Homo sapien
ctgcgcgcaccttcgccaccacgtg

SEQ ID NO: 5749140 - DNA, 25 bp, Homo sapien
tttatttggcatagcatcagtacat

SEQ ID NO: 5749141 - DNA, 25 bp, Homo sapien
ttggttcattgtcatttacatctaa

SEQ ID NO: 5749142 - DNA, 25 bp, Homo sapien
tgtccagcgatttccccagcacgag

SEQ ID NO: 5749143 - DNA, 25 bp, Homo sapien
ctcgtctagggcacgtgtcgtgctg

SEQ ID NO: 5749144 - DNA, 25 bp, Homo sapien
attttactttgtaaactgattgggc

SEQ ID NO: 5749145 - DNA, 25 bp, Homo sapien
tttacgctccctctctattgaagaa

SEQ ID NO: 5749146 - DNA, 25 bp, Homo sapien
tatttggcatagcatcagtacatct

SEQ ID NO: 5749147 - DNA, 25 bp, Homo sapien
gagagcagccgtgtccaggcccctc

SEQ ID NO: 5749148 - DNA, 25 bp, Homo sapien
agctcgacaacgcgcgctcgcccac

SEQ ID NO: 5749149 - DNA, 25 bp, Homo sapien
cctctagaggaaaccgagaatcaag

SEQ ID NO: 5749150 - DNA, 25 bp, Homo sapien
acaggctggataccgcgcagatggc

SEQ ID NO: 5749151 - DNA, 25 bp, Homo sapien
tggggcgtcagggagcaggtgacat

SEQ ID NO: 5749152 - DNA, 25 bp, Homo sapien
gcgctggagcacaccagcgtgggct

SEQ ID NO: 5749153 - DNA, 25 bp, Homo sapien
ctgatctcacccgtgtatagcccca

SEQ ID NO: 5749154 - DNA, 25 bp, Homo sapien
ttgtaggagagaagagcatttactc

SEQ ID NO: 5749155 - DNA, 25 bp, Homo sapien
acgcggaacgggatgcgagcgctgc

SEQ ID NO: 5749156 - DNA, 25 bp, Homo sapien
ttcaccagcacgagtaggcggtgtc

SEQ ID NO: 5749157 - DNA, 25 bp, Homo sapien
cccgcgcgctcacctggaactgcag

SEQ ID NO: 5749158 - DNA, 25 bp, Homo sapien
ggacggagtagcggagctggccgct

SEQ ID NO: 5749159 - DNA, 25 bp, Homo sapien
gagacaaagattcgcttagttcatc

SEQ ID NO: 5749160 - DNA, 25 bp, Homo sapien
atagtggaggacacatcactaccga

SEQ ID NO: 5749161 - DNA, 25 bp, Homo sapien
cttccacatggaaaacctgcagcgg

SEQ ID NO: 5749162 - DNA, 25 bp, Homo sapien
ctcgctgttcggtccttcatctgca

SEQ ID NO: 5749163 - DNA, 25 bp, Homo sapien
aagaaaaactcactggagctgagct

SEQ ID NO: 5749164 - DNA, 25 bp, Homo sapien
accactaaggtcccatttgccgtat

SEQ ID NO: 5749165 - DNA, 25 bp, Homo sapien
tttacctccagaaggtccccgtgtc

SEQ ID NO: 5749166 - DNA, 25 bp, Homo sapien
gacgccacccggaacaggcgcggca

SEQ ID NO: 5749167 - DNA, 25 bp, Homo sapien
ctgccgcctctgctgcgagtaagac

SEQ ID NO: 5749168 - DNA, 25 bp, Homo sapien
actgcagcagctccacttcctcgtg

SEQ ID NO: 5749169 - DNA, 25 bp, Homo sapien
tgggtgcctggccactttccaccaa

SEQ ID NO: 5749170 - DNA, 25 bp, Homo sapien
tcgtaggactttgcttcttcataat

SEQ ID NO: 5749171 - DNA, 25 bp, Homo sapien
cacaccctctgccgcctctgctgcg

SEQ ID NO: 5749172 - DNA, 25 bp, Homo sapien
ctcactggagctgagcttgtaggag

SEQ ID NO: 5749173 - DNA, 25 bp, Homo sapien
cctcgatggacacgctggtggtggc

SEQ ID NO: 5749174 - DNA, 25 bp, Homo sapien
ggacaccagcttgaaagggacgtgg

SEQ ID NO: 5749175 - DNA, 25 bp, Homo sapien
gtggtccagcggctgcagcgcgtac

SEQ ID NO: 5749176 - DNA, 25 bp, Homo sapien
aataagtatttgaacggtgcccgtg

SEQ ID NO: 5749177 - DNA, 25 bp, Homo sapien
gccaccacgtgccctgcacccaccg

SEQ ID NO: 5749178 - DNA, 25 bp, Homo sapien
gcgctgccagtacccagctgaagct

SEQ ID NO: 5749179 - DNA, 25 bp, Homo sapien
gacgaggccttgggtgcctggccac

SEQ ID NO: 5749180 - DNA, 25 bp, Homo sapien
ccgcgacgaggccttgggtgcctgg

SEQ ID NO: 5749181 - DNA, 25 bp, Homo sapien
tttcactatgtggggacccaaacta

SEQ ID NO: 5749182 - DNA, 25 bp, Homo sapien
tgctgcttctcttattcctccgctt

SEQ ID NO: 5749183 - DNA, 25 bp, Homo sapien
ggacacatcactaccgagtgaatac

SEQ ID NO: 5749184 - DNA, 25 bp, Homo sapien
tttacaaaatgatcattgacatcaa

SEQ ID NO: 5749185 - DNA, 25 bp, Homo sapien
ctaacacggtggccgtggctgtcaa

SEQ ID NO: 5749186 - DNA, 25 bp, Homo sapien
cgctctccgcgtgcaccgaaacgta

SEQ ID NO: 5749187 - DNA, 25 bp, Homo sapien
tcctcaatgttttgatcaaattaga

SEQ ID NO: 5749188 - DNA, 25 bp, Homo sapien
ttcaagaggcaagctggatttgaag

SEQ ID NO: 5749189 - DNA, 25 bp, Homo sapien
tgtttggcctcctcggggacggagt

SEQ ID NO: 5749190 - DNA, 25 bp, Homo sapien
gtaaactgattgggcaaaagttggt

SEQ ID NO: 5749191 - DNA, 25 bp, Homo sapien
aggccatgaggtccgtcttgggggg

SEQ ID NO: 5749192 - DNA, 25 bp, Homo sapien
tcctgacattgaaggggttcctttg

SEQ ID NO: 5749193 - DNA, 25 bp, Homo sapien
ttctgagagctgtttctcttctgcg

SEQ ID NO: 5749194 - DNA, 25 bp, Homo sapien
acgccggcgcgttgtcgttcacgtc

SEQ ID NO: 5749195 - DNA, 25 bp, Homo sapien
cagcggctgcagcgcgtacaccttg

SEQ ID NO: 5749196 - DNA, 25 bp, Homo sapien
gagtcagcctcgtctagggcacgtg

SEQ ID NO: 5749197 - DNA, 25 bp, Homo sapien
gataccgcgcagatggcgatgatca

SEQ ID NO: 5749198 - DNA, 25 bp, Homo sapien
ttgaagttccatatctttcctacgt

SEQ ID NO: 5749199 - DNA, 25 bp, Homo sapien
gaaaattccaaagtcttcaaaatgt

SEQ ID NO: 5749200 - DNA, 25 bp, Homo sapien
tttaatgaaattttacaatgtcctg

SEQ ID NO: 5749201 - DNA, 25 bp, Homo sapien
caatgttttgatcaaattagaagag

SEQ ID NO: 5749202 - DNA, 25 bp, Homo sapien
atgaaattttacaatgtcctgacat

SEQ ID NO: 5749203 - DNA, 25 bp, Homo sapien
tgattgggcaaaagttggttcattg

SEQ ID NO: 5749204 - DNA, 25 bp, Homo sapien
aagacgccattaccaatcctcaatg

SEQ ID NO: 5749205 - DNA, 25 bp, Homo sapien
gtcttcaaaatgtctttgccaagag

SEQ ID NO: 5749206 - DNA, 25 bp, Homo sapien
gaaggtggacaccagcttgaaaggg

SEQ ID NO: 5749207 - DNA, 25 bp, Homo sapien
gcaggtgacatgtccattcgtacca

SEQ ID NO: 5749208 - DNA, 25 bp, Homo sapien
gagcaggtgacatgtccattcgtac

SEQ ID NO: 5749209 - DNA, 25 bp, Homo sapien
acggcaccagctcactcactgcgcc

SEQ ID NO: 5749210 - DNA, 25 bp, Homo sapien
tcatcctgtttgtctaaacaaaaaa

SEQ ID NO: 5749211 - DNA, 25 bp, Homo sapien
tggcatagcatcagtacatctgtga

SEQ ID NO: 5749212 - DNA, 25 bp, Homo sapien
acgaatactgtgtactcaggctgtg

SEQ ID NO: 5749213 - DNA, 25 bp, Homo sapien
tcttgaaggtggacaccagcttgaa

SEQ ID NO: 5749214 - DNA, 25 bp, Homo sapien
ttaataagtatttgaacggtgcccg

SEQ ID NO: 5749215 - DNA, 25 bp, Homo sapien
tgtttctcttctgcggagtctggac

SEQ ID NO: 5749216 - DNA, 25 bp, Homo sapien
ggccgtggctgtcaacgctggttcg

SEQ ID NO: 5749217 - DNA, 25 bp, Homo sapien
cgtgatgagagcaatgacagtgccc

SEQ ID NO: 5749218 - DNA, 25 bp, Homo sapien
aatagaaaacaatgtttatttggta

SEQ ID NO: 5749219 - DNA, 25 bp, Homo sapien
agcgtccactgcgcgcaccttcgcc

SEQ ID NO: 5749220 - DNA, 25 bp, Homo sapien
aagaccagctccccacggcgctgga

SEQ ID NO: 5749221 - DNA, 25 bp, Homo sapien
tggcgggttgtcgttaatgtccttc

SEQ ID NO: 5749222 - DNA, 25 bp, Homo sapien
caccacgtgccctgcacccaccgac

SEQ ID NO: 5749223 - DNA, 25 bp, Homo sapien
cacacacacacaaaaaccaaaacaa

SEQ ID NO: 5749224 - DNA, 25 bp, Homo sapien
cgtgtttggcctcctcggggacgga

SEQ ID NO: 5749225 - DNA, 25 bp, Homo sapien
agagcatttactcctatatctgcat

SEQ ID NO: 5749226 - DNA, 25 bp, Homo sapien
gagtagtaattcttgaaggtggaca

SEQ ID NO: 5749227 - DNA, 25 bp, Homo sapien
aaaatgtctttgccaagagtcttgt

SEQ ID NO: 5749228 - DNA, 25 bp, Homo sapien
tgtgaagtgaaaattccaaagtctt

SEQ ID NO: 5749229 - DNA, 25 bp, Homo sapien
ctgaaggccatgaggtccgtcttgg

SEQ ID NO: 5749230 - DNA, 25 bp, Homo sapien
tcctcccggtcgatccgagaattca

SEQ ID NO: 5749231 - DNA, 25 bp, Homo sapien
tccgacaccgtgatgagagcaatga

SEQ ID NO: 5749232 - DNA, 25 bp, Homo sapien
cccacggcgctggagcacaccagcg

SEQ ID NO: 5749233 - DNA, 25 bp, Homo sapien
tccaccagcgagtaggacaccagcg

SEQ ID NO: 5749234 - DNA, 25 bp, Homo sapien
cgtacaccttgccgctctccgcgtg

SEQ ID NO: 5749235 - DNA, 25 bp, Homo sapien
gagagacaaagattcgcttagttca

SEQ ID NO: 5749236 - DNA, 25 bp, Homo sapien
cacaatctcgctgttcggtccttca

SEQ ID NO: 5749237 - DNA, 25 bp, Homo sapien
gttgcagtgacctgaatctcgtagg

SEQ ID NO: 5749238 - DNA, 25 bp, Homo sapien
tgcccagaggcggcacgcccgcatc

SEQ ID NO: 5749239 - DNA, 25 bp, Homo sapien
cattggaaaaaaggaggaagaattc

SEQ ID NO: 5749240 - DNA, 25 bp, Homo sapien
cttaaccactaaggtcccatttgcc

SEQ ID NO: 5749241 - DNA, 25 bp, Homo sapien
gattcgggaaaccggatagtcttta

SEQ ID NO: 5749242 - DNA, 25 bp, Homo sapien
agctcctccagctccagccccaggt

SEQ ID NO: 5749243 - DNA, 25 bp, Homo sapien
agccccacgcggaacgggatgcgag

SEQ ID NO: 5749244 - DNA, 25 bp, Homo sapien
agcacaccctctgccgcctctgctg

SEQ ID NO: 5749245 - DNA, 25 bp, Homo sapien
accgacttggagaagcaccgggacc

SEQ ID NO: 5749246 - DNA, 25 bp, Homo sapien
ggctgctgagccccaggccatggtc

SEQ ID NO: 5749247 - DNA, 25 bp, Homo sapien
cctggctgagaaggcacaggaggag

SEQ ID NO: 5749248 - DNA, 25 bp, Homo sapien
gccctggatccatccggaggaagct

SEQ ID NO: 5749249 - DNA, 25 bp, Homo sapien
ttctccgaggtgcaggagaaggcgt

SEQ ID NO: 5749250 - DNA, 25 bp, Homo sapien
ggcgctgcggcgacgcctggatcct

SEQ ID NO: 5749251 - DNA, 25 bp, Homo sapien
tgctcttcctggcaggcctgggcca

SEQ ID NO: 5749252 - DNA, 25 bp, Homo sapien
ctcgccccgccccagccccagccag

SEQ ID NO: 5749253 - DNA, 25 bp, Homo sapien
ctgcacaagggcaagcctgtgtcct

SEQ ID NO: 5749254 - DNA, 25 bp, Homo sapien
aaggcgtctgactgggagtacacca

SEQ ID NO: 5749255 - DNA, 25 bp, Homo sapien
acagccaggagagcgcccagctccg

SEQ ID NO: 5749256 - DNA, 25 bp, Homo sapien
accaacctgaacgagcacagctccc

SEQ ID NO: 5749257 - DNA, 25 bp, Homo sapien
ggatggctcgccccgccccagcccc

SEQ ID NO: 5749258 - DNA, 25 bp, Homo sapien
gagctggggcctgggctacgcaggg

SEQ ID NO: 5749259 - DNA, 25 bp, Homo sapien
cttctgccccgtctcccctcaaaga

SEQ ID NO: 5749260 - DNA, 25 bp, Homo sapien
gagtgattgctcgtgtccggccagt

SEQ ID NO: 5749261 - DNA, 25 bp, Homo sapien
ggcatgctgtcagagctgaacctag

SEQ ID NO: 5749262 - DNA, 25 bp, Homo sapien
cccacgggctctacctgaccctgca

SEQ ID NO: 5749263 - DNA, 25 bp, Homo sapien
cgggcccagtccccacctgtcaagt

SEQ ID NO: 5749264 - DNA, 25 bp, Homo sapien
tgctgtgtttatggctggcagaggc

SEQ ID NO: 5749265 - DNA, 25 bp, Homo sapien
cgggccgagccccgggcgctgcggc

SEQ ID NO: 5749266 - DNA, 25 bp, Homo sapien
ctgcaggaggccctcaggagtgtca

SEQ ID NO: 5749267 - DNA, 25 bp, Homo sapien
tggagtcgtccaagaccaagcaggc

SEQ ID NO: 5749268 - DNA, 25 bp, Homo sapien
gcctctgggcagacccaagaaccat

SEQ ID NO: 5749269 - DNA, 25 bp, Homo sapien
cagccagcccggccgcccgcccttt

SEQ ID NO: 5749270 - DNA, 25 bp, Homo sapien
tatgtcatcaagacagtggaggtgg

SEQ ID NO: 5749271 - DNA, 25 bp, Homo sapien
caggaagtgagccgactgcgatctg

SEQ ID NO: 5749272 - DNA, 25 bp, Homo sapien
acatcaacaaggtgtttgagtttgg

SEQ ID NO: 5749273 - DNA, 25 bp, Homo sapien
cccagccctagctcagtgccgagcc

SEQ ID NO: 5749274 - DNA, 25 bp, Homo sapien
atcaacaagtcgctgtcggctctgg

SEQ ID NO: 5749275 - DNA, 25 bp, Homo sapien
tctgggggacgtcattgctgccctg

SEQ ID NO: 5749276 - DNA, 25 bp, Homo sapien
aggcagccagcgggtgggggattct

SEQ ID NO: 5749277 - DNA, 25 bp, Homo sapien
tcagtgccgagcccttagcgtggac

SEQ ID NO: 5749278 - DNA, 25 bp, Homo sapien
tagagtgggagccggcttgtcagac

SEQ ID NO: 5749279 - DNA, 25 bp, Homo sapien
cttagggggtgggcgaggagcctct

SEQ ID NO: 5749280 - DNA, 25 bp, Homo sapien
tctgccccgtctcccctcaaagatg

SEQ ID NO: 5749281 - DNA, 25 bp, Homo sapien
agatgcagtccctggaagaggacaa

SEQ ID NO: 5749282 - DNA, 25 bp, Homo sapien
ccagcgggccctgcagctgctcttc

SEQ ID NO: 5749283 - DNA, 25 bp, Homo sapien
gtccggaccaacttgctgaccttgc

SEQ ID NO: 5749284 - DNA, 25 bp, Homo sapien
cccccagctctgggaccagtagccg

SEQ ID NO: 5749285 - DNA, 25 bp, Homo sapien
cctgctgcaggattcgcttagtggt

SEQ ID NO: 5749286 - DNA, 25 bp, Homo sapien
gaggtggagctgcgactcaaggact

SEQ ID NO: 5749287 - DNA, 25 bp, Homo sapien
taggccaggccatcgaggaggtcaa

SEQ ID NO: 5749288 - DNA, 25 bp, Homo sapien
tcgtgtccggccagtcaccaaagag

SEQ ID NO: 5749289 - DNA, 25 bp, Homo sapien
ctgaggcaggagatgcggcgctgtg

SEQ ID NO: 5749290 - DNA, 25 bp, Homo sapien
ctgtgtttatggctggcagaggcag

SEQ ID NO: 5749291 - DNA, 25 bp, Homo sapien
tgagaacccaggtatcaaccagcgg

SEQ ID NO: 5749292 - DNA, 25 bp, Homo sapien
gctggggcctgggctacgcagggca

SEQ ID NO: 5749293 - DNA, 25 bp, Homo sapien
gggcgtggaaaagataccccagtct

SEQ ID NO: 5749294 - DNA, 25 bp, Homo sapien
gcttgcagagctggccagccccctc

SEQ ID NO: 5749295 - DNA, 25 bp, Homo sapien
gagatggcggaaagcaaaggcatgc

SEQ ID NO: 5749296 - DNA, 25 bp, Homo sapien
gcaagtaccgccgcgagctgcagct

SEQ ID NO: 5749297 - DNA, 25 bp, Homo sapien
ttgctgccctgcgctcccgccaggg

SEQ ID NO: 5749298 - DNA, 25 bp, Homo sapien
aaggactgcctggctgagaaggcac

SEQ ID NO: 5749299 - DNA, 25 bp, Homo sapien
aagtgccacaatgagctcgtgcggc

SEQ ID NO: 5749300 - DNA, 25 bp, Homo sapien
acgctctattccctcaagtttgctg

SEQ ID NO: 5749301 - DNA, 25 bp, Homo sapien
agatgcggcgctgtgaggccgagct

SEQ ID NO: 5749302 - DNA, 25 bp, Homo sapien
ggggatggctcgccccgccccagcc

SEQ ID NO: 5749303 - DNA, 25 bp, Homo sapien
atgctggaggagatgcagtccctgg

SEQ ID NO: 5749304 - DNA, 25 bp, Homo sapien
ccaggtggagatgaaggctgtgcac

SEQ ID NO: 5749305 - DNA, 25 bp, Homo sapien
cagtccccacctgtcaagtatgtca

SEQ ID NO: 5749306 - DNA, 25 bp, Homo sapien
aggaggaggcggcggcgtggagctg

SEQ ID NO: 5749307 - DNA, 25 bp, Homo sapien
acaagggcaagcctgtgtccttcga

SEQ ID NO: 5749308 - DNA, 25 bp, Homo sapien
aaagcaaaggcatgctgtcagagct

SEQ ID NO: 5749309 - DNA, 25 bp, Homo sapien
tgagaactgggcgtggaaaagatac

SEQ ID NO: 5749310 - DNA, 25 bp, Homo sapien
ccaggaggtgcaggccctggtcacc

SEQ ID NO: 5749311 - DNA, 25 bp, Homo sapien
cccaggcccggaaccagcacctgca

SEQ ID NO: 5749312 - DNA, 25 bp, Homo sapien
gaccgagttcaccaacctgaacgag

SEQ ID NO: 5749313 - DNA, 25 bp, Homo sapien
aacatgttcagaaggaaacggtgtc

SEQ ID NO: 5749314 - DNA, 25 bp, Homo sapien
ggctgtgcccagatggcagtgggca

SEQ ID NO: 5749315 - DNA, 25 bp, Homo sapien
ccgagataggccaggccatcgagga

SEQ ID NO: 5749316 - DNA, 25 bp, Homo sapien
acttttggaagcttagccattttta

SEQ ID NO: 5749317 - DNA, 25 bp, Homo sapien
aaggacctgaggccaccaatgctgt

SEQ ID NO: 5749318 - DNA, 25 bp, Homo sapien
gcagagctggccagccccctcctta

SEQ ID NO: 5749319 - DNA, 25 bp, Homo sapien
gccggcttgtcagacgccacagccc

SEQ ID NO: 5749320 - DNA, 25 bp, Homo sapien
gggcagacccaagaaccatggggac

SEQ ID NO: 5749321 - DNA, 25 bp, Homo sapien
gcagctgtatgtaccagggctgact

SEQ ID NO: 5749322 - DNA, 25 bp, Homo sapien
gctcggagcgcgtgggcaagtcggg

SEQ ID NO: 5749323 - DNA, 25 bp, Homo sapien
agccgccctggatccatccggagga

SEQ ID NO: 5749324 - DNA, 25 bp, Homo sapien
ttggaagcttagccatttttactta

SEQ ID NO: 5749325 - DNA, 25 bp, Homo sapien
cgtgctgtgtttatggctggcagag

SEQ ID NO: 5749326 - DNA, 25 bp, Homo sapien
cgctgcggggcctgtggagagtggg

SEQ ID NO: 5749327 - DNA, 25 bp, Homo sapien
ctgctgctcgctcacctgcctggct

SEQ ID NO: 5749328 - DNA, 25 bp, Homo sapien
gagaaacatgttcagaaggaaacgg

SEQ ID NO: 5749329 - DNA, 25 bp, Homo sapien
agacgctctattccctcaagtttgc

SEQ ID NO: 5749330 - DNA, 25 bp, Homo sapien
gtgtttatggctggcagaggcagcc

SEQ ID NO: 5749331 - DNA, 25 bp, Homo sapien
ccctgctgcagcgccaggacccccg

SEQ ID NO: 5749332 - DNA, 25 bp, Homo sapien
ggctatgcagaggcaggtgctgaag

SEQ ID NO: 5749333 - DNA, 25 bp, Homo sapien
ggaggaggagcggctcagtcggcgc

SEQ ID NO: 5749334 - DNA, 25 bp, Homo sapien
agcgagacgctctattccctcaagt

SEQ ID NO: 5749335 - DNA, 25 bp, Homo sapien
ctctgggcagacccaagaaccatgg

SEQ ID NO: 5749336 - DNA, 25 bp, Homo sapien
ggggaggttgagaactgggcgtgga

SEQ ID NO: 5749337 - DNA, 25 bp, Homo sapien
gagagggtgcgctctgtggagctgg

SEQ ID NO: 5749338 - DNA, 25 bp, Homo sapien
cttggctggctcggagcgcgtgggc

SEQ ID NO: 5749339 - DNA, 25 bp, Homo sapien
aggcaggtgctgaaggagatggaac

SEQ ID NO: 5749340 - DNA, 25 bp, Homo sapien
gtcggctctgggggacgtcattgct

SEQ ID NO: 5749341 - DNA, 25 bp, Homo sapien
tccaagctcacctacctgctgcagg

SEQ ID NO: 5749342 - DNA, 25 bp, Homo sapien
agagcgtggacgacatcaacaaggt

SEQ ID NO: 5749343 - DNA, 25 bp, Homo sapien
gctgagccccaggccatggtcccct

SEQ ID NO: 5749344 - DNA, 25 bp, Homo sapien
ggtcacctcttgcattgatggcttc

SEQ ID NO: 5749345 - DNA, 25 bp, Homo sapien
ccgagccccgggcgctgcggcgacg

SEQ ID NO: 5749346 - DNA, 25 bp, Homo sapien
gcgccggcaagacgtacacgatgga

SEQ ID NO: 5749347 - DNA, 25 bp, Homo sapien
ctcagcgagtcccaggcccggaacc

SEQ ID NO: 5749348 - DNA, 25 bp, Homo sapien
ctgctcttctccgaggtgcaggaga

SEQ ID NO: 5749349 - DNA, 25 bp, Homo sapien
gcggcggcgtggagctgcctcctgc

SEQ ID NO: 5749350 - DNA, 25 bp, Homo sapien
ctgcctgtgtgacggatgtgacccc

SEQ ID NO: 5749351 - DNA, 25 bp, Homo sapien
cctcaggaaaaactggagatccggc

SEQ ID NO: 5749352 - DNA, 25 bp, Homo sapien
gggcagatgctggaggagatgcagt

SEQ ID NO: 5749353 - DNA, 25 bp, Homo sapien
ggagatccggctgtgcccagatggc

SEQ ID NO: 5749354 - DNA, 25 bp, Homo sapien
gctcttcttctgccccgtctcccct

SEQ ID NO: 5749355 - DNA, 25 bp, Homo sapien
cagcgaactgggccccgtgaggagg

SEQ ID NO: 5749356 - DNA, 25 bp, Homo sapien
cgacttggagaagcaccgggacctg

SEQ ID NO: 5749357 - DNA, 25 bp, Homo sapien
cagcttgcagagctggccagccccc

SEQ ID NO: 5749358 - DNA, 25 bp, Homo sapien
caagcaggccctcagcgagtcccag

SEQ ID NO: 5749359 - DNA, 25 bp, Homo sapien
aggtagaggcgagagtggaggctct

SEQ ID NO: 5749360 - DNA, 25 bp, Homo sapien
cagcacctgcaggagcaggtggcta

SEQ ID NO: 5749361 - DNA, 25 bp, Homo sapien
ctccgaggtgcaggagaaggcgtct

SEQ ID NO: 5749362 - DNA, 25 bp, Homo sapien
agaactgggcgtggaaaagataccc

SEQ ID NO: 5749363 - DNA, 25 bp, Homo sapien
ggccgagataggccaggccatcgag

SEQ ID NO: 5749364 - DNA, 25 bp, Homo sapien
aagctcattagccaggcccaggaag

SEQ ID NO: 5749365 - DNA, 25 bp, Homo sapien
agctgtcccagctgcagctggagat

SEQ ID NO: 5749366 - DNA, 25 bp, Homo sapien
aggtgtcccccgtggagaagaacac

SEQ ID NO: 5749367 - DNA, 25 bp, Homo sapien
tctacaatgaggtcctcagggacct

SEQ ID NO: 5749368 - DNA, 25 bp, Homo sapien
agcatctagagtgggagccggcttg

SEQ ID NO: 5749369 - DNA, 25 bp, Homo sapien
aggacgtggaacctgggagccacgc

SEQ ID NO: 5749370 - DNA, 25 bp, Homo sapien
ctcggctgtggctctgagtgcaaat

SEQ ID NO: 5749371 - DNA, 25 bp, Homo sapien
cctggatccatccggaggaagctgc

SEQ ID NO: 5749372 - DNA, 25 bp, Homo sapien
ggtggagctgcgactcaaggactgc

SEQ ID NO: 5749373 - DNA, 25 bp, Homo sapien
ccgagttcaccaacctgaacgagca

SEQ ID NO: 5749374 - DNA, 25 bp, Homo sapien
gggggcaccgacttggagaagcacc

SEQ ID NO: 5749375 - DNA, 25 bp, Homo sapien
gaagcccccacgggctctacctgac

SEQ ID NO: 5749376 - DNA, 25 bp, Homo sapien
gtggagagtgggccgggccccggag

SEQ ID NO: 5749377 - DNA, 25 bp, Homo sapien
tgccgagcccttagcgtggactggg

SEQ ID NO: 5749378 - DNA, 25 bp, Homo sapien
agcgcgtgggcaagtcgggggccga

SEQ ID NO: 5749379 - DNA, 25 bp, Homo sapien
ccctgcagctgctcttctccgaggt

SEQ ID NO: 5749380 - DNA, 25 bp, Homo sapien
ggggaaggacctgaggccaccaatg

SEQ ID NO: 5749381 - DNA, 25 bp, Homo sapien
ggagggttcccgcagctggggggtg

SEQ ID NO: 5749382 - DNA, 25 bp, Homo sapien
gggttggtggcaccaatggcagccc

SEQ ID NO: 5749383 - DNA, 25 bp, Homo sapien
tgcggtgacgaggactccagtgccc

SEQ ID NO: 5749384 - DNA, 25 bp, Homo sapien
ttggagaagcaccgggacctgctga

SEQ ID NO: 5749385 - DNA, 25 bp, Homo sapien
aggtggagatgaaggctgtgcacga

SEQ ID NO: 5749386 - DNA, 25 bp, Homo sapien
tgcgtgacagccacgagaccattgc

SEQ ID NO: 5749387 - DNA, 25 bp, Homo sapien
cagctctgggaccagtagccgccct

SEQ ID NO: 5749388 - DNA, 25 bp, Homo sapien
ctgtatgtaccagggctgactgagt

SEQ ID NO: 5749389 - DNA, 25 bp, Homo sapien
tcaaggccgagataggccaggccat

SEQ ID NO: 5749390 - DNA, 25 bp, Homo sapien
cgcgctgctcatcgtgacggtgcga

SEQ ID NO: 5749391 - DNA, 25 bp, Homo sapien
ggaagctgcagccctcggggaagtc

SEQ ID NO: 5749392 - DNA, 25 bp, Homo sapien
ggcctcccgccacggggccgtgctg

SEQ ID NO: 5749393 - DNA, 25 bp, Homo sapien
tgctgcaggattcgcttagtggtga

SEQ ID NO: 5749394 - DNA, 25 bp, Homo sapien
cggaaaggcgggggtggctgctctt

SEQ ID NO: 5749395 - DNA, 25 bp, Homo sapien
tgagaaggcacaggaggaggagcgg

SEQ ID NO: 5749396 - DNA, 25 bp, Homo sapien
ctcacaccagctgaccgcgcggctc

SEQ ID NO: 5749397 - DNA, 25 bp, Homo sapien
gaggtggagtcgtccaagaccaagc

SEQ ID NO: 5749398 - DNA, 25 bp, Homo sapien
agctgctcttctccgaggtgcagga

SEQ ID NO: 5749399 - DNA, 25 bp, Homo sapien
ccaatggcagccctccccgcccctc

SEQ ID NO: 5749400 - DNA, 25 bp, Homo sapien
agtggaggtggagtcgtccaagacc

SEQ ID NO: 5749401 - DNA, 25 bp, Homo sapien
ccggccagtcaccaaagaggatggg

SEQ ID NO: 5749402 - DNA, 25 bp, Homo sapien
cagcgagtcccaggcccggaaccag

SEQ ID NO: 5749403 - DNA, 25 bp, Homo sapien
ggaaggacctgaggccaccaatgct

SEQ ID NO: 5749404 - DNA, 25 bp, Homo sapien
gtcccaggcccggaaccagcacctg

SEQ ID NO: 5749405 - DNA, 25 bp, Homo sapien
gctctgagtgcaaattgcatgggcg

SEQ ID NO: 5749406 - DNA, 25 bp, Homo sapien
ggtgcaggccctggtcacctcttgc

SEQ ID NO: 5749407 - DNA, 25 bp, Homo sapien
ttcgagctggacaaggtcttctccc

SEQ ID NO: 5749408 - DNA, 25 bp, Homo sapien
cggcactgcggaccctcaccaacga

SEQ ID NO: 5749409 - DNA, 25 bp, Homo sapien
tgagttccaagtgcagagcgtggac

SEQ ID NO: 5749410 - DNA, 25 bp, Homo sapien
gcggaaagcaaaggcatgctgtcag

SEQ ID NO: 5749411 - DNA, 25 bp, Homo sapien
ccggggatggctcgccccgccccag

SEQ ID NO: 5749412 - DNA, 25 bp, Homo sapien
aagtgcagctcgcccagccctagct

SEQ ID NO: 5749413 - DNA, 25 bp, Homo sapien
ggacctgctgatggtggagaatgag

SEQ ID NO: 5749414 - DNA, 25 bp, Homo sapien
ggccatcagcgaactgggccccgtg

SEQ ID NO: 5749415 - DNA, 25 bp, Homo sapien
ggcaccaatggcagccctccccgcc

SEQ ID NO: 5749416 - DNA, 25 bp, Homo sapien
cggggaagctgaacctggtggactt

SEQ ID NO: 5749417 - DNA, 25 bp, Homo sapien
ccgcctgcgggaggcgcagcacatc

SEQ ID NO: 5749418 - DNA, 25 bp, Homo sapien
gaacttttggaagcttagccatttt

SEQ ID NO: 5749419 - DNA, 25 bp, Homo sapien
agctgcctcctgccggcgggccggg

SEQ ID NO: 5749420 - DNA, 25 bp, Homo sapien
gttcaccaacctgaacgagcacagc

SEQ ID NO: 5749421 - DNA, 25 bp, Homo sapien
gtgcgctctgtggagctggggcctg

SEQ ID NO: 5749422 - DNA, 25 bp, Homo sapien
gtcattgctgccctgcgctcccgcc

SEQ ID NO: 5749423 - DNA, 25 bp, Homo sapien
cctgcccaggttgtgagcacagcca

SEQ ID NO: 5749424 - DNA, 25 bp, Homo sapien
cctcaaagatgagaaacatgttcag

SEQ ID NO: 5749425 - DNA, 25 bp, Homo sapien
gctgctgcgcaagtaccgccgcgag

SEQ ID NO: 5749426 - DNA, 25 bp, Homo sapien
tgcccttccgcaactccaagctcac

SEQ ID NO: 5749427 - DNA, 25 bp, Homo sapien
caaattgcatgggcggaaaggcggg

SEQ ID NO: 5749428 - DNA, 25 bp, Homo sapien
cttgcagccggcactgcggaccctc

SEQ ID NO: 5749429 - DNA, 25 bp, Homo sapien
ctcagcttgcagagctggccagccc

SEQ ID NO: 5749430 - DNA, 25 bp, Homo sapien
gctggctcggagcgcgtgggcaagt

SEQ ID NO: 5749431 - DNA, 25 bp, Homo sapien
gggcagagcttgggtcctggtcaag

SEQ ID NO: 5749432 - DNA, 25 bp, Homo sapien
gctgcctggtgccccgaggaggctg

SEQ ID NO: 5749433 - DNA, 25 bp, Homo sapien
gctgcggagatctacaatgaggtcc

SEQ ID NO: 5749434 - DNA, 25 bp, Homo sapien
atgtacgagtcagagctggagcggg

SEQ ID NO: 5749435 - DNA, 25 bp, Homo sapien
gaccattgccagcctgcgggcccag

SEQ ID NO: 5749436 - DNA, 25 bp, Homo sapien
cagtgggcagctgtatgtaccaggg

SEQ ID NO: 5749437 - DNA, 25 bp, Homo sapien
tggaacctgggagccacgccctcgc

SEQ ID NO: 5749438 - DNA, 25 bp, Homo sapien
gtgtccttcgagctggacaaggtct

SEQ ID NO: 5749439 - DNA, 25 bp, Homo sapien
agtgtggaggagggtgggcctctca

SEQ ID NO: 5749440 - DNA, 25 bp, Homo sapien
cccactgctgctgcaggaggccctc

SEQ ID NO: 5749441 - DNA, 25 bp, Homo sapien
gagtcccaggcccggaaccagcacc

SEQ ID NO: 5749442 - DNA, 25 bp, Homo sapien
gactgaggcaggagatgcggcgctg

SEQ ID NO: 5749443 - DNA, 25 bp, Homo sapien
ttccaagtgcagagcgtggacgaca

SEQ ID NO: 5749444 - DNA, 25 bp, Homo sapien
gctgaacctagaggtgcagcagaag

SEQ ID NO: 5749445 - DNA, 25 bp, Homo sapien
ccgtgacaagctgtcccagctgcag

SEQ ID NO: 5749446 - DNA, 25 bp, Homo sapien
gtcgctgtcggctctgggggacgtc

SEQ ID NO: 5749447 - DNA, 25 bp, Homo sapien
atggcctcccgccacggggccgtgc

SEQ ID NO: 5749448 - DNA, 25 bp, Homo sapien
tgggcgaggagcctctgggcagacc

SEQ ID NO: 5749449 - DNA, 25 bp, Homo sapien
cgaggcgtggactgcagcacaggcc

SEQ ID NO: 5749450 - DNA, 25 bp, Homo sapien
gaagctgaacctggtggacttggct

SEQ ID NO: 5749451 - DNA, 25 bp, Homo sapien
gccagagcccaggtggagatgaagg

SEQ ID NO: 5749452 - DNA, 25 bp, Homo sapien
cgccacagccctcggcacgggccca

SEQ ID NO: 5749453 - DNA, 25 bp, Homo sapien
tgcccgaagtgcagctcgcccagcc

SEQ ID NO: 5749454 - DNA, 25 bp, Homo sapien
cgggacctgctgatggtggagaatg

SEQ ID NO: 5749455 - DNA, 25 bp, Homo sapien
ggctccgggcgcagattgccatgta

SEQ ID NO: 5749456 - DNA, 25 bp, Homo sapien
gtcccccgtggagaagaacactagc

SEQ ID NO: 5749457 - DNA, 25 bp, Homo sapien
gcaggacgtggaacctgggagccac

SEQ ID NO: 5749458 - DNA, 25 bp, Homo sapien
cgtggaacctgggagccacgccctc

SEQ ID NO: 5749459 - DNA, 25 bp, Homo sapien
acgtcattgctgccctgcgctcccg

SEQ ID NO: 5749460 - DNA, 25 bp, Homo sapien
gactgggctggccccggaagccccc

SEQ ID NO: 5749461 - DNA, 25 bp, Homo sapien
gagagcgcccagctccgtgacaagc

SEQ ID NO: 5749462 - DNA, 25 bp, Homo sapien
cagccggcactgcggaccctcacca

SEQ ID NO: 5749463 - DNA, 25 bp, Homo sapien
gcacaaagccagcaggtccctgccc

SEQ ID NO: 5749464 - DNA, 25 bp, Homo sapien
aggagcaggtggctatgcagaggca

SEQ ID NO: 5749465 - DNA, 25 bp, Homo sapien
gccgtgctgtgtttatggctggcag

SEQ ID NO: 5749466 - DNA, 25 bp, Homo sapien
ttgcagagctggccagccccctcct

SEQ ID NO: 5749467 - DNA, 25 bp, Homo sapien
aatctagcaggcgtccggaccaact

SEQ ID NO: 5749468 - DNA, 25 bp, Homo sapien
ccgcgagctgcagctgcgtaagaag

SEQ ID NO: 5749469 - DNA, 25 bp, Homo sapien
gctgcagctggagatggcggaaagc

SEQ ID NO: 5749470 - DNA, 25 bp, Homo sapien
gctcgtgtccggccagtcaccaaag

SEQ ID NO: 5749471 - DNA, 25 bp, Homo sapien
agattgccatgtacgagtcagagct

SEQ ID NO: 5749472 - DNA, 25 bp, Homo sapien
gctcaagcggcaggtgcgcggcttc

SEQ ID NO: 5749473 - DNA, 25 bp, Homo sapien
acctgaccctgcaggtagaacacct

SEQ ID NO: 5749474 - DNA, 25 bp, Homo sapien
acgaccgagttcaccaacctgaacg

SEQ ID NO: 5749475 - DNA, 25 bp, Homo sapien
gcgggtgggggattctgctgctcgc

SEQ ID NO: 5749476 - DNA, 25 bp, Homo sapien
ctgggcgtggaaaagataccccagt

SEQ ID NO: 5749477 - DNA, 25 bp, Homo sapien
cccaggaagtgagccgactgcgatc

SEQ ID NO: 5749478 - DNA, 25 bp, Homo sapien
tgactgggagtacaccatcaccgtc

SEQ ID NO: 5749479 - DNA, 25 bp, Homo sapien
tggcctgtccctgctgcagcgccag

SEQ ID NO: 5749480 - DNA, 25 bp, Homo sapien
agaccctcatggtggtacaggtgtc

SEQ ID NO: 5749481 - DNA, 25 bp, Homo sapien
tggtggcaccaatggcagccctccc

SEQ ID NO: 5749482 - DNA, 25 bp, Homo sapien
gactccatcatccacctgctgcaca

SEQ ID NO: 5749483 - DNA, 25 bp, Homo sapien
ctgaacctggtggacttggctggct

SEQ ID NO: 5749484 - DNA, 25 bp, Homo sapien
gcagagcttgggtcctggtcaagcc

SEQ ID NO: 5749485 - DNA, 25 bp, Homo sapien
ggcccggaaccagcacctgcaggag

SEQ ID NO: 5749486 - DNA, 25 bp, Homo sapien
agatggcagtgggcagctgtatgta

SEQ ID NO: 5749487 - DNA, 25 bp, Homo sapien
agaggcgagagtggaggctcttctt

SEQ ID NO: 5749488 - DNA, 25 bp, Homo sapien
agcccccacgggctctacctgaccc

SEQ ID NO: 5749489 - DNA, 25 bp, Homo sapien
gaggagcggctcagtcggcgcctgc

SEQ ID NO: 5749490 - DNA, 25 bp, Homo sapien
ctcaggagtgtcaaggccgagatag

SEQ ID NO: 5749491 - DNA, 25 bp, Homo sapien
ctagcgagacgctctattccctcaa

SEQ ID NO: 5749492 - DNA, 25 bp, Homo sapien
tcaaccagcgggccctgcagctgct

SEQ ID NO: 5749493 - DNA, 25 bp, Homo sapien
gagggcagccgcctgcgggaggcgc

SEQ ID NO: 5749494 - DNA, 25 bp, Homo sapien
tgcagcgccaggacccccggaggta

SEQ ID NO: 5749495 - DNA, 25 bp, Homo sapien
acagcaacaaccaggagctgctgcg

SEQ ID NO: 5749496 - DNA, 25 bp, Homo sapien
ccagacgggcgccggcaagacgtac

SEQ ID NO: 5749497 - DNA, 25 bp, Homo sapien
gctgtgcacgagaatctagcaggcg

SEQ ID NO: 5749498 - DNA, 25 bp, Homo sapien
cagggctgactgagttccaagtgca

SEQ ID NO: 5749499 - DNA, 25 bp, Homo sapien
cccgaagtgcagctcgcccagccct

SEQ ID NO: 5749500 - DNA, 25 bp, Homo sapien
gcaggagcaggtggctatgcagagg

SEQ ID NO: 5749501 - DNA, 25 bp, Homo sapien
tgactttcgatgccgacgacgactc

SEQ ID NO: 5749502 - DNA, 25 bp, Homo sapien
ggagtgtggaggagggtgggcctct

SEQ ID NO: 5749503 - DNA, 25 bp, Homo sapien
gacgacatcaacaaggtgtttgagt

SEQ ID NO: 5749504 - DNA, 25 bp, Homo sapien
agagcctcaggaaaaactggagatc

SEQ ID NO: 5749505 - DNA, 25 bp, Homo sapien
ctgtgtccttcgagctggacaaggt

SEQ ID NO: 5749506 - DNA, 25 bp, Homo sapien
actgcgatctgagctggggggcacc

SEQ ID NO: 5749507 - DNA, 25 bp, Homo sapien
ggctgaaagggaacatccgagtgat

SEQ ID NO: 5749508 - DNA, 25 bp, Homo sapien
tgaacctagaggtgcagcagaagac

SEQ ID NO: 5749509 - DNA, 25 bp, Homo sapien
accgccgcgagctgcagctgcgtaa

SEQ ID NO: 5749510 - DNA, 25 bp, Homo sapien
ctggtcacctcttgcattgatggct

SEQ ID NO: 5749511 - DNA, 25 bp, Homo sapien
cgggctctacctgaccctgcaggta

SEQ ID NO: 5749512 - DNA, 25 bp, Homo sapien
ggcaggagatgcggcgctgtgaggc

SEQ ID NO: 5749513 - DNA, 25 bp, Homo sapien
tgctcgctcacctgcctggctcgct

SEQ ID NO: 5749514 - DNA, 25 bp, Homo sapien
aggcggcggcgtggagctgcctcct

SEQ ID NO: 5749515 - DNA, 25 bp, Homo sapien
cctgctagggaaagagcctcaggaa

SEQ ID NO: 5749516 - DNA, 25 bp, Homo sapien
aaccgggccattgaggaggcctttg

SEQ ID NO: 5749517 - DNA, 25 bp, Homo sapien
ctccgcaccacggggaagctgaacc

SEQ ID NO: 5749518 - DNA, 25 bp, Homo sapien
gtctcccctcaaagatgagaaacat

SEQ ID NO: 5749519 - DNA, 25 bp, Homo sapien
actttcgatgccgacgacgactcca

SEQ ID NO: 5749520 - DNA, 25 bp, Homo sapien
cggcaagacgtacacgatggagggg

SEQ ID NO: 5749521 - DNA, 25 bp, Homo sapien
cagagctgaacctagaggtgcagca

SEQ ID NO: 5749522 - DNA, 25 bp, Homo sapien
gggcgcagattgccatgtacgagtc

SEQ ID NO: 5749523 - DNA, 25 bp, Homo sapien
ctgcggcgacgcctggatcctgcct

SEQ ID NO: 5749524 - DNA, 25 bp, Homo sapien
ctgggcctgaagctgggccctcact

SEQ ID NO: 5749525 - DNA, 25 bp, Homo sapien
tgcaagagctgcgcacaaagccagc

SEQ ID NO: 5749526 - DNA, 25 bp, Homo sapien
tcgcacgaccgagttcaccaacctg

SEQ ID NO: 5749527 - DNA, 25 bp, Homo sapien
ggcacaggaggaggagcggctcagt

SEQ ID NO: 5749528 - DNA, 25 bp, Homo sapien
gcctggatcctgcctccgccaggcc

SEQ ID NO: 5749529 - DNA, 25 bp, Homo sapien
cgactacaatgggctcaagcggcag

SEQ ID NO: 5749530 - DNA, 25 bp, Homo sapien
cggcttcccactgctgctgcaggag

SEQ ID NO: 5749531 - DNA, 25 bp, Homo sapien
cgaggagcctctgggcagacccaag

SEQ ID NO: 5749532 - DNA, 25 bp, Homo sapien
cgccccgccccagccccagccagcc

SEQ ID NO: 5749533 - DNA, 25 bp, Homo sapien
ggccccgtgaggagggcgggagtgt

SEQ ID NO: 5749534 - DNA, 25 bp, Homo sapien
ccggctggctgaggtggagctgcga

SEQ ID NO: 5749535 - DNA, 25 bp, Homo sapien
acctgcaggagcaggtggctatgca

SEQ ID NO: 5749536 - DNA, 25 bp, Homo sapien
gggctgactgagttccaagtgcaga

SEQ ID NO: 5749537 - DNA, 25 bp, Homo sapien
ctcgaattttcttccctctgaaatc

SEQ ID NO: 5749538 - DNA, 25 bp, Homo sapien
agagctcacaccagctgaccgcgcg

SEQ ID NO: 5749539 - DNA, 25 bp, Homo sapien
caacaagtcgctgtcggctctgggg

SEQ ID NO: 5749540 - DNA, 25 bp, Homo sapien
ctgctgcagcgccaggacccccgga

SEQ ID NO: 5749541 - DNA, 25 bp, Homo sapien
cttcctggcaggcctgggccatcag

SEQ ID NO: 5749542 - DNA, 25 bp, Homo sapien
gaccggctggctgaggtggagctgc

SEQ ID NO: 5749543 - DNA, 25 bp, Homo sapien
ggagagtgggccgggccccggagcc

SEQ ID NO: 5749544 - DNA, 25 bp, Homo sapien
cacctacctgctgcaggattcgctt

SEQ ID NO: 5749545 - DNA, 25 bp, Homo sapien
tgatggtggagaatgagcgactgag

SEQ ID NO: 5749546 - DNA, 25 bp, Homo sapien
cgtgcccttccgcaactccaagctc

SEQ ID NO: 5749547 - DNA, 25 bp, Homo sapien
cgggagtgtggaggagggtgggcct

SEQ ID NO: 5749548 - DNA, 25 bp, Homo sapien
cctcatggtggtacaggtgtccccc

SEQ ID NO: 5749549 - DNA, 25 bp, Homo sapien
tcttcttctgccccgtctcccctca

SEQ ID NO: 5749550 - DNA, 25 bp, Homo sapien
agctgggccctcactggcctgtccc

SEQ ID NO: 5749551 - DNA, 25 bp, Homo sapien
ccattgccagcctgcgggcccagtc

SEQ ID NO: 5749552 - DNA, 25 bp, Homo sapien
gccacggggccgtgctgtgtttatg

SEQ ID NO: 5749553 - DNA, 25 bp, Homo sapien
aagcggcaggtgcgcggcttcccac

SEQ ID NO: 5749554 - DNA, 25 bp, Homo sapien
gccggcaagacgtacacgatggagg

SEQ ID NO: 5749555 - DNA, 25 bp, Homo sapien
aacagcagctgcagagctcacacca

SEQ ID NO: 5749556 - DNA, 25 bp, Homo sapien
cgcccctctccttcaaggagggttc

SEQ ID NO: 5749557 - DNA, 25 bp, Homo sapien
tgccccgtctcccctcaaagatgag

SEQ ID NO: 5749558 - DNA, 25 bp, Homo sapien
gtggaggctcttcttctgccccgtc

SEQ ID NO: 5749559 - DNA, 25 bp, Homo sapien
atggtggagaatgagcgactgaggc

SEQ ID NO: 5749560 - DNA, 25 bp, Homo sapien
gcgcggctccgggcgcagattgcca

SEQ ID NO: 5749561 - DNA, 25 bp, Homo sapien
tctagcaggcgtccggaccaacttg

SEQ ID NO: 5749562 - DNA, 25 bp, Homo sapien
cttgcattgatggcttcaatgtctg

SEQ ID NO: 5749563 - DNA, 25 bp, Homo sapien
gctggccccggaagcccccacgggc

SEQ ID NO: 5749564 - DNA, 25 bp, Homo sapien
gagatctacaatgaggtcctcaggg

SEQ ID NO: 5749565 - DNA, 25 bp, Homo sapien
tgagccccaggccatggtcccctct

SEQ ID NO: 5749566 - DNA, 25 bp, Homo sapien
gctctgggaccagtagccgccctgg

SEQ ID NO: 5749567 - DNA, 25 bp, Homo sapien
accaatgctgtgactttcgatgccg

SEQ ID NO: 5749568 - DNA, 25 bp, Homo sapien
gccacgtgcccttccgcaactccaa

SEQ ID NO: 5749569 - DNA, 25 bp, Homo sapien
gtagccgccctggatccatccggag

SEQ ID NO: 5749570 - DNA, 25 bp, Homo sapien
caggtatcaaccagcgggccctgca

SEQ ID NO: 5749571 - DNA, 25 bp, Homo sapien
gctgcagcgccaggacccccggagg

SEQ ID NO: 5749572 - DNA, 25 bp, Homo sapien
tgcagctggagatggcggaaagcaa

SEQ ID NO: 5749573 - DNA, 25 bp, Homo sapien
aggcgagagtggaggctcttcttct

SEQ ID NO: 5749574 - DNA, 25 bp, Homo sapien
caggccctcagcgagtcccaggccc

SEQ ID NO: 5749575 - DNA, 25 bp, Homo sapien
cccaggtatcaaccagcgggccctg

SEQ ID NO: 5749576 - DNA, 25 bp, Homo sapien
ggagcggctcagtcggcgcctgcgt

SEQ ID NO: 5749577 - DNA, 25 bp, Homo sapien
gagcccaggtggagatgaaggctgt

SEQ ID NO: 5749578 - DNA, 25 bp, Homo sapien
acgagcacagctcccgctcgcacgc

SEQ ID NO: 5749579 - DNA, 25 bp, Homo sapien
gtttatggctggcagaggcagccag

SEQ ID NO: 5749580 - DNA, 25 bp, Homo sapien
tccctgcccaggttgtgagcacagc

SEQ ID NO: 5749581 - DNA, 25 bp, Homo sapien
tcacccaggctttctcggcccctct

SEQ ID NO: 5749582 - DNA, 25 bp, Homo sapien
ggctcgccccgccccagccccagcc

SEQ ID NO: 5749583 - DNA, 25 bp, Homo sapien
ggcgggggtggctgctcttcctggc

SEQ ID NO: 5749584 - DNA, 25 bp, Homo sapien
gagcgactgaggcaggagatgcggc

SEQ ID NO: 5749585 - DNA, 25 bp, Homo sapien
tgggccatcagcgaactgggccccg

SEQ ID NO: 5749586 - DNA, 25 bp, Homo sapien
gctcagtcggcgcctgcgtgacagc

SEQ ID NO: 5749587 - DNA, 25 bp, Homo sapien
tcggcccctctcctcagcttgcaga

SEQ ID NO: 5749588 - DNA, 25 bp, Homo sapien
gcgactgaggcaggagatgcggcgc

SEQ ID NO: 5749589 - DNA, 25 bp, Homo sapien
tcggagcgcgtgggcaagtcggggg

SEQ ID NO: 5749590 - DNA, 25 bp, Homo sapien
tggaggagatgcagtccctggaaga

SEQ ID NO: 5749591 - DNA, 25 bp, Homo sapien
actgcctggctgagaaggcacagga

SEQ ID NO: 5749592 - DNA, 25 bp, Homo sapien
ccccgtctcccctcaaagatgagaa

SEQ ID NO: 5749593 - DNA, 25 bp, Homo sapien
gtagaggcgagagtggaggctcttc

SEQ ID NO: 5749594 - DNA, 25 bp, Homo sapien
aggaggtgcaggccctggtcacctc

SEQ ID NO: 5749595 - DNA, 25 bp, Homo sapien
actgagttccaagtgcagagcgtgg

SEQ ID NO: 5749596 - DNA, 25 bp, Homo sapien
cgggccctgcagctgctcttctccg

SEQ ID NO: 5749597 - DNA, 25 bp, Homo sapien
tgcaaattgcatgggcggaaaggcg

SEQ ID NO: 5749598 - DNA, 25 bp, Homo sapien
cctgcctccgccaggccggctgcct

SEQ ID NO: 5749599 - DNA, 25 bp, Homo sapien
gcaggacgtgttccaggaggtgcag

SEQ ID NO: 5749600 - DNA, 25 bp, Homo sapien
caatgtctgcatctttgcgtacggc

SEQ ID NO: 5749601 - DNA, 25 bp, Homo sapien
agcgtggacgacatcaacaaggtgt

SEQ ID NO: 5749602 - DNA, 25 bp, Homo sapien
tcctggcaggcctgggccatcagcg

SEQ ID NO: 5749603 - DNA, 25 bp, Homo sapien
ggagatgcagtccctggaagaggac

SEQ ID NO: 5749604 - DNA, 25 bp, Homo sapien
tgcggaccctcaccaacgactacaa

SEQ ID NO: 5749605 - DNA, 25 bp, Homo sapien
cacaccggcccggggaggttgagaa

SEQ ID NO: 5749606 - DNA, 25 bp, Homo sapien
cagagctggagcgggcccatgggca

SEQ ID NO: 5749607 - DNA, 25 bp, Homo sapien
ggtatcaaccagcgggccctgcagc

SEQ ID NO: 5749608 - DNA, 25 bp, Homo sapien
gaagaacactagcgagacgctctat

SEQ ID NO: 5749609 - DNA, 25 bp, Homo sapien
cattgctgccctgcgctcccgccag

SEQ ID NO: 5749610 - DNA, 25 bp, Homo sapien
ggtggacttggctggctcggagcgc

SEQ ID NO: 5749611 - DNA, 25 bp, Homo sapien
gcaagacgtacacgatggaggggac

SEQ ID NO: 5749612 - DNA, 25 bp, Homo sapien
gcctccgcaccacggggaagctgaa

SEQ ID NO: 5749613 - DNA, 25 bp, Homo sapien
gaccgctgagaacccaggtatcaac

SEQ ID NO: 5749614 - DNA, 25 bp, Homo sapien
atccggctgtgcccagatggcagtg

SEQ ID NO: 5749615 - DNA, 25 bp, Homo sapien
acagctcccgctcgcacgcgctgct

SEQ ID NO: 5749616 - DNA, 25 bp, Homo sapien
caagagctgcgcacaaagccagcag

SEQ ID NO: 5749617 - DNA, 25 bp, Homo sapien
aacccaggtatcaaccagcgggccc

SEQ ID NO: 5749618 - DNA, 25 bp, Homo sapien
ccaggctttctcggcccctctcctc

SEQ ID NO: 5749619 - DNA, 25 bp, Homo sapien
cacctgctgcacaagggcaagcctg

SEQ ID NO: 5749620 - DNA, 25 bp, Homo sapien
ccgccacggggccgtgctgtgttta

SEQ ID NO: 5749621 - DNA, 25 bp, Homo sapien
gagtggaggctcttcttctgccccg

SEQ ID NO: 5749622 - DNA, 25 bp, Homo sapien
ttctgctgctcgctcacctgcctgg

SEQ ID NO: 5749623 - DNA, 25 bp, Homo sapien
gaggatggggaaggacctgaggcca

SEQ ID NO: 5749624 - DNA, 25 bp, Homo sapien
ctgtcaagtatgtcatcaagacagt

SEQ ID NO: 5749625 - DNA, 25 bp, Homo sapien
gtccctgctgcagcgccaggacccc

SEQ ID NO: 5749626 - DNA, 25 bp, Homo sapien
tggaagaggacaagaaccgggccat

SEQ ID NO: 5749627 - DNA, 25 bp, Homo sapien
gcccatgggcagatgctggaggaga

SEQ ID NO: 5749628 - DNA, 25 bp, Homo sapien
gggcccatgggcagatgctggagga

SEQ ID NO: 5749629 - DNA, 25 bp, Homo sapien
ggtgacagcaagaccctcatggtgg

SEQ ID NO: 5749630 - DNA, 25 bp, Homo sapien
cctctcgcaggacgtggaacctggg

SEQ ID NO: 5749631 - DNA, 25 bp, Homo sapien
gagttcaccaacctgaacgagcaca

SEQ ID NO: 5749632 - DNA, 25 bp, Homo sapien
cgggggtggctgctcttcctggcag

SEQ ID NO: 5749633 - DNA, 25 bp, Homo sapien
cctgcgggcccagtccccacctgtc

SEQ ID NO: 5749634 - DNA, 25 bp, Homo sapien
gctgtgactttcgatgccgacgacg

SEQ ID NO: 5749635 - DNA, 25 bp, Homo sapien
gggacctgctagggaaagagcctca

SEQ ID NO: 5749636 - DNA, 25 bp, Homo sapien
agaaccgggccattgaggaggcctt

SEQ ID NO: 5749637 - DNA, 25 bp, Homo sapien
tggagctgcgactcaaggactgcct

SEQ ID NO: 5749638 - DNA, 25 bp, Homo sapien
tgtgcacgagaatctagcaggcgtc

SEQ ID NO: 5749639 - DNA, 25 bp, Homo sapien
gggtgggggattctgctgctcgctc

SEQ ID NO: 5749640 - DNA, 25 bp, Homo sapien
ggggccgagggcagccgcctgcggg

SEQ ID NO: 5749641 - DNA, 25 bp, Homo sapien
gaactgggccccgtgaggagggcgg

SEQ ID NO: 5749642 - DNA, 25 bp, Homo sapien
ggggtggctgctcttcctggcaggc

SEQ ID NO: 5749643 - DNA, 25 bp, Homo sapien
aaccaggagctgctgcgcaagtacc

SEQ ID NO: 5749644 - DNA, 25 bp, Homo sapien
tgcaggagaaggcgtctgactggga

SEQ ID NO: 5749645 - DNA, 25 bp, Homo sapien
agcaggtccctgcccaggttgtgag

SEQ ID NO: 5749646 - DNA, 25 bp, Homo sapien
gaggagatgcagtccctggaagagg

SEQ ID NO: 5749647 - DNA, 25 bp, Homo sapien
ggcgcagcacatcaacaagtcgctg

SEQ ID NO: 5749648 - DNA, 25 bp, Homo sapien
gtgacaagctgtcccagctgcagct

SEQ ID NO: 5749649 - DNA, 25 bp, Homo sapien
ggaggggaccgctgagaacccaggt

SEQ ID NO: 5749650 - DNA, 25 bp, Homo sapien
gacggatgtgaccccgctgggcctg

SEQ ID NO: 5749651 - DNA, 25 bp, Homo sapien
gcgtccggaccaacttgctgacctt

SEQ ID NO: 5749652 - DNA, 25 bp, Homo sapien
aaagatgagaaacatgttcagaagg

SEQ ID NO: 5749653 - DNA, 25 bp, Homo sapien
agcctcaggaaaaactggagatccg

SEQ ID NO: 5749654 - DNA, 25 bp, Homo sapien
ggaagtcgcggccactgcctgtgtg

SEQ ID NO: 5749655 - DNA, 25 bp, Homo sapien
gctgctcttcctggcaggcctgggc

SEQ ID NO: 5749656 - DNA, 25 bp, Homo sapien
agcggctcagtcggcgcctgcgtga

SEQ ID NO: 5749657 - DNA, 25 bp, Homo sapien
aagtcgcggccactgcctgtgtgac

SEQ ID NO: 5749658 - DNA, 25 bp, Homo sapien
catccggaggaagctgcagccctcg

SEQ ID NO: 5749659 - DNA, 25 bp, Homo sapien
gcactgcggaccctcaccaacgact

SEQ ID NO: 5749660 - DNA, 25 bp, Homo sapien
ctcagggacctgctagggaaagagc

SEQ ID NO: 5749661 - DNA, 25 bp, Homo sapien
accgggacctgctgatggtggagaa

SEQ ID NO: 5749662 - DNA, 25 bp, Homo sapien
ggacgtcattgctgccctgcgctcc

SEQ ID NO: 5749663 - DNA, 25 bp, Homo sapien
ccaacgactacaatgggctcaagcg

SEQ ID NO: 5749664 - DNA, 25 bp, Homo sapien
gaggccgagctgcaagagctgcgca

SEQ ID NO: 5749665 - DNA, 25 bp, Homo sapien
cctagctcagtgccgagcccttagc

SEQ ID NO: 5749666 - DNA, 25 bp, Homo sapien
atgggcagatgctggaggagatgca

SEQ ID NO: 5749667 - DNA, 25 bp, Homo sapien
gggcagccgcctgcgggaggcgcag

SEQ ID NO: 5749668 - DNA, 25 bp, Homo sapien
ccggctgtgcccagatggcagtggg

SEQ ID NO: 5749669 - DNA, 25 bp, Homo sapien
cctctcctcagcttgcagagctggc

SEQ ID NO: 5749670 - DNA, 25 bp, Homo sapien
gccgggccgagccccgggcgctgcg

SEQ ID NO: 5749671 - DNA, 25 bp, Homo sapien
tgaaggagaagctcattagccaggc

SEQ ID NO: 5749672 - DNA, 25 bp, Homo sapien
gaaggaaacggtgtctctcggctgt

SEQ ID NO: 5749673 - DNA, 25 bp, Homo sapien
gtacggccagacgggcgccggcaag

SEQ ID NO: 5749674 - DNA, 25 bp, Homo sapien
atggggaaggacctgaggccaccaa

SEQ ID NO: 5749675 - DNA, 25 bp, Homo sapien
cttgggtcctggtcaagccaggagc

SEQ ID NO: 5749676 - DNA, 25 bp, Homo sapien
tcaggaaaaactggagatccggctg

SEQ ID NO: 5749677 - DNA, 25 bp, Homo sapien
agagcttgggtcctggtcaagccag

SEQ ID NO: 5749678 - DNA, 25 bp, Homo sapien
gcgtggaaaagataccccagtctgc

SEQ ID NO: 5749679 - DNA, 25 bp, Homo sapien
cacctgaaggagaagctcattagcc

SEQ ID NO: 5749680 - DNA, 25 bp, Homo sapien
gtaccagggctgactgagttccaag

SEQ ID NO: 5749681 - DNA, 25 bp, Homo sapien
tagaggtgcagcagaagaccgaccg

SEQ ID NO: 5749682 - DNA, 25 bp, Homo sapien
gaaacatgttcagaaggaaacggtg

SEQ ID NO: 5749683 - DNA, 25 bp, Homo sapien
ttatggctggcagaggcagccagcg

SEQ ID NO: 5749684 - DNA, 25 bp, Homo sapien
gacgtacacgatggaggggaccgct

SEQ ID NO: 5749685 - DNA, 25 bp, Homo sapien
gcctcgcagcaggacgtgttccagg

SEQ ID NO: 5749686 - DNA, 25 bp, Homo sapien
ggaggggcgcgagcgggctggccga

SEQ ID NO: 5749687 - DNA, 25 bp, Homo sapien
aactggagatccggctgtgcccaga

SEQ ID NO: 5749688 - DNA, 25 bp, Homo sapien
cagacgccacagccctcggcacggg

SEQ ID NO: 5749689 - DNA, 25 bp, Homo sapien
cgactcaaggactgcctggctgaga

SEQ ID NO: 5749690 - DNA, 25 bp, Homo sapien
caagaccctcatggtggtacaggtg

SEQ ID NO: 5749691 - DNA, 25 bp, Homo sapien
tgcagcacaggcctccgcaccacgg

SEQ ID NO: 5749692 - DNA, 25 bp, Homo sapien
gagggtgcgctctgtggagctgggg

SEQ ID NO: 5749693 - DNA, 25 bp, Homo sapien
ggtgcagcagaagaccgaccggctg

SEQ ID NO: 5749694 - DNA, 25 bp, Homo sapien
ttaagaacttttggaagcttagcca

SEQ ID NO: 5749695 - DNA, 25 bp, Homo sapien
gcaggcgtccggaccaacttgctga

SEQ ID NO: 5749696 - DNA, 25 bp, Homo sapien
gaacctggtggacttggctggctcg

SEQ ID NO: 5749697 - DNA, 25 bp, Homo sapien
cagcaggacgtgttccaggaggtgc

SEQ ID NO: 5749698 - DNA, 25 bp, Homo sapien
ggtcctcagggacctgctagggaaa

SEQ ID NO: 5749699 - DNA, 25 bp, Homo sapien
agtatgtcatcaagacagtggaggt

SEQ ID NO: 5749700 - DNA, 25 bp, Homo sapien
tcggggaagtcgcggccactgcctg

SEQ ID NO: 5749701 - DNA, 25 bp, Homo sapien
ctgtggagagtgggccgggccccgg

SEQ ID NO: 5749702 - DNA, 25 bp, Homo sapien
tgctgtcagagctgaacctagaggt

SEQ ID NO: 5749703 - DNA, 25 bp, Homo sapien
ggcgaggagcctctgggcagaccca

SEQ ID NO: 5749704 - DNA, 25 bp, Homo sapien
ggtgcgcggcttcccactgctgctg

SEQ ID NO: 5749705 - DNA, 25 bp, Homo sapien
tacgcagggcagagcttgggtcctg

SEQ ID NO: 5749706 - DNA, 25 bp, Homo sapien
tgcctggctcgctggtctctcgaat

SEQ ID NO: 5749707 - DNA, 25 bp, Homo sapien
cccccgtggagaagaacactagcga

SEQ ID NO: 5749708 - DNA, 25 bp, Homo sapien
tttgctgagagggtgcgctctgtgg

SEQ ID NO: 5749709 - DNA, 25 bp, Homo sapien
gcctgtggagagtgggccgggcccc

SEQ ID NO: 5749710 - DNA, 25 bp, Homo sapien
ctcgctgcggggcctgtggagagtg

SEQ ID NO: 5749711 - DNA, 25 bp, Homo sapien
aaggcatgctgtcagagctgaacct

SEQ ID NO: 5749712 - DNA, 25 bp, Homo sapien
gaggcgcagcacatcaacaagtcgc

SEQ ID NO: 5749713 - DNA, 25 bp, Homo sapien
tcctggtcaagccaggagcatctag

SEQ ID NO: 5749714 - DNA, 25 bp, Homo sapien
cgcacgcgctgctcatcgtgacggt

SEQ ID NO: 5749715 - DNA, 25 bp, Homo sapien
gcggctgaaagggaacatccgagtg

SEQ ID NO: 5749716 - DNA, 25 bp, Homo sapien
ggccgcccgccctttcccacacacc

SEQ ID NO: 5749717 - DNA, 25 bp, Homo sapien
gtacaggtgtcccccgtggagaaga

SEQ ID NO: 5749718 - DNA, 25 bp, Homo sapien
ggtggagaatgagcgactgaggcag

SEQ ID NO: 5749719 - DNA, 25 bp, Homo sapien
gccccagccccagccagcccggccg

SEQ ID NO: 5749720 - DNA, 25 bp, Homo sapien
gtgtccggccagtcaccaaagagga

SEQ ID NO: 5749721 - DNA, 25 bp, Homo sapien
gcgctgcggagatctacaatgaggt

SEQ ID NO: 5749722 - DNA, 25 bp, Homo sapien
agaagtgccacaatgagctcgtgcg

SEQ ID NO: 5749723 - DNA, 25 bp, Homo sapien
tggggcctgggctacgcagggcaga

SEQ ID NO: 5749724 - DNA, 25 bp, Homo sapien
tggcagccctccccgcccctctcct

SEQ ID NO: 5749725 - DNA, 25 bp, Homo sapien
ccgtctcccctcaaagatgagaaac

SEQ ID NO: 5749726 - DNA, 25 bp, Homo sapien
cattgatggcttcaatgtctgcatc

SEQ ID NO: 5749727 - DNA, 25 bp, Homo sapien
gtctgcatctttgcgtacggccaga

SEQ ID NO: 5749728 - DNA, 25 bp, Homo sapien
atcaagacagtggaggtggagtcgt

SEQ ID NO: 5749729 - DNA, 25 bp, Homo sapien
cgtggagaagaacactagcgagacg

SEQ ID NO: 5749730 - DNA, 25 bp, Homo sapien
tccctggaagaggacaagaaccggg

SEQ ID NO: 5749731 - DNA, 25 bp, Homo sapien
aagcctgtgtccttcgagctggaca

SEQ ID NO: 5749732 - DNA, 25 bp, Homo sapien
atcaacaaggtgtttgagtttggcc

SEQ ID NO: 5749733 - DNA, 25 bp, Homo sapien
gctggagcgggcccatgggcagatg

SEQ ID NO: 5749734 - DNA, 25 bp, Homo sapien
acctgctgatggtggagaatgagcg

SEQ ID NO: 5749735 - DNA, 25 bp, Homo sapien
gtggagatgaaggctgtgcacgaga

SEQ ID NO: 5749736 - DNA, 25 bp, Homo sapien
ctgcagctgctcttctccgaggtgc

SEQ ID NO: 5749737 - DNA, 25 bp, Homo sapien
tgtgaccccgctgggcctgaagctg

SEQ ID NO: 5749738 - DNA, 25 bp, Homo sapien
gccagcgggtgggggattctgctgc

SEQ ID NO: 5749739 - DNA, 25 bp, Homo sapien
acctgggagccacgccctcgctgcg

SEQ ID NO: 5749740 - DNA, 25 bp, Homo sapien
ggccctggtcacctcttgcattgat

SEQ ID NO: 5749741 - DNA, 25 bp, Homo sapien
cacaggaggaggagcggctcagtcg

SEQ ID NO: 5749742 - DNA, 25 bp, Homo sapien
gagaagaacactagcgagacgctct

SEQ ID NO: 5749743 - DNA, 25 bp, Homo sapien
gtatgtaccagggctgactgagttc

SEQ ID NO: 5749744 - DNA, 25 bp, Homo sapien
ggtggtacaggtgtcccccgtggag

SEQ ID NO: 5749745 - DNA, 25 bp, Homo sapien
gctctattccctcaagtttgctgag

SEQ ID NO: 5749746 - DNA, 25 bp, Homo sapien
tgtttgagtttggccacactaatcg

SEQ ID NO: 5749747 - DNA, 25 bp, Homo sapien
gtgccccgaggaggctgctgagccc

SEQ ID NO: 5749748 - DNA, 25 bp, Homo sapien
agaggcaggtgctgaaggagatgga

SEQ ID NO: 5749749 - DNA, 25 bp, Homo sapien
ccacgagaccattgccagcctgcgg

SEQ ID NO: 5749750 - DNA, 25 bp, Homo sapien
agccctcggcacgggcccactcagc

SEQ ID NO: 5749751 - DNA, 25 bp, Homo sapien
gagataggccaggccatcgaggagg

SEQ ID NO: 5749752 - DNA, 25 bp, Homo sapien
ttttcttccctctgaaatcctattt

SEQ ID NO: 5749753 - DNA, 25 bp, Homo sapien
gagctggagcgggcccatgggcaga

SEQ ID NO: 5749754 - DNA, 25 bp, Homo sapien
tccatccggaggaagctgcagccct

SEQ ID NO: 5749755 - DNA, 25 bp, Homo sapien
gctgcgactcaaggactgcctggct

SEQ ID NO: 5749756 - DNA, 25 bp, Homo sapien
caatgctgtgactttcgatgccgac

SEQ ID NO: 5749757 - DNA, 25 bp, Homo sapien
catccacctgctgcacaagggcaag

SEQ ID NO: 5749758 - DNA, 25 bp, Homo sapien
gcggcaggtgcgcggcttcccactg

SEQ ID NO: 5749759 - DNA, 25 bp, Homo sapien
atcgtgacggtgcgaggcgtggact

SEQ ID NO: 5749760 - DNA, 25 bp, Homo sapien
agcaaaggcatgctgtcagagctga

SEQ ID NO: 5749761 - DNA, 25 bp, Homo sapien
cgacgcctggatcctgcctccgcca

SEQ ID NO: 5749762 - DNA, 25 bp, Homo sapien
gcggaggcgcatggcctcccgccac

SEQ ID NO: 5749763 - DNA, 25 bp, Homo sapien
ggagtacaccatcaccgtcagcgct

SEQ ID NO: 5749764 - DNA, 25 bp, Homo sapien
ggaggcctttgccagagcccaggtg

SEQ ID NO: 5749765 - DNA, 25 bp, Homo sapien
tgctagggaaagagcctcaggaaaa

SEQ ID NO: 5749766 - DNA, 25 bp, Homo sapien
aggctcttcttctgccccgtctccc

SEQ ID NO: 5749767 - DNA, 25 bp, Homo sapien
caagtatgtcatcaagacagtggag

SEQ ID NO: 5749768 - DNA, 25 bp, Homo sapien
ccagatggcagtgggcagctgtatg

SEQ ID NO: 5749769 - DNA, 25 bp, Homo sapien
gcagattgccatgtacgagtcagag

SEQ ID NO: 5749770 - DNA, 25 bp, Homo sapien
aggtggctatgcagaggcaggtgct

SEQ ID NO: 5749771 - DNA, 25 bp, Homo sapien
agtgccgagcccttagcgtggactg

SEQ ID NO: 5749772 - DNA, 25 bp, Homo sapien
ctgctgagccccaggccatggtccc

SEQ ID NO: 5749773 - DNA, 25 bp, Homo sapien
ttgatggcttcaatgtctgcatctt

SEQ ID NO: 5749774 - DNA, 25 bp, Homo sapien
gggagccggcttgtcagacgccaca

SEQ ID NO: 5749775 - DNA, 25 bp, Homo sapien
acgggcccactcagcccccagctct

SEQ ID NO: 5749776 - DNA, 25 bp, Homo sapien
cctccccgcccctctccttcaagga

SEQ ID NO: 5749777 - DNA, 25 bp, Homo sapien
tgcgaggcgtggactgcagcacagg

SEQ ID NO: 5749778 - DNA, 25 bp, Homo sapien
cgcaactccaagctcacctacctgc

SEQ ID NO: 5749779 - DNA, 25 bp, Homo sapien
agtctgcggtgacgaggactccagt

SEQ ID NO: 5749780 - DNA, 25 bp, Homo sapien
gagaccattgccagcctgcgggccc

SEQ ID NO: 5749781 - DNA, 25 bp, Homo sapien
ggcggcgtggagctgcctcctgccg

SEQ ID NO: 5749782 - DNA, 25 bp, Homo sapien
gtccccacctgtcaagtatgtcatc

SEQ ID NO: 5749783 - DNA, 25 bp, Homo sapien
agcttgggtcctggtcaagccagga

SEQ ID NO: 5749784 - DNA, 25 bp, Homo sapien
gctgatggtggagaatgagcgactg

SEQ ID NO: 5749785 - DNA, 25 bp, Homo sapien
gggcagctgtatgtaccagggctga

SEQ ID NO: 5749786 - DNA, 25 bp, Homo sapien
gtgacggatgtgaccccgctgggcc

SEQ ID NO: 5749787 - DNA, 25 bp, Homo sapien
ttgcgtacggccagacgggcgccgg

SEQ ID NO: 5749788 - DNA, 25 bp, Homo sapien
ccccagtctgcggtgacgaggactc

SEQ ID NO: 5749789 - DNA, 25 bp, Homo sapien
tagggggtgggcgaggagcctctgg

SEQ ID NO: 5749790 - DNA, 25 bp, Homo sapien
aggctgtgcacgagaatctagcagg

SEQ ID NO: 5749791 - DNA, 25 bp, Homo sapien
caccaacgactacaatgggctcaag

SEQ ID NO: 5749792 - DNA, 25 bp, Homo sapien
gctacgcagggcagagcttgggtcc

SEQ ID NO: 5749793 - DNA, 25 bp, Homo sapien
tcttctccgaggtgcaggagaaggc

SEQ ID NO: 5749794 - DNA, 25 bp, Homo sapien
ctggagatccggctgtgcccagatg

SEQ ID NO: 5749795 - DNA, 25 bp, Homo sapien
acgggcgccggcaagacgtacacga

SEQ ID NO: 5749796 - DNA, 25 bp, Homo sapien
gcctgtgtccttcgagctggacaag

SEQ ID NO: 5749797 - DNA, 25 bp, Homo sapien
agatgctggaggagatgcagtccct

SEQ ID NO: 5749798 - DNA, 25 bp, Homo sapien
cgacgactccatcatccacctgctg

SEQ ID NO: 5749799 - DNA, 25 bp, Homo sapien
gagccccgggcgctgcggcgacgcc

SEQ ID NO: 5749800 - DNA, 25 bp, Homo sapien
agatgagaaacatgttcagaaggaa

SEQ ID NO: 5749801 - DNA, 25 bp, Homo sapien
cggcttgtcagacgccacagccctc

SEQ ID NO: 5749802 - DNA, 25 bp, Homo sapien
ccggaggtagaggcgagagtggagg

SEQ ID NO: 5749803 - DNA, 25 bp, Homo sapien
gggcaccgacttggagaagcaccgg

SEQ ID NO: 5749804 - DNA, 25 bp, Homo sapien
gccaggagcatctagagtgggagcc

SEQ ID NO: 5749805 - DNA, 25 bp, Homo sapien
tctgtggagctggggcctgggctac

SEQ ID NO: 5749806 - DNA, 25 bp, Homo sapien
gcctttgccagagcccaggtggaga

SEQ ID NO: 5749807 - DNA, 25 bp, Homo sapien
tcctcagcttgcagagctggccagc

SEQ ID NO: 5749808 - DNA, 25 bp, Homo sapien
atctgagctggggggcaccgacttg

SEQ ID NO: 5749809 - DNA, 25 bp, Homo sapien
caccagctgaccgcgcggctccggg

SEQ ID NO: 5749810 - DNA, 25 bp, Homo sapien
agccgcctgcgggaggcgcagcaca

SEQ ID NO: 5749811 - DNA, 25 bp, Homo sapien
ggactgcctggctgagaaggcacag

SEQ ID NO: 5749812 - DNA, 25 bp, Homo sapien
gcaggtggctatgcagaggcaggtg

SEQ ID NO: 5749813 - DNA, 25 bp, Homo sapien
caacagcaacaaccaggagctgctg

SEQ ID NO: 5749814 - DNA, 25 bp, Homo sapien
gtgggccgggccccggagcccgagc

SEQ ID NO: 5749815 - DNA, 25 bp, Homo sapien
gctgctcgctcacctgcctggctcg

SEQ ID NO: 5749816 - DNA, 25 bp, Homo sapien
agggtgggcctctcacccaggcttt

SEQ ID NO: 5749817 - DNA, 25 bp, Homo sapien
cgatggaggggaccgctgagaaccc

SEQ ID NO: 5749818 - DNA, 25 bp, Homo sapien
ctatgcagaggcaggtgctgaagga

SEQ ID NO: 5749819 - DNA, 25 bp, Homo sapien
agaggacaagaaccgggccattgag

SEQ ID NO: 5749820 - DNA, 25 bp, Homo sapien
tgacagccacgagaccattgccagc

SEQ ID NO: 5749821 - DNA, 25 bp, Homo sapien
tgggtcctggtcaagccaggagcat

SEQ ID NO: 5749822 - DNA, 25 bp, Homo sapien
gataggccaggccatcgaggaggtc

SEQ ID NO: 5749823 - DNA, 25 bp, Homo sapien
aattttcttccctctgaaatcctat

SEQ ID NO: 5749824 - DNA, 25 bp, Homo sapien
aggtagaacacctgaaggagaagct

SEQ ID NO: 5749825 - DNA, 25 bp, Homo sapien
cggtgtctctcggctgtggctctga

SEQ ID NO: 5749826 - DNA, 25 bp, Homo sapien
ctgtgcccagatggcagtgggcagc

SEQ ID NO: 5749827 - DNA, 25 bp, Homo sapien
ccatgggcagatgctggaggagatg

SEQ ID NO: 5749828 - DNA, 25 bp, Homo sapien
agcccccagctctgggaccagtagc

SEQ ID NO: 5749829 - DNA, 25 bp, Homo sapien
ccatcagcgaactgggccccgtgag

SEQ ID NO: 5749830 - DNA, 25 bp, Homo sapien
tggctgagaaggcacaggaggagga

SEQ ID NO: 5749831 - DNA, 25 bp, Homo sapien
cttcaaggagggttcccgcagctgg

SEQ ID NO: 5749832 - DNA, 25 bp, Homo sapien
tggtgccccgaggaggctgctgagc

SEQ ID NO: 5749833 - DNA, 25 bp, Homo sapien
ctcaagtttgctgagagggtgcgct

SEQ ID NO: 5749834 - DNA, 25 bp, Homo sapien
gcgcacaaagccagcaggtccctgc

SEQ ID NO: 5749835 - DNA, 25 bp, Homo sapien
accccgctgggcctgaagctgggcc

SEQ ID NO: 5749836 - DNA, 25 bp, Homo sapien
ccgggcgcagattgccatgtacgag

SEQ ID NO: 5749837 - DNA, 25 bp, Homo sapien
caggacccccggaggtagaggcgag

SEQ ID NO: 5749838 - DNA, 25 bp, Homo sapien
cgagaatctagcaggcgtccggacc

SEQ ID NO: 5749839 - DNA, 25 bp, Homo sapien
ttcccactgctgctgcaggaggccc

SEQ ID NO: 5749840 - DNA, 25 bp, Homo sapien
acgagtcagagctggagcgggccca

SEQ ID NO: 5749841 - DNA, 25 bp, Homo sapien
agctggacaaggtcttctccccaca

SEQ ID NO: 5749842 - DNA, 25 bp, Homo sapien
ctgcgcacaaagccagcaggtccct

SEQ ID NO: 5749843 - DNA, 25 bp, Homo sapien
cagctgcgtaagaagtgccacaatg

SEQ ID NO: 5749844 - DNA, 25 bp, Homo sapien
cgtacacgatggaggggaccgctga

SEQ ID NO: 5749845 - DNA, 25 bp, Homo sapien
caggagcatctagagtgggagccgg

SEQ ID NO: 5749846 - DNA, 25 bp, Homo sapien
gcgggaggcgcagcacatcaacaag

SEQ ID NO: 5749847 - DNA, 25 bp, Homo sapien
tggctctgagtgcaaattgcatggg

SEQ ID NO: 5749848 - DNA, 25 bp, Homo sapien
ggggaagtcgcggccactgcctgtg

SEQ ID NO: 5749849 - DNA, 25 bp, Homo sapien
ccacacaccggcccggggaggttga

SEQ ID NO: 5749850 - DNA, 25 bp, Homo sapien
cctgaaggagaagctcattagccag

SEQ ID NO: 5749851 - DNA, 25 bp, Homo sapien
tacaatgaggtcctcagggacctgc

SEQ ID NO: 5749852 - DNA, 25 bp, Homo sapien
gggaccgctgagaacccaggtatca

SEQ ID NO: 5749853 - DNA, 25 bp, Homo sapien
tgcgatctgagctggggggcaccga

SEQ ID NO: 5749854 - DNA, 25 bp, Homo sapien
ccatcatccacctgctgcacaaggg

SEQ ID NO: 5749855 - DNA, 25 bp, Homo sapien
gcagctcgcccagccctagctcagt

SEQ ID NO: 5749856 - DNA, 25 bp, Homo sapien
cggctcagtcggcgcctgcgtgaca

SEQ ID NO: 5749857 - DNA, 25 bp, Homo sapien
cagcgggtgggggattctgctgctc

SEQ ID NO: 5749858 - DNA, 25 bp, Homo sapien
aggacaagaaccgggccattgagga

SEQ ID NO: 5749859 - DNA, 25 bp, Homo sapien
ccccgtgaggagggcgggagtgtgg

SEQ ID NO: 5749860 - DNA, 25 bp, Homo sapien
gccaggacccccggaggtagaggcg

SEQ ID NO: 5749861 - DNA, 25 bp, Homo sapien
gggagccacgccctcgctgcggggc

SEQ ID NO: 5749862 - DNA, 25 bp, Homo sapien
caatgggctcaagcggcaggtgcgc

SEQ ID NO: 5749863 - DNA, 25 bp, Homo sapien
agccctccccgcccctctccttcaa

SEQ ID NO: 5749864 - DNA, 25 bp, Homo sapien
ctctcgaattttcttccctctgaaa

SEQ ID NO: 5749865 - DNA, 25 bp, Homo sapien
tgtcatcaagacagtggaggtggag

SEQ ID NO: 5749866 - DNA, 25 bp, Homo sapien
ccgagtgattgctcgtgtccggcca

SEQ ID NO: 5749867 - DNA, 25 bp, Homo sapien
gagcctctgggcagacccaagaacc

SEQ ID NO: 5749868 - DNA, 25 bp, Homo sapien
gcttagccatttttacttattaaaa

SEQ ID NO: 5749869 - DNA, 25 bp, Homo sapien
gaccgcgcggctccgggcgcagatt

SEQ ID NO: 5749870 - DNA, 25 bp, Homo sapien
gcccagctccgtgacaagctgtccc

SEQ ID NO: 5749871 - DNA, 25 bp, Homo sapien
gctcttctccgaggtgcaggagaag

SEQ ID NO: 5749872 - DNA, 25 bp, Homo sapien
cgctgtgaggccgagctgcaagagc

SEQ ID NO: 5749873 - DNA, 25 bp, Homo sapien
ttgctcgtgtccggccagtcaccaa

SEQ ID NO: 5749874 - DNA, 25 bp, Homo sapien
tgcgcggcttcccactgctgctgca

SEQ ID NO: 5749875 - DNA, 25 bp, Homo sapien
cagcgctgcggagatctacaatgag

SEQ ID NO: 5749876 - DNA, 25 bp, Homo sapien
acctggtggacttggctggctcgga

SEQ ID NO: 5749877 - DNA, 25 bp, Homo sapien
caggcctgggccatcagcgaactgg

SEQ ID NO: 5749878 - DNA, 25 bp, Homo sapien
gaacctgggagccacgccctcgctg

SEQ ID NO: 5749879 - DNA, 25 bp, Homo sapien
gggcctgtggagagtgggccgggcc

SEQ ID NO: 5749880 - DNA, 25 bp, Homo sapien
caagaccaagcaggccctcagcgag

SEQ ID NO: 5749881 - DNA, 25 bp, Homo sapien
cgtgacagccacgagaccattgcca

SEQ ID NO: 5749882 - DNA, 25 bp, Homo sapien
ctcaccaacgactacaatgggctca

SEQ ID NO: 5749883 - DNA, 25 bp, Homo sapien
gtgcggaggcgcatggcctcccgcc

SEQ ID NO: 5749884 - DNA, 25 bp, Homo sapien
gcgcccagctccgtgacaagctgtc

SEQ ID NO: 5749885 - DNA, 25 bp, Homo sapien
cgagccggggatggctcgccccgcc

SEQ ID NO: 5749886 - DNA, 25 bp, Homo sapien
cctgcctggctcgctggtctctcga

SEQ ID NO: 5749887 - DNA, 25 bp, Homo sapien
tgaccccgctgggcctgaagctggg

SEQ ID NO: 5749888 - DNA, 25 bp, Homo sapien
gaatgagcgactgaggcaggagatg

SEQ ID NO: 5749889 - DNA, 25 bp, Homo sapien
ggagctgcctcctgccggcgggccg

SEQ ID NO: 5749890 - DNA, 25 bp, Homo sapien
ctccatcatccacctgctgcacaag

SEQ ID NO: 5749891 - DNA, 25 bp, Homo sapien
ctcttcctggcaggcctgggccatc

SEQ ID NO: 5749892 - DNA, 25 bp, Homo sapien
atctttgcgtacggccagacgggcg

SEQ ID NO: 5749893 - DNA, 25 bp, Homo sapien
ctgcagagctcacaccagctgaccg

SEQ ID NO: 5749894 - DNA, 25 bp, Homo sapien
gagcacagctcccgctcgcacgcgc

SEQ ID NO: 5749895 - DNA, 25 bp, Homo sapien
cccgaggaggctgctgagccccagg

SEQ ID NO: 5749896 - DNA, 25 bp, Homo sapien
ctgcctcctgccggcgggccgggcc

SEQ ID NO: 5749897 - DNA, 25 bp, Homo sapien
atgcagaggcaggtgctgaaggaga

SEQ ID NO: 5749898 - DNA, 25 bp, Homo sapien
caacttgctgaccttgcagccggca

SEQ ID NO: 5749899 - DNA, 25 bp, Homo sapien
caggagaaggcgtctgactgggagt

SEQ ID NO: 5749900 - DNA, 25 bp, Homo sapien
cctggtgccccgaggaggctgctga

SEQ ID NO: 5749901 - DNA, 25 bp, Homo sapien
ttccaggaggtgcaggccctggtca

SEQ ID NO: 5749902 - DNA, 25 bp, Homo sapien
ggcaggtgcgcggcttcccactgct

SEQ ID NO: 5749903 - DNA, 25 bp, Homo sapien
gcagtccctggaagaggacaagaac

SEQ ID NO: 5749904 - DNA, 25 bp, Homo sapien
tggaggagggtgggcctctcaccca

SEQ ID NO: 5749905 - DNA, 25 bp, Homo sapien
gtggctatgcagaggcaggtgctga

SEQ ID NO: 5749906 - DNA, 25 bp, Homo sapien
attagccaggcccaggaagtgagcc

SEQ ID NO: 5749907 - DNA, 25 bp, Homo sapien
ggccaggccatcgaggaggtcaaca

SEQ ID NO: 5749908 - DNA, 25 bp, Homo sapien
ctgcaggagcaggtggctatgcaga

SEQ ID NO: 5749909 - DNA, 25 bp, Homo sapien
ccgggccattgaggaggcctttgcc

SEQ ID NO: 5749910 - DNA, 25 bp, Homo sapien
cagcacaggcctccgcaccacgggg

SEQ ID NO: 5749911 - DNA, 25 bp, Homo sapien
caacctgaacgagcacagctcccgc

SEQ ID NO: 5749912 - DNA, 25 bp, Homo sapien
agcgtggactgggctggccccggaa

SEQ ID NO: 5749913 - DNA, 25 bp, Homo sapien
gccgaggaggaggcggcggcgtgga

SEQ ID NO: 5749914 - DNA, 25 bp, Homo sapien
ctagggaaagagcctcaggaaaaac

SEQ ID NO: 5749915 - DNA, 25 bp, Homo sapien
ggcaggcctgggccatcagcgaact

SEQ ID NO: 5749916 - DNA, 25 bp, Homo sapien
tcatcaagacagtggaggtggagtc

SEQ ID NO: 5749917 - DNA, 25 bp, Homo sapien
ggtgcgaggcgtggactgcagcaca

SEQ ID NO: 5749918 - DNA, 25 bp, Homo sapien
tacctgctgcaggattcgcttagtg

SEQ ID NO: 5749919 - DNA, 25 bp, Homo sapien
gcgtggagctgcctcctgccggcgg

SEQ ID NO: 5749920 - DNA, 25 bp, Homo sapien
cgagctggacaaggtcttctcccca

SEQ ID NO: 5749921 - DNA, 25 bp, Homo sapien
ctgggcagacccaagaaccatgggg

SEQ ID NO: 5749922 - DNA, 25 bp, Homo sapien
aggccggctgcctggtgccccgagg

SEQ ID NO: 5749923 - DNA, 25 bp, Homo sapien
cccagccccagccagcccggccgcc

SEQ ID NO: 5749924 - DNA, 25 bp, Homo sapien
ttctccccacaggcctcgcagcagg

SEQ ID NO: 5749925 - DNA, 25 bp, Homo sapien
gcctgcgggaggcgcagcacatcaa

SEQ ID NO: 5749926 - DNA, 25 bp, Homo sapien
caactccaagctcacctacctgctg

SEQ ID NO: 5749927 - DNA, 25 bp, Homo sapien
gggtgtgcggaggcgcatggcctcc

SEQ ID NO: 5749928 - DNA, 25 bp, Homo sapien
gctctgggggacgtcattgctgccc

SEQ ID NO: 5749929 - DNA, 25 bp, Homo sapien
catctagagtgggagccggcttgtc

SEQ ID NO: 5749930 - DNA, 25 bp, Homo sapien
taccccagtctgcggtgacgaggac

SEQ ID NO: 5749931 - DNA, 25 bp, Homo sapien
cacgcgctgctcatcgtgacggtgc

SEQ ID NO: 5749932 - DNA, 25 bp, Homo sapien
aaggagatggaacagcagctgcaga

SEQ ID NO: 5749933 - DNA, 25 bp, Homo sapien
ctgccggcgggccgggccgggccga

SEQ ID NO: 5749934 - DNA, 25 bp, Homo sapien
gcctgtccctgctgcagcgccagga

SEQ ID NO: 5749935 - DNA, 25 bp, Homo sapien
caagacagtggaggtggagtcgtcc

SEQ ID NO: 5749936 - DNA, 25 bp, Homo sapien
gtcagagctgaacctagaggtgcag

SEQ ID NO: 5749937 - DNA, 25 bp, Homo sapien
tgcacgagaatctagcaggcgtccg

SEQ ID NO: 5749938 - DNA, 25 bp, Homo sapien
aggcgcatggcctcccgccacgggg

SEQ ID NO: 5749939 - DNA, 25 bp, Homo sapien
acctgtcaagtatgtcatcaagaca

SEQ ID NO: 5749940 - DNA, 25 bp, Homo sapien
ggtgggcgaggagcctctgggcaga

SEQ ID NO: 5749941 - DNA, 25 bp, Homo sapien
gtgtgacggatgtgaccccgctggg

SEQ ID NO: 5749942 - DNA, 25 bp, Homo sapien
ctgaccctgcaggtagaacacctga

SEQ ID NO: 5749943 - DNA, 25 bp, Homo sapien
gcccggccgcccgccctttcccaca

SEQ ID NO: 5749944 - DNA, 25 bp, Homo sapien
acaggtgtcccccgtggagaagaac

SEQ ID NO: 5749945 - DNA, 25 bp, Homo sapien
cagcagaagaccgaccggctggctg

SEQ ID NO: 5749946 - DNA, 25 bp, Homo sapien
gtgggttggtggcaccaatggcagc

SEQ ID NO: 5749947 - DNA, 25 bp, Homo sapien
gcaccacggggaagctgaacctggt

SEQ ID NO: 5749948 - DNA, 25 bp, Homo sapien
ccgccagggccacgtgcccttccgc

SEQ ID NO: 5749949 - DNA, 25 bp, Homo sapien
ttgccagagcccaggtggagatgaa

SEQ ID NO: 5749950 - DNA, 25 bp, Homo sapien
cacggggaagctgaacctggtggac

SEQ ID NO: 5749951 - DNA, 25 bp, Homo sapien
gatggcggaaagcaaaggcatgctg

SEQ ID NO: 5749952 - DNA, 25 bp, Homo sapien
ctcgcacgcgctgctcatcgtgacg

SEQ ID NO: 5749953 - DNA, 25 bp, Homo sapien
tggactgggctggccccggaagccc

SEQ ID NO: 5749954 - DNA, 25 bp, Homo sapien
aggattcgcttagtggtgacagcaa

SEQ ID NO: 5749955 - DNA, 25 bp, Homo sapien
cccaggttgtgagcacagccaggag

SEQ ID NO: 5749956 - DNA, 25 bp, Homo sapien
tcggcgcctgcgtgacagccacgag

SEQ ID NO: 5749957 - DNA, 25 bp, Homo sapien
cgactgcgatctgagctggggggca

SEQ ID NO: 5749958 - DNA, 25 bp, Homo sapien
tcaagccaggagcatctagagtggg

SEQ ID NO: 5749959 - DNA, 25 bp, Homo sapien
acaaccaggagctgctgcgcaagta

SEQ ID NO: 5749960 - DNA, 25 bp, Homo sapien
tcgctggtctctcgaattttcttcc

SEQ ID NO: 5749961 - DNA, 25 bp, Homo sapien
catgttcagaaggaaacggtgtctc

SEQ ID NO: 5749962 - DNA, 25 bp, Homo sapien
ccctcggcacgggcccactcagccc

SEQ ID NO: 5749963 - DNA, 25 bp, Homo sapien
gacaagctgtcccagctgcagctgg

SEQ ID NO: 5749964 - DNA, 25 bp, Homo sapien
aggaggccctcaggagtgtcaaggc

SEQ ID NO: 5749965 - DNA, 25 bp, Homo sapien
gagcaggtggctatgcagaggcagg

SEQ ID NO: 5749966 - DNA, 25 bp, Homo sapien
tggccagccccctccttagggggtg

SEQ ID NO: 5749967 - DNA, 25 bp, Homo sapien
atggcagtgggcagctgtatgtacc

SEQ ID NO: 5749968 - DNA, 25 bp, Homo sapien
cagggccacgtgcccttccgcaact

SEQ ID NO: 5749969 - DNA, 25 bp, Homo sapien
ctttgccagagcccaggtggagatg

SEQ ID NO: 5749970 - DNA, 25 bp, Homo sapien
aacgactacaatgggctcaagcggc

SEQ ID NO: 5749971 - DNA, 25 bp, Homo sapien
gtgacgaggactccagtgcccgaag

SEQ ID NO: 5749972 - DNA, 25 bp, Homo sapien
atgtaccagggctgactgagttcca

SEQ ID NO: 5749973 - DNA, 25 bp, Homo sapien
gattctgctgctcgctcacctgcct

SEQ ID NO: 5749974 - DNA, 25 bp, Homo sapien
gtgtctctcggctgtggctctgagt

SEQ ID NO: 5749975 - DNA, 25 bp, Homo sapien
gctttctcggcccctctcctcagct

SEQ ID NO: 5749976 - DNA, 25 bp, Homo sapien
ggaccaacttgctgaccttgcagcc

SEQ ID NO: 5749977 - DNA, 25 bp, Homo sapien
ctccagtgcccgaagtgcagctcgc

SEQ ID NO: 5749978 - DNA, 25 bp, Homo sapien
gcggctccgggcgcagattgccatg

SEQ ID NO: 5749979 - DNA, 25 bp, Homo sapien
gcatctttgcgtacggccagacggg

SEQ ID NO: 5749980 - DNA, 25 bp, Homo sapien
ctggacaaggtcttctccccacagg

SEQ ID NO: 5749981 - DNA, 25 bp, Homo sapien
gaaagggaacatccgagtgattgct

SEQ ID NO: 5749982 - DNA, 25 bp, Homo sapien
gagccacgccctcgctgcggggcct

SEQ ID NO: 5749983 - DNA, 25 bp, Homo sapien
ctcgctcacctgcctggctcgctgg

SEQ ID NO: 5749984 - DNA, 25 bp, Homo sapien
gacgccacagccctcggcacgggcc

SEQ ID NO: 5749985 - DNA, 25 bp, Homo sapien
tcatggtggtacaggtgtcccccgt

SEQ ID NO: 5749986 - DNA, 25 bp, Homo sapien
atgctgtgactttcgatgccgacga

SEQ ID NO: 5749987 - DNA, 25 bp, Homo sapien
gacgaggactccagtgcccgaagtg

SEQ ID NO: 5749988 - DNA, 25 bp, Homo sapien
ctcttgcattgatggcttcaatgtc

SEQ ID NO: 5749989 - DNA, 25 bp, Homo sapien
gaggccctcaggagtgtcaaggccg

SEQ ID NO: 5749990 - DNA, 25 bp, Homo sapien
agtgcccgaagtgcagctcgcccag

SEQ ID NO: 5749991 - DNA, 25 bp, Homo sapien
ggggtgggcgaggagcctctgggca

SEQ ID NO: 5749992 - DNA, 25 bp, Homo sapien
aagcaccgggacctgctgatggtgg

SEQ ID NO: 5749993 - DNA, 25 bp, Homo sapien
cggtgacgaggactccagtgcccga

SEQ ID NO: 5749994 - DNA, 25 bp, Homo sapien
caggccctggtcacctcttgcattg

SEQ ID NO: 5749995 - DNA, 25 bp, Homo sapien
gacgtgttccaggaggtgcaggccc

SEQ ID NO: 5749996 - DNA, 25 bp, Homo sapien
gtcgggggccgagggcagccgcctg

SEQ ID NO: 5749997 - DNA, 25 bp, Homo sapien
ctctcggctgtggctctgagtgcaa

SEQ ID NO: 5749998 - DNA, 25 bp, Homo sapien
atgagcgactgaggcaggagatgcg

SEQ ID NO: 5749999 - DNA, 25 bp, Homo sapien
ggactggggtgggttggtggcacca

SEQ ID NO: 5750000 - DNA, 25 bp, Homo sapien
tgagtttggccacactaatcgcacg

SEQ ID NO: 5750001 - DNA, 25 bp, Homo sapien
atgagctcgtgcggctgaaagggaa

SEQ ID NO: 5750002 - DNA, 25 bp, Homo sapien
tcagtcggcgcctgcgtgacagcca

SEQ ID NO: 5750003 - DNA, 25 bp, Homo sapien
cctgggccatcagcgaactgggccc

SEQ ID NO: 5750004 - DNA, 25 bp, Homo sapien
gtgggcagctgtatgtaccagggct

SEQ ID NO: 5750005 - DNA, 25 bp, Homo sapien
tccgcaactccaagctcacctacct

SEQ ID NO: 5750006 - DNA, 25 bp, Homo sapien
ccaagtgcagagcgtggacgacatc

SEQ ID NO: 5750007 - DNA, 25 bp, Homo sapien
aagtcgctgtcggctctgggggacg

SEQ ID NO: 5750008 - DNA, 25 bp, Homo sapien
gcgagtcccaggcccggaaccagca

SEQ ID NO: 5750009 - DNA, 25 bp, Homo sapien
gagagtggaggctcttcttctgccc

SEQ ID NO: 5750010 - DNA, 25 bp, Homo sapien
cggctgcctggtgccccgaggaggc

SEQ ID NO: 5750011 - DNA, 25 bp, Homo sapien
acctcttgcattgatggcttcaatg

SEQ ID NO: 5750012 - DNA, 25 bp, Homo sapien
cgtctgactgggagtacaccatcac

SEQ ID NO: 5750013 - DNA, 25 bp, Homo sapien
gagctgaacctagaggtgcagcaga

SEQ ID NO: 5750014 - DNA, 25 bp, Homo sapien
gtggtgacagcaagaccctcatggt

SEQ ID NO: 5750015 - DNA, 25 bp, Homo sapien
tgctgcgcaagtaccgccgcgagct

SEQ ID NO: 5750016 - DNA, 25 bp, Homo sapien
gggtgcgctctgtggagctggggcc

SEQ ID NO: 5750017 - DNA, 25 bp, Homo sapien
cacctgcctggctcgctggtctctc

SEQ ID NO: 5750018 - DNA, 25 bp, Homo sapien
cgctgcggcgacgcctggatcctgc

SEQ ID NO: 5750019 - DNA, 25 bp, Homo sapien
acttgctgaccttgcagccggcact

SEQ ID NO: 5750020 - DNA, 25 bp, Homo sapien
aggcctccgcaccacggggaagctg

SEQ ID NO: 5750021 - DNA, 25 bp, Homo sapien
accaacttgctgaccttgcagccgg

SEQ ID NO: 5750022 - DNA, 25 bp, Homo sapien
agtcggcgcctgcgtgacagccacg

SEQ ID NO: 5750023 - DNA, 25 bp, Homo sapien
aggtgctgaaggagatggaacagca

SEQ ID NO: 5750024 - DNA, 25 bp, Homo sapien
gggtgggttggtggcaccaatggca

SEQ ID NO: 5750025 - DNA, 25 bp, Homo sapien
gatgccgacgacgactccatcatcc

SEQ ID NO: 5750026 - DNA, 25 bp, Homo sapien
ggatggggaaggacctgaggccacc

SEQ ID NO: 5750027 - DNA, 25 bp, Homo sapien
tccctctgaaatcctatttaagaac

SEQ ID NO: 5750028 - DNA, 25 bp, Homo sapien
gggcgcgagcgggctggccgaggag

SEQ ID NO: 5750029 - DNA, 25 bp, Homo sapien
gcttgtcagacgccacagccctcgg

SEQ ID NO: 5750030 - DNA, 25 bp, Homo sapien
gcacagccaggagagcgcccagctc

SEQ ID NO: 5750031 - DNA, 25 bp, Homo sapien
cgctgtcggctctgggggacgtcat

SEQ ID NO: 5750032 - DNA, 25 bp, Homo sapien
gaggcaggagatgcggcgctgtgag

SEQ ID NO: 5750033 - DNA, 25 bp, Homo sapien
tggtacaggtgtcccccgtggagaa

SEQ ID NO: 5750034 - DNA, 25 bp, Homo sapien
gctggggggcaccgacttggagaag

SEQ ID NO: 5750035 - DNA, 25 bp, Homo sapien
acagccacgagaccattgccagcct

SEQ ID NO: 5750036 - DNA, 25 bp, Homo sapien
ctgcgctcccgccagggccacgtgc

SEQ ID NO: 5750037 - DNA, 25 bp, Homo sapien
gcagatgctggaggagatgcagtcc

SEQ ID NO: 5750038 - DNA, 25 bp, Homo sapien
gtgcagctcgcccagccctagctca

SEQ ID NO: 5750039 - DNA, 25 bp, Homo sapien
acctgaggccaccaatgctgtgact

SEQ ID NO: 5750040 - DNA, 25 bp, Homo sapien
aacggtgtctctcggctgtggctct

SEQ ID NO: 5750041 - DNA, 25 bp, Homo sapien
gattgctcgtgtccggccagtcacc

SEQ ID NO: 5750042 - DNA, 25 bp, Homo sapien
tacacgatggaggggaccgctgaga

SEQ ID NO: 5750043 - DNA, 25 bp, Homo sapien
tagccaggcccaggaagtgagccga

SEQ ID NO: 5750044 - DNA, 25 bp, Homo sapien
agaagctcattagccaggcccagga

SEQ ID NO: 5750045 - DNA, 25 bp, Homo sapien
tctccttcaaggagggttcccgcag

SEQ ID NO: 5750046 - DNA, 25 bp, Homo sapien
ctgaacgagcacagctcccgctcgc

SEQ ID NO: 5750047 - DNA, 25 bp, Homo sapien
ggagatgcggcgctgtgaggccgag

SEQ ID NO: 5750048 - DNA, 25 bp, Homo sapien
gataccccagtctgcggtgacgagg

SEQ ID NO: 5750049 - DNA, 25 bp, Homo sapien
cgaagtgcagctcgcccagccctag

SEQ ID NO: 5750050 - DNA, 25 bp, Homo sapien
cccgtggagaagaacactagcgaga

SEQ ID NO: 5750051 - DNA, 25 bp, Homo sapien
cggcgtggagctgcctcctgccggc

SEQ ID NO: 5750052 - DNA, 25 bp, Homo sapien
tcaaagatgagaaacatgttcagaa

SEQ ID NO: 5750053 - DNA, 25 bp, Homo sapien
gcgcgagcgggctggccgaggagga

SEQ ID NO: 5750054 - DNA, 25 bp, Homo sapien
gtcgtccaagaccaagcaggccctc

SEQ ID NO: 5750055 - DNA, 25 bp, Homo sapien
caggtccctgcccaggttgtgagca

SEQ ID NO: 5750056 - DNA, 25 bp, Homo sapien
tggagaagaacactagcgagacgct

SEQ ID NO: 5750057 - DNA, 25 bp, Homo sapien
ctggatcctgcctccgccaggccgg

SEQ ID NO: 5750058 - DNA, 25 bp, Homo sapien
agaggcagccagcgggtgggggatt

SEQ ID NO: 5750059 - DNA, 25 bp, Homo sapien
acatcaacaagtcgctgtcggctct

SEQ ID NO: 5750060 - DNA, 25 bp, Homo sapien
cctggctcgctggtctctcgaattt

SEQ ID NO: 5750061 - DNA, 25 bp, Homo sapien
tgctgcaggaggccctcaggagtgt

SEQ ID NO: 5750062 - DNA, 25 bp, Homo sapien
aaggcgggggtggctgctcttcctg

SEQ ID NO: 5750063 - DNA, 25 bp, Homo sapien
gcagaagaccgaccggctggctgag

SEQ ID NO: 5750064 - DNA, 25 bp, Homo sapien
gcacgaccgagttcaccaacctgaa

SEQ ID NO: 5750065 - DNA, 25 bp, Homo sapien
actgggagtacaccatcaccgtcag

SEQ ID NO: 5750066 - DNA, 25 bp, Homo sapien
actgcggaccctcaccaacgactac

SEQ ID NO: 5750067 - DNA, 25 bp, Homo sapien
atcaccgtcagcgctgcggagatct

SEQ ID NO: 5750068 - DNA, 25 bp, Homo sapien
ggccgagctgcaagagctgcgcaca

SEQ ID NO: 5750069 - DNA, 25 bp, Homo sapien
ttcttctgccccgtctcccctcaaa

SEQ ID NO: 5750070 - DNA, 25 bp, Homo sapien
ttgtgagcacagccaggagagcgcc

SEQ ID NO: 5750071 - DNA, 25 bp, Homo sapien
cccagtccccacctgtcaagtatgt

SEQ ID NO: 5750072 - DNA, 25 bp, Homo sapien
agctcgcccagccctagctcagtgc

SEQ ID NO: 5750073 - DNA, 25 bp, Homo sapien
tggatccatccggaggaagctgcag

SEQ ID NO: 5750074 - DNA, 25 bp, Homo sapien
actcagcccccagctctgggaccag

SEQ ID NO: 5750075 - DNA, 25 bp, Homo sapien
caccgtcagcgctgcggagatctac

SEQ ID NO: 5750076 - DNA, 25 bp, Homo sapien
atcctgcctccgccaggccggctgc

SEQ ID NO: 5750077 - DNA, 25 bp, Homo sapien
aggcgtccggaccaacttgctgacc

SEQ ID NO: 5750078 - DNA, 25 bp, Homo sapien
gcgctctgtggagctggggcctggg

SEQ ID NO: 5750079 - DNA, 25 bp, Homo sapien
ctgtgaggccgagctgcaagagctg

SEQ ID NO: 5750080 - DNA, 25 bp, Homo sapien
ctgaaagggaacatccgagtgattg

SEQ ID NO: 5750081 - DNA, 25 bp, Homo sapien
cgatctgagctggggggcaccgact

SEQ ID NO: 5750082 - DNA, 25 bp, Homo sapien
gccatcgaggaggtcaacagcaaca

SEQ ID NO: 5750083 - DNA, 25 bp, Homo sapien
catggtcccctctcgcaggacgtgg

SEQ ID NO: 5750084 - DNA, 25 bp, Homo sapien
agatggaacagcagctgcagagctc

SEQ ID NO: 5750085 - DNA, 25 bp, Homo sapien
ccccaggccatggtcccctctcgca

SEQ ID NO: 5750086 - DNA, 25 bp, Homo sapien
ctggccgaggaggaggcggcggcgt

SEQ ID NO: 5750087 - DNA, 25 bp, Homo sapien
cagagcccaggtggagatgaaggct

SEQ ID NO: 5750088 - DNA, 25 bp, Homo sapien
tccacctgctgcacaagggcaagcc

SEQ ID NO: 5750089 - DNA, 25 bp, Homo sapien
gtccttcgagctggacaaggtcttc

SEQ ID NO: 5750090 - DNA, 25 bp, Homo sapien
tggcggaaagcaaaggcatgctgtc

SEQ ID NO: 5750091 - DNA, 25 bp, Homo sapien
tgcgtaagaagtgccacaatgagct

SEQ ID NO: 5750092 - DNA, 25 bp, Homo sapien
ggaaagagcctcaggaaaaactgga

SEQ ID NO: 5750093 - DNA, 25 bp, Homo sapien
acccaggctttctcggcccctctcc

SEQ ID NO: 5750094 - DNA, 25 bp, Homo sapien
cgcccgccctttcccacacaccggc

SEQ ID NO: 5750095 - DNA, 25 bp, Homo sapien
gtcagacgccacagccctcggcacg

SEQ ID NO: 5750096 - DNA, 25 bp, Homo sapien
gtgcggctgaaagggaacatccgag

SEQ ID NO: 5750097 - DNA, 25 bp, Homo sapien
tcctcagggacctgctagggaaaga

SEQ ID NO: 5750098 - DNA, 25 bp, Homo sapien
caggaggaggagcggctcagtcggc

SEQ ID NO: 5750099 - DNA, 25 bp, Homo sapien
gcgccaggacccccggaggtagagg

SEQ ID NO: 5750100 - DNA, 25 bp, Homo sapien
gcaccgggacctgctgatggtggag

SEQ ID NO: 5750101 - DNA, 25 bp, Homo sapien
ctggctgaggtggagctgcgactca

SEQ ID NO: 5750102 - DNA, 25 bp, Homo sapien
atggaacagcagctgcagagctcac

SEQ ID NO: 5750103 - DNA, 25 bp, Homo sapien
actcaaggactgcctggctgagaag

SEQ ID NO: 5750104 - DNA, 25 bp, Homo sapien
aggagagcgcccagctccgtgacaa

SEQ ID NO: 5750105 - DNA, 25 bp, Homo sapien
gggccgggccgagccccgggcgctg

SEQ ID NO: 5750106 - DNA, 25 bp, Homo sapien
tggagctggggcctgggctacgcag

SEQ ID NO: 5750107 - DNA, 25 bp, Homo sapien
cggaccctcaccaacgactacaatg

SEQ ID NO: 5750108 - DNA, 25 bp, Homo sapien
gacgtggaacctgggagccacgccc

SEQ ID NO: 5750109 - DNA, 25 bp, Homo sapien
gtgaggccgagctgcaagagctgcg

SEQ ID NO: 5750110 - DNA, 25 bp, Homo sapien
actccaagctcacctacctgctgca

SEQ ID NO: 5750111 - DNA, 25 bp, Homo sapien
acctgaacgagcacagctcccgctc

SEQ ID NO: 5750112 - DNA, 25 bp, Homo sapien
agctgcgcacaaagccagcaggtcc

SEQ ID NO: 5750113 - DNA, 25 bp, Homo sapien
gcgtggactgcagcacaggcctccg

SEQ ID NO: 5750114 - DNA, 25 bp, Homo sapien
atggctcgccccgccccagccccag

SEQ ID NO: 5750115 - DNA, 25 bp, Homo sapien
cacgatggaggggaccgctgagaac

SEQ ID NO: 5750116 - DNA, 25 bp, Homo sapien
cagtagccgccctggatccatccgg

SEQ ID NO: 5750117 - DNA, 25 bp, Homo sapien
gccagcccggccgcccgccctttcc

SEQ ID NO: 5750118 - DNA, 25 bp, Homo sapien
ggagcatctagagtgggagccggct

SEQ ID NO: 5750119 - DNA, 25 bp, Homo sapien
ggagaaggcgtctgactgggagtac

SEQ ID NO: 5750120 - DNA, 25 bp, Homo sapien
tggctggctcggagcgcgtgggcaa

SEQ ID NO: 5750121 - DNA, 25 bp, Homo sapien
gggccctcactggcctgtccctgct

SEQ ID NO: 5750122 - DNA, 25 bp, Homo sapien
accttgcagccggcactgcggaccc

SEQ ID NO: 5750123 - DNA, 25 bp, Homo sapien
tgacggtgcgaggcgtggactgcag

SEQ ID NO: 5750124 - DNA, 25 bp, Homo sapien
agagctgcgcacaaagccagcaggt

SEQ ID NO: 5750125 - DNA, 25 bp, Homo sapien
cggcacgggcccactcagcccccag

SEQ ID NO: 5750126 - DNA, 25 bp, Homo sapien
aggaaacggtgtctctcggctgtgg

SEQ ID NO: 5750127 - DNA, 25 bp, Homo sapien
ggccctgcagctgctcttctccgag

SEQ ID NO: 5750128 - DNA, 25 bp, Homo sapien
tctattccctcaagtttgctgagag

SEQ ID NO: 5750129 - DNA, 25 bp, Homo sapien
gctgccctgcgctcccgccagggcc

SEQ ID NO: 5750130 - DNA, 25 bp, Homo sapien
ggagtgtcaaggccgagataggcca

SEQ ID NO: 5750131 - DNA, 25 bp, Homo sapien
ggcgtctgactgggagtacaccatc

SEQ ID NO: 5750132 - DNA, 25 bp, Homo sapien
tcttctccccacaggcctcgcagca

SEQ ID NO: 5750133 - DNA, 25 bp, Homo sapien
cgcagcacatcaacaagtcgctgtc

SEQ ID NO: 5750134 - DNA, 25 bp, Homo sapien
ctgggctacgcagggcagagcttgg

SEQ ID NO: 5750135 - DNA, 25 bp, Homo sapien
ggtgtttgagtttggccacactaat

SEQ ID NO: 5750136 - DNA, 25 bp, Homo sapien
ccgaccggctggctgaggtggagct

SEQ ID NO: 5750137 - DNA, 25 bp, Homo sapien
aggggaccgctgagaacccaggtat

SEQ ID NO: 5750138 - DNA, 25 bp, Homo sapien
gccggcactgcggaccctcaccaac

SEQ ID NO: 5750139 - DNA, 25 bp, Homo sapien
gctgcaagagctgcgcacaaagcca

SEQ ID NO: 5750140 - DNA, 25 bp, Homo sapien
cgccctcgctgcggggcctgtggag

SEQ ID NO: 5750141 - DNA, 25 bp, Homo sapien
ccacctgtcaagtatgtcatcaaga

SEQ ID NO: 5750142 - DNA, 25 bp, Homo sapien
gctgcagctgcgtaagaagtgccac

SEQ ID NO: 5750143 - DNA, 25 bp, Homo sapien
ggaggcgcatggcctcccgccacgg

SEQ ID NO: 5750144 - DNA, 25 bp, Homo sapien
ccgagcccttagcgtggactgggct

SEQ ID NO: 5750145 - DNA, 25 bp, Homo sapien
ccacagccctcggcacgggcccact

SEQ ID NO: 5750146 - DNA, 25 bp, Homo sapien
tggacgacatcaacaaggtgtttga

SEQ ID NO: 5750147 - DNA, 25 bp, Homo sapien
aacctagaggtgcagcagaagaccg

SEQ ID NO: 5750148 - DNA, 25 bp, Homo sapien
ctggtggacttggctggctcggagc

SEQ ID NO: 5750149 - DNA, 25 bp, Homo sapien
cagccctcggggaagtcgcggccac

SEQ ID NO: 5750150 - DNA, 25 bp, Homo sapien
gcgctcccgccagggccacgtgccc

SEQ ID NO: 5750151 - DNA, 25 bp, Homo sapien
ctgaggtggagctgcgactcaagga

SEQ ID NO: 5750152 - DNA, 25 bp, Homo sapien
agaaggcgtctgactgggagtacac

SEQ ID NO: 5750153 - DNA, 25 bp, Homo sapien
gggggattctgctgctcgctcacct

SEQ ID NO: 5750154 - DNA, 25 bp, Homo sapien
agctcccgctcgcacgcgctgctca

SEQ ID NO: 5750155 - DNA, 25 bp, Homo sapien
aggccatcgaggaggtcaacagcaa

SEQ ID NO: 5750156 - DNA, 25 bp, Homo sapien
ggccctcaggagtgtcaaggccgag

SEQ ID NO: 5750157 - DNA, 25 bp, Homo sapien
gccccggaagcccccacgggctcta

SEQ ID NO: 5750158 - DNA, 25 bp, Homo sapien
tctagagtgggagccggcttgtcag

SEQ ID NO: 5750159 - DNA, 25 bp, Homo sapien
gccattgaggaggcctttgccagag

SEQ ID NO: 5750160 - DNA, 25 bp, Homo sapien
gtgattgctcgtgtccggccagtca

SEQ ID NO: 5750161 - DNA, 25 bp, Homo sapien
aaccagcgggccctgcagctgctct

SEQ ID NO: 5750162 - DNA, 25 bp, Homo sapien
gtacgagtcagagctggagcgggcc

SEQ ID NO: 5750163 - DNA, 25 bp, Homo sapien
tgctgcacaagggcaagcctgtgtc

SEQ ID NO: 5750164 - DNA, 25 bp, Homo sapien
cgccaggccggctgcctggtgcccc

SEQ ID NO: 5750165 - DNA, 25 bp, Homo sapien
gccacaatgagctcgtgcggctgaa

SEQ ID NO: 5750166 - DNA, 25 bp, Homo sapien
aagcttagccatttttacttattaa

SEQ ID NO: 5750167 - DNA, 25 bp, Homo sapien
cccgctgggcctgaagctgggccct

SEQ ID NO: 5750168 - DNA, 25 bp, Homo sapien
acggtgcgaggcgtggactgcagca

SEQ ID NO: 5750169 - DNA, 25 bp, Homo sapien
ctggcaggcctgggccatcagcgaa

SEQ ID NO: 5750170 - DNA, 25 bp, Homo sapien
gccccgggcgctgcggcgacgcctg

SEQ ID NO: 5750171 - DNA, 25 bp, Homo sapien
caagaaccgggccattgaggaggcc

SEQ ID NO: 5750172 - DNA, 25 bp, Homo sapien
aatggcagccctccccgcccctctc

SEQ ID NO: 5750173 - DNA, 25 bp, Homo sapien
ggaggtagaggcgagagtggaggct

SEQ ID NO: 5750174 - DNA, 25 bp, Homo sapien
ggttgtgagcacagccaggagagcg

SEQ ID NO: 5750175 - DNA, 25 bp, Homo sapien
tgtggagctggggcctgggctacgc

SEQ ID NO: 5750176 - DNA, 25 bp, Homo sapien
cttccctctgaaatcctatttaaga

SEQ ID NO: 5750177 - DNA, 25 bp, Homo sapien
tgggggacgtcattgctgccctgcg

SEQ ID NO: 5750178 - DNA, 25 bp, Homo sapien
tgaccttgcagccggcactgcggac

SEQ ID NO: 5750179 - DNA, 25 bp, Homo sapien
cccgctcgcacgcgctgctcatcgt

SEQ ID NO: 5750180 - DNA, 25 bp, Homo sapien
cggccactgcctgtgtgacggatgt

SEQ ID NO: 5750181 - DNA, 25 bp, Homo sapien
agaagaccgaccggctggctgaggt

SEQ ID NO: 5750182 - DNA, 25 bp, Homo sapien
tacaccatcaccgtcagcgctgcgg

SEQ ID NO: 5750183 - DNA, 25 bp, Homo sapien
aacacctgaaggagaagctcattag

SEQ ID NO: 5750184 - DNA, 25 bp, Homo sapien
ggtcctggtcaagccaggagcatct

SEQ ID NO: 5750185 - DNA, 25 bp, Homo sapien
cgacatcaacaaggtgtttgagttt

SEQ ID NO: 5750186 - DNA, 25 bp, Homo sapien
cgtggacgacatcaacaaggtgttt

SEQ ID NO: 5750187 - DNA, 25 bp, Homo sapien
tacaatgggctcaagcggcaggtgc

SEQ ID NO: 5750188 - DNA, 25 bp, Homo sapien
ggctggccgaggaggaggcggcggc

SEQ ID NO: 5750189 - DNA, 25 bp, Homo sapien
aaaagataccccagtctgcggtgac

SEQ ID NO: 5750190 - DNA, 25 bp, Homo sapien
cacgagaatctagcaggcgtccgga

SEQ ID NO: 5750191 - DNA, 25 bp, Homo sapien
gaggtgcaggccctggtcacctctt

SEQ ID NO: 5750192 - DNA, 25 bp, Homo sapien
gagctgctgcgcaagtaccgccgcg

SEQ ID NO: 5750193 - DNA, 25 bp, Homo sapien
gaccctgcaggtagaacacctgaag

SEQ ID NO: 5750194 - DNA, 25 bp, Homo sapien
aagtgcagagcgtggacgacatcaa

SEQ ID NO: 5750195 - DNA, 25 bp, Homo sapien
gagtgggagccggcttgtcagacgc

SEQ ID NO: 5750196 - DNA, 25 bp, Homo sapien
gaaggctgtgcacgagaatctagca

SEQ ID NO: 5750197 - DNA, 25 bp, Homo sapien
cccttccgcaactccaagctcacct

SEQ ID NO: 5750198 - DNA, 25 bp, Homo sapien
taagaagtgccacaatgagctcgtg

SEQ ID NO: 5750199 - DNA, 25 bp, Homo sapien
agacagtggaggtggagtcgtccaa

SEQ ID NO: 5750200 - DNA, 25 bp, Homo sapien
ctttgcgtacggccagacgggcgcc

SEQ ID NO: 5750201 - DNA, 25 bp, Homo sapien
gacaagaaccgggccattgaggagg

SEQ ID NO: 5750202 - DNA, 25 bp, Homo sapien
ctgaccgcgcggctccgggcgcaga

SEQ ID NO: 5750203 - DNA, 25 bp, Homo sapien
gcccactcagcccccagctctggga

SEQ ID NO: 5750204 - DNA, 25 bp, Homo sapien
gtgagccgactgcgatctgagctgg

SEQ ID NO: 5750205 - DNA, 25 bp, Homo sapien
tgggaccagtagccgccctggatcc

SEQ ID NO: 5750206 - DNA, 25 bp, Homo sapien
caagctgtcccagctgcagctggag

SEQ ID NO: 5750207 - DNA, 25 bp, Homo sapien
gcaggattcgcttagtggtgacagc

SEQ ID NO: 5750208 - DNA, 25 bp, Homo sapien
ggcccagtccccacctgtcaagtat

SEQ ID NO: 5750209 - DNA, 25 bp, Homo sapien
aagaacttttggaagcttagccatt

SEQ ID NO: 5750210 - DNA, 25 bp, Homo sapien
ggagatgaaggctgtgcacgagaat

SEQ ID NO: 5750211 - DNA, 25 bp, Homo sapien
gcacagctcccgctcgcacgcgctg

SEQ ID NO: 5750212 - DNA, 25 bp, Homo sapien
agatgaaggctgtgcacgagaatct

SEQ ID NO: 5750213 - DNA, 25 bp, Homo sapien
tgtggctctgagtgcaaattgcatg

SEQ ID NO: 5750214 - DNA, 25 bp, Homo sapien
gaggtgcaggagaaggcgtctgact

SEQ ID NO: 5750215 - DNA, 25 bp, Homo sapien
gaggaggtcaacagcaacaaccagg

SEQ ID NO: 5750216 - DNA, 25 bp, Homo sapien
gcgagcgggctggccgaggaggagg

SEQ ID NO: 5750217 - DNA, 25 bp, Homo sapien
gtgccacaatgagctcgtgcggctg

SEQ ID NO: 5750218 - DNA, 25 bp, Homo sapien
ggaggttgagaactgggcgtggaaa

SEQ ID NO: 5750219 - DNA, 25 bp, Homo sapien
ctcgcccagccctagctcagtgccg

SEQ ID NO: 5750220 - DNA, 25 bp, Homo sapien
ttcagaaggaaacggtgtctctcgg

SEQ ID NO: 5750221 - DNA, 25 bp, Homo sapien
ctgtccctgctgcagcgccaggacc

SEQ ID NO: 5750222 - DNA, 25 bp, Homo sapien
cggctgtggctctgagtgcaaattg

SEQ ID NO: 5750223 - DNA, 25 bp, Homo sapien
caacaaccaggagctgctgcgcaag

SEQ ID NO: 5750224 - DNA, 25 bp, Homo sapien
gagtcgtccaagaccaagcaggccc

SEQ ID NO: 5750225 - DNA, 25 bp, Homo sapien
agccggggatggctcgccccgcccc

SEQ ID NO: 5750226 - DNA, 25 bp, Homo sapien
ccatgtacgagtcagagctggagcg

SEQ ID NO: 5750227 - DNA, 25 bp, Homo sapien
caagtttgctgagagggtgcgctct

SEQ ID NO: 5750228 - DNA, 25 bp, Homo sapien
ctcacctacctgctgcaggattcgc

SEQ ID NO: 5750229 - DNA, 25 bp, Homo sapien
ccgcgcggctccgggcgcagattgc

SEQ ID NO: 5750230 - DNA, 25 bp, Homo sapien
caggagtgtcaaggccgagataggc

SEQ ID NO: 5750231 - DNA, 25 bp, Homo sapien
tgcggagatctacaatgaggtcctc

SEQ ID NO: 5750232 - DNA, 25 bp, Homo sapien
caggcccggaaccagcacctgcagg

SEQ ID NO: 5750233 - DNA, 25 bp, Homo sapien
gaagaggacaagaaccgggccattg

SEQ ID NO: 5750234 - DNA, 25 bp, Homo sapien
ctgcgggaggcgcagcacatcaaca

SEQ ID NO: 5750235 - DNA, 25 bp, Homo sapien
gtccggccagtcaccaaagaggatg

SEQ ID NO: 5750236 - DNA, 25 bp, Homo sapien
tcgaggaggtcaacagcaacaacca

SEQ ID NO: 5750237 - DNA, 25 bp, Homo sapien
cgaattttcttccctctgaaatcct

SEQ ID NO: 5750238 - DNA, 25 bp, Homo sapien
ctgggagccacgccctcgctgcggg

SEQ ID NO: 5750239 - DNA, 25 bp, Homo sapien
atcagcgaactgggccccgtgagga

SEQ ID NO: 5750240 - DNA, 25 bp, Homo sapien
agggttcccgcagctggggggtgtg

SEQ ID NO: 5750241 - DNA, 25 bp, Homo sapien
gtggagctgcctcctgccggcgggc

SEQ ID NO: 5750242 - DNA, 25 bp, Homo sapien
agccagcaggtccctgcccaggttg

SEQ ID NO: 5750243 - DNA, 25 bp, Homo sapien
ggccctcagcgagtcccaggcccgg

SEQ ID NO: 5750244 - DNA, 25 bp, Homo sapien
agaacactagcgagacgctctattc

SEQ ID NO: 5750245 - DNA, 25 bp, Homo sapien
tccgccaggccggctgcctggtgcc

SEQ ID NO: 5750246 - DNA, 25 bp, Homo sapien
tgccgacgacgactccatcatccac

SEQ ID NO: 5750247 - DNA, 25 bp, Homo sapien
cgctgggcctgaagctgggccctca

SEQ ID NO: 5750248 - DNA, 25 bp, Homo sapien
cctcactggcctgtccctgctgcag

SEQ ID NO: 5750249 - DNA, 25 bp, Homo sapien
ggcccctctcctcagcttgcagagc

SEQ ID NO: 5750250 - DNA, 25 bp, Homo sapien
aggcctttgccagagcccaggtgga

SEQ ID NO: 5750251 - DNA, 25 bp, Homo sapien
caaaggcatgctgtcagagctgaac

SEQ ID NO: 5750252 - DNA, 25 bp, Homo sapien
gacgacgactccatcatccacctgc

SEQ ID NO: 5750253 - DNA, 25 bp, Homo sapien
ggaaagcaaaggcatgctgtcagag

SEQ ID NO: 5750254 - DNA, 25 bp, Homo sapien
ggtggctgctcttcctggcaggcct

SEQ ID NO: 5750255 - DNA, 25 bp, Homo sapien
acaagtcgctgtcggctctggggga

SEQ ID NO: 5750256 - DNA, 25 bp, Homo sapien
tctcacccaggctttctcggcccct

SEQ ID NO: 5750257 - DNA, 25 bp, Homo sapien
cctgctgcacaagggcaagcctgtg

SEQ ID NO: 5750258 - DNA, 25 bp, Homo sapien
cggagatctacaatgaggtcctcag

SEQ ID NO: 5750259 - DNA, 25 bp, Homo sapien
caccatcaccgtcagcgctgcggag

SEQ ID NO: 5750260 - DNA, 25 bp, Homo sapien
cctccgccaggccggctgcctggtg

SEQ ID NO: 5750261 - DNA, 25 bp, Homo sapien
tgcctccgccaggccggctgcctgg

SEQ ID NO: 5750262 - DNA, 25 bp, Homo sapien
aaggtgtttgagtttggccacacta

SEQ ID NO: 5750263 - DNA, 25 bp, Homo sapien
ttccctcaagtttgctgagagggtg

SEQ ID NO: 5750264 - DNA, 25 bp, Homo sapien
aggagctgctgcgcaagtaccgccg

SEQ ID NO: 5750265 - DNA, 25 bp, Homo sapien
ccagctccgtgacaagctgtcccag

SEQ ID NO: 5750266 - DNA, 25 bp, Homo sapien
gctgagaaggcacaggaggaggagc

SEQ ID NO: 5750267 - DNA, 25 bp, Homo sapien
gaaacggtgtctctcggctgtggct

SEQ ID NO: 5750268 - DNA, 25 bp, Homo sapien
tagtggtgacagcaagaccctcatg

SEQ ID NO: 5750269 - DNA, 25 bp, Homo sapien
cggatgtgaccccgctgggcctgaa

SEQ ID NO: 5750270 - DNA, 25 bp, Homo sapien
tttctcggcccctctcctcagcttg

SEQ ID NO: 5750271 - DNA, 25 bp, Homo sapien
tgcccaggttgtgagcacagccagg

SEQ ID NO: 5750272 - DNA, 25 bp, Homo sapien
tcgcaggacgtggaacctgggagcc

SEQ ID NO: 5750273 - DNA, 25 bp, Homo sapien
agaagcaccgggacctgctgatggt

SEQ ID NO: 5750274 - DNA, 25 bp, Homo sapien
gcagagcgtggacgacatcaacaag

SEQ ID NO: 5750275 - DNA, 25 bp, Homo sapien
tctcctcagcttgcagagctggcca

SEQ ID NO: 5750276 - DNA, 25 bp, Homo sapien
aagaccgaccggctggctgaggtgg

SEQ ID NO: 5750277 - DNA, 25 bp, Homo sapien
tgtgactttcgatgccgacgacgac

SEQ ID NO: 5750278 - DNA, 25 bp, Homo sapien
gccctagctcagtgccgagccctta

SEQ ID NO: 5750279 - DNA, 25 bp, Homo sapien
cagccccagccagcccggccgcccg

SEQ ID NO: 5750280 - DNA, 25 bp, Homo sapien
gtcaagtatgtcatcaagacagtgg

SEQ ID NO: 5750281 - DNA, 25 bp, Homo sapien
ccatcaccgtcagcgctgcggagat

SEQ ID NO: 5750282 - DNA, 25 bp, Homo sapien
gagcgcccagctccgtgacaagctg

SEQ ID NO: 5750283 - DNA, 25 bp, Homo sapien
tccaagaccaagcaggccctcagcg

SEQ ID NO: 5750284 - DNA, 25 bp, Homo sapien
gcacctgcaggagcaggtggctatg

SEQ ID NO: 5750285 - DNA, 25 bp, Homo sapien
ccgctgagaacccaggtatcaacca

SEQ ID NO: 5750286 - DNA, 25 bp, Homo sapien
ccccacctgtcaagtatgtcatcaa

SEQ ID NO: 5750287 - DNA, 25 bp, Homo sapien
tggagaatgagcgactgaggcagga

SEQ ID NO: 5750288 - DNA, 25 bp, Homo sapien
acatccgagtgattgctcgtgtccg

SEQ ID NO: 5750289 - DNA, 25 bp, Homo sapien
aggactccagtgcccgaagtgcagc

SEQ ID NO: 5750290 - DNA, 25 bp, Homo sapien
actacaatgggctcaagcggcaggt

SEQ ID NO: 5750291 - DNA, 25 bp, Homo sapien
gcaggtgctgaaggagatggaacag

SEQ ID NO: 5750292 - DNA, 25 bp, Homo sapien
ccaggccatggtcccctctcgcagg

SEQ ID NO: 5750293 - DNA, 25 bp, Homo sapien
gcagctgctcttctccgaggtgcag

SEQ ID NO: 5750294 - DNA, 25 bp, Homo sapien
gcgagagtggaggctcttcttctgc

SEQ ID NO: 5750295 - DNA, 25 bp, Homo sapien
agctggccagccccctccttagggg

SEQ ID NO: 5750296 - DNA, 25 bp, Homo sapien
gctggaggagatgcagtccctggaa

SEQ ID NO: 5750297 - DNA, 25 bp, Homo sapien
attgccagcctgcgggcccagtccc

SEQ ID NO: 5750298 - DNA, 25 bp, Homo sapien
gagtgggccgggccccggagcccga

SEQ ID NO: 5750299 - DNA, 25 bp, Homo sapien
ggctggcagaggcagccagcgggtg

SEQ ID NO: 5750300 - DNA, 25 bp, Homo sapien
tggccccggaagcccccacgggctc

SEQ ID NO: 5750301 - DNA, 25 bp, Homo sapien
cctgcgtgacagccacgagaccatt

SEQ ID NO: 5750302 - DNA, 25 bp, Homo sapien
gccactgcctgtgtgacggatgtga

SEQ ID NO: 5750303 - DNA, 25 bp, Homo sapien
gagctgcagctgcgtaagaagtgcc

SEQ ID NO: 5750304 - DNA, 25 bp, Homo sapien
cccgggcgctgcggcgacgcctgga

SEQ ID NO: 5750305 - DNA, 25 bp, Homo sapien
aggaaaaactggagatccggctgtg

SEQ ID NO: 5750306 - DNA, 25 bp, Homo sapien
accacggggaagctgaacctggtgg

SEQ ID NO: 5750307 - DNA, 25 bp, Homo sapien
gtcccctctcgcaggacgtggaacc

SEQ ID NO: 5750308 - DNA, 25 bp, Homo sapien
gtcccagctgcagctggagatggcg

SEQ ID NO: 5750309 - DNA, 25 bp, Homo sapien
ccctggtcacctcttgcattgatgg

SEQ ID NO: 5750310 - DNA, 25 bp, Homo sapien
cacgggctctacctgaccctgcagg

SEQ ID NO: 5750311 - DNA, 25 bp, Homo sapien
ccagcctgcgggcccagtccccacc

SEQ ID NO: 5750312 - DNA, 25 bp, Homo sapien
gtcagcgctgcggagatctacaatg

SEQ ID NO: 5750313 - DNA, 25 bp, Homo sapien
ccgccccagccccagccagcccggc

SEQ ID NO: 5750314 - DNA, 25 bp, Homo sapien
tgtcaaggccgagataggccaggcc

SEQ ID NO: 5750315 - DNA, 25 bp, Homo sapien
gtgtgcggaggcgcatggcctcccg

SEQ ID NO: 5750316 - DNA, 25 bp, Homo sapien
catgctgtcagagctgaacctagag

SEQ ID NO: 5750317 - DNA, 25 bp, Homo sapien
ttgaggaggcctttgccagagccca

SEQ ID NO: 5750318 - DNA, 25 bp, Homo sapien
accctcatggtggtacaggtgtccc

SEQ ID NO: 5750319 - DNA, 25 bp, Homo sapien
cgaggaggctgctgagccccaggcc

SEQ ID NO: 5750320 - DNA, 25 bp, Homo sapien
agaacccaggtatcaaccagcgggc

SEQ ID NO: 5750321 - DNA, 25 bp, Homo sapien
gcagctgcagagctcacaccagctg

SEQ ID NO: 5750322 - DNA, 25 bp, Homo sapien
ctcggcacgggcccactcagccccc

SEQ ID NO: 5750323 - DNA, 25 bp, Homo sapien
atggctggcagaggcagccagcggg

SEQ ID NO: 5750324 - DNA, 25 bp, Homo sapien
cactgcctgtgtgacggatgtgacc

SEQ ID NO: 5750325 - DNA, 25 bp, Homo sapien
cccagctctgggaccagtagccgcc

SEQ ID NO: 5750326 - DNA, 25 bp, Homo sapien
cggggccgtgctgtgtttatggctg

SEQ ID NO: 5750327 - DNA, 25 bp, Homo sapien
agaatctagcaggcgtccggaccaa

SEQ ID NO: 5750328 - DNA, 25 bp, Homo sapien
tgcctggtgccccgaggaggctgct

SEQ ID NO: 5750329 - DNA, 25 bp, Homo sapien
aagccaggagcatctagagtgggag

SEQ ID NO: 5750330 - DNA, 25 bp, Homo sapien
atgaggtcctcagggacctgctagg

SEQ ID NO: 5750331 - DNA, 25 bp, Homo sapien
aaggccgagataggccaggccatcg

SEQ ID NO: 5750332 - DNA, 25 bp, Homo sapien
atgaaggctgtgcacgagaatctag

SEQ ID NO: 5750333 - DNA, 25 bp, Homo sapien
aggccatggtcccctctcgcaggac

SEQ ID NO: 5750334 - DNA, 25 bp, Homo sapien
agttccaagtgcagagcgtggacga

SEQ ID NO: 5750335 - DNA, 25 bp, Homo sapien
cttccgcaactccaagctcacctac

SEQ ID NO: 5750336 - DNA, 25 bp, Homo sapien
aaggcacaggaggaggagcggctca

SEQ ID NO: 5750337 - DNA, 25 bp, Homo sapien
ccaggagagcgcccagctccgtgac

SEQ ID NO: 5750338 - DNA, 25 bp, Homo sapien
ctgcaggattcgcttagtggtgaca

SEQ ID NO: 5750339 - DNA, 25 bp, Homo sapien
atgcggcgctgtgaggccgagctgc

SEQ ID NO: 5750340 - DNA, 25 bp, Homo sapien
gccagggccacgtgcccttccgcaa

SEQ ID NO: 5750341 - DNA, 25 bp, Homo sapien
ccacaggcctcgcagcaggacgtgt

SEQ ID NO: 5750342 - DNA, 25 bp, Homo sapien
gggccattgaggaggcctttgccag

SEQ ID NO: 5750343 - DNA, 25 bp, Homo sapien
gtgtcccccgtggagaagaacacta

SEQ ID NO: 5750344 - DNA, 25 bp, Homo sapien
aaggagaagctcattagccaggccc

SEQ ID NO: 5750345 - DNA, 25 bp, Homo sapien
agcctgcgggcccagtccccacctg

SEQ ID NO: 5750346 - DNA, 25 bp, Homo sapien
gaccctcaccaacgactacaatggg

SEQ ID NO: 5750347 - DNA, 25 bp, Homo sapien
tgggcctctcacccaggctttctcg

SEQ ID NO: 5750348 - DNA, 25 bp, Homo sapien
gcgcaagtaccgccgcgagctgcag

SEQ ID NO: 5750349 - DNA, 25 bp, Homo sapien
agacgggcgccggcaagacgtacac

SEQ ID NO: 5750350 - DNA, 25 bp, Homo sapien
atccgagtgattgctcgtgtccggc

SEQ ID NO: 5750351 - DNA, 25 bp, Homo sapien
gcatggcctcccgccacggggccgt

SEQ ID NO: 5750352 - DNA, 25 bp, Homo sapien
gaggtgcagcagaagaccgaccggc

SEQ ID NO: 5750353 - DNA, 25 bp, Homo sapien
tgggccccgtgaggagggcgggagt

SEQ ID NO: 5750354 - DNA, 25 bp, Homo sapien
cggaagcccccacgggctctacctg

SEQ ID NO: 5750355 - DNA, 25 bp, Homo sapien
cggaaccagcacctgcaggagcagg

SEQ ID NO: 5750356 - DNA, 25 bp, Homo sapien
cggaggaagctgcagccctcgggga

SEQ ID NO: 5750357 - DNA, 25 bp, Homo sapien
gccgactgcgatctgagctgggggg

SEQ ID NO: 5750358 - DNA, 25 bp, Homo sapien
acttggagaagcaccgggacctgct

SEQ ID NO: 5750359 - DNA, 25 bp, Homo sapien
atgcagtccctggaagaggacaaga

SEQ ID NO: 5750360 - DNA, 25 bp, Homo sapien
tgacagcaagaccctcatggtggta

SEQ ID NO: 5750361 - DNA, 25 bp, Homo sapien
gaaaggcgggggtggctgctcttcc

SEQ ID NO: 5750362 - DNA, 25 bp, Homo sapien
agctgtatgtaccagggctgactga

SEQ ID NO: 5750363 - DNA, 25 bp, Homo sapien
caggagatgcggcgctgtgaggccg

SEQ ID NO: 5750364 - DNA, 25 bp, Homo sapien
tcattagccaggcccaggaagtgag

SEQ ID NO: 5750365 - DNA, 25 bp, Homo sapien
tctgagtgcaaattgcatgggcgga

SEQ ID NO: 5750366 - DNA, 25 bp, Homo sapien
tccccgcccctctccttcaaggagg

SEQ ID NO: 5750367 - DNA, 25 bp, Homo sapien
ctgaggccaccaatgctgtgacttt

SEQ ID NO: 5750368 - DNA, 25 bp, Homo sapien
tgcagcagaagaccgaccggctggc

SEQ ID NO: 5750369 - DNA, 25 bp, Homo sapien
gacctgctagggaaagagcctcagg

SEQ ID NO: 5750370 - DNA, 25 bp, Homo sapien
cacgtgcccttccgcaactccaagc

SEQ ID NO: 5750371 - DNA, 25 bp, Homo sapien
agctgaacctggtggacttggctgg

SEQ ID NO: 5750372 - DNA, 25 bp, Homo sapien
aatcgcacgaccgagttcaccaacc

SEQ ID NO: 5750373 - DNA, 25 bp, Homo sapien
aagtcgggggccgagggcagccgcc

SEQ ID NO: 5750374 - DNA, 25 bp, Homo sapien
ctccgtgacaagctgtcccagctgc

SEQ ID NO: 5750375 - DNA, 25 bp, Homo sapien
agccacgagaccattgccagcctgc

SEQ ID NO: 5750376 - DNA, 25 bp, Homo sapien
gccccgaggaggctgctgagcccca

SEQ ID NO: 5750377 - DNA, 25 bp, Homo sapien
gggggtgtgcggaggcgcatggcct

SEQ ID NO: 5750378 - DNA, 25 bp, Homo sapien
gaagctgggccctcactggcctgtc

SEQ ID NO: 5750379 - DNA, 25 bp, Homo sapien
aaagagcctcaggaaaaactggaga

SEQ ID NO: 5750380 - DNA, 25 bp, Homo sapien
atgagaaacatgttcagaaggaaac

SEQ ID NO: 5750381 - DNA, 25 bp, Homo sapien
acagcaagaccctcatggtggtaca

SEQ ID NO: 5750382 - DNA, 25 bp, Homo sapien
cccctctcctcagcttgcagagctg

SEQ ID NO: 5750383 - DNA, 25 bp, Homo sapien
tcatcgtgacggtgcgaggcgtgga

SEQ ID NO: 5750384 - DNA, 25 bp, Homo sapien
tgcagccctcggggaagtcgcggcc

SEQ ID NO: 5750385 - DNA, 25 bp, Homo sapien
tctgggaccagtagccgccctggat

SEQ ID NO: 5750386 - DNA, 25 bp, Homo sapien
gagcgggcccatgggcagatgctgg

SEQ ID NO: 5750387 - DNA, 25 bp, Homo sapien
agaccaagcaggccctcagcgagtc

SEQ ID NO: 5750388 - DNA, 25 bp, Homo sapien
ggagaagctcattagccaggcccag

SEQ ID NO: 5750389 - DNA, 25 bp, Homo sapien
ggccgagccccgggcgctgcggcga

SEQ ID NO: 5750390 - DNA, 25 bp, Homo sapien
gctgaaggagatggaacagcagctg

SEQ ID NO: 5750391 - DNA, 25 bp, Homo sapien
gaggaggcggcggcgtggagctgcc

SEQ ID NO: 5750392 - DNA, 25 bp, Homo sapien
tgccagcctgcgggcccagtcccca

SEQ ID NO: 5750393 - DNA, 25 bp, Homo sapien
ggcagtgggcagctgtatgtaccag

SEQ ID NO: 5750394 - DNA, 25 bp, Homo sapien
ggaagtgagccgactgcgatctgag

SEQ ID NO: 5750395 - DNA, 25 bp, Homo sapien
cacaatgagctcgtgcggctgaaag

SEQ ID NO: 5750396 - DNA, 25 bp, Homo sapien
acagccctcggcacgggcccactca

SEQ ID NO: 5750397 - DNA, 25 bp, Homo sapien
tccggaggaagctgcagccctcggg

SEQ ID NO: 5750398 - DNA, 25 bp, Homo sapien
ccgtcagcgctgcggagatctacaa

SEQ ID NO: 5750399 - DNA, 25 bp, Homo sapien
agctggggggtgtgcggaggcgcat

SEQ ID NO: 5750400 - DNA, 25 bp, Homo sapien
ttttggaagcttagccatttttact

SEQ ID NO: 5750401 - DNA, 25 bp, Homo sapien
tcccgccacggggccgtgctgtgtt

SEQ ID NO: 5750402 - DNA, 25 bp, Homo sapien
ggtgggcctctcacccaggctttct

SEQ ID NO: 5750403 - DNA, 25 bp, Homo sapien
agctgaccgcgcggctccgggcgca

SEQ ID NO: 5750404 - DNA, 25 bp, Homo sapien
ttagcgtggactgggctggccccgg

SEQ ID NO: 5750405 - DNA, 25 bp, Homo sapien
agagctggccagccccctccttagg

SEQ ID NO: 5750406 - DNA, 25 bp, Homo sapien
gaccgaccggctggctgaggtggag

SEQ ID NO: 5750407 - DNA, 25 bp, Homo sapien
ccgagctgcaagagctgcgcacaaa

SEQ ID NO: 5750408 - DNA, 25 bp, Homo sapien
caacaaggtgtttgagtttggccac

SEQ ID NO: 5750409 - DNA, 25 bp, Homo sapien
tggctcgctggtctctcgaattttc

SEQ ID NO: 5750410 - DNA, 25 bp, Homo sapien
cccggaaccagcacctgcaggagca

SEQ ID NO: 5750411 - DNA, 25 bp, Homo sapien
tgcattgatggcttcaatgtctgca

SEQ ID NO: 5750412 - DNA, 25 bp, Homo sapien
gcccttagcgtggactgggctggcc

SEQ ID NO: 5750413 - DNA, 25 bp, Homo sapien
gcgcatggcctcccgccacggggcc

SEQ ID NO: 5750414 - DNA, 25 bp, Homo sapien
ccagtgcccgaagtgcagctcgccc

SEQ ID NO: 5750415 - DNA, 25 bp, Homo sapien
tcagcccccagctctgggaccagta

SEQ ID NO: 5750416 - DNA, 25 bp, Homo sapien
tggacttggctggctcggagcgcgt

SEQ ID NO: 5750417 - DNA, 25 bp, Homo sapien
tggggggcaccgacttggagaagca

SEQ ID NO: 5750418 - DNA, 25 bp, Homo sapien
aggggcgcgagcgggctggccgagg

SEQ ID NO: 5750419 - DNA, 25 bp, Homo sapien
gcgagctgcagctgcgtaagaagtg

SEQ ID NO: 5750420 - DNA, 25 bp, Homo sapien
gcaccgacttggagaagcaccggga

SEQ ID NO: 5750421 - DNA, 25 bp, Homo sapien
aggaggctgctgagccccaggccat

SEQ ID NO: 5750422 - DNA, 25 bp, Homo sapien
cgctgctcatcgtgacggtgcgagg

SEQ ID NO: 5750423 - DNA, 25 bp, Homo sapien
cctctcacccaggctttctcggccc

SEQ ID NO: 5750424 - DNA, 25 bp, Homo sapien
aagtaccgccgcgagctgcagctgc

SEQ ID NO: 5750425 - DNA, 25 bp, Homo sapien
gtctctcgaattttcttccctctga

SEQ ID NO: 5750426 - DNA, 25 bp, Homo sapien
gctcgtgcggctgaaagggaacatc

SEQ ID NO: 5750427 - DNA, 25 bp, Homo sapien
accagcacctgcaggagcaggtggc

SEQ ID NO: 5750428 - DNA, 25 bp, Homo sapien
gtgggggattctgctgctcgctcac

SEQ ID NO: 5750429 - DNA, 25 bp, Homo sapien
cggctctgggggacgtcattgctgc

SEQ ID NO: 5750430 - DNA, 25 bp, Homo sapien
agaacacctgaaggagaagctcatt

SEQ ID NO: 5750431 - DNA, 25 bp, Homo sapien
ctggtcaagccaggagcatctagag

SEQ ID NO: 5750432 - DNA, 25 bp, Homo sapien
tgaaatcctatttaagaacttttgg

SEQ ID NO: 5750433 - DNA, 25 bp, Homo sapien
ctgggctggccccggaagcccccac

SEQ ID NO: 5750434 - DNA, 25 bp, Homo sapien
cctggaagaggacaagaaccgggcc

SEQ ID NO: 5750435 - DNA, 25 bp, Homo sapien
gagcccttagcgtggactgggctgg

SEQ ID NO: 5750436 - DNA, 25 bp, Homo sapien
gtctctcggctgtggctctgagtgc

SEQ ID NO: 5750437 - DNA, 25 bp, Homo sapien
ctgctgctgcaggaggccctcagga

SEQ ID NO: 5750438 - DNA, 25 bp, Homo sapien
tctgactgggagtacaccatcaccg

SEQ ID NO: 5750439 - DNA, 25 bp, Homo sapien
gggcaagcctgtgtccttcgagctg

SEQ ID NO: 5750440 - DNA, 25 bp, Homo sapien
agtttggccacactaatcgcacgac

SEQ ID NO: 5750441 - DNA, 25 bp, Homo sapien
ccaggccatcgaggaggtcaacagc

SEQ ID NO: 5750442 - DNA, 25 bp, Homo sapien
ggtcaagccaggagcatctagagtg

SEQ ID NO: 5750443 - DNA, 25 bp, Homo sapien
ctccgggcgcagattgccatgtacg

SEQ ID NO: 5750444 - DNA, 25 bp, Homo sapien
ggccgagggcagccgcctgcgggag

SEQ ID NO: 5750445 - DNA, 25 bp, Homo sapien
tggcttcaatgtctgcatctttgcg

SEQ ID NO: 5750446 - DNA, 25 bp, Homo sapien
tctcggcccctctcctcagcttgca

SEQ ID NO: 5750447 - DNA, 25 bp, Homo sapien
agtacaccatcaccgtcagcgctgc

SEQ ID NO: 5750448 - DNA, 25 bp, Homo sapien
tgctgagagggtgcgctctgtggag

SEQ ID NO: 5750449 - DNA, 25 bp, Homo sapien
ggagaagcaccgggacctgctgatg

SEQ ID NO: 5750450 - DNA, 25 bp, Homo sapien
ccttcgagctggacaaggtcttctc

SEQ ID NO: 5750451 - DNA, 25 bp, Homo sapien
ctgctcatcgtgacggtgcgaggcg

SEQ ID NO: 5750452 - DNA, 25 bp, Homo sapien
gcaggtagaacacctgaaggagaag

SEQ ID NO: 5750453 - DNA, 25 bp, Homo sapien
aagacgtacacgatggaggggaccg

SEQ ID NO: 5750454 - DNA, 25 bp, Homo sapien
agcaagaccctcatggtggtacagg

SEQ ID NO: 5750455 - DNA, 25 bp, Homo sapien
agccccaggccatggtcccctctcg

SEQ ID NO: 5750456 - DNA, 25 bp, Homo sapien
ccagctgaccgcgcggctccgggcg

SEQ ID NO: 5750457 - DNA, 25 bp, Homo sapien
gagcgggctggccgaggaggaggcg

SEQ ID NO: 5750458 - DNA, 25 bp, Homo sapien
ggctctacctgaccctgcaggtaga

SEQ ID NO: 5750459 - DNA, 25 bp, Homo sapien
ccggccgcccgccctttcccacaca

SEQ ID NO: 5750460 - DNA, 25 bp, Homo sapien
gtggcaccaatggcagccctccccg

SEQ ID NO: 5750461 - DNA, 25 bp, Homo sapien
gccctcggggaagtcgcggccactg

SEQ ID NO: 5750462 - DNA, 25 bp, Homo sapien
tcacctcttgcattgatggcttcaa

SEQ ID NO: 5750463 - DNA, 25 bp, Homo sapien
aagggaacatccgagtgattgctcg

SEQ ID NO: 5750464 - DNA, 25 bp, Homo sapien
ttgtcagacgccacagccctcggca

SEQ ID NO: 5750465 - DNA, 25 bp, Homo sapien
acgactccatcatccacctgctgca

SEQ ID NO: 5750466 - DNA, 25 bp, Homo sapien
cactagcgagacgctctattccctc

SEQ ID NO: 5750467 - DNA, 25 bp, Homo sapien
caggcccaggaagtgagccgactgc

SEQ ID NO: 5750468 - DNA, 25 bp, Homo sapien
agtccctggaagaggacaagaaccg

SEQ ID NO: 5750469 - DNA, 25 bp, Homo sapien
gggattctgctgctcgctcacctgc

SEQ ID NO: 5750470 - DNA, 25 bp, Homo sapien
ctcccctcaaagatgagaaacatgt

SEQ ID NO: 5750471 - DNA, 25 bp, Homo sapien
tcgatgccgacgacgactccatcat

SEQ ID NO: 5750472 - DNA, 25 bp, Homo sapien
aaagccagcaggtccctgcccaggt

SEQ ID NO: 5750473 - DNA, 25 bp, Homo sapien
gtgcagagcgtggacgacatcaaca

SEQ ID NO: 5750474 - DNA, 25 bp, Homo sapien
gtaccgccgcgagctgcagctgcgt

SEQ ID NO: 5750475 - DNA, 25 bp, Homo sapien
aggttgagaactgggcgtggaaaag

SEQ ID NO: 5750476 - DNA, 25 bp, Homo sapien
ctcacctgcctggctcgctggtctc

SEQ ID NO: 5750477 - DNA, 25 bp, Homo sapien
aacactagcgagacgctctattccc

SEQ ID NO: 5750478 - DNA, 25 bp, Homo sapien
ccgagggcagccgcctgcgggaggc

SEQ ID NO: 5750479 - DNA, 25 bp, Homo sapien
cagcacatcaacaagtcgctgtcgg

SEQ ID NO: 5750480 - DNA, 25 bp, Homo sapien
ggcggaaaggcgggggtggctgctc

SEQ ID NO: 5750481 - DNA, 25 bp, Homo sapien
ggatcctgcctccgccaggccggct

SEQ ID NO: 5750482 - DNA, 25 bp, Homo sapien
gcaggaggccctcaggagtgtcaag

SEQ ID NO: 5750483 - DNA, 25 bp, Homo sapien
gcctgggctacgcagggcagagctt

SEQ ID NO: 5750484 - DNA, 25 bp, Homo sapien
agaaggcacaggaggaggagcggct

SEQ ID NO: 5750485 - DNA, 25 bp, Homo sapien
ggacaaggtcttctccccacaggcc

SEQ ID NO: 5750486 - DNA, 25 bp, Homo sapien
ccgaggtgcaggagaaggcgtctga

SEQ ID NO: 5750487 - DNA, 25 bp, Homo sapien
gcacaagggcaagcctgtgtccttc

SEQ ID NO: 5750488 - DNA, 25 bp, Homo sapien
ggacctgaggccaccaatgctgtga

SEQ ID NO: 5750489 - DNA, 25 bp, Homo sapien
ccccgccccagccccagccagcccg

SEQ ID NO: 5750490 - DNA, 25 bp, Homo sapien
gtgggagccggcttgtcagacgcca

SEQ ID NO: 5750491 - DNA, 25 bp, Homo sapien
gttgagaactgggcgtggaaaagat

SEQ ID NO: 5750492 - DNA, 25 bp, Homo sapien
ggaagcttagccatttttacttatt

SEQ ID NO: 5750493 - DNA, 25 bp, Homo sapien
atttaagaacttttggaagcttagc

SEQ ID NO: 5750494 - DNA, 25 bp, Homo sapien
caatgagctcgtgcggctgaaaggg

SEQ ID NO: 5750495 - DNA, 25 bp, Homo sapien
gactccagtgcccgaagtgcagctc

SEQ ID NO: 5750496 - DNA, 25 bp, Homo sapien
cacactaatcgcacgaccgagttca

SEQ ID NO: 5750497 - DNA, 25 bp, Homo sapien
cagcccggccgcccgccctttccca

SEQ ID NO: 5750498 - DNA, 25 bp, Homo sapien
accagggctgactgagttccaagtg

SEQ ID NO: 5750499 - DNA, 25 bp, Homo sapien
gctgagaacccaggtatcaaccagc

SEQ ID NO: 5750500 - DNA, 25 bp, Homo sapien
ggaggcggcggcgtggagctgcctc

SEQ ID NO: 5750501 - DNA, 25 bp, Homo sapien
ggcgctgtgaggccgagctgcaaga

SEQ ID NO: 5750502 - DNA, 25 bp, Homo sapien
gcgtacggccagacgggcgccggca

SEQ ID NO: 5750503 - DNA, 25 bp, Homo sapien
gagccgactgcgatctgagctgggg

SEQ ID NO: 5750504 - DNA, 25 bp, Homo sapien
gcgcagattgccatgtacgagtcag

SEQ ID NO: 5750505 - DNA, 25 bp, Homo sapien
ccgcaccacggggaagctgaacctg

SEQ ID NO: 5750506 - DNA, 25 bp, Homo sapien
ctcgcagcaggacgtgttccaggag

SEQ ID NO: 5750507 - DNA, 25 bp, Homo sapien
acccccggaggtagaggcgagagtg

SEQ ID NO: 5750508 - DNA, 25 bp, Homo sapien
tcaaggactgcctggctgagaaggc

SEQ ID NO: 5750509 - DNA, 25 bp, Homo sapien
cccccacgggctctacctgaccctg

SEQ ID NO: 5750510 - DNA, 25 bp, Homo sapien
gcctcctgccggcgggccgggccgg

SEQ ID NO: 5750511 - DNA, 25 bp, Homo sapien
gtggaaaagataccccagtctgcgg

SEQ ID NO: 5750512 - DNA, 25 bp, Homo sapien
ctcctgccggcgggccgggccgggc

SEQ ID NO: 5750513 - DNA, 25 bp, Homo sapien
agctgcagagctcacaccagctgac

SEQ ID NO: 5750514 - DNA, 25 bp, Homo sapien
aagataccccagtctgcggtgacga

SEQ ID NO: 5750515 - DNA, 25 bp, Homo sapien
gcagaggcaggtgctgaaggagatg

SEQ ID NO: 5750516 - DNA, 25 bp, Homo sapien
gccctcactggcctgtccctgctgc

SEQ ID NO: 5750517 - DNA, 25 bp, Homo sapien
caggtgcgcggcttcccactgctgc

SEQ ID NO: 5750518 - DNA, 25 bp, Homo sapien
gagccggcttgtcagacgccacagc

SEQ ID NO: 5750519 - DNA, 25 bp, Homo sapien
ctgggccctcactggcctgtccctg

SEQ ID NO: 5750520 - DNA, 25 bp, Homo sapien
cattgaggaggcctttgccagagcc

SEQ ID NO: 5750521 - DNA, 25 bp, Homo sapien
gcacaggcctccgcaccacggggaa

SEQ ID NO: 5750522 - DNA, 25 bp, Homo sapien
cccagctgcagctggagatggcgga

SEQ ID NO: 5750523 - DNA, 25 bp, Homo sapien
cgctcacctgcctggctcgctggtc

SEQ ID NO: 5750524 - DNA, 25 bp, Homo sapien
cagccagcgggtgggggattctgct

SEQ ID NO: 5750525 - DNA, 25 bp, Homo sapien
ggaccagtagccgccctggatccat

SEQ ID NO: 5750526 - DNA, 25 bp, Homo sapien
gttggtggcaccaatggcagccctc

SEQ ID NO: 5750527 - DNA, 25 bp, Homo sapien
caccaatggcagccctccccgcccc

SEQ ID NO: 5750528 - DNA, 25 bp, Homo sapien
ggtggagtcgtccaagaccaagcag

SEQ ID NO: 5750529 - DNA, 25 bp, Homo sapien
ctgctgatggtggagaatgagcgac

SEQ ID NO: 5750530 - DNA, 25 bp, Homo sapien
cgggggccgagggcagccgcctgcg

SEQ ID NO: 5750531 - DNA, 25 bp, Homo sapien
cccctcaaagatgagaaacatgttc

SEQ ID NO: 5750532 - DNA, 25 bp, Homo sapien
tgttcagaaggaaacggtgtctctc

SEQ ID NO: 5750533 - DNA, 25 bp, Homo sapien
atgggctcaagcggcaggtgcgcgg

SEQ ID NO: 5750534 - DNA, 25 bp, Homo sapien
ttgctgaccttgcagccggcactgc

SEQ ID NO: 5750535 - DNA, 25 bp, Homo sapien
ccccggaggtagaggcgagagtgga

SEQ ID NO: 5750536 - DNA, 25 bp, Homo sapien
tgcgactcaaggactgcctggctga

SEQ ID NO: 5750537 - DNA, 25 bp, Homo sapien
ctaatcgcacgaccgagttcaccaa

SEQ ID NO: 5750538 - DNA, 25 bp, Homo sapien
tgccatgtacgagtcagagctggag

SEQ ID NO: 5750539 - DNA, 25 bp, Homo sapien
cactgctgctgcaggaggccctcag

SEQ ID NO: 5750540 - DNA, 25 bp, Homo sapien
gcctgtgtgacggatgtgaccccgc

SEQ ID NO: 5750541 - DNA, 25 bp, Homo sapien
agctcacctacctgctgcaggattc

SEQ ID NO: 5750542 - DNA, 25 bp, Homo sapien
cgcttagtggtgacagcaagaccct

SEQ ID NO: 5750543 - DNA, 25 bp, Homo sapien
agtgcaaattgcatgggcggaaagg

SEQ ID NO: 5750544 - DNA, 25 bp, Homo sapien
tgccctgcgctcccgccagggccac

SEQ ID NO: 5750545 - DNA, 25 bp, Homo sapien
gctcagtgccgagcccttagcgtgg

SEQ ID NO: 5750546 - DNA, 25 bp, Homo sapien
cagcagctgcagagctcacaccagc

SEQ ID NO: 5750547 - DNA, 25 bp, Homo sapien
ccctgcaggtagaacacctgaagga

SEQ ID NO: 5750548 - DNA, 25 bp, Homo sapien
cgtggactgggctggccccggaagc

SEQ ID NO: 5750549 - DNA, 25 bp, Homo sapien
ccctcaggagtgtcaaggccgagat

SEQ ID NO: 5750550 - DNA, 25 bp, Homo sapien
tcaagcggcaggtgcgcggcttccc

SEQ ID NO: 5750551 - DNA, 25 bp, Homo sapien
gctgaccttgcagccggcactgcgg

SEQ ID NO: 5750552 - DNA, 25 bp, Homo sapien
gatctacaatgaggtcctcagggac

SEQ ID NO: 5750553 - DNA, 25 bp, Homo sapien
tattccctcaagtttgctgagaggg

SEQ ID NO: 5750554 - DNA, 25 bp, Homo sapien
ggctgaggtggagctgcgactcaag

SEQ ID NO: 5750555 - DNA, 25 bp, Homo sapien
aggcgtggactgcagcacaggcctc

SEQ ID NO: 5750556 - DNA, 25 bp, Homo sapien
tgcagccggcactgcggaccctcac

SEQ ID NO: 5750557 - DNA, 25 bp, Homo sapien
gagctcgtgcggctgaaagggaaca

SEQ ID NO: 5750558 - DNA, 25 bp, Homo sapien
tgtggaggagggtgggcctctcacc

SEQ ID NO: 5750559 - DNA, 25 bp, Homo sapien
cccagccagcccggccgcccgccct

SEQ ID NO: 5750560 - DNA, 25 bp, Homo sapien
tggagatggcggaaagcaaaggcat

SEQ ID NO: 5750561 - DNA, 25 bp, Homo sapien
cagctggagatggcggaaagcaaag

SEQ ID NO: 5750562 - DNA, 25 bp, Homo sapien
ctgtcccagctgcagctggagatgg

SEQ ID NO: 5750563 - DNA, 25 bp, Homo sapien
tttgagtttggccacactaatcgca

SEQ ID NO: 5750564 - DNA, 25 bp, Homo sapien
cgtgacggtgcgaggcgtggactgc

SEQ ID NO: 5750565 - DNA, 25 bp, Homo sapien
ccaccaatgctgtgactttcgatgc

SEQ ID NO: 5750566 - DNA, 25 bp, Homo sapien
gccaggcccaggaagtgagccgact

SEQ ID NO: 5750567 - DNA, 25 bp, Homo sapien
cacgccctcgctgcggggcctgtgg

SEQ ID NO: 5750568 - DNA, 25 bp, Homo sapien
gatggcttcaatgtctgcatctttg

SEQ ID NO: 5750569 - DNA, 25 bp, Homo sapien
ctgtgtgacggatgtgaccccgctg

SEQ ID NO: 5750570 - DNA, 25 bp, Homo sapien
gcggcgctgtgaggccgagctgcaa

SEQ ID NO: 5750571 - DNA, 25 bp, Homo sapien
ctgtcggctctgggggacgtcattg

SEQ ID NO: 5750572 - DNA, 25 bp, Homo sapien
tctgaaatcctatttaagaactttt

SEQ ID NO: 5750573 - DNA, 25 bp, Homo sapien
gctggtctctcgaattttcttccct

SEQ ID NO: 5750574 - DNA, 25 bp, Homo sapien
gcgggcccatgggcagatgctggag

SEQ ID NO: 5750575 - DNA, 25 bp, Homo sapien
ctgagctggggggcaccgacttgga

SEQ ID NO: 5750576 - DNA, 25 bp, Homo sapien
tctgcggtgacgaggactccagtgc

SEQ ID NO: 5750577 - DNA, 25 bp, Homo sapien
agcaacaaccaggagctgctgcgca

SEQ ID NO: 5750578 - DNA, 25 bp, Homo sapien
ggtcttctccccacaggcctcgcag

SEQ ID NO: 5750579 - DNA, 25 bp, Homo sapien
tgactgagttccaagtgcagagcgt

SEQ ID NO: 5750580 - DNA, 25 bp, Homo sapien
caggttgtgagcacagccaggagag

SEQ ID NO: 5750581 - DNA, 25 bp, Homo sapien
tggagcgggcccatgggcagatgct

SEQ ID NO: 5750582 - DNA, 25 bp, Homo sapien
aggctttctcggcccctctcctcag

SEQ ID NO: 5750583 - DNA, 25 bp, Homo sapien
ctgcaggtagaacacctgaaggaga

SEQ ID NO: 5750584 - DNA, 25 bp, Homo sapien
cgggcgctgcggcgacgcctggatc

SEQ ID NO: 5750585 - DNA, 25 bp, Homo sapien
ccgacgacgactccatcatccacct

SEQ ID NO: 5750586 - DNA, 25 bp, Homo sapien
tggtctctcgaattttcttccctct

SEQ ID NO: 5750587 - DNA, 25 bp, Homo sapien
actgggccccgtgaggagggcggga

SEQ ID NO: 5750588 - DNA, 25 bp, Homo sapien
tggaggtggagtcgtccaagaccaa

SEQ ID NO: 5750589 - DNA, 25 bp, Homo sapien
acaaggtgtttgagtttggccacac

SEQ ID NO: 5750590 - DNA, 25 bp, Homo sapien
tgggagtacaccatcaccgtcagcg

SEQ ID NO: 5750591 - DNA, 25 bp, Homo sapien
gggctacgcagggcagagcttgggt

SEQ ID NO: 5750592 - DNA, 25 bp, Homo sapien
actgcagcacaggcctccgcaccac

SEQ ID NO: 5750593 - DNA, 25 bp, Homo sapien
aaaactggagatccggctgtgccca

SEQ ID NO: 5750594 - DNA, 25 bp, Homo sapien
gaggtcctcagggacctgctaggga

SEQ ID NO: 5750595 - DNA, 25 bp, Homo sapien
gaggaggcctttgccagagcccagg

SEQ ID NO: 5750596 - DNA, 25 bp, Homo sapien
cgaggactccagtgcccgaagtgca

SEQ ID NO: 5750597 - DNA, 25 bp, Homo sapien
gaggccaccaatgctgtgactttcg

SEQ ID NO: 5750598 - DNA, 25 bp, Homo sapien
gctgtggctctgagtgcaaattgca

SEQ ID NO: 5750599 - DNA, 25 bp, Homo sapien
accaagcaggccctcagcgagtccc

SEQ ID NO: 5750600 - DNA, 25 bp, Homo sapien
gagtcagagctggagcgggcccatg

SEQ ID NO: 5750601 - DNA, 25 bp, Homo sapien
cctcccgccacggggccgtgctgtg

SEQ ID NO: 5750602 - DNA, 25 bp, Homo sapien
ccagtctgcggtgacgaggactcca

SEQ ID NO: 5750603 - DNA, 25 bp, Homo sapien
tccttcaaggagggttcccgcagct

SEQ ID NO: 5750604 - DNA, 25 bp, Homo sapien
gctgcgtaagaagtgccacaatgag

SEQ ID NO: 5750605 - DNA, 25 bp, Homo sapien
gcagccgcctgcgggaggcgcagca

SEQ ID NO: 5750606 - DNA, 25 bp, Homo sapien
ccctgcgctcccgccagggccacgt

SEQ ID NO: 5750607 - DNA, 25 bp, Homo sapien
atggtggtacaggtgtcccccgtgg

SEQ ID NO: 5750608 - DNA, 25 bp, Homo sapien
ggactgcagcacaggcctccgcacc

SEQ ID NO: 5750609 - DNA, 25 bp, Homo sapien
tgaaggagatggaacagcagctgca

SEQ ID NO: 5750610 - DNA, 25 bp, Homo sapien
gaaccagcacctgcaggagcaggtg

SEQ ID NO: 5750611 - DNA, 25 bp, Homo sapien
agcaggccctcagcgagtcccaggc

SEQ ID NO: 5750612 - DNA, 25 bp, Homo sapien
cctagaggtgcagcagaagaccgac

SEQ ID NO: 5750613 - DNA, 25 bp, Homo sapien
ccctcgctgcggggcctgtggagag

SEQ ID NO: 5750614 - DNA, 25 bp, Homo sapien
catcgaggaggtcaacagcaacaac

SEQ ID NO: 5750615 - DNA, 25 bp, Homo sapien
acaaagccagcaggtccctgcccag

SEQ ID NO: 5750616 - DNA, 25 bp, Homo sapien
gaaaaactggagatccggctgtgcc

SEQ ID NO: 5750617 - DNA, 25 bp, Homo sapien
gcggcgacgcctggatcctgcctcc

SEQ ID NO: 5750618 - DNA, 25 bp, Homo sapien
aggaggagcggctcagtcggcgcct

SEQ ID NO: 5750619 - DNA, 25 bp, Homo sapien
ctgcgcaagtaccgccgcgagctgc

SEQ ID NO: 5750620 - DNA, 25 bp, Homo sapien
ttcaatgtctgcatctttgcgtacg

SEQ ID NO: 5750621 - DNA, 25 bp, Homo sapien
ccggaccaacttgctgaccttgcag

SEQ ID NO: 5750622 - DNA, 25 bp, Homo sapien
agccaggagagcgcccagctccgtg

SEQ ID NO: 5750623 - DNA, 25 bp, Homo sapien
tatcaaccagcgggccctgcagctg

SEQ ID NO: 5750624 - DNA, 25 bp, Homo sapien
gtagaacacctgaaggagaagctca

SEQ ID NO: 5750625 - DNA, 25 bp, Homo sapien
gcgggctggccgaggaggaggcggc

SEQ ID NO: 5750626 - DNA, 25 bp, Homo sapien
acaaggtcttctccccacaggcctc

SEQ ID NO: 5750627 - DNA, 25 bp, Homo sapien
gcttcaatgtctgcatctttgcgta

SEQ ID NO: 5750628 - DNA, 25 bp, Homo sapien
aggacgtgttccaggaggtgcaggc

SEQ ID NO: 5750629 - DNA, 25 bp, Homo sapien
ctgaagctgggccctcactggcctg

SEQ ID NO: 5750630 - DNA, 25 bp, Homo sapien
gcacgggcccactcagcccccagct

SEQ ID NO: 5750631 - DNA, 25 bp, Homo sapien
gaggaagctgcagccctcggggaag

SEQ ID NO: 5750632 - DNA, 25 bp, Homo sapien
aaggtcttctccccacaggcctcgc

SEQ ID NO: 5750633 - DNA, 25 bp, Homo sapien
ctacctgaccctgcaggtagaacac

SEQ ID NO: 5750634 - DNA, 25 bp, Homo sapien
cagcgccaggacccccggaggtaga

SEQ ID NO: 5750635 - DNA, 25 bp, Homo sapien
cgaggaggaggcggcggcgtggagc

SEQ ID NO: 5750636 - DNA, 25 bp, Homo sapien
cttagtggtgacagcaagaccctca

SEQ ID NO: 5750637 - DNA, 25 bp, Homo sapien
gagcacagccaggagagcgcccagc

SEQ ID NO: 5750638 - DNA, 25 bp, Homo sapien
tgcgggcccagtccccacctgtcaa

SEQ ID NO: 5750639 - DNA, 25 bp, Homo sapien
ggccagacgggcgccggcaagacgt

SEQ ID NO: 5750640 - DNA, 25 bp, Homo sapien
ctcccgctcgcacgcgctgctcatc

SEQ ID NO: 5750641 - DNA, 25 bp, Homo sapien
gctgactgagttccaagtgcagagc

SEQ ID NO: 5750642 - DNA, 25 bp, Homo sapien
gggaggcgcagcacatcaacaagtc

SEQ ID NO: 5750643 - DNA, 25 bp, Homo sapien
ctgagagggtgcgctctgtggagct

SEQ ID NO: 5750644 - DNA, 25 bp, Homo sapien
ttcgcttagtggtgacagcaagacc

SEQ ID NO: 5750645 - DNA, 25 bp, Homo sapien
gccccagccagcccggccgcccgcc

SEQ ID NO: 5750646 - DNA, 25 bp, Homo sapien
agctccgtgacaagctgtcccagct

SEQ ID NO: 5750647 - DNA, 25 bp, Homo sapien
gaacgagcacagctcccgctcgcac

SEQ ID NO: 5750648 - DNA, 25 bp, Homo sapien
gggaagctgaacctggtggacttgg

SEQ ID NO: 5750649 - DNA, 25 bp, Homo sapien
ccaggccggctgcctggtgccccga

SEQ ID NO: 5750650 - DNA, 25 bp, Homo sapien
gctcatcgtgacggtgcgaggcgtg

SEQ ID NO: 5750651 - DNA, 25 bp, Homo sapien
ggtgcaggagaaggcgtctgactgg

SEQ ID NO: 5750652 - DNA, 25 bp, Homo sapien
gattcgcttagtggtgacagcaaga

SEQ ID NO: 5750653 - DNA, 25 bp, Homo sapien
gtgcccagatggcagtgggcagctg

SEQ ID NO: 5750654 - DNA, 25 bp, Homo sapien
tcaaggagggttcccgcagctgggg

SEQ ID NO: 5750655 - DNA, 25 bp, Homo sapien
tcactggcctgtccctgctgcagcg

SEQ ID NO: 5750656 - DNA, 25 bp, Homo sapien
gcccagatggcagtgggcagctgta

SEQ ID NO: 5750657 - DNA, 25 bp, Homo sapien
cctacctgctgcaggattcgcttag

SEQ ID NO: 5750658 - DNA, 25 bp, Homo sapien
tttggccacactaatcgcacgaccg

SEQ ID NO: 5750659 - DNA, 25 bp, Homo sapien
tgcctggctgagaaggcacaggagg

SEQ ID NO: 5750660 - DNA, 25 bp, Homo sapien
gtcagagctggagcgggcccatggg

SEQ ID NO: 5750661 - DNA, 25 bp, Homo sapien
gctctgtggagctggggcctgggct

SEQ ID NO: 5750662 - DNA, 25 bp, Homo sapien
ccactcagcccccagctctgggacc

SEQ ID NO: 5750663 - DNA, 25 bp, Homo sapien
accagtagccgccctggatccatcc

SEQ ID NO: 5750664 - DNA, 25 bp, Homo sapien
tgagtgcaaattgcatgggcggaaa

SEQ ID NO: 5750665 - DNA, 25 bp, Homo sapien
actggggtgggttggtggcaccaat

SEQ ID NO: 5750666 - DNA, 25 bp, Homo sapien
gccacactaatcgcacgaccgagtt

SEQ ID NO: 5750667 - DNA, 25 bp, Homo sapien
cagctgcagctggagatggcggaaa

SEQ ID NO: 5750668 - DNA, 25 bp, Homo sapien
ggaggtcaacagcaacaaccaggag

SEQ ID NO: 5750669 - DNA, 25 bp, Homo sapien
acgcctggatcctgcctccgccagg

SEQ ID NO: 5750670 - DNA, 25 bp, Homo sapien
cccctctcgcaggacgtggaacctg

SEQ ID NO: 5750671 - DNA, 25 bp, Homo sapien
tggtcccctctcgcaggacgtggaa

SEQ ID NO: 5750672 - DNA, 25 bp, Homo sapien
atcctatttaagaacttttggaagc

SEQ ID NO: 5750673 - DNA, 25 bp, Homo sapien
ggaacagcagctgcagagctcacac

SEQ ID NO: 5750674 - DNA, 25 bp, Homo sapien
cgcccagccctagctcagtgccgag

SEQ ID NO: 5750675 - DNA, 25 bp, Homo sapien
acaggcctccgcaccacggggaagc

SEQ ID NO: 5750676 - DNA, 25 bp, Homo sapien
gggaacatccgagtgattgctcgtg

SEQ ID NO: 5750677 - DNA, 25 bp, Homo sapien
ccccacaggcctcgcagcaggacgt

SEQ ID NO: 5750678 - DNA, 25 bp, Homo sapien
ggcgcctgcgtgacagccacgagac

SEQ ID NO: 5750679 - DNA, 25 bp, Homo sapien
gcagacccaagaaccatggggactg

SEQ ID NO: 5750680 - DNA, 25 bp, Homo sapien
ctgcatctttgcgtacggccagacg

SEQ ID NO: 5750681 - DNA, 25 bp, Homo sapien
ggccagtcaccaaagaggatgggga

SEQ ID NO: 5750682 - DNA, 25 bp, Homo sapien
ctctacctgaccctgcaggtagaac

SEQ ID NO: 5750683 - DNA, 25 bp, Homo sapien
gcttcccactgctgctgcaggaggc

SEQ ID NO: 5750684 - DNA, 25 bp, Homo sapien
cgcggcttcccactgctgctgcagg

SEQ ID NO: 5750685 - DNA, 25 bp, Homo sapien
tggctcggagcgcgtgggcaagtcg

SEQ ID NO: 5750686 - DNA, 25 bp, Homo sapien
agggaaagagcctcaggaaaaactg

SEQ ID NO: 5750687 - DNA, 25 bp, Homo sapien
cctcggggaagtcgcggccactgcc

SEQ ID NO: 5750688 - DNA, 25 bp, Homo sapien
tttcgatgccgacgacgactccatc

SEQ ID NO: 5750689 - DNA, 25 bp, Homo sapien
gtgagcacagccaggagagcgccca

SEQ ID NO: 5750690 - DNA, 25 bp, Homo sapien
gaggctgctgagccccaggccatgg

SEQ ID NO: 5750691 - DNA, 25 bp, Homo sapien
ggcctctcacccaggctttctcggc

SEQ ID NO: 5750692 - DNA, 25 bp, Homo sapien
gggctcaagcggcaggtgcgcggct

SEQ ID NO: 5750693 - DNA, 25 bp, Homo sapien
cgcggccactgcctgtgtgacggat

SEQ ID NO: 5750694 - DNA, 25 bp, Homo sapien
ctgtcagagctgaacctagaggtgc

SEQ ID NO: 5750695 - DNA, 25 bp, Homo sapien
gggcgccggcaagacgtacacgatg

SEQ ID NO: 5750696 - DNA, 25 bp, Homo sapien
gctcgctggtctctcgaattttctt

SEQ ID NO: 5750697 - DNA, 25 bp, Homo sapien
ggagatggaacagcagctgcagagc

SEQ ID NO: 5750698 - DNA, 25 bp, Homo sapien
ggtccctgcccaggttgtgagcaca

SEQ ID NO: 5750699 - DNA, 25 bp, Homo sapien
gatgtgaccccgctgggcctgaagc

SEQ ID NO: 5750700 - DNA, 25 bp, Homo sapien
gtggactgcagcacaggcctccgca

SEQ ID NO: 5750701 - DNA, 25 bp, Homo sapien
ggcccaggaagtgagccgactgcga

SEQ ID NO: 5750702 - DNA, 25 bp, Homo sapien
gcagccctccccgcccctctccttc

SEQ ID NO: 5750703 - DNA, 25 bp, Homo sapien
agatccggctgtgcccagatggcag

SEQ ID NO: 5750704 - DNA, 25 bp, Homo sapien
gtcaacagcaacaaccaggagctgc

SEQ ID NO: 5750705 - DNA, 25 bp, Homo sapien
gagctgcaagagctgcgcacaaagc

SEQ ID NO: 5750706 - DNA, 25 bp, Homo sapien
ccctcaccaacgactacaatgggct

SEQ ID NO: 5750707 - DNA, 25 bp, Homo sapien
caatgaggtcctcagggacctgcta

SEQ ID NO: 5750708 - DNA, 25 bp, Homo sapien
ggacccccggaggtagaggcgagag

SEQ ID NO: 5750709 - DNA, 25 bp, Homo sapien
aggtcaacagcaacaaccaggagct

SEQ ID NO: 5750710 - DNA, 25 bp, Homo sapien
gtcgcggccactgcctgtgtgacgg

SEQ ID NO: 5750711 - DNA, 25 bp, Homo sapien
acagtggaggtggagtcgtccaaga

SEQ ID NO: 5750712 - DNA, 25 bp, Homo sapien
gctggagatggcggaaagcaaaggc

SEQ ID NO: 5750713 - DNA, 25 bp, Homo sapien
gtgctgaaggagatggaacagcagc

SEQ ID NO: 5750714 - DNA, 25 bp, Homo sapien
gggcccactcagcccccagctctgg

SEQ ID NO: 5750715 - DNA, 25 bp, Homo sapien
acgagaccattgccagcctgcgggc

SEQ ID NO: 5750716 - DNA, 25 bp, Homo sapien
gggccgtgctgtgtttatggctggc

SEQ ID NO: 5750717 - DNA, 25 bp, Homo sapien
ccagcaggtccctgcccaggttgtg

SEQ ID NO: 5750718 - DNA, 25 bp, Homo sapien
gcgaactgggccccgtgaggagggc

SEQ ID NO: 5750719 - DNA, 25 bp, Homo sapien
gagctggggggcaccgacttggaga

SEQ ID NO: 5750720 - DNA, 25 bp, Homo sapien
ctggcagaggcagccagcgggtggg

SEQ ID NO: 5750721 - DNA, 25 bp, Homo sapien
ccctcagcgagtcccaggcccggaa

SEQ ID NO: 5750722 - DNA, 25 bp, Homo sapien
gccatggtcccctctcgcaggacgt

SEQ ID NO: 5750723 - DNA, 25 bp, Homo sapien
tagctcagtgccgagcccttagcgt

SEQ ID NO: 5750724 - DNA, 25 bp, Homo sapien
cgctcgcacgcgctgctcatcgtga

SEQ ID NO: 5750725 - DNA, 25 bp, Homo sapien
gggcctgaagctgggccctcactgg

SEQ ID NO: 5750726 - DNA, 25 bp, Homo sapien
ttcttccctctgaaatcctatttaa

SEQ ID NO: 5750727 - DNA, 25 bp, Homo sapien
ggccaccaatgctgtgactttcgat

SEQ ID NO: 5750728 - DNA, 25 bp, Homo sapien
gcccaggtggagatgaaggctgtgc

SEQ ID NO: 5750729 - DNA, 25 bp, Homo sapien
actggcctgtccctgctgcagcgcc

SEQ ID NO: 5750730 - DNA, 25 bp, Homo sapien
gccggctgcctggtgccccgaggag

SEQ ID NO: 5750731 - DNA, 25 bp, Homo sapien
aggcctcgcagcaggacgtgttcca

SEQ ID NO: 5750732 - DNA, 25 bp, Homo sapien
agcgggccctgcagctgctcttctc

SEQ ID NO: 5750733 - DNA, 25 bp, Homo sapien
gatccatccggaggaagctgcagcc

SEQ ID NO: 5750734 - DNA, 25 bp, Homo sapien
ctccccacaggcctcgcagcaggac

SEQ ID NO: 5750735 - DNA, 25 bp, Homo sapien
ccaggagctgctgcgcaagtaccgc

SEQ ID NO: 5750736 - DNA, 25 bp, Homo sapien
tcgtgcggctgaaagggaacatccg

SEQ ID NO: 5750737 - DNA, 25 bp, Homo sapien
cgtaagaagtgccacaatgagctcg

SEQ ID NO: 5750738 - DNA, 25 bp, Homo sapien
ggagggtgggcctctcacccaggct

SEQ ID NO: 5750739 - DNA, 25 bp, Homo sapien
ggctggctgaggtggagctgcgact

SEQ ID NO: 5750740 - DNA, 25 bp, Homo sapien
gcacatcaacaagtcgctgtcggct

SEQ ID NO: 5750741 - DNA, 25 bp, Homo sapien
tcccgccagggccacgtgcccttcc

SEQ ID NO: 5750742 - DNA, 25 bp, Homo sapien
gaacatccgagtgattgctcgtgtc

SEQ ID NO: 5750743 - DNA, 25 bp, Homo sapien
ccttagcgtggactgggctggcccc

SEQ ID NO: 5750744 - DNA, 25 bp, Homo sapien
gctgcagccctcggggaagtcgcgg

SEQ ID NO: 5750745 - DNA, 25 bp, Homo sapien
tgttccaggaggtgcaggccctggt

SEQ ID NO: 5750746 - DNA, 25 bp, Homo sapien
cacaccagctgaccgcgcggctccg

SEQ ID NO: 5750747 - DNA, 25 bp, Homo sapien
atggaggggaccgctgagaacccag

SEQ ID NO: 5750748 - DNA, 25 bp, Homo sapien
tctcgcaggacgtggaacctgggag

SEQ ID NO: 5750749 - DNA, 25 bp, Homo sapien
cctctgaaatcctatttaagaactt

SEQ ID NO: 5750750 - DNA, 25 bp, Homo sapien
cacggggccgtgctgtgtttatggc

SEQ ID NO: 5750751 - DNA, 25 bp, Homo sapien
ggaaaagataccccagtctgcggtg

SEQ ID NO: 5750752 - DNA, 25 bp, Homo sapien
atgtctgcatctttgcgtacggcca

SEQ ID NO: 5750753 - DNA, 25 bp, Homo sapien
cagaaggaaacggtgtctctcggct

SEQ ID NO: 5750754 - DNA, 25 bp, Homo sapien
cgagacgctctattccctcaagttt

SEQ ID NO: 5750755 - DNA, 25 bp, Homo sapien
gggcctgggctacgcagggcagagc

SEQ ID NO: 5750756 - DNA, 25 bp, Homo sapien
gctcccgccagggccacgtgccctt

SEQ ID NO: 5750757 - DNA, 25 bp, Homo sapien
tggctgctcttcctggcaggcctgg

SEQ ID NO: 5750758 - DNA, 25 bp, Homo sapien
tggccacactaatcgcacgaccgag

SEQ ID NO: 5750759 - DNA, 25 bp, Homo sapien
cactaatcgcacgaccgagttcacc

SEQ ID NO: 5750760 - DNA, 25 bp, Homo sapien
gctgctgcaggaggccctcaggagt

SEQ ID NO: 5750761 - DNA, 25 bp, Homo sapien
cgccgcgagctgcagctgcgtaaga

SEQ ID NO: 5750762 - DNA, 25 bp, Homo sapien
acaggcctcgcagcaggacgtgttc

SEQ ID NO: 5750763 - DNA, 25 bp, Homo sapien
cagggacctgctagggaaagagcct

SEQ ID NO: 5750764 - DNA, 25 bp, Homo sapien
gggccacgtgcccttccgcaactcc

SEQ ID NO: 5750765 - DNA, 25 bp, Homo sapien
agtttgctgagagggtgcgctctgt

SEQ ID NO: 5750766 - DNA, 25 bp, Homo sapien
gaggagggtgggcctctcacccagg

SEQ ID NO: 5750767 - DNA, 25 bp, Homo sapien
atcatccacctgctgcacaagggca

SEQ ID NO: 5750768 - DNA, 25 bp, Homo sapien
tgcagctgcgtaagaagtgccacaa

SEQ ID NO: 5750769 - DNA, 25 bp, Homo sapien
cgcagggcagagcttgggtcctggt

SEQ ID NO: 5750770 - DNA, 25 bp, Homo sapien
gcagagctcacaccagctgaccgcg

SEQ ID NO: 5750771 - DNA, 25 bp, Homo sapien
cgcagcaggacgtgttccaggaggt

SEQ ID NO: 5750772 - DNA, 25 bp, Homo sapien
cagggcagagcttgggtcctggtca

SEQ ID NO: 5750773 - DNA, 25 bp, Homo sapien
gacttggctggctcggagcgcgtgg

SEQ ID NO: 5750774 - DNA, 25 bp, Homo sapien
ccgccctggatccatccggaggaag

SEQ ID NO: 5750775 - DNA, 25 bp, Homo sapien
gccacgccctcgctgcggggcctgt

SEQ ID NO: 5750776 - DNA, 25 bp, Homo sapien
tagcaggcgtccggaccaacttgct

SEQ ID NO: 5750777 - DNA, 25 bp, Homo sapien
cgtgttccaggaggtgcaggccctg

SEQ ID NO: 5750778 - DNA, 25 bp, Homo sapien
caagctcacctacctgctgcaggat

SEQ ID NO: 5750779 - DNA, 25 bp, Homo sapien
aactgggcgtggaaaagatacccca

SEQ ID NO: 5750780 - DNA, 25 bp, Homo sapien
agctcacaccagctgaccgcgcggc

SEQ ID NO: 5750781 - DNA, 25 bp, Homo sapien
ctatttaagaacttttggaagctta

SEQ ID NO: 5750782 - DNA, 25 bp, Homo sapien
tcaccaacctgaacgagcacagctc

SEQ ID NO: 5750783 - DNA, 25 bp, Homo sapien
gagctgcgactcaaggactgcctgg

SEQ ID NO: 5750784 - DNA, 25 bp, Homo sapien
tgcaggccctggtcacctcttgcat

SEQ ID NO: 5750785 - DNA, 25 bp, Homo sapien
ggggacgtcattgctgccctgcgct

SEQ ID NO: 5750786 - DNA, 25 bp, Homo sapien
gcctgaagctgggccctcactggcc

SEQ ID NO: 5750787 - DNA, 25 bp, Homo sapien
cgcctgcgtgacagccacgagacca

SEQ ID NO: 5750788 - DNA, 25 bp, Homo sapien
ccctcaagtttgctgagagggtgcg

SEQ ID NO: 5750789 - DNA, 25 bp, Homo sapien
ttagccatttttacttattaaaata

SEQ ID NO: 5750790 - DNA, 25 bp, Homo sapien
ggaggctcttcttctgccccgtctc

SEQ ID NO: 5750791 - DNA, 25 bp, Homo sapien
acggccagacgggcgccggcaagac

SEQ ID NO: 5750792 - DNA, 25 bp, Homo sapien
gcaagcctgtgtccttcgagctgga

SEQ ID NO: 5750793 - DNA, 25 bp, Homo sapien
gagaatgagcgactgaggcaggaga

SEQ ID NO: 5750794 - DNA, 25 bp, Homo sapien
aggagcctctgggcagacccaagaa

SEQ ID NO: 5750795 - DNA, 25 bp, Homo sapien
ggcctgggccatcagcgaactgggc

SEQ ID NO: 5750796 - DNA, 25 bp, Homo sapien
aagggcaagcctgtgtccttcgagc

SEQ ID NO: 5750797 - DNA, 25 bp, Homo sapien
ggcgacgcctggatcctgcctccgc

SEQ ID NO: 5750798 - DNA, 25 bp, Homo sapien
agtgtcaaggccgagataggccagg

SEQ ID NO: 5750799 - DNA, 25 bp, Homo sapien
aagtgagccgactgcgatctgagct

SEQ ID NO: 5750800 - DNA, 25 bp, Homo sapien
cagccctagctcagtgccgagccct

SEQ ID NO: 5750801 - DNA, 25 bp, Homo sapien
attgccatgtacgagtcagagctgg

SEQ ID NO: 5750802 - DNA, 25 bp, Homo sapien
aagctgcagccctcggggaagtcgc

SEQ ID NO: 5750803 - DNA, 25 bp, Homo sapien
cctctccttcaaggagggttcccgc

SEQ ID NO: 5750804 - DNA, 25 bp, Homo sapien
cgtccaagaccaagcaggccctcag

SEQ ID NO: 5750805 - DNA, 25 bp, Homo sapien
gctcattagccaggcccaggaagtg

SEQ ID NO: 5750806 - DNA, 25 bp, Homo sapien
gcgccgactgagccgctcctcctcc

SEQ ID NO: 5750807 - DNA, 25 bp, Homo sapien
gctccacgccgccgcctcctcctcg

SEQ ID NO: 5750808 - DNA, 25 bp, Homo sapien
cctccactctcgcctctacctccgg

SEQ ID NO: 5750809 - DNA, 25 bp, Homo sapien
agtgggcccgtgccgagggctgtgg

SEQ ID NO: 5750810 - DNA, 25 bp, Homo sapien
caatgcaagaggtgaccagggcctg

SEQ ID NO: 5750811 - DNA, 25 bp, Homo sapien
gggcctgcacctcctggaacacgtc

SEQ ID NO: 5750812 - DNA, 25 bp, Homo sapien
ctcggtcgtgcgattagtgtggcca

SEQ ID NO: 5750813 - DNA, 25 bp, Homo sapien
tagtgtggccaaactcaaacacctt

SEQ ID NO: 5750814 - DNA, 25 bp, Homo sapien
cgtctcgctagtgttcttctccacg

SEQ ID NO: 5750815 - DNA, 25 bp, Homo sapien
tacagctgcccactgccatctgggc

SEQ ID NO: 5750816 - DNA, 25 bp, Homo sapien
tggaacacgtcctgctgcgaggcct

SEQ ID NO: 5750817 - DNA, 25 bp, Homo sapien
tccgagccagccaagtccaccaggt

SEQ ID NO: 5750818 - DNA, 25 bp, Homo sapien
ccggcctggcggaggcaggatccag

SEQ ID NO: 5750819 - DNA, 25 bp, Homo sapien
gagcagccacccccgcctttccgcc

SEQ ID NO: 5750820 - DNA, 25 bp, Homo sapien
ggatgatggagtcgtcgtcggcatc

SEQ ID NO: 5750821 - DNA, 25 bp, Homo sapien
gcctgcttggtcttggacgactcca

SEQ ID NO: 5750822 - DNA, 25 bp, Homo sapien
gcccgtgggggcttccggggccagc

SEQ ID NO: 5750823 - DNA, 25 bp, Homo sapien
acggccccgtggcgggaggccatgc

SEQ ID NO: 5750824 - DNA, 25 bp, Homo sapien
tccttcaggtgttctacctgcaggg

SEQ ID NO: 5750825 - DNA, 25 bp, Homo sapien
acacgtcctgctgcgaggcctgtgg

SEQ ID NO: 5750826 - DNA, 25 bp, Homo sapien
cgtgcgattagtgtggccaaactca

SEQ ID NO: 5750827 - DNA, 25 bp, Homo sapien
gacaccgtttccttctgaacatgtt

SEQ ID NO: 5750828 - DNA, 25 bp, Homo sapien
agggacctgctggctttgtgcgcag

SEQ ID NO: 5750829 - DNA, 25 bp, Homo sapien
cttgtccagctcgaaggacacaggc

SEQ ID NO: 5750830 - DNA, 25 bp, Homo sapien
ccccagctcagatcgcagtcggctc

SEQ ID NO: 5750831 - DNA, 25 bp, Homo sapien
gctactggtcccagagctgggggct

SEQ ID NO: 5750832 - DNA, 25 bp, Homo sapien
agcagctgcagggcccgctggttga

SEQ ID NO: 5750833 - DNA, 25 bp, Homo sapien
gcacctgccgcttgagcccattgta

SEQ ID NO: 5750834 - DNA, 25 bp, Homo sapien
gcggggtcacatccgtcacacaggc

SEQ ID NO: 5750835 - DNA, 25 bp, Homo sapien
ccagtcagacgccttctcctgcacc

SEQ ID NO: 5750836 - DNA, 25 bp, Homo sapien
cattgtagatctccgcagcgctgac

SEQ ID NO: 5750837 - DNA, 25 bp, Homo sapien
ggctgggcgagctgcacttcgggca

SEQ ID NO: 5750838 - DNA, 25 bp, Homo sapien
agtcagacgccttctcctgcacctc

SEQ ID NO: 5750839 - DNA, 25 bp, Homo sapien
cattctccaccatcagcaggtcccg

SEQ ID NO: 5750840 - DNA, 25 bp, Homo sapien
ggcggctactggtcccagagctggg

SEQ ID NO: 5750841 - DNA, 25 bp, Homo sapien
aagctctgccctgcgtagcccaggc

SEQ ID NO: 5750842 - DNA, 25 bp, Homo sapien
tgcagcaggtaggtgagcttggagt

SEQ ID NO: 5750843 - DNA, 25 bp, Homo sapien
gcaagaggtgaccagggcctgcacc

SEQ ID NO: 5750844 - DNA, 25 bp, Homo sapien
ccccgtggtgcggaggcctgtgctg

SEQ ID NO: 5750845 - DNA, 25 bp, Homo sapien
cgggctggctggggctggggcgggg

SEQ ID NO: 5750846 - DNA, 25 bp, Homo sapien
tccctagcaggtccctgaggacctc

SEQ ID NO: 5750847 - DNA, 25 bp, Homo sapien
ccatggcctggggctcagcagcctc

SEQ ID NO: 5750848 - DNA, 25 bp, Homo sapien
ccctttcagccgcacgagctcattg

SEQ ID NO: 5750849 - DNA, 25 bp, Homo sapien
tttccgcccatgcaatttgcactca

SEQ ID NO: 5750850 - DNA, 25 bp, Homo sapien
agcgcaccctctcagcaaacttgag

SEQ ID NO: 5750851 - DNA, 25 bp, Homo sapien
catagccacctgctcctgcaggtgc

SEQ ID NO: 5750852 - DNA, 25 bp, Homo sapien
ggcggggagggctgccattggtgcc

SEQ ID NO: 5750853 - DNA, 25 bp, Homo sapien
gagctgtgctcgttcaggttggtga

SEQ ID NO: 5750854 - DNA, 25 bp, Homo sapien
cgctccagctctgactcgtacatgg

SEQ ID NO: 5750855 - DNA, 25 bp, Homo sapien
aggatccaggcgtcgccgcagcgcc

SEQ ID NO: 5750856 - DNA, 25 bp, Homo sapien
tgagaggcccaccctcctccacact

SEQ ID NO: 5750857 - DNA, 25 bp, Homo sapien
ggctggctggggctggggcggggcg

SEQ ID NO: 5750858 - DNA, 25 bp, Homo sapien
gagtcctcgtcaccgcagactgggg

SEQ ID NO: 5750859 - DNA, 25 bp, Homo sapien
tcagcagcctcctcggggcaccagg

SEQ ID NO: 5750860 - DNA, 25 bp, Homo sapien
gcagcagtgggaagccgcgcacctg

SEQ ID NO: 5750861 - DNA, 25 bp, Homo sapien
cacaggcttgcccttgtgcagcagg

SEQ ID NO: 5750862 - DNA, 25 bp, Homo sapien
gcgccgcatctcctgcctcagtcgc

SEQ ID NO: 5750863 - DNA, 25 bp, Homo sapien
tagcaggtccctgaggacctcattg

SEQ ID NO: 5750864 - DNA, 25 bp, Homo sapien
aatcccccacccgctggctgcctct

SEQ ID NO: 5750865 - DNA, 25 bp, Homo sapien
ggtgtgtgggaaagggcgggcggcc

SEQ ID NO: 5750866 - DNA, 25 bp, Homo sapien
tgccggcgcccgtctggccgtacgc

SEQ ID NO: 5750867 - DNA, 25 bp, Homo sapien
cctgaggctctttccctagcaggtc

SEQ ID NO: 5750868 - DNA, 25 bp, Homo sapien
ctaagcgaatcctgcagcaggtagg

SEQ ID NO: 5750869 - DNA, 25 bp, Homo sapien
gcacggccccgtggcgggaggccat

SEQ ID NO: 5750870 - DNA, 25 bp, Homo sapien
ggcggccgggctggctggggctggg

SEQ ID NO: 5750871 - DNA, 25 bp, Homo sapien
cagccagccggtcggtcttctgctg

SEQ ID NO: 5750872 - DNA, 25 bp, Homo sapien
gcctatctcggccttgacactcctg

SEQ ID NO: 5750873 - DNA, 25 bp, Homo sapien
ctccacctccactgtcttgatgaca

SEQ ID NO: 5750874 - DNA, 25 bp, Homo sapien
gccggtcggtcttctgctgcacctc

SEQ ID NO: 5750875 - DNA, 25 bp, Homo sapien
taagggctcggcactgagctagggc

SEQ ID NO: 5750876 - DNA, 25 bp, Homo sapien
aagaggtgaccagggcctgcacctc

SEQ ID NO: 5750877 - DNA, 25 bp, Homo sapien
tttccacgcccagttctcaacctcc

SEQ ID NO: 5750878 - DNA, 25 bp, Homo sapien
tggctaagcttccaaaagttcttaa

SEQ ID NO: 5750879 - DNA, 25 bp, Homo sapien
caggccccagctccacagagcgcac

SEQ ID NO: 5750880 - DNA, 25 bp, Homo sapien
tcttgtcctcttccagggactgcat

SEQ ID NO: 5750881 - DNA, 25 bp, Homo sapien
cctcgtcaccgcagactggggtatc

SEQ ID NO: 5750882 - DNA, 25 bp, Homo sapien
tggccgtacgcaaagatgcagacat

SEQ ID NO: 5750883 - DNA, 25 bp, Homo sapien
ggtgcttctccaagtcggtgccccc

SEQ ID NO: 5750884 - DNA, 25 bp, Homo sapien
caggcggctgccctcggcccccgac

SEQ ID NO: 5750885 - DNA, 25 bp, Homo sapien
cgtcccccagagccgacagcgactt

SEQ ID NO: 5750886 - DNA, 25 bp, Homo sapien
ggttcttgggtctgcccagaggctc

SEQ ID NO: 5750887 - DNA, 25 bp, Homo sapien
gagctgggcgctctcctggctgtgc

SEQ ID NO: 5750888 - DNA, 25 bp, Homo sapien
cagctctgcaagctgaggagagggg

SEQ ID NO: 5750889 - DNA, 25 bp, Homo sapien
cccgcagcgagggcgtggctcccag

SEQ ID NO: 5750890 - DNA, 25 bp, Homo sapien
gcactcagagccacagccgagagac

SEQ ID NO: 5750891 - DNA, 25 bp, Homo sapien
cctcctcaatggcccggttcttgtc

SEQ ID NO: 5750892 - DNA, 25 bp, Homo sapien
cgcttgagcccattgtagtcgttgg

SEQ ID NO: 5750893 - DNA, 25 bp, Homo sapien
gcaccgtcacgatgagcagcgcgtg

SEQ ID NO: 5750894 - DNA, 25 bp, Homo sapien
cacacaggcagtggccgcgacttcc

SEQ ID NO: 5750895 - DNA, 25 bp, Homo sapien
ttcaggcccagcggggtcacatccg

SEQ ID NO: 5750896 - DNA, 25 bp, Homo sapien
gtcaggtagagcccgtgggggcttc

SEQ ID NO: 5750897 - DNA, 25 bp, Homo sapien
atccgtcacacaggcagtggccgcg

SEQ ID NO: 5750898 - DNA, 25 bp, Homo sapien
ccgccggcaggaggcagctccacgc

SEQ ID NO: 5750899 - DNA, 25 bp, Homo sapien
ttaataagtaaaaatggctaagctt

SEQ ID NO: 5750900 - DNA, 25 bp, Homo sapien
cggaggcctgtgctgcagtccacgc

SEQ ID NO: 5750901 - DNA, 25 bp, Homo sapien
gctttgtgcgcagctcttgcagctc

SEQ ID NO: 5750902 - DNA, 25 bp, Homo sapien
tgcaagctgaggagaggggccgaga

SEQ ID NO: 5750903 - DNA, 25 bp, Homo sapien
aggatttcagagggaagaaaattcg

SEQ ID NO: 5750904 - DNA, 25 bp, Homo sapien
cctccttgaaggagaggggcgggga

SEQ ID NO: 5750905 - DNA, 25 bp, Homo sapien
tgggcccgtgccgagggctgtggcg

SEQ ID NO: 5750906 - DNA, 25 bp, Homo sapien
cgcccgtctggccgtacgcaaagat

SEQ ID NO: 5750907 - DNA, 25 bp, Homo sapien
gagcagcagaatcccccacccgctg

SEQ ID NO: 5750908 - DNA, 25 bp, Homo sapien
gatctccagtttttcctgaggctct

SEQ ID NO: 5750909 - DNA, 25 bp, Homo sapien
aagtccaccaggttcagcttccccg

SEQ ID NO: 5750910 - DNA, 25 bp, Homo sapien
caccgtttccttctgaacatgtttc

SEQ ID NO: 5750911 - DNA, 25 bp, Homo sapien
cgttcaggttggtgaactcggtcgt

SEQ ID NO: 5750912 - DNA, 25 bp, Homo sapien
catctcctccagcatctgcccatgg

SEQ ID NO: 5750913 - DNA, 25 bp, Homo sapien
cccattgtagtcgttggtgagggtc

SEQ ID NO: 5750914 - DNA, 25 bp, Homo sapien
ggtgagaggcccaccctcctccaca

SEQ ID NO: 5750915 - DNA, 25 bp, Homo sapien
cacgagctcattgtggcacttctta

SEQ ID NO: 5750916 - DNA, 25 bp, Homo sapien
aagatgcagacattgaagccatcaa

SEQ ID NO: 5750917 - DNA, 25 bp, Homo sapien
tcccagtcagacgccttctcctgca

SEQ ID NO: 5750918 - DNA, 25 bp, Homo sapien
tacctccgggggtcctggcgctgca

SEQ ID NO: 5750919 - DNA, 25 bp, Homo sapien
cctgcgagaggggaccatggcctgg

SEQ ID NO: 5750920 - DNA, 25 bp, Homo sapien
gcagcagggacaggccagtgagggc

SEQ ID NO: 5750921 - DNA, 25 bp, Homo sapien
cgcagctcttgcagctcggcctcac

SEQ ID NO: 5750922 - DNA, 25 bp, Homo sapien
tgatacctgggttctcagcggtccc

SEQ ID NO: 5750923 - DNA, 25 bp, Homo sapien
cggtcttctgctgcacctctaggtt

SEQ ID NO: 5750924 - DNA, 25 bp, Homo sapien
taaaaatggctaagcttccaaaagt

SEQ ID NO: 5750925 - DNA, 25 bp, Homo sapien
cctcttccagggactgcatctcctc

SEQ ID NO: 5750926 - DNA, 25 bp, Homo sapien
cgcagggcagcaatgacgtccccca

SEQ ID NO: 5750927 - DNA, 25 bp, Homo sapien
cttgttgatgtcgtccacgctctgc

SEQ ID NO: 5750928 - DNA, 25 bp, Homo sapien
acctcggagaagagcagctgcaggg

SEQ ID NO: 5750929 - DNA, 25 bp, Homo sapien
ggtcttgctgtcaccactaagcgaa

SEQ ID NO: 5750930 - DNA, 25 bp, Homo sapien
gggctcagcagcctcctcggggcac

SEQ ID NO: 5750931 - DNA, 25 bp, Homo sapien
gcgggagctgtgctcgttcaggttg

SEQ ID NO: 5750932 - DNA, 25 bp, Homo sapien
aatgagcttctccttcaggtgttct

SEQ ID NO: 5750933 - DNA, 25 bp, Homo sapien
cgagaggggaccatggcctggggct

SEQ ID NO: 5750934 - DNA, 25 bp, Homo sapien
ggccgcgacttccccgagggctgca

SEQ ID NO: 5750935 - DNA, 25 bp, Homo sapien
cccatgcaatttgcactcagagcca

SEQ ID NO: 5750936 - DNA, 25 bp, Homo sapien
aggttcagctctgacagcatgcctt

SEQ ID NO: 5750937 - DNA, 25 bp, Homo sapien
gcgaatcctgcagcaggtaggtgag

SEQ ID NO: 5750938 - DNA, 25 bp, Homo sapien
ctagggctgggcgagctgcacttcg

SEQ ID NO: 5750939 - DNA, 25 bp, Homo sapien
ttgtagatctccgcagcgctgacgg

SEQ ID NO: 5750940 - DNA, 25 bp, Homo sapien
tggcgtctgacaagccggctcccac

SEQ ID NO: 5750941 - DNA, 25 bp, Homo sapien
accatcagcaggtcccggtgcttct

SEQ ID NO: 5750942 - DNA, 25 bp, Homo sapien
tcggggcaccaggcagccggcctgg

SEQ ID NO: 5750943 - DNA, 25 bp, Homo sapien
ccggtgcttctccaagtcggtgccc

SEQ ID NO: 5750944 - DNA, 25 bp, Homo sapien
tctttccctagcaggtccctgagga

SEQ ID NO: 5750945 - DNA, 25 bp, Homo sapien
tccatctccttcagcacctgcctct

SEQ ID NO: 5750946 - DNA, 25 bp, Homo sapien
agagccgacagcgacttgttgatgt

SEQ ID NO: 5750947 - DNA, 25 bp, Homo sapien
gcagctccacctcagccagccggtc

SEQ ID NO: 5750948 - DNA, 25 bp, Homo sapien
tgcgattagtgtggccaaactcaaa

SEQ ID NO: 5750949 - DNA, 25 bp, Homo sapien
ccgtttccttctgaacatgtttctc

SEQ ID NO: 5750950 - DNA, 25 bp, Homo sapien
atctccagctgcagctgggacagct

SEQ ID NO: 5750951 - DNA, 25 bp, Homo sapien
gaaccctccttgaaggagaggggcg

SEQ ID NO: 5750952 - DNA, 25 bp, Homo sapien
gtcctcgtcaccgcagactggggta

SEQ ID NO: 5750953 - DNA, 25 bp, Homo sapien
tgaggctctttccctagcaggtccc

SEQ ID NO: 5750954 - DNA, 25 bp, Homo sapien
cggcctcacagcgccgcatctcctg

SEQ ID NO: 5750955 - DNA, 25 bp, Homo sapien
tcagcaagttggtccggacgcctgc

SEQ ID NO: 5750956 - DNA, 25 bp, Homo sapien
cctcctcgatggcctggcctatctc

SEQ ID NO: 5750957 - DNA, 25 bp, Homo sapien
tgctagattctcgtgcacagccttc

SEQ ID NO: 5750958 - DNA, 25 bp, Homo sapien
ctgggcgagctgcacttcgggcact

SEQ ID NO: 5750959 - DNA, 25 bp, Homo sapien
tccacgccgccgcctcctcctcggc

SEQ ID NO: 5750960 - DNA, 25 bp, Homo sapien
aggggaccatggcctggggctcagc

SEQ ID NO: 5750961 - DNA, 25 bp, Homo sapien
ctcctggttgttgctgttgacctcc

SEQ ID NO: 5750962 - DNA, 25 bp, Homo sapien
caccgcagactggggtatcttttcc

SEQ ID NO: 5750963 - DNA, 25 bp, Homo sapien
cattgaagccatcaatgcaagaggt

SEQ ID NO: 5750964 - DNA, 25 bp, Homo sapien
cgcccatgcaatttgcactcagagc

SEQ ID NO: 5750965 - DNA, 25 bp, Homo sapien
aaagggcgggcggccgggctggctg

SEQ ID NO: 5750966 - DNA, 25 bp, Homo sapien
gaggacctcattgtagatctccgca

SEQ ID NO: 5750967 - DNA, 25 bp, Homo sapien
ggggtcctggcgctgcagcagggac

SEQ ID NO: 5750968 - DNA, 25 bp, Homo sapien
cacggggcccagttcgctgatggcc

SEQ ID NO: 5750969 - DNA, 25 bp, Homo sapien
cccggcccgccggcaggaggcagct

SEQ ID NO: 5750970 - DNA, 25 bp, Homo sapien
ggcacagccggatctccagtttttc

SEQ ID NO: 5750971 - DNA, 25 bp, Homo sapien
ccccagctgcgggaaccctccttga

SEQ ID NO: 5750972 - DNA, 25 bp, Homo sapien
gtgcgagcgggagctgtgctcgttc

SEQ ID NO: 5750973 - DNA, 25 bp, Homo sapien
ctccagctctgactcgtacatggca

SEQ ID NO: 5750974 - DNA, 25 bp, Homo sapien
actgtcttgatgacatacttgacag

SEQ ID NO: 5750975 - DNA, 25 bp, Homo sapien
agcaatgacgtcccccagagccgac

SEQ ID NO: 5750976 - DNA, 25 bp, Homo sapien
tcctctttggtgactggccggacac

SEQ ID NO: 5750977 - DNA, 25 bp, Homo sapien
agcagggacaggccagtgagggccc

SEQ ID NO: 5750978 - DNA, 25 bp, Homo sapien
tcagtcagccctggtacatacagct

SEQ ID NO: 5750979 - DNA, 25 bp, Homo sapien
tcgctagtgttcttctccacggggg

SEQ ID NO: 5750980 - DNA, 25 bp, Homo sapien
ctgcgaggcctgtggggagaagacc

SEQ ID NO: 5750981 - DNA, 25 bp, Homo sapien
tgcgcccggagccgcgcggtcagct

SEQ ID NO: 5750982 - DNA, 25 bp, Homo sapien
ggcctggcggaggcaggatccaggc

SEQ ID NO: 5750983 - DNA, 25 bp, Homo sapien
gcctttgctttccgccatctccagc

SEQ ID NO: 5750984 - DNA, 25 bp, Homo sapien
actggccggacacgagcaatcactc

SEQ ID NO: 5750985 - DNA, 25 bp, Homo sapien
tgtgctgcagtccacgcctcgcacc

SEQ ID NO: 5750986 - DNA, 25 bp, Homo sapien
tcttggacgactccacctccactgt

SEQ ID NO: 5750987 - DNA, 25 bp, Homo sapien
agcctgggtgagaggcccaccctcc

SEQ ID NO: 5750988 - DNA, 25 bp, Homo sapien
gtcttctgctgcacctctaggttca

SEQ ID NO: 5750989 - DNA, 25 bp, Homo sapien
ttggtggcctcaggtccttccccat

SEQ ID NO: 5750990 - DNA, 25 bp, Homo sapien
agcggtcccctccatcgtgtacgtc

SEQ ID NO: 5750991 - DNA, 25 bp, Homo sapien
caggtgctggttccgggcctgggac

SEQ ID NO: 5750992 - DNA, 25 bp, Homo sapien
cggtcccctccatcgtgtacgtctt

SEQ ID NO: 5750993 - DNA, 25 bp, Homo sapien
ggtcctggcgctgcagcagggacag

SEQ ID NO: 5750994 - DNA, 25 bp, Homo sapien
gcagcagaatcccccacccgctggc

SEQ ID NO: 5750995 - DNA, 25 bp, Homo sapien
caatcactcggatgttccctttcag

SEQ ID NO: 5750996 - DNA, 25 bp, Homo sapien
cgactgagccgctcctcctcctgtg

SEQ ID NO: 5750997 - DNA, 25 bp, Homo sapien
cgtcacgatgagcagcgcgtgcgag

SEQ ID NO: 5750998 - DNA, 25 bp, Homo sapien
tggcccaggcctgccaggaagagca

SEQ ID NO: 5750999 - DNA, 25 bp, Homo sapien
gtgtacgtcttgccggcgcccgtct

SEQ ID NO: 5751000 - DNA, 25 bp, Homo sapien
aaacttgagggaatagagcgtctcg

SEQ ID NO: 5751001 - DNA, 25 bp, Homo sapien
cagtccacgctaagggctcggcact

SEQ ID NO: 5751002 - DNA, 25 bp, Homo sapien
cggttcttgtcctcttccagggact

SEQ ID NO: 5751003 - DNA, 25 bp, Homo sapien
ccagcgagccaggcaggtgagcgag

SEQ ID NO: 5751004 - DNA, 25 bp, Homo sapien
gagggaatagagcgtctcgctagtg

SEQ ID NO: 5751005 - DNA, 25 bp, Homo sapien
tcttaaataggatttcagagggaag

SEQ ID NO: 5751006 - DNA, 25 bp, Homo sapien
acatccgtcacacaggcagtggccg

SEQ ID NO: 5751007 - DNA, 25 bp, Homo sapien
gtggctcccaggttccacgtcctgc

SEQ ID NO: 5751008 - DNA, 25 bp, Homo sapien
gcagctgcagctcgcggcggtactt

SEQ ID NO: 5751009 - DNA, 25 bp, Homo sapien
agaggcccaccctcctccacactcc

SEQ ID NO: 5751010 - DNA, 25 bp, Homo sapien
ctggctggggctggggcggggcgag

SEQ ID NO: 5751011 - DNA, 25 bp, Homo sapien
ggccagcccagtccacgctaagggc

SEQ ID NO: 5751012 - DNA, 25 bp, Homo sapien
agctgaggagaggggccgagaaagc

SEQ ID NO: 5751013 - DNA, 25 bp, Homo sapien
cctgcctctgcatagccacctgctc

SEQ ID NO: 5751014 - DNA, 25 bp, Homo sapien
cctgctcctgcaggtgctggttccg

SEQ ID NO: 5751015 - DNA, 25 bp, Homo sapien
ttgtcacggagctgggcgctctcct

SEQ ID NO: 5751016 - DNA, 25 bp, Homo sapien
agctcctggttgttgctgttgacct

SEQ ID NO: 5751017 - DNA, 25 bp, Homo sapien
cagtcgctcattctccaccatcagc

SEQ ID NO: 5751018 - DNA, 25 bp, Homo sapien
acagccgagagacaccgtttccttc

SEQ ID NO: 5751019 - DNA, 25 bp, Homo sapien
tctcctccagcatctgcccatgggc

SEQ ID NO: 5751020 - DNA, 25 bp, Homo sapien
gccggcaggaggcagctccacgccg

SEQ ID NO: 5751021 - DNA, 25 bp, Homo sapien
ctcgcggcggtacttgcgcagcagc

SEQ ID NO: 5751022 - DNA, 25 bp, Homo sapien
cagcgccgcatctcctgcctcagtc

SEQ ID NO: 5751023 - DNA, 25 bp, Homo sapien
gcgcacctgccgcttgagcccattg

SEQ ID NO: 5751024 - DNA, 25 bp, Homo sapien
gcccacgcgctccgagccagccaag

SEQ ID NO: 5751025 - DNA, 25 bp, Homo sapien
ccagagccgacagcgacttgttgat

SEQ ID NO: 5751026 - DNA, 25 bp, Homo sapien
atcctgcagcaggtaggtgagcttg

SEQ ID NO: 5751027 - DNA, 25 bp, Homo sapien
cgcgcggtcagctggtgtgagctct

SEQ ID NO: 5751028 - DNA, 25 bp, Homo sapien
ctttgctttccgccatctccagctg

SEQ ID NO: 5751029 - DNA, 25 bp, Homo sapien
tcaggtgttctacctgcagggtcag

SEQ ID NO: 5751030 - DNA, 25 bp, Homo sapien
tgcctctgcatagccacctgctcct

SEQ ID NO: 5751031 - DNA, 25 bp, Homo sapien
agcgctgacggtgatggtgtactcc

SEQ ID NO: 5751032 - DNA, 25 bp, Homo sapien
tgagtgggcccgtgccgagggctgt

SEQ ID NO: 5751033 - DNA, 25 bp, Homo sapien
cacagcacggccccgtggcgggagg

SEQ ID NO: 5751034 - DNA, 25 bp, Homo sapien
gctggtgtgagctctgcagctgctg

SEQ ID NO: 5751035 - DNA, 25 bp, Homo sapien
tagtgttcttctccacgggggacac

SEQ ID NO: 5751036 - DNA, 25 bp, Homo sapien
aggccatgcgcctccgcacaccccc

SEQ ID NO: 5751037 - DNA, 25 bp, Homo sapien
ccggggccagcccagtccacgctaa

SEQ ID NO: 5751038 - DNA, 25 bp, Homo sapien
tcttccagggactgcatctcctcca

SEQ ID NO: 5751039 - DNA, 25 bp, Homo sapien
tgggcccgctccagctctgactcgt

SEQ ID NO: 5751040 - DNA, 25 bp, Homo sapien
gcgacttgttgatgtgctgcgcctc

SEQ ID NO: 5751041 - DNA, 25 bp, Homo sapien
agcacctgcctctgcatagccacct

SEQ ID NO: 5751042 - DNA, 25 bp, Homo sapien
ctcctcctgtgccttctcagccagg

SEQ ID NO: 5751043 - DNA, 25 bp, Homo sapien
ttccagggactgcatctcctccagc

SEQ ID NO: 5751044 - DNA, 25 bp, Homo sapien
ggtgcggaggcctgtgctgcagtcc

SEQ ID NO: 5751045 - DNA, 25 bp, Homo sapien
gcagcgctgacggtgatggtgtact

SEQ ID NO: 5751046 - DNA, 25 bp, Homo sapien
ctcagatcgcagtcggctcacttcc

SEQ ID NO: 5751047 - DNA, 25 bp, Homo sapien
agccttcatctccacctgggctctg

SEQ ID NO: 5751048 - DNA, 25 bp, Homo sapien
cttgttgatgtgctgcgcctcccgc

SEQ ID NO: 5751049 - DNA, 25 bp, Homo sapien
gaatagagcgtctcgctagtgttct

SEQ ID NO: 5751050 - DNA, 25 bp, Homo sapien
ccagagctgggggctgagtgggccc

SEQ ID NO: 5751051 - DNA, 25 bp, Homo sapien
tacctgcagggtcaggtagagcccg

SEQ ID NO: 5751052 - DNA, 25 bp, Homo sapien
gggggacacctgtaccaccatgagg

SEQ ID NO: 5751053 - DNA, 25 bp, Homo sapien
ggggccagcccagtccacgctaagg

SEQ ID NO: 5751054 - DNA, 25 bp, Homo sapien
tgcggaggcctgtgctgcagtccac

SEQ ID NO: 5751055 - DNA, 25 bp, Homo sapien
gtgtactcccagtcagacgccttct

SEQ ID NO: 5751056 - DNA, 25 bp, Homo sapien
gctgagtgggcccgtgccgagggct

SEQ ID NO: 5751057 - DNA, 25 bp, Homo sapien
agcagaatcccccacccgctggctg

SEQ ID NO: 5751058 - DNA, 25 bp, Homo sapien
agggcccagcttcaggcccagcggg

SEQ ID NO: 5751059 - DNA, 25 bp, Homo sapien
gggcactggagtcctcgtcaccgca

SEQ ID NO: 5751060 - DNA, 25 bp, Homo sapien
caggcttgcccttgtgcagcaggtg

SEQ ID NO: 5751061 - DNA, 25 bp, Homo sapien
acgtcctgctgcgaggcctgtgggg

SEQ ID NO: 5751062 - DNA, 25 bp, Homo sapien
ctccagctgcagctgggacagcttg

SEQ ID NO: 5751063 - DNA, 25 bp, Homo sapien
gctgctgttccatctccttcagcac

SEQ ID NO: 5751064 - DNA, 25 bp, Homo sapien
cggcatcgaaagtcacagcattggt

SEQ ID NO: 5751065 - DNA, 25 bp, Homo sapien
gtcacacaggcagtggccgcgactt

SEQ ID NO: 5751066 - DNA, 25 bp, Homo sapien
ctgtgccttctcagccaggcagtcc

SEQ ID NO: 5751067 - DNA, 25 bp, Homo sapien
ctgggttctcagcggtcccctccat

SEQ ID NO: 5751068 - DNA, 25 bp, Homo sapien
agaggctcctcgcccaccccctaag

SEQ ID NO: 5751069 - DNA, 25 bp, Homo sapien
gtcggtcttctgctgcacctctagg

SEQ ID NO: 5751070 - DNA, 25 bp, Homo sapien
gagaagaccttgtccagctcgaagg

SEQ ID NO: 5751071 - DNA, 25 bp, Homo sapien
cttgaccaggacccaagctctgccc

SEQ ID NO: 5751072 - DNA, 25 bp, Homo sapien
gccccgcagcgagggcgtggctccc

SEQ ID NO: 5751073 - DNA, 25 bp, Homo sapien
gctcagcagcctcctcggggcacca

SEQ ID NO: 5751074 - DNA, 25 bp, Homo sapien
cacctgtaccaccatgagggtcttg

SEQ ID NO: 5751075 - DNA, 25 bp, Homo sapien
gccggatctccagtttttcctgagg

SEQ ID NO: 5751076 - DNA, 25 bp, Homo sapien
caatggcccggttcttgtcctcttc

SEQ ID NO: 5751077 - DNA, 25 bp, Homo sapien
tgcagcagcagtgggaagccgcgca

SEQ ID NO: 5751078 - DNA, 25 bp, Homo sapien
gatgtcgtccacgctctgcacttgg

SEQ ID NO: 5751079 - DNA, 25 bp, Homo sapien
gcagctgggacagcttgtcacggag

SEQ ID NO: 5751080 - DNA, 25 bp, Homo sapien
gcgctccgagccagccaagtccacc

SEQ ID NO: 5751081 - DNA, 25 bp, Homo sapien
ttccccgtggtgcggaggcctgtgc

SEQ ID NO: 5751082 - DNA, 25 bp, Homo sapien
agaaagcctgggtgagaggcccacc

SEQ ID NO: 5751083 - DNA, 25 bp, Homo sapien
ggaaagggcgggcggccgggctggc

SEQ ID NO: 5751084 - DNA, 25 bp, Homo sapien
gcaggtaggtgagcttggagttgcg

SEQ ID NO: 5751085 - DNA, 25 bp, Homo sapien
tggagtcctcgtcaccgcagactgg

SEQ ID NO: 5751086 - DNA, 25 bp, Homo sapien
cggcaggaggcagctccacgccgcc

SEQ ID NO: 5751087 - DNA, 25 bp, Homo sapien
ctgccaggaagagcagccacccccg

SEQ ID NO: 5751088 - DNA, 25 bp, Homo sapien
ggctgcagcttcctccggatggatc

SEQ ID NO: 5751089 - DNA, 25 bp, Homo sapien
gccgcacgagctcattgtggcactt

SEQ ID NO: 5751090 - DNA, 25 bp, Homo sapien
gcgagcagcagaatcccccacccgc

SEQ ID NO: 5751091 - DNA, 25 bp, Homo sapien
gtagtcgttggtgagggtccgcagt

SEQ ID NO: 5751092 - DNA, 25 bp, Homo sapien
ccaaactcaaacaccttgttgatgt

SEQ ID NO: 5751093 - DNA, 25 bp, Homo sapien
tgcatagccacctgctcctgcaggt

SEQ ID NO: 5751094 - DNA, 25 bp, Homo sapien
ccctctcagcaaacttgagggaata

SEQ ID NO: 5751095 - DNA, 25 bp, Homo sapien
ctccacgggggacacctgtaccacc

SEQ ID NO: 5751096 - DNA, 25 bp, Homo sapien
gggcctgcttggtcttggacgactc

SEQ ID NO: 5751097 - DNA, 25 bp, Homo sapien
agcgagccaggcaggtgagcgagca

SEQ ID NO: 5751098 - DNA, 25 bp, Homo sapien
accactaagcgaatcctgcagcagg

SEQ ID NO: 5751099 - DNA, 25 bp, Homo sapien
ggtgactggccggacacgagcaatc

SEQ ID NO: 5751100 - DNA, 25 bp, Homo sapien
ggctcacttcctgggcctggctaat

SEQ ID NO: 5751101 - DNA, 25 bp, Homo sapien
aggaggcagctccacgccgccgcct

SEQ ID NO: 5751102 - DNA, 25 bp, Homo sapien
gcttcaggcccagcggggtcacatc

SEQ ID NO: 5751103 - DNA, 25 bp, Homo sapien
gctgccattggtgccaccaacccac

SEQ ID NO: 5751104 - DNA, 25 bp, Homo sapien
ggtcttggacgactccacctccact

SEQ ID NO: 5751105 - DNA, 25 bp, Homo sapien
gggcctggctaatgagcttctcctt

SEQ ID NO: 5751106 - DNA, 25 bp, Homo sapien
ggctggggctggggcggggcgagcc

SEQ ID NO: 5751107 - DNA, 25 bp, Homo sapien
cccccgacttgcccacgcgctccga

SEQ ID NO: 5751108 - DNA, 25 bp, Homo sapien
gaaggagaggggcggggagggctgc

SEQ ID NO: 5751109 - DNA, 25 bp, Homo sapien
tggggctcagcagcctcctcggggc

SEQ ID NO: 5751110 - DNA, 25 bp, Homo sapien
cttgacactcctgagggcctcctgc

SEQ ID NO: 5751111 - DNA, 25 bp, Homo sapien
ccctgaggacctcattgtagatctc

SEQ ID NO: 5751112 - DNA, 25 bp, Homo sapien
tctgcatagccacctgctcctgcag

SEQ ID NO: 5751113 - DNA, 25 bp, Homo sapien
ctccagcatctgcccatgggcccgc

SEQ ID NO: 5751114 - DNA, 25 bp, Homo sapien
ctccactgtcttgatgacatacttg

SEQ ID NO: 5751115 - DNA, 25 bp, Homo sapien
gcaggcgccgactgagccgctcctc

SEQ ID NO: 5751116 - DNA, 25 bp, Homo sapien
cgatggcctggcctatctcggcctt

SEQ ID NO: 5751117 - DNA, 25 bp, Homo sapien
gtcttgccggcgcccgtctggccgt

SEQ ID NO: 5751118 - DNA, 25 bp, Homo sapien
agggctgggcgagctgcacttcggg

SEQ ID NO: 5751119 - DNA, 25 bp, Homo sapien
gctgtgctcacaacctgggcaggga

SEQ ID NO: 5751120 - DNA, 25 bp, Homo sapien
ctatctcggccttgacactcctgag

SEQ ID NO: 5751121 - DNA, 25 bp, Homo sapien
cgcggtcagctggtgtgagctctgc

SEQ ID NO: 5751122 - DNA, 25 bp, Homo sapien
cgagcaatcactcggatgttccctt

SEQ ID NO: 5751123 - DNA, 25 bp, Homo sapien
gcccggcccggcccgccggcaggag

SEQ ID NO: 5751124 - DNA, 25 bp, Homo sapien
gccaggaagagcagccacccccgcc

SEQ ID NO: 5751125 - DNA, 25 bp, Homo sapien
cccgagggctgcagcttcctccgga

SEQ ID NO: 5751126 - DNA, 25 bp, Homo sapien
gctccgagccagccaagtccaccag

SEQ ID NO: 5751127 - DNA, 25 bp, Homo sapien
tccacgcctcgcaccgtcacgatga

SEQ ID NO: 5751128 - DNA, 25 bp, Homo sapien
tcctccggatggatccagggcggct

SEQ ID NO: 5751129 - DNA, 25 bp, Homo sapien
tcctcacggggcccagttcgctgat

SEQ ID NO: 5751130 - DNA, 25 bp, Homo sapien
gcacctctaggttcagctctgacag

SEQ ID NO: 5751131 - DNA, 25 bp, Homo sapien
ctcgcctctacctccgggggtcctg

SEQ ID NO: 5751132 - DNA, 25 bp, Homo sapien
tccacctgggctctggcaaaggcct

SEQ ID NO: 5751133 - DNA, 25 bp, Homo sapien
agccgagagacaccgtttccttctg

SEQ ID NO: 5751134 - DNA, 25 bp, Homo sapien
cacaacctgggcagggacctgctgg

SEQ ID NO: 5751135 - DNA, 25 bp, Homo sapien
agaccttgtccagctcgaaggacac

SEQ ID NO: 5751136 - DNA, 25 bp, Homo sapien
tcggccagcccgctcgcgcccctcc

SEQ ID NO: 5751137 - DNA, 25 bp, Homo sapien
tccgcccatgcaatttgcactcaga

SEQ ID NO: 5751138 - DNA, 25 bp, Homo sapien
ccagccaagtccaccaggttcagct

SEQ ID NO: 5751139 - DNA, 25 bp, Homo sapien
tgcagggtcaggtagagcccgtggg

SEQ ID NO: 5751140 - DNA, 25 bp, Homo sapien
aggtggatgatggagtcgtcgtcgg

SEQ ID NO: 5751141 - DNA, 25 bp, Homo sapien
acatacttgacaggtggggactggg

SEQ ID NO: 5751142 - DNA, 25 bp, Homo sapien
tctgcccatgggcccgctccagctc

SEQ ID NO: 5751143 - DNA, 25 bp, Homo sapien
gtccgcagtgccggctgcaaggtca

SEQ ID NO: 5751144 - DNA, 25 bp, Homo sapien
gctctgcacttggaactcagtcagc

SEQ ID NO: 5751145 - DNA, 25 bp, Homo sapien
ccagttcgctgatggcccaggcctg

SEQ ID NO: 5751146 - DNA, 25 bp, Homo sapien
ttgatgtcgtccacgctctgcactt

SEQ ID NO: 5751147 - DNA, 25 bp, Homo sapien
atgctcctggcttgaccaggaccca

SEQ ID NO: 5751148 - DNA, 25 bp, Homo sapien
gcgcgtgcgagcgggagctgtgctc

SEQ ID NO: 5751149 - DNA, 25 bp, Homo sapien
cgggcggccgggctggctggggctg

SEQ ID NO: 5751150 - DNA, 25 bp, Homo sapien
agccagccaagtccaccaggttcag

SEQ ID NO: 5751151 - DNA, 25 bp, Homo sapien
tgtggcgtctgacaagccggctccc

SEQ ID NO: 5751152 - DNA, 25 bp, Homo sapien
cagatcgcagtcggctcacttcctg

SEQ ID NO: 5751153 - DNA, 25 bp, Homo sapien
ttcgctgatggcccaggcctgccag

SEQ ID NO: 5751154 - DNA, 25 bp, Homo sapien
accttgtccagctcgaaggacacag

SEQ ID NO: 5751155 - DNA, 25 bp, Homo sapien
agctagggctgggcgagctgcactt

SEQ ID NO: 5751156 - DNA, 25 bp, Homo sapien
tggcggaggcaggatccaggcgtcg

SEQ ID NO: 5751157 - DNA, 25 bp, Homo sapien
tggtctcgtggctgtcacgcaggcg

SEQ ID NO: 5751158 - DNA, 25 bp, Homo sapien
ctgcacctcctggaacacgtcctgc

SEQ ID NO: 5751159 - DNA, 25 bp, Homo sapien
gcccgccggcaggaggcagctccac

SEQ ID NO: 5751160 - DNA, 25 bp, Homo sapien
gctgggcgctctcctggctgtgctc

SEQ ID NO: 5751161 - DNA, 25 bp, Homo sapien
cctggcctatctcggccttgacact

SEQ ID NO: 5751162 - DNA, 25 bp, Homo sapien
aagcgaatcctgcagcaggtaggtg

SEQ ID NO: 5751163 - DNA, 25 bp, Homo sapien
gctgcagggcccgctggttgatacc

SEQ ID NO: 5751164 - DNA, 25 bp, Homo sapien
cataaacacagcacggccccgtggc

SEQ ID NO: 5751165 - DNA, 25 bp, Homo sapien
aggcaggatccaggcgtcgccgcag

SEQ ID NO: 5751166 - DNA, 25 bp, Homo sapien
gcgtctgacaagccggctcccactc

SEQ ID NO: 5751167 - DNA, 25 bp, Homo sapien
catcagcaggtcccggtgcttctcc

SEQ ID NO: 5751168 - DNA, 25 bp, Homo sapien
gtgtggccaaactcaaacaccttgt

SEQ ID NO: 5751169 - DNA, 25 bp, Homo sapien
ggcccagcggggtcacatccgtcac

SEQ ID NO: 5751170 - DNA, 25 bp, Homo sapien
ctgcgcctcccgcaggcggctgccc

SEQ ID NO: 5751171 - DNA, 25 bp, Homo sapien
gggcccagttcgctgatggcccagg

SEQ ID NO: 5751172 - DNA, 25 bp, Homo sapien
tttccctagcaggtccctgaggacc

SEQ ID NO: 5751173 - DNA, 25 bp, Homo sapien
gcagtccttgagtcgcagctccacc

SEQ ID NO: 5751174 - DNA, 25 bp, Homo sapien
ctgggcctggctaatgagcttctcc

SEQ ID NO: 5751175 - DNA, 25 bp, Homo sapien
ctgcttggtcttggacgactccacc

SEQ ID NO: 5751176 - DNA, 25 bp, Homo sapien
cctgggctctggcaaaggcctcctc

SEQ ID NO: 5751177 - DNA, 25 bp, Homo sapien
gcagctcctggttgttgctgttgac

SEQ ID NO: 5751178 - DNA, 25 bp, Homo sapien
atgcaagaggtgaccagggcctgca

SEQ ID NO: 5751179 - DNA, 25 bp, Homo sapien
gaactcagtcagccctggtacatac

SEQ ID NO: 5751180 - DNA, 25 bp, Homo sapien
gtccacgctctgcacttggaactca

SEQ ID NO: 5751181 - DNA, 25 bp, Homo sapien
agtcggctcacttcctgggcctggc

SEQ ID NO: 5751182 - DNA, 25 bp, Homo sapien
gatgacatacttgacaggtggggac

SEQ ID NO: 5751183 - DNA, 25 bp, Homo sapien
gatgtgctgcgcctcccgcaggcgg

SEQ ID NO: 5751184 - DNA, 25 bp, Homo sapien
gtgttctacctgcagggtcaggtag

SEQ ID NO: 5751185 - DNA, 25 bp, Homo sapien
taaacacagcacggccccgtggcgg

SEQ ID NO: 5751186 - DNA, 25 bp, Homo sapien
gctgttgacctcctcgatggcctgg

SEQ ID NO: 5751187 - DNA, 25 bp, Homo sapien
ggcgggcggccgggctggctggggc

SEQ ID NO: 5751188 - DNA, 25 bp, Homo sapien
cagcaggtggatgatggagtcgtcg

SEQ ID NO: 5751189 - DNA, 25 bp, Homo sapien
ggtgaactcggtcgtgcgattagtg

SEQ ID NO: 5751190 - DNA, 25 bp, Homo sapien
ttctcatctttgaggggagacgggg

SEQ ID NO: 5751191 - DNA, 25 bp, Homo sapien
agtcggtgccccccagctcagatcg

SEQ ID NO: 5751192 - DNA, 25 bp, Homo sapien
ctcctcggccagcccgctcgcgccc

SEQ ID NO: 5751193 - DNA, 25 bp, Homo sapien
cgggggtcctggcgctgcagcaggg

SEQ ID NO: 5751194 - DNA, 25 bp, Homo sapien
ggagttgcggaagggcacgtggccc

SEQ ID NO: 5751195 - DNA, 25 bp, Homo sapien
ccgcagcgctgacggtgatggtgta

SEQ ID NO: 5751196 - DNA, 25 bp, Homo sapien
ctgcagcagggacaggccagtgagg

SEQ ID NO: 5751197 - DNA, 25 bp, Homo sapien
tctcctgcctcagtcgctcattctc

SEQ ID NO: 5751198 - DNA, 25 bp, Homo sapien
ggacgactccacctccactgtcttg

SEQ ID NO: 5751199 - DNA, 25 bp, Homo sapien
ccccccagctcagatcgcagtcggc

SEQ ID NO: 5751200 - DNA, 25 bp, Homo sapien
acagccttcatctccacctgggctc

SEQ ID NO: 5751201 - DNA, 25 bp, Homo sapien
tcctcaatggcccggttcttgtcct

SEQ ID NO: 5751202 - DNA, 25 bp, Homo sapien
agccaggcaggtgagcgagcagcag

SEQ ID NO: 5751203 - DNA, 25 bp, Homo sapien
gcaatggtctcgtggctgtcacgca

SEQ ID NO: 5751204 - DNA, 25 bp, Homo sapien
tggctgtcacgcaggcgccgactga

SEQ ID NO: 5751205 - DNA, 25 bp, Homo sapien
gcaggtccctgaggacctcattgta

SEQ ID NO: 5751206 - DNA, 25 bp, Homo sapien
cacggagctgggcgctctcctggct

SEQ ID NO: 5751207 - DNA, 25 bp, Homo sapien
cgctgagggcctgcttggtcttgga

SEQ ID NO: 5751208 - DNA, 25 bp, Homo sapien
accaggttcagcttccccgtggtgc

SEQ ID NO: 5751209 - DNA, 25 bp, Homo sapien
tctccaagtcggtgccccccagctc

SEQ ID NO: 5751210 - DNA, 25 bp, Homo sapien
cgctcattctccaccatcagcaggt

SEQ ID NO: 5751211 - DNA, 25 bp, Homo sapien
gtcagctggtgtgagctctgcagct

SEQ ID NO: 5751212 - DNA, 25 bp, Homo sapien
ctggggcggggcgagccatccccgg

SEQ ID NO: 5751213 - DNA, 25 bp, Homo sapien
ccggcccggcccgccggcaggaggc

SEQ ID NO: 5751214 - DNA, 25 bp, Homo sapien
tgttccctttcagccgcacgagctc

SEQ ID NO: 5751215 - DNA, 25 bp, Homo sapien
cggtcgtgcgattagtgtggccaaa

SEQ ID NO: 5751216 - DNA, 25 bp, Homo sapien
actcctgagggcctcctgcagcagc

SEQ ID NO: 5751217 - DNA, 25 bp, Homo sapien
tgtgcagcaggtggatgatggagtc

SEQ ID NO: 5751218 - DNA, 25 bp, Homo sapien
cgggaggccatgcgcctccgcacac

SEQ ID NO: 5751219 - DNA, 25 bp, Homo sapien
tcgccgcagcgcccggggctcggcc

SEQ ID NO: 5751220 - DNA, 25 bp, Homo sapien
gccataaacacagcacggccccgtg

SEQ ID NO: 5751221 - DNA, 25 bp, Homo sapien
agctcagatcgcagtcggctcactt

SEQ ID NO: 5751222 - DNA, 25 bp, Homo sapien
ggcttgaccaggacccaagctctgc

SEQ ID NO: 5751223 - DNA, 25 bp, Homo sapien
aaaatggctaagcttccaaaagttc

SEQ ID NO: 5751224 - DNA, 25 bp, Homo sapien
cgcaggcggctgccctcggcccccg

SEQ ID NO: 5751225 - DNA, 25 bp, Homo sapien
cactaagcgaatcctgcagcaggta

SEQ ID NO: 5751226 - DNA, 25 bp, Homo sapien
ctcagtcgctcattctccaccatca

SEQ ID NO: 5751227 - DNA, 25 bp, Homo sapien
aagaagagcctccactctcgcctct

SEQ ID NO: 5751228 - DNA, 25 bp, Homo sapien
cccgtgccgagggctgtggcgtctg

SEQ ID NO: 5751229 - DNA, 25 bp, Homo sapien
agggctgcagcttcctccggatgga

SEQ ID NO: 5751230 - DNA, 25 bp, Homo sapien
gtgagggtccgcagtgccggctgca

SEQ ID NO: 5751231 - DNA, 25 bp, Homo sapien
ccttctgaacatgtttctcatcttt

SEQ ID NO: 5751232 - DNA, 25 bp, Homo sapien
gtactcccagtcagacgccttctcc

SEQ ID NO: 5751233 - DNA, 25 bp, Homo sapien
tctttgaggggagacggggcagaag

SEQ ID NO: 5751234 - DNA, 25 bp, Homo sapien
cctaaggagggggctggccagctct

SEQ ID NO: 5751235 - DNA, 25 bp, Homo sapien
gtgggaagccgcgcacctgccgctt

SEQ ID NO: 5751236 - DNA, 25 bp, Homo sapien
gggggctgagtgggcccgtgccgag

SEQ ID NO: 5751237 - DNA, 25 bp, Homo sapien
tggctgtgctcacaacctgggcagg

SEQ ID NO: 5751238 - DNA, 25 bp, Homo sapien
ccttcatctccacctgggctctggc

SEQ ID NO: 5751239 - DNA, 25 bp, Homo sapien
ctgaggagaggggccgagaaagcct

SEQ ID NO: 5751240 - DNA, 25 bp, Homo sapien
ggactgcatctcctccagcatctgc

SEQ ID NO: 5751241 - DNA, 25 bp, Homo sapien
gaccatggcctggggctcagcagcc

SEQ ID NO: 5751242 - DNA, 25 bp, Homo sapien
tgggaaagggcgggcggccgggctg

SEQ ID NO: 5751243 - DNA, 25 bp, Homo sapien
agcagcgcgtgcgagcgggagctgt

SEQ ID NO: 5751244 - DNA, 25 bp, Homo sapien
cctttccgcccatgcaatttgcact

SEQ ID NO: 5751245 - DNA, 25 bp, Homo sapien
ggtccggacgcctgctagattctcg

SEQ ID NO: 5751246 - DNA, 25 bp, Homo sapien
tgccctgcgtagcccaggccccagc

SEQ ID NO: 5751247 - DNA, 25 bp, Homo sapien
caagtcggtgccccccagctcagat

SEQ ID NO: 5751248 - DNA, 25 bp, Homo sapien
gagggtccgcagtgccggctgcaag

SEQ ID NO: 5751249 - DNA, 25 bp, Homo sapien
acttgacaggtggggactgggcccg

SEQ ID NO: 5751250 - DNA, 25 bp, Homo sapien
ccacactcccgccctcctcacgggg

SEQ ID NO: 5751251 - DNA, 25 bp, Homo sapien
ttctccacgggggacacctgtacca

SEQ ID NO: 5751252 - DNA, 25 bp, Homo sapien
cttctccttcaggtgttctacctgc

SEQ ID NO: 5751253 - DNA, 25 bp, Homo sapien
caaagatgcagacattgaagccatc

SEQ ID NO: 5751254 - DNA, 25 bp, Homo sapien
gctgtcacgcaggcgccgactgagc

SEQ ID NO: 5751255 - DNA, 25 bp, Homo sapien
cttgagtcgcagctccacctcagcc

SEQ ID NO: 5751256 - DNA, 25 bp, Homo sapien
agctcattgtggcacttcttacgca

SEQ ID NO: 5751257 - DNA, 25 bp, Homo sapien
ctggcgggagcgcagggcagcaatg

SEQ ID NO: 5751258 - DNA, 25 bp, Homo sapien
ttgcactcagagccacagccgagag

SEQ ID NO: 5751259 - DNA, 25 bp, Homo sapien
cccactctagatgctcctggcttga

SEQ ID NO: 5751260 - DNA, 25 bp, Homo sapien
tcggctcacttcctgggcctggcta

SEQ ID NO: 5751261 - DNA, 25 bp, Homo sapien
caggtcccggtgcttctccaagtcg

SEQ ID NO: 5751262 - DNA, 25 bp, Homo sapien
tctgcagctgctgttccatctcctt

SEQ ID NO: 5751263 - DNA, 25 bp, Homo sapien
cttcgggcactggagtcctcgtcac

SEQ ID NO: 5751264 - DNA, 25 bp, Homo sapien
tccccatcctctttggtgactggcc

SEQ ID NO: 5751265 - DNA, 25 bp, Homo sapien
cgagaaagcctgggtgagaggccca

SEQ ID NO: 5751266 - DNA, 25 bp, Homo sapien
cagcttccccgtggtgcggaggcct

SEQ ID NO: 5751267 - DNA, 25 bp, Homo sapien
cctggttgttgctgttgacctcctc

SEQ ID NO: 5751268 - DNA, 25 bp, Homo sapien
ccgccctcctcacggggcccagttc

SEQ ID NO: 5751269 - DNA, 25 bp, Homo sapien
ctggctgcctctgccagccataaac

SEQ ID NO: 5751270 - DNA, 25 bp, Homo sapien
ctgagggcctgcttggtcttggacg

SEQ ID NO: 5751271 - DNA, 25 bp, Homo sapien
tcacgcaggcgccgactgagccgct

SEQ ID NO: 5751272 - DNA, 25 bp, Homo sapien
agcattggtggcctcaggtccttcc

SEQ ID NO: 5751273 - DNA, 25 bp, Homo sapien
gggttctcagcggtcccctccatcg

SEQ ID NO: 5751274 - DNA, 25 bp, Homo sapien
cccagcggggtcacatccgtcacac

SEQ ID NO: 5751275 - DNA, 25 bp, Homo sapien
tgccccccagctcagatcgcagtcg

SEQ ID NO: 5751276 - DNA, 25 bp, Homo sapien
gactgggcccgcaggctggcaatgg

SEQ ID NO: 5751277 - DNA, 25 bp, Homo sapien
tgggtgagaggcccaccctcctcca

SEQ ID NO: 5751278 - DNA, 25 bp, Homo sapien
ctgccagccataaacacagcacggc

SEQ ID NO: 5751279 - DNA, 25 bp, Homo sapien
actcagtcagccctggtacatacag

SEQ ID NO: 5751280 - DNA, 25 bp, Homo sapien
gtcgctcattctccaccatcagcag

SEQ ID NO: 5751281 - DNA, 25 bp, Homo sapien
ccagctctgactcgtacatggcaat

SEQ ID NO: 5751282 - DNA, 25 bp, Homo sapien
cagccggtcggtcttctgctgcacc

SEQ ID NO: 5751283 - DNA, 25 bp, Homo sapien
tcgtgtacgtcttgccggcgcccgt

SEQ ID NO: 5751284 - DNA, 25 bp, Homo sapien
agctcgcggcggtacttgcgcagca

SEQ ID NO: 5751285 - DNA, 25 bp, Homo sapien
tcctgtgccttctcagccaggcagt

SEQ ID NO: 5751286 - DNA, 25 bp, Homo sapien
gacaagccggctcccactctagatg

SEQ ID NO: 5751287 - DNA, 25 bp, Homo sapien
aatggtctcgtggctgtcacgcagg

SEQ ID NO: 5751288 - DNA, 25 bp, Homo sapien
cggatgttccctttcagccgcacga

SEQ ID NO: 5751289 - DNA, 25 bp, Homo sapien
gaggcctgtggggagaagaccttgt

SEQ ID NO: 5751290 - DNA, 25 bp, Homo sapien
gcggaagggcacgtggccctggcgg

SEQ ID NO: 5751291 - DNA, 25 bp, Homo sapien
tcttctccacgggggacacctgtac

SEQ ID NO: 5751292 - DNA, 25 bp, Homo sapien
ggctccggggcccggcccactctcc

SEQ ID NO: 5751293 - DNA, 25 bp, Homo sapien
taccaccatgagggtcttgctgtca

SEQ ID NO: 5751294 - DNA, 25 bp, Homo sapien
gcagcttcctccggatggatccagg

SEQ ID NO: 5751295 - DNA, 25 bp, Homo sapien
gaggtgaccagggcctgcacctcct

SEQ ID NO: 5751296 - DNA, 25 bp, Homo sapien
ctggggctggggcggggcgagccat

SEQ ID NO: 5751297 - DNA, 25 bp, Homo sapien
cggggagggctgccattggtgccac

SEQ ID NO: 5751298 - DNA, 25 bp, Homo sapien
cccagcttcaggcccagcggggtca

SEQ ID NO: 5751299 - DNA, 25 bp, Homo sapien
cctgggtgagaggcccaccctcctc

SEQ ID NO: 5751300 - DNA, 25 bp, Homo sapien
tgacatacttgacaggtggggactg

SEQ ID NO: 5751301 - DNA, 25 bp, Homo sapien
cggggcccagttcgctgatggccca

SEQ ID NO: 5751302 - DNA, 25 bp, Homo sapien
attagtgtggccaaactcaaacacc

SEQ ID NO: 5751303 - DNA, 25 bp, Homo sapien
ctcctggaacacgtcctgctgcgag

SEQ ID NO: 5751304 - DNA, 25 bp, Homo sapien
ttgcagctcggcctcacagcgccgc

SEQ ID NO: 5751305 - DNA, 25 bp, Homo sapien
gtagcccaggccccagctccacaga

SEQ ID NO: 5751306 - DNA, 25 bp, Homo sapien
cggagctgggcgctctcctggctgt

SEQ ID NO: 5751307 - DNA, 25 bp, Homo sapien
ggcgctctcctggctgtgctcacaa

SEQ ID NO: 5751308 - DNA, 25 bp, Homo sapien
cgcctttccgcccatgcaatttgca

SEQ ID NO: 5751309 - DNA, 25 bp, Homo sapien
gctcgaaggacacaggcttgccctt

SEQ ID NO: 5751310 - DNA, 25 bp, Homo sapien
acaggccccgcagcgagggcgtggc

SEQ ID NO: 5751311 - DNA, 25 bp, Homo sapien
agtcacagcattggtggcctcaggt

SEQ ID NO: 5751312 - DNA, 25 bp, Homo sapien
gacttgttgatgtgctgcgcctccc

SEQ ID NO: 5751313 - DNA, 25 bp, Homo sapien
aggcctgccaggaagagcagccacc

SEQ ID NO: 5751314 - DNA, 25 bp, Homo sapien
catgagggtcttgctgtcaccacta

SEQ ID NO: 5751315 - DNA, 25 bp, Homo sapien
gctggctttgtgcgcagctcttgca

SEQ ID NO: 5751316 - DNA, 25 bp, Homo sapien
ttggtccggacgcctgctagattct

SEQ ID NO: 5751317 - DNA, 25 bp, Homo sapien
ggcccgtgccgagggctgtggcgtc

SEQ ID NO: 5751318 - DNA, 25 bp, Homo sapien
ccatctccagctgcagctgggacag

SEQ ID NO: 5751319 - DNA, 25 bp, Homo sapien
gcctcctcggggcaccaggcagccg

SEQ ID NO: 5751320 - DNA, 25 bp, Homo sapien
cattgtagtcgttggtgagggtccg

SEQ ID NO: 5751321 - DNA, 25 bp, Homo sapien
ctgaggacctcattgtagatctccg

SEQ ID NO: 5751322 - DNA, 25 bp, Homo sapien
tcctggcttgaccaggacccaagct

SEQ ID NO: 5751323 - DNA, 25 bp, Homo sapien
agttggtccggacgcctgctagatt

SEQ ID NO: 5751324 - DNA, 25 bp, Homo sapien
atggcccggttcttgtcctcttcca

SEQ ID NO: 5751325 - DNA, 25 bp, Homo sapien
tctgcaagctgaggagaggggccga

SEQ ID NO: 5751326 - DNA, 25 bp, Homo sapien
cactctccacaggccccgcagcgag

SEQ ID NO: 5751327 - DNA, 25 bp, Homo sapien
ctcggagaagagcagctgcagggcc

SEQ ID NO: 5751328 - DNA, 25 bp, Homo sapien
tccactctcgcctctacctccgggg

SEQ ID NO: 5751329 - DNA, 25 bp, Homo sapien
cagcgcccggggctcggcccggccc

SEQ ID NO: 5751330 - DNA, 25 bp, Homo sapien
ggctgcaaggtcagcaagttggtcc

SEQ ID NO: 5751331 - DNA, 25 bp, Homo sapien
ctcccgcaggcggctgccctcggcc

SEQ ID NO: 5751332 - DNA, 25 bp, Homo sapien
tactggtcccagagctgggggctga

SEQ ID NO: 5751333 - DNA, 25 bp, Homo sapien
agctccacctcagccagccggtcgg

SEQ ID NO: 5751334 - DNA, 25 bp, Homo sapien
agcttcctccggatggatccagggc

SEQ ID NO: 5751335 - DNA, 25 bp, Homo sapien
tgcccactgccatctgggcacagcc

SEQ ID NO: 5751336 - DNA, 25 bp, Homo sapien
gctgcccactgccatctgggcacag

SEQ ID NO: 5751337 - DNA, 25 bp, Homo sapien
acctgctggctttgtgcgcagctct

SEQ ID NO: 5751338 - DNA, 25 bp, Homo sapien
ggttccgggcctgggactcgctgag

SEQ ID NO: 5751339 - DNA, 25 bp, Homo sapien
aaggtcagcaagttggtccggacgc

SEQ ID NO: 5751340 - DNA, 25 bp, Homo sapien
ctagattctcgtgcacagccttcat

SEQ ID NO: 5751341 - DNA, 25 bp, Homo sapien
gtccacgctaagggctcggcactga

SEQ ID NO: 5751342 - DNA, 25 bp, Homo sapien
cctgctgcgaggcctgtggggagaa

SEQ ID NO: 5751343 - DNA, 25 bp, Homo sapien
aaattcgagagaccagcgagccagg

SEQ ID NO: 5751344 - DNA, 25 bp, Homo sapien
cgaaagtcacagcattggtggcctc

SEQ ID NO: 5751345 - DNA, 25 bp, Homo sapien
ggcgctgcagcagggacaggccagt

SEQ ID NO: 5751346 - DNA, 25 bp, Homo sapien
agccacagccgagagacaccgtttc

SEQ ID NO: 5751347 - DNA, 25 bp, Homo sapien
ccccgtggcgggaggccatgcgcct

SEQ ID NO: 5751348 - DNA, 25 bp, Homo sapien
tccttgagtcgcagctccacctcag

SEQ ID NO: 5751349 - DNA, 25 bp, Homo sapien
cacctgggctctggcaaaggcctcc

SEQ ID NO: 5751350 - DNA, 25 bp, Homo sapien
tgccggctgcaaggtcagcaagttg

SEQ ID NO: 5751351 - DNA, 25 bp, Homo sapien
ctgacagcatgcctttgctttccgc

SEQ ID NO: 5751352 - DNA, 25 bp, Homo sapien
acgtggccctggcgggagcgcaggg

SEQ ID NO: 5751353 - DNA, 25 bp, Homo sapien
ctggcgctgcagcagggacaggcca

SEQ ID NO: 5751354 - DNA, 25 bp, Homo sapien
gggcagcaatgacgtcccccagagc

SEQ ID NO: 5751355 - DNA, 25 bp, Homo sapien
aggtgagcttggagttgcggaaggg

SEQ ID NO: 5751356 - DNA, 25 bp, Homo sapien
cactgccatctgggcacagccggat

SEQ ID NO: 5751357 - DNA, 25 bp, Homo sapien
ctccggatggatccagggcggctac

SEQ ID NO: 5751358 - DNA, 25 bp, Homo sapien
atcgaaagtcacagcattggtggcc

SEQ ID NO: 5751359 - DNA, 25 bp, Homo sapien
caagttggtccggacgcctgctaga

SEQ ID NO: 5751360 - DNA, 25 bp, Homo sapien
tgtgtgggaaagggcgggcggccgg

SEQ ID NO: 5751361 - DNA, 25 bp, Homo sapien
ggggcccggcccactctccacaggc

SEQ ID NO: 5751362 - DNA, 25 bp, Homo sapien
ggcctggcctatctcggccttgaca

SEQ ID NO: 5751363 - DNA, 25 bp, Homo sapien
gacaggtggggactgggcccgcagg

SEQ ID NO: 5751364 - DNA, 25 bp, Homo sapien
gaggggcggggagggctgccattgg

SEQ ID NO: 5751365 - DNA, 25 bp, Homo sapien
gctggcaatggtctcgtggctgtca

SEQ ID NO: 5751366 - DNA, 25 bp, Homo sapien
ggcggctgccctcggcccccgactt

SEQ ID NO: 5751367 - DNA, 25 bp, Homo sapien
ggcccggcccactctccacaggccc

SEQ ID NO: 5751368 - DNA, 25 bp, Homo sapien
ggcaccaggcagccggcctggcgga

SEQ ID NO: 5751369 - DNA, 25 bp, Homo sapien
tcgttggtgagggtccgcagtgccg

SEQ ID NO: 5751370 - DNA, 25 bp, Homo sapien
gacaggccagtgagggcccagcttc

SEQ ID NO: 5751371 - DNA, 25 bp, Homo sapien
gtttctcatctttgaggggagacgg

SEQ ID NO: 5751372 - DNA, 25 bp, Homo sapien
atcaatgcaagaggtgaccagggcc

SEQ ID NO: 5751373 - DNA, 25 bp, Homo sapien
acactcccgccctcctcacggggcc

SEQ ID NO: 5751374 - DNA, 25 bp, Homo sapien
tcggtgccccccagctcagatcgca

SEQ ID NO: 5751375 - DNA, 25 bp, Homo sapien
tgcccttgtgcagcaggtggatgat

SEQ ID NO: 5751376 - DNA, 25 bp, Homo sapien
cggagaagagcagctgcagggcccg

SEQ ID NO: 5751377 - DNA, 25 bp, Homo sapien
ctggctaatgagcttctccttcagg

SEQ ID NO: 5751378 - DNA, 25 bp, Homo sapien
cgcccggagccgcgcggtcagctgg

SEQ ID NO: 5751379 - DNA, 25 bp, Homo sapien
tacgcaaagatgcagacattgaagc

SEQ ID NO: 5751380 - DNA, 25 bp, Homo sapien
ctctttggtgactggccggacacga

SEQ ID NO: 5751381 - DNA, 25 bp, Homo sapien
tcctcctcggccagcccgctcgcgc

SEQ ID NO: 5751382 - DNA, 25 bp, Homo sapien
cctccgggggtcctggcgctgcagc

SEQ ID NO: 5751383 - DNA, 25 bp, Homo sapien
tcagagggaagaaaattcgagagac

SEQ ID NO: 5751384 - DNA, 25 bp, Homo sapien
gagggcctgcttggtcttggacgac

SEQ ID NO: 5751385 - DNA, 25 bp, Homo sapien
ggcccagcttcaggcccagcggggt

SEQ ID NO: 5751386 - DNA, 25 bp, Homo sapien
agggaagaaaattcgagagaccagc

SEQ ID NO: 5751387 - DNA, 25 bp, Homo sapien
aagggcacgtggccctggcgggagc

SEQ ID NO: 5751388 - DNA, 25 bp, Homo sapien
cggcactgagctagggctgggcgag

SEQ ID NO: 5751389 - DNA, 25 bp, Homo sapien
tcgagagaccagcgagccaggcagg

SEQ ID NO: 5751390 - DNA, 25 bp, Homo sapien
gcgtagcccaggccccagctccaca

SEQ ID NO: 5751391 - DNA, 25 bp, Homo sapien
gtcccctccatcgtgtacgtcttgc

SEQ ID NO: 5751392 - DNA, 25 bp, Homo sapien
taaggagggggctggccagctctgc

SEQ ID NO: 5751393 - DNA, 25 bp, Homo sapien
ctgggggctgagtgggcccgtgccg

SEQ ID NO: 5751394 - DNA, 25 bp, Homo sapien
atcttttccacgcccagttctcaac

SEQ ID NO: 5751395 - DNA, 25 bp, Homo sapien
agccaagtccaccaggttcagcttc

SEQ ID NO: 5751396 - DNA, 25 bp, Homo sapien
gtggccgcgacttccccgagggctg

SEQ ID NO: 5751397 - DNA, 25 bp, Homo sapien
cctgtggggagaagaccttgtccag

SEQ ID NO: 5751398 - DNA, 25 bp, Homo sapien
cttctgctgcacctctaggttcagc

SEQ ID NO: 5751399 - DNA, 25 bp, Homo sapien
cagctggtgtgagctctgcagctgc

SEQ ID NO: 5751400 - DNA, 25 bp, Homo sapien
gttcttaaataggatttcagaggga

SEQ ID NO: 5751401 - DNA, 25 bp, Homo sapien
aggacacaggcttgcccttgtgcag

SEQ ID NO: 5751402 - DNA, 25 bp, Homo sapien
tctcagccaggcagtccttgagtcg

SEQ ID NO: 5751403 - DNA, 25 bp, Homo sapien
cccctccatcgtgtacgtcttgccg

SEQ ID NO: 5751404 - DNA, 25 bp, Homo sapien
ctggcaaaggcctcctcaatggccc

SEQ ID NO: 5751405 - DNA, 25 bp, Homo sapien
cccctaaggagggggctggccagct

SEQ ID NO: 5751406 - DNA, 25 bp, Homo sapien
gatccaggcgtcgccgcagcgcccg

SEQ ID NO: 5751407 - DNA, 25 bp, Homo sapien
cagtgggaagccgcgcacctgccgc

SEQ ID NO: 5751408 - DNA, 25 bp, Homo sapien
gacattgaagccatcaatgcaagag

SEQ ID NO: 5751409 - DNA, 25 bp, Homo sapien
tccgggggtcctggcgctgcagcag

SEQ ID NO: 5751410 - DNA, 25 bp, Homo sapien
ctgccgcttgagcccattgtagtcg

SEQ ID NO: 5751411 - DNA, 25 bp, Homo sapien
cggacacgagcaatcactcggatgt

SEQ ID NO: 5751412 - DNA, 25 bp, Homo sapien
agagcagctgcagggcccgctggtt

SEQ ID NO: 5751413 - DNA, 25 bp, Homo sapien
ctccaccatcagcaggtcccggtgc

SEQ ID NO: 5751414 - DNA, 25 bp, Homo sapien
agagcctccactctcgcctctacct

SEQ ID NO: 5751415 - DNA, 25 bp, Homo sapien
agctctgacagcatgcctttgcttt

SEQ ID NO: 5751416 - DNA, 25 bp, Homo sapien
acctccactgtcttgatgacatact

SEQ ID NO: 5751417 - DNA, 25 bp, Homo sapien
tgtcttgatgacatacttgacaggt

SEQ ID NO: 5751418 - DNA, 25 bp, Homo sapien
ccgctcctcctcctgtgccttctca

SEQ ID NO: 5751419 - DNA, 25 bp, Homo sapien
cccactgccatctgggcacagccgg

SEQ ID NO: 5751420 - DNA, 25 bp, Homo sapien
ccgcgacttccccgagggctgcagc

SEQ ID NO: 5751421 - DNA, 25 bp, Homo sapien
gtccccatggttcttgggtctgccc

SEQ ID NO: 5751422 - DNA, 25 bp, Homo sapien
aatctgcgcccggagccgcgcggtc

SEQ ID NO: 5751423 - DNA, 25 bp, Homo sapien
cacagcgccgcatctcctgcctcag

SEQ ID NO: 5751424 - DNA, 25 bp, Homo sapien
ttccacgtcctgcgagaggggacca

SEQ ID NO: 5751425 - DNA, 25 bp, Homo sapien
cagcgacttgttgatgtgctgcgcc

SEQ ID NO: 5751426 - DNA, 25 bp, Homo sapien
agagccacagccgagagacaccgtt

SEQ ID NO: 5751427 - DNA, 25 bp, Homo sapien
ttggtgaactcggtcgtgcgattag

SEQ ID NO: 5751428 - DNA, 25 bp, Homo sapien
ttctccaccatcagcaggtcccggt

SEQ ID NO: 5751429 - DNA, 25 bp, Homo sapien
gacagcttgtcacggagctgggcgc

SEQ ID NO: 5751430 - DNA, 25 bp, Homo sapien
gtggcgggaggccatgcgcctccgc

SEQ ID NO: 5751431 - DNA, 25 bp, Homo sapien
gctctgcagctgctgttccatctcc

SEQ ID NO: 5751432 - DNA, 25 bp, Homo sapien
caggtagagcccgtgggggcttccg

SEQ ID NO: 5751433 - DNA, 25 bp, Homo sapien
tcgtgcacagccttcatctccacct

SEQ ID NO: 5751434 - DNA, 25 bp, Homo sapien
caccaggcagccggcctggcggagg

SEQ ID NO: 5751435 - DNA, 25 bp, Homo sapien
ccgtggcgggaggccatgcgcctcc

SEQ ID NO: 5751436 - DNA, 25 bp, Homo sapien
gagcttggagttgcggaagggcacg

SEQ ID NO: 5751437 - DNA, 25 bp, Homo sapien
tgtgctcacaacctgggcagggacc

SEQ ID NO: 5751438 - DNA, 25 bp, Homo sapien
acgcgctccgagccagccaagtcca

SEQ ID NO: 5751439 - DNA, 25 bp, Homo sapien
tcgtccacgctctgcacttggaact

SEQ ID NO: 5751440 - DNA, 25 bp, Homo sapien
cctgcagcagcagtgggaagccgcg

SEQ ID NO: 5751441 - DNA, 25 bp, Homo sapien
gagccgcgcggtcagctggtgtgag

SEQ ID NO: 5751442 - DNA, 25 bp, Homo sapien
ggctgcctctgccagccataaacac

SEQ ID NO: 5751443 - DNA, 25 bp, Homo sapien
ctgggcccgcaggctggcaatggtc

SEQ ID NO: 5751444 - DNA, 25 bp, Homo sapien
gcactggagtcctcgtcaccgcaga

SEQ ID NO: 5751445 - DNA, 25 bp, Homo sapien
caacctgggcagggacctgctggct

SEQ ID NO: 5751446 - DNA, 25 bp, Homo sapien
aaactcaaacaccttgttgatgtcg

SEQ ID NO: 5751447 - DNA, 25 bp, Homo sapien
ttgatgtgctgcgcctcccgcaggc

SEQ ID NO: 5751448 - DNA, 25 bp, Homo sapien
gcgagggcgtggctcccaggttcca

SEQ ID NO: 5751449 - DNA, 25 bp, Homo sapien
gcggtacttgcgcagcagctcctgg

SEQ ID NO: 5751450 - DNA, 25 bp, Homo sapien
agggcggctactggtcccagagctg

SEQ ID NO: 5751451 - DNA, 25 bp, Homo sapien
gggcccgcaggctggcaatggtctc

SEQ ID NO: 5751452 - DNA, 25 bp, Homo sapien
gcgacttccccgagggctgcagctt

SEQ ID NO: 5751453 - DNA, 25 bp, Homo sapien
gttccatctccttcagcacctgcct

SEQ ID NO: 5751454 - DNA, 25 bp, Homo sapien
gcttccccgtggtgcggaggcctgt

SEQ ID NO: 5751455 - DNA, 25 bp, Homo sapien
ggaagaaaattcgagagaccagcga

SEQ ID NO: 5751456 - DNA, 25 bp, Homo sapien
ctctaggttcagctctgacagcatg

SEQ ID NO: 5751457 - DNA, 25 bp, Homo sapien
gggacaggccagtgagggcccagct

SEQ ID NO: 5751458 - DNA, 25 bp, Homo sapien
cacttcgggcactggagtcctcgtc

SEQ ID NO: 5751459 - DNA, 25 bp, Homo sapien
ggtacatacagctgcccactgccat

SEQ ID NO: 5751460 - DNA, 25 bp, Homo sapien
gcgcctcccgcaggcggctgccctc

SEQ ID NO: 5751461 - DNA, 25 bp, Homo sapien
ctgcctcagtcgctcattctccacc

SEQ ID NO: 5751462 - DNA, 25 bp, Homo sapien
tcaccactaagcgaatcctgcagca

SEQ ID NO: 5751463 - DNA, 25 bp, Homo sapien
gggcagggacctgctggctttgtgc

SEQ ID NO: 5751464 - DNA, 25 bp, Homo sapien
tctccagtttttcctgaggctcttt

SEQ ID NO: 5751465 - DNA, 25 bp, Homo sapien
acctcattgtagatctccgcagcgc

SEQ ID NO: 5751466 - DNA, 25 bp, Homo sapien
gccttgacactcctgagggcctcct

SEQ ID NO: 5751467 - DNA, 25 bp, Homo sapien
tgaactcggtcgtgcgattagtgtg

SEQ ID NO: 5751468 - DNA, 25 bp, Homo sapien
actcccgccctcctcacggggccca

SEQ ID NO: 5751469 - DNA, 25 bp, Homo sapien
aaaagttcttaaataggatttcaga

SEQ ID NO: 5751470 - DNA, 25 bp, Homo sapien
ggcccggttcttgtcctcttccagg

SEQ ID NO: 5751471 - DNA, 25 bp, Homo sapien
acctgggttctcagcggtcccctcc

SEQ ID NO: 5751472 - DNA, 25 bp, Homo sapien
gcaaggtcagcaagttggtccggac

SEQ ID NO: 5751473 - DNA, 25 bp, Homo sapien
ctgacaagccggctcccactctaga

SEQ ID NO: 5751474 - DNA, 25 bp, Homo sapien
gcttgtcacggagctgggcgctctc

SEQ ID NO: 5751475 - DNA, 25 bp, Homo sapien
gggcctcctgcagcagcagtgggaa

SEQ ID NO: 5751476 - DNA, 25 bp, Homo sapien
tcccccagagccgacagcgacttgt

SEQ ID NO: 5751477 - DNA, 25 bp, Homo sapien
cagtccccatggttcttgggtctgc

SEQ ID NO: 5751478 - DNA, 25 bp, Homo sapien
cagctccacgccgccgcctcctcct

SEQ ID NO: 5751479 - DNA, 25 bp, Homo sapien
gtcacggagctgggcgctctcctgg

SEQ ID NO: 5751480 - DNA, 25 bp, Homo sapien
tgtcgtccacgctctgcacttggaa

SEQ ID NO: 5751481 - DNA, 25 bp, Homo sapien
cccacccgctggctgcctctgccag

SEQ ID NO: 5751482 - DNA, 25 bp, Homo sapien
ggcccgctccagctctgactcgtac

SEQ ID NO: 5751483 - DNA, 25 bp, Homo sapien
gggactgggcccgcaggctggcaat

SEQ ID NO: 5751484 - DNA, 25 bp, Homo sapien
ctggtcccagagctgggggctgagt

SEQ ID NO: 5751485 - DNA, 25 bp, Homo sapien
ggcgcccgtctggccgtacgcaaag

SEQ ID NO: 5751486 - DNA, 25 bp, Homo sapien
tcgcagctccacctcagccagccgg

SEQ ID NO: 5751487 - DNA, 25 bp, Homo sapien
gacggggcagaagaagagcctccac

SEQ ID NO: 5751488 - DNA, 25 bp, Homo sapien
cgccatctccagctgcagctgggac

SEQ ID NO: 5751489 - DNA, 25 bp, Homo sapien
ccaggcctgccaggaagagcagcca

SEQ ID NO: 5751490 - DNA, 25 bp, Homo sapien
tcgcaccgtcacgatgagcagcgcg

SEQ ID NO: 5751491 - DNA, 25 bp, Homo sapien
tgcagggcccgctggttgatacctg

SEQ ID NO: 5751492 - DNA, 25 bp, Homo sapien
cctgcaggtgctggttccgggcctg

SEQ ID NO: 5751493 - DNA, 25 bp, Homo sapien
ttgctttccgccatctccagctgca

SEQ ID NO: 5751494 - DNA, 25 bp, Homo sapien
tgagcccattgtagtcgttggtgag

SEQ ID NO: 5751495 - DNA, 25 bp, Homo sapien
gggcgagctgcacttcgggcactgg

SEQ ID NO: 5751496 - DNA, 25 bp, Homo sapien
gcaggaggcagctccacgccgccgc

SEQ ID NO: 5751497 - DNA, 25 bp, Homo sapien
agagcgtctcgctagtgttcttctc

SEQ ID NO: 5751498 - DNA, 25 bp, Homo sapien
tgagggtcttgctgtcaccactaag

SEQ ID NO: 5751499 - DNA, 25 bp, Homo sapien
ggtgaccagggcctgcacctcctgg

SEQ ID NO: 5751500 - DNA, 25 bp, Homo sapien
atggttcttgggtctgcccagaggc

SEQ ID NO: 5751501 - DNA, 25 bp, Homo sapien
cagctcgaaggacacaggcttgccc

SEQ ID NO: 5751502 - DNA, 25 bp, Homo sapien
ccgacagcgacttgttgatgtgctg

SEQ ID NO: 5751503 - DNA, 25 bp, Homo sapien
tcggcccccgacttgcccacgcgct

SEQ ID NO: 5751504 - DNA, 25 bp, Homo sapien
tcgaaggacacaggcttgcccttgt

SEQ ID NO: 5751505 - DNA, 25 bp, Homo sapien
cgcctcctcctcggccagcccgctc

SEQ ID NO: 5751506 - DNA, 25 bp, Homo sapien
tggcctcaggtccttccccatcctc

SEQ ID NO: 5751507 - DNA, 25 bp, Homo sapien
gctctgcaagctgaggagaggggcc

SEQ ID NO: 5751508 - DNA, 25 bp, Homo sapien
tgggcacagccggatctccagtttt

SEQ ID NO: 5751509 - DNA, 25 bp, Homo sapien
gggacagcttgtcacggagctgggc

SEQ ID NO: 5751510 - DNA, 25 bp, Homo sapien
agcgcagggcagcaatgacgtcccc

SEQ ID NO: 5751511 - DNA, 25 bp, Homo sapien
gagacggggcagaagaagagcctcc

SEQ ID NO: 5751512 - DNA, 25 bp, Homo sapien
catgggcccgctccagctctgactc

SEQ ID NO: 5751513 - DNA, 25 bp, Homo sapien
gactcgctgagggcctgcttggtct

SEQ ID NO: 5751514 - DNA, 25 bp, Homo sapien
gccgcgcggtcagctggtgtgagct

SEQ ID NO: 5751515 - DNA, 25 bp, Homo sapien
gtttccttctgaacatgtttctcat

SEQ ID NO: 5751516 - DNA, 25 bp, Homo sapien
gatgttccctttcagccgcacgagc

SEQ ID NO: 5751517 - DNA, 25 bp, Homo sapien
ctaatgagcttctccttcaggtgtt

SEQ ID NO: 5751518 - DNA, 25 bp, Homo sapien
cttctccaagtcggtgccccccagc

SEQ ID NO: 5751519 - DNA, 25 bp, Homo sapien
acactcctgagggcctcctgcagca

SEQ ID NO: 5751520 - DNA, 25 bp, Homo sapien
aggagggggctggccagctctgcaa

SEQ ID NO: 5751521 - DNA, 25 bp, Homo sapien
tcaacctccccgggccggtgtgtgg

SEQ ID NO: 5751522 - DNA, 25 bp, Homo sapien
gatgagcagcgcgtgcgagcgggag

SEQ ID NO: 5751523 - DNA, 25 bp, Homo sapien
atggcctggggctcagcagcctcct

SEQ ID NO: 5751524 - DNA, 25 bp, Homo sapien
attcgagagaccagcgagccaggca

SEQ ID NO: 5751525 - DNA, 25 bp, Homo sapien
agactggggtatcttttccacgccc

SEQ ID NO: 5751526 - DNA, 25 bp, Homo sapien
tttccgccatctccagctgcagctg

SEQ ID NO: 5751527 - DNA, 25 bp, Homo sapien
ctcagccagccggtcggtcttctgc

SEQ ID NO: 5751528 - DNA, 25 bp, Homo sapien
cattggtggcctcaggtccttcccc

SEQ ID NO: 5751529 - DNA, 25 bp, Homo sapien
tggcaatctgcgcccggagccgcgc

SEQ ID NO: 5751530 - DNA, 25 bp, Homo sapien
tctacctccgggggtcctggcgctg

SEQ ID NO: 5751531 - DNA, 25 bp, Homo sapien
cccatcctctttggtgactggccgg

SEQ ID NO: 5751532 - DNA, 25 bp, Homo sapien
gccctcctcacggggcccagttcgc

SEQ ID NO: 5751533 - DNA, 25 bp, Homo sapien
tcccggtgcttctccaagtcggtgc

SEQ ID NO: 5751534 - DNA, 25 bp, Homo sapien
agccggctcccactctagatgctcc

SEQ ID NO: 5751535 - DNA, 25 bp, Homo sapien
acttgagggaatagagcgtctcgct

SEQ ID NO: 5751536 - DNA, 25 bp, Homo sapien
gcgagctgcacttcgggcactggag

SEQ ID NO: 5751537 - DNA, 25 bp, Homo sapien
tctcctgcacctcggagaagagcag

SEQ ID NO: 5751538 - DNA, 25 bp, Homo sapien
gccgcagcgcccggggctcggcccg

SEQ ID NO: 5751539 - DNA, 25 bp, Homo sapien
cgcctcgcaccgtcacgatgagcag

SEQ ID NO: 5751540 - DNA, 25 bp, Homo sapien
tttgtgcgcagctcttgcagctcgg

SEQ ID NO: 5751541 - DNA, 25 bp, Homo sapien
ttcagccgcacgagctcattgtggc

SEQ ID NO: 5751542 - DNA, 25 bp, Homo sapien
cttggaactcagtcagccctggtac

SEQ ID NO: 5751543 - DNA, 25 bp, Homo sapien
ggctctggcaaaggcctcctcaatg

SEQ ID NO: 5751544 - DNA, 25 bp, Homo sapien
cagcttcaggcccagcggggtcaca

SEQ ID NO: 5751545 - DNA, 25 bp, Homo sapien
gggaatagagcgtctcgctagtgtt

SEQ ID NO: 5751546 - DNA, 25 bp, Homo sapien
ctttggtgactggccggacacgagc

SEQ ID NO: 5751547 - DNA, 25 bp, Homo sapien
tcttgctgtcaccactaagcgaatc

SEQ ID NO: 5751548 - DNA, 25 bp, Homo sapien
tgactggccggacacgagcaatcac

SEQ ID NO: 5751549 - DNA, 25 bp, Homo sapien
ccagctgcagctgggacagcttgtc

SEQ ID NO: 5751550 - DNA, 25 bp, Homo sapien
agccgctcctcctcctgtgccttct

SEQ ID NO: 5751551 - DNA, 25 bp, Homo sapien
gaatcctgcagcaggtaggtgagct

SEQ ID NO: 5751552 - DNA, 25 bp, Homo sapien
tgcacttggaactcagtcagccctg

SEQ ID NO: 5751553 - DNA, 25 bp, Homo sapien
tgtgctcgttcaggttggtgaactc

SEQ ID NO: 5751554 - DNA, 25 bp, Homo sapien
tgctgcgcctcccgcaggcggctgc

SEQ ID NO: 5751555 - DNA, 25 bp, Homo sapien
tgttgatgtcgtccacgctctgcac

SEQ ID NO: 5751556 - DNA, 25 bp, Homo sapien
agcagcctcctcggggcaccaggca

SEQ ID NO: 5751557 - DNA, 25 bp, Homo sapien
agatgctcctggcttgaccaggacc

SEQ ID NO: 5751558 - DNA, 25 bp, Homo sapien
agcctccactctcgcctctacctcc

SEQ ID NO: 5751559 - DNA, 25 bp, Homo sapien
gccgccgcctcctcctcggccagcc

SEQ ID NO: 5751560 - DNA, 25 bp, Homo sapien
cagctgctgttccatctccttcagc

SEQ ID NO: 5751561 - DNA, 25 bp, Homo sapien
agggctcggcactgagctagggctg

SEQ ID NO: 5751562 - DNA, 25 bp, Homo sapien
cagggcagcaatgacgtcccccaga

SEQ ID NO: 5751563 - DNA, 25 bp, Homo sapien
aggcgccgactgagccgctcctcct

SEQ ID NO: 5751564 - DNA, 25 bp, Homo sapien
gacagcgacttgttgatgtgctgcg

SEQ ID NO: 5751565 - DNA, 25 bp, Homo sapien
ctcgctgagggcctgcttggtcttg

SEQ ID NO: 5751566 - DNA, 25 bp, Homo sapien
gatgcagacattgaagccatcaatg

SEQ ID NO: 5751567 - DNA, 25 bp, Homo sapien
cctgcagggtcaggtagagcccgtg

SEQ ID NO: 5751568 - DNA, 25 bp, Homo sapien
tggccagctctgcaagctgaggaga

SEQ ID NO: 5751569 - DNA, 25 bp, Homo sapien
ctgggacagcttgtcacggagctgg

SEQ ID NO: 5751570 - DNA, 25 bp, Homo sapien
caccccctaaggagggggctggcca

SEQ ID NO: 5751571 - DNA, 25 bp, Homo sapien
gaaggacacaggcttgcccttgtgc

SEQ ID NO: 5751572 - DNA, 25 bp, Homo sapien
cagcagctcctggttgttgctgttg

SEQ ID NO: 5751573 - DNA, 25 bp, Homo sapien
ggcggggcgagccatccccggctcg

SEQ ID NO: 5751574 - DNA, 25 bp, Homo sapien
ccagaggctcctcgcccacccccta

SEQ ID NO: 5751575 - DNA, 25 bp, Homo sapien
ggtcacatccgtcacacaggcagtg

SEQ ID NO: 5751576 - DNA, 25 bp, Homo sapien
gcttccaaaagttcttaaataggat

SEQ ID NO: 5751577 - DNA, 25 bp, Homo sapien
agtaaaaatggctaagcttccaaaa

SEQ ID NO: 5751578 - DNA, 25 bp, Homo sapien
agctccacagagcgcaccctctcag

SEQ ID NO: 5751579 - DNA, 25 bp, Homo sapien
gaggcagctccacgccgccgcctcc

SEQ ID NO: 5751580 - DNA, 25 bp, Homo sapien
gacacaggcttgcccttgtgcagca

SEQ ID NO: 5751581 - DNA, 25 bp, Homo sapien
gagcgggagctgtgctcgttcaggt

SEQ ID NO: 5751582 - DNA, 25 bp, Homo sapien
cactcggatgttccctttcagccgc

SEQ ID NO: 5751583 - DNA, 25 bp, Homo sapien
ctcgttcaggttggtgaactcggtc

SEQ ID NO: 5751584 - DNA, 25 bp, Homo sapien
atacttgacaggtggggactgggcc

SEQ ID NO: 5751585 - DNA, 25 bp, Homo sapien
ttggagttgcggaagggcacgtggc

SEQ ID NO: 5751586 - DNA, 25 bp, Homo sapien
atgcgcctccgcacaccccccagct

SEQ ID NO: 5751587 - DNA, 25 bp, Homo sapien
cccgcctttccgcccatgcaatttg

SEQ ID NO: 5751588 - DNA, 25 bp, Homo sapien
cgcagcagctcctggttgttgctgt

SEQ ID NO: 5751589 - DNA, 25 bp, Homo sapien
atctccgcagcgctgacggtgatgg

SEQ ID NO: 5751590 - DNA, 25 bp, Homo sapien
agacgccttctcctgcacctcggag

SEQ ID NO: 5751591 - DNA, 25 bp, Homo sapien
cggccgggctggctggggctggggc

SEQ ID NO: 5751592 - DNA, 25 bp, Homo sapien
gggggcttccggggccagcccagtc

SEQ ID NO: 5751593 - DNA, 25 bp, Homo sapien
cagcggggtcacatccgtcacacag

SEQ ID NO: 5751594 - DNA, 25 bp, Homo sapien
tctgcccagaggctcctcgcccacc

SEQ ID NO: 5751595 - DNA, 25 bp, Homo sapien
ctctgccagccataaacacagcacg

SEQ ID NO: 5751596 - DNA, 25 bp, Homo sapien
gaccagcgagccaggcaggtgagcg

SEQ ID NO: 5751597 - DNA, 25 bp, Homo sapien
ttcatctccacctgggctctggcaa

SEQ ID NO: 5751598 - DNA, 25 bp, Homo sapien
gctggccagctctgcaagctgagga

SEQ ID NO: 5751599 - DNA, 25 bp, Homo sapien
gctcctggcttgaccaggacccaag

SEQ ID NO: 5751600 - DNA, 25 bp, Homo sapien
ggccccagctccacagagcgcaccc

SEQ ID NO: 5751601 - DNA, 25 bp, Homo sapien
cctcctcacggggcccagttcgctg

SEQ ID NO: 5751602 - DNA, 25 bp, Homo sapien
agaggggccgagaaagcctgggtga

SEQ ID NO: 5751603 - DNA, 25 bp, Homo sapien
gacacgagcaatcactcggatgttc

SEQ ID NO: 5751604 - DNA, 25 bp, Homo sapien
tcaaacaccttgttgatgtcgtcca

SEQ ID NO: 5751605 - DNA, 25 bp, Homo sapien
gcaaacttgagggaatagagcgtct

SEQ ID NO: 5751606 - DNA, 25 bp, Homo sapien
ccggggcccggcccactctccacag

SEQ ID NO: 5751607 - DNA, 25 bp, Homo sapien
gcctcctgcagcagcagtgggaagc

SEQ ID NO: 5751608 - DNA, 25 bp, Homo sapien
agccgacagcgacttgttgatgtgc

SEQ ID NO: 5751609 - DNA, 25 bp, Homo sapien
ctgcctctgccagccataaacacag

SEQ ID NO: 5751610 - DNA, 25 bp, Homo sapien
tgcaatttgcactcagagccacagc

SEQ ID NO: 5751611 - DNA, 25 bp, Homo sapien
ctcgatggcctggcctatctcggcc

SEQ ID NO: 5751612 - DNA, 25 bp, Homo sapien
cctcggccagcccgctcgcgcccct

SEQ ID NO: 5751613 - DNA, 25 bp, Homo sapien
aagaaaattcgagagaccagcgagc

SEQ ID NO: 5751614 - DNA, 25 bp, Homo sapien
ccgggcctgggactcgctgagggcc

SEQ ID NO: 5751615 - DNA, 25 bp, Homo sapien
tgaccaggacccaagctctgccctg

SEQ ID NO: 5751616 - DNA, 25 bp, Homo sapien
cttcctgggcctggctaatgagctt

SEQ ID NO: 5751617 - DNA, 25 bp, Homo sapien
cacagccggatctccagtttttcct

SEQ ID NO: 5751618 - DNA, 25 bp, Homo sapien
aagagcagccacccccgcctttccg

SEQ ID NO: 5751619 - DNA, 25 bp, Homo sapien
cccaggttccacgtcctgcgagagg

SEQ ID NO: 5751620 - DNA, 25 bp, Homo sapien
ccacagagcgcaccctctcagcaaa

SEQ ID NO: 5751621 - DNA, 25 bp, Homo sapien
ggggtcacatccgtcacacaggcag

SEQ ID NO: 5751622 - DNA, 25 bp, Homo sapien
caggccagtgagggcccagcttcag

SEQ ID NO: 5751623 - DNA, 25 bp, Homo sapien
gcaggatccaggcgtcgccgcagcg

SEQ ID NO: 5751624 - DNA, 25 bp, Homo sapien
ttgtcctcttccagggactgcatct

SEQ ID NO: 5751625 - DNA, 25 bp, Homo sapien
tgcagcaggtggatgatggagtcgt

SEQ ID NO: 5751626 - DNA, 25 bp, Homo sapien
gggaagccgcgcacctgccgcttga

SEQ ID NO: 5751627 - DNA, 25 bp, Homo sapien
tgagctagggctgggcgagctgcac

SEQ ID NO: 5751628 - DNA, 25 bp, Homo sapien
tgcagacattgaagccatcaatgca

SEQ ID NO: 5751629 - DNA, 25 bp, Homo sapien
gtcggcatcgaaagtcacagcattg

SEQ ID NO: 5751630 - DNA, 25 bp, Homo sapien
acctgggcagggacctgctggcttt

SEQ ID NO: 5751631 - DNA, 25 bp, Homo sapien
gctctttccctagcaggtccctgag

SEQ ID NO: 5751632 - DNA, 25 bp, Homo sapien
ctcggccttgacactcctgagggcc

SEQ ID NO: 5751633 - DNA, 25 bp, Homo sapien
gcagtgccggctgcaaggtcagcaa

SEQ ID NO: 5751634 - DNA, 25 bp, Homo sapien
tctccttcagcacctgcctctgcat

SEQ ID NO: 5751635 - DNA, 25 bp, Homo sapien
acgatgagcagcgcgtgcgagcggg

SEQ ID NO: 5751636 - DNA, 25 bp, Homo sapien
gctaagggctcggcactgagctagg

SEQ ID NO: 5751637 - DNA, 25 bp, Homo sapien
gccggacacgagcaatcactcggat

SEQ ID NO: 5751638 - DNA, 25 bp, Homo sapien
cagcaggtaggtgagcttggagttg

SEQ ID NO: 5751639 - DNA, 25 bp, Homo sapien
ggacccaagctctgccctgcgtagc

SEQ ID NO: 5751640 - DNA, 25 bp, Homo sapien
cttcaggtgttctacctgcagggtc

SEQ ID NO: 5751641 - DNA, 25 bp, Homo sapien
caggcgtcgccgcagcgcccggggc

SEQ ID NO: 5751642 - DNA, 25 bp, Homo sapien
cgcctgctagattctcgtgcacagc

SEQ ID NO: 5751643 - DNA, 25 bp, Homo sapien
cgctctcctggctgtgctcacaacc

SEQ ID NO: 5751644 - DNA, 25 bp, Homo sapien
tggtgagggtccgcagtgccggctg

SEQ ID NO: 5751645 - DNA, 25 bp, Homo sapien
gctcgggctccggggcccggcccac

SEQ ID NO: 5751646 - DNA, 25 bp, Homo sapien
ctcctggctgtgctcacaacctggg

SEQ ID NO: 5751647 - DNA, 25 bp, Homo sapien
gagagacaccgtttccttctgaaca

SEQ ID NO: 5751648 - DNA, 25 bp, Homo sapien
tcacatccgtcacacaggcagtggc

SEQ ID NO: 5751649 - DNA, 25 bp, Homo sapien
atccagggcggctactggtcccaga

SEQ ID NO: 5751650 - DNA, 25 bp, Homo sapien
cagctcttgcagctcggcctcacag

SEQ ID NO: 5751651 - DNA, 25 bp, Homo sapien
ccagctgcgggaaccctccttgaag

SEQ ID NO: 5751652 - DNA, 25 bp, Homo sapien
ttaaataggatttcagagggaagaa

SEQ ID NO: 5751653 - DNA, 25 bp, Homo sapien
cgtcgtcggcatcgaaagtcacagc

SEQ ID NO: 5751654 - DNA, 25 bp, Homo sapien
tctggccgtacgcaaagatgcagac

SEQ ID NO: 5751655 - DNA, 25 bp, Homo sapien
cagcaaacttgagggaatagagcgt

SEQ ID NO: 5751656 - DNA, 25 bp, Homo sapien
gcgtggctcccaggttccacgtcct

SEQ ID NO: 5751657 - DNA, 25 bp, Homo sapien
gcctgcacctcctggaacacgtcct

SEQ ID NO: 5751658 - DNA, 25 bp, Homo sapien
caccccccagctgcgggaaccctcc

SEQ ID NO: 5751659 - DNA, 25 bp, Homo sapien
caggcccagcggggtcacatccgtc

SEQ ID NO: 5751660 - DNA, 25 bp, Homo sapien
gtcgtcgtcggcatcgaaagtcaca

SEQ ID NO: 5751661 - DNA, 25 bp, Homo sapien
agcaagttggtccggacgcctgcta

SEQ ID NO: 5751662 - DNA, 25 bp, Homo sapien
ctggttccgggcctgggactcgctg

SEQ ID NO: 5751663 - DNA, 25 bp, Homo sapien
cgcaccctctcagcaaacttgaggg

SEQ ID NO: 5751664 - DNA, 25 bp, Homo sapien
ctgcacctcggagaagagcagctgc

SEQ ID NO: 5751665 - DNA, 25 bp, Homo sapien
agagctgggggctgagtgggcccgt

SEQ ID NO: 5751666 - DNA, 25 bp, Homo sapien
gactcgtacatggcaatctgcgccc

SEQ ID NO: 5751667 - DNA, 25 bp, Homo sapien
cccttgtgcagcaggtggatgatgg

SEQ ID NO: 5751668 - DNA, 25 bp, Homo sapien
tcacgatgagcagcgcgtgcgagcg

SEQ ID NO: 5751669 - DNA, 25 bp, Homo sapien
gtgtgagctctgcagctgctgttcc

SEQ ID NO: 5751670 - DNA, 25 bp, Homo sapien
ttgtggcacttcttacgcagctgca

SEQ ID NO: 5751671 - DNA, 25 bp, Homo sapien
cctcctcctcggccagcccgctcgc

SEQ ID NO: 5751672 - DNA, 25 bp, Homo sapien
atgtttctcatctttgaggggagac

SEQ ID NO: 5751673 - DNA, 25 bp, Homo sapien
ctggtacatacagctgcccactgcc

SEQ ID NO: 5751674 - DNA, 25 bp, Homo sapien
cactctcgcctctacctccgggggt

SEQ ID NO: 5751675 - DNA, 25 bp, Homo sapien
aggcagccggcctggcggaggcagg

SEQ ID NO: 5751676 - DNA, 25 bp, Homo sapien
cacgcctcgcaccgtcacgatgagc

SEQ ID NO: 5751677 - DNA, 25 bp, Homo sapien
agctgcgggaaccctccttgaagga

SEQ ID NO: 5751678 - DNA, 25 bp, Homo sapien
gtagatctccgcagcgctgacggtg

SEQ ID NO: 5751679 - DNA, 25 bp, Homo sapien
agaatcccccacccgctggctgcct

SEQ ID NO: 5751680 - DNA, 25 bp, Homo sapien
cctcggggcaccaggcagccggcct

SEQ ID NO: 5751681 - DNA, 25 bp, Homo sapien
aatggctaagcttccaaaagttctt

SEQ ID NO: 5751682 - DNA, 25 bp, Homo sapien
cgctgacggtgatggtgtactccca

SEQ ID NO: 5751683 - DNA, 25 bp, Homo sapien
ccaagtccaccaggttcagcttccc

SEQ ID NO: 5751684 - DNA, 25 bp, Homo sapien
ggtggcctcaggtccttccccatcc

SEQ ID NO: 5751685 - DNA, 25 bp, Homo sapien
gaagagcagctgcagggcccgctgg

SEQ ID NO: 5751686 - DNA, 25 bp, Homo sapien
tgtgctgcgcctcccgcaggcggct

SEQ ID NO: 5751687 - DNA, 25 bp, Homo sapien
gcgtgcgagcgggagctgtgctcgt

SEQ ID NO: 5751688 - DNA, 25 bp, Homo sapien
gtatcttttccacgcccagttctca

SEQ ID NO: 5751689 - DNA, 25 bp, Homo sapien
ccccagagccgacagcgacttgttg

SEQ ID NO: 5751690 - DNA, 25 bp, Homo sapien
cagcttgtcacggagctgggcgctc

SEQ ID NO: 5751691 - DNA, 25 bp, Homo sapien
gacagcatgcctttgctttccgcca

SEQ ID NO: 5751692 - DNA, 25 bp, Homo sapien
cttgcgcagcagctcctggttgttg

SEQ ID NO: 5751693 - DNA, 25 bp, Homo sapien
gccagctctgcaagctgaggagagg

SEQ ID NO: 5751694 - DNA, 25 bp, Homo sapien
cacccgctggctgcctctgccagcc

SEQ ID NO: 5751695 - DNA, 25 bp, Homo sapien
aggcaggtgagcgagcagcagaatc

SEQ ID NO: 5751696 - DNA, 25 bp, Homo sapien
gagacaccgtttccttctgaacatg

SEQ ID NO: 5751697 - DNA, 25 bp, Homo sapien
gcagctcggcctcacagcgccgcat

SEQ ID NO: 5751698 - DNA, 25 bp, Homo sapien
gttgatacctgggttctcagcggtc

SEQ ID NO: 5751699 - DNA, 25 bp, Homo sapien
tgacactcctgagggcctcctgcag

SEQ ID NO: 5751700 - DNA, 25 bp, Homo sapien
ctgcaaggtcagcaagttggtccgg

SEQ ID NO: 5751701 - DNA, 25 bp, Homo sapien
ctctgacagcatgcctttgctttcc

SEQ ID NO: 5751702 - DNA, 25 bp, Homo sapien
cagtggccgcgacttccccgagggc

SEQ ID NO: 5751703 - DNA, 25 bp, Homo sapien
ggctggggcggggcgagccatcccc

SEQ ID NO: 5751704 - DNA, 25 bp, Homo sapien
tgtccagctcgaaggacacaggctt

SEQ ID NO: 5751705 - DNA, 25 bp, Homo sapien
gaagagcctccactctcgcctctac

SEQ ID NO: 5751706 - DNA, 25 bp, Homo sapien
ccgctggttgatacctgggttctca

SEQ ID NO: 5751707 - DNA, 25 bp, Homo sapien
gctttccgccatctccagctgcagc

SEQ ID NO: 5751708 - DNA, 25 bp, Homo sapien
cggcccgccggcaggaggcagctcc

SEQ ID NO: 5751709 - DNA, 25 bp, Homo sapien
ctgcacctctaggttcagctctgac

SEQ ID NO: 5751710 - DNA, 25 bp, Homo sapien
cagcagcagtgggaagccgcgcacc

SEQ ID NO: 5751711 - DNA, 25 bp, Homo sapien
agatctccgcagcgctgacggtgat

SEQ ID NO: 5751712 - DNA, 25 bp, Homo sapien
ctgccatctgggcacagccggatct

SEQ ID NO: 5751713 - DNA, 25 bp, Homo sapien
ggcctgtgctgcagtccacgcctcg

SEQ ID NO: 5751714 - DNA, 25 bp, Homo sapien
tgggctctggcaaaggcctcctcaa

SEQ ID NO: 5751715 - DNA, 25 bp, Homo sapien
agtcgcagctccacctcagccagcc

SEQ ID NO: 5751716 - DNA, 25 bp, Homo sapien
gcttggagttgcggaagggcacgtg

SEQ ID NO: 5751717 - DNA, 25 bp, Homo sapien
gatcgcagtcggctcacttcctggg

SEQ ID NO: 5751718 - DNA, 25 bp, Homo sapien
gggagggctgccattggtgccacca

SEQ ID NO: 5751719 - DNA, 25 bp, Homo sapien
caccctctcagcaaacttgagggaa

SEQ ID NO: 5751720 - DNA, 25 bp, Homo sapien
gtggccaaactcaaacaccttgttg

SEQ ID NO: 5751721 - DNA, 25 bp, Homo sapien
gagggggctggccagctctgcaagc

SEQ ID NO: 5751722 - DNA, 25 bp, Homo sapien
acagagcgcaccctctcagcaaact

SEQ ID NO: 5751723 - DNA, 25 bp, Homo sapien
gagctctgcagctgctgttccatct

SEQ ID NO: 5751724 - DNA, 25 bp, Homo sapien
gagaagagcagctgcagggcccgct

SEQ ID NO: 5751725 - DNA, 25 bp, Homo sapien
cagacattgaagccatcaatgcaag

SEQ ID NO: 5751726 - DNA, 25 bp, Homo sapien
cttgtgcagcaggtggatgatggag

SEQ ID NO: 5751727 - DNA, 25 bp, Homo sapien
tcagccctggtacatacagctgccc

SEQ ID NO: 5751728 - DNA, 25 bp, Homo sapien
ctcctcggggcaccaggcagccggc

SEQ ID NO: 5751729 - DNA, 25 bp, Homo sapien
tacatacagctgcccactgccatct

SEQ ID NO: 5751730 - DNA, 25 bp, Homo sapien
agtgccggctgcaaggtcagcaagt

SEQ ID NO: 5751731 - DNA, 25 bp, Homo sapien
gagggctgccattggtgccaccaac

SEQ ID NO: 5751732 - DNA, 25 bp, Homo sapien
agctgcagctgggacagcttgtcac

SEQ ID NO: 5751733 - DNA, 25 bp, Homo sapien
ttgagggaatagagcgtctcgctag

SEQ ID NO: 5751734 - DNA, 25 bp, Homo sapien
tcggcccggcccggcccgccggcag

SEQ ID NO: 5751735 - DNA, 25 bp, Homo sapien
cgtcgccgcagcgcccggggctcgg

SEQ ID NO: 5751736 - DNA, 25 bp, Homo sapien
tcttacgcagctgcagctcgcggcg

SEQ ID NO: 5751737 - DNA, 25 bp, Homo sapien
cttctcctgcacctcggagaagagc

SEQ ID NO: 5751738 - DNA, 25 bp, Homo sapien
tctccttcaggtgttctacctgcag

SEQ ID NO: 5751739 - DNA, 25 bp, Homo sapien
gaaaattcgagagaccagcgagcca

SEQ ID NO: 5751740 - DNA, 25 bp, Homo sapien
taagcttccaaaagttcttaaatag

SEQ ID NO: 5751741 - DNA, 25 bp, Homo sapien
gctcttgcagctcggcctcacagcg

SEQ ID NO: 5751742 - DNA, 25 bp, Homo sapien
gcttccggggccagcccagtccacg

SEQ ID NO: 5751743 - DNA, 25 bp, Homo sapien
atctcggccttgacactcctgaggg

SEQ ID NO: 5751744 - DNA, 25 bp, Homo sapien
ttcagcttccccgtggtgcggaggc

SEQ ID NO: 5751745 - DNA, 25 bp, Homo sapien
cgacttgcccacgcgctccgagcca

SEQ ID NO: 5751746 - DNA, 25 bp, Homo sapien
agtgagggcccagcttcaggcccag

SEQ ID NO: 5751747 - DNA, 25 bp, Homo sapien
tcctggcgctgcagcagggacaggc

SEQ ID NO: 5751748 - DNA, 25 bp, Homo sapien
tccacgcccagttctcaacctcccc

SEQ ID NO: 5751749 - DNA, 25 bp, Homo sapien
cgctggctgcctctgccagccataa

SEQ ID NO: 5751750 - DNA, 25 bp, Homo sapien
tcctgcctcagtcgctcattctcca

SEQ ID NO: 5751751 - DNA, 25 bp, Homo sapien
ccacagccgagagacaccgtttcct

SEQ ID NO: 5751752 - DNA, 25 bp, Homo sapien
gctagtgttcttctccacgggggac

SEQ ID NO: 5751753 - DNA, 25 bp, Homo sapien
ccctgcgtagcccaggccccagctc

SEQ ID NO: 5751754 - DNA, 25 bp, Homo sapien
ggcccggcccgccggcaggaggcag

SEQ ID NO: 5751755 - DNA, 25 bp, Homo sapien
ggtggggactgggcccgcaggctgg

SEQ ID NO: 5751756 - DNA, 25 bp, Homo sapien
gctgtcaccactaagcgaatcctgc

SEQ ID NO: 5751757 - DNA, 25 bp, Homo sapien
ggggctggggcggggcgagccatcc

SEQ ID NO: 5751758 - DNA, 25 bp, Homo sapien
gtctgacaagccggctcccactcta

SEQ ID NO: 5751759 - DNA, 25 bp, Homo sapien
gcctctgccagccataaacacagca

SEQ ID NO: 5751760 - DNA, 25 bp, Homo sapien
agctctgactcgtacatggcaatct

SEQ ID NO: 5751761 - DNA, 25 bp, Homo sapien
gcagactggggtatcttttccacgc

SEQ ID NO: 5751762 - DNA, 25 bp, Homo sapien
gccgcatctcctgcctcagtcgctc

SEQ ID NO: 5751763 - DNA, 25 bp, Homo sapien
ccagggactgcatctcctccagcat

SEQ ID NO: 5751764 - DNA, 25 bp, Homo sapien
cacttcctgggcctggctaatgagc

SEQ ID NO: 5751765 - DNA, 25 bp, Homo sapien
agcagtgggaagccgcgcacctgcc

SEQ ID NO: 5751766 - DNA, 25 bp, Homo sapien
cttttccacgcccagttctcaacct

SEQ ID NO: 5751767 - DNA, 25 bp, Homo sapien
cgattagtgtggccaaactcaaaca

SEQ ID NO: 5751768 - DNA, 25 bp, Homo sapien
cgcaaagatgcagacattgaagcca

SEQ ID NO: 5751769 - DNA, 25 bp, Homo sapien
actggagtcctcgtcaccgcagact

SEQ ID NO: 5751770 - DNA, 25 bp, Homo sapien
gtcgtgcgattagtgtggccaaact

SEQ ID NO: 5751771 - DNA, 25 bp, Homo sapien
tgcacttcgggcactggagtcctcg

SEQ ID NO: 5751772 - DNA, 25 bp, Homo sapien
ccatcaatgcaagaggtgaccaggg

SEQ ID NO: 5751773 - DNA, 25 bp, Homo sapien
ttcctgaggctctttccctagcagg

SEQ ID NO: 5751774 - DNA, 25 bp, Homo sapien
ccagggcggctactggtcccagagc

SEQ ID NO: 5751775 - DNA, 25 bp, Homo sapien
cggggcagaagaagagcctccactc

SEQ ID NO: 5751776 - DNA, 25 bp, Homo sapien
gcacagccttcatctccacctgggc

SEQ ID NO: 5751777 - DNA, 25 bp, Homo sapien
acgactccacctccactgtcttgat

SEQ ID NO: 5751778 - DNA, 25 bp, Homo sapien
gtcctgcgagaggggaccatggcct

SEQ ID NO: 5751779 - DNA, 25 bp, Homo sapien
cgtggctgtcacgcaggcgccgact

SEQ ID NO: 5751780 - DNA, 25 bp, Homo sapien
aaacaccttgttgatgtcgtccacg

SEQ ID NO: 5751781 - DNA, 25 bp, Homo sapien
agggcgggcggccgggctggctggg

SEQ ID NO: 5751782 - DNA, 25 bp, Homo sapien
ggcagtggccgcgacttccccgagg

SEQ ID NO: 5751783 - DNA, 25 bp, Homo sapien
ggaagggcacgtggccctggcggga

SEQ ID NO: 5751784 - DNA, 25 bp, Homo sapien
tctgcacttggaactcagtcagccc

SEQ ID NO: 5751785 - DNA, 25 bp, Homo sapien
cctggaacacgtcctgctgcgaggc

SEQ ID NO: 5751786 - DNA, 25 bp, Homo sapien
ctcacttcctgggcctggctaatga

SEQ ID NO: 5751787 - DNA, 25 bp, Homo sapien
cgtacatggcaatctgcgcccggag

SEQ ID NO: 5751788 - DNA, 25 bp, Homo sapien
aagttcttaaataggatttcagagg

SEQ ID NO: 5751789 - DNA, 25 bp, Homo sapien
gtcaccgcagactggggtatctttt

SEQ ID NO: 5751790 - DNA, 25 bp, Homo sapien
gggctgtggcgtctgacaagccggc

SEQ ID NO: 5751791 - DNA, 25 bp, Homo sapien
agcccaggccccagctccacagagc

SEQ ID NO: 5751792 - DNA, 25 bp, Homo sapien
ctgttccatctccttcagcacctgc

SEQ ID NO: 5751793 - DNA, 25 bp, Homo sapien
agtcagccctggtacatacagctgc

SEQ ID NO: 5751794 - DNA, 25 bp, Homo sapien
gagctgcacttcgggcactggagtc

SEQ ID NO: 5751795 - DNA, 25 bp, Homo sapien
tagagcccgtgggggcttccggggc

SEQ ID NO: 5751796 - DNA, 25 bp, Homo sapien
ctccacagagcgcaccctctcagca

SEQ ID NO: 5751797 - DNA, 25 bp, Homo sapien
catctccacctgggctctggcaaag

SEQ ID NO: 5751798 - DNA, 25 bp, Homo sapien
cgagggctgcagcttcctccggatg

SEQ ID NO: 5751799 - DNA, 25 bp, Homo sapien
tgcaggtgctggttccgggcctggg

SEQ ID NO: 5751800 - DNA, 25 bp, Homo sapien
catctcctgcctcagtcgctcattc

SEQ ID NO: 5751801 - DNA, 25 bp, Homo sapien
ctcctgcaggtgctggttccgggcc

SEQ ID NO: 5751802 - DNA, 25 bp, Homo sapien
tggtgtgagctctgcagctgctgtt

SEQ ID NO: 5751803 - DNA, 25 bp, Homo sapien
tgagtcgcagctccacctcagccag

SEQ ID NO: 5751804 - DNA, 25 bp, Homo sapien
ttgctgttgacctcctcgatggcct

SEQ ID NO: 5751805 - DNA, 25 bp, Homo sapien
tgagcttctccttcaggtgttctac

SEQ ID NO: 5751806 - DNA, 25 bp, Homo sapien
caagctgaggagaggggccgagaaa

SEQ ID NO: 5751807 - DNA, 25 bp, Homo sapien
gctaagcttccaaaagttcttaaat

SEQ ID NO: 5751808 - DNA, 25 bp, Homo sapien
attggtgccaccaacccaccccagt

SEQ ID NO: 5751809 - DNA, 25 bp, Homo sapien
gtccaccaggttcagcttccccgtg

SEQ ID NO: 5751810 - DNA, 25 bp, Homo sapien
agctcggcctcacagcgccgcatct

SEQ ID NO: 5751811 - DNA, 25 bp, Homo sapien
ggagaggggccgagaaagcctgggt

SEQ ID NO: 5751812 - DNA, 25 bp, Homo sapien
gcaggtggatgatggagtcgtcgtc

SEQ ID NO: 5751813 - DNA, 25 bp, Homo sapien
tcgggcactggagtcctcgtcaccg

SEQ ID NO: 5751814 - DNA, 25 bp, Homo sapien
tggggagaagaccttgtccagctcg

SEQ ID NO: 5751815 - DNA, 25 bp, Homo sapien
agcccattgtagtcgttggtgaggg

SEQ ID NO: 5751816 - DNA, 25 bp, Homo sapien
catctgcccatgggcccgctccagc

SEQ ID NO: 5751817 - DNA, 25 bp, Homo sapien
agggactgcatctcctccagcatct

SEQ ID NO: 5751818 - DNA, 25 bp, Homo sapien
gtgccttctcagccaggcagtcctt

SEQ ID NO: 5751819 - DNA, 25 bp, Homo sapien
ggctaatgagcttctccttcaggtg

SEQ ID NO: 5751820 - DNA, 25 bp, Homo sapien
gtcctgctgcgaggcctgtggggag

SEQ ID NO: 5751821 - DNA, 25 bp, Homo sapien
acgcaggcgccgactgagccgctcc

SEQ ID NO: 5751822 - DNA, 25 bp, Homo sapien
ggctcccaggttccacgtcctgcga

SEQ ID NO: 5751823 - DNA, 25 bp, Homo sapien
ggaagagcagccacccccgcctttc

SEQ ID NO: 5751824 - DNA, 25 bp, Homo sapien
gcctggctaatgagcttctccttca

SEQ ID NO: 5751825 - DNA, 25 bp, Homo sapien
ccaggcagccggcctggcggaggca

SEQ ID NO: 5751826 - DNA, 25 bp, Homo sapien
cccgctggctgcctctgccagccat

SEQ ID NO: 5751827 - DNA, 25 bp, Homo sapien
cacctgcctctgcatagccacctgc

SEQ ID NO: 5751828 - DNA, 25 bp, Homo sapien
cttccccgagggctgcagcttcctc

SEQ ID NO: 5751829 - DNA, 25 bp, Homo sapien
aggggccgagaaagcctgggtgaga

SEQ ID NO: 5751830 - DNA, 25 bp, Homo sapien
ttgctgtcaccactaagcgaatcct

SEQ ID NO: 5751831 - DNA, 25 bp, Homo sapien
agcaatcactcggatgttccctttc

SEQ ID NO: 5751832 - DNA, 25 bp, Homo sapien
gtgcacagccttcatctccacctgg

SEQ ID NO: 5751833 - DNA, 25 bp, Homo sapien
gggtccgcagtgccggctgcaaggt

SEQ ID NO: 5751834 - DNA, 25 bp, Homo sapien
ctgggactcgctgagggcctgcttg

SEQ ID NO: 5751835 - DNA, 25 bp, Homo sapien
gttcttctccacgggggacacctgt

SEQ ID NO: 5751836 - DNA, 25 bp, Homo sapien
actggggtatcttttccacgcccag

SEQ ID NO: 5751837 - DNA, 25 bp, Homo sapien
cttgggtctgcccagaggctcctcg

SEQ ID NO: 5751838 - DNA, 25 bp, Homo sapien
cggtcggtcttctgctgcacctcta

SEQ ID NO: 5751839 - DNA, 25 bp, Homo sapien
cagggacaggccagtgagggcccag

SEQ ID NO: 5751840 - DNA, 25 bp, Homo sapien
ttccgggcctgggactcgctgaggg

SEQ ID NO: 5751841 - DNA, 25 bp, Homo sapien
gcctcccgcaggcggctgccctcgg

SEQ ID NO: 5751842 - DNA, 25 bp, Homo sapien
aacacagcacggccccgtggcggga

SEQ ID NO: 5751843 - DNA, 25 bp, Homo sapien
ccgcgcacctgccgcttgagcccat

SEQ ID NO: 5751844 - DNA, 25 bp, Homo sapien
gcccgcaggctggcaatggtctcgt

SEQ ID NO: 5751845 - DNA, 25 bp, Homo sapien
tgccattggtgccaccaacccaccc

SEQ ID NO: 5751846 - DNA, 25 bp, Homo sapien
gttctcagcggtcccctccatcgtg

SEQ ID NO: 5751847 - DNA, 25 bp, Homo sapien
cccgtctggccgtacgcaaagatgc

SEQ ID NO: 5751848 - DNA, 25 bp, Homo sapien
ggatccagggcggctactggtccca

SEQ ID NO: 5751849 - DNA, 25 bp, Homo sapien
cggacgcctgctagattctcgtgca

SEQ ID NO: 5751850 - DNA, 25 bp, Homo sapien
ccgagggctgtggcgtctgacaagc

SEQ ID NO: 5751851 - DNA, 25 bp, Homo sapien
tgaccagggcctgcacctcctggaa

SEQ ID NO: 5751852 - DNA, 25 bp, Homo sapien
ccaggcaggtgagcgagcagcagaa

SEQ ID NO: 5751853 - DNA, 25 bp, Homo sapien
gccttctcagccaggcagtccttga

SEQ ID NO: 5751854 - DNA, 25 bp, Homo sapien
gtgggggcttccggggccagcccag

SEQ ID NO: 5751855 - DNA, 25 bp, Homo sapien
gcgggaaccctccttgaaggagagg

SEQ ID NO: 5751856 - DNA, 25 bp, Homo sapien
aggcccaccctcctccacactcccg

SEQ ID NO: 5751857 - DNA, 25 bp, Homo sapien
gttcagctctgacagcatgcctttg

SEQ ID NO: 5751858 - DNA, 25 bp, Homo sapien
ccagcatctgcccatgggcccgctc

SEQ ID NO: 5751859 - DNA, 25 bp, Homo sapien
gccacctgctcctgcaggtgctggt

SEQ ID NO: 5751860 - DNA, 25 bp, Homo sapien
ggcttgcccttgtgcagcaggtgga

SEQ ID NO: 5751861 - DNA, 25 bp, Homo sapien
gttggtgagggtccgcagtgccggc

SEQ ID NO: 5751862 - DNA, 25 bp, Homo sapien
tttgaggggagacggggcagaagaa

SEQ ID NO: 5751863 - DNA, 25 bp, Homo sapien
agcatctgcccatgggcccgctcca

SEQ ID NO: 5751864 - DNA, 25 bp, Homo sapien
gaacacgtcctgctgcgaggcctgt

SEQ ID NO: 5751865 - DNA, 25 bp, Homo sapien
tcgtcaccgcagactggggtatctt

SEQ ID NO: 5751866 - DNA, 25 bp, Homo sapien
tgtgggaaagggcgggcggccgggc

SEQ ID NO: 5751867 - DNA, 25 bp, Homo sapien
cctccatcgtgtacgtcttgccggc

SEQ ID NO: 5751868 - DNA, 25 bp, Homo sapien
ggccctggcgggagcgcagggcagc

SEQ ID NO: 5751869 - DNA, 25 bp, Homo sapien
ttggtcttggacgactccacctcca

SEQ ID NO: 5751870 - DNA, 25 bp, Homo sapien
cccgacttgcccacgcgctccgagc

SEQ ID NO: 5751871 - DNA, 25 bp, Homo sapien
agagggaagaaaattcgagagacca

SEQ ID NO: 5751872 - DNA, 25 bp, Homo sapien
ttacgcagctgcagctcgcggcggt

SEQ ID NO: 5751873 - DNA, 25 bp, Homo sapien
cttgcccttgtgcagcaggtggatg

SEQ ID NO: 5751874 - DNA, 25 bp, Homo sapien
gggcctgggactcgctgagggcctg

SEQ ID NO: 5751875 - DNA, 25 bp, Homo sapien
ggttccacgtcctgcgagaggggac

SEQ ID NO: 5751876 - DNA, 25 bp, Homo sapien
tgctggttccgggcctgggactcgc

SEQ ID NO: 5751877 - DNA, 25 bp, Homo sapien
gcccagttcgctgatggcccaggcc

SEQ ID NO: 5751878 - DNA, 25 bp, Homo sapien
cacaggcagtggccgcgacttcccc

SEQ ID NO: 5751879 - DNA, 25 bp, Homo sapien
cccggagccgcgcggtcagctggtg

SEQ ID NO: 5751880 - DNA, 25 bp, Homo sapien
gagggcgtggctcccaggttccacg

SEQ ID NO: 5751881 - DNA, 25 bp, Homo sapien
gaggagaggggccgagaaagcctgg

SEQ ID NO: 5751882 - DNA, 25 bp, Homo sapien
gccgtacgcaaagatgcagacattg

SEQ ID NO: 5751883 - DNA, 25 bp, Homo sapien
ctgcgtagcccaggccccagctcca

SEQ ID NO: 5751884 - DNA, 25 bp, Homo sapien
tctcagcggtcccctccatcgtgta

SEQ ID NO: 5751885 - DNA, 25 bp, Homo sapien
gagcgagcagcagaatcccccaccc

SEQ ID NO: 5751886 - DNA, 25 bp, Homo sapien
cctggcggaggcaggatccaggcgt

SEQ ID NO: 5751887 - DNA, 25 bp, Homo sapien
agttgcggaagggcacgtggccctg

SEQ ID NO: 5751888 - DNA, 25 bp, Homo sapien
atgacgtcccccagagccgacagcg

SEQ ID NO: 5751889 - DNA, 25 bp, Homo sapien
acgccttctcctgcacctcggagaa

SEQ ID NO: 5751890 - DNA, 25 bp, Homo sapien
tcccagagctgggggctgagtgggc

SEQ ID NO: 5751891 - DNA, 25 bp, Homo sapien
gcagggacctgctggctttgtgcgc

SEQ ID NO: 5751892 - DNA, 25 bp, Homo sapien
ctcagcaaacttgagggaatagagc

SEQ ID NO: 5751893 - DNA, 25 bp, Homo sapien
ctttcagccgcacgagctcattgtg

SEQ ID NO: 5751894 - DNA, 25 bp, Homo sapien
ctgcagctcgcggcggtacttgcgc

SEQ ID NO: 5751895 - DNA, 25 bp, Homo sapien
caggttccacgtcctgcgagagggg

SEQ ID NO: 5751896 - DNA, 25 bp, Homo sapien
cctggggctcagcagcctcctcggg

SEQ ID NO: 5751897 - DNA, 25 bp, Homo sapien
agcccagtccacgctaagggctcgg

SEQ ID NO: 5751898 - DNA, 25 bp, Homo sapien
tcctgagggcctcctgcagcagcag

SEQ ID NO: 5751899 - DNA, 25 bp, Homo sapien
cagcctcctcggggcaccaggcagc

SEQ ID NO: 5751900 - DNA, 25 bp, Homo sapien
tggaactcagtcagccctggtacat

SEQ ID NO: 5751901 - DNA, 25 bp, Homo sapien
tcgtcggcatcgaaagtcacagcat

SEQ ID NO: 5751902 - DNA, 25 bp, Homo sapien
ccccatggttcttgggtctgcccag

SEQ ID NO: 5751903 - DNA, 25 bp, Homo sapien
tgcagctgctgttccatctccttca

SEQ ID NO: 5751904 - DNA, 25 bp, Homo sapien
gcgaggcctgtggggagaagacctt

SEQ ID NO: 5751905 - DNA, 25 bp, Homo sapien
agcgtctcgctagtgttcttctcca

SEQ ID NO: 5751906 - DNA, 25 bp, Homo sapien
agctgggacagcttgtcacggagct

SEQ ID NO: 5751907 - DNA, 25 bp, Homo sapien
ggcctggggctcagcagcctcctcg

SEQ ID NO: 5751908 - DNA, 25 bp, Homo sapien
atcactcggatgttccctttcagcc

SEQ ID NO: 5751909 - DNA, 25 bp, Homo sapien
ctgactcgtacatggcaatctgcgc

SEQ ID NO: 5751910 - DNA, 25 bp, Homo sapien
cgcatctcctgcctcagtcgctcat

SEQ ID NO: 5751911 - DNA, 25 bp, Homo sapien
tgagccgctcctcctcctgtgcctt

SEQ ID NO: 5751912 - DNA, 25 bp, Homo sapien
catctgggcacagccggatctccag

SEQ ID NO: 5751913 - DNA, 25 bp, Homo sapien
tcctgggcctggctaatgagcttct

SEQ ID NO: 5751914 - DNA, 25 bp, Homo sapien
aggtaggtgagcttggagttgcgga

SEQ ID NO: 5751915 - DNA, 25 bp, Homo sapien
agaagaagagcctccactctcgcct

SEQ ID NO: 5751916 - DNA, 25 bp, Homo sapien
gcagcaatgacgtcccccagagccg

SEQ ID NO: 5751917 - DNA, 25 bp, Homo sapien
cacgagcaatcactcggatgttccc

SEQ ID NO: 5751918 - DNA, 25 bp, Homo sapien
tggctttgtgcgcagctcttgcagc

SEQ ID NO: 5751919 - DNA, 25 bp, Homo sapien
ctctccacaggccccgcagcgaggg

SEQ ID NO: 5751920 - DNA, 25 bp, Homo sapien
gggcacgtggccctggcgggagcgc

SEQ ID NO: 5751921 - DNA, 25 bp, Homo sapien
tcttgatgacatacttgacaggtgg

SEQ ID NO: 5751922 - DNA, 25 bp, Homo sapien
tgtcacgcaggcgccgactgagccg

SEQ ID NO: 5751923 - DNA, 25 bp, Homo sapien
cctcgcaccgtcacgatgagcagcg

SEQ ID NO: 5751924 - DNA, 25 bp, Homo sapien
cccgctccagctctgactcgtacat

SEQ ID NO: 5751925 - DNA, 25 bp, Homo sapien
cctgtgctgcagtccacgcctcgca

SEQ ID NO: 5751926 - DNA, 25 bp, Homo sapien
ctgcgggaaccctccttgaaggaga

SEQ ID NO: 5751927 - DNA, 25 bp, Homo sapien
caagccggctcccactctagatgct

SEQ ID NO: 5751928 - DNA, 25 bp, Homo sapien
caggttcagcttccccgtggtgcgg

SEQ ID NO: 5751929 - DNA, 25 bp, Homo sapien
gaagccgcgcacctgccgcttgagc

SEQ ID NO: 5751930 - DNA, 25 bp, Homo sapien
caggcagtggccgcgacttccccga

SEQ ID NO: 5751931 - DNA, 25 bp, Homo sapien
ccagctccacagagcgcaccctctc

SEQ ID NO: 5751932 - DNA, 25 bp, Homo sapien
gtgagcgagcagcagaatcccccac

SEQ ID NO: 5751933 - DNA, 25 bp, Homo sapien
gtgatggtgtactcccagtcagacg

SEQ ID NO: 5751934 - DNA, 25 bp, Homo sapien
ccacgtcctgcgagaggggaccatg

SEQ ID NO: 5751935 - DNA, 25 bp, Homo sapien
aggctggcaatggtctcgtggctgt

SEQ ID NO: 5751936 - DNA, 25 bp, Homo sapien
gatggcccaggcctgccaggaagag

SEQ ID NO: 5751937 - DNA, 25 bp, Homo sapien
ctgcagctgggacagcttgtcacgg

SEQ ID NO: 5751938 - DNA, 25 bp, Homo sapien
actgagccgctcctcctcctgtgcc

SEQ ID NO: 5751939 - DNA, 25 bp, Homo sapien
cttcagcacctgcctctgcatagcc

SEQ ID NO: 5751940 - DNA, 25 bp, Homo sapien
gttctacctgcagggtcaggtagag

SEQ ID NO: 5751941 - DNA, 25 bp, Homo sapien
gaagaccttgtccagctcgaaggac

SEQ ID NO: 5751942 - DNA, 25 bp, Homo sapien
ttgatgacatacttgacaggtgggg

SEQ ID NO: 5751943 - DNA, 25 bp, Homo sapien
ggaggcaggatccaggcgtcgccgc

SEQ ID NO: 5751944 - DNA, 25 bp, Homo sapien
ggtgccccccagctcagatcgcagt

SEQ ID NO: 5751945 - DNA, 25 bp, Homo sapien
acctctaggttcagctctgacagca

SEQ ID NO: 5751946 - DNA, 25 bp, Homo sapien
ggcgggaggccatgcgcctccgcac

SEQ ID NO: 5751947 - DNA, 25 bp, Homo sapien
tgggtctgcccagaggctcctcgcc

SEQ ID NO: 5751948 - DNA, 25 bp, Homo sapien
cggtcagctggtgtgagctctgcag

SEQ ID NO: 5751949 - DNA, 25 bp, Homo sapien
tcagagccacagccgagagacaccg

SEQ ID NO: 5751950 - DNA, 25 bp, Homo sapien
ctgcagcttcctccggatggatcca

SEQ ID NO: 5751951 - DNA, 25 bp, Homo sapien
ggcctgtggggagaagaccttgtcc

SEQ ID NO: 5751952 - DNA, 25 bp, Homo sapien
gttcttgtcctcttccagggactgc

SEQ ID NO: 5751953 - DNA, 25 bp, Homo sapien
ccctggcgggagcgcagggcagcaa

SEQ ID NO: 5751954 - DNA, 25 bp, Homo sapien
cttcctccggatggatccagggcgg

SEQ ID NO: 5751955 - DNA, 25 bp, Homo sapien
ggacctcattgtagatctccgcagc

SEQ ID NO: 5751956 - DNA, 25 bp, Homo sapien
gccgcctcctcctcggccagcccgc

SEQ ID NO: 5751957 - DNA, 25 bp, Homo sapien
tggcctatctcggccttgacactcc

SEQ ID NO: 5751958 - DNA, 25 bp, Homo sapien
tcagccaggcagtccttgagtcgca

SEQ ID NO: 5751959 - DNA, 25 bp, Homo sapien
ctgacggtgatggtgtactcccagt

SEQ ID NO: 5751960 - DNA, 25 bp, Homo sapien
ccctggtacatacagctgcccactg

SEQ ID NO: 5751961 - DNA, 25 bp, Homo sapien
gccgggctggctggggctggggcgg

SEQ ID NO: 5751962 - DNA, 25 bp, Homo sapien
gcgagcgggagctgtgctcgttcag

SEQ ID NO: 5751963 - DNA, 25 bp, Homo sapien
ctgggcagggacctgctggctttgt

SEQ ID NO: 5751964 - DNA, 25 bp, Homo sapien
ctcggatgttccctttcagccgcac

SEQ ID NO: 5751965 - DNA, 25 bp, Homo sapien
caggacccaagctctgccctgcgta

SEQ ID NO: 5751966 - DNA, 25 bp, Homo sapien
gcatcgaaagtcacagcattggtgg

SEQ ID NO: 5751967 - DNA, 25 bp, Homo sapien
gttgttgctgttgacctcctcgatg

SEQ ID NO: 5751968 - DNA, 25 bp, Homo sapien
acgtcttgccggcgcccgtctggcc

SEQ ID NO: 5751969 - DNA, 25 bp, Homo sapien
ctcattgtggcacttcttacgcagc

SEQ ID NO: 5751970 - DNA, 25 bp, Homo sapien
cagcacggccccgtggcgggaggcc

SEQ ID NO: 5751971 - DNA, 25 bp, Homo sapien
ccgagagacaccgtttccttctgaa

SEQ ID NO: 5751972 - DNA, 25 bp, Homo sapien
gagggcctcctgcagcagcagtggg

SEQ ID NO: 5751973 - DNA, 25 bp, Homo sapien
gtggcacttcttacgcagctgcagc

SEQ ID NO: 5751974 - DNA, 25 bp, Homo sapien
tccggacgcctgctagattctcgtg

SEQ ID NO: 5751975 - DNA, 25 bp, Homo sapien
ctgaacatgtttctcatctttgagg

SEQ ID NO: 5751976 - DNA, 25 bp, Homo sapien
ttcaggttggtgaactcggtcgtgc

SEQ ID NO: 5751977 - DNA, 25 bp, Homo sapien
ctcattgtagatctccgcagcgctg

SEQ ID NO: 5751978 - DNA, 25 bp, Homo sapien
ggtcccagagctgggggctgagtgg

SEQ ID NO: 5751979 - DNA, 25 bp, Homo sapien
cccaggccccagctccacagagcgc

SEQ ID NO: 5751980 - DNA, 25 bp, Homo sapien
ttggacgactccacctccactgtct

SEQ ID NO: 5751981 - DNA, 25 bp, Homo sapien
agctgggggctgagtgggcccgtgc

SEQ ID NO: 5751982 - DNA, 25 bp, Homo sapien
gcctcagtcgctcattctccaccat

SEQ ID NO: 5751983 - DNA, 25 bp, Homo sapien
gatggtgtactcccagtcagacgcc

SEQ ID NO: 5751984 - DNA, 25 bp, Homo sapien
acgtcctgcgagaggggaccatggc

SEQ ID NO: 5751985 - DNA, 25 bp, Homo sapien
gaagccatcaatgcaagaggtgacc

SEQ ID NO: 5751986 - DNA, 25 bp, Homo sapien
gaacatgtttctcatctttgagggg

SEQ ID NO: 5751987 - DNA, 25 bp, Homo sapien
gccagccggtcggtcttctgctgca

SEQ ID NO: 5751988 - DNA, 25 bp, Homo sapien
gcagtcggctcacttcctgggcctg

SEQ ID NO: 5751989 - DNA, 25 bp, Homo sapien
aaataggatttcagagggaagaaaa

SEQ ID NO: 5751990 - DNA, 25 bp, Homo sapien
ctccacctcagccagccggtcggtc

SEQ ID NO: 5751991 - DNA, 25 bp, Homo sapien
ccgtcacacaggcagtggccgcgac

SEQ ID NO: 5751992 - DNA, 25 bp, Homo sapien
tcgcagtcggctcacttcctgggcc

SEQ ID NO: 5751993 - DNA, 25 bp, Homo sapien
tgaggggagacggggcagaagaaga

SEQ ID NO: 5751994 - DNA, 25 bp, Homo sapien
aggagaggggcggggagggctgcca

SEQ ID NO: 5751995 - DNA, 25 bp, Homo sapien
gtggatgatggagtcgtcgtcggca

SEQ ID NO: 5751996 - DNA, 25 bp, Homo sapien
tgccgagggctgtggcgtctgacaa

SEQ ID NO: 5751997 - DNA, 25 bp, Homo sapien
cccggttcttgtcctcttccaggga

SEQ ID NO: 5751998 - DNA, 25 bp, Homo sapien
gacttccccgagggctgcagcttcc

SEQ ID NO: 5751999 - DNA, 25 bp, Homo sapien
ttgacctcctcgatggcctggccta

SEQ ID NO: 5752000 - DNA, 25 bp, Homo sapien
tgctcctgcaggtgctggttccggg

SEQ ID NO: 5752001 - DNA, 25 bp, Homo sapien
catcctctttggtgactggccggac

SEQ ID NO: 5752002 - DNA, 25 bp, Homo sapien
accagggcctgcacctcctggaaca

SEQ ID NO: 5752003 - DNA, 25 bp, Homo sapien
tctgctgcacctctaggttcagctc

SEQ ID NO: 5752004 - DNA, 25 bp, Homo sapien
cgcctctacctccgggggtcctggc

SEQ ID NO: 5752005 - DNA, 25 bp, Homo sapien
tcgggctccggggcccggcccactc

SEQ ID NO: 5752006 - DNA, 25 bp, Homo sapien
tgctcacaacctgggcagggacctg

SEQ ID NO: 5752007 - DNA, 25 bp, Homo sapien
ctgatggcccaggcctgccaggaag

SEQ ID NO: 5752008 - DNA, 25 bp, Homo sapien
agcaggtcccggtgcttctccaagt

SEQ ID NO: 5752009 - DNA, 25 bp, Homo sapien
ctcaatggcccggttcttgtcctct

SEQ ID NO: 5752010 - DNA, 25 bp, Homo sapien
caggaagagcagccacccccgcctt

SEQ ID NO: 5752011 - DNA, 25 bp, Homo sapien
ctaggttcagctctgacagcatgcc

SEQ ID NO: 5752012 - DNA, 25 bp, Homo sapien
ccacctccactgtcttgatgacata

SEQ ID NO: 5752013 - DNA, 25 bp, Homo sapien
gatggagtcgtcgtcggcatcgaaa

SEQ ID NO: 5752014 - DNA, 25 bp, Homo sapien
tcagcaggtcccggtgcttctccaa

SEQ ID NO: 5752015 - DNA, 25 bp, Homo sapien
gagaccagcgagccaggcaggtgag

SEQ ID NO: 5752016 - DNA, 25 bp, Homo sapien
cgctgatggcccaggcctgccagga

SEQ ID NO: 5752017 - DNA, 25 bp, Homo sapien
aggccccgcagcgagggcgtggctc

SEQ ID NO: 5752018 - DNA, 25 bp, Homo sapien
caggtggggactgggcccgcaggct

SEQ ID NO: 5752019 - DNA, 25 bp, Homo sapien
acatgtttctcatctttgaggggag

SEQ ID NO: 5752020 - DNA, 25 bp, Homo sapien
ggcacttcttacgcagctgcagctc

SEQ ID NO: 5752021 - DNA, 25 bp, Homo sapien
tctacctgcagggtcaggtagagcc

SEQ ID NO: 5752022 - DNA, 25 bp, Homo sapien
acagcattggtggcctcaggtcctt

SEQ ID NO: 5752023 - DNA, 25 bp, Homo sapien
ctcgtacatggcaatctgcgcccgg

SEQ ID NO: 5752024 - DNA, 25 bp, Homo sapien
tccgccatctccagctgcagctggg

SEQ ID NO: 5752025 - DNA, 25 bp, Homo sapien
gggtatcttttccacgcccagttct

SEQ ID NO: 5752026 - DNA, 25 bp, Homo sapien
cgcacgagctcattgtggcacttct

SEQ ID NO: 5752027 - DNA, 25 bp, Homo sapien
ggtcagcaagttggtccggacgcct

SEQ ID NO: 5752028 - DNA, 25 bp, Homo sapien
tccccgagggctgcagcttcctccg

SEQ ID NO: 5752029 - DNA, 25 bp, Homo sapien
gacgtcccccagagccgacagcgac

SEQ ID NO: 5752030 - DNA, 25 bp, Homo sapien
ggcgggagcgcagggcagcaatgac

SEQ ID NO: 5752031 - DNA, 25 bp, Homo sapien
gtctcgtggctgtcacgcaggcgcc

SEQ ID NO: 5752032 - DNA, 25 bp, Homo sapien
cgtctggccgtacgcaaagatgcag

SEQ ID NO: 5752033 - DNA, 25 bp, Homo sapien
ctcctgcagcagcagtgggaagccg

SEQ ID NO: 5752034 - DNA, 25 bp, Homo sapien
ttccttctgaacatgtttctcatct

SEQ ID NO: 5752035 - DNA, 25 bp, Homo sapien
cacttcttacgcagctgcagctcgc

SEQ ID NO: 5752036 - DNA, 25 bp, Homo sapien
cccgcaggcggctgccctcggcccc

SEQ ID NO: 5752037 - DNA, 25 bp, Homo sapien
ataggatttcagagggaagaaaatt

SEQ ID NO: 5752038 - DNA, 25 bp, Homo sapien
cctggctgtgctcacaacctgggca

SEQ ID NO: 5752039 - DNA, 25 bp, Homo sapien
ttttaataagtaaaaatggctaagc

SEQ ID NO: 5752040 - DNA, 25 bp, Homo sapien
ggctcccactctagatgctcctggc

SEQ ID NO: 5752041 - DNA, 25 bp, Homo sapien
cccactctccacaggccccgcagcg

SEQ ID NO: 5752042 - DNA, 25 bp, Homo sapien
cctgcagcaggtaggtgagcttgga

SEQ ID NO: 5752043 - DNA, 25 bp, Homo sapien
caatttgcactcagagccacagccg

SEQ ID NO: 5752044 - DNA, 25 bp, Homo sapien
acgctaagggctcggcactgagcta

SEQ ID NO: 5752045 - DNA, 25 bp, Homo sapien
cgcagcgagggcgtggctcccaggt

SEQ ID NO: 5752046 - DNA, 25 bp, Homo sapien
ggtacttgcgcagcagctcctggtt

SEQ ID NO: 5752047 - DNA, 25 bp, Homo sapien
gggaccatggcctggggctcagcag

SEQ ID NO: 5752048 - DNA, 25 bp, Homo sapien
tctgcgcccggagccgcgcggtcag

SEQ ID NO: 5752049 - DNA, 25 bp, Homo sapien
agagcgcaccctctcagcaaacttg

SEQ ID NO: 5752050 - DNA, 25 bp, Homo sapien
tccagtttttcctgaggctctttcc

SEQ ID NO: 5752051 - DNA, 25 bp, Homo sapien
ctcggcactgagctagggctgggcg

SEQ ID NO: 5752052 - DNA, 25 bp, Homo sapien
ccgtggtgcggaggcctgtgctgca

SEQ ID NO: 5752053 - DNA, 25 bp, Homo sapien
gccgactgagccgctcctcctcctg

SEQ ID NO: 5752054 - DNA, 25 bp, Homo sapien
agccaggcagtccttgagtcgcagc

SEQ ID NO: 5752055 - DNA, 25 bp, Homo sapien
ctcacggggcccagttcgctgatgg

SEQ ID NO: 5752056 - DNA, 25 bp, Homo sapien
aggggagacggggcagaagaagagc

SEQ ID NO: 5752057 - DNA, 25 bp, Homo sapien
gagggctgtggcgtctgacaagccg

SEQ ID NO: 5752058 - DNA, 25 bp, Homo sapien
gggcagaagaagagcctccactctc

SEQ ID NO: 5752059 - DNA, 25 bp, Homo sapien
gggccgagaaagcctgggtgagagg

SEQ ID NO: 5752060 - DNA, 25 bp, Homo sapien
cttgccggcgcccgtctggccgtac

SEQ ID NO: 5752061 - DNA, 25 bp, Homo sapien
ctcattctccaccatcagcaggtcc

SEQ ID NO: 5752062 - DNA, 25 bp, Homo sapien
cgtacgcaaagatgcagacattgaa

SEQ ID NO: 5752063 - DNA, 25 bp, Homo sapien
acctcctggaacacgtcctgctgcg

SEQ ID NO: 5752064 - DNA, 25 bp, Homo sapien
cgcggcggtacttgcgcagcagctc

SEQ ID NO: 5752065 - DNA, 25 bp, Homo sapien
gcagccggcctggcggaggcaggat

SEQ ID NO: 5752066 - DNA, 25 bp, Homo sapien
aaagtcacagcattggtggcctcag

SEQ ID NO: 5752067 - DNA, 25 bp, Homo sapien
ggccagtgagggcccagcttcaggc

SEQ ID NO: 5752068 - DNA, 25 bp, Homo sapien
ccatggttcttgggtctgcccagag

SEQ ID NO: 5752069 - DNA, 25 bp, Homo sapien
agccgcgcacctgccgcttgagccc

SEQ ID NO: 5752070 - DNA, 25 bp, Homo sapien
tggtgtactcccagtcagacgcctt

SEQ ID NO: 5752071 - DNA, 25 bp, Homo sapien
tgcgcagctcttgcagctcggcctc

SEQ ID NO: 5752072 - DNA, 25 bp, Homo sapien
gacacctgtaccaccatgagggtct

SEQ ID NO: 5752073 - DNA, 25 bp, Homo sapien
ttttcctgaggctctttccctagca

SEQ ID NO: 5752074 - DNA, 25 bp, Homo sapien
ctggcttgaccaggacccaagctct

SEQ ID NO: 5752075 - DNA, 25 bp, Homo sapien
tggggtatcttttccacgcccagtt

SEQ ID NO: 5752076 - DNA, 25 bp, Homo sapien
cagccgcacgagctcattgtggcac

SEQ ID NO: 5752077 - DNA, 25 bp, Homo sapien
ccagctcagatcgcagtcggctcac

SEQ ID NO: 5752078 - DNA, 25 bp, Homo sapien
tgcgcagcagctcctggttgttgct

SEQ ID NO: 5752079 - DNA, 25 bp, Homo sapien
cgggagcgcagggcagcaatgacgt

SEQ ID NO: 5752080 - DNA, 25 bp, Homo sapien
ccacgcgctccgagccagccaagtc

SEQ ID NO: 5752081 - DNA, 25 bp, Homo sapien
atggcctggcctatctcggccttga

SEQ ID NO: 5752082 - DNA, 25 bp, Homo sapien
gcagaagaagagcctccactctcgc

SEQ ID NO: 5752083 - DNA, 25 bp, Homo sapien
ccgcagactggggtatcttttccac

SEQ ID NO: 5752084 - DNA, 25 bp, Homo sapien
ccaggcagtccttgagtcgcagctc

SEQ ID NO: 5752085 - DNA, 25 bp, Homo sapien
tgctgcacctctaggttcagctctg

SEQ ID NO: 5752086 - DNA, 25 bp, Homo sapien
tcacagcattggtggcctcaggtcc

SEQ ID NO: 5752087 - DNA, 25 bp, Homo sapien
tctcgtgcacagccttcatctccac

SEQ ID NO: 5752088 - DNA, 25 bp, Homo sapien
ggggcaccaggcagccggcctggcg

SEQ ID NO: 5752089 - DNA, 25 bp, Homo sapien
ttgcggaagggcacgtggccctggc

SEQ ID NO: 5752090 - DNA, 25 bp, Homo sapien
gggggctggccagctctgcaagctg

SEQ ID NO: 5752091 - DNA, 25 bp, Homo sapien
aggcagtccttgagtcgcagctcca

SEQ ID NO: 5752092 - DNA, 25 bp, Homo sapien
cctagcaggtccctgaggacctcat

SEQ ID NO: 5752093 - DNA, 25 bp, Homo sapien
acccaagctctgccctgcgtagccc

SEQ ID NO: 5752094 - DNA, 25 bp, Homo sapien
ttgtagtcgttggtgagggtccgca

SEQ ID NO: 5752095 - DNA, 25 bp, Homo sapien
cctcctgtgccttctcagccaggca

SEQ ID NO: 5752096 - DNA, 25 bp, Homo sapien
tcagctctgacagcatgcctttgct

SEQ ID NO: 5752097 - DNA, 25 bp, Homo sapien
ccacgctctgcacttggaactcagt

SEQ ID NO: 5752098 - DNA, 25 bp, Homo sapien
ccaagctctgccctgcgtagcccag

SEQ ID NO: 5752099 - DNA, 25 bp, Homo sapien
agaggggaccatggcctggggctca

SEQ ID NO: 5752100 - DNA, 25 bp, Homo sapien
ggccaaactcaaacaccttgttgat

SEQ ID NO: 5752101 - DNA, 25 bp, Homo sapien
ggcgtcgccgcagcgcccggggctc

SEQ ID NO: 5752102 - DNA, 25 bp, Homo sapien
catcgtgtacgtcttgccggcgccc

SEQ ID NO: 5752103 - DNA, 25 bp, Homo sapien
gtaggtgagcttggagttgcggaag

SEQ ID NO: 5752104 - DNA, 25 bp, Homo sapien
agcttctccttcaggtgttctacct

SEQ ID NO: 5752105 - DNA, 25 bp, Homo sapien
gggctgagtgggcccgtgccgaggg

SEQ ID NO: 5752106 - DNA, 25 bp, Homo sapien
ctcacaacctgggcagggacctgct

SEQ ID NO: 5752107 - DNA, 25 bp, Homo sapien
gcggaggcaggatccaggcgtcgcc

SEQ ID NO: 5752108 - DNA, 25 bp, Homo sapien
ggcaaaggcctcctcaatggcccgg

SEQ ID NO: 5752109 - DNA, 25 bp, Homo sapien
ttgaaggagaggggcggggagggct

SEQ ID NO: 5752110 - DNA, 25 bp, Homo sapien
ctgcagtccacgcctcgcaccgtca

SEQ ID NO: 5752111 - DNA, 25 bp, Homo sapien
tgcatctcctccagcatctgcccat

SEQ ID NO: 5752112 - DNA, 25 bp, Homo sapien
cgagctcattgtggcacttcttacg

SEQ ID NO: 5752113 - DNA, 25 bp, Homo sapien
tggagtcgtcgtcggcatcgaaagt

SEQ ID NO: 5752114 - DNA, 25 bp, Homo sapien
gggtcaggtagagcccgtgggggct

SEQ ID NO: 5752115 - DNA, 25 bp, Homo sapien
cagggcctgcacctcctggaacacg

SEQ ID NO: 5752116 - DNA, 25 bp, Homo sapien
ttctgaacatgtttctcatctttga

SEQ ID NO: 5752117 - DNA, 25 bp, Homo sapien
ctcatctttgaggggagacggggca

SEQ ID NO: 5752118 - DNA, 25 bp, Homo sapien
tgcccatgggcccgctccagctctg

SEQ ID NO: 5752119 - DNA, 25 bp, Homo sapien
gggacacctgtaccaccatgagggt

SEQ ID NO: 5752120 - DNA, 25 bp, Homo sapien
ccacaggccccgcagcgagggcgtg

SEQ ID NO: 5752121 - DNA, 25 bp, Homo sapien
ctctgactcgtacatggcaatctgc

SEQ ID NO: 5752122 - DNA, 25 bp, Homo sapien
gctgcacttcgggcactggagtcct

SEQ ID NO: 5752123 - DNA, 25 bp, Homo sapien
ctccgcagcgctgacggtgatggtg

SEQ ID NO: 5752124 - DNA, 25 bp, Homo sapien
cgagccaggcaggtgagcgagcagc

SEQ ID NO: 5752125 - DNA, 25 bp, Homo sapien
ttgcccacgcgctccgagccagcca

SEQ ID NO: 5752126 - DNA, 25 bp, Homo sapien
aaggcctcctcaatggcccggttct

SEQ ID NO: 5752127 - DNA, 25 bp, Homo sapien
tcctcgatggcctggcctatctcgg

SEQ ID NO: 5752128 - DNA, 25 bp, Homo sapien
gggctggccagctctgcaagctgag

SEQ ID NO: 5752129 - DNA, 25 bp, Homo sapien
gccgagaaagcctgggtgagaggcc

SEQ ID NO: 5752130 - DNA, 25 bp, Homo sapien
gcaatctgcgcccggagccgcgcgg

SEQ ID NO: 5752131 - DNA, 25 bp, Homo sapien
cactctagatgctcctggcttgacc

SEQ ID NO: 5752132 - DNA, 25 bp, Homo sapien
gtgttcttctccacgggggacacct

SEQ ID NO: 5752133 - DNA, 25 bp, Homo sapien
ccccagctccacagagcgcaccctc

SEQ ID NO: 5752134 - DNA, 25 bp, Homo sapien
gcagctcgcggcggtacttgcgcag

SEQ ID NO: 5752135 - DNA, 25 bp, Homo sapien
acgccgccgcctcctcctcggccag

SEQ ID NO: 5752136 - DNA, 25 bp, Homo sapien
tacttgcgcagcagctcctggttgt

SEQ ID NO: 5752137 - DNA, 25 bp, Homo sapien
cacttggaactcagtcagccctggt

SEQ ID NO: 5752138 - DNA, 25 bp, Homo sapien
agccatcaatgcaagaggtgaccag

SEQ ID NO: 5752139 - DNA, 25 bp, Homo sapien
atttgcactcagagccacagccgag

SEQ ID NO: 5752140 - DNA, 25 bp, Homo sapien
ctctggcaaaggcctcctcaatggc

SEQ ID NO: 5752141 - DNA, 25 bp, Homo sapien
agctgcagctcgcggcggtacttgc

SEQ ID NO: 5752142 - DNA, 25 bp, Homo sapien
ggaggccatgcgcctccgcacaccc

SEQ ID NO: 5752143 - DNA, 25 bp, Homo sapien
tgctgcgaggcctgtggggagaaga

SEQ ID NO: 5752144 - DNA, 25 bp, Homo sapien
ctcccactctagatgctcctggctt

SEQ ID NO: 5752145 - DNA, 25 bp, Homo sapien
ccaaaagttcttaaataggatttca

SEQ ID NO: 5752146 - DNA, 25 bp, Homo sapien
caatgacgtcccccagagccgacag

SEQ ID NO: 5752147 - DNA, 25 bp, Homo sapien
gcactgagctagggctgggcgagct

SEQ ID NO: 5752148 - DNA, 25 bp, Homo sapien
tccttcagcacctgcctctgcatag

SEQ ID NO: 5752149 - DNA, 25 bp, Homo sapien
catacagctgcccactgccatctgg

SEQ ID NO: 5752150 - DNA, 25 bp, Homo sapien
gcccgctggttgatacctgggttct

SEQ ID NO: 5752151 - DNA, 25 bp, Homo sapien
cagcgcgtgcgagcgggagctgtgc

SEQ ID NO: 5752152 - DNA, 25 bp, Homo sapien
agattctcgtgcacagccttcatct

SEQ ID NO: 5752153 - DNA, 25 bp, Homo sapien
gagagaccagcgagccaggcaggtg

SEQ ID NO: 5752154 - DNA, 25 bp, Homo sapien
catggcaatctgcgcccggagccgc

SEQ ID NO: 5752155 - DNA, 25 bp, Homo sapien
gcctcacagcgccgcatctcctgcc

SEQ ID NO: 5752156 - DNA, 25 bp, Homo sapien
tccaggcgtcgccgcagcgcccggg

SEQ ID NO: 5752157 - DNA, 25 bp, Homo sapien
tgctcgttcaggttggtgaactcgg

SEQ ID NO: 5752158 - DNA, 25 bp, Homo sapien
ggccccgtggcgggaggccatgcgc

SEQ ID NO: 5752159 - DNA, 25 bp, Homo sapien
agccggcctggcggaggcaggatcc

SEQ ID NO: 5752160 - DNA, 25 bp, Homo sapien
catctttgaggggagacggggcaga

SEQ ID NO: 5752161 - DNA, 25 bp, Homo sapien
cagggcccgctggttgatacctggg

SEQ ID NO: 5752162 - DNA, 25 bp, Homo sapien
gtacgtcttgccggcgcccgtctgg

SEQ ID NO: 5752163 - DNA, 25 bp, Homo sapien
atggatccagggcggctactggtcc

SEQ ID NO: 5752164 - DNA, 25 bp, Homo sapien
tgggcgctctcctggctgtgctcac

SEQ ID NO: 5752165 - DNA, 25 bp, Homo sapien
ctccacaggccccgcagcgagggcg

SEQ ID NO: 5752166 - DNA, 25 bp, Homo sapien
tgagcagcgcgtgcgagcgggagct

SEQ ID NO: 5752167 - DNA, 25 bp, Homo sapien
gccttctcctgcacctcggagaaga

SEQ ID NO: 5752168 - DNA, 25 bp, Homo sapien
ctctagatgctcctggcttgaccag

SEQ ID NO: 5752169 - DNA, 25 bp, Homo sapien
cttgagcccattgtagtcgttggtg

SEQ ID NO: 5752170 - DNA, 25 bp, Homo sapien
cttcttacgcagctgcagctcgcgg

SEQ ID NO: 5752171 - DNA, 25 bp, Homo sapien
accatgagggtcttgctgtcaccac

SEQ ID NO: 5752172 - DNA, 25 bp, Homo sapien
tctgccctgcgtagcccaggcccca

SEQ ID NO: 5752173 - DNA, 25 bp, Homo sapien
aggtgttctacctgcagggtcaggt

SEQ ID NO: 5752174 - DNA, 25 bp, Homo sapien
taagtaaaaatggctaagcttccaa

SEQ ID NO: 5752175 - DNA, 25 bp, Homo sapien
gtgagcttggagttgcggaagggca

SEQ ID NO: 5752176 - DNA, 25 bp, Homo sapien
tgtggggagaagaccttgtccagct

SEQ ID NO: 5752177 - DNA, 25 bp, Homo sapien
gggagacggggcagaagaagagcct

SEQ ID NO: 5752178 - DNA, 25 bp, Homo sapien
tctcgctagtgttcttctccacggg

SEQ ID NO: 5752179 - DNA, 25 bp, Homo sapien
ctctcctggctgtgctcacaacctg

SEQ ID NO: 5752180 - DNA, 25 bp, Homo sapien
ctcgtggctgtcacgcaggcgccga

SEQ ID NO: 5752181 - DNA, 25 bp, Homo sapien
cggtgatggtgtactcccagtcaga

SEQ ID NO: 5752182 - DNA, 25 bp, Homo sapien
ccaccatcagcaggtcccggtgctt

SEQ ID NO: 5752183 - DNA, 25 bp, Homo sapien
tccttgaaggagaggggcggggagg

SEQ ID NO: 5752184 - DNA, 25 bp, Homo sapien
tggtgccaccaacccaccccagtcc

SEQ ID NO: 5752185 - DNA, 25 bp, Homo sapien
gaggcctgtgctgcagtccacgcct

SEQ ID NO: 5752186 - DNA, 25 bp, Homo sapien
gtgagctctgcagctgctgttccat

SEQ ID NO: 5752187 - DNA, 25 bp, Homo sapien
cttctcagccaggcagtccttgagt

SEQ ID NO: 5752188 - DNA, 25 bp, Homo sapien
cggagccgcgcggtcagctggtgtg

SEQ ID NO: 5752189 - DNA, 25 bp, Homo sapien
accgtcacgatgagcagcgcgtgcg

SEQ ID NO: 5752190 - DNA, 25 bp, Homo sapien
ttgaagccatcaatgcaagaggtga

SEQ ID NO: 5752191 - DNA, 25 bp, Homo sapien
ccacgctaagggctcggcactgagc

SEQ ID NO: 5752192 - DNA, 25 bp, Homo sapien
gtggtgcggaggcctgtgctgcagt

SEQ ID NO: 5752193 - DNA, 25 bp, Homo sapien
ccaccatgagggtcttgctgtcacc

SEQ ID NO: 5752194 - DNA, 25 bp, Homo sapien
atgcctttgctttccgccatctcca

SEQ ID NO: 5752195 - DNA, 25 bp, Homo sapien
ttcttgggtctgcccagaggctcct

SEQ ID NO: 5752196 - DNA, 25 bp, Homo sapien
gtttttcctgaggctctttccctag

SEQ ID NO: 5752197 - DNA, 25 bp, Homo sapien
ctccggggcccggcccactctccac

SEQ ID NO: 5752198 - DNA, 25 bp, Homo sapien
ggggcggggcgagccatccccggct

SEQ ID NO: 5752199 - DNA, 25 bp, Homo sapien
caaaggcctcctcaatggcccggtt

SEQ ID NO: 5752200 - DNA, 25 bp, Homo sapien
ccagtgagggcccagcttcaggccc

SEQ ID NO: 5752201 - DNA, 25 bp, Homo sapien
gggctgccattggtgccaccaaccc

SEQ ID NO: 5752202 - DNA, 25 bp, Homo sapien
gggcgtggctcccaggttccacgtc

SEQ ID NO: 5752203 - DNA, 25 bp, Homo sapien
ccggcgcccgtctggccgtacgcaa

SEQ ID NO: 5752204 - DNA, 25 bp, Homo sapien
gagtcgtcgtcggcatcgaaagtca

SEQ ID NO: 5752205 - DNA, 25 bp, Homo sapien
tggccggacacgagcaatcactcgg

SEQ ID NO: 5752206 - DNA, 25 bp, Homo sapien
acttgcccacgcgctccgagccagc

SEQ ID NO: 5752207 - DNA, 25 bp, Homo sapien
gcacctcggagaagagcagctgcag

SEQ ID NO: 5752208 - DNA, 25 bp, Homo sapien
tcagcacctgcctctgcatagccac

SEQ ID NO: 5752209 - DNA, 25 bp, Homo sapien
catgcaatttgcactcagagccaca

SEQ ID NO: 5752210 - DNA, 25 bp, Homo sapien
gggactcgctgagggcctgcttggt

SEQ ID NO: 5752211 - DNA, 25 bp, Homo sapien
ccactgtcttgatgacatacttgac

SEQ ID NO: 5752212 - DNA, 25 bp, Homo sapien
ttccggggccagcccagtccacgct

SEQ ID NO: 5752213 - DNA, 25 bp, Homo sapien
ctagatgctcctggcttgaccagga

SEQ ID NO: 5752214 - DNA, 25 bp, Homo sapien
ctctcagcaaacttgagggaataga

SEQ ID NO: 5752215 - DNA, 25 bp, Homo sapien
atacctgggttctcagcggtcccct

SEQ ID NO: 5752216 - DNA, 25 bp, Homo sapien
ctgagggcctcctgcagcagcagtg

SEQ ID NO: 5752217 - DNA, 25 bp, Homo sapien
tcagcggtcccctccatcgtgtacg

SEQ ID NO: 5752218 - DNA, 25 bp, Homo sapien
gcccaggcctgccaggaagagcagc

SEQ ID NO: 5752219 - DNA, 25 bp, Homo sapien
cagctgcagggcccgctggttgata

SEQ ID NO: 5752220 - DNA, 25 bp, Homo sapien
actgagctagggctgggcgagctgc

SEQ ID NO: 5752221 - DNA, 25 bp, Homo sapien
agggtcttgctgtcaccactaagcg

SEQ ID NO: 5752222 - DNA, 25 bp, Homo sapien
tggttgatacctgggttctcagcgg

SEQ ID NO: 5752223 - DNA, 25 bp, Homo sapien
tgcccagaggctcctcgcccacccc

SEQ ID NO: 5752224 - DNA, 25 bp, Homo sapien
acctcagccagccggtcggtcttct

SEQ ID NO: 5752225 - DNA, 25 bp, Homo sapien
acaccttgttgatgtcgtccacgct

SEQ ID NO: 5752226 - DNA, 25 bp, Homo sapien
ttccctttcagccgcacgagctcat

SEQ ID NO: 5752227 - DNA, 25 bp, Homo sapien
cagccataaacacagcacggccccg

SEQ ID NO: 5752228 - DNA, 25 bp, Homo sapien
ctcccaggttccacgtcctgcgaga

SEQ ID NO: 5752229 - DNA, 25 bp, Homo sapien
tgctgttccatctccttcagcacct

SEQ ID NO: 5752230 - DNA, 25 bp, Homo sapien
cctctgcatagccacctgctcctgc

SEQ ID NO: 5752231 - DNA, 25 bp, Homo sapien
gactccacctccactgtcttgatga

SEQ ID NO: 5752232 - DNA, 25 bp, Homo sapien
agtcgttggtgagggtccgcagtgc

SEQ ID NO: 5752233 - DNA, 25 bp, Homo sapien
ctgctggctttgtgcgcagctcttg

SEQ ID NO: 5752234 - DNA, 25 bp, Homo sapien
atgatggagtcgtcgtcggcatcga

SEQ ID NO: 5752235 - DNA, 25 bp, Homo sapien
tgagggcccagcttcaggcccagcg

SEQ ID NO: 5752236 - DNA, 25 bp, Homo sapien
gctggttgatacctgggttctcagc

SEQ ID NO: 5752237 - DNA, 25 bp, Homo sapien
gcctgggactcgctgagggcctgct

SEQ ID NO: 5752238 - DNA, 25 bp, Homo sapien
gagcccgtgggggcttccggggcca

SEQ ID NO: 5752239 - DNA, 25 bp, Homo sapien
tctccacctgggctctggcaaaggc

SEQ ID NO: 5752240 - DNA, 25 bp, Homo sapien
cgtgccgagggctgtggcgtctgac

SEQ ID NO: 5752241 - DNA, 25 bp, Homo sapien
cattgtggcacttcttacgcagctg

SEQ ID NO: 5752242 - DNA, 25 bp, Homo sapien
cggatctccagtttttcctgaggct

SEQ ID NO: 5752243 - DNA, 25 bp, Homo sapien
ggcctcctcaatggcccggttcttg

SEQ ID NO: 5752244 - DNA, 25 bp, Homo sapien
tgttgctgttgacctcctcgatggc

SEQ ID NO: 5752245 - DNA, 25 bp, Homo sapien
gcaggtgagcgagcagcagaatccc

SEQ ID NO: 5752246 - DNA, 25 bp, Homo sapien
tgtcaccactaagcgaatcctgcag

SEQ ID NO: 5752247 - DNA, 25 bp, Homo sapien
gccggtgtgtgggaaagggcgggcg

SEQ ID NO: 5752248 - DNA, 25 bp, Homo sapien
tccaagtcggtgccccccagctcag

SEQ ID NO: 5752249 - DNA, 25 bp, Homo sapien
gctgtgctcgttcaggttggtgaac

SEQ ID NO: 5752250 - DNA, 25 bp, Homo sapien
gggagaagaccttgtccagctcgaa

SEQ ID NO: 5752251 - DNA, 25 bp, Homo sapien
accaggacccaagctctgccctgcg

SEQ ID NO: 5752252 - DNA, 25 bp, Homo sapien
tacatggcaatctgcgcccggagcc

SEQ ID NO: 5752253 - DNA, 25 bp, Homo sapien
cggcggtacttgcgcagcagctcct

SEQ ID NO: 5752254 - DNA, 25 bp, Homo sapien
actcccagtcagacgccttctcctg

SEQ ID NO: 5752255 - DNA, 25 bp, Homo sapien
tcagacgccttctcctgcacctcgg

SEQ ID NO: 5752256 - DNA, 25 bp, Homo sapien
ggttggtgaactcggtcgtgcgatt

SEQ ID NO: 5752257 - DNA, 25 bp, Homo sapien
gatttcagagggaagaaaattcgag

SEQ ID NO: 5752258 - DNA, 25 bp, Homo sapien
acgctctgcacttggaactcagtca

SEQ ID NO: 5752259 - DNA, 25 bp, Homo sapien
gctgtggcgtctgacaagccggctc

SEQ ID NO: 5752260 - DNA, 25 bp, Homo sapien
accttgttgatgtcgtccacgctct

SEQ ID NO: 5752261 - DNA, 25 bp, Homo sapien
tttcagagggaagaaaattcgagag

SEQ ID NO: 5752262 - DNA, 25 bp, Homo sapien
atagagcgtctcgctagtgttcttc

SEQ ID NO: 5752263 - DNA, 25 bp, Homo sapien
cccatgggcccgctccagctctgac

SEQ ID NO: 5752264 - DNA, 25 bp, Homo sapien
ccagcccagtccacgctaagggctc

SEQ ID NO: 5752265 - DNA, 25 bp, Homo sapien
cctgctagattctcgtgcacagcct

SEQ ID NO: 5752266 - DNA, 25 bp, Homo sapien
gcaggctggcaatggtctcgtggct

SEQ ID NO: 5752267 - DNA, 25 bp, Homo sapien
ttggtgactggccggacacgagcaa

SEQ ID NO: 5752268 - DNA, 25 bp, Homo sapien
gggagctgtgctcgttcaggttggt

SEQ ID NO: 5752269 - DNA, 25 bp, Homo sapien
ggatggatccagggcggctactggt

SEQ ID NO: 5752270 - DNA, 25 bp, Homo sapien
cgctgcagcagggacaggccagtga

SEQ ID NO: 5752271 - DNA, 25 bp, Homo sapien
ctctcgcctctacctccgggggtcc

SEQ ID NO: 5752272 - DNA, 25 bp, Homo sapien
cccagtccacgctaagggctcggca

SEQ ID NO: 5752273 - DNA, 25 bp, Homo sapien
cagcatgcctttgctttccgccatc

SEQ ID NO: 5752274 - DNA, 25 bp, Homo sapien
ggggcggggagggctgccattggtg

SEQ ID NO: 5752275 - DNA, 25 bp, Homo sapien
catctccttcagcacctgcctctgc

SEQ ID NO: 5752276 - DNA, 25 bp, Homo sapien
gctctgccctgcgtagcccaggccc

SEQ ID NO: 5752277 - DNA, 25 bp, Homo sapien
ccacctcagccagccggtcggtctt

SEQ ID NO: 5752278 - DNA, 25 bp, Homo sapien
aaagcctgggtgagaggcccaccct

SEQ ID NO: 5752279 - DNA, 25 bp, Homo sapien
tattttaataagtaaaaatggctaa

SEQ ID NO: 5752280 - DNA, 25 bp, Homo sapien
gacctcctcgatggcctggcctatc

SEQ ID NO: 5752281 - DNA, 25 bp, Homo sapien
ggctcggcactgagctagggctggg

SEQ ID NO: 5752282 - DNA, 25 bp, Homo sapien
tgcgagaggggaccatggcctgggg

SEQ ID NO: 5752283 - DNA, 25 bp, Homo sapien
ggacctgctggctttgtgcgcagct

SEQ ID NO: 5752284 - DNA, 25 bp, Homo sapien
gcctgccaggaagagcagccacccc

SEQ ID NO: 5752285 - DNA, 25 bp, Homo sapien
gccagccataaacacagcacggccc

SEQ ID NO: 5752286 - DNA, 25 bp, Homo sapien
tgcttctccaagtcggtgcccccca

SEQ ID NO: 5752287 - DNA, 25 bp, Homo sapien
ggtgctggttccgggcctgggactc

SEQ ID NO: 5752288 - DNA, 25 bp, Homo sapien
cggccttgacactcctgagggcctc

SEQ ID NO: 5752289 - DNA, 25 bp, Homo sapien
gccatctgggcacagccggatctcc

SEQ ID NO: 5752290 - DNA, 25 bp, Homo sapien
tcttgcagctcggcctcacagcgcc

SEQ ID NO: 5752291 - DNA, 25 bp, Homo sapien
ttgacaggtggggactgggcccgca

SEQ ID NO: 5752292 - DNA, 25 bp, Homo sapien
ggtcccggtgcttctccaagtcggt

SEQ ID NO: 5752293 - DNA, 25 bp, Homo sapien
cacctgctcctgcaggtgctggttc

SEQ ID NO: 5752294 - DNA, 25 bp, Homo sapien
cagccggatctccagtttttcctga

SEQ ID NO: 5752295 - DNA, 25 bp, Homo sapien
tcccgccctcctcacggggcccagt

SEQ ID NO: 5752296 - DNA, 25 bp, Homo sapien
ccgcagtgccggctgcaaggtcagc

SEQ ID NO: 5752297 - DNA, 25 bp, Homo sapien
tcctcctcctgtgccttctcagcca

SEQ ID NO: 5752298 - DNA, 25 bp, Homo sapien
aggtccctgaggacctcattgtaga

SEQ ID NO: 5752299 - DNA, 25 bp, Homo sapien
cacaccccccagctgcgggaaccct

SEQ ID NO: 5752300 - DNA, 25 bp, Homo sapien
gtccctgaggacctcattgtagatc

SEQ ID NO: 5752301 - DNA, 25 bp, Homo sapien
gggcccgctggttgatacctgggtt

SEQ ID NO: 5752302 - DNA, 25 bp, Homo sapien
tgctgcagtccacgcctcgcaccgt

SEQ ID NO: 5752303 - DNA, 25 bp, Homo sapien
tagccacctgctcctgcaggtgctg

SEQ ID NO: 5752304 - DNA, 25 bp, Homo sapien
agttcgctgatggcccaggcctgcc

SEQ ID NO: 5752305 - DNA, 25 bp, Homo sapien
acgcagctgcagctcgcggcggtac

SEQ ID NO: 5752306 - DNA, 25 bp, Homo sapien
ccaccaggttcagcttccccgtggt

SEQ ID NO: 5752307 - DNA, 25 bp, Homo sapien
ggcagctccacgccgccgcctcctc

SEQ ID NO: 5752308 - DNA, 25 bp, Homo sapien
cagtttttcctgaggctctttccct

SEQ ID NO: 5752309 - DNA, 25 bp, Homo sapien
cagggtcaggtagagcccgtggggg

SEQ ID NO: 5752310 - DNA, 25 bp, Homo sapien
agtccttgagtcgcagctccacctc

SEQ ID NO: 5752311 - DNA, 25 bp, Homo sapien
aggtgagcgagcagcagaatccccc

SEQ ID NO: 5752312 - DNA, 25 bp, Homo sapien
ggttcagcttccccgtggtgcggag

SEQ ID NO: 5752313 - DNA, 25 bp, Homo sapien
ctcggcctcacagcgccgcatctcc

SEQ ID NO: 5752314 - DNA, 25 bp, Homo sapien
ccggctcccactctagatgctcctg

SEQ ID NO: 5752315 - DNA, 25 bp, Homo sapien
tccagctcgaaggacacaggcttgc

SEQ ID NO: 5752316 - DNA, 25 bp, Homo sapien
actcagagccacagccgagagacac

SEQ ID NO: 5752317 - DNA, 25 bp, Homo sapien
gccgcttgagcccattgtagtcgtt

SEQ ID NO: 5752318 - DNA, 25 bp, Homo sapien
ccacgggggacacctgtaccaccat

SEQ ID NO: 5752319 - DNA, 25 bp, Homo sapien
cctctacctccgggggtcctggcgc

SEQ ID NO: 5752320 - DNA, 25 bp, Homo sapien
gtggccctggcgggagcgcagggca

SEQ ID NO: 5752321 - DNA, 25 bp, Homo sapien
actcaaacaccttgttgatgtcgtc

SEQ ID NO: 5752322 - DNA, 25 bp, Homo sapien
agtccacgcctcgcaccgtcacgat

SEQ ID NO: 5752323 - DNA, 25 bp, Homo sapien
gagaggggcggggagggctgccatt

SEQ ID NO: 5752324 - DNA, 25 bp, Homo sapien
tggcaatggtctcgtggctgtcacg

SEQ ID NO: 5752325 - DNA, 25 bp, Homo sapien
ccggatggatccagggcggctactg

SEQ ID NO: 5752326 - DNA, 25 bp, Homo sapien
gggcttccggggccagcccagtcca

SEQ ID NO: 5752327 - DNA, 25 bp, Homo sapien
gcacgtggccctggcgggagcgcag

SEQ ID NO: 5752328 - DNA, 25 bp, Homo sapien
gtcctcttccagggactgcatctcc

SEQ ID NO: 5752329 - DNA, 25 bp, Homo sapien
actgcatctcctccagcatctgccc

SEQ ID NO: 5752330 - DNA, 25 bp, Homo sapien
tgtaccaccatgagggtcttgctgt

SEQ ID NO: 5752331 - DNA, 25 bp, Homo sapien
gcagtccacgcctcgcaccgtcacg

SEQ ID NO: 5752332 - DNA, 25 bp, Homo sapien
cagcgagggcgtggctcccaggttc

SEQ ID NO: 5752333 - DNA, 25 bp, Homo sapien
cgcagcgcccggggctcggcccggc

SEQ ID NO: 5752334 - DNA, 25 bp, Homo sapien
gcatgcctttgctttccgccatctc

SEQ ID NO: 5752335 - DNA, 25 bp, Homo sapien
tctgggcacagccggatctccagtt

SEQ ID NO: 5752336 - DNA, 25 bp, Homo sapien
attctcgtgcacagccttcatctcc

SEQ ID NO: 5752337 - DNA, 25 bp, Homo sapien
cgagccagccaagtccaccaggttc

SEQ ID NO: 5752338 - DNA, 25 bp, Homo sapien
gcttggtcttggacgactccacctc

SEQ ID NO: 5752339 - DNA, 25 bp, Homo sapien
cagctgcccactgccatctgggcac

SEQ ID NO: 5752340 - DNA, 25 bp, Homo sapien
tccatcgtgtacgtcttgccggcgc

SEQ ID NO: 5752341 - DNA, 25 bp, Homo sapien
tcctccagcatctgcccatgggccc

SEQ ID NO: 5752342 - DNA, 25 bp, Homo sapien
tgttgacctcctcgatggcctggcc

SEQ ID NO: 5752343 - DNA, 25 bp, Homo sapien
tggttgttgctgttgacctcctcga

SEQ ID NO: 5752344 - DNA, 25 bp, Homo sapien
gacggtgatggtgtactcccagtca

SEQ ID NO: 5752345 - DNA, 25 bp, Homo sapien
tcctgcacctcggagaagagcagct

SEQ ID NO: 5752346 - DNA, 25 bp, Homo sapien
aggctctttccctagcaggtccctg

SEQ ID NO: 5752347 - DNA, 25 bp, Homo sapien
cggctactggtcccagagctggggg

SEQ ID NO: 5752348 - DNA, 25 bp, Homo sapien
tgtgcgcagctcttgcagctcggcc

SEQ ID NO: 5752349 - DNA, 25 bp, Homo sapien
ccgcaggctggcaatggtctcgtgg

SEQ ID NO: 5752350 - DNA, 25 bp, Homo sapien
ggtctgcccagaggctcctcgccca

SEQ ID NO: 5752351 - DNA, 25 bp, Homo sapien
tgttgatgtgctgcgcctcccgcag

SEQ ID NO: 5752352 - DNA, 25 bp, Homo sapien
ctcacagcgccgcatctcctgcctc

SEQ ID NO: 5752353 - DNA, 25 bp, Homo sapien
gcacctcctggaacacgtcctgctg

SEQ ID NO: 5752354 - DNA, 25 bp, Homo sapien
gctcctcctcctgtgccttctcagc

SEQ ID NO: 5752355 - DNA, 25 bp, Homo sapien
ggagcgcagggcagcaatgacgtcc

SEQ ID NO: 5752356 - DNA, 25 bp, Homo sapien
aataagtaaaaatggctaagcttcc

SEQ ID NO: 5752357 - DNA, 25 bp, Homo sapien
caggttggtgaactcggtcgtgcga

SEQ ID NO: 5752358 - DNA, 25 bp, Homo sapien
cctgtaccaccatgagggtcttgct

SEQ ID NO: 5752359 - DNA, 25 bp, Homo sapien
ccggctgcaaggtcagcaagttggt

SEQ ID NO: 5752360 - DNA, 25 bp, Homo sapien
tggggactgggcccgcaggctggca

SEQ ID NO: 5752361 - DNA, 25 bp, Homo sapien
ttctcaacctccccgggccggtgtg

SEQ ID NO: 5752362 - DNA, 25 bp, Homo sapien
agccctggtacatacagctgcccac

SEQ ID NO: 5752363 - DNA, 25 bp, Homo sapien
acctgccgcttgagcccattgtagt

SEQ ID NO: 5752364 - DNA, 25 bp, Homo sapien
aactcggtcgtgcgattagtgtggc

SEQ ID NO: 5752365 - DNA, 25 bp, Homo sapien
gacgcctgctagattctcgtgcaca

SEQ ID NO: 5752366 - DNA, 25 bp, Homo sapien
acgggggacacctgtaccaccatga

SEQ ID NO: 5752367 - DNA, 25 bp, Homo sapien
gcttccctgtgccgcccgggggcgc

SEQ ID NO: 5752368 - DNA, 25 bp, Homo sapien
gctgcgagccccctcgcattcgcgg

SEQ ID NO: 5752369 - DNA, 25 bp, Homo sapien
agcgacctcctgctggctgtggctt

SEQ ID NO: 5752370 - DNA, 25 bp, Homo sapien
gcatcgctggcccagtgcgcgggtc

SEQ ID NO: 5752371 - DNA, 25 bp, Homo sapien
aaccaaggcgggctgccaggggctg

SEQ ID NO: 5752372 - DNA, 25 bp, Homo sapien
ctgcaggcacgagtgtggcagacgc

SEQ ID NO: 5752373 - DNA, 25 bp, Homo sapien
tgacctgcctctcacacacatagat

SEQ ID NO: 5752374 - DNA, 25 bp, Homo sapien
ggcaaatgacatgcactgacccttc

SEQ ID NO: 5752375 - DNA, 25 bp, Homo sapien
gaaaaggtagcttacctgacacaag

SEQ ID NO: 5752376 - DNA, 25 bp, Homo sapien
cggagccgggacacgagaattggag

SEQ ID NO: 5752377 - DNA, 25 bp, Homo sapien
cggactactcatggtgccctacccc

SEQ ID NO: 5752378 - DNA, 25 bp, Homo sapien
cgcattcgcggagccgggacacgag

SEQ ID NO: 5752379 - DNA, 25 bp, Homo sapien
gggactgagccgccgcctgaggact

SEQ ID NO: 5752380 - DNA, 25 bp, Homo sapien
cagtgcgtgcatcgctggcccagtg

SEQ ID NO: 5752381 - DNA, 25 bp, Homo sapien
tgattgttttagagactatggagcc

SEQ ID NO: 5752382 - DNA, 25 bp, Homo sapien
gggtcgagctgagtaaggcggcggg

SEQ ID NO: 5752383 - DNA, 25 bp, Homo sapien
ttgcttcgctgtccaggcttagcta

SEQ ID NO: 5752384 - DNA, 25 bp, Homo sapien
tgtttggcttcctcctgaaaaaaaa

SEQ ID NO: 5752385 - DNA, 25 bp, Homo sapien
caggaaaccaacacccaaagcatgg

SEQ ID NO: 5752386 - DNA, 25 bp, Homo sapien
tccattgcttcgctgtccaggctta

SEQ ID NO: 5752387 - DNA, 25 bp, Homo sapien
ggctgtggcttgcatgcccttcacc

SEQ ID NO: 5752388 - DNA, 25 bp, Homo sapien
tggctgctacgtgcaacttccacgt

SEQ ID NO: 5752389 - DNA, 25 bp, Homo sapien
atgagcgttggaggaaatatgctca

SEQ ID NO: 5752390 - DNA, 25 bp, Homo sapien
gctcttgttcttcatcccgggtgtg

SEQ ID NO: 5752391 - DNA, 25 bp, Homo sapien
cgggccgggggcttccctgtgccgc

SEQ ID NO: 5752392 - DNA, 25 bp, Homo sapien
cccgggggcgcctctcctcaacagc

SEQ ID NO: 5752393 - DNA, 25 bp, Homo sapien
gccaggggctgttcaccagaacggg

SEQ ID NO: 5752394 - DNA, 25 bp, Homo sapien
cccgtgtacactgtcgtgcaaccag

SEQ ID NO: 5752395 - DNA, 25 bp, Homo sapien
gtccgtactgctgcttctgctcttg

SEQ ID NO: 5752396 - DNA, 25 bp, Homo sapien
atgggggtgtctgtgagtgtgtcta

SEQ ID NO: 5752397 - DNA, 25 bp, Homo sapien
tgacatgcactgacccttccagaca

SEQ ID NO: 5752398 - DNA, 25 bp, Homo sapien
cctggtctactgcttcatgcaccgt

SEQ ID NO: 5752399 - DNA, 25 bp, Homo sapien
gttctgcactgaaaaggttcttcat

SEQ ID NO: 5752400 - DNA, 25 bp, Homo sapien
gtgcacaccgagcactctcgggtgc

SEQ ID NO: 5752401 - DNA, 25 bp, Homo sapien
ctgttctgcactgaaaaggttcttc

SEQ ID NO: 5752402 - DNA, 25 bp, Homo sapien
cctctcctcaacagcagcagtgtgg

SEQ ID NO: 5752403 - DNA, 25 bp, Homo sapien
taagcctcgtggccatcgcactgga

SEQ ID NO: 5752404 - DNA, 25 bp, Homo sapien
actggcgcggttggcgaagacagcg

SEQ ID NO: 5752405 - DNA, 25 bp, Homo sapien
ctactgcttcatgcaccgtcgcttt

SEQ ID NO: 5752406 - DNA, 25 bp, Homo sapien
gcctaatctcatacctctgaccaac

SEQ ID NO: 5752407 - DNA, 25 bp, Homo sapien
tgagactggcgcggttggcgaagac

SEQ ID NO: 5752408 - DNA, 25 bp, Homo sapien
ccatcgcactggagcggtacagcgc

SEQ ID NO: 5752409 - DNA, 25 bp, Homo sapien
ctcgcattcgcggagccgggacacg

SEQ ID NO: 5752410 - DNA, 25 bp, Homo sapien
ctctcgggtgctcctatctccttca

SEQ ID NO: 5752411 - DNA, 25 bp, Homo sapien
tctgcactgaaaaggttcttcatcc

SEQ ID NO: 5752412 - DNA, 25 bp, Homo sapien
cctggaaacttgcgctcgctgctgc

SEQ ID NO: 5752413 - DNA, 25 bp, Homo sapien
ggctcggcgggggccatggagctgc

SEQ ID NO: 5752414 - DNA, 25 bp, Homo sapien
ggtgcgaatgttgctggtgatcgtt

SEQ ID NO: 5752415 - DNA, 25 bp, Homo sapien
gcggtgggagcccgccgggtcgagc

SEQ ID NO: 5752416 - DNA, 25 bp, Homo sapien
tcgcgtgattgtagccacgtggctg

SEQ ID NO: 5752417 - DNA, 25 bp, Homo sapien
tcgtggtcctgggactgagccgccg

SEQ ID NO: 5752418 - DNA, 25 bp, Homo sapien
ctcgctgctgcccccggcctccacg

SEQ ID NO: 5752419 - DNA, 25 bp, Homo sapien
ggctcccggcccacccaggccaagc

SEQ ID NO: 5752420 - DNA, 25 bp, Homo sapien
ctgaaaataccatcaggcctaatct

SEQ ID NO: 5752421 - DNA, 25 bp, Homo sapien
tacatgggaaaggaggcatgcctct

SEQ ID NO: 5752422 - DNA, 25 bp, Homo sapien
gcacattcatctttggcaccgtcat

SEQ ID NO: 5752423 - DNA, 25 bp, Homo sapien
tcctcctctcactggcagtcagcga

SEQ ID NO: 5752424 - DNA, 25 bp, Homo sapien
ttccctgtgccgcccgggggcgcct

SEQ ID NO: 5752425 - DNA, 25 bp, Homo sapien
gtacagcgccatctgccgaccactg

SEQ ID NO: 5752426 - DNA, 25 bp, Homo sapien
cctgatgagcgttggaggaaatatg

SEQ ID NO: 5752427 - DNA, 25 bp, Homo sapien
ggaataagaatggagcagtacatgg

SEQ ID NO: 5752428 - DNA, 25 bp, Homo sapien
gctaagaagcgcgtggtgcgaatgt

SEQ ID NO: 5752429 - DNA, 25 bp, Homo sapien
gcgcctttgatggcccgggtgcaca

SEQ ID NO: 5752430 - DNA, 25 bp, Homo sapien
gatggctgctacgtgcaacttccac

SEQ ID NO: 5752431 - DNA, 25 bp, Homo sapien
gtgtgtctacgctaagcctcgtggc

SEQ ID NO: 5752432 - DNA, 25 bp, Homo sapien
tttctacacagtgggaactctgaca

SEQ ID NO: 5752433 - DNA, 25 bp, Homo sapien
tctccttcattcacttgctgagcta

SEQ ID NO: 5752434 - DNA, 25 bp, Homo sapien
caaagcagggtccgaaaccaaggcg

SEQ ID NO: 5752435 - DNA, 25 bp, Homo sapien
ccttacccaaactgttcaagaaata

SEQ ID NO: 5752436 - DNA, 25 bp, Homo sapien
ctggagcggtacagcgccatctgcc

SEQ ID NO: 5752437 - DNA, 25 bp, Homo sapien
cagcagtgtgggcaacctcagctgc

SEQ ID NO: 5752438 - DNA, 25 bp, Homo sapien
agtgccaacacgtggcgcgcctttg

SEQ ID NO: 5752439 - DNA, 25 bp, Homo sapien
aactgacacaggaaaccaacaccca

SEQ ID NO: 5752440 - DNA, 25 bp, Homo sapien
ttcttcatccctttccagttaagga

SEQ ID NO: 5752441 - DNA, 25 bp, Homo sapien
cgggcttatctctcgcgagctctac

SEQ ID NO: 5752442 - DNA, 25 bp, Homo sapien
gagcgtgcagggaaccggacccggg

SEQ ID NO: 5752443 - DNA, 25 bp, Homo sapien
cagtgatcttcctgatgagcgttgg

SEQ ID NO: 5752444 - DNA, 25 bp, Homo sapien
aatggcactgattgttttagagact

SEQ ID NO: 5752445 - DNA, 25 bp, Homo sapien
ctcctgctggctgtggcttgcatgc

SEQ ID NO: 5752446 - DNA, 25 bp, Homo sapien
gtggccatcgcactggagcggtaca

SEQ ID NO: 5752447 - DNA, 25 bp, Homo sapien
gacacagcgtccctagcagtgaact

SEQ ID NO: 5752448 - DNA, 25 bp, Homo sapien
agcgccatctgccgaccactgcagg

SEQ ID NO: 5752449 - DNA, 25 bp, Homo sapien
ccacgtggctgctgtccggactact

SEQ ID NO: 5752450 - DNA, 25 bp, Homo sapien
gaggcatgcctctgatatgggactg

SEQ ID NO: 5752451 - DNA, 25 bp, Homo sapien
cacagtgggaactctgacaagggct

SEQ ID NO: 5752452 - DNA, 25 bp, Homo sapien
tcccaatcagcactgaaaataccat

SEQ ID NO: 5752453 - DNA, 25 bp, Homo sapien
cgcctctcctcaacagcagcagtgt

SEQ ID NO: 5752454 - DNA, 25 bp, Homo sapien
gcctcggcctgtgtcaaccccctgg

SEQ ID NO: 5752455 - DNA, 25 bp, Homo sapien
acgagctcgccccagggctcttccc

SEQ ID NO: 5752456 - DNA, 25 bp, Homo sapien
tggactaaccccaacgcacaggaaa

SEQ ID NO: 5752457 - DNA, 25 bp, Homo sapien
tgcttcatgcaccgtcgctttcgcc

SEQ ID NO: 5752458 - DNA, 25 bp, Homo sapien
tggccattagaatcactctttacgc

SEQ ID NO: 5752459 - DNA, 25 bp, Homo sapien
gaaaccaaggcgggctgccaggggc

SEQ ID NO: 5752460 - DNA, 25 bp, Homo sapien
cccgatgaggaccctcccactccct

SEQ ID NO: 5752461 - DNA, 25 bp, Homo sapien
cccttcaccctcctgcccaatctca

SEQ ID NO: 5752462 - DNA, 25 bp, Homo sapien
aagggctgacctgcctctcacacac

SEQ ID NO: 5752463 - DNA, 25 bp, Homo sapien
taaccccaacgcacaggaaaaggta

SEQ ID NO: 5752464 - DNA, 25 bp, Homo sapien
gaggaaatatgctcatcatcgtggt

SEQ ID NO: 5752465 - DNA, 25 bp, Homo sapien
atgctcatcatcgtggtcctgggac

SEQ ID NO: 5752466 - DNA, 25 bp, Homo sapien
gcacactgggccctggctgaggagt

SEQ ID NO: 5752467 - DNA, 25 bp, Homo sapien
acgctaagcctcgtggccatcgcac

SEQ ID NO: 5752468 - DNA, 25 bp, Homo sapien
ggactgactctgggatgctcctagt

SEQ ID NO: 5752469 - DNA, 25 bp, Homo sapien
tcttcatcccgggtgtggttatggc

SEQ ID NO: 5752470 - DNA, 25 bp, Homo sapien
tgaggcagggcaaatgacatgcact

SEQ ID NO: 5752471 - DNA, 25 bp, Homo sapien
ggagcggtacagcgccatctgccga

SEQ ID NO: 5752472 - DNA, 25 bp, Homo sapien
ttatagtgccaacacgtggcgcgcc

SEQ ID NO: 5752473 - DNA, 25 bp, Homo sapien
tcatacctctgaccaacaggctgtt

SEQ ID NO: 5752474 - DNA, 25 bp, Homo sapien
tggaggaaatatgctcatcatcgtg

SEQ ID NO: 5752475 - DNA, 25 bp, Homo sapien
aggcagggcaaatgacatgcactga

SEQ ID NO: 5752476 - DNA, 25 bp, Homo sapien
tgtccggactactcatggtgcccta

SEQ ID NO: 5752477 - DNA, 25 bp, Homo sapien
cctacgggcttatctctcgcgagct

SEQ ID NO: 5752478 - DNA, 25 bp, Homo sapien
ataaattgtttggcttcctcctgaa

SEQ ID NO: 5752479 - DNA, 25 bp, Homo sapien
agcactgaaaataccatcaggccta

SEQ ID NO: 5752480 - DNA, 25 bp, Homo sapien
catggactaaccccaacgcacagga

SEQ ID NO: 5752481 - DNA, 25 bp, Homo sapien
gccattagaatcactctttacgcag

SEQ ID NO: 5752482 - DNA, 25 bp, Homo sapien
cgcactggagcggtacagcgccatc

SEQ ID NO: 5752483 - DNA, 25 bp, Homo sapien
gcctggcacaggactgactctggga

SEQ ID NO: 5752484 - DNA, 25 bp, Homo sapien
ggacacgagaattggagctggccat

SEQ ID NO: 5752485 - DNA, 25 bp, Homo sapien
ttcgcggagccgggacacgagaatt

SEQ ID NO: 5752486 - DNA, 25 bp, Homo sapien
atacctctgaccaacaggctgttct

SEQ ID NO: 5752487 - DNA, 25 bp, Homo sapien
gccaaagcagggtccgaaaccaagg

SEQ ID NO: 5752488 - DNA, 25 bp, Homo sapien
cacagtgacccttcccaatcagcac

SEQ ID NO: 5752489 - DNA, 25 bp, Homo sapien
cgagcactctcgggtgctcctatct

SEQ ID NO: 5752490 - DNA, 25 bp, Homo sapien
acagcagcagtgtgggcaacctcag

SEQ ID NO: 5752491 - DNA, 25 bp, Homo sapien
gctgcagtgcgtgcatcgctggccc

SEQ ID NO: 5752492 - DNA, 25 bp, Homo sapien
caggctgttctgcactgaaaaggtt

SEQ ID NO: 5752493 - DNA, 25 bp, Homo sapien
ggagcccgccgggtcgagctgagta

SEQ ID NO: 5752494 - DNA, 25 bp, Homo sapien
ctgagcctggcccatagaaacatga

SEQ ID NO: 5752495 - DNA, 25 bp, Homo sapien
atctgccgaccactgcaggcacgag

SEQ ID NO: 5752496 - DNA, 25 bp, Homo sapien
aatcagcactgaaaataccatcagg

SEQ ID NO: 5752497 - DNA, 25 bp, Homo sapien
cttatctctcgcgagctctacttag

SEQ ID NO: 5752498 - DNA, 25 bp, Homo sapien
cccgccgggtcgagctgagtaaggc

SEQ ID NO: 5752499 - DNA, 25 bp, Homo sapien
tgctacgtgcaacttccacgttccc

SEQ ID NO: 5752500 - DNA, 25 bp, Homo sapien
catgggaaaggaggcatgcctctga

SEQ ID NO: 5752501 - DNA, 25 bp, Homo sapien
actgactctgggatgctcctagttt

SEQ ID NO: 5752502 - DNA, 25 bp, Homo sapien
ctgtccaggcttagctacaccacca

SEQ ID NO: 5752503 - DNA, 25 bp, Homo sapien
tcctagtttgacctcacagtgaccc

SEQ ID NO: 5752504 - DNA, 25 bp, Homo sapien
tcttcccgatgaggaccctcccact

SEQ ID NO: 5752505 - DNA, 25 bp, Homo sapien
atgaggaccctcccactccctccat

SEQ ID NO: 5752506 - DNA, 25 bp, Homo sapien
cttagggcttcgctttgacggcgac

SEQ ID NO: 5752507 - DNA, 25 bp, Homo sapien
ctgaaccggagcgtgcagggaaccg

SEQ ID NO: 5752508 - DNA, 25 bp, Homo sapien
ttcctgatgagcgttggaggaaata

SEQ ID NO: 5752509 - DNA, 25 bp, Homo sapien
gctgctacgtgcaacttccacgttc

SEQ ID NO: 5752510 - DNA, 25 bp, Homo sapien
tgcttttttttctgtgttggttgcc

SEQ ID NO: 5752511 - DNA, 25 bp, Homo sapien
aataagaatggagcagtacatggga

SEQ ID NO: 5752512 - DNA, 25 bp, Homo sapien
gagacacagcgtccctagcagtgaa

SEQ ID NO: 5752513 - DNA, 25 bp, Homo sapien
aaggcgggctgccaggggctgttca

SEQ ID NO: 5752514 - DNA, 25 bp, Homo sapien
gggtgtctgtgagtgtgtctacgct

SEQ ID NO: 5752515 - DNA, 25 bp, Homo sapien
cgagccccctcgcattcgcggagcc

SEQ ID NO: 5752516 - DNA, 25 bp, Homo sapien
gggccgggatccggctcccggccca

SEQ ID NO: 5752517 - DNA, 25 bp, Homo sapien
aggccaagctgctggctaagaagcg

SEQ ID NO: 5752518 - DNA, 25 bp, Homo sapien
gcactgacccttccagacatagaaa

SEQ ID NO: 5752519 - DNA, 25 bp, Homo sapien
caccgtcatctgcaaggcggtttcc

SEQ ID NO: 5752520 - DNA, 25 bp, Homo sapien
tgcgaatgttgctggtgatcgttgt

SEQ ID NO: 5752521 - DNA, 25 bp, Homo sapien
gtgacccttcccaatcagcactgaa

SEQ ID NO: 5752522 - DNA, 25 bp, Homo sapien
ctgaccaacaggctgttctgcactg

SEQ ID NO: 5752523 - DNA, 25 bp, Homo sapien
gctcctagtttgacctcacagtgac

SEQ ID NO: 5752524 - DNA, 25 bp, Homo sapien
gcgttgccggcctgagactggcgcg

SEQ ID NO: 5752525 - DNA, 25 bp, Homo sapien
cctccattgcttcgctgtccaggct

SEQ ID NO: 5752526 - DNA, 25 bp, Homo sapien
tctcctcaacagcagcagtgtgggc

SEQ ID NO: 5752527 - DNA, 25 bp, Homo sapien
aggaccgtggccctgccctctcctt

SEQ ID NO: 5752528 - DNA, 25 bp, Homo sapien
tcttgttcttcatcccgggtgtggt

SEQ ID NO: 5752529 - DNA, 25 bp, Homo sapien
ctgaggactgtcaccaatgccttcc

SEQ ID NO: 5752530 - DNA, 25 bp, Homo sapien
tgtacactgtcgtgcaaccagtggg

SEQ ID NO: 5752531 - DNA, 25 bp, Homo sapien
actatttctacacagtgggaactct

SEQ ID NO: 5752532 - DNA, 25 bp, Homo sapien
atgcactgacccttccagacataga

SEQ ID NO: 5752533 - DNA, 25 bp, Homo sapien
acgcacaggaaaaggtagcttacct

SEQ ID NO: 5752534 - DNA, 25 bp, Homo sapien
cggcctgtgtcaaccccctggtcta

SEQ ID NO: 5752535 - DNA, 25 bp, Homo sapien
cggcccacccaggccaagctgctgg

SEQ ID NO: 5752536 - DNA, 25 bp, Homo sapien
atcagcacactgggccctggctgag

SEQ ID NO: 5752537 - DNA, 25 bp, Homo sapien
ttggttgccagtttatagtgccaac

SEQ ID NO: 5752538 - DNA, 25 bp, Homo sapien
ctggctgtggcttgcatgcccttca

SEQ ID NO: 5752539 - DNA, 25 bp, Homo sapien
agtacatgggaaaggaggcatgcct

SEQ ID NO: 5752540 - DNA, 25 bp, Homo sapien
gcccacccaggccaagctgctggct

SEQ ID NO: 5752541 - DNA, 25 bp, Homo sapien
gagtgtggcagacgcgctcccacgc

SEQ ID NO: 5752542 - DNA, 25 bp, Homo sapien
caacacccaaagcatggactaaccc

SEQ ID NO: 5752543 - DNA, 25 bp, Homo sapien
tggcgcggttggcgaagacagcgat

SEQ ID NO: 5752544 - DNA, 25 bp, Homo sapien
acacaagaggaataagaatggagca

SEQ ID NO: 5752545 - DNA, 25 bp, Homo sapien
aaagctgaaccggagcgtgcaggga

SEQ ID NO: 5752546 - DNA, 25 bp, Homo sapien
ccctggagctgacggcgctgacggc

SEQ ID NO: 5752547 - DNA, 25 bp, Homo sapien
tgccggcctgagactggcgcggttg

SEQ ID NO: 5752548 - DNA, 25 bp, Homo sapien
actgctgcttctgctcttgttcttc

SEQ ID NO: 5752549 - DNA, 25 bp, Homo sapien
gctcttcccgatgaggaccctccca

SEQ ID NO: 5752550 - DNA, 25 bp, Homo sapien
gtgtgctgcagtgcgtgcatcgctg

SEQ ID NO: 5752551 - DNA, 25 bp, Homo sapien
cccctggtctactgcttcatgcacc

SEQ ID NO: 5752552 - DNA, 25 bp, Homo sapien
gtggtcctgggactgagccgccgcc

SEQ ID NO: 5752553 - DNA, 25 bp, Homo sapien
tgggcaacctcagctgcgagccccc

SEQ ID NO: 5752554 - DNA, 25 bp, Homo sapien
tcactggcagtcagcgacctcctgc

SEQ ID NO: 5752555 - DNA, 25 bp, Homo sapien
gtgccgcccgggggcgcctctcctc

SEQ ID NO: 5752556 - DNA, 25 bp, Homo sapien
gactgagccgccgcctgaggactgt

SEQ ID NO: 5752557 - DNA, 25 bp, Homo sapien
gggtccgaaaccaaggcgggctgcc

SEQ ID NO: 5752558 - DNA, 25 bp, Homo sapien
gctcatcatcgtggtcctgggactg

SEQ ID NO: 5752559 - DNA, 25 bp, Homo sapien
gcagtcagcgacctcctgctggctg

SEQ ID NO: 5752560 - DNA, 25 bp, Homo sapien
ctctccttccttacccaaactgttc

SEQ ID NO: 5752561 - DNA, 25 bp, Homo sapien
ccgtggcctacgggcttatctctcg

SEQ ID NO: 5752562 - DNA, 25 bp, Homo sapien
tcatccctttccagttaaggaccgt

SEQ ID NO: 5752563 - DNA, 25 bp, Homo sapien
aataataaattgtttggcttcctcc

SEQ ID NO: 5752564 - DNA, 25 bp, Homo sapien
gctgagctacgcctcggcctgtgtc

SEQ ID NO: 5752565 - DNA, 25 bp, Homo sapien
cgagctgagtaaggcggcgggctcg

SEQ ID NO: 5752566 - DNA, 25 bp, Homo sapien
ggcccatagaaacatgacactgacc

SEQ ID NO: 5752567 - DNA, 25 bp, Homo sapien
atggtgccctaccccgtgtacactg

SEQ ID NO: 5752568 - DNA, 25 bp, Homo sapien
ctcctatctccttcattcacttgct

SEQ ID NO: 5752569 - DNA, 25 bp, Homo sapien
tccggactactcatggtgccctacc

SEQ ID NO: 5752570 - DNA, 25 bp, Homo sapien
cagctgcgagccccctcgcattcgc

SEQ ID NO: 5752571 - DNA, 25 bp, Homo sapien
cagtgggaactctgacaagggctga

SEQ ID NO: 5752572 - DNA, 25 bp, Homo sapien
accagaacgggcgttgccggcctga

SEQ ID NO: 5752573 - DNA, 25 bp, Homo sapien
gctgacggctcctgggccgggatcc

SEQ ID NO: 5752574 - DNA, 25 bp, Homo sapien
cagccaaagcagggtccgaaaccaa

SEQ ID NO: 5752575 - DNA, 25 bp, Homo sapien
caaggcggtttcctacctcatgggg

SEQ ID NO: 5752576 - DNA, 25 bp, Homo sapien
ggcggtttcctacctcatgggggtg

SEQ ID NO: 5752577 - DNA, 25 bp, Homo sapien
accgtcgctttcgccaggcctgcct

SEQ ID NO: 5752578 - DNA, 25 bp, Homo sapien
ggctgttcaccagaacgggcgttgc

SEQ ID NO: 5752579 - DNA, 25 bp, Homo sapien
taataaattgtttggcttcctcctg

SEQ ID NO: 5752580 - DNA, 25 bp, Homo sapien
gtgcgcgggtccgccagacctggtc

SEQ ID NO: 5752581 - DNA, 25 bp, Homo sapien
gcgcgggtccgccagacctggtccg

SEQ ID NO: 5752582 - DNA, 25 bp, Homo sapien
tcgttgtgcttttttttctgtgttg

SEQ ID NO: 5752583 - DNA, 25 bp, Homo sapien
cgctgtccaggcttagctacaccac

SEQ ID NO: 5752584 - DNA, 25 bp, Homo sapien
acctgcctctcacacacatagatta

SEQ ID NO: 5752585 - DNA, 25 bp, Homo sapien
acaactgacacaggaaaccaacacc

SEQ ID NO: 5752586 - DNA, 25 bp, Homo sapien
ctaaagctgaaccggagcgtgcagg

SEQ ID NO: 5752587 - DNA, 25 bp, Homo sapien
agcttacctgacacaagaggaataa

SEQ ID NO: 5752588 - DNA, 25 bp, Homo sapien
cctcctgcccaatctcatgggcaca

SEQ ID NO: 5752589 - DNA, 25 bp, Homo sapien
ctgaaaaggttcttcatccctttcc

SEQ ID NO: 5752590 - DNA, 25 bp, Homo sapien
cagcacactgggccctggctgagga

SEQ ID NO: 5752591 - DNA, 25 bp, Homo sapien
caggggctgttcaccagaacgggcg

SEQ ID NO: 5752592 - DNA, 25 bp, Homo sapien
ccgtggccctgccctctccttcctt

SEQ ID NO: 5752593 - DNA, 25 bp, Homo sapien
agggcaaatgacatgcactgaccct

SEQ ID NO: 5752594 - DNA, 25 bp, Homo sapien
aaaacacaaaccacaactgacacag

SEQ ID NO: 5752595 - DNA, 25 bp, Homo sapien
cccttcccaatcagcactgaaaata

SEQ ID NO: 5752596 - DNA, 25 bp, Homo sapien
cggagcgtgcagggaaccggacccg

SEQ ID NO: 5752597 - DNA, 25 bp, Homo sapien
ttcgctgtccaggcttagctacacc

SEQ ID NO: 5752598 - DNA, 25 bp, Homo sapien
cccaacgcacaggaaaaggtagctt

SEQ ID NO: 5752599 - DNA, 25 bp, Homo sapien
agtcagcgacctcctgctggctgtg

SEQ ID NO: 5752600 - DNA, 25 bp, Homo sapien
cgctggcccagtgcgcgggtccgcc

SEQ ID NO: 5752601 - DNA, 25 bp, Homo sapien
acaagggctgacctgcctctcacac

SEQ ID NO: 5752602 - DNA, 25 bp, Homo sapien
gtgatcgttgtgcttttttttctgt

SEQ ID NO: 5752603 - DNA, 25 bp, Homo sapien
ctcagctgcgagccccctcgcattc

SEQ ID NO: 5752604 - DNA, 25 bp, Homo sapien
gcctgaggactgtcaccaatgcctt

SEQ ID NO: 5752605 - DNA, 25 bp, Homo sapien
cacaggaaaccaacacccaaagcat

SEQ ID NO: 5752606 - DNA, 25 bp, Homo sapien
ccactccctccattgcttcgctgtc

SEQ ID NO: 5752607 - DNA, 25 bp, Homo sapien
aggcctaatctcatacctctgacca

SEQ ID NO: 5752608 - DNA, 25 bp, Homo sapien
acgttcccggcctgccctggagctg

SEQ ID NO: 5752609 - DNA, 25 bp, Homo sapien
cgccgcctgaggactgtcaccaatg

SEQ ID NO: 5752610 - DNA, 25 bp, Homo sapien
gagctgctaaagctgaaccggagcg

SEQ ID NO: 5752611 - DNA, 25 bp, Homo sapien
agcagcagtgtgggcaacctcagct

SEQ ID NO: 5752612 - DNA, 25 bp, Homo sapien
gggggttgaggcagggcaaatgaca

SEQ ID NO: 5752613 - DNA, 25 bp, Homo sapien
cacaaaccacaactgacacaggaaa

SEQ ID NO: 5752614 - DNA, 25 bp, Homo sapien
acttgctgagctacgcctcggcctg

SEQ ID NO: 5752615 - DNA, 25 bp, Homo sapien
gagctggccattagaatcactcttt

SEQ ID NO: 5752616 - DNA, 25 bp, Homo sapien
ccaacacgtggcgcgcctttgatgg

SEQ ID NO: 5752617 - DNA, 25 bp, Homo sapien
tggcccgggtgcacaccgagcactc

SEQ ID NO: 5752618 - DNA, 25 bp, Homo sapien
tccctttccagttaaggaccgtggc

SEQ ID NO: 5752619 - DNA, 25 bp, Homo sapien
tgggccctggctgaggagtagaggg

SEQ ID NO: 5752620 - DNA, 25 bp, Homo sapien
aaattgtttggcttcctcctgaaaa

SEQ ID NO: 5752621 - DNA, 25 bp, Homo sapien
cgcccgggggcgcctctcctcaaca

SEQ ID NO: 5752622 - DNA, 25 bp, Homo sapien
cgggggcgcctctcctcaacagcag

SEQ ID NO: 5752623 - DNA, 25 bp, Homo sapien
ctctgaccaacaggctgttctgcac

SEQ ID NO: 5752624 - DNA, 25 bp, Homo sapien
caggactgactctgggatgctccta

SEQ ID NO: 5752625 - DNA, 25 bp, Homo sapien
ttatggccgtggcctacgggcttat

SEQ ID NO: 5752626 - DNA, 25 bp, Homo sapien
cgcagtgatcttcctgatgagcgtt

SEQ ID NO: 5752627 - DNA, 25 bp, Homo sapien
cagcgacagccaaagcagggtccga

SEQ ID NO: 5752628 - DNA, 25 bp, Homo sapien
ctttggcaccgtcatctgcaaggcg

SEQ ID NO: 5752629 - DNA, 25 bp, Homo sapien
gtgtctacgctaagcctcgtggcca

SEQ ID NO: 5752630 - DNA, 25 bp, Homo sapien
ttggcgaagacagcgatggctgcta

SEQ ID NO: 5752631 - DNA, 25 bp, Homo sapien
gtccgccagacctggtccgtactgc

SEQ ID NO: 5752632 - DNA, 25 bp, Homo sapien
gggactgagcctggcccatagaaac

SEQ ID NO: 5752633 - DNA, 25 bp, Homo sapien
cctcgtgtgctgcagtgcgtgcatc

SEQ ID NO: 5752634 - DNA, 25 bp, Homo sapien
ctcccacgcggctcgcgtgattgta

SEQ ID NO: 5752635 - DNA, 25 bp, Homo sapien
ttagaatcactctttacgcagtgat

SEQ ID NO: 5752636 - DNA, 25 bp, Homo sapien
gagagacacagcgtccctagcagtg

SEQ ID NO: 5752637 - DNA, 25 bp, Homo sapien
tggcgcgcctttgatggcccgggtg

SEQ ID NO: 5752638 - DNA, 25 bp, Homo sapien
ctgctggctaagaagcgcgtggtgc

SEQ ID NO: 5752639 - DNA, 25 bp, Homo sapien
tctgacaagggctgacctgcctctc

SEQ ID NO: 5752640 - DNA, 25 bp, Homo sapien
ctgtgccgcccgggggcgcctctcc

SEQ ID NO: 5752641 - DNA, 25 bp, Homo sapien
accagtggggcctcgtgtgctgcag

SEQ ID NO: 5752642 - DNA, 25 bp, Homo sapien
tgcccttcaccctcctgcccaatct

SEQ ID NO: 5752643 - DNA, 25 bp, Homo sapien
cactggagcggtacagcgccatctg

SEQ ID NO: 5752644 - DNA, 25 bp, Homo sapien
cagttaaggaccgtggccctgccct

SEQ ID NO: 5752645 - DNA, 25 bp, Homo sapien
aaaggtagcttacctgacacaagag

SEQ ID NO: 5752646 - DNA, 25 bp, Homo sapien
aatctcatacctctgaccaacaggc

SEQ ID NO: 5752647 - DNA, 25 bp, Homo sapien
aaaccaacacccaaagcatggacta

SEQ ID NO: 5752648 - DNA, 25 bp, Homo sapien
cctacctcatgggggtgtctgtgag

SEQ ID NO: 5752649 - DNA, 25 bp, Homo sapien
tgctcctatctccttcattcacttg

SEQ ID NO: 5752650 - DNA, 25 bp, Homo sapien
tcatgcaccgtcgctttcgccaggc

SEQ ID NO: 5752651 - DNA, 25 bp, Homo sapien
acgtggctgctgtccggactactca

SEQ ID NO: 5752652 - DNA, 25 bp, Homo sapien
cctggtccgtactgctgcttctgct

SEQ ID NO: 5752653 - DNA, 25 bp, Homo sapien
accggagcgtgcagggaaccggacc

SEQ ID NO: 5752654 - DNA, 25 bp, Homo sapien
gaaataataaattgtttggcttcct

SEQ ID NO: 5752655 - DNA, 25 bp, Homo sapien
tttttctgtgttggttgccagttta

SEQ ID NO: 5752656 - DNA, 25 bp, Homo sapien
atatgctcatcatcgtggtcctggg

SEQ ID NO: 5752657 - DNA, 25 bp, Homo sapien
ttgctggtgatcgttgtgctttttt

SEQ ID NO: 5752658 - DNA, 25 bp, Homo sapien
cagtggggcctcgtgtgctgcagtg

SEQ ID NO: 5752659 - DNA, 25 bp, Homo sapien
gaaacatgacactgaccttggagag

SEQ ID NO: 5752660 - DNA, 25 bp, Homo sapien
gtgaactatttctacacagtgggaa

SEQ ID NO: 5752661 - DNA, 25 bp, Homo sapien
ctgttcaccagaacgggcgttgccg

SEQ ID NO: 5752662 - DNA, 25 bp, Homo sapien
acgagaattggagctggccattaga

SEQ ID NO: 5752663 - DNA, 25 bp, Homo sapien
tctcatacctctgaccaacaggctg

SEQ ID NO: 5752664 - DNA, 25 bp, Homo sapien
ctcggcgggggccatggagctgcta

SEQ ID NO: 5752665 - DNA, 25 bp, Homo sapien
gtggcctacgggcttatctctcgcg

SEQ ID NO: 5752666 - DNA, 25 bp, Homo sapien
actccctccattgcttcgctgtcca

SEQ ID NO: 5752667 - DNA, 25 bp, Homo sapien
ggccctgccctctccttccttaccc

SEQ ID NO: 5752668 - DNA, 25 bp, Homo sapien
cgcgctcccacgcggctcgcgtgat

SEQ ID NO: 5752669 - DNA, 25 bp, Homo sapien
ctactcatggtgccctaccccgtgt

SEQ ID NO: 5752670 - DNA, 25 bp, Homo sapien
gttgtgcttttttttctgtgttggt

SEQ ID NO: 5752671 - DNA, 25 bp, Homo sapien
ggaaaggaggcatgcctctgatatg

SEQ ID NO: 5752672 - DNA, 25 bp, Homo sapien
cctgagactggcgcggttggcgaag

SEQ ID NO: 5752673 - DNA, 25 bp, Homo sapien
tcttcctgatgagcgttggaggaaa

SEQ ID NO: 5752674 - DNA, 25 bp, Homo sapien
gtctgtgagtgtgtctacgctaagc

SEQ ID NO: 5752675 - DNA, 25 bp, Homo sapien
ggccgggggcttccctgtgccgccc

SEQ ID NO: 5752676 - DNA, 25 bp, Homo sapien
attgtttggcttcctcctgaaaaaa

SEQ ID NO: 5752677 - DNA, 25 bp, Homo sapien
tgttggttgccagtttatagtgcca

SEQ ID NO: 5752678 - DNA, 25 bp, Homo sapien
gtggctgctgtccggactactcatg

SEQ ID NO: 5752679 - DNA, 25 bp, Homo sapien
ctgtgtcaaccccctggtctactgc

SEQ ID NO: 5752680 - DNA, 25 bp, Homo sapien
accctcctgcccaatctcatgggca

SEQ ID NO: 5752681 - DNA, 25 bp, Homo sapien
acttccacgttcccggcctgccctg

SEQ ID NO: 5752682 - DNA, 25 bp, Homo sapien
ctgagtaaggcggcgggctcggcgg

SEQ ID NO: 5752683 - DNA, 25 bp, Homo sapien
gcgctgacggctcctgggccgggat

SEQ ID NO: 5752684 - DNA, 25 bp, Homo sapien
gccgcccgggggcgcctctcctcaa

SEQ ID NO: 5752685 - DNA, 25 bp, Homo sapien
tgccctaccccgtgtacactgtcgt

SEQ ID NO: 5752686 - DNA, 25 bp, Homo sapien
tcctgcccaatctcatgggcacatt

SEQ ID NO: 5752687 - DNA, 25 bp, Homo sapien
ttcgctttgacggcgacagtgacag

SEQ ID NO: 5752688 - DNA, 25 bp, Homo sapien
ttaatggcactgattgttttagaga

SEQ ID NO: 5752689 - DNA, 25 bp, Homo sapien
gcgcgtggtgcgaatgttgctggtg

SEQ ID NO: 5752690 - DNA, 25 bp, Homo sapien
ggatgctcctagtttgacctcacag

SEQ ID NO: 5752691 - DNA, 25 bp, Homo sapien
atgggcacattcatctttggcaccg

SEQ ID NO: 5752692 - DNA, 25 bp, Homo sapien
tggaaacttgcgctcgctgctgccc

SEQ ID NO: 5752693 - DNA, 25 bp, Homo sapien
attcacttgctgagctacgcctcgg

SEQ ID NO: 5752694 - DNA, 25 bp, Homo sapien
agaatcactctttacgcagtgatct

SEQ ID NO: 5752695 - DNA, 25 bp, Homo sapien
tggcagtcagcgacctcctgctggc

SEQ ID NO: 5752696 - DNA, 25 bp, Homo sapien
tcaagaaataataaattgtttggct

SEQ ID NO: 5752697 - DNA, 25 bp, Homo sapien
taaggaccgtggccctgccctctcc

SEQ ID NO: 5752698 - DNA, 25 bp, Homo sapien
accaatgccttcctcctctcactgg

SEQ ID NO: 5752699 - DNA, 25 bp, Homo sapien
tctcatgggcacattcatctttggc

SEQ ID NO: 5752700 - DNA, 25 bp, Homo sapien
gctctacttagggcttcgctttgac

SEQ ID NO: 5752701 - DNA, 25 bp, Homo sapien
atccggctcccggcccacccaggcc

SEQ ID NO: 5752702 - DNA, 25 bp, Homo sapien
tggcactgattgttttagagactat

SEQ ID NO: 5752703 - DNA, 25 bp, Homo sapien
cagacctggtccgtactgctgcttc

SEQ ID NO: 5752704 - DNA, 25 bp, Homo sapien
actgcttcatgcaccgtcgctttcg

SEQ ID NO: 5752705 - DNA, 25 bp, Homo sapien
tgagctacgcctcggcctgtgtcaa

SEQ ID NO: 5752706 - DNA, 25 bp, Homo sapien
ccttccttacccaaactgttcaaga

SEQ ID NO: 5752707 - DNA, 25 bp, Homo sapien
gggttgaggcagggcaaatgacatg

SEQ ID NO: 5752708 - DNA, 25 bp, Homo sapien
ggcccagtgcgcgggtccgccagac

SEQ ID NO: 5752709 - DNA, 25 bp, Homo sapien
gccgaccactgcaggcacgagtgtg

SEQ ID NO: 5752710 - DNA, 25 bp, Homo sapien
cggctcgcgtgattgtagccacgtg

SEQ ID NO: 5752711 - DNA, 25 bp, Homo sapien
tgctaaagctgaaccggagcgtgca

SEQ ID NO: 5752712 - DNA, 25 bp, Homo sapien
ccaatcagcactgaaaataccatca

SEQ ID NO: 5752713 - DNA, 25 bp, Homo sapien
gctcgcgtgattgtagccacgtggc

SEQ ID NO: 5752714 - DNA, 25 bp, Homo sapien
ctggcccatagaaacatgacactga

SEQ ID NO: 5752715 - DNA, 25 bp, Homo sapien
ccgggtgtggttatggccgtggcct

SEQ ID NO: 5752716 - DNA, 25 bp, Homo sapien
gaaaaggttcttcatccctttccag

SEQ ID NO: 5752717 - DNA, 25 bp, Homo sapien
acgtgcaacttccacgttcccggcc

SEQ ID NO: 5752718 - DNA, 25 bp, Homo sapien
acctcctgctggctgtggcttgcat

SEQ ID NO: 5752719 - DNA, 25 bp, Homo sapien
atcgctggcccagtgcgcgggtccg

SEQ ID NO: 5752720 - DNA, 25 bp, Homo sapien
ggcctgccctggagctgacggcgct

SEQ ID NO: 5752721 - DNA, 25 bp, Homo sapien
gtgtggttatggccgtggcctacgg

SEQ ID NO: 5752722 - DNA, 25 bp, Homo sapien
catcccgggtgtggttatggccgtg

SEQ ID NO: 5752723 - DNA, 25 bp, Homo sapien
aggaggcatgcctctgatatgggac

SEQ ID NO: 5752724 - DNA, 25 bp, Homo sapien
gcttagctacaccaccatcagcaca

SEQ ID NO: 5752725 - DNA, 25 bp, Homo sapien
gagctcgccccagggctcttcccga

SEQ ID NO: 5752726 - DNA, 25 bp, Homo sapien
agcatggactaaccccaacgcacag

SEQ ID NO: 5752727 - DNA, 25 bp, Homo sapien
ctacgtgcaacttccacgttcccgg

SEQ ID NO: 5752728 - DNA, 25 bp, Homo sapien
ctagcagtgaactatttctacacag

SEQ ID NO: 5752729 - DNA, 25 bp, Homo sapien
ctaatctcatacctctgaccaacag

SEQ ID NO: 5752730 - DNA, 25 bp, Homo sapien
ggctcctgggccgggatccggctcc

SEQ ID NO: 5752731 - DNA, 25 bp, Homo sapien
ctggcccagtgcgcgggtccgccag

SEQ ID NO: 5752732 - DNA, 25 bp, Homo sapien
ctctcacacacatagattaatggca

SEQ ID NO: 5752733 - DNA, 25 bp, Homo sapien
cagggctcttcccgatgaggaccct

SEQ ID NO: 5752734 - DNA, 25 bp, Homo sapien
ctccttccttacccaaactgttcaa

SEQ ID NO: 5752735 - DNA, 25 bp, Homo sapien
ataccatcaggcctaatctcatacc

SEQ ID NO: 5752736 - DNA, 25 bp, Homo sapien
gaaacttgcgctcgctgctgccccc

SEQ ID NO: 5752737 - DNA, 25 bp, Homo sapien
ctgccaggggctgttcaccagaacg

SEQ ID NO: 5752738 - DNA, 25 bp, Homo sapien
catcgtggtcctgggactgagccgc

SEQ ID NO: 5752739 - DNA, 25 bp, Homo sapien
tacactgtcgtgcaaccagtggggc

SEQ ID NO: 5752740 - DNA, 25 bp, Homo sapien
gcccaatctcatgggcacattcatc

SEQ ID NO: 5752741 - DNA, 25 bp, Homo sapien
gtagccacgtggctgctgtccggac

SEQ ID NO: 5752742 - DNA, 25 bp, Homo sapien
gcctctcacacacatagattaatgg

SEQ ID NO: 5752743 - DNA, 25 bp, Homo sapien
tggtccgtactgctgcttctgctct

SEQ ID NO: 5752744 - DNA, 25 bp, Homo sapien
ccctaccccgtgtacactgtcgtgc

SEQ ID NO: 5752745 - DNA, 25 bp, Homo sapien
cggtacagcgccatctgccgaccac

SEQ ID NO: 5752746 - DNA, 25 bp, Homo sapien
gaaaataccatcaggcctaatctca

SEQ ID NO: 5752747 - DNA, 25 bp, Homo sapien
gcctgtgtcaaccccctggtctact

SEQ ID NO: 5752748 - DNA, 25 bp, Homo sapien
ctggagctgacggcgctgacggctc

SEQ ID NO: 5752749 - DNA, 25 bp, Homo sapien
cgctgctgcccccggcctccacgag

SEQ ID NO: 5752750 - DNA, 25 bp, Homo sapien
ggggctgttcaccagaacgggcgtt

SEQ ID NO: 5752751 - DNA, 25 bp, Homo sapien
acatgcactgacccttccagacata

SEQ ID NO: 5752752 - DNA, 25 bp, Homo sapien
tcaccctcctgcccaatctcatggg

SEQ ID NO: 5752753 - DNA, 25 bp, Homo sapien
catagaaacatgacactgaccttgg

SEQ ID NO: 5752754 - DNA, 25 bp, Homo sapien
ccacgttcccggcctgccctggagc

SEQ ID NO: 5752755 - DNA, 25 bp, Homo sapien
ctgctgtccggactactcatggtgc

SEQ ID NO: 5752756 - DNA, 25 bp, Homo sapien
acccaaactgttcaagaaataataa

SEQ ID NO: 5752757 - DNA, 25 bp, Homo sapien
tgactctgggatgctcctagtttga

SEQ ID NO: 5752758 - DNA, 25 bp, Homo sapien
cttgcatgcccttcaccctcctgcc

SEQ ID NO: 5752759 - DNA, 25 bp, Homo sapien
gggtgcacaccgagcactctcgggt

SEQ ID NO: 5752760 - DNA, 25 bp, Homo sapien
acaccaccatcagcacactgggccc

SEQ ID NO: 5752761 - DNA, 25 bp, Homo sapien
tttttttctgtgttggttgccagtt

SEQ ID NO: 5752762 - DNA, 25 bp, Homo sapien
tttgacctcacagtgacccttccca

SEQ ID NO: 5752763 - DNA, 25 bp, Homo sapien
actggcagtcagcgacctcctgctg

SEQ ID NO: 5752764 - DNA, 25 bp, Homo sapien
ctgtcgtgcaaccagtggggcctcg

SEQ ID NO: 5752765 - DNA, 25 bp, Homo sapien
aggcttagctacaccaccatcagca

SEQ ID NO: 5752766 - DNA, 25 bp, Homo sapien
cttcccaatcagcactgaaaatacc

SEQ ID NO: 5752767 - DNA, 25 bp, Homo sapien
gcgtgattgtagccacgtggctgct

SEQ ID NO: 5752768 - DNA, 25 bp, Homo sapien
ttccagacatagaaaacacaaacca

SEQ ID NO: 5752769 - DNA, 25 bp, Homo sapien
atggccgtggcctacgggcttatct

SEQ ID NO: 5752770 - DNA, 25 bp, Homo sapien
ctcaacagcagcagtgtgggcaacc

SEQ ID NO: 5752771 - DNA, 25 bp, Homo sapien
tcgtggccatcgcactggagcggta

SEQ ID NO: 5752772 - DNA, 25 bp, Homo sapien
agagactatggagcctggcacagga

SEQ ID NO: 5752773 - DNA, 25 bp, Homo sapien
aaggttcttcatccctttccagtta

SEQ ID NO: 5752774 - DNA, 25 bp, Homo sapien
atgccttcctcctctcactggcagt

SEQ ID NO: 5752775 - DNA, 25 bp, Homo sapien
attgttttagagactatggagcctg

SEQ ID NO: 5752776 - DNA, 25 bp, Homo sapien
caacagcagcagtgtgggcaacctc

SEQ ID NO: 5752777 - DNA, 25 bp, Homo sapien
ggctgccaggggctgttcaccagaa

SEQ ID NO: 5752778 - DNA, 25 bp, Homo sapien
ctgtggcttgcatgcccttcaccct

SEQ ID NO: 5752779 - DNA, 25 bp, Homo sapien
cggcgggctcggcgggggccatgga

SEQ ID NO: 5752780 - DNA, 25 bp, Homo sapien
gtcaaccccctggtctactgcttca

SEQ ID NO: 5752781 - DNA, 25 bp, Homo sapien
gaactctgacaagggctgacctgcc

SEQ ID NO: 5752782 - DNA, 25 bp, Homo sapien
atgcaccgtcgctttcgccaggcct

SEQ ID NO: 5752783 - DNA, 25 bp, Homo sapien
gccaagctgctggctaagaagcgcg

SEQ ID NO: 5752784 - DNA, 25 bp, Homo sapien
gtgcgtgcatcgctggcccagtgcg

SEQ ID NO: 5752785 - DNA, 25 bp, Homo sapien
agcagggtccgaaaccaaggcgggc

SEQ ID NO: 5752786 - DNA, 25 bp, Homo sapien
accaacacccaaagcatggactaac

SEQ ID NO: 5752787 - DNA, 25 bp, Homo sapien
gccagacctggtccgtactgctgct

SEQ ID NO: 5752788 - DNA, 25 bp, Homo sapien
gaggaataagaatggagcagtacat

SEQ ID NO: 5752789 - DNA, 25 bp, Homo sapien
cacgcggctcgcgtgattgtagcca

SEQ ID NO: 5752790 - DNA, 25 bp, Homo sapien
gcccgggtgcacaccgagcactctc

SEQ ID NO: 5752791 - DNA, 25 bp, Homo sapien
caaccagtggggcctcgtgtgctgc

SEQ ID NO: 5752792 - DNA, 25 bp, Homo sapien
cgacctcctgctggctgtggcttgc

SEQ ID NO: 5752793 - DNA, 25 bp, Homo sapien
ctttgatggcccgggtgcacaccga

SEQ ID NO: 5752794 - DNA, 25 bp, Homo sapien
gcttcgctgtccaggcttagctaca

SEQ ID NO: 5752795 - DNA, 25 bp, Homo sapien
cacagcgtccctagcagtgaactat

SEQ ID NO: 5752796 - DNA, 25 bp, Homo sapien
actgattgttttagagactatggag

SEQ ID NO: 5752797 - DNA, 25 bp, Homo sapien
tgcccccggcctccacgagctcgcc

SEQ ID NO: 5752798 - DNA, 25 bp, Homo sapien
actcatggtgccctaccccgtgtac

SEQ ID NO: 5752799 - DNA, 25 bp, Homo sapien
accccctggtctactgcttcatgca

SEQ ID NO: 5752800 - DNA, 25 bp, Homo sapien
tggagctggccattagaatcactct

SEQ ID NO: 5752801 - DNA, 25 bp, Homo sapien
gaacgggcgttgccggcctgagact

SEQ ID NO: 5752802 - DNA, 25 bp, Homo sapien
gcttctgctcttgttcttcatcccg

SEQ ID NO: 5752803 - DNA, 25 bp, Homo sapien
cttcatccctttccagttaaggacc

SEQ ID NO: 5752804 - DNA, 25 bp, Homo sapien
tttctgtgttggttgccagtttata

SEQ ID NO: 5752805 - DNA, 25 bp, Homo sapien
ttccacgttcccggcctgccctgga

SEQ ID NO: 5752806 - DNA, 25 bp, Homo sapien
gggaactctgacaagggctgacctg

SEQ ID NO: 5752807 - DNA, 25 bp, Homo sapien
cgaatgttgctggtgatcgttgtgc

SEQ ID NO: 5752808 - DNA, 25 bp, Homo sapien
ccaatctcatgggcacattcatctt

SEQ ID NO: 5752809 - DNA, 25 bp, Homo sapien
ggcttatctctcgcgagctctactt

SEQ ID NO: 5752810 - DNA, 25 bp, Homo sapien
gggcttccctgtgccgcccgggggc

SEQ ID NO: 5752811 - DNA, 25 bp, Homo sapien
attcatctttggcaccgtcatctgc

SEQ ID NO: 5752812 - DNA, 25 bp, Homo sapien
ggaccctcccactccctccattgct

SEQ ID NO: 5752813 - DNA, 25 bp, Homo sapien
ggcgcctctcctcaacagcagcagt

SEQ ID NO: 5752814 - DNA, 25 bp, Homo sapien
acatagaaaacacaaaccacaactg

SEQ ID NO: 5752815 - DNA, 25 bp, Homo sapien
cactgaaaaggttcttcatcccttt

SEQ ID NO: 5752816 - DNA, 25 bp, Homo sapien
agcctcgtggccatcgcactggagc

SEQ ID NO: 5752817 - DNA, 25 bp, Homo sapien
ggcagacgcgctcccacgcggctcg

SEQ ID NO: 5752818 - DNA, 25 bp, Homo sapien
cttggagagacacagcgtccctagc

SEQ ID NO: 5752819 - DNA, 25 bp, Homo sapien
caacgcacaggaaaaggtagcttac

SEQ ID NO: 5752820 - DNA, 25 bp, Homo sapien
ttagctacaccaccatcagcacact

SEQ ID NO: 5752821 - DNA, 25 bp, Homo sapien
tacgcagtgatcttcctgatgagcg

SEQ ID NO: 5752822 - DNA, 25 bp, Homo sapien
actctttacgcagtgatcttcctga

SEQ ID NO: 5752823 - DNA, 25 bp, Homo sapien
acctcagctgcgagccccctcgcat

SEQ ID NO: 5752824 - DNA, 25 bp, Homo sapien
ggcctgcctggaaacttgcgctcgc

SEQ ID NO: 5752825 - DNA, 25 bp, Homo sapien
gggtccgccagacctggtccgtact

SEQ ID NO: 5752826 - DNA, 25 bp, Homo sapien
tcccgggtgtggttatggccgtggc

SEQ ID NO: 5752827 - DNA, 25 bp, Homo sapien
acctcacagtgacccttcccaatca

SEQ ID NO: 5752828 - DNA, 25 bp, Homo sapien
gtggccctgccctctccttccttac

SEQ ID NO: 5752829 - DNA, 25 bp, Homo sapien
aacacaaaccacaactgacacagga

SEQ ID NO: 5752830 - DNA, 25 bp, Homo sapien
gtccctagcagtgaactatttctac

SEQ ID NO: 5752831 - DNA, 25 bp, Homo sapien
ccaaagcatggactaaccccaacgc

SEQ ID NO: 5752832 - DNA, 25 bp, Homo sapien
ggaaaccaacacccaaagcatggac

SEQ ID NO: 5752833 - DNA, 25 bp, Homo sapien
gcgagctctacttagggcttcgctt

SEQ ID NO: 5752834 - DNA, 25 bp, Homo sapien
gcagtgtgggcaacctcagctgcga

SEQ ID NO: 5752835 - DNA, 25 bp, Homo sapien
tgcgagccccctcgcattcgcggag

SEQ ID NO: 5752836 - DNA, 25 bp, Homo sapien
gttcaccagaacgggcgttgccggc

SEQ ID NO: 5752837 - DNA, 25 bp, Homo sapien
catagattaatggcactgattgttt

SEQ ID NO: 5752838 - DNA, 25 bp, Homo sapien
actctgacaagggctgacctgcctc

SEQ ID NO: 5752839 - DNA, 25 bp, Homo sapien
tgggagcccgccgggtcgagctgag

SEQ ID NO: 5752840 - DNA, 25 bp, Homo sapien
tctgatatgggactgagcctggccc

SEQ ID NO: 5752841 - DNA, 25 bp, Homo sapien
gggctgacctgcctctcacacacat

SEQ ID NO: 5752842 - DNA, 25 bp, Homo sapien
gtctacgctaagcctcgtggccatc

SEQ ID NO: 5752843 - DNA, 25 bp, Homo sapien
cactgtcgtgcaaccagtggggcct

SEQ ID NO: 5752844 - DNA, 25 bp, Homo sapien
aggcacgagtgtggcagacgcgctc

SEQ ID NO: 5752845 - DNA, 25 bp, Homo sapien
agctgagtaaggcggcgggctcggc

SEQ ID NO: 5752846 - DNA, 25 bp, Homo sapien
tgctgcttctgctcttgttcttcat

SEQ ID NO: 5752847 - DNA, 25 bp, Homo sapien
tcactctttacgcagtgatcttcct

SEQ ID NO: 5752848 - DNA, 25 bp, Homo sapien
actgggccctggctgaggagtagag

SEQ ID NO: 5752849 - DNA, 25 bp, Homo sapien
gtgattgtagccacgtggctgctgt

SEQ ID NO: 5752850 - DNA, 25 bp, Homo sapien
tctgggatgctcctagtttgacctc

SEQ ID NO: 5752851 - DNA, 25 bp, Homo sapien
gtttatagtgccaacacgtggcgcg

SEQ ID NO: 5752852 - DNA, 25 bp, Homo sapien
ccacgagctcgccccagggctcttc

SEQ ID NO: 5752853 - DNA, 25 bp, Homo sapien
ccccctcgcattcgcggagccggga

SEQ ID NO: 5752854 - DNA, 25 bp, Homo sapien
ggcggcgggctcggcgggggccatg

SEQ ID NO: 5752855 - DNA, 25 bp, Homo sapien
gctggtgatcgttgtgctttttttt

SEQ ID NO: 5752856 - DNA, 25 bp, Homo sapien
cttcatgcaccgtcgctttcgccag

SEQ ID NO: 5752857 - DNA, 25 bp, Homo sapien
catcaggcctaatctcatacctctg

SEQ ID NO: 5752858 - DNA, 25 bp, Homo sapien
gcaggcacgagtgtggcagacgcgc

SEQ ID NO: 5752859 - DNA, 25 bp, Homo sapien
tttacgcagtgatcttcctgatgag

SEQ ID NO: 5752860 - DNA, 25 bp, Homo sapien
gcctttgatggcccgggtgcacacc

SEQ ID NO: 5752861 - DNA, 25 bp, Homo sapien
cattgcttcgctgtccaggcttagc

SEQ ID NO: 5752862 - DNA, 25 bp, Homo sapien
aaataccatcaggcctaatctcata

SEQ ID NO: 5752863 - DNA, 25 bp, Homo sapien
ctcctctcactggcagtcagcgacc

SEQ ID NO: 5752864 - DNA, 25 bp, Homo sapien
tgcctggaaacttgcgctcgctgct

SEQ ID NO: 5752865 - DNA, 25 bp, Homo sapien
cactgcaggcacgagtgtggcagac

SEQ ID NO: 5752866 - DNA, 25 bp, Homo sapien
ggcacaggactgactctgggatgct

SEQ ID NO: 5752867 - DNA, 25 bp, Homo sapien
tcatggtgccctaccccgtgtacac

SEQ ID NO: 5752868 - DNA, 25 bp, Homo sapien
cacatagattaatggcactgattgt

SEQ ID NO: 5752869 - DNA, 25 bp, Homo sapien
tacctcatgggggtgtctgtgagtg

SEQ ID NO: 5752870 - DNA, 25 bp, Homo sapien
ccaggcttagctacaccaccatcag

SEQ ID NO: 5752871 - DNA, 25 bp, Homo sapien
cttcctcctctcactggcagtcagc

SEQ ID NO: 5752872 - DNA, 25 bp, Homo sapien
cctcccactccctccattgcttcgc

SEQ ID NO: 5752873 - DNA, 25 bp, Homo sapien
gtgtcaaccccctggtctactgctt

SEQ ID NO: 5752874 - DNA, 25 bp, Homo sapien
ggcgggctgccaggggctgttcacc

SEQ ID NO: 5752875 - DNA, 25 bp, Homo sapien
atgggactgagcctggcccatagaa

SEQ ID NO: 5752876 - DNA, 25 bp, Homo sapien
ctaccccgtgtacactgtcgtgcaa

SEQ ID NO: 5752877 - DNA, 25 bp, Homo sapien
ggcctacgggcttatctctcgcgag

SEQ ID NO: 5752878 - DNA, 25 bp, Homo sapien
gggtgtggttatggccgtggcctac

SEQ ID NO: 5752879 - DNA, 25 bp, Homo sapien
ggcaacctcagctgcgagccccctc

SEQ ID NO: 5752880 - DNA, 25 bp, Homo sapien
ttgctgagctacgcctcggcctgtg

SEQ ID NO: 5752881 - DNA, 25 bp, Homo sapien
cctgcctggaaacttgcgctcgctg

SEQ ID NO: 5752882 - DNA, 25 bp, Homo sapien
tgatatgggactgagcctggcccat

SEQ ID NO: 5752883 - DNA, 25 bp, Homo sapien
cagtgacccttcccaatcagcactg

SEQ ID NO: 5752884 - DNA, 25 bp, Homo sapien
tatctctcgcgagctctacttaggg

SEQ ID NO: 5752885 - DNA, 25 bp, Homo sapien
tggagcctggcacaggactgactct

SEQ ID NO: 5752886 - DNA, 25 bp, Homo sapien
ggcctcgtgtgctgcagtgcgtgca

SEQ ID NO: 5752887 - DNA, 25 bp, Homo sapien
aaagcatggactaaccccaacgcac

SEQ ID NO: 5752888 - DNA, 25 bp, Homo sapien
gtttcctacctcatgggggtgtctg

SEQ ID NO: 5752889 - DNA, 25 bp, Homo sapien
aacttgcgctcgctgctgcccccgg

SEQ ID NO: 5752890 - DNA, 25 bp, Homo sapien
gttgccggcctgagactggcgcggt

SEQ ID NO: 5752891 - DNA, 25 bp, Homo sapien
gttaaggaccgtggccctgccctct

SEQ ID NO: 5752892 - DNA, 25 bp, Homo sapien
ccaggccaagctgctggctaagaag

SEQ ID NO: 5752893 - DNA, 25 bp, Homo sapien
cgtcgctttcgccaggcctgcctgg

SEQ ID NO: 5752894 - DNA, 25 bp, Homo sapien
agactggcgcggttggcgaagacag

SEQ ID NO: 5752895 - DNA, 25 bp, Homo sapien
gcgtggtgcgaatgttgctggtgat

SEQ ID NO: 5752896 - DNA, 25 bp, Homo sapien
ctgctgcccccggcctccacgagct

SEQ ID NO: 5752897 - DNA, 25 bp, Homo sapien
gacagtgacagcgacagccaaagca

SEQ ID NO: 5752898 - DNA, 25 bp, Homo sapien
ggcgaagacagcgatggctgctacg

SEQ ID NO: 5752899 - DNA, 25 bp, Homo sapien
ccaacaggctgttctgcactgaaaa

SEQ ID NO: 5752900 - DNA, 25 bp, Homo sapien
ctcctgggccgggatccggctcccg

SEQ ID NO: 5752901 - DNA, 25 bp, Homo sapien
cccagggctcttcccgatgaggacc

SEQ ID NO: 5752902 - DNA, 25 bp, Homo sapien
cagacgcgctcccacgcggctcgcg

SEQ ID NO: 5752903 - DNA, 25 bp, Homo sapien
gttgaggcagggcaaatgacatgca

SEQ ID NO: 5752904 - DNA, 25 bp, Homo sapien
acgcctcggcctgtgtcaaccccct

SEQ ID NO: 5752905 - DNA, 25 bp, Homo sapien
taagaatggagcagtacatgggaaa

SEQ ID NO: 5752906 - DNA, 25 bp, Homo sapien
ggatccggctcccggcccacccagg

SEQ ID NO: 5752907 - DNA, 25 bp, Homo sapien
tcgccaggcctgcctggaaacttgc

SEQ ID NO: 5752908 - DNA, 25 bp, Homo sapien
cacaggactgactctgggatgctcc

SEQ ID NO: 5752909 - DNA, 25 bp, Homo sapien
atcgcactggagcggtacagcgcca

SEQ ID NO: 5752910 - DNA, 25 bp, Homo sapien
tcctgggactgagccgccgcctgag

SEQ ID NO: 5752911 - DNA, 25 bp, Homo sapien
tggtctactgcttcatgcaccgtcg

SEQ ID NO: 5752912 - DNA, 25 bp, Homo sapien
ggctgttctgcactgaaaaggttct

SEQ ID NO: 5752913 - DNA, 25 bp, Homo sapien
ccgtcatctgcaaggcggtttccta

SEQ ID NO: 5752914 - DNA, 25 bp, Homo sapien
ccacaactgacacaggaaaccaaca

SEQ ID NO: 5752915 - DNA, 25 bp, Homo sapien
ccggctcccggcccacccaggccaa

SEQ ID NO: 5752916 - DNA, 25 bp, Homo sapien
aatctcatgggcacattcatctttg

SEQ ID NO: 5752917 - DNA, 25 bp, Homo sapien
caaccccctggtctactgcttcatg

SEQ ID NO: 5752918 - DNA, 25 bp, Homo sapien
tctgcaaggcggtttcctacctcat

SEQ ID NO: 5752919 - DNA, 25 bp, Homo sapien
caaatgacatgcactgacccttcca

SEQ ID NO: 5752920 - DNA, 25 bp, Homo sapien
gggccatggagctgctaaagctgaa

SEQ ID NO: 5752921 - DNA, 25 bp, Homo sapien
cctgctggctgtggcttgcatgccc

SEQ ID NO: 5752922 - DNA, 25 bp, Homo sapien
agaaaacacaaaccacaactgacac

SEQ ID NO: 5752923 - DNA, 25 bp, Homo sapien
gatcgttgtgcttttttttctgtgt

SEQ ID NO: 5752924 - DNA, 25 bp, Homo sapien
tttcgccaggcctgcctggaaactt

SEQ ID NO: 5752925 - DNA, 25 bp, Homo sapien
gtgatcttcctgatgagcgttggag

SEQ ID NO: 5752926 - DNA, 25 bp, Homo sapien
ccttccagacatagaaaacacaaac

SEQ ID NO: 5752927 - DNA, 25 bp, Homo sapien
agacatagaaaacacaaaccacaac

SEQ ID NO: 5752928 - DNA, 25 bp, Homo sapien
tgtgggcaacctcagctgcgagccc

SEQ ID NO: 5752929 - DNA, 25 bp, Homo sapien
tgacaagggctgacctgcctctcac

SEQ ID NO: 5752930 - DNA, 25 bp, Homo sapien
agtttgacctcacagtgacccttcc

SEQ ID NO: 5752931 - DNA, 25 bp, Homo sapien
aaccacaactgacacaggaaaccaa

SEQ ID NO: 5752932 - DNA, 25 bp, Homo sapien
cccatagaaacatgacactgacctt

SEQ ID NO: 5752933 - DNA, 25 bp, Homo sapien
cttcaccctcctgcccaatctcatg

SEQ ID NO: 5752934 - DNA, 25 bp, Homo sapien
ctgcttctgctcttgttcttcatcc

SEQ ID NO: 5752935 - DNA, 25 bp, Homo sapien
tctcactggcagtcagcgacctcct

SEQ ID NO: 5752936 - DNA, 25 bp, Homo sapien
gcaccgtcgctttcgccaggcctgc

SEQ ID NO: 5752937 - DNA, 25 bp, Homo sapien
ttccttacccaaactgttcaagaaa

SEQ ID NO: 5752938 - DNA, 25 bp, Homo sapien
gaaccggagcgtgcagggaaccgga

SEQ ID NO: 5752939 - DNA, 25 bp, Homo sapien
ccggcctgccctggagctgacggcg

SEQ ID NO: 5752940 - DNA, 25 bp, Homo sapien
aagaggaataagaatggagcagtac

SEQ ID NO: 5752941 - DNA, 25 bp, Homo sapien
tcattcacttgctgagctacgcctc

SEQ ID NO: 5752942 - DNA, 25 bp, Homo sapien
tcatgggggtgtctgtgagtgtgtc

SEQ ID NO: 5752943 - DNA, 25 bp, Homo sapien
tcccggcctgccctggagctgacgg

SEQ ID NO: 5752944 - DNA, 25 bp, Homo sapien
cgctcgctgctgcccccggcctcca

SEQ ID NO: 5752945 - DNA, 25 bp, Homo sapien
gacagcgatggctgctacgtgcaac

SEQ ID NO: 5752946 - DNA, 25 bp, Homo sapien
gcgggtccgccagacctggtccgta

SEQ ID NO: 5752947 - DNA, 25 bp, Homo sapien
tggagctgctaaagctgaaccggag

SEQ ID NO: 5752948 - DNA, 25 bp, Homo sapien
ggcctgagactggcgcggttggcga

SEQ ID NO: 5752949 - DNA, 25 bp, Homo sapien
tcgccccagggctcttcccgatgag

SEQ ID NO: 5752950 - DNA, 25 bp, Homo sapien
cggcctccacgagctcgccccaggg

SEQ ID NO: 5752951 - DNA, 25 bp, Homo sapien
cgctttgacggcgacagtgacagcg

SEQ ID NO: 5752952 - DNA, 25 bp, Homo sapien
gtggcttgcatgcccttcaccctcc

SEQ ID NO: 5752953 - DNA, 25 bp, Homo sapien
gacctggtccgtactgctgcttctg

SEQ ID NO: 5752954 - DNA, 25 bp, Homo sapien
ggctgctgtccggactactcatggt

SEQ ID NO: 5752955 - DNA, 25 bp, Homo sapien
cagtgaactatttctacacagtggg

SEQ ID NO: 5752956 - DNA, 25 bp, Homo sapien
aacaggctgttctgcactgaaaagg

SEQ ID NO: 5752957 - DNA, 25 bp, Homo sapien
cagcgtccctagcagtgaactattt

SEQ ID NO: 5752958 - DNA, 25 bp, Homo sapien
agctacaccaccatcagcacactgg

SEQ ID NO: 5752959 - DNA, 25 bp, Homo sapien
gcgttggaggaaatatgctcatcat

SEQ ID NO: 5752960 - DNA, 25 bp, Homo sapien
gctgcccccggcctccacgagctcg

SEQ ID NO: 5752961 - DNA, 25 bp, Homo sapien
cactctcgggtgctcctatctcctt

SEQ ID NO: 5752962 - DNA, 25 bp, Homo sapien
taagaagcgcgtggtgcgaatgttg

SEQ ID NO: 5752963 - DNA, 25 bp, Homo sapien
aacatgacactgaccttggagagac

SEQ ID NO: 5752964 - DNA, 25 bp, Homo sapien
agaatggagcagtacatgggaaagg

SEQ ID NO: 5752965 - DNA, 25 bp, Homo sapien
cggcgggggccatggagctgctaaa

SEQ ID NO: 5752966 - DNA, 25 bp, Homo sapien
cattagaatcactctttacgcagtg

SEQ ID NO: 5752967 - DNA, 25 bp, Homo sapien
attggagctggccattagaatcact

SEQ ID NO: 5752968 - DNA, 25 bp, Homo sapien
ggtgggagcccgccgggtcgagctg

SEQ ID NO: 5752969 - DNA, 25 bp, Homo sapien
gtgtctgtgagtgtgtctacgctaa

SEQ ID NO: 5752970 - DNA, 25 bp, Homo sapien
accttggagagacacagcgtcccta

SEQ ID NO: 5752971 - DNA, 25 bp, Homo sapien
gacggcgctgacggctcctgggccg

SEQ ID NO: 5752972 - DNA, 25 bp, Homo sapien
tggagcagtacatgggaaaggaggc

SEQ ID NO: 5752973 - DNA, 25 bp, Homo sapien
atagaaaacacaaaccacaactgac

SEQ ID NO: 5752974 - DNA, 25 bp, Homo sapien
gcacgagtgtggcagacgcgctccc

SEQ ID NO: 5752975 - DNA, 25 bp, Homo sapien
gcagtacatgggaaaggaggcatgc

SEQ ID NO: 5752976 - DNA, 25 bp, Homo sapien
gtgggaactctgacaagggctgacc

SEQ ID NO: 5752977 - DNA, 25 bp, Homo sapien
tcagcactgaaaataccatcaggcc

SEQ ID NO: 5752978 - DNA, 25 bp, Homo sapien
ccatctgccgaccactgcaggcacg

SEQ ID NO: 5752979 - DNA, 25 bp, Homo sapien
ggtgctcctatctccttcattcact

SEQ ID NO: 5752980 - DNA, 25 bp, Homo sapien
actatggagcctggcacaggactga

SEQ ID NO: 5752981 - DNA, 25 bp, Homo sapien
ctcacacacatagattaatggcact

SEQ ID NO: 5752982 - DNA, 25 bp, Homo sapien
aaggcggcgggctcggcgggggcca

SEQ ID NO: 5752983 - DNA, 25 bp, Homo sapien
ccacccaggccaagctgctggctaa

SEQ ID NO: 5752984 - DNA, 25 bp, Homo sapien
atagtgccaacacgtggcgcgcctt

SEQ ID NO: 5752985 - DNA, 25 bp, Homo sapien
gattgtagccacgtggctgctgtcc

SEQ ID NO: 5752986 - DNA, 25 bp, Homo sapien
ttgacggcgacagtgacagcgacag

SEQ ID NO: 5752987 - DNA, 25 bp, Homo sapien
gggctcttcccgatgaggaccctcc

SEQ ID NO: 5752988 - DNA, 25 bp, Homo sapien
tgcagtgcgtgcatcgctggcccag

SEQ ID NO: 5752989 - DNA, 25 bp, Homo sapien
tagattaatggcactgattgtttta

SEQ ID NO: 5752990 - DNA, 25 bp, Homo sapien
tgttttagagactatggagcctggc

SEQ ID NO: 5752991 - DNA, 25 bp, Homo sapien
tgcaaggcggtttcctacctcatgg

SEQ ID NO: 5752992 - DNA, 25 bp, Homo sapien
ctgcctctcacacacatagattaat

SEQ ID NO: 5752993 - DNA, 25 bp, Homo sapien
aagaaataataaattgtttggcttc

SEQ ID NO: 5752994 - DNA, 25 bp, Homo sapien
ccaaggcgggctgccaggggctgtt

SEQ ID NO: 5752995 - DNA, 25 bp, Homo sapien
cgaagacagcgatggctgctacgtg

SEQ ID NO: 5752996 - DNA, 25 bp, Homo sapien
tcacttgctgagctacgcctcggcc

SEQ ID NO: 5752997 - DNA, 25 bp, Homo sapien
ctgccctctccttccttacccaaac

SEQ ID NO: 5752998 - DNA, 25 bp, Homo sapien
ggttggcgaagacagcgatggctgc

SEQ ID NO: 5752999 - DNA, 25 bp, Homo sapien
cgtgtacactgtcgtgcaaccagtg

SEQ ID NO: 5753000 - DNA, 25 bp, Homo sapien
agcactctcgggtgctcctatctcc

SEQ ID NO: 5753001 - DNA, 25 bp, Homo sapien
ggcaccgtcatctgcaaggcggttt

SEQ ID NO: 5753002 - DNA, 25 bp, Homo sapien
cgtggcgcgcctttgatggcccggg

SEQ ID NO: 5753003 - DNA, 25 bp, Homo sapien
gtcatctgcaaggcggtttcctacc

SEQ ID NO: 5753004 - DNA, 25 bp, Homo sapien
ctcacagtgacccttcccaatcagc

SEQ ID NO: 5753005 - DNA, 25 bp, Homo sapien
gacagccaaagcagggtccgaaacc

SEQ ID NO: 5753006 - DNA, 25 bp, Homo sapien
tcatctttggcaccgtcatctgcaa

SEQ ID NO: 5753007 - DNA, 25 bp, Homo sapien
tacttagggcttcgctttgacggcg

SEQ ID NO: 5753008 - DNA, 25 bp, Homo sapien
caagctgctggctaagaagcgcgtg

SEQ ID NO: 5753009 - DNA, 25 bp, Homo sapien
atctttggcaccgtcatctgcaagg

SEQ ID NO: 5753010 - DNA, 25 bp, Homo sapien
agtgtgggcaacctcagctgcgagc

SEQ ID NO: 5753011 - DNA, 25 bp, Homo sapien
tgttgctggtgatcgttgtgctttt

SEQ ID NO: 5753012 - DNA, 25 bp, Homo sapien
gcgacagtgacagcgacagccaaag

SEQ ID NO: 5753013 - DNA, 25 bp, Homo sapien
atcatcgtggtcctgggactgagcc

SEQ ID NO: 5753014 - DNA, 25 bp, Homo sapien
gagcagtacatgggaaaggaggcat

SEQ ID NO: 5753015 - DNA, 25 bp, Homo sapien
gtccaggcttagctacaccaccatc

SEQ ID NO: 5753016 - DNA, 25 bp, Homo sapien
cgggacacgagaattggagctggcc

SEQ ID NO: 5753017 - DNA, 25 bp, Homo sapien
tccttcattcacttgctgagctacg

SEQ ID NO: 5753018 - DNA, 25 bp, Homo sapien
tccctccattgcttcgctgtccagg

SEQ ID NO: 5753019 - DNA, 25 bp, Homo sapien
tacacagtgggaactctgacaaggg

SEQ ID NO: 5753020 - DNA, 25 bp, Homo sapien
tctacacagtgggaactctgacaag

SEQ ID NO: 5753021 - DNA, 25 bp, Homo sapien
cgatgaggaccctcccactccctcc

SEQ ID NO: 5753022 - DNA, 25 bp, Homo sapien
aatgacatgcactgacccttccaga

SEQ ID NO: 5753023 - DNA, 25 bp, Homo sapien
gatggcccgggtgcacaccgagcac

SEQ ID NO: 5753024 - DNA, 25 bp, Homo sapien
gggcacattcatctttggcaccgtc

SEQ ID NO: 5753025 - DNA, 25 bp, Homo sapien
gccgggatccggctcccggcccacc

SEQ ID NO: 5753026 - DNA, 25 bp, Homo sapien
tagggcttcgctttgacggcgacag

SEQ ID NO: 5753027 - DNA, 25 bp, Homo sapien
gcggttggcgaagacagcgatggct

SEQ ID NO: 5753028 - DNA, 25 bp, Homo sapien
gtccgaaaccaaggcgggctgccag

SEQ ID NO: 5753029 - DNA, 25 bp, Homo sapien
caccatcagcacactgggccctggc

SEQ ID NO: 5753030 - DNA, 25 bp, Homo sapien
cattcgcggagccgggacacgagaa

SEQ ID NO: 5753031 - DNA, 25 bp, Homo sapien
gctcgccccagggctcttcccgatg

SEQ ID NO: 5753032 - DNA, 25 bp, Homo sapien
catgacactgaccttggagagacac

SEQ ID NO: 5753033 - DNA, 25 bp, Homo sapien
acaccgagcactctcgggtgctcct

SEQ ID NO: 5753034 - DNA, 25 bp, Homo sapien
tgacggctcctgggccgggatccgg

SEQ ID NO: 5753035 - DNA, 25 bp, Homo sapien
gacggcgacagtgacagcgacagcc

SEQ ID NO: 5753036 - DNA, 25 bp, Homo sapien
gagcgttggaggaaatatgctcatc

SEQ ID NO: 5753037 - DNA, 25 bp, Homo sapien
gagcctggcccatagaaacatgaca

SEQ ID NO: 5753038 - DNA, 25 bp, Homo sapien
tgcgctcgctgctgcccccggcctc

SEQ ID NO: 5753039 - DNA, 25 bp, Homo sapien
ccctgccctctccttccttacccaa

SEQ ID NO: 5753040 - DNA, 25 bp, Homo sapien
gaggaccctcccactccctccattg

SEQ ID NO: 5753041 - DNA, 25 bp, Homo sapien
ggtgccctaccccgtgtacactgtc

SEQ ID NO: 5753042 - DNA, 25 bp, Homo sapien
accgagcactctcgggtgctcctat

SEQ ID NO: 5753043 - DNA, 25 bp, Homo sapien
acccttccagacatagaaaacacaa

SEQ ID NO: 5753044 - DNA, 25 bp, Homo sapien
tacctgacacaagaggaataagaat

SEQ ID NO: 5753045 - DNA, 25 bp, Homo sapien
tgcaaccagtggggcctcgtgtgct

SEQ ID NO: 5753046 - DNA, 25 bp, Homo sapien
gacacaggaaaccaacacccaaagc

SEQ ID NO: 5753047 - DNA, 25 bp, Homo sapien
ctcgggtgctcctatctccttcatt

SEQ ID NO: 5753048 - DNA, 25 bp, Homo sapien
tctcgcgagctctacttagggcttc

SEQ ID NO: 5753049 - DNA, 25 bp, Homo sapien
ctgctcttgttcttcatcccgggtg

SEQ ID NO: 5753050 - DNA, 25 bp, Homo sapien
acacgagaattggagctggccatta

SEQ ID NO: 5753051 - DNA, 25 bp, Homo sapien
cactgaaaataccatcaggcctaat

SEQ ID NO: 5753052 - DNA, 25 bp, Homo sapien
ccgcctgaggactgtcaccaatgcc

SEQ ID NO: 5753053 - DNA, 25 bp, Homo sapien
ggcttgcatgcccttcaccctcctg

SEQ ID NO: 5753054 - DNA, 25 bp, Homo sapien
ccgtactgctgcttctgctcttgtt

SEQ ID NO: 5753055 - DNA, 25 bp, Homo sapien
gaccgtggccctgccctctccttcc

SEQ ID NO: 5753056 - DNA, 25 bp, Homo sapien
gagccgccgcctgaggactgtcacc

SEQ ID NO: 5753057 - DNA, 25 bp, Homo sapien
cttgcgctcgctgctgcccccggcc

SEQ ID NO: 5753058 - DNA, 25 bp, Homo sapien
tggagagacacagcgtccctagcag

SEQ ID NO: 5753059 - DNA, 25 bp, Homo sapien
cgcggctcgcgtgattgtagccacg

SEQ ID NO: 5753060 - DNA, 25 bp, Homo sapien
tgtcaccaatgccttcctcctctca

SEQ ID NO: 5753061 - DNA, 25 bp, Homo sapien
cccacgcggctcgcgtgattgtagc

SEQ ID NO: 5753062 - DNA, 25 bp, Homo sapien
cctgccctggagctgacggcgctga

SEQ ID NO: 5753063 - DNA, 25 bp, Homo sapien
ccagacatagaaaacacaaaccaca

SEQ ID NO: 5753064 - DNA, 25 bp, Homo sapien
tcccactccctccattgcttcgctg

SEQ ID NO: 5753065 - DNA, 25 bp, Homo sapien
gtctactgcttcatgcaccgtcgct

SEQ ID NO: 5753066 - DNA, 25 bp, Homo sapien
aatggagcagtacatgggaaaggag

SEQ ID NO: 5753067 - DNA, 25 bp, Homo sapien
tcaccaatgccttcctcctctcact

SEQ ID NO: 5753068 - DNA, 25 bp, Homo sapien
tgccctggagctgacggcgctgacg

SEQ ID NO: 5753069 - DNA, 25 bp, Homo sapien
agctacgcctcggcctgtgtcaacc

SEQ ID NO: 5753070 - DNA, 25 bp, Homo sapien
cttcattcacttgctgagctacgcc

SEQ ID NO: 5753071 - DNA, 25 bp, Homo sapien
accaccatcagcacactgggccctg

SEQ ID NO: 5753072 - DNA, 25 bp, Homo sapien
agctgacggcgctgacggctcctgg

SEQ ID NO: 5753073 - DNA, 25 bp, Homo sapien
actctgggatgctcctagtttgacc

SEQ ID NO: 5753074 - DNA, 25 bp, Homo sapien
aacacgtggcgcgcctttgatggcc

SEQ ID NO: 5753075 - DNA, 25 bp, Homo sapien
aagcgcgtggtgcgaatgttgctgg

SEQ ID NO: 5753076 - DNA, 25 bp, Homo sapien
gcagggcaaatgacatgcactgacc

SEQ ID NO: 5753077 - DNA, 25 bp, Homo sapien
ccatcagcacactgggccctggctg

SEQ ID NO: 5753078 - DNA, 25 bp, Homo sapien
ctgagccgccgcctgaggactgtca

SEQ ID NO: 5753079 - DNA, 25 bp, Homo sapien
accctcccactccctccattgcttc

SEQ ID NO: 5753080 - DNA, 25 bp, Homo sapien
gccctctccttccttacccaaactg

SEQ ID NO: 5753081 - DNA, 25 bp, Homo sapien
gtactgctgcttctgctcttgttct

SEQ ID NO: 5753082 - DNA, 25 bp, Homo sapien
cgggctgccaggggctgttcaccag

SEQ ID NO: 5753083 - DNA, 25 bp, Homo sapien
cagtgcgcgggtccgccagacctgg

SEQ ID NO: 5753084 - DNA, 25 bp, Homo sapien
ttggcaccgtcatctgcaaggcggt

SEQ ID NO: 5753085 - DNA, 25 bp, Homo sapien
gagctctacttagggcttcgctttg

SEQ ID NO: 5753086 - DNA, 25 bp, Homo sapien
gacccttcccaatcagcactgaaaa

SEQ ID NO: 5753087 - DNA, 25 bp, Homo sapien
gctgctaaagctgaaccggagcgtg

SEQ ID NO: 5753088 - DNA, 25 bp, Homo sapien
agcggtacagcgccatctgccgacc

SEQ ID NO: 5753089 - DNA, 25 bp, Homo sapien
gtgggggttgaggcagggcaaatga

SEQ ID NO: 5753090 - DNA, 25 bp, Homo sapien
gtggtgcgaatgttgctggtgatcg

SEQ ID NO: 5753091 - DNA, 25 bp, Homo sapien
tgggatgctcctagtttgacctcac

SEQ ID NO: 5753092 - DNA, 25 bp, Homo sapien
gctggctaagaagcgcgtggtgcga

SEQ ID NO: 5753093 - DNA, 25 bp, Homo sapien
ggaaatatgctcatcatcgtggtcc

SEQ ID NO: 5753094 - DNA, 25 bp, Homo sapien
ccctagcagtgaactatttctacac

SEQ ID NO: 5753095 - DNA, 25 bp, Homo sapien
gttcttcatcccgggtgtggttatg

SEQ ID NO: 5753096 - DNA, 25 bp, Homo sapien
cttacctgacacaagaggaataaga

SEQ ID NO: 5753097 - DNA, 25 bp, Homo sapien
ctttgacggcgacagtgacagcgac

SEQ ID NO: 5753098 - DNA, 25 bp, Homo sapien
aaatatgctcatcatcgtggtcctg

SEQ ID NO: 5753099 - DNA, 25 bp, Homo sapien
cagtgacagcgacagccaaagcagg

SEQ ID NO: 5753100 - DNA, 25 bp, Homo sapien
ctacgcctcggcctgtgtcaacccc

SEQ ID NO: 5753101 - DNA, 25 bp, Homo sapien
ttcctacctcatgggggtgtctgtg

SEQ ID NO: 5753102 - DNA, 25 bp, Homo sapien
cgggatccggctcccggcccaccca

SEQ ID NO: 5753103 - DNA, 25 bp, Homo sapien
tccagttaaggaccgtggccctgcc

SEQ ID NO: 5753104 - DNA, 25 bp, Homo sapien
accactgcaggcacgagtgtggcag

SEQ ID NO: 5753105 - DNA, 25 bp, Homo sapien
ccgtgggggttgaggcagggcaaat

SEQ ID NO: 5753106 - DNA, 25 bp, Homo sapien
tgcctctgatatgggactgagcctg

SEQ ID NO: 5753107 - DNA, 25 bp, Homo sapien
cacacacatagattaatggcactga

SEQ ID NO: 5753108 - DNA, 25 bp, Homo sapien
accccgtgtacactgtcgtgcaacc

SEQ ID NO: 5753109 - DNA, 25 bp, Homo sapien
aatgttgctggtgatcgttgtgctt

SEQ ID NO: 5753110 - DNA, 25 bp, Homo sapien
cagaacgggcgttgccggcctgaga

SEQ ID NO: 5753111 - DNA, 25 bp, Homo sapien
tctgtgttggttgccagtttatagt

SEQ ID NO: 5753112 - DNA, 25 bp, Homo sapien
gcacaccgagcactctcgggtgctc

SEQ ID NO: 5753113 - DNA, 25 bp, Homo sapien
gggcttcgctttgacggcgacagtg

SEQ ID NO: 5753114 - DNA, 25 bp, Homo sapien
aggtagcttacctgacacaagagga

SEQ ID NO: 5753115 - DNA, 25 bp, Homo sapien
tagaaacatgacactgaccttggag

SEQ ID NO: 5753116 - DNA, 25 bp, Homo sapien
gccgggacacgagaattggagctgg

SEQ ID NO: 5753117 - DNA, 25 bp, Homo sapien
ggccgtggcctacgggcttatctct

SEQ ID NO: 5753118 - DNA, 25 bp, Homo sapien
gacgcgctcccacgcggctcgcgtg

SEQ ID NO: 5753119 - DNA, 25 bp, Homo sapien
tgacctcacagtgacccttcccaat

SEQ ID NO: 5753120 - DNA, 25 bp, Homo sapien
aagacagcgatggctgctacgtgca

SEQ ID NO: 5753121 - DNA, 25 bp, Homo sapien
gccccagggctcttcccgatgagga

SEQ ID NO: 5753122 - DNA, 25 bp, Homo sapien
ttgccagtttatagtgccaacacgt

SEQ ID NO: 5753123 - DNA, 25 bp, Homo sapien
actgacccttccagacatagaaaac

SEQ ID NO: 5753124 - DNA, 25 bp, Homo sapien
ctgtgagtgtgtctacgctaagcct

SEQ ID NO: 5753125 - DNA, 25 bp, Homo sapien
cccagtgcgcgggtccgccagacct

SEQ ID NO: 5753126 - DNA, 25 bp, Homo sapien
tctacttagggcttcgctttgacgg

SEQ ID NO: 5753127 - DNA, 25 bp, Homo sapien
gcgcgcctttgatggcccgggtgca

SEQ ID NO: 5753128 - DNA, 25 bp, Homo sapien
gctaagcctcgtggccatcgcactg

SEQ ID NO: 5753129 - DNA, 25 bp, Homo sapien
gtggggcctcgtgtgctgcagtgcg

SEQ ID NO: 5753130 - DNA, 25 bp, Homo sapien
aatcactctttacgcagtgatcttc

SEQ ID NO: 5753131 - DNA, 25 bp, Homo sapien
tacgggcttatctctcgcgagctct

SEQ ID NO: 5753132 - DNA, 25 bp, Homo sapien
tatggagcctggcacaggactgact

SEQ ID NO: 5753133 - DNA, 25 bp, Homo sapien
gtgcatcgctggcccagtgcgcggg

SEQ ID NO: 5753134 - DNA, 25 bp, Homo sapien
tgccaacacgtggcgcgcctttgat

SEQ ID NO: 5753135 - DNA, 25 bp, Homo sapien
tcgtgtgctgcagtgcgtgcatcgc

SEQ ID NO: 5753136 - DNA, 25 bp, Homo sapien
catctgcaaggcggtttcctacctc

SEQ ID NO: 5753137 - DNA, 25 bp, Homo sapien
ccgcggtgggagcccgccgggtcga

SEQ ID NO: 5753138 - DNA, 25 bp, Homo sapien
ggactgtcaccaatgccttcctcct

SEQ ID NO: 5753139 - DNA, 25 bp, Homo sapien
gactgagcctggcccatagaaacat

SEQ ID NO: 5753140 - DNA, 25 bp, Homo sapien
tcgctttcgccaggcctgcctggaa

SEQ ID NO: 5753141 - DNA, 25 bp, Homo sapien
gaccaacaggctgttctgcactgaa

SEQ ID NO: 5753142 - DNA, 25 bp, Homo sapien
ggggcgcctctcctcaacagcagca

SEQ ID NO: 5753143 - DNA, 25 bp, Homo sapien
ggccatcgcactggagcggtacagc

SEQ ID NO: 5753144 - DNA, 25 bp, Homo sapien
ttgttcttcatcccgggtgtggtta

SEQ ID NO: 5753145 - DNA, 25 bp, Homo sapien
agctgctggctaagaagcgcgtggt

SEQ ID NO: 5753146 - DNA, 25 bp, Homo sapien
ctgcccaatctcatgggcacattca

SEQ ID NO: 5753147 - DNA, 25 bp, Homo sapien
caacctcagctgcgagccccctcgc

SEQ ID NO: 5753148 - DNA, 25 bp, Homo sapien
agaagcgcgtggtgcgaatgttgct

SEQ ID NO: 5753149 - DNA, 25 bp, Homo sapien
gtcgtgcaaccagtggggcctcgtg

SEQ ID NO: 5753150 - DNA, 25 bp, Homo sapien
gagtaaggcggcgggctcggcgggg

SEQ ID NO: 5753151 - DNA, 25 bp, Homo sapien
acggctcctgggccgggatccggct

SEQ ID NO: 5753152 - DNA, 25 bp, Homo sapien
ggcatgcctctgatatgggactgag

SEQ ID NO: 5753153 - DNA, 25 bp, Homo sapien
gagaattggagctggccattagaat

SEQ ID NO: 5753154 - DNA, 25 bp, Homo sapien
agactatggagcctggcacaggact

SEQ ID NO: 5753155 - DNA, 25 bp, Homo sapien
gcgggggccatggagctgctaaagc

SEQ ID NO: 5753156 - DNA, 25 bp, Homo sapien
catggagctgctaaagctgaaccgg

SEQ ID NO: 5753157 - DNA, 25 bp, Homo sapien
gccagtttatagtgccaacacgtgg

SEQ ID NO: 5753158 - DNA, 25 bp, Homo sapien
gcgtgcatcgctggcccagtgcgcg

SEQ ID NO: 5753159 - DNA, 25 bp, Homo sapien
acaagaggaataagaatggagcagt

SEQ ID NO: 5753160 - DNA, 25 bp, Homo sapien
cgcggagccgggacacgagaattgg

SEQ ID NO: 5753161 - DNA, 25 bp, Homo sapien
accccaacgcacaggaaaaggtagc

SEQ ID NO: 5753162 - DNA, 25 bp, Homo sapien
cctctgatatgggactgagcctggc

SEQ ID NO: 5753163 - DNA, 25 bp, Homo sapien
tgtgcttttttttctgtgttggttg

SEQ ID NO: 5753164 - DNA, 25 bp, Homo sapien
gcgtgcagggaaccggacccgggcc

SEQ ID NO: 5753165 - DNA, 25 bp, Homo sapien
cagcgatggctgctacgtgcaactt

SEQ ID NO: 5753166 - DNA, 25 bp, Homo sapien
tcagcgacctcctgctggctgtggc

SEQ ID NO: 5753167 - DNA, 25 bp, Homo sapien
ccctgtgccgcccgggggcgcctct

SEQ ID NO: 5753168 - DNA, 25 bp, Homo sapien
ttacccaaactgttcaagaaataat

SEQ ID NO: 5753169 - DNA, 25 bp, Homo sapien
ttgatggcccgggtgcacaccgagc

SEQ ID NO: 5753170 - DNA, 25 bp, Homo sapien
ctgacggcgctgacggctcctgggc

SEQ ID NO: 5753171 - DNA, 25 bp, Homo sapien
acccaaagcatggactaaccccaac

SEQ ID NO: 5753172 - DNA, 25 bp, Homo sapien
gccttcctcctctcactggcagtca

SEQ ID NO: 5753173 - DNA, 25 bp, Homo sapien
agccacgtggctgctgtccggacta

SEQ ID NO: 5753174 - DNA, 25 bp, Homo sapien
cgaccactgcaggcacgagtgtggc

SEQ ID NO: 5753175 - DNA, 25 bp, Homo sapien
ctgacacaggaaaccaacacccaaa

SEQ ID NO: 5753176 - DNA, 25 bp, Homo sapien
gtgagtgtgtctacgctaagcctcg

SEQ ID NO: 5753177 - DNA, 25 bp, Homo sapien
ctgccgaccactgcaggcacgagtg

SEQ ID NO: 5753178 - DNA, 25 bp, Homo sapien
ggttatggccgtggcctacgggctt

SEQ ID NO: 5753179 - DNA, 25 bp, Homo sapien
cctcgtggccatcgcactggagcgg

SEQ ID NO: 5753180 - DNA, 25 bp, Homo sapien
acacccaaagcatggactaacccca

SEQ ID NO: 5753181 - DNA, 25 bp, Homo sapien
ctccacgagctcgccccagggctct

SEQ ID NO: 5753182 - DNA, 25 bp, Homo sapien
acagcgccatctgccgaccactgca

SEQ ID NO: 5753183 - DNA, 25 bp, Homo sapien
cagtttatagtgccaacacgtggcg

SEQ ID NO: 5753184 - DNA, 25 bp, Homo sapien
tgatgagcgttggaggaaatatgct

SEQ ID NO: 5753185 - DNA, 25 bp, Homo sapien
ttcatcccgggtgtggttatggccg

SEQ ID NO: 5753186 - DNA, 25 bp, Homo sapien
tcctcaacagcagcagtgtgggcaa

SEQ ID NO: 5753187 - DNA, 25 bp, Homo sapien
catgcctctgatatgggactgagcc

SEQ ID NO: 5753188 - DNA, 25 bp, Homo sapien
catgcccttcaccctcctgcccaat

SEQ ID NO: 5753189 - DNA, 25 bp, Homo sapien
cacgtggcgcgcctttgatggcccg

SEQ ID NO: 5753190 - DNA, 25 bp, Homo sapien
tcgcgagctctacttagggcttcgc

SEQ ID NO: 5753191 - DNA, 25 bp, Homo sapien
acactgggccctggctgaggagtag

SEQ ID NO: 5753192 - DNA, 25 bp, Homo sapien
cggcgctgacggctcctgggccggg

SEQ ID NO: 5753193 - DNA, 25 bp, Homo sapien
cctatctccttcattcacttgctga

SEQ ID NO: 5753194 - DNA, 25 bp, Homo sapien
gcctggcccatagaaacatgacact

SEQ ID NO: 5753195 - DNA, 25 bp, Homo sapien
cctctcactggcagtcagcgacctc

SEQ ID NO: 5753196 - DNA, 25 bp, Homo sapien
tctctcgcgagctctacttagggct

SEQ ID NO: 5753197 - DNA, 25 bp, Homo sapien
ggttgccagtttatagtgccaacac

SEQ ID NO: 5753198 - DNA, 25 bp, Homo sapien
gcgatggctgctacgtgcaacttcc

SEQ ID NO: 5753199 - DNA, 25 bp, Homo sapien
caggcctgcctggaaacttgcgctc

SEQ ID NO: 5753200 - DNA, 25 bp, Homo sapien
ccgggtcgagctgagtaaggcggcg

SEQ ID NO: 5753201 - DNA, 25 bp, Homo sapien
gccatggagctgctaaagctgaacc

SEQ ID NO: 5753202 - DNA, 25 bp, Homo sapien
cagggtccgaaaccaaggcgggctg

SEQ ID NO: 5753203 - DNA, 25 bp, Homo sapien
cccggcctccacgagctcgccccag

SEQ ID NO: 5753204 - DNA, 25 bp, Homo sapien
ttagagactatggagcctggcacag

SEQ ID NO: 5753205 - DNA, 25 bp, Homo sapien
gtggttatggccgtggcctacgggc

SEQ ID NO: 5753206 - DNA, 25 bp, Homo sapien
acaggaaaaggtagcttacctgaca

SEQ ID NO: 5753207 - DNA, 25 bp, Homo sapien
actgtcaccaatgccttcctcctct

SEQ ID NO: 5753208 - DNA, 25 bp, Homo sapien
acattcatctttggcaccgtcatct

SEQ ID NO: 5753209 - DNA, 25 bp, Homo sapien
atatgggactgagcctggcccatag

SEQ ID NO: 5753210 - DNA, 25 bp, Homo sapien
tgacacaagaggaataagaatggag

SEQ ID NO: 5753211 - DNA, 25 bp, Homo sapien
gtggcagacgcgctcccacgcggct

SEQ ID NO: 5753212 - DNA, 25 bp, Homo sapien
tgcactgaaaaggttcttcatccct

SEQ ID NO: 5753213 - DNA, 25 bp, Homo sapien
tcatcatcgtggtcctgggactgag

SEQ ID NO: 5753214 - DNA, 25 bp, Homo sapien
gcactgattgttttagagactatgg

SEQ ID NO: 5753215 - DNA, 25 bp, Homo sapien
gggggccatggagctgctaaagctg

SEQ ID NO: 5753216 - DNA, 25 bp, Homo sapien
tctttacgcagtgatcttcctgatg

SEQ ID NO: 5753217 - DNA, 25 bp, Homo sapien
gagccgggacacgagaattggagct

SEQ ID NO: 5753218 - DNA, 25 bp, Homo sapien
tgacccttccagacatagaaaacac

SEQ ID NO: 5753219 - DNA, 25 bp, Homo sapien
tgacactgaccttggagagacacag

SEQ ID NO: 5753220 - DNA, 25 bp, Homo sapien
gcttcgctttgacggcgacagtgac

SEQ ID NO: 5753221 - DNA, 25 bp, Homo sapien
caaaccacaactgacacaggaaacc

SEQ ID NO: 5753222 - DNA, 25 bp, Homo sapien
cccggcccacccaggccaagctgct

SEQ ID NO: 5753223 - DNA, 25 bp, Homo sapien
gggcgttgccggcctgagactggcg

SEQ ID NO: 5753224 - DNA, 25 bp, Homo sapien
gccaggcctgcctggaaacttgcgc

SEQ ID NO: 5753225 - DNA, 25 bp, Homo sapien
gcgacagccaaagcagggtccgaaa

SEQ ID NO: 5753226 - DNA, 25 bp, Homo sapien
ggggcctcgtgtgctgcagtgcgtg

SEQ ID NO: 5753227 - DNA, 25 bp, Homo sapien
ccgggtgcacaccgagcactctcgg

SEQ ID NO: 5753228 - DNA, 25 bp, Homo sapien
tgaccttggagagacacagcgtccc

SEQ ID NO: 5753229 - DNA, 25 bp, Homo sapien
gccgccgcctgaggactgtcaccaa

SEQ ID NO: 5753230 - DNA, 25 bp, Homo sapien
gtaaggcggcgggctcggcgggggc

SEQ ID NO: 5753231 - DNA, 25 bp, Homo sapien
gtagcttacctgacacaagaggaat

SEQ ID NO: 5753232 - DNA, 25 bp, Homo sapien
cgccatctgccgaccactgcaggca

SEQ ID NO: 5753233 - DNA, 25 bp, Homo sapien
gtgcaacttccacgttcccggcctg

SEQ ID NO: 5753234 - DNA, 25 bp, Homo sapien
gcgtccctagcagtgaactatttct

SEQ ID NO: 5753235 - DNA, 25 bp, Homo sapien
gttcccggcctgccctggagctgac

SEQ ID NO: 5753236 - DNA, 25 bp, Homo sapien
cggtttcctacctcatgggggtgtc

SEQ ID NO: 5753237 - DNA, 25 bp, Homo sapien
gtgctgcagtgcgtgcatcgctggc

SEQ ID NO: 5753238 - DNA, 25 bp, Homo sapien
agctgaaccggagcgtgcagggaac

SEQ ID NO: 5753239 - DNA, 25 bp, Homo sapien
acgagtgtggcagacgcgctcccac

SEQ ID NO: 5753240 - DNA, 25 bp, Homo sapien
acactgaccttggagagacacagcg

SEQ ID NO: 5753241 - DNA, 25 bp, Homo sapien
gtgacagcgacagccaaagcagggt

SEQ ID NO: 5753242 - DNA, 25 bp, Homo sapien
cgggtgctcctatctccttcattca

SEQ ID NO: 5753243 - DNA, 25 bp, Homo sapien
actgaccttggagagacacagcgtc

SEQ ID NO: 5753244 - DNA, 25 bp, Homo sapien
cttttttttctgtgttggttgccag

SEQ ID NO: 5753245 - DNA, 25 bp, Homo sapien
gattaatggcactgattgttttaga

SEQ ID NO: 5753246 - DNA, 25 bp, Homo sapien
ttctgctcttgttcttcatcccggg

SEQ ID NO: 5753247 - DNA, 25 bp, Homo sapien
gcgcggttggcgaagacagcgatgg

SEQ ID NO: 5753248 - DNA, 25 bp, Homo sapien
tatttctacacagtgggaactctga

SEQ ID NO: 5753249 - DNA, 25 bp, Homo sapien
gctgacctgcctctcacacacatag

SEQ ID NO: 5753250 - DNA, 25 bp, Homo sapien
gagtgtgtctacgctaagcctcgtg

SEQ ID NO: 5753251 - DNA, 25 bp, Homo sapien
gactactcatggtgccctaccccgt

SEQ ID NO: 5753252 - DNA, 25 bp, Homo sapien
ctacgctaagcctcgtggccatcgc

SEQ ID NO: 5753253 - DNA, 25 bp, Homo sapien
tggtgatcgttgtgcttttttttct

SEQ ID NO: 5753254 - DNA, 25 bp, Homo sapien
gctgtccggactactcatggtgccc

SEQ ID NO: 5753255 - DNA, 25 bp, Homo sapien
tgggaaaggaggcatgcctctgata

SEQ ID NO: 5753256 - DNA, 25 bp, Homo sapien
tcaccagaacgggcgttgccggcct

SEQ ID NO: 5753257 - DNA, 25 bp, Homo sapien
gatcttcctgatgagcgttggagga

SEQ ID NO: 5753258 - DNA, 25 bp, Homo sapien
tatctccttcattcacttgctgagc

SEQ ID NO: 5753259 - DNA, 25 bp, Homo sapien
ttgtagccacgtggctgctgtccgg

SEQ ID NO: 5753260 - DNA, 25 bp, Homo sapien
gtgtggcagacgcgctcccacgcgg

SEQ ID NO: 5753261 - DNA, 25 bp, Homo sapien
tgctggctgtggcttgcatgccctt

SEQ ID NO: 5753262 - DNA, 25 bp, Homo sapien
ccctcgcattcgcggagccgggaca

SEQ ID NO: 5753263 - DNA, 25 bp, Homo sapien
cctgacacaagaggaataagaatgg

SEQ ID NO: 5753264 - DNA, 25 bp, Homo sapien
cccccggcctccacgagctcgcccc

SEQ ID NO: 5753265 - DNA, 25 bp, Homo sapien
ctgggactgagccgccgcctgagga

SEQ ID NO: 5753266 - DNA, 25 bp, Homo sapien
tgtgttggttgccagtttatagtgc

SEQ ID NO: 5753267 - DNA, 25 bp, Homo sapien
cgtgcaaccagtggggcctcgtgtg

SEQ ID NO: 5753268 - DNA, 25 bp, Homo sapien
gctttcgccaggcctgcctggaaac

SEQ ID NO: 5753269 - DNA, 25 bp, Homo sapien
ctcccggcccacccaggccaagctg

SEQ ID NO: 5753270 - DNA, 25 bp, Homo sapien
cgctcccacgcggctcgcgtgattg

SEQ ID NO: 5753271 - DNA, 25 bp, Homo sapien
tcatgggcacattcatctttggcac

SEQ ID NO: 5753272 - DNA, 25 bp, Homo sapien
cctgggccgggatccggctcccggc

SEQ ID NO: 5753273 - DNA, 25 bp, Homo sapien
cggcgacagtgacagcgacagccaa

SEQ ID NO: 5753274 - DNA, 25 bp, Homo sapien
gggggtgtctgtgagtgtgtctacg

SEQ ID NO: 5753275 - DNA, 25 bp, Homo sapien
ctcggcctgtgtcaaccccctggtc

SEQ ID NO: 5753276 - DNA, 25 bp, Homo sapien
ggtcctgggactgagccgccgcctg

SEQ ID NO: 5753277 - DNA, 25 bp, Homo sapien
acctctgaccaacaggctgttctgc

SEQ ID NO: 5753278 - DNA, 25 bp, Homo sapien
ctacaccaccatcagcacactgggc

SEQ ID NO: 5753279 - DNA, 25 bp, Homo sapien
gaactatttctacacagtgggaact

SEQ ID NO: 5753280 - DNA, 25 bp, Homo sapien
gctggccattagaatcactctttac

SEQ ID NO: 5753281 - DNA, 25 bp, Homo sapien
gcaacttccacgttcccggcctgcc

SEQ ID NO: 5753282 - DNA, 25 bp, Homo sapien
gttggaggaaatatgctcatcatcg

SEQ ID NO: 5753283 - DNA, 25 bp, Homo sapien
gaattggagctggccattagaatca

SEQ ID NO: 5753284 - DNA, 25 bp, Homo sapien
ttttagagactatggagcctggcac

SEQ ID NO: 5753285 - DNA, 25 bp, Homo sapien
agcagtgaactatttctacacagtg

SEQ ID NO: 5753286 - DNA, 25 bp, Homo sapien
cgccgggtcgagctgagtaaggcgg

SEQ ID NO: 5753287 - DNA, 25 bp, Homo sapien
tgcatgcccttcaccctcctgccca

SEQ ID NO: 5753288 - DNA, 25 bp, Homo sapien
ttcccgatgaggaccctcccactcc

SEQ ID NO: 5753289 - DNA, 25 bp, Homo sapien
tggctaagaagcgcgtggtgcgaat

SEQ ID NO: 5753290 - DNA, 25 bp, Homo sapien
tcaggcctaatctcatacctctgac

SEQ ID NO: 5753291 - DNA, 25 bp, Homo sapien
gactaaccccaacgcacaggaaaag

SEQ ID NO: 5753292 - DNA, 25 bp, Homo sapien
acgggcgttgccggcctgagactgg

SEQ ID NO: 5753293 - DNA, 25 bp, Homo sapien
tttccagttaaggaccgtggccctg

SEQ ID NO: 5753294 - DNA, 25 bp, Homo sapien
gaggactgtcaccaatgccttcctc

SEQ ID NO: 5753295 - DNA, 25 bp, Homo sapien
ccgaaaccaaggcgggctgccaggg

SEQ ID NO: 5753296 - DNA, 25 bp, Homo sapien
ggttcttcatccctttccagttaag

SEQ ID NO: 5753297 - DNA, 25 bp, Homo sapien
agcccgccgggtcgagctgagtaag

SEQ ID NO: 5753298 - DNA, 25 bp, Homo sapien
ccgccagacctggtccgtactgctg

SEQ ID NO: 5753299 - DNA, 25 bp, Homo sapien
aggaaaaggtagcttacctgacaca

SEQ ID NO: 5753300 - DNA, 25 bp, Homo sapien
cacacatagattaatggcactgatt

SEQ ID NO: 5753301 - DNA, 25 bp, Homo sapien
gagcctggcacaggactgactctgg

SEQ ID NO: 5753302 - DNA, 25 bp, Homo sapien
ctggcacaggactgactctgggatg

SEQ ID NO: 5753303 - DNA, 25 bp, Homo sapien
acccaggccaagctgctggctaaga

SEQ ID NO: 5753304 - DNA, 25 bp, Homo sapien
gtcgagctgagtaaggcggcgggct

SEQ ID NO: 5753305 - DNA, 25 bp, Homo sapien
gacagcgacagccaaagcagggtcc

SEQ ID NO: 5753306 - DNA, 25 bp, Homo sapien
caatgccttcctcctctcactggca

SEQ ID NO: 5753307 - DNA, 25 bp, Homo sapien
gcacaggaaaaggtagcttacctga

SEQ ID NO: 5753308 - DNA, 25 bp, Homo sapien
accatcaggcctaatctcatacctc

SEQ ID NO: 5753309 - DNA, 25 bp, Homo sapien
ctagtttgacctcacagtgaccctt

SEQ ID NO: 5753310 - DNA, 25 bp, Homo sapien
ccggcctgagactggcgcggttggc

SEQ ID NO: 5753311 - DNA, 25 bp, Homo sapien
atgctcctagtttgacctcacagtg

SEQ ID NO: 5753312 - DNA, 25 bp, Homo sapien
agccccctcgcattcgcggagccgg

SEQ ID NO: 5753313 - DNA, 25 bp, Homo sapien
aaaggaggcatgcctctgatatggg

SEQ ID NO: 5753314 - DNA, 25 bp, Homo sapien
gcctccacgagctcgccccagggct

SEQ ID NO: 5753315 - DNA, 25 bp, Homo sapien
ggagctgacggcgctgacggctcct

SEQ ID NO: 5753316 - DNA, 25 bp, Homo sapien
gttggggttagtccatgctttgggt

SEQ ID NO: 5753317 - DNA, 25 bp, Homo sapien
ccttggtttcggaccctgctttggc

SEQ ID NO: 5753318 - DNA, 25 bp, Homo sapien
cctggacagcgaagcaatggaggga

SEQ ID NO: 5753319 - DNA, 25 bp, Homo sapien
cgccttgcagatgacggtgccaaag

SEQ ID NO: 5753320 - DNA, 25 bp, Homo sapien
gggaacgtggaagttgcacgtagca

SEQ ID NO: 5753321 - DNA, 25 bp, Homo sapien
tcccagagtcagtcctgtgccaggc

SEQ ID NO: 5753322 - DNA, 25 bp, Homo sapien
acaatcagtgccattaatctatgtg

SEQ ID NO: 5753323 - DNA, 25 bp, Homo sapien
aacaagagcagaagcagcagtacgg

SEQ ID NO: 5753324 - DNA, 25 bp, Homo sapien
cacccgggatgaagaacaagagcag

SEQ ID NO: 5753325 - DNA, 25 bp, Homo sapien
agccctaagtagagctcgcgagaga

SEQ ID NO: 5753326 - DNA, 25 bp, Homo sapien
agccctggggcgagctcgtggaggc

SEQ ID NO: 5753327 - DNA, 25 bp, Homo sapien
gctcgacccggcgggctcccaccgc

SEQ ID NO: 5753328 - DNA, 25 bp, Homo sapien
atggtattttcagtgctgattggga

SEQ ID NO: 5753329 - DNA, 25 bp, Homo sapien
agataagcccgtaggccacggccat

SEQ ID NO: 5753330 - DNA, 25 bp, Homo sapien
cctgctttggctgtcgctgtcactg

SEQ ID NO: 5753331 - DNA, 25 bp, Homo sapien
caggctcagtcccatatcagaggca

SEQ ID NO: 5753332 - DNA, 25 bp, Homo sapien
aactggcaaccaacacagaaaaaaa

SEQ ID NO: 5753333 - DNA, 25 bp, Homo sapien
gaagcagcagtacggaccaggtctg

SEQ ID NO: 5753334 - DNA, 25 bp, Homo sapien
gaacagtttgggtaaggaaggagag

SEQ ID NO: 5753335 - DNA, 25 bp, Homo sapien
attatttcttgaacagtttgggtaa

SEQ ID NO: 5753336 - DNA, 25 bp, Homo sapien
cccgggatgaagaacaagagcagaa

SEQ ID NO: 5753337 - DNA, 25 bp, Homo sapien
cgcactgggccagcgatgcacgcac

SEQ ID NO: 5753338 - DNA, 25 bp, Homo sapien
ataggagcacccgagagtgctcggt

SEQ ID NO: 5753339 - DNA, 25 bp, Homo sapien
ccggctccgcgaatgcgagggggct

SEQ ID NO: 5753340 - DNA, 25 bp, Homo sapien
aacgctcatcaggaagatcactgcg

SEQ ID NO: 5753341 - DNA, 25 bp, Homo sapien
ctgttggtcagaggtatgagattag

SEQ ID NO: 5753342 - DNA, 25 bp, Homo sapien
tccggttccctgcacgctccggttc

SEQ ID NO: 5753343 - DNA, 25 bp, Homo sapien
ctggcaaccaacacagaaaaaaaag

SEQ ID NO: 5753344 - DNA, 25 bp, Homo sapien
cagtgctgattgggaagggtcactg

SEQ ID NO: 5753345 - DNA, 25 bp, Homo sapien
actcctcagccagggcccagtgtgc

SEQ ID NO: 5753346 - DNA, 25 bp, Homo sapien
ttagcgtagacacactcacagacac

SEQ ID NO: 5753347 - DNA, 25 bp, Homo sapien
cccatatcagaggcatgcctccttt

SEQ ID NO: 5753348 - DNA, 25 bp, Homo sapien
gagtgctcggtgtgcacccgggcca

SEQ ID NO: 5753349 - DNA, 25 bp, Homo sapien
gcaccacgcgcttcttagccagcag

SEQ ID NO: 5753350 - DNA, 25 bp, Homo sapien
gagccgtcagcgccgtcagctccag

SEQ ID NO: 5753351 - DNA, 25 bp, Homo sapien
taatggccagctccaattctcgtgt

SEQ ID NO: 5753352 - DNA, 25 bp, Homo sapien
gcaagtttccaggcaggcctggcga

SEQ ID NO: 5753353 - DNA, 25 bp, Homo sapien
agattaggcctgatggtattttcag

SEQ ID NO: 5753354 - DNA, 25 bp, Homo sapien
agcaatggagggagtgggagggtcc

SEQ ID NO: 5753355 - DNA, 25 bp, Homo sapien
tgagtagtccggacagcagccacgt

SEQ ID NO: 5753356 - DNA, 25 bp, Homo sapien
agctccaattctcgtgtcccggctc

SEQ ID NO: 5753357 - DNA, 25 bp, Homo sapien
cgatcaccagcaacattcgcaccac

SEQ ID NO: 5753358 - DNA, 25 bp, Homo sapien
tctaatggccagctccaattctcgt

SEQ ID NO: 5753359 - DNA, 25 bp, Homo sapien
agagggcagggccacggtccttaac

SEQ ID NO: 5753360 - DNA, 25 bp, Homo sapien
aagtttccaggcaggcctggcgaaa

SEQ ID NO: 5753361 - DNA, 25 bp, Homo sapien
cgctcatcaggaagatcactgcgta

SEQ ID NO: 5753362 - DNA, 25 bp, Homo sapien
tggctacaatcacgcgagccgcgtg

SEQ ID NO: 5753363 - DNA, 25 bp, Homo sapien
cgacggtgcatgaagcagtagacca

SEQ ID NO: 5753364 - DNA, 25 bp, Homo sapien
accaacacagaaaaaaaagcacaac

SEQ ID NO: 5753365 - DNA, 25 bp, Homo sapien
ttcaggaggaagccaaacaatttat

SEQ ID NO: 5753366 - DNA, 25 bp, Homo sapien
cagtcccatatcagaggcatgcctc

SEQ ID NO: 5753367 - DNA, 25 bp, Homo sapien
atcaccagcaacattcgcaccacgc

SEQ ID NO: 5753368 - DNA, 25 bp, Homo sapien
agaggcatgcctcctttcccatgta

SEQ ID NO: 5753369 - DNA, 25 bp, Homo sapien
tctatgtctggaagggtcagtgcat

SEQ ID NO: 5753370 - DNA, 25 bp, Homo sapien
gccaggctccatagtctctaaaaca

SEQ ID NO: 5753371 - DNA, 25 bp, Homo sapien
ggtcagcccttgtcagagttcccac

SEQ ID NO: 5753372 - DNA, 25 bp, Homo sapien
tttcctccaacgctcatcaggaaga

SEQ ID NO: 5753373 - DNA, 25 bp, Homo sapien
cgaggcttagcgtagacacactcac

SEQ ID NO: 5753374 - DNA, 25 bp, Homo sapien
caacattcgcaccacgcgcttctta

SEQ ID NO: 5753375 - DNA, 25 bp, Homo sapien
gggacgctgtgtctctccaaggtca

SEQ ID NO: 5753376 - DNA, 25 bp, Homo sapien
attgggaagggtcactgtgaggtca

SEQ ID NO: 5753377 - DNA, 25 bp, Homo sapien
gctgtaccgctccagtgcgatggcc

SEQ ID NO: 5753378 - DNA, 25 bp, Homo sapien
gcccaggagccgtcagcgccgtcag

SEQ ID NO: 5753379 - DNA, 25 bp, Homo sapien
cagccagcaggaggtcgctgactgc

SEQ ID NO: 5753380 - DNA, 25 bp, Homo sapien
gcgagggggctcgcagctgaggttg

SEQ ID NO: 5753381 - DNA, 25 bp, Homo sapien
tttagcagctccatggcccccgccg

SEQ ID NO: 5753382 - DNA, 25 bp, Homo sapien
ccaattctcgtgtcccggctccgcg

SEQ ID NO: 5753383 - DNA, 25 bp, Homo sapien
ctaagtagagctcgcgagagataag

SEQ ID NO: 5753384 - DNA, 25 bp, Homo sapien
cttcttagccagcagcttggcctgg

SEQ ID NO: 5753385 - DNA, 25 bp, Homo sapien
aggcaggcctggcgaaagcgacggt

SEQ ID NO: 5753386 - DNA, 25 bp, Homo sapien
cacccccatgaggtaggaaaccgcc

SEQ ID NO: 5753387 - DNA, 25 bp, Homo sapien
ggtttcggaccctgctttggctgtc

SEQ ID NO: 5753388 - DNA, 25 bp, Homo sapien
gcacccgagagtgctcggtgtgcac

SEQ ID NO: 5753389 - DNA, 25 bp, Homo sapien
agcagaagcagcagtacggaccagg

SEQ ID NO: 5753390 - DNA, 25 bp, Homo sapien
ctcgtgtcccggctccgcgaatgcg

SEQ ID NO: 5753391 - DNA, 25 bp, Homo sapien
tcccggctccgcgaatgcgaggggg

SEQ ID NO: 5753392 - DNA, 25 bp, Homo sapien
agaacaagagcagaagcagcagtac

SEQ ID NO: 5753393 - DNA, 25 bp, Homo sapien
cacacgaggccccactggttgcacg

SEQ ID NO: 5753394 - DNA, 25 bp, Homo sapien
acagtcctcaggcggcggctcagtc

SEQ ID NO: 5753395 - DNA, 25 bp, Homo sapien
gaggcgtagctcagcaagtgaatga

SEQ ID NO: 5753396 - DNA, 25 bp, Homo sapien
cgccgccttactcagctcgacccgg

SEQ ID NO: 5753397 - DNA, 25 bp, Homo sapien
cgggatgaagaacaagagcagaagc

SEQ ID NO: 5753398 - DNA, 25 bp, Homo sapien
tcgggaagagccctggggcgagctc

SEQ ID NO: 5753399 - DNA, 25 bp, Homo sapien
tcaggccggcaacgcccgttctggt

SEQ ID NO: 5753400 - DNA, 25 bp, Homo sapien
cgtagcagccatcgctgtcttcgcc

SEQ ID NO: 5753401 - DNA, 25 bp, Homo sapien
gcttagcgtagacacactcacagac

SEQ ID NO: 5753402 - DNA, 25 bp, Homo sapien
aaggcgcgccacgtgttggcactat

SEQ ID NO: 5753403 - DNA, 25 bp, Homo sapien
ctgtcttcgccaaccgcgccagtct

SEQ ID NO: 5753404 - DNA, 25 bp, Homo sapien
agtgggagggtcctcatcgggaaga

SEQ ID NO: 5753405 - DNA, 25 bp, Homo sapien
tgtcagagttcccactgtgtagaaa

SEQ ID NO: 5753406 - DNA, 25 bp, Homo sapien
cagttgtggtttgtgttttctatgt

SEQ ID NO: 5753407 - DNA, 25 bp, Homo sapien
aaagcgacggtgcatgaagcagtag

SEQ ID NO: 5753408 - DNA, 25 bp, Homo sapien
agggcagggccacggtccttaactg

SEQ ID NO: 5753409 - DNA, 25 bp, Homo sapien
aagctaccttttcctgtgcgttggg

SEQ ID NO: 5753410 - DNA, 25 bp, Homo sapien
ctcagccagggcccagtgtgctgat

SEQ ID NO: 5753411 - DNA, 25 bp, Homo sapien
gtttccaggcaggcctggcgaaagc

SEQ ID NO: 5753412 - DNA, 25 bp, Homo sapien
aggaggaaggcattggtgacagtcc

SEQ ID NO: 5753413 - DNA, 25 bp, Homo sapien
acattcgcaccacgcgcttcttagc

SEQ ID NO: 5753414 - DNA, 25 bp, Homo sapien
atgcctcctttcccatgtactgctc

SEQ ID NO: 5753415 - DNA, 25 bp, Homo sapien
gatggccacgaggcttagcgtagac

SEQ ID NO: 5753416 - DNA, 25 bp, Homo sapien
tccatggcccccgccgagcccgccg

SEQ ID NO: 5753417 - DNA, 25 bp, Homo sapien
ggtgacagtcctcaggcggcggctc

SEQ ID NO: 5753418 - DNA, 25 bp, Homo sapien
tgtcatttgccctgcctcaaccccc

SEQ ID NO: 5753419 - DNA, 25 bp, Homo sapien
caggaggaagccaaacaatttatta

SEQ ID NO: 5753420 - DNA, 25 bp, Homo sapien
cgctgtgtctctccaaggtcagtgt

SEQ ID NO: 5753421 - DNA, 25 bp, Homo sapien
ggccagctccaattctcgtgtcccg

SEQ ID NO: 5753422 - DNA, 25 bp, Homo sapien
ctcctttcccatgtactgctccatt

SEQ ID NO: 5753423 - DNA, 25 bp, Homo sapien
tcctccaacgctcatcaggaagatc

SEQ ID NO: 5753424 - DNA, 25 bp, Homo sapien
cgcgcactgggccagcgatgcacgc

SEQ ID NO: 5753425 - DNA, 25 bp, Homo sapien
gtaaggaaggagagggcagggccac

SEQ ID NO: 5753426 - DNA, 25 bp, Homo sapien
aggaagccaaacaatttattatttc

SEQ ID NO: 5753427 - DNA, 25 bp, Homo sapien
ggggtagggcaccatgagtagtccg

SEQ ID NO: 5753428 - DNA, 25 bp, Homo sapien
agcgacggtgcatgaagcagtagac

SEQ ID NO: 5753429 - DNA, 25 bp, Homo sapien
accatgagtagtccggacagcagcc

SEQ ID NO: 5753430 - DNA, 25 bp, Homo sapien
tggcactataaactggcaaccaaca

SEQ ID NO: 5753431 - DNA, 25 bp, Homo sapien
atcaaaggcgcgccacgtgttggca

SEQ ID NO: 5753432 - DNA, 25 bp, Homo sapien
aggaggtcgctgactgccagtgaga

SEQ ID NO: 5753433 - DNA, 25 bp, Homo sapien
cacgcgcttcttagccagcagcttg

SEQ ID NO: 5753434 - DNA, 25 bp, Homo sapien
cctttcccatgtactgctccattct

SEQ ID NO: 5753435 - DNA, 25 bp, Homo sapien
attgggcaggagggtgaagggcatg

SEQ ID NO: 5753436 - DNA, 25 bp, Homo sapien
gcaccatgagtagtccggacagcag

SEQ ID NO: 5753437 - DNA, 25 bp, Homo sapien
ccagggggttgacacaggccgaggc

SEQ ID NO: 5753438 - DNA, 25 bp, Homo sapien
ccatgaggtaggaaaccgccttgca

SEQ ID NO: 5753439 - DNA, 25 bp, Homo sapien
acgtgttggcactataaactggcaa

SEQ ID NO: 5753440 - DNA, 25 bp, Homo sapien
cccttgtcagagttcccactgtgta

SEQ ID NO: 5753441 - DNA, 25 bp, Homo sapien
cgtagacacactcacagacaccccc

SEQ ID NO: 5753442 - DNA, 25 bp, Homo sapien
gccgtcagcgccgtcagctccaggg

SEQ ID NO: 5753443 - DNA, 25 bp, Homo sapien
ctgtgaggtcaaactaggagcatcc

SEQ ID NO: 5753444 - DNA, 25 bp, Homo sapien
gcaagccacagccagcaggaggtcg

SEQ ID NO: 5753445 - DNA, 25 bp, Homo sapien
cccgttctggtgaacagcccctggc

SEQ ID NO: 5753446 - DNA, 25 bp, Homo sapien
catatcagaggcatgcctcctttcc

SEQ ID NO: 5753447 - DNA, 25 bp, Homo sapien
cacagccagcaggaggtcgctgact

SEQ ID NO: 5753448 - DNA, 25 bp, Homo sapien
ccgtcaaagcgaagccctaagtaga

SEQ ID NO: 5753449 - DNA, 25 bp, Homo sapien
ccaacgctcatcaggaagatcactg

SEQ ID NO: 5753450 - DNA, 25 bp, Homo sapien
gtgtgtgagaggcaggtcagccctt

SEQ ID NO: 5753451 - DNA, 25 bp, Homo sapien
agcagccacgtggctacaatcacgc

SEQ ID NO: 5753452 - DNA, 25 bp, Homo sapien
ggtagggcaccatgagtagtccgga

SEQ ID NO: 5753453 - DNA, 25 bp, Homo sapien
cagaagcagcagtacggaccaggtc

SEQ ID NO: 5753454 - DNA, 25 bp, Homo sapien
actaggagcatcccagagtcagtcc

SEQ ID NO: 5753455 - DNA, 25 bp, Homo sapien
aggtaagctaccttttcctgtgcgt

SEQ ID NO: 5753456 - DNA, 25 bp, Homo sapien
tagggcaccatgagtagtccggaca

SEQ ID NO: 5753457 - DNA, 25 bp, Homo sapien
cgcgagagataagcccgtaggccac

SEQ ID NO: 5753458 - DNA, 25 bp, Homo sapien
aagcccgtaggccacggccataacc

SEQ ID NO: 5753459 - DNA, 25 bp, Homo sapien
atcgctgtcttcgccaaccgcgcca

SEQ ID NO: 5753460 - DNA, 25 bp, Homo sapien
tgctgctgttgaggagaggcgcccc

SEQ ID NO: 5753461 - DNA, 25 bp, Homo sapien
tagaccagggggttgacacaggccg

SEQ ID NO: 5753462 - DNA, 25 bp, Homo sapien
gtcgccgtcaaagcgaagccctaag

SEQ ID NO: 5753463 - DNA, 25 bp, Homo sapien
gcccccgccgagcccgccgccttac

SEQ ID NO: 5753464 - DNA, 25 bp, Homo sapien
tactcagctcgacccggcgggctcc

SEQ ID NO: 5753465 - DNA, 25 bp, Homo sapien
gacccgcgcactgggccagcgatgc

SEQ ID NO: 5753466 - DNA, 25 bp, Homo sapien
agatcactgcgtaaagagtgattct

SEQ ID NO: 5753467 - DNA, 25 bp, Homo sapien
gtgggagcgcgtctgccacactcgt

SEQ ID NO: 5753468 - DNA, 25 bp, Homo sapien
tataaactggcaaccaacacagaaa

SEQ ID NO: 5753469 - DNA, 25 bp, Homo sapien
agagccctggggcgagctcgtggag

SEQ ID NO: 5753470 - DNA, 25 bp, Homo sapien
acacagaaaaaaaagcacaacgatc

SEQ ID NO: 5753471 - DNA, 25 bp, Homo sapien
tggtggtgtagctaagcctggacag

SEQ ID NO: 5753472 - DNA, 25 bp, Homo sapien
cggacccgcgcactgggccagcgat

SEQ ID NO: 5753473 - DNA, 25 bp, Homo sapien
ggagataggagcacccgagagtgct

SEQ ID NO: 5753474 - DNA, 25 bp, Homo sapien
ctccatagtctctaaaacaatcagt

SEQ ID NO: 5753475 - DNA, 25 bp, Homo sapien
tgaacagcccctggcagcccgcctt

SEQ ID NO: 5753476 - DNA, 25 bp, Homo sapien
ccagcaacattcgcaccacgcgctt

SEQ ID NO: 5753477 - DNA, 25 bp, Homo sapien
atgcaagccacagccagcaggaggt

SEQ ID NO: 5753478 - DNA, 25 bp, Homo sapien
gtgtgagaggcaggtcagcccttgt

SEQ ID NO: 5753479 - DNA, 25 bp, Homo sapien
tgagattgggcaggagggtgaaggg

SEQ ID NO: 5753480 - DNA, 25 bp, Homo sapien
tgcacccgggccatcaaaggcgcgc

SEQ ID NO: 5753481 - DNA, 25 bp, Homo sapien
ctgtcgctgtcactgtcgccgtcaa

SEQ ID NO: 5753482 - DNA, 25 bp, Homo sapien
cactgggccagcgatgcacgcactg

SEQ ID NO: 5753483 - DNA, 25 bp, Homo sapien
gggcagcagcgagcgcaagtttcca

SEQ ID NO: 5753484 - DNA, 25 bp, Homo sapien
catcaggaagatcactgcgtaaaga

SEQ ID NO: 5753485 - DNA, 25 bp, Homo sapien
tctaaaacaatcagtgccattaatc

SEQ ID NO: 5753486 - DNA, 25 bp, Homo sapien
gagcacccgagagtgctcggtgtgc

SEQ ID NO: 5753487 - DNA, 25 bp, Homo sapien
aggaagatcactgcgtaaagagtga

SEQ ID NO: 5753488 - DNA, 25 bp, Homo sapien
aaactaggagcatcccagagtcagt

SEQ ID NO: 5753489 - DNA, 25 bp, Homo sapien
gcagaacagcctgttggtcagaggt

SEQ ID NO: 5753490 - DNA, 25 bp, Homo sapien
tggacagcgaagcaatggagggagt

SEQ ID NO: 5753491 - DNA, 25 bp, Homo sapien
gccggcaacgcccgttctggtgaac

SEQ ID NO: 5753492 - DNA, 25 bp, Homo sapien
gtagaaatagttcactgctagggac

SEQ ID NO: 5753493 - DNA, 25 bp, Homo sapien
gccacgtggctacaatcacgcgagc

SEQ ID NO: 5753494 - DNA, 25 bp, Homo sapien
gcgttggggttagtccatgctttgg

SEQ ID NO: 5753495 - DNA, 25 bp, Homo sapien
gctttagcagctccatggcccccgc

SEQ ID NO: 5753496 - DNA, 25 bp, Homo sapien
cttgtcagagttcccactgtgtaga

SEQ ID NO: 5753497 - DNA, 25 bp, Homo sapien
tgggtgggccgggagccggatcccg

SEQ ID NO: 5753498 - DNA, 25 bp, Homo sapien
aggccggcaacgcccgttctggtga

SEQ ID NO: 5753499 - DNA, 25 bp, Homo sapien
cgggagccggatcccggcccaggag

SEQ ID NO: 5753500 - DNA, 25 bp, Homo sapien
agtacggaccaggtctggcggaccc

SEQ ID NO: 5753501 - DNA, 25 bp, Homo sapien
gtgcgatggccacgaggcttagcgt

SEQ ID NO: 5753502 - DNA, 25 bp, Homo sapien
ggaaggagagggcagggccacggtc

SEQ ID NO: 5753503 - DNA, 25 bp, Homo sapien
gcagcagcgagcgcaagtttccagg

SEQ ID NO: 5753504 - DNA, 25 bp, Homo sapien
actgctgctgttgaggagaggcgcc

SEQ ID NO: 5753505 - DNA, 25 bp, Homo sapien
gcactataaactggcaaccaacaca

SEQ ID NO: 5753506 - DNA, 25 bp, Homo sapien
tggaagggtcagtgcatgtcatttg

SEQ ID NO: 5753507 - DNA, 25 bp, Homo sapien
cacccgggccatcaaaggcgcgcca

SEQ ID NO: 5753508 - DNA, 25 bp, Homo sapien
gaggtcaaactaggagcatcccaga

SEQ ID NO: 5753509 - DNA, 25 bp, Homo sapien
ttattcctcttgtgtcaggtaagct

SEQ ID NO: 5753510 - DNA, 25 bp, Homo sapien
gttccctgcacgctccggttcagct

SEQ ID NO: 5753511 - DNA, 25 bp, Homo sapien
ggcagcccgccttggtttcggaccc

SEQ ID NO: 5753512 - DNA, 25 bp, Homo sapien
ccattcttattcctcttgtgtcagg

SEQ ID NO: 5753513 - DNA, 25 bp, Homo sapien
gacagcgaagcaatggagggagtgg

SEQ ID NO: 5753514 - DNA, 25 bp, Homo sapien
ggctgtcgctgtcactgtcgccgtc

SEQ ID NO: 5753515 - DNA, 25 bp, Homo sapien
gaccagggggttgacacaggccgag

SEQ ID NO: 5753516 - DNA, 25 bp, Homo sapien
atttgccctgcctcaacccccacgg

SEQ ID NO: 5753517 - DNA, 25 bp, Homo sapien
agggtgaagggcatgcaagccacag

SEQ ID NO: 5753518 - DNA, 25 bp, Homo sapien
attcgcaccacgcgcttcttagcca

SEQ ID NO: 5753519 - DNA, 25 bp, Homo sapien
agccagcagcttggcctgggtgggc

SEQ ID NO: 5753520 - DNA, 25 bp, Homo sapien
gtgtctctccaaggtcagtgtcatg

SEQ ID NO: 5753521 - DNA, 25 bp, Homo sapien
tgctgatggtggtgtagctaagcct

SEQ ID NO: 5753522 - DNA, 25 bp, Homo sapien
taatctatgtgtgtgagaggcaggt

SEQ ID NO: 5753523 - DNA, 25 bp, Homo sapien
caggagggtgaagggcatgcaagcc

SEQ ID NO: 5753524 - DNA, 25 bp, Homo sapien
gcctgttggtcagaggtatgagatt

SEQ ID NO: 5753525 - DNA, 25 bp, Homo sapien
agccggatcccggcccaggagccgt

SEQ ID NO: 5753526 - DNA, 25 bp, Homo sapien
agaaatagttcactgctagggacgc

SEQ ID NO: 5753527 - DNA, 25 bp, Homo sapien
agctgaggttgcccacactgctgct

SEQ ID NO: 5753528 - DNA, 25 bp, Homo sapien
attcctcttgtgtcaggtaagctac

SEQ ID NO: 5753529 - DNA, 25 bp, Homo sapien
cagtgcagaacagcctgttggtcag

SEQ ID NO: 5753530 - DNA, 25 bp, Homo sapien
ggaccctgctttggctgtcgctgtc

SEQ ID NO: 5753531 - DNA, 25 bp, Homo sapien
agcacacgaggccccactggttgca

SEQ ID NO: 5753532 - DNA, 25 bp, Homo sapien
gaagaacaagagcagaagcagcagt

SEQ ID NO: 5753533 - DNA, 25 bp, Homo sapien
tgggcaggagggtgaagggcatgca

SEQ ID NO: 5753534 - DNA, 25 bp, Homo sapien
gcagctgaggttgcccacactgctg

SEQ ID NO: 5753535 - DNA, 25 bp, Homo sapien
ggtcaaactaggagcatcccagagt

SEQ ID NO: 5753536 - DNA, 25 bp, Homo sapien
gcaggcctggcgaaagcgacggtgc

SEQ ID NO: 5753537 - DNA, 25 bp, Homo sapien
aagcagtagaccagggggttgacac

SEQ ID NO: 5753538 - DNA, 25 bp, Homo sapien
ggtattttcagtgctgattgggaag

SEQ ID NO: 5753539 - DNA, 25 bp, Homo sapien
aagatgaatgtgcccatgagattgg

SEQ ID NO: 5753540 - DNA, 25 bp, Homo sapien
caagtgaatgaaggagataggagca

SEQ ID NO: 5753541 - DNA, 25 bp, Homo sapien
ggatgaagaaccttttcagtgcaga

SEQ ID NO: 5753542 - DNA, 25 bp, Homo sapien
cacagacacccccatgaggtaggaa

SEQ ID NO: 5753543 - DNA, 25 bp, Homo sapien
gccagcgatgcacgcactgcagcac

SEQ ID NO: 5753544 - DNA, 25 bp, Homo sapien
tccctgcacgctccggttcagcttt

SEQ ID NO: 5753545 - DNA, 25 bp, Homo sapien
gtagagctcgcgagagataagcccg

SEQ ID NO: 5753546 - DNA, 25 bp, Homo sapien
gcctcctttcccatgtactgctcca

SEQ ID NO: 5753547 - DNA, 25 bp, Homo sapien
gacacaggccgaggcgtagctcagc

SEQ ID NO: 5753548 - DNA, 25 bp, Homo sapien
cactggttgcacgacagtgtacacg

SEQ ID NO: 5753549 - DNA, 25 bp, Homo sapien
aatgaaggagataggagcacccgag

SEQ ID NO: 5753550 - DNA, 25 bp, Homo sapien
tttgggtgttggtttcctgtgtcag

SEQ ID NO: 5753551 - DNA, 25 bp, Homo sapien
ttgcagatgacggtgccaaagatga

SEQ ID NO: 5753552 - DNA, 25 bp, Homo sapien
ttgaggagaggcgcccccgggcggc

SEQ ID NO: 5753553 - DNA, 25 bp, Homo sapien
tcaggtaagctaccttttcctgtgc

SEQ ID NO: 5753554 - DNA, 25 bp, Homo sapien
cagtgtacacggggtagggcaccat

SEQ ID NO: 5753555 - DNA, 25 bp, Homo sapien
gccgagcccgccgccttactcagct

SEQ ID NO: 5753556 - DNA, 25 bp, Homo sapien
ctgctgttgaggagaggcgcccccg

SEQ ID NO: 5753557 - DNA, 25 bp, Homo sapien
ctgatggtggtgtagctaagcctgg

SEQ ID NO: 5753558 - DNA, 25 bp, Homo sapien
gtactgctccattcttattcctctt

SEQ ID NO: 5753559 - DNA, 25 bp, Homo sapien
gtcagttgtggtttgtgttttctat

SEQ ID NO: 5753560 - DNA, 25 bp, Homo sapien
tcgctgactgccagtgagaggagga

SEQ ID NO: 5753561 - DNA, 25 bp, Homo sapien
ctgtgccaggctccatagtctctaa

SEQ ID NO: 5753562 - DNA, 25 bp, Homo sapien
ccgctccagtgcgatggccacgagg

SEQ ID NO: 5753563 - DNA, 25 bp, Homo sapien
atagtctctaaaacaatcagtgcca

SEQ ID NO: 5753564 - DNA, 25 bp, Homo sapien
gcgcaagtttccaggcaggcctggc

SEQ ID NO: 5753565 - DNA, 25 bp, Homo sapien
gttggcactataaactggcaaccaa

SEQ ID NO: 5753566 - DNA, 25 bp, Homo sapien
agccgcgtgggagcgcgtctgccac

SEQ ID NO: 5753567 - DNA, 25 bp, Homo sapien
ctcatcgggaagagccctggggcga

SEQ ID NO: 5753568 - DNA, 25 bp, Homo sapien
ggtatgagattaggcctgatggtat

SEQ ID NO: 5753569 - DNA, 25 bp, Homo sapien
tttcctgtgtcagttgtggtttgtg

SEQ ID NO: 5753570 - DNA, 25 bp, Homo sapien
ggagggtcctcatcgggaagagccc

SEQ ID NO: 5753571 - DNA, 25 bp, Homo sapien
tttcccatgtactgctccattctta

SEQ ID NO: 5753572 - DNA, 25 bp, Homo sapien
gccaggctcagtcccatatcagagg

SEQ ID NO: 5753573 - DNA, 25 bp, Homo sapien
tgattctaatggccagctccaattc

SEQ ID NO: 5753574 - DNA, 25 bp, Homo sapien
cacgcactgcagcacacgaggcccc

SEQ ID NO: 5753575 - DNA, 25 bp, Homo sapien
cagcagtacggaccaggtctggcgg

SEQ ID NO: 5753576 - DNA, 25 bp, Homo sapien
atggagggagtgggagggtcctcat

SEQ ID NO: 5753577 - DNA, 25 bp, Homo sapien
ctatgtgtgtgagaggcaggtcagc

SEQ ID NO: 5753578 - DNA, 25 bp, Homo sapien
ttgacacaggccgaggcgtagctca

SEQ ID NO: 5753579 - DNA, 25 bp, Homo sapien
ggcgtagctcagcaagtgaatgaag

SEQ ID NO: 5753580 - DNA, 25 bp, Homo sapien
atcactgcgtaaagagtgattctaa

SEQ ID NO: 5753581 - DNA, 25 bp, Homo sapien
gcgaagccctaagtagagctcgcga

SEQ ID NO: 5753582 - DNA, 25 bp, Homo sapien
tcatttgccctgcctcaacccccac

SEQ ID NO: 5753583 - DNA, 25 bp, Homo sapien
gaagaaccttttcagtgcagaacag

SEQ ID NO: 5753584 - DNA, 25 bp, Homo sapien
gtggaagttgcacgtagcagccatc

SEQ ID NO: 5753585 - DNA, 25 bp, Homo sapien
gccccactggttgcacgacagtgta

SEQ ID NO: 5753586 - DNA, 25 bp, Homo sapien
ctggcgaaagcgacggtgcatgaag

SEQ ID NO: 5753587 - DNA, 25 bp, Homo sapien
agagcagaagcagcagtacggacca

SEQ ID NO: 5753588 - DNA, 25 bp, Homo sapien
ggctccatagtctctaaaacaatca

SEQ ID NO: 5753589 - DNA, 25 bp, Homo sapien
ggtccggttccctgcacgctccggt

SEQ ID NO: 5753590 - DNA, 25 bp, Homo sapien
gcttggcctgggtgggccgggagcc

SEQ ID NO: 5753591 - DNA, 25 bp, Homo sapien
gtgttggcactataaactggcaacc

SEQ ID NO: 5753592 - DNA, 25 bp, Homo sapien
tgatggtattttcagtgctgattgg

SEQ ID NO: 5753593 - DNA, 25 bp, Homo sapien
ctggaaagggatgaagaaccttttc

SEQ ID NO: 5753594 - DNA, 25 bp, Homo sapien
gaggaaggcattggtgacagtcctc

SEQ ID NO: 5753595 - DNA, 25 bp, Homo sapien
ctggtgaacagcccctggcagcccg

SEQ ID NO: 5753596 - DNA, 25 bp, Homo sapien
tctggaagggtcagtgcatgtcatt

SEQ ID NO: 5753597 - DNA, 25 bp, Homo sapien
ccggttcagctttagcagctccatg

SEQ ID NO: 5753598 - DNA, 25 bp, Homo sapien
ggttgcccacactgctgctgttgag

SEQ ID NO: 5753599 - DNA, 25 bp, Homo sapien
ctgtcactgtcgccgtcaaagcgaa

SEQ ID NO: 5753600 - DNA, 25 bp, Homo sapien
ggaagggtcactgtgaggtcaaact

SEQ ID NO: 5753601 - DNA, 25 bp, Homo sapien
catgagtagtccggacagcagccac

SEQ ID NO: 5753602 - DNA, 25 bp, Homo sapien
caaagatgaatgtgcccatgagatt

SEQ ID NO: 5753603 - DNA, 25 bp, Homo sapien
taggagcatcccagagtcagtcctg

SEQ ID NO: 5753604 - DNA, 25 bp, Homo sapien
ggcgaaagcgacggtgcatgaagca

SEQ ID NO: 5753605 - DNA, 25 bp, Homo sapien
tcaggaagatcactgcgtaaagagt

SEQ ID NO: 5753606 - DNA, 25 bp, Homo sapien
attaatctatgtgtgtgagaggcag

SEQ ID NO: 5753607 - DNA, 25 bp, Homo sapien
ctgggccagcgatgcacgcactgca

SEQ ID NO: 5753608 - DNA, 25 bp, Homo sapien
agtagaccagggggttgacacaggc

SEQ ID NO: 5753609 - DNA, 25 bp, Homo sapien
gctaagcctggacagcgaagcaatg

SEQ ID NO: 5753610 - DNA, 25 bp, Homo sapien
gctgttgaggagaggcgcccccggg

SEQ ID NO: 5753611 - DNA, 25 bp, Homo sapien
ttttttttcaggaggaagccaaaca

SEQ ID NO: 5753612 - DNA, 25 bp, Homo sapien
aggcttagcgtagacacactcacag

SEQ ID NO: 5753613 - DNA, 25 bp, Homo sapien
attctaatggccagctccaattctc

SEQ ID NO: 5753614 - DNA, 25 bp, Homo sapien
ggagccggatcccggcccaggagcc

SEQ ID NO: 5753615 - DNA, 25 bp, Homo sapien
gggtaaggaaggagagggcagggcc

SEQ ID NO: 5753616 - DNA, 25 bp, Homo sapien
ctccaacgctcatcaggaagatcac

SEQ ID NO: 5753617 - DNA, 25 bp, Homo sapien
ttgtgttttctatgtctggaagggt

SEQ ID NO: 5753618 - DNA, 25 bp, Homo sapien
ccagtctcaggccggcaacgcccgt

SEQ ID NO: 5753619 - DNA, 25 bp, Homo sapien
ggtgtagctaagcctggacagcgaa

SEQ ID NO: 5753620 - DNA, 25 bp, Homo sapien
tcctgtgtcagttgtggtttgtgtt

SEQ ID NO: 5753621 - DNA, 25 bp, Homo sapien
gtggtcggcagatggcgctgtaccg

SEQ ID NO: 5753622 - DNA, 25 bp, Homo sapien
gtcccatatcagaggcatgcctcct

SEQ ID NO: 5753623 - DNA, 25 bp, Homo sapien
ccaaggtcagtgtcatgtttctatg

SEQ ID NO: 5753624 - DNA, 25 bp, Homo sapien
agcagcagtacggaccaggtctggc

SEQ ID NO: 5753625 - DNA, 25 bp, Homo sapien
cgagccgcgtgggagcgcgtctgcc

SEQ ID NO: 5753626 - DNA, 25 bp, Homo sapien
gacgctgtgtctctccaaggtcagt

SEQ ID NO: 5753627 - DNA, 25 bp, Homo sapien
agcccttgtcagagttcccactgtg

SEQ ID NO: 5753628 - DNA, 25 bp, Homo sapien
gcacgacagtgtacacggggtaggg

SEQ ID NO: 5753629 - DNA, 25 bp, Homo sapien
ccatcgctgtcttcgccaaccgcgc

SEQ ID NO: 5753630 - DNA, 25 bp, Homo sapien
cagtggtcggcagatggcgctgtac

SEQ ID NO: 5753631 - DNA, 25 bp, Homo sapien
agtgcatgtcatttgccctgcctca

SEQ ID NO: 5753632 - DNA, 25 bp, Homo sapien
gcaggaggtcgctgactgccagtga

SEQ ID NO: 5753633 - DNA, 25 bp, Homo sapien
ccatgtactgctccattcttattcc

SEQ ID NO: 5753634 - DNA, 25 bp, Homo sapien
taactggaaagggatgaagaacctt

SEQ ID NO: 5753635 - DNA, 25 bp, Homo sapien
ttgggtaaggaaggagagggcaggg

SEQ ID NO: 5753636 - DNA, 25 bp, Homo sapien
catcgggaagagccctggggcgagc

SEQ ID NO: 5753637 - DNA, 25 bp, Homo sapien
tcagtcctgtgccaggctccatagt

SEQ ID NO: 5753638 - DNA, 25 bp, Homo sapien
ggcgcgccacgtgttggcactataa

SEQ ID NO: 5753639 - DNA, 25 bp, Homo sapien
ggccatcaaaggcgcgccacgtgtt

SEQ ID NO: 5753640 - DNA, 25 bp, Homo sapien
cagcaggaggtcgctgactgccagt

SEQ ID NO: 5753641 - DNA, 25 bp, Homo sapien
gtgctgattgggaagggtcactgtg

SEQ ID NO: 5753642 - DNA, 25 bp, Homo sapien
taggaaaccgccttgcagatgacgg

SEQ ID NO: 5753643 - DNA, 25 bp, Homo sapien
gcgaagcaatggagggagtgggagg

SEQ ID NO: 5753644 - DNA, 25 bp, Homo sapien
gccaaccgcgccagtctcaggccgg

SEQ ID NO: 5753645 - DNA, 25 bp, Homo sapien
cccgcgcactgggccagcgatgcac

SEQ ID NO: 5753646 - DNA, 25 bp, Homo sapien
ctgtgtctctccaaggtcagtgtca

SEQ ID NO: 5753647 - DNA, 25 bp, Homo sapien
tcagcgccgtcagctccagggcagg

SEQ ID NO: 5753648 - DNA, 25 bp, Homo sapien
gctagggacgctgtgtctctccaag

SEQ ID NO: 5753649 - DNA, 25 bp, Homo sapien
gtcgctgtcactgtcgccgtcaaag

SEQ ID NO: 5753650 - DNA, 25 bp, Homo sapien
tacggaccaggtctggcggacccgc

SEQ ID NO: 5753651 - DNA, 25 bp, Homo sapien
cttaactggaaagggatgaagaacc

SEQ ID NO: 5753652 - DNA, 25 bp, Homo sapien
aggccacggccataaccacacccgg

SEQ ID NO: 5753653 - DNA, 25 bp, Homo sapien
ctcgtggaggccgggggcagcagcg

SEQ ID NO: 5753654 - DNA, 25 bp, Homo sapien
tgaagcagtagaccagggggttgac

SEQ ID NO: 5753655 - DNA, 25 bp, Homo sapien
gccagcaggaggtcgctgactgcca

SEQ ID NO: 5753656 - DNA, 25 bp, Homo sapien
ccgggaacgtggaagttgcacgtag

SEQ ID NO: 5753657 - DNA, 25 bp, Homo sapien
cgtggctacaatcacgcgagccgcg

SEQ ID NO: 5753658 - DNA, 25 bp, Homo sapien
accgcgccagtctcaggccggcaac

SEQ ID NO: 5753659 - DNA, 25 bp, Homo sapien
gcgagcgcaagtttccaggcaggcc

SEQ ID NO: 5753660 - DNA, 25 bp, Homo sapien
gggtcactgtgaggtcaaactagga

SEQ ID NO: 5753661 - DNA, 25 bp, Homo sapien
agcatcccagagtcagtcctgtgcc

SEQ ID NO: 5753662 - DNA, 25 bp, Homo sapien
ttgaacagtttgggtaaggaaggag

SEQ ID NO: 5753663 - DNA, 25 bp, Homo sapien
tgcagtggtcggcagatggcgctgt

SEQ ID NO: 5753664 - DNA, 25 bp, Homo sapien
ggtgggccgggagccggatcccggc

SEQ ID NO: 5753665 - DNA, 25 bp, Homo sapien
cacgaggccccactggttgcacgac

SEQ ID NO: 5753666 - DNA, 25 bp, Homo sapien
gtgttttctatgtctggaagggtca

SEQ ID NO: 5753667 - DNA, 25 bp, Homo sapien
ggttgcacgacagtgtacacggggt

SEQ ID NO: 5753668 - DNA, 25 bp, Homo sapien
ggagcatcccagagtcagtcctgtg

SEQ ID NO: 5753669 - DNA, 25 bp, Homo sapien
ggcaggtcagcccttgtcagagttc

SEQ ID NO: 5753670 - DNA, 25 bp, Homo sapien
accacgatgatgagcatatttcctc

SEQ ID NO: 5753671 - DNA, 25 bp, Homo sapien
aaccttttcagtgcagaacagcctg

SEQ ID NO: 5753672 - DNA, 25 bp, Homo sapien
gttggtcagaggtatgagattaggc

SEQ ID NO: 5753673 - DNA, 25 bp, Homo sapien
gtcactgtcgccgtcaaagcgaagc

SEQ ID NO: 5753674 - DNA, 25 bp, Homo sapien
cggcaacgcccgttctggtgaacag

SEQ ID NO: 5753675 - DNA, 25 bp, Homo sapien
cgcgcttcttagccagcagcttggc

SEQ ID NO: 5753676 - DNA, 25 bp, Homo sapien
agagataagcccgtaggccacggcc

SEQ ID NO: 5753677 - DNA, 25 bp, Homo sapien
aaacaatcagtgccattaatctatg

SEQ ID NO: 5753678 - DNA, 25 bp, Homo sapien
tgtagctaagcctggacagcgaagc

SEQ ID NO: 5753679 - DNA, 25 bp, Homo sapien
ggcctgggtgggccgggagccggat

SEQ ID NO: 5753680 - DNA, 25 bp, Homo sapien
gaagagccctggggcgagctcgtgg

SEQ ID NO: 5753681 - DNA, 25 bp, Homo sapien
ggaaggcattggtgacagtcctcag

SEQ ID NO: 5753682 - DNA, 25 bp, Homo sapien
ggtcgctgactgccagtgagaggag

SEQ ID NO: 5753683 - DNA, 25 bp, Homo sapien
ttgcacgacagtgtacacggggtag

SEQ ID NO: 5753684 - DNA, 25 bp, Homo sapien
ccttgcagatgacggtgccaaagat

SEQ ID NO: 5753685 - DNA, 25 bp, Homo sapien
agtgccattaatctatgtgtgtgag

SEQ ID NO: 5753686 - DNA, 25 bp, Homo sapien
tgaaggagataggagcacccgagag

SEQ ID NO: 5753687 - DNA, 25 bp, Homo sapien
gctttgggtgttggtttcctgtgtc

SEQ ID NO: 5753688 - DNA, 25 bp, Homo sapien
agtgtcatgtttctatgggccaggc

SEQ ID NO: 5753689 - DNA, 25 bp, Homo sapien
cgctgtcactgtcgccgtcaaagcg

SEQ ID NO: 5753690 - DNA, 25 bp, Homo sapien
cagcgagcgcaagtttccaggcagg

SEQ ID NO: 5753691 - DNA, 25 bp, Homo sapien
aggcctggcgaaagcgacggtgcat

SEQ ID NO: 5753692 - DNA, 25 bp, Homo sapien
aaagggatgaagaaccttttcagtg

SEQ ID NO: 5753693 - DNA, 25 bp, Homo sapien
caagagcagaagcagcagtacggac

SEQ ID NO: 5753694 - DNA, 25 bp, Homo sapien
cactgcgtaaagagtgattctaatg

SEQ ID NO: 5753695 - DNA, 25 bp, Homo sapien
agttcccactgtgtagaaatagttc

SEQ ID NO: 5753696 - DNA, 25 bp, Homo sapien
ccagtgtgctgatggtggtgtagct

SEQ ID NO: 5753697 - DNA, 25 bp, Homo sapien
ggtaggaaaccgccttgcagatgac

SEQ ID NO: 5753698 - DNA, 25 bp, Homo sapien
gacggtgccaaagatgaatgtgccc

SEQ ID NO: 5753699 - DNA, 25 bp, Homo sapien
tgagattaggcctgatggtattttc

SEQ ID NO: 5753700 - DNA, 25 bp, Homo sapien
ggcattggtgacagtcctcaggcgg

SEQ ID NO: 5753701 - DNA, 25 bp, Homo sapien
agtgaatgaaggagataggagcacc

SEQ ID NO: 5753702 - DNA, 25 bp, Homo sapien
tagggacgctgtgtctctccaaggt

SEQ ID NO: 5753703 - DNA, 25 bp, Homo sapien
aaggtcagtgtcatgtttctatggg

SEQ ID NO: 5753704 - DNA, 25 bp, Homo sapien
ggccgggaacgtggaagttgcacgt

SEQ ID NO: 5753705 - DNA, 25 bp, Homo sapien
tatttcttgaacagtttgggtaagg

SEQ ID NO: 5753706 - DNA, 25 bp, Homo sapien
atcccggcccaggagccgtcagcgc

SEQ ID NO: 5753707 - DNA, 25 bp, Homo sapien
aggtctggcggacccgcgcactggg

SEQ ID NO: 5753708 - DNA, 25 bp, Homo sapien
tgcatgtcatttgccctgcctcaac

SEQ ID NO: 5753709 - DNA, 25 bp, Homo sapien
tcagtgtcatgtttctatgggccag

SEQ ID NO: 5753710 - DNA, 25 bp, Homo sapien
actgctccattcttattcctcttgt

SEQ ID NO: 5753711 - DNA, 25 bp, Homo sapien
cgccagtctcaggccggcaacgccc

SEQ ID NO: 5753712 - DNA, 25 bp, Homo sapien
atgaagaacaagagcagaagcagca

SEQ ID NO: 5753713 - DNA, 25 bp, Homo sapien
agagtgattctaatggccagctcca

SEQ ID NO: 5753714 - DNA, 25 bp, Homo sapien
gggcggcacagggaagcccccggcc

SEQ ID NO: 5753715 - DNA, 25 bp, Homo sapien
aatgtgcccatgagattgggcagga

SEQ ID NO: 5753716 - DNA, 25 bp, Homo sapien
atgaagaaccttttcagtgcagaac

SEQ ID NO: 5753717 - DNA, 25 bp, Homo sapien
gtccggacagcagccacgtggctac

SEQ ID NO: 5753718 - DNA, 25 bp, Homo sapien
gccacgaggcttagcgtagacacac

SEQ ID NO: 5753719 - DNA, 25 bp, Homo sapien
ggccgaggcgtagctcagcaagtga

SEQ ID NO: 5753720 - DNA, 25 bp, Homo sapien
ctccgcgaatgcgagggggctcgca

SEQ ID NO: 5753721 - DNA, 25 bp, Homo sapien
gtgccaggctccatagtctctaaaa

SEQ ID NO: 5753722 - DNA, 25 bp, Homo sapien
tcatgtttctatgggccaggctcag

SEQ ID NO: 5753723 - DNA, 25 bp, Homo sapien
aaggagataggagcacccgagagtg

SEQ ID NO: 5753724 - DNA, 25 bp, Homo sapien
acggtccttaactggaaagggatga

SEQ ID NO: 5753725 - DNA, 25 bp, Homo sapien
gtgtagaaatagttcactgctaggg

SEQ ID NO: 5753726 - DNA, 25 bp, Homo sapien
tgacagtcctcaggcggcggctcag

SEQ ID NO: 5753727 - DNA, 25 bp, Homo sapien
aaaaaaaagcacaacgatcaccagc

SEQ ID NO: 5753728 - DNA, 25 bp, Homo sapien
ggagtgggagggtcctcatcgggaa

SEQ ID NO: 5753729 - DNA, 25 bp, Homo sapien
agtctctaaaacaatcagtgccatt

SEQ ID NO: 5753730 - DNA, 25 bp, Homo sapien
tcctcttgtgtcaggtaagctacct

SEQ ID NO: 5753731 - DNA, 25 bp, Homo sapien
caggcggcggctcagtcccaggacc

SEQ ID NO: 5753732 - DNA, 25 bp, Homo sapien
ctatgggccaggctcagtcccatat

SEQ ID NO: 5753733 - DNA, 25 bp, Homo sapien
gggcccagtgtgctgatggtggtgt

SEQ ID NO: 5753734 - DNA, 25 bp, Homo sapien
gcggcacagggaagcccccggcccg

SEQ ID NO: 5753735 - DNA, 25 bp, Homo sapien
gctgattgggaagggtcactgtgag

SEQ ID NO: 5753736 - DNA, 25 bp, Homo sapien
cggcccaggagccgtcagcgccgtc

SEQ ID NO: 5753737 - DNA, 25 bp, Homo sapien
agcgccgtcagctccagggcaggcc

SEQ ID NO: 5753738 - DNA, 25 bp, Homo sapien
cacggccataaccacacccgggatg

SEQ ID NO: 5753739 - DNA, 25 bp, Homo sapien
ttcactgctagggacgctgtgtctc

SEQ ID NO: 5753740 - DNA, 25 bp, Homo sapien
tggtcagaggtatgagattaggcct

SEQ ID NO: 5753741 - DNA, 25 bp, Homo sapien
taaactggcaaccaacacagaaaaa

SEQ ID NO: 5753742 - DNA, 25 bp, Homo sapien
gtgccaaagatgaatgtgcccatga

SEQ ID NO: 5753743 - DNA, 25 bp, Homo sapien
ccctaagtagagctcgcgagagata

SEQ ID NO: 5753744 - DNA, 25 bp, Homo sapien
ccgggggcagcagcgagcgcaagtt

SEQ ID NO: 5753745 - DNA, 25 bp, Homo sapien
tgttgaggagaggcgcccccgggcg

SEQ ID NO: 5753746 - DNA, 25 bp, Homo sapien
gaacgtggaagttgcacgtagcagc

SEQ ID NO: 5753747 - DNA, 25 bp, Homo sapien
ggccgggggcagcagcgagcgcaag

SEQ ID NO: 5753748 - DNA, 25 bp, Homo sapien
ggaggaagccaaacaatttattatt

SEQ ID NO: 5753749 - DNA, 25 bp, Homo sapien
ggtccttaactggaaagggatgaag

SEQ ID NO: 5753750 - DNA, 25 bp, Homo sapien
caaccgcgccagtctcaggccggca

SEQ ID NO: 5753751 - DNA, 25 bp, Homo sapien
cgtagctcagcaagtgaatgaagga

SEQ ID NO: 5753752 - DNA, 25 bp, Homo sapien
ggtgaagggcatgcaagccacagcc

SEQ ID NO: 5753753 - DNA, 25 bp, Homo sapien
caatggagggagtgggagggtcctc

SEQ ID NO: 5753754 - DNA, 25 bp, Homo sapien
aacagcccctggcagcccgccttgg

SEQ ID NO: 5753755 - DNA, 25 bp, Homo sapien
gcagtagaccagggggttgacacag

SEQ ID NO: 5753756 - DNA, 25 bp, Homo sapien
ctgccacactcgtgcctgcagtggt

SEQ ID NO: 5753757 - DNA, 25 bp, Homo sapien
atgctttgggtgttggtttcctgtg

SEQ ID NO: 5753758 - DNA, 25 bp, Homo sapien
ctggttgcacgacagtgtacacggg

SEQ ID NO: 5753759 - DNA, 25 bp, Homo sapien
gcgcccccgggcggcacagggaagc

SEQ ID NO: 5753760 - DNA, 25 bp, Homo sapien
ctcagtcccaggaccacgatgatga

SEQ ID NO: 5753761 - DNA, 25 bp, Homo sapien
tagcagccatcgctgtcttcgccaa

SEQ ID NO: 5753762 - DNA, 25 bp, Homo sapien
gaggttgcccacactgctgctgttg

SEQ ID NO: 5753763 - DNA, 25 bp, Homo sapien
gggagcgcgtctgccacactcgtgc

SEQ ID NO: 5753764 - DNA, 25 bp, Homo sapien
gtgaggtcaaactaggagcatccca

SEQ ID NO: 5753765 - DNA, 25 bp, Homo sapien
ccaggtctggcggacccgcgcactg

SEQ ID NO: 5753766 - DNA, 25 bp, Homo sapien
cccgccgccttactcagctcgaccc

SEQ ID NO: 5753767 - DNA, 25 bp, Homo sapien
gcctggcgaaagcgacggtgcatga

SEQ ID NO: 5753768 - DNA, 25 bp, Homo sapien
caccagcaacattcgcaccacgcgc

SEQ ID NO: 5753769 - DNA, 25 bp, Homo sapien
ggctccgcgaatgcgagggggctcg

SEQ ID NO: 5753770 - DNA, 25 bp, Homo sapien
tgtaccgctccagtgcgatggccac

SEQ ID NO: 5753771 - DNA, 25 bp, Homo sapien
ctccattcttattcctcttgtgtca

SEQ ID NO: 5753772 - DNA, 25 bp, Homo sapien
cgttctggtgaacagcccctggcag

SEQ ID NO: 5753773 - DNA, 25 bp, Homo sapien
gttgtggtttgtgttttctatgtct

SEQ ID NO: 5753774 - DNA, 25 bp, Homo sapien
cgggtccggttccctgcacgctccg

SEQ ID NO: 5753775 - DNA, 25 bp, Homo sapien
tggcgctgtaccgctccagtgcgat

SEQ ID NO: 5753776 - DNA, 25 bp, Homo sapien
tcggtgtgcacccgggccatcaaag

SEQ ID NO: 5753777 - DNA, 25 bp, Homo sapien
ggcaaccaacacagaaaaaaaagca

SEQ ID NO: 5753778 - DNA, 25 bp, Homo sapien
tgggccgggagccggatcccggccc

SEQ ID NO: 5753779 - DNA, 25 bp, Homo sapien
tgagcatatttcctccaacgctcat

SEQ ID NO: 5753780 - DNA, 25 bp, Homo sapien
cctgcagtggtcggcagatggcgct

SEQ ID NO: 5753781 - DNA, 25 bp, Homo sapien
tcctcagccagggcccagtgtgctg

SEQ ID NO: 5753782 - DNA, 25 bp, Homo sapien
caggccgggaacgtggaagttgcac

SEQ ID NO: 5753783 - DNA, 25 bp, Homo sapien
tggcccccgccgagcccgccgcctt

SEQ ID NO: 5753784 - DNA, 25 bp, Homo sapien
cactgtgtagaaatagttcactgct

SEQ ID NO: 5753785 - DNA, 25 bp, Homo sapien
gctcagcaagtgaatgaaggagata

SEQ ID NO: 5753786 - DNA, 25 bp, Homo sapien
aacgatcaccagcaacattcgcacc

SEQ ID NO: 5753787 - DNA, 25 bp, Homo sapien
ccagagtcagtcctgtgccaggctc

SEQ ID NO: 5753788 - DNA, 25 bp, Homo sapien
acagcagccacgtggctacaatcac

SEQ ID NO: 5753789 - DNA, 25 bp, Homo sapien
tcagaggcatgcctcctttcccatg

SEQ ID NO: 5753790 - DNA, 25 bp, Homo sapien
gatgaatgtgcccatgagattgggc

SEQ ID NO: 5753791 - DNA, 25 bp, Homo sapien
ggggttgacacaggccgaggcgtag

SEQ ID NO: 5753792 - DNA, 25 bp, Homo sapien
gtgagaggcaggtcagcccttgtca

SEQ ID NO: 5753793 - DNA, 25 bp, Homo sapien
cgcttcttagccagcagcttggcct

SEQ ID NO: 5753794 - DNA, 25 bp, Homo sapien
ttttcaggaggaagccaaacaattt

SEQ ID NO: 5753795 - DNA, 25 bp, Homo sapien
cacgctccggttcagctttagcagc

SEQ ID NO: 5753796 - DNA, 25 bp, Homo sapien
tgccagtgagaggaggaaggcattg

SEQ ID NO: 5753797 - DNA, 25 bp, Homo sapien
acaacgatcaccagcaacattcgca

SEQ ID NO: 5753798 - DNA, 25 bp, Homo sapien
agagctcgcgagagataagcccgta

SEQ ID NO: 5753799 - DNA, 25 bp, Homo sapien
gggcatgcaagccacagccagcagg

SEQ ID NO: 5753800 - DNA, 25 bp, Homo sapien
agggtcagtgcatgtcatttgccct

SEQ ID NO: 5753801 - DNA, 25 bp, Homo sapien
atcacgcgagccgcgtgggagcgcg

SEQ ID NO: 5753802 - DNA, 25 bp, Homo sapien
ggtgaacagcccctggcagcccgcc

SEQ ID NO: 5753803 - DNA, 25 bp, Homo sapien
gctaccttttcctgtgcgttggggt

SEQ ID NO: 5753804 - DNA, 25 bp, Homo sapien
tgggtgttggtttcctgtgtcagtt

SEQ ID NO: 5753805 - DNA, 25 bp, Homo sapien
gtctctccaaggtcagtgtcatgtt

SEQ ID NO: 5753806 - DNA, 25 bp, Homo sapien
cgggccatcaaaggcgcgccacgtg

SEQ ID NO: 5753807 - DNA, 25 bp, Homo sapien
tttcttgaacagtttgggtaaggaa

SEQ ID NO: 5753808 - DNA, 25 bp, Homo sapien
ccagcagcttggcctgggtgggccg

SEQ ID NO: 5753809 - DNA, 25 bp, Homo sapien
caaaggcgcgccacgtgttggcact

SEQ ID NO: 5753810 - DNA, 25 bp, Homo sapien
atgacggtgccaaagatgaatgtgc

SEQ ID NO: 5753811 - DNA, 25 bp, Homo sapien
gcccgtaggccacggccataaccac

SEQ ID NO: 5753812 - DNA, 25 bp, Homo sapien
ggtcggcagatggcgctgtaccgct

SEQ ID NO: 5753813 - DNA, 25 bp, Homo sapien
taagcctggacagcgaagcaatgga

SEQ ID NO: 5753814 - DNA, 25 bp, Homo sapien
gcccccgggcggcacagggaagccc

SEQ ID NO: 5753815 - DNA, 25 bp, Homo sapien
ggcaggagggtgaagggcatgcaag

SEQ ID NO: 5753816 - DNA, 25 bp, Homo sapien
cagccagggcccagtgtgctgatgg

SEQ ID NO: 5753817 - DNA, 25 bp, Homo sapien
cccactgtgtagaaatagttcactg

SEQ ID NO: 5753818 - DNA, 25 bp, Homo sapien
aaagagtgattctaatggccagctc

SEQ ID NO: 5753819 - DNA, 25 bp, Homo sapien
ttccaggcaggcctggcgaaagcga

SEQ ID NO: 5753820 - DNA, 25 bp, Homo sapien
ttttttcaggaggaagccaaacaat

SEQ ID NO: 5753821 - DNA, 25 bp, Homo sapien
cggcggctcagtcccaggaccacga

SEQ ID NO: 5753822 - DNA, 25 bp, Homo sapien
ctcttgtgtcaggtaagctaccttt

SEQ ID NO: 5753823 - DNA, 25 bp, Homo sapien
agaacagcctgttggtcagaggtat

SEQ ID NO: 5753824 - DNA, 25 bp, Homo sapien
aagtagagctcgcgagagataagcc

SEQ ID NO: 5753825 - DNA, 25 bp, Homo sapien
aaaaaagcacaacgatcaccagcaa

SEQ ID NO: 5753826 - DNA, 25 bp, Homo sapien
ggcctgatggtattttcagtgctga

SEQ ID NO: 5753827 - DNA, 25 bp, Homo sapien
ttctcgtgtcccggctccgcgaatg

SEQ ID NO: 5753828 - DNA, 25 bp, Homo sapien
gctcgcagctgaggttgcccacact

SEQ ID NO: 5753829 - DNA, 25 bp, Homo sapien
cgcgccacgtgttggcactataaac

SEQ ID NO: 5753830 - DNA, 25 bp, Homo sapien
aggagcacccgagagtgctcggtgt

SEQ ID NO: 5753831 - DNA, 25 bp, Homo sapien
ccaggcaggcctggcgaaagcgacg

SEQ ID NO: 5753832 - DNA, 25 bp, Homo sapien
gctccagggcaggccgggaacgtgg

SEQ ID NO: 5753833 - DNA, 25 bp, Homo sapien
cccaggaccacgatgatgagcatat

SEQ ID NO: 5753834 - DNA, 25 bp, Homo sapien
agcctggacagcgaagcaatggagg

SEQ ID NO: 5753835 - DNA, 25 bp, Homo sapien
cgatgatgagcatatttcctccaac

SEQ ID NO: 5753836 - DNA, 25 bp, Homo sapien
tgtgctgatggtggtgtagctaagc

SEQ ID NO: 5753837 - DNA, 25 bp, Homo sapien
atggccagctccaattctcgtgtcc

SEQ ID NO: 5753838 - DNA, 25 bp, Homo sapien
aagccacagccagcaggaggtcgct

SEQ ID NO: 5753839 - DNA, 25 bp, Homo sapien
tagtccggacagcagccacgtggct

SEQ ID NO: 5753840 - DNA, 25 bp, Homo sapien
ggcggcggctcagtcccaggaccac

SEQ ID NO: 5753841 - DNA, 25 bp, Homo sapien
ggctcagtcccatatcagaggcatg

SEQ ID NO: 5753842 - DNA, 25 bp, Homo sapien
acgtggaagttgcacgtagcagcca

SEQ ID NO: 5753843 - DNA, 25 bp, Homo sapien
agggatgaagaaccttttcagtgca

SEQ ID NO: 5753844 - DNA, 25 bp, Homo sapien
cagtcccaggaccacgatgatgagc

SEQ ID NO: 5753845 - DNA, 25 bp, Homo sapien
gcgcgtctgccacactcgtgcctgc

SEQ ID NO: 5753846 - DNA, 25 bp, Homo sapien
tagctcagcaagtgaatgaaggaga

SEQ ID NO: 5753847 - DNA, 25 bp, Homo sapien
ccattaatctatgtgtgtgagaggc

SEQ ID NO: 5753848 - DNA, 25 bp, Homo sapien
gatgcacgcactgcagcacacgagg

SEQ ID NO: 5753849 - DNA, 25 bp, Homo sapien
cgccgtcagctccagggcaggccgg

SEQ ID NO: 5753850 - DNA, 25 bp, Homo sapien
gcaacgcccgttctggtgaacagcc

SEQ ID NO: 5753851 - DNA, 25 bp, Homo sapien
aggcgcccccgggcggcacagggaa

SEQ ID NO: 5753852 - DNA, 25 bp, Homo sapien
ccatgctttgggtgttggtttcctg

SEQ ID NO: 5753853 - DNA, 25 bp, Homo sapien
ttctggtgaacagcccctggcagcc

SEQ ID NO: 5753854 - DNA, 25 bp, Homo sapien
caggaccacgatgatgagcatattt

SEQ ID NO: 5753855 - DNA, 25 bp, Homo sapien
cgctgtcttcgccaaccgcgccagt

SEQ ID NO: 5753856 - DNA, 25 bp, Homo sapien
gtttgggtaaggaaggagagggcag

SEQ ID NO: 5753857 - DNA, 25 bp, Homo sapien
ccccatgaggtaggaaaccgccttg

SEQ ID NO: 5753858 - DNA, 25 bp, Homo sapien
agaggcgcccccgggcggcacaggg

SEQ ID NO: 5753859 - DNA, 25 bp, Homo sapien
acggggtagggcaccatgagtagtc

SEQ ID NO: 5753860 - DNA, 25 bp, Homo sapien
ccatcaaaggcgcgccacgtgttgg

SEQ ID NO: 5753861 - DNA, 25 bp, Homo sapien
gcatgcaagccacagccagcaggag

SEQ ID NO: 5753862 - DNA, 25 bp, Homo sapien
ccgccttactcagctcgacccggcg

SEQ ID NO: 5753863 - DNA, 25 bp, Homo sapien
taccttttcctgtgcgttggggtta

SEQ ID NO: 5753864 - DNA, 25 bp, Homo sapien
ccctggggcgagctcgtggaggccg

SEQ ID NO: 5753865 - DNA, 25 bp, Homo sapien
tttcggaccctgctttggctgtcgc

SEQ ID NO: 5753866 - DNA, 25 bp, Homo sapien
ccgtaggccacggccataaccacac

SEQ ID NO: 5753867 - DNA, 25 bp, Homo sapien
agtgagaggaggaaggcattggtga

SEQ ID NO: 5753868 - DNA, 25 bp, Homo sapien
aagcgaagccctaagtagagctcgc

SEQ ID NO: 5753869 - DNA, 25 bp, Homo sapien
cacgaggcttagcgtagacacactc

SEQ ID NO: 5753870 - DNA, 25 bp, Homo sapien
gcccacactgctgctgttgaggaga

SEQ ID NO: 5753871 - DNA, 25 bp, Homo sapien
tgtgcccatgagattgggcaggagg

SEQ ID NO: 5753872 - DNA, 25 bp, Homo sapien
gtaagctaccttttcctgtgcgttg

SEQ ID NO: 5753873 - DNA, 25 bp, Homo sapien
cttgtgtcaggtaagctaccttttc

SEQ ID NO: 5753874 - DNA, 25 bp, Homo sapien
caacacagaaaaaaaagcacaacga

SEQ ID NO: 5753875 - DNA, 25 bp, Homo sapien
ggacagcagccacgtggctacaatc

SEQ ID NO: 5753876 - DNA, 25 bp, Homo sapien
ctgaggttgcccacactgctgctgt

SEQ ID NO: 5753877 - DNA, 25 bp, Homo sapien
ttggtttcctgtgtcagttgtggtt

SEQ ID NO: 5753878 - DNA, 25 bp, Homo sapien
ttgcccacactgctgctgttgagga

SEQ ID NO: 5753879 - DNA, 25 bp, Homo sapien
cagccacgtggctacaatcacgcga

SEQ ID NO: 5753880 - DNA, 25 bp, Homo sapien
tgccattaatctatgtgtgtgagag

SEQ ID NO: 5753881 - DNA, 25 bp, Homo sapien
cccgggccatcaaaggcgcgccacg

SEQ ID NO: 5753882 - DNA, 25 bp, Homo sapien
gcagtacggaccaggtctggcggac

SEQ ID NO: 5753883 - DNA, 25 bp, Homo sapien
gctccagtgcgatggccacgaggct

SEQ ID NO: 5753884 - DNA, 25 bp, Homo sapien
caggccgaggcgtagctcagcaagt

SEQ ID NO: 5753885 - DNA, 25 bp, Homo sapien
ggagggtgaagggcatgcaagccac

SEQ ID NO: 5753886 - DNA, 25 bp, Homo sapien
ccaggagccgtcagcgccgtcagct

SEQ ID NO: 5753887 - DNA, 25 bp, Homo sapien
tagtccatgctttgggtgttggttt

SEQ ID NO: 5753888 - DNA, 25 bp, Homo sapien
cagaggtatgagattaggcctgatg

SEQ ID NO: 5753889 - DNA, 25 bp, Homo sapien
actgccagtgagaggaggaaggcat

SEQ ID NO: 5753890 - DNA, 25 bp, Homo sapien
tccagggcaggccgggaacgtggaa

SEQ ID NO: 5753891 - DNA, 25 bp, Homo sapien
tgtgtcaggtaagctaccttttcct

SEQ ID NO: 5753892 - DNA, 25 bp, Homo sapien
gtcttcgccaaccgcgccagtctca

SEQ ID NO: 5753893 - DNA, 25 bp, Homo sapien
gaggccgggggcagcagcgagcgca

SEQ ID NO: 5753894 - DNA, 25 bp, Homo sapien
tcttattcctcttgtgtcaggtaag

SEQ ID NO: 5753895 - DNA, 25 bp, Homo sapien
cagcccctggcagcccgccttggtt

SEQ ID NO: 5753896 - DNA, 25 bp, Homo sapien
gccttactcagctcgacccggcggg

SEQ ID NO: 5753897 - DNA, 25 bp, Homo sapien
taccgctccagtgcgatggccacga

SEQ ID NO: 5753898 - DNA, 25 bp, Homo sapien
tgctccattcttattcctcttgtgt

SEQ ID NO: 5753899 - DNA, 25 bp, Homo sapien
ttggctgtcgctgtcactgtcgccg

SEQ ID NO: 5753900 - DNA, 25 bp, Homo sapien
gcagccatcgctgtcttcgccaacc

SEQ ID NO: 5753901 - DNA, 25 bp, Homo sapien
cttttcctgtgcgttggggttagtc

SEQ ID NO: 5753902 - DNA, 25 bp, Homo sapien
ctgcgtaaagagtgattctaatggc

SEQ ID NO: 5753903 - DNA, 25 bp, Homo sapien
ggatgaagaacaagagcagaagcag

SEQ ID NO: 5753904 - DNA, 25 bp, Homo sapien
gtacacggggtagggcaccatgagt

SEQ ID NO: 5753905 - DNA, 25 bp, Homo sapien
ccggatcccggcccaggagccgtca

SEQ ID NO: 5753906 - DNA, 25 bp, Homo sapien
cgagcccgccgccttactcagctcg

SEQ ID NO: 5753907 - DNA, 25 bp, Homo sapien
cagggcccagtgtgctgatggtggt

SEQ ID NO: 5753908 - DNA, 25 bp, Homo sapien
tatgagattaggcctgatggtattt

SEQ ID NO: 5753909 - DNA, 25 bp, Homo sapien
ccgcgaatgcgagggggctcgcagc

SEQ ID NO: 5753910 - DNA, 25 bp, Homo sapien
catgtcatttgccctgcctcaaccc

SEQ ID NO: 5753911 - DNA, 25 bp, Homo sapien
tggtttgtgttttctatgtctggaa

SEQ ID NO: 5753912 - DNA, 25 bp, Homo sapien
cactgtgaggtcaaactaggagcat

SEQ ID NO: 5753913 - DNA, 25 bp, Homo sapien
gcccagtgtgctgatggtggtgtag

SEQ ID NO: 5753914 - DNA, 25 bp, Homo sapien
aacgcccgttctggtgaacagcccc

SEQ ID NO: 5753915 - DNA, 25 bp, Homo sapien
atgtgtgtgagaggcaggtcagccc

SEQ ID NO: 5753916 - DNA, 25 bp, Homo sapien
cacactcgtgcctgcagtggtcggc

SEQ ID NO: 5753917 - DNA, 25 bp, Homo sapien
aaatagttcactgctagggacgctg

SEQ ID NO: 5753918 - DNA, 25 bp, Homo sapien
cagcttggcctgggtgggccgggag

SEQ ID NO: 5753919 - DNA, 25 bp, Homo sapien
agtagtccggacagcagccacgtgg

SEQ ID NO: 5753920 - DNA, 25 bp, Homo sapien
agcccgccgccttactcagctcgac

SEQ ID NO: 5753921 - DNA, 25 bp, Homo sapien
ccgaggcgtagctcagcaagtgaat

SEQ ID NO: 5753922 - DNA, 25 bp, Homo sapien
gatgagcatatttcctccaacgctc

SEQ ID NO: 5753923 - DNA, 25 bp, Homo sapien
tttctatgtctggaagggtcagtgc

SEQ ID NO: 5753924 - DNA, 25 bp, Homo sapien
agcaacattcgcaccacgcgcttct

SEQ ID NO: 5753925 - DNA, 25 bp, Homo sapien
tgaagggcatgcaagccacagccag

SEQ ID NO: 5753926 - DNA, 25 bp, Homo sapien
tgctttggctgtcgctgtcactgtc

SEQ ID NO: 5753927 - DNA, 25 bp, Homo sapien
gctcggtgtgcacccgggccatcaa

SEQ ID NO: 5753928 - DNA, 25 bp, Homo sapien
atgaggtaggaaaccgccttgcaga

SEQ ID NO: 5753929 - DNA, 25 bp, Homo sapien
agtgattctaatggccagctccaat

SEQ ID NO: 5753930 - DNA, 25 bp, Homo sapien
ggttcagctttagcagctccatggc

SEQ ID NO: 5753931 - DNA, 25 bp, Homo sapien
ttattatttcttgaacagtttgggt

SEQ ID NO: 5753932 - DNA, 25 bp, Homo sapien
ggtgttggtttcctgtgtcagttgt

SEQ ID NO: 5753933 - DNA, 25 bp, Homo sapien
ccacgtgttggcactataaactggc

SEQ ID NO: 5753934 - DNA, 25 bp, Homo sapien
gaggcaggtcagcccttgtcagagt

SEQ ID NO: 5753935 - DNA, 25 bp, Homo sapien
tcagtgccattaatctatgtgtgtg

SEQ ID NO: 5753936 - DNA, 25 bp, Homo sapien
gggctcgcagctgaggttgcccaca

SEQ ID NO: 5753937 - DNA, 25 bp, Homo sapien
tccttaactggaaagggatgaagaa

SEQ ID NO: 5753938 - DNA, 25 bp, Homo sapien
agggggttgacacaggccgaggcgt

SEQ ID NO: 5753939 - DNA, 25 bp, Homo sapien
ccatagtctctaaaacaatcagtgc

SEQ ID NO: 5753940 - DNA, 25 bp, Homo sapien
tggaggccgggggcagcagcgagcg

SEQ ID NO: 5753941 - DNA, 25 bp, Homo sapien
gcgatgcacgcactgcagcacacga

SEQ ID NO: 5753942 - DNA, 25 bp, Homo sapien
ctctactcctcagccagggcccagt

SEQ ID NO: 5753943 - DNA, 25 bp, Homo sapien
acactgctgctgttgaggagaggcg

SEQ ID NO: 5753944 - DNA, 25 bp, Homo sapien
tcggcagatggcgctgtaccgctcc

SEQ ID NO: 5753945 - DNA, 25 bp, Homo sapien
agagtcagtcctgtgccaggctcca

SEQ ID NO: 5753946 - DNA, 25 bp, Homo sapien
cctgatggtattttcagtgctgatt

SEQ ID NO: 5753947 - DNA, 25 bp, Homo sapien
tatcagaggcatgcctcctttccca

SEQ ID NO: 5753948 - DNA, 25 bp, Homo sapien
cagcctgttggtcagaggtatgaga

SEQ ID NO: 5753949 - DNA, 25 bp, Homo sapien
tcagagttcccactgtgtagaaata

SEQ ID NO: 5753950 - DNA, 25 bp, Homo sapien
gaagccaaacaatttattatttctt

SEQ ID NO: 5753951 - DNA, 25 bp, Homo sapien
ctcagctcgacccggcgggctccca

SEQ ID NO: 5753952 - DNA, 25 bp, Homo sapien
agagttcccactgtgtagaaatagt

SEQ ID NO: 5753953 - DNA, 25 bp, Homo sapien
catgaagcagtagaccagggggttg

SEQ ID NO: 5753954 - DNA, 25 bp, Homo sapien
ctggcagcccgccttggtttcggac

SEQ ID NO: 5753955 - DNA, 25 bp, Homo sapien
ggaccacgatgatgagcatatttcc

SEQ ID NO: 5753956 - DNA, 25 bp, Homo sapien
cgaaagcgacggtgcatgaagcagt

SEQ ID NO: 5753957 - DNA, 25 bp, Homo sapien
cagggcaggccgggaacgtggaagt

SEQ ID NO: 5753958 - DNA, 25 bp, Homo sapien
caatcacgcgagccgcgtgggagcg

SEQ ID NO: 5753959 - DNA, 25 bp, Homo sapien
gggcaccatgagtagtccggacagc

SEQ ID NO: 5753960 - DNA, 25 bp, Homo sapien
ccggacagcagccacgtggctacaa

SEQ ID NO: 5753961 - DNA, 25 bp, Homo sapien
tctcaggccggcaacgcccgttctg

SEQ ID NO: 5753962 - DNA, 25 bp, Homo sapien
tggggttagtccatgctttgggtgt

SEQ ID NO: 5753963 - DNA, 25 bp, Homo sapien
cgctccggttcagctttagcagctc

SEQ ID NO: 5753964 - DNA, 25 bp, Homo sapien
cacgatgatgagcatatttcctcca

SEQ ID NO: 5753965 - DNA, 25 bp, Homo sapien
cagtttgggtaaggaaggagagggc

SEQ ID NO: 5753966 - DNA, 25 bp, Homo sapien
gtgctcggtgtgcacccgggccatc

SEQ ID NO: 5753967 - DNA, 25 bp, Homo sapien
gcgtaaagagtgattctaatggcca

SEQ ID NO: 5753968 - DNA, 25 bp, Homo sapien
tatttcctccaacgctcatcaggaa

SEQ ID NO: 5753969 - DNA, 25 bp, Homo sapien
tatgtctggaagggtcagtgcatgt

SEQ ID NO: 5753970 - DNA, 25 bp, Homo sapien
agtgtgctgatggtggtgtagctaa

SEQ ID NO: 5753971 - DNA, 25 bp, Homo sapien
gccataaccacacccgggatgaaga

SEQ ID NO: 5753972 - DNA, 25 bp, Homo sapien
tgcccatgagattgggcaggagggt

SEQ ID NO: 5753973 - DNA, 25 bp, Homo sapien
atctatgtgtgtgagaggcaggtca

SEQ ID NO: 5753974 - DNA, 25 bp, Homo sapien
cacgtggctacaatcacgcgagccg

SEQ ID NO: 5753975 - DNA, 25 bp, Homo sapien
ttcagtgctgattgggaagggtcac

SEQ ID NO: 5753976 - DNA, 25 bp, Homo sapien
agtctcaggccggcaacgcccgttc

SEQ ID NO: 5753977 - DNA, 25 bp, Homo sapien
cacgtagcagccatcgctgtcttcg

SEQ ID NO: 5753978 - DNA, 25 bp, Homo sapien
gaagggtcagtgcatgtcatttgcc

SEQ ID NO: 5753979 - DNA, 25 bp, Homo sapien
ctccggttcagctttagcagctcca

SEQ ID NO: 5753980 - DNA, 25 bp, Homo sapien
cgtgtcccggctccgcgaatgcgag

SEQ ID NO: 5753981 - DNA, 25 bp, Homo sapien
ggcagatggcgctgtaccgctccag

SEQ ID NO: 5753982 - DNA, 25 bp, Homo sapien
tcaaactaggagcatcccagagtca

SEQ ID NO: 5753983 - DNA, 25 bp, Homo sapien
tcctgtgccaggctccatagtctct

SEQ ID NO: 5753984 - DNA, 25 bp, Homo sapien
ttcccactgtgtagaaatagttcac

SEQ ID NO: 5753985 - DNA, 25 bp, Homo sapien
ccgccgagcccgccgccttactcag

SEQ ID NO: 5753986 - DNA, 25 bp, Homo sapien
tgcacgtagcagccatcgctgtctt

SEQ ID NO: 5753987 - DNA, 25 bp, Homo sapien
tcttagccagcagcttggcctgggt

SEQ ID NO: 5753988 - DNA, 25 bp, Homo sapien
gtcaaagcgaagccctaagtagagc

SEQ ID NO: 5753989 - DNA, 25 bp, Homo sapien
aaggaaggagagggcagggccacgg

SEQ ID NO: 5753990 - DNA, 25 bp, Homo sapien
agatgacggtgccaaagatgaatgt

SEQ ID NO: 5753991 - DNA, 25 bp, Homo sapien
caaagcgaagccctaagtagagctc

SEQ ID NO: 5753992 - DNA, 25 bp, Homo sapien
acacggggtagggcaccatgagtag

SEQ ID NO: 5753993 - DNA, 25 bp, Homo sapien
gcgtgggagcgcgtctgccacactc

SEQ ID NO: 5753994 - DNA, 25 bp, Homo sapien
tgcctgcagtggtcggcagatggcg

SEQ ID NO: 5753995 - DNA, 25 bp, Homo sapien
gccgggagccggatcccggcccagg

SEQ ID NO: 5753996 - DNA, 25 bp, Homo sapien
agaaccttttcagtgcagaacagcc

SEQ ID NO: 5753997 - DNA, 25 bp, Homo sapien
atgggccaggctcagtcccatatca

SEQ ID NO: 5753998 - DNA, 25 bp, Homo sapien
gctacaatcacgcgagccgcgtggg

SEQ ID NO: 5753999 - DNA, 25 bp, Homo sapien
gcagatgacggtgccaaagatgaat

SEQ ID NO: 5754000 - DNA, 25 bp, Homo sapien
tcttgaacagtttgggtaaggaagg

SEQ ID NO: 5754001 - DNA, 25 bp, Homo sapien
cactcgtgcctgcagtggtcggcag

SEQ ID NO: 5754002 - DNA, 25 bp, Homo sapien
catatttcctccaacgctcatcagg

SEQ ID NO: 5754003 - DNA, 25 bp, Homo sapien
ggatcccggcccaggagccgtcagc

SEQ ID NO: 5754004 - DNA, 25 bp, Homo sapien
gctgactgccagtgagaggaggaag

SEQ ID NO: 5754005 - DNA, 25 bp, Homo sapien
ccagtgagaggaggaaggcattggt

SEQ ID NO: 5754006 - DNA, 25 bp, Homo sapien
gtctggcggacccgcgcactgggcc

SEQ ID NO: 5754007 - DNA, 25 bp, Homo sapien
ggtcctcatcgggaagagccctggg

SEQ ID NO: 5754008 - DNA, 25 bp, Homo sapien
tattttcagtgctgattgggaaggg

SEQ ID NO: 5754009 - DNA, 25 bp, Homo sapien
tcagcccttgtcagagttcccactg

SEQ ID NO: 5754010 - DNA, 25 bp, Homo sapien
cgcactgcagcacacgaggccccac

SEQ ID NO: 5754011 - DNA, 25 bp, Homo sapien
caggctccatagtctctaaaacaat

SEQ ID NO: 5754012 - DNA, 25 bp, Homo sapien
gaagatcactgcgtaaagagtgatt

SEQ ID NO: 5754013 - DNA, 25 bp, Homo sapien
aggcatgcctcctttcccatgtact

SEQ ID NO: 5754014 - DNA, 25 bp, Homo sapien
cccactggttgcacgacagtgtaca

SEQ ID NO: 5754015 - DNA, 25 bp, Homo sapien
agggtcctcatcgggaagagccctg

SEQ ID NO: 5754016 - DNA, 25 bp, Homo sapien
ggcaggccgggaacgtggaagttgc

SEQ ID NO: 5754017 - DNA, 25 bp, Homo sapien
gggccaggctcagtcccatatcaga

SEQ ID NO: 5754018 - DNA, 25 bp, Homo sapien
cacgcgagccgcgtgggagcgcgtc

SEQ ID NO: 5754019 - DNA, 25 bp, Homo sapien
ggtttcctgtgtcagttgtggtttg

SEQ ID NO: 5754020 - DNA, 25 bp, Homo sapien
ggtgcatgaagcagtagaccagggg

SEQ ID NO: 5754021 - DNA, 25 bp, Homo sapien
tgaatgtgcccatgagattgggcag

SEQ ID NO: 5754022 - DNA, 25 bp, Homo sapien
ggcggacccgcgcactgggccagcg

SEQ ID NO: 5754023 - DNA, 25 bp, Homo sapien
accgccttgcagatgacggtgccaa

SEQ ID NO: 5754024 - DNA, 25 bp, Homo sapien
tgttggtttcctgtgtcagttgtgg

SEQ ID NO: 5754025 - DNA, 25 bp, Homo sapien
gtcagaggtatgagattaggcctga

SEQ ID NO: 5754026 - DNA, 25 bp, Homo sapien
cctgggtgggccgggagccggatcc

SEQ ID NO: 5754027 - DNA, 25 bp, Homo sapien
gtgtacacggggtagggcaccatga

SEQ ID NO: 5754028 - DNA, 25 bp, Homo sapien
ctggcggacccgcgcactgggccag

SEQ ID NO: 5754029 - DNA, 25 bp, Homo sapien
gaggagaggcgcccccgggcggcac

SEQ ID NO: 5754030 - DNA, 25 bp, Homo sapien
cggtgccaaagatgaatgtgcccat

SEQ ID NO: 5754031 - DNA, 25 bp, Homo sapien
tctctaaaacaatcagtgccattaa

SEQ ID NO: 5754032 - DNA, 25 bp, Homo sapien
tccagtgcgatggccacgaggctta

SEQ ID NO: 5754033 - DNA, 25 bp, Homo sapien
ctcgtgcctgcagtggtcggcagat

SEQ ID NO: 5754034 - DNA, 25 bp, Homo sapien
agaggaggaaggcattggtgacagt

SEQ ID NO: 5754035 - DNA, 25 bp, Homo sapien
tgtcaggtaagctaccttttcctgt

SEQ ID NO: 5754036 - DNA, 25 bp, Homo sapien
cagtgcgatggccacgaggcttagc

SEQ ID NO: 5754037 - DNA, 25 bp, Homo sapien
aatcagtgccattaatctatgtgtg

SEQ ID NO: 5754038 - DNA, 25 bp, Homo sapien
ctactcctcagccagggcccagtgt

SEQ ID NO: 5754039 - DNA, 25 bp, Homo sapien
attaggcctgatggtattttcagtg

SEQ ID NO: 5754040 - DNA, 25 bp, Homo sapien
gtgcagaacagcctgttggtcagag

SEQ ID NO: 5754041 - DNA, 25 bp, Homo sapien
tgaatgaaggagataggagcacccg

SEQ ID NO: 5754042 - DNA, 25 bp, Homo sapien
ggtcagtgtcatgtttctatgggcc

SEQ ID NO: 5754043 - DNA, 25 bp, Homo sapien
aaaagcacaacgatcaccagcaaca

SEQ ID NO: 5754044 - DNA, 25 bp, Homo sapien
tgggaagggtcactgtgaggtcaaa

SEQ ID NO: 5754045 - DNA, 25 bp, Homo sapien
gcatgcctcctttcccatgtactgc

SEQ ID NO: 5754046 - DNA, 25 bp, Homo sapien
agggagtgggagggtcctcatcggg

SEQ ID NO: 5754047 - DNA, 25 bp, Homo sapien
ggagaggcgcccccgggcggcacag

SEQ ID NO: 5754048 - DNA, 25 bp, Homo sapien
gagagtgctcggtgtgcacccgggc

SEQ ID NO: 5754049 - DNA, 25 bp, Homo sapien
ccgtcagctccagggcaggccggga

SEQ ID NO: 5754050 - DNA, 25 bp, Homo sapien
tgcatgaagcagtagaccagggggt

SEQ ID NO: 5754051 - DNA, 25 bp, Homo sapien
ttcagtgcagaacagcctgttggtc

SEQ ID NO: 5754052 - DNA, 25 bp, Homo sapien
tcagcaagtgaatgaaggagatagg

SEQ ID NO: 5754053 - DNA, 25 bp, Homo sapien
gtttgtgttttctatgtctggaagg

SEQ ID NO: 5754054 - DNA, 25 bp, Homo sapien
ctcagtcccatatcagaggcatgcc

SEQ ID NO: 5754055 - DNA, 25 bp, Homo sapien
taggcctgatggtattttcagtgct

SEQ ID NO: 5754056 - DNA, 25 bp, Homo sapien
cgtggaggccgggggcagcagcgag

SEQ ID NO: 5754057 - DNA, 25 bp, Homo sapien
gcacaacgatcaccagcaacattcg

SEQ ID NO: 5754058 - DNA, 25 bp, Homo sapien
ttggtgacagtcctcaggcggcggc

SEQ ID NO: 5754059 - DNA, 25 bp, Homo sapien
cagctccagggcaggccgggaacgt

SEQ ID NO: 5754060 - DNA, 25 bp, Homo sapien
cagcccgccttggtttcggaccctg

SEQ ID NO: 5754061 - DNA, 25 bp, Homo sapien
ccctggcagcccgccttggtttcgg

SEQ ID NO: 5754062 - DNA, 25 bp, Homo sapien
cagatggcgctgtaccgctccagtg

SEQ ID NO: 5754063 - DNA, 25 bp, Homo sapien
agcatatttcctccaacgctcatca

SEQ ID NO: 5754064 - DNA, 25 bp, Homo sapien
ccacactgctgctgttgaggagagg

SEQ ID NO: 5754065 - DNA, 25 bp, Homo sapien
ggttgacacaggccgaggcgtagct

SEQ ID NO: 5754066 - DNA, 25 bp, Homo sapien
cgccttggtttcggaccctgctttg

SEQ ID NO: 5754067 - DNA, 25 bp, Homo sapien
gtcccaggaccacgatgatgagcat

SEQ ID NO: 5754068 - DNA, 25 bp, Homo sapien
gggggctcgcagctgaggttgccca

SEQ ID NO: 5754069 - DNA, 25 bp, Homo sapien
tcccatgtactgctccattcttatt

SEQ ID NO: 5754070 - DNA, 25 bp, Homo sapien
ggaaaccgccttgcagatgacggtg

SEQ ID NO: 5754071 - DNA, 25 bp, Homo sapien
cactgtcgccgtcaaagcgaagccc

SEQ ID NO: 5754072 - DNA, 25 bp, Homo sapien
ctgctagggacgctgtgtctctcca

SEQ ID NO: 5754073 - DNA, 25 bp, Homo sapien
ggaaagggatgaagaaccttttcag

SEQ ID NO: 5754074 - DNA, 25 bp, Homo sapien
accacacccgggatgaagaacaaga

SEQ ID NO: 5754075 - DNA, 25 bp, Homo sapien
cagctttagcagctccatggccccc

SEQ ID NO: 5754076 - DNA, 25 bp, Homo sapien
tgggagggtcctcatcgggaagagc

SEQ ID NO: 5754077 - DNA, 25 bp, Homo sapien
cataaccacacccgggatgaagaac

SEQ ID NO: 5754078 - DNA, 25 bp, Homo sapien
ccctctactcctcagccagggccca

SEQ ID NO: 5754079 - DNA, 25 bp, Homo sapien
agtcctgtgccaggctccatagtct

SEQ ID NO: 5754080 - DNA, 25 bp, Homo sapien
aacagcctgttggtcagaggtatga

SEQ ID NO: 5754081 - DNA, 25 bp, Homo sapien
agcagcttggcctgggtgggccggg

SEQ ID NO: 5754082 - DNA, 25 bp, Homo sapien
ccgcgtgggagcgcgtctgccacac

SEQ ID NO: 5754083 - DNA, 25 bp, Homo sapien
ctcatcaggaagatcactgcgtaaa

SEQ ID NO: 5754084 - DNA, 25 bp, Homo sapien
cacacccgggatgaagaacaagagc

SEQ ID NO: 5754085 - DNA, 25 bp, Homo sapien
gaggtatgagattaggcctgatggt

SEQ ID NO: 5754086 - DNA, 25 bp, Homo sapien
gggccagcgatgcacgcactgcagc

SEQ ID NO: 5754087 - DNA, 25 bp, Homo sapien
agtcagtcctgtgccaggctccata

SEQ ID NO: 5754088 - DNA, 25 bp, Homo sapien
cacaggccgaggcgtagctcagcaa

SEQ ID NO: 5754089 - DNA, 25 bp, Homo sapien
taaccacacccgggatgaagaacaa

SEQ ID NO: 5754090 - DNA, 25 bp, Homo sapien
cagggccacggtccttaactggaaa

SEQ ID NO: 5754091 - DNA, 25 bp, Homo sapien
ggcgagctcgtggaggccgggggca

SEQ ID NO: 5754092 - DNA, 25 bp, Homo sapien
gaagccctaagtagagctcgcgaga

SEQ ID NO: 5754093 - DNA, 25 bp, Homo sapien
gccacactcgtgcctgcagtggtcg

SEQ ID NO: 5754094 - DNA, 25 bp, Homo sapien
ttctatgggccaggctcagtcccat

SEQ ID NO: 5754095 - DNA, 25 bp, Homo sapien
gcgctgtaccgctccagtgcgatgg

SEQ ID NO: 5754096 - DNA, 25 bp, Homo sapien
tcgccaaccgcgccagtctcaggcc

SEQ ID NO: 5754097 - DNA, 25 bp, Homo sapien
gacacactcacagacacccccatga

SEQ ID NO: 5754098 - DNA, 25 bp, Homo sapien
cgccacgtgttggcactataaactg

SEQ ID NO: 5754099 - DNA, 25 bp, Homo sapien
ctcaggcggcggctcagtcccagga

SEQ ID NO: 5754100 - DNA, 25 bp, Homo sapien
cgagagataagcccgtaggccacgg

SEQ ID NO: 5754101 - DNA, 25 bp, Homo sapien
ggcagggccacggtccttaactgga

SEQ ID NO: 5754102 - DNA, 25 bp, Homo sapien
accacgcgcttcttagccagcagct

SEQ ID NO: 5754103 - DNA, 25 bp, Homo sapien
gaatgcgagggggctcgcagctgag

SEQ ID NO: 5754104 - DNA, 25 bp, Homo sapien
agcagcgagcgcaagtttccaggca

SEQ ID NO: 5754105 - DNA, 25 bp, Homo sapien
agcgtagacacactcacagacaccc

SEQ ID NO: 5754106 - DNA, 25 bp, Homo sapien
gcagctccatggcccccgccgagcc

SEQ ID NO: 5754107 - DNA, 25 bp, Homo sapien
cactgcagcacacgaggccccactg

SEQ ID NO: 5754108 - DNA, 25 bp, Homo sapien
cggccataaccacacccgggatgaa

SEQ ID NO: 5754109 - DNA, 25 bp, Homo sapien
tcagtgcatgtcatttgccctgcct

SEQ ID NO: 5754110 - DNA, 25 bp, Homo sapien
cttcgccaaccgcgccagtctcagg

SEQ ID NO: 5754111 - DNA, 25 bp, Homo sapien
gagcgcaagtttccaggcaggcctg

SEQ ID NO: 5754112 - DNA, 25 bp, Homo sapien
acagaaaaaaaagcacaacgatcac

SEQ ID NO: 5754113 - DNA, 25 bp, Homo sapien
catggcccccgccgagcccgccgcc

SEQ ID NO: 5754114 - DNA, 25 bp, Homo sapien
cgtgcctgcagtggtcggcagatgg

SEQ ID NO: 5754115 - DNA, 25 bp, Homo sapien
gtaggccacggccataaccacaccc

SEQ ID NO: 5754116 - DNA, 25 bp, Homo sapien
cactgctagggacgctgtgtctctc

SEQ ID NO: 5754117 - DNA, 25 bp, Homo sapien
gaggtcgctgactgccagtgagagg

SEQ ID NO: 5754118 - DNA, 25 bp, Homo sapien
ttttcagtgcagaacagcctgttgg

SEQ ID NO: 5754119 - DNA, 25 bp, Homo sapien
tgtgcacccgggccatcaaaggcgc

SEQ ID NO: 5754120 - DNA, 25 bp, Homo sapien
gatggtggtgtagctaagcctggac

SEQ ID NO: 5754121 - DNA, 25 bp, Homo sapien
gcgtctgccacactcgtgcctgcag

SEQ ID NO: 5754122 - DNA, 25 bp, Homo sapien
catgagattgggcaggagggtgaag

SEQ ID NO: 5754123 - DNA, 25 bp, Homo sapien
agctcgcgagagataagcccgtagg

SEQ ID NO: 5754124 - DNA, 25 bp, Homo sapien
caaccaacacagaaaaaaaagcaca

SEQ ID NO: 5754125 - DNA, 25 bp, Homo sapien
gccagggcccagtgtgctgatggtg

SEQ ID NO: 5754126 - DNA, 25 bp, Homo sapien
tagcagctccatggcccccgccgag

SEQ ID NO: 5754127 - DNA, 25 bp, Homo sapien
gtggtgtagctaagcctggacagcg

SEQ ID NO: 5754128 - DNA, 25 bp, Homo sapien
cccatgagattgggcaggagggtga

SEQ ID NO: 5754129 - DNA, 25 bp, Homo sapien
cccgggtccggttccctgcacgctc

SEQ ID NO: 5754130 - DNA, 25 bp, Homo sapien
cgcgccagtctcaggccggcaacgc

SEQ ID NO: 5754131 - DNA, 25 bp, Homo sapien
ctcgcgagagataagcccgtaggcc

SEQ ID NO: 5754132 - DNA, 25 bp, Homo sapien
aattctcgtgtcccggctccgcgaa

SEQ ID NO: 5754133 - DNA, 25 bp, Homo sapien
gcgatggccacgaggcttagcgtag

SEQ ID NO: 5754134 - DNA, 25 bp, Homo sapien
gagggggctcgcagctgaggttgcc

SEQ ID NO: 5754135 - DNA, 25 bp, Homo sapien
ggaagttgcacgtagcagccatcgc

SEQ ID NO: 5754136 - DNA, 25 bp, Homo sapien
tcctgtgcgttggggttagtccatg

SEQ ID NO: 5754137 - DNA, 25 bp, Homo sapien
caggtcagcccttgtcagagttccc

SEQ ID NO: 5754138 - DNA, 25 bp, Homo sapien
tagctaagcctggacagcgaagcaa

SEQ ID NO: 5754139 - DNA, 25 bp, Homo sapien
gcccctggcagcccgccttggtttc

SEQ ID NO: 5754140 - DNA, 25 bp, Homo sapien
tcgacccggcgggctcccaccgcgg

SEQ ID NO: 5754141 - DNA, 25 bp, Homo sapien
gtgtcagttgtggtttgtgttttct

SEQ ID NO: 5754142 - DNA, 25 bp, Homo sapien
acgacagtgtacacggggtagggca

SEQ ID NO: 5754143 - DNA, 25 bp, Homo sapien
cgaggccccactggttgcacgacag

SEQ ID NO: 5754144 - DNA, 25 bp, Homo sapien
gatggcgctgtaccgctccagtgcg

SEQ ID NO: 5754145 - DNA, 25 bp, Homo sapien
cccggcccaggagccgtcagcgccg

SEQ ID NO: 5754146 - DNA, 25 bp, Homo sapien
ccgagagtgctcggtgtgcacccgg

SEQ ID NO: 5754147 - DNA, 25 bp, Homo sapien
cggttccctgcacgctccggttcag

SEQ ID NO: 5754148 - DNA, 25 bp, Homo sapien
agattgggcaggagggtgaagggca

SEQ ID NO: 5754149 - DNA, 25 bp, Homo sapien
agccaaacaatttattatttcttga

SEQ ID NO: 5754150 - DNA, 25 bp, Homo sapien
gtaaagagtgattctaatggccagc

SEQ ID NO: 5754151 - DNA, 25 bp, Homo sapien
tgattgggaagggtcactgtgaggt

SEQ ID NO: 5754152 - DNA, 25 bp, Homo sapien
agctcgtggaggccgggggcagcag

SEQ ID NO: 5754153 - DNA, 25 bp, Homo sapien
tgtcccggctccgcgaatgcgaggg

SEQ ID NO: 5754154 - DNA, 25 bp, Homo sapien
tgcacgctccggttcagctttagca

SEQ ID NO: 5754155 - DNA, 25 bp, Homo sapien
gtccatgctttgggtgttggtttcc

SEQ ID NO: 5754156 - DNA, 25 bp, Homo sapien
gtcactgtgaggtcaaactaggagc

SEQ ID NO: 5754157 - DNA, 25 bp, Homo sapien
atgtttctatgggccaggctcagtc

SEQ ID NO: 5754158 - DNA, 25 bp, Homo sapien
gagcgcgtctgccacactcgtgcct

SEQ ID NO: 5754159 - DNA, 25 bp, Homo sapien
gaagcaatggagggagtgggagggt

SEQ ID NO: 5754160 - DNA, 25 bp, Homo sapien
tgagaggaggaaggcattggtgaca

SEQ ID NO: 5754161 - DNA, 25 bp, Homo sapien
tcggaccctgctttggctgtcgctg

SEQ ID NO: 5754162 - DNA, 25 bp, Homo sapien
ctgtgtagaaatagttcactgctag

SEQ ID NO: 5754163 - DNA, 25 bp, Homo sapien
agttcactgctagggacgctgtgtc

SEQ ID NO: 5754164 - DNA, 25 bp, Homo sapien
ttcagctttagcagctccatggccc

SEQ ID NO: 5754165 - DNA, 25 bp, Homo sapien
gaggtaggaaaccgccttgcagatg

SEQ ID NO: 5754166 - DNA, 25 bp, Homo sapien
gcccgccttggtttcggaccctgct

SEQ ID NO: 5754167 - DNA, 25 bp, Homo sapien
ggcccgggtccggttccctgcacgc

SEQ ID NO: 5754168 - DNA, 25 bp, Homo sapien
ccagctccaattctcgtgtcccggc

SEQ ID NO: 5754169 - DNA, 25 bp, Homo sapien
ctttggctgtcgctgtcactgtcgc

SEQ ID NO: 5754170 - DNA, 25 bp, Homo sapien
agaaaaaaaagcacaacgatcacca

SEQ ID NO: 5754171 - DNA, 25 bp, Homo sapien
gacacccccatgaggtaggaaaccg

SEQ ID NO: 5754172 - DNA, 25 bp, Homo sapien
cgagctcgtggaggccgggggcagc

SEQ ID NO: 5754173 - DNA, 25 bp, Homo sapien
acccgagagtgctcggtgtgcaccc

SEQ ID NO: 5754174 - DNA, 25 bp, Homo sapien
cagcgatgcacgcactgcagcacac

SEQ ID NO: 5754175 - DNA, 25 bp, Homo sapien
tttcctgtgcgttggggttagtcca

SEQ ID NO: 5754176 - DNA, 25 bp, Homo sapien
cgcgagccgcgtgggagcgcgtctg

SEQ ID NO: 5754177 - DNA, 25 bp, Homo sapien
ccccgccgagcccgccgccttactc

SEQ ID NO: 5754178 - DNA, 25 bp, Homo sapien
gggggcagcagcgagcgcaagtttc

SEQ ID NO: 5754179 - DNA, 25 bp, Homo sapien
cagctcgacccggcgggctcccacc

SEQ ID NO: 5754180 - DNA, 25 bp, Homo sapien
gacagtgtacacggggtagggcacc

SEQ ID NO: 5754181 - DNA, 25 bp, Homo sapien
aaaccgccttgcagatgacggtgcc

SEQ ID NO: 5754182 - DNA, 25 bp, Homo sapien
tgtctggaagggtcagtgcatgtca

SEQ ID NO: 5754183 - DNA, 25 bp, Homo sapien
cctgcacgctccggttcagctttag

SEQ ID NO: 5754184 - DNA, 25 bp, Homo sapien
gttagtccatgctttgggtgttggt

SEQ ID NO: 5754185 - DNA, 25 bp, Homo sapien
ccttttcagtgcagaacagcctgtt

SEQ ID NO: 5754186 - DNA, 25 bp, Homo sapien
ctggggcgagctcgtggaggccggg

SEQ ID NO: 5754187 - DNA, 25 bp, Homo sapien
aggccccactggttgcacgacagtg

SEQ ID NO: 5754188 - DNA, 25 bp, Homo sapien
ataagcccgtaggccacggccataa

SEQ ID NO: 5754189 - DNA, 25 bp, Homo sapien
aaggagagggcagggccacggtcct

SEQ ID NO: 5754190 - DNA, 25 bp, Homo sapien
cagcgaagcaatggagggagtggga

SEQ ID NO: 5754191 - DNA, 25 bp, Homo sapien
ctctccaaggtcagtgtcatgtttc

SEQ ID NO: 5754192 - DNA, 25 bp, Homo sapien
aagggcatgcaagccacagccagca

SEQ ID NO: 5754193 - DNA, 25 bp, Homo sapien
gccacagccagcaggaggtcgctga

SEQ ID NO: 5754194 - DNA, 25 bp, Homo sapien
gtctgccacactcgtgcctgcagtg

SEQ ID NO: 5754195 - DNA, 25 bp, Homo sapien
gtcagctccagggcaggccgggaac

SEQ ID NO: 5754196 - DNA, 25 bp, Homo sapien
agtcctcaggcggcggctcagtccc

SEQ ID NO: 5754197 - DNA, 25 bp, Homo sapien
gcgaatgcgagggggctcgcagctg

SEQ ID NO: 5754198 - DNA, 25 bp, Homo sapien
ggctcagtcccaggaccacgatgat

SEQ ID NO: 5754199 - DNA, 25 bp, Homo sapien
ttagccagcagcttggcctgggtgg

SEQ ID NO: 5754200 - DNA, 25 bp, Homo sapien
ggagagggcagggccacggtcctta

SEQ ID NO: 5754201 - DNA, 25 bp, Homo sapien
ctccaaggtcagtgtcatgtttcta

SEQ ID NO: 5754202 - DNA, 25 bp, Homo sapien
ggtcagtgcatgtcatttgccctgc

SEQ ID NO: 5754203 - DNA, 25 bp, Homo sapien
ctgtgcgttggggttagtccatgct

SEQ ID NO: 5754204 - DNA, 25 bp, Homo sapien
tgtggtttgtgttttctatgtctgg

SEQ ID NO: 5754205 - DNA, 25 bp, Homo sapien
gggaagagccctggggcgagctcgt

SEQ ID NO: 5754206 - DNA, 25 bp, Homo sapien
cactcacagacacccccatgaggta

SEQ ID NO: 5754207 - DNA, 25 bp, Homo sapien
gccacggtccttaactggaaaggga

SEQ ID NO: 5754208 - DNA, 25 bp, Homo sapien
tgtcatgtttctatgggccaggctc

SEQ ID NO: 5754209 - DNA, 25 bp, Homo sapien
ggtgtgcacccgggccatcaaaggc

SEQ ID NO: 5754210 - DNA, 25 bp, Homo sapien
gaccaggtctggcggacccgcgcac

SEQ ID NO: 5754211 - DNA, 25 bp, Homo sapien
actataaactggcaaccaacacaga

SEQ ID NO: 5754212 - DNA, 25 bp, Homo sapien
gcagcacacgaggccccactggttg

SEQ ID NO: 5754213 - DNA, 25 bp, Homo sapien
atgcgagggggctcgcagctgaggt

SEQ ID NO: 5754214 - DNA, 25 bp, Homo sapien
gttttctatgtctggaagggtcagt

SEQ ID NO: 5754215 - DNA, 25 bp, Homo sapien
cgcccgttctggtgaacagcccctg

SEQ ID NO: 5754216 - DNA, 25 bp, Homo sapien
atgtactgctccattcttattcctc

SEQ ID NO: 5754217 - DNA, 25 bp, Homo sapien
taaaacaatcagtgccattaatcta

SEQ ID NO: 5754218 - DNA, 25 bp, Homo sapien
ttttcagtgctgattgggaagggtc

SEQ ID NO: 5754219 - DNA, 25 bp, Homo sapien
agcaagtgaatgaaggagataggag

SEQ ID NO: 5754220 - DNA, 25 bp, Homo sapien
tggccacgaggcttagcgtagacac

SEQ ID NO: 5754221 - DNA, 25 bp, Homo sapien
cgccgtcaaagcgaagccctaagta

SEQ ID NO: 5754222 - DNA, 25 bp, Homo sapien
ctccaattctcgtgtcccggctccg

SEQ ID NO: 5754223 - DNA, 25 bp, Homo sapien
cagacacccccatgaggtaggaaac

SEQ ID NO: 5754224 - DNA, 25 bp, Homo sapien
aggagccgtcagcgccgtcagctcc

SEQ ID NO: 5754225 - DNA, 25 bp, Homo sapien
ttggcctgggtgggccgggagccgg

SEQ ID NO: 5754226 - DNA, 25 bp, Homo sapien
cattggtgacagtcctcaggcggcg

SEQ ID NO: 5754227 - DNA, 25 bp, Homo sapien
tgactgccagtgagaggaggaaggc

SEQ ID NO: 5754228 - DNA, 25 bp, Homo sapien
tcgcaccacgcgcttcttagccagc

SEQ ID NO: 5754229 - DNA, 25 bp, Homo sapien
gggttagtccatgctttgggtgttg

SEQ ID NO: 5754230 - DNA, 25 bp, Homo sapien
ggagggagtgggagggtcctcatcg

SEQ ID NO: 5754231 - DNA, 25 bp, Homo sapien
gtttctatgggccaggctcagtccc

SEQ ID NO: 5754232 - DNA, 25 bp, Homo sapien
gccacggccataaccacacccggga

SEQ ID NO: 5754233 - DNA, 25 bp, Homo sapien
tagacacactcacagacacccccat

SEQ ID NO: 5754234 - DNA, 25 bp, Homo sapien
agccatcgctgtcttcgccaaccgc

SEQ ID NO: 5754235 - DNA, 25 bp, Homo sapien
tcctcaggcggcggctcagtcccag

SEQ ID NO: 5754236 - DNA, 25 bp, Homo sapien
gagaggcaggtcagcccttgtcaga

SEQ ID NO: 5754237 - DNA, 25 bp, Homo sapien
tacaatcacgcgagccgcgtgggag

SEQ ID NO: 5754238 - DNA, 25 bp, Homo sapien
cggaccaggtctggcggacccgcgc

SEQ ID NO: 5754239 - DNA, 25 bp, Homo sapien
gttgcacgtagcagccatcgctgtc

SEQ ID NO: 5754240 - DNA, 25 bp, Homo sapien
atagttcactgctagggacgctgtg

SEQ ID NO: 5754241 - DNA, 25 bp, Homo sapien
tcgcagctgaggttgcccacactgc

SEQ ID NO: 5754242 - DNA, 25 bp, Homo sapien
aagcacaacgatcaccagcaacatt

SEQ ID NO: 5754243 - DNA, 25 bp, Homo sapien
acggtgcatgaagcagtagaccagg

SEQ ID NO: 5754244 - DNA, 25 bp, Homo sapien
agataggagcacccgagagtgctcg

SEQ ID NO: 5754245 - DNA, 25 bp, Homo sapien
aaggcattggtgacagtcctcaggc

SEQ ID NO: 5754246 - DNA, 25 bp, Homo sapien
aagggtcactgtgaggtcaaactag

SEQ ID NO: 5754247 - DNA, 25 bp, Homo sapien
accctgctttggctgtcgctgtcac

SEQ ID NO: 5754248 - DNA, 25 bp, Homo sapien
ctgtcgccgtcaaagcgaagcccta

SEQ ID NO: 5754249 - DNA, 25 bp, Homo sapien
cttactcagctcgacccggcgggct

SEQ ID NO: 5754250 - DNA, 25 bp, Homo sapien
gccaaagatgaatgtgcccatgaga

SEQ ID NO: 5754251 - DNA, 25 bp, Homo sapien
aagttgcacgtagcagccatcgctg

SEQ ID NO: 5754252 - DNA, 25 bp, Homo sapien
gcggctcagtcccaggaccacgatg

SEQ ID NO: 5754253 - DNA, 25 bp, Homo sapien
tgcacgcactgcagcacacgaggcc

SEQ ID NO: 5754254 - DNA, 25 bp, Homo sapien
tcctcatcgggaagagccctggggc

SEQ ID NO: 5754255 - DNA, 25 bp, Homo sapien
atgatgagcatatttcctccaacgc

SEQ ID NO: 5754256 - DNA, 25 bp, Homo sapien
gtgcgttggggttagtccatgcttt

SEQ ID NO: 5754257 - DNA, 25 bp, Homo sapien
cgtcagcgccgtcagctccagggca

SEQ ID NO: 5754258 - DNA, 25 bp, Homo sapien
ctcacagacacccccatgaggtagg

SEQ ID NO: 5754259 - DNA, 25 bp, Homo sapien
ttggtttcggaccctgctttggctg

SEQ ID NO: 5754260 - DNA, 25 bp, Homo sapien
attcttattcctcttgtgtcaggta

SEQ ID NO: 5754261 - DNA, 25 bp, Homo sapien
ctgtgtcagttgtggtttgtgtttt

SEQ ID NO: 5754262 - DNA, 25 bp, Homo sapien
catcccagagtcagtcctgtgccag

SEQ ID NO: 5754263 - DNA, 25 bp, Homo sapien
ctgcagcacacgaggccccactggt

SEQ ID NO: 5754264 - DNA, 25 bp, Homo sapien
ggggcgagctcgtggaggccggggg

SEQ ID NO: 5754265 - DNA, 25 bp, Homo sapien
cctcgtcgacccaccaccccatcac

SEQ ID NO: 5754266 - DNA, 25 bp, Homo sapien
acaccgcctccccctggaatctcag

SEQ ID NO: 5754267 - DNA, 25 bp, Homo sapien
aagtgcaaaaaagtgcatgactcac

SEQ ID NO: 5754268 - DNA, 25 bp, Homo sapien
gcagaggtaccctccgacccaccac

SEQ ID NO: 5754269 - DNA, 25 bp, Homo sapien
ctatcacaaaatgaacggacagaac

SEQ ID NO: 5754270 - DNA, 25 bp, Homo sapien
gcgaaggctgtctgcagccaggaga

SEQ ID NO: 5754271 - DNA, 25 bp, Homo sapien
cagccccttctccaagacgtccatc

SEQ ID NO: 5754272 - DNA, 25 bp, Homo sapien
gagagggcgcgagcacagccgaggc

SEQ ID NO: 5754273 - DNA, 25 bp, Homo sapien
atctgaccgagcaggtcgtacgccg

SEQ ID NO: 5754274 - DNA, 25 bp, Homo sapien
gcagcctgctgggcggctcccccac

SEQ ID NO: 5754275 - DNA, 25 bp, Homo sapien
gtaccctccgacccaccacgggagc

SEQ ID NO: 5754276 - DNA, 25 bp, Homo sapien
tcacctttgcttcccagccttccca

SEQ ID NO: 5754277 - DNA, 25 bp, Homo sapien
aaggcaaccacgtcccgccctacta

SEQ ID NO: 5754278 - DNA, 25 bp, Homo sapien
gcgagcacagccgaggccatggagg

SEQ ID NO: 5754279 - DNA, 25 bp, Homo sapien
tgctgggcggctcccccaccggctt

SEQ ID NO: 5754280 - DNA, 25 bp, Homo sapien
tttttaacatcgacggtcaaggcaa

SEQ ID NO: 5754281 - DNA, 25 bp, Homo sapien
ctgtcctttggaccacaccacccct

SEQ ID NO: 5754282 - DNA, 25 bp, Homo sapien
ctgtggcggcgagatggcacgggac

SEQ ID NO: 5754283 - DNA, 25 bp, Homo sapien
gggttagagccctgctcgatgctca

SEQ ID NO: 5754284 - DNA, 25 bp, Homo sapien
tcaagtaccaggtgcccctgcccga

SEQ ID NO: 5754285 - DNA, 25 bp, Homo sapien
gagtccctgcagtccctttcgactt

SEQ ID NO: 5754286 - DNA, 25 bp, Homo sapien
gtggaaattaagaagaaactaggtc

SEQ ID NO: 5754287 - DNA, 25 bp, Homo sapien
aatgcctgtgggctctactacaagc

SEQ ID NO: 5754288 - DNA, 25 bp, Homo sapien
gcagaaagcaaaattatgtttgcca

SEQ ID NO: 5754289 - DNA, 25 bp, Homo sapien
gtcagggccacggtgcagaggtacc

SEQ ID NO: 5754290 - DNA, 25 bp, Homo sapien
tttgccactttgcaaaggagctcac

SEQ ID NO: 5754291 - DNA, 25 bp, Homo sapien
gagcgagcaacgcaatctgaccgag

SEQ ID NO: 5754292 - DNA, 25 bp, Homo sapien
accgaaagcaaatcattcaacgacc

SEQ ID NO: 5754293 - DNA, 25 bp, Homo sapien
cctctgcttcatggatccctaccct

SEQ ID NO: 5754294 - DNA, 25 bp, Homo sapien
agtgtgtgaactgtggggcaacctc

SEQ ID NO: 5754295 - DNA, 25 bp, Homo sapien
gacagagcgagcaacgcaatctgac

SEQ ID NO: 5754296 - DNA, 25 bp, Homo sapien
tggagtcgtcccactcccgtggcag

SEQ ID NO: 5754297 - DNA, 25 bp, Homo sapien
ccagaccagaaaccgaaaaatgtct

SEQ ID NO: 5754298 - DNA, 25 bp, Homo sapien
aaattaagaagaaactaggtctgat

SEQ ID NO: 5754299 - DNA, 25 bp, Homo sapien
gatggatatatgtttttgaaggcag

SEQ ID NO: 5754300 - DNA, 25 bp, Homo sapien
atctgggtagctgtaaggcatgaag

SEQ ID NO: 5754301 - DNA, 25 bp, Homo sapien
gccgccctctccagacacatgtcct

SEQ ID NO: 5754302 - DNA, 25 bp, Homo sapien
atgtcctccctgagccacatctcgc

SEQ ID NO: 5754303 - DNA, 25 bp, Homo sapien
cccttctccaagacgtccatccacc

SEQ ID NO: 5754304 - DNA, 25 bp, Homo sapien
ctgtgcaacgcctgcgggctctatc

SEQ ID NO: 5754305 - DNA, 25 bp, Homo sapien
aaaagtgcaaaaaagtgcatgactc

SEQ ID NO: 5754306 - DNA, 25 bp, Homo sapien
gacgcggcgcagtacccgctgccgg

SEQ ID NO: 5754307 - DNA, 25 bp, Homo sapien
ctaggtctgatattcaaatggacaa

SEQ ID NO: 5754308 - DNA, 25 bp, Homo sapien
cgaggagggactccgcctccgagcg

SEQ ID NO: 5754309 - DNA, 25 bp, Homo sapien
tatatgtttttgaaggcagaaagca

SEQ ID NO: 5754310 - DNA, 25 bp, Homo sapien
gcacagccgaggccatggaggtgac

SEQ ID NO: 5754311 - DNA, 25 bp, Homo sapien
caaactgccagttttgtttcctttc

SEQ ID NO: 5754312 - DNA, 25 bp, Homo sapien
tccagcctgtcctttggaccacacc

SEQ ID NO: 5754313 - DNA, 25 bp, Homo sapien
aatatgggagaaatagtgtggaaat

SEQ ID NO: 5754314 - DNA, 25 bp, Homo sapien
gtccatccaccacggctccccgggg

SEQ ID NO: 5754315 - DNA, 25 bp, Homo sapien
gggacactacctgtgcaacgcctgc

SEQ ID NO: 5754316 - DNA, 25 bp, Homo sapien
ctcatatcccctatttaacagggtc

SEQ ID NO: 5754317 - DNA, 25 bp, Homo sapien
ccgagcggctgaggaccccggtgca

SEQ ID NO: 5754318 - DNA, 25 bp, Homo sapien
ttaagcccaagcgaaggctgtctgc

SEQ ID NO: 5754319 - DNA, 25 bp, Homo sapien
gagccctgctcgatgctcacagggc

SEQ ID NO: 5754320 - DNA, 25 bp, Homo sapien
agcagtatcatgaagcctaaacgcg

SEQ ID NO: 5754321 - DNA, 25 bp, Homo sapien
ctgaccacgcccacgccgatgcacc

SEQ ID NO: 5754322 - DNA, 25 bp, Homo sapien
ctgtccaccccaggctcggccggct

SEQ ID NO: 5754323 - DNA, 25 bp, Homo sapien
tcagaccaccacaaccacactctgg

SEQ ID NO: 5754324 - DNA, 25 bp, Homo sapien
tggacgcggcgcagtacccgctgcc

SEQ ID NO: 5754325 - DNA, 25 bp, Homo sapien
acgggacactacctgtgcaacgcct

SEQ ID NO: 5754326 - DNA, 25 bp, Homo sapien
accccaggctcggccggctcggccc

SEQ ID NO: 5754327 - DNA, 25 bp, Homo sapien
ttcccccccagcagcctgctgggcg

SEQ ID NO: 5754328 - DNA, 25 bp, Homo sapien
gactcactggaggacttccccaaga

SEQ ID NO: 5754329 - DNA, 25 bp, Homo sapien
cgccatgggttagagccctgctcga

SEQ ID NO: 5754330 - DNA, 25 bp, Homo sapien
tgaacggacagaaccggcccctcat

SEQ ID NO: 5754331 - DNA, 25 bp, Homo sapien
cctccgacccaccacgggagccagg

SEQ ID NO: 5754332 - DNA, 25 bp, Homo sapien
atctcagccccttctccaagacgtc

SEQ ID NO: 5754333 - DNA, 25 bp, Homo sapien
gccctactacggaaactcggtcagg

SEQ ID NO: 5754334 - DNA, 25 bp, Homo sapien
caggcggaccgccctccctccccgc

SEQ ID NO: 5754335 - DNA, 25 bp, Homo sapien
aaggcccggtccagcacaggcaggg

SEQ ID NO: 5754336 - DNA, 25 bp, Homo sapien
aatgtctagcaaatccaaaaagtgc

SEQ ID NO: 5754337 - DNA, 25 bp, Homo sapien
gcaacgcctgcgggctctatcacaa

SEQ ID NO: 5754338 - DNA, 25 bp, Homo sapien
ggaccccggtgcagaggagcctggc

SEQ ID NO: 5754339 - DNA, 25 bp, Homo sapien
agccgaggccatggaggtgacggcg

SEQ ID NO: 5754340 - DNA, 25 bp, Homo sapien
tatgtttttgaaggcagaaagcaaa

SEQ ID NO: 5754341 - DNA, 25 bp, Homo sapien
acatgtcctccctgagccacatctc

SEQ ID NO: 5754342 - DNA, 25 bp, Homo sapien
tgtttttgaaggcagaaagcaaaat

SEQ ID NO: 5754343 - DNA, 25 bp, Homo sapien
tcacagggcccccagcgagagtccc

SEQ ID NO: 5754344 - DNA, 25 bp, Homo sapien
accaccacaaccacactctggagga

SEQ ID NO: 5754345 - DNA, 25 bp, Homo sapien
aagcgaaggctgtctgcagccagga

SEQ ID NO: 5754346 - DNA, 25 bp, Homo sapien
cggaccgccctccctccccgcgcgc

SEQ ID NO: 5754347 - DNA, 25 bp, Homo sapien
tccaagacgtccatccaccacggct

SEQ ID NO: 5754348 - DNA, 25 bp, Homo sapien
ccctgtctgcaatgcctgtgggctc

SEQ ID NO: 5754349 - DNA, 25 bp, Homo sapien
agcaaaattatgtttgccactttgc

SEQ ID NO: 5754350 - DNA, 25 bp, Homo sapien
cttcttctctttgctaaacgacccc

SEQ ID NO: 5754351 - DNA, 25 bp, Homo sapien
cccgccctacgtgcccgagtacagc

SEQ ID NO: 5754352 - DNA, 25 bp, Homo sapien
atgaccgccctgggtggagcctcct

SEQ ID NO: 5754353 - DNA, 25 bp, Homo sapien
ccgccatccagcctgtcctttggac

SEQ ID NO: 5754354 - DNA, 25 bp, Homo sapien
gagccaccaccaccccgccgtgctc

SEQ ID NO: 5754355 - DNA, 25 bp, Homo sapien
tacgccgccgcctcctcctcctctc

SEQ ID NO: 5754356 - DNA, 25 bp, Homo sapien
aaaaaaatgctgaacattgcatata

SEQ ID NO: 5754357 - DNA, 25 bp, Homo sapien
ggcccccagcgagagtccctgcagt

SEQ ID NO: 5754358 - DNA, 25 bp, Homo sapien
agccacatctcgcccttcagccact

SEQ ID NO: 5754359 - DNA, 25 bp, Homo sapien
aaagcaaatcattcaacgacccccg

SEQ ID NO: 5754360 - DNA, 25 bp, Homo sapien
acaatattaacagacccctgactat

SEQ ID NO: 5754361 - DNA, 25 bp, Homo sapien
caacctcgaccccactgtggcggcg

SEQ ID NO: 5754362 - DNA, 25 bp, Homo sapien
gaccacgcccacgccgatgcacccg

SEQ ID NO: 5754363 - DNA, 25 bp, Homo sapien
caagacgtccatccaccacggctcc

SEQ ID NO: 5754364 - DNA, 25 bp, Homo sapien
ataagccattctgactcatatcccc

SEQ ID NO: 5754365 - DNA, 25 bp, Homo sapien
gagagtccctgcagtccctttcgac

SEQ ID NO: 5754366 - DNA, 25 bp, Homo sapien
aactcggtcagggccacggtgcaga

SEQ ID NO: 5754367 - DNA, 25 bp, Homo sapien
cctcccaggcggaccgccctccctc

SEQ ID NO: 5754368 - DNA, 25 bp, Homo sapien
ccctgcagtccctttcgacttgcat

SEQ ID NO: 5754369 - DNA, 25 bp, Homo sapien
atggaggtgacggcggaccagccgc

SEQ ID NO: 5754370 - DNA, 25 bp, Homo sapien
ctaccctggctggacggcggcaaag

SEQ ID NO: 5754371 - DNA, 25 bp, Homo sapien
ctcctcctctctgctcttcgctacc

SEQ ID NO: 5754372 - DNA, 25 bp, Homo sapien
gggtctctagtgctgtgaaaaaaaa

SEQ ID NO: 5754373 - DNA, 25 bp, Homo sapien
gtgctttttaacatcgacggtcaag

SEQ ID NO: 5754374 - DNA, 25 bp, Homo sapien
aactgccagttttgtttcctttcac

SEQ ID NO: 5754375 - DNA, 25 bp, Homo sapien
gtgacggcggaccagccgcgctggg

SEQ ID NO: 5754376 - DNA, 25 bp, Homo sapien
cctggctggacggcggcaaagccct

SEQ ID NO: 5754377 - DNA, 25 bp, Homo sapien
cagttttgtttcctttcactggcca

SEQ ID NO: 5754378 - DNA, 25 bp, Homo sapien
taagaagaaactaggtctgatattc

SEQ ID NO: 5754379 - DNA, 25 bp, Homo sapien
tctgcttcatggatccctaccctgg

SEQ ID NO: 5754380 - DNA, 25 bp, Homo sapien
tgccaatggggaccctgtctgcaat

SEQ ID NO: 5754381 - DNA, 25 bp, Homo sapien
ccgacggcaggagccccccgacctc

SEQ ID NO: 5754382 - DNA, 25 bp, Homo sapien
gctcgtttaacccggccgccctctc

SEQ ID NO: 5754383 - DNA, 25 bp, Homo sapien
gtacaatgactttattgcatctggg

SEQ ID NO: 5754384 - DNA, 25 bp, Homo sapien
actcttcccccccagcagcctgctg

SEQ ID NO: 5754385 - DNA, 25 bp, Homo sapien
tgcctgtgggctctactacaagctt

SEQ ID NO: 5754386 - DNA, 25 bp, Homo sapien
tgactttattgcatctgggtagctg

SEQ ID NO: 5754387 - DNA, 25 bp, Homo sapien
ctcattaagcccaagcgaaggctgt

SEQ ID NO: 5754388 - DNA, 25 bp, Homo sapien
ccgtggcagcatgaccgccctgggt

SEQ ID NO: 5754389 - DNA, 25 bp, Homo sapien
aaaagtgcatgactcactggaggac

SEQ ID NO: 5754390 - DNA, 25 bp, Homo sapien
atcatgaagcctaaacgcgatggat

SEQ ID NO: 5754391 - DNA, 25 bp, Homo sapien
tcctcctcctctctgctcttcgcta

SEQ ID NO: 5754392 - DNA, 25 bp, Homo sapien
cagacccctgactatgaagaaggaa

SEQ ID NO: 5754393 - DNA, 25 bp, Homo sapien
gctcttcgctacccaggtgacccga

SEQ ID NO: 5754394 - DNA, 25 bp, Homo sapien
tcctttgctcacctttgcttcccag

SEQ ID NO: 5754395 - DNA, 25 bp, Homo sapien
cctcctcctcctctctgctcttcgc

SEQ ID NO: 5754396 - DNA, 25 bp, Homo sapien
ctgccagttttgtttcctttcactg

SEQ ID NO: 5754397 - DNA, 25 bp, Homo sapien
ctgcaatgcctgtgggctctactac

SEQ ID NO: 5754398 - DNA, 25 bp, Homo sapien
ctgccggaggaggtggatgtgcttt

SEQ ID NO: 5754399 - DNA, 25 bp, Homo sapien
ttgaaggcagaaagcaaaattatgt

SEQ ID NO: 5754400 - DNA, 25 bp, Homo sapien
tctcctttgctcacctttgcttccc

SEQ ID NO: 5754401 - DNA, 25 bp, Homo sapien
cctgctcgatgctcacagggccccc

SEQ ID NO: 5754402 - DNA, 25 bp, Homo sapien
ggcccggcgagagggcgcgagcaca

SEQ ID NO: 5754403 - DNA, 25 bp, Homo sapien
agaacagctcgtttaacccggccgc

SEQ ID NO: 5754404 - DNA, 25 bp, Homo sapien
ccatctgtgaataagccattctgac

SEQ ID NO: 5754405 - DNA, 25 bp, Homo sapien
tatgaagaaggaaggcatccagacc

SEQ ID NO: 5754406 - DNA, 25 bp, Homo sapien
gccctgggcagccaccacaccgcct

SEQ ID NO: 5754407 - DNA, 25 bp, Homo sapien
tatgtttgccactttgcaaaggagc

SEQ ID NO: 5754408 - DNA, 25 bp, Homo sapien
ctacctgtgcaacgcctgcgggctc

SEQ ID NO: 5754409 - DNA, 25 bp, Homo sapien
ctgtacaatgactttattgcatctg

SEQ ID NO: 5754410 - DNA, 25 bp, Homo sapien
ccgttttattctgccatacccagtt

SEQ ID NO: 5754411 - DNA, 25 bp, Homo sapien
cagcctgtcctttggaccacaccac

SEQ ID NO: 5754412 - DNA, 25 bp, Homo sapien
cctttggaccacaccacccctccag

SEQ ID NO: 5754413 - DNA, 25 bp, Homo sapien
gccgcctcctcctcctctctgctct

SEQ ID NO: 5754414 - DNA, 25 bp, Homo sapien
gcacctcttcaccttcccgcccacc

SEQ ID NO: 5754415 - DNA, 25 bp, Homo sapien
cctacatggacgcggcgcagtaccc

SEQ ID NO: 5754416 - DNA, 25 bp, Homo sapien
gaaactcggtcagggccacggtgca

SEQ ID NO: 5754417 - DNA, 25 bp, Homo sapien
tgcatttttgcaggagcagtatcat

SEQ ID NO: 5754418 - DNA, 25 bp, Homo sapien
cggcgagagggcgcgagcacagccg

SEQ ID NO: 5754419 - DNA, 25 bp, Homo sapien
tgaactgtggggcaacctcgacccc

SEQ ID NO: 5754420 - DNA, 25 bp, Homo sapien
aagtaccaggtgcccctgcccgaca

SEQ ID NO: 5754421 - DNA, 25 bp, Homo sapien
cgaaggacgtctccccggacccatc

SEQ ID NO: 5754422 - DNA, 25 bp, Homo sapien
aaaaatgctgaacattgcatataac

SEQ ID NO: 5754423 - DNA, 25 bp, Homo sapien
aggcagaaagcaaaattatgtttgc

SEQ ID NO: 5754424 - DNA, 25 bp, Homo sapien
aatggggaccctgtctgcaatgcct

SEQ ID NO: 5754425 - DNA, 25 bp, Homo sapien
gcgcagtacccgctgccggaggagg

SEQ ID NO: 5754426 - DNA, 25 bp, Homo sapien
tccagcatggtcaccgccatgggtt

SEQ ID NO: 5754427 - DNA, 25 bp, Homo sapien
aaggagctcactgtggtgtctgtgt

SEQ ID NO: 5754428 - DNA, 25 bp, Homo sapien
actacaagcttcacaatattaacag

SEQ ID NO: 5754429 - DNA, 25 bp, Homo sapien
cgagaaagagtgcctcaagtaccag

SEQ ID NO: 5754430 - DNA, 25 bp, Homo sapien
acaccacccctccagcatggtcacc

SEQ ID NO: 5754431 - DNA, 25 bp, Homo sapien
gtaccaggtgcccctgcccgacagc

SEQ ID NO: 5754432 - DNA, 25 bp, Homo sapien
cgcccttcagccactccagccacat

SEQ ID NO: 5754433 - DNA, 25 bp, Homo sapien
ctcgcagaattgcagagtcgtcgcc

SEQ ID NO: 5754434 - DNA, 25 bp, Homo sapien
aaccactgaatctggaccccatctg

SEQ ID NO: 5754435 - DNA, 25 bp, Homo sapien
cgccgccgcctcctcctcctctctg

SEQ ID NO: 5754436 - DNA, 25 bp, Homo sapien
cccggacacgcaccacccgggcctc

SEQ ID NO: 5754437 - DNA, 25 bp, Homo sapien
ccctctccagacacatgtcctccct

SEQ ID NO: 5754438 - DNA, 25 bp, Homo sapien
tgtttgccactttgcaaaggagctc

SEQ ID NO: 5754439 - DNA, 25 bp, Homo sapien
tgcccctgcccgacagcatgaagct

SEQ ID NO: 5754440 - DNA, 25 bp, Homo sapien
gtcctccctgagccacatctcgccc

SEQ ID NO: 5754441 - DNA, 25 bp, Homo sapien
aggtctgatattcaaatggacaaac

SEQ ID NO: 5754442 - DNA, 25 bp, Homo sapien
gacccctgactatgaagaaggaagg

SEQ ID NO: 5754443 - DNA, 25 bp, Homo sapien
tttaacatcgacggtcaaggcaacc

SEQ ID NO: 5754444 - DNA, 25 bp, Homo sapien
ccgccgcctcctcctcctctctgct

SEQ ID NO: 5754445 - DNA, 25 bp, Homo sapien
cagccactcctacatggacgcggcg

SEQ ID NO: 5754446 - DNA, 25 bp, Homo sapien
tgaagcctaaacgcgatggatatat

SEQ ID NO: 5754447 - DNA, 25 bp, Homo sapien
aggtgacccgaggagggactccgcc

SEQ ID NO: 5754448 - DNA, 25 bp, Homo sapien
aaggacgtctccccggacccatcgc

SEQ ID NO: 5754449 - DNA, 25 bp, Homo sapien
cctggaatctcagccccttctccaa

SEQ ID NO: 5754450 - DNA, 25 bp, Homo sapien
cagaaaccgaaaaatgtctagcaaa

SEQ ID NO: 5754451 - DNA, 25 bp, Homo sapien
aggtgacggcggaccagccgcgctg

SEQ ID NO: 5754452 - DNA, 25 bp, Homo sapien
ggcccggcaggacgagaaagagtgc

SEQ ID NO: 5754453 - DNA, 25 bp, Homo sapien
ccacccgggcctcagccactcctac

SEQ ID NO: 5754454 - DNA, 25 bp, Homo sapien
caacctggtcccgttttattctgcc

SEQ ID NO: 5754455 - DNA, 25 bp, Homo sapien
cccggccgccctctccagacacatg

SEQ ID NO: 5754456 - DNA, 25 bp, Homo sapien
ccatgggttagagccctgctcgatg

SEQ ID NO: 5754457 - DNA, 25 bp, Homo sapien
ctctgctcttcgctacccaggtgac

SEQ ID NO: 5754458 - DNA, 25 bp, Homo sapien
gacggcggaccagccgcgctgggtg

SEQ ID NO: 5754459 - DNA, 25 bp, Homo sapien
gcagtacccgctgccggaggaggtg

SEQ ID NO: 5754460 - DNA, 25 bp, Homo sapien
ggatgcaagtccaggcccaaggccc

SEQ ID NO: 5754461 - DNA, 25 bp, Homo sapien
cctgggtggagcctcctcgtcgacc

SEQ ID NO: 5754462 - DNA, 25 bp, Homo sapien
cccgctgccggaggaggtggatgtg

SEQ ID NO: 5754463 - DNA, 25 bp, Homo sapien
cagggtctctagtgctgtgaaaaaa

SEQ ID NO: 5754464 - DNA, 25 bp, Homo sapien
aggacttccccaagaacagctcgtt

SEQ ID NO: 5754465 - DNA, 25 bp, Homo sapien
atcacaaaatgaacggacagaaccg

SEQ ID NO: 5754466 - DNA, 25 bp, Homo sapien
cgatgcacccgccatccagcctgtc

SEQ ID NO: 5754467 - DNA, 25 bp, Homo sapien
aaacgcgatggatatatgtttttga

SEQ ID NO: 5754468 - DNA, 25 bp, Homo sapien
tttaaaaaaccttctcctttgctca

SEQ ID NO: 5754469 - DNA, 25 bp, Homo sapien
gaaggaaggcatccagaccagaaac

SEQ ID NO: 5754470 - DNA, 25 bp, Homo sapien
ctctccagacacatgtcctccctga

SEQ ID NO: 5754471 - DNA, 25 bp, Homo sapien
cctgagccacatctcgcccttcagc

SEQ ID NO: 5754472 - DNA, 25 bp, Homo sapien
agccaggtgtgccgcccgcctctgc

SEQ ID NO: 5754473 - DNA, 25 bp, Homo sapien
gcctcagccactcctacatggacgc

SEQ ID NO: 5754474 - DNA, 25 bp, Homo sapien
ccgacctcccaggcggaccgccctc

SEQ ID NO: 5754475 - DNA, 25 bp, Homo sapien
cgcccaccccgccgaaggacgtctc

SEQ ID NO: 5754476 - DNA, 25 bp, Homo sapien
ggtgcccctgcccgacagcatgaag

SEQ ID NO: 5754477 - DNA, 25 bp, Homo sapien
gaatctcagccccttctccaagacg

SEQ ID NO: 5754478 - DNA, 25 bp, Homo sapien
cggacagaaccggcccctcattaag

SEQ ID NO: 5754479 - DNA, 25 bp, Homo sapien
gcctcctcgtcgacccaccacccca

SEQ ID NO: 5754480 - DNA, 25 bp, Homo sapien
cgatgctcacagggcccccagcgag

SEQ ID NO: 5754481 - DNA, 25 bp, Homo sapien
gtcgtacgccgccgcctcctcctcc

SEQ ID NO: 5754482 - DNA, 25 bp, Homo sapien
tagagccctgctcgatgctcacagg

SEQ ID NO: 5754483 - DNA, 25 bp, Homo sapien
cacccggacacgcaccacccgggcc

SEQ ID NO: 5754484 - DNA, 25 bp, Homo sapien
ggatccctaccctggctggacggcg

SEQ ID NO: 5754485 - DNA, 25 bp, Homo sapien
caccacaccgcctccccctggaatc

SEQ ID NO: 5754486 - DNA, 25 bp, Homo sapien
gtccaggcccaaggcccggtccagc

SEQ ID NO: 5754487 - DNA, 25 bp, Homo sapien
tgcaaaggagctcactgtggtgtct

SEQ ID NO: 5754488 - DNA, 25 bp, Homo sapien
ccctacgtgcccgagtacagctccg

SEQ ID NO: 5754489 - DNA, 25 bp, Homo sapien
tctccgtctaccccccggcctcgtc

SEQ ID NO: 5754490 - DNA, 25 bp, Homo sapien
cacgggagccaggtgtgccgcccgc

SEQ ID NO: 5754491 - DNA, 25 bp, Homo sapien
aggacgagaaagagtgcctcaagta

SEQ ID NO: 5754492 - DNA, 25 bp, Homo sapien
ggcctcgtcctcctccttgtcgggg

SEQ ID NO: 5754493 - DNA, 25 bp, Homo sapien
tatgggagaaatagtgtggaaatta

SEQ ID NO: 5754494 - DNA, 25 bp, Homo sapien
gactccgcctccgagcggctgagga

SEQ ID NO: 5754495 - DNA, 25 bp, Homo sapien
cgcggcgcagtacccgctgccggag

SEQ ID NO: 5754496 - DNA, 25 bp, Homo sapien
ccctatttaacagggtctctagtgc

SEQ ID NO: 5754497 - DNA, 25 bp, Homo sapien
gctaaacgacccctccaagataatt

SEQ ID NO: 5754498 - DNA, 25 bp, Homo sapien
acgggcagcacccggacacgcacca

SEQ ID NO: 5754499 - DNA, 25 bp, Homo sapien
tgtctagcaaatccaaaaagtgcaa

SEQ ID NO: 5754500 - DNA, 25 bp, Homo sapien
caaaattatgtttgccactttgcaa

SEQ ID NO: 5754501 - DNA, 25 bp, Homo sapien
ctgtaaggcatgaaggatgccaaga

SEQ ID NO: 5754502 - DNA, 25 bp, Homo sapien
agagtgcctcaagtaccaggtgccc

SEQ ID NO: 5754503 - DNA, 25 bp, Homo sapien
aaggcatgaaggatgccaagaagtt

SEQ ID NO: 5754504 - DNA, 25 bp, Homo sapien
ttccaaccactgaatctggacccca

SEQ ID NO: 5754505 - DNA, 25 bp, Homo sapien
ctccgacggcaggagccccccgacc

SEQ ID NO: 5754506 - DNA, 25 bp, Homo sapien
gaaaccgaaaaatgtctagcaaatc

SEQ ID NO: 5754507 - DNA, 25 bp, Homo sapien
aagctggagtcgtcccactcccgtg

SEQ ID NO: 5754508 - DNA, 25 bp, Homo sapien
agcttcacaatattaacagacccct

SEQ ID NO: 5754509 - DNA, 25 bp, Homo sapien
gcccacgccgatgcacccgccatcc

SEQ ID NO: 5754510 - DNA, 25 bp, Homo sapien
ccaccccaggctcggccggctcggc

SEQ ID NO: 5754511 - DNA, 25 bp, Homo sapien
ggttccgggcccggcgagagggcgc

SEQ ID NO: 5754512 - DNA, 25 bp, Homo sapien
ttgcttcccagccttcccatccccc

SEQ ID NO: 5754513 - DNA, 25 bp, Homo sapien
aggtggatgtgctttttaacatcga

SEQ ID NO: 5754514 - DNA, 25 bp, Homo sapien
gcatgactcactggaggacttcccc

SEQ ID NO: 5754515 - DNA, 25 bp, Homo sapien
acatcgacggtcaaggcaaccacgt

SEQ ID NO: 5754516 - DNA, 25 bp, Homo sapien
tgtcagaccaccacaaccacactct

SEQ ID NO: 5754517 - DNA, 25 bp, Homo sapien
cgtacgccgccgcctcctcctcctc

SEQ ID NO: 5754518 - DNA, 25 bp, Homo sapien
tcgtttaacccggccgccctctcca

SEQ ID NO: 5754519 - DNA, 25 bp, Homo sapien
acactctggaggaggaatgccaatg

SEQ ID NO: 5754520 - DNA, 25 bp, Homo sapien
gacacgcaccacccgggcctcagcc

SEQ ID NO: 5754521 - DNA, 25 bp, Homo sapien
ttctctttgctaaacgacccctcca

SEQ ID NO: 5754522 - DNA, 25 bp, Homo sapien
gacagaaccggcccctcattaagcc

SEQ ID NO: 5754523 - DNA, 25 bp, Homo sapien
cgtcccactcccgtggcagcatgac

SEQ ID NO: 5754524 - DNA, 25 bp, Homo sapien
cactacctgtgcaacgcctgcgggc

SEQ ID NO: 5754525 - DNA, 25 bp, Homo sapien
caggcagggagtgtgtgaactgtgg

SEQ ID NO: 5754526 - DNA, 25 bp, Homo sapien
ggaggtggatgtgctttttaacatc

SEQ ID NO: 5754527 - DNA, 25 bp, Homo sapien
gccgaaggacgtctccccggaccca

SEQ ID NO: 5754528 - DNA, 25 bp, Homo sapien
cgctgggtgagccaccaccaccccg

SEQ ID NO: 5754529 - DNA, 25 bp, Homo sapien
cgcctgcgggctctatcacaaaatg

SEQ ID NO: 5754530 - DNA, 25 bp, Homo sapien
cactggaggacttccccaagaacag

SEQ ID NO: 5754531 - DNA, 25 bp, Homo sapien
accccggtgcagaggagcctggctc

SEQ ID NO: 5754532 - DNA, 25 bp, Homo sapien
gcgagatggcacgggacactacctg

SEQ ID NO: 5754533 - DNA, 25 bp, Homo sapien
tattcaaatggacaaactgccagtt

SEQ ID NO: 5754534 - DNA, 25 bp, Homo sapien
ggcttcggatgcaagtccaggccca

SEQ ID NO: 5754535 - DNA, 25 bp, Homo sapien
tccctttcgacttgcatttttgcag

SEQ ID NO: 5754536 - DNA, 25 bp, Homo sapien
atccctaccctggctggacggcggc

SEQ ID NO: 5754537 - DNA, 25 bp, Homo sapien
cagccaggagagcagggacgtcctg

SEQ ID NO: 5754538 - DNA, 25 bp, Homo sapien
gccccttctccaagacgtccatcca

SEQ ID NO: 5754539 - DNA, 25 bp, Homo sapien
cagagcgagcaacgcaatctgaccg

SEQ ID NO: 5754540 - DNA, 25 bp, Homo sapien
gagatggcacgggacactacctgtg

SEQ ID NO: 5754541 - DNA, 25 bp, Homo sapien
tcccctatttaacagggtctctagt

SEQ ID NO: 5754542 - DNA, 25 bp, Homo sapien
ccacgcccacgccgatgcacccgcc

SEQ ID NO: 5754543 - DNA, 25 bp, Homo sapien
tctccaagacgtccatccaccacgg

SEQ ID NO: 5754544 - DNA, 25 bp, Homo sapien
atgtgctttttaacatcgacggtca

SEQ ID NO: 5754545 - DNA, 25 bp, Homo sapien
cctactacggaaactcggtcagggc

SEQ ID NO: 5754546 - DNA, 25 bp, Homo sapien
agaaagcaaaattatgtttgccact

SEQ ID NO: 5754547 - DNA, 25 bp, Homo sapien
ctacccaggtgacccgaggagggac

SEQ ID NO: 5754548 - DNA, 25 bp, Homo sapien
tggggaccctgtctgcaatgcctgt

SEQ ID NO: 5754549 - DNA, 25 bp, Homo sapien
cccaggctcggccggctcggcccgg

SEQ ID NO: 5754550 - DNA, 25 bp, Homo sapien
accacgggagccaggtgtgccgccc

SEQ ID NO: 5754551 - DNA, 25 bp, Homo sapien
ggccacagttgtttgatgcattaaa

SEQ ID NO: 5754552 - DNA, 25 bp, Homo sapien
ggccacgccagcccgcacctcttca

SEQ ID NO: 5754553 - DNA, 25 bp, Homo sapien
cgcgcgcgggttccgggcccggcga

SEQ ID NO: 5754554 - DNA, 25 bp, Homo sapien
aagccattctgactcatatccccta

SEQ ID NO: 5754555 - DNA, 25 bp, Homo sapien
ttaacagggtctctagtgctgtgaa

SEQ ID NO: 5754556 - DNA, 25 bp, Homo sapien
gggacgtcctgtgcgaactgtcaga

SEQ ID NO: 5754557 - DNA, 25 bp, Homo sapien
ttttgtcttccccttcttctctttg

SEQ ID NO: 5754558 - DNA, 25 bp, Homo sapien
aatgccaatggggaccctgtctgca

SEQ ID NO: 5754559 - DNA, 25 bp, Homo sapien
gagcctcctcgtcgacccaccaccc

SEQ ID NO: 5754560 - DNA, 25 bp, Homo sapien
gtgcatgactcactggaggacttcc

SEQ ID NO: 5754561 - DNA, 25 bp, Homo sapien
acagttgtttgatgcattaaaagaa

SEQ ID NO: 5754562 - DNA, 25 bp, Homo sapien
cgtcctcctccttgtcggggggcca

SEQ ID NO: 5754563 - DNA, 25 bp, Homo sapien
cagtatcatgaagcctaaacgcgat

SEQ ID NO: 5754564 - DNA, 25 bp, Homo sapien
gtggcggcgagatggcacgggacac

SEQ ID NO: 5754565 - DNA, 25 bp, Homo sapien
tcccaggcggaccgccctccctccc

SEQ ID NO: 5754566 - DNA, 25 bp, Homo sapien
ctgggcggctcccccaccggcttcg

SEQ ID NO: 5754567 - DNA, 25 bp, Homo sapien
agggcccccagcgagagtccctgca

SEQ ID NO: 5754568 - DNA, 25 bp, Homo sapien
ccactccagccacatgctgaccacg

SEQ ID NO: 5754569 - DNA, 25 bp, Homo sapien
ctcttcaccttcccgcccaccccgc

SEQ ID NO: 5754570 - DNA, 25 bp, Homo sapien
caaatcattcaacgacccccgaccc

SEQ ID NO: 5754571 - DNA, 25 bp, Homo sapien
caaaatgaacggacagaaccggccc

SEQ ID NO: 5754572 - DNA, 25 bp, Homo sapien
tgcagagtcgtcgcccctttttaca

SEQ ID NO: 5754573 - DNA, 25 bp, Homo sapien
gaggaatgccaatggggaccctgtc

SEQ ID NO: 5754574 - DNA, 25 bp, Homo sapien
ctgaccgagcaggtcgtacgccgcc

SEQ ID NO: 5754575 - DNA, 25 bp, Homo sapien
cacgcaccacccgggcctcagccac

SEQ ID NO: 5754576 - DNA, 25 bp, Homo sapien
tttattctgccatacccagtttttg

SEQ ID NO: 5754577 - DNA, 25 bp, Homo sapien
ctgggtgagccaccaccaccccgcc

SEQ ID NO: 5754578 - DNA, 25 bp, Homo sapien
cttcggatgcaagtccaggcccaag

SEQ ID NO: 5754579 - DNA, 25 bp, Homo sapien
caaccacgtcccgccctactacgga

SEQ ID NO: 5754580 - DNA, 25 bp, Homo sapien
tgaatctggaccccatctgtgaata

SEQ ID NO: 5754581 - DNA, 25 bp, Homo sapien
cccggtccagcacaggcagggagtg

SEQ ID NO: 5754582 - DNA, 25 bp, Homo sapien
ctcgtcctcctccttgtcggggggc

SEQ ID NO: 5754583 - DNA, 25 bp, Homo sapien
accctccgacccaccacgggagcca

SEQ ID NO: 5754584 - DNA, 25 bp, Homo sapien
gccatacccagtttttggatttttg

SEQ ID NO: 5754585 - DNA, 25 bp, Homo sapien
caccacccgggcctcagccactcct

SEQ ID NO: 5754586 - DNA, 25 bp, Homo sapien
ctacgtgcccgagtacagctccgga

SEQ ID NO: 5754587 - DNA, 25 bp, Homo sapien
ccctccgacggcaggagccccccga

SEQ ID NO: 5754588 - DNA, 25 bp, Homo sapien
acccatcgctgtccaccccaggctc

SEQ ID NO: 5754589 - DNA, 25 bp, Homo sapien
acccaccaccccatcaccacctacc

SEQ ID NO: 5754590 - DNA, 25 bp, Homo sapien
gggtgagccaccaccaccccgccgt

SEQ ID NO: 5754591 - DNA, 25 bp, Homo sapien
caaaaagtgcaaaaaagtgcatgac

SEQ ID NO: 5754592 - DNA, 25 bp, Homo sapien
gaaggcatccagaccagaaaccgaa

SEQ ID NO: 5754593 - DNA, 25 bp, Homo sapien
ctcgatgctcacagggcccccagcg

SEQ ID NO: 5754594 - DNA, 25 bp, Homo sapien
tcatggatccctaccctggctggac

SEQ ID NO: 5754595 - DNA, 25 bp, Homo sapien
tccccttcttctctttgctaaacga

SEQ ID NO: 5754596 - DNA, 25 bp, Homo sapien
agcaaatcattcaacgacccccgac

SEQ ID NO: 5754597 - DNA, 25 bp, Homo sapien
ctggaggaggaatgccaatggggac

SEQ ID NO: 5754598 - DNA, 25 bp, Homo sapien
gctttttaacatcgacggtcaaggc

SEQ ID NO: 5754599 - DNA, 25 bp, Homo sapien
gtctccccggacccatcgctgtcca

SEQ ID NO: 5754600 - DNA, 25 bp, Homo sapien
caccggcttcggatgcaagtccagg

SEQ ID NO: 5754601 - DNA, 25 bp, Homo sapien
cccccgaccctccgacggcaggagc

SEQ ID NO: 5754602 - DNA, 25 bp, Homo sapien
gatggcacgggacactacctgtgca

SEQ ID NO: 5754603 - DNA, 25 bp, Homo sapien
gaccgagcaggtcgtacgccgccgc

SEQ ID NO: 5754604 - DNA, 25 bp, Homo sapien
tccgacccaccacgggagccaggtg

SEQ ID NO: 5754605 - DNA, 25 bp, Homo sapien
gactcatatcccctatttaacaggg

SEQ ID NO: 5754606 - DNA, 25 bp, Homo sapien
ccacagttgtttgatgcattaaaag

SEQ ID NO: 5754607 - DNA, 25 bp, Homo sapien
ccaccaccccatcaccacctacccg

SEQ ID NO: 5754608 - DNA, 25 bp, Homo sapien
caccccgccgtgctcaacgggcagc

SEQ ID NO: 5754609 - DNA, 25 bp, Homo sapien
cattaagcccaagcgaaggctgtct

SEQ ID NO: 5754610 - DNA, 25 bp, Homo sapien
ttctgactcatatcccctatttaac

SEQ ID NO: 5754611 - DNA, 25 bp, Homo sapien
aacccggccgccctctccagacaca

SEQ ID NO: 5754612 - DNA, 25 bp, Homo sapien
gtctgcaatgcctgtgggctctact

SEQ ID NO: 5754613 - DNA, 25 bp, Homo sapien
atgactcactggaggacttccccaa

SEQ ID NO: 5754614 - DNA, 25 bp, Homo sapien
cccgaccctccgacggcaggagccc

SEQ ID NO: 5754615 - DNA, 25 bp, Homo sapien
ccaccaccccgccgtgctcaacggg

SEQ ID NO: 5754616 - DNA, 25 bp, Homo sapien
gacccgaggagggactccgcctccg

SEQ ID NO: 5754617 - DNA, 25 bp, Homo sapien
aacggacagaaccggcccctcatta

SEQ ID NO: 5754618 - DNA, 25 bp, Homo sapien
aatctggaccccatctgtgaataag

SEQ ID NO: 5754619 - DNA, 25 bp, Homo sapien
ggagtgtgtgaactgtggggcaacc

SEQ ID NO: 5754620 - DNA, 25 bp, Homo sapien
tgggcagccaccacaccgcctcccc

SEQ ID NO: 5754621 - DNA, 25 bp, Homo sapien
tttggaccacaccacccctccagca

SEQ ID NO: 5754622 - DNA, 25 bp, Homo sapien
acccgccatccagcctgtcctttgg

SEQ ID NO: 5754623 - DNA, 25 bp, Homo sapien
attgcagagtcgtcgccccttttta

SEQ ID NO: 5754624 - DNA, 25 bp, Homo sapien
gcccgagtacagctccggactcttc

SEQ ID NO: 5754625 - DNA, 25 bp, Homo sapien
tgccactttgcaaaggagctcactg

SEQ ID NO: 5754626 - DNA, 25 bp, Homo sapien
ctctagtgctgtgaaaaaaaaaaaa

SEQ ID NO: 5754627 - DNA, 25 bp, Homo sapien
atgggttagagccctgctcgatgct

SEQ ID NO: 5754628 - DNA, 25 bp, Homo sapien
ggacccatcgctgtccaccccaggc

SEQ ID NO: 5754629 - DNA, 25 bp, Homo sapien
gccatccagcctgtcctttggacca

SEQ ID NO: 5754630 - DNA, 25 bp, Homo sapien
cagccttcccatccccccaccgaaa

SEQ ID NO: 5754631 - DNA, 25 bp, Homo sapien
acacatgtcctccctgagccacatc

SEQ ID NO: 5754632 - DNA, 25 bp, Homo sapien
gaccgccctgggtggagcctcctcg

SEQ ID NO: 5754633 - DNA, 25 bp, Homo sapien
cgggagccaggtgtgccgcccgcct

SEQ ID NO: 5754634 - DNA, 25 bp, Homo sapien
gtctgatattcaaatggacaaactg

SEQ ID NO: 5754635 - DNA, 25 bp, Homo sapien
ctcactggaggacttccccaagaac

SEQ ID NO: 5754636 - DNA, 25 bp, Homo sapien
ggcagccaccacaccgcctccccct

SEQ ID NO: 5754637 - DNA, 25 bp, Homo sapien
ggctctactacaagcttcacaatat

SEQ ID NO: 5754638 - DNA, 25 bp, Homo sapien
gaccccatctgtgaataagccattc

SEQ ID NO: 5754639 - DNA, 25 bp, Homo sapien
ggaatgccaatggggaccctgtctg

SEQ ID NO: 5754640 - DNA, 25 bp, Homo sapien
aatactgtacaatgactttattgca

SEQ ID NO: 5754641 - DNA, 25 bp, Homo sapien
ccccccaccgaaagcaaatcattca

SEQ ID NO: 5754642 - DNA, 25 bp, Homo sapien
gccctccctccccgcgcgcgggttc

SEQ ID NO: 5754643 - DNA, 25 bp, Homo sapien
aaaccttctcctttgctcacctttg

SEQ ID NO: 5754644 - DNA, 25 bp, Homo sapien
gccctgggtggagcctcctcgtcga

SEQ ID NO: 5754645 - DNA, 25 bp, Homo sapien
caaatggacaaactgccagttttgt

SEQ ID NO: 5754646 - DNA, 25 bp, Homo sapien
ctgtggtgtctgtgttccaaccact

SEQ ID NO: 5754647 - DNA, 25 bp, Homo sapien
gcatggtcaccgccatgggttagag

SEQ ID NO: 5754648 - DNA, 25 bp, Homo sapien
ttgcatctgggtagctgtaaggcat

SEQ ID NO: 5754649 - DNA, 25 bp, Homo sapien
atccccccaccgaaagcaaatcatt

SEQ ID NO: 5754650 - DNA, 25 bp, Homo sapien
ctctatcacaaaatgaacggacaga

SEQ ID NO: 5754651 - DNA, 25 bp, Homo sapien
ccacctacccgccctacgtgcccga

SEQ ID NO: 5754652 - DNA, 25 bp, Homo sapien
accggcccctcattaagcccaagcg

SEQ ID NO: 5754653 - DNA, 25 bp, Homo sapien
aagaaatactgtacaatgactttat

SEQ ID NO: 5754654 - DNA, 25 bp, Homo sapien
gacccccgaccctccgacggcagga

SEQ ID NO: 5754655 - DNA, 25 bp, Homo sapien
tctgtgttccaaccactgaatctgg

SEQ ID NO: 5754656 - DNA, 25 bp, Homo sapien
ggacgtctccccggacccatcgctg

SEQ ID NO: 5754657 - DNA, 25 bp, Homo sapien
cagagtcgtcgcccctttttacaac

SEQ ID NO: 5754658 - DNA, 25 bp, Homo sapien
ctttgcttcccagccttcccatccc

SEQ ID NO: 5754659 - DNA, 25 bp, Homo sapien
ctgactcatatcccctatttaacag

SEQ ID NO: 5754660 - DNA, 25 bp, Homo sapien
ctgcagtccctttcgacttgcattt

SEQ ID NO: 5754661 - DNA, 25 bp, Homo sapien
aggaggaatgccaatggggaccctg

SEQ ID NO: 5754662 - DNA, 25 bp, Homo sapien
ccggcttcggatgcaagtccaggcc

SEQ ID NO: 5754663 - DNA, 25 bp, Homo sapien
ctcctacatggacgcggcgcagtac

SEQ ID NO: 5754664 - DNA, 25 bp, Homo sapien
tcccatccccccaccgaaagcaaat

SEQ ID NO: 5754665 - DNA, 25 bp, Homo sapien
gaaggctgtctgcagccaggagagc

SEQ ID NO: 5754666 - DNA, 25 bp, Homo sapien
aggagggactccgcctccgagcggc

SEQ ID NO: 5754667 - DNA, 25 bp, Homo sapien
ctcagccccttctccaagacgtcca

SEQ ID NO: 5754668 - DNA, 25 bp, Homo sapien
gaattgcagagtcgtcgcccctttt

SEQ ID NO: 5754669 - DNA, 25 bp, Homo sapien
ggtcaccgccatgggttagagccct

SEQ ID NO: 5754670 - DNA, 25 bp, Homo sapien
gcctggctcgcagaattgcagagtc

SEQ ID NO: 5754671 - DNA, 25 bp, Homo sapien
acgccgatgcacccgccatccagcc

SEQ ID NO: 5754672 - DNA, 25 bp, Homo sapien
gaccacaccacccctccagcatggt

SEQ ID NO: 5754673 - DNA, 25 bp, Homo sapien
gcatctgggtagctgtaaggcatga

SEQ ID NO: 5754674 - DNA, 25 bp, Homo sapien
gggcgcgagcacagccgaggccatg

SEQ ID NO: 5754675 - DNA, 25 bp, Homo sapien
caccacctacccgccctacgtgccc

SEQ ID NO: 5754676 - DNA, 25 bp, Homo sapien
acagggcccccagcgagagtccctg

SEQ ID NO: 5754677 - DNA, 25 bp, Homo sapien
gaataagccattctgactcatatcc

SEQ ID NO: 5754678 - DNA, 25 bp, Homo sapien
cccgcctctgcttcatggatcccta

SEQ ID NO: 5754679 - DNA, 25 bp, Homo sapien
ccgcctccgagcggctgaggacccc

SEQ ID NO: 5754680 - DNA, 25 bp, Homo sapien
ccactcccgtggcagcatgaccgcc

SEQ ID NO: 5754681 - DNA, 25 bp, Homo sapien
gtgcaaaaaagtgcatgactcactg

SEQ ID NO: 5754682 - DNA, 25 bp, Homo sapien
tggacaaactgccagttttgtttcc

SEQ ID NO: 5754683 - DNA, 25 bp, Homo sapien
caggctcggccggctcggcccggca

SEQ ID NO: 5754684 - DNA, 25 bp, Homo sapien
cccctccagcatggtcaccgccatg

SEQ ID NO: 5754685 - DNA, 25 bp, Homo sapien
accttctcctttgctcacctttgct

SEQ ID NO: 5754686 - DNA, 25 bp, Homo sapien
gcaaatccaaaaagtgcaaaaaagt

SEQ ID NO: 5754687 - DNA, 25 bp, Homo sapien
catacccagtttttggatttttgtc

SEQ ID NO: 5754688 - DNA, 25 bp, Homo sapien
aagtccaggcccaaggcccggtcca

SEQ ID NO: 5754689 - DNA, 25 bp, Homo sapien
tccttgtcggggggccacgccagcc

SEQ ID NO: 5754690 - DNA, 25 bp, Homo sapien
atccaaaaagtgcaaaaaagtgcat

SEQ ID NO: 5754691 - DNA, 25 bp, Homo sapien
cggtgcagaggagcctggctcgcag

SEQ ID NO: 5754692 - DNA, 25 bp, Homo sapien
ttcactggccacagttgtttgatgc

SEQ ID NO: 5754693 - DNA, 25 bp, Homo sapien
tattaacagacccctgactatgaag

SEQ ID NO: 5754694 - DNA, 25 bp, Homo sapien
gaactgtcagaccaccacaaccaca

SEQ ID NO: 5754695 - DNA, 25 bp, Homo sapien
tgggctctactacaagcttcacaat

SEQ ID NO: 5754696 - DNA, 25 bp, Homo sapien
tgtcggggggccacgccagcccgca

SEQ ID NO: 5754697 - DNA, 25 bp, Homo sapien
gtgcaacgcctgcgggctctatcac

SEQ ID NO: 5754698 - DNA, 25 bp, Homo sapien
ctccgagcggctgaggaccccggtg

SEQ ID NO: 5754699 - DNA, 25 bp, Homo sapien
cggcaggacgagaaagagtgcctca

SEQ ID NO: 5754700 - DNA, 25 bp, Homo sapien
ctgtgaataagccattctgactcat

SEQ ID NO: 5754701 - DNA, 25 bp, Homo sapien
ccccggcctcgtcctcctccttgtc

SEQ ID NO: 5754702 - DNA, 25 bp, Homo sapien
ccatccaccacggctccccggggcc

SEQ ID NO: 5754703 - DNA, 25 bp, Homo sapien
cagccgcgctgggtgagccaccacc

SEQ ID NO: 5754704 - DNA, 25 bp, Homo sapien
ttgctaaacgacccctccaagataa

SEQ ID NO: 5754705 - DNA, 25 bp, Homo sapien
ggctctatcacaaaatgaacggaca

SEQ ID NO: 5754706 - DNA, 25 bp, Homo sapien
gagcaggtcgtacgccgccgcctcc

SEQ ID NO: 5754707 - DNA, 25 bp, Homo sapien
agacgtccatccaccacggctcccc

SEQ ID NO: 5754708 - DNA, 25 bp, Homo sapien
acaaccacactctggaggaggaatg

SEQ ID NO: 5754709 - DNA, 25 bp, Homo sapien
tcattcaacgacccccgaccctccg

SEQ ID NO: 5754710 - DNA, 25 bp, Homo sapien
cggccggctcggcccggcaggacga

SEQ ID NO: 5754711 - DNA, 25 bp, Homo sapien
ggagccccccgacctcccaggcgga

SEQ ID NO: 5754712 - DNA, 25 bp, Homo sapien
aaccgaaaaatgtctagcaaatcca

SEQ ID NO: 5754713 - DNA, 25 bp, Homo sapien
cagccaccacaccgcctccccctgg

SEQ ID NO: 5754714 - DNA, 25 bp, Homo sapien
ctttcactggccacagttgtttgat

SEQ ID NO: 5754715 - DNA, 25 bp, Homo sapien
aaaaaagtgcatgactcactggagg

SEQ ID NO: 5754716 - DNA, 25 bp, Homo sapien
tcccactcccgtggcagcatgaccg

SEQ ID NO: 5754717 - DNA, 25 bp, Homo sapien
gccaccaccaccccgccgtgctcaa

SEQ ID NO: 5754718 - DNA, 25 bp, Homo sapien
aggcatccagaccagaaaccgaaaa

SEQ ID NO: 5754719 - DNA, 25 bp, Homo sapien
atttaacagggtctctagtgctgtg

SEQ ID NO: 5754720 - DNA, 25 bp, Homo sapien
gcatccagaccagaaaccgaaaaat

SEQ ID NO: 5754721 - DNA, 25 bp, Homo sapien
gggactccgcctccgagcggctgag

SEQ ID NO: 5754722 - DNA, 25 bp, Homo sapien
gtgcagaggagcctggctcgcagaa

SEQ ID NO: 5754723 - DNA, 25 bp, Homo sapien
cccagcgagagtccctgcagtccct

SEQ ID NO: 5754724 - DNA, 25 bp, Homo sapien
gcaatgcctgtgggctctactacaa

SEQ ID NO: 5754725 - DNA, 25 bp, Homo sapien
cccgaggagggactccgcctccgag

SEQ ID NO: 5754726 - DNA, 25 bp, Homo sapien
tcggggggccacgccagcccgcacc

SEQ ID NO: 5754727 - DNA, 25 bp, Homo sapien
ccagacacatgtcctccctgagcca

SEQ ID NO: 5754728 - DNA, 25 bp, Homo sapien
gagcacagccgaggccatggaggtg

SEQ ID NO: 5754729 - DNA, 25 bp, Homo sapien
ccccgccgtgctcaacgggcagcac

SEQ ID NO: 5754730 - DNA, 25 bp, Homo sapien
cagaaccggcccctcattaagccca

SEQ ID NO: 5754731 - DNA, 25 bp, Homo sapien
tcccgtggcagcatgaccgccctgg

SEQ ID NO: 5754732 - DNA, 25 bp, Homo sapien
cccttcttctctttgctaaacgacc

SEQ ID NO: 5754733 - DNA, 25 bp, Homo sapien
ttgtcttccccttcttctctttgct

SEQ ID NO: 5754734 - DNA, 25 bp, Homo sapien
agcatgaagctggagtcgtcccact

SEQ ID NO: 5754735 - DNA, 25 bp, Homo sapien
cacggtgcagaggtaccctccgacc

SEQ ID NO: 5754736 - DNA, 25 bp, Homo sapien
ctcctcgtcgacccaccaccccatc

SEQ ID NO: 5754737 - DNA, 25 bp, Homo sapien
actccagccacatgctgaccacgcc

SEQ ID NO: 5754738 - DNA, 25 bp, Homo sapien
gccgcccgcctctgcttcatggatc

SEQ ID NO: 5754739 - DNA, 25 bp, Homo sapien
cagcatggtcaccgccatgggttag

SEQ ID NO: 5754740 - DNA, 25 bp, Homo sapien
ggatttttgtcttccccttcttctc

SEQ ID NO: 5754741 - DNA, 25 bp, Homo sapien
ctccagacacatgtcctccctgagc

SEQ ID NO: 5754742 - DNA, 25 bp, Homo sapien
gaggaggtggatgtgctttttaaca

SEQ ID NO: 5754743 - DNA, 25 bp, Homo sapien
tggaccccatctgtgaataagccat

SEQ ID NO: 5754744 - DNA, 25 bp, Homo sapien
cgcctctgcttcatggatccctacc

SEQ ID NO: 5754745 - DNA, 25 bp, Homo sapien
cgcccgcctctgcttcatggatccc

SEQ ID NO: 5754746 - DNA, 25 bp, Homo sapien
cggcgagatggcacgggacactacc

SEQ ID NO: 5754747 - DNA, 25 bp, Homo sapien
ggccatggaggtgacggcggaccag

SEQ ID NO: 5754748 - DNA, 25 bp, Homo sapien
caggagagcagggacgtcctgtgcg

SEQ ID NO: 5754749 - DNA, 25 bp, Homo sapien
ttaacccggccgccctctccagaca

SEQ ID NO: 5754750 - DNA, 25 bp, Homo sapien
ccaagaacagctcgtttaacccggc

SEQ ID NO: 5754751 - DNA, 25 bp, Homo sapien
aagaaactaggtctgatattcaaat

SEQ ID NO: 5754752 - DNA, 25 bp, Homo sapien
tctggaccccatctgtgaataagcc

SEQ ID NO: 5754753 - DNA, 25 bp, Homo sapien
tgaaggatgccaagaagtttaagga

SEQ ID NO: 5754754 - DNA, 25 bp, Homo sapien
gccagttttgtttcctttcactggc

SEQ ID NO: 5754755 - DNA, 25 bp, Homo sapien
gccattctgactcatatcccctatt

SEQ ID NO: 5754756 - DNA, 25 bp, Homo sapien
ccactttgcaaaggagctcactgtg

SEQ ID NO: 5754757 - DNA, 25 bp, Homo sapien
aatattaacagacccctgactatga

SEQ ID NO: 5754758 - DNA, 25 bp, Homo sapien
tacccgctgccggaggaggtggatg

SEQ ID NO: 5754759 - DNA, 25 bp, Homo sapien
gccaccacaccgcctccccctggaa

SEQ ID NO: 5754760 - DNA, 25 bp, Homo sapien
tgaagctggagtcgtcccactcccg

SEQ ID NO: 5754761 - DNA, 25 bp, Homo sapien
gcaacgcaatctgaccgagcaggtc

SEQ ID NO: 5754762 - DNA, 25 bp, Homo sapien
aaaatgtctagcaaatccaaaaagt

SEQ ID NO: 5754763 - DNA, 25 bp, Homo sapien
aatgactttattgcatctgggtagc

SEQ ID NO: 5754764 - DNA, 25 bp, Homo sapien
gggcctcagccactcctacatggac

SEQ ID NO: 5754765 - DNA, 25 bp, Homo sapien
ggcatgaaggatgccaagaagttta

SEQ ID NO: 5754766 - DNA, 25 bp, Homo sapien
agaccagaaaccgaaaaatgtctag

SEQ ID NO: 5754767 - DNA, 25 bp, Homo sapien
ctaaacgcgatggatatatgttttt

SEQ ID NO: 5754768 - DNA, 25 bp, Homo sapien
accccactgtggcggcgagatggca

SEQ ID NO: 5754769 - DNA, 25 bp, Homo sapien
ggatgtgctttttaacatcgacggt

SEQ ID NO: 5754770 - DNA, 25 bp, Homo sapien
tcttcgctacccaggtgacccgagg

SEQ ID NO: 5754771 - DNA, 25 bp, Homo sapien
cggtccagcacaggcagggagtgtg

SEQ ID NO: 5754772 - DNA, 25 bp, Homo sapien
ttccgggcccggcgagagggcgcga

SEQ ID NO: 5754773 - DNA, 25 bp, Homo sapien
agaggagcctggctcgcagaattgc

SEQ ID NO: 5754774 - DNA, 25 bp, Homo sapien
accaccccatcaccacctacccgcc

SEQ ID NO: 5754775 - DNA, 25 bp, Homo sapien
ccccaccgaaagcaaatcattcaac

SEQ ID NO: 5754776 - DNA, 25 bp, Homo sapien
cttcccatccccccaccgaaagcaa

SEQ ID NO: 5754777 - DNA, 25 bp, Homo sapien
cttccccttcttctctttgctaaac

SEQ ID NO: 5754778 - DNA, 25 bp, Homo sapien
cccagccttcccatccccccaccga

SEQ ID NO: 5754779 - DNA, 25 bp, Homo sapien
tcctttcactggccacagttgtttg

SEQ ID NO: 5754780 - DNA, 25 bp, Homo sapien
gctgtctgcagccaggagagcaggg

SEQ ID NO: 5754781 - DNA, 25 bp, Homo sapien
gcggctcccccaccggcttcggatg

SEQ ID NO: 5754782 - DNA, 25 bp, Homo sapien
aggctgtctgcagccaggagagcag

SEQ ID NO: 5754783 - DNA, 25 bp, Homo sapien
gccttcccatccccccaccgaaagc

SEQ ID NO: 5754784 - DNA, 25 bp, Homo sapien
aaatgctgaacattgcatataactt

SEQ ID NO: 5754785 - DNA, 25 bp, Homo sapien
cgcagaattgcagagtcgtcgcccc

SEQ ID NO: 5754786 - DNA, 25 bp, Homo sapien
cggcaggagccccccgacctcccag

SEQ ID NO: 5754787 - DNA, 25 bp, Homo sapien
caggagcagtatcatgaagcctaaa

SEQ ID NO: 5754788 - DNA, 25 bp, Homo sapien
cctacccgccctacgtgcccgagta

SEQ ID NO: 5754789 - DNA, 25 bp, Homo sapien
gtttaacccggccgccctctccaga

SEQ ID NO: 5754790 - DNA, 25 bp, Homo sapien
cgccctctccagacacatgtcctcc

SEQ ID NO: 5754791 - DNA, 25 bp, Homo sapien
tcagccactccagccacatgctgac

SEQ ID NO: 5754792 - DNA, 25 bp, Homo sapien
cccctgactatgaagaaggaaggca

SEQ ID NO: 5754793 - DNA, 25 bp, Homo sapien
ccaccgaaagcaaatcattcaacga

SEQ ID NO: 5754794 - DNA, 25 bp, Homo sapien
caagcttcacaatattaacagaccc

SEQ ID NO: 5754795 - DNA, 25 bp, Homo sapien
ctgctcttcgctacccaggtgaccc

SEQ ID NO: 5754796 - DNA, 25 bp, Homo sapien
gtaaggcatgaaggatgccaagaag

SEQ ID NO: 5754797 - DNA, 25 bp, Homo sapien
gctgaacattgcatataacttatat

SEQ ID NO: 5754798 - DNA, 25 bp, Homo sapien
gcacgggacactacctgtgcaacgc

SEQ ID NO: 5754799 - DNA, 25 bp, Homo sapien
ggaggacttccccaagaacagctcg

SEQ ID NO: 5754800 - DNA, 25 bp, Homo sapien
actctggaggaggaatgccaatggg

SEQ ID NO: 5754801 - DNA, 25 bp, Homo sapien
gcaggacgagaaagagtgcctcaag

SEQ ID NO: 5754802 - DNA, 25 bp, Homo sapien
gcaggtcgtacgccgccgcctcctc

SEQ ID NO: 5754803 - DNA, 25 bp, Homo sapien
ccaatggggaccctgtctgcaatgc

SEQ ID NO: 5754804 - DNA, 25 bp, Homo sapien
tcgacttgcatttttgcaggagcag

SEQ ID NO: 5754805 - DNA, 25 bp, Homo sapien
cttcacaatattaacagacccctga

SEQ ID NO: 5754806 - DNA, 25 bp, Homo sapien
cctgcccgacagcatgaagctggag

SEQ ID NO: 5754807 - DNA, 25 bp, Homo sapien
attatgtttgccactttgcaaagga

SEQ ID NO: 5754808 - DNA, 25 bp, Homo sapien
tgcgggctctatcacaaaatgaacg

SEQ ID NO: 5754809 - DNA, 25 bp, Homo sapien
tccctgagccacatctcgcccttca

SEQ ID NO: 5754810 - DNA, 25 bp, Homo sapien
ctcggtcagggccacggtgcagagg

SEQ ID NO: 5754811 - DNA, 25 bp, Homo sapien
cctccagcatggtcaccgccatggg

SEQ ID NO: 5754812 - DNA, 25 bp, Homo sapien
agctccggactcttcccccccagca

SEQ ID NO: 5754813 - DNA, 25 bp, Homo sapien
tcaaggcaaccacgtcccgccctac

SEQ ID NO: 5754814 - DNA, 25 bp, Homo sapien
accacccctccagcatggtcaccgc

SEQ ID NO: 5754815 - DNA, 25 bp, Homo sapien
ggggccacgccagcccgcacctctt

SEQ ID NO: 5754816 - DNA, 25 bp, Homo sapien
gacaaactgccagttttgtttcctt

SEQ ID NO: 5754817 - DNA, 25 bp, Homo sapien
cactgtggcggcgagatggcacggg

SEQ ID NO: 5754818 - DNA, 25 bp, Homo sapien
tgtgaactgtggggcaacctcgacc

SEQ ID NO: 5754819 - DNA, 25 bp, Homo sapien
gcggcaaagccctgggcagccacca

SEQ ID NO: 5754820 - DNA, 25 bp, Homo sapien
ctacggaaactcggtcagggccacg

SEQ ID NO: 5754821 - DNA, 25 bp, Homo sapien
gttttattctgccatacccagtttt

SEQ ID NO: 5754822 - DNA, 25 bp, Homo sapien
ggagcagtatcatgaagcctaaacg

SEQ ID NO: 5754823 - DNA, 25 bp, Homo sapien
atcgctgtccaccccaggctcggcc

SEQ ID NO: 5754824 - DNA, 25 bp, Homo sapien
ctagtgctgtgaaaaaaaaaaaatg

SEQ ID NO: 5754825 - DNA, 25 bp, Homo sapien
gccgcgctgggtgagccaccaccac

SEQ ID NO: 5754826 - DNA, 25 bp, Homo sapien
ccgaggccatggaggtgacggcgga

SEQ ID NO: 5754827 - DNA, 25 bp, Homo sapien
ctggaggacttccccaagaacagct

SEQ ID NO: 5754828 - DNA, 25 bp, Homo sapien
ctccccggacccatcgctgtccacc

SEQ ID NO: 5754829 - DNA, 25 bp, Homo sapien
gtgcgaactgtcagaccaccacaac

SEQ ID NO: 5754830 - DNA, 25 bp, Homo sapien
tccccaagaacagctcgtttaaccc

SEQ ID NO: 5754831 - DNA, 25 bp, Homo sapien
gtccaccccaggctcggccggctcg

SEQ ID NO: 5754832 - DNA, 25 bp, Homo sapien
gtgacccgaggagggactccgcctc

SEQ ID NO: 5754833 - DNA, 25 bp, Homo sapien
ccacaaccacactctggaggaggaa

SEQ ID NO: 5754834 - DNA, 25 bp, Homo sapien
tgctcgatgctcacagggcccccag

SEQ ID NO: 5754835 - DNA, 25 bp, Homo sapien
cctgggcagccaccacaccgcctcc

SEQ ID NO: 5754836 - DNA, 25 bp, Homo sapien
ctcctccttgtcggggggccacgcc

SEQ ID NO: 5754837 - DNA, 25 bp, Homo sapien
ggcggaccgccctccctccccgcgc

SEQ ID NO: 5754838 - DNA, 25 bp, Homo sapien
cctccctgagccacatctcgccctt

SEQ ID NO: 5754839 - DNA, 25 bp, Homo sapien
catccagcctgtcctttggaccaca

SEQ ID NO: 5754840 - DNA, 25 bp, Homo sapien
ctcagccactcctacatggacgcgg

SEQ ID NO: 5754841 - DNA, 25 bp, Homo sapien
ccggcctcgtcctcctccttgtcgg

SEQ ID NO: 5754842 - DNA, 25 bp, Homo sapien
cggaaactcggtcagggccacggtg

SEQ ID NO: 5754843 - DNA, 25 bp, Homo sapien
ggcaacctcgaccccactgtggcgg

SEQ ID NO: 5754844 - DNA, 25 bp, Homo sapien
tgtgtgaactgtggggcaacctcga

SEQ ID NO: 5754845 - DNA, 25 bp, Homo sapien
cactggccacagttgtttgatgcat

SEQ ID NO: 5754846 - DNA, 25 bp, Homo sapien
agtgcctcaagtaccaggtgcccct

SEQ ID NO: 5754847 - DNA, 25 bp, Homo sapien
cccccaccggcttcggatgcaagtc

SEQ ID NO: 5754848 - DNA, 25 bp, Homo sapien
accagaaaccgaaaaatgtctagca

SEQ ID NO: 5754849 - DNA, 25 bp, Homo sapien
ccgccgtgctcaacgggcagcaccc

SEQ ID NO: 5754850 - DNA, 25 bp, Homo sapien
cgcctcctcctcctctctgctcttc

SEQ ID NO: 5754851 - DNA, 25 bp, Homo sapien
cctcctctctgctcttcgctaccca

SEQ ID NO: 5754852 - DNA, 25 bp, Homo sapien
cacaggcagggagtgtgtgaactgt

SEQ ID NO: 5754853 - DNA, 25 bp, Homo sapien
attaagaagaaactaggtctgatat

SEQ ID NO: 5754854 - DNA, 25 bp, Homo sapien
ggctgaggaccccggtgcagaggag

SEQ ID NO: 5754855 - DNA, 25 bp, Homo sapien
ctgtctgcaatgcctgtgggctcta

SEQ ID NO: 5754856 - DNA, 25 bp, Homo sapien
tttttgcaggagcagtatcatgaag

SEQ ID NO: 5754857 - DNA, 25 bp, Homo sapien
gagacagagcgagcaacgcaatctg

SEQ ID NO: 5754858 - DNA, 25 bp, Homo sapien
gtaagaaatactgtacaatgacttt

SEQ ID NO: 5754859 - DNA, 25 bp, Homo sapien
aatcattcaacgacccccgaccctc

SEQ ID NO: 5754860 - DNA, 25 bp, Homo sapien
ggcagcatgaccgccctgggtggag

SEQ ID NO: 5754861 - DNA, 25 bp, Homo sapien
gtgtgccgcccgcctctgcttcatg

SEQ ID NO: 5754862 - DNA, 25 bp, Homo sapien
atgccaagaagtttaaggaatatgg

SEQ ID NO: 5754863 - DNA, 25 bp, Homo sapien
atctcgcccttcagccactccagcc

SEQ ID NO: 5754864 - DNA, 25 bp, Homo sapien
aggagcctggctcgcagaattgcag

SEQ ID NO: 5754865 - DNA, 25 bp, Homo sapien
ccacatctcgcccttcagccactcc

SEQ ID NO: 5754866 - DNA, 25 bp, Homo sapien
cctttcgacttgcatttttgcagga

SEQ ID NO: 5754867 - DNA, 25 bp, Homo sapien
cgaaagcaaatcattcaacgacccc

SEQ ID NO: 5754868 - DNA, 25 bp, Homo sapien
tgcaggagcagtatcatgaagccta

SEQ ID NO: 5754869 - DNA, 25 bp, Homo sapien
gagcaacgcaatctgaccgagcagg

SEQ ID NO: 5754870 - DNA, 25 bp, Homo sapien
cgccctacgtgcccgagtacagctc

SEQ ID NO: 5754871 - DNA, 25 bp, Homo sapien
gcctgtcctttggaccacaccaccc

SEQ ID NO: 5754872 - DNA, 25 bp, Homo sapien
acccgggcctcagccactcctacat

SEQ ID NO: 5754873 - DNA, 25 bp, Homo sapien
catatcccctatttaacagggtctc

SEQ ID NO: 5754874 - DNA, 25 bp, Homo sapien
cgcgcgggttccgggcccggcgaga

SEQ ID NO: 5754875 - DNA, 25 bp, Homo sapien
gaaggcagaaagcaaaattatgttt

SEQ ID NO: 5754876 - DNA, 25 bp, Homo sapien
agctgtaaggcatgaaggatgccaa

SEQ ID NO: 5754877 - DNA, 25 bp, Homo sapien
ctgtgcgaactgtcagaccaccaca

SEQ ID NO: 5754878 - DNA, 25 bp, Homo sapien
catgctgaccacgcccacgccgatg

SEQ ID NO: 5754879 - DNA, 25 bp, Homo sapien
gtacagctccggactcttccccccc

SEQ ID NO: 5754880 - DNA, 25 bp, Homo sapien
gatattcaaatggacaaactgccag

SEQ ID NO: 5754881 - DNA, 25 bp, Homo sapien
cgtgctcaacgggcagcacccggac

SEQ ID NO: 5754882 - DNA, 25 bp, Homo sapien
ccgagtacagctccggactcttccc

SEQ ID NO: 5754883 - DNA, 25 bp, Homo sapien
acaatgactttattgcatctgggta

SEQ ID NO: 5754884 - DNA, 25 bp, Homo sapien
gtatcatgaagcctaaacgcgatgg

SEQ ID NO: 5754885 - DNA, 25 bp, Homo sapien
ttctgccatacccagtttttggatt

SEQ ID NO: 5754886 - DNA, 25 bp, Homo sapien
ctctctgctcttcgctacccaggtg

SEQ ID NO: 5754887 - DNA, 25 bp, Homo sapien
gccaggagagcagggacgtcctgtg

SEQ ID NO: 5754888 - DNA, 25 bp, Homo sapien
ggaaattaagaagaaactaggtctg

SEQ ID NO: 5754889 - DNA, 25 bp, Homo sapien
cttccccaagaacagctcgtttaac

SEQ ID NO: 5754890 - DNA, 25 bp, Homo sapien
ggagctcactgtggtgtctgtgttc

SEQ ID NO: 5754891 - DNA, 25 bp, Homo sapien
cccctgcccgacagcatgaagctgg

SEQ ID NO: 5754892 - DNA, 25 bp, Homo sapien
cttctcctttgctcacctttgcttc

SEQ ID NO: 5754893 - DNA, 25 bp, Homo sapien
gtcctttggaccacaccacccctcc

SEQ ID NO: 5754894 - DNA, 25 bp, Homo sapien
ctttgctaaacgacccctccaagat

SEQ ID NO: 5754895 - DNA, 25 bp, Homo sapien
gaaatactgtacaatgactttattg

SEQ ID NO: 5754896 - DNA, 25 bp, Homo sapien
gccaagaagtttaaggaatatggga

SEQ ID NO: 5754897 - DNA, 25 bp, Homo sapien
aaattatgtttgccactttgcaaag

SEQ ID NO: 5754898 - DNA, 25 bp, Homo sapien
ttgctcacctttgcttcccagcctt

SEQ ID NO: 5754899 - DNA, 25 bp, Homo sapien
gggcagcacccggacacgcaccacc

SEQ ID NO: 5754900 - DNA, 25 bp, Homo sapien
atgctcacagggcccccagcgagag

SEQ ID NO: 5754901 - DNA, 25 bp, Homo sapien
gctcacctttgcttcccagccttcc

SEQ ID NO: 5754902 - DNA, 25 bp, Homo sapien
ccgggcctcagccactcctacatgg

SEQ ID NO: 5754903 - DNA, 25 bp, Homo sapien
gcagaggagcctggctcgcagaatt

SEQ ID NO: 5754904 - DNA, 25 bp, Homo sapien
ccaggtgacccgaggagggactccg

SEQ ID NO: 5754905 - DNA, 25 bp, Homo sapien
gcagcacccggacacgcaccacccg

SEQ ID NO: 5754906 - DNA, 25 bp, Homo sapien
gaaccggcccctcattaagcccaag

SEQ ID NO: 5754907 - DNA, 25 bp, Homo sapien
tgtttcctttcactggccacagttg

SEQ ID NO: 5754908 - DNA, 25 bp, Homo sapien
cgggcccggcgagagggcgcgagca

SEQ ID NO: 5754909 - DNA, 25 bp, Homo sapien
actttgcaaaggagctcactgtggt

SEQ ID NO: 5754910 - DNA, 25 bp, Homo sapien
caaagccctgggcagccaccacacc

SEQ ID NO: 5754911 - DNA, 25 bp, Homo sapien
catgaagctggagtcgtcccactcc

SEQ ID NO: 5754912 - DNA, 25 bp, Homo sapien
aaccacactctggaggaggaatgcc

SEQ ID NO: 5754913 - DNA, 25 bp, Homo sapien
tcccgttttattctgccatacccag

SEQ ID NO: 5754914 - DNA, 25 bp, Homo sapien
agagcagggacgtcctgtgcgaact

SEQ ID NO: 5754915 - DNA, 25 bp, Homo sapien
acccaggtgacccgaggagggactc

SEQ ID NO: 5754916 - DNA, 25 bp, Homo sapien
tgaagaaggaaggcatccagaccag

SEQ ID NO: 5754917 - DNA, 25 bp, Homo sapien
atctgtgaataagccattctgactc

SEQ ID NO: 5754918 - DNA, 25 bp, Homo sapien
accagccgcgctgggtgagccacca

SEQ ID NO: 5754919 - DNA, 25 bp, Homo sapien
cgcaccacccgggcctcagccactc

SEQ ID NO: 5754920 - DNA, 25 bp, Homo sapien
gaccctgtctgcaatgcctgtgggc

SEQ ID NO: 5754921 - DNA, 25 bp, Homo sapien
atgcacccgccatccagcctgtcct

SEQ ID NO: 5754922 - DNA, 25 bp, Homo sapien
ccacgccagcccgcacctcttcacc

SEQ ID NO: 5754923 - DNA, 25 bp, Homo sapien
cactgtggtgtctgtgttccaacca

SEQ ID NO: 5754924 - DNA, 25 bp, Homo sapien
ggtcccgttttattctgccataccc

SEQ ID NO: 5754925 - DNA, 25 bp, Homo sapien
cccagcagcctgctgggcggctccc

SEQ ID NO: 5754926 - DNA, 25 bp, Homo sapien
cggcggcaaagccctgggcagccac

SEQ ID NO: 5754927 - DNA, 25 bp, Homo sapien
gacgagaaagagtgcctcaagtacc

SEQ ID NO: 5754928 - DNA, 25 bp, Homo sapien
gaaaaatgtctagcaaatccaaaaa

SEQ ID NO: 5754929 - DNA, 25 bp, Homo sapien
ctggccacagttgtttgatgcatta

SEQ ID NO: 5754930 - DNA, 25 bp, Homo sapien
ggcccggtccagcacaggcagggag

SEQ ID NO: 5754931 - DNA, 25 bp, Homo sapien
gcagtccctttcgacttgcattttt

SEQ ID NO: 5754932 - DNA, 25 bp, Homo sapien
tggctggacggcggcaaagccctgg

SEQ ID NO: 5754933 - DNA, 25 bp, Homo sapien
tggacggcggcaaagccctgggcag

SEQ ID NO: 5754934 - DNA, 25 bp, Homo sapien
ccacactctggaggaggaatgccaa

SEQ ID NO: 5754935 - DNA, 25 bp, Homo sapien
tggatatatgtttttgaaggcagaa

SEQ ID NO: 5754936 - DNA, 25 bp, Homo sapien
gtcgacccaccaccccatcaccacc

SEQ ID NO: 5754937 - DNA, 25 bp, Homo sapien
gagggactccgcctccgagcggctg

SEQ ID NO: 5754938 - DNA, 25 bp, Homo sapien
gcgagagtccctgcagtccctttcg

SEQ ID NO: 5754939 - DNA, 25 bp, Homo sapien
ggagccaggtgtgccgcccgcctct

SEQ ID NO: 5754940 - DNA, 25 bp, Homo sapien
gtgagccaccaccaccccgccgtgc

SEQ ID NO: 5754941 - DNA, 25 bp, Homo sapien
cagcgagagtccctgcagtcccttt

SEQ ID NO: 5754942 - DNA, 25 bp, Homo sapien
atgctgaacattgcatataacttat

SEQ ID NO: 5754943 - DNA, 25 bp, Homo sapien
tggagcctcctcgtcgacccaccac

SEQ ID NO: 5754944 - DNA, 25 bp, Homo sapien
gtggtgtctgtgttccaaccactga

SEQ ID NO: 5754945 - DNA, 25 bp, Homo sapien
gcccaaggcccggtccagcacaggc

SEQ ID NO: 5754946 - DNA, 25 bp, Homo sapien
cccactgtggcggcgagatggcacg

SEQ ID NO: 5754947 - DNA, 25 bp, Homo sapien
ggcaaccacgtcccgccctactacg

SEQ ID NO: 5754948 - DNA, 25 bp, Homo sapien
tgcttcatggatccctaccctggct

SEQ ID NO: 5754949 - DNA, 25 bp, Homo sapien
ttgtaagaaatactgtacaatgact

SEQ ID NO: 5754950 - DNA, 25 bp, Homo sapien
ccgcacctcttcaccttcccgccca

SEQ ID NO: 5754951 - DNA, 25 bp, Homo sapien
caatctgaccgagcaggtcgtacgc

SEQ ID NO: 5754952 - DNA, 25 bp, Homo sapien
gcttcccagccttcccatcccccca

SEQ ID NO: 5754953 - DNA, 25 bp, Homo sapien
agctcactgtggtgtctgtgttcca

SEQ ID NO: 5754954 - DNA, 25 bp, Homo sapien
agaagaaactaggtctgatattcaa

SEQ ID NO: 5754955 - DNA, 25 bp, Homo sapien
tcttcccccccagcagcctgctggg

SEQ ID NO: 5754956 - DNA, 25 bp, Homo sapien
gtgccgcccgcctctgcttcatgga

SEQ ID NO: 5754957 - DNA, 25 bp, Homo sapien
gacgtcctgtgcgaactgtcagacc

SEQ ID NO: 5754958 - DNA, 25 bp, Homo sapien
cacccctccagcatggtcaccgcca

SEQ ID NO: 5754959 - DNA, 25 bp, Homo sapien
cagggacgtcctgtgcgaactgtca

SEQ ID NO: 5754960 - DNA, 25 bp, Homo sapien
acttatattgtaagaaatactgtac

SEQ ID NO: 5754961 - DNA, 25 bp, Homo sapien
gtggatgtgctttttaacatcgacg

SEQ ID NO: 5754962 - DNA, 25 bp, Homo sapien
tggaccacaccacccctccagcatg

SEQ ID NO: 5754963 - DNA, 25 bp, Homo sapien
gaggccatggaggtgacggcggacc

SEQ ID NO: 5754964 - DNA, 25 bp, Homo sapien
gcccgcacctcttcaccttcccgcc

SEQ ID NO: 5754965 - DNA, 25 bp, Homo sapien
ggcggcgagatggcacgggacacta

SEQ ID NO: 5754966 - DNA, 25 bp, Homo sapien
ctgtggggcaacctcgaccccactg

SEQ ID NO: 5754967 - DNA, 25 bp, Homo sapien
accgcctccccctggaatctcagcc

SEQ ID NO: 5754968 - DNA, 25 bp, Homo sapien
acgtgcccgagtacagctccggact

SEQ ID NO: 5754969 - DNA, 25 bp, Homo sapien
tccagccacatgctgaccacgccca

SEQ ID NO: 5754970 - DNA, 25 bp, Homo sapien
cgctgtccaccccaggctcggccgg

SEQ ID NO: 5754971 - DNA, 25 bp, Homo sapien
tcggcccggcaggacgagaaagagt

SEQ ID NO: 5754972 - DNA, 25 bp, Homo sapien
gcccaagcgaaggctgtctgcagcc

SEQ ID NO: 5754973 - DNA, 25 bp, Homo sapien
gcgagcaacgcaatctgaccgagca

SEQ ID NO: 5754974 - DNA, 25 bp, Homo sapien
cttcagccactccagccacatgctg

SEQ ID NO: 5754975 - DNA, 25 bp, Homo sapien
cgacccaccaccccatcaccaccta

SEQ ID NO: 5754976 - DNA, 25 bp, Homo sapien
catgaaggatgccaagaagtttaag

SEQ ID NO: 5754977 - DNA, 25 bp, Homo sapien
agtacccgctgccggaggaggtgga

SEQ ID NO: 5754978 - DNA, 25 bp, Homo sapien
ggatgccaagaagtttaaggaatat

SEQ ID NO: 5754979 - DNA, 25 bp, Homo sapien
ctatttaacagggtctctagtgctg

SEQ ID NO: 5754980 - DNA, 25 bp, Homo sapien
ccggacccatcgctgtccaccccag

SEQ ID NO: 5754981 - DNA, 25 bp, Homo sapien
gtgcagaggtaccctccgacccacc

SEQ ID NO: 5754982 - DNA, 25 bp, Homo sapien
agggagtgtgtgaactgtggggcaa

SEQ ID NO: 5754983 - DNA, 25 bp, Homo sapien
tgcccgacagcatgaagctggagtc

SEQ ID NO: 5754984 - DNA, 25 bp, Homo sapien
gcgagagggcgcgagcacagccgag

SEQ ID NO: 5754985 - DNA, 25 bp, Homo sapien
tgcctcaagtaccaggtgcccctgc

SEQ ID NO: 5754986 - DNA, 25 bp, Homo sapien
accctggctggacggcggcaaagcc

SEQ ID NO: 5754987 - DNA, 25 bp, Homo sapien
agaccaccacaaccacactctggag

SEQ ID NO: 5754988 - DNA, 25 bp, Homo sapien
tacatggacgcggcgcagtacccgc

SEQ ID NO: 5754989 - DNA, 25 bp, Homo sapien
cgctacccaggtgacccgaggaggg

SEQ ID NO: 5754990 - DNA, 25 bp, Homo sapien
ccctcattaagcccaagcgaaggct

SEQ ID NO: 5754991 - DNA, 25 bp, Homo sapien
tgctcaacgggcagcacccggacac

SEQ ID NO: 5754992 - DNA, 25 bp, Homo sapien
ttcgctacccaggtgacccgaggag

SEQ ID NO: 5754993 - DNA, 25 bp, Homo sapien
aaaaaaaaatgctgaacattgcata

SEQ ID NO: 5754994 - DNA, 25 bp, Homo sapien
ggctcggccggctcggcccggcagg

SEQ ID NO: 5754995 - DNA, 25 bp, Homo sapien
aacagggtctctagtgctgtgaaaa

SEQ ID NO: 5754996 - DNA, 25 bp, Homo sapien
ttcccagccttcccatccccccacc

SEQ ID NO: 5754997 - DNA, 25 bp, Homo sapien
gttttgtttcctttcactggccaca

SEQ ID NO: 5754998 - DNA, 25 bp, Homo sapien
ctttgctcacctttgcttcccagcc

SEQ ID NO: 5754999 - DNA, 25 bp, Homo sapien
ccgccctactacggaaactcggtca

SEQ ID NO: 5755000 - DNA, 25 bp, Homo sapien
aacgcaatctgaccgagcaggtcgt

SEQ ID NO: 5755001 - DNA, 25 bp, Homo sapien
aacagacccctgactatgaagaagg

SEQ ID NO: 5755002 - DNA, 25 bp, Homo sapien
tcggatgcaagtccaggcccaaggc

SEQ ID NO: 5755003 - DNA, 25 bp, Homo sapien
gacctcccaggcggaccgccctccc

SEQ ID NO: 5755004 - DNA, 25 bp, Homo sapien
gcaggagccccccgacctcccaggc

SEQ ID NO: 5755005 - DNA, 25 bp, Homo sapien
ttcaaatggacaaactgccagtttt

SEQ ID NO: 5755006 - DNA, 25 bp, Homo sapien
ctctactacaagcttcacaatatta

SEQ ID NO: 5755007 - DNA, 25 bp, Homo sapien
cattgcatataacttatattgtaag

SEQ ID NO: 5755008 - DNA, 25 bp, Homo sapien
agttgtttgatgcattaaaagaaaa

SEQ ID NO: 5755009 - DNA, 25 bp, Homo sapien
tactacggaaactcggtcagggcca

SEQ ID NO: 5755010 - DNA, 25 bp, Homo sapien
ccgccctgggtggagcctcctcgtc

SEQ ID NO: 5755011 - DNA, 25 bp, Homo sapien
ggaggaggaatgccaatggggaccc

SEQ ID NO: 5755012 - DNA, 25 bp, Homo sapien
ctactacaagcttcacaatattaac

SEQ ID NO: 5755013 - DNA, 25 bp, Homo sapien
tacccgccctacgtgcccgagtaca

SEQ ID NO: 5755014 - DNA, 25 bp, Homo sapien
cacaaaatgaacggacagaaccggc

SEQ ID NO: 5755015 - DNA, 25 bp, Homo sapien
actttattgcatctgggtagctgta

SEQ ID NO: 5755016 - DNA, 25 bp, Homo sapien
gcctaaacgcgatggatatatgttt

SEQ ID NO: 5755017 - DNA, 25 bp, Homo sapien
acgtccatccaccacggctccccgg

SEQ ID NO: 5755018 - DNA, 25 bp, Homo sapien
acctcgaccccactgtggcggcgag

SEQ ID NO: 5755019 - DNA, 25 bp, Homo sapien
gggtagctgtaaggcatgaaggatg

SEQ ID NO: 5755020 - DNA, 25 bp, Homo sapien
gctggagtcgtcccactcccgtggc

SEQ ID NO: 5755021 - DNA, 25 bp, Homo sapien
gtgaataagccattctgactcatat

SEQ ID NO: 5755022 - DNA, 25 bp, Homo sapien
aggtcgtacgccgccgcctcctcct

SEQ ID NO: 5755023 - DNA, 25 bp, Homo sapien
cagccacatgctgaccacgcccacg

SEQ ID NO: 5755024 - DNA, 25 bp, Homo sapien
tttgcaggagcagtatcatgaagcc

SEQ ID NO: 5755025 - DNA, 25 bp, Homo sapien
taaaaaaccttctcctttgctcacc

SEQ ID NO: 5755026 - DNA, 25 bp, Homo sapien
cggaggaggtggatgtgctttttaa

SEQ ID NO: 5755027 - DNA, 25 bp, Homo sapien
tcaccgccatgggttagagccctgc

SEQ ID NO: 5755028 - DNA, 25 bp, Homo sapien
tgtgttccaaccactgaatctggac

SEQ ID NO: 5755029 - DNA, 25 bp, Homo sapien
gcggaccagccgcgctgggtgagcc

SEQ ID NO: 5755030 - DNA, 25 bp, Homo sapien
gacttgcatttttgcaggagcagta

SEQ ID NO: 5755031 - DNA, 25 bp, Homo sapien
ttcaccttcccgcccaccccgccga

SEQ ID NO: 5755032 - DNA, 25 bp, Homo sapien
ccatcgctgtccaccccaggctcgg

SEQ ID NO: 5755033 - DNA, 25 bp, Homo sapien
tgtgggctctactacaagcttcaca

SEQ ID NO: 5755034 - DNA, 25 bp, Homo sapien
acgtctccccggacccatcgctgtc

SEQ ID NO: 5755035 - DNA, 25 bp, Homo sapien
tttcctttcactggccacagttgtt

SEQ ID NO: 5755036 - DNA, 25 bp, Homo sapien
cgtcctgtgcgaactgtcagaccac

SEQ ID NO: 5755037 - DNA, 25 bp, Homo sapien
gagggcgcgagcacagccgaggcca

SEQ ID NO: 5755038 - DNA, 25 bp, Homo sapien
tccccctggaatctcagccccttct

SEQ ID NO: 5755039 - DNA, 25 bp, Homo sapien
ggggggccacgccagcccgcacctc

SEQ ID NO: 5755040 - DNA, 25 bp, Homo sapien
ccaaccactgaatctggaccccatc

SEQ ID NO: 5755041 - DNA, 25 bp, Homo sapien
gcgcgagcacagccgaggccatgga

SEQ ID NO: 5755042 - DNA, 25 bp, Homo sapien
caagaagtttaaggaatatgggaga

SEQ ID NO: 5755043 - DNA, 25 bp, Homo sapien
cgacccaccacgggagccaggtgtg

SEQ ID NO: 5755044 - DNA, 25 bp, Homo sapien
gagtacagctccggactcttccccc

SEQ ID NO: 5755045 - DNA, 25 bp, Homo sapien
caccaccaccccgccgtgctcaacg

SEQ ID NO: 5755046 - DNA, 25 bp, Homo sapien
ctgatattcaaatggacaaactgcc

SEQ ID NO: 5755047 - DNA, 25 bp, Homo sapien
atcgacggtcaaggcaaccacgtcc

SEQ ID NO: 5755048 - DNA, 25 bp, Homo sapien
tcctgtgcgaactgtcagaccacca

SEQ ID NO: 5755049 - DNA, 25 bp, Homo sapien
agcacccggacacgcaccacccggg

SEQ ID NO: 5755050 - DNA, 25 bp, Homo sapien
gggcggctcccccaccggcttcgga

SEQ ID NO: 5755051 - DNA, 25 bp, Homo sapien
ccaaggcccggtccagcacaggcag

SEQ ID NO: 5755052 - DNA, 25 bp, Homo sapien
cgacggtcaaggcaaccacgtcccg

SEQ ID NO: 5755053 - DNA, 25 bp, Homo sapien
aacattgcatataacttatattgta

SEQ ID NO: 5755054 - DNA, 25 bp, Homo sapien
atgcaagtccaggcccaaggcccgg

SEQ ID NO: 5755055 - DNA, 25 bp, Homo sapien
ccagcacaggcagggagtgtgtgaa

SEQ ID NO: 5755056 - DNA, 25 bp, Homo sapien
ttaacagacccctgactatgaagaa

SEQ ID NO: 5755057 - DNA, 25 bp, Homo sapien
gcccctcattaagcccaagcgaagg

SEQ ID NO: 5755058 - DNA, 25 bp, Homo sapien
cgaccctccgacggcaggagccccc

SEQ ID NO: 5755059 - DNA, 25 bp, Homo sapien
tgtctgcagccaggagagcagggac

SEQ ID NO: 5755060 - DNA, 25 bp, Homo sapien
tttgtttcctttcactggccacagt

SEQ ID NO: 5755061 - DNA, 25 bp, Homo sapien
caggtgcccctgcccgacagcatga

SEQ ID NO: 5755062 - DNA, 25 bp, Homo sapien
ggtcaaggcaaccacgtcccgccct

SEQ ID NO: 5755063 - DNA, 25 bp, Homo sapien
tttcgacttgcatttttgcaggagc

SEQ ID NO: 5755064 - DNA, 25 bp, Homo sapien
ggaccagccgcgctgggtgagccac

SEQ ID NO: 5755065 - DNA, 25 bp, Homo sapien
ccacaccacccctccagcatggtca

SEQ ID NO: 5755066 - DNA, 25 bp, Homo sapien
aggaaggcatccagaccagaaaccg

SEQ ID NO: 5755067 - DNA, 25 bp, Homo sapien
cccaccggcttcggatgcaagtcca

SEQ ID NO: 5755068 - DNA, 25 bp, Homo sapien
ggactcttcccccccagcagcctgc

SEQ ID NO: 5755069 - DNA, 25 bp, Homo sapien
aatagtgtggaaattaagaagaaac

SEQ ID NO: 5755070 - DNA, 25 bp, Homo sapien
cccgacagcatgaagctggagtcgt

SEQ ID NO: 5755071 - DNA, 25 bp, Homo sapien
ctgccatacccagtttttggatttt

SEQ ID NO: 5755072 - DNA, 25 bp, Homo sapien
cagcagcctgctgggcggctccccc

SEQ ID NO: 5755073 - DNA, 25 bp, Homo sapien
cctccccctggaatctcagcccctt

SEQ ID NO: 5755074 - DNA, 25 bp, Homo sapien
cgcgctgggtgagccaccaccaccc

SEQ ID NO: 5755075 - DNA, 25 bp, Homo sapien
acccaccacgggagccaggtgtgcc

SEQ ID NO: 5755076 - DNA, 25 bp, Homo sapien
caccacaaccacactctggaggagg

SEQ ID NO: 5755077 - DNA, 25 bp, Homo sapien
tcttctctttgctaaacgacccctc

SEQ ID NO: 5755078 - DNA, 25 bp, Homo sapien
gccacggtgcagaggtaccctccga

SEQ ID NO: 5755079 - DNA, 25 bp, Homo sapien
acatctcgcccttcagccactccag

SEQ ID NO: 5755080 - DNA, 25 bp, Homo sapien
ggaggtgacggcggaccagccgcgc

SEQ ID NO: 5755081 - DNA, 25 bp, Homo sapien
ctgaggaccccggtgcagaggagcc

SEQ ID NO: 5755082 - DNA, 25 bp, Homo sapien
gtagctgtaaggcatgaaggatgcc

SEQ ID NO: 5755083 - DNA, 25 bp, Homo sapien
tcacaatattaacagacccctgact

SEQ ID NO: 5755084 - DNA, 25 bp, Homo sapien
tagcaaatccaaaaagtgcaaaaaa

SEQ ID NO: 5755085 - DNA, 25 bp, Homo sapien
ccaccacgggagccaggtgtgccgc

SEQ ID NO: 5755086 - DNA, 25 bp, Homo sapien
acggtcaaggcaaccacgtcccgcc

SEQ ID NO: 5755087 - DNA, 25 bp, Homo sapien
tctagcaaatccaaaaagtgcaaaa

SEQ ID NO: 5755088 - DNA, 25 bp, Homo sapien
tctaccccccggcctcgtcctcctc

SEQ ID NO: 5755089 - DNA, 25 bp, Homo sapien
cgacagcatgaagctggagtcgtcc

SEQ ID NO: 5755090 - DNA, 25 bp, Homo sapien
caaaggagctcactgtggtgtctgt

SEQ ID NO: 5755091 - DNA, 25 bp, Homo sapien
cggacacgcaccacccgggcctcag

SEQ ID NO: 5755092 - DNA, 25 bp, Homo sapien
agaagtttaaggaatatgggagaaa

SEQ ID NO: 5755093 - DNA, 25 bp, Homo sapien
gccacatgctgaccacgcccacgcc

SEQ ID NO: 5755094 - DNA, 25 bp, Homo sapien
ccgagcaggtcgtacgccgccgcct

SEQ ID NO: 5755095 - DNA, 25 bp, Homo sapien
gccggaggaggtggatgtgcttttt

SEQ ID NO: 5755096 - DNA, 25 bp, Homo sapien
gaaactaggtctgatattcaaatgg

SEQ ID NO: 5755097 - DNA, 25 bp, Homo sapien
ctcggccggctcggcccggcaggac

SEQ ID NO: 5755098 - DNA, 25 bp, Homo sapien
aagtgcatgactcactggaggactt

SEQ ID NO: 5755099 - DNA, 25 bp, Homo sapien
ctcccccaccggcttcggatgcaag

SEQ ID NO: 5755100 - DNA, 25 bp, Homo sapien
gtggcagcatgaccgccctgggtgg

SEQ ID NO: 5755101 - DNA, 25 bp, Homo sapien
ccaggcccaaggcccggtccagcac

SEQ ID NO: 5755102 - DNA, 25 bp, Homo sapien
gacggcggcaaagccctgggcagcc

SEQ ID NO: 5755103 - DNA, 25 bp, Homo sapien
tggcacgggacactacctgtgcaac

SEQ ID NO: 5755104 - DNA, 25 bp, Homo sapien
cttgtcggggggccacgccagcccg

SEQ ID NO: 5755105 - DNA, 25 bp, Homo sapien
ccatcaccacctacccgccctacgt

SEQ ID NO: 5755106 - DNA, 25 bp, Homo sapien
cccggcaggacgagaaagagtgcct

SEQ ID NO: 5755107 - DNA, 25 bp, Homo sapien
tactgtacaatgactttattgcatc

SEQ ID NO: 5755108 - DNA, 25 bp, Homo sapien
aactgtggggcaacctcgaccccac

SEQ ID NO: 5755109 - DNA, 25 bp, Homo sapien
atggatccctaccctggctggacgg

SEQ ID NO: 5755110 - DNA, 25 bp, Homo sapien
gcctccgagcggctgaggaccccgg

SEQ ID NO: 5755111 - DNA, 25 bp, Homo sapien
actatgaagaaggaaggcatccaga

SEQ ID NO: 5755112 - DNA, 25 bp, Homo sapien
actcccgtggcagcatgaccgccct

SEQ ID NO: 5755113 - DNA, 25 bp, Homo sapien
acctgtgcaacgcctgcgggctcta

SEQ ID NO: 5755114 - DNA, 25 bp, Homo sapien
ggctcgcagaattgcagagtcgtcg

SEQ ID NO: 5755115 - DNA, 25 bp, Homo sapien
cagaattgcagagtcgtcgcccctt

SEQ ID NO: 5755116 - DNA, 25 bp, Homo sapien
ctcaacgggcagcacccggacacgc

SEQ ID NO: 5755117 - DNA, 25 bp, Homo sapien
tgtctgtgttccaaccactgaatct

SEQ ID NO: 5755118 - DNA, 25 bp, Homo sapien
cattctgactcatatcccctattta

SEQ ID NO: 5755119 - DNA, 25 bp, Homo sapien
atccagaccagaaaccgaaaaatgt

SEQ ID NO: 5755120 - DNA, 25 bp, Homo sapien
ggctcccccaccggcttcggatgca

SEQ ID NO: 5755121 - DNA, 25 bp, Homo sapien
catttttgcaggagcagtatcatga

SEQ ID NO: 5755122 - DNA, 25 bp, Homo sapien
gtggggcaacctcgaccccactgtg

SEQ ID NO: 5755123 - DNA, 25 bp, Homo sapien
gcgagacagagcgagcaacgcaatc

SEQ ID NO: 5755124 - DNA, 25 bp, Homo sapien
ctcgcccttcagccactccagccac

SEQ ID NO: 5755125 - DNA, 25 bp, Homo sapien
atcaccacctacccgccctacgtgc

SEQ ID NO: 5755126 - DNA, 25 bp, Homo sapien
ctgggtagctgtaaggcatgaagga

SEQ ID NO: 5755127 - DNA, 25 bp, Homo sapien
gggccacggtgcagaggtaccctcc

SEQ ID NO: 5755128 - DNA, 25 bp, Homo sapien
gagcggctgaggaccccggtgcaga

SEQ ID NO: 5755129 - DNA, 25 bp, Homo sapien
ggcaaagccctgggcagccaccaca

SEQ ID NO: 5755130 - DNA, 25 bp, Homo sapien
cctgactatgaagaaggaaggcatc

SEQ ID NO: 5755131 - DNA, 25 bp, Homo sapien
gccctgctcgatgctcacagggccc

SEQ ID NO: 5755132 - DNA, 25 bp, Homo sapien
tacaagcttcacaatattaacagac

SEQ ID NO: 5755133 - DNA, 25 bp, Homo sapien
agccactccagccacatgctgacca

SEQ ID NO: 5755134 - DNA, 25 bp, Homo sapien
tcctctctgctcttcgctacccagg

SEQ ID NO: 5755135 - DNA, 25 bp, Homo sapien
tgagccacatctcgcccttcagcca

SEQ ID NO: 5755136 - DNA, 25 bp, Homo sapien
gtccctgcagtccctttcgacttgc

SEQ ID NO: 5755137 - DNA, 25 bp, Homo sapien
cgggctctatcacaaaatgaacgga

SEQ ID NO: 5755138 - DNA, 25 bp, Homo sapien
tttgcaaaggagctcactgtggtgt

SEQ ID NO: 5755139 - DNA, 25 bp, Homo sapien
agcctgctgggcggctcccccaccg

SEQ ID NO: 5755140 - DNA, 25 bp, Homo sapien
cccggcgagagggcgcgagcacagc

SEQ ID NO: 5755141 - DNA, 25 bp, Homo sapien
gccgatgcacccgccatccagcctg

SEQ ID NO: 5755142 - DNA, 25 bp, Homo sapien
aggcccaaggcccggtccagcacag

SEQ ID NO: 5755143 - DNA, 25 bp, Homo sapien
gtgcccgagtacagctccggactct

SEQ ID NO: 5755144 - DNA, 25 bp, Homo sapien
tatcccctatttaacagggtctcta

SEQ ID NO: 5755145 - DNA, 25 bp, Homo sapien
accgccatgggttagagccctgctc

SEQ ID NO: 5755146 - DNA, 25 bp, Homo sapien
tattctgccatacccagtttttgga

SEQ ID NO: 5755147 - DNA, 25 bp, Homo sapien
caacgggcagcacccggacacgcac

SEQ ID NO: 5755148 - DNA, 25 bp, Homo sapien
cggtgcagaggtaccctccgaccca

SEQ ID NO: 5755149 - DNA, 25 bp, Homo sapien
cagcccgcacctcttcaccttcccg

SEQ ID NO: 5755150 - DNA, 25 bp, Homo sapien
tacaacctggtcccgttttattctg

SEQ ID NO: 5755151 - DNA, 25 bp, Homo sapien
atggtcaccgccatgggttagagcc

SEQ ID NO: 5755152 - DNA, 25 bp, Homo sapien
cttctccaagacgtccatccaccac

SEQ ID NO: 5755153 - DNA, 25 bp, Homo sapien
aggtgtgccgcccgcctctgcttca

SEQ ID NO: 5755154 - DNA, 25 bp, Homo sapien
cctgtgggctctactacaagcttca

SEQ ID NO: 5755155 - DNA, 25 bp, Homo sapien
gctcacagggcccccagcgagagtc

SEQ ID NO: 5755156 - DNA, 25 bp, Homo sapien
gcatgaccgccctgggtggagcctc

SEQ ID NO: 5755157 - DNA, 25 bp, Homo sapien
actgtcagaccaccacaaccacact

SEQ ID NO: 5755158 - DNA, 25 bp, Homo sapien
cagcatgaccgccctgggtggagcc

SEQ ID NO: 5755159 - DNA, 25 bp, Homo sapien
cacatgctgaccacgcccacgccga

SEQ ID NO: 5755160 - DNA, 25 bp, Homo sapien
ctctttgctaaacgacccctccaag

SEQ ID NO: 5755161 - DNA, 25 bp, Homo sapien
cgcctccccctggaatctcagcccc

SEQ ID NO: 5755162 - DNA, 25 bp, Homo sapien
gtccagcacaggcagggagtgtgtg

SEQ ID NO: 5755163 - DNA, 25 bp, Homo sapien
cggcccctcattaagcccaagcgaa

SEQ ID NO: 5755164 - DNA, 25 bp, Homo sapien
gacttccccaagaacagctcgttta

SEQ ID NO: 5755165 - DNA, 25 bp, Homo sapien
acgccagcccgcacctcttcacctt

SEQ ID NO: 5755166 - DNA, 25 bp, Homo sapien
tcgtcgacccaccaccccatcacca

SEQ ID NO: 5755167 - DNA, 25 bp, Homo sapien
aaagcaaaattatgtttgccacttt

SEQ ID NO: 5755168 - DNA, 25 bp, Homo sapien
cggcggaccagccgcgctgggtgag

SEQ ID NO: 5755169 - DNA, 25 bp, Homo sapien
tgaacattgcatataacttatattg

SEQ ID NO: 5755170 - DNA, 25 bp, Homo sapien
ttggatttttgtcttccccttcttc

SEQ ID NO: 5755171 - DNA, 25 bp, Homo sapien
accaggtgcccctgcccgacagcat

SEQ ID NO: 5755172 - DNA, 25 bp, Homo sapien
ggggcaacctcgaccccactgtggc

SEQ ID NO: 5755173 - DNA, 25 bp, Homo sapien
ccactgaatctggaccccatctgtg

SEQ ID NO: 5755174 - DNA, 25 bp, Homo sapien
gccactcctacatggacgcggcgca

SEQ ID NO: 5755175 - DNA, 25 bp, Homo sapien
aatggacaaactgccagttttgttt

SEQ ID NO: 5755176 - DNA, 25 bp, Homo sapien
gatatatgtttttgaaggcagaaag

SEQ ID NO: 5755177 - DNA, 25 bp, Homo sapien
tattgcatctgggtagctgtaaggc

SEQ ID NO: 5755178 - DNA, 25 bp, Homo sapien
cactcctacatggacgcggcgcagt

SEQ ID NO: 5755179 - DNA, 25 bp, Homo sapien
agcacaggcagggagtgtgtgaact

SEQ ID NO: 5755180 - DNA, 25 bp, Homo sapien
catggacgcggcgcagtacccgctg

SEQ ID NO: 5755181 - DNA, 25 bp, Homo sapien
tcctcctccttgtcggggggccacg

SEQ ID NO: 5755182 - DNA, 25 bp, Homo sapien
taacatcgacggtcaaggcaaccac

SEQ ID NO: 5755183 - DNA, 25 bp, Homo sapien
ctcgaccccactgtggcggcgagat

SEQ ID NO: 5755184 - DNA, 25 bp, Homo sapien
gacggcaggagccccccgacctccc

SEQ ID NO: 5755185 - DNA, 25 bp, Homo sapien
gtctctagtgctgtgaaaaaaaaaa

SEQ ID NO: 5755186 - DNA, 25 bp, Homo sapien
gcgaactgtcagaccaccacaacca

SEQ ID NO: 5755187 - DNA, 25 bp, Homo sapien
ctccggactcttcccccccagcagc

SEQ ID NO: 5755188 - DNA, 25 bp, Homo sapien
tgctgaccacgcccacgccgatgca

SEQ ID NO: 5755189 - DNA, 25 bp, Homo sapien
acgcccacgccgatgcacccgccat

SEQ ID NO: 5755190 - DNA, 25 bp, Homo sapien
acagctccggactcttcccccccag

SEQ ID NO: 5755191 - DNA, 25 bp, Homo sapien
cccccagcgagagtccctgcagtcc

SEQ ID NO: 5755192 - DNA, 25 bp, Homo sapien
tctgcagccaggagagcagggacgt

SEQ ID NO: 5755193 - DNA, 25 bp, Homo sapien
ccggactcttcccccccagcagcct

SEQ ID NO: 5755194 - DNA, 25 bp, Homo sapien
gaggaccccggtgcagaggagcctg

SEQ ID NO: 5755195 - DNA, 25 bp, Homo sapien
agaaagagtgcctcaagtaccaggt

SEQ ID NO: 5755196 - DNA, 25 bp, Homo sapien
gctccccggggcccctctccgtcta

SEQ ID NO: 5755197 - DNA, 25 bp, Homo sapien
gaccgccctccctccccgcgcgcgg

SEQ ID NO: 5755198 - DNA, 25 bp, Homo sapien
cggccgccctctccagacacatgtc

SEQ ID NO: 5755199 - DNA, 25 bp, Homo sapien
aagcccaagcgaaggctgtctgcag

SEQ ID NO: 5755200 - DNA, 25 bp, Homo sapien
aaagagtgcctcaagtaccaggtgc

SEQ ID NO: 5755201 - DNA, 25 bp, Homo sapien
gagcctggctcgcagaattgcagag

SEQ ID NO: 5755202 - DNA, 25 bp, Homo sapien
cggctcggcccggcaggacgagaaa

SEQ ID NO: 5755203 - DNA, 25 bp, Homo sapien
cctcaagtaccaggtgcccctgccc

SEQ ID NO: 5755204 - DNA, 25 bp, Homo sapien
tgggtggagcctcctcgtcgaccca

SEQ ID NO: 5755205 - DNA, 25 bp, Homo sapien
gggaccctgtctgcaatgcctgtgg

SEQ ID NO: 5755206 - DNA, 25 bp, Homo sapien
ccatggaggtgacggcggaccagcc

SEQ ID NO: 5755207 - DNA, 25 bp, Homo sapien
acagcatgaagctggagtcgtccca

SEQ ID NO: 5755208 - DNA, 25 bp, Homo sapien
ccccatctgtgaataagccattctg

SEQ ID NO: 5755209 - DNA, 25 bp, Homo sapien
ggtgtctgtgttccaaccactgaat

SEQ ID NO: 5755210 - DNA, 25 bp, Homo sapien
ccccggacccatcgctgtccacccc

SEQ ID NO: 5755211 - DNA, 25 bp, Homo sapien
actgaatctggaccccatctgtgaa

SEQ ID NO: 5755212 - DNA, 25 bp, Homo sapien
ttttgaaggcagaaagcaaaattat

SEQ ID NO: 5755213 - DNA, 25 bp, Homo sapien
gacactacctgtgcaacgcctgcgg

SEQ ID NO: 5755214 - DNA, 25 bp, Homo sapien
cagggccacggtgcagaggtaccct

SEQ ID NO: 5755215 - DNA, 25 bp, Homo sapien
caccccatcaccacctacccgccct

SEQ ID NO: 5755216 - DNA, 25 bp, Homo sapien
cttcatggatccctaccctggctgg

SEQ ID NO: 5755217 - DNA, 25 bp, Homo sapien
aagcctaaacgcgatggatatatgt

SEQ ID NO: 5755218 - DNA, 25 bp, Homo sapien
gcacccgccatccagcctgtccttt

SEQ ID NO: 5755219 - DNA, 25 bp, Homo sapien
tgttccaaccactgaatctggaccc

SEQ ID NO: 5755220 - DNA, 25 bp, Homo sapien
gagtcgtcccactcccgtggcagca

SEQ ID NO: 5755221 - DNA, 25 bp, Homo sapien
ctcactgtggtgtctgtgttccaac

SEQ ID NO: 5755222 - DNA, 25 bp, Homo sapien
gcgatggatatatgtttttgaaggc

SEQ ID NO: 5755223 - DNA, 25 bp, Homo sapien
ccaggtgtgccgcccgcctctgctt

SEQ ID NO: 5755224 - DNA, 25 bp, Homo sapien
tttattgcatctgggtagctgtaag

SEQ ID NO: 5755225 - DNA, 25 bp, Homo sapien
ctggtcccgttttattctgccatac

SEQ ID NO: 5755226 - DNA, 25 bp, Homo sapien
cctgcgggctctatcacaaaatgaa

SEQ ID NO: 5755227 - DNA, 25 bp, Homo sapien
gtcgtcccactcccgtggcagcatg

SEQ ID NO: 5755228 - DNA, 25 bp, Homo sapien
aaggatgccaagaagtttaaggaat

SEQ ID NO: 5755229 - DNA, 25 bp, Homo sapien
cctccttgtcggggggccacgccag

SEQ ID NO: 5755230 - DNA, 25 bp, Homo sapien
catgaagcctaaacgcgatggatat

SEQ ID NO: 5755231 - DNA, 25 bp, Homo sapien
ccatccccccaccgaaagcaaatca

SEQ ID NO: 5755232 - DNA, 25 bp, Homo sapien
tggaatctcagccccttctccaaga

SEQ ID NO: 5755233 - DNA, 25 bp, Homo sapien
cccttcagccactccagccacatgc

SEQ ID NO: 5755234 - DNA, 25 bp, Homo sapien
gccagcccgcacctcttcaccttcc

SEQ ID NO: 5755235 - DNA, 25 bp, Homo sapien
gcaaaaaagtgcatgactcactgga

SEQ ID NO: 5755236 - DNA, 25 bp, Homo sapien
ccccatcaccacctacccgccctac

SEQ ID NO: 5755237 - DNA, 25 bp, Homo sapien
cccggtgcagaggagcctggctcgc

SEQ ID NO: 5755238 - DNA, 25 bp, Homo sapien
agacacatgtcctccctgagccaca

SEQ ID NO: 5755239 - DNA, 25 bp, Homo sapien
gccgtgctcaacgggcagcacccgg

SEQ ID NO: 5755240 - DNA, 25 bp, Homo sapien
ggagagcagggacgtcctgtgcgaa

SEQ ID NO: 5755241 - DNA, 25 bp, Homo sapien
ctggctcgcagaattgcagagtcgt

SEQ ID NO: 5755242 - DNA, 25 bp, Homo sapien
gctcggcccggcaggacgagaaaga

SEQ ID NO: 5755243 - DNA, 25 bp, Homo sapien
ccacgccgatgcacccgccatccag

SEQ ID NO: 5755244 - DNA, 25 bp, Homo sapien
ccacaccgcctccccctggaatctc

SEQ ID NO: 5755245 - DNA, 25 bp, Homo sapien
cgaccccactgtggcggcgagatgg

SEQ ID NO: 5755246 - DNA, 25 bp, Homo sapien
accaccccgccgtgctcaacgggca

SEQ ID NO: 5755247 - DNA, 25 bp, Homo sapien
aaatccaaaaagtgcaaaaaagtgc

SEQ ID NO: 5755248 - DNA, 25 bp, Homo sapien
gctggacggcggcaaagccctgggc

SEQ ID NO: 5755249 - DNA, 25 bp, Homo sapien
aagccctgggcagccaccacaccgc

SEQ ID NO: 5755250 - DNA, 25 bp, Homo sapien
agtccctttcgacttgcatttttgc

SEQ ID NO: 5755251 - DNA, 25 bp, Homo sapien
cttgcatttttgcaggagcagtatc

SEQ ID NO: 5755252 - DNA, 25 bp, Homo sapien
cgcaatctgaccgagcaggtcgtac

SEQ ID NO: 5755253 - DNA, 25 bp, Homo sapien
ggtggagcctcctcgtcgacccacc

SEQ ID NO: 5755254 - DNA, 25 bp, Homo sapien
ccaagcgaaggctgtctgcagccag

SEQ ID NO: 5755255 - DNA, 25 bp, Homo sapien
gttagagccctgctcgatgctcaca

SEQ ID NO: 5755256 - DNA, 25 bp, Homo sapien
ccctaccctggctggacggcggcaa

SEQ ID NO: 5755257 - DNA, 25 bp, Homo sapien
gccggctcggcccggcaggacgaga

SEQ ID NO: 5755258 - DNA, 25 bp, Homo sapien
gcaagtccaggcccaaggcccggtc

SEQ ID NO: 5755259 - DNA, 25 bp, Homo sapien
cgctgccggaggaggtggatgtgct

SEQ ID NO: 5755260 - DNA, 25 bp, Homo sapien
acagccgaggccatggaggtgacgg

SEQ ID NO: 5755261 - DNA, 25 bp, Homo sapien
tgcagccaggagagcagggacgtcc

SEQ ID NO: 5755262 - DNA, 25 bp, Homo sapien
acctggtcccgttttattctgccat

SEQ ID NO: 5755263 - DNA, 25 bp, Homo sapien
acgcgatggatatatgtttttgaag

SEQ ID NO: 5755264 - DNA, 25 bp, Homo sapien
aactaggtctgatattcaaatggac

SEQ ID NO: 5755265 - DNA, 25 bp, Homo sapien
ctccgcctccgagcggctgaggacc

SEQ ID NO: 5755266 - DNA, 25 bp, Homo sapien
ccgaaaaatgtctagcaaatccaaa

SEQ ID NO: 5755267 - DNA, 25 bp, Homo sapien
cagctcgtttaacccggccgccctc

SEQ ID NO: 5755268 - DNA, 25 bp, Homo sapien
agcagggacgtcctgtgcgaactgt

SEQ ID NO: 5755269 - DNA, 25 bp, Homo sapien
cggtcagggccacggtgcagaggta

SEQ ID NO: 5755270 - DNA, 25 bp, Homo sapien
ggaatatgggagaaatagtgtggaa

SEQ ID NO: 5755271 - DNA, 25 bp, Homo sapien
cggcgcagtacccgctgccggagga

SEQ ID NO: 5755272 - DNA, 25 bp, Homo sapien
aagaaggaaggcatccagaccagaa

SEQ ID NO: 5755273 - DNA, 25 bp, Homo sapien
gcggctgaggaccccggtgcagagg

SEQ ID NO: 5755274 - DNA, 25 bp, Homo sapien
tgactatgaagaaggaaggcatcca

SEQ ID NO: 5755275 - DNA, 25 bp, Homo sapien
aacgcctgcgggctctatcacaaaa

SEQ ID NO: 5755276 - DNA, 25 bp, Homo sapien
gtcttccccttcttctctttgctaa

SEQ ID NO: 5755277 - DNA, 25 bp, Homo sapien
aatgaacggacagaaccggcccctc

SEQ ID NO: 5755278 - DNA, 25 bp, Homo sapien
cctgctgggcggctcccccaccggc

SEQ ID NO: 5755279 - DNA, 25 bp, Homo sapien
acctttgcttcccagccttcccatc

SEQ ID NO: 5755280 - DNA, 25 bp, Homo sapien
cccctggaatctcagccccttctcc

SEQ ID NO: 5755281 - DNA, 25 bp, Homo sapien
cggctgtgctcgcgccctctcgccg

SEQ ID NO: 5755282 - DNA, 25 bp, Homo sapien
ccttcttcatagtcaggggtctgtt

SEQ ID NO: 5755283 - DNA, 25 bp, Homo sapien
ataagttatatgcaatgttcagcat

SEQ ID NO: 5755284 - DNA, 25 bp, Homo sapien
ctgcgagccaggctcctctgcaccg

SEQ ID NO: 5755285 - DNA, 25 bp, Homo sapien
aaagcacatccacctcctccggcag

SEQ ID NO: 5755286 - DNA, 25 bp, Homo sapien
acaaaactggcagtttgtccatttg

SEQ ID NO: 5755287 - DNA, 25 bp, Homo sapien
tgcacaggtagtgtcccgtgccatc

SEQ ID NO: 5755288 - DNA, 25 bp, Homo sapien
acgacctgctcggtcagattgcgtt

SEQ ID NO: 5755289 - DNA, 25 bp, Homo sapien
ctgttaatattgtgaagcttgtagt

SEQ ID NO: 5755290 - DNA, 25 bp, Homo sapien
catggcctcggctgtgctcgcgccc

SEQ ID NO: 5755291 - DNA, 25 bp, Homo sapien
tggttggaacacagacaccacagtg

SEQ ID NO: 5755292 - DNA, 25 bp, Homo sapien
ggggaagtcctccagtgagtcatgc

SEQ ID NO: 5755293 - DNA, 25 bp, Homo sapien
gggtcacctgggtagcgaagagcag

SEQ ID NO: 5755294 - DNA, 25 bp, Homo sapien
tggatggacgtcttggagaaggggc

SEQ ID NO: 5755295 - DNA, 25 bp, Homo sapien
ccgtggtggatggacgtcttggaga

SEQ ID NO: 5755296 - DNA, 25 bp, Homo sapien
cggttctgtccgttcattttgtgat

SEQ ID NO: 5755297 - DNA, 25 bp, Homo sapien
tattcacagatggggtccagattca

SEQ ID NO: 5755298 - DNA, 25 bp, Homo sapien
aacccatggcggtgaccatgctgga

SEQ ID NO: 5755299 - DNA, 25 bp, Homo sapien
gggttaaacgagctgttcttgggga

SEQ ID NO: 5755300 - DNA, 25 bp, Homo sapien
tgggtcgacgaggaggctccaccca

SEQ ID NO: 5755301 - DNA, 25 bp, Homo sapien
ctgcaattctgcgagccaggctcct

SEQ ID NO: 5755302 - DNA, 25 bp, Homo sapien
ccagggggaggcggtgtggtggctg

SEQ ID NO: 5755303 - DNA, 25 bp, Homo sapien
actagagaccctgttaaatagggga

SEQ ID NO: 5755304 - DNA, 25 bp, Homo sapien
tctgacagttcgcacaggacgtccc

SEQ ID NO: 5755305 - DNA, 25 bp, Homo sapien
catccacctcctccggcagcgggta

SEQ ID NO: 5755306 - DNA, 25 bp, Homo sapien
ccgagcctggggtggacagcgatgg

SEQ ID NO: 5755307 - DNA, 25 bp, Homo sapien
tgatttgctttcggtggggggatgg

SEQ ID NO: 5755308 - DNA, 25 bp, Homo sapien
ccgggccgagccggccgagcctggg

SEQ ID NO: 5755309 - DNA, 25 bp, Homo sapien
tgaagcagaggcgggcggcacacct

SEQ ID NO: 5755310 - DNA, 25 bp, Homo sapien
gggatccatgaagcagaggcgggcg

SEQ ID NO: 5755311 - DNA, 25 bp, Homo sapien
atggcttattcacagatggggtcca

SEQ ID NO: 5755312 - DNA, 25 bp, Homo sapien
tcatgctgtcgggcaggggcacctg

SEQ ID NO: 5755313 - DNA, 25 bp, Homo sapien
gcgggtactgcgccgcgtccatgta

SEQ ID NO: 5755314 - DNA, 25 bp, Homo sapien
gggagggagggcggtccgcctggga

SEQ ID NO: 5755315 - DNA, 25 bp, Homo sapien
gagacgtccttcggcggggtgggcg

SEQ ID NO: 5755316 - DNA, 25 bp, Homo sapien
tggtggtctgacagttcgcacagga

SEQ ID NO: 5755317 - DNA, 25 bp, Homo sapien
ggcctggacttgcatccgaagccgg

SEQ ID NO: 5755318 - DNA, 25 bp, Homo sapien
gcaaacataattttgctttctgcct

SEQ ID NO: 5755319 - DNA, 25 bp, Homo sapien
atcaaacaactgtggccagtgaaag

SEQ ID NO: 5755320 - DNA, 25 bp, Homo sapien
agctgttcttggggaagtcctccag

SEQ ID NO: 5755321 - DNA, 25 bp, Homo sapien
tggatgccttccttcttcatagtca

SEQ ID NO: 5755322 - DNA, 25 bp, Homo sapien
tgcaccgtggccctgaccgagtttc

SEQ ID NO: 5755323 - DNA, 25 bp, Homo sapien
ctccggcagcgggtactgcgccgcg

SEQ ID NO: 5755324 - DNA, 25 bp, Homo sapien
gagattccagggggaggcggtgtgg

SEQ ID NO: 5755325 - DNA, 25 bp, Homo sapien
gacagggtccccattggcattcctc

SEQ ID NO: 5755326 - DNA, 25 bp, Homo sapien
ggtggtggctcacccagcgcggctg

SEQ ID NO: 5755327 - DNA, 25 bp, Homo sapien
gttgcacaggtagtgtcccgtgcca

SEQ ID NO: 5755328 - DNA, 25 bp, Homo sapien
ggtcgacgaggaggctccacccagg

SEQ ID NO: 5755329 - DNA, 25 bp, Homo sapien
ttcacagatggggtccagattcagt

SEQ ID NO: 5755330 - DNA, 25 bp, Homo sapien
aactgggtatggcagaataaaacgg

SEQ ID NO: 5755331 - DNA, 25 bp, Homo sapien
taatttccacactatttctcccata

SEQ ID NO: 5755332 - DNA, 25 bp, Homo sapien
tccttcatgccttacagctacccag

SEQ ID NO: 5755333 - DNA, 25 bp, Homo sapien
ttgctttcggtggggggatgggaag

SEQ ID NO: 5755334 - DNA, 25 bp, Homo sapien
agacatttttcggtttctggtctgg

SEQ ID NO: 5755335 - DNA, 25 bp, Homo sapien
ctgcaaaaatgcaagtcgaaaggga

SEQ ID NO: 5755336 - DNA, 25 bp, Homo sapien
atgcaagtcgaaagggactgcaggg

SEQ ID NO: 5755337 - DNA, 25 bp, Homo sapien
tgctcggtcagattgcgttgctcgc

SEQ ID NO: 5755338 - DNA, 25 bp, Homo sapien
tcatagtcaggggtctgttaatatt

SEQ ID NO: 5755339 - DNA, 25 bp, Homo sapien
atatcagacctagtttcttcttaat

SEQ ID NO: 5755340 - DNA, 25 bp, Homo sapien
gtccccattggcattcctcctccag

SEQ ID NO: 5755341 - DNA, 25 bp, Homo sapien
tcatgccttacagctacccagatgc

SEQ ID NO: 5755342 - DNA, 25 bp, Homo sapien
gattgcgttgctcgctctgtctcgc

SEQ ID NO: 5755343 - DNA, 25 bp, Homo sapien
gaggcccgggtggtgcgtgtccggg

SEQ ID NO: 5755344 - DNA, 25 bp, Homo sapien
aaacataattttgctttctgccttc

SEQ ID NO: 5755345 - DNA, 25 bp, Homo sapien
cagaataaaacgggaccaggttgta

SEQ ID NO: 5755346 - DNA, 25 bp, Homo sapien
ccacaggcattgcagacagggtccc

SEQ ID NO: 5755347 - DNA, 25 bp, Homo sapien
tgtggccagtgaaaggaaacaaaac

SEQ ID NO: 5755348 - DNA, 25 bp, Homo sapien
tccatgaagcagaggcgggcggcac

SEQ ID NO: 5755349 - DNA, 25 bp, Homo sapien
atggcagaataaaacgggaccaggt

SEQ ID NO: 5755350 - DNA, 25 bp, Homo sapien
tccgaagccggtgggggagccgccc

SEQ ID NO: 5755351 - DNA, 25 bp, Homo sapien
tggccccccgacaaggaggaggacg

SEQ ID NO: 5755352 - DNA, 25 bp, Homo sapien
gaccgggccttgggcctggacttgc

SEQ ID NO: 5755353 - DNA, 25 bp, Homo sapien
cgccgcgtccatgtaggagtggctg

SEQ ID NO: 5755354 - DNA, 25 bp, Homo sapien
gccgggttaaacgagctgttcttgg

SEQ ID NO: 5755355 - DNA, 25 bp, Homo sapien
gttatatgcaatgttcagcattttt

SEQ ID NO: 5755356 - DNA, 25 bp, Homo sapien
gtggtgggtcggagggtacctctgc

SEQ ID NO: 5755357 - DNA, 25 bp, Homo sapien
gagggagggcggtccgcctgggagg

SEQ ID NO: 5755358 - DNA, 25 bp, Homo sapien
gcttgtagtagagcccacaggcatt

SEQ ID NO: 5755359 - DNA, 25 bp, Homo sapien
acagacaccacagtgagctcctttg

SEQ ID NO: 5755360 - DNA, 25 bp, Homo sapien
ttcgcacaggacgtccctgctctcc

SEQ ID NO: 5755361 - DNA, 25 bp, Homo sapien
ctttgcaaagtggcaaacataattt

SEQ ID NO: 5755362 - DNA, 25 bp, Homo sapien
gagtcagaatggcttattcacagat

SEQ ID NO: 5755363 - DNA, 25 bp, Homo sapien
acaccacagtgagctcctttgcaaa

SEQ ID NO: 5755364 - DNA, 25 bp, Homo sapien
ggggtcgaggttgccccacagttca

SEQ ID NO: 5755365 - DNA, 25 bp, Homo sapien
gggagccgcccagcaggctgctggg

SEQ ID NO: 5755366 - DNA, 25 bp, Homo sapien
gggtctgttaatattgtgaagcttg

SEQ ID NO: 5755367 - DNA, 25 bp, Homo sapien
agagtgtggttgtggtggtctgaca

SEQ ID NO: 5755368 - DNA, 25 bp, Homo sapien
cccagcaggctgctgggggggaaga

SEQ ID NO: 5755369 - DNA, 25 bp, Homo sapien
gggggagccgcccagcaggctgctg

SEQ ID NO: 5755370 - DNA, 25 bp, Homo sapien
atataagttatatgcaatgttcagc

SEQ ID NO: 5755371 - DNA, 25 bp, Homo sapien
ctgccttcaaaaacatatatccatc

SEQ ID NO: 5755372 - DNA, 25 bp, Homo sapien
gcaagtcgaaagggactgcagggac

SEQ ID NO: 5755373 - DNA, 25 bp, Homo sapien
gcactagagaccctgttaaataggg

SEQ ID NO: 5755374 - DNA, 25 bp, Homo sapien
cagtgagtcatgcacttttttgcac

SEQ ID NO: 5755375 - DNA, 25 bp, Homo sapien
ctccagagtgtggttgtggtggtct

SEQ ID NO: 5755376 - DNA, 25 bp, Homo sapien
gcggggagggagggcggtccgcctg

SEQ ID NO: 5755377 - DNA, 25 bp, Homo sapien
gagggcggtccgcctgggaggtcgg

SEQ ID NO: 5755378 - DNA, 25 bp, Homo sapien
tgtgagcatcgagcagggctctaac

SEQ ID NO: 5755379 - DNA, 25 bp, Homo sapien
tccgtagtagggcgggacgtggttg

SEQ ID NO: 5755380 - DNA, 25 bp, Homo sapien
tcggtggggggatgggaaggctggg

SEQ ID NO: 5755381 - DNA, 25 bp, Homo sapien
cgcacaggacgtccctgctctcctg

SEQ ID NO: 5755382 - DNA, 25 bp, Homo sapien
actttttggatttgctagacatttt

SEQ ID NO: 5755383 - DNA, 25 bp, Homo sapien
tccaaaaactgggtatggcagaata

SEQ ID NO: 5755384 - DNA, 25 bp, Homo sapien
ttttttcacagcactagagaccctg

SEQ ID NO: 5755385 - DNA, 25 bp, Homo sapien
cttgggcctggacttgcatccgaag

SEQ ID NO: 5755386 - DNA, 25 bp, Homo sapien
tttcggtggggggatgggaaggctg

SEQ ID NO: 5755387 - DNA, 25 bp, Homo sapien
gtggtgggtcgacgaggaggctcca

SEQ ID NO: 5755388 - DNA, 25 bp, Homo sapien
agtcaggggtctgttaatattgtga

SEQ ID NO: 5755389 - DNA, 25 bp, Homo sapien
ggcggggtggtggtggctcacccag

SEQ ID NO: 5755390 - DNA, 25 bp, Homo sapien
tcttggcatccttcatgccttacag

SEQ ID NO: 5755391 - DNA, 25 bp, Homo sapien
tcgttgaatgatttgctttcggtgg

SEQ ID NO: 5755392 - DNA, 25 bp, Homo sapien
gtgatagagcccgcaggcgttgcac

SEQ ID NO: 5755393 - DNA, 25 bp, Homo sapien
atttgctttcggtggggggatggga

SEQ ID NO: 5755394 - DNA, 25 bp, Homo sapien
tccgttcattttgtgatagagcccg

SEQ ID NO: 5755395 - DNA, 25 bp, Homo sapien
gaggaggacgaggccggggggtaga

SEQ ID NO: 5755396 - DNA, 25 bp, Homo sapien
cagagaggaggaggaggcggcggcg

SEQ ID NO: 5755397 - DNA, 25 bp, Homo sapien
agccgtggtggatggacgtcttgga

SEQ ID NO: 5755398 - DNA, 25 bp, Homo sapien
gcaattctgcgagccaggctcctct

SEQ ID NO: 5755399 - DNA, 25 bp, Homo sapien
gccacgggagtgggacgactccagc

SEQ ID NO: 5755400 - DNA, 25 bp, Homo sapien
ggcttattcacagatggggtccaga

SEQ ID NO: 5755401 - DNA, 25 bp, Homo sapien
ggtacctctgcaccgtggccctgac

SEQ ID NO: 5755402 - DNA, 25 bp, Homo sapien
gccgagccggccgagcctggggtgg

SEQ ID NO: 5755403 - DNA, 25 bp, Homo sapien
tgtggctcagggaggacatgtgtct

SEQ ID NO: 5755404 - DNA, 25 bp, Homo sapien
gcccgcaggcgttgcacaggtagtg

SEQ ID NO: 5755405 - DNA, 25 bp, Homo sapien
tgaagaggtgcgggctggcgtggcc

SEQ ID NO: 5755406 - DNA, 25 bp, Homo sapien
acctggtacttgaggcactctttct

SEQ ID NO: 5755407 - DNA, 25 bp, Homo sapien
tttctcccatattccttaaacttct

SEQ ID NO: 5755408 - DNA, 25 bp, Homo sapien
cctgggtagcgaagagcagagagga

SEQ ID NO: 5755409 - DNA, 25 bp, Homo sapien
atatatccatcgcgtttaggcttca

SEQ ID NO: 5755410 - DNA, 25 bp, Homo sapien
gttcttggggaagtcctccagtgag

SEQ ID NO: 5755411 - DNA, 25 bp, Homo sapien
gctgtgctcgcgccctctcgccggg

SEQ ID NO: 5755412 - DNA, 25 bp, Homo sapien
cacagatggggtccagattcagtgg

SEQ ID NO: 5755413 - DNA, 25 bp, Homo sapien
tgacagttcgcacaggacgtccctg

SEQ ID NO: 5755414 - DNA, 25 bp, Homo sapien
gagaagaaggggaagacaaaaatcc

SEQ ID NO: 5755415 - DNA, 25 bp, Homo sapien
ggacgtccctgctctcctggctgca

SEQ ID NO: 5755416 - DNA, 25 bp, Homo sapien
cagatgcaataaagtcattgtacag

SEQ ID NO: 5755417 - DNA, 25 bp, Homo sapien
aggggtctgttaatattgtgaagct

SEQ ID NO: 5755418 - DNA, 25 bp, Homo sapien
cttattcacagatggggtccagatt

SEQ ID NO: 5755419 - DNA, 25 bp, Homo sapien
ggccgagcctggggtggacagcgat

SEQ ID NO: 5755420 - DNA, 25 bp, Homo sapien
gggccggttctgtccgttcattttg

SEQ ID NO: 5755421 - DNA, 25 bp, Homo sapien
gtccgggtgctgcccgttgagcacg

SEQ ID NO: 5755422 - DNA, 25 bp, Homo sapien
atgaggggccggttctgtccgttca

SEQ ID NO: 5755423 - DNA, 25 bp, Homo sapien
ccccggggagccgtggtggatggac

SEQ ID NO: 5755424 - DNA, 25 bp, Homo sapien
gtagggcgggacgtggttgccttga

SEQ ID NO: 5755425 - DNA, 25 bp, Homo sapien
gagggtcgggggtcgttgaatgatt

SEQ ID NO: 5755426 - DNA, 25 bp, Homo sapien
gcgcggggagggagggcggtccgcc

SEQ ID NO: 5755427 - DNA, 25 bp, Homo sapien
tgggtagcgaagagcagagaggagg

SEQ ID NO: 5755428 - DNA, 25 bp, Homo sapien
taaacttcttggcatccttcatgcc

SEQ ID NO: 5755429 - DNA, 25 bp, Homo sapien
tttaggcttcatgatactgctcctg

SEQ ID NO: 5755430 - DNA, 25 bp, Homo sapien
gagcccgcaggcgttgcacaggtag

SEQ ID NO: 5755431 - DNA, 25 bp, Homo sapien
ggctcacccagcgcggctggtccgc

SEQ ID NO: 5755432 - DNA, 25 bp, Homo sapien
aaggggcgacgactctgcaattctg

SEQ ID NO: 5755433 - DNA, 25 bp, Homo sapien
ggtagggatccatgaagcagaggcg

SEQ ID NO: 5755434 - DNA, 25 bp, Homo sapien
tggatttgctagacatttttcggtt

SEQ ID NO: 5755435 - DNA, 25 bp, Homo sapien
aggagtggctgaggcccgggtggtg

SEQ ID NO: 5755436 - DNA, 25 bp, Homo sapien
tgggtcggagggtacctctgcaccg

SEQ ID NO: 5755437 - DNA, 25 bp, Homo sapien
tggtgatggggtggtgggtcgacga

SEQ ID NO: 5755438 - DNA, 25 bp, Homo sapien
ggagccgtggtggatggacgtcttg

SEQ ID NO: 5755439 - DNA, 25 bp, Homo sapien
caggacgtccctgctctcctggctg

SEQ ID NO: 5755440 - DNA, 25 bp, Homo sapien
ttgtagtagagcccacaggcattgc

SEQ ID NO: 5755441 - DNA, 25 bp, Homo sapien
gatgccttccttcttcatagtcagg

SEQ ID NO: 5755442 - DNA, 25 bp, Homo sapien
cgggagtgggacgactccagcttca

SEQ ID NO: 5755443 - DNA, 25 bp, Homo sapien
caaacaactgtggccagtgaaagga

SEQ ID NO: 5755444 - DNA, 25 bp, Homo sapien
ggacgtggttgccttgaccgtcgat

SEQ ID NO: 5755445 - DNA, 25 bp, Homo sapien
gcgagatgtggctcagggaggacat

SEQ ID NO: 5755446 - DNA, 25 bp, Homo sapien
gcgaagagcagagaggaggaggagg

SEQ ID NO: 5755447 - DNA, 25 bp, Homo sapien
ccggcagcgggtactgcgccgcgtc

SEQ ID NO: 5755448 - DNA, 25 bp, Homo sapien
cgagccggccgagcctggggtggac

SEQ ID NO: 5755449 - DNA, 25 bp, Homo sapien
tgctgccacgggagtgggacgactc

SEQ ID NO: 5755450 - DNA, 25 bp, Homo sapien
aagcttgtagtagagcccacaggca

SEQ ID NO: 5755451 - DNA, 25 bp, Homo sapien
tcgtcctgccgggccgagccggccg

SEQ ID NO: 5755452 - DNA, 25 bp, Homo sapien
gaggtgcgggctggcgtggcccccc

SEQ ID NO: 5755453 - DNA, 25 bp, Homo sapien
cgacgactctgcaattctgcgagcc

SEQ ID NO: 5755454 - DNA, 25 bp, Homo sapien
ggtgcgggctggcgtggccccccga

SEQ ID NO: 5755455 - DNA, 25 bp, Homo sapien
tctggatgccttccttcttcatagt

SEQ ID NO: 5755456 - DNA, 25 bp, Homo sapien
atatccatcgcgtttaggcttcatg

SEQ ID NO: 5755457 - DNA, 25 bp, Homo sapien
ggagtgggacgactccagcttcatg

SEQ ID NO: 5755458 - DNA, 25 bp, Homo sapien
cttcatgctgtcgggcaggggcacc

SEQ ID NO: 5755459 - DNA, 25 bp, Homo sapien
ggtggtgcgtgtccgggtgctgccc

SEQ ID NO: 5755460 - DNA, 25 bp, Homo sapien
gtggttgccttgaccgtcgatgtta

SEQ ID NO: 5755461 - DNA, 25 bp, Homo sapien
gcacgtagggcgggtaggtggtgat

SEQ ID NO: 5755462 - DNA, 25 bp, Homo sapien
gcgtccatgtaggagtggctgaggc

SEQ ID NO: 5755463 - DNA, 25 bp, Homo sapien
ggcgtggccccccgacaaggaggag

SEQ ID NO: 5755464 - DNA, 25 bp, Homo sapien
gtcctgccgggccgagccggccgag

SEQ ID NO: 5755465 - DNA, 25 bp, Homo sapien
aagggcgagatgtggctcagggagg

SEQ ID NO: 5755466 - DNA, 25 bp, Homo sapien
aagccggtgggggagccgcccagca

SEQ ID NO: 5755467 - DNA, 25 bp, Homo sapien
cgtggtcagcatgtggctggagtgg

SEQ ID NO: 5755468 - DNA, 25 bp, Homo sapien
cctctgcaccgtggccctgaccgag

SEQ ID NO: 5755469 - DNA, 25 bp, Homo sapien
tgggcgggaaggtgaagaggtgcgg

SEQ ID NO: 5755470 - DNA, 25 bp, Homo sapien
acgtagggcgggtaggtggtgatgg

SEQ ID NO: 5755471 - DNA, 25 bp, Homo sapien
cttgggcttaatgaggggccggttc

SEQ ID NO: 5755472 - DNA, 25 bp, Homo sapien
gctcctttgcaaagtggcaaacata

SEQ ID NO: 5755473 - DNA, 25 bp, Homo sapien
cactccctgcctgtgctggaccggg

SEQ ID NO: 5755474 - DNA, 25 bp, Homo sapien
gatgttaaaaagcacatccacctcc

SEQ ID NO: 5755475 - DNA, 25 bp, Homo sapien
ctggcagtttgtccatttgaatatc

SEQ ID NO: 5755476 - DNA, 25 bp, Homo sapien
gtcgggggtcgttgaatgatttgct

SEQ ID NO: 5755477 - DNA, 25 bp, Homo sapien
cgcttgggcttaatgaggggccggt

SEQ ID NO: 5755478 - DNA, 25 bp, Homo sapien
gtccagattcagtggttggaacaca

SEQ ID NO: 5755479 - DNA, 25 bp, Homo sapien
ctgggaagcaaaggtgagcaaagga

SEQ ID NO: 5755480 - DNA, 25 bp, Homo sapien
tgaatgatttgctttcggtgggggg

SEQ ID NO: 5755481 - DNA, 25 bp, Homo sapien
gctcagggaggacatgtgtctggag

SEQ ID NO: 5755482 - DNA, 25 bp, Homo sapien
gttaatattgtgaagcttgtagtag

SEQ ID NO: 5755483 - DNA, 25 bp, Homo sapien
ctggaggggtggtgtggtccaaagg

SEQ ID NO: 5755484 - DNA, 25 bp, Homo sapien
aagcagaggcgggcggcacacctgg

SEQ ID NO: 5755485 - DNA, 25 bp, Homo sapien
gtggtggtggctcacccagcgcggc

SEQ ID NO: 5755486 - DNA, 25 bp, Homo sapien
ggtccgccgtcacctccatggcctc

SEQ ID NO: 5755487 - DNA, 25 bp, Homo sapien
catccgaagccggtgggggagccgc

SEQ ID NO: 5755488 - DNA, 25 bp, Homo sapien
gggtggtgggtcgacgaggaggctc

SEQ ID NO: 5755489 - DNA, 25 bp, Homo sapien
agttcacacactccctgcctgtgct

SEQ ID NO: 5755490 - DNA, 25 bp, Homo sapien
cccagcgcggctggtccgccgtcac

SEQ ID NO: 5755491 - DNA, 25 bp, Homo sapien
tgtggttgtggtggtctgacagttc

SEQ ID NO: 5755492 - DNA, 25 bp, Homo sapien
acgtccctgctctcctggctgcaga

SEQ ID NO: 5755493 - DNA, 25 bp, Homo sapien
gtccctcctcgggtcacctgggtag

SEQ ID NO: 5755494 - DNA, 25 bp, Homo sapien
gggtcgggggtcgttgaatgatttg

SEQ ID NO: 5755495 - DNA, 25 bp, Homo sapien
ccggggtcctcagccgctcggaggc

SEQ ID NO: 5755496 - DNA, 25 bp, Homo sapien
ggagggtacctctgcaccgtggccc

SEQ ID NO: 5755497 - DNA, 25 bp, Homo sapien
tcggagggtacctctgcaccgtggc

SEQ ID NO: 5755498 - DNA, 25 bp, Homo sapien
ggctgggaagcaaaggtgagcaaag

SEQ ID NO: 5755499 - DNA, 25 bp, Homo sapien
ttgcaaagtggcaaacataattttg

SEQ ID NO: 5755500 - DNA, 25 bp, Homo sapien
ctggcgtggccccccgacaaggagg

SEQ ID NO: 5755501 - DNA, 25 bp, Homo sapien
ctgggtatggcagaataaaacggga

SEQ ID NO: 5755502 - DNA, 25 bp, Homo sapien
ccgtcacctccatggcctcggctgt

SEQ ID NO: 5755503 - DNA, 25 bp, Homo sapien
cttgaggcactctttctcgtcctgc

SEQ ID NO: 5755504 - DNA, 25 bp, Homo sapien
tttaatgcatcaaacaactgtggcc

SEQ ID NO: 5755505 - DNA, 25 bp, Homo sapien
attgcagacagggtccccattggca

SEQ ID NO: 5755506 - DNA, 25 bp, Homo sapien
gcgagccaggctcctctgcaccggg

SEQ ID NO: 5755507 - DNA, 25 bp, Homo sapien
ctgggggccctgtgagcatcgagca

SEQ ID NO: 5755508 - DNA, 25 bp, Homo sapien
ttctggtctggatgccttccttctt

SEQ ID NO: 5755509 - DNA, 25 bp, Homo sapien
tgtcgggcaggggcacctggtactt

SEQ ID NO: 5755510 - DNA, 25 bp, Homo sapien
ttagcaaagagaagaaggggaagac

SEQ ID NO: 5755511 - DNA, 25 bp, Homo sapien
tacccagatgcaataaagtcattgt

SEQ ID NO: 5755512 - DNA, 25 bp, Homo sapien
gcattgcagacagggtccccattgg

SEQ ID NO: 5755513 - DNA, 25 bp, Homo sapien
aatgatttgctttcggtggggggat

SEQ ID NO: 5755514 - DNA, 25 bp, Homo sapien
gccctgaccgagtttccgtagtagg

SEQ ID NO: 5755515 - DNA, 25 bp, Homo sapien
gatttgctagacatttttcggtttc

SEQ ID NO: 5755516 - DNA, 25 bp, Homo sapien
gctgctgggggggaagagtccggag

SEQ ID NO: 5755517 - DNA, 25 bp, Homo sapien
ttggcatccttcatgccttacagct

SEQ ID NO: 5755518 - DNA, 25 bp, Homo sapien
gtgagtcatgcacttttttgcactt

SEQ ID NO: 5755519 - DNA, 25 bp, Homo sapien
ggtcggagggtacctctgcaccgtg

SEQ ID NO: 5755520 - DNA, 25 bp, Homo sapien
gaagagcagagaggaggaggaggcg

SEQ ID NO: 5755521 - DNA, 25 bp, Homo sapien
cgggaaggtgaagaggtgcgggctg

SEQ ID NO: 5755522 - DNA, 25 bp, Homo sapien
atcttggaggggtcgtttagcaaag

SEQ ID NO: 5755523 - DNA, 25 bp, Homo sapien
ttgccccacagttcacacactccct

SEQ ID NO: 5755524 - DNA, 25 bp, Homo sapien
tgcaataaagtcattgtacagtatt

SEQ ID NO: 5755525 - DNA, 25 bp, Homo sapien
ggctgagattccagggggaggcggt

SEQ ID NO: 5755526 - DNA, 25 bp, Homo sapien
gggatgggaaggctgggaagcaaag

SEQ ID NO: 5755527 - DNA, 25 bp, Homo sapien
cctgccgggccgagccggccgagcc

SEQ ID NO: 5755528 - DNA, 25 bp, Homo sapien
gcaggctgctgggggggaagagtcc

SEQ ID NO: 5755529 - DNA, 25 bp, Homo sapien
acgtggttgccttgaccgtcgatgt

SEQ ID NO: 5755530 - DNA, 25 bp, Homo sapien
gtgctgcccgttgagcacggcgggg

SEQ ID NO: 5755531 - DNA, 25 bp, Homo sapien
cggtttctggtctggatgccttcct

SEQ ID NO: 5755532 - DNA, 25 bp, Homo sapien
tgctagacatttttcggtttctggt

SEQ ID NO: 5755533 - DNA, 25 bp, Homo sapien
agcatcgagcagggctctaacccat

SEQ ID NO: 5755534 - DNA, 25 bp, Homo sapien
agtgggacgactccagcttcatgct

SEQ ID NO: 5755535 - DNA, 25 bp, Homo sapien
ggctgcagacagccttcgcttgggc

SEQ ID NO: 5755536 - DNA, 25 bp, Homo sapien
gctggaccgggccttgggcctggac

SEQ ID NO: 5755537 - DNA, 25 bp, Homo sapien
tgctttctgccttcaaaaacatata

SEQ ID NO: 5755538 - DNA, 25 bp, Homo sapien
cgggacgtggttgccttgaccgtcg

SEQ ID NO: 5755539 - DNA, 25 bp, Homo sapien
ggaggcggtgtggtggctgcccagg

SEQ ID NO: 5755540 - DNA, 25 bp, Homo sapien
tgggcctggacttgcatccgaagcc

SEQ ID NO: 5755541 - DNA, 25 bp, Homo sapien
gatagagcccgcaggcgttgcacag

SEQ ID NO: 5755542 - DNA, 25 bp, Homo sapien
gagcagggctctaacccatggcggt

SEQ ID NO: 5755543 - DNA, 25 bp, Homo sapien
gctacccagatgcaataaagtcatt

SEQ ID NO: 5755544 - DNA, 25 bp, Homo sapien
gccgctcggaggcggagtccctcct

SEQ ID NO: 5755545 - DNA, 25 bp, Homo sapien
ctggatggcgggtgcatcggcgtgg

SEQ ID NO: 5755546 - DNA, 25 bp, Homo sapien
ttcacagcactagagaccctgttaa

SEQ ID NO: 5755547 - DNA, 25 bp, Homo sapien
ccgggccttgggcctggacttgcat

SEQ ID NO: 5755548 - DNA, 25 bp, Homo sapien
gccaggctcctctgcaccggggtcc

SEQ ID NO: 5755549 - DNA, 25 bp, Homo sapien
ctggagtggctgaagggcgagatgt

SEQ ID NO: 5755550 - DNA, 25 bp, Homo sapien
agacaccacagtgagctcctttgca

SEQ ID NO: 5755551 - DNA, 25 bp, Homo sapien
gcccagggctttgccgccgtccagc

SEQ ID NO: 5755552 - DNA, 25 bp, Homo sapien
cacagtgagctcctttgcaaagtgg

SEQ ID NO: 5755553 - DNA, 25 bp, Homo sapien
ctcggtcagattgcgttgctcgctc

SEQ ID NO: 5755554 - DNA, 25 bp, Homo sapien
tgaccatgctggaggggtggtgtgg

SEQ ID NO: 5755555 - DNA, 25 bp, Homo sapien
gggtggtgtggtccaaaggacaggc

SEQ ID NO: 5755556 - DNA, 25 bp, Homo sapien
tccagtgagtcatgcacttttttgc

SEQ ID NO: 5755557 - DNA, 25 bp, Homo sapien
ctggtctggatgccttccttcttca

SEQ ID NO: 5755558 - DNA, 25 bp, Homo sapien
agcacatccacctcctccggcagcg

SEQ ID NO: 5755559 - DNA, 25 bp, Homo sapien
gaatatcagacctagtttcttctta

SEQ ID NO: 5755560 - DNA, 25 bp, Homo sapien
gtccaaaggacaggctggatggcgg

SEQ ID NO: 5755561 - DNA, 25 bp, Homo sapien
ggttgccttgaccgtcgatgttaaa

SEQ ID NO: 5755562 - DNA, 25 bp, Homo sapien
cgtgggcgtggtcagcatgtggctg

SEQ ID NO: 5755563 - DNA, 25 bp, Homo sapien
aaggctgggaagcaaaggtgagcaa

SEQ ID NO: 5755564 - DNA, 25 bp, Homo sapien
gtttcttcttaatttccacactatt

SEQ ID NO: 5755565 - DNA, 25 bp, Homo sapien
tagacggagaggggccccggggagc

SEQ ID NO: 5755566 - DNA, 25 bp, Homo sapien
tagcgaagagcagagaggaggagga

SEQ ID NO: 5755567 - DNA, 25 bp, Homo sapien
ggcgggtgcatcggcgtgggcgtgg

SEQ ID NO: 5755568 - DNA, 25 bp, Homo sapien
gggcggcacacctggctcccgtggt

SEQ ID NO: 5755569 - DNA, 25 bp, Homo sapien
tcgatgttaaaaagcacatccacct

SEQ ID NO: 5755570 - DNA, 25 bp, Homo sapien
ctggtacttgaggcactctttctcg

SEQ ID NO: 5755571 - DNA, 25 bp, Homo sapien
tgttaaaaagcacatccacctcctc

SEQ ID NO: 5755572 - DNA, 25 bp, Homo sapien
tgccatctcgccgccacagtggggt

SEQ ID NO: 5755573 - DNA, 25 bp, Homo sapien
cacgggagtgggacgactccagctt

SEQ ID NO: 5755574 - DNA, 25 bp, Homo sapien
gcctgggaggtcggggggctcctgc

SEQ ID NO: 5755575 - DNA, 25 bp, Homo sapien
atttccacactatttctcccatatt

SEQ ID NO: 5755576 - DNA, 25 bp, Homo sapien
ctggtccgccgtcacctccatggcc

SEQ ID NO: 5755577 - DNA, 25 bp, Homo sapien
ggcgacgactctgcaattctgcgag

SEQ ID NO: 5755578 - DNA, 25 bp, Homo sapien
cacctgggtagcgaagagcagagag

SEQ ID NO: 5755579 - DNA, 25 bp, Homo sapien
gggccctgtgagcatcgagcagggc

SEQ ID NO: 5755580 - DNA, 25 bp, Homo sapien
ggccccggggagccgtggtggatgg

SEQ ID NO: 5755581 - DNA, 25 bp, Homo sapien
cctcctccggcagcgggtactgcgc

SEQ ID NO: 5755582 - DNA, 25 bp, Homo sapien
tactcgggcacgtagggcgggtagg

SEQ ID NO: 5755583 - DNA, 25 bp, Homo sapien
gtacagtatttcttacaatataagt

SEQ ID NO: 5755584 - DNA, 25 bp, Homo sapien
acgactctgcaattctgcgagccag

SEQ ID NO: 5755585 - DNA, 25 bp, Homo sapien
tggacgtcttggagaaggggctgag

SEQ ID NO: 5755586 - DNA, 25 bp, Homo sapien
gtgatggggtggtgggtcgacgagg

SEQ ID NO: 5755587 - DNA, 25 bp, Homo sapien
cacctccatggcctcggctgtgctc

SEQ ID NO: 5755588 - DNA, 25 bp, Homo sapien
aaaactggcagtttgtccatttgaa

SEQ ID NO: 5755589 - DNA, 25 bp, Homo sapien
tagagcccacaggcattgcagacag

SEQ ID NO: 5755590 - DNA, 25 bp, Homo sapien
ctgggaggtcggggggctcctgccg

SEQ ID NO: 5755591 - DNA, 25 bp, Homo sapien
tggtggctgcccagggctttgccgc

SEQ ID NO: 5755592 - DNA, 25 bp, Homo sapien
aggcattgcagacagggtccccatt

SEQ ID NO: 5755593 - DNA, 25 bp, Homo sapien
ggaggaggaggcggcggcgtacgac

SEQ ID NO: 5755594 - DNA, 25 bp, Homo sapien
ttatcttggaggggtcgtttagcaa

SEQ ID NO: 5755595 - DNA, 25 bp, Homo sapien
ggtgaagaggtgcgggctggcgtgg

SEQ ID NO: 5755596 - DNA, 25 bp, Homo sapien
ggtgggcgggaaggtgaagaggtgc

SEQ ID NO: 5755597 - DNA, 25 bp, Homo sapien
caggtagtgtcccgtgccatctcgc

SEQ ID NO: 5755598 - DNA, 25 bp, Homo sapien
ggtgggtcggagggtacctctgcac

SEQ ID NO: 5755599 - DNA, 25 bp, Homo sapien
ttccttcttcatagtcaggggtctg

SEQ ID NO: 5755600 - DNA, 25 bp, Homo sapien
gtggtggatggacgtcttggagaag

SEQ ID NO: 5755601 - DNA, 25 bp, Homo sapien
tacctctgcaccgtggccctgaccg

SEQ ID NO: 5755602 - DNA, 25 bp, Homo sapien
tggtccaaaggacaggctggatggc

SEQ ID NO: 5755603 - DNA, 25 bp, Homo sapien
ggctctaacccatggcggtgaccat

SEQ ID NO: 5755604 - DNA, 25 bp, Homo sapien
aaaaggggcgacgactctgcaattc

SEQ ID NO: 5755605 - DNA, 25 bp, Homo sapien
cttacaatataagttatatgcaatg

SEQ ID NO: 5755606 - DNA, 25 bp, Homo sapien
ctccagcttcatgctgtcgggcagg

SEQ ID NO: 5755607 - DNA, 25 bp, Homo sapien
ccggggagccgtggtggatggacgt

SEQ ID NO: 5755608 - DNA, 25 bp, Homo sapien
cagcgatgggtccggggagacgtcc

SEQ ID NO: 5755609 - DNA, 25 bp, Homo sapien
cagaatggcttattcacagatgggg

SEQ ID NO: 5755610 - DNA, 25 bp, Homo sapien
gagccaggctcctctgcaccggggt

SEQ ID NO: 5755611 - DNA, 25 bp, Homo sapien
gagaggaggaggaggcggcggcgta

SEQ ID NO: 5755612 - DNA, 25 bp, Homo sapien
ttttttgcactttttggatttgcta

SEQ ID NO: 5755613 - DNA, 25 bp, Homo sapien
ggggtggacagcgatgggtccgggg

SEQ ID NO: 5755614 - DNA, 25 bp, Homo sapien
tgtgaagcttgtagtagagcccaca

SEQ ID NO: 5755615 - DNA, 25 bp, Homo sapien
gggccgagccggccgagcctggggt

SEQ ID NO: 5755616 - DNA, 25 bp, Homo sapien
ggctcctctgcaccggggtcctcag

SEQ ID NO: 5755617 - DNA, 25 bp, Homo sapien
aactggcagtttgtccatttgaata

SEQ ID NO: 5755618 - DNA, 25 bp, Homo sapien
tggcaaacataattttgctttctgc

SEQ ID NO: 5755619 - DNA, 25 bp, Homo sapien
tctggagagggcggccgggttaaac

SEQ ID NO: 5755620 - DNA, 25 bp, Homo sapien
tcgtttagcaaagagaagaagggga

SEQ ID NO: 5755621 - DNA, 25 bp, Homo sapien
ttttgcactttttggatttgctaga

SEQ ID NO: 5755622 - DNA, 25 bp, Homo sapien
gacaggctggatggcgggtgcatcg

SEQ ID NO: 5755623 - DNA, 25 bp, Homo sapien
cagtggggtcgaggttgccccacag

SEQ ID NO: 5755624 - DNA, 25 bp, Homo sapien
cggagctgtactcgggcacgtaggg

SEQ ID NO: 5755625 - DNA, 25 bp, Homo sapien
gcatcaaacaactgtggccagtgaa

SEQ ID NO: 5755626 - DNA, 25 bp, Homo sapien
ggggagccgtggtggatggacgtct

SEQ ID NO: 5755627 - DNA, 25 bp, Homo sapien
tttgctttctgccttcaaaaacata

SEQ ID NO: 5755628 - DNA, 25 bp, Homo sapien
tactgctcctgcaaaaatgcaagtc

SEQ ID NO: 5755629 - DNA, 25 bp, Homo sapien
ggcgtggtcagcatgtggctggagt

SEQ ID NO: 5755630 - DNA, 25 bp, Homo sapien
cccattggcattcctcctccagagt

SEQ ID NO: 5755631 - DNA, 25 bp, Homo sapien
tgcccgttgagcacggcggggtggt

SEQ ID NO: 5755632 - DNA, 25 bp, Homo sapien
atattccttaaacttcttggcatcc

SEQ ID NO: 5755633 - DNA, 25 bp, Homo sapien
ggctggcgtggccccccgacaagga

SEQ ID NO: 5755634 - DNA, 25 bp, Homo sapien
tggcctcggctgtgctcgcgccctc

SEQ ID NO: 5755635 - DNA, 25 bp, Homo sapien
tgtgctcgcgccctctcgccgggcc

SEQ ID NO: 5755636 - DNA, 25 bp, Homo sapien
ccacagttcacacactccctgcctg

SEQ ID NO: 5755637 - DNA, 25 bp, Homo sapien
actgtggccagtgaaaggaaacaaa

SEQ ID NO: 5755638 - DNA, 25 bp, Homo sapien
gagtggctgaggcccgggtggtgcg

SEQ ID NO: 5755639 - DNA, 25 bp, Homo sapien
gtctgttaatattgtgaagcttgta

SEQ ID NO: 5755640 - DNA, 25 bp, Homo sapien
cgtggccctgaccgagtttccgtag

SEQ ID NO: 5755641 - DNA, 25 bp, Homo sapien
cgggtgcatcggcgtgggcgtggtc

SEQ ID NO: 5755642 - DNA, 25 bp, Homo sapien
atagtcaggggtctgttaatattgt

SEQ ID NO: 5755643 - DNA, 25 bp, Homo sapien
cgggctggcgtggccccccgacaag

SEQ ID NO: 5755644 - DNA, 25 bp, Homo sapien
aggcgttgcacaggtagtgtcccgt

SEQ ID NO: 5755645 - DNA, 25 bp, Homo sapien
gaggcggagtccctcctcgggtcac

SEQ ID NO: 5755646 - DNA, 25 bp, Homo sapien
gccccccgacaaggaggaggacgag

SEQ ID NO: 5755647 - DNA, 25 bp, Homo sapien
tgggcttaatgaggggccggttctg

SEQ ID NO: 5755648 - DNA, 25 bp, Homo sapien
gtggctggagtggctgaagggcgag

SEQ ID NO: 5755649 - DNA, 25 bp, Homo sapien
gaggaggcggcggcgtacgacctgc

SEQ ID NO: 5755650 - DNA, 25 bp, Homo sapien
ggcgggtaggtggtgatggggtggt

SEQ ID NO: 5755651 - DNA, 25 bp, Homo sapien
gagagggcggccgggttaaacgagc

SEQ ID NO: 5755652 - DNA, 25 bp, Homo sapien
ggtacttgaggcactctttctcgtc

SEQ ID NO: 5755653 - DNA, 25 bp, Homo sapien
taaacgagctgttcttggggaagtc

SEQ ID NO: 5755654 - DNA, 25 bp, Homo sapien
tagagcccgcaggcgttgcacaggt

SEQ ID NO: 5755655 - DNA, 25 bp, Homo sapien
gtgaaaggaaacaaaactggcagtt

SEQ ID NO: 5755656 - DNA, 25 bp, Homo sapien
cttggaggggtcgtttagcaaagag

SEQ ID NO: 5755657 - DNA, 25 bp, Homo sapien
tggagagggcggccgggttaaacga

SEQ ID NO: 5755658 - DNA, 25 bp, Homo sapien
tgtggtggtctgacagttcgcacag

SEQ ID NO: 5755659 - DNA, 25 bp, Homo sapien
tgctcgcgccctctcgccgggcccg

SEQ ID NO: 5755660 - DNA, 25 bp, Homo sapien
aggacaggctggatggcgggtgcat

SEQ ID NO: 5755661 - DNA, 25 bp, Homo sapien
ggcggagtccctcctcgggtcacct

SEQ ID NO: 5755662 - DNA, 25 bp, Homo sapien
caaagagaagaaggggaagacaaaa

SEQ ID NO: 5755663 - DNA, 25 bp, Homo sapien
tgggtccggggagacgtccttcggc

SEQ ID NO: 5755664 - DNA, 25 bp, Homo sapien
gtcccgtgccatctcgccgccacag

SEQ ID NO: 5755665 - DNA, 25 bp, Homo sapien
ttcattttgtgatagagcccgcagg

SEQ ID NO: 5755666 - DNA, 25 bp, Homo sapien
ttggagaaggggctgagattccagg

SEQ ID NO: 5755667 - DNA, 25 bp, Homo sapien
gctctcctggctgcagacagccttc

SEQ ID NO: 5755668 - DNA, 25 bp, Homo sapien
ctccctgcctgtgctggaccgggcc

SEQ ID NO: 5755669 - DNA, 25 bp, Homo sapien
cacactccctgcctgtgctggaccg

SEQ ID NO: 5755670 - DNA, 25 bp, Homo sapien
ggggctgagattccagggggaggcg

SEQ ID NO: 5755671 - DNA, 25 bp, Homo sapien
acagttcacacactccctgcctgtg

SEQ ID NO: 5755672 - DNA, 25 bp, Homo sapien
ggagtggctgaagggcgagatgtgg

SEQ ID NO: 5755673 - DNA, 25 bp, Homo sapien
ccagattcagtggttggaacacaga

SEQ ID NO: 5755674 - DNA, 25 bp, Homo sapien
tgaccgtcgatgttaaaaagcacat

SEQ ID NO: 5755675 - DNA, 25 bp, Homo sapien
gggagggcggtccgcctgggaggtc

SEQ ID NO: 5755676 - DNA, 25 bp, Homo sapien
agtggttggaacacagacaccacag

SEQ ID NO: 5755677 - DNA, 25 bp, Homo sapien
gccttacagctacccagatgcaata

SEQ ID NO: 5755678 - DNA, 25 bp, Homo sapien
agggcgggacgtggttgccttgacc

SEQ ID NO: 5755679 - DNA, 25 bp, Homo sapien
ctttgccgccgtccagccagggtag

SEQ ID NO: 5755680 - DNA, 25 bp, Homo sapien
gcctggggtggacagcgatgggtcc

SEQ ID NO: 5755681 - DNA, 25 bp, Homo sapien
ttttcttttaatgcatcaaacaact

SEQ ID NO: 5755682 - DNA, 25 bp, Homo sapien
gagggcggccgggttaaacgagctg

SEQ ID NO: 5755683 - DNA, 25 bp, Homo sapien
taatgcatcaaacaactgtggccag

SEQ ID NO: 5755684 - DNA, 25 bp, Homo sapien
acgactccagcttcatgctgtcggg

SEQ ID NO: 5755685 - DNA, 25 bp, Homo sapien
ggtgaccatgctggaggggtggtgt

SEQ ID NO: 5755686 - DNA, 25 bp, Homo sapien
gtgcgtgtccgggtgctgcccgttg

SEQ ID NO: 5755687 - DNA, 25 bp, Homo sapien
gctgtactcgggcacgtagggcggg

SEQ ID NO: 5755688 - DNA, 25 bp, Homo sapien
tgcatccgaagccggtgggggagcc

SEQ ID NO: 5755689 - DNA, 25 bp, Homo sapien
gggccttgggcctggacttgcatcc

SEQ ID NO: 5755690 - DNA, 25 bp, Homo sapien
ggaagtcctccagtgagtcatgcac

SEQ ID NO: 5755691 - DNA, 25 bp, Homo sapien
gacaaggaggaggacgaggccgggg

SEQ ID NO: 5755692 - DNA, 25 bp, Homo sapien
ttttcggtttctggtctggatgcct

SEQ ID NO: 5755693 - DNA, 25 bp, Homo sapien
tttctcgtcctgccgggccgagccg

SEQ ID NO: 5755694 - DNA, 25 bp, Homo sapien
gcgggcggcacacctggctcccgtg

SEQ ID NO: 5755695 - DNA, 25 bp, Homo sapien
gggggatgggaaggctgggaagcaa

SEQ ID NO: 5755696 - DNA, 25 bp, Homo sapien
gtggctcacccagcgcggctggtcc

SEQ ID NO: 5755697 - DNA, 25 bp, Homo sapien
tcgacgaggaggctccacccagggc

SEQ ID NO: 5755698 - DNA, 25 bp, Homo sapien
catcggcgtgggcgtggtcagcatg

SEQ ID NO: 5755699 - DNA, 25 bp, Homo sapien
gcacggcggggtggtggtggctcac

SEQ ID NO: 5755700 - DNA, 25 bp, Homo sapien
ccagggctttgccgccgtccagcca

SEQ ID NO: 5755701 - DNA, 25 bp, Homo sapien
cagatggggtccagattcagtggtt

SEQ ID NO: 5755702 - DNA, 25 bp, Homo sapien
ggtctgacagttcgcacaggacgtc

SEQ ID NO: 5755703 - DNA, 25 bp, Homo sapien
acttttttgcactttttggatttgc

SEQ ID NO: 5755704 - DNA, 25 bp, Homo sapien
cacatccacctcctccggcagcggg

SEQ ID NO: 5755705 - DNA, 25 bp, Homo sapien
gggtgctgcccgttgagcacggcgg

SEQ ID NO: 5755706 - DNA, 25 bp, Homo sapien
tgtaaaaaggggcgacgactctgca

SEQ ID NO: 5755707 - DNA, 25 bp, Homo sapien
ggtcgtttagcaaagagaagaaggg

SEQ ID NO: 5755708 - DNA, 25 bp, Homo sapien
cgcgtttaggcttcatgatactgct

SEQ ID NO: 5755709 - DNA, 25 bp, Homo sapien
ctcgctgggggccctgtgagcatcg

SEQ ID NO: 5755710 - DNA, 25 bp, Homo sapien
cttcatgccttacagctacccagat

SEQ ID NO: 5755711 - DNA, 25 bp, Homo sapien
gtccctgctctcctggctgcagaca

SEQ ID NO: 5755712 - DNA, 25 bp, Homo sapien
tggcggtgaccatgctggaggggtg

SEQ ID NO: 5755713 - DNA, 25 bp, Homo sapien
ggagaaggggctgagattccagggg

SEQ ID NO: 5755714 - DNA, 25 bp, Homo sapien
ggactgcagggactctcgctggggg

SEQ ID NO: 5755715 - DNA, 25 bp, Homo sapien
gtatggcagaataaaacgggaccag

SEQ ID NO: 5755716 - DNA, 25 bp, Homo sapien
cacctcctccggcagcgggtactgc

SEQ ID NO: 5755717 - DNA, 25 bp, Homo sapien
gcggctggtccgccgtcacctccat

SEQ ID NO: 5755718 - DNA, 25 bp, Homo sapien
taaataggggatatgagtcagaatg

SEQ ID NO: 5755719 - DNA, 25 bp, Homo sapien
aggacatgtgtctggagagggcggc

SEQ ID NO: 5755720 - DNA, 25 bp, Homo sapien
aacaactgtggccagtgaaaggaaa

SEQ ID NO: 5755721 - DNA, 25 bp, Homo sapien
tcctcagccgctcggaggcggagtc

SEQ ID NO: 5755722 - DNA, 25 bp, Homo sapien
ttcggtttctggtctggatgccttc

SEQ ID NO: 5755723 - DNA, 25 bp, Homo sapien
agggctctaacccatggcggtgacc

SEQ ID NO: 5755724 - DNA, 25 bp, Homo sapien
tggaccgggccttgggcctggactt

SEQ ID NO: 5755725 - DNA, 25 bp, Homo sapien
gggcaggggcacctggtacttgagg

SEQ ID NO: 5755726 - DNA, 25 bp, Homo sapien
caggctcctctgcaccggggtcctc

SEQ ID NO: 5755727 - DNA, 25 bp, Homo sapien
tgcatcggcgtgggcgtggtcagca

SEQ ID NO: 5755728 - DNA, 25 bp, Homo sapien
gccggtgggggagccgcccagcagg

SEQ ID NO: 5755729 - DNA, 25 bp, Homo sapien
tggggggatgggaaggctgggaagc

SEQ ID NO: 5755730 - DNA, 25 bp, Homo sapien
actgcgccgcgtccatgtaggagtg

SEQ ID NO: 5755731 - DNA, 25 bp, Homo sapien
cctgctcggtcagattgcgttgctc

SEQ ID NO: 5755732 - DNA, 25 bp, Homo sapien
gagtccctcctcgggtcacctgggt

SEQ ID NO: 5755733 - DNA, 25 bp, Homo sapien
gcgccctctcgccgggcccggaacc

SEQ ID NO: 5755734 - DNA, 25 bp, Homo sapien
ttttttttttcacagcactagagac

SEQ ID NO: 5755735 - DNA, 25 bp, Homo sapien
gcggtgaccatgctggaggggtggt

SEQ ID NO: 5755736 - DNA, 25 bp, Homo sapien
cccagatgcaataaagtcattgtac

SEQ ID NO: 5755737 - DNA, 25 bp, Homo sapien
aggcggcggcgtacgacctgctcgg

SEQ ID NO: 5755738 - DNA, 25 bp, Homo sapien
tcagggaggacatgtgtctggagag

SEQ ID NO: 5755739 - DNA, 25 bp, Homo sapien
ttctgcgagccaggctcctctgcac

SEQ ID NO: 5755740 - DNA, 25 bp, Homo sapien
taaaaaggggcgacgactctgcaat

SEQ ID NO: 5755741 - DNA, 25 bp, Homo sapien
atgagtcagaatggcttattcacag

SEQ ID NO: 5755742 - DNA, 25 bp, Homo sapien
tggaacacagacaccacagtgagct

SEQ ID NO: 5755743 - DNA, 25 bp, Homo sapien
tggtcagcatgtggctggagtggct

SEQ ID NO: 5755744 - DNA, 25 bp, Homo sapien
gggcgagatgtggctcagggaggac

SEQ ID NO: 5755745 - DNA, 25 bp, Homo sapien
gacaaaaatccaaaaactgggtatg

SEQ ID NO: 5755746 - DNA, 25 bp, Homo sapien
tggctcagggaggacatgtgtctgg

SEQ ID NO: 5755747 - DNA, 25 bp, Homo sapien
ctgccacgggagtgggacgactcca

SEQ ID NO: 5755748 - DNA, 25 bp, Homo sapien
cgcccagcaggctgctgggggggaa

SEQ ID NO: 5755749 - DNA, 25 bp, Homo sapien
cagtgaaaggaaacaaaactggcag

SEQ ID NO: 5755750 - DNA, 25 bp, Homo sapien
ttcgcttgggcttaatgaggggccg

SEQ ID NO: 5755751 - DNA, 25 bp, Homo sapien
gtggtgtggtccaaaggacaggctg

SEQ ID NO: 5755752 - DNA, 25 bp, Homo sapien
ctcgccgccacagtggggtcgaggt

SEQ ID NO: 5755753 - DNA, 25 bp, Homo sapien
ttttgtgatagagcccgcaggcgtt

SEQ ID NO: 5755754 - DNA, 25 bp, Homo sapien
ggggtcctcagccgctcggaggcgg

SEQ ID NO: 5755755 - DNA, 25 bp, Homo sapien
tcggggggctcctgccgtcggaggg

SEQ ID NO: 5755756 - DNA, 25 bp, Homo sapien
tgaagcttgtagtagagcccacagg

SEQ ID NO: 5755757 - DNA, 25 bp, Homo sapien
caggctggatggcgggtgcatcggc

SEQ ID NO: 5755758 - DNA, 25 bp, Homo sapien
cttacagctacccagatgcaataaa

SEQ ID NO: 5755759 - DNA, 25 bp, Homo sapien
gcagacagccttcgcttgggcttaa

SEQ ID NO: 5755760 - DNA, 25 bp, Homo sapien
gtcacctgggtagcgaagagcagag

SEQ ID NO: 5755761 - DNA, 25 bp, Homo sapien
ggtggggggatgggaaggctgggaa

SEQ ID NO: 5755762 - DNA, 25 bp, Homo sapien
attccttaaacttcttggcatcctt

SEQ ID NO: 5755763 - DNA, 25 bp, Homo sapien
gtttctggtctggatgccttccttc

SEQ ID NO: 5755764 - DNA, 25 bp, Homo sapien
ggcgtgggcgtggtcagcatgtggc

SEQ ID NO: 5755765 - DNA, 25 bp, Homo sapien
ctgggggggaagagtccggagctgt

SEQ ID NO: 5755766 - DNA, 25 bp, Homo sapien
gctgtcgggcaggggcacctggtac

SEQ ID NO: 5755767 - DNA, 25 bp, Homo sapien
gggactctcgctgggggccctgtga

SEQ ID NO: 5755768 - DNA, 25 bp, Homo sapien
ttccagggggaggcggtgtggtggc

SEQ ID NO: 5755769 - DNA, 25 bp, Homo sapien
ggcggtcatgctgccacgggagtgg

SEQ ID NO: 5755770 - DNA, 25 bp, Homo sapien
cttcttggcatccttcatgccttac

SEQ ID NO: 5755771 - DNA, 25 bp, Homo sapien
gtccagccagggtagggatccatga

SEQ ID NO: 5755772 - DNA, 25 bp, Homo sapien
tgcagggactctcgctgggggccct

SEQ ID NO: 5755773 - DNA, 25 bp, Homo sapien
gtgtcccgtgccatctcgccgccac

SEQ ID NO: 5755774 - DNA, 25 bp, Homo sapien
ctctgcaattctgcgagccaggctc

SEQ ID NO: 5755775 - DNA, 25 bp, Homo sapien
gtagtagagcccacaggcattgcag

SEQ ID NO: 5755776 - DNA, 25 bp, Homo sapien
aaacaaaactggcagtttgtccatt

SEQ ID NO: 5755777 - DNA, 25 bp, Homo sapien
aaaggacaggctggatggcgggtgc

SEQ ID NO: 5755778 - DNA, 25 bp, Homo sapien
cagacagggtccccattggcattcc

SEQ ID NO: 5755779 - DNA, 25 bp, Homo sapien
aggggcacctggtacttgaggcact

SEQ ID NO: 5755780 - DNA, 25 bp, Homo sapien
tctgcaccggggtcctcagccgctc

SEQ ID NO: 5755781 - DNA, 25 bp, Homo sapien
gcatgtggctggagtggctgaaggg

SEQ ID NO: 5755782 - DNA, 25 bp, Homo sapien
ccacccagggcggtcatgctgccac

SEQ ID NO: 5755783 - DNA, 25 bp, Homo sapien
gtgagctcctttgcaaagtggcaaa

SEQ ID NO: 5755784 - DNA, 25 bp, Homo sapien
cccatggcggtgaccatgctggagg

SEQ ID NO: 5755785 - DNA, 25 bp, Homo sapien
aaaatccaaaaactgggtatggcag

SEQ ID NO: 5755786 - DNA, 25 bp, Homo sapien
tctcgccgggcccggaacccgcgcg

SEQ ID NO: 5755787 - DNA, 25 bp, Homo sapien
cacaggacgtccctgctctcctggc

SEQ ID NO: 5755788 - DNA, 25 bp, Homo sapien
cagcgcggctggtccgccgtcacct

SEQ ID NO: 5755789 - DNA, 25 bp, Homo sapien
caaaaactgggtatggcagaataaa

SEQ ID NO: 5755790 - DNA, 25 bp, Homo sapien
tgccgggccgagccggccgagcctg

SEQ ID NO: 5755791 - DNA, 25 bp, Homo sapien
cccgttgagcacggcggggtggtgg

SEQ ID NO: 5755792 - DNA, 25 bp, Homo sapien
aacgagctgttcttggggaagtcct

SEQ ID NO: 5755793 - DNA, 25 bp, Homo sapien
tcctgccgtcggagggtcgggggtc

SEQ ID NO: 5755794 - DNA, 25 bp, Homo sapien
cctctgcaccggggtcctcagccgc

SEQ ID NO: 5755795 - DNA, 25 bp, Homo sapien
accgtcgatgttaaaaagcacatcc

SEQ ID NO: 5755796 - DNA, 25 bp, Homo sapien
cttgaccgtcgatgttaaaaagcac

SEQ ID NO: 5755797 - DNA, 25 bp, Homo sapien
ggatggcgggtgcatcggcgtgggc

SEQ ID NO: 5755798 - DNA, 25 bp, Homo sapien
tcggcgtgggcgtggtcagcatgtg

SEQ ID NO: 5755799 - DNA, 25 bp, Homo sapien
gacatgtgtctggagagggcggccg

SEQ ID NO: 5755800 - DNA, 25 bp, Homo sapien
ggacgactccagcttcatgctgtcg

SEQ ID NO: 5755801 - DNA, 25 bp, Homo sapien
tcgggcacgtagggcgggtaggtgg

SEQ ID NO: 5755802 - DNA, 25 bp, Homo sapien
gccggttctgtccgttcattttgtg

SEQ ID NO: 5755803 - DNA, 25 bp, Homo sapien
gaacacagacaccacagtgagctcc

SEQ ID NO: 5755804 - DNA, 25 bp, Homo sapien
agcttcatgctgtcgggcaggggca

SEQ ID NO: 5755805 - DNA, 25 bp, Homo sapien
agcagagaggaggaggaggcggcgg

SEQ ID NO: 5755806 - DNA, 25 bp, Homo sapien
ttcacacactccctgcctgtgctgg

SEQ ID NO: 5755807 - DNA, 25 bp, Homo sapien
gcgttgcacaggtagtgtcccgtgc

SEQ ID NO: 5755808 - DNA, 25 bp, Homo sapien
ctgaggcccgggtggtgcgtgtccg

SEQ ID NO: 5755809 - DNA, 25 bp, Homo sapien
gatactgctcctgcaaaaatgcaag

SEQ ID NO: 5755810 - DNA, 25 bp, Homo sapien
ggggtcgttgaatgatttgctttcg

SEQ ID NO: 5755811 - DNA, 25 bp, Homo sapien
gccctgtgagcatcgagcagggctc

SEQ ID NO: 5755812 - DNA, 25 bp, Homo sapien
actctttctcgtcctgccgggccga

SEQ ID NO: 5755813 - DNA, 25 bp, Homo sapien
taggggatatgagtcagaatggctt

SEQ ID NO: 5755814 - DNA, 25 bp, Homo sapien
ccttcgcttgggcttaatgaggggc

SEQ ID NO: 5755815 - DNA, 25 bp, Homo sapien
cgccgccacagtggggtcgaggttg

SEQ ID NO: 5755816 - DNA, 25 bp, Homo sapien
ggcagaataaaacgggaccaggttg

SEQ ID NO: 5755817 - DNA, 25 bp, Homo sapien
ccctcctcgggtcacctgggtagcg

SEQ ID NO: 5755818 - DNA, 25 bp, Homo sapien
cttcatgatactgctcctgcaaaaa

SEQ ID NO: 5755819 - DNA, 25 bp, Homo sapien
tcctccagagtgtggttgtggtggt

SEQ ID NO: 5755820 - DNA, 25 bp, Homo sapien
aaggtgaagaggtgcgggctggcgt

SEQ ID NO: 5755821 - DNA, 25 bp, Homo sapien
gtagggcgggtaggtggtgatgggg

SEQ ID NO: 5755822 - DNA, 25 bp, Homo sapien
tggacagcgatgggtccggggagac

SEQ ID NO: 5755823 - DNA, 25 bp, Homo sapien
aggggtggtgtggtccaaaggacag

SEQ ID NO: 5755824 - DNA, 25 bp, Homo sapien
cagggtccccattggcattcctcct

SEQ ID NO: 5755825 - DNA, 25 bp, Homo sapien
aattatcttggaggggtcgtttagc

SEQ ID NO: 5755826 - DNA, 25 bp, Homo sapien
gatgtggctcagggaggacatgtgt

SEQ ID NO: 5755827 - DNA, 25 bp, Homo sapien
acataattttgctttctgccttcaa

SEQ ID NO: 5755828 - DNA, 25 bp, Homo sapien
gctgcccgttgagcacggcggggtg

SEQ ID NO: 5755829 - DNA, 25 bp, Homo sapien
ggtctggatgccttccttcttcata

SEQ ID NO: 5755830 - DNA, 25 bp, Homo sapien
gcggggtgggcgggaaggtgaagag

SEQ ID NO: 5755831 - DNA, 25 bp, Homo sapien
cacccagcgcggctggtccgccgtc

SEQ ID NO: 5755832 - DNA, 25 bp, Homo sapien
cagtgagctcctttgcaaagtggca

SEQ ID NO: 5755833 - DNA, 25 bp, Homo sapien
cgctgggggccctgtgagcatcgag

SEQ ID NO: 5755834 - DNA, 25 bp, Homo sapien
ggggcgacgactctgcaattctgcg

SEQ ID NO: 5755835 - DNA, 25 bp, Homo sapien
ttcttttaatgcatcaaacaactgt

SEQ ID NO: 5755836 - DNA, 25 bp, Homo sapien
gatggggtggtgggtcgacgaggag

SEQ ID NO: 5755837 - DNA, 25 bp, Homo sapien
ggctgcccagggctttgccgccgtc

SEQ ID NO: 5755838 - DNA, 25 bp, Homo sapien
ccctgctctcctggctgcagacagc

SEQ ID NO: 5755839 - DNA, 25 bp, Homo sapien
cttaatgaggggccggttctgtccg

SEQ ID NO: 5755840 - DNA, 25 bp, Homo sapien
gaggggccggttctgtccgttcatt

SEQ ID NO: 5755841 - DNA, 25 bp, Homo sapien
agtagagcccacaggcattgcagac

SEQ ID NO: 5755842 - DNA, 25 bp, Homo sapien
ccatttgaatatcagacctagtttc

SEQ ID NO: 5755843 - DNA, 25 bp, Homo sapien
ttctgccttcaaaaacatatatcca

SEQ ID NO: 5755844 - DNA, 25 bp, Homo sapien
tttgctagacatttttcggtttctg

SEQ ID NO: 5755845 - DNA, 25 bp, Homo sapien
tcgccgggcccggaacccgcgcgcg

SEQ ID NO: 5755846 - DNA, 25 bp, Homo sapien
cgggggtcgttgaatgatttgcttt

SEQ ID NO: 5755847 - DNA, 25 bp, Homo sapien
gtgctggaccgggccttgggcctgg

SEQ ID NO: 5755848 - DNA, 25 bp, Homo sapien
tggtggctcacccagcgcggctggt

SEQ ID NO: 5755849 - DNA, 25 bp, Homo sapien
tagggatccatgaagcagaggcggg

SEQ ID NO: 5755850 - DNA, 25 bp, Homo sapien
cgccgtcacctccatggcctcggct

SEQ ID NO: 5755851 - DNA, 25 bp, Homo sapien
tggctcccgtggtgggtcggagggt

SEQ ID NO: 5755852 - DNA, 25 bp, Homo sapien
ttgccgccgtccagccagggtaggg

SEQ ID NO: 5755853 - DNA, 25 bp, Homo sapien
gcacttttttgcactttttggattt

SEQ ID NO: 5755854 - DNA, 25 bp, Homo sapien
gaccctgttaaataggggatatgag

SEQ ID NO: 5755855 - DNA, 25 bp, Homo sapien
ggcacacctggctcccgtggtgggt

SEQ ID NO: 5755856 - DNA, 25 bp, Homo sapien
agaaggggctgagattccaggggga

SEQ ID NO: 5755857 - DNA, 25 bp, Homo sapien
tcttggggaagtcctccagtgagtc

SEQ ID NO: 5755858 - DNA, 25 bp, Homo sapien
tccgcctgggaggtcggggggctcc

SEQ ID NO: 5755859 - DNA, 25 bp, Homo sapien
ggtgtggtggctgcccagggctttg

SEQ ID NO: 5755860 - DNA, 25 bp, Homo sapien
tacaatataagttatatgcaatgtt

SEQ ID NO: 5755861 - DNA, 25 bp, Homo sapien
ctgagattccagggggaggcggtgt

SEQ ID NO: 5755862 - DNA, 25 bp, Homo sapien
gggaagagtccggagctgtactcgg

SEQ ID NO: 5755863 - DNA, 25 bp, Homo sapien
agcaaagagaagaaggggaagacaa

SEQ ID NO: 5755864 - DNA, 25 bp, Homo sapien
aaagtcattgtacagtatttcttac

SEQ ID NO: 5755865 - DNA, 25 bp, Homo sapien
tctcgtcctgccgggccgagccggc

SEQ ID NO: 5755866 - DNA, 25 bp, Homo sapien
gccgccgtccagccagggtagggat

SEQ ID NO: 5755867 - DNA, 25 bp, Homo sapien
tacttgaggcactctttctcgtcct

SEQ ID NO: 5755868 - DNA, 25 bp, Homo sapien
atatgagtcagaatggcttattcac

SEQ ID NO: 5755869 - DNA, 25 bp, Homo sapien
gttggaacacagacaccacagtgag

SEQ ID NO: 5755870 - DNA, 25 bp, Homo sapien
gtcatgctgccacgggagtgggacg

SEQ ID NO: 5755871 - DNA, 25 bp, Homo sapien
gtcagattgcgttgctcgctctgtc

SEQ ID NO: 5755872 - DNA, 25 bp, Homo sapien
tggccctgaccgagtttccgtagta

SEQ ID NO: 5755873 - DNA, 25 bp, Homo sapien
ctcacccagcgcggctggtccgccg

SEQ ID NO: 5755874 - DNA, 25 bp, Homo sapien
ctcctctgcaccggggtcctcagcc

SEQ ID NO: 5755875 - DNA, 25 bp, Homo sapien
gggggaagagtccggagctgtactc

SEQ ID NO: 5755876 - DNA, 25 bp, Homo sapien
tccgccgtcacctccatggcctcgg

SEQ ID NO: 5755877 - DNA, 25 bp, Homo sapien
agaggcgggcggcacacctggctcc

SEQ ID NO: 5755878 - DNA, 25 bp, Homo sapien
aataggggatatgagtcagaatggc

SEQ ID NO: 5755879 - DNA, 25 bp, Homo sapien
ccagggcggtcatgctgccacggga

SEQ ID NO: 5755880 - DNA, 25 bp, Homo sapien
gtcatgcacttttttgcactttttg

SEQ ID NO: 5755881 - DNA, 25 bp, Homo sapien
cttttaatgcatcaaacaactgtgg

SEQ ID NO: 5755882 - DNA, 25 bp, Homo sapien
tgtggtccaaaggacaggctggatg

SEQ ID NO: 5755883 - DNA, 25 bp, Homo sapien
agccagggtagggatccatgaagca

SEQ ID NO: 5755884 - DNA, 25 bp, Homo sapien
aaatgcaagtcgaaagggactgcag

SEQ ID NO: 5755885 - DNA, 25 bp, Homo sapien
ttccacactatttctcccatattcc

SEQ ID NO: 5755886 - DNA, 25 bp, Homo sapien
agtggcaaacataattttgctttct

SEQ ID NO: 5755887 - DNA, 25 bp, Homo sapien
ccgccacagtggggtcgaggttgcc

SEQ ID NO: 5755888 - DNA, 25 bp, Homo sapien
tgggacgactccagcttcatgctgt

SEQ ID NO: 5755889 - DNA, 25 bp, Homo sapien
gcgatgggtccggggagacgtcctt

SEQ ID NO: 5755890 - DNA, 25 bp, Homo sapien
ccgtccagccagggtagggatccat

SEQ ID NO: 5755891 - DNA, 25 bp, Homo sapien
ggggaggcggtgtggtggctgccca

SEQ ID NO: 5755892 - DNA, 25 bp, Homo sapien
ccaaaggacaggctggatggcgggt

SEQ ID NO: 5755893 - DNA, 25 bp, Homo sapien
tagtgtcccgtgccatctcgccgcc

SEQ ID NO: 5755894 - DNA, 25 bp, Homo sapien
gatggacgtcttggagaaggggctg

SEQ ID NO: 5755895 - DNA, 25 bp, Homo sapien
tgaccgagtttccgtagtagggcgg

SEQ ID NO: 5755896 - DNA, 25 bp, Homo sapien
cagtttgtccatttgaatatcagac

SEQ ID NO: 5755897 - DNA, 25 bp, Homo sapien
tcctccggcagcgggtactgcgccg

SEQ ID NO: 5755898 - DNA, 25 bp, Homo sapien
agggctttgccgccgtccagccagg

SEQ ID NO: 5755899 - DNA, 25 bp, Homo sapien
tgggaaggctgggaagcaaaggtga

SEQ ID NO: 5755900 - DNA, 25 bp, Homo sapien
gacctgctcggtcagattgcgttgc

SEQ ID NO: 5755901 - DNA, 25 bp, Homo sapien
gaggttgccccacagttcacacact

SEQ ID NO: 5755902 - DNA, 25 bp, Homo sapien
cgctcggaggcggagtccctcctcg

SEQ ID NO: 5755903 - DNA, 25 bp, Homo sapien
aaacatatatccatcgcgtttaggc

SEQ ID NO: 5755904 - DNA, 25 bp, Homo sapien
catgctggaggggtggtgtggtcca

SEQ ID NO: 5755905 - DNA, 25 bp, Homo sapien
ttgccttgaccgtcgatgttaaaaa

SEQ ID NO: 5755906 - DNA, 25 bp, Homo sapien
ggatatgagtcagaatggcttattc

SEQ ID NO: 5755907 - DNA, 25 bp, Homo sapien
aaaaacatatatccatcgcgtttag

SEQ ID NO: 5755908 - DNA, 25 bp, Homo sapien
gccagtgaaaggaaacaaaactggc

SEQ ID NO: 5755909 - DNA, 25 bp, Homo sapien
ggtaggtggtgatggggtggtgggt

SEQ ID NO: 5755910 - DNA, 25 bp, Homo sapien
acatttttcggtttctggtctggat

SEQ ID NO: 5755911 - DNA, 25 bp, Homo sapien
ccatattccttaaacttcttggcat

SEQ ID NO: 5755912 - DNA, 25 bp, Homo sapien
ctgtgctggaccgggccttgggcct

SEQ ID NO: 5755913 - DNA, 25 bp, Homo sapien
agattcagtggttggaacacagaca

SEQ ID NO: 5755914 - DNA, 25 bp, Homo sapien
gcgcgcggggagggagggcggtccg

SEQ ID NO: 5755915 - DNA, 25 bp, Homo sapien
tgaagggcgagatgtggctcaggga

SEQ ID NO: 5755916 - DNA, 25 bp, Homo sapien
tcctggctgcagacagccttcgctt

SEQ ID NO: 5755917 - DNA, 25 bp, Homo sapien
aaaaatgcaagtcgaaagggactgc

SEQ ID NO: 5755918 - DNA, 25 bp, Homo sapien
ctgcagacagccttcgcttgggctt

SEQ ID NO: 5755919 - DNA, 25 bp, Homo sapien
cagcatgtggctggagtggctgaag

SEQ ID NO: 5755920 - DNA, 25 bp, Homo sapien
ctgcctgtgctggaccgggccttgg

SEQ ID NO: 5755921 - DNA, 25 bp, Homo sapien
ggtcgaggttgccccacagttcaca

SEQ ID NO: 5755922 - DNA, 25 bp, Homo sapien
tgtactcgggcacgtagggcgggta

SEQ ID NO: 5755923 - DNA, 25 bp, Homo sapien
cgaagccggtgggggagccgcccag

SEQ ID NO: 5755924 - DNA, 25 bp, Homo sapien
gtttgtccatttgaatatcagacct

SEQ ID NO: 5755925 - DNA, 25 bp, Homo sapien
ggctttgccgccgtccagccagggt

SEQ ID NO: 5755926 - DNA, 25 bp, Homo sapien
gcgtgtccgggtgctgcccgttgag

SEQ ID NO: 5755927 - DNA, 25 bp, Homo sapien
gactccagcttcatgctgtcgggca

SEQ ID NO: 5755928 - DNA, 25 bp, Homo sapien
atgccttacagctacccagatgcaa

SEQ ID NO: 5755929 - DNA, 25 bp, Homo sapien
ccgcgtccatgtaggagtggctgag

SEQ ID NO: 5755930 - DNA, 25 bp, Homo sapien
gagcctggggtggacagcgatgggt

SEQ ID NO: 5755931 - DNA, 25 bp, Homo sapien
aacttcttggcatccttcatgcctt

SEQ ID NO: 5755932 - DNA, 25 bp, Homo sapien
ttgtccatttgaatatcagacctag

SEQ ID NO: 5755933 - DNA, 25 bp, Homo sapien
tgtggtggctgcccagggctttgcc

SEQ ID NO: 5755934 - DNA, 25 bp, Homo sapien
tcgcgccctctcgccgggcccggaa

SEQ ID NO: 5755935 - DNA, 25 bp, Homo sapien
cacagcactagagaccctgttaaat

SEQ ID NO: 5755936 - DNA, 25 bp, Homo sapien
tgtgtctggagagggcggccgggtt

SEQ ID NO: 5755937 - DNA, 25 bp, Homo sapien
tgagcatcgagcagggctctaaccc

SEQ ID NO: 5755938 - DNA, 25 bp, Homo sapien
atcagacctagtttcttcttaattt

SEQ ID NO: 5755939 - DNA, 25 bp, Homo sapien
gaacccgcgcgcggggagggagggc

SEQ ID NO: 5755940 - DNA, 25 bp, Homo sapien
cagggactctcgctgggggccctgt

SEQ ID NO: 5755941 - DNA, 25 bp, Homo sapien
cctcgggtcacctgggtagcgaaga

SEQ ID NO: 5755942 - DNA, 25 bp, Homo sapien
cattttgtgatagagcccgcaggcg

SEQ ID NO: 5755943 - DNA, 25 bp, Homo sapien
gggggccctgtgagcatcgagcagg

SEQ ID NO: 5755944 - DNA, 25 bp, Homo sapien
cgtggccccccgacaaggaggagga

SEQ ID NO: 5755945 - DNA, 25 bp, Homo sapien
gttaaacgagctgttcttggggaag

SEQ ID NO: 5755946 - DNA, 25 bp, Homo sapien
gagatgtggctcagggaggacatgt

SEQ ID NO: 5755947 - DNA, 25 bp, Homo sapien
cgtagtagggcgggacgtggttgcc

SEQ ID NO: 5755948 - DNA, 25 bp, Homo sapien
ttgagcacggcggggtggtggtggc

SEQ ID NO: 5755949 - DNA, 25 bp, Homo sapien
accatgctggaggggtggtgtggtc

SEQ ID NO: 5755950 - DNA, 25 bp, Homo sapien
gtttagcaaagagaagaaggggaag

SEQ ID NO: 5755951 - DNA, 25 bp, Homo sapien
ggtggtgatggggtggtgggtcgac

SEQ ID NO: 5755952 - DNA, 25 bp, Homo sapien
tggaggggtcgtttagcaaagagaa

SEQ ID NO: 5755953 - DNA, 25 bp, Homo sapien
gtggtctgacagttcgcacaggacg

SEQ ID NO: 5755954 - DNA, 25 bp, Homo sapien
ctccacccagggcggtcatgctgcc

SEQ ID NO: 5755955 - DNA, 25 bp, Homo sapien
gatgggaaggctgggaagcaaaggt

SEQ ID NO: 5755956 - DNA, 25 bp, Homo sapien
tgcgggctggcgtggccccccgaca

SEQ ID NO: 5755957 - DNA, 25 bp, Homo sapien
ttggcattcctcctccagagtgtgg

SEQ ID NO: 5755958 - DNA, 25 bp, Homo sapien
ccccgacaaggaggaggacgaggcc

SEQ ID NO: 5755959 - DNA, 25 bp, Homo sapien
ggtgagcaaaggagaaggtttttta

SEQ ID NO: 5755960 - DNA, 25 bp, Homo sapien
tggacttgcatccgaagccggtggg

SEQ ID NO: 5755961 - DNA, 25 bp, Homo sapien
ggaaggtgaagaggtgcgggctggc

SEQ ID NO: 5755962 - DNA, 25 bp, Homo sapien
ccagggtagggatccatgaagcaga

SEQ ID NO: 5755963 - DNA, 25 bp, Homo sapien
cgaaagggactgcagggactctcgc

SEQ ID NO: 5755964 - DNA, 25 bp, Homo sapien
tcctgcaaaaatgcaagtcgaaagg

SEQ ID NO: 5755965 - DNA, 25 bp, Homo sapien
tggctgaagggcgagatgtggctca

SEQ ID NO: 5755966 - DNA, 25 bp, Homo sapien
aagtcctccagtgagtcatgcactt

SEQ ID NO: 5755967 - DNA, 25 bp, Homo sapien
tccacctcctccggcagcgggtact

SEQ ID NO: 5755968 - DNA, 25 bp, Homo sapien
aaaaagcacatccacctcctccggc

SEQ ID NO: 5755969 - DNA, 25 bp, Homo sapien
gcggccgggttaaacgagctgttct

SEQ ID NO: 5755970 - DNA, 25 bp, Homo sapien
gcctcggctgtgctcgcgccctctc

SEQ ID NO: 5755971 - DNA, 25 bp, Homo sapien
cacacactccctgcctgtgctggac

SEQ ID NO: 5755972 - DNA, 25 bp, Homo sapien
ttgaatatcagacctagtttcttct

SEQ ID NO: 5755973 - DNA, 25 bp, Homo sapien
taatattgtgaagcttgtagtagag

SEQ ID NO: 5755974 - DNA, 25 bp, Homo sapien
attcagtggttggaacacagacacc

SEQ ID NO: 5755975 - DNA, 25 bp, Homo sapien
gtacgacctgctcggtcagattgcg

SEQ ID NO: 5755976 - DNA, 25 bp, Homo sapien
ggcattcctcctccagagtgtggtt

SEQ ID NO: 5755977 - DNA, 25 bp, Homo sapien
gctcccgtggtgggtcggagggtac

SEQ ID NO: 5755978 - DNA, 25 bp, Homo sapien
cgtcttggagaaggggctgagattc

SEQ ID NO: 5755979 - DNA, 25 bp, Homo sapien
ctgctctcctggctgcagacagcct

SEQ ID NO: 5755980 - DNA, 25 bp, Homo sapien
tggccagtgaaaggaaacaaaactg

SEQ ID NO: 5755981 - DNA, 25 bp, Homo sapien
agccggccgagcctggggtggacag

SEQ ID NO: 5755982 - DNA, 25 bp, Homo sapien
tctcctggctgcagacagccttcgc

SEQ ID NO: 5755983 - DNA, 25 bp, Homo sapien
ccagccagggtagggatccatgaag

SEQ ID NO: 5755984 - DNA, 25 bp, Homo sapien
gtaggagtggctgaggcccgggtgg

SEQ ID NO: 5755985 - DNA, 25 bp, Homo sapien
ctgttaaataggggatatgagtcag

SEQ ID NO: 5755986 - DNA, 25 bp, Homo sapien
gaatggcttattcacagatggggtc

SEQ ID NO: 5755987 - DNA, 25 bp, Homo sapien
gactctgcaattctgcgagccaggc

SEQ ID NO: 5755988 - DNA, 25 bp, Homo sapien
gaggaggaggaggcggcggcgtacg

SEQ ID NO: 5755989 - DNA, 25 bp, Homo sapien
ggggtcgtttagcaaagagaagaag

SEQ ID NO: 5755990 - DNA, 25 bp, Homo sapien
ggcatccttcatgccttacagctac

SEQ ID NO: 5755991 - DNA, 25 bp, Homo sapien
tagtagggcgggacgtggttgcctt

SEQ ID NO: 5755992 - DNA, 25 bp, Homo sapien
ccgcgcgcggggagggagggcggtc

SEQ ID NO: 5755993 - DNA, 25 bp, Homo sapien
ccggccgagcctggggtggacagcg

SEQ ID NO: 5755994 - DNA, 25 bp, Homo sapien
caccgtggccctgaccgagtttccg

SEQ ID NO: 5755995 - DNA, 25 bp, Homo sapien
gtggctgcccagggctttgccgccg

SEQ ID NO: 5755996 - DNA, 25 bp, Homo sapien
gggtggtggtggctcacccagcgcg

SEQ ID NO: 5755997 - DNA, 25 bp, Homo sapien
tcgaggttgccccacagttcacaca

SEQ ID NO: 5755998 - DNA, 25 bp, Homo sapien
cccgggtggtgcgtgtccgggtgct

SEQ ID NO: 5755999 - DNA, 25 bp, Homo sapien
actgcagggactctcgctgggggcc

SEQ ID NO: 5756000 - DNA, 25 bp, Homo sapien
taggcttcatgatactgctcctgca

SEQ ID NO: 5756001 - DNA, 25 bp, Homo sapien
ccgcaggcgttgcacaggtagtgtc

SEQ ID NO: 5756002 - DNA, 25 bp, Homo sapien
tgcaccggggtcctcagccgctcgg

SEQ ID NO: 5756003 - DNA, 25 bp, Homo sapien
gggtactgcgccgcgtccatgtagg

SEQ ID NO: 5756004 - DNA, 25 bp, Homo sapien
atgcacttttttgcactttttggat

SEQ ID NO: 5756005 - DNA, 25 bp, Homo sapien
agggtacctctgcaccgtggccctg

SEQ ID NO: 5756006 - DNA, 25 bp, Homo sapien
cctgaccgagtttccgtagtagggc

SEQ ID NO: 5756007 - DNA, 25 bp, Homo sapien
gaagaaggggaagacaaaaatccaa

SEQ ID NO: 5756008 - DNA, 25 bp, Homo sapien
gcgcggctggtccgccgtcacctcc

SEQ ID NO: 5756009 - DNA, 25 bp, Homo sapien
agtcattgtacagtatttcttacaa

SEQ ID NO: 5756010 - DNA, 25 bp, Homo sapien
gccttcaaaaacatatatccatcgc

SEQ ID NO: 5756011 - DNA, 25 bp, Homo sapien
acaggcattgcagacagggtcccca

SEQ ID NO: 5756012 - DNA, 25 bp, Homo sapien
ataattttgctttctgccttcaaaa

SEQ ID NO: 5756013 - DNA, 25 bp, Homo sapien
gcactttttggatttgctagacatt

SEQ ID NO: 5756014 - DNA, 25 bp, Homo sapien
ctggggtggacagcgatgggtccgg

SEQ ID NO: 5756015 - DNA, 25 bp, Homo sapien
cgccgtccagccagggtagggatcc

SEQ ID NO: 5756016 - DNA, 25 bp, Homo sapien
cgggtaggtggtgatggggtggtgg

SEQ ID NO: 5756017 - DNA, 25 bp, Homo sapien
ctgctcctgcaaaaatgcaagtcga

SEQ ID NO: 5756018 - DNA, 25 bp, Homo sapien
ttttttttttttcacagcactagag

SEQ ID NO: 5756019 - DNA, 25 bp, Homo sapien
tctttctcgtcctgccgggccgagc

SEQ ID NO: 5756020 - DNA, 25 bp, Homo sapien
gaggctccacccagggcggtcatgc

SEQ ID NO: 5756021 - DNA, 25 bp, Homo sapien
gacgaggaggctccacccagggcgg

SEQ ID NO: 5756022 - DNA, 25 bp, Homo sapien
cgtttaggcttcatgatactgctcc

SEQ ID NO: 5756023 - DNA, 25 bp, Homo sapien
ggcttaatgaggggccggttctgtc

SEQ ID NO: 5756024 - DNA, 25 bp, Homo sapien
gggaggtcggggggctcctgccgtc

SEQ ID NO: 5756025 - DNA, 25 bp, Homo sapien
tgcagacagggtccccattggcatt

SEQ ID NO: 5756026 - DNA, 25 bp, Homo sapien
cgtgccatctcgccgccacagtggg

SEQ ID NO: 5756027 - DNA, 25 bp, Homo sapien
tccatggcctcggctgtgctcgcgc

SEQ ID NO: 5756028 - DNA, 25 bp, Homo sapien
gcacctggtacttgaggcactcttt

SEQ ID NO: 5756029 - DNA, 25 bp, Homo sapien
cttgcatccgaagccggtgggggag

SEQ ID NO: 5756030 - DNA, 25 bp, Homo sapien
aggcggtgtggtggctgcccagggc

SEQ ID NO: 5756031 - DNA, 25 bp, Homo sapien
caactgtggccagtgaaaggaaaca

SEQ ID NO: 5756032 - DNA, 25 bp, Homo sapien
ggtggatggacgtcttggagaaggg

SEQ ID NO: 5756033 - DNA, 25 bp, Homo sapien
acggcggggtggtggtggctcaccc

SEQ ID NO: 5756034 - DNA, 25 bp, Homo sapien
gctcctgcaaaaatgcaagtcgaaa

SEQ ID NO: 5756035 - DNA, 25 bp, Homo sapien
gggggctcctgccgtcggagggtcg

SEQ ID NO: 5756036 - DNA, 25 bp, Homo sapien
gggtatggcagaataaaacgggacc

SEQ ID NO: 5756037 - DNA, 25 bp, Homo sapien
attttgctttctgccttcaaaaaca

SEQ ID NO: 5756038 - DNA, 25 bp, Homo sapien
gaaaggaaacaaaactggcagtttg

SEQ ID NO: 5756039 - DNA, 25 bp, Homo sapien
ccatctcgccgccacagtggggtcg

SEQ ID NO: 5756040 - DNA, 25 bp, Homo sapien
cagccgctcggaggcggagtccctc

SEQ ID NO: 5756041 - DNA, 25 bp, Homo sapien
cgtcgatgttaaaaagcacatccac

SEQ ID NO: 5756042 - DNA, 25 bp, Homo sapien
tgtccgttcattttgtgatagagcc

SEQ ID NO: 5756043 - DNA, 25 bp, Homo sapien
gacgtcttggagaaggggctgagat

SEQ ID NO: 5756044 - DNA, 25 bp, Homo sapien
gcaaagtggcaaacataattttgct

SEQ ID NO: 5756045 - DNA, 25 bp, Homo sapien
aggcgggcggcacacctggctcccg

SEQ ID NO: 5756046 - DNA, 25 bp, Homo sapien
cggtgggggagccgcccagcaggct

SEQ ID NO: 5756047 - DNA, 25 bp, Homo sapien
tcccatattccttaaacttcttggc

SEQ ID NO: 5756048 - DNA, 25 bp, Homo sapien
aagttatatgcaatgttcagcattt

SEQ ID NO: 5756049 - DNA, 25 bp, Homo sapien
ccatgtaggagtggctgaggcccgg

SEQ ID NO: 5756050 - DNA, 25 bp, Homo sapien
tcgggtcacctgggtagcgaagagc

SEQ ID NO: 5756051 - DNA, 25 bp, Homo sapien
gcggcggcgtacgacctgctcggtc

SEQ ID NO: 5756052 - DNA, 25 bp, Homo sapien
agggaggacatgtgtctggagaggg

SEQ ID NO: 5756053 - DNA, 25 bp, Homo sapien
ggaaacaaaactggcagtttgtcca

SEQ ID NO: 5756054 - DNA, 25 bp, Homo sapien
gatccatgaagcagaggcgggcggc

SEQ ID NO: 5756055 - DNA, 25 bp, Homo sapien
gcgtacgacctgctcggtcagattg

SEQ ID NO: 5756056 - DNA, 25 bp, Homo sapien
atctcgccgccacagtggggtcgag

SEQ ID NO: 5756057 - DNA, 25 bp, Homo sapien
acccagggcggtcatgctgccacgg

SEQ ID NO: 5756058 - DNA, 25 bp, Homo sapien
acagttcgcacaggacgtccctgct

SEQ ID NO: 5756059 - DNA, 25 bp, Homo sapien
aggctgctgggggggaagagtccgg

SEQ ID NO: 5756060 - DNA, 25 bp, Homo sapien
gacgaggccggggggtagacggaga

SEQ ID NO: 5756061 - DNA, 25 bp, Homo sapien
cggaggcggagtccctcctcgggtc

SEQ ID NO: 5756062 - DNA, 25 bp, Homo sapien
agggggaggcggtgtggtggctgcc

SEQ ID NO: 5756063 - DNA, 25 bp, Homo sapien
cttcatagtcaggggtctgttaata

SEQ ID NO: 5756064 - DNA, 25 bp, Homo sapien
gggtccagattcagtggttggaaca

SEQ ID NO: 5756065 - DNA, 25 bp, Homo sapien
cccgtgccatctcgccgccacagtg

SEQ ID NO: 5756066 - DNA, 25 bp, Homo sapien
tgcgccgcgtccatgtaggagtggc

SEQ ID NO: 5756067 - DNA, 25 bp, Homo sapien
atattgtgaagcttgtagtagagcc

SEQ ID NO: 5756068 - DNA, 25 bp, Homo sapien
aggaggaggcggcggcgtacgacct

SEQ ID NO: 5756069 - DNA, 25 bp, Homo sapien
ggcccgggtggtgcgtgtccgggtg

SEQ ID NO: 5756070 - DNA, 25 bp, Homo sapien
cctccatggcctcggctgtgctcgc

SEQ ID NO: 5756071 - DNA, 25 bp, Homo sapien
gggaagcaaaggtgagcaaaggaga

SEQ ID NO: 5756072 - DNA, 25 bp, Homo sapien
catgaagcagaggcgggcggcacac

SEQ ID NO: 5756073 - DNA, 25 bp, Homo sapien
cagcaggctgctgggggggaagagt

SEQ ID NO: 5756074 - DNA, 25 bp, Homo sapien
tgccttccttcttcatagtcagggg

SEQ ID NO: 5756075 - DNA, 25 bp, Homo sapien
gacagcgatgggtccggggagacgt

SEQ ID NO: 5756076 - DNA, 25 bp, Homo sapien
ttcctcctccagagtgtggttgtgg

SEQ ID NO: 5756077 - DNA, 25 bp, Homo sapien
tcagtggttggaacacagacaccac

SEQ ID NO: 5756078 - DNA, 25 bp, Homo sapien
ttgcactttttggatttgctagaca

SEQ ID NO: 5756079 - DNA, 25 bp, Homo sapien
tcggcggggtgggcgggaaggtgaa

SEQ ID NO: 5756080 - DNA, 25 bp, Homo sapien
gcaggcgttgcacaggtagtgtccc

SEQ ID NO: 5756081 - DNA, 25 bp, Homo sapien
gtccatttgaatatcagacctagtt

SEQ ID NO: 5756082 - DNA, 25 bp, Homo sapien
gatggggtccagattcagtggttgg

SEQ ID NO: 5756083 - DNA, 25 bp, Homo sapien
gccttgaccgtcgatgttaaaaagc

SEQ ID NO: 5756084 - DNA, 25 bp, Homo sapien
ctctcgctgggggccctgtgagcat

SEQ ID NO: 5756085 - DNA, 25 bp, Homo sapien
ggggatatgagtcagaatggcttat

SEQ ID NO: 5756086 - DNA, 25 bp, Homo sapien
atcgcgtttaggcttcatgatactg

SEQ ID NO: 5756087 - DNA, 25 bp, Homo sapien
ggcggcgtacgacctgctcggtcag

SEQ ID NO: 5756088 - DNA, 25 bp, Homo sapien
taggtggtgatggggtggtgggtcg

SEQ ID NO: 5756089 - DNA, 25 bp, Homo sapien
cggggtggtggtggctcacccagcg

SEQ ID NO: 5756090 - DNA, 25 bp, Homo sapien
tgggcgtggtcagcatgtggctgga

SEQ ID NO: 5756091 - DNA, 25 bp, Homo sapien
acacagacaccacagtgagctcctt

SEQ ID NO: 5756092 - DNA, 25 bp, Homo sapien
aaaactgggtatggcagaataaaac

SEQ ID NO: 5756093 - DNA, 25 bp, Homo sapien
gagcacggcggggtggtggtggctc

SEQ ID NO: 5756094 - DNA, 25 bp, Homo sapien
tgctggaggggtggtgtggtccaaa

SEQ ID NO: 5756095 - DNA, 25 bp, Homo sapien
cacacctggctcccgtggtgggtcg

SEQ ID NO: 5756096 - DNA, 25 bp, Homo sapien
atgtaggagtggctgaggcccgggt

SEQ ID NO: 5756097 - DNA, 25 bp, Homo sapien
gtggggtcgaggttgccccacagtt

SEQ ID NO: 5756098 - DNA, 25 bp, Homo sapien
atttgaatatcagacctagtttctt

SEQ ID NO: 5756099 - DNA, 25 bp, Homo sapien
ccgacaaggaggaggacgaggccgg

SEQ ID NO: 5756100 - DNA, 25 bp, Homo sapien
cctcctccagagtgtggttgtggtg

SEQ ID NO: 5756101 - DNA, 25 bp, Homo sapien
gctcctgccgtcggagggtcggggg

SEQ ID NO: 5756102 - DNA, 25 bp, Homo sapien
ctcggaggcggagtccctcctcggg

SEQ ID NO: 5756103 - DNA, 25 bp, Homo sapien
tgagcaaaggagaaggttttttaaa

SEQ ID NO: 5756104 - DNA, 25 bp, Homo sapien
tatgcaatgttcagcattttttttt

SEQ ID NO: 5756105 - DNA, 25 bp, Homo sapien
aatccaaaaactgggtatggcagaa

SEQ ID NO: 5756106 - DNA, 25 bp, Homo sapien
gttgaatgatttgctttcggtgggg

SEQ ID NO: 5756107 - DNA, 25 bp, Homo sapien
gcggcacacctggctcccgtggtgg

SEQ ID NO: 5756108 - DNA, 25 bp, Homo sapien
atggcgggtgcatcggcgtgggcgt

SEQ ID NO: 5756109 - DNA, 25 bp, Homo sapien
ataaagtcattgtacagtatttctt

SEQ ID NO: 5756110 - DNA, 25 bp, Homo sapien
gcagaggcgggcggcacacctggct

SEQ ID NO: 5756111 - DNA, 25 bp, Homo sapien
ggtggacagcgatgggtccggggag

SEQ ID NO: 5756112 - DNA, 25 bp, Homo sapien
cattcctcctccagagtgtggttgt

SEQ ID NO: 5756113 - DNA, 25 bp, Homo sapien
tatatgcaatgttcagcattttttt

SEQ ID NO: 5756114 - DNA, 25 bp, Homo sapien
ggcttcatgatactgctcctgcaaa

SEQ ID NO: 5756115 - DNA, 25 bp, Homo sapien
agggtagggatccatgaagcagagg

SEQ ID NO: 5756116 - DNA, 25 bp, Homo sapien
ctctaacccatggcggtgaccatgc

SEQ ID NO: 5756117 - DNA, 25 bp, Homo sapien
ccagagtgtggttgtggtggtctga

SEQ ID NO: 5756118 - DNA, 25 bp, Homo sapien
gcagggctctaacccatggcggtga

SEQ ID NO: 5756119 - DNA, 25 bp, Homo sapien
agttcgcacaggacgtccctgctct

SEQ ID NO: 5756120 - DNA, 25 bp, Homo sapien
caaaggtgagcaaaggagaaggttt

SEQ ID NO: 5756121 - DNA, 25 bp, Homo sapien
gaggtcggggggctcctgccgtcgg

SEQ ID NO: 5756122 - DNA, 25 bp, Homo sapien
gcctgtgctggaccgggccttgggc

SEQ ID NO: 5756123 - DNA, 25 bp, Homo sapien
cagattgcgttgctcgctctgtctc

SEQ ID NO: 5756124 - DNA, 25 bp, Homo sapien
ccagcttcatgctgtcgggcagggg

SEQ ID NO: 5756125 - DNA, 25 bp, Homo sapien
ctcggctgtgctcgcgccctctcgc

SEQ ID NO: 5756126 - DNA, 25 bp, Homo sapien
atgtggctggagtggctgaagggcg

SEQ ID NO: 5756127 - DNA, 25 bp, Homo sapien
agagtccggagctgtactcgggcac

SEQ ID NO: 5756128 - DNA, 25 bp, Homo sapien
cgagctgttcttggggaagtcctcc

SEQ ID NO: 5756129 - DNA, 25 bp, Homo sapien
tagagaccctgttaaataggggata

SEQ ID NO: 5756130 - DNA, 25 bp, Homo sapien
gctgaagggcgagatgtggctcagg

SEQ ID NO: 5756131 - DNA, 25 bp, Homo sapien
agggcgggtaggtggtgatggggtg

SEQ ID NO: 5756132 - DNA, 25 bp, Homo sapien
tcgagcagggctctaacccatggcg

SEQ ID NO: 5756133 - DNA, 25 bp, Homo sapien
agagcagagaggaggaggaggcggc

SEQ ID NO: 5756134 - DNA, 25 bp, Homo sapien
cggtcagattgcgttgctcgctctg

SEQ ID NO: 5756135 - DNA, 25 bp, Homo sapien
cacaggtagtgtcccgtgccatctc

SEQ ID NO: 5756136 - DNA, 25 bp, Homo sapien
cagcactagagaccctgttaaatag

SEQ ID NO: 5756137 - DNA, 25 bp, Homo sapien
cggagtccctcctcgggtcacctgg

SEQ ID NO: 5756138 - DNA, 25 bp, Homo sapien
cctccagtgagtcatgcactttttt

SEQ ID NO: 5756139 - DNA, 25 bp, Homo sapien
gtcgaaagggactgcagggactctc

SEQ ID NO: 5756140 - DNA, 25 bp, Homo sapien
cacctggctcccgtggtgggtcgga

SEQ ID NO: 5756141 - DNA, 25 bp, Homo sapien
ctcctcgggtcacctgggtagcgaa

SEQ ID NO: 5756142 - DNA, 25 bp, Homo sapien
caaaaatccaaaaactgggtatggc

SEQ ID NO: 5756143 - DNA, 25 bp, Homo sapien
ggctccacccagggcggtcatgctg

SEQ ID NO: 5756144 - DNA, 25 bp, Homo sapien
tggttgtggtggtctgacagttcgc

SEQ ID NO: 5756145 - DNA, 25 bp, Homo sapien
gagctcctttgcaaagtggcaaaca

SEQ ID NO: 5756146 - DNA, 25 bp, Homo sapien
ggcgggacgtggttgccttgaccgt

SEQ ID NO: 5756147 - DNA, 25 bp, Homo sapien
ggtgcatcggcgtgggcgtggtcag

SEQ ID NO: 5756148 - DNA, 25 bp, Homo sapien
gagctgtactcgggcacgtagggcg

SEQ ID NO: 5756149 - DNA, 25 bp, Homo sapien
ggtcctcagccgctcggaggcggag

SEQ ID NO: 5756150 - DNA, 25 bp, Homo sapien
aagaggtgcgggctggcgtggcccc

SEQ ID NO: 5756151 - DNA, 25 bp, Homo sapien
agggcggtcatgctgccacgggagt

SEQ ID NO: 5756152 - DNA, 25 bp, Homo sapien
ggctgaggcccgggtggtgcgtgtc

SEQ ID NO: 5756153 - DNA, 25 bp, Homo sapien
gtgtccgggtgctgcccgttgagca

SEQ ID NO: 5756154 - DNA, 25 bp, Homo sapien
ccctgcctgtgctggaccgggcctt

SEQ ID NO: 5756155 - DNA, 25 bp, Homo sapien
gttctgtccgttcattttgtgatag

SEQ ID NO: 5756156 - DNA, 25 bp, Homo sapien
gtcagaatggcttattcacagatgg

SEQ ID NO: 5756157 - DNA, 25 bp, Homo sapien
gtcagcatgtggctggagtggctga

SEQ ID NO: 5756158 - DNA, 25 bp, Homo sapien
ggtagcgaagagcagagaggaggag

SEQ ID NO: 5756159 - DNA, 25 bp, Homo sapien
gcaaaaatgcaagtcgaaagggact

SEQ ID NO: 5756160 - DNA, 25 bp, Homo sapien
atgcatcaaacaactgtggccagtg

SEQ ID NO: 5756161 - DNA, 25 bp, Homo sapien
gggcacctggtacttgaggcactct

SEQ ID NO: 5756162 - DNA, 25 bp, Homo sapien
acagccttcgcttgggcttaatgag

SEQ ID NO: 5756163 - DNA, 25 bp, Homo sapien
cagctacccagatgcaataaagtca

SEQ ID NO: 5756164 - DNA, 25 bp, Homo sapien
gttgtaaaaaggggcgacgactctg

SEQ ID NO: 5756165 - DNA, 25 bp, Homo sapien
tgtctggagagggcggccgggttaa

SEQ ID NO: 5756166 - DNA, 25 bp, Homo sapien
atccatcgcgtttaggcttcatgat

SEQ ID NO: 5756167 - DNA, 25 bp, Homo sapien
ctaacccatggcggtgaccatgctg

SEQ ID NO: 5756168 - DNA, 25 bp, Homo sapien
cctggctcccgtggtgggtcggagg

SEQ ID NO: 5756169 - DNA, 25 bp, Homo sapien
ttaaaaagcacatccacctcctccg

SEQ ID NO: 5756170 - DNA, 25 bp, Homo sapien
tcctttgcaaagtggcaaacataat

SEQ ID NO: 5756171 - DNA, 25 bp, Homo sapien
tcaaaaacatatatccatcgcgttt

SEQ ID NO: 5756172 - DNA, 25 bp, Homo sapien
gaggggtcgtttagcaaagagaaga

SEQ ID NO: 5756173 - DNA, 25 bp, Homo sapien
tgaggcactctttctcgtcctgccg

SEQ ID NO: 5756174 - DNA, 25 bp, Homo sapien
cggagggtcgggggtcgttgaatga

SEQ ID NO: 5756175 - DNA, 25 bp, Homo sapien
cagcgggtactgcgccgcgtccatg

SEQ ID NO: 5756176 - DNA, 25 bp, Homo sapien
atgctgtcgggcaggggcacctggt

SEQ ID NO: 5756177 - DNA, 25 bp, Homo sapien
gagaccctgttaaataggggatatg

SEQ ID NO: 5756178 - DNA, 25 bp, Homo sapien
ggtgtggtccaaaggacaggctgga

SEQ ID NO: 5756179 - DNA, 25 bp, Homo sapien
cctgtgagcatcgagcagggctcta

SEQ ID NO: 5756180 - DNA, 25 bp, Homo sapien
aaggaaacaaaactggcagtttgtc

SEQ ID NO: 5756181 - DNA, 25 bp, Homo sapien
ggtagtgtcccgtgccatctcgccg

SEQ ID NO: 5756182 - DNA, 25 bp, Homo sapien
gccacagtggggtcgaggttgcccc

SEQ ID NO: 5756183 - DNA, 25 bp, Homo sapien
ggaggacatgtgtctggagagggcg

SEQ ID NO: 5756184 - DNA, 25 bp, Homo sapien
tcttggagaaggggctgagattcca

SEQ ID NO: 5756185 - DNA, 25 bp, Homo sapien
ttttcacagcactagagaccctgtt

SEQ ID NO: 5756186 - DNA, 25 bp, Homo sapien
cgttgagcacggcggggtggtggtg

SEQ ID NO: 5756187 - DNA, 25 bp, Homo sapien
catcgagcagggctctaacccatgg

SEQ ID NO: 5756188 - DNA, 25 bp, Homo sapien
gtggctgaggcccgggtggtgcgtg

SEQ ID NO: 5756189 - DNA, 25 bp, Homo sapien
cagacctagtttcttcttaatttcc

SEQ ID NO: 5756190 - DNA, 25 bp, Homo sapien
cctggacttgcatccgaagccggtg

SEQ ID NO: 5756191 - DNA, 25 bp, Homo sapien
gttaaataggggatatgagtcagaa

SEQ ID NO: 5756192 - DNA, 25 bp, Homo sapien
ctagacatttttcggtttctggtct

SEQ ID NO: 5756193 - DNA, 25 bp, Homo sapien
ccttccttcttcatagtcaggggtc

SEQ ID NO: 5756194 - DNA, 25 bp, Homo sapien
ttggggaagtcctccagtgagtcat

SEQ ID NO: 5756195 - DNA, 25 bp, Homo sapien
acatatatccatcgcgtttaggctt

SEQ ID NO: 5756196 - DNA, 25 bp, Homo sapien
aaagggactgcagggactctcgctg

SEQ ID NO: 5756197 - DNA, 25 bp, Homo sapien
gatgggtccggggagacgtccttcg

SEQ ID NO: 5756198 - DNA, 25 bp, Homo sapien
ctttctgccttcaaaaacatatatc

SEQ ID NO: 5756199 - DNA, 25 bp, Homo sapien
ctcagccgctcggaggcggagtccc

SEQ ID NO: 5756200 - DNA, 25 bp, Homo sapien
cgttcattttgtgatagagcccgca

SEQ ID NO: 5756201 - DNA, 25 bp, Homo sapien
tcatgatactgctcctgcaaaaatg

SEQ ID NO: 5756202 - DNA, 25 bp, Homo sapien
accacagtgagctcctttgcaaagt

SEQ ID NO: 5756203 - DNA, 25 bp, Homo sapien
cattttttttttttcacagcactag

SEQ ID NO: 5756204 - DNA, 25 bp, Homo sapien
ggcagtttgtccatttgaatatcag

SEQ ID NO: 5756205 - DNA, 25 bp, Homo sapien
cggcgtacgacctgctcggtcagat

SEQ ID NO: 5756206 - DNA, 25 bp, Homo sapien
gaagcaaaggtgagcaaaggagaag

SEQ ID NO: 5756207 - DNA, 25 bp, Homo sapien
agccttcgcttgggcttaatgaggg

SEQ ID NO: 5756208 - DNA, 25 bp, Homo sapien
catggcggtgaccatgctggagggg

SEQ ID NO: 5756209 - DNA, 25 bp, Homo sapien
catccttcatgccttacagctaccc

SEQ ID NO: 5756210 - DNA, 25 bp, Homo sapien
gagtcatgcacttttttgcactttt

SEQ ID NO: 5756211 - DNA, 25 bp, Homo sapien
ggaggcggcggcgtacgacctgctc

SEQ ID NO: 5756212 - DNA, 25 bp, Homo sapien
tctgtccgttcattttgtgatagag

SEQ ID NO: 5756213 - DNA, 25 bp, Homo sapien
ctggctgcagacagccttcgcttgg

SEQ ID NO: 5756214 - DNA, 25 bp, Homo sapien
gggcacgtagggcgggtaggtggtg

SEQ ID NO: 5756215 - DNA, 25 bp, Homo sapien
ttcttcatagtcaggggtctgttaa

SEQ ID NO: 5756216 - DNA, 25 bp, Homo sapien
gcactctttctcgtcctgccgggcc

SEQ ID NO: 5756217 - DNA, 25 bp, Homo sapien
gggctcctgccgtcggagggtcggg

SEQ ID NO: 5756218 - DNA, 25 bp, Homo sapien
gatgcaataaagtcattgtacagta

SEQ ID NO: 5756219 - DNA, 25 bp, Homo sapien
gactctcgctgggggccctgtgagc

SEQ ID NO: 5756220 - DNA, 25 bp, Homo sapien
gtccatgtaggagtggctgaggccc

SEQ ID NO: 5756221 - DNA, 25 bp, Homo sapien
cttaaacttcttggcatccttcatg

SEQ ID NO: 5756222 - DNA, 25 bp, Homo sapien
gctttcggtggggggatgggaaggc

SEQ ID NO: 5756223 - DNA, 25 bp, Homo sapien
attgtgaagcttgtagtagagccca

SEQ ID NO: 5756224 - DNA, 25 bp, Homo sapien
gtcctccagtgagtcatgcactttt

SEQ ID NO: 5756225 - DNA, 25 bp, Homo sapien
cggtcatgctgccacgggagtggga

SEQ ID NO: 5756226 - DNA, 25 bp, Homo sapien
atgatactgctcctgcaaaaatgca

SEQ ID NO: 5756227 - DNA, 25 bp, Homo sapien
caatataagttatatgcaatgttca

SEQ ID NO: 5756228 - DNA, 25 bp, Homo sapien
gggtccccattggcattcctcctcc

SEQ ID NO: 5756229 - DNA, 25 bp, Homo sapien
gtgggggagccgcccagcaggctgc

SEQ ID NO: 5756230 - DNA, 25 bp, Homo sapien
tacagctacccagatgcaataaagt

SEQ ID NO: 5756231 - DNA, 25 bp, Homo sapien
cattggcattcctcctccagagtgt

SEQ ID NO: 5756232 - DNA, 25 bp, Homo sapien
agcaaaggtgagcaaaggagaaggt

SEQ ID NO: 5756233 - DNA, 25 bp, Homo sapien
ccgggtgctgcccgttgagcacggc

SEQ ID NO: 5756234 - DNA, 25 bp, Homo sapien
ggttgccccacagttcacacactcc

SEQ ID NO: 5756235 - DNA, 25 bp, Homo sapien
ggcgggaaggtgaagaggtgcgggc

SEQ ID NO: 5756236 - DNA, 25 bp, Homo sapien
tctgcaccgtggccctgaccgagtt

SEQ ID NO: 5756237 - DNA, 25 bp, Homo sapien
ttgtgatagagcccgcaggcgttgc

SEQ ID NO: 5756238 - DNA, 25 bp, Homo sapien
tcaggggtctgttaatattgtgaag

SEQ ID NO: 5756239 - DNA, 25 bp, Homo sapien
tttttggatttgctagacatttttc

SEQ ID NO: 5756240 - DNA, 25 bp, Homo sapien
ggtcggggggctcctgccgtcggag

SEQ ID NO: 5756241 - DNA, 25 bp, Homo sapien
aaagtggcaaacataattttgcttt

SEQ ID NO: 5756242 - DNA, 25 bp, Homo sapien
caataaagtcattgtacagtatttc

SEQ ID NO: 5756243 - DNA, 25 bp, Homo sapien
ctgcccagggctttgccgccgtcca

SEQ ID NO: 5756244 - DNA, 25 bp, Homo sapien
tggggtccagattcagtggttggaa

SEQ ID NO: 5756245 - DNA, 25 bp, Homo sapien
gtactgcgccgcgtccatgtaggag

SEQ ID NO: 5756246 - DNA, 25 bp, Homo sapien
tcgggcaggggcacctggtacttga

SEQ ID NO: 5756247 - DNA, 25 bp, Homo sapien
ggctggtccgccgtcacctccatgg

SEQ ID NO: 5756248 - DNA, 25 bp, Homo sapien
tgctgggggggaagagtccggagct

SEQ ID NO: 5756249 - DNA, 25 bp, Homo sapien
gacctagtttcttcttaatttccac

SEQ ID NO: 5756250 - DNA, 25 bp, Homo sapien
gttgtggtggtctgacagttcgcac

SEQ ID NO: 5756251 - DNA, 25 bp, Homo sapien
gtcacctccatggcctcggctgtgc

SEQ ID NO: 5756252 - DNA, 25 bp, Homo sapien
gcaggggcacctggtacttgaggca

SEQ ID NO: 5756253 - DNA, 25 bp, Homo sapien
gccttgggcctggacttgcatccga

SEQ ID NO: 5756254 - DNA, 25 bp, Homo sapien
catgtgtctggagagggcggccggg

SEQ ID NO: 5756255 - DNA, 25 bp, Homo sapien
aagtcgaaagggactgcagggactc

SEQ ID NO: 5756256 - DNA, 25 bp, Homo sapien
caccggggtcctcagccgctcggag

SEQ ID NO: 5756257 - DNA, 25 bp, Homo sapien
ggtgggtcgacgaggaggctccacc

SEQ ID NO: 5756258 - DNA, 25 bp, Homo sapien
cgggtggtgcgtgtccgggtgctgc

SEQ ID NO: 5756259 - DNA, 25 bp, Homo sapien
ggctggagtggctgaagggcgagat

SEQ ID NO: 5756260 - DNA, 25 bp, Homo sapien
ggaggggtggtgtggtccaaaggac

SEQ ID NO: 5756261 - DNA, 25 bp, Homo sapien
agggactgcagggactctcgctggg

SEQ ID NO: 5756262 - DNA, 25 bp, Homo sapien
ggcagcgggtactgcgccgcgtcca

SEQ ID NO: 5756263 - DNA, 25 bp, Homo sapien
tctcccatattccttaaacttcttg

SEQ ID NO: 5756264 - DNA, 25 bp, Homo sapien
ctgttcttggggaagtcctccagtg

SEQ ID NO: 5756265 - DNA, 25 bp, Homo sapien
agacagccttcgcttgggcttaatg

SEQ ID NO: 5756266 - DNA, 25 bp, Homo sapien
gacttgcatccgaagccggtggggg

SEQ ID NO: 5756267 - DNA, 25 bp, Homo sapien
tggtgcgtgtccgggtgctgcccgt

SEQ ID NO: 5756268 - DNA, 25 bp, Homo sapien
ccctgttaaataggggatatgagtc

SEQ ID NO: 5756269 - DNA, 25 bp, Homo sapien
aattctgcgagccaggctcctctgc

SEQ ID NO: 5756270 - DNA, 25 bp, Homo sapien
catgctgccacgggagtgggacgac

SEQ ID NO: 5756271 - DNA, 25 bp, Homo sapien
taatgaggggccggttctgtccgtt

SEQ ID NO: 5756272 - DNA, 25 bp, Homo sapien
aggaggctccacccagggcggtcat

SEQ ID NO: 5756273 - DNA, 25 bp, Homo sapien
gcggtgtggtggctgcccagggctt

SEQ ID NO: 5756274 - DNA, 25 bp, Homo sapien
ggctggatggcgggtgcatcggcgt

SEQ ID NO: 5756275 - DNA, 25 bp, Homo sapien
ggtcgttgaatgatttgctttcggt

SEQ ID NO: 5756276 - DNA, 25 bp, Homo sapien
cttcaaaaacatatatccatcgcgt

SEQ ID NO: 5756277 - DNA, 25 bp, Homo sapien
tccttaaacttcttggcatccttca

SEQ ID NO: 5756278 - DNA, 25 bp, Homo sapien
tccggagctgtactcgggcacgtag

SEQ ID NO: 5756279 - DNA, 25 bp, Homo sapien
aggcactctttctcgtcctgccggg

SEQ ID NO: 5756280 - DNA, 25 bp, Homo sapien
aaggggctgagattccagggggagg

SEQ ID NO: 5756281 - DNA, 25 bp, Homo sapien
ttttttttcacagcactagagaccc

SEQ ID NO: 5756282 - DNA, 25 bp, Homo sapien
tttggatttgctagacatttttcgg

SEQ ID NO: 5756283 - DNA, 25 bp, Homo sapien
ggaaggctgggaagcaaaggtgagc

SEQ ID NO: 5756284 - DNA, 25 bp, Homo sapien
tggggtggtgggtcgacgaggaggc

SEQ ID NO: 5756285 - DNA, 25 bp, Homo sapien
cacagtggggtcgaggttgccccac

SEQ ID NO: 5756286 - DNA, 25 bp, Homo sapien
agtggctgaagggcgagatgtggct

SEQ ID NO: 5756287 - DNA, 25 bp, Homo sapien
ccatcgcgtttaggcttcatgatac

SEQ ID NO: 5756288 - DNA, 25 bp, Homo sapien
agtgtggttgtggtggtctgacagt

SEQ ID NO: 5756289 - DNA, 25 bp, Homo sapien
atttttcggtttctggtctggatgc

SEQ ID NO: 5756290 - DNA, 25 bp, Homo sapien
agtccggagctgtactcgggcacgt

SEQ ID NO: 5756291 - DNA, 25 bp, Homo sapien
gaagagtccggagctgtactcgggc

SEQ ID NO: 5756292 - DNA, 25 bp, Homo sapien
gcccacaggcattgcagacagggtc

SEQ ID NO: 5756293 - DNA, 25 bp, Homo sapien
gattccagggggaggcggtgtggtg

SEQ ID NO: 5756294 - DNA, 25 bp, Homo sapien
gggggggaagagtccggagctgtac

SEQ ID NO: 5756295 - DNA, 25 bp, Homo sapien
gagcccacaggcattgcagacaggg

SEQ ID NO: 5756296 - DNA, 25 bp, Homo sapien
cgaggaggctccacccagggcggtc

SEQ ID NO: 5756297 - DNA, 25 bp, Homo sapien
cttcagtgtctaggagactcgtaag

SEQ ID NO: 5756298 - DNA, 25 bp, Homo sapien
cttacgagtctcctagacactgaag

SEQ ID NO: 5756299 - DNA, 25 bp, Homo sapien
gtcttcaactgacgtgttccgactt

SEQ ID NO: 5756300 - DNA, 25 bp, Homo sapien
aagtcggaacacgtcagttgaagac

SEQ ID NO: 5756301 - DNA, 25 bp, Homo sapien
ttcttggagacattccagattgcca

SEQ ID NO: 5756302 - DNA, 25 bp, Homo sapien
gtttttcaagtggctttgctggggt

SEQ ID NO: 5756303 - DNA, 25 bp, Homo sapien
tctaacaatgcgttattccagaact

SEQ ID NO: 5756304 - DNA, 25 bp, Homo sapien
gatatcatcatgctgaatctgatca

SEQ ID NO: 5756305 - DNA, 25 bp, Homo sapien
attttaaacagcgctatgactttaa

SEQ ID NO: 5756306 - DNA, 25 bp, Homo sapien
aaaatgacttttcttggagacattc

SEQ ID NO: 5756307 - DNA, 25 bp, Homo sapien
cattccagattgccatattacttta

SEQ ID NO: 5756308 - DNA, 25 bp, Homo sapien
ggacttctacagagtctgagaagat

SEQ ID NO: 5756309 - DNA, 25 bp, Homo sapien
accaatttttgcaaattagatttaa

SEQ ID NO: 5756310 - DNA, 25 bp, Homo sapien
taagcctattcttccctgatcacat

SEQ ID NO: 5756311 - DNA, 25 bp, Homo sapien
tcttcagaataatttactgtatgtg

SEQ ID NO: 5756312 - DNA, 25 bp, Homo sapien
tattgtataatatctacatttggag

SEQ ID NO: 5756313 - DNA, 25 bp, Homo sapien
ttgatctgtaaaaacttctttaatc

SEQ ID NO: 5756314 - DNA, 25 bp, Homo sapien
acccgggaggcagaggttgcagtaa

SEQ ID NO: 5756315 - DNA, 25 bp, Homo sapien
tgcgcgggaggcaaatgaagataaa

SEQ ID NO: 5756316 - DNA, 25 bp, Homo sapien
aagatatcatcatgctgaatctgat

SEQ ID NO: 5756317 - DNA, 25 bp, Homo sapien
aagataatggcctgcattttattgg

SEQ ID NO: 5756318 - DNA, 25 bp, Homo sapien
gtacagtggccctcagattctcagc

SEQ ID NO: 5756319 - DNA, 25 bp, Homo sapien
caggagttgcttttgtacagtggcc

SEQ ID NO: 5756320 - DNA, 25 bp, Homo sapien
gtaatcctagcagtttgggaggctg

SEQ ID NO: 5756321 - DNA, 25 bp, Homo sapien
tcttacaacagcattattttctgtg

SEQ ID NO: 5756322 - DNA, 25 bp, Homo sapien
aagatattttagtgcttcaagactg

SEQ ID NO: 5756323 - DNA, 25 bp, Homo sapien
attccatcagggatctatactcttc

SEQ ID NO: 5756324 - DNA, 25 bp, Homo sapien
atgtcagtgacagaacaaaatgact

SEQ ID NO: 5756325 - DNA, 25 bp, Homo sapien
atttgtgtgtaattgccattaaatt

SEQ ID NO: 5756326 - DNA, 25 bp, Homo sapien
cacgtatcagttgaaaattcttaca

SEQ ID NO: 5756327 - DNA, 25 bp, Homo sapien
atcaaatctagatgcagctacttat

SEQ ID NO: 5756328 - DNA, 25 bp, Homo sapien
gtataatatctacatttggagaatt

SEQ ID NO: 5756329 - DNA, 25 bp, Homo sapien
gaagatttttttaggtctctcataa

SEQ ID NO: 5756330 - DNA, 25 bp, Homo sapien
tgaaaccccgtctctaccaaaaata

SEQ ID NO: 5756331 - DNA, 25 bp, Homo sapien
tcacaaggtcaagagattgagacta

SEQ ID NO: 5756332 - DNA, 25 bp, Homo sapien
tggtagccagagaattttatagtaa

SEQ ID NO: 5756333 - DNA, 25 bp, Homo sapien
acattaatcttgcacagaggacttc

SEQ ID NO: 5756334 - DNA, 25 bp, Homo sapien
tccctttctgtgttcacacaagagc

SEQ ID NO: 5756335 - DNA, 25 bp, Homo sapien
tgttcacacaagagctgctgagaag

SEQ ID NO: 5756336 - DNA, 25 bp, Homo sapien
cagtggctgtccctagtaattttga

SEQ ID NO: 5756337 - DNA, 25 bp, Homo sapien
cattcaaacaaatagtacagatgtc

SEQ ID NO: 5756338 - DNA, 25 bp, Homo sapien
ttatcagagatttttatatttatac

SEQ ID NO: 5756339 - DNA, 25 bp, Homo sapien
ctagtaattttgatgacaggagttg

SEQ ID NO: 5756340 - DNA, 25 bp, Homo sapien
gctgcgcgggaggcaaatgaagata

SEQ ID NO: 5756341 - DNA, 25 bp, Homo sapien
gaactttcagctggttctcaatttg

SEQ ID NO: 5756342 - DNA, 25 bp, Homo sapien
gctcagccggtcgagctgcgcggga

SEQ ID NO: 5756343 - DNA, 25 bp, Homo sapien
aatattcagcttgtgtctttttcct

SEQ ID NO: 5756344 - DNA, 25 bp, Homo sapien
cgtaggacccagcggactcggcagc

SEQ ID NO: 5756345 - DNA, 25 bp, Homo sapien
tggccctcagattctcagcttgatt

SEQ ID NO: 5756346 - DNA, 25 bp, Homo sapien
tacatactatttctccatatgaatt

SEQ ID NO: 5756347 - DNA, 25 bp, Homo sapien
tcagttgaaaattcttacaacagca

SEQ ID NO: 5756348 - DNA, 25 bp, Homo sapien
ctgtagtcccagctactcgggagac

SEQ ID NO: 5756349 - DNA, 25 bp, Homo sapien
acagagtctgagaagatatcatcat

SEQ ID NO: 5756350 - DNA, 25 bp, Homo sapien
accaacatggtgaaaccccgtctct

SEQ ID NO: 5756351 - DNA, 25 bp, Homo sapien
tcaagactgctgaaagcaatccagt

SEQ ID NO: 5756352 - DNA, 25 bp, Homo sapien
tttccagggattaggattagaagga

SEQ ID NO: 5756353 - DNA, 25 bp, Homo sapien
ctttgcaagagcacacaacaaatgt

SEQ ID NO: 5756354 - DNA, 25 bp, Homo sapien
tcagcggtcgcgtaggacccagcgg

SEQ ID NO: 5756355 - DNA, 25 bp, Homo sapien
aacaatcagtgtggataagaaatat

SEQ ID NO: 5756356 - DNA, 25 bp, Homo sapien
cgtatcagttgaaaattcttacaac

SEQ ID NO: 5756357 - DNA, 25 bp, Homo sapien
aatattagaggaaacttgaaatctg

SEQ ID NO: 5756358 - DNA, 25 bp, Homo sapien
ttcagaataatttactgtatgtggc

SEQ ID NO: 5756359 - DNA, 25 bp, Homo sapien
gagctgaaccgcggcccccggtggt

SEQ ID NO: 5756360 - DNA, 25 bp, Homo sapien
gacattccagattgccatattactt

SEQ ID NO: 5756361 - DNA, 25 bp, Homo sapien
cttaataaacctatggaaacactta

SEQ ID NO: 5756362 - DNA, 25 bp, Homo sapien
aaatgaacattttactcattgatct

SEQ ID NO: 5756363 - DNA, 25 bp, Homo sapien
atagtaatggaggttagcccttaat

SEQ ID NO: 5756364 - DNA, 25 bp, Homo sapien
acttgaacccgggaggcagaggttg

SEQ ID NO: 5756365 - DNA, 25 bp, Homo sapien
ttgaaaattcttacaacagcattat

SEQ ID NO: 5756366 - DNA, 25 bp, Homo sapien
tggaaacacttaaacttgctattcc

SEQ ID NO: 5756367 - DNA, 25 bp, Homo sapien
ttactaaatgaaggattgctaaatg

SEQ ID NO: 5756368 - DNA, 25 bp, Homo sapien
cttgctattccatcagggatctata

SEQ ID NO: 5756369 - DNA, 25 bp, Homo sapien
acaaaacaatcagtgtggataagaa

SEQ ID NO: 5756370 - DNA, 25 bp, Homo sapien
cataagcctattcttccctgatcac

SEQ ID NO: 5756371 - DNA, 25 bp, Homo sapien
tcacgccactgcactccaacctggg

SEQ ID NO: 5756372 - DNA, 25 bp, Homo sapien
cgttatctatcttctacagcagtgg

SEQ ID NO: 5756373 - DNA, 25 bp, Homo sapien
catgctgaatctgatcatactgttt

SEQ ID NO: 5756374 - DNA, 25 bp, Homo sapien
gaaatattcagcttgtgtctttttc

SEQ ID NO: 5756375 - DNA, 25 bp, Homo sapien
tttacctttttgattgctgcagaaa

SEQ ID NO: 5756376 - DNA, 25 bp, Homo sapien
tggtctacaaagacagcaaatgtag

SEQ ID NO: 5756377 - DNA, 25 bp, Homo sapien
cactatcaaatctagatgcagctac

SEQ ID NO: 5756378 - DNA, 25 bp, Homo sapien
attataattacctataaagctgtga

SEQ ID NO: 5756379 - DNA, 25 bp, Homo sapien
ggcggagctgaaccgcggcccccgg

SEQ ID NO: 5756380 - DNA, 25 bp, Homo sapien
agaaggaatattagaggaaacttga

SEQ ID NO: 5756381 - DNA, 25 bp, Homo sapien
tggcgcagtggctcacgcctgtaat

SEQ ID NO: 5756382 - DNA, 25 bp, Homo sapien
gtacagatatatcaaatcacatgaa

SEQ ID NO: 5756383 - DNA, 25 bp, Homo sapien
tttccctgggaattttggtctttca

SEQ ID NO: 5756384 - DNA, 25 bp, Homo sapien
ctgtgtctatgcttagtaaaaaatt

SEQ ID NO: 5756385 - DNA, 25 bp, Homo sapien
gaggcaggagaatcacttgaacccg

SEQ ID NO: 5756386 - DNA, 25 bp, Homo sapien
ctccatatgaattttaagatatttt

SEQ ID NO: 5756387 - DNA, 25 bp, Homo sapien
ccggcggagctgaaccgcggccccc

SEQ ID NO: 5756388 - DNA, 25 bp, Homo sapien
ggaatattagaggaaacttgaaatc

SEQ ID NO: 5756389 - DNA, 25 bp, Homo sapien
ttatagtaatggaggttagccctta

SEQ ID NO: 5756390 - DNA, 25 bp, Homo sapien
gctgcgggtcagcggtcgcgtagga

SEQ ID NO: 5756391 - DNA, 25 bp, Homo sapien
ttttaagatattttagtgcttcaag

SEQ ID NO: 5756392 - DNA, 25 bp, Homo sapien
gccactgcactccaacctgggcgac

SEQ ID NO: 5756393 - DNA, 25 bp, Homo sapien
ctgaggcaggagaatcacttgaacc

SEQ ID NO: 5756394 - DNA, 25 bp, Homo sapien
ggataagaaatattcagcttgtgtc

SEQ ID NO: 5756395 - DNA, 25 bp, Homo sapien
ttagaggaaacttgaaatctgagtt

SEQ ID NO: 5756396 - DNA, 25 bp, Homo sapien
ctgtaatcctagcagtttgggaggc

SEQ ID NO: 5756397 - DNA, 25 bp, Homo sapien
tcagggatctatactcttcagaata

SEQ ID NO: 5756398 - DNA, 25 bp, Homo sapien
ataaaacaatgttcgccaacctaaa

SEQ ID NO: 5756399 - DNA, 25 bp, Homo sapien
tcgggagactgaggcaggagaatca

SEQ ID NO: 5756400 - DNA, 25 bp, Homo sapien
cagaggacttctacagagtctgaga

SEQ ID NO: 5756401 - DNA, 25 bp, Homo sapien
gggagactgaggcaggagaatcact

SEQ ID NO: 5756402 - DNA, 25 bp, Homo sapien
ttttcttggagacattccagattgc

SEQ ID NO: 5756403 - DNA, 25 bp, Homo sapien
agtctgagaagatatcatcatgctg

SEQ ID NO: 5756404 - DNA, 25 bp, Homo sapien
gactcggcagcctggggcgcccggc

SEQ ID NO: 5756405 - DNA, 25 bp, Homo sapien
ggagaggtagccaaattttgaattc

SEQ ID NO: 5756406 - DNA, 25 bp, Homo sapien
cagagatttttatatttatacaaaa

SEQ ID NO: 5756407 - DNA, 25 bp, Homo sapien
taacaatgcgttattccagaacttt

SEQ ID NO: 5756408 - DNA, 25 bp, Homo sapien
agctggttctcaatttgtaggactc

SEQ ID NO: 5756409 - DNA, 25 bp, Homo sapien
ttctcaatttgtaggactcatggca

SEQ ID NO: 5756410 - DNA, 25 bp, Homo sapien
acagatatatcaaatcacatgaaat

SEQ ID NO: 5756411 - DNA, 25 bp, Homo sapien
gcacgcacctgtagtcccagctact

SEQ ID NO: 5756412 - DNA, 25 bp, Homo sapien
ttgtacagtggccctcagattctca

SEQ ID NO: 5756413 - DNA, 25 bp, Homo sapien
aggtcacgtatcagttgaaaattct

SEQ ID NO: 5756414 - DNA, 25 bp, Homo sapien
aatcccactaaagcatagttgtata

SEQ ID NO: 5756415 - DNA, 25 bp, Homo sapien
actccaacctgggcgacacagtgag

SEQ ID NO: 5756416 - DNA, 25 bp, Homo sapien
gagatcacgccactgcactccaacc

SEQ ID NO: 5756417 - DNA, 25 bp, Homo sapien
ctgtatacagttagaaagttattaa

SEQ ID NO: 5756418 - DNA, 25 bp, Homo sapien
atctgtcagagaataaatatcaaat

SEQ ID NO: 5756419 - DNA, 25 bp, Homo sapien
ataaaaattaatattctgggtctga

SEQ ID NO: 5756420 - DNA, 25 bp, Homo sapien
tgcgttattccagaactttaaaaga

SEQ ID NO: 5756421 - DNA, 25 bp, Homo sapien
tgtgttcacacaagagctgctgaga

SEQ ID NO: 5756422 - DNA, 25 bp, Homo sapien
catttcacttatcagagatttttat

SEQ ID NO: 5756423 - DNA, 25 bp, Homo sapien
cactaggaatctcgacattaatctt

SEQ ID NO: 5756424 - DNA, 25 bp, Homo sapien
ttgtgtctttttccttggagccatc

SEQ ID NO: 5756425 - DNA, 25 bp, Homo sapien
cttcaagactgctgaaagcaatcca

SEQ ID NO: 5756426 - DNA, 25 bp, Homo sapien
ccagagaattttatagtaatggagg

SEQ ID NO: 5756427 - DNA, 25 bp, Homo sapien
gtgctagatggtagccagagaattt

SEQ ID NO: 5756428 - DNA, 25 bp, Homo sapien
atgatcccaaacctgcaggaaatcc

SEQ ID NO: 5756429 - DNA, 25 bp, Homo sapien
gattactaaatgaaggattgctaaa

SEQ ID NO: 5756430 - DNA, 25 bp, Homo sapien
acttttcttggagacattccagatt

SEQ ID NO: 5756431 - DNA, 25 bp, Homo sapien
gtatgtggcactatcaaatctagat

SEQ ID NO: 5756432 - DNA, 25 bp, Homo sapien
taaggaactttcagctggttctcaa

SEQ ID NO: 5756433 - DNA, 25 bp, Homo sapien
gtagtcccagctactcgggagactg

SEQ ID NO: 5756434 - DNA, 25 bp, Homo sapien
gcttttgtacagtggccctcagatt

SEQ ID NO: 5756435 - DNA, 25 bp, Homo sapien
ctcacagcatgtttttcaagtggct

SEQ ID NO: 5756436 - DNA, 25 bp, Homo sapien
agtaatggaggttagcccttaatct

SEQ ID NO: 5756437 - DNA, 25 bp, Homo sapien
tttcacttatcagagatttttatat

SEQ ID NO: 5756438 - DNA, 25 bp, Homo sapien
ctgctgagaaggcctggcgcagtgg

SEQ ID NO: 5756439 - DNA, 25 bp, Homo sapien
aggataagatatgtgtatatgtaac

SEQ ID NO: 5756440 - DNA, 25 bp, Homo sapien
tgaattttaagatattttagtgctt

SEQ ID NO: 5756441 - DNA, 25 bp, Homo sapien
agctgctgagaaggcctggcgcagt

SEQ ID NO: 5756442 - DNA, 25 bp, Homo sapien
tttaactggtttttcacgatggggc

SEQ ID NO: 5756443 - DNA, 25 bp, Homo sapien
agggatctatactcttcagaataat

SEQ ID NO: 5756444 - DNA, 25 bp, Homo sapien
tagatgcagctacttatcaggtcac

SEQ ID NO: 5756445 - DNA, 25 bp, Homo sapien
cgggaggcaaatgaagataaaacaa

SEQ ID NO: 5756446 - DNA, 25 bp, Homo sapien
agtgcttcaagactgctgaaagcaa

SEQ ID NO: 5756447 - DNA, 25 bp, Homo sapien
cctcagattctcagcttgattctaa

SEQ ID NO: 5756448 - DNA, 25 bp, Homo sapien
agattctcagcttgattctaaggaa

SEQ ID NO: 5756449 - DNA, 25 bp, Homo sapien
acgcctgtaatcctagcagtttggg

SEQ ID NO: 5756450 - DNA, 25 bp, Homo sapien
aggaaatcccactaaagcatagttg

SEQ ID NO: 5756451 - DNA, 25 bp, Homo sapien
ctgcaggaaatcccactaaagcata

SEQ ID NO: 5756452 - DNA, 25 bp, Homo sapien
accagtggctgtccctagtaatttt

SEQ ID NO: 5756453 - DNA, 25 bp, Homo sapien
gtaattgccattaaattttcaaaat

SEQ ID NO: 5756454 - DNA, 25 bp, Homo sapien
ttgcatttcatttctgtaaatcaga

SEQ ID NO: 5756455 - DNA, 25 bp, Homo sapien
gctgcaccgagctggcggtggctac

SEQ ID NO: 5756456 - DNA, 25 bp, Homo sapien
gggtgtataccagtggctgtcccta

SEQ ID NO: 5756457 - DNA, 25 bp, Homo sapien
aaagtatttccagggattaggatta

SEQ ID NO: 5756458 - DNA, 25 bp, Homo sapien
aaattaatattctgggtctgatctg

SEQ ID NO: 5756459 - DNA, 25 bp, Homo sapien
cagaataatttactgtatgtggcac

SEQ ID NO: 5756460 - DNA, 25 bp, Homo sapien
tctttaactggtttttcacgatggg

SEQ ID NO: 5756461 - DNA, 25 bp, Homo sapien
tgaaagtatttccagggattaggat

SEQ ID NO: 5756462 - DNA, 25 bp, Homo sapien
agatatgtgtatatgtaacaaaaca

SEQ ID NO: 5756463 - DNA, 25 bp, Homo sapien
ctcattgatctgtaaaaacttcttt

SEQ ID NO: 5756464 - DNA, 25 bp, Homo sapien
tgattgctgcagaaatgtcctatgc

SEQ ID NO: 5756465 - DNA, 25 bp, Homo sapien
tataattacctataaagctgtgaaa

SEQ ID NO: 5756466 - DNA, 25 bp, Homo sapien
ttttcacgatggggcactaggaatc

SEQ ID NO: 5756467 - DNA, 25 bp, Homo sapien
gcggtggctacggcgacgggagccg

SEQ ID NO: 5756468 - DNA, 25 bp, Homo sapien
cactctttgcaagagcacacaacaa

SEQ ID NO: 5756469 - DNA, 25 bp, Homo sapien
agccggtcgagctgcgcgggaggca

SEQ ID NO: 5756470 - DNA, 25 bp, Homo sapien
ggattgctaaatgtttttggttcaa

SEQ ID NO: 5756471 - DNA, 25 bp, Homo sapien
ttaaatgtttttatcttactctttc

SEQ ID NO: 5756472 - DNA, 25 bp, Homo sapien
ggtggtgggctcagccggtcgagct

SEQ ID NO: 5756473 - DNA, 25 bp, Homo sapien
tgaacttttgaagataatggcctgc

SEQ ID NO: 5756474 - DNA, 25 bp, Homo sapien
gtatactatctttaactggtttttc

SEQ ID NO: 5756475 - DNA, 25 bp, Homo sapien
attattttctgtgtctatgcttagt

SEQ ID NO: 5756476 - DNA, 25 bp, Homo sapien
gaaaattcttacaacagcattattt

SEQ ID NO: 5756477 - DNA, 25 bp, Homo sapien
gtctttttccttggagccatccttg

SEQ ID NO: 5756478 - DNA, 25 bp, Homo sapien
tatcatcatgctgaatctgatcata

SEQ ID NO: 5756479 - DNA, 25 bp, Homo sapien
tggagatcacgccactgcactccaa

SEQ ID NO: 5756480 - DNA, 25 bp, Homo sapien
caaacaaatagtacagatgtcagtg

SEQ ID NO: 5756481 - DNA, 25 bp, Homo sapien
atcagagatttttatatttatacaa

SEQ ID NO: 5756482 - DNA, 25 bp, Homo sapien
aatttgaaaaaacatttcacttatc

SEQ ID NO: 5756483 - DNA, 25 bp, Homo sapien
tctgggtctgatctgtcagagaata

SEQ ID NO: 5756484 - DNA, 25 bp, Homo sapien
gtttttatcttactctttctgtaca

SEQ ID NO: 5756485 - DNA, 25 bp, Homo sapien
ccatccttgtaataacagctacttt

SEQ ID NO: 5756486 - DNA, 25 bp, Homo sapien
ttacataaaaattaatattctgggt

SEQ ID NO: 5756487 - DNA, 25 bp, Homo sapien
agccaaattttgaattccctttctg

SEQ ID NO: 5756488 - DNA, 25 bp, Homo sapien
tctgtaaaaacttctttaatctaca

SEQ ID NO: 5756489 - DNA, 25 bp, Homo sapien
ctctttctgtacagatatatcaaat

SEQ ID NO: 5756490 - DNA, 25 bp, Homo sapien
atcagtgtggataagaaatattcag

SEQ ID NO: 5756491 - DNA, 25 bp, Homo sapien
ccagattgccatattactttatttt

SEQ ID NO: 5756492 - DNA, 25 bp, Homo sapien
ttagctgggtgtggtggcacgcacc

SEQ ID NO: 5756493 - DNA, 25 bp, Homo sapien
ccagctactcgggagactgaggcag

SEQ ID NO: 5756494 - DNA, 25 bp, Homo sapien
gctgaaagcaatccagttgctcctg

SEQ ID NO: 5756495 - DNA, 25 bp, Homo sapien
aatcagattaagtccttaatattat

SEQ ID NO: 5756496 - DNA, 25 bp, Homo sapien
aacttgctattccatcagggatcta

SEQ ID NO: 5756497 - DNA, 25 bp, Homo sapien
gaagaaggacctcgttatctatctt

SEQ ID NO: 5756498 - DNA, 25 bp, Homo sapien
ccatattactttattttaaacagcg

SEQ ID NO: 5756499 - DNA, 25 bp, Homo sapien
gtctctaccaaaaatacaaaaatta

SEQ ID NO: 5756500 - DNA, 25 bp, Homo sapien
tcagataccaatttttgcaaattag

SEQ ID NO: 5756501 - DNA, 25 bp, Homo sapien
actaccagtttggttctaacaatgc

SEQ ID NO: 5756502 - DNA, 25 bp, Homo sapien
gcatgtttttcaagtggctttgctg

SEQ ID NO: 5756503 - DNA, 25 bp, Homo sapien
tggttctaacaatgcgttattccag

SEQ ID NO: 5756504 - DNA, 25 bp, Homo sapien
tttaaacagcgctatgactttaaat

SEQ ID NO: 5756505 - DNA, 25 bp, Homo sapien
tccaacctgggcgacacagtgagag

SEQ ID NO: 5756506 - DNA, 25 bp, Homo sapien
tagtctaagagcactgaatcgagta

SEQ ID NO: 5756507 - DNA, 25 bp, Homo sapien
tagagatacatactatttctccata

SEQ ID NO: 5756508 - DNA, 25 bp, Homo sapien
agccggcggcgctgcgggtcagcgg

SEQ ID NO: 5756509 - DNA, 25 bp, Homo sapien
aaagaaacaaaacaatcagtgtgga

SEQ ID NO: 5756510 - DNA, 25 bp, Homo sapien
atattactttattttaaacagcgct

SEQ ID NO: 5756511 - DNA, 25 bp, Homo sapien
cgcgggaggcaaatgaagataaaac

SEQ ID NO: 5756512 - DNA, 25 bp, Homo sapien
tgaccaacatggtgaaaccccgtct

SEQ ID NO: 5756513 - DNA, 25 bp, Homo sapien
ttttatcttactctttctgtacaga

SEQ ID NO: 5756514 - DNA, 25 bp, Homo sapien
tgctaaatgtttttggttcaattac

SEQ ID NO: 5756515 - DNA, 25 bp, Homo sapien
caccgagctggcggtggctacggcg

SEQ ID NO: 5756516 - DNA, 25 bp, Homo sapien
aataacagctacttttttgtatggt

SEQ ID NO: 5756517 - DNA, 25 bp, Homo sapien
agccagagaattttatagtaatgga

SEQ ID NO: 5756518 - DNA, 25 bp, Homo sapien
cacttaaacttgctattccatcagg

SEQ ID NO: 5756519 - DNA, 25 bp, Homo sapien
tttgattgctgcagaaatgtcctat

SEQ ID NO: 5756520 - DNA, 25 bp, Homo sapien
ataatttactgtatgtggcactatc

SEQ ID NO: 5756521 - DNA, 25 bp, Homo sapien
gttagcccttaatctcttcattgca

SEQ ID NO: 5756522 - DNA, 25 bp, Homo sapien
acaacattcaaacaaatagtacaga

SEQ ID NO: 5756523 - DNA, 25 bp, Homo sapien
tgcgggtcagcggtcgcgtaggacc

SEQ ID NO: 5756524 - DNA, 25 bp, Homo sapien
catactatttctccatatgaatttt

SEQ ID NO: 5756525 - DNA, 25 bp, Homo sapien
gacagaacaaaatgacttttcttgg

SEQ ID NO: 5756526 - DNA, 25 bp, Homo sapien
aattttgaattccctttctgtgttc

SEQ ID NO: 5756527 - DNA, 25 bp, Homo sapien
agctactcgggagactgaggcagga

SEQ ID NO: 5756528 - DNA, 25 bp, Homo sapien
ttaatctcttcattgcatttcattt

SEQ ID NO: 5756529 - DNA, 25 bp, Homo sapien
tgctattccatcagggatctatact

SEQ ID NO: 5756530 - DNA, 25 bp, Homo sapien
tatgaattttaagatattttagtgc

SEQ ID NO: 5756531 - DNA, 25 bp, Homo sapien
ctatttctccatatgaattttaaga

SEQ ID NO: 5756532 - DNA, 25 bp, Homo sapien
agcttgattctaaggaactttcagc

SEQ ID NO: 5756533 - DNA, 25 bp, Homo sapien
aaaaaattgggtgtataccagtggc

SEQ ID NO: 5756534 - DNA, 25 bp, Homo sapien
gctcctgtgctagatggtagccaga

SEQ ID NO: 5756535 - DNA, 25 bp, Homo sapien
gagattgagactatcctgaccaaca

SEQ ID NO: 5756536 - DNA, 25 bp, Homo sapien
cctggggcgcccggcggagctgaac

SEQ ID NO: 5756537 - DNA, 25 bp, Homo sapien
gcagcctggggcgcccggcggagct

SEQ ID NO: 5756538 - DNA, 25 bp, Homo sapien
ttttatagtaatggaggttagccct

SEQ ID NO: 5756539 - DNA, 25 bp, Homo sapien
ctcgttatctatcttctacagcagt

SEQ ID NO: 5756540 - DNA, 25 bp, Homo sapien
ttttgtatggttatgatcccaaacc

SEQ ID NO: 5756541 - DNA, 25 bp, Homo sapien
gttattaaatgaacattttactcat

SEQ ID NO: 5756542 - DNA, 25 bp, Homo sapien
tctttcagactaccagtttggttct

SEQ ID NO: 5756543 - DNA, 25 bp, Homo sapien
tggggcgcccggcggagctgaaccg

SEQ ID NO: 5756544 - DNA, 25 bp, Homo sapien
aaaaaacatttcacttatcagagat

SEQ ID NO: 5756545 - DNA, 25 bp, Homo sapien
agatgtcagtgacagaacaaaatga

SEQ ID NO: 5756546 - DNA, 25 bp, Homo sapien
tattttagtgcttcaagactgctga

SEQ ID NO: 5756547 - DNA, 25 bp, Homo sapien
atggaggttagcccttaatctcttc

SEQ ID NO: 5756548 - DNA, 25 bp, Homo sapien
agcatatactgtatacagttagaaa

SEQ ID NO: 5756549 - DNA, 25 bp, Homo sapien
attccctttctgtgttcacacaaga

SEQ ID NO: 5756550 - DNA, 25 bp, Homo sapien
gtgtctatgcttagtaaaaaattgg

SEQ ID NO: 5756551 - DNA, 25 bp, Homo sapien
gtaaaaaattgggtgtataccagtg

SEQ ID NO: 5756552 - DNA, 25 bp, Homo sapien
cttccctgatcacatgagtgggaga

SEQ ID NO: 5756553 - DNA, 25 bp, Homo sapien
acttctacagagtctgagaagatat

SEQ ID NO: 5756554 - DNA, 25 bp, Homo sapien
ggcactatcaaatctagatgcagct

SEQ ID NO: 5756555 - DNA, 25 bp, Homo sapien
atctgatcatactgttttttaaaag

SEQ ID NO: 5756556 - DNA, 25 bp, Homo sapien
atctatactcttcagaataatttac

SEQ ID NO: 5756557 - DNA, 25 bp, Homo sapien
actttaaatccaaggctgctcggaa

SEQ ID NO: 5756558 - DNA, 25 bp, Homo sapien
ccctagtaattttgatgacaggagt

SEQ ID NO: 5756559 - DNA, 25 bp, Homo sapien
tcagattctcagcttgattctaagg

SEQ ID NO: 5756560 - DNA, 25 bp, Homo sapien
aatgtagagatacatactatttctc

SEQ ID NO: 5756561 - DNA, 25 bp, Homo sapien
tcccagctactcgggagactgaggc

SEQ ID NO: 5756562 - DNA, 25 bp, Homo sapien
aactatcaagcatatactgtataca

SEQ ID NO: 5756563 - DNA, 25 bp, Homo sapien
atcttctacagcagtggttgttgct

SEQ ID NO: 5756564 - DNA, 25 bp, Homo sapien
aggaatctcgacattaatcttgcac

SEQ ID NO: 5756565 - DNA, 25 bp, Homo sapien
cggtcgcgtaggacccagcggactc

SEQ ID NO: 5756566 - DNA, 25 bp, Homo sapien
tttaatctacaactgtttacaaaaa

SEQ ID NO: 5756567 - DNA, 25 bp, Homo sapien
tcagcttgattctaaggaactttca

SEQ ID NO: 5756568 - DNA, 25 bp, Homo sapien
ttgtatactatctttaactggtttt

SEQ ID NO: 5756569 - DNA, 25 bp, Homo sapien
acctgtagtcccagctactcgggag

SEQ ID NO: 5756570 - DNA, 25 bp, Homo sapien
tgtaaaaacttctttaatctacaac

SEQ ID NO: 5756571 - DNA, 25 bp, Homo sapien
gtgtaattgccattaaattttcaaa

SEQ ID NO: 5756572 - DNA, 25 bp, Homo sapien
aacacttaaacttgctattccatca

SEQ ID NO: 5756573 - DNA, 25 bp, Homo sapien
ttctccatatgaattttaagatatt

SEQ ID NO: 5756574 - DNA, 25 bp, Homo sapien
gaaacttgaaatctgagtttaaaaa

SEQ ID NO: 5756575 - DNA, 25 bp, Homo sapien
gacacagtgagagtctgtctcaaaa

SEQ ID NO: 5756576 - DNA, 25 bp, Homo sapien
cttgcacagaggacttctacagagt

SEQ ID NO: 5756577 - DNA, 25 bp, Homo sapien
ttcatttctgtaaatcagattaagt

SEQ ID NO: 5756578 - DNA, 25 bp, Homo sapien
ataagaaatattcagcttgtgtctt

SEQ ID NO: 5756579 - DNA, 25 bp, Homo sapien
gattgagactatcctgaccaacatg

SEQ ID NO: 5756580 - DNA, 25 bp, Homo sapien
ctatcaagcatatactgtatacagt

SEQ ID NO: 5756581 - DNA, 25 bp, Homo sapien
ctaggaatctcgacattaatcttgc

SEQ ID NO: 5756582 - DNA, 25 bp, Homo sapien
cttctttaatctacaactgtttaca

SEQ ID NO: 5756583 - DNA, 25 bp, Homo sapien
ttaggtctctcataagcctattctt

SEQ ID NO: 5756584 - DNA, 25 bp, Homo sapien
attttactcattgatctgtaaaaac

SEQ ID NO: 5756585 - DNA, 25 bp, Homo sapien
agtcccagctactcgggagactgag

SEQ ID NO: 5756586 - DNA, 25 bp, Homo sapien
ggaggcaaatgaagataaaacaatg

SEQ ID NO: 5756587 - DNA, 25 bp, Homo sapien
ttctgtgtctatgcttagtaaaaaa

SEQ ID NO: 5756588 - DNA, 25 bp, Homo sapien
gatcccaaacctgcaggaaatccca

SEQ ID NO: 5756589 - DNA, 25 bp, Homo sapien
acaacagcattattttctgtgtcta

SEQ ID NO: 5756590 - DNA, 25 bp, Homo sapien
aagcatagttgtatactatctttaa

SEQ ID NO: 5756591 - DNA, 25 bp, Homo sapien
ccgagctggcggtggctacggcgac

SEQ ID NO: 5756592 - DNA, 25 bp, Homo sapien
ccccggtggtgggctcagccggtcg

SEQ ID NO: 5756593 - DNA, 25 bp, Homo sapien
ttgccattaaattttcaaaatgtaa

SEQ ID NO: 5756594 - DNA, 25 bp, Homo sapien
aatcttattaaatgtttttatctta

SEQ ID NO: 5756595 - DNA, 25 bp, Homo sapien
tcagctggttctcaatttgtaggac

SEQ ID NO: 5756596 - DNA, 25 bp, Homo sapien
caacctgggcgacacagtgagagtc

SEQ ID NO: 5756597 - DNA, 25 bp, Homo sapien
agttgaaaattcttacaacagcatt

SEQ ID NO: 5756598 - DNA, 25 bp, Homo sapien
cacgatggggcactaggaatctcga

SEQ ID NO: 5756599 - DNA, 25 bp, Homo sapien
aacattcaaacaaatagtacagatg

SEQ ID NO: 5756600 - DNA, 25 bp, Homo sapien
atgtggcactatcaaatctagatgc

SEQ ID NO: 5756601 - DNA, 25 bp, Homo sapien
attattgtataatatctacatttgg

SEQ ID NO: 5756602 - DNA, 25 bp, Homo sapien
aaatgaagataaaacaatgttcgcc

SEQ ID NO: 5756603 - DNA, 25 bp, Homo sapien
gtgtctttttccttggagccatcct

SEQ ID NO: 5756604 - DNA, 25 bp, Homo sapien
tgagaagatatcatcatgctgaatc

SEQ ID NO: 5756605 - DNA, 25 bp, Homo sapien
caaggctgctcggaagattttttta

SEQ ID NO: 5756606 - DNA, 25 bp, Homo sapien
tccctgggaattttggtctttcaga

SEQ ID NO: 5756607 - DNA, 25 bp, Homo sapien
aacaaatgtcagataccaatttttg

SEQ ID NO: 5756608 - DNA, 25 bp, Homo sapien
tcagattaagtccttaatattattt

SEQ ID NO: 5756609 - DNA, 25 bp, Homo sapien
aacttttgaagataatggcctgcat

SEQ ID NO: 5756610 - DNA, 25 bp, Homo sapien
ctgtgctagatggtagccagagaat

SEQ ID NO: 5756611 - DNA, 25 bp, Homo sapien
cggcgctgcgggtcagcggtcgcgt

SEQ ID NO: 5756612 - DNA, 25 bp, Homo sapien
cgcgtaggacccagcggactcggca

SEQ ID NO: 5756613 - DNA, 25 bp, Homo sapien
agtggccctcagattctcagcttga

SEQ ID NO: 5756614 - DNA, 25 bp, Homo sapien
tgctcggaagatttttttaggtctc

SEQ ID NO: 5756615 - DNA, 25 bp, Homo sapien
tccatcagggatctatactcttcag

SEQ ID NO: 5756616 - DNA, 25 bp, Homo sapien
atttctccatatgaattttaagata

SEQ ID NO: 5756617 - DNA, 25 bp, Homo sapien
taatctacaactgtttacaaaaaca

SEQ ID NO: 5756618 - DNA, 25 bp, Homo sapien
caaatctagatgcagctacttatca

SEQ ID NO: 5756619 - DNA, 25 bp, Homo sapien
aaaaacaacattcaaacaaatagta

SEQ ID NO: 5756620 - DNA, 25 bp, Homo sapien
aacagcgctatgactttaaatccaa

SEQ ID NO: 5756621 - DNA, 25 bp, Homo sapien
gagagtctgtctcaaaaaaaaaaaa

SEQ ID NO: 5756622 - DNA, 25 bp, Homo sapien
gggctcagccggtcgagctgcgcgg

SEQ ID NO: 5756623 - DNA, 25 bp, Homo sapien
aacaaaacacattgcatctagaaat

SEQ ID NO: 5756624 - DNA, 25 bp, Homo sapien
agcctggggcgcccggcggagctga

SEQ ID NO: 5756625 - DNA, 25 bp, Homo sapien
acaaagacagcaaatgtagtctaag

SEQ ID NO: 5756626 - DNA, 25 bp, Homo sapien
ccagttgctcctgtgctagatggta

SEQ ID NO: 5756627 - DNA, 25 bp, Homo sapien
aaggaatattagaggaaacttgaaa

SEQ ID NO: 5756628 - DNA, 25 bp, Homo sapien
ttgtaggactcatggcagttctcac

SEQ ID NO: 5756629 - DNA, 25 bp, Homo sapien
tactgtatacagttagaaagttatt

SEQ ID NO: 5756630 - DNA, 25 bp, Homo sapien
cactgcactccaacctgggcgacac

SEQ ID NO: 5756631 - DNA, 25 bp, Homo sapien
cttgattctaaggaactttcagctg

SEQ ID NO: 5756632 - DNA, 25 bp, Homo sapien
aggttagcccttaatctcttcattg

SEQ ID NO: 5756633 - DNA, 25 bp, Homo sapien
tatctacatttggagaattttgaac

SEQ ID NO: 5756634 - DNA, 25 bp, Homo sapien
ggagccatccttgtaataacagcta

SEQ ID NO: 5756635 - DNA, 25 bp, Homo sapien
gcaggaaatcccactaaagcatagt

SEQ ID NO: 5756636 - DNA, 25 bp, Homo sapien
aatgcgttattccagaactttaaaa

SEQ ID NO: 5756637 - DNA, 25 bp, Homo sapien
gggctgcaccgagctggcggtggct

SEQ ID NO: 5756638 - DNA, 25 bp, Homo sapien
caaaaatacaaaaattagctgggtg

SEQ ID NO: 5756639 - DNA, 25 bp, Homo sapien
gattaagtccttaatattattttaa

SEQ ID NO: 5756640 - DNA, 25 bp, Homo sapien
tgtagagatacatactatttctcca

SEQ ID NO: 5756641 - DNA, 25 bp, Homo sapien
aatcacttgaacccgggaggcagag

SEQ ID NO: 5756642 - DNA, 25 bp, Homo sapien
gaaaattataattacctataaagct

SEQ ID NO: 5756643 - DNA, 25 bp, Homo sapien
gtacagatgtcagtgacagaacaaa

SEQ ID NO: 5756644 - DNA, 25 bp, Homo sapien
gtggctgtccctagtaattttgatg

SEQ ID NO: 5756645 - DNA, 25 bp, Homo sapien
tttgaactatcaagcatatactgta

SEQ ID NO: 5756646 - DNA, 25 bp, Homo sapien
cgggtcagcggtcgcgtaggaccca

SEQ ID NO: 5756647 - DNA, 25 bp, Homo sapien
taatattctgggtctgatctgtcag

SEQ ID NO: 5756648 - DNA, 25 bp, Homo sapien
tccagggattaggattagaaggaat

SEQ ID NO: 5756649 - DNA, 25 bp, Homo sapien
tacttatcaggtcacgtatcagttg

SEQ ID NO: 5756650 - DNA, 25 bp, Homo sapien
agttgctcctgtgctagatggtagc

SEQ ID NO: 5756651 - DNA, 25 bp, Homo sapien
catggcagttctcacagcatgtttt

SEQ ID NO: 5756652 - DNA, 25 bp, Homo sapien
caatttttgcaaattagatttaatc

SEQ ID NO: 5756653 - DNA, 25 bp, Homo sapien
gctttgctggggtttactttgagaa

SEQ ID NO: 5756654 - DNA, 25 bp, Homo sapien
tttcagactaccagtttggttctaa

SEQ ID NO: 5756655 - DNA, 25 bp, Homo sapien
ggttgcagtaagtggagatcacgcc

SEQ ID NO: 5756656 - DNA, 25 bp, Homo sapien
agcagtttgggaggctgaggcaggt

SEQ ID NO: 5756657 - DNA, 25 bp, Homo sapien
tgattctaaggaactttcagctggt

SEQ ID NO: 5756658 - DNA, 25 bp, Homo sapien
agagctgctgagaaggcctggcgca

SEQ ID NO: 5756659 - DNA, 25 bp, Homo sapien
tattcttccctgatcacatgagtgg

SEQ ID NO: 5756660 - DNA, 25 bp, Homo sapien
tgatgaaattcttaataaacctatg

SEQ ID NO: 5756661 - DNA, 25 bp, Homo sapien
tttactcattgatctgtaaaaactt

SEQ ID NO: 5756662 - DNA, 25 bp, Homo sapien
aaatgtttttggttcaattacataa

SEQ ID NO: 5756663 - DNA, 25 bp, Homo sapien
catatactgtatacagttagaaagt

SEQ ID NO: 5756664 - DNA, 25 bp, Homo sapien
ttcacgatggggcactaggaatctc

SEQ ID NO: 5756665 - DNA, 25 bp, Homo sapien
ttagtgcttcaagactgctgaaagc

SEQ ID NO: 5756666 - DNA, 25 bp, Homo sapien
ccttaatctcttcattgcatttcat

SEQ ID NO: 5756667 - DNA, 25 bp, Homo sapien
gattagaaggaatattagaggaaac

SEQ ID NO: 5756668 - DNA, 25 bp, Homo sapien
ggagccggcggcgctgcgggtcagc

SEQ ID NO: 5756669 - DNA, 25 bp, Homo sapien
ttcaagtggctttgctggggtttac

SEQ ID NO: 5756670 - DNA, 25 bp, Homo sapien
tttcagctggttctcaatttgtagg

SEQ ID NO: 5756671 - DNA, 25 bp, Homo sapien
caaatagtacagatgtcagtgacag

SEQ ID NO: 5756672 - DNA, 25 bp, Homo sapien
gtagccagagaattttatagtaatg

SEQ ID NO: 5756673 - DNA, 25 bp, Homo sapien
tgagtgggagaggtagccaaatttt

SEQ ID NO: 5756674 - DNA, 25 bp, Homo sapien
caatcagtgtggataagaaatattc

SEQ ID NO: 5756675 - DNA, 25 bp, Homo sapien
attaaaatttgtgtgtaattgccat

SEQ ID NO: 5756676 - DNA, 25 bp, Homo sapien
agactaccagtttggttctaacaat

SEQ ID NO: 5756677 - DNA, 25 bp, Homo sapien
ctcggaagatttttttaggtctctc

SEQ ID NO: 5756678 - DNA, 25 bp, Homo sapien
cagcattattttctgtgtctatgct

SEQ ID NO: 5756679 - DNA, 25 bp, Homo sapien
tgtagtctaagagcactgaatcgag

SEQ ID NO: 5756680 - DNA, 25 bp, Homo sapien
ccaaattttgaattccctttctgtg

SEQ ID NO: 5756681 - DNA, 25 bp, Homo sapien
gtatacagttagaaagttattaaat

SEQ ID NO: 5756682 - DNA, 25 bp, Homo sapien
catgagtgggagaggtagccaaatt

SEQ ID NO: 5756683 - DNA, 25 bp, Homo sapien
attactttattttaaacagcgctat

SEQ ID NO: 5756684 - DNA, 25 bp, Homo sapien
atgcttagtaaaaaattgggtgtat

SEQ ID NO: 5756685 - DNA, 25 bp, Homo sapien
acagatgtcagtgacagaacaaaat

SEQ ID NO: 5756686 - DNA, 25 bp, Homo sapien
tgaactatcaagcatatactgtata

SEQ ID NO: 5756687 - DNA, 25 bp, Homo sapien
gaataatttactgtatgtggcacta

SEQ ID NO: 5756688 - DNA, 25 bp, Homo sapien
ttgagactatcctgaccaacatggt

SEQ ID NO: 5756689 - DNA, 25 bp, Homo sapien
tttctgtaaatcagattaagtcctt

SEQ ID NO: 5756690 - DNA, 25 bp, Homo sapien
ttgctcctgtgctagatggtagcca

SEQ ID NO: 5756691 - DNA, 25 bp, Homo sapien
gtcacgtatcagttgaaaattctta

SEQ ID NO: 5756692 - DNA, 25 bp, Homo sapien
ttcattgcatttcatttctgtaaat

SEQ ID NO: 5756693 - DNA, 25 bp, Homo sapien
ccggcggcgctgcgggtcagcggtc

SEQ ID NO: 5756694 - DNA, 25 bp, Homo sapien
caacatggtgaaaccccgtctctac

SEQ ID NO: 5756695 - DNA, 25 bp, Homo sapien
ttattggtctacaaagacagcaaat

SEQ ID NO: 5756696 - DNA, 25 bp, Homo sapien
acctgcaggaaatcccactaaagca

SEQ ID NO: 5756697 - DNA, 25 bp, Homo sapien
ctaaatgtttttggttcaattacat

SEQ ID NO: 5756698 - DNA, 25 bp, Homo sapien
tgtaaatcagattaagtccttaata

SEQ ID NO: 5756699 - DNA, 25 bp, Homo sapien
gttctaacaatgcgttattccagaa

SEQ ID NO: 5756700 - DNA, 25 bp, Homo sapien
gtttgggaggctgaggcaggtggat

SEQ ID NO: 5756701 - DNA, 25 bp, Homo sapien
gtctctcataagcctattcttccct

SEQ ID NO: 5756702 - DNA, 25 bp, Homo sapien
tacatgatgaaattcttaataaacc

SEQ ID NO: 5756703 - DNA, 25 bp, Homo sapien
agaagatatcatcatgctgaatctg

SEQ ID NO: 5756704 - DNA, 25 bp, Homo sapien
gcactgaatcgagtactacatgatg

SEQ ID NO: 5756705 - DNA, 25 bp, Homo sapien
ttatctatcttctacagcagtggtt

SEQ ID NO: 5756706 - DNA, 25 bp, Homo sapien
gatgcagctacttatcaggtcacgt

SEQ ID NO: 5756707 - DNA, 25 bp, Homo sapien
agaattttatagtaatggaggttag

SEQ ID NO: 5756708 - DNA, 25 bp, Homo sapien
tggcagttctcacagcatgtttttc

SEQ ID NO: 5756709 - DNA, 25 bp, Homo sapien
agagaattttatagtaatggaggtt

SEQ ID NO: 5756710 - DNA, 25 bp, Homo sapien
cggcccccggtggtgggctcagccg

SEQ ID NO: 5756711 - DNA, 25 bp, Homo sapien
agtggctttgctggggtttactttg

SEQ ID NO: 5756712 - DNA, 25 bp, Homo sapien
taaaagaaacaaaacaatcagtgtg

SEQ ID NO: 5756713 - DNA, 25 bp, Homo sapien
agcaaatgtagtctaagagcactga

SEQ ID NO: 5756714 - DNA, 25 bp, Homo sapien
aacaaatagtacagatgtcagtgac

SEQ ID NO: 5756715 - DNA, 25 bp, Homo sapien
tgaaccgcggcccccggtggtgggc

SEQ ID NO: 5756716 - DNA, 25 bp, Homo sapien
taatcttgcacagaggacttctaca

SEQ ID NO: 5756717 - DNA, 25 bp, Homo sapien
tgcttcaagactgctgaaagcaatc

SEQ ID NO: 5756718 - DNA, 25 bp, Homo sapien
ttgctgaacttttgaagataatggc

SEQ ID NO: 5756719 - DNA, 25 bp, Homo sapien
aacttgaaatctgagtttaaaaaga

SEQ ID NO: 5756720 - DNA, 25 bp, Homo sapien
ataccaatttttgcaaattagattt

SEQ ID NO: 5756721 - DNA, 25 bp, Homo sapien
tcaaaacttgaaagtatttccaggg

SEQ ID NO: 5756722 - DNA, 25 bp, Homo sapien
ggcactaggaatctcgacattaatc

SEQ ID NO: 5756723 - DNA, 25 bp, Homo sapien
tatggaaacacttaaacttgctatt

SEQ ID NO: 5756724 - DNA, 25 bp, Homo sapien
ataatatctacatttggagaatttt

SEQ ID NO: 5756725 - DNA, 25 bp, Homo sapien
agaaggcctggcgcagtggctcacg

SEQ ID NO: 5756726 - DNA, 25 bp, Homo sapien
gggaggctgaggcaggtggatcaca

SEQ ID NO: 5756727 - DNA, 25 bp, Homo sapien
acaatgcgttattccagaactttaa

SEQ ID NO: 5756728 - DNA, 25 bp, Homo sapien
ctacaactgtttacaaaaacaacat

SEQ ID NO: 5756729 - DNA, 25 bp, Homo sapien
ggcaggtggatcacaaggtcaagag

SEQ ID NO: 5756730 - DNA, 25 bp, Homo sapien
aggactcatggcagttctcacagca

SEQ ID NO: 5756731 - DNA, 25 bp, Homo sapien
gtcagagaataaatatcaaatctaa

SEQ ID NO: 5756732 - DNA, 25 bp, Homo sapien
agcggactcggcagcctggggcgcc

SEQ ID NO: 5756733 - DNA, 25 bp, Homo sapien
acagtggccctcagattctcagctt

SEQ ID NO: 5756734 - DNA, 25 bp, Homo sapien
tctcttcattgcatttcatttctgt

SEQ ID NO: 5756735 - DNA, 25 bp, Homo sapien
aaggcctggcgcagtggctcacgcc

SEQ ID NO: 5756736 - DNA, 25 bp, Homo sapien
gaattttgaactatcaagcatatac

SEQ ID NO: 5756737 - DNA, 25 bp, Homo sapien
aatagtacagatgtcagtgacagaa

SEQ ID NO: 5756738 - DNA, 25 bp, Homo sapien
gggattaggattagaaggaatatta

SEQ ID NO: 5756739 - DNA, 25 bp, Homo sapien
tatctttaactggtttttcacgatg

SEQ ID NO: 5756740 - DNA, 25 bp, Homo sapien
ttacaaaaacaacattcaaacaaat

SEQ ID NO: 5756741 - DNA, 25 bp, Homo sapien
cacacaagagctgctgagaaggcct

SEQ ID NO: 5756742 - DNA, 25 bp, Homo sapien
gcgctgcgggtcagcggtcgcgtag

SEQ ID NO: 5756743 - DNA, 25 bp, Homo sapien
gagactgaggcaggagaatcacttg

SEQ ID NO: 5756744 - DNA, 25 bp, Homo sapien
actaaagcatagttgtatactatct

SEQ ID NO: 5756745 - DNA, 25 bp, Homo sapien
attaatcttgcacagaggacttcta

SEQ ID NO: 5756746 - DNA, 25 bp, Homo sapien
gctacttatcaggtcacgtatcagt

SEQ ID NO: 5756747 - DNA, 25 bp, Homo sapien
ccagcggactcggcagcctggggcg

SEQ ID NO: 5756748 - DNA, 25 bp, Homo sapien
gcaagagcacacaacaaatgtcaga

SEQ ID NO: 5756749 - DNA, 25 bp, Homo sapien
ttttgtacagtggccctcagattct

SEQ ID NO: 5756750 - DNA, 25 bp, Homo sapien
atgacaggagttgcttttgtacagt

SEQ ID NO: 5756751 - DNA, 25 bp, Homo sapien
tcttattaaatgtttttatcttact

SEQ ID NO: 5756752 - DNA, 25 bp, Homo sapien
tctacagcagtggttgttgctgaac

SEQ ID NO: 5756753 - DNA, 25 bp, Homo sapien
agtggttgttgctgaacttttgaag

SEQ ID NO: 5756754 - DNA, 25 bp, Homo sapien
aaaatacaaaaattagctgggtgtg

SEQ ID NO: 5756755 - DNA, 25 bp, Homo sapien
taaacttgctattccatcagggatc

SEQ ID NO: 5756756 - DNA, 25 bp, Homo sapien
ttgggtgtataccagtggctgtccc

SEQ ID NO: 5756757 - DNA, 25 bp, Homo sapien
gctcacgcctgtaatcctagcagtt

SEQ ID NO: 5756758 - DNA, 25 bp, Homo sapien
gtctaagagcactgaatcgagtact

SEQ ID NO: 5756759 - DNA, 25 bp, Homo sapien
actttcagctggttctcaatttgta

SEQ ID NO: 5756760 - DNA, 25 bp, Homo sapien
tcccaaacctgcaggaaatcccact

SEQ ID NO: 5756761 - DNA, 25 bp, Homo sapien
tttaaatccaaggctgctcggaaga

SEQ ID NO: 5756762 - DNA, 25 bp, Homo sapien
taagatatgtgtatatgtaacaaaa

SEQ ID NO: 5756763 - DNA, 25 bp, Homo sapien
gagactatcctgaccaacatggtga

SEQ ID NO: 5756764 - DNA, 25 bp, Homo sapien
ttgcttttgtacagtggccctcaga

SEQ ID NO: 5756765 - DNA, 25 bp, Homo sapien
attaatattctgggtctgatctgtc

SEQ ID NO: 5756766 - DNA, 25 bp, Homo sapien
agatttttttaggtctctcataagc

SEQ ID NO: 5756767 - DNA, 25 bp, Homo sapien
cagcagtggttgttgctgaactttt

SEQ ID NO: 5756768 - DNA, 25 bp, Homo sapien
aaagcaatccagttgctcctgtgct

SEQ ID NO: 5756769 - DNA, 25 bp, Homo sapien
ttaaaagaagaaggacctcgttatc

SEQ ID NO: 5756770 - DNA, 25 bp, Homo sapien
aaacaacattcaaacaaatagtaca

SEQ ID NO: 5756771 - DNA, 25 bp, Homo sapien
attgccatattactttattttaaac

SEQ ID NO: 5756772 - DNA, 25 bp, Homo sapien
cagaggttgcagtaagtggagatca

SEQ ID NO: 5756773 - DNA, 25 bp, Homo sapien
gcgcccggcggagctgaaccgcggc

SEQ ID NO: 5756774 - DNA, 25 bp, Homo sapien
ggttctcaatttgtaggactcatgg

SEQ ID NO: 5756775 - DNA, 25 bp, Homo sapien
cgacattaatcttgcacagaggact

SEQ ID NO: 5756776 - DNA, 25 bp, Homo sapien
agaaggacctcgttatctatcttct

SEQ ID NO: 5756777 - DNA, 25 bp, Homo sapien
ggagaatcacttgaacccgggaggc

SEQ ID NO: 5756778 - DNA, 25 bp, Homo sapien
taaaaacttctttaatctacaactg

SEQ ID NO: 5756779 - DNA, 25 bp, Homo sapien
ttattttaaacagcgctatgacttt

SEQ ID NO: 5756780 - DNA, 25 bp, Homo sapien
aatgacttttcttggagacattcca

SEQ ID NO: 5756781 - DNA, 25 bp, Homo sapien
atgaaattcttaataaacctatgga

SEQ ID NO: 5756782 - DNA, 25 bp, Homo sapien
agaggaaacttgaaatctgagttta

SEQ ID NO: 5756783 - DNA, 25 bp, Homo sapien
taaacagcgctatgactttaaatcc

SEQ ID NO: 5756784 - DNA, 25 bp, Homo sapien
tcccactaaagcatagttgtatact

SEQ ID NO: 5756785 - DNA, 25 bp, Homo sapien
ctatcctgaccaacatggtgaaacc

SEQ ID NO: 5756786 - DNA, 25 bp, Homo sapien
cggagctgaaccgcggcccccggtg

SEQ ID NO: 5756787 - DNA, 25 bp, Homo sapien
acattgcatctagaaatcaaaactt

SEQ ID NO: 5756788 - DNA, 25 bp, Homo sapien
cctttttgattgctgcagaaatgtc

SEQ ID NO: 5756789 - DNA, 25 bp, Homo sapien
gtccctagtaattttgatgacagga

SEQ ID NO: 5756790 - DNA, 25 bp, Homo sapien
aaacaatgttcgccaacctaaaata

SEQ ID NO: 5756791 - DNA, 25 bp, Homo sapien
gaacaaaatgacttttcttggagac

SEQ ID NO: 5756792 - DNA, 25 bp, Homo sapien
tgttgctgaacttttgaagataatg

SEQ ID NO: 5756793 - DNA, 25 bp, Homo sapien
ttcacacaagagctgctgagaaggc

SEQ ID NO: 5756794 - DNA, 25 bp, Homo sapien
ttttcaagtggctttgctggggttt

SEQ ID NO: 5756795 - DNA, 25 bp, Homo sapien
aatccaaggctgctcggaagatttt

SEQ ID NO: 5756796 - DNA, 25 bp, Homo sapien
tgaaaaaacatttcacttatcagag

SEQ ID NO: 5756797 - DNA, 25 bp, Homo sapien
gagaattttgaactatcaagcatat

SEQ ID NO: 5756798 - DNA, 25 bp, Homo sapien
aatctcttcattgcatttcatttct

SEQ ID NO: 5756799 - DNA, 25 bp, Homo sapien
tcttcattgcatttcatttctgtaa

SEQ ID NO: 5756800 - DNA, 25 bp, Homo sapien
agaaatgtcctatgcactctttgca

SEQ ID NO: 5756801 - DNA, 25 bp, Homo sapien
gcatagttgtatactatctttaact

SEQ ID NO: 5756802 - DNA, 25 bp, Homo sapien
acaatgttcgccaacctaaaatacg

SEQ ID NO: 5756803 - DNA, 25 bp, Homo sapien
ttgtataatatctacatttggagaa

SEQ ID NO: 5756804 - DNA, 25 bp, Homo sapien
acaaaaacaacattcaaacaaatag

SEQ ID NO: 5756805 - DNA, 25 bp, Homo sapien
cctatggaaacacttaaacttgcta

SEQ ID NO: 5756806 - DNA, 25 bp, Homo sapien
aacctatggaaacacttaaacttgc

SEQ ID NO: 5756807 - DNA, 25 bp, Homo sapien
gcccggcggagctgaaccgcggccc

SEQ ID NO: 5756808 - DNA, 25 bp, Homo sapien
ctgcagaaatgtcctatgcactctt

SEQ ID NO: 5756809 - DNA, 25 bp, Homo sapien
ttgtatggttatgatcccaaacctg

SEQ ID NO: 5756810 - DNA, 25 bp, Homo sapien
gagcactgaatcgagtactacatga

SEQ ID NO: 5756811 - DNA, 25 bp, Homo sapien
ctgtcagagaataaatatcaaatct

SEQ ID NO: 5756812 - DNA, 25 bp, Homo sapien
gtgggctcagccggtcgagctgcgc

SEQ ID NO: 5756813 - DNA, 25 bp, Homo sapien
agccatccttgtaataacagctact

SEQ ID NO: 5756814 - DNA, 25 bp, Homo sapien
actacatgatgaaattcttaataaa

SEQ ID NO: 5756815 - DNA, 25 bp, Homo sapien
cagcttgtgtctttttccttggagc

SEQ ID NO: 5756816 - DNA, 25 bp, Homo sapien
cacatgagtgggagaggtagccaaa

SEQ ID NO: 5756817 - DNA, 25 bp, Homo sapien
gaggacttctacagagtctgagaag

SEQ ID NO: 5756818 - DNA, 25 bp, Homo sapien
ggctgtccctagtaattttgatgac

SEQ ID NO: 5756819 - DNA, 25 bp, Homo sapien
gcgacgggagccggcggcgctgcgg

SEQ ID NO: 5756820 - DNA, 25 bp, Homo sapien
tcaagagattgagactatcctgacc

SEQ ID NO: 5756821 - DNA, 25 bp, Homo sapien
acaactgtttacaaaaacaacattc

SEQ ID NO: 5756822 - DNA, 25 bp, Homo sapien
attttacctttttgattgctgcaga

SEQ ID NO: 5756823 - DNA, 25 bp, Homo sapien
tttactgtatgtggcactatcaaat

SEQ ID NO: 5756824 - DNA, 25 bp, Homo sapien
ggtcagcggtcgcgtaggacccagc

SEQ ID NO: 5756825 - DNA, 25 bp, Homo sapien
gctgaaccgcggcccccggtggtgg

SEQ ID NO: 5756826 - DNA, 25 bp, Homo sapien
gcgacacagtgagagtctgtctcaa

SEQ ID NO: 5756827 - DNA, 25 bp, Homo sapien
tcacttgaacccgggaggcagaggt

SEQ ID NO: 5756828 - DNA, 25 bp, Homo sapien
gctacggcgacgggagccggcggcg

SEQ ID NO: 5756829 - DNA, 25 bp, Homo sapien
agtaagtggagatcacgccactgca

SEQ ID NO: 5756830 - DNA, 25 bp, Homo sapien
tagatggtagccagagaattttata

SEQ ID NO: 5756831 - DNA, 25 bp, Homo sapien
gaggctgaggcaggtggatcacaag

SEQ ID NO: 5756832 - DNA, 25 bp, Homo sapien
agataccaatttttgcaaattagat

SEQ ID NO: 5756833 - DNA, 25 bp, Homo sapien
attgctaaatgtttttggttcaatt

SEQ ID NO: 5756834 - DNA, 25 bp, Homo sapien
gcagaaatgtcctatgcactctttg

SEQ ID NO: 5756835 - DNA, 25 bp, Homo sapien
ttccagaactttaaaagaagaagga

SEQ ID NO: 5756836 - DNA, 25 bp, Homo sapien
ctgatcatactgttttttaaaagtt

SEQ ID NO: 5756837 - DNA, 25 bp, Homo sapien
atttcatttctgtaaatcagattaa

SEQ ID NO: 5756838 - DNA, 25 bp, Homo sapien
gtgtatatgtaacaaaacacattgc

SEQ ID NO: 5756839 - DNA, 25 bp, Homo sapien
gggaggcagaggttgcagtaagtgg

SEQ ID NO: 5756840 - DNA, 25 bp, Homo sapien
gacaggagttgcttttgtacagtgg

SEQ ID NO: 5756841 - DNA, 25 bp, Homo sapien
tgcactctttgcaagagcacacaac

SEQ ID NO: 5756842 - DNA, 25 bp, Homo sapien
tacaaaaattagctgggtgtggtgg

SEQ ID NO: 5756843 - DNA, 25 bp, Homo sapien
ttgcaagagcacacaacaaatgtca

SEQ ID NO: 5756844 - DNA, 25 bp, Homo sapien
agaatcacttgaacccgggaggcag

SEQ ID NO: 5756845 - DNA, 25 bp, Homo sapien
agcctattcttccctgatcacatga

SEQ ID NO: 5756846 - DNA, 25 bp, Homo sapien
gcatttcatttctgtaaatcagatt

SEQ ID NO: 5756847 - DNA, 25 bp, Homo sapien
ctaagagcactgaatcgagtactac

SEQ ID NO: 5756848 - DNA, 25 bp, Homo sapien
gatacatactatttctccatatgaa

SEQ ID NO: 5756849 - DNA, 25 bp, Homo sapien
gactatcctgaccaacatggtgaaa

SEQ ID NO: 5756850 - DNA, 25 bp, Homo sapien
tgcagctacttatcaggtcacgtat

SEQ ID NO: 5756851 - DNA, 25 bp, Homo sapien
tttgctggggtttactttgagaaaa

SEQ ID NO: 5756852 - DNA, 25 bp, Homo sapien
atggggcactaggaatctcgacatt

SEQ ID NO: 5756853 - DNA, 25 bp, Homo sapien
tttttgattgctgcagaaatgtcct

SEQ ID NO: 5756854 - DNA, 25 bp, Homo sapien
aattcttaataaacctatggaaaca

SEQ ID NO: 5756855 - DNA, 25 bp, Homo sapien
cagaacaaaatgacttttcttggag

SEQ ID NO: 5756856 - DNA, 25 bp, Homo sapien
ccactaaagcatagttgtatactat

SEQ ID NO: 5756857 - DNA, 25 bp, Homo sapien
tattttctgtgtctatgcttagtaa

SEQ ID NO: 5756858 - DNA, 25 bp, Homo sapien
tccctgatcacatgagtgggagagg

SEQ ID NO: 5756859 - DNA, 25 bp, Homo sapien
gtgtggtggcacgcacctgtagtcc

SEQ ID NO: 5756860 - DNA, 25 bp, Homo sapien
ggtcaagagattgagactatcctga

SEQ ID NO: 5756861 - DNA, 25 bp, Homo sapien
ttgtaataacagctacttttttgta

SEQ ID NO: 5756862 - DNA, 25 bp, Homo sapien
atagttgtatactatctttaactgg

SEQ ID NO: 5756863 - DNA, 25 bp, Homo sapien
gcagtggctcacgcctgtaatccta

SEQ ID NO: 5756864 - DNA, 25 bp, Homo sapien
tgctgcagaaatgtcctatgcactc

SEQ ID NO: 5756865 - DNA, 25 bp, Homo sapien
atccagttgctcctgtgctagatgg

SEQ ID NO: 5756866 - DNA, 25 bp, Homo sapien
aaggattgctaaatgtttttggttc

SEQ ID NO: 5756867 - DNA, 25 bp, Homo sapien
ttttattggtctacaaagacagcaa

SEQ ID NO: 5756868 - DNA, 25 bp, Homo sapien
gtggtggcacgcacctgtagtccca

SEQ ID NO: 5756869 - DNA, 25 bp, Homo sapien
gaggcagaggttgcagtaagtggag

SEQ ID NO: 5756870 - DNA, 25 bp, Homo sapien
taaatccaaggctgctcggaagatt

SEQ ID NO: 5756871 - DNA, 25 bp, Homo sapien
acaacaaatgtcagataccaatttt

SEQ ID NO: 5756872 - DNA, 25 bp, Homo sapien
cagcatgtttttcaagtggctttgc

SEQ ID NO: 5756873 - DNA, 25 bp, Homo sapien
atcctgaccaacatggtgaaacccc

SEQ ID NO: 5756874 - DNA, 25 bp, Homo sapien
cctgcattttattggtctacaaaga

SEQ ID NO: 5756875 - DNA, 25 bp, Homo sapien
ttttggtctttcagactaccagttt

SEQ ID NO: 5756876 - DNA, 25 bp, Homo sapien
gctagatggtagccagagaatttta

SEQ ID NO: 5756877 - DNA, 25 bp, Homo sapien
tcagactaccagtttggttctaaca

SEQ ID NO: 5756878 - DNA, 25 bp, Homo sapien
acgccactgcactccaacctgggcg

SEQ ID NO: 5756879 - DNA, 25 bp, Homo sapien
ggagttgcttttgtacagtggccct

SEQ ID NO: 5756880 - DNA, 25 bp, Homo sapien
atgtaacaaaacacattgcatctag

SEQ ID NO: 5756881 - DNA, 25 bp, Homo sapien
gaatctgatcatactgttttttaaa

SEQ ID NO: 5756882 - DNA, 25 bp, Homo sapien
ttgaattccctttctgtgttcacac

SEQ ID NO: 5756883 - DNA, 25 bp, Homo sapien
atccttgtaataacagctacttttt

SEQ ID NO: 5756884 - DNA, 25 bp, Homo sapien
tggggtttactttgagaaaatctta

SEQ ID NO: 5756885 - DNA, 25 bp, Homo sapien
cttactctttctgtacagatatatc

SEQ ID NO: 5756886 - DNA, 25 bp, Homo sapien
tggttgttgctgaacttttgaagat

SEQ ID NO: 5756887 - DNA, 25 bp, Homo sapien
gagcacacaacaaatgtcagatacc

SEQ ID NO: 5756888 - DNA, 25 bp, Homo sapien
caggagaatcacttgaacccgggag

SEQ ID NO: 5756889 - DNA, 25 bp, Homo sapien
tgactttaaatccaaggctgctcgg

SEQ ID NO: 5756890 - DNA, 25 bp, Homo sapien
ttaaatgaacattttactcattgat

SEQ ID NO: 5756891 - DNA, 25 bp, Homo sapien
aatttactgtatgtggcactatcaa

SEQ ID NO: 5756892 - DNA, 25 bp, Homo sapien
attacctataaagctgtgaaaaata

SEQ ID NO: 5756893 - DNA, 25 bp, Homo sapien
taacagctacttttttgtatggtta

SEQ ID NO: 5756894 - DNA, 25 bp, Homo sapien
tgatcacatgagtgggagaggtagc

SEQ ID NO: 5756895 - DNA, 25 bp, Homo sapien
ccgggaggcagaggttgcagtaagt

SEQ ID NO: 5756896 - DNA, 25 bp, Homo sapien
tggctttgctggggtttactttgag

SEQ ID NO: 5756897 - DNA, 25 bp, Homo sapien
gtgtgtaattgccattaaattttca

SEQ ID NO: 5756898 - DNA, 25 bp, Homo sapien
gacgggagccggcggcgctgcgggt

SEQ ID NO: 5756899 - DNA, 25 bp, Homo sapien
agctacttttttgtatggttatgat

SEQ ID NO: 5756900 - DNA, 25 bp, Homo sapien
tttgaaaaaacatttcacttatcag

SEQ ID NO: 5756901 - DNA, 25 bp, Homo sapien
ctggttctcaatttgtaggactcat

SEQ ID NO: 5756902 - DNA, 25 bp, Homo sapien
ccagtttggttctaacaatgcgtta

SEQ ID NO: 5756903 - DNA, 25 bp, Homo sapien
ctactcgggagactgaggcaggaga

SEQ ID NO: 5756904 - DNA, 25 bp, Homo sapien
ttcttccctgatcacatgagtggga

SEQ ID NO: 5756905 - DNA, 25 bp, Homo sapien
gtaggactcatggcagttctcacag

SEQ ID NO: 5756906 - DNA, 25 bp, Homo sapien
ttttttgtatggttatgatcccaaa

SEQ ID NO: 5756907 - DNA, 25 bp, Homo sapien
atttgtaggactcatggcagttctc

SEQ ID NO: 5756908 - DNA, 25 bp, Homo sapien
acaaaatgacttttcttggagacat

SEQ ID NO: 5756909 - DNA, 25 bp, Homo sapien
acacattgcatctagaaatcaaaac

SEQ ID NO: 5756910 - DNA, 25 bp, Homo sapien
taactggtttttcacgatggggcac

SEQ ID NO: 5756911 - DNA, 25 bp, Homo sapien
aatctagatgcagctacttatcagg

SEQ ID NO: 5756912 - DNA, 25 bp, Homo sapien
atttttgcaaattagatttaatctt

SEQ ID NO: 5756913 - DNA, 25 bp, Homo sapien
cgatggggcactaggaatctcgaca

SEQ ID NO: 5756914 - DNA, 25 bp, Homo sapien
gcagtaagtggagatcacgccactg

SEQ ID NO: 5756915 - DNA, 25 bp, Homo sapien
tcgagtactacatgatgaaattctt

SEQ ID NO: 5756916 - DNA, 25 bp, Homo sapien
cttctacagcagtggttgttgctga

SEQ ID NO: 5756917 - DNA, 25 bp, Homo sapien
aagactgctgaaagcaatccagttg

SEQ ID NO: 5756918 - DNA, 25 bp, Homo sapien
tggagaattttgaactatcaagcat

SEQ ID NO: 5756919 - DNA, 25 bp, Homo sapien
aaaagaagaaggacctcgttatcta

SEQ ID NO: 5756920 - DNA, 25 bp, Homo sapien
ggctgaggcaggtggatcacaaggt

SEQ ID NO: 5756921 - DNA, 25 bp, Homo sapien
aatgtagtctaagagcactgaatcg

SEQ ID NO: 5756922 - DNA, 25 bp, Homo sapien
tggcggtggctacggcgacgggagc

SEQ ID NO: 5756923 - DNA, 25 bp, Homo sapien
tagtacagatgtcagtgacagaaca

SEQ ID NO: 5756924 - DNA, 25 bp, Homo sapien
gaaattcttaataaacctatggaaa

SEQ ID NO: 5756925 - DNA, 25 bp, Homo sapien
tgaaagcaatccagttgctcctgtg

SEQ ID NO: 5756926 - DNA, 25 bp, Homo sapien
aatatctacatttggagaattttga

SEQ ID NO: 5756927 - DNA, 25 bp, Homo sapien
gggtgtggtggcacgcacctgtagt

SEQ ID NO: 5756928 - DNA, 25 bp, Homo sapien
agttgtatactatctttaactggtt

SEQ ID NO: 5756929 - DNA, 25 bp, Homo sapien
tacctataaagctgtgaaaaataga

SEQ ID NO: 5756930 - DNA, 25 bp, Homo sapien
ttttctgtgtctatgcttagtaaaa

SEQ ID NO: 5756931 - DNA, 25 bp, Homo sapien
agagtctgagaagatatcatcatgc

SEQ ID NO: 5756932 - DNA, 25 bp, Homo sapien
acatggtgaaaccccgtctctacca

SEQ ID NO: 5756933 - DNA, 25 bp, Homo sapien
gcattattttctgtgtctatgctta

SEQ ID NO: 5756934 - DNA, 25 bp, Homo sapien
cggcagcctggggcgcccggcggag

SEQ ID NO: 5756935 - DNA, 25 bp, Homo sapien
ctacagagtctgagaagatatcatc

SEQ ID NO: 5756936 - DNA, 25 bp, Homo sapien
aaatttgtgtgtaattgccattaaa

SEQ ID NO: 5756937 - DNA, 25 bp, Homo sapien
ctctcataagcctattcttccctga

SEQ ID NO: 5756938 - DNA, 25 bp, Homo sapien
cacagtgagagtctgtctcaaaaaa

SEQ ID NO: 5756939 - DNA, 25 bp, Homo sapien
ttcaaacaaatagtacagatgtcag

SEQ ID NO: 5756940 - DNA, 25 bp, Homo sapien
tcatcatgctgaatctgatcatact

SEQ ID NO: 5756941 - DNA, 25 bp, Homo sapien
ctgtccctagtaattttgatgacag

SEQ ID NO: 5756942 - DNA, 25 bp, Homo sapien
ctgggcgacacagtgagagtctgtc

SEQ ID NO: 5756943 - DNA, 25 bp, Homo sapien
tttggttctaacaatgcgttattcc

SEQ ID NO: 5756944 - DNA, 25 bp, Homo sapien
gggcgacacagtgagagtctgtctc

SEQ ID NO: 5756945 - DNA, 25 bp, Homo sapien
tacggcgacgggagccggcggcgct

SEQ ID NO: 5756946 - DNA, 25 bp, Homo sapien
aagagcactgaatcgagtactacat

SEQ ID NO: 5756947 - DNA, 25 bp, Homo sapien
ggtggcacgcacctgtagtcccagc

SEQ ID NO: 5756948 - DNA, 25 bp, Homo sapien
gtgtataccagtggctgtccctagt

SEQ ID NO: 5756949 - DNA, 25 bp, Homo sapien
acataaaaattaatattctgggtct

SEQ ID NO: 5756950 - DNA, 25 bp, Homo sapien
gaatctcgacattaatcttgcacag

SEQ ID NO: 5756951 - DNA, 25 bp, Homo sapien
tatcaggtcacgtatcagttgaaaa

SEQ ID NO: 5756952 - DNA, 25 bp, Homo sapien
ttccagattgccatattactttatt

SEQ ID NO: 5756953 - DNA, 25 bp, Homo sapien
agattgccatattactttattttaa

SEQ ID NO: 5756954 - DNA, 25 bp, Homo sapien
aatgtcagataccaatttttgcaaa

SEQ ID NO: 5756955 - DNA, 25 bp, Homo sapien
ctgtatgtggcactatcaaatctag

SEQ ID NO: 5756956 - DNA, 25 bp, Homo sapien
atgaagataaaacaatgttcgccaa

SEQ ID NO: 5756957 - DNA, 25 bp, Homo sapien
tgatgacaggagttgcttttgtaca

SEQ ID NO: 5756958 - DNA, 25 bp, Homo sapien
agcaatccagttgctcctgtgctag

SEQ ID NO: 5756959 - DNA, 25 bp, Homo sapien
cagtgacagaacaaaatgacttttc

SEQ ID NO: 5756960 - DNA, 25 bp, Homo sapien
tgggagaggtagccaaattttgaat

SEQ ID NO: 5756961 - DNA, 25 bp, Homo sapien
gtcctatgcactctttgcaagagca

SEQ ID NO: 5756962 - DNA, 25 bp, Homo sapien
cacagcatgtttttcaagtggcttt

SEQ ID NO: 5756963 - DNA, 25 bp, Homo sapien
taattttgatgacaggagttgcttt

SEQ ID NO: 5756964 - DNA, 25 bp, Homo sapien
actcgggagactgaggcaggagaat

SEQ ID NO: 5756965 - DNA, 25 bp, Homo sapien
attttgaactatcaagcatatactg

SEQ ID NO: 5756966 - DNA, 25 bp, Homo sapien
tgcatctagaaatcaaaacttgaaa

SEQ ID NO: 5756967 - DNA, 25 bp, Homo sapien
atattctgggtctgatctgtcagag

SEQ ID NO: 5756968 - DNA, 25 bp, Homo sapien
tgatctgtcagagaataaatatcaa

SEQ ID NO: 5756969 - DNA, 25 bp, Homo sapien
tcagccggtcgagctgcgcgggagg

SEQ ID NO: 5756970 - DNA, 25 bp, Homo sapien
tctgagaagatatcatcatgctgaa

SEQ ID NO: 5756971 - DNA, 25 bp, Homo sapien
tttgatgacaggagttgcttttgta

SEQ ID NO: 5756972 - DNA, 25 bp, Homo sapien
aacatttcacttatcagagattttt

SEQ ID NO: 5756973 - DNA, 25 bp, Homo sapien
taccagtttggttctaacaatgcgt

SEQ ID NO: 5756974 - DNA, 25 bp, Homo sapien
aatcacatgaaatatttaaagtttg

SEQ ID NO: 5756975 - DNA, 25 bp, Homo sapien
tcgagctgcgcgggaggcaaatgaa

SEQ ID NO: 5756976 - DNA, 25 bp, Homo sapien
tactatttctccatatgaattttaa

SEQ ID NO: 5756977 - DNA, 25 bp, Homo sapien
acctcgttatctatcttctacagca

SEQ ID NO: 5756978 - DNA, 25 bp, Homo sapien
gtatatgtaacaaaacacattgcat

SEQ ID NO: 5756979 - DNA, 25 bp, Homo sapien
tttgaagataatggcctgcatttta

SEQ ID NO: 5756980 - DNA, 25 bp, Homo sapien
cttttgaagataatggcctgcattt

SEQ ID NO: 5756981 - DNA, 25 bp, Homo sapien
tgcaccgagctggcggtggctacgg

SEQ ID NO: 5756982 - DNA, 25 bp, Homo sapien
aatcgagtactacatgatgaaattc

SEQ ID NO: 5756983 - DNA, 25 bp, Homo sapien
aggcaaatgaagataaaacaatgtt

SEQ ID NO: 5756984 - DNA, 25 bp, Homo sapien
atctacaactgtttacaaaaacaac

SEQ ID NO: 5756985 - DNA, 25 bp, Homo sapien
gtggcactatcaaatctagatgcag

SEQ ID NO: 5756986 - DNA, 25 bp, Homo sapien
atactcttcagaataatttactgta

SEQ ID NO: 5756987 - DNA, 25 bp, Homo sapien
aattagctgggtgtggtggcacgca

SEQ ID NO: 5756988 - DNA, 25 bp, Homo sapien
aattgggtgtataccagtggctgtc

SEQ ID NO: 5756989 - DNA, 25 bp, Homo sapien
ctatcaaatctagatgcagctactt

SEQ ID NO: 5756990 - DNA, 25 bp, Homo sapien
ctgtacagatatatcaaatcacatg

SEQ ID NO: 5756991 - DNA, 25 bp, Homo sapien
gaaatcaaaacttgaaagtatttcc

SEQ ID NO: 5756992 - DNA, 25 bp, Homo sapien
gcactccaacctgggcgacacagtg

SEQ ID NO: 5756993 - DNA, 25 bp, Homo sapien
attgctgcagaaatgtcctatgcac

SEQ ID NO: 5756994 - DNA, 25 bp, Homo sapien
ggtcgagctgcgcgggaggcaaatg

SEQ ID NO: 5756995 - DNA, 25 bp, Homo sapien
atggtgaaaccccgtctctaccaaa

SEQ ID NO: 5756996 - DNA, 25 bp, Homo sapien
gaaacacttaaacttgctattccat

SEQ ID NO: 5756997 - DNA, 25 bp, Homo sapien
tgaatcgagtactacatgatgaaat

SEQ ID NO: 5756998 - DNA, 25 bp, Homo sapien
cagtttgggaggctgaggcaggtgg

SEQ ID NO: 5756999 - DNA, 25 bp, Homo sapien
ggttatgatcccaaacctgcaggaa

SEQ ID NO: 5757000 - DNA, 25 bp, Homo sapien
ttgtgtgtaattgccattaaatttt

SEQ ID NO: 5757001 - DNA, 25 bp, Homo sapien
gtactacatgatgaaattcttaata

SEQ ID NO: 5757002 - DNA, 25 bp, Homo sapien
ggatctatactcttcagaataattt

SEQ ID NO: 5757003 - DNA, 25 bp, Homo sapien
atcacatgagtgggagaggtagcca

SEQ ID NO: 5757004 - DNA, 25 bp, Homo sapien
cggcgacgggagccggcggcgctgc

SEQ ID NO: 5757005 - DNA, 25 bp, Homo sapien
ataccagtggctgtccctagtaatt

SEQ ID NO: 5757006 - DNA, 25 bp, Homo sapien
aaaagattactaaatgaaggattgc

SEQ ID NO: 5757007 - DNA, 25 bp, Homo sapien
ttcagcttgtgtctttttccttgga

SEQ ID NO: 5757008 - DNA, 25 bp, Homo sapien
catcagggatctatactcttcagaa

SEQ ID NO: 5757009 - DNA, 25 bp, Homo sapien
tctgtgttcacacaagagctgctga

SEQ ID NO: 5757010 - DNA, 25 bp, Homo sapien
caaatgtcagataccaatttttgca

SEQ ID NO: 5757011 - DNA, 25 bp, Homo sapien
aacagcattattttctgtgtctatg

SEQ ID NO: 5757012 - DNA, 25 bp, Homo sapien
ggacccagcggactcggcagcctgg

SEQ ID NO: 5757013 - DNA, 25 bp, Homo sapien
gttattccagaactttaaaagaaga

SEQ ID NO: 5757014 - DNA, 25 bp, Homo sapien
ttgaacccgggaggcagaggttgca

SEQ ID NO: 5757015 - DNA, 25 bp, Homo sapien
tgaagataatggcctgcattttatt

SEQ ID NO: 5757016 - DNA, 25 bp, Homo sapien
gcaaatgaagataaaacaatgttcg

SEQ ID NO: 5757017 - DNA, 25 bp, Homo sapien
atgtttttcaagtggctttgctggg

SEQ ID NO: 5757018 - DNA, 25 bp, Homo sapien
cctgatcacatgagtgggagaggta

SEQ ID NO: 5757019 - DNA, 25 bp, Homo sapien
aaacacattgcatctagaaatcaaa

SEQ ID NO: 5757020 - DNA, 25 bp, Homo sapien
aattttggtctttcagactaccagt

SEQ ID NO: 5757021 - DNA, 25 bp, Homo sapien
aaagattttacctttttgattgctg

SEQ ID NO: 5757022 - DNA, 25 bp, Homo sapien
aaagacagcaaatgtagtctaagag

SEQ ID NO: 5757023 - DNA, 25 bp, Homo sapien
atggcctgcattttattggtctaca

SEQ ID NO: 5757024 - DNA, 25 bp, Homo sapien
tagcccttaatctcttcattgcatt

SEQ ID NO: 5757025 - DNA, 25 bp, Homo sapien
aaattataattacctataaagctgt

SEQ ID NO: 5757026 - DNA, 25 bp, Homo sapien
tgggtctgatctgtcagagaataaa

SEQ ID NO: 5757027 - DNA, 25 bp, Homo sapien
gctgaacttttgaagataatggcct

SEQ ID NO: 5757028 - DNA, 25 bp, Homo sapien
cttatcaggtcacgtatcagttgaa

SEQ ID NO: 5757029 - DNA, 25 bp, Homo sapien
taattacctataaagctgtgaaaaa

SEQ ID NO: 5757030 - DNA, 25 bp, Homo sapien
gtataccagtggctgtccctagtaa

SEQ ID NO: 5757031 - DNA, 25 bp, Homo sapien
agttctcacagcatgtttttcaagt

SEQ ID NO: 5757032 - DNA, 25 bp, Homo sapien
gtcagtgacagaacaaaatgacttt

SEQ ID NO: 5757033 - DNA, 25 bp, Homo sapien
gataatggcctgcattttattggtc

SEQ ID NO: 5757034 - DNA, 25 bp, Homo sapien
catctagaaatcaaaacttgaaagt

SEQ ID NO: 5757035 - DNA, 25 bp, Homo sapien
tctcagcttgattctaaggaacttt

SEQ ID NO: 5757036 - DNA, 25 bp, Homo sapien
ctcaatttgtaggactcatggcagt

SEQ ID NO: 5757037 - DNA, 25 bp, Homo sapien
aaattaaaatttgtgtgtaattgcc

SEQ ID NO: 5757038 - DNA, 25 bp, Homo sapien
ctacttttttgtatggttatgatcc

SEQ ID NO: 5757039 - DNA, 25 bp, Homo sapien
catttggagaattttgaactatcaa

SEQ ID NO: 5757040 - DNA, 25 bp, Homo sapien
aaacaaaacaatcagtgtggataag

SEQ ID NO: 5757041 - DNA, 25 bp, Homo sapien
cattgcatttcatttctgtaaatca

SEQ ID NO: 5757042 - DNA, 25 bp, Homo sapien
ctgaggcaggtggatcacaaggtca

SEQ ID NO: 5757043 - DNA, 25 bp, Homo sapien
ttatcttactctttctgtacagata

SEQ ID NO: 5757044 - DNA, 25 bp, Homo sapien
tgggaattttggtctttcagactac

SEQ ID NO: 5757045 - DNA, 25 bp, Homo sapien
aaaaattaatattctgggtctgatc

SEQ ID NO: 5757046 - DNA, 25 bp, Homo sapien
acctgggcgacacagtgagagtctg

SEQ ID NO: 5757047 - DNA, 25 bp, Homo sapien
ggaattttggtctttcagactacca

SEQ ID NO: 5757048 - DNA, 25 bp, Homo sapien
ttctacagagtctgagaagatatca

SEQ ID NO: 5757049 - DNA, 25 bp, Homo sapien
tgtcagataccaatttttgcaaatt

SEQ ID NO: 5757050 - DNA, 25 bp, Homo sapien
tatttccagggattaggattagaag

SEQ ID NO: 5757051 - DNA, 25 bp, Homo sapien
ggcagaggttgcagtaagtggagat

SEQ ID NO: 5757052 - DNA, 25 bp, Homo sapien
gatggtagccagagaattttatagt

SEQ ID NO: 5757053 - DNA, 25 bp, Homo sapien
taaaatttgtgtgtaattgccatta

SEQ ID NO: 5757054 - DNA, 25 bp, Homo sapien
tcacgcctgtaatcctagcagtttg

SEQ ID NO: 5757055 - DNA, 25 bp, Homo sapien
cctggcgcagtggctcacgcctgta

SEQ ID NO: 5757056 - DNA, 25 bp, Homo sapien
taaatcagattaagtccttaatatt

SEQ ID NO: 5757057 - DNA, 25 bp, Homo sapien
taaatgaaggattgctaaatgtttt

SEQ ID NO: 5757058 - DNA, 25 bp, Homo sapien
gatattttagtgcttcaagactgct

SEQ ID NO: 5757059 - DNA, 25 bp, Homo sapien
tacctttttgattgctgcagaaatg

SEQ ID NO: 5757060 - DNA, 25 bp, Homo sapien
aaaattgggtgtataccagtggctg

SEQ ID NO: 5757061 - DNA, 25 bp, Homo sapien
tacatttggagaattttgaactatc

SEQ ID NO: 5757062 - DNA, 25 bp, Homo sapien
gtcgcgtaggacccagcggactcgg

SEQ ID NO: 5757063 - DNA, 25 bp, Homo sapien
aggaaacttgaaatctgagtttaaa

SEQ ID NO: 5757064 - DNA, 25 bp, Homo sapien
atctcgacattaatcttgcacagag

SEQ ID NO: 5757065 - DNA, 25 bp, Homo sapien
atggttatgatcccaaacctgcagg

SEQ ID NO: 5757066 - DNA, 25 bp, Homo sapien
gtggataagaaatattcagcttgtg

SEQ ID NO: 5757067 - DNA, 25 bp, Homo sapien
agaggtagccaaattttgaattccc

SEQ ID NO: 5757068 - DNA, 25 bp, Homo sapien
gagacattccagattgccatattac

SEQ ID NO: 5757069 - DNA, 25 bp, Homo sapien
aaattcttacaacagcattattttc

SEQ ID NO: 5757070 - DNA, 25 bp, Homo sapien
caaaacacattgcatctagaaatca

SEQ ID NO: 5757071 - DNA, 25 bp, Homo sapien
caatccagttgctcctgtgctagat

SEQ ID NO: 5757072 - DNA, 25 bp, Homo sapien
aggctgctcggaagatttttttagg

SEQ ID NO: 5757073 - DNA, 25 bp, Homo sapien
aacttctttaatctacaactgttta

SEQ ID NO: 5757074 - DNA, 25 bp, Homo sapien
accgcggcccccggtggtgggctca

SEQ ID NO: 5757075 - DNA, 25 bp, Homo sapien
tgctgaatctgatcatactgttttt

SEQ ID NO: 5757076 - DNA, 25 bp, Homo sapien
tctacatttggagaattttgaacta

SEQ ID NO: 5757077 - DNA, 25 bp, Homo sapien
gcttagtaaaaaattgggtgtatac

SEQ ID NO: 5757078 - DNA, 25 bp, Homo sapien
aatgaaggattgctaaatgtttttg

SEQ ID NO: 5757079 - DNA, 25 bp, Homo sapien
atcttgcacagaggacttctacaga

SEQ ID NO: 5757080 - DNA, 25 bp, Homo sapien
caagtggctttgctggggtttactt

SEQ ID NO: 5757081 - DNA, 25 bp, Homo sapien
tgcacagaggacttctacagagtct

SEQ ID NO: 5757082 - DNA, 25 bp, Homo sapien
gtgtggataagaaatattcagcttg

SEQ ID NO: 5757083 - DNA, 25 bp, Homo sapien
cagtgagagtctgtctcaaaaaaaa

SEQ ID NO: 5757084 - DNA, 25 bp, Homo sapien
tctgtaaatcagattaagtccttaa

SEQ ID NO: 5757085 - DNA, 25 bp, Homo sapien
gagatacatactatttctccatatg

SEQ ID NO: 5757086 - DNA, 25 bp, Homo sapien
ccggtggtgggctcagccggtcgag

SEQ ID NO: 5757087 - DNA, 25 bp, Homo sapien
acttatcagagatttttatatttat

SEQ ID NO: 5757088 - DNA, 25 bp, Homo sapien
ttattaaatgtttttatcttactct

SEQ ID NO: 5757089 - DNA, 25 bp, Homo sapien
tgttcgccaacctaaaatacgtttc

SEQ ID NO: 5757090 - DNA, 25 bp, Homo sapien
ttcttaataaacctatggaaacact

SEQ ID NO: 5757091 - DNA, 25 bp, Homo sapien
aggtctctcataagcctattcttcc

SEQ ID NO: 5757092 - DNA, 25 bp, Homo sapien
gccctcagattctcagcttgattct

SEQ ID NO: 5757093 - DNA, 25 bp, Homo sapien
acttttttgtatggttatgatccca

SEQ ID NO: 5757094 - DNA, 25 bp, Homo sapien
ttaagatattttagtgcttcaagac

SEQ ID NO: 5757095 - DNA, 25 bp, Homo sapien
gatctgtaaaaacttctttaatcta

SEQ ID NO: 5757096 - DNA, 25 bp, Homo sapien
tacagcagtggttgttgctgaactt

SEQ ID NO: 5757097 - DNA, 25 bp, Homo sapien
gctgagaaggcctggcgcagtggct

SEQ ID NO: 5757098 - DNA, 25 bp, Homo sapien
tattagaggaaacttgaaatctgag

SEQ ID NO: 5757099 - DNA, 25 bp, Homo sapien
aatcctagcagtttgggaggctgag

SEQ ID NO: 5757100 - DNA, 25 bp, Homo sapien
gtaacaaaacacattgcatctagaa

SEQ ID NO: 5757101 - DNA, 25 bp, Homo sapien
ggcggcgctgcgggtcagcggtcgc

SEQ ID NO: 5757102 - DNA, 25 bp, Homo sapien
aaaattagctgggtgtggtggcacg

SEQ ID NO: 5757103 - DNA, 25 bp, Homo sapien
gtgacagaacaaaatgacttttctt

SEQ ID NO: 5757104 - DNA, 25 bp, Homo sapien
cagcgctatgactttaaatccaagg

SEQ ID NO: 5757105 - DNA, 25 bp, Homo sapien
atttttttaggtctctcataagcct

SEQ ID NO: 5757106 - DNA, 25 bp, Homo sapien
gctgctcggaagatttttttaggtc

SEQ ID NO: 5757107 - DNA, 25 bp, Homo sapien
tccaaggctgctcggaagatttttt

SEQ ID NO: 5757108 - DNA, 25 bp, Homo sapien
gaggttgcagtaagtggagatcacg

SEQ ID NO: 5757109 - DNA, 25 bp, Homo sapien
tcctgtgctagatggtagccagaga

SEQ ID NO: 5757110 - DNA, 25 bp, Homo sapien
gaaatcccactaaagcatagttgta

SEQ ID NO: 5757111 - DNA, 25 bp, Homo sapien
gagtactacatgatgaaattcttaa

SEQ ID NO: 5757112 - DNA, 25 bp, Homo sapien
ttatgatcccaaacctgcaggaaat

SEQ ID NO: 5757113 - DNA, 25 bp, Homo sapien
taagtggagatcacgccactgcact

SEQ ID NO: 5757114 - DNA, 25 bp, Homo sapien
gttgttgctgaacttttgaagataa

SEQ ID NO: 5757115 - DNA, 25 bp, Homo sapien
ctatcttctacagcagtggttgttg

SEQ ID NO: 5757116 - DNA, 25 bp, Homo sapien
ttaatgtagagatacatactatttc

SEQ ID NO: 5757117 - DNA, 25 bp, Homo sapien
agtttggttctaacaatgcgttatt

SEQ ID NO: 5757118 - DNA, 25 bp, Homo sapien
tctgatctgtcagagaataaatatc

SEQ ID NO: 5757119 - DNA, 25 bp, Homo sapien
ccaaacctgcaggaaatcccactaa

SEQ ID NO: 5757120 - DNA, 25 bp, Homo sapien
attcttacaacagcattattttctg

SEQ ID NO: 5757121 - DNA, 25 bp, Homo sapien
ggcaggagaatcacttgaacccggg

SEQ ID NO: 5757122 - DNA, 25 bp, Homo sapien
gatcatactgttttttaaaagttta

SEQ ID NO: 5757123 - DNA, 25 bp, Homo sapien
caaatgtagtctaagagcactgaat

SEQ ID NO: 5757124 - DNA, 25 bp, Homo sapien
ttgcagtaagtggagatcacgccac

SEQ ID NO: 5757125 - DNA, 25 bp, Homo sapien
cggactcggcagcctggggcgcccg

SEQ ID NO: 5757126 - DNA, 25 bp, Homo sapien
attctcagcttgattctaaggaact

SEQ ID NO: 5757127 - DNA, 25 bp, Homo sapien
aaacctgcaggaaatcccactaaag

SEQ ID NO: 5757128 - DNA, 25 bp, Homo sapien
ctcgacattaatcttgcacagagga

SEQ ID NO: 5757129 - DNA, 25 bp, Homo sapien
cagggattaggattagaaggaatat

SEQ ID NO: 5757130 - DNA, 25 bp, Homo sapien
aagaaatattcagcttgtgtctttt

SEQ ID NO: 5757131 - DNA, 25 bp, Homo sapien
gcagtggttgttgctgaacttttga

SEQ ID NO: 5757132 - DNA, 25 bp, Homo sapien
tactcattgatctgtaaaaacttct

SEQ ID NO: 5757133 - DNA, 25 bp, Homo sapien
aggaactttcagctggttctcaatt

SEQ ID NO: 5757134 - DNA, 25 bp, Homo sapien
ctacaaagacagcaaatgtagtcta

SEQ ID NO: 5757135 - DNA, 25 bp, Homo sapien
ctcatggcagttctcacagcatgtt

SEQ ID NO: 5757136 - DNA, 25 bp, Homo sapien
aagattactaaatgaaggattgcta

SEQ ID NO: 5757137 - DNA, 25 bp, Homo sapien
actatctttaactggtttttcacga

SEQ ID NO: 5757138 - DNA, 25 bp, Homo sapien
tgctggggtttactttgagaaaatc

SEQ ID NO: 5757139 - DNA, 25 bp, Homo sapien
aattttaagatattttagtgcttca

SEQ ID NO: 5757140 - DNA, 25 bp, Homo sapien
tggtttttcacgatggggcactagg

SEQ ID NO: 5757141 - DNA, 25 bp, Homo sapien
gcacacaacaaatgtcagataccaa

SEQ ID NO: 5757142 - DNA, 25 bp, Homo sapien
gggcgcccggcggagctgaaccgcg

SEQ ID NO: 5757143 - DNA, 25 bp, Homo sapien
cctgaccaacatggtgaaaccccgt

SEQ ID NO: 5757144 - DNA, 25 bp, Homo sapien
ctgggtgtggtggcacgcacctgta

SEQ ID NO: 5757145 - DNA, 25 bp, Homo sapien
ttacaacagcattattttctgtgtc

SEQ ID NO: 5757146 - DNA, 25 bp, Homo sapien
gtagccaaattttgaattccctttc

SEQ ID NO: 5757147 - DNA, 25 bp, Homo sapien
ctttctgtacagatatatcaaatca

SEQ ID NO: 5757148 - DNA, 25 bp, Homo sapien
ttctcacagcatgtttttcaagtgg

SEQ ID NO: 5757149 - DNA, 25 bp, Homo sapien
ctattccatcagggatctatactct

SEQ ID NO: 5757150 - DNA, 25 bp, Homo sapien
ttttttaggtctctcataagcctat

SEQ ID NO: 5757151 - DNA, 25 bp, Homo sapien
atgtcctatgcactctttgcaagag

SEQ ID NO: 5757152 - DNA, 25 bp, Homo sapien
tattcagcttgtgtctttttccttg

SEQ ID NO: 5757153 - DNA, 25 bp, Homo sapien
tcctagcagtttgggaggctgaggc

SEQ ID NO: 5757154 - DNA, 25 bp, Homo sapien
cacaagagctgctgagaaggcctgg

SEQ ID NO: 5757155 - DNA, 25 bp, Homo sapien
cggaagatttttttaggtctctcat

SEQ ID NO: 5757156 - DNA, 25 bp, Homo sapien
gactgctgaaagcaatccagttgct

SEQ ID NO: 5757157 - DNA, 25 bp, Homo sapien
caagcatatactgtatacagttaga

SEQ ID NO: 5757158 - DNA, 25 bp, Homo sapien
ttctgtacagatatatcaaatcaca

SEQ ID NO: 5757159 - DNA, 25 bp, Homo sapien
agaaacaaaacaatcagtgtggata

SEQ ID NO: 5757160 - DNA, 25 bp, Homo sapien
ttggtctttcagactaccagtttgg

SEQ ID NO: 5757161 - DNA, 25 bp, Homo sapien
cagtgtggataagaaatattcagct

SEQ ID NO: 5757162 - DNA, 25 bp, Homo sapien
gactgaggcaggagaatcacttgaa

SEQ ID NO: 5757163 - DNA, 25 bp, Homo sapien
atgtttttggttcaattacataaaa

SEQ ID NO: 5757164 - DNA, 25 bp, Homo sapien
cttggagacattccagattgccata

SEQ ID NO: 5757165 - DNA, 25 bp, Homo sapien
gatcacgccactgcactccaacctg

SEQ ID NO: 5757166 - DNA, 25 bp, Homo sapien
ctatgcttagtaaaaaattgggtgt

SEQ ID NO: 5757167 - DNA, 25 bp, Homo sapien
tctttaatctacaactgtttacaaa

SEQ ID NO: 5757168 - DNA, 25 bp, Homo sapien
ctcggcagcctggggcgcccggcgg

SEQ ID NO: 5757169 - DNA, 25 bp, Homo sapien
tgcattttattggtctacaaagaca

SEQ ID NO: 5757170 - DNA, 25 bp, Homo sapien
gcccccggtggtgggctcagccggt

SEQ ID NO: 5757171 - DNA, 25 bp, Homo sapien
cctgggaattttggtctttcagact

SEQ ID NO: 5757172 - DNA, 25 bp, Homo sapien
acacaacaaatgtcagataccaatt

SEQ ID NO: 5757173 - DNA, 25 bp, Homo sapien
gtatggttatgatcccaaacctgca

SEQ ID NO: 5757174 - DNA, 25 bp, Homo sapien
taatggcctgcattttattggtcta

SEQ ID NO: 5757175 - DNA, 25 bp, Homo sapien
gaattccctttctgtgttcacacaa

SEQ ID NO: 5757176 - DNA, 25 bp, Homo sapien
tactgtatgtggcactatcaaatct

SEQ ID NO: 5757177 - DNA, 25 bp, Homo sapien
actcttcagaataatttactgtatg

SEQ ID NO: 5757178 - DNA, 25 bp, Homo sapien
tggcacgcacctgtagtcccagcta

SEQ ID NO: 5757179 - DNA, 25 bp, Homo sapien
ttagtaaaaaattgggtgtatacca

SEQ ID NO: 5757180 - DNA, 25 bp, Homo sapien
cctattcttccctgatcacatgagt

SEQ ID NO: 5757181 - DNA, 25 bp, Homo sapien
gatcacaaggtcaagagattgagac

SEQ ID NO: 5757182 - DNA, 25 bp, Homo sapien
ttttccttggagccatccttgtaat

SEQ ID NO: 5757183 - DNA, 25 bp, Homo sapien
cctttctgtgttcacacaagagctg

SEQ ID NO: 5757184 - DNA, 25 bp, Homo sapien
ccttgtaataacagctacttttttg

SEQ ID NO: 5757185 - DNA, 25 bp, Homo sapien
gtttttcacgatggggcactaggaa

SEQ ID NO: 5757186 - DNA, 25 bp, Homo sapien
tggctacggcgacgggagccggcgg

SEQ ID NO: 5757187 - DNA, 25 bp, Homo sapien
aattgccattaaattttcaaaatgt

SEQ ID NO: 5757188 - DNA, 25 bp, Homo sapien
tggatcacaaggtcaagagattgag

SEQ ID NO: 5757189 - DNA, 25 bp, Homo sapien
gagctggcggtggctacggcgacgg

SEQ ID NO: 5757190 - DNA, 25 bp, Homo sapien
atcatgctgaatctgatcatactgt

SEQ ID NO: 5757191 - DNA, 25 bp, Homo sapien
ggcctgcattttattggtctacaaa

SEQ ID NO: 5757192 - DNA, 25 bp, Homo sapien
acagcaaatgtagtctaagagcact

SEQ ID NO: 5757193 - DNA, 25 bp, Homo sapien
agtatttccagggattaggattaga

SEQ ID NO: 5757194 - DNA, 25 bp, Homo sapien
aaatgtttttatcttactctttctg

SEQ ID NO: 5757195 - DNA, 25 bp, Homo sapien
cattgatctgtaaaaacttctttaa

SEQ ID NO: 5757196 - DNA, 25 bp, Homo sapien
acccagcggactcggcagcctgggg

SEQ ID NO: 5757197 - DNA, 25 bp, Homo sapien
ctgaatctgatcatactgtttttta

SEQ ID NO: 5757198 - DNA, 25 bp, Homo sapien
caagagctgctgagaaggcctggcg

SEQ ID NO: 5757199 - DNA, 25 bp, Homo sapien
agacagcaaatgtagtctaagagca

SEQ ID NO: 5757200 - DNA, 25 bp, Homo sapien
ttttaggtctctcataagcctattc

SEQ ID NO: 5757201 - DNA, 25 bp, Homo sapien
caaaaattagctgggtgtggtggca

SEQ ID NO: 5757202 - DNA, 25 bp, Homo sapien
ttccttggagccatccttgtaataa

SEQ ID NO: 5757203 - DNA, 25 bp, Homo sapien
tatgactttaaatccaaggctgctc

SEQ ID NO: 5757204 - DNA, 25 bp, Homo sapien
gctatgactttaaatccaaggctgc

SEQ ID NO: 5757205 - DNA, 25 bp, Homo sapien
attggtctacaaagacagcaaatgt

SEQ ID NO: 5757206 - DNA, 25 bp, Homo sapien
tggagacattccagattgccatatt

SEQ ID NO: 5757207 - DNA, 25 bp, Homo sapien
agtggctcacgcctgtaatcctagc

SEQ ID NO: 5757208 - DNA, 25 bp, Homo sapien
ttggagccatccttgtaataacagc

SEQ ID NO: 5757209 - DNA, 25 bp, Homo sapien
gaacattttactcattgatctgtaa

SEQ ID NO: 5757210 - DNA, 25 bp, Homo sapien
tggctcacgcctgtaatcctagcag

SEQ ID NO: 5757211 - DNA, 25 bp, Homo sapien
ctgctgaaagcaatccagttgctcc

SEQ ID NO: 5757212 - DNA, 25 bp, Homo sapien
ctcataagcctattcttccctgatc

SEQ ID NO: 5757213 - DNA, 25 bp, Homo sapien
actaaatgaaggattgctaaatgtt

SEQ ID NO: 5757214 - DNA, 25 bp, Homo sapien
tcaggtcacgtatcagttgaaaatt

SEQ ID NO: 5757215 - DNA, 25 bp, Homo sapien
taataaacctatggaaacacttaaa

SEQ ID NO: 5757216 - DNA, 25 bp, Homo sapien
gtctatgcttagtaaaaaattgggt

SEQ ID NO: 5757217 - DNA, 25 bp, Homo sapien
tttctgtgttcacacaagagctgct

SEQ ID NO: 5757218 - DNA, 25 bp, Homo sapien
caggtggatcacaaggtcaagagat

SEQ ID NO: 5757219 - DNA, 25 bp, Homo sapien
agcggtcgcgtaggacccagcggac

SEQ ID NO: 5757220 - DNA, 25 bp, Homo sapien
ttttagtgcttcaagactgctgaaa

SEQ ID NO: 5757221 - DNA, 25 bp, Homo sapien
tttggagaattttgaactatcaagc

SEQ ID NO: 5757222 - DNA, 25 bp, Homo sapien
catttctgtaaatcagattaagtcc

SEQ ID NO: 5757223 - DNA, 25 bp, Homo sapien
aaaacaatcagtgtggataagaaat

SEQ ID NO: 5757224 - DNA, 25 bp, Homo sapien
aaaacatttcacttatcagagattt

SEQ ID NO: 5757225 - DNA, 25 bp, Homo sapien
tgagaaggcctggcgcagtggctca

SEQ ID NO: 5757226 - DNA, 25 bp, Homo sapien
aaggacctcgttatctatcttctac

SEQ ID NO: 5757227 - DNA, 25 bp, Homo sapien
gtgagagtctgtctcaaaaaaaaaa

SEQ ID NO: 5757228 - DNA, 25 bp, Homo sapien
cgggagccggcggcgctgcgggtca

SEQ ID NO: 5757229 - DNA, 25 bp, Homo sapien
agattttacctttttgattgctgca

SEQ ID NO: 5757230 - DNA, 25 bp, Homo sapien
gctggcggtggctacggcgacggga

SEQ ID NO: 5757231 - DNA, 25 bp, Homo sapien
atactatctttaactggtttttcac

SEQ ID NO: 5757232 - DNA, 25 bp, Homo sapien
actgaatcgagtactacatgatgaa

SEQ ID NO: 5757233 - DNA, 25 bp, Homo sapien
ctagcagtttgggaggctgaggcag

SEQ ID NO: 5757234 - DNA, 25 bp, Homo sapien
ctttattttaaacagcgctatgact

SEQ ID NO: 5757235 - DNA, 25 bp, Homo sapien
catgatgaaattcttaataaaccta

SEQ ID NO: 5757236 - DNA, 25 bp, Homo sapien
ctgcactccaacctgggcgacacag

SEQ ID NO: 5757237 - DNA, 25 bp, Homo sapien
tatcagttgaaaattcttacaacag

SEQ ID NO: 5757238 - DNA, 25 bp, Homo sapien
tatgcactctttgcaagagcacaca

SEQ ID NO: 5757239 - DNA, 25 bp, Homo sapien
acgcacctgtagtcccagctactcg

SEQ ID NO: 5757240 - DNA, 25 bp, Homo sapien
ttgggaggctgaggcaggtggatca

SEQ ID NO: 5757241 - DNA, 25 bp, Homo sapien
cagctacttatcaggtcacgtatca

SEQ ID NO: 5757242 - DNA, 25 bp, Homo sapien
attttgatgacaggagttgcttttg

SEQ ID NO: 5757243 - DNA, 25 bp, Homo sapien
ctctttgcaagagcacacaacaaat

SEQ ID NO: 5757244 - DNA, 25 bp, Homo sapien
tggtgggctcagccggtcgagctgc

SEQ ID NO: 5757245 - DNA, 25 bp, Homo sapien
tgccatattactttattttaaacag

SEQ ID NO: 5757246 - DNA, 25 bp, Homo sapien
atgtttttatcttactctttctgta

SEQ ID NO: 5757247 - DNA, 25 bp, Homo sapien
gataagatatgtgtatatgtaacaa

SEQ ID NO: 5757248 - DNA, 25 bp, Homo sapien
ggggcactaggaatctcgacattaa

SEQ ID NO: 5757249 - DNA, 25 bp, Homo sapien
cattttattggtctacaaagacagc

SEQ ID NO: 5757250 - DNA, 25 bp, Homo sapien
atgaacattttactcattgatctgt

SEQ ID NO: 5757251 - DNA, 25 bp, Homo sapien
agtgggagaggtagccaaattttga

SEQ ID NO: 5757252 - DNA, 25 bp, Homo sapien
attctaaggaactttcagctggttc

SEQ ID NO: 5757253 - DNA, 25 bp, Homo sapien
agataaaacaatgttcgccaaccta

SEQ ID NO: 5757254 - DNA, 25 bp, Homo sapien
tctaaggaactttcagctggttctc

SEQ ID NO: 5757255 - DNA, 25 bp, Homo sapien
aaatgtcctatgcactctttgcaag

SEQ ID NO: 5757256 - DNA, 25 bp, Homo sapien
gcccttaatctcttcattgcatttc

SEQ ID NO: 5757257 - DNA, 25 bp, Homo sapien
cacagaggacttctacagagtctga

SEQ ID NO: 5757258 - DNA, 25 bp, Homo sapien
aattttatagtaatggaggttagcc

SEQ ID NO: 5757259 - DNA, 25 bp, Homo sapien
ggtctgatctgtcagagaataaata

SEQ ID NO: 5757260 - DNA, 25 bp, Homo sapien
taggacccagcggactcggcagcct

SEQ ID NO: 5757261 - DNA, 25 bp, Homo sapien
tattaaatgaacattttactcattg

SEQ ID NO: 5757262 - DNA, 25 bp, Homo sapien
gtaataacagctacttttttgtatg

SEQ ID NO: 5757263 - DNA, 25 bp, Homo sapien
attgcatctagaaatcaaaacttga

SEQ ID NO: 5757264 - DNA, 25 bp, Homo sapien
ccggtcgagctgcgcgggaggcaaa

SEQ ID NO: 5757265 - DNA, 25 bp, Homo sapien
atctatcttctacagcagtggttgt

SEQ ID NO: 5757266 - DNA, 25 bp, Homo sapien
agatatatcaaatcacatgaaatat

SEQ ID NO: 5757267 - DNA, 25 bp, Homo sapien
ctatactcttcagaataatttactg

SEQ ID NO: 5757268 - DNA, 25 bp, Homo sapien
aacttgaaagtatttccagggatta

SEQ ID NO: 5757269 - DNA, 25 bp, Homo sapien
tacaaaagattactaaatgaaggat

SEQ ID NO: 5757270 - DNA, 25 bp, Homo sapien
agttgcttttgtacagtggccctca

SEQ ID NO: 5757271 - DNA, 25 bp, Homo sapien
gtttacaaaaacaacattcaaacaa

SEQ ID NO: 5757272 - DNA, 25 bp, Homo sapien
gaacccgggaggcagaggttgcagt

SEQ ID NO: 5757273 - DNA, 25 bp, Homo sapien
aatacaaaaattagctgggtgtggt

SEQ ID NO: 5757274 - DNA, 25 bp, Homo sapien
cctatgcactctttgcaagagcaca

SEQ ID NO: 5757275 - DNA, 25 bp, Homo sapien
agtggagatcacgccactgcactcc

SEQ ID NO: 5757276 - DNA, 25 bp, Homo sapien
ctttttccttggagccatccttgta

SEQ ID NO: 5757277 - DNA, 25 bp, Homo sapien
ggcctggcgcagtggctcacgcctg

SEQ ID NO: 5757278 - DNA, 25 bp, Homo sapien
taaagcatagttgtatactatcttt

SEQ ID NO: 5757279 - DNA, 25 bp, Homo sapien
gtctacaaagacagcaaatgtagtc

SEQ ID NO: 5757280 - DNA, 25 bp, Homo sapien
attctgggtctgatctgtcagagaa

SEQ ID NO: 5757281 - DNA, 25 bp, Homo sapien
gcacctgtagtcccagctactcggg

SEQ ID NO: 5757282 - DNA, 25 bp, Homo sapien
ggtggatcacaaggtcaagagattg

SEQ ID NO: 5757283 - DNA, 25 bp, Homo sapien
tctagatgcagctacttatcaggtc

SEQ ID NO: 5757284 - DNA, 25 bp, Homo sapien
aagagcacacaacaaatgtcagata

SEQ ID NO: 5757285 - DNA, 25 bp, Homo sapien
gcttgtgtctttttccttggagcca

SEQ ID NO: 5757286 - DNA, 25 bp, Homo sapien
aatcaaaacttgaaagtatttccag

SEQ ID NO: 5757287 - DNA, 25 bp, Homo sapien
ggtggctacggcgacgggagccggc

SEQ ID NO: 5757288 - DNA, 25 bp, Homo sapien
tgacttttcttggagacattccaga

SEQ ID NO: 5757289 - DNA, 25 bp, Homo sapien
actggtttttcacgatggggcacta

SEQ ID NO: 5757290 - DNA, 25 bp, Homo sapien
tcacttatcagagatttttatattt

SEQ ID NO: 5757291 - DNA, 25 bp, Homo sapien
aagagattgagactatcctgaccaa

SEQ ID NO: 5757292 - DNA, 25 bp, Homo sapien
cttaaacttgctattccatcaggga

SEQ ID NO: 5757293 - DNA, 25 bp, Homo sapien
ggacctcgttatctatcttctacag

SEQ ID NO: 5757294 - DNA, 25 bp, Homo sapien
acagctacttttttgtatggttatg

SEQ ID NO: 5757295 - DNA, 25 bp, Homo sapien
gcagttctcacagcatgtttttcaa

SEQ ID NO: 5757296 - DNA, 25 bp, Homo sapien
agctgggtgtggtggcacgcacctg

SEQ ID NO: 5757297 - DNA, 25 bp, Homo sapien
cgcggcccccggtggtgggctcagc

SEQ ID NO: 5757298 - DNA, 25 bp, Homo sapien
ccttggagccatccttgtaataaca

SEQ ID NO: 5757299 - DNA, 25 bp, Homo sapien
gagctgcgcgggaggcaaatgaaga

SEQ ID NO: 5757300 - DNA, 25 bp, Homo sapien
aaggtcaagagattgagactatcct

SEQ ID NO: 5757301 - DNA, 25 bp, Homo sapien
tactttattttaaacagcgctatga

SEQ ID NO: 5757302 - DNA, 25 bp, Homo sapien
ggtctttcagactaccagtttggtt

SEQ ID NO: 5757303 - DNA, 25 bp, Homo sapien
agtaattttgatgacaggagttgct

SEQ ID NO: 5757304 - DNA, 25 bp, Homo sapien
gaagataaaacaatgttcgccaacc

SEQ ID NO: 5757305 - DNA, 25 bp, Homo sapien
acaaggtcaagagattgagactatc

SEQ ID NO: 5757306 - DNA, 25 bp, Homo sapien
caatttgtaggactcatggcagttc

SEQ ID NO: 5757307 - DNA, 25 bp, Homo sapien
taatggaggttagcccttaatctct

SEQ ID NO: 5757308 - DNA, 25 bp, Homo sapien
cttgaaagtatttccagggattagg

SEQ ID NO: 5757309 - DNA, 25 bp, Homo sapien
tgaaggattgctaaatgtttttggt

SEQ ID NO: 5757310 - DNA, 25 bp, Homo sapien
ggaggttagcccttaatctcttcat

SEQ ID NO: 5757311 - DNA, 25 bp, Homo sapien
atatgtaacaaaacacattgcatct

SEQ ID NO: 5757312 - DNA, 25 bp, Homo sapien
aactgtttacaaaaacaacattcaa

SEQ ID NO: 5757313 - DNA, 25 bp, Homo sapien
gcctgtaatcctagcagtttgggag

SEQ ID NO: 5757314 - DNA, 25 bp, Homo sapien
acattttactcattgatctgtaaaa

SEQ ID NO: 5757315 - DNA, 25 bp, Homo sapien
ttttgaattccctttctgtgttcac

SEQ ID NO: 5757316 - DNA, 25 bp, Homo sapien
aagaagaaggacctcgttatctatc

SEQ ID NO: 5757317 - DNA, 25 bp, Homo sapien
gcgcagtggctcacgcctgtaatcc

SEQ ID NO: 5757318 - DNA, 25 bp, Homo sapien
gcgctatgactttaaatccaaggct

SEQ ID NO: 5757319 - DNA, 25 bp, Homo sapien
gactcatggcagttctcacagcatg

SEQ ID NO: 5757320 - DNA, 25 bp, Homo sapien
gaggcaggtggatcacaaggtcaag

SEQ ID NO: 5757321 - DNA, 25 bp, Homo sapien
atcaagcatatactgtatacagtta

SEQ ID NO: 5757322 - DNA, 25 bp, Homo sapien
tactctttctgtacagatatatcaa

SEQ ID NO: 5757323 - DNA, 25 bp, Homo sapien
atcttactctttctgtacagatata

SEQ ID NO: 5757324 - DNA, 25 bp, Homo sapien
tattccagaactttaaaagaagaag

SEQ ID NO: 5757325 - DNA, 25 bp, Homo sapien
tgccaccacacccagctaatttttg

SEQ ID NO: 5757326 - DNA, 25 bp, Homo sapien
tagggacagccactggtatacaccc

SEQ ID NO: 5757327 - DNA, 25 bp, Homo sapien
ttaatctgatttacagaaatgaaat

SEQ ID NO: 5757328 - DNA, 25 bp, Homo sapien
cagactctcactgtgtcgcccaggt

SEQ ID NO: 5757329 - DNA, 25 bp, Homo sapien
gtataaatataaaaatctctgataa

SEQ ID NO: 5757330 - DNA, 25 bp, Homo sapien
tacaggcgtgagccactgcgccagg

SEQ ID NO: 5757331 - DNA, 25 bp, Homo sapien
tatacagtatatgcttgatagttca

SEQ ID NO: 5757332 - DNA, 25 bp, Homo sapien
aagacacaagctgaatatttcttat

SEQ ID NO: 5757333 - DNA, 25 bp, Homo sapien
atttgatatttattctctgacagat

SEQ ID NO: 5757334 - DNA, 25 bp, Homo sapien
tgctgtgagaactgccatgagtcct

SEQ ID NO: 5757335 - DNA, 25 bp, Homo sapien
tttcaagttttgatttctagatgca

SEQ ID NO: 5757336 - DNA, 25 bp, Homo sapien
cggttcagctccgccgggcgcccca

SEQ ID NO: 5757337 - DNA, 25 bp, Homo sapien
aatattaaggacttaatctgattta

SEQ ID NO: 5757338 - DNA, 25 bp, Homo sapien
atttcatgtgatttgatatatctgt

SEQ ID NO: 5757339 - DNA, 25 bp, Homo sapien
gtaaaccccagcaaagccacttgaa

SEQ ID NO: 5757340 - DNA, 25 bp, Homo sapien
tcgagattcctagtgccccatcgtg

SEQ ID NO: 5757341 - DNA, 25 bp, Homo sapien
gaacacagaaagggaattcaaaatt

SEQ ID NO: 5757342 - DNA, 25 bp, Homo sapien
aagtaaaccccagcaaagccacttg

SEQ ID NO: 5757343 - DNA, 25 bp, Homo sapien
aatgcaatgaagagattaagggcta

SEQ ID NO: 5757344 - DNA, 25 bp, Homo sapien
gggggccgcggttcagctccgccgg

SEQ ID NO: 5757345 - DNA, 25 bp, Homo sapien
tgtttttgtaaacagttgtagatta

SEQ ID NO: 5757346 - DNA, 25 bp, Homo sapien
tggctacctctcccactcatgtgat

SEQ ID NO: 5757347 - DNA, 25 bp, Homo sapien
tgatctccacttactgcaacctctg

SEQ ID NO: 5757348 - DNA, 25 bp, Homo sapien
cagatcagacccagaatattaattt

SEQ ID NO: 5757349 - DNA, 25 bp, Homo sapien
atattccttctaatcctaatccctg

SEQ ID NO: 5757350 - DNA, 25 bp, Homo sapien
cggctcccgtcgccgtagccaccgc

SEQ ID NO: 5757351 - DNA, 25 bp, Homo sapien
gagacctaaaaaaatcttccgagca

SEQ ID NO: 5757352 - DNA, 25 bp, Homo sapien
atatttcttatccacactgattgtt

SEQ ID NO: 5757353 - DNA, 25 bp, Homo sapien
ttttttgagacagactctcactgtg

SEQ ID NO: 5757354 - DNA, 25 bp, Homo sapien
cctccattactataaaattctctgg

SEQ ID NO: 5757355 - DNA, 25 bp, Homo sapien
tggctccaaggaaaaagacacaagc

SEQ ID NO: 5757356 - DNA, 25 bp, Homo sapien
gaaaaagacacaagctgaatatttc

SEQ ID NO: 5757357 - DNA, 25 bp, Homo sapien
ggaaatactttcaagttttgatttc

SEQ ID NO: 5757358 - DNA, 25 bp, Homo sapien
gtatatgcttgatagttcaaaattc

SEQ ID NO: 5757359 - DNA, 25 bp, Homo sapien
tgacccgcagcgccgccggctcccg

SEQ ID NO: 5757360 - DNA, 25 bp, Homo sapien
gactacatttgctgtctttgtagac

SEQ ID NO: 5757361 - DNA, 25 bp, Homo sapien
aaaaaatcttccgagcagccttgga

SEQ ID NO: 5757362 - DNA, 25 bp, Homo sapien
tggagaaatagtatgtatctctaca

SEQ ID NO: 5757363 - DNA, 25 bp, Homo sapien
tcagcagctcttgtgtgaacacaga

SEQ ID NO: 5757364 - DNA, 25 bp, Homo sapien
gaactgccatgagtcctacaaattg

SEQ ID NO: 5757365 - DNA, 25 bp, Homo sapien
actggtagtctgaaagaccaaaatt

SEQ ID NO: 5757366 - DNA, 25 bp, Homo sapien
ttactataaaattctctggctacca

SEQ ID NO: 5757367 - DNA, 25 bp, Homo sapien
aaagcaactcctgtcatcaaaatta

SEQ ID NO: 5757368 - DNA, 25 bp, Homo sapien
tctcagactctgtagaagtcctctg

SEQ ID NO: 5757369 - DNA, 25 bp, Homo sapien
ccatgagtcctacaaattgagaacc

SEQ ID NO: 5757370 - DNA, 25 bp, Homo sapien
gagacagactctcactgtgtcgccc

SEQ ID NO: 5757371 - DNA, 25 bp, Homo sapien
gaaaaaccagttaaagatagtatac

SEQ ID NO: 5757372 - DNA, 25 bp, Homo sapien
ctaatttgcaaaaattggtatctga

SEQ ID NO: 5757373 - DNA, 25 bp, Homo sapien
gatagttcaaaattctccaaatgta

SEQ ID NO: 5757374 - DNA, 25 bp, Homo sapien
cataaccatacaaaaaagtagctgt

SEQ ID NO: 5757375 - DNA, 25 bp, Homo sapien
ctagatttgatagtgccacatacag

SEQ ID NO: 5757376 - DNA, 25 bp, Homo sapien
ctgtagaagatagataacgaggtcc

SEQ ID NO: 5757377 - DNA, 25 bp, Homo sapien
tctgcagcaatcaaaaaggtaaaat

SEQ ID NO: 5757378 - DNA, 25 bp, Homo sapien
aaaattcatatggagaaatagtatg

SEQ ID NO: 5757379 - DNA, 25 bp, Homo sapien
atttaataactttctaactgtatac

SEQ ID NO: 5757380 - DNA, 25 bp, Homo sapien
ttccgagcagccttggatttaaagt

SEQ ID NO: 5757381 - DNA, 25 bp, Homo sapien
atgaagagattaagggctaacctcc

SEQ ID NO: 5757382 - DNA, 25 bp, Homo sapien
tgtagattaaagaagtttttacaga

SEQ ID NO: 5757383 - DNA, 25 bp, Homo sapien
ccactgctgtagaagatagataacg

SEQ ID NO: 5757384 - DNA, 25 bp, Homo sapien
gagaactgccatgagtcctacaaat

SEQ ID NO: 5757385 - DNA, 25 bp, Homo sapien
agatagtatacaactatgctttagt

SEQ ID NO: 5757386 - DNA, 25 bp, Homo sapien
agaattttcaactgatacgtgacct

SEQ ID NO: 5757387 - DNA, 25 bp, Homo sapien
cttatccacactgattgttttgttt

SEQ ID NO: 5757388 - DNA, 25 bp, Homo sapien
taaccatacaaaaaagtagctgtta

SEQ ID NO: 5757389 - DNA, 25 bp, Homo sapien
ctccacttactgcaacctctgcctc

SEQ ID NO: 5757390 - DNA, 25 bp, Homo sapien
tactcgattcagtgctcttagacta

SEQ ID NO: 5757391 - DNA, 25 bp, Homo sapien
aagattaatgtcgagattcctagtg

SEQ ID NO: 5757392 - DNA, 25 bp, Homo sapien
aaaccccagcaaagccacttgaaaa

SEQ ID NO: 5757393 - DNA, 25 bp, Homo sapien
taggattacaggcgtgagccactgc

SEQ ID NO: 5757394 - DNA, 25 bp, Homo sapien
attattctgaagagtatagatccct

SEQ ID NO: 5757395 - DNA, 25 bp, Homo sapien
aacatgctgtgagaactgccatgag

SEQ ID NO: 5757396 - DNA, 25 bp, Homo sapien
ttaaggacttaatctgatttacaga

SEQ ID NO: 5757397 - DNA, 25 bp, Homo sapien
cttgcaaagagtgcataggacattt

SEQ ID NO: 5757398 - DNA, 25 bp, Homo sapien
ttttttactaagcatagacacagaa

SEQ ID NO: 5757399 - DNA, 25 bp, Homo sapien
atttcatcatgtagtactcgattca

SEQ ID NO: 5757400 - DNA, 25 bp, Homo sapien
tgatccacctgcctcagcctcccaa

SEQ ID NO: 5757401 - DNA, 25 bp, Homo sapien
ttggtatctgacatttgttgtgtgc

SEQ ID NO: 5757402 - DNA, 25 bp, Homo sapien
catatggagaaatagtatgtatctc

SEQ ID NO: 5757403 - DNA, 25 bp, Homo sapien
tcctgtcatcaaaattactagggac

SEQ ID NO: 5757404 - DNA, 25 bp, Homo sapien
tctggctaccatctagcacaggagc

SEQ ID NO: 5757405 - DNA, 25 bp, Homo sapien
cttttaaaaaacagtatgatcagat

SEQ ID NO: 5757406 - DNA, 25 bp, Homo sapien
accatacaaaaaagtagctgttatt

SEQ ID NO: 5757407 - DNA, 25 bp, Homo sapien
tatttttcacagctttataggtaat

SEQ ID NO: 5757408 - DNA, 25 bp, Homo sapien
ctcttgcaaagagtgcataggacat

SEQ ID NO: 5757409 - DNA, 25 bp, Homo sapien
gcctcccaaactgctaggattacag

SEQ ID NO: 5757410 - DNA, 25 bp, Homo sapien
ggttggcgaacattgttttatcttc

SEQ ID NO: 5757411 - DNA, 25 bp, Homo sapien
ttccttagaatcaagctgagaatct

SEQ ID NO: 5757412 - DNA, 25 bp, Homo sapien
ccaccacacccagctaatttttgta

SEQ ID NO: 5757413 - DNA, 25 bp, Homo sapien
aaatctctgataagtgaaatgtttt

SEQ ID NO: 5757414 - DNA, 25 bp, Homo sapien
tgggatttcctgcaggtttgggatc

SEQ ID NO: 5757415 - DNA, 25 bp, Homo sapien
tctgaaagaccaaaattcccaggga

SEQ ID NO: 5757416 - DNA, 25 bp, Homo sapien
ttctgtcactgacatctgtactatt

SEQ ID NO: 5757417 - DNA, 25 bp, Homo sapien
actgccatgagtcctacaaattgag

SEQ ID NO: 5757418 - DNA, 25 bp, Homo sapien
tcgtgaaaaaccagttaaagatagt

SEQ ID NO: 5757419 - DNA, 25 bp, Homo sapien
tgataagtagctgcatctagatttg

SEQ ID NO: 5757420 - DNA, 25 bp, Homo sapien
tataaaattctctggctaccatcta

SEQ ID NO: 5757421 - DNA, 25 bp, Homo sapien
gcactaaaatatcttaaaattcata

SEQ ID NO: 5757422 - DNA, 25 bp, Homo sapien
cttctcagcagctcttgtgtgaaca

SEQ ID NO: 5757423 - DNA, 25 bp, Homo sapien
ttggtcaggatagtctcaatctctt

SEQ ID NO: 5757424 - DNA, 25 bp, Homo sapien
tgatttctagatgcaatgtgttttg

SEQ ID NO: 5757425 - DNA, 25 bp, Homo sapien
cacatacagtaaattattctgaaga

SEQ ID NO: 5757426 - DNA, 25 bp, Homo sapien
cttgtgatccacctgcctcagcctc

SEQ ID NO: 5757427 - DNA, 25 bp, Homo sapien
gtgaaaaaccagttaaagatagtat

SEQ ID NO: 5757428 - DNA, 25 bp, Homo sapien
actgcaacctctgcctcccgggttc

SEQ ID NO: 5757429 - DNA, 25 bp, Homo sapien
tttttgtaaacagttgtagattaaa

SEQ ID NO: 5757430 - DNA, 25 bp, Homo sapien
actgtatacagtatatgcttgatag

SEQ ID NO: 5757431 - DNA, 25 bp, Homo sapien
agtagctgttattacaaggatggct

SEQ ID NO: 5757432 - DNA, 25 bp, Homo sapien
aatttgcaaaaattggtatctgaca

SEQ ID NO: 5757433 - DNA, 25 bp, Homo sapien
gccgggcgccccaggctgccgagtc

SEQ ID NO: 5757434 - DNA, 25 bp, Homo sapien
tagttcaaaattctccaaatgtaga

SEQ ID NO: 5757435 - DNA, 25 bp, Homo sapien
ttcaactgatacgtgacctgataag

SEQ ID NO: 5757436 - DNA, 25 bp, Homo sapien
tacaggtgcgtgccaccacacccag

SEQ ID NO: 5757437 - DNA, 25 bp, Homo sapien
ttagaatcaagctgagaatctgagg

SEQ ID NO: 5757438 - DNA, 25 bp, Homo sapien
caaaaattggtatctgacatttgtt

SEQ ID NO: 5757439 - DNA, 25 bp, Homo sapien
taagattttctcaaagtaaacccca

SEQ ID NO: 5757440 - DNA, 25 bp, Homo sapien
atttgtttgaatgttgtttttgtaa

SEQ ID NO: 5757441 - DNA, 25 bp, Homo sapien
actggattgctttcagcagtcttga

SEQ ID NO: 5757442 - DNA, 25 bp, Homo sapien
aagtagctgcatctagatttgatag

SEQ ID NO: 5757443 - DNA, 25 bp, Homo sapien
atcataaccatacaaaaaagtagct

SEQ ID NO: 5757444 - DNA, 25 bp, Homo sapien
acttactgcaacctctgcctcccgg

SEQ ID NO: 5757445 - DNA, 25 bp, Homo sapien
gaccgctgacccgcagcgccgccgg

SEQ ID NO: 5757446 - DNA, 25 bp, Homo sapien
ctgacatctgtactatttgtttgaa

SEQ ID NO: 5757447 - DNA, 25 bp, Homo sapien
tgttttgttacatatacacatatct

SEQ ID NO: 5757448 - DNA, 25 bp, Homo sapien
ccaagaaaagtcattttgttctgtc

SEQ ID NO: 5757449 - DNA, 25 bp, Homo sapien
aaagtcattttgttctgtcactgac

SEQ ID NO: 5757450 - DNA, 25 bp, Homo sapien
cataggtttattaagaatttcatca

SEQ ID NO: 5757451 - DNA, 25 bp, Homo sapien
caatgaagagattaagggctaacct

SEQ ID NO: 5757452 - DNA, 25 bp, Homo sapien
tatggagaaatagtatgtatctcta

SEQ ID NO: 5757453 - DNA, 25 bp, Homo sapien
gtaatatggcaatctggaatgtctc

SEQ ID NO: 5757454 - DNA, 25 bp, Homo sapien
gacacagaaaataatgctgttgtaa

SEQ ID NO: 5757455 - DNA, 25 bp, Homo sapien
tgagcccaccaccgggggccgcggt

SEQ ID NO: 5757456 - DNA, 25 bp, Homo sapien
agtactcgattcagtgctcttagac

SEQ ID NO: 5757457 - DNA, 25 bp, Homo sapien
aaaatttggctacctctcccactca

SEQ ID NO: 5757458 - DNA, 25 bp, Homo sapien
aacattgttttatcttcatttgcct

SEQ ID NO: 5757459 - DNA, 25 bp, Homo sapien
gtgcataggacatttctgcagcaat

SEQ ID NO: 5757460 - DNA, 25 bp, Homo sapien
cgggcgccccaggctgccgagtccg

SEQ ID NO: 5757461 - DNA, 25 bp, Homo sapien
caaagagtgcataggacatttctgc

SEQ ID NO: 5757462 - DNA, 25 bp, Homo sapien
agagattaagggctaacctccatta

SEQ ID NO: 5757463 - DNA, 25 bp, Homo sapien
atcttcaaaagttcagcaacaacca

SEQ ID NO: 5757464 - DNA, 25 bp, Homo sapien
gcccaccaccgggggccgcggttca

SEQ ID NO: 5757465 - DNA, 25 bp, Homo sapien
catcgtgaaaaaccagttaaagata

SEQ ID NO: 5757466 - DNA, 25 bp, Homo sapien
tgcagtggcgtgatctccacttact

SEQ ID NO: 5757467 - DNA, 25 bp, Homo sapien
atatttcatgtgatttgatatatct

SEQ ID NO: 5757468 - DNA, 25 bp, Homo sapien
gaaagagtaagataaaaacatttaa

SEQ ID NO: 5757469 - DNA, 25 bp, Homo sapien
gactctcactgtgtcgcccaggttg

SEQ ID NO: 5757470 - DNA, 25 bp, Homo sapien
aaatctaatttgcaaaaattggtat

SEQ ID NO: 5757471 - DNA, 25 bp, Homo sapien
ctctgataagtgaaatgttttttca

SEQ ID NO: 5757472 - DNA, 25 bp, Homo sapien
tacaaaagcaactcctgtcatcaaa

SEQ ID NO: 5757473 - DNA, 25 bp, Homo sapien
tgcaacctctgcctcccgggttcaa

SEQ ID NO: 5757474 - DNA, 25 bp, Homo sapien
attctcctgcctcagtctcccgagt

SEQ ID NO: 5757475 - DNA, 25 bp, Homo sapien
aatttggctacctctcccactcatg

SEQ ID NO: 5757476 - DNA, 25 bp, Homo sapien
aaaacatgctgtgagaactgccatg

SEQ ID NO: 5757477 - DNA, 25 bp, Homo sapien
aacatttagcaatccttcatttagt

SEQ ID NO: 5757478 - DNA, 25 bp, Homo sapien
gtaaattattctgaagagtatagat

SEQ ID NO: 5757479 - DNA, 25 bp, Homo sapien
tcagcaacaaccactgctgtagaag

SEQ ID NO: 5757480 - DNA, 25 bp, Homo sapien
cgtgagccactgcgccaggccttct

SEQ ID NO: 5757481 - DNA, 25 bp, Homo sapien
aaatgcaggccattatcttcaaaag

SEQ ID NO: 5757482 - DNA, 25 bp, Homo sapien
ctacatttgctgtctttgtagacca

SEQ ID NO: 5757483 - DNA, 25 bp, Homo sapien
aagctgagaatctgagggccactgt

SEQ ID NO: 5757484 - DNA, 25 bp, Homo sapien
taaacttttaaaaaacagtatgatc

SEQ ID NO: 5757485 - DNA, 25 bp, Homo sapien
agcaacaaccactgctgtagaagat

SEQ ID NO: 5757486 - DNA, 25 bp, Homo sapien
catttagcaatccttcatttagtaa

SEQ ID NO: 5757487 - DNA, 25 bp, Homo sapien
gtgccccatcgtgaaaaaccagtta

SEQ ID NO: 5757488 - DNA, 25 bp, Homo sapien
gattaatgtcgagattcctagtgcc

SEQ ID NO: 5757489 - DNA, 25 bp, Homo sapien
ggttggagtgcagtggcgtgatctc

SEQ ID NO: 5757490 - DNA, 25 bp, Homo sapien
acccagaatattaatttttatgtaa

SEQ ID NO: 5757491 - DNA, 25 bp, Homo sapien
tattctgaagagtatagatccctga

SEQ ID NO: 5757492 - DNA, 25 bp, Homo sapien
tgatcagattcagcatgatgatatc

SEQ ID NO: 5757493 - DNA, 25 bp, Homo sapien
agacccagaatattaatttttatgt

SEQ ID NO: 5757494 - DNA, 25 bp, Homo sapien
tattttaggttggcgaacattgttt

SEQ ID NO: 5757495 - DNA, 25 bp, Homo sapien
aacttttaaaaaacagtatgatcag

SEQ ID NO: 5757496 - DNA, 25 bp, Homo sapien
catgtgatttgatatatctgtacag

SEQ ID NO: 5757497 - DNA, 25 bp, Homo sapien
tcaagttttgatttctagatgcaat

SEQ ID NO: 5757498 - DNA, 25 bp, Homo sapien
tcagactctgtagaagtcctctgtg

SEQ ID NO: 5757499 - DNA, 25 bp, Homo sapien
gaagtcctctgtgcaagattaatgt

SEQ ID NO: 5757500 - DNA, 25 bp, Homo sapien
atttcctgcaggtttgggatcataa

SEQ ID NO: 5757501 - DNA, 25 bp, Homo sapien
taggtttattaagaatttcatcatg

SEQ ID NO: 5757502 - DNA, 25 bp, Homo sapien
gacagccactggtatacacccaatt

SEQ ID NO: 5757503 - DNA, 25 bp, Homo sapien
agtgggatttcctgcaggtttggga

SEQ ID NO: 5757504 - DNA, 25 bp, Homo sapien
gaaacgtattttaggttggcgaaca

SEQ ID NO: 5757505 - DNA, 25 bp, Homo sapien
attcaaaatttggctacctctccca

SEQ ID NO: 5757506 - DNA, 25 bp, Homo sapien
tcagcagtcttgaagcactaaaata

SEQ ID NO: 5757507 - DNA, 25 bp, Homo sapien
ccgcgcagctcgaccggctgagccc

SEQ ID NO: 5757508 - DNA, 25 bp, Homo sapien
cttgaccttgtgatccacctgcctc

SEQ ID NO: 5757509 - DNA, 25 bp, Homo sapien
caatgagtaaaatgttcatttaata

SEQ ID NO: 5757510 - DNA, 25 bp, Homo sapien
tttctaactgtatacagtatatgct

SEQ ID NO: 5757511 - DNA, 25 bp, Homo sapien
gaatgtctccaagaaaagtcatttt

SEQ ID NO: 5757512 - DNA, 25 bp, Homo sapien
gggaattcaaaatttggctacctct

SEQ ID NO: 5757513 - DNA, 25 bp, Homo sapien
agccaccgccagctcggtgcagccc

SEQ ID NO: 5757514 - DNA, 25 bp, Homo sapien
cagtctcccgagtagctgggactac

SEQ ID NO: 5757515 - DNA, 25 bp, Homo sapien
gagattcctagtgccccatcgtgaa

SEQ ID NO: 5757516 - DNA, 25 bp, Homo sapien
aatagcaagtttaagtgtttccata

SEQ ID NO: 5757517 - DNA, 25 bp, Homo sapien
tgcaaaaattggtatctgacatttg

SEQ ID NO: 5757518 - DNA, 25 bp, Homo sapien
ttaaaataaagtaatatggcaatct

SEQ ID NO: 5757519 - DNA, 25 bp, Homo sapien
ccactgcgccaggccttctcagcag

SEQ ID NO: 5757520 - DNA, 25 bp, Homo sapien
agctccgccgggcgccccaggctgc

SEQ ID NO: 5757521 - DNA, 25 bp, Homo sapien
agatttgatagtgccacatacagta

SEQ ID NO: 5757522 - DNA, 25 bp, Homo sapien
tttattaagaatttcatcatgtagt

SEQ ID NO: 5757523 - DNA, 25 bp, Homo sapien
ccaccaccgggggccgcggttcagc

SEQ ID NO: 5757524 - DNA, 25 bp, Homo sapien
cacactgattgttttgtttctttta

SEQ ID NO: 5757525 - DNA, 25 bp, Homo sapien
attcagtgctcttagactacatttg

SEQ ID NO: 5757526 - DNA, 25 bp, Homo sapien
aagattaaatctaatttgcaaaaat

SEQ ID NO: 5757527 - DNA, 25 bp, Homo sapien
aattttttactaagcatagacacag

SEQ ID NO: 5757528 - DNA, 25 bp, Homo sapien
ggaataacgcattgttagaaccaaa

SEQ ID NO: 5757529 - DNA, 25 bp, Homo sapien
aagaataggcttatgagagacctaa

SEQ ID NO: 5757530 - DNA, 25 bp, Homo sapien
tgattctcctgcctcagtctcccga

SEQ ID NO: 5757531 - DNA, 25 bp, Homo sapien
tgatatcttctcagactctgtagaa

SEQ ID NO: 5757532 - DNA, 25 bp, Homo sapien
tctcagcagctcttgtgtgaacaca

SEQ ID NO: 5757533 - DNA, 25 bp, Homo sapien
gacctaaaaaaatcttccgagcagc

SEQ ID NO: 5757534 - DNA, 25 bp, Homo sapien
ctcgattcagtgctcttagactaca

SEQ ID NO: 5757535 - DNA, 25 bp, Homo sapien
ggagcaactggattgctttcagcag

SEQ ID NO: 5757536 - DNA, 25 bp, Homo sapien
tgtactatttgtttgaatgttgttt

SEQ ID NO: 5757537 - DNA, 25 bp, Homo sapien
tctgtacagaaagagtaagataaaa

SEQ ID NO: 5757538 - DNA, 25 bp, Homo sapien
acttaatctgatttacagaaatgaa

SEQ ID NO: 5757539 - DNA, 25 bp, Homo sapien
tgatttacagaaatgaaatgcaatg

SEQ ID NO: 5757540 - DNA, 25 bp, Homo sapien
aaggacttaatctgatttacagaaa

SEQ ID NO: 5757541 - DNA, 25 bp, Homo sapien
ctgtgtcgcccaggttggagtgcag

SEQ ID NO: 5757542 - DNA, 25 bp, Homo sapien
ggaagaataggcttatgagagacct

SEQ ID NO: 5757543 - DNA, 25 bp, Homo sapien
ggcgtgagccactgcgccaggcctt

SEQ ID NO: 5757544 - DNA, 25 bp, Homo sapien
agaaatgaaatgcaatgaagagatt

SEQ ID NO: 5757545 - DNA, 25 bp, Homo sapien
caacaaccactgctgtagaagatag

SEQ ID NO: 5757546 - DNA, 25 bp, Homo sapien
gctgacccgcagcgccgccggctcc

SEQ ID NO: 5757547 - DNA, 25 bp, Homo sapien
tcctctgtgcaagattaatgtcgag

SEQ ID NO: 5757548 - DNA, 25 bp, Homo sapien
aataacgcattgttagaaccaaact

SEQ ID NO: 5757549 - DNA, 25 bp, Homo sapien
gagagacctaaaaaaatcttccgag

SEQ ID NO: 5757550 - DNA, 25 bp, Homo sapien
aaccaaactggtagtctgaaagacc

SEQ ID NO: 5757551 - DNA, 25 bp, Homo sapien
gattttctcaaagtaaaccccagca

SEQ ID NO: 5757552 - DNA, 25 bp, Homo sapien
tcatgtagtactcgattcagtgctc

SEQ ID NO: 5757553 - DNA, 25 bp, Homo sapien
atgtgatcagggaagaataggctta

SEQ ID NO: 5757554 - DNA, 25 bp, Homo sapien
atttctagatgcaatgtgttttgtt

SEQ ID NO: 5757555 - DNA, 25 bp, Homo sapien
tgaaagttccttagaatcaagctga

SEQ ID NO: 5757556 - DNA, 25 bp, Homo sapien
tcttccgagcagccttggatttaaa

SEQ ID NO: 5757557 - DNA, 25 bp, Homo sapien
ttctcaaagtaaaccccagcaaagc

SEQ ID NO: 5757558 - DNA, 25 bp, Homo sapien
gctccaaggaaaaagacacaagctg

SEQ ID NO: 5757559 - DNA, 25 bp, Homo sapien
ctgctaggattacaggcgtgagcca

SEQ ID NO: 5757560 - DNA, 25 bp, Homo sapien
acggggtttcaccatgttggtcagg

SEQ ID NO: 5757561 - DNA, 25 bp, Homo sapien
tgggatcataaccatacaaaaaagt

SEQ ID NO: 5757562 - DNA, 25 bp, Homo sapien
agaagtttttacagatcaatgagta

SEQ ID NO: 5757563 - DNA, 25 bp, Homo sapien
atgatgatatcttctcagactctgt

SEQ ID NO: 5757564 - DNA, 25 bp, Homo sapien
tcagggaagaataggcttatgagag

SEQ ID NO: 5757565 - DNA, 25 bp, Homo sapien
tatatctgtacagaaagagtaagat

SEQ ID NO: 5757566 - DNA, 25 bp, Homo sapien
aggccattatcttcaaaagttcagc

SEQ ID NO: 5757567 - DNA, 25 bp, Homo sapien
ccaataaaatgcaggccattatctt

SEQ ID NO: 5757568 - DNA, 25 bp, Homo sapien
gtcctacaaattgagaaccagctga

SEQ ID NO: 5757569 - DNA, 25 bp, Homo sapien
caactatgctttagtgggatttcct

SEQ ID NO: 5757570 - DNA, 25 bp, Homo sapien
gttttatcttcatttgcctcccgcg

SEQ ID NO: 5757571 - DNA, 25 bp, Homo sapien
actcctgtcatcaaaattactaggg

SEQ ID NO: 5757572 - DNA, 25 bp, Homo sapien
tgccatgagtcctacaaattgagaa

SEQ ID NO: 5757573 - DNA, 25 bp, Homo sapien
ttttacagatcaatgagtaaaatgt

SEQ ID NO: 5757574 - DNA, 25 bp, Homo sapien
ggacttaatctgatttacagaaatg

SEQ ID NO: 5757575 - DNA, 25 bp, Homo sapien
tctatttttcacagctttataggta

SEQ ID NO: 5757576 - DNA, 25 bp, Homo sapien
tttcaccatgttggtcaggatagtc

SEQ ID NO: 5757577 - DNA, 25 bp, Homo sapien
tttattctctgacagatcagaccca

SEQ ID NO: 5757578 - DNA, 25 bp, Homo sapien
ttgctgtctttgtagaccaataaaa

SEQ ID NO: 5757579 - DNA, 25 bp, Homo sapien
ttagtgggatttcctgcaggtttgg

SEQ ID NO: 5757580 - DNA, 25 bp, Homo sapien
gccttctcagcagctcttgtgtgaa

SEQ ID NO: 5757581 - DNA, 25 bp, Homo sapien
tgctgtagaagatagataacgaggt

SEQ ID NO: 5757582 - DNA, 25 bp, Homo sapien
taaagtaatatggcaatctggaatg

SEQ ID NO: 5757583 - DNA, 25 bp, Homo sapien
ttgttgtgtgctcttgcaaagagtg

SEQ ID NO: 5757584 - DNA, 25 bp, Homo sapien
catctgtactatttgtttgaatgtt

SEQ ID NO: 5757585 - DNA, 25 bp, Homo sapien
tctgatttacagaaatgaaatgcaa

SEQ ID NO: 5757586 - DNA, 25 bp, Homo sapien
actataaaattctctggctaccatc

SEQ ID NO: 5757587 - DNA, 25 bp, Homo sapien
agggccactgtacaaaagcaactcc

SEQ ID NO: 5757588 - DNA, 25 bp, Homo sapien
actatgctttagtgggatttcctgc

SEQ ID NO: 5757589 - DNA, 25 bp, Homo sapien
caaactttaaatatttcatgtgatt

SEQ ID NO: 5757590 - DNA, 25 bp, Homo sapien
ccgccgggcgccccaggctgccgag

SEQ ID NO: 5757591 - DNA, 25 bp, Homo sapien
gcatctagatttgatagtgccacat

SEQ ID NO: 5757592 - DNA, 25 bp, Homo sapien
gtcactgacatctgtactatttgtt

SEQ ID NO: 5757593 - DNA, 25 bp, Homo sapien
acatttgttgtgtgctcttgcaaag

SEQ ID NO: 5757594 - DNA, 25 bp, Homo sapien
taaaatgcaggccattatcttcaaa

SEQ ID NO: 5757595 - DNA, 25 bp, Homo sapien
tatctgtacagaaagagtaagataa

SEQ ID NO: 5757596 - DNA, 25 bp, Homo sapien
tggaatgtctccaagaaaagtcatt

SEQ ID NO: 5757597 - DNA, 25 bp, Homo sapien
gtagagacggggtttcaccatgttg

SEQ ID NO: 5757598 - DNA, 25 bp, Homo sapien
tagattaaagaagtttttacagatc

SEQ ID NO: 5757599 - DNA, 25 bp, Homo sapien
gatagtgccacatacagtaaattat

SEQ ID NO: 5757600 - DNA, 25 bp, Homo sapien
tgtgtgctcttgcaaagagtgcata

SEQ ID NO: 5757601 - DNA, 25 bp, Homo sapien
tgttggtcaggatagtctcaatctc

SEQ ID NO: 5757602 - DNA, 25 bp, Homo sapien
ccgctgggtcctacgcgaccgctga

SEQ ID NO: 5757603 - DNA, 25 bp, Homo sapien
aaaaccagttaaagatagtatacaa

SEQ ID NO: 5757604 - DNA, 25 bp, Homo sapien
cgccgccggctcccgtcgccgtagc

SEQ ID NO: 5757605 - DNA, 25 bp, Homo sapien
tactatttgtttgaatgttgttttt

SEQ ID NO: 5757606 - DNA, 25 bp, Homo sapien
atctagatttgatagtgccacatac

SEQ ID NO: 5757607 - DNA, 25 bp, Homo sapien
aaccactgctgtagaagatagataa

SEQ ID NO: 5757608 - DNA, 25 bp, Homo sapien
gaataggcttatgagagacctaaaa

SEQ ID NO: 5757609 - DNA, 25 bp, Homo sapien
caggtttgggatcataaccatacaa

SEQ ID NO: 5757610 - DNA, 25 bp, Homo sapien
ttgtttgaatgttgtttttgtaaac

SEQ ID NO: 5757611 - DNA, 25 bp, Homo sapien
tagctgttattacaaggatggctcc

SEQ ID NO: 5757612 - DNA, 25 bp, Homo sapien
tagcaagtttaagtgtttccatagg

SEQ ID NO: 5757613 - DNA, 25 bp, Homo sapien
gttcagcaacaaccactgctgtaga

SEQ ID NO: 5757614 - DNA, 25 bp, Homo sapien
ttttactaagcatagacacagaaaa

SEQ ID NO: 5757615 - DNA, 25 bp, Homo sapien
ttattacaaggatggctccaaggaa

SEQ ID NO: 5757616 - DNA, 25 bp, Homo sapien
gcattgttagaaccaaactggtagt

SEQ ID NO: 5757617 - DNA, 25 bp, Homo sapien
tacaaaaaagtagctgttattacaa

SEQ ID NO: 5757618 - DNA, 25 bp, Homo sapien
cgtattttaggttggcgaacattgt

SEQ ID NO: 5757619 - DNA, 25 bp, Homo sapien
aagcactaaaatatcttaaaattca

SEQ ID NO: 5757620 - DNA, 25 bp, Homo sapien
tgaccttgtgatccacctgcctcag

SEQ ID NO: 5757621 - DNA, 25 bp, Homo sapien
ttaaagatagtatacaactatgctt

SEQ ID NO: 5757622 - DNA, 25 bp, Homo sapien
ttctggaataacgcattgttagaac

SEQ ID NO: 5757623 - DNA, 25 bp, Homo sapien
tagtctcaatctcttgaccttgtga

SEQ ID NO: 5757624 - DNA, 25 bp, Homo sapien
tcagctccgccgggcgccccaggct

SEQ ID NO: 5757625 - DNA, 25 bp, Homo sapien
tgtgatccacctgcctcagcctccc

SEQ ID NO: 5757626 - DNA, 25 bp, Homo sapien
ataggcttatgagagacctaaaaaa

SEQ ID NO: 5757627 - DNA, 25 bp, Homo sapien
aaagtagctgttattacaaggatgg

SEQ ID NO: 5757628 - DNA, 25 bp, Homo sapien
gccactggtatacacccaatttttt

SEQ ID NO: 5757629 - DNA, 25 bp, Homo sapien
actgatacgtgacctgataagtagc

SEQ ID NO: 5757630 - DNA, 25 bp, Homo sapien
gtagccaccgccagctcggtgcagc

SEQ ID NO: 5757631 - DNA, 25 bp, Homo sapien
gctgagaatctgagggccactgtac

SEQ ID NO: 5757632 - DNA, 25 bp, Homo sapien
ttgatagtgccacatacagtaaatt

SEQ ID NO: 5757633 - DNA, 25 bp, Homo sapien
cagttgtagattaaagaagttttta

SEQ ID NO: 5757634 - DNA, 25 bp, Homo sapien
gctcccgtcgccgtagccaccgcca

SEQ ID NO: 5757635 - DNA, 25 bp, Homo sapien
tgttctgtcactgacatctgtacta

SEQ ID NO: 5757636 - DNA, 25 bp, Homo sapien
ctagcacaggagcaactggattgct

SEQ ID NO: 5757637 - DNA, 25 bp, Homo sapien
ggtttcaccatgttggtcaggatag

SEQ ID NO: 5757638 - DNA, 25 bp, Homo sapien
ctggaaatactttcaagttttgatt

SEQ ID NO: 5757639 - DNA, 25 bp, Homo sapien
cgaccggctgagcccaccaccgggg

SEQ ID NO: 5757640 - DNA, 25 bp, Homo sapien
acccaattttttactaagcatagac

SEQ ID NO: 5757641 - DNA, 25 bp, Homo sapien
catagacacagaaaataatgctgtt

SEQ ID NO: 5757642 - DNA, 25 bp, Homo sapien
tgcaaagagtgcataggacatttct

SEQ ID NO: 5757643 - DNA, 25 bp, Homo sapien
atttacagaaatgaaatgcaatgaa

SEQ ID NO: 5757644 - DNA, 25 bp, Homo sapien
actaagcatagacacagaaaataat

SEQ ID NO: 5757645 - DNA, 25 bp, Homo sapien
ataaaaatctctgataagtgaaatg

SEQ ID NO: 5757646 - DNA, 25 bp, Homo sapien
aatctgatttacagaaatgaaatgc

SEQ ID NO: 5757647 - DNA, 25 bp, Homo sapien
atgtctccaagaaaagtcattttgt

SEQ ID NO: 5757648 - DNA, 25 bp, Homo sapien
gttttgatttctagatgcaatgtgt

SEQ ID NO: 5757649 - DNA, 25 bp, Homo sapien
ctgtcactgacatctgtactatttg

SEQ ID NO: 5757650 - DNA, 25 bp, Homo sapien
gtgcaagattaatgtcgagattcct

SEQ ID NO: 5757651 - DNA, 25 bp, Homo sapien
cagtcttgaagcactaaaatatctt

SEQ ID NO: 5757652 - DNA, 25 bp, Homo sapien
ggtatctgacatttgttgtgtgctc

SEQ ID NO: 5757653 - DNA, 25 bp, Homo sapien
tttggctacctctcccactcatgtg

SEQ ID NO: 5757654 - DNA, 25 bp, Homo sapien
ctcgaccggctgagcccaccaccgg

SEQ ID NO: 5757655 - DNA, 25 bp, Homo sapien
ctctcactgtgtcgcccaggttgga

SEQ ID NO: 5757656 - DNA, 25 bp, Homo sapien
agctgcatctagatttgatagtgcc

SEQ ID NO: 5757657 - DNA, 25 bp, Homo sapien
cagcatgatgatatcttctcagact

SEQ ID NO: 5757658 - DNA, 25 bp, Homo sapien
tgtagaagtcctctgtgcaagatta

SEQ ID NO: 5757659 - DNA, 25 bp, Homo sapien
tccacactgattgttttgtttcttt

SEQ ID NO: 5757660 - DNA, 25 bp, Homo sapien
agggaagaataggcttatgagagac

SEQ ID NO: 5757661 - DNA, 25 bp, Homo sapien
aagaatttcatcatgtagtactcga

SEQ ID NO: 5757662 - DNA, 25 bp, Homo sapien
gatcagacccagaatattaattttt

SEQ ID NO: 5757663 - DNA, 25 bp, Homo sapien
atccttcatttagtaatcttttgta

SEQ ID NO: 5757664 - DNA, 25 bp, Homo sapien
agaatcaagctgagaatctgagggc

SEQ ID NO: 5757665 - DNA, 25 bp, Homo sapien
ctgcctcccgggttcaagtgattct

SEQ ID NO: 5757666 - DNA, 25 bp, Homo sapien
cagatttcaagtttcctctaatatt

SEQ ID NO: 5757667 - DNA, 25 bp, Homo sapien
ggatttaaagtcatagcgctgttta

SEQ ID NO: 5757668 - DNA, 25 bp, Homo sapien
accaaaaacatttagcaatccttca

SEQ ID NO: 5757669 - DNA, 25 bp, Homo sapien
tttgtagaccaataaaatgcaggcc

SEQ ID NO: 5757670 - DNA, 25 bp, Homo sapien
ttttctcaaagtaaaccccagcaaa

SEQ ID NO: 5757671 - DNA, 25 bp, Homo sapien
accagctgaaagttccttagaatca

SEQ ID NO: 5757672 - DNA, 25 bp, Homo sapien
agttccttagaatcaagctgagaat

SEQ ID NO: 5757673 - DNA, 25 bp, Homo sapien
tttaatggcaattacacacaaattt

SEQ ID NO: 5757674 - DNA, 25 bp, Homo sapien
atggaatagcaagtttaagtgtttc

SEQ ID NO: 5757675 - DNA, 25 bp, Homo sapien
gatttcaagtttcctctaatattcc

SEQ ID NO: 5757676 - DNA, 25 bp, Homo sapien
tttcacagctttataggtaattata

SEQ ID NO: 5757677 - DNA, 25 bp, Homo sapien
gttgtagattaaagaagtttttaca

SEQ ID NO: 5757678 - DNA, 25 bp, Homo sapien
ctgaagagtatagatccctgatgga

SEQ ID NO: 5757679 - DNA, 25 bp, Homo sapien
ccccaggctgccgagtccgctgggt

SEQ ID NO: 5757680 - DNA, 25 bp, Homo sapien
caggagcaactggattgctttcagc

SEQ ID NO: 5757681 - DNA, 25 bp, Homo sapien
tttttaaactcagatttcaagtttc

SEQ ID NO: 5757682 - DNA, 25 bp, Homo sapien
tgggactacaggtgcgtgccaccac

SEQ ID NO: 5757683 - DNA, 25 bp, Homo sapien
tgtctttgtagaccaataaaatgca

SEQ ID NO: 5757684 - DNA, 25 bp, Homo sapien
agtgattctcctgcctcagtctccc

SEQ ID NO: 5757685 - DNA, 25 bp, Homo sapien
accatgttggtcaggatagtctcaa

SEQ ID NO: 5757686 - DNA, 25 bp, Homo sapien
gctgggactacaggtgcgtgccacc

SEQ ID NO: 5757687 - DNA, 25 bp, Homo sapien
attaagggctaacctccattactat

SEQ ID NO: 5757688 - DNA, 25 bp, Homo sapien
caggttggagtgcagtggcgtgatc

SEQ ID NO: 5757689 - DNA, 25 bp, Homo sapien
cactggtatacacccaattttttac

SEQ ID NO: 5757690 - DNA, 25 bp, Homo sapien
ggtttgggatcataaccatacaaaa

SEQ ID NO: 5757691 - DNA, 25 bp, Homo sapien
ataaatataaaaatctctgataagt

SEQ ID NO: 5757692 - DNA, 25 bp, Homo sapien
gaaccagctgaaagttccttagaat

SEQ ID NO: 5757693 - DNA, 25 bp, Homo sapien
caaggaaaaagacacaagctgaata

SEQ ID NO: 5757694 - DNA, 25 bp, Homo sapien
gctacctctcccactcatgtgatca

SEQ ID NO: 5757695 - DNA, 25 bp, Homo sapien
aatcaagctgagaatctgagggcca

SEQ ID NO: 5757696 - DNA, 25 bp, Homo sapien
gctgaaagttccttagaatcaagct

SEQ ID NO: 5757697 - DNA, 25 bp, Homo sapien
tccattactataaaattctctggct

SEQ ID NO: 5757698 - DNA, 25 bp, Homo sapien
cccgagtagctgggactacaggtgc

SEQ ID NO: 5757699 - DNA, 25 bp, Homo sapien
gtgtgaacacagaaagggaattcaa

SEQ ID NO: 5757700 - DNA, 25 bp, Homo sapien
tggtagtctgaaagaccaaaattcc

SEQ ID NO: 5757701 - DNA, 25 bp, Homo sapien
ctgacagatcagacccagaatatta

SEQ ID NO: 5757702 - DNA, 25 bp, Homo sapien
ttgtataaatataaaaatctctgat

SEQ ID NO: 5757703 - DNA, 25 bp, Homo sapien
agattaagggctaacctccattact

SEQ ID NO: 5757704 - DNA, 25 bp, Homo sapien
ccgcagcgccgccggctcccgtcgc

SEQ ID NO: 5757705 - DNA, 25 bp, Homo sapien
atgagagacctaaaaaaatcttccg

SEQ ID NO: 5757706 - DNA, 25 bp, Homo sapien
cctgataagtagctgcatctagatt

SEQ ID NO: 5757707 - DNA, 25 bp, Homo sapien
acacccaattttttactaagcatag

SEQ ID NO: 5757708 - DNA, 25 bp, Homo sapien
ttgttttatcttcatttgcctcccg

SEQ ID NO: 5757709 - DNA, 25 bp, Homo sapien
agcacaggagcaactggattgcttt

SEQ ID NO: 5757710 - DNA, 25 bp, Homo sapien
tctcctgcctcagtctcccgagtag

SEQ ID NO: 5757711 - DNA, 25 bp, Homo sapien
gacagactctcactgtgtcgcccag

SEQ ID NO: 5757712 - DNA, 25 bp, Homo sapien
tcaccatgttggtcaggatagtctc

SEQ ID NO: 5757713 - DNA, 25 bp, Homo sapien
cctcccgcgcagctcgaccggctga

SEQ ID NO: 5757714 - DNA, 25 bp, Homo sapien
caactgatacgtgacctgataagta

SEQ ID NO: 5757715 - DNA, 25 bp, Homo sapien
aaacagtatgatcagattcagcatg

SEQ ID NO: 5757716 - DNA, 25 bp, Homo sapien
tgaagcactaaaatatcttaaaatt

SEQ ID NO: 5757717 - DNA, 25 bp, Homo sapien
gctgggtcctacgcgaccgctgacc

SEQ ID NO: 5757718 - DNA, 25 bp, Homo sapien
gaaatgcaatgaagagattaagggc

SEQ ID NO: 5757719 - DNA, 25 bp, Homo sapien
ggggtttcaccatgttggtcaggat

SEQ ID NO: 5757720 - DNA, 25 bp, Homo sapien
cattactataaaattctctggctac

SEQ ID NO: 5757721 - DNA, 25 bp, Homo sapien
atcttctcagactctgtagaagtcc

SEQ ID NO: 5757722 - DNA, 25 bp, Homo sapien
ttagatttgatatttattctctgac

SEQ ID NO: 5757723 - DNA, 25 bp, Homo sapien
cccagcaaagccacttgaaaaacat

SEQ ID NO: 5757724 - DNA, 25 bp, Homo sapien
agaatctgagggccactgtacaaaa

SEQ ID NO: 5757725 - DNA, 25 bp, Homo sapien
aattttcaactgatacgtgacctga

SEQ ID NO: 5757726 - DNA, 25 bp, Homo sapien
agccacttgaaaaacatgctgtgag

SEQ ID NO: 5757727 - DNA, 25 bp, Homo sapien
ctgcctcagtctcccgagtagctgg

SEQ ID NO: 5757728 - DNA, 25 bp, Homo sapien
gaaccaaaaacatttagcaatcctt

SEQ ID NO: 5757729 - DNA, 25 bp, Homo sapien
cccatcgtgaaaaaccagttaaaga

SEQ ID NO: 5757730 - DNA, 25 bp, Homo sapien
gcagctcgaccggctgagcccacca

SEQ ID NO: 5757731 - DNA, 25 bp, Homo sapien
gatagataacgaggtccttcttctt

SEQ ID NO: 5757732 - DNA, 25 bp, Homo sapien
ataagtagctgcatctagatttgat

SEQ ID NO: 5757733 - DNA, 25 bp, Homo sapien
agaagatagataacgaggtccttct

SEQ ID NO: 5757734 - DNA, 25 bp, Homo sapien
atcctaatccctggaaatactttca

SEQ ID NO: 5757735 - DNA, 25 bp, Homo sapien
agtcctctgtgcaagattaatgtcg

SEQ ID NO: 5757736 - DNA, 25 bp, Homo sapien
tcatagcgctgtttaaaataaagta

SEQ ID NO: 5757737 - DNA, 25 bp, Homo sapien
agtagctgggactacaggtgcgtgc

SEQ ID NO: 5757738 - DNA, 25 bp, Homo sapien
gtctccaagaaaagtcattttgttc

SEQ ID NO: 5757739 - DNA, 25 bp, Homo sapien
atttaaagtcatagcgctgtttaaa

SEQ ID NO: 5757740 - DNA, 25 bp, Homo sapien
ggatcataaccatacaaaaaagtag

SEQ ID NO: 5757741 - DNA, 25 bp, Homo sapien
aaccagttaaagatagtatacaact

SEQ ID NO: 5757742 - DNA, 25 bp, Homo sapien
tagcaatccttcatttagtaatctt

SEQ ID NO: 5757743 - DNA, 25 bp, Homo sapien
tgccgagtccgctgggtcctacgcg

SEQ ID NO: 5757744 - DNA, 25 bp, Homo sapien
tgctcttagactacatttgctgtct

SEQ ID NO: 5757745 - DNA, 25 bp, Homo sapien
tcccgcgcagctcgaccggctgagc

SEQ ID NO: 5757746 - DNA, 25 bp, Homo sapien
agatgcaatgtgttttgttacatat

SEQ ID NO: 5757747 - DNA, 25 bp, Homo sapien
tgtatacagtatatgcttgatagtt

SEQ ID NO: 5757748 - DNA, 25 bp, Homo sapien
tagaccaataaaatgcaggccatta

SEQ ID NO: 5757749 - DNA, 25 bp, Homo sapien
ccaggctgccgagtccgctgggtcc

SEQ ID NO: 5757750 - DNA, 25 bp, Homo sapien
cccaaactgctaggattacaggcgt

SEQ ID NO: 5757751 - DNA, 25 bp, Homo sapien
ttgatagttcaaaattctccaaatg

SEQ ID NO: 5757752 - DNA, 25 bp, Homo sapien
tagtgccccatcgtgaaaaaccagt

SEQ ID NO: 5757753 - DNA, 25 bp, Homo sapien
tgtaagaattttcaactgatacgtg

SEQ ID NO: 5757754 - DNA, 25 bp, Homo sapien
gttgtgtgctcttgcaaagagtgca

SEQ ID NO: 5757755 - DNA, 25 bp, Homo sapien
gggccgcggttcagctccgccgggc

SEQ ID NO: 5757756 - DNA, 25 bp, Homo sapien
aataaaatgcaggccattatcttca

SEQ ID NO: 5757757 - DNA, 25 bp, Homo sapien
gatggctccaaggaaaaagacacaa

SEQ ID NO: 5757758 - DNA, 25 bp, Homo sapien
gtcgccgtagccaccgccagctcgg

SEQ ID NO: 5757759 - DNA, 25 bp, Homo sapien
ttgtgtgaacacagaaagggaattc

SEQ ID NO: 5757760 - DNA, 25 bp, Homo sapien
actctgtagaagtcctctgtgcaag

SEQ ID NO: 5757761 - DNA, 25 bp, Homo sapien
cctgcaggtttgggatcataaccat

SEQ ID NO: 5757762 - DNA, 25 bp, Homo sapien
ccaaactggtagtctgaaagaccaa

SEQ ID NO: 5757763 - DNA, 25 bp, Homo sapien
gcaatgtgttttgttacatatacac

SEQ ID NO: 5757764 - DNA, 25 bp, Homo sapien
gtgccacatacagtaaattattctg

SEQ ID NO: 5757765 - DNA, 25 bp, Homo sapien
actagggacagccactggtatacac

SEQ ID NO: 5757766 - DNA, 25 bp, Homo sapien
atctagcacaggagcaactggattg

SEQ ID NO: 5757767 - DNA, 25 bp, Homo sapien
caatctcttgaccttgtgatccacc

SEQ ID NO: 5757768 - DNA, 25 bp, Homo sapien
tctaatcctaatccctggaaatact

SEQ ID NO: 5757769 - DNA, 25 bp, Homo sapien
cttctaatcctaatccctggaaata

SEQ ID NO: 5757770 - DNA, 25 bp, Homo sapien
ttttcaactgatacgtgacctgata

SEQ ID NO: 5757771 - DNA, 25 bp, Homo sapien
gagtgcataggacatttctgcagca

SEQ ID NO: 5757772 - DNA, 25 bp, Homo sapien
gagtccgctgggtcctacgcgaccg

SEQ ID NO: 5757773 - DNA, 25 bp, Homo sapien
tatggcaatctggaatgtctccaag

SEQ ID NO: 5757774 - DNA, 25 bp, Homo sapien
aagttttgatttctagatgcaatgt

SEQ ID NO: 5757775 - DNA, 25 bp, Homo sapien
ggtgcgtgccaccacacccagctaa

SEQ ID NO: 5757776 - DNA, 25 bp, Homo sapien
acatttgctgtctttgtagaccaat

SEQ ID NO: 5757777 - DNA, 25 bp, Homo sapien
aattgagaaccagctgaaagttcct

SEQ ID NO: 5757778 - DNA, 25 bp, Homo sapien
agttaaagatagtatacaactatgc

SEQ ID NO: 5757779 - DNA, 25 bp, Homo sapien
tcaaaatttggctacctctcccact

SEQ ID NO: 5757780 - DNA, 25 bp, Homo sapien
taatttttgtatttttggtagagac

SEQ ID NO: 5757781 - DNA, 25 bp, Homo sapien
gataacgaggtccttcttcttttaa

SEQ ID NO: 5757782 - DNA, 25 bp, Homo sapien
attctctggctaccatctagcacag

SEQ ID NO: 5757783 - DNA, 25 bp, Homo sapien
gtttaaaataaagtaatatggcaat

SEQ ID NO: 5757784 - DNA, 25 bp, Homo sapien
atggcaattacacacaaattttaat

SEQ ID NO: 5757785 - DNA, 25 bp, Homo sapien
gatgatatcttctcagactctgtag

SEQ ID NO: 5757786 - DNA, 25 bp, Homo sapien
ttggcgaacattgttttatcttcat

SEQ ID NO: 5757787 - DNA, 25 bp, Homo sapien
aataaagtaatatggcaatctggaa

SEQ ID NO: 5757788 - DNA, 25 bp, Homo sapien
actgctgtagaagatagataacgag

SEQ ID NO: 5757789 - DNA, 25 bp, Homo sapien
tttcaagtttcctctaatattcctt

SEQ ID NO: 5757790 - DNA, 25 bp, Homo sapien
catcaaaattactagggacagccac

SEQ ID NO: 5757791 - DNA, 25 bp, Homo sapien
tcaagtttcctctaatattccttct

SEQ ID NO: 5757792 - DNA, 25 bp, Homo sapien
cgccaggccttctcagcagctcttg

SEQ ID NO: 5757793 - DNA, 25 bp, Homo sapien
gcctcccgggttcaagtgattctcc

SEQ ID NO: 5757794 - DNA, 25 bp, Homo sapien
tgcaggtttgggatcataaccatac

SEQ ID NO: 5757795 - DNA, 25 bp, Homo sapien
gcttatgagagacctaaaaaaatct

SEQ ID NO: 5757796 - DNA, 25 bp, Homo sapien
ctccaagaaaagtcattttgttctg

SEQ ID NO: 5757797 - DNA, 25 bp, Homo sapien
cacacccagctaatttttgtatttt

SEQ ID NO: 5757798 - DNA, 25 bp, Homo sapien
tttaaaaaacagtatgatcagattc

SEQ ID NO: 5757799 - DNA, 25 bp, Homo sapien
gcaatctggaatgtctccaagaaaa

SEQ ID NO: 5757800 - DNA, 25 bp, Homo sapien
acctgcctcagcctcccaaactgct

SEQ ID NO: 5757801 - DNA, 25 bp, Homo sapien
tcttaaaattcatatggagaaatag

SEQ ID NO: 5757802 - DNA, 25 bp, Homo sapien
caactggattgctttcagcagtctt

SEQ ID NO: 5757803 - DNA, 25 bp, Homo sapien
ttctccaaatgtagatattatacaa

SEQ ID NO: 5757804 - DNA, 25 bp, Homo sapien
ccatctagcacaggagcaactggat

SEQ ID NO: 5757805 - DNA, 25 bp, Homo sapien
agactctgtagaagtcctctgtgca

SEQ ID NO: 5757806 - DNA, 25 bp, Homo sapien
ccaggccttctcagcagctcttgtg

SEQ ID NO: 5757807 - DNA, 25 bp, Homo sapien
ggtcaggatagtctcaatctcttga

SEQ ID NO: 5757808 - DNA, 25 bp, Homo sapien
tgatggaatagcaagtttaagtgtt

SEQ ID NO: 5757809 - DNA, 25 bp, Homo sapien
actcatgtgatcagggaagaatagg

SEQ ID NO: 5757810 - DNA, 25 bp, Homo sapien
cacagaaaataatgctgttgtaaga

SEQ ID NO: 5757811 - DNA, 25 bp, Homo sapien
ccacttgaaaaacatgctgtgagaa

SEQ ID NO: 5757812 - DNA, 25 bp, Homo sapien
tctgtactatttgtttgaatgttgt

SEQ ID NO: 5757813 - DNA, 25 bp, Homo sapien
gcataggacatttctgcagcaatca

SEQ ID NO: 5757814 - DNA, 25 bp, Homo sapien
gttcaaaattctccaaatgtagata

SEQ ID NO: 5757815 - DNA, 25 bp, Homo sapien
tttgcctcccgcgcagctcgaccgg

SEQ ID NO: 5757816 - DNA, 25 bp, Homo sapien
atatcttctcagactctgtagaagt

SEQ ID NO: 5757817 - DNA, 25 bp, Homo sapien
tatttattctctgacagatcagacc

SEQ ID NO: 5757818 - DNA, 25 bp, Homo sapien
tgagggccactgtacaaaagcaact

SEQ ID NO: 5757819 - DNA, 25 bp, Homo sapien
agagtaagataaaaacatttaataa

SEQ ID NO: 5757820 - DNA, 25 bp, Homo sapien
aaaatttaatggcaattacacacaa

SEQ ID NO: 5757821 - DNA, 25 bp, Homo sapien
cctagtgccccatcgtgaaaaacca

SEQ ID NO: 5757822 - DNA, 25 bp, Homo sapien
gataagtgaaatgttttttcaaatt

SEQ ID NO: 5757823 - DNA, 25 bp, Homo sapien
cacaggagcaactggattgctttca

SEQ ID NO: 5757824 - DNA, 25 bp, Homo sapien
ctgtgcaagattaatgtcgagattc

SEQ ID NO: 5757825 - DNA, 25 bp, Homo sapien
agtgctcttagactacatttgctgt

SEQ ID NO: 5757826 - DNA, 25 bp, Homo sapien
tgatacgtgacctgataagtagctg

SEQ ID NO: 5757827 - DNA, 25 bp, Homo sapien
tgtttccataggtttattaagaatt

SEQ ID NO: 5757828 - DNA, 25 bp, Homo sapien
ttttaaagttctggaataacgcatt

SEQ ID NO: 5757829 - DNA, 25 bp, Homo sapien
ttctagatgcaatgtgttttgttac

SEQ ID NO: 5757830 - DNA, 25 bp, Homo sapien
cattgttttatcttcatttgcctcc

SEQ ID NO: 5757831 - DNA, 25 bp, Homo sapien
acaaccactgctgtagaagatagat

SEQ ID NO: 5757832 - DNA, 25 bp, Homo sapien
gatatatctgtacagaaagagtaag

SEQ ID NO: 5757833 - DNA, 25 bp, Homo sapien
tctttgtagaccaataaaatgcagg

SEQ ID NO: 5757834 - DNA, 25 bp, Homo sapien
tgggtcctacgcgaccgctgacccg

SEQ ID NO: 5757835 - DNA, 25 bp, Homo sapien
aataactttctaactgtatacagta

SEQ ID NO: 5757836 - DNA, 25 bp, Homo sapien
acagatcaatgagtaaaatgttcat

SEQ ID NO: 5757837 - DNA, 25 bp, Homo sapien
tgtcgagattcctagtgccccatcg

SEQ ID NO: 5757838 - DNA, 25 bp, Homo sapien
acagaaatgaaatgcaatgaagaga

SEQ ID NO: 5757839 - DNA, 25 bp, Homo sapien
atgtaattgaaccaaaaacatttag

SEQ ID NO: 5757840 - DNA, 25 bp, Homo sapien
ctcagatttcaagtttcctctaata

SEQ ID NO: 5757841 - DNA, 25 bp, Homo sapien
tccataggtttattaagaatttcat

SEQ ID NO: 5757842 - DNA, 25 bp, Homo sapien
ttactaagcatagacacagaaaata

SEQ ID NO: 5757843 - DNA, 25 bp, Homo sapien
ctccaaatgtagatattatacaata

SEQ ID NO: 5757844 - DNA, 25 bp, Homo sapien
tgtacagaaagagtaagataaaaac

SEQ ID NO: 5757845 - DNA, 25 bp, Homo sapien
tattctctgacagatcagacccaga

SEQ ID NO: 5757846 - DNA, 25 bp, Homo sapien
gatagtctcaatctcttgaccttgt

SEQ ID NO: 5757847 - DNA, 25 bp, Homo sapien
cctaatccctggaaatactttcaag

SEQ ID NO: 5757848 - DNA, 25 bp, Homo sapien
catgttggtcaggatagtctcaatc

SEQ ID NO: 5757849 - DNA, 25 bp, Homo sapien
ttcagcatgatgatatcttctcaga

SEQ ID NO: 5757850 - DNA, 25 bp, Homo sapien
gaaaagtcattttgttctgtcactg

SEQ ID NO: 5757851 - DNA, 25 bp, Homo sapien
atttgatatatctgtacagaaagag

SEQ ID NO: 5757852 - DNA, 25 bp, Homo sapien
caaaaacatttagcaatccttcatt

SEQ ID NO: 5757853 - DNA, 25 bp, Homo sapien
caaggatggctccaaggaaaaagac

SEQ ID NO: 5757854 - DNA, 25 bp, Homo sapien
attacaaggatggctccaaggaaaa

SEQ ID NO: 5757855 - DNA, 25 bp, Homo sapien
gatcagggaagaataggcttatgag

SEQ ID NO: 5757856 - DNA, 25 bp, Homo sapien
ctaacctccattactataaaattct

SEQ ID NO: 5757857 - DNA, 25 bp, Homo sapien
tacaaggatggctccaaggaaaaag

SEQ ID NO: 5757858 - DNA, 25 bp, Homo sapien
ccctggaaatactttcaagttttga

SEQ ID NO: 5757859 - DNA, 25 bp, Homo sapien
taaaattctctggctaccatctagc

SEQ ID NO: 5757860 - DNA, 25 bp, Homo sapien
ctatttgtttgaatgttgtttttgt

SEQ ID NO: 5757861 - DNA, 25 bp, Homo sapien
atgttgtttttgtaaacagttgtag

SEQ ID NO: 5757862 - DNA, 25 bp, Homo sapien
gtgagaactgccatgagtcctacaa

SEQ ID NO: 5757863 - DNA, 25 bp, Homo sapien
ttaaagaagtttttacagatcaatg

SEQ ID NO: 5757864 - DNA, 25 bp, Homo sapien
tttaaactcagatttcaagtttcct

SEQ ID NO: 5757865 - DNA, 25 bp, Homo sapien
ccactgtacaaaagcaactcctgtc

SEQ ID NO: 5757866 - DNA, 25 bp, Homo sapien
tatagatccctgatggaatagcaag

SEQ ID NO: 5757867 - DNA, 25 bp, Homo sapien
atatgcttgatagttcaaaattctc

SEQ ID NO: 5757868 - DNA, 25 bp, Homo sapien
aattggtatctgacatttgttgtgt

SEQ ID NO: 5757869 - DNA, 25 bp, Homo sapien
aggatagtctcaatctcttgacctt

SEQ ID NO: 5757870 - DNA, 25 bp, Homo sapien
aaataatgctgttgtaagaattttc

SEQ ID NO: 5757871 - DNA, 25 bp, Homo sapien
gacatctgtactatttgtttgaatg

SEQ ID NO: 5757872 - DNA, 25 bp, Homo sapien
ccaaatgtagatattatacaataat

SEQ ID NO: 5757873 - DNA, 25 bp, Homo sapien
ttaaagttctggaataacgcattgt

SEQ ID NO: 5757874 - DNA, 25 bp, Homo sapien
caaaaaagtagctgttattacaagg

SEQ ID NO: 5757875 - DNA, 25 bp, Homo sapien
aaagttccttagaatcaagctgaga

SEQ ID NO: 5757876 - DNA, 25 bp, Homo sapien
ccagttaaagatagtatacaactat

SEQ ID NO: 5757877 - DNA, 25 bp, Homo sapien
cctacaaattgagaaccagctgaaa

SEQ ID NO: 5757878 - DNA, 25 bp, Homo sapien
tcatgtgatcagggaagaataggct

SEQ ID NO: 5757879 - DNA, 25 bp, Homo sapien
tattaaggacttaatctgatttaca

SEQ ID NO: 5757880 - DNA, 25 bp, Homo sapien
tgctcttgcaaagagtgcataggac

SEQ ID NO: 5757881 - DNA, 25 bp, Homo sapien
cagcaaagccacttgaaaaacatgc

SEQ ID NO: 5757882 - DNA, 25 bp, Homo sapien
tctgtagaagtcctctgtgcaagat

SEQ ID NO: 5757883 - DNA, 25 bp, Homo sapien
ccgtcgccgtagccaccgccagctc

SEQ ID NO: 5757884 - DNA, 25 bp, Homo sapien
aggctgccgagtccgctgggtccta

SEQ ID NO: 5757885 - DNA, 25 bp, Homo sapien
gctgtctttgtagaccaataaaatg

SEQ ID NO: 5757886 - DNA, 25 bp, Homo sapien
ccgccggctcccgtcgccgtagcca

SEQ ID NO: 5757887 - DNA, 25 bp, Homo sapien
tcaagctgagaatctgagggccact

SEQ ID NO: 5757888 - DNA, 25 bp, Homo sapien
gttgtttttgtaaacagttgtagat

SEQ ID NO: 5757889 - DNA, 25 bp, Homo sapien
aaagtcatagcgctgtttaaaataa

SEQ ID NO: 5757890 - DNA, 25 bp, Homo sapien
ttcctagtgccccatcgtgaaaaac

SEQ ID NO: 5757891 - DNA, 25 bp, Homo sapien
ttctctgacagatcagacccagaat

SEQ ID NO: 5757892 - DNA, 25 bp, Homo sapien
tgagccactgcgccaggccttctca

SEQ ID NO: 5757893 - DNA, 25 bp, Homo sapien
cgccgtagccaccgccagctcggtg

SEQ ID NO: 5757894 - DNA, 25 bp, Homo sapien
agtaagataaaaacatttaataaga

SEQ ID NO: 5757895 - DNA, 25 bp, Homo sapien
cagaaaataatgctgttgtaagaat

SEQ ID NO: 5757896 - DNA, 25 bp, Homo sapien
taacgcattgttagaaccaaactgg

SEQ ID NO: 5757897 - DNA, 25 bp, Homo sapien
aaaacatttagcaatccttcattta

SEQ ID NO: 5757898 - DNA, 25 bp, Homo sapien
atttgttgtgtgctcttgcaaagag

SEQ ID NO: 5757899 - DNA, 25 bp, Homo sapien
gaaaaacatgctgtgagaactgcca

SEQ ID NO: 5757900 - DNA, 25 bp, Homo sapien
tagtgccacatacagtaaattattc

SEQ ID NO: 5757901 - DNA, 25 bp, Homo sapien
acgcattgttagaaccaaactggta

SEQ ID NO: 5757902 - DNA, 25 bp, Homo sapien
ttagaaccaaactggtagtctgaaa

SEQ ID NO: 5757903 - DNA, 25 bp, Homo sapien
gctcttgtgtgaacacagaaaggga

SEQ ID NO: 5757904 - DNA, 25 bp, Homo sapien
tcctacgcgaccgctgacccgcagc

SEQ ID NO: 5757905 - DNA, 25 bp, Homo sapien
tgatttgatatatctgtacagaaag

SEQ ID NO: 5757906 - DNA, 25 bp, Homo sapien
attttgttctgtcactgacatctgt

SEQ ID NO: 5757907 - DNA, 25 bp, Homo sapien
aaaaagtagctgttattacaaggat

SEQ ID NO: 5757908 - DNA, 25 bp, Homo sapien
aaaattctccaaatgtagatattat

SEQ ID NO: 5757909 - DNA, 25 bp, Homo sapien
ctcaaagtaaaccccagcaaagcca

SEQ ID NO: 5757910 - DNA, 25 bp, Homo sapien
gattcagcatgatgatatcttctca

SEQ ID NO: 5757911 - DNA, 25 bp, Homo sapien
ttgttacatatacacatatcttatc

SEQ ID NO: 5757912 - DNA, 25 bp, Homo sapien
tgcgtgccaccacacccagctaatt

SEQ ID NO: 5757913 - DNA, 25 bp, Homo sapien
cacccagctaatttttgtatttttg

SEQ ID NO: 5757914 - DNA, 25 bp, Homo sapien
ttttatgtaattgaaccaaaaacat

SEQ ID NO: 5757915 - DNA, 25 bp, Homo sapien
cgccccaggctgccgagtccgctgg

SEQ ID NO: 5757916 - DNA, 25 bp, Homo sapien
ttttttttgagacagactctcactg

SEQ ID NO: 5757917 - DNA, 25 bp, Homo sapien
cacagaaagggaattcaaaatttgg

SEQ ID NO: 5757918 - DNA, 25 bp, Homo sapien
ctcttagactacatttgctgtcttt

SEQ ID NO: 5757919 - DNA, 25 bp, Homo sapien
tccttctaatcctaatccctggaaa

SEQ ID NO: 5757920 - DNA, 25 bp, Homo sapien
gcatgatgatatcttctcagactct

SEQ ID NO: 5757921 - DNA, 25 bp, Homo sapien
tggattgctttcagcagtcttgaag

SEQ ID NO: 5757922 - DNA, 25 bp, Homo sapien
gtgtcgcccaggttggagtgcagtg

SEQ ID NO: 5757923 - DNA, 25 bp, Homo sapien
gcagccttggatttaaagtcatagc

SEQ ID NO: 5757924 - DNA, 25 bp, Homo sapien
tcccactcatgtgatcagggaagaa

SEQ ID NO: 5757925 - DNA, 25 bp, Homo sapien
acgcgaccgctgacccgcagcgccg

SEQ ID NO: 5757926 - DNA, 25 bp, Homo sapien
tgtagaccaataaaatgcaggccat

SEQ ID NO: 5757927 - DNA, 25 bp, Homo sapien
gcgaccgctgacccgcagcgccgcc

SEQ ID NO: 5757928 - DNA, 25 bp, Homo sapien
tgctgttgtaagaattttcaactga

SEQ ID NO: 5757929 - DNA, 25 bp, Homo sapien
gtagaagatagataacgaggtcctt

SEQ ID NO: 5757930 - DNA, 25 bp, Homo sapien
agacggggtttcaccatgttggtca

SEQ ID NO: 5757931 - DNA, 25 bp, Homo sapien
ctgttgtaagaattttcaactgata

SEQ ID NO: 5757932 - DNA, 25 bp, Homo sapien
gattgctttcagcagtcttgaagca

SEQ ID NO: 5757933 - DNA, 25 bp, Homo sapien
attacaggcgtgagccactgcgcca

SEQ ID NO: 5757934 - DNA, 25 bp, Homo sapien
atgcttgatagttcaaaattctcca

SEQ ID NO: 5757935 - DNA, 25 bp, Homo sapien
tcaaaagttcagcaacaaccactgc

SEQ ID NO: 5757936 - DNA, 25 bp, Homo sapien
aggccttctcagcagctcttgtgtg

SEQ ID NO: 5757937 - DNA, 25 bp, Homo sapien
caagctgaatatttcttatccacac

SEQ ID NO: 5757938 - DNA, 25 bp, Homo sapien
gaaaataatgctgttgtaagaattt

SEQ ID NO: 5757939 - DNA, 25 bp, Homo sapien
aggaaaaagacacaagctgaatatt

SEQ ID NO: 5757940 - DNA, 25 bp, Homo sapien
tcttcttttaaagttctggaataac

SEQ ID NO: 5757941 - DNA, 25 bp, Homo sapien
cagctcttgtgtgaacacagaaagg

SEQ ID NO: 5757942 - DNA, 25 bp, Homo sapien
ggattacaggcgtgagccactgcgc

SEQ ID NO: 5757943 - DNA, 25 bp, Homo sapien
tcttttaaagttctggaataacgca

SEQ ID NO: 5757944 - DNA, 25 bp, Homo sapien
cgctgtttaaaataaagtaatatgg

SEQ ID NO: 5757945 - DNA, 25 bp, Homo sapien
tttatcttcatttgcctcccgcgca

SEQ ID NO: 5757946 - DNA, 25 bp, Homo sapien
cgaacattgttttatcttcatttgc

SEQ ID NO: 5757947 - DNA, 25 bp, Homo sapien
tgaaaatttaatggcaattacacac

SEQ ID NO: 5757948 - DNA, 25 bp, Homo sapien
cgtgccaccacacccagctaatttt

SEQ ID NO: 5757949 - DNA, 25 bp, Homo sapien
ctccgccgggcgccccaggctgccg

SEQ ID NO: 5757950 - DNA, 25 bp, Homo sapien
gtttcctctaatattccttctaatc

SEQ ID NO: 5757951 - DNA, 25 bp, Homo sapien
cctctcccactcatgtgatcaggga

SEQ ID NO: 5757952 - DNA, 25 bp, Homo sapien
atttgctgtctttgtagaccaataa

SEQ ID NO: 5757953 - DNA, 25 bp, Homo sapien
gccggctcccgtcgccgtagccacc

SEQ ID NO: 5757954 - DNA, 25 bp, Homo sapien
agtcatagcgctgtttaaaataaag

SEQ ID NO: 5757955 - DNA, 25 bp, Homo sapien
catcatgtagtactcgattcagtgc

SEQ ID NO: 5757956 - DNA, 25 bp, Homo sapien
ttggagtgcagtggcgtgatctcca

SEQ ID NO: 5757957 - DNA, 25 bp, Homo sapien
aaaaacagtatgatcagattcagca

SEQ ID NO: 5757958 - DNA, 25 bp, Homo sapien
ccacttactgcaacctctgcctccc

SEQ ID NO: 5757959 - DNA, 25 bp, Homo sapien
aatttaatggcaattacacacaaat

SEQ ID NO: 5757960 - DNA, 25 bp, Homo sapien
acttgaaaaacatgctgtgagaact

SEQ ID NO: 5757961 - DNA, 25 bp, Homo sapien
ggaatagcaagtttaagtgtttcca

SEQ ID NO: 5757962 - DNA, 25 bp, Homo sapien
gctaggattacaggcgtgagccact

SEQ ID NO: 5757963 - DNA, 25 bp, Homo sapien
aaattctctggctaccatctagcac

SEQ ID NO: 5757964 - DNA, 25 bp, Homo sapien
aatcttccgagcagccttggattta

SEQ ID NO: 5757965 - DNA, 25 bp, Homo sapien
tagataacgaggtccttcttctttt

SEQ ID NO: 5757966 - DNA, 25 bp, Homo sapien
tttagcaatccttcatttagtaatc

SEQ ID NO: 5757967 - DNA, 25 bp, Homo sapien
ccgctgacccgcagcgccgccggct

SEQ ID NO: 5757968 - DNA, 25 bp, Homo sapien
ataatattaaggacttaatctgatt

SEQ ID NO: 5757969 - DNA, 25 bp, Homo sapien
tagatccctgatggaatagcaagtt

SEQ ID NO: 5757970 - DNA, 25 bp, Homo sapien
caggcgtgagccactgcgccaggcc

SEQ ID NO: 5757971 - DNA, 25 bp, Homo sapien
actttctaactgtatacagtatatg

SEQ ID NO: 5757972 - DNA, 25 bp, Homo sapien
taagataaaaacatttaataagatt

SEQ ID NO: 5757973 - DNA, 25 bp, Homo sapien
attgttagaaccaaactggtagtct

SEQ ID NO: 5757974 - DNA, 25 bp, Homo sapien
aaaatcttccgagcagccttggatt

SEQ ID NO: 5757975 - DNA, 25 bp, Homo sapien
agctttataggtaattataattttc

SEQ ID NO: 5757976 - DNA, 25 bp, Homo sapien
ttgaaccaaaaacatttagcaatcc

SEQ ID NO: 5757977 - DNA, 25 bp, Homo sapien
ctgtgagaactgccatgagtcctac

SEQ ID NO: 5757978 - DNA, 25 bp, Homo sapien
tcagtgctcttagactacatttgct

SEQ ID NO: 5757979 - DNA, 25 bp, Homo sapien
taagggctaacctccattactataa

SEQ ID NO: 5757980 - DNA, 25 bp, Homo sapien
tttttcacagctttataggtaatta

SEQ ID NO: 5757981 - DNA, 25 bp, Homo sapien
caactcctgtcatcaaaattactag

SEQ ID NO: 5757982 - DNA, 25 bp, Homo sapien
tatctgacatttgttgtgtgctctt

SEQ ID NO: 5757983 - DNA, 25 bp, Homo sapien
gcaagattaatgtcgagattcctag

SEQ ID NO: 5757984 - DNA, 25 bp, Homo sapien
ccttagaatcaagctgagaatctga

SEQ ID NO: 5757985 - DNA, 25 bp, Homo sapien
gattaaagaagtttttacagatcaa

SEQ ID NO: 5757986 - DNA, 25 bp, Homo sapien
ccgtagccaccgccagctcggtgca

SEQ ID NO: 5757987 - DNA, 25 bp, Homo sapien
ttactagggacagccactggtatac

SEQ ID NO: 5757988 - DNA, 25 bp, Homo sapien
ttgatatttattctctgacagatca

SEQ ID NO: 5757989 - DNA, 25 bp, Homo sapien
agcgctgtttaaaataaagtaatat

SEQ ID NO: 5757990 - DNA, 25 bp, Homo sapien
gaaagggaattcaaaatttggctac

SEQ ID NO: 5757991 - DNA, 25 bp, Homo sapien
tggtagagacggggtttcaccatgt

SEQ ID NO: 5757992 - DNA, 25 bp, Homo sapien
ttctgaagagtatagatccctgatg

SEQ ID NO: 5757993 - DNA, 25 bp, Homo sapien
cactgtgtcgcccaggttggagtgc

SEQ ID NO: 5757994 - DNA, 25 bp, Homo sapien
gttacatatacacatatcttatcct

SEQ ID NO: 5757995 - DNA, 25 bp, Homo sapien
cttctcagactctgtagaagtcctc

SEQ ID NO: 5757996 - DNA, 25 bp, Homo sapien
accttgtgatccacctgcctcagcc

SEQ ID NO: 5757997 - DNA, 25 bp, Homo sapien
ctctgcctcccgggttcaagtgatt

SEQ ID NO: 5757998 - DNA, 25 bp, Homo sapien
taatattccttctaatcctaatccc

SEQ ID NO: 5757999 - DNA, 25 bp, Homo sapien
ttggatttaaagtcatagcgctgtt

SEQ ID NO: 5758000 - DNA, 25 bp, Homo sapien
gcagcgccgccggctcccgtcgccg

SEQ ID NO: 5758001 - DNA, 25 bp, Homo sapien
ttcctgcaggtttgggatcataacc

SEQ ID NO: 5758002 - DNA, 25 bp, Homo sapien
gaagagattaagggctaacctccat

SEQ ID NO: 5758003 - DNA, 25 bp, Homo sapien
gccgcggttcagctccgccgggcgc

SEQ ID NO: 5758004 - DNA, 25 bp, Homo sapien
tgcctcccgcgcagctcgaccggct

SEQ ID NO: 5758005 - DNA, 25 bp, Homo sapien
aaaattactagggacagccactggt

SEQ ID NO: 5758006 - DNA, 25 bp, Homo sapien
gagcagccttggatttaaagtcata

SEQ ID NO: 5758007 - DNA, 25 bp, Homo sapien
cgcccaggttggagtgcagtggcgt

SEQ ID NO: 5758008 - DNA, 25 bp, Homo sapien
cggctgagcccaccaccgggggccg

SEQ ID NO: 5758009 - DNA, 25 bp, Homo sapien
tgttattacaaggatggctccaagg

SEQ ID NO: 5758010 - DNA, 25 bp, Homo sapien
gtagtctgaaagaccaaaattccca

SEQ ID NO: 5758011 - DNA, 25 bp, Homo sapien
gtcttgaagcactaaaatatcttaa

SEQ ID NO: 5758012 - DNA, 25 bp, Homo sapien
tacagtatatgcttgatagttcaaa

SEQ ID NO: 5758013 - DNA, 25 bp, Homo sapien
gacatttctgcagcaatcaaaaagg

SEQ ID NO: 5758014 - DNA, 25 bp, Homo sapien
atataaaaatctctgataagtgaaa

SEQ ID NO: 5758015 - DNA, 25 bp, Homo sapien
agtatgatcagattcagcatgatga

SEQ ID NO: 5758016 - DNA, 25 bp, Homo sapien
catacagtaaattattctgaagagt

SEQ ID NO: 5758017 - DNA, 25 bp, Homo sapien
ctctgtgcaagattaatgtcgagat

SEQ ID NO: 5758018 - DNA, 25 bp, Homo sapien
cacaagctgaatatttcttatccac

SEQ ID NO: 5758019 - DNA, 25 bp, Homo sapien
atctaatttgcaaaaattggtatct

SEQ ID NO: 5758020 - DNA, 25 bp, Homo sapien
ttgatatatctgtacagaaagagta

SEQ ID NO: 5758021 - DNA, 25 bp, Homo sapien
tgtgatttgatatatctgtacagaa

SEQ ID NO: 5758022 - DNA, 25 bp, Homo sapien
cactgacatctgtactatttgtttg

SEQ ID NO: 5758023 - DNA, 25 bp, Homo sapien
tacctctcccactcatgtgatcagg

SEQ ID NO: 5758024 - DNA, 25 bp, Homo sapien
cttagactacatttgctgtctttgt

SEQ ID NO: 5758025 - DNA, 25 bp, Homo sapien
gacctgataagtagctgcatctaga

SEQ ID NO: 5758026 - DNA, 25 bp, Homo sapien
acattttgaaaatttaatggcaatt

SEQ ID NO: 5758027 - DNA, 25 bp, Homo sapien
tcagacccagaatattaatttttat

SEQ ID NO: 5758028 - DNA, 25 bp, Homo sapien
taatcctaatccctggaaatacttt

SEQ ID NO: 5758029 - DNA, 25 bp, Homo sapien
gaatatttcttatccacactgattg

SEQ ID NO: 5758030 - DNA, 25 bp, Homo sapien
cagaaagggaattcaaaatttggct

SEQ ID NO: 5758031 - DNA, 25 bp, Homo sapien
cagccactggtatacacccaatttt

SEQ ID NO: 5758032 - DNA, 25 bp, Homo sapien
ggcgaacattgttttatcttcattt

SEQ ID NO: 5758033 - DNA, 25 bp, Homo sapien
cagtaaattattctgaagagtatag

SEQ ID NO: 5758034 - DNA, 25 bp, Homo sapien
agtgcagtggcgtgatctccactta

SEQ ID NO: 5758035 - DNA, 25 bp, Homo sapien
gctaccatctagcacaggagcaact

SEQ ID NO: 5758036 - DNA, 25 bp, Homo sapien
acagctttataggtaattataattt

SEQ ID NO: 5758037 - DNA, 25 bp, Homo sapien
atacgtgacctgataagtagctgca

SEQ ID NO: 5758038 - DNA, 25 bp, Homo sapien
gcaaagccacttgaaaaacatgctg

SEQ ID NO: 5758039 - DNA, 25 bp, Homo sapien
ctacgcgaccgctgacccgcagcgc

SEQ ID NO: 5758040 - DNA, 25 bp, Homo sapien
aattactagggacagccactggtat

SEQ ID NO: 5758041 - DNA, 25 bp, Homo sapien
ttgagaaccagctgaaagttcctta

SEQ ID NO: 5758042 - DNA, 25 bp, Homo sapien
tgcgccaggccttctcagcagctct

SEQ ID NO: 5758043 - DNA, 25 bp, Homo sapien
atctcttgaccttgtgatccacctg

SEQ ID NO: 5758044 - DNA, 25 bp, Homo sapien
tgtgctcttgcaaagagtgcatagg

SEQ ID NO: 5758045 - DNA, 25 bp, Homo sapien
gccacatacagtaaattattctgaa

SEQ ID NO: 5758046 - DNA, 25 bp, Homo sapien
tcacagctttataggtaattataat

SEQ ID NO: 5758047 - DNA, 25 bp, Homo sapien
cgagtagctgggactacaggtgcgt

SEQ ID NO: 5758048 - DNA, 25 bp, Homo sapien
ttgctttcagcagtcttgaagcact

SEQ ID NO: 5758049 - DNA, 25 bp, Homo sapien
taagaattttcaactgatacgtgac

SEQ ID NO: 5758050 - DNA, 25 bp, Homo sapien
aagatagataacgaggtccttcttc

SEQ ID NO: 5758051 - DNA, 25 bp, Homo sapien
ctgataagtgaaatgttttttcaaa

SEQ ID NO: 5758052 - DNA, 25 bp, Homo sapien
gtgaacacagaaagggaattcaaaa

SEQ ID NO: 5758053 - DNA, 25 bp, Homo sapien
caagtgattctcctgcctcagtctc

SEQ ID NO: 5758054 - DNA, 25 bp, Homo sapien
aagttcagcaacaaccactgctgta

SEQ ID NO: 5758055 - DNA, 25 bp, Homo sapien
caaagtaaaccccagcaaagccact

SEQ ID NO: 5758056 - DNA, 25 bp, Homo sapien
gcaatccttcatttagtaatctttt

SEQ ID NO: 5758057 - DNA, 25 bp, Homo sapien
atctctgataagtgaaatgtttttt

SEQ ID NO: 5758058 - DNA, 25 bp, Homo sapien
aaaagacacaagctgaatatttctt

SEQ ID NO: 5758059 - DNA, 25 bp, Homo sapien
cgggttcaagtgattctcctgcctc

SEQ ID NO: 5758060 - DNA, 25 bp, Homo sapien
aaattattctgaagagtatagatcc

SEQ ID NO: 5758061 - DNA, 25 bp, Homo sapien
gtctcaatctcttgaccttgtgatc

SEQ ID NO: 5758062 - DNA, 25 bp, Homo sapien
cagaaagagtaagataaaaacattt

SEQ ID NO: 5758063 - DNA, 25 bp, Homo sapien
tgctttagtgggatttcctgcaggt

SEQ ID NO: 5758064 - DNA, 25 bp, Homo sapien
ctgtttaaaataaagtaatatggca

SEQ ID NO: 5758065 - DNA, 25 bp, Homo sapien
aacctccattactataaaattctct

SEQ ID NO: 5758066 - DNA, 25 bp, Homo sapien
tttccataggtttattaagaatttc

SEQ ID NO: 5758067 - DNA, 25 bp, Homo sapien
aaataatattaaggacttaatctga

SEQ ID NO: 5758068 - DNA, 25 bp, Homo sapien
tccaaggaaaaagacacaagctgaa

SEQ ID NO: 5758069 - DNA, 25 bp, Homo sapien
tctaactgtatacagtatatgcttg

SEQ ID NO: 5758070 - DNA, 25 bp, Homo sapien
gatccctgatggaatagcaagttta

SEQ ID NO: 5758071 - DNA, 25 bp, Homo sapien
agctgaatatttcttatccacactg

SEQ ID NO: 5758072 - DNA, 25 bp, Homo sapien
aaaattggtatctgacatttgttgt

SEQ ID NO: 5758073 - DNA, 25 bp, Homo sapien
gtctcccgagtagctgggactacag

SEQ ID NO: 5758074 - DNA, 25 bp, Homo sapien
ataatgctgttgtaagaattttcaa

SEQ ID NO: 5758075 - DNA, 25 bp, Homo sapien
ggcgccccaggctgccgagtccgct

SEQ ID NO: 5758076 - DNA, 25 bp, Homo sapien
ttacagaaatgaaatgcaatgaaga

SEQ ID NO: 5758077 - DNA, 25 bp, Homo sapien
gctgagcccaccaccgggggccgcg

SEQ ID NO: 5758078 - DNA, 25 bp, Homo sapien
atctccacttactgcaacctctgcc

SEQ ID NO: 5758079 - DNA, 25 bp, Homo sapien
aggacatttctgcagcaatcaaaaa

SEQ ID NO: 5758080 - DNA, 25 bp, Homo sapien
aagagtgcataggacatttctgcag

SEQ ID NO: 5758081 - DNA, 25 bp, Homo sapien
ttgagacagactctcactgtgtcgc

SEQ ID NO: 5758082 - DNA, 25 bp, Homo sapien
aactcagatttcaagtttcctctaa

SEQ ID NO: 5758083 - DNA, 25 bp, Homo sapien
ctgaatatttcttatccacactgat

SEQ ID NO: 5758084 - DNA, 25 bp, Homo sapien
ctcagcctcccaaactgctaggatt

SEQ ID NO: 5758085 - DNA, 25 bp, Homo sapien
aaaagttcagcaacaaccactgctg

SEQ ID NO: 5758086 - DNA, 25 bp, Homo sapien
ggactacaggtgcgtgccaccacac

SEQ ID NO: 5758087 - DNA, 25 bp, Homo sapien
taaaaaaatcttccgagcagccttg

SEQ ID NO: 5758088 - DNA, 25 bp, Homo sapien
aaagccacttgaaaaacatgctgtg

SEQ ID NO: 5758089 - DNA, 25 bp, Homo sapien
tttaggttggcgaacattgttttat

SEQ ID NO: 5758090 - DNA, 25 bp, Homo sapien
gattcctagtgccccatcgtgaaaa

SEQ ID NO: 5758091 - DNA, 25 bp, Homo sapien
agcaactggattgctttcagcagtc

SEQ ID NO: 5758092 - DNA, 25 bp, Homo sapien
tacagtaaattattctgaagagtat

SEQ ID NO: 5758093 - DNA, 25 bp, Homo sapien
tggctaccatctagcacaggagcaa

SEQ ID NO: 5758094 - DNA, 25 bp, Homo sapien
agcatagacacagaaaataatgctg

SEQ ID NO: 5758095 - DNA, 25 bp, Homo sapien
tagaagtcctctgtgcaagattaat

SEQ ID NO: 5758096 - DNA, 25 bp, Homo sapien
ttgaatgttgtttttgtaaacagtt

SEQ ID NO: 5758097 - DNA, 25 bp, Homo sapien
ccgagcagccttggatttaaagtca

SEQ ID NO: 5758098 - DNA, 25 bp, Homo sapien
aattctccaaatgtagatattatac

SEQ ID NO: 5758099 - DNA, 25 bp, Homo sapien
ctcaatctcttgaccttgtgatcca

SEQ ID NO: 5758100 - DNA, 25 bp, Homo sapien
ggttcaagtgattctcctgcctcag

SEQ ID NO: 5758101 - DNA, 25 bp, Homo sapien
tttcagcagtcttgaagcactaaaa

SEQ ID NO: 5758102 - DNA, 25 bp, Homo sapien
taggttggcgaacattgttttatct

SEQ ID NO: 5758103 - DNA, 25 bp, Homo sapien
gccccatcgtgaaaaaccagttaaa

SEQ ID NO: 5758104 - DNA, 25 bp, Homo sapien
taaactcagatttcaagtttcctct

SEQ ID NO: 5758105 - DNA, 25 bp, Homo sapien
caccgggggccgcggttcagctccg

SEQ ID NO: 5758106 - DNA, 25 bp, Homo sapien
atttgatagtgccacatacagtaaa

SEQ ID NO: 5758107 - DNA, 25 bp, Homo sapien
agatcaatgagtaaaatgttcattt

SEQ ID NO: 5758108 - DNA, 25 bp, Homo sapien
caaattgagaaccagctgaaagttc

SEQ ID NO: 5758109 - DNA, 25 bp, Homo sapien
tgtacaaaagcaactcctgtcatca

SEQ ID NO: 5758110 - DNA, 25 bp, Homo sapien
attttgaaaatttaatggcaattac

SEQ ID NO: 5758111 - DNA, 25 bp, Homo sapien
tagacacagaaaataatgctgttgt

SEQ ID NO: 5758112 - DNA, 25 bp, Homo sapien
aatatggcaatctggaatgtctcca

SEQ ID NO: 5758113 - DNA, 25 bp, Homo sapien
gtgatcagggaagaataggcttatg

SEQ ID NO: 5758114 - DNA, 25 bp, Homo sapien
accggctgagcccaccaccgggggc

SEQ ID NO: 5758115 - DNA, 25 bp, Homo sapien
actgtacaaaagcaactcctgtcat

SEQ ID NO: 5758116 - DNA, 25 bp, Homo sapien
gatatttattctctgacagatcaga

SEQ ID NO: 5758117 - DNA, 25 bp, Homo sapien
gtggcgtgatctccacttactgcaa

SEQ ID NO: 5758118 - DNA, 25 bp, Homo sapien
cgtgatctccacttactgcaacctc

SEQ ID NO: 5758119 - DNA, 25 bp, Homo sapien
tcctgcctcagtctcccgagtagct

SEQ ID NO: 5758120 - DNA, 25 bp, Homo sapien
agtatagatccctgatggaatagca

SEQ ID NO: 5758121 - DNA, 25 bp, Homo sapien
atagtatacaactatgctttagtgg

SEQ ID NO: 5758122 - DNA, 25 bp, Homo sapien
ctcccgggttcaagtgattctcctg

SEQ ID NO: 5758123 - DNA, 25 bp, Homo sapien
ttcatttgcctcccgcgcagctcga

SEQ ID NO: 5758124 - DNA, 25 bp, Homo sapien
atcagattcagcatgatgatatctt

SEQ ID NO: 5758125 - DNA, 25 bp, Homo sapien
ggatttcctgcaggtttgggatcat

SEQ ID NO: 5758126 - DNA, 25 bp, Homo sapien
caggtgcgtgccaccacacccagct

SEQ ID NO: 5758127 - DNA, 25 bp, Homo sapien
gtatacacccaattttttactaagc

SEQ ID NO: 5758128 - DNA, 25 bp, Homo sapien
tccttcttcttttaaagttctggaa

SEQ ID NO: 5758129 - DNA, 25 bp, Homo sapien
tttgcaaaaattggtatctgacatt

SEQ ID NO: 5758130 - DNA, 25 bp, Homo sapien
tggtatacacccaattttttactaa

SEQ ID NO: 5758131 - DNA, 25 bp, Homo sapien
taccatctagcacaggagcaactgg

SEQ ID NO: 5758132 - DNA, 25 bp, Homo sapien
ttatgtaattgaaccaaaaacattt

SEQ ID NO: 5758133 - DNA, 25 bp, Homo sapien
agggctaacctccattactataaaa

SEQ ID NO: 5758134 - DNA, 25 bp, Homo sapien
gagaaatagtatgtatctctacatt

SEQ ID NO: 5758135 - DNA, 25 bp, Homo sapien
tgcaatgaagagattaagggctaac

SEQ ID NO: 5758136 - DNA, 25 bp, Homo sapien
gagaaccagctgaaagttccttaga

SEQ ID NO: 5758137 - DNA, 25 bp, Homo sapien
cgattcagtgctcttagactacatt

SEQ ID NO: 5758138 - DNA, 25 bp, Homo sapien
tatttttggtagagacggggtttca

SEQ ID NO: 5758139 - DNA, 25 bp, Homo sapien
gtcatcaaaattactagggacagcc

SEQ ID NO: 5758140 - DNA, 25 bp, Homo sapien
gtccgctgggtcctacgcgaccgct

SEQ ID NO: 5758141 - DNA, 25 bp, Homo sapien
cagtggcgtgatctccacttactgc

SEQ ID NO: 5758142 - DNA, 25 bp, Homo sapien
atgcaatgtgttttgttacatatac

SEQ ID NO: 5758143 - DNA, 25 bp, Homo sapien
aaagaagtttttacagatcaatgag

SEQ ID NO: 5758144 - DNA, 25 bp, Homo sapien
cttcaaaagttcagcaacaaccact

SEQ ID NO: 5758145 - DNA, 25 bp, Homo sapien
ttaaatctaatttgcaaaaattggt

SEQ ID NO: 5758146 - DNA, 25 bp, Homo sapien
agccttggatttaaagtcatagcgc

SEQ ID NO: 5758147 - DNA, 25 bp, Homo sapien
tacagaaagagtaagataaaaacat

SEQ ID NO: 5758148 - DNA, 25 bp, Homo sapien
atacacccaattttttactaagcat

SEQ ID NO: 5758149 - DNA, 25 bp, Homo sapien
taagtgtttccataggtttattaag

SEQ ID NO: 5758150 - DNA, 25 bp, Homo sapien
aattgaaccaaaaacatttagcaat

SEQ ID NO: 5758151 - DNA, 25 bp, Homo sapien
ttaaaataatattaaggacttaatc

SEQ ID NO: 5758152 - DNA, 25 bp, Homo sapien
ccgggggccgcggttcagctccgcc

SEQ ID NO: 5758153 - DNA, 25 bp, Homo sapien
tatcttcatttgcctcccgcgcagc

SEQ ID NO: 5758154 - DNA, 25 bp, Homo sapien
cagattcagcatgatgatatcttct

SEQ ID NO: 5758155 - DNA, 25 bp, Homo sapien
tctcccactcatgtgatcagggaag

SEQ ID NO: 5758156 - DNA, 25 bp, Homo sapien
gcctcagcctcccaaactgctagga

SEQ ID NO: 5758157 - DNA, 25 bp, Homo sapien
tacaactatgctttagtgggatttc

SEQ ID NO: 5758158 - DNA, 25 bp, Homo sapien
cccaggttggagtgcagtggcgtga

SEQ ID NO: 5758159 - DNA, 25 bp, Homo sapien
gctgttattacaaggatggctccaa

SEQ ID NO: 5758160 - DNA, 25 bp, Homo sapien
gaaatagtatgtatctctacattaa

SEQ ID NO: 5758161 - DNA, 25 bp, Homo sapien
agctcgaccggctgagcccaccacc

SEQ ID NO: 5758162 - DNA, 25 bp, Homo sapien
ctagatgcaatgtgttttgttacat

SEQ ID NO: 5758163 - DNA, 25 bp, Homo sapien
ttttttttttgagacagactctcac

SEQ ID NO: 5758164 - DNA, 25 bp, Homo sapien
tgttagaaccaaactggtagtctga

SEQ ID NO: 5758165 - DNA, 25 bp, Homo sapien
catacaaaaaagtagctgttattac

SEQ ID NO: 5758166 - DNA, 25 bp, Homo sapien
ctggaataacgcattgttagaacca

SEQ ID NO: 5758167 - DNA, 25 bp, Homo sapien
gaatgttgtttttgtaaacagttgt

SEQ ID NO: 5758168 - DNA, 25 bp, Homo sapien
agcgccgccggctcccgtcgccgta

SEQ ID NO: 5758169 - DNA, 25 bp, Homo sapien
atgaaatgcaatgaagagattaagg

SEQ ID NO: 5758170 - DNA, 25 bp, Homo sapien
gcttgatagttcaaaattctccaaa

SEQ ID NO: 5758171 - DNA, 25 bp, Homo sapien
ttacattttgaaaatttaatggcaa

SEQ ID NO: 5758172 - DNA, 25 bp, Homo sapien
gtcgcccaggttggagtgcagtggc

SEQ ID NO: 5758173 - DNA, 25 bp, Homo sapien
gccattatcttcaaaagttcagcaa

SEQ ID NO: 5758174 - DNA, 25 bp, Homo sapien
tcattttgttctgtcactgacatct

SEQ ID NO: 5758175 - DNA, 25 bp, Homo sapien
gtagctgcatctagatttgatagtg

SEQ ID NO: 5758176 - DNA, 25 bp, Homo sapien
ttcttatccacactgattgttttgt

SEQ ID NO: 5758177 - DNA, 25 bp, Homo sapien
tcaaaattctccaaatgtagatatt

SEQ ID NO: 5758178 - DNA, 25 bp, Homo sapien
aaaaatctctgataagtgaaatgtt

SEQ ID NO: 5758179 - DNA, 25 bp, Homo sapien
atgcaggccattatcttcaaaagtt

SEQ ID NO: 5758180 - DNA, 25 bp, Homo sapien
tgagaatctgagggccactgtacaa

SEQ ID NO: 5758181 - DNA, 25 bp, Homo sapien
ggagtgcagtggcgtgatctccact

SEQ ID NO: 5758182 - DNA, 25 bp, Homo sapien
gaagagtatagatccctgatggaat

SEQ ID NO: 5758183 - DNA, 25 bp, Homo sapien
caaactgctaggattacaggcgtga

SEQ ID NO: 5758184 - DNA, 25 bp, Homo sapien
ccgagtccgctgggtcctacgcgac

SEQ ID NO: 5758185 - DNA, 25 bp, Homo sapien
actacaggtgcgtgccaccacaccc

SEQ ID NO: 5758186 - DNA, 25 bp, Homo sapien
ggtttattaagaatttcatcatgta

SEQ ID NO: 5758187 - DNA, 25 bp, Homo sapien
cctgatggaatagcaagtttaagtg

SEQ ID NO: 5758188 - DNA, 25 bp, Homo sapien
ccacctgcctcagcctcccaaactg

SEQ ID NO: 5758189 - DNA, 25 bp, Homo sapien
agagtatagatccctgatggaatag

SEQ ID NO: 5758190 - DNA, 25 bp, Homo sapien
tctgacatttgttgtgtgctcttgc

SEQ ID NO: 5758191 - DNA, 25 bp, Homo sapien
agcagctcttgtgtgaacacagaaa

SEQ ID NO: 5758192 - DNA, 25 bp, Homo sapien
ttaaagtcatagcgctgtttaaaat

SEQ ID NO: 5758193 - DNA, 25 bp, Homo sapien
agtctgaaagaccaaaattcccagg

SEQ ID NO: 5758194 - DNA, 25 bp, Homo sapien
atccacctgcctcagcctcccaaac

SEQ ID NO: 5758195 - DNA, 25 bp, Homo sapien
tcaaaattactagggacagccactg

SEQ ID NO: 5758196 - DNA, 25 bp, Homo sapien
ttttgtataaatataaaaatctctg

SEQ ID NO: 5758197 - DNA, 25 bp, Homo sapien
cagcaatcaaaaaggtaaaatcttt

SEQ ID NO: 5758198 - DNA, 25 bp, Homo sapien
tctggaatgtctccaagaaaagtca

SEQ ID NO: 5758199 - DNA, 25 bp, Homo sapien
ttatcttcaaaagttcagcaacaac

SEQ ID NO: 5758200 - DNA, 25 bp, Homo sapien
tccctgatggaatagcaagtttaag

SEQ ID NO: 5758201 - DNA, 25 bp, Homo sapien
tttgaaaatttaatggcaattacac

SEQ ID NO: 5758202 - DNA, 25 bp, Homo sapien
gaattcaaaatttggctacctctcc

SEQ ID NO: 5758203 - DNA, 25 bp, Homo sapien
ttttgagacagactctcactgtgtc

SEQ ID NO: 5758204 - DNA, 25 bp, Homo sapien
atcaatgagtaaaatgttcatttaa

SEQ ID NO: 5758205 - DNA, 25 bp, Homo sapien
acgtgacctgataagtagctgcatc

SEQ ID NO: 5758206 - DNA, 25 bp, Homo sapien
gagtcctacaaattgagaaccagct

SEQ ID NO: 5758207 - DNA, 25 bp, Homo sapien
cccgggttcaagtgattctcctgcc

SEQ ID NO: 5758208 - DNA, 25 bp, Homo sapien
gcaggccattatcttcaaaagttca

SEQ ID NO: 5758209 - DNA, 25 bp, Homo sapien
aatatcttaaaattcatatggagaa

SEQ ID NO: 5758210 - DNA, 25 bp, Homo sapien
ctgcatctagatttgatagtgccac

SEQ ID NO: 5758211 - DNA, 25 bp, Homo sapien
ccttggatttaaagtcatagcgctg

SEQ ID NO: 5758212 - DNA, 25 bp, Homo sapien
ggccactgtacaaaagcaactcctg

SEQ ID NO: 5758213 - DNA, 25 bp, Homo sapien
ttttgttacatatacacatatctta

SEQ ID NO: 5758214 - DNA, 25 bp, Homo sapien
tatacaactatgctttagtgggatt

SEQ ID NO: 5758215 - DNA, 25 bp, Homo sapien
aaaatatcttaaaattcatatggag

SEQ ID NO: 5758216 - DNA, 25 bp, Homo sapien
gtttttacagatcaatgagtaaaat

SEQ ID NO: 5758217 - DNA, 25 bp, Homo sapien
ttactgcaacctctgcctcccgggt

SEQ ID NO: 5758218 - DNA, 25 bp, Homo sapien
atgagtcctacaaattgagaaccag

SEQ ID NO: 5758219 - DNA, 25 bp, Homo sapien
ttcatcatgtagtactcgattcagt

SEQ ID NO: 5758220 - DNA, 25 bp, Homo sapien
aaatataaaaatctctgataagtga

SEQ ID NO: 5758221 - DNA, 25 bp, Homo sapien
aactgctaggattacaggcgtgagc

SEQ ID NO: 5758222 - DNA, 25 bp, Homo sapien
gcctcagtctcccgagtagctggga

SEQ ID NO: 5758223 - DNA, 25 bp, Homo sapien
accacacccagctaatttttgtatt

SEQ ID NO: 5758224 - DNA, 25 bp, Homo sapien
caaaagcaactcctgtcatcaaaat

SEQ ID NO: 5758225 - DNA, 25 bp, Homo sapien
ctcagtctcccgagtagctgggact

SEQ ID NO: 5758226 - DNA, 25 bp, Homo sapien
ttaataactttctaactgtatacag

SEQ ID NO: 5758227 - DNA, 25 bp, Homo sapien
tagctgggactacaggtgcgtgcca

SEQ ID NO: 5758228 - DNA, 25 bp, Homo sapien
tagactacatttgctgtctttgtag

SEQ ID NO: 5758229 - DNA, 25 bp, Homo sapien
ttaaaattcatatggagaaatagta

SEQ ID NO: 5758230 - DNA, 25 bp, Homo sapien
tctctggctaccatctagcacagga

SEQ ID NO: 5758231 - DNA, 25 bp, Homo sapien
aatgctgttgtaagaattttcaact

SEQ ID NO: 5758232 - DNA, 25 bp, Homo sapien
aaactggtagtctgaaagaccaaaa

SEQ ID NO: 5758233 - DNA, 25 bp, Homo sapien
tcccgtcgccgtagccaccgccagc

SEQ ID NO: 5758234 - DNA, 25 bp, Homo sapien
tgtaaacagttgtagattaaagaag

SEQ ID NO: 5758235 - DNA, 25 bp, Homo sapien
tacaaattgagaaccagctgaaagt

SEQ ID NO: 5758236 - DNA, 25 bp, Homo sapien
cagctgaaagttccttagaatcaag

SEQ ID NO: 5758237 - DNA, 25 bp, Homo sapien
cttcttcttttaaagttctggaata

SEQ ID NO: 5758238 - DNA, 25 bp, Homo sapien
ttacagatcaatgagtaaaatgttc

SEQ ID NO: 5758239 - DNA, 25 bp, Homo sapien
atgagtaaaatgttcatttaataac

SEQ ID NO: 5758240 - DNA, 25 bp, Homo sapien
cctaaaaaaatcttccgagcagcct

SEQ ID NO: 5758241 - DNA, 25 bp, Homo sapien
cattatcttcaaaagttcagcaaca

SEQ ID NO: 5758242 - DNA, 25 bp, Homo sapien
tattaagaatttcatcatgtagtac

SEQ ID NO: 5758243 - DNA, 25 bp, Homo sapien
gtaattgaaccaaaaacatttagca

SEQ ID NO: 5758244 - DNA, 25 bp, Homo sapien
taatggcaattacacacaaatttta

SEQ ID NO: 5758245 - DNA, 25 bp, Homo sapien
tcaggatagtctcaatctcttgacc

SEQ ID NO: 5758246 - DNA, 25 bp, Homo sapien
gacacaagctgaatatttcttatcc

SEQ ID NO: 5758247 - DNA, 25 bp, Homo sapien
agttctggaataacgcattgttaga

SEQ ID NO: 5758248 - DNA, 25 bp, Homo sapien
cgcggttcagctccgccgggcgccc

SEQ ID NO: 5758249 - DNA, 25 bp, Homo sapien
agatttgatatttattctctgacag

SEQ ID NO: 5758250 - DNA, 25 bp, Homo sapien
cagtatatgcttgatagttcaaaat

SEQ ID NO: 5758251 - DNA, 25 bp, Homo sapien
ttcatatggagaaatagtatgtatc

SEQ ID NO: 5758252 - DNA, 25 bp, Homo sapien
gtagtactcgattcagtgctcttag

SEQ ID NO: 5758253 - DNA, 25 bp, Homo sapien
ttaagaatttcatcatgtagtactc

SEQ ID NO: 5758254 - DNA, 25 bp, Homo sapien
ctgcctcagcctcccaaactgctag

SEQ ID NO: 5758255 - DNA, 25 bp, Homo sapien
ttttttttttttgagacagactctc

SEQ ID NO: 5758256 - DNA, 25 bp, Homo sapien
aagtaatatggcaatctggaatgtc

SEQ ID NO: 5758257 - DNA, 25 bp, Homo sapien
ctcactgtgtcgcccaggttggagt

SEQ ID NO: 5758258 - DNA, 25 bp, Homo sapien
gggacagccactggtatacacccaa

SEQ ID NO: 5758259 - DNA, 25 bp, Homo sapien
tttctgcagcaatcaaaaaggtaaa

SEQ ID NO: 5758260 - DNA, 25 bp, Homo sapien
tatgctttagtgggatttcctgcag

SEQ ID NO: 5758261 - DNA, 25 bp, Homo sapien
accccagcaaagccacttgaaaaac

SEQ ID NO: 5758262 - DNA, 25 bp, Homo sapien
aaagttctggaataacgcattgtta

SEQ ID NO: 5758263 - DNA, 25 bp, Homo sapien
gctgccgagtccgctgggtcctacg

SEQ ID NO: 5758264 - DNA, 25 bp, Homo sapien
gcgcagctcgaccggctgagcccac

SEQ ID NO: 5758265 - DNA, 25 bp, Homo sapien
catgctgtgagaactgccatgagtc

SEQ ID NO: 5758266 - DNA, 25 bp, Homo sapien
aaatgaaatgcaatgaagagattaa

SEQ ID NO: 5758267 - DNA, 25 bp, Homo sapien
taaaaaacagtatgatcagattcag

SEQ ID NO: 5758268 - DNA, 25 bp, Homo sapien
aattcatatggagaaatagtatgta

SEQ ID NO: 5758269 - DNA, 25 bp, Homo sapien
agtatacaactatgctttagtggga

SEQ ID NO: 5758270 - DNA, 25 bp, Homo sapien
gctttcagcagtcttgaagcactaa

SEQ ID NO: 5758271 - DNA, 25 bp, Homo sapien
ggcaattacacacaaattttaattt

SEQ ID NO: 5758272 - DNA, 25 bp, Homo sapien
catttgcctcccgcgcagctcgacc

SEQ ID NO: 5758273 - DNA, 25 bp, Homo sapien
tatcttaaaattcatatggagaaat

SEQ ID NO: 5758274 - DNA, 25 bp, Homo sapien
actttcaagttttgatttctagatg

SEQ ID NO: 5758275 - DNA, 25 bp, Homo sapien
ctttagtgggatttcctgcaggttt

SEQ ID NO: 5758276 - DNA, 25 bp, Homo sapien
tgcagcaatcaaaaaggtaaaatct

SEQ ID NO: 5758277 - DNA, 25 bp, Homo sapien
atttcttatccacactgattgtttt

SEQ ID NO: 5758278 - DNA, 25 bp, Homo sapien
accaccgggggccgcggttcagctc

SEQ ID NO: 5758279 - DNA, 25 bp, Homo sapien
ctgtcatcaaaattactagggacag

SEQ ID NO: 5758280 - DNA, 25 bp, Homo sapien
ttcatgtgatttgatatatctgtac

SEQ ID NO: 5758281 - DNA, 25 bp, Homo sapien
tggcaatctggaatgtctccaagaa

SEQ ID NO: 5758282 - DNA, 25 bp, Homo sapien
taagcatagacacagaaaataatgc

SEQ ID NO: 5758283 - DNA, 25 bp, Homo sapien
ttgaaaaacatgctgtgagaactgc

SEQ ID NO: 5758284 - DNA, 25 bp, Homo sapien
ggcgtgatctccacttactgcaacc

SEQ ID NO: 5758285 - DNA, 25 bp, Homo sapien
ctctgacagatcagacccagaatat

SEQ ID NO: 5758286 - DNA, 25 bp, Homo sapien
tatccacactgattgttttgtttct

SEQ ID NO: 5758287 - DNA, 25 bp, Homo sapien
aaaataaagtaatatggcaatctgg

SEQ ID NO: 5758288 - DNA, 25 bp, Homo sapien
tttaagtgtttccataggtttatta

SEQ ID NO: 5758289 - DNA, 25 bp, Homo sapien
ttaatgtcgagattcctagtgcccc

SEQ ID NO: 5758290 - DNA, 25 bp, Homo sapien
aatctgagggccactgtacaaaagc

SEQ ID NO: 5758291 - DNA, 25 bp, Homo sapien
aggatggctccaaggaaaaagacac

SEQ ID NO: 5758292 - DNA, 25 bp, Homo sapien
tttgttctgtcactgacatctgtac

SEQ ID NO: 5758293 - DNA, 25 bp, Homo sapien
ataggacatttctgcagcaatcaaa

SEQ ID NO: 5758294 - DNA, 25 bp, Homo sapien
ggctaacctccattactataaaatt

SEQ ID NO: 5758295 - DNA, 25 bp, Homo sapien
ctcccgagtagctgggactacaggt

SEQ ID NO: 5758296 - DNA, 25 bp, Homo sapien
agcagtcttgaagcactaaaatatc

SEQ ID NO: 5758297 - DNA, 25 bp, Homo sapien
gttcagctccgccgggcgccccagg

SEQ ID NO: 5758298 - DNA, 25 bp, Homo sapien
gcaagtttaagtgtttccataggtt

SEQ ID NO: 5758299 - DNA, 25 bp, Homo sapien
atgtagtactcgattcagtgctctt

SEQ ID NO: 5758300 - DNA, 25 bp, Homo sapien
ggtcctacgcgaccgctgacccgca

SEQ ID NO: 5758301 - DNA, 25 bp, Homo sapien
atagcgctgtttaaaataaagtaat

SEQ ID NO: 5758302 - DNA, 25 bp, Homo sapien
aaagatagtatacaactatgcttta

SEQ ID NO: 5758303 - DNA, 25 bp, Homo sapien
aggcttatgagagacctaaaaaaat

SEQ ID NO: 5758304 - DNA, 25 bp, Homo sapien
agtgtttccataggtttattaagaa

SEQ ID NO: 5758305 - DNA, 25 bp, Homo sapien
taactgtatacagtatatgcttgat

SEQ ID NO: 5758306 - DNA, 25 bp, Homo sapien
agtcattttgttctgtcactgacat

SEQ ID NO: 5758307 - DNA, 25 bp, Homo sapien
tgacatttgttgtgtgctcttgcaa

SEQ ID NO: 5758308 - DNA, 25 bp, Homo sapien
gacagatcagacccagaatattaat

SEQ ID NO: 5758309 - DNA, 25 bp, Homo sapien
ttcaagtgattctcctgcctcagtc

SEQ ID NO: 5758310 - DNA, 25 bp, Homo sapien
tatgatcagattcagcatgatgata

SEQ ID NO: 5758311 - DNA, 25 bp, Homo sapien
actgcgccaggccttctcagcagct

SEQ ID NO: 5758312 - DNA, 25 bp, Homo sapien
tcttgtgtgaacacagaaagggaat

SEQ ID NO: 5758313 - DNA, 25 bp, Homo sapien
ccaattttttactaagcatagacac

SEQ ID NO: 5758314 - DNA, 25 bp, Homo sapien
gtgacctgataagtagctgcatcta

SEQ ID NO: 5758315 - DNA, 25 bp, Homo sapien
tttgggatcataaccatacaaaaaa

SEQ ID NO: 5758316 - DNA, 25 bp, Homo sapien
tctttttaaactcagatttcaagtt

SEQ ID NO: 5758317 - DNA, 25 bp, Homo sapien
gattaaatctaatttgcaaaaattg

SEQ ID NO: 5758318 - DNA, 25 bp, Homo sapien
agccactgcgccaggccttctcagc

SEQ ID NO: 5758319 - DNA, 25 bp, Homo sapien
tttgatttctagatgcaatgtgttt

SEQ ID NO: 5758320 - DNA, 25 bp, Homo sapien
tctgagggccactgtacaaaagcaa

SEQ ID NO: 5758321 - DNA, 25 bp, Homo sapien
acagtatgatcagattcagcatgat

SEQ ID NO: 5758322 - DNA, 25 bp, Homo sapien
gaatttcatcatgtagtactcgatt

SEQ ID NO: 5758323 - DNA, 25 bp, Homo sapien
cttgaagcactaaaatatcttaaaa

SEQ ID NO: 5758324 - DNA, 25 bp, Homo sapien
taaacagttgtagattaaagaagtt

SEQ ID NO: 5758325 - DNA, 25 bp, Homo sapien
tttgtaaacagttgtagattaaaga

SEQ ID NO: 5758326 - DNA, 25 bp, Homo sapien
acctctgcctcccgggttcaagtga

SEQ ID NO: 5758327 - DNA, 25 bp, Homo sapien
agagacggggtttcaccatgttggt

SEQ ID NO: 5758328 - DNA, 25 bp, Homo sapien
taatccctggaaatactttcaagtt

SEQ ID NO: 5758329 - DNA, 25 bp, Homo sapien
gttgtaagaattttcaactgatacg

SEQ ID NO: 5758330 - DNA, 25 bp, Homo sapien
ttatgagagacctaaaaaaatcttc

SEQ ID NO: 5758331 - DNA, 25 bp, Homo sapien
catttctgcagcaatcaaaaaggta

SEQ ID NO: 5758332 - DNA, 25 bp, Homo sapien
tgaaagaccaaaattcccagggaaa

SEQ ID NO: 5758333 - DNA, 25 bp, Homo sapien
tcttcatttgcctcccgcgcagctc

SEQ ID NO: 5758334 - DNA, 25 bp, Homo sapien
agaaccaaactggtagtctgaaaga

SEQ ID NO: 5758335 - DNA, 25 bp, Homo sapien
acccgcagcgccgccggctcccgtc

SEQ ID NO: 5758336 - DNA, 25 bp, Homo sapien
aagtttttacagatcaatgagtaaa

SEQ ID NO: 5758337 - DNA, 25 bp, Homo sapien
ctcccaaactgctaggattacaggc

SEQ ID NO: 5758338 - DNA, 25 bp, Homo sapien
cagcctcccaaactgctaggattac

SEQ ID NO: 5758339 - DNA, 25 bp, Homo sapien
ctcttgaccttgtgatccacctgcc

SEQ ID NO: 5758340 - DNA, 25 bp, Homo sapien
attccttctaatcctaatccctgga

SEQ ID NO: 5758341 - DNA, 25 bp, Homo sapien
aatctggaatgtctccaagaaaagt

SEQ ID NO: 5758342 - DNA, 25 bp, Homo sapien
caacctctgcctcccgggttcaagt

SEQ ID NO: 5758343 - DNA, 25 bp, Homo sapien
gaccaataaaatgcaggccattatc

SEQ ID NO: 5758344 - DNA, 25 bp, Homo sapien
agcaactcctgtcatcaaaattact

SEQ ID NO: 5758345 - DNA, 25 bp, Homo sapien
aagaaaagtcattttgttctgtcac

SEQ ID NO: 5758346 - DNA, 25 bp, Homo sapien
tttggtagagacggggtttcaccat

SEQ ID NO: 5758347 - DNA, 25 bp, Homo sapien
ccactcatgtgatcagggaagaata

SEQ ID NO: 5758348 - DNA, 25 bp, Homo sapien
aatgtcgagattcctagtgccccat

SEQ ID NO: 5758349 - DNA, 25 bp, Homo sapien
tcgtcgagacgtacgtggccccgta

SEQ ID NO: 5758350 - DNA, 25 bp, Homo sapien
tacggggccacgtacgtctcgacga

SEQ ID NO: 5758351 - DNA, 25 bp, Homo sapien
cccacccttcggtggtccgtgtgag

SEQ ID NO: 5758352 - DNA, 25 bp, Homo sapien
ctcacacggaccaccgaagggtggg

SEQ ID NO: 5758353 - DNA, 25 bp, Homo sapien
atctgtggcccttcatcatgctaag

SEQ ID NO: 5758354 - DNA, 25 bp, Homo sapien
atccggaactttgtgatccaagggg

SEQ ID NO: 5758355 - DNA, 25 bp, Homo sapien
ttgttccatggcttaagaagtacgg

SEQ ID NO: 5758356 - DNA, 25 bp, Homo sapien
cctgggctctagagtgacttttgac

SEQ ID NO: 5758357 - DNA, 25 bp, Homo sapien
cctttggcaaatgaaggtttacatt

SEQ ID NO: 5758358 - DNA, 25 bp, Homo sapien
agggcaggggacaggccaccaagga

SEQ ID NO: 5758359 - DNA, 25 bp, Homo sapien
caaagacgagttccggcccaacctc

SEQ ID NO: 5758360 - DNA, 25 bp, Homo sapien
aggaccaagggctggcggtgtggcc

SEQ ID NO: 5758361 - DNA, 25 bp, Homo sapien
acagatccatccggaactttgtgat

SEQ ID NO: 5758362 - DNA, 25 bp, Homo sapien
aataacatgaaaataatagacccag

SEQ ID NO: 5758363 - DNA, 25 bp, Homo sapien
gaaggccccgtgcttgagctcggca

SEQ ID NO: 5758364 - DNA, 25 bp, Homo sapien
ctgtttaccgtgttcaccaacaaca

SEQ ID NO: 5758365 - DNA, 25 bp, Homo sapien
ggccatctgctcccagggcagggga

SEQ ID NO: 5758366 - DNA, 25 bp, Homo sapien
gccgagacccgagagaccctgcagg

SEQ ID NO: 5758367 - DNA, 25 bp, Homo sapien
gagaccctgcaggagctctacaagg

SEQ ID NO: 5758368 - DNA, 25 bp, Homo sapien
gctcaaggtagccccggagaccaaa

SEQ ID NO: 5758369 - DNA, 25 bp, Homo sapien
atggtcccggagaccacacatgaag

SEQ ID NO: 5758370 - DNA, 25 bp, Homo sapien
gtgccactgtccccatgtccaagaa

SEQ ID NO: 5758371 - DNA, 25 bp, Homo sapien
aaaaacctgcgaaaacttcatcagg

SEQ ID NO: 5758372 - DNA, 25 bp, Homo sapien
gctggcggtgtggccagaggacagg

SEQ ID NO: 5758373 - DNA, 25 bp, Homo sapien
gatggcatcgtctttgacttactga

SEQ ID NO: 5758374 - DNA, 25 bp, Homo sapien
gtaactggcttgtaagaggctcaga

SEQ ID NO: 5758375 - DNA, 25 bp, Homo sapien
tccaagggggcgaccccacaggcac

SEQ ID NO: 5758376 - DNA, 25 bp, Homo sapien
gaagaagaaagtggacaagctgaat

SEQ ID NO: 5758377 - DNA, 25 bp, Homo sapien
gagcggaagacacagctcaaggtag

SEQ ID NO: 5758378 - DNA, 25 bp, Homo sapien
aggcactgtcctccgcaaggcctgg

SEQ ID NO: 5758379 - DNA, 25 bp, Homo sapien
tgggtgaccgtccagcctcacccgg

SEQ ID NO: 5758380 - DNA, 25 bp, Homo sapien
cacagctcaaggtagccccggagac

SEQ ID NO: 5758381 - DNA, 25 bp, Homo sapien
taaggaggagatccgcattgatgcc

SEQ ID NO: 5758382 - DNA, 25 bp, Homo sapien
accctggctggccctgactgactgt

SEQ ID NO: 5758383 - DNA, 25 bp, Homo sapien
gccactgtccccatgtccaagaaga

SEQ ID NO: 5758384 - DNA, 25 bp, Homo sapien
ccagtttgtgaagaagaagggctac

SEQ ID NO: 5758385 - DNA, 25 bp, Homo sapien
ttgacgccctccatccctcccgcca

SEQ ID NO: 5758386 - DNA, 25 bp, Homo sapien
accgcgatggtcccggagaccacac

SEQ ID NO: 5758387 - DNA, 25 bp, Homo sapien
ccatccttggctccagagctcgaag

SEQ ID NO: 5758388 - DNA, 25 bp, Homo sapien
ggacaagctgaatgctgcccactat

SEQ ID NO: 5758389 - DNA, 25 bp, Homo sapien
gcagcaggctgcctgatgaccacta

SEQ ID NO: 5758390 - DNA, 25 bp, Homo sapien
tctacccagtctgcactcccgatgg

SEQ ID NO: 5758391 - DNA, 25 bp, Homo sapien
catcttccacagatccatccggaac

SEQ ID NO: 5758392 - DNA, 25 bp, Homo sapien
cattgttccatggcttaagaagtac

SEQ ID NO: 5758393 - DNA, 25 bp, Homo sapien
taggaccaggccatccttggctcca

SEQ ID NO: 5758394 - DNA, 25 bp, Homo sapien
accactgcagtctctctctgcagcc

SEQ ID NO: 5758395 - DNA, 25 bp, Homo sapien
gacgaccggcaacgtctacgcctat

SEQ ID NO: 5758396 - DNA, 25 bp, Homo sapien
gttttttcgtgctcgctagtcgccg

SEQ ID NO: 5758397 - DNA, 25 bp, Homo sapien
ttgtcagccgttgttttttcgtgct

SEQ ID NO: 5758398 - DNA, 25 bp, Homo sapien
aggaggccgatgcccagattgcgca

SEQ ID NO: 5758399 - DNA, 25 bp, Homo sapien
tgctgcccactattccacagggaag

SEQ ID NO: 5758400 - DNA, 25 bp, Homo sapien
agcttaatttgtagttttttagcta

SEQ ID NO: 5758401 - DNA, 25 bp, Homo sapien
ccctctgcagcctgtcatccctgtc

SEQ ID NO: 5758402 - DNA, 25 bp, Homo sapien
cagcatggccaactccgggcccaac

SEQ ID NO: 5758403 - DNA, 25 bp, Homo sapien
acaaatgccgagacccgagagaccc

SEQ ID NO: 5758404 - DNA, 25 bp, Homo sapien
aggtatgtctgcccctcgtcaccct

SEQ ID NO: 5758405 - DNA, 25 bp, Homo sapien
ctgcacaccaatctgtggcccttca

SEQ ID NO: 5758406 - DNA, 25 bp, Homo sapien
ccagggagtgagaagcaggtttgga

SEQ ID NO: 5758407 - DNA, 25 bp, Homo sapien
caccctccaggaccccaccaatttg

SEQ ID NO: 5758408 - DNA, 25 bp, Homo sapien
tgacttactgaacattgttccatgg

SEQ ID NO: 5758409 - DNA, 25 bp, Homo sapien
agcgcttccttcacctccaccgcga

SEQ ID NO: 5758410 - DNA, 25 bp, Homo sapien
gggctacgtgcggctgcacaccaac

SEQ ID NO: 5758411 - DNA, 25 bp, Homo sapien
tactgacagccatggagaatgtgga

SEQ ID NO: 5758412 - DNA, 25 bp, Homo sapien
tctgtagtttgtttgttttagagct

SEQ ID NO: 5758413 - DNA, 25 bp, Homo sapien
atccctcccgccaggcactgtcctc

SEQ ID NO: 5758414 - DNA, 25 bp, Homo sapien
tcatcaccctccaggaccccaccaa

SEQ ID NO: 5758415 - DNA, 25 bp, Homo sapien
tgtgaagaagaagggctacgtgcgg

SEQ ID NO: 5758416 - DNA, 25 bp, Homo sapien
ctcccgccaggcactgtcctccgca

SEQ ID NO: 5758417 - DNA, 25 bp, Homo sapien
catggcttaagaagtacgggaccaa

SEQ ID NO: 5758418 - DNA, 25 bp, Homo sapien
tggtgcagccctggcagtaactggc

SEQ ID NO: 5758419 - DNA, 25 bp, Homo sapien
cgttgttttttcgtgctcgctagtc

SEQ ID NO: 5758420 - DNA, 25 bp, Homo sapien
ccctgtgcccaccctgacagacacc

SEQ ID NO: 5758421 - DNA, 25 bp, Homo sapien
ctctcgcacacgggccgcggcatcc

SEQ ID NO: 5758422 - DNA, 25 bp, Homo sapien
ctttgtgatccaagggggcgacccc

SEQ ID NO: 5758423 - DNA, 25 bp, Homo sapien
aaaactgaccgccctaaggaggaga

SEQ ID NO: 5758424 - DNA, 25 bp, Homo sapien
atctgctcccagggcaggggacagg

SEQ ID NO: 5758425 - DNA, 25 bp, Homo sapien
cagccttctgcatcaggacatggcc

SEQ ID NO: 5758426 - DNA, 25 bp, Homo sapien
agaagtacgggaccaaccccagcaa

SEQ ID NO: 5758427 - DNA, 25 bp, Homo sapien
agattctggcagccaccatgaaggc

SEQ ID NO: 5758428 - DNA, 25 bp, Homo sapien
tacgtgcggctgcacaccaacaagg

SEQ ID NO: 5758429 - DNA, 25 bp, Homo sapien
tccgggacctgctgaccgacgagcc

SEQ ID NO: 5758430 - DNA, 25 bp, Homo sapien
accccacaggcacaggcacgggtgg

SEQ ID NO: 5758431 - DNA, 25 bp, Homo sapien
acacctgtaggcctctgagccagcg

SEQ ID NO: 5758432 - DNA, 25 bp, Homo sapien
ccacacacctgtaggcctctgagcc

SEQ ID NO: 5758433 - DNA, 25 bp, Homo sapien
acaagaactgcgccatggctggctc

SEQ ID NO: 5758434 - DNA, 25 bp, Homo sapien
catcaacccagcagccaccgagcag

SEQ ID NO: 5758435 - DNA, 25 bp, Homo sapien
ggcgacctcaacctggagctgcact

SEQ ID NO: 5758436 - DNA, 25 bp, Homo sapien
acctggagctgcactgcgacctgac

SEQ ID NO: 5758437 - DNA, 25 bp, Homo sapien
gaaggcctgaccagggagtgagaag

SEQ ID NO: 5758438 - DNA, 25 bp, Homo sapien
agccagatctcccacaaacaaattt

SEQ ID NO: 5758439 - DNA, 25 bp, Homo sapien
tcgctcctgtgcctacctggacaag

SEQ ID NO: 5758440 - DNA, 25 bp, Homo sapien
tggcaaatgaaggtttacatttctg

SEQ ID NO: 5758441 - DNA, 25 bp, Homo sapien
gcaacaggtctcaattcttcatcac

SEQ ID NO: 5758442 - DNA, 25 bp, Homo sapien
ggagctgcactgcgacctgacacca

SEQ ID NO: 5758443 - DNA, 25 bp, Homo sapien
ccagatctcccacaaacaaattttc

SEQ ID NO: 5758444 - DNA, 25 bp, Homo sapien
cagattgcgcaggagcggaagacac

SEQ ID NO: 5758445 - DNA, 25 bp, Homo sapien
ccccaagacagccctctgctctcag

SEQ ID NO: 5758446 - DNA, 25 bp, Homo sapien
cagtgactgcccaggtgtccacaca

SEQ ID NO: 5758447 - DNA, 25 bp, Homo sapien
acctccaccgcgatggtcccggaga

SEQ ID NO: 5758448 - DNA, 25 bp, Homo sapien
agggggcgaccccacaggcacaggc

SEQ ID NO: 5758449 - DNA, 25 bp, Homo sapien
gggcccaacagcaacaggtctcaat

SEQ ID NO: 5758450 - DNA, 25 bp, Homo sapien
ggctggctccttctcttctccagcc

SEQ ID NO: 5758451 - DNA, 25 bp, Homo sapien
atgccgagacccgagagaccctgca

SEQ ID NO: 5758452 - DNA, 25 bp, Homo sapien
catgctaagaacaagaactgcgcca

SEQ ID NO: 5758453 - DNA, 25 bp, Homo sapien
gcctacctggacaagaagcatacca

SEQ ID NO: 5758454 - DNA, 25 bp, Homo sapien
tgagaagcaggtttggagaggaccc

SEQ ID NO: 5758455 - DNA, 25 bp, Homo sapien
ggacttcagctcctggtagcagcag

SEQ ID NO: 5758456 - DNA, 25 bp, Homo sapien
catggcctcgtccactgagggcacg

SEQ ID NO: 5758457 - DNA, 25 bp, Homo sapien
tgtcctccgcaaggcctggtgcagc

SEQ ID NO: 5758458 - DNA, 25 bp, Homo sapien
ctgcaggagctctacaaggagttca

SEQ ID NO: 5758459 - DNA, 25 bp, Homo sapien
agtacatcaacccagcagccaccga

SEQ ID NO: 5758460 - DNA, 25 bp, Homo sapien
atgtggagagtgaccccaaaactga

SEQ ID NO: 5758461 - DNA, 25 bp, Homo sapien
ccctccatccctcccgccaggcact

SEQ ID NO: 5758462 - DNA, 25 bp, Homo sapien
cgtccagcctcacccggtggcctgc

SEQ ID NO: 5758463 - DNA, 25 bp, Homo sapien
gtgaggggaagtaccactgcccagt

SEQ ID NO: 5758464 - DNA, 25 bp, Homo sapien
cccaccaatttggacaagttcaatg

SEQ ID NO: 5758465 - DNA, 25 bp, Homo sapien
cgggccgcggcatcctcagcatggc

SEQ ID NO: 5758466 - DNA, 25 bp, Homo sapien
tctcaattcttcatcacgtttcgct

SEQ ID NO: 5758467 - DNA, 25 bp, Homo sapien
gaggagatccgcattgatgccacta

SEQ ID NO: 5758468 - DNA, 25 bp, Homo sapien
ccaatttggacaagttcaatgtctc

SEQ ID NO: 5758469 - DNA, 25 bp, Homo sapien
caatggagagaagctggacgggagg

SEQ ID NO: 5758470 - DNA, 25 bp, Homo sapien
gacctttggcaaatgaaggtttaca

SEQ ID NO: 5758471 - DNA, 25 bp, Homo sapien
aggacaaaatgtacattacctgtgc

SEQ ID NO: 5758472 - DNA, 25 bp, Homo sapien
ctccatggtctgagttgtcagccgt

SEQ ID NO: 5758473 - DNA, 25 bp, Homo sapien
cgagattctggcagccaccatgaag

SEQ ID NO: 5758474 - DNA, 25 bp, Homo sapien
aaccccagcaatggagagaagctgg

SEQ ID NO: 5758475 - DNA, 25 bp, Homo sapien
cccggagaagaagaaagtggacaag

SEQ ID NO: 5758476 - DNA, 25 bp, Homo sapien
tttttcgtgctcgctagtcgccgcc

SEQ ID NO: 5758477 - DNA, 25 bp, Homo sapien
ccggaactttgtgatccaagggggc

SEQ ID NO: 5758478 - DNA, 25 bp, Homo sapien
gcactcccgatggcatcgtctttga

SEQ ID NO: 5758479 - DNA, 25 bp, Homo sapien
caggacccgtcttattatctgaaaa

SEQ ID NO: 5758480 - DNA, 25 bp, Homo sapien
accctgacagacaccctggctggcc

SEQ ID NO: 5758481 - DNA, 25 bp, Homo sapien
aaaggacaaaatgtacattacctgt

SEQ ID NO: 5758482 - DNA, 25 bp, Homo sapien
ctcccagggcaggggacaggccacc

SEQ ID NO: 5758483 - DNA, 25 bp, Homo sapien
tcccggagaccacacatgaagcagc

SEQ ID NO: 5758484 - DNA, 25 bp, Homo sapien
agaccacacatgaagcagctgccat

SEQ ID NO: 5758485 - DNA, 25 bp, Homo sapien
agagtgacttttgacgccctccatc

SEQ ID NO: 5758486 - DNA, 25 bp, Homo sapien
tttgtctacccagtctgcactcccg

SEQ ID NO: 5758487 - DNA, 25 bp, Homo sapien
ttatggtggcaagaagccagatctc

SEQ ID NO: 5758488 - DNA, 25 bp, Homo sapien
accaggccatccttggctccagagc

SEQ ID NO: 5758489 - DNA, 25 bp, Homo sapien
cccctatgaggaggccgatgcccag

SEQ ID NO: 5758490 - DNA, 25 bp, Homo sapien
ccaggcactgtcctccgcaaggcct

SEQ ID NO: 5758491 - DNA, 25 bp, Homo sapien
ggacccgtcttattatctgaaaaat

SEQ ID NO: 5758492 - DNA, 25 bp, Homo sapien
gtaggacacagtgactgcccaggtg

SEQ ID NO: 5758493 - DNA, 25 bp, Homo sapien
cccggtggcctgcacagtgagggaa

SEQ ID NO: 5758494 - DNA, 25 bp, Homo sapien
ttcttcatcacgtttcgctcctgtg

SEQ ID NO: 5758495 - DNA, 25 bp, Homo sapien
cacagtaggacacagtgactgccca

SEQ ID NO: 5758496 - DNA, 25 bp, Homo sapien
ttgacgtactgacagccatggagaa

SEQ ID NO: 5758497 - DNA, 25 bp, Homo sapien
ggtctgagttgtcagccgttgtttt

SEQ ID NO: 5758498 - DNA, 25 bp, Homo sapien
gtggggatgaaggcctgaccaggga

SEQ ID NO: 5758499 - DNA, 25 bp, Homo sapien
cctgggctcagccttctgcatcagg

SEQ ID NO: 5758500 - DNA, 25 bp, Homo sapien
gccctctgctctcagcggcgccaca

SEQ ID NO: 5758501 - DNA, 25 bp, Homo sapien
aggagttcaaaggggacgagattct

SEQ ID NO: 5758502 - DNA, 25 bp, Homo sapien
ccaaccccagcaatggagagaagct

SEQ ID NO: 5758503 - DNA, 25 bp, Homo sapien
cctgtgctgaatacactcactttta

SEQ ID NO: 5758504 - DNA, 25 bp, Homo sapien
tacgcctatgaggcagtggaacagc

SEQ ID NO: 5758505 - DNA, 25 bp, Homo sapien
aggtgtccacacacctgtaggcctc

SEQ ID NO: 5758506 - DNA, 25 bp, Homo sapien
ccgcggcatcctcagcatggccaac

SEQ ID NO: 5758507 - DNA, 25 bp, Homo sapien
ggggaagcgacagcaccaaaaggac

SEQ ID NO: 5758508 - DNA, 25 bp, Homo sapien
tttgacatcagaagctttatttgta

SEQ ID NO: 5758509 - DNA, 25 bp, Homo sapien
gccagcgtccagggtacaggtgcgg

SEQ ID NO: 5758510 - DNA, 25 bp, Homo sapien
tccgccagggcgtgggcaagtacat

SEQ ID NO: 5758511 - DNA, 25 bp, Homo sapien
aggacatcatcaccctccaggaccc

SEQ ID NO: 5758512 - DNA, 25 bp, Homo sapien
gaacagctaaatatcaaggccaaga

SEQ ID NO: 5758513 - DNA, 25 bp, Homo sapien
ttcgtggacccctatgaggaggccg

SEQ ID NO: 5758514 - DNA, 25 bp, Homo sapien
cagcaacaggtctcaattcttcatc

SEQ ID NO: 5758515 - DNA, 25 bp, Homo sapien
atcagaagctttatttgtaaacctc

SEQ ID NO: 5758516 - DNA, 25 bp, Homo sapien
cccagggcaggggacaggccaccaa

SEQ ID NO: 5758517 - DNA, 25 bp, Homo sapien
ttccggcccaacctctcgcacacgg

SEQ ID NO: 5758518 - DNA, 25 bp, Homo sapien
gagaatgtggagagtgaccccaaaa

SEQ ID NO: 5758519 - DNA, 25 bp, Homo sapien
ccagtgctgtttaccgtgttcacca

SEQ ID NO: 5758520 - DNA, 25 bp, Homo sapien
gcaggtttggagaggaccctgtgcc

SEQ ID NO: 5758521 - DNA, 25 bp, Homo sapien
tcaacccagcagccaccgagcagca

SEQ ID NO: 5758522 - DNA, 25 bp, Homo sapien
ttcagctcctggtagcagcaggctg

SEQ ID NO: 5758523 - DNA, 25 bp, Homo sapien
tggtggggatgaaggcctgaccagg

SEQ ID NO: 5758524 - DNA, 25 bp, Homo sapien
aggctttgcaagaagcattattacg

SEQ ID NO: 5758525 - DNA, 25 bp, Homo sapien
accatcttccacagatccatccgga

SEQ ID NO: 5758526 - DNA, 25 bp, Homo sapien
gcatcgtctttgacttactgaacat

SEQ ID NO: 5758527 - DNA, 25 bp, Homo sapien
ccgtcttattatctgaaaaatacaa

SEQ ID NO: 5758528 - DNA, 25 bp, Homo sapien
gattgcgcaggagcggaagacacag

SEQ ID NO: 5758529 - DNA, 25 bp, Homo sapien
tgaagagcagccagccccaggcagg

SEQ ID NO: 5758530 - DNA, 25 bp, Homo sapien
accaaaaggacaaaatgtacattac

SEQ ID NO: 5758531 - DNA, 25 bp, Homo sapien
gctacgtgcggctgcacaccaacaa

SEQ ID NO: 5758532 - DNA, 25 bp, Homo sapien
tttggacaagttcaatgtctctaac

SEQ ID NO: 5758533 - DNA, 25 bp, Homo sapien
tttctgtagtttgtttgttttagag

SEQ ID NO: 5758534 - DNA, 25 bp, Homo sapien
ccactattccacagggaaggtcagc

SEQ ID NO: 5758535 - DNA, 25 bp, Homo sapien
caagttcaatgtctctaacttctat

SEQ ID NO: 5758536 - DNA, 25 bp, Homo sapien
agcaatggagagaagctggacggga

SEQ ID NO: 5758537 - DNA, 25 bp, Homo sapien
agttcaatgtctctaacttctatca

SEQ ID NO: 5758538 - DNA, 25 bp, Homo sapien
ccccagaccttccgccagggcgtgg

SEQ ID NO: 5758539 - DNA, 25 bp, Homo sapien
gcggctccatggtctgagttgtcag

SEQ ID NO: 5758540 - DNA, 25 bp, Homo sapien
tgcatcaggacatggcctcgtccac

SEQ ID NO: 5758541 - DNA, 25 bp, Homo sapien
gtccctgatcaagctgaacttttcc

SEQ ID NO: 5758542 - DNA, 25 bp, Homo sapien
gaagggcttcagggccatctgctcc

SEQ ID NO: 5758543 - DNA, 25 bp, Homo sapien
cttgagctcggcagtcctgctcctt

SEQ ID NO: 5758544 - DNA, 25 bp, Homo sapien
tgttttagagcttaatttgtagttt

SEQ ID NO: 5758545 - DNA, 25 bp, Homo sapien
caaaatgtacattacctgtgctgaa

SEQ ID NO: 5758546 - DNA, 25 bp, Homo sapien
tcctcagcatggccaactccgggcc

SEQ ID NO: 5758547 - DNA, 25 bp, Homo sapien
cagtctgcactcccgatggcatcgt

SEQ ID NO: 5758548 - DNA, 25 bp, Homo sapien
ggcagagaagtaggaccaggccatc

SEQ ID NO: 5758549 - DNA, 25 bp, Homo sapien
gacccctatgaggaggccgatgccc

SEQ ID NO: 5758550 - DNA, 25 bp, Homo sapien
ctcaacctggagctgcactgcgacc

SEQ ID NO: 5758551 - DNA, 25 bp, Homo sapien
cagaagctttatttgtaaacctcac

SEQ ID NO: 5758552 - DNA, 25 bp, Homo sapien
aagaagccagatctcccacaaacaa

SEQ ID NO: 5758553 - DNA, 25 bp, Homo sapien
cttgcagtgaagccaccatgggtga

SEQ ID NO: 5758554 - DNA, 25 bp, Homo sapien
gcaggacatcatcaccctccaggac

SEQ ID NO: 5758555 - DNA, 25 bp, Homo sapien
gcaggagcggaagacacagctcaag

SEQ ID NO: 5758556 - DNA, 25 bp, Homo sapien
aagcattattacgatggcaccatct

SEQ ID NO: 5758557 - DNA, 25 bp, Homo sapien
agtcctgctccttgcagtgaagcca

SEQ ID NO: 5758558 - DNA, 25 bp, Homo sapien
acctgctgaccgacgagcccttctc

SEQ ID NO: 5758559 - DNA, 25 bp, Homo sapien
aggcctctgagccagcgtccagggt

SEQ ID NO: 5758560 - DNA, 25 bp, Homo sapien
gaagccaccatgggtgaccgtccag

SEQ ID NO: 5758561 - DNA, 25 bp, Homo sapien
gaaggccaaacaggacccgtcttat

SEQ ID NO: 5758562 - DNA, 25 bp, Homo sapien
accaagctgggcctgcagaggaggg

SEQ ID NO: 5758563 - DNA, 25 bp, Homo sapien
agagccctcaaccagtgccactgtc

SEQ ID NO: 5758564 - DNA, 25 bp, Homo sapien
ccaccctgacagacaccctggctgg

SEQ ID NO: 5758565 - DNA, 25 bp, Homo sapien
ggagagaagctggacgggaggtccc

SEQ ID NO: 5758566 - DNA, 25 bp, Homo sapien
cacacagataaggaccaagggctgg

SEQ ID NO: 5758567 - DNA, 25 bp, Homo sapien
caagaagcattattacgatggcacc

SEQ ID NO: 5758568 - DNA, 25 bp, Homo sapien
accttccgccagggcgtgggcaagt

SEQ ID NO: 5758569 - DNA, 25 bp, Homo sapien
cctctgctctcagcggcgccacaga

SEQ ID NO: 5758570 - DNA, 25 bp, Homo sapien
tcttccacagatccatccggaactt

SEQ ID NO: 5758571 - DNA, 25 bp, Homo sapien
ttactgaacattgttccatggctta

SEQ ID NO: 5758572 - DNA, 25 bp, Homo sapien
aggtccctgatcaagctgaactttt

SEQ ID NO: 5758573 - DNA, 25 bp, Homo sapien
cacccggtggcctgcacagtgaggg

SEQ ID NO: 5758574 - DNA, 25 bp, Homo sapien
agtgctgtttaccgtgttcaccaac

SEQ ID NO: 5758575 - DNA, 25 bp, Homo sapien
ccaggtgtccacacacctgtaggcc

SEQ ID NO: 5758576 - DNA, 25 bp, Homo sapien
gcagaggaggggcacagtaggacac

SEQ ID NO: 5758577 - DNA, 25 bp, Homo sapien
tcgtgctcgctagtcgccgccgccg

SEQ ID NO: 5758578 - DNA, 25 bp, Homo sapien
ttagagcttaatttgtagtttttta

SEQ ID NO: 5758579 - DNA, 25 bp, Homo sapien
gcaggagctctacaaggagttcaaa

SEQ ID NO: 5758580 - DNA, 25 bp, Homo sapien
cgccatggctggctccttctcttct

SEQ ID NO: 5758581 - DNA, 25 bp, Homo sapien
cgacctgacaccaaaaacctgcgaa

SEQ ID NO: 5758582 - DNA, 25 bp, Homo sapien
cagtgaagccaccatgggtgaccgt

SEQ ID NO: 5758583 - DNA, 25 bp, Homo sapien
cagctcaaggtagccccggagacca

SEQ ID NO: 5758584 - DNA, 25 bp, Homo sapien
ttccacagggaaggtcagcgcttcc

SEQ ID NO: 5758585 - DNA, 25 bp, Homo sapien
gaatgtggagagtgaccccaaaact

SEQ ID NO: 5758586 - DNA, 25 bp, Homo sapien
tggacccctatgaggaggccgatgc

SEQ ID NO: 5758587 - DNA, 25 bp, Homo sapien
cttttgaccactgcagtctctctct

SEQ ID NO: 5758588 - DNA, 25 bp, Homo sapien
tgggctctagagtgacttttgacgc

SEQ ID NO: 5758589 - DNA, 25 bp, Homo sapien
taagaggctcagacaccaagctggg

SEQ ID NO: 5758590 - DNA, 25 bp, Homo sapien
atgaaggtttacatttctgtagttt

SEQ ID NO: 5758591 - DNA, 25 bp, Homo sapien
acagagagcctgggctcagccttct

SEQ ID NO: 5758592 - DNA, 25 bp, Homo sapien
gcacgatttaaacatttgacatcag

SEQ ID NO: 5758593 - DNA, 25 bp, Homo sapien
gcccttctcccggcaggacatcatc

SEQ ID NO: 5758594 - DNA, 25 bp, Homo sapien
tctacgcctatgaggcagtggaaca

SEQ ID NO: 5758595 - DNA, 25 bp, Homo sapien
aaacctcacacagataaggaccaag

SEQ ID NO: 5758596 - DNA, 25 bp, Homo sapien
tgaagagaaggccaaacaggacccg

SEQ ID NO: 5758597 - DNA, 25 bp, Homo sapien
ctctcagcggcgccacagagagcct

SEQ ID NO: 5758598 - DNA, 25 bp, Homo sapien
ctagaggtatgtctgcccctcgtca

SEQ ID NO: 5758599 - DNA, 25 bp, Homo sapien
ccgcattgatgccactacagtgttc

SEQ ID NO: 5758600 - DNA, 25 bp, Homo sapien
ggaagcccttcaaagacgagttccg

SEQ ID NO: 5758601 - DNA, 25 bp, Homo sapien
agaagaaagtggacaagctgaatgc

SEQ ID NO: 5758602 - DNA, 25 bp, Homo sapien
ggcgaccccacaggcacaggcacgg

SEQ ID NO: 5758603 - DNA, 25 bp, Homo sapien
ctacagtgttcgtggacccctatga

SEQ ID NO: 5758604 - DNA, 25 bp, Homo sapien
cttcatcacgtttcgctcctgtgcc

SEQ ID NO: 5758605 - DNA, 25 bp, Homo sapien
atccctctgcagcctgtcatccctg

SEQ ID NO: 5758606 - DNA, 25 bp, Homo sapien
acgatttaaacatttgacatcagaa

SEQ ID NO: 5758607 - DNA, 25 bp, Homo sapien
ggttttggggacttcagctcctggt

SEQ ID NO: 5758608 - DNA, 25 bp, Homo sapien
gacgagattctggcagccaccatga

SEQ ID NO: 5758609 - DNA, 25 bp, Homo sapien
cgggacctgctgaccgacgagccct

SEQ ID NO: 5758610 - DNA, 25 bp, Homo sapien
ctgcagtctctctctgcagcccttt

SEQ ID NO: 5758611 - DNA, 25 bp, Homo sapien
cagtgagggaagggcttcagggcca

SEQ ID NO: 5758612 - DNA, 25 bp, Homo sapien
cgccgccgccgctccgccatgggga

SEQ ID NO: 5758613 - DNA, 25 bp, Homo sapien
acattacctgtgctgaatacactca

SEQ ID NO: 5758614 - DNA, 25 bp, Homo sapien
gctcagacaccaagctgggcctgca

SEQ ID NO: 5758615 - DNA, 25 bp, Homo sapien
ccctgatcaagctgaacttttccaa

SEQ ID NO: 5758616 - DNA, 25 bp, Homo sapien
gtaggcctctgagccagcgtccagg

SEQ ID NO: 5758617 - DNA, 25 bp, Homo sapien
aagacacagctcaaggtagccccgg

SEQ ID NO: 5758618 - DNA, 25 bp, Homo sapien
tgcaagaagcattattacgatggca

SEQ ID NO: 5758619 - DNA, 25 bp, Homo sapien
atgccactacagtgttcgtggaccc

SEQ ID NO: 5758620 - DNA, 25 bp, Homo sapien
agaagggctacgtgcggctgcacac

SEQ ID NO: 5758621 - DNA, 25 bp, Homo sapien
tctggcagccaccatgaaggccccg

SEQ ID NO: 5758622 - DNA, 25 bp, Homo sapien
acatcagaagctttatttgtaaacc

SEQ ID NO: 5758623 - DNA, 25 bp, Homo sapien
ccttggctccagagctcgaagaccc

SEQ ID NO: 5758624 - DNA, 25 bp, Homo sapien
tggcagccaccatgaaggccccgga

SEQ ID NO: 5758625 - DNA, 25 bp, Homo sapien
ctcagccttctgcatcaggacatgg

SEQ ID NO: 5758626 - DNA, 25 bp, Homo sapien
tctacaaggagttcaaaggggacga

SEQ ID NO: 5758627 - DNA, 25 bp, Homo sapien
gctccttgcagtgaagccaccatgg

SEQ ID NO: 5758628 - DNA, 25 bp, Homo sapien
ccatggtctgagttgtcagccgttg

SEQ ID NO: 5758629 - DNA, 25 bp, Homo sapien
aagagcagccagccccaggcaggga

SEQ ID NO: 5758630 - DNA, 25 bp, Homo sapien
caacacccacatcgtggctgtgagg

SEQ ID NO: 5758631 - DNA, 25 bp, Homo sapien
aagcaggtttggagaggaccctgtg

SEQ ID NO: 5758632 - DNA, 25 bp, Homo sapien
tcccgatggcatcgtctttgactta

SEQ ID NO: 5758633 - DNA, 25 bp, Homo sapien
tttcgtgctcgctagtcgccgccgc

SEQ ID NO: 5758634 - DNA, 25 bp, Homo sapien
ctttatttgtaaacctcacacagat

SEQ ID NO: 5758635 - DNA, 25 bp, Homo sapien
tcaggctttgcaagaagcattatta

SEQ ID NO: 5758636 - DNA, 25 bp, Homo sapien
aggcagggagccagggcccccagac

SEQ ID NO: 5758637 - DNA, 25 bp, Homo sapien
caacctctcgcacacgggccgcggc

SEQ ID NO: 5758638 - DNA, 25 bp, Homo sapien
tgaatgctgcccactattccacagg

SEQ ID NO: 5758639 - DNA, 25 bp, Homo sapien
agctgcactgcgacctgacaccaaa

SEQ ID NO: 5758640 - DNA, 25 bp, Homo sapien
ggaccccaccaatttggacaagttc

SEQ ID NO: 5758641 - DNA, 25 bp, Homo sapien
gccccggagaagaagaaagtggaca

SEQ ID NO: 5758642 - DNA, 25 bp, Homo sapien
tctccagcccatccctctgcagcct

SEQ ID NO: 5758643 - DNA, 25 bp, Homo sapien
atggccaactccgggcccaacagca

SEQ ID NO: 5758644 - DNA, 25 bp, Homo sapien
cgacctcaacctggagctgcactgc

SEQ ID NO: 5758645 - DNA, 25 bp, Homo sapien
ccgatggcatcgtctttgacttact

SEQ ID NO: 5758646 - DNA, 25 bp, Homo sapien
gacccagatgaagagaaggccaaac

SEQ ID NO: 5758647 - DNA, 25 bp, Homo sapien
cagcagaggaagagccctcaaccag

SEQ ID NO: 5758648 - DNA, 25 bp, Homo sapien
gctgggcctgcagaggaggggcaca

SEQ ID NO: 5758649 - DNA, 25 bp, Homo sapien
cctttgtctacccagtctgcactcc

SEQ ID NO: 5758650 - DNA, 25 bp, Homo sapien
cgcttccttcacctccaccgcgatg

SEQ ID NO: 5758651 - DNA, 25 bp, Homo sapien
acccacatcgtggctgtgaggacga

SEQ ID NO: 5758652 - DNA, 25 bp, Homo sapien
tttggcaaatgaaggtttacatttc

SEQ ID NO: 5758653 - DNA, 25 bp, Homo sapien
gacgccctccatccctcccgccagg

SEQ ID NO: 5758654 - DNA, 25 bp, Homo sapien
gaactgcgccatggctggctccttc

SEQ ID NO: 5758655 - DNA, 25 bp, Homo sapien
cccgccaggcactgtcctccgcaag

SEQ ID NO: 5758656 - DNA, 25 bp, Homo sapien
caagggcgacctcaacctggagctg

SEQ ID NO: 5758657 - DNA, 25 bp, Homo sapien
aggacatggcctcgtccactgaggg

SEQ ID NO: 5758658 - DNA, 25 bp, Homo sapien
accccaccaatttggacaagttcaa

SEQ ID NO: 5758659 - DNA, 25 bp, Homo sapien
cccggagaccaaagtgaagagcagc

SEQ ID NO: 5758660 - DNA, 25 bp, Homo sapien
tgtgctgcgctaccagtttgtgaag

SEQ ID NO: 5758661 - DNA, 25 bp, Homo sapien
gctgaatgctgcccactattccaca

SEQ ID NO: 5758662 - DNA, 25 bp, Homo sapien
cagctcctggtagcagcaggctgcc

SEQ ID NO: 5758663 - DNA, 25 bp, Homo sapien
gtcatactgggggaagcccttcaaa

SEQ ID NO: 5758664 - DNA, 25 bp, Homo sapien
gcagtctctctctgcagccctttgt

SEQ ID NO: 5758665 - DNA, 25 bp, Homo sapien
tgaacattgttccatggcttaagaa

SEQ ID NO: 5758666 - DNA, 25 bp, Homo sapien
ttaccgtgttcaccaacaacaccca

SEQ ID NO: 5758667 - DNA, 25 bp, Homo sapien
gtccaagaagaagcccagtcggggt

SEQ ID NO: 5758668 - DNA, 25 bp, Homo sapien
actgcgacctgacaccaaaaacctg

SEQ ID NO: 5758669 - DNA, 25 bp, Homo sapien
ggggcacagtaggacacagtgactg

SEQ ID NO: 5758670 - DNA, 25 bp, Homo sapien
acaggggaagctgaaggccccgtgc

SEQ ID NO: 5758671 - DNA, 25 bp, Homo sapien
ctgcccctcgtcaccctgctgcaca

SEQ ID NO: 5758672 - DNA, 25 bp, Homo sapien
gtaccactgcccagtgctgtttacc

SEQ ID NO: 5758673 - DNA, 25 bp, Homo sapien
ggcttcagggccatctgctcccagg

SEQ ID NO: 5758674 - DNA, 25 bp, Homo sapien
tgactgactgtattctctggccaca

SEQ ID NO: 5758675 - DNA, 25 bp, Homo sapien
cgtccactgagggcacgatttaaac

SEQ ID NO: 5758676 - DNA, 25 bp, Homo sapien
attacctgtgctgaatacactcact

SEQ ID NO: 5758677 - DNA, 25 bp, Homo sapien
ggtggtggggatgaaggcctgacca

SEQ ID NO: 5758678 - DNA, 25 bp, Homo sapien
taacatgaaaataatagacccagat

SEQ ID NO: 5758679 - DNA, 25 bp, Homo sapien
gaccaagggctggcggtgtggccag

SEQ ID NO: 5758680 - DNA, 25 bp, Homo sapien
ccgccgccgctccgccatggggaag

SEQ ID NO: 5758681 - DNA, 25 bp, Homo sapien
cagtgaggggaagtaccactgccca

SEQ ID NO: 5758682 - DNA, 25 bp, Homo sapien
ccatctgctcccagggcaggggaca

SEQ ID NO: 5758683 - DNA, 25 bp, Homo sapien
ttggagaggaccctgtgcccaccct

SEQ ID NO: 5758684 - DNA, 25 bp, Homo sapien
ctgtaggcctctgagccagcgtcca

SEQ ID NO: 5758685 - DNA, 25 bp, Homo sapien
atggctggctccttctcttctccag

SEQ ID NO: 5758686 - DNA, 25 bp, Homo sapien
ggaccaggccatccttggctccaga

SEQ ID NO: 5758687 - DNA, 25 bp, Homo sapien
atacactcacttttatggtggcaag

SEQ ID NO: 5758688 - DNA, 25 bp, Homo sapien
gaccaaagtgaagagcagccagccc

SEQ ID NO: 5758689 - DNA, 25 bp, Homo sapien
atgtctctaacttctatcatgtgaa

SEQ ID NO: 5758690 - DNA, 25 bp, Homo sapien
tgtagtttgtttgttttagagctta

SEQ ID NO: 5758691 - DNA, 25 bp, Homo sapien
attgatgccactacagtgttcgtgg

SEQ ID NO: 5758692 - DNA, 25 bp, Homo sapien
tgcacaccaacaagggcgacctcaa

SEQ ID NO: 5758693 - DNA, 25 bp, Homo sapien
ggcgccacagagagcctgggctcag

SEQ ID NO: 5758694 - DNA, 25 bp, Homo sapien
gggaagggcttcagggccatctgct

SEQ ID NO: 5758695 - DNA, 25 bp, Homo sapien
aaatacaaatgccgagacccgagag

SEQ ID NO: 5758696 - DNA, 25 bp, Homo sapien
tatgaggcagtggaacagctaaata

SEQ ID NO: 5758697 - DNA, 25 bp, Homo sapien
cgaagaccccaagacagccctctgc

SEQ ID NO: 5758698 - DNA, 25 bp, Homo sapien
tcctgtgcctacctggacaagaagc

SEQ ID NO: 5758699 - DNA, 25 bp, Homo sapien
tctctgcagccctttgtctacccag

SEQ ID NO: 5758700 - DNA, 25 bp, Homo sapien
cgtcaccctgctgcacaccaatctg

SEQ ID NO: 5758701 - DNA, 25 bp, Homo sapien
ttgttgggggctttgacgtactgac

SEQ ID NO: 5758702 - DNA, 25 bp, Homo sapien
acattcaagtcccccattggtgggg

SEQ ID NO: 5758703 - DNA, 25 bp, Homo sapien
cccgtgcttgagctcggcagtcctg

SEQ ID NO: 5758704 - DNA, 25 bp, Homo sapien
caccaatttggacaagttcaatgtc

SEQ ID NO: 5758705 - DNA, 25 bp, Homo sapien
ggctccttctcttctccagcccatc

SEQ ID NO: 5758706 - DNA, 25 bp, Homo sapien
cacgtttcgctcctgtgcctacctg

SEQ ID NO: 5758707 - DNA, 25 bp, Homo sapien
agtggaacagctaaatatcaaggcc

SEQ ID NO: 5758708 - DNA, 25 bp, Homo sapien
ggaagcgacagcaccaaaaggacaa

SEQ ID NO: 5758709 - DNA, 25 bp, Homo sapien
tttgacttactgaacattgttccat

SEQ ID NO: 5758710 - DNA, 25 bp, Homo sapien
tccatggcttaagaagtacgggacc

SEQ ID NO: 5758711 - DNA, 25 bp, Homo sapien
aggaggagatccgcattgatgccac

SEQ ID NO: 5758712 - DNA, 25 bp, Homo sapien
atccctgtctgtgaccattggtcgg

SEQ ID NO: 5758713 - DNA, 25 bp, Homo sapien
gaagaagggctacgtgcggctgcac

SEQ ID NO: 5758714 - DNA, 25 bp, Homo sapien
tacaggtgcgggtggtggggatgaa

SEQ ID NO: 5758715 - DNA, 25 bp, Homo sapien
ctctggccacattcaagtcccccat

SEQ ID NO: 5758716 - DNA, 25 bp, Homo sapien
ggtcccggagaccacacatgaagca

SEQ ID NO: 5758717 - DNA, 25 bp, Homo sapien
tccagcccatccctctgcagcctgt

SEQ ID NO: 5758718 - DNA, 25 bp, Homo sapien
cttccgccagggcgtgggcaagtac

SEQ ID NO: 5758719 - DNA, 25 bp, Homo sapien
tgactgtattctctggccacattca

SEQ ID NO: 5758720 - DNA, 25 bp, Homo sapien
tgctctcagcggcgccacagagagc

SEQ ID NO: 5758721 - DNA, 25 bp, Homo sapien
gacaagttcaatgtctctaacttct

SEQ ID NO: 5758722 - DNA, 25 bp, Homo sapien
atacaaatgccgagacccgagagac

SEQ ID NO: 5758723 - DNA, 25 bp, Homo sapien
agaggaccctgtgcccaccctgaca

SEQ ID NO: 5758724 - DNA, 25 bp, Homo sapien
ctgcactcccgatggcatcgtcttt

SEQ ID NO: 5758725 - DNA, 25 bp, Homo sapien
accgacgagcccttctcccggcagg

SEQ ID NO: 5758726 - DNA, 25 bp, Homo sapien
gttccatggcttaagaagtacggga

SEQ ID NO: 5758727 - DNA, 25 bp, Homo sapien
gctcctggtagcagcaggctgcctg

SEQ ID NO: 5758728 - DNA, 25 bp, Homo sapien
aagggctggcggtgtggccagagga

SEQ ID NO: 5758729 - DNA, 25 bp, Homo sapien
gcccaccctgacagacaccctggct

SEQ ID NO: 5758730 - DNA, 25 bp, Homo sapien
ccaagacagccctctgctctcagcg

SEQ ID NO: 5758731 - DNA, 25 bp, Homo sapien
tcaggacatggcctcgtccactgag

SEQ ID NO: 5758732 - DNA, 25 bp, Homo sapien
ctgcccactattccacagggaaggt

SEQ ID NO: 5758733 - DNA, 25 bp, Homo sapien
tttgtgaagaagaagggctacgtgc

SEQ ID NO: 5758734 - DNA, 25 bp, Homo sapien
gcagctgccatcgacgaggatgtgc

SEQ ID NO: 5758735 - DNA, 25 bp, Homo sapien
gctgaccgacgagcccttctcccgg

SEQ ID NO: 5758736 - DNA, 25 bp, Homo sapien
agggcttcagggccatctgctccca

SEQ ID NO: 5758737 - DNA, 25 bp, Homo sapien
cctgcacagtgagggaagggcttca

SEQ ID NO: 5758738 - DNA, 25 bp, Homo sapien
cagccctctgctctcagcggcgcca

SEQ ID NO: 5758739 - DNA, 25 bp, Homo sapien
gaccccaagacagccctctgctctc

SEQ ID NO: 5758740 - DNA, 25 bp, Homo sapien
ctaacttctatcatgtgaagaataa

SEQ ID NO: 5758741 - DNA, 25 bp, Homo sapien
acagctaaatatcaaggccaagaac

SEQ ID NO: 5758742 - DNA, 25 bp, Homo sapien
cccaacctctcgcacacgggccgcg

SEQ ID NO: 5758743 - DNA, 25 bp, Homo sapien
attattacgatggcaccatcttcca

SEQ ID NO: 5758744 - DNA, 25 bp, Homo sapien
gagcagccagccccaggcagggagc

SEQ ID NO: 5758745 - DNA, 25 bp, Homo sapien
ctcgaagaccccaagacagccctct

SEQ ID NO: 5758746 - DNA, 25 bp, Homo sapien
acaccaatctgtggcccttcatcat

SEQ ID NO: 5758747 - DNA, 25 bp, Homo sapien
ggcttgtaagaggctcagacaccaa

SEQ ID NO: 5758748 - DNA, 25 bp, Homo sapien
tctgcagccctttgtctacccagtc

SEQ ID NO: 5758749 - DNA, 25 bp, Homo sapien
acaggcacgggtggggagtcatact

SEQ ID NO: 5758750 - DNA, 25 bp, Homo sapien
tggctggccctgactgactgtattc

SEQ ID NO: 5758751 - DNA, 25 bp, Homo sapien
acaagctgaatgctgcccactattc

SEQ ID NO: 5758752 - DNA, 25 bp, Homo sapien
cttcacctccaccgcgatggtcccg

SEQ ID NO: 5758753 - DNA, 25 bp, Homo sapien
tcagggccatctgctcccagggcag

SEQ ID NO: 5758754 - DNA, 25 bp, Homo sapien
tctgagttgtcagccgttgtttttt

SEQ ID NO: 5758755 - DNA, 25 bp, Homo sapien
ctaagaacaagaactgcgccatggc

SEQ ID NO: 5758756 - DNA, 25 bp, Homo sapien
accgtgttcaccaacaacacccaca

SEQ ID NO: 5758757 - DNA, 25 bp, Homo sapien
tgaccactagaggtatgtctgcccc

SEQ ID NO: 5758758 - DNA, 25 bp, Homo sapien
gcccatccctctgcagcctgtcatc

SEQ ID NO: 5758759 - DNA, 25 bp, Homo sapien
gagagaccctgcaggagctctacaa

SEQ ID NO: 5758760 - DNA, 25 bp, Homo sapien
tcctccgcaaggcctggtgcagccc

SEQ ID NO: 5758761 - DNA, 25 bp, Homo sapien
aactggcttgtaagaggctcagaca

SEQ ID NO: 5758762 - DNA, 25 bp, Homo sapien
ccaacaacacccacatcgtggctgt

SEQ ID NO: 5758763 - DNA, 25 bp, Homo sapien
gcattgatgccactacagtgttcgt

SEQ ID NO: 5758764 - DNA, 25 bp, Homo sapien
cgccacagagagcctgggctcagcc

SEQ ID NO: 5758765 - DNA, 25 bp, Homo sapien
atgtccaagaagaagcccagtcggg

SEQ ID NO: 5758766 - DNA, 25 bp, Homo sapien
gcagccaccgagcagcagaggaaga

SEQ ID NO: 5758767 - DNA, 25 bp, Homo sapien
ctgaaggccccgtgcttgagctcgg

SEQ ID NO: 5758768 - DNA, 25 bp, Homo sapien
gcagggagccagggcccccagacct

SEQ ID NO: 5758769 - DNA, 25 bp, Homo sapien
gcagccctggcagtaactggcttgt

SEQ ID NO: 5758770 - DNA, 25 bp, Homo sapien
acgatggcaccatcttccacagatc

SEQ ID NO: 5758771 - DNA, 25 bp, Homo sapien
acttttgacgccctccatccctccc

SEQ ID NO: 5758772 - DNA, 25 bp, Homo sapien
gtgagggaagggcttcagggccatc

SEQ ID NO: 5758773 - DNA, 25 bp, Homo sapien
caccaaggacctttggcaaatgaag

SEQ ID NO: 5758774 - DNA, 25 bp, Homo sapien
gagctctacaaggagttcaaagggg

SEQ ID NO: 5758775 - DNA, 25 bp, Homo sapien
ccacagggaaggtcagcgcttcctt

SEQ ID NO: 5758776 - DNA, 25 bp, Homo sapien
gccccgtgcttgagctcggcagtcc

SEQ ID NO: 5758777 - DNA, 25 bp, Homo sapien
aggacacagtgactgcccaggtgtc

SEQ ID NO: 5758778 - DNA, 25 bp, Homo sapien
cctgtcatccctgtctgtgaccatt

SEQ ID NO: 5758779 - DNA, 25 bp, Homo sapien
aaatgtacattacctgtgctgaata

SEQ ID NO: 5758780 - DNA, 25 bp, Homo sapien
ttttttagctattaaaaccatttga

SEQ ID NO: 5758781 - DNA, 25 bp, Homo sapien
ttgtaaacctcacacagataaggac

SEQ ID NO: 5758782 - DNA, 25 bp, Homo sapien
agccaccatgaaggccccggagaag

SEQ ID NO: 5758783 - DNA, 25 bp, Homo sapien
caagtacatcaacccagcagccacc

SEQ ID NO: 5758784 - DNA, 25 bp, Homo sapien
aattcttcatcacgtttcgctcctg

SEQ ID NO: 5758785 - DNA, 25 bp, Homo sapien
aagaagaagggctacgtgcggctgc

SEQ ID NO: 5758786 - DNA, 25 bp, Homo sapien
cagccctttgtctacccagtctgca

SEQ ID NO: 5758787 - DNA, 25 bp, Homo sapien
tcatcatgctaagaacaagaactgc

SEQ ID NO: 5758788 - DNA, 25 bp, Homo sapien
tgcacagtgagggaagggcttcagg

SEQ ID NO: 5758789 - DNA, 25 bp, Homo sapien
gacacagctcaaggtagccccggag

SEQ ID NO: 5758790 - DNA, 25 bp, Homo sapien
ctgaccagggagtgagaagcaggtt

SEQ ID NO: 5758791 - DNA, 25 bp, Homo sapien
ggaactttgtgatccaagggggcga

SEQ ID NO: 5758792 - DNA, 25 bp, Homo sapien
gcgctaccagtttgtgaagaagaag

SEQ ID NO: 5758793 - DNA, 25 bp, Homo sapien
gtcggggttttggggacttcagctc

SEQ ID NO: 5758794 - DNA, 25 bp, Homo sapien
ggagtgagaagcaggtttggagagg

SEQ ID NO: 5758795 - DNA, 25 bp, Homo sapien
ggcccaacctctcgcacacgggccg

SEQ ID NO: 5758796 - DNA, 25 bp, Homo sapien
ctgcgctaccagtttgtgaagaaga

SEQ ID NO: 5758797 - DNA, 25 bp, Homo sapien
cgccatggggaagcgacagcaccaa

SEQ ID NO: 5758798 - DNA, 25 bp, Homo sapien
ggtggcaagaagccagatctcccac

SEQ ID NO: 5758799 - DNA, 25 bp, Homo sapien
acctcacacagataaggaccaaggg

SEQ ID NO: 5758800 - DNA, 25 bp, Homo sapien
aggggaagctgaaggccccgtgctt

SEQ ID NO: 5758801 - DNA, 25 bp, Homo sapien
agctgaaggccccgtgcttgagctc

SEQ ID NO: 5758802 - DNA, 25 bp, Homo sapien
ggtcagcgcttccttcacctccacc

SEQ ID NO: 5758803 - DNA, 25 bp, Homo sapien
gacatggcctcgtccactgagggca

SEQ ID NO: 5758804 - DNA, 25 bp, Homo sapien
atgaaaataatagacccagatgaag

SEQ ID NO: 5758805 - DNA, 25 bp, Homo sapien
taccagtttgtgaagaagaagggct

SEQ ID NO: 5758806 - DNA, 25 bp, Homo sapien
taaggaccaagggctggcggtgtgg

SEQ ID NO: 5758807 - DNA, 25 bp, Homo sapien
aacagcaacaggtctcaattcttca

SEQ ID NO: 5758808 - DNA, 25 bp, Homo sapien
agagagcctgggctcagccttctgc

SEQ ID NO: 5758809 - DNA, 25 bp, Homo sapien
tcggctgcggctccatggtctgagt

SEQ ID NO: 5758810 - DNA, 25 bp, Homo sapien
agtgaagagcagccagccccaggca

SEQ ID NO: 5758811 - DNA, 25 bp, Homo sapien
acccgagagaccctgcaggagctct

SEQ ID NO: 5758812 - DNA, 25 bp, Homo sapien
ggacaagaagcataccatctttgga

SEQ ID NO: 5758813 - DNA, 25 bp, Homo sapien
agaggtatgtctgcccctcgtcacc

SEQ ID NO: 5758814 - DNA, 25 bp, Homo sapien
gaagccagatctcccacaaacaaat

SEQ ID NO: 5758815 - DNA, 25 bp, Homo sapien
ggggctttgacgtactgacagccat

SEQ ID NO: 5758816 - DNA, 25 bp, Homo sapien
ctccaggaccccaccaatttggaca

SEQ ID NO: 5758817 - DNA, 25 bp, Homo sapien
ctctgcagcctgtcatccctgtctg

SEQ ID NO: 5758818 - DNA, 25 bp, Homo sapien
ggccgcggcatcctcagcatggcca

SEQ ID NO: 5758819 - DNA, 25 bp, Homo sapien
agaggaggggcacagtaggacacag

SEQ ID NO: 5758820 - DNA, 25 bp, Homo sapien
atggtctgagttgtcagccgttgtt

SEQ ID NO: 5758821 - DNA, 25 bp, Homo sapien
ttttatggtggcaagaagccagatc

SEQ ID NO: 5758822 - DNA, 25 bp, Homo sapien
ccaccatgaaggccccggagaagaa

SEQ ID NO: 5758823 - DNA, 25 bp, Homo sapien
ggggaagcccttcaaagacgagttc

SEQ ID NO: 5758824 - DNA, 25 bp, Homo sapien
aacaagggcgacctcaacctggagc

SEQ ID NO: 5758825 - DNA, 25 bp, Homo sapien
ccattggtcgggcccctgggctcta

SEQ ID NO: 5758826 - DNA, 25 bp, Homo sapien
ccagccccaggcagggagccagggc

SEQ ID NO: 5758827 - DNA, 25 bp, Homo sapien
acacccacatcgtggctgtgaggac

SEQ ID NO: 5758828 - DNA, 25 bp, Homo sapien
agtgttcgtggacccctatgaggag

SEQ ID NO: 5758829 - DNA, 25 bp, Homo sapien
cacacgggccgcggcatcctcagca

SEQ ID NO: 5758830 - DNA, 25 bp, Homo sapien
gatccaagggggcgaccccacaggc

SEQ ID NO: 5758831 - DNA, 25 bp, Homo sapien
ttccacagatccatccggaactttg

SEQ ID NO: 5758832 - DNA, 25 bp, Homo sapien
ggccacattcaagtcccccattggt

SEQ ID NO: 5758833 - DNA, 25 bp, Homo sapien
gtctgcactcccgatggcatcgtct

SEQ ID NO: 5758834 - DNA, 25 bp, Homo sapien
atcatgctaagaacaagaactgcgc

SEQ ID NO: 5758835 - DNA, 25 bp, Homo sapien
agggcgacctcaacctggagctgca

SEQ ID NO: 5758836 - DNA, 25 bp, Homo sapien
cggcagtcctgctccttgcagtgaa

SEQ ID NO: 5758837 - DNA, 25 bp, Homo sapien
ggggacaggccaccaaggacctttg

SEQ ID NO: 5758838 - DNA, 25 bp, Homo sapien
gaggccgatgcccagattgcgcagg

SEQ ID NO: 5758839 - DNA, 25 bp, Homo sapien
cctgacagacaccctggctggccct

SEQ ID NO: 5758840 - DNA, 25 bp, Homo sapien
cacgggccgcggcatcctcagcatg

SEQ ID NO: 5758841 - DNA, 25 bp, Homo sapien
cctaaggaggagatccgcattgatg

SEQ ID NO: 5758842 - DNA, 25 bp, Homo sapien
tgcagccctttgtctacccagtctg

SEQ ID NO: 5758843 - DNA, 25 bp, Homo sapien
gaaagtggacaagctgaatgctgcc

SEQ ID NO: 5758844 - DNA, 25 bp, Homo sapien
gctctacaaggagttcaaaggggac

SEQ ID NO: 5758845 - DNA, 25 bp, Homo sapien
gtcgggcccctgggctctagagtga

SEQ ID NO: 5758846 - DNA, 25 bp, Homo sapien
tactgggggaagcccttcaaagacg

SEQ ID NO: 5758847 - DNA, 25 bp, Homo sapien
ctgtgcccaccctgacagacaccct

SEQ ID NO: 5758848 - DNA, 25 bp, Homo sapien
tgtaagaggctcagacaccaagctg

SEQ ID NO: 5758849 - DNA, 25 bp, Homo sapien
tggacgggttgttgggggctttgac

SEQ ID NO: 5758850 - DNA, 25 bp, Homo sapien
aggagctctacaaggagttcaaagg

SEQ ID NO: 5758851 - DNA, 25 bp, Homo sapien
taccatctttggacgggttgttggg

SEQ ID NO: 5758852 - DNA, 25 bp, Homo sapien
gaaaataatagacccagatgaagag

SEQ ID NO: 5758853 - DNA, 25 bp, Homo sapien
ccaaagtgaagagcagccagcccca

SEQ ID NO: 5758854 - DNA, 25 bp, Homo sapien
cggtggcctgcacagtgagggaagg

SEQ ID NO: 5758855 - DNA, 25 bp, Homo sapien
aggctcagacaccaagctgggcctg

SEQ ID NO: 5758856 - DNA, 25 bp, Homo sapien
gctcgctagtcgccgccgccgctcc

SEQ ID NO: 5758857 - DNA, 25 bp, Homo sapien
accggcaacgtctacgcctatgagg

SEQ ID NO: 5758858 - DNA, 25 bp, Homo sapien
aggcacgggtggggagtcatactgg

SEQ ID NO: 5758859 - DNA, 25 bp, Homo sapien
ccgagagaccctgcaggagctctac

SEQ ID NO: 5758860 - DNA, 25 bp, Homo sapien
cctggtgcagccctggcagtaactg

SEQ ID NO: 5758861 - DNA, 25 bp, Homo sapien
gatgaagagaaggccaaacaggacc

SEQ ID NO: 5758862 - DNA, 25 bp, Homo sapien
gtgatccaagggggcgaccccacag

SEQ ID NO: 5758863 - DNA, 25 bp, Homo sapien
gagttcaaaggggacgagattctgg

SEQ ID NO: 5758864 - DNA, 25 bp, Homo sapien
ggtctcaattcttcatcacgtttcg

SEQ ID NO: 5758865 - DNA, 25 bp, Homo sapien
gtgcagccctggcagtaactggctt

SEQ ID NO: 5758866 - DNA, 25 bp, Homo sapien
gcctcacccggtggcctgcacagtg

SEQ ID NO: 5758867 - DNA, 25 bp, Homo sapien
aaacctgcgaaaacttcatcaggct

SEQ ID NO: 5758868 - DNA, 25 bp, Homo sapien
cgaccccacaggcacaggcacgggt

SEQ ID NO: 5758869 - DNA, 25 bp, Homo sapien
cactgtccccatgtccaagaagaag

SEQ ID NO: 5758870 - DNA, 25 bp, Homo sapien
tgaagcagctgccatcgacgaggat

SEQ ID NO: 5758871 - DNA, 25 bp, Homo sapien
gtcgccgccgccgctccgccatggg

SEQ ID NO: 5758872 - DNA, 25 bp, Homo sapien
acgagcccttctcccggcaggacat

SEQ ID NO: 5758873 - DNA, 25 bp, Homo sapien
ttctctggccacattcaagtccccc

SEQ ID NO: 5758874 - DNA, 25 bp, Homo sapien
aggccaccaaggacctttggcaaat

SEQ ID NO: 5758875 - DNA, 25 bp, Homo sapien
gagaagtaggaccaggccatccttg

SEQ ID NO: 5758876 - DNA, 25 bp, Homo sapien
gccatggagaatgtggagagtgacc

SEQ ID NO: 5758877 - DNA, 25 bp, Homo sapien
agggaaggtcagcgcttccttcacc

SEQ ID NO: 5758878 - DNA, 25 bp, Homo sapien
agaagctggacgggaggtccctgat

SEQ ID NO: 5758879 - DNA, 25 bp, Homo sapien
gcccactattccacagggaaggtca

SEQ ID NO: 5758880 - DNA, 25 bp, Homo sapien
cgtgttcaccaacaacacccacatc

SEQ ID NO: 5758881 - DNA, 25 bp, Homo sapien
ttatttgtaaacctcacacagataa

SEQ ID NO: 5758882 - DNA, 25 bp, Homo sapien
catcgacgaggatgtgctgcgctac

SEQ ID NO: 5758883 - DNA, 25 bp, Homo sapien
cggcaggacatcatcaccctccagg

SEQ ID NO: 5758884 - DNA, 25 bp, Homo sapien
ctcagcatggccaactccgggccca

SEQ ID NO: 5758885 - DNA, 25 bp, Homo sapien
cagagaagtaggaccaggccatcct

SEQ ID NO: 5758886 - DNA, 25 bp, Homo sapien
ccagagctcgaagaccccaagacag

SEQ ID NO: 5758887 - DNA, 25 bp, Homo sapien
gtgaccattggtcgggcccctgggc

SEQ ID NO: 5758888 - DNA, 25 bp, Homo sapien
ccccaggcagggagccagggccccc

SEQ ID NO: 5758889 - DNA, 25 bp, Homo sapien
cagcgtccagggtacaggtgcgggt

SEQ ID NO: 5758890 - DNA, 25 bp, Homo sapien
aggccccgtgcttgagctcggcagt

SEQ ID NO: 5758891 - DNA, 25 bp, Homo sapien
cttccttcacctccaccgcgatggt

SEQ ID NO: 5758892 - DNA, 25 bp, Homo sapien
atccttggctccagagctcgaagac

SEQ ID NO: 5758893 - DNA, 25 bp, Homo sapien
aatgctgcccactattccacaggga

SEQ ID NO: 5758894 - DNA, 25 bp, Homo sapien
cgaggatgtgctgcgctaccagttt

SEQ ID NO: 5758895 - DNA, 25 bp, Homo sapien
gtgtccacacacctgtaggcctctg

SEQ ID NO: 5758896 - DNA, 25 bp, Homo sapien
ctcaaccagtgccactgtccccatg

SEQ ID NO: 5758897 - DNA, 25 bp, Homo sapien
gcaccaaaaggacaaaatgtacatt

SEQ ID NO: 5758898 - DNA, 25 bp, Homo sapien
tggaacagctaaatatcaaggccaa

SEQ ID NO: 5758899 - DNA, 25 bp, Homo sapien
ccacattcaagtcccccattggtgg

SEQ ID NO: 5758900 - DNA, 25 bp, Homo sapien
cagtaactggcttgtaagaggctca

SEQ ID NO: 5758901 - DNA, 25 bp, Homo sapien
ggaagacacagctcaaggtagcccc

SEQ ID NO: 5758902 - DNA, 25 bp, Homo sapien
gacagcaccaaaaggacaaaatgta

SEQ ID NO: 5758903 - DNA, 25 bp, Homo sapien
ggtagcagcaggctgcctgatgacc

SEQ ID NO: 5758904 - DNA, 25 bp, Homo sapien
cagcggcgccacagagagcctgggc

SEQ ID NO: 5758905 - DNA, 25 bp, Homo sapien
acccgtcttattatctgaaaaatac

SEQ ID NO: 5758906 - DNA, 25 bp, Homo sapien
ctgatgaccactagaggtatgtctg

SEQ ID NO: 5758907 - DNA, 25 bp, Homo sapien
gtgactgcccaggtgtccacacacc

SEQ ID NO: 5758908 - DNA, 25 bp, Homo sapien
atcgtctttgacttactgaacattg

SEQ ID NO: 5758909 - DNA, 25 bp, Homo sapien
tggcatcgtctttgacttactgaac

SEQ ID NO: 5758910 - DNA, 25 bp, Homo sapien
cgtggacccctatgaggaggccgat

SEQ ID NO: 5758911 - DNA, 25 bp, Homo sapien
ttttggggacttcagctcctggtag

SEQ ID NO: 5758912 - DNA, 25 bp, Homo sapien
tttcgctcctgtgcctacctggaca

SEQ ID NO: 5758913 - DNA, 25 bp, Homo sapien
actcacttttatggtggcaagaagc

SEQ ID NO: 5758914 - DNA, 25 bp, Homo sapien
catcatcaccctccaggaccccacc

SEQ ID NO: 5758915 - DNA, 25 bp, Homo sapien
ctgcgaaaacttcatcaggctttgc

SEQ ID NO: 5758916 - DNA, 25 bp, Homo sapien
gaagtaggaccaggccatccttggc

SEQ ID NO: 5758917 - DNA, 25 bp, Homo sapien
cgggaggtccctgatcaagctgaac

SEQ ID NO: 5758918 - DNA, 25 bp, Homo sapien
acacacctgtaggcctctgagccag

SEQ ID NO: 5758919 - DNA, 25 bp, Homo sapien
accgagcagcagaggaagagccctc

SEQ ID NO: 5758920 - DNA, 25 bp, Homo sapien
tacatcaacccagcagccaccgagc

SEQ ID NO: 5758921 - DNA, 25 bp, Homo sapien
cagtcggggttttggggacttcagc

SEQ ID NO: 5758922 - DNA, 25 bp, Homo sapien
ttgttttttcgtgctcgctagtcgc

SEQ ID NO: 5758923 - DNA, 25 bp, Homo sapien
aaggcctggtgcagccctggcagta

SEQ ID NO: 5758924 - DNA, 25 bp, Homo sapien
gaagctgaaggccccgtgcttgagc

SEQ ID NO: 5758925 - DNA, 25 bp, Homo sapien
tcaagctgaacttttccaagaacag

SEQ ID NO: 5758926 - DNA, 25 bp, Homo sapien
tgaccactgcagtctctctctgcag

SEQ ID NO: 5758927 - DNA, 25 bp, Homo sapien
ccctcccgccaggcactgtcctccg

SEQ ID NO: 5758928 - DNA, 25 bp, Homo sapien
gtggacaagctgaatgctgcccact

SEQ ID NO: 5758929 - DNA, 25 bp, Homo sapien
gcactgtcctccgcaaggcctggtg

SEQ ID NO: 5758930 - DNA, 25 bp, Homo sapien
cactgagggcacgatttaaacattt

SEQ ID NO: 5758931 - DNA, 25 bp, Homo sapien
gccgttgttttttcgtgctcgctag

SEQ ID NO: 5758932 - DNA, 25 bp, Homo sapien
gcctgatgaccactagaggtatgtc

SEQ ID NO: 5758933 - DNA, 25 bp, Homo sapien
accatgaaggccccggagaagaaga

SEQ ID NO: 5758934 - DNA, 25 bp, Homo sapien
ttcaatgtctctaacttctatcatg

SEQ ID NO: 5758935 - DNA, 25 bp, Homo sapien
ttattatctgaaaaatacaaatgcc

SEQ ID NO: 5758936 - DNA, 25 bp, Homo sapien
caaaaggacaaaatgtacattacct

SEQ ID NO: 5758937 - DNA, 25 bp, Homo sapien
tgaccgtccagcctcacccggtggc

SEQ ID NO: 5758938 - DNA, 25 bp, Homo sapien
ccaggcagggagccagggcccccag

SEQ ID NO: 5758939 - DNA, 25 bp, Homo sapien
ttaccttttgaccactgcagtctct

SEQ ID NO: 5758940 - DNA, 25 bp, Homo sapien
cctgactgactgtattctctggcca

SEQ ID NO: 5758941 - DNA, 25 bp, Homo sapien
ccacagagagcctgggctcagcctt

SEQ ID NO: 5758942 - DNA, 25 bp, Homo sapien
ctgtgcctacctggacaagaagcat

SEQ ID NO: 5758943 - DNA, 25 bp, Homo sapien
cgtctttgacttactgaacattgtt

SEQ ID NO: 5758944 - DNA, 25 bp, Homo sapien
gtacattacctgtgctgaatacact

SEQ ID NO: 5758945 - DNA, 25 bp, Homo sapien
ccctggcagtaactggcttgtaaga

SEQ ID NO: 5758946 - DNA, 25 bp, Homo sapien
gaggggaagtaccactgcccagtgc

SEQ ID NO: 5758947 - DNA, 25 bp, Homo sapien
gccgccgctccgccatggggaagcg

SEQ ID NO: 5758948 - DNA, 25 bp, Homo sapien
ggctttgacgtactgacagccatgg

SEQ ID NO: 5758949 - DNA, 25 bp, Homo sapien
ggtttacatttctgtagtttgtttg

SEQ ID NO: 5758950 - DNA, 25 bp, Homo sapien
agtgaccccaaaactgaccgcccta

SEQ ID NO: 5758951 - DNA, 25 bp, Homo sapien
gcatggccaactccgggcccaacag

SEQ ID NO: 5758952 - DNA, 25 bp, Homo sapien
tccttcacctccaccgcgatggtcc

SEQ ID NO: 5758953 - DNA, 25 bp, Homo sapien
ctgctccttgcagtgaagccaccat

SEQ ID NO: 5758954 - DNA, 25 bp, Homo sapien
tagacccagatgaagagaaggccaa

SEQ ID NO: 5758955 - DNA, 25 bp, Homo sapien
ccggagaccacacatgaagcagctg

SEQ ID NO: 5758956 - DNA, 25 bp, Homo sapien
ctgagccagcgtccagggtacaggt

SEQ ID NO: 5758957 - DNA, 25 bp, Homo sapien
ccatccggaactttgtgatccaagg

SEQ ID NO: 5758958 - DNA, 25 bp, Homo sapien
ggcccctgggctctagagtgacttt

SEQ ID NO: 5758959 - DNA, 25 bp, Homo sapien
cgtttcgctcctgtgcctacctgga

SEQ ID NO: 5758960 - DNA, 25 bp, Homo sapien
gcagccagccccaggcagggagcca

SEQ ID NO: 5758961 - DNA, 25 bp, Homo sapien
aagcgacagcaccaaaaggacaaaa

SEQ ID NO: 5758962 - DNA, 25 bp, Homo sapien
agaataacatgaaaataatagaccc

SEQ ID NO: 5758963 - DNA, 25 bp, Homo sapien
gcggcatcctcagcatggccaactc

SEQ ID NO: 5758964 - DNA, 25 bp, Homo sapien
ccctccaggaccccaccaatttgga

SEQ ID NO: 5758965 - DNA, 25 bp, Homo sapien
aggaccctgtgcccaccctgacaga

SEQ ID NO: 5758966 - DNA, 25 bp, Homo sapien
atccgcattgatgccactacagtgt

SEQ ID NO: 5758967 - DNA, 25 bp, Homo sapien
gacgagttccggcccaacctctcgc

SEQ ID NO: 5758968 - DNA, 25 bp, Homo sapien
ctggcagtaactggcttgtaagagg

SEQ ID NO: 5758969 - DNA, 25 bp, Homo sapien
ctcggcagtcctgctccttgcagtg

SEQ ID NO: 5758970 - DNA, 25 bp, Homo sapien
ccaccgagcagcagaggaagagccc

SEQ ID NO: 5758971 - DNA, 25 bp, Homo sapien
cgcacacgggccgcggcatcctcag

SEQ ID NO: 5758972 - DNA, 25 bp, Homo sapien
ggcctgcacagtgagggaagggctt

SEQ ID NO: 5758973 - DNA, 25 bp, Homo sapien
gggaagctgaaggccccgtgcttga

SEQ ID NO: 5758974 - DNA, 25 bp, Homo sapien
aaaaatacaaatgccgagacccgag

SEQ ID NO: 5758975 - DNA, 25 bp, Homo sapien
caagggggcgaccccacaggcacag

SEQ ID NO: 5758976 - DNA, 25 bp, Homo sapien
tgcttgagctcggcagtcctgctcc

SEQ ID NO: 5758977 - DNA, 25 bp, Homo sapien
gaccctgcaggagctctacaaggag

SEQ ID NO: 5758978 - DNA, 25 bp, Homo sapien
tacccagtctgcactcccgatggca

SEQ ID NO: 5758979 - DNA, 25 bp, Homo sapien
gtccacacacctgtaggcctctgag

SEQ ID NO: 5758980 - DNA, 25 bp, Homo sapien
tggcttaagaagtacgggaccaacc

SEQ ID NO: 5758981 - DNA, 25 bp, Homo sapien
gatggcaccatcttccacagatcca

SEQ ID NO: 5758982 - DNA, 25 bp, Homo sapien
actcccgatggcatcgtctttgact

SEQ ID NO: 5758983 - DNA, 25 bp, Homo sapien
tcagcgcttccttcacctccaccgc

SEQ ID NO: 5758984 - DNA, 25 bp, Homo sapien
gtgaagccaccatgggtgaccgtcc

SEQ ID NO: 5758985 - DNA, 25 bp, Homo sapien
ttttgacgccctccatccctcccgc

SEQ ID NO: 5758986 - DNA, 25 bp, Homo sapien
ggcaggggacaggccaccaaggacc

SEQ ID NO: 5758987 - DNA, 25 bp, Homo sapien
ggacctgctgaccgacgagcccttc

SEQ ID NO: 5758988 - DNA, 25 bp, Homo sapien
ctagagtgacttttgacgccctcca

SEQ ID NO: 5758989 - DNA, 25 bp, Homo sapien
ggggcagagaagtaggaccaggcca

SEQ ID NO: 5758990 - DNA, 25 bp, Homo sapien
tgtgaggacgaccggcaacgtctac

SEQ ID NO: 5758991 - DNA, 25 bp, Homo sapien
tgaacttttccaagaacagtgaggg

SEQ ID NO: 5758992 - DNA, 25 bp, Homo sapien
accactgcccagtgctgtttaccgt

SEQ ID NO: 5758993 - DNA, 25 bp, Homo sapien
ctcgtccactgagggcacgatttaa

SEQ ID NO: 5758994 - DNA, 25 bp, Homo sapien
tgtcatccctgtctgtgaccattgg

SEQ ID NO: 5758995 - DNA, 25 bp, Homo sapien
aaaggggacgagattctggcagcca

SEQ ID NO: 5758996 - DNA, 25 bp, Homo sapien
agtgacttttgacgccctccatccc

SEQ ID NO: 5758997 - DNA, 25 bp, Homo sapien
agttccggcccaacctctcgcacac

SEQ ID NO: 5758998 - DNA, 25 bp, Homo sapien
gccatcgacgaggatgtgctgcgct

SEQ ID NO: 5758999 - DNA, 25 bp, Homo sapien
ccatggctggctccttctcttctcc

SEQ ID NO: 5759000 - DNA, 25 bp, Homo sapien
ctcacacagataaggaccaagggct

SEQ ID NO: 5759001 - DNA, 25 bp, Homo sapien
caaacaggacccgtcttattatctg

SEQ ID NO: 5759002 - DNA, 25 bp, Homo sapien
ccaaggacctttggcaaatgaaggt

SEQ ID NO: 5759003 - DNA, 25 bp, Homo sapien
cgcgatggtcccggagaccacacat

SEQ ID NO: 5759004 - DNA, 25 bp, Homo sapien
cagcccatccctctgcagcctgtca

SEQ ID NO: 5759005 - DNA, 25 bp, Homo sapien
cccagatgaagagaaggccaaacag

SEQ ID NO: 5759006 - DNA, 25 bp, Homo sapien
acagtgttcgtggacccctatgagg

SEQ ID NO: 5759007 - DNA, 25 bp, Homo sapien
ataatagacccagatgaagagaagg

SEQ ID NO: 5759008 - DNA, 25 bp, Homo sapien
aagaacaagaactgcgccatggctg

SEQ ID NO: 5759009 - DNA, 25 bp, Homo sapien
acagggaaggtcagcgcttccttca

SEQ ID NO: 5759010 - DNA, 25 bp, Homo sapien
ccaacagcaacaggtctcaattctt

SEQ ID NO: 5759011 - DNA, 25 bp, Homo sapien
acatgaaaataatagacccagatga

SEQ ID NO: 5759012 - DNA, 25 bp, Homo sapien
tgctgcgctaccagtttgtgaagaa

SEQ ID NO: 5759013 - DNA, 25 bp, Homo sapien
tgggggctttgacgtactgacagcc

SEQ ID NO: 5759014 - DNA, 25 bp, Homo sapien
ctttgacgtactgacagccatggag

SEQ ID NO: 5759015 - DNA, 25 bp, Homo sapien
ccgcaaggcctggtgcagccctggc

SEQ ID NO: 5759016 - DNA, 25 bp, Homo sapien
ggccaactccgggcccaacagcaac

SEQ ID NO: 5759017 - DNA, 25 bp, Homo sapien
gatcaagctgaacttttccaagaac

SEQ ID NO: 5759018 - DNA, 25 bp, Homo sapien
gccactacagtgttcgtggacccct

SEQ ID NO: 5759019 - DNA, 25 bp, Homo sapien
aagacagccctctgctctcagcggc

SEQ ID NO: 5759020 - DNA, 25 bp, Homo sapien
aagctgaacttttccaagaacagtg

SEQ ID NO: 5759021 - DNA, 25 bp, Homo sapien
aatttggacaagttcaatgtctcta

SEQ ID NO: 5759022 - DNA, 25 bp, Homo sapien
tgaagaagaagggctacgtgcggct

SEQ ID NO: 5759023 - DNA, 25 bp, Homo sapien
tgtagttttttagctattaaaacca

SEQ ID NO: 5759024 - DNA, 25 bp, Homo sapien
cccctgggctctagagtgacttttg

SEQ ID NO: 5759025 - DNA, 25 bp, Homo sapien
aagcccttcaaagacgagttccggc

SEQ ID NO: 5759026 - DNA, 25 bp, Homo sapien
tgtttgttttagagcttaatttgta

SEQ ID NO: 5759027 - DNA, 25 bp, Homo sapien
ttagctattaaaaccatttgaattt

SEQ ID NO: 5759028 - DNA, 25 bp, Homo sapien
aagaactgcgccatggctggctcct

SEQ ID NO: 5759029 - DNA, 25 bp, Homo sapien
agctgccatcgacgaggatgtgctg

SEQ ID NO: 5759030 - DNA, 25 bp, Homo sapien
aactccgggcccaacagcaacaggt

SEQ ID NO: 5759031 - DNA, 25 bp, Homo sapien
tccactgagggcacgatttaaacat

SEQ ID NO: 5759032 - DNA, 25 bp, Homo sapien
tgacatcagaagctttatttgtaaa

SEQ ID NO: 5759033 - DNA, 25 bp, Homo sapien
gtccccatgtccaagaagaagccca

SEQ ID NO: 5759034 - DNA, 25 bp, Homo sapien
accagtgccactgtccccatgtcca

SEQ ID NO: 5759035 - DNA, 25 bp, Homo sapien
acctggacaagaagcataccatctt

SEQ ID NO: 5759036 - DNA, 25 bp, Homo sapien
gaatacactcacttttatggtggca

SEQ ID NO: 5759037 - DNA, 25 bp, Homo sapien
caagaacttccgggacctgctgacc

SEQ ID NO: 5759038 - DNA, 25 bp, Homo sapien
ggaaggtcagcgcttccttcacctc

SEQ ID NO: 5759039 - DNA, 25 bp, Homo sapien
gcctgaccagggagtgagaagcagg

SEQ ID NO: 5759040 - DNA, 25 bp, Homo sapien
tgaccgacgagcccttctcccggca

SEQ ID NO: 5759041 - DNA, 25 bp, Homo sapien
accatgggtgaccgtccagcctcac

SEQ ID NO: 5759042 - DNA, 25 bp, Homo sapien
gggcccccagaccttccgccagggc

SEQ ID NO: 5759043 - DNA, 25 bp, Homo sapien
aaatgccgagacccgagagaccctg

SEQ ID NO: 5759044 - DNA, 25 bp, Homo sapien
aaggtagccccggagaccaaagtga

SEQ ID NO: 5759045 - DNA, 25 bp, Homo sapien
gccccggagaccaaagtgaagagca

SEQ ID NO: 5759046 - DNA, 25 bp, Homo sapien
aagaaagtggacaagctgaatgctg

SEQ ID NO: 5759047 - DNA, 25 bp, Homo sapien
accacacatgaagcagctgccatcg

SEQ ID NO: 5759048 - DNA, 25 bp, Homo sapien
catcaggctttgcaagaagcattat

SEQ ID NO: 5759049 - DNA, 25 bp, Homo sapien
accgtccagcctcacccggtggcct

SEQ ID NO: 5759050 - DNA, 25 bp, Homo sapien
ctgcactgcgacctgacaccaaaaa

SEQ ID NO: 5759051 - DNA, 25 bp, Homo sapien
cgccagggcgtgggcaagtacatca

SEQ ID NO: 5759052 - DNA, 25 bp, Homo sapien
ttgcgcaggagcggaagacacagct

SEQ ID NO: 5759053 - DNA, 25 bp, Homo sapien
gcagtggaacagctaaatatcaagg

SEQ ID NO: 5759054 - DNA, 25 bp, Homo sapien
ggtagccccggagaccaaagtgaag

SEQ ID NO: 5759055 - DNA, 25 bp, Homo sapien
aaataatagacccagatgaagagaa

SEQ ID NO: 5759056 - DNA, 25 bp, Homo sapien
gtggcctgcacagtgagggaagggc

SEQ ID NO: 5759057 - DNA, 25 bp, Homo sapien
atcacgtttcgctcctgtgcctacc

SEQ ID NO: 5759058 - DNA, 25 bp, Homo sapien
gacgaggatgtgctgcgctaccagt

SEQ ID NO: 5759059 - DNA, 25 bp, Homo sapien
agggagtgagaagcaggtttggaga

SEQ ID NO: 5759060 - DNA, 25 bp, Homo sapien
tgaggcagtggaacagctaaatatc

SEQ ID NO: 5759061 - DNA, 25 bp, Homo sapien
gaacaagaactgcgccatggctggc

SEQ ID NO: 5759062 - DNA, 25 bp, Homo sapien
gaactcggctgcggctccatggtct

SEQ ID NO: 5759063 - DNA, 25 bp, Homo sapien
gaagctttatttgtaaacctcacac

SEQ ID NO: 5759064 - DNA, 25 bp, Homo sapien
tgacagacaccctggctggccctga

SEQ ID NO: 5759065 - DNA, 25 bp, Homo sapien
ttcatcaggctttgcaagaagcatt

SEQ ID NO: 5759066 - DNA, 25 bp, Homo sapien
ctgagggcacgatttaaacatttga

SEQ ID NO: 5759067 - DNA, 25 bp, Homo sapien
gtacgggaccaaccccagcaatgga

SEQ ID NO: 5759068 - DNA, 25 bp, Homo sapien
cttcagggccatctgctcccagggc

SEQ ID NO: 5759069 - DNA, 25 bp, Homo sapien
gcccctcgtcaccctgctgcacacc

SEQ ID NO: 5759070 - DNA, 25 bp, Homo sapien
aacttttccaagaacagtgagggga

SEQ ID NO: 5759071 - DNA, 25 bp, Homo sapien
gctccgccatggggaagcgacagca

SEQ ID NO: 5759072 - DNA, 25 bp, Homo sapien
aactgaccgccctaaggaggagatc

SEQ ID NO: 5759073 - DNA, 25 bp, Homo sapien
ggggacttcagctcctggtagcagc

SEQ ID NO: 5759074 - DNA, 25 bp, Homo sapien
aatagacccagatgaagagaaggcc

SEQ ID NO: 5759075 - DNA, 25 bp, Homo sapien
aagtaccactgcccagtgctgttta

SEQ ID NO: 5759076 - DNA, 25 bp, Homo sapien
gacagccatggagaatgtggagagt

SEQ ID NO: 5759077 - DNA, 25 bp, Homo sapien
ccaagggctggcggtgtggccagag

SEQ ID NO: 5759078 - DNA, 25 bp, Homo sapien
gccaaacaggacccgtcttattatc

SEQ ID NO: 5759079 - DNA, 25 bp, Homo sapien
ctccgcaaggcctggtgcagccctg

SEQ ID NO: 5759080 - DNA, 25 bp, Homo sapien
tcaattcttcatcacgtttcgctcc

SEQ ID NO: 5759081 - DNA, 25 bp, Homo sapien
tgatgccactacagtgttcgtggac

SEQ ID NO: 5759082 - DNA, 25 bp, Homo sapien
gacgtactgacagccatggagaatg

SEQ ID NO: 5759083 - DNA, 25 bp, Homo sapien
gagcccttctcccggcaggacatca

SEQ ID NO: 5759084 - DNA, 25 bp, Homo sapien
ctcacccggtggcctgcacagtgag

SEQ ID NO: 5759085 - DNA, 25 bp, Homo sapien
ggtgaccgtccagcctcacccggtg

SEQ ID NO: 5759086 - DNA, 25 bp, Homo sapien
cacagtgagggaagggcttcagggc

SEQ ID NO: 5759087 - DNA, 25 bp, Homo sapien
ggagagtgaccccaaaactgaccgc

SEQ ID NO: 5759088 - DNA, 25 bp, Homo sapien
gtgctcgctagtcgccgccgccgct

SEQ ID NO: 5759089 - DNA, 25 bp, Homo sapien
aagggctacgtgcggctgcacacca

SEQ ID NO: 5759090 - DNA, 25 bp, Homo sapien
cttctgcatcaggacatggcctcgt

SEQ ID NO: 5759091 - DNA, 25 bp, Homo sapien
tccgccatggggaagcgacagcacc

SEQ ID NO: 5759092 - DNA, 25 bp, Homo sapien
ctgtccccatgtccaagaagaagcc

SEQ ID NO: 5759093 - DNA, 25 bp, Homo sapien
gatgtgctgcgctaccagtttgtga

SEQ ID NO: 5759094 - DNA, 25 bp, Homo sapien
ccgccctaaggaggagatccgcatt

SEQ ID NO: 5759095 - DNA, 25 bp, Homo sapien
gcccaacagcaacaggtctcaattc

SEQ ID NO: 5759096 - DNA, 25 bp, Homo sapien
tcgacgaggatgtgctgcgctacca

SEQ ID NO: 5759097 - DNA, 25 bp, Homo sapien
ttctcccggcaggacatcatcaccc

SEQ ID NO: 5759098 - DNA, 25 bp, Homo sapien
tggagaatgtggagagtgaccccaa

SEQ ID NO: 5759099 - DNA, 25 bp, Homo sapien
tagtttgtttgttttagagcttaat

SEQ ID NO: 5759100 - DNA, 25 bp, Homo sapien
cttctccagcccatccctctgcagc

SEQ ID NO: 5759101 - DNA, 25 bp, Homo sapien
atggtggcaagaagccagatctccc

SEQ ID NO: 5759102 - DNA, 25 bp, Homo sapien
cgtgcttgagctcggcagtcctgct

SEQ ID NO: 5759103 - DNA, 25 bp, Homo sapien
ctccatccctcccgccaggcactgt

SEQ ID NO: 5759104 - DNA, 25 bp, Homo sapien
aaacttcatcaggctttgcaagaag

SEQ ID NO: 5759105 - DNA, 25 bp, Homo sapien
tgctgcacaccaatctgtggccctt

SEQ ID NO: 5759106 - DNA, 25 bp, Homo sapien
agacccgagagaccctgcaggagct

SEQ ID NO: 5759107 - DNA, 25 bp, Homo sapien
tgggcctgcagaggaggggcacagt

SEQ ID NO: 5759108 - DNA, 25 bp, Homo sapien
agccctggcagtaactggcttgtaa

SEQ ID NO: 5759109 - DNA, 25 bp, Homo sapien
ctggccacattcaagtcccccattg

SEQ ID NO: 5759110 - DNA, 25 bp, Homo sapien
cagcagccaccgagcagcagaggaa

SEQ ID NO: 5759111 - DNA, 25 bp, Homo sapien
gtatgtctgcccctcgtcaccctgc

SEQ ID NO: 5759112 - DNA, 25 bp, Homo sapien
ctggtagcagcaggctgcctgatga

SEQ ID NO: 5759113 - DNA, 25 bp, Homo sapien
agtctctctctgcagccctttgtct

SEQ ID NO: 5759114 - DNA, 25 bp, Homo sapien
tgggcaagtacatcaacccagcagc

SEQ ID NO: 5759115 - DNA, 25 bp, Homo sapien
gccctttgtctacccagtctgcact

SEQ ID NO: 5759116 - DNA, 25 bp, Homo sapien
gtctctaacttctatcatgtgaaga

SEQ ID NO: 5759117 - DNA, 25 bp, Homo sapien
gttcaaaggggacgagattctggca

SEQ ID NO: 5759118 - DNA, 25 bp, Homo sapien
ggagaggaccctgtgcccaccctga

SEQ ID NO: 5759119 - DNA, 25 bp, Homo sapien
ttacgatggcaccatcttccacaga

SEQ ID NO: 5759120 - DNA, 25 bp, Homo sapien
agtaggaccaggccatccttggctc

SEQ ID NO: 5759121 - DNA, 25 bp, Homo sapien
gtgtggccagaggacaggggaagct

SEQ ID NO: 5759122 - DNA, 25 bp, Homo sapien
cgtctacgcctatgaggcagtggaa

SEQ ID NO: 5759123 - DNA, 25 bp, Homo sapien
tgaggacgaccggcaacgtctacgc

SEQ ID NO: 5759124 - DNA, 25 bp, Homo sapien
cgcctatgaggcagtggaacagcta

SEQ ID NO: 5759125 - DNA, 25 bp, Homo sapien
ctgcagcctgtcatccctgtctgtg

SEQ ID NO: 5759126 - DNA, 25 bp, Homo sapien
ctgacagccatggagaatgtggaga

SEQ ID NO: 5759127 - DNA, 25 bp, Homo sapien
ccagggtacaggtgcgggtggtggg

SEQ ID NO: 5759128 - DNA, 25 bp, Homo sapien
ctcagcggcgccacagagagcctgg

SEQ ID NO: 5759129 - DNA, 25 bp, Homo sapien
cttcatcatgctaagaacaagaact

SEQ ID NO: 5759130 - DNA, 25 bp, Homo sapien
cccagcagccaccgagcagcagagg

SEQ ID NO: 5759131 - DNA, 25 bp, Homo sapien
aggaggggcacagtaggacacagtg

SEQ ID NO: 5759132 - DNA, 25 bp, Homo sapien
gcagtcctgctccttgcagtgaagc

SEQ ID NO: 5759133 - DNA, 25 bp, Homo sapien
gatgaccactagaggtatgtctgcc

SEQ ID NO: 5759134 - DNA, 25 bp, Homo sapien
ccctgcaggagctctacaaggagtt

SEQ ID NO: 5759135 - DNA, 25 bp, Homo sapien
cctgctgcacaccaatctgtggccc

SEQ ID NO: 5759136 - DNA, 25 bp, Homo sapien
ggagccagggcccccagaccttccg

SEQ ID NO: 5759137 - DNA, 25 bp, Homo sapien
gtggcccttcatcatgctaagaaca

SEQ ID NO: 5759138 - DNA, 25 bp, Homo sapien
gagccagcgtccagggtacaggtgc

SEQ ID NO: 5759139 - DNA, 25 bp, Homo sapien
tgctcccagggcaggggacaggcca

SEQ ID NO: 5759140 - DNA, 25 bp, Homo sapien
aacattgttccatggcttaagaagt

SEQ ID NO: 5759141 - DNA, 25 bp, Homo sapien
gctgaacttttccaagaacagtgag

SEQ ID NO: 5759142 - DNA, 25 bp, Homo sapien
aacgtctacgcctatgaggcagtgg

SEQ ID NO: 5759143 - DNA, 25 bp, Homo sapien
ggcagtaactggcttgtaagaggct

SEQ ID NO: 5759144 - DNA, 25 bp, Homo sapien
ccatgtccaagaagaagcccagtcg

SEQ ID NO: 5759145 - DNA, 25 bp, Homo sapien
agaggaagagccctcaaccagtgcc

SEQ ID NO: 5759146 - DNA, 25 bp, Homo sapien
ctgcagaggaggggcacagtaggac

SEQ ID NO: 5759147 - DNA, 25 bp, Homo sapien
ctgaatacactcacttttatggtgg

SEQ ID NO: 5759148 - DNA, 25 bp, Homo sapien
tttgaccactgcagtctctctctgc

SEQ ID NO: 5759149 - DNA, 25 bp, Homo sapien
ggaggtccctgatcaagctgaactt

SEQ ID NO: 5759150 - DNA, 25 bp, Homo sapien
aacaggtctcaattcttcatcacgt

SEQ ID NO: 5759151 - DNA, 25 bp, Homo sapien
ccgctccgccatggggaagcgacag

SEQ ID NO: 5759152 - DNA, 25 bp, Homo sapien
ggccgatgcccagattgcgcaggag

SEQ ID NO: 5759153 - DNA, 25 bp, Homo sapien
actgcgccatggctggctccttctc

SEQ ID NO: 5759154 - DNA, 25 bp, Homo sapien
gaccaaccccagcaatggagagaag

SEQ ID NO: 5759155 - DNA, 25 bp, Homo sapien
tgcgccatggctggctccttctctt

SEQ ID NO: 5759156 - DNA, 25 bp, Homo sapien
aacagtgaggggaagtaccactgcc

SEQ ID NO: 5759157 - DNA, 25 bp, Homo sapien
gggacgagattctggcagccaccat

SEQ ID NO: 5759158 - DNA, 25 bp, Homo sapien
cgtgggcaagtacatcaacccagca

SEQ ID NO: 5759159 - DNA, 25 bp, Homo sapien
aagacgagttccggcccaacctctc

SEQ ID NO: 5759160 - DNA, 25 bp, Homo sapien
ccatccctctgcagcctgtcatccc

SEQ ID NO: 5759161 - DNA, 25 bp, Homo sapien
cagccatggagaatgtggagagtga

SEQ ID NO: 5759162 - DNA, 25 bp, Homo sapien
gagaagaagaaagtggacaagctga

SEQ ID NO: 5759163 - DNA, 25 bp, Homo sapien
aggcacaggcacgggtggggagtca

SEQ ID NO: 5759164 - DNA, 25 bp, Homo sapien
agccagggcccccagaccttccgcc

SEQ ID NO: 5759165 - DNA, 25 bp, Homo sapien
cgtgcggctgcacaccaacaagggc

SEQ ID NO: 5759166 - DNA, 25 bp, Homo sapien
ccctgtctgtgaccattggtcgggc

SEQ ID NO: 5759167 - DNA, 25 bp, Homo sapien
gggagtcatactgggggaagccctt

SEQ ID NO: 5759168 - DNA, 25 bp, Homo sapien
tggcctcgtccactgagggcacgat

SEQ ID NO: 5759169 - DNA, 25 bp, Homo sapien
tttgcaagaagcattattacgatgg

SEQ ID NO: 5759170 - DNA, 25 bp, Homo sapien
tctgaaaaatacaaatgccgagacc

SEQ ID NO: 5759171 - DNA, 25 bp, Homo sapien
aggggacgagattctggcagccacc

SEQ ID NO: 5759172 - DNA, 25 bp, Homo sapien
ggcggtgtggccagaggacagggga

SEQ ID NO: 5759173 - DNA, 25 bp, Homo sapien
ttaatttgtagttttttagctatta

SEQ ID NO: 5759174 - DNA, 25 bp, Homo sapien
tagccccggagaccaaagtgaagag

SEQ ID NO: 5759175 - DNA, 25 bp, Homo sapien
agtgagaagcaggtttggagaggac

SEQ ID NO: 5759176 - DNA, 25 bp, Homo sapien
gccctgactgactgtattctctggc

SEQ ID NO: 5759177 - DNA, 25 bp, Homo sapien
agggcgtgggcaagtacatcaaccc

SEQ ID NO: 5759178 - DNA, 25 bp, Homo sapien
gcaagaagccagatctcccacaaac

SEQ ID NO: 5759179 - DNA, 25 bp, Homo sapien
gcattattacgatggcaccatcttc

SEQ ID NO: 5759180 - DNA, 25 bp, Homo sapien
aacatttgacatcagaagctttatt

SEQ ID NO: 5759181 - DNA, 25 bp, Homo sapien
cagccgttgttttttcgtgctcgct

SEQ ID NO: 5759182 - DNA, 25 bp, Homo sapien
aagctggacgggaggtccctgatca

SEQ ID NO: 5759183 - DNA, 25 bp, Homo sapien
tacctgtgctgaatacactcacttt

SEQ ID NO: 5759184 - DNA, 25 bp, Homo sapien
cgacgagcccttctcccggcaggac

SEQ ID NO: 5759185 - DNA, 25 bp, Homo sapien
tctttgacttactgaacattgttcc

SEQ ID NO: 5759186 - DNA, 25 bp, Homo sapien
ccgatgcccagattgcgcaggagcg

SEQ ID NO: 5759187 - DNA, 25 bp, Homo sapien
agcataccatctttggacgggttgt

SEQ ID NO: 5759188 - DNA, 25 bp, Homo sapien
acctgcgaaaacttcatcaggcttt

SEQ ID NO: 5759189 - DNA, 25 bp, Homo sapien
ctgggggaagcccttcaaagacgag

SEQ ID NO: 5759190 - DNA, 25 bp, Homo sapien
gctagtcgccgccgccgctccgcca

SEQ ID NO: 5759191 - DNA, 25 bp, Homo sapien
caggctgcctgatgaccactagagg

SEQ ID NO: 5759192 - DNA, 25 bp, Homo sapien
gactgcccaggtgtccacacacctg

SEQ ID NO: 5759193 - DNA, 25 bp, Homo sapien
aaggtcagcgcttccttcacctcca

SEQ ID NO: 5759194 - DNA, 25 bp, Homo sapien
ctgcggctccatggtctgagttgtc

SEQ ID NO: 5759195 - DNA, 25 bp, Homo sapien
gacgggaggtccctgatcaagctga

SEQ ID NO: 5759196 - DNA, 25 bp, Homo sapien
gcaacgtctacgcctatgaggcagt

SEQ ID NO: 5759197 - DNA, 25 bp, Homo sapien
agatccgcattgatgccactacagt

SEQ ID NO: 5759198 - DNA, 25 bp, Homo sapien
ggagaccacacatgaagcagctgcc

SEQ ID NO: 5759199 - DNA, 25 bp, Homo sapien
ccaggaccccaccaatttggacaag

SEQ ID NO: 5759200 - DNA, 25 bp, Homo sapien
actattccacagggaaggtcagcgc

SEQ ID NO: 5759201 - DNA, 25 bp, Homo sapien
tagcagcaggctgcctgatgaccac

SEQ ID NO: 5759202 - DNA, 25 bp, Homo sapien
agagcctgggctcagccttctgcat

SEQ ID NO: 5759203 - DNA, 25 bp, Homo sapien
tggcaccatcttccacagatccatc

SEQ ID NO: 5759204 - DNA, 25 bp, Homo sapien
acttcatcaggctttgcaagaagca

SEQ ID NO: 5759205 - DNA, 25 bp, Homo sapien
ctgtgaccattggtcgggcccctgg

SEQ ID NO: 5759206 - DNA, 25 bp, Homo sapien
tttacatttctgtagtttgtttgtt

SEQ ID NO: 5759207 - DNA, 25 bp, Homo sapien
cagataaggaccaagggctggcggt

SEQ ID NO: 5759208 - DNA, 25 bp, Homo sapien
agagctcgaagaccccaagacagcc

SEQ ID NO: 5759209 - DNA, 25 bp, Homo sapien
gctgcacaccaacaagggcgacctc

SEQ ID NO: 5759210 - DNA, 25 bp, Homo sapien
tggacgggaggtccctgatcaagct

SEQ ID NO: 5759211 - DNA, 25 bp, Homo sapien
ggggcgaccccacaggcacaggcac

SEQ ID NO: 5759212 - DNA, 25 bp, Homo sapien
gcagccaccatgaaggccccggaga

SEQ ID NO: 5759213 - DNA, 25 bp, Homo sapien
cggctgcacaccaacaagggcgacc

SEQ ID NO: 5759214 - DNA, 25 bp, Homo sapien
agctttatttgtaaacctcacacag

SEQ ID NO: 5759215 - DNA, 25 bp, Homo sapien
atggagagaagctggacgggaggtc

SEQ ID NO: 5759216 - DNA, 25 bp, Homo sapien
tattccacagggaaggtcagcgctt

SEQ ID NO: 5759217 - DNA, 25 bp, Homo sapien
attggtcgggcccctgggctctaga

SEQ ID NO: 5759218 - DNA, 25 bp, Homo sapien
gctaccagtttgtgaagaagaaggg

SEQ ID NO: 5759219 - DNA, 25 bp, Homo sapien
agggccatctgctcccagggcaggg

SEQ ID NO: 5759220 - DNA, 25 bp, Homo sapien
cactagaggtatgtctgcccctcgt

SEQ ID NO: 5759221 - DNA, 25 bp, Homo sapien
acctctcgcacacgggccgcggcat

SEQ ID NO: 5759222 - DNA, 25 bp, Homo sapien
ggcaagtacatcaacccagcagcca

SEQ ID NO: 5759223 - DNA, 25 bp, Homo sapien
ccagggcccccagaccttccgccag

SEQ ID NO: 5759224 - DNA, 25 bp, Homo sapien
tgaccccaaaactgaccgccctaag

SEQ ID NO: 5759225 - DNA, 25 bp, Homo sapien
gtcagccgttgttttttcgtgctcg

SEQ ID NO: 5759226 - DNA, 25 bp, Homo sapien
gaccgccctaaggaggagatccgca

SEQ ID NO: 5759227 - DNA, 25 bp, Homo sapien
ggagatccgcattgatgccactaca

SEQ ID NO: 5759228 - DNA, 25 bp, Homo sapien
caccaacaagggcgacctcaacctg

SEQ ID NO: 5759229 - DNA, 25 bp, Homo sapien
catcaggacatggcctcgtccactg

SEQ ID NO: 5759230 - DNA, 25 bp, Homo sapien
cgtcgtttaccttttgaccactgca

SEQ ID NO: 5759231 - DNA, 25 bp, Homo sapien
gccaccaaggacctttggcaaatga

SEQ ID NO: 5759232 - DNA, 25 bp, Homo sapien
tcctggtagcagcaggctgcctgat

SEQ ID NO: 5759233 - DNA, 25 bp, Homo sapien
aggccaagaacttccgggacctgct

SEQ ID NO: 5759234 - DNA, 25 bp, Homo sapien
aagtggacaagctgaatgctgccca

SEQ ID NO: 5759235 - DNA, 25 bp, Homo sapien
tccttgcagtgaagccaccatgggt

SEQ ID NO: 5759236 - DNA, 25 bp, Homo sapien
cggagaagaagaaagtggacaagct

SEQ ID NO: 5759237 - DNA, 25 bp, Homo sapien
ccatccctcccgccaggcactgtcc

SEQ ID NO: 5759238 - DNA, 25 bp, Homo sapien
ccaccatgggtgaccgtccagcctc

SEQ ID NO: 5759239 - DNA, 25 bp, Homo sapien
gcagaggaagagccctcaaccagtg

SEQ ID NO: 5759240 - DNA, 25 bp, Homo sapien
acaccaagctgggcctgcagaggag

SEQ ID NO: 5759241 - DNA, 25 bp, Homo sapien
attatctgaaaaatacaaatgccga

SEQ ID NO: 5759242 - DNA, 25 bp, Homo sapien
atccatccggaactttgtgatccaa

SEQ ID NO: 5759243 - DNA, 25 bp, Homo sapien
gagggaagggcttcagggccatctg

SEQ ID NO: 5759244 - DNA, 25 bp, Homo sapien
ctggcttgtaagaggctcagacacc

SEQ ID NO: 5759245 - DNA, 25 bp, Homo sapien
cgtactgacagccatggagaatgtg

SEQ ID NO: 5759246 - DNA, 25 bp, Homo sapien
gctggacgggaggtccctgatcaag

SEQ ID NO: 5759247 - DNA, 25 bp, Homo sapien
gtaaacctcacacagataaggacca

SEQ ID NO: 5759248 - DNA, 25 bp, Homo sapien
ggctccagagctcgaagaccccaag

SEQ ID NO: 5759249 - DNA, 25 bp, Homo sapien
ggggatgaaggcctgaccagggagt

SEQ ID NO: 5759250 - DNA, 25 bp, Homo sapien
gggctggcggtgtggccagaggaca

SEQ ID NO: 5759251 - DNA, 25 bp, Homo sapien
cggagaccaaagtgaagagcagcca

SEQ ID NO: 5759252 - DNA, 25 bp, Homo sapien
gcctctgagccagcgtccagggtac

SEQ ID NO: 5759253 - DNA, 25 bp, Homo sapien
tgtgctgaatacactcacttttatg

SEQ ID NO: 5759254 - DNA, 25 bp, Homo sapien
agaagcaggtttggagaggaccctg

SEQ ID NO: 5759255 - DNA, 25 bp, Homo sapien
aggcctgaccagggagtgagaagca

SEQ ID NO: 5759256 - DNA, 25 bp, Homo sapien
ctgatcaagctgaacttttccaaga

SEQ ID NO: 5759257 - DNA, 25 bp, Homo sapien
tatgaggaggccgatgcccagattg

SEQ ID NO: 5759258 - DNA, 25 bp, Homo sapien
acttttatggtggcaagaagccaga

SEQ ID NO: 5759259 - DNA, 25 bp, Homo sapien
taaacatttgacatcagaagcttta

SEQ ID NO: 5759260 - DNA, 25 bp, Homo sapien
tgttcgtggacccctatgaggaggc

SEQ ID NO: 5759261 - DNA, 25 bp, Homo sapien
agccaccatgggtgaccgtccagcc

SEQ ID NO: 5759262 - DNA, 25 bp, Homo sapien
agaacttccgggacctgctgaccga

SEQ ID NO: 5759263 - DNA, 25 bp, Homo sapien
ggcacagtaggacacagtgactgcc

SEQ ID NO: 5759264 - DNA, 25 bp, Homo sapien
ttctcttctccagcccatccctctg

SEQ ID NO: 5759265 - DNA, 25 bp, Homo sapien
actgtcctccgcaaggcctggtgca

SEQ ID NO: 5759266 - DNA, 25 bp, Homo sapien
tgaaggccccggagaagaagaaagt

SEQ ID NO: 5759267 - DNA, 25 bp, Homo sapien
agcctgggctcagccttctgcatca

SEQ ID NO: 5759268 - DNA, 25 bp, Homo sapien
gcctcgtccactgagggcacgattt

SEQ ID NO: 5759269 - DNA, 25 bp, Homo sapien
gagaaggccaaacaggacccgtctt

SEQ ID NO: 5759270 - DNA, 25 bp, Homo sapien
cgagttccggcccaacctctcgcac

SEQ ID NO: 5759271 - DNA, 25 bp, Homo sapien
gcggcgccacagagagcctgggctc

SEQ ID NO: 5759272 - DNA, 25 bp, Homo sapien
caccaaaaacctgcgaaaacttcat

SEQ ID NO: 5759273 - DNA, 25 bp, Homo sapien
catttctgtagtttgtttgttttag

SEQ ID NO: 5759274 - DNA, 25 bp, Homo sapien
tgagctcggcagtcctgctccttgc

SEQ ID NO: 5759275 - DNA, 25 bp, Homo sapien
agaagcattattacgatggcaccat

SEQ ID NO: 5759276 - DNA, 25 bp, Homo sapien
agatccatccggaactttgtgatcc

SEQ ID NO: 5759277 - DNA, 25 bp, Homo sapien
aggacctttggcaaatgaaggttta

SEQ ID NO: 5759278 - DNA, 25 bp, Homo sapien
gtggggagtcatactgggggaagcc

SEQ ID NO: 5759279 - DNA, 25 bp, Homo sapien
tgctgtttaccgtgttcaccaacaa

SEQ ID NO: 5759280 - DNA, 25 bp, Homo sapien
cagtaggacacagtgactgcccagg

SEQ ID NO: 5759281 - DNA, 25 bp, Homo sapien
acatcgtggctgtgaggacgaccgg

SEQ ID NO: 5759282 - DNA, 25 bp, Homo sapien
ctgcccagtgctgtttaccgtgttc

SEQ ID NO: 5759283 - DNA, 25 bp, Homo sapien
aaatatcaaggccaagaacttccgg

SEQ ID NO: 5759284 - DNA, 25 bp, Homo sapien
cgagcagcagaggaagagccctcaa

SEQ ID NO: 5759285 - DNA, 25 bp, Homo sapien
cgccgctccgccatggggaagcgac

SEQ ID NO: 5759286 - DNA, 25 bp, Homo sapien
gcgtccagggtacaggtgcgggtgg

SEQ ID NO: 5759287 - DNA, 25 bp, Homo sapien
gaaaacttcatcaggctttgcaaga

SEQ ID NO: 5759288 - DNA, 25 bp, Homo sapien
cgaccggcaacgtctacgcctatga

SEQ ID NO: 5759289 - DNA, 25 bp, Homo sapien
ctgaccgccctaaggaggagatccg

SEQ ID NO: 5759290 - DNA, 25 bp, Homo sapien
gccaagaacttccgggacctgctga

SEQ ID NO: 5759291 - DNA, 25 bp, Homo sapien
cagcaccaaaaggacaaaatgtaca

SEQ ID NO: 5759292 - DNA, 25 bp, Homo sapien
agagaagctggacgggaggtccctg

SEQ ID NO: 5759293 - DNA, 25 bp, Homo sapien
tctgctctcagcggcgccacagaga

SEQ ID NO: 5759294 - DNA, 25 bp, Homo sapien
ggctcagccttctgcatcaggacat

SEQ ID NO: 5759295 - DNA, 25 bp, Homo sapien
ggcatcctcagcatggccaactccg

SEQ ID NO: 5759296 - DNA, 25 bp, Homo sapien
caacctggagctgcactgcgacctg

SEQ ID NO: 5759297 - DNA, 25 bp, Homo sapien
gctttgcaagaagcattattacgat

SEQ ID NO: 5759298 - DNA, 25 bp, Homo sapien
accttttgaccactgcagtctctct

SEQ ID NO: 5759299 - DNA, 25 bp, Homo sapien
ctctgagccagcgtccagggtacag

SEQ ID NO: 5759300 - DNA, 25 bp, Homo sapien
tgctaagaacaagaactgcgccatg

SEQ ID NO: 5759301 - DNA, 25 bp, Homo sapien
aggccaaacaggacccgtcttatta

SEQ ID NO: 5759302 - DNA, 25 bp, Homo sapien
ctcgcacacgggccgcggcatcctc

SEQ ID NO: 5759303 - DNA, 25 bp, Homo sapien
agccagccccaggcagggagccagg

SEQ ID NO: 5759304 - DNA, 25 bp, Homo sapien
tgaggaggccgatgcccagattgcg

SEQ ID NO: 5759305 - DNA, 25 bp, Homo sapien
ggggaagtaccactgcccagtgctg

SEQ ID NO: 5759306 - DNA, 25 bp, Homo sapien
ccctcgtcaccctgctgcacaccaa

SEQ ID NO: 5759307 - DNA, 25 bp, Homo sapien
gaccattggtcgggcccctgggctc

SEQ ID NO: 5759308 - DNA, 25 bp, Homo sapien
ggggttttggggacttcagctcctg

SEQ ID NO: 5759309 - DNA, 25 bp, Homo sapien
gaaggtttacatttctgtagtttgt

SEQ ID NO: 5759310 - DNA, 25 bp, Homo sapien
acctgtaggcctctgagccagcgtc

SEQ ID NO: 5759311 - DNA, 25 bp, Homo sapien
gcaaggcctggtgcagccctggcag

SEQ ID NO: 5759312 - DNA, 25 bp, Homo sapien
gcccttcaaagacgagttccggccc

SEQ ID NO: 5759313 - DNA, 25 bp, Homo sapien
aaatgaaggtttacatttctgtagt

SEQ ID NO: 5759314 - DNA, 25 bp, Homo sapien
agcctgtcatccctgtctgtgacca

SEQ ID NO: 5759315 - DNA, 25 bp, Homo sapien
ggctgcctgatgaccactagaggta

SEQ ID NO: 5759316 - DNA, 25 bp, Homo sapien
agacaccaagctgggcctgcagagg

SEQ ID NO: 5759317 - DNA, 25 bp, Homo sapien
gcgcaggagcggaagacacagctca

SEQ ID NO: 5759318 - DNA, 25 bp, Homo sapien
ctccagagctcgaagaccccaagac

SEQ ID NO: 5759319 - DNA, 25 bp, Homo sapien
tgtctacccagtctgcactcccgat

SEQ ID NO: 5759320 - DNA, 25 bp, Homo sapien
tggtcgggcccctgggctctagagt

SEQ ID NO: 5759321 - DNA, 25 bp, Homo sapien
gcaaatgaaggtttacatttctgta

SEQ ID NO: 5759322 - DNA, 25 bp, Homo sapien
gatttaaacatttgacatcagaagc

SEQ ID NO: 5759323 - DNA, 25 bp, Homo sapien
gagtcatactgggggaagcccttca

SEQ ID NO: 5759324 - DNA, 25 bp, Homo sapien
catctttggacgggttgttgggggc

SEQ ID NO: 5759325 - DNA, 25 bp, Homo sapien
ctccaccgcgatggtcccggagacc

SEQ ID NO: 5759326 - DNA, 25 bp, Homo sapien
cataccatctttggacgggttgttg

SEQ ID NO: 5759327 - DNA, 25 bp, Homo sapien
tgcccagattgcgcaggagcggaag

SEQ ID NO: 5759328 - DNA, 25 bp, Homo sapien
ggctgcggctccatggtctgagttg

SEQ ID NO: 5759329 - DNA, 25 bp, Homo sapien
gggaccaaccccagcaatggagaga

SEQ ID NO: 5759330 - DNA, 25 bp, Homo sapien
cctatgaggcagtggaacagctaaa

SEQ ID NO: 5759331 - DNA, 25 bp, Homo sapien
gcgacagcaccaaaaggacaaaatg

SEQ ID NO: 5759332 - DNA, 25 bp, Homo sapien
ctctagagtgacttttgacgccctc

SEQ ID NO: 5759333 - DNA, 25 bp, Homo sapien
taagaagtacgggaccaaccccagc

SEQ ID NO: 5759334 - DNA, 25 bp, Homo sapien
ctgctgaccgacgagcccttctccc

SEQ ID NO: 5759335 - DNA, 25 bp, Homo sapien
atcaaggccaagaacttccgggacc

SEQ ID NO: 5759336 - DNA, 25 bp, Homo sapien
gcccccagaccttccgccagggcgt

SEQ ID NO: 5759337 - DNA, 25 bp, Homo sapien
agaccttccgccagggcgtgggcaa

SEQ ID NO: 5759338 - DNA, 25 bp, Homo sapien
ctccgggcccaacagcaacaggtct

SEQ ID NO: 5759339 - DNA, 25 bp, Homo sapien
tggctgtgaggacgaccggcaacgt

SEQ ID NO: 5759340 - DNA, 25 bp, Homo sapien
agcaggctgcctgatgaccactaga

SEQ ID NO: 5759341 - DNA, 25 bp, Homo sapien
gcccagtgctgtttaccgtgttcac

SEQ ID NO: 5759342 - DNA, 25 bp, Homo sapien
cctggctggccctgactgactgtat

SEQ ID NO: 5759343 - DNA, 25 bp, Homo sapien
ccgggcccaacagcaacaggtctca

SEQ ID NO: 5759344 - DNA, 25 bp, Homo sapien
aagaagcataccatctttggacggg

SEQ ID NO: 5759345 - DNA, 25 bp, Homo sapien
caggccatccttggctccagagctc

SEQ ID NO: 5759346 - DNA, 25 bp, Homo sapien
gacatcatcaccctccaggacccca

SEQ ID NO: 5759347 - DNA, 25 bp, Homo sapien
cggcaacgtctacgcctatgaggca

SEQ ID NO: 5759348 - DNA, 25 bp, Homo sapien
ccaccgcgatggtcccggagaccac

SEQ ID NO: 5759349 - DNA, 25 bp, Homo sapien
accaatctgtggcccttcatcatgc

SEQ ID NO: 5759350 - DNA, 25 bp, Homo sapien
tttgtttgttttagagcttaatttg

SEQ ID NO: 5759351 - DNA, 25 bp, Homo sapien
aggaagagccctcaaccagtgccac

SEQ ID NO: 5759352 - DNA, 25 bp, Homo sapien
ccacatcgtggctgtgaggacgacc

SEQ ID NO: 5759353 - DNA, 25 bp, Homo sapien
acagacaccctggctggccctgact

SEQ ID NO: 5759354 - DNA, 25 bp, Homo sapien
tgcgacctgacaccaaaaacctgcg

SEQ ID NO: 5759355 - DNA, 25 bp, Homo sapien
gaagagccctcaaccagtgccactg

SEQ ID NO: 5759356 - DNA, 25 bp, Homo sapien
gccttctgcatcaggacatggcctc

SEQ ID NO: 5759357 - DNA, 25 bp, Homo sapien
acctgacaccaaaaacctgcgaaaa

SEQ ID NO: 5759358 - DNA, 25 bp, Homo sapien
atgtctgcccctcgtcaccctgctg

SEQ ID NO: 5759359 - DNA, 25 bp, Homo sapien
gtttggagaggaccctgtgcccacc

SEQ ID NO: 5759360 - DNA, 25 bp, Homo sapien
atgtacattacctgtgctgaataca

SEQ ID NO: 5759361 - DNA, 25 bp, Homo sapien
accctgctgcacaccaatctgtggc

SEQ ID NO: 5759362 - DNA, 25 bp, Homo sapien
ctaaatatcaaggccaagaacttcc

SEQ ID NO: 5759363 - DNA, 25 bp, Homo sapien
tacaaggagttcaaaggggacgaga

SEQ ID NO: 5759364 - DNA, 25 bp, Homo sapien
gcggaagacacagctcaaggtagcc

SEQ ID NO: 5759365 - DNA, 25 bp, Homo sapien
ctcgtcaccctgctgcacaccaatc

SEQ ID NO: 5759366 - DNA, 25 bp, Homo sapien
tggacaagttcaatgtctctaactt

SEQ ID NO: 5759367 - DNA, 25 bp, Homo sapien
cccttcatcatgctaagaacaagaa

SEQ ID NO: 5759368 - DNA, 25 bp, Homo sapien
tctctctgcagccctttgtctaccc

SEQ ID NO: 5759369 - DNA, 25 bp, Homo sapien
gacaaaatgtacattacctgtgctg

SEQ ID NO: 5759370 - DNA, 25 bp, Homo sapien
gttgggggctttgacgtactgacag

SEQ ID NO: 5759371 - DNA, 25 bp, Homo sapien
caaccagtgccactgtccccatgtc

SEQ ID NO: 5759372 - DNA, 25 bp, Homo sapien
ttgtgatccaagggggcgaccccac

SEQ ID NO: 5759373 - DNA, 25 bp, Homo sapien
gataaggaccaagggctggcggtgt

SEQ ID NO: 5759374 - DNA, 25 bp, Homo sapien
ccaaaactgaccgccctaaggagga

SEQ ID NO: 5759375 - DNA, 25 bp, Homo sapien
atgaaggcctgaccagggagtgaga

SEQ ID NO: 5759376 - DNA, 25 bp, Homo sapien
aacttctatcatgtgaagaataaca

SEQ ID NO: 5759377 - DNA, 25 bp, Homo sapien
ttcaaagacgagttccggcccaacc

SEQ ID NO: 5759378 - DNA, 25 bp, Homo sapien
aacaggacccgtcttattatctgaa

SEQ ID NO: 5759379 - DNA, 25 bp, Homo sapien
ccttcaaagacgagttccggcccaa

SEQ ID NO: 5759380 - DNA, 25 bp, Homo sapien
tcatccctgtctgtgaccattggtc

SEQ ID NO: 5759381 - DNA, 25 bp, Homo sapien
tacatttctgtagtttgtttgtttt

SEQ ID NO: 5759382 - DNA, 25 bp, Homo sapien
tcctgctccttgcagtgaagccacc

SEQ ID NO: 5759383 - DNA, 25 bp, Homo sapien
ggcccttcatcatgctaagaacaag

SEQ ID NO: 5759384 - DNA, 25 bp, Homo sapien
agccctcaaccagtgccactgtccc

SEQ ID NO: 5759385 - DNA, 25 bp, Homo sapien
ctgtctgtgaccattggtcgggccc

SEQ ID NO: 5759386 - DNA, 25 bp, Homo sapien
ttggggacttcagctcctggtagca

SEQ ID NO: 5759387 - DNA, 25 bp, Homo sapien
agccaccgagcagcagaggaagagc

SEQ ID NO: 5759388 - DNA, 25 bp, Homo sapien
acttcagctcctggtagcagcaggc

SEQ ID NO: 5759389 - DNA, 25 bp, Homo sapien
ctgacaccaaaaacctgcgaaaact

SEQ ID NO: 5759390 - DNA, 25 bp, Homo sapien
cgagacccgagagaccctgcaggag

SEQ ID NO: 5759391 - DNA, 25 bp, Homo sapien
tcaaaggggacgagattctggcagc

SEQ ID NO: 5759392 - DNA, 25 bp, Homo sapien
ggcgtgggcaagtacatcaacccag

SEQ ID NO: 5759393 - DNA, 25 bp, Homo sapien
ctgccatcgacgaggatgtgctgcg

SEQ ID NO: 5759394 - DNA, 25 bp, Homo sapien
gtctgtgaccattggtcgggcccct

SEQ ID NO: 5759395 - DNA, 25 bp, Homo sapien
cacagtgactgcccaggtgtccaca

SEQ ID NO: 5759396 - DNA, 25 bp, Homo sapien
aacaacacccacatcgtggctgtga

SEQ ID NO: 5759397 - DNA, 25 bp, Homo sapien
aagagaaggccaaacaggacccgtc

SEQ ID NO: 5759398 - DNA, 25 bp, Homo sapien
aactttgtgatccaagggggcgacc

SEQ ID NO: 5759399 - DNA, 25 bp, Homo sapien
cgatggtcccggagaccacacatga

SEQ ID NO: 5759400 - DNA, 25 bp, Homo sapien
tcgtttaccttttgaccactgcagt

SEQ ID NO: 5759401 - DNA, 25 bp, Homo sapien
atcaccctccaggaccccaccaatt

SEQ ID NO: 5759402 - DNA, 25 bp, Homo sapien
cctatgaggaggccgatgcccagat

SEQ ID NO: 5759403 - DNA, 25 bp, Homo sapien
ggccatccttggctccagagctcga

SEQ ID NO: 5759404 - DNA, 25 bp, Homo sapien
ttggctccagagctcgaagacccca

SEQ ID NO: 5759405 - DNA, 25 bp, Homo sapien
tattacgatggcaccatcttccaca

SEQ ID NO: 5759406 - DNA, 25 bp, Homo sapien
agggagccagggcccccagaccttc

SEQ ID NO: 5759407 - DNA, 25 bp, Homo sapien
gtcttattatctgaaaaatacaaat

SEQ ID NO: 5759408 - DNA, 25 bp, Homo sapien
cccagattgcgcaggagcggaagac

SEQ ID NO: 5759409 - DNA, 25 bp, Homo sapien
cttccgggacctgctgaccgacgag

SEQ ID NO: 5759410 - DNA, 25 bp, Homo sapien
tcatcacgtttcgctcctgtgccta

SEQ ID NO: 5759411 - DNA, 25 bp, Homo sapien
tttaaacatttgacatcagaagctt

SEQ ID NO: 5759412 - DNA, 25 bp, Homo sapien
tcaaggtagccccggagaccaaagt

SEQ ID NO: 5759413 - DNA, 25 bp, Homo sapien
ttcaccaacaacacccacatcgtgg

SEQ ID NO: 5759414 - DNA, 25 bp, Homo sapien
gcagcctgtcatccctgtctgtgac

SEQ ID NO: 5759415 - DNA, 25 bp, Homo sapien
gtttaccgtgttcaccaacaacacc

SEQ ID NO: 5759416 - DNA, 25 bp, Homo sapien
gcgaaaacttcatcaggctttgcaa

SEQ ID NO: 5759417 - DNA, 25 bp, Homo sapien
agccccaggcagggagccagggccc

SEQ ID NO: 5759418 - DNA, 25 bp, Homo sapien
caggtctcaattcttcatcacgttt

SEQ ID NO: 5759419 - DNA, 25 bp, Homo sapien
caggggacaggccaccaaggacctt

SEQ ID NO: 5759420 - DNA, 25 bp, Homo sapien
acaggccaccaaggacctttggcaa

SEQ ID NO: 5759421 - DNA, 25 bp, Homo sapien
aggcagtggaacagctaaatatcaa

SEQ ID NO: 5759422 - DNA, 25 bp, Homo sapien
caaggccaagaacttccgggacctg

SEQ ID NO: 5759423 - DNA, 25 bp, Homo sapien
attctggcagccaccatgaaggccc

SEQ ID NO: 5759424 - DNA, 25 bp, Homo sapien
cactacagtgttcgtggacccctat

SEQ ID NO: 5759425 - DNA, 25 bp, Homo sapien
agttgtcagccgttgttttttcgtg

SEQ ID NO: 5759426 - DNA, 25 bp, Homo sapien
ccacagatccatccggaactttgtg

SEQ ID NO: 5759427 - DNA, 25 bp, Homo sapien
cgccctccatccctcccgccaggca

SEQ ID NO: 5759428 - DNA, 25 bp, Homo sapien
ggaagtaccactgcccagtgctgtt

SEQ ID NO: 5759429 - DNA, 25 bp, Homo sapien
ctggagctgcactgcgacctgacac

SEQ ID NO: 5759430 - DNA, 25 bp, Homo sapien
aggacgaccggcaacgtctacgcct

SEQ ID NO: 5759431 - DNA, 25 bp, Homo sapien
gaggggcacagtaggacacagtgac

SEQ ID NO: 5759432 - DNA, 25 bp, Homo sapien
tcaccctgctgcacaccaatctgtg

SEQ ID NO: 5759433 - DNA, 25 bp, Homo sapien
tccagcctcacccggtggcctgcac

SEQ ID NO: 5759434 - DNA, 25 bp, Homo sapien
gagggcacgatttaaacatttgaca

SEQ ID NO: 5759435 - DNA, 25 bp, Homo sapien
caatctgtggcccttcatcatgcta

SEQ ID NO: 5759436 - DNA, 25 bp, Homo sapien
gctgtgaggacgaccggcaacgtct

SEQ ID NO: 5759437 - DNA, 25 bp, Homo sapien
tctctctctgcagccctttgtctac

SEQ ID NO: 5759438 - DNA, 25 bp, Homo sapien
agatctcccacaaacaaattttcgt

SEQ ID NO: 5759439 - DNA, 25 bp, Homo sapien
cccggcaggacatcatcaccctcca

SEQ ID NO: 5759440 - DNA, 25 bp, Homo sapien
aggacaggggaagctgaaggccccg

SEQ ID NO: 5759441 - DNA, 25 bp, Homo sapien
gacagccctctgctctcagcggcgc

SEQ ID NO: 5759442 - DNA, 25 bp, Homo sapien
actgactgtattctctggccacatt

SEQ ID NO: 5759443 - DNA, 25 bp, Homo sapien
gggcacgatttaaacatttgacatc

SEQ ID NO: 5759444 - DNA, 25 bp, Homo sapien
ctcccggcaggacatcatcaccctc

SEQ ID NO: 5759445 - DNA, 25 bp, Homo sapien
agctcggcagtcctgctccttgcag

SEQ ID NO: 5759446 - DNA, 25 bp, Homo sapien
cgggcccctgggctctagagtgact

SEQ ID NO: 5759447 - DNA, 25 bp, Homo sapien
cacacatgaagcagctgccatcgac

SEQ ID NO: 5759448 - DNA, 25 bp, Homo sapien
cacagataaggaccaagggctggcg

SEQ ID NO: 5759449 - DNA, 25 bp, Homo sapien
actgaacattgttccatggcttaag

SEQ ID NO: 5759450 - DNA, 25 bp, Homo sapien
cacaccaacaagggcgacctcaacc

SEQ ID NO: 5759451 - DNA, 25 bp, Homo sapien
catgggtgaccgtccagcctcaccc

SEQ ID NO: 5759452 - DNA, 25 bp, Homo sapien
cagtgccactgtccccatgtccaag

SEQ ID NO: 5759453 - DNA, 25 bp, Homo sapien
agcagcagaggaagagccctcaacc

SEQ ID NO: 5759454 - DNA, 25 bp, Homo sapien
ctgcctgatgaccactagaggtatg

SEQ ID NO: 5759455 - DNA, 25 bp, Homo sapien
cgccaggcactgtcctccgcaaggc

SEQ ID NO: 5759456 - DNA, 25 bp, Homo sapien
tcagacaccaagctgggcctgcaga

SEQ ID NO: 5759457 - DNA, 25 bp, Homo sapien
gcactgcgacctgacaccaaaaacc

SEQ ID NO: 5759458 - DNA, 25 bp, Homo sapien
tgggctcagccttctgcatcaggac

SEQ ID NO: 5759459 - DNA, 25 bp, Homo sapien
acctcaacctggagctgcactgcga

SEQ ID NO: 5759460 - DNA, 25 bp, Homo sapien
ccttctcccggcaggacatcatcac

SEQ ID NO: 5759461 - DNA, 25 bp, Homo sapien
aggagcggaagacacagctcaaggt

SEQ ID NO: 5759462 - DNA, 25 bp, Homo sapien
aaagtgaagagcagccagccccagg

SEQ ID NO: 5759463 - DNA, 25 bp, Homo sapien
gatgcccagattgcgcaggagcgga

SEQ ID NO: 5759464 - DNA, 25 bp, Homo sapien
catgaaggccccggagaagaagaaa

SEQ ID NO: 5759465 - DNA, 25 bp, Homo sapien
catactgggggaagcccttcaaaga

SEQ ID NO: 5759466 - DNA, 25 bp, Homo sapien
actgtattctctggccacattcaag

SEQ ID NO: 5759467 - DNA, 25 bp, Homo sapien
ccctcaaccagtgccactgtcccca

SEQ ID NO: 5759468 - DNA, 25 bp, Homo sapien
atggggaagcgacagcaccaaaagg

SEQ ID NO: 5759469 - DNA, 25 bp, Homo sapien
gcacaccaatctgtggcccttcatc

SEQ ID NO: 5759470 - DNA, 25 bp, Homo sapien
catttgacatcagaagctttatttg

SEQ ID NO: 5759471 - DNA, 25 bp, Homo sapien
ccccatgtccaagaagaagcccagt

SEQ ID NO: 5759472 - DNA, 25 bp, Homo sapien
aagaccccaagacagccctctgctc

SEQ ID NO: 5759473 - DNA, 25 bp, Homo sapien
tgtattctctggccacattcaagtc

SEQ ID NO: 5759474 - DNA, 25 bp, Homo sapien
ccagcaatggagagaagctggacgg

SEQ ID NO: 5759475 - DNA, 25 bp, Homo sapien
tattctctggccacattcaagtccc

SEQ ID NO: 5759476 - DNA, 25 bp, Homo sapien
cttctatcatgtgaagaataacatg

SEQ ID NO: 5759477 - DNA, 25 bp, Homo sapien
gcccaggtgtccacacacctgtagg

SEQ ID NO: 5759478 - DNA, 25 bp, Homo sapien
acttactgaacattgttccatggct

SEQ ID NO: 5759479 - DNA, 25 bp, Homo sapien
catcctcagcatggccaactccggg

SEQ ID NO: 5759480 - DNA, 25 bp, Homo sapien
tttgttttagagcttaatttgtagt

SEQ ID NO: 5759481 - DNA, 25 bp, Homo sapien
tcacttttatggtggcaagaagcca

SEQ ID NO: 5759482 - DNA, 25 bp, Homo sapien
catgaagcagctgccatcgacgagg

SEQ ID NO: 5759483 - DNA, 25 bp, Homo sapien
gaagcataccatctttggacgggtt

SEQ ID NO: 5759484 - DNA, 25 bp, Homo sapien
cccagtctgcactcccgatggcatc

SEQ ID NO: 5759485 - DNA, 25 bp, Homo sapien
ccatggggaagcgacagcaccaaaa

SEQ ID NO: 5759486 - DNA, 25 bp, Homo sapien
ctggctccttctcttctccagccca

SEQ ID NO: 5759487 - DNA, 25 bp, Homo sapien
agacaccctggctggccctgactga

SEQ ID NO: 5759488 - DNA, 25 bp, Homo sapien
acaccctggctggccctgactgact

SEQ ID NO: 5759489 - DNA, 25 bp, Homo sapien
ccagaccttccgccagggcgtgggc

SEQ ID NO: 5759490 - DNA, 25 bp, Homo sapien
tgcggctgcacaccaacaagggcga

SEQ ID NO: 5759491 - DNA, 25 bp, Homo sapien
agagcttaatttgtagttttttagc

SEQ ID NO: 5759492 - DNA, 25 bp, Homo sapien
gaccagggagtgagaagcaggtttg

SEQ ID NO: 5759493 - DNA, 25 bp, Homo sapien
ctgtggcccttcatcatgctaagaa

SEQ ID NO: 5759494 - DNA, 25 bp, Homo sapien
tgaaaaatacaaatgccgagacccg

SEQ ID NO: 5759495 - DNA, 25 bp, Homo sapien
agctaaatatcaaggccaagaactt

SEQ ID NO: 5759496 - DNA, 25 bp, Homo sapien
tgttcaccaacaacacccacatcgt

SEQ ID NO: 5759497 - DNA, 25 bp, Homo sapien
agctcgaagaccccaagacagccct

SEQ ID NO: 5759498 - DNA, 25 bp, Homo sapien
gtgcccaccctgacagacaccctgg

SEQ ID NO: 5759499 - DNA, 25 bp, Homo sapien
atctcccacaaacaaattttcgtcg

SEQ ID NO: 5759500 - DNA, 25 bp, Homo sapien
ggcctggtgcagccctggcagtaac

SEQ ID NO: 5759501 - DNA, 25 bp, Homo sapien
tgcagtgaagccaccatgggtgacc

SEQ ID NO: 5759502 - DNA, 25 bp, Homo sapien
actcggctgcggctccatggtctga

SEQ ID NO: 5759503 - DNA, 25 bp, Homo sapien
tgagttgtcagccgttgttttttcg

SEQ ID NO: 5759504 - DNA, 25 bp, Homo sapien
caaggagttcaaaggggacgagatt

SEQ ID NO: 5759505 - DNA, 25 bp, Homo sapien
ccaacaagggcgacctcaacctgga

SEQ ID NO: 5759506 - DNA, 25 bp, Homo sapien
gaccctgtgcccaccctgacagaca

SEQ ID NO: 5759507 - DNA, 25 bp, Homo sapien
agagtgaccccaaaactgaccgccc

SEQ ID NO: 5759508 - DNA, 25 bp, Homo sapien
tgctgaatacactcacttttatggt

SEQ ID NO: 5759509 - DNA, 25 bp, Homo sapien
ccaactccgggcccaacagcaacag

SEQ ID NO: 5759510 - DNA, 25 bp, Homo sapien
gtggagagtgaccccaaaactgacc

SEQ ID NO: 5759511 - DNA, 25 bp, Homo sapien
gagaccaaagtgaagagcagccagc

SEQ ID NO: 5759512 - DNA, 25 bp, Homo sapien
gtccagggtacaggtgcgggtggtg

SEQ ID NO: 5759513 - DNA, 25 bp, Homo sapien
tcgctagtcgccgccgccgctccgc

SEQ ID NO: 5759514 - DNA, 25 bp, Homo sapien
ggttgttgggggctttgacgtactg

SEQ ID NO: 5759515 - DNA, 25 bp, Homo sapien
cttgtaagaggctcagacaccaagc

SEQ ID NO: 5759516 - DNA, 25 bp, Homo sapien
caccaacaacacccacatcgtggct

SEQ ID NO: 5759517 - DNA, 25 bp, Homo sapien
gcaccatcttccacagatccatccg

SEQ ID NO: 5759518 - DNA, 25 bp, Homo sapien
gtttaccttttgaccactgcagtct

SEQ ID NO: 5759519 - DNA, 25 bp, Homo sapien
ccaaaaacctgcgaaaacttcatca

SEQ ID NO: 5759520 - DNA, 25 bp, Homo sapien
gtgcctacctggacaagaagcatac

SEQ ID NO: 5759521 - DNA, 25 bp, Homo sapien
cactgcagtctctctctgcagccct

SEQ ID NO: 5759522 - DNA, 25 bp, Homo sapien
accactagaggtatgtctgcccctc

SEQ ID NO: 5759523 - DNA, 25 bp, Homo sapien
tatctgaaaaatacaaatgccgaga

SEQ ID NO: 5759524 - DNA, 25 bp, Homo sapien
acgggaccaaccccagcaatggaga

SEQ ID NO: 5759525 - DNA, 25 bp, Homo sapien
cagcctcacccggtggcctgcacag

SEQ ID NO: 5759526 - DNA, 25 bp, Homo sapien
cactgcccagtgctgtttaccgtgt

SEQ ID NO: 5759527 - DNA, 25 bp, Homo sapien
gctattaaaaccatttgaattttta

SEQ ID NO: 5759528 - DNA, 25 bp, Homo sapien
ggctctagagtgacttttgacgccc

SEQ ID NO: 5759529 - DNA, 25 bp, Homo sapien
ggatgaaggcctgaccagggagtga

SEQ ID NO: 5759530 - DNA, 25 bp, Homo sapien
caatgtctctaacttctatcatgtg

SEQ ID NO: 5759531 - DNA, 25 bp, Homo sapien
tagtcgccgccgccgctccgccatg

SEQ ID NO: 5759532 - DNA, 25 bp, Homo sapien
aagtacgggaccaaccccagcaatg

SEQ ID NO: 5759533 - DNA, 25 bp, Homo sapien
acaagaagcataccatctttggacg

SEQ ID NO: 5759534 - DNA, 25 bp, Homo sapien
ctctaacttctatcatgtgaagaat

SEQ ID NO: 5759535 - DNA, 25 bp, Homo sapien
ctgcccaggtgtccacacacctgta

SEQ ID NO: 5759536 - DNA, 25 bp, Homo sapien
tctgcatcaggacatggcctcgtcc

SEQ ID NO: 5759537 - DNA, 25 bp, Homo sapien
agtttgtgaagaagaagggctacgt

SEQ ID NO: 5759538 - DNA, 25 bp, Homo sapien
ccccagcaatggagagaagctggac

SEQ ID NO: 5759539 - DNA, 25 bp, Homo sapien
aacccagcagccaccgagcagcaga

SEQ ID NO: 5759540 - DNA, 25 bp, Homo sapien
ccttctcttctccagcccatccctc

SEQ ID NO: 5759541 - DNA, 25 bp, Homo sapien
gtctgcccctcgtcaccctgctgca

SEQ ID NO: 5759542 - DNA, 25 bp, Homo sapien
acactcacttttatggtggcaagaa

SEQ ID NO: 5759543 - DNA, 25 bp, Homo sapien
aagctgaatgctgcccactattcca

SEQ ID NO: 5759544 - DNA, 25 bp, Homo sapien
tggcaagaagccagatctcccacaa

SEQ ID NO: 5759545 - DNA, 25 bp, Homo sapien
gctcctgtgcctacctggacaagaa

SEQ ID NO: 5759546 - DNA, 25 bp, Homo sapien
ctggacaagaagcataccatctttg

SEQ ID NO: 5759547 - DNA, 25 bp, Homo sapien
aggatgtgctgcgctaccagtttgt

SEQ ID NO: 5759548 - DNA, 25 bp, Homo sapien
aacttccgggacctgctgaccgacg

SEQ ID NO: 5759549 - DNA, 25 bp, Homo sapien
tggccctgactgactgtattctctg

SEQ ID NO: 5759550 - DNA, 25 bp, Homo sapien
gacaccaaaaacctgcgaaaacttc

SEQ ID NO: 5759551 - DNA, 25 bp, Homo sapien
aagcagctgccatcgacgaggatgt

SEQ ID NO: 5759552 - DNA, 25 bp, Homo sapien
ttcgtcgtttaccttttgaccactg

SEQ ID NO: 5759553 - DNA, 25 bp, Homo sapien
cacatgaagcagctgccatcgacga

SEQ ID NO: 5759554 - DNA, 25 bp, Homo sapien
tcacctccaccgcgatggtcccgga

SEQ ID NO: 5759555 - DNA, 25 bp, Homo sapien
tgacttttgacgccctccatccctc

SEQ ID NO: 5759556 - DNA, 25 bp, Homo sapien
cagatgaagagaaggccaaacagga

SEQ ID NO: 5759557 - DNA, 25 bp, Homo sapien
gcacaggcacgggtggggagtcata

SEQ ID NO: 5759558 - DNA, 25 bp, Homo sapien
ctcttctccagcccatccctctgca

SEQ ID NO: 5759559 - DNA, 25 bp, Homo sapien
ggctccatggtctgagttgtcagcc

SEQ ID NO: 5759560 - DNA, 25 bp, Homo sapien
aggtttggagaggaccctgtgccca

SEQ ID NO: 5759561 - DNA, 25 bp, Homo sapien
ctacctggacaagaagcataccatc

SEQ ID NO: 5759562 - DNA, 25 bp, Homo sapien
gccctaaggaggagatccgcattga

SEQ ID NO: 5759563 - DNA, 25 bp, Homo sapien
gctggccctgactgactgtattctc

SEQ ID NO: 5759564 - DNA, 25 bp, Homo sapien
atcgtggctgtgaggacgaccggca

SEQ ID NO: 5759565 - DNA, 25 bp, Homo sapien
atttgtaaacctcacacagataagg

SEQ ID NO: 5759566 - DNA, 25 bp, Homo sapien
ccagggcgtgggcaagtacatcaac

SEQ ID NO: 5759567 - DNA, 25 bp, Homo sapien
catggagaatgtggagagtgacccc

SEQ ID NO: 5759568 - DNA, 25 bp, Homo sapien
gacacagtgactgcccaggtgtcca

SEQ ID NO: 5759569 - DNA, 25 bp, Homo sapien
ccggcccaacctctcgcacacgggc

SEQ ID NO: 5759570 - DNA, 25 bp, Homo sapien
ctccttctcttctccagcccatccc

SEQ ID NO: 5759571 - DNA, 25 bp, Homo sapien
aggccccggagaagaagaaagtgga

SEQ ID NO: 5759572 - DNA, 25 bp, Homo sapien
ttttagctattaaaaccatttgaat

SEQ ID NO: 5759573 - DNA, 25 bp, Homo sapien
atatcaaggccaagaacttccggga

SEQ ID NO: 5759574 - DNA, 25 bp, Homo sapien
attcaagtcccccattggtgggggc

SEQ ID NO: 5759575 - DNA, 25 bp, Homo sapien
agaggctcagacaccaagctgggcc

SEQ ID NO: 5759576 - DNA, 25 bp, Homo sapien
cgtggctgtgaggacgaccggcaac

SEQ ID NO: 5759577 - DNA, 25 bp, Homo sapien
ggacaggccaccaaggacctttggc

SEQ ID NO: 5759578 - DNA, 25 bp, Homo sapien
tggcctggtcctacttctctgcccc

SEQ ID NO: 5759579 - DNA, 25 bp, Homo sapien
ttggtcccgtacttcttaagccatg

SEQ ID NO: 5759580 - DNA, 25 bp, Homo sapien
tcacccatggtggcttcactgcaag

SEQ ID NO: 5759581 - DNA, 25 bp, Homo sapien
ctgttgctgttgggcccggagttgg

SEQ ID NO: 5759582 - DNA, 25 bp, Homo sapien
cgggtctcggcatttgtatttttca

SEQ ID NO: 5759583 - DNA, 25 bp, Homo sapien
ctgatgtcaaatgtttaaatcgtgc

SEQ ID NO: 5759584 - DNA, 25 bp, Homo sapien
atcagggacctcccgtccagcttct

SEQ ID NO: 5759585 - DNA, 25 bp, Homo sapien
gcagtgcagctccaggttgaggtcg

SEQ ID NO: 5759586 - DNA, 25 bp, Homo sapien
cgagcacgaaaaaacaacggctgac

SEQ ID NO: 5759587 - DNA, 25 bp, Homo sapien
atggcagctgcttcatgtgtggtct

SEQ ID NO: 5759588 - DNA, 25 bp, Homo sapien
gtcctcacagccacgatgtgggtgt

SEQ ID NO: 5759589 - DNA, 25 bp, Homo sapien
ttcacatgatagaagttagagacat

SEQ ID NO: 5759590 - DNA, 25 bp, Homo sapien
tcagcaggtcccggaagttcttggc

SEQ ID NO: 5759591 - DNA, 25 bp, Homo sapien
gtacttcttaagccatggaacaatg

SEQ ID NO: 5759592 - DNA, 25 bp, Homo sapien
gaggtttacaaataaagcttctgat

SEQ ID NO: 5759593 - DNA, 25 bp, Homo sapien
ggccacaccgccagcccttggtcct

SEQ ID NO: 5759594 - DNA, 25 bp, Homo sapien
tcttcttctccggggccttcatggt

SEQ ID NO: 5759595 - DNA, 25 bp, Homo sapien
gtcctactgtgcccctcctctgcag

SEQ ID NO: 5759596 - DNA, 25 bp, Homo sapien
tgaagcccttccctcactgtgcagg

SEQ ID NO: 5759597 - DNA, 25 bp, Homo sapien
gacaactcagaccatggagccgcag

SEQ ID NO: 5759598 - DNA, 25 bp, Homo sapien
gatgtgggtgttgttggtgaacacg

SEQ ID NO: 5759599 - DNA, 25 bp, Homo sapien
ttcatccccaccacccgcacctgta

SEQ ID NO: 5759600 - DNA, 25 bp, Homo sapien
accccgactgggcttcttcttggac

SEQ ID NO: 5759601 - DNA, 25 bp, Homo sapien
tttggtgtcaggtcgcagtgcagct

SEQ ID NO: 5759602 - DNA, 25 bp, Homo sapien
agcaggactgccgagctcaagcacg

SEQ ID NO: 5759603 - DNA, 25 bp, Homo sapien
tgtgtggacacctgggcagtcactg

SEQ ID NO: 5759604 - DNA, 25 bp, Homo sapien
tggctccctgcctggggctggctgc

SEQ ID NO: 5759605 - DNA, 25 bp, Homo sapien
agaagttagagacattgaacttgtc

SEQ ID NO: 5759606 - DNA, 25 bp, Homo sapien
ttggtggggtcctggagggtgatga

SEQ ID NO: 5759607 - DNA, 25 bp, Homo sapien
tctccggggccttcatggtggctgc

SEQ ID NO: 5759608 - DNA, 25 bp, Homo sapien
gagggctcttcctctgctgctcggt

SEQ ID NO: 5759609 - DNA, 25 bp, Homo sapien
gcgactagcgagcacgaaaaaacaa

SEQ ID NO: 5759610 - DNA, 25 bp, Homo sapien
cgtcggtcagcaggtcccggaagtt

SEQ ID NO: 5759611 - DNA, 25 bp, Homo sapien
ataagacgggtcctgtttggccttc

SEQ ID NO: 5759612 - DNA, 25 bp, Homo sapien
gggccacagattggtgtgcagcagg

SEQ ID NO: 5759613 - DNA, 25 bp, Homo sapien
tcgtcccctttgaactccttgtaga

SEQ ID NO: 5759614 - DNA, 25 bp, Homo sapien
cagcagggtgacgaggggcagacat

SEQ ID NO: 5759615 - DNA, 25 bp, Homo sapien
cctctgcaggcccagcttggtgtct

SEQ ID NO: 5759616 - DNA, 25 bp, Homo sapien
acatcctcgtcgatggcagctgctt

SEQ ID NO: 5759617 - DNA, 25 bp, Homo sapien
caggtcgcagtgcagctccaggttg

SEQ ID NO: 5759618 - DNA, 25 bp, Homo sapien
cgctgagagcagagggctgtcttgg

SEQ ID NO: 5759619 - DNA, 25 bp, Homo sapien
gtccagcttctctccattgctgggg

SEQ ID NO: 5759620 - DNA, 25 bp, Homo sapien
gcatcggcctcctcataggggtcca

SEQ ID NO: 5759621 - DNA, 25 bp, Homo sapien
gtgtcaggtcgcagtgcagctccag

SEQ ID NO: 5759622 - DNA, 25 bp, Homo sapien
gaggtgaaggaagcgctgaccttcc

SEQ ID NO: 5759623 - DNA, 25 bp, Homo sapien
gttagagacattgaacttgtccaaa

SEQ ID NO: 5759624 - DNA, 25 bp, Homo sapien
tccgctcctgcgcaatctgggcatc

SEQ ID NO: 5759625 - DNA, 25 bp, Homo sapien
ttggatcacaaagttccggatggat

SEQ ID NO: 5759626 - DNA, 25 bp, Homo sapien
aaggagcaggactgccgagctcaag

SEQ ID NO: 5759627 - DNA, 25 bp, Homo sapien
agacctgttgctgttgggcccggag

SEQ ID NO: 5759628 - DNA, 25 bp, Homo sapien
ggtcgtcctcacagccacgatgtgg

SEQ ID NO: 5759629 - DNA, 25 bp, Homo sapien
attcagcttgtccactttcttcttc

SEQ ID NO: 5759630 - DNA, 25 bp, Homo sapien
tcataggggtccacgaacactgtag

SEQ ID NO: 5759631 - DNA, 25 bp, Homo sapien
gccctgaagcccttccctcactgtg

SEQ ID NO: 5759632 - DNA, 25 bp, Homo sapien
ctaaaacaaacaaactacagaaatg

SEQ ID NO: 5759633 - DNA, 25 bp, Homo sapien
agtgtattcagcacaggtaatgtac

SEQ ID NO: 5759634 - DNA, 25 bp, Homo sapien
atggtggctgccagaatctcgtccc

SEQ ID NO: 5759635 - DNA, 25 bp, Homo sapien
gtctgggggccctggctccctgcct

SEQ ID NO: 5759636 - DNA, 25 bp, Homo sapien
caggttgaggtcgcccttgttggtg

SEQ ID NO: 5759637 - DNA, 25 bp, Homo sapien
caggagctgaagtccccaaaacccc

SEQ ID NO: 5759638 - DNA, 25 bp, Homo sapien
tcgcccttgttggtgtgcagccgca

SEQ ID NO: 5759639 - DNA, 25 bp, Homo sapien
tgtctgagcctcttacaagccagtt

SEQ ID NO: 5759640 - DNA, 25 bp, Homo sapien
gaactcgtctttgaagggcttcccc

SEQ ID NO: 5759641 - DNA, 25 bp, Homo sapien
ccaggggcccgaccaatggtcacag

SEQ ID NO: 5759642 - DNA, 25 bp, Homo sapien
gctgcagagggatgggctggagaag

SEQ ID NO: 5759643 - DNA, 25 bp, Homo sapien
gattggtgtgcagcagggtgacgag

SEQ ID NO: 5759644 - DNA, 25 bp, Homo sapien
gcttcactgcaaggagcaggactgc

SEQ ID NO: 5759645 - DNA, 25 bp, Homo sapien
gagctcaagcacggggccttcagct

SEQ ID NO: 5759646 - DNA, 25 bp, Homo sapien
tcgcagtgcagctccaggttgaggt

SEQ ID NO: 5759647 - DNA, 25 bp, Homo sapien
gggagggatggagggcgtcaaaagt

SEQ ID NO: 5759648 - DNA, 25 bp, Homo sapien
tgaagggcttcccccagtatgactc

SEQ ID NO: 5759649 - DNA, 25 bp, Homo sapien
ttgccaaaggtccttggtggcctgt

SEQ ID NO: 5759650 - DNA, 25 bp, Homo sapien
gttcagcttgatcagggacctcccg

SEQ ID NO: 5759651 - DNA, 25 bp, Homo sapien
tcaatgcggatctcctccttagggc

SEQ ID NO: 5759652 - DNA, 25 bp, Homo sapien
cttgatcagggacctcccgtccagc

SEQ ID NO: 5759653 - DNA, 25 bp, Homo sapien
ctgtcgcttccccatggcggagcgg

SEQ ID NO: 5759654 - DNA, 25 bp, Homo sapien
atcgtaataatgcttcttgcaaagc

SEQ ID NO: 5759655 - DNA, 25 bp, Homo sapien
agcttctctccattgctggggttgg

SEQ ID NO: 5759656 - DNA, 25 bp, Homo sapien
cagggacctcccgtccagcttctct

SEQ ID NO: 5759657 - DNA, 25 bp, Homo sapien
ctgtgcctgtggggtcgcccccttg

SEQ ID NO: 5759658 - DNA, 25 bp, Homo sapien
tttggtctccggggctaccttgagc

SEQ ID NO: 5759659 - DNA, 25 bp, Homo sapien
tcgcccccttggatcacaaagttcc

SEQ ID NO: 5759660 - DNA, 25 bp, Homo sapien
tcctccttagggcggtcagttttgg

SEQ ID NO: 5759661 - DNA, 25 bp, Homo sapien
gttcttggccttgatatttagctgt

SEQ ID NO: 5759662 - DNA, 25 bp, Homo sapien
tctccacattctccatggctgtcag

SEQ ID NO: 5759663 - DNA, 25 bp, Homo sapien
ccaatggtcacagacagggatgaca

SEQ ID NO: 5759664 - DNA, 25 bp, Homo sapien
ttcttgccaccataaaagtgagtgt

SEQ ID NO: 5759665 - DNA, 25 bp, Homo sapien
tgtggcgccgctgagagcagagggc

SEQ ID NO: 5759666 - DNA, 25 bp, Homo sapien
accaggagctgaagtccccaaaacc

SEQ ID NO: 5759667 - DNA, 25 bp, Homo sapien
agccagggtgtctgtcagggtgggc

SEQ ID NO: 5759668 - DNA, 25 bp, Homo sapien
ggccttctcttcatctgggtctatt

SEQ ID NO: 5759669 - DNA, 25 bp, Homo sapien
agtgcctggcgggagggatggaggg

SEQ ID NO: 5759670 - DNA, 25 bp, Homo sapien
ccctcactgttcttggaaaagttca

SEQ ID NO: 5759671 - DNA, 25 bp, Homo sapien
gtgcctgtggggtcgcccccttgga

SEQ ID NO: 5759672 - DNA, 25 bp, Homo sapien
gacgggtcctgtttggccttctctt

SEQ ID NO: 5759673 - DNA, 25 bp, Homo sapien
gaagttttcgcaggtttttggtgtc

SEQ ID NO: 5759674 - DNA, 25 bp, Homo sapien
aaaacaacggctgacaactcagacc

SEQ ID NO: 5759675 - DNA, 25 bp, Homo sapien
gcagagggctgtcttggggtcttcg

SEQ ID NO: 5759676 - DNA, 25 bp, Homo sapien
gagggatgggctggagaagagaagg

SEQ ID NO: 5759677 - DNA, 25 bp, Homo sapien
ctcagaggcctacaggtgtgtggac

SEQ ID NO: 5759678 - DNA, 25 bp, Homo sapien
caggcagcctgctgctaccaggagc

SEQ ID NO: 5759679 - DNA, 25 bp, Homo sapien
ggttggtcccgtacttcttaagcca

SEQ ID NO: 5759680 - DNA, 25 bp, Homo sapien
actgtgcccctcctctgcaggccca

SEQ ID NO: 5759681 - DNA, 25 bp, Homo sapien
cattgctggggttggtcccgtactt

SEQ ID NO: 5759682 - DNA, 25 bp, Homo sapien
cgcggcccgtgtgcgagaggttggg

SEQ ID NO: 5759683 - DNA, 25 bp, Homo sapien
tggtgaacacggtaaacagcactgg

SEQ ID NO: 5759684 - DNA, 25 bp, Homo sapien
tccggggccttcatggtggctgcca

SEQ ID NO: 5759685 - DNA, 25 bp, Homo sapien
ccatcgtaataatgcttcttgcaaa

SEQ ID NO: 5759686 - DNA, 25 bp, Homo sapien
atacagtcagtcagggccagccagg

SEQ ID NO: 5759687 - DNA, 25 bp, Homo sapien
acgaacactgtagtggcatcaatgc

SEQ ID NO: 5759688 - DNA, 25 bp, Homo sapien
ccctcagtggacgaggccatgtcct

SEQ ID NO: 5759689 - DNA, 25 bp, Homo sapien
gagggcgtcaaaagtcactctagag

SEQ ID NO: 5759690 - DNA, 25 bp, Homo sapien
tgccagaatctcgtcccctttgaac

SEQ ID NO: 5759691 - DNA, 25 bp, Homo sapien
caatgggggacttgaatgtggccag

SEQ ID NO: 5759692 - DNA, 25 bp, Homo sapien
gggatggagggcgtcaaaagtcact

SEQ ID NO: 5759693 - DNA, 25 bp, Homo sapien
tgaaggaagcgctgaccttccctgt

SEQ ID NO: 5759694 - DNA, 25 bp, Homo sapien
cacagggtcctctccaaacctgctt

SEQ ID NO: 5759695 - DNA, 25 bp, Homo sapien
atgtcctgatgcagaaggctgagcc

SEQ ID NO: 5759696 - DNA, 25 bp, Homo sapien
gcccaggctctctgtggcgccgctg

SEQ ID NO: 5759697 - DNA, 25 bp, Homo sapien
tgatgtcctgccgggagaagggctc

SEQ ID NO: 5759698 - DNA, 25 bp, Homo sapien
gggacagtggcactggttgagggct

SEQ ID NO: 5759699 - DNA, 25 bp, Homo sapien
gtgatgatgtcctgccgggagaagg

SEQ ID NO: 5759700 - DNA, 25 bp, Homo sapien
gggacttgaatgtggccagagaata

SEQ ID NO: 5759701 - DNA, 25 bp, Homo sapien
tgaccttccctgtggaatagtgggc

SEQ ID NO: 5759702 - DNA, 25 bp, Homo sapien
agctctaaaacaaacaaactacaga

SEQ ID NO: 5759703 - DNA, 25 bp, Homo sapien
catggcggagcggcggcggcgacta

SEQ ID NO: 5759704 - DNA, 25 bp, Homo sapien
gatgccatcgggagtgcagactggg

SEQ ID NO: 5759705 - DNA, 25 bp, Homo sapien
cactggttgagggctcttcctctgc

SEQ ID NO: 5759706 - DNA, 25 bp, Homo sapien
gagcccaggggcccgaccaatggtc

SEQ ID NO: 5759707 - DNA, 25 bp, Homo sapien
cggatggatctgtggaagatggtgc

SEQ ID NO: 5759708 - DNA, 25 bp, Homo sapien
caactcagaccatggagccgcagcc

SEQ ID NO: 5759709 - DNA, 25 bp, Homo sapien
tgactccccacccgtgcctgtgcct

SEQ ID NO: 5759710 - DNA, 25 bp, Homo sapien
tacaaattaagctctaaaacaaaca

SEQ ID NO: 5759711 - DNA, 25 bp, Homo sapien
cccaacaacccgtccaaagatggta

SEQ ID NO: 5759712 - DNA, 25 bp, Homo sapien
gtgcaggccaccgggtgaggctgga

SEQ ID NO: 5759713 - DNA, 25 bp, Homo sapien
agtgcagactgggtagacaaagggc

SEQ ID NO: 5759714 - DNA, 25 bp, Homo sapien
tcttggccttgatatttagctgttc

SEQ ID NO: 5759715 - DNA, 25 bp, Homo sapien
gtggtctccgggaccatcgcggtgg

SEQ ID NO: 5759716 - DNA, 25 bp, Homo sapien
atcctcgtcgatggcagctgcttca

SEQ ID NO: 5759717 - DNA, 25 bp, Homo sapien
ttctccatggctgtcagtacgtcaa

SEQ ID NO: 5759718 - DNA, 25 bp, Homo sapien
agccatggaacaatgttcagtaagt

SEQ ID NO: 5759719 - DNA, 25 bp, Homo sapien
gggtgaggctggacggtcacccatg

SEQ ID NO: 5759720 - DNA, 25 bp, Homo sapien
tctccaaacctgcttctcactccct

SEQ ID NO: 5759721 - DNA, 25 bp, Homo sapien
ccttggatcacaaagttccggatgg

SEQ ID NO: 5759722 - DNA, 25 bp, Homo sapien
agagagagactgcagtggtcaaaag

SEQ ID NO: 5759723 - DNA, 25 bp, Homo sapien
gatgacaggctgcagagggatgggc

SEQ ID NO: 5759724 - DNA, 25 bp, Homo sapien
tagagacattgaacttgtccaaatt

SEQ ID NO: 5759725 - DNA, 25 bp, Homo sapien
cacattctccatggctgtcagtacg

SEQ ID NO: 5759726 - DNA, 25 bp, Homo sapien
gggctcttcctctgctgctcggtgg

SEQ ID NO: 5759727 - DNA, 25 bp, Homo sapien
ggttgaggtcgcccttgttggtgtg

SEQ ID NO: 5759728 - DNA, 25 bp, Homo sapien
caggcccagcttggtgtctgagcct

SEQ ID NO: 5759729 - DNA, 25 bp, Homo sapien
caacggctgacaactcagaccatgg

SEQ ID NO: 5759730 - DNA, 25 bp, Homo sapien
ggtctccgggaccatcgcggtggag

SEQ ID NO: 5759731 - DNA, 25 bp, Homo sapien
gaggccatgtcctgatgcagaaggc

SEQ ID NO: 5759732 - DNA, 25 bp, Homo sapien
ggtaggcacaggagcgaaacgtgat

SEQ ID NO: 5759733 - DNA, 25 bp, Homo sapien
gggccctggctccctgcctggggct

SEQ ID NO: 5759734 - DNA, 25 bp, Homo sapien
cagctccaggttgaggtcgcccttg

SEQ ID NO: 5759735 - DNA, 25 bp, Homo sapien
ggagcgaaacgtgatgaagaattga

SEQ ID NO: 5759736 - DNA, 25 bp, Homo sapien
tgctgtcgcttccccatggcggagc

SEQ ID NO: 5759737 - DNA, 25 bp, Homo sapien
gctgaccttccctgtggaatagtgg

SEQ ID NO: 5759738 - DNA, 25 bp, Homo sapien
tctcgtcccctttgaactccttgta

SEQ ID NO: 5759739 - DNA, 25 bp, Homo sapien
tgcagcagggtgacgaggggcagac

SEQ ID NO: 5759740 - DNA, 25 bp, Homo sapien
cagaggcctacaggtgtgtggacac

SEQ ID NO: 5759741 - DNA, 25 bp, Homo sapien
cagtcactgtgtcctactgtgcccc

SEQ ID NO: 5759742 - DNA, 25 bp, Homo sapien
atgccgcggcccgtgtgcgagaggt

SEQ ID NO: 5759743 - DNA, 25 bp, Homo sapien
aagttcagcttgatcagggacctcc

SEQ ID NO: 5759744 - DNA, 25 bp, Homo sapien
ttggccttgatatttagctgttcca

SEQ ID NO: 5759745 - DNA, 25 bp, Homo sapien
ttattcttcacatgatagaagttag

SEQ ID NO: 5759746 - DNA, 25 bp, Homo sapien
ccgtccagcttctctccattgctgg

SEQ ID NO: 5759747 - DNA, 25 bp, Homo sapien
ttttgtccttttggtgctgtcgctt

SEQ ID NO: 5759748 - DNA, 25 bp, Homo sapien
catgatagaagttagagacattgaa

SEQ ID NO: 5759749 - DNA, 25 bp, Homo sapien
tcttggaaaagttcagcttgatcag

SEQ ID NO: 5759750 - DNA, 25 bp, Homo sapien
ttcttgttcttagcatgatgaaggg

SEQ ID NO: 5759751 - DNA, 25 bp, Homo sapien
tttgaactccttgtagagctcctgc

SEQ ID NO: 5759752 - DNA, 25 bp, Homo sapien
aggggtccacgaacactgtagtggc

SEQ ID NO: 5759753 - DNA, 25 bp, Homo sapien
ctgtgtcttccgctcctgcgcaatc

SEQ ID NO: 5759754 - DNA, 25 bp, Homo sapien
tggcgggagggatggagggcgtcaa

SEQ ID NO: 5759755 - DNA, 25 bp, Homo sapien
ggggcagacatacctctagtggtca

SEQ ID NO: 5759756 - DNA, 25 bp, Homo sapien
ttatctgtgtgaggtttacaaataa

SEQ ID NO: 5759757 - DNA, 25 bp, Homo sapien
ggtttacaaataaagcttctgatgt

SEQ ID NO: 5759758 - DNA, 25 bp, Homo sapien
ctcctgcagggtctctcgggtctcg

SEQ ID NO: 5759759 - DNA, 25 bp, Homo sapien
tcccctgtcctctggccacaccgcc

SEQ ID NO: 5759760 - DNA, 25 bp, Homo sapien
cctgcgcaatctgggcatcggcctc

SEQ ID NO: 5759761 - DNA, 25 bp, Homo sapien
attgagacctgttgctgttgggccc

SEQ ID NO: 5759762 - DNA, 25 bp, Homo sapien
gcacgtagcccttcttcttcacaaa

SEQ ID NO: 5759763 - DNA, 25 bp, Homo sapien
ggacgaggccatgtcctgatgcaga

SEQ ID NO: 5759764 - DNA, 25 bp, Homo sapien
ggtcccgtacttcttaagccatgga

SEQ ID NO: 5759765 - DNA, 25 bp, Homo sapien
tacattttgtccttttggtgctgtc

SEQ ID NO: 5759766 - DNA, 25 bp, Homo sapien
cgcaggtttttggtgtcaggtcgca

SEQ ID NO: 5759767 - DNA, 25 bp, Homo sapien
gttgatgtacttgcccacgccctgg

SEQ ID NO: 5759768 - DNA, 25 bp, Homo sapien
tgccctcagtggacgaggccatgtc

SEQ ID NO: 5759769 - DNA, 25 bp, Homo sapien
gatatttagctgttccactgcctca

SEQ ID NO: 5759770 - DNA, 25 bp, Homo sapien
gtgaggctggacggtcacccatggt

SEQ ID NO: 5759771 - DNA, 25 bp, Homo sapien
ttgctggggttggtcccgtacttct

SEQ ID NO: 5759772 - DNA, 25 bp, Homo sapien
tggcctgtcccctgccctgggagca

SEQ ID NO: 5759773 - DNA, 25 bp, Homo sapien
agtgggcagcattcagcttgtccac

SEQ ID NO: 5759774 - DNA, 25 bp, Homo sapien
cttcacaaactggtagcgcagcaca

SEQ ID NO: 5759775 - DNA, 25 bp, Homo sapien
catgttattcttcacatgatagaag

SEQ ID NO: 5759776 - DNA, 25 bp, Homo sapien
ccaggccttgcggaggacagtgcct

SEQ ID NO: 5759777 - DNA, 25 bp, Homo sapien
tggtgtgcagccgcacgtagccctt

SEQ ID NO: 5759778 - DNA, 25 bp, Homo sapien
tagggcggtcagttttggggtcact

SEQ ID NO: 5759779 - DNA, 25 bp, Homo sapien
aggtaatgtacattttgtccttttg

SEQ ID NO: 5759780 - DNA, 25 bp, Homo sapien
ccgggagaagggctcgtcggtcagc

SEQ ID NO: 5759781 - DNA, 25 bp, Homo sapien
tgcgcaatctgggcatcggcctcct

SEQ ID NO: 5759782 - DNA, 25 bp, Homo sapien
tgctcttcactttggtctccggggc

SEQ ID NO: 5759783 - DNA, 25 bp, Homo sapien
acgaggggcagacatacctctagtg

SEQ ID NO: 5759784 - DNA, 25 bp, Homo sapien
ctccggggctaccttgagctgtgtc

SEQ ID NO: 5759785 - DNA, 25 bp, Homo sapien
tgcggatctcctccttagggcggtc

SEQ ID NO: 5759786 - DNA, 25 bp, Homo sapien
gggatgacaggctgcagagggatgg

SEQ ID NO: 5759787 - DNA, 25 bp, Homo sapien
tgccggtcgtcctcacagccacgat

SEQ ID NO: 5759788 - DNA, 25 bp, Homo sapien
ggactgccgagctcaagcacggggc

SEQ ID NO: 5759789 - DNA, 25 bp, Homo sapien
tgtggacacctgggcagtcactgtg

SEQ ID NO: 5759790 - DNA, 25 bp, Homo sapien
tctgctgctcggtggctgctgggtt

SEQ ID NO: 5759791 - DNA, 25 bp, Homo sapien
tcccctcactgttcttggaaaagtt

SEQ ID NO: 5759792 - DNA, 25 bp, Homo sapien
gggcgtcaaaagtcactctagagcc

SEQ ID NO: 5759793 - DNA, 25 bp, Homo sapien
tccaggtaggcacaggagcgaaacg

SEQ ID NO: 5759794 - DNA, 25 bp, Homo sapien
ttgttggtgaacacggtaaacagca

SEQ ID NO: 5759795 - DNA, 25 bp, Homo sapien
gctgttccactgcctcataggcgta

SEQ ID NO: 5759796 - DNA, 25 bp, Homo sapien
cttgccaccataaaagtgagtgtat

SEQ ID NO: 5759797 - DNA, 25 bp, Homo sapien
cctgtcccctgccctgggagcagat

SEQ ID NO: 5759798 - DNA, 25 bp, Homo sapien
cacaaagttccggatggatctgtgg

SEQ ID NO: 5759799 - DNA, 25 bp, Homo sapien
cagaaatgtaaaccttcatttgcca

SEQ ID NO: 5759800 - DNA, 25 bp, Homo sapien
ctgccctgggagcagatggccctga

SEQ ID NO: 5759801 - DNA, 25 bp, Homo sapien
caggtttttggtgtcaggtcgcagt

SEQ ID NO: 5759802 - DNA, 25 bp, Homo sapien
cctggagggtgatgatgtcctgccg

SEQ ID NO: 5759803 - DNA, 25 bp, Homo sapien
ggtggctgctgggttgatgtacttg

SEQ ID NO: 5759804 - DNA, 25 bp, Homo sapien
ggagcggcggcggcgactagcgagc

SEQ ID NO: 5759805 - DNA, 25 bp, Homo sapien
gcccgtgtgcgagaggttgggccgg

SEQ ID NO: 5759806 - DNA, 25 bp, Homo sapien
cagcacatcctcgtcgatggcagct

SEQ ID NO: 5759807 - DNA, 25 bp, Homo sapien
actctccacattctccatggctgtc

SEQ ID NO: 5759808 - DNA, 25 bp, Homo sapien
gactgggtagacaaagggctgcaga

SEQ ID NO: 5759809 - DNA, 25 bp, Homo sapien
tgctgctcggtggctgctgggttga

SEQ ID NO: 5759810 - DNA, 25 bp, Homo sapien
acaaactacagaaatgtaaaccttc

SEQ ID NO: 5759811 - DNA, 25 bp, Homo sapien
gcccttgttggtgtgcagccgcacg

SEQ ID NO: 5759812 - DNA, 25 bp, Homo sapien
aaggctgagcccaggctctctgtgg

SEQ ID NO: 5759813 - DNA, 25 bp, Homo sapien
cctcataggcgtagacgttgccggt

SEQ ID NO: 5759814 - DNA, 25 bp, Homo sapien
cacagattggtgtgcagcagggtga

SEQ ID NO: 5759815 - DNA, 25 bp, Homo sapien
ctgggtagacaaagggctgcagaga

SEQ ID NO: 5759816 - DNA, 25 bp, Homo sapien
ttacaagccagttactgccagggct

SEQ ID NO: 5759817 - DNA, 25 bp, Homo sapien
gaggggcagacatacctctagtggt

SEQ ID NO: 5759818 - DNA, 25 bp, Homo sapien
tccaaattggtggggtcctggaggg

SEQ ID NO: 5759819 - DNA, 25 bp, Homo sapien
aatgtaaaccttcatttgccaaagg

SEQ ID NO: 5759820 - DNA, 25 bp, Homo sapien
atgtgtggtctccgggaccatcgcg

SEQ ID NO: 5759821 - DNA, 25 bp, Homo sapien
ccggtcgtcctcacagccacgatgt

SEQ ID NO: 5759822 - DNA, 25 bp, Homo sapien
gtcaaaagtcactctagagcccagg

SEQ ID NO: 5759823 - DNA, 25 bp, Homo sapien
tttttggtgtcaggtcgcagtgcag

SEQ ID NO: 5759824 - DNA, 25 bp, Homo sapien
tacaaataaagcttctgatgtcaaa

SEQ ID NO: 5759825 - DNA, 25 bp, Homo sapien
agggccagccagggtgtctgtcagg

SEQ ID NO: 5759826 - DNA, 25 bp, Homo sapien
ccagccagggtgtctgtcagggtgg

SEQ ID NO: 5759827 - DNA, 25 bp, Homo sapien
gccaccgggtgaggctggacggtca

SEQ ID NO: 5759828 - DNA, 25 bp, Homo sapien
atgcttcttgtccaggtaggcacag

SEQ ID NO: 5759829 - DNA, 25 bp, Homo sapien
ggagaagagaaggagccagccatgg

SEQ ID NO: 5759830 - DNA, 25 bp, Homo sapien
cagtggcactggttgagggctcttc

SEQ ID NO: 5759831 - DNA, 25 bp, Homo sapien
ttggtgtctgagcctcttacaagcc

SEQ ID NO: 5759832 - DNA, 25 bp, Homo sapien
gagccaaggatggcctggtcctact

SEQ ID NO: 5759833 - DNA, 25 bp, Homo sapien
agtgagtgtattcagcacaggtaat

SEQ ID NO: 5759834 - DNA, 25 bp, Homo sapien
tcggtggctgctgggttgatgtact

SEQ ID NO: 5759835 - DNA, 25 bp, Homo sapien
tcacagccacgatgtgggtgttgtt

SEQ ID NO: 5759836 - DNA, 25 bp, Homo sapien
tactgccagggctgcaccaggcctt

SEQ ID NO: 5759837 - DNA, 25 bp, Homo sapien
gagggtgatgatgtcctgccgggag

SEQ ID NO: 5759838 - DNA, 25 bp, Homo sapien
ttgcaaagcctgatgaagttttcgc

SEQ ID NO: 5759839 - DNA, 25 bp, Homo sapien
tgggcttcttcttggacatggggac

SEQ ID NO: 5759840 - DNA, 25 bp, Homo sapien
atctgggtctattattttcatgtta

SEQ ID NO: 5759841 - DNA, 25 bp, Homo sapien
agcctcttacaagccagttactgcc

SEQ ID NO: 5759842 - DNA, 25 bp, Homo sapien
agacgatgccatcgggagtgcagac

SEQ ID NO: 5759843 - DNA, 25 bp, Homo sapien
tcactctccacattctccatggctg

SEQ ID NO: 5759844 - DNA, 25 bp, Homo sapien
catggggacagtggcactggttgag

SEQ ID NO: 5759845 - DNA, 25 bp, Homo sapien
gtcctggagggtgatgatgtcctgc

SEQ ID NO: 5759846 - DNA, 25 bp, Homo sapien
gctctctgtggcgccgctgagagca

SEQ ID NO: 5759847 - DNA, 25 bp, Homo sapien
taaacagcactgggcagtggtactt

SEQ ID NO: 5759848 - DNA, 25 bp, Homo sapien
tcactttggtctccggggctacctt

SEQ ID NO: 5759849 - DNA, 25 bp, Homo sapien
aatgtacattttgtccttttggtgc

SEQ ID NO: 5759850 - DNA, 25 bp, Homo sapien
tctcggcatttgtatttttcagata

SEQ ID NO: 5759851 - DNA, 25 bp, Homo sapien
gcctcctcataggggtccacgaaca

SEQ ID NO: 5759852 - DNA, 25 bp, Homo sapien
ctcactgtgcaggccaccgggtgag

SEQ ID NO: 5759853 - DNA, 25 bp, Homo sapien
gagcagagggctgtcttggggtctt

SEQ ID NO: 5759854 - DNA, 25 bp, Homo sapien
agcgagcacgaaaaaacaacggctg

SEQ ID NO: 5759855 - DNA, 25 bp, Homo sapien
ggtcgcagtgcagctccaggttgag

SEQ ID NO: 5759856 - DNA, 25 bp, Homo sapien
ccatcgggagtgcagactgggtaga

SEQ ID NO: 5759857 - DNA, 25 bp, Homo sapien
atgtacttgcccacgccctggcgga

SEQ ID NO: 5759858 - DNA, 25 bp, Homo sapien
tgggcagtcactgtgtcctactgtg

SEQ ID NO: 5759859 - DNA, 25 bp, Homo sapien
atttgtatttttcagataataagac

SEQ ID NO: 5759860 - DNA, 25 bp, Homo sapien
ctcgggtctcggcatttgtattttt

SEQ ID NO: 5759861 - DNA, 25 bp, Homo sapien
cagataataagacgggtcctgtttg

SEQ ID NO: 5759862 - DNA, 25 bp, Homo sapien
caaacctgcttctcactccctggtc

SEQ ID NO: 5759863 - DNA, 25 bp, Homo sapien
gccagagaatacagtcagtcagggc

SEQ ID NO: 5759864 - DNA, 25 bp, Homo sapien
aagcacggggccttcagcttcccct

SEQ ID NO: 5759865 - DNA, 25 bp, Homo sapien
aaaaaacaacggctgacaactcaga

SEQ ID NO: 5759866 - DNA, 25 bp, Homo sapien
ctcactgttcttggaaaagttcagc

SEQ ID NO: 5759867 - DNA, 25 bp, Homo sapien
cctcgtcgatggcagctgcttcatg

SEQ ID NO: 5759868 - DNA, 25 bp, Homo sapien
gctccctgcctggggctggctgctc

SEQ ID NO: 5759869 - DNA, 25 bp, Homo sapien
tacctctagtggtcatcaggcagcc

SEQ ID NO: 5759870 - DNA, 25 bp, Homo sapien
tcatctgggtctattattttcatgt

SEQ ID NO: 5759871 - DNA, 25 bp, Homo sapien
gcccccaacaacccgtccaaagatg

SEQ ID NO: 5759872 - DNA, 25 bp, Homo sapien
agaatctcgtcccctttgaactcct

SEQ ID NO: 5759873 - DNA, 25 bp, Homo sapien
gtgtcctactgtgcccctcctctgc

SEQ ID NO: 5759874 - DNA, 25 bp, Homo sapien
aagttccggatggatctgtggaaga

SEQ ID NO: 5759875 - DNA, 25 bp, Homo sapien
gggtcttcgagctctggagccaagg

SEQ ID NO: 5759876 - DNA, 25 bp, Homo sapien
gccagttactgccagggctgcacca

SEQ ID NO: 5759877 - DNA, 25 bp, Homo sapien
ggttgagggctcttcctctgctgct

SEQ ID NO: 5759878 - DNA, 25 bp, Homo sapien
ggcagcattcagcttgtccactttc

SEQ ID NO: 5759879 - DNA, 25 bp, Homo sapien
tgacgaggggcagacatacctctag

SEQ ID NO: 5759880 - DNA, 25 bp, Homo sapien
caaattggtggggtcctggagggtg

SEQ ID NO: 5759881 - DNA, 25 bp, Homo sapien
cggaactcgtctttgaagggcttcc

SEQ ID NO: 5759882 - DNA, 25 bp, Homo sapien
ctgaggatgccgcggcccgtgtgcg

SEQ ID NO: 5759883 - DNA, 25 bp, Homo sapien
gccaaggatggcctggtcctacttc

SEQ ID NO: 5759884 - DNA, 25 bp, Homo sapien
tgccgggagaagggctcgtcggtca

SEQ ID NO: 5759885 - DNA, 25 bp, Homo sapien
cctcataggggtccacgaacactgt

SEQ ID NO: 5759886 - DNA, 25 bp, Homo sapien
ataggggtccacgaacactgtagtg

SEQ ID NO: 5759887 - DNA, 25 bp, Homo sapien
ctgagcccaggctctctgtggcgcc

SEQ ID NO: 5759888 - DNA, 25 bp, Homo sapien
tggcttcttgccaccataaaagtga

SEQ ID NO: 5759889 - DNA, 25 bp, Homo sapien
ggtaaacagcactgggcagtggtac

SEQ ID NO: 5759890 - DNA, 25 bp, Homo sapien
aacaatgttcagtaagtcaaagacg

SEQ ID NO: 5759891 - DNA, 25 bp, Homo sapien
ttccctcactgtgcaggccaccggg

SEQ ID NO: 5759892 - DNA, 25 bp, Homo sapien
gaggatgccgcggcccgtgtgcgag

SEQ ID NO: 5759893 - DNA, 25 bp, Homo sapien
cttgagctgtgtcttccgctcctgc

SEQ ID NO: 5759894 - DNA, 25 bp, Homo sapien
gcagggtgacgaggggcagacatac

SEQ ID NO: 5759895 - DNA, 25 bp, Homo sapien
tggagggcgtcaaaagtcactctag

SEQ ID NO: 5759896 - DNA, 25 bp, Homo sapien
gtagacgttgccggtcgtcctcaca

SEQ ID NO: 5759897 - DNA, 25 bp, Homo sapien
tgggcacagggtcctctccaaacct

SEQ ID NO: 5759898 - DNA, 25 bp, Homo sapien
acggtaaacagcactgggcagtggt

SEQ ID NO: 5759899 - DNA, 25 bp, Homo sapien
cgaaacgtgatgaagaattgagacc

SEQ ID NO: 5759900 - DNA, 25 bp, Homo sapien
tcctctggccacaccgccagccctt

SEQ ID NO: 5759901 - DNA, 25 bp, Homo sapien
tggctgctgggttgatgtacttgcc

SEQ ID NO: 5759902 - DNA, 25 bp, Homo sapien
gctcggtggctgctgggttgatgta

SEQ ID NO: 5759903 - DNA, 25 bp, Homo sapien
tgctgggttgatgtacttgcccacg

SEQ ID NO: 5759904 - DNA, 25 bp, Homo sapien
cttccccatggcggagcggcggcgg

SEQ ID NO: 5759905 - DNA, 25 bp, Homo sapien
acactgtagtggcatcaatgcggat

SEQ ID NO: 5759906 - DNA, 25 bp, Homo sapien
cagtggacgaggccatgtcctgatg

SEQ ID NO: 5759907 - DNA, 25 bp, Homo sapien
ctagcgagcacgaaaaaacaacggc

SEQ ID NO: 5759908 - DNA, 25 bp, Homo sapien
ggaaaagttcagcttgatcagggac

SEQ ID NO: 5759909 - DNA, 25 bp, Homo sapien
aggccttgcggaggacagtgcctgg

SEQ ID NO: 5759910 - DNA, 25 bp, Homo sapien
ggctaccttgagctgtgtcttccgc

SEQ ID NO: 5759911 - DNA, 25 bp, Homo sapien
cgggagtgcagactgggtagacaaa

SEQ ID NO: 5759912 - DNA, 25 bp, Homo sapien
gatggagggcgtcaaaagtcactct

SEQ ID NO: 5759913 - DNA, 25 bp, Homo sapien
gtggcatcaatgcggatctcctcct

SEQ ID NO: 5759914 - DNA, 25 bp, Homo sapien
acgtagcccttcttcttcacaaact

SEQ ID NO: 5759915 - DNA, 25 bp, Homo sapien
ctggcggaaggtctgggggccctgg

SEQ ID NO: 5759916 - DNA, 25 bp, Homo sapien
tggttttaatagctaaaaaactaca

SEQ ID NO: 5759917 - DNA, 25 bp, Homo sapien
gatgtcaaatgtttaaatcgtgccc

SEQ ID NO: 5759918 - DNA, 25 bp, Homo sapien
tctcctccttagggcggtcagtttt

SEQ ID NO: 5759919 - DNA, 25 bp, Homo sapien
agaaggctgagcccaggctctctgt

SEQ ID NO: 5759920 - DNA, 25 bp, Homo sapien
gatgaagaattgagacctgttgctg

SEQ ID NO: 5759921 - DNA, 25 bp, Homo sapien
gttggtgtgcagccgcacgtagccc

SEQ ID NO: 5759922 - DNA, 25 bp, Homo sapien
gttccggatggatctgtggaagatg

SEQ ID NO: 5759923 - DNA, 25 bp, Homo sapien
gggctgcaccaggccttgcggagga

SEQ ID NO: 5759924 - DNA, 25 bp, Homo sapien
ctgtgtgaggtttacaaataaagct

SEQ ID NO: 5759925 - DNA, 25 bp, Homo sapien
cggcccgtgtgcgagaggttgggcc

SEQ ID NO: 5759926 - DNA, 25 bp, Homo sapien
gagaaggagccagccatggcgcagt

SEQ ID NO: 5759927 - DNA, 25 bp, Homo sapien
ggcacaggagcgaaacgtgatgaag

SEQ ID NO: 5759928 - DNA, 25 bp, Homo sapien
gggtagacaaagggctgcagagaga

SEQ ID NO: 5759929 - DNA, 25 bp, Homo sapien
tagagcccaggggcccgaccaatgg

SEQ ID NO: 5759930 - DNA, 25 bp, Homo sapien
gtgcctgtgcctgtggggtcgcccc

SEQ ID NO: 5759931 - DNA, 25 bp, Homo sapien
ttggggtcactctccacattctcca

SEQ ID NO: 5759932 - DNA, 25 bp, Homo sapien
caccacccgcacctgtaccctggac

SEQ ID NO: 5759933 - DNA, 25 bp, Homo sapien
tgaagggccacagattggtgtgcag

SEQ ID NO: 5759934 - DNA, 25 bp, Homo sapien
tcaaatgtttaaatcgtgccctcag

SEQ ID NO: 5759935 - DNA, 25 bp, Homo sapien
aataaagcttctgatgtcaaatgtt

SEQ ID NO: 5759936 - DNA, 25 bp, Homo sapien
tttcttcttctccggggccttcatg

SEQ ID NO: 5759937 - DNA, 25 bp, Homo sapien
gtagacaaagggctgcagagagaga

SEQ ID NO: 5759938 - DNA, 25 bp, Homo sapien
tgcggaggacagtgcctggcgggag

SEQ ID NO: 5759939 - DNA, 25 bp, Homo sapien
aagggcttcccccagtatgactccc

SEQ ID NO: 5759940 - DNA, 25 bp, Homo sapien
attaagctctaaaacaaacaaacta

SEQ ID NO: 5759941 - DNA, 25 bp, Homo sapien
cagggatgacaggctgcagagggat

SEQ ID NO: 5759942 - DNA, 25 bp, Homo sapien
tccctggtcaggccttcatccccac

SEQ ID NO: 5759943 - DNA, 25 bp, Homo sapien
ggggtcactctccacattctccatg

SEQ ID NO: 5759944 - DNA, 25 bp, Homo sapien
gtccacgaacactgtagtggcatca

SEQ ID NO: 5759945 - DNA, 25 bp, Homo sapien
cgtccaaagatggtatgcttcttgt

SEQ ID NO: 5759946 - DNA, 25 bp, Homo sapien
gaaggtctgggggccctggctccct

SEQ ID NO: 5759947 - DNA, 25 bp, Homo sapien
gtcttccgctcctgcgcaatctggg

SEQ ID NO: 5759948 - DNA, 25 bp, Homo sapien
tggtatgcttcttgtccaggtaggc

SEQ ID NO: 5759949 - DNA, 25 bp, Homo sapien
cactgtgtcctactgtgcccctcct

SEQ ID NO: 5759950 - DNA, 25 bp, Homo sapien
ccacccgtgcctgtgcctgtggggt

SEQ ID NO: 5759951 - DNA, 25 bp, Homo sapien
aaaacaaacaaactacagaaatgta

SEQ ID NO: 5759952 - DNA, 25 bp, Homo sapien
aggccaccgggtgaggctggacggt

SEQ ID NO: 5759953 - DNA, 25 bp, Homo sapien
tcactctagagcccaggggcccgac

SEQ ID NO: 5759954 - DNA, 25 bp, Homo sapien
agccgcacgtagcccttcttcttca

SEQ ID NO: 5759955 - DNA, 25 bp, Homo sapien
tctgtggcgccgctgagagcagagg

SEQ ID NO: 5759956 - DNA, 25 bp, Homo sapien
tcaaagacgatgccatcgggagtgc

SEQ ID NO: 5759957 - DNA, 25 bp, Homo sapien
tcagtaagtcaaagacgatgccatc

SEQ ID NO: 5759958 - DNA, 25 bp, Homo sapien
tgcaggcccagcttggtgtctgagc

SEQ ID NO: 5759959 - DNA, 25 bp, Homo sapien
gaccaatggtcacagacagggatga

SEQ ID NO: 5759960 - DNA, 25 bp, Homo sapien
tcagggccagccagggtgtctgtca

SEQ ID NO: 5759961 - DNA, 25 bp, Homo sapien
ggtgtctgagcctcttacaagccag

SEQ ID NO: 5759962 - DNA, 25 bp, Homo sapien
gactagcgagcacgaaaaaacaacg

SEQ ID NO: 5759963 - DNA, 25 bp, Homo sapien
ttttggggtcactctccacattctc

SEQ ID NO: 5759964 - DNA, 25 bp, Homo sapien
ggacggtcacccatggtggcttcac

SEQ ID NO: 5759965 - DNA, 25 bp, Homo sapien
cattttgtccttttggtgctgtcgc

SEQ ID NO: 5759966 - DNA, 25 bp, Homo sapien
aacaacggctgacaactcagaccat

SEQ ID NO: 5759967 - DNA, 25 bp, Homo sapien
tgatcagggacctcccgtccagctt

SEQ ID NO: 5759968 - DNA, 25 bp, Homo sapien
acagtgcctggcgggagggatggag

SEQ ID NO: 5759969 - DNA, 25 bp, Homo sapien
cggggccttcagcttcccctgtcct

SEQ ID NO: 5759970 - DNA, 25 bp, Homo sapien
tgccgagctcaagcacggggccttc

SEQ ID NO: 5759971 - DNA, 25 bp, Homo sapien
aagcgctgaccttccctgtggaata

SEQ ID NO: 5759972 - DNA, 25 bp, Homo sapien
actcagaccatggagccgcagccga

SEQ ID NO: 5759973 - DNA, 25 bp, Homo sapien
gccagggctgcaccaggccttgcgg

SEQ ID NO: 5759974 - DNA, 25 bp, Homo sapien
ttgaacttgtccaaattggtggggt

SEQ ID NO: 5759975 - DNA, 25 bp, Homo sapien
ggtcgcccccttggatcacaaagtt

SEQ ID NO: 5759976 - DNA, 25 bp, Homo sapien
gcaggccaccgggtgaggctggacg

SEQ ID NO: 5759977 - DNA, 25 bp, Homo sapien
tcggtcagcaggtcccggaagttct

SEQ ID NO: 5759978 - DNA, 25 bp, Homo sapien
agttcttgttcttagcatgatgaag

SEQ ID NO: 5759979 - DNA, 25 bp, Homo sapien
tagctgttccactgcctcataggcg

SEQ ID NO: 5759980 - DNA, 25 bp, Homo sapien
agcgcagcacatcctcgtcgatggc

SEQ ID NO: 5759981 - DNA, 25 bp, Homo sapien
ggcccagcttggtgtctgagcctct

SEQ ID NO: 5759982 - DNA, 25 bp, Homo sapien
agcacgaaaaaacaacggctgacaa

SEQ ID NO: 5759983 - DNA, 25 bp, Homo sapien
tgtcccctgccctgggagcagatgg

SEQ ID NO: 5759984 - DNA, 25 bp, Homo sapien
gtgtcttccgctcctgcgcaatctg

SEQ ID NO: 5759985 - DNA, 25 bp, Homo sapien
cagcctgctgctaccaggagctgaa

SEQ ID NO: 5759986 - DNA, 25 bp, Homo sapien
gaggtcgcccttgttggtgtgcagc

SEQ ID NO: 5759987 - DNA, 25 bp, Homo sapien
gacagtggcactggttgagggctct

SEQ ID NO: 5759988 - DNA, 25 bp, Homo sapien
cttcatgtgtggtctccgggaccat

SEQ ID NO: 5759989 - DNA, 25 bp, Homo sapien
acggctgacaactcagaccatggag

SEQ ID NO: 5759990 - DNA, 25 bp, Homo sapien
actacaaattaagctctaaaacaaa

SEQ ID NO: 5759991 - DNA, 25 bp, Homo sapien
agggtgacgaggggcagacatacct

SEQ ID NO: 5759992 - DNA, 25 bp, Homo sapien
cccctttgaactccttgtagagctc

SEQ ID NO: 5759993 - DNA, 25 bp, Homo sapien
tgccatcgtaataatgcttcttgca

SEQ ID NO: 5759994 - DNA, 25 bp, Homo sapien
ttctgatgtcaaatgtttaaatcgt

SEQ ID NO: 5759995 - DNA, 25 bp, Homo sapien
gtgaacacggtaaacagcactgggc

SEQ ID NO: 5759996 - DNA, 25 bp, Homo sapien
ggtccttggtggcctgtcccctgcc

SEQ ID NO: 5759997 - DNA, 25 bp, Homo sapien
tgaagaattgagacctgttgctgtt

SEQ ID NO: 5759998 - DNA, 25 bp, Homo sapien
cagacagggatgacaggctgcagag

SEQ ID NO: 5759999 - DNA, 25 bp, Homo sapien
gatggcctggtcctacttctctgcc

SEQ ID NO: 5760000 - DNA, 25 bp, Homo sapien
ttggccttctcttcatctgggtcta

SEQ ID NO: 5760001 - DNA, 25 bp, Homo sapien
gtaccctggacgctggctcagaggc

SEQ ID NO: 5760002 - DNA, 25 bp, Homo sapien
aagccagttactgccagggctgcac

SEQ ID NO: 5760003 - DNA, 25 bp, Homo sapien
tccgggaccatcgcggtggaggtga

SEQ ID NO: 5760004 - DNA, 25 bp, Homo sapien
agaccatggagccgcagccgagttc

SEQ ID NO: 5760005 - DNA, 25 bp, Homo sapien
gggtgatgatgtcctgccgggagaa

SEQ ID NO: 5760006 - DNA, 25 bp, Homo sapien
gcagccgcacgtagcccttcttctt

SEQ ID NO: 5760007 - DNA, 25 bp, Homo sapien
gaggcctacaggtgtgtggacacct

SEQ ID NO: 5760008 - DNA, 25 bp, Homo sapien
tagtggtcatcaggcagcctgctgc

SEQ ID NO: 5760009 - DNA, 25 bp, Homo sapien
agtcactctagagcccaggggcccg

SEQ ID NO: 5760010 - DNA, 25 bp, Homo sapien
ttgtatttttcagataataagacgg

SEQ ID NO: 5760011 - DNA, 25 bp, Homo sapien
cagtacgtcaaagcccccaacaacc

SEQ ID NO: 5760012 - DNA, 25 bp, Homo sapien
gggtcctggagggtgatgatgtcct

SEQ ID NO: 5760013 - DNA, 25 bp, Homo sapien
gcgcagttcttgttcttagcatgat

SEQ ID NO: 5760014 - DNA, 25 bp, Homo sapien
tttagctgttccactgcctcatagg

SEQ ID NO: 5760015 - DNA, 25 bp, Homo sapien
gtgaggtttacaaataaagcttctg

SEQ ID NO: 5760016 - DNA, 25 bp, Homo sapien
cgggaccatcgcggtggaggtgaag

SEQ ID NO: 5760017 - DNA, 25 bp, Homo sapien
ctccatggctgtcagtacgtcaaag

SEQ ID NO: 5760018 - DNA, 25 bp, Homo sapien
gggcggtcagttttggggtcactct

SEQ ID NO: 5760019 - DNA, 25 bp, Homo sapien
ggtgctgtcgcttccccatggcgga

SEQ ID NO: 5760020 - DNA, 25 bp, Homo sapien
cagttactgccagggctgcaccagg

SEQ ID NO: 5760021 - DNA, 25 bp, Homo sapien
ccagcttctctccattgctggggtt

SEQ ID NO: 5760022 - DNA, 25 bp, Homo sapien
ggtggggtcctggagggtgatgatg

SEQ ID NO: 5760023 - DNA, 25 bp, Homo sapien
gtttgtgggagatctggcttcttgc

SEQ ID NO: 5760024 - DNA, 25 bp, Homo sapien
atggtggcttcactgcaaggagcag

SEQ ID NO: 5760025 - DNA, 25 bp, Homo sapien
ttgttggtgtgcagccgcacgtagc

SEQ ID NO: 5760026 - DNA, 25 bp, Homo sapien
aatgtggccagagaatacagtcagt

SEQ ID NO: 5760027 - DNA, 25 bp, Homo sapien
tcgcggtggaggtgaaggaagcgct

SEQ ID NO: 5760028 - DNA, 25 bp, Homo sapien
ccagaatctcgtcccctttgaactc

SEQ ID NO: 5760029 - DNA, 25 bp, Homo sapien
gccaaaggtccttggtggcctgtcc

SEQ ID NO: 5760030 - DNA, 25 bp, Homo sapien
ccttgtagagctcctgcagggtctc

SEQ ID NO: 5760031 - DNA, 25 bp, Homo sapien
agcaggtcccggaagttcttggcct

SEQ ID NO: 5760032 - DNA, 25 bp, Homo sapien
caaattaagctctaaaacaaacaaa

SEQ ID NO: 5760033 - DNA, 25 bp, Homo sapien
cggcggcggcgactagcgagcacga

SEQ ID NO: 5760034 - DNA, 25 bp, Homo sapien
ggtggcctgtcccctgccctgggag

SEQ ID NO: 5760035 - DNA, 25 bp, Homo sapien
aactccttgtagagctcctgcaggg

SEQ ID NO: 5760036 - DNA, 25 bp, Homo sapien
agctgtgtcttccgctcctgcgcaa

SEQ ID NO: 5760037 - DNA, 25 bp, Homo sapien
gaaggagccagccatggcgcagttc

SEQ ID NO: 5760038 - DNA, 25 bp, Homo sapien
tcagcttgatcagggacctcccgtc

SEQ ID NO: 5760039 - DNA, 25 bp, Homo sapien
tgtagtggcatcaatgcggatctcc

SEQ ID NO: 5760040 - DNA, 25 bp, Homo sapien
tccggatggatctgtggaagatggt

SEQ ID NO: 5760041 - DNA, 25 bp, Homo sapien
caaaggtccttggtggcctgtcccc

SEQ ID NO: 5760042 - DNA, 25 bp, Homo sapien
cagtggtcaaaaggtaaacgacgaa

SEQ ID NO: 5760043 - DNA, 25 bp, Homo sapien
ttgaggtcgcccttgttggtgtgca

SEQ ID NO: 5760044 - DNA, 25 bp, Homo sapien
tcccgtccagcttctctccattgct

SEQ ID NO: 5760045 - DNA, 25 bp, Homo sapien
tgggcagcattcagcttgtccactt

SEQ ID NO: 5760046 - DNA, 25 bp, Homo sapien
ttaaatcgtgccctcagtggacgag

SEQ ID NO: 5760047 - DNA, 25 bp, Homo sapien
accgccagcccttggtccttatctg

SEQ ID NO: 5760048 - DNA, 25 bp, Homo sapien
gaacactgtagtggcatcaatgcgg

SEQ ID NO: 5760049 - DNA, 25 bp, Homo sapien
ggcacagggtcctctccaaacctgc

SEQ ID NO: 5760050 - DNA, 25 bp, Homo sapien
gcacatcctcgtcgatggcagctgc

SEQ ID NO: 5760051 - DNA, 25 bp, Homo sapien
tcagtcagggccagccagggtgtct

SEQ ID NO: 5760052 - DNA, 25 bp, Homo sapien
gcgagaggttgggccggaactcgtc

SEQ ID NO: 5760053 - DNA, 25 bp, Homo sapien
gccgctgagagcagagggctgtctt

SEQ ID NO: 5760054 - DNA, 25 bp, Homo sapien
accataaaagtgagtgtattcagca

SEQ ID NO: 5760055 - DNA, 25 bp, Homo sapien
tcatcaggcagcctgctgctaccag

SEQ ID NO: 5760056 - DNA, 25 bp, Homo sapien
tgtccaaattggtggggtcctggag

SEQ ID NO: 5760057 - DNA, 25 bp, Homo sapien
tagcatgatgaagggccacagattg

SEQ ID NO: 5760058 - DNA, 25 bp, Homo sapien
gtgggagatctggcttcttgccacc

SEQ ID NO: 5760059 - DNA, 25 bp, Homo sapien
caccgggtgaggctggacggtcacc

SEQ ID NO: 5760060 - DNA, 25 bp, Homo sapien
tggcgcagttcttgttcttagcatg

SEQ ID NO: 5760061 - DNA, 25 bp, Homo sapien
cagagaatacagtcagtcagggcca

SEQ ID NO: 5760062 - DNA, 25 bp, Homo sapien
gcggtggaggtgaaggaagcgctga

SEQ ID NO: 5760063 - DNA, 25 bp, Homo sapien
gtcaggtcgcagtgcagctccaggt

SEQ ID NO: 5760064 - DNA, 25 bp, Homo sapien
atgcagaaggctgagcccaggctct

SEQ ID NO: 5760065 - DNA, 25 bp, Homo sapien
ggggtcgcccccttggatcacaaag

SEQ ID NO: 5760066 - DNA, 25 bp, Homo sapien
gcccgaccaatggtcacagacaggg

SEQ ID NO: 5760067 - DNA, 25 bp, Homo sapien
cctgggcagtcactgtgtcctactg

SEQ ID NO: 5760068 - DNA, 25 bp, Homo sapien
ccagcccttggtccttatctgtgtg

SEQ ID NO: 5760069 - DNA, 25 bp, Homo sapien
taataagacgggtcctgtttggcct

SEQ ID NO: 5760070 - DNA, 25 bp, Homo sapien
cctgcctggggctggctgctcttca

SEQ ID NO: 5760071 - DNA, 25 bp, Homo sapien
cctgaagcccttccctcactgtgca

SEQ ID NO: 5760072 - DNA, 25 bp, Homo sapien
gttggtgaacacggtaaacagcact

SEQ ID NO: 5760073 - DNA, 25 bp, Homo sapien
aaatttgtttgtgggagatctggct

SEQ ID NO: 5760074 - DNA, 25 bp, Homo sapien
tgcttcatgtgtggtctccgggacc

SEQ ID NO: 5760075 - DNA, 25 bp, Homo sapien
ccttatctgtgtgaggtttacaaat

SEQ ID NO: 5760076 - DNA, 25 bp, Homo sapien
ttggtgtgcagcagggtgacgaggg

SEQ ID NO: 5760077 - DNA, 25 bp, Homo sapien
gagttggccatgctgaggatgccgc

SEQ ID NO: 5760078 - DNA, 25 bp, Homo sapien
cgaaaaaacaacggctgacaactca

SEQ ID NO: 5760079 - DNA, 25 bp, Homo sapien
ggatgccgcggcccgtgtgcgagag

SEQ ID NO: 5760080 - DNA, 25 bp, Homo sapien
tgcagagggatgggctggagaagag

SEQ ID NO: 5760081 - DNA, 25 bp, Homo sapien
cactgttcttggaaaagttcagctt

SEQ ID NO: 5760082 - DNA, 25 bp, Homo sapien
ccctcactgtgcaggccaccgggtg

SEQ ID NO: 5760083 - DNA, 25 bp, Homo sapien
ccaccaatgggggacttgaatgtgg

SEQ ID NO: 5760084 - DNA, 25 bp, Homo sapien
tctcactccctggtcaggccttcat

SEQ ID NO: 5760085 - DNA, 25 bp, Homo sapien
gatggatctgtggaagatggtgcca

SEQ ID NO: 5760086 - DNA, 25 bp, Homo sapien
aggagccagccatggcgcagttctt

SEQ ID NO: 5760087 - DNA, 25 bp, Homo sapien
ttcctctgctgctcggtggctgctg

SEQ ID NO: 5760088 - DNA, 25 bp, Homo sapien
tgcagggtctctcgggtctcggcat

SEQ ID NO: 5760089 - DNA, 25 bp, Homo sapien
cctgcagggtctctcgggtctcggc

SEQ ID NO: 5760090 - DNA, 25 bp, Homo sapien
gtggacgaggccatgtcctgatgca

SEQ ID NO: 5760091 - DNA, 25 bp, Homo sapien
gtgcagccgcacgtagcccttcttc

SEQ ID NO: 5760092 - DNA, 25 bp, Homo sapien
accttcatttgccaaaggtccttgg

SEQ ID NO: 5760093 - DNA, 25 bp, Homo sapien
tctccattgctggggttggtcccgt

SEQ ID NO: 5760094 - DNA, 25 bp, Homo sapien
tgatgaagttttcgcaggtttttgg

SEQ ID NO: 5760095 - DNA, 25 bp, Homo sapien
gagaagggctcgtcggtcagcaggt

SEQ ID NO: 5760096 - DNA, 25 bp, Homo sapien
atttgccaaaggtccttggtggcct

SEQ ID NO: 5760097 - DNA, 25 bp, Homo sapien
cctctccaaacctgcttctcactcc

SEQ ID NO: 5760098 - DNA, 25 bp, Homo sapien
agctcctgcagggtctctcgggtct

SEQ ID NO: 5760099 - DNA, 25 bp, Homo sapien
gtcaaagcccccaacaacccgtcca

SEQ ID NO: 5760100 - DNA, 25 bp, Homo sapien
ctcttcatctgggtctattattttc

SEQ ID NO: 5760101 - DNA, 25 bp, Homo sapien
gcctgctgctaccaggagctgaagt

SEQ ID NO: 5760102 - DNA, 25 bp, Homo sapien
gctgcaccaggccttgcggaggaca

SEQ ID NO: 5760103 - DNA, 25 bp, Homo sapien
cagcattcagcttgtccactttctt

SEQ ID NO: 5760104 - DNA, 25 bp, Homo sapien
cactgtgcaggccaccgggtgaggc

SEQ ID NO: 5760105 - DNA, 25 bp, Homo sapien
gtccttttggtgctgtcgcttcccc

SEQ ID NO: 5760106 - DNA, 25 bp, Homo sapien
ctctaaaacaaacaaactacagaaa

SEQ ID NO: 5760107 - DNA, 25 bp, Homo sapien
cttgtccaggtaggcacaggagcga

SEQ ID NO: 5760108 - DNA, 25 bp, Homo sapien
ggcggcgactagcgagcacgaaaaa

SEQ ID NO: 5760109 - DNA, 25 bp, Homo sapien
gggccggaactcgtctttgaagggc

SEQ ID NO: 5760110 - DNA, 25 bp, Homo sapien
tcaaatggttttaatagctaaaaaa

SEQ ID NO: 5760111 - DNA, 25 bp, Homo sapien
tgggagcagatggccctgaagccct

SEQ ID NO: 5760112 - DNA, 25 bp, Homo sapien
gatgatgtcctgccgggagaagggc

SEQ ID NO: 5760113 - DNA, 25 bp, Homo sapien
ccatggctgtcagtacgtcaaagcc

SEQ ID NO: 5760114 - DNA, 25 bp, Homo sapien
ggccatgtcctgatgcagaaggctg

SEQ ID NO: 5760115 - DNA, 25 bp, Homo sapien
tgttccactgcctcataggcgtaga

SEQ ID NO: 5760116 - DNA, 25 bp, Homo sapien
caaagatggtatgcttcttgtccag

SEQ ID NO: 5760117 - DNA, 25 bp, Homo sapien
ggacagtgcctggcgggagggatgg

SEQ ID NO: 5760118 - DNA, 25 bp, Homo sapien
tggaagatggtgccatcgtaataat

SEQ ID NO: 5760119 - DNA, 25 bp, Homo sapien
cttaagccatggaacaatgttcagt

SEQ ID NO: 5760120 - DNA, 25 bp, Homo sapien
gggcatcggcctcctcataggggtc

SEQ ID NO: 5760121 - DNA, 25 bp, Homo sapien
aagcttctgatgtcaaatgtttaaa

SEQ ID NO: 5760122 - DNA, 25 bp, Homo sapien
tctgcaggcccagcttggtgtctga

SEQ ID NO: 5760123 - DNA, 25 bp, Homo sapien
tgcaccaggccttgcggaggacagt

SEQ ID NO: 5760124 - DNA, 25 bp, Homo sapien
ggctcagaggcctacaggtgtgtgg

SEQ ID NO: 5760125 - DNA, 25 bp, Homo sapien
agtcagtcagggccagccagggtgt

SEQ ID NO: 5760126 - DNA, 25 bp, Homo sapien
agggctgcagagagagactgcagtg

SEQ ID NO: 5760127 - DNA, 25 bp, Homo sapien
ccaccataaaagtgagtgtattcag

SEQ ID NO: 5760128 - DNA, 25 bp, Homo sapien
tggacgctggctcagaggcctacag

SEQ ID NO: 5760129 - DNA, 25 bp, Homo sapien
ggagcagatggccctgaagcccttc

SEQ ID NO: 5760130 - DNA, 25 bp, Homo sapien
cctggtcaggccttcatccccacca

SEQ ID NO: 5760131 - DNA, 25 bp, Homo sapien
ttgtttgtgggagatctggcttctt

SEQ ID NO: 5760132 - DNA, 25 bp, Homo sapien
tgctgttgggcccggagttggccat

SEQ ID NO: 5760133 - DNA, 25 bp, Homo sapien
gtcttggggtcttcgagctctggag

SEQ ID NO: 5760134 - DNA, 25 bp, Homo sapien
gtccttatctgtgtgaggtttacaa

SEQ ID NO: 5760135 - DNA, 25 bp, Homo sapien
ggtggcttcactgcaaggagcagga

SEQ ID NO: 5760136 - DNA, 25 bp, Homo sapien
tcttcttggacatggggacagtggc

SEQ ID NO: 5760137 - DNA, 25 bp, Homo sapien
ggctcgtcggtcagcaggtcccgga

SEQ ID NO: 5760138 - DNA, 25 bp, Homo sapien
cggcctcctcataggggtccacgaa

SEQ ID NO: 5760139 - DNA, 25 bp, Homo sapien
gcagttcttgttcttagcatgatga

SEQ ID NO: 5760140 - DNA, 25 bp, Homo sapien
gccttgcggaggacagtgcctggcg

SEQ ID NO: 5760141 - DNA, 25 bp, Homo sapien
ggtgtctgtcagggtgggcacaggg

SEQ ID NO: 5760142 - DNA, 25 bp, Homo sapien
atagaagttagagacattgaacttg

SEQ ID NO: 5760143 - DNA, 25 bp, Homo sapien
aaacgtgatgaagaattgagacctg

SEQ ID NO: 5760144 - DNA, 25 bp, Homo sapien
agcagatggccctgaagcccttccc

SEQ ID NO: 5760145 - DNA, 25 bp, Homo sapien
tgtgcccctcctctgcaggcccagc

SEQ ID NO: 5760146 - DNA, 25 bp, Homo sapien
tgttattcttcacatgatagaagtt

SEQ ID NO: 5760147 - DNA, 25 bp, Homo sapien
cacgaaaaaacaacggctgacaact

SEQ ID NO: 5760148 - DNA, 25 bp, Homo sapien
tgcttcttgcaaagcctgatgaagt

SEQ ID NO: 5760149 - DNA, 25 bp, Homo sapien
acgttgccggtcgtcctcacagcca

SEQ ID NO: 5760150 - DNA, 25 bp, Homo sapien
ataggcgtagacgttgccggtcgtc

SEQ ID NO: 5760151 - DNA, 25 bp, Homo sapien
cattctccatggctgtcagtacgtc

SEQ ID NO: 5760152 - DNA, 25 bp, Homo sapien
agagctcctgcagggtctctcgggt

SEQ ID NO: 5760153 - DNA, 25 bp, Homo sapien
ttctcttcatctgggtctattattt

SEQ ID NO: 5760154 - DNA, 25 bp, Homo sapien
ctaccaggagctgaagtccccaaaa

SEQ ID NO: 5760155 - DNA, 25 bp, Homo sapien
cgacgaaaatttgtttgtgggagat

SEQ ID NO: 5760156 - DNA, 25 bp, Homo sapien
acggtcacccatggtggcttcactg

SEQ ID NO: 5760157 - DNA, 25 bp, Homo sapien
tgggtgttgttggtgaacacggtaa

SEQ ID NO: 5760158 - DNA, 25 bp, Homo sapien
tgatgtacttgcccacgccctggcg

SEQ ID NO: 5760159 - DNA, 25 bp, Homo sapien
gttcagtaagtcaaagacgatgcca

SEQ ID NO: 5760160 - DNA, 25 bp, Homo sapien
acaaactggtagcgcagcacatcct

SEQ ID NO: 5760161 - DNA, 25 bp, Homo sapien
agcccttggtccttatctgtgtgag

SEQ ID NO: 5760162 - DNA, 25 bp, Homo sapien
cagggctgcaccaggccttgcggag

SEQ ID NO: 5760163 - DNA, 25 bp, Homo sapien
gctggggttggtcccgtacttctta

SEQ ID NO: 5760164 - DNA, 25 bp, Homo sapien
gtatttttcagataataagacgggt

SEQ ID NO: 5760165 - DNA, 25 bp, Homo sapien
gtcacagacagggatgacaggctgc

SEQ ID NO: 5760166 - DNA, 25 bp, Homo sapien
ggtgaaggaagcgctgaccttccct

SEQ ID NO: 5760167 - DNA, 25 bp, Homo sapien
ttgggccggaactcgtctttgaagg

SEQ ID NO: 5760168 - DNA, 25 bp, Homo sapien
gatctcctccttagggcggtcagtt

SEQ ID NO: 5760169 - DNA, 25 bp, Homo sapien
gggcccgaccaatggtcacagacag

SEQ ID NO: 5760170 - DNA, 25 bp, Homo sapien
gtttaaatcgtgccctcagtggacg

SEQ ID NO: 5760171 - DNA, 25 bp, Homo sapien
cccttggtccttatctgtgtgaggt

SEQ ID NO: 5760172 - DNA, 25 bp, Homo sapien
gcttctgatgtcaaatgtttaaatc

SEQ ID NO: 5760173 - DNA, 25 bp, Homo sapien
acagtcagtcagggccagccagggt

SEQ ID NO: 5760174 - DNA, 25 bp, Homo sapien
ccccttggatcacaaagttccggat

SEQ ID NO: 5760175 - DNA, 25 bp, Homo sapien
gcccccaccaatgggggacttgaat

SEQ ID NO: 5760176 - DNA, 25 bp, Homo sapien
gggggccctggctccctgcctgggg

SEQ ID NO: 5760177 - DNA, 25 bp, Homo sapien
ggaagttcttggccttgatatttag

SEQ ID NO: 5760178 - DNA, 25 bp, Homo sapien
ggtgttgttggtgaacacggtaaac

SEQ ID NO: 5760179 - DNA, 25 bp, Homo sapien
tgtgggtgttgttggtgaacacggt

SEQ ID NO: 5760180 - DNA, 25 bp, Homo sapien
ctgggtctattattttcatgttatt

SEQ ID NO: 5760181 - DNA, 25 bp, Homo sapien
aagggccacagattggtgtgcagca

SEQ ID NO: 5760182 - DNA, 25 bp, Homo sapien
cagccatggcgcagttcttgttctt

SEQ ID NO: 5760183 - DNA, 25 bp, Homo sapien
cccgtccaaagatggtatgcttctt

SEQ ID NO: 5760184 - DNA, 25 bp, Homo sapien
cttccctgtggaatagtgggcagca

SEQ ID NO: 5760185 - DNA, 25 bp, Homo sapien
aaagcctgatgaagttttcgcaggt

SEQ ID NO: 5760186 - DNA, 25 bp, Homo sapien
tgaactccttgtagagctcctgcag

SEQ ID NO: 5760187 - DNA, 25 bp, Homo sapien
agcctgatgaagttttcgcaggttt

SEQ ID NO: 5760188 - DNA, 25 bp, Homo sapien
gctcaagcacggggccttcagcttc

SEQ ID NO: 5760189 - DNA, 25 bp, Homo sapien
ggctggacggtcacccatggtggct

SEQ ID NO: 5760190 - DNA, 25 bp, Homo sapien
tgagcctcttacaagccagttactg

SEQ ID NO: 5760191 - DNA, 25 bp, Homo sapien
cttctccggggccttcatggtggct

SEQ ID NO: 5760192 - DNA, 25 bp, Homo sapien
cctcacagccacgatgtgggtgttg

SEQ ID NO: 5760193 - DNA, 25 bp, Homo sapien
tcatgtgtggtctccgggaccatcg

SEQ ID NO: 5760194 - DNA, 25 bp, Homo sapien
tgcagctccaggttgaggtcgccct

SEQ ID NO: 5760195 - DNA, 25 bp, Homo sapien
atgttcagtaagtcaaagacgatgc

SEQ ID NO: 5760196 - DNA, 25 bp, Homo sapien
ggcactggttgagggctcttcctct

SEQ ID NO: 5760197 - DNA, 25 bp, Homo sapien
ttcttcacaaactggtagcgcagca

SEQ ID NO: 5760198 - DNA, 25 bp, Homo sapien
gcaaagcctgatgaagttttcgcag

SEQ ID NO: 5760199 - DNA, 25 bp, Homo sapien
aggctgcagagggatgggctggaga

SEQ ID NO: 5760200 - DNA, 25 bp, Homo sapien
gctgaagtccccaaaaccccgactg

SEQ ID NO: 5760201 - DNA, 25 bp, Homo sapien
tctagtggtcatcaggcagcctgct

SEQ ID NO: 5760202 - DNA, 25 bp, Homo sapien
gagctctggagccaaggatggcctg

SEQ ID NO: 5760203 - DNA, 25 bp, Homo sapien
tctctccattgctggggttggtccc

SEQ ID NO: 5760204 - DNA, 25 bp, Homo sapien
ctaccttgagctgtgtcttccgctc

SEQ ID NO: 5760205 - DNA, 25 bp, Homo sapien
caggtcccggaagttcttggccttg

SEQ ID NO: 5760206 - DNA, 25 bp, Homo sapien
cagactgggtagacaaagggctgca

SEQ ID NO: 5760207 - DNA, 25 bp, Homo sapien
ctgacaactcagaccatggagccgc

SEQ ID NO: 5760208 - DNA, 25 bp, Homo sapien
tgtccactttcttcttctccggggc

SEQ ID NO: 5760209 - DNA, 25 bp, Homo sapien
aggtctgggggccctggctccctgc

SEQ ID NO: 5760210 - DNA, 25 bp, Homo sapien
cctggctccctgcctggggctggct

SEQ ID NO: 5760211 - DNA, 25 bp, Homo sapien
cctggacgctggctcagaggcctac

SEQ ID NO: 5760212 - DNA, 25 bp, Homo sapien
ccagtatgactccccacccgtgcct

SEQ ID NO: 5760213 - DNA, 25 bp, Homo sapien
cggatctcctccttagggcggtcag

SEQ ID NO: 5760214 - DNA, 25 bp, Homo sapien
ctgtttggccttctcttcatctggg

SEQ ID NO: 5760215 - DNA, 25 bp, Homo sapien
cgggtcctgtttggccttctcttca

SEQ ID NO: 5760216 - DNA, 25 bp, Homo sapien
ctgtgcaggccaccgggtgaggctg

SEQ ID NO: 5760217 - DNA, 25 bp, Homo sapien
cagcttggtgtctgagcctcttaca

SEQ ID NO: 5760218 - DNA, 25 bp, Homo sapien
gctgctaccaggagctgaagtcccc

SEQ ID NO: 5760219 - DNA, 25 bp, Homo sapien
cttggggtcttcgagctctggagcc

SEQ ID NO: 5760220 - DNA, 25 bp, Homo sapien
tccaggttgaggtcgcccttgttgg

SEQ ID NO: 5760221 - DNA, 25 bp, Homo sapien
gttgccggtcgtcctcacagccacg

SEQ ID NO: 5760222 - DNA, 25 bp, Homo sapien
caaggatggcctggtcctacttctc

SEQ ID NO: 5760223 - DNA, 25 bp, Homo sapien
acgatgtgggtgttgttggtgaaca

SEQ ID NO: 5760224 - DNA, 25 bp, Homo sapien
tctagagcccaggggcccgaccaat

SEQ ID NO: 5760225 - DNA, 25 bp, Homo sapien
ctggagaagagaaggagccagccat

SEQ ID NO: 5760226 - DNA, 25 bp, Homo sapien
taagtcaaagacgatgccatcggga

SEQ ID NO: 5760227 - DNA, 25 bp, Homo sapien
aaactacagaaatgtaaaccttcat

SEQ ID NO: 5760228 - DNA, 25 bp, Homo sapien
cttcactttggtctccggggctacc

SEQ ID NO: 5760229 - DNA, 25 bp, Homo sapien
gtcccctttgaactccttgtagagc

SEQ ID NO: 5760230 - DNA, 25 bp, Homo sapien
ggggctaccttgagctgtgtcttcc

SEQ ID NO: 5760231 - DNA, 25 bp, Homo sapien
ccgtgtgcgagaggttgggccggaa

SEQ ID NO: 5760232 - DNA, 25 bp, Homo sapien
tcagcttgtccactttcttcttctc

SEQ ID NO: 5760233 - DNA, 25 bp, Homo sapien
gctgctgggttgatgtacttgccca

SEQ ID NO: 5760234 - DNA, 25 bp, Homo sapien
agagagactgcagtggtcaaaaggt

SEQ ID NO: 5760235 - DNA, 25 bp, Homo sapien
aagatggtatgcttcttgtccaggt

SEQ ID NO: 5760236 - DNA, 25 bp, Homo sapien
gccgcggcccgtgtgcgagaggttg

SEQ ID NO: 5760237 - DNA, 25 bp, Homo sapien
cgctcctgcgcaatctgggcatcgg

SEQ ID NO: 5760238 - DNA, 25 bp, Homo sapien
gcccaggggcccgaccaatggtcac

SEQ ID NO: 5760239 - DNA, 25 bp, Homo sapien
gctgcttcatgtgtggtctccggga

SEQ ID NO: 5760240 - DNA, 25 bp, Homo sapien
tccttggtggcctgtcccctgccct

SEQ ID NO: 5760241 - DNA, 25 bp, Homo sapien
ctccttgtagagctcctgcagggtc

SEQ ID NO: 5760242 - DNA, 25 bp, Homo sapien
atctgtgtgaggtttacaaataaag

SEQ ID NO: 5760243 - DNA, 25 bp, Homo sapien
gcggagcggcggcggcgactagcga

SEQ ID NO: 5760244 - DNA, 25 bp, Homo sapien
ctgttcttggaaaagttcagcttga

SEQ ID NO: 5760245 - DNA, 25 bp, Homo sapien
ccttgttggtgtgcagccgcacgta

SEQ ID NO: 5760246 - DNA, 25 bp, Homo sapien
agcttgtccactttcttcttctccg

SEQ ID NO: 5760247 - DNA, 25 bp, Homo sapien
acagccacgatgtgggtgttgttgg

SEQ ID NO: 5760248 - DNA, 25 bp, Homo sapien
ctctggccacaccgccagcccttgg

SEQ ID NO: 5760249 - DNA, 25 bp, Homo sapien
ggaccatcgcggtggaggtgaagga

SEQ ID NO: 5760250 - DNA, 25 bp, Homo sapien
ggtctcggcatttgtatttttcaga

SEQ ID NO: 5760251 - DNA, 25 bp, Homo sapien
tgttgttggtgaacacggtaaacag

SEQ ID NO: 5760252 - DNA, 25 bp, Homo sapien
actccctggtcaggccttcatcccc

SEQ ID NO: 5760253 - DNA, 25 bp, Homo sapien
gacttgaatgtggccagagaataca

SEQ ID NO: 5760254 - DNA, 25 bp, Homo sapien
ctggctcagaggcctacaggtgtgt

SEQ ID NO: 5760255 - DNA, 25 bp, Homo sapien
tggaggtgaaggaagcgctgacctt

SEQ ID NO: 5760256 - DNA, 25 bp, Homo sapien
tgtctgtcagggtgggcacagggtc

SEQ ID NO: 5760257 - DNA, 25 bp, Homo sapien
gaagggctcgtcggtcagcaggtcc

SEQ ID NO: 5760258 - DNA, 25 bp, Homo sapien
gccctggctccctgcctggggctgg

SEQ ID NO: 5760259 - DNA, 25 bp, Homo sapien
cttctctccattgctggggttggtc

SEQ ID NO: 5760260 - DNA, 25 bp, Homo sapien
tggggacagtggcactggttgaggg

SEQ ID NO: 5760261 - DNA, 25 bp, Homo sapien
gtcactgtgtcctactgtgcccctc

SEQ ID NO: 5760262 - DNA, 25 bp, Homo sapien
ggagtgcagactgggtagacaaagg

SEQ ID NO: 5760263 - DNA, 25 bp, Homo sapien
ctgggttgatgtacttgcccacgcc

SEQ ID NO: 5760264 - DNA, 25 bp, Homo sapien
gacatacctctagtggtcatcaggc

SEQ ID NO: 5760265 - DNA, 25 bp, Homo sapien
aaggaagcgctgaccttccctgtgg

SEQ ID NO: 5760266 - DNA, 25 bp, Homo sapien
tcagaccatggagccgcagccgagt

SEQ ID NO: 5760267 - DNA, 25 bp, Homo sapien
taaaagtgagtgtattcagcacagg

SEQ ID NO: 5760268 - DNA, 25 bp, Homo sapien
agcggcggcggcgactagcgagcac

SEQ ID NO: 5760269 - DNA, 25 bp, Homo sapien
tggagccaaggatggcctggtccta

SEQ ID NO: 5760270 - DNA, 25 bp, Homo sapien
atgtttaaatcgtgccctcagtgga

SEQ ID NO: 5760271 - DNA, 25 bp, Homo sapien
actggtagcgcagcacatcctcgtc

SEQ ID NO: 5760272 - DNA, 25 bp, Homo sapien
ctcctgcgcaatctgggcatcggcc

SEQ ID NO: 5760273 - DNA, 25 bp, Homo sapien
taagctctaaaacaaacaaactaca

SEQ ID NO: 5760274 - DNA, 25 bp, Homo sapien
gcccccttggatcacaaagttccgg

SEQ ID NO: 5760275 - DNA, 25 bp, Homo sapien
ccttctcttcatctgggtctattat

SEQ ID NO: 5760276 - DNA, 25 bp, Homo sapien
caaacaaactacagaaatgtaaacc

SEQ ID NO: 5760277 - DNA, 25 bp, Homo sapien
cagggtcctctccaaacctgcttct

SEQ ID NO: 5760278 - DNA, 25 bp, Homo sapien
catacctctagtggtcatcaggcag

SEQ ID NO: 5760279 - DNA, 25 bp, Homo sapien
tccattgctggggttggtcccgtac

SEQ ID NO: 5760280 - DNA, 25 bp, Homo sapien
ccacgatgtgggtgttgttggtgaa

SEQ ID NO: 5760281 - DNA, 25 bp, Homo sapien
gggagatctggcttcttgccaccat

SEQ ID NO: 5760282 - DNA, 25 bp, Homo sapien
tcagttttggggtcactctccacat

SEQ ID NO: 5760283 - DNA, 25 bp, Homo sapien
gcgtagacgttgccggtcgtcctca

SEQ ID NO: 5760284 - DNA, 25 bp, Homo sapien
actgtagtggcatcaatgcggatct

SEQ ID NO: 5760285 - DNA, 25 bp, Homo sapien
tggcggagcggcggcggcgactagc

SEQ ID NO: 5760286 - DNA, 25 bp, Homo sapien
acccatggtggcttcactgcaagga

SEQ ID NO: 5760287 - DNA, 25 bp, Homo sapien
atcacaaagttccggatggatctgt

SEQ ID NO: 5760288 - DNA, 25 bp, Homo sapien
tctctgtggcgccgctgagagcaga

SEQ ID NO: 5760289 - DNA, 25 bp, Homo sapien
cacctgggcagtcactgtgtcctac

SEQ ID NO: 5760290 - DNA, 25 bp, Homo sapien
aacctgcttctcactccctggtcag

SEQ ID NO: 5760291 - DNA, 25 bp, Homo sapien
ttggaaaagttcagcttgatcaggg

SEQ ID NO: 5760292 - DNA, 25 bp, Homo sapien
cagcacaggtaatgtacattttgtc

SEQ ID NO: 5760293 - DNA, 25 bp, Homo sapien
cttgtccaaattggtggggtcctgg

SEQ ID NO: 5760294 - DNA, 25 bp, Homo sapien
ttcagataataagacgggtcctgtt

SEQ ID NO: 5760295 - DNA, 25 bp, Homo sapien
tgtcctctggccacaccgccagccc

SEQ ID NO: 5760296 - DNA, 25 bp, Homo sapien
tctttgaagggcttcccccagtatg

SEQ ID NO: 5760297 - DNA, 25 bp, Homo sapien
accaatgggggacttgaatgtggcc

SEQ ID NO: 5760298 - DNA, 25 bp, Homo sapien
agcccttcttcttcacaaactggta

SEQ ID NO: 5760299 - DNA, 25 bp, Homo sapien
gctaaaaaactacaaattaagctct

SEQ ID NO: 5760300 - DNA, 25 bp, Homo sapien
ataatgcttcttgcaaagcctgatg

SEQ ID NO: 5760301 - DNA, 25 bp, Homo sapien
caaaagtcactctagagcccagggg

SEQ ID NO: 5760302 - DNA, 25 bp, Homo sapien
atcgtgccctcagtggacgaggcca

SEQ ID NO: 5760303 - DNA, 25 bp, Homo sapien
gggtcctctccaaacctgcttctca

SEQ ID NO: 5760304 - DNA, 25 bp, Homo sapien
tggctgccagaatctcgtccccttt

SEQ ID NO: 5760305 - DNA, 25 bp, Homo sapien
gaatacagtcagtcagggccagcca

SEQ ID NO: 5760306 - DNA, 25 bp, Homo sapien
ggtgccatcgtaataatgcttcttg

SEQ ID NO: 5760307 - DNA, 25 bp, Homo sapien
agacgttgccggtcgtcctcacagc

SEQ ID NO: 5760308 - DNA, 25 bp, Homo sapien
aggctctctgtggcgccgctgagag

SEQ ID NO: 5760309 - DNA, 25 bp, Homo sapien
aggatggcctggtcctacttctctg

SEQ ID NO: 5760310 - DNA, 25 bp, Homo sapien
cccttcttcttcacaaactggtagc

SEQ ID NO: 5760311 - DNA, 25 bp, Homo sapien
ccttgatatttagctgttccactgc

SEQ ID NO: 5760312 - DNA, 25 bp, Homo sapien
tcccggaagttcttggccttgatat

SEQ ID NO: 5760313 - DNA, 25 bp, Homo sapien
gacgctggctcagaggcctacaggt

SEQ ID NO: 5760314 - DNA, 25 bp, Homo sapien
tggcgccgctgagagcagagggctg

SEQ ID NO: 5760315 - DNA, 25 bp, Homo sapien
tccactttcttcttctccggggcct

SEQ ID NO: 5760316 - DNA, 25 bp, Homo sapien
actgcagtggtcaaaaggtaaacga

SEQ ID NO: 5760317 - DNA, 25 bp, Homo sapien
cttgaatgtggccagagaatacagt

SEQ ID NO: 5760318 - DNA, 25 bp, Homo sapien
cgtaataatgcttcttgcaaagcct

SEQ ID NO: 5760319 - DNA, 25 bp, Homo sapien
tacagaaatgtaaaccttcatttgc

SEQ ID NO: 5760320 - DNA, 25 bp, Homo sapien
tgatgcagaaggctgagcccaggct

SEQ ID NO: 5760321 - DNA, 25 bp, Homo sapien
ccagggtgtctgtcagggtgggcac

SEQ ID NO: 5760322 - DNA, 25 bp, Homo sapien
gttgctgttgggcccggagttggcc

SEQ ID NO: 5760323 - DNA, 25 bp, Homo sapien
gacagggatgacaggctgcagaggg

SEQ ID NO: 5760324 - DNA, 25 bp, Homo sapien
tcggcatttgtatttttcagataat

SEQ ID NO: 5760325 - DNA, 25 bp, Homo sapien
gccctggcggaaggtctgggggccc

SEQ ID NO: 5760326 - DNA, 25 bp, Homo sapien
tgacaggctgcagagggatgggctg

SEQ ID NO: 5760327 - DNA, 25 bp, Homo sapien
gtcctctccaaacctgcttctcact

SEQ ID NO: 5760328 - DNA, 25 bp, Homo sapien
cttgtccactttcttcttctccggg

SEQ ID NO: 5760329 - DNA, 25 bp, Homo sapien
cagagggatgggctggagaagagaa

SEQ ID NO: 5760330 - DNA, 25 bp, Homo sapien
cccgactgggcttcttcttggacat

SEQ ID NO: 5760331 - DNA, 25 bp, Homo sapien
ttgagggctcttcctctgctgctcg

SEQ ID NO: 5760332 - DNA, 25 bp, Homo sapien
atagtgggcagcattcagcttgtcc

SEQ ID NO: 5760333 - DNA, 25 bp, Homo sapien
ggtcccggaagttcttggccttgat

SEQ ID NO: 5760334 - DNA, 25 bp, Homo sapien
gccttcatggtggctgccagaatct

SEQ ID NO: 5760335 - DNA, 25 bp, Homo sapien
cctgggagcagatggccctgaagcc

SEQ ID NO: 5760336 - DNA, 25 bp, Homo sapien
ggcagctgcttcatgtgtggtctcc

SEQ ID NO: 5760337 - DNA, 25 bp, Homo sapien
atcggcctcctcataggggtccacg

SEQ ID NO: 5760338 - DNA, 25 bp, Homo sapien
atctgggcatcggcctcctcatagg

SEQ ID NO: 5760339 - DNA, 25 bp, Homo sapien
aatctcgtcccctttgaactccttg

SEQ ID NO: 5760340 - DNA, 25 bp, Homo sapien
tggggctggctgctcttcactttgg

SEQ ID NO: 5760341 - DNA, 25 bp, Homo sapien
tggtcacagacagggatgacaggct

SEQ ID NO: 5760342 - DNA, 25 bp, Homo sapien
gaggacagtgcctggcgggagggat

SEQ ID NO: 5760343 - DNA, 25 bp, Homo sapien
acccgcacctgtaccctggacgctg

SEQ ID NO: 5760344 - DNA, 25 bp, Homo sapien
tccctgcctggggctggctgctctt

SEQ ID NO: 5760345 - DNA, 25 bp, Homo sapien
ctgtaccctggacgctggctcagag

SEQ ID NO: 5760346 - DNA, 25 bp, Homo sapien
actgcctcataggcgtagacgttgc

SEQ ID NO: 5760347 - DNA, 25 bp, Homo sapien
acgatgccatcgggagtgcagactg

SEQ ID NO: 5760348 - DNA, 25 bp, Homo sapien
cttcatctgggtctattattttcat

SEQ ID NO: 5760349 - DNA, 25 bp, Homo sapien
ttcagcacaggtaatgtacattttg

SEQ ID NO: 5760350 - DNA, 25 bp, Homo sapien
ggtgtgtggacacctgggcagtcac

SEQ ID NO: 5760351 - DNA, 25 bp, Homo sapien
cggaaggtctgggggccctggctcc

SEQ ID NO: 5760352 - DNA, 25 bp, Homo sapien
ttgtagagctcctgcagggtctctc

SEQ ID NO: 5760353 - DNA, 25 bp, Homo sapien
aagttcttggccttgatatttagct

SEQ ID NO: 5760354 - DNA, 25 bp, Homo sapien
ctgcagagagagactgcagtggtca

SEQ ID NO: 5760355 - DNA, 25 bp, Homo sapien
aagagaaggagccagccatggcgca

SEQ ID NO: 5760356 - DNA, 25 bp, Homo sapien
cacaggagcgaaacgtgatgaagaa

SEQ ID NO: 5760357 - DNA, 25 bp, Homo sapien
tggccctgaagcccttccctcactg

SEQ ID NO: 5760358 - DNA, 25 bp, Homo sapien
tgccaccataaaagtgagtgtattc

SEQ ID NO: 5760359 - DNA, 25 bp, Homo sapien
ggtggaggtgaaggaagcgctgacc

SEQ ID NO: 5760360 - DNA, 25 bp, Homo sapien
gcagagagagactgcagtggtcaaa

SEQ ID NO: 5760361 - DNA, 25 bp, Homo sapien
ggtcactctccacattctccatggc

SEQ ID NO: 5760362 - DNA, 25 bp, Homo sapien
tgggcagtggtacttcccctcactg

SEQ ID NO: 5760363 - DNA, 25 bp, Homo sapien
aggggcccgaccaatggtcacagac

SEQ ID NO: 5760364 - DNA, 25 bp, Homo sapien
tccctgtggaatagtgggcagcatt

SEQ ID NO: 5760365 - DNA, 25 bp, Homo sapien
cctgatgaagttttcgcaggttttt

SEQ ID NO: 5760366 - DNA, 25 bp, Homo sapien
atggctgtcagtacgtcaaagcccc

SEQ ID NO: 5760367 - DNA, 25 bp, Homo sapien
gtagcgcagcacatcctcgtcgatg

SEQ ID NO: 5760368 - DNA, 25 bp, Homo sapien
tcctgtttggccttctcttcatctg

SEQ ID NO: 5760369 - DNA, 25 bp, Homo sapien
gccagccatggcgcagttcttgttc

SEQ ID NO: 5760370 - DNA, 25 bp, Homo sapien
tgtggaatagtgggcagcattcagc

SEQ ID NO: 5760371 - DNA, 25 bp, Homo sapien
gagatctggcttcttgccaccataa

SEQ ID NO: 5760372 - DNA, 25 bp, Homo sapien
gaattgagacctgttgctgttgggc

SEQ ID NO: 5760373 - DNA, 25 bp, Homo sapien
agagactgcagtggtcaaaaggtaa

SEQ ID NO: 5760374 - DNA, 25 bp, Homo sapien
cagggtctctcgggtctcggcattt

SEQ ID NO: 5760375 - DNA, 25 bp, Homo sapien
cagcactgggcagtggtacttcccc

SEQ ID NO: 5760376 - DNA, 25 bp, Homo sapien
caaagttccggatggatctgtggaa

SEQ ID NO: 5760377 - DNA, 25 bp, Homo sapien
gttactgccagggctgcaccaggcc

SEQ ID NO: 5760378 - DNA, 25 bp, Homo sapien
ccgcacgtagcccttcttcttcaca

SEQ ID NO: 5760379 - DNA, 25 bp, Homo sapien
tcaagcacggggccttcagcttccc

SEQ ID NO: 5760380 - DNA, 25 bp, Homo sapien
ccgaccaatggtcacagacagggat

SEQ ID NO: 5760381 - DNA, 25 bp, Homo sapien
gtcgatggcagctgcttcatgtgtg

SEQ ID NO: 5760382 - DNA, 25 bp, Homo sapien
gcacaggtaatgtacattttgtcct

SEQ ID NO: 5760383 - DNA, 25 bp, Homo sapien
ggcggaaggtctgggggccctggct

SEQ ID NO: 5760384 - DNA, 25 bp, Homo sapien
gggttgatgtacttgcccacgccct

SEQ ID NO: 5760385 - DNA, 25 bp, Homo sapien
ttcgcaggtttttggtgtcaggtcg

SEQ ID NO: 5760386 - DNA, 25 bp, Homo sapien
ttgtccttttggtgctgtcgcttcc

SEQ ID NO: 5760387 - DNA, 25 bp, Homo sapien
ggcatcaatgcggatctcctcctta

SEQ ID NO: 5760388 - DNA, 25 bp, Homo sapien
cctctagtggtcatcaggcagcctg

SEQ ID NO: 5760389 - DNA, 25 bp, Homo sapien
acacggtaaacagcactgggcagtg

SEQ ID NO: 5760390 - DNA, 25 bp, Homo sapien
gggtccacgaacactgtagtggcat

SEQ ID NO: 5760391 - DNA, 25 bp, Homo sapien
caggtaggcacaggagcgaaacgtg

SEQ ID NO: 5760392 - DNA, 25 bp, Homo sapien
gcacggggccttcagcttcccctgt

SEQ ID NO: 5760393 - DNA, 25 bp, Homo sapien
gagccagccatggcgcagttcttgt

SEQ ID NO: 5760394 - DNA, 25 bp, Homo sapien
tgcttctcactccctggtcaggcct

SEQ ID NO: 5760395 - DNA, 25 bp, Homo sapien
cttcgagctctggagccaaggatgg

SEQ ID NO: 5760396 - DNA, 25 bp, Homo sapien
ggcagtcactgtgtcctactgtgcc

SEQ ID NO: 5760397 - DNA, 25 bp, Homo sapien
acccgtgcctgtgcctgtggggtcg

SEQ ID NO: 5760398 - DNA, 25 bp, Homo sapien
actttggtctccggggctaccttga

SEQ ID NO: 5760399 - DNA, 25 bp, Homo sapien
ggctgagcccaggctctctgtggcg

SEQ ID NO: 5760400 - DNA, 25 bp, Homo sapien
cctgatgcagaaggctgagcccagg

SEQ ID NO: 5760401 - DNA, 25 bp, Homo sapien
actacagaaatgtaaaccttcattt

SEQ ID NO: 5760402 - DNA, 25 bp, Homo sapien
actgggcttcttcttggacatgggg

SEQ ID NO: 5760403 - DNA, 25 bp, Homo sapien
gcttggtgtctgagcctcttacaag

SEQ ID NO: 5760404 - DNA, 25 bp, Homo sapien
agggtgggcacagggtcctctccaa

SEQ ID NO: 5760405 - DNA, 25 bp, Homo sapien
cctggggctggctgctcttcacttt

SEQ ID NO: 5760406 - DNA, 25 bp, Homo sapien
tggtgtcaggtcgcagtgcagctcc

SEQ ID NO: 5760407 - DNA, 25 bp, Homo sapien
tggaatagtgggcagcattcagctt

SEQ ID NO: 5760408 - DNA, 25 bp, Homo sapien
cctggcgggagggatggagggcgtc

SEQ ID NO: 5760409 - DNA, 25 bp, Homo sapien
gctctggagccaaggatggcctggt

SEQ ID NO: 5760410 - DNA, 25 bp, Homo sapien
gccacagattggtgtgcagcagggt

SEQ ID NO: 5760411 - DNA, 25 bp, Homo sapien
gtcagtacgtcaaagcccccaacaa

SEQ ID NO: 5760412 - DNA, 25 bp, Homo sapien
aagttagagacattgaacttgtcca

SEQ ID NO: 5760413 - DNA, 25 bp, Homo sapien
tgttcttagcatgatgaagggccac

SEQ ID NO: 5760414 - DNA, 25 bp, Homo sapien
gcgctgaccttccctgtggaatagt

SEQ ID NO: 5760415 - DNA, 25 bp, Homo sapien
cttcttgcaaagcctgatgaagttt

SEQ ID NO: 5760416 - DNA, 25 bp, Homo sapien
atggtgccatcgtaataatgcttct

SEQ ID NO: 5760417 - DNA, 25 bp, Homo sapien
caacaacccgtccaaagatggtatg

SEQ ID NO: 5760418 - DNA, 25 bp, Homo sapien
gttgggcccggagttggccatgctg

SEQ ID NO: 5760419 - DNA, 25 bp, Homo sapien
ctggccacaccgccagcccttggtc

SEQ ID NO: 5760420 - DNA, 25 bp, Homo sapien
cctgtggaatagtgggcagcattca

SEQ ID NO: 5760421 - DNA, 25 bp, Homo sapien
cagatggccctgaagcccttccctc

SEQ ID NO: 5760422 - DNA, 25 bp, Homo sapien
agcgaaacgtgatgaagaattgaga

SEQ ID NO: 5760423 - DNA, 25 bp, Homo sapien
ccgagctcaagcacggggccttcag

SEQ ID NO: 5760424 - DNA, 25 bp, Homo sapien
agggctcgtcggtcagcaggtcccg

SEQ ID NO: 5760425 - DNA, 25 bp, Homo sapien
cttctcactccctggtcaggccttc

SEQ ID NO: 5760426 - DNA, 25 bp, Homo sapien
ggtcatcaggcagcctgctgctacc

SEQ ID NO: 5760427 - DNA, 25 bp, Homo sapien
tcgtcgatggcagctgcttcatgtg

SEQ ID NO: 5760428 - DNA, 25 bp, Homo sapien
gcagaaggctgagcccaggctctct

SEQ ID NO: 5760429 - DNA, 25 bp, Homo sapien
ggtcagttttggggtcactctccac

SEQ ID NO: 5760430 - DNA, 25 bp, Homo sapien
tcataggcgtagacgttgccggtcg

SEQ ID NO: 5760431 - DNA, 25 bp, Homo sapien
caatgttcagtaagtcaaagacgat

SEQ ID NO: 5760432 - DNA, 25 bp, Homo sapien
tctccgggaccatcgcggtggaggt

SEQ ID NO: 5760433 - DNA, 25 bp, Homo sapien
gggtctattattttcatgttattct

SEQ ID NO: 5760434 - DNA, 25 bp, Homo sapien
cttagggcggtcagttttggggtca

SEQ ID NO: 5760435 - DNA, 25 bp, Homo sapien
tccaaacctgcttctcactccctgg

SEQ ID NO: 5760436 - DNA, 25 bp, Homo sapien
agtatgactccccacccgtgcctgt

SEQ ID NO: 5760437 - DNA, 25 bp, Homo sapien
gcattcagcttgtccactttcttct

SEQ ID NO: 5760438 - DNA, 25 bp, Homo sapien
cttggacatggggacagtggcactg

SEQ ID NO: 5760439 - DNA, 25 bp, Homo sapien
caggagcgaaacgtgatgaagaatt

SEQ ID NO: 5760440 - DNA, 25 bp, Homo sapien
tgggctggagaagagaaggagccag

SEQ ID NO: 5760441 - DNA, 25 bp, Homo sapien
catcaatgcggatctcctccttagg

SEQ ID NO: 5760442 - DNA, 25 bp, Homo sapien
ccgcacctgtaccctggacgctggc

SEQ ID NO: 5760443 - DNA, 25 bp, Homo sapien
ctgctcggtggctgctgggttgatg

SEQ ID NO: 5760444 - DNA, 25 bp, Homo sapien
acaaagggctgcagagagagactgc

SEQ ID NO: 5760445 - DNA, 25 bp, Homo sapien
gcccttccctcactgtgcaggccac

SEQ ID NO: 5760446 - DNA, 25 bp, Homo sapien
gatctggcttcttgccaccataaaa

SEQ ID NO: 5760447 - DNA, 25 bp, Homo sapien
gtctccggggctaccttgagctgtg

SEQ ID NO: 5760448 - DNA, 25 bp, Homo sapien
aaatgtttaaatcgtgccctcagtg

SEQ ID NO: 5760449 - DNA, 25 bp, Homo sapien
tccccatggcggagcggcggcggcg

SEQ ID NO: 5760450 - DNA, 25 bp, Homo sapien
ttcttagcatgatgaagggccacag

SEQ ID NO: 5760451 - DNA, 25 bp, Homo sapien
tgccatcgggagtgcagactgggta

SEQ ID NO: 5760452 - DNA, 25 bp, Homo sapien
tgtcaaatgtttaaatcgtgccctc

SEQ ID NO: 5760453 - DNA, 25 bp, Homo sapien
tggtagcgcagcacatcctcgtcga

SEQ ID NO: 5760454 - DNA, 25 bp, Homo sapien
aaagacgatgccatcgggagtgcag

SEQ ID NO: 5760455 - DNA, 25 bp, Homo sapien
ggcagtggtacttcccctcactgtt

SEQ ID NO: 5760456 - DNA, 25 bp, Homo sapien
gggatgggctggagaagagaaggag

SEQ ID NO: 5760457 - DNA, 25 bp, Homo sapien
gccctgggagcagatggccctgaag

SEQ ID NO: 5760458 - DNA, 25 bp, Homo sapien
atcgggagtgcagactgggtagaca

SEQ ID NO: 5760459 - DNA, 25 bp, Homo sapien
gtgtgcgagaggttgggccggaact

SEQ ID NO: 5760460 - DNA, 25 bp, Homo sapien
cagacatacctctagtggtcatcag

SEQ ID NO: 5760461 - DNA, 25 bp, Homo sapien
accatcgcggtggaggtgaaggaag

SEQ ID NO: 5760462 - DNA, 25 bp, Homo sapien
ttggtggcctgtcccctgccctggg

SEQ ID NO: 5760463 - DNA, 25 bp, Homo sapien
cataaaagtgagtgtattcagcaca

SEQ ID NO: 5760464 - DNA, 25 bp, Homo sapien
tcttgcaaagcctgatgaagttttc

SEQ ID NO: 5760465 - DNA, 25 bp, Homo sapien
gacctcccgtccagcttctctccat

SEQ ID NO: 5760466 - DNA, 25 bp, Homo sapien
aagcccttccctcactgtgcaggcc

SEQ ID NO: 5760467 - DNA, 25 bp, Homo sapien
gatctgtggaagatggtgccatcgt

SEQ ID NO: 5760468 - DNA, 25 bp, Homo sapien
tggagggtgatgatgtcctgccggg

SEQ ID NO: 5760469 - DNA, 25 bp, Homo sapien
ttcttctccggggccttcatggtgg

SEQ ID NO: 5760470 - DNA, 25 bp, Homo sapien
tgagtgtattcagcacaggtaatgt

SEQ ID NO: 5760471 - DNA, 25 bp, Homo sapien
tggggtcctggagggtgatgatgtc

SEQ ID NO: 5760472 - DNA, 25 bp, Homo sapien
tcatggtggctgccagaatctcgtc

SEQ ID NO: 5760473 - DNA, 25 bp, Homo sapien
aatgcttcttgcaaagcctgatgaa

SEQ ID NO: 5760474 - DNA, 25 bp, Homo sapien
gacacctgggcagtcactgtgtcct

SEQ ID NO: 5760475 - DNA, 25 bp, Homo sapien
atgatgaagggccacagattggtgt

SEQ ID NO: 5760476 - DNA, 25 bp, Homo sapien
ctgagagcagagggctgtcttgggg

SEQ ID NO: 5760477 - DNA, 25 bp, Homo sapien
tgtggccagagaatacagtcagtca

SEQ ID NO: 5760478 - DNA, 25 bp, Homo sapien
gagctgaagtccccaaaaccccgac

SEQ ID NO: 5760479 - DNA, 25 bp, Homo sapien
ggtcctgtttggccttctcttcatc

SEQ ID NO: 5760480 - DNA, 25 bp, Homo sapien
gcctgtgcctgtggggtcgccccct

SEQ ID NO: 5760481 - DNA, 25 bp, Homo sapien
ccacgccctggcggaaggtctgggg

SEQ ID NO: 5760482 - DNA, 25 bp, Homo sapien
gagacattgaacttgtccaaattgg

SEQ ID NO: 5760483 - DNA, 25 bp, Homo sapien
tgcagactgggtagacaaagggctg

SEQ ID NO: 5760484 - DNA, 25 bp, Homo sapien
ccaggctctctgtggcgccgctgag

SEQ ID NO: 5760485 - DNA, 25 bp, Homo sapien
ccactgcctcataggcgtagacgtt

SEQ ID NO: 5760486 - DNA, 25 bp, Homo sapien
actttcttcttctccggggccttca

SEQ ID NO: 5760487 - DNA, 25 bp, Homo sapien
cctctgctgctcggtggctgctggg

SEQ ID NO: 5760488 - DNA, 25 bp, Homo sapien
ccatgtcctgatgcagaaggctgag

SEQ ID NO: 5760489 - DNA, 25 bp, Homo sapien
cttcatggtggctgccagaatctcg

SEQ ID NO: 5760490 - DNA, 25 bp, Homo sapien
ttgtgggagatctggcttcttgcca

SEQ ID NO: 5760491 - DNA, 25 bp, Homo sapien
ccgtacttcttaagccatggaacaa

SEQ ID NO: 5760492 - DNA, 25 bp, Homo sapien
gctccaggttgaggtcgcccttgtt

SEQ ID NO: 5760493 - DNA, 25 bp, Homo sapien
tggtctccggggctaccttgagctg

SEQ ID NO: 5760494 - DNA, 25 bp, Homo sapien
gatggccctgaagcccttccctcac

SEQ ID NO: 5760495 - DNA, 25 bp, Homo sapien
actctagagcccaggggcccgacca

SEQ ID NO: 5760496 - DNA, 25 bp, Homo sapien
ctcctctgcaggcccagcttggtgt

SEQ ID NO: 5760497 - DNA, 25 bp, Homo sapien
ggtggctgccagaatctcgtcccct

SEQ ID NO: 5760498 - DNA, 25 bp, Homo sapien
gatggtatgcttcttgtccaggtag

SEQ ID NO: 5760499 - DNA, 25 bp, Homo sapien
attcttcacatgatagaagttagag

SEQ ID NO: 5760500 - DNA, 25 bp, Homo sapien
aacccgtccaaagatggtatgcttc

SEQ ID NO: 5760501 - DNA, 25 bp, Homo sapien
ggttgggccggaactcgtctttgaa

SEQ ID NO: 5760502 - DNA, 25 bp, Homo sapien
gagggatggagggcgtcaaaagtca

SEQ ID NO: 5760503 - DNA, 25 bp, Homo sapien
gctgccagaatctcgtcccctttga

SEQ ID NO: 5760504 - DNA, 25 bp, Homo sapien
ggccagccagggtgtctgtcagggt

SEQ ID NO: 5760505 - DNA, 25 bp, Homo sapien
tgtgcagcagggtgacgaggggcag

SEQ ID NO: 5760506 - DNA, 25 bp, Homo sapien
cggagttggccatgctgaggatgcc

SEQ ID NO: 5760507 - DNA, 25 bp, Homo sapien
cttccgctcctgcgcaatctgggca

SEQ ID NO: 5760508 - DNA, 25 bp, Homo sapien
caaataaagcttctgatgtcaaatg

SEQ ID NO: 5760509 - DNA, 25 bp, Homo sapien
ctctcgggtctcggcatttgtattt

SEQ ID NO: 5760510 - DNA, 25 bp, Homo sapien
gctggctgctcttcactttggtctc

SEQ ID NO: 5760511 - DNA, 25 bp, Homo sapien
tctggagccaaggatggcctggtcc

SEQ ID NO: 5760512 - DNA, 25 bp, Homo sapien
acaggtaatgtacattttgtccttt

SEQ ID NO: 5760513 - DNA, 25 bp, Homo sapien
cgcttccccatggcggagcggcggc

SEQ ID NO: 5760514 - DNA, 25 bp, Homo sapien
aaatcgtgccctcagtggacgaggc

SEQ ID NO: 5760515 - DNA, 25 bp, Homo sapien
cctcttacaagccagttactgccag

SEQ ID NO: 5760516 - DNA, 25 bp, Homo sapien
tcttacaagccagttactgccaggg

SEQ ID NO: 5760517 - DNA, 25 bp, Homo sapien
gggctggctgctcttcactttggtc

SEQ ID NO: 5760518 - DNA, 25 bp, Homo sapien
cgcagcacatcctcgtcgatggcag

SEQ ID NO: 5760519 - DNA, 25 bp, Homo sapien
ggatcacaaagttccggatggatct

SEQ ID NO: 5760520 - DNA, 25 bp, Homo sapien
cttcttcttcacaaactggtagcgc

SEQ ID NO: 5760521 - DNA, 25 bp, Homo sapien
aatgcggatctcctccttagggcgg

SEQ ID NO: 5760522 - DNA, 25 bp, Homo sapien
ctgtcttggggtcttcgagctctgg

SEQ ID NO: 5760523 - DNA, 25 bp, Homo sapien
agactgcagtggtcaaaaggtaaac

SEQ ID NO: 5760524 - DNA, 25 bp, Homo sapien
ctggttgagggctcttcctctgctg

SEQ ID NO: 5760525 - DNA, 25 bp, Homo sapien
agtcagggccagccagggtgtctgt

SEQ ID NO: 5760526 - DNA, 25 bp, Homo sapien
ttccactgcctcataggcgtagacg

SEQ ID NO: 5760527 - DNA, 25 bp, Homo sapien
accttgagctgtgtcttccgctcct

SEQ ID NO: 5760528 - DNA, 25 bp, Homo sapien
ccctgccctgggagcagatggccct

SEQ ID NO: 5760529 - DNA, 25 bp, Homo sapien
actgggcagtggtacttcccctcac

SEQ ID NO: 5760530 - DNA, 25 bp, Homo sapien
gagcccaggctctctgtggcgccgc

SEQ ID NO: 5760531 - DNA, 25 bp, Homo sapien
cgactgggcttcttcttggacatgg

SEQ ID NO: 5760532 - DNA, 25 bp, Homo sapien
tcccgtacttcttaagccatggaac

SEQ ID NO: 5760533 - DNA, 25 bp, Homo sapien
tggtccttatctgtgtgaggtttac

SEQ ID NO: 5760534 - DNA, 25 bp, Homo sapien
cagattggtgtgcagcagggtgacg

SEQ ID NO: 5760535 - DNA, 25 bp, Homo sapien
ggcagacatacctctagtggtcatc

SEQ ID NO: 5760536 - DNA, 25 bp, Homo sapien
gggagaagggctcgtcggtcagcag

SEQ ID NO: 5760537 - DNA, 25 bp, Homo sapien
cttgttcttagcatgatgaagggcc

SEQ ID NO: 5760538 - DNA, 25 bp, Homo sapien
gtggcactggttgagggctcttcct

SEQ ID NO: 5760539 - DNA, 25 bp, Homo sapien
ggaacaatgttcagtaagtcaaaga

SEQ ID NO: 5760540 - DNA, 25 bp, Homo sapien
gggggacttgaatgtggccagagaa

SEQ ID NO: 5760541 - DNA, 25 bp, Homo sapien
tggctgctcttcactttggtctccg

SEQ ID NO: 5760542 - DNA, 25 bp, Homo sapien
agggtgtctgtcagggtgggcacag

SEQ ID NO: 5760543 - DNA, 25 bp, Homo sapien
acgaaaatttgtttgtgggagatct

SEQ ID NO: 5760544 - DNA, 25 bp, Homo sapien
cggcgactagcgagcacgaaaaaac

SEQ ID NO: 5760545 - DNA, 25 bp, Homo sapien
tgtggaagatggtgccatcgtaata

SEQ ID NO: 5760546 - DNA, 25 bp, Homo sapien
gcttcttgccaccataaaagtgagt

SEQ ID NO: 5760547 - DNA, 25 bp, Homo sapien
ctcctcataggggtccacgaacact

SEQ ID NO: 5760548 - DNA, 25 bp, Homo sapien
tgtcagggtgggcacagggtcctct

SEQ ID NO: 5760549 - DNA, 25 bp, Homo sapien
cgtctttgaagggcttcccccagta

SEQ ID NO: 5760550 - DNA, 25 bp, Homo sapien
gctgctcttcactttggtctccggg

SEQ ID NO: 5760551 - DNA, 25 bp, Homo sapien
tggatctgtggaagatggtgccatc

SEQ ID NO: 5760552 - DNA, 25 bp, Homo sapien
aaaagttcagcttgatcagggacct

SEQ ID NO: 5760553 - DNA, 25 bp, Homo sapien
gcggcggcgactagcgagcacgaaa

SEQ ID NO: 5760554 - DNA, 25 bp, Homo sapien
gcacctgtaccctggacgctggctc

SEQ ID NO: 5760555 - DNA, 25 bp, Homo sapien
cctacaggtgtgtggacacctgggc

SEQ ID NO: 5760556 - DNA, 25 bp, Homo sapien
tcagggtgggcacagggtcctctcc

SEQ ID NO: 5760557 - DNA, 25 bp, Homo sapien
gtggggtcgcccccttggatcacaa

SEQ ID NO: 5760558 - DNA, 25 bp, Homo sapien
cgcaatctgggcatcggcctcctca

SEQ ID NO: 5760559 - DNA, 25 bp, Homo sapien
gcccacgccctggcggaaggtctgg

SEQ ID NO: 5760560 - DNA, 25 bp, Homo sapien
agacaaagggctgcagagagagact

SEQ ID NO: 5760561 - DNA, 25 bp, Homo sapien
tggtcaggccttcatccccaccacc

SEQ ID NO: 5760562 - DNA, 25 bp, Homo sapien
gtggtcatcaggcagcctgctgcta

SEQ ID NO: 5760563 - DNA, 25 bp, Homo sapien
aatggtcacagacagggatgacagg

SEQ ID NO: 5760564 - DNA, 25 bp, Homo sapien
tgcctggggctggctgctcttcact

SEQ ID NO: 5760565 - DNA, 25 bp, Homo sapien
atttgtttgtgggagatctggcttc

SEQ ID NO: 5760566 - DNA, 25 bp, Homo sapien
ctgggggccctggctccctgcctgg

SEQ ID NO: 5760567 - DNA, 25 bp, Homo sapien
acaccgccagcccttggtccttatc

SEQ ID NO: 5760568 - DNA, 25 bp, Homo sapien
ccgggtgaggctggacggtcaccca

SEQ ID NO: 5760569 - DNA, 25 bp, Homo sapien
gtagagctcctgcagggtctctcgg

SEQ ID NO: 5760570 - DNA, 25 bp, Homo sapien
acaggctgcagagggatgggctgga

SEQ ID NO: 5760571 - DNA, 25 bp, Homo sapien
tgggcccggagttggccatgctgag

SEQ ID NO: 5760572 - DNA, 25 bp, Homo sapien
tctgtcagggtgggcacagggtcct

SEQ ID NO: 5760573 - DNA, 25 bp, Homo sapien
cctgcttctcactccctggtcaggc

SEQ ID NO: 5760574 - DNA, 25 bp, Homo sapien
ccgtgcctgtgcctgtggggtcgcc

SEQ ID NO: 5760575 - DNA, 25 bp, Homo sapien
aacagcactgggcagtggtacttcc

SEQ ID NO: 5760576 - DNA, 25 bp, Homo sapien
acttcttaagccatggaacaatgtt

SEQ ID NO: 5760577 - DNA, 25 bp, Homo sapien
acttgcccacgccctggcggaaggt

SEQ ID NO: 5760578 - DNA, 25 bp, Homo sapien
gcctgtggggtcgcccccttggatc

SEQ ID NO: 5760579 - DNA, 25 bp, Homo sapien
aaactacaaattaagctctaaaaca

SEQ ID NO: 5760580 - DNA, 25 bp, Homo sapien
taaaaaactacaaattaagctctaa

SEQ ID NO: 5760581 - DNA, 25 bp, Homo sapien
atggaacaatgttcagtaagtcaaa

SEQ ID NO: 5760582 - DNA, 25 bp, Homo sapien
ggaagcgctgaccttccctgtggaa

SEQ ID NO: 5760583 - DNA, 25 bp, Homo sapien
cacagacagggatgacaggctgcag

SEQ ID NO: 5760584 - DNA, 25 bp, Homo sapien
cttcttcttggacatggggacagtg

SEQ ID NO: 5760585 - DNA, 25 bp, Homo sapien
tggccagagaatacagtcagtcagg

SEQ ID NO: 5760586 - DNA, 25 bp, Homo sapien
gtcgcttccccatggcggagcggcg

SEQ ID NO: 5760587 - DNA, 25 bp, Homo sapien
tgtattcagcacaggtaatgtacat

SEQ ID NO: 5760588 - DNA, 25 bp, Homo sapien
ttcttggacatggggacagtggcac

SEQ ID NO: 5760589 - DNA, 25 bp, Homo sapien
tcacaaactggtagcgcagcacatc

SEQ ID NO: 5760590 - DNA, 25 bp, Homo sapien
actgccgagctcaagcacggggcct

SEQ ID NO: 5760591 - DNA, 25 bp, Homo sapien
ccccaccaatgggggacttgaatgt

SEQ ID NO: 5760592 - DNA, 25 bp, Homo sapien
ttggtgctgtcgcttccccatggcg

SEQ ID NO: 5760593 - DNA, 25 bp, Homo sapien
tggcttcactgcaaggagcaggact

SEQ ID NO: 5760594 - DNA, 25 bp, Homo sapien
tccacattctccatggctgtcagta

SEQ ID NO: 5760595 - DNA, 25 bp, Homo sapien
agtgcagctccaggttgaggtcgcc

SEQ ID NO: 5760596 - DNA, 25 bp, Homo sapien
ggccttgatatttagctgttccact

SEQ ID NO: 5760597 - DNA, 25 bp, Homo sapien
ggtcgcccttgttggtgtgcagccg

SEQ ID NO: 5760598 - DNA, 25 bp, Homo sapien
gtagcccttcttcttcacaaactgg

SEQ ID NO: 5760599 - DNA, 25 bp, Homo sapien
gtgtgaggtttacaaataaagcttc

SEQ ID NO: 5760600 - DNA, 25 bp, Homo sapien
aagacgggtcctgtttggccttctc

SEQ ID NO: 5760601 - DNA, 25 bp, Homo sapien
caccaggccttgcggaggacagtgc

SEQ ID NO: 5760602 - DNA, 25 bp, Homo sapien
ctgcaaggagcaggactgccgagct

SEQ ID NO: 5760603 - DNA, 25 bp, Homo sapien
tctgtggaagatggtgccatcgtaa

SEQ ID NO: 5760604 - DNA, 25 bp, Homo sapien
acgccctggcggaaggtctgggggc

SEQ ID NO: 5760605 - DNA, 25 bp, Homo sapien
agaagagaaggagccagccatggcg

SEQ ID NO: 5760606 - DNA, 25 bp, Homo sapien
gtgatgaagaattgagacctgttgc

SEQ ID NO: 5760607 - DNA, 25 bp, Homo sapien
tatgactccccacccgtgcctgtgc

SEQ ID NO: 5760608 - DNA, 25 bp, Homo sapien
cttggtccttatctgtgtgaggttt

SEQ ID NO: 5760609 - DNA, 25 bp, Homo sapien
agcttcccctgtcctctggccacac

SEQ ID NO: 5760610 - DNA, 25 bp, Homo sapien
ccatggaacaatgttcagtaagtca

SEQ ID NO: 5760611 - DNA, 25 bp, Homo sapien
gaacacggtaaacagcactgggcag

SEQ ID NO: 5760612 - DNA, 25 bp, Homo sapien
gtcctgatgcagaaggctgagccca

SEQ ID NO: 5760613 - DNA, 25 bp, Homo sapien
ctcgtctttgaagggcttcccccag

SEQ ID NO: 5760614 - DNA, 25 bp, Homo sapien
agggctgtcttggggtcttcgagct

SEQ ID NO: 5760615 - DNA, 25 bp, Homo sapien
catcgcggtggaggtgaaggaagcg

SEQ ID NO: 5760616 - DNA, 25 bp, Homo sapien
gcgggagggatggagggcgtcaaaa

SEQ ID NO: 5760617 - DNA, 25 bp, Homo sapien
ggctgtcttggggtcttcgagctct

SEQ ID NO: 5760618 - DNA, 25 bp, Homo sapien
aggcgtagacgttgccggtcgtcct

SEQ ID NO: 5760619 - DNA, 25 bp, Homo sapien
cctttgaactccttgtagagctcct

SEQ ID NO: 5760620 - DNA, 25 bp, Homo sapien
ctgtgtcctactgtgcccctcctct

SEQ ID NO: 5760621 - DNA, 25 bp, Homo sapien
gggtctctcgggtctcggcatttgt

SEQ ID NO: 5760622 - DNA, 25 bp, Homo sapien
accttccctgtggaatagtgggcag

SEQ ID NO: 5760623 - DNA, 25 bp, Homo sapien
tgcagtggtcaaaaggtaaacgacg

SEQ ID NO: 5760624 - DNA, 25 bp, Homo sapien
tcttcctctgctgctcggtggctgc

SEQ ID NO: 5760625 - DNA, 25 bp, Homo sapien
tacaggtgtgtggacacctgggcag

SEQ ID NO: 5760626 - DNA, 25 bp, Homo sapien
ctcgtcggtcagcaggtcccggaag

SEQ ID NO: 5760627 - DNA, 25 bp, Homo sapien
agttttcgcaggtttttggtgtcag

SEQ ID NO: 5760628 - DNA, 25 bp, Homo sapien
aaactggtagcgcagcacatcctcg

SEQ ID NO: 5760629 - DNA, 25 bp, Homo sapien
tcatttgccaaaggtccttggtggc

SEQ ID NO: 5760630 - DNA, 25 bp, Homo sapien
ctggacggtcacccatggtggcttc

SEQ ID NO: 5760631 - DNA, 25 bp, Homo sapien
gagagcagagggctgtcttggggtc

SEQ ID NO: 5760632 - DNA, 25 bp, Homo sapien
cacatgatagaagttagagacattg

SEQ ID NO: 5760633 - DNA, 25 bp, Homo sapien
acctgtaccctggacgctggctcag

SEQ ID NO: 5760634 - DNA, 25 bp, Homo sapien
acaacccgtccaaagatggtatgct

SEQ ID NO: 5760635 - DNA, 25 bp, Homo sapien
ccacgaacactgtagtggcatcaat

SEQ ID NO: 5760636 - DNA, 25 bp, Homo sapien
acaagccagttactgccagggctgc

SEQ ID NO: 5760637 - DNA, 25 bp, Homo sapien
gaggttgggccggaactcgtctttg

SEQ ID NO: 5760638 - DNA, 25 bp, Homo sapien
tagtggcatcaatgcggatctcctc

SEQ ID NO: 5760639 - DNA, 25 bp, Homo sapien
cactgcaaggagcaggactgccgag

SEQ ID NO: 5760640 - DNA, 25 bp, Homo sapien
ccatggtggcttcactgcaaggagc

SEQ ID NO: 5760641 - DNA, 25 bp, Homo sapien
gaggctggacggtcacccatggtgg

SEQ ID NO: 5760642 - DNA, 25 bp, Homo sapien
ccacccgcacctgtaccctggacgc

SEQ ID NO: 5760643 - DNA, 25 bp, Homo sapien
cgctggctcagaggcctacaggtgt

SEQ ID NO: 5760644 - DNA, 25 bp, Homo sapien
aaagtgagtgtattcagcacaggta

SEQ ID NO: 5760645 - DNA, 25 bp, Homo sapien
ttttcgcaggtttttggtgtcaggt

SEQ ID NO: 5760646 - DNA, 25 bp, Homo sapien
tgcctggcgggagggatggagggcg

SEQ ID NO: 5760647 - DNA, 25 bp, Homo sapien
ctgggcatcggcctcctcatagggg

SEQ ID NO: 5760648 - DNA, 25 bp, Homo sapien
tgctgaggatgccgcggcccgtgtg

SEQ ID NO: 5760649 - DNA, 25 bp, Homo sapien
ccggggctaccttgagctgtgtctt

SEQ ID NO: 5760650 - DNA, 25 bp, Homo sapien
taaagcttctgatgtcaaatgttta

SEQ ID NO: 5760651 - DNA, 25 bp, Homo sapien
tgagacctgttgctgttgggcccgg

SEQ ID NO: 5760652 - DNA, 25 bp, Homo sapien
gcggtcagttttggggtcactctcc

SEQ ID NO: 5760653 - DNA, 25 bp, Homo sapien
tcgtcctcacagccacgatgtgggt

SEQ ID NO: 5760654 - DNA, 25 bp, Homo sapien
agatggtgccatcgtaataatgctt

SEQ ID NO: 5760655 - DNA, 25 bp, Homo sapien
gccatggcgcagttcttgttcttag

SEQ ID NO: 5760656 - DNA, 25 bp, Homo sapien
cgccagcccttggtccttatctgtg

SEQ ID NO: 5760657 - DNA, 25 bp, Homo sapien
gagaggttgggccggaactcgtctt

SEQ ID NO: 5760658 - DNA, 25 bp, Homo sapien
attcaaatggttttaatagctaaaa

SEQ ID NO: 5760659 - DNA, 25 bp, Homo sapien
aagaattgagacctgttgctgttgg

SEQ ID NO: 5760660 - DNA, 25 bp, Homo sapien
caggtgtgtggacacctgggcagtc

SEQ ID NO: 5760661 - DNA, 25 bp, Homo sapien
gttcttggaaaagttcagcttgatc

SEQ ID NO: 5760662 - DNA, 25 bp, Homo sapien
agtcaaagacgatgccatcgggagt

SEQ ID NO: 5760663 - DNA, 25 bp, Homo sapien
ggtcagcaggtcccggaagttcttg

SEQ ID NO: 5760664 - DNA, 25 bp, Homo sapien
ccttccctcactgtgcaggccaccg

SEQ ID NO: 5760665 - DNA, 25 bp, Homo sapien
cttgcggaggacagtgcctggcggg

SEQ ID NO: 5760666 - DNA, 25 bp, Homo sapien
tgaatgtggccagagaatacagtca

SEQ ID NO: 5760667 - DNA, 25 bp, Homo sapien
ttttcagataataagacgggtcctg

SEQ ID NO: 5760668 - DNA, 25 bp, Homo sapien
gtttggccttctcttcatctgggtc

SEQ ID NO: 5760669 - DNA, 25 bp, Homo sapien
cagctgcttcatgtgtggtctccgg

SEQ ID NO: 5760670 - DNA, 25 bp, Homo sapien
cccagcttggtgtctgagcctctta

SEQ ID NO: 5760671 - DNA, 25 bp, Homo sapien
acgtgatgaagaattgagacctgtt

SEQ ID NO: 5760672 - DNA, 25 bp, Homo sapien
gaacttgtccaaattggtggggtcc

SEQ ID NO: 5760673 - DNA, 25 bp, Homo sapien
tgagctgtgtcttccgctcctgcgc

SEQ ID NO: 5760674 - DNA, 25 bp, Homo sapien
tgtacattttgtccttttggtgctg

SEQ ID NO: 5760675 - DNA, 25 bp, Homo sapien
aaagtcactctagagcccaggggcc

SEQ ID NO: 5760676 - DNA, 25 bp, Homo sapien
gaatagtgggcagcattcagcttgt

SEQ ID NO: 5760677 - DNA, 25 bp, Homo sapien
gagaatacagtcagtcagggccagc

SEQ ID NO: 5760678 - DNA, 25 bp, Homo sapien
taaaaattcaaatggttttaatagc

SEQ ID NO: 5760679 - DNA, 25 bp, Homo sapien
ggctggagaagagaaggagccagcc

SEQ ID NO: 5760680 - DNA, 25 bp, Homo sapien
agagggctgtcttggggtcttcgag

SEQ ID NO: 5760681 - DNA, 25 bp, Homo sapien
ggtgggcacagggtcctctccaaac

SEQ ID NO: 5760682 - DNA, 25 bp, Homo sapien
tcccctgccctgggagcagatggcc

SEQ ID NO: 5760683 - DNA, 25 bp, Homo sapien
ccctcctctgcaggcccagcttggt

SEQ ID NO: 5760684 - DNA, 25 bp, Homo sapien
aaggtccttggtggcctgtcccctg

SEQ ID NO: 5760685 - DNA, 25 bp, Homo sapien
cctcccgtccagcttctctccattg

SEQ ID NO: 5760686 - DNA, 25 bp, Homo sapien
gcaaggagcaggactgccgagctca

SEQ ID NO: 5760687 - DNA, 25 bp, Homo sapien
gcatgatgaagggccacagattggt

SEQ ID NO: 5760688 - DNA, 25 bp, Homo sapien
tccaaagatggtatgcttcttgtcc

SEQ ID NO: 5760689 - DNA, 25 bp, Homo sapien
atcaggcagcctgctgctaccagga

SEQ ID NO: 5760690 - DNA, 25 bp, Homo sapien
gttggccatgctgaggatgccgcgg

SEQ ID NO: 5760691 - DNA, 25 bp, Homo sapien
agccacgatgtgggtgttgttggtg

SEQ ID NO: 5760692 - DNA, 25 bp, Homo sapien
ttgcccacgccctggcggaaggtct

SEQ ID NO: 5760693 - DNA, 25 bp, Homo sapien
cctgccgggagaagggctcgtcggt

SEQ ID NO: 5760694 - DNA, 25 bp, Homo sapien
gtcctgccgggagaagggctcgtcg

SEQ ID NO: 5760695 - DNA, 25 bp, Homo sapien
ttttggtgctgtcgcttccccatgg

SEQ ID NO: 5760696 - DNA, 25 bp, Homo sapien
gcactgggcagtggtacttcccctc

SEQ ID NO: 5760697 - DNA, 25 bp, Homo sapien
tgtccaggtaggcacaggagcgaaa

SEQ ID NO: 5760698 - DNA, 25 bp, Homo sapien
tgctaccaggagctgaagtccccaa

SEQ ID NO: 5760699 - DNA, 25 bp, Homo sapien
gataataagacgggtcctgtttggc

SEQ ID NO: 5760700 - DNA, 25 bp, Homo sapien
ggtttttggtgtcaggtcgcagtgc

SEQ ID NO: 5760701 - DNA, 25 bp, Homo sapien
ctgctgctaccaggagctgaagtcc

SEQ ID NO: 5760702 - DNA, 25 bp, Homo sapien
gacatggggacagtggcactggttg

SEQ ID NO: 5760703 - DNA, 25 bp, Homo sapien
gccatgctgaggatgccgcggcccg

SEQ ID NO: 5760704 - DNA, 25 bp, Homo sapien
tcgagctctggagccaaggatggcc

SEQ ID NO: 5760705 - DNA, 25 bp, Homo sapien
gggccttcatggtggctgccagaat

SEQ ID NO: 5760706 - DNA, 25 bp, Homo sapien
cttagcatgatgaagggccacagat

SEQ ID NO: 5760707 - DNA, 25 bp, Homo sapien
tggggtcttcgagctctggagccaa

SEQ ID NO: 5760708 - DNA, 25 bp, Homo sapien
gtctctcgggtctcggcatttgtat

SEQ ID NO: 5760709 - DNA, 25 bp, Homo sapien
gggacctcccgtccagcttctctcc

SEQ ID NO: 5760710 - DNA, 25 bp, Homo sapien
gaagatggtgccatcgtaataatgc

SEQ ID NO: 5760711 - DNA, 25 bp, Homo sapien
ctgccagggctgcaccaggccttgc

SEQ ID NO: 5760712 - DNA, 25 bp, Homo sapien
gctcttcctctgctgctcggtggct

SEQ ID NO: 5760713 - DNA, 25 bp, Homo sapien
aaagggctgcagagagagactgcag

SEQ ID NO: 5760714 - DNA, 25 bp, Homo sapien
aaattcaaatggttttaatagctaa

SEQ ID NO: 5760715 - DNA, 25 bp, Homo sapien
cgatggcagctgcttcatgtgtggt

SEQ ID NO: 5760716 - DNA, 25 bp, Homo sapien
tcactccctggtcaggccttcatcc

SEQ ID NO: 5760717 - DNA, 25 bp, Homo sapien
ggtgacgaggggcagacatacctct

SEQ ID NO: 5760718 - DNA, 25 bp, Homo sapien
atgtcctgccgggagaagggctcgt

SEQ ID NO: 5760719 - DNA, 25 bp, Homo sapien
tctggcttcttgccaccataaaagt

SEQ ID NO: 5760720 - DNA, 25 bp, Homo sapien
ttcttaagccatggaacaatgttca

SEQ ID NO: 5760721 - DNA, 25 bp, Homo sapien
ggcttcttcttggacatggggacag

SEQ ID NO: 5760722 - DNA, 25 bp, Homo sapien
cttcatttgccaaaggtccttggtg

SEQ ID NO: 5760723 - DNA, 25 bp, Homo sapien
cattgaacttgtccaaattggtggg

SEQ ID NO: 5760724 - DNA, 25 bp, Homo sapien
cccatggcggagcggcggcggcgac

SEQ ID NO: 5760725 - DNA, 25 bp, Homo sapien
ttcttgtccaggtaggcacaggagc

SEQ ID NO: 5760726 - DNA, 25 bp, Homo sapien
gtacttgcccacgccctggcggaag

SEQ ID NO: 5760727 - DNA, 25 bp, Homo sapien
atgaagttttcgcaggtttttggtg

SEQ ID NO: 5760728 - DNA, 25 bp, Homo sapien
ccacaccgccagcccttggtcctta

SEQ ID NO: 5760729 - DNA, 25 bp, Homo sapien
ctgttgggcccggagttggccatgc

SEQ ID NO: 5760730 - DNA, 25 bp, Homo sapien
ggcatttgtatttttcagataataa

SEQ ID NO: 5760731 - DNA, 25 bp, Homo sapien
tttgaagggcttcccccagtatgac

SEQ ID NO: 5760732 - DNA, 25 bp, Homo sapien
catgctgaggatgccgcggcccgtg

SEQ ID NO: 5760733 - DNA, 25 bp, Homo sapien
ggtgtgcagcagggtgacgaggggc

SEQ ID NO: 5760734 - DNA, 25 bp, Homo sapien
ccttttggtgctgtcgcttccccat

SEQ ID NO: 5760735 - DNA, 25 bp, Homo sapien
ggtcacccatggtggcttcactgca

SEQ ID NO: 5760736 - DNA, 25 bp, Homo sapien
ctcttcactttggtctccggggcta

SEQ ID NO: 5760737 - DNA, 25 bp, Homo sapien
gtatgcttcttgtccaggtaggcac

SEQ ID NO: 5760738 - DNA, 25 bp, Homo sapien
gatgaagggccacagattggtgtgc

SEQ ID NO: 5760739 - DNA, 25 bp, Homo sapien
ggctgcagagagagactgcagtggt

SEQ ID NO: 5760740 - DNA, 25 bp, Homo sapien
agcttgatcagggacctcccgtcca

SEQ ID NO: 5760741 - DNA, 25 bp, Homo sapien
tattcagcacaggtaatgtacattt

SEQ ID NO: 5760742 - DNA, 25 bp, Homo sapien
ttcactgcaaggagcaggactgccg

SEQ ID NO: 5760743 - DNA, 25 bp, Homo sapien
gtgtgcagccgcacgtagcccttct

SEQ ID NO: 5760744 - DNA, 25 bp, Homo sapien
gaaaatttgtttgtgggagatctgg

SEQ ID NO: 5760745 - DNA, 25 bp, Homo sapien
tggacacctgggcagtcactgtgtc

SEQ ID NO: 5760746 - DNA, 25 bp, Homo sapien
gaaatgtaaaccttcatttgccaaa

SEQ ID NO: 5760747 - DNA, 25 bp, Homo sapien
tctgagcctcttacaagccagttac

SEQ ID NO: 5760748 - DNA, 25 bp, Homo sapien
aacaaacaaactacagaaatgtaaa

SEQ ID NO: 5760749 - DNA, 25 bp, Homo sapien
tttacaaataaagcttctgatgtca

SEQ ID NO: 5760750 - DNA, 25 bp, Homo sapien
cccggagttggccatgctgaggatg

SEQ ID NO: 5760751 - DNA, 25 bp, Homo sapien
accctggacgctggctcagaggcct

SEQ ID NO: 5760752 - DNA, 25 bp, Homo sapien
ggcagcctgctgctaccaggagctg

SEQ ID NO: 5760753 - DNA, 25 bp, Homo sapien
taaaccttcatttgccaaaggtcct

SEQ ID NO: 5760754 - DNA, 25 bp, Homo sapien
gatgggctggagaagagaaggagcc

SEQ ID NO: 5760755 - DNA, 25 bp, Homo sapien
gtcttcgagctctggagccaaggat

SEQ ID NO: 5760756 - DNA, 25 bp, Homo sapien
ttgatatttagctgttccactgcct

SEQ ID NO: 5760757 - DNA, 25 bp, Homo sapien
aattggtggggtcctggagggtgat

SEQ ID NO: 5760758 - DNA, 25 bp, Homo sapien
caggactgccgagctcaagcacggg

SEQ ID NO: 5760759 - DNA, 25 bp, Homo sapien
gcgtcaaaagtcactctagagccca

SEQ ID NO: 5760760 - DNA, 25 bp, Homo sapien
gacattgaacttgtccaaattggtg

SEQ ID NO: 5760761 - DNA, 25 bp, Homo sapien
taataatgcttcttgcaaagcctga

SEQ ID NO: 5760762 - DNA, 25 bp, Homo sapien
taggcacaggagcgaaacgtgatga

SEQ ID NO: 5760763 - DNA, 25 bp, Homo sapien
tggacatggggacagtggcactggt

SEQ ID NO: 5760764 - DNA, 25 bp, Homo sapien
ccggaagttcttggccttgatattt

SEQ ID NO: 5760765 - DNA, 25 bp, Homo sapien
ctgtggggtcgcccccttggatcac

SEQ ID NO: 5760766 - DNA, 25 bp, Homo sapien
gcgccgctgagagcagagggctgtc

SEQ ID NO: 5760767 - DNA, 25 bp, Homo sapien
tgcctcataggcgtagacgttgccg

SEQ ID NO: 5760768 - DNA, 25 bp, Homo sapien
ggctgacaactcagaccatggagcc

SEQ ID NO: 5760769 - DNA, 25 bp, Homo sapien
tggccatgctgaggatgccgcggcc

SEQ ID NO: 5760770 - DNA, 25 bp, Homo sapien
acgaggccatgtcctgatgcagaag

SEQ ID NO: 5760771 - DNA, 25 bp, Homo sapien
ggcctacaggtgtgtggacacctgg

SEQ ID NO: 5760772 - DNA, 25 bp, Homo sapien
ggcttcccccagtatgactccccac

SEQ ID NO: 5760773 - DNA, 25 bp, Homo sapien
tatttagctgttccactgcctcata

SEQ ID NO: 5760774 - DNA, 25 bp, Homo sapien
tagctaaaaaactacaaattaagct

SEQ ID NO: 5760775 - DNA, 25 bp, Homo sapien
agttttggggtcactctccacattc

SEQ ID NO: 5760776 - DNA, 25 bp, Homo sapien
ctgtcagtacgtcaaagcccccaac

SEQ ID NO: 5760777 - DNA, 25 bp, Homo sapien
agtaagtcaaagacgatgccatcgg

SEQ ID NO: 5760778 - DNA, 25 bp, Homo sapien
caatctgggcatcggcctcctcata

SEQ ID NO: 5760779 - DNA, 25 bp, Homo sapien
cctgtcctctggccacaccgccagc

SEQ ID NO: 5760780 - DNA, 25 bp, Homo sapien
tgatagaagttagagacattgaact

SEQ ID NO: 5760781 - DNA, 25 bp, Homo sapien
ggagcaggactgccgagctcaagca

SEQ ID NO: 5760782 - DNA, 25 bp, Homo sapien
atttttcagataataagacgggtcc

SEQ ID NO: 5760783 - DNA, 25 bp, Homo sapien
gccggaactcgtctttgaagggctt

SEQ ID NO: 5760784 - DNA, 25 bp, Homo sapien
catggcgcagttcttgttcttagca

SEQ ID NO: 5760785 - DNA, 25 bp, Homo sapien
gtgcgagaggttgggccggaactcg

SEQ ID NO: 5760786 - DNA, 25 bp, Homo sapien
cggaggacagtgcctggcgggaggg

SEQ ID NO: 5760787 - DNA, 25 bp, Homo sapien
tgtaaaccttcatttgccaaaggtc

SEQ ID NO: 5760788 - DNA, 25 bp, Homo sapien
ggctgtcagtacgtcaaagccccca

SEQ ID NO: 5760789 - DNA, 25 bp, Homo sapien
taagccatggaacaatgttcagtaa

SEQ ID NO: 5760790 - DNA, 25 bp, Homo sapien
gtgtggtctccgggaccatcgcggt

SEQ ID NO: 5760791 - DNA, 25 bp, Homo sapien
tcttcttcacaaactggtagcgcag

SEQ ID NO: 5760792 - DNA, 25 bp, Homo sapien
ggcccggagttggccatgctgagga

SEQ ID NO: 5760793 - DNA, 25 bp, Homo sapien
ctcagtggacgaggccatgtcctga

SEQ ID NO: 5760794 - DNA, 25 bp, Homo sapien
atgggggacttgaatgtggccagag

SEQ ID NO: 5760795 - DNA, 25 bp, Homo sapien
acctgttgctgttgggcccggagtt

SEQ ID NO: 5760796 - DNA, 25 bp, Homo sapien
taatagctaaaaaactacaaattaa

SEQ ID NO: 5760797 - DNA, 25 bp, Homo sapien
cccaccacccgcacctgtaccctgg

SEQ ID NO: 5760798 - DNA, 25 bp, Homo sapien
gcttcttgtccaggtaggcacagga

SEQ ID NO: 5760799 - DNA, 25 bp, Homo sapien
tcttcacatgatagaagttagagac

SEQ ID NO: 5760800 - DNA, 25 bp, Homo sapien
cgtgccctcagtggacgaggccatg

SEQ ID NO: 5760801 - DNA, 25 bp, Homo sapien
gtaatgtacattttgtccttttggt

SEQ ID NO: 5760802 - DNA, 25 bp, Homo sapien
cggggccttcatggtggctgccaga

SEQ ID NO: 5760803 - DNA, 25 bp, Homo sapien
gacctacagctttgtagcaagctac

SEQ ID NO: 5760804 - DNA, 25 bp, Homo sapien
aggatgaagtgtttgaagagattgc

SEQ ID NO: 5760805 - DNA, 25 bp, Homo sapien
cacctcgccatgatttttcctttga

SEQ ID NO: 5760806 - DNA, 25 bp, Homo sapien
gcgacttgaccccggcttagccctc

SEQ ID NO: 5760807 - DNA, 25 bp, Homo sapien
ggtgggccctctgatcctccaaccc

SEQ ID NO: 5760808 - DNA, 25 bp, Homo sapien
agaagaaacggacaagaggcctggg

SEQ ID NO: 5760809 - DNA, 25 bp, Homo sapien
atggctatccagtatgcatctttgc

SEQ ID NO: 5760810 - DNA, 25 bp, Homo sapien
gagggcttggtgcaagagcttcaga

SEQ ID NO: 5760811 - DNA, 25 bp, Homo sapien
ccattaacagcagcctgtccacgct

SEQ ID NO: 5760812 - DNA, 25 bp, Homo sapien
gctcaggccaacaggaagtgaagac

SEQ ID NO: 5760813 - DNA, 25 bp, Homo sapien
gctcagagatgcccagcagcaggtc

SEQ ID NO: 5760814 - DNA, 25 bp, Homo sapien
ctttgaccgggtattcccaccagga

SEQ ID NO: 5760815 - DNA, 25 bp, Homo sapien
cagaagcagccctgtcaagcagcca

SEQ ID NO: 5760816 - DNA, 25 bp, Homo sapien
aacacaggccattaacagcagcctg

SEQ ID NO: 5760817 - DNA, 25 bp, Homo sapien
ccctcactacagtgccacagacaca

SEQ ID NO: 5760818 - DNA, 25 bp, Homo sapien
agatgcccagcagcaggtcaaggcc

SEQ ID NO: 5760819 - DNA, 25 bp, Homo sapien
aggtggacatggatccgcagaggtc

SEQ ID NO: 5760820 - DNA, 25 bp, Homo sapien
cctgtctcctgtgagaaagaagtgg

SEQ ID NO: 5760821 - DNA, 25 bp, Homo sapien
agcagccctgtcaagcagccaagca

SEQ ID NO: 5760822 - DNA, 25 bp, Homo sapien
agctcccccacctcgccatgatttt

SEQ ID NO: 5760823 - DNA, 25 bp, Homo sapien
tctccgagtccctcaactctctacg

SEQ ID NO: 5760824 - DNA, 25 bp, Homo sapien
cggaacagcaaactgacctacctgc

SEQ ID NO: 5760825 - DNA, 25 bp, Homo sapien
attcccccggcgcgtgtgggaccga

SEQ ID NO: 5760826 - DNA, 25 bp, Homo sapien
cacatcaggtgttcctcccatggca

SEQ ID NO: 5760827 - DNA, 25 bp, Homo sapien
ccagaatgaacggtcatcacgcagc

SEQ ID NO: 5760828 - DNA, 25 bp, Homo sapien
cagctttgtagcaagctacgtagag

SEQ ID NO: 5760829 - DNA, 25 bp, Homo sapien
aggagggcttggtgcaagagcttca

SEQ ID NO: 5760830 - DNA, 25 bp, Homo sapien
caccccctggcctcctcctgtttcc

SEQ ID NO: 5760831 - DNA, 25 bp, Homo sapien
ggtggagggcaccatgtcccagggc

SEQ ID NO: 5760832 - DNA, 25 bp, Homo sapien
gccagacaggcagtggcaagacctt

SEQ ID NO: 5760833 - DNA, 25 bp, Homo sapien
agtggtcagggctggacctacagct

SEQ ID NO: 5760834 - DNA, 25 bp, Homo sapien
tggggctggttatcatggccctgag

SEQ ID NO: 5760835 - DNA, 25 bp, Homo sapien
cagagcgcacaacactggaggggca

SEQ ID NO: 5760836 - DNA, 25 bp, Homo sapien
ctggaggggcatttagccaaggtac

SEQ ID NO: 5760837 - DNA, 25 bp, Homo sapien
aactaaaacggtgccgtgagaggac

SEQ ID NO: 5760838 - DNA, 25 bp, Homo sapien
ctcctcctgtttccctctggccctg

SEQ ID NO: 5760839 - DNA, 25 bp, Homo sapien
gagcgggaagaacgtcttcatgggc

SEQ ID NO: 5760840 - DNA, 25 bp, Homo sapien
aggccaacaggaagtgaagacggat

SEQ ID NO: 5760841 - DNA, 25 bp, Homo sapien
tgcatctttgcctatggccagacag

SEQ ID NO: 5760842 - DNA, 25 bp, Homo sapien
gcagactcaagaggaggcctgacca

SEQ ID NO: 5760843 - DNA, 25 bp, Homo sapien
ggaggggcatttagccaaggtacag

SEQ ID NO: 5760844 - DNA, 25 bp, Homo sapien
tcaggccaacaggaagtgaagacgg

SEQ ID NO: 5760845 - DNA, 25 bp, Homo sapien
ccgtgcgagttctctaccctgcttc

SEQ ID NO: 5760846 - DNA, 25 bp, Homo sapien
aacgtctccgagtccctcaactctc

SEQ ID NO: 5760847 - DNA, 25 bp, Homo sapien
ctaaaacggtgccgtgagaggactc

SEQ ID NO: 5760848 - DNA, 25 bp, Homo sapien
ttggaccaagagaaccagcagcttc

SEQ ID NO: 5760849 - DNA, 25 bp, Homo sapien
tccgagtccctcaactctctacgct

SEQ ID NO: 5760850 - DNA, 25 bp, Homo sapien
attcccaccaggaagtggacaggat

SEQ ID NO: 5760851 - DNA, 25 bp, Homo sapien
cttgaccccggcttagccctcggcc

SEQ ID NO: 5760852 - DNA, 25 bp, Homo sapien
gggagcccactccaccccctggcct

SEQ ID NO: 5760853 - DNA, 25 bp, Homo sapien
cccagttggaggggctgatccctcg

SEQ ID NO: 5760854 - DNA, 25 bp, Homo sapien
ttgtccagtcagccctggatggcta

SEQ ID NO: 5760855 - DNA, 25 bp, Homo sapien
agcctgagaagaaacggacaagagg

SEQ ID NO: 5760856 - DNA, 25 bp, Homo sapien
ccacgctggggctggttatcatggc

SEQ ID NO: 5760857 - DNA, 25 bp, Homo sapien
gcacgcaggagggcttggtgcaaga

SEQ ID NO: 5760858 - DNA, 25 bp, Homo sapien
gtggacatggatccgcagaggtccc

SEQ ID NO: 5760859 - DNA, 25 bp, Homo sapien
accacagctcaaaaagtttccaaga

SEQ ID NO: 5760860 - DNA, 25 bp, Homo sapien
agaacgcgagtcccaggatccccgg

SEQ ID NO: 5760861 - DNA, 25 bp, Homo sapien
ggccctggtgggccctctgatcctc

SEQ ID NO: 5760862 - DNA, 25 bp, Homo sapien
ctcttctctgtggctcaggagctga

SEQ ID NO: 5760863 - DNA, 25 bp, Homo sapien
gagggcaccatgtcccagggctatc

SEQ ID NO: 5760864 - DNA, 25 bp, Homo sapien
agttctcttccactgcattcccccg

SEQ ID NO: 5760865 - DNA, 25 bp, Homo sapien
ggacatggatccgcagaggtccccc

SEQ ID NO: 5760866 - DNA, 25 bp, Homo sapien
tgaagagacctctgattaaggcccc

SEQ ID NO: 5760867 - DNA, 25 bp, Homo sapien
caggcccaggctgagcagggccaac

SEQ ID NO: 5760868 - DNA, 25 bp, Homo sapien
gacgccctgcttcatctggcccgcc

SEQ ID NO: 5760869 - DNA, 25 bp, Homo sapien
ccatgcttgtccagtcagccctgga

SEQ ID NO: 5760870 - DNA, 25 bp, Homo sapien
ggaactcaagggcaacatccgtgta

SEQ ID NO: 5760871 - DNA, 25 bp, Homo sapien
tccctcaactctctacgctttgcct

SEQ ID NO: 5760872 - DNA, 25 bp, Homo sapien
atgagactgtccgggacctgctggc

SEQ ID NO: 5760873 - DNA, 25 bp, Homo sapien
atggagcgccggcgactgcacaacc

SEQ ID NO: 5760874 - DNA, 25 bp, Homo sapien
gggaccctgagtggggcaccagctc

SEQ ID NO: 5760875 - DNA, 25 bp, Homo sapien
ttgaccgggtattcccaccaggaag

SEQ ID NO: 5760876 - DNA, 25 bp, Homo sapien
ttcatgggctagaaatggagcgccg

SEQ ID NO: 5760877 - DNA, 25 bp, Homo sapien
aaattaccacatcccacccaagagt

SEQ ID NO: 5760878 - DNA, 25 bp, Homo sapien
gttgaagaaccagaagccagttcct

SEQ ID NO: 5760879 - DNA, 25 bp, Homo sapien
ctggccctggtgggccctctgatcc

SEQ ID NO: 5760880 - DNA, 25 bp, Homo sapien
ccctgcttcgcgagcgggcgagaga

SEQ ID NO: 5760881 - DNA, 25 bp, Homo sapien
cggcacccagttctcttccactgca

SEQ ID NO: 5760882 - DNA, 25 bp, Homo sapien
gatgaagtgtttgaagagattgcca

SEQ ID NO: 5760883 - DNA, 25 bp, Homo sapien
cgtgagaggactcaaacgttggacc

SEQ ID NO: 5760884 - DNA, 25 bp, Homo sapien
caggaagcagactcaagaggaggcc

SEQ ID NO: 5760885 - DNA, 25 bp, Homo sapien
aacccagcaaacgtccagcctggga

SEQ ID NO: 5760886 - DNA, 25 bp, Homo sapien
gaccgggtattcccaccaggaagtg

SEQ ID NO: 5760887 - DNA, 25 bp, Homo sapien
cttactgactgagcgggaagaacgt

SEQ ID NO: 5760888 - DNA, 25 bp, Homo sapien
gatcctccaacccgccttagcctct

SEQ ID NO: 5760889 - DNA, 25 bp, Homo sapien
ccgccagaatcgggctgtggcccgc

SEQ ID NO: 5760890 - DNA, 25 bp, Homo sapien
ctggagctggaagagcggctgagca

SEQ ID NO: 5760891 - DNA, 25 bp, Homo sapien
caggtggaattgcaggaagaacgga

SEQ ID NO: 5760892 - DNA, 25 bp, Homo sapien
gatggcctggagcctgagaagaaac

SEQ ID NO: 5760893 - DNA, 25 bp, Homo sapien
ggggcaccagctcccccacctcgcc

SEQ ID NO: 5760894 - DNA, 25 bp, Homo sapien
agtcagccctggatggctatccagt

SEQ ID NO: 5760895 - DNA, 25 bp, Homo sapien
gctcaggagctgagtggtcagggct

SEQ ID NO: 5760896 - DNA, 25 bp, Homo sapien
acagtgccacagacacaaggccaga

SEQ ID NO: 5760897 - DNA, 25 bp, Homo sapien
caagggcaacatccgtgtattctgc

SEQ ID NO: 5760898 - DNA, 25 bp, Homo sapien
gggtcagttatgtgacctaaatgca

SEQ ID NO: 5760899 - DNA, 25 bp, Homo sapien
cgtccagcctgggacttaaagggtc

SEQ ID NO: 5760900 - DNA, 25 bp, Homo sapien
cagtgtggggcccccctcagtcttg

SEQ ID NO: 5760901 - DNA, 25 bp, Homo sapien
agaagacaggaccccggtgttccac

SEQ ID NO: 5760902 - DNA, 25 bp, Homo sapien
aggcctgggtgcaacgaccaaaatt

SEQ ID NO: 5760903 - DNA, 25 bp, Homo sapien
aaaacggtgccgtgagaggactcaa

SEQ ID NO: 5760904 - DNA, 25 bp, Homo sapien
cagccctgtcaagcagccaagcaga

SEQ ID NO: 5760905 - DNA, 25 bp, Homo sapien
tcaggtgttcctcccatggcaggag

SEQ ID NO: 5760906 - DNA, 25 bp, Homo sapien
gagcccactccaccccctggcctcc

SEQ ID NO: 5760907 - DNA, 25 bp, Homo sapien
agggtgctttattgggtggagggca

SEQ ID NO: 5760908 - DNA, 25 bp, Homo sapien
ggagtgaggagctcactgtcaccaa

SEQ ID NO: 5760909 - DNA, 25 bp, Homo sapien
aggtggcatctctgcggcaggagac

SEQ ID NO: 5760910 - DNA, 25 bp, Homo sapien
cacagggttgaagaaccagaagcca

SEQ ID NO: 5760911 - DNA, 25 bp, Homo sapien
gaagtgaagacggatccagatctgt

SEQ ID NO: 5760912 - DNA, 25 bp, Homo sapien
cgaggtggacatggatccgcagagg

SEQ ID NO: 5760913 - DNA, 25 bp, Homo sapien
agactcaagaggaggcctgaccaga

SEQ ID NO: 5760914 - DNA, 25 bp, Homo sapien
tgcacaaccagctgcaggaactcaa

SEQ ID NO: 5760915 - DNA, 25 bp, Homo sapien
ttggtactgctcaggccaacaggaa

SEQ ID NO: 5760916 - DNA, 25 bp, Homo sapien
ccgtgtattctgccgggtccgccct

SEQ ID NO: 5760917 - DNA, 25 bp, Homo sapien
cctctgattaaggccccttcccagc

SEQ ID NO: 5760918 - DNA, 25 bp, Homo sapien
tctgtgtgtgtgtgtgtgtgtgtgt

SEQ ID NO: 5760919 - DNA, 25 bp, Homo sapien
ttcgcgagcgggcgagagaacgcga

SEQ ID NO: 5760920 - DNA, 25 bp, Homo sapien
cctccaaggtgaaccagtgtgttat

SEQ ID NO: 5760921 - DNA, 25 bp, Homo sapien
cggaggggactgatgtcccaactag

SEQ ID NO: 5760922 - DNA, 25 bp, Homo sapien
tagcctctcccggtctgacgagcgg

SEQ ID NO: 5760923 - DNA, 25 bp, Homo sapien
gcctggagcctgagaagaaacggac

SEQ ID NO: 5760924 - DNA, 25 bp, Homo sapien
cgtctccgagtccctcaactctcta

SEQ ID NO: 5760925 - DNA, 25 bp, Homo sapien
gccccttcccagctgcctctctcag

SEQ ID NO: 5760926 - DNA, 25 bp, Homo sapien
gggttgaagaaccagaagccagttc

SEQ ID NO: 5760927 - DNA, 25 bp, Homo sapien
ggcatctctgcggcaggagactgtg

SEQ ID NO: 5760928 - DNA, 25 bp, Homo sapien
tgctttattgggtggagggcaccat

SEQ ID NO: 5760929 - DNA, 25 bp, Homo sapien
caaacgttggaccaagagaaccagc

SEQ ID NO: 5760930 - DNA, 25 bp, Homo sapien
gatatgtccctgtctcctgtgagaa

SEQ ID NO: 5760931 - DNA, 25 bp, Homo sapien
tgaagaaccagaagccagttcctgc

SEQ ID NO: 5760932 - DNA, 25 bp, Homo sapien
ggcaagaccttcacaatggagggtg

SEQ ID NO: 5760933 - DNA, 25 bp, Homo sapien
accaggaagtggacaggatgaagtg

SEQ ID NO: 5760934 - DNA, 25 bp, Homo sapien
ccggcgactgcacaaccagctgcag

SEQ ID NO: 5760935 - DNA, 25 bp, Homo sapien
aacactggaggggcatttagccaag

SEQ ID NO: 5760936 - DNA, 25 bp, Homo sapien
ggaccccggtgttccacagctattg

SEQ ID NO: 5760937 - DNA, 25 bp, Homo sapien
gggtgcaacgaccaaaattaccaca

SEQ ID NO: 5760938 - DNA, 25 bp, Homo sapien
ctctctacgctttgcctccaaggtg

SEQ ID NO: 5760939 - DNA, 25 bp, Homo sapien
gaccctgagtggggcaccagctccc

SEQ ID NO: 5760940 - DNA, 25 bp, Homo sapien
ggactgatgtcccaactagaggaga

SEQ ID NO: 5760941 - DNA, 25 bp, Homo sapien
atcagaagcagccctgtcaagcagc

SEQ ID NO: 5760942 - DNA, 25 bp, Homo sapien
gccctggggacagagcgcacaacac

SEQ ID NO: 5760943 - DNA, 25 bp, Homo sapien
gcaggagggaagaaacccagcaaac

SEQ ID NO: 5760944 - DNA, 25 bp, Homo sapien
gttcctcccatggcaggagggaaga

SEQ ID NO: 5760945 - DNA, 25 bp, Homo sapien
gccagaatcgggctgtggcccgcac

SEQ ID NO: 5760946 - DNA, 25 bp, Homo sapien
agaggcctgggtgcaacgaccaaaa

SEQ ID NO: 5760947 - DNA, 25 bp, Homo sapien
ccctgagcaacaaggagtcccacgt

SEQ ID NO: 5760948 - DNA, 25 bp, Homo sapien
gccttagcctctcccggtctgacga

SEQ ID NO: 5760949 - DNA, 25 bp, Homo sapien
tccactgcattcccccggcgcgtgt

SEQ ID NO: 5760950 - DNA, 25 bp, Homo sapien
gccctgcggcacctcttctctgtgg

SEQ ID NO: 5760951 - DNA, 25 bp, Homo sapien
gcttcatctggcccgccagaatcgg

SEQ ID NO: 5760952 - DNA, 25 bp, Homo sapien
aagagcggctgagcacgcaggaggg

SEQ ID NO: 5760953 - DNA, 25 bp, Homo sapien
aacaggtggaattgcaggaagaacg

SEQ ID NO: 5760954 - DNA, 25 bp, Homo sapien
gcctgggacttaaagggtcagttat

SEQ ID NO: 5760955 - DNA, 25 bp, Homo sapien
gcctgggtgcaacgaccaaaattac

SEQ ID NO: 5760956 - DNA, 25 bp, Homo sapien
agaaaaaacaggtggaattgcagga

SEQ ID NO: 5760957 - DNA, 25 bp, Homo sapien
taacagcagcctgtccacgctgggg

SEQ ID NO: 5760958 - DNA, 25 bp, Homo sapien
tgggtggagggcaccatgtcccagg

SEQ ID NO: 5760959 - DNA, 25 bp, Homo sapien
gagggttgctggagggtgctttatt

SEQ ID NO: 5760960 - DNA, 25 bp, Homo sapien
gcctgtccacgctggggctggttat

SEQ ID NO: 5760961 - DNA, 25 bp, Homo sapien
gaagagattgccatgcttgtccagt

SEQ ID NO: 5760962 - DNA, 25 bp, Homo sapien
gaagcagccctgtcaagcagccaag

SEQ ID NO: 5760963 - DNA, 25 bp, Homo sapien
cctacagctttgtagcaagctacgt

SEQ ID NO: 5760964 - DNA, 25 bp, Homo sapien
cgtgcttgtgtcctggagctggaag

SEQ ID NO: 5760965 - DNA, 25 bp, Homo sapien
ccagggctatcaaataaagaatagt

SEQ ID NO: 5760966 - DNA, 25 bp, Homo sapien
acgccttcgggaaacacaggccatt

SEQ ID NO: 5760967 - DNA, 25 bp, Homo sapien
gaggggactgatgtcccaactagag

SEQ ID NO: 5760968 - DNA, 25 bp, Homo sapien
caggcagtggcaagaccttcacaat

SEQ ID NO: 5760969 - DNA, 25 bp, Homo sapien
ggcaacatccgtgtattctgccggg

SEQ ID NO: 5760970 - DNA, 25 bp, Homo sapien
tggcaggagggaagaaacccagcaa

SEQ ID NO: 5760971 - DNA, 25 bp, Homo sapien
ggcagtggcaagaccttcacaatgg

SEQ ID NO: 5760972 - DNA, 25 bp, Homo sapien
accagtgtgttattggtactgctca

SEQ ID NO: 5760973 - DNA, 25 bp, Homo sapien
ctgatcctccaacccgccttagcct

SEQ ID NO: 5760974 - DNA, 25 bp, Homo sapien
ttcaggaccagctcagagatgccca

SEQ ID NO: 5760975 - DNA, 25 bp, Homo sapien
cgcgtgtgggaccgaggtggacatg

SEQ ID NO: 5760976 - DNA, 25 bp, Homo sapien
gtgtgtgtgtgtgtgtgtgtgtgtc

SEQ ID NO: 5760977 - DNA, 25 bp, Homo sapien
ccgggtattcccaccaggaagtgga

SEQ ID NO: 5760978 - DNA, 25 bp, Homo sapien
tgtccctgtctcctgtgagaaagaa

SEQ ID NO: 5760979 - DNA, 25 bp, Homo sapien
ggagcgccggcgactgcacaaccag

SEQ ID NO: 5760980 - DNA, 25 bp, Homo sapien
tggttatcatggccctgagcaacaa

SEQ ID NO: 5760981 - DNA, 25 bp, Homo sapien
acgctttgcctccaaggtgaaccag

SEQ ID NO: 5760982 - DNA, 25 bp, Homo sapien
aacggacaagaggcctgggtgcaac

SEQ ID NO: 5760983 - DNA, 25 bp, Homo sapien
agacatcagaagcagccctgtcaag

SEQ ID NO: 5760984 - DNA, 25 bp, Homo sapien
agcactccagccgaggcctgcagtg

SEQ ID NO: 5760985 - DNA, 25 bp, Homo sapien
agaagtctggcacatcaggtgttcc

SEQ ID NO: 5760986 - DNA, 25 bp, Homo sapien
ctgaagaacttgcgtgcttgtgtcc

SEQ ID NO: 5760987 - DNA, 25 bp, Homo sapien
gtgtgtgtgtgtccctatgtctatg

SEQ ID NO: 5760988 - DNA, 25 bp, Homo sapien
tccctcgggccctgcggcacctctt

SEQ ID NO: 5760989 - DNA, 25 bp, Homo sapien
agcttcagaaaaaacaggtggaatt

SEQ ID NO: 5760990 - DNA, 25 bp, Homo sapien
ccctggatggctatccagtatgcat

SEQ ID NO: 5760991 - DNA, 25 bp, Homo sapien
ctgctcaggccaacaggaagtgaag

SEQ ID NO: 5760992 - DNA, 25 bp, Homo sapien
acatttctccactggaagagaacgt

SEQ ID NO: 5760993 - DNA, 25 bp, Homo sapien
gagcaacaaggagtcccacgtgcct

SEQ ID NO: 5760994 - DNA, 25 bp, Homo sapien
agtgccacagacacaaggccagacc

SEQ ID NO: 5760995 - DNA, 25 bp, Homo sapien
gaacatttctccactggaagagaac

SEQ ID NO: 5760996 - DNA, 25 bp, Homo sapien
cagttggaggggctgatccctcggg

SEQ ID NO: 5760997 - DNA, 25 bp, Homo sapien
tagcggccggagccgtgcgagttct

SEQ ID NO: 5760998 - DNA, 25 bp, Homo sapien
gtgtgtgtgtgtgtgtgtgtgtgtg

SEQ ID NO: 5760999 - DNA, 25 bp, Homo sapien
gggagggttgctggagggtgcttta

SEQ ID NO: 5761000 - DNA, 25 bp, Homo sapien
agccgtgcgagttctctaccctgct

SEQ ID NO: 5761001 - DNA, 25 bp, Homo sapien
agtcttgtggacctggccgggagtg

SEQ ID NO: 5761002 - DNA, 25 bp, Homo sapien
gtgttccacagctattgccacaggg

SEQ ID NO: 5761003 - DNA, 25 bp, Homo sapien
acagcaaactgacctacctgctgca

SEQ ID NO: 5761004 - DNA, 25 bp, Homo sapien
ctctcaggaagcagactcaagagga

SEQ ID NO: 5761005 - DNA, 25 bp, Homo sapien
cagcctgggacttaaagggtcagtt

SEQ ID NO: 5761006 - DNA, 25 bp, Homo sapien
gtggcccgcacagcccagaatgaac

SEQ ID NO: 5761007 - DNA, 25 bp, Homo sapien
agggctatcaaataaagaatagttt

SEQ ID NO: 5761008 - DNA, 25 bp, Homo sapien
gagtggggcaccagctcccccacct

SEQ ID NO: 5761009 - DNA, 25 bp, Homo sapien
tcctgtttccctctggccctggtgg

SEQ ID NO: 5761010 - DNA, 25 bp, Homo sapien
cagctcagagatgcccagcagcagg

SEQ ID NO: 5761011 - DNA, 25 bp, Homo sapien
acacaaggccagaccacagctcaaa

SEQ ID NO: 5761012 - DNA, 25 bp, Homo sapien
ctacagtgccacagacacaaggcca

SEQ ID NO: 5761013 - DNA, 25 bp, Homo sapien
gctcgatatgtccctgtctcctgtg

SEQ ID NO: 5761014 - DNA, 25 bp, Homo sapien
ctggagggtgctttattgggtggag

SEQ ID NO: 5761015 - DNA, 25 bp, Homo sapien
tgagtggtcagggctggacctacag

SEQ ID NO: 5761016 - DNA, 25 bp, Homo sapien
atttctccactggaagagaacgtct

SEQ ID NO: 5761017 - DNA, 25 bp, Homo sapien
cagtgtgttattggtactgctcagg

SEQ ID NO: 5761018 - DNA, 25 bp, Homo sapien
agttcctgctgttcctgtccagaag

SEQ ID NO: 5761019 - DNA, 25 bp, Homo sapien
gaggaggcctgaccagatggaagat

SEQ ID NO: 5761020 - DNA, 25 bp, Homo sapien
acatcagaagcagccctgtcaagca

SEQ ID NO: 5761021 - DNA, 25 bp, Homo sapien
tcagccctggatggctatccagtat

SEQ ID NO: 5761022 - DNA, 25 bp, Homo sapien
caacatccgtgtattctgccgggtc

SEQ ID NO: 5761023 - DNA, 25 bp, Homo sapien
ggtagcggccggagccgtgcgagtt

SEQ ID NO: 5761024 - DNA, 25 bp, Homo sapien
tgcttgtgtcctggagctggaagag

SEQ ID NO: 5761025 - DNA, 25 bp, Homo sapien
tcctgtgagaaagaagtggacgccc

SEQ ID NO: 5761026 - DNA, 25 bp, Homo sapien
ctgacgagcggcgtgggaccctgag

SEQ ID NO: 5761027 - DNA, 25 bp, Homo sapien
ccctgcttcatctggcccgccagaa

SEQ ID NO: 5761028 - DNA, 25 bp, Homo sapien
ccggagccgtgcgagttctctaccc

SEQ ID NO: 5761029 - DNA, 25 bp, Homo sapien
caggaccccggtgttccacagctat

SEQ ID NO: 5761030 - DNA, 25 bp, Homo sapien
aacgttggaccaagagaaccagcag

SEQ ID NO: 5761031 - DNA, 25 bp, Homo sapien
cccccctcagtcttgtggacctggc

SEQ ID NO: 5761032 - DNA, 25 bp, Homo sapien
ggccagaccacagctcaaaaagttt

SEQ ID NO: 5761033 - DNA, 25 bp, Homo sapien
aggccccttcccagctgcctctctc

SEQ ID NO: 5761034 - DNA, 25 bp, Homo sapien
caggaagtggacaggatgaagtgtt

SEQ ID NO: 5761035 - DNA, 25 bp, Homo sapien
accagctcagagatgcccagcagca

SEQ ID NO: 5761036 - DNA, 25 bp, Homo sapien
gcacccagttctcttccactgcatt

SEQ ID NO: 5761037 - DNA, 25 bp, Homo sapien
cagtggcaagaccttcacaatggag

SEQ ID NO: 5761038 - DNA, 25 bp, Homo sapien
cggatccagatctgtgtgtgtgtgt

SEQ ID NO: 5761039 - DNA, 25 bp, Homo sapien
tcgggaaacacaggccattaacagc

SEQ ID NO: 5761040 - DNA, 25 bp, Homo sapien
ttcctgctgttcctgtccagaagtc

SEQ ID NO: 5761041 - DNA, 25 bp, Homo sapien
attgggtggagggcaccatgtccca

SEQ ID NO: 5761042 - DNA, 25 bp, Homo sapien
ccgccttagcctctcccggtctgac

SEQ ID NO: 5761043 - DNA, 25 bp, Homo sapien
agatgctcatgtttgtgaacatttc

SEQ ID NO: 5761044 - DNA, 25 bp, Homo sapien
ctggccgggagtgagcgacttgacc

SEQ ID NO: 5761045 - DNA, 25 bp, Homo sapien
ctgactgagcgggaagaacgtcttc

SEQ ID NO: 5761046 - DNA, 25 bp, Homo sapien
agaactaaaacggtgccgtgagagg

SEQ ID NO: 5761047 - DNA, 25 bp, Homo sapien
ttcctttgaccgggtattcccacca

SEQ ID NO: 5761048 - DNA, 25 bp, Homo sapien
gggagacccccagttggaggggctg

SEQ ID NO: 5761049 - DNA, 25 bp, Homo sapien
cggtctgacgagcggcgtgggaccc

SEQ ID NO: 5761050 - DNA, 25 bp, Homo sapien
agccagttcctgctgttcctgtcca

SEQ ID NO: 5761051 - DNA, 25 bp, Homo sapien
gagcagggccaacaggagctgaaga

SEQ ID NO: 5761052 - DNA, 25 bp, Homo sapien
caactagaggagaaggagaggaggc

SEQ ID NO: 5761053 - DNA, 25 bp, Homo sapien
tgaacggtcatcacgcagccacagt

SEQ ID NO: 5761054 - DNA, 25 bp, Homo sapien
gtccagtcagccctggatggctatc

SEQ ID NO: 5761055 - DNA, 25 bp, Homo sapien
cttcacaatggagggtgggcctggg

SEQ ID NO: 5761056 - DNA, 25 bp, Homo sapien
gtgtgtgtgtgtgtgtgtgtgtccc

SEQ ID NO: 5761057 - DNA, 25 bp, Homo sapien
ctgcttcgcgagcgggcgagagaac

SEQ ID NO: 5761058 - DNA, 25 bp, Homo sapien
cgcacagcccagaatgaacggtcat

SEQ ID NO: 5761059 - DNA, 25 bp, Homo sapien
actgtcaccaatgctcgatatgtcc

SEQ ID NO: 5761060 - DNA, 25 bp, Homo sapien
tatgtccctgtctcctgtgagaaag

SEQ ID NO: 5761061 - DNA, 25 bp, Homo sapien
gcgcacaacactggaggggcattta

SEQ ID NO: 5761062 - DNA, 25 bp, Homo sapien
gggacttaaagggtcagttatgtga

SEQ ID NO: 5761063 - DNA, 25 bp, Homo sapien
aggtgttcctcccatggcaggaggg

SEQ ID NO: 5761064 - DNA, 25 bp, Homo sapien
gcccagcagcaggtcaaggccctgg

SEQ ID NO: 5761065 - DNA, 25 bp, Homo sapien
tgaagtgtttgaagagattgccatg

SEQ ID NO: 5761066 - DNA, 25 bp, Homo sapien
gtccctatgtctatgtatcgggtga

SEQ ID NO: 5761067 - DNA, 25 bp, Homo sapien
taaggccccttcccagctgcctctc

SEQ ID NO: 5761068 - DNA, 25 bp, Homo sapien
tgccttaccggaacagcaaactgac

SEQ ID NO: 5761069 - DNA, 25 bp, Homo sapien
ctatgtctatgtatcgggtgagggg

SEQ ID NO: 5761070 - DNA, 25 bp, Homo sapien
gccctgtcaagcagccaagcagagg

SEQ ID NO: 5761071 - DNA, 25 bp, Homo sapien
gagactgtggcccaggcagccttac

SEQ ID NO: 5761072 - DNA, 25 bp, Homo sapien
gcacctcttctctgtggctcaggag

SEQ ID NO: 5761073 - DNA, 25 bp, Homo sapien
ggacctggccgggagtgagcgactt

SEQ ID NO: 5761074 - DNA, 25 bp, Homo sapien
accaatgctcgatatgtccctgtct

SEQ ID NO: 5761075 - DNA, 25 bp, Homo sapien
gactgagcgggaagaacgtcttcat

SEQ ID NO: 5761076 - DNA, 25 bp, Homo sapien
cacgtgccttaccggaacagcaaac

SEQ ID NO: 5761077 - DNA, 25 bp, Homo sapien
gagaaagaagtggacgccctgcttc

SEQ ID NO: 5761078 - DNA, 25 bp, Homo sapien
ctgcattcccccggcgcgtgtggga

SEQ ID NO: 5761079 - DNA, 25 bp, Homo sapien
gagttctctaccctgcttcgcgagc

SEQ ID NO: 5761080 - DNA, 25 bp, Homo sapien
aactctctacgctttgcctccaagg

SEQ ID NO: 5761081 - DNA, 25 bp, Homo sapien
cctgagaagaaacggacaagaggcc

SEQ ID NO: 5761082 - DNA, 25 bp, Homo sapien
tcctccaacccgccttagcctctcc

SEQ ID NO: 5761083 - DNA, 25 bp, Homo sapien
atgcagaactaaaacggtgccgtga

SEQ ID NO: 5761084 - DNA, 25 bp, Homo sapien
gtggacaggatgaagtgtttgaaga

SEQ ID NO: 5761085 - DNA, 25 bp, Homo sapien
aaggtacaggcccaggctgagcagg

SEQ ID NO: 5761086 - DNA, 25 bp, Homo sapien
gtgtttgaagagattgccatgcttg

SEQ ID NO: 5761087 - DNA, 25 bp, Homo sapien
ccagatggaagatggcctggagcct

SEQ ID NO: 5761088 - DNA, 25 bp, Homo sapien
ttctcttccactgcattcccccggc

SEQ ID NO: 5761089 - DNA, 25 bp, Homo sapien
gtctggcacatcaggtgttcctccc

SEQ ID NO: 5761090 - DNA, 25 bp, Homo sapien
aagagacctctgattaaggcccctt

SEQ ID NO: 5761091 - DNA, 25 bp, Homo sapien
gtgttcctcccatggcaggagggaa

SEQ ID NO: 5761092 - DNA, 25 bp, Homo sapien
gaaccagtgtgttattggtactgct

SEQ ID NO: 5761093 - DNA, 25 bp, Homo sapien
cgtgtgggaccgaggtggacatgga

SEQ ID NO: 5761094 - DNA, 25 bp, Homo sapien
tgcctatggccagacaggcagtggc

SEQ ID NO: 5761095 - DNA, 25 bp, Homo sapien
caacccgccttagcctctcccggtc

SEQ ID NO: 5761096 - DNA, 25 bp, Homo sapien
agattgccatgcttgtccagtcagc

SEQ ID NO: 5761097 - DNA, 25 bp, Homo sapien
gccaacaggaagtgaagacggatcc

SEQ ID NO: 5761098 - DNA, 25 bp, Homo sapien
gttatgtgacctaaatgcagaacta

SEQ ID NO: 5761099 - DNA, 25 bp, Homo sapien
acaaggccagaccacagctcaaaaa

SEQ ID NO: 5761100 - DNA, 25 bp, Homo sapien
ttcgccgtgcagggccagggagtga

SEQ ID NO: 5761101 - DNA, 25 bp, Homo sapien
ctcaagggcaacatccgtgtattct

SEQ ID NO: 5761102 - DNA, 25 bp, Homo sapien
gtctgacgagcggcgtgggaccctg

SEQ ID NO: 5761103 - DNA, 25 bp, Homo sapien
tattccagctacagatttctgggga

SEQ ID NO: 5761104 - DNA, 25 bp, Homo sapien
tcctgccgggggagcccactccacc

SEQ ID NO: 5761105 - DNA, 25 bp, Homo sapien
gaggctgcagacatcagaagcagcc

SEQ ID NO: 5761106 - DNA, 25 bp, Homo sapien
ggcctgcagtgtggggcccccctca

SEQ ID NO: 5761107 - DNA, 25 bp, Homo sapien
gccatgatttttcctttgaccgggt

SEQ ID NO: 5761108 - DNA, 25 bp, Homo sapien
agaggactcaaacgttggaccaaga

SEQ ID NO: 5761109 - DNA, 25 bp, Homo sapien
caagagcttcagaaaaaacaggtgg

SEQ ID NO: 5761110 - DNA, 25 bp, Homo sapien
agagcttcagaaaaaacaggtggaa

SEQ ID NO: 5761111 - DNA, 25 bp, Homo sapien
tatgtgacctaaatgcagaactaaa

SEQ ID NO: 5761112 - DNA, 25 bp, Homo sapien
ggggctggtagcggccggagccgtg

SEQ ID NO: 5761113 - DNA, 25 bp, Homo sapien
cctgcggcacctcttctctgtggct

SEQ ID NO: 5761114 - DNA, 25 bp, Homo sapien
agagaacgtctccgagtccctcaac

SEQ ID NO: 5761115 - DNA, 25 bp, Homo sapien
atccctcactacagtgccacagaca

SEQ ID NO: 5761116 - DNA, 25 bp, Homo sapien
tccctgtctcctgtgagaaagaagt

SEQ ID NO: 5761117 - DNA, 25 bp, Homo sapien
aggggcatttagccaaggtacaggc

SEQ ID NO: 5761118 - DNA, 25 bp, Homo sapien
ctgtttccctctggccctggtgggc

SEQ ID NO: 5761119 - DNA, 25 bp, Homo sapien
gtgtggcgcggggctggtagcggcc

SEQ ID NO: 5761120 - DNA, 25 bp, Homo sapien
cagggctggacctacagctttgtag

SEQ ID NO: 5761121 - DNA, 25 bp, Homo sapien
gactgtggcccaggcagccttactg

SEQ ID NO: 5761122 - DNA, 25 bp, Homo sapien
aagaaccagaagccagttcctgctg

SEQ ID NO: 5761123 - DNA, 25 bp, Homo sapien
gtgttattggtactgctcaggccaa

SEQ ID NO: 5761124 - DNA, 25 bp, Homo sapien
actccaccccctggcctcctcctgt

SEQ ID NO: 5761125 - DNA, 25 bp, Homo sapien
cacaaccagctgcaggaactcaagg

SEQ ID NO: 5761126 - DNA, 25 bp, Homo sapien
gggaaacacaggccattaacagcag

SEQ ID NO: 5761127 - DNA, 25 bp, Homo sapien
cgccggcgactgcacaaccagctgc

SEQ ID NO: 5761128 - DNA, 25 bp, Homo sapien
agcgccggcgactgcacaaccagct

SEQ ID NO: 5761129 - DNA, 25 bp, Homo sapien
agaatgaacggtcatcacgcagcca

SEQ ID NO: 5761130 - DNA, 25 bp, Homo sapien
gagattcgccgtgcagggccaggga

SEQ ID NO: 5761131 - DNA, 25 bp, Homo sapien
gaccagatggaagatggcctggagc

SEQ ID NO: 5761132 - DNA, 25 bp, Homo sapien
cctgctgcagaactctctgggtggt

SEQ ID NO: 5761133 - DNA, 25 bp, Homo sapien
aaggccagaccacagctcaaaaagt

SEQ ID NO: 5761134 - DNA, 25 bp, Homo sapien
tgacctaaatgcagaactaaaacgg

SEQ ID NO: 5761135 - DNA, 25 bp, Homo sapien
accttcacaatggagggtgggcctg

SEQ ID NO: 5761136 - DNA, 25 bp, Homo sapien
cccggtgttccacagctattgccac

SEQ ID NO: 5761137 - DNA, 25 bp, Homo sapien
gcggctgagcacgcaggagggcttg

SEQ ID NO: 5761138 - DNA, 25 bp, Homo sapien
cgactgcacaaccagctgcaggaac

SEQ ID NO: 5761139 - DNA, 25 bp, Homo sapien
cccggtctgacgagcggcgtgggac

SEQ ID NO: 5761140 - DNA, 25 bp, Homo sapien
aacggtcatcacgcagccacagtgt

SEQ ID NO: 5761141 - DNA, 25 bp, Homo sapien
gtcagggctggacctacagctttgt

SEQ ID NO: 5761142 - DNA, 25 bp, Homo sapien
tggacctacagctttgtagcaagct

SEQ ID NO: 5761143 - DNA, 25 bp, Homo sapien
cttaaagggtcagttatgtgaccta

SEQ ID NO: 5761144 - DNA, 25 bp, Homo sapien
ggtgcaagagcttcagaaaaaacag

SEQ ID NO: 5761145 - DNA, 25 bp, Homo sapien
tggcctcctcctgtttccctctggc

SEQ ID NO: 5761146 - DNA, 25 bp, Homo sapien
tcatggccctgagcaacaaggagtc

SEQ ID NO: 5761147 - DNA, 25 bp, Homo sapien
gtggggcaccagctcccccacctcg

SEQ ID NO: 5761148 - DNA, 25 bp, Homo sapien
gtggacctggccgggagtgagcgac

SEQ ID NO: 5761149 - DNA, 25 bp, Homo sapien
ttcatctggcccgccagaatcgggc

SEQ ID NO: 5761150 - DNA, 25 bp, Homo sapien
atgcttgtccagtcagccctggatg

SEQ ID NO: 5761151 - DNA, 25 bp, Homo sapien
tccccggcacccagttctcttccac

SEQ ID NO: 5761152 - DNA, 25 bp, Homo sapien
gctttgtagcaagctacgtagagat

SEQ ID NO: 5761153 - DNA, 25 bp, Homo sapien
ggatggctatccagtatgcatcttt

SEQ ID NO: 5761154 - DNA, 25 bp, Homo sapien
gagacccccagttggaggggctgat

SEQ ID NO: 5761155 - DNA, 25 bp, Homo sapien
tcaagggggcgagtgtgagattcgc

SEQ ID NO: 5761156 - DNA, 25 bp, Homo sapien
cggcaggagactgtggcccaggcag

SEQ ID NO: 5761157 - DNA, 25 bp, Homo sapien
gtccgggacctgctggccactggaa

SEQ ID NO: 5761158 - DNA, 25 bp, Homo sapien
gtgtgagattcgccgtgcagggcca

SEQ ID NO: 5761159 - DNA, 25 bp, Homo sapien
tgtgggaccgaggtggacatggatc

SEQ ID NO: 5761160 - DNA, 25 bp, Homo sapien
cccgcacagcccagaatgaacggtc

SEQ ID NO: 5761161 - DNA, 25 bp, Homo sapien
ggcccgcacagcccagaatgaacgg

SEQ ID NO: 5761162 - DNA, 25 bp, Homo sapien
tgatgtcccaactagaggagaagga

SEQ ID NO: 5761163 - DNA, 25 bp, Homo sapien
cactggaggggcatttagccaaggt

SEQ ID NO: 5761164 - DNA, 25 bp, Homo sapien
aggtgaaccagtgtgttattggtac

SEQ ID NO: 5761165 - DNA, 25 bp, Homo sapien
ctctggccctggtgggccctctgat

SEQ ID NO: 5761166 - DNA, 25 bp, Homo sapien
gcttcaggaccagctcagagatgcc

SEQ ID NO: 5761167 - DNA, 25 bp, Homo sapien
atttagccaaggtacaggcccaggc

SEQ ID NO: 5761168 - DNA, 25 bp, Homo sapien
gtgtgttattggtactgctcaggcc

SEQ ID NO: 5761169 - DNA, 25 bp, Homo sapien
aggagtcccacgtgccttaccggaa

SEQ ID NO: 5761170 - DNA, 25 bp, Homo sapien
tactgctcaggccaacaggaagtga

SEQ ID NO: 5761171 - DNA, 25 bp, Homo sapien
ggctgatccctcgggccctgcggca

SEQ ID NO: 5761172 - DNA, 25 bp, Homo sapien
caggagctgaagaacttgcgtgctt

SEQ ID NO: 5761173 - DNA, 25 bp, Homo sapien
aagacggatccagatctgtgtgtgt

SEQ ID NO: 5761174 - DNA, 25 bp, Homo sapien
tgtgacctaaatgcagaactaaaac

SEQ ID NO: 5761175 - DNA, 25 bp, Homo sapien
acatcccacccaagagttccatccc

SEQ ID NO: 5761176 - DNA, 25 bp, Homo sapien
aaagtggcgggtgtggcgcggggct

SEQ ID NO: 5761177 - DNA, 25 bp, Homo sapien
ctatccagtatgcatctttgcctat

SEQ ID NO: 5761178 - DNA, 25 bp, Homo sapien
aacatagaactgaagagacctctga

SEQ ID NO: 5761179 - DNA, 25 bp, Homo sapien
aagtgtttgaagagattgccatgct

SEQ ID NO: 5761180 - DNA, 25 bp, Homo sapien
tctgtggctcaggagctgagtggtc

SEQ ID NO: 5761181 - DNA, 25 bp, Homo sapien
ctgtggcccgcacagcccagaatga

SEQ ID NO: 5761182 - DNA, 25 bp, Homo sapien
ctggggagcactccagccgaggcct

SEQ ID NO: 5761183 - DNA, 25 bp, Homo sapien
tttccaagaagacaggaccccggtg

SEQ ID NO: 5761184 - DNA, 25 bp, Homo sapien
tcaaaaagtttccaagaagacagga

SEQ ID NO: 5761185 - DNA, 25 bp, Homo sapien
gttctctaccctgcttcgcgagcgg

SEQ ID NO: 5761186 - DNA, 25 bp, Homo sapien
aagtctggcacatcaggtgttcctc

SEQ ID NO: 5761187 - DNA, 25 bp, Homo sapien
cctggggacagagcgcacaacactg

SEQ ID NO: 5761188 - DNA, 25 bp, Homo sapien
gcggggctggtagcggccggagccg

SEQ ID NO: 5761189 - DNA, 25 bp, Homo sapien
ccgaggcctgcagtgtggggccccc

SEQ ID NO: 5761190 - DNA, 25 bp, Homo sapien
tctggcccgccagaatcgggctgtg

SEQ ID NO: 5761191 - DNA, 25 bp, Homo sapien
cgagtccctcaactctctacgcttt

SEQ ID NO: 5761192 - DNA, 25 bp, Homo sapien
gatctgtgtgtgtgtgtgtgtgtgt

SEQ ID NO: 5761193 - DNA, 25 bp, Homo sapien
ttattgggtggagggcaccatgtcc

SEQ ID NO: 5761194 - DNA, 25 bp, Homo sapien
ggtggaattgcaggaagaacggagg

SEQ ID NO: 5761195 - DNA, 25 bp, Homo sapien
gcaggtcaaggccctggggacagag

SEQ ID NO: 5761196 - DNA, 25 bp, Homo sapien
gacaagaggcctgggtgcaacgacc

SEQ ID NO: 5761197 - DNA, 25 bp, Homo sapien
tggcgcggggctggtagcggccgga

SEQ ID NO: 5761198 - DNA, 25 bp, Homo sapien
gaggcctgcagtgtggggcccccct

SEQ ID NO: 5761199 - DNA, 25 bp, Homo sapien
ggtacaggcccaggctgagcagggc

SEQ ID NO: 5761200 - DNA, 25 bp, Homo sapien
gcaacgaccaaaattaccacatccc

SEQ ID NO: 5761201 - DNA, 25 bp, Homo sapien
caagaccttcacaatggagggtggg

SEQ ID NO: 5761202 - DNA, 25 bp, Homo sapien
agtgaagacggatccagatctgtgt

SEQ ID NO: 5761203 - DNA, 25 bp, Homo sapien
gacctgctggccactggaacccgga

SEQ ID NO: 5761204 - DNA, 25 bp, Homo sapien
agtccctcaactctctacgctttgc

SEQ ID NO: 5761205 - DNA, 25 bp, Homo sapien
ccctctggccctggtgggccctctg

SEQ ID NO: 5761206 - DNA, 25 bp, Homo sapien
tcacgcagccacagtgtattccagc

SEQ ID NO: 5761207 - DNA, 25 bp, Homo sapien
tcccagggctatcaaataaagaata

SEQ ID NO: 5761208 - DNA, 25 bp, Homo sapien
tctaccctgcttcgcgagcgggcga

SEQ ID NO: 5761209 - DNA, 25 bp, Homo sapien
ggaccaagagaaccagcagcttcag

SEQ ID NO: 5761210 - DNA, 25 bp, Homo sapien
aggagctcactgtcaccaatgctcg

SEQ ID NO: 5761211 - DNA, 25 bp, Homo sapien
atttctggggagcactccagccgag

SEQ ID NO: 5761212 - DNA, 25 bp, Homo sapien
agggaagaaacccagcaaacgtcca

SEQ ID NO: 5761213 - DNA, 25 bp, Homo sapien
gtgtccctatgtctatgtatcgggt

SEQ ID NO: 5761214 - DNA, 25 bp, Homo sapien
ctgccgggggagcccactccacccc

SEQ ID NO: 5761215 - DNA, 25 bp, Homo sapien
ctccaacccgccttagcctctcccg

SEQ ID NO: 5761216 - DNA, 25 bp, Homo sapien
gccctgtcctgccgggggagcccac

SEQ ID NO: 5761217 - DNA, 25 bp, Homo sapien
cgccgtgcagggccagggagtgagg

SEQ ID NO: 5761218 - DNA, 25 bp, Homo sapien
cggcgtgggaccctgagtggggcac

SEQ ID NO: 5761219 - DNA, 25 bp, Homo sapien
cagcaggtcaaggccctggggacag

SEQ ID NO: 5761220 - DNA, 25 bp, Homo sapien
tggagggcaccatgtcccagggcta

SEQ ID NO: 5761221 - DNA, 25 bp, Homo sapien
aaatgcagaactaaaacggtgccgt

SEQ ID NO: 5761222 - DNA, 25 bp, Homo sapien
ggtgctttattgggtggagggcacc

SEQ ID NO: 5761223 - DNA, 25 bp, Homo sapien
ggaagagcggctgagcacgcaggag

SEQ ID NO: 5761224 - DNA, 25 bp, Homo sapien
agcagcctgtccacgctggggctgg

SEQ ID NO: 5761225 - DNA, 25 bp, Homo sapien
tctgcggcaggagactgtggcccag

SEQ ID NO: 5761226 - DNA, 25 bp, Homo sapien
agaaccagcagcttcaggaccagct

SEQ ID NO: 5761227 - DNA, 25 bp, Homo sapien
ctggagcctgagaagaaacggacaa

SEQ ID NO: 5761228 - DNA, 25 bp, Homo sapien
gacttaaagggtcagttatgtgacc

SEQ ID NO: 5761229 - DNA, 25 bp, Homo sapien
ggagggaagaaacccagcaaacgtc

SEQ ID NO: 5761230 - DNA, 25 bp, Homo sapien
agaacgtctccgagtccctcaactc

SEQ ID NO: 5761231 - DNA, 25 bp, Homo sapien
attctgccgggtccgccctgtcctg

SEQ ID NO: 5761232 - DNA, 25 bp, Homo sapien
gctattgccacagggttgaagaacc

SEQ ID NO: 5761233 - DNA, 25 bp, Homo sapien
tgcggcacctcttctctgtggctca

SEQ ID NO: 5761234 - DNA, 25 bp, Homo sapien
tatggccagacaggcagtggcaaga

SEQ ID NO: 5761235 - DNA, 25 bp, Homo sapien
gtgtgtgtgtgtgtgtgtccctatg

SEQ ID NO: 5761236 - DNA, 25 bp, Homo sapien
gcaggagactgtggcccaggcagcc

SEQ ID NO: 5761237 - DNA, 25 bp, Homo sapien
agctacagatttctggggagcactc

SEQ ID NO: 5761238 - DNA, 25 bp, Homo sapien
agcagcttcaggaccagctcagaga

SEQ ID NO: 5761239 - DNA, 25 bp, Homo sapien
gaaacccagcaaacgtccagcctgg

SEQ ID NO: 5761240 - DNA, 25 bp, Homo sapien
gacctacctgctgcagaactctctg

SEQ ID NO: 5761241 - DNA, 25 bp, Homo sapien
acgcagccacagtgtattccagcta

SEQ ID NO: 5761242 - DNA, 25 bp, Homo sapien
tgtcctgccgggggagcccactcca

SEQ ID NO: 5761243 - DNA, 25 bp, Homo sapien
ctgtgagaaagaagtggacgccctg

SEQ ID NO: 5761244 - DNA, 25 bp, Homo sapien
aaccagcagcttcaggaccagctca

SEQ ID NO: 5761245 - DNA, 25 bp, Homo sapien
ccgtgcagggccagggagtgaggag

SEQ ID NO: 5761246 - DNA, 25 bp, Homo sapien
gaggggctgatccctcgggccctgc

SEQ ID NO: 5761247 - DNA, 25 bp, Homo sapien
attaaggccccttcccagctgcctc

SEQ ID NO: 5761248 - DNA, 25 bp, Homo sapien
cgtgccttaccggaacagcaaactg

SEQ ID NO: 5761249 - DNA, 25 bp, Homo sapien
ctgagcgggaagaacgtcttcatgg

SEQ ID NO: 5761250 - DNA, 25 bp, Homo sapien
atggccctgagcaacaaggagtccc

SEQ ID NO: 5761251 - DNA, 25 bp, Homo sapien
tcttcatgggctagaaatggagcgc

SEQ ID NO: 5761252 - DNA, 25 bp, Homo sapien
gtgccgtgagaggactcaaacgttg

SEQ ID NO: 5761253 - DNA, 25 bp, Homo sapien
tccagcctgggacttaaagggtcag

SEQ ID NO: 5761254 - DNA, 25 bp, Homo sapien
agagaaccagcagcttcaggaccag

SEQ ID NO: 5761255 - DNA, 25 bp, Homo sapien
tgtcaagcagccaagcagaggtggc

SEQ ID NO: 5761256 - DNA, 25 bp, Homo sapien
gtcaaggccctggggacagagcgca

SEQ ID NO: 5761257 - DNA, 25 bp, Homo sapien
gaggagaaggagaggaggctgcaga

SEQ ID NO: 5761258 - DNA, 25 bp, Homo sapien
ccagtatgcatctttgcctatggcc

SEQ ID NO: 5761259 - DNA, 25 bp, Homo sapien
caagaagacaggaccccggtgttcc

SEQ ID NO: 5761260 - DNA, 25 bp, Homo sapien
acaacactggaggggcatttagcca

SEQ ID NO: 5761261 - DNA, 25 bp, Homo sapien
ccagaagtctggcacatcaggtgtt

SEQ ID NO: 5761262 - DNA, 25 bp, Homo sapien
tgtagcaagctacgtagagatctac

SEQ ID NO: 5761263 - DNA, 25 bp, Homo sapien
tacagctttgtagcaagctacgtag

SEQ ID NO: 5761264 - DNA, 25 bp, Homo sapien
tctacaatgagactgtccgggacct

SEQ ID NO: 5761265 - DNA, 25 bp, Homo sapien
tagtgctaagatgctcatgtttgtg

SEQ ID NO: 5761266 - DNA, 25 bp, Homo sapien
atccgcagaggtcccccctattgga

SEQ ID NO: 5761267 - DNA, 25 bp, Homo sapien
accagctgcaggaactcaagggcaa

SEQ ID NO: 5761268 - DNA, 25 bp, Homo sapien
tgggaccgaggtggacatggatccg

SEQ ID NO: 5761269 - DNA, 25 bp, Homo sapien
cgagagaacgcgagtcccaggatcc

SEQ ID NO: 5761270 - DNA, 25 bp, Homo sapien
ccctctgatcctccaacccgcctta

SEQ ID NO: 5761271 - DNA, 25 bp, Homo sapien
cttgcgtgcttgtgtcctggagctg

SEQ ID NO: 5761272 - DNA, 25 bp, Homo sapien
gagcacgcaggagggcttggtgcaa

SEQ ID NO: 5761273 - DNA, 25 bp, Homo sapien
ctgggtgcaacgaccaaaattacca

SEQ ID NO: 5761274 - DNA, 25 bp, Homo sapien
tcaactctctacgctttgcctccaa

SEQ ID NO: 5761275 - DNA, 25 bp, Homo sapien
tgggctagaaatggagcgccggcga

SEQ ID NO: 5761276 - DNA, 25 bp, Homo sapien
cagcttcaggaccagctcagagatg

SEQ ID NO: 5761277 - DNA, 25 bp, Homo sapien
ctgagcagggccaacaggagctgaa

SEQ ID NO: 5761278 - DNA, 25 bp, Homo sapien
tatgcatctttgcctatggccagac

SEQ ID NO: 5761279 - DNA, 25 bp, Homo sapien
gtcagttatgtgacctaaatgcaga

SEQ ID NO: 5761280 - DNA, 25 bp, Homo sapien
tagaggagaaggagaggaggctgca

SEQ ID NO: 5761281 - DNA, 25 bp, Homo sapien
ttctggggagcactccagccgaggc

SEQ ID NO: 5761282 - DNA, 25 bp, Homo sapien
catctctgcggcaggagactgtggc

SEQ ID NO: 5761283 - DNA, 25 bp, Homo sapien
ccaacaggagctgaagaacttgcgt

SEQ ID NO: 5761284 - DNA, 25 bp, Homo sapien
aagctacgtagagatctacaatgag

SEQ ID NO: 5761285 - DNA, 25 bp, Homo sapien
gagtcccacgtgccttaccggaaca

SEQ ID NO: 5761286 - DNA, 25 bp, Homo sapien
tcatgtttgtgaacatttctccact

SEQ ID NO: 5761287 - DNA, 25 bp, Homo sapien
tctctgcggcaggagactgtggccc

SEQ ID NO: 5761288 - DNA, 25 bp, Homo sapien
agccgaggcctgcagtgtggggccc

SEQ ID NO: 5761289 - DNA, 25 bp, Homo sapien
cagaatcgggctgtggcccgcacag

SEQ ID NO: 5761290 - DNA, 25 bp, Homo sapien
tgcaggaactcaagggcaacatccg

SEQ ID NO: 5761291 - DNA, 25 bp, Homo sapien
tctgattaaggccccttcccagctg

SEQ ID NO: 5761292 - DNA, 25 bp, Homo sapien
ccaccaggaagtggacaggatgaag

SEQ ID NO: 5761293 - DNA, 25 bp, Homo sapien
aagcagactcaagaggaggcctgac

SEQ ID NO: 5761294 - DNA, 25 bp, Homo sapien
ggagcgggaacgccttcgggaaaca

SEQ ID NO: 5761295 - DNA, 25 bp, Homo sapien
aggaggctgcagacatcagaagcag

SEQ ID NO: 5761296 - DNA, 25 bp, Homo sapien
gcccagaatgaacggtcatcacgca

SEQ ID NO: 5761297 - DNA, 25 bp, Homo sapien
ctacgctttgcctccaaggtgaacc

SEQ ID NO: 5761298 - DNA, 25 bp, Homo sapien
ggaagcagactcaagaggaggcctg

SEQ ID NO: 5761299 - DNA, 25 bp, Homo sapien
tccacagctattgccacagggttga

SEQ ID NO: 5761300 - DNA, 25 bp, Homo sapien
gcacaacactggaggggcatttagc

SEQ ID NO: 5761301 - DNA, 25 bp, Homo sapien
gcctctctcaggaagcagactcaag

SEQ ID NO: 5761302 - DNA, 25 bp, Homo sapien
gtcccacgtgccttaccggaacagc

SEQ ID NO: 5761303 - DNA, 25 bp, Homo sapien
ctctgatcctccaacccgccttagc

SEQ ID NO: 5761304 - DNA, 25 bp, Homo sapien
ctttattgggtggagggcaccatgt

SEQ ID NO: 5761305 - DNA, 25 bp, Homo sapien
actagaggagaaggagaggaggctg

SEQ ID NO: 5761306 - DNA, 25 bp, Homo sapien
cttgtgtcctggagctggaagagcg

SEQ ID NO: 5761307 - DNA, 25 bp, Homo sapien
tgccacagacacaaggccagaccac

SEQ ID NO: 5761308 - DNA, 25 bp, Homo sapien
agcagcaggtcaaggccctggggac

SEQ ID NO: 5761309 - DNA, 25 bp, Homo sapien
gggctggacctacagctttgtagca

SEQ ID NO: 5761310 - DNA, 25 bp, Homo sapien
gttggaggggctgatccctcgggcc

SEQ ID NO: 5761311 - DNA, 25 bp, Homo sapien
gtgtgtgtgtgtgtccctatgtcta

SEQ ID NO: 5761312 - DNA, 25 bp, Homo sapien
gatctacaatgagactgtccgggac

SEQ ID NO: 5761313 - DNA, 25 bp, Homo sapien
gaagtggacgccctgcttcatctgg

SEQ ID NO: 5761314 - DNA, 25 bp, Homo sapien
ccgggacctgctggccactggaacc

SEQ ID NO: 5761315 - DNA, 25 bp, Homo sapien
accaagagaaccagcagcttcagga

SEQ ID NO: 5761316 - DNA, 25 bp, Homo sapien
cagctcaaaaagtttccaagaagac

SEQ ID NO: 5761317 - DNA, 25 bp, Homo sapien
ggaacatagaactgaagagacctct

SEQ ID NO: 5761318 - DNA, 25 bp, Homo sapien
agttccatccctcactacagtgcca

SEQ ID NO: 5761319 - DNA, 25 bp, Homo sapien
gggaagaacgtcttcatgggctaga

SEQ ID NO: 5761320 - DNA, 25 bp, Homo sapien
gctacgtagagatctacaatgagac

SEQ ID NO: 5761321 - DNA, 25 bp, Homo sapien
gtgagaaagaagtggacgccctgct

SEQ ID NO: 5761322 - DNA, 25 bp, Homo sapien
cgagtcccaggatccccggcaccca

SEQ ID NO: 5761323 - DNA, 25 bp, Homo sapien
gacggatccagatctgtgtgtgtgt

SEQ ID NO: 5761324 - DNA, 25 bp, Homo sapien
atcgggctgtggcccgcacagccca

SEQ ID NO: 5761325 - DNA, 25 bp, Homo sapien
tcccccggcgcgtgtgggaccgagg

SEQ ID NO: 5761326 - DNA, 25 bp, Homo sapien
accgaggtggacatggatccgcaga

SEQ ID NO: 5761327 - DNA, 25 bp, Homo sapien
gcaaacgtccagcctgggacttaaa

SEQ ID NO: 5761328 - DNA, 25 bp, Homo sapien
aagcagaggtggcatctctgcggca

SEQ ID NO: 5761329 - DNA, 25 bp, Homo sapien
ctcaggaagcagactcaagaggagg

SEQ ID NO: 5761330 - DNA, 25 bp, Homo sapien
gctgcaggaactcaagggcaacatc

SEQ ID NO: 5761331 - DNA, 25 bp, Homo sapien
tgcggcaggagactgtggcccaggc

SEQ ID NO: 5761332 - DNA, 25 bp, Homo sapien
aacaaggagtcccacgtgccttacc

SEQ ID NO: 5761333 - DNA, 25 bp, Homo sapien
gagacctctgattaaggccccttcc

SEQ ID NO: 5761334 - DNA, 25 bp, Homo sapien
tggacgccctgcttcatctggcccg

SEQ ID NO: 5761335 - DNA, 25 bp, Homo sapien
ctcccatggcaggagggaagaaacc

SEQ ID NO: 5761336 - DNA, 25 bp, Homo sapien
gggccctgcggcacctcttctctgt

SEQ ID NO: 5761337 - DNA, 25 bp, Homo sapien
agggccagggagtgaggagctcact

SEQ ID NO: 5761338 - DNA, 25 bp, Homo sapien
cagctgcaggaactcaagggcaaca

SEQ ID NO: 5761339 - DNA, 25 bp, Homo sapien
agaaatggagcgccggcgactgcac

SEQ ID NO: 5761340 - DNA, 25 bp, Homo sapien
ggagcactccagccgaggcctgcag

SEQ ID NO: 5761341 - DNA, 25 bp, Homo sapien
cactacagtgccacagacacaaggc

SEQ ID NO: 5761342 - DNA, 25 bp, Homo sapien
gaagagaacgtctccgagtccctca

SEQ ID NO: 5761343 - DNA, 25 bp, Homo sapien
gaagaacttgcgtgcttgtgtcctg

SEQ ID NO: 5761344 - DNA, 25 bp, Homo sapien
tggcccgccagaatcgggctgtggc

SEQ ID NO: 5761345 - DNA, 25 bp, Homo sapien
gaagaacggaggggactgatgtccc

SEQ ID NO: 5761346 - DNA, 25 bp, Homo sapien
cacagctattgccacagggttgaag

SEQ ID NO: 5761347 - DNA, 25 bp, Homo sapien
gcttcgcgagcgggcgagagaacgc

SEQ ID NO: 5761348 - DNA, 25 bp, Homo sapien
gcgtgggaccctgagtggggcacca

SEQ ID NO: 5761349 - DNA, 25 bp, Homo sapien
cagggttgaagaaccagaagccagt

SEQ ID NO: 5761350 - DNA, 25 bp, Homo sapien
gttgctggagggtgctttattgggt

SEQ ID NO: 5761351 - DNA, 25 bp, Homo sapien
ggaggcctgaccagatggaagatgg

SEQ ID NO: 5761352 - DNA, 25 bp, Homo sapien
caggaccagctcagagatgcccagc

SEQ ID NO: 5761353 - DNA, 25 bp, Homo sapien
aacggaggggactgatgtcccaact

SEQ ID NO: 5761354 - DNA, 25 bp, Homo sapien
tgggccctctgatcctccaacccgc

SEQ ID NO: 5761355 - DNA, 25 bp, Homo sapien
atggatccgcagaggtcccccctat

SEQ ID NO: 5761356 - DNA, 25 bp, Homo sapien
gttcctgtccagaagtctggcacat

SEQ ID NO: 5761357 - DNA, 25 bp, Homo sapien
caggcagccttactgactgagcggg

SEQ ID NO: 5761358 - DNA, 25 bp, Homo sapien
gtgtgtgtgtccctatgtctatgta

SEQ ID NO: 5761359 - DNA, 25 bp, Homo sapien
ccacatcccacccaagagttccatc

SEQ ID NO: 5761360 - DNA, 25 bp, Homo sapien
ggcccccctcagtcttgtggacctg

SEQ ID NO: 5761361 - DNA, 25 bp, Homo sapien
cactccagccgaggcctgcagtgtg

SEQ ID NO: 5761362 - DNA, 25 bp, Homo sapien
accagaagccagttcctgctgttcc

SEQ ID NO: 5761363 - DNA, 25 bp, Homo sapien
cctcgggccctgcggcacctcttct

SEQ ID NO: 5761364 - DNA, 25 bp, Homo sapien
ctgaccagatggaagatggcctgga

SEQ ID NO: 5761365 - DNA, 25 bp, Homo sapien
cagaagccagttcctgctgttcctg

SEQ ID NO: 5761366 - DNA, 25 bp, Homo sapien
cacagcccagaatgaacggtcatca

SEQ ID NO: 5761367 - DNA, 25 bp, Homo sapien
ggcccaggcagccttactgactgag

SEQ ID NO: 5761368 - DNA, 25 bp, Homo sapien
gactcaaacgttggaccaagagaac

SEQ ID NO: 5761369 - DNA, 25 bp, Homo sapien
tggctcaggagctgagtggtcaggg

SEQ ID NO: 5761370 - DNA, 25 bp, Homo sapien
aggccctggggacagagcgcacaac

SEQ ID NO: 5761371 - DNA, 25 bp, Homo sapien
ccagctgcctctctcaggaagcaga

SEQ ID NO: 5761372 - DNA, 25 bp, Homo sapien
gaagccagttcctgctgttcctgtc

SEQ ID NO: 5761373 - DNA, 25 bp, Homo sapien
gagatctacaatgagactgtccggg

SEQ ID NO: 5761374 - DNA, 25 bp, Homo sapien
ggtagtgctaagatgctcatgtttg

SEQ ID NO: 5761375 - DNA, 25 bp, Homo sapien
ggcagccttactgactgagcgggaa

SEQ ID NO: 5761376 - DNA, 25 bp, Homo sapien
agagttccatccctcactacagtgc

SEQ ID NO: 5761377 - DNA, 25 bp, Homo sapien
gggacctgctggccactggaacccg

SEQ ID NO: 5761378 - DNA, 25 bp, Homo sapien
tgcctccaaggtgaaccagtgtgtt

SEQ ID NO: 5761379 - DNA, 25 bp, Homo sapien
cttcgggaaacacaggccattaaca

SEQ ID NO: 5761380 - DNA, 25 bp, Homo sapien
ggaagatggcctggagcctgagaag

SEQ ID NO: 5761381 - DNA, 25 bp, Homo sapien
gggctggttatcatggccctgagca

SEQ ID NO: 5761382 - DNA, 25 bp, Homo sapien
tattgccacagggttgaagaaccag

SEQ ID NO: 5761383 - DNA, 25 bp, Homo sapien
agaacgtcttcatgggctagaaatg

SEQ ID NO: 5761384 - DNA, 25 bp, Homo sapien
ggggcccccctcagtcttgtggacc

SEQ ID NO: 5761385 - DNA, 25 bp, Homo sapien
tgcgtgcttgtgtcctggagctgga

SEQ ID NO: 5761386 - DNA, 25 bp, Homo sapien
ggagctggaagagcggctgagcacg

SEQ ID NO: 5761387 - DNA, 25 bp, Homo sapien
gcctcctcctgtttccctctggccc

SEQ ID NO: 5761388 - DNA, 25 bp, Homo sapien
ctgtccagaagtctggcacatcagg

SEQ ID NO: 5761389 - DNA, 25 bp, Homo sapien
agtgtattccagctacagatttctg

SEQ ID NO: 5761390 - DNA, 25 bp, Homo sapien
gcatttagccaaggtacaggcccag

SEQ ID NO: 5761391 - DNA, 25 bp, Homo sapien
ctccagccgaggcctgcagtgtggg

SEQ ID NO: 5761392 - DNA, 25 bp, Homo sapien
gctcactgtcaccaatgctcgatat

SEQ ID NO: 5761393 - DNA, 25 bp, Homo sapien
agctgcctctctcaggaagcagact

SEQ ID NO: 5761394 - DNA, 25 bp, Homo sapien
tgtcccagggctatcaaataaagaa

SEQ ID NO: 5761395 - DNA, 25 bp, Homo sapien
tctctgtggctcaggagctgagtgg

SEQ ID NO: 5761396 - DNA, 25 bp, Homo sapien
cgagcggcgtgggaccctgagtggg

SEQ ID NO: 5761397 - DNA, 25 bp, Homo sapien
gctggacctacagctttgtagcaag

SEQ ID NO: 5761398 - DNA, 25 bp, Homo sapien
gatccccggcacccagttctcttcc

SEQ ID NO: 5761399 - DNA, 25 bp, Homo sapien
gcaagctacgtagagatctacaatg

SEQ ID NO: 5761400 - DNA, 25 bp, Homo sapien
gaagaacgtcttcatgggctagaaa

SEQ ID NO: 5761401 - DNA, 25 bp, Homo sapien
caggctgagcagggccaacaggagc

SEQ ID NO: 5761402 - DNA, 25 bp, Homo sapien
agatggaagatggcctggagcctga

SEQ ID NO: 5761403 - DNA, 25 bp, Homo sapien
tgctgttcctgtccagaagtctggc

SEQ ID NO: 5761404 - DNA, 25 bp, Homo sapien
ccatccctcactacagtgccacaga

SEQ ID NO: 5761405 - DNA, 25 bp, Homo sapien
ctccactggaagagaacgtctccga

SEQ ID NO: 5761406 - DNA, 25 bp, Homo sapien
agaactctctgggtggtagtgctaa

SEQ ID NO: 5761407 - DNA, 25 bp, Homo sapien
cttcccagctgcctctctcaggaag

SEQ ID NO: 5761408 - DNA, 25 bp, Homo sapien
tagcaagctacgtagagatctacaa

SEQ ID NO: 5761409 - DNA, 25 bp, Homo sapien
ccagcagcaggtcaaggccctgggg

SEQ ID NO: 5761410 - DNA, 25 bp, Homo sapien
ggggaacatagaactgaagagacct

SEQ ID NO: 5761411 - DNA, 25 bp, Homo sapien
ccaagcagaggtggcatctctgcgg

SEQ ID NO: 5761412 - DNA, 25 bp, Homo sapien
cctgctggccactggaacccggaag

SEQ ID NO: 5761413 - DNA, 25 bp, Homo sapien
ccagctacagatttctggggagcac

SEQ ID NO: 5761414 - DNA, 25 bp, Homo sapien
tctttgcctatggccagacaggcag

SEQ ID NO: 5761415 - DNA, 25 bp, Homo sapien
gcagccaagcagaggtggcatctct

SEQ ID NO: 5761416 - DNA, 25 bp, Homo sapien
gttattggtactgctcaggccaaca

SEQ ID NO: 5761417 - DNA, 25 bp, Homo sapien
aagaaacggacaagaggcctgggtg

SEQ ID NO: 5761418 - DNA, 25 bp, Homo sapien
accaaaattaccacatcccacccaa

SEQ ID NO: 5761419 - DNA, 25 bp, Homo sapien
tattggtactgctcaggccaacagg

SEQ ID NO: 5761420 - DNA, 25 bp, Homo sapien
taagatgctcatgtttgtgaacatt

SEQ ID NO: 5761421 - DNA, 25 bp, Homo sapien
ccgccctgtcctgccgggggagccc

SEQ ID NO: 5761422 - DNA, 25 bp, Homo sapien
caaaattaccacatcccacccaaga

SEQ ID NO: 5761423 - DNA, 25 bp, Homo sapien
ccacagtgtattccagctacagatt

SEQ ID NO: 5761424 - DNA, 25 bp, Homo sapien
accatgtcccagggctatcaaataa

SEQ ID NO: 5761425 - DNA, 25 bp, Homo sapien
acgctggggctggttatcatggccc

SEQ ID NO: 5761426 - DNA, 25 bp, Homo sapien
tgctggagggtgctttattgggtgg

SEQ ID NO: 5761427 - DNA, 25 bp, Homo sapien
agggagtgaggagctcactgtcacc

SEQ ID NO: 5761428 - DNA, 25 bp, Homo sapien
acatggatccgcagaggtcccccct

SEQ ID NO: 5761429 - DNA, 25 bp, Homo sapien
ggctggtagcggccggagccgtgcg

SEQ ID NO: 5761430 - DNA, 25 bp, Homo sapien
cagacaggcagtggcaagaccttca

SEQ ID NO: 5761431 - DNA, 25 bp, Homo sapien
cagctattgccacagggttgaagaa

SEQ ID NO: 5761432 - DNA, 25 bp, Homo sapien
tgctggccactggaacccggaaggg

SEQ ID NO: 5761433 - DNA, 25 bp, Homo sapien
aacaggagctgaagaacttgcgtgc

SEQ ID NO: 5761434 - DNA, 25 bp, Homo sapien
ctgcagaactctctgggtggtagtg

SEQ ID NO: 5761435 - DNA, 25 bp, Homo sapien
ttgaagagattgccatgcttgtcca

SEQ ID NO: 5761436 - DNA, 25 bp, Homo sapien
gactgtccgggacctgctggccact

SEQ ID NO: 5761437 - DNA, 25 bp, Homo sapien
gttatcatggccctgagcaacaagg

SEQ ID NO: 5761438 - DNA, 25 bp, Homo sapien
tacaggcccaggctgagcagggcca

SEQ ID NO: 5761439 - DNA, 25 bp, Homo sapien
ggcttagccctcggccccggggagc

SEQ ID NO: 5761440 - DNA, 25 bp, Homo sapien
taccacatcccacccaagagttcca

SEQ ID NO: 5761441 - DNA, 25 bp, Homo sapien
agtcccaggatccccggcacccagt

SEQ ID NO: 5761442 - DNA, 25 bp, Homo sapien
gtggtagtgctaagatgctcatgtt

SEQ ID NO: 5761443 - DNA, 25 bp, Homo sapien
cctcaactctctacgctttgcctcc

SEQ ID NO: 5761444 - DNA, 25 bp, Homo sapien
gcggccggagccgtgcgagttctct

SEQ ID NO: 5761445 - DNA, 25 bp, Homo sapien
gtttgaagagattgccatgcttgtc

SEQ ID NO: 5761446 - DNA, 25 bp, Homo sapien
ggatccgcagaggtcccccctattg

SEQ ID NO: 5761447 - DNA, 25 bp, Homo sapien
gggtgggagggttgctggagggtgc

SEQ ID NO: 5761448 - DNA, 25 bp, Homo sapien
gggcttggtgcaagagcttcagaaa

SEQ ID NO: 5761449 - DNA, 25 bp, Homo sapien
atgctcatgtttgtgaacatttctc

SEQ ID NO: 5761450 - DNA, 25 bp, Homo sapien
tgaggagctcactgtcaccaatgct

SEQ ID NO: 5761451 - DNA, 25 bp, Homo sapien
cccttcccagctgcctctctcagga

SEQ ID NO: 5761452 - DNA, 25 bp, Homo sapien
gtattctgccgggtccgccctgtcc

SEQ ID NO: 5761453 - DNA, 25 bp, Homo sapien
gcagggccagggagtgaggagctca

SEQ ID NO: 5761454 - DNA, 25 bp, Homo sapien
caatgctcgatatgtccctgtctcc

SEQ ID NO: 5761455 - DNA, 25 bp, Homo sapien
tgtattccagctacagatttctggg

SEQ ID NO: 5761456 - DNA, 25 bp, Homo sapien
agtgaggagctcactgtcaccaatg

SEQ ID NO: 5761457 - DNA, 25 bp, Homo sapien
attaacagcagcctgtccacgctgg

SEQ ID NO: 5761458 - DNA, 25 bp, Homo sapien
gcaccatgtcccagggctatcaaat

SEQ ID NO: 5761459 - DNA, 25 bp, Homo sapien
gtggggcccccctcagtcttgtgga

SEQ ID NO: 5761460 - DNA, 25 bp, Homo sapien
cggtgttccacagctattgccacag

SEQ ID NO: 5761461 - DNA, 25 bp, Homo sapien
ccagggagtgaggagctcactgtca

SEQ ID NO: 5761462 - DNA, 25 bp, Homo sapien
ctcccccacctcgccatgatttttc

SEQ ID NO: 5761463 - DNA, 25 bp, Homo sapien
cccaactagaggagaaggagaggag

SEQ ID NO: 5761464 - DNA, 25 bp, Homo sapien
actcaagaggaggcctgaccagatg

SEQ ID NO: 5761465 - DNA, 25 bp, Homo sapien
cacaggccattaacagcagcctgtc

SEQ ID NO: 5761466 - DNA, 25 bp, Homo sapien
gaattgcaggaagaacggaggggac

SEQ ID NO: 5761467 - DNA, 25 bp, Homo sapien
gggttgctggagggtgctttattgg

SEQ ID NO: 5761468 - DNA, 25 bp, Homo sapien
acagtgtattccagctacagatttc

SEQ ID NO: 5761469 - DNA, 25 bp, Homo sapien
tccaagaagacaggaccccggtgtt

SEQ ID NO: 5761470 - DNA, 25 bp, Homo sapien
aagacaggaccccggtgttccacag

SEQ ID NO: 5761471 - DNA, 25 bp, Homo sapien
ccctgagtggggcaccagctccccc

SEQ ID NO: 5761472 - DNA, 25 bp, Homo sapien
tacctgctgcagaactctctgggtg

SEQ ID NO: 5761473 - DNA, 25 bp, Homo sapien
tcgatatgtccctgtctcctgtgag

SEQ ID NO: 5761474 - DNA, 25 bp, Homo sapien
catagaactgaagagacctctgatt

SEQ ID NO: 5761475 - DNA, 25 bp, Homo sapien
caaggagtcccacgtgccttaccgg

SEQ ID NO: 5761476 - DNA, 25 bp, Homo sapien
ccaggatccccggcacccagttctc

SEQ ID NO: 5761477 - DNA, 25 bp, Homo sapien
atggaagatggcctggagcctgaga

SEQ ID NO: 5761478 - DNA, 25 bp, Homo sapien
gtttccctctggccctggtgggccc

SEQ ID NO: 5761479 - DNA, 25 bp, Homo sapien
ctgcttcatctggcccgccagaatc

SEQ ID NO: 5761480 - DNA, 25 bp, Homo sapien
gacaggcagtggcaagaccttcaca

SEQ ID NO: 5761481 - DNA, 25 bp, Homo sapien
actgcacaaccagctgcaggaactc

SEQ ID NO: 5761482 - DNA, 25 bp, Homo sapien
gtcatcacgcagccacagtgtattc

SEQ ID NO: 5761483 - DNA, 25 bp, Homo sapien
catctttgcctatggccagacaggc

SEQ ID NO: 5761484 - DNA, 25 bp, Homo sapien
agagattgccatgcttgtccagtca

SEQ ID NO: 5761485 - DNA, 25 bp, Homo sapien
gccacagggttgaagaaccagaagc

SEQ ID NO: 5761486 - DNA, 25 bp, Homo sapien
cgagcgggcgagagaacgcgagtcc

SEQ ID NO: 5761487 - DNA, 25 bp, Homo sapien
caagagttccatccctcactacagt

SEQ ID NO: 5761488 - DNA, 25 bp, Homo sapien
cctgtcaagcagccaagcagaggtg

SEQ ID NO: 5761489 - DNA, 25 bp, Homo sapien
tgctgcagaactctctgggtggtag

SEQ ID NO: 5761490 - DNA, 25 bp, Homo sapien
cgtcttcatgggctagaaatggagc

SEQ ID NO: 5761491 - DNA, 25 bp, Homo sapien
ggctgtggcccgcacagcccagaat

SEQ ID NO: 5761492 - DNA, 25 bp, Homo sapien
tgagaagaaacggacaagaggcctg

SEQ ID NO: 5761493 - DNA, 25 bp, Homo sapien
ggcacatcaggtgttcctcccatgg

SEQ ID NO: 5761494 - DNA, 25 bp, Homo sapien
tagaactgaagagacctctgattaa

SEQ ID NO: 5761495 - DNA, 25 bp, Homo sapien
aagcagccaagcagaggtggcatct

SEQ ID NO: 5761496 - DNA, 25 bp, Homo sapien
tggtcagggctggacctacagcttt

SEQ ID NO: 5761497 - DNA, 25 bp, Homo sapien
tatcatggccctgagcaacaaggag

SEQ ID NO: 5761498 - DNA, 25 bp, Homo sapien
agcgggaacgccttcgggaaacaca

SEQ ID NO: 5761499 - DNA, 25 bp, Homo sapien
ggaccgaggtggacatggatccgca

SEQ ID NO: 5761500 - DNA, 25 bp, Homo sapien
gcgagtgtgagattcgccgtgcagg

SEQ ID NO: 5761501 - DNA, 25 bp, Homo sapien
aaggagaggaggctgcagacatcag

SEQ ID NO: 5761502 - DNA, 25 bp, Homo sapien
gtgcgagttctctaccctgcttcgc

SEQ ID NO: 5761503 - DNA, 25 bp, Homo sapien
cgcgagtcccaggatccccggcacc

SEQ ID NO: 5761504 - DNA, 25 bp, Homo sapien
catcacgcagccacagtgtattcca

SEQ ID NO: 5761505 - DNA, 25 bp, Homo sapien
ggctgagcagggccaacaggagctg

SEQ ID NO: 5761506 - DNA, 25 bp, Homo sapien
gggtattcccaccaggaagtggaca

SEQ ID NO: 5761507 - DNA, 25 bp, Homo sapien
tcccaccaggaagtggacaggatga

SEQ ID NO: 5761508 - DNA, 25 bp, Homo sapien
aaaaaacaggtggaattgcaggaag

SEQ ID NO: 5761509 - DNA, 25 bp, Homo sapien
ctgtggcccaggcagccttactgac

SEQ ID NO: 5761510 - DNA, 25 bp, Homo sapien
aagtggacaggatgaagtgtttgaa

SEQ ID NO: 5761511 - DNA, 25 bp, Homo sapien
cagccttactgactgagcgggaaga

SEQ ID NO: 5761512 - DNA, 25 bp, Homo sapien
aggagactgtggcccaggcagcctt

SEQ ID NO: 5761513 - DNA, 25 bp, Homo sapien
ggaccagctcagagatgcccagcag

SEQ ID NO: 5761514 - DNA, 25 bp, Homo sapien
ttgccacagggttgaagaaccagaa

SEQ ID NO: 5761515 - DNA, 25 bp, Homo sapien
gaacagcaaactgacctacctgctg

SEQ ID NO: 5761516 - DNA, 25 bp, Homo sapien
gccgtgagaggactcaaacgttgga

SEQ ID NO: 5761517 - DNA, 25 bp, Homo sapien
acatccgtgtattctgccgggtccg

SEQ ID NO: 5761518 - DNA, 25 bp, Homo sapien
agaaggagaggaggctgcagacatc

SEQ ID NO: 5761519 - DNA, 25 bp, Homo sapien
ccagctcccccacctcgccatgatt

SEQ ID NO: 5761520 - DNA, 25 bp, Homo sapien
gaaacggacaagaggcctgggtgca

SEQ ID NO: 5761521 - DNA, 25 bp, Homo sapien
ccacagacacaaggccagaccacag

SEQ ID NO: 5761522 - DNA, 25 bp, Homo sapien
ctgttcctgtccagaagtctggcac

SEQ ID NO: 5761523 - DNA, 25 bp, Homo sapien
agccaagcagaggtggcatctctgc

SEQ ID NO: 5761524 - DNA, 25 bp, Homo sapien
tcgccatgatttttcctttgaccgg

SEQ ID NO: 5761525 - DNA, 25 bp, Homo sapien
tgccgggtccgccctgtcctgccgg

SEQ ID NO: 5761526 - DNA, 25 bp, Homo sapien
tcaagcagccaagcagaggtggcat

SEQ ID NO: 5761527 - DNA, 25 bp, Homo sapien
gcaacaaggagtcccacgtgcctta

SEQ ID NO: 5761528 - DNA, 25 bp, Homo sapien
cctgctgttcctgtccagaagtctg

SEQ ID NO: 5761529 - DNA, 25 bp, Homo sapien
acccagttctcttccactgcattcc

SEQ ID NO: 5761530 - DNA, 25 bp, Homo sapien
tggccagacaggcagtggcaagacc

SEQ ID NO: 5761531 - DNA, 25 bp, Homo sapien
aacgtcttcatgggctagaaatgga

SEQ ID NO: 5761532 - DNA, 25 bp, Homo sapien
gcgggaagaacgtcttcatgggcta

SEQ ID NO: 5761533 - DNA, 25 bp, Homo sapien
agctgaagaacttgcgtgcttgtgt

SEQ ID NO: 5761534 - DNA, 25 bp, Homo sapien
gtgtgtgtgtgtgtgtgtgtcccta

SEQ ID NO: 5761535 - DNA, 25 bp, Homo sapien
ggggctgatccctcgggccctgcgg

SEQ ID NO: 5761536 - DNA, 25 bp, Homo sapien
ctcaaacgttggaccaagagaacca

SEQ ID NO: 5761537 - DNA, 25 bp, Homo sapien
gcgcggggctggtagcggccggagc

SEQ ID NO: 5761538 - DNA, 25 bp, Homo sapien
gatccagatctgtgtgtgtgtgtgt

SEQ ID NO: 5761539 - DNA, 25 bp, Homo sapien
tggaagagaacgtctccgagtccct

SEQ ID NO: 5761540 - DNA, 25 bp, Homo sapien
gagctcactgtcaccaatgctcgat

SEQ ID NO: 5761541 - DNA, 25 bp, Homo sapien
agcaaactgacctacctgctgcaga

SEQ ID NO: 5761542 - DNA, 25 bp, Homo sapien
acagacacaaggccagaccacagct

SEQ ID NO: 5761543 - DNA, 25 bp, Homo sapien
cgcgagcgggcgagagaacgcgagt

SEQ ID NO: 5761544 - DNA, 25 bp, Homo sapien
tggaggggctgatccctcgggccct

SEQ ID NO: 5761545 - DNA, 25 bp, Homo sapien
ggggagcactccagccgaggcctgc

SEQ ID NO: 5761546 - DNA, 25 bp, Homo sapien
gtgctaagatgctcatgtttgtgaa

SEQ ID NO: 5761547 - DNA, 25 bp, Homo sapien
cttcagaaaaaacaggtggaattgc

SEQ ID NO: 5761548 - DNA, 25 bp, Homo sapien
aactcaagggcaacatccgtgtatt

SEQ ID NO: 5761549 - DNA, 25 bp, Homo sapien
cccatggcaggagggaagaaaccca

SEQ ID NO: 5761550 - DNA, 25 bp, Homo sapien
tcccaggatccccggcacccagttc

SEQ ID NO: 5761551 - DNA, 25 bp, Homo sapien
cggtcatcacgcagccacagtgtat

SEQ ID NO: 5761552 - DNA, 25 bp, Homo sapien
agacacaaggccagaccacagctca

SEQ ID NO: 5761553 - DNA, 25 bp, Homo sapien
tcactgtcaccaatgctcgatatgt

SEQ ID NO: 5761554 - DNA, 25 bp, Homo sapien
ccagaccacagctcaaaaagtttcc

SEQ ID NO: 5761555 - DNA, 25 bp, Homo sapien
ggagccgtgcgagttctctaccctg

SEQ ID NO: 5761556 - DNA, 25 bp, Homo sapien
ctgagcaacaaggagtcccacgtgc

SEQ ID NO: 5761557 - DNA, 25 bp, Homo sapien
ggagggtgctttattgggtggaggg

SEQ ID NO: 5761558 - DNA, 25 bp, Homo sapien
tacgtagagatctacaatgagactg

SEQ ID NO: 5761559 - DNA, 25 bp, Homo sapien
gacagagcgcacaacactggagggg

SEQ ID NO: 5761560 - DNA, 25 bp, Homo sapien
cccggcacccagttctcttccactg

SEQ ID NO: 5761561 - DNA, 25 bp, Homo sapien
atccgtgtattctgccgggtccgcc

SEQ ID NO: 5761562 - DNA, 25 bp, Homo sapien
aacttgcgtgcttgtgtcctggagc

SEQ ID NO: 5761563 - DNA, 25 bp, Homo sapien
cgccctgcttcatctggcccgccag

SEQ ID NO: 5761564 - DNA, 25 bp, Homo sapien
gttccacagctattgccacagggtt

SEQ ID NO: 5761565 - DNA, 25 bp, Homo sapien
acctggccgggagtgagcgacttga

SEQ ID NO: 5761566 - DNA, 25 bp, Homo sapien
ccgcagaggtcccccctattggaag

SEQ ID NO: 5761567 - DNA, 25 bp, Homo sapien
tcagagatgcccagcagcaggtcaa

SEQ ID NO: 5761568 - DNA, 25 bp, Homo sapien
tcagtcttgtggacctggccgggag

SEQ ID NO: 5761569 - DNA, 25 bp, Homo sapien
catgatttttcctttgaccgggtat

SEQ ID NO: 5761570 - DNA, 25 bp, Homo sapien
cccccagttggaggggctgatccct

SEQ ID NO: 5761571 - DNA, 25 bp, Homo sapien
gtgtgtccctatgtctatgtatcgg

SEQ ID NO: 5761572 - DNA, 25 bp, Homo sapien
ctggccactggaacccggaagggtc

SEQ ID NO: 5761573 - DNA, 25 bp, Homo sapien
ctggatggctatccagtatgcatct

SEQ ID NO: 5761574 - DNA, 25 bp, Homo sapien
ccgggagtgagcgacttgaccccgg

SEQ ID NO: 5761575 - DNA, 25 bp, Homo sapien
agaggaggctgcagacatcagaagc

SEQ ID NO: 5761576 - DNA, 25 bp, Homo sapien
cctcgccatgatttttcctttgacc

SEQ ID NO: 5761577 - DNA, 25 bp, Homo sapien
agatttctggggagcactccagccg

SEQ ID NO: 5761578 - DNA, 25 bp, Homo sapien
cggcacctcttctctgtggctcagg

SEQ ID NO: 5761579 - DNA, 25 bp, Homo sapien
gggggagcccactccaccccctggc

SEQ ID NO: 5761580 - DNA, 25 bp, Homo sapien
gctgagtggtcagggctggacctac

SEQ ID NO: 5761581 - DNA, 25 bp, Homo sapien
agagatgcccagcagcaggtcaagg

SEQ ID NO: 5761582 - DNA, 25 bp, Homo sapien
agaggtggcatctctgcggcaggag

SEQ ID NO: 5761583 - DNA, 25 bp, Homo sapien
tgtcaccaatgctcgatatgtccct

SEQ ID NO: 5761584 - DNA, 25 bp, Homo sapien
gtgagattcgccgtgcagggccagg

SEQ ID NO: 5761585 - DNA, 25 bp, Homo sapien
taccctgcttcgcgagcgggcgaga

SEQ ID NO: 5761586 - DNA, 25 bp, Homo sapien
aggaagtgaagacggatccagatct

SEQ ID NO: 5761587 - DNA, 25 bp, Homo sapien
cctacctgctgcagaactctctggg

SEQ ID NO: 5761588 - DNA, 25 bp, Homo sapien
atcccacccaagagttccatccctc

SEQ ID NO: 5761589 - DNA, 25 bp, Homo sapien
gcagaggtggcatctctgcggcagg

SEQ ID NO: 5761590 - DNA, 25 bp, Homo sapien
tcctgtccagaagtctggcacatca

SEQ ID NO: 5761591 - DNA, 25 bp, Homo sapien
tgccatgcttgtccagtcagccctg

SEQ ID NO: 5761592 - DNA, 25 bp, Homo sapien
ctgagcacgcaggagggcttggtgc

SEQ ID NO: 5761593 - DNA, 25 bp, Homo sapien
tagccctcggccccggggagcggga

SEQ ID NO: 5761594 - DNA, 25 bp, Homo sapien
aagaaacccagcaaacgtccagcct

SEQ ID NO: 5761595 - DNA, 25 bp, Homo sapien
gcagccacagtgtattccagctaca

SEQ ID NO: 5761596 - DNA, 25 bp, Homo sapien
gagactgtccgggacctgctggcca

SEQ ID NO: 5761597 - DNA, 25 bp, Homo sapien
cggtgccgtgagaggactcaaacgt

SEQ ID NO: 5761598 - DNA, 25 bp, Homo sapien
gacctctgattaaggccccttccca

SEQ ID NO: 5761599 - DNA, 25 bp, Homo sapien
gctttgcctccaaggtgaaccagtg

SEQ ID NO: 5761600 - DNA, 25 bp, Homo sapien
gtgaaccagtgtgttattggtactg

SEQ ID NO: 5761601 - DNA, 25 bp, Homo sapien
tgattaaggccccttcccagctgcc

SEQ ID NO: 5761602 - DNA, 25 bp, Homo sapien
gagcggctgagcacgcaggagggct

SEQ ID NO: 5761603 - DNA, 25 bp, Homo sapien
aagatggcctggagcctgagaagaa

SEQ ID NO: 5761604 - DNA, 25 bp, Homo sapien
ggcgagagaacgcgagtcccaggat

SEQ ID NO: 5761605 - DNA, 25 bp, Homo sapien
gagcgacttgaccccggcttagccc

SEQ ID NO: 5761606 - DNA, 25 bp, Homo sapien
tgagaggactcaaacgttggaccaa

SEQ ID NO: 5761607 - DNA, 25 bp, Homo sapien
ctgagtggggcaccagctcccccac

SEQ ID NO: 5761608 - DNA, 25 bp, Homo sapien
ggaagtggacaggatgaagtgtttg

SEQ ID NO: 5761609 - DNA, 25 bp, Homo sapien
tgcaagagcttcagaaaaaacaggt

SEQ ID NO: 5761610 - DNA, 25 bp, Homo sapien
tttgcctatggccagacaggcagtg

SEQ ID NO: 5761611 - DNA, 25 bp, Homo sapien
tttgcctccaaggtgaaccagtgtg

SEQ ID NO: 5761612 - DNA, 25 bp, Homo sapien
ggctgagcacgcaggagggcttggt

SEQ ID NO: 5761613 - DNA, 25 bp, Homo sapien
tggcctggagcctgagaagaaacgg

SEQ ID NO: 5761614 - DNA, 25 bp, Homo sapien
ctacagatttctggggagcactcca

SEQ ID NO: 5761615 - DNA, 25 bp, Homo sapien
gtggcatctctgcggcaggagactg

SEQ ID NO: 5761616 - DNA, 25 bp, Homo sapien
gtgtggggcccccctcagtcttgtg

SEQ ID NO: 5761617 - DNA, 25 bp, Homo sapien
cccacctcgccatgatttttccttt

SEQ ID NO: 5761618 - DNA, 25 bp, Homo sapien
ctcccggtctgacgagcggcgtggg

SEQ ID NO: 5761619 - DNA, 25 bp, Homo sapien
gagctgagtggtcagggctggacct

SEQ ID NO: 5761620 - DNA, 25 bp, Homo sapien
aactgacctacctgctgcagaactc

SEQ ID NO: 5761621 - DNA, 25 bp, Homo sapien
ctctcccggtctgacgagcggcgtg

SEQ ID NO: 5761622 - DNA, 25 bp, Homo sapien
ccccggcgcgtgtgggaccgaggtg

SEQ ID NO: 5761623 - DNA, 25 bp, Homo sapien
ttgtgaacatttctccactggaaga

SEQ ID NO: 5761624 - DNA, 25 bp, Homo sapien
actggaagagaacgtctccgagtcc

SEQ ID NO: 5761625 - DNA, 25 bp, Homo sapien
ctgggacttaaagggtcagttatgt

SEQ ID NO: 5761626 - DNA, 25 bp, Homo sapien
tcaggagctgagtggtcagggctgg

SEQ ID NO: 5761627 - DNA, 25 bp, Homo sapien
ggccctgagcaacaaggagtcccac

SEQ ID NO: 5761628 - DNA, 25 bp, Homo sapien
agccctggatggctatccagtatgc

SEQ ID NO: 5761629 - DNA, 25 bp, Homo sapien
ggaagaaacccagcaaacgtccagc

SEQ ID NO: 5761630 - DNA, 25 bp, Homo sapien
gatccctcgggccctgcggcacctc

SEQ ID NO: 5761631 - DNA, 25 bp, Homo sapien
ctgcagacatcagaagcagccctgt

SEQ ID NO: 5761632 - DNA, 25 bp, Homo sapien
atccagtatgcatctttgcctatgg

SEQ ID NO: 5761633 - DNA, 25 bp, Homo sapien
aagggtcagttatgtgacctaaatg

SEQ ID NO: 5761634 - DNA, 25 bp, Homo sapien
ttctccactggaagagaacgtctcc

SEQ ID NO: 5761635 - DNA, 25 bp, Homo sapien
gggcatttagccaaggtacaggccc

SEQ ID NO: 5761636 - DNA, 25 bp, Homo sapien
acaggaagtgaagacggatccagat

SEQ ID NO: 5761637 - DNA, 25 bp, Homo sapien
agaccttcacaatggagggtgggcc

SEQ ID NO: 5761638 - DNA, 25 bp, Homo sapien
ttggtgcaagagcttcagaaaaaac

SEQ ID NO: 5761639 - DNA, 25 bp, Homo sapien
aagaagtggacgccctgcttcatct

SEQ ID NO: 5761640 - DNA, 25 bp, Homo sapien
caaccagctgcaggaactcaagggc

SEQ ID NO: 5761641 - DNA, 25 bp, Homo sapien
caggaactcaagggcaacatccgtg

SEQ ID NO: 5761642 - DNA, 25 bp, Homo sapien
cccacccaagagttccatccctcac

SEQ ID NO: 5761643 - DNA, 25 bp, Homo sapien
aggatccccggcacccagttctctt

SEQ ID NO: 5761644 - DNA, 25 bp, Homo sapien
caatgagactgtccgggacctgctg

SEQ ID NO: 5761645 - DNA, 25 bp, Homo sapien
gtgggagggttgctggagggtgctt

SEQ ID NO: 5761646 - DNA, 25 bp, Homo sapien
agtatgcatctttgcctatggccag

SEQ ID NO: 5761647 - DNA, 25 bp, Homo sapien
actgatgtcccaactagaggagaag

SEQ ID NO: 5761648 - DNA, 25 bp, Homo sapien
cttctctgtggctcaggagctgagt

SEQ ID NO: 5761649 - DNA, 25 bp, Homo sapien
cgggctgtggcccgcacagcccaga

SEQ ID NO: 5761650 - DNA, 25 bp, Homo sapien
cagatctgtgtgtgtgtgtgtgtgt

SEQ ID NO: 5761651 - DNA, 25 bp, Homo sapien
ccctatgtctatgtatcgggtgagg

SEQ ID NO: 5761652 - DNA, 25 bp, Homo sapien
tgtctcctgtgagaaagaagtggac

SEQ ID NO: 5761653 - DNA, 25 bp, Homo sapien
agcgggcgagagaacgcgagtccca

SEQ ID NO: 5761654 - DNA, 25 bp, Homo sapien
gcctgaccagatggaagatggcctg

SEQ ID NO: 5761655 - DNA, 25 bp, Homo sapien
accccggtgttccacagctattgcc

SEQ ID NO: 5761656 - DNA, 25 bp, Homo sapien
tcaaaagtggcgggtgtggcgcggg

SEQ ID NO: 5761657 - DNA, 25 bp, Homo sapien
ctggtgggccctctgatcctccaac

SEQ ID NO: 5761658 - DNA, 25 bp, Homo sapien
gcttgtccagtcagccctggatggc

SEQ ID NO: 5761659 - DNA, 25 bp, Homo sapien
gtgcaacgaccaaaattaccacatc

SEQ ID NO: 5761660 - DNA, 25 bp, Homo sapien
tgatttttcctttgaccgggtattc

SEQ ID NO: 5761661 - DNA, 25 bp, Homo sapien
actgaagagacctctgattaaggcc

SEQ ID NO: 5761662 - DNA, 25 bp, Homo sapien
cagcctgtccacgctggggctggtt

SEQ ID NO: 5761663 - DNA, 25 bp, Homo sapien
cctgcagtgtggggcccccctcagt

SEQ ID NO: 5761664 - DNA, 25 bp, Homo sapien
acagatttctggggagcactccagc

SEQ ID NO: 5761665 - DNA, 25 bp, Homo sapien
cctcagtcttgtggacctggccggg

SEQ ID NO: 5761666 - DNA, 25 bp, Homo sapien
atgctcgatatgtccctgtctcctg

SEQ ID NO: 5761667 - DNA, 25 bp, Homo sapien
tagagatctacaatgagactgtccg

SEQ ID NO: 5761668 - DNA, 25 bp, Homo sapien
caaactgacctacctgctgcagaac

SEQ ID NO: 5761669 - DNA, 25 bp, Homo sapien
gggtggtagtgctaagatgctcatg

SEQ ID NO: 5761670 - DNA, 25 bp, Homo sapien
ttccctctggccctggtgggccctc

SEQ ID NO: 5761671 - DNA, 25 bp, Homo sapien
gccttactgactgagcgggaagaac

SEQ ID NO: 5761672 - DNA, 25 bp, Homo sapien
acccgccttagcctctcccggtctg

SEQ ID NO: 5761673 - DNA, 25 bp, Homo sapien
agaacttgcgtgcttgtgtcctgga

SEQ ID NO: 5761674 - DNA, 25 bp, Homo sapien
ggagaggaggctgcagacatcagaa

SEQ ID NO: 5761675 - DNA, 25 bp, Homo sapien
caaggccctggggacagagcgcaca

SEQ ID NO: 5761676 - DNA, 25 bp, Homo sapien
agcggcgtgggaccctgagtggggc

SEQ ID NO: 5761677 - DNA, 25 bp, Homo sapien
agccaaggtacaggcccaggctgag

SEQ ID NO: 5761678 - DNA, 25 bp, Homo sapien
ggccattaacagcagcctgtccacg

SEQ ID NO: 5761679 - DNA, 25 bp, Homo sapien
gccttcgggaaacacaggccattaa

SEQ ID NO: 5761680 - DNA, 25 bp, Homo sapien
gtggcaagaccttcacaatggaggg

SEQ ID NO: 5761681 - DNA, 25 bp, Homo sapien
catggcaggagggaagaaacccagc

SEQ ID NO: 5761682 - DNA, 25 bp, Homo sapien
caagagaaccagcagcttcaggacc

SEQ ID NO: 5761683 - DNA, 25 bp, Homo sapien
ggcccaggctgagcagggccaacag

SEQ ID NO: 5761684 - DNA, 25 bp, Homo sapien
gcttggtgcaagagcttcagaaaaa

SEQ ID NO: 5761685 - DNA, 25 bp, Homo sapien
tcgggccctgcggcacctcttctct

SEQ ID NO: 5761686 - DNA, 25 bp, Homo sapien
accggaacagcaaactgacctacct

SEQ ID NO: 5761687 - DNA, 25 bp, Homo sapien
ccactccaccccctggcctcctcct

SEQ ID NO: 5761688 - DNA, 25 bp, Homo sapien
gtccagaagtctggcacatcaggtg

SEQ ID NO: 5761689 - DNA, 25 bp, Homo sapien
aggtcaaggccctggggacagagcg

SEQ ID NO: 5761690 - DNA, 25 bp, Homo sapien
tacaatgagactgtccgggacctgc

SEQ ID NO: 5761691 - DNA, 25 bp, Homo sapien
cactgcattcccccggcgcgtgtgg

SEQ ID NO: 5761692 - DNA, 25 bp, Homo sapien
gtattcccaccaggaagtggacagg

SEQ ID NO: 5761693 - DNA, 25 bp, Homo sapien
gctggggctggttatcatggccctg

SEQ ID NO: 5761694 - DNA, 25 bp, Homo sapien
caagaggcctgggtgcaacgaccaa

SEQ ID NO: 5761695 - DNA, 25 bp, Homo sapien
cctatggccagacaggcagtggcaa

SEQ ID NO: 5761696 - DNA, 25 bp, Homo sapien
gcagggccaacaggagctgaagaac

SEQ ID NO: 5761697 - DNA, 25 bp, Homo sapien
agctggaagagcggctgagcacgca

SEQ ID NO: 5761698 - DNA, 25 bp, Homo sapien
taaagggtcagttatgtgacctaaa

SEQ ID NO: 5761699 - DNA, 25 bp, Homo sapien
gacccccagttggaggggctgatcc

SEQ ID NO: 5761700 - DNA, 25 bp, Homo sapien
aactctctgggtggtagtgctaaga

SEQ ID NO: 5761701 - DNA, 25 bp, Homo sapien
caccagctcccccacctcgccatga

SEQ ID NO: 5761702 - DNA, 25 bp, Homo sapien
gaaccagaagccagttcctgctgtt

SEQ ID NO: 5761703 - DNA, 25 bp, Homo sapien
tcttgtggacctggccgggagtgag

SEQ ID NO: 5761704 - DNA, 25 bp, Homo sapien
ctgggtggtagtgctaagatgctca

SEQ ID NO: 5761705 - DNA, 25 bp, Homo sapien
gctcaaaaagtttccaagaagacag

SEQ ID NO: 5761706 - DNA, 25 bp, Homo sapien
atgtctatgtatcgggtgaggggtg

SEQ ID NO: 5761707 - DNA, 25 bp, Homo sapien
ctctctgggtggtagtgctaagatg

SEQ ID NO: 5761708 - DNA, 25 bp, Homo sapien
agagaacgcgagtcccaggatcccc

SEQ ID NO: 5761709 - DNA, 25 bp, Homo sapien
agaacggaggggactgatgtcccaa

SEQ ID NO: 5761710 - DNA, 25 bp, Homo sapien
gtgggaccctgagtggggcaccagc

SEQ ID NO: 5761711 - DNA, 25 bp, Homo sapien
ccagttcctgctgttcctgtccaga

SEQ ID NO: 5761712 - DNA, 25 bp, Homo sapien
gaacgccttcgggaaacacaggcca

SEQ ID NO: 5761713 - DNA, 25 bp, Homo sapien
ccttaccggaacagcaaactgacct

SEQ ID NO: 5761714 - DNA, 25 bp, Homo sapien
attaccacatcccacccaagagttc

SEQ ID NO: 5761715 - DNA, 25 bp, Homo sapien
cccagcaaacgtccagcctgggact

SEQ ID NO: 5761716 - DNA, 25 bp, Homo sapien
tttgtagcaagctacgtagagatct

SEQ ID NO: 5761717 - DNA, 25 bp, Homo sapien
tcccagctgcctctctcaggaagca

SEQ ID NO: 5761718 - DNA, 25 bp, Homo sapien
tccaccccctggcctcctcctgttt

SEQ ID NO: 5761719 - DNA, 25 bp, Homo sapien
ctggtagcggccggagccgtgcgag

SEQ ID NO: 5761720 - DNA, 25 bp, Homo sapien
ctgacctacctgctgcagaactctc

SEQ ID NO: 5761721 - DNA, 25 bp, Homo sapien
tccaaggtgaaccagtgtgttattg

SEQ ID NO: 5761722 - DNA, 25 bp, Homo sapien
agccacagtgtattccagctacaga

SEQ ID NO: 5761723 - DNA, 25 bp, Homo sapien
cacccaagagttccatccctcacta

SEQ ID NO: 5761724 - DNA, 25 bp, Homo sapien
gggaacgccttcgggaaacacaggc

SEQ ID NO: 5761725 - DNA, 25 bp, Homo sapien
gtccgccctgtcctgccgggggagc

SEQ ID NO: 5761726 - DNA, 25 bp, Homo sapien
ccagtcagccctggatggctatcca

SEQ ID NO: 5761727 - DNA, 25 bp, Homo sapien
gcagaactctctgggtggtagtgct

SEQ ID NO: 5761728 - DNA, 25 bp, Homo sapien
catcaggtgttcctcccatggcagg

SEQ ID NO: 5761729 - DNA, 25 bp, Homo sapien
gaaacacaggccattaacagcagcc

SEQ ID NO: 5761730 - DNA, 25 bp, Homo sapien
cctggcctcctcctgtttccctctg

SEQ ID NO: 5761731 - DNA, 25 bp, Homo sapien
tctcctgtgagaaagaagtggacgc

SEQ ID NO: 5761732 - DNA, 25 bp, Homo sapien
ggagcctgagaagaaacggacaaga

SEQ ID NO: 5761733 - DNA, 25 bp, Homo sapien
gtcccaactagaggagaaggagagg

SEQ ID NO: 5761734 - DNA, 25 bp, Homo sapien
gggtccgccctgtcctgccggggga

SEQ ID NO: 5761735 - DNA, 25 bp, Homo sapien
ccagttctcttccactgcattcccc

SEQ ID NO: 5761736 - DNA, 25 bp, Homo sapien
tccagatctgtgtgtgtgtgtgtgt

SEQ ID NO: 5761737 - DNA, 25 bp, Homo sapien
tcctcccatggcaggagggaagaaa

SEQ ID NO: 5761738 - DNA, 25 bp, Homo sapien
cacagctcaaaaagtttccaagaag

SEQ ID NO: 5761739 - DNA, 25 bp, Homo sapien
ggcgcgtgtgggaccgaggtggaca

SEQ ID NO: 5761740 - DNA, 25 bp, Homo sapien
gcagacatcagaagcagccctgtca

SEQ ID NO: 5761741 - DNA, 25 bp, Homo sapien
tcagaaaaaacaggtggaattgcag

SEQ ID NO: 5761742 - DNA, 25 bp, Homo sapien
ctggcacatcaggtgttcctcccat

SEQ ID NO: 5761743 - DNA, 25 bp, Homo sapien
ggacaggatgaagtgtttgaagaga

SEQ ID NO: 5761744 - DNA, 25 bp, Homo sapien
gtttgtgaacatttctccactggaa

SEQ ID NO: 5761745 - DNA, 25 bp, Homo sapien
aacgaccaaaattaccacatcccac

SEQ ID NO: 5761746 - DNA, 25 bp, Homo sapien
ttccatccctcactacagtgccaca

SEQ ID NO: 5761747 - DNA, 25 bp, Homo sapien
agggcaacatccgtgtattctgccg

SEQ ID NO: 5761748 - DNA, 25 bp, Homo sapien
ggccctctgatcctccaacccgcct

SEQ ID NO: 5761749 - DNA, 25 bp, Homo sapien
ggagaaggagaggaggctgcagaca

SEQ ID NO: 5761750 - DNA, 25 bp, Homo sapien
aggactcaaacgttggaccaagaga

SEQ ID NO: 5761751 - DNA, 25 bp, Homo sapien
ttaccggaacagcaaactgacctac

SEQ ID NO: 5761752 - DNA, 25 bp, Homo sapien
gtgaacatttctccactggaagaga

SEQ ID NO: 5761753 - DNA, 25 bp, Homo sapien
ggtactgctcaggccaacaggaagt

SEQ ID NO: 5761754 - DNA, 25 bp, Homo sapien
gacttgaccccggcttagccctcgg

SEQ ID NO: 5761755 - DNA, 25 bp, Homo sapien
cttccactgcattcccccggcgcgt

SEQ ID NO: 5761756 - DNA, 25 bp, Homo sapien
aaaacaggtggaattgcaggaagaa

SEQ ID NO: 5761757 - DNA, 25 bp, Homo sapien
cgaccaaaattaccacatcccaccc

SEQ ID NO: 5761758 - DNA, 25 bp, Homo sapien
ggcgactgcacaaccagctgcagga

SEQ ID NO: 5761759 - DNA, 25 bp, Homo sapien
cggacaagaggcctgggtgcaacga

SEQ ID NO: 5761760 - DNA, 25 bp, Homo sapien
catgggctagaaatggagcgccggc

SEQ ID NO: 5761761 - DNA, 25 bp, Homo sapien
aggagctgagtggtcagggctggac

SEQ ID NO: 5761762 - DNA, 25 bp, Homo sapien
ccactggaagagaacgtctccgagt

SEQ ID NO: 5761763 - DNA, 25 bp, Homo sapien
tgtgtcctggagctggaagagcggc

SEQ ID NO: 5761764 - DNA, 25 bp, Homo sapien
cagcaaacgtccagcctgggactta

SEQ ID NO: 5761765 - DNA, 25 bp, Homo sapien
aatgaacggtcatcacgcagccaca

SEQ ID NO: 5761766 - DNA, 25 bp, Homo sapien
ctgtccacgctggggctggttatca

SEQ ID NO: 5761767 - DNA, 25 bp, Homo sapien
atgtcccaactagaggagaaggaga

SEQ ID NO: 5761768 - DNA, 25 bp, Homo sapien
cccaggcagccttactgactgagcg

SEQ ID NO: 5761769 - DNA, 25 bp, Homo sapien
gcctctcccggtctgacgagcggcg

SEQ ID NO: 5761770 - DNA, 25 bp, Homo sapien
caggccattaacagcagcctgtcca

SEQ ID NO: 5761771 - DNA, 25 bp, Homo sapien
ctgtccgggacctgctggccactgg

SEQ ID NO: 5761772 - DNA, 25 bp, Homo sapien
gtgagcgacttgaccccggcttagc

SEQ ID NO: 5761773 - DNA, 25 bp, Homo sapien
ccggcgcgtgtgggaccgaggtgga

SEQ ID NO: 5761774 - DNA, 25 bp, Homo sapien
aggcctgaccagatggaagatggcc

SEQ ID NO: 5761775 - DNA, 25 bp, Homo sapien
gcaggagggcttggtgcaagagctt

SEQ ID NO: 5761776 - DNA, 25 bp, Homo sapien
tctgccgggtccgccctgtcctgcc

SEQ ID NO: 5761777 - DNA, 25 bp, Homo sapien
gcagaactaaaacggtgccgtgaga

SEQ ID NO: 5761778 - DNA, 25 bp, Homo sapien
ggctagaaatggagcgccggcgact

SEQ ID NO: 5761779 - DNA, 25 bp, Homo sapien
ttccagctacagatttctggggagc

SEQ ID NO: 5761780 - DNA, 25 bp, Homo sapien
agggccaacaggagctgaagaactt

SEQ ID NO: 5761781 - DNA, 25 bp, Homo sapien
acctaaatgcagaactaaaacggtg

SEQ ID NO: 5761782 - DNA, 25 bp, Homo sapien
gagcgcacaacactggaggggcatt

SEQ ID NO: 5761783 - DNA, 25 bp, Homo sapien
cagcccagaatgaacggtcatcacg

SEQ ID NO: 5761784 - DNA, 25 bp, Homo sapien
ggggactgatgtcccaactagagga

SEQ ID NO: 5761785 - DNA, 25 bp, Homo sapien
gcgagttctctaccctgcttcgcga

SEQ ID NO: 5761786 - DNA, 25 bp, Homo sapien
ccaaggtacaggcccaggctgagca

SEQ ID NO: 5761787 - DNA, 25 bp, Homo sapien
gattcgccgtgcagggccagggagt

SEQ ID NO: 5761788 - DNA, 25 bp, Homo sapien
ttgtggacctggccgggagtgagcg

SEQ ID NO: 5761789 - DNA, 25 bp, Homo sapien
gggcaccatgtcccagggctatcaa

SEQ ID NO: 5761790 - DNA, 25 bp, Homo sapien
gtgcagggccagggagtgaggagct

SEQ ID NO: 5761791 - DNA, 25 bp, Homo sapien
cagttatgtgacctaaatgcagaac

SEQ ID NO: 5761792 - DNA, 25 bp, Homo sapien
gagtgagcgacttgaccccggctta

SEQ ID NO: 5761793 - DNA, 25 bp, Homo sapien
ctcttccactgcattcccccggcgc

SEQ ID NO: 5761794 - DNA, 25 bp, Homo sapien
ggcaccagctcccccacctcgccat

SEQ ID NO: 5761795 - DNA, 25 bp, Homo sapien
gctaagatgctcatgtttgtgaaca

SEQ ID NO: 5761796 - DNA, 25 bp, Homo sapien
catctggcccgccagaatcgggctg

SEQ ID NO: 5761797 - DNA, 25 bp, Homo sapien
ctgcctctctcaggaagcagactca

SEQ ID NO: 5761798 - DNA, 25 bp, Homo sapien
cccctcagtcttgtggacctggccg

SEQ ID NO: 5761799 - DNA, 25 bp, Homo sapien
cgtagagatctacaatgagactgtc

SEQ ID NO: 5761800 - DNA, 25 bp, Homo sapien
ggccagggagtgaggagctcactgt

SEQ ID NO: 5761801 - DNA, 25 bp, Homo sapien
tcaagaggaggcctgaccagatgga

SEQ ID NO: 5761802 - DNA, 25 bp, Homo sapien
gtgtattctgccgggtccgccctgt

SEQ ID NO: 5761803 - DNA, 25 bp, Homo sapien
ggctatccagtatgcatctttgcct

SEQ ID NO: 5761804 - DNA, 25 bp, Homo sapien
gcagaggtcccccctattggaagta

SEQ ID NO: 5761805 - DNA, 25 bp, Homo sapien
caaggtgaaccagtgtgttattggt

SEQ ID NO: 5761806 - DNA, 25 bp, Homo sapien
tgtggctcaggagctgagtggtcag

SEQ ID NO: 5761807 - DNA, 25 bp, Homo sapien
gaaagaagtggacgccctgcttcat

SEQ ID NO: 5761808 - DNA, 25 bp, Homo sapien
tctctaccctgcttcgcgagcgggc

SEQ ID NO: 5761809 - DNA, 25 bp, Homo sapien
aaatggagcgccggcgactgcacaa

SEQ ID NO: 5761810 - DNA, 25 bp, Homo sapien
tgaccccggcttagccctcggcccc

SEQ ID NO: 5761811 - DNA, 25 bp, Homo sapien
ctctgggtggtagtgctaagatgct

SEQ ID NO: 5761812 - DNA, 25 bp, Homo sapien
gaatcgggctgtggcccgcacagcc

SEQ ID NO: 5761813 - DNA, 25 bp, Homo sapien
gacgagcggcgtgggaccctgagtg

SEQ ID NO: 5761814 - DNA, 25 bp, Homo sapien
tggggacagagcgcacaacactgga

SEQ ID NO: 5761815 - DNA, 25 bp, Homo sapien
gctggttatcatggccctgagcaac

SEQ ID NO: 5761816 - DNA, 25 bp, Homo sapien
tcctggagctggaagagcggctgag

SEQ ID NO: 5761817 - DNA, 25 bp, Homo sapien
acctcttctctgtggctcaggagct

SEQ ID NO: 5761818 - DNA, 25 bp, Homo sapien
tgtcctggagctggaagagcggctg

SEQ ID NO: 5761819 - DNA, 25 bp, Homo sapien
agaccacagctcaaaaagtttccaa

SEQ ID NO: 5761820 - DNA, 25 bp, Homo sapien
atgtttgtgaacatttctccactgg

SEQ ID NO: 5761821 - DNA, 25 bp, Homo sapien
ctcactacagtgccacagacacaag

SEQ ID NO: 5761822 - DNA, 25 bp, Homo sapien
ggagctgaagaacttgcgtgcttgt

SEQ ID NO: 5761823 - DNA, 25 bp, Homo sapien
gcccgccagaatcgggctgtggccc

SEQ ID NO: 5761824 - DNA, 25 bp, Homo sapien
ctctacgctttgcctccaaggtgaa

SEQ ID NO: 5761825 - DNA, 25 bp, Homo sapien
ccctggtgggccctctgatcctcca

SEQ ID NO: 5761826 - DNA, 25 bp, Homo sapien
cctgtcctgccgggggagcccactc

SEQ ID NO: 5761827 - DNA, 25 bp, Homo sapien
cgggcgagagaacgcgagtcccagg

SEQ ID NO: 5761828 - DNA, 25 bp, Homo sapien
ggccgggagtgagcgacttgacccc

SEQ ID NO: 5761829 - DNA, 25 bp, Homo sapien
gggcgagtgtgagattcgccgtgca

SEQ ID NO: 5761830 - DNA, 25 bp, Homo sapien
aacggtgccgtgagaggactcaaac

SEQ ID NO: 5761831 - DNA, 25 bp, Homo sapien
tgcagtgtggggcccccctcagtct

SEQ ID NO: 5761832 - DNA, 25 bp, Homo sapien
cgttggaccaagagaaccagcagct

SEQ ID NO: 5761833 - DNA, 25 bp, Homo sapien
gtggcccaggcagccttactgactg

SEQ ID NO: 5761834 - DNA, 25 bp, Homo sapien
acgcaggagggcttggtgcaagagc

SEQ ID NO: 5761835 - DNA, 25 bp, Homo sapien
cccacgtgccttaccggaacagcaa

SEQ ID NO: 5761836 - DNA, 25 bp, Homo sapien
ttagccaaggtacaggcccaggctg

SEQ ID NO: 5761837 - DNA, 25 bp, Homo sapien
gagtgtgagattcgccgtgcagggc

SEQ ID NO: 5761838 - DNA, 25 bp, Homo sapien
gtccacgctggggctggttatcatg

SEQ ID NO: 5761839 - DNA, 25 bp, Homo sapien
attgccatgcttgtccagtcagccc

SEQ ID NO: 5761840 - DNA, 25 bp, Homo sapien
aacgcgagtcccaggatccccggca

SEQ ID NO: 5761841 - DNA, 25 bp, Homo sapien
aagaggaggcctgaccagatggaag

SEQ ID NO: 5761842 - DNA, 25 bp, Homo sapien
tgaagacggatccagatctgtgtgt

SEQ ID NO: 5761843 - DNA, 25 bp, Homo sapien
gtgtgtgtgtgtgtgtccctatgtc

SEQ ID NO: 5761844 - DNA, 25 bp, Homo sapien
ctagaaatggagcgccggcgactgc

SEQ ID NO: 5761845 - DNA, 25 bp, Homo sapien
tcaccaatgctcgatatgtccctgt

SEQ ID NO: 5761846 - DNA, 25 bp, Homo sapien
ggccaacaggagctgaagaacttgc

SEQ ID NO: 5761847 - DNA, 25 bp, Homo sapien
ggctgcagacatcagaagcagccct

SEQ ID NO: 5761848 - DNA, 25 bp, Homo sapien
caacaggaagtgaagacggatccag

SEQ ID NO: 5761849 - DNA, 25 bp, Homo sapien
gctcatgtttgtgaacatttctcca

SEQ ID NO: 5761850 - DNA, 25 bp, Homo sapien
cccaagagttccatccctcactaca

SEQ ID NO: 5761851 - DNA, 25 bp, Homo sapien
atgcccagcagcaggtcaaggccct

SEQ ID NO: 5761852 - DNA, 25 bp, Homo sapien
ctggaagagcggctgagcacgcagg

SEQ ID NO: 5761853 - DNA, 25 bp, Homo sapien
gcattcccccggcgcgtgtgggacc

SEQ ID NO: 5761854 - DNA, 25 bp, Homo sapien
gggacagagcgcacaacactggagg

SEQ ID NO: 5761855 - DNA, 25 bp, Homo sapien
cttagcctctcccggtctgacgagc

SEQ ID NO: 5761856 - DNA, 25 bp, Homo sapien
gtgtgtgtccctatgtctatgtatc

SEQ ID NO: 5761857 - DNA, 25 bp, Homo sapien
ccagccgaggcctgcagtgtggggc

SEQ ID NO: 5761858 - DNA, 25 bp, Homo sapien
ggccactggaacccggaagggtcaa

SEQ ID NO: 5761859 - DNA, 25 bp, Homo sapien
gggagtgagcgacttgaccccggct

SEQ ID NO: 5761860 - DNA, 25 bp, Homo sapien
ccagcagcttcaggaccagctcaga

SEQ ID NO: 5761861 - DNA, 25 bp, Homo sapien
ctgatccctcgggccctgcggcacc

SEQ ID NO: 5761862 - DNA, 25 bp, Homo sapien
cctcctgtttccctctggccctggt

SEQ ID NO: 5761863 - DNA, 25 bp, Homo sapien
acagcagcctgtccacgctggggct

SEQ ID NO: 5761864 - DNA, 25 bp, Homo sapien
acaggatgaagtgtttgaagagatt

SEQ ID NO: 5761865 - DNA, 25 bp, Homo sapien
cccctggcctcctcctgtttccctc

SEQ ID NO: 5761866 - DNA, 25 bp, Homo sapien
cccccacctcgccatgatttttcct

SEQ ID NO: 5761867 - DNA, 25 bp, Homo sapien
gaactgaagagacctctgattaagg

SEQ ID NO: 5761868 - DNA, 25 bp, Homo sapien
gacaggaccccggtgttccacagct

SEQ ID NO: 5761869 - DNA, 25 bp, Homo sapien
agtggacgccctgcttcatctggcc

SEQ ID NO: 5761870 - DNA, 25 bp, Homo sapien
cccaggctgagcagggccaacagga

SEQ ID NO: 5761871 - DNA, 25 bp, Homo sapien
gcccactccaccccctggcctcctc

SEQ ID NO: 5761872 - DNA, 25 bp, Homo sapien
ctaaatgcagaactaaaacggtgcc

SEQ ID NO: 5761873 - DNA, 25 bp, Homo sapien
ggccggagccgtgcgagttctctac

SEQ ID NO: 5761874 - DNA, 25 bp, Homo sapien
ctctctcaggaagcagactcaagag

SEQ ID NO: 5761875 - DNA, 25 bp, Homo sapien
catgtcccagggctatcaaataaag

SEQ ID NO: 5761876 - DNA, 25 bp, Homo sapien
tactgactgagcgggaagaacgtct

SEQ ID NO: 5761877 - DNA, 25 bp, Homo sapien
cactaccacccagagagttctgcag

SEQ ID NO: 5761878 - DNA, 25 bp, Homo sapien
gtccacttctttctcacaggagaca

SEQ ID NO: 5761879 - DNA, 25 bp, Homo sapien
caagactgaggggggccccacactg

SEQ ID NO: 5761880 - DNA, 25 bp, Homo sapien
gatggaactcttgggtgggatgtgg

SEQ ID NO: 5761881 - DNA, 25 bp, Homo sapien
gcctgggccacagtctcctgccgca

SEQ ID NO: 5761882 - DNA, 25 bp, Homo sapien
cagtctcattgtagatctctacgta

SEQ ID NO: 5761883 - DNA, 25 bp, Homo sapien
atgggaggaacacctgatgtgccag

SEQ ID NO: 5761884 - DNA, 25 bp, Homo sapien
tggcaatctcttcaaacacttcatc

SEQ ID NO: 5761885 - DNA, 25 bp, Homo sapien
tggacaagcatggcaatctcttcaa

SEQ ID NO: 5761886 - DNA, 25 bp, Homo sapien
tgtagtgagggatggaactcttggg

SEQ ID NO: 5761887 - DNA, 25 bp, Homo sapien
cctgccgcagagatgccacctctgc

SEQ ID NO: 5761888 - DNA, 25 bp, Homo sapien
cttcaaccctgtggcaatagctgtg

SEQ ID NO: 5761889 - DNA, 25 bp, Homo sapien
cagcccgattctggcgggccagatg

SEQ ID NO: 5761890 - DNA, 25 bp, Homo sapien
gaggcagctgggaaggggccttaat

SEQ ID NO: 5761891 - DNA, 25 bp, Homo sapien
gtgccccactcagggtcccacgccg

SEQ ID NO: 5761892 - DNA, 25 bp, Homo sapien
ccagcgtggacaggctgctgttaat

SEQ ID NO: 5761893 - DNA, 25 bp, Homo sapien
ccggggtcaagtcgctcactcccgg

SEQ ID NO: 5761894 - DNA, 25 bp, Homo sapien
ttctggcgggccagatgaagcaggg

SEQ ID NO: 5761895 - DNA, 25 bp, Homo sapien
gttgagggactcggagacgttctct

SEQ ID NO: 5761896 - DNA, 25 bp, Homo sapien
cttggctgcttgacagggctgcttc

SEQ ID NO: 5761897 - DNA, 25 bp, Homo sapien
ctgaccactcagctcctgagccaca

SEQ ID NO: 5761898 - DNA, 25 bp, Homo sapien
gggaggaacacctgatgtgccagac

SEQ ID NO: 5761899 - DNA, 25 bp, Homo sapien
ggggatcctgggactcgcgttctct

SEQ ID NO: 5761900 - DNA, 25 bp, Homo sapien
gaggaggccagggggtggagtgggc

SEQ ID NO: 5761901 - DNA, 25 bp, Homo sapien
agctgtggaacaccggggtcctgtc

SEQ ID NO: 5761902 - DNA, 25 bp, Homo sapien
tggccctgctcagcctgggcctgta

SEQ ID NO: 5761903 - DNA, 25 bp, Homo sapien
gaccactcagctcctgagccacaga

SEQ ID NO: 5761904 - DNA, 25 bp, Homo sapien
ttggtcgttgcacccaggcctcttg

SEQ ID NO: 5761905 - DNA, 25 bp, Homo sapien
acgttctcttccagtggagaaatgt

SEQ ID NO: 5761906 - DNA, 25 bp, Homo sapien
actgtggctgcgtgatgaccgttca

SEQ ID NO: 5761907 - DNA, 25 bp, Homo sapien
gccagcaggtcccggacagtctcat

SEQ ID NO: 5761908 - DNA, 25 bp, Homo sapien
tcatggcgaggtgggggagctggtg

SEQ ID NO: 5761909 - DNA, 25 bp, Homo sapien
ggaagagaactgggtgccggggatc

SEQ ID NO: 5761910 - DNA, 25 bp, Homo sapien
cactggttcaccttggaggcaaagc

SEQ ID NO: 5761911 - DNA, 25 bp, Homo sapien
tcctgagagaggcagctgggaaggg

SEQ ID NO: 5761912 - DNA, 25 bp, Homo sapien
cccagagagttctgcagcaggtagg

SEQ ID NO: 5761913 - DNA, 25 bp, Homo sapien
agatgccacctctgcttggctgctt

SEQ ID NO: 5761914 - DNA, 25 bp, Homo sapien
gtttgagtcctctcacggcaccgtt

SEQ ID NO: 5761915 - DNA, 25 bp, Homo sapien
gaccctttaagtcccaggctggacg

SEQ ID NO: 5761916 - DNA, 25 bp, Homo sapien
gctccccggggccgagggctaagcc

SEQ ID NO: 5761917 - DNA, 25 bp, Homo sapien
gtccagccctgaccactcagctcct

SEQ ID NO: 5761918 - DNA, 25 bp, Homo sapien
gctgttccggtaaggcacgtgggac

SEQ ID NO: 5761919 - DNA, 25 bp, Homo sapien
cgaggtgggggagctggtgccccac

SEQ ID NO: 5761920 - DNA, 25 bp, Homo sapien
gggctcccccggcaggacagggcgg

SEQ ID NO: 5761921 - DNA, 25 bp, Homo sapien
ctgagagaggcagctgggaaggggc

SEQ ID NO: 5761922 - DNA, 25 bp, Homo sapien
ctgctggttctcttggtccaacgtt

SEQ ID NO: 5761923 - DNA, 25 bp, Homo sapien
tgctcagccgctcttccagctccag

SEQ ID NO: 5761924 - DNA, 25 bp, Homo sapien
ctgcagctggttgtgcagtcgccgg

SEQ ID NO: 5761925 - DNA, 25 bp, Homo sapien
tttagttctgcatttaggtcacata

SEQ ID NO: 5761926 - DNA, 25 bp, Homo sapien
gagttcctgcagctggttgtgcagt

SEQ ID NO: 5761927 - DNA, 25 bp, Homo sapien
gcttctgatgtctgcagcctcctct

SEQ ID NO: 5761928 - DNA, 25 bp, Homo sapien
actggcttctggttcttcaaccctg

SEQ ID NO: 5761929 - DNA, 25 bp, Homo sapien
aacatgagcatcttagcactaccac

SEQ ID NO: 5761930 - DNA, 25 bp, Homo sapien
agctcctgagccacagagaagaggt

SEQ ID NO: 5761931 - DNA, 25 bp, Homo sapien
tttttctgaagctcttgcaccaagc

SEQ ID NO: 5761932 - DNA, 25 bp, Homo sapien
cgctctgtccccagggccttgacct

SEQ ID NO: 5761933 - DNA, 25 bp, Homo sapien
gttgctcagggccatgataaccagc

SEQ ID NO: 5761934 - DNA, 25 bp, Homo sapien
gccagacttctggacaggaacagca

SEQ ID NO: 5761935 - DNA, 25 bp, Homo sapien
caagccctcctgcgtgctcagccgc

SEQ ID NO: 5761936 - DNA, 25 bp, Homo sapien
tccagctccaggacacaagcacgca

SEQ ID NO: 5761937 - DNA, 25 bp, Homo sapien
cctctccttctcctctagttgggac

SEQ ID NO: 5761938 - DNA, 25 bp, Homo sapien
ggaaactttttgagctgtggtctgg

SEQ ID NO: 5761939 - DNA, 25 bp, Homo sapien
taagtcccaggctggacgtttgctg

SEQ ID NO: 5761940 - DNA, 25 bp, Homo sapien
cacccctcacccgatacatagacat

SEQ ID NO: 5761941 - DNA, 25 bp, Homo sapien
gtggaacaccggggtcctgtcttct

SEQ ID NO: 5761942 - DNA, 25 bp, Homo sapien
tcacccgatacatagacatagggac

SEQ ID NO: 5761943 - DNA, 25 bp, Homo sapien
ttcttcctgcaattccacctgtttt

SEQ ID NO: 5761944 - DNA, 25 bp, Homo sapien
ggttccagtggccagcaggtcccgg

SEQ ID NO: 5761945 - DNA, 25 bp, Homo sapien
ccttgttgctcagggccatgataac

SEQ ID NO: 5761946 - DNA, 25 bp, Homo sapien
caccttggaggcaaagcgtagagag

SEQ ID NO: 5761947 - DNA, 25 bp, Homo sapien
gggctaagccggggtcaagtcgctc

SEQ ID NO: 5761948 - DNA, 25 bp, Homo sapien
catgagcatcttagcactaccaccc

SEQ ID NO: 5761949 - DNA, 25 bp, Homo sapien
gagctggtgccccactcagggtccc

SEQ ID NO: 5761950 - DNA, 25 bp, Homo sapien
cagtggaagagaactgggtgccggg

SEQ ID NO: 5761951 - DNA, 25 bp, Homo sapien
gttctcttccagtggagaaatgttc

SEQ ID NO: 5761952 - DNA, 25 bp, Homo sapien
tgcacggcgaatctcacactcgccc

SEQ ID NO: 5761953 - DNA, 25 bp, Homo sapien
cctcggtcccacacgcgccggggga

SEQ ID NO: 5761954 - DNA, 25 bp, Homo sapien
cattgtagatctctacgtagcttgc

SEQ ID NO: 5761955 - DNA, 25 bp, Homo sapien
ttctggttcttcaaccctgtggcaa

SEQ ID NO: 5761956 - DNA, 25 bp, Homo sapien
acacaagcacgcaagttcttcagct

SEQ ID NO: 5761957 - DNA, 25 bp, Homo sapien
actcagctcctgagccacagagaag

SEQ ID NO: 5761958 - DNA, 25 bp, Homo sapien
aaggctgcctgggccacagtctcct

SEQ ID NO: 5761959 - DNA, 25 bp, Homo sapien
cgagcattggtgacagtgagctcct

SEQ ID NO: 5761960 - DNA, 25 bp, Homo sapien
cgtggacaggctgctgttaatggcc

SEQ ID NO: 5761961 - DNA, 25 bp, Homo sapien
ttctcacaggagacagggacatatc

SEQ ID NO: 5761962 - DNA, 25 bp, Homo sapien
acagggacatatcgagcattggtga

SEQ ID NO: 5761963 - DNA, 25 bp, Homo sapien
gaatacactgtggctgcgtgatgac

SEQ ID NO: 5761964 - DNA, 25 bp, Homo sapien
actcttgggtgggatgtggtaattt

SEQ ID NO: 5761965 - DNA, 25 bp, Homo sapien
cactgcaggcctcggctggagtgct

SEQ ID NO: 5761966 - DNA, 25 bp, Homo sapien
atccgtcttcacttcctgttggcct

SEQ ID NO: 5761967 - DNA, 25 bp, Homo sapien
ggatcctgggactcgcgttctctcg

SEQ ID NO: 5761968 - DNA, 25 bp, Homo sapien
tgggtttcttccctcctgccatggg

SEQ ID NO: 5761969 - DNA, 25 bp, Homo sapien
cacttcatcctgtccacttcctggt

SEQ ID NO: 5761970 - DNA, 25 bp, Homo sapien
actgtagtgagggatggaactcttg

SEQ ID NO: 5761971 - DNA, 25 bp, Homo sapien
cggatgttgcccttgagttcctgca

SEQ ID NO: 5761972 - DNA, 25 bp, Homo sapien
gtaccttggctaaatgcccctccag

SEQ ID NO: 5761973 - DNA, 25 bp, Homo sapien
tcttgcaccaagccctcctgcgtgc

SEQ ID NO: 5761974 - DNA, 25 bp, Homo sapien
acctgttttttctgaagctcttgca

SEQ ID NO: 5761975 - DNA, 25 bp, Homo sapien
ttgtgcagtcgccggcgctccattt

SEQ ID NO: 5761976 - DNA, 25 bp, Homo sapien
tcttcagctcctgttggccctgctc

SEQ ID NO: 5761977 - DNA, 25 bp, Homo sapien
caaacatgagcatcttagcactacc

SEQ ID NO: 5761978 - DNA, 25 bp, Homo sapien
tctcctctagttgggacatcagtcc

SEQ ID NO: 5761979 - DNA, 25 bp, Homo sapien
ctcacaggagacagggacatatcga

SEQ ID NO: 5761980 - DNA, 25 bp, Homo sapien
tggagtgggctcccccggcaggaca

SEQ ID NO: 5761981 - DNA, 25 bp, Homo sapien
atgccacctctgcttggctgcttga

SEQ ID NO: 5761982 - DNA, 25 bp, Homo sapien
tgtggcactgtagtgagggatggaa

SEQ ID NO: 5761983 - DNA, 25 bp, Homo sapien
cagtaaggctgcctgggccacagtc

SEQ ID NO: 5761984 - DNA, 25 bp, Homo sapien
aggctccaggccatcttccatctgg

SEQ ID NO: 5761985 - DNA, 25 bp, Homo sapien
aaccctgtggcaatagctgtggaac

SEQ ID NO: 5761986 - DNA, 25 bp, Homo sapien
accaagccctcctgcgtgctcagcc

SEQ ID NO: 5761987 - DNA, 25 bp, Homo sapien
cctgggacatggtgccctccaccca

SEQ ID NO: 5761988 - DNA, 25 bp, Homo sapien
atgaagacgttcttcccgctcagtc

SEQ ID NO: 5761989 - DNA, 25 bp, Homo sapien
tgactggacaagcatggcaatctct

SEQ ID NO: 5761990 - DNA, 25 bp, Homo sapien
ttcaaacacttcatcctgtccactt

SEQ ID NO: 5761991 - DNA, 25 bp, Homo sapien
ccataggcaaagatgcatactggat

SEQ ID NO: 5761992 - DNA, 25 bp, Homo sapien
gtcagaccgggagaggctaaggcgg

SEQ ID NO: 5761993 - DNA, 25 bp, Homo sapien
tggctgcgtgatgaccgttcattct

SEQ ID NO: 5761994 - DNA, 25 bp, Homo sapien
actggacaagcatggcaatctcttc

SEQ ID NO: 5761995 - DNA, 25 bp, Homo sapien
aacacctgatgtgccagacttctgg

SEQ ID NO: 5761996 - DNA, 25 bp, Homo sapien
cttgctacaaagctgtaggtccagc

SEQ ID NO: 5761997 - DNA, 25 bp, Homo sapien
agacgttcttcccgctcagtcagta

SEQ ID NO: 5761998 - DNA, 25 bp, Homo sapien
aacacttcatcctgtccacttcctg

SEQ ID NO: 5761999 - DNA, 25 bp, Homo sapien
ctcctgccatgggaggaacacctga

SEQ ID NO: 5762000 - DNA, 25 bp, Homo sapien
gagggatggaactcttgggtgggat

SEQ ID NO: 5762001 - DNA, 25 bp, Homo sapien
gtcctctcacggcaccgttttagtt

SEQ ID NO: 5762002 - DNA, 25 bp, Homo sapien
gctggtgccccactcagggtcccac

SEQ ID NO: 5762003 - DNA, 25 bp, Homo sapien
tcaaaggaaaaatcatggcgaggtg

SEQ ID NO: 5762004 - DNA, 25 bp, Homo sapien
tgagcatcttagcactaccacccag

SEQ ID NO: 5762005 - DNA, 25 bp, Homo sapien
tgctcagggccatgataaccagccc

SEQ ID NO: 5762006 - DNA, 25 bp, Homo sapien
tcttgggtgggatgtggtaattttg

SEQ ID NO: 5762007 - DNA, 25 bp, Homo sapien
aaggggccttaatcagaggtctctt

SEQ ID NO: 5762008 - DNA, 25 bp, Homo sapien
acccgatacatagacatagggacac

SEQ ID NO: 5762009 - DNA, 25 bp, Homo sapien
cggacagtctcattgtagatctcta

SEQ ID NO: 5762010 - DNA, 25 bp, Homo sapien
gctggagtgctccccagaaatctgt

SEQ ID NO: 5762011 - DNA, 25 bp, Homo sapien
cagcaggtaggtcagtttgctgttc

SEQ ID NO: 5762012 - DNA, 25 bp, Homo sapien
ccatgggaggaacacctgatgtgcc

SEQ ID NO: 5762013 - DNA, 25 bp, Homo sapien
tcttggaaactttttgagctgtggt

SEQ ID NO: 5762014 - DNA, 25 bp, Homo sapien
atgcatactggatagccatccaggg

SEQ ID NO: 5762015 - DNA, 25 bp, Homo sapien
acataactgaccctttaagtcccag

SEQ ID NO: 5762016 - DNA, 25 bp, Homo sapien
acttctttctcacaggagacaggga

SEQ ID NO: 5762017 - DNA, 25 bp, Homo sapien
tccatctggtcaggcctcctcttga

SEQ ID NO: 5762018 - DNA, 25 bp, Homo sapien
tggtcaggcctcctcttgagtctgc

SEQ ID NO: 5762019 - DNA, 25 bp, Homo sapien
ctccacccaataaagcaccctccag

SEQ ID NO: 5762020 - DNA, 25 bp, Homo sapien
ccgcagagatgccacctctgcttgg

SEQ ID NO: 5762021 - DNA, 25 bp, Homo sapien
aggaggaggccagggggtggagtgg

SEQ ID NO: 5762022 - DNA, 25 bp, Homo sapien
aggccagggggtggagtgggctccc

SEQ ID NO: 5762023 - DNA, 25 bp, Homo sapien
tgttggcctgagcagtaccaataac

SEQ ID NO: 5762024 - DNA, 25 bp, Homo sapien
gttctgcatttaggtcacataactg

SEQ ID NO: 5762025 - DNA, 25 bp, Homo sapien
gcagctggttgtgcagtcgccggcg

SEQ ID NO: 5762026 - DNA, 25 bp, Homo sapien
tgcagcaggtaggtcagtttgctgt

SEQ ID NO: 5762027 - DNA, 25 bp, Homo sapien
ccttgagttcctgcagctggttgtg

SEQ ID NO: 5762028 - DNA, 25 bp, Homo sapien
ggtccacaagactgaggggggcccc

SEQ ID NO: 5762029 - DNA, 25 bp, Homo sapien
cccctcacccgatacatagacatag

SEQ ID NO: 5762030 - DNA, 25 bp, Homo sapien
tggtaattttggtcgttgcacccag

SEQ ID NO: 5762031 - DNA, 25 bp, Homo sapien
ctcctctccttctcctctagttggg

SEQ ID NO: 5762032 - DNA, 25 bp, Homo sapien
tcttgccactgcctgtctggccata

SEQ ID NO: 5762033 - DNA, 25 bp, Homo sapien
ggtcctgaagctgctggttctcttg

SEQ ID NO: 5762034 - DNA, 25 bp, Homo sapien
gcatactggatagccatccagggct

SEQ ID NO: 5762035 - DNA, 25 bp, Homo sapien
ccctgaccactcagctcctgagcca

SEQ ID NO: 5762036 - DNA, 25 bp, Homo sapien
tcggagacgttctcttccagtggag

SEQ ID NO: 5762037 - DNA, 25 bp, Homo sapien
aaaggaaaaatcatggcgaggtggg

SEQ ID NO: 5762038 - DNA, 25 bp, Homo sapien
cacggatgttgcccttgagttcctg

SEQ ID NO: 5762039 - DNA, 25 bp, Homo sapien
gaagacgttcttcccgctcagtcag

SEQ ID NO: 5762040 - DNA, 25 bp, Homo sapien
tgaggggggccccacactgcaggcc

SEQ ID NO: 5762041 - DNA, 25 bp, Homo sapien
tcttgtccgtttcttctcaggctcc

SEQ ID NO: 5762042 - DNA, 25 bp, Homo sapien
gccatccagggctgactggacaagc

SEQ ID NO: 5762043 - DNA, 25 bp, Homo sapien
caaacacttcatcctgtccacttcc

SEQ ID NO: 5762044 - DNA, 25 bp, Homo sapien
cctgtccacttcctggtgggaatac

SEQ ID NO: 5762045 - DNA, 25 bp, Homo sapien
gtctcctgccgcagagatgccacct

SEQ ID NO: 5762046 - DNA, 25 bp, Homo sapien
gaaatctgtagctggaatacactgt

SEQ ID NO: 5762047 - DNA, 25 bp, Homo sapien
tccggccgctaccagccccgcgcca

SEQ ID NO: 5762048 - DNA, 25 bp, Homo sapien
actattctttatttgatagccctgg

SEQ ID NO: 5762049 - DNA, 25 bp, Homo sapien
cagggctgactggacaagcatggca

SEQ ID NO: 5762050 - DNA, 25 bp, Homo sapien
cagtgttgtgcgctctgtccccagg

SEQ ID NO: 5762051 - DNA, 25 bp, Homo sapien
cagctgggaaggggccttaatcaga

SEQ ID NO: 5762052 - DNA, 25 bp, Homo sapien
ttcctgttggcctgagcagtaccaa

SEQ ID NO: 5762053 - DNA, 25 bp, Homo sapien
ctgcttctgatgtctgcagcctcct

SEQ ID NO: 5762054 - DNA, 25 bp, Homo sapien
gacgtttgctgggtttcttccctcc

SEQ ID NO: 5762055 - DNA, 25 bp, Homo sapien
ggacacaagcacgcaagttcttcag

SEQ ID NO: 5762056 - DNA, 25 bp, Homo sapien
acaaagctgtaggtccagccctgac

SEQ ID NO: 5762057 - DNA, 25 bp, Homo sapien
ccttggaggcaaagcgtagagagtt

SEQ ID NO: 5762058 - DNA, 25 bp, Homo sapien
tgcccctccagtgttgtgcgctctg

SEQ ID NO: 5762059 - DNA, 25 bp, Homo sapien
tctgcagcctcctctccttctcctc

SEQ ID NO: 5762060 - DNA, 25 bp, Homo sapien
gggttggaggatcagagggcccacc

SEQ ID NO: 5762061 - DNA, 25 bp, Homo sapien
gccactgcctgtctggccataggca

SEQ ID NO: 5762062 - DNA, 25 bp, Homo sapien
ataggggggacctctgcggatccat

SEQ ID NO: 5762063 - DNA, 25 bp, Homo sapien
gaccgggagaggctaaggcgggttg

SEQ ID NO: 5762064 - DNA, 25 bp, Homo sapien
aacagcaggaactggcttctggttc

SEQ ID NO: 5762065 - DNA, 25 bp, Homo sapien
ccggtcaaaggaaaaatcatggcga

SEQ ID NO: 5762066 - DNA, 25 bp, Homo sapien
aactgaccctttaagtcccaggctg

SEQ ID NO: 5762067 - DNA, 25 bp, Homo sapien
cttcctggtgggaatacccggtcaa

SEQ ID NO: 5762068 - DNA, 25 bp, Homo sapien
ggacagggcggacccggcagaatac

SEQ ID NO: 5762069 - DNA, 25 bp, Homo sapien
cacggctccggccgctaccagcccc

SEQ ID NO: 5762070 - DNA, 25 bp, Homo sapien
ctcctgagccacagagaagaggtgc

SEQ ID NO: 5762071 - DNA, 25 bp, Homo sapien
cttcttggaaactttttgagctgtg

SEQ ID NO: 5762072 - DNA, 25 bp, Homo sapien
aagtcgctcactcccggccaggtcc

SEQ ID NO: 5762073 - DNA, 25 bp, Homo sapien
acacacacacacacagatctggatc

SEQ ID NO: 5762074 - DNA, 25 bp, Homo sapien
tgagctgtggtctggccttgtgtct

SEQ ID NO: 5762075 - DNA, 25 bp, Homo sapien
gctgggcatctctgagctggtcctg

SEQ ID NO: 5762076 - DNA, 25 bp, Homo sapien
aaccagccccagcgtggacaggctg

SEQ ID NO: 5762077 - DNA, 25 bp, Homo sapien
atcagagggcccaccagggccagag

SEQ ID NO: 5762078 - DNA, 25 bp, Homo sapien
ccccagggccttgacctgctgctgg

SEQ ID NO: 5762079 - DNA, 25 bp, Homo sapien
aagcacgcaagttcttcagctcctg

SEQ ID NO: 5762080 - DNA, 25 bp, Homo sapien
actggatagccatccagggctgact

SEQ ID NO: 5762081 - DNA, 25 bp, Homo sapien
ggcctcctcttgagtctgcttcctg

SEQ ID NO: 5762082 - DNA, 25 bp, Homo sapien
tggagaaatgttcacaaacatgagc

SEQ ID NO: 5762083 - DNA, 25 bp, Homo sapien
cctgatgtgccagacttctggacag

SEQ ID NO: 5762084 - DNA, 25 bp, Homo sapien
cctctgcttggctgcttgacagggc

SEQ ID NO: 5762085 - DNA, 25 bp, Homo sapien
tagtgagggatggaactcttgggtg

SEQ ID NO: 5762086 - DNA, 25 bp, Homo sapien
cctcacccgatacatagacataggg

SEQ ID NO: 5762087 - DNA, 25 bp, Homo sapien
ttatttgatagccctgggacatggt

SEQ ID NO: 5762088 - DNA, 25 bp, Homo sapien
tgcgtgatgaccgttcattctgggc

SEQ ID NO: 5762089 - DNA, 25 bp, Homo sapien
gccttgtgtctgtggcactgtagtg

SEQ ID NO: 5762090 - DNA, 25 bp, Homo sapien
ggtctggccttgtgtctgtggcact

SEQ ID NO: 5762091 - DNA, 25 bp, Homo sapien
caggctgctgttaatggcctgtgtt

SEQ ID NO: 5762092 - DNA, 25 bp, Homo sapien
tgataaccagccccagcgtggacag

SEQ ID NO: 5762093 - DNA, 25 bp, Homo sapien
tgggactcgcgttctctcgcccgct

SEQ ID NO: 5762094 - DNA, 25 bp, Homo sapien
tggtgggaatacccggtcaaaggaa

SEQ ID NO: 5762095 - DNA, 25 bp, Homo sapien
cccggacagtctcattgtagatctc

SEQ ID NO: 5762096 - DNA, 25 bp, Homo sapien
cgctcagtcagtaaggctgcctggg

SEQ ID NO: 5762097 - DNA, 25 bp, Homo sapien
accacccagagagttctgcagcagg

SEQ ID NO: 5762098 - DNA, 25 bp, Homo sapien
tgctcagcctgggcctgtaccttgg

SEQ ID NO: 5762099 - DNA, 25 bp, Homo sapien
ctgcctgggccacagtctcctgccg

SEQ ID NO: 5762100 - DNA, 25 bp, Homo sapien
ctttctcacaggagacagggacata

SEQ ID NO: 5762101 - DNA, 25 bp, Homo sapien
caggacagggcggacccggcagaat

SEQ ID NO: 5762102 - DNA, 25 bp, Homo sapien
actgaggggggccccacactgcagg

SEQ ID NO: 5762103 - DNA, 25 bp, Homo sapien
ctcctgccgcagagatgccacctct

SEQ ID NO: 5762104 - DNA, 25 bp, Homo sapien
gagagttctgcagcaggtaggtcag

SEQ ID NO: 5762105 - DNA, 25 bp, Homo sapien
tcccccggcaggacagggcggaccc

SEQ ID NO: 5762106 - DNA, 25 bp, Homo sapien
cagggtagagaactcgcacggctcc

SEQ ID NO: 5762107 - DNA, 25 bp, Homo sapien
gccaggtccacaagactgagggggg

SEQ ID NO: 5762108 - DNA, 25 bp, Homo sapien
atgtgccagacttctggacaggaac

SEQ ID NO: 5762109 - DNA, 25 bp, Homo sapien
agggacatatcgagcattggtgaca

SEQ ID NO: 5762110 - DNA, 25 bp, Homo sapien
tgttaatggcctgtgtttcccgaag

SEQ ID NO: 5762111 - DNA, 25 bp, Homo sapien
tgcatttaggtcacataactgaccc

SEQ ID NO: 5762112 - DNA, 25 bp, Homo sapien
acacacacacacacacacagatctg

SEQ ID NO: 5762113 - DNA, 25 bp, Homo sapien
cacaggagacagggacatatcgagc

SEQ ID NO: 5762114 - DNA, 25 bp, Homo sapien
tcctcttgagtctgcttcctgagag

SEQ ID NO: 5762115 - DNA, 25 bp, Homo sapien
acagtgagctcctcactccctggcc

SEQ ID NO: 5762116 - DNA, 25 bp, Homo sapien
tgacagtgagctcctcactccctgg

SEQ ID NO: 5762117 - DNA, 25 bp, Homo sapien
agcattggtgacagtgagctcctca

SEQ ID NO: 5762118 - DNA, 25 bp, Homo sapien
cttctcctctagttgggacatcagt

SEQ ID NO: 5762119 - DNA, 25 bp, Homo sapien
ttccacctgttttttctgaagctct

SEQ ID NO: 5762120 - DNA, 25 bp, Homo sapien
gtcccacgccgctcgtcagaccggg

SEQ ID NO: 5762121 - DNA, 25 bp, Homo sapien
agccacagagaagaggtgccgcagg

SEQ ID NO: 5762122 - DNA, 25 bp, Homo sapien
actcggagacgttctcttccagtgg

SEQ ID NO: 5762123 - DNA, 25 bp, Homo sapien
ggacatatcgagcattggtgacagt

SEQ ID NO: 5762124 - DNA, 25 bp, Homo sapien
ggccatcttccatctggtcaggcct

SEQ ID NO: 5762125 - DNA, 25 bp, Homo sapien
cagcctgggcctgtaccttggctaa

SEQ ID NO: 5762126 - DNA, 25 bp, Homo sapien
cctcctcttgagtctgcttcctgag

SEQ ID NO: 5762127 - DNA, 25 bp, Homo sapien
tcagctcctgagccacagagaagag

SEQ ID NO: 5762128 - DNA, 25 bp, Homo sapien
aggcacgtgggactccttgttgctc

SEQ ID NO: 5762129 - DNA, 25 bp, Homo sapien
cccggccaggtccacaagactgagg

SEQ ID NO: 5762130 - DNA, 25 bp, Homo sapien
ctgttttttctgaagctcttgcacc

SEQ ID NO: 5762131 - DNA, 25 bp, Homo sapien
caataacacactggttcaccttgga

SEQ ID NO: 5762132 - DNA, 25 bp, Homo sapien
gtggcaatagctgtggaacaccggg

SEQ ID NO: 5762133 - DNA, 25 bp, Homo sapien
tccacctcggtcccacacgcgccgg

SEQ ID NO: 5762134 - DNA, 25 bp, Homo sapien
ctgtaccttggctaaatgcccctcc

SEQ ID NO: 5762135 - DNA, 25 bp, Homo sapien
ccgattctggcgggccagatgaagc

SEQ ID NO: 5762136 - DNA, 25 bp, Homo sapien
cttccaataggggggacctctgcgg

SEQ ID NO: 5762137 - DNA, 25 bp, Homo sapien
cacttcctggtgggaatacccggtc

SEQ ID NO: 5762138 - DNA, 25 bp, Homo sapien
cagcccctccaactgggggtctccc

SEQ ID NO: 5762139 - DNA, 25 bp, Homo sapien
ccctccattgtgaaggtcttgccac

SEQ ID NO: 5762140 - DNA, 25 bp, Homo sapien
tcgcgttctctcgcccgctcgcgaa

SEQ ID NO: 5762141 - DNA, 25 bp, Homo sapien
ccacccaataaagcaccctccagca

SEQ ID NO: 5762142 - DNA, 25 bp, Homo sapien
ataggcaaagatgcatactggatag

SEQ ID NO: 5762143 - DNA, 25 bp, Homo sapien
tccaggacacaagcacgcaagttct

SEQ ID NO: 5762144 - DNA, 25 bp, Homo sapien
agtcccaggctggacgtttgctggg

SEQ ID NO: 5762145 - DNA, 25 bp, Homo sapien
ggatcagcccctccaactgggggtc

SEQ ID NO: 5762146 - DNA, 25 bp, Homo sapien
ttgcaccaagccctcctgcgtgctc

SEQ ID NO: 5762147 - DNA, 25 bp, Homo sapien
gacaagcatggcaatctcttcaaac

SEQ ID NO: 5762148 - DNA, 25 bp, Homo sapien
aaaatcatggcgaggtgggggagct

SEQ ID NO: 5762149 - DNA, 25 bp, Homo sapien
gccctgggacatggtgccctccacc

SEQ ID NO: 5762150 - DNA, 25 bp, Homo sapien
ttggtccaacgtttgagtcctctca

SEQ ID NO: 5762151 - DNA, 25 bp, Homo sapien
gacaggctgctgttaatggcctgtg

SEQ ID NO: 5762152 - DNA, 25 bp, Homo sapien
cctgagcagtaccaataacacactg

SEQ ID NO: 5762153 - DNA, 25 bp, Homo sapien
ttgtccgtttcttctcaggctccag

SEQ ID NO: 5762154 - DNA, 25 bp, Homo sapien
atttgatagccctgggacatggtgc

SEQ ID NO: 5762155 - DNA, 25 bp, Homo sapien
agtggccagcaggtcccggacagtc

SEQ ID NO: 5762156 - DNA, 25 bp, Homo sapien
ggcgggccagatgaagcagggcgtc

SEQ ID NO: 5762157 - DNA, 25 bp, Homo sapien
agaactcgcacggctccggccgcta

SEQ ID NO: 5762158 - DNA, 25 bp, Homo sapien
gaccgttcattctgggctgtgcggg

SEQ ID NO: 5762159 - DNA, 25 bp, Homo sapien
aaggtcttgccactgcctgtctggc

SEQ ID NO: 5762160 - DNA, 25 bp, Homo sapien
cagtctcctgccgcagagatgccac

SEQ ID NO: 5762161 - DNA, 25 bp, Homo sapien
tgggtgccggggatcctgggactcg

SEQ ID NO: 5762162 - DNA, 25 bp, Homo sapien
tccccagaaatctgtagctggaata

SEQ ID NO: 5762163 - DNA, 25 bp, Homo sapien
ggtgacagtgagctcctcactccct

SEQ ID NO: 5762164 - DNA, 25 bp, Homo sapien
acaggaggaggccagggggtggagt

SEQ ID NO: 5762165 - DNA, 25 bp, Homo sapien
gctgggaaggggccttaatcagagg

SEQ ID NO: 5762166 - DNA, 25 bp, Homo sapien
tgcacccaggcctcttgtccgtttc

SEQ ID NO: 5762167 - DNA, 25 bp, Homo sapien
atcctgggactcgcgttctctcgcc

SEQ ID NO: 5762168 - DNA, 25 bp, Homo sapien
tgagcagtaccaataacacactggt

SEQ ID NO: 5762169 - DNA, 25 bp, Homo sapien
acactgtggctgcgtgatgaccgtt

SEQ ID NO: 5762170 - DNA, 25 bp, Homo sapien
gaggtgccgcagggcccgagggatc

SEQ ID NO: 5762171 - DNA, 25 bp, Homo sapien
ccctcctgccatgggaggaacacct

SEQ ID NO: 5762172 - DNA, 25 bp, Homo sapien
cttgagtctgcttcctgagagaggc

SEQ ID NO: 5762173 - DNA, 25 bp, Homo sapien
gctggaatacactgtggctgcgtga

SEQ ID NO: 5762174 - DNA, 25 bp, Homo sapien
aatgcccctccagtgttgtgcgctc

SEQ ID NO: 5762175 - DNA, 25 bp, Homo sapien
ggaacaccggggtcctgtcttcttg

SEQ ID NO: 5762176 - DNA, 25 bp, Homo sapien
gcgggccacagcccgattctggcgg

SEQ ID NO: 5762177 - DNA, 25 bp, Homo sapien
tggatagccatccagggctgactgg

SEQ ID NO: 5762178 - DNA, 25 bp, Homo sapien
caatagctgtggaacaccggggtcc

SEQ ID NO: 5762179 - DNA, 25 bp, Homo sapien
agatgaagcagggcgtccacttctt

SEQ ID NO: 5762180 - DNA, 25 bp, Homo sapien
ccccagcgtggacaggctgctgtta

SEQ ID NO: 5762181 - DNA, 25 bp, Homo sapien
ggactcggagacgttctcttccagt

SEQ ID NO: 5762182 - DNA, 25 bp, Homo sapien
ggccttaatcagaggtctcttcagt

SEQ ID NO: 5762183 - DNA, 25 bp, Homo sapien
ggttcaccttggaggcaaagcgtag

SEQ ID NO: 5762184 - DNA, 25 bp, Homo sapien
ccgagggctaagccggggtcaagtc

SEQ ID NO: 5762185 - DNA, 25 bp, Homo sapien
cacccagagagttctgcagcaggta

SEQ ID NO: 5762186 - DNA, 25 bp, Homo sapien
gctcttgcaccaagccctcctgcgt

SEQ ID NO: 5762187 - DNA, 25 bp, Homo sapien
cagggccatgataaccagccccagc

SEQ ID NO: 5762188 - DNA, 25 bp, Homo sapien
ctggttcaccttggaggcaaagcgt

SEQ ID NO: 5762189 - DNA, 25 bp, Homo sapien
gggatggaactcttgggtgggatgt

SEQ ID NO: 5762190 - DNA, 25 bp, Homo sapien
gacccggcagaatacacggatgttg

SEQ ID NO: 5762191 - DNA, 25 bp, Homo sapien
cctgggactcgcgttctctcgcccg

SEQ ID NO: 5762192 - DNA, 25 bp, Homo sapien
ctcagtcagtaaggctgcctgggcc

SEQ ID NO: 5762193 - DNA, 25 bp, Homo sapien
ctgtgcgggccacagcccgattctg

SEQ ID NO: 5762194 - DNA, 25 bp, Homo sapien
gtgggggagctggtgccccactcag

SEQ ID NO: 5762195 - DNA, 25 bp, Homo sapien
gttcttcccgctcagtcagtaaggc

SEQ ID NO: 5762196 - DNA, 25 bp, Homo sapien
tgaagctcttgcaccaagccctcct

SEQ ID NO: 5762197 - DNA, 25 bp, Homo sapien
cccttccgggttccagtggccagca

SEQ ID NO: 5762198 - DNA, 25 bp, Homo sapien
agggactcggagacgttctcttcca

SEQ ID NO: 5762199 - DNA, 25 bp, Homo sapien
tgggctgtgcgggccacagcccgat

SEQ ID NO: 5762200 - DNA, 25 bp, Homo sapien
aagctcttgcaccaagccctcctgc

SEQ ID NO: 5762201 - DNA, 25 bp, Homo sapien
cagagagttctgcagcaggtaggtc

SEQ ID NO: 5762202 - DNA, 25 bp, Homo sapien
ggccataggcaaagatgcatactgg

SEQ ID NO: 5762203 - DNA, 25 bp, Homo sapien
gcctgtctggccataggcaaagatg

SEQ ID NO: 5762204 - DNA, 25 bp, Homo sapien
gctggacgtttgctgggtttcttcc

SEQ ID NO: 5762205 - DNA, 25 bp, Homo sapien
tcttccagtggagaaatgttcacaa

SEQ ID NO: 5762206 - DNA, 25 bp, Homo sapien
ataaccagccccagcgtggacaggc

SEQ ID NO: 5762207 - DNA, 25 bp, Homo sapien
ttcacaaacatgagcatcttagcac

SEQ ID NO: 5762208 - DNA, 25 bp, Homo sapien
aggtaggtcagtttgctgttccggt

SEQ ID NO: 5762209 - DNA, 25 bp, Homo sapien
tcctggtgggaatacccggtcaaag

SEQ ID NO: 5762210 - DNA, 25 bp, Homo sapien
tggccagcaggtcccggacagtctc

SEQ ID NO: 5762211 - DNA, 25 bp, Homo sapien
gtaaggctgcctgggccacagtctc

SEQ ID NO: 5762212 - DNA, 25 bp, Homo sapien
cagggcgtccacttctttctcacag

SEQ ID NO: 5762213 - DNA, 25 bp, Homo sapien
cctgagccacagagaagaggtgccg

SEQ ID NO: 5762214 - DNA, 25 bp, Homo sapien
cggacccggcagaatacacggatgt

SEQ ID NO: 5762215 - DNA, 25 bp, Homo sapien
gagggcccaccagggccagagggaa

SEQ ID NO: 5762216 - DNA, 25 bp, Homo sapien
ctcttgagtctgcttcctgagagag

SEQ ID NO: 5762217 - DNA, 25 bp, Homo sapien
ttggaggcaaagcgtagagagttga

SEQ ID NO: 5762218 - DNA, 25 bp, Homo sapien
tccgttcttcctgcaattccacctg

SEQ ID NO: 5762219 - DNA, 25 bp, Homo sapien
tagctggaatacactgtggctgcgt

SEQ ID NO: 5762220 - DNA, 25 bp, Homo sapien
gtagcttgctacaaagctgtaggtc

SEQ ID NO: 5762221 - DNA, 25 bp, Homo sapien
gaatacccggtcaaaggaaaaatca

SEQ ID NO: 5762222 - DNA, 25 bp, Homo sapien
cacctcggtcccacacgcgccgggg

SEQ ID NO: 5762223 - DNA, 25 bp, Homo sapien
ggaggcaaagcgtagagagttgagg

SEQ ID NO: 5762224 - DNA, 25 bp, Homo sapien
cacgccgctcgtcagaccgggagag

SEQ ID NO: 5762225 - DNA, 25 bp, Homo sapien
ccagggccttgacctgctgctgggc

SEQ ID NO: 5762226 - DNA, 25 bp, Homo sapien
agccctgaccactcagctcctgagc

SEQ ID NO: 5762227 - DNA, 25 bp, Homo sapien
ctcagcctgggcctgtaccttggct

SEQ ID NO: 5762228 - DNA, 25 bp, Homo sapien
gccatgataaccagccccagcgtgg

SEQ ID NO: 5762229 - DNA, 25 bp, Homo sapien
actccctggccctgcacggcgaatc

SEQ ID NO: 5762230 - DNA, 25 bp, Homo sapien
ttccctcctgccatgggaggaacac

SEQ ID NO: 5762231 - DNA, 25 bp, Homo sapien
acacacacacagatctggatccgtc

SEQ ID NO: 5762232 - DNA, 25 bp, Homo sapien
ttcttctcaggctccaggccatctt

SEQ ID NO: 5762233 - DNA, 25 bp, Homo sapien
ggggccgagggctaagccggggtca

SEQ ID NO: 5762234 - DNA, 25 bp, Homo sapien
ctggccataggcaaagatgcatact

SEQ ID NO: 5762235 - DNA, 25 bp, Homo sapien
tgacagggctgcttctgatgtctgc

SEQ ID NO: 5762236 - DNA, 25 bp, Homo sapien
ttgagtcctctcacggcaccgtttt

SEQ ID NO: 5762237 - DNA, 25 bp, Homo sapien
aggaactggcttctggttcttcaac

SEQ ID NO: 5762238 - DNA, 25 bp, Homo sapien
tccacttcctggtgggaatacccgg

SEQ ID NO: 5762239 - DNA, 25 bp, Homo sapien
gggacctctgcggatccatgtccac

SEQ ID NO: 5762240 - DNA, 25 bp, Homo sapien
cagaaatctgtagctggaatacact

SEQ ID NO: 5762241 - DNA, 25 bp, Homo sapien
gtctggccataggcaaagatgcata

SEQ ID NO: 5762242 - DNA, 25 bp, Homo sapien
gcaggaactggcttctggttcttca

SEQ ID NO: 5762243 - DNA, 25 bp, Homo sapien
ctctgtccccagggccttgacctgc

SEQ ID NO: 5762244 - DNA, 25 bp, Homo sapien
gtttgctgggtttcttccctcctgc

SEQ ID NO: 5762245 - DNA, 25 bp, Homo sapien
gagggaaacaggaggaggccagggg

SEQ ID NO: 5762246 - DNA, 25 bp, Homo sapien
gtagatctctacgtagcttgctaca

SEQ ID NO: 5762247 - DNA, 25 bp, Homo sapien
tcttcaaacacttcatcctgtccac

SEQ ID NO: 5762248 - DNA, 25 bp, Homo sapien
tcacggcaccgttttagttctgcat

SEQ ID NO: 5762249 - DNA, 25 bp, Homo sapien
ctgggcctgtaccttggctaaatgc

SEQ ID NO: 5762250 - DNA, 25 bp, Homo sapien
tgtccacctcggtcccacacgcgcc

SEQ ID NO: 5762251 - DNA, 25 bp, Homo sapien
cttggctaaatgcccctccagtgtt

SEQ ID NO: 5762252 - DNA, 25 bp, Homo sapien
caataggggggacctctgcggatcc

SEQ ID NO: 5762253 - DNA, 25 bp, Homo sapien
ccacagagaagaggtgccgcagggc

SEQ ID NO: 5762254 - DNA, 25 bp, Homo sapien
gcgaagcagggtagagaactcgcac

SEQ ID NO: 5762255 - DNA, 25 bp, Homo sapien
ttagcactaccacccagagagttct

SEQ ID NO: 5762256 - DNA, 25 bp, Homo sapien
ggcggacccggcagaatacacggat

SEQ ID NO: 5762257 - DNA, 25 bp, Homo sapien
tgcagtggaagagaactgggtgccg

SEQ ID NO: 5762258 - DNA, 25 bp, Homo sapien
tgagggactcggagacgttctcttc

SEQ ID NO: 5762259 - DNA, 25 bp, Homo sapien
agggctgcttctgatgtctgcagcc

SEQ ID NO: 5762260 - DNA, 25 bp, Homo sapien
tgccgcagggcccgagggatcagcc

SEQ ID NO: 5762261 - DNA, 25 bp, Homo sapien
gagttctgcagcaggtaggtcagtt

SEQ ID NO: 5762262 - DNA, 25 bp, Homo sapien
cccacactgcaggcctcggctggag

SEQ ID NO: 5762263 - DNA, 25 bp, Homo sapien
ttctttctcacaggagacagggaca

SEQ ID NO: 5762264 - DNA, 25 bp, Homo sapien
gggactccttgttgctcagggccat

SEQ ID NO: 5762265 - DNA, 25 bp, Homo sapien
cttctggacaggaacagcaggaact

SEQ ID NO: 5762266 - DNA, 25 bp, Homo sapien
cccactcagggtcccacgccgctcg

SEQ ID NO: 5762267 - DNA, 25 bp, Homo sapien
tacacggatgttgcccttgagttcc

SEQ ID NO: 5762268 - DNA, 25 bp, Homo sapien
agaggtctcttcagttctatgttcc

SEQ ID NO: 5762269 - DNA, 25 bp, Homo sapien
aatcagaggtctcttcagttctatg

SEQ ID NO: 5762270 - DNA, 25 bp, Homo sapien
ctggttcttcaaccctgtggcaata

SEQ ID NO: 5762271 - DNA, 25 bp, Homo sapien
gggccacagcccgattctggcgggc

SEQ ID NO: 5762272 - DNA, 25 bp, Homo sapien
gcaatctcttcaaacacttcatcct

SEQ ID NO: 5762273 - DNA, 25 bp, Homo sapien
catcttagcactaccacccagagag

SEQ ID NO: 5762274 - DNA, 25 bp, Homo sapien
tcgcgaagcagggtagagaactcgc

SEQ ID NO: 5762275 - DNA, 25 bp, Homo sapien
atatcgagcattggtgacagtgagc

SEQ ID NO: 5762276 - DNA, 25 bp, Homo sapien
tggacaggaacagcaggaactggct

SEQ ID NO: 5762277 - DNA, 25 bp, Homo sapien
gggcccaccagggccagagggaaac

SEQ ID NO: 5762278 - DNA, 25 bp, Homo sapien
ccgatacatagacatagggacacac

SEQ ID NO: 5762279 - DNA, 25 bp, Homo sapien
aggggggccccacactgcaggcctc

SEQ ID NO: 5762280 - DNA, 25 bp, Homo sapien
cctctgcggatccatgtccacctcg

SEQ ID NO: 5762281 - DNA, 25 bp, Homo sapien
tggaatacactgtggctgcgtgatg

SEQ ID NO: 5762282 - DNA, 25 bp, Homo sapien
ggtcaaaggaaaaatcatggcgagg

SEQ ID NO: 5762283 - DNA, 25 bp, Homo sapien
agctgtaggtccagccctgaccact

SEQ ID NO: 5762284 - DNA, 25 bp, Homo sapien
ggcaatagctgtggaacaccggggt

SEQ ID NO: 5762285 - DNA, 25 bp, Homo sapien
gggggacctctgcggatccatgtcc

SEQ ID NO: 5762286 - DNA, 25 bp, Homo sapien
tttcttccctcctgccatgggagga

SEQ ID NO: 5762287 - DNA, 25 bp, Homo sapien
ggactcgcgttctctcgcccgctcg

SEQ ID NO: 5762288 - DNA, 25 bp, Homo sapien
tgagctggtcctgaagctgctggtt

SEQ ID NO: 5762289 - DNA, 25 bp, Homo sapien
tgcgtgctcagccgctcttccagct

SEQ ID NO: 5762290 - DNA, 25 bp, Homo sapien
tttctgaagctcttgcaccaagccc

SEQ ID NO: 5762291 - DNA, 25 bp, Homo sapien
tggcactgtagtgagggatggaact

SEQ ID NO: 5762292 - DNA, 25 bp, Homo sapien
gtaccaataacacactggttcacct

SEQ ID NO: 5762293 - DNA, 25 bp, Homo sapien
ccatcttccatctggtcaggcctcc

SEQ ID NO: 5762294 - DNA, 25 bp, Homo sapien
tggcttctggttcttcaaccctgtg

SEQ ID NO: 5762295 - DNA, 25 bp, Homo sapien
gggctgactggacaagcatggcaat

SEQ ID NO: 5762296 - DNA, 25 bp, Homo sapien
ctccattgtgaaggtcttgccactg

SEQ ID NO: 5762297 - DNA, 25 bp, Homo sapien
gtctcattgtagatctctacgtagc

SEQ ID NO: 5762298 - DNA, 25 bp, Homo sapien
acccaataaagcaccctccagcaac

SEQ ID NO: 5762299 - DNA, 25 bp, Homo sapien
caccggggtcctgtcttcttggaaa

SEQ ID NO: 5762300 - DNA, 25 bp, Homo sapien
ttccagtggagaaatgttcacaaac

SEQ ID NO: 5762301 - DNA, 25 bp, Homo sapien
gagaggcagctgggaaggggcctta

SEQ ID NO: 5762302 - DNA, 25 bp, Homo sapien
gtgggctcccccggcaggacagggc

SEQ ID NO: 5762303 - DNA, 25 bp, Homo sapien
tttaggtcacataactgacccttta

SEQ ID NO: 5762304 - DNA, 25 bp, Homo sapien
acacacacacacacacacacagatc

SEQ ID NO: 5762305 - DNA, 25 bp, Homo sapien
tgcttcctgagagaggcagctggga

SEQ ID NO: 5762306 - DNA, 25 bp, Homo sapien
tcactccctggccctgcacggcgaa

SEQ ID NO: 5762307 - DNA, 25 bp, Homo sapien
ataactgaccctttaagtcccaggc

SEQ ID NO: 5762308 - DNA, 25 bp, Homo sapien
tgccatgggaggaacacctgatgtg

SEQ ID NO: 5762309 - DNA, 25 bp, Homo sapien
ggcctgagcagtaccaataacacac

SEQ ID NO: 5762310 - DNA, 25 bp, Homo sapien
ggtcacataactgaccctttaagtc

SEQ ID NO: 5762311 - DNA, 25 bp, Homo sapien
ggggtcaagtcgctcactcccggcc

SEQ ID NO: 5762312 - DNA, 25 bp, Homo sapien
aggcctcggctggagtgctccccag

SEQ ID NO: 5762313 - DNA, 25 bp, Homo sapien
gatgttgcccttgagttcctgcagc

SEQ ID NO: 5762314 - DNA, 25 bp, Homo sapien
gcgttctctcgcccgctcgcgaagc

SEQ ID NO: 5762315 - DNA, 25 bp, Homo sapien
cagcaggaactggcttctggttctt

SEQ ID NO: 5762316 - DNA, 25 bp, Homo sapien
agaagaggtgccgcagggcccgagg

SEQ ID NO: 5762317 - DNA, 25 bp, Homo sapien
gcttctggttcttcaaccctgtggc

SEQ ID NO: 5762318 - DNA, 25 bp, Homo sapien
tgtggctgcgtgatgaccgttcatt

SEQ ID NO: 5762319 - DNA, 25 bp, Homo sapien
cacaaacatgagcatcttagcacta

SEQ ID NO: 5762320 - DNA, 25 bp, Homo sapien
agcactaccacccagagagttctgc

SEQ ID NO: 5762321 - DNA, 25 bp, Homo sapien
caccgttttagttctgcatttaggt

SEQ ID NO: 5762322 - DNA, 25 bp, Homo sapien
aggtcagtttgctgttccggtaagg

SEQ ID NO: 5762323 - DNA, 25 bp, Homo sapien
gacccttccgggttccagtggccag

SEQ ID NO: 5762324 - DNA, 25 bp, Homo sapien
gtttgctgttccggtaaggcacgtg

SEQ ID NO: 5762325 - DNA, 25 bp, Homo sapien
gtgggatgtggtaattttggtcgtt

SEQ ID NO: 5762326 - DNA, 25 bp, Homo sapien
cccctccagtgttgtgcgctctgtc

SEQ ID NO: 5762327 - DNA, 25 bp, Homo sapien
aggggggacctctgcggatccatgt

SEQ ID NO: 5762328 - DNA, 25 bp, Homo sapien
cagtaccaataacacactggttcac

SEQ ID NO: 5762329 - DNA, 25 bp, Homo sapien
agggccttgacctgctgctgggcat

SEQ ID NO: 5762330 - DNA, 25 bp, Homo sapien
ggtcgttgcacccaggcctcttgtc

SEQ ID NO: 5762331 - DNA, 25 bp, Homo sapien
ggcagctgggaaggggccttaatca

SEQ ID NO: 5762332 - DNA, 25 bp, Homo sapien
tccaggccatcttccatctggtcag

SEQ ID NO: 5762333 - DNA, 25 bp, Homo sapien
ggtttcttccctcctgccatgggag

SEQ ID NO: 5762334 - DNA, 25 bp, Homo sapien
ggcatctctgagctggtcctgaagc

SEQ ID NO: 5762335 - DNA, 25 bp, Homo sapien
ttctttatttgatagccctgggaca

SEQ ID NO: 5762336 - DNA, 25 bp, Homo sapien
agctgtggtctggccttgtgtctgt

SEQ ID NO: 5762337 - DNA, 25 bp, Homo sapien
ctgggccacagtctcctgccgcaga

SEQ ID NO: 5762338 - DNA, 25 bp, Homo sapien
gttttttctgaagctcttgcaccaa

SEQ ID NO: 5762339 - DNA, 25 bp, Homo sapien
gttctctcgcccgctcgcgaagcag

SEQ ID NO: 5762340 - DNA, 25 bp, Homo sapien
cagctcctgttggccctgctcagcc

SEQ ID NO: 5762341 - DNA, 25 bp, Homo sapien
tctgaagctcttgcaccaagccctc

SEQ ID NO: 5762342 - DNA, 25 bp, Homo sapien
cagcctcctctccttctcctctagt

SEQ ID NO: 5762343 - DNA, 25 bp, Homo sapien
gcaggcctcggctggagtgctcccc

SEQ ID NO: 5762344 - DNA, 25 bp, Homo sapien
gctcctgttggccctgctcagcctg

SEQ ID NO: 5762345 - DNA, 25 bp, Homo sapien
gcacgtgggactccttgttgctcag

SEQ ID NO: 5762346 - DNA, 25 bp, Homo sapien
tctcttcaaacacttcatcctgtcc

SEQ ID NO: 5762347 - DNA, 25 bp, Homo sapien
gcagtcgccggcgctccatttctag

SEQ ID NO: 5762348 - DNA, 25 bp, Homo sapien
cctcactccctggccctgcacggcg

SEQ ID NO: 5762349 - DNA, 25 bp, Homo sapien
atgaagcagggcgtccacttctttc

SEQ ID NO: 5762350 - DNA, 25 bp, Homo sapien
gagtgggctcccccggcaggacagg

SEQ ID NO: 5762351 - DNA, 25 bp, Homo sapien
gtaattttggtcgttgcacccaggc

SEQ ID NO: 5762352 - DNA, 25 bp, Homo sapien
gtgcagtcgccggcgctccatttct

SEQ ID NO: 5762353 - DNA, 25 bp, Homo sapien
ggtcttgccactgcctgtctggcca

SEQ ID NO: 5762354 - DNA, 25 bp, Homo sapien
cgggttccagtggccagcaggtccc

SEQ ID NO: 5762355 - DNA, 25 bp, Homo sapien
cacactggttcaccttggaggcaaa

SEQ ID NO: 5762356 - DNA, 25 bp, Homo sapien
gatagccctgggacatggtgccctc

SEQ ID NO: 5762357 - DNA, 25 bp, Homo sapien
tccacaagactgaggggggccccac

SEQ ID NO: 5762358 - DNA, 25 bp, Homo sapien
cccaggcctcttgtccgtttcttct

SEQ ID NO: 5762359 - DNA, 25 bp, Homo sapien
gctggttctcttggtccaacgtttg

SEQ ID NO: 5762360 - DNA, 25 bp, Homo sapien
cagccgctcttccagctccaggaca

SEQ ID NO: 5762361 - DNA, 25 bp, Homo sapien
acacacacacacagatctggatccg

SEQ ID NO: 5762362 - DNA, 25 bp, Homo sapien
gtgctccccagaaatctgtagctgg

SEQ ID NO: 5762363 - DNA, 25 bp, Homo sapien
taagccggggtcaagtcgctcactc

SEQ ID NO: 5762364 - DNA, 25 bp, Homo sapien
ttgagttcctgcagctggttgtgca

SEQ ID NO: 5762365 - DNA, 25 bp, Homo sapien
acagggcggacccggcagaatacac

SEQ ID NO: 5762366 - DNA, 25 bp, Homo sapien
agctggtcctgaagctgctggttct

SEQ ID NO: 5762367 - DNA, 25 bp, Homo sapien
ctcgcacggctccggccgctaccag

SEQ ID NO: 5762368 - DNA, 25 bp, Homo sapien
acacgcgccgggggaatgcagtgga

SEQ ID NO: 5762369 - DNA, 25 bp, Homo sapien
gagtcctctcacggcaccgttttag

SEQ ID NO: 5762370 - DNA, 25 bp, Homo sapien
gggggccccacactgcaggcctcgg

SEQ ID NO: 5762371 - DNA, 25 bp, Homo sapien
gttttagttctgcatttaggtcaca

SEQ ID NO: 5762372 - DNA, 25 bp, Homo sapien
ctgaccctttaagtcccaggctgga

SEQ ID NO: 5762373 - DNA, 25 bp, Homo sapien
cctgctgctgggcatctctgagctg

SEQ ID NO: 5762374 - DNA, 25 bp, Homo sapien
ctcccggccaggtccacaagactga

SEQ ID NO: 5762375 - DNA, 25 bp, Homo sapien
ccggcaggacagggcggacccggca

SEQ ID NO: 5762376 - DNA, 25 bp, Homo sapien
gcacgcaagttcttcagctcctgtt

SEQ ID NO: 5762377 - DNA, 25 bp, Homo sapien
tctcttccagtggagaaatgttcac

SEQ ID NO: 5762378 - DNA, 25 bp, Homo sapien
gctcgcgaagcagggtagagaactc

SEQ ID NO: 5762379 - DNA, 25 bp, Homo sapien
aaagatgcatactggatagccatcc

SEQ ID NO: 5762380 - DNA, 25 bp, Homo sapien
tcgcccgctcgcgaagcagggtaga

SEQ ID NO: 5762381 - DNA, 25 bp, Homo sapien
gggggagctggtgccccactcaggg

SEQ ID NO: 5762382 - DNA, 25 bp, Homo sapien
gctaaatgcccctccagtgttgtgc

SEQ ID NO: 5762383 - DNA, 25 bp, Homo sapien
tccctggccctgcacggcgaatctc

SEQ ID NO: 5762384 - DNA, 25 bp, Homo sapien
gatgtggtaattttggtcgttgcac

SEQ ID NO: 5762385 - DNA, 25 bp, Homo sapien
gtccgtttcttctcaggctccaggc

SEQ ID NO: 5762386 - DNA, 25 bp, Homo sapien
gcccgctcgcgaagcagggtagaga

SEQ ID NO: 5762387 - DNA, 25 bp, Homo sapien
ctccttgttgctcagggccatgata

SEQ ID NO: 5762388 - DNA, 25 bp, Homo sapien
cttccgggttccagtggccagcagg

SEQ ID NO: 5762389 - DNA, 25 bp, Homo sapien
ccagccccagcgtggacaggctgct

SEQ ID NO: 5762390 - DNA, 25 bp, Homo sapien
gcccatgaagacgttcttcccgctc

SEQ ID NO: 5762391 - DNA, 25 bp, Homo sapien
gctaagccggggtcaagtcgctcac

SEQ ID NO: 5762392 - DNA, 25 bp, Homo sapien
gggccccacactgcaggcctcggct

SEQ ID NO: 5762393 - DNA, 25 bp, Homo sapien
tcttcccgctcagtcagtaaggctg

SEQ ID NO: 5762394 - DNA, 25 bp, Homo sapien
tggacgtttgctgggtttcttccct

SEQ ID NO: 5762395 - DNA, 25 bp, Homo sapien
acatggtgccctccacccaataaag

SEQ ID NO: 5762396 - DNA, 25 bp, Homo sapien
ggcaccgttttagttctgcatttag

SEQ ID NO: 5762397 - DNA, 25 bp, Homo sapien
tcccacacgcgccgggggaatgcag

SEQ ID NO: 5762398 - DNA, 25 bp, Homo sapien
atggcgaggtgggggagctggtgcc

SEQ ID NO: 5762399 - DNA, 25 bp, Homo sapien
ccacttctttctcacaggagacagg

SEQ ID NO: 5762400 - DNA, 25 bp, Homo sapien
gggccatgataaccagccccagcgt

SEQ ID NO: 5762401 - DNA, 25 bp, Homo sapien
ttcagctcctgttggccctgctcag

SEQ ID NO: 5762402 - DNA, 25 bp, Homo sapien
gctgcgtgatgaccgttcattctgg

SEQ ID NO: 5762403 - DNA, 25 bp, Homo sapien
tctcttggtccaacgtttgagtcct

SEQ ID NO: 5762404 - DNA, 25 bp, Homo sapien
cttccagctccaggacacaagcacg

SEQ ID NO: 5762405 - DNA, 25 bp, Homo sapien
cccaggcccaccctccattgtgaag

SEQ ID NO: 5762406 - DNA, 25 bp, Homo sapien
cgggagaggctaaggcgggttggag

SEQ ID NO: 5762407 - DNA, 25 bp, Homo sapien
cggctccggccgctaccagccccgc

SEQ ID NO: 5762408 - DNA, 25 bp, Homo sapien
ccctccacccaataaagcaccctcc

SEQ ID NO: 5762409 - DNA, 25 bp, Homo sapien
caacgtttgagtcctctcacggcac

SEQ ID NO: 5762410 - DNA, 25 bp, Homo sapien
gtagagaactcgcacggctccggcc

SEQ ID NO: 5762411 - DNA, 25 bp, Homo sapien
gggtcccacgccgctcgtcagaccg

SEQ ID NO: 5762412 - DNA, 25 bp, Homo sapien
aatcatggcgaggtgggggagctgg

SEQ ID NO: 5762413 - DNA, 25 bp, Homo sapien
tcctgtcttcttggaaactttttga

SEQ ID NO: 5762414 - DNA, 25 bp, Homo sapien
atagctgtggaacaccggggtcctg

SEQ ID NO: 5762415 - DNA, 25 bp, Homo sapien
gcaattccacctgttttttctgaag

SEQ ID NO: 5762416 - DNA, 25 bp, Homo sapien
ccaataaagcaccctccagcaaccc

SEQ ID NO: 5762417 - DNA, 25 bp, Homo sapien
tcctctagttgggacatcagtcccc

SEQ ID NO: 5762418 - DNA, 25 bp, Homo sapien
aggcaaagcgtagagagttgaggga

SEQ ID NO: 5762419 - DNA, 25 bp, Homo sapien
gcagagatgccacctctgcttggct

SEQ ID NO: 5762420 - DNA, 25 bp, Homo sapien
agccctcctgcgtgctcagccgctc

SEQ ID NO: 5762421 - DNA, 25 bp, Homo sapien
cggcagaatacacggatgttgccct

SEQ ID NO: 5762422 - DNA, 25 bp, Homo sapien
accttggctaaatgcccctccagtg

SEQ ID NO: 5762423 - DNA, 25 bp, Homo sapien
tcaaccctgtggcaatagctgtgga

SEQ ID NO: 5762424 - DNA, 25 bp, Homo sapien
ttgggacatcagtcccctccgttct

SEQ ID NO: 5762425 - DNA, 25 bp, Homo sapien
aatctgtagctggaatacactgtgg

SEQ ID NO: 5762426 - DNA, 25 bp, Homo sapien
gatacatagacatagggacacacac

SEQ ID NO: 5762427 - DNA, 25 bp, Homo sapien
gagagaggcagctgggaaggggcct

SEQ ID NO: 5762428 - DNA, 25 bp, Homo sapien
gctgactggacaagcatggcaatct

SEQ ID NO: 5762429 - DNA, 25 bp, Homo sapien
agatctggatccgtcttcacttcct

SEQ ID NO: 5762430 - DNA, 25 bp, Homo sapien
ctacgtagcttgctacaaagctgta

SEQ ID NO: 5762431 - DNA, 25 bp, Homo sapien
aattttggtcgttgcacccaggcct

SEQ ID NO: 5762432 - DNA, 25 bp, Homo sapien
ttcccgctcagtcagtaaggctgcc

SEQ ID NO: 5762433 - DNA, 25 bp, Homo sapien
gcactgtagtgagggatggaactct

SEQ ID NO: 5762434 - DNA, 25 bp, Homo sapien
ggagacagggacatatcgagcattg

SEQ ID NO: 5762435 - DNA, 25 bp, Homo sapien
aggcaaagatgcatactggatagcc

SEQ ID NO: 5762436 - DNA, 25 bp, Homo sapien
gtggaagagaactgggtgccgggga

SEQ ID NO: 5762437 - DNA, 25 bp, Homo sapien
cagtttgctgttccggtaaggcacg

SEQ ID NO: 5762438 - DNA, 25 bp, Homo sapien
tagacatagggacacacacacacac

SEQ ID NO: 5762439 - DNA, 25 bp, Homo sapien
ggtgccgcagggcccgagggatcag

SEQ ID NO: 5762440 - DNA, 25 bp, Homo sapien
gacatagggacacacacacacacac

SEQ ID NO: 5762441 - DNA, 25 bp, Homo sapien
gcaccaagccctcctgcgtgctcag

SEQ ID NO: 5762442 - DNA, 25 bp, Homo sapien
cagggccagagggaaacaggaggag

SEQ ID NO: 5762443 - DNA, 25 bp, Homo sapien
ggggccttaatcagaggtctcttca

SEQ ID NO: 5762444 - DNA, 25 bp, Homo sapien
ggccgagggctaagccggggtcaag

SEQ ID NO: 5762445 - DNA, 25 bp, Homo sapien
gcctgggcctgtaccttggctaaat

SEQ ID NO: 5762446 - DNA, 25 bp, Homo sapien
ggcaggacagggcggacccggcaga

SEQ ID NO: 5762447 - DNA, 25 bp, Homo sapien
cccgctcagtcagtaaggctgcctg

SEQ ID NO: 5762448 - DNA, 25 bp, Homo sapien
ctgtggtctggccttgtgtctgtgg

SEQ ID NO: 5762449 - DNA, 25 bp, Homo sapien
cctcttgtccgtttcttctcaggct

SEQ ID NO: 5762450 - DNA, 25 bp, Homo sapien
ttgctgttccggtaaggcacgtggg

SEQ ID NO: 5762451 - DNA, 25 bp, Homo sapien
caggccatcttccatctggtcaggc

SEQ ID NO: 5762452 - DNA, 25 bp, Homo sapien
tggcctgtgtttcccgaaggcgttc

SEQ ID NO: 5762453 - DNA, 25 bp, Homo sapien
ggggtggagtgggctcccccggcag

SEQ ID NO: 5762454 - DNA, 25 bp, Homo sapien
gttggaggatcagagggcccaccag

SEQ ID NO: 5762455 - DNA, 25 bp, Homo sapien
tggtgccccactcagggtcccacgc

SEQ ID NO: 5762456 - DNA, 25 bp, Homo sapien
cgggccagatgaagcagggcgtcca

SEQ ID NO: 5762457 - DNA, 25 bp, Homo sapien
tgccggggatcctgggactcgcgtt

SEQ ID NO: 5762458 - DNA, 25 bp, Homo sapien
tctccttctcctctagttgggacat

SEQ ID NO: 5762459 - DNA, 25 bp, Homo sapien
tgctgctgggcatctctgagctggt

SEQ ID NO: 5762460 - DNA, 25 bp, Homo sapien
tgtagctggaatacactgtggctgc

SEQ ID NO: 5762461 - DNA, 25 bp, Homo sapien
cactcccggccaggtccacaagact

SEQ ID NO: 5762462 - DNA, 25 bp, Homo sapien
cacaagactgaggggggccccacac

SEQ ID NO: 5762463 - DNA, 25 bp, Homo sapien
gctccaggccatcttccatctggtc

SEQ ID NO: 5762464 - DNA, 25 bp, Homo sapien
acaagcacgcaagttcttcagctcc

SEQ ID NO: 5762465 - DNA, 25 bp, Homo sapien
ccattgtgaaggtcttgccactgcc

SEQ ID NO: 5762466 - DNA, 25 bp, Homo sapien
tgtttcccgaaggcgttcccgctcc

SEQ ID NO: 5762467 - DNA, 25 bp, Homo sapien
gggagctggtgccccactcagggtc

SEQ ID NO: 5762468 - DNA, 25 bp, Homo sapien
tcccaggctggacgtttgctgggtt

SEQ ID NO: 5762469 - DNA, 25 bp, Homo sapien
ggagaggctaaggcgggttggagga

SEQ ID NO: 5762470 - DNA, 25 bp, Homo sapien
tagggacacacacacacacacacac

SEQ ID NO: 5762471 - DNA, 25 bp, Homo sapien
tgtgtttcccgaaggcgttcccgct

SEQ ID NO: 5762472 - DNA, 25 bp, Homo sapien
tcctgcaattccacctgttttttct

SEQ ID NO: 5762473 - DNA, 25 bp, Homo sapien
gggacacacacacacacacacacac

SEQ ID NO: 5762474 - DNA, 25 bp, Homo sapien
aactcgcacggctccggccgctacc

SEQ ID NO: 5762475 - DNA, 25 bp, Homo sapien
ggtgccggggatcctgggactcgcg

SEQ ID NO: 5762476 - DNA, 25 bp, Homo sapien
cagagggaaacaggaggaggccagg

SEQ ID NO: 5762477 - DNA, 25 bp, Homo sapien
aggcgggttggaggatcagagggcc

SEQ ID NO: 5762478 - DNA, 25 bp, Homo sapien
attgtgaaggtcttgccactgcctg

SEQ ID NO: 5762479 - DNA, 25 bp, Homo sapien
agatgcatactggatagccatccag

SEQ ID NO: 5762480 - DNA, 25 bp, Homo sapien
caggcccaccctccattgtgaaggt

SEQ ID NO: 5762481 - DNA, 25 bp, Homo sapien
gttgtgcgctctgtccccagggcct

SEQ ID NO: 5762482 - DNA, 25 bp, Homo sapien
acgtgggactccttgttgctcaggg

SEQ ID NO: 5762483 - DNA, 25 bp, Homo sapien
agccccagcgtggacaggctgctgt

SEQ ID NO: 5762484 - DNA, 25 bp, Homo sapien
ccctgtggcaatagctgtggaacac

SEQ ID NO: 5762485 - DNA, 25 bp, Homo sapien
agcttgctacaaagctgtaggtcca

SEQ ID NO: 5762486 - DNA, 25 bp, Homo sapien
catttctagcccatgaagacgttct

SEQ ID NO: 5762487 - DNA, 25 bp, Homo sapien
agggcccgagggatcagcccctcca

SEQ ID NO: 5762488 - DNA, 25 bp, Homo sapien
ggggaatgcagtggaagagaactgg

SEQ ID NO: 5762489 - DNA, 25 bp, Homo sapien
gtcagtttgctgttccggtaaggca

SEQ ID NO: 5762490 - DNA, 25 bp, Homo sapien
acacacacacacacacacacacaga

SEQ ID NO: 5762491 - DNA, 25 bp, Homo sapien
catctctgagctggtcctgaagctg

SEQ ID NO: 5762492 - DNA, 25 bp, Homo sapien
ttggaaactttttgagctgtggtct

SEQ ID NO: 5762493 - DNA, 25 bp, Homo sapien
gcaagttcttcagctcctgttggcc

SEQ ID NO: 5762494 - DNA, 25 bp, Homo sapien
cggctggagtgctccccagaaatct

SEQ ID NO: 5762495 - DNA, 25 bp, Homo sapien
tctcaggctccaggccatcttccat

SEQ ID NO: 5762496 - DNA, 25 bp, Homo sapien
agagaagaggtgccgcagggcccga

SEQ ID NO: 5762497 - DNA, 25 bp, Homo sapien
cgagggatcagcccctccaactggg

SEQ ID NO: 5762498 - DNA, 25 bp, Homo sapien
gccgggggaatgcagtggaagagaa

SEQ ID NO: 5762499 - DNA, 25 bp, Homo sapien
ccacctgttttttctgaagctcttg

SEQ ID NO: 5762500 - DNA, 25 bp, Homo sapien
gcgctccatttctagcccatgaaga

SEQ ID NO: 5762501 - DNA, 25 bp, Homo sapien
cacagtctcctgccgcagagatgcc

SEQ ID NO: 5762502 - DNA, 25 bp, Homo sapien
tcagaggtctcttcagttctatgtt

SEQ ID NO: 5762503 - DNA, 25 bp, Homo sapien
tctggacaggaacagcaggaactgg

SEQ ID NO: 5762504 - DNA, 25 bp, Homo sapien
gattctggcgggccagatgaagcag

SEQ ID NO: 5762505 - DNA, 25 bp, Homo sapien
gagggctaagccggggtcaagtcgc

SEQ ID NO: 5762506 - DNA, 25 bp, Homo sapien
gccggcgctccatttctagcccatg

SEQ ID NO: 5762507 - DNA, 25 bp, Homo sapien
tgggacatggtgccctccacccaat

SEQ ID NO: 5762508 - DNA, 25 bp, Homo sapien
tccttctcctctagttgggacatca

SEQ ID NO: 5762509 - DNA, 25 bp, Homo sapien
gcaggtaggtcagtttgctgttccg

SEQ ID NO: 5762510 - DNA, 25 bp, Homo sapien
ccgctcgcgaagcagggtagagaac

SEQ ID NO: 5762511 - DNA, 25 bp, Homo sapien
gaggaacacctgatgtgccagactt

SEQ ID NO: 5762512 - DNA, 25 bp, Homo sapien
gctccggccgctaccagccccgcgc

SEQ ID NO: 5762513 - DNA, 25 bp, Homo sapien
cgctcactcccggccaggtccacaa

SEQ ID NO: 5762514 - DNA, 25 bp, Homo sapien
actcgcgttctctcgcccgctcgcg

SEQ ID NO: 5762515 - DNA, 25 bp, Homo sapien
ctgatgtctgcagcctcctctcctt

SEQ ID NO: 5762516 - DNA, 25 bp, Homo sapien
tcggtcccacacgcgccgggggaat

SEQ ID NO: 5762517 - DNA, 25 bp, Homo sapien
aatgcagtggaagagaactgggtgc

SEQ ID NO: 5762518 - DNA, 25 bp, Homo sapien
agcgtagagagttgagggactcgga

SEQ ID NO: 5762519 - DNA, 25 bp, Homo sapien
tttaagtcccaggctggacgtttgc

SEQ ID NO: 5762520 - DNA, 25 bp, Homo sapien
ggctgcctgggccacagtctcctgc

SEQ ID NO: 5762521 - DNA, 25 bp, Homo sapien
cagcaggtcccggacagtctcattg

SEQ ID NO: 5762522 - DNA, 25 bp, Homo sapien
cttcacttcctgttggcctgagcag

SEQ ID NO: 5762523 - DNA, 25 bp, Homo sapien
cctgctcagcctgggcctgtacctt

SEQ ID NO: 5762524 - DNA, 25 bp, Homo sapien
tggaggatcagagggcccaccaggg

SEQ ID NO: 5762525 - DNA, 25 bp, Homo sapien
tctcacggcaccgttttagttctgc

SEQ ID NO: 5762526 - DNA, 25 bp, Homo sapien
gtgggactccttgttgctcagggcc

SEQ ID NO: 5762527 - DNA, 25 bp, Homo sapien
cccgcgccacacccgccacttttga

SEQ ID NO: 5762528 - DNA, 25 bp, Homo sapien
ttctgatgtctgcagcctcctctcc

SEQ ID NO: 5762529 - DNA, 25 bp, Homo sapien
gtggtctggccttgtgtctgtggca

SEQ ID NO: 5762530 - DNA, 25 bp, Homo sapien
gtccccagggccttgacctgctgct

SEQ ID NO: 5762531 - DNA, 25 bp, Homo sapien
ttcttcaaccctgtggcaatagctg

SEQ ID NO: 5762532 - DNA, 25 bp, Homo sapien
cagtcagtaaggctgcctgggccac

SEQ ID NO: 5762533 - DNA, 25 bp, Homo sapien
caccctccattgtgaaggtcttgcc

SEQ ID NO: 5762534 - DNA, 25 bp, Homo sapien
ctcttccagctccaggacacaagca

SEQ ID NO: 5762535 - DNA, 25 bp, Homo sapien
ccttgacctgctgctgggcatctct

SEQ ID NO: 5762536 - DNA, 25 bp, Homo sapien
tgtgtctgtggcactgtagtgaggg

SEQ ID NO: 5762537 - DNA, 25 bp, Homo sapien
agtggagaaatgttcacaaacatga

SEQ ID NO: 5762538 - DNA, 25 bp, Homo sapien
catagggacacacacacacacacac

SEQ ID NO: 5762539 - DNA, 25 bp, Homo sapien
tgatgtgccagacttctggacagga

SEQ ID NO: 5762540 - DNA, 25 bp, Homo sapien
ctcattgtagatctctacgtagctt

SEQ ID NO: 5762541 - DNA, 25 bp, Homo sapien
tcgttgcacccaggcctcttgtccg

SEQ ID NO: 5762542 - DNA, 25 bp, Homo sapien
tctgcttggctgcttgacagggctg

SEQ ID NO: 5762543 - DNA, 25 bp, Homo sapien
acgcaagttcttcagctcctgttgg

SEQ ID NO: 5762544 - DNA, 25 bp, Homo sapien
ttgccactgcctgtctggccatagg

SEQ ID NO: 5762545 - DNA, 25 bp, Homo sapien
cgctcttccagctccaggacacaag

SEQ ID NO: 5762546 - DNA, 25 bp, Homo sapien
gggtgggatgtggtaattttggtcg

SEQ ID NO: 5762547 - DNA, 25 bp, Homo sapien
ctaccacccagagagttctgcagca

SEQ ID NO: 5762548 - DNA, 25 bp, Homo sapien
tcctgttggccctgctcagcctggg

SEQ ID NO: 5762549 - DNA, 25 bp, Homo sapien
tgctacaaagctgtaggtccagccc

SEQ ID NO: 5762550 - DNA, 25 bp, Homo sapien
tctagcccatgaagacgttcttccc

SEQ ID NO: 5762551 - DNA, 25 bp, Homo sapien
gctcccccggcaggacagggcggac

SEQ ID NO: 5762552 - DNA, 25 bp, Homo sapien
cccggcagaatacacggatgttgcc

SEQ ID NO: 5762553 - DNA, 25 bp, Homo sapien
aacacactggttcaccttggaggca

SEQ ID NO: 5762554 - DNA, 25 bp, Homo sapien
ctctacgtagcttgctacaaagctg

SEQ ID NO: 5762555 - DNA, 25 bp, Homo sapien
gctcgtcagaccgggagaggctaag

SEQ ID NO: 5762556 - DNA, 25 bp, Homo sapien
tggccttgtgtctgtggcactgtag

SEQ ID NO: 5762557 - DNA, 25 bp, Homo sapien
agcagggtagagaactcgcacggct

SEQ ID NO: 5762558 - DNA, 25 bp, Homo sapien
cggccaggtccacaagactgagggg

SEQ ID NO: 5762559 - DNA, 25 bp, Homo sapien
ccgcagggcccgagggatcagcccc

SEQ ID NO: 5762560 - DNA, 25 bp, Homo sapien
tgaaggtcttgccactgcctgtctg

SEQ ID NO: 5762561 - DNA, 25 bp, Homo sapien
gttcctgcagctggttgtgcagtcg

SEQ ID NO: 5762562 - DNA, 25 bp, Homo sapien
gacctctgcggatccatgtccacct

SEQ ID NO: 5762563 - DNA, 25 bp, Homo sapien
tagcccatgaagacgttcttcccgc

SEQ ID NO: 5762564 - DNA, 25 bp, Homo sapien
tctgcatttaggtcacataactgac

SEQ ID NO: 5762565 - DNA, 25 bp, Homo sapien
ttgcccttgagttcctgcagctggt

SEQ ID NO: 5762566 - DNA, 25 bp, Homo sapien
cagctccaggacacaagcacgcaag

SEQ ID NO: 5762567 - DNA, 25 bp, Homo sapien
ttgatagccctgggacatggtgccc

SEQ ID NO: 5762568 - DNA, 25 bp, Homo sapien
aagcaccctccagcaaccctcccac

SEQ ID NO: 5762569 - DNA, 25 bp, Homo sapien
gaagcagggtagagaactcgcacgg

SEQ ID NO: 5762570 - DNA, 25 bp, Homo sapien
caggcctcttgtccgtttcttctca

SEQ ID NO: 5762571 - DNA, 25 bp, Homo sapien
gcccaccagggccagagggaaacag

SEQ ID NO: 5762572 - DNA, 25 bp, Homo sapien
gcgaatctcacactcgcccccttga

SEQ ID NO: 5762573 - DNA, 25 bp, Homo sapien
tttttgagctgtggtctggccttgt

SEQ ID NO: 5762574 - DNA, 25 bp, Homo sapien
aatggcctgtgtttcccgaaggcgt

SEQ ID NO: 5762575 - DNA, 25 bp, Homo sapien
acggcaccgttttagttctgcattt

SEQ ID NO: 5762576 - DNA, 25 bp, Homo sapien
ggccttgacctgctgctgggcatct

SEQ ID NO: 5762577 - DNA, 25 bp, Homo sapien
gatccatgtccacctcggtcccaca

SEQ ID NO: 5762578 - DNA, 25 bp, Homo sapien
ctcactcccggccaggtccacaaga

SEQ ID NO: 5762579 - DNA, 25 bp, Homo sapien
gtcccggacagtctcattgtagatc

SEQ ID NO: 5762580 - DNA, 25 bp, Homo sapien
ggacatggtgccctccacccaataa

SEQ ID NO: 5762581 - DNA, 25 bp, Homo sapien
agaatacacggatgttgcccttgag

SEQ ID NO: 5762582 - DNA, 25 bp, Homo sapien
atcagcccctccaactgggggtctc

SEQ ID NO: 5762583 - DNA, 25 bp, Homo sapien
tttgagctgtggtctggccttgtgt

SEQ ID NO: 5762584 - DNA, 25 bp, Homo sapien
atacactgtggctgcgtgatgaccg

SEQ ID NO: 5762585 - DNA, 25 bp, Homo sapien
tgcagcctcctctccttctcctcta

SEQ ID NO: 5762586 - DNA, 25 bp, Homo sapien
tgagctcctcactccctggccctgc

SEQ ID NO: 5762587 - DNA, 25 bp, Homo sapien
cagaccgggagaggctaaggcgggt

SEQ ID NO: 5762588 - DNA, 25 bp, Homo sapien
ccggtaaggcacgtgggactccttg

SEQ ID NO: 5762589 - DNA, 25 bp, Homo sapien
gaactcttgggtgggatgtggtaat

SEQ ID NO: 5762590 - DNA, 25 bp, Homo sapien
cgtgctcagccgctcttccagctcc

SEQ ID NO: 5762591 - DNA, 25 bp, Homo sapien
gcctgtgtttcccgaaggcgttccc

SEQ ID NO: 5762592 - DNA, 25 bp, Homo sapien
gctccaggacacaagcacgcaagtt

SEQ ID NO: 5762593 - DNA, 25 bp, Homo sapien
caggaacagcaggaactggcttctg

SEQ ID NO: 5762594 - DNA, 25 bp, Homo sapien
gcctcctctccttctcctctagttg

SEQ ID NO: 5762595 - DNA, 25 bp, Homo sapien
tgtgaaggtcttgccactgcctgtc

SEQ ID NO: 5762596 - DNA, 25 bp, Homo sapien
ccttaatcagaggtctcttcagttc

SEQ ID NO: 5762597 - DNA, 25 bp, Homo sapien
gcctgtaccttggctaaatgcccct

SEQ ID NO: 5762598 - DNA, 25 bp, Homo sapien
cgggggaatgcagtggaagagaact

SEQ ID NO: 5762599 - DNA, 25 bp, Homo sapien
gccacctctgcttggctgcttgaca

SEQ ID NO: 5762600 - DNA, 25 bp, Homo sapien
tgagtctgcttcctgagagaggcag

SEQ ID NO: 5762601 - DNA, 25 bp, Homo sapien
tagccctgggacatggtgccctcca

SEQ ID NO: 5762602 - DNA, 25 bp, Homo sapien
cggatccatgtccacctcggtccca

SEQ ID NO: 5762603 - DNA, 25 bp, Homo sapien
cccacgccgctcgtcagaccgggag

SEQ ID NO: 5762604 - DNA, 25 bp, Homo sapien
ttggcctgagcagtaccaataacac

SEQ ID NO: 5762605 - DNA, 25 bp, Homo sapien
ccgttttagttctgcatttaggtca

SEQ ID NO: 5762606 - DNA, 25 bp, Homo sapien
cccagaaatctgtagctggaataca

SEQ ID NO: 5762607 - DNA, 25 bp, Homo sapien
ccacacgcgccgggggaatgcagtg

SEQ ID NO: 5762608 - DNA, 25 bp, Homo sapien
aggtccagccctgaccactcagctc

SEQ ID NO: 5762609 - DNA, 25 bp, Homo sapien
ctcctcactccctggccctgcacgg

SEQ ID NO: 5762610 - DNA, 25 bp, Homo sapien
agcagggcgtccacttctttctcac

SEQ ID NO: 5762611 - DNA, 25 bp, Homo sapien
tgcttgacagggctgcttctgatgt

SEQ ID NO: 5762612 - DNA, 25 bp, Homo sapien
gttcattctgggctgtgcgggccac

SEQ ID NO: 5762613 - DNA, 25 bp, Homo sapien
tctgcttcctgagagaggcagctgg

SEQ ID NO: 5762614 - DNA, 25 bp, Homo sapien
cctgccatgggaggaacacctgatg

SEQ ID NO: 5762615 - DNA, 25 bp, Homo sapien
tggagtgctccccagaaatctgtag

SEQ ID NO: 5762616 - DNA, 25 bp, Homo sapien
ctgtggcaatagctgtggaacaccg

SEQ ID NO: 5762617 - DNA, 25 bp, Homo sapien
cctccgttcttcctgcaattccacc

SEQ ID NO: 5762618 - DNA, 25 bp, Homo sapien
actgggtgccggggatcctgggact

SEQ ID NO: 5762619 - DNA, 25 bp, Homo sapien
gccacagcccgattctggcgggcca

SEQ ID NO: 5762620 - DNA, 25 bp, Homo sapien
gttggccctgctcagcctgggcctg

SEQ ID NO: 5762621 - DNA, 25 bp, Homo sapien
gctgttaatggcctgtgtttcccga

SEQ ID NO: 5762622 - DNA, 25 bp, Homo sapien
tggctgcttgacagggctgcttctg

SEQ ID NO: 5762623 - DNA, 25 bp, Homo sapien
gccccactcagggtcccacgccgct

SEQ ID NO: 5762624 - DNA, 25 bp, Homo sapien
tgtctgcagcctcctctccttctcc

SEQ ID NO: 5762625 - DNA, 25 bp, Homo sapien
ctgcctgtctggccataggcaaaga

SEQ ID NO: 5762626 - DNA, 25 bp, Homo sapien
tgtctgtggcactgtagtgagggat

SEQ ID NO: 5762627 - DNA, 25 bp, Homo sapien
cacactgcaggcctcggctggagtg

SEQ ID NO: 5762628 - DNA, 25 bp, Homo sapien
gctaaggcgggttggaggatcagag

SEQ ID NO: 5762629 - DNA, 25 bp, Homo sapien
ggaaggggccttaatcagaggtctc

SEQ ID NO: 5762630 - DNA, 25 bp, Homo sapien
tgggcatctctgagctggtcctgaa

SEQ ID NO: 5762631 - DNA, 25 bp, Homo sapien
gtgttgtgcgctctgtccccagggc

SEQ ID NO: 5762632 - DNA, 25 bp, Homo sapien
ccaggctggacgtttgctgggtttc

SEQ ID NO: 5762633 - DNA, 25 bp, Homo sapien
ttccagtggccagcaggtcccggac

SEQ ID NO: 5762634 - DNA, 25 bp, Homo sapien
ttcaccttggaggcaaagcgtagag

SEQ ID NO: 5762635 - DNA, 25 bp, Homo sapien
aagttcttcagctcctgttggccct

SEQ ID NO: 5762636 - DNA, 25 bp, Homo sapien
agggcggacccggcagaatacacgg

SEQ ID NO: 5762637 - DNA, 25 bp, Homo sapien
ctcagggtcccacgccgctcgtcag

SEQ ID NO: 5762638 - DNA, 25 bp, Homo sapien
gtcagtaaggctgcctgggccacag

SEQ ID NO: 5762639 - DNA, 25 bp, Homo sapien
atggtgccctccacccaataaagca

SEQ ID NO: 5762640 - DNA, 25 bp, Homo sapien
taaatgcccctccagtgttgtgcgc

SEQ ID NO: 5762641 - DNA, 25 bp, Homo sapien
ccagatgaagcagggcgtccacttc

SEQ ID NO: 5762642 - DNA, 25 bp, Homo sapien
acagagaagaggtgccgcagggccc

SEQ ID NO: 5762643 - DNA, 25 bp, Homo sapien
tggccctgcacggcgaatctcacac

SEQ ID NO: 5762644 - DNA, 25 bp, Homo sapien
ataacacactggttcaccttggagg

SEQ ID NO: 5762645 - DNA, 25 bp, Homo sapien
ctgcaggcctcggctggagtgctcc

SEQ ID NO: 5762646 - DNA, 25 bp, Homo sapien
tgagccacagagaagaggtgccgca

SEQ ID NO: 5762647 - DNA, 25 bp, Homo sapien
ctctagttgggacatcagtcccctc

SEQ ID NO: 5762648 - DNA, 25 bp, Homo sapien
cactgcctgtctggccataggcaaa

SEQ ID NO: 5762649 - DNA, 25 bp, Homo sapien
cttcctgcaattccacctgtttttt

SEQ ID NO: 5762650 - DNA, 25 bp, Homo sapien
tccgggttccagtggccagcaggtc

SEQ ID NO: 5762651 - DNA, 25 bp, Homo sapien
agagaactcgcacggctccggccgc

SEQ ID NO: 5762652 - DNA, 25 bp, Homo sapien
gaactggcttctggttcttcaaccc

SEQ ID NO: 5762653 - DNA, 25 bp, Homo sapien
ggttgtgcagtcgccggcgctccat

SEQ ID NO: 5762654 - DNA, 25 bp, Homo sapien
ctgctgttaatggcctgtgtttccc

SEQ ID NO: 5762655 - DNA, 25 bp, Homo sapien
tccaataggggggacctctgcggat

SEQ ID NO: 5762656 - DNA, 25 bp, Homo sapien
gccctgcacggcgaatctcacactc

SEQ ID NO: 5762657 - DNA, 25 bp, Homo sapien
ctgtccccagggccttgacctgctg

SEQ ID NO: 5762658 - DNA, 25 bp, Homo sapien
ctgaagctgctggttctcttggtcc

SEQ ID NO: 5762659 - DNA, 25 bp, Homo sapien
ggctgcttctgatgtctgcagcctc

SEQ ID NO: 5762660 - DNA, 25 bp, Homo sapien
gcgtccacttctttctcacaggaga

SEQ ID NO: 5762661 - DNA, 25 bp, Homo sapien
gccccacactgcaggcctcggctgg

SEQ ID NO: 5762662 - DNA, 25 bp, Homo sapien
tgccgcagagatgccacctctgctt

SEQ ID NO: 5762663 - DNA, 25 bp, Homo sapien
cttgtgtctgtggcactgtagtgag

SEQ ID NO: 5762664 - DNA, 25 bp, Homo sapien
cccaccctccattgtgaaggtcttg

SEQ ID NO: 5762665 - DNA, 25 bp, Homo sapien
gggtagagaactcgcacggctccgg

SEQ ID NO: 5762666 - DNA, 25 bp, Homo sapien
tagagagttgagggactcggagacg

SEQ ID NO: 5762667 - DNA, 25 bp, Homo sapien
cagggtcccacgccgctcgtcagac

SEQ ID NO: 5762668 - DNA, 25 bp, Homo sapien
aaagctgtaggtccagccctgacca

SEQ ID NO: 5762669 - DNA, 25 bp, Homo sapien
cgccgctcgtcagaccgggagaggc

SEQ ID NO: 5762670 - DNA, 25 bp, Homo sapien
catgataaccagccccagcgtggac

SEQ ID NO: 5762671 - DNA, 25 bp, Homo sapien
tcaagtcgctcactcccggccaggt

SEQ ID NO: 5762672 - DNA, 25 bp, Homo sapien
acagggctgcttctgatgtctgcag

SEQ ID NO: 5762673 - DNA, 25 bp, Homo sapien
gggcgtccacttctttctcacagga

SEQ ID NO: 5762674 - DNA, 25 bp, Homo sapien
gactccttgttgctcagggccatga

SEQ ID NO: 5762675 - DNA, 25 bp, Homo sapien
acacacacagatctggatccgtctt

SEQ ID NO: 5762676 - DNA, 25 bp, Homo sapien
aaactttttgagctgtggtctggcc

SEQ ID NO: 5762677 - DNA, 25 bp, Homo sapien
gctccccagaaatctgtagctggaa

SEQ ID NO: 5762678 - DNA, 25 bp, Homo sapien
cgtagagagttgagggactcggaga

SEQ ID NO: 5762679 - DNA, 25 bp, Homo sapien
gggccacagtctcctgccgcagaga

SEQ ID NO: 5762680 - DNA, 25 bp, Homo sapien
tcattctgggctgtgcgggccacag

SEQ ID NO: 5762681 - DNA, 25 bp, Homo sapien
ttggtgacagtgagctcctcactcc

SEQ ID NO: 5762682 - DNA, 25 bp, Homo sapien
agacagggacatatcgagcattggt

SEQ ID NO: 5762683 - DNA, 25 bp, Homo sapien
ttccggtaaggcacgtgggactcct

SEQ ID NO: 5762684 - DNA, 25 bp, Homo sapien
gtcttcttggaaactttttgagctg

SEQ ID NO: 5762685 - DNA, 25 bp, Homo sapien
gtgagggatggaactcttgggtggg

SEQ ID NO: 5762686 - DNA, 25 bp, Homo sapien
cctgttggcctgagcagtaccaata

SEQ ID NO: 5762687 - DNA, 25 bp, Homo sapien
gggacatcagtcccctccgttcttc

SEQ ID NO: 5762688 - DNA, 25 bp, Homo sapien
caagcatggcaatctcttcaaacac

SEQ ID NO: 5762689 - DNA, 25 bp, Homo sapien
ctggtcctgaagctgctggttctct

SEQ ID NO: 5762690 - DNA, 25 bp, Homo sapien
acacagatctggatccgtcttcact

SEQ ID NO: 5762691 - DNA, 25 bp, Homo sapien
tgtgcgctctgtccccagggccttg

SEQ ID NO: 5762692 - DNA, 25 bp, Homo sapien
agctggttgtgcagtcgccggcgct

SEQ ID NO: 5762693 - DNA, 25 bp, Homo sapien
agcgtggacaggctgctgttaatgg

SEQ ID NO: 5762694 - DNA, 25 bp, Homo sapien
agtctgcttcctgagagaggcagct

SEQ ID NO: 5762695 - DNA, 25 bp, Homo sapien
atctggatccgtcttcacttcctgt

SEQ ID NO: 5762696 - DNA, 25 bp, Homo sapien
agcatcttagcactaccacccagag

SEQ ID NO: 5762697 - DNA, 25 bp, Homo sapien
acagatctggatccgtcttcacttc

SEQ ID NO: 5762698 - DNA, 25 bp, Homo sapien
gaaaaatcatggcgaggtgggggag

SEQ ID NO: 5762699 - DNA, 25 bp, Homo sapien
tggaactcttgggtgggatgtggta

SEQ ID NO: 5762700 - DNA, 25 bp, Homo sapien
tacttccaataggggggacctctgc

SEQ ID NO: 5762701 - DNA, 25 bp, Homo sapien
gttctgcagcaggtaggtcagtttg

SEQ ID NO: 5762702 - DNA, 25 bp, Homo sapien
gcctcggctggagtgctccccagaa

SEQ ID NO: 5762703 - DNA, 25 bp, Homo sapien
gtcaggcctcctcttgagtctgctt

SEQ ID NO: 5762704 - DNA, 25 bp, Homo sapien
aggtgggggagctggtgccccactc

SEQ ID NO: 5762705 - DNA, 25 bp, Homo sapien
agcagtaccaataacacactggttc

SEQ ID NO: 5762706 - DNA, 25 bp, Homo sapien
ctgttggccctgctcagcctgggcc

SEQ ID NO: 5762707 - DNA, 25 bp, Homo sapien
gcaggtcccggacagtctcattgta

SEQ ID NO: 5762708 - DNA, 25 bp, Homo sapien
tcccgctccccggggccgagggcta

SEQ ID NO: 5762709 - DNA, 25 bp, Homo sapien
gagaaatgttcacaaacatgagcat

SEQ ID NO: 5762710 - DNA, 25 bp, Homo sapien
gatgtctgcagcctcctctccttct

SEQ ID NO: 5762711 - DNA, 25 bp, Homo sapien
ggctgtgcgggccacagcccgattc

SEQ ID NO: 5762712 - DNA, 25 bp, Homo sapien
gacttctggacaggaacagcaggaa

SEQ ID NO: 5762713 - DNA, 25 bp, Homo sapien
tccatttctagcccatgaagacgtt

SEQ ID NO: 5762714 - DNA, 25 bp, Homo sapien
ggaacagcaggaactggcttctggt

SEQ ID NO: 5762715 - DNA, 25 bp, Homo sapien
cctctcacggcaccgttttagttct

SEQ ID NO: 5762716 - DNA, 25 bp, Homo sapien
gaagcagggcgtccacttctttctc

SEQ ID NO: 5762717 - DNA, 25 bp, Homo sapien
ggtgccctccacccaataaagcacc

SEQ ID NO: 5762718 - DNA, 25 bp, Homo sapien
aagagaactgggtgccggggatcct

SEQ ID NO: 5762719 - DNA, 25 bp, Homo sapien
agttgggacatcagtcccctccgtt

SEQ ID NO: 5762720 - DNA, 25 bp, Homo sapien
tggttctcttggtccaacgtttgag

SEQ ID NO: 5762721 - DNA, 25 bp, Homo sapien
caggtccacaagactgaggggggcc

SEQ ID NO: 5762722 - DNA, 25 bp, Homo sapien
gaactgggtgccggggatcctggga

SEQ ID NO: 5762723 - DNA, 25 bp, Homo sapien
gagtgctccccagaaatctgtagct

SEQ ID NO: 5762724 - DNA, 25 bp, Homo sapien
ctggatccgtcttcacttcctgttg

SEQ ID NO: 5762725 - DNA, 25 bp, Homo sapien
ctgtggaacaccggggtcctgtctt

SEQ ID NO: 5762726 - DNA, 25 bp, Homo sapien
accagggccagagggaaacaggagg

SEQ ID NO: 5762727 - DNA, 25 bp, Homo sapien
agccccgcgccacacccgccacttt

SEQ ID NO: 5762728 - DNA, 25 bp, Homo sapien
tcttggtccaacgtttgagtcctct

SEQ ID NO: 5762729 - DNA, 25 bp, Homo sapien
gatagccatccagggctgactggac

SEQ ID NO: 5762730 - DNA, 25 bp, Homo sapien
tacatagacatagggacacacacac

SEQ ID NO: 5762731 - DNA, 25 bp, Homo sapien
ctgctgggcatctctgagctggtcc

SEQ ID NO: 5762732 - DNA, 25 bp, Homo sapien
cacctctgcttggctgcttgacagg

SEQ ID NO: 5762733 - DNA, 25 bp, Homo sapien
gacaggaacagcaggaactggcttc

SEQ ID NO: 5762734 - DNA, 25 bp, Homo sapien
ccagtggccagcaggtcccggacag

SEQ ID NO: 5762735 - DNA, 25 bp, Homo sapien
ctggttgtgcagtcgccggcgctcc

SEQ ID NO: 5762736 - DNA, 25 bp, Homo sapien
ttgacctgctgctgggcatctctga

SEQ ID NO: 5762737 - DNA, 25 bp, Homo sapien
tgttcacaaacatgagcatcttagc

SEQ ID NO: 5762738 - DNA, 25 bp, Homo sapien
tcttccctcctgccatgggaggaac

SEQ ID NO: 5762739 - DNA, 25 bp, Homo sapien
cacctgatgtgccagacttctggac

SEQ ID NO: 5762740 - DNA, 25 bp, Homo sapien
tcacttcctgttggcctgagcagta

SEQ ID NO: 5762741 - DNA, 25 bp, Homo sapien
ggaatgcagtggaagagaactgggt

SEQ ID NO: 5762742 - DNA, 25 bp, Homo sapien
gctgggtttcttccctcctgccatg

SEQ ID NO: 5762743 - DNA, 25 bp, Homo sapien
catagacatagggacacacacacac

SEQ ID NO: 5762744 - DNA, 25 bp, Homo sapien
cgtgatgaccgttcattctgggctg

SEQ ID NO: 5762745 - DNA, 25 bp, Homo sapien
gccgctcttccagctccaggacaca

SEQ ID NO: 5762746 - DNA, 25 bp, Homo sapien
ggtccaacgtttgagtcctctcacg

SEQ ID NO: 5762747 - DNA, 25 bp, Homo sapien
gaaatgttcacaaacatgagcatct

SEQ ID NO: 5762748 - DNA, 25 bp, Homo sapien
gcgggttggaggatcagagggccca

SEQ ID NO: 5762749 - DNA, 25 bp, Homo sapien
caggagacagggacatatcgagcat

SEQ ID NO: 5762750 - DNA, 25 bp, Homo sapien
acccggtcaaaggaaaaatcatggc

SEQ ID NO: 5762751 - DNA, 25 bp, Homo sapien
ggtggagtgggctcccccggcagga

SEQ ID NO: 5762752 - DNA, 25 bp, Homo sapien
ggctgctgttaatggcctgtgtttc

SEQ ID NO: 5762753 - DNA, 25 bp, Homo sapien
taaggcgggttggaggatcagaggg

SEQ ID NO: 5762754 - DNA, 25 bp, Homo sapien
aggtctcttcagttctatgttcccc

SEQ ID NO: 5762755 - DNA, 25 bp, Homo sapien
ttgacccttccgggttccagtggcc

SEQ ID NO: 5762756 - DNA, 25 bp, Homo sapien
tagccatccagggctgactggacaa

SEQ ID NO: 5762757 - DNA, 25 bp, Homo sapien
atgaccgttcattctgggctgtgcg

SEQ ID NO: 5762758 - DNA, 25 bp, Homo sapien
ctagttgggacatcagtcccctccg

SEQ ID NO: 5762759 - DNA, 25 bp, Homo sapien
agctgctggttctcttggtccaacg

SEQ ID NO: 5762760 - DNA, 25 bp, Homo sapien
tattctttatttgatagccctggga

SEQ ID NO: 5762761 - DNA, 25 bp, Homo sapien
acacacagatctggatccgtcttca

SEQ ID NO: 5762762 - DNA, 25 bp, Homo sapien
gaagctgctggttctcttggtccaa

SEQ ID NO: 5762763 - DNA, 25 bp, Homo sapien
gagttgagggactcggagacgttct

SEQ ID NO: 5762764 - DNA, 25 bp, Homo sapien
ggtaaggcacgtgggactccttgtt

SEQ ID NO: 5762765 - DNA, 25 bp, Homo sapien
tgccctccacccaataaagcaccct

SEQ ID NO: 5762766 - DNA, 25 bp, Homo sapien
cagagggcccaccagggccagaggg

SEQ ID NO: 5762767 - DNA, 25 bp, Homo sapien
gagaactgggtgccggggatcctgg

SEQ ID NO: 5762768 - DNA, 25 bp, Homo sapien
ggaaacaggaggaggccagggggtg

SEQ ID NO: 5762769 - DNA, 25 bp, Homo sapien
gtgcgggccacagcccgattctggc

SEQ ID NO: 5762770 - DNA, 25 bp, Homo sapien
agtgagctcctcactccctggccct

SEQ ID NO: 5762771 - DNA, 25 bp, Homo sapien
gttgcacccaggcctcttgtccgtt

SEQ ID NO: 5762772 - DNA, 25 bp, Homo sapien
tgggaaggggccttaatcagaggtc

SEQ ID NO: 5762773 - DNA, 25 bp, Homo sapien
attctgggctgtgcgggccacagcc

SEQ ID NO: 5762774 - DNA, 25 bp, Homo sapien
tccagggctgactggacaagcatgg

SEQ ID NO: 5762775 - DNA, 25 bp, Homo sapien
aatgttcacaaacatgagcatctta

SEQ ID NO: 5762776 - DNA, 25 bp, Homo sapien
tttctagcccatgaagacgttcttc

SEQ ID NO: 5762777 - DNA, 25 bp, Homo sapien
gctccatttctagcccatgaagacg

SEQ ID NO: 5762778 - DNA, 25 bp, Homo sapien
tcgtcagaccgggagaggctaaggc

SEQ ID NO: 5762779 - DNA, 25 bp, Homo sapien
cctccagtgttgtgcgctctgtccc

SEQ ID NO: 5762780 - DNA, 25 bp, Homo sapien
cgttcttcctgcaattccacctgtt

SEQ ID NO: 5762781 - DNA, 25 bp, Homo sapien
gacacacacacacacacacacacac

SEQ ID NO: 5762782 - DNA, 25 bp, Homo sapien
cttccatctggtcaggcctcctctt

SEQ ID NO: 5762783 - DNA, 25 bp, Homo sapien
ggccgctaccagccccgcgccacac

SEQ ID NO: 5762784 - DNA, 25 bp, Homo sapien
agactgaggggggccccacactgca

SEQ ID NO: 5762785 - DNA, 25 bp, Homo sapien
cctgcacggcgaatctcacactcgc

SEQ ID NO: 5762786 - DNA, 25 bp, Homo sapien
cacacacacacacacacacacacac

SEQ ID NO: 5762787 - DNA, 25 bp, Homo sapien
cttcctgagagaggcagctgggaag

SEQ ID NO: 5762788 - DNA, 25 bp, Homo sapien
tcttagcactaccacccagagagtt

SEQ ID NO: 5762789 - DNA, 25 bp, Homo sapien
acgtttgagtcctctcacggcaccg

SEQ ID NO: 5762790 - DNA, 25 bp, Homo sapien
agggatcagcccctccaactggggg

SEQ ID NO: 5762791 - DNA, 25 bp, Homo sapien
ccgtcttcacttcctgttggcctga

SEQ ID NO: 5762792 - DNA, 25 bp, Homo sapien
aaagcgtagagagttgagggactcg

SEQ ID NO: 5762793 - DNA, 25 bp, Homo sapien
gggatgtggtaattttggtcgttgc

SEQ ID NO: 5762794 - DNA, 25 bp, Homo sapien
aagaggtgccgcagggcccgaggga

SEQ ID NO: 5762795 - DNA, 25 bp, Homo sapien
ctgtctggccataggcaaagatgca

SEQ ID NO: 5762796 - DNA, 25 bp, Homo sapien
aacaccggggtcctgtcttcttgga

SEQ ID NO: 5762797 - DNA, 25 bp, Homo sapien
ttaatcagaggtctcttcagttcta

SEQ ID NO: 5762798 - DNA, 25 bp, Homo sapien
aatctcttcaaacacttcatcctgt

SEQ ID NO: 5762799 - DNA, 25 bp, Homo sapien
tcatcctgtccacttcctggtggga

SEQ ID NO: 5762800 - DNA, 25 bp, Homo sapien
gtcttcacttcctgttggcctgagc

SEQ ID NO: 5762801 - DNA, 25 bp, Homo sapien
cacagcccgattctggcgggccaga

SEQ ID NO: 5762802 - DNA, 25 bp, Homo sapien
gacctgctgctgggcatctctgagc

SEQ ID NO: 5762803 - DNA, 25 bp, Homo sapien
ggccagatgaagcagggcgtccact

SEQ ID NO: 5762804 - DNA, 25 bp, Homo sapien
acgtagcttgctacaaagctgtagg

SEQ ID NO: 5762805 - DNA, 25 bp, Homo sapien
ggcctcttgtccgtttcttctcagg

SEQ ID NO: 5762806 - DNA, 25 bp, Homo sapien
ggatccgtcttcacttcctgttggc

SEQ ID NO: 5762807 - DNA, 25 bp, Homo sapien
gtaggtccagccctgaccactcagc

SEQ ID NO: 5762808 - DNA, 25 bp, Homo sapien
gccagggggtggagtgggctccccc

SEQ ID NO: 5762809 - DNA, 25 bp, Homo sapien
agatctctacgtagcttgctacaaa

SEQ ID NO: 5762810 - DNA, 25 bp, Homo sapien
cttcatcctgtccacttcctggtgg

SEQ ID NO: 5762811 - DNA, 25 bp, Homo sapien
tccatgtccacctcggtcccacacg

SEQ ID NO: 5762812 - DNA, 25 bp, Homo sapien
agctcctcactccctggccctgcac

SEQ ID NO: 5762813 - DNA, 25 bp, Homo sapien
actttttgagctgtggtctggcctt

SEQ ID NO: 5762814 - DNA, 25 bp, Homo sapien
gcaaagcgtagagagttgagggact

SEQ ID NO: 5762815 - DNA, 25 bp, Homo sapien
agtcgccggcgctccatttctagcc

SEQ ID NO: 5762816 - DNA, 25 bp, Homo sapien
tggacaggctgctgttaatggcctg

SEQ ID NO: 5762817 - DNA, 25 bp, Homo sapien
tcctgaagctgctggttctcttggt

SEQ ID NO: 5762818 - DNA, 25 bp, Homo sapien
ggcccgagggatcagcccctccaac

SEQ ID NO: 5762819 - DNA, 25 bp, Homo sapien
acgttcttcccgctcagtcagtaag

SEQ ID NO: 5762820 - DNA, 25 bp, Homo sapien
ctcagggccatgataaccagcccca

SEQ ID NO: 5762821 - DNA, 25 bp, Homo sapien
ggtcaagtcgctcactcccggccag

SEQ ID NO: 5762822 - DNA, 25 bp, Homo sapien
gggcctgtaccttggctaaatgccc

SEQ ID NO: 5762823 - DNA, 25 bp, Homo sapien
ttgtagatctctacgtagcttgcta

SEQ ID NO: 5762824 - DNA, 25 bp, Homo sapien
tgcttggctgcttgacagggctgct

SEQ ID NO: 5762825 - DNA, 25 bp, Homo sapien
tgcgctctgtccccagggccttgac

SEQ ID NO: 5762826 - DNA, 25 bp, Homo sapien
acttcctgttggcctgagcagtacc

SEQ ID NO: 5762827 - DNA, 25 bp, Homo sapien
agagatgccacctctgcttggctgc

SEQ ID NO: 5762828 - DNA, 25 bp, Homo sapien
cacccaggcctcttgtccgtttctt

SEQ ID NO: 5762829 - DNA, 25 bp, Homo sapien
gtcccctccgttcttcctgcaattc

SEQ ID NO: 5762830 - DNA, 25 bp, Homo sapien
tctgtagctggaatacactgtggct

SEQ ID NO: 5762831 - DNA, 25 bp, Homo sapien
tcgccggcgctccatttctagccca

SEQ ID NO: 5762832 - DNA, 25 bp, Homo sapien
tctggtcaggcctcctcttgagtct

SEQ ID NO: 5762833 - DNA, 25 bp, Homo sapien
catttaggtcacataactgaccctt

SEQ ID NO: 5762834 - DNA, 25 bp, Homo sapien
tctgtggcactgtagtgagggatgg

SEQ ID NO: 5762835 - DNA, 25 bp, Homo sapien
tgtccacttcctggtgggaataccc

SEQ ID NO: 5762836 - DNA, 25 bp, Homo sapien
ttgttgctcagggccatgataacca

SEQ ID NO: 5762837 - DNA, 25 bp, Homo sapien
catctggtcaggcctcctcttgagt

SEQ ID NO: 5762838 - DNA, 25 bp, Homo sapien
caggcctcctcttgagtctgcttcc

SEQ ID NO: 5762839 - DNA, 25 bp, Homo sapien
gctgcttgacagggctgcttctgat

SEQ ID NO: 5762840 - DNA, 25 bp, Homo sapien
tgcggatccatgtccacctcggtcc

SEQ ID NO: 5762841 - DNA, 25 bp, Homo sapien
ccggggatcctgggactcgcgttct

SEQ ID NO: 5762842 - DNA, 25 bp, Homo sapien
cgcacggctccggccgctaccagcc

SEQ ID NO: 5762843 - DNA, 25 bp, Homo sapien
taggtcacataactgaccctttaag

SEQ ID NO: 5762844 - DNA, 25 bp, Homo sapien
gcgccgggggaatgcagtggaagag

SEQ ID NO: 5762845 - DNA, 25 bp, Homo sapien
gtgccagacttctggacaggaacag

SEQ ID NO: 5762846 - DNA, 25 bp, Homo sapien
catccagggctgactggacaagcat

SEQ ID NO: 5762847 - DNA, 25 bp, Homo sapien
ctggcgggccagatgaagcagggcg

SEQ ID NO: 5762848 - DNA, 25 bp, Homo sapien
gcaccctccagcaaccctcccaccc

SEQ ID NO: 5762849 - DNA, 25 bp, Homo sapien
ccctcctgcgtgctcagccgctctt

SEQ ID NO: 5762850 - DNA, 25 bp, Homo sapien
gaggatcagagggcccaccagggcc

SEQ ID NO: 5762851 - DNA, 25 bp, Homo sapien
tgttgcccttgagttcctgcagctg

SEQ ID NO: 5762852 - DNA, 25 bp, Homo sapien
cttgacagggctgcttctgatgtct

SEQ ID NO: 5762853 - DNA, 25 bp, Homo sapien
cactcagggtcccacgccgctcgtc

SEQ ID NO: 5762854 - DNA, 25 bp, Homo sapien
agccggggtcaagtcgctcactccc

SEQ ID NO: 5762855 - DNA, 25 bp, Homo sapien
gccagagggaaacaggaggaggcca

SEQ ID NO: 5762856 - DNA, 25 bp, Homo sapien
atcgagcattggtgacagtgagctc

SEQ ID NO: 5762857 - DNA, 25 bp, Homo sapien
gcaaagatgcatactggatagccat

SEQ ID NO: 5762858 - DNA, 25 bp, Homo sapien
tctgagctggtcctgaagctgctgg

SEQ ID NO: 5762859 - DNA, 25 bp, Homo sapien
tcacataactgaccctttaagtccc

SEQ ID NO: 5762860 - DNA, 25 bp, Homo sapien
ggaacacctgatgtgccagacttct

SEQ ID NO: 5762861 - DNA, 25 bp, Homo sapien
cagacttctggacaggaacagcagg

SEQ ID NO: 5762862 - DNA, 25 bp, Homo sapien
tccaacgtttgagtcctctcacggc

SEQ ID NO: 5762863 - DNA, 25 bp, Homo sapien
ggagacgttctcttccagtggagaa

SEQ ID NO: 5762864 - DNA, 25 bp, Homo sapien
ccgtttcttctcaggctccaggcca

SEQ ID NO: 5762865 - DNA, 25 bp, Homo sapien
tctctgagctggtcctgaagctgct

SEQ ID NO: 5762866 - DNA, 25 bp, Homo sapien
gacagtctcattgtagatctctacg

SEQ ID NO: 5762867 - DNA, 25 bp, Homo sapien
agcatggcaatctcttcaaacactt

SEQ ID NO: 5762868 - DNA, 25 bp, Homo sapien
aggctaaggcgggttggaggatcag

SEQ ID NO: 5762869 - DNA, 25 bp, Homo sapien
atacccggtcaaaggaaaaatcatg

SEQ ID NO: 5762870 - DNA, 25 bp, Homo sapien
ccatgaagacgttcttcccgctcag

SEQ ID NO: 5762871 - DNA, 25 bp, Homo sapien
ggatcagagggcccaccagggccag

SEQ ID NO: 5762872 - DNA, 25 bp, Homo sapien
ggttcttcaaccctgtggcaatagc

SEQ ID NO: 5762873 - DNA, 25 bp, Homo sapien
taaggcacgtgggactccttgttgc

SEQ ID NO: 5762874 - DNA, 25 bp, Homo sapien
agacgttctcttccagtggagaaat

SEQ ID NO: 5762875 - DNA, 25 bp, Homo sapien
tagttctgcatttaggtcacataac

SEQ ID NO: 5762876 - DNA, 25 bp, Homo sapien
ttaatggcctgtgtttcccgaaggc

SEQ ID NO: 5762877 - DNA, 25 bp, Homo sapien
ggtcccacacgcgccgggggaatgc

SEQ ID NO: 5762878 - DNA, 25 bp, Homo sapien
ctttatttgatagccctgggacatg

SEQ ID NO: 5762879 - DNA, 25 bp, Homo sapien
ggcgaggtgggggagctggtgcccc

SEQ ID NO: 5762880 - DNA, 25 bp, Homo sapien
ctcagccgctcttccagctccagga

SEQ ID NO: 5762881 - DNA, 25 bp, Homo sapien
gccctgctcagcctgggcctgtacc

SEQ ID NO: 5762882 - DNA, 25 bp, Homo sapien
ccagccctgaccactcagctcctga

SEQ ID NO: 5762883 - DNA, 25 bp, Homo sapien
ggcccaccctccattgtgaaggtct

SEQ ID NO: 5762884 - DNA, 25 bp, Homo sapien
gcagggcccgagggatcagcccctc

SEQ ID NO: 5762885 - DNA, 25 bp, Homo sapien
gtcgctcactcccggccaggtccac

SEQ ID NO: 5762886 - DNA, 25 bp, Homo sapien
gagagttgagggactcggagacgtt

SEQ ID NO: 5762887 - DNA, 25 bp, Homo sapien
gttctcttggtccaacgtttgagtc

SEQ ID NO: 5762888 - DNA, 25 bp, Homo sapien
catggcaatctcttcaaacacttca

SEQ ID NO: 5762889 - DNA, 25 bp, Homo sapien
tctgggctgtgcgggccacagcccg

SEQ ID NO: 5762890 - DNA, 25 bp, Homo sapien
tcctgcagctggttgtgcagtcgcc

SEQ ID NO: 5762891 - DNA, 25 bp, Homo sapien
tgttccggtaaggcacgtgggactc

SEQ ID NO: 5762892 - DNA, 25 bp, Homo sapien
ccagtggagaaatgttcacaaacat

SEQ ID NO: 5762893 - DNA, 25 bp, Homo sapien
ctcctgcgtgctcagccgctcttcc

SEQ ID NO: 5762894 - DNA, 25 bp, Homo sapien
ctacaaagctgtaggtccagccctg

SEQ ID NO: 5762895 - DNA, 25 bp, Homo sapien
ctgcaattccacctgttttttctga

SEQ ID NO: 5762896 - DNA, 25 bp, Homo sapien
ccgctcgtcagaccgggagaggcta

SEQ ID NO: 5762897 - DNA, 25 bp, Homo sapien
ttgggtgggatgtggtaattttggt

SEQ ID NO: 5762898 - DNA, 25 bp, Homo sapien
aatacacggatgttgcccttgagtt

SEQ ID NO: 5762899 - DNA, 25 bp, Homo sapien
tgatgaccgttcattctgggctgtg

SEQ ID NO: 5762900 - DNA, 25 bp, Homo sapien
cctgcgtgctcagccgctcttccag

SEQ ID NO: 5762901 - DNA, 25 bp, Homo sapien
aggaaaaatcatggcgaggtggggg

SEQ ID NO: 5762902 - DNA, 25 bp, Homo sapien
acgcgccgggggaatgcagtggaag

SEQ ID NO: 5762903 - DNA, 25 bp, Homo sapien
tgtggtaattttggtcgttgcaccc

SEQ ID NO: 5762904 - DNA, 25 bp, Homo sapien
ccaccagggccagagggaaacagga

SEQ ID NO: 5762905 - DNA, 25 bp, Homo sapien
ccactcagctcctgagccacagaga

SEQ ID NO: 5762906 - DNA, 25 bp, Homo sapien
atactggatagccatccagggctga

SEQ ID NO: 5762907 - DNA, 25 bp, Homo sapien
atcttccatctggtcaggcctcctc

SEQ ID NO: 5762908 - DNA, 25 bp, Homo sapien
gtaggtcagtttgctgttccggtaa

SEQ ID NO: 5762909 - DNA, 25 bp, Homo sapien
aataaagcaccctccagcaaccctc

SEQ ID NO: 5762910 - DNA, 25 bp, Homo sapien
caggacacaagcacgcaagttcttc

SEQ ID NO: 5762911 - DNA, 25 bp, Homo sapien
tctggccttgtgtctgtggcactgt

SEQ ID NO: 5762912 - DNA, 25 bp, Homo sapien
agaggctaaggcgggttggaggatc

SEQ ID NO: 5762913 - DNA, 25 bp, Homo sapien
taaagcaccctccagcaaccctccc

SEQ ID NO: 5762914 - DNA, 25 bp, Homo sapien
cattggtgacagtgagctcctcact

SEQ ID NO: 5762915 - DNA, 25 bp, Homo sapien
tggctaaatgcccctccagtgttgt

SEQ ID NO: 5762916 - DNA, 25 bp, Homo sapien
aattccacctgttttttctgaagct

SEQ ID NO: 5762917 - DNA, 25 bp, Homo sapien
gccacagtctcctgccgcagagatg

SEQ ID NO: 5762918 - DNA, 25 bp, Homo sapien
cctggccctgcacggcgaatctcac

SEQ ID NO: 5762919 - DNA, 25 bp, Homo sapien
acatatcgagcattggtgacagtga

SEQ ID NO: 5762920 - DNA, 25 bp, Homo sapien
atctctacgtagcttgctacaaagc

SEQ ID NO: 5762921 - DNA, 25 bp, Homo sapien
tctgcagcaggtaggtcagtttgct

SEQ ID NO: 5762922 - DNA, 25 bp, Homo sapien
ggaggccagggggtggagtgggctc

SEQ ID NO: 5762923 - DNA, 25 bp, Homo sapien
tctgcggatccatgtccacctcggt

SEQ ID NO: 5762924 - DNA, 25 bp, Homo sapien
gttcttcagctcctgttggccctgc

SEQ ID NO: 5762925 - DNA, 25 bp, Homo sapien
gggccagagggaaacaggaggaggc

SEQ ID NO: 5762926 - DNA, 25 bp, Homo sapien
gcccttgagttcctgcagctggttg

SEQ ID NO: 5762927 - DNA, 25 bp, Homo sapien
ccgttcattctgggctgtgcgggcc

SEQ ID NO: 5762928 - DNA, 25 bp, Homo sapien
tctcgcccgctcgcgaagcagggta

SEQ ID NO: 5762929 - DNA, 25 bp, Homo sapien
acacacacacacacacagatctgga

SEQ ID NO: 5762930 - DNA, 25 bp, Homo sapien
ttttggtcgttgcacccaggcctct

SEQ ID NO: 5762931 - DNA, 25 bp, Homo sapien
gtttcttctcaggctccaggccatc

SEQ ID NO: 5762932 - DNA, 25 bp, Homo sapien
ttgctgggtttcttccctcctgcca

SEQ ID NO: 5762933 - DNA, 25 bp, Homo sapien
aggtcccggacagtctcattgtaga

SEQ ID NO: 5762934 - DNA, 25 bp, Homo sapien
tccagtgttgtgcgctctgtcccca

SEQ ID NO: 5762935 - DNA, 25 bp, Homo sapien
cggcgctccatttctagcccatgaa

SEQ ID NO: 5762936 - DNA, 25 bp, Homo sapien
tcaggctccaggccatcttccatct

SEQ ID NO: 5762937 - DNA, 25 bp, Homo sapien
gcccgattctggcgggccagatgaa

SEQ ID NO: 5762938 - DNA, 25 bp, Homo sapien
atcctgtccacttcctggtgggaat

SEQ ID NO: 5762939 - DNA, 25 bp, Homo sapien
accaataacacactggttcaccttg

SEQ ID NO: 5762940 - DNA, 25 bp, Homo sapien
ctgtcttcttggaaactttttgagc

SEQ ID NO: 5762941 - DNA, 25 bp, Homo sapien
gcagaatacacggatgttgcccttg

SEQ ID NO: 5762942 - DNA, 25 bp, Homo sapien
aaacaggaggaggccagggggtgga

SEQ ID NO: 5762943 - DNA, 25 bp, Homo sapien
ctgtaggtccagccctgaccactca

SEQ ID NO: 5762944 - DNA, 25 bp, Homo sapien
aggctggacgtttgctgggtttctt

SEQ ID NO: 5762945 - DNA, 25 bp, Homo sapien
tctctcgcccgctcgcgaagcaggg

SEQ ID NO: 5762946 - DNA, 25 bp, Homo sapien
catgtccacctcggtcccacacgcg

SEQ ID NO: 5762947 - DNA, 25 bp, Homo sapien
ctcggctggagtgctccccagaaat

SEQ ID NO: 5762948 - DNA, 25 bp, Homo sapien
cccgagggatcagcccctccaactg

SEQ ID NO: 5762949 - DNA, 25 bp, Homo sapien
aaactattctttatttgatagccct

SEQ ID NO: 5762950 - DNA, 25 bp, Homo sapien
cttctcaggctccaggccatcttcc

SEQ ID NO: 5762951 - DNA, 25 bp, Homo sapien
caaagcaaagtagtcgagtacctct

SEQ ID NO: 5762952 - DNA, 25 bp, Homo sapien
cattaaggcatacagcctgatctag

SEQ ID NO: 5762953 - DNA, 25 bp, Homo sapien
gaatttgctgagttctatgaaactt

SEQ ID NO: 5762954 - DNA, 25 bp, Homo sapien
gatgacccttatagtgggcaccaat

SEQ ID NO: 5762955 - DNA, 25 bp, Homo sapien
tcatttttgcttgcaaatggctttg

SEQ ID NO: 5762956 - DNA, 25 bp, Homo sapien
gtgatcctactaggtaaactggttc

SEQ ID NO: 5762957 - DNA, 25 bp, Homo sapien
tttacatcgaaacttcttgaccgag

SEQ ID NO: 5762958 - DNA, 25 bp, Homo sapien
ggaggatgtagatgagccacctgtc

SEQ ID NO: 5762959 - DNA, 25 bp, Homo sapien
cacgcggaggcgctcatccacccca

SEQ ID NO: 5762960 - DNA, 25 bp, Homo sapien
tgtgaaacttgctcgtgtctttgct

SEQ ID NO: 5762961 - DNA, 25 bp, Homo sapien
tatttttcagttgaatcagaaacag

SEQ ID NO: 5762962 - DNA, 25 bp, Homo sapien
aaacttgctcgtgtctttgcttgcc

SEQ ID NO: 5762963 - DNA, 25 bp, Homo sapien
ctttaccattcaagacaacaaagac

SEQ ID NO: 5762964 - DNA, 25 bp, Homo sapien
gagaatctgtgctgtacgatgtgaa

SEQ ID NO: 5762965 - DNA, 25 bp, Homo sapien
atgtcaacgacaaccctccccgatt

SEQ ID NO: 5762966 - DNA, 25 bp, Homo sapien
ccaccaagaggctggacagggaaga

SEQ ID NO: 5762967 - DNA, 25 bp, Homo sapien
gcggcggcggaggcaggagcagcct

SEQ ID NO: 5762968 - DNA, 25 bp, Homo sapien
tggtgaggggctcacactgttactg

SEQ ID NO: 5762969 - DNA, 25 bp, Homo sapien
gaaatggttcgatttttacatcgaa

SEQ ID NO: 5762970 - DNA, 25 bp, Homo sapien
caaaaaggagctggatgtggaatca

SEQ ID NO: 5762971 - DNA, 25 bp, Homo sapien
tcgacggtgccatcagcatgagaac

SEQ ID NO: 5762972 - DNA, 25 bp, Homo sapien
ggttctccctgcctcctatctcccc

SEQ ID NO: 5762973 - DNA, 25 bp, Homo sapien
caggccaccaagaggctggacaggg

SEQ ID NO: 5762974 - DNA, 25 bp, Homo sapien
gaaggaggaatgaggctggatacgg

SEQ ID NO: 5762975 - DNA, 25 bp, Homo sapien
tgtgcccttttcatttcattcgttg

SEQ ID NO: 5762976 - DNA, 25 bp, Homo sapien
agtagtcgagtacctctatatatta

SEQ ID NO: 5762977 - DNA, 25 bp, Homo sapien
tatctccccatggtgaggggctcac

SEQ ID NO: 5762978 - DNA, 25 bp, Homo sapien
agccaaggatatgggcggccagatg

SEQ ID NO: 5762979 - DNA, 25 bp, Homo sapien
aagatgctcagataaacaccacaat

SEQ ID NO: 5762980 - DNA, 25 bp, Homo sapien
gacagccctatttttcagttgaatc

SEQ ID NO: 5762981 - DNA, 25 bp, Homo sapien
tttcagacaacgactacccagttca

SEQ ID NO: 5762982 - DNA, 25 bp, Homo sapien
tctatatattaaagttctagatgtc

SEQ ID NO: 5762983 - DNA, 25 bp, Homo sapien
ttaagcgtctggcatggagtgtatg

SEQ ID NO: 5762984 - DNA, 25 bp, Homo sapien
cctgggcgggtcgcagggtctccgc

SEQ ID NO: 5762985 - DNA, 25 bp, Homo sapien
ggcatacagcctgatctaggtgagt

SEQ ID NO: 5762986 - DNA, 25 bp, Homo sapien
tggtggaggatgtagatgagccacc

SEQ ID NO: 5762987 - DNA, 25 bp, Homo sapien
agatctcttcattattaatgaaaac

SEQ ID NO: 5762988 - DNA, 25 bp, Homo sapien
aatggttcgatttttacatcgaaac

SEQ ID NO: 5762989 - DNA, 25 bp, Homo sapien
aaagtagtcgagtacctctatatat

SEQ ID NO: 5762990 - DNA, 25 bp, Homo sapien
ttgcttgcccaggaagcaaagaatc

SEQ ID NO: 5762991 - DNA, 25 bp, Homo sapien
ttctcctggaggaatacacaggatc

SEQ ID NO: 5762992 - DNA, 25 bp, Homo sapien
tagatgagccacctgtcttcagcaa

SEQ ID NO: 5762993 - DNA, 25 bp, Homo sapien
aagattcagccacggttagaattgt

SEQ ID NO: 5762994 - DNA, 25 bp, Homo sapien
cgggggctctggttgccatccttct

SEQ ID NO: 5762995 - DNA, 25 bp, Homo sapien
cccccagagtacataccagtttaaa

SEQ ID NO: 5762996 - DNA, 25 bp, Homo sapien
tgggcgggtcgcagggtctccgcgg

SEQ ID NO: 5762997 - DNA, 25 bp, Homo sapien
gagagccaagcaaagaacattaagg

SEQ ID NO: 5762998 - DNA, 25 bp, Homo sapien
agagccggcgaccgcggcggcggcg

SEQ ID NO: 5762999 - DNA, 25 bp, Homo sapien
tactgagaatctgtgctgtacgatg

SEQ ID NO: 5763000 - DNA, 25 bp, Homo sapien
ggatatgggcggccagatgggagga

SEQ ID NO: 5763001 - DNA, 25 bp, Homo sapien
tctatcagactgggaatgaatctcg

SEQ ID NO: 5763002 - DNA, 25 bp, Homo sapien
gattatcagtatgtgggcaagttac

SEQ ID NO: 5763003 - DNA, 25 bp, Homo sapien
ggagcccgagtctgaattcatcatc

SEQ ID NO: 5763004 - DNA, 25 bp, Homo sapien
aaagtggaagcctccaatccttatg

SEQ ID NO: 5763005 - DNA, 25 bp, Homo sapien
actgtccgggtctgtgcatgtgacc

SEQ ID NO: 5763006 - DNA, 25 bp, Homo sapien
gcactgggacagtgactgtccgggt

SEQ ID NO: 5763007 - DNA, 25 bp, Homo sapien
gcagcctgggcgggtcgcagggtct

SEQ ID NO: 5763008 - DNA, 25 bp, Homo sapien
tatcctttcaggagatggagcagga

SEQ ID NO: 5763009 - DNA, 25 bp, Homo sapien
ctataaacagaaggacagggagacc

SEQ ID NO: 5763010 - DNA, 25 bp, Homo sapien
aacggcagagccggcgaccgcggcg

SEQ ID NO: 5763011 - DNA, 25 bp, Homo sapien
agccactgtccctgaaatgtctgat

SEQ ID NO: 5763012 - DNA, 25 bp, Homo sapien
gtgaactcatttttgcttgcaaatg

SEQ ID NO: 5763013 - DNA, 25 bp, Homo sapien
cattcagaccaggatagaggagatg

SEQ ID NO: 5763014 - DNA, 25 bp, Homo sapien
cactgctatggcacaacattacagt

SEQ ID NO: 5763015 - DNA, 25 bp, Homo sapien
ttctccaccggggacaccaattggc

SEQ ID NO: 5763016 - DNA, 25 bp, Homo sapien
ggagcagtaccaagtggtgattcaa

SEQ ID NO: 5763017 - DNA, 25 bp, Homo sapien
atttttgcttgcaaatggctttgga

SEQ ID NO: 5763018 - DNA, 25 bp, Homo sapien
gccagcgatgctgatgtgggagaaa

SEQ ID NO: 5763019 - DNA, 25 bp, Homo sapien
gtcaagtactctgtagatcgacaca

SEQ ID NO: 5763020 - DNA, 25 bp, Homo sapien
tcggaaaaatggctataatagacac

SEQ ID NO: 5763021 - DNA, 25 bp, Homo sapien
cacagcccaagatccagatgctgcc

SEQ ID NO: 5763022 - DNA, 25 bp, Homo sapien
tatattaaagttctagatgtcaatg

SEQ ID NO: 5763023 - DNA, 25 bp, Homo sapien
tcgtgatcctactaggtaaactggt

SEQ ID NO: 5763024 - DNA, 25 bp, Homo sapien
gtctgatgtcggtacatttgttgtc

SEQ ID NO: 5763025 - DNA, 25 bp, Homo sapien
cagatgtgaaacttgctcgtgtctt

SEQ ID NO: 5763026 - DNA, 25 bp, Homo sapien
tgagaacttaccgctacttcttgct

SEQ ID NO: 5763027 - DNA, 25 bp, Homo sapien
caacattgattctggaaatggttcg

SEQ ID NO: 5763028 - DNA, 25 bp, Homo sapien
ttgtccaagtcactgcgacggatgc

SEQ ID NO: 5763029 - DNA, 25 bp, Homo sapien
ttgattcagaccttgcatgctgttg

SEQ ID NO: 5763030 - DNA, 25 bp, Homo sapien
gcaatcctgccacgcggaggcgctc

SEQ ID NO: 5763031 - DNA, 25 bp, Homo sapien
caaagccagcgatgctgatgtggga

SEQ ID NO: 5763032 - DNA, 25 bp, Homo sapien
accgtgaacatcacactgactgatg

SEQ ID NO: 5763033 - DNA, 25 bp, Homo sapien
gcaacataaatgtgcccttttcatt

SEQ ID NO: 5763034 - DNA, 25 bp, Homo sapien
ttgctcgtgtctttgcttgcccagg

SEQ ID NO: 5763035 - DNA, 25 bp, Homo sapien
cttggaaaacgttgttaagcgtctg

SEQ ID NO: 5763036 - DNA, 25 bp, Homo sapien
ggccctggagctctctggaaacagc

SEQ ID NO: 5763037 - DNA, 25 bp, Homo sapien
cactacgcacagactcgacggtgcc

SEQ ID NO: 5763038 - DNA, 25 bp, Homo sapien
aaaatgctgaaattgagtacagcat

SEQ ID NO: 5763039 - DNA, 25 bp, Homo sapien
aagttgtctacagtattctacaggg

SEQ ID NO: 5763040 - DNA, 25 bp, Homo sapien
gaatctcgggggatttcagggcaac

SEQ ID NO: 5763041 - DNA, 25 bp, Homo sapien
ctgcctcccccattaaggcatacag

SEQ ID NO: 5763042 - DNA, 25 bp, Homo sapien
agggagacccgtggagcccgagtct

SEQ ID NO: 5763043 - DNA, 25 bp, Homo sapien
cataaatgtgcccttttcatttcat

SEQ ID NO: 5763044 - DNA, 25 bp, Homo sapien
tggcccctgaagcagccagtggctc

SEQ ID NO: 5763045 - DNA, 25 bp, Homo sapien
atctcgggggatttcagggcaacat

SEQ ID NO: 5763046 - DNA, 25 bp, Homo sapien
gccaggaatcctgtcaagtactctg

SEQ ID NO: 5763047 - DNA, 25 bp, Homo sapien
gtatacccttaaagtggaagcctcc

SEQ ID NO: 5763048 - DNA, 25 bp, Homo sapien
ggtattatcaagacagctttgctca

SEQ ID NO: 5763049 - DNA, 25 bp, Homo sapien
aatagacacgagatgagcacctatc

SEQ ID NO: 5763050 - DNA, 25 bp, Homo sapien
cagtgctaaagttgtctacagtatt

SEQ ID NO: 5763051 - DNA, 25 bp, Homo sapien
agcaaagaatctcttgtctatcaga

SEQ ID NO: 5763052 - DNA, 25 bp, Homo sapien
gcggccagatgggaggattatctgg

SEQ ID NO: 5763053 - DNA, 25 bp, Homo sapien
tgctgatgtgggagaaaatgctgaa

SEQ ID NO: 5763054 - DNA, 25 bp, Homo sapien
aatgctgaaattgagtacagcatca

SEQ ID NO: 5763055 - DNA, 25 bp, Homo sapien
tctgtgcatcgtgatcctactaggt

SEQ ID NO: 5763056 - DNA, 25 bp, Homo sapien
caaagacaacacggcgggaatctta

SEQ ID NO: 5763057 - DNA, 25 bp, Homo sapien
aaaaaggcacttccaagagtggggc

SEQ ID NO: 5763058 - DNA, 25 bp, Homo sapien
tgaattcatcatcaagatccatgac

SEQ ID NO: 5763059 - DNA, 25 bp, Homo sapien
acagcaaaaatgagctgaaccgttc

SEQ ID NO: 5763060 - DNA, 25 bp, Homo sapien
tgtggtggaggatgtagatgagcca

SEQ ID NO: 5763061 - DNA, 25 bp, Homo sapien
atgacatcaatgacaatgaaccaat

SEQ ID NO: 5763062 - DNA, 25 bp, Homo sapien
ggagcaggagatctcttcattatta

SEQ ID NO: 5763063 - DNA, 25 bp, Homo sapien
cccccattaaggcatacagcctgat

SEQ ID NO: 5763064 - DNA, 25 bp, Homo sapien
catacaggccaccaagaggctggac

SEQ ID NO: 5763065 - DNA, 25 bp, Homo sapien
ttcccccagagtacataccagttta

SEQ ID NO: 5763066 - DNA, 25 bp, Homo sapien
atccttatgttgagccacgatttct

SEQ ID NO: 5763067 - DNA, 25 bp, Homo sapien
gaaaagggccctggagctctctgga

SEQ ID NO: 5763068 - DNA, 25 bp, Homo sapien
tccagatgctgccaggaatcctgtc

SEQ ID NO: 5763069 - DNA, 25 bp, Homo sapien
gcgggaatcttaactcggaaaaatg

SEQ ID NO: 5763070 - DNA, 25 bp, Homo sapien
ttcaggagatggagcaggagatctc

SEQ ID NO: 5763071 - DNA, 25 bp, Homo sapien
gtccaagtcactgcgacggatgcag

SEQ ID NO: 5763072 - DNA, 25 bp, Homo sapien
aacttaccgctacttcttgctgctc

SEQ ID NO: 5763073 - DNA, 25 bp, Homo sapien
gtggaggatgtagatgagccacctg

SEQ ID NO: 5763074 - DNA, 25 bp, Homo sapien
atctcttgtctatcagactgggaat

SEQ ID NO: 5763075 - DNA, 25 bp, Homo sapien
aatgaacagatgtgaaacttgctcg

SEQ ID NO: 5763076 - DNA, 25 bp, Homo sapien
ctgatgtgggagaaaatgctgaaat

SEQ ID NO: 5763077 - DNA, 25 bp, Homo sapien
gtcatttcagacaacgactacccag

SEQ ID NO: 5763078 - DNA, 25 bp, Homo sapien
tttgggtgggccagccctacccaac

SEQ ID NO: 5763079 - DNA, 25 bp, Homo sapien
gaatgaatctcgggggatttcaggg

SEQ ID NO: 5763080 - DNA, 25 bp, Homo sapien
gaatcagaaacaggtattatcaaga

SEQ ID NO: 5763081 - DNA, 25 bp, Homo sapien
tacttggaaaacgttgttaagcgtc

SEQ ID NO: 5763082 - DNA, 25 bp, Homo sapien
cggggacaccaattggcagaatcaa

SEQ ID NO: 5763083 - DNA, 25 bp, Homo sapien
ctcaagctataaacagaaggacagg

SEQ ID NO: 5763084 - DNA, 25 bp, Homo sapien
gattcaagccaaggatatgggcggc

SEQ ID NO: 5763085 - DNA, 25 bp, Homo sapien
catatgggaacagtgctaaagttgt

SEQ ID NO: 5763086 - DNA, 25 bp, Homo sapien
aaggcatacagcctgatctaggtga

SEQ ID NO: 5763087 - DNA, 25 bp, Homo sapien
ccgtcacagcccaagatccagatgc

SEQ ID NO: 5763088 - DNA, 25 bp, Homo sapien
catggtgaggggctcacactgttac

SEQ ID NO: 5763089 - DNA, 25 bp, Homo sapien
ttctccctgcctcctatctccccat

SEQ ID NO: 5763090 - DNA, 25 bp, Homo sapien
atgtgaactcatttttgcttgcaaa

SEQ ID NO: 5763091 - DNA, 25 bp, Homo sapien
tgctgaaattgagtacagcatcaca

SEQ ID NO: 5763092 - DNA, 25 bp, Homo sapien
ccacaataggctccgtcacagccca

SEQ ID NO: 5763093 - DNA, 25 bp, Homo sapien
cagaccaggatagaggagatggatc

SEQ ID NO: 5763094 - DNA, 25 bp, Homo sapien
acgggaacatgcaatcctgccacgc

SEQ ID NO: 5763095 - DNA, 25 bp, Homo sapien
cacactgttactgtgacactctaga

SEQ ID NO: 5763096 - DNA, 25 bp, Homo sapien
acagggagacccgtggagcccgagt

SEQ ID NO: 5763097 - DNA, 25 bp, Homo sapien
aatgaggctggatacggtgcagtga

SEQ ID NO: 5763098 - DNA, 25 bp, Homo sapien
gtacataccagtttaaaactcctga

SEQ ID NO: 5763099 - DNA, 25 bp, Homo sapien
ccagccctacccaactctctcaact

SEQ ID NO: 5763100 - DNA, 25 bp, Homo sapien
caacgccccagaatttgctgagttc

SEQ ID NO: 5763101 - DNA, 25 bp, Homo sapien
caaagaggactagtggtttcccagc

SEQ ID NO: 5763102 - DNA, 25 bp, Homo sapien
gcagggtctccgcgggcgcaggaag

SEQ ID NO: 5763103 - DNA, 25 bp, Homo sapien
atggctttggaaaatgaacagatgt

SEQ ID NO: 5763104 - DNA, 25 bp, Homo sapien
aacccaggaagggattataactgtc

SEQ ID NO: 5763105 - DNA, 25 bp, Homo sapien
acagcatcacagacggtgaggggct

SEQ ID NO: 5763106 - DNA, 25 bp, Homo sapien
acaacgactacccagttcaaagcag

SEQ ID NO: 5763107 - DNA, 25 bp, Homo sapien
ggccagatgggaggattatctggga

SEQ ID NO: 5763108 - DNA, 25 bp, Homo sapien
ctccctgcctcctatctccccatgg

SEQ ID NO: 5763109 - DNA, 25 bp, Homo sapien
gtttaaaactcctgaatcttctcca

SEQ ID NO: 5763110 - DNA, 25 bp, Homo sapien
cgacagcaagaacggcagagccggc

SEQ ID NO: 5763111 - DNA, 25 bp, Homo sapien
gctcttggactttgaaaagaagaaa

SEQ ID NO: 5763112 - DNA, 25 bp, Homo sapien
cttacaaataagagaagatgctcag

SEQ ID NO: 5763113 - DNA, 25 bp, Homo sapien
tagtcgagtacctctatatattaaa

SEQ ID NO: 5763114 - DNA, 25 bp, Homo sapien
tcagacaacgactacccagttcaaa

SEQ ID NO: 5763115 - DNA, 25 bp, Homo sapien
ttctagatgtcaatgacaacgcccc

SEQ ID NO: 5763116 - DNA, 25 bp, Homo sapien
aaatgtctgatgtcggtacatttgt

SEQ ID NO: 5763117 - DNA, 25 bp, Homo sapien
cagtggctcaaactttaccattcaa

SEQ ID NO: 5763118 - DNA, 25 bp, Homo sapien
acagagatcaataatccaaagcaaa

SEQ ID NO: 5763119 - DNA, 25 bp, Homo sapien
gaaaacgttgttaagcgtctggcat

SEQ ID NO: 5763120 - DNA, 25 bp, Homo sapien
ttgccatccttctgtgcatcgtgat

SEQ ID NO: 5763121 - DNA, 25 bp, Homo sapien
atgctgttgacaaggatgaccctta

SEQ ID NO: 5763122 - DNA, 25 bp, Homo sapien
tacatttgttgtccaagtcactgcg

SEQ ID NO: 5763123 - DNA, 25 bp, Homo sapien
ccgtggagcccgagtctgaattcat

SEQ ID NO: 5763124 - DNA, 25 bp, Homo sapien
aacaccacaataggctccgtcacag

SEQ ID NO: 5763125 - DNA, 25 bp, Homo sapien
agactgggaatgaatctcgggggat

SEQ ID NO: 5763126 - DNA, 25 bp, Homo sapien
tgaaatgtctgatgtcggtacattt

SEQ ID NO: 5763127 - DNA, 25 bp, Homo sapien
tccgcgggcgcaggaaggcgagcag

SEQ ID NO: 5763128 - DNA, 25 bp, Homo sapien
gatgatccaacatatgggaacagtg

SEQ ID NO: 5763129 - DNA, 25 bp, Homo sapien
cgcaggaaggcgagcagagatatcc

SEQ ID NO: 5763130 - DNA, 25 bp, Homo sapien
ccagatgggaggattatctgggacc

SEQ ID NO: 5763131 - DNA, 25 bp, Homo sapien
acagggagcagtaccaagtggtgat

SEQ ID NO: 5763132 - DNA, 25 bp, Homo sapien
ttttgcttgcaaatggctttggaaa

SEQ ID NO: 5763133 - DNA, 25 bp, Homo sapien
tcgttttccttggcccctgaagcag

SEQ ID NO: 5763134 - DNA, 25 bp, Homo sapien
attctacagggacagccctattttt

SEQ ID NO: 5763135 - DNA, 25 bp, Homo sapien
tgcagatgatccaacatatgggaac

SEQ ID NO: 5763136 - DNA, 25 bp, Homo sapien
aaatggctttggaaaatgaacagat

SEQ ID NO: 5763137 - DNA, 25 bp, Homo sapien
ccaccggggacaccaattggcagaa

SEQ ID NO: 5763138 - DNA, 25 bp, Homo sapien
ggatcacttaaatatatcctttcag

SEQ ID NO: 5763139 - DNA, 25 bp, Homo sapien
agtctgaattcatcatcaagatcca

SEQ ID NO: 5763140 - DNA, 25 bp, Homo sapien
ttataactgtcaaaaagctcttgga

SEQ ID NO: 5763141 - DNA, 25 bp, Homo sapien
gacaacgccccagaatttgctgagt

SEQ ID NO: 5763142 - DNA, 25 bp, Homo sapien
agaacttaccgctacttcttgctgc

SEQ ID NO: 5763143 - DNA, 25 bp, Homo sapien
gcctcctatctccccatggtgaggg

SEQ ID NO: 5763144 - DNA, 25 bp, Homo sapien
tctacagtattctacagggacagcc

SEQ ID NO: 5763145 - DNA, 25 bp, Homo sapien
tgaggtccctttctataaaggtaaa

SEQ ID NO: 5763146 - DNA, 25 bp, Homo sapien
agcagccagtggctcaaactttacc

SEQ ID NO: 5763147 - DNA, 25 bp, Homo sapien
tgatccaacatatgggaacagtgct

SEQ ID NO: 5763148 - DNA, 25 bp, Homo sapien
ctggttgccatccttctgtgcatcg

SEQ ID NO: 5763149 - DNA, 25 bp, Homo sapien
tatctgggaccaccaccgtgaacat

SEQ ID NO: 5763150 - DNA, 25 bp, Homo sapien
ctgccacgcggaggcgctcatccac

SEQ ID NO: 5763151 - DNA, 25 bp, Homo sapien
caagccaaggatatgggcggccaga

SEQ ID NO: 5763152 - DNA, 25 bp, Homo sapien
ggcggcggaggcaggagcagcctgg

SEQ ID NO: 5763153 - DNA, 25 bp, Homo sapien
agatcgacacacagatatggacaga

SEQ ID NO: 5763154 - DNA, 25 bp, Homo sapien
gacacgagatgagcacctatctctt

SEQ ID NO: 5763155 - DNA, 25 bp, Homo sapien
cccagaatttgctgagttctatgaa

SEQ ID NO: 5763156 - DNA, 25 bp, Homo sapien
gattataactgtcaaaaagctcttg

SEQ ID NO: 5763157 - DNA, 25 bp, Homo sapien
aaaagctcttggactttgaaaagaa

SEQ ID NO: 5763158 - DNA, 25 bp, Homo sapien
tgggcaccaattttcgttttccttg

SEQ ID NO: 5763159 - DNA, 25 bp, Homo sapien
aagagtggggcactcactacgcaca

SEQ ID NO: 5763160 - DNA, 25 bp, Homo sapien
cccagttcaaagcagcactgggaca

SEQ ID NO: 5763161 - DNA, 25 bp, Homo sapien
gatgctcagataaacaccacaatag

SEQ ID NO: 5763162 - DNA, 25 bp, Homo sapien
aactggttctccctgcctcctatct

SEQ ID NO: 5763163 - DNA, 25 bp, Homo sapien
taaatatatcctttcaggagatgga

SEQ ID NO: 5763164 - DNA, 25 bp, Homo sapien
tccactatcaaagaggactagtggt

SEQ ID NO: 5763165 - DNA, 25 bp, Homo sapien
ggggatttcagggcaacataaatgt

SEQ ID NO: 5763166 - DNA, 25 bp, Homo sapien
gacaaccctccccgattcccccaga

SEQ ID NO: 5763167 - DNA, 25 bp, Homo sapien
aattgagtacagcatcacagacggt

SEQ ID NO: 5763168 - DNA, 25 bp, Homo sapien
caggagatggagcaggagatctctt

SEQ ID NO: 5763169 - DNA, 25 bp, Homo sapien
tgcccttttcatttcattcgttgtg

SEQ ID NO: 5763170 - DNA, 25 bp, Homo sapien
catgagaacttaccgctacttcttg

SEQ ID NO: 5763171 - DNA, 25 bp, Homo sapien
gtgtatacccttaaagtggaagcct

SEQ ID NO: 5763172 - DNA, 25 bp, Homo sapien
tctgtgaaaaagcaaaggcagatca

SEQ ID NO: 5763173 - DNA, 25 bp, Homo sapien
gaatctcttgtctatcagactggga

SEQ ID NO: 5763174 - DNA, 25 bp, Homo sapien
tgtgcatgtgaccaccacgggaaca

SEQ ID NO: 5763175 - DNA, 25 bp, Homo sapien
cactgcgacggatgcagatgatcca

SEQ ID NO: 5763176 - DNA, 25 bp, Homo sapien
ggtaaactggttctccctgcctcct

SEQ ID NO: 5763177 - DNA, 25 bp, Homo sapien
cagaatcaaagccagcgatgctgat

SEQ ID NO: 5763178 - DNA, 25 bp, Homo sapien
gggaatgaatctcgggggatttcag

SEQ ID NO: 5763179 - DNA, 25 bp, Homo sapien
ctgatgtcggtacatttgttgtcca

SEQ ID NO: 5763180 - DNA, 25 bp, Homo sapien
agcctccaatccttatgttgagcca

SEQ ID NO: 5763181 - DNA, 25 bp, Homo sapien
gaggagatggatcacttaaatatat

SEQ ID NO: 5763182 - DNA, 25 bp, Homo sapien
gagcagcctgggcgggtcgcagggt

SEQ ID NO: 5763183 - DNA, 25 bp, Homo sapien
taaatgtgcccttttcatttcattc

SEQ ID NO: 5763184 - DNA, 25 bp, Homo sapien
aagggattataactgtcaaaaagct

SEQ ID NO: 5763185 - DNA, 25 bp, Homo sapien
ctgagaatctgtgctgtacgatgtg

SEQ ID NO: 5763186 - DNA, 25 bp, Homo sapien
agatgggaggattatctgggaccac

SEQ ID NO: 5763187 - DNA, 25 bp, Homo sapien
cggatgcagatgatccaacatatgg

SEQ ID NO: 5763188 - DNA, 25 bp, Homo sapien
gaaaacacaggcgacatacaggcca

SEQ ID NO: 5763189 - DNA, 25 bp, Homo sapien
cgcgacagcaagaacggcagagccg

SEQ ID NO: 5763190 - DNA, 25 bp, Homo sapien
ggagatggatcacttaaatatatcc

SEQ ID NO: 5763191 - DNA, 25 bp, Homo sapien
gggcaacataaatgtgcccttttca

SEQ ID NO: 5763192 - DNA, 25 bp, Homo sapien
ttggcagaatcaaagccagcgatgc

SEQ ID NO: 5763193 - DNA, 25 bp, Homo sapien
aggggctggatatgtttgatgtcat

SEQ ID NO: 5763194 - DNA, 25 bp, Homo sapien
cccaggaagggattataactgtcaa

SEQ ID NO: 5763195 - DNA, 25 bp, Homo sapien
cttctgtgcatcgtgatcctactag

SEQ ID NO: 5763196 - DNA, 25 bp, Homo sapien
tttgatgtcatcaccgaccaggaaa

SEQ ID NO: 5763197 - DNA, 25 bp, Homo sapien
agcctgggcgggtcgcagggtctcc

SEQ ID NO: 5763198 - DNA, 25 bp, Homo sapien
cccgagtctgaattcatcatcaaga

SEQ ID NO: 5763199 - DNA, 25 bp, Homo sapien
ggattatctgggaccaccaccgtga

SEQ ID NO: 5763200 - DNA, 25 bp, Homo sapien
catggatcgagaaaacagggagcag

SEQ ID NO: 5763201 - DNA, 25 bp, Homo sapien
tctgtgcatgtgaccaccacgggaa

SEQ ID NO: 5763202 - DNA, 25 bp, Homo sapien
acgcacagactcgacggtgccatca

SEQ ID NO: 5763203 - DNA, 25 bp, Homo sapien
accaagtggtgattcaagccaagga

SEQ ID NO: 5763204 - DNA, 25 bp, Homo sapien
actgagcacgggggctctggttgcc

SEQ ID NO: 5763205 - DNA, 25 bp, Homo sapien
gattcccccagagtacataccagtt

SEQ ID NO: 5763206 - DNA, 25 bp, Homo sapien
atcaaagccagcgatgctgatgtgg

SEQ ID NO: 5763207 - DNA, 25 bp, Homo sapien
gtgattcaagccaaggatatgggcg

SEQ ID NO: 5763208 - DNA, 25 bp, Homo sapien
tgctcttttgggtgggccagcccta

SEQ ID NO: 5763209 - DNA, 25 bp, Homo sapien
ggcgagcagagatatcctctgagag

SEQ ID NO: 5763210 - DNA, 25 bp, Homo sapien
caagctataaacagaaggacaggga

SEQ ID NO: 5763211 - DNA, 25 bp, Homo sapien
gtctttgcttgcccaggaagcaaag

SEQ ID NO: 5763212 - DNA, 25 bp, Homo sapien
cttaaatatatcctttcaggagatg

SEQ ID NO: 5763213 - DNA, 25 bp, Homo sapien
gtcactgcgacggatgcagatgatc

SEQ ID NO: 5763214 - DNA, 25 bp, Homo sapien
cctatttttcagttgaatcagaaac

SEQ ID NO: 5763215 - DNA, 25 bp, Homo sapien
aagccagcgatgctgatgtgggaga

SEQ ID NO: 5763216 - DNA, 25 bp, Homo sapien
ctatctcttgcctgtggtcatttca

SEQ ID NO: 5763217 - DNA, 25 bp, Homo sapien
atcagtatgtgggcaagttacattc

SEQ ID NO: 5763218 - DNA, 25 bp, Homo sapien
tattcaccaaggaggtttacacagc

SEQ ID NO: 5763219 - DNA, 25 bp, Homo sapien
cggcggcggcggcggcggaggcagg

SEQ ID NO: 5763220 - DNA, 25 bp, Homo sapien
acagccactgtccctgaaatgtctg

SEQ ID NO: 5763221 - DNA, 25 bp, Homo sapien
gggaggattatctgggaccaccacc

SEQ ID NO: 5763222 - DNA, 25 bp, Homo sapien
catccaccccacgggactgagcacg

SEQ ID NO: 5763223 - DNA, 25 bp, Homo sapien
gtagatcgacacacagatatggaca

SEQ ID NO: 5763224 - DNA, 25 bp, Homo sapien
catccttctgtgcatcgtgatccta

SEQ ID NO: 5763225 - DNA, 25 bp, Homo sapien
ggaatcctgtcaagtactctgtaga

SEQ ID NO: 5763226 - DNA, 25 bp, Homo sapien
ttgctcaacatggatcgagaaaaca

SEQ ID NO: 5763227 - DNA, 25 bp, Homo sapien
atcaagacagctttgctcaacatgg

SEQ ID NO: 5763228 - DNA, 25 bp, Homo sapien
ggtctccgcgggcgcaggaaggcga

SEQ ID NO: 5763229 - DNA, 25 bp, Homo sapien
ttatgttgagccacgatttctctac

SEQ ID NO: 5763230 - DNA, 25 bp, Homo sapien
tgaaacttgctcgtgtctttgcttg

SEQ ID NO: 5763231 - DNA, 25 bp, Homo sapien
ctgtcaaaaagctcttggactttga

SEQ ID NO: 5763232 - DNA, 25 bp, Homo sapien
gaaccgttcaaaaaggagctggatg

SEQ ID NO: 5763233 - DNA, 25 bp, Homo sapien
tcgatttttacatcgaaacttcttg

SEQ ID NO: 5763234 - DNA, 25 bp, Homo sapien
gaaattgagtacagcatcacagacg

SEQ ID NO: 5763235 - DNA, 25 bp, Homo sapien
agaatattcaacattgattctggaa

SEQ ID NO: 5763236 - DNA, 25 bp, Homo sapien
agcagagatatcctctgagagccaa

SEQ ID NO: 5763237 - DNA, 25 bp, Homo sapien
ccctccccgattcccccagagtaca

SEQ ID NO: 5763238 - DNA, 25 bp, Homo sapien
tacattcagaccaggatagaggaga

SEQ ID NO: 5763239 - DNA, 25 bp, Homo sapien
gcaaatggctttggaaaatgaacag

SEQ ID NO: 5763240 - DNA, 25 bp, Homo sapien
ccttatgttgagccacgatttctct

SEQ ID NO: 5763241 - DNA, 25 bp, Homo sapien
aaggcagatcagttgattcagacct

SEQ ID NO: 5763242 - DNA, 25 bp, Homo sapien
ggaaaaatggctataatagacacga

SEQ ID NO: 5763243 - DNA, 25 bp, Homo sapien
ctgttactgtgacactctagattta

SEQ ID NO: 5763244 - DNA, 25 bp, Homo sapien
ctggcctacatcttacaaataagag

SEQ ID NO: 5763245 - DNA, 25 bp, Homo sapien
tcctgtcaagtactctgtagatcga

SEQ ID NO: 5763246 - DNA, 25 bp, Homo sapien
gcagagccggcgaccgcggcggcgg

SEQ ID NO: 5763247 - DNA, 25 bp, Homo sapien
acgttgttaagcgtctggcatggag

SEQ ID NO: 5763248 - DNA, 25 bp, Homo sapien
accagtttaaaactcctgaatcttc

SEQ ID NO: 5763249 - DNA, 25 bp, Homo sapien
ggactgagcacgggggctctggttg

SEQ ID NO: 5763250 - DNA, 25 bp, Homo sapien
tgttgacaaggatgacccttatagt

SEQ ID NO: 5763251 - DNA, 25 bp, Homo sapien
tcctctgagagccaagcaaagaaca

SEQ ID NO: 5763252 - DNA, 25 bp, Homo sapien
caggaaggcgagcagagatatcctc

SEQ ID NO: 5763253 - DNA, 25 bp, Homo sapien
ctcttttgggtgggccagccctacc

SEQ ID NO: 5763254 - DNA, 25 bp, Homo sapien
caagacagctttgctcaacatggat

SEQ ID NO: 5763255 - DNA, 25 bp, Homo sapien
aaagcagcactgggacagtgactgt

SEQ ID NO: 5763256 - DNA, 25 bp, Homo sapien
agttctatgaaacttttgtctgtga

SEQ ID NO: 5763257 - DNA, 25 bp, Homo sapien
ttacagtgatagcaacagagatcaa

SEQ ID NO: 5763258 - DNA, 25 bp, Homo sapien
atttgctgagttctatgaaactttt

SEQ ID NO: 5763259 - DNA, 25 bp, Homo sapien
cagatgctgccaggaatcctgtcaa

SEQ ID NO: 5763260 - DNA, 25 bp, Homo sapien
taaactggttctccctgcctcctat

SEQ ID NO: 5763261 - DNA, 25 bp, Homo sapien
ctgcgacggatgcagatgatccaac

SEQ ID NO: 5763262 - DNA, 25 bp, Homo sapien
ctagatgtcaatgacaacgccccag

SEQ ID NO: 5763263 - DNA, 25 bp, Homo sapien
gatgctgccaggaatcctgtcaagt

SEQ ID NO: 5763264 - DNA, 25 bp, Homo sapien
gttactgtgacactctagatttatc

SEQ ID NO: 5763265 - DNA, 25 bp, Homo sapien
atagcaacagagatcaataatccaa

SEQ ID NO: 5763266 - DNA, 25 bp, Homo sapien
agacaacgactacccagttcaaagc

SEQ ID NO: 5763267 - DNA, 25 bp, Homo sapien
cattattaatgaaaacacaggcgac

SEQ ID NO: 5763268 - DNA, 25 bp, Homo sapien
tgtttgatgtcatcaccgaccagga

SEQ ID NO: 5763269 - DNA, 25 bp, Homo sapien
aggcacttccaagagtggggcactc

SEQ ID NO: 5763270 - DNA, 25 bp, Homo sapien
aggatagaggagatggatcacttaa

SEQ ID NO: 5763271 - DNA, 25 bp, Homo sapien
aaaggcacttccaagagtggggcac

SEQ ID NO: 5763272 - DNA, 25 bp, Homo sapien
gaaacttcttgaccgagaaacactg

SEQ ID NO: 5763273 - DNA, 25 bp, Homo sapien
ccgtttacatccttcgagctcaagc

SEQ ID NO: 5763274 - DNA, 25 bp, Homo sapien
agatttatctgcctcccccattaag

SEQ ID NO: 5763275 - DNA, 25 bp, Homo sapien
atgggcggccagatgggaggattat

SEQ ID NO: 5763276 - DNA, 25 bp, Homo sapien
tcaccgaccaggaaacccaggaagg

SEQ ID NO: 5763277 - DNA, 25 bp, Homo sapien
atgaaacttttgtctgtgaaaaagc

SEQ ID NO: 5763278 - DNA, 25 bp, Homo sapien
ttgagtacagcatcacagacggtga

SEQ ID NO: 5763279 - DNA, 25 bp, Homo sapien
gacaccaattggcagaatcaaagcc

SEQ ID NO: 5763280 - DNA, 25 bp, Homo sapien
caaggatgacccttatagtgggcac

SEQ ID NO: 5763281 - DNA, 25 bp, Homo sapien
tacggtgcagtgaaaaaggcacttc

SEQ ID NO: 5763282 - DNA, 25 bp, Homo sapien
aatcagttctttctcctggaggaat

SEQ ID NO: 5763283 - DNA, 25 bp, Homo sapien
gtgccatcagcatgagaacttaccg

SEQ ID NO: 5763284 - DNA, 25 bp, Homo sapien
agtcgagttacatactgagaatctg

SEQ ID NO: 5763285 - DNA, 25 bp, Homo sapien
aagtgtatacccttaaagtggaagc

SEQ ID NO: 5763286 - DNA, 25 bp, Homo sapien
aagaacattaaggaaggaaggagga

SEQ ID NO: 5763287 - DNA, 25 bp, Homo sapien
cactgttactgtgacactctagatt

SEQ ID NO: 5763288 - DNA, 25 bp, Homo sapien
cggtgccatcagcatgagaacttac

SEQ ID NO: 5763289 - DNA, 25 bp, Homo sapien
tcacactgactgatgtcaacgacaa

SEQ ID NO: 5763290 - DNA, 25 bp, Homo sapien
ctcatccaccccacgggactgagca

SEQ ID NO: 5763291 - DNA, 25 bp, Homo sapien
acagatatggacagaatattcaaca

SEQ ID NO: 5763292 - DNA, 25 bp, Homo sapien
ccaagtcactgcgacggatgcagat

SEQ ID NO: 5763293 - DNA, 25 bp, Homo sapien
gtgaggggctcacactgttactgtg

SEQ ID NO: 5763294 - DNA, 25 bp, Homo sapien
tatggcacaacattacagtgatagc

SEQ ID NO: 5763295 - DNA, 25 bp, Homo sapien
acctatctcttgcctgtggtcattt

SEQ ID NO: 5763296 - DNA, 25 bp, Homo sapien
gatttctctacttggggcctttcaa

SEQ ID NO: 5763297 - DNA, 25 bp, Homo sapien
gctgttgacaaggatgacccttata

SEQ ID NO: 5763298 - DNA, 25 bp, Homo sapien
gagtggggcactcactacgcacaga

SEQ ID NO: 5763299 - DNA, 25 bp, Homo sapien
tgcatgtgaccaccacgggaacatg

SEQ ID NO: 5763300 - DNA, 25 bp, Homo sapien
aatgacaatgaaccaatattcacca

SEQ ID NO: 5763301 - DNA, 25 bp, Homo sapien
aggatgacccttatagtgggcacca

SEQ ID NO: 5763302 - DNA, 25 bp, Homo sapien
tacaaataagagaagatgctcagat

SEQ ID NO: 5763303 - DNA, 25 bp, Homo sapien
tacagcctgatctaggtgagtcgag

SEQ ID NO: 5763304 - DNA, 25 bp, Homo sapien
gaaacccaggaagggattataactg

SEQ ID NO: 5763305 - DNA, 25 bp, Homo sapien
gtgtatgatgaggtccctttctata

SEQ ID NO: 5763306 - DNA, 25 bp, Homo sapien
gagaaaacagggagcagtaccaagt

SEQ ID NO: 5763307 - DNA, 25 bp, Homo sapien
gtttacacagccactgtccctgaaa

SEQ ID NO: 5763308 - DNA, 25 bp, Homo sapien
tgcatcgtgatcctactaggtaaac

SEQ ID NO: 5763309 - DNA, 25 bp, Homo sapien
aaaatgagctgaaccgttcaaaaag

SEQ ID NO: 5763310 - DNA, 25 bp, Homo sapien
ggcggcggcggcggaggcaggagca

SEQ ID NO: 5763311 - DNA, 25 bp, Homo sapien
agaaagtgtatacccttaaagtgga

SEQ ID NO: 5763312 - DNA, 25 bp, Homo sapien
cttgtctatcagactgggaatgaat

SEQ ID NO: 5763313 - DNA, 25 bp, Homo sapien
atctcttgcctgtggtcatttcaga

SEQ ID NO: 5763314 - DNA, 25 bp, Homo sapien
tctccgcgggcgcaggaaggcgagc

SEQ ID NO: 5763315 - DNA, 25 bp, Homo sapien
tggggcctttcaaagattcagccac

SEQ ID NO: 5763316 - DNA, 25 bp, Homo sapien
aataagagaagatgctcagataaac

SEQ ID NO: 5763317 - DNA, 25 bp, Homo sapien
ggggctcacactgttactgtgacac

SEQ ID NO: 5763318 - DNA, 25 bp, Homo sapien
attgtggtggaggatgtagatgagc

SEQ ID NO: 5763319 - DNA, 25 bp, Homo sapien
acacacagatatggacagaatattc

SEQ ID NO: 5763320 - DNA, 25 bp, Homo sapien
caaactttaccattcaagacaacaa

SEQ ID NO: 5763321 - DNA, 25 bp, Homo sapien
tgaaccaatattcaccaaggaggtt

SEQ ID NO: 5763322 - DNA, 25 bp, Homo sapien
cgcgggcgcaggaaggcgagcagag

SEQ ID NO: 5763323 - DNA, 25 bp, Homo sapien
ggacagtgactgtccgggtctgtgc

SEQ ID NO: 5763324 - DNA, 25 bp, Homo sapien
caggagatctcttcattattaatga

SEQ ID NO: 5763325 - DNA, 25 bp, Homo sapien
ccttgcatgctgttgacaaggatga

SEQ ID NO: 5763326 - DNA, 25 bp, Homo sapien
gttgttaagcgtctggcatggagtg

SEQ ID NO: 5763327 - DNA, 25 bp, Homo sapien
tctgaattcatcatcaagatccatg

SEQ ID NO: 5763328 - DNA, 25 bp, Homo sapien
agaacggcagagccggcgaccgcgg

SEQ ID NO: 5763329 - DNA, 25 bp, Homo sapien
cccattaaggcatacagcctgatct

SEQ ID NO: 5763330 - DNA, 25 bp, Homo sapien
cgcatcccaagagctgcagtttcag

SEQ ID NO: 5763331 - DNA, 25 bp, Homo sapien
ggaatacacaggatccgattatcag

SEQ ID NO: 5763332 - DNA, 25 bp, Homo sapien
tgtgaaaaagcaaaggcagatcagt

SEQ ID NO: 5763333 - DNA, 25 bp, Homo sapien
gatgaggtccctttctataaaggta

SEQ ID NO: 5763334 - DNA, 25 bp, Homo sapien
ccacgggaacatgcaatcctgccac

SEQ ID NO: 5763335 - DNA, 25 bp, Homo sapien
aaagggccctggagctctctggaaa

SEQ ID NO: 5763336 - DNA, 25 bp, Homo sapien
cctatctccccatggtgaggggctc

SEQ ID NO: 5763337 - DNA, 25 bp, Homo sapien
aaaaatggctataatagacacgaga

SEQ ID NO: 5763338 - DNA, 25 bp, Homo sapien
ctcttgcctgtggtcatttcagaca

SEQ ID NO: 5763339 - DNA, 25 bp, Homo sapien
aaacccgtttacatccttcgagctc

SEQ ID NO: 5763340 - DNA, 25 bp, Homo sapien
ctggcatggagtgtatgatgaggtc

SEQ ID NO: 5763341 - DNA, 25 bp, Homo sapien
agttgaatcagaaacaggtattatc

SEQ ID NO: 5763342 - DNA, 25 bp, Homo sapien
ctgccaggaatcctgtcaagtactc

SEQ ID NO: 5763343 - DNA, 25 bp, Homo sapien
gacactctagatttatctgcctccc

SEQ ID NO: 5763344 - DNA, 25 bp, Homo sapien
catcgtgatcctactaggtaaactg

SEQ ID NO: 5763345 - DNA, 25 bp, Homo sapien
tcgaaacttcttgaccgagaaacac

SEQ ID NO: 5763346 - DNA, 25 bp, Homo sapien
tttttacatcgaaacttcttgaccg

SEQ ID NO: 5763347 - DNA, 25 bp, Homo sapien
ctggatgtggaatcagttctttctc

SEQ ID NO: 5763348 - DNA, 25 bp, Homo sapien
ggctcacactgttactgtgacactc

SEQ ID NO: 5763349 - DNA, 25 bp, Homo sapien
cagaatttgctgagttctatgaaac

SEQ ID NO: 5763350 - DNA, 25 bp, Homo sapien
gcagtgaaaaaggcacttccaagag

SEQ ID NO: 5763351 - DNA, 25 bp, Homo sapien
tggaagcctccaatccttatgttga

SEQ ID NO: 5763352 - DNA, 25 bp, Homo sapien
gttgagccacgatttctctacttgg

SEQ ID NO: 5763353 - DNA, 25 bp, Homo sapien
tttcagttgaatcagaaacaggtat

SEQ ID NO: 5763354 - DNA, 25 bp, Homo sapien
accaccaccgtgaacatcacactga

SEQ ID NO: 5763355 - DNA, 25 bp, Homo sapien
tactgtgacactctagatttatctg

SEQ ID NO: 5763356 - DNA, 25 bp, Homo sapien
cgggcgcaggaaggcgagcagagat

SEQ ID NO: 5763357 - DNA, 25 bp, Homo sapien
agccacctgtcttcagcaaactggc

SEQ ID NO: 5763358 - DNA, 25 bp, Homo sapien
gtatgtgggcaagttacattcagac

SEQ ID NO: 5763359 - DNA, 25 bp, Homo sapien
atcttacaaataagagaagatgctc

SEQ ID NO: 5763360 - DNA, 25 bp, Homo sapien
gtgctaaagttgtctacagtattct

SEQ ID NO: 5763361 - DNA, 25 bp, Homo sapien
acttccaagagtggggcactcacta

SEQ ID NO: 5763362 - DNA, 25 bp, Homo sapien
cacttaaatatatcctttcaggaga

SEQ ID NO: 5763363 - DNA, 25 bp, Homo sapien
caagcaaagaacattaaggaaggaa

SEQ ID NO: 5763364 - DNA, 25 bp, Homo sapien
ttaaagttctagatgtcaatgacaa

SEQ ID NO: 5763365 - DNA, 25 bp, Homo sapien
cctgaaatgtctgatgtcggtacat

SEQ ID NO: 5763366 - DNA, 25 bp, Homo sapien
ttcaaagattcagccacggttagaa

SEQ ID NO: 5763367 - DNA, 25 bp, Homo sapien
cctgaatcttctccaccggggacac

SEQ ID NO: 5763368 - DNA, 25 bp, Homo sapien
gcctgatctaggtgagtcgagttac

SEQ ID NO: 5763369 - DNA, 25 bp, Homo sapien
ctacgcacagactcgacggtgccat

SEQ ID NO: 5763370 - DNA, 25 bp, Homo sapien
caagtactctgtagatcgacacaca

SEQ ID NO: 5763371 - DNA, 25 bp, Homo sapien
gccagtggctcaaactttaccattc

SEQ ID NO: 5763372 - DNA, 25 bp, Homo sapien
cagtatgtgggcaagttacattcag

SEQ ID NO: 5763373 - DNA, 25 bp, Homo sapien
atgttgagccacgatttctctactt

SEQ ID NO: 5763374 - DNA, 25 bp, Homo sapien
ggatccgattatcagtatgtgggca

SEQ ID NO: 5763375 - DNA, 25 bp, Homo sapien
tcttgaccgagaaacactgctatgg

SEQ ID NO: 5763376 - DNA, 25 bp, Homo sapien
ccagcaaagaaaagggccctggagc

SEQ ID NO: 5763377 - DNA, 25 bp, Homo sapien
tccttggcccctgaagcagccagtg

SEQ ID NO: 5763378 - DNA, 25 bp, Homo sapien
cttcttgctgctcttttgggtgggc

SEQ ID NO: 5763379 - DNA, 25 bp, Homo sapien
gctacttcttgctgctcttttgggt

SEQ ID NO: 5763380 - DNA, 25 bp, Homo sapien
gatccagatgctgccaggaatcctg

SEQ ID NO: 5763381 - DNA, 25 bp, Homo sapien
tccgggtctgtgcatgtgaccacca

SEQ ID NO: 5763382 - DNA, 25 bp, Homo sapien
gaggggctcacactgttactgtgac

SEQ ID NO: 5763383 - DNA, 25 bp, Homo sapien
aaaaggagctggatgtggaatcagt

SEQ ID NO: 5763384 - DNA, 25 bp, Homo sapien
tcggtacatttgttgtccaagtcac

SEQ ID NO: 5763385 - DNA, 25 bp, Homo sapien
ccaagagctgcagtttcagccgcga

SEQ ID NO: 5763386 - DNA, 25 bp, Homo sapien
tgaaaaagcaaaggcagatcagttg

SEQ ID NO: 5763387 - DNA, 25 bp, Homo sapien
ttacatccttcgagctcaagctata

SEQ ID NO: 5763388 - DNA, 25 bp, Homo sapien
gatatgtttgatgtcatcaccgacc

SEQ ID NO: 5763389 - DNA, 25 bp, Homo sapien
cgagtacctctatatattaaagttc

SEQ ID NO: 5763390 - DNA, 25 bp, Homo sapien
tggatcgagaaaacagggagcagta

SEQ ID NO: 5763391 - DNA, 25 bp, Homo sapien
gcctttcaaagattcagccacggtt

SEQ ID NO: 5763392 - DNA, 25 bp, Homo sapien
atttcagggcaacataaatgtgccc

SEQ ID NO: 5763393 - DNA, 25 bp, Homo sapien
gcacaacattacagtgatagcaaca

SEQ ID NO: 5763394 - DNA, 25 bp, Homo sapien
gtacagcatcacagacggtgagggg

SEQ ID NO: 5763395 - DNA, 25 bp, Homo sapien
ttcaagacaacaaagacaacacggc

SEQ ID NO: 5763396 - DNA, 25 bp, Homo sapien
ctcaaactttaccattcaagacaac

SEQ ID NO: 5763397 - DNA, 25 bp, Homo sapien
atgaaaacacaggcgacatacaggc

SEQ ID NO: 5763398 - DNA, 25 bp, Homo sapien
ggagctggatgtggaatcagttctt

SEQ ID NO: 5763399 - DNA, 25 bp, Homo sapien
agcagtaccaagtggtgattcaagc

SEQ ID NO: 5763400 - DNA, 25 bp, Homo sapien
ctctctcaactccactatcaaagag

SEQ ID NO: 5763401 - DNA, 25 bp, Homo sapien
caagatccatgacatcaatgacaat

SEQ ID NO: 5763402 - DNA, 25 bp, Homo sapien
aattggcagaatcaaagccagcgat

SEQ ID NO: 5763403 - DNA, 25 bp, Homo sapien
gcttgcccaggaagcaaagaatctc

SEQ ID NO: 5763404 - DNA, 25 bp, Homo sapien
aaatggctataatagacacgagatg

SEQ ID NO: 5763405 - DNA, 25 bp, Homo sapien
ccttaaagtggaagcctccaatcct

SEQ ID NO: 5763406 - DNA, 25 bp, Homo sapien
agatggagcaggagatctcttcatt

SEQ ID NO: 5763407 - DNA, 25 bp, Homo sapien
tgcctgtggtcatttcagacaacga

SEQ ID NO: 5763408 - DNA, 25 bp, Homo sapien
ctctggttgccatccttctgtgcat

SEQ ID NO: 5763409 - DNA, 25 bp, Homo sapien
ggggcactcactacgcacagactcg

SEQ ID NO: 5763410 - DNA, 25 bp, Homo sapien
actgatgtcaacgacaaccctcccc

SEQ ID NO: 5763411 - DNA, 25 bp, Homo sapien
acggtgaggggctggatatgtttga

SEQ ID NO: 5763412 - DNA, 25 bp, Homo sapien
cttggcccctgaagcagccagtggc

SEQ ID NO: 5763413 - DNA, 25 bp, Homo sapien
tgtacgatgtgaactcatttttgct

SEQ ID NO: 5763414 - DNA, 25 bp, Homo sapien
ggaatcagttctttctcctggagga

SEQ ID NO: 5763415 - DNA, 25 bp, Homo sapien
agccggcgaccgcggcggcggcggc

SEQ ID NO: 5763416 - DNA, 25 bp, Homo sapien
tggagtgtatgatgaggtccctttc

SEQ ID NO: 5763417 - DNA, 25 bp, Homo sapien
accaagaggctggacagggaagaaa

SEQ ID NO: 5763418 - DNA, 25 bp, Homo sapien
ccaacatatgggaacagtgctaaag

SEQ ID NO: 5763419 - DNA, 25 bp, Homo sapien
tggaggaatacacaggatccgatta

SEQ ID NO: 5763420 - DNA, 25 bp, Homo sapien
ctctgagagccaagcaaagaacatt

SEQ ID NO: 5763421 - DNA, 25 bp, Homo sapien
gaggaatacacaggatccgattatc

SEQ ID NO: 5763422 - DNA, 25 bp, Homo sapien
tattatcaagacagctttgctcaac

SEQ ID NO: 5763423 - DNA, 25 bp, Homo sapien
aacaaagacaacacggcgggaatct

SEQ ID NO: 5763424 - DNA, 25 bp, Homo sapien
gcgatgctgatgtgggagaaaatgc

SEQ ID NO: 5763425 - DNA, 25 bp, Homo sapien
aggaggaatgaggctggatacggtg

SEQ ID NO: 5763426 - DNA, 25 bp, Homo sapien
atcagaaacaggtattatcaagaca

SEQ ID NO: 5763427 - DNA, 25 bp, Homo sapien
aggagcagcctgggcgggtcgcagg

SEQ ID NO: 5763428 - DNA, 25 bp, Homo sapien
taagagaagatgctcagataaacac

SEQ ID NO: 5763429 - DNA, 25 bp, Homo sapien
gaggcgctcatccaccccacgggac

SEQ ID NO: 5763430 - DNA, 25 bp, Homo sapien
cttggggcctttcaaagattcagcc

SEQ ID NO: 5763431 - DNA, 25 bp, Homo sapien
aggaagcaaagaatctcttgtctat

SEQ ID NO: 5763432 - DNA, 25 bp, Homo sapien
tcattcgttgtgtaatttttttact

SEQ ID NO: 5763433 - DNA, 25 bp, Homo sapien
ctatgaaacttttgtctgtgaaaaa

SEQ ID NO: 5763434 - DNA, 25 bp, Homo sapien
cgagcagagatatcctctgagagcc

SEQ ID NO: 5763435 - DNA, 25 bp, Homo sapien
aatgaaccaatattcaccaaggagg

SEQ ID NO: 5763436 - DNA, 25 bp, Homo sapien
agtggtgattcaagccaaggatatg

SEQ ID NO: 5763437 - DNA, 25 bp, Homo sapien
ataatccaaagcaaagtagtcgagt

SEQ ID NO: 5763438 - DNA, 25 bp, Homo sapien
tgagtcgagttacatactgagaatc

SEQ ID NO: 5763439 - DNA, 25 bp, Homo sapien
aatgtgcccttttcatttcattcgt

SEQ ID NO: 5763440 - DNA, 25 bp, Homo sapien
gctcaacatggatcgagaaaacagg

SEQ ID NO: 5763441 - DNA, 25 bp, Homo sapien
gagcacctatctcttgcctgtggtc

SEQ ID NO: 5763442 - DNA, 25 bp, Homo sapien
catcaatgacaatgaaccaatattc

SEQ ID NO: 5763443 - DNA, 25 bp, Homo sapien
cagagatatcctctgagagccaagc

SEQ ID NO: 5763444 - DNA, 25 bp, Homo sapien
cagcgatgctgatgtgggagaaaat

SEQ ID NO: 5763445 - DNA, 25 bp, Homo sapien
gtggctcaaactttaccattcaaga

SEQ ID NO: 5763446 - DNA, 25 bp, Homo sapien
actgactgatgtcaacgacaaccct

SEQ ID NO: 5763447 - DNA, 25 bp, Homo sapien
gctatggcacaacattacagtgata

SEQ ID NO: 5763448 - DNA, 25 bp, Homo sapien
ccctgcctcctatctccccatggtg

SEQ ID NO: 5763449 - DNA, 25 bp, Homo sapien
agttctagatgtcaatgacaacgcc

SEQ ID NO: 5763450 - DNA, 25 bp, Homo sapien
ctacccaactctctcaactccacta

SEQ ID NO: 5763451 - DNA, 25 bp, Homo sapien
tgattctggaaatggttcgattttt

SEQ ID NO: 5763452 - DNA, 25 bp, Homo sapien
ttcattattaatgaaaacacaggcg

SEQ ID NO: 5763453 - DNA, 25 bp, Homo sapien
attgattctggaaatggttcgattt

SEQ ID NO: 5763454 - DNA, 25 bp, Homo sapien
cttcagcaaactggcctacatctta

SEQ ID NO: 5763455 - DNA, 25 bp, Homo sapien
cctccaatccttatgttgagccacg

SEQ ID NO: 5763456 - DNA, 25 bp, Homo sapien
aatcctgccacgcggaggcgctcat

SEQ ID NO: 5763457 - DNA, 25 bp, Homo sapien
tcctttcaggagatggagcaggaga

SEQ ID NO: 5763458 - DNA, 25 bp, Homo sapien
aaagttctagatgtcaatgacaacg

SEQ ID NO: 5763459 - DNA, 25 bp, Homo sapien
ttgacaaggatgacccttatagtgg

SEQ ID NO: 5763460 - DNA, 25 bp, Homo sapien
aaacgttgttaagcgtctggcatgg

SEQ ID NO: 5763461 - DNA, 25 bp, Homo sapien
acttgctcgtgtctttgcttgccca

SEQ ID NO: 5763462 - DNA, 25 bp, Homo sapien
cagtaccaagtggtgattcaagcca

SEQ ID NO: 5763463 - DNA, 25 bp, Homo sapien
agcaaaaatgagctgaaccgttcaa

SEQ ID NO: 5763464 - DNA, 25 bp, Homo sapien
cgtgaacatcacactgactgatgtc

SEQ ID NO: 5763465 - DNA, 25 bp, Homo sapien
ggatgtggaatcagttctttctcct

SEQ ID NO: 5763466 - DNA, 25 bp, Homo sapien
cttttgtctgtgaaaaagcaaaggc

SEQ ID NO: 5763467 - DNA, 25 bp, Homo sapien
catggagtgtatgatgaggtccctt

SEQ ID NO: 5763468 - DNA, 25 bp, Homo sapien
gatagaggagatggatcacttaaat

SEQ ID NO: 5763469 - DNA, 25 bp, Homo sapien
tgggccagccctacccaactctctc

SEQ ID NO: 5763470 - DNA, 25 bp, Homo sapien
tgctgccaggaatcctgtcaagtac

SEQ ID NO: 5763471 - DNA, 25 bp, Homo sapien
tgactgtccgggtctgtgcatgtga

SEQ ID NO: 5763472 - DNA, 25 bp, Homo sapien
agcaaagaaaagggccctggagctc

SEQ ID NO: 5763473 - DNA, 25 bp, Homo sapien
caccaattggcagaatcaaagccag

SEQ ID NO: 5763474 - DNA, 25 bp, Homo sapien
cggcggcggcggaggcaggagcagc

SEQ ID NO: 5763475 - DNA, 25 bp, Homo sapien
tttgtctgtgaaaaagcaaaggcag

SEQ ID NO: 5763476 - DNA, 25 bp, Homo sapien
tttcatttcattcgttgtgtaattt

SEQ ID NO: 5763477 - DNA, 25 bp, Homo sapien
acccgtggagcccgagtctgaattc

SEQ ID NO: 5763478 - DNA, 25 bp, Homo sapien
atcacttaaatatatcctttcagga

SEQ ID NO: 5763479 - DNA, 25 bp, Homo sapien
tcttgctgctcttttgggtgggcca

SEQ ID NO: 5763480 - DNA, 25 bp, Homo sapien
gggacaccaattggcagaatcaaag

SEQ ID NO: 5763481 - DNA, 25 bp, Homo sapien
tcagcatgagaacttaccgctactt

SEQ ID NO: 5763482 - DNA, 25 bp, Homo sapien
aagtcactgcgacggatgcagatga

SEQ ID NO: 5763483 - DNA, 25 bp, Homo sapien
tcctgccacgcggaggcgctcatcc

SEQ ID NO: 5763484 - DNA, 25 bp, Homo sapien
gaaacactgctatggcacaacatta

SEQ ID NO: 5763485 - DNA, 25 bp, Homo sapien
cgagatgagcacctatctcttgcct

SEQ ID NO: 5763486 - DNA, 25 bp, Homo sapien
ttcaccaaggaggtttacacagcca

SEQ ID NO: 5763487 - DNA, 25 bp, Homo sapien
acagctttgctcaacatggatcgag

SEQ ID NO: 5763488 - DNA, 25 bp, Homo sapien
ctcagataaacaccacaataggctc

SEQ ID NO: 5763489 - DNA, 25 bp, Homo sapien
ataactgtcaaaaagctcttggact

SEQ ID NO: 5763490 - DNA, 25 bp, Homo sapien
gcacctatctcttgcctgtggtcat

SEQ ID NO: 5763491 - DNA, 25 bp, Homo sapien
gccatcagcatgagaacttaccgct

SEQ ID NO: 5763492 - DNA, 25 bp, Homo sapien
cggcggaggcaggagcagcctgggc

SEQ ID NO: 5763493 - DNA, 25 bp, Homo sapien
caccacgggaacatgcaatcctgcc

SEQ ID NO: 5763494 - DNA, 25 bp, Homo sapien
caaagaatctcttgtctatcagact

SEQ ID NO: 5763495 - DNA, 25 bp, Homo sapien
tcagttctttctcctggaggaatac

SEQ ID NO: 5763496 - DNA, 25 bp, Homo sapien
gggctggatatgtttgatgtcatca

SEQ ID NO: 5763497 - DNA, 25 bp, Homo sapien
ctctgtagatcgacacacagatatg

SEQ ID NO: 5763498 - DNA, 25 bp, Homo sapien
cctgtggtcatttcagacaacgact

SEQ ID NO: 5763499 - DNA, 25 bp, Homo sapien
gaccttgcatgctgttgacaaggat

SEQ ID NO: 5763500 - DNA, 25 bp, Homo sapien
atcaaagaggactagtggtttccca

SEQ ID NO: 5763501 - DNA, 25 bp, Homo sapien
gcaaagtagtcgagtacctctatat

SEQ ID NO: 5763502 - DNA, 25 bp, Homo sapien
gatcgagaaaacagggagcagtacc

SEQ ID NO: 5763503 - DNA, 25 bp, Homo sapien
gtatgatgaggtccctttctataaa

SEQ ID NO: 5763504 - DNA, 25 bp, Homo sapien
gcgacatacaggccaccaagaggct

SEQ ID NO: 5763505 - DNA, 25 bp, Homo sapien
tatcctctgagagccaagcaaagaa

SEQ ID NO: 5763506 - DNA, 25 bp, Homo sapien
ggaaggcgagcagagatatcctctg

SEQ ID NO: 5763507 - DNA, 25 bp, Homo sapien
tgtgcatcgtgatcctactaggtaa

SEQ ID NO: 5763508 - DNA, 25 bp, Homo sapien
gccacgcggaggcgctcatccaccc

SEQ ID NO: 5763509 - DNA, 25 bp, Homo sapien
attaatgaaaacacaggcgacatac

SEQ ID NO: 5763510 - DNA, 25 bp, Homo sapien
agcaaactggcctacatcttacaaa

SEQ ID NO: 5763511 - DNA, 25 bp, Homo sapien
cagaccttgcatgctgttgacaagg

SEQ ID NO: 5763512 - DNA, 25 bp, Homo sapien
ttcaacattgattctggaaatggtt

SEQ ID NO: 5763513 - DNA, 25 bp, Homo sapien
tctacagggacagccctatttttca

SEQ ID NO: 5763514 - DNA, 25 bp, Homo sapien
ccaactctctcaactccactatcaa

SEQ ID NO: 5763515 - DNA, 25 bp, Homo sapien
gcaagttacattcagaccaggatag

SEQ ID NO: 5763516 - DNA, 25 bp, Homo sapien
acattgattctggaaatggttcgat

SEQ ID NO: 5763517 - DNA, 25 bp, Homo sapien
ttaaggcatacagcctgatctaggt

SEQ ID NO: 5763518 - DNA, 25 bp, Homo sapien
ctcctatctccccatggtgaggggc

SEQ ID NO: 5763519 - DNA, 25 bp, Homo sapien
aaagcaaaggcagatcagttgattc

SEQ ID NO: 5763520 - DNA, 25 bp, Homo sapien
agatggatcacttaaatatatcctt

SEQ ID NO: 5763521 - DNA, 25 bp, Homo sapien
aatattcaacattgattctggaaat

SEQ ID NO: 5763522 - DNA, 25 bp, Homo sapien
tgtctacagtattctacagggacag

SEQ ID NO: 5763523 - DNA, 25 bp, Homo sapien
gccatccttctgtgcatcgtgatcc

SEQ ID NO: 5763524 - DNA, 25 bp, Homo sapien
ctgaaattgagtacagcatcacaga

SEQ ID NO: 5763525 - DNA, 25 bp, Homo sapien
gagtacataccagtttaaaactcct

SEQ ID NO: 5763526 - DNA, 25 bp, Homo sapien
acgccccagaatttgctgagttcta

SEQ ID NO: 5763527 - DNA, 25 bp, Homo sapien
ttattaatgaaaacacaggcgacat

SEQ ID NO: 5763528 - DNA, 25 bp, Homo sapien
acaggcgacatacaggccaccaaga

SEQ ID NO: 5763529 - DNA, 25 bp, Homo sapien
gttttccttggcccctgaagcagcc

SEQ ID NO: 5763530 - DNA, 25 bp, Homo sapien
aacattacagtgatagcaacagaga

SEQ ID NO: 5763531 - DNA, 25 bp, Homo sapien
gcgtctggcatggagtgtatgatga

SEQ ID NO: 5763532 - DNA, 25 bp, Homo sapien
gtgtctttgcttgcccaggaagcaa

SEQ ID NO: 5763533 - DNA, 25 bp, Homo sapien
tgaacatcacactgactgatgtcaa

SEQ ID NO: 5763534 - DNA, 25 bp, Homo sapien
attctggaaatggttcgatttttac

SEQ ID NO: 5763535 - DNA, 25 bp, Homo sapien
tccaatccttatgttgagccacgat

SEQ ID NO: 5763536 - DNA, 25 bp, Homo sapien
aatccaaagcaaagtagtcgagtac

SEQ ID NO: 5763537 - DNA, 25 bp, Homo sapien
cagccgcgacagcaagaacggcaga

SEQ ID NO: 5763538 - DNA, 25 bp, Homo sapien
gggcggccagatgggaggattatct

SEQ ID NO: 5763539 - DNA, 25 bp, Homo sapien
agaggctggacagggaagaaaaacc

SEQ ID NO: 5763540 - DNA, 25 bp, Homo sapien
ggaccaccaccgtgaacatcacact

SEQ ID NO: 5763541 - DNA, 25 bp, Homo sapien
ccaaggatatgggcggccagatggg

SEQ ID NO: 5763542 - DNA, 25 bp, Homo sapien
aacttttgtctgtgaaaaagcaaag

SEQ ID NO: 5763543 - DNA, 25 bp, Homo sapien
ccaatattcaccaaggaggtttaca

SEQ ID NO: 5763544 - DNA, 25 bp, Homo sapien
caatccttatgttgagccacgattt

SEQ ID NO: 5763545 - DNA, 25 bp, Homo sapien
aaggatatgggcggccagatgggag

SEQ ID NO: 5763546 - DNA, 25 bp, Homo sapien
tcgttgtgtaatttttttacttgga

SEQ ID NO: 5763547 - DNA, 25 bp, Homo sapien
cagcctgatctaggtgagtcgagtt

SEQ ID NO: 5763548 - DNA, 25 bp, Homo sapien
cccttttcatttcattcgttgtgta

SEQ ID NO: 5763549 - DNA, 25 bp, Homo sapien
atacccttaaagtggaagcctccaa

SEQ ID NO: 5763550 - DNA, 25 bp, Homo sapien
ggctctggttgccatccttctgtgc

SEQ ID NO: 5763551 - DNA, 25 bp, Homo sapien
cagccctatttttcagttgaatcag

SEQ ID NO: 5763552 - DNA, 25 bp, Homo sapien
caggaatcctgtcaagtactctgta

SEQ ID NO: 5763553 - DNA, 25 bp, Homo sapien
acacagatatggacagaatattcaa

SEQ ID NO: 5763554 - DNA, 25 bp, Homo sapien
ctttcaggagatggagcaggagatc

SEQ ID NO: 5763555 - DNA, 25 bp, Homo sapien
attatctgggaccaccaccgtgaac

SEQ ID NO: 5763556 - DNA, 25 bp, Homo sapien
aaacagcaaaaatgagctgaaccgt

SEQ ID NO: 5763557 - DNA, 25 bp, Homo sapien
aaaaagcaaaggcagatcagttgat

SEQ ID NO: 5763558 - DNA, 25 bp, Homo sapien
cagcccaagatccagatgctgccag

SEQ ID NO: 5763559 - DNA, 25 bp, Homo sapien
aagaatctcttgtctatcagactgg

SEQ ID NO: 5763560 - DNA, 25 bp, Homo sapien
gacatacaggccaccaagaggctgg

SEQ ID NO: 5763561 - DNA, 25 bp, Homo sapien
ggcatggagtgtatgatgaggtccc

SEQ ID NO: 5763562 - DNA, 25 bp, Homo sapien
gacggtgccatcagcatgagaactt

SEQ ID NO: 5763563 - DNA, 25 bp, Homo sapien
gaggactagtggtttcccagcaaag

SEQ ID NO: 5763564 - DNA, 25 bp, Homo sapien
tgttaagcgtctggcatggagtgta

SEQ ID NO: 5763565 - DNA, 25 bp, Homo sapien
ccaagagtggggcactcactacgca

SEQ ID NO: 5763566 - DNA, 25 bp, Homo sapien
gttacatactgagaatctgtgctgt

SEQ ID NO: 5763567 - DNA, 25 bp, Homo sapien
tttgaaaagaagaaagtgtataccc

SEQ ID NO: 5763568 - DNA, 25 bp, Homo sapien
cggtgcagtgaaaaaggcacttcca

SEQ ID NO: 5763569 - DNA, 25 bp, Homo sapien
atcttaactcggaaaaatggctata

SEQ ID NO: 5763570 - DNA, 25 bp, Homo sapien
accattcaagacaacaaagacaaca

SEQ ID NO: 5763571 - DNA, 25 bp, Homo sapien
ttgcatgctgttgacaaggatgacc

SEQ ID NO: 5763572 - DNA, 25 bp, Homo sapien
ttcagccgcgacagcaagaacggca

SEQ ID NO: 5763573 - DNA, 25 bp, Homo sapien
actcggaaaaatggctataatagac

SEQ ID NO: 5763574 - DNA, 25 bp, Homo sapien
acctgtcttcagcaaactggcctac

SEQ ID NO: 5763575 - DNA, 25 bp, Homo sapien
gtcacagcccaagatccagatgctg

SEQ ID NO: 5763576 - DNA, 25 bp, Homo sapien
gagctgcagtttcagccgcgacagc

SEQ ID NO: 5763577 - DNA, 25 bp, Homo sapien
ataaacagaaggacagggagacccg

SEQ ID NO: 5763578 - DNA, 25 bp, Homo sapien
ttcagaccttgcatgctgttgacaa

SEQ ID NO: 5763579 - DNA, 25 bp, Homo sapien
taaggaaggaaggaggaatgaggct

SEQ ID NO: 5763580 - DNA, 25 bp, Homo sapien
atggctataatagacacgagatgag

SEQ ID NO: 5763581 - DNA, 25 bp, Homo sapien
ggagatggagcaggagatctcttca

SEQ ID NO: 5763582 - DNA, 25 bp, Homo sapien
cgggtcgcagggtctccgcgggcgc

SEQ ID NO: 5763583 - DNA, 25 bp, Homo sapien
cgacacacagatatggacagaatat

SEQ ID NO: 5763584 - DNA, 25 bp, Homo sapien
ctcacactgttactgtgacactcta

SEQ ID NO: 5763585 - DNA, 25 bp, Homo sapien
cccagagtacataccagtttaaaac

SEQ ID NO: 5763586 - DNA, 25 bp, Homo sapien
ctcgggggatttcagggcaacataa

SEQ ID NO: 5763587 - DNA, 25 bp, Homo sapien
agggccctggagctctctggaaaca

SEQ ID NO: 5763588 - DNA, 25 bp, Homo sapien
actgggaatgaatctcgggggattt

SEQ ID NO: 5763589 - DNA, 25 bp, Homo sapien
acataccagtttaaaactcctgaat

SEQ ID NO: 5763590 - DNA, 25 bp, Homo sapien
tgaggctggatacggtgcagtgaaa

SEQ ID NO: 5763591 - DNA, 25 bp, Homo sapien
atgagcacctatctcttgcctgtgg

SEQ ID NO: 5763592 - DNA, 25 bp, Homo sapien
aagctcttggactttgaaaagaaga

SEQ ID NO: 5763593 - DNA, 25 bp, Homo sapien
tgaaaagaagaaagtgtataccctt

SEQ ID NO: 5763594 - DNA, 25 bp, Homo sapien
agagatcaataatccaaagcaaagt

SEQ ID NO: 5763595 - DNA, 25 bp, Homo sapien
acagtgactgtccgggtctgtgcat

SEQ ID NO: 5763596 - DNA, 25 bp, Homo sapien
agagaagatgctcagataaacacca

SEQ ID NO: 5763597 - DNA, 25 bp, Homo sapien
agctataaacagaaggacagggaga

SEQ ID NO: 5763598 - DNA, 25 bp, Homo sapien
tacatcgaaacttcttgaccgagaa

SEQ ID NO: 5763599 - DNA, 25 bp, Homo sapien
aggctggatacggtgcagtgaaaaa

SEQ ID NO: 5763600 - DNA, 25 bp, Homo sapien
ttaaaactcctgaatcttctccacc

SEQ ID NO: 5763601 - DNA, 25 bp, Homo sapien
tcatttcattcgttgtgtaattttt

SEQ ID NO: 5763602 - DNA, 25 bp, Homo sapien
aaaatgaacagatgtgaaacttgct

SEQ ID NO: 5763603 - DNA, 25 bp, Homo sapien
tatgggaacagtgctaaagttgtct

SEQ ID NO: 5763604 - DNA, 25 bp, Homo sapien
cactcactacgcacagactcgacgg

SEQ ID NO: 5763605 - DNA, 25 bp, Homo sapien
ggaagggattataactgtcaaaaag

SEQ ID NO: 5763606 - DNA, 25 bp, Homo sapien
cctggaggaatacacaggatccgat

SEQ ID NO: 5763607 - DNA, 25 bp, Homo sapien
gatgtcggtacatttgttgtccaag

SEQ ID NO: 5763608 - DNA, 25 bp, Homo sapien
atcgacacacagatatggacagaat

SEQ ID NO: 5763609 - DNA, 25 bp, Homo sapien
ctgtgacactctagatttatctgcc

SEQ ID NO: 5763610 - DNA, 25 bp, Homo sapien
cgcggaggcgctcatccaccccacg

SEQ ID NO: 5763611 - DNA, 25 bp, Homo sapien
gtttcagccgcgacagcaagaacgg

SEQ ID NO: 5763612 - DNA, 25 bp, Homo sapien
tgtccctgaaatgtctgatgtcggt

SEQ ID NO: 5763613 - DNA, 25 bp, Homo sapien
ggctccgtcacagcccaagatccag

SEQ ID NO: 5763614 - DNA, 25 bp, Homo sapien
aacatatgggaacagtgctaaagtt

SEQ ID NO: 5763615 - DNA, 25 bp, Homo sapien
ggcgcaggaaggcgagcagagatat

SEQ ID NO: 5763616 - DNA, 25 bp, Homo sapien
ttcagaccaggatagaggagatgga

SEQ ID NO: 5763617 - DNA, 25 bp, Homo sapien
tgtccgggtctgtgcatgtgaccac

SEQ ID NO: 5763618 - DNA, 25 bp, Homo sapien
ccctacccaactctctcaactccac

SEQ ID NO: 5763619 - DNA, 25 bp, Homo sapien
tctaggtgagtcgagttacatactg

SEQ ID NO: 5763620 - DNA, 25 bp, Homo sapien
aatacacaggatccgattatcagta

SEQ ID NO: 5763621 - DNA, 25 bp, Homo sapien
tgagttctatgaaacttttgtctgt

SEQ ID NO: 5763622 - DNA, 25 bp, Homo sapien
tttttcagttgaatcagaaacaggt

SEQ ID NO: 5763623 - DNA, 25 bp, Homo sapien
atgacaacgccccagaatttgctga

SEQ ID NO: 5763624 - DNA, 25 bp, Homo sapien
catgtgaccaccacgggaacatgca

SEQ ID NO: 5763625 - DNA, 25 bp, Homo sapien
ggcagaatcaaagccagcgatgctg

SEQ ID NO: 5763626 - DNA, 25 bp, Homo sapien
cactatcaaagaggactagtggttt

SEQ ID NO: 5763627 - DNA, 25 bp, Homo sapien
ttacacagccactgtccctgaaatg

SEQ ID NO: 5763628 - DNA, 25 bp, Homo sapien
acatgcaatcctgccacgcggaggc

SEQ ID NO: 5763629 - DNA, 25 bp, Homo sapien
gataaacaccacaataggctccgtc

SEQ ID NO: 5763630 - DNA, 25 bp, Homo sapien
caacacggcgggaatcttaactcgg

SEQ ID NO: 5763631 - DNA, 25 bp, Homo sapien
gaccaggatagaggagatggatcac

SEQ ID NO: 5763632 - DNA, 25 bp, Homo sapien
cagccagtggctcaaactttaccat

SEQ ID NO: 5763633 - DNA, 25 bp, Homo sapien
cagggcaacataaatgtgccctttt

SEQ ID NO: 5763634 - DNA, 25 bp, Homo sapien
atccaacatatgggaacagtgctaa

SEQ ID NO: 5763635 - DNA, 25 bp, Homo sapien
cagtttaaaactcctgaatcttctc

SEQ ID NO: 5763636 - DNA, 25 bp, Homo sapien
ccaggaagcaaagaatctcttgtct

SEQ ID NO: 5763637 - DNA, 25 bp, Homo sapien
ttatcaagacagctttgctcaacat

SEQ ID NO: 5763638 - DNA, 25 bp, Homo sapien
agacaacaaagacaacacggcggga

SEQ ID NO: 5763639 - DNA, 25 bp, Homo sapien
ctggttctccctgcctcctatctcc

SEQ ID NO: 5763640 - DNA, 25 bp, Homo sapien
aggaaggaggaatgaggctggatac

SEQ ID NO: 5763641 - DNA, 25 bp, Homo sapien
tcaatgacaatgaaccaatattcac

SEQ ID NO: 5763642 - DNA, 25 bp, Homo sapien
gatatcctctgagagccaagcaaag

SEQ ID NO: 5763643 - DNA, 25 bp, Homo sapien
caggaagggattataactgtcaaaa

SEQ ID NO: 5763644 - DNA, 25 bp, Homo sapien
tgagccacgatttctctacttgggg

SEQ ID NO: 5763645 - DNA, 25 bp, Homo sapien
tgtgggagaaaatgctgaaattgag

SEQ ID NO: 5763646 - DNA, 25 bp, Homo sapien
gaccaggaaacccaggaagggatta

SEQ ID NO: 5763647 - DNA, 25 bp, Homo sapien
agcaacagagatcaataatccaaag

SEQ ID NO: 5763648 - DNA, 25 bp, Homo sapien
aattcatcatcaagatccatgacat

SEQ ID NO: 5763649 - DNA, 25 bp, Homo sapien
agacggtgaggggctggatatgttt

SEQ ID NO: 5763650 - DNA, 25 bp, Homo sapien
agctcaagctataaacagaaggaca

SEQ ID NO: 5763651 - DNA, 25 bp, Homo sapien
cctacatcttacaaataagagaaga

SEQ ID NO: 5763652 - DNA, 25 bp, Homo sapien
cttcttgaccgagaaacactgctat

SEQ ID NO: 5763653 - DNA, 25 bp, Homo sapien
tacagtattctacagggacagccct

SEQ ID NO: 5763654 - DNA, 25 bp, Homo sapien
aagatccagatgctgccaggaatcc

SEQ ID NO: 5763655 - DNA, 25 bp, Homo sapien
tttccttggcccctgaagcagccag

SEQ ID NO: 5763656 - DNA, 25 bp, Homo sapien
ttaaagtggaagcctccaatcctta

SEQ ID NO: 5763657 - DNA, 25 bp, Homo sapien
tttcgttttccttggcccctgaagc

SEQ ID NO: 5763658 - DNA, 25 bp, Homo sapien
agcagcactgggacagtgactgtcc

SEQ ID NO: 5763659 - DNA, 25 bp, Homo sapien
tacacaggatccgattatcagtatg

SEQ ID NO: 5763660 - DNA, 25 bp, Homo sapien
aagttacattcagaccaggatagag

SEQ ID NO: 5763661 - DNA, 25 bp, Homo sapien
cgctcatccaccccacgggactgag

SEQ ID NO: 5763662 - DNA, 25 bp, Homo sapien
caccaaggaggtttacacagccact

SEQ ID NO: 5763663 - DNA, 25 bp, Homo sapien
agtggaagcctccaatccttatgtt

SEQ ID NO: 5763664 - DNA, 25 bp, Homo sapien
gctgtacgatgtgaactcatttttg

SEQ ID NO: 5763665 - DNA, 25 bp, Homo sapien
ctgatctaggtgagtcgagttacat

SEQ ID NO: 5763666 - DNA, 25 bp, Homo sapien
acacggcgggaatcttaactcggaa

SEQ ID NO: 5763667 - DNA, 25 bp, Homo sapien
tgacaatgaaccaatattcaccaag

SEQ ID NO: 5763668 - DNA, 25 bp, Homo sapien
ctcccccattaaggcatacagcctg

SEQ ID NO: 5763669 - DNA, 25 bp, Homo sapien
agtgatagcaacagagatcaataat

SEQ ID NO: 5763670 - DNA, 25 bp, Homo sapien
tcagttgattcagaccttgcatgct

SEQ ID NO: 5763671 - DNA, 25 bp, Homo sapien
ggttgccatccttctgtgcatcgtg

SEQ ID NO: 5763672 - DNA, 25 bp, Homo sapien
atgaatctcgggggatttcagggca

SEQ ID NO: 5763673 - DNA, 25 bp, Homo sapien
catcaccgaccaggaaacccaggaa

SEQ ID NO: 5763674 - DNA, 25 bp, Homo sapien
aaccaatattcaccaaggaggttta

SEQ ID NO: 5763675 - DNA, 25 bp, Homo sapien
gatgagccacctgtcttcagcaaac

SEQ ID NO: 5763676 - DNA, 25 bp, Homo sapien
actcatttttgcttgcaaatggctt

SEQ ID NO: 5763677 - DNA, 25 bp, Homo sapien
cttaccgctacttcttgctgctctt

SEQ ID NO: 5763678 - DNA, 25 bp, Homo sapien
atcaataatccaaagcaaagtagtc

SEQ ID NO: 5763679 - DNA, 25 bp, Homo sapien
caaaaatgagctgaaccgttcaaaa

SEQ ID NO: 5763680 - DNA, 25 bp, Homo sapien
taactcggaaaaatggctataatag

SEQ ID NO: 5763681 - DNA, 25 bp, Homo sapien
agcaggagatctcttcattattaat

SEQ ID NO: 5763682 - DNA, 25 bp, Homo sapien
ggggctctggttgccatccttctgt

SEQ ID NO: 5763683 - DNA, 25 bp, Homo sapien
tacttggggcctttcaaagattcag

SEQ ID NO: 5763684 - DNA, 25 bp, Homo sapien
ttgaccgagaaacactgctatggca

SEQ ID NO: 5763685 - DNA, 25 bp, Homo sapien
gatgtagatgagccacctgtcttca

SEQ ID NO: 5763686 - DNA, 25 bp, Homo sapien
tatgtttgatgtcatcaccgaccag

SEQ ID NO: 5763687 - DNA, 25 bp, Homo sapien
acaacaaagacaacacggcgggaat

SEQ ID NO: 5763688 - DNA, 25 bp, Homo sapien
ccacgatttctctacttggggcctt

SEQ ID NO: 5763689 - DNA, 25 bp, Homo sapien
agccacgatttctctacttggggcc

SEQ ID NO: 5763690 - DNA, 25 bp, Homo sapien
ggaaacagcaaaaatgagctgaacc

SEQ ID NO: 5763691 - DNA, 25 bp, Homo sapien
ctggagctctctggaaacagcaaaa

SEQ ID NO: 5763692 - DNA, 25 bp, Homo sapien
aaacagaaggacagggagacccgtg

SEQ ID NO: 5763693 - DNA, 25 bp, Homo sapien
tcccagcaaagaaaagggccctgga

SEQ ID NO: 5763694 - DNA, 25 bp, Homo sapien
gcccaagatccagatgctgccagga

SEQ ID NO: 5763695 - DNA, 25 bp, Homo sapien
atccgattatcagtatgtgggcaag

SEQ ID NO: 5763696 - DNA, 25 bp, Homo sapien
tgagccacctgtcttcagcaaactg

SEQ ID NO: 5763697 - DNA, 25 bp, Homo sapien
ggagacccgtggagcccgagtctga

SEQ ID NO: 5763698 - DNA, 25 bp, Homo sapien
cacaggatccgattatcagtatgtg

SEQ ID NO: 5763699 - DNA, 25 bp, Homo sapien
gtggaatcagttctttctcctggag

SEQ ID NO: 5763700 - DNA, 25 bp, Homo sapien
agggtctccgcgggcgcaggaaggc

SEQ ID NO: 5763701 - DNA, 25 bp, Homo sapien
agctttgctcaacatggatcgagaa

SEQ ID NO: 5763702 - DNA, 25 bp, Homo sapien
gtctggcatggagtgtatgatgagg

SEQ ID NO: 5763703 - DNA, 25 bp, Homo sapien
ccaaggaggtttacacagccactgt

SEQ ID NO: 5763704 - DNA, 25 bp, Homo sapien
ccaattggcagaatcaaagccagcg

SEQ ID NO: 5763705 - DNA, 25 bp, Homo sapien
ggtgaggggctggatatgtttgatg

SEQ ID NO: 5763706 - DNA, 25 bp, Homo sapien
tcgagaaaacagggagcagtaccaa

SEQ ID NO: 5763707 - DNA, 25 bp, Homo sapien
ccgctacttcttgctgctcttttgg

SEQ ID NO: 5763708 - DNA, 25 bp, Homo sapien
tgaacagatgtgaaacttgctcgtg

SEQ ID NO: 5763709 - DNA, 25 bp, Homo sapien
ctggaaacagcaaaaatgagctgaa

SEQ ID NO: 5763710 - DNA, 25 bp, Homo sapien
cccatggtgaggggctcacactgtt

SEQ ID NO: 5763711 - DNA, 25 bp, Homo sapien
tgtctatcagactgggaatgaatct

SEQ ID NO: 5763712 - DNA, 25 bp, Homo sapien
cgggggatttcagggcaacataaat

SEQ ID NO: 5763713 - DNA, 25 bp, Homo sapien
ggcgctcatccaccccacgggactg

SEQ ID NO: 5763714 - DNA, 25 bp, Homo sapien
cacgggggctctggttgccatcctt

SEQ ID NO: 5763715 - DNA, 25 bp, Homo sapien
tgatgtcaacgacaaccctccccga

SEQ ID NO: 5763716 - DNA, 25 bp, Homo sapien
ccgattatcagtatgtgggcaagtt

SEQ ID NO: 5763717 - DNA, 25 bp, Homo sapien
gcttgcaaatggctttggaaaatga

SEQ ID NO: 5763718 - DNA, 25 bp, Homo sapien
agtactctgtagatcgacacacaga

SEQ ID NO: 5763719 - DNA, 25 bp, Homo sapien
ttcagggcaacataaatgtgccctt

SEQ ID NO: 5763720 - DNA, 25 bp, Homo sapien
acccaactctctcaactccactatc

SEQ ID NO: 5763721 - DNA, 25 bp, Homo sapien
tcgcagggtctccgcgggcgcagga

SEQ ID NO: 5763722 - DNA, 25 bp, Homo sapien
ccccgattcccccagagtacatacc

SEQ ID NO: 5763723 - DNA, 25 bp, Homo sapien
acgatttctctacttggggcctttc

SEQ ID NO: 5763724 - DNA, 25 bp, Homo sapien
ttgctgagttctatgaaacttttgt

SEQ ID NO: 5763725 - DNA, 25 bp, Homo sapien
aacagatgtgaaacttgctcgtgtc

SEQ ID NO: 5763726 - DNA, 25 bp, Homo sapien
atatggacagaatattcaacattga

SEQ ID NO: 5763727 - DNA, 25 bp, Homo sapien
gctcgtgtctttgcttgcccaggaa

SEQ ID NO: 5763728 - DNA, 25 bp, Homo sapien
cggcagagccggcgaccgcggcggc

SEQ ID NO: 5763729 - DNA, 25 bp, Homo sapien
aacagtgctaaagttgtctacagta

SEQ ID NO: 5763730 - DNA, 25 bp, Homo sapien
cagccacggttagaattgtggtgga

SEQ ID NO: 5763731 - DNA, 25 bp, Homo sapien
aaggagctggatgtggaatcagttc

SEQ ID NO: 5763732 - DNA, 25 bp, Homo sapien
tgggaccaccaccgtgaacatcaca

SEQ ID NO: 5763733 - DNA, 25 bp, Homo sapien
ggacagaatattcaacattgattct

SEQ ID NO: 5763734 - DNA, 25 bp, Homo sapien
cattacagtgatagcaacagagatc

SEQ ID NO: 5763735 - DNA, 25 bp, Homo sapien
gtggtttcccagcaaagaaaagggc

SEQ ID NO: 5763736 - DNA, 25 bp, Homo sapien
taggtgagtcgagttacatactgag

SEQ ID NO: 5763737 - DNA, 25 bp, Homo sapien
ctactaggtaaactggttctccctg

SEQ ID NO: 5763738 - DNA, 25 bp, Homo sapien
cagagtacataccagtttaaaactc

SEQ ID NO: 5763739 - DNA, 25 bp, Homo sapien
gggaacatgcaatcctgccacgcgg

SEQ ID NO: 5763740 - DNA, 25 bp, Homo sapien
ggctttggaaaatgaacagatgtga

SEQ ID NO: 5763741 - DNA, 25 bp, Homo sapien
taccgctacttcttgctgctctttt

SEQ ID NO: 5763742 - DNA, 25 bp, Homo sapien
ctcaactccactatcaaagaggact

SEQ ID NO: 5763743 - DNA, 25 bp, Homo sapien
gagatatcctctgagagccaagcaa

SEQ ID NO: 5763744 - DNA, 25 bp, Homo sapien
agatccatgacatcaatgacaatga

SEQ ID NO: 5763745 - DNA, 25 bp, Homo sapien
tactctgtagatcgacacacagata

SEQ ID NO: 5763746 - DNA, 25 bp, Homo sapien
tgacccttatagtgggcaccaattt

SEQ ID NO: 5763747 - DNA, 25 bp, Homo sapien
ctgtcaagtactctgtagatcgaca

SEQ ID NO: 5763748 - DNA, 25 bp, Homo sapien
gaatcttaactcggaaaaatggcta

SEQ ID NO: 5763749 - DNA, 25 bp, Homo sapien
cggaggcgctcatccaccccacggg

SEQ ID NO: 5763750 - DNA, 25 bp, Homo sapien
ctgtgctgtacgatgtgaactcatt

SEQ ID NO: 5763751 - DNA, 25 bp, Homo sapien
acagaaggacagggagacccgtgga

SEQ ID NO: 5763752 - DNA, 25 bp, Homo sapien
gggacagccctatttttcagttgaa

SEQ ID NO: 5763753 - DNA, 25 bp, Homo sapien
catcagcatgagaacttaccgctac

SEQ ID NO: 5763754 - DNA, 25 bp, Homo sapien
caaagaacattaaggaaggaaggag

SEQ ID NO: 5763755 - DNA, 25 bp, Homo sapien
ttctttctcctggaggaatacacag

SEQ ID NO: 5763756 - DNA, 25 bp, Homo sapien
gtattctacagggacagccctattt

SEQ ID NO: 5763757 - DNA, 25 bp, Homo sapien
acactgactgatgtcaacgacaacc

SEQ ID NO: 5763758 - DNA, 25 bp, Homo sapien
tgtagatgagccacctgtcttcagc

SEQ ID NO: 5763759 - DNA, 25 bp, Homo sapien
gcccaggaagcaaagaatctcttgt

SEQ ID NO: 5763760 - DNA, 25 bp, Homo sapien
ggacagggagacccgtggagcccga

SEQ ID NO: 5763761 - DNA, 25 bp, Homo sapien
agccctacccaactctctcaactcc

SEQ ID NO: 5763762 - DNA, 25 bp, Homo sapien
aaggaggtttacacagccactgtcc

SEQ ID NO: 5763763 - DNA, 25 bp, Homo sapien
gccctatttttcagttgaatcagaa

SEQ ID NO: 5763764 - DNA, 25 bp, Homo sapien
caactccactatcaaagaggactag

SEQ ID NO: 5763765 - DNA, 25 bp, Homo sapien
ccatgacatcaatgacaatgaacca

SEQ ID NO: 5763766 - DNA, 25 bp, Homo sapien
ggctcaaactttaccattcaagaca

SEQ ID NO: 5763767 - DNA, 25 bp, Homo sapien
caggatccgattatcagtatgtggg

SEQ ID NO: 5763768 - DNA, 25 bp, Homo sapien
caatgacaacgccccagaatttgct

SEQ ID NO: 5763769 - DNA, 25 bp, Homo sapien
caagaacggcagagccggcgaccgc

SEQ ID NO: 5763770 - DNA, 25 bp, Homo sapien
ggtgggccagccctacccaactctc

SEQ ID NO: 5763771 - DNA, 25 bp, Homo sapien
ggaacagtgctaaagttgtctacag

SEQ ID NO: 5763772 - DNA, 25 bp, Homo sapien
aactcctgaatcttctccaccgggg

SEQ ID NO: 5763773 - DNA, 25 bp, Homo sapien
ttgcaaatggctttggaaaatgaac

SEQ ID NO: 5763774 - DNA, 25 bp, Homo sapien
ggactagtggtttcccagcaaagaa

SEQ ID NO: 5763775 - DNA, 25 bp, Homo sapien
gccgcgacagcaagaacggcagagc

SEQ ID NO: 5763776 - DNA, 25 bp, Homo sapien
ctctctggaaacagcaaaaatgagc

SEQ ID NO: 5763777 - DNA, 25 bp, Homo sapien
atggatcacttaaatatatcctttc

SEQ ID NO: 5763778 - DNA, 25 bp, Homo sapien
ttccaagagtggggcactcactacg

SEQ ID NO: 5763779 - DNA, 25 bp, Homo sapien
gtttacatccttcgagctcaagcta

SEQ ID NO: 5763780 - DNA, 25 bp, Homo sapien
gccaagcaaagaacattaaggaagg

SEQ ID NO: 5763781 - DNA, 25 bp, Homo sapien
caccaccgtgaacatcacactgact

SEQ ID NO: 5763782 - DNA, 25 bp, Homo sapien
tgggagaaaatgctgaaattgagta

SEQ ID NO: 5763783 - DNA, 25 bp, Homo sapien
catttcagacaacgactacccagtt

SEQ ID NO: 5763784 - DNA, 25 bp, Homo sapien
aggatgtagatgagccacctgtctt

SEQ ID NO: 5763785 - DNA, 25 bp, Homo sapien
agaaggacagggagacccgtggagc

SEQ ID NO: 5763786 - DNA, 25 bp, Homo sapien
ctttgctcaacatggatcgagaaaa

SEQ ID NO: 5763787 - DNA, 25 bp, Homo sapien
aacatcacactgactgatgtcaacg

SEQ ID NO: 5763788 - DNA, 25 bp, Homo sapien
atccatgacatcaatgacaatgaac

SEQ ID NO: 5763789 - DNA, 25 bp, Homo sapien
cagtttcagccgcgacagcaagaac

SEQ ID NO: 5763790 - DNA, 25 bp, Homo sapien
ctgtagatcgacacacagatatgga

SEQ ID NO: 5763791 - DNA, 25 bp, Homo sapien
atgtctgatgtcggtacatttgttg

SEQ ID NO: 5763792 - DNA, 25 bp, Homo sapien
cgatgtgaactcatttttgcttgca

SEQ ID NO: 5763793 - DNA, 25 bp, Homo sapien
acagcaagaacggcagagccggcga

SEQ ID NO: 5763794 - DNA, 25 bp, Homo sapien
ccttatagtgggcaccaattttcgt

SEQ ID NO: 5763795 - DNA, 25 bp, Homo sapien
gagtgtatgatgaggtccctttcta

SEQ ID NO: 5763796 - DNA, 25 bp, Homo sapien
ttgaatcagaaacaggtattatcaa

SEQ ID NO: 5763797 - DNA, 25 bp, Homo sapien
gatcctactaggtaaactggttctc

SEQ ID NO: 5763798 - DNA, 25 bp, Homo sapien
gaggattatctgggaccaccaccgt

SEQ ID NO: 5763799 - DNA, 25 bp, Homo sapien
gcctcccccattaaggcatacagcc

SEQ ID NO: 5763800 - DNA, 25 bp, Homo sapien
actagtggtttcccagcaaagaaaa

SEQ ID NO: 5763801 - DNA, 25 bp, Homo sapien
caagacaacaaagacaacacggcgg

SEQ ID NO: 5763802 - DNA, 25 bp, Homo sapien
tagtggtttcccagcaaagaaaagg

SEQ ID NO: 5763803 - DNA, 25 bp, Homo sapien
tcaacatggatcgagaaaacaggga

SEQ ID NO: 5763804 - DNA, 25 bp, Homo sapien
ccacctgtcttcagcaaactggcct

SEQ ID NO: 5763805 - DNA, 25 bp, Homo sapien
agatgagcacctatctcttgcctgt

SEQ ID NO: 5763806 - DNA, 25 bp, Homo sapien
gggcctttcaaagattcagccacgg

SEQ ID NO: 5763807 - DNA, 25 bp, Homo sapien
aaacagggagcagtaccaagtggtg

SEQ ID NO: 5763808 - DNA, 25 bp, Homo sapien
agctgaaccgttcaaaaaggagctg

SEQ ID NO: 5763809 - DNA, 25 bp, Homo sapien
atgtggaatcagttctttctcctgg

SEQ ID NO: 5763810 - DNA, 25 bp, Homo sapien
gttacattcagaccaggatagagga

SEQ ID NO: 5763811 - DNA, 25 bp, Homo sapien
accggggacaccaattggcagaatc

SEQ ID NO: 5763812 - DNA, 25 bp, Homo sapien
tgagctgaaccgttcaaaaaggagc

SEQ ID NO: 5763813 - DNA, 25 bp, Homo sapien
agttgattcagaccttgcatgctgt

SEQ ID NO: 5763814 - DNA, 25 bp, Homo sapien
aacactgctatggcacaacattaca

SEQ ID NO: 5763815 - DNA, 25 bp, Homo sapien
cctctatatattaaagttctagatg

SEQ ID NO: 5763816 - DNA, 25 bp, Homo sapien
tgtgaccaccacgggaacatgcaat

SEQ ID NO: 5763817 - DNA, 25 bp, Homo sapien
caaagattcagccacggttagaatt

SEQ ID NO: 5763818 - DNA, 25 bp, Homo sapien
ccaggatagaggagatggatcactt

SEQ ID NO: 5763819 - DNA, 25 bp, Homo sapien
acagactcgacggtgccatcagcat

SEQ ID NO: 5763820 - DNA, 25 bp, Homo sapien
cttttcatttcattcgttgtgtaat

SEQ ID NO: 5763821 - DNA, 25 bp, Homo sapien
gtcgagtacctctatatattaaagt

SEQ ID NO: 5763822 - DNA, 25 bp, Homo sapien
aagcaaagtagtcgagtacctctat

SEQ ID NO: 5763823 - DNA, 25 bp, Homo sapien
tgggtgggccagccctacccaactc

SEQ ID NO: 5763824 - DNA, 25 bp, Homo sapien
ggatttcagggcaacataaatgtgc

SEQ ID NO: 5763825 - DNA, 25 bp, Homo sapien
gagaaacactgctatggcacaacat

SEQ ID NO: 5763826 - DNA, 25 bp, Homo sapien
cgttcaaaaaggagctggatgtgga

SEQ ID NO: 5763827 - DNA, 25 bp, Homo sapien
aactctctcaactccactatcaaag

SEQ ID NO: 5763828 - DNA, 25 bp, Homo sapien
gctgagttctatgaaacttttgtct

SEQ ID NO: 5763829 - DNA, 25 bp, Homo sapien
ggaggcaggagcagcctgggcgggt

SEQ ID NO: 5763830 - DNA, 25 bp, Homo sapien
ttcaaaaaggagctggatgtggaat

SEQ ID NO: 5763831 - DNA, 25 bp, Homo sapien
gaagcaaagaatctcttgtctatca

SEQ ID NO: 5763832 - DNA, 25 bp, Homo sapien
gaactcatttttgcttgcaaatggc

SEQ ID NO: 5763833 - DNA, 25 bp, Homo sapien
tgaccaccacgggaacatgcaatcc

SEQ ID NO: 5763834 - DNA, 25 bp, Homo sapien
gggaatcttaactcggaaaaatggc

SEQ ID NO: 5763835 - DNA, 25 bp, Homo sapien
tttgttgtccaagtcactgcgacgg

SEQ ID NO: 5763836 - DNA, 25 bp, Homo sapien
ctgagagccaagcaaagaacattaa

SEQ ID NO: 5763837 - DNA, 25 bp, Homo sapien
agacagctttgctcaacatggatcg

SEQ ID NO: 5763838 - DNA, 25 bp, Homo sapien
gaagcctccaatccttatgttgagc

SEQ ID NO: 5763839 - DNA, 25 bp, Homo sapien
tattaaagttctagatgtcaatgac

SEQ ID NO: 5763840 - DNA, 25 bp, Homo sapien
agatcaataatccaaagcaaagtag

SEQ ID NO: 5763841 - DNA, 25 bp, Homo sapien
ctccgtcacagcccaagatccagat

SEQ ID NO: 5763842 - DNA, 25 bp, Homo sapien
cactctagatttatctgcctccccc

SEQ ID NO: 5763843 - DNA, 25 bp, Homo sapien
tagaattgtggtggaggatgtagat

SEQ ID NO: 5763844 - DNA, 25 bp, Homo sapien
gatcagttgattcagaccttgcatg

SEQ ID NO: 5763845 - DNA, 25 bp, Homo sapien
tgttgtccaagtcactgcgacggat

SEQ ID NO: 5763846 - DNA, 25 bp, Homo sapien
tatatattaaagttctagatgtcaa

SEQ ID NO: 5763847 - DNA, 25 bp, Homo sapien
ccaggaaacccaggaagggattata

SEQ ID NO: 5763848 - DNA, 25 bp, Homo sapien
cacggttagaattgtggtggaggat

SEQ ID NO: 5763849 - DNA, 25 bp, Homo sapien
gaggaatgaggctggatacggtgca

SEQ ID NO: 5763850 - DNA, 25 bp, Homo sapien
tacagggacagccctatttttcagt

SEQ ID NO: 5763851 - DNA, 25 bp, Homo sapien
ggagaaaatgctgaaattgagtaca

SEQ ID NO: 5763852 - DNA, 25 bp, Homo sapien
tcatcaagatccatgacatcaatga

SEQ ID NO: 5763853 - DNA, 25 bp, Homo sapien
aagcgtctggcatggagtgtatgat

SEQ ID NO: 5763854 - DNA, 25 bp, Homo sapien
gagttacatactgagaatctgtgct

SEQ ID NO: 5763855 - DNA, 25 bp, Homo sapien
caataatccaaagcaaagtagtcga

SEQ ID NO: 5763856 - DNA, 25 bp, Homo sapien
gttcaaagcagcactgggacagtga

SEQ ID NO: 5763857 - DNA, 25 bp, Homo sapien
ggaaaatgaacagatgtgaaacttg

SEQ ID NO: 5763858 - DNA, 25 bp, Homo sapien
aactggcctacatcttacaaataag

SEQ ID NO: 5763859 - DNA, 25 bp, Homo sapien
gttcgatttttacatcgaaacttct

SEQ ID NO: 5763860 - DNA, 25 bp, Homo sapien
catcccaagagctgcagtttcagcc

SEQ ID NO: 5763861 - DNA, 25 bp, Homo sapien
caagaggctggacagggaagaaaaa

SEQ ID NO: 5763862 - DNA, 25 bp, Homo sapien
cagatcagttgattcagaccttgca

SEQ ID NO: 5763863 - DNA, 25 bp, Homo sapien
tcgagttacatactgagaatctgtg

SEQ ID NO: 5763864 - DNA, 25 bp, Homo sapien
ccctggagctctctggaaacagcaa

SEQ ID NO: 5763865 - DNA, 25 bp, Homo sapien
ttcagccacggttagaattgtggtg

SEQ ID NO: 5763866 - DNA, 25 bp, Homo sapien
accgttcaaaaaggagctggatgtg

SEQ ID NO: 5763867 - DNA, 25 bp, Homo sapien
ttaccattcaagacaacaaagacaa

SEQ ID NO: 5763868 - DNA, 25 bp, Homo sapien
atgtgggcaagttacattcagacca

SEQ ID NO: 5763869 - DNA, 25 bp, Homo sapien
ggccagccctacccaactctctcaa

SEQ ID NO: 5763870 - DNA, 25 bp, Homo sapien
caggtattatcaagacagctttgct

SEQ ID NO: 5763871 - DNA, 25 bp, Homo sapien
cacgagatgagcacctatctcttgc

SEQ ID NO: 5763872 - DNA, 25 bp, Homo sapien
tggaaatggttcgatttttacatcg

SEQ ID NO: 5763873 - DNA, 25 bp, Homo sapien
ggcagatcagttgattcagaccttg

SEQ ID NO: 5763874 - DNA, 25 bp, Homo sapien
gacggatgcagatgatccaacatat

SEQ ID NO: 5763875 - DNA, 25 bp, Homo sapien
aactgtcaaaaagctcttggacttt

SEQ ID NO: 5763876 - DNA, 25 bp, Homo sapien
gatgtgaaacttgctcgtgtctttg

SEQ ID NO: 5763877 - DNA, 25 bp, Homo sapien
cagaaacaggtattatcaagacagc

SEQ ID NO: 5763878 - DNA, 25 bp, Homo sapien
ctttcaaagattcagccacggttag

SEQ ID NO: 5763879 - DNA, 25 bp, Homo sapien
gcggaggcaggagcagcctgggcgg

SEQ ID NO: 5763880 - DNA, 25 bp, Homo sapien
gtggagcccgagtctgaattcatca

SEQ ID NO: 5763881 - DNA, 25 bp, Homo sapien
tccttctgtgcatcgtgatcctact

SEQ ID NO: 5763882 - DNA, 25 bp, Homo sapien
ttgcccaggaagcaaagaatctctt

SEQ ID NO: 5763883 - DNA, 25 bp, Homo sapien
cagatgatccaacatatgggaacag

SEQ ID NO: 5763884 - DNA, 25 bp, Homo sapien
aatattcaccaaggaggtttacaca

SEQ ID NO: 5763885 - DNA, 25 bp, Homo sapien
aaaactcctgaatcttctccaccgg

SEQ ID NO: 5763886 - DNA, 25 bp, Homo sapien
aacataaatgtgcccttttcatttc

SEQ ID NO: 5763887 - DNA, 25 bp, Homo sapien
atccttcgagctcaagctataaaca

SEQ ID NO: 5763888 - DNA, 25 bp, Homo sapien
gacaaggatgacccttatagtgggc

SEQ ID NO: 5763889 - DNA, 25 bp, Homo sapien
aagacaacacggcgggaatcttaac

SEQ ID NO: 5763890 - DNA, 25 bp, Homo sapien
agactcgacggtgccatcagcatga

SEQ ID NO: 5763891 - DNA, 25 bp, Homo sapien
ataccagtttaaaactcctgaatct

SEQ ID NO: 5763892 - DNA, 25 bp, Homo sapien
ataatagacacgagatgagcaccta

SEQ ID NO: 5763893 - DNA, 25 bp, Homo sapien
agcacgggggctctggttgccatcc

SEQ ID NO: 5763894 - DNA, 25 bp, Homo sapien
atgtcatcaccgaccaggaaaccca

SEQ ID NO: 5763895 - DNA, 25 bp, Homo sapien
ctcctggaggaatacacaggatccg

SEQ ID NO: 5763896 - DNA, 25 bp, Homo sapien
tgtggtcatttcagacaacgactac

SEQ ID NO: 5763897 - DNA, 25 bp, Homo sapien
ccaccgtgaacatcacactgactga

SEQ ID NO: 5763898 - DNA, 25 bp, Homo sapien
agaagatgctcagataaacaccaca

SEQ ID NO: 5763899 - DNA, 25 bp, Homo sapien
ttctatgaaacttttgtctgtgaaa

SEQ ID NO: 5763900 - DNA, 25 bp, Homo sapien
gcatgctgttgacaaggatgaccct

SEQ ID NO: 5763901 - DNA, 25 bp, Homo sapien
tgggacagtgactgtccgggtctgt

SEQ ID NO: 5763902 - DNA, 25 bp, Homo sapien
gtgacactctagatttatctgcctc

SEQ ID NO: 5763903 - DNA, 25 bp, Homo sapien
gaatctgtgctgtacgatgtgaact

SEQ ID NO: 5763904 - DNA, 25 bp, Homo sapien
ctttggaaaatgaacagatgtgaaa

SEQ ID NO: 5763905 - DNA, 25 bp, Homo sapien
aaggacagggagacccgtggagccc

SEQ ID NO: 5763906 - DNA, 25 bp, Homo sapien
actcgacggtgccatcagcatgaga

SEQ ID NO: 5763907 - DNA, 25 bp, Homo sapien
cgagctcaagctataaacagaagga

SEQ ID NO: 5763908 - DNA, 25 bp, Homo sapien
ccactgtccctgaaatgtctgatgt

SEQ ID NO: 5763909 - DNA, 25 bp, Homo sapien
tacccagttcaaagcagcactggga

SEQ ID NO: 5763910 - DNA, 25 bp, Homo sapien
acaatgaaccaatattcaccaagga

SEQ ID NO: 5763911 - DNA, 25 bp, Homo sapien
atggacagaatattcaacattgatt

SEQ ID NO: 5763912 - DNA, 25 bp, Homo sapien
tcagactgggaatgaatctcggggg

SEQ ID NO: 5763913 - DNA, 25 bp, Homo sapien
ttcgcatcccaagagctgcagtttc

SEQ ID NO: 5763914 - DNA, 25 bp, Homo sapien
caaaaagctcttggactttgaaaag

SEQ ID NO: 5763915 - DNA, 25 bp, Homo sapien
gaacatgcaatcctgccacgcggag

SEQ ID NO: 5763916 - DNA, 25 bp, Homo sapien
tatatcctttcaggagatggagcag

SEQ ID NO: 5763917 - DNA, 25 bp, Homo sapien
agcccgagtctgaattcatcatcaa

SEQ ID NO: 5763918 - DNA, 25 bp, Homo sapien
tcgtgtctttgcttgcccaggaagc

SEQ ID NO: 5763919 - DNA, 25 bp, Homo sapien
aagaaaagggccctggagctctctg

SEQ ID NO: 5763920 - DNA, 25 bp, Homo sapien
cggcgaccgcggcggcggcggcggc

SEQ ID NO: 5763921 - DNA, 25 bp, Homo sapien
ctttgcttgcccaggaagcaaagaa

SEQ ID NO: 5763922 - DNA, 25 bp, Homo sapien
gccccagaatttgctgagttctatg

SEQ ID NO: 5763923 - DNA, 25 bp, Homo sapien
gtgggcaagttacattcagaccagg

SEQ ID NO: 5763924 - DNA, 25 bp, Homo sapien
agcatgagaacttaccgctacttct

SEQ ID NO: 5763925 - DNA, 25 bp, Homo sapien
tgatagcaacagagatcaataatcc

SEQ ID NO: 5763926 - DNA, 25 bp, Homo sapien
gctggatacggtgcagtgaaaaagg

SEQ ID NO: 5763927 - DNA, 25 bp, Homo sapien
agggagcagtaccaagtggtgattc

SEQ ID NO: 5763928 - DNA, 25 bp, Homo sapien
tacttcttgctgctcttttgggtgg

SEQ ID NO: 5763929 - DNA, 25 bp, Homo sapien
gaaggaaggaggaatgaggctggat

SEQ ID NO: 5763930 - DNA, 25 bp, Homo sapien
aacatggatcgagaaaacagggagc

SEQ ID NO: 5763931 - DNA, 25 bp, Homo sapien
ggaatgaggctggatacggtgcagt

SEQ ID NO: 5763932 - DNA, 25 bp, Homo sapien
taggtaaactggttctccctgcctc

SEQ ID NO: 5763933 - DNA, 25 bp, Homo sapien
gatgctgatgtgggagaaaatgctg

SEQ ID NO: 5763934 - DNA, 25 bp, Homo sapien
catacagcctgatctaggtgagtcg

SEQ ID NO: 5763935 - DNA, 25 bp, Homo sapien
cggttagaattgtggtggaggatgt

SEQ ID NO: 5763936 - DNA, 25 bp, Homo sapien
ctcactacgcacagactcgacggtg

SEQ ID NO: 5763937 - DNA, 25 bp, Homo sapien
ggcaccaattttcgttttccttggc

SEQ ID NO: 5763938 - DNA, 25 bp, Homo sapien
ctcttgtctatcagactgggaatga

SEQ ID NO: 5763939 - DNA, 25 bp, Homo sapien
gacatcaatgacaatgaaccaatat

SEQ ID NO: 5763940 - DNA, 25 bp, Homo sapien
gaacattaaggaaggaaggaggaat

SEQ ID NO: 5763941 - DNA, 25 bp, Homo sapien
tattcaacattgattctggaaatgg

SEQ ID NO: 5763942 - DNA, 25 bp, Homo sapien
caagtggtgattcaagccaaggata

SEQ ID NO: 5763943 - DNA, 25 bp, Homo sapien
gcccctgaagcagccagtggctcaa

SEQ ID NO: 5763944 - DNA, 25 bp, Homo sapien
tccctgaaatgtctgatgtcggtac

SEQ ID NO: 5763945 - DNA, 25 bp, Homo sapien
ggcgggtcgcagggtctccgcgggc

SEQ ID NO: 5763946 - DNA, 25 bp, Homo sapien
acacagccactgtccctgaaatgtc

SEQ ID NO: 5763947 - DNA, 25 bp, Homo sapien
ggtgagtcgagttacatactgagaa

SEQ ID NO: 5763948 - DNA, 25 bp, Homo sapien
ctataatagacacgagatgagcacc

SEQ ID NO: 5763949 - DNA, 25 bp, Homo sapien
ttcaagccaaggatatgggcggcca

SEQ ID NO: 5763950 - DNA, 25 bp, Homo sapien
atcaagatccatgacatcaatgaca

SEQ ID NO: 5763951 - DNA, 25 bp, Homo sapien
gagtacagcatcacagacggtgagg

SEQ ID NO: 5763952 - DNA, 25 bp, Homo sapien
tacctctatatattaaagttctaga

SEQ ID NO: 5763953 - DNA, 25 bp, Homo sapien
gtcaaaaagctcttggactttgaaa

SEQ ID NO: 5763954 - DNA, 25 bp, Homo sapien
agtacctctatatattaaagttcta

SEQ ID NO: 5763955 - DNA, 25 bp, Homo sapien
gtgcagtgaaaaaggcacttccaag

SEQ ID NO: 5763956 - DNA, 25 bp, Homo sapien
acaacattacagtgatagcaacaga

SEQ ID NO: 5763957 - DNA, 25 bp, Homo sapien
ttcgagctcaagctataaacagaag

SEQ ID NO: 5763958 - DNA, 25 bp, Homo sapien
gacaacacggcgggaatcttaactc

SEQ ID NO: 5763959 - DNA, 25 bp, Homo sapien
aggtttacacagccactgtccctga

SEQ ID NO: 5763960 - DNA, 25 bp, Homo sapien
ggctataatagacacgagatgagca

SEQ ID NO: 5763961 - DNA, 25 bp, Homo sapien
tttcattcgttgtgtaattttttta

SEQ ID NO: 5763962 - DNA, 25 bp, Homo sapien
tgctcagataaacaccacaataggc

SEQ ID NO: 5763963 - DNA, 25 bp, Homo sapien
ggaggtttacacagccactgtccct

SEQ ID NO: 5763964 - DNA, 25 bp, Homo sapien
agctggatgtggaatcagttctttc

SEQ ID NO: 5763965 - DNA, 25 bp, Homo sapien
ttggaaaatgaacagatgtgaaact

SEQ ID NO: 5763966 - DNA, 25 bp, Homo sapien
ctgcctcctatctccccatggtgag

SEQ ID NO: 5763967 - DNA, 25 bp, Homo sapien
catcatcaagatccatgacatcaat

SEQ ID NO: 5763968 - DNA, 25 bp, Homo sapien
taaacaccacaataggctccgtcac

SEQ ID NO: 5763969 - DNA, 25 bp, Homo sapien
caaataagagaagatgctcagataa

SEQ ID NO: 5763970 - DNA, 25 bp, Homo sapien
atatgggcggccagatgggaggatt

SEQ ID NO: 5763971 - DNA, 25 bp, Homo sapien
ctcctgaatcttctccaccggggac

SEQ ID NO: 5763972 - DNA, 25 bp, Homo sapien
catcgaaacttcttgaccgagaaac

SEQ ID NO: 5763973 - DNA, 25 bp, Homo sapien
agcaaaggcagatcagttgattcag

SEQ ID NO: 5763974 - DNA, 25 bp, Homo sapien
ctgctatggcacaacattacagtga

SEQ ID NO: 5763975 - DNA, 25 bp, Homo sapien
agctctctggaaacagcaaaaatga

SEQ ID NO: 5763976 - DNA, 25 bp, Homo sapien
cttttgggtgggccagccctaccca

SEQ ID NO: 5763977 - DNA, 25 bp, Homo sapien
cgactacccagttcaaagcagcact

SEQ ID NO: 5763978 - DNA, 25 bp, Homo sapien
aagaggactagtggtttcccagcaa

SEQ ID NO: 5763979 - DNA, 25 bp, Homo sapien
cgggactgagcacgggggctctggt

SEQ ID NO: 5763980 - DNA, 25 bp, Homo sapien
caaaggcagatcagttgattcagac

SEQ ID NO: 5763981 - DNA, 25 bp, Homo sapien
cattcaagacaacaaagacaacacg

SEQ ID NO: 5763982 - DNA, 25 bp, Homo sapien
tctggaaatggttcgatttttacat

SEQ ID NO: 5763983 - DNA, 25 bp, Homo sapien
acccttatagtgggcaccaattttc

SEQ ID NO: 5763984 - DNA, 25 bp, Homo sapien
cgaccgcggcggcggcggcggcgga

SEQ ID NO: 5763985 - DNA, 25 bp, Homo sapien
gccacggttagaattgtggtggagg

SEQ ID NO: 5763986 - DNA, 25 bp, Homo sapien
tacaggccaccaagaggctggacag

SEQ ID NO: 5763987 - DNA, 25 bp, Homo sapien
atgcaatcctgccacgcggaggcgc

SEQ ID NO: 5763988 - DNA, 25 bp, Homo sapien
tccccatggtgaggggctcacactg

SEQ ID NO: 5763989 - DNA, 25 bp, Homo sapien
ggcctacatcttacaaataagagaa

SEQ ID NO: 5763990 - DNA, 25 bp, Homo sapien
atagtgggcaccaattttcgttttc

SEQ ID NO: 5763991 - DNA, 25 bp, Homo sapien
cttaactcggaaaaatggctataat

SEQ ID NO: 5763992 - DNA, 25 bp, Homo sapien
ccacgggactgagcacgggggctct

SEQ ID NO: 5763993 - DNA, 25 bp, Homo sapien
actgtccctgaaatgtctgatgtcg

SEQ ID NO: 5763994 - DNA, 25 bp, Homo sapien
gtgctgtacgatgtgaactcatttt

SEQ ID NO: 5763995 - DNA, 25 bp, Homo sapien
gctaaagttgtctacagtattctac

SEQ ID NO: 5763996 - DNA, 25 bp, Homo sapien
tttctctacttggggcctttcaaag

SEQ ID NO: 5763997 - DNA, 25 bp, Homo sapien
ctccccgattcccccagagtacata

SEQ ID NO: 5763998 - DNA, 25 bp, Homo sapien
tgggaacagtgctaaagttgtctac

SEQ ID NO: 5763999 - DNA, 25 bp, Homo sapien
tggaaaacgttgttaagcgtctggc

SEQ ID NO: 5764000 - DNA, 25 bp, Homo sapien
gaattgtggtggaggatgtagatga

SEQ ID NO: 5764001 - DNA, 25 bp, Homo sapien
tttcccagcaaagaaaagggccctg

SEQ ID NO: 5764002 - DNA, 25 bp, Homo sapien
gttagaattgtggtggaggatgtag

SEQ ID NO: 5764003 - DNA, 25 bp, Homo sapien
tggtcatttcagacaacgactaccc

SEQ ID NO: 5764004 - DNA, 25 bp, Homo sapien
gatttttacatcgaaacttcttgac

SEQ ID NO: 5764005 - DNA, 25 bp, Homo sapien
tcagcaaactggcctacatcttaca

SEQ ID NO: 5764006 - DNA, 25 bp, Homo sapien
cgggtctgtgcatgtgaccaccacg

SEQ ID NO: 5764007 - DNA, 25 bp, Homo sapien
ttatctgcctcccccattaaggcat

SEQ ID NO: 5764008 - DNA, 25 bp, Homo sapien
gtcttcagcaaactggcctacatct

SEQ ID NO: 5764009 - DNA, 25 bp, Homo sapien
gtcaacgacaaccctccccgattcc

SEQ ID NO: 5764010 - DNA, 25 bp, Homo sapien
tgagcacgggggctctggttgccat

SEQ ID NO: 5764011 - DNA, 25 bp, Homo sapien
atctgcctcccccattaaggcatac

SEQ ID NO: 5764012 - DNA, 25 bp, Homo sapien
ctgtcttcagcaaactggcctacat

SEQ ID NO: 5764013 - DNA, 25 bp, Homo sapien
aagagctgcagtttcagccgcgaca

SEQ ID NO: 5764014 - DNA, 25 bp, Homo sapien
aataggctccgtcacagcccaagat

SEQ ID NO: 5764015 - DNA, 25 bp, Homo sapien
tgaaaaaggcacttccaagagtggg

SEQ ID NO: 5764016 - DNA, 25 bp, Homo sapien
ctatcaaagaggactagtggtttcc

SEQ ID NO: 5764017 - DNA, 25 bp, Homo sapien
caccacaataggctccgtcacagcc

SEQ ID NO: 5764018 - DNA, 25 bp, Homo sapien
ctctcaactccactatcaaagagga

SEQ ID NO: 5764019 - DNA, 25 bp, Homo sapien
tcaaagcagcactgggacagtgact

SEQ ID NO: 5764020 - DNA, 25 bp, Homo sapien
ttatcagtatgtgggcaagttacat

SEQ ID NO: 5764021 - DNA, 25 bp, Homo sapien
gaaacttttgtctgtgaaaaagcaa

SEQ ID NO: 5764022 - DNA, 25 bp, Homo sapien
ggccaccaagaggctggacagggaa

SEQ ID NO: 5764023 - DNA, 25 bp, Homo sapien
cagggacagccctatttttcagttg

SEQ ID NO: 5764024 - DNA, 25 bp, Homo sapien
tgtctgtgaaaaagcaaaggcagat

SEQ ID NO: 5764025 - DNA, 25 bp, Homo sapien
ccgagaaacactgctatggcacaac

SEQ ID NO: 5764026 - DNA, 25 bp, Homo sapien
ctgaaccgttcaaaaaggagctgga

SEQ ID NO: 5764027 - DNA, 25 bp, Homo sapien
aactttaccattcaagacaacaaag

SEQ ID NO: 5764028 - DNA, 25 bp, Homo sapien
atctgtgctgtacgatgtgaactca

SEQ ID NO: 5764029 - DNA, 25 bp, Homo sapien
gcacttccaagagtggggcactcac

SEQ ID NO: 5764030 - DNA, 25 bp, Homo sapien
tgactgatgtcaacgacaaccctcc

SEQ ID NO: 5764031 - DNA, 25 bp, Homo sapien
tacgatgtgaactcatttttgcttg

SEQ ID NO: 5764032 - DNA, 25 bp, Homo sapien
aacgactacccagttcaaagcagca

SEQ ID NO: 5764033 - DNA, 25 bp, Homo sapien
aaacacaggcgacatacaggccacc

SEQ ID NO: 5764034 - DNA, 25 bp, Homo sapien
tctacttggggcctttcaaagattc

SEQ ID NO: 5764035 - DNA, 25 bp, Homo sapien
ggagctctctggaaacagcaaaaat

SEQ ID NO: 5764036 - DNA, 25 bp, Homo sapien
tggtgattcaagccaaggatatggg

SEQ ID NO: 5764037 - DNA, 25 bp, Homo sapien
gctggatatgtttgatgtcatcacc

SEQ ID NO: 5764038 - DNA, 25 bp, Homo sapien
tcctactaggtaaactggttctccc

SEQ ID NO: 5764039 - DNA, 25 bp, Homo sapien
tctgggaccaccaccgtgaacatca

SEQ ID NO: 5764040 - DNA, 25 bp, Homo sapien
ccctgaagcagccagtggctcaaac

SEQ ID NO: 5764041 - DNA, 25 bp, Homo sapien
gtggggcactcactacgcacagact

SEQ ID NO: 5764042 - DNA, 25 bp, Homo sapien
tggttcgatttttacatcgaaactt

SEQ ID NO: 5764043 - DNA, 25 bp, Homo sapien
tgaatcttctccaccggggacacca

SEQ ID NO: 5764044 - DNA, 25 bp, Homo sapien
agttctttctcctggaggaatacac

SEQ ID NO: 5764045 - DNA, 25 bp, Homo sapien
ccttcgagctcaagctataaacaga

SEQ ID NO: 5764046 - DNA, 25 bp, Homo sapien
gagccaagcaaagaacattaaggaa

SEQ ID NO: 5764047 - DNA, 25 bp, Homo sapien
tacatactgagaatctgtgctgtac

SEQ ID NO: 5764048 - DNA, 25 bp, Homo sapien
gattcagccacggttagaattgtgg

SEQ ID NO: 5764049 - DNA, 25 bp, Homo sapien
acccgtttacatccttcgagctcaa

SEQ ID NO: 5764050 - DNA, 25 bp, Homo sapien
tctctacttggggcctttcaaagat

SEQ ID NO: 5764051 - DNA, 25 bp, Homo sapien
tcttctccaccggggacaccaattg

SEQ ID NO: 5764052 - DNA, 25 bp, Homo sapien
gaccgagaaacactgctatggcaca

SEQ ID NO: 5764053 - DNA, 25 bp, Homo sapien
aatcctgtcaagtactctgtagatc

SEQ ID NO: 5764054 - DNA, 25 bp, Homo sapien
tccaaagcaaagtagtcgagtacct

SEQ ID NO: 5764055 - DNA, 25 bp, Homo sapien
aatcttctccaccggggacaccaat

SEQ ID NO: 5764056 - DNA, 25 bp, Homo sapien
ctctagatttatctgcctcccccat

SEQ ID NO: 5764057 - DNA, 25 bp, Homo sapien
ggagatctcttcattattaatgaaa

SEQ ID NO: 5764058 - DNA, 25 bp, Homo sapien
atgatgaggtccctttctataaagg

SEQ ID NO: 5764059 - DNA, 25 bp, Homo sapien
acatccttcgagctcaagctataaa

SEQ ID NO: 5764060 - DNA, 25 bp, Homo sapien
acagaatattcaacattgattctgg

SEQ ID NO: 5764061 - DNA, 25 bp, Homo sapien
agatatggacagaatattcaacatt

SEQ ID NO: 5764062 - DNA, 25 bp, Homo sapien
catcacactgactgatgtcaacgac

SEQ ID NO: 5764063 - DNA, 25 bp, Homo sapien
ggtcgcagggtctccgcgggcgcag

SEQ ID NO: 5764064 - DNA, 25 bp, Homo sapien
gcacagactcgacggtgccatcagc

SEQ ID NO: 5764065 - DNA, 25 bp, Homo sapien
tagacacgagatgagcacctatctc

SEQ ID NO: 5764066 - DNA, 25 bp, Homo sapien
ctccaccggggacaccaattggcag

SEQ ID NO: 5764067 - DNA, 25 bp, Homo sapien
catactgagaatctgtgctgtacga

SEQ ID NO: 5764068 - DNA, 25 bp, Homo sapien
ctgaagcagccagtggctcaaactt

SEQ ID NO: 5764069 - DNA, 25 bp, Homo sapien
accaccacgggaacatgcaatcctg

SEQ ID NO: 5764070 - DNA, 25 bp, Homo sapien
ggcactcactacgcacagactcgac

SEQ ID NO: 5764071 - DNA, 25 bp, Homo sapien
taggctccgtcacagcccaagatcc

SEQ ID NO: 5764072 - DNA, 25 bp, Homo sapien
tctccccatggtgaggggctcacac

SEQ ID NO: 5764073 - DNA, 25 bp, Homo sapien
aatatatcctttcaggagatggagc

SEQ ID NO: 5764074 - DNA, 25 bp, Homo sapien
ccgattcccccagagtacataccag

SEQ ID NO: 5764075 - DNA, 25 bp, Homo sapien
ttgcttgcaaatggctttggaaaat

SEQ ID NO: 5764076 - DNA, 25 bp, Homo sapien
aacttcttgaccgagaaacactgct

SEQ ID NO: 5764077 - DNA, 25 bp, Homo sapien
tgaggggctggatatgtttgatgtc

SEQ ID NO: 5764078 - DNA, 25 bp, Homo sapien
taaagttgtctacagtattctacag

SEQ ID NO: 5764079 - DNA, 25 bp, Homo sapien
ttcatcatcaagatccatgacatca

SEQ ID NO: 5764080 - DNA, 25 bp, Homo sapien
gcggcggcggcggcggaggcaggag

SEQ ID NO: 5764081 - DNA, 25 bp, Homo sapien
acccttaaagtggaagcctccaatc

SEQ ID NO: 5764082 - DNA, 25 bp, Homo sapien
atgggaggattatctgggaccacca

SEQ ID NO: 5764083 - DNA, 25 bp, Homo sapien
gtcatcaccgaccaggaaacccagg

SEQ ID NO: 5764084 - DNA, 25 bp, Homo sapien
gatctaggtgagtcgagttacatac

SEQ ID NO: 5764085 - DNA, 25 bp, Homo sapien
tcccaagagctgcagtttcagccgc

SEQ ID NO: 5764086 - DNA, 25 bp, Homo sapien
gaaacaggtattatcaagacagctt

SEQ ID NO: 5764087 - DNA, 25 bp, Homo sapien
tgatgtcatcaccgaccaggaaacc

SEQ ID NO: 5764088 - DNA, 25 bp, Homo sapien
atggagcaggagatctcttcattat

SEQ ID NO: 5764089 - DNA, 25 bp, Homo sapien
ctagatttatctgcctcccccatta

SEQ ID NO: 5764090 - DNA, 25 bp, Homo sapien
ggtacatttgttgtccaagtcactg

SEQ ID NO: 5764091 - DNA, 25 bp, Homo sapien
actccactatcaaagaggactagtg

SEQ ID NO: 5764092 - DNA, 25 bp, Homo sapien
ctctggaaacagcaaaaatgagctg

SEQ ID NO: 5764093 - DNA, 25 bp, Homo sapien
agcaaagaacattaaggaaggaagg

SEQ ID NO: 5764094 - DNA, 25 bp, Homo sapien
tgtcggtacatttgttgtccaagtc

SEQ ID NO: 5764095 - DNA, 25 bp, Homo sapien
gattcagaccttgcatgctgttgac

SEQ ID NO: 5764096 - DNA, 25 bp, Homo sapien
gctgcagtttcagccgcgacagcaa

SEQ ID NO: 5764097 - DNA, 25 bp, Homo sapien
gatgtgggagaaaatgctgaaattg

SEQ ID NO: 5764098 - DNA, 25 bp, Homo sapien
gaagaaagtgtatacccttaaagtg

SEQ ID NO: 5764099 - DNA, 25 bp, Homo sapien
actgggacagtgactgtccgggtct

SEQ ID NO: 5764100 - DNA, 25 bp, Homo sapien
ttgctgctcttttgggtgggccagc

SEQ ID NO: 5764101 - DNA, 25 bp, Homo sapien
agcaagaacggcagagccggcgacc

SEQ ID NO: 5764102 - DNA, 25 bp, Homo sapien
atgtcaatgacaacgccccagaatt

SEQ ID NO: 5764103 - DNA, 25 bp, Homo sapien
atttatctgcctcccccattaaggc

SEQ ID NO: 5764104 - DNA, 25 bp, Homo sapien
ggtctgtgcatgtgaccaccacggg

SEQ ID NO: 5764105 - DNA, 25 bp, Homo sapien
aatgagctgaaccgttcaaaaagga

SEQ ID NO: 5764106 - DNA, 25 bp, Homo sapien
actacccagttcaaagcagcactgg

SEQ ID NO: 5764107 - DNA, 25 bp, Homo sapien
tccaccccacgggactgagcacggg

SEQ ID NO: 5764108 - DNA, 25 bp, Homo sapien
gaatcaaagccagcgatgctgatgt

SEQ ID NO: 5764109 - DNA, 25 bp, Homo sapien
gatgcagatgatccaacatatggga

SEQ ID NO: 5764110 - DNA, 25 bp, Homo sapien
ccaagatccagatgctgccaggaat

SEQ ID NO: 5764111 - DNA, 25 bp, Homo sapien
cagcactgggacagtgactgtccgg

SEQ ID NO: 5764112 - DNA, 25 bp, Homo sapien
acaataggctccgtcacagcccaag

SEQ ID NO: 5764113 - DNA, 25 bp, Homo sapien
catttgttgtccaagtcactgcgac

SEQ ID NO: 5764114 - DNA, 25 bp, Homo sapien
gcaggagcagcctgggcgggtcgca

SEQ ID NO: 5764115 - DNA, 25 bp, Homo sapien
aaggcgagcagagatatcctctgag

SEQ ID NO: 5764116 - DNA, 25 bp, Homo sapien
caaactggcctacatcttacaaata

SEQ ID NO: 5764117 - DNA, 25 bp, Homo sapien
gtcaatgacaacgccccagaatttg

SEQ ID NO: 5764118 - DNA, 25 bp, Homo sapien
acagtgatagcaacagagatcaata

SEQ ID NO: 5764119 - DNA, 25 bp, Homo sapien
gaaaacagggagcagtaccaagtgg

SEQ ID NO: 5764120 - DNA, 25 bp, Homo sapien
agatgtcaatgacaacgccccagaa

SEQ ID NO: 5764121 - DNA, 25 bp, Homo sapien
gggattataactgtcaaaaagctct

SEQ ID NO: 5764122 - DNA, 25 bp, Homo sapien
acacaggcgacatacaggccaccaa

SEQ ID NO: 5764123 - DNA, 25 bp, Homo sapien
agtgaaaaaggcacttccaagagtg

SEQ ID NO: 5764124 - DNA, 25 bp, Homo sapien
gggcaagttacattcagaccaggat

SEQ ID NO: 5764125 - DNA, 25 bp, Homo sapien
aggcgacatacaggccaccaagagg

SEQ ID NO: 5764126 - DNA, 25 bp, Homo sapien
ttatagtgggcaccaattttcgttt

SEQ ID NO: 5764127 - DNA, 25 bp, Homo sapien
agaaaatgctgaaattgagtacagc

SEQ ID NO: 5764128 - DNA, 25 bp, Homo sapien
tggcacaacattacagtgatagcaa

SEQ ID NO: 5764129 - DNA, 25 bp, Homo sapien
tcagttgaatcagaaacaggtatta

SEQ ID NO: 5764130 - DNA, 25 bp, Homo sapien
cgagtctgaattcatcatcaagatc

SEQ ID NO: 5764131 - DNA, 25 bp, Homo sapien
cagataaacaccacaataggctccg

SEQ ID NO: 5764132 - DNA, 25 bp, Homo sapien
gcgacggatgcagatgatccaacat

SEQ ID NO: 5764133 - DNA, 25 bp, Homo sapien
aacaggtattatcaagacagctttg

SEQ ID NO: 5764134 - DNA, 25 bp, Homo sapien
tggatacggtgcagtgaaaaaggca

SEQ ID NO: 5764135 - DNA, 25 bp, Homo sapien
cgcggcggcggcggcggcggaggca

SEQ ID NO: 5764136 - DNA, 25 bp, Homo sapien
ctttctcctggaggaatacacagga

SEQ ID NO: 5764137 - DNA, 25 bp, Homo sapien
gctgctcttttgggtgggccagccc

SEQ ID NO: 5764138 - DNA, 25 bp, Homo sapien
cagtattctacagggacagccctat

SEQ ID NO: 5764139 - DNA, 25 bp, Homo sapien
taatgaaaacacaggcgacatacag

SEQ ID NO: 5764140 - DNA, 25 bp, Homo sapien
caaagaaaagggccctggagctctc

SEQ ID NO: 5764141 - DNA, 25 bp, Homo sapien
tgcagtttcagccgcgacagcaaga

SEQ ID NO: 5764142 - DNA, 25 bp, Homo sapien
cttgcctgtggtcatttcagacaac

SEQ ID NO: 5764143 - DNA, 25 bp, Homo sapien
agtgactgtccgggtctgtgcatgt

SEQ ID NO: 5764144 - DNA, 25 bp, Homo sapien
aggcaggagcagcctgggcgggtcg

SEQ ID NO: 5764145 - DNA, 25 bp, Homo sapien
caacagagatcaataatccaaagca

SEQ ID NO: 5764146 - DNA, 25 bp, Homo sapien
gttgtctacagtattctacagggac

SEQ ID NO: 5764147 - DNA, 25 bp, Homo sapien
tggatatgtttgatgtcatcaccga

SEQ ID NO: 5764148 - DNA, 25 bp, Homo sapien
cagttcaaagcagcactgggacagt

SEQ ID NO: 5764149 - DNA, 25 bp, Homo sapien
gtaccaagtggtgattcaagccaag

SEQ ID NO: 5764150 - DNA, 25 bp, Homo sapien
tatcagactgggaatgaatctcggg

SEQ ID NO: 5764151 - DNA, 25 bp, Homo sapien
agacccgtggagcccgagtctgaat

SEQ ID NO: 5764152 - DNA, 25 bp, Homo sapien
actaggtaaactggttctccctgcc

SEQ ID NO: 5764153 - DNA, 25 bp, Homo sapien
gaagcagccagtggctcaaacttta

SEQ ID NO: 5764154 - DNA, 25 bp, Homo sapien
tagaggagatggatcacttaaatat

SEQ ID NO: 5764155 - DNA, 25 bp, Homo sapien
gatacggtgcagtgaaaaaggcact

SEQ ID NO: 5764156 - DNA, 25 bp, Homo sapien
tgattccacatccagctcctttttg

SEQ ID NO: 5764157 - DNA, 25 bp, Homo sapien
attgatgtcatggatcttgatgatg

SEQ ID NO: 5764158 - DNA, 25 bp, Homo sapien
tacctttatagaaagggacctcatc

SEQ ID NO: 5764159 - DNA, 25 bp, Homo sapien
cacgagcaagtttcacatctgttca

SEQ ID NO: 5764160 - DNA, 25 bp, Homo sapien
ttaagtgatccatctcctctatcct

SEQ ID NO: 5764161 - DNA, 25 bp, Homo sapien
cctggtctgaatgtaacttgcccac

SEQ ID NO: 5764162 - DNA, 25 bp, Homo sapien
tctgccgttcttgctgtcgcggctg

SEQ ID NO: 5764163 - DNA, 25 bp, Homo sapien
agaatactgtagacaactttagcac

SEQ ID NO: 5764164 - DNA, 25 bp, Homo sapien
tgttcccgtggtggtcacatgcaca

SEQ ID NO: 5764165 - DNA, 25 bp, Homo sapien
gggaggcagataaatctagagtgtc

SEQ ID NO: 5764166 - DNA, 25 bp, Homo sapien
ggtttttcttccctgtccagcctct

SEQ ID NO: 5764167 - DNA, 25 bp, Homo sapien
aagggtatacactttcttcttttca

SEQ ID NO: 5764168 - DNA, 25 bp, Homo sapien
gaatggtaaagtttgagccactggc

SEQ ID NO: 5764169 - DNA, 25 bp, Homo sapien
gtatgtcgcctgtgttttcattaat

SEQ ID NO: 5764170 - DNA, 25 bp, Homo sapien
tcccatatgttggatcatctgcatc

SEQ ID NO: 5764171 - DNA, 25 bp, Homo sapien
gagcctattgtggtgtttatctgag

SEQ ID NO: 5764172 - DNA, 25 bp, Homo sapien
ctttgctttttcacagacaaaagtt

SEQ ID NO: 5764173 - DNA, 25 bp, Homo sapien
caaagccatttgcaagcaaaaatga

SEQ ID NO: 5764174 - DNA, 25 bp, Homo sapien
gtccagcctcttggtggcctgtatg

SEQ ID NO: 5764175 - DNA, 25 bp, Homo sapien
attcattcccagtctgatagacaag

SEQ ID NO: 5764176 - DNA, 25 bp, Homo sapien
taaatctagagtgtcacagtaacag

SEQ ID NO: 5764177 - DNA, 25 bp, Homo sapien
gtggtcccagataatcctcccatct

SEQ ID NO: 5764178 - DNA, 25 bp, Homo sapien
tccaccacaattctaaccgtggctg

SEQ ID NO: 5764179 - DNA, 25 bp, Homo sapien
ttctgccaattggtgtccccggtgg

SEQ ID NO: 5764180 - DNA, 25 bp, Homo sapien
acagaaggatggcaaccagagcccc

SEQ ID NO: 5764181 - DNA, 25 bp, Homo sapien
ccttgtcaacagcatgcaaggtctg

SEQ ID NO: 5764182 - DNA, 25 bp, Homo sapien
atcaccacttggtactgctccctgt

SEQ ID NO: 5764183 - DNA, 25 bp, Homo sapien
tcgtgtctattatagccatttttcc

SEQ ID NO: 5764184 - DNA, 25 bp, Homo sapien
ataatgaagagatctcctgctccat

SEQ ID NO: 5764185 - DNA, 25 bp, Homo sapien
cgatccatgttgagcaaagctgtct

SEQ ID NO: 5764186 - DNA, 25 bp, Homo sapien
ggtcggtgatgacatcaaacatatc

SEQ ID NO: 5764187 - DNA, 25 bp, Homo sapien
ctgtccagcctcttggtggcctgta

SEQ ID NO: 5764188 - DNA, 25 bp, Homo sapien
aagagattctttgcttcctgggcaa

SEQ ID NO: 5764189 - DNA, 25 bp, Homo sapien
atgctgtactcaatttcagcatttt

SEQ ID NO: 5764190 - DNA, 25 bp, Homo sapien
ctttgttgtcttgaatggtaaagtt

SEQ ID NO: 5764191 - DNA, 25 bp, Homo sapien
tgtcttgaatggtaaagtttgagcc

SEQ ID NO: 5764192 - DNA, 25 bp, Homo sapien
gttcacggtggtggtcccagataat

SEQ ID NO: 5764193 - DNA, 25 bp, Homo sapien
catctcctctatcctggtctgaatg

SEQ ID NO: 5764194 - DNA, 25 bp, Homo sapien
gcccacccaaaagagcagcaagaag

SEQ ID NO: 5764195 - DNA, 25 bp, Homo sapien
gataggtgctcatctcgtgtctatt

SEQ ID NO: 5764196 - DNA, 25 bp, Homo sapien
ccttccttccttaatgttctttgct

SEQ ID NO: 5764197 - DNA, 25 bp, Homo sapien
ggagggttgtcgttgacatcagtca

SEQ ID NO: 5764198 - DNA, 25 bp, Homo sapien
gagaaagaactgattccacatccag

SEQ ID NO: 5764199 - DNA, 25 bp, Homo sapien
ttgacatcagtcagtgtgatgttca

SEQ ID NO: 5764200 - DNA, 25 bp, Homo sapien
ctggctttgattctgccaattggtg

SEQ ID NO: 5764201 - DNA, 25 bp, Homo sapien
gcgtggcaggattgcatgttcccgt

SEQ ID NO: 5764202 - DNA, 25 bp, Homo sapien
ggctttgattctgccaattggtgtc

SEQ ID NO: 5764203 - DNA, 25 bp, Homo sapien
ggaggcttccactttaagggtatac

SEQ ID NO: 5764204 - DNA, 25 bp, Homo sapien
tttccaaagccatttgcaagcaaaa

SEQ ID NO: 5764205 - DNA, 25 bp, Homo sapien
cgttgtcattgacatctagaacttt

SEQ ID NO: 5764206 - DNA, 25 bp, Homo sapien
atagcagtgtttctcggtcaagaag

SEQ ID NO: 5764207 - DNA, 25 bp, Homo sapien
tgcccacatactgataatcggatcc

SEQ ID NO: 5764208 - DNA, 25 bp, Homo sapien
ccgcccaggctgctcctgcctccgc

SEQ ID NO: 5764209 - DNA, 25 bp, Homo sapien
tgatgctgtactcaatttcagcatt

SEQ ID NO: 5764210 - DNA, 25 bp, Homo sapien
gagagctccagggcccttttctttg

SEQ ID NO: 5764211 - DNA, 25 bp, Homo sapien
ttctttgcttcctgggcaagcaaag

SEQ ID NO: 5764212 - DNA, 25 bp, Homo sapien
ctcaccatggggagataggaggcag

SEQ ID NO: 5764213 - DNA, 25 bp, Homo sapien
ggggagataggaggcagggagaacc

SEQ ID NO: 5764214 - DNA, 25 bp, Homo sapien
tgtgccatagcagtgtttctcggtc

SEQ ID NO: 5764215 - DNA, 25 bp, Homo sapien
gatccatctcctctatcctggtctg

SEQ ID NO: 5764216 - DNA, 25 bp, Homo sapien
tctgtgatgctgtactcaatttcag

SEQ ID NO: 5764217 - DNA, 25 bp, Homo sapien
tgtgatgctgtactcaatttcagca

SEQ ID NO: 5764218 - DNA, 25 bp, Homo sapien
tggcccacccaaaagagcagcaaga

SEQ ID NO: 5764219 - DNA, 25 bp, Homo sapien
gcctattgtggtgtttatctgagca

SEQ ID NO: 5764220 - DNA, 25 bp, Homo sapien
ccaagtagagaaatcgtggctcaac

SEQ ID NO: 5764221 - DNA, 25 bp, Homo sapien
atccgtcgcagtgacttggacaaca

SEQ ID NO: 5764222 - DNA, 25 bp, Homo sapien
attttccaaagccatttgcaagcaa

SEQ ID NO: 5764223 - DNA, 25 bp, Homo sapien
atggtaaagtttgagccactggctg

SEQ ID NO: 5764224 - DNA, 25 bp, Homo sapien
tcccagataatcctcccatctggcc

SEQ ID NO: 5764225 - DNA, 25 bp, Homo sapien
acaaatgtaccgacatcagacattt

SEQ ID NO: 5764226 - DNA, 25 bp, Homo sapien
ctgtatgccttaatgggggaggcag

SEQ ID NO: 5764227 - DNA, 25 bp, Homo sapien
tcctgaaaggatatatttaagtgat

SEQ ID NO: 5764228 - DNA, 25 bp, Homo sapien
tccatatctgtgtgtcgatctacag

SEQ ID NO: 5764229 - DNA, 25 bp, Homo sapien
tcagactcgggctccacgggtctcc

SEQ ID NO: 5764230 - DNA, 25 bp, Homo sapien
cctcttggtggcctgtatgtcgcct

SEQ ID NO: 5764231 - DNA, 25 bp, Homo sapien
acagacaaaagtttcatagaactca

SEQ ID NO: 5764232 - DNA, 25 bp, Homo sapien
aaggatatatttaagtgatccatct

SEQ ID NO: 5764233 - DNA, 25 bp, Homo sapien
gtgtattcctccaggagaaagaact

SEQ ID NO: 5764234 - DNA, 25 bp, Homo sapien
ctcttatttgtaagatgtaggccag

SEQ ID NO: 5764235 - DNA, 25 bp, Homo sapien
tttttcacagacaaaagtttcatag

SEQ ID NO: 5764236 - DNA, 25 bp, Homo sapien
ctttgcttggctctcagaggatatc

SEQ ID NO: 5764237 - DNA, 25 bp, Homo sapien
cagcattttctcccacatcagcatc

SEQ ID NO: 5764238 - DNA, 25 bp, Homo sapien
atttccagaatcaatgttgaatatt

SEQ ID NO: 5764239 - DNA, 25 bp, Homo sapien
ggggagggttgtcgttgacatcagt

SEQ ID NO: 5764240 - DNA, 25 bp, Homo sapien
cgtgttgtctttgttgtcttgaatg

SEQ ID NO: 5764241 - DNA, 25 bp, Homo sapien
gagtgtcacagtaacagtgtgagcc

SEQ ID NO: 5764242 - DNA, 25 bp, Homo sapien
tcaacataaggattggaggcttcca

SEQ ID NO: 5764243 - DNA, 25 bp, Homo sapien
ccccggtggagaagattcaggagtt

SEQ ID NO: 5764244 - DNA, 25 bp, Homo sapien
gagttttaaactggtatgtactctg

SEQ ID NO: 5764245 - DNA, 25 bp, Homo sapien
tgaaaaatagggctgtccctgtaga

SEQ ID NO: 5764246 - DNA, 25 bp, Homo sapien
taggtgctcatctcgtgtctattat

SEQ ID NO: 5764247 - DNA, 25 bp, Homo sapien
ttggattattgatctctgttgctat

SEQ ID NO: 5764248 - DNA, 25 bp, Homo sapien
gaatcaactgatctgcctttgcttt

SEQ ID NO: 5764249 - DNA, 25 bp, Homo sapien
gtaaaaatcgaaccatttccagaat

SEQ ID NO: 5764250 - DNA, 25 bp, Homo sapien
gattctcagtatgtaactcgactca

SEQ ID NO: 5764251 - DNA, 25 bp, Homo sapien
cccgtggtggtcacatgcacagacc

SEQ ID NO: 5764252 - DNA, 25 bp, Homo sapien
tttcacagacaaaagtttcatagaa

SEQ ID NO: 5764253 - DNA, 25 bp, Homo sapien
ccgtatccagcctcattcctccttc

SEQ ID NO: 5764254 - DNA, 25 bp, Homo sapien
aagagataggtgctcatctcgtgtc

SEQ ID NO: 5764255 - DNA, 25 bp, Homo sapien
aacctccttggtgaatattggttca

SEQ ID NO: 5764256 - DNA, 25 bp, Homo sapien
gattcaactgaaaaatagggctgtc

SEQ ID NO: 5764257 - DNA, 25 bp, Homo sapien
agcaagtttcacatctgttcatttt

SEQ ID NO: 5764258 - DNA, 25 bp, Homo sapien
ctttgatagtggagttgagagagtt

SEQ ID NO: 5764259 - DNA, 25 bp, Homo sapien
acatcagacatttcagggacagtgg

SEQ ID NO: 5764260 - DNA, 25 bp, Homo sapien
tccactttaagggtatacactttct

SEQ ID NO: 5764261 - DNA, 25 bp, Homo sapien
atcaactgatctgcctttgcttttt

SEQ ID NO: 5764262 - DNA, 25 bp, Homo sapien
taagattcccgccgtgttgtctttg

SEQ ID NO: 5764263 - DNA, 25 bp, Homo sapien
gttcttgctgtcgcggctgaaactg

SEQ ID NO: 5764264 - DNA, 25 bp, Homo sapien
cctgttttctcgatccatgttgagc

SEQ ID NO: 5764265 - DNA, 25 bp, Homo sapien
attcctggcagcatctggatcttgg

SEQ ID NO: 5764266 - DNA, 25 bp, Homo sapien
agaccctgcgacccgcccaggctgc

SEQ ID NO: 5764267 - DNA, 25 bp, Homo sapien
gctttgaactgggtagtcgttgtct

SEQ ID NO: 5764268 - DNA, 25 bp, Homo sapien
atcgctggctttgattctgccaatt

SEQ ID NO: 5764269 - DNA, 25 bp, Homo sapien
cagtttgctgaagacaggtggctca

SEQ ID NO: 5764270 - DNA, 25 bp, Homo sapien
tcttgataatacctgtttctgattc

SEQ ID NO: 5764271 - DNA, 25 bp, Homo sapien
tcctttttgaacggttcagctcatt

SEQ ID NO: 5764272 - DNA, 25 bp, Homo sapien
tgagttcacatcgtacagcacagat

SEQ ID NO: 5764273 - DNA, 25 bp, Homo sapien
gcccctcaccatggggagataggag

SEQ ID NO: 5764274 - DNA, 25 bp, Homo sapien
ttaatgttctttgcttggctctcag

SEQ ID NO: 5764275 - DNA, 25 bp, Homo sapien
gcgcctccgcgtggcaggattgcat

SEQ ID NO: 5764276 - DNA, 25 bp, Homo sapien
caacaaatgtaccgacatcagacat

SEQ ID NO: 5764277 - DNA, 25 bp, Homo sapien
gtctgaatcaactgatctgcctttg

SEQ ID NO: 5764278 - DNA, 25 bp, Homo sapien
aagagatctcctgctccatctcctg

SEQ ID NO: 5764279 - DNA, 25 bp, Homo sapien
attcaggagttttaaactggtatgt

SEQ ID NO: 5764280 - DNA, 25 bp, Homo sapien
tgaactgggtagtcgttgtctgaaa

SEQ ID NO: 5764281 - DNA, 25 bp, Homo sapien
gaatctttgaaaggccccaagtaga

SEQ ID NO: 5764282 - DNA, 25 bp, Homo sapien
acatgcacagacccggacagtcact

SEQ ID NO: 5764283 - DNA, 25 bp, Homo sapien
atgttgagcaaagctgtcttgataa

SEQ ID NO: 5764284 - DNA, 25 bp, Homo sapien
aaaagagcagcaagaagtagcggta

SEQ ID NO: 5764285 - DNA, 25 bp, Homo sapien
aacataaggattggaggcttccact

SEQ ID NO: 5764286 - DNA, 25 bp, Homo sapien
ttcctgggtttcctggtcggtgatg

SEQ ID NO: 5764287 - DNA, 25 bp, Homo sapien
actcagcaaattctggggcgttgtc

SEQ ID NO: 5764288 - DNA, 25 bp, Homo sapien
tttcactgcaccgtatccagcctca

SEQ ID NO: 5764289 - DNA, 25 bp, Homo sapien
tccctgttttctcgatccatgttga

SEQ ID NO: 5764290 - DNA, 25 bp, Homo sapien
tctcgtgtctattatagccattttt

SEQ ID NO: 5764291 - DNA, 25 bp, Homo sapien
gctatcactgtaatgttgtgccata

SEQ ID NO: 5764292 - DNA, 25 bp, Homo sapien
attggtgtccccggtggagaagatt

SEQ ID NO: 5764293 - DNA, 25 bp, Homo sapien
ctcagtcccgtggggtggatgagcg

SEQ ID NO: 5764294 - DNA, 25 bp, Homo sapien
ctgtatgtcgcctgtgttttcatta

SEQ ID NO: 5764295 - DNA, 25 bp, Homo sapien
gttaagattcccgccgtgttgtctt

SEQ ID NO: 5764296 - DNA, 25 bp, Homo sapien
atgctgatggcaccgtcgagtctgt

SEQ ID NO: 5764297 - DNA, 25 bp, Homo sapien
ttgaacggttcagctcatttttgct

SEQ ID NO: 5764298 - DNA, 25 bp, Homo sapien
tatcactgtaatgttgtgccatagc

SEQ ID NO: 5764299 - DNA, 25 bp, Homo sapien
gtgtccccggtggagaagattcagg

SEQ ID NO: 5764300 - DNA, 25 bp, Homo sapien
cagaggatatctctgctcgccttcc

SEQ ID NO: 5764301 - DNA, 25 bp, Homo sapien
gtatgccttaatgggggaggcagat

SEQ ID NO: 5764302 - DNA, 25 bp, Homo sapien
tcattaataatgaagagatctcctg

SEQ ID NO: 5764303 - DNA, 25 bp, Homo sapien
tcgcggctgaaactgcagctcttgg

SEQ ID NO: 5764304 - DNA, 25 bp, Homo sapien
aggcttccactttaagggtatacac

SEQ ID NO: 5764305 - DNA, 25 bp, Homo sapien
tcttgatgatgaattcagactcggg

SEQ ID NO: 5764306 - DNA, 25 bp, Homo sapien
gctccagggcccttttctttgctgg

SEQ ID NO: 5764307 - DNA, 25 bp, Homo sapien
caagtttcacatctgttcattttcc

SEQ ID NO: 5764308 - DNA, 25 bp, Homo sapien
ttggaggcttccactttaagggtat

SEQ ID NO: 5764309 - DNA, 25 bp, Homo sapien
tgttgaatattctgtccatatctgt

SEQ ID NO: 5764310 - DNA, 25 bp, Homo sapien
tccatctcctgaaaggatatattta

SEQ ID NO: 5764311 - DNA, 25 bp, Homo sapien
taatatatagaggtactcgactact

SEQ ID NO: 5764312 - DNA, 25 bp, Homo sapien
tttatagcttgagctcgaaggatgt

SEQ ID NO: 5764313 - DNA, 25 bp, Homo sapien
gtaacagtgtgagcccctcaccatg

SEQ ID NO: 5764314 - DNA, 25 bp, Homo sapien
cctgtccttctgtttatagcttgag

SEQ ID NO: 5764315 - DNA, 25 bp, Homo sapien
gctcatttttgctgtttccagagag

SEQ ID NO: 5764316 - DNA, 25 bp, Homo sapien
ttgctttttcacagacaaaagtttc

SEQ ID NO: 5764317 - DNA, 25 bp, Homo sapien
cacgggtctccctgtccttctgttt

SEQ ID NO: 5764318 - DNA, 25 bp, Homo sapien
catctagaactttaatatatagagg

SEQ ID NO: 5764319 - DNA, 25 bp, Homo sapien
caaccagagcccccgtgctcagtcc

SEQ ID NO: 5764320 - DNA, 25 bp, Homo sapien
atctgcatccgtcgcagtgacttgg

SEQ ID NO: 5764321 - DNA, 25 bp, Homo sapien
tgatgaattcagactcgggctccac

SEQ ID NO: 5764322 - DNA, 25 bp, Homo sapien
ggatatctctgctcgccttcctgcg

SEQ ID NO: 5764323 - DNA, 25 bp, Homo sapien
tcacagacaaaagtttcatagaact

SEQ ID NO: 5764324 - DNA, 25 bp, Homo sapien
gccatttgcaagcaaaaatgagttc

SEQ ID NO: 5764325 - DNA, 25 bp, Homo sapien
ggtcccagataatcctcccatctgg

SEQ ID NO: 5764326 - DNA, 25 bp, Homo sapien
tcttccctgtccagcctcttggtgg

SEQ ID NO: 5764327 - DNA, 25 bp, Homo sapien
ctgcttcaggggccaaggaaaacga

SEQ ID NO: 5764328 - DNA, 25 bp, Homo sapien
tgggctgtgacggagcctattgtgg

SEQ ID NO: 5764329 - DNA, 25 bp, Homo sapien
tcatccttgtcaacagcatgcaagg

SEQ ID NO: 5764330 - DNA, 25 bp, Homo sapien
caagaagtagcggtaagttctcatg

SEQ ID NO: 5764331 - DNA, 25 bp, Homo sapien
catctggccgcccatatccttggct

SEQ ID NO: 5764332 - DNA, 25 bp, Homo sapien
tcctctttgatagtggagttgagag

SEQ ID NO: 5764333 - DNA, 25 bp, Homo sapien
acttggtactgctccctgttttctc

SEQ ID NO: 5764334 - DNA, 25 bp, Homo sapien
aaacatatccagcccctcaccgtct

SEQ ID NO: 5764335 - DNA, 25 bp, Homo sapien
ggtggcctgtatgtcgcctgtgttt

SEQ ID NO: 5764336 - DNA, 25 bp, Homo sapien
atctgagcatcttctcttatttgta

SEQ ID NO: 5764337 - DNA, 25 bp, Homo sapien
cgagtctgtgcgtagtgagtgcccc

SEQ ID NO: 5764338 - DNA, 25 bp, Homo sapien
acatctgttcattttccaaagccat

SEQ ID NO: 5764339 - DNA, 25 bp, Homo sapien
ggcgttgtcattgacatctagaact

SEQ ID NO: 5764340 - DNA, 25 bp, Homo sapien
ccatggggagataggaggcagggag

SEQ ID NO: 5764341 - DNA, 25 bp, Homo sapien
ccgccgtgttgtctttgttgtcttg

SEQ ID NO: 5764342 - DNA, 25 bp, Homo sapien
agtgctgctttgaactgggtagtcg

SEQ ID NO: 5764343 - DNA, 25 bp, Homo sapien
ttctttgctgggaaaccactagtcc

SEQ ID NO: 5764344 - DNA, 25 bp, Homo sapien
gcttcaggggccaaggaaaacgaaa

SEQ ID NO: 5764345 - DNA, 25 bp, Homo sapien
ttcatagaactcagcaaattctggg

SEQ ID NO: 5764346 - DNA, 25 bp, Homo sapien
atcgtggctcaacataaggattgga

SEQ ID NO: 5764347 - DNA, 25 bp, Homo sapien
tgccatagcagtgtttctcggtcaa

SEQ ID NO: 5764348 - DNA, 25 bp, Homo sapien
cccctcaccgtctgtgatgctgtac

SEQ ID NO: 5764349 - DNA, 25 bp, Homo sapien
aaaccactagtcctctttgatagtg

SEQ ID NO: 5764350 - DNA, 25 bp, Homo sapien
ccatagcagtgtttctcggtcaaga

SEQ ID NO: 5764351 - DNA, 25 bp, Homo sapien
catttttccgagttaagattcccgc

SEQ ID NO: 5764352 - DNA, 25 bp, Homo sapien
aagtttcatagaactcagcaaattc

SEQ ID NO: 5764353 - DNA, 25 bp, Homo sapien
cagtcccgtggggtggatgagcgcc

SEQ ID NO: 5764354 - DNA, 25 bp, Homo sapien
gagttaagattcccgccgtgttgtc

SEQ ID NO: 5764355 - DNA, 25 bp, Homo sapien
acggtggtggtcccagataatcctc

SEQ ID NO: 5764356 - DNA, 25 bp, Homo sapien
ggtactgctccctgttttctcgatc

SEQ ID NO: 5764357 - DNA, 25 bp, Homo sapien
ggcaccgtcgagtctgtgcgtagtg

SEQ ID NO: 5764358 - DNA, 25 bp, Homo sapien
ggattgcatgttcccgtggtggtca

SEQ ID NO: 5764359 - DNA, 25 bp, Homo sapien
cgtggggtggatgagcgcctccgcg

SEQ ID NO: 5764360 - DNA, 25 bp, Homo sapien
caggattcctggcagcatctggatc

SEQ ID NO: 5764361 - DNA, 25 bp, Homo sapien
ccttttctttgctgggaaaccacta

SEQ ID NO: 5764362 - DNA, 25 bp, Homo sapien
caccatggggagataggaggcaggg

SEQ ID NO: 5764363 - DNA, 25 bp, Homo sapien
ctgaaaggatatatttaagtgatcc

SEQ ID NO: 5764364 - DNA, 25 bp, Homo sapien
catactgataatcggatcctgtgta

SEQ ID NO: 5764365 - DNA, 25 bp, Homo sapien
tcaaagtccaagagctttttgacag

SEQ ID NO: 5764366 - DNA, 25 bp, Homo sapien
aatgttgaatattctgtccatatct

SEQ ID NO: 5764367 - DNA, 25 bp, Homo sapien
cactttaagggtatacactttcttc

SEQ ID NO: 5764368 - DNA, 25 bp, Homo sapien
tccctgtccttctgtttatagcttg

SEQ ID NO: 5764369 - DNA, 25 bp, Homo sapien
aaatagggctgtccctgtagaatac

SEQ ID NO: 5764370 - DNA, 25 bp, Homo sapien
tattgatctctgttgctatcactgt

SEQ ID NO: 5764371 - DNA, 25 bp, Homo sapien
tgaaatgaccacaggcaagagatag

SEQ ID NO: 5764372 - DNA, 25 bp, Homo sapien
actgcaccgtatccagcctcattcc

SEQ ID NO: 5764373 - DNA, 25 bp, Homo sapien
taatgggggaggcagataaatctag

SEQ ID NO: 5764374 - DNA, 25 bp, Homo sapien
atgtaaaaatcgaaccatttccaga

SEQ ID NO: 5764375 - DNA, 25 bp, Homo sapien
aatcaatgttgaatattctgtccat

SEQ ID NO: 5764376 - DNA, 25 bp, Homo sapien
tgtaatgttgtgccatagcagtgtt

SEQ ID NO: 5764377 - DNA, 25 bp, Homo sapien
tagccatttttccgagttaagattc

SEQ ID NO: 5764378 - DNA, 25 bp, Homo sapien
cttggcttgaatcaccacttggtac

SEQ ID NO: 5764379 - DNA, 25 bp, Homo sapien
ttgcttggctctcagaggatatctc

SEQ ID NO: 5764380 - DNA, 25 bp, Homo sapien
gcacagaaggatggcaaccagagcc

SEQ ID NO: 5764381 - DNA, 25 bp, Homo sapien
ccaggctgctcctgcctccgccgcc

SEQ ID NO: 5764382 - DNA, 25 bp, Homo sapien
tcactgcaccgtatccagcctcatt

SEQ ID NO: 5764383 - DNA, 25 bp, Homo sapien
gattggaggcttccactttaagggt

SEQ ID NO: 5764384 - DNA, 25 bp, Homo sapien
gaaatgaaaagggcacatttatgtt

SEQ ID NO: 5764385 - DNA, 25 bp, Homo sapien
attacacaacgaatgaaatgaaaag

SEQ ID NO: 5764386 - DNA, 25 bp, Homo sapien
ggctgcttcaggggccaaggaaaac

SEQ ID NO: 5764387 - DNA, 25 bp, Homo sapien
agaagtttcgatgtaaaaatcgaac

SEQ ID NO: 5764388 - DNA, 25 bp, Homo sapien
ccgcggagaccctgcgacccgccca

SEQ ID NO: 5764389 - DNA, 25 bp, Homo sapien
gagcgcctccgcgtggcaggattgc

SEQ ID NO: 5764390 - DNA, 25 bp, Homo sapien
ctgtagaatactgtagacaacttta

SEQ ID NO: 5764391 - DNA, 25 bp, Homo sapien
caggtggctcatctacatcctccac

SEQ ID NO: 5764392 - DNA, 25 bp, Homo sapien
cctcatcatacactccatgccagac

SEQ ID NO: 5764393 - DNA, 25 bp, Homo sapien
ggtatgtactctgggggaatcgggg

SEQ ID NO: 5764394 - DNA, 25 bp, Homo sapien
tacagagtacttgacaggattcctg

SEQ ID NO: 5764395 - DNA, 25 bp, Homo sapien
gtgagcccctcaccatggggagata

SEQ ID NO: 5764396 - DNA, 25 bp, Homo sapien
caaagacacgagcaagtttcacatc

SEQ ID NO: 5764397 - DNA, 25 bp, Homo sapien
acatcctccaccacaattctaaccg

SEQ ID NO: 5764398 - DNA, 25 bp, Homo sapien
ttagcactgttcccatatgttggat

SEQ ID NO: 5764399 - DNA, 25 bp, Homo sapien
ggctgtccctgtagaatactgtaga

SEQ ID NO: 5764400 - DNA, 25 bp, Homo sapien
atgtaacttgcccacatactgataa

SEQ ID NO: 5764401 - DNA, 25 bp, Homo sapien
aagtagagaaatcgtggctcaacat

SEQ ID NO: 5764402 - DNA, 25 bp, Homo sapien
tagaactcagcaaattctggggcgt

SEQ ID NO: 5764403 - DNA, 25 bp, Homo sapien
gagctccagggcccttttctttgct

SEQ ID NO: 5764404 - DNA, 25 bp, Homo sapien
attcctccaggagaaagaactgatt

SEQ ID NO: 5764405 - DNA, 25 bp, Homo sapien
cagttataatcccttcctgggtttc

SEQ ID NO: 5764406 - DNA, 25 bp, Homo sapien
cgaaccatttccagaatcaatgttg

SEQ ID NO: 5764407 - DNA, 25 bp, Homo sapien
ccagtctgatagacaagagattctt

SEQ ID NO: 5764408 - DNA, 25 bp, Homo sapien
tccaaagccatttgcaagcaaaaat

SEQ ID NO: 5764409 - DNA, 25 bp, Homo sapien
cagagtacttgacaggattcctggc

SEQ ID NO: 5764410 - DNA, 25 bp, Homo sapien
cacatactgataatcggatcctgtg

SEQ ID NO: 5764411 - DNA, 25 bp, Homo sapien
agggttgtcgttgacatcagtcagt

SEQ ID NO: 5764412 - DNA, 25 bp, Homo sapien
atctgttcattttccaaagccattt

SEQ ID NO: 5764413 - DNA, 25 bp, Homo sapien
atcctccaccacaattctaaccgtg

SEQ ID NO: 5764414 - DNA, 25 bp, Homo sapien
cctccaccacaattctaaccgtggc

SEQ ID NO: 5764415 - DNA, 25 bp, Homo sapien
gattctttgcttcctgggcaagcaa

SEQ ID NO: 5764416 - DNA, 25 bp, Homo sapien
gaaaattggtgcccactataagggt

SEQ ID NO: 5764417 - DNA, 25 bp, Homo sapien
gcttgagctcgaaggatgtaaacgg

SEQ ID NO: 5764418 - DNA, 25 bp, Homo sapien
cagtaacagtgtgagcccctcacca

SEQ ID NO: 5764419 - DNA, 25 bp, Homo sapien
gtccccggtggagaagattcaggag

SEQ ID NO: 5764420 - DNA, 25 bp, Homo sapien
gtttcatagaactcagcaaattctg

SEQ ID NO: 5764421 - DNA, 25 bp, Homo sapien
cagacgcttaacaacgttttccaag

SEQ ID NO: 5764422 - DNA, 25 bp, Homo sapien
tgcctccgccgccgccgccgccgcg

SEQ ID NO: 5764423 - DNA, 25 bp, Homo sapien
tgtactcaatttcagcattttctcc

SEQ ID NO: 5764424 - DNA, 25 bp, Homo sapien
catttcagggacagtggctgtgtaa

SEQ ID NO: 5764425 - DNA, 25 bp, Homo sapien
agataggaggcagggagaaccagtt

SEQ ID NO: 5764426 - DNA, 25 bp, Homo sapien
tgtccatatctgtgtgtcgatctac

SEQ ID NO: 5764427 - DNA, 25 bp, Homo sapien
catatccttggcttgaatcaccact

SEQ ID NO: 5764428 - DNA, 25 bp, Homo sapien
ctgttcccatatgttggatcatctg

SEQ ID NO: 5764429 - DNA, 25 bp, Homo sapien
gccactggctgcttcaggggccaag

SEQ ID NO: 5764430 - DNA, 25 bp, Homo sapien
gtagagaaatcgtggctcaacataa

SEQ ID NO: 5764431 - DNA, 25 bp, Homo sapien
gtgatccatctcctctatcctggtc

SEQ ID NO: 5764432 - DNA, 25 bp, Homo sapien
ctattatagccatttttccgagtta

SEQ ID NO: 5764433 - DNA, 25 bp, Homo sapien
aagtagcggtaagttctcatgctga

SEQ ID NO: 5764434 - DNA, 25 bp, Homo sapien
caacagcatgcaaggtctgaatcaa

SEQ ID NO: 5764435 - DNA, 25 bp, Homo sapien
ctggggcgttgtcattgacatctag

SEQ ID NO: 5764436 - DNA, 25 bp, Homo sapien
aaaagtttcatagaactcagcaaat

SEQ ID NO: 5764437 - DNA, 25 bp, Homo sapien
attccacatccagctcctttttgaa

SEQ ID NO: 5764438 - DNA, 25 bp, Homo sapien
ttctcgatccatgttgagcaaagct

SEQ ID NO: 5764439 - DNA, 25 bp, Homo sapien
catctcgtgtctattatagccattt

SEQ ID NO: 5764440 - DNA, 25 bp, Homo sapien
ctttttgaacggttcagctcatttt

SEQ ID NO: 5764441 - DNA, 25 bp, Homo sapien
atgtaccgacatcagacatttcagg

SEQ ID NO: 5764442 - DNA, 25 bp, Homo sapien
agaaatcgtggctcaacataaggat

SEQ ID NO: 5764443 - DNA, 25 bp, Homo sapien
ctgcctttgctttttcacagacaaa

SEQ ID NO: 5764444 - DNA, 25 bp, Homo sapien
gacctcatcatacactccatgccag

SEQ ID NO: 5764445 - DNA, 25 bp, Homo sapien
agaaggatggcaaccagagcccccg

SEQ ID NO: 5764446 - DNA, 25 bp, Homo sapien
tctgtgtgtcgatctacagagtact

SEQ ID NO: 5764447 - DNA, 25 bp, Homo sapien
ctgaaactgcagctcttgggatgcg

SEQ ID NO: 5764448 - DNA, 25 bp, Homo sapien
ttttctcgatccatgttgagcaaag

SEQ ID NO: 5764449 - DNA, 25 bp, Homo sapien
gtttacctagtaggatcacgatgca

SEQ ID NO: 5764450 - DNA, 25 bp, Homo sapien
actcgggctccacgggtctccctgt

SEQ ID NO: 5764451 - DNA, 25 bp, Homo sapien
cctccttggtgaatattggttcatt

SEQ ID NO: 5764452 - DNA, 25 bp, Homo sapien
gtctattatagccatttttccgagt

SEQ ID NO: 5764453 - DNA, 25 bp, Homo sapien
gtgaatattggttcattgtcattga

SEQ ID NO: 5764454 - DNA, 25 bp, Homo sapien
acaaaagtttcatagaactcagcaa

SEQ ID NO: 5764455 - DNA, 25 bp, Homo sapien
tgtactctgggggaatcggggaggg

SEQ ID NO: 5764456 - DNA, 25 bp, Homo sapien
aaaaatcgaaccatttccagaatca

SEQ ID NO: 5764457 - DNA, 25 bp, Homo sapien
ccttcctgggtttcctggtcggtga

SEQ ID NO: 5764458 - DNA, 25 bp, Homo sapien
ggacagtcactgtcccagtgctgct

SEQ ID NO: 5764459 - DNA, 25 bp, Homo sapien
accgacatcagacatttcagggaca

SEQ ID NO: 5764460 - DNA, 25 bp, Homo sapien
tgaaaagggcacatttatgttgccc

SEQ ID NO: 5764461 - DNA, 25 bp, Homo sapien
ctctgctcgccttcctgcgcccgcg

SEQ ID NO: 5764462 - DNA, 25 bp, Homo sapien
ctggtcggtgatgacatcaaacata

SEQ ID NO: 5764463 - DNA, 25 bp, Homo sapien
gcccgcggagaccctgcgacccgcc

SEQ ID NO: 5764464 - DNA, 25 bp, Homo sapien
cgcctgtgttttcattaataatgaa

SEQ ID NO: 5764465 - DNA, 25 bp, Homo sapien
tcatctacatcctccaccacaattc

SEQ ID NO: 5764466 - DNA, 25 bp, Homo sapien
tctgtgcgtagtgagtgccccactc

SEQ ID NO: 5764467 - DNA, 25 bp, Homo sapien
cctgcctccgccgccgccgccgccg

SEQ ID NO: 5764468 - DNA, 25 bp, Homo sapien
cttggacaacaaatgtaccgacatc

SEQ ID NO: 5764469 - DNA, 25 bp, Homo sapien
tcaggagttttaaactggtatgtac

SEQ ID NO: 5764470 - DNA, 25 bp, Homo sapien
atattggttcattgtcattgatgtc

SEQ ID NO: 5764471 - DNA, 25 bp, Homo sapien
gttcattgtcattgatgtcatggat

SEQ ID NO: 5764472 - DNA, 25 bp, Homo sapien
gaactcagcaaattctggggcgttg

SEQ ID NO: 5764473 - DNA, 25 bp, Homo sapien
ccatgccagacgcttaacaacgttt

SEQ ID NO: 5764474 - DNA, 25 bp, Homo sapien
acccaaaagagcagcaagaagtagc

SEQ ID NO: 5764475 - DNA, 25 bp, Homo sapien
acagacccggacagtcactgtccca

SEQ ID NO: 5764476 - DNA, 25 bp, Homo sapien
tttttcactgcaccgtatccagcct

SEQ ID NO: 5764477 - DNA, 25 bp, Homo sapien
ctttgaaaggccccaagtagagaaa

SEQ ID NO: 5764478 - DNA, 25 bp, Homo sapien
gcccttttctttgctgggaaaccac

SEQ ID NO: 5764479 - DNA, 25 bp, Homo sapien
ctgctccctgttttctcgatccatg

SEQ ID NO: 5764480 - DNA, 25 bp, Homo sapien
ctctttgatagtggagttgagagag

SEQ ID NO: 5764481 - DNA, 25 bp, Homo sapien
gcagcaagaagtagcggtaagttct

SEQ ID NO: 5764482 - DNA, 25 bp, Homo sapien
gtcgcctgtgttttcattaataatg

SEQ ID NO: 5764483 - DNA, 25 bp, Homo sapien
cagctcctttttgaacggttcagct

SEQ ID NO: 5764484 - DNA, 25 bp, Homo sapien
aggattggaggcttccactttaagg

SEQ ID NO: 5764485 - DNA, 25 bp, Homo sapien
gtaagttctcatgctgatggcaccg

SEQ ID NO: 5764486 - DNA, 25 bp, Homo sapien
tttgctttggattattgatctctgt

SEQ ID NO: 5764487 - DNA, 25 bp, Homo sapien
tctacagagtacttgacaggattcc

SEQ ID NO: 5764488 - DNA, 25 bp, Homo sapien
ttggtggcctgtatgtcgcctgtgt

SEQ ID NO: 5764489 - DNA, 25 bp, Homo sapien
ctgctcgccttcctgcgcccgcgga

SEQ ID NO: 5764490 - DNA, 25 bp, Homo sapien
ctcgatccatgttgagcaaagctgt

SEQ ID NO: 5764491 - DNA, 25 bp, Homo sapien
tcctggcagcatctggatcttgggc

SEQ ID NO: 5764492 - DNA, 25 bp, Homo sapien
gtgtctattatagccatttttccga

SEQ ID NO: 5764493 - DNA, 25 bp, Homo sapien
atcccccgagattcattcccagtct

SEQ ID NO: 5764494 - DNA, 25 bp, Homo sapien
agactcgggctccacgggtctccct

SEQ ID NO: 5764495 - DNA, 25 bp, Homo sapien
ctcgactcacctagatcaggctgta

SEQ ID NO: 5764496 - DNA, 25 bp, Homo sapien
atgtcatggatcttgatgatgaatt

SEQ ID NO: 5764497 - DNA, 25 bp, Homo sapien
ttatctgagcatcttctcttatttg

SEQ ID NO: 5764498 - DNA, 25 bp, Homo sapien
tttcaaagtccaagagctttttgac

SEQ ID NO: 5764499 - DNA, 25 bp, Homo sapien
gccgccgccgccgcggtcgccggct

SEQ ID NO: 5764500 - DNA, 25 bp, Homo sapien
atcttgggctgtgacggagcctatt

SEQ ID NO: 5764501 - DNA, 25 bp, Homo sapien
agcactgttcccatatgttggatca

SEQ ID NO: 5764502 - DNA, 25 bp, Homo sapien
gaaactgcagctcttgggatgcgaa

SEQ ID NO: 5764503 - DNA, 25 bp, Homo sapien
ccagtgctgctttgaactgggtagt

SEQ ID NO: 5764504 - DNA, 25 bp, Homo sapien
tttcattaataatgaagagatctcc

SEQ ID NO: 5764505 - DNA, 25 bp, Homo sapien
ttgttgtcttgaatggtaaagtttg

SEQ ID NO: 5764506 - DNA, 25 bp, Homo sapien
caatttcagcattttctcccacatc

SEQ ID NO: 5764507 - DNA, 25 bp, Homo sapien
gtcatggatcttgatgatgaattca

SEQ ID NO: 5764508 - DNA, 25 bp, Homo sapien
aaattacacaacgaatgaaatgaaa

SEQ ID NO: 5764509 - DNA, 25 bp, Homo sapien
ggctgaatctttgaaaggccccaag

SEQ ID NO: 5764510 - DNA, 25 bp, Homo sapien
gtggtcacatgcacagacccggaca

SEQ ID NO: 5764511 - DNA, 25 bp, Homo sapien
gaatcaccacttggtactgctccct

SEQ ID NO: 5764512 - DNA, 25 bp, Homo sapien
cgtgctcagtcccgtggggtggatg

SEQ ID NO: 5764513 - DNA, 25 bp, Homo sapien
ttggtactgctccctgttttctcga

SEQ ID NO: 5764514 - DNA, 25 bp, Homo sapien
agacaactttagcactgttcccata

SEQ ID NO: 5764515 - DNA, 25 bp, Homo sapien
gaccacaggcaagagataggtgctc

SEQ ID NO: 5764516 - DNA, 25 bp, Homo sapien
gctccacgggtctccctgtccttct

SEQ ID NO: 5764517 - DNA, 25 bp, Homo sapien
gtctgaatgtaacttgcccacatac

SEQ ID NO: 5764518 - DNA, 25 bp, Homo sapien
acaagagattctttgcttcctgggc

SEQ ID NO: 5764519 - DNA, 25 bp, Homo sapien
tttatagaaagggacctcatcatac

SEQ ID NO: 5764520 - DNA, 25 bp, Homo sapien
gttcattttccaaagccatttgcaa

SEQ ID NO: 5764521 - DNA, 25 bp, Homo sapien
tttgcaagcaaaaatgagttcacat

SEQ ID NO: 5764522 - DNA, 25 bp, Homo sapien
ctggcagcatctggatcttgggctg

SEQ ID NO: 5764523 - DNA, 25 bp, Homo sapien
tgcgacccgcccaggctgctcctgc

SEQ ID NO: 5764524 - DNA, 25 bp, Homo sapien
ggcaaccagagcccccgtgctcagt

SEQ ID NO: 5764525 - DNA, 25 bp, Homo sapien
caggctgtatgccttaatgggggag

SEQ ID NO: 5764526 - DNA, 25 bp, Homo sapien
cactcttggaagtgcctttttcact

SEQ ID NO: 5764527 - DNA, 25 bp, Homo sapien
ccgtggctgaatctttgaaaggccc

SEQ ID NO: 5764528 - DNA, 25 bp, Homo sapien
aaggatggcaaccagagcccccgtg

SEQ ID NO: 5764529 - DNA, 25 bp, Homo sapien
catgttcccgtggtggtcacatgca

SEQ ID NO: 5764530 - DNA, 25 bp, Homo sapien
atcacgatgcacagaaggatggcaa

SEQ ID NO: 5764531 - DNA, 25 bp, Homo sapien
catggatcttgatgatgaattcaga

SEQ ID NO: 5764532 - DNA, 25 bp, Homo sapien
gttgggtagggctggcccacccaaa

SEQ ID NO: 5764533 - DNA, 25 bp, Homo sapien
tgtcccagtgctgctttgaactggg

SEQ ID NO: 5764534 - DNA, 25 bp, Homo sapien
gcccactataagggtcatccttgtc

SEQ ID NO: 5764535 - DNA, 25 bp, Homo sapien
tcacggtggtggtcccagataatcc

SEQ ID NO: 5764536 - DNA, 25 bp, Homo sapien
acagtggctgtgtaaacctccttgg

SEQ ID NO: 5764537 - DNA, 25 bp, Homo sapien
gagcatcttctcttatttgtaagat

SEQ ID NO: 5764538 - DNA, 25 bp, Homo sapien
aatgagttcacatcgtacagcacag

SEQ ID NO: 5764539 - DNA, 25 bp, Homo sapien
tgggtagggctggcccacccaaaag

SEQ ID NO: 5764540 - DNA, 25 bp, Homo sapien
gtagtcgttgtctgaaatgaccaca

SEQ ID NO: 5764541 - DNA, 25 bp, Homo sapien
agaatcaatgttgaatattctgtcc

SEQ ID NO: 5764542 - DNA, 25 bp, Homo sapien
taatcggatcctgtgtattcctcca

SEQ ID NO: 5764543 - DNA, 25 bp, Homo sapien
gtttctcggtcaagaagtttcgatg

SEQ ID NO: 5764544 - DNA, 25 bp, Homo sapien
gagttgggtagggctggcccaccca

SEQ ID NO: 5764545 - DNA, 25 bp, Homo sapien
agcctcattcctccttccttcctta

SEQ ID NO: 5764546 - DNA, 25 bp, Homo sapien
tcattcccagtctgatagacaagag

SEQ ID NO: 5764547 - DNA, 25 bp, Homo sapien
gcacatttatgttgccctgaaatcc

SEQ ID NO: 5764548 - DNA, 25 bp, Homo sapien
gggacctcatcatacactccatgcc

SEQ ID NO: 5764549 - DNA, 25 bp, Homo sapien
tcgactactttgctttggattattg

SEQ ID NO: 5764550 - DNA, 25 bp, Homo sapien
ggattattgatctctgttgctatca

SEQ ID NO: 5764551 - DNA, 25 bp, Homo sapien
ccgtcgagtctgtgcgtagtgagtg

SEQ ID NO: 5764552 - DNA, 25 bp, Homo sapien
tctcctgctccatctcctgaaagga

SEQ ID NO: 5764553 - DNA, 25 bp, Homo sapien
gaactttaatatatagaggtactcg

SEQ ID NO: 5764554 - DNA, 25 bp, Homo sapien
cagataaatctagagtgtcacagta

SEQ ID NO: 5764555 - DNA, 25 bp, Homo sapien
gaaaacgaaaattggtgcccactat

SEQ ID NO: 5764556 - DNA, 25 bp, Homo sapien
gtagcggtaagttctcatgctgatg

SEQ ID NO: 5764557 - DNA, 25 bp, Homo sapien
aactgggtagtcgttgtctgaaatg

SEQ ID NO: 5764558 - DNA, 25 bp, Homo sapien
cggatcctgtgtattcctccaggag

SEQ ID NO: 5764559 - DNA, 25 bp, Homo sapien
atctttgaaaggccccaagtagaga

SEQ ID NO: 5764560 - DNA, 25 bp, Homo sapien
gacaggattcctggcagcatctgga

SEQ ID NO: 5764561 - DNA, 25 bp, Homo sapien
tggagaagattcaggagttttaaac

SEQ ID NO: 5764562 - DNA, 25 bp, Homo sapien
gacgcttaacaacgttttccaagta

SEQ ID NO: 5764563 - DNA, 25 bp, Homo sapien
tggctcatctacatcctccaccaca

SEQ ID NO: 5764564 - DNA, 25 bp, Homo sapien
gtgccccactcttggaagtgccttt

SEQ ID NO: 5764565 - DNA, 25 bp, Homo sapien
cctttttcactgcaccgtatccagc

SEQ ID NO: 5764566 - DNA, 25 bp, Homo sapien
accagtttacctagtaggatcacga

SEQ ID NO: 5764567 - DNA, 25 bp, Homo sapien
tggtgaatattggttcattgtcatt

SEQ ID NO: 5764568 - DNA, 25 bp, Homo sapien
ttccttccttaatgttctttgcttg

SEQ ID NO: 5764569 - DNA, 25 bp, Homo sapien
ttatgttgccctgaaatcccccgag

SEQ ID NO: 5764570 - DNA, 25 bp, Homo sapien
attggttcattgtcattgatgtcat

SEQ ID NO: 5764571 - DNA, 25 bp, Homo sapien
cgttgacatcagtcagtgtgatgtt

SEQ ID NO: 5764572 - DNA, 25 bp, Homo sapien
cttggaagtgcctttttcactgcac

SEQ ID NO: 5764573 - DNA, 25 bp, Homo sapien
catccagctcctttttgaacggttc

SEQ ID NO: 5764574 - DNA, 25 bp, Homo sapien
aactggtatgtactctgggggaatc

SEQ ID NO: 5764575 - DNA, 25 bp, Homo sapien
cagcatctggatcttgggctgtgac

SEQ ID NO: 5764576 - DNA, 25 bp, Homo sapien
tagcttgagctcgaaggatgtaaac

SEQ ID NO: 5764577 - DNA, 25 bp, Homo sapien
ttctaaccgtggctgaatctttgaa

SEQ ID NO: 5764578 - DNA, 25 bp, Homo sapien
atttatgttgccctgaaatcccccg

SEQ ID NO: 5764579 - DNA, 25 bp, Homo sapien
tcacctagatcaggctgtatgcctt

SEQ ID NO: 5764580 - DNA, 25 bp, Homo sapien
gagagagttgggtagggctggccca

SEQ ID NO: 5764581 - DNA, 25 bp, Homo sapien
aagttctcatgctgatggcaccgtc

SEQ ID NO: 5764582 - DNA, 25 bp, Homo sapien
ttgagagagttgggtagggctggcc

SEQ ID NO: 5764583 - DNA, 25 bp, Homo sapien
gccttaatgggggaggcagataaat

SEQ ID NO: 5764584 - DNA, 25 bp, Homo sapien
aagtttcgatgtaaaaatcgaacca

SEQ ID NO: 5764585 - DNA, 25 bp, Homo sapien
cccactcttggaagtgcctttttca

SEQ ID NO: 5764586 - DNA, 25 bp, Homo sapien
aagacacgagcaagtttcacatctg

SEQ ID NO: 5764587 - DNA, 25 bp, Homo sapien
aatgttctttgcttggctctcagag

SEQ ID NO: 5764588 - DNA, 25 bp, Homo sapien
agtcgttgtctgaaatgaccacagg

SEQ ID NO: 5764589 - DNA, 25 bp, Homo sapien
gacggagcctattgtggtgtttatc

SEQ ID NO: 5764590 - DNA, 25 bp, Homo sapien
gtcaacagcatgcaaggtctgaatc

SEQ ID NO: 5764591 - DNA, 25 bp, Homo sapien
gaaagaactgattccacatccagct

SEQ ID NO: 5764592 - DNA, 25 bp, Homo sapien
acgaaaattggtgcccactataagg

SEQ ID NO: 5764593 - DNA, 25 bp, Homo sapien
ggttcagctcatttttgctgtttcc

SEQ ID NO: 5764594 - DNA, 25 bp, Homo sapien
ttccctgtccagcctcttggtggcc

SEQ ID NO: 5764595 - DNA, 25 bp, Homo sapien
cctttatagaaagggacctcatcat

SEQ ID NO: 5764596 - DNA, 25 bp, Homo sapien
tcaccgtctgtgatgctgtactcaa

SEQ ID NO: 5764597 - DNA, 25 bp, Homo sapien
gatcctgtgtattcctccaggagaa

SEQ ID NO: 5764598 - DNA, 25 bp, Homo sapien
atgttcacggtggtggtcccagata

SEQ ID NO: 5764599 - DNA, 25 bp, Homo sapien
ctgaatgtaacttgcccacatactg

SEQ ID NO: 5764600 - DNA, 25 bp, Homo sapien
catatctgtgtgtcgatctacagag

SEQ ID NO: 5764601 - DNA, 25 bp, Homo sapien
gacacgagcaagtttcacatctgtt

SEQ ID NO: 5764602 - DNA, 25 bp, Homo sapien
tggctgtgtaaacctccttggtgaa

SEQ ID NO: 5764603 - DNA, 25 bp, Homo sapien
gattctgccaattggtgtccccggt

SEQ ID NO: 5764604 - DNA, 25 bp, Homo sapien
gctgtgtaaacctccttggtgaata

SEQ ID NO: 5764605 - DNA, 25 bp, Homo sapien
gaggatatctctgctcgccttcctg

SEQ ID NO: 5764606 - DNA, 25 bp, Homo sapien
cgctggctttgattctgccaattgg

SEQ ID NO: 5764607 - DNA, 25 bp, Homo sapien
atccttgtcaacagcatgcaaggtc

SEQ ID NO: 5764608 - DNA, 25 bp, Homo sapien
ctactttgctttggattattgatct

SEQ ID NO: 5764609 - DNA, 25 bp, Homo sapien
ccgccgccgcggtcgccggctctgc

SEQ ID NO: 5764610 - DNA, 25 bp, Homo sapien
gtagaatactgtagacaactttagc

SEQ ID NO: 5764611 - DNA, 25 bp, Homo sapien
caccacaattctaaccgtggctgaa

SEQ ID NO: 5764612 - DNA, 25 bp, Homo sapien
aggtactcgactactttgctttgga

SEQ ID NO: 5764613 - DNA, 25 bp, Homo sapien
gctgaagacaggtggctcatctaca

SEQ ID NO: 5764614 - DNA, 25 bp, Homo sapien
acagtcactgtcccagtgctgcttt

SEQ ID NO: 5764615 - DNA, 25 bp, Homo sapien
atgggggaggcagataaatctagag

SEQ ID NO: 5764616 - DNA, 25 bp, Homo sapien
ctgaaatcccccgagattcattccc

SEQ ID NO: 5764617 - DNA, 25 bp, Homo sapien
gatctctgttgctatcactgtaatg

SEQ ID NO: 5764618 - DNA, 25 bp, Homo sapien
ggtggtggtcccagataatcctccc

SEQ ID NO: 5764619 - DNA, 25 bp, Homo sapien
ctgccaattggtgtccccggtggag

SEQ ID NO: 5764620 - DNA, 25 bp, Homo sapien
tgtctgaaatgaccacaggcaagag

SEQ ID NO: 5764621 - DNA, 25 bp, Homo sapien
tccgccgccgccgccgccgcggtcg

SEQ ID NO: 5764622 - DNA, 25 bp, Homo sapien
gtcgttgacatcagtcagtgtgatg

SEQ ID NO: 5764623 - DNA, 25 bp, Homo sapien
cggagcctattgtggtgtttatctg

SEQ ID NO: 5764624 - DNA, 25 bp, Homo sapien
ggtggctcatctacatcctccacca

SEQ ID NO: 5764625 - DNA, 25 bp, Homo sapien
tgaagagatctcctgctccatctcc

SEQ ID NO: 5764626 - DNA, 25 bp, Homo sapien
ctccatgccagacgcttaacaacgt

SEQ ID NO: 5764627 - DNA, 25 bp, Homo sapien
cagggagaaccagtttacctagtag

SEQ ID NO: 5764628 - DNA, 25 bp, Homo sapien
cagtgtgagcccctcaccatgggga

SEQ ID NO: 5764629 - DNA, 25 bp, Homo sapien
ggatcttgggctgtgacggagccta

SEQ ID NO: 5764630 - DNA, 25 bp, Homo sapien
gaggcagggagaaccagtttaccta

SEQ ID NO: 5764631 - DNA, 25 bp, Homo sapien
tcgggctccacgggtctccctgtcc

SEQ ID NO: 5764632 - DNA, 25 bp, Homo sapien
caccgtatccagcctcattcctcct

SEQ ID NO: 5764633 - DNA, 25 bp, Homo sapien
catctcctgaaaggatatatttaag

SEQ ID NO: 5764634 - DNA, 25 bp, Homo sapien
cagggcccttttctttgctgggaaa

SEQ ID NO: 5764635 - DNA, 25 bp, Homo sapien
agcatgcaaggtctgaatcaactga

SEQ ID NO: 5764636 - DNA, 25 bp, Homo sapien
tgcgtagtgagtgccccactcttgg

SEQ ID NO: 5764637 - DNA, 25 bp, Homo sapien
gctcgccttcctgcgcccgcggaga

SEQ ID NO: 5764638 - DNA, 25 bp, Homo sapien
cgccgccgccgcggtcgccggctct

SEQ ID NO: 5764639 - DNA, 25 bp, Homo sapien
tatttgtaagatgtaggccagtttg

SEQ ID NO: 5764640 - DNA, 25 bp, Homo sapien
gggggaggcagataaatctagagtg

SEQ ID NO: 5764641 - DNA, 25 bp, Homo sapien
aaccgtggctgaatctttgaaaggc

SEQ ID NO: 5764642 - DNA, 25 bp, Homo sapien
ccggtggagaagattcaggagtttt

SEQ ID NO: 5764643 - DNA, 25 bp, Homo sapien
tactgctccctgttttctcgatcca

SEQ ID NO: 5764644 - DNA, 25 bp, Homo sapien
actcgactactttgctttggattat

SEQ ID NO: 5764645 - DNA, 25 bp, Homo sapien
ttcgatgtaaaaatcgaaccatttc

SEQ ID NO: 5764646 - DNA, 25 bp, Homo sapien
acatcagcatcgctggctttgattc

SEQ ID NO: 5764647 - DNA, 25 bp, Homo sapien
ctgaatctttgaaaggccccaagta

SEQ ID NO: 5764648 - DNA, 25 bp, Homo sapien
ggtggagaagattcaggagttttaa

SEQ ID NO: 5764649 - DNA, 25 bp, Homo sapien
tcttgaatggtaaagtttgagccac

SEQ ID NO: 5764650 - DNA, 25 bp, Homo sapien
ttgaatcaccacttggtactgctcc

SEQ ID NO: 5764651 - DNA, 25 bp, Homo sapien
cgagcaagtttcacatctgttcatt

SEQ ID NO: 5764652 - DNA, 25 bp, Homo sapien
catttgcaagcaaaaatgagttcac

SEQ ID NO: 5764653 - DNA, 25 bp, Homo sapien
ctgagcatcttctcttatttgtaag

SEQ ID NO: 5764654 - DNA, 25 bp, Homo sapien
tgatggcaccgtcgagtctgtgcgt

SEQ ID NO: 5764655 - DNA, 25 bp, Homo sapien
gccgtgttgtctttgttgtcttgaa

SEQ ID NO: 5764656 - DNA, 25 bp, Homo sapien
tggcttgaatcaccacttggtactg

SEQ ID NO: 5764657 - DNA, 25 bp, Homo sapien
ggtgatgacatcaaacatatccagc

SEQ ID NO: 5764658 - DNA, 25 bp, Homo sapien
gcacagacccggacagtcactgtcc

SEQ ID NO: 5764659 - DNA, 25 bp, Homo sapien
ttgacatctagaactttaatatata

SEQ ID NO: 5764660 - DNA, 25 bp, Homo sapien
gactactttgctttggattattgat

SEQ ID NO: 5764661 - DNA, 25 bp, Homo sapien
aagacaggtggctcatctacatcct

SEQ ID NO: 5764662 - DNA, 25 bp, Homo sapien
ttccagaatcaatgttgaatattct

SEQ ID NO: 5764663 - DNA, 25 bp, Homo sapien
attgtggtgtttatctgagcatctt

SEQ ID NO: 5764664 - DNA, 25 bp, Homo sapien
gtgtgagcccctcaccatggggaga

SEQ ID NO: 5764665 - DNA, 25 bp, Homo sapien
taataatgaagagatctcctgctcc

SEQ ID NO: 5764666 - DNA, 25 bp, Homo sapien
cgcagtgacttggacaacaaatgta

SEQ ID NO: 5764667 - DNA, 25 bp, Homo sapien
ccttaatgttctttgcttggctctc

SEQ ID NO: 5764668 - DNA, 25 bp, Homo sapien
ctggatcttgggctgtgacggagcc

SEQ ID NO: 5764669 - DNA, 25 bp, Homo sapien
aaatgtaccgacatcagacatttca

SEQ ID NO: 5764670 - DNA, 25 bp, Homo sapien
ccctgaaatcccccgagattcattc

SEQ ID NO: 5764671 - DNA, 25 bp, Homo sapien
ctcatctcgtgtctattatagccat

SEQ ID NO: 5764672 - DNA, 25 bp, Homo sapien
tgtccttctgtttatagcttgagct

SEQ ID NO: 5764673 - DNA, 25 bp, Homo sapien
caaggtctgaatcaactgatctgcc

SEQ ID NO: 5764674 - DNA, 25 bp, Homo sapien
ctttttgacagttataatcccttcc

SEQ ID NO: 5764675 - DNA, 25 bp, Homo sapien
gtacttgacaggattcctggcagca

SEQ ID NO: 5764676 - DNA, 25 bp, Homo sapien
cacagtaacagtgtgagcccctcac

SEQ ID NO: 5764677 - DNA, 25 bp, Homo sapien
gctttttcacagacaaaagtttcat

SEQ ID NO: 5764678 - DNA, 25 bp, Homo sapien
cgtggctcaacataaggattggagg

SEQ ID NO: 5764679 - DNA, 25 bp, Homo sapien
ttctgattcaactgaaaaatagggc

SEQ ID NO: 5764680 - DNA, 25 bp, Homo sapien
tacactccatgccagacgcttaaca

SEQ ID NO: 5764681 - DNA, 25 bp, Homo sapien
tttcctggtcggtgatgacatcaaa

SEQ ID NO: 5764682 - DNA, 25 bp, Homo sapien
tcattgatgtcatggatcttgatga

SEQ ID NO: 5764683 - DNA, 25 bp, Homo sapien
cgcccatatccttggcttgaatcac

SEQ ID NO: 5764684 - DNA, 25 bp, Homo sapien
gtgcccactataagggtcatccttg

SEQ ID NO: 5764685 - DNA, 25 bp, Homo sapien
gagcccctcaccatggggagatagg

SEQ ID NO: 5764686 - DNA, 25 bp, Homo sapien
tgatagacaagagattctttgcttc

SEQ ID NO: 5764687 - DNA, 25 bp, Homo sapien
tgcaccgtatccagcctcattcctc

SEQ ID NO: 5764688 - DNA, 25 bp, Homo sapien
tgatctgcctttgctttttcacaga

SEQ ID NO: 5764689 - DNA, 25 bp, Homo sapien
tagtgagtgccccactcttggaagt

SEQ ID NO: 5764690 - DNA, 25 bp, Homo sapien
ctatcctggtctgaatgtaacttgc

SEQ ID NO: 5764691 - DNA, 25 bp, Homo sapien
ggatggcaaccagagcccccgtgct

SEQ ID NO: 5764692 - DNA, 25 bp, Homo sapien
ctccgcgtggcaggattgcatgttc

SEQ ID NO: 5764693 - DNA, 25 bp, Homo sapien
taaactggtatgtactctgggggaa

SEQ ID NO: 5764694 - DNA, 25 bp, Homo sapien
gagcagcaagaagtagcggtaagtt

SEQ ID NO: 5764695 - DNA, 25 bp, Homo sapien
gcatcgctggctttgattctgccaa

SEQ ID NO: 5764696 - DNA, 25 bp, Homo sapien
tggacaacaaatgtaccgacatcag

SEQ ID NO: 5764697 - DNA, 25 bp, Homo sapien
gatcatctgcatccgtcgcagtgac

SEQ ID NO: 5764698 - DNA, 25 bp, Homo sapien
attctgtccatatctgtgtgtcgat

SEQ ID NO: 5764699 - DNA, 25 bp, Homo sapien
attgcatgttcccgtggtggtcaca

SEQ ID NO: 5764700 - DNA, 25 bp, Homo sapien
gcttcctgggcaagcaaagacacga

SEQ ID NO: 5764701 - DNA, 25 bp, Homo sapien
tctagaactttaatatatagaggta

SEQ ID NO: 5764702 - DNA, 25 bp, Homo sapien
tccttggtgaatattggttcattgt

SEQ ID NO: 5764703 - DNA, 25 bp, Homo sapien
tcattgtcattgatgtcatggatct

SEQ ID NO: 5764704 - DNA, 25 bp, Homo sapien
gataatcggatcctgtgtattcctc

SEQ ID NO: 5764705 - DNA, 25 bp, Homo sapien
gccccactcttggaagtgccttttt

SEQ ID NO: 5764706 - DNA, 25 bp, Homo sapien
gtgtttctcggtcaagaagtttcga

SEQ ID NO: 5764707 - DNA, 25 bp, Homo sapien
agttcacatcgtacagcacagattc

SEQ ID NO: 5764708 - DNA, 25 bp, Homo sapien
ttccgagttaagattcccgccgtgt

SEQ ID NO: 5764709 - DNA, 25 bp, Homo sapien
ttcacatcgtacagcacagattctc

SEQ ID NO: 5764710 - DNA, 25 bp, Homo sapien
gataatacctgtttctgattcaact

SEQ ID NO: 5764711 - DNA, 25 bp, Homo sapien
tttccagagagctccagggcccttt

SEQ ID NO: 5764712 - DNA, 25 bp, Homo sapien
tagtggagttgagagagttgggtag

SEQ ID NO: 5764713 - DNA, 25 bp, Homo sapien
atcctggtctgaatgtaacttgccc

SEQ ID NO: 5764714 - DNA, 25 bp, Homo sapien
gaatgaaatgaaaagggcacattta

SEQ ID NO: 5764715 - DNA, 25 bp, Homo sapien
gaagtgcctttttcactgcaccgta

SEQ ID NO: 5764716 - DNA, 25 bp, Homo sapien
acctagtaggatcacgatgcacaga

SEQ ID NO: 5764717 - DNA, 25 bp, Homo sapien
attcctccttccttccttaatgttc

SEQ ID NO: 5764718 - DNA, 25 bp, Homo sapien
aggaggcagggagaaccagtttacc

SEQ ID NO: 5764719 - DNA, 25 bp, Homo sapien
ttcctgggcaagcaaagacacgagc

SEQ ID NO: 5764720 - DNA, 25 bp, Homo sapien
cataaggattggaggcttccacttt

SEQ ID NO: 5764721 - DNA, 25 bp, Homo sapien
ttgctatcactgtaatgttgtgcca

SEQ ID NO: 5764722 - DNA, 25 bp, Homo sapien
gcgcccgcggagaccctgcgacccg

SEQ ID NO: 5764723 - DNA, 25 bp, Homo sapien
ttgataatacctgtttctgattcaa

SEQ ID NO: 5764724 - DNA, 25 bp, Homo sapien
tccacatccagctcctttttgaacg

SEQ ID NO: 5764725 - DNA, 25 bp, Homo sapien
catcagtcagtgtgatgttcacggt

SEQ ID NO: 5764726 - DNA, 25 bp, Homo sapien
catacactccatgccagacgcttaa

SEQ ID NO: 5764727 - DNA, 25 bp, Homo sapien
tcccagtctgatagacaagagattc

SEQ ID NO: 5764728 - DNA, 25 bp, Homo sapien
cttttcaaagtccaagagctttttg

SEQ ID NO: 5764729 - DNA, 25 bp, Homo sapien
cttcctgcgcccgcggagaccctgc

SEQ ID NO: 5764730 - DNA, 25 bp, Homo sapien
atatagaggtactcgactactttgc

SEQ ID NO: 5764731 - DNA, 25 bp, Homo sapien
ccagaatcaatgttgaatattctgt

SEQ ID NO: 5764732 - DNA, 25 bp, Homo sapien
taagatgtaggccagtttgctgaag

SEQ ID NO: 5764733 - DNA, 25 bp, Homo sapien
ctcagtatgtaactcgactcaccta

SEQ ID NO: 5764734 - DNA, 25 bp, Homo sapien
ccgcgtggcaggattgcatgttccc

SEQ ID NO: 5764735 - DNA, 25 bp, Homo sapien
tgtttccagagagctccagggccct

SEQ ID NO: 5764736 - DNA, 25 bp, Homo sapien
tccatctcctctatcctggtctgaa

SEQ ID NO: 5764737 - DNA, 25 bp, Homo sapien
atccagcctcattcctccttccttc

SEQ ID NO: 5764738 - DNA, 25 bp, Homo sapien
ccgcggtcgccggctctgccgttct

SEQ ID NO: 5764739 - DNA, 25 bp, Homo sapien
aagctgtcttgataatacctgtttc

SEQ ID NO: 5764740 - DNA, 25 bp, Homo sapien
gctgtactcaatttcagcattttct

SEQ ID NO: 5764741 - DNA, 25 bp, Homo sapien
tgctttggattattgatctctgttg

SEQ ID NO: 5764742 - DNA, 25 bp, Homo sapien
gtggcaggattgcatgttcccgtgg

SEQ ID NO: 5764743 - DNA, 25 bp, Homo sapien
gggagaaccagtttacctagtagga

SEQ ID NO: 5764744 - DNA, 25 bp, Homo sapien
taaaaaaattacacaacgaatgaaa

SEQ ID NO: 5764745 - DNA, 25 bp, Homo sapien
tggtctgaatgtaacttgcccacat

SEQ ID NO: 5764746 - DNA, 25 bp, Homo sapien
gagattctttgcttcctgggcaagc

SEQ ID NO: 5764747 - DNA, 25 bp, Homo sapien
ttttctttgctgggaaaccactagt

SEQ ID NO: 5764748 - DNA, 25 bp, Homo sapien
ggacagtggctgtgtaaacctcctt

SEQ ID NO: 5764749 - DNA, 25 bp, Homo sapien
gggctggcccacccaaaagagcagc

SEQ ID NO: 5764750 - DNA, 25 bp, Homo sapien
tagaaagggacctcatcatacactc

SEQ ID NO: 5764751 - DNA, 25 bp, Homo sapien
agttgagagagttgggtagggctgg

SEQ ID NO: 5764752 - DNA, 25 bp, Homo sapien
tcgccggctctgccgttcttgctgt

SEQ ID NO: 5764753 - DNA, 25 bp, Homo sapien
taaagtttgagccactggctgcttc

SEQ ID NO: 5764754 - DNA, 25 bp, Homo sapien
aagtgatccatctcctctatcctgg

SEQ ID NO: 5764755 - DNA, 25 bp, Homo sapien
cttaatgggggaggcagataaatct

SEQ ID NO: 5764756 - DNA, 25 bp, Homo sapien
acaattctaaccgtggctgaatctt

SEQ ID NO: 5764757 - DNA, 25 bp, Homo sapien
tgcaagcaaaaatgagttcacatcg

SEQ ID NO: 5764758 - DNA, 25 bp, Homo sapien
agcacagattctcagtatgtaactc

SEQ ID NO: 5764759 - DNA, 25 bp, Homo sapien
ctgggtagtcgttgtctgaaatgac

SEQ ID NO: 5764760 - DNA, 25 bp, Homo sapien
gccggctctgccgttcttgctgtcg

SEQ ID NO: 5764761 - DNA, 25 bp, Homo sapien
cccgagattcattcccagtctgata

SEQ ID NO: 5764762 - DNA, 25 bp, Homo sapien
atagacaagagattctttgcttcct

SEQ ID NO: 5764763 - DNA, 25 bp, Homo sapien
ggccccaagtagagaaatcgtggct

SEQ ID NO: 5764764 - DNA, 25 bp, Homo sapien
aaattggtgcccactataagggtca

SEQ ID NO: 5764765 - DNA, 25 bp, Homo sapien
gaggcagataaatctagagtgtcac

SEQ ID NO: 5764766 - DNA, 25 bp, Homo sapien
aatactgtagacaactttagcactg

SEQ ID NO: 5764767 - DNA, 25 bp, Homo sapien
gatcttgatgatgaattcagactcg

SEQ ID NO: 5764768 - DNA, 25 bp, Homo sapien
gcctccgcgtggcaggattgcatgt

SEQ ID NO: 5764769 - DNA, 25 bp, Homo sapien
cggctctgccgttcttgctgtcgcg

SEQ ID NO: 5764770 - DNA, 25 bp, Homo sapien
actgatctgcctttgctttttcaca

SEQ ID NO: 5764771 - DNA, 25 bp, Homo sapien
tccagagagctccagggcccttttc

SEQ ID NO: 5764772 - DNA, 25 bp, Homo sapien
acatttatgttgccctgaaatcccc

SEQ ID NO: 5764773 - DNA, 25 bp, Homo sapien
atacctgtttctgattcaactgaaa

SEQ ID NO: 5764774 - DNA, 25 bp, Homo sapien
ggcagataaatctagagtgtcacag

SEQ ID NO: 5764775 - DNA, 25 bp, Homo sapien
cagattctcagtatgtaactcgact

SEQ ID NO: 5764776 - DNA, 25 bp, Homo sapien
gctcatctacatcctccaccacaat

SEQ ID NO: 5764777 - DNA, 25 bp, Homo sapien
gccatttttccgagttaagattccc

SEQ ID NO: 5764778 - DNA, 25 bp, Homo sapien
gttctcatgctgatggcaccgtcga

SEQ ID NO: 5764779 - DNA, 25 bp, Homo sapien
aggctgctcctgcctccgccgccgc

SEQ ID NO: 5764780 - DNA, 25 bp, Homo sapien
ttacctagtaggatcacgatgcaca

SEQ ID NO: 5764781 - DNA, 25 bp, Homo sapien
gggtggatgagcgcctccgcgtggc

SEQ ID NO: 5764782 - DNA, 25 bp, Homo sapien
gtaacttgcccacatactgataatc

SEQ ID NO: 5764783 - DNA, 25 bp, Homo sapien
accactagtcctctttgatagtgga

SEQ ID NO: 5764784 - DNA, 25 bp, Homo sapien
ttgtcaacagcatgcaaggtctgaa

SEQ ID NO: 5764785 - DNA, 25 bp, Homo sapien
tggctcaacataaggattggaggct

SEQ ID NO: 5764786 - DNA, 25 bp, Homo sapien
ctgtagacaactttagcactgttcc

SEQ ID NO: 5764787 - DNA, 25 bp, Homo sapien
gacttggacaacaaatgtaccgaca

SEQ ID NO: 5764788 - DNA, 25 bp, Homo sapien
acctgtttctgattcaactgaaaaa

SEQ ID NO: 5764789 - DNA, 25 bp, Homo sapien
tcagtgtgatgttcacggtggtggt

SEQ ID NO: 5764790 - DNA, 25 bp, Homo sapien
gacatttcagggacagtggctgtgt

SEQ ID NO: 5764791 - DNA, 25 bp, Homo sapien
tgatgttcacggtggtggtcccaga

SEQ ID NO: 5764792 - DNA, 25 bp, Homo sapien
tggccgcccatatccttggcttgaa

SEQ ID NO: 5764793 - DNA, 25 bp, Homo sapien
ctttgctgggaaaccactagtcctc

SEQ ID NO: 5764794 - DNA, 25 bp, Homo sapien
aggagaaagaactgattccacatcc

SEQ ID NO: 5764795 - DNA, 25 bp, Homo sapien
tgttgtctttgttgtcttgaatggt

SEQ ID NO: 5764796 - DNA, 25 bp, Homo sapien
gaagattcaggagttttaaactggt

SEQ ID NO: 5764797 - DNA, 25 bp, Homo sapien
gtcccgtggggtggatgagcgcctc

SEQ ID NO: 5764798 - DNA, 25 bp, Homo sapien
cacatcgtacagcacagattctcag

SEQ ID NO: 5764799 - DNA, 25 bp, Homo sapien
gttttcattaataatgaagagatct

SEQ ID NO: 5764800 - DNA, 25 bp, Homo sapien
tgggcaagcaaagacacgagcaagt

SEQ ID NO: 5764801 - DNA, 25 bp, Homo sapien
tcctccttccttccttaatgttctt

SEQ ID NO: 5764802 - DNA, 25 bp, Homo sapien
atccatgttgagcaaagctgtcttg

SEQ ID NO: 5764803 - DNA, 25 bp, Homo sapien
gttgtctgaaatgaccacaggcaag

SEQ ID NO: 5764804 - DNA, 25 bp, Homo sapien
tgccgttcttgctgtcgcggctgaa

SEQ ID NO: 5764805 - DNA, 25 bp, Homo sapien
gaaaggccccaagtagagaaatcgt

SEQ ID NO: 5764806 - DNA, 25 bp, Homo sapien
aggcaagagataggtgctcatctcg

SEQ ID NO: 5764807 - DNA, 25 bp, Homo sapien
ccaaaagagcagcaagaagtagcgg

SEQ ID NO: 5764808 - DNA, 25 bp, Homo sapien
cagtgtttctcggtcaagaagtttc

SEQ ID NO: 5764809 - DNA, 25 bp, Homo sapien
atattctgtccatatctgtgtgtcg

SEQ ID NO: 5764810 - DNA, 25 bp, Homo sapien
taaacctccttggtgaatattggtt

SEQ ID NO: 5764811 - DNA, 25 bp, Homo sapien
atgtaactcgactcacctagatcag

SEQ ID NO: 5764812 - DNA, 25 bp, Homo sapien
ttgatgatgaattcagactcgggct

SEQ ID NO: 5764813 - DNA, 25 bp, Homo sapien
accctgcgacccgcccaggctgctc

SEQ ID NO: 5764814 - DNA, 25 bp, Homo sapien
ggcagggagaaccagtttacctagt

SEQ ID NO: 5764815 - DNA, 25 bp, Homo sapien
acagcatgcaaggtctgaatcaact

SEQ ID NO: 5764816 - DNA, 25 bp, Homo sapien
gatagtggagttgagagagttgggt

SEQ ID NO: 5764817 - DNA, 25 bp, Homo sapien
gcctgtatgtcgcctgtgttttcat

SEQ ID NO: 5764818 - DNA, 25 bp, Homo sapien
ggtaaagtttgagccactggctgct

SEQ ID NO: 5764819 - DNA, 25 bp, Homo sapien
agagctttttgacagttataatccc

SEQ ID NO: 5764820 - DNA, 25 bp, Homo sapien
ggtttcctggtcggtgatgacatca

SEQ ID NO: 5764821 - DNA, 25 bp, Homo sapien
ccgtcgcagtgacttggacaacaaa

SEQ ID NO: 5764822 - DNA, 25 bp, Homo sapien
tcttcttttcaaagtccaagagctt

SEQ ID NO: 5764823 - DNA, 25 bp, Homo sapien
actgtaatgttgtgccatagcagtg

SEQ ID NO: 5764824 - DNA, 25 bp, Homo sapien
tataatcccttcctgggtttcctgg

SEQ ID NO: 5764825 - DNA, 25 bp, Homo sapien
atgttgccctgaaatcccccgagat

SEQ ID NO: 5764826 - DNA, 25 bp, Homo sapien
atcagacatttcagggacagtggct

SEQ ID NO: 5764827 - DNA, 25 bp, Homo sapien
cttgcccacatactgataatcggat

SEQ ID NO: 5764828 - DNA, 25 bp, Homo sapien
tcaatgttgaatattctgtccatat

SEQ ID NO: 5764829 - DNA, 25 bp, Homo sapien
gctgtcttgataatacctgtttctg

SEQ ID NO: 5764830 - DNA, 25 bp, Homo sapien
tatagaaagggacctcatcatacac

SEQ ID NO: 5764831 - DNA, 25 bp, Homo sapien
ggctgtatgccttaatgggggaggc

SEQ ID NO: 5764832 - DNA, 25 bp, Homo sapien
tcatgctgatggcaccgtcgagtct

SEQ ID NO: 5764833 - DNA, 25 bp, Homo sapien
atatatttaagtgatccatctcctc

SEQ ID NO: 5764834 - DNA, 25 bp, Homo sapien
agataatcctcccatctggccgccc

SEQ ID NO: 5764835 - DNA, 25 bp, Homo sapien
tcctccaggagaaagaactgattcc

SEQ ID NO: 5764836 - DNA, 25 bp, Homo sapien
gatctcctgctccatctcctgaaag

SEQ ID NO: 5764837 - DNA, 25 bp, Homo sapien
gtttctgattcaactgaaaaatagg

SEQ ID NO: 5764838 - DNA, 25 bp, Homo sapien
gtcacagtaacagtgtgagcccctc

SEQ ID NO: 5764839 - DNA, 25 bp, Homo sapien
tgtgatgttcacggtggtggtccca

SEQ ID NO: 5764840 - DNA, 25 bp, Homo sapien
tctcctctatcctggtctgaatgta

SEQ ID NO: 5764841 - DNA, 25 bp, Homo sapien
acaactttagcactgttcccatatg

SEQ ID NO: 5764842 - DNA, 25 bp, Homo sapien
tccttctgtttatagcttgagctcg

SEQ ID NO: 5764843 - DNA, 25 bp, Homo sapien
gaaagggacctcatcatacactcca

SEQ ID NO: 5764844 - DNA, 25 bp, Homo sapien
tcgtacagcacagattctcagtatg

SEQ ID NO: 5764845 - DNA, 25 bp, Homo sapien
tccaagagctttttgacagttataa

SEQ ID NO: 5764846 - DNA, 25 bp, Homo sapien
gcatctggatcttgggctgtgacgg

SEQ ID NO: 5764847 - DNA, 25 bp, Homo sapien
aagagcagcaagaagtagcggtaag

SEQ ID NO: 5764848 - DNA, 25 bp, Homo sapien
ctcctgcctccgccgccgccgccgc

SEQ ID NO: 5764849 - DNA, 25 bp, Homo sapien
tcccacatcagcatcgctggctttg

SEQ ID NO: 5764850 - DNA, 25 bp, Homo sapien
agcagtgtttctcggtcaagaagtt

SEQ ID NO: 5764851 - DNA, 25 bp, Homo sapien
ccacccaaaagagcagcaagaagta

SEQ ID NO: 5764852 - DNA, 25 bp, Homo sapien
tctctgttgctatcactgtaatgtt

SEQ ID NO: 5764853 - DNA, 25 bp, Homo sapien
actgtcccagtgctgctttgaactg

SEQ ID NO: 5764854 - DNA, 25 bp, Homo sapien
caccgtcgagtctgtgcgtagtgag

SEQ ID NO: 5764855 - DNA, 25 bp, Homo sapien
cttggtgaatattggttcattgtca

SEQ ID NO: 5764856 - DNA, 25 bp, Homo sapien
ttgaatattctgtccatatctgtgt

SEQ ID NO: 5764857 - DNA, 25 bp, Homo sapien
cagcatcgctggctttgattctgcc

SEQ ID NO: 5764858 - DNA, 25 bp, Homo sapien
tacacaacgaatgaaatgaaaaggg

SEQ ID NO: 5764859 - DNA, 25 bp, Homo sapien
ttttgaacggttcagctcatttttg

SEQ ID NO: 5764860 - DNA, 25 bp, Homo sapien
ttcttttcaaagtccaagagctttt

SEQ ID NO: 5764861 - DNA, 25 bp, Homo sapien
tctcccacatcagcatcgctggctt

SEQ ID NO: 5764862 - DNA, 25 bp, Homo sapien
ccctgtagaatactgtagacaactt

SEQ ID NO: 5764863 - DNA, 25 bp, Homo sapien
gccgccgcggtcgccggctctgccg

SEQ ID NO: 5764864 - DNA, 25 bp, Homo sapien
cccatctggccgcccatatccttgg

SEQ ID NO: 5764865 - DNA, 25 bp, Homo sapien
cgagattcattcccagtctgataga

SEQ ID NO: 5764866 - DNA, 25 bp, Homo sapien
tggaagtgcctttttcactgcaccg

SEQ ID NO: 5764867 - DNA, 25 bp, Homo sapien
ctgataatcggatcctgtgtattcc

SEQ ID NO: 5764868 - DNA, 25 bp, Homo sapien
agacccggacagtcactgtcccagt

SEQ ID NO: 5764869 - DNA, 25 bp, Homo sapien
gaaaggatatatttaagtgatccat

SEQ ID NO: 5764870 - DNA, 25 bp, Homo sapien
ttgctgtcgcggctgaaactgcagc

SEQ ID NO: 5764871 - DNA, 25 bp, Homo sapien
agcaagaagtagcggtaagttctca

SEQ ID NO: 5764872 - DNA, 25 bp, Homo sapien
ttcccgtggtggtcacatgcacaga

SEQ ID NO: 5764873 - DNA, 25 bp, Homo sapien
cactgttcccatatgttggatcatc

SEQ ID NO: 5764874 - DNA, 25 bp, Homo sapien
tcctgcgcccgcggagaccctgcga

SEQ ID NO: 5764875 - DNA, 25 bp, Homo sapien
agagaaatcgtggctcaacataagg

SEQ ID NO: 5764876 - DNA, 25 bp, Homo sapien
tagagtgtcacagtaacagtgtgag

SEQ ID NO: 5764877 - DNA, 25 bp, Homo sapien
ctgtttctgattcaactgaaaaata

SEQ ID NO: 5764878 - DNA, 25 bp, Homo sapien
ttgagctcgaaggatgtaaacgggt

SEQ ID NO: 5764879 - DNA, 25 bp, Homo sapien
acgaatgaaatgaaaagggcacatt

SEQ ID NO: 5764880 - DNA, 25 bp, Homo sapien
tcatttttgctgtttccagagagct

SEQ ID NO: 5764881 - DNA, 25 bp, Homo sapien
gtacagcacagattctcagtatgta

SEQ ID NO: 5764882 - DNA, 25 bp, Homo sapien
taatacctgtttctgattcaactga

SEQ ID NO: 5764883 - DNA, 25 bp, Homo sapien
gtactcgactactttgctttggatt

SEQ ID NO: 5764884 - DNA, 25 bp, Homo sapien
ctgcgcccgcggagaccctgcgacc

SEQ ID NO: 5764885 - DNA, 25 bp, Homo sapien
tgcatgttcccgtggtggtcacatg

SEQ ID NO: 5764886 - DNA, 25 bp, Homo sapien
taatcccttcctgggtttcctggtc

SEQ ID NO: 5764887 - DNA, 25 bp, Homo sapien
actttaatatatagaggtactcgac

SEQ ID NO: 5764888 - DNA, 25 bp, Homo sapien
cccgtgctcagtcccgtggggtgga

SEQ ID NO: 5764889 - DNA, 25 bp, Homo sapien
tctgatagacaagagattctttgct

SEQ ID NO: 5764890 - DNA, 25 bp, Homo sapien
aagaactgattccacatccagctcc

SEQ ID NO: 5764891 - DNA, 25 bp, Homo sapien
cgggtctccctgtccttctgtttat

SEQ ID NO: 5764892 - DNA, 25 bp, Homo sapien
agcaaagacacgagcaagtttcaca

SEQ ID NO: 5764893 - DNA, 25 bp, Homo sapien
taggatcacgatgcacagaaggatg

SEQ ID NO: 5764894 - DNA, 25 bp, Homo sapien
ggctctcagaggatatctctgctcg

SEQ ID NO: 5764895 - DNA, 25 bp, Homo sapien
tcatcatacactccatgccagacgc

SEQ ID NO: 5764896 - DNA, 25 bp, Homo sapien
atgttgtgccatagcagtgtttctc

SEQ ID NO: 5764897 - DNA, 25 bp, Homo sapien
gcttccactttaagggtatacactt

SEQ ID NO: 5764898 - DNA, 25 bp, Homo sapien
ctgtgacggagcctattgtggtgtt

SEQ ID NO: 5764899 - DNA, 25 bp, Homo sapien
gggtatacactttcttcttttcaaa

SEQ ID NO: 5764900 - DNA, 25 bp, Homo sapien
gagtgccccactcttggaagtgcct

SEQ ID NO: 5764901 - DNA, 25 bp, Homo sapien
tcaaacatatccagcccctcaccgt

SEQ ID NO: 5764902 - DNA, 25 bp, Homo sapien
tgtaaacctccttggtgaatattgg

SEQ ID NO: 5764903 - DNA, 25 bp, Homo sapien
ttccttaatgttctttgcttggctc

SEQ ID NO: 5764904 - DNA, 25 bp, Homo sapien
ctgaatcaactgatctgcctttgct

SEQ ID NO: 5764905 - DNA, 25 bp, Homo sapien
gagtacttgacaggattcctggcag

SEQ ID NO: 5764906 - DNA, 25 bp, Homo sapien
cacaacgaatgaaatgaaaagggca

SEQ ID NO: 5764907 - DNA, 25 bp, Homo sapien
cgtctgtgatgctgtactcaatttc

SEQ ID NO: 5764908 - DNA, 25 bp, Homo sapien
gacaacaaatgtaccgacatcagac

SEQ ID NO: 5764909 - DNA, 25 bp, Homo sapien
attggtgcccactataagggtcatc

SEQ ID NO: 5764910 - DNA, 25 bp, Homo sapien
gtggctgaatctttgaaaggcccca

SEQ ID NO: 5764911 - DNA, 25 bp, Homo sapien
ggcaagcaaagacacgagcaagttt

SEQ ID NO: 5764912 - DNA, 25 bp, Homo sapien
ccctgtccagcctcttggtggcctg

SEQ ID NO: 5764913 - DNA, 25 bp, Homo sapien
tcagcaaattctggggcgttgtcat

SEQ ID NO: 5764914 - DNA, 25 bp, Homo sapien
cccatatccttggcttgaatcacca

SEQ ID NO: 5764915 - DNA, 25 bp, Homo sapien
caggattgcatgttcccgtggtggt

SEQ ID NO: 5764916 - DNA, 25 bp, Homo sapien
cctcaccgtctgtgatgctgtactc

SEQ ID NO: 5764917 - DNA, 25 bp, Homo sapien
ctgttcattttccaaagccatttgc

SEQ ID NO: 5764918 - DNA, 25 bp, Homo sapien
gaatattctgtccatatctgtgtgt

SEQ ID NO: 5764919 - DNA, 25 bp, Homo sapien
agattcccgccgtgttgtctttgtt

SEQ ID NO: 5764920 - DNA, 25 bp, Homo sapien
agggtcatccttgtcaacagcatgc

SEQ ID NO: 5764921 - DNA, 25 bp, Homo sapien
tgccctgaaatcccccgagattcat

SEQ ID NO: 5764922 - DNA, 25 bp, Homo sapien
aaacgaaaattggtgcccactataa

SEQ ID NO: 5764923 - DNA, 25 bp, Homo sapien
aatcggggagggttgtcgttgacat

SEQ ID NO: 5764924 - DNA, 25 bp, Homo sapien
cggtcaagaagtttcgatgtaaaaa

SEQ ID NO: 5764925 - DNA, 25 bp, Homo sapien
ttgctgtttccagagagctccaggg

SEQ ID NO: 5764926 - DNA, 25 bp, Homo sapien
ctggctgcttcaggggccaaggaaa

SEQ ID NO: 5764927 - DNA, 25 bp, Homo sapien
agcccctcaccgtctgtgatgctgt

SEQ ID NO: 5764928 - DNA, 25 bp, Homo sapien
gtattcctccaggagaaagaactga

SEQ ID NO: 5764929 - DNA, 25 bp, Homo sapien
ggtagggctggcccacccaaaagag

SEQ ID NO: 5764930 - DNA, 25 bp, Homo sapien
agtaggatcacgatgcacagaagga

SEQ ID NO: 5764931 - DNA, 25 bp, Homo sapien
ttgtctttgttgtcttgaatggtaa

SEQ ID NO: 5764932 - DNA, 25 bp, Homo sapien
tgttttctcgatccatgttgagcaa

SEQ ID NO: 5764933 - DNA, 25 bp, Homo sapien
tgctcctgcctccgccgccgccgcc

SEQ ID NO: 5764934 - DNA, 25 bp, Homo sapien
attatagccatttttccgagttaag

SEQ ID NO: 5764935 - DNA, 25 bp, Homo sapien
tactcaatttcagcattttctccca

SEQ ID NO: 5764936 - DNA, 25 bp, Homo sapien
aactcgactcacctagatcaggctg

SEQ ID NO: 5764937 - DNA, 25 bp, Homo sapien
atctgcctttgctttttcacagaca

SEQ ID NO: 5764938 - DNA, 25 bp, Homo sapien
tgtgtaaacctccttggtgaatatt

SEQ ID NO: 5764939 - DNA, 25 bp, Homo sapien
cgatgtaaaaatcgaaccatttcca

SEQ ID NO: 5764940 - DNA, 25 bp, Homo sapien
ggtcatccttgtcaacagcatgcaa

SEQ ID NO: 5764941 - DNA, 25 bp, Homo sapien
ctgattcaactgaaaaatagggctg

SEQ ID NO: 5764942 - DNA, 25 bp, Homo sapien
actttgctttggattattgatctct

SEQ ID NO: 5764943 - DNA, 25 bp, Homo sapien
gaattcagactcgggctccacgggt

SEQ ID NO: 5764944 - DNA, 25 bp, Homo sapien
gccagacgcttaacaacgttttcca

SEQ ID NO: 5764945 - DNA, 25 bp, Homo sapien
ttcagcattttctcccacatcagca

SEQ ID NO: 5764946 - DNA, 25 bp, Homo sapien
gcccaggctgctcctgcctccgccg

SEQ ID NO: 5764947 - DNA, 25 bp, Homo sapien
gagccactggctgcttcaggggcca

SEQ ID NO: 5764948 - DNA, 25 bp, Homo sapien
gggctccacgggtctccctgtcctt

SEQ ID NO: 5764949 - DNA, 25 bp, Homo sapien
aacagtgtgagcccctcaccatggg

SEQ ID NO: 5764950 - DNA, 25 bp, Homo sapien
aaccatttccagaatcaatgttgaa

SEQ ID NO: 5764951 - DNA, 25 bp, Homo sapien
tatccttggcttgaatcaccacttg

SEQ ID NO: 5764952 - DNA, 25 bp, Homo sapien
ttttgacagttataatcccttcctg

SEQ ID NO: 5764953 - DNA, 25 bp, Homo sapien
gttttaaactggtatgtactctggg

SEQ ID NO: 5764954 - DNA, 25 bp, Homo sapien
gtggagttgagagagttgggtaggg

SEQ ID NO: 5764955 - DNA, 25 bp, Homo sapien
ccctcaccatggggagataggaggc

SEQ ID NO: 5764956 - DNA, 25 bp, Homo sapien
cacatccagctcctttttgaacggt

SEQ ID NO: 5764957 - DNA, 25 bp, Homo sapien
tatctgtgtgtcgatctacagagta

SEQ ID NO: 5764958 - DNA, 25 bp, Homo sapien
ctcccatctggccgcccatatcctt

SEQ ID NO: 5764959 - DNA, 25 bp, Homo sapien
tttcacatctgttcattttccaaag

SEQ ID NO: 5764960 - DNA, 25 bp, Homo sapien
gtggatgagcgcctccgcgtggcag

SEQ ID NO: 5764961 - DNA, 25 bp, Homo sapien
gttcccatatgttggatcatctgca

SEQ ID NO: 5764962 - DNA, 25 bp, Homo sapien
atatttaagtgatccatctcctcta

SEQ ID NO: 5764963 - DNA, 25 bp, Homo sapien
gagatctcctgctccatctcctgaa

SEQ ID NO: 5764964 - DNA, 25 bp, Homo sapien
taagggtcatccttgtcaacagcat

SEQ ID NO: 5764965 - DNA, 25 bp, Homo sapien
tgctcagtcccgtggggtggatgag

SEQ ID NO: 5764966 - DNA, 25 bp, Homo sapien
caagaagtttcgatgtaaaaatcga

SEQ ID NO: 5764967 - DNA, 25 bp, Homo sapien
ctcttggaagtgcctttttcactgc

SEQ ID NO: 5764968 - DNA, 25 bp, Homo sapien
catgcaaggtctgaatcaactgatc

SEQ ID NO: 5764969 - DNA, 25 bp, Homo sapien
aggagttttaaactggtatgtactc

SEQ ID NO: 5764970 - DNA, 25 bp, Homo sapien
gctgctcctgcctccgccgccgccg

SEQ ID NO: 5764971 - DNA, 25 bp, Homo sapien
gctgggaaaccactagtcctctttg

SEQ ID NO: 5764972 - DNA, 25 bp, Homo sapien
tgttgctatcactgtaatgttgtgc

SEQ ID NO: 5764973 - DNA, 25 bp, Homo sapien
tccaagtaaaaaaattacacaacga

SEQ ID NO: 5764974 - DNA, 25 bp, Homo sapien
gtctttgttgtcttgaatggtaaag

SEQ ID NO: 5764975 - DNA, 25 bp, Homo sapien
ttttgctgtttccagagagctccag

SEQ ID NO: 5764976 - DNA, 25 bp, Homo sapien
agcggtaagttctcatgctgatggc

SEQ ID NO: 5764977 - DNA, 25 bp, Homo sapien
gccgcccatatccttggcttgaatc

SEQ ID NO: 5764978 - DNA, 25 bp, Homo sapien
cttgggctgtgacggagcctattgt

SEQ ID NO: 5764979 - DNA, 25 bp, Homo sapien
agattcaggagttttaaactggtat

SEQ ID NO: 5764980 - DNA, 25 bp, Homo sapien
agtcctctttgatagtggagttgag

SEQ ID NO: 5764981 - DNA, 25 bp, Homo sapien
tcggggagggttgtcgttgacatca

SEQ ID NO: 5764982 - DNA, 25 bp, Homo sapien
tgtaagatgtaggccagtttgctga

SEQ ID NO: 5764983 - DNA, 25 bp, Homo sapien
ccagcctcttggtggcctgtatgtc

SEQ ID NO: 5764984 - DNA, 25 bp, Homo sapien
gaatgtaacttgcccacatactgat

SEQ ID NO: 5764985 - DNA, 25 bp, Homo sapien
tgtgcgtagtgagtgccccactctt

SEQ ID NO: 5764986 - DNA, 25 bp, Homo sapien
gctgatggcaccgtcgagtctgtgc

SEQ ID NO: 5764987 - DNA, 25 bp, Homo sapien
acaggcaagagataggtgctcatct

SEQ ID NO: 5764988 - DNA, 25 bp, Homo sapien
tttacctttatagaaagggacctca

SEQ ID NO: 5764989 - DNA, 25 bp, Homo sapien
caagcaaaaatgagttcacatcgta

SEQ ID NO: 5764990 - DNA, 25 bp, Homo sapien
tttctcccacatcagcatcgctggc

SEQ ID NO: 5764991 - DNA, 25 bp, Homo sapien
ctctcagaggatatctctgctcgcc

SEQ ID NO: 5764992 - DNA, 25 bp, Homo sapien
tctgaaatgaccacaggcaagagat

SEQ ID NO: 5764993 - DNA, 25 bp, Homo sapien
aagtttgagccactggctgcttcag

SEQ ID NO: 5764994 - DNA, 25 bp, Homo sapien
gacaggtggctcatctacatcctcc

SEQ ID NO: 5764995 - DNA, 25 bp, Homo sapien
ctacatcctccaccacaattctaac

SEQ ID NO: 5764996 - DNA, 25 bp, Homo sapien
ggtgctcatctcgtgtctattatag

SEQ ID NO: 5764997 - DNA, 25 bp, Homo sapien
cagacatttcagggacagtggctgt

SEQ ID NO: 5764998 - DNA, 25 bp, Homo sapien
gcttgaatcaccacttggtactgct

SEQ ID NO: 5764999 - DNA, 25 bp, Homo sapien
aaatgaccacaggcaagagataggt

SEQ ID NO: 5765000 - DNA, 25 bp, Homo sapien
gtgtcacagtaacagtgtgagcccc

SEQ ID NO: 5765001 - DNA, 25 bp, Homo sapien
cactggctgcttcaggggccaagga

SEQ ID NO: 5765002 - DNA, 25 bp, Homo sapien
atatgttggatcatctgcatccgtc

SEQ ID NO: 5765003 - DNA, 25 bp, Homo sapien
ggatgagcgcctccgcgtggcagga

SEQ ID NO: 5765004 - DNA, 25 bp, Homo sapien
gtgagtgccccactcttggaagtgc

SEQ ID NO: 5765005 - DNA, 25 bp, Homo sapien
aaaaatagggctgtccctgtagaat

SEQ ID NO: 5765006 - DNA, 25 bp, Homo sapien
aaagtccaagagctttttgacagtt

SEQ ID NO: 5765007 - DNA, 25 bp, Homo sapien
acccgcccaggctgctcctgcctcc

SEQ ID NO: 5765008 - DNA, 25 bp, Homo sapien
tataagggtcatccttgtcaacagc

SEQ ID NO: 5765009 - DNA, 25 bp, Homo sapien
ccaggagaaagaactgattccacat

SEQ ID NO: 5765010 - DNA, 25 bp, Homo sapien
aatgaaaagggcacatttatgttgc

SEQ ID NO: 5765011 - DNA, 25 bp, Homo sapien
attcccgccgtgttgtctttgttgt

SEQ ID NO: 5765012 - DNA, 25 bp, Homo sapien
atagggctgtccctgtagaatactg

SEQ ID NO: 5765013 - DNA, 25 bp, Homo sapien
gtagacaactttagcactgttccca

SEQ ID NO: 5765014 - DNA, 25 bp, Homo sapien
atcagcatcgctggctttgattctg

SEQ ID NO: 5765015 - DNA, 25 bp, Homo sapien
tcccagtgctgctttgaactgggta

SEQ ID NO: 5765016 - DNA, 25 bp, Homo sapien
gacagttataatcccttcctgggtt

SEQ ID NO: 5765017 - DNA, 25 bp, Homo sapien
ttgtcgttgacatcagtcagtgtga

SEQ ID NO: 5765018 - DNA, 25 bp, Homo sapien
agtctgtgcgtagtgagtgccccac

SEQ ID NO: 5765019 - DNA, 25 bp, Homo sapien
gttgagcaaagctgtcttgataata

SEQ ID NO: 5765020 - DNA, 25 bp, Homo sapien
caagcaaagacacgagcaagtttca

SEQ ID NO: 5765021 - DNA, 25 bp, Homo sapien
gctcctttttgaacggttcagctca

SEQ ID NO: 5765022 - DNA, 25 bp, Homo sapien
ctctatcctggtctgaatgtaactt

SEQ ID NO: 5765023 - DNA, 25 bp, Homo sapien
cagtgacttggacaacaaatgtacc

SEQ ID NO: 5765024 - DNA, 25 bp, Homo sapien
tctagagtgtcacagtaacagtgtg

SEQ ID NO: 5765025 - DNA, 25 bp, Homo sapien
atgacatcaaacatatccagcccct

SEQ ID NO: 5765026 - DNA, 25 bp, Homo sapien
cccacatactgataatcggatcctg

SEQ ID NO: 5765027 - DNA, 25 bp, Homo sapien
ttgattctgccaattggtgtccccg

SEQ ID NO: 5765028 - DNA, 25 bp, Homo sapien
tctgtccatatctgtgtgtcgatct

SEQ ID NO: 5765029 - DNA, 25 bp, Homo sapien
gtaccgacatcagacatttcaggga

SEQ ID NO: 5765030 - DNA, 25 bp, Homo sapien
aattctaaccgtggctgaatctttg

SEQ ID NO: 5765031 - DNA, 25 bp, Homo sapien
ggtctccctgtccttctgtttatag

SEQ ID NO: 5765032 - DNA, 25 bp, Homo sapien
agacaagagattctttgcttcctgg

SEQ ID NO: 5765033 - DNA, 25 bp, Homo sapien
ctcagaggatatctctgctcgcctt

SEQ ID NO: 5765034 - DNA, 25 bp, Homo sapien
catcaaacatatccagcccctcacc

SEQ ID NO: 5765035 - DNA, 25 bp, Homo sapien
caaaaatgagttcacatcgtacagc

SEQ ID NO: 5765036 - DNA, 25 bp, Homo sapien
gtatccagcctcattcctccttcct

SEQ ID NO: 5765037 - DNA, 25 bp, Homo sapien
cgccgcggtcgccggctctgccgtt

SEQ ID NO: 5765038 - DNA, 25 bp, Homo sapien
agacaaaagtttcatagaactcagc

SEQ ID NO: 5765039 - DNA, 25 bp, Homo sapien
ccatatgttggatcatctgcatccg

SEQ ID NO: 5765040 - DNA, 25 bp, Homo sapien
tgttctttgcttggctctcagagga

SEQ ID NO: 5765041 - DNA, 25 bp, Homo sapien
tgtcttgataatacctgtttctgat

SEQ ID NO: 5765042 - DNA, 25 bp, Homo sapien
agtcagtgtgatgttcacggtggtg

SEQ ID NO: 5765043 - DNA, 25 bp, Homo sapien
gaactgattccacatccagctcctt

SEQ ID NO: 5765044 - DNA, 25 bp, Homo sapien
ccgttcttgctgtcgcggctgaaac

SEQ ID NO: 5765045 - DNA, 25 bp, Homo sapien
acctagatcaggctgtatgccttaa

SEQ ID NO: 5765046 - DNA, 25 bp, Homo sapien
atgttggatcatctgcatccgtcgc

SEQ ID NO: 5765047 - DNA, 25 bp, Homo sapien
ttctcagtatgtaactcgactcacc

SEQ ID NO: 5765048 - DNA, 25 bp, Homo sapien
tgtgtgtcgatctacagagtacttg

SEQ ID NO: 5765049 - DNA, 25 bp, Homo sapien
gggcacatttatgttgccctgaaat

SEQ ID NO: 5765050 - DNA, 25 bp, Homo sapien
ctttggattattgatctctgttgct

SEQ ID NO: 5765051 - DNA, 25 bp, Homo sapien
ggagttgagagagttgggtagggct

SEQ ID NO: 5765052 - DNA, 25 bp, Homo sapien
gtcaagaagtttcgatgtaaaaatc

SEQ ID NO: 5765053 - DNA, 25 bp, Homo sapien
tcactgtaatgttgtgccatagcag

SEQ ID NO: 5765054 - DNA, 25 bp, Homo sapien
tgagcaaagctgtcttgataatacc

SEQ ID NO: 5765055 - DNA, 25 bp, Homo sapien
tcctcccatctggccgcccatatcc

SEQ ID NO: 5765056 - DNA, 25 bp, Homo sapien
gtcgagtctgtgcgtagtgagtgcc

SEQ ID NO: 5765057 - DNA, 25 bp, Homo sapien
cagtttacctagtaggatcacgatg

SEQ ID NO: 5765058 - DNA, 25 bp, Homo sapien
gggtagtcgttgtctgaaatgacca

SEQ ID NO: 5765059 - DNA, 25 bp, Homo sapien
ctcaatttcagcattttctcccaca

SEQ ID NO: 5765060 - DNA, 25 bp, Homo sapien
atgaattcagactcgggctccacgg

SEQ ID NO: 5765061 - DNA, 25 bp, Homo sapien
gaatattggttcattgtcattgatg

SEQ ID NO: 5765062 - DNA, 25 bp, Homo sapien
caactgatctgcctttgctttttca

SEQ ID NO: 5765063 - DNA, 25 bp, Homo sapien
ggctgaaactgcagctcttgggatg

SEQ ID NO: 5765064 - DNA, 25 bp, Homo sapien
ctgtccctgtagaatactgtagaca

SEQ ID NO: 5765065 - DNA, 25 bp, Homo sapien
tagaactttaatatatagaggtact

SEQ ID NO: 5765066 - DNA, 25 bp, Homo sapien
gccaattggtgtccccggtggagaa

SEQ ID NO: 5765067 - DNA, 25 bp, Homo sapien
tactgataatcggatcctgtgtatt

SEQ ID NO: 5765068 - DNA, 25 bp, Homo sapien
tcctggtcggtgatgacatcaaaca

SEQ ID NO: 5765069 - DNA, 25 bp, Homo sapien
gtttatctgagcatcttctcttatt

SEQ ID NO: 5765070 - DNA, 25 bp, Homo sapien
tatgtactctgggggaatcggggag

SEQ ID NO: 5765071 - DNA, 25 bp, Homo sapien
accagagcccccgtgctcagtcccg

SEQ ID NO: 5765072 - DNA, 25 bp, Homo sapien
tcacatctgttcattttccaaagcc

SEQ ID NO: 5765073 - DNA, 25 bp, Homo sapien
ccttccttaatgttctttgcttggc

SEQ ID NO: 5765074 - DNA, 25 bp, Homo sapien
tctcatgctgatggcaccgtcgagt

SEQ ID NO: 5765075 - DNA, 25 bp, Homo sapien
ggaatcggggagggttgtcgttgac

SEQ ID NO: 5765076 - DNA, 25 bp, Homo sapien
agtccaagagctttttgacagttat

SEQ ID NO: 5765077 - DNA, 25 bp, Homo sapien
attcagactcgggctccacgggtct

SEQ ID NO: 5765078 - DNA, 25 bp, Homo sapien
atcggatcctgtgtattcctccagg

SEQ ID NO: 5765079 - DNA, 25 bp, Homo sapien
tcggtgatgacatcaaacatatcca

SEQ ID NO: 5765080 - DNA, 25 bp, Homo sapien
tcatctgcatccgtcgcagtgactt

SEQ ID NO: 5765081 - DNA, 25 bp, Homo sapien
tcacatgcacagacccggacagtca

SEQ ID NO: 5765082 - DNA, 25 bp, Homo sapien
atggcaaccagagcccccgtgctca

SEQ ID NO: 5765083 - DNA, 25 bp, Homo sapien
tggtgcccactataagggtcatcct

SEQ ID NO: 5765084 - DNA, 25 bp, Homo sapien
agaggtactcgactactttgctttg

SEQ ID NO: 5765085 - DNA, 25 bp, Homo sapien
cgacatcagacatttcagggacagt

SEQ ID NO: 5765086 - DNA, 25 bp, Homo sapien
cagtatgtaactcgactcacctaga

SEQ ID NO: 5765087 - DNA, 25 bp, Homo sapien
gctgtcgcggctgaaactgcagctc

SEQ ID NO: 5765088 - DNA, 25 bp, Homo sapien
ccacatcagcatcgctggctttgat

SEQ ID NO: 5765089 - DNA, 25 bp, Homo sapien
tctgttgctatcactgtaatgttgt

SEQ ID NO: 5765090 - DNA, 25 bp, Homo sapien
atgcacagaaggatggcaaccagag

SEQ ID NO: 5765091 - DNA, 25 bp, Homo sapien
gtttgctgaagacaggtggctcatc

SEQ ID NO: 5765092 - DNA, 25 bp, Homo sapien
gttgtcttgaatggtaaagtttgag

SEQ ID NO: 5765093 - DNA, 25 bp, Homo sapien
atggggagataggaggcagggagaa

SEQ ID NO: 5765094 - DNA, 25 bp, Homo sapien
atgagcgcctccgcgtggcaggatt

SEQ ID NO: 5765095 - DNA, 25 bp, Homo sapien
gttgtgccatagcagtgtttctcgg

SEQ ID NO: 5765096 - DNA, 25 bp, Homo sapien
atgccttaatgggggaggcagataa

SEQ ID NO: 5765097 - DNA, 25 bp, Homo sapien
tggtgtccccggtggagaagattca

SEQ ID NO: 5765098 - DNA, 25 bp, Homo sapien
tgtcattgatgtcatggatcttgat

SEQ ID NO: 5765099 - DNA, 25 bp, Homo sapien
tgtggtgtttatctgagcatcttct

SEQ ID NO: 5765100 - DNA, 25 bp, Homo sapien
ctgcatccgtcgcagtgacttggac

SEQ ID NO: 5765101 - DNA, 25 bp, Homo sapien
tactgtagacaactttagcactgtt

SEQ ID NO: 5765102 - DNA, 25 bp, Homo sapien
atgtcgcctgtgttttcattaataa

SEQ ID NO: 5765103 - DNA, 25 bp, Homo sapien
ataggaggcagggagaaccagttta

SEQ ID NO: 5765104 - DNA, 25 bp, Homo sapien
cacgatgcacagaaggatggcaacc

SEQ ID NO: 5765105 - DNA, 25 bp, Homo sapien
acagcacagattctcagtatgtaac

SEQ ID NO: 5765106 - DNA, 25 bp, Homo sapien
aactttagcactgttcccatatgtt

SEQ ID NO: 5765107 - DNA, 25 bp, Homo sapien
caaggaaaacgaaaattggtgccca

SEQ ID NO: 5765108 - DNA, 25 bp, Homo sapien
ccacaattctaaccgtggctgaatc

SEQ ID NO: 5765109 - DNA, 25 bp, Homo sapien
cactccatgccagacgcttaacaac

SEQ ID NO: 5765110 - DNA, 25 bp, Homo sapien
caccacttggtactgctccctgttt

SEQ ID NO: 5765111 - DNA, 25 bp, Homo sapien
ggattcctggcagcatctggatctt

SEQ ID NO: 5765112 - DNA, 25 bp, Homo sapien
agattcattcccagtctgatagaca

SEQ ID NO: 5765113 - DNA, 25 bp, Homo sapien
agcaaaaatgagttcacatcgtaca

SEQ ID NO: 5765114 - DNA, 25 bp, Homo sapien
tttcttccctgtccagcctcttggt

SEQ ID NO: 5765115 - DNA, 25 bp, Homo sapien
agtgtgatgttcacggtggtggtcc

SEQ ID NO: 5765116 - DNA, 25 bp, Homo sapien
ggcaggattgcatgttcccgtggtg

SEQ ID NO: 5765117 - DNA, 25 bp, Homo sapien
ctttgattctgccaattggtgtccc

SEQ ID NO: 5765118 - DNA, 25 bp, Homo sapien
gcatccgtcgcagtgacttggacaa

SEQ ID NO: 5765119 - DNA, 25 bp, Homo sapien
tcctctatcctggtctgaatgtaac

SEQ ID NO: 5765120 - DNA, 25 bp, Homo sapien
ctccttccttccttaatgttctttg

SEQ ID NO: 5765121 - DNA, 25 bp, Homo sapien
tctgggggaatcggggagggttgtc

SEQ ID NO: 5765122 - DNA, 25 bp, Homo sapien
cgtggtggtcacatgcacagacccg

SEQ ID NO: 5765123 - DNA, 25 bp, Homo sapien
aaaatgagttcacatcgtacagcac

SEQ ID NO: 5765124 - DNA, 25 bp, Homo sapien
ttgcttcctgggcaagcaaagacac

SEQ ID NO: 5765125 - DNA, 25 bp, Homo sapien
tatagccatttttccgagttaagat

SEQ ID NO: 5765126 - DNA, 25 bp, Homo sapien
gagaagattcaggagttttaaactg

SEQ ID NO: 5765127 - DNA, 25 bp, Homo sapien
ttcaactgaaaaatagggctgtccc

SEQ ID NO: 5765128 - DNA, 25 bp, Homo sapien
cacagattctcagtatgtaactcga

SEQ ID NO: 5765129 - DNA, 25 bp, Homo sapien
gctcaacataaggattggaggcttc

SEQ ID NO: 5765130 - DNA, 25 bp, Homo sapien
ggggcgttgtcattgacatctagaa

SEQ ID NO: 5765131 - DNA, 25 bp, Homo sapien
attcccagtctgatagacaagagat

SEQ ID NO: 5765132 - DNA, 25 bp, Homo sapien
gccaaggaaaacgaaaattggtgcc

SEQ ID NO: 5765133 - DNA, 25 bp, Homo sapien
ataatcctcccatctggccgcccat

SEQ ID NO: 5765134 - DNA, 25 bp, Homo sapien
tccttggcttgaatcaccacttggt

SEQ ID NO: 5765135 - DNA, 25 bp, Homo sapien
ccacttggtactgctccctgttttc

SEQ ID NO: 5765136 - DNA, 25 bp, Homo sapien
tttcttcttttcaaagtccaagagc

SEQ ID NO: 5765137 - DNA, 25 bp, Homo sapien
tgtcgatctacagagtacttgacag

SEQ ID NO: 5765138 - DNA, 25 bp, Homo sapien
gtttgagccactggctgcttcaggg

SEQ ID NO: 5765139 - DNA, 25 bp, Homo sapien
gtcattgacatctagaactttaata

SEQ ID NO: 5765140 - DNA, 25 bp, Homo sapien
atcatacactccatgccagacgctt

SEQ ID NO: 5765141 - DNA, 25 bp, Homo sapien
tcttgctgtcgcggctgaaactgca

SEQ ID NO: 5765142 - DNA, 25 bp, Homo sapien
ctttgcttcctgggcaagcaaagac

SEQ ID NO: 5765143 - DNA, 25 bp, Homo sapien
ttgaatggtaaagtttgagccactg

SEQ ID NO: 5765144 - DNA, 25 bp, Homo sapien
ccactataagggtcatccttgtcaa

SEQ ID NO: 5765145 - DNA, 25 bp, Homo sapien
gataaatctagagtgtcacagtaac

SEQ ID NO: 5765146 - DNA, 25 bp, Homo sapien
atcgaaccatttccagaatcaatgt

SEQ ID NO: 5765147 - DNA, 25 bp, Homo sapien
tctcctgaaaggatatatttaagtg

SEQ ID NO: 5765148 - DNA, 25 bp, Homo sapien
aaaaattacacaacgaatgaaatga

SEQ ID NO: 5765149 - DNA, 25 bp, Homo sapien
tcgatctacagagtacttgacagga

SEQ ID NO: 5765150 - DNA, 25 bp, Homo sapien
agcaaagctgtcttgataatacctg

SEQ ID NO: 5765151 - DNA, 25 bp, Homo sapien
agtcactgtcccagtgctgctttga

SEQ ID NO: 5765152 - DNA, 25 bp, Homo sapien
tttgtaagatgtaggccagtttgct

SEQ ID NO: 5765153 - DNA, 25 bp, Homo sapien
agtttcacatctgttcattttccaa

SEQ ID NO: 5765154 - DNA, 25 bp, Homo sapien
aatcctcccatctggccgcccatat

SEQ ID NO: 5765155 - DNA, 25 bp, Homo sapien
aaaagggcacatttatgttgccctg

SEQ ID NO: 5765156 - DNA, 25 bp, Homo sapien
gctctgccgttcttgctgtcgcggc

SEQ ID NO: 5765157 - DNA, 25 bp, Homo sapien
tggtgtttatctgagcatcttctct

SEQ ID NO: 5765158 - DNA, 25 bp, Homo sapien
ttctcttatttgtaagatgtaggcc

SEQ ID NO: 5765159 - DNA, 25 bp, Homo sapien
attgtcattgatgtcatggatcttg

SEQ ID NO: 5765160 - DNA, 25 bp, Homo sapien
tttgaactgggtagtcgttgtctga

SEQ ID NO: 5765161 - DNA, 25 bp, Homo sapien
ctgtgtattcctccaggagaaagaa

SEQ ID NO: 5765162 - DNA, 25 bp, Homo sapien
caaagctgtcttgataatacctgtt

SEQ ID NO: 5765163 - DNA, 25 bp, Homo sapien
tttcagggacagtggctgtgtaaac

SEQ ID NO: 5765164 - DNA, 25 bp, Homo sapien
ccagataatcctcccatctggccgc

SEQ ID NO: 5765165 - DNA, 25 bp, Homo sapien
ggaaaccactagtcctctttgatag

SEQ ID NO: 5765166 - DNA, 25 bp, Homo sapien
actataagggtcatccttgtcaaca

SEQ ID NO: 5765167 - DNA, 25 bp, Homo sapien
cccccgagattcattcccagtctga

SEQ ID NO: 5765168 - DNA, 25 bp, Homo sapien
catcgtacagcacagattctcagta

SEQ ID NO: 5765169 - DNA, 25 bp, Homo sapien
ttcagctcatttttgctgtttccag

SEQ ID NO: 5765170 - DNA, 25 bp, Homo sapien
ggttgtcgttgacatcagtcagtgt

SEQ ID NO: 5765171 - DNA, 25 bp, Homo sapien
gcggagaccctgcgacccgcccagg

SEQ ID NO: 5765172 - DNA, 25 bp, Homo sapien
agtaaaaaaattacacaacgaatga

SEQ ID NO: 5765173 - DNA, 25 bp, Homo sapien
ttgctgggaaaccactagtcctctt

SEQ ID NO: 5765174 - DNA, 25 bp, Homo sapien
tatagcttgagctcgaaggatgtaa

SEQ ID NO: 5765175 - DNA, 25 bp, Homo sapien
tcgccttcctgcgcccgcggagacc

SEQ ID NO: 5765176 - DNA, 25 bp, Homo sapien
tgaagacaggtggctcatctacatc

SEQ ID NO: 5765177 - DNA, 25 bp, Homo sapien
aaatcgtggctcaacataaggattg

SEQ ID NO: 5765178 - DNA, 25 bp, Homo sapien
gccttcctgcgcccgcggagaccct

SEQ ID NO: 5765179 - DNA, 25 bp, Homo sapien
gctggcccacccaaaagagcagcaa

SEQ ID NO: 5765180 - DNA, 25 bp, Homo sapien
aggtctgaatcaactgatctgcctt

SEQ ID NO: 5765181 - DNA, 25 bp, Homo sapien
tcgttgtctgaaatgaccacaggca

SEQ ID NO: 5765182 - DNA, 25 bp, Homo sapien
aattctggggcgttgtcattgacat

SEQ ID NO: 5765183 - DNA, 25 bp, Homo sapien
attaataatgaagagatctcctgct

SEQ ID NO: 5765184 - DNA, 25 bp, Homo sapien
agctttttgacagttataatccctt

SEQ ID NO: 5765185 - DNA, 25 bp, Homo sapien
tcttctcttatttgtaagatgtagg

SEQ ID NO: 5765186 - DNA, 25 bp, Homo sapien
gttggatcatctgcatccgtcgcag

SEQ ID NO: 5765187 - DNA, 25 bp, Homo sapien
actgattccacatccagctcctttt

SEQ ID NO: 5765188 - DNA, 25 bp, Homo sapien
tcagggacagtggctgtgtaaacct

SEQ ID NO: 5765189 - DNA, 25 bp, Homo sapien
aatctagagtgtcacagtaacagtg

SEQ ID NO: 5765190 - DNA, 25 bp, Homo sapien
tcccgccgtgttgtctttgttgtct

SEQ ID NO: 5765191 - DNA, 25 bp, Homo sapien
ttctcggtcaagaagtttcgatgta

SEQ ID NO: 5765192 - DNA, 25 bp, Homo sapien
ccatttccagaatcaatgttgaata

SEQ ID NO: 5765193 - DNA, 25 bp, Homo sapien
ggagataggaggcagggagaaccag

SEQ ID NO: 5765194 - DNA, 25 bp, Homo sapien
acggttcagctcatttttgctgttt

SEQ ID NO: 5765195 - DNA, 25 bp, Homo sapien
tcattttccaaagccatttgcaagc

SEQ ID NO: 5765196 - DNA, 25 bp, Homo sapien
ctccaggagaaagaactgattccac

SEQ ID NO: 5765197 - DNA, 25 bp, Homo sapien
atttcagcattttctcccacatcag

SEQ ID NO: 5765198 - DNA, 25 bp, Homo sapien
tcagtcagtgtgatgttcacggtgg

SEQ ID NO: 5765199 - DNA, 25 bp, Homo sapien
tggcctgtatgtcgcctgtgttttc

SEQ ID NO: 5765200 - DNA, 25 bp, Homo sapien
atttaagtgatccatctcctctatc

SEQ ID NO: 5765201 - DNA, 25 bp, Homo sapien
ggctgtgacggagcctattgtggtg

SEQ ID NO: 5765202 - DNA, 25 bp, Homo sapien
tgcctttttcactgcaccgtatcca

SEQ ID NO: 5765203 - DNA, 25 bp, Homo sapien
tccagctcctttttgaacggttcag

SEQ ID NO: 5765204 - DNA, 25 bp, Homo sapien
acccggacagtcactgtcccagtgc

SEQ ID NO: 5765205 - DNA, 25 bp, Homo sapien
atgccagacgcttaacaacgttttc

SEQ ID NO: 5765206 - DNA, 25 bp, Homo sapien
tccagggcccttttctttgctggga

SEQ ID NO: 5765207 - DNA, 25 bp, Homo sapien
agggctgtccctgtagaatactgta

SEQ ID NO: 5765208 - DNA, 25 bp, Homo sapien
tgatgtcatggatcttgatgatgaa

SEQ ID NO: 5765209 - DNA, 25 bp, Homo sapien
attattgatctctgttgctatcact

SEQ ID NO: 5765210 - DNA, 25 bp, Homo sapien
gacatctagaactttaatatataga

SEQ ID NO: 5765211 - DNA, 25 bp, Homo sapien
agatcaggctgtatgccttaatggg

SEQ ID NO: 5765212 - DNA, 25 bp, Homo sapien
aacttgcccacatactgataatcgg

SEQ ID NO: 5765213 - DNA, 25 bp, Homo sapien
atggcaccgtcgagtctgtgcgtag

SEQ ID NO: 5765214 - DNA, 25 bp, Homo sapien
atttttgctgtttccagagagctcc

SEQ ID NO: 5765215 - DNA, 25 bp, Homo sapien
cgatgcacagaaggatggcaaccag

SEQ ID NO: 5765216 - DNA, 25 bp, Homo sapien
tggatcatctgcatccgtcgcagtg

SEQ ID NO: 5765217 - DNA, 25 bp, Homo sapien
ttgatagtggagttgagagagttgg

SEQ ID NO: 5765218 - DNA, 25 bp, Homo sapien
tgtgtcgatctacagagtacttgac

SEQ ID NO: 5765219 - DNA, 25 bp, Homo sapien
gtaactcgactcacctagatcaggc

SEQ ID NO: 5765220 - DNA, 25 bp, Homo sapien
caattggtgtccccggtggagaaga

SEQ ID NO: 5765221 - DNA, 25 bp, Homo sapien
gatctacagagtacttgacaggatt

SEQ ID NO: 5765222 - DNA, 25 bp, Homo sapien
aagggacctcatcatacactccatg

SEQ ID NO: 5765223 - DNA, 25 bp, Homo sapien
gtaggccagtttgctgaagacaggt

SEQ ID NO: 5765224 - DNA, 25 bp, Homo sapien
tccacgggtctccctgtccttctgt

SEQ ID NO: 5765225 - DNA, 25 bp, Homo sapien
atgaaatgaaaagggcacatttatg

SEQ ID NO: 5765226 - DNA, 25 bp, Homo sapien
gttgccctgaaatcccccgagattc

SEQ ID NO: 5765227 - DNA, 25 bp, Homo sapien
gcattttctcccacatcagcatcgc

SEQ ID NO: 5765228 - DNA, 25 bp, Homo sapien
atgcacagacccggacagtcactgt

SEQ ID NO: 5765229 - DNA, 25 bp, Homo sapien
cgacccgcccaggctgctcctgcct

SEQ ID NO: 5765230 - DNA, 25 bp, Homo sapien
tctggccgcccatatccttggcttg

SEQ ID NO: 5765231 - DNA, 25 bp, Homo sapien
aaggccccaagtagagaaatcgtgg

SEQ ID NO: 5765232 - DNA, 25 bp, Homo sapien
cagagagctccagggcccttttctt

SEQ ID NO: 5765233 - DNA, 25 bp, Homo sapien
gatgatgaattcagactcgggctcc

SEQ ID NO: 5765234 - DNA, 25 bp, Homo sapien
tctccctgtccttctgtttatagct

SEQ ID NO: 5765235 - DNA, 25 bp, Homo sapien
tcttggtggcctgtatgtcgcctgt

SEQ ID NO: 5765236 - DNA, 25 bp, Homo sapien
cttctgtttatagcttgagctcgaa

SEQ ID NO: 5765237 - DNA, 25 bp, Homo sapien
gcggtcgccggctctgccgttcttg

SEQ ID NO: 5765238 - DNA, 25 bp, Homo sapien
ggatcacgatgcacagaaggatggc

SEQ ID NO: 5765239 - DNA, 25 bp, Homo sapien
tctgtttatagcttgagctcgaagg

SEQ ID NO: 5765240 - DNA, 25 bp, Homo sapien
cccgtggggtggatgagcgcctccg

SEQ ID NO: 5765241 - DNA, 25 bp, Homo sapien
ctagtaggatcacgatgcacagaag

SEQ ID NO: 5765242 - DNA, 25 bp, Homo sapien
caagagctttttgacagttataatc

SEQ ID NO: 5765243 - DNA, 25 bp, Homo sapien
cctgggtttcctggtcggtgatgac

SEQ ID NO: 5765244 - DNA, 25 bp, Homo sapien
tagggctggcccacccaaaagagca

SEQ ID NO: 5765245 - DNA, 25 bp, Homo sapien
gccagtttgctgaagacaggtggct

SEQ ID NO: 5765246 - DNA, 25 bp, Homo sapien
atgtaggccagtttgctgaagacag

SEQ ID NO: 5765247 - DNA, 25 bp, Homo sapien
cttatttgtaagatgtaggccagtt

SEQ ID NO: 5765248 - DNA, 25 bp, Homo sapien
ctattgtggtgtttatctgagcatc

SEQ ID NO: 5765249 - DNA, 25 bp, Homo sapien
gagaaccagtttacctagtaggatc

SEQ ID NO: 5765250 - DNA, 25 bp, Homo sapien
ttgatctctgttgctatcactgtaa

SEQ ID NO: 5765251 - DNA, 25 bp, Homo sapien
cactagtcctctttgatagtggagt

SEQ ID NO: 5765252 - DNA, 25 bp, Homo sapien
tggtggtcccagataatcctcccat

SEQ ID NO: 5765253 - DNA, 25 bp, Homo sapien
gcctttgctttttcacagacaaaag

SEQ ID NO: 5765254 - DNA, 25 bp, Homo sapien
gtccctgtagaatactgtagacaac

SEQ ID NO: 5765255 - DNA, 25 bp, Homo sapien
ctgctccatctcctgaaaggatata

SEQ ID NO: 5765256 - DNA, 25 bp, Homo sapien
tcctgctccatctcctgaaaggata

SEQ ID NO: 5765257 - DNA, 25 bp, Homo sapien
tgtttatagcttgagctcgaaggat

SEQ ID NO: 5765258 - DNA, 25 bp, Homo sapien
cagctcatttttgctgtttccagag

SEQ ID NO: 5765259 - DNA, 25 bp, Homo sapien
ctttagcactgttcccatatgttgg

SEQ ID NO: 5765260 - DNA, 25 bp, Homo sapien
tggatcttgatgatgaattcagact

SEQ ID NO: 5765261 - DNA, 25 bp, Homo sapien
ccccaagtagagaaatcgtggctca

SEQ ID NO: 5765262 - DNA, 25 bp, Homo sapien
atatatagaggtactcgactacttt

SEQ ID NO: 5765263 - DNA, 25 bp, Homo sapien
agtggctgtgtaaacctccttggtg

SEQ ID NO: 5765264 - DNA, 25 bp, Homo sapien
actcacctagatcaggctgtatgcc

SEQ ID NO: 5765265 - DNA, 25 bp, Homo sapien
cctgggcaagcaaagacacgagcaa

SEQ ID NO: 5765266 - DNA, 25 bp, Homo sapien
ggtcacatgcacagacccggacagt

SEQ ID NO: 5765267 - DNA, 25 bp, Homo sapien
aatgaagagatctcctgctccatct

SEQ ID NO: 5765268 - DNA, 25 bp, Homo sapien
ctaaccgtggctgaatctttgaaag

SEQ ID NO: 5765269 - DNA, 25 bp, Homo sapien
gacatcaaacatatccagcccctca

SEQ ID NO: 5765270 - DNA, 25 bp, Homo sapien
cggtaagttctcatgctgatggcac

SEQ ID NO: 5765271 - DNA, 25 bp, Homo sapien
ctcggtcaagaagtttcgatgtaaa

SEQ ID NO: 5765272 - DNA, 25 bp, Homo sapien
ccatgttgagcaaagctgtcttgat

SEQ ID NO: 5765273 - DNA, 25 bp, Homo sapien
tgtcgcggctgaaactgcagctctt

SEQ ID NO: 5765274 - DNA, 25 bp, Homo sapien
atagaggtactcgactactttgctt

SEQ ID NO: 5765275 - DNA, 25 bp, Homo sapien
caactgaaaaatagggctgtccctg

SEQ ID NO: 5765276 - DNA, 25 bp, Homo sapien
acttgacaggattcctggcagcatc

SEQ ID NO: 5765277 - DNA, 25 bp, Homo sapien
agtctgatagacaagagattctttg

SEQ ID NO: 5765278 - DNA, 25 bp, Homo sapien
cgactcacctagatcaggctgtatg

SEQ ID NO: 5765279 - DNA, 25 bp, Homo sapien
actgaaaaatagggctgtccctgta

SEQ ID NO: 5765280 - DNA, 25 bp, Homo sapien
tcactgtcccagtgctgctttgaac

SEQ ID NO: 5765281 - DNA, 25 bp, Homo sapien
gtgacttggacaacaaatgtaccga

SEQ ID NO: 5765282 - DNA, 25 bp, Homo sapien
tgggaaaccactagtcctctttgat

SEQ ID NO: 5765283 - DNA, 25 bp, Homo sapien
taaggattggaggcttccactttaa

SEQ ID NO: 5765284 - DNA, 25 bp, Homo sapien
tgatgacatcaaacatatccagccc

SEQ ID NO: 5765285 - DNA, 25 bp, Homo sapien
ttctttgcttggctctcagaggata

SEQ ID NO: 5765286 - DNA, 25 bp, Homo sapien
gctccatctcctgaaaggatatatt

SEQ ID NO: 5765287 - DNA, 25 bp, Homo sapien
ttgctgaagacaggtggctcatcta

SEQ ID NO: 5765288 - DNA, 25 bp, Homo sapien
agatgtaggccagtttgctgaagac

SEQ ID NO: 5765289 - DNA, 25 bp, Homo sapien
tggtggtcacatgcacagacccgga

SEQ ID NO: 5765290 - DNA, 25 bp, Homo sapien
aaatcccccgagattcattcccagt

SEQ ID NO: 5765291 - DNA, 25 bp, Homo sapien
ccacaggcaagagataggtgctcat

SEQ ID NO: 5765292 - DNA, 25 bp, Homo sapien
ttgacaggattcctggcagcatctg

SEQ ID NO: 5765293 - DNA, 25 bp, Homo sapien
ttctggggcgttgtcattgacatct

SEQ ID NO: 5765294 - DNA, 25 bp, Homo sapien
ggagaccctgcgacccgcccaggct

SEQ ID NO: 5765295 - DNA, 25 bp, Homo sapien
ctgctttgaactgggtagtcgttgt

SEQ ID NO: 5765296 - DNA, 25 bp, Homo sapien
ttgaaaggccccaagtagagaaatc

SEQ ID NO: 5765297 - DNA, 25 bp, Homo sapien
gtcgcagtgacttggacaacaaatg

SEQ ID NO: 5765298 - DNA, 25 bp, Homo sapien
atctggatcttgggctgtgacggag

SEQ ID NO: 5765299 - DNA, 25 bp, Homo sapien
aagccatttgcaagcaaaaatgagt

SEQ ID NO: 5765300 - DNA, 25 bp, Homo sapien
ttgtcattgacatctagaactttaa

SEQ ID NO: 5765301 - DNA, 25 bp, Homo sapien
ctagtcctctttgatagtggagttg

SEQ ID NO: 5765302 - DNA, 25 bp, Homo sapien
ttggctctcagaggatatctctgct

SEQ ID NO: 5765303 - DNA, 25 bp, Homo sapien
atctctgctcgccttcctgcgcccg

SEQ ID NO: 5765304 - DNA, 25 bp, Homo sapien
gtatgtaactcgactcacctagatc

SEQ ID NO: 5765305 - DNA, 25 bp, Homo sapien
gagctcgaaggatgtaaacgggttt

SEQ ID NO: 5765306 - DNA, 25 bp, Homo sapien
agcctcttggtggcctgtatgtcgc

SEQ ID NO: 5765307 - DNA, 25 bp, Homo sapien
gccgccgccgccgccgcggtcgccg

SEQ ID NO: 5765308 - DNA, 25 bp, Homo sapien
gtgacggagcctattgtggtgttta

SEQ ID NO: 5765309 - DNA, 25 bp, Homo sapien
gctgtttccagagagctccagggcc

SEQ ID NO: 5765310 - DNA, 25 bp, Homo sapien
gcaagagataggtgctcatctcgtg

SEQ ID NO: 5765311 - DNA, 25 bp, Homo sapien
gctccctgttttctcgatccatgtt

SEQ ID NO: 5765312 - DNA, 25 bp, Homo sapien
agtgcctttttcactgcaccgtatc

SEQ ID NO: 5765313 - DNA, 25 bp, Homo sapien
attttctcccacatcagcatcgctg

SEQ ID NO: 5765314 - DNA, 25 bp, Homo sapien
ggcagcatctggatcttgggctgtg

SEQ ID NO: 5765315 - DNA, 25 bp, Homo sapien
gagataggtgctcatctcgtgtcta

SEQ ID NO: 5765316 - DNA, 25 bp, Homo sapien
ttgagccactggctgcttcaggggc

SEQ ID NO: 5765317 - DNA, 25 bp, Homo sapien
tcctgtgtattcctccaggagaaag

SEQ ID NO: 5765318 - DNA, 25 bp, Homo sapien
gtttcgatgtaaaaatcgaaccatt

SEQ ID NO: 5765319 - DNA, 25 bp, Homo sapien
gcttggctctcagaggatatctctg

SEQ ID NO: 5765320 - DNA, 25 bp, Homo sapien
tggttcattgtcattgatgtcatgg

SEQ ID NO: 5765321 - DNA, 25 bp, Homo sapien
taatgttgtgccatagcagtgtttc

SEQ ID NO: 5765322 - DNA, 25 bp, Homo sapien
gtgtttatctgagcatcttctctta

SEQ ID NO: 5765323 - DNA, 25 bp, Homo sapien
tgctgctttgaactgggtagtcgtt

SEQ ID NO: 5765324 - DNA, 25 bp, Homo sapien
gaacggttcagctcatttttgctgt

SEQ ID NO: 5765325 - DNA, 25 bp, Homo sapien
gacatcagtcagtgtgatgttcacg

SEQ ID NO: 5765326 - DNA, 25 bp, Homo sapien
aggccagtttgctgaagacaggtgg

SEQ ID NO: 5765327 - DNA, 25 bp, Homo sapien
gagagttgggtagggctggcccacc

SEQ ID NO: 5765328 - DNA, 25 bp, Homo sapien
caacgaatgaaatgaaaagggcaca

SEQ ID NO: 5765329 - DNA, 25 bp, Homo sapien
cctgcgacccgcccaggctgctcct

SEQ ID NO: 5765330 - DNA, 25 bp, Homo sapien
ctggtatgtactctgggggaatcgg

SEQ ID NO: 5765331 - DNA, 25 bp, Homo sapien
tttaaactggtatgtactctggggg

SEQ ID NO: 5765332 - DNA, 25 bp, Homo sapien
catagaactcagcaaattctggggc

SEQ ID NO: 5765333 - DNA, 25 bp, Homo sapien
gaaccagtttacctagtaggatcac

SEQ ID NO: 5765334 - DNA, 25 bp, Homo sapien
atatctctgctcgccttcctgcgcc

SEQ ID NO: 5765335 - DNA, 25 bp, Homo sapien
agaagtagcggtaagttctcatgct

SEQ ID NO: 5765336 - DNA, 25 bp, Homo sapien
tttttcttccctgtccagcctcttg

SEQ ID NO: 5765337 - DNA, 25 bp, Homo sapien
atctacatcctccaccacaattcta

SEQ ID NO: 5765338 - DNA, 25 bp, Homo sapien
ccgagttaagattcccgccgtgttg

SEQ ID NO: 5765339 - DNA, 25 bp, Homo sapien
agagcccccgtgctcagtcccgtgg

SEQ ID NO: 5765340 - DNA, 25 bp, Homo sapien
cgtagtgagtgccccactcttggaa

SEQ ID NO: 5765341 - DNA, 25 bp, Homo sapien
aaatcgaaccatttccagaatcaat

SEQ ID NO: 5765342 - DNA, 25 bp, Homo sapien
ttgacagttataatcccttcctggg

SEQ ID NO: 5765343 - DNA, 25 bp, Homo sapien
aagggcacatttatgttgccctgaa

SEQ ID NO: 5765344 - DNA, 25 bp, Homo sapien
tgcaaggtctgaatcaactgatctg

SEQ ID NO: 5765345 - DNA, 25 bp, Homo sapien
tgggtttcctggtcggtgatgacat

SEQ ID NO: 5765346 - DNA, 25 bp, Homo sapien
ccggacagtcactgtcccagtgctg

SEQ ID NO: 5765347 - DNA, 25 bp, Homo sapien
agggacagtggctgtgtaaacctcc

SEQ ID NO: 5765348 - DNA, 25 bp, Homo sapien
gcggctgaaactgcagctcttggga

SEQ ID NO: 5765349 - DNA, 25 bp, Homo sapien
tttaatatatagaggtactcgacta

SEQ ID NO: 5765350 - DNA, 25 bp, Homo sapien
tgctcatctcgtgtctattatagcc

SEQ ID NO: 5765351 - DNA, 25 bp, Homo sapien
ctagatcaggctgtatgccttaatg

SEQ ID NO: 5765352 - DNA, 25 bp, Homo sapien
ggatatatttaagtgatccatctcc

SEQ ID NO: 5765353 - DNA, 25 bp, Homo sapien
accgtctgtgatgctgtactcaatt

SEQ ID NO: 5765354 - DNA, 25 bp, Homo sapien
agcaaattctggggcgttgtcattg

SEQ ID NO: 5765355 - DNA, 25 bp, Homo sapien
tggggtggatgagcgcctccgcgtg

SEQ ID NO: 5765356 - DNA, 25 bp, Homo sapien
cattgacatctagaactttaatata

SEQ ID NO: 5765357 - DNA, 25 bp, Homo sapien
ggtcgccggctctgccgttcttgct

SEQ ID NO: 5765358 - DNA, 25 bp, Homo sapien
atcaggctgtatgccttaatggggg

SEQ ID NO: 5765359 - DNA, 25 bp, Homo sapien
atgaccacaggcaagagataggtgc

SEQ ID NO: 5765360 - DNA, 25 bp, Homo sapien
caaattctggggcgttgtcattgac

SEQ ID NO: 5765361 - DNA, 25 bp, Homo sapien
tgtgcacccgctgcaaagagtcggc

SEQ ID NO: 5765362 - DNA, 25 bp, Homo sapien
gcaaaggggcatcagcccaccccac

SEQ ID NO: 5765363 - DNA, 25 bp, Homo sapien
tcaagtccaagtgcctctggaagcc

SEQ ID NO: 5765364 - DNA, 25 bp, Homo sapien
gcatcgggcccctattcggacttgg

SEQ ID NO: 5765365 - DNA, 25 bp, Homo sapien
ttcttggttaaggaatgaatcaacg

SEQ ID NO: 5765366 - DNA, 25 bp, Homo sapien
ctgtgcgatcccgcagccgctccct

SEQ ID NO: 5765367 - DNA, 25 bp, Homo sapien
aagccaccattccaggcctctttgc

SEQ ID NO: 5765368 - DNA, 25 bp, Homo sapien
aaccaccgcacccctacgctgacca

SEQ ID NO: 5765369 - DNA, 25 bp, Homo sapien
ttcggaggaggagttccagtttctg

SEQ ID NO: 5765370 - DNA, 25 bp, Homo sapien
tgggccgcgcgcgtgccgagaccga

SEQ ID NO: 5765371 - DNA, 25 bp, Homo sapien
gtggatgcgcaggctgtgtgcaccc

SEQ ID NO: 5765372 - DNA, 25 bp, Homo sapien
tggtgcagaggatgaagtgctacgc

SEQ ID NO: 5765373 - DNA, 25 bp, Homo sapien
agacctgggtcttctctggctgaga

SEQ ID NO: 5765374 - DNA, 25 bp, Homo sapien
atcagcgcagagatccagcagcgac

SEQ ID NO: 5765375 - DNA, 25 bp, Homo sapien
gcgatcccgcagccgctccctccgg

SEQ ID NO: 5765376 - DNA, 25 bp, Homo sapien
gcccatgctcttacaggccctgcac

SEQ ID NO: 5765377 - DNA, 25 bp, Homo sapien
cagagcgagcccccgcttcggagga

SEQ ID NO: 5765378 - DNA, 25 bp, Homo sapien
acccgcaagaccaacaacatcttct

SEQ ID NO: 5765379 - DNA, 25 bp, Homo sapien
ccgaagctgctgccttgtctgcaca

SEQ ID NO: 5765380 - DNA, 25 bp, Homo sapien
agaggatgaagtgctacgcctcgga

SEQ ID NO: 5765381 - DNA, 25 bp, Homo sapien
acgaatgaatggctatgcatggacc

SEQ ID NO: 5765382 - DNA, 25 bp, Homo sapien
ccgtcaagcaggcctctgagagtgc

SEQ ID NO: 5765383 - DNA, 25 bp, Homo sapien
ctcagatgccgaaaactcgtgcatg

SEQ ID NO: 5765384 - DNA, 25 bp, Homo sapien
cctgtcggtgtaccggcagattgtg

SEQ ID NO: 5765385 - DNA, 25 bp, Homo sapien
cgactacgaggagatggccagtcgg

SEQ ID NO: 5765386 - DNA, 25 bp, Homo sapien
cggccagctgggccgcgcgcgtgcc

SEQ ID NO: 5765387 - DNA, 25 bp, Homo sapien
ggagcccatggagaccgccgagcca

SEQ ID NO: 5765388 - DNA, 25 bp, Homo sapien
agagatccagcagcgacaggaggag

SEQ ID NO: 5765389 - DNA, 25 bp, Homo sapien
ctcacgtgcgggctcaggagcgcga

SEQ ID NO: 5765390 - DNA, 25 bp, Homo sapien
agggagacctgggtcttctctggct

SEQ ID NO: 5765391 - DNA, 25 bp, Homo sapien
ataccaccccccagcttggcctccc

SEQ ID NO: 5765392 - DNA, 25 bp, Homo sapien
ggaggagccccagagcctgcaagct

SEQ ID NO: 5765393 - DNA, 25 bp, Homo sapien
tgcgggctcaggagcgcgagctgct

SEQ ID NO: 5765394 - DNA, 25 bp, Homo sapien
ccggcccctagcagagctgcgcaac

SEQ ID NO: 5765395 - DNA, 25 bp, Homo sapien
ggaaagatgcagctgtatccaagaa

SEQ ID NO: 5765396 - DNA, 25 bp, Homo sapien
gccccagaaaggccccccatcagcc

SEQ ID NO: 5765397 - DNA, 25 bp, Homo sapien
atggcttcgacgagttcaaggtgcg

SEQ ID NO: 5765398 - DNA, 25 bp, Homo sapien
gatgtggctgctcaataaacacttg

SEQ ID NO: 5765399 - DNA, 25 bp, Homo sapien
ttccaagccgctgtgctgctcgtgc

SEQ ID NO: 5765400 - DNA, 25 bp, Homo sapien
ccgatctccgaggccccagcaggac

SEQ ID NO: 5765401 - DNA, 25 bp, Homo sapien
ctgctggaggctgtggacgcgcggt

SEQ ID NO: 5765402 - DNA, 25 bp, Homo sapien
acagccttccatgccccgaccccca

SEQ ID NO: 5765403 - DNA, 25 bp, Homo sapien
cgagttcaaggtgcgcctgcaggac

SEQ ID NO: 5765404 - DNA, 25 bp, Homo sapien
cgccctgccgtccaccgtgggatcc

SEQ ID NO: 5765405 - DNA, 25 bp, Homo sapien
tgagctgcctcctccagcccatgct

SEQ ID NO: 5765406 - DNA, 25 bp, Homo sapien
taaggaatgaatcaacgaatgaatg

SEQ ID NO: 5765407 - DNA, 25 bp, Homo sapien
agcactcccagggaccctattgacg

SEQ ID NO: 5765408 - DNA, 25 bp, Homo sapien
cgatgctgagcctcacagcgagcct

SEQ ID NO: 5765409 - DNA, 25 bp, Homo sapien
gaggggctgtgcgatcccgcagccg

SEQ ID NO: 5765410 - DNA, 25 bp, Homo sapien
gcccgaagctgctgccttgtctgca

SEQ ID NO: 5765411 - DNA, 25 bp, Homo sapien
cccccaccccaagcctctccactag

SEQ ID NO: 5765412 - DNA, 25 bp, Homo sapien
ccagcgcgactacgaggagatggcc

SEQ ID NO: 5765413 - DNA, 25 bp, Homo sapien
ctggcagatgtggctgctcaataaa

SEQ ID NO: 5765414 - DNA, 25 bp, Homo sapien
gccagcccactcctcgccagcccac

SEQ ID NO: 5765415 - DNA, 25 bp, Homo sapien
caggggaaggcagagcccagactct

SEQ ID NO: 5765416 - DNA, 25 bp, Homo sapien
ccttgtctgcacacgctgtgctcag

SEQ ID NO: 5765417 - DNA, 25 bp, Homo sapien
cccccgatgctgagcctcacagcga

SEQ ID NO: 5765418 - DNA, 25 bp, Homo sapien
cacctccaaggcagtctcaccaccc

SEQ ID NO: 5765419 - DNA, 25 bp, Homo sapien
gctgccagcaatgccaggcggaagc

SEQ ID NO: 5765420 - DNA, 25 bp, Homo sapien
ccctgccgtccaccgtgggatccgc

SEQ ID NO: 5765421 - DNA, 25 bp, Homo sapien
cccctgagctgcctcctccagccca

SEQ ID NO: 5765422 - DNA, 25 bp, Homo sapien
cttggttaaggaatgaatcaacgaa

SEQ ID NO: 5765423 - DNA, 25 bp, Homo sapien
tggaggcctctcaagtccaagtgcc

SEQ ID NO: 5765424 - DNA, 25 bp, Homo sapien
tgcactctcctgtgttctgagtccc

SEQ ID NO: 5765425 - DNA, 25 bp, Homo sapien
gcgcgctggtgcagaggatgaagtg

SEQ ID NO: 5765426 - DNA, 25 bp, Homo sapien
ggacgcgcggtaccagcgcgactac

SEQ ID NO: 5765427 - DNA, 25 bp, Homo sapien
ggcagcgcgctggtgcagaggatga

SEQ ID NO: 5765428 - DNA, 25 bp, Homo sapien
taccagcgcgactacgaggagatgg

SEQ ID NO: 5765429 - DNA, 25 bp, Homo sapien
taagctggggtccatggagcctgca

SEQ ID NO: 5765430 - DNA, 25 bp, Homo sapien
gcacaaggagcctccagcctgccct

SEQ ID NO: 5765431 - DNA, 25 bp, Homo sapien
gggcccctcaaccatcctgccaatg

SEQ ID NO: 5765432 - DNA, 25 bp, Homo sapien
ccagtgccccaggaaggtcatcaag

SEQ ID NO: 5765433 - DNA, 25 bp, Homo sapien
cgaggagatggccagtcggctgggc

SEQ ID NO: 5765434 - DNA, 25 bp, Homo sapien
gtggtccaagccagcactcctgcca

SEQ ID NO: 5765435 - DNA, 25 bp, Homo sapien
acatcagcgcagagatccagcagcg

SEQ ID NO: 5765436 - DNA, 25 bp, Homo sapien
cccctacgctgaccagcatctactg

SEQ ID NO: 5765437 - DNA, 25 bp, Homo sapien
aaagagtcggccgacttctggtgct

SEQ ID NO: 5765438 - DNA, 25 bp, Homo sapien
gaaaggccccccatcagcccagtcc

SEQ ID NO: 5765439 - DNA, 25 bp, Homo sapien
ctcctcgccagtccagtctctgctg

SEQ ID NO: 5765440 - DNA, 25 bp, Homo sapien
tctctgctgagagcacaaggagcct

SEQ ID NO: 5765441 - DNA, 25 bp, Homo sapien
tacagagcgagcccccgcttcggag

SEQ ID NO: 5765442 - DNA, 25 bp, Homo sapien
acgcgttgtggtgatcagcagctcg

SEQ ID NO: 5765443 - DNA, 25 bp, Homo sapien
atgaatcaacgaatgaatggctatg

SEQ ID NO: 5765444 - DNA, 25 bp, Homo sapien
ccaacaacatcttctgctccaaccc

SEQ ID NO: 5765445 - DNA, 25 bp, Homo sapien
gcctttggcgcggttcacgcgcaga

SEQ ID NO: 5765446 - DNA, 25 bp, Homo sapien
aaactaagctggggtccatggagcc

SEQ ID NO: 5765447 - DNA, 25 bp, Homo sapien
agtgccccaggaaggtcatcaagat

SEQ ID NO: 5765448 - DNA, 25 bp, Homo sapien
tggcctccccaccagcccgctgagc

SEQ ID NO: 5765449 - DNA, 25 bp, Homo sapien
ctggggtccatggagcctgcacccg

SEQ ID NO: 5765450 - DNA, 25 bp, Homo sapien
tcggagctccccggagcagcccagg

SEQ ID NO: 5765451 - DNA, 25 bp, Homo sapien
ctctgaaggccgccagcccagcccc

SEQ ID NO: 5765452 - DNA, 25 bp, Homo sapien
ccccaccagcccgctgagcaggctg

SEQ ID NO: 5765453 - DNA, 25 bp, Homo sapien
aggtgctggacatgcacggtttcct

SEQ ID NO: 5765454 - DNA, 25 bp, Homo sapien
tggccagtcggctgggccgcctgga

SEQ ID NO: 5765455 - DNA, 25 bp, Homo sapien
cgagccacagtcctcgccagcccac

SEQ ID NO: 5765456 - DNA, 25 bp, Homo sapien
cctcgccagtccagtctctgctgag

SEQ ID NO: 5765457 - DNA, 25 bp, Homo sapien
ctgccctgtggcacataccaccccc

SEQ ID NO: 5765458 - DNA, 25 bp, Homo sapien
tggagcctgcacccgcccgatctcc

SEQ ID NO: 5765459 - DNA, 25 bp, Homo sapien
caagtgcgacatcagcgcagagatc

SEQ ID NO: 5765460 - DNA, 25 bp, Homo sapien
agcatctactgccgaggatgttcca

SEQ ID NO: 5765461 - DNA, 25 bp, Homo sapien
tctgctgagagcacaaggagcctcc

SEQ ID NO: 5765462 - DNA, 25 bp, Homo sapien
cgctgcaggagcaggatagtgcctt

SEQ ID NO: 5765463 - DNA, 25 bp, Homo sapien
ggaggtgctggacatgcacggtttc

SEQ ID NO: 5765464 - DNA, 25 bp, Homo sapien
agtcccaggcgcccgtcaagcaggc

SEQ ID NO: 5765465 - DNA, 25 bp, Homo sapien
ccccatcagcccagtcccaggcgcc

SEQ ID NO: 5765466 - DNA, 25 bp, Homo sapien
agcagctcggaagactcagatgccg

SEQ ID NO: 5765467 - DNA, 25 bp, Homo sapien
accaggagcgccctgccgtccaccg

SEQ ID NO: 5765468 - DNA, 25 bp, Homo sapien
ccatggcttcccagcttgacatgtc

SEQ ID NO: 5765469 - DNA, 25 bp, Homo sapien
tcccagtggctcaacaacttttttg

SEQ ID NO: 5765470 - DNA, 25 bp, Homo sapien
aagccgctgtgctgctcgtgcgcgc

SEQ ID NO: 5765471 - DNA, 25 bp, Homo sapien
gccgagaccgaggagctgatccgcg

SEQ ID NO: 5765472 - DNA, 25 bp, Homo sapien
acagcgagcctcctgatcaccagga

SEQ ID NO: 5765473 - DNA, 25 bp, Homo sapien
caacacccctgcccggcccctgagc

SEQ ID NO: 5765474 - DNA, 25 bp, Homo sapien
ccagcatctactgccgaggatgttc

SEQ ID NO: 5765475 - DNA, 25 bp, Homo sapien
acctggatggaccgcctagccccag

SEQ ID NO: 5765476 - DNA, 25 bp, Homo sapien
tgtgctcaggatgcctggaggcgtc

SEQ ID NO: 5765477 - DNA, 25 bp, Homo sapien
tggtgctttgagtgcgagcagctcc

SEQ ID NO: 5765478 - DNA, 25 bp, Homo sapien
aagccagcccagaggctgccagcac

SEQ ID NO: 5765479 - DNA, 25 bp, Homo sapien
cagagtagcactcattaattcttgg

SEQ ID NO: 5765480 - DNA, 25 bp, Homo sapien
gcttgcaccctcaattgcatcgggc

SEQ ID NO: 5765481 - DNA, 25 bp, Homo sapien
ccaggcgccctggcccctaggtgca

SEQ ID NO: 5765482 - DNA, 25 bp, Homo sapien
aggatgttccaagccgctgtgctgc

SEQ ID NO: 5765483 - DNA, 25 bp, Homo sapien
cgcggttcacgcgcagatgcacgcg

SEQ ID NO: 5765484 - DNA, 25 bp, Homo sapien
ccatgcctccccccgagaccccctc

SEQ ID NO: 5765485 - DNA, 25 bp, Homo sapien
ttccccctggggactctgtcagagg

SEQ ID NO: 5765486 - DNA, 25 bp, Homo sapien
gccaagtgcttcgaggcacaccagt

SEQ ID NO: 5765487 - DNA, 25 bp, Homo sapien
tggcccctaggtgcagacacacccg

SEQ ID NO: 5765488 - DNA, 25 bp, Homo sapien
caggcggaagccaagtgcccgaagc

SEQ ID NO: 5765489 - DNA, 25 bp, Homo sapien
ggactctgtcagaggctccatggag

SEQ ID NO: 5765490 - DNA, 25 bp, Homo sapien
gctttgagtgcgagcagctcctctg

SEQ ID NO: 5765491 - DNA, 25 bp, Homo sapien
actctgtcagaggctccatggaggc

SEQ ID NO: 5765492 - DNA, 25 bp, Homo sapien
gggcagggagacctgggtcttctct

SEQ ID NO: 5765493 - DNA, 25 bp, Homo sapien
gcagaggaacgcgttgtggtgatca

SEQ ID NO: 5765494 - DNA, 25 bp, Homo sapien
caagcacgaggcccggcccctagca

SEQ ID NO: 5765495 - DNA, 25 bp, Homo sapien
gccagctgggccgcgcgcgtgccga

SEQ ID NO: 5765496 - DNA, 25 bp, Homo sapien
gcagagctgcgcaaccagtcggtgc

SEQ ID NO: 5765497 - DNA, 25 bp, Homo sapien
caccccacctggatggaccgcctag

SEQ ID NO: 5765498 - DNA, 25 bp, Homo sapien
cacgaggcccggcccctagcagagc

SEQ ID NO: 5765499 - DNA, 25 bp, Homo sapien
gccacccccgatgctgagcctcaca

SEQ ID NO: 5765500 - DNA, 25 bp, Homo sapien
tggtctccccatgtggtccaagcca

SEQ ID NO: 5765501 - DNA, 25 bp, Homo sapien
tatcccagtggctcaacaacttttt

SEQ ID NO: 5765502 - DNA, 25 bp, Homo sapien
gatccgctacctgttgtacagagca

SEQ ID NO: 5765503 - DNA, 25 bp, Homo sapien
agcccatgagcacagggactggcta

SEQ ID NO: 5765504 - DNA, 25 bp, Homo sapien
gccccagcaggaccccgcccggccc

SEQ ID NO: 5765505 - DNA, 25 bp, Homo sapien
gtgctacgcctcggaccaggaggtg

SEQ ID NO: 5765506 - DNA, 25 bp, Homo sapien
aggcgtcgggcatgcagtgccccat

SEQ ID NO: 5765507 - DNA, 25 bp, Homo sapien
ctccaattacattcccaccaccctg

SEQ ID NO: 5765508 - DNA, 25 bp, Homo sapien
ccaagatctaaaccgagaatcgaaa

SEQ ID NO: 5765509 - DNA, 25 bp, Homo sapien
gagcacaaggagcctccagcctgcc

SEQ ID NO: 5765510 - DNA, 25 bp, Homo sapien
gtttctgcgctgccagcaatgccag

SEQ ID NO: 5765511 - DNA, 25 bp, Homo sapien
cattaattcttggttaaggaatgaa

SEQ ID NO: 5765512 - DNA, 25 bp, Homo sapien
tgcttcgaggcacaccagtggttcc

SEQ ID NO: 5765513 - DNA, 25 bp, Homo sapien
acatgtcttccgtggtgggggcagg

SEQ ID NO: 5765514 - DNA, 25 bp, Homo sapien
gcgcagatgcacgcggctgtcggcc

SEQ ID NO: 5765515 - DNA, 25 bp, Homo sapien
agccgctccctccggggctcctccc

SEQ ID NO: 5765516 - DNA, 25 bp, Homo sapien
ggcgcctgtcggtgtaccggcagat

SEQ ID NO: 5765517 - DNA, 25 bp, Homo sapien
tgatccgcgagcgcgtgcgccaggt

SEQ ID NO: 5765518 - DNA, 25 bp, Homo sapien
gcgccctggcccctaggtgcagaca

SEQ ID NO: 5765519 - DNA, 25 bp, Homo sapien
tgtgctgcagcgcatccgcacgggc

SEQ ID NO: 5765520 - DNA, 25 bp, Homo sapien
agctgcgcaaccagtcggtgcgtga

SEQ ID NO: 5765521 - DNA, 25 bp, Homo sapien
ccctggggactctgtcagaggctcc

SEQ ID NO: 5765522 - DNA, 25 bp, Homo sapien
gaatgaatcaacgaatgaatggcta

SEQ ID NO: 5765523 - DNA, 25 bp, Homo sapien
gacatgcacggtttcctgcgccagg

SEQ ID NO: 5765524 - DNA, 25 bp, Homo sapien
cttggcctccccaccagcccgctga

SEQ ID NO: 5765525 - DNA, 25 bp, Homo sapien
gcgccaagtgcttcgaggcacacca

SEQ ID NO: 5765526 - DNA, 25 bp, Homo sapien
cttcgacgagttcaaggtgcgcctg

SEQ ID NO: 5765527 - DNA, 25 bp, Homo sapien
cataggaagtgaggtcttcctgccc

SEQ ID NO: 5765528 - DNA, 25 bp, Homo sapien
gaaagccagcccagaggctgccagc

SEQ ID NO: 5765529 - DNA, 25 bp, Homo sapien
tttgagtgcgagcagctcctctgcg

SEQ ID NO: 5765530 - DNA, 25 bp, Homo sapien
aggctgccagcactcccagggaccc

SEQ ID NO: 5765531 - DNA, 25 bp, Homo sapien
gctgagcaggctgccacccccgatg

SEQ ID NO: 5765532 - DNA, 25 bp, Homo sapien
ctccactaggcctctgccaggatct

SEQ ID NO: 5765533 - DNA, 25 bp, Homo sapien
ctggatggaccgcctagccccagga

SEQ ID NO: 5765534 - DNA, 25 bp, Homo sapien
gcgctctgccgcctgcgccaggagg

SEQ ID NO: 5765535 - DNA, 25 bp, Homo sapien
acgcgcagatgcacgcggctgtcgg

SEQ ID NO: 5765536 - DNA, 25 bp, Homo sapien
ctgcacacgctgtgctcaggatgcc

SEQ ID NO: 5765537 - DNA, 25 bp, Homo sapien
gatcagcagctcggaagactcagat

SEQ ID NO: 5765538 - DNA, 25 bp, Homo sapien
gcctctccaattacattcccaccac

SEQ ID NO: 5765539 - DNA, 25 bp, Homo sapien
gccaggaggagccccagagcctgca

SEQ ID NO: 5765540 - DNA, 25 bp, Homo sapien
taggaagtgaggtcttcctgcccaa

SEQ ID NO: 5765541 - DNA, 25 bp, Homo sapien
aggagctggacgccatgacgcaggc

SEQ ID NO: 5765542 - DNA, 25 bp, Homo sapien
aagcctctccaattacattcccacc

SEQ ID NO: 5765543 - DNA, 25 bp, Homo sapien
gtcggctgggccgcctggatgctgt

SEQ ID NO: 5765544 - DNA, 25 bp, Homo sapien
atccaagaaagccagcccagaggct

SEQ ID NO: 5765545 - DNA, 25 bp, Homo sapien
tacgaggagatggccagtcggctgg

SEQ ID NO: 5765546 - DNA, 25 bp, Homo sapien
gctcggagctccccggagcagccca

SEQ ID NO: 5765547 - DNA, 25 bp, Homo sapien
tgccaggcgccctggcccctaggtg

SEQ ID NO: 5765548 - DNA, 25 bp, Homo sapien
gcgccaggtggtagctcacgtgcgg

SEQ ID NO: 5765549 - DNA, 25 bp, Homo sapien
ggccaatagcacagccttccatgcc

SEQ ID NO: 5765550 - DNA, 25 bp, Homo sapien
caaggttggctcggagctccccgga

SEQ ID NO: 5765551 - DNA, 25 bp, Homo sapien
agcctccagcctgccctgtggcaca

SEQ ID NO: 5765552 - DNA, 25 bp, Homo sapien
acgcggctgtcggccagctgggccg

SEQ ID NO: 5765553 - DNA, 25 bp, Homo sapien
caacatcttctgctccaaccccaac

SEQ ID NO: 5765554 - DNA, 25 bp, Homo sapien
catttatcccagtggctcaacaact

SEQ ID NO: 5765555 - DNA, 25 bp, Homo sapien
gatcaccaggagcgccctgccgtcc

SEQ ID NO: 5765556 - DNA, 25 bp, Homo sapien
gtgctgctcgtgcgcgctccttgac

SEQ ID NO: 5765557 - DNA, 25 bp, Homo sapien
gaggaagtgcagccagacccagtgc

SEQ ID NO: 5765558 - DNA, 25 bp, Homo sapien
gcgctgccagcaatgccaggcggaa

SEQ ID NO: 5765559 - DNA, 25 bp, Homo sapien
aaggccccccatcagcccagtccca

SEQ ID NO: 5765560 - DNA, 25 bp, Homo sapien
gggcatcagcccaccccaccggata

SEQ ID NO: 5765561 - DNA, 25 bp, Homo sapien
gagccccagagcctgcaagctgccg

SEQ ID NO: 5765562 - DNA, 25 bp, Homo sapien
agtcggtgcgtgagttcctggacgg

SEQ ID NO: 5765563 - DNA, 25 bp, Homo sapien
gcctgcaagctgccgtgcgcaccga

SEQ ID NO: 5765564 - DNA, 25 bp, Homo sapien
gcaagaccaacaacatcttctgctc

SEQ ID NO: 5765565 - DNA, 25 bp, Homo sapien
cagctcctctgcgccaagtgcttcg

SEQ ID NO: 5765566 - DNA, 25 bp, Homo sapien
tcccaccaccctgtgccccagaaag

SEQ ID NO: 5765567 - DNA, 25 bp, Homo sapien
tcaccaggagcgccctgccgtccac

SEQ ID NO: 5765568 - DNA, 25 bp, Homo sapien
ttacaggccctgcacagagtagcac

SEQ ID NO: 5765569 - DNA, 25 bp, Homo sapien
ttttcgagagtctgcagcggcgcct

SEQ ID NO: 5765570 - DNA, 25 bp, Homo sapien
agaggaacgcgttgtggtgatcagc

SEQ ID NO: 5765571 - DNA, 25 bp, Homo sapien
ggatacgaggggctgtgcgatcccg

SEQ ID NO: 5765572 - DNA, 25 bp, Homo sapien
agcgcatccgcacgggcagcgcgct

SEQ ID NO: 5765573 - DNA, 25 bp, Homo sapien
cagagcccagactcttggagcagtt

SEQ ID NO: 5765574 - DNA, 25 bp, Homo sapien
gcttcggaggaggagttccagtttc

SEQ ID NO: 5765575 - DNA, 25 bp, Homo sapien
attgacgttgacctggatgtctcca

SEQ ID NO: 5765576 - DNA, 25 bp, Homo sapien
tagcacagccttccatgccccgacc

SEQ ID NO: 5765577 - DNA, 25 bp, Homo sapien
ccgtcataggaagtgaggtcttcct

SEQ ID NO: 5765578 - DNA, 25 bp, Homo sapien
gccctccccttctcctccatggctt

SEQ ID NO: 5765579 - DNA, 25 bp, Homo sapien
aatacaacgacagcccagaagagga

SEQ ID NO: 5765580 - DNA, 25 bp, Homo sapien
ggcagatgtggctgctcaataaaca

SEQ ID NO: 5765581 - DNA, 25 bp, Homo sapien
cggacttggtctccccatgtggtcc

SEQ ID NO: 5765582 - DNA, 25 bp, Homo sapien
agcacagggactggctatcccaaga

SEQ ID NO: 5765583 - DNA, 25 bp, Homo sapien
gcaggctgtgtgcacccgctgcaaa

SEQ ID NO: 5765584 - DNA, 25 bp, Homo sapien
gaccccctctgaaggccgccagccc

SEQ ID NO: 5765585 - DNA, 25 bp, Homo sapien
gtgcagaggatgaagtgctacgcct

SEQ ID NO: 5765586 - DNA, 25 bp, Homo sapien
cactccaagatctaaaccgagaatc

SEQ ID NO: 5765587 - DNA, 25 bp, Homo sapien
cccagccccagccctacagagcgag

SEQ ID NO: 5765588 - DNA, 25 bp, Homo sapien
caccagtggttcctcaagcacgagg

SEQ ID NO: 5765589 - DNA, 25 bp, Homo sapien
ccccctctgaaggccgccagcccag

SEQ ID NO: 5765590 - DNA, 25 bp, Homo sapien
tagtgcctttggcgcggttcacgcg

SEQ ID NO: 5765591 - DNA, 25 bp, Homo sapien
tgcgagcagctcctctgcgccaagt

SEQ ID NO: 5765592 - DNA, 25 bp, Homo sapien
cccaagaaagaaacttctgtcaccc

SEQ ID NO: 5765593 - DNA, 25 bp, Homo sapien
ggagcgcgagctgctggaggctgtg

SEQ ID NO: 5765594 - DNA, 25 bp, Homo sapien
gttggctcggagctccccggagcag

SEQ ID NO: 5765595 - DNA, 25 bp, Homo sapien
ttctgagtccctggccaatagcaca

SEQ ID NO: 5765596 - DNA, 25 bp, Homo sapien
tctcctccatggcttcccagcttga

SEQ ID NO: 5765597 - DNA, 25 bp, Homo sapien
gagatggccagtcggctgggccgcc

SEQ ID NO: 5765598 - DNA, 25 bp, Homo sapien
gcgcaccgatggcttcgacgagttc

SEQ ID NO: 5765599 - DNA, 25 bp, Homo sapien
gcagggagacctgggtcttctctgg

SEQ ID NO: 5765600 - DNA, 25 bp, Homo sapien
ggggaaggctaaggcatggctgaga

SEQ ID NO: 5765601 - DNA, 25 bp, Homo sapien
ctgccgaggatgttccaagccgctg

SEQ ID NO: 5765602 - DNA, 25 bp, Homo sapien
ccaaccaccgcacccctacgctgac

SEQ ID NO: 5765603 - DNA, 25 bp, Homo sapien
caagcaggcctctgagagtgctacc

SEQ ID NO: 5765604 - DNA, 25 bp, Homo sapien
atgcctggaggcgtcgggcatgcag

SEQ ID NO: 5765605 - DNA, 25 bp, Homo sapien
tcttggagcagttgttccccctggg

SEQ ID NO: 5765606 - DNA, 25 bp, Homo sapien
gagcacagagagccatccgccttcg

SEQ ID NO: 5765607 - DNA, 25 bp, Homo sapien
ggctatcccaagacctggcagatgt

SEQ ID NO: 5765608 - DNA, 25 bp, Homo sapien
gcagacacacccgccctggataacg

SEQ ID NO: 5765609 - DNA, 25 bp, Homo sapien
tccctccggggctcctcccatttat

SEQ ID NO: 5765610 - DNA, 25 bp, Homo sapien
ggagccccgtcataggaagtgaggt

SEQ ID NO: 5765611 - DNA, 25 bp, Homo sapien
cacccccgatgctgagcctcacagc

SEQ ID NO: 5765612 - DNA, 25 bp, Homo sapien
caagaaagaaacttctgtcaccctt

SEQ ID NO: 5765613 - DNA, 25 bp, Homo sapien
tcccgcagccgctccctccggggct

SEQ ID NO: 5765614 - DNA, 25 bp, Homo sapien
ggcttcccagcttgacatgtcttcc

SEQ ID NO: 5765615 - DNA, 25 bp, Homo sapien
tacagagcacagagagccatccgcc

SEQ ID NO: 5765616 - DNA, 25 bp, Homo sapien
gcccagaggctgccagcactcccag

SEQ ID NO: 5765617 - DNA, 25 bp, Homo sapien
ggcctctcaagtccaagtgcctctg

SEQ ID NO: 5765618 - DNA, 25 bp, Homo sapien
agcacctccaaggcagtctcaccac

SEQ ID NO: 5765619 - DNA, 25 bp, Homo sapien
tgcagtgccccatctgccaggcgcc

SEQ ID NO: 5765620 - DNA, 25 bp, Homo sapien
ctgcacccgcccgatctccgaggcc

SEQ ID NO: 5765621 - DNA, 25 bp, Homo sapien
ggccgacttctggtgctttgagtgc

SEQ ID NO: 5765622 - DNA, 25 bp, Homo sapien
gacaggaggagctggacgccatgac

SEQ ID NO: 5765623 - DNA, 25 bp, Homo sapien
gctgccgtgcgcaccgatggcttcg

SEQ ID NO: 5765624 - DNA, 25 bp, Homo sapien
tctgagagtgctacccttctcttgt

SEQ ID NO: 5765625 - DNA, 25 bp, Homo sapien
ccactaggcctctgccaggatctaa

SEQ ID NO: 5765626 - DNA, 25 bp, Homo sapien
tgctgagagcacaaggagcctccag

SEQ ID NO: 5765627 - DNA, 25 bp, Homo sapien
catcctgccaatgcccaggaacatc

SEQ ID NO: 5765628 - DNA, 25 bp, Homo sapien
ccccacctggatggaccgcctagcc

SEQ ID NO: 5765629 - DNA, 25 bp, Homo sapien
aaaggggcatcagcccaccccaccg

SEQ ID NO: 5765630 - DNA, 25 bp, Homo sapien
accgcacccctacgctgaccagcat

SEQ ID NO: 5765631 - DNA, 25 bp, Homo sapien
agtcctcgccagcccactcctcgcc

SEQ ID NO: 5765632 - DNA, 25 bp, Homo sapien
tcaattgcatcgggcccctattcgg

SEQ ID NO: 5765633 - DNA, 25 bp, Homo sapien
ccccatgtggtccaagccagcactc

SEQ ID NO: 5765634 - DNA, 25 bp, Homo sapien
ccagcttgacatgtcttccgtggtg

SEQ ID NO: 5765635 - DNA, 25 bp, Homo sapien
gcccgatctccgaggccccagcagg

SEQ ID NO: 5765636 - DNA, 25 bp, Homo sapien
gtgcctctggaagcctctccaatta

SEQ ID NO: 5765637 - DNA, 25 bp, Homo sapien
gacctcagctcttgcatcacccagg

SEQ ID NO: 5765638 - DNA, 25 bp, Homo sapien
agaaacttctgtcacccttgcactc

SEQ ID NO: 5765639 - DNA, 25 bp, Homo sapien
gcccggcccctagcagagctgcgca

SEQ ID NO: 5765640 - DNA, 25 bp, Homo sapien
aagaaagccagcccagaggctgcca

SEQ ID NO: 5765641 - DNA, 25 bp, Homo sapien
agcaggcctctgagagtgctaccct

SEQ ID NO: 5765642 - DNA, 25 bp, Homo sapien
gcctggaggcgtcgggcatgcagtg

SEQ ID NO: 5765643 - DNA, 25 bp, Homo sapien
tggacatgcacggtttcctgcgcca

SEQ ID NO: 5765644 - DNA, 25 bp, Homo sapien
tctcaagtccaagtgcctctggaag

SEQ ID NO: 5765645 - DNA, 25 bp, Homo sapien
cggcacccgcaagaccaacaacatc

SEQ ID NO: 5765646 - DNA, 25 bp, Homo sapien
cacagggactggctatcccaagacc

SEQ ID NO: 5765647 - DNA, 25 bp, Homo sapien
aggcagaggaacgcgttgtggtgat

SEQ ID NO: 5765648 - DNA, 25 bp, Homo sapien
ccatgacgcaggcgctgcaggagca

SEQ ID NO: 5765649 - DNA, 25 bp, Homo sapien
catggctgagattcaagccaccatt

SEQ ID NO: 5765650 - DNA, 25 bp, Homo sapien
agcagcgacaggaggagctggacgc

SEQ ID NO: 5765651 - DNA, 25 bp, Homo sapien
caggcctctttgcccaagaaagaaa

SEQ ID NO: 5765652 - DNA, 25 bp, Homo sapien
cagtcggctgggccgcctggatgct

SEQ ID NO: 5765653 - DNA, 25 bp, Homo sapien
accaccccccagcttggcctcccca

SEQ ID NO: 5765654 - DNA, 25 bp, Homo sapien
attccaggcctctttgcccaagaaa

SEQ ID NO: 5765655 - DNA, 25 bp, Homo sapien
gtcacccttgcactctcctgtgttc

SEQ ID NO: 5765656 - DNA, 25 bp, Homo sapien
cgagcctcctgatcaccaggagcgc

SEQ ID NO: 5765657 - DNA, 25 bp, Homo sapien
acgtggccagtggcgccggggaggc

SEQ ID NO: 5765658 - DNA, 25 bp, Homo sapien
gtccctggccaatagcacagccttc

SEQ ID NO: 5765659 - DNA, 25 bp, Homo sapien
gacgccatgacgcaggcgctgcagg

SEQ ID NO: 5765660 - DNA, 25 bp, Homo sapien
gcgcgcgtgccgagaccgaggagct

SEQ ID NO: 5765661 - DNA, 25 bp, Homo sapien
aggctgtgtgcacccgctgcaaaga

SEQ ID NO: 5765662 - DNA, 25 bp, Homo sapien
cctcctgatcaccaggagcgccctg

SEQ ID NO: 5765663 - DNA, 25 bp, Homo sapien
ggcctctgccaggatctaagcccat

SEQ ID NO: 5765664 - DNA, 25 bp, Homo sapien
tggataacgtctttttcgagagtct

SEQ ID NO: 5765665 - DNA, 25 bp, Homo sapien
tcgacgagttcaaggtgcgcctgca

SEQ ID NO: 5765666 - DNA, 25 bp, Homo sapien
ctggatgtctccaatacaacgacag

SEQ ID NO: 5765667 - DNA, 25 bp, Homo sapien
tctttgcccaagaaagaaacttctg

SEQ ID NO: 5765668 - DNA, 25 bp, Homo sapien
cccatttatcccagtggctcaacaa

SEQ ID NO: 5765669 - DNA, 25 bp, Homo sapien
taacgtctttttcgagagtctgcag

SEQ ID NO: 5765670 - DNA, 25 bp, Homo sapien
cctcacagcgagcctcctgatcacc

SEQ ID NO: 5765671 - DNA, 25 bp, Homo sapien
tcgtgcatggagcccatggagaccg

SEQ ID NO: 5765672 - DNA, 25 bp, Homo sapien
caggaggagctggacgccatgacgc

SEQ ID NO: 5765673 - DNA, 25 bp, Homo sapien
cgcgagctgctggaggctgtggacg

SEQ ID NO: 5765674 - DNA, 25 bp, Homo sapien
atggctatgcatggacctctgggca

SEQ ID NO: 5765675 - DNA, 25 bp, Homo sapien
ccagcccagccccagccccagccct

SEQ ID NO: 5765676 - DNA, 25 bp, Homo sapien
gtgcgccaggtggtagctcacgtgc

SEQ ID NO: 5765677 - DNA, 25 bp, Homo sapien
ggcttcgacgagttcaaggtgcgcc

SEQ ID NO: 5765678 - DNA, 25 bp, Homo sapien
gcacccgcaagaccaacaacatctt

SEQ ID NO: 5765679 - DNA, 25 bp, Homo sapien
ctacctgttgtacagagcacagaga

SEQ ID NO: 5765680 - DNA, 25 bp, Homo sapien
cacccctacgctgaccagcatctac

SEQ ID NO: 5765681 - DNA, 25 bp, Homo sapien
agcctcctgatcaccaggagcgccc

SEQ ID NO: 5765682 - DNA, 25 bp, Homo sapien
agtctcaccaccccacctggatgga

SEQ ID NO: 5765683 - DNA, 25 bp, Homo sapien
ccaggaacatcctgcccagctgcaa

SEQ ID NO: 5765684 - DNA, 25 bp, Homo sapien
gcgcaaccagtcggtgcgtgagttc

SEQ ID NO: 5765685 - DNA, 25 bp, Homo sapien
ctgtggacgcgcggtaccagcgcga

SEQ ID NO: 5765686 - DNA, 25 bp, Homo sapien
agcaaccacgtggccagtggcgccg

SEQ ID NO: 5765687 - DNA, 25 bp, Homo sapien
ctgccaatgcccaggaacatcctgc

SEQ ID NO: 5765688 - DNA, 25 bp, Homo sapien
cacgcactccaagatctaaaccgag

SEQ ID NO: 5765689 - DNA, 25 bp, Homo sapien
ctgaaggccgccagcccagccccag

SEQ ID NO: 5765690 - DNA, 25 bp, Homo sapien
cgagaccgaggagctgatccgcgag

SEQ ID NO: 5765691 - DNA, 25 bp, Homo sapien
gtgctggacatgcacggtttcctgc

SEQ ID NO: 5765692 - DNA, 25 bp, Homo sapien
agaggctgccagcactcccagggac

SEQ ID NO: 5765693 - DNA, 25 bp, Homo sapien
ccgacccccaccccaagcctctcca

SEQ ID NO: 5765694 - DNA, 25 bp, Homo sapien
ttgccctccccttctcctccatggc

SEQ ID NO: 5765695 - DNA, 25 bp, Homo sapien
ttctcttgtaaccttgcagccaaca

SEQ ID NO: 5765696 - DNA, 25 bp, Homo sapien
acacccctgcccggcccctgagctg

SEQ ID NO: 5765697 - DNA, 25 bp, Homo sapien
agtgcttcgaggcacaccagtggtt

SEQ ID NO: 5765698 - DNA, 25 bp, Homo sapien
gcccaccccaccggatacgaggggc

SEQ ID NO: 5765699 - DNA, 25 bp, Homo sapien
tggttaaggaatgaatcaacgaatg

SEQ ID NO: 5765700 - DNA, 25 bp, Homo sapien
ccagactcttggagcagttgttccc

SEQ ID NO: 5765701 - DNA, 25 bp, Homo sapien
ccagcacctccaaggcagtctcacc

SEQ ID NO: 5765702 - DNA, 25 bp, Homo sapien
tggttcctcaagcacgaggcccggc

SEQ ID NO: 5765703 - DNA, 25 bp, Homo sapien
cggaagccaagtgcccgaagctgct

SEQ ID NO: 5765704 - DNA, 25 bp, Homo sapien
cctgtgttctgagtccctggccaat

SEQ ID NO: 5765705 - DNA, 25 bp, Homo sapien
cccgctgcaaagagtcggccgactt

SEQ ID NO: 5765706 - DNA, 25 bp, Homo sapien
ttcaaggtgcgcctgcaggacctca

SEQ ID NO: 5765707 - DNA, 25 bp, Homo sapien
aggagttccagtttctgcgctgcca

SEQ ID NO: 5765708 - DNA, 25 bp, Homo sapien
cgcctgtcggtgtaccggcagattg

SEQ ID NO: 5765709 - DNA, 25 bp, Homo sapien
agccccgtcataggaagtgaggtct

SEQ ID NO: 5765710 - DNA, 25 bp, Homo sapien
cagattgtggatgcgcaggctgtgt

SEQ ID NO: 5765711 - DNA, 25 bp, Homo sapien
ccatccgccttcgccatgccctccg

SEQ ID NO: 5765712 - DNA, 25 bp, Homo sapien
gacggcacccgcaagaccaacaaca

SEQ ID NO: 5765713 - DNA, 25 bp, Homo sapien
ttgcatcgggcccctattcggactt

SEQ ID NO: 5765714 - DNA, 25 bp, Homo sapien
gagcctgcaagctgccgtgcgcacc

SEQ ID NO: 5765715 - DNA, 25 bp, Homo sapien
ggtaccagcgcgactacgaggagat

SEQ ID NO: 5765716 - DNA, 25 bp, Homo sapien
gagaatcgaaactaagctggggtcc

SEQ ID NO: 5765717 - DNA, 25 bp, Homo sapien
atcagcccaccccaccggatacgag

SEQ ID NO: 5765718 - DNA, 25 bp, Homo sapien
gatggccagtcggctgggccgcctg

SEQ ID NO: 5765719 - DNA, 25 bp, Homo sapien
ggggtccatggagcctgcacccgcc

SEQ ID NO: 5765720 - DNA, 25 bp, Homo sapien
gccctggcccctaggtgcagacaca

SEQ ID NO: 5765721 - DNA, 25 bp, Homo sapien
gctcctctgcgccaagtgcttcgag

SEQ ID NO: 5765722 - DNA, 25 bp, Homo sapien
atcttctgctccaaccccaaccacc

SEQ ID NO: 5765723 - DNA, 25 bp, Homo sapien
cgagctgctggaggctgtggacgcg

SEQ ID NO: 5765724 - DNA, 25 bp, Homo sapien
ctgagagcacaaggagcctccagcc

SEQ ID NO: 5765725 - DNA, 25 bp, Homo sapien
ggggaaggcagagcccagactcttg

SEQ ID NO: 5765726 - DNA, 25 bp, Homo sapien
gagcccccgcttcggaggaggagtt

SEQ ID NO: 5765727 - DNA, 25 bp, Homo sapien
tctaagcccatgagcacagggactg

SEQ ID NO: 5765728 - DNA, 25 bp, Homo sapien
cgatggcttcgacgagttcaaggtg

SEQ ID NO: 5765729 - DNA, 25 bp, Homo sapien
gctccctccggggctcctcccattt

SEQ ID NO: 5765730 - DNA, 25 bp, Homo sapien
gttccagtttctgcgctgccagcaa

SEQ ID NO: 5765731 - DNA, 25 bp, Homo sapien
gatctccgaggccccagcaggaccc

SEQ ID NO: 5765732 - DNA, 25 bp, Homo sapien
cctctgagagtgctacccttctctt

SEQ ID NO: 5765733 - DNA, 25 bp, Homo sapien
ccctggccaatagcacagccttcca

SEQ ID NO: 5765734 - DNA, 25 bp, Homo sapien
gggaaggaggcaaggttggctcgga

SEQ ID NO: 5765735 - DNA, 25 bp, Homo sapien
ctatgcatggacctctgggcaggga

SEQ ID NO: 5765736 - DNA, 25 bp, Homo sapien
agaggctccatggaggcctctcaag

SEQ ID NO: 5765737 - DNA, 25 bp, Homo sapien
cccatctgccaggcgccctggcccc

SEQ ID NO: 5765738 - DNA, 25 bp, Homo sapien
cgccagcccagccccagccccagcc

SEQ ID NO: 5765739 - DNA, 25 bp, Homo sapien
aagaccaacaacatcttctgctcca

SEQ ID NO: 5765740 - DNA, 25 bp, Homo sapien
gatgaagtgctacgcctcggaccag

SEQ ID NO: 5765741 - DNA, 25 bp, Homo sapien
ctcgtgcgcgctccttgacagcagc

SEQ ID NO: 5765742 - DNA, 25 bp, Homo sapien
gcccctaggtgcagacacacccgcc

SEQ ID NO: 5765743 - DNA, 25 bp, Homo sapien
gctccatggaggcctctcaagtcca

SEQ ID NO: 5765744 - DNA, 25 bp, Homo sapien
cgctgcaaagagtcggccgacttct

SEQ ID NO: 5765745 - DNA, 25 bp, Homo sapien
gccgtccaccgtgggatccgctacc

SEQ ID NO: 5765746 - DNA, 25 bp, Homo sapien
agagccatccgccttcgccatgccc

SEQ ID NO: 5765747 - DNA, 25 bp, Homo sapien
tgctcaggatgcctggaggcgtcgg

SEQ ID NO: 5765748 - DNA, 25 bp, Homo sapien
gtccagtctctgctgagagcacaag

SEQ ID NO: 5765749 - DNA, 25 bp, Homo sapien
ccccgagaccccctctgaaggccgc

SEQ ID NO: 5765750 - DNA, 25 bp, Homo sapien
tcagcttctcttcacgcactccaag

SEQ ID NO: 5765751 - DNA, 25 bp, Homo sapien
cctccagcccatgctcttacaggcc

SEQ ID NO: 5765752 - DNA, 25 bp, Homo sapien
aggacctcagctcttgcatcaccca

SEQ ID NO: 5765753 - DNA, 25 bp, Homo sapien
cagtgccccatctgccaggcgccct

SEQ ID NO: 5765754 - DNA, 25 bp, Homo sapien
ctccatggcttcccagcttgacatg

SEQ ID NO: 5765755 - DNA, 25 bp, Homo sapien
ccgtgcgcaccgatggcttcgacga

SEQ ID NO: 5765756 - DNA, 25 bp, Homo sapien
cagcgcagagatccagcagcgacag

SEQ ID NO: 5765757 - DNA, 25 bp, Homo sapien
ttcggacttggtctccccatgtggt

SEQ ID NO: 5765758 - DNA, 25 bp, Homo sapien
ttcgagagtctgcagcggcgcctgt

SEQ ID NO: 5765759 - DNA, 25 bp, Homo sapien
gccgagccacagtcctcgccagccc

SEQ ID NO: 5765760 - DNA, 25 bp, Homo sapien
cagcggcgcctgtcggtgtaccggc

SEQ ID NO: 5765761 - DNA, 25 bp, Homo sapien
ccaccgcacccctacgctgaccagc

SEQ ID NO: 5765762 - DNA, 25 bp, Homo sapien
tggacgccatgacgcaggcgctgca

SEQ ID NO: 5765763 - DNA, 25 bp, Homo sapien
tgctcgtgcgcgctccttgacagca

SEQ ID NO: 5765764 - DNA, 25 bp, Homo sapien
taccggcagattgtggatgcgcagg

SEQ ID NO: 5765765 - DNA, 25 bp, Homo sapien
ccagcaatgccaggcggaagccaag

SEQ ID NO: 5765766 - DNA, 25 bp, Homo sapien
tgagcacagggactggctatcccaa

SEQ ID NO: 5765767 - DNA, 25 bp, Homo sapien
aagtgaggtcttcctgcccaacagc

SEQ ID NO: 5765768 - DNA, 25 bp, Homo sapien
ctgcccggcccctgagctgcctcct

SEQ ID NO: 5765769 - DNA, 25 bp, Homo sapien
gcgccaggaggagccccagagcctg

SEQ ID NO: 5765770 - DNA, 25 bp, Homo sapien
gattgtggatgcgcaggctgtgtgc

SEQ ID NO: 5765771 - DNA, 25 bp, Homo sapien
gtctccaatacaacgacagcccaga

SEQ ID NO: 5765772 - DNA, 25 bp, Homo sapien
acacgctgtgctcaggatgcctgga

SEQ ID NO: 5765773 - DNA, 25 bp, Homo sapien
tgtaaccttgcagccaacacccctg

SEQ ID NO: 5765774 - DNA, 25 bp, Homo sapien
gagcccagactcttggagcagttgt

SEQ ID NO: 5765775 - DNA, 25 bp, Homo sapien
gcacagccttccatgccccgacccc

SEQ ID NO: 5765776 - DNA, 25 bp, Homo sapien
attcccaccaccctgtgccccagaa

SEQ ID NO: 5765777 - DNA, 25 bp, Homo sapien
ggaccgcctagccccaggagccccg

SEQ ID NO: 5765778 - DNA, 25 bp, Homo sapien
gaatggctatgcatggacctctggg

SEQ ID NO: 5765779 - DNA, 25 bp, Homo sapien
cttgcagccaacacccctgcccggc

SEQ ID NO: 5765780 - DNA, 25 bp, Homo sapien
caggtggtagctcacgtgcgggctc

SEQ ID NO: 5765781 - DNA, 25 bp, Homo sapien
ctgcagcgcatccgcacgggcagcg

SEQ ID NO: 5765782 - DNA, 25 bp, Homo sapien
tccgctacctgttgtacagagcaca

SEQ ID NO: 5765783 - DNA, 25 bp, Homo sapien
tggagaccgccgagccacagtcctc

SEQ ID NO: 5765784 - DNA, 25 bp, Homo sapien
tgttccccctggggactctgtcaga

SEQ ID NO: 5765785 - DNA, 25 bp, Homo sapien
cctggacggcacccgcaagaccaac

SEQ ID NO: 5765786 - DNA, 25 bp, Homo sapien
gcaccgatggcttcgacgagttcaa

SEQ ID NO: 5765787 - DNA, 25 bp, Homo sapien
cctggataacgtctttttcgagagt

SEQ ID NO: 5765788 - DNA, 25 bp, Homo sapien
agcttgacatgtcttccgtggtggg

SEQ ID NO: 5765789 - DNA, 25 bp, Homo sapien
tcctccatggcttcccagcttgaca

SEQ ID NO: 5765790 - DNA, 25 bp, Homo sapien
atcagcccagtcccaggcgcccgtc

SEQ ID NO: 5765791 - DNA, 25 bp, Homo sapien
tccgaggccccagcaggaccccgcc

SEQ ID NO: 5765792 - DNA, 25 bp, Homo sapien
ctcaagtgcgacatcagcgcagaga

SEQ ID NO: 5765793 - DNA, 25 bp, Homo sapien
ctaggtgcagacacacccgccctgg

SEQ ID NO: 5765794 - DNA, 25 bp, Homo sapien
cgtgcgggctcaggagcgcgagctg

SEQ ID NO: 5765795 - DNA, 25 bp, Homo sapien
ccagaggctgccagcactcccaggg

SEQ ID NO: 5765796 - DNA, 25 bp, Homo sapien
agcaggctgccacccccgatgctga

SEQ ID NO: 5765797 - DNA, 25 bp, Homo sapien
agcctcacagcgagcctcctgatca

SEQ ID NO: 5765798 - DNA, 25 bp, Homo sapien
ccaccccaccggatacgaggggctg

SEQ ID NO: 5765799 - DNA, 25 bp, Homo sapien
cctcaattgcatcgggcccctattc

SEQ ID NO: 5765800 - DNA, 25 bp, Homo sapien
cagcccagtcccaggcgcccgtcaa

SEQ ID NO: 5765801 - DNA, 25 bp, Homo sapien
ccgcttcggaggaggagttccagtt

SEQ ID NO: 5765802 - DNA, 25 bp, Homo sapien
ctttttcgagagtctgcagcggcgc

SEQ ID NO: 5765803 - DNA, 25 bp, Homo sapien
ggcagagcccagactcttggagcag

SEQ ID NO: 5765804 - DNA, 25 bp, Homo sapien
cagttgttccccctggggactctgt

SEQ ID NO: 5765805 - DNA, 25 bp, Homo sapien
ctctgggcagggagacctgggtctt

SEQ ID NO: 5765806 - DNA, 25 bp, Homo sapien
taagcccatgagcacagggactggc

SEQ ID NO: 5765807 - DNA, 25 bp, Homo sapien
cagtccagtctctgctgagagcaca

SEQ ID NO: 5765808 - DNA, 25 bp, Homo sapien
actcttggagcagttgttccccctg

SEQ ID NO: 5765809 - DNA, 25 bp, Homo sapien
aagtgcagccagacccagtgcccca

SEQ ID NO: 5765810 - DNA, 25 bp, Homo sapien
gccaggcggaagccaagtgcccgaa

SEQ ID NO: 5765811 - DNA, 25 bp, Homo sapien
ggtgcgtgagttcctggacggcacc

SEQ ID NO: 5765812 - DNA, 25 bp, Homo sapien
cctgagctgcctcctccagcccatg

SEQ ID NO: 5765813 - DNA, 25 bp, Homo sapien
tcctcgccagcccactcctcgccag

SEQ ID NO: 5765814 - DNA, 25 bp, Homo sapien
cagcccaccccaccggatacgaggg

SEQ ID NO: 5765815 - DNA, 25 bp, Homo sapien
cccagccctacagagcgagcccccg

SEQ ID NO: 5765816 - DNA, 25 bp, Homo sapien
agtgatctcaagtgcgacatcagcg

SEQ ID NO: 5765817 - DNA, 25 bp, Homo sapien
caaggcagtctcaccaccccacctg

SEQ ID NO: 5765818 - DNA, 25 bp, Homo sapien
gctcttacaggccctgcacagagta

SEQ ID NO: 5765819 - DNA, 25 bp, Homo sapien
gagcctgcacccgcccgatctccga

SEQ ID NO: 5765820 - DNA, 25 bp, Homo sapien
cccaccggatacgaggggctgtgcg

SEQ ID NO: 5765821 - DNA, 25 bp, Homo sapien
caagacctggcagatgtggctgctc

SEQ ID NO: 5765822 - DNA, 25 bp, Homo sapien
aaggagcctccagcctgccctgtgg

SEQ ID NO: 5765823 - DNA, 25 bp, Homo sapien
ccaatagcacagccttccatgcccc

SEQ ID NO: 5765824 - DNA, 25 bp, Homo sapien
taaccttgcagccaacacccctgcc

SEQ ID NO: 5765825 - DNA, 25 bp, Homo sapien
tcagaggctccatggaggcctctca

SEQ ID NO: 5765826 - DNA, 25 bp, Homo sapien
tcggccgacttctggtgctttgagt

SEQ ID NO: 5765827 - DNA, 25 bp, Homo sapien
cactcctcgccagtccagtctctgc

SEQ ID NO: 5765828 - DNA, 25 bp, Homo sapien
acccagtgccccaggaaggtcatca

SEQ ID NO: 5765829 - DNA, 25 bp, Homo sapien
agatgcacgcggctgtcggccagct

SEQ ID NO: 5765830 - DNA, 25 bp, Homo sapien
tgcacccgctgcaaagagtcggccg

SEQ ID NO: 5765831 - DNA, 25 bp, Homo sapien
ccggcagattgtggatgcgcaggct

SEQ ID NO: 5765832 - DNA, 25 bp, Homo sapien
agatgcagctgtatccaagaaagcc

SEQ ID NO: 5765833 - DNA, 25 bp, Homo sapien
caatgcccaggaacatcctgcccag

SEQ ID NO: 5765834 - DNA, 25 bp, Homo sapien
ggaaggcagagcccagactcttgga

SEQ ID NO: 5765835 - DNA, 25 bp, Homo sapien
tctgtcagaggctccatggaggcct

SEQ ID NO: 5765836 - DNA, 25 bp, Homo sapien
gccccagccctacagagcgagcccc

SEQ ID NO: 5765837 - DNA, 25 bp, Homo sapien
caggcctctgagagtgctacccttc

SEQ ID NO: 5765838 - DNA, 25 bp, Homo sapien
tgcgtgagttcctggacggcacccg

SEQ ID NO: 5765839 - DNA, 25 bp, Homo sapien
ctgcaggacctcagctcttgcatca

SEQ ID NO: 5765840 - DNA, 25 bp, Homo sapien
gccctgtggcacataccacccccca

SEQ ID NO: 5765841 - DNA, 25 bp, Homo sapien
ccacctggatggaccgcctagcccc

SEQ ID NO: 5765842 - DNA, 25 bp, Homo sapien
ctgccgtccaccgtgggatccgcta

SEQ ID NO: 5765843 - DNA, 25 bp, Homo sapien
tgcgccaggcgctctgccgcctgcg

SEQ ID NO: 5765844 - DNA, 25 bp, Homo sapien
gtgaggtcttcctgcccaacagcaa

SEQ ID NO: 5765845 - DNA, 25 bp, Homo sapien
caacgacagcccagaagaggaagtg

SEQ ID NO: 5765846 - DNA, 25 bp, Homo sapien
ccagtcggtgcgtgagttcctggac

SEQ ID NO: 5765847 - DNA, 25 bp, Homo sapien
gcccaggaacatcctgcccagctgc

SEQ ID NO: 5765848 - DNA, 25 bp, Homo sapien
gcccagtcccaggcgcccgtcaagc

SEQ ID NO: 5765849 - DNA, 25 bp, Homo sapien
ccagtggctcaacaacttttttgcc

SEQ ID NO: 5765850 - DNA, 25 bp, Homo sapien
ccgcaagaccaacaacatcttctgc

SEQ ID NO: 5765851 - DNA, 25 bp, Homo sapien
gaggcaaggttggctcggagctccc

SEQ ID NO: 5765852 - DNA, 25 bp, Homo sapien
tgccccaggaaggtcatcaagatgg

SEQ ID NO: 5765853 - DNA, 25 bp, Homo sapien
gctgggccgcctggatgctgtgctg

SEQ ID NO: 5765854 - DNA, 25 bp, Homo sapien
cgcgactacgaggagatggccagtc

SEQ ID NO: 5765855 - DNA, 25 bp, Homo sapien
ctccgcttgcaccctcaattgcatc

SEQ ID NO: 5765856 - DNA, 25 bp, Homo sapien
atgcctccccccgagaccccctctg

SEQ ID NO: 5765857 - DNA, 25 bp, Homo sapien
cgaaactaagctggggtccatggag

SEQ ID NO: 5765858 - DNA, 25 bp, Homo sapien
gagaccgccgagccacagtcctcgc

SEQ ID NO: 5765859 - DNA, 25 bp, Homo sapien
tgcacggtttcctgcgccaggcgct

SEQ ID NO: 5765860 - DNA, 25 bp, Homo sapien
atggcttcccagcttgacatgtctt

SEQ ID NO: 5765861 - DNA, 25 bp, Homo sapien
catgcacggtttcctgcgccaggcg

SEQ ID NO: 5765862 - DNA, 25 bp, Homo sapien
ccccagcttggcctccccaccagcc

SEQ ID NO: 5765863 - DNA, 25 bp, Homo sapien
cagtttctgcgctgccagcaatgcc

SEQ ID NO: 5765864 - DNA, 25 bp, Homo sapien
ggacctctgggcagggagacctggg

SEQ ID NO: 5765865 - DNA, 25 bp, Homo sapien
ccccaaccaccgcacccctacgctg

SEQ ID NO: 5765866 - DNA, 25 bp, Homo sapien
gaatcgaaactaagctggggtccat

SEQ ID NO: 5765867 - DNA, 25 bp, Homo sapien
gagaccccctctgaaggccgccagc

SEQ ID NO: 5765868 - DNA, 25 bp, Homo sapien
ggggctgtgcgatcccgcagccgct

SEQ ID NO: 5765869 - DNA, 25 bp, Homo sapien
gctgatccgcgagcgcgtgcgccag

SEQ ID NO: 5765870 - DNA, 25 bp, Homo sapien
aggcgctctgccgcctgcgccagga

SEQ ID NO: 5765871 - DNA, 25 bp, Homo sapien
tacgctgaccagcatctactgccga

SEQ ID NO: 5765872 - DNA, 25 bp, Homo sapien
gctcggaagactcagatgccgaaaa

SEQ ID NO: 5765873 - DNA, 25 bp, Homo sapien
gcgcgtgccgagaccgaggagctga

SEQ ID NO: 5765874 - DNA, 25 bp, Homo sapien
ctgtgctgctcgtgcgcgctccttg

SEQ ID NO: 5765875 - DNA, 25 bp, Homo sapien
cgcactccaagatctaaaccgagaa

SEQ ID NO: 5765876 - DNA, 25 bp, Homo sapien
aagtgcctctggaagcctctccaat

SEQ ID NO: 5765877 - DNA, 25 bp, Homo sapien
cagcccaggcccagcacctccaagg

SEQ ID NO: 5765878 - DNA, 25 bp, Homo sapien
ccagacccagtgccccaggaaggtc

SEQ ID NO: 5765879 - DNA, 25 bp, Homo sapien
accgcctagccccaggagccccgtc

SEQ ID NO: 5765880 - DNA, 25 bp, Homo sapien
cacccaggggaaagatgcagctgta

SEQ ID NO: 5765881 - DNA, 25 bp, Homo sapien
ggtggtagctcacgtgcgggctcag

SEQ ID NO: 5765882 - DNA, 25 bp, Homo sapien
catgagcacagggactggctatccc

SEQ ID NO: 5765883 - DNA, 25 bp, Homo sapien
cggaggaggagttccagtttctgcg

SEQ ID NO: 5765884 - DNA, 25 bp, Homo sapien
tattcggacttggtctccccatgtg

SEQ ID NO: 5765885 - DNA, 25 bp, Homo sapien
gacgagttcaaggtgcgcctgcagg

SEQ ID NO: 5765886 - DNA, 25 bp, Homo sapien
ttaattcttggttaaggaatgaatc

SEQ ID NO: 5765887 - DNA, 25 bp, Homo sapien
agctgcctcctccagcccatgctct

SEQ ID NO: 5765888 - DNA, 25 bp, Homo sapien
cactcctgccatcacagggcccctc

SEQ ID NO: 5765889 - DNA, 25 bp, Homo sapien
gagctgatccgcgagcgcgtgcgcc

SEQ ID NO: 5765890 - DNA, 25 bp, Homo sapien
tctaaaccgagaatcgaaactaagc

SEQ ID NO: 5765891 - DNA, 25 bp, Homo sapien
atgtggtccaagccagcactcctgc

SEQ ID NO: 5765892 - DNA, 25 bp, Homo sapien
gggatccgctacctgttgtacagag

SEQ ID NO: 5765893 - DNA, 25 bp, Homo sapien
aaggcagagcccagactcttggagc

SEQ ID NO: 5765894 - DNA, 25 bp, Homo sapien
tgagcctcacagcgagcctcctgat

SEQ ID NO: 5765895 - DNA, 25 bp, Homo sapien
atgctgtgctgcagcgcatccgcac

SEQ ID NO: 5765896 - DNA, 25 bp, Homo sapien
cttgcactctcctgtgttctgagtc

SEQ ID NO: 5765897 - DNA, 25 bp, Homo sapien
tggctgctcaataaacacttgttga

SEQ ID NO: 5765898 - DNA, 25 bp, Homo sapien
gtgatcagcagctcggaagactcag

SEQ ID NO: 5765899 - DNA, 25 bp, Homo sapien
ccgcccgatctccgaggccccagca

SEQ ID NO: 5765900 - DNA, 25 bp, Homo sapien
gccatgccctccgcttgcaccctca

SEQ ID NO: 5765901 - DNA, 25 bp, Homo sapien
catggagaccgccgagccacagtcc

SEQ ID NO: 5765902 - DNA, 25 bp, Homo sapien
atcacccaggggaaagatgcagctg

SEQ ID NO: 5765903 - DNA, 25 bp, Homo sapien
cagcgcgctggtgcagaggatgaag

SEQ ID NO: 5765904 - DNA, 25 bp, Homo sapien
ggaggagttccagtttctgcgctgc

SEQ ID NO: 5765905 - DNA, 25 bp, Homo sapien
gccagtcggctgggccgcctggatg

SEQ ID NO: 5765906 - DNA, 25 bp, Homo sapien
caggctgccacccccgatgctgagc

SEQ ID NO: 5765907 - DNA, 25 bp, Homo sapien
ctctccaattacattcccaccaccc

SEQ ID NO: 5765908 - DNA, 25 bp, Homo sapien
caaccacgtggccagtggcgccggg

SEQ ID NO: 5765909 - DNA, 25 bp, Homo sapien
atgaatggctatgcatggacctctg

SEQ ID NO: 5765910 - DNA, 25 bp, Homo sapien
tctctggctgagaggggaaggctaa

SEQ ID NO: 5765911 - DNA, 25 bp, Homo sapien
cccgcccggccccaggagcccacca

SEQ ID NO: 5765912 - DNA, 25 bp, Homo sapien
ccgccttcgccatgccctccgcttg

SEQ ID NO: 5765913 - DNA, 25 bp, Homo sapien
ccaccaccctgtgccccagaaaggc

SEQ ID NO: 5765914 - DNA, 25 bp, Homo sapien
accatcctgccaatgcccaggaaca

SEQ ID NO: 5765915 - DNA, 25 bp, Homo sapien
tacgcctcggaccaggaggtgctgg

SEQ ID NO: 5765916 - DNA, 25 bp, Homo sapien
ctgcgccaagtgcttcgaggcacac

SEQ ID NO: 5765917 - DNA, 25 bp, Homo sapien
agcgagcctcctgatcaccaggagc

SEQ ID NO: 5765918 - DNA, 25 bp, Homo sapien
gccaatgcccaggaacatcctgccc

SEQ ID NO: 5765919 - DNA, 25 bp, Homo sapien
ggaccaggaggtgctggacatgcac

SEQ ID NO: 5765920 - DNA, 25 bp, Homo sapien
agcagttgttccccctggggactct

SEQ ID NO: 5765921 - DNA, 25 bp, Homo sapien
ttgtggatgcgcaggctgtgtgcac

SEQ ID NO: 5765922 - DNA, 25 bp, Homo sapien
ggagcagttgttccccctggggact

SEQ ID NO: 5765923 - DNA, 25 bp, Homo sapien
tgacgttgacctggatgtctccaat

SEQ ID NO: 5765924 - DNA, 25 bp, Homo sapien
caggaggagccccagagcctgcaag

SEQ ID NO: 5765925 - DNA, 25 bp, Homo sapien
aaggctaaggcatggctgagattca

SEQ ID NO: 5765926 - DNA, 25 bp, Homo sapien
cacagagtagcactcattaattctt

SEQ ID NO: 5765927 - DNA, 25 bp, Homo sapien
ggtcttcctgcccaacagcaaccac

SEQ ID NO: 5765928 - DNA, 25 bp, Homo sapien
agtgctacccttctcttgtaacctt

SEQ ID NO: 5765929 - DNA, 25 bp, Homo sapien
ttctgcgctgccagcaatgccaggc

SEQ ID NO: 5765930 - DNA, 25 bp, Homo sapien
gccctgcacagagtagcactcatta

SEQ ID NO: 5765931 - DNA, 25 bp, Homo sapien
gccctacagagcgagcccccgcttc

SEQ ID NO: 5765932 - DNA, 25 bp, Homo sapien
ctcccatttatcccagtggctcaac

SEQ ID NO: 5765933 - DNA, 25 bp, Homo sapien
cctattcggacttggtctccccatg

SEQ ID NO: 5765934 - DNA, 25 bp, Homo sapien
cagcccactcctcgccagcccactc

SEQ ID NO: 5765935 - DNA, 25 bp, Homo sapien
ggggaaagatgcagctgtatccaag

SEQ ID NO: 5765936 - DNA, 25 bp, Homo sapien
agcccatggagaccgccgagccaca

SEQ ID NO: 5765937 - DNA, 25 bp, Homo sapien
catggaggcctctcaagtccaagtg

SEQ ID NO: 5765938 - DNA, 25 bp, Homo sapien
tccccttctcctccatggcttccca

SEQ ID NO: 5765939 - DNA, 25 bp, Homo sapien
gttgtggtgatcagcagctcggaag

SEQ ID NO: 5765940 - DNA, 25 bp, Homo sapien
gtgccccatctgccaggcgccctgg

SEQ ID NO: 5765941 - DNA, 25 bp, Homo sapien
gcccgtcaagcaggcctctgagagt

SEQ ID NO: 5765942 - DNA, 25 bp, Homo sapien
gttcctcaagcacgaggcccggccc

SEQ ID NO: 5765943 - DNA, 25 bp, Homo sapien
caaccatcctgccaatgcccaggaa

SEQ ID NO: 5765944 - DNA, 25 bp, Homo sapien
agcactcctgccatcacagggcccc

SEQ ID NO: 5765945 - DNA, 25 bp, Homo sapien
gccaggtggtagctcacgtgcgggc

SEQ ID NO: 5765946 - DNA, 25 bp, Homo sapien
gtgcgcctgcaggacctcagctctt

SEQ ID NO: 5765947 - DNA, 25 bp, Homo sapien
ccaggatctaagcccatgagcacag

SEQ ID NO: 5765948 - DNA, 25 bp, Homo sapien
agcgccctgccgtccaccgtgggat

SEQ ID NO: 5765949 - DNA, 25 bp, Homo sapien
tccaaccccaaccaccgcaccccta

SEQ ID NO: 5765950 - DNA, 25 bp, Homo sapien
catggagcctgcacccgcccgatct

SEQ ID NO: 5765951 - DNA, 25 bp, Homo sapien
agcttggcctccccaccagcccgct

SEQ ID NO: 5765952 - DNA, 25 bp, Homo sapien
aacaacatcttctgctccaacccca

SEQ ID NO: 5765953 - DNA, 25 bp, Homo sapien
tgtgttctgagtccctggccaatag

SEQ ID NO: 5765954 - DNA, 25 bp, Homo sapien
ccaagaaagccagcccagaggctgc

SEQ ID NO: 5765955 - DNA, 25 bp, Homo sapien
aggagccccagagcctgcaagctgc

SEQ ID NO: 5765956 - DNA, 25 bp, Homo sapien
accaggaggtgctggacatgcacgg

SEQ ID NO: 5765957 - DNA, 25 bp, Homo sapien
tctccgaggccccagcaggaccccg

SEQ ID NO: 5765958 - DNA, 25 bp, Homo sapien
ggcctctttgcccaagaaagaaact

SEQ ID NO: 5765959 - DNA, 25 bp, Homo sapien
cttgtaaccttgcagccaacacccc

SEQ ID NO: 5765960 - DNA, 25 bp, Homo sapien
taggcctctgccaggatctaagccc

SEQ ID NO: 5765961 - DNA, 25 bp, Homo sapien
gaatgaatggctatgcatggacctc

SEQ ID NO: 5765962 - DNA, 25 bp, Homo sapien
ccgcgagcgcgtgcgccaggtggta

SEQ ID NO: 5765963 - DNA, 25 bp, Homo sapien
ctctggaagcctctccaattacatt

SEQ ID NO: 5765964 - DNA, 25 bp, Homo sapien
gccttcgccatgccctccgcttgca

SEQ ID NO: 5765965 - DNA, 25 bp, Homo sapien
cactcattaattcttggttaaggaa

SEQ ID NO: 5765966 - DNA, 25 bp, Homo sapien
tgagttcctggacggcacccgcaag

SEQ ID NO: 5765967 - DNA, 25 bp, Homo sapien
cgggctcaggagcgcgagctgctgg

SEQ ID NO: 5765968 - DNA, 25 bp, Homo sapien
cggccccaggagcccaccatgcctc

SEQ ID NO: 5765969 - DNA, 25 bp, Homo sapien
catgccccgacccccaccccaagcc

SEQ ID NO: 5765970 - DNA, 25 bp, Homo sapien
tgctacccttctcttgtaaccttgc

SEQ ID NO: 5765971 - DNA, 25 bp, Homo sapien
ccaggcgctctgccgcctgcgccag

SEQ ID NO: 5765972 - DNA, 25 bp, Homo sapien
agcagctcctctgcgccaagtgctt

SEQ ID NO: 5765973 - DNA, 25 bp, Homo sapien
gctcctcccatttatcccagtggct

SEQ ID NO: 5765974 - DNA, 25 bp, Homo sapien
ccagcactcccagggaccctattga

SEQ ID NO: 5765975 - DNA, 25 bp, Homo sapien
ctgtatccaagaaagccagcccaga

SEQ ID NO: 5765976 - DNA, 25 bp, Homo sapien
agaaagaaacttctgtcacccttgc

SEQ ID NO: 5765977 - DNA, 25 bp, Homo sapien
ctccccggagcagcccaggcccagc

SEQ ID NO: 5765978 - DNA, 25 bp, Homo sapien
tgccgaaaactcgtgcatggagccc

SEQ ID NO: 5765979 - DNA, 25 bp, Homo sapien
ggccccccatcagcccagtcccagg

SEQ ID NO: 5765980 - DNA, 25 bp, Homo sapien
ctgccacccccgatgctgagcctca

SEQ ID NO: 5765981 - DNA, 25 bp, Homo sapien
cagggactggctatcccaagacctg

SEQ ID NO: 5765982 - DNA, 25 bp, Homo sapien
ttttttgccctccccttctcctcca

SEQ ID NO: 5765983 - DNA, 25 bp, Homo sapien
ggctcaggagcgcgagctgctggag

SEQ ID NO: 5765984 - DNA, 25 bp, Homo sapien
cttcgccatgccctccgcttgcacc

SEQ ID NO: 5765985 - DNA, 25 bp, Homo sapien
ggcggaagccaagtgcccgaagctg

SEQ ID NO: 5765986 - DNA, 25 bp, Homo sapien
atgcagctgtatccaagaaagccag

SEQ ID NO: 5765987 - DNA, 25 bp, Homo sapien
gcacacgctgtgctcaggatgcctg

SEQ ID NO: 5765988 - DNA, 25 bp, Homo sapien
cagcccagaggctgccagcactccc

SEQ ID NO: 5765989 - DNA, 25 bp, Homo sapien
ggagcccaccatgcctccccccgag

SEQ ID NO: 5765990 - DNA, 25 bp, Homo sapien
caccattccaggcctctttgcccaa

SEQ ID NO: 5765991 - DNA, 25 bp, Homo sapien
caaggtgcgcctgcaggacctcagc

SEQ ID NO: 5765992 - DNA, 25 bp, Homo sapien
atggacctctgggcagggagacctg

SEQ ID NO: 5765993 - DNA, 25 bp, Homo sapien
accaccctgtgccccagaaaggccc

SEQ ID NO: 5765994 - DNA, 25 bp, Homo sapien
ttcctgcccaacagcaaccacgtgg

SEQ ID NO: 5765995 - DNA, 25 bp, Homo sapien
ggaaggctaaggcatggctgagatt

SEQ ID NO: 5765996 - DNA, 25 bp, Homo sapien
acgacagcccagaagaggaagtgca

SEQ ID NO: 5765997 - DNA, 25 bp, Homo sapien
aaactcgtgcatggagcccatggag

SEQ ID NO: 5765998 - DNA, 25 bp, Homo sapien
agccttccatgccccgacccccacc

SEQ ID NO: 5765999 - DNA, 25 bp, Homo sapien
ctaaggcatggctgagattcaagcc

SEQ ID NO: 5766000 - DNA, 25 bp, Homo sapien
agagtctgcagcggcgcctgtcggt

SEQ ID NO: 5766001 - DNA, 25 bp, Homo sapien
aaacttctgtcacccttgcactctc

SEQ ID NO: 5766002 - DNA, 25 bp, Homo sapien
ggatgtctccaatacaacgacagcc

SEQ ID NO: 5766003 - DNA, 25 bp, Homo sapien
cagccctacagagcgagcccccgct

SEQ ID NO: 5766004 - DNA, 25 bp, Homo sapien
gctggtgcagaggatgaagtgctac

SEQ ID NO: 5766005 - DNA, 25 bp, Homo sapien
ctccaatacaacgacagcccagaag

SEQ ID NO: 5766006 - DNA, 25 bp, Homo sapien
ggagcagcccaggcccagcacctcc

SEQ ID NO: 5766007 - DNA, 25 bp, Homo sapien
cctacagagcgagcccccgcttcgg

SEQ ID NO: 5766008 - DNA, 25 bp, Homo sapien
gcaaagagtcggccgacttctggtg

SEQ ID NO: 5766009 - DNA, 25 bp, Homo sapien
aaccagtcggtgcgtgagttcctgg

SEQ ID NO: 5766010 - DNA, 25 bp, Homo sapien
tgcccaagaaagaaacttctgtcac

SEQ ID NO: 5766011 - DNA, 25 bp, Homo sapien
caggagcgcgagctgctggaggctg

SEQ ID NO: 5766012 - DNA, 25 bp, Homo sapien
tgcagccaacacccctgcccggccc

SEQ ID NO: 5766013 - DNA, 25 bp, Homo sapien
aattcttggttaaggaatgaatcaa

SEQ ID NO: 5766014 - DNA, 25 bp, Homo sapien
gacagcagccacagtgatctcaagt

SEQ ID NO: 5766015 - DNA, 25 bp, Homo sapien
atggaccgcctagccccaggagccc

SEQ ID NO: 5766016 - DNA, 25 bp, Homo sapien
tcacagcgagcctcctgatcaccag

SEQ ID NO: 5766017 - DNA, 25 bp, Homo sapien
gctcaacaacttttttgccctcccc

SEQ ID NO: 5766018 - DNA, 25 bp, Homo sapien
caggaggtgctggacatgcacggtt

SEQ ID NO: 5766019 - DNA, 25 bp, Homo sapien
caagccagcactcctgccatcacag

SEQ ID NO: 5766020 - DNA, 25 bp, Homo sapien
gcccagctgcaaaggggcatcagcc

SEQ ID NO: 5766021 - DNA, 25 bp, Homo sapien
ccagtcccaggcgcccgtcaagcag

SEQ ID NO: 5766022 - DNA, 25 bp, Homo sapien
aagactcagatgccgaaaactcgtg

SEQ ID NO: 5766023 - DNA, 25 bp, Homo sapien
gtcggccagctgggccgcgcgcgtg

SEQ ID NO: 5766024 - DNA, 25 bp, Homo sapien
atgtctccaatacaacgacagccca

SEQ ID NO: 5766025 - DNA, 25 bp, Homo sapien
gcgcgtgcgccaggtggtagctcac

SEQ ID NO: 5766026 - DNA, 25 bp, Homo sapien
cagcctgccctgtggcacataccac

SEQ ID NO: 5766027 - DNA, 25 bp, Homo sapien
atcctgcccagctgcaaaggggcat

SEQ ID NO: 5766028 - DNA, 25 bp, Homo sapien
ccagctgcaaaggggcatcagccca

SEQ ID NO: 5766029 - DNA, 25 bp, Homo sapien
aggcgccctggcccctaggtgcaga

SEQ ID NO: 5766030 - DNA, 25 bp, Homo sapien
ataaacacttgttgaaccatcaaaa

SEQ ID NO: 5766031 - DNA, 25 bp, Homo sapien
tgctcaataaacacttgttgaacca

SEQ ID NO: 5766032 - DNA, 25 bp, Homo sapien
gcctccccaccagcccgctgagcag

SEQ ID NO: 5766033 - DNA, 25 bp, Homo sapien
tgtgtgcacccgctgcaaagagtcg

SEQ ID NO: 5766034 - DNA, 25 bp, Homo sapien
cgcctagccccaggagccccgtcat

SEQ ID NO: 5766035 - DNA, 25 bp, Homo sapien
ggtccaagccagcactcctgccatc

SEQ ID NO: 5766036 - DNA, 25 bp, Homo sapien
ctgcctcctccagcccatgctctta

SEQ ID NO: 5766037 - DNA, 25 bp, Homo sapien
ccgcagccgctccctccggggctcc

SEQ ID NO: 5766038 - DNA, 25 bp, Homo sapien
gaggcctctcaagtccaagtgcctc

SEQ ID NO: 5766039 - DNA, 25 bp, Homo sapien
catgccctccgcttgcaccctcaat

SEQ ID NO: 5766040 - DNA, 25 bp, Homo sapien
gcaccctcaattgcatcgggcccct

SEQ ID NO: 5766041 - DNA, 25 bp, Homo sapien
acgtctttttcgagagtctgcagcg

SEQ ID NO: 5766042 - DNA, 25 bp, Homo sapien
gccaacacccctgcccggcccctga

SEQ ID NO: 5766043 - DNA, 25 bp, Homo sapien
cctggcccctaggtgcagacacacc

SEQ ID NO: 5766044 - DNA, 25 bp, Homo sapien
cttggtctccccatgtggtccaagc

SEQ ID NO: 5766045 - DNA, 25 bp, Homo sapien
gcaaccagtcggtgcgtgagttcct

SEQ ID NO: 5766046 - DNA, 25 bp, Homo sapien
cctagcagagctgcgcaaccagtcg

SEQ ID NO: 5766047 - DNA, 25 bp, Homo sapien
gaacatcctgcccagctgcaaaggg

SEQ ID NO: 5766048 - DNA, 25 bp, Homo sapien
cctccaaggcagtctcaccacccca

SEQ ID NO: 5766049 - DNA, 25 bp, Homo sapien
tccatggagcctgcacccgcccgat

SEQ ID NO: 5766050 - DNA, 25 bp, Homo sapien
ccccggagcagcccaggcccagcac

SEQ ID NO: 5766051 - DNA, 25 bp, Homo sapien
ctcccagggaccctattgacgttga

SEQ ID NO: 5766052 - DNA, 25 bp, Homo sapien
ggaggcgtcgggcatgcagtgcccc

SEQ ID NO: 5766053 - DNA, 25 bp, Homo sapien
cccttgcactctcctgtgttctgag

SEQ ID NO: 5766054 - DNA, 25 bp, Homo sapien
acctctgggcagggagacctgggtc

SEQ ID NO: 5766055 - DNA, 25 bp, Homo sapien
aggagctgatccgcgagcgcgtgcg

SEQ ID NO: 5766056 - DNA, 25 bp, Homo sapien
tgacatgtcttccgtggtgggggca

SEQ ID NO: 5766057 - DNA, 25 bp, Homo sapien
agtggttcctcaagcacgaggcccg

SEQ ID NO: 5766058 - DNA, 25 bp, Homo sapien
tacaacgacagcccagaagaggaag

SEQ ID NO: 5766059 - DNA, 25 bp, Homo sapien
accaccccacctggatggaccgcct

SEQ ID NO: 5766060 - DNA, 25 bp, Homo sapien
ttgtctgcacacgctgtgctcagga

SEQ ID NO: 5766061 - DNA, 25 bp, Homo sapien
ctcctgtgttctgagtccctggcca

SEQ ID NO: 5766062 - DNA, 25 bp, Homo sapien
ctcgccagcccactcctcgccagtc

SEQ ID NO: 5766063 - DNA, 25 bp, Homo sapien
gaggggaaggctaaggcatggctga

SEQ ID NO: 5766064 - DNA, 25 bp, Homo sapien
tgtcggtgtaccggcagattgtgga

SEQ ID NO: 5766065 - DNA, 25 bp, Homo sapien
ctcaggatgcctggaggcgtcgggc

SEQ ID NO: 5766066 - DNA, 25 bp, Homo sapien
catctgccaggcgccctggccccta

SEQ ID NO: 5766067 - DNA, 25 bp, Homo sapien
cccaacagcaaccacgtggccagtg

SEQ ID NO: 5766068 - DNA, 25 bp, Homo sapien
agcttctcttcacgcactccaagat

SEQ ID NO: 5766069 - DNA, 25 bp, Homo sapien
ccgcctgcgccaggaggagccccag

SEQ ID NO: 5766070 - DNA, 25 bp, Homo sapien
tgtcagaggctccatggaggcctct

SEQ ID NO: 5766071 - DNA, 25 bp, Homo sapien
ccaagtgcccgaagctgctgccttg

SEQ ID NO: 5766072 - DNA, 25 bp, Homo sapien
aagcctctccactaggcctctgcca

SEQ ID NO: 5766073 - DNA, 25 bp, Homo sapien
tctgccaggatctaagcccatgagc

SEQ ID NO: 5766074 - DNA, 25 bp, Homo sapien
tgaagtgctacgcctcggaccagga

SEQ ID NO: 5766075 - DNA, 25 bp, Homo sapien
caccggatacgaggggctgtgcgat

SEQ ID NO: 5766076 - DNA, 25 bp, Homo sapien
cagcccatgctcttacaggccctgc

SEQ ID NO: 5766077 - DNA, 25 bp, Homo sapien
gcatcagcccaccccaccggatacg

SEQ ID NO: 5766078 - DNA, 25 bp, Homo sapien
ggaggagctggacgccatgacgcag

SEQ ID NO: 5766079 - DNA, 25 bp, Homo sapien
tcgccagcccactcctcgccagccc

SEQ ID NO: 5766080 - DNA, 25 bp, Homo sapien
gacttggtctccccatgtggtccaa

SEQ ID NO: 5766081 - DNA, 25 bp, Homo sapien
tgcgacatcagcgcagagatccagc

SEQ ID NO: 5766082 - DNA, 25 bp, Homo sapien
ctatcccaagacctggcagatgtgg

SEQ ID NO: 5766083 - DNA, 25 bp, Homo sapien
cctgcccagctgcaaaggggcatca

SEQ ID NO: 5766084 - DNA, 25 bp, Homo sapien
gatctaaaccgagaatcgaaactaa

SEQ ID NO: 5766085 - DNA, 25 bp, Homo sapien
gcgcggtaccagcgcgactacgagg

SEQ ID NO: 5766086 - DNA, 25 bp, Homo sapien
cgtgagttcctggacggcacccgca

SEQ ID NO: 5766087 - DNA, 25 bp, Homo sapien
taaaccgagaatcgaaactaagctg

SEQ ID NO: 5766088 - DNA, 25 bp, Homo sapien
ccaggcccagcacctccaaggcagt

SEQ ID NO: 5766089 - DNA, 25 bp, Homo sapien
ctccccaccagcccgctgagcaggc

SEQ ID NO: 5766090 - DNA, 25 bp, Homo sapien
ccccccatcagcccagtcccaggcg

SEQ ID NO: 5766091 - DNA, 25 bp, Homo sapien
cgcacccctacgctgaccagcatct

SEQ ID NO: 5766092 - DNA, 25 bp, Homo sapien
tgctccaaccccaaccaccgcaccc

SEQ ID NO: 5766093 - DNA, 25 bp, Homo sapien
ccctgtgccccagaaaggcccccca

SEQ ID NO: 5766094 - DNA, 25 bp, Homo sapien
gacgcaggcgctgcaggagcaggat

SEQ ID NO: 5766095 - DNA, 25 bp, Homo sapien
gcccaggcccagcacctccaaggca

SEQ ID NO: 5766096 - DNA, 25 bp, Homo sapien
gagagcacaaggagcctccagcctg

SEQ ID NO: 5766097 - DNA, 25 bp, Homo sapien
ctcaaccatcctgccaatgcccagg

SEQ ID NO: 5766098 - DNA, 25 bp, Homo sapien
aaagaaacttctgtcacccttgcac

SEQ ID NO: 5766099 - DNA, 25 bp, Homo sapien
cgcatccgcacgggcagcgcgctgg

SEQ ID NO: 5766100 - DNA, 25 bp, Homo sapien
tccgcacgggcagcgcgctggtgca

SEQ ID NO: 5766101 - DNA, 25 bp, Homo sapien
ggaagtgaggtcttcctgcccaaca

SEQ ID NO: 5766102 - DNA, 25 bp, Homo sapien
gcccccgcttcggaggaggagttcc

SEQ ID NO: 5766103 - DNA, 25 bp, Homo sapien
agtggctcaacaacttttttgccct

SEQ ID NO: 5766104 - DNA, 25 bp, Homo sapien
agtcggccgacttctggtgctttga

SEQ ID NO: 5766105 - DNA, 25 bp, Homo sapien
ccaattacattcccaccaccctgtg

SEQ ID NO: 5766106 - DNA, 25 bp, Homo sapien
gagcgagcccccgcttcggaggagg

SEQ ID NO: 5766107 - DNA, 25 bp, Homo sapien
tcgaggcacaccagtggttcctcaa

SEQ ID NO: 5766108 - DNA, 25 bp, Homo sapien
acagcaaccacgtggccagtggcgc

SEQ ID NO: 5766109 - DNA, 25 bp, Homo sapien
ctggccaatagcacagccttccatg

SEQ ID NO: 5766110 - DNA, 25 bp, Homo sapien
ggtgtaccggcagattgtggatgcg

SEQ ID NO: 5766111 - DNA, 25 bp, Homo sapien
tcttcacgcactccaagatctaaac

SEQ ID NO: 5766112 - DNA, 25 bp, Homo sapien
gcagagatccagcagcgacaggagg

SEQ ID NO: 5766113 - DNA, 25 bp, Homo sapien
gcgcccgtcaagcaggcctctgaga

SEQ ID NO: 5766114 - DNA, 25 bp, Homo sapien
tcctcccatttatcccagtggctca

SEQ ID NO: 5766115 - DNA, 25 bp, Homo sapien
gtgcagccagacccagtgccccagg

SEQ ID NO: 5766116 - DNA, 25 bp, Homo sapien
gagttccagtttctgcgctgccagc

SEQ ID NO: 5766117 - DNA, 25 bp, Homo sapien
gcagcgcatccgcacgggcagcgcg

SEQ ID NO: 5766118 - DNA, 25 bp, Homo sapien
gcggtaccagcgcgactacgaggag

SEQ ID NO: 5766119 - DNA, 25 bp, Homo sapien
gcctgcacccgcccgatctccgagg

SEQ ID NO: 5766120 - DNA, 25 bp, Homo sapien
gcagaggatgaagtgctacgcctcg

SEQ ID NO: 5766121 - DNA, 25 bp, Homo sapien
cagcccagaagaggaagtgcagcca

SEQ ID NO: 5766122 - DNA, 25 bp, Homo sapien
gcctccccccgagaccccctctgaa

SEQ ID NO: 5766123 - DNA, 25 bp, Homo sapien
cttgacatgtcttccgtggtggggg

SEQ ID NO: 5766124 - DNA, 25 bp, Homo sapien
tgccagcactcccagggaccctatt

SEQ ID NO: 5766125 - DNA, 25 bp, Homo sapien
gtcataggaagtgaggtcttcctgc

SEQ ID NO: 5766126 - DNA, 25 bp, Homo sapien
ctggatgctgtgctgcagcgcatcc

SEQ ID NO: 5766127 - DNA, 25 bp, Homo sapien
ggaagactcagatgccgaaaactcg

SEQ ID NO: 5766128 - DNA, 25 bp, Homo sapien
aggtgcgcctgcaggacctcagctc

SEQ ID NO: 5766129 - DNA, 25 bp, Homo sapien
ggcatggctgagattcaagccacca

SEQ ID NO: 5766130 - DNA, 25 bp, Homo sapien
atgcgcaggctgtgtgcacccgctg

SEQ ID NO: 5766131 - DNA, 25 bp, Homo sapien
acgctgtgctcaggatgcctggagg

SEQ ID NO: 5766132 - DNA, 25 bp, Homo sapien
ccgcctggatgctgtgctgcagcgc

SEQ ID NO: 5766133 - DNA, 25 bp, Homo sapien
tgagcaggctgccacccccgatgct

SEQ ID NO: 5766134 - DNA, 25 bp, Homo sapien
agtctctgctgagagcacaaggagc

SEQ ID NO: 5766135 - DNA, 25 bp, Homo sapien
acctgggtcttctctggctgagagg

SEQ ID NO: 5766136 - DNA, 25 bp, Homo sapien
cccctagcagagctgcgcaaccagt

SEQ ID NO: 5766137 - DNA, 25 bp, Homo sapien
gaagccaagtgcccgaagctgctgc

SEQ ID NO: 5766138 - DNA, 25 bp, Homo sapien
cgacatcagcgcagagatccagcag

SEQ ID NO: 5766139 - DNA, 25 bp, Homo sapien
aagtgctacgcctcggaccaggagg

SEQ ID NO: 5766140 - DNA, 25 bp, Homo sapien
tgcacagagtagcactcattaattc

SEQ ID NO: 5766141 - DNA, 25 bp, Homo sapien
gttgacctggatgtctccaatacaa

SEQ ID NO: 5766142 - DNA, 25 bp, Homo sapien
tggtgatcagcagctcggaagactc

SEQ ID NO: 5766143 - DNA, 25 bp, Homo sapien
gatctaagcccatgagcacagggac

SEQ ID NO: 5766144 - DNA, 25 bp, Homo sapien
ctcaagcacgaggcccggcccctag

SEQ ID NO: 5766145 - DNA, 25 bp, Homo sapien
agttcctggacggcacccgcaagac

SEQ ID NO: 5766146 - DNA, 25 bp, Homo sapien
gtagcactcattaattcttggttaa

SEQ ID NO: 5766147 - DNA, 25 bp, Homo sapien
ctccttgacagcagccacagtgatc

SEQ ID NO: 5766148 - DNA, 25 bp, Homo sapien
gcagatgcacgcggctgtcggccag

SEQ ID NO: 5766149 - DNA, 25 bp, Homo sapien
tgccgcctgcgccaggaggagcccc

SEQ ID NO: 5766150 - DNA, 25 bp, Homo sapien
gtcatcaagatggagtctgaggagg

SEQ ID NO: 5766151 - DNA, 25 bp, Homo sapien
gctgtgctcaggatgcctggaggcg

SEQ ID NO: 5766152 - DNA, 25 bp, Homo sapien
gcgtgcgccaggtggtagctcacgt

SEQ ID NO: 5766153 - DNA, 25 bp, Homo sapien
ctgctgccttgtctgcacacgctgt

SEQ ID NO: 5766154 - DNA, 25 bp, Homo sapien
atgcatggacctctgggcagggaga

SEQ ID NO: 5766155 - DNA, 25 bp, Homo sapien
gcaggacctcagctcttgcatcacc

SEQ ID NO: 5766156 - DNA, 25 bp, Homo sapien
ggcgcggttcacgcgcagatgcacg

SEQ ID NO: 5766157 - DNA, 25 bp, Homo sapien
ctttggcgcggttcacgcgcagatg

SEQ ID NO: 5766158 - DNA, 25 bp, Homo sapien
ctcttgcatcacccaggggaaagat

SEQ ID NO: 5766159 - DNA, 25 bp, Homo sapien
gcctggatgctgtgctgcagcgcat

SEQ ID NO: 5766160 - DNA, 25 bp, Homo sapien
agctgctggaggctgtggacgcgcg

SEQ ID NO: 5766161 - DNA, 25 bp, Homo sapien
aggagcaggatagtgcctttggcgc

SEQ ID NO: 5766162 - DNA, 25 bp, Homo sapien
agatccagcagcgacaggaggagct

SEQ ID NO: 5766163 - DNA, 25 bp, Homo sapien
gtgcatggagcccatggagaccgcc

SEQ ID NO: 5766164 - DNA, 25 bp, Homo sapien
ctctcctgtgttctgagtccctggc

SEQ ID NO: 5766165 - DNA, 25 bp, Homo sapien
tccccccgagaccccctctgaaggc

SEQ ID NO: 5766166 - DNA, 25 bp, Homo sapien
cagatgccgaaaactcgtgcatgga

SEQ ID NO: 5766167 - DNA, 25 bp, Homo sapien
tcctgccaatgcccaggaacatcct

SEQ ID NO: 5766168 - DNA, 25 bp, Homo sapien
ccccccagcttggcctccccaccag

SEQ ID NO: 5766169 - DNA, 25 bp, Homo sapien
gcctgcaggacctcagctcttgcat

SEQ ID NO: 5766170 - DNA, 25 bp, Homo sapien
aggatctaagcccatgagcacaggg

SEQ ID NO: 5766171 - DNA, 25 bp, Homo sapien
ctgcgctgccagcaatgccaggcgg

SEQ ID NO: 5766172 - DNA, 25 bp, Homo sapien
ggctgtgcgatcccgcagccgctcc

SEQ ID NO: 5766173 - DNA, 25 bp, Homo sapien
tgttctgagtccctggccaatagca

SEQ ID NO: 5766174 - DNA, 25 bp, Homo sapien
cgaggccccagcaggaccccgcccg

SEQ ID NO: 5766175 - DNA, 25 bp, Homo sapien
tttgcccaagaaagaaacttctgtc

SEQ ID NO: 5766176 - DNA, 25 bp, Homo sapien
cctacgctgaccagcatctactgcc

SEQ ID NO: 5766177 - DNA, 25 bp, Homo sapien
atccgcgagcgcgtgcgccaggtgg

SEQ ID NO: 5766178 - DNA, 25 bp, Homo sapien
atgccaggcggaagccaagtgcccg

SEQ ID NO: 5766179 - DNA, 25 bp, Homo sapien
gacagcccagaagaggaagtgcagc

SEQ ID NO: 5766180 - DNA, 25 bp, Homo sapien
ggagctccccggagcagcccaggcc

SEQ ID NO: 5766181 - DNA, 25 bp, Homo sapien
ccggcccctgagctgcctcctccag

SEQ ID NO: 5766182 - DNA, 25 bp, Homo sapien
gaacgcgttgtggtgatcagcagct

SEQ ID NO: 5766183 - DNA, 25 bp, Homo sapien
caccctgtgccccagaaaggccccc

SEQ ID NO: 5766184 - DNA, 25 bp, Homo sapien
ccccctggggactctgtcagaggct

SEQ ID NO: 5766185 - DNA, 25 bp, Homo sapien
gaggcacaccagtggttcctcaagc

SEQ ID NO: 5766186 - DNA, 25 bp, Homo sapien
cttctgctccaaccccaaccaccgc

SEQ ID NO: 5766187 - DNA, 25 bp, Homo sapien
agccaagtgcccgaagctgctgcct

SEQ ID NO: 5766188 - DNA, 25 bp, Homo sapien
gtcgggcatgcagtgccccatctgc

SEQ ID NO: 5766189 - DNA, 25 bp, Homo sapien
acatcctgcccagctgcaaaggggc

SEQ ID NO: 5766190 - DNA, 25 bp, Homo sapien
tgtggtgatcagcagctcggaagac

SEQ ID NO: 5766191 - DNA, 25 bp, Homo sapien
ccctcaaccatcctgccaatgccca

SEQ ID NO: 5766192 - DNA, 25 bp, Homo sapien
ctcattaattcttggttaaggaatg

SEQ ID NO: 5766193 - DNA, 25 bp, Homo sapien
gccagtccagtctctgctgagagca

SEQ ID NO: 5766194 - DNA, 25 bp, Homo sapien
ccgacttctggtgctttgagtgcga

SEQ ID NO: 5766195 - DNA, 25 bp, Homo sapien
ccgagaccccctctgaaggccgcca

SEQ ID NO: 5766196 - DNA, 25 bp, Homo sapien
tccggggctcctcccatttatccca

SEQ ID NO: 5766197 - DNA, 25 bp, Homo sapien
tcggaccaggaggtgctggacatgc

SEQ ID NO: 5766198 - DNA, 25 bp, Homo sapien
cgtccaccgtgggatccgctacctg

SEQ ID NO: 5766199 - DNA, 25 bp, Homo sapien
gaccgccgagccacagtcctcgcca

SEQ ID NO: 5766200 - DNA, 25 bp, Homo sapien
aggcccggcccctagcagagctgcg

SEQ ID NO: 5766201 - DNA, 25 bp, Homo sapien
gcccgctgagcaggctgccaccccc

SEQ ID NO: 5766202 - DNA, 25 bp, Homo sapien
ccagcactcctgccatcacagggcc

SEQ ID NO: 5766203 - DNA, 25 bp, Homo sapien
ccgtgggatccgctacctgttgtac

SEQ ID NO: 5766204 - DNA, 25 bp, Homo sapien
tgccagcaatgccaggcggaagcca

SEQ ID NO: 5766205 - DNA, 25 bp, Homo sapien
cgcgctccttgacagcagccacagt

SEQ ID NO: 5766206 - DNA, 25 bp, Homo sapien
gatgccgaaaactcgtgcatggagc

SEQ ID NO: 5766207 - DNA, 25 bp, Homo sapien
tcaagccaccattccaggcctcttt

SEQ ID NO: 5766208 - DNA, 25 bp, Homo sapien
ccggagcagcccaggcccagcacct

SEQ ID NO: 5766209 - DNA, 25 bp, Homo sapien
gtgctttgagtgcgagcagctcctc

SEQ ID NO: 5766210 - DNA, 25 bp, Homo sapien
cagccaacacccctgcccggcccct

SEQ ID NO: 5766211 - DNA, 25 bp, Homo sapien
gcccagaagaggaagtgcagccaga

SEQ ID NO: 5766212 - DNA, 25 bp, Homo sapien
agcgcgactacgaggagatggccag

SEQ ID NO: 5766213 - DNA, 25 bp, Homo sapien
aggcagtctcaccaccccacctgga

SEQ ID NO: 5766214 - DNA, 25 bp, Homo sapien
tgttccaagccgctgtgctgctcgt

SEQ ID NO: 5766215 - DNA, 25 bp, Homo sapien
ctctgcgccaagtgcttcgaggcac

SEQ ID NO: 5766216 - DNA, 25 bp, Homo sapien
ctccaagatctaaaccgagaatcga

SEQ ID NO: 5766217 - DNA, 25 bp, Homo sapien
gcgcagagatccagcagcgacagga

SEQ ID NO: 5766218 - DNA, 25 bp, Homo sapien
ctgtcggccagctgggccgcgcgcg

SEQ ID NO: 5766219 - DNA, 25 bp, Homo sapien
ctgtcacccttgcactctcctgtgt

SEQ ID NO: 5766220 - DNA, 25 bp, Homo sapien
gaggctgtggacgcgcggtaccagc

SEQ ID NO: 5766221 - DNA, 25 bp, Homo sapien
cagggcccctcaaccatcctgccaa

SEQ ID NO: 5766222 - DNA, 25 bp, Homo sapien
gctctgccgcctgcgccaggaggag

SEQ ID NO: 5766223 - DNA, 25 bp, Homo sapien
tctgctccaaccccaaccaccgcac

SEQ ID NO: 5766224 - DNA, 25 bp, Homo sapien
ctggaagcctctccaattacattcc

SEQ ID NO: 5766225 - DNA, 25 bp, Homo sapien
aggaaggtcatcaagatggagtctg

SEQ ID NO: 5766226 - DNA, 25 bp, Homo sapien
cctcggaccaggaggtgctggacat

SEQ ID NO: 5766227 - DNA, 25 bp, Homo sapien
agagtgctacccttctcttgtaacc

SEQ ID NO: 5766228 - DNA, 25 bp, Homo sapien
agccagcactcctgccatcacaggg

SEQ ID NO: 5766229 - DNA, 25 bp, Homo sapien
cctgcacagagtagcactcattaat

SEQ ID NO: 5766230 - DNA, 25 bp, Homo sapien
gccccaggagcccaccatgcctccc

SEQ ID NO: 5766231 - DNA, 25 bp, Homo sapien
ccggatacgaggggctgtgcgatcc

SEQ ID NO: 5766232 - DNA, 25 bp, Homo sapien
tggtagctcacgtgcgggctcagga

SEQ ID NO: 5766233 - DNA, 25 bp, Homo sapien
atgacgcaggcgctgcaggagcagg

SEQ ID NO: 5766234 - DNA, 25 bp, Homo sapien
ccgaaaactcgtgcatggagcccat

SEQ ID NO: 5766235 - DNA, 25 bp, Homo sapien
ttacattcccaccaccctgtgcccc

SEQ ID NO: 5766236 - DNA, 25 bp, Homo sapien
gcacataccaccccccagcttggcc

SEQ ID NO: 5766237 - DNA, 25 bp, Homo sapien
atggagcccatggagaccgccgagc

SEQ ID NO: 5766238 - DNA, 25 bp, Homo sapien
acgaggggctgtgcgatcccgcagc

SEQ ID NO: 5766239 - DNA, 25 bp, Homo sapien
gcagccagacccagtgccccaggaa

SEQ ID NO: 5766240 - DNA, 25 bp, Homo sapien
ggcatgcagtgccccatctgccagg

SEQ ID NO: 5766241 - DNA, 25 bp, Homo sapien
gcgcctgcaggacctcagctcttgc

SEQ ID NO: 5766242 - DNA, 25 bp, Homo sapien
tggctgagattcaagccaccattcc

SEQ ID NO: 5766243 - DNA, 25 bp, Homo sapien
gccagcccagaggctgccagcactc

SEQ ID NO: 5766244 - DNA, 25 bp, Homo sapien
tggccagtggcgccggggaggcaga

SEQ ID NO: 5766245 - DNA, 25 bp, Homo sapien
agagctgcgcaaccagtcggtgcgt

SEQ ID NO: 5766246 - DNA, 25 bp, Homo sapien
tgagagtgctacccttctcttgtaa

SEQ ID NO: 5766247 - DNA, 25 bp, Homo sapien
aatagcacagccttccatgccccga

SEQ ID NO: 5766248 - DNA, 25 bp, Homo sapien
cacccgctgcaaagagtcggccgac

SEQ ID NO: 5766249 - DNA, 25 bp, Homo sapien
agccatccgccttcgccatgccctc

SEQ ID NO: 5766250 - DNA, 25 bp, Homo sapien
tctcaccaccccacctggatggacc

SEQ ID NO: 5766251 - DNA, 25 bp, Homo sapien
accagcccgctgagcaggctgccac

SEQ ID NO: 5766252 - DNA, 25 bp, Homo sapien
ctggaggcgtcgggcatgcagtgcc

SEQ ID NO: 5766253 - DNA, 25 bp, Homo sapien
aagatctaaaccgagaatcgaaact

SEQ ID NO: 5766254 - DNA, 25 bp, Homo sapien
tccatggaggcctctcaagtccaag

SEQ ID NO: 5766255 - DNA, 25 bp, Homo sapien
accccaccggatacgaggggctgtg

SEQ ID NO: 5766256 - DNA, 25 bp, Homo sapien
ctgcaaagagtcggccgacttctgg

SEQ ID NO: 5766257 - DNA, 25 bp, Homo sapien
tccagtttctgcgctgccagcaatg

SEQ ID NO: 5766258 - DNA, 25 bp, Homo sapien
aggaacatcctgcccagctgcaaag

SEQ ID NO: 5766259 - DNA, 25 bp, Homo sapien
gccctggataacgtctttttcgaga

SEQ ID NO: 5766260 - DNA, 25 bp, Homo sapien
ccgccgagccacagtcctcgccagc

SEQ ID NO: 5766261 - DNA, 25 bp, Homo sapien
gcgtcgggcatgcagtgccccatct

SEQ ID NO: 5766262 - DNA, 25 bp, Homo sapien
atccagcagcgacaggaggagctgg

SEQ ID NO: 5766263 - DNA, 25 bp, Homo sapien
tgacctggatgtctccaatacaacg

SEQ ID NO: 5766264 - DNA, 25 bp, Homo sapien
cacgtgcgggctcaggagcgcgagc

SEQ ID NO: 5766265 - DNA, 25 bp, Homo sapien
ccaagtgcctctggaagcctctcca

SEQ ID NO: 5766266 - DNA, 25 bp, Homo sapien
ctcaataaacacttgttgaaccatc

SEQ ID NO: 5766267 - DNA, 25 bp, Homo sapien
gttaaggaatgaatcaacgaatgaa

SEQ ID NO: 5766268 - DNA, 25 bp, Homo sapien
ccatcacagggcccctcaaccatcc

SEQ ID NO: 5766269 - DNA, 25 bp, Homo sapien
cctgcgccaggcgctctgccgcctg

SEQ ID NO: 5766270 - DNA, 25 bp, Homo sapien
gcctctccactaggcctctgccagg

SEQ ID NO: 5766271 - DNA, 25 bp, Homo sapien
ttcctgcgccaggcgctctgccgcc

SEQ ID NO: 5766272 - DNA, 25 bp, Homo sapien
ggcctctgagagtgctacccttctc

SEQ ID NO: 5766273 - DNA, 25 bp, Homo sapien
ccacagtcctcgccagcccactcct

SEQ ID NO: 5766274 - DNA, 25 bp, Homo sapien
gaaaactcgtgcatggagcccatgg

SEQ ID NO: 5766275 - DNA, 25 bp, Homo sapien
caggagcgccctgccgtccaccgtg

SEQ ID NO: 5766276 - DNA, 25 bp, Homo sapien
gctggacatgcacggtttcctgcgc

SEQ ID NO: 5766277 - DNA, 25 bp, Homo sapien
tcacgcgcagatgcacgcggctgtc

SEQ ID NO: 5766278 - DNA, 25 bp, Homo sapien
agagagccatccgccttcgccatgc

SEQ ID NO: 5766279 - DNA, 25 bp, Homo sapien
ccgctgagcaggctgccacccccga

SEQ ID NO: 5766280 - DNA, 25 bp, Homo sapien
aggatgaagtgctacgcctcggacc

SEQ ID NO: 5766281 - DNA, 25 bp, Homo sapien
gcctgcgccaggaggagccccagag

SEQ ID NO: 5766282 - DNA, 25 bp, Homo sapien
aaagatgcagctgtatccaagaaag

SEQ ID NO: 5766283 - DNA, 25 bp, Homo sapien
cacccttgcactctcctgtgttctg

SEQ ID NO: 5766284 - DNA, 25 bp, Homo sapien
gtccaagtgcctctggaagcctctc

SEQ ID NO: 5766285 - DNA, 25 bp, Homo sapien
ctgcaaaggggcatcagcccacccc

SEQ ID NO: 5766286 - DNA, 25 bp, Homo sapien
acagagagccatccgccttcgccat

SEQ ID NO: 5766287 - DNA, 25 bp, Homo sapien
atcacagggcccctcaaccatcctg

SEQ ID NO: 5766288 - DNA, 25 bp, Homo sapien
tcccagcttgacatgtcttccgtgg

SEQ ID NO: 5766289 - DNA, 25 bp, Homo sapien
cttctcttcacgcactccaagatct

SEQ ID NO: 5766290 - DNA, 25 bp, Homo sapien
catgcagtgccccatctgccaggcg

SEQ ID NO: 5766291 - DNA, 25 bp, Homo sapien
ggggactctgtcagaggctccatgg

SEQ ID NO: 5766292 - DNA, 25 bp, Homo sapien
aggcgcccgtcaagcaggcctctga

SEQ ID NO: 5766293 - DNA, 25 bp, Homo sapien
cgaggagctgatccgcgagcgcgtg

SEQ ID NO: 5766294 - DNA, 25 bp, Homo sapien
ccatgctcttacaggccctgcacag

SEQ ID NO: 5766295 - DNA, 25 bp, Homo sapien
agaagaggaagtgcagccagaccca

SEQ ID NO: 5766296 - DNA, 25 bp, Homo sapien
gctgggccgcgcgcgtgccgagacc

SEQ ID NO: 5766297 - DNA, 25 bp, Homo sapien
ctctccactaggcctctgccaggat

SEQ ID NO: 5766298 - DNA, 25 bp, Homo sapien
gccgaggatgttccaagccgctgtg

SEQ ID NO: 5766299 - DNA, 25 bp, Homo sapien
aggccccagcaggaccccgcccggc

SEQ ID NO: 5766300 - DNA, 25 bp, Homo sapien
tgagtgcgagcagctcctctgcgcc

SEQ ID NO: 5766301 - DNA, 25 bp, Homo sapien
accctcaattgcatcgggcccctat

SEQ ID NO: 5766302 - DNA, 25 bp, Homo sapien
ttctgtcacccttgcactctcctgt

SEQ ID NO: 5766303 - DNA, 25 bp, Homo sapien
ctcttgtaaccttgcagccaacacc

SEQ ID NO: 5766304 - DNA, 25 bp, Homo sapien
acaggccctgcacagagtagcactc

SEQ ID NO: 5766305 - DNA, 25 bp, Homo sapien
cacgggcagcgcgctggtgcagagg

SEQ ID NO: 5766306 - DNA, 25 bp, Homo sapien
cttcgaggcacaccagtggttcctc

SEQ ID NO: 5766307 - DNA, 25 bp, Homo sapien
tgccaggatctaagcccatgagcac

SEQ ID NO: 5766308 - DNA, 25 bp, Homo sapien
gaccctattgacgttgacctggatg

SEQ ID NO: 5766309 - DNA, 25 bp, Homo sapien
tgtggcacataccaccccccagctt

SEQ ID NO: 5766310 - DNA, 25 bp, Homo sapien
cccaggagcccaccatgcctccccc

SEQ ID NO: 5766311 - DNA, 25 bp, Homo sapien
aaccgagaatcgaaactaagctggg

SEQ ID NO: 5766312 - DNA, 25 bp, Homo sapien
gcgttgtggtgatcagcagctcgga

SEQ ID NO: 5766313 - DNA, 25 bp, Homo sapien
gcagctgtatccaagaaagccagcc

SEQ ID NO: 5766314 - DNA, 25 bp, Homo sapien
gaccccgcccggccccaggagccca

SEQ ID NO: 5766315 - DNA, 25 bp, Homo sapien
acctgttgtacagagcacagagagc

SEQ ID NO: 5766316 - DNA, 25 bp, Homo sapien
ccgcgcgcgtgccgagaccgaggag

SEQ ID NO: 5766317 - DNA, 25 bp, Homo sapien
acccttctcttgtaaccttgcagcc

SEQ ID NO: 5766318 - DNA, 25 bp, Homo sapien
gccgctgtgctgctcgtgcgcgctc

SEQ ID NO: 5766319 - DNA, 25 bp, Homo sapien
agaccgaggagctgatccgcgagcg

SEQ ID NO: 5766320 - DNA, 25 bp, Homo sapien
gcccactcctcgccagcccactcct

SEQ ID NO: 5766321 - DNA, 25 bp, Homo sapien
tccaaggcagtctcaccaccccacc

SEQ ID NO: 5766322 - DNA, 25 bp, Homo sapien
gctggacgccatgacgcaggcgctg

SEQ ID NO: 5766323 - DNA, 25 bp, Homo sapien
cagctcggaagactcagatgccgaa

SEQ ID NO: 5766324 - DNA, 25 bp, Homo sapien
ggctgccacccccgatgctgagcct

SEQ ID NO: 5766325 - DNA, 25 bp, Homo sapien
ccacagtgatctcaagtgcgacatc

SEQ ID NO: 5766326 - DNA, 25 bp, Homo sapien
ttggagcagttgttccccctgggga

SEQ ID NO: 5766327 - DNA, 25 bp, Homo sapien
gtcaagcaggcctctgagagtgcta

SEQ ID NO: 5766328 - DNA, 25 bp, Homo sapien
gcccagcacctccaaggcagtctca

SEQ ID NO: 5766329 - DNA, 25 bp, Homo sapien
cctctgccaggatctaagcccatga

SEQ ID NO: 5766330 - DNA, 25 bp, Homo sapien
ggtccatggagcctgcacccgcccg

SEQ ID NO: 5766331 - DNA, 25 bp, Homo sapien
cccggccccaggagcccaccatgcc

SEQ ID NO: 5766332 - DNA, 25 bp, Homo sapien
gataacgtctttttcgagagtctgc

SEQ ID NO: 5766333 - DNA, 25 bp, Homo sapien
gccggggaggcagaggaacgcgttg

SEQ ID NO: 5766334 - DNA, 25 bp, Homo sapien
cccgatgctgagcctcacagcgagc

SEQ ID NO: 5766335 - DNA, 25 bp, Homo sapien
acttctgtcacccttgcactctcct

SEQ ID NO: 5766336 - DNA, 25 bp, Homo sapien
ctacccttctcttgtaaccttgcag

SEQ ID NO: 5766337 - DNA, 25 bp, Homo sapien
aggctccatggaggcctctcaagtc

SEQ ID NO: 5766338 - DNA, 25 bp, Homo sapien
gcccctcaaccatcctgccaatgcc

SEQ ID NO: 5766339 - DNA, 25 bp, Homo sapien
ccaggcgcccgtcaagcaggcctct

SEQ ID NO: 5766340 - DNA, 25 bp, Homo sapien
gagtagcactcattaattcttggtt

SEQ ID NO: 5766341 - DNA, 25 bp, Homo sapien
acccgcccgatctccgaggccccag

SEQ ID NO: 5766342 - DNA, 25 bp, Homo sapien
accgatggcttcgacgagttcaagg

SEQ ID NO: 5766343 - DNA, 25 bp, Homo sapien
atgctcttacaggccctgcacagag

SEQ ID NO: 5766344 - DNA, 25 bp, Homo sapien
cacagggcccctcaaccatcctgcc

SEQ ID NO: 5766345 - DNA, 25 bp, Homo sapien
gcctcctccagcccatgctcttaca

SEQ ID NO: 5766346 - DNA, 25 bp, Homo sapien
caccccaagcctctccactaggcct

SEQ ID NO: 5766347 - DNA, 25 bp, Homo sapien
cccaccccaagcctctccactaggc

SEQ ID NO: 5766348 - DNA, 25 bp, Homo sapien
caagtgcttcgaggcacaccagtgg

SEQ ID NO: 5766349 - DNA, 25 bp, Homo sapien
ggagcgccctgccgtccaccgtggg

SEQ ID NO: 5766350 - DNA, 25 bp, Homo sapien
acagtcctcgccagcccactcctcg

SEQ ID NO: 5766351 - DNA, 25 bp, Homo sapien
gtgcccgaagctgctgccttgtctg

SEQ ID NO: 5766352 - DNA, 25 bp, Homo sapien
cctccccttctcctccatggcttcc

SEQ ID NO: 5766353 - DNA, 25 bp, Homo sapien
caggagcccaccatgcctccccccg

SEQ ID NO: 5766354 - DNA, 25 bp, Homo sapien
aattacattcccaccaccctgtgcc

SEQ ID NO: 5766355 - DNA, 25 bp, Homo sapien
accgaggagctgatccgcgagcgcg

SEQ ID NO: 5766356 - DNA, 25 bp, Homo sapien
ccattccaggcctctttgcccaaga

SEQ ID NO: 5766357 - DNA, 25 bp, Homo sapien
gcggctgtcggccagctgggccgcg

SEQ ID NO: 5766358 - DNA, 25 bp, Homo sapien
aagtccaagtgcctctggaagcctc

SEQ ID NO: 5766359 - DNA, 25 bp, Homo sapien
gacccccaccccaagcctctccact

SEQ ID NO: 5766360 - DNA, 25 bp, Homo sapien
gcaggaccccgcccggccccaggag

SEQ ID NO: 5766361 - DNA, 25 bp, Homo sapien
ggcaaggttggctcggagctccccg

SEQ ID NO: 5766362 - DNA, 25 bp, Homo sapien
gtttcctgcgccaggcgctctgccg

SEQ ID NO: 5766363 - DNA, 25 bp, Homo sapien
ggaggcagaggaacgcgttgtggtg

SEQ ID NO: 5766364 - DNA, 25 bp, Homo sapien
gcctctggaagcctctccaattaca

SEQ ID NO: 5766365 - DNA, 25 bp, Homo sapien
gcaggagcaggatagtgcctttggc

SEQ ID NO: 5766366 - DNA, 25 bp, Homo sapien
tcttcctgcccaacagcaaccacgt

SEQ ID NO: 5766367 - DNA, 25 bp, Homo sapien
tctgccaggcgccctggcccctagg

SEQ ID NO: 5766368 - DNA, 25 bp, Homo sapien
ctgcaagctgccgtgcgcaccgatg

SEQ ID NO: 5766369 - DNA, 25 bp, Homo sapien
aggccgccagcccagccccagcccc

SEQ ID NO: 5766370 - DNA, 25 bp, Homo sapien
tctggtgctttgagtgcgagcagct

SEQ ID NO: 5766371 - DNA, 25 bp, Homo sapien
cgggcatgcagtgccccatctgcca

SEQ ID NO: 5766372 - DNA, 25 bp, Homo sapien
cccctattcggacttggtctcccca

SEQ ID NO: 5766373 - DNA, 25 bp, Homo sapien
cttctcctccatggcttcccagctt

SEQ ID NO: 5766374 - DNA, 25 bp, Homo sapien
tgtaccggcagattgtggatgcgca

SEQ ID NO: 5766375 - DNA, 25 bp, Homo sapien
cgagagtctgcagcggcgcctgtcg

SEQ ID NO: 5766376 - DNA, 25 bp, Homo sapien
agtgcgacatcagcgcagagatcca

SEQ ID NO: 5766377 - DNA, 25 bp, Homo sapien
agcgcgagctgctggaggctgtgga

SEQ ID NO: 5766378 - DNA, 25 bp, Homo sapien
tgtacagagcacagagagccatccg

SEQ ID NO: 5766379 - DNA, 25 bp, Homo sapien
ccccaggaaggtcatcaagatggag

SEQ ID NO: 5766380 - DNA, 25 bp, Homo sapien
ggcacaccagtggttcctcaagcac

SEQ ID NO: 5766381 - DNA, 25 bp, Homo sapien
acccctgcccggcccctgagctgcc

SEQ ID NO: 5766382 - DNA, 25 bp, Homo sapien
tcaccaccccacctggatggaccgc

SEQ ID NO: 5766383 - DNA, 25 bp, Homo sapien
gttcacgcgcagatgcacgcggctg

SEQ ID NO: 5766384 - DNA, 25 bp, Homo sapien
tagccccaggagccccgtcatagga

SEQ ID NO: 5766385 - DNA, 25 bp, Homo sapien
caggggaaagatgcagctgtatcca

SEQ ID NO: 5766386 - DNA, 25 bp, Homo sapien
cccatggagaccgccgagccacagt

SEQ ID NO: 5766387 - DNA, 25 bp, Homo sapien
ggaagtgcagccagacccagtgccc

SEQ ID NO: 5766388 - DNA, 25 bp, Homo sapien
acctggatgtctccaatacaacgac

SEQ ID NO: 5766389 - DNA, 25 bp, Homo sapien
ggagcctccagcctgccctgtggca

SEQ ID NO: 5766390 - DNA, 25 bp, Homo sapien
ctgcgccaggaggagccccagagcc

SEQ ID NO: 5766391 - DNA, 25 bp, Homo sapien
gtctccccatgtggtccaagccagc

SEQ ID NO: 5766392 - DNA, 25 bp, Homo sapien
gcgagcccccgcttcggaggaggag

SEQ ID NO: 5766393 - DNA, 25 bp, Homo sapien
cccttctcctccatggcttcccagc

SEQ ID NO: 5766394 - DNA, 25 bp, Homo sapien
ccaagccgctgtgctgctcgtgcgc

SEQ ID NO: 5766395 - DNA, 25 bp, Homo sapien
ccagtctctgctgagagcacaagga

SEQ ID NO: 5766396 - DNA, 25 bp, Homo sapien
gcacgcggctgtcggccagctgggc

SEQ ID NO: 5766397 - DNA, 25 bp, Homo sapien
agctcacgtgcgggctcaggagcgc

SEQ ID NO: 5766398 - DNA, 25 bp, Homo sapien
ctcctgccatcacagggcccctcaa

SEQ ID NO: 5766399 - DNA, 25 bp, Homo sapien
tggcacataccaccccccagcttgg

SEQ ID NO: 5766400 - DNA, 25 bp, Homo sapien
caccccccagcttggcctccccacc

SEQ ID NO: 5766401 - DNA, 25 bp, Homo sapien
cctctcaagtccaagtgcctctgga

SEQ ID NO: 5766402 - DNA, 25 bp, Homo sapien
aggcccagcacctccaaggcagtct

SEQ ID NO: 5766403 - DNA, 25 bp, Homo sapien
cgcacgggcagcgcgctggtgcaga

SEQ ID NO: 5766404 - DNA, 25 bp, Homo sapien
acgcgcggtaccagcgcgactacga

SEQ ID NO: 5766405 - DNA, 25 bp, Homo sapien
gatagtgcctttggcgcggttcacg

SEQ ID NO: 5766406 - DNA, 25 bp, Homo sapien
gaaggaggcaaggttggctcggagc

SEQ ID NO: 5766407 - DNA, 25 bp, Homo sapien
agctcttgcatcacccaggggaaag

SEQ ID NO: 5766408 - DNA, 25 bp, Homo sapien
gagtccctggccaatagcacagcct

SEQ ID NO: 5766409 - DNA, 25 bp, Homo sapien
ggatgctgtgctgcagcgcatccgc

SEQ ID NO: 5766410 - DNA, 25 bp, Homo sapien
cccagaaaggccccccatcagccca

SEQ ID NO: 5766411 - DNA, 25 bp, Homo sapien
gccaccattccaggcctctttgccc

SEQ ID NO: 5766412 - DNA, 25 bp, Homo sapien
acatcttctgctccaaccccaacca

SEQ ID NO: 5766413 - DNA, 25 bp, Homo sapien
aaacacttgttgaaccatcaaaaaa

SEQ ID NO: 5766414 - DNA, 25 bp, Homo sapien
ggcccctagcagagctgcgcaacca

SEQ ID NO: 5766415 - DNA, 25 bp, Homo sapien
agactcttggagcagttgttccccc

SEQ ID NO: 5766416 - DNA, 25 bp, Homo sapien
ggcccctattcggacttggtctccc

SEQ ID NO: 5766417 - DNA, 25 bp, Homo sapien
tccaggcctctttgcccaagaaaga

SEQ ID NO: 5766418 - DNA, 25 bp, Homo sapien
cagcgacaggaggagctggacgcca

SEQ ID NO: 5766419 - DNA, 25 bp, Homo sapien
agttcaaggtgcgcctgcaggacct

SEQ ID NO: 5766420 - DNA, 25 bp, Homo sapien
gaatcaacgaatgaatggctatgca

SEQ ID NO: 5766421 - DNA, 25 bp, Homo sapien
agagtcggccgacttctggtgcttt

SEQ ID NO: 5766422 - DNA, 25 bp, Homo sapien
cccaggggaaagatgcagctgtatc

SEQ ID NO: 5766423 - DNA, 25 bp, Homo sapien
caggatgcctggaggcgtcgggcat

SEQ ID NO: 5766424 - DNA, 25 bp, Homo sapien
gcgcaggctgtgtgcacccgctgca

SEQ ID NO: 5766425 - DNA, 25 bp, Homo sapien
ccctaggtgcagacacacccgccct

SEQ ID NO: 5766426 - DNA, 25 bp, Homo sapien
ccaatacaacgacagcccagaagag

SEQ ID NO: 5766427 - DNA, 25 bp, Homo sapien
catctactgccgaggatgttccaag

SEQ ID NO: 5766428 - DNA, 25 bp, Homo sapien
gatcccgcagccgctccctccgggg

SEQ ID NO: 5766429 - DNA, 25 bp, Homo sapien
tggacggcacccgcaagaccaacaa

SEQ ID NO: 5766430 - DNA, 25 bp, Homo sapien
tgtggctgctcaataaacacttgtt

SEQ ID NO: 5766431 - DNA, 25 bp, Homo sapien
cactcccagggaccctattgacgtt

SEQ ID NO: 5766432 - DNA, 25 bp, Homo sapien
aggatagtgcctttggcgcggttca

SEQ ID NO: 5766433 - DNA, 25 bp, Homo sapien
gtgggatccgctacctgttgtacag

SEQ ID NO: 5766434 - DNA, 25 bp, Homo sapien
tccagcccatgctcttacaggccct

SEQ ID NO: 5766435 - DNA, 25 bp, Homo sapien
tcctcaagcacgaggcccggcccct

SEQ ID NO: 5766436 - DNA, 25 bp, Homo sapien
actcgtgcatggagcccatggagac

SEQ ID NO: 5766437 - DNA, 25 bp, Homo sapien
tcggtgtaccggcagattgtggatg

SEQ ID NO: 5766438 - DNA, 25 bp, Homo sapien
cgagcagctcctctgcgccaagtgc

SEQ ID NO: 5766439 - DNA, 25 bp, Homo sapien
ccagcttggcctccccaccagcccg

SEQ ID NO: 5766440 - DNA, 25 bp, Homo sapien
agctccccggagcagcccaggccca

SEQ ID NO: 5766441 - DNA, 25 bp, Homo sapien
cctgcccaacagcaaccacgtggcc

SEQ ID NO: 5766442 - DNA, 25 bp, Homo sapien
agctggggtccatggagcctgcacc

SEQ ID NO: 5766443 - DNA, 25 bp, Homo sapien
gaccagcatctactgccgaggatgt

SEQ ID NO: 5766444 - DNA, 25 bp, Homo sapien
tctgcagcggcgcctgtcggtgtac

SEQ ID NO: 5766445 - DNA, 25 bp, Homo sapien
gtggacgcgcggtaccagcgcgact

SEQ ID NO: 5766446 - DNA, 25 bp, Homo sapien
ggcgctgcaggagcaggatagtgcc

SEQ ID NO: 5766447 - DNA, 25 bp, Homo sapien
atgctgagcctcacagcgagcctcc

SEQ ID NO: 5766448 - DNA, 25 bp, Homo sapien
ccctccgcttgcaccctcaattgca

SEQ ID NO: 5766449 - DNA, 25 bp, Homo sapien
gcagccacagtgatctcaagtgcga

SEQ ID NO: 5766450 - DNA, 25 bp, Homo sapien
cagagcctgcaagctgccgtgcgca

SEQ ID NO: 5766451 - DNA, 25 bp, Homo sapien
ccctctgaaggccgccagcccagcc

SEQ ID NO: 5766452 - DNA, 25 bp, Homo sapien
ggatgcctggaggcgtcgggcatgc

SEQ ID NO: 5766453 - DNA, 25 bp, Homo sapien
gagctggacgccatgacgcaggcgc

SEQ ID NO: 5766454 - DNA, 25 bp, Homo sapien
gttgttccccctggggactctgtca

SEQ ID NO: 5766455 - DNA, 25 bp, Homo sapien
atcgaaactaagctggggtccatgg

SEQ ID NO: 5766456 - DNA, 25 bp, Homo sapien
ggctatgcatggacctctgggcagg

SEQ ID NO: 5766457 - DNA, 25 bp, Homo sapien
gtgcgcaccgatggcttcgacgagt

SEQ ID NO: 5766458 - DNA, 25 bp, Homo sapien
caacgaatgaatggctatgcatgga

SEQ ID NO: 5766459 - DNA, 25 bp, Homo sapien
gcggcgcctgtcggtgtaccggcag

SEQ ID NO: 5766460 - DNA, 25 bp, Homo sapien
ccccaagcctctccactaggcctct

SEQ ID NO: 5766461 - DNA, 25 bp, Homo sapien
tcctgatcaccaggagcgccctgcc

SEQ ID NO: 5766462 - DNA, 25 bp, Homo sapien
caccatgcctccccccgagaccccc

SEQ ID NO: 5766463 - DNA, 25 bp, Homo sapien
tcccaggcgcccgtcaagcaggcct

SEQ ID NO: 5766464 - DNA, 25 bp, Homo sapien
gcccagactcttggagcagttgttc

SEQ ID NO: 5766465 - DNA, 25 bp, Homo sapien
gtgccccagaaaggccccccatcag

SEQ ID NO: 5766466 - DNA, 25 bp, Homo sapien
tcggaagactcagatgccgaaaact

SEQ ID NO: 5766467 - DNA, 25 bp, Homo sapien
gggaccctattgacgttgacctgga

SEQ ID NO: 5766468 - DNA, 25 bp, Homo sapien
cgccagcccactcctcgccagtcca

SEQ ID NO: 5766469 - DNA, 25 bp, Homo sapien
gtatccaagaaagccagcccagagg

SEQ ID NO: 5766470 - DNA, 25 bp, Homo sapien
gcaggatagtgcctttggcgcggtt

SEQ ID NO: 5766471 - DNA, 25 bp, Homo sapien
ctgggcagggagacctgggtcttct

SEQ ID NO: 5766472 - DNA, 25 bp, Homo sapien
ccgccctggataacgtctttttcga

SEQ ID NO: 5766473 - DNA, 25 bp, Homo sapien
gtgcagacacacccgccctggataa

SEQ ID NO: 5766474 - DNA, 25 bp, Homo sapien
cgcccggccccaggagcccaccatg

SEQ ID NO: 5766475 - DNA, 25 bp, Homo sapien
ctgcgcaaccagtcggtgcgtgagt

SEQ ID NO: 5766476 - DNA, 25 bp, Homo sapien
accttgcagccaacacccctgcccg

SEQ ID NO: 5766477 - DNA, 25 bp, Homo sapien
gagaggggaaggctaaggcatggct

SEQ ID NO: 5766478 - DNA, 25 bp, Homo sapien
agtgcgagcagctcctctgcgccaa

SEQ ID NO: 5766479 - DNA, 25 bp, Homo sapien
aggaggcaaggttggctcggagctc

SEQ ID NO: 5766480 - DNA, 25 bp, Homo sapien
cagccccagccctacagagcgagcc

SEQ ID NO: 5766481 - DNA, 25 bp, Homo sapien
agcccagccccagccccagccctac

SEQ ID NO: 5766482 - DNA, 25 bp, Homo sapien
gctacgcctcggaccaggaggtgct

SEQ ID NO: 5766483 - DNA, 25 bp, Homo sapien
gctgagcctcacagcgagcctcctg

SEQ ID NO: 5766484 - DNA, 25 bp, Homo sapien
cgaggatgttccaagccgctgtgct

SEQ ID NO: 5766485 - DNA, 25 bp, Homo sapien
ggccgcctggatgctgtgctgcagc

SEQ ID NO: 5766486 - DNA, 25 bp, Homo sapien
accacgtggccagtggcgccgggga

SEQ ID NO: 5766487 - DNA, 25 bp, Homo sapien
acgttgacctggatgtctccaatac

SEQ ID NO: 5766488 - DNA, 25 bp, Homo sapien
cctcgccagcccactcctcgccagc

SEQ ID NO: 5766489 - DNA, 25 bp, Homo sapien
tcgccatgccctccgcttgcaccct

SEQ ID NO: 5766490 - DNA, 25 bp, Homo sapien
tcctctgcgccaagtgcttcgaggc

SEQ ID NO: 5766491 - DNA, 25 bp, Homo sapien
agcactcattaattcttggttaagg

SEQ ID NO: 5766492 - DNA, 25 bp, Homo sapien
aggttggctcggagctccccggagc

SEQ ID NO: 5766493 - DNA, 25 bp, Homo sapien
gagcgcgtgcgccaggtggtagctc

SEQ ID NO: 5766494 - DNA, 25 bp, Homo sapien
ggatgcgcaggctgtgtgcacccgc

SEQ ID NO: 5766495 - DNA, 25 bp, Homo sapien
gcgacaggaggagctggacgccatg

SEQ ID NO: 5766496 - DNA, 25 bp, Homo sapien
cctctttgcccaagaaagaaacttc

SEQ ID NO: 5766497 - DNA, 25 bp, Homo sapien
tgccccgacccccaccccaagcctc

SEQ ID NO: 5766498 - DNA, 25 bp, Homo sapien
cggctgggccgcctggatgctgtgc

SEQ ID NO: 5766499 - DNA, 25 bp, Homo sapien
ccaccagcccgctgagcaggctgcc

SEQ ID NO: 5766500 - DNA, 25 bp, Homo sapien
gccgccagcccagccccagccccag

SEQ ID NO: 5766501 - DNA, 25 bp, Homo sapien
cttccatgccccgacccccacccca

SEQ ID NO: 5766502 - DNA, 25 bp, Homo sapien
tggctcaacaacttttttgccctcc

SEQ ID NO: 5766503 - DNA, 25 bp, Homo sapien
gcacagagagccatccgccttcgcc

SEQ ID NO: 5766504 - DNA, 25 bp, Homo sapien
gtgcgatcccgcagccgctccctcc

SEQ ID NO: 5766505 - DNA, 25 bp, Homo sapien
agctgctgccttgtctgcacacgct

SEQ ID NO: 5766506 - DNA, 25 bp, Homo sapien
gaaggtcatcaagatggagtctgag

SEQ ID NO: 5766507 - DNA, 25 bp, Homo sapien
tgctgcagcgcatccgcacgggcag

SEQ ID NO: 5766508 - DNA, 25 bp, Homo sapien
tagcagagctgcgcaaccagtcggt

SEQ ID NO: 5766509 - DNA, 25 bp, Homo sapien
cgcctcggaccaggaggtgctggac

SEQ ID NO: 5766510 - DNA, 25 bp, Homo sapien
gcatggagcccatggagaccgccga

SEQ ID NO: 5766511 - DNA, 25 bp, Homo sapien
aagaggaagtgcagccagacccagt

SEQ ID NO: 5766512 - DNA, 25 bp, Homo sapien
caataaacacttgttgaaccatcaa

SEQ ID NO: 5766513 - DNA, 25 bp, Homo sapien
caacagcaaccacgtggccagtggc

SEQ ID NO: 5766514 - DNA, 25 bp, Homo sapien
acaaggagcctccagcctgccctgt

SEQ ID NO: 5766515 - DNA, 25 bp, Homo sapien
tcgccagtccagtctctgctgagag

SEQ ID NO: 5766516 - DNA, 25 bp, Homo sapien
ctcctccagcccatgctcttacagg

SEQ ID NO: 5766517 - DNA, 25 bp, Homo sapien
gtgcctttggcgcggttcacgcgca

SEQ ID NO: 5766518 - DNA, 25 bp, Homo sapien
atcccaagacctggcagatgtggct

SEQ ID NO: 5766519 - DNA, 25 bp, Homo sapien
ggatggaccgcctagccccaggagc

SEQ ID NO: 5766520 - DNA, 25 bp, Homo sapien
tgccatcacagggcccctcaaccat

SEQ ID NO: 5766521 - DNA, 25 bp, Homo sapien
cccaagacctggcagatgtggctgc

SEQ ID NO: 5766522 - DNA, 25 bp, Homo sapien
cagatgtggctgctcaataaacact

SEQ ID NO: 5766523 - DNA, 25 bp, Homo sapien
ggctaaggcatggctgagattcaag

SEQ ID NO: 5766524 - DNA, 25 bp, Homo sapien
tccagcctgccctgtggcacatacc

SEQ ID NO: 5766525 - DNA, 25 bp, Homo sapien
acctggcagatgtggctgctcaata

SEQ ID NO: 5766526 - DNA, 25 bp, Homo sapien
caggagccccgtcataggaagtgag

SEQ ID NO: 5766527 - DNA, 25 bp, Homo sapien
cagcagccacagtgatctcaagtgc

SEQ ID NO: 5766528 - DNA, 25 bp, Homo sapien
tgccttgtctgcacacgctgtgctc

SEQ ID NO: 5766529 - DNA, 25 bp, Homo sapien
gcatggacctctgggcagggagacc

SEQ ID NO: 5766530 - DNA, 25 bp, Homo sapien
tgatctcaagtgcgacatcagcgca

SEQ ID NO: 5766531 - DNA, 25 bp, Homo sapien
aggccctgcacagagtagcactcat

SEQ ID NO: 5766532 - DNA, 25 bp, Homo sapien
acacttgttgaaccatcaaaaaaaa

SEQ ID NO: 5766533 - DNA, 25 bp, Homo sapien
ccagtggttcctcaagcacgaggcc

SEQ ID NO: 5766534 - DNA, 25 bp, Homo sapien
gactggctatcccaagacctggcag

SEQ ID NO: 5766535 - DNA, 25 bp, Homo sapien
gagcaggatagtgcctttggcgcgg

SEQ ID NO: 5766536 - DNA, 25 bp, Homo sapien
ccaggaaggtcatcaagatggagtc

SEQ ID NO: 5766537 - DNA, 25 bp, Homo sapien
aattgcatcgggcccctattcggac

SEQ ID NO: 5766538 - DNA, 25 bp, Homo sapien
ggcccctgagctgcctcctccagcc

SEQ ID NO: 5766539 - DNA, 25 bp, Homo sapien
tcggtgcgtgagttcctggacggca

SEQ ID NO: 5766540 - DNA, 25 bp, Homo sapien
gccccatctgccaggcgccctggcc

SEQ ID NO: 5766541 - DNA, 25 bp, Homo sapien
cagaaaggccccccatcagcccagt

SEQ ID NO: 5766542 - DNA, 25 bp, Homo sapien
tcagcagctcggaagactcagatgc

SEQ ID NO: 5766543 - DNA, 25 bp, Homo sapien
ccccgcttcggaggaggagttccag

SEQ ID NO: 5766544 - DNA, 25 bp, Homo sapien
cagcccgctgagcaggctgccaccc

SEQ ID NO: 5766545 - DNA, 25 bp, Homo sapien
gctgccagcactcccagggacccta

SEQ ID NO: 5766546 - DNA, 25 bp, Homo sapien
ctgaccagcatctactgccgaggat

SEQ ID NO: 5766547 - DNA, 25 bp, Homo sapien
gcacccgcccgatctccgaggcccc

SEQ ID NO: 5766548 - DNA, 25 bp, Homo sapien
cttcccagcttgacatgtcttccgt

SEQ ID NO: 5766549 - DNA, 25 bp, Homo sapien
tggaggctgtggacgcgcggtacca

SEQ ID NO: 5766550 - DNA, 25 bp, Homo sapien
gtagctcacgtgcgggctcaggagc

SEQ ID NO: 5766551 - DNA, 25 bp, Homo sapien
cgccaggcgctctgccgcctgcgcc

SEQ ID NO: 5766552 - DNA, 25 bp, Homo sapien
atcgggcccctattcggacttggtc

SEQ ID NO: 5766553 - DNA, 25 bp, Homo sapien
catccgcacgggcagcgcgctggtg

SEQ ID NO: 5766554 - DNA, 25 bp, Homo sapien
aggaacgcgttgtggtgatcagcag

SEQ ID NO: 5766555 - DNA, 25 bp, Homo sapien
gaggtcttcctgcccaacagcaacc

SEQ ID NO: 5766556 - DNA, 25 bp, Homo sapien
agcagcccaggcccagcacctccaa

SEQ ID NO: 5766557 - DNA, 25 bp, Homo sapien
ttgcaccctcaattgcatcgggccc

SEQ ID NO: 5766558 - DNA, 25 bp, Homo sapien
cgctgaccagcatctactgccgagg

SEQ ID NO: 5766559 - DNA, 25 bp, Homo sapien
ctattgacgttgacctggatgtctc

SEQ ID NO: 5766560 - DNA, 25 bp, Homo sapien
agccacagtgatctcaagtgcgaca

SEQ ID NO: 5766561 - DNA, 25 bp, Homo sapien
gatgttccaagccgctgtgctgctc

SEQ ID NO: 5766562 - DNA, 25 bp, Homo sapien
cggttcacgcgcagatgcacgcggc

SEQ ID NO: 5766563 - DNA, 25 bp, Homo sapien
ctgcaggagcaggatagtgcctttg

SEQ ID NO: 5766564 - DNA, 25 bp, Homo sapien
tctactgccgaggatgttccaagcc

SEQ ID NO: 5766565 - DNA, 25 bp, Homo sapien
ccatgtggtccaagccagcactcct

SEQ ID NO: 5766566 - DNA, 25 bp, Homo sapien
gaggaggagttccagtttctgcgct

SEQ ID NO: 5766567 - DNA, 25 bp, Homo sapien
cccagagcctgcaagctgccgtgcg

SEQ ID NO: 5766568 - DNA, 25 bp, Homo sapien
cgccatgacgcaggcgctgcaggag

SEQ ID NO: 5766569 - DNA, 25 bp, Homo sapien
gctgtgtgcacccgctgcaaagagt

SEQ ID NO: 5766570 - DNA, 25 bp, Homo sapien
cagctgggccgcgcgcgtgccgaga

SEQ ID NO: 5766571 - DNA, 25 bp, Homo sapien
agacctggcagatgtggctgctcaa

SEQ ID NO: 5766572 - DNA, 25 bp, Homo sapien
ccactcctcgccagcccactcctcg

SEQ ID NO: 5766573 - DNA, 25 bp, Homo sapien
actacgaggagatggccagtcggct

SEQ ID NO: 5766574 - DNA, 25 bp, Homo sapien
ccgagaatcgaaactaagctggggt

SEQ ID NO: 5766575 - DNA, 25 bp, Homo sapien
tgcagcggcgcctgtcggtgtaccg

SEQ ID NO: 5766576 - DNA, 25 bp, Homo sapien
agacccagtgccccaggaaggtcat

SEQ ID NO: 5766577 - DNA, 25 bp, Homo sapien
gcgtgccgagaccgaggagctgatc

SEQ ID NO: 5766578 - DNA, 25 bp, Homo sapien
ccaagcctctccactaggcctctgc

SEQ ID NO: 5766579 - DNA, 25 bp, Homo sapien
ggctgtggacgcgcggtaccagcgc

SEQ ID NO: 5766580 - DNA, 25 bp, Homo sapien
atgcacgcggctgtcggccagctgg

SEQ ID NO: 5766581 - DNA, 25 bp, Homo sapien
atctcaagtgcgacatcagcgcaga

SEQ ID NO: 5766582 - DNA, 25 bp, Homo sapien
ggcagattgtggatgcgcaggctgt

SEQ ID NO: 5766583 - DNA, 25 bp, Homo sapien
tttatcccagtggctcaacaacttt

SEQ ID NO: 5766584 - DNA, 25 bp, Homo sapien
ctggctatcccaagacctggcagat

SEQ ID NO: 5766585 - DNA, 25 bp, Homo sapien
cccagggaccctattgacgttgacc

SEQ ID NO: 5766586 - DNA, 25 bp, Homo sapien
attcaagccaccattccaggcctct

SEQ ID NO: 5766587 - DNA, 25 bp, Homo sapien
ctgggtcttctctggctgagagggg

SEQ ID NO: 5766588 - DNA, 25 bp, Homo sapien
aggagatggccagtcggctgggccg

SEQ ID NO: 5766589 - DNA, 25 bp, Homo sapien
ctgatcaccaggagcgccctgccgt

SEQ ID NO: 5766590 - DNA, 25 bp, Homo sapien
ttggcgcggttcacgcgcagatgca

SEQ ID NO: 5766591 - DNA, 25 bp, Homo sapien
ggggaggcagaggaacgcgttgtgg

SEQ ID NO: 5766592 - DNA, 25 bp, Homo sapien
gggactggctatcccaagacctggc

SEQ ID NO: 5766593 - DNA, 25 bp, Homo sapien
ggaagcctctccaattacattccca

SEQ ID NO: 5766594 - DNA, 25 bp, Homo sapien
gaaggccgccagcccagccccagcc

SEQ ID NO: 5766595 - DNA, 25 bp, Homo sapien
ttttgccctccccttctcctccatg

SEQ ID NO: 5766596 - DNA, 25 bp, Homo sapien
cagcaggaccccgcccggccccagg

SEQ ID NO: 5766597 - DNA, 25 bp, Homo sapien
aggggcatcagcccaccccaccgga

SEQ ID NO: 5766598 - DNA, 25 bp, Homo sapien
gcctgccctgtggcacataccaccc

SEQ ID NO: 5766599 - DNA, 25 bp, Homo sapien
acataccaccccccagcttggcctc

SEQ ID NO: 5766600 - DNA, 25 bp, Homo sapien
gtctttttcgagagtctgcagcggc

SEQ ID NO: 5766601 - DNA, 25 bp, Homo sapien
gctgctcgtgcgcgctccttgacag

SEQ ID NO: 5766602 - DNA, 25 bp, Homo sapien
cctgccatcacagggcccctcaacc

SEQ ID NO: 5766603 - DNA, 25 bp, Homo sapien
ccctattgacgttgacctggatgtc

SEQ ID NO: 5766604 - DNA, 25 bp, Homo sapien
ggccgcgcgcgtgccgagaccgagg

SEQ ID NO: 5766605 - DNA, 25 bp, Homo sapien
tcagctcttgcatcacccaggggaa

SEQ ID NO: 5766606 - DNA, 25 bp, Homo sapien
agtctgcagcggcgcctgtcggtgt

SEQ ID NO: 5766607 - DNA, 25 bp, Homo sapien
acacacccgccctggataacgtctt

SEQ ID NO: 5766608 - DNA, 25 bp, Homo sapien
ctcaggagcgcgagctgctggaggc

SEQ ID NO: 5766609 - DNA, 25 bp, Homo sapien
gactcagatgccgaaaactcgtgca

SEQ ID NO: 5766610 - DNA, 25 bp, Homo sapien
cactctcctgtgttctgagtccctg

SEQ ID NO: 5766611 - DNA, 25 bp, Homo sapien
ccttctcttgtaaccttgcagccaa

SEQ ID NO: 5766612 - DNA, 25 bp, Homo sapien
cacggtttcctgcgccaggcgctct

SEQ ID NO: 5766613 - DNA, 25 bp, Homo sapien
cttcagcttctcttcacgcactcca

SEQ ID NO: 5766614 - DNA, 25 bp, Homo sapien
agccacagtcctcgccagcccactc

SEQ ID NO: 5766615 - DNA, 25 bp, Homo sapien
cctcagctcttgcatcacccagggg

SEQ ID NO: 5766616 - DNA, 25 bp, Homo sapien
gaccaacaacatcttctgctccaac

SEQ ID NO: 5766617 - DNA, 25 bp, Homo sapien
cgggcagcgcgctggtgcagaggat

SEQ ID NO: 5766618 - DNA, 25 bp, Homo sapien
ccccgtcataggaagtgaggtcttc

SEQ ID NO: 5766619 - DNA, 25 bp, Homo sapien
ttcacgcactccaagatctaaaccg

SEQ ID NO: 5766620 - DNA, 25 bp, Homo sapien
tactgccgaggatgttccaagccgc

SEQ ID NO: 5766621 - DNA, 25 bp, Homo sapien
ctgagtccctggccaatagcacagc

SEQ ID NO: 5766622 - DNA, 25 bp, Homo sapien
agcccaccatgcctccccccgagac

SEQ ID NO: 5766623 - DNA, 25 bp, Homo sapien
ctgtgccccagaaaggccccccatc

SEQ ID NO: 5766624 - DNA, 25 bp, Homo sapien
tcttacaggccctgcacagagtagc

SEQ ID NO: 5766625 - DNA, 25 bp, Homo sapien
gggtcttctctggctgagaggggaa

SEQ ID NO: 5766626 - DNA, 25 bp, Homo sapien
tgccctccgcttgcaccctcaattg

SEQ ID NO: 5766627 - DNA, 25 bp, Homo sapien
gctgctcaataaacacttgttgaac

SEQ ID NO: 5766628 - DNA, 25 bp, Homo sapien
atcaacgaatgaatggctatgcatg

SEQ ID NO: 5766629 - DNA, 25 bp, Homo sapien
aggtcatcaagatggagtctgagga

SEQ ID NO: 5766630 - DNA, 25 bp, Homo sapien
atccgccttcgccatgccctccgct

SEQ ID NO: 5766631 - DNA, 25 bp, Homo sapien
agccagacccagtgccccaggaagg

SEQ ID NO: 5766632 - DNA, 25 bp, Homo sapien
ccctgcccggcccctgagctgcctc

SEQ ID NO: 5766633 - DNA, 25 bp, Homo sapien
cccaggagccccgtcataggaagtg

SEQ ID NO: 5766634 - DNA, 25 bp, Homo sapien
cttctggtgctttgagtgcgagcag

SEQ ID NO: 5766635 - DNA, 25 bp, Homo sapien
ggctgtcggccagctgggccgcgcg

SEQ ID NO: 5766636 - DNA, 25 bp, Homo sapien
atacgaggggctgtgcgatcccgca

SEQ ID NO: 5766637 - DNA, 25 bp, Homo sapien
gtctgcacacgctgtgctcaggatg

SEQ ID NO: 5766638 - DNA, 25 bp, Homo sapien
agcccactcctcgccagtccagtct

SEQ ID NO: 5766639 - DNA, 25 bp, Homo sapien
tgccgtgcgcaccgatggcttcgac

SEQ ID NO: 5766640 - DNA, 25 bp, Homo sapien
gcccggcccctgagctgcctcctcc

SEQ ID NO: 5766641 - DNA, 25 bp, Homo sapien
ccagcagcgacaggaggagctggac

SEQ ID NO: 5766642 - DNA, 25 bp, Homo sapien
cggtttcctgcgccaggcgctctgc

SEQ ID NO: 5766643 - DNA, 25 bp, Homo sapien
gccccaggagccccgtcataggaag

SEQ ID NO: 5766644 - DNA, 25 bp, Homo sapien
gccccagccccagccctacagagcg

SEQ ID NO: 5766645 - DNA, 25 bp, Homo sapien
tggctcggagctccccggagcagcc

SEQ ID NO: 5766646 - DNA, 25 bp, Homo sapien
caatgccaggcggaagccaagtgcc

SEQ ID NO: 5766647 - DNA, 25 bp, Homo sapien
acagtgatctcaagtgcgacatcag

SEQ ID NO: 5766648 - DNA, 25 bp, Homo sapien
cacaccagtggttcctcaagcacga

SEQ ID NO: 5766649 - DNA, 25 bp, Homo sapien
agctgcaaaggggcatcagcccacc

SEQ ID NO: 5766650 - DNA, 25 bp, Homo sapien
gctgagattcaagccaccattccag

SEQ ID NO: 5766651 - DNA, 25 bp, Homo sapien
tccaccgtgggatccgctacctgtt

SEQ ID NO: 5766652 - DNA, 25 bp, Homo sapien
tctgccgcctgcgccaggaggagcc

SEQ ID NO: 5766653 - DNA, 25 bp, Homo sapien
cccagccccagccccagccctacag

SEQ ID NO: 5766654 - DNA, 25 bp, Homo sapien
gcgagcgcgtgcgccaggtggtagc

SEQ ID NO: 5766655 - DNA, 25 bp, Homo sapien
caccgtgggatccgctacctgttgt

SEQ ID NO: 5766656 - DNA, 25 bp, Homo sapien
ccgctccctccggggctcctcccat

SEQ ID NO: 5766657 - DNA, 25 bp, Homo sapien
cgcaggcgctgcaggagcaggatag

SEQ ID NO: 5766658 - DNA, 25 bp, Homo sapien
gaagctgctgccttgtctgcacacg

SEQ ID NO: 5766659 - DNA, 25 bp, Homo sapien
cccactcctcgccagtccagtctct

SEQ ID NO: 5766660 - DNA, 25 bp, Homo sapien
tccatgccccgacccccaccccaag

SEQ ID NO: 5766661 - DNA, 25 bp, Homo sapien
gacttctggtgctttgagtgcgagc

SEQ ID NO: 5766662 - DNA, 25 bp, Homo sapien
cagagcacagagagccatccgcctt

SEQ ID NO: 5766663 - DNA, 25 bp, Homo sapien
agacacacccgccctggataacgtc

SEQ ID NO: 5766664 - DNA, 25 bp, Homo sapien
ctgttgtacagagcacagagagcca

SEQ ID NO: 5766665 - DNA, 25 bp, Homo sapien
gctgtgctgcagcgcatccgcacgg

SEQ ID NO: 5766666 - DNA, 25 bp, Homo sapien
actcctcgccagcccactcctcgcc

SEQ ID NO: 5766667 - DNA, 25 bp, Homo sapien
agattcaagccaccattccaggcct

SEQ ID NO: 5766668 - DNA, 25 bp, Homo sapien
cggggctcctcccatttatcccagt

SEQ ID NO: 5766669 - DNA, 25 bp, Homo sapien
aagctgccgtgcgcaccgatggctt

SEQ ID NO: 5766670 - DNA, 25 bp, Homo sapien
actaagctggggtccatggagcctg

SEQ ID NO: 5766671 - DNA, 25 bp, Homo sapien
aagtgcccgaagctgctgccttgtc

SEQ ID NO: 5766672 - DNA, 25 bp, Homo sapien
cccagcaggaccccgcccggcccca

SEQ ID NO: 5766673 - DNA, 25 bp, Homo sapien
tgagattcaagccaccattccaggc

SEQ ID NO: 5766674 - DNA, 25 bp, Homo sapien
cgctccttgacagcagccacagtga

SEQ ID NO: 5766675 - DNA, 25 bp, Homo sapien
cccatgagcacagggactggctatc

SEQ ID NO: 5766676 - DNA, 25 bp, Homo sapien
agctgtatccaagaaagccagccca

SEQ ID NO: 5766677 - DNA, 25 bp, Homo sapien
tgcccaacagcaaccacgtggccag

SEQ ID NO: 5766678 - DNA, 25 bp, Homo sapien
gctgccttgtctgcacacgctgtgc

SEQ ID NO: 5766679 - DNA, 25 bp, Homo sapien
ggcaggggaaggcagagcccagact

SEQ ID NO: 5766680 - DNA, 25 bp, Homo sapien
tgggccgcctggatgctgtgctgca

SEQ ID NO: 5766681 - DNA, 25 bp, Homo sapien
gttgtacagagcacagagagccatc

SEQ ID NO: 5766682 - DNA, 25 bp, Homo sapien
cgctacctgttgtacagagcacaga

SEQ ID NO: 5766683 - DNA, 25 bp, Homo sapien
gccccagagcctgcaagctgccgtg

SEQ ID NO: 5766684 - DNA, 25 bp, Homo sapien
cctccggggctcctcccatttatcc

SEQ ID NO: 5766685 - DNA, 25 bp, Homo sapien
agcaatgccaggcggaagccaagtg

SEQ ID NO: 5766686 - DNA, 25 bp, Homo sapien
atgcccaggaacatcctgcccagct

SEQ ID NO: 5766687 - DNA, 25 bp, Homo sapien
cagggaccctattgacgttgacctg

SEQ ID NO: 5766688 - DNA, 25 bp, Homo sapien
cctagccccaggagccccgtcatag

SEQ ID NO: 5766689 - DNA, 25 bp, Homo sapien
tgcgcgctccttgacagcagccaca

SEQ ID NO: 5766690 - DNA, 25 bp, Homo sapien
gcaagctgccgtgcgcaccgatggc

SEQ ID NO: 5766691 - DNA, 25 bp, Homo sapien
gcagtctcaccaccccacctggatg

SEQ ID NO: 5766692 - DNA, 25 bp, Homo sapien
ccagcccactcctcgccagtccagt

SEQ ID NO: 5766693 - DNA, 25 bp, Homo sapien
ccagaagaggaagtgcagccagacc

SEQ ID NO: 5766694 - DNA, 25 bp, Homo sapien
tccaagccagcactcctgccatcac

SEQ ID NO: 5766695 - DNA, 25 bp, Homo sapien
cctgtggcacataccaccccccagc

SEQ ID NO: 5766696 - DNA, 25 bp, Homo sapien
ctggggactctgtcagaggctccat

SEQ ID NO: 5766697 - DNA, 25 bp, Homo sapien
ccgcttgcaccctcaattgcatcgg

SEQ ID NO: 5766698 - DNA, 25 bp, Homo sapien
cagccccagccccagccctacagag

SEQ ID NO: 5766699 - DNA, 25 bp, Homo sapien
ctccccatgtggtccaagccagcac

SEQ ID NO: 5766700 - DNA, 25 bp, Homo sapien
ccatcagcccagtcccaggcgcccg

SEQ ID NO: 5766701 - DNA, 25 bp, Homo sapien
cccaccatgcctccccccgagaccc

SEQ ID NO: 5766702 - DNA, 25 bp, Homo sapien
gggctcctcccatttatcccagtgg

SEQ ID NO: 5766703 - DNA, 25 bp, Homo sapien
cgaggcccggcccctagcagagctg

SEQ ID NO: 5766704 - DNA, 25 bp, Homo sapien
aggaatgaatcaacgaatgaatggc

SEQ ID NO: 5766705 - DNA, 25 bp, Homo sapien
ttcctggacggcacccgcaagacca

SEQ ID NO: 5766706 - DNA, 25 bp, Homo sapien
gcgctggtgcagaggatgaagtgct

SEQ ID NO: 5766707 - DNA, 25 bp, Homo sapien
acattcccaccaccctgtgccccag

SEQ ID NO: 5766708 - DNA, 25 bp, Homo sapien
cgtgcgcgctccttgacagcagcca

SEQ ID NO: 5766709 - DNA, 25 bp, Homo sapien
caggcgctgcaggagcaggatagtg

SEQ ID NO: 5766710 - DNA, 25 bp, Homo sapien
gtgccgagaccgaggagctgatccg

SEQ ID NO: 5766711 - DNA, 25 bp, Homo sapien
aggtgcagacacacccgccctggat

SEQ ID NO: 5766712 - DNA, 25 bp, Homo sapien
ggagacctgggtcttctctggctga

SEQ ID NO: 5766713 - DNA, 25 bp, Homo sapien
cgggcccctattcggacttggtctc

SEQ ID NO: 5766714 - DNA, 25 bp, Homo sapien
cctccagcctgccctgtggcacata

SEQ ID NO: 5766715 - DNA, 25 bp, Homo sapien
gcagccgctccctccggggctcctc

SEQ ID NO: 5766716 - DNA, 25 bp, Homo sapien
tctcttcacgcactccaagatctaa

SEQ ID NO: 5766717 - DNA, 25 bp, Homo sapien
ttgacagcagccacagtgatctcaa

SEQ ID NO: 5766718 - DNA, 25 bp, Homo sapien
aaggcatggctgagattcaagccac

SEQ ID NO: 5766719 - DNA, 25 bp, Homo sapien
actaggcctctgccaggatctaagc

SEQ ID NO: 5766720 - DNA, 25 bp, Homo sapien
agcacgaggcccggcccctagcaga

SEQ ID NO: 5766721 - DNA, 25 bp, Homo sapien
cgctgtgctgctcgtgcgcgctcct

SEQ ID NO: 5766722 - DNA, 25 bp, Homo sapien
ccttgacagcagccacagtgatctc

SEQ ID NO: 5766723 - DNA, 25 bp, Homo sapien
gctggaggctgtggacgcgcggtac

SEQ ID NO: 5766724 - DNA, 25 bp, Homo sapien
ccatgggctccatgcacgagttttc

SEQ ID NO: 5766725 - DNA, 25 bp, Homo sapien
tggagaggcttggggtgggggtcgg

SEQ ID NO: 5766726 - DNA, 25 bp, Homo sapien
ggctcgctctgtagggctggggctg

SEQ ID NO: 5766727 - DNA, 25 bp, Homo sapien
ctcagactccatcttgatgaccttc

SEQ ID NO: 5766728 - DNA, 25 bp, Homo sapien
ctgcatgcccgacgcctccaggcat

SEQ ID NO: 5766729 - DNA, 25 bp, Homo sapien
ggtgtgtctgcacctaggggccagg

SEQ ID NO: 5766730 - DNA, 25 bp, Homo sapien
caccagaagtcggccgactctttgc

SEQ ID NO: 5766731 - DNA, 25 bp, Homo sapien
ttctcggtttagatcttggagtgcg

SEQ ID NO: 5766732 - DNA, 25 bp, Homo sapien
tcaacaagtgtttattgagcagcca

SEQ ID NO: 5766733 - DNA, 25 bp, Homo sapien
gtggacggcagggcgctcctggtga

SEQ ID NO: 5766734 - DNA, 25 bp, Homo sapien
tggcgaggactgtggctcggcggtc

SEQ ID NO: 5766735 - DNA, 25 bp, Homo sapien
ctcctcctccgaagcgggggctcgc

SEQ ID NO: 5766736 - DNA, 25 bp, Homo sapien
cagactccatcttgatgaccttcct

SEQ ID NO: 5766737 - DNA, 25 bp, Homo sapien
gtggcttgaatctcagccatgcctt

SEQ ID NO: 5766738 - DNA, 25 bp, Homo sapien
gccgactctttgcagcgggtgcaca

SEQ ID NO: 5766739 - DNA, 25 bp, Homo sapien
ggcctgtaagagcatgggctggagg

SEQ ID NO: 5766740 - DNA, 25 bp, Homo sapien
cggcagagcgcctggcgcaggaaac

SEQ ID NO: 5766741 - DNA, 25 bp, Homo sapien
ttgttggtcttgcgggtgccgtcca

SEQ ID NO: 5766742 - DNA, 25 bp, Homo sapien
aggctcagcatcgggggtggcagcc

SEQ ID NO: 5766743 - DNA, 25 bp, Homo sapien
gctccaagagtctgggctctgcctt

SEQ ID NO: 5766744 - DNA, 25 bp, Homo sapien
actgggataaatgggaggagccccg

SEQ ID NO: 5766745 - DNA, 25 bp, Homo sapien
tggacttgagaggcctccatggagc

SEQ ID NO: 5766746 - DNA, 25 bp, Homo sapien
cctgcagcgcctgcgtcatggcgtc

SEQ ID NO: 5766747 - DNA, 25 bp, Homo sapien
cttgcaggctctggggctcctcctg

SEQ ID NO: 5766748 - DNA, 25 bp, Homo sapien
tgtctgcacctaggggccagggcgc

SEQ ID NO: 5766749 - DNA, 25 bp, Homo sapien
cattgctggcagcgcagaaactgga

SEQ ID NO: 5766750 - DNA, 25 bp, Homo sapien
gttgagccactgggataaatgggag

SEQ ID NO: 5766751 - DNA, 25 bp, Homo sapien
cccaccacggaagacatgtcaagct

SEQ ID NO: 5766752 - DNA, 25 bp, Homo sapien
cagccgcgtgcatctgcgcgtgaac

SEQ ID NO: 5766753 - DNA, 25 bp, Homo sapien
aaccgtgcatgtccagcacctcctg

SEQ ID NO: 5766754 - DNA, 25 bp, Homo sapien
acagagtccccagggggaacaactg

SEQ ID NO: 5766755 - DNA, 25 bp, Homo sapien
aacaggtagcggatcccacggtgga

SEQ ID NO: 5766756 - DNA, 25 bp, Homo sapien
cttgatgaccttcctggggcactgg

SEQ ID NO: 5766757 - DNA, 25 bp, Homo sapien
cctgcccagaggtccatgcatagcc

SEQ ID NO: 5766758 - DNA, 25 bp, Homo sapien
gaggaaccactggtgtgcctcgaag

SEQ ID NO: 5766759 - DNA, 25 bp, Homo sapien
gggtggtgggaatgtaattggagag

SEQ ID NO: 5766760 - DNA, 25 bp, Homo sapien
ctggctttcttggatacagctgcat

SEQ ID NO: 5766761 - DNA, 25 bp, Homo sapien
cacctcctggtccgaggcgtagcac

SEQ ID NO: 5766762 - DNA, 25 bp, Homo sapien
aggaaaccgtgcatgtccagcacct

SEQ ID NO: 5766763 - DNA, 25 bp, Homo sapien
ccaagtccgaataggggcccgatgc

SEQ ID NO: 5766764 - DNA, 25 bp, Homo sapien
ccgacgcctccaggcatcctgagca

SEQ ID NO: 5766765 - DNA, 25 bp, Homo sapien
cgctgctggatctctgcgctgatgt

SEQ ID NO: 5766766 - DNA, 25 bp, Homo sapien
actcacgcaccgactggttgcgcag

SEQ ID NO: 5766767 - DNA, 25 bp, Homo sapien
ttgagatcactgtggctgctgtcaa

SEQ ID NO: 5766768 - DNA, 25 bp, Homo sapien
gggtgacagaagtttctttcttggg

SEQ ID NO: 5766769 - DNA, 25 bp, Homo sapien
ggtgttggctgcaaggttacaagag

SEQ ID NO: 5766770 - DNA, 25 bp, Homo sapien
gcctccagcagctcgcgctcctgag

SEQ ID NO: 5766771 - DNA, 25 bp, Homo sapien
ttcattccttaaccaagaattaatg

SEQ ID NO: 5766772 - DNA, 25 bp, Homo sapien
ggctggtggggaggccaagctgggg

SEQ ID NO: 5766773 - DNA, 25 bp, Homo sapien
gcgccaaaggcactatcctgctcct

SEQ ID NO: 5766774 - DNA, 25 bp, Homo sapien
caggctccatggaccccagcttagt

SEQ ID NO: 5766775 - DNA, 25 bp, Homo sapien
ctcctggggccgggcggggtcctgc

SEQ ID NO: 5766776 - DNA, 25 bp, Homo sapien
gtcctgctggggcctcggagatcgg

SEQ ID NO: 5766777 - DNA, 25 bp, Homo sapien
ggtagcggatcccacggtggacggc

SEQ ID NO: 5766778 - DNA, 25 bp, Homo sapien
cgggtgtgtctgcacctaggggcca

SEQ ID NO: 5766779 - DNA, 25 bp, Homo sapien
tgcaccagcgcgctgcccgtgcgga

SEQ ID NO: 5766780 - DNA, 25 bp, Homo sapien
gggggtggcagcctgctcagcgggc

SEQ ID NO: 5766781 - DNA, 25 bp, Homo sapien
ccgacagccgcgtgcatctgcgcgt

SEQ ID NO: 5766782 - DNA, 25 bp, Homo sapien
cctctgggctggctttcttggatac

SEQ ID NO: 5766783 - DNA, 25 bp, Homo sapien
gcctgcgtcatggcgtccagctcct

SEQ ID NO: 5766784 - DNA, 25 bp, Homo sapien
ctgtcgctgctggatctctgcgctg

SEQ ID NO: 5766785 - DNA, 25 bp, Homo sapien
cagctcgcgctcctgagcccgcacg

SEQ ID NO: 5766786 - DNA, 25 bp, Homo sapien
cccctctcagccagagaagacccag

SEQ ID NO: 5766787 - DNA, 25 bp, Homo sapien
cctcctgtcgctgctggatctctgc

SEQ ID NO: 5766788 - DNA, 25 bp, Homo sapien
cctcggtctcggcacgcgcgcggcc

SEQ ID NO: 5766789 - DNA, 25 bp, Homo sapien
ggcgcacgcgctcgcggatcagctc

SEQ ID NO: 5766790 - DNA, 25 bp, Homo sapien
agggtgcaagcggagggcatggcga

SEQ ID NO: 5766791 - DNA, 25 bp, Homo sapien
cttgagaggcctccatggagcctct

SEQ ID NO: 5766792 - DNA, 25 bp, Homo sapien
gaagcgggggctcgctctgtagggc

SEQ ID NO: 5766793 - DNA, 25 bp, Homo sapien
ttggaggtgctgggcctgggctgct

SEQ ID NO: 5766794 - DNA, 25 bp, Homo sapien
gggccgggcaggggtgttggctgca

SEQ ID NO: 5766795 - DNA, 25 bp, Homo sapien
gggaggcatggtgggctcctggggc

SEQ ID NO: 5766796 - DNA, 25 bp, Homo sapien
ctgtagggctggggctggggctggg

SEQ ID NO: 5766797 - DNA, 25 bp, Homo sapien
gagcagaagatgttgttggtcttgc

SEQ ID NO: 5766798 - DNA, 25 bp, Homo sapien
ggctgctccggggagctccgagcca

SEQ ID NO: 5766799 - DNA, 25 bp, Homo sapien
ccgtgcatgtccagcacctcctggt

SEQ ID NO: 5766800 - DNA, 25 bp, Homo sapien
gagtgggctggcgaggactgtggct

SEQ ID NO: 5766801 - DNA, 25 bp, Homo sapien
tggcgtccagctcctcctgtcgctg

SEQ ID NO: 5766802 - DNA, 25 bp, Homo sapien
ccttgaactcgtcgaagccatcggt

SEQ ID NO: 5766803 - DNA, 25 bp, Homo sapien
ctgtcaaggagcgcgcacgagcagc

SEQ ID NO: 5766804 - DNA, 25 bp, Homo sapien
ggaccccagcttagtttcgattctc

SEQ ID NO: 5766805 - DNA, 25 bp, Homo sapien
tcctggggctaggcggtccatccag

SEQ ID NO: 5766806 - DNA, 25 bp, Homo sapien
tgagccactgggataaatgggagga

SEQ ID NO: 5766807 - DNA, 25 bp, Homo sapien
ggctgcaaggttacaagagaagggt

SEQ ID NO: 5766808 - DNA, 25 bp, Homo sapien
ctatcctgctcctgcagcgcctgcg

SEQ ID NO: 5766809 - DNA, 25 bp, Homo sapien
tttcgattctcggtttagatcttgg

SEQ ID NO: 5766810 - DNA, 25 bp, Homo sapien
ttgggatagccagtccctgtgctca

SEQ ID NO: 5766811 - DNA, 25 bp, Homo sapien
ggccagggcgcctggcagatggggc

SEQ ID NO: 5766812 - DNA, 25 bp, Homo sapien
ggctggaggaggcagctcaggggcc

SEQ ID NO: 5766813 - DNA, 25 bp, Homo sapien
ctgggctggcggccttcagaggggg

SEQ ID NO: 5766814 - DNA, 25 bp, Homo sapien
ggtggggtggtgagactgccttgga

SEQ ID NO: 5766815 - DNA, 25 bp, Homo sapien
cttgaatctcagccatgccttagcc

SEQ ID NO: 5766816 - DNA, 25 bp, Homo sapien
gtgggctggcgaggagtgggctggc

SEQ ID NO: 5766817 - DNA, 25 bp, Homo sapien
ctggggctaggcggtccatccaggt

SEQ ID NO: 5766818 - DNA, 25 bp, Homo sapien
gcgcacgagcagcacagcggcttgg

SEQ ID NO: 5766819 - DNA, 25 bp, Homo sapien
cctcgtagtcgcgctggtaccgcgc

SEQ ID NO: 5766820 - DNA, 25 bp, Homo sapien
acttgagatcactgtggctgctgtc

SEQ ID NO: 5766821 - DNA, 25 bp, Homo sapien
tcggtctcggcacgcgcgcggccca

SEQ ID NO: 5766822 - DNA, 25 bp, Homo sapien
cagtccctgtgctcatgggcttaga

SEQ ID NO: 5766823 - DNA, 25 bp, Homo sapien
ctcgaagcacttggcgcagaggagc

SEQ ID NO: 5766824 - DNA, 25 bp, Homo sapien
ggcggcagagcgcctggcgcaggaa

SEQ ID NO: 5766825 - DNA, 25 bp, Homo sapien
tgtgcagacaaggcagcagcttcgg

SEQ ID NO: 5766826 - DNA, 25 bp, Homo sapien
gagcacagcgtgtgcagacaaggca

SEQ ID NO: 5766827 - DNA, 25 bp, Homo sapien
gggtggtgagactgccttggaggtg

SEQ ID NO: 5766828 - DNA, 25 bp, Homo sapien
gcgtccagctcctcctgtcgctgct

SEQ ID NO: 5766829 - DNA, 25 bp, Homo sapien
gctggcagcctctgggctggctttc

SEQ ID NO: 5766830 - DNA, 25 bp, Homo sapien
ggcgaggagtgggctggcgaggagt

SEQ ID NO: 5766831 - DNA, 25 bp, Homo sapien
gcccctttgcagctgggcaggatgt

SEQ ID NO: 5766832 - DNA, 25 bp, Homo sapien
ttagtttcgattctcggtttagatc

SEQ ID NO: 5766833 - DNA, 25 bp, Homo sapien
cgggcggggtcctgctggggcctcg

SEQ ID NO: 5766834 - DNA, 25 bp, Homo sapien
ttggctgcaaggttacaagagaagg

SEQ ID NO: 5766835 - DNA, 25 bp, Homo sapien
ttgtattggagacatccaggtcaac

SEQ ID NO: 5766836 - DNA, 25 bp, Homo sapien
atccagggcgggtgtgtctgcacct

SEQ ID NO: 5766837 - DNA, 25 bp, Homo sapien
agacctcacttcctatgacggggct

SEQ ID NO: 5766838 - DNA, 25 bp, Homo sapien
cgtgcatctgcgcgtgaaccgcgcc

SEQ ID NO: 5766839 - DNA, 25 bp, Homo sapien
cctgctggggcctcggagatcgggc

SEQ ID NO: 5766840 - DNA, 25 bp, Homo sapien
tgtgctctgtacaacaggtagcgga

SEQ ID NO: 5766841 - DNA, 25 bp, Homo sapien
gacttgagaggcctccatggagcct

SEQ ID NO: 5766842 - DNA, 25 bp, Homo sapien
gtacaacaggtagcggatcccacgg

SEQ ID NO: 5766843 - DNA, 25 bp, Homo sapien
gcccagctggccgacagccgcgtgc

SEQ ID NO: 5766844 - DNA, 25 bp, Homo sapien
atgggaggagccccggagggagcgg

SEQ ID NO: 5766845 - DNA, 25 bp, Homo sapien
actctcagaggcctgcttgacgggc

SEQ ID NO: 5766846 - DNA, 25 bp, Homo sapien
cggtacaccgacaggcgccgctgca

SEQ ID NO: 5766847 - DNA, 25 bp, Homo sapien
cattggcaggatggttgaggggccc

SEQ ID NO: 5766848 - DNA, 25 bp, Homo sapien
cgcgtgaaccgcgccaaaggcacta

SEQ ID NO: 5766849 - DNA, 25 bp, Homo sapien
ggcgcctggcagatggggcactgca

SEQ ID NO: 5766850 - DNA, 25 bp, Homo sapien
aggagtgctggcttggaccacatgg

SEQ ID NO: 5766851 - DNA, 25 bp, Homo sapien
ccagggcgcctggcagatggggcac

SEQ ID NO: 5766852 - DNA, 25 bp, Homo sapien
aggggccgggcaggggtgttggctg

SEQ ID NO: 5766853 - DNA, 25 bp, Homo sapien
cgagctgctgatcaccacaacgcgt

SEQ ID NO: 5766854 - DNA, 25 bp, Homo sapien
ggtcaacgtcaatagggtccctggg

SEQ ID NO: 5766855 - DNA, 25 bp, Homo sapien
gtccagcacctcctggtccgaggcg

SEQ ID NO: 5766856 - DNA, 25 bp, Homo sapien
cgcggcccagctggccgacagccgc

SEQ ID NO: 5766857 - DNA, 25 bp, Homo sapien
gacaaggcagcagcttcgggcactt

SEQ ID NO: 5766858 - DNA, 25 bp, Homo sapien
agccactgggataaatgggaggagc

SEQ ID NO: 5766859 - DNA, 25 bp, Homo sapien
gggcactgggtctggctgcacttcc

SEQ ID NO: 5766860 - DNA, 25 bp, Homo sapien
ggaagccatggaggagaaggggagg

SEQ ID NO: 5766861 - DNA, 25 bp, Homo sapien
gcatgcccgacgcctccaggcatcc

SEQ ID NO: 5766862 - DNA, 25 bp, Homo sapien
agggagcggctgcgggatcgcacag

SEQ ID NO: 5766863 - DNA, 25 bp, Homo sapien
cttgcgggtgccgtccaggaactca

SEQ ID NO: 5766864 - DNA, 25 bp, Homo sapien
cgggatcgcacagcccctcgtatcc

SEQ ID NO: 5766865 - DNA, 25 bp, Homo sapien
gcgggtgcacacagcctgcgcatcc

SEQ ID NO: 5766866 - DNA, 25 bp, Homo sapien
gctcggcggtctccatgggctccat

SEQ ID NO: 5766867 - DNA, 25 bp, Homo sapien
cagacaaggcagcagcttcgggcac

SEQ ID NO: 5766868 - DNA, 25 bp, Homo sapien
tgggctgtcgttgtattggagacat

SEQ ID NO: 5766869 - DNA, 25 bp, Homo sapien
ccatcttgatgaccttcctggggca

SEQ ID NO: 5766870 - DNA, 25 bp, Homo sapien
tgttgggcaggaagacctcacttcc

SEQ ID NO: 5766871 - DNA, 25 bp, Homo sapien
gctggatctctgcgctgatgtcgca

SEQ ID NO: 5766872 - DNA, 25 bp, Homo sapien
atgctggtcagcgtaggggtgcggt

SEQ ID NO: 5766873 - DNA, 25 bp, Homo sapien
cagcctgctcagcgggctggtgggg

SEQ ID NO: 5766874 - DNA, 25 bp, Homo sapien
gcctccatggagcctctgacagagt

SEQ ID NO: 5766875 - DNA, 25 bp, Homo sapien
gcggatcccacggtggacggcaggg

SEQ ID NO: 5766876 - DNA, 25 bp, Homo sapien
cggagggcatggcgaaggcggatgg

SEQ ID NO: 5766877 - DNA, 25 bp, Homo sapien
ccactggtgtgcctcgaagcacttg

SEQ ID NO: 5766878 - DNA, 25 bp, Homo sapien
ctggaactcctcctccgaagcgggg

SEQ ID NO: 5766879 - DNA, 25 bp, Homo sapien
ctttctggggcacagggtggtggga

SEQ ID NO: 5766880 - DNA, 25 bp, Homo sapien
ataaatgggaggagccccggaggga

SEQ ID NO: 5766881 - DNA, 25 bp, Homo sapien
acagcatccaggcggcccagccgac

SEQ ID NO: 5766882 - DNA, 25 bp, Homo sapien
ggctaggcggtccatccaggtgggg

SEQ ID NO: 5766883 - DNA, 25 bp, Homo sapien
gtacaccgacaggcgccgctgcaga

SEQ ID NO: 5766884 - DNA, 25 bp, Homo sapien
tagcggatcccacggtggacggcag

SEQ ID NO: 5766885 - DNA, 25 bp, Homo sapien
ggatggttgaggggccctgtgatgg

SEQ ID NO: 5766886 - DNA, 25 bp, Homo sapien
actgccttggaggtgctgggcctgg

SEQ ID NO: 5766887 - DNA, 25 bp, Homo sapien
ggcattggcaggatggttgaggggc

SEQ ID NO: 5766888 - DNA, 25 bp, Homo sapien
ttgattcattccttaaccaagaatt

SEQ ID NO: 5766889 - DNA, 25 bp, Homo sapien
cggtctccatgggctccatgcacga

SEQ ID NO: 5766890 - DNA, 25 bp, Homo sapien
ctggcgcaggcggcagagcgcctgg

SEQ ID NO: 5766891 - DNA, 25 bp, Homo sapien
tccaagagtctgggctctgccttcc

SEQ ID NO: 5766892 - DNA, 25 bp, Homo sapien
atggggcactgcatgcccgacgcct

SEQ ID NO: 5766893 - DNA, 25 bp, Homo sapien
cggcccagccgactggccatctcct

SEQ ID NO: 5766894 - DNA, 25 bp, Homo sapien
ggatcgcacagcccctcgtatccgg

SEQ ID NO: 5766895 - DNA, 25 bp, Homo sapien
gcccgcacgtgagctaccacctggc

SEQ ID NO: 5766896 - DNA, 25 bp, Homo sapien
ctccagcagctcgcgctcctgagcc

SEQ ID NO: 5766897 - DNA, 25 bp, Homo sapien
cttggggtgggggtcggggcatgga

SEQ ID NO: 5766898 - DNA, 25 bp, Homo sapien
tctcagccatgccttagccttcccc

SEQ ID NO: 5766899 - DNA, 25 bp, Homo sapien
ctggccgacagccgcgtgcatctgc

SEQ ID NO: 5766900 - DNA, 25 bp, Homo sapien
gtgctcatgggcttagatcctggca

SEQ ID NO: 5766901 - DNA, 25 bp, Homo sapien
gccggtacaccgacaggcgccgctg

SEQ ID NO: 5766902 - DNA, 25 bp, Homo sapien
aaggttacaagagaagggtagcact

SEQ ID NO: 5766903 - DNA, 25 bp, Homo sapien
gatcagctcctcggtctcggcacgc

SEQ ID NO: 5766904 - DNA, 25 bp, Homo sapien
tgcacctaggggccagggcgcctgg

SEQ ID NO: 5766905 - DNA, 25 bp, Homo sapien
acgtggttgctgttgggcaggaaga

SEQ ID NO: 5766906 - DNA, 25 bp, Homo sapien
atcttggagtgcgtgaagagaagct

SEQ ID NO: 5766907 - DNA, 25 bp, Homo sapien
atcttgatgaccttcctggggcact

SEQ ID NO: 5766908 - DNA, 25 bp, Homo sapien
gcagctgggcaggatgttcctgggc

SEQ ID NO: 5766909 - DNA, 25 bp, Homo sapien
cccccaccacggaagacatgtcaag

SEQ ID NO: 5766910 - DNA, 25 bp, Homo sapien
aagacccaggtctccctgcccagag

SEQ ID NO: 5766911 - DNA, 25 bp, Homo sapien
tggctcggcggtctccatgggctcc

SEQ ID NO: 5766912 - DNA, 25 bp, Homo sapien
actgtggctcggcggtctccatggg

SEQ ID NO: 5766913 - DNA, 25 bp, Homo sapien
gctgatcaccacaacgcgttcctct

SEQ ID NO: 5766914 - DNA, 25 bp, Homo sapien
aagcacttggcgcagaggagctgct

SEQ ID NO: 5766915 - DNA, 25 bp, Homo sapien
ggtctggctgcacttcctcttctgg

SEQ ID NO: 5766916 - DNA, 25 bp, Homo sapien
tgcgcagctctgctaggggccgggc

SEQ ID NO: 5766917 - DNA, 25 bp, Homo sapien
catcctgagcacagcgtgtgcagac

SEQ ID NO: 5766918 - DNA, 25 bp, Homo sapien
tggcttccgcctggcattgctggca

SEQ ID NO: 5766919 - DNA, 25 bp, Homo sapien
cttggaacatcctcggcagtagatg

SEQ ID NO: 5766920 - DNA, 25 bp, Homo sapien
ctggcgcacgcgctcgcggatcagc

SEQ ID NO: 5766921 - DNA, 25 bp, Homo sapien
aatgtaattggagaggcttccagag

SEQ ID NO: 5766922 - DNA, 25 bp, Homo sapien
ttcgttgattcattccttaaccaag

SEQ ID NO: 5766923 - DNA, 25 bp, Homo sapien
tgcagcgcctgcgtcatggcgtcca

SEQ ID NO: 5766924 - DNA, 25 bp, Homo sapien
ccagctcctcctgtcgctgctggat

SEQ ID NO: 5766925 - DNA, 25 bp, Homo sapien
aggcagcagcttcgggcacttggct

SEQ ID NO: 5766926 - DNA, 25 bp, Homo sapien
tgtgtctgcacctaggggccagggc

SEQ ID NO: 5766927 - DNA, 25 bp, Homo sapien
atctttcccctgggtgatgcaagag

SEQ ID NO: 5766928 - DNA, 25 bp, Homo sapien
gtgcagggcctgtaagagcatgggc

SEQ ID NO: 5766929 - DNA, 25 bp, Homo sapien
gggatagccagtccctgtgctcatg

SEQ ID NO: 5766930 - DNA, 25 bp, Homo sapien
ggaccacatggggagaccaagtccg

SEQ ID NO: 5766931 - DNA, 25 bp, Homo sapien
gggaggccaagctggggggtggtat

SEQ ID NO: 5766932 - DNA, 25 bp, Homo sapien
tatgtgccacagggcaggctggagg

SEQ ID NO: 5766933 - DNA, 25 bp, Homo sapien
gcgcctgcgtcatggcgtccagctc

SEQ ID NO: 5766934 - DNA, 25 bp, Homo sapien
ccacctggcgcacgcgctcgcggat

SEQ ID NO: 5766935 - DNA, 25 bp, Homo sapien
tcttgggatagccagtccctgtgct

SEQ ID NO: 5766936 - DNA, 25 bp, Homo sapien
tctgggctggctttcttggatacag

SEQ ID NO: 5766937 - DNA, 25 bp, Homo sapien
ctctcagcagagactggactggcga

SEQ ID NO: 5766938 - DNA, 25 bp, Homo sapien
gagaggcttccagaggcacttggac

SEQ ID NO: 5766939 - DNA, 25 bp, Homo sapien
ccagcgcgctgcccgtgcggatgcg

SEQ ID NO: 5766940 - DNA, 25 bp, Homo sapien
gggtgcggtggttggggttggagca

SEQ ID NO: 5766941 - DNA, 25 bp, Homo sapien
gacgcctccaggcatcctgagcaca

SEQ ID NO: 5766942 - DNA, 25 bp, Homo sapien
ccagctggccgacagccgcgtgcat

SEQ ID NO: 5766943 - DNA, 25 bp, Homo sapien
gcgctcctggtgatcaggaggctcg

SEQ ID NO: 5766944 - DNA, 25 bp, Homo sapien
tcggcacgcgcgcggcccagctggc

SEQ ID NO: 5766945 - DNA, 25 bp, Homo sapien
ttgctggcagcgcagaaactggaac

SEQ ID NO: 5766946 - DNA, 25 bp, Homo sapien
ctattggccagggactcagaacaca

SEQ ID NO: 5766947 - DNA, 25 bp, Homo sapien
aggagtgggctggcgaggactgtgg

SEQ ID NO: 5766948 - DNA, 25 bp, Homo sapien
ggttgctgttgggcaggaagacctc

SEQ ID NO: 5766949 - DNA, 25 bp, Homo sapien
ggggcacagggtggtgggaatgtaa

SEQ ID NO: 5766950 - DNA, 25 bp, Homo sapien
cggcatctgagtcttccgagctgct

SEQ ID NO: 5766951 - DNA, 25 bp, Homo sapien
tgttggctgcaaggttacaagagaa

SEQ ID NO: 5766952 - DNA, 25 bp, Homo sapien
cctgggcattggcaggatggttgag

SEQ ID NO: 5766953 - DNA, 25 bp, Homo sapien
ggggctcctcctggcgcaggcggca

SEQ ID NO: 5766954 - DNA, 25 bp, Homo sapien
ggctgtcgttgtattggagacatcc

SEQ ID NO: 5766955 - DNA, 25 bp, Homo sapien
gcgtcatggcgtccagctcctcctg

SEQ ID NO: 5766956 - DNA, 25 bp, Homo sapien
catagccattcattcgttgattcat

SEQ ID NO: 5766957 - DNA, 25 bp, Homo sapien
gctggtcagcgtaggggtgcggtgg

SEQ ID NO: 5766958 - DNA, 25 bp, Homo sapien
gtaccgcgcgtccacagcctccagc

SEQ ID NO: 5766959 - DNA, 25 bp, Homo sapien
acaactgctccaagagtctgggctc

SEQ ID NO: 5766960 - DNA, 25 bp, Homo sapien
ataggggcccgatgcaattgagggt

SEQ ID NO: 5766961 - DNA, 25 bp, Homo sapien
ttcctggggcactgggtctggctgc

SEQ ID NO: 5766962 - DNA, 25 bp, Homo sapien
cacatggggagaccaagtccgaata

SEQ ID NO: 5766963 - DNA, 25 bp, Homo sapien
gaggagccccggagggagcggctgc

SEQ ID NO: 5766964 - DNA, 25 bp, Homo sapien
tgaggtcctgcaggcgcaccttgaa

SEQ ID NO: 5766965 - DNA, 25 bp, Homo sapien
tggcagcgcagaaactggaactcct

SEQ ID NO: 5766966 - DNA, 25 bp, Homo sapien
gtgggctggcgaggactgtggctcg

SEQ ID NO: 5766967 - DNA, 25 bp, Homo sapien
tgtgctctcagcagagactggactg

SEQ ID NO: 5766968 - DNA, 25 bp, Homo sapien
gagtgctggcagcctctgggctggc

SEQ ID NO: 5766969 - DNA, 25 bp, Homo sapien
aagtcggccgactctttgcagcggg

SEQ ID NO: 5766970 - DNA, 25 bp, Homo sapien
tgcccccaccacggaagacatgtca

SEQ ID NO: 5766971 - DNA, 25 bp, Homo sapien
ggtatgtgccacagggcaggctgga

SEQ ID NO: 5766972 - DNA, 25 bp, Homo sapien
gaaggctgtgctattggccagggac

SEQ ID NO: 5766973 - DNA, 25 bp, Homo sapien
ggcggggtcctgctggggcctcgga

SEQ ID NO: 5766974 - DNA, 25 bp, Homo sapien
tcggcagtagatgctggtcagcgta

SEQ ID NO: 5766975 - DNA, 25 bp, Homo sapien
aagaattaatgagtgctactctgtg

SEQ ID NO: 5766976 - DNA, 25 bp, Homo sapien
atctgccaggtcttgggatagccag

SEQ ID NO: 5766977 - DNA, 25 bp, Homo sapien
ccatctcctcgtagtcgcgctggta

SEQ ID NO: 5766978 - DNA, 25 bp, Homo sapien
gctgcgggatcgcacagcccctcgt

SEQ ID NO: 5766979 - DNA, 25 bp, Homo sapien
gggaggagccccggagggagcggct

SEQ ID NO: 5766980 - DNA, 25 bp, Homo sapien
ctgtacaacaggtagcggatcccac

SEQ ID NO: 5766981 - DNA, 25 bp, Homo sapien
agccagagaagacccaggtctccct

SEQ ID NO: 5766982 - DNA, 25 bp, Homo sapien
tgcaagcggagggcatggcgaaggc

SEQ ID NO: 5766983 - DNA, 25 bp, Homo sapien
cctgggtgatgcaagagctgaggtc

SEQ ID NO: 5766984 - DNA, 25 bp, Homo sapien
cggatggctctctgtgctctgtaca

SEQ ID NO: 5766985 - DNA, 25 bp, Homo sapien
atggagcctctgacagagtccccag

SEQ ID NO: 5766986 - DNA, 25 bp, Homo sapien
tggagaggcttccagaggcacttgg

SEQ ID NO: 5766987 - DNA, 25 bp, Homo sapien
acaggcgccgctgcagactctcgaa

SEQ ID NO: 5766988 - DNA, 25 bp, Homo sapien
aagacatgtcaagctgggaagccat

SEQ ID NO: 5766989 - DNA, 25 bp, Homo sapien
gcagaggcctagtggagaggcttgg

SEQ ID NO: 5766990 - DNA, 25 bp, Homo sapien
ccaagctggggggtggtatgtgcca

SEQ ID NO: 5766991 - DNA, 25 bp, Homo sapien
agaggcctagtggagaggcttgggg

SEQ ID NO: 5766992 - DNA, 25 bp, Homo sapien
ctggggctggggctgggctggcggc

SEQ ID NO: 5766993 - DNA, 25 bp, Homo sapien
gcttagatcctggcagaggcctagt

SEQ ID NO: 5766994 - DNA, 25 bp, Homo sapien
tctctgtgctctgtacaacaggtag

SEQ ID NO: 5766995 - DNA, 25 bp, Homo sapien
caaggcagcagcttcgggcacttgg

SEQ ID NO: 5766996 - DNA, 25 bp, Homo sapien
gctaccacctggcgcacgcgctcgc

SEQ ID NO: 5766997 - DNA, 25 bp, Homo sapien
cgggcgcctgggactgggctgatgg

SEQ ID NO: 5766998 - DNA, 25 bp, Homo sapien
ttaaccaagaattaatgagtgctac

SEQ ID NO: 5766999 - DNA, 25 bp, Homo sapien
ccgaataggggcccgatgcaattga

SEQ ID NO: 5767000 - DNA, 25 bp, Homo sapien
cagcctccagcagctcgcgctcctg

SEQ ID NO: 5767001 - DNA, 25 bp, Homo sapien
tctgtgctctgtacaacaggtagcg

SEQ ID NO: 5767002 - DNA, 25 bp, Homo sapien
gggctcctggggctaggcggtccat

SEQ ID NO: 5767003 - DNA, 25 bp, Homo sapien
gggggcctttctggggcacagggtg

SEQ ID NO: 5767004 - DNA, 25 bp, Homo sapien
aagggtgacagaagtttctttcttg

SEQ ID NO: 5767005 - DNA, 25 bp, Homo sapien
ccgatgcaattgagggtgcaagcgg

SEQ ID NO: 5767006 - DNA, 25 bp, Homo sapien
tccatgcacgagttttcggcatctg

SEQ ID NO: 5767007 - DNA, 25 bp, Homo sapien
ctgggagtgctggcagcctctgggc

SEQ ID NO: 5767008 - DNA, 25 bp, Homo sapien
agcatcgggggtggcagcctgctca

SEQ ID NO: 5767009 - DNA, 25 bp, Homo sapien
acgcaccgactggttgcgcagctct

SEQ ID NO: 5767010 - DNA, 25 bp, Homo sapien
ctgccggtacaccgacaggcgccgc

SEQ ID NO: 5767011 - DNA, 25 bp, Homo sapien
gttggagcagaagatgttgttggtc

SEQ ID NO: 5767012 - DNA, 25 bp, Homo sapien
gagatcactgtggctgctgtcaagg

SEQ ID NO: 5767013 - DNA, 25 bp, Homo sapien
tcaatagggtccctgggagtgctgg

SEQ ID NO: 5767014 - DNA, 25 bp, Homo sapien
gcagactctcgaaaaagacgttatc

SEQ ID NO: 5767015 - DNA, 25 bp, Homo sapien
ctgatgtcgcacttgagatcactgt

SEQ ID NO: 5767016 - DNA, 25 bp, Homo sapien
ggggccctgtgatggcaggagtgct

SEQ ID NO: 5767017 - DNA, 25 bp, Homo sapien
tctggctgcacttcctcttctgggc

SEQ ID NO: 5767018 - DNA, 25 bp, Homo sapien
gtcaaggagcgcgcacgagcagcac

SEQ ID NO: 5767019 - DNA, 25 bp, Homo sapien
gcaagggtgacagaagtttctttct

SEQ ID NO: 5767020 - DNA, 25 bp, Homo sapien
cagaggtccatgcatagccattcat

SEQ ID NO: 5767021 - DNA, 25 bp, Homo sapien
cgttgtattggagacatccaggtca

SEQ ID NO: 5767022 - DNA, 25 bp, Homo sapien
cgcgtgcatctgcgcgtgaaccgcg

SEQ ID NO: 5767023 - DNA, 25 bp, Homo sapien
gccagtccctgtgctcatgggctta

SEQ ID NO: 5767024 - DNA, 25 bp, Homo sapien
ctcgcggatcagctcctcggtctcg

SEQ ID NO: 5767025 - DNA, 25 bp, Homo sapien
tgggaagccatggaggagaagggga

SEQ ID NO: 5767026 - DNA, 25 bp, Homo sapien
ctgtgctcatgggcttagatcctgg

SEQ ID NO: 5767027 - DNA, 25 bp, Homo sapien
tgagactgccttggaggtgctgggc

SEQ ID NO: 5767028 - DNA, 25 bp, Homo sapien
gacatgtcaagctgggaagccatgg

SEQ ID NO: 5767029 - DNA, 25 bp, Homo sapien
ccgaagcgggggctcgctctgtagg

SEQ ID NO: 5767030 - DNA, 25 bp, Homo sapien
tctcggcacgcgcgcggcccagctg

SEQ ID NO: 5767031 - DNA, 25 bp, Homo sapien
ctccatggagcctctgacagagtcc

SEQ ID NO: 5767032 - DNA, 25 bp, Homo sapien
agggcgggtgtgtctgcacctaggg

SEQ ID NO: 5767033 - DNA, 25 bp, Homo sapien
ggctgatgcccctttgcagctgggc

SEQ ID NO: 5767034 - DNA, 25 bp, Homo sapien
gcccgacgcctccaggcatcctgag

SEQ ID NO: 5767035 - DNA, 25 bp, Homo sapien
cttggcttccgcctggcattgctgg

SEQ ID NO: 5767036 - DNA, 25 bp, Homo sapien
ctgccaggtcttgggatagccagtc

SEQ ID NO: 5767037 - DNA, 25 bp, Homo sapien
ctggcgaggagtgggctggcgagga

SEQ ID NO: 5767038 - DNA, 25 bp, Homo sapien
ctcgtatccggtggggtgggctgat

SEQ ID NO: 5767039 - DNA, 25 bp, Homo sapien
tgacagagtccccagggggaacaac

SEQ ID NO: 5767040 - DNA, 25 bp, Homo sapien
ctgagtcttccgagctgctgatcac

SEQ ID NO: 5767041 - DNA, 25 bp, Homo sapien
tctgcgcgtgaaccgcgccaaaggc

SEQ ID NO: 5767042 - DNA, 25 bp, Homo sapien
acctggcgcacgcgctcgcggatca

SEQ ID NO: 5767043 - DNA, 25 bp, Homo sapien
gggctccatgcacgagttttcggca

SEQ ID NO: 5767044 - DNA, 25 bp, Homo sapien
tggagtgcgtgaagagaagctgaag

SEQ ID NO: 5767045 - DNA, 25 bp, Homo sapien
cgcctgggactgggctgatgggggg

SEQ ID NO: 5767046 - DNA, 25 bp, Homo sapien
ggggtcggggcatggaaggctgtgc

SEQ ID NO: 5767047 - DNA, 25 bp, Homo sapien
gcagatggggcactgcatgcccgac

SEQ ID NO: 5767048 - DNA, 25 bp, Homo sapien
gacgggcgcctgggactgggctgat

SEQ ID NO: 5767049 - DNA, 25 bp, Homo sapien
gcggccttcagagggggtctcgggg

SEQ ID NO: 5767050 - DNA, 25 bp, Homo sapien
agcagctcgcgctcctgagcccgca

SEQ ID NO: 5767051 - DNA, 25 bp, Homo sapien
gctgcacttcctcttctgggctgtc

SEQ ID NO: 5767052 - DNA, 25 bp, Homo sapien
gcaccgactggttgcgcagctctgc

SEQ ID NO: 5767053 - DNA, 25 bp, Homo sapien
gtgatggcaggagtgctggcttgga

SEQ ID NO: 5767054 - DNA, 25 bp, Homo sapien
cttggagtgcgtgaagagaagctga

SEQ ID NO: 5767055 - DNA, 25 bp, Homo sapien
cggtttagatcttggagtgcgtgaa

SEQ ID NO: 5767056 - DNA, 25 bp, Homo sapien
gcttggaccacatggggagaccaag

SEQ ID NO: 5767057 - DNA, 25 bp, Homo sapien
gcagcagcttcgggcacttggcttc

SEQ ID NO: 5767058 - DNA, 25 bp, Homo sapien
tagcactctcagaggcctgcttgac

SEQ ID NO: 5767059 - DNA, 25 bp, Homo sapien
ggagctgctcgcactcaaagcacca

SEQ ID NO: 5767060 - DNA, 25 bp, Homo sapien
ccacatctgccaggtcttgggatag

SEQ ID NO: 5767061 - DNA, 25 bp, Homo sapien
ttccttaaccaagaattaatgagtg

SEQ ID NO: 5767062 - DNA, 25 bp, Homo sapien
ccctgggagtgctggcagcctctgg

SEQ ID NO: 5767063 - DNA, 25 bp, Homo sapien
ggcaggggtgttggctgcaaggtta

SEQ ID NO: 5767064 - DNA, 25 bp, Homo sapien
ggccaagctggggggtggtatgtgc

SEQ ID NO: 5767065 - DNA, 25 bp, Homo sapien
tattgagcagccacatctgccaggt

SEQ ID NO: 5767066 - DNA, 25 bp, Homo sapien
agagcgcctggcgcaggaaaccgtg

SEQ ID NO: 5767067 - DNA, 25 bp, Homo sapien
gcccgtgcggatgcgctgcagcaca

SEQ ID NO: 5767068 - DNA, 25 bp, Homo sapien
cctgggctgctccggggagctccga

SEQ ID NO: 5767069 - DNA, 25 bp, Homo sapien
ggcctcgtgcttgaggaaccactgg

SEQ ID NO: 5767070 - DNA, 25 bp, Homo sapien
tggcgcaggaaaccgtgcatgtcca

SEQ ID NO: 5767071 - DNA, 25 bp, Homo sapien
tggtaccgcgcgtccacagcctcca

SEQ ID NO: 5767072 - DNA, 25 bp, Homo sapien
ttcgggcacttggcttccgcctggc

SEQ ID NO: 5767073 - DNA, 25 bp, Homo sapien
aaccgcgccaaaggcactatcctgc

SEQ ID NO: 5767074 - DNA, 25 bp, Homo sapien
ttcccctctcagccagagaagaccc

SEQ ID NO: 5767075 - DNA, 25 bp, Homo sapien
ttgatggttcaacaagtgtttattg

SEQ ID NO: 5767076 - DNA, 25 bp, Homo sapien
agagtctgggctctgccttcccctg

SEQ ID NO: 5767077 - DNA, 25 bp, Homo sapien
gcgtagcacttcatcctctgcacca

SEQ ID NO: 5767078 - DNA, 25 bp, Homo sapien
tggggcactgggtctggctgcactt

SEQ ID NO: 5767079 - DNA, 25 bp, Homo sapien
aaggcggatggctctctgtgctctg

SEQ ID NO: 5767080 - DNA, 25 bp, Homo sapien
gaacacaggagagtgcaagggtgac

SEQ ID NO: 5767081 - DNA, 25 bp, Homo sapien
ggcacttggacttgagaggcctcca

SEQ ID NO: 5767082 - DNA, 25 bp, Homo sapien
agccgactggccatctcctcgtagt

SEQ ID NO: 5767083 - DNA, 25 bp, Homo sapien
ctcctcgtagtcgcgctggtaccgc

SEQ ID NO: 5767084 - DNA, 25 bp, Homo sapien
agctgctgatcaccacaacgcgttc

SEQ ID NO: 5767085 - DNA, 25 bp, Homo sapien
gcacgagcagcacagcggcttggaa

SEQ ID NO: 5767086 - DNA, 25 bp, Homo sapien
actcgtcgaagccatcggtgcgcac

SEQ ID NO: 5767087 - DNA, 25 bp, Homo sapien
gatgcaattgagggtgcaagcggag

SEQ ID NO: 5767088 - DNA, 25 bp, Homo sapien
gacagaagtttctttcttgggcaaa

SEQ ID NO: 5767089 - DNA, 25 bp, Homo sapien
cgggctggtggggaggccaagctgg

SEQ ID NO: 5767090 - DNA, 25 bp, Homo sapien
gggctggcggccttcagagggggtc

SEQ ID NO: 5767091 - DNA, 25 bp, Homo sapien
aacaagtgtttattgagcagccaca

SEQ ID NO: 5767092 - DNA, 25 bp, Homo sapien
tgctctcagcagagactggactggc

SEQ ID NO: 5767093 - DNA, 25 bp, Homo sapien
gcaggagtgctggcttggaccacat

SEQ ID NO: 5767094 - DNA, 25 bp, Homo sapien
tgccttggaggtgctgggcctgggc

SEQ ID NO: 5767095 - DNA, 25 bp, Homo sapien
tcactgtggctgctgtcaaggagcg

SEQ ID NO: 5767096 - DNA, 25 bp, Homo sapien
tccttgtgctctcagcagagactgg

SEQ ID NO: 5767097 - DNA, 25 bp, Homo sapien
cgctctgtagggctggggctggggc

SEQ ID NO: 5767098 - DNA, 25 bp, Homo sapien
cgttgattcattccttaaccaagaa

SEQ ID NO: 5767099 - DNA, 25 bp, Homo sapien
gcatgtccagcacctcctggtccga

SEQ ID NO: 5767100 - DNA, 25 bp, Homo sapien
gcgccgctgcagactctcgaaaaag

SEQ ID NO: 5767101 - DNA, 25 bp, Homo sapien
tgggctgctccggggagctccgagc

SEQ ID NO: 5767102 - DNA, 25 bp, Homo sapien
ggaagacatgtcaagctgggaagcc

SEQ ID NO: 5767103 - DNA, 25 bp, Homo sapien
ttcagagggggtctcggggggaggc

SEQ ID NO: 5767104 - DNA, 25 bp, Homo sapien
cgaggagtgggctggcgaggactgt

SEQ ID NO: 5767105 - DNA, 25 bp, Homo sapien
ccacagggcaggctggaggctcctt

SEQ ID NO: 5767106 - DNA, 25 bp, Homo sapien
tctgctaggggccgggcctcgtgct

SEQ ID NO: 5767107 - DNA, 25 bp, Homo sapien
cagaacacaggagagtgcaagggtg

SEQ ID NO: 5767108 - DNA, 25 bp, Homo sapien
cagcgggtgcacacagcctgcgcat

SEQ ID NO: 5767109 - DNA, 25 bp, Homo sapien
ttgctgttgggcaggaagacctcac

SEQ ID NO: 5767110 - DNA, 25 bp, Homo sapien
tgagggtgcaagcggagggcatggc

SEQ ID NO: 5767111 - DNA, 25 bp, Homo sapien
gtgcttgaggaaccactggtgtgcc

SEQ ID NO: 5767112 - DNA, 25 bp, Homo sapien
gtcgttgtattggagacatccaggt

SEQ ID NO: 5767113 - DNA, 25 bp, Homo sapien
gttggggttggagcagaagatgttg

SEQ ID NO: 5767114 - DNA, 25 bp, Homo sapien
ggggctcgctctgtagggctggggc

SEQ ID NO: 5767115 - DNA, 25 bp, Homo sapien
agtctgggctctgccttcccctgcc

SEQ ID NO: 5767116 - DNA, 25 bp, Homo sapien
gcctccccggcgccactggccacgt

SEQ ID NO: 5767117 - DNA, 25 bp, Homo sapien
caggaggctcgctgtgaggctcagc

SEQ ID NO: 5767118 - DNA, 25 bp, Homo sapien
cagaggagctgctcgcactcaaagc

SEQ ID NO: 5767119 - DNA, 25 bp, Homo sapien
tcctgagcacagcgtgtgcagacaa

SEQ ID NO: 5767120 - DNA, 25 bp, Homo sapien
cagagggggtctcggggggaggcat

SEQ ID NO: 5767121 - DNA, 25 bp, Homo sapien
tggtgtgcctcgaagcacttggcgc

SEQ ID NO: 5767122 - DNA, 25 bp, Homo sapien
ttcccctgggtgatgcaagagctga

SEQ ID NO: 5767123 - DNA, 25 bp, Homo sapien
tgggggtcggggcatggaaggctgt

SEQ ID NO: 5767124 - DNA, 25 bp, Homo sapien
aacgtcaatagggtccctgggagtg

SEQ ID NO: 5767125 - DNA, 25 bp, Homo sapien
ttcattcgttgattcattccttaac

SEQ ID NO: 5767126 - DNA, 25 bp, Homo sapien
ggttacaagagaagggtagcactct

SEQ ID NO: 5767127 - DNA, 25 bp, Homo sapien
tgatgaccttcctggggcactgggt

SEQ ID NO: 5767128 - DNA, 25 bp, Homo sapien
atggcgaaggcggatggctctctgt

SEQ ID NO: 5767129 - DNA, 25 bp, Homo sapien
gatggcaggagtgctggcttggacc

SEQ ID NO: 5767130 - DNA, 25 bp, Homo sapien
tgctgtcaaggagcgcgcacgagca

SEQ ID NO: 5767131 - DNA, 25 bp, Homo sapien
gacggggctcctggggctaggcggt

SEQ ID NO: 5767132 - DNA, 25 bp, Homo sapien
tgcgcgtgaaccgcgccaaaggcac

SEQ ID NO: 5767133 - DNA, 25 bp, Homo sapien
ggaggaggcagctcaggggccgggc

SEQ ID NO: 5767134 - DNA, 25 bp, Homo sapien
caggcggcagagcgcctggcgcagg

SEQ ID NO: 5767135 - DNA, 25 bp, Homo sapien
agctcctcggtctcggcacgcgcgc

SEQ ID NO: 5767136 - DNA, 25 bp, Homo sapien
ggtgagactgccttggaggtgctgg

SEQ ID NO: 5767137 - DNA, 25 bp, Homo sapien
ccctcgtatccggtggggtgggctg

SEQ ID NO: 5767138 - DNA, 25 bp, Homo sapien
ccgactggccatctcctcgtagtcg

SEQ ID NO: 5767139 - DNA, 25 bp, Homo sapien
aggaagacctcacttcctatgacgg

SEQ ID NO: 5767140 - DNA, 25 bp, Homo sapien
acatcctcggcagtagatgctggtc

SEQ ID NO: 5767141 - DNA, 25 bp, Homo sapien
ggactgtggctcggcggtctccatg

SEQ ID NO: 5767142 - DNA, 25 bp, Homo sapien
accacatggggagaccaagtccgaa

SEQ ID NO: 5767143 - DNA, 25 bp, Homo sapien
gctccatgcacgagttttcggcatc

SEQ ID NO: 5767144 - DNA, 25 bp, Homo sapien
cgggtgcaggctccatggaccccag

SEQ ID NO: 5767145 - DNA, 25 bp, Homo sapien
aatctcagccatgccttagccttcc

SEQ ID NO: 5767146 - DNA, 25 bp, Homo sapien
ggcacagggtggtgggaatgtaatt

SEQ ID NO: 5767147 - DNA, 25 bp, Homo sapien
ggaaccactggtgtgcctcgaagca

SEQ ID NO: 5767148 - DNA, 25 bp, Homo sapien
gacatccaggtcaacgtcaataggg

SEQ ID NO: 5767149 - DNA, 25 bp, Homo sapien
ggctgatggggggcctttctggggc

SEQ ID NO: 5767150 - DNA, 25 bp, Homo sapien
caagtgtttattgagcagccacatc

SEQ ID NO: 5767151 - DNA, 25 bp, Homo sapien
gactccatcttgatgaccttcctgg

SEQ ID NO: 5767152 - DNA, 25 bp, Homo sapien
ggctggggctgggctggcggccttc

SEQ ID NO: 5767153 - DNA, 25 bp, Homo sapien
cgggcctcgtgcttgaggaaccact

SEQ ID NO: 5767154 - DNA, 25 bp, Homo sapien
gagtcttccgagctgctgatcacca

SEQ ID NO: 5767155 - DNA, 25 bp, Homo sapien
tgatgcccctttgcagctgggcagg

SEQ ID NO: 5767156 - DNA, 25 bp, Homo sapien
gccagggactcagaacacaggagag

SEQ ID NO: 5767157 - DNA, 25 bp, Homo sapien
tccaggcggcccagccgactggcca

SEQ ID NO: 5767158 - DNA, 25 bp, Homo sapien
gagtgctactctgtgcagggcctgt

SEQ ID NO: 5767159 - DNA, 25 bp, Homo sapien
cagtagatgctggtcagcgtagggg

SEQ ID NO: 5767160 - DNA, 25 bp, Homo sapien
cctggcagatggggcactgcatgcc

SEQ ID NO: 5767161 - DNA, 25 bp, Homo sapien
agctgggcaggatgttcctgggcat

SEQ ID NO: 5767162 - DNA, 25 bp, Homo sapien
gaagggtagcactctcagaggcctg

SEQ ID NO: 5767163 - DNA, 25 bp, Homo sapien
aaagcaccagaagtcggccgactct

SEQ ID NO: 5767164 - DNA, 25 bp, Homo sapien
atggaccccagcttagtttcgattc

SEQ ID NO: 5767165 - DNA, 25 bp, Homo sapien
tccaggtcaacgtcaatagggtccc

SEQ ID NO: 5767166 - DNA, 25 bp, Homo sapien
atctgccggtacaccgacaggcgcc

SEQ ID NO: 5767167 - DNA, 25 bp, Homo sapien
cagggactcagaacacaggagagtg

SEQ ID NO: 5767168 - DNA, 25 bp, Homo sapien
tacagctgcatctttcccctgggtg

SEQ ID NO: 5767169 - DNA, 25 bp, Homo sapien
gtccctgggagtgctggcagcctct

SEQ ID NO: 5767170 - DNA, 25 bp, Homo sapien
ggggcctcggagatcgggcgggtgc

SEQ ID NO: 5767171 - DNA, 25 bp, Homo sapien
caggcgcaccttgaactcgtcgaag

SEQ ID NO: 5767172 - DNA, 25 bp, Homo sapien
cgaaggcggatggctctctgtgctc

SEQ ID NO: 5767173 - DNA, 25 bp, Homo sapien
gtcttccgagctgctgatcaccaca

SEQ ID NO: 5767174 - DNA, 25 bp, Homo sapien
tggatctctgcgctgatgtcgcact

SEQ ID NO: 5767175 - DNA, 25 bp, Homo sapien
ttgaactcgtcgaagccatcggtgc

SEQ ID NO: 5767176 - DNA, 25 bp, Homo sapien
ggcatggaaggctgtgctattggcc

SEQ ID NO: 5767177 - DNA, 25 bp, Homo sapien
cacagcccctcgtatccggtggggt

SEQ ID NO: 5767178 - DNA, 25 bp, Homo sapien
cagcttcgggcacttggcttccgcc

SEQ ID NO: 5767179 - DNA, 25 bp, Homo sapien
aaccactggtgtgcctcgaagcact

SEQ ID NO: 5767180 - DNA, 25 bp, Homo sapien
tgggctgatggggggcctttctggg

SEQ ID NO: 5767181 - DNA, 25 bp, Homo sapien
ggaggctccttgtgctctcagcaga

SEQ ID NO: 5767182 - DNA, 25 bp, Homo sapien
gccaaaggcactatcctgctcctgc

SEQ ID NO: 5767183 - DNA, 25 bp, Homo sapien
cagaaactggaactcctcctccgaa

SEQ ID NO: 5767184 - DNA, 25 bp, Homo sapien
gcagcctctgggctggctttcttgg

SEQ ID NO: 5767185 - DNA, 25 bp, Homo sapien
cttcctatgacggggctcctggggc

SEQ ID NO: 5767186 - DNA, 25 bp, Homo sapien
cgcctggcgcaggaaaccgtgcatg

SEQ ID NO: 5767187 - DNA, 25 bp, Homo sapien
ctgctggatctctgcgctgatgtcg

SEQ ID NO: 5767188 - DNA, 25 bp, Homo sapien
ggcgaggagtgggctggcgaggact

SEQ ID NO: 5767189 - DNA, 25 bp, Homo sapien
acgtgagctaccacctggcgcacgc

SEQ ID NO: 5767190 - DNA, 25 bp, Homo sapien
gaggagctgctcgcactcaaagcac

SEQ ID NO: 5767191 - DNA, 25 bp, Homo sapien
ggcggatggctctctgtgctctgta

SEQ ID NO: 5767192 - DNA, 25 bp, Homo sapien
atctgagtcttccgagctgctgatc

SEQ ID NO: 5767193 - DNA, 25 bp, Homo sapien
gagggggtctcggggggaggcatgg

SEQ ID NO: 5767194 - DNA, 25 bp, Homo sapien
gctcctggggctaggcggtccatcc

SEQ ID NO: 5767195 - DNA, 25 bp, Homo sapien
tccccggcgccactggccacgtggt

SEQ ID NO: 5767196 - DNA, 25 bp, Homo sapien
ggcagctcaggggccgggcaggggt

SEQ ID NO: 5767197 - DNA, 25 bp, Homo sapien
caggggtgttggctgcaaggttaca

SEQ ID NO: 5767198 - DNA, 25 bp, Homo sapien
tggcagcctctgggctggctttctt

SEQ ID NO: 5767199 - DNA, 25 bp, Homo sapien
aaatgggaggagccccggagggagc

SEQ ID NO: 5767200 - DNA, 25 bp, Homo sapien
ggcgggtgcaggctccatggacccc

SEQ ID NO: 5767201 - DNA, 25 bp, Homo sapien
acacagcctgcgcatccacaatctg

SEQ ID NO: 5767202 - DNA, 25 bp, Homo sapien
acagcgtgtgcagacaaggcagcag

SEQ ID NO: 5767203 - DNA, 25 bp, Homo sapien
ggcaggatggttgaggggccctgtg

SEQ ID NO: 5767204 - DNA, 25 bp, Homo sapien
gtgcaagggtgacagaagtttcttt

SEQ ID NO: 5767205 - DNA, 25 bp, Homo sapien
taattggagaggcttccagaggcac

SEQ ID NO: 5767206 - DNA, 25 bp, Homo sapien
tcctggtgatcaggaggctcgctgt

SEQ ID NO: 5767207 - DNA, 25 bp, Homo sapien
cagcagagactggactggcgaggag

SEQ ID NO: 5767208 - DNA, 25 bp, Homo sapien
tgggataaatgggaggagccccgga

SEQ ID NO: 5767209 - DNA, 25 bp, Homo sapien
ggggcatggaaggctgtgctattgg

SEQ ID NO: 5767210 - DNA, 25 bp, Homo sapien
cgtgtgcagacaaggcagcagcttc

SEQ ID NO: 5767211 - DNA, 25 bp, Homo sapien
ggcttggaacatcctcggcagtaga

SEQ ID NO: 5767212 - DNA, 25 bp, Homo sapien
ccttcctggggcactgggtctggct

SEQ ID NO: 5767213 - DNA, 25 bp, Homo sapien
tcgattctcggtttagatcttggag

SEQ ID NO: 5767214 - DNA, 25 bp, Homo sapien
tgatcaggaggctcgctgtgaggct

SEQ ID NO: 5767215 - DNA, 25 bp, Homo sapien
ggagggagcggctgcgggatcgcac

SEQ ID NO: 5767216 - DNA, 25 bp, Homo sapien
aagagaagggtagcactctcagagg

SEQ ID NO: 5767217 - DNA, 25 bp, Homo sapien
taagagcatgggctggaggaggcag

SEQ ID NO: 5767218 - DNA, 25 bp, Homo sapien
aggcctgcttgacgggcgcctggga

SEQ ID NO: 5767219 - DNA, 25 bp, Homo sapien
catccaggcggcccagccgactggc

SEQ ID NO: 5767220 - DNA, 25 bp, Homo sapien
gagaccaagtccgaataggggcccg

SEQ ID NO: 5767221 - DNA, 25 bp, Homo sapien
gctggggggtggtatgtgccacagg

SEQ ID NO: 5767222 - DNA, 25 bp, Homo sapien
agcaccagaagtcggccgactcttt

SEQ ID NO: 5767223 - DNA, 25 bp, Homo sapien
aggctcgctgtgaggctcagcatcg

SEQ ID NO: 5767224 - DNA, 25 bp, Homo sapien
ggtcttgggatagccagtccctgtg

SEQ ID NO: 5767225 - DNA, 25 bp, Homo sapien
tgtaagagcatgggctggaggaggc

SEQ ID NO: 5767226 - DNA, 25 bp, Homo sapien
gtccaggaactcacgcaccgactgg

SEQ ID NO: 5767227 - DNA, 25 bp, Homo sapien
agttttcggcatctgagtcttccga

SEQ ID NO: 5767228 - DNA, 25 bp, Homo sapien
gaacatcctcggcagtagatgctgg

SEQ ID NO: 5767229 - DNA, 25 bp, Homo sapien
aagctgggaagccatggaggagaag

SEQ ID NO: 5767230 - DNA, 25 bp, Homo sapien
aggatgttcctgggcattggcagga

SEQ ID NO: 5767231 - DNA, 25 bp, Homo sapien
ccttaaccaagaattaatgagtgct

SEQ ID NO: 5767232 - DNA, 25 bp, Homo sapien
gggcctttctggggcacagggtggt

SEQ ID NO: 5767233 - DNA, 25 bp, Homo sapien
cctgcccccaccacggaagacatgt

SEQ ID NO: 5767234 - DNA, 25 bp, Homo sapien
gacccaggtctccctgcccagaggt

SEQ ID NO: 5767235 - DNA, 25 bp, Homo sapien
atgcgctgcagcacagcatccaggc

SEQ ID NO: 5767236 - DNA, 25 bp, Homo sapien
ctgcttgacgggcgcctgggactgg

SEQ ID NO: 5767237 - DNA, 25 bp, Homo sapien
ggcgggtgtgtctgcacctaggggc

SEQ ID NO: 5767238 - DNA, 25 bp, Homo sapien
ggtggggaggccaagctggggggtg

SEQ ID NO: 5767239 - DNA, 25 bp, Homo sapien
gcagcacagcggcttggaacatcct

SEQ ID NO: 5767240 - DNA, 25 bp, Homo sapien
ggtccatgcatagccattcattcgt

SEQ ID NO: 5767241 - DNA, 25 bp, Homo sapien
tcaacgtcaatagggtccctgggag

SEQ ID NO: 5767242 - DNA, 25 bp, Homo sapien
tggggggtggtatgtgccacagggc

SEQ ID NO: 5767243 - DNA, 25 bp, Homo sapien
ctgcgtcatggcgtccagctcctcc

SEQ ID NO: 5767244 - DNA, 25 bp, Homo sapien
gcgaggactgtggctcggcggtctc

SEQ ID NO: 5767245 - DNA, 25 bp, Homo sapien
gcaggaaaccgtgcatgtccagcac

SEQ ID NO: 5767246 - DNA, 25 bp, Homo sapien
aggagagtgcaagggtgacagaagt

SEQ ID NO: 5767247 - DNA, 25 bp, Homo sapien
gagcccgcacgtgagctaccacctg

SEQ ID NO: 5767248 - DNA, 25 bp, Homo sapien
gtgcacacagcctgcgcatccacaa

SEQ ID NO: 5767249 - DNA, 25 bp, Homo sapien
cagggtggtgggaatgtaattggag

SEQ ID NO: 5767250 - DNA, 25 bp, Homo sapien
cgaagcacttggcgcagaggagctg

SEQ ID NO: 5767251 - DNA, 25 bp, Homo sapien
accgacaggcgccgctgcagactct

SEQ ID NO: 5767252 - DNA, 25 bp, Homo sapien
ggggtgttggctgcaaggttacaag

SEQ ID NO: 5767253 - DNA, 25 bp, Homo sapien
ggatgcgctgcagcacagcatccag

SEQ ID NO: 5767254 - DNA, 25 bp, Homo sapien
agcgggggctcgctctgtagggctg

SEQ ID NO: 5767255 - DNA, 25 bp, Homo sapien
ggatcccacggtggacggcagggcg

SEQ ID NO: 5767256 - DNA, 25 bp, Homo sapien
caagcggagggcatggcgaaggcgg

SEQ ID NO: 5767257 - DNA, 25 bp, Homo sapien
ggaggtgctgggcctgggctgctcc

SEQ ID NO: 5767258 - DNA, 25 bp, Homo sapien
cgctcgcggatcagctcctcggtct

SEQ ID NO: 5767259 - DNA, 25 bp, Homo sapien
tccgagccaaccttgcctccttccc

SEQ ID NO: 5767260 - DNA, 25 bp, Homo sapien
gggcatggcgaaggcggatggctct

SEQ ID NO: 5767261 - DNA, 25 bp, Homo sapien
cccggcgccactggccacgtggttg

SEQ ID NO: 5767262 - DNA, 25 bp, Homo sapien
gaaactggaactcctcctccgaagc

SEQ ID NO: 5767263 - DNA, 25 bp, Homo sapien
ggcggtctccatgggctccatgcac

SEQ ID NO: 5767264 - DNA, 25 bp, Homo sapien
aggcggtccatccaggtggggtggt

SEQ ID NO: 5767265 - DNA, 25 bp, Homo sapien
gaagtttctttcttgggcaaagagg

SEQ ID NO: 5767266 - DNA, 25 bp, Homo sapien
gcttgacgggcgcctgggactgggc

SEQ ID NO: 5767267 - DNA, 25 bp, Homo sapien
gctcagcatcgggggtggcagcctg

SEQ ID NO: 5767268 - DNA, 25 bp, Homo sapien
gctcgcactcaaagcaccagaagtc

SEQ ID NO: 5767269 - DNA, 25 bp, Homo sapien
gggcaggatgttcctgggcattggc

SEQ ID NO: 5767270 - DNA, 25 bp, Homo sapien
aggtgctgggcctgggctgctccgg

SEQ ID NO: 5767271 - DNA, 25 bp, Homo sapien
ttcttggatacagctgcatctttcc

SEQ ID NO: 5767272 - DNA, 25 bp, Homo sapien
ggcgcagaggagctgctcgcactca

SEQ ID NO: 5767273 - DNA, 25 bp, Homo sapien
gtcggccgactctttgcagcgggtg

SEQ ID NO: 5767274 - DNA, 25 bp, Homo sapien
ctatgacggggctcctggggctagg

SEQ ID NO: 5767275 - DNA, 25 bp, Homo sapien
agatgctggtcagcgtaggggtgcg

SEQ ID NO: 5767276 - DNA, 25 bp, Homo sapien
cactggccacgtggttgctgttggg

SEQ ID NO: 5767277 - DNA, 25 bp, Homo sapien
gctggtaccgcgcgtccacagcctc

SEQ ID NO: 5767278 - DNA, 25 bp, Homo sapien
atcctcggcagtagatgctggtcag

SEQ ID NO: 5767279 - DNA, 25 bp, Homo sapien
ggctccatggaccccagcttagttt

SEQ ID NO: 5767280 - DNA, 25 bp, Homo sapien
tcttgggcaaagaggcctggaatgg

SEQ ID NO: 5767281 - DNA, 25 bp, Homo sapien
ttgcagctgggcaggatgttcctgg

SEQ ID NO: 5767282 - DNA, 25 bp, Homo sapien
gtggtgggaatgtaattggagaggc

SEQ ID NO: 5767283 - DNA, 25 bp, Homo sapien
caccacggaagacatgtcaagctgg

SEQ ID NO: 5767284 - DNA, 25 bp, Homo sapien
cgtcaatagggtccctgggagtgct

SEQ ID NO: 5767285 - DNA, 25 bp, Homo sapien
tctcgaaaaagacgttatccagggc

SEQ ID NO: 5767286 - DNA, 25 bp, Homo sapien
gctctctgtgctctgtacaacaggt

SEQ ID NO: 5767287 - DNA, 25 bp, Homo sapien
agtttcgattctcggtttagatctt

SEQ ID NO: 5767288 - DNA, 25 bp, Homo sapien
ggggcactgcatgcccgacgcctcc

SEQ ID NO: 5767289 - DNA, 25 bp, Homo sapien
gaggactgtggctcggcggtctcca

SEQ ID NO: 5767290 - DNA, 25 bp, Homo sapien
ccttggaggtgctgggcctgggctg

SEQ ID NO: 5767291 - DNA, 25 bp, Homo sapien
tgcatagccattcattcgttgattc

SEQ ID NO: 5767292 - DNA, 25 bp, Homo sapien
agcatgggctggaggaggcagctca

SEQ ID NO: 5767293 - DNA, 25 bp, Homo sapien
gactggcgaggagtgggctggcgag

SEQ ID NO: 5767294 - DNA, 25 bp, Homo sapien
gagctccgagccaaccttgcctcct

SEQ ID NO: 5767295 - DNA, 25 bp, Homo sapien
cggcccagctggccgacagccgcgt

SEQ ID NO: 5767296 - DNA, 25 bp, Homo sapien
ccaggaactcacgcaccgactggtt

SEQ ID NO: 5767297 - DNA, 25 bp, Homo sapien
cctgctcctgcagcgcctgcgtcat

SEQ ID NO: 5767298 - DNA, 25 bp, Homo sapien
cctccaggcatcctgagcacagcgt

SEQ ID NO: 5767299 - DNA, 25 bp, Homo sapien
cattcattcgttgattcattcctta

SEQ ID NO: 5767300 - DNA, 25 bp, Homo sapien
gtattggagacatccaggtcaacgt

SEQ ID NO: 5767301 - DNA, 25 bp, Homo sapien
caaggagcgcgcacgagcagcacag

SEQ ID NO: 5767302 - DNA, 25 bp, Homo sapien
ttgacgggcgcctgggactgggctg

SEQ ID NO: 5767303 - DNA, 25 bp, Homo sapien
ggagcggctgcgggatcgcacagcc

SEQ ID NO: 5767304 - DNA, 25 bp, Homo sapien
gctggcagcgcagaaactggaactc

SEQ ID NO: 5767305 - DNA, 25 bp, Homo sapien
agcctctgggctggctttcttggat

SEQ ID NO: 5767306 - DNA, 25 bp, Homo sapien
gccgggcaggggtgttggctgcaag

SEQ ID NO: 5767307 - DNA, 25 bp, Homo sapien
agggcgcctggcagatggggcactg

SEQ ID NO: 5767308 - DNA, 25 bp, Homo sapien
ctggggctcctcctggcgcaggcgg

SEQ ID NO: 5767309 - DNA, 25 bp, Homo sapien
ctggaggaggcagctcaggggccgg

SEQ ID NO: 5767310 - DNA, 25 bp, Homo sapien
ggcaggctggaggctccttgtgctc

SEQ ID NO: 5767311 - DNA, 25 bp, Homo sapien
gcctgcttgacgggcgcctgggact

SEQ ID NO: 5767312 - DNA, 25 bp, Homo sapien
tggtgggctcctggggccgggcggg

SEQ ID NO: 5767313 - DNA, 25 bp, Homo sapien
agaagtcggccgactctttgcagcg

SEQ ID NO: 5767314 - DNA, 25 bp, Homo sapien
ttgagcagccacatctgccaggtct

SEQ ID NO: 5767315 - DNA, 25 bp, Homo sapien
ttgggcaaagaggcctggaatggtg

SEQ ID NO: 5767316 - DNA, 25 bp, Homo sapien
cggggggaggcatggtgggctcctg

SEQ ID NO: 5767317 - DNA, 25 bp, Homo sapien
gaggcatggtgggctcctggggccg

SEQ ID NO: 5767318 - DNA, 25 bp, Homo sapien
gccatggaggagaaggggagggcaa

SEQ ID NO: 5767319 - DNA, 25 bp, Homo sapien
ttacaagagaagggtagcactctca

SEQ ID NO: 5767320 - DNA, 25 bp, Homo sapien
gtggttgctgttgggcaggaagacc

SEQ ID NO: 5767321 - DNA, 25 bp, Homo sapien
aggtcctgcaggcgcaccttgaact

SEQ ID NO: 5767322 - DNA, 25 bp, Homo sapien
gctggcttggaccacatggggagac

SEQ ID NO: 5767323 - DNA, 25 bp, Homo sapien
gcctcgaagcacttggcgcagagga

SEQ ID NO: 5767324 - DNA, 25 bp, Homo sapien
agtgtttattgagcagccacatctg

SEQ ID NO: 5767325 - DNA, 25 bp, Homo sapien
agcatccaggcggcccagccgactg

SEQ ID NO: 5767326 - DNA, 25 bp, Homo sapien
gtttagatcttggagtgcgtgaaga

SEQ ID NO: 5767327 - DNA, 25 bp, Homo sapien
tgcgcatccacaatctgccggtaca

SEQ ID NO: 5767328 - DNA, 25 bp, Homo sapien
gaggcttccagaggcacttggactt

SEQ ID NO: 5767329 - DNA, 25 bp, Homo sapien
ctctggggctcctcctggcgcaggc

SEQ ID NO: 5767330 - DNA, 25 bp, Homo sapien
tgcaggcgcaccttgaactcgtcga

SEQ ID NO: 5767331 - DNA, 25 bp, Homo sapien
gctcctgagcccgcacgtgagctac

SEQ ID NO: 5767332 - DNA, 25 bp, Homo sapien
ggtgatcaggaggctcgctgtgagg

SEQ ID NO: 5767333 - DNA, 25 bp, Homo sapien
cgtccacagcctccagcagctcgcg

SEQ ID NO: 5767334 - DNA, 25 bp, Homo sapien
tcggtgcgcacggcagcttgcaggc

SEQ ID NO: 5767335 - DNA, 25 bp, Homo sapien
catggaaggctgtgctattggccag

SEQ ID NO: 5767336 - DNA, 25 bp, Homo sapien
ggcgcaggcggcagagcgcctggcg

SEQ ID NO: 5767337 - DNA, 25 bp, Homo sapien
tctgcctccccggcgccactggcca

SEQ ID NO: 5767338 - DNA, 25 bp, Homo sapien
agtccccagggggaacaactgctcc

SEQ ID NO: 5767339 - DNA, 25 bp, Homo sapien
tctgcgctgatgtcgcacttgagat

SEQ ID NO: 5767340 - DNA, 25 bp, Homo sapien
ggtgccgtccaggaactcacgcacc

SEQ ID NO: 5767341 - DNA, 25 bp, Homo sapien
cgggcaggggtgttggctgcaaggt

SEQ ID NO: 5767342 - DNA, 25 bp, Homo sapien
gctgtgaggctcagcatcgggggtg

SEQ ID NO: 5767343 - DNA, 25 bp, Homo sapien
ctcagaacacaggagagtgcaaggg

SEQ ID NO: 5767344 - DNA, 25 bp, Homo sapien
ctcctcctggcgcaggcggcagagc

SEQ ID NO: 5767345 - DNA, 25 bp, Homo sapien
gctcatgggcttagatcctggcaga

SEQ ID NO: 5767346 - DNA, 25 bp, Homo sapien
ggccacgtggttgctgttgggcagg

SEQ ID NO: 5767347 - DNA, 25 bp, Homo sapien
tgcgctgatgtcgcacttgagatca

SEQ ID NO: 5767348 - DNA, 25 bp, Homo sapien
gccactggccacgtggttgctgttg

SEQ ID NO: 5767349 - DNA, 25 bp, Homo sapien
ggcacgcgcgcggcccagctggccg

SEQ ID NO: 5767350 - DNA, 25 bp, Homo sapien
gttcaacaagtgtttattgagcagc

SEQ ID NO: 5767351 - DNA, 25 bp, Homo sapien
tggttgcgcagctctgctaggggcc

SEQ ID NO: 5767352 - DNA, 25 bp, Homo sapien
gctggcgaggactgtggctcggcgg

SEQ ID NO: 5767353 - DNA, 25 bp, Homo sapien
gcagaagatgttgttggtcttgcgg

SEQ ID NO: 5767354 - DNA, 25 bp, Homo sapien
attggccagggactcagaacacagg

SEQ ID NO: 5767355 - DNA, 25 bp, Homo sapien
catccaggtcaacgtcaatagggtc

SEQ ID NO: 5767356 - DNA, 25 bp, Homo sapien
caggtagcggatcccacggtggacg

SEQ ID NO: 5767357 - DNA, 25 bp, Homo sapien
tgcacttcctcttctgggctgtcgt

SEQ ID NO: 5767358 - DNA, 25 bp, Homo sapien
gactcagaacacaggagagtgcaag

SEQ ID NO: 5767359 - DNA, 25 bp, Homo sapien
ctgcccgtgcggatgcgctgcagca

SEQ ID NO: 5767360 - DNA, 25 bp, Homo sapien
gtgacagaagtttctttcttgggca

SEQ ID NO: 5767361 - DNA, 25 bp, Homo sapien
gtggggtgggctgatgcccctttgc

SEQ ID NO: 5767362 - DNA, 25 bp, Homo sapien
ctaggcggtccatccaggtggggtg

SEQ ID NO: 5767363 - DNA, 25 bp, Homo sapien
tggggggcctttctggggcacaggg

SEQ ID NO: 5767364 - DNA, 25 bp, Homo sapien
ccagggcgggtgtgtctgcacctag

SEQ ID NO: 5767365 - DNA, 25 bp, Homo sapien
cacttcatcctctgcaccagcgcgc

SEQ ID NO: 5767366 - DNA, 25 bp, Homo sapien
agatcttggagtgcgtgaagagaag

SEQ ID NO: 5767367 - DNA, 25 bp, Homo sapien
gatcactgtggctgctgtcaaggag

SEQ ID NO: 5767368 - DNA, 25 bp, Homo sapien
ctgcaaggttacaagagaagggtag

SEQ ID NO: 5767369 - DNA, 25 bp, Homo sapien
tttgcagcgggtgcacacagcctgc

SEQ ID NO: 5767370 - DNA, 25 bp, Homo sapien
gaagacctcacttcctatgacgggg

SEQ ID NO: 5767371 - DNA, 25 bp, Homo sapien
ggtgcgcacggcagcttgcaggctc

SEQ ID NO: 5767372 - DNA, 25 bp, Homo sapien
cctctgacagagtccccagggggaa

SEQ ID NO: 5767373 - DNA, 25 bp, Homo sapien
tactctgtgcagggcctgtaagagc

SEQ ID NO: 5767374 - DNA, 25 bp, Homo sapien
tcagctcctcggtctcggcacgcgc

SEQ ID NO: 5767375 - DNA, 25 bp, Homo sapien
gtgagctaccacctggcgcacgcgc

SEQ ID NO: 5767376 - DNA, 25 bp, Homo sapien
aactgctccaagagtctgggctctg

SEQ ID NO: 5767377 - DNA, 25 bp, Homo sapien
aagctggggggtggtatgtgccaca

SEQ ID NO: 5767378 - DNA, 25 bp, Homo sapien
tctttcttgggcaaagaggcctgga

SEQ ID NO: 5767379 - DNA, 25 bp, Homo sapien
tgcatctgcgcgtgaaccgcgccaa

SEQ ID NO: 5767380 - DNA, 25 bp, Homo sapien
atcctggcagaggcctagtggagag

SEQ ID NO: 5767381 - DNA, 25 bp, Homo sapien
ctgagcccgcacgtgagctaccacc

SEQ ID NO: 5767382 - DNA, 25 bp, Homo sapien
gggtccctgggagtgctggcagcct

SEQ ID NO: 5767383 - DNA, 25 bp, Homo sapien
agttgttgagccactgggataaatg

SEQ ID NO: 5767384 - DNA, 25 bp, Homo sapien
catgtcaagctgggaagccatggag

SEQ ID NO: 5767385 - DNA, 25 bp, Homo sapien
gaggcttggggtgggggtcggggca

SEQ ID NO: 5767386 - DNA, 25 bp, Homo sapien
actctcgaaaaagacgttatccagg

SEQ ID NO: 5767387 - DNA, 25 bp, Homo sapien
tccacagcctccagcagctcgcgct

SEQ ID NO: 5767388 - DNA, 25 bp, Homo sapien
actggactggcgaggagtgggctgg

SEQ ID NO: 5767389 - DNA, 25 bp, Homo sapien
gggccgggcggggtcctgctggggc

SEQ ID NO: 5767390 - DNA, 25 bp, Homo sapien
aggggccgggcctcgtgcttgagga

SEQ ID NO: 5767391 - DNA, 25 bp, Homo sapien
actggtgtgcctcgaagcacttggc

SEQ ID NO: 5767392 - DNA, 25 bp, Homo sapien
tcctccgaagcgggggctcgctctg

SEQ ID NO: 5767393 - DNA, 25 bp, Homo sapien
gtagatgctggtcagcgtaggggtg

SEQ ID NO: 5767394 - DNA, 25 bp, Homo sapien
aggcctagtggagaggcttggggtg

SEQ ID NO: 5767395 - DNA, 25 bp, Homo sapien
ctggggcctcggagatcgggcgggt

SEQ ID NO: 5767396 - DNA, 25 bp, Homo sapien
gatacagctgcatctttcccctggg

SEQ ID NO: 5767397 - DNA, 25 bp, Homo sapien
aggcgtagcacttcatcctctgcac

SEQ ID NO: 5767398 - DNA, 25 bp, Homo sapien
ggcacttggcttccgcctggcattg

SEQ ID NO: 5767399 - DNA, 25 bp, Homo sapien
ctggaggctccttgtgctctcagca

SEQ ID NO: 5767400 - DNA, 25 bp, Homo sapien
cacgcgctcgcggatcagctcctcg

SEQ ID NO: 5767401 - DNA, 25 bp, Homo sapien
ggggagggcaaaaaagttgttgagc

SEQ ID NO: 5767402 - DNA, 25 bp, Homo sapien
gcctttctggggcacagggtggtgg

SEQ ID NO: 5767403 - DNA, 25 bp, Homo sapien
atcgggcgggtgcaggctccatgga

SEQ ID NO: 5767404 - DNA, 25 bp, Homo sapien
agggctggggctggggctgggctgg

SEQ ID NO: 5767405 - DNA, 25 bp, Homo sapien
tgagaggcctccatggagcctctga

SEQ ID NO: 5767406 - DNA, 25 bp, Homo sapien
gtgctgggcctgggctgctccgggg

SEQ ID NO: 5767407 - DNA, 25 bp, Homo sapien
gagtgcaagggtgacagaagtttct

SEQ ID NO: 5767408 - DNA, 25 bp, Homo sapien
ggagcctctgacagagtccccaggg

SEQ ID NO: 5767409 - DNA, 25 bp, Homo sapien
tggtggcttgaatctcagccatgcc

SEQ ID NO: 5767410 - DNA, 25 bp, Homo sapien
tcgcgctggtaccgcgcgtccacag

SEQ ID NO: 5767411 - DNA, 25 bp, Homo sapien
acaggagagtgcaagggtgacagaa

SEQ ID NO: 5767412 - DNA, 25 bp, Homo sapien
atcgcacagcccctcgtatccggtg

SEQ ID NO: 5767413 - DNA, 25 bp, Homo sapien
tgttgttggtcttgcgggtgccgtc

SEQ ID NO: 5767414 - DNA, 25 bp, Homo sapien
cttggacttgagaggcctccatgga

SEQ ID NO: 5767415 - DNA, 25 bp, Homo sapien
ttgaggaaccactggtgtgcctcga

SEQ ID NO: 5767416 - DNA, 25 bp, Homo sapien
ggggctggggctgggctggcggcct

SEQ ID NO: 5767417 - DNA, 25 bp, Homo sapien
gtagcacttcatcctctgcaccagc

SEQ ID NO: 5767418 - DNA, 25 bp, Homo sapien
catggtgggctcctggggccgggcg

SEQ ID NO: 5767419 - DNA, 25 bp, Homo sapien
gtgctggcagcctctgggctggctt

SEQ ID NO: 5767420 - DNA, 25 bp, Homo sapien
cccagaggtccatgcatagccattc

SEQ ID NO: 5767421 - DNA, 25 bp, Homo sapien
tctgggctgtcgttgtattggagac

SEQ ID NO: 5767422 - DNA, 25 bp, Homo sapien
aagccatcggtgcgcacggcagctt

SEQ ID NO: 5767423 - DNA, 25 bp, Homo sapien
gggactcagaacacaggagagtgca

SEQ ID NO: 5767424 - DNA, 25 bp, Homo sapien
ccagagaagacccaggtctccctgc

SEQ ID NO: 5767425 - DNA, 25 bp, Homo sapien
agcgcagaaactggaactcctcctc

SEQ ID NO: 5767426 - DNA, 25 bp, Homo sapien
agcgcgctgcccgtgcggatgcgct

SEQ ID NO: 5767427 - DNA, 25 bp, Homo sapien
gcaggaagacctcacttcctatgac

SEQ ID NO: 5767428 - DNA, 25 bp, Homo sapien
cggatcagctcctcggtctcggcac

SEQ ID NO: 5767429 - DNA, 25 bp, Homo sapien
caccacaacgcgttcctctgcctcc

SEQ ID NO: 5767430 - DNA, 25 bp, Homo sapien
ggcattgctggcagcgcagaaactg

SEQ ID NO: 5767431 - DNA, 25 bp, Homo sapien
ttttgatggttcaacaagtgtttat

SEQ ID NO: 5767432 - DNA, 25 bp, Homo sapien
gctcaggggccgggcaggggtgttg

SEQ ID NO: 5767433 - DNA, 25 bp, Homo sapien
gaattaatgagtgctactctgtgca

SEQ ID NO: 5767434 - DNA, 25 bp, Homo sapien
atgcaagagctgaggtcctgcaggc

SEQ ID NO: 5767435 - DNA, 25 bp, Homo sapien
ctgggcaggatgttcctgggcattg

SEQ ID NO: 5767436 - DNA, 25 bp, Homo sapien
aagtccgaataggggcccgatgcaa

SEQ ID NO: 5767437 - DNA, 25 bp, Homo sapien
aagatgttgttggtcttgcgggtgc

SEQ ID NO: 5767438 - DNA, 25 bp, Homo sapien
tcagcatcgggggtggcagcctgct

SEQ ID NO: 5767439 - DNA, 25 bp, Homo sapien
atcccacggtggacggcagggcgct

SEQ ID NO: 5767440 - DNA, 25 bp, Homo sapien
ctggggcacagggtggtgggaatgt

SEQ ID NO: 5767441 - DNA, 25 bp, Homo sapien
gactggccatctcctcgtagtcgcg

SEQ ID NO: 5767442 - DNA, 25 bp, Homo sapien
ggcagtagatgctggtcagcgtagg

SEQ ID NO: 5767443 - DNA, 25 bp, Homo sapien
ggctcctcctggcgcaggcggcaga

SEQ ID NO: 5767444 - DNA, 25 bp, Homo sapien
gctggcgaggagtgggctggcgagg

SEQ ID NO: 5767445 - DNA, 25 bp, Homo sapien
tggtcagcgtaggggtgcggtggtt

SEQ ID NO: 5767446 - DNA, 25 bp, Homo sapien
gtccgaataggggcccgatgcaatt

SEQ ID NO: 5767447 - DNA, 25 bp, Homo sapien
attgagggtgcaagcggagggcatg

SEQ ID NO: 5767448 - DNA, 25 bp, Homo sapien
gctgctgtcaaggagcgcgcacgag

SEQ ID NO: 5767449 - DNA, 25 bp, Homo sapien
acatctgccaggtcttgggatagcc

SEQ ID NO: 5767450 - DNA, 25 bp, Homo sapien
agggcaggctggaggctccttgtgc

SEQ ID NO: 5767451 - DNA, 25 bp, Homo sapien
ccatggagcctctgacagagtcccc

SEQ ID NO: 5767452 - DNA, 25 bp, Homo sapien
aaagaggcctggaatggtggcttga

SEQ ID NO: 5767453 - DNA, 25 bp, Homo sapien
gatctctgcgctgatgtcgcacttg

SEQ ID NO: 5767454 - DNA, 25 bp, Homo sapien
tggggtgggggtcggggcatggaag

SEQ ID NO: 5767455 - DNA, 25 bp, Homo sapien
tccaggcatcctgagcacagcgtgt

SEQ ID NO: 5767456 - DNA, 25 bp, Homo sapien
gcaggatgttcctgggcattggcag

SEQ ID NO: 5767457 - DNA, 25 bp, Homo sapien
tggactggcgaggagtgggctggcg

SEQ ID NO: 5767458 - DNA, 25 bp, Homo sapien
gcacagcatccaggcggcccagccg

SEQ ID NO: 5767459 - DNA, 25 bp, Homo sapien
cacagcggcttggaacatcctcggc

SEQ ID NO: 5767460 - DNA, 25 bp, Homo sapien
cagcacagcatccaggcggcccagc

SEQ ID NO: 5767461 - DNA, 25 bp, Homo sapien
ggtgggggtcggggcatggaaggct

SEQ ID NO: 5767462 - DNA, 25 bp, Homo sapien
cctcctggtccgaggcgtagcactt

SEQ ID NO: 5767463 - DNA, 25 bp, Homo sapien
caccttgaactcgtcgaagccatcg

SEQ ID NO: 5767464 - DNA, 25 bp, Homo sapien
gttgcgcagctctgctaggggccgg

SEQ ID NO: 5767465 - DNA, 25 bp, Homo sapien
ggtctcggcacgcgcgcggcccagc

SEQ ID NO: 5767466 - DNA, 25 bp, Homo sapien
ttgttgagccactgggataaatggg

SEQ ID NO: 5767467 - DNA, 25 bp, Homo sapien
agcacttcatcctctgcaccagcgc

SEQ ID NO: 5767468 - DNA, 25 bp, Homo sapien
agctgctcgcactcaaagcaccaga

SEQ ID NO: 5767469 - DNA, 25 bp, Homo sapien
ctgtgatggcaggagtgctggcttg

SEQ ID NO: 5767470 - DNA, 25 bp, Homo sapien
ccctttgcagctgggcaggatgttc

SEQ ID NO: 5767471 - DNA, 25 bp, Homo sapien
agcggagggcatggcgaaggcggat

SEQ ID NO: 5767472 - DNA, 25 bp, Homo sapien
ccctgtgctcatgggcttagatcct

SEQ ID NO: 5767473 - DNA, 25 bp, Homo sapien
caaaggcactatcctgctcctgcag

SEQ ID NO: 5767474 - DNA, 25 bp, Homo sapien
acaccgacaggcgccgctgcagact

SEQ ID NO: 5767475 - DNA, 25 bp, Homo sapien
ggaatgtaattggagaggcttccag

SEQ ID NO: 5767476 - DNA, 25 bp, Homo sapien
aatggtggcttgaatctcagccatg

SEQ ID NO: 5767477 - DNA, 25 bp, Homo sapien
cggcagcttgcaggctctggggctc

SEQ ID NO: 5767478 - DNA, 25 bp, Homo sapien
ctgctgatcaccacaacgcgttcct

SEQ ID NO: 5767479 - DNA, 25 bp, Homo sapien
cagggggaacaactgctccaagagt

SEQ ID NO: 5767480 - DNA, 25 bp, Homo sapien
ggccctgtgatggcaggagtgctgg

SEQ ID NO: 5767481 - DNA, 25 bp, Homo sapien
tgtgccacagggcaggctggaggct

SEQ ID NO: 5767482 - DNA, 25 bp, Homo sapien
gtctccatgggctccatgcacgagt

SEQ ID NO: 5767483 - DNA, 25 bp, Homo sapien
tcagccagagaagacccaggtctcc

SEQ ID NO: 5767484 - DNA, 25 bp, Homo sapien
cactatcctgctcctgcagcgcctg

SEQ ID NO: 5767485 - DNA, 25 bp, Homo sapien
tgctctgtacaacaggtagcggatc

SEQ ID NO: 5767486 - DNA, 25 bp, Homo sapien
ggggctgggctggcggccttcagag

SEQ ID NO: 5767487 - DNA, 25 bp, Homo sapien
cagcgtaggggtgcggtggttgggg

SEQ ID NO: 5767488 - DNA, 25 bp, Homo sapien
cccctgggtgatgcaagagctgagg

SEQ ID NO: 5767489 - DNA, 25 bp, Homo sapien
ttttcggcatctgagtcttccgagc

SEQ ID NO: 5767490 - DNA, 25 bp, Homo sapien
tgcacgagttttcggcatctgagtc

SEQ ID NO: 5767491 - DNA, 25 bp, Homo sapien
tccatgcatagccattcattcgttg

SEQ ID NO: 5767492 - DNA, 25 bp, Homo sapien
gccgcgtgcatctgcgcgtgaaccg

SEQ ID NO: 5767493 - DNA, 25 bp, Homo sapien
ccgtgcggatgcgctgcagcacagc

SEQ ID NO: 5767494 - DNA, 25 bp, Homo sapien
tcgcacttgagatcactgtggctgc

SEQ ID NO: 5767495 - DNA, 25 bp, Homo sapien
gctcagcgggctggtggggaggcca

SEQ ID NO: 5767496 - DNA, 25 bp, Homo sapien
gggcaggaagacctcacttcctatg

SEQ ID NO: 5767497 - DNA, 25 bp, Homo sapien
agcacctcctggtccgaggcgtagc

SEQ ID NO: 5767498 - DNA, 25 bp, Homo sapien
atcaccacaacgcgttcctctgcct

SEQ ID NO: 5767499 - DNA, 25 bp, Homo sapien
ggagggcaaaaaagttgttgagcca

SEQ ID NO: 5767500 - DNA, 25 bp, Homo sapien
tggcagaggcctagtggagaggctt

SEQ ID NO: 5767501 - DNA, 25 bp, Homo sapien
tgctaggggccgggcctcgtgcttg

SEQ ID NO: 5767502 - DNA, 25 bp, Homo sapien
tgctggggcctcggagatcgggcgg

SEQ ID NO: 5767503 - DNA, 25 bp, Homo sapien
gcggtccatccaggtggggtggtga

SEQ ID NO: 5767504 - DNA, 25 bp, Homo sapien
aagacgttatccagggcgggtgtgt

SEQ ID NO: 5767505 - DNA, 25 bp, Homo sapien
gtgcctcgaagcacttggcgcagag

SEQ ID NO: 5767506 - DNA, 25 bp, Homo sapien
tcagccatgccttagccttcccctc

SEQ ID NO: 5767507 - DNA, 25 bp, Homo sapien
agaagatgttgttggtcttgcgggt

SEQ ID NO: 5767508 - DNA, 25 bp, Homo sapien
gggcccgatgcaattgagggtgcaa

SEQ ID NO: 5767509 - DNA, 25 bp, Homo sapien
tcctggtccgaggcgtagcacttca

SEQ ID NO: 5767510 - DNA, 25 bp, Homo sapien
aggagtgggctggcgaggagtgggc

SEQ ID NO: 5767511 - DNA, 25 bp, Homo sapien
gggtcctgctggggcctcggagatc

SEQ ID NO: 5767512 - DNA, 25 bp, Homo sapien
ccacggaagacatgtcaagctggga

SEQ ID NO: 5767513 - DNA, 25 bp, Homo sapien
cgggcacttggcttccgcctggcat

SEQ ID NO: 5767514 - DNA, 25 bp, Homo sapien
tggaacatcctcggcagtagatgct

SEQ ID NO: 5767515 - DNA, 25 bp, Homo sapien
cgactggttgcgcagctctgctagg

SEQ ID NO: 5767516 - DNA, 25 bp, Homo sapien
cgcggatcagctcctcggtctcggc

SEQ ID NO: 5767517 - DNA, 25 bp, Homo sapien
ggtccgaggcgtagcacttcatcct

SEQ ID NO: 5767518 - DNA, 25 bp, Homo sapien
gcttcgggcacttggcttccgcctg

SEQ ID NO: 5767519 - DNA, 25 bp, Homo sapien
gccgggcggggtcctgctggggcct

SEQ ID NO: 5767520 - DNA, 25 bp, Homo sapien
ctcggggggaggcatggtgggctcc

SEQ ID NO: 5767521 - DNA, 25 bp, Homo sapien
acggcagggcgctcctggtgatcag

SEQ ID NO: 5767522 - DNA, 25 bp, Homo sapien
cagctctgctaggggccgggcctcg

SEQ ID NO: 5767523 - DNA, 25 bp, Homo sapien
ctcttctgggctgtcgttgtattgg

SEQ ID NO: 5767524 - DNA, 25 bp, Homo sapien
cagctgcatctttcccctgggtgat

SEQ ID NO: 5767525 - DNA, 25 bp, Homo sapien
cctggcagaggcctagtggagaggc

SEQ ID NO: 5767526 - DNA, 25 bp, Homo sapien
gctccggggagctccgagccaacct

SEQ ID NO: 5767527 - DNA, 25 bp, Homo sapien
gggggaacaactgctccaagagtct

SEQ ID NO: 5767528 - DNA, 25 bp, Homo sapien
gccttcagagggggtctcgggggga

SEQ ID NO: 5767529 - DNA, 25 bp, Homo sapien
agcgcctggcgcaggaaaccgtgca

SEQ ID NO: 5767530 - DNA, 25 bp, Homo sapien
ggctggaggctccttgtgctctcag

SEQ ID NO: 5767531 - DNA, 25 bp, Homo sapien
ggcctgggctgctccggggagctcc

SEQ ID NO: 5767532 - DNA, 25 bp, Homo sapien
actcaaagcaccagaagtcggccga

SEQ ID NO: 5767533 - DNA, 25 bp, Homo sapien
atcaggaggctcgctgtgaggctca

SEQ ID NO: 5767534 - DNA, 25 bp, Homo sapien
gcactcaaagcaccagaagtcggcc

SEQ ID NO: 5767535 - DNA, 25 bp, Homo sapien
gagtgctggcttggaccacatgggg

SEQ ID NO: 5767536 - DNA, 25 bp, Homo sapien
cgaagccatcggtgcgcacggcagc

SEQ ID NO: 5767537 - DNA, 25 bp, Homo sapien
gtgcggatgcgctgcagcacagcat

SEQ ID NO: 5767538 - DNA, 25 bp, Homo sapien
cttggatacagctgcatctttcccc

SEQ ID NO: 5767539 - DNA, 25 bp, Homo sapien
gcactctcagaggcctgcttgacgg

SEQ ID NO: 5767540 - DNA, 25 bp, Homo sapien
gtccagctcctcctgtcgctgctgg

SEQ ID NO: 5767541 - DNA, 25 bp, Homo sapien
ggtgatgcaagagctgaggtcctgc

SEQ ID NO: 5767542 - DNA, 25 bp, Homo sapien
gcagagcgcctggcgcaggaaaccg

SEQ ID NO: 5767543 - DNA, 25 bp, Homo sapien
acagggcaggctggaggctccttgt

SEQ ID NO: 5767544 - DNA, 25 bp, Homo sapien
cggctgcgggatcgcacagcccctc

SEQ ID NO: 5767545 - DNA, 25 bp, Homo sapien
ctgctcagcgggctggtggggaggc

SEQ ID NO: 5767546 - DNA, 25 bp, Homo sapien
atgacggggctcctggggctaggcg

SEQ ID NO: 5767547 - DNA, 25 bp, Homo sapien
ccacaacgcgttcctctgcctcccc

SEQ ID NO: 5767548 - DNA, 25 bp, Homo sapien
caggctggaggctccttgtgctctc

SEQ ID NO: 5767549 - DNA, 25 bp, Homo sapien
gggtctcggggggaggcatggtggg

SEQ ID NO: 5767550 - DNA, 25 bp, Homo sapien
gcccgatgcaattgagggtgcaagc

SEQ ID NO: 5767551 - DNA, 25 bp, Homo sapien
tgggcattggcaggatggttgaggg

SEQ ID NO: 5767552 - DNA, 25 bp, Homo sapien
cctgcaggcgcaccttgaactcgtc

SEQ ID NO: 5767553 - DNA, 25 bp, Homo sapien
tccgaggcgtagcacttcatcctct

SEQ ID NO: 5767554 - DNA, 25 bp, Homo sapien
gaggggccctgtgatggcaggagtg

SEQ ID NO: 5767555 - DNA, 25 bp, Homo sapien
attggagacatccaggtcaacgtca

SEQ ID NO: 5767556 - DNA, 25 bp, Homo sapien
aaagttgttgagccactgggataaa

SEQ ID NO: 5767557 - DNA, 25 bp, Homo sapien
ctcctcctgtcgctgctggatctct

SEQ ID NO: 5767558 - DNA, 25 bp, Homo sapien
gtggcagcctgctcagcgggctggt

SEQ ID NO: 5767559 - DNA, 25 bp, Homo sapien
gtggtatgtgccacagggcaggctg

SEQ ID NO: 5767560 - DNA, 25 bp, Homo sapien
aggagcgcgcacgagcagcacagcg

SEQ ID NO: 5767561 - DNA, 25 bp, Homo sapien
catggggagaccaagtccgaatagg

SEQ ID NO: 5767562 - DNA, 25 bp, Homo sapien
agaggcctgcttgacgggcgcctgg

SEQ ID NO: 5767563 - DNA, 25 bp, Homo sapien
gagctaccacctggcgcacgcgctc

SEQ ID NO: 5767564 - DNA, 25 bp, Homo sapien
tgaggctcagcatcgggggtggcag

SEQ ID NO: 5767565 - DNA, 25 bp, Homo sapien
gctactctgtgcagggcctgtaaga

SEQ ID NO: 5767566 - DNA, 25 bp, Homo sapien
caatctgccggtacaccgacaggcg

SEQ ID NO: 5767567 - DNA, 25 bp, Homo sapien
ctccgaagcgggggctcgctctgta

SEQ ID NO: 5767568 - DNA, 25 bp, Homo sapien
cctcctggcgcaggcggcagagcgc

SEQ ID NO: 5767569 - DNA, 25 bp, Homo sapien
cagggcgctcctggtgatcaggagg

SEQ ID NO: 5767570 - DNA, 25 bp, Homo sapien
gggctggcgaggactgtggctcggc

SEQ ID NO: 5767571 - DNA, 25 bp, Homo sapien
tccacaatctgccggtacaccgaca

SEQ ID NO: 5767572 - DNA, 25 bp, Homo sapien
gcctggcattgctggcagcgcagaa

SEQ ID NO: 5767573 - DNA, 25 bp, Homo sapien
ctgtcgttgtattggagacatccag

SEQ ID NO: 5767574 - DNA, 25 bp, Homo sapien
tcgaaaaagacgttatccagggcgg

SEQ ID NO: 5767575 - DNA, 25 bp, Homo sapien
acctcacttcctatgacggggctcc

SEQ ID NO: 5767576 - DNA, 25 bp, Homo sapien
agcttgcaggctctggggctcctcc

SEQ ID NO: 5767577 - DNA, 25 bp, Homo sapien
cgggcgggtgcaggctccatggacc

SEQ ID NO: 5767578 - DNA, 25 bp, Homo sapien
ccactgggataaatgggaggagccc

SEQ ID NO: 5767579 - DNA, 25 bp, Homo sapien
tttattgagcagccacatctgccag

SEQ ID NO: 5767580 - DNA, 25 bp, Homo sapien
aggcctccatggagcctctgacaga

SEQ ID NO: 5767581 - DNA, 25 bp, Homo sapien
cgctgatgtcgcacttgagatcact

SEQ ID NO: 5767582 - DNA, 25 bp, Homo sapien
gcgcaggaaaccgtgcatgtccagc

SEQ ID NO: 5767583 - DNA, 25 bp, Homo sapien
ctgctccggggagctccgagccaac

SEQ ID NO: 5767584 - DNA, 25 bp, Homo sapien
gcacacagcctgcgcatccacaatc

SEQ ID NO: 5767585 - DNA, 25 bp, Homo sapien
tgggaatgtaattggagaggcttcc

SEQ ID NO: 5767586 - DNA, 25 bp, Homo sapien
tctgacagagtccccagggggaaca

SEQ ID NO: 5767587 - DNA, 25 bp, Homo sapien
cgagttttcggcatctgagtcttcc

SEQ ID NO: 5767588 - DNA, 25 bp, Homo sapien
cacgagttttcggcatctgagtctt

SEQ ID NO: 5767589 - DNA, 25 bp, Homo sapien
gctccgagccaaccttgcctccttc

SEQ ID NO: 5767590 - DNA, 25 bp, Homo sapien
tttctttcttgggcaaagaggcctg

SEQ ID NO: 5767591 - DNA, 25 bp, Homo sapien
ctctgtagggctggggctggggctg

SEQ ID NO: 5767592 - DNA, 25 bp, Homo sapien
tgccgtccaggaactcacgcaccga

SEQ ID NO: 5767593 - DNA, 25 bp, Homo sapien
cgtatccggtggggtgggctgatgc

SEQ ID NO: 5767594 - DNA, 25 bp, Homo sapien
gcacttggcgcagaggagctgctcg

SEQ ID NO: 5767595 - DNA, 25 bp, Homo sapien
ggggtgggctgatgcccctttgcag

SEQ ID NO: 5767596 - DNA, 25 bp, Homo sapien
tagccattcattcgttgattcattc

SEQ ID NO: 5767597 - DNA, 25 bp, Homo sapien
ggtccatccaggtggggtggtgaga

SEQ ID NO: 5767598 - DNA, 25 bp, Homo sapien
agccacatctgccaggtcttgggat

SEQ ID NO: 5767599 - DNA, 25 bp, Homo sapien
tcgctgtgaggctcagcatcggggg

SEQ ID NO: 5767600 - DNA, 25 bp, Homo sapien
tcgtcgaagccatcggtgcgcacgg

SEQ ID NO: 5767601 - DNA, 25 bp, Homo sapien
gcgcgcacgagcagcacagcggctt

SEQ ID NO: 5767602 - DNA, 25 bp, Homo sapien
ttgggcaggaagacctcacttccta

SEQ ID NO: 5767603 - DNA, 25 bp, Homo sapien
agactgccttggaggtgctgggcct

SEQ ID NO: 5767604 - DNA, 25 bp, Homo sapien
ggctggctttcttggatacagctgc

SEQ ID NO: 5767605 - DNA, 25 bp, Homo sapien
gaggtccatgcatagccattcattc

SEQ ID NO: 5767606 - DNA, 25 bp, Homo sapien
ctgctccaagagtctgggctctgcc

SEQ ID NO: 5767607 - DNA, 25 bp, Homo sapien
tctcagccagagaagacccaggtct

SEQ ID NO: 5767608 - DNA, 25 bp, Homo sapien
ctcagcagagactggactggcgagg

SEQ ID NO: 5767609 - DNA, 25 bp, Homo sapien
tcaaagcaccagaagtcggccgact

SEQ ID NO: 5767610 - DNA, 25 bp, Homo sapien
cagctcaggggccgggcaggggtgt

SEQ ID NO: 5767611 - DNA, 25 bp, Homo sapien
cgcagaggagctgctcgcactcaaa

SEQ ID NO: 5767612 - DNA, 25 bp, Homo sapien
gagcgcgcacgagcagcacagcggc

SEQ ID NO: 5767613 - DNA, 25 bp, Homo sapien
cggccgactctttgcagcgggtgca

SEQ ID NO: 5767614 - DNA, 25 bp, Homo sapien
gcagggcctgtaagagcatgggctg

SEQ ID NO: 5767615 - DNA, 25 bp, Homo sapien
cagcgcctgcgtcatggcgtccagc

SEQ ID NO: 5767616 - DNA, 25 bp, Homo sapien
catggaggagaaggggagggcaaaa

SEQ ID NO: 5767617 - DNA, 25 bp, Homo sapien
cttccgagctgctgatcaccacaac

SEQ ID NO: 5767618 - DNA, 25 bp, Homo sapien
cacaatctgccggtacaccgacagg

SEQ ID NO: 5767619 - DNA, 25 bp, Homo sapien
tggctgcacttcctcttctgggctg

SEQ ID NO: 5767620 - DNA, 25 bp, Homo sapien
tcgcgctcctgagcccgcacgtgag

SEQ ID NO: 5767621 - DNA, 25 bp, Homo sapien
ccagccgactggccatctcctcgta

SEQ ID NO: 5767622 - DNA, 25 bp, Homo sapien
gggcaaagaggcctggaatggtggc

SEQ ID NO: 5767623 - DNA, 25 bp, Homo sapien
actgggctgatggggggcctttctg

SEQ ID NO: 5767624 - DNA, 25 bp, Homo sapien
atgtccagcacctcctggtccgagg

SEQ ID NO: 5767625 - DNA, 25 bp, Homo sapien
tgtaattggagaggcttccagaggc

SEQ ID NO: 5767626 - DNA, 25 bp, Homo sapien
aagccatggaggagaaggggagggc

SEQ ID NO: 5767627 - DNA, 25 bp, Homo sapien
aggggcccgatgcaattgagggtgc

SEQ ID NO: 5767628 - DNA, 25 bp, Homo sapien
gctggcggccttcagagggggtctc

SEQ ID NO: 5767629 - DNA, 25 bp, Homo sapien
ggaatggtggcttgaatctcagcca

SEQ ID NO: 5767630 - DNA, 25 bp, Homo sapien
gtgctggcttggaccacatggggag

SEQ ID NO: 5767631 - DNA, 25 bp, Homo sapien
gcagccacatctgccaggtcttggg

SEQ ID NO: 5767632 - DNA, 25 bp, Homo sapien
ggactgggctgatggggggcctttc

SEQ ID NO: 5767633 - DNA, 25 bp, Homo sapien
tcgcactcaaagcaccagaagtcgg

SEQ ID NO: 5767634 - DNA, 25 bp, Homo sapien
tccggtggggtgggctgatgcccct

SEQ ID NO: 5767635 - DNA, 25 bp, Homo sapien
gatgttgttggtcttgcgggtgccg

SEQ ID NO: 5767636 - DNA, 25 bp, Homo sapien
cgcaggcggcagagcgcctggcgca

SEQ ID NO: 5767637 - DNA, 25 bp, Homo sapien
gaacaactgctccaagagtctgggc

SEQ ID NO: 5767638 - DNA, 25 bp, Homo sapien
ggagatcgggcgggtgcaggctcca

SEQ ID NO: 5767639 - DNA, 25 bp, Homo sapien
cactgcatgcccgacgcctccaggc

SEQ ID NO: 5767640 - DNA, 25 bp, Homo sapien
cgggtgccgtccaggaactcacgca

SEQ ID NO: 5767641 - DNA, 25 bp, Homo sapien
cccacggtggacggcagggcgctcc

SEQ ID NO: 5767642 - DNA, 25 bp, Homo sapien
cccagggggaacaactgctccaaga

SEQ ID NO: 5767643 - DNA, 25 bp, Homo sapien
gcctggaatggtggcttgaatctca

SEQ ID NO: 5767644 - DNA, 25 bp, Homo sapien
gtcatggcgtccagctcctcctgtc

SEQ ID NO: 5767645 - DNA, 25 bp, Homo sapien
agatcctggcagaggcctagtggag

SEQ ID NO: 5767646 - DNA, 25 bp, Homo sapien
tcaggggccgggcaggggtgttggc

SEQ ID NO: 5767647 - DNA, 25 bp, Homo sapien
gggtggcagcctgctcagcgggctg

SEQ ID NO: 5767648 - DNA, 25 bp, Homo sapien
cctggcgcaggaaaccgtgcatgtc

SEQ ID NO: 5767649 - DNA, 25 bp, Homo sapien
gcaagagctgaggtcctgcaggcgc

SEQ ID NO: 5767650 - DNA, 25 bp, Homo sapien
ggcgcaccttgaactcgtcgaagcc

SEQ ID NO: 5767651 - DNA, 25 bp, Homo sapien
gcccagccgactggccatctcctcg

SEQ ID NO: 5767652 - DNA, 25 bp, Homo sapien
gattctcggtttagatcttggagtg

SEQ ID NO: 5767653 - DNA, 25 bp, Homo sapien
cggggagctccgagccaaccttgcc

SEQ ID NO: 5767654 - DNA, 25 bp, Homo sapien
ctccatgggctccatgcacgagttt

SEQ ID NO: 5767655 - DNA, 25 bp, Homo sapien
gcagagactggactggcgaggagtg

SEQ ID NO: 5767656 - DNA, 25 bp, Homo sapien
ggccatctcctcgtagtcgcgctgg

SEQ ID NO: 5767657 - DNA, 25 bp, Homo sapien
tgcgggatcgcacagcccctcgtat

SEQ ID NO: 5767658 - DNA, 25 bp, Homo sapien
agactggactggcgaggagtgggct

SEQ ID NO: 5767659 - DNA, 25 bp, Homo sapien
agactctcgaaaaagacgttatcca

SEQ ID NO: 5767660 - DNA, 25 bp, Homo sapien
tgtttattgagcagccacatctgcc

SEQ ID NO: 5767661 - DNA, 25 bp, Homo sapien
gcctgctcagcgggctggtggggag

SEQ ID NO: 5767662 - DNA, 25 bp, Homo sapien
tgggctggaggaggcagctcagggg

SEQ ID NO: 5767663 - DNA, 25 bp, Homo sapien
gcagcgcagaaactggaactcctcc

SEQ ID NO: 5767664 - DNA, 25 bp, Homo sapien
cgggggctcgctctgtagggctggg

SEQ ID NO: 5767665 - DNA, 25 bp, Homo sapien
cttcatcctctgcaccagcgcgctg

SEQ ID NO: 5767666 - DNA, 25 bp, Homo sapien
gctgtgctattggccagggactcag

SEQ ID NO: 5767667 - DNA, 25 bp, Homo sapien
cgcgtccacagcctccagcagctcg

SEQ ID NO: 5767668 - DNA, 25 bp, Homo sapien
gcggtggttggggttggagcagaag

SEQ ID NO: 5767669 - DNA, 25 bp, Homo sapien
tgggctgatgcccctttgcagctgg

SEQ ID NO: 5767670 - DNA, 25 bp, Homo sapien
cacagggtggtgggaatgtaattgg

SEQ ID NO: 5767671 - DNA, 25 bp, Homo sapien
caacgcgttcctctgcctccccggc

SEQ ID NO: 5767672 - DNA, 25 bp, Homo sapien
acacaggagagtgcaagggtgacag

SEQ ID NO: 5767673 - DNA, 25 bp, Homo sapien
agcctgcgcatccacaatctgccgg

SEQ ID NO: 5767674 - DNA, 25 bp, Homo sapien
agcacagcggcttggaacatcctcg

SEQ ID NO: 5767675 - DNA, 25 bp, Homo sapien
taatgagtgctactctgtgcagggc

SEQ ID NO: 5767676 - DNA, 25 bp, Homo sapien
cctcgtgcttgaggaaccactggtg

SEQ ID NO: 5767677 - DNA, 25 bp, Homo sapien
agaagacccaggtctccctgcccag

SEQ ID NO: 5767678 - DNA, 25 bp, Homo sapien
tggtcttgcgggtgccgtccaggaa

SEQ ID NO: 5767679 - DNA, 25 bp, Homo sapien
gggtggtatgtgccacagggcaggc

SEQ ID NO: 5767680 - DNA, 25 bp, Homo sapien
gctctgctaggggccgggcctcgtg

SEQ ID NO: 5767681 - DNA, 25 bp, Homo sapien
tggaaggctgtgctattggccaggg

SEQ ID NO: 5767682 - DNA, 25 bp, Homo sapien
tttcttgggcaaagaggcctggaat

SEQ ID NO: 5767683 - DNA, 25 bp, Homo sapien
tcagcgggctggtggggaggccaag

SEQ ID NO: 5767684 - DNA, 25 bp, Homo sapien
cgcgctgcccgtgcggatgcgctgc

SEQ ID NO: 5767685 - DNA, 25 bp, Homo sapien
cccaggtctccctgcccagaggtcc

SEQ ID NO: 5767686 - DNA, 25 bp, Homo sapien
ctggccacgtggttgctgttgggca

SEQ ID NO: 5767687 - DNA, 25 bp, Homo sapien
tcaagctgggaagccatggaggaga

SEQ ID NO: 5767688 - DNA, 25 bp, Homo sapien
atgcccctttgcagctgggcaggat

SEQ ID NO: 5767689 - DNA, 25 bp, Homo sapien
ctggccatctcctcgtagtcgcgct

SEQ ID NO: 5767690 - DNA, 25 bp, Homo sapien
tgcaattgagggtgcaagcggaggg

SEQ ID NO: 5767691 - DNA, 25 bp, Homo sapien
tctttgcagcgggtgcacacagcct

SEQ ID NO: 5767692 - DNA, 25 bp, Homo sapien
aggctccttgtgctctcagcagaga

SEQ ID NO: 5767693 - DNA, 25 bp, Homo sapien
ctggtgatcaggaggctcgctgtga

SEQ ID NO: 5767694 - DNA, 25 bp, Homo sapien
caccagcgcgctgcccgtgcggatg

SEQ ID NO: 5767695 - DNA, 25 bp, Homo sapien
ctggcattgctggcagcgcagaaac

SEQ ID NO: 5767696 - DNA, 25 bp, Homo sapien
agggcaaaaaagttgttgagccact

SEQ ID NO: 5767697 - DNA, 25 bp, Homo sapien
gttggtcttgcgggtgccgtccagg

SEQ ID NO: 5767698 - DNA, 25 bp, Homo sapien
atgggcttagatcctggcagaggcc

SEQ ID NO: 5767699 - DNA, 25 bp, Homo sapien
gcatggcgaaggcggatggctctct

SEQ ID NO: 5767700 - DNA, 25 bp, Homo sapien
gctcctggtgatcaggaggctcgct

SEQ ID NO: 5767701 - DNA, 25 bp, Homo sapien
gtctcggggggaggcatggtgggct

SEQ ID NO: 5767702 - DNA, 25 bp, Homo sapien
acagcctgcgcatccacaatctgcc

SEQ ID NO: 5767703 - DNA, 25 bp, Homo sapien
ggctttcttggatacagctgcatct

SEQ ID NO: 5767704 - DNA, 25 bp, Homo sapien
tgaaccgcgccaaaggcactatcct

SEQ ID NO: 5767705 - DNA, 25 bp, Homo sapien
cacttggcttccgcctggcattgct

SEQ ID NO: 5767706 - DNA, 25 bp, Homo sapien
gaataggggcccgatgcaattgagg

SEQ ID NO: 5767707 - DNA, 25 bp, Homo sapien
cgtgaaccgcgccaaaggcactatc

SEQ ID NO: 5767708 - DNA, 25 bp, Homo sapien
gaaaccgtgcatgtccagcacctcc

SEQ ID NO: 5767709 - DNA, 25 bp, Homo sapien
gtagtcgcgctggtaccgcgcgtcc

SEQ ID NO: 5767710 - DNA, 25 bp, Homo sapien
cacttcctcttctgggctgtcgttg

SEQ ID NO: 5767711 - DNA, 25 bp, Homo sapien
ctggggctgggctggcggccttcag

SEQ ID NO: 5767712 - DNA, 25 bp, Homo sapien
ggcactatcctgctcctgcagcgcc

SEQ ID NO: 5767713 - DNA, 25 bp, Homo sapien
ggtagcactctcagaggcctgcttg

SEQ ID NO: 5767714 - DNA, 25 bp, Homo sapien
gagggcatggcgaaggcggatggct

SEQ ID NO: 5767715 - DNA, 25 bp, Homo sapien
tgaatctcagccatgccttagcctt

SEQ ID NO: 5767716 - DNA, 25 bp, Homo sapien
tggccagggactcagaacacaggag

SEQ ID NO: 5767717 - DNA, 25 bp, Homo sapien
ctttgcagctgggcaggatgttcct

SEQ ID NO: 5767718 - DNA, 25 bp, Homo sapien
gagagtgcaagggtgacagaagttt

SEQ ID NO: 5767719 - DNA, 25 bp, Homo sapien
ccaagaattaatgagtgctactctg

SEQ ID NO: 5767720 - DNA, 25 bp, Homo sapien
cctcctcagactccatcttgatgac

SEQ ID NO: 5767721 - DNA, 25 bp, Homo sapien
cagaggcacttggacttgagaggcc

SEQ ID NO: 5767722 - DNA, 25 bp, Homo sapien
ctcggtttagatcttggagtgcgtg

SEQ ID NO: 5767723 - DNA, 25 bp, Homo sapien
acttggcgcagaggagctgctcgca

SEQ ID NO: 5767724 - DNA, 25 bp, Homo sapien
ggggccagggcgcctggcagatggg

SEQ ID NO: 5767725 - DNA, 25 bp, Homo sapien
ggtggttggggttggagcagaagat

SEQ ID NO: 5767726 - DNA, 25 bp, Homo sapien
cagcggcttggaacatcctcggcag

SEQ ID NO: 5767727 - DNA, 25 bp, Homo sapien
cgactctttgcagcgggtgcacaca

SEQ ID NO: 5767728 - DNA, 25 bp, Homo sapien
agcctctgacagagtccccaggggg

SEQ ID NO: 5767729 - DNA, 25 bp, Homo sapien
accccagcttagtttcgattctcgg

SEQ ID NO: 5767730 - DNA, 25 bp, Homo sapien
accgcgcgtccacagcctccagcag

SEQ ID NO: 5767731 - DNA, 25 bp, Homo sapien
cgcagaaactggaactcctcctccg

SEQ ID NO: 5767732 - DNA, 25 bp, Homo sapien
gaactcacgcaccgactggttgcgc

SEQ ID NO: 5767733 - DNA, 25 bp, Homo sapien
ctcctgcagcgcctgcgtcatggcg

SEQ ID NO: 5767734 - DNA, 25 bp, Homo sapien
cggcgccactggccacgtggttgct

SEQ ID NO: 5767735 - DNA, 25 bp, Homo sapien
ggaggctcgctgtgaggctcagcat

SEQ ID NO: 5767736 - DNA, 25 bp, Homo sapien
caggctctggggctcctcctggcgc

SEQ ID NO: 5767737 - DNA, 25 bp, Homo sapien
ctctgtacaacaggtagcggatccc

SEQ ID NO: 5767738 - DNA, 25 bp, Homo sapien
ggcttccagaggcacttggacttga

SEQ ID NO: 5767739 - DNA, 25 bp, Homo sapien
ccgtccaggaactcacgcaccgact

SEQ ID NO: 5767740 - DNA, 25 bp, Homo sapien
ggcaaaaaagttgttgagccactgg

SEQ ID NO: 5767741 - DNA, 25 bp, Homo sapien
tgtgctattggccagggactcagaa

SEQ ID NO: 5767742 - DNA, 25 bp, Homo sapien
tccccagggggaacaactgctccaa

SEQ ID NO: 5767743 - DNA, 25 bp, Homo sapien
tggaggagaaggggagggcaaaaaa

SEQ ID NO: 5767744 - DNA, 25 bp, Homo sapien
aactggaactcctcctccgaagcgg

SEQ ID NO: 5767745 - DNA, 25 bp, Homo sapien
cggggtcctgctggggcctcggaga

SEQ ID NO: 5767746 - DNA, 25 bp, Homo sapien
caggcatcctgagcacagcgtgtgc

SEQ ID NO: 5767747 - DNA, 25 bp, Homo sapien
cttctgggctgtcgttgtattggag

SEQ ID NO: 5767748 - DNA, 25 bp, Homo sapien
ggcctcggagatcgggcgggtgcag

SEQ ID NO: 5767749 - DNA, 25 bp, Homo sapien
gggcttagatcctggcagaggccta

SEQ ID NO: 5767750 - DNA, 25 bp, Homo sapien
ctttcccctgggtgatgcaagagct

SEQ ID NO: 5767751 - DNA, 25 bp, Homo sapien
catccaggtggggtggtgagactgc

SEQ ID NO: 5767752 - DNA, 25 bp, Homo sapien
caggtctccctgcccagaggtccat

SEQ ID NO: 5767753 - DNA, 25 bp, Homo sapien
atgcccgacgcctccaggcatcctg

SEQ ID NO: 5767754 - DNA, 25 bp, Homo sapien
taccacctggcgcacgcgctcgcgg

SEQ ID NO: 5767755 - DNA, 25 bp, Homo sapien
tgcaggctctggggctcctcctggc

SEQ ID NO: 5767756 - DNA, 25 bp, Homo sapien
ggagccccggagggagcggctgcgg

SEQ ID NO: 5767757 - DNA, 25 bp, Homo sapien
tgtcaagctgggaagccatggagga

SEQ ID NO: 5767758 - DNA, 25 bp, Homo sapien
cacagcctccagcagctcgcgctcc

SEQ ID NO: 5767759 - DNA, 25 bp, Homo sapien
tagggtccctgggagtgctggcagc

SEQ ID NO: 5767760 - DNA, 25 bp, Homo sapien
acgagcagcacagcggcttggaaca

SEQ ID NO: 5767761 - DNA, 25 bp, Homo sapien
gtagggctggggctggggctgggct

SEQ ID NO: 5767762 - DNA, 25 bp, Homo sapien
ctcctcggtctcggcacgcgcgcgg

SEQ ID NO: 5767763 - DNA, 25 bp, Homo sapien
tggatacagctgcatctttcccctg

SEQ ID NO: 5767764 - DNA, 25 bp, Homo sapien
actgtggctgctgtcaaggagcgcg

SEQ ID NO: 5767765 - DNA, 25 bp, Homo sapien
tgggctggctttcttggatacagct

SEQ ID NO: 5767766 - DNA, 25 bp, Homo sapien
gtcttgcgggtgccgtccaggaact

SEQ ID NO: 5767767 - DNA, 25 bp, Homo sapien
gatggggggcctttctggggcacag

SEQ ID NO: 5767768 - DNA, 25 bp, Homo sapien
tgctattggccagggactcagaaca

SEQ ID NO: 5767769 - DNA, 25 bp, Homo sapien
tgcaggctccatggaccccagctta

SEQ ID NO: 5767770 - DNA, 25 bp, Homo sapien
aggcctggaatggtggcttgaatct

SEQ ID NO: 5767771 - DNA, 25 bp, Homo sapien
gccgggcctcgtgcttgaggaacca

SEQ ID NO: 5767772 - DNA, 25 bp, Homo sapien
cacctaggggccagggcgcctggca

SEQ ID NO: 5767773 - DNA, 25 bp, Homo sapien
atgagtgctactctgtgcagggcct

SEQ ID NO: 5767774 - DNA, 25 bp, Homo sapien
gcggatgcgctgcagcacagcatcc

SEQ ID NO: 5767775 - DNA, 25 bp, Homo sapien
ctttcttggatacagctgcatcttt

SEQ ID NO: 5767776 - DNA, 25 bp, Homo sapien
gagaagggtagcactctcagaggcc

SEQ ID NO: 5767777 - DNA, 25 bp, Homo sapien
aatagggtccctgggagtgctggca

SEQ ID NO: 5767778 - DNA, 25 bp, Homo sapien
tgccacagggcaggctggaggctcc

SEQ ID NO: 5767779 - DNA, 25 bp, Homo sapien
aaggcactatcctgctcctgcagcg

SEQ ID NO: 5767780 - DNA, 25 bp, Homo sapien
tggttggggttggagcagaagatgt

SEQ ID NO: 5767781 - DNA, 25 bp, Homo sapien
gctgttgggcaggaagacctcactt

SEQ ID NO: 5767782 - DNA, 25 bp, Homo sapien
ccagaagtcggccgactctttgcag

SEQ ID NO: 5767783 - DNA, 25 bp, Homo sapien
catgcatagccattcattcgttgat

SEQ ID NO: 5767784 - DNA, 25 bp, Homo sapien
cagcccctcgtatccggtggggtgg

SEQ ID NO: 5767785 - DNA, 25 bp, Homo sapien
ccggagggagcggctgcgggatcgc

SEQ ID NO: 5767786 - DNA, 25 bp, Homo sapien
catccacaatctgccggtacaccga

SEQ ID NO: 5767787 - DNA, 25 bp, Homo sapien
cgctgcagactctcgaaaaagacgt

SEQ ID NO: 5767788 - DNA, 25 bp, Homo sapien
gctgggcctgggctgctccggggag

SEQ ID NO: 5767789 - DNA, 25 bp, Homo sapien
ctccatggaccccagcttagtttcg

SEQ ID NO: 5767790 - DNA, 25 bp, Homo sapien
cggtggggtgggctgatgccccttt

SEQ ID NO: 5767791 - DNA, 25 bp, Homo sapien
cctcggagatcgggcgggtgcaggc

SEQ ID NO: 5767792 - DNA, 25 bp, Homo sapien
cgcatccacaatctgccggtacacc

SEQ ID NO: 5767793 - DNA, 25 bp, Homo sapien
tggcggccttcagagggggtctcgg

SEQ ID NO: 5767794 - DNA, 25 bp, Homo sapien
ttccgcctggcattgctggcagcgc

SEQ ID NO: 5767795 - DNA, 25 bp, Homo sapien
gggtgcacacagcctgcgcatccac

SEQ ID NO: 5767796 - DNA, 25 bp, Homo sapien
ggcatggtgggctcctggggccggg

SEQ ID NO: 5767797 - DNA, 25 bp, Homo sapien
cctgggactgggctgatggggggcc

SEQ ID NO: 5767798 - DNA, 25 bp, Homo sapien
gtgcggtggttggggttggagcaga

SEQ ID NO: 5767799 - DNA, 25 bp, Homo sapien
actctttgcagcgggtgcacacagc

SEQ ID NO: 5767800 - DNA, 25 bp, Homo sapien
gccgctgcagactctcgaaaaagac

SEQ ID NO: 5767801 - DNA, 25 bp, Homo sapien
agcggctgcgggatcgcacagcccc

SEQ ID NO: 5767802 - DNA, 25 bp, Homo sapien
caggtggggtggtgagactgccttg

SEQ ID NO: 5767803 - DNA, 25 bp, Homo sapien
cttgtgctctcagcagagactggac

SEQ ID NO: 5767804 - DNA, 25 bp, Homo sapien
tcatgggcttagatcctggcagagg

SEQ ID NO: 5767805 - DNA, 25 bp, Homo sapien
ggcagcctgctcagcgggctggtgg

SEQ ID NO: 5767806 - DNA, 25 bp, Homo sapien
gtgcatgtccagcacctcctggtcc

SEQ ID NO: 5767807 - DNA, 25 bp, Homo sapien
agaggcctggaatggtggcttgaat

SEQ ID NO: 5767808 - DNA, 25 bp, Homo sapien
cacggtggacggcagggcgctcctg

SEQ ID NO: 5767809 - DNA, 25 bp, Homo sapien
gctgggaagccatggaggagaaggg

SEQ ID NO: 5767810 - DNA, 25 bp, Homo sapien
cgcctggcagatggggcactgcatg

SEQ ID NO: 5767811 - DNA, 25 bp, Homo sapien
aactcctcctccgaagcgggggctc

SEQ ID NO: 5767812 - DNA, 25 bp, Homo sapien
agctcctcctgtcgctgctggatct

SEQ ID NO: 5767813 - DNA, 25 bp, Homo sapien
cgcgcggcccagctggccgacagcc

SEQ ID NO: 5767814 - DNA, 25 bp, Homo sapien
gtcagcgtaggggtgcggtggttgg

SEQ ID NO: 5767815 - DNA, 25 bp, Homo sapien
ctgatggggggcctttctggggcac

SEQ ID NO: 5767816 - DNA, 25 bp, Homo sapien
tcacgcaccgactggttgcgcagct

SEQ ID NO: 5767817 - DNA, 25 bp, Homo sapien
tgtggctgctgtcaaggagcgcgca

SEQ ID NO: 5767818 - DNA, 25 bp, Homo sapien
ggtgcaggctccatggaccccagct

SEQ ID NO: 5767819 - DNA, 25 bp, Homo sapien
agagactggactggcgaggagtggg

SEQ ID NO: 5767820 - DNA, 25 bp, Homo sapien
ctgagcacagcgtgtgcagacaagg

SEQ ID NO: 5767821 - DNA, 25 bp, Homo sapien
ggccgacagccgcgtgcatctgcgc

SEQ ID NO: 5767822 - DNA, 25 bp, Homo sapien
gatggctctctgtgctctgtacaac

SEQ ID NO: 5767823 - DNA, 25 bp, Homo sapien
gccattcattcgttgattcattcct

SEQ ID NO: 5767824 - DNA, 25 bp, Homo sapien
agctggccgacagccgcgtgcatct

SEQ ID NO: 5767825 - DNA, 25 bp, Homo sapien
gatgttcctgggcattggcaggatg

SEQ ID NO: 5767826 - DNA, 25 bp, Homo sapien
ctctgtgcagggcctgtaagagcat

SEQ ID NO: 5767827 - DNA, 25 bp, Homo sapien
ccgcctggcattgctggcagcgcag

SEQ ID NO: 5767828 - DNA, 25 bp, Homo sapien
tcagaggcctgcttgacgggcgcct

SEQ ID NO: 5767829 - DNA, 25 bp, Homo sapien
tgttcctgggcattggcaggatggt

SEQ ID NO: 5767830 - DNA, 25 bp, Homo sapien
gggagtgctggcagcctctgggctg

SEQ ID NO: 5767831 - DNA, 25 bp, Homo sapien
tgctcctgcagcgcctgcgtcatgg

SEQ ID NO: 5767832 - DNA, 25 bp, Homo sapien
cacgcgcgcggcccagctggccgac

SEQ ID NO: 5767833 - DNA, 25 bp, Homo sapien
agtggagaggcttggggtgggggtc

SEQ ID NO: 5767834 - DNA, 25 bp, Homo sapien
cattccttaaccaagaattaatgag

SEQ ID NO: 5767835 - DNA, 25 bp, Homo sapien
tggctgctgtcaaggagcgcgcacg

SEQ ID NO: 5767836 - DNA, 25 bp, Homo sapien
tgggtctggctgcacttcctcttct

SEQ ID NO: 5767837 - DNA, 25 bp, Homo sapien
gggggtggtatgtgccacagggcag

SEQ ID NO: 5767838 - DNA, 25 bp, Homo sapien
gcgctcctgagcccgcacgtgagct

SEQ ID NO: 5767839 - DNA, 25 bp, Homo sapien
catctgcgcgtgaaccgcgccaaag

SEQ ID NO: 5767840 - DNA, 25 bp, Homo sapien
ttggcgcagaggagctgctcgcact

SEQ ID NO: 5767841 - DNA, 25 bp, Homo sapien
tcctcagactccatcttgatgacct

SEQ ID NO: 5767842 - DNA, 25 bp, Homo sapien
aggaggcagctcaggggccgggcag

SEQ ID NO: 5767843 - DNA, 25 bp, Homo sapien
ccacgtggttgctgttgggcaggaa

SEQ ID NO: 5767844 - DNA, 25 bp, Homo sapien
gtcgaagccatcggtgcgcacggca

SEQ ID NO: 5767845 - DNA, 25 bp, Homo sapien
tcctggcgcaggcggcagagcgcct

SEQ ID NO: 5767846 - DNA, 25 bp, Homo sapien
gagtgggctggcgaggagtgggctg

SEQ ID NO: 5767847 - DNA, 25 bp, Homo sapien
ccgcacgtgagctaccacctggcgc

SEQ ID NO: 5767848 - DNA, 25 bp, Homo sapien
atggttgaggggccctgtgatggca

SEQ ID NO: 5767849 - DNA, 25 bp, Homo sapien
acaagagaagggtagcactctcaga

SEQ ID NO: 5767850 - DNA, 25 bp, Homo sapien
catgggctggaggaggcagctcagg

SEQ ID NO: 5767851 - DNA, 25 bp, Homo sapien
agagtccccagggggaacaactgct

SEQ ID NO: 5767852 - DNA, 25 bp, Homo sapien
ggaactcctcctccgaagcgggggc

SEQ ID NO: 5767853 - DNA, 25 bp, Homo sapien
ttagccttcccctctcagccagaga

SEQ ID NO: 5767854 - DNA, 25 bp, Homo sapien
gattcattccttaaccaagaattaa

SEQ ID NO: 5767855 - DNA, 25 bp, Homo sapien
cctcggcagtagatgctggtcagcg

SEQ ID NO: 5767856 - DNA, 25 bp, Homo sapien
gaccaagtccgaataggggcccgat

SEQ ID NO: 5767857 - DNA, 25 bp, Homo sapien
ttagatcctggcagaggcctagtgg

SEQ ID NO: 5767858 - DNA, 25 bp, Homo sapien
ggtgggaatgtaattggagaggctt

SEQ ID NO: 5767859 - DNA, 25 bp, Homo sapien
cagaagtttctttcttgggcaaaga

SEQ ID NO: 5767860 - DNA, 25 bp, Homo sapien
tgcgcacggcagcttgcaggctctg

SEQ ID NO: 5767861 - DNA, 25 bp, Homo sapien
ctgtgcagggcctgtaagagcatgg

SEQ ID NO: 5767862 - DNA, 25 bp, Homo sapien
agatggggcactgcatgcccgacgc

SEQ ID NO: 5767863 - DNA, 25 bp, Homo sapien
accgactggttgcgcagctctgcta

SEQ ID NO: 5767864 - DNA, 25 bp, Homo sapien
gggctggcgaggagtgggctggcga

SEQ ID NO: 5767865 - DNA, 25 bp, Homo sapien
acaacaggtagcggatcccacggtg

SEQ ID NO: 5767866 - DNA, 25 bp, Homo sapien
caaaaaagttgttgagccactggga

SEQ ID NO: 5767867 - DNA, 25 bp, Homo sapien
gagacatccaggtcaacgtcaatag

SEQ ID NO: 5767868 - DNA, 25 bp, Homo sapien
ttgaggggccctgtgatggcaggag

SEQ ID NO: 5767869 - DNA, 25 bp, Homo sapien
ggataaatgggaggagccccggagg

SEQ ID NO: 5767870 - DNA, 25 bp, Homo sapien
gcgctggtaccgcgcgtccacagcc

SEQ ID NO: 5767871 - DNA, 25 bp, Homo sapien
gcctagtggagaggcttggggtggg

SEQ ID NO: 5767872 - DNA, 25 bp, Homo sapien
ggcagggcgctcctggtgatcagga

SEQ ID NO: 5767873 - DNA, 25 bp, Homo sapien
tccatccaggtggggtggtgagact

SEQ ID NO: 5767874 - DNA, 25 bp, Homo sapien
ctcacttcctatgacggggctcctg

SEQ ID NO: 5767875 - DNA, 25 bp, Homo sapien
cgcacggcagcttgcaggctctggg

SEQ ID NO: 5767876 - DNA, 25 bp, Homo sapien
cgaggagtgggctggcgaggagtgg

SEQ ID NO: 5767877 - DNA, 25 bp, Homo sapien
gggcgctcctggtgatcaggaggct

SEQ ID NO: 5767878 - DNA, 25 bp, Homo sapien
tgggctcctggggccgggcggggtc

SEQ ID NO: 5767879 - DNA, 25 bp, Homo sapien
caattgagggtgcaagcggagggca

SEQ ID NO: 5767880 - DNA, 25 bp, Homo sapien
gcacttgagatcactgtggctgctg

SEQ ID NO: 5767881 - DNA, 25 bp, Homo sapien
ggacggcagggcgctcctggtgatc

SEQ ID NO: 5767882 - DNA, 25 bp, Homo sapien
tggcagatggggcactgcatgcccg

SEQ ID NO: 5767883 - DNA, 25 bp, Homo sapien
cgcacagcccctcgtatccggtggg

SEQ ID NO: 5767884 - DNA, 25 bp, Homo sapien
ggcggcccagccgactggccatctc

SEQ ID NO: 5767885 - DNA, 25 bp, Homo sapien
gcaaagaggcctggaatggtggctt

SEQ ID NO: 5767886 - DNA, 25 bp, Homo sapien
ctgcagactctcgaaaaagacgtta

SEQ ID NO: 5767887 - DNA, 25 bp, Homo sapien
ccagcacctcctggtccgaggcgta

SEQ ID NO: 5767888 - DNA, 25 bp, Homo sapien
cctgtaagagcatgggctggaggag

SEQ ID NO: 5767889 - DNA, 25 bp, Homo sapien
gcccctcgtatccggtggggtgggc

SEQ ID NO: 5767890 - DNA, 25 bp, Homo sapien
tggttcaacaagtgtttattgagca

SEQ ID NO: 5767891 - DNA, 25 bp, Homo sapien
gaggccaagctggggggtggtatgt

SEQ ID NO: 5767892 - DNA, 25 bp, Homo sapien
cgacaggcgccgctgcagactctcg

SEQ ID NO: 5767893 - DNA, 25 bp, Homo sapien
tggcttggaccacatggggagacca

SEQ ID NO: 5767894 - DNA, 25 bp, Homo sapien
tcatcctctgcaccagcgcgctgcc

SEQ ID NO: 5767895 - DNA, 25 bp, Homo sapien
cgcgcgtccacagcctccagcagct

SEQ ID NO: 5767896 - DNA, 25 bp, Homo sapien
gaggcacttggacttgagaggcctc

SEQ ID NO: 5767897 - DNA, 25 bp, Homo sapien
ggtcggggcatggaaggctgtgcta

SEQ ID NO: 5767898 - DNA, 25 bp, Homo sapien
gggttggagcagaagatgttgttgg

SEQ ID NO: 5767899 - DNA, 25 bp, Homo sapien
gcaaggttacaagagaagggtagca

SEQ ID NO: 5767900 - DNA, 25 bp, Homo sapien
tggagcagaagatgttgttggtctt

SEQ ID NO: 5767901 - DNA, 25 bp, Homo sapien
taggggtgcggtggttggggttgga

SEQ ID NO: 5767902 - DNA, 25 bp, Homo sapien
aaccaagaattaatgagtgctactc

SEQ ID NO: 5767903 - DNA, 25 bp, Homo sapien
gaccttcctggggcactgggtctgg

SEQ ID NO: 5767904 - DNA, 25 bp, Homo sapien
cgttatccagggcgggtgtgtctgc

SEQ ID NO: 5767905 - DNA, 25 bp, Homo sapien
caagagtctgggctctgccttcccc

SEQ ID NO: 5767906 - DNA, 25 bp, Homo sapien
tgggactgggctgatggggggcctt

SEQ ID NO: 5767907 - DNA, 25 bp, Homo sapien
cctcctccgaagcgggggctcgctc

SEQ ID NO: 5767908 - DNA, 25 bp, Homo sapien
aggcgccgctgcagactctcgaaaa

SEQ ID NO: 5767909 - DNA, 25 bp, Homo sapien
ccctgtgatggcaggagtgctggct

SEQ ID NO: 5767910 - DNA, 25 bp, Homo sapien
cgcgcgcggcccagctggccgacag

SEQ ID NO: 5767911 - DNA, 25 bp, Homo sapien
tccctgcccagaggtccatgcatag

SEQ ID NO: 5767912 - DNA, 25 bp, Homo sapien
agcagcttcgggcacttggcttccg

SEQ ID NO: 5767913 - DNA, 25 bp, Homo sapien
cgcctccaggcatcctgagcacagc

SEQ ID NO: 5767914 - DNA, 25 bp, Homo sapien
ttagatcttggagtgcgtgaagaga

SEQ ID NO: 5767915 - DNA, 25 bp, Homo sapien
ggtgcaagcggagggcatggcgaag

SEQ ID NO: 5767916 - DNA, 25 bp, Homo sapien
tccagaggcacttggacttgagagg

SEQ ID NO: 5767917 - DNA, 25 bp, Homo sapien
tgatgcaagagctgaggtcctgcag

SEQ ID NO: 5767918 - DNA, 25 bp, Homo sapien
cgcagctctgctaggggccgggcct

SEQ ID NO: 5767919 - DNA, 25 bp, Homo sapien
atgaccttcctggggcactgggtct

SEQ ID NO: 5767920 - DNA, 25 bp, Homo sapien
agaggcctccatggagcctctgaca

SEQ ID NO: 5767921 - DNA, 25 bp, Homo sapien
gtcgctgctggatctctgcgctgat

SEQ ID NO: 5767922 - DNA, 25 bp, Homo sapien
cgcaccttgaactcgtcgaagccat

SEQ ID NO: 5767923 - DNA, 25 bp, Homo sapien
gggggtctcggggggaggcatggtg

SEQ ID NO: 5767924 - DNA, 25 bp, Homo sapien
tcgtagtcgcgctggtaccgcgcgt

SEQ ID NO: 5767925 - DNA, 25 bp, Homo sapien
caggatggttgaggggccctgtgat

SEQ ID NO: 5767926 - DNA, 25 bp, Homo sapien
cccagcttagtttcgattctcggtt

SEQ ID NO: 5767927 - DNA, 25 bp, Homo sapien
cattcgttgattcattccttaacca

SEQ ID NO: 5767928 - DNA, 25 bp, Homo sapien
cagcttagtttcgattctcggttta

SEQ ID NO: 5767929 - DNA, 25 bp, Homo sapien
ctaggggccgggcctcgtgcttgag

SEQ ID NO: 5767930 - DNA, 25 bp, Homo sapien
ttggaccacatggggagaccaagtc

SEQ ID NO: 5767931 - DNA, 25 bp, Homo sapien
actgggtctggctgcacttcctctt

SEQ ID NO: 5767932 - DNA, 25 bp, Homo sapien
gggccgggcctcgtgcttgaggaac

SEQ ID NO: 5767933 - DNA, 25 bp, Homo sapien
gcatctgagtcttccgagctgctga

SEQ ID NO: 5767934 - DNA, 25 bp, Homo sapien
atcctctgcaccagcgcgctgcccg

SEQ ID NO: 5767935 - DNA, 25 bp, Homo sapien
actggttgcgcagctctgctagggg

SEQ ID NO: 5767936 - DNA, 25 bp, Homo sapien
cggggctcctggggctaggcggtcc

SEQ ID NO: 5767937 - DNA, 25 bp, Homo sapien
tcgtgcttgaggaaccactggtgtg

SEQ ID NO: 5767938 - DNA, 25 bp, Homo sapien
tggcaggagtgctggcttggaccac

SEQ ID NO: 5767939 - DNA, 25 bp, Homo sapien
aaaaagttgttgagccactgggata

SEQ ID NO: 5767940 - DNA, 25 bp, Homo sapien
tgtcgcacttgagatcactgtggct

SEQ ID NO: 5767941 - DNA, 25 bp, Homo sapien
tctgcaccagcgcgctgcccgtgcg

SEQ ID NO: 5767942 - DNA, 25 bp, Homo sapien
tatccggtggggtgggctgatgccc

SEQ ID NO: 5767943 - DNA, 25 bp, Homo sapien
gatagccagtccctgtgctcatggg

SEQ ID NO: 5767944 - DNA, 25 bp, Homo sapien
gtgtgcctcgaagcacttggcgcag

SEQ ID NO: 5767945 - DNA, 25 bp, Homo sapien
gagcagcacagcggcttggaacatc

SEQ ID NO: 5767946 - DNA, 25 bp, Homo sapien
tgcagcacagcatccaggcggccca

SEQ ID NO: 5767947 - DNA, 25 bp, Homo sapien
agatcgggcgggtgcaggctccatg

SEQ ID NO: 5767948 - DNA, 25 bp, Homo sapien
ggcgcctgggactgggctgatgggg

SEQ ID NO: 5767949 - DNA, 25 bp, Homo sapien
ggctctggggctcctcctggcgcag

SEQ ID NO: 5767950 - DNA, 25 bp, Homo sapien
tgcagcgggtgcacacagcctgcgc

SEQ ID NO: 5767951 - DNA, 25 bp, Homo sapien
cctgcgcatccacaatctgccggta

SEQ ID NO: 5767952 - DNA, 25 bp, Homo sapien
ttggcaggatggttgaggggccctg

SEQ ID NO: 5767953 - DNA, 25 bp, Homo sapien
agccatgccttagccttcccctctc

SEQ ID NO: 5767954 - DNA, 25 bp, Homo sapien
ccgcgccaaaggcactatcctgctc

SEQ ID NO: 5767955 - DNA, 25 bp, Homo sapien
cttcctcttctgggctgtcgttgta

SEQ ID NO: 5767956 - DNA, 25 bp, Homo sapien
gggaacaactgctccaagagtctgg

SEQ ID NO: 5767957 - DNA, 25 bp, Homo sapien
cacggcagcttgcaggctctggggc

SEQ ID NO: 5767958 - DNA, 25 bp, Homo sapien
ctggaatggtggcttgaatctcagc

SEQ ID NO: 5767959 - DNA, 25 bp, Homo sapien
tgtgaggctcagcatcgggggtggc

SEQ ID NO: 5767960 - DNA, 25 bp, Homo sapien
ttatccagggcgggtgtgtctgcac

SEQ ID NO: 5767961 - DNA, 25 bp, Homo sapien
gtgctactctgtgcagggcctgtaa

SEQ ID NO: 5767962 - DNA, 25 bp, Homo sapien
agtcgcgctggtaccgcgcgtccac

SEQ ID NO: 5767963 - DNA, 25 bp, Homo sapien
atctcctcgtagtcgcgctggtacc

SEQ ID NO: 5767964 - DNA, 25 bp, Homo sapien
ctgctcgcactcaaagcaccagaag

SEQ ID NO: 5767965 - DNA, 25 bp, Homo sapien
cggtggacggcagggcgctcctggt

SEQ ID NO: 5767966 - DNA, 25 bp, Homo sapien
attaatgagtgctactctgtgcagg

SEQ ID NO: 5767967 - DNA, 25 bp, Homo sapien
gagctgaggtcctgcaggcgcacct

SEQ ID NO: 5767968 - DNA, 25 bp, Homo sapien
tgcccagaggtccatgcatagccat

SEQ ID NO: 5767969 - DNA, 25 bp, Homo sapien
cgctgcccgtgcggatgcgctgcag

SEQ ID NO: 5767970 - DNA, 25 bp, Homo sapien
gctcgctgtgaggctcagcatcggg

SEQ ID NO: 5767971 - DNA, 25 bp, Homo sapien
tcctcttctgggctgtcgttgtatt

SEQ ID NO: 5767972 - DNA, 25 bp, Homo sapien
tgcgggtgccgtccaggaactcacg

SEQ ID NO: 5767973 - DNA, 25 bp, Homo sapien
aggaactcacgcaccgactggttgc

SEQ ID NO: 5767974 - DNA, 25 bp, Homo sapien
cctggggcactgggtctggctgcac

SEQ ID NO: 5767975 - DNA, 25 bp, Homo sapien
tcctgagcccgcacgtgagctacca

SEQ ID NO: 5767976 - DNA, 25 bp, Homo sapien
gacagccgcgtgcatctgcgcgtga

SEQ ID NO: 5767977 - DNA, 25 bp, Homo sapien
acggaagacatgtcaagctgggaag

SEQ ID NO: 5767978 - DNA, 25 bp, Homo sapien
tggggccgggcggggtcctgctggg

SEQ ID NO: 5767979 - DNA, 25 bp, Homo sapien
ggttgaggggccctgtgatggcagg

SEQ ID NO: 5767980 - DNA, 25 bp, Homo sapien
tggctctctgtgctctgtacaacag

SEQ ID NO: 5767981 - DNA, 25 bp, Homo sapien
tccggggagctccgagccaaccttg

SEQ ID NO: 5767982 - DNA, 25 bp, Homo sapien
gggggaggcatggtgggctcctggg

SEQ ID NO: 5767983 - DNA, 25 bp, Homo sapien
ccccggagggagcggctgcgggatc

SEQ ID NO: 5767984 - DNA, 25 bp, Homo sapien
gtggtgagactgccttggaggtgct

SEQ ID NO: 5767985 - DNA, 25 bp, Homo sapien
cttccagaggcacttggacttgaga

SEQ ID NO: 5767986 - DNA, 25 bp, Homo sapien
cacttggacttgagaggcctccatg

SEQ ID NO: 5767987 - DNA, 25 bp, Homo sapien
gatggttcaacaagtgtttattgag

SEQ ID NO: 5767988 - DNA, 25 bp, Homo sapien
gggagaccaagtccgaataggggcc

SEQ ID NO: 5767989 - DNA, 25 bp, Homo sapien
tcgggggtggcagcctgctcagcgg

SEQ ID NO: 5767990 - DNA, 25 bp, Homo sapien
tgggcctgggctgctccggggagct

SEQ ID NO: 5767991 - DNA, 25 bp, Homo sapien
gatgtcgcacttgagatcactgtgg

SEQ ID NO: 5767992 - DNA, 25 bp, Homo sapien
cctctgcaccagcgcgctgcccgtg

SEQ ID NO: 5767993 - DNA, 25 bp, Homo sapien
tcctgtcgctgctggatctctgcgc

SEQ ID NO: 5767994 - DNA, 25 bp, Homo sapien
taggggccagggcgcctggcagatg

SEQ ID NO: 5767995 - DNA, 25 bp, Homo sapien
agagcatgggctggaggaggcagct

SEQ ID NO: 5767996 - DNA, 25 bp, Homo sapien
cacttcctatgacggggctcctggg

SEQ ID NO: 5767997 - DNA, 25 bp, Homo sapien
caggcggcccagccgactggccatc

SEQ ID NO: 5767998 - DNA, 25 bp, Homo sapien
ggcactgcatgcccgacgcctccag

SEQ ID NO: 5767999 - DNA, 25 bp, Homo sapien
agagaagacccaggtctccctgccc

SEQ ID NO: 5768000 - DNA, 25 bp, Homo sapien
agggtagcactctcagaggcctgct

SEQ ID NO: 5768001 - DNA, 25 bp, Homo sapien
gtcctgcaggcgcaccttgaactcg

SEQ ID NO: 5768002 - DNA, 25 bp, Homo sapien
ctcgctctgtagggctggggctggg

SEQ ID NO: 5768003 - DNA, 25 bp, Homo sapien
gagcagccacatctgccaggtcttg

SEQ ID NO: 5768004 - DNA, 25 bp, Homo sapien
catgcacgagttttcggcatctgag

SEQ ID NO: 5768005 - DNA, 25 bp, Homo sapien
tgggtgatgcaagagctgaggtcct

SEQ ID NO: 5768006 - DNA, 25 bp, Homo sapien
gctgaggtcctgcaggcgcaccttg

SEQ ID NO: 5768007 - DNA, 25 bp, Homo sapien
tctctgcgctgatgtcgcacttgag

SEQ ID NO: 5768008 - DNA, 25 bp, Homo sapien
ggtctccctgcccagaggtccatgc

SEQ ID NO: 5768009 - DNA, 25 bp, Homo sapien
gcggcttggaacatcctcggcagta

SEQ ID NO: 5768010 - DNA, 25 bp, Homo sapien
gacgttatccagggcgggtgtgtct

SEQ ID NO: 5768011 - DNA, 25 bp, Homo sapien
gcttagtttcgattctcggtttaga

SEQ ID NO: 5768012 - DNA, 25 bp, Homo sapien
catggcgtccagctcctcctgtcgc

SEQ ID NO: 5768013 - DNA, 25 bp, Homo sapien
tcggagatcgggcgggtgcaggctc

SEQ ID NO: 5768014 - DNA, 25 bp, Homo sapien
ctccatcttgatgaccttcctgggg

SEQ ID NO: 5768015 - DNA, 25 bp, Homo sapien
gcttccgcctggcattgctggcagc

SEQ ID NO: 5768016 - DNA, 25 bp, Homo sapien
atcctgctcctgcagcgcctgcgtc

SEQ ID NO: 5768017 - DNA, 25 bp, Homo sapien
gcactgggtctggctgcacttcctc

SEQ ID NO: 5768018 - DNA, 25 bp, Homo sapien
ggcatcctgagcacagcgtgtgcag

SEQ ID NO: 5768019 - DNA, 25 bp, Homo sapien
tcggcggtctccatgggctccatgc

SEQ ID NO: 5768020 - DNA, 25 bp, Homo sapien
gcgctgcagcacagcatccaggcgg

SEQ ID NO: 5768021 - DNA, 25 bp, Homo sapien
aggctgtgctattggccagggactc

SEQ ID NO: 5768022 - DNA, 25 bp, Homo sapien
agggcctgtaagagcatgggctgga

SEQ ID NO: 5768023 - DNA, 25 bp, Homo sapien
ggctggggctggggctgggctggcg

SEQ ID NO: 5768024 - DNA, 25 bp, Homo sapien
ggcgaaggcggatggctctctgtgc

SEQ ID NO: 5768025 - DNA, 25 bp, Homo sapien
tggggagaccaagtccgaatagggg

SEQ ID NO: 5768026 - DNA, 25 bp, Homo sapien
agtttctttcttgggcaaagaggcc

SEQ ID NO: 5768027 - DNA, 25 bp, Homo sapien
agccccggagggagcggctgcggga

SEQ ID NO: 5768028 - DNA, 25 bp, Homo sapien
ggctgggctggcggccttcagaggg

SEQ ID NO: 5768029 - DNA, 25 bp, Homo sapien
attggagaggcttccagaggcactt

SEQ ID NO: 5768030 - DNA, 25 bp, Homo sapien
tggggtggtgagactgccttggagg

SEQ ID NO: 5768031 - DNA, 25 bp, Homo sapien
caggtcttgggatagccagtccctg

SEQ ID NO: 5768032 - DNA, 25 bp, Homo sapien
ctggtggggaggccaagctgggggg

SEQ ID NO: 5768033 - DNA, 25 bp, Homo sapien
gctcgcgctcctgagcccgcacgtg

SEQ ID NO: 5768034 - DNA, 25 bp, Homo sapien
tctgcacctaggggccagggcgcct

SEQ ID NO: 5768035 - DNA, 25 bp, Homo sapien
cctaggggccagggcgcctggcaga

SEQ ID NO: 5768036 - DNA, 25 bp, Homo sapien
gctccttgtgctctcagcagagact

SEQ ID NO: 5768037 - DNA, 25 bp, Homo sapien
tggagacatccaggtcaacgtcaat

SEQ ID NO: 5768038 - DNA, 25 bp, Homo sapien
catcggtgcgcacggcagcttgcag

SEQ ID NO: 5768039 - DNA, 25 bp, Homo sapien
gctgcagcacagcatccaggcggcc

SEQ ID NO: 5768040 - DNA, 25 bp, Homo sapien
gaactcgtcgaagccatcggtgcgc

SEQ ID NO: 5768041 - DNA, 25 bp, Homo sapien
tggggttggagcagaagatgttgtt

SEQ ID NO: 5768042 - DNA, 25 bp, Homo sapien
tgcagacaaggcagcagcttcgggc

SEQ ID NO: 5768043 - DNA, 25 bp, Homo sapien
tgatcaccacaacgcgttcctctgc

SEQ ID NO: 5768044 - DNA, 25 bp, Homo sapien
gtccctgtgctcatgggcttagatc

SEQ ID NO: 5768045 - DNA, 25 bp, Homo sapien
cgcgctcgcggatcagctcctcggt

SEQ ID NO: 5768046 - DNA, 25 bp, Homo sapien
ttttttgatggttcaacaagtgttt

SEQ ID NO: 5768047 - DNA, 25 bp, Homo sapien
tggggaggccaagctggggggtggt

SEQ ID NO: 5768048 - DNA, 25 bp, Homo sapien
ctagtggagaggcttggggtggggg

SEQ ID NO: 5768049 - DNA, 25 bp, Homo sapien
gaggcagctcaggggccgggcaggg

SEQ ID NO: 5768050 - DNA, 25 bp, Homo sapien
agcgggctggtggggaggccaagct

SEQ ID NO: 5768051 - DNA, 25 bp, Homo sapien
gggagctccgagccaaccttgcctc

SEQ ID NO: 5768052 - DNA, 25 bp, Homo sapien
ttcggcatctgagtcttccgagctg

SEQ ID NO: 5768053 - DNA, 25 bp, Homo sapien
caggtcaacgtcaatagggtccctg

SEQ ID NO: 5768054 - DNA, 25 bp, Homo sapien
catcgggggtggcagcctgctcagc

SEQ ID NO: 5768055 - DNA, 25 bp, Homo sapien
ccagcagctcgcgctcctgagcccg

SEQ ID NO: 5768056 - DNA, 25 bp, Homo sapien
tccaggtggggtggtgagactgcct

SEQ ID NO: 5768057 - DNA, 25 bp, Homo sapien
gcgccactggccacgtggttgctgt

SEQ ID NO: 5768058 - DNA, 25 bp, Homo sapien
ttttttttgatggttcaacaagtgt

SEQ ID NO: 5768059 - DNA, 25 bp, Homo sapien
agcgtgtgcagacaaggcagcagct

SEQ ID NO: 5768060 - DNA, 25 bp, Homo sapien
tcctatgacggggctcctggggcta

SEQ ID NO: 5768061 - DNA, 25 bp, Homo sapien
gcagcttgcaggctctggggctcct

SEQ ID NO: 5768062 - DNA, 25 bp, Homo sapien
tgtggctcggcggtctccatgggct

SEQ ID NO: 5768063 - DNA, 25 bp, Homo sapien
ttcctgggcattggcaggatggttg

SEQ ID NO: 5768064 - DNA, 25 bp, Homo sapien
ggcttgaatctcagccatgccttag

SEQ ID NO: 5768065 - DNA, 25 bp, Homo sapien
atgggctccatgcacgagttttcgg

SEQ ID NO: 5768066 - DNA, 25 bp, Homo sapien
cgaggcgtagcacttcatcctctgc

SEQ ID NO: 5768067 - DNA, 25 bp, Homo sapien
gccatcggtgcgcacggcagcttgc

SEQ ID NO: 5768068 - DNA, 25 bp, Homo sapien
gcacgtgagctaccacctggcgcac

SEQ ID NO: 5768069 - DNA, 25 bp, Homo sapien
tagccagtccctgtgctcatgggct

SEQ ID NO: 5768070 - DNA, 25 bp, Homo sapien
ccatggaccccagcttagtttcgat

SEQ ID NO: 5768071 - DNA, 25 bp, Homo sapien
ttctggggcacagggtggtgggaat

SEQ ID NO: 5768072 - DNA, 25 bp, Homo sapien
ggggctaggcggtccatccaggtgg

SEQ ID NO: 5768073 - DNA, 25 bp, Homo sapien
aagagctgaggtcctgcaggcgcac

SEQ ID NO: 5768074 - DNA, 25 bp, Homo sapien
tcggggcatggaaggctgtgctatt

SEQ ID NO: 5768075 - DNA, 25 bp, Homo sapien
gcacagcgtgtgcagacaaggcagc

SEQ ID NO: 5768076 - DNA, 25 bp, Homo sapien
ggcttggggtgggggtcggggcatg

SEQ ID NO: 5768077 - DNA, 25 bp, Homo sapien
gcttgaggaaccactggtgtgcctc

SEQ ID NO: 5768078 - DNA, 25 bp, Homo sapien
cctctcagccagagaagacccaggt

SEQ ID NO: 5768079 - DNA, 25 bp, Homo sapien
tccgagctgctgatcaccacaacgc

SEQ ID NO: 5768080 - DNA, 25 bp, Homo sapien
tctccctgcccagaggtccatgcat

SEQ ID NO: 5768081 - DNA, 25 bp, Homo sapien
cgcacgcgctcgcggatcagctcct

SEQ ID NO: 5768082 - DNA, 25 bp, Homo sapien
ggtgggctgatgcccctttgcagct

SEQ ID NO: 5768083 - DNA, 25 bp, Homo sapien
gccaggtcttgggatagccagtccc

SEQ ID NO: 5768084 - DNA, 25 bp, Homo sapien
tctcagaggcctgcttgacgggcgc

SEQ ID NO: 5768085 - DNA, 25 bp, Homo sapien
ctggtccgaggcgtagcacttcatc

SEQ ID NO: 5768086 - DNA, 25 bp, Homo sapien
cctggggccgggcggggtcctgctg

SEQ ID NO: 5768087 - DNA, 25 bp, Homo sapien
gaagtaagggtagaggagaccttta

SEQ ID NO: 5768088 - DNA, 25 bp, Homo sapien
taaaggtctcctctacccttacttc

SEQ ID NO: 5768089 - DNA, 25 bp, Homo sapien
aatatttactttgaagagttagcat

SEQ ID NO: 5768090 - DNA, 25 bp, Homo sapien
atgctaactcttcaaagtaaatatt

SEQ ID NO: 5768091 - DNA, 25 bp, Homo sapien
ttggatataggaagcgtatggctac

SEQ ID NO: 5768092 - DNA, 25 bp, Homo sapien
gtagccatacgcttcctatatccaa

SEQ ID NO: 5768093 - DNA, 25 bp, Homo sapien
gagtgagaaagtctgcgagccactc

SEQ ID NO: 5768094 - DNA, 25 bp, Homo sapien
gagtggctcgcagactttctcactc

SEQ ID NO: 5768095 - DNA, 25 bp, Homo sapien
aacaccggcggagtgaaccccgaga

SEQ ID NO: 5768096 - DNA, 25 bp, Homo sapien
tctcggggttcactccgccggtgtt

SEQ ID NO: 5768097 - DNA, 25 bp, Homo sapien
ctccttctccgtctggtaccattag

SEQ ID NO: 5768098 - DNA, 25 bp, Homo sapien
ctaatggtaccagacggagaaggag

SEQ ID NO: 5768099 - DNA, 25 bp, Homo sapien
ggagttttcgttggtcgccttaaga

SEQ ID NO: 5768100 - DNA, 25 bp, Homo sapien
tcttaaggcgaccaacgaaaactcc

SEQ ID NO: 5768101 - DNA, 25 bp, Homo sapien
ggttgcggacggctagggcgccaca

SEQ ID NO: 5768102 - DNA, 25 bp, Homo sapien
tgtggcgccctagccgtccgcaacc

SEQ ID NO: 5768103 - DNA, 25 bp, Homo sapien
ttcttagccctctgggacgaggtcg

SEQ ID NO: 5768104 - DNA, 25 bp, Homo sapien
cgacctcgtcccagagggctaagaa

SEQ ID NO: 5768105 - DNA, 25 bp, Homo sapien
gttgaaggcgtaatgtttaaaccga

SEQ ID NO: 5768106 - DNA, 25 bp, Homo sapien
tcggtttaaacattacgccttcaac

SEQ ID NO: 5768107 - DNA, 25 bp, Homo sapien
aacggacatgtataggttgaaggcg

SEQ ID NO: 5768108 - DNA, 25 bp, Homo sapien
cgccttcaacctatacatgtccgtt

SEQ ID NO: 5768109 - DNA, 25 bp, Homo sapien
cgcggtggcgccccgcctagggtgt

SEQ ID NO: 5768110 - DNA, 25 bp, Homo sapien
acaccctaggcggggcgccaccgcg

SEQ ID NO: 5768111 - DNA, 25 bp, Homo sapien
aaaatgaagaagtgcgacttctacg

SEQ ID NO: 5768112 - DNA, 25 bp, Homo sapien
cgtagaagtcgcacttcttcatttt

SEQ ID NO: 5768113 - DNA, 25 bp, Homo sapien
aagaaagtcagagttggtccactgg

SEQ ID NO: 5768114 - DNA, 25 bp, Homo sapien
ccagtggaccaactctgactttctt

SEQ ID NO: 5768115 - DNA, 25 bp, Homo sapien
ctaagtcaaagtaaacagtgattct

SEQ ID NO: 5768116 - DNA, 25 bp, Homo sapien
agaatcactgtttactttgacttag

SEQ ID NO: 5768117 - DNA, 25 bp, Homo sapien
aaaaatgtctttgaaaatatctact

SEQ ID NO: 5768118 - DNA, 25 bp, Homo sapien
agtagatattttcaaagacattttt

SEQ ID NO: 5768119 - DNA, 25 bp, Homo sapien
gaaaaatgtctttgaaaatatctac

SEQ ID NO: 5768120 - DNA, 25 bp, Homo sapien
gtagatattttcaaagacatttttc

SEQ ID NO: 5768121 - DNA, 25 bp, Homo sapien
gtacggtattgtccgagaagacctc

SEQ ID NO: 5768122 - DNA, 25 bp, Homo sapien
gaggtcttctcggacaataccgtac

SEQ ID NO: 5768123 - DNA, 25 bp, Homo sapien
gaacgagacgcggacgtacccaagt

SEQ ID NO: 5768124 - DNA, 25 bp, Homo sapien
acttgggtacgtccgcgtctcgttc

SEQ ID NO: 5768125 - DNA, 25 bp, Homo sapien
gcccctggaggaggatcgcgcaggg

SEQ ID NO: 5768126 - DNA, 25 bp, Homo sapien
ccctgcgcgatcctcctccaggggc

SEQ ID NO: 5768127 - DNA, 25 bp, Homo sapien
acggtgagtgatggagcaaataaac

SEQ ID NO: 5768128 - DNA, 25 bp, Homo sapien
gtttatttgctccatcactcaccgt

SEQ ID NO: 5768129 - DNA, 25 bp, Homo sapien
gggggtcggtctcacgccacgggag

SEQ ID NO: 5768130 - DNA, 25 bp, Homo sapien
ctcccgtggcgtgagaccgaccccc

SEQ ID NO: 5768131 - DNA, 25 bp, Homo sapien
gggtcggtctcacgccacgggaggg

SEQ ID NO: 5768132 - DNA, 25 bp, Homo sapien
ccctcccgtggcgtgagaccgaccc

SEQ ID NO: 5768133 - DNA, 25 bp, Homo sapien
cggagcccgtccagccccagggtcg

SEQ ID NO: 5768134 - DNA, 25 bp, Homo sapien
cgaccctggggctggacgggctccg

SEQ ID NO: 5768135 - DNA, 25 bp, Homo sapien
agacgtaagactctcctcgaatgat

SEQ ID NO: 5768136 - DNA, 25 bp, Homo sapien
atcattcgaggagagtcttacgtct

SEQ ID NO: 5768137 - DNA, 25 bp, Homo sapien
tctaccacgacggaatctgtgaaag

SEQ ID NO: 5768138 - DNA, 25 bp, Homo sapien
ctttcacagattccgtcgtggtaga

SEQ ID NO: 5768139 - DNA, 25 bp, Homo sapien
aaaatactagagataccaattacac

SEQ ID NO: 5768140 - DNA, 25 bp, Homo sapien
gtgtaattggtatctctagtatttt

SEQ ID NO: 5768141 - DNA, 25 bp, Homo sapien
cgaaaagtaagtccaggaggacacg

SEQ ID NO: 5768142 - DNA, 25 bp, Homo sapien
cgtgtcctcctggacttacttttcg

SEQ ID NO: 5768143 - DNA, 25 bp, Homo sapien
aaaggaactgactatgttatctgag

SEQ ID NO: 5768144 - DNA, 25 bp, Homo sapien
ctcagataacatagtcagttccttt

SEQ ID NO: 5768145 - DNA, 25 bp, Homo sapien
tcggagggaccttcagcgaagtcct

SEQ ID NO: 5768146 - DNA, 25 bp, Homo sapien
aggacttcgctgaaggtccctccga

SEQ ID NO: 5768147 - DNA, 25 bp, Homo sapien
ctgagcattgtaatatgcggcccag

SEQ ID NO: 5768148 - DNA, 25 bp, Homo sapien
agccggtggggacctcgagcaacgc

SEQ ID NO: 5768149 - DNA, 25 bp, Homo sapien
cctctgcagatgattgtgaacacgt

SEQ ID NO: 5768150 - DNA, 25 bp, Homo sapien
cacccctatcttctaggattgacac

SEQ ID NO: 5768151 - DNA, 25 bp, Homo sapien
acctcgctgggggactcgtggaccc

SEQ ID NO: 5768152 - DNA, 25 bp, Homo sapien
gccgacccctcctctccggagctgt

SEQ ID NO: 5768153 - DNA, 25 bp, Homo sapien
ccaggcagcctgtcctgaccctcag

SEQ ID NO: 5768154 - DNA, 25 bp, Homo sapien
aggtcgctgtcaatggtcaccgaga

SEQ ID NO: 5768155 - DNA, 25 bp, Homo sapien
gggcggctggggagggcttgctgac

SEQ ID NO: 5768156 - DNA, 25 bp, Homo sapien
atcccggtggacagacttaacgatc

SEQ ID NO: 5768157 - DNA, 25 bp, Homo sapien
agcaggaaaatgggtcctgtgtaat

SEQ ID NO: 5768158 - DNA, 25 bp, Homo sapien
gcctggccccgcctgacccgactgt

SEQ ID NO: 5768159 - DNA, 25 bp, Homo sapien
ggaagtcgatcttctgaaggatggc

SEQ ID NO: 5768160 - DNA, 25 bp, Homo sapien
tgcgagtgtctcccgaccatgtcac

SEQ ID NO: 5768161 - DNA, 25 bp, Homo sapien
agccagggccgagtctgggcacagg

SEQ ID NO: 5768162 - DNA, 25 bp, Homo sapien
acctgccaggcgcccttcgcaaaga

SEQ ID NO: 5768163 - DNA, 25 bp, Homo sapien
ccccgtgggagaacggactcctcag

SEQ ID NO: 5768164 - DNA, 25 bp, Homo sapien
ctgacccgactgtcttacttcctac

SEQ ID NO: 5768165 - DNA, 25 bp, Homo sapien
ttcttcagcggctgggagccgccgg

SEQ ID NO: 5768166 - DNA, 25 bp, Homo sapien
ggaaggcgaggtggaaatggaggtc

SEQ ID NO: 5768167 - DNA, 25 bp, Homo sapien
cactgacccgcagagccgcgcctgg

SEQ ID NO: 5768168 - DNA, 25 bp, Homo sapien
atgccacccggcaggagccgctcgt

SEQ ID NO: 5768169 - DNA, 25 bp, Homo sapien
ctcgtgtcctcccttgcagcacgca

SEQ ID NO: 5768170 - DNA, 25 bp, Homo sapien
agggcctgcgcctcggggcggagct

SEQ ID NO: 5768171 - DNA, 25 bp, Homo sapien
gatgcctccaggaagttggccgtca

SEQ ID NO: 5768172 - DNA, 25 bp, Homo sapien
gtggaaatggaggtcatttgacctg

SEQ ID NO: 5768173 - DNA, 25 bp, Homo sapien
agacagcaggaaaatgggtcctgtg

SEQ ID NO: 5768174 - DNA, 25 bp, Homo sapien
cgagtgtctcccgaccatgtcacgc

SEQ ID NO: 5768175 - DNA, 25 bp, Homo sapien
cgtttcctctttgccagcacctggt

SEQ ID NO: 5768176 - DNA, 25 bp, Homo sapien
gagcaccgggaacgcggccgcagga

SEQ ID NO: 5768177 - DNA, 25 bp, Homo sapien
aaggtgattcctggcctgccctcct

SEQ ID NO: 5768178 - DNA, 25 bp, Homo sapien
acgcggtgatgccacccggcaggag

SEQ ID NO: 5768179 - DNA, 25 bp, Homo sapien
aaagagaaagtgtcagagctggagg

SEQ ID NO: 5768180 - DNA, 25 bp, Homo sapien
ggtgacgttctgcctgggtgaggac

SEQ ID NO: 5768181 - DNA, 25 bp, Homo sapien
gtcactgacccgcagagccgcgcct

SEQ ID NO: 5768182 - DNA, 25 bp, Homo sapien
ttggcagagcccctcgtgtcctccc

SEQ ID NO: 5768183 - DNA, 25 bp, Homo sapien
gttcgacgacgtagagagctttgta

SEQ ID NO: 5768184 - DNA, 25 bp, Homo sapien
cgcgcgcagcccgacgtgcacttct

SEQ ID NO: 5768185 - DNA, 25 bp, Homo sapien
acagcagtgagctgtcggtcaagca

SEQ ID NO: 5768186 - DNA, 25 bp, Homo sapien
tcgtgtgccaggaacccgagcgcgc

SEQ ID NO: 5768187 - DNA, 25 bp, Homo sapien
cgaggctgcagaagtcggcggaggc

SEQ ID NO: 5768188 - DNA, 25 bp, Homo sapien
cgggggcgcggccggtccgcctggc

SEQ ID NO: 5768189 - DNA, 25 bp, Homo sapien
ccggcaggtgacccaagcgacacag

SEQ ID NO: 5768190 - DNA, 25 bp, Homo sapien
tgcgggacaacgtcactccacgtga

SEQ ID NO: 5768191 - DNA, 25 bp, Homo sapien
tcaagtacgccttcagcctgctggc

SEQ ID NO: 5768192 - DNA, 25 bp, Homo sapien
gtggacccgccccgggctggagctg

SEQ ID NO: 5768193 - DNA, 25 bp, Homo sapien
acagacttaacgatccttgctgcag

SEQ ID NO: 5768194 - DNA, 25 bp, Homo sapien
gcattgtaatatgcggcccagccta

SEQ ID NO: 5768195 - DNA, 25 bp, Homo sapien
ggaaatggaggtcatttgacctgcc

SEQ ID NO: 5768196 - DNA, 25 bp, Homo sapien
tgtcggtcaagcagcgggacgtact

SEQ ID NO: 5768197 - DNA, 25 bp, Homo sapien
gcgaagcccattcccgaggcagagg

SEQ ID NO: 5768198 - DNA, 25 bp, Homo sapien
ctgctgcgagtgtctcccgaccatg

SEQ ID NO: 5768199 - DNA, 25 bp, Homo sapien
cagacccccgagagggtgcagtgga

SEQ ID NO: 5768200 - DNA, 25 bp, Homo sapien
ttccagggcctgcgcctcggggcgg

SEQ ID NO: 5768201 - DNA, 25 bp, Homo sapien
cagtgtgcggcggccgcatctgaca

SEQ ID NO: 5768202 - DNA, 25 bp, Homo sapien
ctgcgggccaagccgccctcggagg

SEQ ID NO: 5768203 - DNA, 25 bp, Homo sapien
tgcagatgattgtgaacacgtcggg

SEQ ID NO: 5768204 - DNA, 25 bp, Homo sapien
gcaacatcgccgacccctcctctcc

SEQ ID NO: 5768205 - DNA, 25 bp, Homo sapien
ggcgaggtggaaatggaggtcattt

SEQ ID NO: 5768206 - DNA, 25 bp, Homo sapien
ggaaagcgctagcagacccccgaga

SEQ ID NO: 5768207 - DNA, 25 bp, Homo sapien
tgcagcacgcatgggaagaaaggcc

SEQ ID NO: 5768208 - DNA, 25 bp, Homo sapien
gcctccaaggaggagctggagtcgt

SEQ ID NO: 5768209 - DNA, 25 bp, Homo sapien
cgttgctgctgctcgtgtgccagga

SEQ ID NO: 5768210 - DNA, 25 bp, Homo sapien
cgccggcaggtgacccaagcgacac

SEQ ID NO: 5768211 - DNA, 25 bp, Homo sapien
cccgactgtcttacttcctacagca

SEQ ID NO: 5768212 - DNA, 25 bp, Homo sapien
gctgcagtccctccggagaggatct

SEQ ID NO: 5768213 - DNA, 25 bp, Homo sapien
ccctcctctccggagctgttgcact

SEQ ID NO: 5768214 - DNA, 25 bp, Homo sapien
cgacgtagagagctttgtatcgagg

SEQ ID NO: 5768215 - DNA, 25 bp, Homo sapien
tcctcctcctccaggcagcctgtcc

SEQ ID NO: 5768216 - DNA, 25 bp, Homo sapien
ctcagactctccccaatagcggaag

SEQ ID NO: 5768217 - DNA, 25 bp, Homo sapien
agccgccctcggaggccgagtacac

SEQ ID NO: 5768218 - DNA, 25 bp, Homo sapien
ccccccaggtcgctgtcaatggtca

SEQ ID NO: 5768219 - DNA, 25 bp, Homo sapien
agggggctctgcacaattaccgctc

SEQ ID NO: 5768220 - DNA, 25 bp, Homo sapien
ataaacagcctccgtgcttaaaaaa

SEQ ID NO: 5768221 - DNA, 25 bp, Homo sapien
ggccaatctgctccggccctggtct

SEQ ID NO: 5768222 - DNA, 25 bp, Homo sapien
actggaggtcctggaggacaaagag

SEQ ID NO: 5768223 - DNA, 25 bp, Homo sapien
ggaggccgagtacaccgacgtgctg

SEQ ID NO: 5768224 - DNA, 25 bp, Homo sapien
aacccgagcgcgcgcagcccgacgt

SEQ ID NO: 5768225 - DNA, 25 bp, Homo sapien
aggcagtgatggagaagcaaaagaa

SEQ ID NO: 5768226 - DNA, 25 bp, Homo sapien
ctcagcagcctctcctggccttggc

SEQ ID NO: 5768227 - DNA, 25 bp, Homo sapien
gacgtgctgcagaagatcaagtacg

SEQ ID NO: 5768228 - DNA, 25 bp, Homo sapien
cgagcgcgcgcagcccgacgtgcac

SEQ ID NO: 5768229 - DNA, 25 bp, Homo sapien
ctggtgacgttctgcctgggtgagg

SEQ ID NO: 5768230 - DNA, 25 bp, Homo sapien
gtggaaggcgaggtggaaatggagg

SEQ ID NO: 5768231 - DNA, 25 bp, Homo sapien
tgtccccggaggagggacccccata

SEQ ID NO: 5768232 - DNA, 25 bp, Homo sapien
tccaggaagttggccgtcatggata

SEQ ID NO: 5768233 - DNA, 25 bp, Homo sapien
cctgtcctgaccctcagcagcctct

SEQ ID NO: 5768234 - DNA, 25 bp, Homo sapien
tgagccggtggggacctcgagcaac

SEQ ID NO: 5768235 - DNA, 25 bp, Homo sapien
gtgctggagcaccgggaacgcggcc

SEQ ID NO: 5768236 - DNA, 25 bp, Homo sapien
aagcaaaagaagaaggtggaaggcg

SEQ ID NO: 5768237 - DNA, 25 bp, Homo sapien
catacagacccgagttcttcagcgg

SEQ ID NO: 5768238 - DNA, 25 bp, Homo sapien
catccttcaaggtgattcctggcct

SEQ ID NO: 5768239 - DNA, 25 bp, Homo sapien
ctccggccctggtcttcccccatcc

SEQ ID NO: 5768240 - DNA, 25 bp, Homo sapien
gcggcggcgctcagggccacgcagg

SEQ ID NO: 5768241 - DNA, 25 bp, Homo sapien
aatctgagcctcagctggagtcaga

SEQ ID NO: 5768242 - DNA, 25 bp, Homo sapien
gccctcggaggccgagtacaccgac

SEQ ID NO: 5768243 - DNA, 25 bp, Homo sapien
cgactgtcttacttcctacagcaaa

SEQ ID NO: 5768244 - DNA, 25 bp, Homo sapien
cccttgcagcacgcatgggaagaaa

SEQ ID NO: 5768245 - DNA, 25 bp, Homo sapien
ggcccagcctataaacagcctccgt

SEQ ID NO: 5768246 - DNA, 25 bp, Homo sapien
cgctgctgcgggacaacgtcactcc

SEQ ID NO: 5768247 - DNA, 25 bp, Homo sapien
cgcagcccgacgtgcacttcttcca

SEQ ID NO: 5768248 - DNA, 25 bp, Homo sapien
ggcccgcaacagcagtgagctgtcg

SEQ ID NO: 5768249 - DNA, 25 bp, Homo sapien
cacgtgaaaacgagctctggacctc

SEQ ID NO: 5768250 - DNA, 25 bp, Homo sapien
gaggcctgagccggtggggacctcg

SEQ ID NO: 5768251 - DNA, 25 bp, Homo sapien
aatgggtcctgtgtaattatgactt

SEQ ID NO: 5768252 - DNA, 25 bp, Homo sapien
agctggaggcagtgatggagaagca

SEQ ID NO: 5768253 - DNA, 25 bp, Homo sapien
ctggggagggcttgctgacgctgcg

SEQ ID NO: 5768254 - DNA, 25 bp, Homo sapien
tggccgtcatggatagccagggccg

SEQ ID NO: 5768255 - DNA, 25 bp, Homo sapien
gcgccatcgtgcgctgtgacgcggt

SEQ ID NO: 5768256 - DNA, 25 bp, Homo sapien
cctgagccggtggggacctcgagca

SEQ ID NO: 5768257 - DNA, 25 bp, Homo sapien
agcctctcctggccttggcagagcc

SEQ ID NO: 5768258 - DNA, 25 bp, Homo sapien
tcaccgagacttggagccagaatct

SEQ ID NO: 5768259 - DNA, 25 bp, Homo sapien
ggcttgctgacgctgcgggccaagc

SEQ ID NO: 5768260 - DNA, 25 bp, Homo sapien
gaccatgtcacgctgctcgacccgg

SEQ ID NO: 5768261 - DNA, 25 bp, Homo sapien
cgtcatggatagccagggccgagtc

SEQ ID NO: 5768262 - DNA, 25 bp, Homo sapien
tacagcaaagcgccccccaggtcgc

SEQ ID NO: 5768263 - DNA, 25 bp, Homo sapien
ccagaatctgagcctcagctggagt

SEQ ID NO: 5768264 - DNA, 25 bp, Homo sapien
ccatcccggtggacagacttaacga

SEQ ID NO: 5768265 - DNA, 25 bp, Homo sapien
gcgctgtgacgcggtgatgccaccc

SEQ ID NO: 5768266 - DNA, 25 bp, Homo sapien
tctgaaggatggccaatctgctccg

SEQ ID NO: 5768267 - DNA, 25 bp, Homo sapien
ctcctcctccaggcagcctgtcctg

SEQ ID NO: 5768268 - DNA, 25 bp, Homo sapien
cgggggggccggagttcgcgagcag

SEQ ID NO: 5768269 - DNA, 25 bp, Homo sapien
cggcaacatcgccgacccctcctct

SEQ ID NO: 5768270 - DNA, 25 bp, Homo sapien
cccgagttcttcagcggctgggagc

SEQ ID NO: 5768271 - DNA, 25 bp, Homo sapien
aggagctggagtcgtacccactggg

SEQ ID NO: 5768272 - DNA, 25 bp, Homo sapien
agcgcgcgcagcccgacgtgcactt

SEQ ID NO: 5768273 - DNA, 25 bp, Homo sapien
agccagaatctgagcctcagctgga

SEQ ID NO: 5768274 - DNA, 25 bp, Homo sapien
tcagctggagtcagagacagcagga

SEQ ID NO: 5768275 - DNA, 25 bp, Homo sapien
cggaggcgccggcaggtgacccaag

SEQ ID NO: 5768276 - DNA, 25 bp, Homo sapien
ctgctgcgggacaacgtcactccac

SEQ ID NO: 5768277 - DNA, 25 bp, Homo sapien
cccggcaggagccgctcgttgctgc

SEQ ID NO: 5768278 - DNA, 25 bp, Homo sapien
cccgccgctgagaccccgcccctgc

SEQ ID NO: 5768279 - DNA, 25 bp, Homo sapien
cggcaggagccgctcgttgctgctg

SEQ ID NO: 5768280 - DNA, 25 bp, Homo sapien
cagtgagctgtcggtcaagcagcgg

SEQ ID NO: 5768281 - DNA, 25 bp, Homo sapien
agaatctgagcctcagctggagtca

SEQ ID NO: 5768282 - DNA, 25 bp, Homo sapien
ctccaaggaggagctggagtcgtac

SEQ ID NO: 5768283 - DNA, 25 bp, Homo sapien
caacagcagtgagctgtcggtcaag

SEQ ID NO: 5768284 - DNA, 25 bp, Homo sapien
gggcacaggagatgctgctgcgagt

SEQ ID NO: 5768285 - DNA, 25 bp, Homo sapien
ctggcctgccctcctcctccaggca

SEQ ID NO: 5768286 - DNA, 25 bp, Homo sapien
ttaacgatccttgctgcagtccctc

SEQ ID NO: 5768287 - DNA, 25 bp, Homo sapien
gaggcgcagaggcctgagccggtgg

SEQ ID NO: 5768288 - DNA, 25 bp, Homo sapien
gcctgacccgactgtcttacttcct

SEQ ID NO: 5768289 - DNA, 25 bp, Homo sapien
gaagaaaggccatcgtcctcgccat

SEQ ID NO: 5768290 - DNA, 25 bp, Homo sapien
caggaacccgagcgcgcgcagcccg

SEQ ID NO: 5768291 - DNA, 25 bp, Homo sapien
gtagagagctttgtatcgaggctgc

SEQ ID NO: 5768292 - DNA, 25 bp, Homo sapien
cgggaagtggacatcctgaaccacg

SEQ ID NO: 5768293 - DNA, 25 bp, Homo sapien
cgggccgcggacgaccccaggcgaa

SEQ ID NO: 5768294 - DNA, 25 bp, Homo sapien
ctgcacaattaccgctcgggccgcg

SEQ ID NO: 5768295 - DNA, 25 bp, Homo sapien
ctctccccaatagcggaagtcgatc

SEQ ID NO: 5768296 - DNA, 25 bp, Homo sapien
gcctataaacagcctccgtgcttaa

SEQ ID NO: 5768297 - DNA, 25 bp, Homo sapien
aacatcgccgacccctcctctccgg

SEQ ID NO: 5768298 - DNA, 25 bp, Homo sapien
gctgtcggtcaagcagcgggacgta

SEQ ID NO: 5768299 - DNA, 25 bp, Homo sapien
gagccgctcgttgctgctgctcgtg

SEQ ID NO: 5768300 - DNA, 25 bp, Homo sapien
aaggatggccaatctgctccggccc

SEQ ID NO: 5768301 - DNA, 25 bp, Homo sapien
gcacaggagatgctgctgcgagtgt

SEQ ID NO: 5768302 - DNA, 25 bp, Homo sapien
ggcggccagggtgctggagcaccgg

SEQ ID NO: 5768303 - DNA, 25 bp, Homo sapien
cgcgagcagtgtgcggcggccgcat

SEQ ID NO: 5768304 - DNA, 25 bp, Homo sapien
cctcctccaggcagcctgtcctcct

SEQ ID NO: 5768305 - DNA, 25 bp, Homo sapien
gggccaagccgccctcggaggccga

SEQ ID NO: 5768306 - DNA, 25 bp, Homo sapien
gatgccgtggcgctgctgcgggaca

SEQ ID NO: 5768307 - DNA, 25 bp, Homo sapien
tgctgacgctgcgggccaagccgcc

SEQ ID NO: 5768308 - DNA, 25 bp, Homo sapien
cataccgtggaggatgcctccagga

SEQ ID NO: 5768309 - DNA, 25 bp, Homo sapien
aggtcatttgacctgccaggcgccc

SEQ ID NO: 5768310 - DNA, 25 bp, Homo sapien
cagacccgagttcttcagcggctgg

SEQ ID NO: 5768311 - DNA, 25 bp, Homo sapien
ggtgaggacgatggcgtgcataccg

SEQ ID NO: 5768312 - DNA, 25 bp, Homo sapien
ggagaggatctggactggctgggag

SEQ ID NO: 5768313 - DNA, 25 bp, Homo sapien
aaaacgagctctggacctcgctggg

SEQ ID NO: 5768314 - DNA, 25 bp, Homo sapien
ctagcagacccccgagagggtgcag

SEQ ID NO: 5768315 - DNA, 25 bp, Homo sapien
ccagggggctctgcacaattaccgc

SEQ ID NO: 5768316 - DNA, 25 bp, Homo sapien
ctgacctggcggttctgcaggcgga

SEQ ID NO: 5768317 - DNA, 25 bp, Homo sapien
tcgccgacccctcctctccggagct

SEQ ID NO: 5768318 - DNA, 25 bp, Homo sapien
gcacgcatgggaagaaaggccatcg

SEQ ID NO: 5768319 - DNA, 25 bp, Homo sapien
agacttaacgatccttgctgcagtc

SEQ ID NO: 5768320 - DNA, 25 bp, Homo sapien
tggagacagtctacggaaagcgcta

SEQ ID NO: 5768321 - DNA, 25 bp, Homo sapien
cgcggccgcaggagccggcgccggg

SEQ ID NO: 5768322 - DNA, 25 bp, Homo sapien
ccgacgtgctgcagaagatcaagta

SEQ ID NO: 5768323 - DNA, 25 bp, Homo sapien
agaaacagctacagcacgagcggag

SEQ ID NO: 5768324 - DNA, 25 bp, Homo sapien
ggaggtcatttgacctgccaggcgc

SEQ ID NO: 5768325 - DNA, 25 bp, Homo sapien
tgagaccccgcccctgcagcgccgc

SEQ ID NO: 5768326 - DNA, 25 bp, Homo sapien
ctgacgctgcgggccaagccgccct

SEQ ID NO: 5768327 - DNA, 25 bp, Homo sapien
gactcggcctccccggacctgggtc

SEQ ID NO: 5768328 - DNA, 25 bp, Homo sapien
aactcatccttcaaggtgattcctg

SEQ ID NO: 5768329 - DNA, 25 bp, Homo sapien
cggagctgttgcacttccttttcgg

SEQ ID NO: 5768330 - DNA, 25 bp, Homo sapien
cggccagggtgctggagcaccggga

SEQ ID NO: 5768331 - DNA, 25 bp, Homo sapien
ccctcagcagcctctcctggccttg

SEQ ID NO: 5768332 - DNA, 25 bp, Homo sapien
tgggtgaggacgatggcgtgcatac

SEQ ID NO: 5768333 - DNA, 25 bp, Homo sapien
gtgttcgacgacgtagagagctttg

SEQ ID NO: 5768334 - DNA, 25 bp, Homo sapien
ctggccttggcagagcccctcgtgt

SEQ ID NO: 5768335 - DNA, 25 bp, Homo sapien
ctcctctccggagctgttgcacttc

SEQ ID NO: 5768336 - DNA, 25 bp, Homo sapien
ccaatagcggaagtcgatcttctga

SEQ ID NO: 5768337 - DNA, 25 bp, Homo sapien
ggaacgcggccgcaggagccggcgc

SEQ ID NO: 5768338 - DNA, 25 bp, Homo sapien
cattgctaacaccagccttgcgttt

SEQ ID NO: 5768339 - DNA, 25 bp, Homo sapien
cccccatacagacccgagttcttca

SEQ ID NO: 5768340 - DNA, 25 bp, Homo sapien
cgcggcaacatcgccgacccctcct

SEQ ID NO: 5768341 - DNA, 25 bp, Homo sapien
agggccacgcaggaggagttgcagc

SEQ ID NO: 5768342 - DNA, 25 bp, Homo sapien
gtgcgctgtgacgcggtgatgccac

SEQ ID NO: 5768343 - DNA, 25 bp, Homo sapien
cgcatctgacatcggatgccgtggc

SEQ ID NO: 5768344 - DNA, 25 bp, Homo sapien
ttgtatcgaggctgcagaagtcggc

SEQ ID NO: 5768345 - DNA, 25 bp, Homo sapien
ggcgcggccggtccgcctggccccg

SEQ ID NO: 5768346 - DNA, 25 bp, Homo sapien
cgctgactcggcctccccggacctg

SEQ ID NO: 5768347 - DNA, 25 bp, Homo sapien
gccccgggctggagctgtccccgga

SEQ ID NO: 5768348 - DNA, 25 bp, Homo sapien
cccgagagggtgcagtggagccctg

SEQ ID NO: 5768349 - DNA, 25 bp, Homo sapien
gcggcggccgcatctgacatcggat

SEQ ID NO: 5768350 - DNA, 25 bp, Homo sapien
tgaggacgatggcgtgcataccgtg

SEQ ID NO: 5768351 - DNA, 25 bp, Homo sapien
tgggaggacccagttgagaaacagc

SEQ ID NO: 5768352 - DNA, 25 bp, Homo sapien
aattaccgctcgggccgcggggagc

SEQ ID NO: 5768353 - DNA, 25 bp, Homo sapien
caggtgacccaagcgacacagcagg

SEQ ID NO: 5768354 - DNA, 25 bp, Homo sapien
gcagcctctcctggccttggcagag

SEQ ID NO: 5768355 - DNA, 25 bp, Homo sapien
cgtacccactgggcgccatcgtgcg

SEQ ID NO: 5768356 - DNA, 25 bp, Homo sapien
tgctccggccctggtcttcccccat

SEQ ID NO: 5768357 - DNA, 25 bp, Homo sapien
ggccgcggacgaccccaggcgaagc

SEQ ID NO: 5768358 - DNA, 25 bp, Homo sapien
cctgaaccacgtgttcgacgacgta

SEQ ID NO: 5768359 - DNA, 25 bp, Homo sapien
cgtgcataccgtggaggatgcctcc

SEQ ID NO: 5768360 - DNA, 25 bp, Homo sapien
cctgggaggacccagttgagaaaca

SEQ ID NO: 5768361 - DNA, 25 bp, Homo sapien
caaactcatccttcaaggtgattcc

SEQ ID NO: 5768362 - DNA, 25 bp, Homo sapien
cgctgcgggccaagccgccctcgga

SEQ ID NO: 5768363 - DNA, 25 bp, Homo sapien
cttcaaggtgattcctggcctgccc

SEQ ID NO: 5768364 - DNA, 25 bp, Homo sapien
ggaagtggacatcctgaaccacgtg

SEQ ID NO: 5768365 - DNA, 25 bp, Homo sapien
tatcttctaggattgacactggctg

SEQ ID NO: 5768366 - DNA, 25 bp, Homo sapien
aaagtgtcagagctggaggcagtga

SEQ ID NO: 5768367 - DNA, 25 bp, Homo sapien
tgtaatatgcggcccagcctataaa

SEQ ID NO: 5768368 - DNA, 25 bp, Homo sapien
gtctacggaaagcgctagcagaccc

SEQ ID NO: 5768369 - DNA, 25 bp, Homo sapien
ttgacactggctgtcaaactcatcc

SEQ ID NO: 5768370 - DNA, 25 bp, Homo sapien
cgaggcagaggaggcgcagaggcct

SEQ ID NO: 5768371 - DNA, 25 bp, Homo sapien
ggcagagcccctcgtgtcctccctt

SEQ ID NO: 5768372 - DNA, 25 bp, Homo sapien
tcttccagggcctgcgcctcggggc

SEQ ID NO: 5768373 - DNA, 25 bp, Homo sapien
cccagcctataaacagcctccgtgc

SEQ ID NO: 5768374 - DNA, 25 bp, Homo sapien
ccatgtcacgctgctcgacccggcc

SEQ ID NO: 5768375 - DNA, 25 bp, Homo sapien
ggcctgccctcctcctccaggcagc

SEQ ID NO: 5768376 - DNA, 25 bp, Homo sapien
gcggctggggagggcttgctgacgc

SEQ ID NO: 5768377 - DNA, 25 bp, Homo sapien
aagtacgccttcagcctgctggccc

SEQ ID NO: 5768378 - DNA, 25 bp, Homo sapien
ggagtcagagacagcaggaaaatgg

SEQ ID NO: 5768379 - DNA, 25 bp, Homo sapien
gggaagaaaggccatcgtcctcgcc

SEQ ID NO: 5768380 - DNA, 25 bp, Homo sapien
ctccccaatagcggaagtcgatctt

SEQ ID NO: 5768381 - DNA, 25 bp, Homo sapien
ggacaacgtcactccacgtgaaaac

SEQ ID NO: 5768382 - DNA, 25 bp, Homo sapien
ctcatccttcaaggtgattcctggc

SEQ ID NO: 5768383 - DNA, 25 bp, Homo sapien
tgggagccgccggtcactgacccgc

SEQ ID NO: 5768384 - DNA, 25 bp, Homo sapien
tgacgttctgcctgggtgaggacga

SEQ ID NO: 5768385 - DNA, 25 bp, Homo sapien
ctcctcctccaggcagcctgtcctc

SEQ ID NO: 5768386 - DNA, 25 bp, Homo sapien
gcccgacgtgcacttcttccagggc

SEQ ID NO: 5768387 - DNA, 25 bp, Homo sapien
cagcccgacgtgcacttcttccagg

SEQ ID NO: 5768388 - DNA, 25 bp, Homo sapien
gctgtccccggaggagggaccccca

SEQ ID NO: 5768389 - DNA, 25 bp, Homo sapien
tcgacccggcctccaaggaggagct

SEQ ID NO: 5768390 - DNA, 25 bp, Homo sapien
agcctgtcctgaccctcagcagcct

SEQ ID NO: 5768391 - DNA, 25 bp, Homo sapien
atccttgctgcagtccctccggaga

SEQ ID NO: 5768392 - DNA, 25 bp, Homo sapien
cgcgggccgcggacgaccccaggcg

SEQ ID NO: 5768393 - DNA, 25 bp, Homo sapien
cgctcgcccgccgctgagaccccgc

SEQ ID NO: 5768394 - DNA, 25 bp, Homo sapien
gctcgtgtgccaggaacccgagcgc

SEQ ID NO: 5768395 - DNA, 25 bp, Homo sapien
gcatgggaagaaaggccatcgtcct

SEQ ID NO: 5768396 - DNA, 25 bp, Homo sapien
ggacgtactggaggtcctggaggac

SEQ ID NO: 5768397 - DNA, 25 bp, Homo sapien
cccgcagagccgcgcctgggaggac

SEQ ID NO: 5768398 - DNA, 25 bp, Homo sapien
gacgatggcgtgcataccgtggagg

SEQ ID NO: 5768399 - DNA, 25 bp, Homo sapien
actgtcttacttcctacagcaaagc

SEQ ID NO: 5768400 - DNA, 25 bp, Homo sapien
cccgagcgcgcgcagcccgacgtgc

SEQ ID NO: 5768401 - DNA, 25 bp, Homo sapien
atgacttccaggcccgcaacagcag

SEQ ID NO: 5768402 - DNA, 25 bp, Homo sapien
gtccgcctggccccgcctgacccga

SEQ ID NO: 5768403 - DNA, 25 bp, Homo sapien
caagccgccctcggaggccgagtac

SEQ ID NO: 5768404 - DNA, 25 bp, Homo sapien
cgcgcagtgatcagcaccgtagagc

SEQ ID NO: 5768405 - DNA, 25 bp, Homo sapien
tcagcggctgggagccgccggtcac

SEQ ID NO: 5768406 - DNA, 25 bp, Homo sapien
atggatagccagggccgagtctggg

SEQ ID NO: 5768407 - DNA, 25 bp, Homo sapien
tgggtccccggggtcctgacctggc

SEQ ID NO: 5768408 - DNA, 25 bp, Homo sapien
ctataaacagcctccgtgcttaaaa

SEQ ID NO: 5768409 - DNA, 25 bp, Homo sapien
tcctcagactctccccaatagcgga

SEQ ID NO: 5768410 - DNA, 25 bp, Homo sapien
gatgctgctgcgagtgtctcccgac

SEQ ID NO: 5768411 - DNA, 25 bp, Homo sapien
gacccggcctccaaggaggagctgg

SEQ ID NO: 5768412 - DNA, 25 bp, Homo sapien
aggcgaagcccattcccgaggcaga

SEQ ID NO: 5768413 - DNA, 25 bp, Homo sapien
aacgtcactccacgtgaaaacgagc

SEQ ID NO: 5768414 - DNA, 25 bp, Homo sapien
cttcttccagggcctgcgcctcggg

SEQ ID NO: 5768415 - DNA, 25 bp, Homo sapien
cagcacgcatgggaagaaaggccat

SEQ ID NO: 5768416 - DNA, 25 bp, Homo sapien
ttctgcaggcggagcgggaagtgga

SEQ ID NO: 5768417 - DNA, 25 bp, Homo sapien
ggaacccgagcgcgcgcagcccgac

SEQ ID NO: 5768418 - DNA, 25 bp, Homo sapien
gttgagaaacagctacagcacgagc

SEQ ID NO: 5768419 - DNA, 25 bp, Homo sapien
gacttccaggcccgcaacagcagtg

SEQ ID NO: 5768420 - DNA, 25 bp, Homo sapien
agctacagcacgagcggaggcgccg

SEQ ID NO: 5768421 - DNA, 25 bp, Homo sapien
ggcgcagaggcctgagccggtgggg

SEQ ID NO: 5768422 - DNA, 25 bp, Homo sapien
gtctgggcacaggagatgctgctgc

SEQ ID NO: 5768423 - DNA, 25 bp, Homo sapien
tctcctggccttggcagagcccctc

SEQ ID NO: 5768424 - DNA, 25 bp, Homo sapien
gatcaagtacgccttcagcctgctg

SEQ ID NO: 5768425 - DNA, 25 bp, Homo sapien
agctctggacctcgctgggggactc

SEQ ID NO: 5768426 - DNA, 25 bp, Homo sapien
cttcccccatcccggtggacagact

SEQ ID NO: 5768427 - DNA, 25 bp, Homo sapien
gccgcatctgacatcggatgccgtg

SEQ ID NO: 5768428 - DNA, 25 bp, Homo sapien
gaggagggacccccatacagacccg

SEQ ID NO: 5768429 - DNA, 25 bp, Homo sapien
gtaattatgacttccaggcccgcaa

SEQ ID NO: 5768430 - DNA, 25 bp, Homo sapien
ggggcggagctgatccgagaggaca

SEQ ID NO: 5768431 - DNA, 25 bp, Homo sapien
tgacgcggtgatgccacccggcagg

SEQ ID NO: 5768432 - DNA, 25 bp, Homo sapien
gcagcctgtcctcctcctccaggca

SEQ ID NO: 5768433 - DNA, 25 bp, Homo sapien
gtgtgccaggaacccgagcgcgcgc

SEQ ID NO: 5768434 - DNA, 25 bp, Homo sapien
ctttgccagcacctggtgacgttct

SEQ ID NO: 5768435 - DNA, 25 bp, Homo sapien
tcctctttgccagcacctggtgacg

SEQ ID NO: 5768436 - DNA, 25 bp, Homo sapien
ggaaaatgggtcctgtgtaattatg

SEQ ID NO: 5768437 - DNA, 25 bp, Homo sapien
aacgcggccgcaggagccggcgccg

SEQ ID NO: 5768438 - DNA, 25 bp, Homo sapien
tcagagacagcaggaaaatgggtcc

SEQ ID NO: 5768439 - DNA, 25 bp, Homo sapien
tcctgacctggcggttctgcaggcg

SEQ ID NO: 5768440 - DNA, 25 bp, Homo sapien
cctggtcttcccccatcccggtgga

SEQ ID NO: 5768441 - DNA, 25 bp, Homo sapien
ggggccggagttcgcgagcagtgtg

SEQ ID NO: 5768442 - DNA, 25 bp, Homo sapien
gacctcgagcaacgctgactcggcc

SEQ ID NO: 5768443 - DNA, 25 bp, Homo sapien
tcccgaccatgtcacgctgctcgac

SEQ ID NO: 5768444 - DNA, 25 bp, Homo sapien
gctgcgagtgtctcccgaccatgtc

SEQ ID NO: 5768445 - DNA, 25 bp, Homo sapien
tgcagaagtcggcggaggcggccag

SEQ ID NO: 5768446 - DNA, 25 bp, Homo sapien
aaagcgctagcagacccccgagagg

SEQ ID NO: 5768447 - DNA, 25 bp, Homo sapien
cttccaggcccgcaacagcagtgag

SEQ ID NO: 5768448 - DNA, 25 bp, Homo sapien
tgctggcccggctgcgcggcaacat

SEQ ID NO: 5768449 - DNA, 25 bp, Homo sapien
cgcccttcgcaaagagtgacgaggc

SEQ ID NO: 5768450 - DNA, 25 bp, Homo sapien
tgagaaacagctacagcacgagcgg

SEQ ID NO: 5768451 - DNA, 25 bp, Homo sapien
ttgccagcacctggtgacgttctgc

SEQ ID NO: 5768452 - DNA, 25 bp, Homo sapien
agaaagtgtcagagctggaggcagt

SEQ ID NO: 5768453 - DNA, 25 bp, Homo sapien
caggcgcccttcgcaaagagtgacg

SEQ ID NO: 5768454 - DNA, 25 bp, Homo sapien
gaagcccattcccgaggcagaggag

SEQ ID NO: 5768455 - DNA, 25 bp, Homo sapien
tgcataccgtggaggatgcctccag

SEQ ID NO: 5768456 - DNA, 25 bp, Homo sapien
cagatgattgtgaacacgtcggggg

SEQ ID NO: 5768457 - DNA, 25 bp, Homo sapien
ccagggccgagtctgggcacaggag

SEQ ID NO: 5768458 - DNA, 25 bp, Homo sapien
tcagagctggaggcagtgatggaga

SEQ ID NO: 5768459 - DNA, 25 bp, Homo sapien
cagtgatcagcaccgtagagcgggg

SEQ ID NO: 5768460 - DNA, 25 bp, Homo sapien
acggactcctcagactctccccaat

SEQ ID NO: 5768461 - DNA, 25 bp, Homo sapien
ctggccccgcctgacccgactgtct

SEQ ID NO: 5768462 - DNA, 25 bp, Homo sapien
ggcgcgggccgcggacgaccccagg

SEQ ID NO: 5768463 - DNA, 25 bp, Homo sapien
cgtcactccacgtgaaaacgagctc

SEQ ID NO: 5768464 - DNA, 25 bp, Homo sapien
ggaggatgcctccaggaagttggcc

SEQ ID NO: 5768465 - DNA, 25 bp, Homo sapien
cacgctgctcgacccggcctccaag

SEQ ID NO: 5768466 - DNA, 25 bp, Homo sapien
tcggaggccgagtacaccgacgtgc

SEQ ID NO: 5768467 - DNA, 25 bp, Homo sapien
ctgcagaagatcaagtacgccttca

SEQ ID NO: 5768468 - DNA, 25 bp, Homo sapien
gcggacgaccccaggcgaagcccat

SEQ ID NO: 5768469 - DNA, 25 bp, Homo sapien
tgtcctcctcctccaggcagcctgt

SEQ ID NO: 5768470 - DNA, 25 bp, Homo sapien
acagcaggaaaatgggtcctgtgta

SEQ ID NO: 5768471 - DNA, 25 bp, Homo sapien
ctgactcggcctccccggacctggg

SEQ ID NO: 5768472 - DNA, 25 bp, Homo sapien
atgcggcccagcctataaacagcct

SEQ ID NO: 5768473 - DNA, 25 bp, Homo sapien
cccactgggcgccatcgtgcgctgt

SEQ ID NO: 5768474 - DNA, 25 bp, Homo sapien
ctcccttgcagcacgcatgggaaga

SEQ ID NO: 5768475 - DNA, 25 bp, Homo sapien
ggtgacccaagcgacacagcagggc

SEQ ID NO: 5768476 - DNA, 25 bp, Homo sapien
cgcgaccgctcgcccgccgctgaga

SEQ ID NO: 5768477 - DNA, 25 bp, Homo sapien
ggggggccggagttcgcgagcagtg

SEQ ID NO: 5768478 - DNA, 25 bp, Homo sapien
cgtgcacttcttccagggcctgcgc

SEQ ID NO: 5768479 - DNA, 25 bp, Homo sapien
tgcagtggagccctgagcattgtaa

SEQ ID NO: 5768480 - DNA, 25 bp, Homo sapien
ggcgctgctgcgggacaacgtcact

SEQ ID NO: 5768481 - DNA, 25 bp, Homo sapien
cctgcagcgccgcccgtcagtccgc

SEQ ID NO: 5768482 - DNA, 25 bp, Homo sapien
gggagaacggactcctcagactctc

SEQ ID NO: 5768483 - DNA, 25 bp, Homo sapien
gagccgcgcctgggaggacccagtt

SEQ ID NO: 5768484 - DNA, 25 bp, Homo sapien
gtgatcagcaccgtagagcggggcg

SEQ ID NO: 5768485 - DNA, 25 bp, Homo sapien
acgtagagagctttgtatcgaggct

SEQ ID NO: 5768486 - DNA, 25 bp, Homo sapien
agaccccgcccctgcagcgccgccc

SEQ ID NO: 5768487 - DNA, 25 bp, Homo sapien
gccgcccgtcagtccgcgcagtgat

SEQ ID NO: 5768488 - DNA, 25 bp, Homo sapien
cccggcctccaaggaggagctggag

SEQ ID NO: 5768489 - DNA, 25 bp, Homo sapien
tcggtcaagcagcgggacgtactgg

SEQ ID NO: 5768490 - DNA, 25 bp, Homo sapien
ctcgttgctgctgctcgtgtgccag

SEQ ID NO: 5768491 - DNA, 25 bp, Homo sapien
gatctggactggctgggagtgggga

SEQ ID NO: 5768492 - DNA, 25 bp, Homo sapien
ggtgattcctggcctgccctcctcc

SEQ ID NO: 5768493 - DNA, 25 bp, Homo sapien
taccgtggaggatgcctccaggaag

SEQ ID NO: 5768494 - DNA, 25 bp, Homo sapien
gccagcacctggtgacgttctgcct

SEQ ID NO: 5768495 - DNA, 25 bp, Homo sapien
gcaaagagtgacgaggccccgtggg

SEQ ID NO: 5768496 - DNA, 25 bp, Homo sapien
aaggaggagctggagtcgtacccac

SEQ ID NO: 5768497 - DNA, 25 bp, Homo sapien
tcctggcctgccctcctcctccagg

SEQ ID NO: 5768498 - DNA, 25 bp, Homo sapien
ccgccctcggaggccgagtacaccg

SEQ ID NO: 5768499 - DNA, 25 bp, Homo sapien
ttcctacagcaaagcgccccccagg

SEQ ID NO: 5768500 - DNA, 25 bp, Homo sapien
tgcgcctcggggcggagctgatccg

SEQ ID NO: 5768501 - DNA, 25 bp, Homo sapien
cctcgagcaacgctgactcggcctc

SEQ ID NO: 5768502 - DNA, 25 bp, Homo sapien
gccattgctaacaccagccttgcgt

SEQ ID NO: 5768503 - DNA, 25 bp, Homo sapien
ggctggggagggcttgctgacgctg

SEQ ID NO: 5768504 - DNA, 25 bp, Homo sapien
tccgggggcgcggccggtccgcctg

SEQ ID NO: 5768505 - DNA, 25 bp, Homo sapien
cgccgctgagaccccgcccctgcag

SEQ ID NO: 5768506 - DNA, 25 bp, Homo sapien
acccgccccgggctggagctgtccc

SEQ ID NO: 5768507 - DNA, 25 bp, Homo sapien
cttcagcggctgggagccgccggtc

SEQ ID NO: 5768508 - DNA, 25 bp, Homo sapien
gccttgcgtttcctctttgccagca

SEQ ID NO: 5768509 - DNA, 25 bp, Homo sapien
gcaaagcgccccccaggtcgctgtc

SEQ ID NO: 5768510 - DNA, 25 bp, Homo sapien
gacccgactgtcttacttcctacag

SEQ ID NO: 5768511 - DNA, 25 bp, Homo sapien
tgcctgggtgaggacgatggcgtgc

SEQ ID NO: 5768512 - DNA, 25 bp, Homo sapien
cccatacagacccgagttcttcagc

SEQ ID NO: 5768513 - DNA, 25 bp, Homo sapien
tgtcctgaccctcagcagcctctcc

SEQ ID NO: 5768514 - DNA, 25 bp, Homo sapien
gacccgagttcttcagcggctggga

SEQ ID NO: 5768515 - DNA, 25 bp, Homo sapien
tgtcctcccttgcagcacgcatggg

SEQ ID NO: 5768516 - DNA, 25 bp, Homo sapien
tggcggttctgcaggcggagcggga

SEQ ID NO: 5768517 - DNA, 25 bp, Homo sapien
gagacagtctacggaaagcgctagc

SEQ ID NO: 5768518 - DNA, 25 bp, Homo sapien
ccgccggtcactgacccgcagagcc

SEQ ID NO: 5768519 - DNA, 25 bp, Homo sapien
cgatccttgctgcagtccctccgga

SEQ ID NO: 5768520 - DNA, 25 bp, Homo sapien
cagagccgcgcctgggaggacccag

SEQ ID NO: 5768521 - DNA, 25 bp, Homo sapien
atggaggtcatttgacctgccaggc

SEQ ID NO: 5768522 - DNA, 25 bp, Homo sapien
cggtccgcctggccccgcctgaccc

SEQ ID NO: 5768523 - DNA, 25 bp, Homo sapien
cgctagcagacccccgagagggtgc

SEQ ID NO: 5768524 - DNA, 25 bp, Homo sapien
cgagtacaccgacgtgctgcagaag

SEQ ID NO: 5768525 - DNA, 25 bp, Homo sapien
cgagttcttcagcggctgggagccg

SEQ ID NO: 5768526 - DNA, 25 bp, Homo sapien
tgctgctgcgagtgtctcccgacca

SEQ ID NO: 5768527 - DNA, 25 bp, Homo sapien
ccgacgtgcacttcttccagggcct

SEQ ID NO: 5768528 - DNA, 25 bp, Homo sapien
gaaggtggaaggcgaggtggaaatg

SEQ ID NO: 5768529 - DNA, 25 bp, Homo sapien
tgttgcacttccttttcgggcctct

SEQ ID NO: 5768530 - DNA, 25 bp, Homo sapien
cccccgagagggtgcagtggagccc

SEQ ID NO: 5768531 - DNA, 25 bp, Homo sapien
gtcgggggggccggagttcgcgagc

SEQ ID NO: 5768532 - DNA, 25 bp, Homo sapien
aattatgacttccaggcccgcaaca

SEQ ID NO: 5768533 - DNA, 25 bp, Homo sapien
ttgctgctgctcgtgtgccaggaac

SEQ ID NO: 5768534 - DNA, 25 bp, Homo sapien
ggtcaagcagcgggacgtactggag

SEQ ID NO: 5768535 - DNA, 25 bp, Homo sapien
gagatgctgctgcgagtgtctcccg

SEQ ID NO: 5768536 - DNA, 25 bp, Homo sapien
cgaccgctcgcccgccgctgagacc

SEQ ID NO: 5768537 - DNA, 25 bp, Homo sapien
gccttcagcctgctggcccggctgc

SEQ ID NO: 5768538 - DNA, 25 bp, Homo sapien
gtcctcgccattgctaacaccagcc

SEQ ID NO: 5768539 - DNA, 25 bp, Homo sapien
cgtggagacagtctacggaaagcgc

SEQ ID NO: 5768540 - DNA, 25 bp, Homo sapien
aaggcgaggtggaaatggaggtcat

SEQ ID NO: 5768541 - DNA, 25 bp, Homo sapien
tcctgaccctcagcagcctctcctg

SEQ ID NO: 5768542 - DNA, 25 bp, Homo sapien
ctggagctgtccccggaggagggac

SEQ ID NO: 5768543 - DNA, 25 bp, Homo sapien
tccccggaggagggacccccataca

SEQ ID NO: 5768544 - DNA, 25 bp, Homo sapien
tcgtcctcgccattgctaacaccag

SEQ ID NO: 5768545 - DNA, 25 bp, Homo sapien
ccgcctggccccgcctgacccgact

SEQ ID NO: 5768546 - DNA, 25 bp, Homo sapien
taacaccagccttgcgtttcctctt

SEQ ID NO: 5768547 - DNA, 25 bp, Homo sapien
aaaggccatcgtcctcgccattgct

SEQ ID NO: 5768548 - DNA, 25 bp, Homo sapien
gctgatccgagaggacatccagggg

SEQ ID NO: 5768549 - DNA, 25 bp, Homo sapien
aggcggagcgggaagtggacatcct

SEQ ID NO: 5768550 - DNA, 25 bp, Homo sapien
ggaagttggccgtcatggatagcca

SEQ ID NO: 5768551 - DNA, 25 bp, Homo sapien
ggccgagtctgggcacaggagatgc

SEQ ID NO: 5768552 - DNA, 25 bp, Homo sapien
gggtgctggagcaccgggaacgcgg

SEQ ID NO: 5768553 - DNA, 25 bp, Homo sapien
gtcttcccccatcccggtggacaga

SEQ ID NO: 5768554 - DNA, 25 bp, Homo sapien
atcctgaaccacgtgttcgacgacg

SEQ ID NO: 5768555 - DNA, 25 bp, Homo sapien
tcaagcagcgggacgtactggaggt

SEQ ID NO: 5768556 - DNA, 25 bp, Homo sapien
ttacttcctacagcaaagcgccccc

SEQ ID NO: 5768557 - DNA, 25 bp, Homo sapien
agcagtgtgcggcggccgcatctga

SEQ ID NO: 5768558 - DNA, 25 bp, Homo sapien
gtcgatcttctgaaggatggccaat

SEQ ID NO: 5768559 - DNA, 25 bp, Homo sapien
accagccttgcgtttcctctttgcc

SEQ ID NO: 5768560 - DNA, 25 bp, Homo sapien
gccggtccgcctggccccgcctgac

SEQ ID NO: 5768561 - DNA, 25 bp, Homo sapien
agtcagagacagcaggaaaatgggt

SEQ ID NO: 5768562 - DNA, 25 bp, Homo sapien
ccctcctcctccaggcagcctgtcc

SEQ ID NO: 5768563 - DNA, 25 bp, Homo sapien
ctgtgtaattatgacttccaggccc

SEQ ID NO: 5768564 - DNA, 25 bp, Homo sapien
taatatgcggcccagcctataaaca

SEQ ID NO: 5768565 - DNA, 25 bp, Homo sapien
ctggagtcagagacagcaggaaaat

SEQ ID NO: 5768566 - DNA, 25 bp, Homo sapien
ggacatcctgaaccacgtgttcgac

SEQ ID NO: 5768567 - DNA, 25 bp, Homo sapien
gcagaggaggcgcagaggcctgagc

SEQ ID NO: 5768568 - DNA, 25 bp, Homo sapien
cctctcctggccttggcagagcccc

SEQ ID NO: 5768569 - DNA, 25 bp, Homo sapien
tgcctccaggaagttggccgtcatg

SEQ ID NO: 5768570 - DNA, 25 bp, Homo sapien
catcgtcctcgccattgctaacacc

SEQ ID NO: 5768571 - DNA, 25 bp, Homo sapien
cgtgctgcagaagatcaagtacgcc

SEQ ID NO: 5768572 - DNA, 25 bp, Homo sapien
atcggatgccgtggcgctgctgcgg

SEQ ID NO: 5768573 - DNA, 25 bp, Homo sapien
agaagaaggtggaaggcgaggtgga

SEQ ID NO: 5768574 - DNA, 25 bp, Homo sapien
agggtgcagtggagccctgagcatt

SEQ ID NO: 5768575 - DNA, 25 bp, Homo sapien
acgccttcagcctgctggcccggct

SEQ ID NO: 5768576 - DNA, 25 bp, Homo sapien
aggacgatggcgtgcataccgtgga

SEQ ID NO: 5768577 - DNA, 25 bp, Homo sapien
cgcccgtcagtccgcgcagtgatca

SEQ ID NO: 5768578 - DNA, 25 bp, Homo sapien
acttcctacagcaaagcgcccccca

SEQ ID NO: 5768579 - DNA, 25 bp, Homo sapien
gggcggcggcgctcagggccacgca

SEQ ID NO: 5768580 - DNA, 25 bp, Homo sapien
tgattgtgaacacgtcgggggggcc

SEQ ID NO: 5768581 - DNA, 25 bp, Homo sapien
aaccacgtgttcgacgacgtagaga

SEQ ID NO: 5768582 - DNA, 25 bp, Homo sapien
gagcattgtaatatgcggcccagcc

SEQ ID NO: 5768583 - DNA, 25 bp, Homo sapien
actccacgtgaaaacgagctctgga

SEQ ID NO: 5768584 - DNA, 25 bp, Homo sapien
aaatggaggtcatttgacctgccag

SEQ ID NO: 5768585 - DNA, 25 bp, Homo sapien
ccagggcctgcgcctcggggcggag

SEQ ID NO: 5768586 - DNA, 25 bp, Homo sapien
ccttgctgcagtccctccggagagg

SEQ ID NO: 5768587 - DNA, 25 bp, Homo sapien
cggcgctcagggccacgcaggagga

SEQ ID NO: 5768588 - DNA, 25 bp, Homo sapien
ggacctcgctgggggactcgtggac

SEQ ID NO: 5768589 - DNA, 25 bp, Homo sapien
ccgagaggacatccagggggctctg

SEQ ID NO: 5768590 - DNA, 25 bp, Homo sapien
gtgcggcggccgcatctgacatcgg

SEQ ID NO: 5768591 - DNA, 25 bp, Homo sapien
agggcgtggagacagtctacggaaa

SEQ ID NO: 5768592 - DNA, 25 bp, Homo sapien
gcagaagatcaagtacgccttcagc

SEQ ID NO: 5768593 - DNA, 25 bp, Homo sapien
cccgtcagtccgcgcagtgatcagc

SEQ ID NO: 5768594 - DNA, 25 bp, Homo sapien
ggacagacttaacgatccttgctgc

SEQ ID NO: 5768595 - DNA, 25 bp, Homo sapien
gctcagggccacgcaggaggagttg

SEQ ID NO: 5768596 - DNA, 25 bp, Homo sapien
ggtcaccgagacttggagccagaat

SEQ ID NO: 5768597 - DNA, 25 bp, Homo sapien
tgaaccacgtgttcgacgacgtaga

SEQ ID NO: 5768598 - DNA, 25 bp, Homo sapien
ctggaggacaaagagaaagtgtcag

SEQ ID NO: 5768599 - DNA, 25 bp, Homo sapien
gcggcccagcctataaacagcctcc

SEQ ID NO: 5768600 - DNA, 25 bp, Homo sapien
ttctaggattgacactggctgtcaa

SEQ ID NO: 5768601 - DNA, 25 bp, Homo sapien
agcctgtcctcctcctccaggcagc

SEQ ID NO: 5768602 - DNA, 25 bp, Homo sapien
cctccaggaagttggccgtcatgga

SEQ ID NO: 5768603 - DNA, 25 bp, Homo sapien
agcccattcccgaggcagaggaggc

SEQ ID NO: 5768604 - DNA, 25 bp, Homo sapien
tcttctaggattgacactggctgtc

SEQ ID NO: 5768605 - DNA, 25 bp, Homo sapien
tgaaaacgagctctggacctcgctg

SEQ ID NO: 5768606 - DNA, 25 bp, Homo sapien
ccccgcctgacccgactgtcttact

SEQ ID NO: 5768607 - DNA, 25 bp, Homo sapien
acaacgtcactccacgtgaaaacga

SEQ ID NO: 5768608 - DNA, 25 bp, Homo sapien
acgcatgggaagaaaggccatcgtc

SEQ ID NO: 5768609 - DNA, 25 bp, Homo sapien
tgacgaggccccgtgggagaacgga

SEQ ID NO: 5768610 - DNA, 25 bp, Homo sapien
gcaggcggagcgggaagtggacatc

SEQ ID NO: 5768611 - DNA, 25 bp, Homo sapien
tgatgccacccggcaggagccgctc

SEQ ID NO: 5768612 - DNA, 25 bp, Homo sapien
cactgggcgccatcgtgcgctgtga

SEQ ID NO: 5768613 - DNA, 25 bp, Homo sapien
gctgttgcacttccttttcgggcct

SEQ ID NO: 5768614 - DNA, 25 bp, Homo sapien
catctgacatcggatgccgtggcgc

SEQ ID NO: 5768615 - DNA, 25 bp, Homo sapien
gtcatttgacctgccaggcgccctt

SEQ ID NO: 5768616 - DNA, 25 bp, Homo sapien
cggtcactgacccgcagagccgcgc

SEQ ID NO: 5768617 - DNA, 25 bp, Homo sapien
acatccagggggctctgcacaatta

SEQ ID NO: 5768618 - DNA, 25 bp, Homo sapien
tttcctctttgccagcacctggtga

SEQ ID NO: 5768619 - DNA, 25 bp, Homo sapien
agcacgagcggaggcgccggcaggt

SEQ ID NO: 5768620 - DNA, 25 bp, Homo sapien
ctggctgtcaaactcatccttcaag

SEQ ID NO: 5768621 - DNA, 25 bp, Homo sapien
tcctccaggcagcctgtcctgaccc

SEQ ID NO: 5768622 - DNA, 25 bp, Homo sapien
gcgccgcccgtcagtccgcgcagtg

SEQ ID NO: 5768623 - DNA, 25 bp, Homo sapien
aaacagctacagcacgagcggaggc

SEQ ID NO: 5768624 - DNA, 25 bp, Homo sapien
ggatggccaatctgctccggccctg

SEQ ID NO: 5768625 - DNA, 25 bp, Homo sapien
ctcgctgggggactcgtggacccgc

SEQ ID NO: 5768626 - DNA, 25 bp, Homo sapien
ggagccctgagcattgtaatatgcg

SEQ ID NO: 5768627 - DNA, 25 bp, Homo sapien
ggtggggacctcgagcaacgctgac

SEQ ID NO: 5768628 - DNA, 25 bp, Homo sapien
aggacccagttgagaaacagctaca

SEQ ID NO: 5768629 - DNA, 25 bp, Homo sapien
aatagcggaagtcgatcttctgaag

SEQ ID NO: 5768630 - DNA, 25 bp, Homo sapien
ggagggcgtggagacagtctacgga

SEQ ID NO: 5768631 - DNA, 25 bp, Homo sapien
tgagcctcagctggagtcagagaca

SEQ ID NO: 5768632 - DNA, 25 bp, Homo sapien
agtccgcgcagtgatcagcaccgta

SEQ ID NO: 5768633 - DNA, 25 bp, Homo sapien
accgagacttggagccagaatctga

SEQ ID NO: 5768634 - DNA, 25 bp, Homo sapien
tcactccacgtgaaaacgagctctg

SEQ ID NO: 5768635 - DNA, 25 bp, Homo sapien
cagcagggccgaggctgggaagtcc

SEQ ID NO: 5768636 - DNA, 25 bp, Homo sapien
gtgagctgtcggtcaagcagcggga

SEQ ID NO: 5768637 - DNA, 25 bp, Homo sapien
tgctgcagaagatcaagtacgcctt

SEQ ID NO: 5768638 - DNA, 25 bp, Homo sapien
cgagcagtgtgcggcggccgcatct

SEQ ID NO: 5768639 - DNA, 25 bp, Homo sapien
tgggtcctgtgtaattatgacttcc

SEQ ID NO: 5768640 - DNA, 25 bp, Homo sapien
gcacttccttttcgggcctctgcag

SEQ ID NO: 5768641 - DNA, 25 bp, Homo sapien
cgcgcagcccgacgtgcacttcttc

SEQ ID NO: 5768642 - DNA, 25 bp, Homo sapien
atgtcacgctgctcgacccggcctc

SEQ ID NO: 5768643 - DNA, 25 bp, Homo sapien
gcagcgcgaccgctcgcccgccgct

SEQ ID NO: 5768644 - DNA, 25 bp, Homo sapien
gtcgctgtcaatggtcaccgagact

SEQ ID NO: 5768645 - DNA, 25 bp, Homo sapien
ccaggcagcctgtcctcctcctcca

SEQ ID NO: 5768646 - DNA, 25 bp, Homo sapien
agcgggaagtggacatcctgaacca

SEQ ID NO: 5768647 - DNA, 25 bp, Homo sapien
cgaggtggaaatggaggtcatttga

SEQ ID NO: 5768648 - DNA, 25 bp, Homo sapien
ggggcgcgggccgcggacgacccca

SEQ ID NO: 5768649 - DNA, 25 bp, Homo sapien
gacccagttgagaaacagctacagc

SEQ ID NO: 5768650 - DNA, 25 bp, Homo sapien
cgctgggggactcgtggacccgccc

SEQ ID NO: 5768651 - DNA, 25 bp, Homo sapien
tgccgtggcgctgctgcgggacaac

SEQ ID NO: 5768652 - DNA, 25 bp, Homo sapien
cgcagaggcctgagccggtggggac

SEQ ID NO: 5768653 - DNA, 25 bp, Homo sapien
cgctcgttgctgctgctcgtgtgcc

SEQ ID NO: 5768654 - DNA, 25 bp, Homo sapien
cggtggacagacttaacgatccttg

SEQ ID NO: 5768655 - DNA, 25 bp, Homo sapien
aaagaagaaggtggaaggcgaggtg

SEQ ID NO: 5768656 - DNA, 25 bp, Homo sapien
tgtcagagctggaggcagtgatgga

SEQ ID NO: 5768657 - DNA, 25 bp, Homo sapien
attgtaatatgcggcccagcctata

SEQ ID NO: 5768658 - DNA, 25 bp, Homo sapien
aggattgacactggctgtcaaactc

SEQ ID NO: 5768659 - DNA, 25 bp, Homo sapien
agcgcgaccgctcgcccgccgctga

SEQ ID NO: 5768660 - DNA, 25 bp, Homo sapien
tctcccgaccatgtcacgctgctcg

SEQ ID NO: 5768661 - DNA, 25 bp, Homo sapien
ttatgacttccaggcccgcaacagc

SEQ ID NO: 5768662 - DNA, 25 bp, Homo sapien
agcgcagggcggcggcgctcagggc

SEQ ID NO: 5768663 - DNA, 25 bp, Homo sapien
cgcccgccgctgagaccccgcccct

SEQ ID NO: 5768664 - DNA, 25 bp, Homo sapien
cagccttgcgtttcctctttgccag

SEQ ID NO: 5768665 - DNA, 25 bp, Homo sapien
acctggtgacgttctgcctgggtga

SEQ ID NO: 5768666 - DNA, 25 bp, Homo sapien
cgacccctcctctccggagctgttg

SEQ ID NO: 5768667 - DNA, 25 bp, Homo sapien
ggctgtcaaactcatccttcaaggt

SEQ ID NO: 5768668 - DNA, 25 bp, Homo sapien
agcagtgagctgtcggtcaagcagc

SEQ ID NO: 5768669 - DNA, 25 bp, Homo sapien
cctcctccaggcagcctgtcctgac

SEQ ID NO: 5768670 - DNA, 25 bp, Homo sapien
atagccagggccgagtctgggcaca

SEQ ID NO: 5768671 - DNA, 25 bp, Homo sapien
agcgccccccaggtcgctgtcaatg

SEQ ID NO: 5768672 - DNA, 25 bp, Homo sapien
ggatagccagggccgagtctgggca

SEQ ID NO: 5768673 - DNA, 25 bp, Homo sapien
gtggagccctgagcattgtaatatg

SEQ ID NO: 5768674 - DNA, 25 bp, Homo sapien
gcggtgatgccacccggcaggagcc

SEQ ID NO: 5768675 - DNA, 25 bp, Homo sapien
cttgcgtttcctctttgccagcacc

SEQ ID NO: 5768676 - DNA, 25 bp, Homo sapien
cctacagcaaagcgccccccaggtc

SEQ ID NO: 5768677 - DNA, 25 bp, Homo sapien
agcggaggcgccggcaggtgaccca

SEQ ID NO: 5768678 - DNA, 25 bp, Homo sapien
acaccagccttgcgtttcctctttg

SEQ ID NO: 5768679 - DNA, 25 bp, Homo sapien
agtgtcagagctggaggcagtgatg

SEQ ID NO: 5768680 - DNA, 25 bp, Homo sapien
gacccccgagagggtgcagtggagc

SEQ ID NO: 5768681 - DNA, 25 bp, Homo sapien
agaagatcaagtacgccttcagcct

SEQ ID NO: 5768682 - DNA, 25 bp, Homo sapien
ttgctaacaccagccttgcgtttcc

SEQ ID NO: 5768683 - DNA, 25 bp, Homo sapien
tcgacgacgtagagagctttgtatc

SEQ ID NO: 5768684 - DNA, 25 bp, Homo sapien
ggccacgcaggaggagttgcagcgc

SEQ ID NO: 5768685 - DNA, 25 bp, Homo sapien
aacgctgactcggcctccccggacc

SEQ ID NO: 5768686 - DNA, 25 bp, Homo sapien
ctgacccgcagagccgcgcctggga

SEQ ID NO: 5768687 - DNA, 25 bp, Homo sapien
gccctggtcttcccccatcccggtg

SEQ ID NO: 5768688 - DNA, 25 bp, Homo sapien
agttcgcgagcagtgtgcggcggcc

SEQ ID NO: 5768689 - DNA, 25 bp, Homo sapien
tacccactgggcgccatcgtgcgct

SEQ ID NO: 5768690 - DNA, 25 bp, Homo sapien
atcttctgaaggatggccaatctgc

SEQ ID NO: 5768691 - DNA, 25 bp, Homo sapien
gaccctcagcagcctctcctggcct

SEQ ID NO: 5768692 - DNA, 25 bp, Homo sapien
acagcacgagcggaggcgccggcag

SEQ ID NO: 5768693 - DNA, 25 bp, Homo sapien
ccccaggtcgctgtcaatggtcacc

SEQ ID NO: 5768694 - DNA, 25 bp, Homo sapien
gcggaagtcgatcttctgaaggatg

SEQ ID NO: 5768695 - DNA, 25 bp, Homo sapien
aggatctggactggctgggagtggg

SEQ ID NO: 5768696 - DNA, 25 bp, Homo sapien
ggactcgtggacccgccccgggctg

SEQ ID NO: 5768697 - DNA, 25 bp, Homo sapien
ggccccgtgggagaacggactcctc

SEQ ID NO: 5768698 - DNA, 25 bp, Homo sapien
ggccggagttcgcgagcagtgtgcg

SEQ ID NO: 5768699 - DNA, 25 bp, Homo sapien
ccgggcggctggggagggcttgctg

SEQ ID NO: 5768700 - DNA, 25 bp, Homo sapien
catcgtgcgctgtgacgcggtgatg

SEQ ID NO: 5768701 - DNA, 25 bp, Homo sapien
ggacatccagggggctctgcacaat

SEQ ID NO: 5768702 - DNA, 25 bp, Homo sapien
gccagggtgctggagcaccgggaac

SEQ ID NO: 5768703 - DNA, 25 bp, Homo sapien
gcggagcgggaagtggacatcctga

SEQ ID NO: 5768704 - DNA, 25 bp, Homo sapien
tacagacccgagttcttcagcggct

SEQ ID NO: 5768705 - DNA, 25 bp, Homo sapien
ggggctctgcacaattaccgctcgg

SEQ ID NO: 5768706 - DNA, 25 bp, Homo sapien
cgtgaaaacgagctctggacctcgc

SEQ ID NO: 5768707 - DNA, 25 bp, Homo sapien
cgcctcggggcggagctgatccgag

SEQ ID NO: 5768708 - DNA, 25 bp, Homo sapien
ggcggcgctcagggccacgcaggag

SEQ ID NO: 5768709 - DNA, 25 bp, Homo sapien
tcctggccttggcagagcccctcgt

SEQ ID NO: 5768710 - DNA, 25 bp, Homo sapien
gaggacaaagagaaagtgtcagagc

SEQ ID NO: 5768711 - DNA, 25 bp, Homo sapien
gcagcgggacgtactggaggtcctg

SEQ ID NO: 5768712 - DNA, 25 bp, Homo sapien
ggggagggcgtggagacagtctacg

SEQ ID NO: 5768713 - DNA, 25 bp, Homo sapien
ttccttttcgggcctctgcagatga

SEQ ID NO: 5768714 - DNA, 25 bp, Homo sapien
ccccatcccggtggacagacttaac

SEQ ID NO: 5768715 - DNA, 25 bp, Homo sapien
cgcgcctgggaggacccagttgaga

SEQ ID NO: 5768716 - DNA, 25 bp, Homo sapien
tttgacctgccaggcgcccttcgca

SEQ ID NO: 5768717 - DNA, 25 bp, Homo sapien
gacccgcagagccgcgcctgggagg

SEQ ID NO: 5768718 - DNA, 25 bp, Homo sapien
aggccgagtacaccgacgtgctgca

SEQ ID NO: 5768719 - DNA, 25 bp, Homo sapien
cctatcttctaggattgacactggc

SEQ ID NO: 5768720 - DNA, 25 bp, Homo sapien
gctgcgggacaacgtcactccacgt

SEQ ID NO: 5768721 - DNA, 25 bp, Homo sapien
ggcgcccttcgcaaagagtgacgag

SEQ ID NO: 5768722 - DNA, 25 bp, Homo sapien
aaaatgggtcctgtgtaattatgac

SEQ ID NO: 5768723 - DNA, 25 bp, Homo sapien
tgtctcccgaccatgtcacgctgct

SEQ ID NO: 5768724 - DNA, 25 bp, Homo sapien
tcagggccacgcaggaggagttgca

SEQ ID NO: 5768725 - DNA, 25 bp, Homo sapien
ctccaggcagcctgtcctgaccctc

SEQ ID NO: 5768726 - DNA, 25 bp, Homo sapien
gctgcagaagtcggcggaggcggcc

SEQ ID NO: 5768727 - DNA, 25 bp, Homo sapien
gctgcgcggcaacatcgccgacccc

SEQ ID NO: 5768728 - DNA, 25 bp, Homo sapien
tcgagcaacgctgactcggcctccc

SEQ ID NO: 5768729 - DNA, 25 bp, Homo sapien
atgggaagaaaggccatcgtcctcg

SEQ ID NO: 5768730 - DNA, 25 bp, Homo sapien
gaggtcctggaggacaaagagaaag

SEQ ID NO: 5768731 - DNA, 25 bp, Homo sapien
tgctgctcgtgtgccaggaacccga

SEQ ID NO: 5768732 - DNA, 25 bp, Homo sapien
cctggcggttctgcaggcggagcgg

SEQ ID NO: 5768733 - DNA, 25 bp, Homo sapien
cggcctccaaggaggagctggagtc

SEQ ID NO: 5768734 - DNA, 25 bp, Homo sapien
ggaggcagtgatggagaagcaaaag

SEQ ID NO: 5768735 - DNA, 25 bp, Homo sapien
ggagcgggaagtggacatcctgaac

SEQ ID NO: 5768736 - DNA, 25 bp, Homo sapien
acgtgttcgacgacgtagagagctt

SEQ ID NO: 5768737 - DNA, 25 bp, Homo sapien
gtggggagggcgtggagacagtcta

SEQ ID NO: 5768738 - DNA, 25 bp, Homo sapien
cggctgggagccgccggtcactgac

SEQ ID NO: 5768739 - DNA, 25 bp, Homo sapien
aagcagcgggacgtactggaggtcc

SEQ ID NO: 5768740 - DNA, 25 bp, Homo sapien
cctgctggcccggctgcgcggcaac

SEQ ID NO: 5768741 - DNA, 25 bp, Homo sapien
gtactggaggtcctggaggacaaag

SEQ ID NO: 5768742 - DNA, 25 bp, Homo sapien
ctggacctcgctgggggactcgtgg

SEQ ID NO: 5768743 - DNA, 25 bp, Homo sapien
gtcaaactcatccttcaaggtgatt

SEQ ID NO: 5768744 - DNA, 25 bp, Homo sapien
gagaacggactcctcagactctccc

SEQ ID NO: 5768745 - DNA, 25 bp, Homo sapien
gcagtgatggagaagcaaaagaaga

SEQ ID NO: 5768746 - DNA, 25 bp, Homo sapien
acttaacgatccttgctgcagtccc

SEQ ID NO: 5768747 - DNA, 25 bp, Homo sapien
aacacccctatcttctaggattgac

SEQ ID NO: 5768748 - DNA, 25 bp, Homo sapien
ggacccgccccgggctggagctgtc

SEQ ID NO: 5768749 - DNA, 25 bp, Homo sapien
cttcagcctgctggcccggctgcgc

SEQ ID NO: 5768750 - DNA, 25 bp, Homo sapien
cggagctgatccgagaggacatcca

SEQ ID NO: 5768751 - DNA, 25 bp, Homo sapien
gttctgcctgggtgaggacgatggc

SEQ ID NO: 5768752 - DNA, 25 bp, Homo sapien
ggcggagctgatccgagaggacatc

SEQ ID NO: 5768753 - DNA, 25 bp, Homo sapien
cactggctgtcaaactcatccttca

SEQ ID NO: 5768754 - DNA, 25 bp, Homo sapien
acggaaagcgctagcagacccccga

SEQ ID NO: 5768755 - DNA, 25 bp, Homo sapien
tggaggtcctggaggacaaagagaa

SEQ ID NO: 5768756 - DNA, 25 bp, Homo sapien
ccacgtgttcgacgacgtagagagc

SEQ ID NO: 5768757 - DNA, 25 bp, Homo sapien
cccgggctggagctgtccccggagg

SEQ ID NO: 5768758 - DNA, 25 bp, Homo sapien
gctgtgacgcggtgatgccacccgg

SEQ ID NO: 5768759 - DNA, 25 bp, Homo sapien
atatgcggcccagcctataaacagc

SEQ ID NO: 5768760 - DNA, 25 bp, Homo sapien
gcaacgctgactcggcctccccgga

SEQ ID NO: 5768761 - DNA, 25 bp, Homo sapien
tctgcctgggtgaggacgatggcgt

SEQ ID NO: 5768762 - DNA, 25 bp, Homo sapien
gaagtcggcggaggcggccagggtg

SEQ ID NO: 5768763 - DNA, 25 bp, Homo sapien
cttcgcaaagagtgacgaggccccg

SEQ ID NO: 5768764 - DNA, 25 bp, Homo sapien
ctggcccggctgcgcggcaacatcg

SEQ ID NO: 5768765 - DNA, 25 bp, Homo sapien
gccgtcatggatagccagggccgag

SEQ ID NO: 5768766 - DNA, 25 bp, Homo sapien
cggccgcaggagccggcgccgggcg

SEQ ID NO: 5768767 - DNA, 25 bp, Homo sapien
cagggcggcggcgctcagggccacg

SEQ ID NO: 5768768 - DNA, 25 bp, Homo sapien
cagaggcctgagccggtggggacct

SEQ ID NO: 5768769 - DNA, 25 bp, Homo sapien
ctcgcccgccgctgagaccccgccc

SEQ ID NO: 5768770 - DNA, 25 bp, Homo sapien
gatgattgtgaacacgtcggggggg

SEQ ID NO: 5768771 - DNA, 25 bp, Homo sapien
gcaccgggaacgcggccgcaggagc

SEQ ID NO: 5768772 - DNA, 25 bp, Homo sapien
cgcagagccgcgcctgggaggaccc

SEQ ID NO: 5768773 - DNA, 25 bp, Homo sapien
ggaggacccagttgagaaacagcta

SEQ ID NO: 5768774 - DNA, 25 bp, Homo sapien
gcgacacagcagggccgaggctggg

SEQ ID NO: 5768775 - DNA, 25 bp, Homo sapien
cgagcggaggcgccggcaggtgacc

SEQ ID NO: 5768776 - DNA, 25 bp, Homo sapien
gtcgtacccactgggcgccatcgtg

SEQ ID NO: 5768777 - DNA, 25 bp, Homo sapien
cacccggcaggagccgctcgttgct

SEQ ID NO: 5768778 - DNA, 25 bp, Homo sapien
cccattcccgaggcagaggaggcgc

SEQ ID NO: 5768779 - DNA, 25 bp, Homo sapien
agagagctttgtatcgaggctgcag

SEQ ID NO: 5768780 - DNA, 25 bp, Homo sapien
tgcagcgccgcccgtcagtccgcgc

SEQ ID NO: 5768781 - DNA, 25 bp, Homo sapien
ggactcctcagactctccccaatag

SEQ ID NO: 5768782 - DNA, 25 bp, Homo sapien
gcacctggtgacgttctgcctgggt

SEQ ID NO: 5768783 - DNA, 25 bp, Homo sapien
agccctgagcattgtaatatgcggc

SEQ ID NO: 5768784 - DNA, 25 bp, Homo sapien
tcggggcggagctgatccgagagga

SEQ ID NO: 5768785 - DNA, 25 bp, Homo sapien
aagttggccgtcatggatagccagg

SEQ ID NO: 5768786 - DNA, 25 bp, Homo sapien
gccatcgtcctcgccattgctaaca

SEQ ID NO: 5768787 - DNA, 25 bp, Homo sapien
ttgctgcagtccctccggagaggat

SEQ ID NO: 5768788 - DNA, 25 bp, Homo sapien
tagcggaagtcgatcttctgaagga

SEQ ID NO: 5768789 - DNA, 25 bp, Homo sapien
gcagggccgaggctgggaagtccgg

SEQ ID NO: 5768790 - DNA, 25 bp, Homo sapien
gtggacatcctgaaccacgtgttcg

SEQ ID NO: 5768791 - DNA, 25 bp, Homo sapien
gtatcgaggctgcagaagtcggcgg

SEQ ID NO: 5768792 - DNA, 25 bp, Homo sapien
cgatggcgtgcataccgtggaggat

SEQ ID NO: 5768793 - DNA, 25 bp, Homo sapien
acaattaccgctcgggccgcgggga

SEQ ID NO: 5768794 - DNA, 25 bp, Homo sapien
aagaaggtggaaggcgaggtggaaa

SEQ ID NO: 5768795 - DNA, 25 bp, Homo sapien
gccaggaacccgagcgcgcgcagcc

SEQ ID NO: 5768796 - DNA, 25 bp, Homo sapien
cgcccctgcagcgccgcccgtcagt

SEQ ID NO: 5768797 - DNA, 25 bp, Homo sapien
tgacccaagcgacacagcagggccg

SEQ ID NO: 5768798 - DNA, 25 bp, Homo sapien
cacttcttccagggcctgcgcctcg

SEQ ID NO: 5768799 - DNA, 25 bp, Homo sapien
agcgggacgtactggaggtcctgga

SEQ ID NO: 5768800 - DNA, 25 bp, Homo sapien
agtgtctcccgaccatgtcacgctg

SEQ ID NO: 5768801 - DNA, 25 bp, Homo sapien
aagtggacatcctgaaccacgtgtt

SEQ ID NO: 5768802 - DNA, 25 bp, Homo sapien
caggcccgcaacagcagtgagctgt

SEQ ID NO: 5768803 - DNA, 25 bp, Homo sapien
cagtggagccctgagcattgtaata

SEQ ID NO: 5768804 - DNA, 25 bp, Homo sapien
agcctcagctggagtcagagacagc

SEQ ID NO: 5768805 - DNA, 25 bp, Homo sapien
catttgacctgccaggcgcccttcg

SEQ ID NO: 5768806 - DNA, 25 bp, Homo sapien
ctctgcacaattaccgctcgggccg

SEQ ID NO: 5768807 - DNA, 25 bp, Homo sapien
cgtcagtccgcgcagtgatcagcac

SEQ ID NO: 5768808 - DNA, 25 bp, Homo sapien
ttcccgaggcagaggaggcgcagag

SEQ ID NO: 5768809 - DNA, 25 bp, Homo sapien
agccgccggtcactgacccgcagag

SEQ ID NO: 5768810 - DNA, 25 bp, Homo sapien
aacgatccttgctgcagtccctccg

SEQ ID NO: 5768811 - DNA, 25 bp, Homo sapien
gtggcgctgctgcgggacaacgtca

SEQ ID NO: 5768812 - DNA, 25 bp, Homo sapien
cgctgtcaatggtcaccgagacttg

SEQ ID NO: 5768813 - DNA, 25 bp, Homo sapien
ggctctgcacaattaccgctcgggc

SEQ ID NO: 5768814 - DNA, 25 bp, Homo sapien
agtacaccgacgtgctgcagaagat

SEQ ID NO: 5768815 - DNA, 25 bp, Homo sapien
ggagttcgcgagcagtgtgcggcgg

SEQ ID NO: 5768816 - DNA, 25 bp, Homo sapien
aagcgacacagcagggccgaggctg

SEQ ID NO: 5768817 - DNA, 25 bp, Homo sapien
gacactggctgtcaaactcatcctt

SEQ ID NO: 5768818 - DNA, 25 bp, Homo sapien
cagactctccccaatagcggaagtc

SEQ ID NO: 5768819 - DNA, 25 bp, Homo sapien
tgacctgccaggcgcccttcgcaaa

SEQ ID NO: 5768820 - DNA, 25 bp, Homo sapien
tccttcaaggtgattcctggcctgc

SEQ ID NO: 5768821 - DNA, 25 bp, Homo sapien
aggagccgctcgttgctgctgctcg

SEQ ID NO: 5768822 - DNA, 25 bp, Homo sapien
ctacagcacgagcggaggcgccggc

SEQ ID NO: 5768823 - DNA, 25 bp, Homo sapien
tacaccgacgtgctgcagaagatca

SEQ ID NO: 5768824 - DNA, 25 bp, Homo sapien
gagctgatccgagaggacatccagg

SEQ ID NO: 5768825 - DNA, 25 bp, Homo sapien
atggccaatctgctccggccctggt

SEQ ID NO: 5768826 - DNA, 25 bp, Homo sapien
tcctggaggacaaagagaaagtgtc

SEQ ID NO: 5768827 - DNA, 25 bp, Homo sapien
tcctgtgtaattatgacttccaggc

SEQ ID NO: 5768828 - DNA, 25 bp, Homo sapien
gtgccaggaacccgagcgcgcgcag

SEQ ID NO: 5768829 - DNA, 25 bp, Homo sapien
ggttctgcaggcggagcgggaagtg

SEQ ID NO: 5768830 - DNA, 25 bp, Homo sapien
aggccatcgtcctcgccattgctaa

SEQ ID NO: 5768831 - DNA, 25 bp, Homo sapien
ggtcctgtgtaattatgacttccag

SEQ ID NO: 5768832 - DNA, 25 bp, Homo sapien
cggctgcgcggcaacatcgccgacc

SEQ ID NO: 5768833 - DNA, 25 bp, Homo sapien
gagctgtcggtcaagcagcgggacg

SEQ ID NO: 5768834 - DNA, 25 bp, Homo sapien
aaagagtgacgaggccccgtgggag

SEQ ID NO: 5768835 - DNA, 25 bp, Homo sapien
acaaagagaaagtgtcagagctgga

SEQ ID NO: 5768836 - DNA, 25 bp, Homo sapien
ccctgagcattgtaatatgcggccc

SEQ ID NO: 5768837 - DNA, 25 bp, Homo sapien
cagtccctccggagaggatctggac

SEQ ID NO: 5768838 - DNA, 25 bp, Homo sapien
tctgacatcggatgccgtggcgctg

SEQ ID NO: 5768839 - DNA, 25 bp, Homo sapien
tgcgcggcaacatcgccgacccctc

SEQ ID NO: 5768840 - DNA, 25 bp, Homo sapien
ccgagtctgggcacaggagatgctg

SEQ ID NO: 5768841 - DNA, 25 bp, Homo sapien
accgggaacgcggccgcaggagccg

SEQ ID NO: 5768842 - DNA, 25 bp, Homo sapien
cccggtggacagacttaacgatcct

SEQ ID NO: 5768843 - DNA, 25 bp, Homo sapien
ctgtcaaactcatccttcaaggtga

SEQ ID NO: 5768844 - DNA, 25 bp, Homo sapien
agttgcagcgcgaccgctcgcccgc

SEQ ID NO: 5768845 - DNA, 25 bp, Homo sapien
gtgggagaacggactcctcagactc

SEQ ID NO: 5768846 - DNA, 25 bp, Homo sapien
gggacccccatacagacccgagttc

SEQ ID NO: 5768847 - DNA, 25 bp, Homo sapien
tgccctcctcctccaggcagcctgt

SEQ ID NO: 5768848 - DNA, 25 bp, Homo sapien
ggaggagctggagtcgtacccactg

SEQ ID NO: 5768849 - DNA, 25 bp, Homo sapien
ccctccggagaggatctggactggc

SEQ ID NO: 5768850 - DNA, 25 bp, Homo sapien
acatcggatgccgtggcgctgctgc

SEQ ID NO: 5768851 - DNA, 25 bp, Homo sapien
ctgtcaatggtcaccgagacttgga

SEQ ID NO: 5768852 - DNA, 25 bp, Homo sapien
gcgctcagggccacgcaggaggagt

SEQ ID NO: 5768853 - DNA, 25 bp, Homo sapien
gaggcggccagggtgctggagcacc

SEQ ID NO: 5768854 - DNA, 25 bp, Homo sapien
gaacggactcctcagactctcccca

SEQ ID NO: 5768855 - DNA, 25 bp, Homo sapien
ccaagcgacacagcagggccgaggc

SEQ ID NO: 5768856 - DNA, 25 bp, Homo sapien
agttcttcagcggctgggagccgcc

SEQ ID NO: 5768857 - DNA, 25 bp, Homo sapien
gacgctgcgggccaagccgccctcg

SEQ ID NO: 5768858 - DNA, 25 bp, Homo sapien
agcggctgggagccgccggtcactg

SEQ ID NO: 5768859 - DNA, 25 bp, Homo sapien
acccaagcgacacagcagggccgag

SEQ ID NO: 5768860 - DNA, 25 bp, Homo sapien
acagctacagcacgagcggaggcgc

SEQ ID NO: 5768861 - DNA, 25 bp, Homo sapien
cagggtgctggagcaccgggaacgc

SEQ ID NO: 5768862 - DNA, 25 bp, Homo sapien
accgctcgcccgccgctgagacccc

SEQ ID NO: 5768863 - DNA, 25 bp, Homo sapien
ctgctcgacccggcctccaaggagg

SEQ ID NO: 5768864 - DNA, 25 bp, Homo sapien
gctcgacccggcctccaaggaggag

SEQ ID NO: 5768865 - DNA, 25 bp, Homo sapien
gagtcgtacccactgggcgccatcg

SEQ ID NO: 5768866 - DNA, 25 bp, Homo sapien
cagcagcctctcctggccttggcag

SEQ ID NO: 5768867 - DNA, 25 bp, Homo sapien
ctttgtatcgaggctgcagaagtcg

SEQ ID NO: 5768868 - DNA, 25 bp, Homo sapien
ggcgccggcaggtgacccaagcgac

SEQ ID NO: 5768869 - DNA, 25 bp, Homo sapien
cgcggccggtccgcctggccccgcc

SEQ ID NO: 5768870 - DNA, 25 bp, Homo sapien
ctgctcgtgtgccaggaacccgagc

SEQ ID NO: 5768871 - DNA, 25 bp, Homo sapien
ggcgtgcataccgtggaggatgcct

SEQ ID NO: 5768872 - DNA, 25 bp, Homo sapien
ggcccggctgcgcggcaacatcgcc

SEQ ID NO: 5768873 - DNA, 25 bp, Homo sapien
ggcggccgcatctgacatcggatgc

SEQ ID NO: 5768874 - DNA, 25 bp, Homo sapien
gccgctcgttgctgctgctcgtgtg

SEQ ID NO: 5768875 - DNA, 25 bp, Homo sapien
ctctggacctcgctgggggactcgt

SEQ ID NO: 5768876 - DNA, 25 bp, Homo sapien
ccgaccatgtcacgctgctcgaccc

SEQ ID NO: 5768877 - DNA, 25 bp, Homo sapien
tgtcttacttcctacagcaaagcgc

SEQ ID NO: 5768878 - DNA, 25 bp, Homo sapien
cctcgccattgctaacaccagcctt

SEQ ID NO: 5768879 - DNA, 25 bp, Homo sapien
atggtcaccgagacttggagccaga

SEQ ID NO: 5768880 - DNA, 25 bp, Homo sapien
gtcaatggtcaccgagacttggagc

SEQ ID NO: 5768881 - DNA, 25 bp, Homo sapien
ggcctctgcagatgattgtgaacac

SEQ ID NO: 5768882 - DNA, 25 bp, Homo sapien
catcgccgacccctcctctccggag

SEQ ID NO: 5768883 - DNA, 25 bp, Homo sapien
tccgcgcagtgatcagcaccgtaga

SEQ ID NO: 5768884 - DNA, 25 bp, Homo sapien
tcagcctgctggcccggctgcgcgg

SEQ ID NO: 5768885 - DNA, 25 bp, Homo sapien
tgattcctggcctgccctcctcctc

SEQ ID NO: 5768886 - DNA, 25 bp, Homo sapien
agaacacccctatcttctaggattg

SEQ ID NO: 5768887 - DNA, 25 bp, Homo sapien
cctcagctggagtcagagacagcag

SEQ ID NO: 5768888 - DNA, 25 bp, Homo sapien
caatggtcaccgagacttggagcca

SEQ ID NO: 5768889 - DNA, 25 bp, Homo sapien
aggaggagttgcagcgcgaccgctc

SEQ ID NO: 5768890 - DNA, 25 bp, Homo sapien
aggctgcagaagtcggcggaggcgg

SEQ ID NO: 5768891 - DNA, 25 bp, Homo sapien
agctggagtcagagacagcaggaaa

SEQ ID NO: 5768892 - DNA, 25 bp, Homo sapien
ttcgggcctctgcagatgattgtga

SEQ ID NO: 5768893 - DNA, 25 bp, Homo sapien
gagctgttgcacttccttttcgggc

SEQ ID NO: 5768894 - DNA, 25 bp, Homo sapien
gcagcctgtcctgaccctcagcagc

SEQ ID NO: 5768895 - DNA, 25 bp, Homo sapien
aacgagctctggacctcgctggggg

SEQ ID NO: 5768896 - DNA, 25 bp, Homo sapien
gaggacatccagggggctctgcaca

SEQ ID NO: 5768897 - DNA, 25 bp, Homo sapien
cacagcagggccgaggctgggaagt

SEQ ID NO: 5768898 - DNA, 25 bp, Homo sapien
tcaaggtgattcctggcctgccctc

SEQ ID NO: 5768899 - DNA, 25 bp, Homo sapien
gagcaacgctgactcggcctccccg

SEQ ID NO: 5768900 - DNA, 25 bp, Homo sapien
agagacagcaggaaaatgggtcctg

SEQ ID NO: 5768901 - DNA, 25 bp, Homo sapien
aatctgctccggccctggtcttccc

SEQ ID NO: 5768902 - DNA, 25 bp, Homo sapien
ggtcctgacctggcggttctgcagg

SEQ ID NO: 5768903 - DNA, 25 bp, Homo sapien
gagaggacatccagggggctctgca

SEQ ID NO: 5768904 - DNA, 25 bp, Homo sapien
ctccaggcagcctgtcctcctcctc

SEQ ID NO: 5768905 - DNA, 25 bp, Homo sapien
gtacgccttcagcctgctggcccgg

SEQ ID NO: 5768906 - DNA, 25 bp, Homo sapien
gattgacactggctgtcaaactcat

SEQ ID NO: 5768907 - DNA, 25 bp, Homo sapien
ggcggaggcggccagggtgctggag

SEQ ID NO: 5768908 - DNA, 25 bp, Homo sapien
tctccggagctgttgcacttccttt

SEQ ID NO: 5768909 - DNA, 25 bp, Homo sapien
gacctggcggttctgcaggcggagc

SEQ ID NO: 5768910 - DNA, 25 bp, Homo sapien
ccggagaggatctggactggctggg

SEQ ID NO: 5768911 - DNA, 25 bp, Homo sapien
tgatccgagaggacatccagggggc

SEQ ID NO: 5768912 - DNA, 25 bp, Homo sapien
aggtggaaggcgaggtggaaatgga

SEQ ID NO: 5768913 - DNA, 25 bp, Homo sapien
gaggcgccggcaggtgacccaagcg

SEQ ID NO: 5768914 - DNA, 25 bp, Homo sapien
gcggttctgcaggcggagcgggaag

SEQ ID NO: 5768915 - DNA, 25 bp, Homo sapien
gtcacgctgctcgacccggcctcca

SEQ ID NO: 5768916 - DNA, 25 bp, Homo sapien
cggccgcatctgacatcggatgccg

SEQ ID NO: 5768917 - DNA, 25 bp, Homo sapien
cctcggaggccgagtacaccgacgt

SEQ ID NO: 5768918 - DNA, 25 bp, Homo sapien
ccgtggaggatgcctccaggaagtt

SEQ ID NO: 5768919 - DNA, 25 bp, Homo sapien
ccttttcgggcctctgcagatgatt

SEQ ID NO: 5768920 - DNA, 25 bp, Homo sapien
ccgctgagaccccgcccctgcagcg

SEQ ID NO: 5768921 - DNA, 25 bp, Homo sapien
caaaagaagaaggtggaaggcgagg

SEQ ID NO: 5768922 - DNA, 25 bp, Homo sapien
agggcttgctgacgctgcgggccaa

SEQ ID NO: 5768923 - DNA, 25 bp, Homo sapien
ccaatctgctccggccctggtcttc

SEQ ID NO: 5768924 - DNA, 25 bp, Homo sapien
tcgtgcgctgtgacgcggtgatgcc

SEQ ID NO: 5768925 - DNA, 25 bp, Homo sapien
ccggagttcgcgagcagtgtgcggc

SEQ ID NO: 5768926 - DNA, 25 bp, Homo sapien
tggagcaccgggaacgcggccgcag

SEQ ID NO: 5768927 - DNA, 25 bp, Homo sapien
aaagcgccccccaggtcgctgtcaa

SEQ ID NO: 5768928 - DNA, 25 bp, Homo sapien
agagtgacgaggccccgtgggagaa

SEQ ID NO: 5768929 - DNA, 25 bp, Homo sapien
cccgcccctgcagcgccgcccgtca

SEQ ID NO: 5768930 - DNA, 25 bp, Homo sapien
ttgcagcgcgaccgctcgcccgccg

SEQ ID NO: 5768931 - DNA, 25 bp, Homo sapien
gttggccgtcatggatagccagggc

SEQ ID NO: 5768932 - DNA, 25 bp, Homo sapien
ccgtgggagaacggactcctcagac

SEQ ID NO: 5768933 - DNA, 25 bp, Homo sapien
agaggaggcgcagaggcctgagccg

SEQ ID NO: 5768934 - DNA, 25 bp, Homo sapien
cgagagggtgcagtggagccctgag

SEQ ID NO: 5768935 - DNA, 25 bp, Homo sapien
ccagaacacccctatcttctaggat

SEQ ID NO: 5768936 - DNA, 25 bp, Homo sapien
aggcagcctgtcctcctcctccagg

SEQ ID NO: 5768937 - DNA, 25 bp, Homo sapien
cagcacctggtgacgttctgcctgg

SEQ ID NO: 5768938 - DNA, 25 bp, Homo sapien
tcatggatagccagggccgagtctg

SEQ ID NO: 5768939 - DNA, 25 bp, Homo sapien
agtcggcggaggcggccagggtgct

SEQ ID NO: 5768940 - DNA, 25 bp, Homo sapien
cggccggtccgcctggccccgcctg

SEQ ID NO: 5768941 - DNA, 25 bp, Homo sapien
gagctggagtcgtacccactgggcg

SEQ ID NO: 5768942 - DNA, 25 bp, Homo sapien
cggaggcggccagggtgctggagca

SEQ ID NO: 5768943 - DNA, 25 bp, Homo sapien
caccgacgtgctgcagaagatcaag

SEQ ID NO: 5768944 - DNA, 25 bp, Homo sapien
tgcagtccctccggagaggatctgg

SEQ ID NO: 5768945 - DNA, 25 bp, Homo sapien
gactctccccaatagcggaagtcga

SEQ ID NO: 5768946 - DNA, 25 bp, Homo sapien
cgcagtgatcagcaccgtagagcgg

SEQ ID NO: 5768947 - DNA, 25 bp, Homo sapien
cgccccccaggtcgctgtcaatggt

SEQ ID NO: 5768948 - DNA, 25 bp, Homo sapien
ctgcaggcggagcgggaagtggaca

SEQ ID NO: 5768949 - DNA, 25 bp, Homo sapien
ttcgcgagcagtgtgcggcggccgc

SEQ ID NO: 5768950 - DNA, 25 bp, Homo sapien
ctccggagaggatctggactggctg

SEQ ID NO: 5768951 - DNA, 25 bp, Homo sapien
atcgaggctgcagaagtcggcggag

SEQ ID NO: 5768952 - DNA, 25 bp, Homo sapien
cagaagtcggcggaggcggccaggg

SEQ ID NO: 5768953 - DNA, 25 bp, Homo sapien
ctgaccctcagcagcctctcctggc

SEQ ID NO: 5768954 - DNA, 25 bp, Homo sapien
cgggacgtactggaggtcctggagg

SEQ ID NO: 5768955 - DNA, 25 bp, Homo sapien
aggcagaggaggcgcagaggcctga

SEQ ID NO: 5768956 - DNA, 25 bp, Homo sapien
cctgtcctcctcctccaggcagcct

SEQ ID NO: 5768957 - DNA, 25 bp, Homo sapien
ccgcaggagccggcgccgggcggct

SEQ ID NO: 5768958 - DNA, 25 bp, Homo sapien
ctgggcacaggagatgctgctgcga

SEQ ID NO: 5768959 - DNA, 25 bp, Homo sapien
ttttcgggcctctgcagatgattgt

SEQ ID NO: 5768960 - DNA, 25 bp, Homo sapien
aagtcgatcttctgaaggatggcca

SEQ ID NO: 5768961 - DNA, 25 bp, Homo sapien
cgcaacagcagtgagctgtcggtca

SEQ ID NO: 5768962 - DNA, 25 bp, Homo sapien
gctgagaccccgcccctgcagcgcc

SEQ ID NO: 5768963 - DNA, 25 bp, Homo sapien
cgagacttggagccagaatctgagc

SEQ ID NO: 5768964 - DNA, 25 bp, Homo sapien
ccgcctgacccgactgtcttacttc

SEQ ID NO: 5768965 - DNA, 25 bp, Homo sapien
ggccttggcagagcccctcgtgtcc

SEQ ID NO: 5768966 - DNA, 25 bp, Homo sapien
cgagctctggacctcgctgggggac

SEQ ID NO: 5768967 - DNA, 25 bp, Homo sapien
ggcctgagccggtggggacctcgag

SEQ ID NO: 5768968 - DNA, 25 bp, Homo sapien
aggagatgctgctgcgagtgtctcc

SEQ ID NO: 5768969 - DNA, 25 bp, Homo sapien
cccggctgcgcggcaacatcgccga

SEQ ID NO: 5768970 - DNA, 25 bp, Homo sapien
tggtcttcccccatcccggtggaca

SEQ ID NO: 5768971 - DNA, 25 bp, Homo sapien
tcctcccttgcagcacgcatgggaa

SEQ ID NO: 5768972 - DNA, 25 bp, Homo sapien
acttccttttcgggcctctgcagat

SEQ ID NO: 5768973 - DNA, 25 bp, Homo sapien
aggaggcgcagaggcctgagccggt

SEQ ID NO: 5768974 - DNA, 25 bp, Homo sapien
gctgctgctcgtgtgccaggaaccc

SEQ ID NO: 5768975 - DNA, 25 bp, Homo sapien
ccccaggcgaagcccattcccgagg

SEQ ID NO: 5768976 - DNA, 25 bp, Homo sapien
tcccccatcccggtggacagactta

SEQ ID NO: 5768977 - DNA, 25 bp, Homo sapien
cagcaaagcgccccccaggtcgctg

SEQ ID NO: 5768978 - DNA, 25 bp, Homo sapien
ggcgtggagacagtctacggaaagc

SEQ ID NO: 5768979 - DNA, 25 bp, Homo sapien
tcagtccgcgcagtgatcagcaccg

SEQ ID NO: 5768980 - DNA, 25 bp, Homo sapien
cgggcctctgcagatgattgtgaac

SEQ ID NO: 5768981 - DNA, 25 bp, Homo sapien
ggcctgcgcctcggggcggagctga

SEQ ID NO: 5768982 - DNA, 25 bp, Homo sapien
gatcagcaccgtagagcggggcgcg

SEQ ID NO: 5768983 - DNA, 25 bp, Homo sapien
gctaacaccagccttgcgtttcctc

SEQ ID NO: 5768984 - DNA, 25 bp, Homo sapien
tctgcagatgattgtgaacacgtcg

SEQ ID NO: 5768985 - DNA, 25 bp, Homo sapien
acgaccccaggcgaagcccattccc

SEQ ID NO: 5768986 - DNA, 25 bp, Homo sapien
cggatgccgtggcgctgctgcggga

SEQ ID NO: 5768987 - DNA, 25 bp, Homo sapien
ggagccgccggtcactgacccgcag

SEQ ID NO: 5768988 - DNA, 25 bp, Homo sapien
tcttacttcctacagcaaagcgccc

SEQ ID NO: 5768989 - DNA, 25 bp, Homo sapien
tccaggcccgcaacagcagtgagct

SEQ ID NO: 5768990 - DNA, 25 bp, Homo sapien
tcgtggacccgccccgggctggagc

SEQ ID NO: 5768991 - DNA, 25 bp, Homo sapien
gaccccaggcgaagcccattcccga

SEQ ID NO: 5768992 - DNA, 25 bp, Homo sapien
aggtggaaatggaggtcatttgacc

SEQ ID NO: 5768993 - DNA, 25 bp, Homo sapien
aagatcaagtacgccttcagcctgc

SEQ ID NO: 5768994 - DNA, 25 bp, Homo sapien
agcagacccccgagagggtgcagtg

SEQ ID NO: 5768995 - DNA, 25 bp, Homo sapien
gcaggagccggcgccgggcggctgg

SEQ ID NO: 5768996 - DNA, 25 bp, Homo sapien
gagtggggagggcgtggagacagtc

SEQ ID NO: 5768997 - DNA, 25 bp, Homo sapien
agacttggagccagaatctgagcct

SEQ ID NO: 5768998 - DNA, 25 bp, Homo sapien
gagcccctcgtgtcctcccttgcag

SEQ ID NO: 5768999 - DNA, 25 bp, Homo sapien
tgaaggatggccaatctgctccggc

SEQ ID NO: 5769000 - DNA, 25 bp, Homo sapien
agaggatctggactggctgggagtg

SEQ ID NO: 5769001 - DNA, 25 bp, Homo sapien
tgcacttcttccagggcctgcgcct

SEQ ID NO: 5769002 - DNA, 25 bp, Homo sapien
agtgacgaggccccgtgggagaacg

SEQ ID NO: 5769003 - DNA, 25 bp, Homo sapien
tcctccaggcagcctgtcctcctcc

SEQ ID NO: 5769004 - DNA, 25 bp, Homo sapien
ccacgcaggaggagttgcagcgcga

SEQ ID NO: 5769005 - DNA, 25 bp, Homo sapien
gtggacagacttaacgatccttgct

SEQ ID NO: 5769006 - DNA, 25 bp, Homo sapien
cattcccgaggcagaggaggcgcag

SEQ ID NO: 5769007 - DNA, 25 bp, Homo sapien
ttggagccagaatctgagcctcagc

SEQ ID NO: 5769008 - DNA, 25 bp, Homo sapien
tctgagcctcagctggagtcagaga

SEQ ID NO: 5769009 - DNA, 25 bp, Homo sapien
cagttgagaaacagctacagcacga

SEQ ID NO: 5769010 - DNA, 25 bp, Homo sapien
cgatcttctgaaggatggccaatct

SEQ ID NO: 5769011 - DNA, 25 bp, Homo sapien
cgggacaacgtcactccacgtgaaa

SEQ ID NO: 5769012 - DNA, 25 bp, Homo sapien
accccgcccctgcagcgccgcccgt

SEQ ID NO: 5769013 - DNA, 25 bp, Homo sapien
gccaggcgcccttcgcaaagagtga

SEQ ID NO: 5769014 - DNA, 25 bp, Homo sapien
cccagttgagaaacagctacagcac

SEQ ID NO: 5769015 - DNA, 25 bp, Homo sapien
ggagggcttgctgacgctgcgggcc

SEQ ID NO: 5769016 - DNA, 25 bp, Homo sapien
ggctggagctgtccccggaggaggg

SEQ ID NO: 5769017 - DNA, 25 bp, Homo sapien
acaggagatgctgctgcgagtgtct

SEQ ID NO: 5769018 - DNA, 25 bp, Homo sapien
acgcaggaggagttgcagcgcgacc

SEQ ID NO: 5769019 - DNA, 25 bp, Homo sapien
cagcctataaacagcctccgtgctt

SEQ ID NO: 5769020 - DNA, 25 bp, Homo sapien
cttgcagcacgcatgggaagaaagg

SEQ ID NO: 5769021 - DNA, 25 bp, Homo sapien
cagcgccgcccgtcagtccgcgcag

SEQ ID NO: 5769022 - DNA, 25 bp, Homo sapien
cggaggagggacccccatacagacc

SEQ ID NO: 5769023 - DNA, 25 bp, Homo sapien
agaaaggccatcgtcctcgccattg

SEQ ID NO: 5769024 - DNA, 25 bp, Homo sapien
tcgccattgctaacaccagccttgc

SEQ ID NO: 5769025 - DNA, 25 bp, Homo sapien
gtgtaattatgacttccaggcccgc

SEQ ID NO: 5769026 - DNA, 25 bp, Homo sapien
gtccctccggagaggatctggactg

SEQ ID NO: 5769027 - DNA, 25 bp, Homo sapien
tcagcaccgtagagcggggcgcggg

SEQ ID NO: 5769028 - DNA, 25 bp, Homo sapien
gtgtgcggcggccgcatctgacatc

SEQ ID NO: 5769029 - DNA, 25 bp, Homo sapien
ccgtggcgctgctgcgggacaacgt

SEQ ID NO: 5769030 - DNA, 25 bp, Homo sapien
gcaggagccgctcgttgctgctgct

SEQ ID NO: 5769031 - DNA, 25 bp, Homo sapien
ccttggcagagcccctcgtgtcctc

SEQ ID NO: 5769032 - DNA, 25 bp, Homo sapien
ctgggcgccatcgtgcgctgtgacg

SEQ ID NO: 5769033 - DNA, 25 bp, Homo sapien
ccaaggaggagctggagtcgtaccc

SEQ ID NO: 5769034 - DNA, 25 bp, Homo sapien
ttgcacttccttttcgggcctctgc

SEQ ID NO: 5769035 - DNA, 25 bp, Homo sapien
gccggtcactgacccgcagagccgc

SEQ ID NO: 5769036 - DNA, 25 bp, Homo sapien
gccatcgtgcgctgtgacgcggtga

SEQ ID NO: 5769037 - DNA, 25 bp, Homo sapien
acgttctgcctgggtgaggacgatg

SEQ ID NO: 5769038 - DNA, 25 bp, Homo sapien
ggacgaccccaggcgaagcccattc

SEQ ID NO: 5769039 - DNA, 25 bp, Homo sapien
aggatgcctccaggaagttggccgt

SEQ ID NO: 5769040 - DNA, 25 bp, Homo sapien
gcacaattaccgctcgggccgcggg

SEQ ID NO: 5769041 - DNA, 25 bp, Homo sapien
cttgctgacgctgcgggccaagccg

SEQ ID NO: 5769042 - DNA, 25 bp, Homo sapien
caggaagttggccgtcatggatagc

SEQ ID NO: 5769043 - DNA, 25 bp, Homo sapien
cacgagcggaggcgccggcaggtga

SEQ ID NO: 5769044 - DNA, 25 bp, Homo sapien
attcctggcctgccctcctcctcca

SEQ ID NO: 5769045 - DNA, 25 bp, Homo sapien
gaggagttgcagcgcgaccgctcgc

SEQ ID NO: 5769046 - DNA, 25 bp, Homo sapien
atggcgtgcataccgtggaggatgc

SEQ ID NO: 5769047 - DNA, 25 bp, Homo sapien
agagctttgtatcgaggctgcagaa

SEQ ID NO: 5769048 - DNA, 25 bp, Homo sapien
cagtctacggaaagcgctagcagac

SEQ ID NO: 5769049 - DNA, 25 bp, Homo sapien
tcgcaaagagtgacgaggccccgtg

SEQ ID NO: 5769050 - DNA, 25 bp, Homo sapien
cgcctgggaggacccagttgagaaa

SEQ ID NO: 5769051 - DNA, 25 bp, Homo sapien
gcgggccaagccgccctcggaggcc

SEQ ID NO: 5769052 - DNA, 25 bp, Homo sapien
ctaggattgacactggctgtcaaac

SEQ ID NO: 5769053 - DNA, 25 bp, Homo sapien
agagggtgcagtggagccctgagca

SEQ ID NO: 5769054 - DNA, 25 bp, Homo sapien
aggcagcctgtcctgaccctcagca

SEQ ID NO: 5769055 - DNA, 25 bp, Homo sapien
ccggtggggacctcgagcaacgctg

SEQ ID NO: 5769056 - DNA, 25 bp, Homo sapien
tggggacctcgagcaacgctgactc

SEQ ID NO: 5769057 - DNA, 25 bp, Homo sapien
gcccctcgtgtcctcccttgcagca

SEQ ID NO: 5769058 - DNA, 25 bp, Homo sapien
atccagggggctctgcacaattacc

SEQ ID NO: 5769059 - DNA, 25 bp, Homo sapien
acccctcctctccggagctgttgca

SEQ ID NO: 5769060 - DNA, 25 bp, Homo sapien
ggtgcagtggagccctgagcattgt

SEQ ID NO: 5769061 - DNA, 25 bp, Homo sapien
cctgccctcctcctccaggcagcct

SEQ ID NO: 5769062 - DNA, 25 bp, Homo sapien
cccgcaacagcagtgagctgtcggt

SEQ ID NO: 5769063 - DNA, 25 bp, Homo sapien
ccctcgtgtcctcccttgcagcacg

SEQ ID NO: 5769064 - DNA, 25 bp, Homo sapien
ttaccgctcgggccgcggggagcgc

SEQ ID NO: 5769065 - DNA, 25 bp, Homo sapien
cctgggtgaggacgatggcgtgcat

SEQ ID NO: 5769066 - DNA, 25 bp, Homo sapien
ggacaaagagaaagtgtcagagctg

SEQ ID NO: 5769067 - DNA, 25 bp, Homo sapien
tcggcggaggcggccagggtgctgg

SEQ ID NO: 5769068 - DNA, 25 bp, Homo sapien
gggcgccatcgtgcgctgtgacgcg

SEQ ID NO: 5769069 - DNA, 25 bp, Homo sapien
ctacggaaagcgctagcagaccccc

SEQ ID NO: 5769070 - DNA, 25 bp, Homo sapien
ctgccaggcgcccttcgcaaagagt

SEQ ID NO: 5769071 - DNA, 25 bp, Homo sapien
ccccaatagcggaagtcgatcttct

SEQ ID NO: 5769072 - DNA, 25 bp, Homo sapien
cgggaacgcggccgcaggagccggc

SEQ ID NO: 5769073 - DNA, 25 bp, Homo sapien
tccggagctgttgcacttccttttc

SEQ ID NO: 5769074 - DNA, 25 bp, Homo sapien
agcgctagcagacccccgagagggt

SEQ ID NO: 5769075 - DNA, 25 bp, Homo sapien
ggagggacccccatacagacccgag

SEQ ID NO: 5769076 - DNA, 25 bp, Homo sapien
cttctgaaggatggccaatctgctc

SEQ ID NO: 5769077 - DNA, 25 bp, Homo sapien
cccctgcagcgccgcccgtcagtcc

SEQ ID NO: 5769078 - DNA, 25 bp, Homo sapien
ggagctgtccccggaggagggaccc

SEQ ID NO: 5769079 - DNA, 25 bp, Homo sapien
ggggagggcttgctgacgctgcggg

SEQ ID NO: 5769080 - DNA, 25 bp, Homo sapien
ctggaggcagtgatggagaagcaaa

SEQ ID NO: 5769081 - DNA, 25 bp, Homo sapien
tgtgacgcggtgatgccacccggca

SEQ ID NO: 5769082 - DNA, 25 bp, Homo sapien
cccttcgcaaagagtgacgaggccc

SEQ ID NO: 5769083 - DNA, 25 bp, Homo sapien
tgacatcggatgccgtggcgctgct

SEQ ID NO: 5769084 - DNA, 25 bp, Homo sapien
actcgtggacccgccccgggctgga

SEQ ID NO: 5769085 - DNA, 25 bp, Homo sapien
gacagtctacggaaagcgctagcag

SEQ ID NO: 5769086 - DNA, 25 bp, Homo sapien
actcctcagactctccccaatagcg

SEQ ID NO: 5769087 - DNA, 25 bp, Homo sapien
ccaggtcgctgtcaatggtcaccga

SEQ ID NO: 5769088 - DNA, 25 bp, Homo sapien
gccgagtacaccgacgtgctgcaga

SEQ ID NO: 5769089 - DNA, 25 bp, Homo sapien
agagctggaggcagtgatggagaag

SEQ ID NO: 5769090 - DNA, 25 bp, Homo sapien
gggacctcgagcaacgctgactcgg

SEQ ID NO: 5769091 - DNA, 25 bp, Homo sapien
acgtactggaggtcctggaggacaa

SEQ ID NO: 5769092 - DNA, 25 bp, Homo sapien
gctggagtcgtacccactgggcgcc

SEQ ID NO: 5769093 - DNA, 25 bp, Homo sapien
cgcagggcggcggcgctcagggcca

SEQ ID NO: 5769094 - DNA, 25 bp, Homo sapien
gtggaggatgcctccaggaagttgg

SEQ ID NO: 5769095 - DNA, 25 bp, Homo sapien
ccgccccgggctggagctgtccccg

SEQ ID NO: 5769096 - DNA, 25 bp, Homo sapien
ggcaggtgacccaagcgacacagca

SEQ ID NO: 5769097 - DNA, 25 bp, Homo sapien
acatcctgaaccacgtgttcgacga

SEQ ID NO: 5769098 - DNA, 25 bp, Homo sapien
agcaccgtagagcggggcgcgggcc

SEQ ID NO: 5769099 - DNA, 25 bp, Homo sapien
cgaggccccgtgggagaacggactc

SEQ ID NO: 5769100 - DNA, 25 bp, Homo sapien
gctgggagccgccggtcactgaccc

SEQ ID NO: 5769101 - DNA, 25 bp, Homo sapien
cctctccggagctgttgcacttcct

SEQ ID NO: 5769102 - DNA, 25 bp, Homo sapien
ggtcctggaggacaaagagaaagtg

SEQ ID NO: 5769103 - DNA, 25 bp, Homo sapien
ccggggtcctgacctggcggttctg

SEQ ID NO: 5769104 - DNA, 25 bp, Homo sapien
agagaaagtgtcagagctggaggca

SEQ ID NO: 5769105 - DNA, 25 bp, Homo sapien
agggccgagtctgggcacaggagat

SEQ ID NO: 5769106 - DNA, 25 bp, Homo sapien
ggccccgcctgacccgactgtctta

SEQ ID NO: 5769107 - DNA, 25 bp, Homo sapien
cccgaggcagaggaggcgcagaggc

SEQ ID NO: 5769108 - DNA, 25 bp, Homo sapien
gagtctgggcacaggagatgctgct

SEQ ID NO: 5769109 - DNA, 25 bp, Homo sapien
cccctatcttctaggattgacactg

SEQ ID NO: 5769110 - DNA, 25 bp, Homo sapien
gacccccatacagacccgagttctt

SEQ ID NO: 5769111 - DNA, 25 bp, Homo sapien
tggagtcgtacccactgggcgccat

SEQ ID NO: 5769112 - DNA, 25 bp, Homo sapien
gacgtgcacttcttccagggcctgc

SEQ ID NO: 5769113 - DNA, 25 bp, Homo sapien
caggaaaatgggtcctgtgtaatta

SEQ ID NO: 5769114 - DNA, 25 bp, Homo sapien
cctgcgcctcggggcggagctgatc

SEQ ID NO: 5769115 - DNA, 25 bp, Homo sapien
cgctgctcgacccggcctccaagga

SEQ ID NO: 5769116 - DNA, 25 bp, Homo sapien
gcaggaggagttgcagcgcgaccgc

SEQ ID NO: 5769117 - DNA, 25 bp, Homo sapien
gacacagcagggccgaggctgggaa

SEQ ID NO: 5769118 - DNA, 25 bp, Homo sapien
cagagcccctcgtgtcctcccttgc

SEQ ID NO: 5769119 - DNA, 25 bp, Homo sapien
agcctgctggcccggctgcgcggca

SEQ ID NO: 5769120 - DNA, 25 bp, Homo sapien
ccgcggacgaccccaggcgaagccc

SEQ ID NO: 5769121 - DNA, 25 bp, Homo sapien
gctggagcaccgggaacgcggccgc

SEQ ID NO: 5769122 - DNA, 25 bp, Homo sapien
acttggagccagaatctgagcctca

SEQ ID NO: 5769123 - DNA, 25 bp, Homo sapien
ggagttgcagcgcgaccgctcgccc

SEQ ID NO: 5769124 - DNA, 25 bp, Homo sapien
ggagccagaatctgagcctcagctg

SEQ ID NO: 5769125 - DNA, 25 bp, Homo sapien
gccacccggcaggagccgctcgttg

SEQ ID NO: 5769126 - DNA, 25 bp, Homo sapien
tgcgtttcctctttgccagcacctg

SEQ ID NO: 5769127 - DNA, 25 bp, Homo sapien
atccgagaggacatccagggggctc

SEQ ID NO: 5769128 - DNA, 25 bp, Homo sapien
gacgacgtagagagctttgtatcga

SEQ ID NO: 5769129 - DNA, 25 bp, Homo sapien
cgtgtcctcccttgcagcacgcatg

SEQ ID NO: 5769130 - DNA, 25 bp, Homo sapien
tccacgtgaaaacgagctctggacc

SEQ ID NO: 5769131 - DNA, 25 bp, Homo sapien
ctctttgccagcacctggtgacgtt

SEQ ID NO: 5769132 - DNA, 25 bp, Homo sapien
cccggaggagggacccccatacaga

SEQ ID NO: 5769133 - DNA, 25 bp, Homo sapien
tctgctccggccctggtcttccccc

SEQ ID NO: 5769134 - DNA, 25 bp, Homo sapien
ccaggcgaagcccattcccgaggca

SEQ ID NO: 5769135 - DNA, 25 bp, Homo sapien
ggtgatgccacccggcaggagccgc

SEQ ID NO: 5769136 - DNA, 25 bp, Homo sapien
cgggctggagctgtccccggaggag

SEQ ID NO: 5769137 - DNA, 25 bp, Homo sapien
ggggtcctgacctggcggttctgca

SEQ ID NO: 5769138 - DNA, 25 bp, Homo sapien
agctttgtatcgaggctgcagaagt

SEQ ID NO: 5769139 - DNA, 25 bp, Homo sapien
gccgcgcctgggaggacccagttga

SEQ ID NO: 5769140 - DNA, 25 bp, Homo sapien
gccaagccgccctcggaggccgagt

SEQ ID NO: 5769141 - DNA, 25 bp, Homo sapien
ggggcgcggccggtccgcctggccc

SEQ ID NO: 5769142 - DNA, 25 bp, Homo sapien
agccgcccggcgccggctcctgcgg

SEQ ID NO: 5769143 - DNA, 25 bp, Homo sapien
cctgcagaaccgccaggtcaggacc

SEQ ID NO: 5769144 - DNA, 25 bp, Homo sapien
ccctcctccggggacagctccagcc

SEQ ID NO: 5769145 - DNA, 25 bp, Homo sapien
gcgtgacatggtcgggagacactcg

SEQ ID NO: 5769146 - DNA, 25 bp, Homo sapien
gcgcctggcaggtcaaatgacctcc

SEQ ID NO: 5769147 - DNA, 25 bp, Homo sapien
tttgctgtaggaagtaagacagtcg

SEQ ID NO: 5769148 - DNA, 25 bp, Homo sapien
tccatgacggccaacttcctggagg

SEQ ID NO: 5769149 - DNA, 25 bp, Homo sapien
gcgccacggcatccgatgtcagatg

SEQ ID NO: 5769150 - DNA, 25 bp, Homo sapien
cggagcagattggccatccttcaga

SEQ ID NO: 5769151 - DNA, 25 bp, Homo sapien
tcgtgctgtagctgtttctcaactg

SEQ ID NO: 5769152 - DNA, 25 bp, Homo sapien
attggccatccttcagaagatcgac

SEQ ID NO: 5769153 - DNA, 25 bp, Homo sapien
tcagattctggctccaagtctcggt

SEQ ID NO: 5769154 - DNA, 25 bp, Homo sapien
ccgcgcagccgggccagcaggctga

SEQ ID NO: 5769155 - DNA, 25 bp, Homo sapien
gcaggccaggaatcaccttgaagga

SEQ ID NO: 5769156 - DNA, 25 bp, Homo sapien
cccgaggcgcaggccctggaagaag

SEQ ID NO: 5769157 - DNA, 25 bp, Homo sapien
ggacaggctgcctggaggaggaggg

SEQ ID NO: 5769158 - DNA, 25 bp, Homo sapien
tgaagaactcgggtctgtatggggg

SEQ ID NO: 5769159 - DNA, 25 bp, Homo sapien
cctggggggcgctttgctgtaggaa

SEQ ID NO: 5769160 - DNA, 25 bp, Homo sapien
ctcccagccagtccagatcctctcc

SEQ ID NO: 5769161 - DNA, 25 bp, Homo sapien
cagtgaccggcggctcccagccgct

SEQ ID NO: 5769162 - DNA, 25 bp, Homo sapien
gggccggagcagattggccatcctt

SEQ ID NO: 5769163 - DNA, 25 bp, Homo sapien
tgcgtgctgcaagggaggacacgag

SEQ ID NO: 5769164 - DNA, 25 bp, Homo sapien
tacacaggacccattttcctgctgt

SEQ ID NO: 5769165 - DNA, 25 bp, Homo sapien
tgtcccgcagcagcgccacggcatc

SEQ ID NO: 5769166 - DNA, 25 bp, Homo sapien
tggctatccatgacggccaacttcc

SEQ ID NO: 5769167 - DNA, 25 bp, Homo sapien
agtgacgttgtcccgcagcagcgcc

SEQ ID NO: 5769168 - DNA, 25 bp, Homo sapien
cgagcagcagcaacgagcggctcct

SEQ ID NO: 5769169 - DNA, 25 bp, Homo sapien
aggctcagattctggctccaagtct

SEQ ID NO: 5769170 - DNA, 25 bp, Homo sapien
tcgacttccgctattggggagagtc

SEQ ID NO: 5769171 - DNA, 25 bp, Homo sapien
tttcttcccatgcgtgctgcaaggg

SEQ ID NO: 5769172 - DNA, 25 bp, Homo sapien
gcgggtccacgagtcccccagcgag

SEQ ID NO: 5769173 - DNA, 25 bp, Homo sapien
ctgacactttctctttgtcctccag

SEQ ID NO: 5769174 - DNA, 25 bp, Homo sapien
tcccggtgctccagcaccctggccg

SEQ ID NO: 5769175 - DNA, 25 bp, Homo sapien
tccagcccggggcgggtccacgagt

SEQ ID NO: 5769176 - DNA, 25 bp, Homo sapien
cgaggtccccaccggctcaggcctc

SEQ ID NO: 5769177 - DNA, 25 bp, Homo sapien
cgaacacgtggttcaggatgtccac

SEQ ID NO: 5769178 - DNA, 25 bp, Homo sapien
cgggagacactcgcagcagcatctc

SEQ ID NO: 5769179 - DNA, 25 bp, Homo sapien
gcgagcggtcgcgctgcaactcctc

SEQ ID NO: 5769180 - DNA, 25 bp, Homo sapien
tctgcctcgggaatgggcttcgcct

SEQ ID NO: 5769181 - DNA, 25 bp, Homo sapien
tcctgcggccgcgttcccggtgctc

SEQ ID NO: 5769182 - DNA, 25 bp, Homo sapien
attggggagagtctgaggagtccgt

SEQ ID NO: 5769183 - DNA, 25 bp, Homo sapien
ctcggatcagctccgccccgaggcg

SEQ ID NO: 5769184 - DNA, 25 bp, Homo sapien
gcgggcctggaagtcataattacac

SEQ ID NO: 5769185 - DNA, 25 bp, Homo sapien
ttgtcctccaggacctccagtacgt

SEQ ID NO: 5769186 - DNA, 25 bp, Homo sapien
gcgctttccgtagactgtctccacg

SEQ ID NO: 5769187 - DNA, 25 bp, Homo sapien
tggggagagtctgaggagtccgttc

SEQ ID NO: 5769188 - DNA, 25 bp, Homo sapien
atccgatgtcagatgcggccgccgc

SEQ ID NO: 5769189 - DNA, 25 bp, Homo sapien
ccgcagcagcgccacggcatccgat

SEQ ID NO: 5769190 - DNA, 25 bp, Homo sapien
agcaaggatcgttaagtctgtccac

SEQ ID NO: 5769191 - DNA, 25 bp, Homo sapien
cctccgagggcggcttggcccgcag

SEQ ID NO: 5769192 - DNA, 25 bp, Homo sapien
gccatccttcagaagatcgacttcc

SEQ ID NO: 5769193 - DNA, 25 bp, Homo sapien
gcctggcaggtcaaatgacctccat

SEQ ID NO: 5769194 - DNA, 25 bp, Homo sapien
gcggactgacgggcggcgctgcagg

SEQ ID NO: 5769195 - DNA, 25 bp, Homo sapien
tccacttcccgctccgcctgcagaa

SEQ ID NO: 5769196 - DNA, 25 bp, Homo sapien
accagggccggagcagattggccat

SEQ ID NO: 5769197 - DNA, 25 bp, Homo sapien
gcagcagcgccacggcatccgatgt

SEQ ID NO: 5769198 - DNA, 25 bp, Homo sapien
aagtcataattacacaggacccatt

SEQ ID NO: 5769199 - DNA, 25 bp, Homo sapien
gtcctcacccaggcagaacgtcacc

SEQ ID NO: 5769200 - DNA, 25 bp, Homo sapien
tcgttaagtctgtccaccgggatgg

SEQ ID NO: 5769201 - DNA, 25 bp, Homo sapien
gtccacgagtcccccagcgaggtcc

SEQ ID NO: 5769202 - DNA, 25 bp, Homo sapien
gtggcatcaccgcgtcacagcgcac

SEQ ID NO: 5769203 - DNA, 25 bp, Homo sapien
gctagcgctttccgtagactgtctc

SEQ ID NO: 5769204 - DNA, 25 bp, Homo sapien
tgctcagggctccactgcaccctct

SEQ ID NO: 5769205 - DNA, 25 bp, Homo sapien
gtgggtacgactccagctcctcctt

SEQ ID NO: 5769206 - DNA, 25 bp, Homo sapien
ctcctccggggacagctccagcccg

SEQ ID NO: 5769207 - DNA, 25 bp, Homo sapien
taattacacaggacccattttcctg

SEQ ID NO: 5769208 - DNA, 25 bp, Homo sapien
gcggtaattgtgcagagccccctgg

SEQ ID NO: 5769209 - DNA, 25 bp, Homo sapien
ccgctctacggtgctgatcactgcg

SEQ ID NO: 5769210 - DNA, 25 bp, Homo sapien
ctcccacggggcctcgtcactcttt

SEQ ID NO: 5769211 - DNA, 25 bp, Homo sapien
ctggcacacgagcagcagcaacgag

SEQ ID NO: 5769212 - DNA, 25 bp, Homo sapien
gtgctgtagctgtttctcaactggg

SEQ ID NO: 5769213 - DNA, 25 bp, Homo sapien
gcagccgggccagcaggctgaaggc

SEQ ID NO: 5769214 - DNA, 25 bp, Homo sapien
gggccaggcggaccggccgcgcccc

SEQ ID NO: 5769215 - DNA, 25 bp, Homo sapien
atcctagaagataggggtgttctgg

SEQ ID NO: 5769216 - DNA, 25 bp, Homo sapien
cggggccaggcggaccggccgcgcc

SEQ ID NO: 5769217 - DNA, 25 bp, Homo sapien
tgggtcacctgccggcgcctccgct

SEQ ID NO: 5769218 - DNA, 25 bp, Homo sapien
ggagaggaggggtcggcgatgttgc

SEQ ID NO: 5769219 - DNA, 25 bp, Homo sapien
cagcgacctggggggcgctttgctg

SEQ ID NO: 5769220 - DNA, 25 bp, Homo sapien
gacttccgctattggggagagtctg

SEQ ID NO: 5769221 - DNA, 25 bp, Homo sapien
tgctcgaggtccccaccggctcagg

SEQ ID NO: 5769222 - DNA, 25 bp, Homo sapien
caggtcaaatgacctccatttccac

SEQ ID NO: 5769223 - DNA, 25 bp, Homo sapien
ccagctcctccttggaggccgggtc

SEQ ID NO: 5769224 - DNA, 25 bp, Homo sapien
gtgcacgtcgggctgcgcgcgctcg

SEQ ID NO: 5769225 - DNA, 25 bp, Homo sapien
tggccctgagcgccgccgccctgcg

SEQ ID NO: 5769226 - DNA, 25 bp, Homo sapien
gctgcctggaggaggagggcaggcc

SEQ ID NO: 5769227 - DNA, 25 bp, Homo sapien
acggccaacttcctggaggcatcct

SEQ ID NO: 5769228 - DNA, 25 bp, Homo sapien
aggagggcaggccaggaatcacctt

SEQ ID NO: 5769229 - DNA, 25 bp, Homo sapien
caggtccggggaggccgagtcagcg

SEQ ID NO: 5769230 - DNA, 25 bp, Homo sapien
tgttagcaatggcgaggacgatggc

SEQ ID NO: 5769231 - DNA, 25 bp, Homo sapien
tcacccaggcagaacgtcaccaggt

SEQ ID NO: 5769232 - DNA, 25 bp, Homo sapien
gcgttcccggtgctccagcaccctg

SEQ ID NO: 5769233 - DNA, 25 bp, Homo sapien
gcttcgcctggggtcgtccgcggcc

SEQ ID NO: 5769234 - DNA, 25 bp, Homo sapien
gtcataattacacaggacccatttt

SEQ ID NO: 5769235 - DNA, 25 bp, Homo sapien
ccggacttcccagcctcggccctgc

SEQ ID NO: 5769236 - DNA, 25 bp, Homo sapien
cctggggtcgtccgcggcccgcgcc

SEQ ID NO: 5769237 - DNA, 25 bp, Homo sapien
aagaggaaacgcaaggctggtgtta

SEQ ID NO: 5769238 - DNA, 25 bp, Homo sapien
cgggctgcgcgcgctcgggttcctg

SEQ ID NO: 5769239 - DNA, 25 bp, Homo sapien
tgtttctcaactgggtcctcccagg

SEQ ID NO: 5769240 - DNA, 25 bp, Homo sapien
atgggggaagaccagggccggagca

SEQ ID NO: 5769241 - DNA, 25 bp, Homo sapien
tatccatgacggccaacttcctgga

SEQ ID NO: 5769242 - DNA, 25 bp, Homo sapien
ttgcgggcctggaagtcataattac

SEQ ID NO: 5769243 - DNA, 25 bp, Homo sapien
gttcccggtgctccagcaccctggc

SEQ ID NO: 5769244 - DNA, 25 bp, Homo sapien
agctcctccttggaggccgggtcga

SEQ ID NO: 5769245 - DNA, 25 bp, Homo sapien
taattgtgcagagccccctggatgt

SEQ ID NO: 5769246 - DNA, 25 bp, Homo sapien
gggactgcagcaaggatcgttaagt

SEQ ID NO: 5769247 - DNA, 25 bp, Homo sapien
ccattttcctgctgtctctgactcc

SEQ ID NO: 5769248 - DNA, 25 bp, Homo sapien
tcactgcctccagctctgacacttt

SEQ ID NO: 5769249 - DNA, 25 bp, Homo sapien
cttccgctattggggagagtctgag

SEQ ID NO: 5769250 - DNA, 25 bp, Homo sapien
ccgagtcagcgttgctcgaggtccc

SEQ ID NO: 5769251 - DNA, 25 bp, Homo sapien
cataattacacaggacccattttcc

SEQ ID NO: 5769252 - DNA, 25 bp, Homo sapien
tctacggtgctgatcactgcgcgga

SEQ ID NO: 5769253 - DNA, 25 bp, Homo sapien
gatgtccacttcccgctccgcctgc

SEQ ID NO: 5769254 - DNA, 25 bp, Homo sapien
tgtttataggctgggccgcatatta

SEQ ID NO: 5769255 - DNA, 25 bp, Homo sapien
gcggccgcgttcccggtgctccagc

SEQ ID NO: 5769256 - DNA, 25 bp, Homo sapien
tctacgtcgtcgaacacgtggttca

SEQ ID NO: 5769257 - DNA, 25 bp, Homo sapien
aagcacggaggctgtttataggctg

SEQ ID NO: 5769258 - DNA, 25 bp, Homo sapien
gacctccatttccacctcgccttcc

SEQ ID NO: 5769259 - DNA, 25 bp, Homo sapien
tggggtcgtccgcggcccgcgcccc

SEQ ID NO: 5769260 - DNA, 25 bp, Homo sapien
gtgtactcggcctccgagggcggct

SEQ ID NO: 5769261 - DNA, 25 bp, Homo sapien
ctgcaagggaggacacgaggggctc

SEQ ID NO: 5769262 - DNA, 25 bp, Homo sapien
agtctcggtgaccattgacagcgac

SEQ ID NO: 5769263 - DNA, 25 bp, Homo sapien
gtgctgatcactgcgcggactgacg

SEQ ID NO: 5769264 - DNA, 25 bp, Homo sapien
cccccgacgtgttcacaatcatctg

SEQ ID NO: 5769265 - DNA, 25 bp, Homo sapien
tctgtatgggggtccctcctccggg

SEQ ID NO: 5769266 - DNA, 25 bp, Homo sapien
gagtctgaggagtccgttctcccac

SEQ ID NO: 5769267 - DNA, 25 bp, Homo sapien
cacgtggttcaggatgtccacttcc

SEQ ID NO: 5769268 - DNA, 25 bp, Homo sapien
aagctctctacgtcgtcgaacacgt

SEQ ID NO: 5769269 - DNA, 25 bp, Homo sapien
gccaggagaggctgctgagggtcag

SEQ ID NO: 5769270 - DNA, 25 bp, Homo sapien
ggcggctcccagccgctgaagaact

SEQ ID NO: 5769271 - DNA, 25 bp, Homo sapien
tggttcaggatgtccacttcccgct

SEQ ID NO: 5769272 - DNA, 25 bp, Homo sapien
cggggcctcgtcactctttgcgaag

SEQ ID NO: 5769273 - DNA, 25 bp, Homo sapien
gggggcgctttgctgtaggaagtaa

SEQ ID NO: 5769274 - DNA, 25 bp, Homo sapien
tacgtcccgctgcttgaccgacagc

SEQ ID NO: 5769275 - DNA, 25 bp, Homo sapien
ctccggagaggaggggtcggcgatg

SEQ ID NO: 5769276 - DNA, 25 bp, Homo sapien
tcttcttttgcttctccatcactgc

SEQ ID NO: 5769277 - DNA, 25 bp, Homo sapien
tgcctcgggaatgggcttcgcctgg

SEQ ID NO: 5769278 - DNA, 25 bp, Homo sapien
caaagctctctacgtcgtcgaacac

SEQ ID NO: 5769279 - DNA, 25 bp, Homo sapien
gccagcaggctgaaggcgtacttga

SEQ ID NO: 5769280 - DNA, 25 bp, Homo sapien
cctggaggaggaggacaggctgcct

SEQ ID NO: 5769281 - DNA, 25 bp, Homo sapien
tgggggtccctcctccggggacagc

SEQ ID NO: 5769282 - DNA, 25 bp, Homo sapien
tacaaagctctctacgtcgtcgaac

SEQ ID NO: 5769283 - DNA, 25 bp, Homo sapien
gcacgtcggtgtactcggcctccga

SEQ ID NO: 5769284 - DNA, 25 bp, Homo sapien
ccccgctctacggtgctgatcactg

SEQ ID NO: 5769285 - DNA, 25 bp, Homo sapien
ggcgcccagtgggtacgactccagc

SEQ ID NO: 5769286 - DNA, 25 bp, Homo sapien
ggagacactcgcagcagcatctcct

SEQ ID NO: 5769287 - DNA, 25 bp, Homo sapien
gatacaaagctctctacgtcgtcga

SEQ ID NO: 5769288 - DNA, 25 bp, Homo sapien
cggagggactgcagcaaggatcgtt

SEQ ID NO: 5769289 - DNA, 25 bp, Homo sapien
agctcactgctgttgcgggcctgga

SEQ ID NO: 5769290 - DNA, 25 bp, Homo sapien
cgcagcgtcagcaagccctccccag

SEQ ID NO: 5769291 - DNA, 25 bp, Homo sapien
gcgcgcgctcgggttcctggcacac

SEQ ID NO: 5769292 - DNA, 25 bp, Homo sapien
gtatgcacgccatcgtcctcaccca

SEQ ID NO: 5769293 - DNA, 25 bp, Homo sapien
gggcaggccaggaatcaccttgaag

SEQ ID NO: 5769294 - DNA, 25 bp, Homo sapien
aagggaggacacgaggggctctgcc

SEQ ID NO: 5769295 - DNA, 25 bp, Homo sapien
ggcccccccgacgtgttcacaatca

SEQ ID NO: 5769296 - DNA, 25 bp, Homo sapien
ccaggcagaacgtcaccaggtgctg

SEQ ID NO: 5769297 - DNA, 25 bp, Homo sapien
gggcggcgctgcaggggcggggtct

SEQ ID NO: 5769298 - DNA, 25 bp, Homo sapien
cctctcgggggtctgctagcgcttt

SEQ ID NO: 5769299 - DNA, 25 bp, Homo sapien
tccaccgggatgggggaagaccagg

SEQ ID NO: 5769300 - DNA, 25 bp, Homo sapien
ctgcagaggcccgaaaaggaagtgc

SEQ ID NO: 5769301 - DNA, 25 bp, Homo sapien
tccggggaggccgagtcagcgttgc

SEQ ID NO: 5769302 - DNA, 25 bp, Homo sapien
gactccagctcctccttggaggccg

SEQ ID NO: 5769303 - DNA, 25 bp, Homo sapien
ctgtaggaagtaagacagtcgggtc

SEQ ID NO: 5769304 - DNA, 25 bp, Homo sapien
gcgctgcaactcctcctgcgtggcc

SEQ ID NO: 5769305 - DNA, 25 bp, Homo sapien
cactcccagccagtccagatcctct

SEQ ID NO: 5769306 - DNA, 25 bp, Homo sapien
cgcctggggtcgtccgcggcccgcg

SEQ ID NO: 5769307 - DNA, 25 bp, Homo sapien
cgagggcggcttggcccgcagcgtc

SEQ ID NO: 5769308 - DNA, 25 bp, Homo sapien
ccgccgacttctgcagcctcgatac

SEQ ID NO: 5769309 - DNA, 25 bp, Homo sapien
tttgcgaagggcgcctggcaggtca

SEQ ID NO: 5769310 - DNA, 25 bp, Homo sapien
cagcctcggccctgctgtgtcgctt

SEQ ID NO: 5769311 - DNA, 25 bp, Homo sapien
ggatgggggaagaccagggccggag

SEQ ID NO: 5769312 - DNA, 25 bp, Homo sapien
gcacgtcgggctgcgcgcgctcggg

SEQ ID NO: 5769313 - DNA, 25 bp, Homo sapien
cccccagcgaggtccagagctcgtt

SEQ ID NO: 5769314 - DNA, 25 bp, Homo sapien
tgcgaagggcgcctggcaggtcaaa

SEQ ID NO: 5769315 - DNA, 25 bp, Homo sapien
gggaagaccagggccggagcagatt

SEQ ID NO: 5769316 - DNA, 25 bp, Homo sapien
atggcctttcttcccatgcgtgctg

SEQ ID NO: 5769317 - DNA, 25 bp, Homo sapien
tccgcctgcagaaccgccaggtcag

SEQ ID NO: 5769318 - DNA, 25 bp, Homo sapien
tgcaactcctcctgcgtggccctga

SEQ ID NO: 5769319 - DNA, 25 bp, Homo sapien
gggcgcctggcaggtcaaatgacct

SEQ ID NO: 5769320 - DNA, 25 bp, Homo sapien
gagtcccccagcgaggtccagagct

SEQ ID NO: 5769321 - DNA, 25 bp, Homo sapien
gccccctggatgtcctctcggatca

SEQ ID NO: 5769322 - DNA, 25 bp, Homo sapien
ggaagtcataattacacaggaccca

SEQ ID NO: 5769323 - DNA, 25 bp, Homo sapien
gggcctggaagtcataattacacag

SEQ ID NO: 5769324 - DNA, 25 bp, Homo sapien
tcggcgatgttgccgcgcagccggg

SEQ ID NO: 5769325 - DNA, 25 bp, Homo sapien
agaacgtcaccaggtgctggcaaag

SEQ ID NO: 5769326 - DNA, 25 bp, Homo sapien
ctgcagcctcgatacaaagctctct

SEQ ID NO: 5769327 - DNA, 25 bp, Homo sapien
gccgcacactgctcgcgaactccgg

SEQ ID NO: 5769328 - DNA, 25 bp, Homo sapien
cctctgcctcgggaatgggcttcgc

SEQ ID NO: 5769329 - DNA, 25 bp, Homo sapien
tcctggaggcatcctccacggtatg

SEQ ID NO: 5769330 - DNA, 25 bp, Homo sapien
ctcctgtgcccagactcggccctgg

SEQ ID NO: 5769331 - DNA, 25 bp, Homo sapien
cgccttccaccttcttcttttgctt

SEQ ID NO: 5769332 - DNA, 25 bp, Homo sapien
tgcttgaccgacagctcactgctgt

SEQ ID NO: 5769333 - DNA, 25 bp, Homo sapien
gaaaaggaagtgcaacagctccgga

SEQ ID NO: 5769334 - DNA, 25 bp, Homo sapien
gcagcaacgagcggctcctgccggg

SEQ ID NO: 5769335 - DNA, 25 bp, Homo sapien
ctggcaggtcaaatgacctccattt

SEQ ID NO: 5769336 - DNA, 25 bp, Homo sapien
gacctggggggcgctttgctgtagg

SEQ ID NO: 5769337 - DNA, 25 bp, Homo sapien
ggacaggctgcctggaggaggagga

SEQ ID NO: 5769338 - DNA, 25 bp, Homo sapien
gcagaggcccgaaaaggaagtgcaa

SEQ ID NO: 5769339 - DNA, 25 bp, Homo sapien
ctccgccccgaggcgcaggccctgg

SEQ ID NO: 5769340 - DNA, 25 bp, Homo sapien
cactgctcgcgaactccggcccccc

SEQ ID NO: 5769341 - DNA, 25 bp, Homo sapien
ggacacgaggggctctgccaaggcc

SEQ ID NO: 5769342 - DNA, 25 bp, Homo sapien
cctccggggacagctccagcccggg

SEQ ID NO: 5769343 - DNA, 25 bp, Homo sapien
gcctcggccctgctgtgtcgcttgg

SEQ ID NO: 5769344 - DNA, 25 bp, Homo sapien
agaagatcgacttccgctattgggg

SEQ ID NO: 5769345 - DNA, 25 bp, Homo sapien
gtcaggacaggctgcctggaggagg

SEQ ID NO: 5769346 - DNA, 25 bp, Homo sapien
acgagtcccccagcgaggtccagag

SEQ ID NO: 5769347 - DNA, 25 bp, Homo sapien
cctcgccttccaccttcttcttttg

SEQ ID NO: 5769348 - DNA, 25 bp, Homo sapien
tgctgtaggaagtaagacagtcggg

SEQ ID NO: 5769349 - DNA, 25 bp, Homo sapien
ctattggggagagtctgaggagtcc

SEQ ID NO: 5769350 - DNA, 25 bp, Homo sapien
tggaggccgggtcgagcagcgtgac

SEQ ID NO: 5769351 - DNA, 25 bp, Homo sapien
gcttggcccgcagcgtcagcaagcc

SEQ ID NO: 5769352 - DNA, 25 bp, Homo sapien
cagagctcgttttcacgtggagtga

SEQ ID NO: 5769353 - DNA, 25 bp, Homo sapien
gctgtttataggctgggccgcatat

SEQ ID NO: 5769354 - DNA, 25 bp, Homo sapien
tggctccaagtctcggtgaccattg

SEQ ID NO: 5769355 - DNA, 25 bp, Homo sapien
ggctgcgcgcgctcgggttcctggc

SEQ ID NO: 5769356 - DNA, 25 bp, Homo sapien
tcggcctccgagggcggcttggccc

SEQ ID NO: 5769357 - DNA, 25 bp, Homo sapien
cgatggcgcccagtgggtacgactc

SEQ ID NO: 5769358 - DNA, 25 bp, Homo sapien
gtccctcctccggggacagctccag

SEQ ID NO: 5769359 - DNA, 25 bp, Homo sapien
tgaccattgacagcgacctgggggg

SEQ ID NO: 5769360 - DNA, 25 bp, Homo sapien
gctgaaggcgtacttgatcttctgc

SEQ ID NO: 5769361 - DNA, 25 bp, Homo sapien
cttgaaggatgagtttgacagccag

SEQ ID NO: 5769362 - DNA, 25 bp, Homo sapien
tcctggcacacgagcagcagcaacg

SEQ ID NO: 5769363 - DNA, 25 bp, Homo sapien
gcgaggtccagagctcgttttcacg

SEQ ID NO: 5769364 - DNA, 25 bp, Homo sapien
aggccctggaagaagtgcacgtcgg

SEQ ID NO: 5769365 - DNA, 25 bp, Homo sapien
acgactccagctcctccttggaggc

SEQ ID NO: 5769366 - DNA, 25 bp, Homo sapien
gacagcgacctggggggcgctttgc

SEQ ID NO: 5769367 - DNA, 25 bp, Homo sapien
aaatgacctccatttccacctcgcc

SEQ ID NO: 5769368 - DNA, 25 bp, Homo sapien
gtcgcttgggtcacctgccggcgcc

SEQ ID NO: 5769369 - DNA, 25 bp, Homo sapien
gccccgaggcgcaggccctggaaga

SEQ ID NO: 5769370 - DNA, 25 bp, Homo sapien
gatcgttaagtctgtccaccgggat

SEQ ID NO: 5769371 - DNA, 25 bp, Homo sapien
gcgcagccgggccagcaggctgaag

SEQ ID NO: 5769372 - DNA, 25 bp, Homo sapien
ctgcaggggcggggtctcagcggcg

SEQ ID NO: 5769373 - DNA, 25 bp, Homo sapien
ggcacacgagcagcagcaacgagcg

SEQ ID NO: 5769374 - DNA, 25 bp, Homo sapien
gactgtctccacgccctccccactc

SEQ ID NO: 5769375 - DNA, 25 bp, Homo sapien
tgtgcccagactcggccctggctat

SEQ ID NO: 5769376 - DNA, 25 bp, Homo sapien
catcactgcctccagctctgacact

SEQ ID NO: 5769377 - DNA, 25 bp, Homo sapien
ggctcctgccgggtggcatcaccgc

SEQ ID NO: 5769378 - DNA, 25 bp, Homo sapien
tgcttctccatcactgcctccagct

SEQ ID NO: 5769379 - DNA, 25 bp, Homo sapien
tccttcagaagatcgacttccgcta

SEQ ID NO: 5769380 - DNA, 25 bp, Homo sapien
ctgctcgcgaactccggcccccccg

SEQ ID NO: 5769381 - DNA, 25 bp, Homo sapien
gttgccgcgcagccgggccagcagg

SEQ ID NO: 5769382 - DNA, 25 bp, Homo sapien
ggagaggctgctgagggtcaggaca

SEQ ID NO: 5769383 - DNA, 25 bp, Homo sapien
cccatgcgtgctgcaagggaggaca

SEQ ID NO: 5769384 - DNA, 25 bp, Homo sapien
tcacgtggagtgacgttgtcccgca

SEQ ID NO: 5769385 - DNA, 25 bp, Homo sapien
aggtccccaccggctcaggcctctg

SEQ ID NO: 5769386 - DNA, 25 bp, Homo sapien
tgatcttctgcagcacgtcggtgta

SEQ ID NO: 5769387 - DNA, 25 bp, Homo sapien
gctccccgcggcccgagcggtaatt

SEQ ID NO: 5769388 - DNA, 25 bp, Homo sapien
gggaggccgagtcagcgttgctcga

SEQ ID NO: 5769389 - DNA, 25 bp, Homo sapien
gtgaccggcggctcccagccgctga

SEQ ID NO: 5769390 - DNA, 25 bp, Homo sapien
cctccttggaggccgggtcgagcag

SEQ ID NO: 5769391 - DNA, 25 bp, Homo sapien
tctctgactccagctgaggctcaga

SEQ ID NO: 5769392 - DNA, 25 bp, Homo sapien
ctggcaaagaggaaacgcaaggctg

SEQ ID NO: 5769393 - DNA, 25 bp, Homo sapien
cagaaccgccaggtcaggaccccgg

SEQ ID NO: 5769394 - DNA, 25 bp, Homo sapien
acaggctgcctggaggaggaggaca

SEQ ID NO: 5769395 - DNA, 25 bp, Homo sapien
tctgtccaccgggatgggggaagac

SEQ ID NO: 5769396 - DNA, 25 bp, Homo sapien
ggccgagtcagcgttgctcgaggtc

SEQ ID NO: 5769397 - DNA, 25 bp, Homo sapien
aggatcgttaagtctgtccaccggg

SEQ ID NO: 5769398 - DNA, 25 bp, Homo sapien
cggggaggccgagtcagcgttgctc

SEQ ID NO: 5769399 - DNA, 25 bp, Homo sapien
cagtccagatcctctccggagggac

SEQ ID NO: 5769400 - DNA, 25 bp, Homo sapien
cttctccatcactgcctccagctct

SEQ ID NO: 5769401 - DNA, 25 bp, Homo sapien
cgttctcccacggggcctcgtcact

SEQ ID NO: 5769402 - DNA, 25 bp, Homo sapien
gggccagcaggctgaaggcgtactt

SEQ ID NO: 5769403 - DNA, 25 bp, Homo sapien
ccctggccgcctccgccgacttctg

SEQ ID NO: 5769404 - DNA, 25 bp, Homo sapien
aacgtcaccaggtgctggcaaagag

SEQ ID NO: 5769405 - DNA, 25 bp, Homo sapien
catattacaatgctcagggctccac

SEQ ID NO: 5769406 - DNA, 25 bp, Homo sapien
ttcccatgcgtgctgcaagggagga

SEQ ID NO: 5769407 - DNA, 25 bp, Homo sapien
ccacgagtcccccagcgaggtccag

SEQ ID NO: 5769408 - DNA, 25 bp, Homo sapien
gcctctgcgcctcctctgcctcggg

SEQ ID NO: 5769409 - DNA, 25 bp, Homo sapien
agcaatggcgaggacgatggccttt

SEQ ID NO: 5769410 - DNA, 25 bp, Homo sapien
catttccacctcgccttccaccttc

SEQ ID NO: 5769411 - DNA, 25 bp, Homo sapien
gctgtctctgactccagctgaggct

SEQ ID NO: 5769412 - DNA, 25 bp, Homo sapien
caatggcgaggacgatggcctttct

SEQ ID NO: 5769413 - DNA, 25 bp, Homo sapien
ttctcccacggggcctcgtcactct

SEQ ID NO: 5769414 - DNA, 25 bp, Homo sapien
gtcagtgaccggcggctcccagccg

SEQ ID NO: 5769415 - DNA, 25 bp, Homo sapien
agctccggagaggaggggtcggcga

SEQ ID NO: 5769416 - DNA, 25 bp, Homo sapien
gctgaggctcagattctggctccaa

SEQ ID NO: 5769417 - DNA, 25 bp, Homo sapien
gctgatcactgcgcggactgacggg

SEQ ID NO: 5769418 - DNA, 25 bp, Homo sapien
gcagattggccatccttcagaagat

SEQ ID NO: 5769419 - DNA, 25 bp, Homo sapien
tgtcagatgcggccgccgcacactg

SEQ ID NO: 5769420 - DNA, 25 bp, Homo sapien
gcggctctgcgggtcagtgaccggc

SEQ ID NO: 5769421 - DNA, 25 bp, Homo sapien
acctgccggcgcctccgctcgtgct

SEQ ID NO: 5769422 - DNA, 25 bp, Homo sapien
ttgacagcgacctggggggcgcttt

SEQ ID NO: 5769423 - DNA, 25 bp, Homo sapien
catccttcagaagatcgacttccgc

SEQ ID NO: 5769424 - DNA, 25 bp, Homo sapien
gcgcctccgctcgtgctgtagctgt

SEQ ID NO: 5769425 - DNA, 25 bp, Homo sapien
gcagaacgtcaccaggtgctggcaa

SEQ ID NO: 5769426 - DNA, 25 bp, Homo sapien
ggtcgcgctgcaactcctcctgcgt

SEQ ID NO: 5769427 - DNA, 25 bp, Homo sapien
tattacaatgctcagggctccactg

SEQ ID NO: 5769428 - DNA, 25 bp, Homo sapien
cgcacgatggcgcccagtgggtacg

SEQ ID NO: 5769429 - DNA, 25 bp, Homo sapien
catggtcgggagacactcgcagcag

SEQ ID NO: 5769430 - DNA, 25 bp, Homo sapien
tttctcaactgggtcctcccaggcg

SEQ ID NO: 5769431 - DNA, 25 bp, Homo sapien
gaggggtcggcgatgttgccgcgca

SEQ ID NO: 5769432 - DNA, 25 bp, Homo sapien
gcggtcgcgctgcaactcctcctgc

SEQ ID NO: 5769433 - DNA, 25 bp, Homo sapien
atgagtttgacagccagtgtcaatc

SEQ ID NO: 5769434 - DNA, 25 bp, Homo sapien
ccgccgcacactgctcgcgaactcc

SEQ ID NO: 5769435 - DNA, 25 bp, Homo sapien
cctgtgcccagactcggccctggct

SEQ ID NO: 5769436 - DNA, 25 bp, Homo sapien
ctgaggagtccgttctcccacgggg

SEQ ID NO: 5769437 - DNA, 25 bp, Homo sapien
cgcgccccgctctacggtgctgatc

SEQ ID NO: 5769438 - DNA, 25 bp, Homo sapien
gtactcggcctccgagggcggcttg

SEQ ID NO: 5769439 - DNA, 25 bp, Homo sapien
ccagccgcccggcgccggctcctgc

SEQ ID NO: 5769440 - DNA, 25 bp, Homo sapien
cctttcttcccatgcgtgctgcaag

SEQ ID NO: 5769441 - DNA, 25 bp, Homo sapien
ggaaacgcaaggctggtgttagcaa

SEQ ID NO: 5769442 - DNA, 25 bp, Homo sapien
ctggaggcatcctccacggtatgca

SEQ ID NO: 5769443 - DNA, 25 bp, Homo sapien
cgtgctgcaagggaggacacgaggg

SEQ ID NO: 5769444 - DNA, 25 bp, Homo sapien
ctggaagtcataattacacaggacc

SEQ ID NO: 5769445 - DNA, 25 bp, Homo sapien
cgtcacagcgcacgatggcgcccag

SEQ ID NO: 5769446 - DNA, 25 bp, Homo sapien
agaggaggggtcggcgatgttgccg

SEQ ID NO: 5769447 - DNA, 25 bp, Homo sapien
tcagctccgccccgaggcgcaggcc

SEQ ID NO: 5769448 - DNA, 25 bp, Homo sapien
agcagcgtgacatggtcgggagaca

SEQ ID NO: 5769449 - DNA, 25 bp, Homo sapien
cagggccggagcagattggccatcc

SEQ ID NO: 5769450 - DNA, 25 bp, Homo sapien
gaggaggagggcaggccaggaatca

SEQ ID NO: 5769451 - DNA, 25 bp, Homo sapien
gggcgggtccacgagtcccccagcg

SEQ ID NO: 5769452 - DNA, 25 bp, Homo sapien
ctgcggccgcgttcccggtgctcca

SEQ ID NO: 5769453 - DNA, 25 bp, Homo sapien
ctccagcaccctggccgcctccgcc

SEQ ID NO: 5769454 - DNA, 25 bp, Homo sapien
ggaggaggacaggctgcctggagga

SEQ ID NO: 5769455 - DNA, 25 bp, Homo sapien
ttctgcagcctcgatacaaagctct

SEQ ID NO: 5769456 - DNA, 25 bp, Homo sapien
tcgggaatgggcttcgcctggggtc

SEQ ID NO: 5769457 - DNA, 25 bp, Homo sapien
agattggccatccttcagaagatcg

SEQ ID NO: 5769458 - DNA, 25 bp, Homo sapien
gggtcaggacaggctgcctggagga

SEQ ID NO: 5769459 - DNA, 25 bp, Homo sapien
tccggagggactgcagcaaggatcg

SEQ ID NO: 5769460 - DNA, 25 bp, Homo sapien
ctgtgtcgcttgggtcacctgccgg

SEQ ID NO: 5769461 - DNA, 25 bp, Homo sapien
tcgtcgaacacgtggttcaggatgt

SEQ ID NO: 5769462 - DNA, 25 bp, Homo sapien
gatcagctccgccccgaggcgcagg

SEQ ID NO: 5769463 - DNA, 25 bp, Homo sapien
cgacgtgttcacaatcatctgcaga

SEQ ID NO: 5769464 - DNA, 25 bp, Homo sapien
gttgtcccgcagcagcgccacggca

SEQ ID NO: 5769465 - DNA, 25 bp, Homo sapien
ctggtgttagcaatggcgaggacga

SEQ ID NO: 5769466 - DNA, 25 bp, Homo sapien
gaggaaacgcaaggctggtgttagc

SEQ ID NO: 5769467 - DNA, 25 bp, Homo sapien
gacagctccagcccggggcgggtcc

SEQ ID NO: 5769468 - DNA, 25 bp, Homo sapien
caggtgctggcaaagaggaaacgca

SEQ ID NO: 5769469 - DNA, 25 bp, Homo sapien
cctggaagaagtgcacgtcgggctg

SEQ ID NO: 5769470 - DNA, 25 bp, Homo sapien
cacaggacccattttcctgctgtct

SEQ ID NO: 5769471 - DNA, 25 bp, Homo sapien
aggaagtaagacagtcgggtcaggc

SEQ ID NO: 5769472 - DNA, 25 bp, Homo sapien
gggcgagcggtcgcgctgcaactcc

SEQ ID NO: 5769473 - DNA, 25 bp, Homo sapien
cccagcgaggtccagagctcgtttt

SEQ ID NO: 5769474 - DNA, 25 bp, Homo sapien
gcggccgccgcacactgctcgcgaa

SEQ ID NO: 5769475 - DNA, 25 bp, Homo sapien
tttccacctcgccttccaccttctt

SEQ ID NO: 5769476 - DNA, 25 bp, Homo sapien
accaggtgctggcaaagaggaaacg

SEQ ID NO: 5769477 - DNA, 25 bp, Homo sapien
ccgcgttcccggtgctccagcaccc

SEQ ID NO: 5769478 - DNA, 25 bp, Homo sapien
gtcctcccaggcgcggctctgcggg

SEQ ID NO: 5769479 - DNA, 25 bp, Homo sapien
ggccgcctccgccgacttctgcagc

SEQ ID NO: 5769480 - DNA, 25 bp, Homo sapien
gcgctcgggttcctggcacacgagc

SEQ ID NO: 5769481 - DNA, 25 bp, Homo sapien
tccgagggcggcttggcccgcagcg

SEQ ID NO: 5769482 - DNA, 25 bp, Homo sapien
aaaggaagtgcaacagctccggaga

SEQ ID NO: 5769483 - DNA, 25 bp, Homo sapien
tgcctggaggaggagggcaggccag

SEQ ID NO: 5769484 - DNA, 25 bp, Homo sapien
tcagaagatcgacttccgctattgg

SEQ ID NO: 5769485 - DNA, 25 bp, Homo sapien
tgacggccaacttcctggaggcatc

SEQ ID NO: 5769486 - DNA, 25 bp, Homo sapien
ccgatgtcagatgcggccgccgcac

SEQ ID NO: 5769487 - DNA, 25 bp, Homo sapien
cagcgttgctcgaggtccccaccgg

SEQ ID NO: 5769488 - DNA, 25 bp, Homo sapien
ggtaattgtgcagagccccctggat

SEQ ID NO: 5769489 - DNA, 25 bp, Homo sapien
tgctccagcaccctggccgcctccg

SEQ ID NO: 5769490 - DNA, 25 bp, Homo sapien
cgccccgctctacggtgctgatcac

SEQ ID NO: 5769491 - DNA, 25 bp, Homo sapien
tgcaacagctccggagaggaggggt

SEQ ID NO: 5769492 - DNA, 25 bp, Homo sapien
tacgtcgtcgaacacgtggttcagg

SEQ ID NO: 5769493 - DNA, 25 bp, Homo sapien
ggccaacttcctggaggcatcctcc

SEQ ID NO: 5769494 - DNA, 25 bp, Homo sapien
agctccgccccgaggcgcaggccct

SEQ ID NO: 5769495 - DNA, 25 bp, Homo sapien
gagcggctcctgccgggtggcatca

SEQ ID NO: 5769496 - DNA, 25 bp, Homo sapien
gccagtgtcaatcctagaagatagg

SEQ ID NO: 5769497 - DNA, 25 bp, Homo sapien
gcgtcagcaagccctccccagccgc

SEQ ID NO: 5769498 - DNA, 25 bp, Homo sapien
gtacgactccagctcctccttggag

SEQ ID NO: 5769499 - DNA, 25 bp, Homo sapien
tccgtagactgtctccacgccctcc

SEQ ID NO: 5769500 - DNA, 25 bp, Homo sapien
gtgacatggtcgggagacactcgca

SEQ ID NO: 5769501 - DNA, 25 bp, Homo sapien
agatcctctccggagggactgcagc

SEQ ID NO: 5769502 - DNA, 25 bp, Homo sapien
gctctgacactttctctttgtcctc

SEQ ID NO: 5769503 - DNA, 25 bp, Homo sapien
gccaggtcaggaccccggggaccca

SEQ ID NO: 5769504 - DNA, 25 bp, Homo sapien
gagggactgcagcaaggatcgttaa

SEQ ID NO: 5769505 - DNA, 25 bp, Homo sapien
cgcccggcgccggctcctgcggccg

SEQ ID NO: 5769506 - DNA, 25 bp, Homo sapien
acggaggctgtttataggctgggcc

SEQ ID NO: 5769507 - DNA, 25 bp, Homo sapien
gagcggtcgcgctgcaactcctcct

SEQ ID NO: 5769508 - DNA, 25 bp, Homo sapien
gtcagcaagccctccccagccgccc

SEQ ID NO: 5769509 - DNA, 25 bp, Homo sapien
tacttgatcttctgcagcacgtcgg

SEQ ID NO: 5769510 - DNA, 25 bp, Homo sapien
gaggtccagagctcgttttcacgtg

SEQ ID NO: 5769511 - DNA, 25 bp, Homo sapien
gctatccatgacggccaacttcctg

SEQ ID NO: 5769512 - DNA, 25 bp, Homo sapien
attgtgcagagccccctggatgtcc

SEQ ID NO: 5769513 - DNA, 25 bp, Homo sapien
gaggagtccgttctcccacggggcc

SEQ ID NO: 5769514 - DNA, 25 bp, Homo sapien
cctctccggagggactgcagcaagg

SEQ ID NO: 5769515 - DNA, 25 bp, Homo sapien
ccgggtcgagcagcgtgacatggtc

SEQ ID NO: 5769516 - DNA, 25 bp, Homo sapien
tcccgctccgcctgcagaaccgcca

SEQ ID NO: 5769517 - DNA, 25 bp, Homo sapien
agcaacgagcggctcctgccgggtg

SEQ ID NO: 5769518 - DNA, 25 bp, Homo sapien
gggggtctgctagcgctttccgtag

SEQ ID NO: 5769519 - DNA, 25 bp, Homo sapien
tggaggaggaggacaggctgcctgg

SEQ ID NO: 5769520 - DNA, 25 bp, Homo sapien
tctttgcgaagggcgcctggcaggt

SEQ ID NO: 5769521 - DNA, 25 bp, Homo sapien
gggtcgagcagcgtgacatggtcgg

SEQ ID NO: 5769522 - DNA, 25 bp, Homo sapien
ctgagggtcaggacaggctgcctgg

SEQ ID NO: 5769523 - DNA, 25 bp, Homo sapien
caaagaggaaacgcaaggctggtgt

SEQ ID NO: 5769524 - DNA, 25 bp, Homo sapien
acccaggcagaacgtcaccaggtgc

SEQ ID NO: 5769525 - DNA, 25 bp, Homo sapien
gtccagatcctctccggagggactg

SEQ ID NO: 5769526 - DNA, 25 bp, Homo sapien
gggcctcgtcactctttgcgaaggg

SEQ ID NO: 5769527 - DNA, 25 bp, Homo sapien
cagcccggggcgggtccacgagtcc

SEQ ID NO: 5769528 - DNA, 25 bp, Homo sapien
tttcctgctgtctctgactccagct

SEQ ID NO: 5769529 - DNA, 25 bp, Homo sapien
agacagtcgggtcaggcggggccag

SEQ ID NO: 5769530 - DNA, 25 bp, Homo sapien
tccttggaggccgggtcgagcagcg

SEQ ID NO: 5769531 - DNA, 25 bp, Homo sapien
cggcgccggctcctgcggccgcgtt

SEQ ID NO: 5769532 - DNA, 25 bp, Homo sapien
gccaggcggaccggccgcgcccccg

SEQ ID NO: 5769533 - DNA, 25 bp, Homo sapien
ttcgcctggggtcgtccgcggcccg

SEQ ID NO: 5769534 - DNA, 25 bp, Homo sapien
aacacgtggttcaggatgtccactt

SEQ ID NO: 5769535 - DNA, 25 bp, Homo sapien
aagaactcgggtctgtatgggggtc

SEQ ID NO: 5769536 - DNA, 25 bp, Homo sapien
ctgccaaggccaggagaggctgctg

SEQ ID NO: 5769537 - DNA, 25 bp, Homo sapien
atgcacgccatcgtcctcacccagg

SEQ ID NO: 5769538 - DNA, 25 bp, Homo sapien
acccattttcctgctgtctctgact

SEQ ID NO: 5769539 - DNA, 25 bp, Homo sapien
cagactcggccctggctatccatga

SEQ ID NO: 5769540 - DNA, 25 bp, Homo sapien
ctctttgtcctccaggacctccagt

SEQ ID NO: 5769541 - DNA, 25 bp, Homo sapien
gcaggccctggaagaagtgcacgtc

SEQ ID NO: 5769542 - DNA, 25 bp, Homo sapien
ctcctgccgggtggcatcaccgcgt

SEQ ID NO: 5769543 - DNA, 25 bp, Homo sapien
tcagatgcggccgccgcacactgct

SEQ ID NO: 5769544 - DNA, 25 bp, Homo sapien
cggccctgctgtgtcgcttgggtca

SEQ ID NO: 5769545 - DNA, 25 bp, Homo sapien
gtcaatcctagaagataggggtgtt

SEQ ID NO: 5769546 - DNA, 25 bp, Homo sapien
cgacagctcactgctgttgcgggcc

SEQ ID NO: 5769547 - DNA, 25 bp, Homo sapien
gggtacgactccagctcctccttgg

SEQ ID NO: 5769548 - DNA, 25 bp, Homo sapien
accctctcgggggtctgctagcgct

SEQ ID NO: 5769549 - DNA, 25 bp, Homo sapien
gctcctgcggccgcgttcccggtgc

SEQ ID NO: 5769550 - DNA, 25 bp, Homo sapien
tgcagaaccgccaggtcaggacccc

SEQ ID NO: 5769551 - DNA, 25 bp, Homo sapien
gcgccggctcctgcggccgcgttcc

SEQ ID NO: 5769552 - DNA, 25 bp, Homo sapien
ttggcccgcagcgtcagcaagccct

SEQ ID NO: 5769553 - DNA, 25 bp, Homo sapien
gccaggaatcaccttgaaggatgag

SEQ ID NO: 5769554 - DNA, 25 bp, Homo sapien
cggcttggcccgcagcgtcagcaag

SEQ ID NO: 5769555 - DNA, 25 bp, Homo sapien
gaggaggaggacaggctgcctggag

SEQ ID NO: 5769556 - DNA, 25 bp, Homo sapien
gagggtcaggacaggctgcctggag

SEQ ID NO: 5769557 - DNA, 25 bp, Homo sapien
ctcggccctggctatccatgacggc

SEQ ID NO: 5769558 - DNA, 25 bp, Homo sapien
cgggtctgtatgggggtccctcctc

SEQ ID NO: 5769559 - DNA, 25 bp, Homo sapien
cggatcagctccgccccgaggcgca

SEQ ID NO: 5769560 - DNA, 25 bp, Homo sapien
ccgcctccgccgacttctgcagcct

SEQ ID NO: 5769561 - DNA, 25 bp, Homo sapien
cttcagaagatcgacttccgctatt

SEQ ID NO: 5769562 - DNA, 25 bp, Homo sapien
gtcagcgttgctcgaggtccccacc

SEQ ID NO: 5769563 - DNA, 25 bp, Homo sapien
tggtcgggagacactcgcagcagca

SEQ ID NO: 5769564 - DNA, 25 bp, Homo sapien
gtggagtgacgttgtcccgcagcag

SEQ ID NO: 5769565 - DNA, 25 bp, Homo sapien
cgatggcctttcttcccatgcgtgc

SEQ ID NO: 5769566 - DNA, 25 bp, Homo sapien
gggtcagtgaccggcggctcccagc

SEQ ID NO: 5769567 - DNA, 25 bp, Homo sapien
tcccgcagcagcgccacggcatccg

SEQ ID NO: 5769568 - DNA, 25 bp, Homo sapien
gcgcaggccctggaagaagtgcacg

SEQ ID NO: 5769569 - DNA, 25 bp, Homo sapien
atgcggccgccgcacactgctcgcg

SEQ ID NO: 5769570 - DNA, 25 bp, Homo sapien
cggggacagctccagcccggggcgg

SEQ ID NO: 5769571 - DNA, 25 bp, Homo sapien
accgacagctcactgctgttgcggg

SEQ ID NO: 5769572 - DNA, 25 bp, Homo sapien
tccccgcggcccgagcggtaattgt

SEQ ID NO: 5769573 - DNA, 25 bp, Homo sapien
acgggcggcgctgcaggggcggggt

SEQ ID NO: 5769574 - DNA, 25 bp, Homo sapien
aatcaccttgaaggatgagtttgac

SEQ ID NO: 5769575 - DNA, 25 bp, Homo sapien
cctgccgggtggcatcaccgcgtca

SEQ ID NO: 5769576 - DNA, 25 bp, Homo sapien
gccacggcatccgatgtcagatgcg

SEQ ID NO: 5769577 - DNA, 25 bp, Homo sapien
tgtatgggggtccctcctccgggga

SEQ ID NO: 5769578 - DNA, 25 bp, Homo sapien
tgccgcgcagccgggccagcaggct

SEQ ID NO: 5769579 - DNA, 25 bp, Homo sapien
cacggggcctcgtcactctttgcga

SEQ ID NO: 5769580 - DNA, 25 bp, Homo sapien
tgcagcacgtcggtgtactcggcct

SEQ ID NO: 5769581 - DNA, 25 bp, Homo sapien
actcgcagcagcatctcctgtgccc

SEQ ID NO: 5769582 - DNA, 25 bp, Homo sapien
gggggaagaccagggccggagcaga

SEQ ID NO: 5769583 - DNA, 25 bp, Homo sapien
catcgtcctcacccaggcagaacgt

SEQ ID NO: 5769584 - DNA, 25 bp, Homo sapien
cgtcactctttgcgaagggcgcctg

SEQ ID NO: 5769585 - DNA, 25 bp, Homo sapien
gcaaggctggtgttagcaatggcga

SEQ ID NO: 5769586 - DNA, 25 bp, Homo sapien
tctcagcggcgggcgagcggtcgcg

SEQ ID NO: 5769587 - DNA, 25 bp, Homo sapien
tccccactcccagccagtccagatc

SEQ ID NO: 5769588 - DNA, 25 bp, Homo sapien
gtaggaagtaagacagtcgggtcag

SEQ ID NO: 5769589 - DNA, 25 bp, Homo sapien
tcaggatgtccacttcccgctccgc

SEQ ID NO: 5769590 - DNA, 25 bp, Homo sapien
aggctgctgagggtcaggacaggct

SEQ ID NO: 5769591 - DNA, 25 bp, Homo sapien
tcgcagcagcatctcctgtgcccag

SEQ ID NO: 5769592 - DNA, 25 bp, Homo sapien
gccctggctatccatgacggccaac

SEQ ID NO: 5769593 - DNA, 25 bp, Homo sapien
gctctctacgtcgtcgaacacgtgg

SEQ ID NO: 5769594 - DNA, 25 bp, Homo sapien
tcaggcctctgcgcctcctctgcct

SEQ ID NO: 5769595 - DNA, 25 bp, Homo sapien
ctgcaccctctcgggggtctgctag

SEQ ID NO: 5769596 - DNA, 25 bp, Homo sapien
ctgggccgcatattacaatgctcag

SEQ ID NO: 5769597 - DNA, 25 bp, Homo sapien
cgcacactgctcgcgaactccggcc

SEQ ID NO: 5769598 - DNA, 25 bp, Homo sapien
cttgaccgacagctcactgctgttg

SEQ ID NO: 5769599 - DNA, 25 bp, Homo sapien
ggaggcatcctccacggtatgcacg

SEQ ID NO: 5769600 - DNA, 25 bp, Homo sapien
gcgcgctcgggttcctggcacacga

SEQ ID NO: 5769601 - DNA, 25 bp, Homo sapien
gctctacggtgctgatcactgcgcg

SEQ ID NO: 5769602 - DNA, 25 bp, Homo sapien
gccatcgtcctcacccaggcagaac

SEQ ID NO: 5769603 - DNA, 25 bp, Homo sapien
tgaggctcagattctggctccaagt

SEQ ID NO: 5769604 - DNA, 25 bp, Homo sapien
cggcatccgatgtcagatgcggccg

SEQ ID NO: 5769605 - DNA, 25 bp, Homo sapien
actccagctgaggctcagattctgg

SEQ ID NO: 5769606 - DNA, 25 bp, Homo sapien
cctgctgtgtcgcttgggtcacctg

SEQ ID NO: 5769607 - DNA, 25 bp, Homo sapien
tgttgcgggcctggaagtcataatt

SEQ ID NO: 5769608 - DNA, 25 bp, Homo sapien
gtcgggctgcgcgcgctcgggttcc

SEQ ID NO: 5769609 - DNA, 25 bp, Homo sapien
gcagcaaggatcgttaagtctgtcc

SEQ ID NO: 5769610 - DNA, 25 bp, Homo sapien
gggacagctccagcccggggcgggt

SEQ ID NO: 5769611 - DNA, 25 bp, Homo sapien
cccgcggcccgagcggtaattgtgc

SEQ ID NO: 5769612 - DNA, 25 bp, Homo sapien
gctccagcccggggcgggtccacga

SEQ ID NO: 5769613 - DNA, 25 bp, Homo sapien
gtgtcgcttgggtcacctgccggcg

SEQ ID NO: 5769614 - DNA, 25 bp, Homo sapien
cacgatggcgcccagtgggtacgac

SEQ ID NO: 5769615 - DNA, 25 bp, Homo sapien
tttataggctgggccgcatattaca

SEQ ID NO: 5769616 - DNA, 25 bp, Homo sapien
cacctcgccttccaccttcttcttt

SEQ ID NO: 5769617 - DNA, 25 bp, Homo sapien
aggcgcggctctgcgggtcagtgac

SEQ ID NO: 5769618 - DNA, 25 bp, Homo sapien
tgccgggtggcatcaccgcgtcaca

SEQ ID NO: 5769619 - DNA, 25 bp, Homo sapien
ggcgtacttgatcttctgcagcacg

SEQ ID NO: 5769620 - DNA, 25 bp, Homo sapien
cagcatctcctgtgcccagactcgg

SEQ ID NO: 5769621 - DNA, 25 bp, Homo sapien
tggaagaagtgcacgtcgggctgcg

SEQ ID NO: 5769622 - DNA, 25 bp, Homo sapien
gaagtaagacagtcgggtcaggcgg

SEQ ID NO: 5769623 - DNA, 25 bp, Homo sapien
cggcgggcgagcggtcgcgctgcaa

SEQ ID NO: 5769624 - DNA, 25 bp, Homo sapien
ctctgcgggtcagtgaccggcggct

SEQ ID NO: 5769625 - DNA, 25 bp, Homo sapien
tctctacgtcgtcgaacacgtggtt

SEQ ID NO: 5769626 - DNA, 25 bp, Homo sapien
gcgctccccgcggcccgagcggtaa

SEQ ID NO: 5769627 - DNA, 25 bp, Homo sapien
aaggctggtgttagcaatggcgagg

SEQ ID NO: 5769628 - DNA, 25 bp, Homo sapien
aggcgcaggccctggaagaagtgca

SEQ ID NO: 5769629 - DNA, 25 bp, Homo sapien
gagctcgttttcacgtggagtgacg

SEQ ID NO: 5769630 - DNA, 25 bp, Homo sapien
acagtcgggtcaggcggggccaggc

SEQ ID NO: 5769631 - DNA, 25 bp, Homo sapien
caccctggccgcctccgccgacttc

SEQ ID NO: 5769632 - DNA, 25 bp, Homo sapien
acaatgctcagggctccactgcacc

SEQ ID NO: 5769633 - DNA, 25 bp, Homo sapien
tccgttctcccacggggcctcgtca

SEQ ID NO: 5769634 - DNA, 25 bp, Homo sapien
accggctcaggcctctgcgcctcct

SEQ ID NO: 5769635 - DNA, 25 bp, Homo sapien
cccacggggcctcgtcactctttgc

SEQ ID NO: 5769636 - DNA, 25 bp, Homo sapien
gggtccctcctccggggacagctcc

SEQ ID NO: 5769637 - DNA, 25 bp, Homo sapien
gcagcagcatctcctgtgcccagac

SEQ ID NO: 5769638 - DNA, 25 bp, Homo sapien
agcctcgatacaaagctctctacgt

SEQ ID NO: 5769639 - DNA, 25 bp, Homo sapien
cggcccgagcggtaattgtgcagag

SEQ ID NO: 5769640 - DNA, 25 bp, Homo sapien
ctcgtcactctttgcgaagggcgcc

SEQ ID NO: 5769641 - DNA, 25 bp, Homo sapien
gcgacctggggggcgctttgctgta

SEQ ID NO: 5769642 - DNA, 25 bp, Homo sapien
ccgctgaagaactcgggtctgtatg

SEQ ID NO: 5769643 - DNA, 25 bp, Homo sapien
gctcgggttcctggcacacgagcag

SEQ ID NO: 5769644 - DNA, 25 bp, Homo sapien
gtcgagcagcgtgacatggtcggga

SEQ ID NO: 5769645 - DNA, 25 bp, Homo sapien
atcctccacggtatgcacgccatcg

SEQ ID NO: 5769646 - DNA, 25 bp, Homo sapien
aggccaggaatcaccttgaaggatg

SEQ ID NO: 5769647 - DNA, 25 bp, Homo sapien
cacgagcagcagcaacgagcggctc

SEQ ID NO: 5769648 - DNA, 25 bp, Homo sapien
gcatccgatgtcagatgcggccgcc

SEQ ID NO: 5769649 - DNA, 25 bp, Homo sapien
ctgctagcgctttccgtagactgtc

SEQ ID NO: 5769650 - DNA, 25 bp, Homo sapien
gcctcctctgcctcgggaatgggct

SEQ ID NO: 5769651 - DNA, 25 bp, Homo sapien
ggtcggcgatgttgccgcgcagccg

SEQ ID NO: 5769652 - DNA, 25 bp, Homo sapien
acactcgcagcagcatctcctgtgc

SEQ ID NO: 5769653 - DNA, 25 bp, Homo sapien
gctgtttctcaactgggtcctccca

SEQ ID NO: 5769654 - DNA, 25 bp, Homo sapien
ggtgctggcaaagaggaaacgcaag

SEQ ID NO: 5769655 - DNA, 25 bp, Homo sapien
ggcgaggacgatggcctttcttccc

SEQ ID NO: 5769656 - DNA, 25 bp, Homo sapien
cttgatcttctgcagcacgtcggtg

SEQ ID NO: 5769657 - DNA, 25 bp, Homo sapien
gggaatgggcttcgcctggggtcgt

SEQ ID NO: 5769658 - DNA, 25 bp, Homo sapien
cctggctatccatgacggccaactt

SEQ ID NO: 5769659 - DNA, 25 bp, Homo sapien
ggtccggggaggccgagtcagcgtt

SEQ ID NO: 5769660 - DNA, 25 bp, Homo sapien
gggtggcatcaccgcgtcacagcgc

SEQ ID NO: 5769661 - DNA, 25 bp, Homo sapien
ttctctttgtcctccaggacctcca

SEQ ID NO: 5769662 - DNA, 25 bp, Homo sapien
ctgccggcgcctccgctcgtgctgt

SEQ ID NO: 5769663 - DNA, 25 bp, Homo sapien
gggttcctggcacacgagcagcagc

SEQ ID NO: 5769664 - DNA, 25 bp, Homo sapien
gcggcgctgcaggggcggggtctca

SEQ ID NO: 5769665 - DNA, 25 bp, Homo sapien
gccgcatattacaatgctcagggct

SEQ ID NO: 5769666 - DNA, 25 bp, Homo sapien
gctttccgtagactgtctccacgcc

SEQ ID NO: 5769667 - DNA, 25 bp, Homo sapien
gggcgctttgctgtaggaagtaaga

SEQ ID NO: 5769668 - DNA, 25 bp, Homo sapien
gatgtcctctcggatcagctccgcc

SEQ ID NO: 5769669 - DNA, 25 bp, Homo sapien
gccgacttctgcagcctcgatacaa

SEQ ID NO: 5769670 - DNA, 25 bp, Homo sapien
tcgtcctcacccaggcagaacgtca

SEQ ID NO: 5769671 - DNA, 25 bp, Homo sapien
agcagcatctcctgtgcccagactc

SEQ ID NO: 5769672 - DNA, 25 bp, Homo sapien
cggctcaggcctctgcgcctcctct

SEQ ID NO: 5769673 - DNA, 25 bp, Homo sapien
caggcggggccaggcggaccggccg

SEQ ID NO: 5769674 - DNA, 25 bp, Homo sapien
gctgttgcgggcctggaagtcataa

SEQ ID NO: 5769675 - DNA, 25 bp, Homo sapien
cagctctgacactttctctttgtcc

SEQ ID NO: 5769676 - DNA, 25 bp, Homo sapien
gggcggggtctcagcggcgggcgag

SEQ ID NO: 5769677 - DNA, 25 bp, Homo sapien
caacgagcggctcctgccgggtggc

SEQ ID NO: 5769678 - DNA, 25 bp, Homo sapien
gccctggaagaagtgcacgtcgggc

SEQ ID NO: 5769679 - DNA, 25 bp, Homo sapien
cctgcgtggccctgagcgccgccgc

SEQ ID NO: 5769680 - DNA, 25 bp, Homo sapien
atggcgcccagtgggtacgactcca

SEQ ID NO: 5769681 - DNA, 25 bp, Homo sapien
cagccagtgtcaatcctagaagata

SEQ ID NO: 5769682 - DNA, 25 bp, Homo sapien
gctgcaactcctcctgcgtggccct

SEQ ID NO: 5769683 - DNA, 25 bp, Homo sapien
tcttcccatgcgtgctgcaagggag

SEQ ID NO: 5769684 - DNA, 25 bp, Homo sapien
tgcgtggccctgagcgccgccgccc

SEQ ID NO: 5769685 - DNA, 25 bp, Homo sapien
tgtccacttcccgctccgcctgcag

SEQ ID NO: 5769686 - DNA, 25 bp, Homo sapien
cgcttgggtcacctgccggcgcctc

SEQ ID NO: 5769687 - DNA, 25 bp, Homo sapien
acctccagtacgtcccgctgcttga

SEQ ID NO: 5769688 - DNA, 25 bp, Homo sapien
ctcctccttggaggccgggtcgagc

SEQ ID NO: 5769689 - DNA, 25 bp, Homo sapien
tcctcctgcgtggccctgagcgccg

SEQ ID NO: 5769690 - DNA, 25 bp, Homo sapien
gaagaagtgcacgtcgggctgcgcg

SEQ ID NO: 5769691 - DNA, 25 bp, Homo sapien
cttttgcttctccatcactgcctcc

SEQ ID NO: 5769692 - DNA, 25 bp, Homo sapien
gccggcgcctccgctcgtgctgtag

SEQ ID NO: 5769693 - DNA, 25 bp, Homo sapien
cggctcctgcggccgcgttcccggt

SEQ ID NO: 5769694 - DNA, 25 bp, Homo sapien
aggaagtgcaacagctccggagagg

SEQ ID NO: 5769695 - DNA, 25 bp, Homo sapien
gcgcggactgacgggcggcgctgca

SEQ ID NO: 5769696 - DNA, 25 bp, Homo sapien
tccagctctgacactttctctttgt

SEQ ID NO: 5769697 - DNA, 25 bp, Homo sapien
caggagaggctgctgagggtcagga

SEQ ID NO: 5769698 - DNA, 25 bp, Homo sapien
ggcggggccaggcggaccggccgcg

SEQ ID NO: 5769699 - DNA, 25 bp, Homo sapien
agtcgggtcaggcggggccaggcgg

SEQ ID NO: 5769700 - DNA, 25 bp, Homo sapien
ctcctctgcctcgggaatgggcttc

SEQ ID NO: 5769701 - DNA, 25 bp, Homo sapien
tgatcactgcgcggactgacgggcg

SEQ ID NO: 5769702 - DNA, 25 bp, Homo sapien
gtcggtgtactcggcctccgagggc

SEQ ID NO: 5769703 - DNA, 25 bp, Homo sapien
tcactctttgcgaagggcgcctggc

SEQ ID NO: 5769704 - DNA, 25 bp, Homo sapien
caccgggatgggggaagaccagggc

SEQ ID NO: 5769705 - DNA, 25 bp, Homo sapien
cgcctgcagaaccgccaggtcagga

SEQ ID NO: 5769706 - DNA, 25 bp, Homo sapien
tcccagccgctgaagaactcgggtc

SEQ ID NO: 5769707 - DNA, 25 bp, Homo sapien
ggctctgcgggtcagtgaccggcgg

SEQ ID NO: 5769708 - DNA, 25 bp, Homo sapien
tcgggttcctggcacacgagcagca

SEQ ID NO: 5769709 - DNA, 25 bp, Homo sapien
caaggccaggagaggctgctgaggg

SEQ ID NO: 5769710 - DNA, 25 bp, Homo sapien
accttgaaggatgagtttgacagcc

SEQ ID NO: 5769711 - DNA, 25 bp, Homo sapien
taagtctgtccaccgggatggggga

SEQ ID NO: 5769712 - DNA, 25 bp, Homo sapien
ggcggcttggcccgcagcgtcagca

SEQ ID NO: 5769713 - DNA, 25 bp, Homo sapien
gcctccgccgacttctgcagcctcg

SEQ ID NO: 5769714 - DNA, 25 bp, Homo sapien
tccatcactgcctccagctctgaca

SEQ ID NO: 5769715 - DNA, 25 bp, Homo sapien
caggacccattttcctgctgtctct

SEQ ID NO: 5769716 - DNA, 25 bp, Homo sapien
tccaggacctccagtacgtcccgct

SEQ ID NO: 5769717 - DNA, 25 bp, Homo sapien
ccgaaaaggaagtgcaacagctccg

SEQ ID NO: 5769718 - DNA, 25 bp, Homo sapien
ctcgggtctgtatgggggtccctcc

SEQ ID NO: 5769719 - DNA, 25 bp, Homo sapien
gtcccccagcgaggtccagagctcg

SEQ ID NO: 5769720 - DNA, 25 bp, Homo sapien
cgcccagtgggtacgactccagctc

SEQ ID NO: 5769721 - DNA, 25 bp, Homo sapien
ctcggccctgctgtgtcgcttgggt

SEQ ID NO: 5769722 - DNA, 25 bp, Homo sapien
gctcagattctggctccaagtctcg

SEQ ID NO: 5769723 - DNA, 25 bp, Homo sapien
cctcacccaggcagaacgtcaccag

SEQ ID NO: 5769724 - DNA, 25 bp, Homo sapien
gcggggtctcagcggcgggcgagcg

SEQ ID NO: 5769725 - DNA, 25 bp, Homo sapien
tcgggtcaggcggggccaggcggac

SEQ ID NO: 5769726 - DNA, 25 bp, Homo sapien
ggctctgccaaggccaggagaggct

SEQ ID NO: 5769727 - DNA, 25 bp, Homo sapien
gcagcctcgatacaaagctctctac

SEQ ID NO: 5769728 - DNA, 25 bp, Homo sapien
acgtggagtgacgttgtcccgcagc

SEQ ID NO: 5769729 - DNA, 25 bp, Homo sapien
agccgctgaagaactcgggtctgta

SEQ ID NO: 5769730 - DNA, 25 bp, Homo sapien
cgtcccgctgcttgaccgacagctc

SEQ ID NO: 5769731 - DNA, 25 bp, Homo sapien
cccagactcggccctggctatccat

SEQ ID NO: 5769732 - DNA, 25 bp, Homo sapien
cccactcccagccagtccagatcct

SEQ ID NO: 5769733 - DNA, 25 bp, Homo sapien
tggccatccttcagaagatcgactt

SEQ ID NO: 5769734 - DNA, 25 bp, Homo sapien
cctcccaggcgcggctctgcgggtc

SEQ ID NO: 5769735 - DNA, 25 bp, Homo sapien
agaggctgctgagggtcaggacagg

SEQ ID NO: 5769736 - DNA, 25 bp, Homo sapien
cggtgctgatcactgcgcggactga

SEQ ID NO: 5769737 - DNA, 25 bp, Homo sapien
tagctgtttctcaactgggtcctcc

SEQ ID NO: 5769738 - DNA, 25 bp, Homo sapien
attctggctccaagtctcggtgacc

SEQ ID NO: 5769739 - DNA, 25 bp, Homo sapien
gcgttgctcgaggtccccaccggct

SEQ ID NO: 5769740 - DNA, 25 bp, Homo sapien
gtgtcaatcctagaagataggggtg

SEQ ID NO: 5769741 - DNA, 25 bp, Homo sapien
aggctgcctggaggaggaggacagg

SEQ ID NO: 5769742 - DNA, 25 bp, Homo sapien
ggcaaagaggaaacgcaaggctggt

SEQ ID NO: 5769743 - DNA, 25 bp, Homo sapien
atggcgaggacgatggcctttcttc

SEQ ID NO: 5769744 - DNA, 25 bp, Homo sapien
ctgctgtctctgactccagctgagg

SEQ ID NO: 5769745 - DNA, 25 bp, Homo sapien
aaggcgtacttgatcttctgcagca

SEQ ID NO: 5769746 - DNA, 25 bp, Homo sapien
cagcgaggtccagagctcgttttca

SEQ ID NO: 5769747 - DNA, 25 bp, Homo sapien
atctcctgtgcccagactcggccct

SEQ ID NO: 5769748 - DNA, 25 bp, Homo sapien
ccgggtggcatcaccgcgtcacagc

SEQ ID NO: 5769749 - DNA, 25 bp, Homo sapien
cccgcagcgtcagcaagccctcccc

SEQ ID NO: 5769750 - DNA, 25 bp, Homo sapien
ctcctgcgtggccctgagcgccgcc

SEQ ID NO: 5769751 - DNA, 25 bp, Homo sapien
gggtcctcccaggcgcggctctgcg

SEQ ID NO: 5769752 - DNA, 25 bp, Homo sapien
ggggtcggcgatgttgccgcgcagc

SEQ ID NO: 5769753 - DNA, 25 bp, Homo sapien
gtcgaacacgtggttcaggatgtcc

SEQ ID NO: 5769754 - DNA, 25 bp, Homo sapien
cgtagactgtctccacgccctcccc

SEQ ID NO: 5769755 - DNA, 25 bp, Homo sapien
attttcctgctgtctctgactccag

SEQ ID NO: 5769756 - DNA, 25 bp, Homo sapien
gcgcggctctgcgggtcagtgaccg

SEQ ID NO: 5769757 - DNA, 25 bp, Homo sapien
gaactcgggtctgtatgggggtccc

SEQ ID NO: 5769758 - DNA, 25 bp, Homo sapien
ccgctccgcctgcagaaccgccagg

SEQ ID NO: 5769759 - DNA, 25 bp, Homo sapien
gtttgacagccagtgtcaatcctag

SEQ ID NO: 5769760 - DNA, 25 bp, Homo sapien
gggtcaggcggggccaggcggaccg

SEQ ID NO: 5769761 - DNA, 25 bp, Homo sapien
actcggcctccgagggcggcttggc

SEQ ID NO: 5769762 - DNA, 25 bp, Homo sapien
ctcgaggtccccaccggctcaggcc

SEQ ID NO: 5769763 - DNA, 25 bp, Homo sapien
catgacggccaacttcctggaggca

SEQ ID NO: 5769764 - DNA, 25 bp, Homo sapien
caatcctagaagataggggtgttct

SEQ ID NO: 5769765 - DNA, 25 bp, Homo sapien
cggtgtactcggcctccgagggcgg

SEQ ID NO: 5769766 - DNA, 25 bp, Homo sapien
tgtctctgactccagctgaggctca

SEQ ID NO: 5769767 - DNA, 25 bp, Homo sapien
tccaagtctcggtgaccattgacag

SEQ ID NO: 5769768 - DNA, 25 bp, Homo sapien
gaggccgagtcagcgttgctcgagg

SEQ ID NO: 5769769 - DNA, 25 bp, Homo sapien
gctccactgcaccctctcgggggtc

SEQ ID NO: 5769770 - DNA, 25 bp, Homo sapien
gcaggctgaaggcgtacttgatctt

SEQ ID NO: 5769771 - DNA, 25 bp, Homo sapien
tttccgtagactgtctccacgccct

SEQ ID NO: 5769772 - DNA, 25 bp, Homo sapien
ctctgcgcctcctctgcctcgggaa

SEQ ID NO: 5769773 - DNA, 25 bp, Homo sapien
aggcctctgcgcctcctctgcctcg

SEQ ID NO: 5769774 - DNA, 25 bp, Homo sapien
gagggcaggccaggaatcaccttga

SEQ ID NO: 5769775 - DNA, 25 bp, Homo sapien
ttagcaatggcgaggacgatggcct

SEQ ID NO: 5769776 - DNA, 25 bp, Homo sapien
atcttctgcagcacgtcggtgtact

SEQ ID NO: 5769777 - DNA, 25 bp, Homo sapien
gacgatggcctttcttcccatgcgt

SEQ ID NO: 5769778 - DNA, 25 bp, Homo sapien
agaccagggccggagcagattggcc

SEQ ID NO: 5769779 - DNA, 25 bp, Homo sapien
tcggtgaccattgacagcgacctgg

SEQ ID NO: 5769780 - DNA, 25 bp, Homo sapien
gcccgaaaaggaagtgcaacagctc

SEQ ID NO: 5769781 - DNA, 25 bp, Homo sapien
ggctggtgttagcaatggcgaggac

SEQ ID NO: 5769782 - DNA, 25 bp, Homo sapien
agtacgtcccgctgcttgaccgaca

SEQ ID NO: 5769783 - DNA, 25 bp, Homo sapien
tacggtgctgatcactgcgcggact

SEQ ID NO: 5769784 - DNA, 25 bp, Homo sapien
tttgcttctccatcactgcctccag

SEQ ID NO: 5769785 - DNA, 25 bp, Homo sapien
cagccagtccagatcctctccggag

SEQ ID NO: 5769786 - DNA, 25 bp, Homo sapien
cctggatgtcctctcggatcagctc

SEQ ID NO: 5769787 - DNA, 25 bp, Homo sapien
tcaccttgaaggatgagtttgacag

SEQ ID NO: 5769788 - DNA, 25 bp, Homo sapien
ggtcaaatgacctccatttccacct

SEQ ID NO: 5769789 - DNA, 25 bp, Homo sapien
ggtcacctgccggcgcctccgctcg

SEQ ID NO: 5769790 - DNA, 25 bp, Homo sapien
gcatcctccacggtatgcacgccat

SEQ ID NO: 5769791 - DNA, 25 bp, Homo sapien
acgcaaggctggtgttagcaatggc

SEQ ID NO: 5769792 - DNA, 25 bp, Homo sapien
ccgggccagcaggctgaaggcgtac

SEQ ID NO: 5769793 - DNA, 25 bp, Homo sapien
agatgcggccgccgcacactgctcg

SEQ ID NO: 5769794 - DNA, 25 bp, Homo sapien
ggccgggtcgagcagcgtgacatgg

SEQ ID NO: 5769795 - DNA, 25 bp, Homo sapien
gatcgacttccgctattggggagag

SEQ ID NO: 5769796 - DNA, 25 bp, Homo sapien
ccggtgctccagcaccctggccgcc

SEQ ID NO: 5769797 - DNA, 25 bp, Homo sapien
ggagtgacgttgtcccgcagcagcg

SEQ ID NO: 5769798 - DNA, 25 bp, Homo sapien
tgacgttgtcccgcagcagcgccac

SEQ ID NO: 5769799 - DNA, 25 bp, Homo sapien
ccagcaccctggccgcctccgccga

SEQ ID NO: 5769800 - DNA, 25 bp, Homo sapien
tgtagctgtttctcaactgggtcct

SEQ ID NO: 5769801 - DNA, 25 bp, Homo sapien
tccatttccacctcgccttccacct

SEQ ID NO: 5769802 - DNA, 25 bp, Homo sapien
gcgggtcagtgaccggcggctccca

SEQ ID NO: 5769803 - DNA, 25 bp, Homo sapien
gagtttgacagccagtgtcaatcct

SEQ ID NO: 5769804 - DNA, 25 bp, Homo sapien
gtctgctagcgctttccgtagactg

SEQ ID NO: 5769805 - DNA, 25 bp, Homo sapien
acttctgcagcctcgatacaaagct

SEQ ID NO: 5769806 - DNA, 25 bp, Homo sapien
gacccaggtccggggaggccgagtc

SEQ ID NO: 5769807 - DNA, 25 bp, Homo sapien
ttttttaagcacggaggctgtttat

SEQ ID NO: 5769808 - DNA, 25 bp, Homo sapien
gttaagtctgtccaccgggatgggg

SEQ ID NO: 5769809 - DNA, 25 bp, Homo sapien
cagtgggtacgactccagctcctcc

SEQ ID NO: 5769810 - DNA, 25 bp, Homo sapien
accattgacagcgacctggggggcg

SEQ ID NO: 5769811 - DNA, 25 bp, Homo sapien
gaatgggcttcgcctggggtcgtcc

SEQ ID NO: 5769812 - DNA, 25 bp, Homo sapien
gggtccacgagtcccccagcgaggt

SEQ ID NO: 5769813 - DNA, 25 bp, Homo sapien
ttttaagcacggaggctgtttatag

SEQ ID NO: 5769814 - DNA, 25 bp, Homo sapien
ccggcggctcccagccgctgaagaa

SEQ ID NO: 5769815 - DNA, 25 bp, Homo sapien
gccctgagcgccgccgccctgcgct

SEQ ID NO: 5769816 - DNA, 25 bp, Homo sapien
gggagagtctgaggagtccgttctc

SEQ ID NO: 5769817 - DNA, 25 bp, Homo sapien
tggatgtcctctcggatcagctccg

SEQ ID NO: 5769818 - DNA, 25 bp, Homo sapien
gttttcacgtggagtgacgttgtcc

SEQ ID NO: 5769819 - DNA, 25 bp, Homo sapien
gaggacacgaggggctctgccaagg

SEQ ID NO: 5769820 - DNA, 25 bp, Homo sapien
gacatggtcgggagacactcgcagc

SEQ ID NO: 5769821 - DNA, 25 bp, Homo sapien
tccggggacagctccagcccggggc

SEQ ID NO: 5769822 - DNA, 25 bp, Homo sapien
tctcaactgggtcctcccaggcgcg

SEQ ID NO: 5769823 - DNA, 25 bp, Homo sapien
ctggccgcctccgccgacttctgca

SEQ ID NO: 5769824 - DNA, 25 bp, Homo sapien
cagcaggctgaaggcgtacttgatc

SEQ ID NO: 5769825 - DNA, 25 bp, Homo sapien
ctgctgttgcgggcctggaagtcat

SEQ ID NO: 5769826 - DNA, 25 bp, Homo sapien
cgacttctgcagcctcgatacaaag

SEQ ID NO: 5769827 - DNA, 25 bp, Homo sapien
actgcctccagctctgacactttct

SEQ ID NO: 5769828 - DNA, 25 bp, Homo sapien
gaagaccagggccggagcagattgg

SEQ ID NO: 5769829 - DNA, 25 bp, Homo sapien
tggaggaggagggcaggccaggaat

SEQ ID NO: 5769830 - DNA, 25 bp, Homo sapien
tctgcagcacgtcggtgtactcggc

SEQ ID NO: 5769831 - DNA, 25 bp, Homo sapien
gtctgaggagtccgttctcccacgg

SEQ ID NO: 5769832 - DNA, 25 bp, Homo sapien
gatgtcagatgcggccgccgcacac

SEQ ID NO: 5769833 - DNA, 25 bp, Homo sapien
ggtgctccagcaccctggccgcctc

SEQ ID NO: 5769834 - DNA, 25 bp, Homo sapien
ttacaatgctcagggctccactgca

SEQ ID NO: 5769835 - DNA, 25 bp, Homo sapien
ctgcgcctcctctgcctcgggaatg

SEQ ID NO: 5769836 - DNA, 25 bp, Homo sapien
caacagctccggagaggaggggtcg

SEQ ID NO: 5769837 - DNA, 25 bp, Homo sapien
cccggcgccggctcctgcggccgcg

SEQ ID NO: 5769838 - DNA, 25 bp, Homo sapien
agggcggcttggcccgcagcgtcag

SEQ ID NO: 5769839 - DNA, 25 bp, Homo sapien
ggtccagagctcgttttcacgtgga

SEQ ID NO: 5769840 - DNA, 25 bp, Homo sapien
tcctctcggatcagctccgccccga

SEQ ID NO: 5769841 - DNA, 25 bp, Homo sapien
cttctgcagcacgtcggtgtactcg

SEQ ID NO: 5769842 - DNA, 25 bp, Homo sapien
agaagtgcacgtcgggctgcgcgcg

SEQ ID NO: 5769843 - DNA, 25 bp, Homo sapien
gctgcctggaggaggaggacaggct

SEQ ID NO: 5769844 - DNA, 25 bp, Homo sapien
cctcgggaatgggcttcgcctgggg

SEQ ID NO: 5769845 - DNA, 25 bp, Homo sapien
ggccgccgcacactgctcgcgaact

SEQ ID NO: 5769846 - DNA, 25 bp, Homo sapien
gcggctcctgccgggtggcatcacc

SEQ ID NO: 5769847 - DNA, 25 bp, Homo sapien
aggggcggggtctcagcggcgggcg

SEQ ID NO: 5769848 - DNA, 25 bp, Homo sapien
ccgagcggtaattgtgcagagcccc

SEQ ID NO: 5769849 - DNA, 25 bp, Homo sapien
cgtcaccaggtgctggcaaagagga

SEQ ID NO: 5769850 - DNA, 25 bp, Homo sapien
gggtctgctagcgctttccgtagac

SEQ ID NO: 5769851 - DNA, 25 bp, Homo sapien
acgtcgggctgcgcgcgctcgggtt

SEQ ID NO: 5769852 - DNA, 25 bp, Homo sapien
aggcatcctccacggtatgcacgcc

SEQ ID NO: 5769853 - DNA, 25 bp, Homo sapien
caggaatcaccttgaaggatgagtt

SEQ ID NO: 5769854 - DNA, 25 bp, Homo sapien
cggtatgcacgccatcgtcctcacc

SEQ ID NO: 5769855 - DNA, 25 bp, Homo sapien
ggacttcccagcctcggccctgctg

SEQ ID NO: 5769856 - DNA, 25 bp, Homo sapien
tcaaatgacctccatttccacctcg

SEQ ID NO: 5769857 - DNA, 25 bp, Homo sapien
cgctattggggagagtctgaggagt

SEQ ID NO: 5769858 - DNA, 25 bp, Homo sapien
gaggggctctgccaaggccaggaga

SEQ ID NO: 5769859 - DNA, 25 bp, Homo sapien
cattgacagcgacctggggggcgct

SEQ ID NO: 5769860 - DNA, 25 bp, Homo sapien
ccggagaggaggggtcggcgatgtt

SEQ ID NO: 5769861 - DNA, 25 bp, Homo sapien
gagtcagcgttgctcgaggtcccca

SEQ ID NO: 5769862 - DNA, 25 bp, Homo sapien
ccgctgcttgaccgacagctcactg

SEQ ID NO: 5769863 - DNA, 25 bp, Homo sapien
tccacctcgccttccaccttcttct

SEQ ID NO: 5769864 - DNA, 25 bp, Homo sapien
tgctgtgtcgcttgggtcacctgcc

SEQ ID NO: 5769865 - DNA, 25 bp, Homo sapien
agattctggctccaagtctcggtga

SEQ ID NO: 5769866 - DNA, 25 bp, Homo sapien
gagccccctggatgtcctctcggat

SEQ ID NO: 5769867 - DNA, 25 bp, Homo sapien
gagcggtaattgtgcagagccccct

SEQ ID NO: 5769868 - DNA, 25 bp, Homo sapien
tgaaggcgtacttgatcttctgcag

SEQ ID NO: 5769869 - DNA, 25 bp, Homo sapien
tagcgctttccgtagactgtctcca

SEQ ID NO: 5769870 - DNA, 25 bp, Homo sapien
tcgttttcacgtggagtgacgttgt

SEQ ID NO: 5769871 - DNA, 25 bp, Homo sapien
ctgcgggtcagtgaccggcggctcc

SEQ ID NO: 5769872 - DNA, 25 bp, Homo sapien
cagctccagcccggggcgggtccac

SEQ ID NO: 5769873 - DNA, 25 bp, Homo sapien
tataggctgggccgcatattacaat

SEQ ID NO: 5769874 - DNA, 25 bp, Homo sapien
ggcccgcgccccgctctacggtgct

SEQ ID NO: 5769875 - DNA, 25 bp, Homo sapien
cgcggcccgagcggtaattgtgcag

SEQ ID NO: 5769876 - DNA, 25 bp, Homo sapien
ggtctcagcggcgggcgagcggtcg

SEQ ID NO: 5769877 - DNA, 25 bp, Homo sapien
tccactgcaccctctcgggggtctg

SEQ ID NO: 5769878 - DNA, 25 bp, Homo sapien
gctcgcgaactccggcccccccgac

SEQ ID NO: 5769879 - DNA, 25 bp, Homo sapien
tcctgctgtctctgactccagctga

SEQ ID NO: 5769880 - DNA, 25 bp, Homo sapien
gccagtccagatcctctccggaggg

SEQ ID NO: 5769881 - DNA, 25 bp, Homo sapien
tgacgggcggcgctgcaggggcggg

SEQ ID NO: 5769882 - DNA, 25 bp, Homo sapien
gactcggccctggctatccatgacg

SEQ ID NO: 5769883 - DNA, 25 bp, Homo sapien
acgtgttcacaatcatctgcagagg

SEQ ID NO: 5769884 - DNA, 25 bp, Homo sapien
cgaggcgcaggccctggaagaagtg

SEQ ID NO: 5769885 - DNA, 25 bp, Homo sapien
acagcgcacgatggcgcccagtggg

SEQ ID NO: 5769886 - DNA, 25 bp, Homo sapien
tgtccaccgggatgggggaagacca

SEQ ID NO: 5769887 - DNA, 25 bp, Homo sapien
aacttcctggaggcatcctccacgg

SEQ ID NO: 5769888 - DNA, 25 bp, Homo sapien
gacagccagtgtcaatcctagaaga

SEQ ID NO: 5769889 - DNA, 25 bp, Homo sapien
attacacaggacccattttcctgct

SEQ ID NO: 5769890 - DNA, 25 bp, Homo sapien
ggacctccagtacgtcccgctgctt

SEQ ID NO: 5769891 - DNA, 25 bp, Homo sapien
cagctgaggctcagattctggctcc

SEQ ID NO: 5769892 - DNA, 25 bp, Homo sapien
gcgggcgagcggtcgcgctgcaact

SEQ ID NO: 5769893 - DNA, 25 bp, Homo sapien
gttcctggcacacgagcagcagcaa

SEQ ID NO: 5769894 - DNA, 25 bp, Homo sapien
actcctcctgcgtggccctgagcgc

SEQ ID NO: 5769895 - DNA, 25 bp, Homo sapien
ggccgcgttcccggtgctccagcac

SEQ ID NO: 5769896 - DNA, 25 bp, Homo sapien
cacttcccgctccgcctgcagaacc

SEQ ID NO: 5769897 - DNA, 25 bp, Homo sapien
gtcaggcggggccaggcggaccggc

SEQ ID NO: 5769898 - DNA, 25 bp, Homo sapien
cgtacttgatcttctgcagcacgtc

SEQ ID NO: 5769899 - DNA, 25 bp, Homo sapien
atcactgcgcggactgacgggcggc

SEQ ID NO: 5769900 - DNA, 25 bp, Homo sapien
ccaggcgcggctctgcgggtcagtg

SEQ ID NO: 5769901 - DNA, 25 bp, Homo sapien
tcccaggcgcggctctgcgggtcag

SEQ ID NO: 5769902 - DNA, 25 bp, Homo sapien
gcctggaagtcataattacacagga

SEQ ID NO: 5769903 - DNA, 25 bp, Homo sapien
ccaccggctcaggcctctgcgcctc

SEQ ID NO: 5769904 - DNA, 25 bp, Homo sapien
ggacccattttcctgctgtctctga

SEQ ID NO: 5769905 - DNA, 25 bp, Homo sapien
tccacggtatgcacgccatcgtcct

SEQ ID NO: 5769906 - DNA, 25 bp, Homo sapien
cggcgcctccgctcgtgctgtagct

SEQ ID NO: 5769907 - DNA, 25 bp, Homo sapien
cacacgagcagcagcaacgagcggc

SEQ ID NO: 5769908 - DNA, 25 bp, Homo sapien
aggctgaaggcgtacttgatcttct

SEQ ID NO: 5769909 - DNA, 25 bp, Homo sapien
cgaagggcgcctggcaggtcaaatg

SEQ ID NO: 5769910 - DNA, 25 bp, Homo sapien
cacggcatccgatgtcagatgcggc

SEQ ID NO: 5769911 - DNA, 25 bp, Homo sapien
agcaccctggccgcctccgccgact

SEQ ID NO: 5769912 - DNA, 25 bp, Homo sapien
ggaatcaccttgaaggatgagtttg

SEQ ID NO: 5769913 - DNA, 25 bp, Homo sapien
tcacctgccggcgcctccgctcgtg

SEQ ID NO: 5769914 - DNA, 25 bp, Homo sapien
aaggatgagtttgacagccagtgtc

SEQ ID NO: 5769915 - DNA, 25 bp, Homo sapien
gggaggacacgaggggctctgccaa

SEQ ID NO: 5769916 - DNA, 25 bp, Homo sapien
ggcctttcttcccatgcgtgctgca

SEQ ID NO: 5769917 - DNA, 25 bp, Homo sapien
taggctgggccgcatattacaatgc

SEQ ID NO: 5769918 - DNA, 25 bp, Homo sapien
tctgactccagctgaggctcagatt

SEQ ID NO: 5769919 - DNA, 25 bp, Homo sapien
ctctgccaaggccaggagaggctgc

SEQ ID NO: 5769920 - DNA, 25 bp, Homo sapien
tgcctggaggaggaggacaggctgc

SEQ ID NO: 5769921 - DNA, 25 bp, Homo sapien
cacggtatgcacgccatcgtcctca

SEQ ID NO: 5769922 - DNA, 25 bp, Homo sapien
gctgctgagggtcaggacaggctgc

SEQ ID NO: 5769923 - DNA, 25 bp, Homo sapien
actgacgggcggcgctgcaggggcg

SEQ ID NO: 5769924 - DNA, 25 bp, Homo sapien
ctcactgctgttgcgggcctggaag

SEQ ID NO: 5769925 - DNA, 25 bp, Homo sapien
aggctgcctggaggaggagggcagg

SEQ ID NO: 5769926 - DNA, 25 bp, Homo sapien
catcaccgcgtcacagcgcacgatg

SEQ ID NO: 5769927 - DNA, 25 bp, Homo sapien
taagacagtcgggtcaggcggggcc

SEQ ID NO: 5769928 - DNA, 25 bp, Homo sapien
acttcccagcctcggccctgctgtg

SEQ ID NO: 5769929 - DNA, 25 bp, Homo sapien
tcacagcgcacgatggcgcccagtg

SEQ ID NO: 5769930 - DNA, 25 bp, Homo sapien
gctgaagaactcgggtctgtatggg

SEQ ID NO: 5769931 - DNA, 25 bp, Homo sapien
gcaggggcggggtctcagcggcggg

SEQ ID NO: 5769932 - DNA, 25 bp, Homo sapien
cagcgtgacatggtcgggagacact

SEQ ID NO: 5769933 - DNA, 25 bp, Homo sapien
acagctcactgctgttgcgggcctg

SEQ ID NO: 5769934 - DNA, 25 bp, Homo sapien
gctcgtgctgtagctgtttctcaac

SEQ ID NO: 5769935 - DNA, 25 bp, Homo sapien
tgcccagactcggccctggctatcc

SEQ ID NO: 5769936 - DNA, 25 bp, Homo sapien
cgagcagcgtgacatggtcgggaga

SEQ ID NO: 5769937 - DNA, 25 bp, Homo sapien
gggctccactgcaccctctcggggg

SEQ ID NO: 5769938 - DNA, 25 bp, Homo sapien
aggcagaacgtcaccaggtgctggc

SEQ ID NO: 5769939 - DNA, 25 bp, Homo sapien
tcacaatcatctgcagaggcccgaa

SEQ ID NO: 5769940 - DNA, 25 bp, Homo sapien
tgcagagccccctggatgtcctctc

SEQ ID NO: 5769941 - DNA, 25 bp, Homo sapien
ttgacagccagtgtcaatcctagaa

SEQ ID NO: 5769942 - DNA, 25 bp, Homo sapien
cccccccgacgtgttcacaatcatc

SEQ ID NO: 5769943 - DNA, 25 bp, Homo sapien
agtgcaacagctccggagaggaggg

SEQ ID NO: 5769944 - DNA, 25 bp, Homo sapien
ggactgacgggcggcgctgcagggg

SEQ ID NO: 5769945 - DNA, 25 bp, Homo sapien
gctcccagccgctgaagaactcggg

SEQ ID NO: 5769946 - DNA, 25 bp, Homo sapien
cccctggatgtcctctcggatcagc

SEQ ID NO: 5769947 - DNA, 25 bp, Homo sapien
atgggcttcgcctggggtcgtccgc

SEQ ID NO: 5769948 - DNA, 25 bp, Homo sapien
tgtcctctcggatcagctccgcccc

SEQ ID NO: 5769949 - DNA, 25 bp, Homo sapien
cgtggccctgagcgccgccgccctg

SEQ ID NO: 5769950 - DNA, 25 bp, Homo sapien
tgcctccagctctgacactttctct

SEQ ID NO: 5769951 - DNA, 25 bp, Homo sapien
gaccggcggctcccagccgctgaag

SEQ ID NO: 5769952 - DNA, 25 bp, Homo sapien
tccagctgaggctcagattctggct

SEQ ID NO: 5769953 - DNA, 25 bp, Homo sapien
cccagtgggtacgactccagctcct

SEQ ID NO: 5769954 - DNA, 25 bp, Homo sapien
aactgggtcctcccaggcgcggctc

SEQ ID NO: 5769955 - DNA, 25 bp, Homo sapien
ccccaccggctcaggcctctgcgcc

SEQ ID NO: 5769956 - DNA, 25 bp, Homo sapien
cttcctggaggcatcctccacggta

SEQ ID NO: 5769957 - DNA, 25 bp, Homo sapien
cctccacggtatgcacgccatcgtc

SEQ ID NO: 5769958 - DNA, 25 bp, Homo sapien
tcgggggtctgctagcgctttccgt

SEQ ID NO: 5769959 - DNA, 25 bp, Homo sapien
ctttgtcctccaggacctccagtac

SEQ ID NO: 5769960 - DNA, 25 bp, Homo sapien
ccgccccgaggcgcaggccctggaa

SEQ ID NO: 5769961 - DNA, 25 bp, Homo sapien
tgactccagctgaggctcagattct

SEQ ID NO: 5769962 - DNA, 25 bp, Homo sapien
acgttgtcccgcagcagcgccacgg

SEQ ID NO: 5769963 - DNA, 25 bp, Homo sapien
ggcaggtcaaatgacctccatttcc

SEQ ID NO: 5769964 - DNA, 25 bp, Homo sapien
agaggcccgaaaaggaagtgcaaca

SEQ ID NO: 5769965 - DNA, 25 bp, Homo sapien
atgacctccatttccacctcgcctt

SEQ ID NO: 5769966 - DNA, 25 bp, Homo sapien
ccagccgctgaagaactcgggtctg

SEQ ID NO: 5769967 - DNA, 25 bp, Homo sapien
cagggctccactgcaccctctcggg

SEQ ID NO: 5769968 - DNA, 25 bp, Homo sapien
gactgcagcaaggatcgttaagtct

SEQ ID NO: 5769969 - DNA, 25 bp, Homo sapien
ctgcgcggactgacgggcggcgctg

SEQ ID NO: 5769970 - DNA, 25 bp, Homo sapien
gaggacaggctgcctggaggaggag

SEQ ID NO: 5769971 - DNA, 25 bp, Homo sapien
gctgtagctgtttctcaactgggtc

SEQ ID NO: 5769972 - DNA, 25 bp, Homo sapien
ctgcagcaaggatcgttaagtctgt

SEQ ID NO: 5769973 - DNA, 25 bp, Homo sapien
ggaggagggcaggccaggaatcacc

SEQ ID NO: 5769974 - DNA, 25 bp, Homo sapien
caggacaggctgcctggaggaggag

SEQ ID NO: 5769975 - DNA, 25 bp, Homo sapien
accgcgtcacagcgcacgatggcgc

SEQ ID NO: 5769976 - DNA, 25 bp, Homo sapien
cctccaggacctccagtacgtcccg

SEQ ID NO: 5769977 - DNA, 25 bp, Homo sapien
acgagcggctcctgccgggtggcat

SEQ ID NO: 5769978 - DNA, 25 bp, Homo sapien
gcctcgtcactctttgcgaagggcg

SEQ ID NO: 5769979 - DNA, 25 bp, Homo sapien
aagatcgacttccgctattggggag

SEQ ID NO: 5769980 - DNA, 25 bp, Homo sapien
ctcagggctccactgcaccctctcg

SEQ ID NO: 5769981 - DNA, 25 bp, Homo sapien
gcgctttgctgtaggaagtaagaca

SEQ ID NO: 5769982 - DNA, 25 bp, Homo sapien
tttcacgtggagtgacgttgtcccg

SEQ ID NO: 5769983 - DNA, 25 bp, Homo sapien
cagagccccctggatgtcctctcgg

SEQ ID NO: 5769984 - DNA, 25 bp, Homo sapien
tgaccgacagctcactgctgttgcg

SEQ ID NO: 5769985 - DNA, 25 bp, Homo sapien
tcagcggcgggcgagcggtcgcgct

SEQ ID NO: 5769986 - DNA, 25 bp, Homo sapien
aaacgcaaggctggtgttagcaatg

SEQ ID NO: 5769987 - DNA, 25 bp, Homo sapien
actctttgcgaagggcgcctggcag

SEQ ID NO: 5769988 - DNA, 25 bp, Homo sapien
tcccgctgcttgaccgacagctcac

SEQ ID NO: 5769989 - DNA, 25 bp, Homo sapien
tctccatcactgcctccagctctga

SEQ ID NO: 5769990 - DNA, 25 bp, Homo sapien
caagtctcggtgaccattgacagcg

SEQ ID NO: 5769991 - DNA, 25 bp, Homo sapien
cctccagctctgacactttctcttt

SEQ ID NO: 5769992 - DNA, 25 bp, Homo sapien
cgaggacgatggcctttcttcccat

SEQ ID NO: 5769993 - DNA, 25 bp, Homo sapien
gctccaagtctcggtgaccattgac

SEQ ID NO: 5769994 - DNA, 25 bp, Homo sapien
caggcggaccggccgcgcccccgga

SEQ ID NO: 5769995 - DNA, 25 bp, Homo sapien
agacactcgcagcagcatctcctgt

SEQ ID NO: 5769996 - DNA, 25 bp, Homo sapien
tgaaggatgagtttgacagccagtg

SEQ ID NO: 5769997 - DNA, 25 bp, Homo sapien
ctgggtcctcccaggcgcggctctg

SEQ ID NO: 5769998 - DNA, 25 bp, Homo sapien
gtccccaccggctcaggcctctgcg

SEQ ID NO: 5769999 - DNA, 25 bp, Homo sapien
gcacgccatcgtcctcacccaggca

SEQ ID NO: 5770000 - DNA, 25 bp, Homo sapien
tctggctccaagtctcggtgaccat

SEQ ID NO: 5770001 - DNA, 25 bp, Homo sapien
ggcccgcagcgtcagcaagccctcc

SEQ ID NO: 5770002 - DNA, 25 bp, Homo sapien
cagcgtcagcaagccctccccagcc

SEQ ID NO: 5770003 - DNA, 25 bp, Homo sapien
agcgcacgatggcgcccagtgggta

SEQ ID NO: 5770004 - DNA, 25 bp, Homo sapien
acaatcatctgcagaggcccgaaaa

SEQ ID NO: 5770005 - DNA, 25 bp, Homo sapien
gcaagggaggacacgaggggctctg

SEQ ID NO: 5770006 - DNA, 25 bp, Homo sapien
gccaaggccaggagaggctgctgag

SEQ ID NO: 5770007 - DNA, 25 bp, Homo sapien
aggccaggagaggctgctgagggtc

SEQ ID NO: 5770008 - DNA, 25 bp, Homo sapien
ggcatcaccgcgtcacagcgcacga

SEQ ID NO: 5770009 - DNA, 25 bp, Homo sapien
cccgacgtgttcacaatcatctgca

SEQ ID NO: 5770010 - DNA, 25 bp, Homo sapien
gttgctcgaggtccccaccggctca

SEQ ID NO: 5770011 - DNA, 25 bp, Homo sapien
caaggatcgttaagtctgtccaccg

SEQ ID NO: 5770012 - DNA, 25 bp, Homo sapien
gcatctcctgtgcccagactcggcc

SEQ ID NO: 5770013 - DNA, 25 bp, Homo sapien
atcctctccggagggactgcagcaa

SEQ ID NO: 5770014 - DNA, 25 bp, Homo sapien
ctccagtacgtcccgctgcttgacc

SEQ ID NO: 5770015 - DNA, 25 bp, Homo sapien
cactgcaccctctcgggggtctgct

SEQ ID NO: 5770016 - DNA, 25 bp, Homo sapien
agccgggccagcaggctgaaggcgt

SEQ ID NO: 5770017 - DNA, 25 bp, Homo sapien
ccaacttcctggaggcatcctccac

SEQ ID NO: 5770018 - DNA, 25 bp, Homo sapien
gagagtctgaggagtccgttctccc

SEQ ID NO: 5770019 - DNA, 25 bp, Homo sapien
cagcacgtcggtgtactcggcctcc

SEQ ID NO: 5770020 - DNA, 25 bp, Homo sapien
cgcatattacaatgctcagggctcc

SEQ ID NO: 5770021 - DNA, 25 bp, Homo sapien
tcaactgggtcctcccaggcgcggc

SEQ ID NO: 5770022 - DNA, 25 bp, Homo sapien
ggtctgtatgggggtccctcctccg

SEQ ID NO: 5770023 - DNA, 25 bp, Homo sapien
cggccctggctatccatgacggcca

SEQ ID NO: 5770024 - DNA, 25 bp, Homo sapien
tctcggtgaccattgacagcgacct

SEQ ID NO: 5770025 - DNA, 25 bp, Homo sapien
ctgcgcgcgctcgggttcctggcac

SEQ ID NO: 5770026 - DNA, 25 bp, Homo sapien
gccctgctgtgtcgcttgggtcacc

SEQ ID NO: 5770027 - DNA, 25 bp, Homo sapien
aggctgtttataggctgggccgcat

SEQ ID NO: 5770028 - DNA, 25 bp, Homo sapien
tatgggggtccctcctccggggaca

SEQ ID NO: 5770029 - DNA, 25 bp, Homo sapien
aggatgtccacttcccgctccgcct

SEQ ID NO: 5770030 - DNA, 25 bp, Homo sapien
cctccatttccacctcgccttccac

SEQ ID NO: 5770031 - DNA, 25 bp, Homo sapien
tctcgggggtctgctagcgctttcc

SEQ ID NO: 5770032 - DNA, 25 bp, Homo sapien
aagtgcacgtcgggctgcgcgcgct

SEQ ID NO: 5770033 - DNA, 25 bp, Homo sapien
tgctgagggtcaggacaggctgcct

SEQ ID NO: 5770034 - DNA, 25 bp, Homo sapien
caactcctcctgcgtggccctgagc

SEQ ID NO: 5770035 - DNA, 25 bp, Homo sapien
cagcagcaacgagcggctcctgccg

SEQ ID NO: 5770036 - DNA, 25 bp, Homo sapien
cagtgtcaatcctagaagatagggg

SEQ ID NO: 5770037 - DNA, 25 bp, Homo sapien
aggacgatggcctttcttcccatgc

SEQ ID NO: 5770038 - DNA, 25 bp, Homo sapien
gcacggaggctgtttataggctggg

SEQ ID NO: 5770039 - DNA, 25 bp, Homo sapien
caggacctccagtacgtcccgctgc

SEQ ID NO: 5770040 - DNA, 25 bp, Homo sapien
aggaggacaggctgcctggaggagg

SEQ ID NO: 5770041 - DNA, 25 bp, Homo sapien
gggccgcatattacaatgctcaggg

SEQ ID NO: 5770042 - DNA, 25 bp, Homo sapien
cccagcctcggccctgctgtgtcgc

SEQ ID NO: 5770043 - DNA, 25 bp, Homo sapien
ggctgggccgcatattacaatgctc

SEQ ID NO: 5770044 - DNA, 25 bp, Homo sapien
gcccgagcggtaattgtgcagagcc

SEQ ID NO: 5770045 - DNA, 25 bp, Homo sapien
ctccgccgacttctgcagcctcgat

SEQ ID NO: 5770046 - DNA, 25 bp, Homo sapien
gacactttctctttgtcctccagga

SEQ ID NO: 5770047 - DNA, 25 bp, Homo sapien
acgccatcgtcctcacccaggcaga

SEQ ID NO: 5770048 - DNA, 25 bp, Homo sapien
acacgaggggctctgccaaggccag

SEQ ID NO: 5770049 - DNA, 25 bp, Homo sapien
ctttctctttgtcctccaggacctc

SEQ ID NO: 5770050 - DNA, 25 bp, Homo sapien
ccagtacgtcccgctgcttgaccga

SEQ ID NO: 5770051 - DNA, 25 bp, Homo sapien
ttcccagcctcggccctgctgtgtc

SEQ ID NO: 5770052 - DNA, 25 bp, Homo sapien
gcctccgctcgtgctgtagctgttt

SEQ ID NO: 5770053 - DNA, 25 bp, Homo sapien
aggaggggtcggcgatgttgccgcg

SEQ ID NO: 5770054 - DNA, 25 bp, Homo sapien
cgctgcaggggcggggtctcagcgg

SEQ ID NO: 5770055 - DNA, 25 bp, Homo sapien
catgcgtgctgcaagggaggacacg

SEQ ID NO: 5770056 - DNA, 25 bp, Homo sapien
gccggctcctgcggccgcgttcccg

SEQ ID NO: 5770057 - DNA, 25 bp, Homo sapien
aggcccgaaaaggaagtgcaacagc

SEQ ID NO: 5770058 - DNA, 25 bp, Homo sapien
gcgcctcctctgcctcgggaatggg

SEQ ID NO: 5770059 - DNA, 25 bp, Homo sapien
tgtgcagagccccctggatgtcctc

SEQ ID NO: 5770060 - DNA, 25 bp, Homo sapien
tcgcgctgcaactcctcctgcgtgg

SEQ ID NO: 5770061 - DNA, 25 bp, Homo sapien
agcagcagcaacgagcggctcctgc

SEQ ID NO: 5770062 - DNA, 25 bp, Homo sapien
agcagcgccacggcatccgatgtca

SEQ ID NO: 5770063 - DNA, 25 bp, Homo sapien
acgaggggctctgccaaggccagga

SEQ ID NO: 5770064 - DNA, 25 bp, Homo sapien
cccaggtccggggaggccgagtcag

SEQ ID NO: 5770065 - DNA, 25 bp, Homo sapien
tcatctgcagaggcccgaaaaggaa

SEQ ID NO: 5770066 - DNA, 25 bp, Homo sapien
ctccgctcgtgctgtagctgtttct

SEQ ID NO: 5770067 - DNA, 25 bp, Homo sapien
cttgggtcacctgccggcgcctccg

SEQ ID NO: 5770068 - DNA, 25 bp, Homo sapien
gctccgcctgcagaaccgccaggtc

SEQ ID NO: 5770069 - DNA, 25 bp, Homo sapien
gaggccgggtcgagcagcgtgacat

SEQ ID NO: 5770070 - DNA, 25 bp, Homo sapien
cgatgttgccgcgcagccgggccag

SEQ ID NO: 5770071 - DNA, 25 bp, Homo sapien
ggggctctgccaaggccaggagagg

SEQ ID NO: 5770072 - DNA, 25 bp, Homo sapien
aatcatctgcagaggcccgaaaagg

SEQ ID NO: 5770073 - DNA, 25 bp, Homo sapien
ccagatcctctccggagggactgca

SEQ ID NO: 5770074 - DNA, 25 bp, Homo sapien
tggggggcgctttgctgtaggaagt

SEQ ID NO: 5770075 - DNA, 25 bp, Homo sapien
ctccagctcctccttggaggccggg

SEQ ID NO: 5770076 - DNA, 25 bp, Homo sapien
cagcaagccctccccagccgcccgg

SEQ ID NO: 5770077 - DNA, 25 bp, Homo sapien
ggggtctcagcggcgggcgagcggt

SEQ ID NO: 5770078 - DNA, 25 bp, Homo sapien
atctgcagaggcccgaaaaggaagt

SEQ ID NO: 5770079 - DNA, 25 bp, Homo sapien
tcaccgcgtcacagcgcacgatggc

SEQ ID NO: 5770080 - DNA, 25 bp, Homo sapien
ccgctcgtgctgtagctgtttctca

SEQ ID NO: 5770081 - DNA, 25 bp, Homo sapien
tgctggcaaagaggaaacgcaaggc

SEQ ID NO: 5770082 - DNA, 25 bp, Homo sapien
tccagagctcgttttcacgtggagt

SEQ ID NO: 5770083 - DNA, 25 bp, Homo sapien
cgtggttcaggatgtccacttcccg

SEQ ID NO: 5770084 - DNA, 25 bp, Homo sapien
gttcacaatcatctgcagaggcccg

SEQ ID NO: 5770085 - DNA, 25 bp, Homo sapien
gggcttcgcctggggtcgtccgcgg

SEQ ID NO: 5770086 - DNA, 25 bp, Homo sapien
ggtgttagcaatggcgaggacgatg

SEQ ID NO: 5770087 - DNA, 25 bp, Homo sapien
cttcccgctccgcctgcagaaccgc

SEQ ID NO: 5770088 - DNA, 25 bp, Homo sapien
tcgatacaaagctctctacgtcgtc

SEQ ID NO: 5770089 - DNA, 25 bp, Homo sapien
gccggagcagattggccatccttca

SEQ ID NO: 5770090 - DNA, 25 bp, Homo sapien
aatgctcagggctccactgcaccct

SEQ ID NO: 5770091 - DNA, 25 bp, Homo sapien
gtcgggagacactcgcagcagcatc

SEQ ID NO: 5770092 - DNA, 25 bp, Homo sapien
acaggctgcctggaggaggagggca

SEQ ID NO: 5770093 - DNA, 25 bp, Homo sapien
cccagccagtccagatcctctccgg

SEQ ID NO: 5770094 - DNA, 25 bp, Homo sapien
gtcctccaggacctccagtacgtcc

SEQ ID NO: 5770095 - DNA, 25 bp, Homo sapien
cactttctctttgtcctccaggacc

SEQ ID NO: 5770096 - DNA, 25 bp, Homo sapien
tcaccaggtgctggcaaagaggaaa

SEQ ID NO: 5770097 - DNA, 25 bp, Homo sapien
cggctcccagccgctgaagaactcg

SEQ ID NO: 5770098 - DNA, 25 bp, Homo sapien
ggaggctgtttataggctgggccgc

SEQ ID NO: 5770099 - DNA, 25 bp, Homo sapien
tctccggagggactgcagcaaggat

SEQ ID NO: 5770100 - DNA, 25 bp, Homo sapien
ggatgagtttgacagccagtgtcaa

SEQ ID NO: 5770101 - DNA, 25 bp, Homo sapien
cctggaggaggagggcaggccagga

SEQ ID NO: 5770102 - DNA, 25 bp, Homo sapien
ggcctccgagggcggcttggcccgc

SEQ ID NO: 5770103 - DNA, 25 bp, Homo sapien
agcggcgggcgagcggtcgcgctgc

SEQ ID NO: 5770104 - DNA, 25 bp, Homo sapien
gagcagattggccatccttcagaag

SEQ ID NO: 5770105 - DNA, 25 bp, Homo sapien
ggtgaccattgacagcgacctgggg

SEQ ID NO: 5770106 - DNA, 25 bp, Homo sapien
cccgcgccccgctctacggtgctga

SEQ ID NO: 5770107 - DNA, 25 bp, Homo sapien
cagcgccacggcatccgatgtcaga

SEQ ID NO: 5770108 - DNA, 25 bp, Homo sapien
gaagtgcaacagctccggagaggag

SEQ ID NO: 5770109 - DNA, 25 bp, Homo sapien
cactgcgcggactgacgggcggcgc

SEQ ID NO: 5770110 - DNA, 25 bp, Homo sapien
ggcgatgttgccgcgcagccgggcc

SEQ ID NO: 5770111 - DNA, 25 bp, Homo sapien
cgtcgtcgaacacgtggttcaggat

SEQ ID NO: 5770112 - DNA, 25 bp, Homo sapien
tagactgtctccacgccctccccac

SEQ ID NO: 5770113 - DNA, 25 bp, Homo sapien
gtgttcacaatcatctgcagaggcc

SEQ ID NO: 5770114 - DNA, 25 bp, Homo sapien
ggcgctgcaggggcggggtctcagc

SEQ ID NO: 5770115 - DNA, 25 bp, Homo sapien
ttcttttgcttctccatcactgcct

SEQ ID NO: 5770116 - DNA, 25 bp, Homo sapien
gctttgctgtaggaagtaagacagt

SEQ ID NO: 5770117 - DNA, 25 bp, Homo sapien
gctcgttttcacgtggagtgacgtt

SEQ ID NO: 5770118 - DNA, 25 bp, Homo sapien
cctcgatacaaagctctctacgtcg

SEQ ID NO: 5770119 - DNA, 25 bp, Homo sapien
cttggaggccgggtcgagcagcgtg

SEQ ID NO: 5770120 - DNA, 25 bp, Homo sapien
agtctgtccaccgggatgggggaag

SEQ ID NO: 5770121 - DNA, 25 bp, Homo sapien
agtaagacagtcgggtcaggcgggg

SEQ ID NO: 5770122 - DNA, 25 bp, Homo sapien
acagctccggagaggaggggtcggc

SEQ ID NO: 5770123 - DNA, 25 bp, Homo sapien
gctcaggcctctgcgcctcctctgc

SEQ ID NO: 5770124 - DNA, 25 bp, Homo sapien
aagggcgcctggcaggtcaaatgac

SEQ ID NO: 5770125 - DNA, 25 bp, Homo sapien
gagtccgttctcccacggggcctcg

SEQ ID NO: 5770126 - DNA, 25 bp, Homo sapien
gcaccctctcgggggtctgctagcg

SEQ ID NO: 5770127 - DNA, 25 bp, Homo sapien
acgtcggtgtactcggcctccgagg

SEQ ID NO: 5770128 - DNA, 25 bp, Homo sapien
cgcgtcacagcgcacgatggcgccc

SEQ ID NO: 5770129 - DNA, 25 bp, Homo sapien
ttaagcacggaggctgtttataggc

SEQ ID NO: 5770130 - DNA, 25 bp, Homo sapien
cacactgctcgcgaactccggcccc

SEQ ID NO: 5770131 - DNA, 25 bp, Homo sapien
tgctgcaagggaggacacgaggggc

SEQ ID NO: 5770132 - DNA, 25 bp, Homo sapien
gttcaggatgtccacttcccgctcc

SEQ ID NO: 5770133 - DNA, 25 bp, Homo sapien
gctgcttgaccgacagctcactgct

SEQ ID NO: 5770134 - DNA, 25 bp, Homo sapien
cactgctgttgcgggcctggaagtc

SEQ ID NO: 5770135 - DNA, 25 bp, Homo sapien
atgttgccgcgcagccgggccagca

SEQ ID NO: 5770136 - DNA, 25 bp, Homo sapien
tccgctattggggagagtctgagga

SEQ ID NO: 5770137 - DNA, 25 bp, Homo sapien
cacattgctttaatttataatgttt

SEQ ID NO: 5770138 - DNA, 25 bp, Homo sapien
gtgatcgtgagaaagcctttatcca

SEQ ID NO: 5770139 - DNA, 25 bp, Homo sapien
cgcaaatttatcctgattcaacacc

SEQ ID NO: 5770140 - DNA, 25 bp, Homo sapien
actggaggagactgtggtagccatc

SEQ ID NO: 5770141 - DNA, 25 bp, Homo sapien
gctccttgatgagtctcagaggttc

SEQ ID NO: 5770142 - DNA, 25 bp, Homo sapien
catgtaacatccctgggttattgcc

SEQ ID NO: 5770143 - DNA, 25 bp, Homo sapien
tgtgctgtcagctttctaaggatta

SEQ ID NO: 5770144 - DNA, 25 bp, Homo sapien
aaatctgacctcattcaacaccgga

SEQ ID NO: 5770145 - DNA, 25 bp, Homo sapien
aaaggccttatgaatgcagtgaatg

SEQ ID NO: 5770146 - DNA, 25 bp, Homo sapien
aactcattcaacaccagagaattca

SEQ ID NO: 5770147 - DNA, 25 bp, Homo sapien
agctgagattgcaccactgcactcc

SEQ ID NO: 5770148 - DNA, 25 bp, Homo sapien
agaagagccctggaaaaggaaggtg

SEQ ID NO: 5770149 - DNA, 25 bp, Homo sapien
tagctacaaatctaacctcattgaa

SEQ ID NO: 5770150 - DNA, 25 bp, Homo sapien
atctacaaattttccagtgaatatg

SEQ ID NO: 5770151 - DNA, 25 bp, Homo sapien
tgaagaagagccctggaaaaggaag

SEQ ID NO: 5770152 - DNA, 25 bp, Homo sapien
aagaccttatgaatgcagagaatgt

SEQ ID NO: 5770153 - DNA, 25 bp, Homo sapien
taaactttgagcacccacagtgggg

SEQ ID NO: 5770154 - DNA, 25 bp, Homo sapien
gggagtggagaagactgcagtaaat

SEQ ID NO: 5770155 - DNA, 25 bp, Homo sapien
cccctaccacctggcaggtgcacac

SEQ ID NO: 5770156 - DNA, 25 bp, Homo sapien
aagaacacacttgttcagcaccagc

SEQ ID NO: 5770157 - DNA, 25 bp, Homo sapien
ctatcgctgagatcattatcagaaa

SEQ ID NO: 5770158 - DNA, 25 bp, Homo sapien
tgaatttttccacattctgattcac

SEQ ID NO: 5770159 - DNA, 25 bp, Homo sapien
cagctttctaaggattaccttttta

SEQ ID NO: 5770160 - DNA, 25 bp, Homo sapien
agaagagtgggagctccttgatgag

SEQ ID NO: 5770161 - DNA, 25 bp, Homo sapien
cattctgattcaccagcctggaaac

SEQ ID NO: 5770162 - DNA, 25 bp, Homo sapien
ttgaacccagaaggcggaagttgca

SEQ ID NO: 5770163 - DNA, 25 bp, Homo sapien
agtgctagcctcattcaacaccaga

SEQ ID NO: 5770164 - DNA, 25 bp, Homo sapien
tgtagcaaatgtgagaaagccttca

SEQ ID NO: 5770165 - DNA, 25 bp, Homo sapien
ctggcctcattcagcaccggagact

SEQ ID NO: 5770166 - DNA, 25 bp, Homo sapien
tagacaaatcttcaatctcattcga

SEQ ID NO: 5770167 - DNA, 25 bp, Homo sapien
acaagcatgagaggcttctgcttca

SEQ ID NO: 5770168 - DNA, 25 bp, Homo sapien
gtaattgggacagaaactccaggta

SEQ ID NO: 5770169 - DNA, 25 bp, Homo sapien
gagtgcagtgaatgtgagaaatcct

SEQ ID NO: 5770170 - DNA, 25 bp, Homo sapien
tcctttagccgcaaatctaacctca

SEQ ID NO: 5770171 - DNA, 25 bp, Homo sapien
acccacagtggggtattcttcataa

SEQ ID NO: 5770172 - DNA, 25 bp, Homo sapien
ccaggctttgtgttcctgtattgtg

SEQ ID NO: 5770173 - DNA, 25 bp, Homo sapien
ccctttacccacaaatcagacctta

SEQ ID NO: 5770174 - DNA, 25 bp, Homo sapien
gcgggcggattgcctgagctcagga

SEQ ID NO: 5770175 - DNA, 25 bp, Homo sapien
tctagcctttttcgacaccagagag

SEQ ID NO: 5770176 - DNA, 25 bp, Homo sapien
tatgagtgtagcaaatgtgagaaag

SEQ ID NO: 5770177 - DNA, 25 bp, Homo sapien
ctggccgggcatggtgtaatcctaa

SEQ ID NO: 5770178 - DNA, 25 bp, Homo sapien
cacctgacccagttgtggtccagag

SEQ ID NO: 5770179 - DNA, 25 bp, Homo sapien
acttgttcagcatcagagtgtctgt

SEQ ID NO: 5770180 - DNA, 25 bp, Homo sapien
ttgtaagcagaatagtgatgtcagc

SEQ ID NO: 5770181 - DNA, 25 bp, Homo sapien
gtgacaatccccagtgcttctgtga

SEQ ID NO: 5770182 - DNA, 25 bp, Homo sapien
cggacctactccaacacgaagccac

SEQ ID NO: 5770183 - DNA, 25 bp, Homo sapien
cactggagaaagaccttatgaatgc

SEQ ID NO: 5770184 - DNA, 25 bp, Homo sapien
attttgcctgcggctgagcaccaaa

SEQ ID NO: 5770185 - DNA, 25 bp, Homo sapien
ttgggtgttctattcattgcataga

SEQ ID NO: 5770186 - DNA, 25 bp, Homo sapien
caccagagaggtcacactggagaaa

SEQ ID NO: 5770187 - DNA, 25 bp, Homo sapien
caccagcatcaaaagcattacaatg

SEQ ID NO: 5770188 - DNA, 25 bp, Homo sapien
tcggaactcattcaacaccagagaa

SEQ ID NO: 5770189 - DNA, 25 bp, Homo sapien
ctttttcgacaccagagagttcact

SEQ ID NO: 5770190 - DNA, 25 bp, Homo sapien
ggagaaagaccttatgaatgcagtg

SEQ ID NO: 5770191 - DNA, 25 bp, Homo sapien
catggcatataagtcagtgtagact

SEQ ID NO: 5770192 - DNA, 25 bp, Homo sapien
atttacgcacctttaatcttgggtg

SEQ ID NO: 5770193 - DNA, 25 bp, Homo sapien
aaaaggaggcagttgtgacaatccc

SEQ ID NO: 5770194 - DNA, 25 bp, Homo sapien
attttccagtgaatatggttgtgta

SEQ ID NO: 5770195 - DNA, 25 bp, Homo sapien
gtttctgcagtggaggtcgcgactg

SEQ ID NO: 5770196 - DNA, 25 bp, Homo sapien
ctgagggacgggacagagaagtcgc

SEQ ID NO: 5770197 - DNA, 25 bp, Homo sapien
ttttagacagcgctctggcctcatt

SEQ ID NO: 5770198 - DNA, 25 bp, Homo sapien
tccagagaatctgagttgtgctgtc

SEQ ID NO: 5770199 - DNA, 25 bp, Homo sapien
ctgcagtggaggtcgcgactgaggg

SEQ ID NO: 5770200 - DNA, 25 bp, Homo sapien
tgtggggaggccttcccagccccca

SEQ ID NO: 5770201 - DNA, 25 bp, Homo sapien
ctgcactccagcccaggcaacagag

SEQ ID NO: 5770202 - DNA, 25 bp, Homo sapien
ctctggcctcattcagcaccggaga

SEQ ID NO: 5770203 - DNA, 25 bp, Homo sapien
taaattagatggaatgactcttcta

SEQ ID NO: 5770204 - DNA, 25 bp, Homo sapien
cagtgaatatggttgtgtaggatca

SEQ ID NO: 5770205 - DNA, 25 bp, Homo sapien
gattgcaccactgcactccagccca

SEQ ID NO: 5770206 - DNA, 25 bp, Homo sapien
gcacaagcatgagaggcttctgctt

SEQ ID NO: 5770207 - DNA, 25 bp, Homo sapien
cctggtgccatttttgtcaggtcag

SEQ ID NO: 5770208 - DNA, 25 bp, Homo sapien
gccactcccagtggtgaggagccac

SEQ ID NO: 5770209 - DNA, 25 bp, Homo sapien
aatgtgggaaatcctttagacaatt

SEQ ID NO: 5770210 - DNA, 25 bp, Homo sapien
agcaccagcaaattcacactggaca

SEQ ID NO: 5770211 - DNA, 25 bp, Homo sapien
caccagcaaattcacactggacaaa

SEQ ID NO: 5770212 - DNA, 25 bp, Homo sapien
gtgaggggaatctgttgcccaggtc

SEQ ID NO: 5770213 - DNA, 25 bp, Homo sapien
ctgattcaccagcctggaaactgct

SEQ ID NO: 5770214 - DNA, 25 bp, Homo sapien
acccagaaaactcacctcagtgaga

SEQ ID NO: 5770215 - DNA, 25 bp, Homo sapien
cctttagacaaatcttcaatctcat

SEQ ID NO: 5770216 - DNA, 25 bp, Homo sapien
ggtggatgaggctacatttgtgacc

SEQ ID NO: 5770217 - DNA, 25 bp, Homo sapien
agtgtgggaaatcctttagacaaat

SEQ ID NO: 5770218 - DNA, 25 bp, Homo sapien
ggaaatcctttagacaaatcttcaa

SEQ ID NO: 5770219 - DNA, 25 bp, Homo sapien
tcattcagcaccggagacttcatac

SEQ ID NO: 5770220 - DNA, 25 bp, Homo sapien
agggacaatgtgatggcagaagaca

SEQ ID NO: 5770221 - DNA, 25 bp, Homo sapien
tgagctcaggagttcaagaccagcc

SEQ ID NO: 5770222 - DNA, 25 bp, Homo sapien
atacacccacccagaaaactcacct

SEQ ID NO: 5770223 - DNA, 25 bp, Homo sapien
tagtgaatgtgggaaatcctttagc

SEQ ID NO: 5770224 - DNA, 25 bp, Homo sapien
ttcataagtttcaggtatgtgggaa

SEQ ID NO: 5770225 - DNA, 25 bp, Homo sapien
accaccagagacgtcacactggagg

SEQ ID NO: 5770226 - DNA, 25 bp, Homo sapien
gacaatccccagtgcttctgtgaac

SEQ ID NO: 5770227 - DNA, 25 bp, Homo sapien
aggaaaacctttagctacaaatcta

SEQ ID NO: 5770228 - DNA, 25 bp, Homo sapien
tgacttgtaagcagaatagtgatgt

SEQ ID NO: 5770229 - DNA, 25 bp, Homo sapien
aaatcctttagccgcaaatttatcc

SEQ ID NO: 5770230 - DNA, 25 bp, Homo sapien
tgattgtgggaaatcttttagctgc

SEQ ID NO: 5770231 - DNA, 25 bp, Homo sapien
gcagaatagtgatgtcagcatgaag

SEQ ID NO: 5770232 - DNA, 25 bp, Homo sapien
atcctttagacaattctctaacctc

SEQ ID NO: 5770233 - DNA, 25 bp, Homo sapien
gcatagaatgacttgtaagcagaat

SEQ ID NO: 5770234 - DNA, 25 bp, Homo sapien
gcccgggatagggactgttgtgttc

SEQ ID NO: 5770235 - DNA, 25 bp, Homo sapien
catatacaggcatttttcaatgcaa

SEQ ID NO: 5770236 - DNA, 25 bp, Homo sapien
tggcggcagtcgcgctgagggactc

SEQ ID NO: 5770237 - DNA, 25 bp, Homo sapien
ggcagcatgcgcctatagtcccagc

SEQ ID NO: 5770238 - DNA, 25 bp, Homo sapien
tcacagtggagaaagaccttatgaa

SEQ ID NO: 5770239 - DNA, 25 bp, Homo sapien
tattaatagcccaagcatgtagggt

SEQ ID NO: 5770240 - DNA, 25 bp, Homo sapien
tagtctggccgggcatggtgtaatc

SEQ ID NO: 5770241 - DNA, 25 bp, Homo sapien
gagtcacttccccacagtgctcaga

SEQ ID NO: 5770242 - DNA, 25 bp, Homo sapien
tcagtgctgaccttcaccagcatca

SEQ ID NO: 5770243 - DNA, 25 bp, Homo sapien
tcgacatcggagagttcacactgaa

SEQ ID NO: 5770244 - DNA, 25 bp, Homo sapien
actggagaaaggccttatgaatgtg

SEQ ID NO: 5770245 - DNA, 25 bp, Homo sapien
gaatgtgctatttctttattcagta

SEQ ID NO: 5770246 - DNA, 25 bp, Homo sapien
tgaagggaatgtgctatttctttat

SEQ ID NO: 5770247 - DNA, 25 bp, Homo sapien
ttatttcacctgtggggaggccttc

SEQ ID NO: 5770248 - DNA, 25 bp, Homo sapien
gtatgtgggaagctctgaggaggtt

SEQ ID NO: 5770249 - DNA, 25 bp, Homo sapien
gagattgcaccactgcactccagcc

SEQ ID NO: 5770250 - DNA, 25 bp, Homo sapien
tgagcaccaaaccacatcccctgtg

SEQ ID NO: 5770251 - DNA, 25 bp, Homo sapien
agtggggtattcttcataagtttca

SEQ ID NO: 5770252 - DNA, 25 bp, Homo sapien
gccttatgaatgtagtgaatgtgga

SEQ ID NO: 5770253 - DNA, 25 bp, Homo sapien
cccacagtgctcagagaagcaaacc

SEQ ID NO: 5770254 - DNA, 25 bp, Homo sapien
gaatgtggaaagtcttttagccaaa

SEQ ID NO: 5770255 - DNA, 25 bp, Homo sapien
ggcctatagcctgatttatgtcact

SEQ ID NO: 5770256 - DNA, 25 bp, Homo sapien
acctttaatcttgggtgttctattc

SEQ ID NO: 5770257 - DNA, 25 bp, Homo sapien
tctctaacctcattcgacaccgcag

SEQ ID NO: 5770258 - DNA, 25 bp, Homo sapien
tttttccacattctgattcaccagc

SEQ ID NO: 5770259 - DNA, 25 bp, Homo sapien
tgtgaccggctgcagattccatgtg

SEQ ID NO: 5770260 - DNA, 25 bp, Homo sapien
cagattccatgtgttgaattatttc

SEQ ID NO: 5770261 - DNA, 25 bp, Homo sapien
gaaaggccttatgaatgtggcgagt

SEQ ID NO: 5770262 - DNA, 25 bp, Homo sapien
aagactgcagtaaattagatggaat

SEQ ID NO: 5770263 - DNA, 25 bp, Homo sapien
ttgttctgtattgctctaattggcc

SEQ ID NO: 5770264 - DNA, 25 bp, Homo sapien
ggaaatcctttagacaaagctctag

SEQ ID NO: 5770265 - DNA, 25 bp, Homo sapien
acccagaaggcggaagttgcagtga

SEQ ID NO: 5770266 - DNA, 25 bp, Homo sapien
atcctaacactttgggaggccaagg

SEQ ID NO: 5770267 - DNA, 25 bp, Homo sapien
ctttgagcacccacagtggggtatt

SEQ ID NO: 5770268 - DNA, 25 bp, Homo sapien
actctggagaaaggccttatcagtg

SEQ ID NO: 5770269 - DNA, 25 bp, Homo sapien
ctcacatgatgcttgtaatgaattt

SEQ ID NO: 5770270 - DNA, 25 bp, Homo sapien
tgcacattgctttaatttataatgt

SEQ ID NO: 5770271 - DNA, 25 bp, Homo sapien
tacagaaattctcaggatcttctgt

SEQ ID NO: 5770272 - DNA, 25 bp, Homo sapien
aggctttgtgttcctgtattgtggc

SEQ ID NO: 5770273 - DNA, 25 bp, Homo sapien
cagaaattctcaggatcttctgttt

SEQ ID NO: 5770274 - DNA, 25 bp, Homo sapien
agtgattgtgggaaatcttttagct

SEQ ID NO: 5770275 - DNA, 25 bp, Homo sapien
ggaaggtggatgaggctacatttgt

SEQ ID NO: 5770276 - DNA, 25 bp, Homo sapien
ccaggtcctgcaaaggagccatgtg

SEQ ID NO: 5770277 - DNA, 25 bp, Homo sapien
agccatgtgccatggcatataagtc

SEQ ID NO: 5770278 - DNA, 25 bp, Homo sapien
gaagctctgaggaggttcattgtaa

SEQ ID NO: 5770279 - DNA, 25 bp, Homo sapien
cccaaggcctcaaagtaaagactgc

SEQ ID NO: 5770280 - DNA, 25 bp, Homo sapien
cggaagttgcagtgagctgagattg

SEQ ID NO: 5770281 - DNA, 25 bp, Homo sapien
tgggccagaggttctgcgacaccac

SEQ ID NO: 5770282 - DNA, 25 bp, Homo sapien
atgcgcctatagtcccagccacttg

SEQ ID NO: 5770283 - DNA, 25 bp, Homo sapien
ctcaggatcttctgtttactatcgc

SEQ ID NO: 5770284 - DNA, 25 bp, Homo sapien
tgcaaatcggaactcattcaacacc

SEQ ID NO: 5770285 - DNA, 25 bp, Homo sapien
gtagggtcttcatgtcttttctctg

SEQ ID NO: 5770286 - DNA, 25 bp, Homo sapien
atgtgggaaatcctttagccagagc

SEQ ID NO: 5770287 - DNA, 25 bp, Homo sapien
acaccaaagagttcacactggagaa

SEQ ID NO: 5770288 - DNA, 25 bp, Homo sapien
cagtgcagtgattgtgggaaatctt

SEQ ID NO: 5770289 - DNA, 25 bp, Homo sapien
gcgcctatagtcccagccacttggg

SEQ ID NO: 5770290 - DNA, 25 bp, Homo sapien
ggagacttcatactggagaaaggcc

SEQ ID NO: 5770291 - DNA, 25 bp, Homo sapien
tggagaaaggccttatcagtgctgt

SEQ ID NO: 5770292 - DNA, 25 bp, Homo sapien
gcaacagagtgagactccgtctcca

SEQ ID NO: 5770293 - DNA, 25 bp, Homo sapien
aatagcactggaggagactgtggta

SEQ ID NO: 5770294 - DNA, 25 bp, Homo sapien
aatgtagtgaatgtggaaagtcttt

SEQ ID NO: 5770295 - DNA, 25 bp, Homo sapien
agaagcaaacctctgtactctccca

SEQ ID NO: 5770296 - DNA, 25 bp, Homo sapien
gactttagagtatacacctgaccca

SEQ ID NO: 5770297 - DNA, 25 bp, Homo sapien
agtgtatctatacaggtcaggactt

SEQ ID NO: 5770298 - DNA, 25 bp, Homo sapien
aattacaggttcaacagtaattggg

SEQ ID NO: 5770299 - DNA, 25 bp, Homo sapien
cctgcggctgagcaccaaaccacat

SEQ ID NO: 5770300 - DNA, 25 bp, Homo sapien
tatcctgattcaacaccaaagagtt

SEQ ID NO: 5770301 - DNA, 25 bp, Homo sapien
tcgcttgaacccagaaggcggaagt

SEQ ID NO: 5770302 - DNA, 25 bp, Homo sapien
tggagaaaggccttatgaatgtggc

SEQ ID NO: 5770303 - DNA, 25 bp, Homo sapien
ttaaggaacattgtcggtctcacat

SEQ ID NO: 5770304 - DNA, 25 bp, Homo sapien
gcttggtgcacattgctttaattta

SEQ ID NO: 5770305 - DNA, 25 bp, Homo sapien
gccttatgaatgtagtgaatgtggg

SEQ ID NO: 5770306 - DNA, 25 bp, Homo sapien
atgagtctcagaggttcctgtactg

SEQ ID NO: 5770307 - DNA, 25 bp, Homo sapien
tgcagtgatcgtgagaaagccttta

SEQ ID NO: 5770308 - DNA, 25 bp, Homo sapien
agtgagctgagattgcaccactgca

SEQ ID NO: 5770309 - DNA, 25 bp, Homo sapien
ggaaattattaatagcccaagcatg

SEQ ID NO: 5770310 - DNA, 25 bp, Homo sapien
cagaggtcaccatgaaaaggaggca

SEQ ID NO: 5770311 - DNA, 25 bp, Homo sapien
agccacttgggaggctgaggcagga

SEQ ID NO: 5770312 - DNA, 25 bp, Homo sapien
agagctctagcctcattcaacacca

SEQ ID NO: 5770313 - DNA, 25 bp, Homo sapien
acttcatactggagaaaggccttat

SEQ ID NO: 5770314 - DNA, 25 bp, Homo sapien
tatttctttattcagtataatagca

SEQ ID NO: 5770315 - DNA, 25 bp, Homo sapien
tggaatggagaatgaggcgatagct

SEQ ID NO: 5770316 - DNA, 25 bp, Homo sapien
gtgaatgtgggaaatcctttagcca

SEQ ID NO: 5770317 - DNA, 25 bp, Homo sapien
atgagtgcagtgaatgtgagaaatc

SEQ ID NO: 5770318 - DNA, 25 bp, Homo sapien
ccaagcatgtagggtcttcatgtct

SEQ ID NO: 5770319 - DNA, 25 bp, Homo sapien
gaatgtggcaaatcttttagacagc

SEQ ID NO: 5770320 - DNA, 25 bp, Homo sapien
tggagaactttgcacatgtaacatc

SEQ ID NO: 5770321 - DNA, 25 bp, Homo sapien
aactttgagcacccacagtggggta

SEQ ID NO: 5770322 - DNA, 25 bp, Homo sapien
aattctcaggatcttctgtttacta

SEQ ID NO: 5770323 - DNA, 25 bp, Homo sapien
aaaggccttatgaatgtagtgaatg

SEQ ID NO: 5770324 - DNA, 25 bp, Homo sapien
cgggacagagaagtcgcgaaagtgg

SEQ ID NO: 5770325 - DNA, 25 bp, Homo sapien
caggtgcacaccatgtgcatgagtc

SEQ ID NO: 5770326 - DNA, 25 bp, Homo sapien
caccatgtgcatgagtcacttcccc

SEQ ID NO: 5770327 - DNA, 25 bp, Homo sapien
ttgcaccactgcactccagcccagg

SEQ ID NO: 5770328 - DNA, 25 bp, Homo sapien
ttacccgcaaatctgacctcattca

SEQ ID NO: 5770329 - DNA, 25 bp, Homo sapien
ttgtgacaatccccagtgcttctgt

SEQ ID NO: 5770330 - DNA, 25 bp, Homo sapien
agccaaagtgctagcctcattcaac

SEQ ID NO: 5770331 - DNA, 25 bp, Homo sapien
gagcacccacagtggggtattcttc

SEQ ID NO: 5770332 - DNA, 25 bp, Homo sapien
cttttagctgcaaatcggaactcat

SEQ ID NO: 5770333 - DNA, 25 bp, Homo sapien
gcacctttaatcttgggtgttctat

SEQ ID NO: 5770334 - DNA, 25 bp, Homo sapien
tttagctacaaatctaacctcattg

SEQ ID NO: 5770335 - DNA, 25 bp, Homo sapien
tctttattcagtataatagcactgg

SEQ ID NO: 5770336 - DNA, 25 bp, Homo sapien
agagagttcacactggagaaaggcc

SEQ ID NO: 5770337 - DNA, 25 bp, Homo sapien
tattcagtataatagcactggagga

SEQ ID NO: 5770338 - DNA, 25 bp, Homo sapien
ttcacactgaagaaaggccttaaat

SEQ ID NO: 5770339 - DNA, 25 bp, Homo sapien
cagtgaatgtgggaaatcctttagc

SEQ ID NO: 5770340 - DNA, 25 bp, Homo sapien
cagcatgcgcctatagtcccagcca

SEQ ID NO: 5770341 - DNA, 25 bp, Homo sapien
ccagcaaattcacactggacaaaag

SEQ ID NO: 5770342 - DNA, 25 bp, Homo sapien
gatgtgatgctggagaactttgcac

SEQ ID NO: 5770343 - DNA, 25 bp, Homo sapien
gtgaatgtggaaagtcttttagcca

SEQ ID NO: 5770344 - DNA, 25 bp, Homo sapien
gtagactggtgccatttgttgtcag

SEQ ID NO: 5770345 - DNA, 25 bp, Homo sapien
ctggagaaaggccttatgaatgcag

SEQ ID NO: 5770346 - DNA, 25 bp, Homo sapien
ttctgattcaccagcctggaaactg

SEQ ID NO: 5770347 - DNA, 25 bp, Homo sapien
tgaggctgaagccatttcacatttc

SEQ ID NO: 5770348 - DNA, 25 bp, Homo sapien
cttatgaatgcagtgaatgtggaaa

SEQ ID NO: 5770349 - DNA, 25 bp, Homo sapien
ggccgccgctccccgcctagtccac

SEQ ID NO: 5770350 - DNA, 25 bp, Homo sapien
gagctcaatggcggcagtcgcgctg

SEQ ID NO: 5770351 - DNA, 25 bp, Homo sapien
acctcattgaacaccagagagttca

SEQ ID NO: 5770352 - DNA, 25 bp, Homo sapien
tcttcgtaaatttaaactttgagca

SEQ ID NO: 5770353 - DNA, 25 bp, Homo sapien
gaaactgcttggtgcacattgcttt

SEQ ID NO: 5770354 - DNA, 25 bp, Homo sapien
gctgcgccaggcccgggatagggac

SEQ ID NO: 5770355 - DNA, 25 bp, Homo sapien
tcttctaaaagttcatctacaaatt

SEQ ID NO: 5770356 - DNA, 25 bp, Homo sapien
aaaatagtctggccgggcatggtgt

SEQ ID NO: 5770357 - DNA, 25 bp, Homo sapien
gagaaagccttcacttgcaagaaca

SEQ ID NO: 5770358 - DNA, 25 bp, Homo sapien
aagggaatgtgctatttctttattc

SEQ ID NO: 5770359 - DNA, 25 bp, Homo sapien
gctgcaaatcggaactcattcaaca

SEQ ID NO: 5770360 - DNA, 25 bp, Homo sapien
gaaattctcaggatcttctgtttac

SEQ ID NO: 5770361 - DNA, 25 bp, Homo sapien
aatgccttatcagtgcagtgattgt

SEQ ID NO: 5770362 - DNA, 25 bp, Homo sapien
aatttctgaggctgaagccatttca

SEQ ID NO: 5770363 - DNA, 25 bp, Homo sapien
ttctctgactttagagtatacacct

SEQ ID NO: 5770364 - DNA, 25 bp, Homo sapien
atttctaatctgccgaggcctatag

SEQ ID NO: 5770365 - DNA, 25 bp, Homo sapien
gcctcaaagtaaagactgccaggct

SEQ ID NO: 5770366 - DNA, 25 bp, Homo sapien
cgaaagtgggccagaggttctgcga

SEQ ID NO: 5770367 - DNA, 25 bp, Homo sapien
tcagtgagattaagatgtgtgtccc

SEQ ID NO: 5770368 - DNA, 25 bp, Homo sapien
gccacctaatcttacacaagataat

SEQ ID NO: 5770369 - DNA, 25 bp, Homo sapien
cacagtgctcagagaagcaaacctc

SEQ ID NO: 5770370 - DNA, 25 bp, Homo sapien
cattacaatgaagaagagccctgga

SEQ ID NO: 5770371 - DNA, 25 bp, Homo sapien
ccataaatctgaattcattcaccac

SEQ ID NO: 5770372 - DNA, 25 bp, Homo sapien
acatagaagagttcacactggagaa

SEQ ID NO: 5770373 - DNA, 25 bp, Homo sapien
aggcgggcggattgcctgagctcag

SEQ ID NO: 5770374 - DNA, 25 bp, Homo sapien
cctactccaacacgaagccactccc

SEQ ID NO: 5770375 - DNA, 25 bp, Homo sapien
gctctagcctttttcgacaccagag

SEQ ID NO: 5770376 - DNA, 25 bp, Homo sapien
ggcttctgcttcagtgctgaccttc

SEQ ID NO: 5770377 - DNA, 25 bp, Homo sapien
tgtgagtgtgggaaatcctttagac

SEQ ID NO: 5770378 - DNA, 25 bp, Homo sapien
aagccatttcacatttcacccctac

SEQ ID NO: 5770379 - DNA, 25 bp, Homo sapien
atgtgtgtcccagtcttgaaagaca

SEQ ID NO: 5770380 - DNA, 25 bp, Homo sapien
acagtggagaaagaccttatgaatg

SEQ ID NO: 5770381 - DNA, 25 bp, Homo sapien
ggggaatctgttgcccaggtcctgc

SEQ ID NO: 5770382 - DNA, 25 bp, Homo sapien
ggaggcagttgtgacaatccccagt

SEQ ID NO: 5770383 - DNA, 25 bp, Homo sapien
tatacaggtcaggacttctaagggc

SEQ ID NO: 5770384 - DNA, 25 bp, Homo sapien
tacatttgtgaccggctgcagattc

SEQ ID NO: 5770385 - DNA, 25 bp, Homo sapien
tggtgaaatcccatgtctactaaaa

SEQ ID NO: 5770386 - DNA, 25 bp, Homo sapien
aaatacaaaaaattagccaggcgtg

SEQ ID NO: 5770387 - DNA, 25 bp, Homo sapien
cttgaaagacattttgcctgcggct

SEQ ID NO: 5770388 - DNA, 25 bp, Homo sapien
ggaatctgttgcccaggtcctgcaa

SEQ ID NO: 5770389 - DNA, 25 bp, Homo sapien
cttatgaatgcagtgatcgtgagaa

SEQ ID NO: 5770390 - DNA, 25 bp, Homo sapien
gagaattcacagtggagaaagacct

SEQ ID NO: 5770391 - DNA, 25 bp, Homo sapien
ggtcgcgactgagggacgggacaga

SEQ ID NO: 5770392 - DNA, 25 bp, Homo sapien
ttacaggttcaacagtaattgggac

SEQ ID NO: 5770393 - DNA, 25 bp, Homo sapien
atttcacccctaccacctggcaggt

SEQ ID NO: 5770394 - DNA, 25 bp, Homo sapien
ggacagagaagtcgcgaaagtgggc

SEQ ID NO: 5770395 - DNA, 25 bp, Homo sapien
tgaggctacatttgtgaccggctgc

SEQ ID NO: 5770396 - DNA, 25 bp, Homo sapien
agagacgtcacactggaggagtgcg

SEQ ID NO: 5770397 - DNA, 25 bp, Homo sapien
gtgaatacagaaaagcttcaagcca

SEQ ID NO: 5770398 - DNA, 25 bp, Homo sapien
gtgtcccagtcttgaaagacatttt

SEQ ID NO: 5770399 - DNA, 25 bp, Homo sapien
gcactggaggagactgtggtagcca

SEQ ID NO: 5770400 - DNA, 25 bp, Homo sapien
caatccccagtgcttctgtgaacgt

SEQ ID NO: 5770401 - DNA, 25 bp, Homo sapien
acaaacacacacttgttcagcatca

SEQ ID NO: 5770402 - DNA, 25 bp, Homo sapien
gctatttctttattcagtataatag

SEQ ID NO: 5770403 - DNA, 25 bp, Homo sapien
cctgacccagttgtggtccagagaa

SEQ ID NO: 5770404 - DNA, 25 bp, Homo sapien
cacccctaccacctggcaggtgcac

SEQ ID NO: 5770405 - DNA, 25 bp, Homo sapien
gcaacatggtgaaatcccatgtcta

SEQ ID NO: 5770406 - DNA, 25 bp, Homo sapien
aaaagtgccacctaatcttacacaa

SEQ ID NO: 5770407 - DNA, 25 bp, Homo sapien
agatggaatgactcttctaaaagtt

SEQ ID NO: 5770408 - DNA, 25 bp, Homo sapien
agaggttctgcgacaccacctcggg

SEQ ID NO: 5770409 - DNA, 25 bp, Homo sapien
gcttcaagccacaaacacacacttg

SEQ ID NO: 5770410 - DNA, 25 bp, Homo sapien
caagccacaaacacacacttgttca

SEQ ID NO: 5770411 - DNA, 25 bp, Homo sapien
caaatctaacctcattgaacaccag

SEQ ID NO: 5770412 - DNA, 25 bp, Homo sapien
tctgttctgaaggagggctttatga

SEQ ID NO: 5770413 - DNA, 25 bp, Homo sapien
gtaagcagaatagtgatgtcagcat

SEQ ID NO: 5770414 - DNA, 25 bp, Homo sapien
tgtgggaaatcttttagctgcaaat

SEQ ID NO: 5770415 - DNA, 25 bp, Homo sapien
aggcagttgtgacaatccccagtgc

SEQ ID NO: 5770416 - DNA, 25 bp, Homo sapien
agtgtggtgaatgtaggaaaacctt

SEQ ID NO: 5770417 - DNA, 25 bp, Homo sapien
taccacctggcaggtgcacaccatg

SEQ ID NO: 5770418 - DNA, 25 bp, Homo sapien
ccgggatagggactgttgtgttcga

SEQ ID NO: 5770419 - DNA, 25 bp, Homo sapien
cgagtgcgggaaatcctttagacaa

SEQ ID NO: 5770420 - DNA, 25 bp, Homo sapien
gcctagtccacggagctcaatggcg

SEQ ID NO: 5770421 - DNA, 25 bp, Homo sapien
aatcctttacccgcaaatctgacct

SEQ ID NO: 5770422 - DNA, 25 bp, Homo sapien
acacacttgttcagcatcagagtgt

SEQ ID NO: 5770423 - DNA, 25 bp, Homo sapien
ctttagagtatacacctgacccagt

SEQ ID NO: 5770424 - DNA, 25 bp, Homo sapien
ttttagccaaagtgctagcctcatt

SEQ ID NO: 5770425 - DNA, 25 bp, Homo sapien
tggagatctcaaactttctgtactc

SEQ ID NO: 5770426 - DNA, 25 bp, Homo sapien
gaagttgcagtgagctgagattgca

SEQ ID NO: 5770427 - DNA, 25 bp, Homo sapien
ctgaaggagggctttatgagtgtag

SEQ ID NO: 5770428 - DNA, 25 bp, Homo sapien
tcccctgtgcaaaagtcatacttgg

SEQ ID NO: 5770429 - DNA, 25 bp, Homo sapien
gaagacagctctttgttctgtattg

SEQ ID NO: 5770430 - DNA, 25 bp, Homo sapien
agagtgtatctatacaggtcaggac

SEQ ID NO: 5770431 - DNA, 25 bp, Homo sapien
gtggcgagtgcgggaaatcctttag

SEQ ID NO: 5770432 - DNA, 25 bp, Homo sapien
aggttctgcgacaccacctcgggtg

SEQ ID NO: 5770433 - DNA, 25 bp, Homo sapien
ttgttcagcatcagagtgtctgttc

SEQ ID NO: 5770434 - DNA, 25 bp, Homo sapien
acacttgttcagcaccagcaaattc

SEQ ID NO: 5770435 - DNA, 25 bp, Homo sapien
cggctcagggtatgacctttgagga

SEQ ID NO: 5770436 - DNA, 25 bp, Homo sapien
ttttcaatgcaaaaagttattacaa

SEQ ID NO: 5770437 - DNA, 25 bp, Homo sapien
tctcccatttgcttggggaaattat

SEQ ID NO: 5770438 - DNA, 25 bp, Homo sapien
aatgactcttctaaaagttcatcta

SEQ ID NO: 5770439 - DNA, 25 bp, Homo sapien
ctgactttagagtatacacctgacc

SEQ ID NO: 5770440 - DNA, 25 bp, Homo sapien
tcacttgcaagaacacacttgttca

SEQ ID NO: 5770441 - DNA, 25 bp, Homo sapien
aaagacattttgcctgcggctgagc

SEQ ID NO: 5770442 - DNA, 25 bp, Homo sapien
aagagttcacactggagaaatgcct

SEQ ID NO: 5770443 - DNA, 25 bp, Homo sapien
gaggagactgtggtagccatcttcg

SEQ ID NO: 5770444 - DNA, 25 bp, Homo sapien
tatctatacaggtcaggacttctaa

SEQ ID NO: 5770445 - DNA, 25 bp, Homo sapien
ttgcccaggtcctgcaaaggagcca

SEQ ID NO: 5770446 - DNA, 25 bp, Homo sapien
acttgcaagaacacacttgttcagc

SEQ ID NO: 5770447 - DNA, 25 bp, Homo sapien
accagagaattcacagtggagaaag

SEQ ID NO: 5770448 - DNA, 25 bp, Homo sapien
gtcagtgtagactggtgccatttgt

SEQ ID NO: 5770449 - DNA, 25 bp, Homo sapien
ggtcaggacttctaagggcaataca

SEQ ID NO: 5770450 - DNA, 25 bp, Homo sapien
aaaccacatcccctgtgcaaaagtc

SEQ ID NO: 5770451 - DNA, 25 bp, Homo sapien
agaaaagcttcaagccacaaacaca

SEQ ID NO: 5770452 - DNA, 25 bp, Homo sapien
gctcagggtatgacctttgaggatg

SEQ ID NO: 5770453 - DNA, 25 bp, Homo sapien
ggagaatgaggcgatagcttctgag

SEQ ID NO: 5770454 - DNA, 25 bp, Homo sapien
ggtagcacaagcatgagaggcttct

SEQ ID NO: 5770455 - DNA, 25 bp, Homo sapien
tttatcctgattcaacaccaaagag

SEQ ID NO: 5770456 - DNA, 25 bp, Homo sapien
gagtctcagaggttcctgtactgcg

SEQ ID NO: 5770457 - DNA, 25 bp, Homo sapien
taattcctagcactggtgaggggaa

SEQ ID NO: 5770458 - DNA, 25 bp, Homo sapien
ggagaaaggccttatgaatgcagtg

SEQ ID NO: 5770459 - DNA, 25 bp, Homo sapien
tactatcgctgagatcattatcaga

SEQ ID NO: 5770460 - DNA, 25 bp, Homo sapien
tgagtgtagtgaatgtgaggaatcc

SEQ ID NO: 5770461 - DNA, 25 bp, Homo sapien
ttagccgcaaatctaacctcattcg

SEQ ID NO: 5770462 - DNA, 25 bp, Homo sapien
gggtgttctattcattgcatagaat

SEQ ID NO: 5770463 - DNA, 25 bp, Homo sapien
gtggcagcatgcgcctatagtccca

SEQ ID NO: 5770464 - DNA, 25 bp, Homo sapien
gctggagaactttgcacatgtaaca

SEQ ID NO: 5770465 - DNA, 25 bp, Homo sapien
caaagctctagcctttttcgacacc

SEQ ID NO: 5770466 - DNA, 25 bp, Homo sapien
tttgcacatgtaacatccctgggtt

SEQ ID NO: 5770467 - DNA, 25 bp, Homo sapien
gtgggaagctctgaggaggttcatt

SEQ ID NO: 5770468 - DNA, 25 bp, Homo sapien
tgcaaaggagccatgtgccatggca

SEQ ID NO: 5770469 - DNA, 25 bp, Homo sapien
gcagtgagctgagattgcaccactg

SEQ ID NO: 5770470 - DNA, 25 bp, Homo sapien
ctgggcaacatggtgaaatcccatg

SEQ ID NO: 5770471 - DNA, 25 bp, Homo sapien
catcaaaagcattacaatgaagaag

SEQ ID NO: 5770472 - DNA, 25 bp, Homo sapien
tctaattggcctgctgcccaaggcc

SEQ ID NO: 5770473 - DNA, 25 bp, Homo sapien
tcagcatcagagtgtctgttctgaa

SEQ ID NO: 5770474 - DNA, 25 bp, Homo sapien
tttagacaaagctctagcctttttc

SEQ ID NO: 5770475 - DNA, 25 bp, Homo sapien
tccagcccaggcaacagagtgagac

SEQ ID NO: 5770476 - DNA, 25 bp, Homo sapien
tatgaatgcagtgaatgtgggaaat

SEQ ID NO: 5770477 - DNA, 25 bp, Homo sapien
atcctttagccgcaaatttatcctg

SEQ ID NO: 5770478 - DNA, 25 bp, Homo sapien
gacttctaagggcaatacacccacc

SEQ ID NO: 5770479 - DNA, 25 bp, Homo sapien
gacctcattcaacaccggagaattc

SEQ ID NO: 5770480 - DNA, 25 bp, Homo sapien
aatgcagtgaatgtgggaaatcctt

SEQ ID NO: 5770481 - DNA, 25 bp, Homo sapien
aaaggccttaaatgtgaagggaatg

SEQ ID NO: 5770482 - DNA, 25 bp, Homo sapien
ctgagggactcggctcagggtatga

SEQ ID NO: 5770483 - DNA, 25 bp, Homo sapien
tatgaatgtagtgaatgtggaaagt

SEQ ID NO: 5770484 - DNA, 25 bp, Homo sapien
cactcccagtggtgaggagccacac

SEQ ID NO: 5770485 - DNA, 25 bp, Homo sapien
agcaagcatatacaggcatttttca

SEQ ID NO: 5770486 - DNA, 25 bp, Homo sapien
ttgcatagaatgacttgtaagcaga

SEQ ID NO: 5770487 - DNA, 25 bp, Homo sapien
gccgcaaatttatcctgattcaaca

SEQ ID NO: 5770488 - DNA, 25 bp, Homo sapien
gtgcagtgattgtgggaaatctttt

SEQ ID NO: 5770489 - DNA, 25 bp, Homo sapien
agtgcttctgtgaacgtgaattttg

SEQ ID NO: 5770490 - DNA, 25 bp, Homo sapien
gagctccttgatgagtctcagaggt

SEQ ID NO: 5770491 - DNA, 25 bp, Homo sapien
ccagaaggcggaagttgcagtgagc

SEQ ID NO: 5770492 - DNA, 25 bp, Homo sapien
ataggtgtggaggtgaaattacagg

SEQ ID NO: 5770493 - DNA, 25 bp, Homo sapien
gaaagcctttatccataaatctgaa

SEQ ID NO: 5770494 - DNA, 25 bp, Homo sapien
cttatgagtgcagtgaatgtggcaa

SEQ ID NO: 5770495 - DNA, 25 bp, Homo sapien
gagccacacagtagcagcagcaagc

SEQ ID NO: 5770496 - DNA, 25 bp, Homo sapien
aaagaccttatgagtgcagtcaatg

SEQ ID NO: 5770497 - DNA, 25 bp, Homo sapien
gaggaatcctttagcaaaaagtgcc

SEQ ID NO: 5770498 - DNA, 25 bp, Homo sapien
gaaaggccttatcagtgctgtgagt

SEQ ID NO: 5770499 - DNA, 25 bp, Homo sapien
ttatgaatgcagagaatgtgggaaa

SEQ ID NO: 5770500 - DNA, 25 bp, Homo sapien
gatctcaaactttctgtactcagaa

SEQ ID NO: 5770501 - DNA, 25 bp, Homo sapien
agaatagtgatgtcagcatgaaggg

SEQ ID NO: 5770502 - DNA, 25 bp, Homo sapien
gcgtcatgagtgtggtgaatgtagg

SEQ ID NO: 5770503 - DNA, 25 bp, Homo sapien
ggccagaggttctgcgacaccacct

SEQ ID NO: 5770504 - DNA, 25 bp, Homo sapien
aaggaacattgtcggtctcacatga

SEQ ID NO: 5770505 - DNA, 25 bp, Homo sapien
ttcgaatgcccgccccggtcggccg

SEQ ID NO: 5770506 - DNA, 25 bp, Homo sapien
caaggcgggcggattgcctgagctc

SEQ ID NO: 5770507 - DNA, 25 bp, Homo sapien
aaagtgggccagaggttctgcgaca

SEQ ID NO: 5770508 - DNA, 25 bp, Homo sapien
ggtgtaatcctaacactttgggagg

SEQ ID NO: 5770509 - DNA, 25 bp, Homo sapien
catgagtgtggtgaatgtaggaaaa

SEQ ID NO: 5770510 - DNA, 25 bp, Homo sapien
caggagttcaagaccagcctgggca

SEQ ID NO: 5770511 - DNA, 25 bp, Homo sapien
agcatcaaaagcattacaatgaaga

SEQ ID NO: 5770512 - DNA, 25 bp, Homo sapien
tgctagcctcattcaacaccagaga

SEQ ID NO: 5770513 - DNA, 25 bp, Homo sapien
gcagttgtgacaatccccagtgctt

SEQ ID NO: 5770514 - DNA, 25 bp, Homo sapien
agcctggaaactgcttggtgcacat

SEQ ID NO: 5770515 - DNA, 25 bp, Homo sapien
ccccagtgcttctgtgaacgtgaat

SEQ ID NO: 5770516 - DNA, 25 bp, Homo sapien
acccacccagaaaactcacctcagt

SEQ ID NO: 5770517 - DNA, 25 bp, Homo sapien
gtgcaaaagtcatacttgggtagca

SEQ ID NO: 5770518 - DNA, 25 bp, Homo sapien
tctgcgacaccacctcgggtgagct

SEQ ID NO: 5770519 - DNA, 25 bp, Homo sapien
tgccttatcagtgcagtgattgtgg

SEQ ID NO: 5770520 - DNA, 25 bp, Homo sapien
tacaggcatttttcaatgcaaaaag

SEQ ID NO: 5770521 - DNA, 25 bp, Homo sapien
tacaaatctaacctcattgaacacc

SEQ ID NO: 5770522 - DNA, 25 bp, Homo sapien
gaggggaatctgttgcccaggtcct

SEQ ID NO: 5770523 - DNA, 25 bp, Homo sapien
ttctgaaggagggctttatgagtgt

SEQ ID NO: 5770524 - DNA, 25 bp, Homo sapien
tcctgattcaacaccaaagagttca

SEQ ID NO: 5770525 - DNA, 25 bp, Homo sapien
tactggcacaagaccttatgagtgc

SEQ ID NO: 5770526 - DNA, 25 bp, Homo sapien
acaccagagaattcacagtggagaa

SEQ ID NO: 5770527 - DNA, 25 bp, Homo sapien
aagtgccacctaatcttacacaaga

SEQ ID NO: 5770528 - DNA, 25 bp, Homo sapien
gggaggccttcccagcccccacgga

SEQ ID NO: 5770529 - DNA, 25 bp, Homo sapien
agacagctctttgttctgtattgct

SEQ ID NO: 5770530 - DNA, 25 bp, Homo sapien
tctcaaactttctgtactcagaagg

SEQ ID NO: 5770531 - DNA, 25 bp, Homo sapien
catttcacatttcacccctaccacc

SEQ ID NO: 5770532 - DNA, 25 bp, Homo sapien
aaggaaggtggatgaggctacattt

SEQ ID NO: 5770533 - DNA, 25 bp, Homo sapien
ggcggaagttgcagtgagctgagat

SEQ ID NO: 5770534 - DNA, 25 bp, Homo sapien
tggggagtggagaagactgcagtaa

SEQ ID NO: 5770535 - DNA, 25 bp, Homo sapien
gtgcagtgaatgtgagaaatccttt

SEQ ID NO: 5770536 - DNA, 25 bp, Homo sapien
ccagagctctagcctcattcaacac

SEQ ID NO: 5770537 - DNA, 25 bp, Homo sapien
ttgagcacccacagtggggtattct

SEQ ID NO: 5770538 - DNA, 25 bp, Homo sapien
agaagactgcagtaaattagatgga

SEQ ID NO: 5770539 - DNA, 25 bp, Homo sapien
aagagccctggaaaaggaaggtgga

SEQ ID NO: 5770540 - DNA, 25 bp, Homo sapien
cagtcaatgtgggaaaccctttacc

SEQ ID NO: 5770541 - DNA, 25 bp, Homo sapien
ctttagccagagctctagcctcatt

SEQ ID NO: 5770542 - DNA, 25 bp, Homo sapien
ggcagaagacagctctttgttctgt

SEQ ID NO: 5770543 - DNA, 25 bp, Homo sapien
cgacaccagagagttcactctggag

SEQ ID NO: 5770544 - DNA, 25 bp, Homo sapien
actggagaaatgccttatcagtgca

SEQ ID NO: 5770545 - DNA, 25 bp, Homo sapien
agccgcaaatctaacctcattcgac

SEQ ID NO: 5770546 - DNA, 25 bp, Homo sapien
ccggagacttcatactggagaaagg

SEQ ID NO: 5770547 - DNA, 25 bp, Homo sapien
atgcttgtaatgaatttttccacat

SEQ ID NO: 5770548 - DNA, 25 bp, Homo sapien
gagatctcaaactttctgtactcag

SEQ ID NO: 5770549 - DNA, 25 bp, Homo sapien
gccatttttgtcaggtcagaggtca

SEQ ID NO: 5770550 - DNA, 25 bp, Homo sapien
gaggcaggagaatcgcttgaaccca

SEQ ID NO: 5770551 - DNA, 25 bp, Homo sapien
tctgccgaggcctatagcctgattt

SEQ ID NO: 5770552 - DNA, 25 bp, Homo sapien
gcccaggtcctgcaaaggagccatg

SEQ ID NO: 5770553 - DNA, 25 bp, Homo sapien
ctagcctcattcaacaccagagagg

SEQ ID NO: 5770554 - DNA, 25 bp, Homo sapien
cctcattcaacaccggagaattcat

SEQ ID NO: 5770555 - DNA, 25 bp, Homo sapien
ggatcttctgtttactatcgctgag

SEQ ID NO: 5770556 - DNA, 25 bp, Homo sapien
agacgtcacactggaggagtgcgtc

SEQ ID NO: 5770557 - DNA, 25 bp, Homo sapien
ttctaatctgccgaggcctatagcc

SEQ ID NO: 5770558 - DNA, 25 bp, Homo sapien
acttgtaagcagaatagtgatgtca

SEQ ID NO: 5770559 - DNA, 25 bp, Homo sapien
tcggagagttcacactgaagaaagg

SEQ ID NO: 5770560 - DNA, 25 bp, Homo sapien
atgtgaggaatcctttagcaaaaag

SEQ ID NO: 5770561 - DNA, 25 bp, Homo sapien
cacacagtagcagcagcaagcatat

SEQ ID NO: 5770562 - DNA, 25 bp, Homo sapien
cttacacaagataattcacactgga

SEQ ID NO: 5770563 - DNA, 25 bp, Homo sapien
aatagtgatgtcagcatgaaggggt

SEQ ID NO: 5770564 - DNA, 25 bp, Homo sapien
caccagagagttcacactggagaaa

SEQ ID NO: 5770565 - DNA, 25 bp, Homo sapien
cattcgacatagaagagttcacact

SEQ ID NO: 5770566 - DNA, 25 bp, Homo sapien
cgacaccgcagcattcacactggtg

SEQ ID NO: 5770567 - DNA, 25 bp, Homo sapien
tttatgagtgtagcaaatgtgagaa

SEQ ID NO: 5770568 - DNA, 25 bp, Homo sapien
gaatagattttgtggagatctcaaa

SEQ ID NO: 5770569 - DNA, 25 bp, Homo sapien
accacatcccctgtgcaaaagtcat

SEQ ID NO: 5770570 - DNA, 25 bp, Homo sapien
agctcaggagttcaagaccagcctg

SEQ ID NO: 5770571 - DNA, 25 bp, Homo sapien
gggaggctgaggcaggagaatcgct

SEQ ID NO: 5770572 - DNA, 25 bp, Homo sapien
atgaatgtggcgagtgcgggaaatc

SEQ ID NO: 5770573 - DNA, 25 bp, Homo sapien
gagaggcttctgcttcagtgctgac

SEQ ID NO: 5770574 - DNA, 25 bp, Homo sapien
aagtcagtgtagactggtgccattt

SEQ ID NO: 5770575 - DNA, 25 bp, Homo sapien
ccagttgtggtccagagaatctgag

SEQ ID NO: 5770576 - DNA, 25 bp, Homo sapien
ttattcagcaccaaagagttcacac

SEQ ID NO: 5770577 - DNA, 25 bp, Homo sapien
tggagaaagaccttatgaatgcaga

SEQ ID NO: 5770578 - DNA, 25 bp, Homo sapien
tttgggaggccaaggcgggcggatt

SEQ ID NO: 5770579 - DNA, 25 bp, Homo sapien
ttcattgcatagaatgacttgtaag

SEQ ID NO: 5770580 - DNA, 25 bp, Homo sapien
caagaccagcctgggcaacatggtg

SEQ ID NO: 5770581 - DNA, 25 bp, Homo sapien
gttctgcgacaccacctcgggtgag

SEQ ID NO: 5770582 - DNA, 25 bp, Homo sapien
atctgaattcattcaccaccagaga

SEQ ID NO: 5770583 - DNA, 25 bp, Homo sapien
agtgtagtgaatgtgaggaatcctt

SEQ ID NO: 5770584 - DNA, 25 bp, Homo sapien
cacctcgggtgagctgcgccaggcc

SEQ ID NO: 5770585 - DNA, 25 bp, Homo sapien
cttatgaatgtagtgaatgtgggaa

SEQ ID NO: 5770586 - DNA, 25 bp, Homo sapien
caggcatttttcaatgcaaaaagtt

SEQ ID NO: 5770587 - DNA, 25 bp, Homo sapien
cataattcctagcactggtgagggg

SEQ ID NO: 5770588 - DNA, 25 bp, Homo sapien
cacactgaagaaaggccttaaatgt

SEQ ID NO: 5770589 - DNA, 25 bp, Homo sapien
tgtagtgaatgtgggaaatccttta

SEQ ID NO: 5770590 - DNA, 25 bp, Homo sapien
gagtgagactccgtctccaaaaaaa

SEQ ID NO: 5770591 - DNA, 25 bp, Homo sapien
tagacaattctctaacctcattcga

SEQ ID NO: 5770592 - DNA, 25 bp, Homo sapien
gtcagactataggtgtggaggtgaa

SEQ ID NO: 5770593 - DNA, 25 bp, Homo sapien
gacaattctctaacctcattcgaca

SEQ ID NO: 5770594 - DNA, 25 bp, Homo sapien
tttctgtactcagaagggacaatgt

SEQ ID NO: 5770595 - DNA, 25 bp, Homo sapien
gggaaatcctttagccagagctcta

SEQ ID NO: 5770596 - DNA, 25 bp, Homo sapien
acgcacctttaatcttgggtgttct

SEQ ID NO: 5770597 - DNA, 25 bp, Homo sapien
agaccttatgaatgcagtgaatgtg

SEQ ID NO: 5770598 - DNA, 25 bp, Homo sapien
agtgggccagaggttctgcgacacc

SEQ ID NO: 5770599 - DNA, 25 bp, Homo sapien
gcatataagtcagtgtagactggtg

SEQ ID NO: 5770600 - DNA, 25 bp, Homo sapien
agataattcacactggagaaaggcc

SEQ ID NO: 5770601 - DNA, 25 bp, Homo sapien
aagcaaacctctgtactctcccatt

SEQ ID NO: 5770602 - DNA, 25 bp, Homo sapien
ttatttctcccaagaagagtgggag

SEQ ID NO: 5770603 - DNA, 25 bp, Homo sapien
ctcaaagtaaagactgccaggcttt

SEQ ID NO: 5770604 - DNA, 25 bp, Homo sapien
agagaagtcgcgaaagtgggccaga

SEQ ID NO: 5770605 - DNA, 25 bp, Homo sapien
tgtagtgaatgtggaaagtctttta

SEQ ID NO: 5770606 - DNA, 25 bp, Homo sapien
acttgttcagcaccagcaaattcac

SEQ ID NO: 5770607 - DNA, 25 bp, Homo sapien
tggtgataggccttatgagtgcagt

SEQ ID NO: 5770608 - DNA, 25 bp, Homo sapien
aaacacacacttgttcagcatcaga

SEQ ID NO: 5770609 - DNA, 25 bp, Homo sapien
gagaaaggccttatgaatgtggcga

SEQ ID NO: 5770610 - DNA, 25 bp, Homo sapien
cattcaacaccagagaattcacagt

SEQ ID NO: 5770611 - DNA, 25 bp, Homo sapien
catgatgcttgtaatgaatttttcc

SEQ ID NO: 5770612 - DNA, 25 bp, Homo sapien
tgaatgcagtgatcgtgagaaagcc

SEQ ID NO: 5770613 - DNA, 25 bp, Homo sapien
ggagactgtggtagccatcttcgta

SEQ ID NO: 5770614 - DNA, 25 bp, Homo sapien
cactggagaaagaccttatgagtgc

SEQ ID NO: 5770615 - DNA, 25 bp, Homo sapien
actggtgataggccttatgagtgca

SEQ ID NO: 5770616 - DNA, 25 bp, Homo sapien
ctcattcaacaccagagaattcaca

SEQ ID NO: 5770617 - DNA, 25 bp, Homo sapien
agttgtggtccagagaatctgagtt

SEQ ID NO: 5770618 - DNA, 25 bp, Homo sapien
tagcctttttcgacaccagagagtt

SEQ ID NO: 5770619 - DNA, 25 bp, Homo sapien
acagcgctctggcctcattcagcac

SEQ ID NO: 5770620 - DNA, 25 bp, Homo sapien
gggtgagctgcgccaggcccgggat

SEQ ID NO: 5770621 - DNA, 25 bp, Homo sapien
gaattcacagtggagaaagacctta

SEQ ID NO: 5770622 - DNA, 25 bp, Homo sapien
caattctctaacctcattcgacacc

SEQ ID NO: 5770623 - DNA, 25 bp, Homo sapien
tgttctgaaggagggctttatgagt

SEQ ID NO: 5770624 - DNA, 25 bp, Homo sapien
aggccaaggcgggcggattgcctga

SEQ ID NO: 5770625 - DNA, 25 bp, Homo sapien
agaagtcgcgaaagtgggccagagg

SEQ ID NO: 5770626 - DNA, 25 bp, Homo sapien
aatcctttagccgcaaatctaacct

SEQ ID NO: 5770627 - DNA, 25 bp, Homo sapien
tcctttacccgcaaatctgacctca

SEQ ID NO: 5770628 - DNA, 25 bp, Homo sapien
tgatggcagaagacagctctttgtt

SEQ ID NO: 5770629 - DNA, 25 bp, Homo sapien
ggtcttcatgtcttttctctgactt

SEQ ID NO: 5770630 - DNA, 25 bp, Homo sapien
gcctgctgcccaaggcctcaaagta

SEQ ID NO: 5770631 - DNA, 25 bp, Homo sapien
tccacattctgattcaccagcctgg

SEQ ID NO: 5770632 - DNA, 25 bp, Homo sapien
gctgcagattccatgtgttgaatta

SEQ ID NO: 5770633 - DNA, 25 bp, Homo sapien
gggtattcttcataagtttcaggta

SEQ ID NO: 5770634 - DNA, 25 bp, Homo sapien
ggaaatcttttagctgcaaatcgga

SEQ ID NO: 5770635 - DNA, 25 bp, Homo sapien
tgtctgttctgaaggagggctttat

SEQ ID NO: 5770636 - DNA, 25 bp, Homo sapien
gggtgaatagattttgtggagatct

SEQ ID NO: 5770637 - DNA, 25 bp, Homo sapien
agagtgtctgttctgaaggagggct

SEQ ID NO: 5770638 - DNA, 25 bp, Homo sapien
ttcgacatagaagagttcacactgg

SEQ ID NO: 5770639 - DNA, 25 bp, Homo sapien
tttgtgttcctgtattgtggcctgg

SEQ ID NO: 5770640 - DNA, 25 bp, Homo sapien
gtgataggccttatgagtgcagtga

SEQ ID NO: 5770641 - DNA, 25 bp, Homo sapien
gtgctatttctttattcagtataat

SEQ ID NO: 5770642 - DNA, 25 bp, Homo sapien
gaatgcagagaatgtgggaaatcct

SEQ ID NO: 5770643 - DNA, 25 bp, Homo sapien
atgagtcacttccccacagtgctca

SEQ ID NO: 5770644 - DNA, 25 bp, Homo sapien
cagaagacagctctttgttctgtat

SEQ ID NO: 5770645 - DNA, 25 bp, Homo sapien
aaaaaattagccaggcgtggcagca

SEQ ID NO: 5770646 - DNA, 25 bp, Homo sapien
gtggcctggtgccatttttgtcagg

SEQ ID NO: 5770647 - DNA, 25 bp, Homo sapien
gtcggtctcacatgatgcttgtaat

SEQ ID NO: 5770648 - DNA, 25 bp, Homo sapien
gaaatcctttagccagagctctagc

SEQ ID NO: 5770649 - DNA, 25 bp, Homo sapien
ctcattcgacatagaagagttcaca

SEQ ID NO: 5770650 - DNA, 25 bp, Homo sapien
gtgggaaatcctttagccagagctc

SEQ ID NO: 5770651 - DNA, 25 bp, Homo sapien
ttcctagcactggtgaggggaatct

SEQ ID NO: 5770652 - DNA, 25 bp, Homo sapien
ctcattgaacaccagagagttcaca

SEQ ID NO: 5770653 - DNA, 25 bp, Homo sapien
atccataaatctgaattcattcacc

SEQ ID NO: 5770654 - DNA, 25 bp, Homo sapien
aatgtagtgaatgtgggaaatcctt

SEQ ID NO: 5770655 - DNA, 25 bp, Homo sapien
tcattcaacaccggagaattcatac

SEQ ID NO: 5770656 - DNA, 25 bp, Homo sapien
cggtctcacatgatgcttgtaatga

SEQ ID NO: 5770657 - DNA, 25 bp, Homo sapien
ttgtccacaggagatccacataatt

SEQ ID NO: 5770658 - DNA, 25 bp, Homo sapien
gttcagcaccagcaaattcacactg

SEQ ID NO: 5770659 - DNA, 25 bp, Homo sapien
ccctgggttattgccatggaatgga

SEQ ID NO: 5770660 - DNA, 25 bp, Homo sapien
ttaatcttgggtgttctattcattg

SEQ ID NO: 5770661 - DNA, 25 bp, Homo sapien
aagccactcccagtggtgaggagcc

SEQ ID NO: 5770662 - DNA, 25 bp, Homo sapien
aatgcccgccccggtcggccgccgc

SEQ ID NO: 5770663 - DNA, 25 bp, Homo sapien
ttcaatgcaaaaagttattacaagt

SEQ ID NO: 5770664 - DNA, 25 bp, Homo sapien
gccatcttcgtaaatttaaactttg

SEQ ID NO: 5770665 - DNA, 25 bp, Homo sapien
gggtgaatacagaaaagcttcaagc

SEQ ID NO: 5770666 - DNA, 25 bp, Homo sapien
gagcagagtgtatctatacaggtca

SEQ ID NO: 5770667 - DNA, 25 bp, Homo sapien
tcttcatgtcttttctctgacttta

SEQ ID NO: 5770668 - DNA, 25 bp, Homo sapien
attcaacaccggagaattcatactg

SEQ ID NO: 5770669 - DNA, 25 bp, Homo sapien
gttgaattatttcacctgtggggag

SEQ ID NO: 5770670 - DNA, 25 bp, Homo sapien
gtgatgtcagcatgaaggggtgaat

SEQ ID NO: 5770671 - DNA, 25 bp, Homo sapien
aaattattaatagcccaagcatgta

SEQ ID NO: 5770672 - DNA, 25 bp, Homo sapien
agaaaggccttatgaatgcagtgaa

SEQ ID NO: 5770673 - DNA, 25 bp, Homo sapien
agagaggtcacactggagaaagacc

SEQ ID NO: 5770674 - DNA, 25 bp, Homo sapien
gagctgcgccaggcccgggataggg

SEQ ID NO: 5770675 - DNA, 25 bp, Homo sapien
tcagggtatgacctttgaggatgtg

SEQ ID NO: 5770676 - DNA, 25 bp, Homo sapien
ctggaaaaggaaggtggatgaggct

SEQ ID NO: 5770677 - DNA, 25 bp, Homo sapien
ctttatccataaatctgaattcatt

SEQ ID NO: 5770678 - DNA, 25 bp, Homo sapien
cagtggtgaggagccacacagtagc

SEQ ID NO: 5770679 - DNA, 25 bp, Homo sapien
ttcctgtactgcgatgtgatgctgg

SEQ ID NO: 5770680 - DNA, 25 bp, Homo sapien
ctctgaggaggttcattgtaatttc

SEQ ID NO: 5770681 - DNA, 25 bp, Homo sapien
aacagagtgagactccgtctccaaa

SEQ ID NO: 5770682 - DNA, 25 bp, Homo sapien
acagaaaagcttcaagccacaaaca

SEQ ID NO: 5770683 - DNA, 25 bp, Homo sapien
gagaaagaccttatgaatgcagaga

SEQ ID NO: 5770684 - DNA, 25 bp, Homo sapien
tttagccgcaaatttatcctgattc

SEQ ID NO: 5770685 - DNA, 25 bp, Homo sapien
ttacaatgaagaagagccctggaaa

SEQ ID NO: 5770686 - DNA, 25 bp, Homo sapien
ggcaaatcttttagacagcgctctg

SEQ ID NO: 5770687 - DNA, 25 bp, Homo sapien
tttactatcgctgagatcattatca

SEQ ID NO: 5770688 - DNA, 25 bp, Homo sapien
aggccttaaatgtgaagggaatgtg

SEQ ID NO: 5770689 - DNA, 25 bp, Homo sapien
cttctgcttcagtgctgaccttcac

SEQ ID NO: 5770690 - DNA, 25 bp, Homo sapien
tagcctgatttatgtcactgccaat

SEQ ID NO: 5770691 - DNA, 25 bp, Homo sapien
ttatcagtgcagtgattgtgggaaa

SEQ ID NO: 5770692 - DNA, 25 bp, Homo sapien
gccttcacttgcaagaacacacttg

SEQ ID NO: 5770693 - DNA, 25 bp, Homo sapien
accggctgcagattccatgtgttga

SEQ ID NO: 5770694 - DNA, 25 bp, Homo sapien
gcaccactgcactccagcccaggca

SEQ ID NO: 5770695 - DNA, 25 bp, Homo sapien
ccagccacttgggaggctgaggcag

SEQ ID NO: 5770696 - DNA, 25 bp, Homo sapien
aaaagatgtttgagtgtagtgaatg

SEQ ID NO: 5770697 - DNA, 25 bp, Homo sapien
ggatgtggccatttatttctcccaa

SEQ ID NO: 5770698 - DNA, 25 bp, Homo sapien
tgaatgtagtgaatgtggaaagtct

SEQ ID NO: 5770699 - DNA, 25 bp, Homo sapien
attcaacaccagagaggtcacactg

SEQ ID NO: 5770700 - DNA, 25 bp, Homo sapien
tttgttgtcagactataggtgtgga

SEQ ID NO: 5770701 - DNA, 25 bp, Homo sapien
atggagaatgaggcgatagcttctg

SEQ ID NO: 5770702 - DNA, 25 bp, Homo sapien
acaccagagagttcactctggagaa

SEQ ID NO: 5770703 - DNA, 25 bp, Homo sapien
tcaggtatgtgggaagctctgagga

SEQ ID NO: 5770704 - DNA, 25 bp, Homo sapien
agaccttatgagtgcagtgaatgtg

SEQ ID NO: 5770705 - DNA, 25 bp, Homo sapien
gagaaagcctttatccataaatctg

SEQ ID NO: 5770706 - DNA, 25 bp, Homo sapien
attcacagtggagaaagaccttatg

SEQ ID NO: 5770707 - DNA, 25 bp, Homo sapien
cttctaagggcaatacacccaccca

SEQ ID NO: 5770708 - DNA, 25 bp, Homo sapien
ttagccaggcgtggcagcatgcgcc

SEQ ID NO: 5770709 - DNA, 25 bp, Homo sapien
ttcctgtattgtggcctggtgccat

SEQ ID NO: 5770710 - DNA, 25 bp, Homo sapien
tctgtttactatcgctgagatcatt

SEQ ID NO: 5770711 - DNA, 25 bp, Homo sapien
gccacacagtagcagcagcaagcat

SEQ ID NO: 5770712 - DNA, 25 bp, Homo sapien
catgtcttttctctgactttagagt

SEQ ID NO: 5770713 - DNA, 25 bp, Homo sapien
attatcagaaaatagtctggccggg

SEQ ID NO: 5770714 - DNA, 25 bp, Homo sapien
tctgaggctgaagccatttcacatt

SEQ ID NO: 5770715 - DNA, 25 bp, Homo sapien
aaagtcttttagccaaagtgctagc

SEQ ID NO: 5770716 - DNA, 25 bp, Homo sapien
ggattgcctgagctcaggagttcaa

SEQ ID NO: 5770717 - DNA, 25 bp, Homo sapien
ggtgcacaccatgtgcatgagtcac

SEQ ID NO: 5770718 - DNA, 25 bp, Homo sapien
acagagaagtcgcgaaagtgggcca

SEQ ID NO: 5770719 - DNA, 25 bp, Homo sapien
gcagtgattgtgggaaatcttttag

SEQ ID NO: 5770720 - DNA, 25 bp, Homo sapien
ttgtaatgaatttttccacattctg

SEQ ID NO: 5770721 - DNA, 25 bp, Homo sapien
aatctaacctcattgaacaccagag

SEQ ID NO: 5770722 - DNA, 25 bp, Homo sapien
tgcacatgtaacatccctgggttat

SEQ ID NO: 5770723 - DNA, 25 bp, Homo sapien
aatttatcctgattcaacaccaaag

SEQ ID NO: 5770724 - DNA, 25 bp, Homo sapien
ggagaaaggccttatgaatgtagtg

SEQ ID NO: 5770725 - DNA, 25 bp, Homo sapien
cttgatgagtctcagaggttcctgt

SEQ ID NO: 5770726 - DNA, 25 bp, Homo sapien
aatagtctggccgggcatggtgtaa

SEQ ID NO: 5770727 - DNA, 25 bp, Homo sapien
aaggtggatgaggctacatttgtga

SEQ ID NO: 5770728 - DNA, 25 bp, Homo sapien
atataagtcagtgtagactggtgcc

SEQ ID NO: 5770729 - DNA, 25 bp, Homo sapien
tgaaaaggaggcagttgtgacaatc

SEQ ID NO: 5770730 - DNA, 25 bp, Homo sapien
gtattcttcataagtttcaggtatg

SEQ ID NO: 5770731 - DNA, 25 bp, Homo sapien
agaaggcggaagttgcagtgagctg

SEQ ID NO: 5770732 - DNA, 25 bp, Homo sapien
agtggggtgaatacagaaaagcttc

SEQ ID NO: 5770733 - DNA, 25 bp, Homo sapien
ctggagaaagaccttatgaatgcag

SEQ ID NO: 5770734 - DNA, 25 bp, Homo sapien
gtgagaaagccttcacttgcaagaa

SEQ ID NO: 5770735 - DNA, 25 bp, Homo sapien
caatgtgggaaaccctttacccaca

SEQ ID NO: 5770736 - DNA, 25 bp, Homo sapien
tgtgatggcagaagacagctctttg

SEQ ID NO: 5770737 - DNA, 25 bp, Homo sapien
gaggtcgcgactgagggacgggaca

SEQ ID NO: 5770738 - DNA, 25 bp, Homo sapien
ctggaggagtgcgtcatgagtgtgg

SEQ ID NO: 5770739 - DNA, 25 bp, Homo sapien
tgcggctgagcaccaaaccacatcc

SEQ ID NO: 5770740 - DNA, 25 bp, Homo sapien
atgtggcaaatcttttagacagcgc

SEQ ID NO: 5770741 - DNA, 25 bp, Homo sapien
tgcacaccatgtgcatgagtcactt

SEQ ID NO: 5770742 - DNA, 25 bp, Homo sapien
ggaaagtcttttagccaaagtgcta

SEQ ID NO: 5770743 - DNA, 25 bp, Homo sapien
gtccacaggagatccacataattcc

SEQ ID NO: 5770744 - DNA, 25 bp, Homo sapien
agaaaggccttaaatgtgaagggaa

SEQ ID NO: 5770745 - DNA, 25 bp, Homo sapien
agtttcaggtatgtgggaagctctg

SEQ ID NO: 5770746 - DNA, 25 bp, Homo sapien
aggctgaagccatttcacatttcac

SEQ ID NO: 5770747 - DNA, 25 bp, Homo sapien
gagaactttgcacatgtaacatccc

SEQ ID NO: 5770748 - DNA, 25 bp, Homo sapien
acctttgaggatgtggccatttatt

SEQ ID NO: 5770749 - DNA, 25 bp, Homo sapien
ggcgagtgcgggaaatcctttagac

SEQ ID NO: 5770750 - DNA, 25 bp, Homo sapien
aacgtgaattttgttcagttgtcca

SEQ ID NO: 5770751 - DNA, 25 bp, Homo sapien
gcagcaagcatatacaggcattttt

SEQ ID NO: 5770752 - DNA, 25 bp, Homo sapien
atgaatgcagagaatgtgggaaatc

SEQ ID NO: 5770753 - DNA, 25 bp, Homo sapien
gctcaatggcggcagtcgcgctgag

SEQ ID NO: 5770754 - DNA, 25 bp, Homo sapien
tgtactcagaagggacaatgtgatg

SEQ ID NO: 5770755 - DNA, 25 bp, Homo sapien
gatgaggctacatttgtgaccggct

SEQ ID NO: 5770756 - DNA, 25 bp, Homo sapien
tatgagtgcagtgaatgtggcaaat

SEQ ID NO: 5770757 - DNA, 25 bp, Homo sapien
aacagtaattgggacagaaactcca

SEQ ID NO: 5770758 - DNA, 25 bp, Homo sapien
cctgcaaaggagccatgtgccatgg

SEQ ID NO: 5770759 - DNA, 25 bp, Homo sapien
tggtgccatttttgtcaggtcagag

SEQ ID NO: 5770760 - DNA, 25 bp, Homo sapien
tgcccgccccggtcggccgccgctc

SEQ ID NO: 5770761 - DNA, 25 bp, Homo sapien
aactgcttggtgcacattgctttaa

SEQ ID NO: 5770762 - DNA, 25 bp, Homo sapien
taatcctaacactttgggaggccaa

SEQ ID NO: 5770763 - DNA, 25 bp, Homo sapien
gggaaatcctttagccgcaaatcta

SEQ ID NO: 5770764 - DNA, 25 bp, Homo sapien
gccatttcacatttcacccctacca

SEQ ID NO: 5770765 - DNA, 25 bp, Homo sapien
aagccttcacttgcaagaacacact

SEQ ID NO: 5770766 - DNA, 25 bp, Homo sapien
ctttacccgcaaatctgacctcatt

SEQ ID NO: 5770767 - DNA, 25 bp, Homo sapien
tgaatgcagtgaatgtggaaaatcc

SEQ ID NO: 5770768 - DNA, 25 bp, Homo sapien
ggagaagactgcagtaaattagatg

SEQ ID NO: 5770769 - DNA, 25 bp, Homo sapien
ttttgttcagttgtccacaggagat

SEQ ID NO: 5770770 - DNA, 25 bp, Homo sapien
atgagaggcttctgcttcagtgctg

SEQ ID NO: 5770771 - DNA, 25 bp, Homo sapien
aggcctcaaagtaaagactgccagg

SEQ ID NO: 5770772 - DNA, 25 bp, Homo sapien
aatctgttgcccaggtcctgcaaag

SEQ ID NO: 5770773 - DNA, 25 bp, Homo sapien
ctgcagtaaattagatggaatgact

SEQ ID NO: 5770774 - DNA, 25 bp, Homo sapien
agctctagcctcattcaacaccaga

SEQ ID NO: 5770775 - DNA, 25 bp, Homo sapien
tgtggtgaatgtaggaaaaccttta

SEQ ID NO: 5770776 - DNA, 25 bp, Homo sapien
atgtgggaagctctgaggaggttca

SEQ ID NO: 5770777 - DNA, 25 bp, Homo sapien
tgcagtcaatgtgggaaacccttta

SEQ ID NO: 5770778 - DNA, 25 bp, Homo sapien
gacctactccaacacgaagccactc

SEQ ID NO: 5770779 - DNA, 25 bp, Homo sapien
tcattatcagaaaatagtctggccg

SEQ ID NO: 5770780 - DNA, 25 bp, Homo sapien
tgatgctggagaactttgcacatgt

SEQ ID NO: 5770781 - DNA, 25 bp, Homo sapien
tgtgggaaatcctttagacaattct

SEQ ID NO: 5770782 - DNA, 25 bp, Homo sapien
catttttgtcaggtcagaggtcacc

SEQ ID NO: 5770783 - DNA, 25 bp, Homo sapien
cagtaattgggacagaaactccagg

SEQ ID NO: 5770784 - DNA, 25 bp, Homo sapien
gttcagttgtccacaggagatccac

SEQ ID NO: 5770785 - DNA, 25 bp, Homo sapien
cagtgaatgtggaaaatcctttacc

SEQ ID NO: 5770786 - DNA, 25 bp, Homo sapien
cctatagcctgatttatgtcactgc

SEQ ID NO: 5770787 - DNA, 25 bp, Homo sapien
gcaaatctaacctcattcgacatcg

SEQ ID NO: 5770788 - DNA, 25 bp, Homo sapien
aagatgtttgagtgtagtgaatgtg

SEQ ID NO: 5770789 - DNA, 25 bp, Homo sapien
tagtgaatgtgaggaatcctttagc

SEQ ID NO: 5770790 - DNA, 25 bp, Homo sapien
acatccctgggttattgccatggaa

SEQ ID NO: 5770791 - DNA, 25 bp, Homo sapien
tcaccaccagagacgtcacactgga

SEQ ID NO: 5770792 - DNA, 25 bp, Homo sapien
attcagcaccggagacttcatactg

SEQ ID NO: 5770793 - DNA, 25 bp, Homo sapien
tactggagaaaggccttatgaatgt

SEQ ID NO: 5770794 - DNA, 25 bp, Homo sapien
aatcgcttgaacccagaaggcggaa

SEQ ID NO: 5770795 - DNA, 25 bp, Homo sapien
agccacaaacacacacttgttcagc

SEQ ID NO: 5770796 - DNA, 25 bp, Homo sapien
cactgcactccagcccaggcaacag

SEQ ID NO: 5770797 - DNA, 25 bp, Homo sapien
ccaatttctgaggctgaagccattt

SEQ ID NO: 5770798 - DNA, 25 bp, Homo sapien
tggaggagactgtggtagccatctt

SEQ ID NO: 5770799 - DNA, 25 bp, Homo sapien
ttagacagcgctctggcctcattca

SEQ ID NO: 5770800 - DNA, 25 bp, Homo sapien
aaactttctgtactcagaagggaca

SEQ ID NO: 5770801 - DNA, 25 bp, Homo sapien
tttcacatttcacccctaccacctg

SEQ ID NO: 5770802 - DNA, 25 bp, Homo sapien
actcttctaaaagttcatctacaaa

SEQ ID NO: 5770803 - DNA, 25 bp, Homo sapien
acacacttgttcagcaccagcaaat

SEQ ID NO: 5770804 - DNA, 25 bp, Homo sapien
ccgccgctccccgcctagtccacgg

SEQ ID NO: 5770805 - DNA, 25 bp, Homo sapien
gagttcacactggagaaatgcctta

SEQ ID NO: 5770806 - DNA, 25 bp, Homo sapien
cactggaggagtgcgtcatgagtgt

SEQ ID NO: 5770807 - DNA, 25 bp, Homo sapien
ttctgcagtggaggtcgcgactgag

SEQ ID NO: 5770808 - DNA, 25 bp, Homo sapien
ttgaacaccagagagttcacactgg

SEQ ID NO: 5770809 - DNA, 25 bp, Homo sapien
tggtgaatgtaggaaaacctttagc

SEQ ID NO: 5770810 - DNA, 25 bp, Homo sapien
actttctgtactcagaagggacaat

SEQ ID NO: 5770811 - DNA, 25 bp, Homo sapien
ccacttgggaggctgaggcaggaga

SEQ ID NO: 5770812 - DNA, 25 bp, Homo sapien
tcaccatgaaaaggaggcagttgtg

SEQ ID NO: 5770813 - DNA, 25 bp, Homo sapien
cacatgatgcttgtaatgaattttt

SEQ ID NO: 5770814 - DNA, 25 bp, Homo sapien
aaatcttttagctgcaaatcggaac

SEQ ID NO: 5770815 - DNA, 25 bp, Homo sapien
tgttcgaatgcccgccccggtcggc

SEQ ID NO: 5770816 - DNA, 25 bp, Homo sapien
cgcgaaagtgggccagaggttctgc

SEQ ID NO: 5770817 - DNA, 25 bp, Homo sapien
ggtgcacattgctttaatttataat

SEQ ID NO: 5770818 - DNA, 25 bp, Homo sapien
aaaattagccaggcgtggcagcatg

SEQ ID NO: 5770819 - DNA, 25 bp, Homo sapien
ccagcatcaaaagcattacaatgaa

SEQ ID NO: 5770820 - DNA, 25 bp, Homo sapien
tacacaagataattcacactggaga

SEQ ID NO: 5770821 - DNA, 25 bp, Homo sapien
tctgtattgctctaattggcctgct

SEQ ID NO: 5770822 - DNA, 25 bp, Homo sapien
ctgaggcaggagaatcgcttgaacc

SEQ ID NO: 5770823 - DNA, 25 bp, Homo sapien
attaagatgtgtgtcccagtcttga

SEQ ID NO: 5770824 - DNA, 25 bp, Homo sapien
cgacaccacctcgggtgagctgcgc

SEQ ID NO: 5770825 - DNA, 25 bp, Homo sapien
cctgtggggaggccttcccagcccc

SEQ ID NO: 5770826 - DNA, 25 bp, Homo sapien
agaccttatgagtgcagtcaatgtg

SEQ ID NO: 5770827 - DNA, 25 bp, Homo sapien
gtgctgtgagtgtgggaaatccttt

SEQ ID NO: 5770828 - DNA, 25 bp, Homo sapien
aatgcagtgatcgtgagaaagcctt

SEQ ID NO: 5770829 - DNA, 25 bp, Homo sapien
aggtcagaggtcaccatgaaaagga

SEQ ID NO: 5770830 - DNA, 25 bp, Homo sapien
tcctttagccagagctctagcctca

SEQ ID NO: 5770831 - DNA, 25 bp, Homo sapien
gaatctgagttgtgctgtcagcttt

SEQ ID NO: 5770832 - DNA, 25 bp, Homo sapien
agactggtgccatttgttgtcagac

SEQ ID NO: 5770833 - DNA, 25 bp, Homo sapien
cacatgtaacatccctgggttattg

SEQ ID NO: 5770834 - DNA, 25 bp, Homo sapien
tgaaagacattttgcctgcggctga

SEQ ID NO: 5770835 - DNA, 25 bp, Homo sapien
gtgttctattcattgcatagaatga

SEQ ID NO: 5770836 - DNA, 25 bp, Homo sapien
gcctttttcgacaccagagagttca

SEQ ID NO: 5770837 - DNA, 25 bp, Homo sapien
tgtgagaaatcctttagccgcaaat

SEQ ID NO: 5770838 - DNA, 25 bp, Homo sapien
ccagcctggaaactgcttggtgcac

SEQ ID NO: 5770839 - DNA, 25 bp, Homo sapien
atctaacctcattcgacatcggaga

SEQ ID NO: 5770840 - DNA, 25 bp, Homo sapien
gattcaacaccaaagagttcacact

SEQ ID NO: 5770841 - DNA, 25 bp, Homo sapien
cctcattcagcaccggagacttcat

SEQ ID NO: 5770842 - DNA, 25 bp, Homo sapien
agaaaatagtctggccgggcatggt

SEQ ID NO: 5770843 - DNA, 25 bp, Homo sapien
aattatttcacctgtggggaggcct

SEQ ID NO: 5770844 - DNA, 25 bp, Homo sapien
cctttagccgcaaatttatcctgat

SEQ ID NO: 5770845 - DNA, 25 bp, Homo sapien
aaaatcctttacccgcaaatctgac

SEQ ID NO: 5770846 - DNA, 25 bp, Homo sapien
atcagtgctgtgagtgtgggaaatc

SEQ ID NO: 5770847 - DNA, 25 bp, Homo sapien
tgagtgcagtcaatgtgggaaaccc

SEQ ID NO: 5770848 - DNA, 25 bp, Homo sapien
gaaggagggctttatgagtgtagca

SEQ ID NO: 5770849 - DNA, 25 bp, Homo sapien
gtcccagtcttgaaagacattttgc

SEQ ID NO: 5770850 - DNA, 25 bp, Homo sapien
ctgaggaggttcattgtaatttcta

SEQ ID NO: 5770851 - DNA, 25 bp, Homo sapien
ttagccaaagtgctagcctcattca

SEQ ID NO: 5770852 - DNA, 25 bp, Homo sapien
ttgctctaattggcctgctgcccaa

SEQ ID NO: 5770853 - DNA, 25 bp, Homo sapien
tcagaaaatagtctggccgggcatg

SEQ ID NO: 5770854 - DNA, 25 bp, Homo sapien
gggttattgccatggaatggagaat

SEQ ID NO: 5770855 - DNA, 25 bp, Homo sapien
aggccttatgaatgtagtgaatgtg

SEQ ID NO: 5770856 - DNA, 25 bp, Homo sapien
tttccacattctgattcaccagcct

SEQ ID NO: 5770857 - DNA, 25 bp, Homo sapien
gggcaacatggtgaaatcccatgtc

SEQ ID NO: 5770858 - DNA, 25 bp, Homo sapien
ttcaatctcattcgacatagaagag

SEQ ID NO: 5770859 - DNA, 25 bp, Homo sapien
gactgagggacgggacagagaagtc

SEQ ID NO: 5770860 - DNA, 25 bp, Homo sapien
aaagactgccaggctttgtgttcct

SEQ ID NO: 5770861 - DNA, 25 bp, Homo sapien
tccccacagtgctcagagaagcaaa

SEQ ID NO: 5770862 - DNA, 25 bp, Homo sapien
catggaatggagaatgaggcgatag

SEQ ID NO: 5770863 - DNA, 25 bp, Homo sapien
tccacataattcctagcactggtga

SEQ ID NO: 5770864 - DNA, 25 bp, Homo sapien
tggggtattcttcataagtttcagg

SEQ ID NO: 5770865 - DNA, 25 bp, Homo sapien
tttgagtgtagtgaatgtgaggaat

SEQ ID NO: 5770866 - DNA, 25 bp, Homo sapien
agtccacggagctcaatggcggcag

SEQ ID NO: 5770867 - DNA, 25 bp, Homo sapien
agaatgtgggaaatcctttagacaa

SEQ ID NO: 5770868 - DNA, 25 bp, Homo sapien
tgcttctgtgaacgtgaattttgtt

SEQ ID NO: 5770869 - DNA, 25 bp, Homo sapien
tagtgaatgtggaaagtcttttagc

SEQ ID NO: 5770870 - DNA, 25 bp, Homo sapien
agttcacactggagaaaggccttat

SEQ ID NO: 5770871 - DNA, 25 bp, Homo sapien
tccttgatgagtctcagaggttcct

SEQ ID NO: 5770872 - DNA, 25 bp, Homo sapien
gacaaagctctagcctttttcgaca

SEQ ID NO: 5770873 - DNA, 25 bp, Homo sapien
ttgaggatgtggccatttatttctc

SEQ ID NO: 5770874 - DNA, 25 bp, Homo sapien
tcagttgtccacaggagatccacat

SEQ ID NO: 5770875 - DNA, 25 bp, Homo sapien
tttagacaattctctaacctcattc

SEQ ID NO: 5770876 - DNA, 25 bp, Homo sapien
gtgaatgtaggaaaacctttagcta

SEQ ID NO: 5770877 - DNA, 25 bp, Homo sapien
agccaggcgtggcagcatgcgccta

SEQ ID NO: 5770878 - DNA, 25 bp, Homo sapien
agtgaatgtgagaaatcctttagcc

SEQ ID NO: 5770879 - DNA, 25 bp, Homo sapien
gcttctgagcagagtgtatctatac

SEQ ID NO: 5770880 - DNA, 25 bp, Homo sapien
gctttatgagtgtagcaaatgtgag

SEQ ID NO: 5770881 - DNA, 25 bp, Homo sapien
ataaatctgaattcattcaccacca

SEQ ID NO: 5770882 - DNA, 25 bp, Homo sapien
ggagttcaagaccagcctgggcaac

SEQ ID NO: 5770883 - DNA, 25 bp, Homo sapien
gactcggctcagggtatgacctttg

SEQ ID NO: 5770884 - DNA, 25 bp, Homo sapien
cacggacctactccaacacgaagcc

SEQ ID NO: 5770885 - DNA, 25 bp, Homo sapien
aggctacatttgtgaccggctgcag

SEQ ID NO: 5770886 - DNA, 25 bp, Homo sapien
tgtgttcctgtattgtggcctggtg

SEQ ID NO: 5770887 - DNA, 25 bp, Homo sapien
ccacaaatcagaccttattcagcac

SEQ ID NO: 5770888 - DNA, 25 bp, Homo sapien
cctcattcaacaccagagaggtcac

SEQ ID NO: 5770889 - DNA, 25 bp, Homo sapien
cagtgctcagagaagcaaacctctg

SEQ ID NO: 5770890 - DNA, 25 bp, Homo sapien
tgtgatgctggagaactttgcacat

SEQ ID NO: 5770891 - DNA, 25 bp, Homo sapien
tcaacagtaattgggacagaaactc

SEQ ID NO: 5770892 - DNA, 25 bp, Homo sapien
caagcatatacaggcatttttcaat

SEQ ID NO: 5770893 - DNA, 25 bp, Homo sapien
tttgtcaggtcagaggtcaccatga

SEQ ID NO: 5770894 - DNA, 25 bp, Homo sapien
cacactggagaaaggccttatgaat

SEQ ID NO: 5770895 - DNA, 25 bp, Homo sapien
ggttcctgtactgcgatgtgatgct

SEQ ID NO: 5770896 - DNA, 25 bp, Homo sapien
taacatccctgggttattgccatgg

SEQ ID NO: 5770897 - DNA, 25 bp, Homo sapien
tcattgtaatttctaatctgccgag

SEQ ID NO: 5770898 - DNA, 25 bp, Homo sapien
aattcacactggacaaaagatgttt

SEQ ID NO: 5770899 - DNA, 25 bp, Homo sapien
gccgctccccgcctagtccacggag

SEQ ID NO: 5770900 - DNA, 25 bp, Homo sapien
gagatcattatcagaaaatagtctg

SEQ ID NO: 5770901 - DNA, 25 bp, Homo sapien
ggcaggagaatcgcttgaacccaga

SEQ ID NO: 5770902 - DNA, 25 bp, Homo sapien
tgaccggctgcagattccatgtgtt

SEQ ID NO: 5770903 - DNA, 25 bp, Homo sapien
aaatctaacctcattcgacatcgga

SEQ ID NO: 5770904 - DNA, 25 bp, Homo sapien
tgcttcagtgctgaccttcaccagc

SEQ ID NO: 5770905 - DNA, 25 bp, Homo sapien
ctccccgcctagtccacggagctca

SEQ ID NO: 5770906 - DNA, 25 bp, Homo sapien
acaatgtgatggcagaagacagctc

SEQ ID NO: 5770907 - DNA, 25 bp, Homo sapien
cccccacggacctactccaacacga

SEQ ID NO: 5770908 - DNA, 25 bp, Homo sapien
aaggagccatgtgccatggcatata

SEQ ID NO: 5770909 - DNA, 25 bp, Homo sapien
agctctgaggaggttcattgtaatt

SEQ ID NO: 5770910 - DNA, 25 bp, Homo sapien
gttattgccatggaatggagaatga

SEQ ID NO: 5770911 - DNA, 25 bp, Homo sapien
tgcccaaggcctcaaagtaaagact

SEQ ID NO: 5770912 - DNA, 25 bp, Homo sapien
tacacctgacccagttgtggtccag

SEQ ID NO: 5770913 - DNA, 25 bp, Homo sapien
attcaacaccagagagttcacactg

SEQ ID NO: 5770914 - DNA, 25 bp, Homo sapien
ctcattcgacaccgcagcattcaca

SEQ ID NO: 5770915 - DNA, 25 bp, Homo sapien
cctttagctacaaatctaacctcat

SEQ ID NO: 5770916 - DNA, 25 bp, Homo sapien
gactataggtgtggaggtgaaatta

SEQ ID NO: 5770917 - DNA, 25 bp, Homo sapien
tcgcgactgagggacgggacagaga

SEQ ID NO: 5770918 - DNA, 25 bp, Homo sapien
ctgagattgcaccactgcactccag

SEQ ID NO: 5770919 - DNA, 25 bp, Homo sapien
attcaccaccagagacgtcacactg

SEQ ID NO: 5770920 - DNA, 25 bp, Homo sapien
agatgtgtgtcccagtcttgaaaga

SEQ ID NO: 5770921 - DNA, 25 bp, Homo sapien
tctaagggcaatacacccacccaga

SEQ ID NO: 5770922 - DNA, 25 bp, Homo sapien
tattgccatggaatggagaatgagg

SEQ ID NO: 5770923 - DNA, 25 bp, Homo sapien
caaaagcattacaatgaagaagagc

SEQ ID NO: 5770924 - DNA, 25 bp, Homo sapien
tttaaactttgagcacccacagtgg

SEQ ID NO: 5770925 - DNA, 25 bp, Homo sapien
caaggcctcaaagtaaagactgcca

SEQ ID NO: 5770926 - DNA, 25 bp, Homo sapien
tcccagcccccacggacctactcca

SEQ ID NO: 5770927 - DNA, 25 bp, Homo sapien
ctgattcaacaccaaagagttcaca

SEQ ID NO: 5770928 - DNA, 25 bp, Homo sapien
gaatggagaatgaggcgatagcttc

SEQ ID NO: 5770929 - DNA, 25 bp, Homo sapien
atgtgggaaatcctttagccgcaaa

SEQ ID NO: 5770930 - DNA, 25 bp, Homo sapien
tttagctgcaaatcggaactcattc

SEQ ID NO: 5770931 - DNA, 25 bp, Homo sapien
cagagaatctgagttgtgctgtcag

SEQ ID NO: 5770932 - DNA, 25 bp, Homo sapien
agggtcttcatgtcttttctctgac

SEQ ID NO: 5770933 - DNA, 25 bp, Homo sapien
tcactgccaatttctgaggctgaag

SEQ ID NO: 5770934 - DNA, 25 bp, Homo sapien
tcaggtcagaggtcaccatgaaaag

SEQ ID NO: 5770935 - DNA, 25 bp, Homo sapien
aggcccgggatagggactgttgtgt

SEQ ID NO: 5770936 - DNA, 25 bp, Homo sapien
tcggccgccgctccccgcctagtcc

SEQ ID NO: 5770937 - DNA, 25 bp, Homo sapien
attgtgggaaatcttttagctgcaa

SEQ ID NO: 5770938 - DNA, 25 bp, Homo sapien
tgcctgcggctgagcaccaaaccac

SEQ ID NO: 5770939 - DNA, 25 bp, Homo sapien
gttgtgttcgaatgcccgccccggt

SEQ ID NO: 5770940 - DNA, 25 bp, Homo sapien
gtgagctgcgccaggcccgggatag

SEQ ID NO: 5770941 - DNA, 25 bp, Homo sapien
gtgcgtcatgagtgtggtgaatgta

SEQ ID NO: 5770942 - DNA, 25 bp, Homo sapien
ggccatttatttctcccaagaagag

SEQ ID NO: 5770943 - DNA, 25 bp, Homo sapien
gataggccttatgagtgcagtgaat

SEQ ID NO: 5770944 - DNA, 25 bp, Homo sapien
tcatctacaaattttccagtgaata

SEQ ID NO: 5770945 - DNA, 25 bp, Homo sapien
aagcctttatccataaatctgaatt

SEQ ID NO: 5770946 - DNA, 25 bp, Homo sapien
catacttgggtagcacaagcatgag

SEQ ID NO: 5770947 - DNA, 25 bp, Homo sapien
gccccggtcggccgccgctccccgc

SEQ ID NO: 5770948 - DNA, 25 bp, Homo sapien
ttacgcacctttaatcttgggtgtt

SEQ ID NO: 5770949 - DNA, 25 bp, Homo sapien
cattgcatagaatgacttgtaagca

SEQ ID NO: 5770950 - DNA, 25 bp, Homo sapien
acactggagaaatgccttatcagtg

SEQ ID NO: 5770951 - DNA, 25 bp, Homo sapien
agtgcatacagaaattctcaggatc

SEQ ID NO: 5770952 - DNA, 25 bp, Homo sapien
cataagtttcaggtatgtgggaagc

SEQ ID NO: 5770953 - DNA, 25 bp, Homo sapien
atctcattcgacatagaagagttca

SEQ ID NO: 5770954 - DNA, 25 bp, Homo sapien
tgagtgtgggaaatcctttagacaa

SEQ ID NO: 5770955 - DNA, 25 bp, Homo sapien
ctcacctcagtgagattaagatgtg

SEQ ID NO: 5770956 - DNA, 25 bp, Homo sapien
cttatgaatgtagtgaatgtggaaa

SEQ ID NO: 5770957 - DNA, 25 bp, Homo sapien
gcaagaacacacttgttcagcacca

SEQ ID NO: 5770958 - DNA, 25 bp, Homo sapien
aaatgtgagaaagccttcacttgca

SEQ ID NO: 5770959 - DNA, 25 bp, Homo sapien
gtcgcgaaagtgggccagaggttct

SEQ ID NO: 5770960 - DNA, 25 bp, Homo sapien
atgtagggtcttcatgtcttttctc

SEQ ID NO: 5770961 - DNA, 25 bp, Homo sapien
atcagtgcagtgattgtgggaaatc

SEQ ID NO: 5770962 - DNA, 25 bp, Homo sapien
aaatcctttagacaattctctaacc

SEQ ID NO: 5770963 - DNA, 25 bp, Homo sapien
gtcgcgctgagggactcggctcagg

SEQ ID NO: 5770964 - DNA, 25 bp, Homo sapien
tgactcttctaaaagttcatctaca

SEQ ID NO: 5770965 - DNA, 25 bp, Homo sapien
gcattcacactggtgataggcctta

SEQ ID NO: 5770966 - DNA, 25 bp, Homo sapien
ggggaaattattaatagcccaagca

SEQ ID NO: 5770967 - DNA, 25 bp, Homo sapien
ttcacccctaccacctggcaggtgc

SEQ ID NO: 5770968 - DNA, 25 bp, Homo sapien
tatgtcactgccaatttctgaggct

SEQ ID NO: 5770969 - DNA, 25 bp, Homo sapien
ttcgacaccagagagttcactctgg

SEQ ID NO: 5770970 - DNA, 25 bp, Homo sapien
actctcccatttgcttggggaaatt

SEQ ID NO: 5770971 - DNA, 25 bp, Homo sapien
catcagagtgtctgttctgaaggag

SEQ ID NO: 5770972 - DNA, 25 bp, Homo sapien
acaccacctcgggtgagctgcgcca

SEQ ID NO: 5770973 - DNA, 25 bp, Homo sapien
agaaaggccttatgaatgtagtgaa

SEQ ID NO: 5770974 - DNA, 25 bp, Homo sapien
ccagtgcttctgtgaacgtgaattt

SEQ ID NO: 5770975 - DNA, 25 bp, Homo sapien
gttcagcatcagagtgtctgttctg

SEQ ID NO: 5770976 - DNA, 25 bp, Homo sapien
tcccatgtctactaaaatacaaaaa

SEQ ID NO: 5770977 - DNA, 25 bp, Homo sapien
gccatggcatataagtcagtgtaga

SEQ ID NO: 5770978 - DNA, 25 bp, Homo sapien
ctctgtactctcccatttgcttggg

SEQ ID NO: 5770979 - DNA, 25 bp, Homo sapien
agagaatgtgggaaatcctttagac

SEQ ID NO: 5770980 - DNA, 25 bp, Homo sapien
aagcagaatagtgatgtcagcatga

SEQ ID NO: 5770981 - DNA, 25 bp, Homo sapien
ccaaaccacatcccctgtgcaaaag

SEQ ID NO: 5770982 - DNA, 25 bp, Homo sapien
acacccacccagaaaactcacctca

SEQ ID NO: 5770983 - DNA, 25 bp, Homo sapien
atcttacacaagataattcacactg

SEQ ID NO: 5770984 - DNA, 25 bp, Homo sapien
ctttgaggatgtggccatttatttc

SEQ ID NO: 5770985 - DNA, 25 bp, Homo sapien
tggtagccatcttcgtaaatttaaa

SEQ ID NO: 5770986 - DNA, 25 bp, Homo sapien
tgggtagcacaagcatgagaggctt

SEQ ID NO: 5770987 - DNA, 25 bp, Homo sapien
atgtggaaagtcttttagccaaagt

SEQ ID NO: 5770988 - DNA, 25 bp, Homo sapien
atctgagttgtgctgtcagctttct

SEQ ID NO: 5770989 - DNA, 25 bp, Homo sapien
acctctgtactctcccatttgcttg

SEQ ID NO: 5770990 - DNA, 25 bp, Homo sapien
aacaccggagaattcatactggcac

SEQ ID NO: 5770991 - DNA, 25 bp, Homo sapien
ggaggagtgcgtcatgagtgtggtg

SEQ ID NO: 5770992 - DNA, 25 bp, Homo sapien
ataatagcactggaggagactgtgg

SEQ ID NO: 5770993 - DNA, 25 bp, Homo sapien
acaccgcagcattcacactggtgat

SEQ ID NO: 5770994 - DNA, 25 bp, Homo sapien
gctcagagaagcaaacctctgtact

SEQ ID NO: 5770995 - DNA, 25 bp, Homo sapien
caggtcaggacttctaagggcaata

SEQ ID NO: 5770996 - DNA, 25 bp, Homo sapien
ctacaaattttccagtgaatatggt

SEQ ID NO: 5770997 - DNA, 25 bp, Homo sapien
atacagaaaagcttcaagccacaaa

SEQ ID NO: 5770998 - DNA, 25 bp, Homo sapien
agcaccggagacttcatactggaga

SEQ ID NO: 5770999 - DNA, 25 bp, Homo sapien
ctggcaggtgcacaccatgtgcatg

SEQ ID NO: 5771000 - DNA, 25 bp, Homo sapien
aattagatggaatgactcttctaaa

SEQ ID NO: 5771001 - DNA, 25 bp, Homo sapien
tccagtgaatatggttgtgtaggat

SEQ ID NO: 5771002 - DNA, 25 bp, Homo sapien
aacctttagctacaaatctaacctc

SEQ ID NO: 5771003 - DNA, 25 bp, Homo sapien
caccagagacgtcacactggaggag

SEQ ID NO: 5771004 - DNA, 25 bp, Homo sapien
gacagaaactccaggtaaatgggga

SEQ ID NO: 5771005 - DNA, 25 bp, Homo sapien
gtgaatagattttgtggagatctca

SEQ ID NO: 5771006 - DNA, 25 bp, Homo sapien
ctgaattcattcaccaccagagacg

SEQ ID NO: 5771007 - DNA, 25 bp, Homo sapien
acaaaaaattagccaggcgtggcag

SEQ ID NO: 5771008 - DNA, 25 bp, Homo sapien
tgtatctatacaggtcaggacttct

SEQ ID NO: 5771009 - DNA, 25 bp, Homo sapien
ttcatactggagaaaggccttatga

SEQ ID NO: 5771010 - DNA, 25 bp, Homo sapien
ggtcaccatgaaaaggaggcagttg

SEQ ID NO: 5771011 - DNA, 25 bp, Homo sapien
gcccaagcatgtagggtcttcatgt

SEQ ID NO: 5771012 - DNA, 25 bp, Homo sapien
tgttgtcagactataggtgtggagg

SEQ ID NO: 5771013 - DNA, 25 bp, Homo sapien
agactgccaggctttgtgttcctgt

SEQ ID NO: 5771014 - DNA, 25 bp, Homo sapien
ttatccataaatctgaattcattca

SEQ ID NO: 5771015 - DNA, 25 bp, Homo sapien
cagtagcagcagcaagcatatacag

SEQ ID NO: 5771016 - DNA, 25 bp, Homo sapien
agagttcacactggagaaagacctt

SEQ ID NO: 5771017 - DNA, 25 bp, Homo sapien
aaaactcacctcagtgagattaaga

SEQ ID NO: 5771018 - DNA, 25 bp, Homo sapien
gccttatgaatgcagtgatcgtgag

SEQ ID NO: 5771019 - DNA, 25 bp, Homo sapien
ctagtccacggagctcaatggcggc

SEQ ID NO: 5771020 - DNA, 25 bp, Homo sapien
cgaatgcccgccccggtcggccgcc

SEQ ID NO: 5771021 - DNA, 25 bp, Homo sapien
gattcaccagcctggaaactgcttg

SEQ ID NO: 5771022 - DNA, 25 bp, Homo sapien
cagcagcaagcatatacaggcattt

SEQ ID NO: 5771023 - DNA, 25 bp, Homo sapien
gtggaaaatcctttacccgcaaatc

SEQ ID NO: 5771024 - DNA, 25 bp, Homo sapien
agaggtcacactggagaaagacctt

SEQ ID NO: 5771025 - DNA, 25 bp, Homo sapien
gtgaggaatcctttagcaaaaagtg

SEQ ID NO: 5771026 - DNA, 25 bp, Homo sapien
aagcatgtagggtcttcatgtcttt

SEQ ID NO: 5771027 - DNA, 25 bp, Homo sapien
ttcatactggcacaagaccttatga

SEQ ID NO: 5771028 - DNA, 25 bp, Homo sapien
ttcatgtcttttctctgactttaga

SEQ ID NO: 5771029 - DNA, 25 bp, Homo sapien
ggcctggtgccatttttgtcaggtc

SEQ ID NO: 5771030 - DNA, 25 bp, Homo sapien
accgcagcattcacactggtgatag

SEQ ID NO: 5771031 - DNA, 25 bp, Homo sapien
atgctggagaactttgcacatgtaa

SEQ ID NO: 5771032 - DNA, 25 bp, Homo sapien
aacaccagagagttcacactggaga

SEQ ID NO: 5771033 - DNA, 25 bp, Homo sapien
agcatatacaggcatttttcaatgc

SEQ ID NO: 5771034 - DNA, 25 bp, Homo sapien
ggccttcccagcccccacggaccta

SEQ ID NO: 5771035 - DNA, 25 bp, Homo sapien
gctctaattggcctgctgcccaagg

SEQ ID NO: 5771036 - DNA, 25 bp, Homo sapien
tcacactggagaaatgccttatcag

SEQ ID NO: 5771037 - DNA, 25 bp, Homo sapien
aaatctgaattcattcaccaccaga

SEQ ID NO: 5771038 - DNA, 25 bp, Homo sapien
agtcccagccacttgggaggctgag

SEQ ID NO: 5771039 - DNA, 25 bp, Homo sapien
cttatgagtgcagtcaatgtgggaa

SEQ ID NO: 5771040 - DNA, 25 bp, Homo sapien
caaatcttcaatctcattcgacata

SEQ ID NO: 5771041 - DNA, 25 bp, Homo sapien
attcagcaccaaagagttcacactg

SEQ ID NO: 5771042 - DNA, 25 bp, Homo sapien
ttcaagaccagcctgggcaacatgg

SEQ ID NO: 5771043 - DNA, 25 bp, Homo sapien
cagtataatagcactggaggagact

SEQ ID NO: 5771044 - DNA, 25 bp, Homo sapien
tctaacctcattgaacaccagagag

SEQ ID NO: 5771045 - DNA, 25 bp, Homo sapien
tgtggtagccatcttcgtaaattta

SEQ ID NO: 5771046 - DNA, 25 bp, Homo sapien
cattgtcggtctcacatgatgcttg

SEQ ID NO: 5771047 - DNA, 25 bp, Homo sapien
gtctcagaggttcctgtactgcgat

SEQ ID NO: 5771048 - DNA, 25 bp, Homo sapien
tgtaacatccctgggttattgccat

SEQ ID NO: 5771049 - DNA, 25 bp, Homo sapien
agcaaattcacactggacaaaagat

SEQ ID NO: 5771050 - DNA, 25 bp, Homo sapien
cactggagaaaggccttatgaatgt

SEQ ID NO: 5771051 - DNA, 25 bp, Homo sapien
acactttgggaggccaaggcgggcg

SEQ ID NO: 5771052 - DNA, 25 bp, Homo sapien
ggccttatcagtgctgtgagtgtgg

SEQ ID NO: 5771053 - DNA, 25 bp, Homo sapien
actccagcccaggcaacagagtgag

SEQ ID NO: 5771054 - DNA, 25 bp, Homo sapien
gtgagaaagcctttatccataaatc

SEQ ID NO: 5771055 - DNA, 25 bp, Homo sapien
catcggagagttcacactgaagaaa

SEQ ID NO: 5771056 - DNA, 25 bp, Homo sapien
aggcgatagcttctgagcagagtgt

SEQ ID NO: 5771057 - DNA, 25 bp, Homo sapien
tagcaaatgtgagaaagccttcact

SEQ ID NO: 5771058 - DNA, 25 bp, Homo sapien
agacattttgcctgcggctgagcac

SEQ ID NO: 5771059 - DNA, 25 bp, Homo sapien
tgaatgtagtgaatgtgggaaatcc

SEQ ID NO: 5771060 - DNA, 25 bp, Homo sapien
gattacctttttaaggaacattgtc

SEQ ID NO: 5771061 - DNA, 25 bp, Homo sapien
gaattcattcaccaccagagacgtc

SEQ ID NO: 5771062 - DNA, 25 bp, Homo sapien
ccttatcagtgctgtgagtgtggga

SEQ ID NO: 5771063 - DNA, 25 bp, Homo sapien
taaatttaaactttgagcacccaca

SEQ ID NO: 5771064 - DNA, 25 bp, Homo sapien
aatgtgaagggaatgtgctatttct

SEQ ID NO: 5771065 - DNA, 25 bp, Homo sapien
gcagtaaattagatggaatgactct

SEQ ID NO: 5771066 - DNA, 25 bp, Homo sapien
cacttccccacagtgctcagagaag

SEQ ID NO: 5771067 - DNA, 25 bp, Homo sapien
gtgggagctccttgatgagtctcag

SEQ ID NO: 5771068 - DNA, 25 bp, Homo sapien
aatttttccacattctgattcacca

SEQ ID NO: 5771069 - DNA, 25 bp, Homo sapien
gccctggaaaaggaaggtggatgag

SEQ ID NO: 5771070 - DNA, 25 bp, Homo sapien
gcactccagcccaggcaacagagtg

SEQ ID NO: 5771071 - DNA, 25 bp, Homo sapien
accttatgagtgcagtgaatgtggc

SEQ ID NO: 5771072 - DNA, 25 bp, Homo sapien
accttatgagtgcagtcaatgtggg

SEQ ID NO: 5771073 - DNA, 25 bp, Homo sapien
ttggtgcacattgctttaatttata

SEQ ID NO: 5771074 - DNA, 25 bp, Homo sapien
tgcagtgaatgtggcaaatctttta

SEQ ID NO: 5771075 - DNA, 25 bp, Homo sapien
ccagagaggtcacactggagaaaga

SEQ ID NO: 5771076 - DNA, 25 bp, Homo sapien
cgcgctgagggactcggctcagggt

SEQ ID NO: 5771077 - DNA, 25 bp, Homo sapien
ctctgactttagagtatacacctga

SEQ ID NO: 5771078 - DNA, 25 bp, Homo sapien
agaccagcctgggcaacatggtgaa

SEQ ID NO: 5771079 - DNA, 25 bp, Homo sapien
tgtgaacgtgaattttgttcagttg

SEQ ID NO: 5771080 - DNA, 25 bp, Homo sapien
cttaaatgtgaagggaatgtgctat

SEQ ID NO: 5771081 - DNA, 25 bp, Homo sapien
ttccatgtgttgaattatttcacct

SEQ ID NO: 5771082 - DNA, 25 bp, Homo sapien
gagatccacataattcctagcactg

SEQ ID NO: 5771083 - DNA, 25 bp, Homo sapien
cctaatcttacacaagataattcac

SEQ ID NO: 5771084 - DNA, 25 bp, Homo sapien
tatgaatgcagtgatcgtgagaaag

SEQ ID NO: 5771085 - DNA, 25 bp, Homo sapien
ctgaagaaaggccttaaatgtgaag

SEQ ID NO: 5771086 - DNA, 25 bp, Homo sapien
ggaggtgaaattacaggttcaacag

SEQ ID NO: 5771087 - DNA, 25 bp, Homo sapien
gccttatgaatgcagtgaatgtggg

SEQ ID NO: 5771088 - DNA, 25 bp, Homo sapien
agtgcagtcaatgtgggaaaccctt

SEQ ID NO: 5771089 - DNA, 25 bp, Homo sapien
tgggaaatcttttagctgcaaatcg

SEQ ID NO: 5771090 - DNA, 25 bp, Homo sapien
cattcgacaccgcagcattcacact

SEQ ID NO: 5771091 - DNA, 25 bp, Homo sapien
taattggcctgctgcccaaggcctc

SEQ ID NO: 5771092 - DNA, 25 bp, Homo sapien
atccctgggttattgccatggaatg

SEQ ID NO: 5771093 - DNA, 25 bp, Homo sapien
catcccctgtgcaaaagtcatactt

SEQ ID NO: 5771094 - DNA, 25 bp, Homo sapien
caagataattcacactggagaaagg

SEQ ID NO: 5771095 - DNA, 25 bp, Homo sapien
cacactggaggagtgcgtcatgagt

SEQ ID NO: 5771096 - DNA, 25 bp, Homo sapien
tggagaaatgccttatcagtgcagt

SEQ ID NO: 5771097 - DNA, 25 bp, Homo sapien
accttatgaatgcagtgaatgtgga

SEQ ID NO: 5771098 - DNA, 25 bp, Homo sapien
caaattcacactggacaaaagatgt

SEQ ID NO: 5771099 - DNA, 25 bp, Homo sapien
atcctttagacaaagctctagcctt

SEQ ID NO: 5771100 - DNA, 25 bp, Homo sapien
gcctgatttatgtcactgccaattt

SEQ ID NO: 5771101 - DNA, 25 bp, Homo sapien
aagtaaagactgccaggctttgtgt

SEQ ID NO: 5771102 - DNA, 25 bp, Homo sapien
aattagccaggcgtggcagcatgcg

SEQ ID NO: 5771103 - DNA, 25 bp, Homo sapien
tgttcctgtattgtggcctggtgcc

SEQ ID NO: 5771104 - DNA, 25 bp, Homo sapien
atcttttagctgcaaatcggaactc

SEQ ID NO: 5771105 - DNA, 25 bp, Homo sapien
gtcagctttctaaggattacctttt

SEQ ID NO: 5771106 - DNA, 25 bp, Homo sapien
aaaagtcatacttgggtagcacaag

SEQ ID NO: 5771107 - DNA, 25 bp, Homo sapien
attattaatagcccaagcatgtagg

SEQ ID NO: 5771108 - DNA, 25 bp, Homo sapien
cctagcactggtgaggggaatctgt

SEQ ID NO: 5771109 - DNA, 25 bp, Homo sapien
agtcttttagccaaagtgctagcct

SEQ ID NO: 5771110 - DNA, 25 bp, Homo sapien
cagaccttattcagcaccaaagagt

SEQ ID NO: 5771111 - DNA, 25 bp, Homo sapien
tcattcgacatcggagagttcacac

SEQ ID NO: 5771112 - DNA, 25 bp, Homo sapien
tctgttgcccaggtcctgcaaagga

SEQ ID NO: 5771113 - DNA, 25 bp, Homo sapien
caatgcaaaaagttattacaagtgg

SEQ ID NO: 5771114 - DNA, 25 bp, Homo sapien
ctgtgcaaaagtcatacttgggtag

SEQ ID NO: 5771115 - DNA, 25 bp, Homo sapien
gctgtgagtgtgggaaatcctttag

SEQ ID NO: 5771116 - DNA, 25 bp, Homo sapien
aaaggccttatgaatgcagtgatcg

SEQ ID NO: 5771117 - DNA, 25 bp, Homo sapien
ctggacaaaagatgtttgagtgtag

SEQ ID NO: 5771118 - DNA, 25 bp, Homo sapien
ccagaggttctgcgacaccacctcg

SEQ ID NO: 5771119 - DNA, 25 bp, Homo sapien
agttgtgacaatccccagtgcttct

SEQ ID NO: 5771120 - DNA, 25 bp, Homo sapien
atgtggcgagtgcgggaaatccttt

SEQ ID NO: 5771121 - DNA, 25 bp, Homo sapien
gcatgtagggtcttcatgtcttttc

SEQ ID NO: 5771122 - DNA, 25 bp, Homo sapien
tcttttagacagcgctctggcctca

SEQ ID NO: 5771123 - DNA, 25 bp, Homo sapien
aaggaggcagttgtgacaatcccca

SEQ ID NO: 5771124 - DNA, 25 bp, Homo sapien
gggaagctctgaggaggttcattgt

SEQ ID NO: 5771125 - DNA, 25 bp, Homo sapien
cccaagaagagtgggagctccttga

SEQ ID NO: 5771126 - DNA, 25 bp, Homo sapien
aggagccacacagtagcagcagcaa

SEQ ID NO: 5771127 - DNA, 25 bp, Homo sapien
ttctgagcagagtgtatctatacag

SEQ ID NO: 5771128 - DNA, 25 bp, Homo sapien
cctgagctcaggagttcaagaccag

SEQ ID NO: 5771129 - DNA, 25 bp, Homo sapien
tcagcaccagcaaattcacactgga

SEQ ID NO: 5771130 - DNA, 25 bp, Homo sapien
aggatcagtgcatacagaaattctc

SEQ ID NO: 5771131 - DNA, 25 bp, Homo sapien
ctgaccttcaccagcatcaaaagca

SEQ ID NO: 5771132 - DNA, 25 bp, Homo sapien
acccacaaatcagaccttattcagc

SEQ ID NO: 5771133 - DNA, 25 bp, Homo sapien
gagccctggaaaaggaaggtggatg

SEQ ID NO: 5771134 - DNA, 25 bp, Homo sapien
ggcagtcgcgctgagggactcggct

SEQ ID NO: 5771135 - DNA, 25 bp, Homo sapien
caaatttatcctgattcaacaccaa

SEQ ID NO: 5771136 - DNA, 25 bp, Homo sapien
gccttaaatgtgaagggaatgtgct

SEQ ID NO: 5771137 - DNA, 25 bp, Homo sapien
agttgtccacaggagatccacataa

SEQ ID NO: 5771138 - DNA, 25 bp, Homo sapien
ttttaaggaacattgtcggtctcac

SEQ ID NO: 5771139 - DNA, 25 bp, Homo sapien
tttgcctgcggctgagcaccaaacc

SEQ ID NO: 5771140 - DNA, 25 bp, Homo sapien
ccgggcatggtgtaatcctaacact

SEQ ID NO: 5771141 - DNA, 25 bp, Homo sapien
aaagagttcacactggagaaagacc

SEQ ID NO: 5771142 - DNA, 25 bp, Homo sapien
ttagcaaaaagtgccacctaatctt

SEQ ID NO: 5771143 - DNA, 25 bp, Homo sapien
gaatatggttgtgtaggatcagtgc

SEQ ID NO: 5771144 - DNA, 25 bp, Homo sapien
agagaagcaaacctctgtactctcc

SEQ ID NO: 5771145 - DNA, 25 bp, Homo sapien
agattaagatgtgtgtcccagtctt

SEQ ID NO: 5771146 - DNA, 25 bp, Homo sapien
gctttgtgttcctgtattgtggcct

SEQ ID NO: 5771147 - DNA, 25 bp, Homo sapien
gatagggactgttgtgttcgaatgc

SEQ ID NO: 5771148 - DNA, 25 bp, Homo sapien
tgcgacaccacctcgggtgagctgc

SEQ ID NO: 5771149 - DNA, 25 bp, Homo sapien
ttcaccagcctggaaactgcttggt

SEQ ID NO: 5771150 - DNA, 25 bp, Homo sapien
gtgagactccgtctccaaaaaaaaa

SEQ ID NO: 5771151 - DNA, 25 bp, Homo sapien
gaggccttcccagcccccacggacc

SEQ ID NO: 5771152 - DNA, 25 bp, Homo sapien
cttcacttgcaagaacacacttgtt

SEQ ID NO: 5771153 - DNA, 25 bp, Homo sapien
gtgccatttgttgtcagactatagg

SEQ ID NO: 5771154 - DNA, 25 bp, Homo sapien
tccacggagctcaatggcggcagtc

SEQ ID NO: 5771155 - DNA, 25 bp, Homo sapien
ccaggcaacagagtgagactccgtc

SEQ ID NO: 5771156 - DNA, 25 bp, Homo sapien
cgacatagaagagttcacactggag

SEQ ID NO: 5771157 - DNA, 25 bp, Homo sapien
aggttcattgtaatttctaatctgc

SEQ ID NO: 5771158 - DNA, 25 bp, Homo sapien
tcacactggtgataggccttatgag

SEQ ID NO: 5771159 - DNA, 25 bp, Homo sapien
tggcatataagtcagtgtagactgg

SEQ ID NO: 5771160 - DNA, 25 bp, Homo sapien
ttcaacaccaaagagttcacactgg

SEQ ID NO: 5771161 - DNA, 25 bp, Homo sapien
ctgtactctcccatttgcttgggga

SEQ ID NO: 5771162 - DNA, 25 bp, Homo sapien
gtaggatcagtgcatacagaaattc

SEQ ID NO: 5771163 - DNA, 25 bp, Homo sapien
tgtagtgaatgtgaggaatccttta

SEQ ID NO: 5771164 - DNA, 25 bp, Homo sapien
ttgtcagactataggtgtggaggtg

SEQ ID NO: 5771165 - DNA, 25 bp, Homo sapien
ggaaaatcctttacccgcaaatctg

SEQ ID NO: 5771166 - DNA, 25 bp, Homo sapien
agtgagattaagatgtgtgtcccag

SEQ ID NO: 5771167 - DNA, 25 bp, Homo sapien
ctaacctcattcgacatcggagagt

SEQ ID NO: 5771168 - DNA, 25 bp, Homo sapien
gaaagccttcacttgcaagaacaca

SEQ ID NO: 5771169 - DNA, 25 bp, Homo sapien
acacttgttcagcatcagagtgtct

SEQ ID NO: 5771170 - DNA, 25 bp, Homo sapien
tcaatggcggcagtcgcgctgaggg

SEQ ID NO: 5771171 - DNA, 25 bp, Homo sapien
aaaaggaaggtggatgaggctacat

SEQ ID NO: 5771172 - DNA, 25 bp, Homo sapien
atcttctgtttactatcgctgagat

SEQ ID NO: 5771173 - DNA, 25 bp, Homo sapien
gcaaacctctgtactctcccatttg

SEQ ID NO: 5771174 - DNA, 25 bp, Homo sapien
cctcattcgacatcggagagttcac

SEQ ID NO: 5771175 - DNA, 25 bp, Homo sapien
gttgtgctgtcagctttctaaggat

SEQ ID NO: 5771176 - DNA, 25 bp, Homo sapien
taatcttacacaagataattcacac

SEQ ID NO: 5771177 - DNA, 25 bp, Homo sapien
tgccgaggcctatagcctgatttat

SEQ ID NO: 5771178 - DNA, 25 bp, Homo sapien
ccacccagaaaactcacctcagtga

SEQ ID NO: 5771179 - DNA, 25 bp, Homo sapien
agttcacactggagaaagaccttat

SEQ ID NO: 5771180 - DNA, 25 bp, Homo sapien
atggttgtgtaggatcagtgcatac

SEQ ID NO: 5771181 - DNA, 25 bp, Homo sapien
cagtgaatgtggcaaatcttttaga

SEQ ID NO: 5771182 - DNA, 25 bp, Homo sapien
acagctctttgttctgtattgctct

SEQ ID NO: 5771183 - DNA, 25 bp, Homo sapien
agccagagctctagcctcattcaac

SEQ ID NO: 5771184 - DNA, 25 bp, Homo sapien
tgccaatttctgaggctgaagccat

SEQ ID NO: 5771185 - DNA, 25 bp, Homo sapien
cttgggtagcacaagcatgagaggc

SEQ ID NO: 5771186 - DNA, 25 bp, Homo sapien
cttctgtttactatcgctgagatca

SEQ ID NO: 5771187 - DNA, 25 bp, Homo sapien
ttcacactggagaaaggccttatga

SEQ ID NO: 5771188 - DNA, 25 bp, Homo sapien
gatcattatcagaaaatagtctggc

SEQ ID NO: 5771189 - DNA, 25 bp, Homo sapien
agtgtagcaaatgtgagaaagcctt

SEQ ID NO: 5771190 - DNA, 25 bp, Homo sapien
ggaatgactcttctaaaagttcatc

SEQ ID NO: 5771191 - DNA, 25 bp, Homo sapien
agggtatgacctttgaggatgtggc

SEQ ID NO: 5771192 - DNA, 25 bp, Homo sapien
actgccaggctttgtgttcctgtat

SEQ ID NO: 5771193 - DNA, 25 bp, Homo sapien
acccgcaaatctgacctcattcaac

SEQ ID NO: 5771194 - DNA, 25 bp, Homo sapien
gtggcaaatcttttagacagcgctc

SEQ ID NO: 5771195 - DNA, 25 bp, Homo sapien
ctcggctcagggtatgacctttgag

SEQ ID NO: 5771196 - DNA, 25 bp, Homo sapien
cctttagacaattctctaacctcat

SEQ ID NO: 5771197 - DNA, 25 bp, Homo sapien
tgatgagtctcagaggttcctgtac

SEQ ID NO: 5771198 - DNA, 25 bp, Homo sapien
ccatgtgttgaattatttcacctgt

SEQ ID NO: 5771199 - DNA, 25 bp, Homo sapien
gagttcactctggagaaaggcctta

SEQ ID NO: 5771200 - DNA, 25 bp, Homo sapien
cggctgagcaccaaaccacatcccc

SEQ ID NO: 5771201 - DNA, 25 bp, Homo sapien
atcctttagacaaatcttcaatctc

SEQ ID NO: 5771202 - DNA, 25 bp, Homo sapien
ttgggacagaaactccaggtaaatg

SEQ ID NO: 5771203 - DNA, 25 bp, Homo sapien
caaatcttttagacagcgctctggc

SEQ ID NO: 5771204 - DNA, 25 bp, Homo sapien
gtggaggtgaaattacaggttcaac

SEQ ID NO: 5771205 - DNA, 25 bp, Homo sapien
accacctcgggtgagctgcgccagg

SEQ ID NO: 5771206 - DNA, 25 bp, Homo sapien
gtggtccagagaatctgagttgtgc

SEQ ID NO: 5771207 - DNA, 25 bp, Homo sapien
tcttttctctgactttagagtatac

SEQ ID NO: 5771208 - DNA, 25 bp, Homo sapien
tggaaactgcttggtgcacattgct

SEQ ID NO: 5771209 - DNA, 25 bp, Homo sapien
ggcacaagaccttatgagtgcagtg

SEQ ID NO: 5771210 - DNA, 25 bp, Homo sapien
gcatgcgcctatagtcccagccact

SEQ ID NO: 5771211 - DNA, 25 bp, Homo sapien
gtgaatatggttgtgtaggatcagt

SEQ ID NO: 5771212 - DNA, 25 bp, Homo sapien
ccaaagtgctagcctcattcaacac

SEQ ID NO: 5771213 - DNA, 25 bp, Homo sapien
aatcctttagccagagctctagcct

SEQ ID NO: 5771214 - DNA, 25 bp, Homo sapien
tcctttagcaaaaagtgccacctaa

SEQ ID NO: 5771215 - DNA, 25 bp, Homo sapien
gtgtgtcccagtcttgaaagacatt

SEQ ID NO: 5771216 - DNA, 25 bp, Homo sapien
gactgcagtaaattagatggaatga

SEQ ID NO: 5771217 - DNA, 25 bp, Homo sapien
aaatcagaccttattcagcaccaaa

SEQ ID NO: 5771218 - DNA, 25 bp, Homo sapien
gaatacagaaaagcttcaagccaca

SEQ ID NO: 5771219 - DNA, 25 bp, Homo sapien
gaggaggttcattgtaatttctaat

SEQ ID NO: 5771220 - DNA, 25 bp, Homo sapien
actgtggtagccatcttcgtaaatt

SEQ ID NO: 5771221 - DNA, 25 bp, Homo sapien
gagagttcactctggagaaaggcct

SEQ ID NO: 5771222 - DNA, 25 bp, Homo sapien
agagttcacactggagaaaggcctt

SEQ ID NO: 5771223 - DNA, 25 bp, Homo sapien
gatcgtgagaaagcctttatccata

SEQ ID NO: 5771224 - DNA, 25 bp, Homo sapien
gtagccatcttcgtaaatttaaact

SEQ ID NO: 5771225 - DNA, 25 bp, Homo sapien
acaggagatccacataattcctagc

SEQ ID NO: 5771226 - DNA, 25 bp, Homo sapien
tcccatttgcttggggaaattatta

SEQ ID NO: 5771227 - DNA, 25 bp, Homo sapien
tgcgccaggcccgggatagggactg

SEQ ID NO: 5771228 - DNA, 25 bp, Homo sapien
tagcactggaggagactgtggtagc

SEQ ID NO: 5771229 - DNA, 25 bp, Homo sapien
aatagcccaagcatgtagggtcttc

SEQ ID NO: 5771230 - DNA, 25 bp, Homo sapien
ctttacccacaaatcagaccttatt

SEQ ID NO: 5771231 - DNA, 25 bp, Homo sapien
caacaccaaagagttcacactggag

SEQ ID NO: 5771232 - DNA, 25 bp, Homo sapien
ctgcttggtgcacattgctttaatt

SEQ ID NO: 5771233 - DNA, 25 bp, Homo sapien
tcagagtgtctgttctgaaggaggg

SEQ ID NO: 5771234 - DNA, 25 bp, Homo sapien
caaagtaaagactgccaggctttgt

SEQ ID NO: 5771235 - DNA, 25 bp, Homo sapien
cacactggacaaaagatgtttgagt

SEQ ID NO: 5771236 - DNA, 25 bp, Homo sapien
gtaggaaaacctttagctacaaatc

SEQ ID NO: 5771237 - DNA, 25 bp, Homo sapien
aacacgaagccactcccagtggtga

SEQ ID NO: 5771238 - DNA, 25 bp, Homo sapien
aggtatgtgggaagctctgaggagg

SEQ ID NO: 5771239 - DNA, 25 bp, Homo sapien
cacctgtggggaggccttcccagcc

SEQ ID NO: 5771240 - DNA, 25 bp, Homo sapien
gtgcatgagtcacttccccacagtg

SEQ ID NO: 5771241 - DNA, 25 bp, Homo sapien
ccagagagttcacactggagaaagg

SEQ ID NO: 5771242 - DNA, 25 bp, Homo sapien
atatggttgtgtaggatcagtgcat

SEQ ID NO: 5771243 - DNA, 25 bp, Homo sapien
cacctcagtgagattaagatgtgtg

SEQ ID NO: 5771244 - DNA, 25 bp, Homo sapien
actgccaatttctgaggctgaagcc

SEQ ID NO: 5771245 - DNA, 25 bp, Homo sapien
ggccttatgaatgtggcgagtgcgg

SEQ ID NO: 5771246 - DNA, 25 bp, Homo sapien
attcacactggtgataggccttatg

SEQ ID NO: 5771247 - DNA, 25 bp, Homo sapien
ggagagttcacactgaagaaaggcc

SEQ ID NO: 5771248 - DNA, 25 bp, Homo sapien
agttcaagaccagcctgggcaacat

SEQ ID NO: 5771249 - DNA, 25 bp, Homo sapien
agcaccaaagagttcacactggaga

SEQ ID NO: 5771250 - DNA, 25 bp, Homo sapien
caagaccttatgagtgcagtgaatg

SEQ ID NO: 5771251 - DNA, 25 bp, Homo sapien
ttttcgacaccagagagttcactct

SEQ ID NO: 5771252 - DNA, 25 bp, Homo sapien
tgcttggggaaattattaatagccc

SEQ ID NO: 5771253 - DNA, 25 bp, Homo sapien
gaagggacaatgtgatggcagaaga

SEQ ID NO: 5771254 - DNA, 25 bp, Homo sapien
caccagcctggaaactgcttggtgc

SEQ ID NO: 5771255 - DNA, 25 bp, Homo sapien
tacttgggtagcacaagcatgagag

SEQ ID NO: 5771256 - DNA, 25 bp, Homo sapien
tgtgttcgaatgcccgccccggtcg

SEQ ID NO: 5771257 - DNA, 25 bp, Homo sapien
ttatcagtgctgtgagtgtgggaaa

SEQ ID NO: 5771258 - DNA, 25 bp, Homo sapien
tgacccagttgtggtccagagaatc

SEQ ID NO: 5771259 - DNA, 25 bp, Homo sapien
agttcacactgaagaaaggccttaa

SEQ ID NO: 5771260 - DNA, 25 bp, Homo sapien
gagtgcgtcatgagtgtggtgaatg

SEQ ID NO: 5771261 - DNA, 25 bp, Homo sapien
tgctgaccttcaccagcatcaaaag

SEQ ID NO: 5771262 - DNA, 25 bp, Homo sapien
ttttctctgactttagagtatacac

SEQ ID NO: 5771263 - DNA, 25 bp, Homo sapien
aatcttgggtgttctattcattgca

SEQ ID NO: 5771264 - DNA, 25 bp, Homo sapien
ggccgggcatggtgtaatcctaaca

SEQ ID NO: 5771265 - DNA, 25 bp, Homo sapien
tgggaggccaaggcgggcggattgc

SEQ ID NO: 5771266 - DNA, 25 bp, Homo sapien
gcatgagtcacttccccacagtgct

SEQ ID NO: 5771267 - DNA, 25 bp, Homo sapien
gcagagaatgtgggaaatcctttag

SEQ ID NO: 5771268 - DNA, 25 bp, Homo sapien
aagcatgagaggcttctgcttcagt

SEQ ID NO: 5771269 - DNA, 25 bp, Homo sapien
actttgcacatgtaacatccctggg

SEQ ID NO: 5771270 - DNA, 25 bp, Homo sapien
cctcgggtgagctgcgccaggcccg

SEQ ID NO: 5771271 - DNA, 25 bp, Homo sapien
agaattcatactggcacaagacctt

SEQ ID NO: 5771272 - DNA, 25 bp, Homo sapien
agcccccacggacctactccaacac

SEQ ID NO: 5771273 - DNA, 25 bp, Homo sapien
gtactctcccatttgcttggggaaa

SEQ ID NO: 5771274 - DNA, 25 bp, Homo sapien
aatcttcaatctcattcgacataga

SEQ ID NO: 5771275 - DNA, 25 bp, Homo sapien
tcagcaccggagacttcatactgga

SEQ ID NO: 5771276 - DNA, 25 bp, Homo sapien
agaaaggccttatgaatgcagtgat

SEQ ID NO: 5771277 - DNA, 25 bp, Homo sapien
ggaactcattcaacaccagagaatt

SEQ ID NO: 5771278 - DNA, 25 bp, Homo sapien
aggtgtggaggtgaaattacaggtt

SEQ ID NO: 5771279 - DNA, 25 bp, Homo sapien
tagggactgttgtgttcgaatgccc

SEQ ID NO: 5771280 - DNA, 25 bp, Homo sapien
ataagtcagtgtagactggtgccat

SEQ ID NO: 5771281 - DNA, 25 bp, Homo sapien
aatcctttagcaaaaagtgccacct

SEQ ID NO: 5771282 - DNA, 25 bp, Homo sapien
cgggaaatcctttagacaaagctct

SEQ ID NO: 5771283 - DNA, 25 bp, Homo sapien
gtgttgaattatttcacctgtgggg

SEQ ID NO: 5771284 - DNA, 25 bp, Homo sapien
cctcagtgagattaagatgtgtgtc

SEQ ID NO: 5771285 - DNA, 25 bp, Homo sapien
gcgatgtgatgctggagaactttgc

SEQ ID NO: 5771286 - DNA, 25 bp, Homo sapien
gtggaaagtcttttagccaaagtgc

SEQ ID NO: 5771287 - DNA, 25 bp, Homo sapien
tgcagattccatgtgttgaattatt

SEQ ID NO: 5771288 - DNA, 25 bp, Homo sapien
tgaggcgatagcttctgagcagagt

SEQ ID NO: 5771289 - DNA, 25 bp, Homo sapien
ttcaccagcatcaaaagcattacaa

SEQ ID NO: 5771290 - DNA, 25 bp, Homo sapien
aggtcctgcaaaggagccatgtgcc

SEQ ID NO: 5771291 - DNA, 25 bp, Homo sapien
tggaggtcgcgactgagggacggga

SEQ ID NO: 5771292 - DNA, 25 bp, Homo sapien
atgtgcatgagtcacttccccacag

SEQ ID NO: 5771293 - DNA, 25 bp, Homo sapien
ccgcctagtccacggagctcaatgg

SEQ ID NO: 5771294 - DNA, 25 bp, Homo sapien
atgtgttgaattatttcacctgtgg

SEQ ID NO: 5771295 - DNA, 25 bp, Homo sapien
ttaatagcccaagcatgtagggtct

SEQ ID NO: 5771296 - DNA, 25 bp, Homo sapien
tttccagtgaatatggttgtgtagg

SEQ ID NO: 5771297 - DNA, 25 bp, Homo sapien
ttgtggcctggtgccatttttgtca

SEQ ID NO: 5771298 - DNA, 25 bp, Homo sapien
agcctcattcaacaccagagagttc

SEQ ID NO: 5771299 - DNA, 25 bp, Homo sapien
gtcacactggagaaagaccttatga

SEQ ID NO: 5771300 - DNA, 25 bp, Homo sapien
gaggcttctgcttcagtgctgacct

SEQ ID NO: 5771301 - DNA, 25 bp, Homo sapien
acaaaagatgtttgagtgtagtgaa

SEQ ID NO: 5771302 - DNA, 25 bp, Homo sapien
ctgagatcattatcagaaaatagtc

SEQ ID NO: 5771303 - DNA, 25 bp, Homo sapien
aatgaatttttccacattctgattc

SEQ ID NO: 5771304 - DNA, 25 bp, Homo sapien
cactggagaaaggccttatgaatgc

SEQ ID NO: 5771305 - DNA, 25 bp, Homo sapien
gcgtggcagcatgcgcctatagtcc

SEQ ID NO: 5771306 - DNA, 25 bp, Homo sapien
tagtgatgtcagcatgaaggggtga

SEQ ID NO: 5771307 - DNA, 25 bp, Homo sapien
gttctgtattgctctaattggcctg

SEQ ID NO: 5771308 - DNA, 25 bp, Homo sapien
aattgggacagaaactccaggtaaa

SEQ ID NO: 5771309 - DNA, 25 bp, Homo sapien
tgtcttttctctgactttagagtat

SEQ ID NO: 5771310 - DNA, 25 bp, Homo sapien
tggcctgctgcccaaggcctcaaag

SEQ ID NO: 5771311 - DNA, 25 bp, Homo sapien
gtcaatgtgggaaaccctttaccca

SEQ ID NO: 5771312 - DNA, 25 bp, Homo sapien
cgctctggcctcattcagcaccgga

SEQ ID NO: 5771313 - DNA, 25 bp, Homo sapien
ccggtcggccgccgctccccgccta

SEQ ID NO: 5771314 - DNA, 25 bp, Homo sapien
tgcatacagaaattctcaggatctt

SEQ ID NO: 5771315 - DNA, 25 bp, Homo sapien
acgtcacactggaggagtgcgtcat

SEQ ID NO: 5771316 - DNA, 25 bp, Homo sapien
cttatgaatgcagtgaatgtgggaa

SEQ ID NO: 5771317 - DNA, 25 bp, Homo sapien
gtcctgcaaaggagccatgtgccat

SEQ ID NO: 5771318 - DNA, 25 bp, Homo sapien
cagcctgggcaacatggtgaaatcc

SEQ ID NO: 5771319 - DNA, 25 bp, Homo sapien
attctctaacctcattcgacaccgc

SEQ ID NO: 5771320 - DNA, 25 bp, Homo sapien
atcagaccttattcagcaccaaaga

SEQ ID NO: 5771321 - DNA, 25 bp, Homo sapien
gatttatgtcactgccaatttctga

SEQ ID NO: 5771322 - DNA, 25 bp, Homo sapien
taagtttcaggtatgtgggaagctc

SEQ ID NO: 5771323 - DNA, 25 bp, Homo sapien
ccagcccccacggacctactccaac

SEQ ID NO: 5771324 - DNA, 25 bp, Homo sapien
tgagtgcagtgaatgtggcaaatct

SEQ ID NO: 5771325 - DNA, 25 bp, Homo sapien
gtgaaattacaggttcaacagtaat

SEQ ID NO: 5771326 - DNA, 25 bp, Homo sapien
ccctgtgcaaaagtcatacttgggt

SEQ ID NO: 5771327 - DNA, 25 bp, Homo sapien
tagcacaagcatgagaggcttctgc

SEQ ID NO: 5771328 - DNA, 25 bp, Homo sapien
agtgcagtgaatgtggcaaatcttt

SEQ ID NO: 5771329 - DNA, 25 bp, Homo sapien
cacaagataattcacactggagaaa

SEQ ID NO: 5771330 - DNA, 25 bp, Homo sapien
cgtgaattttgttcagttgtccaca

SEQ ID NO: 5771331 - DNA, 25 bp, Homo sapien
gtgtaggatcagtgcatacagaaat

SEQ ID NO: 5771332 - DNA, 25 bp, Homo sapien
atagtcccagccacttgggaggctg

SEQ ID NO: 5771333 - DNA, 25 bp, Homo sapien
tggatgaggctacatttgtgaccgg

SEQ ID NO: 5771334 - DNA, 25 bp, Homo sapien
ctttagccgcaaatctaacctcatt

SEQ ID NO: 5771335 - DNA, 25 bp, Homo sapien
gaatgtgggaaatcctttagccgca

SEQ ID NO: 5771336 - DNA, 25 bp, Homo sapien
aaagaccttatgaatgcagtgaatg

SEQ ID NO: 5771337 - DNA, 25 bp, Homo sapien
agtggaggtcgcgactgagggacgg

SEQ ID NO: 5771338 - DNA, 25 bp, Homo sapien
cactgaagaaaggccttaaatgtga

SEQ ID NO: 5771339 - DNA, 25 bp, Homo sapien
ggagaattcatactggcacaagacc

SEQ ID NO: 5771340 - DNA, 25 bp, Homo sapien
agacagcgctctggcctcattcagc

SEQ ID NO: 5771341 - DNA, 25 bp, Homo sapien
atgcagagaatgtgggaaatccttt

SEQ ID NO: 5771342 - DNA, 25 bp, Homo sapien
tggggaggccttcccagcccccacg

SEQ ID NO: 5771343 - DNA, 25 bp, Homo sapien
gcttgtaatgaatttttccacattc

SEQ ID NO: 5771344 - DNA, 25 bp, Homo sapien
tgggaaatcctttagacaattctct

SEQ ID NO: 5771345 - DNA, 25 bp, Homo sapien
gccatttgttgtcagactataggtg

SEQ ID NO: 5771346 - DNA, 25 bp, Homo sapien
tgcgggaaatcctttagacaaagct

SEQ ID NO: 5771347 - DNA, 25 bp, Homo sapien
gcagagtgtatctatacaggtcagg

SEQ ID NO: 5771348 - DNA, 25 bp, Homo sapien
gcgactgagggacgggacagagaag

SEQ ID NO: 5771349 - DNA, 25 bp, Homo sapien
gtaaagactgccaggctttgtgttc

SEQ ID NO: 5771350 - DNA, 25 bp, Homo sapien
tcaaactttctgtactcagaaggga

SEQ ID NO: 5771351 - DNA, 25 bp, Homo sapien
agaatgacttgtaagcagaatagtg

SEQ ID NO: 5771352 - DNA, 25 bp, Homo sapien
caagaagagtgggagctccttgatg

SEQ ID NO: 5771353 - DNA, 25 bp, Homo sapien
ggcaatacacccacccagaaaactc

SEQ ID NO: 5771354 - DNA, 25 bp, Homo sapien
acagtggggtattcttcataagttt

SEQ ID NO: 5771355 - DNA, 25 bp, Homo sapien
taagggcaatacacccacccagaaa

SEQ ID NO: 5771356 - DNA, 25 bp, Homo sapien
acaatgaagaagagccctggaaaag

SEQ ID NO: 5771357 - DNA, 25 bp, Homo sapien
actggtgccatttgttgtcagacta

SEQ ID NO: 5771358 - DNA, 25 bp, Homo sapien
agcctcattcaacaccagagaggtc

SEQ ID NO: 5771359 - DNA, 25 bp, Homo sapien
atagattttgtggagatctcaaact

SEQ ID NO: 5771360 - DNA, 25 bp, Homo sapien
gtgccatttttgtcaggtcagaggt

SEQ ID NO: 5771361 - DNA, 25 bp, Homo sapien
ttgccatggaatggagaatgaggcg

SEQ ID NO: 5771362 - DNA, 25 bp, Homo sapien
ttcacactggagaaagaccttatga

SEQ ID NO: 5771363 - DNA, 25 bp, Homo sapien
tagcccaagcatgtagggtcttcat

SEQ ID NO: 5771364 - DNA, 25 bp, Homo sapien
acacacacttgttcagcatcagagt

SEQ ID NO: 5771365 - DNA, 25 bp, Homo sapien
accatgaaaaggaggcagttgtgac

SEQ ID NO: 5771366 - DNA, 25 bp, Homo sapien
caccggagaattcatactggcacaa

SEQ ID NO: 5771367 - DNA, 25 bp, Homo sapien
cattgaacaccagagagttcacact

SEQ ID NO: 5771368 - DNA, 25 bp, Homo sapien
tgctgtcagctttctaaggattacc

SEQ ID NO: 5771369 - DNA, 25 bp, Homo sapien
acactggtgataggccttatgagtg

SEQ ID NO: 5771370 - DNA, 25 bp, Homo sapien
ggaaaccctttacccacaaatcaga

SEQ ID NO: 5771371 - DNA, 25 bp, Homo sapien
gtgaatgtggcaaatcttttagaca

SEQ ID NO: 5771372 - DNA, 25 bp, Homo sapien
ctttaatcttgggtgttctattcat

SEQ ID NO: 5771373 - DNA, 25 bp, Homo sapien
actggtgaggggaatctgttgccca

SEQ ID NO: 5771374 - DNA, 25 bp, Homo sapien
ggacaaaagatgtttgagtgtagtg

SEQ ID NO: 5771375 - DNA, 25 bp, Homo sapien
gtagcagcagcaagcatatacaggc

SEQ ID NO: 5771376 - DNA, 25 bp, Homo sapien
ctgttgtgttcgaatgcccgccccg

SEQ ID NO: 5771377 - DNA, 25 bp, Homo sapien
gtcacactggaggagtgcgtcatga

SEQ ID NO: 5771378 - DNA, 25 bp, Homo sapien
tgtattgctctaattggcctgctgc

SEQ ID NO: 5771379 - DNA, 25 bp, Homo sapien
aatgaggcgatagcttctgagcaga

SEQ ID NO: 5771380 - DNA, 25 bp, Homo sapien
gaagaaaggccttaaatgtgaaggg

SEQ ID NO: 5771381 - DNA, 25 bp, Homo sapien
ttcaacaccagagaattcacagtgg

SEQ ID NO: 5771382 - DNA, 25 bp, Homo sapien
ggcctcattcagcaccggagacttc

SEQ ID NO: 5771383 - DNA, 25 bp, Homo sapien
attttgtggagatctcaaactttct

SEQ ID NO: 5771384 - DNA, 25 bp, Homo sapien
agaatgaggcgatagcttctgagca

SEQ ID NO: 5771385 - DNA, 25 bp, Homo sapien
catcttcgtaaatttaaactttgag

SEQ ID NO: 5771386 - DNA, 25 bp, Homo sapien
aaaagcttcaagccacaaacacaca

SEQ ID NO: 5771387 - DNA, 25 bp, Homo sapien
gaatgtaggaaaacctttagctaca

SEQ ID NO: 5771388 - DNA, 25 bp, Homo sapien
ctgatttatgtcactgccaatttct

SEQ ID NO: 5771389 - DNA, 25 bp, Homo sapien
tatcagaaaatagtctggccgggca

SEQ ID NO: 5771390 - DNA, 25 bp, Homo sapien
gggctttatgagtgtagcaaatgtg

SEQ ID NO: 5771391 - DNA, 25 bp, Homo sapien
cacaagaccttatgagtgcagtgaa

SEQ ID NO: 5771392 - DNA, 25 bp, Homo sapien
gagggctttatgagtgtagcaaatg

SEQ ID NO: 5771393 - DNA, 25 bp, Homo sapien
ctggagaaagaccttatgagtgcag

SEQ ID NO: 5771394 - DNA, 25 bp, Homo sapien
gatccacataattcctagcactggt

SEQ ID NO: 5771395 - DNA, 25 bp, Homo sapien
tactcagaagggacaatgtgatggc

SEQ ID NO: 5771396 - DNA, 25 bp, Homo sapien
tactgcgatgtgatgctggagaact

SEQ ID NO: 5771397 - DNA, 25 bp, Homo sapien
gaaattacaggttcaacagtaattg

SEQ ID NO: 5771398 - DNA, 25 bp, Homo sapien
ttgcagtgagctgagattgcaccac

SEQ ID NO: 5771399 - DNA, 25 bp, Homo sapien
gctgagcaccaaaccacatcccctg

SEQ ID NO: 5771400 - DNA, 25 bp, Homo sapien
ggaggttcattgtaatttctaatct

SEQ ID NO: 5771401 - DNA, 25 bp, Homo sapien
atgtgctatttctttattcagtata

SEQ ID NO: 5771402 - DNA, 25 bp, Homo sapien
tcttgggtgttctattcattgcata

SEQ ID NO: 5771403 - DNA, 25 bp, Homo sapien
tgttgcccaggtcctgcaaaggagc

SEQ ID NO: 5771404 - DNA, 25 bp, Homo sapien
caggagaatcgcttgaacccagaag

SEQ ID NO: 5771405 - DNA, 25 bp, Homo sapien
ttatgaatgtggcgagtgcgggaaa

SEQ ID NO: 5771406 - DNA, 25 bp, Homo sapien
aggcgtggcagcatgcgcctatagt

SEQ ID NO: 5771407 - DNA, 25 bp, Homo sapien
aatgtgatggcagaagacagctctt

SEQ ID NO: 5771408 - DNA, 25 bp, Homo sapien
ggtcggccgccgctccccgcctagt

SEQ ID NO: 5771409 - DNA, 25 bp, Homo sapien
taaatgtgaagggaatgtgctattt

SEQ ID NO: 5771410 - DNA, 25 bp, Homo sapien
tactccaacacgaagccactcccag

SEQ ID NO: 5771411 - DNA, 25 bp, Homo sapien
caccaaagagttcacactggagaaa

SEQ ID NO: 5771412 - DNA, 25 bp, Homo sapien
catttgtgaccggctgcagattcca

SEQ ID NO: 5771413 - DNA, 25 bp, Homo sapien
ttacccacaaatcagaccttattca

SEQ ID NO: 5771414 - DNA, 25 bp, Homo sapien
gaggcctatagcctgatttatgtca

SEQ ID NO: 5771415 - DNA, 25 bp, Homo sapien
aatgaagaagagccctggaaaagga

SEQ ID NO: 5771416 - DNA, 25 bp, Homo sapien
tgtgggaaatcctttagacaaatct

SEQ ID NO: 5771417 - DNA, 25 bp, Homo sapien
cagcattcacactggtgataggcct

SEQ ID NO: 5771418 - DNA, 25 bp, Homo sapien
tcagcaccaaagagttcacactgga

SEQ ID NO: 5771419 - DNA, 25 bp, Homo sapien
ggtatgacctttgaggatgtggcca

SEQ ID NO: 5771420 - DNA, 25 bp, Homo sapien
atctgacctcattcaacaccggaga

SEQ ID NO: 5771421 - DNA, 25 bp, Homo sapien
ggttgtgtaggatcagtgcatacag

SEQ ID NO: 5771422 - DNA, 25 bp, Homo sapien
gcagtggaggtcgcgactgagggac

SEQ ID NO: 5771423 - DNA, 25 bp, Homo sapien
tcttttagccaaagtgctagcctca

SEQ ID NO: 5771424 - DNA, 25 bp, Homo sapien
gaccttatgaatgcagagaatgtgg

SEQ ID NO: 5771425 - DNA, 25 bp, Homo sapien
gaacacacttgttcagcaccagcaa

SEQ ID NO: 5771426 - DNA, 25 bp, Homo sapien
gcactggtgaggggaatctgttgcc

SEQ ID NO: 5771427 - DNA, 25 bp, Homo sapien
agcaccaaaccacatcccctgtgca

SEQ ID NO: 5771428 - DNA, 25 bp, Homo sapien
aatcttttagacagcgctctggcct

SEQ ID NO: 5771429 - DNA, 25 bp, Homo sapien
cttccccacagtgctcagagaagca

SEQ ID NO: 5771430 - DNA, 25 bp, Homo sapien
gatcagtgcatacagaaattctcag

SEQ ID NO: 5771431 - DNA, 25 bp, Homo sapien
cggctgcagattccatgtgttgaat

SEQ ID NO: 5771432 - DNA, 25 bp, Homo sapien
accagcctgggcaacatggtgaaat

SEQ ID NO: 5771433 - DNA, 25 bp, Homo sapien
cagtgtagactggtgccatttgttg

SEQ ID NO: 5771434 - DNA, 25 bp, Homo sapien
aggagtgcgtcatgagtgtggtgaa

SEQ ID NO: 5771435 - DNA, 25 bp, Homo sapien
taacctcattgaacaccagagagtt

SEQ ID NO: 5771436 - DNA, 25 bp, Homo sapien
gcaaatgtgagaaagccttcacttg

SEQ ID NO: 5771437 - DNA, 25 bp, Homo sapien
atggaatgactcttctaaaagttca

SEQ ID NO: 5771438 - DNA, 25 bp, Homo sapien
atccccagtgcttctgtgaacgtga

SEQ ID NO: 5771439 - DNA, 25 bp, Homo sapien
ttgtggtccagagaatctgagttgt

SEQ ID NO: 5771440 - DNA, 25 bp, Homo sapien
tgcagtgaatgtgggaaatccttta

SEQ ID NO: 5771441 - DNA, 25 bp, Homo sapien
ccttcaccagcatcaaaagcattac

SEQ ID NO: 5771442 - DNA, 25 bp, Homo sapien
ctgacctcattcaacaccggagaat

SEQ ID NO: 5771443 - DNA, 25 bp, Homo sapien
ccaaagagttcacactggagaaagg

SEQ ID NO: 5771444 - DNA, 25 bp, Homo sapien
aaatcctttagacaaagctctagcc

SEQ ID NO: 5771445 - DNA, 25 bp, Homo sapien
tgaggagccacacagtagcagcagc

SEQ ID NO: 5771446 - DNA, 25 bp, Homo sapien
tgaatgtgagaaatcctttagccgc

SEQ ID NO: 5771447 - DNA, 25 bp, Homo sapien
agaaatcctttagccgcaaatttat

SEQ ID NO: 5771448 - DNA, 25 bp, Homo sapien
gtgaaatcccatgtctactaaaata

SEQ ID NO: 5771449 - DNA, 25 bp, Homo sapien
catacagaaattctcaggatcttct

SEQ ID NO: 5771450 - DNA, 25 bp, Homo sapien
aatcccatgtctactaaaatacaaa

SEQ ID NO: 5771451 - DNA, 25 bp, Homo sapien
ctcccaagaagagtgggagctcctt

SEQ ID NO: 5771452 - DNA, 25 bp, Homo sapien
attcattcaccaccagagacgtcac

SEQ ID NO: 5771453 - DNA, 25 bp, Homo sapien
cacaccatgtgcatgagtcacttcc

SEQ ID NO: 5771454 - DNA, 25 bp, Homo sapien
ttcaagccacaaacacacacttgtt

SEQ ID NO: 5771455 - DNA, 25 bp, Homo sapien
ttcacactggacaaaagatgtttga

SEQ ID NO: 5771456 - DNA, 25 bp, Homo sapien
gaaagaccttatgaatgcagagaat

SEQ ID NO: 5771457 - DNA, 25 bp, Homo sapien
cccagtcttgaaagacattttgcct

SEQ ID NO: 5771458 - DNA, 25 bp, Homo sapien
ccagaaaactcacctcagtgagatt

SEQ ID NO: 5771459 - DNA, 25 bp, Homo sapien
tatgacctttgaggatgtggccatt

SEQ ID NO: 5771460 - DNA, 25 bp, Homo sapien
tggtgccatttgttgtcagactata

SEQ ID NO: 5771461 - DNA, 25 bp, Homo sapien
agaaaactcacctcagtgagattaa

SEQ ID NO: 5771462 - DNA, 25 bp, Homo sapien
gcctttatccataaatctgaattca

SEQ ID NO: 5771463 - DNA, 25 bp, Homo sapien
ccacctggcaggtgcacaccatgtg

SEQ ID NO: 5771464 - DNA, 25 bp, Homo sapien
aatgacttgtaagcagaatagtgat

SEQ ID NO: 5771465 - DNA, 25 bp, Homo sapien
gaactttgcacatgtaacatccctg

SEQ ID NO: 5771466 - DNA, 25 bp, Homo sapien
tcttcaatctcattcgacatagaag

SEQ ID NO: 5771467 - DNA, 25 bp, Homo sapien
atgtggccatttatttctcccaaga

SEQ ID NO: 5771468 - DNA, 25 bp, Homo sapien
gatgtttgagtgtagtgaatgtgag

SEQ ID NO: 5771469 - DNA, 25 bp, Homo sapien
aaagagttcacactggagaaaggcc

SEQ ID NO: 5771470 - DNA, 25 bp, Homo sapien
gtgctcagagaagcaaacctctgta

SEQ ID NO: 5771471 - DNA, 25 bp, Homo sapien
tttctttattcagtataatagcact

SEQ ID NO: 5771472 - DNA, 25 bp, Homo sapien
ggaaatcctttagacaattctctaa

SEQ ID NO: 5771473 - DNA, 25 bp, Homo sapien
ttcagtataatagcactggaggaga

SEQ ID NO: 5771474 - DNA, 25 bp, Homo sapien
agtatacacctgacccagttgtggt

SEQ ID NO: 5771475 - DNA, 25 bp, Homo sapien
ttagccagagctctagcctcattca

SEQ ID NO: 5771476 - DNA, 25 bp, Homo sapien
tgtcactgccaatttctgaggctga

SEQ ID NO: 5771477 - DNA, 25 bp, Homo sapien
ggcatttttcaatgcaaaaagttat

SEQ ID NO: 5771478 - DNA, 25 bp, Homo sapien
cagaagggacaatgtgatggcagaa

SEQ ID NO: 5771479 - DNA, 25 bp, Homo sapien
gtgccacctaatcttacacaagata

SEQ ID NO: 5771480 - DNA, 25 bp, Homo sapien
ttagatggaatgactcttctaaaag

SEQ ID NO: 5771481 - DNA, 25 bp, Homo sapien
cacataattcctagcactggtgagg

SEQ ID NO: 5771482 - DNA, 25 bp, Homo sapien
ctttttaaggaacattgtcggtctc

SEQ ID NO: 5771483 - DNA, 25 bp, Homo sapien
ccttatgagtgcagtgaatgtgaga

SEQ ID NO: 5771484 - DNA, 25 bp, Homo sapien
ccaacacgaagccactcccagtggt

SEQ ID NO: 5771485 - DNA, 25 bp, Homo sapien
aaattttccagtgaatatggttgtg

SEQ ID NO: 5771486 - DNA, 25 bp, Homo sapien
atgtgccatggcatataagtcagtg

SEQ ID NO: 5771487 - DNA, 25 bp, Homo sapien
tgagtgtggtgaatgtaggaaaacc

SEQ ID NO: 5771488 - DNA, 25 bp, Homo sapien
ctctagcctcattcaacaccagaga

SEQ ID NO: 5771489 - DNA, 25 bp, Homo sapien
gctacatttgtgaccggctgcagat

SEQ ID NO: 5771490 - DNA, 25 bp, Homo sapien
aattttgttcagttgtccacaggag

SEQ ID NO: 5771491 - DNA, 25 bp, Homo sapien
gccatggaatggagaatgaggcgat

SEQ ID NO: 5771492 - DNA, 25 bp, Homo sapien
gagggactcggctcagggtatgacc

SEQ ID NO: 5771493 - DNA, 25 bp, Homo sapien
ccacaggagatccacataattccta

SEQ ID NO: 5771494 - DNA, 25 bp, Homo sapien
tagctgcaaatcggaactcattcaa

SEQ ID NO: 5771495 - DNA, 25 bp, Homo sapien
cagtgatcgtgagaaagcctttatc

SEQ ID NO: 5771496 - DNA, 25 bp, Homo sapien
cagagagttcactctggagaaaggc

SEQ ID NO: 5771497 - DNA, 25 bp, Homo sapien
acaaattttccagtgaatatggttg

SEQ ID NO: 5771498 - DNA, 25 bp, Homo sapien
aacctcattcgacatcggagagttc

SEQ ID NO: 5771499 - DNA, 25 bp, Homo sapien
gcatgagaggcttctgcttcagtgc

SEQ ID NO: 5771500 - DNA, 25 bp, Homo sapien
tatgaatgcagtgaatgtggaaaat

SEQ ID NO: 5771501 - DNA, 25 bp, Homo sapien
cctcattcaacaccagagagttcac

SEQ ID NO: 5771502 - DNA, 25 bp, Homo sapien
caaaggagccatgtgccatggcata

SEQ ID NO: 5771503 - DNA, 25 bp, Homo sapien
ctcccagtggtgaggagccacacag

SEQ ID NO: 5771504 - DNA, 25 bp, Homo sapien
caaaaagtgccacctaatcttacac

SEQ ID NO: 5771505 - DNA, 25 bp, Homo sapien
gtctggccgggcatggtgtaatcct

SEQ ID NO: 5771506 - DNA, 25 bp, Homo sapien
ccttatgaatgtggcgagtgcggga

SEQ ID NO: 5771507 - DNA, 25 bp, Homo sapien
gagaaaggccttatcagtgctgtga

SEQ ID NO: 5771508 - DNA, 25 bp, Homo sapien
aattcatactggcacaagaccttat

SEQ ID NO: 5771509 - DNA, 25 bp, Homo sapien
cacctaatcttacacaagataattc

SEQ ID NO: 5771510 - DNA, 25 bp, Homo sapien
acatttcacccctaccacctggcag

SEQ ID NO: 5771511 - DNA, 25 bp, Homo sapien
aatgcagtgaatgtggaaaatcctt

SEQ ID NO: 5771512 - DNA, 25 bp, Homo sapien
ctttagcaaaaagtgccacctaatc

SEQ ID NO: 5771513 - DNA, 25 bp, Homo sapien
gagtgggagctccttgatgagtctc

SEQ ID NO: 5771514 - DNA, 25 bp, Homo sapien
gaacccagaaggcggaagttgcagt

SEQ ID NO: 5771515 - DNA, 25 bp, Homo sapien
cacatcccctgtgcaaaagtcatac

SEQ ID NO: 5771516 - DNA, 25 bp, Homo sapien
tatagcctgatttatgtcactgcca

SEQ ID NO: 5771517 - DNA, 25 bp, Homo sapien
tggtgaggggaatctgttgcccagg

SEQ ID NO: 5771518 - DNA, 25 bp, Homo sapien
catgaaaaggaggcagttgtgacaa

SEQ ID NO: 5771519 - DNA, 25 bp, Homo sapien
atgtggaaaatcctttacccgcaaa

SEQ ID NO: 5771520 - DNA, 25 bp, Homo sapien
tgtaatttctaatctgccgaggcct

SEQ ID NO: 5771521 - DNA, 25 bp, Homo sapien
ctttgttctgtattgctctaattgg

SEQ ID NO: 5771522 - DNA, 25 bp, Homo sapien
gatagcttctgagcagagtgtatct

SEQ ID NO: 5771523 - DNA, 25 bp, Homo sapien
tgggaaatcctttagacaaatcttc

SEQ ID NO: 5771524 - DNA, 25 bp, Homo sapien
gtataatagcactggaggagactgt

SEQ ID NO: 5771525 - DNA, 25 bp, Homo sapien
aagcttcaagccacaaacacacact

SEQ ID NO: 5771526 - DNA, 25 bp, Homo sapien
acttgggaggctgaggcaggagaat

SEQ ID NO: 5771527 - DNA, 25 bp, Homo sapien
gcttgaacccagaaggcggaagttg

SEQ ID NO: 5771528 - DNA, 25 bp, Homo sapien
tgaattttgttcagttgtccacagg

SEQ ID NO: 5771529 - DNA, 25 bp, Homo sapien
tctgcttcagtgctgaccttcacca

SEQ ID NO: 5771530 - DNA, 25 bp, Homo sapien
gtgaatgtggaaaatcctttacccg

SEQ ID NO: 5771531 - DNA, 25 bp, Homo sapien
aacattgtcggtctcacatgatgct

SEQ ID NO: 5771532 - DNA, 25 bp, Homo sapien
cgctgagatcattatcagaaaatag

SEQ ID NO: 5771533 - DNA, 25 bp, Homo sapien
caatctcattcgacatagaagagtt

SEQ ID NO: 5771534 - DNA, 25 bp, Homo sapien
agtggagaaagaccttatgaatgca

SEQ ID NO: 5771535 - DNA, 25 bp, Homo sapien
tctggagaaaggccttatcagtgct

SEQ ID NO: 5771536 - DNA, 25 bp, Homo sapien
ttcacctgtggggaggccttcccag

SEQ ID NO: 5771537 - DNA, 25 bp, Homo sapien
gggagctccttgatgagtctcagag

SEQ ID NO: 5771538 - DNA, 25 bp, Homo sapien
aggccttatgaatgcagtgaatgtg

SEQ ID NO: 5771539 - DNA, 25 bp, Homo sapien
gacaaatcttcaatctcattcgaca

SEQ ID NO: 5771540 - DNA, 25 bp, Homo sapien
tagacaaagctctagcctttttcga

SEQ ID NO: 5771541 - DNA, 25 bp, Homo sapien
caccggagacttcatactggagaaa

SEQ ID NO: 5771542 - DNA, 25 bp, Homo sapien
ctataggtgtggaggtgaaattaca

SEQ ID NO: 5771543 - DNA, 25 bp, Homo sapien
ttctcccaagaagagtgggagctcc

SEQ ID NO: 5771544 - DNA, 25 bp, Homo sapien
ccgcaaatctgacctcattcaacac

SEQ ID NO: 5771545 - DNA, 25 bp, Homo sapien
tgtgaagggaatgtgctatttcttt

SEQ ID NO: 5771546 - DNA, 25 bp, Homo sapien
agaatcgcttgaacccagaaggcgg

SEQ ID NO: 5771547 - DNA, 25 bp, Homo sapien
ggccttatgagtgcagtgaatgtga

SEQ ID NO: 5771548 - DNA, 25 bp, Homo sapien
cctaccacctggcaggtgcacacca

SEQ ID NO: 5771549 - DNA, 25 bp, Homo sapien
gtgtggaggtgaaattacaggttca

SEQ ID NO: 5771550 - DNA, 25 bp, Homo sapien
tgagtgtagcaaatgtgagaaagcc

SEQ ID NO: 5771551 - DNA, 25 bp, Homo sapien
gttcattgtaatttctaatctgccg

SEQ ID NO: 5771552 - DNA, 25 bp, Homo sapien
gaatgtgggaaatcctttagccaga

SEQ ID NO: 5771553 - DNA, 25 bp, Homo sapien
ctgagcagagtgtatctatacaggt

SEQ ID NO: 5771554 - DNA, 25 bp, Homo sapien
gtcacttccccacagtgctcagaga

SEQ ID NO: 5771555 - DNA, 25 bp, Homo sapien
ccaggcgtggcagcatgcgcctata

SEQ ID NO: 5771556 - DNA, 25 bp, Homo sapien
cctgtattgtggcctggtgccattt

SEQ ID NO: 5771557 - DNA, 25 bp, Homo sapien
cgctgagggactcggctcagggtat

SEQ ID NO: 5771558 - DNA, 25 bp, Homo sapien
attgctttaatttataatgttttta

SEQ ID NO: 5771559 - DNA, 25 bp, Homo sapien
ggaatcctttagcaaaaagtgccac

SEQ ID NO: 5771560 - DNA, 25 bp, Homo sapien
ccatgtctactaaaatacaaaaaat

SEQ ID NO: 5771561 - DNA, 25 bp, Homo sapien
gctgaagccatttcacatttcaccc

SEQ ID NO: 5771562 - DNA, 25 bp, Homo sapien
cccagtggtgaggagccacacagta

SEQ ID NO: 5771563 - DNA, 25 bp, Homo sapien
aaggccttatgaatgtggcgagtgc

SEQ ID NO: 5771564 - DNA, 25 bp, Homo sapien
gttctattcattgcatagaatgact

SEQ ID NO: 5771565 - DNA, 25 bp, Homo sapien
cctaacactttgggaggccaaggcg

SEQ ID NO: 5771566 - DNA, 25 bp, Homo sapien
tttttgtcaggtcagaggtcaccat

SEQ ID NO: 5771567 - DNA, 25 bp, Homo sapien
gcagtgaatgtgagaaatcctttag

SEQ ID NO: 5771568 - DNA, 25 bp, Homo sapien
aagtcgcgaaagtgggccagaggtt

SEQ ID NO: 5771569 - DNA, 25 bp, Homo sapien
aatggcggcagtcgcgctgagggac

SEQ ID NO: 5771570 - DNA, 25 bp, Homo sapien
attggcctgctgcccaaggcctcaa

SEQ ID NO: 5771571 - DNA, 25 bp, Homo sapien
gaaatcccatgtctactaaaataca

SEQ ID NO: 5771572 - DNA, 25 bp, Homo sapien
tattgctctaattggcctgctgccc

SEQ ID NO: 5771573 - DNA, 25 bp, Homo sapien
tttatgtcactgccaatttctgagg

SEQ ID NO: 5771574 - DNA, 25 bp, Homo sapien
actttgggaggccaaggcgggcgga

SEQ ID NO: 5771575 - DNA, 25 bp, Homo sapien
tcattcaacaccagagaggtcacac

SEQ ID NO: 5771576 - DNA, 25 bp, Homo sapien
caggatcttctgtttactatcgctg

SEQ ID NO: 5771577 - DNA, 25 bp, Homo sapien
tctaacctcattcgacaccgcagca

SEQ ID NO: 5771578 - DNA, 25 bp, Homo sapien
agaagagttcacactggagaaatgc

SEQ ID NO: 5771579 - DNA, 25 bp, Homo sapien
aatttaaactttgagcacccacagt

SEQ ID NO: 5771580 - DNA, 25 bp, Homo sapien
ccacagtggggtattcttcataagt

SEQ ID NO: 5771581 - DNA, 25 bp, Homo sapien
ctaaaatacaaaaaattagccaggc

SEQ ID NO: 5771582 - DNA, 25 bp, Homo sapien
caccaaaccacatcccctgtgcaaa

SEQ ID NO: 5771583 - DNA, 25 bp, Homo sapien
ggaggccaaggcgggcggattgcct

SEQ ID NO: 5771584 - DNA, 25 bp, Homo sapien
ataattcacactggagaaaggcctt

SEQ ID NO: 5771585 - DNA, 25 bp, Homo sapien
gccaaggcgggcggattgcctgagc

SEQ ID NO: 5771586 - DNA, 25 bp, Homo sapien
aatctgccgaggcctatagcctgat

SEQ ID NO: 5771587 - DNA, 25 bp, Homo sapien
ggagaaagaccttatgagtgcagtc

SEQ ID NO: 5771588 - DNA, 25 bp, Homo sapien
gggactgttgtgttcgaatgcccgc

SEQ ID NO: 5771589 - DNA, 25 bp, Homo sapien
gcccaggcaacagagtgagactccg

SEQ ID NO: 5771590 - DNA, 25 bp, Homo sapien
caacaccagagaattcacagtggag

SEQ ID NO: 5771591 - DNA, 25 bp, Homo sapien
aagtcatacttgggtagcacaagca

SEQ ID NO: 5771592 - DNA, 25 bp, Homo sapien
ggaaaaggaaggtggatgaggctac

SEQ ID NO: 5771593 - DNA, 25 bp, Homo sapien
ggaacattgtcggtctcacatgatg

SEQ ID NO: 5771594 - DNA, 25 bp, Homo sapien
gcctgggcaacatggtgaaatccca

SEQ ID NO: 5771595 - DNA, 25 bp, Homo sapien
gctgcccaaggcctcaaagtaaaga

SEQ ID NO: 5771596 - DNA, 25 bp, Homo sapien
tcccagccacttgggaggctgaggc

SEQ ID NO: 5771597 - DNA, 25 bp, Homo sapien
ccggagaattcatactggcacaaga

SEQ ID NO: 5771598 - DNA, 25 bp, Homo sapien
cctggaaactgcttggtgcacattg

SEQ ID NO: 5771599 - DNA, 25 bp, Homo sapien
ttgggaggctgaggcaggagaatcg

SEQ ID NO: 5771600 - DNA, 25 bp, Homo sapien
gtggagaagactgcagtaaattaga

SEQ ID NO: 5771601 - DNA, 25 bp, Homo sapien
caaatcggaactcattcaacaccag

SEQ ID NO: 5771602 - DNA, 25 bp, Homo sapien
gtgaatgtgaggaatcctttagcaa

SEQ ID NO: 5771603 - DNA, 25 bp, Homo sapien
agggcaatacacccacccagaaaac

SEQ ID NO: 5771604 - DNA, 25 bp, Homo sapien
cacgaagccactcccagtggtgagg

SEQ ID NO: 5771605 - DNA, 25 bp, Homo sapien
agactgtggtagccatcttcgtaaa

SEQ ID NO: 5771606 - DNA, 25 bp, Homo sapien
cttctgtgaacgtgaattttgttca

SEQ ID NO: 5771607 - DNA, 25 bp, Homo sapien
cactggacaaaagatgtttgagtgt

SEQ ID NO: 5771608 - DNA, 25 bp, Homo sapien
cctttagacaaagctctagcctttt

SEQ ID NO: 5771609 - DNA, 25 bp, Homo sapien
ccgaggcctatagcctgatttatgt

SEQ ID NO: 5771610 - DNA, 25 bp, Homo sapien
gaaaacctttagctacaaatctaac

SEQ ID NO: 5771611 - DNA, 25 bp, Homo sapien
ccatgtgccatggcatataagtcag

SEQ ID NO: 5771612 - DNA, 25 bp, Homo sapien
tttgtggagatctcaaactttctgt

SEQ ID NO: 5771613 - DNA, 25 bp, Homo sapien
agaaagaccttatgagtgcagtcaa

SEQ ID NO: 5771614 - DNA, 25 bp, Homo sapien
agtgtctgttctgaaggagggcttt

SEQ ID NO: 5771615 - DNA, 25 bp, Homo sapien
tgggaaaccctttacccacaaatca

SEQ ID NO: 5771616 - DNA, 25 bp, Homo sapien
tctattcattgcatagaatgacttg

SEQ ID NO: 5771617 - DNA, 25 bp, Homo sapien
atttttcaatgcaaaaagttattac

SEQ ID NO: 5771618 - DNA, 25 bp, Homo sapien
ttctcaggatcttctgtttactatc

SEQ ID NO: 5771619 - DNA, 25 bp, Homo sapien
tcacatttcacccctaccacctggc

SEQ ID NO: 5771620 - DNA, 25 bp, Homo sapien
ctcagaagggacaatgtgatggcag

SEQ ID NO: 5771621 - DNA, 25 bp, Homo sapien
agattttgtggagatctcaaacttt

SEQ ID NO: 5771622 - DNA, 25 bp, Homo sapien
aacatggtgaaatcccatgtctact

SEQ ID NO: 5771623 - DNA, 25 bp, Homo sapien
aacaccagagaggtcacactggaga

SEQ ID NO: 5771624 - DNA, 25 bp, Homo sapien
aggacttctaagggcaatacaccca

SEQ ID NO: 5771625 - DNA, 25 bp, Homo sapien
gggactcggctcagggtatgacctt

SEQ ID NO: 5771626 - DNA, 25 bp, Homo sapien
gtcatacttgggtagcacaagcatg

SEQ ID NO: 5771627 - DNA, 25 bp, Homo sapien
ctaatctgccgaggcctatagcctg

SEQ ID NO: 5771628 - DNA, 25 bp, Homo sapien
gaggctgaggcaggagaatcgcttg

SEQ ID NO: 5771629 - DNA, 25 bp, Homo sapien
tttattcagtataatagcactggag

SEQ ID NO: 5771630 - DNA, 25 bp, Homo sapien
gactgttgtgttcgaatgcccgccc

SEQ ID NO: 5771631 - DNA, 25 bp, Homo sapien
gacgggacagagaagtcgcgaaagt

SEQ ID NO: 5771632 - DNA, 25 bp, Homo sapien
tcaacaccagagagttcacactgga

SEQ ID NO: 5771633 - DNA, 25 bp, Homo sapien
aagttcatctacaaattttccagtg

SEQ ID NO: 5771634 - DNA, 25 bp, Homo sapien
tgtcaggtcagaggtcaccatgaaa

SEQ ID NO: 5771635 - DNA, 25 bp, Homo sapien
gtgtagactggtgccatttgttgtc

SEQ ID NO: 5771636 - DNA, 25 bp, Homo sapien
accactgcactccagcccaggcaac

SEQ ID NO: 5771637 - DNA, 25 bp, Homo sapien
tgaattatttcacctgtggggaggc

SEQ ID NO: 5771638 - DNA, 25 bp, Homo sapien
ggacaatgtgatggcagaagacagc

SEQ ID NO: 5771639 - DNA, 25 bp, Homo sapien
catttgttgtcagactataggtgtg

SEQ ID NO: 5771640 - DNA, 25 bp, Homo sapien
agcaaaaagtgccacctaatcttac

SEQ ID NO: 5771641 - DNA, 25 bp, Homo sapien
acctggcaggtgcacaccatgtgca

SEQ ID NO: 5771642 - DNA, 25 bp, Homo sapien
gcatggtgtaatcctaacactttgg

SEQ ID NO: 5771643 - DNA, 25 bp, Homo sapien
acccagttgtggtccagagaatctg

SEQ ID NO: 5771644 - DNA, 25 bp, Homo sapien
tgtggagatctcaaactttctgtac

SEQ ID NO: 5771645 - DNA, 25 bp, Homo sapien
gaggtcaccatgaaaaggaggcagt

SEQ ID NO: 5771646 - DNA, 25 bp, Homo sapien
tacaggtcaggacttctaagggcaa

SEQ ID NO: 5771647 - DNA, 25 bp, Homo sapien
attcttcataagtttcaggtatgtg

SEQ ID NO: 5771648 - DNA, 25 bp, Homo sapien
cacggagctcaatggcggcagtcgc

SEQ ID NO: 5771649 - DNA, 25 bp, Homo sapien
gtgccatggcatataagtcagtgta

SEQ ID NO: 5771650 - DNA, 25 bp, Homo sapien
gcggattgcctgagctcaggagttc

SEQ ID NO: 5771651 - DNA, 25 bp, Homo sapien
gttcaacagtaattgggacagaaac

SEQ ID NO: 5771652 - DNA, 25 bp, Homo sapien
accagagagttcactctggagaaag

SEQ ID NO: 5771653 - DNA, 25 bp, Homo sapien
aaatcctttagacaaatcttcaatc

SEQ ID NO: 5771654 - DNA, 25 bp, Homo sapien
aggcaacagagtgagactccgtctc

SEQ ID NO: 5771655 - DNA, 25 bp, Homo sapien
tttcaggtatgtgggaagctctgag

SEQ ID NO: 5771656 - DNA, 25 bp, Homo sapien
tcactctggagaaaggccttatcag

SEQ ID NO: 5771657 - DNA, 25 bp, Homo sapien
tattgtggcctggtgccatttttgt

SEQ ID NO: 5771658 - DNA, 25 bp, Homo sapien
gttcacactggagaaatgccttatc

SEQ ID NO: 5771659 - DNA, 25 bp, Homo sapien
cccacggacctactccaacacgaag

SEQ ID NO: 5771660 - DNA, 25 bp, Homo sapien
cagtcttgaaagacattttgcctgc

SEQ ID NO: 5771661 - DNA, 25 bp, Homo sapien
ttgcaagaacacacttgttcagcac

SEQ ID NO: 5771662 - DNA, 25 bp, Homo sapien
ctgctgcccaaggcctcaaagtaaa

SEQ ID NO: 5771663 - DNA, 25 bp, Homo sapien
agcattacaatgaagaagagccctg

SEQ ID NO: 5771664 - DNA, 25 bp, Homo sapien
aaaagttcatctacaaattttccag

SEQ ID NO: 5771665 - DNA, 25 bp, Homo sapien
gaacaccagagagttcacactggag

SEQ ID NO: 5771666 - DNA, 25 bp, Homo sapien
gtggccatttatttctcccaagaag

SEQ ID NO: 5771667 - DNA, 25 bp, Homo sapien
tctgtactcagaagggacaatgtga

SEQ ID NO: 5771668 - DNA, 25 bp, Homo sapien
gaaatgccttatcagtgcagtgatt

SEQ ID NO: 5771669 - DNA, 25 bp, Homo sapien
agcgctctggcctcattcagcaccg

SEQ ID NO: 5771670 - DNA, 25 bp, Homo sapien
ttgttcagcaccagcaaattcacac

SEQ ID NO: 5771671 - DNA, 25 bp, Homo sapien
cagactataggtgtggaggtgaaat

SEQ ID NO: 5771672 - DNA, 25 bp, Homo sapien
gggcggattgcctgagctcaggagt

SEQ ID NO: 5771673 - DNA, 25 bp, Homo sapien
tgcagtgaatgtggaaaatccttta

SEQ ID NO: 5771674 - DNA, 25 bp, Homo sapien
tgacctttgaggatgtggccattta

SEQ ID NO: 5771675 - DNA, 25 bp, Homo sapien
catactggagaaaggccttatgaat

SEQ ID NO: 5771676 - DNA, 25 bp, Homo sapien
ttgttcagttgtccacaggagatcc

SEQ ID NO: 5771677 - DNA, 25 bp, Homo sapien
atgtgagaaagccttcacttgcaag

SEQ ID NO: 5771678 - DNA, 25 bp, Homo sapien
ttcgacaccgcagcattcacactgg

SEQ ID NO: 5771679 - DNA, 25 bp, Homo sapien
aggagggctttatgagtgtagcaaa

SEQ ID NO: 5771680 - DNA, 25 bp, Homo sapien
cctgtactgcgatgtgatgctggag

SEQ ID NO: 5771681 - DNA, 25 bp, Homo sapien
cacagtagcagcagcaagcatatac

SEQ ID NO: 5771682 - DNA, 25 bp, Homo sapien
taatttctaatctgccgaggcctat

SEQ ID NO: 5771683 - DNA, 25 bp, Homo sapien
ttagagtatacacctgacccagttg

SEQ ID NO: 5771684 - DNA, 25 bp, Homo sapien
gaggatgtggccatttatttctccc

SEQ ID NO: 5771685 - DNA, 25 bp, Homo sapien
ggagaatcgcttgaacccagaaggc

SEQ ID NO: 5771686 - DNA, 25 bp, Homo sapien
tcagtgcatacagaaattctcagga

SEQ ID NO: 5771687 - DNA, 25 bp, Homo sapien
tttgtgaccggctgcagattccatg

SEQ ID NO: 5771688 - DNA, 25 bp, Homo sapien
cgaagccactcccagtggtgaggag

SEQ ID NO: 5771689 - DNA, 25 bp, Homo sapien
agcatcagagtgtctgttctgaagg

SEQ ID NO: 5771690 - DNA, 25 bp, Homo sapien
ctgtcagctttctaaggattacctt

SEQ ID NO: 5771691 - DNA, 25 bp, Homo sapien
ctccaacacgaagccactcccagtg

SEQ ID NO: 5771692 - DNA, 25 bp, Homo sapien
ggagccatgtgccatggcatataag

SEQ ID NO: 5771693 - DNA, 25 bp, Homo sapien
tcttcataagtttcaggtatgtggg

SEQ ID NO: 5771694 - DNA, 25 bp, Homo sapien
agaaagaccttatgaatgcagtgaa

SEQ ID NO: 5771695 - DNA, 25 bp, Homo sapien
gggcatggtgtaatcctaacacttt

SEQ ID NO: 5771696 - DNA, 25 bp, Homo sapien
ccttatgaatgcagagaatgtggga

SEQ ID NO: 5771697 - DNA, 25 bp, Homo sapien
aatgtgagaaatcctttagccgcaa

SEQ ID NO: 5771698 - DNA, 25 bp, Homo sapien
atttcacctgtggggaggccttccc

SEQ ID NO: 5771699 - DNA, 25 bp, Homo sapien
tatacaggcatttttcaatgcaaaa

SEQ ID NO: 5771700 - DNA, 25 bp, Homo sapien
catggtgaaatcccatgtctactaa

SEQ ID NO: 5771701 - DNA, 25 bp, Homo sapien
agtgctgaccttcaccagcatcaaa

SEQ ID NO: 5771702 - DNA, 25 bp, Homo sapien
tgagctgagattgcaccactgcact

SEQ ID NO: 5771703 - DNA, 25 bp, Homo sapien
tatacacctgacccagttgtggtcc

SEQ ID NO: 5771704 - DNA, 25 bp, Homo sapien
ccaggcccgggatagggactgttgt

SEQ ID NO: 5771705 - DNA, 25 bp, Homo sapien
tatgaatgtagtgaatgtgggaaat

SEQ ID NO: 5771706 - DNA, 25 bp, Homo sapien
ctggcacaagaccttatgagtgcag

SEQ ID NO: 5771707 - DNA, 25 bp, Homo sapien
ggctgaggcaggagaatcgcttgaa

SEQ ID NO: 5771708 - DNA, 25 bp, Homo sapien
tgatgcttgtaatgaatttttccac

SEQ ID NO: 5771709 - DNA, 25 bp, Homo sapien
taacactttgggaggccaaggcggg

SEQ ID NO: 5771710 - DNA, 25 bp, Homo sapien
tttctgaggctgaagccatttcaca

SEQ ID NO: 5771711 - DNA, 25 bp, Homo sapien
tgagattaagatgtgtgtcccagtc

SEQ ID NO: 5771712 - DNA, 25 bp, Homo sapien
aaggccttatcagtgctgtgagtgt

SEQ ID NO: 5771713 - DNA, 25 bp, Homo sapien
atagaatgacttgtaagcagaatag

SEQ ID NO: 5771714 - DNA, 25 bp, Homo sapien
ttgtcggtctcacatgatgcttgta

SEQ ID NO: 5771715 - DNA, 25 bp, Homo sapien
cagtcgcgctgagggactcggctca

SEQ ID NO: 5771716 - DNA, 25 bp, Homo sapien
gagtggagaagactgcagtaaatta

SEQ ID NO: 5771717 - DNA, 25 bp, Homo sapien
attgcctgagctcaggagttcaaga

SEQ ID NO: 5771718 - DNA, 25 bp, Homo sapien
tcattcaccaccagagacgtcacac

SEQ ID NO: 5771719 - DNA, 25 bp, Homo sapien
gtcagaggtcaccatgaaaaggagg

SEQ ID NO: 5771720 - DNA, 25 bp, Homo sapien
aaacctctgtactctcccatttgct

SEQ ID NO: 5771721 - DNA, 25 bp, Homo sapien
gaccttattcagcaccaaagagttc

SEQ ID NO: 5771722 - DNA, 25 bp, Homo sapien
gttcatctacaaattttccagtgaa

SEQ ID NO: 5771723 - DNA, 25 bp, Homo sapien
atgtaggaaaacctttagctacaaa

SEQ ID NO: 5771724 - DNA, 25 bp, Homo sapien
cacattctgattcaccagcctggaa

SEQ ID NO: 5771725 - DNA, 25 bp, Homo sapien
ccatgtgcatgagtcacttccccac

SEQ ID NO: 5771726 - DNA, 25 bp, Homo sapien
atagaagagttcacactggagaaat

SEQ ID NO: 5771727 - DNA, 25 bp, Homo sapien
gagggacgggacagagaagtcgcga

SEQ ID NO: 5771728 - DNA, 25 bp, Homo sapien
aggtcacactggagaaagaccttat

SEQ ID NO: 5771729 - DNA, 25 bp, Homo sapien
aggtgaaattacaggttcaacagta

SEQ ID NO: 5771730 - DNA, 25 bp, Homo sapien
aattcacactggagaaaggccttat

SEQ ID NO: 5771731 - DNA, 25 bp, Homo sapien
ccttatcagtgcagtgattgtggga

SEQ ID NO: 5771732 - DNA, 25 bp, Homo sapien
gaatgtggcgagtgcgggaaatcct

SEQ ID NO: 5771733 - DNA, 25 bp, Homo sapien
aggagatccacataattcctagcac

SEQ ID NO: 5771734 - DNA, 25 bp, Homo sapien
tgagaaatcctttagccgcaaattt

SEQ ID NO: 5771735 - DNA, 25 bp, Homo sapien
agttgcagtgagctgagattgcacc

SEQ ID NO: 5771736 - DNA, 25 bp, Homo sapien
ccagagacgtcacactggaggagtg

SEQ ID NO: 5771737 - DNA, 25 bp, Homo sapien
tcaacaccggagaattcatactggc

SEQ ID NO: 5771738 - DNA, 25 bp, Homo sapien
ctgagttgtgctgtcagctttctaa

SEQ ID NO: 5771739 - DNA, 25 bp, Homo sapien
cttcagtgctgaccttcaccagcat

SEQ ID NO: 5771740 - DNA, 25 bp, Homo sapien
tagccgcaaatttatcctgattcaa

SEQ ID NO: 5771741 - DNA, 25 bp, Homo sapien
tcattcaacaccagagagttcacac

SEQ ID NO: 5771742 - DNA, 25 bp, Homo sapien
gtcttgaaagacattttgcctgcgg

SEQ ID NO: 5771743 - DNA, 25 bp, Homo sapien
cggagctcaatggcggcagtcgcgc

SEQ ID NO: 5771744 - DNA, 25 bp, Homo sapien
atacaaaaaattagccaggcgtggc

SEQ ID NO: 5771745 - DNA, 25 bp, Homo sapien
gaggttcctgtactgcgatgtgatg

SEQ ID NO: 5771746 - DNA, 25 bp, Homo sapien
taggccttatgagtgcagtgaatgt

SEQ ID NO: 5771747 - DNA, 25 bp, Homo sapien
ttatgagtgcagtgaatgtgagaaa

SEQ ID NO: 5771748 - DNA, 25 bp, Homo sapien
gagaaatgccttatcagtgcagtga

SEQ ID NO: 5771749 - DNA, 25 bp, Homo sapien
acaggttcaacagtaattgggacag

SEQ ID NO: 5771750 - DNA, 25 bp, Homo sapien
gtcatgagtgtggtgaatgtaggaa

SEQ ID NO: 5771751 - DNA, 25 bp, Homo sapien
agacttcatactggagaaaggcctt

SEQ ID NO: 5771752 - DNA, 25 bp, Homo sapien
tattcattgcatagaatgacttgta

SEQ ID NO: 5771753 - DNA, 25 bp, Homo sapien
cgtaaatttaaactttgagcaccca

SEQ ID NO: 5771754 - DNA, 25 bp, Homo sapien
tgtactgcgatgtgatgctggagaa

SEQ ID NO: 5771755 - DNA, 25 bp, Homo sapien
gcggcagtcgcgctgagggactcgg

SEQ ID NO: 5771756 - DNA, 25 bp, Homo sapien
gacatcggagagttcacactgaaga

SEQ ID NO: 5771757 - DNA, 25 bp, Homo sapien
tgtttactatcgctgagatcattat

SEQ ID NO: 5771758 - DNA, 25 bp, Homo sapien
gcaaatctgacctcattcaacaccg

SEQ ID NO: 5771759 - DNA, 25 bp, Homo sapien
aggccttatgaatgcagtgatcgtg

SEQ ID NO: 5771760 - DNA, 25 bp, Homo sapien
atcgctgagatcattatcagaaaat

SEQ ID NO: 5771761 - DNA, 25 bp, Homo sapien
tcagagaagcaaacctctgtactct

SEQ ID NO: 5771762 - DNA, 25 bp, Homo sapien
tcaacaccagagaggtcacactgga

SEQ ID NO: 5771763 - DNA, 25 bp, Homo sapien
tcaggacttctaagggcaatacacc

SEQ ID NO: 5771764 - DNA, 25 bp, Homo sapien
ccatttatttctcccaagaagagtg

SEQ ID NO: 5771765 - DNA, 25 bp, Homo sapien
ggcaggtgcacaccatgtgcatgag

SEQ ID NO: 5771766 - DNA, 25 bp, Homo sapien
ctggagaaaggccttatgaatgtag

SEQ ID NO: 5771767 - DNA, 25 bp, Homo sapien
ctgcgatgtgatgctggagaacttt

SEQ ID NO: 5771768 - DNA, 25 bp, Homo sapien
gaatgtgaggaatcctttagcaaaa

SEQ ID NO: 5771769 - DNA, 25 bp, Homo sapien
gccagtttctgcagtggaggtcgcg

SEQ ID NO: 5771770 - DNA, 25 bp, Homo sapien
taagatgtgtgtcccagtcttgaaa

SEQ ID NO: 5771771 - DNA, 25 bp, Homo sapien
caagtggggtgaatacagaaaagct

SEQ ID NO: 5771772 - DNA, 25 bp, Homo sapien
aaagcattacaatgaagaagagccc

SEQ ID NO: 5771773 - DNA, 25 bp, Homo sapien
agctctttgttctgtattgctctaa

SEQ ID NO: 5771774 - DNA, 25 bp, Homo sapien
gtggtgaggagccacacagtagcag

SEQ ID NO: 5771775 - DNA, 25 bp, Homo sapien
gcaaaagtcatacttgggtagcaca

SEQ ID NO: 5771776 - DNA, 25 bp, Homo sapien
atggcagaagacagctctttgttct

SEQ ID NO: 5771777 - DNA, 25 bp, Homo sapien
ccaaagagttcacactggagaaaga

SEQ ID NO: 5771778 - DNA, 25 bp, Homo sapien
gcgatagcttctgagcagagtgtat

SEQ ID NO: 5771779 - DNA, 25 bp, Homo sapien
aggttcaacagtaattgggacagaa

SEQ ID NO: 5771780 - DNA, 25 bp, Homo sapien
attcgacatcggagagttcacactg

SEQ ID NO: 5771781 - DNA, 25 bp, Homo sapien
acctcattcgacaccgcagcattca

SEQ ID NO: 5771782 - DNA, 25 bp, Homo sapien
ctctttgttctgtattgctctaatt

SEQ ID NO: 5771783 - DNA, 25 bp, Homo sapien
agtaaattagatggaatgactcttc

SEQ ID NO: 5771784 - DNA, 25 bp, Homo sapien
tgtattgtggcctggtgccattttt

SEQ ID NO: 5771785 - DNA, 25 bp, Homo sapien
gtctcacatgatgcttgtaatgaat

SEQ ID NO: 5771786 - DNA, 25 bp, Homo sapien
atttatttctcccaagaagagtggg

SEQ ID NO: 5771787 - DNA, 25 bp, Homo sapien
ccacaaacacacacttgttcagcat

SEQ ID NO: 5771788 - DNA, 25 bp, Homo sapien
aatcggaactcattcaacaccagag

SEQ ID NO: 5771789 - DNA, 25 bp, Homo sapien
gggacagaaactccaggtaaatggg

SEQ ID NO: 5771790 - DNA, 25 bp, Homo sapien
tctatacaggtcaggacttctaagg

SEQ ID NO: 5771791 - DNA, 25 bp, Homo sapien
gttcactctggagaaaggccttatc

SEQ ID NO: 5771792 - DNA, 25 bp, Homo sapien
tagcactggtgaggggaatctgttg

SEQ ID NO: 5771793 - DNA, 25 bp, Homo sapien
atttctcccaagaagagtgggagct

SEQ ID NO: 5771794 - DNA, 25 bp, Homo sapien
cagagaattcacagtggagaaagac

SEQ ID NO: 5771795 - DNA, 25 bp, Homo sapien
cgcagcattcacactggtgataggc

SEQ ID NO: 5771796 - DNA, 25 bp, Homo sapien
agcagcagcaagcatatacaggcat

SEQ ID NO: 5771797 - DNA, 25 bp, Homo sapien
atggtgtaatcctaacactttggga

SEQ ID NO: 5771798 - DNA, 25 bp, Homo sapien
cagcccaggcaacagagtgagactc

SEQ ID NO: 5771799 - DNA, 25 bp, Homo sapien
tagcttctgagcagagtgtatctat

SEQ ID NO: 5771800 - DNA, 25 bp, Homo sapien
aaagtgctagcctcattcaacacca

SEQ ID NO: 5771801 - DNA, 25 bp, Homo sapien
gggatagggactgttgtgttcgaat

SEQ ID NO: 5771802 - DNA, 25 bp, Homo sapien
gaatgtggaaaatcctttacccgca

SEQ ID NO: 5771803 - DNA, 25 bp, Homo sapien
cagaggttcctgtactgcgatgtga

SEQ ID NO: 5771804 - DNA, 25 bp, Homo sapien
ctcaggagttcaagaccagcctggg

SEQ ID NO: 5771805 - DNA, 25 bp, Homo sapien
cagtgctgtgagtgtgggaaatcct

SEQ ID NO: 5771806 - DNA, 25 bp, Homo sapien
tgaatgcagtgaatgtgggaaatcc

SEQ ID NO: 5771807 - DNA, 25 bp, Homo sapien
tgcctgagctcaggagttcaagacc

SEQ ID NO: 5771808 - DNA, 25 bp, Homo sapien
gcctatagtcccagccacttgggag

SEQ ID NO: 5771809 - DNA, 25 bp, Homo sapien
gaccttcaccagcatcaaaagcatt

SEQ ID NO: 5771810 - DNA, 25 bp, Homo sapien
aagctctagcctttttcgacaccag

SEQ ID NO: 5771811 - DNA, 25 bp, Homo sapien
gtgggaaatcctttagccgcaaatc

SEQ ID NO: 5771812 - DNA, 25 bp, Homo sapien
gtgaatgtgggaaatcctttagccg

SEQ ID NO: 5771813 - DNA, 25 bp, Homo sapien
ccttattcagcaccaaagagttcac

SEQ ID NO: 5771814 - DNA, 25 bp, Homo sapien
gggaatgtgctatttctttattcag

SEQ ID NO: 5771815 - DNA, 25 bp, Homo sapien
ccccgcctagtccacggagctcaat

SEQ ID NO: 5771816 - DNA, 25 bp, Homo sapien
tttagacaaatcttcaatctcattc

SEQ ID NO: 5771817 - DNA, 25 bp, Homo sapien
acattttgcctgcggctgagcacca

SEQ ID NO: 5771818 - DNA, 25 bp, Homo sapien
ttctaaaagttcatctacaaatttt

SEQ ID NO: 5771819 - DNA, 25 bp, Homo sapien
attgtaatttctaatctgccgaggc

SEQ ID NO: 5771820 - DNA, 25 bp, Homo sapien
tatgagtgcagtcaatgtgggaaac

SEQ ID NO: 5771821 - DNA, 25 bp, Homo sapien
gtaatgaatttttccacattctgat

SEQ ID NO: 5771822 - DNA, 25 bp, Homo sapien
ctaaaagttcatctacaaattttcc

SEQ ID NO: 5771823 - DNA, 25 bp, Homo sapien
tcgggtgagctgcgccaggcccggg

SEQ ID NO: 5771824 - DNA, 25 bp, Homo sapien
tcgtgagaaagcctttatccataaa

SEQ ID NO: 5771825 - DNA, 25 bp, Homo sapien
taacctcattcgacaccgcagcatt

SEQ ID NO: 5771826 - DNA, 25 bp, Homo sapien
caatacacccacccagaaaactcac

SEQ ID NO: 5771827 - DNA, 25 bp, Homo sapien
cacactggagaaagaccttatgaat

SEQ ID NO: 5771828 - DNA, 25 bp, Homo sapien
cagtttctgcagtggaggtcgcgac

SEQ ID NO: 5771829 - DNA, 25 bp, Homo sapien
agagttcacactgaagaaaggcctt

SEQ ID NO: 5771830 - DNA, 25 bp, Homo sapien
ctagcctcattcaacaccagagagt

SEQ ID NO: 5771831 - DNA, 25 bp, Homo sapien
gagttgtgctgtcagctttctaagg

SEQ ID NO: 5771832 - DNA, 25 bp, Homo sapien
agtgcgggaaatcctttagacaaag

SEQ ID NO: 5771833 - DNA, 25 bp, Homo sapien
acaaatcagaccttattcagcacca

SEQ ID NO: 5771834 - DNA, 25 bp, Homo sapien
agagtatacacctgacccagttgtg

SEQ ID NO: 5771835 - DNA, 25 bp, Homo sapien
gagaatctgagttgtgctgtcagct

SEQ ID NO: 5771836 - DNA, 25 bp, Homo sapien
gcacccacagtggggtattcttcat

SEQ ID NO: 5771837 - DNA, 25 bp, Homo sapien
ccgcaaatctaacctcattcgacat

SEQ ID NO: 5771838 - DNA, 25 bp, Homo sapien
aaggcggaagttgcagtgagctgag

SEQ ID NO: 5771839 - DNA, 25 bp, Homo sapien
ctgggttattgccatggaatggaga

SEQ ID NO: 5771840 - DNA, 25 bp, Homo sapien
tgtaatcctaacactttgggaggcc

SEQ ID NO: 5771841 - DNA, 25 bp, Homo sapien
gaaatcctttagccgcaaatctaac

SEQ ID NO: 5771842 - DNA, 25 bp, Homo sapien
ctcagaggttcctgtactgcgatgt

SEQ ID NO: 5771843 - DNA, 25 bp, Homo sapien
gctacaaatctaacctcattgaaca

SEQ ID NO: 5771844 - DNA, 25 bp, Homo sapien
gattccatgtgttgaattatttcac

SEQ ID NO: 5771845 - DNA, 25 bp, Homo sapien
ctatagtcccagccacttgggaggc

SEQ ID NO: 5771846 - DNA, 25 bp, Homo sapien
ggtccagagaatctgagttgtgctg

SEQ ID NO: 5771847 - DNA, 25 bp, Homo sapien
cacactggagaaagaccttatgagt

SEQ ID NO: 5771848 - DNA, 25 bp, Homo sapien
ttgtgtaggatcagtgcatacagaa

SEQ ID NO: 5771849 - DNA, 25 bp, Homo sapien
tgaacgtgaattttgttcagttgtc

SEQ ID NO: 5771850 - DNA, 25 bp, Homo sapien
cagagtgagactccgtctccaaaaa

SEQ ID NO: 5771851 - DNA, 25 bp, Homo sapien
cgctccccgcctagtccacggagct

SEQ ID NO: 5771852 - DNA, 25 bp, Homo sapien
tctgtgaacgtgaattttgttcagt

SEQ ID NO: 5771853 - DNA, 25 bp, Homo sapien
tgtttgagtgtagtgaatgtgagga

SEQ ID NO: 5771854 - DNA, 25 bp, Homo sapien
cgccaggcccgggatagggactgtt

SEQ ID NO: 5771855 - DNA, 25 bp, Homo sapien
ttcgtaaatttaaactttgagcacc

SEQ ID NO: 5771856 - DNA, 25 bp, Homo sapien
gggacgggacagagaagtcgcgaaa

SEQ ID NO: 5771857 - DNA, 25 bp, Homo sapien
ggtgaggagccacacagtagcagca

SEQ ID NO: 5771858 - DNA, 25 bp, Homo sapien
tgaagccatttcacatttcacccct

SEQ ID NO: 5771859 - DNA, 25 bp, Homo sapien
aagagtgggagctccttgatgagtc

SEQ ID NO: 5771860 - DNA, 25 bp, Homo sapien
aactcacctcagtgagattaagatg

SEQ ID NO: 5771861 - DNA, 25 bp, Homo sapien
tgccaggctttgtgttcctgtattg

SEQ ID NO: 5771862 - DNA, 25 bp, Homo sapien
cttcccagcccccacggacctactc

SEQ ID NO: 5771863 - DNA, 25 bp, Homo sapien
catactggcacaagaccttatgagt

SEQ ID NO: 5771864 - DNA, 25 bp, Homo sapien
agtctttactttgaggccttgggca

SEQ ID NO: 5771865 - DNA, 25 bp, Homo sapien
cacatcttaatctcactgaggtgag

SEQ ID NO: 5771866 - DNA, 25 bp, Homo sapien
gtgctgaataaggtctgatttgtgg

SEQ ID NO: 5771867 - DNA, 25 bp, Homo sapien
ttctccagcatcacatcgcagtaca

SEQ ID NO: 5771868 - DNA, 25 bp, Homo sapien
ccactgtgaattctctggtgttgaa

SEQ ID NO: 5771869 - DNA, 25 bp, Homo sapien
ttgcagctaaaagatttcccacaat

SEQ ID NO: 5771870 - DNA, 25 bp, Homo sapien
ttgccacattcactgcactcataag

SEQ ID NO: 5771871 - DNA, 25 bp, Homo sapien
actcacagcactgataaggcctttc

SEQ ID NO: 5771872 - DNA, 25 bp, Homo sapien
aaggcctttctccagtgtgaattat

SEQ ID NO: 5771873 - DNA, 25 bp, Homo sapien
ccacaggtgaaataattcaacacat

SEQ ID NO: 5771874 - DNA, 25 bp, Homo sapien
tttagaagagtcattccatctaatt

SEQ ID NO: 5771875 - DNA, 25 bp, Homo sapien
gttgaacctgtaatttcacctccac

SEQ ID NO: 5771876 - DNA, 25 bp, Homo sapien
ttcctacattcaccacactcatgac

SEQ ID NO: 5771877 - DNA, 25 bp, Homo sapien
tctttggtgctgaataaggtctgat

SEQ ID NO: 5771878 - DNA, 25 bp, Homo sapien
ttcaatgaggttagatttgtagcta

SEQ ID NO: 5771879 - DNA, 25 bp, Homo sapien
accccttcatgctgacatcactatt

SEQ ID NO: 5771880 - DNA, 25 bp, Homo sapien
ctacactcataaagccctccttcag

SEQ ID NO: 5771881 - DNA, 25 bp, Homo sapien
cctccttttcatggtgacctctgac

SEQ ID NO: 5771882 - DNA, 25 bp, Homo sapien
acaaatgtagcctcatccaccttcc

SEQ ID NO: 5771883 - DNA, 25 bp, Homo sapien
caggctataggcctcggcagattag

SEQ ID NO: 5771884 - DNA, 25 bp, Homo sapien
aggatttctcacattcactgcactc

SEQ ID NO: 5771885 - DNA, 25 bp, Homo sapien
ggtccgtgggggctgggaaggcctc

SEQ ID NO: 5771886 - DNA, 25 bp, Homo sapien
atcctacacaaccatattcactgga

SEQ ID NO: 5771887 - DNA, 25 bp, Homo sapien
tgggatttcaccatgttgcccaggc

SEQ ID NO: 5771888 - DNA, 25 bp, Homo sapien
agaagcctctcatgcttgtgctacc

SEQ ID NO: 5771889 - DNA, 25 bp, Homo sapien
ggtgaatgaattcagatttatggat

SEQ ID NO: 5771890 - DNA, 25 bp, Homo sapien
aaagccctccttcagaacagacact

SEQ ID NO: 5771891 - DNA, 25 bp, Homo sapien
ctggtcttgaactcctgagctcagg

SEQ ID NO: 5771892 - DNA, 25 bp, Homo sapien
cctccacacctatagtctgacaaca

SEQ ID NO: 5771893 - DNA, 25 bp, Homo sapien
cctgacctgtatagatacactctgc

SEQ ID NO: 5771894 - DNA, 25 bp, Homo sapien
aggtcagcactgaagcagaagcctc

SEQ ID NO: 5771895 - DNA, 25 bp, Homo sapien
cagactattttctgataatgatctc

SEQ ID NO: 5771896 - DNA, 25 bp, Homo sapien
ggtgtcgcagaacctctggcccact

SEQ ID NO: 5771897 - DNA, 25 bp, Homo sapien
tcttctgccatcacattgtcccttc

SEQ ID NO: 5771898 - DNA, 25 bp, Homo sapien
agtctccggtgctgaatgaggccag

SEQ ID NO: 5771899 - DNA, 25 bp, Homo sapien
tggtgctgaacaagtgtgttcttgc

SEQ ID NO: 5771900 - DNA, 25 bp, Homo sapien
tgctcaaagtttaaatttacgaaga

SEQ ID NO: 5771901 - DNA, 25 bp, Homo sapien
gtgaaggtcagcactgaagcagaag

SEQ ID NO: 5771902 - DNA, 25 bp, Homo sapien
tcataaggtctttctccagtgtgac

SEQ ID NO: 5771903 - DNA, 25 bp, Homo sapien
ttactgcagtcttctccactcccca

SEQ ID NO: 5771904 - DNA, 25 bp, Homo sapien
agaacaaagagctgtcttctgccat

SEQ ID NO: 5771905 - DNA, 25 bp, Homo sapien
ttccatggcaataacccagggatgt

SEQ ID NO: 5771906 - DNA, 25 bp, Homo sapien
tccaccttccttttccagggctctt

SEQ ID NO: 5771907 - DNA, 25 bp, Homo sapien
ggatttcccacattcactgcattca

SEQ ID NO: 5771908 - DNA, 25 bp, Homo sapien
tcacattcactgcactcataaggcc

SEQ ID NO: 5771909 - DNA, 25 bp, Homo sapien
gtcagagaaaagacatgaagaccct

SEQ ID NO: 5771910 - DNA, 25 bp, Homo sapien
tgtgtttgtggcttgaagcttttct

SEQ ID NO: 5771911 - DNA, 25 bp, Homo sapien
ccagtgctattatactgaataaaga

SEQ ID NO: 5771912 - DNA, 25 bp, Homo sapien
tcacatcgcagtacaggaacctctg

SEQ ID NO: 5771913 - DNA, 25 bp, Homo sapien
tataaattaaagcaatgtgcaccaa

SEQ ID NO: 5771914 - DNA, 25 bp, Homo sapien
gaacctctgagactcatcaaggagc

SEQ ID NO: 5771915 - DNA, 25 bp, Homo sapien
ttcccacattcactacattcataag

SEQ ID NO: 5771916 - DNA, 25 bp, Homo sapien
aactcagattctctggaccacaact

SEQ ID NO: 5771917 - DNA, 25 bp, Homo sapien
gggctcttcttcattgtaatgcttt

SEQ ID NO: 5771918 - DNA, 25 bp, Homo sapien
tgataatgatctcagcgatagtaaa

SEQ ID NO: 5771919 - DNA, 25 bp, Homo sapien
tttccacattcactacattcataag

SEQ ID NO: 5771920 - DNA, 25 bp, Homo sapien
gggtttcccacattgactgcactca

SEQ ID NO: 5771921 - DNA, 25 bp, Homo sapien
tttttttggagacggagtctcactc

SEQ ID NO: 5771922 - DNA, 25 bp, Homo sapien
tggggattgtcacaactgcctcctt

SEQ ID NO: 5771923 - DNA, 25 bp, Homo sapien
gtgaaatgtgaaatggcttcagcct

SEQ ID NO: 5771924 - DNA, 25 bp, Homo sapien
ggatgtggtttggtgctcagccgca

SEQ ID NO: 5771925 - DNA, 25 bp, Homo sapien
ccacagtctcctccagtgctattat

SEQ ID NO: 5771926 - DNA, 25 bp, Homo sapien
tgaactctctggtgttcaatgaggt

SEQ ID NO: 5771927 - DNA, 25 bp, Homo sapien
aacacccaagattaaaggtgcgtaa

SEQ ID NO: 5771928 - DNA, 25 bp, Homo sapien
ctaaaggatttcccgcactcgccac

SEQ ID NO: 5771929 - DNA, 25 bp, Homo sapien
aaagcaatgtgcaccaagcagtttc

SEQ ID NO: 5771930 - DNA, 25 bp, Homo sapien
gagaaaagacatgaagaccctacat

SEQ ID NO: 5771931 - DNA, 25 bp, Homo sapien
ggattttccacattcactgcattca

SEQ ID NO: 5771932 - DNA, 25 bp, Homo sapien
gtgtgaactctccgatgtcgaatga

SEQ ID NO: 5771933 - DNA, 25 bp, Homo sapien
gaatgtggaaaaattcattacaagc

SEQ ID NO: 5771934 - DNA, 25 bp, Homo sapien
catgctgccacgcctggctaatttt

SEQ ID NO: 5771935 - DNA, 25 bp, Homo sapien
cactcataaggcctatcaccagtgt

SEQ ID NO: 5771936 - DNA, 25 bp, Homo sapien
ttcccttcacatttaaggcctttct

SEQ ID NO: 5771937 - DNA, 25 bp, Homo sapien
ggaattatgtggatctcctgtggac

SEQ ID NO: 5771938 - DNA, 25 bp, Homo sapien
aaacatcttttgtccagtgtgaatt

SEQ ID NO: 5771939 - DNA, 25 bp, Homo sapien
gaactctttggtgctgaataaggtc

SEQ ID NO: 5771940 - DNA, 25 bp, Homo sapien
gagcttcccacatacctgaaactta

SEQ ID NO: 5771941 - DNA, 25 bp, Homo sapien
tctccattccatggcaataacccag

SEQ ID NO: 5771942 - DNA, 25 bp, Homo sapien
gccagtatgaattctccggtgttga

SEQ ID NO: 5771943 - DNA, 25 bp, Homo sapien
ctctggtgttgaatgagttccgatt

SEQ ID NO: 5771944 - DNA, 25 bp, Homo sapien
cgatcactgcattcataaggccttt

SEQ ID NO: 5771945 - DNA, 25 bp, Homo sapien
cattcactgcattcataaggccttt

SEQ ID NO: 5771946 - DNA, 25 bp, Homo sapien
gttgaatgaggctagcactttggct

SEQ ID NO: 5771947 - DNA, 25 bp, Homo sapien
gagaccgacaatgttccttaaaaag

SEQ ID NO: 5771948 - DNA, 25 bp, Homo sapien
atccttagaaagctgacagcacaac

SEQ ID NO: 5771949 - DNA, 25 bp, Homo sapien
agaccctacatgcttgggctattaa

SEQ ID NO: 5771950 - DNA, 25 bp, Homo sapien
ctgcattcataaggtctttctccag

SEQ ID NO: 5771951 - DNA, 25 bp, Homo sapien
ctgcactcataaggtctttctccag

SEQ ID NO: 5771952 - DNA, 25 bp, Homo sapien
taaattaaagcaatgtgcaccaagc

SEQ ID NO: 5771953 - DNA, 25 bp, Homo sapien
tcataaagccctccttcagaacaga

SEQ ID NO: 5771954 - DNA, 25 bp, Homo sapien
ccagcatcacatcgcagtacaggaa

SEQ ID NO: 5771955 - DNA, 25 bp, Homo sapien
aatctcactgaggtgagttttctgg

SEQ ID NO: 5771956 - DNA, 25 bp, Homo sapien
caatgaggttagatttgtagctaaa

SEQ ID NO: 5771957 - DNA, 25 bp, Homo sapien
gcaccaagcagtttccaggctggtg

SEQ ID NO: 5771958 - DNA, 25 bp, Homo sapien
caatctcagctcactgcaacttccg

SEQ ID NO: 5771959 - DNA, 25 bp, Homo sapien
ataaggtctttctccagtgtgacct

SEQ ID NO: 5771960 - DNA, 25 bp, Homo sapien
agattagaaattacaatgaacctcc

SEQ ID NO: 5771961 - DNA, 25 bp, Homo sapien
cagaacagacactctgatgctgaac

SEQ ID NO: 5771962 - DNA, 25 bp, Homo sapien
acatgtgcaaagttctccagcatca

SEQ ID NO: 5771963 - DNA, 25 bp, Homo sapien
ggtgacctctgacctgacaaaaatg

SEQ ID NO: 5771964 - DNA, 25 bp, Homo sapien
ctcaaaggtcataccctgagccgag

SEQ ID NO: 5771965 - DNA, 25 bp, Homo sapien
tgtggacaactgaacaaaattcacg

SEQ ID NO: 5771966 - DNA, 25 bp, Homo sapien
ggagtgcagtggtgcaatctcagct

SEQ ID NO: 5771967 - DNA, 25 bp, Homo sapien
attatactgaataaagaaatagcac

SEQ ID NO: 5771968 - DNA, 25 bp, Homo sapien
atgaagaccctacatgcttgggcta

SEQ ID NO: 5771969 - DNA, 25 bp, Homo sapien
gtggggaagtgactcatgcacatgg

SEQ ID NO: 5771970 - DNA, 25 bp, Homo sapien
gtatgaagtctccggtgctgaatga

SEQ ID NO: 5771971 - DNA, 25 bp, Homo sapien
cctctctggtgttgaatgaggctag

SEQ ID NO: 5771972 - DNA, 25 bp, Homo sapien
cttttcatggtgacctctgacctga

SEQ ID NO: 5771973 - DNA, 25 bp, Homo sapien
tccagtgtgacctctctggtgttga

SEQ ID NO: 5771974 - DNA, 25 bp, Homo sapien
gagtaggtccgtgggggctgggaag

SEQ ID NO: 5771975 - DNA, 25 bp, Homo sapien
gataaggcatttctccagtgtgaac

SEQ ID NO: 5771976 - DNA, 25 bp, Homo sapien
accatgcccggccagactattttct

SEQ ID NO: 5771977 - DNA, 25 bp, Homo sapien
ctcatgcttgtgctacccaagtatg

SEQ ID NO: 5771978 - DNA, 25 bp, Homo sapien
actctctggtgttgaatgaggctag

SEQ ID NO: 5771979 - DNA, 25 bp, Homo sapien
tccagtgtgaactctctggtgttga

SEQ ID NO: 5771980 - DNA, 25 bp, Homo sapien
tttctccagtgtgaattatcttgtg

SEQ ID NO: 5771981 - DNA, 25 bp, Homo sapien
ggcctggcgcagctcacccgaggtg

SEQ ID NO: 5771982 - DNA, 25 bp, Homo sapien
ctgacctgacaaaaatggcaccagg

SEQ ID NO: 5771983 - DNA, 25 bp, Homo sapien
tggtgtgcacctgccaggtggtagg

SEQ ID NO: 5771984 - DNA, 25 bp, Homo sapien
ggtgttcaatgaggttagatttgta

SEQ ID NO: 5771985 - DNA, 25 bp, Homo sapien
tttcccgcactcgccacattcataa

SEQ ID NO: 5771986 - DNA, 25 bp, Homo sapien
taaaagatttgccacattcactgca

SEQ ID NO: 5771987 - DNA, 25 bp, Homo sapien
aaggttttcctacattcaccacact

SEQ ID NO: 5771988 - DNA, 25 bp, Homo sapien
aactctttggtgttgaatcaggata

SEQ ID NO: 5771989 - DNA, 25 bp, Homo sapien
acactcataaagccctccttcagaa

SEQ ID NO: 5771990 - DNA, 25 bp, Homo sapien
gcacaactcagattctctggaccac

SEQ ID NO: 5771991 - DNA, 25 bp, Homo sapien
agcactgataaggcctttctccaga

SEQ ID NO: 5771992 - DNA, 25 bp, Homo sapien
gagctctggctaaaggatttcccac

SEQ ID NO: 5771993 - DNA, 25 bp, Homo sapien
gtggaaaaattcattacaagcatca

SEQ ID NO: 5771994 - DNA, 25 bp, Homo sapien
ttctgtcccaattactgttgaacct

SEQ ID NO: 5771995 - DNA, 25 bp, Homo sapien
ggctttctcacgatcactgcattca

SEQ ID NO: 5771996 - DNA, 25 bp, Homo sapien
ttgctgctgctactgtgtggctcct

SEQ ID NO: 5771997 - DNA, 25 bp, Homo sapien
tgtgttcttgcaagtgaaggctttc

SEQ ID NO: 5771998 - DNA, 25 bp, Homo sapien
ttagagcaatacagaacaaagagct

SEQ ID NO: 5771999 - DNA, 25 bp, Homo sapien
cgccttggcctcccaaagtgttagg

SEQ ID NO: 5772000 - DNA, 25 bp, Homo sapien
taaaaacattataaattaaagcaat

SEQ ID NO: 5772001 - DNA, 25 bp, Homo sapien
gcggctaaaggatttctcacattca

SEQ ID NO: 5772002 - DNA, 25 bp, Homo sapien
ctgtgtggctcctcaccactgggag

SEQ ID NO: 5772003 - DNA, 25 bp, Homo sapien
tcgaaaaaggctagagctttgtcta

SEQ ID NO: 5772004 - DNA, 25 bp, Homo sapien
gtgtaagattaggtggcactttttg

SEQ ID NO: 5772005 - DNA, 25 bp, Homo sapien
catcatgtgagaccgacaatgttcc

SEQ ID NO: 5772006 - DNA, 25 bp, Homo sapien
ctttctcacgatcactgcattcata

SEQ ID NO: 5772007 - DNA, 25 bp, Homo sapien
ctgtatatgcttgctgctgctactg

SEQ ID NO: 5772008 - DNA, 25 bp, Homo sapien
caaagagctgtcttctgccatcaca

SEQ ID NO: 5772009 - DNA, 25 bp, Homo sapien
tttttttttggagacggagtctcac

SEQ ID NO: 5772010 - DNA, 25 bp, Homo sapien
ggccaattagagcaatacagaacaa

SEQ ID NO: 5772011 - DNA, 25 bp, Homo sapien
tgcccaggctggtcttgaactcctg

SEQ ID NO: 5772012 - DNA, 25 bp, Homo sapien
gtgaaataattcaacacatggaatc

SEQ ID NO: 5772013 - DNA, 25 bp, Homo sapien
caccttccttttccagggctcttct

SEQ ID NO: 5772014 - DNA, 25 bp, Homo sapien
acagattcccctcaccagtgctagg

SEQ ID NO: 5772015 - DNA, 25 bp, Homo sapien
tctatgcaatgaatagaacacccaa

SEQ ID NO: 5772016 - DNA, 25 bp, Homo sapien
aaagttctccagcatcacatcgcag

SEQ ID NO: 5772017 - DNA, 25 bp, Homo sapien
caagtgtgttcttgcaagtgaaggc

SEQ ID NO: 5772018 - DNA, 25 bp, Homo sapien
catttacctggagtttctgtcccaa

SEQ ID NO: 5772019 - DNA, 25 bp, Homo sapien
agcgattctcctgcctcagcctccc

SEQ ID NO: 5772020 - DNA, 25 bp, Homo sapien
ggcactttttgctaaaggattcctc

SEQ ID NO: 5772021 - DNA, 25 bp, Homo sapien
tcacattgtcccttctgagtacaga

SEQ ID NO: 5772022 - DNA, 25 bp, Homo sapien
taaatggccacatcctcaaaggtca

SEQ ID NO: 5772023 - DNA, 25 bp, Homo sapien
tccacattcactacattcataaggc

SEQ ID NO: 5772024 - DNA, 25 bp, Homo sapien
tccagtgtgacgtctctggtggtga

SEQ ID NO: 5772025 - DNA, 25 bp, Homo sapien
cactattctgcttacaagtcattct

SEQ ID NO: 5772026 - DNA, 25 bp, Homo sapien
tctctgagcactgtggggaagtgac

SEQ ID NO: 5772027 - DNA, 25 bp, Homo sapien
tattcactggaaaatttgtagatga

SEQ ID NO: 5772028 - DNA, 25 bp, Homo sapien
cctcagaaattggcagtgacataaa

SEQ ID NO: 5772029 - DNA, 25 bp, Homo sapien
ataaggtcttgtgccagtatgaatt

SEQ ID NO: 5772030 - DNA, 25 bp, Homo sapien
caagcgattctcctgcctcagcctc

SEQ ID NO: 5772031 - DNA, 25 bp, Homo sapien
gattacaccatgcccggccagacta

SEQ ID NO: 5772032 - DNA, 25 bp, Homo sapien
tgcaagtgaaggctttctcacattt

SEQ ID NO: 5772033 - DNA, 25 bp, Homo sapien
gtctaaaggatttcccacattctct

SEQ ID NO: 5772034 - DNA, 25 bp, Homo sapien
aaaatgtctttcaagactgggacac

SEQ ID NO: 5772035 - DNA, 25 bp, Homo sapien
taaatttacgaagatggctaccaca

SEQ ID NO: 5772036 - DNA, 25 bp, Homo sapien
tgaatgctgcggtgtcgaatgaggt

SEQ ID NO: 5772037 - DNA, 25 bp, Homo sapien
gatagtaaacagaagatcctgagaa

SEQ ID NO: 5772038 - DNA, 25 bp, Homo sapien
tctctggtgttgaatgaggctagca

SEQ ID NO: 5772039 - DNA, 25 bp, Homo sapien
aatccgcccgccttggcctcccaaa

SEQ ID NO: 5772040 - DNA, 25 bp, Homo sapien
tttgtggcttgaagcttttctgtat

SEQ ID NO: 5772041 - DNA, 25 bp, Homo sapien
gtgctaggaattatgtggatctcct

SEQ ID NO: 5772042 - DNA, 25 bp, Homo sapien
attcataaggcctttctccagtatg

SEQ ID NO: 5772043 - DNA, 25 bp, Homo sapien
tccccatttacctggagtttctgtc

SEQ ID NO: 5772044 - DNA, 25 bp, Homo sapien
gaaaaaggctagagctttgtctaaa

SEQ ID NO: 5772045 - DNA, 25 bp, Homo sapien
tgcttgtgctacccaagtatgactt

SEQ ID NO: 5772046 - DNA, 25 bp, Homo sapien
aatttccccaagcaaatgggagagt

SEQ ID NO: 5772047 - DNA, 25 bp, Homo sapien
ctcacgatcactgcattcataaggc

SEQ ID NO: 5772048 - DNA, 25 bp, Homo sapien
cagcgcgactgccgccattgagctc

SEQ ID NO: 5772049 - DNA, 25 bp, Homo sapien
aggtggcactttttgctaaaggatt

SEQ ID NO: 5772050 - DNA, 25 bp, Homo sapien
gtaagattaggtggcactttttgct

SEQ ID NO: 5772051 - DNA, 25 bp, Homo sapien
gagcggcggccgaccggggcgggca

SEQ ID NO: 5772052 - DNA, 25 bp, Homo sapien
gaaatgtgaaatggcttcagcctca

SEQ ID NO: 5772053 - DNA, 25 bp, Homo sapien
gaatttgctggtgctgaacaagtgt

SEQ ID NO: 5772054 - DNA, 25 bp, Homo sapien
ctcagctcactgcaacttccgcctt

SEQ ID NO: 5772055 - DNA, 25 bp, Homo sapien
ctgcactcataaggtcttgtgccag

SEQ ID NO: 5772056 - DNA, 25 bp, Homo sapien
gtaataactttttgcattgaaaaat

SEQ ID NO: 5772057 - DNA, 25 bp, Homo sapien
ccaggccacaatacaggaacacaaa

SEQ ID NO: 5772058 - DNA, 25 bp, Homo sapien
tacatgcttgggctattaataattt

SEQ ID NO: 5772059 - DNA, 25 bp, Homo sapien
cagtacaggaacctctgagactcat

SEQ ID NO: 5772060 - DNA, 25 bp, Homo sapien
cgaagatggctaccacagtctcctc

SEQ ID NO: 5772061 - DNA, 25 bp, Homo sapien
acagaagcactggggattgtcacaa

SEQ ID NO: 5772062 - DNA, 25 bp, Homo sapien
gccacatcctcaaaggtcataccct

SEQ ID NO: 5772063 - DNA, 25 bp, Homo sapien
cggggcgggcattcgaacacaacag

SEQ ID NO: 5772064 - DNA, 25 bp, Homo sapien
tataggcgcatgctgccacgcctgg

SEQ ID NO: 5772065 - DNA, 25 bp, Homo sapien
aattgtctaaaggatttcccacatt

SEQ ID NO: 5772066 - DNA, 25 bp, Homo sapien
gacttctctgtcccgtccctcagtc

SEQ ID NO: 5772067 - DNA, 25 bp, Homo sapien
acaaatggcaccagtctacactgac

SEQ ID NO: 5772068 - DNA, 25 bp, Homo sapien
aacccagggatgttacatgtgcaaa

SEQ ID NO: 5772069 - DNA, 25 bp, Homo sapien
cattcataaggtctttctccactgt

SEQ ID NO: 5772070 - DNA, 25 bp, Homo sapien
ctttgcaggacctgggcaacagatt

SEQ ID NO: 5772071 - DNA, 25 bp, Homo sapien
ttcccacatacctgaaacttatgaa

SEQ ID NO: 5772072 - DNA, 25 bp, Homo sapien
ctcttctatgtcgaatgagattgaa

SEQ ID NO: 5772073 - DNA, 25 bp, Homo sapien
aattacaatgaacctcctcagagct

SEQ ID NO: 5772074 - DNA, 25 bp, Homo sapien
agccgcaggcaaaatgtctttcaag

SEQ ID NO: 5772075 - DNA, 25 bp, Homo sapien
acattcataaggcctttctccagtg

SEQ ID NO: 5772076 - DNA, 25 bp, Homo sapien
gaatagaacacccaagattaaaggt

SEQ ID NO: 5772077 - DNA, 25 bp, Homo sapien
tttggtgctgaataaggtctgattt

SEQ ID NO: 5772078 - DNA, 25 bp, Homo sapien
cttttgtccagtgtgaatttgctgg

SEQ ID NO: 5772079 - DNA, 25 bp, Homo sapien
gaacacaacagtccctatcccgggc

SEQ ID NO: 5772080 - DNA, 25 bp, Homo sapien
gcagccggtcacaaatgtagcctca

SEQ ID NO: 5772081 - DNA, 25 bp, Homo sapien
accggggcgggcattcgaacacaac

SEQ ID NO: 5772082 - DNA, 25 bp, Homo sapien
ctattctgcttacaagtcattctat

SEQ ID NO: 5772083 - DNA, 25 bp, Homo sapien
aggctagagctctggctaaaggatt

SEQ ID NO: 5772084 - DNA, 25 bp, Homo sapien
gtctaaaggatttcccgcactcgcc

SEQ ID NO: 5772085 - DNA, 25 bp, Homo sapien
agtgcagtggtgcaatctcagctca

SEQ ID NO: 5772086 - DNA, 25 bp, Homo sapien
tggctgggactataggcgcatgctg

SEQ ID NO: 5772087 - DNA, 25 bp, Homo sapien
tcgaacacaacagtccctatcccgg

SEQ ID NO: 5772088 - DNA, 25 bp, Homo sapien
tctttctccagtgtgaactctttgg

SEQ ID NO: 5772089 - DNA, 25 bp, Homo sapien
actcataaggtcttgtgccagtatg

SEQ ID NO: 5772090 - DNA, 25 bp, Homo sapien
gtggtgtcgcagaacctctggccca

SEQ ID NO: 5772091 - DNA, 25 bp, Homo sapien
actgcaacttccgccttctgggttc

SEQ ID NO: 5772092 - DNA, 25 bp, Homo sapien
cctgaaacttatgaagaatacccca

SEQ ID NO: 5772093 - DNA, 25 bp, Homo sapien
gagtttctgtcccaattactgttga

SEQ ID NO: 5772094 - DNA, 25 bp, Homo sapien
tactgtgtggctcctcaccactggg

SEQ ID NO: 5772095 - DNA, 25 bp, Homo sapien
cccacattcactacattcataaggc

SEQ ID NO: 5772096 - DNA, 25 bp, Homo sapien
tccagtgtgaactctttggtgctga

SEQ ID NO: 5772097 - DNA, 25 bp, Homo sapien
gtcccaattactgttgaacctgtaa

SEQ ID NO: 5772098 - DNA, 25 bp, Homo sapien
aggcctcggcagattagaaattaca

SEQ ID NO: 5772099 - DNA, 25 bp, Homo sapien
tcattctccattccatggcaataac

SEQ ID NO: 5772100 - DNA, 25 bp, Homo sapien
tctccagtgtgaattatcttgtgta

SEQ ID NO: 5772101 - DNA, 25 bp, Homo sapien
ggcgcatgctgccacgcctggctaa

SEQ ID NO: 5772102 - DNA, 25 bp, Homo sapien
cccacattcactgcattcataaggc

SEQ ID NO: 5772103 - DNA, 25 bp, Homo sapien
gggtgaaatgtgaaatggcttcagc

SEQ ID NO: 5772104 - DNA, 25 bp, Homo sapien
tacgaagatggctaccacagtctcc

SEQ ID NO: 5772105 - DNA, 25 bp, Homo sapien
cgtgggggctgggaaggcctcccca

SEQ ID NO: 5772106 - DNA, 25 bp, Homo sapien
cactgacttatatgccatggcacat

SEQ ID NO: 5772107 - DNA, 25 bp, Homo sapien
aaaggatttcccacactcacagcac

SEQ ID NO: 5772108 - DNA, 25 bp, Homo sapien
caccaggccacaatacaggaacaca

SEQ ID NO: 5772109 - DNA, 25 bp, Homo sapien
gaggttagagaattgtctaaaggat

SEQ ID NO: 5772110 - DNA, 25 bp, Homo sapien
tatagtctgacaacaaatggcacca

SEQ ID NO: 5772111 - DNA, 25 bp, Homo sapien
cacatcctcaaaggtcataccctga

SEQ ID NO: 5772112 - DNA, 25 bp, Homo sapien
tagaagagtcattccatctaattta

SEQ ID NO: 5772113 - DNA, 25 bp, Homo sapien
aatttacgaagatggctaccacagt

SEQ ID NO: 5772114 - DNA, 25 bp, Homo sapien
cctgtaatttcacctccacacctat

SEQ ID NO: 5772115 - DNA, 25 bp, Homo sapien
aaggctagagctttgtctaaaggat

SEQ ID NO: 5772116 - DNA, 25 bp, Homo sapien
ctgttgaacctgtaatttcacctcc

SEQ ID NO: 5772117 - DNA, 25 bp, Homo sapien
taaaggttttcctacattcaccaca

SEQ ID NO: 5772118 - DNA, 25 bp, Homo sapien
tggtgttgaatgaggctagagctct

SEQ ID NO: 5772119 - DNA, 25 bp, Homo sapien
gctcactgcaacttccgccttctgg

SEQ ID NO: 5772120 - DNA, 25 bp, Homo sapien
caagtgtgtgtttgtggcttgaagc

SEQ ID NO: 5772121 - DNA, 25 bp, Homo sapien
gatttcccacattctctgcattcat

SEQ ID NO: 5772122 - DNA, 25 bp, Homo sapien
gtgactcatgcacatggtgtgcacc

SEQ ID NO: 5772123 - DNA, 25 bp, Homo sapien
tgaggttagatttgcggctaaagga

SEQ ID NO: 5772124 - DNA, 25 bp, Homo sapien
tgtccagtgtgaatttgctggtgct

SEQ ID NO: 5772125 - DNA, 25 bp, Homo sapien
cgaatgaggttagatttgcggctaa

SEQ ID NO: 5772126 - DNA, 25 bp, Homo sapien
ccagtgtgaactctttggtgttgaa

SEQ ID NO: 5772127 - DNA, 25 bp, Homo sapien
agcaatgtgcaccaagcagtttcca

SEQ ID NO: 5772128 - DNA, 25 bp, Homo sapien
tgaggtcagatttgcgggtaaagga

SEQ ID NO: 5772129 - DNA, 25 bp, Homo sapien
cagatttatggataaaggctttctc

SEQ ID NO: 5772130 - DNA, 25 bp, Homo sapien
tgacataaatcaggctataggcctc

SEQ ID NO: 5772131 - DNA, 25 bp, Homo sapien
gtttccaggctggtgaatcagaatg

SEQ ID NO: 5772132 - DNA, 25 bp, Homo sapien
atgcttgctgctgctactgtgtggc

SEQ ID NO: 5772133 - DNA, 25 bp, Homo sapien
acatcgcagtacaggaacctctgag

SEQ ID NO: 5772134 - DNA, 25 bp, Homo sapien
cagtttccaggctggtgaatcagaa

SEQ ID NO: 5772135 - DNA, 25 bp, Homo sapien
atgctggtgaaggtcagcactgaag

SEQ ID NO: 5772136 - DNA, 25 bp, Homo sapien
ccgtccctcagtcgcgacctccact

SEQ ID NO: 5772137 - DNA, 25 bp, Homo sapien
tgacctgtatagatacactctgctc

SEQ ID NO: 5772138 - DNA, 25 bp, Homo sapien
tgcaatctcagctcactgcaacttc

SEQ ID NO: 5772139 - DNA, 25 bp, Homo sapien
ctgataaggcctttctccagagtga

SEQ ID NO: 5772140 - DNA, 25 bp, Homo sapien
gactcatcaaggagctcccactctt

SEQ ID NO: 5772141 - DNA, 25 bp, Homo sapien
tggccacatcctcaaaggtcatacc

SEQ ID NO: 5772142 - DNA, 25 bp, Homo sapien
ccgcaggcaaaatgtctttcaagac

SEQ ID NO: 5772143 - DNA, 25 bp, Homo sapien
cctttcttcagtgtgaactctccga

SEQ ID NO: 5772144 - DNA, 25 bp, Homo sapien
ctggagtgcagtggtgcaatctcag

SEQ ID NO: 5772145 - DNA, 25 bp, Homo sapien
tgaattcagatttatggataaaggc

SEQ ID NO: 5772146 - DNA, 25 bp, Homo sapien
cctgagccgagtccctcagcgcgac

SEQ ID NO: 5772147 - DNA, 25 bp, Homo sapien
tcgaatgagattgaagatttgtcta

SEQ ID NO: 5772148 - DNA, 25 bp, Homo sapien
tcgaatgaggttagagaattgtcta

SEQ ID NO: 5772149 - DNA, 25 bp, Homo sapien
atgtggtttggtgctcagccgcagg

SEQ ID NO: 5772150 - DNA, 25 bp, Homo sapien
tgcaacttccgccttctgggttcaa

SEQ ID NO: 5772151 - DNA, 25 bp, Homo sapien
tggcccactttcgcgacttctctgt

SEQ ID NO: 5772152 - DNA, 25 bp, Homo sapien
ataaagaaatagcacattcccttca

SEQ ID NO: 5772153 - DNA, 25 bp, Homo sapien
gatttctcacattcactgcactcat

SEQ ID NO: 5772154 - DNA, 25 bp, Homo sapien
gctgtctaaaagatttgccacattc

SEQ ID NO: 5772155 - DNA, 25 bp, Homo sapien
gggcgggcattcgaacacaacagtc

SEQ ID NO: 5772156 - DNA, 25 bp, Homo sapien
aaaggatttcccacattctctgcat

SEQ ID NO: 5772157 - DNA, 25 bp, Homo sapien
ggcttcgtgttggagtaggtccgtg

SEQ ID NO: 5772158 - DNA, 25 bp, Homo sapien
cttcttgggagaaataaatggccac

SEQ ID NO: 5772159 - DNA, 25 bp, Homo sapien
caagtgaaggctttctcacatttgc

SEQ ID NO: 5772160 - DNA, 25 bp, Homo sapien
ctacattcataaggcctttctccag

SEQ ID NO: 5772161 - DNA, 25 bp, Homo sapien
ctggtgttgaatgagttccgatttg

SEQ ID NO: 5772162 - DNA, 25 bp, Homo sapien
ttgtcacaactgcctccttttcatg

SEQ ID NO: 5772163 - DNA, 25 bp, Homo sapien
cgcatgctgccacgcctggctaatt

SEQ ID NO: 5772164 - DNA, 25 bp, Homo sapien
tcccaaagtgttaggattacaccat

SEQ ID NO: 5772165 - DNA, 25 bp, Homo sapien
ctggtgttcaatgaggttagatttg

SEQ ID NO: 5772166 - DNA, 25 bp, Homo sapien
tggctaccacagtctcctccagtgc

SEQ ID NO: 5772167 - DNA, 25 bp, Homo sapien
gcactgaagcagaagcctctcatgc

SEQ ID NO: 5772168 - DNA, 25 bp, Homo sapien
ccctcagcgcgactgccgccattga

SEQ ID NO: 5772169 - DNA, 25 bp, Homo sapien
cactgcattcataaggtctttctcc

SEQ ID NO: 5772170 - DNA, 25 bp, Homo sapien
aatgggagagtacagaggtttgctt

SEQ ID NO: 5772171 - DNA, 25 bp, Homo sapien
tcttgtgccagtatgaattctccgg

SEQ ID NO: 5772172 - DNA, 25 bp, Homo sapien
tgggttcaagcgattctcctgcctc

SEQ ID NO: 5772173 - DNA, 25 bp, Homo sapien
gaggccttgggcagcaggccaatta

SEQ ID NO: 5772174 - DNA, 25 bp, Homo sapien
ggactataggcgcatgctgccacgc

SEQ ID NO: 5772175 - DNA, 25 bp, Homo sapien
taatccttagaaagctgacagcaca

SEQ ID NO: 5772176 - DNA, 25 bp, Homo sapien
tggacaactgaacaaaattcacgtt

SEQ ID NO: 5772177 - DNA, 25 bp, Homo sapien
cacgcctggctaattttttgtattt

SEQ ID NO: 5772178 - DNA, 25 bp, Homo sapien
ctcaaagtttaaatttacgaagatg

SEQ ID NO: 5772179 - DNA, 25 bp, Homo sapien
cccttcacatttaaggcctttcttc

SEQ ID NO: 5772180 - DNA, 25 bp, Homo sapien
tgaggctagagctctggctaaagga

SEQ ID NO: 5772181 - DNA, 25 bp, Homo sapien
agtggctgggactataggcgcatgc

SEQ ID NO: 5772182 - DNA, 25 bp, Homo sapien
aacctcctcagagcttcccacatac

SEQ ID NO: 5772183 - DNA, 25 bp, Homo sapien
gaatgaggttagagaattgtctaaa

SEQ ID NO: 5772184 - DNA, 25 bp, Homo sapien
catcacattgtcccttctgagtaca

SEQ ID NO: 5772185 - DNA, 25 bp, Homo sapien
tgtgaatgctgcggtgtcgaatgag

SEQ ID NO: 5772186 - DNA, 25 bp, Homo sapien
aaagactttccacattcactacatt

SEQ ID NO: 5772187 - DNA, 25 bp, Homo sapien
agcctggcagtctttactttgaggc

SEQ ID NO: 5772188 - DNA, 25 bp, Homo sapien
atgacttttgcacaggggatgtggt

SEQ ID NO: 5772189 - DNA, 25 bp, Homo sapien
cccctcaccagtgctaggaattatg

SEQ ID NO: 5772190 - DNA, 25 bp, Homo sapien
atgtggaaaaattcattacaagcat

SEQ ID NO: 5772191 - DNA, 25 bp, Homo sapien
ttaaagcaatgtgcaccaagcagtt

SEQ ID NO: 5772192 - DNA, 25 bp, Homo sapien
gctaaaggattcctcacattcacta

SEQ ID NO: 5772193 - DNA, 25 bp, Homo sapien
ggaccacaactgggtcaggtgtata

SEQ ID NO: 5772194 - DNA, 25 bp, Homo sapien
tcctgagctcaggcaatccgcccgc

SEQ ID NO: 5772195 - DNA, 25 bp, Homo sapien
tgggggctgggaaggcctccccaca

SEQ ID NO: 5772196 - DNA, 25 bp, Homo sapien
atggtgacctctgacctgacaaaaa

SEQ ID NO: 5772197 - DNA, 25 bp, Homo sapien
tggtgaaggtcagcactgaagcaga

SEQ ID NO: 5772198 - DNA, 25 bp, Homo sapien
ttcaccacactcatgacgcactcct

SEQ ID NO: 5772199 - DNA, 25 bp, Homo sapien
tgcttttgatgctggtgaaggtcag

SEQ ID NO: 5772200 - DNA, 25 bp, Homo sapien
tgttcaatgaggttagatttgtagc

SEQ ID NO: 5772201 - DNA, 25 bp, Homo sapien
cctctggcccactttcgcgacttct

SEQ ID NO: 5772202 - DNA, 25 bp, Homo sapien
ccagtgtgaatgctgcggtgtcgaa

SEQ ID NO: 5772203 - DNA, 25 bp, Homo sapien
actgcctccttttcatggtgacctc

SEQ ID NO: 5772204 - DNA, 25 bp, Homo sapien
ttgggagaaataaatggccacatcc

SEQ ID NO: 5772205 - DNA, 25 bp, Homo sapien
ccatggcaataacccagggatgtta

SEQ ID NO: 5772206 - DNA, 25 bp, Homo sapien
tgcttacaagtcattctatgcaatg

SEQ ID NO: 5772207 - DNA, 25 bp, Homo sapien
aattatgtggatctcctgtggacaa

SEQ ID NO: 5772208 - DNA, 25 bp, Homo sapien
ctttggtgttgaatcaggataaatt

SEQ ID NO: 5772209 - DNA, 25 bp, Homo sapien
gtgagttttctgggtgggtgtattg

SEQ ID NO: 5772210 - DNA, 25 bp, Homo sapien
agcttttctgtattcaccccacttg

SEQ ID NO: 5772211 - DNA, 25 bp, Homo sapien
ccacaatcactgcactgataaggca

SEQ ID NO: 5772212 - DNA, 25 bp, Homo sapien
caacaaatggcaccagtctacactg

SEQ ID NO: 5772213 - DNA, 25 bp, Homo sapien
agtgtgaactcttctatgtcgaatg

SEQ ID NO: 5772214 - DNA, 25 bp, Homo sapien
caatgtgcaccaagcagtttccagg

SEQ ID NO: 5772215 - DNA, 25 bp, Homo sapien
gactgcactcataaggtctttctcc

SEQ ID NO: 5772216 - DNA, 25 bp, Homo sapien
aggtgagttttctgggtgggtgtat

SEQ ID NO: 5772217 - DNA, 25 bp, Homo sapien
tttcccacaatcactgcactgataa

SEQ ID NO: 5772218 - DNA, 25 bp, Homo sapien
tatcttgtgtaagattaggtggcac

SEQ ID NO: 5772219 - DNA, 25 bp, Homo sapien
gatgaacttttagaagagtcattcc

SEQ ID NO: 5772220 - DNA, 25 bp, Homo sapien
gggacacacatcttaatctcactga

SEQ ID NO: 5772221 - DNA, 25 bp, Homo sapien
agtgtgaatgctgcggtgtcgaatg

SEQ ID NO: 5772222 - DNA, 25 bp, Homo sapien
cactgcattcataaggcctttctcc

SEQ ID NO: 5772223 - DNA, 25 bp, Homo sapien
tcataaggtctttctccagtgtgaa

SEQ ID NO: 5772224 - DNA, 25 bp, Homo sapien
aataaatggccacatcctcaaaggt

SEQ ID NO: 5772225 - DNA, 25 bp, Homo sapien
ttctcacatttgctacactcataaa

SEQ ID NO: 5772226 - DNA, 25 bp, Homo sapien
gtatactctaaagtcagagaaaaga

SEQ ID NO: 5772227 - DNA, 25 bp, Homo sapien
tcttcagtgtgaactctccgatgtc

SEQ ID NO: 5772228 - DNA, 25 bp, Homo sapien
tggcttgaagcttttctgtattcac

SEQ ID NO: 5772229 - DNA, 25 bp, Homo sapien
ctgccgccattgagctccgtggact

SEQ ID NO: 5772230 - DNA, 25 bp, Homo sapien
cagtgtgaattatcttgtgtaagat

SEQ ID NO: 5772231 - DNA, 25 bp, Homo sapien
ctcctcaccactgggagtggcttcg

SEQ ID NO: 5772232 - DNA, 25 bp, Homo sapien
aatgaacctcctcagagcttcccac

SEQ ID NO: 5772233 - DNA, 25 bp, Homo sapien
gccgaccggggcgggcattcgaaca

SEQ ID NO: 5772234 - DNA, 25 bp, Homo sapien
tcctttgcaggacctgggcaacaga

SEQ ID NO: 5772235 - DNA, 25 bp, Homo sapien
tagtaaacagaagatcctgagaatt

SEQ ID NO: 5772236 - DNA, 25 bp, Homo sapien
gaattatcttgtgtaagattaggtg

SEQ ID NO: 5772237 - DNA, 25 bp, Homo sapien
gggagaaataaatggccacatcctc

SEQ ID NO: 5772238 - DNA, 25 bp, Homo sapien
tcaaacatcttttgtccagtgtgaa

SEQ ID NO: 5772239 - DNA, 25 bp, Homo sapien
gagacggagtctcactctgttgcct

SEQ ID NO: 5772240 - DNA, 25 bp, Homo sapien
ggtgttgaatcaggataaatttgcg

SEQ ID NO: 5772241 - DNA, 25 bp, Homo sapien
cacaatacaggaacacaaagcctgg

SEQ ID NO: 5772242 - DNA, 25 bp, Homo sapien
ttcagatttatggataaaggctttc

SEQ ID NO: 5772243 - DNA, 25 bp, Homo sapien
aaggtaatccttagaaagctgacag

SEQ ID NO: 5772244 - DNA, 25 bp, Homo sapien
tttcccacactcacagcactgataa

SEQ ID NO: 5772245 - DNA, 25 bp, Homo sapien
tgcacatggtgtgcacctgccaggt

SEQ ID NO: 5772246 - DNA, 25 bp, Homo sapien
accatattcactggaaaatttgtag

SEQ ID NO: 5772247 - DNA, 25 bp, Homo sapien
aaggagctcccactcttcttgggag

SEQ ID NO: 5772248 - DNA, 25 bp, Homo sapien
tgggactataggcgcatgctgccac

SEQ ID NO: 5772249 - DNA, 25 bp, Homo sapien
attcaccccttcatgctgacatcac

SEQ ID NO: 5772250 - DNA, 25 bp, Homo sapien
agccctccttcagaacagacactct

SEQ ID NO: 5772251 - DNA, 25 bp, Homo sapien
aaggatttcccacattcactacatt

SEQ ID NO: 5772252 - DNA, 25 bp, Homo sapien
attataaattaaagcaatgtgcacc

SEQ ID NO: 5772253 - DNA, 25 bp, Homo sapien
agattcccctcaccagtgctaggaa

SEQ ID NO: 5772254 - DNA, 25 bp, Homo sapien
cttttgcacaggggatgtggtttgg

SEQ ID NO: 5772255 - DNA, 25 bp, Homo sapien
atggcttcagcctcagaaattggca

SEQ ID NO: 5772256 - DNA, 25 bp, Homo sapien
tgaaatggcttcagcctcagaaatt

SEQ ID NO: 5772257 - DNA, 25 bp, Homo sapien
gatttgtagctaaaggttttcctac

SEQ ID NO: 5772258 - DNA, 25 bp, Homo sapien
gcagctaaaagatttcccacaatca

SEQ ID NO: 5772259 - DNA, 25 bp, Homo sapien
aatgcttttgatgctggtgaaggtc

SEQ ID NO: 5772260 - DNA, 25 bp, Homo sapien
tcaacacatggaatctgcagccggt

SEQ ID NO: 5772261 - DNA, 25 bp, Homo sapien
gttgcccaggctggtcttgaactcc

SEQ ID NO: 5772262 - DNA, 25 bp, Homo sapien
tttaaatttacgaagatggctacca

SEQ ID NO: 5772263 - DNA, 25 bp, Homo sapien
tcctgagaatttctgtatgcactga

SEQ ID NO: 5772264 - DNA, 25 bp, Homo sapien
atcgcagtacaggaacctctgagac

SEQ ID NO: 5772265 - DNA, 25 bp, Homo sapien
tcataaggcctttctccagtgtgaa

SEQ ID NO: 5772266 - DNA, 25 bp, Homo sapien
ggcctcccaaagtgttaggattaca

SEQ ID NO: 5772267 - DNA, 25 bp, Homo sapien
taaaggatttcccacattcactaca

SEQ ID NO: 5772268 - DNA, 25 bp, Homo sapien
ctgccacgcctggctaattttttgt

SEQ ID NO: 5772269 - DNA, 25 bp, Homo sapien
tccttttccagggctcttcttcatt

SEQ ID NO: 5772270 - DNA, 25 bp, Homo sapien
attgagctccgtggactaggcgggg

SEQ ID NO: 5772271 - DNA, 25 bp, Homo sapien
gccagagcgctgtctaaaagatttg

SEQ ID NO: 5772272 - DNA, 25 bp, Homo sapien
agctgacagcacaactcagattctc

SEQ ID NO: 5772273 - DNA, 25 bp, Homo sapien
tcactgaggtgagttttctgggtgg

SEQ ID NO: 5772274 - DNA, 25 bp, Homo sapien
taaaagactttccacattcactaca

SEQ ID NO: 5772275 - DNA, 25 bp, Homo sapien
ccaagtatgacttttgcacagggga

SEQ ID NO: 5772276 - DNA, 25 bp, Homo sapien
gcccttagaagtcctgacctgtata

SEQ ID NO: 5772277 - DNA, 25 bp, Homo sapien
tcactgcactcataaggcctatcac

SEQ ID NO: 5772278 - DNA, 25 bp, Homo sapien
tatgtcgaatgagattgaagatttg

SEQ ID NO: 5772279 - DNA, 25 bp, Homo sapien
gtgttgaatgaggtcagatttgcgg

SEQ ID NO: 5772280 - DNA, 25 bp, Homo sapien
gttcacagaagcactggggattgtc

SEQ ID NO: 5772281 - DNA, 25 bp, Homo sapien
aaaggatttctcacattcactgcac

SEQ ID NO: 5772282 - DNA, 25 bp, Homo sapien
tcttaatctcactgaggtgagtttt

SEQ ID NO: 5772283 - DNA, 25 bp, Homo sapien
tgtcgaaaaaggctagagctttgtc

SEQ ID NO: 5772284 - DNA, 25 bp, Homo sapien
atctcagcgatagtaaacagaagat

SEQ ID NO: 5772285 - DNA, 25 bp, Homo sapien
atcaggctataggcctcggcagatt

SEQ ID NO: 5772286 - DNA, 25 bp, Homo sapien
gaggtttgcttctctgagcactgtg

SEQ ID NO: 5772287 - DNA, 25 bp, Homo sapien
ctctggtgttcaatgaggttagatt

SEQ ID NO: 5772288 - DNA, 25 bp, Homo sapien
ggtgtcgaatgaggttagagaattg

SEQ ID NO: 5772289 - DNA, 25 bp, Homo sapien
actctccgatgtcgaatgaggttag

SEQ ID NO: 5772290 - DNA, 25 bp, Homo sapien
agaaattggcagtgacataaatcag

SEQ ID NO: 5772291 - DNA, 25 bp, Homo sapien
catttgctacactcataaagccctc

SEQ ID NO: 5772292 - DNA, 25 bp, Homo sapien
ctgggaaggcctccccacaggtgaa

SEQ ID NO: 5772293 - DNA, 25 bp, Homo sapien
cttctatgtcgaatgagattgaaga

SEQ ID NO: 5772294 - DNA, 25 bp, Homo sapien
ctgtatagatacactctgctcagaa

SEQ ID NO: 5772295 - DNA, 25 bp, Homo sapien
gtatatgcttgctgctgctactgtg

SEQ ID NO: 5772296 - DNA, 25 bp, Homo sapien
ctataggcctcggcagattagaaat

SEQ ID NO: 5772297 - DNA, 25 bp, Homo sapien
ctgcagccggtcacaaatgtagcct

SEQ ID NO: 5772298 - DNA, 25 bp, Homo sapien
tacaagtcattctatgcaatgaata

SEQ ID NO: 5772299 - DNA, 25 bp, Homo sapien
cccaagcaaatgggagagtacagag

SEQ ID NO: 5772300 - DNA, 25 bp, Homo sapien
attctcctgcctcagcctcccaagt

SEQ ID NO: 5772301 - DNA, 25 bp, Homo sapien
ccccacaggtgaaataattcaacac

SEQ ID NO: 5772302 - DNA, 25 bp, Homo sapien
tatactgaataaagaaatagcacat

SEQ ID NO: 5772303 - DNA, 25 bp, Homo sapien
tgtgaactctttggtgttgaatcag

SEQ ID NO: 5772304 - DNA, 25 bp, Homo sapien
cattcactacattcataaggccttt

SEQ ID NO: 5772305 - DNA, 25 bp, Homo sapien
tagatgaacttttagaagagtcatt

SEQ ID NO: 5772306 - DNA, 25 bp, Homo sapien
cactgggagtggcttcgtgttggag

SEQ ID NO: 5772307 - DNA, 25 bp, Homo sapien
ctgtggggaagtgactcatgcacat

SEQ ID NO: 5772308 - DNA, 25 bp, Homo sapien
caataacccagggatgttacatgtg

SEQ ID NO: 5772309 - DNA, 25 bp, Homo sapien
taaaggattcctcacattcactaca

SEQ ID NO: 5772310 - DNA, 25 bp, Homo sapien
ttcccctcaccagtgctaggaatta

SEQ ID NO: 5772311 - DNA, 25 bp, Homo sapien
cctggcagtctttactttgaggcct

SEQ ID NO: 5772312 - DNA, 25 bp, Homo sapien
cccactcttcttgggagaaataaat

SEQ ID NO: 5772313 - DNA, 25 bp, Homo sapien
tttctgggtgggtgtattgccctta

SEQ ID NO: 5772314 - DNA, 25 bp, Homo sapien
tctctgtcccgtccctcagtcgcga

SEQ ID NO: 5772315 - DNA, 25 bp, Homo sapien
gtcagatttgcgggtaaaggatttt

SEQ ID NO: 5772316 - DNA, 25 bp, Homo sapien
gtgaactctccgatgtcgaatgagg

SEQ ID NO: 5772317 - DNA, 25 bp, Homo sapien
tgctattatactgaataaagaaata

SEQ ID NO: 5772318 - DNA, 25 bp, Homo sapien
tgctgcggtgtcgaatgaggttaga

SEQ ID NO: 5772319 - DNA, 25 bp, Homo sapien
ttgcaggacctgggcaacagattcc

SEQ ID NO: 5772320 - DNA, 25 bp, Homo sapien
tgaggccagagcgctgtctaaaaga

SEQ ID NO: 5772321 - DNA, 25 bp, Homo sapien
tggcagtctttactttgaggccttg

SEQ ID NO: 5772322 - DNA, 25 bp, Homo sapien
atgaattctccggtgttgaatgagg

SEQ ID NO: 5772323 - DNA, 25 bp, Homo sapien
tctacactgacttatatgccatggc

SEQ ID NO: 5772324 - DNA, 25 bp, Homo sapien
aatgctgcggtgtcgaatgaggtta

SEQ ID NO: 5772325 - DNA, 25 bp, Homo sapien
tcataaggcctttctccagtatgaa

SEQ ID NO: 5772326 - DNA, 25 bp, Homo sapien
cctcccaaagtgttaggattacacc

SEQ ID NO: 5772327 - DNA, 25 bp, Homo sapien
tccgatgtcgaatgaggttagattt

SEQ ID NO: 5772328 - DNA, 25 bp, Homo sapien
tctccagtgtgacctctctggtgtt

SEQ ID NO: 5772329 - DNA, 25 bp, Homo sapien
gaactcctgagctcaggcaatccgc

SEQ ID NO: 5772330 - DNA, 25 bp, Homo sapien
tgtctaaaagatttgccacattcac

SEQ ID NO: 5772331 - DNA, 25 bp, Homo sapien
tggataaaggctttctcacgatcac

SEQ ID NO: 5772332 - DNA, 25 bp, Homo sapien
cttcatgctgacatcactattctgc

SEQ ID NO: 5772333 - DNA, 25 bp, Homo sapien
tgaggctagcactttggctaaaaga

SEQ ID NO: 5772334 - DNA, 25 bp, Homo sapien
tcataaggtcttgtgccagtatgaa

SEQ ID NO: 5772335 - DNA, 25 bp, Homo sapien
caatacagaacaaagagctgtcttc

SEQ ID NO: 5772336 - DNA, 25 bp, Homo sapien
aaaaggctagagctttgtctaaagg

SEQ ID NO: 5772337 - DNA, 25 bp, Homo sapien
cggagtctcactctgttgcctgggc

SEQ ID NO: 5772338 - DNA, 25 bp, Homo sapien
acattcataaggcctttctccagta

SEQ ID NO: 5772339 - DNA, 25 bp, Homo sapien
aactttttgcattgaaaaatgcctg

SEQ ID NO: 5772340 - DNA, 25 bp, Homo sapien
attagaaattacaatgaacctcctc

SEQ ID NO: 5772341 - DNA, 25 bp, Homo sapien
cgcctcattctccattccatggcaa

SEQ ID NO: 5772342 - DNA, 25 bp, Homo sapien
cattcactgcattcataaggtcttt

SEQ ID NO: 5772343 - DNA, 25 bp, Homo sapien
tctccagtgtgaactctctggtgtt

SEQ ID NO: 5772344 - DNA, 25 bp, Homo sapien
atcactattctgcttacaagtcatt

SEQ ID NO: 5772345 - DNA, 25 bp, Homo sapien
taatttactgcagtcttctccactc

SEQ ID NO: 5772346 - DNA, 25 bp, Homo sapien
gataaggcctttctccagagtgaac

SEQ ID NO: 5772347 - DNA, 25 bp, Homo sapien
ggctggtcttgaactcctgagctca

SEQ ID NO: 5772348 - DNA, 25 bp, Homo sapien
gaaggtcagcactgaagcagaagcc

SEQ ID NO: 5772349 - DNA, 25 bp, Homo sapien
cacatacctgaaacttatgaagaat

SEQ ID NO: 5772350 - DNA, 25 bp, Homo sapien
ctctctggtgtcgaaaaaggctaga

SEQ ID NO: 5772351 - DNA, 25 bp, Homo sapien
aacctctggcccactttcgcgactt

SEQ ID NO: 5772352 - DNA, 25 bp, Homo sapien
agaataccccactgtgggtgctcaa

SEQ ID NO: 5772353 - DNA, 25 bp, Homo sapien
gacgtctctggtggtgaatgaattc

SEQ ID NO: 5772354 - DNA, 25 bp, Homo sapien
gcgacttctctgtcccgtccctcag

SEQ ID NO: 5772355 - DNA, 25 bp, Homo sapien
ttacaatgaacctcctcagagcttc

SEQ ID NO: 5772356 - DNA, 25 bp, Homo sapien
aacaaaattcacgttcacagaagca

SEQ ID NO: 5772357 - DNA, 25 bp, Homo sapien
gactgggacacacatcttaatctca

SEQ ID NO: 5772358 - DNA, 25 bp, Homo sapien
tcaaggagctcccactcttcttggg

SEQ ID NO: 5772359 - DNA, 25 bp, Homo sapien
cattgtaatgcttttgatgctggtg

SEQ ID NO: 5772360 - DNA, 25 bp, Homo sapien
aaatgcctgtatatgcttgctgctg

SEQ ID NO: 5772361 - DNA, 25 bp, Homo sapien
agaattgtctaaaggatttcccaca

SEQ ID NO: 5772362 - DNA, 25 bp, Homo sapien
gctcagccgcaggcaaaatgtcttt

SEQ ID NO: 5772363 - DNA, 25 bp, Homo sapien
ggtcttgtgccagtatgaattctcc

SEQ ID NO: 5772364 - DNA, 25 bp, Homo sapien
ttcaagcgattctcctgcctcagcc

SEQ ID NO: 5772365 - DNA, 25 bp, Homo sapien
ggatctcctgtggacaactgaacaa

SEQ ID NO: 5772366 - DNA, 25 bp, Homo sapien
tactgaataaagaaatagcacattc

SEQ ID NO: 5772367 - DNA, 25 bp, Homo sapien
cccaattactgttgaacctgtaatt

SEQ ID NO: 5772368 - DNA, 25 bp, Homo sapien
atttcccacattcactacattcata

SEQ ID NO: 5772369 - DNA, 25 bp, Homo sapien
agtgctattatactgaataaagaaa

SEQ ID NO: 5772370 - DNA, 25 bp, Homo sapien
ccttctgagtacagaaagtttgaga

SEQ ID NO: 5772371 - DNA, 25 bp, Homo sapien
gtgcaccaagcagtttccaggctgg

SEQ ID NO: 5772372 - DNA, 25 bp, Homo sapien
ttcactgcattcataaggcctttct

SEQ ID NO: 5772373 - DNA, 25 bp, Homo sapien
aaaaatggcaccaggccacaataca

SEQ ID NO: 5772374 - DNA, 25 bp, Homo sapien
cagcacaactcagattctctggacc

SEQ ID NO: 5772375 - DNA, 25 bp, Homo sapien
gtgtgaatttgctggtgctgaacaa

SEQ ID NO: 5772376 - DNA, 25 bp, Homo sapien
tgagctccgtggactaggcggggag

SEQ ID NO: 5772377 - DNA, 25 bp, Homo sapien
cttttccagggctcttcttcattgt

SEQ ID NO: 5772378 - DNA, 25 bp, Homo sapien
cctttctccagtgtgaactctttgg

SEQ ID NO: 5772379 - DNA, 25 bp, Homo sapien
ggatttcccacattcactacattca

SEQ ID NO: 5772380 - DNA, 25 bp, Homo sapien
tatatgccatggcacatggctcctt

SEQ ID NO: 5772381 - DNA, 25 bp, Homo sapien
tttgctacactcataaagccctcct

SEQ ID NO: 5772382 - DNA, 25 bp, Homo sapien
ctcacatttgctacactcataaagc

SEQ ID NO: 5772383 - DNA, 25 bp, Homo sapien
aggggtgaaatgtgaaatggcttca

SEQ ID NO: 5772384 - DNA, 25 bp, Homo sapien
agcagtttccaggctggtgaatcag

SEQ ID NO: 5772385 - DNA, 25 bp, Homo sapien
aagcctctcatgcttgtgctaccca

SEQ ID NO: 5772386 - DNA, 25 bp, Homo sapien
ggtgttgaatgagttccgatttgca

SEQ ID NO: 5772387 - DNA, 25 bp, Homo sapien
gagctcaggcaatccgcccgccttg

SEQ ID NO: 5772388 - DNA, 25 bp, Homo sapien
gttagatttgtagctaaaggttttc

SEQ ID NO: 5772389 - DNA, 25 bp, Homo sapien
ccattgagctccgtggactaggcgg

SEQ ID NO: 5772390 - DNA, 25 bp, Homo sapien
catggctcctttgcaggacctgggc

SEQ ID NO: 5772391 - DNA, 25 bp, Homo sapien
taatttcacctccacacctatagtc

SEQ ID NO: 5772392 - DNA, 25 bp, Homo sapien
gcggtgtcgaatgaggttagagaat

SEQ ID NO: 5772393 - DNA, 25 bp, Homo sapien
tctcactgaggtgagttttctgggt

SEQ ID NO: 5772394 - DNA, 25 bp, Homo sapien
atagaacacccaagattaaaggtgc

SEQ ID NO: 5772395 - DNA, 25 bp, Homo sapien
cctcattctccattccatggcaata

SEQ ID NO: 5772396 - DNA, 25 bp, Homo sapien
agacactctgatgctgaacaagtgt

SEQ ID NO: 5772397 - DNA, 25 bp, Homo sapien
acctctgacctgacaaaaatggcac

SEQ ID NO: 5772398 - DNA, 25 bp, Homo sapien
tgtgaattctctggtgttgaatgag

SEQ ID NO: 5772399 - DNA, 25 bp, Homo sapien
actgcactcataaggcctatcacca

SEQ ID NO: 5772400 - DNA, 25 bp, Homo sapien
ttgctaaaggattcctcacattcac

SEQ ID NO: 5772401 - DNA, 25 bp, Homo sapien
actctgctcagaagctatcgcctca

SEQ ID NO: 5772402 - DNA, 25 bp, Homo sapien
aaaaattcattacaagcatcatgtg

SEQ ID NO: 5772403 - DNA, 25 bp, Homo sapien
cagcctcccaagtggctgggactat

SEQ ID NO: 5772404 - DNA, 25 bp, Homo sapien
agcactgtggggaagtgactcatgc

SEQ ID NO: 5772405 - DNA, 25 bp, Homo sapien
gtgctgaatgaggccagagcgctgt

SEQ ID NO: 5772406 - DNA, 25 bp, Homo sapien
ctccccacaggtgaaataattcaac

SEQ ID NO: 5772407 - DNA, 25 bp, Homo sapien
ctattttctgataatgatctcagcg

SEQ ID NO: 5772408 - DNA, 25 bp, Homo sapien
tgaactctctggtgtcgaaaaaggc

SEQ ID NO: 5772409 - DNA, 25 bp, Homo sapien
gctactgtgtggctcctcaccactg

SEQ ID NO: 5772410 - DNA, 25 bp, Homo sapien
cgccattgagctccgtggactaggc

SEQ ID NO: 5772411 - DNA, 25 bp, Homo sapien
ttagaagtcctgacctgtatagata

SEQ ID NO: 5772412 - DNA, 25 bp, Homo sapien
aagggtttcccacattgactgcact

SEQ ID NO: 5772413 - DNA, 25 bp, Homo sapien
ggtgggtgtattgcccttagaagtc

SEQ ID NO: 5772414 - DNA, 25 bp, Homo sapien
cctatagtctgacaacaaatggcac

SEQ ID NO: 5772415 - DNA, 25 bp, Homo sapien
tgtgaactcttctatgtcgaatgag

SEQ ID NO: 5772416 - DNA, 25 bp, Homo sapien
cactgcactcataaggtcttgtgcc

SEQ ID NO: 5772417 - DNA, 25 bp, Homo sapien
tcttgaactcctgagctcaggcaat

SEQ ID NO: 5772418 - DNA, 25 bp, Homo sapien
tctggtgttgaatgaggctagcact

SEQ ID NO: 5772419 - DNA, 25 bp, Homo sapien
aacacatggaatctgcagccggtca

SEQ ID NO: 5772420 - DNA, 25 bp, Homo sapien
ctaaaggatttcccacattctctgc

SEQ ID NO: 5772421 - DNA, 25 bp, Homo sapien
agatttgtctaaaggatttcccaca

SEQ ID NO: 5772422 - DNA, 25 bp, Homo sapien
gctgctgctactgtgtggctcctca

SEQ ID NO: 5772423 - DNA, 25 bp, Homo sapien
ggtctttctccagtgtgacctctct

SEQ ID NO: 5772424 - DNA, 25 bp, Homo sapien
tgtgaactctctggtgttcaatgag

SEQ ID NO: 5772425 - DNA, 25 bp, Homo sapien
caagcaaatgggagagtacagaggt

SEQ ID NO: 5772426 - DNA, 25 bp, Homo sapien
tgtcttctgccatcacattgtccct

SEQ ID NO: 5772427 - DNA, 25 bp, Homo sapien
ctctgacctgacaaaaatggcacca

SEQ ID NO: 5772428 - DNA, 25 bp, Homo sapien
attggcagtgacataaatcaggcta

SEQ ID NO: 5772429 - DNA, 25 bp, Homo sapien
tggtgaatcagaatgtggaaaaatt

SEQ ID NO: 5772430 - DNA, 25 bp, Homo sapien
atgagttccgatttgcagctaaaag

SEQ ID NO: 5772431 - DNA, 25 bp, Homo sapien
caagcatcatgtgagaccgacaatg

SEQ ID NO: 5772432 - DNA, 25 bp, Homo sapien
aagactgggacacacatcttaatct

SEQ ID NO: 5772433 - DNA, 25 bp, Homo sapien
gaataaagaaatagcacattccctt

SEQ ID NO: 5772434 - DNA, 25 bp, Homo sapien
agagtgaactctctggtgtcgaaaa

SEQ ID NO: 5772435 - DNA, 25 bp, Homo sapien
gtgtgaattatcttgtgtaagatta

SEQ ID NO: 5772436 - DNA, 25 bp, Homo sapien
ggcctttctccagtgtgaactctct

SEQ ID NO: 5772437 - DNA, 25 bp, Homo sapien
caaatgggagagtacagaggtttgc

SEQ ID NO: 5772438 - DNA, 25 bp, Homo sapien
catctaatttactgcagtcttctcc

SEQ ID NO: 5772439 - DNA, 25 bp, Homo sapien
actttccacattcactacattcata

SEQ ID NO: 5772440 - DNA, 25 bp, Homo sapien
catgcttgggctattaataatttcc

SEQ ID NO: 5772441 - DNA, 25 bp, Homo sapien
tccgcccgccttggcctcccaaagt

SEQ ID NO: 5772442 - DNA, 25 bp, Homo sapien
agcaggccaattagagcaatacaga

SEQ ID NO: 5772443 - DNA, 25 bp, Homo sapien
agactttccacattcactacattca

SEQ ID NO: 5772444 - DNA, 25 bp, Homo sapien
tcattctatgcaatgaatagaacac

SEQ ID NO: 5772445 - DNA, 25 bp, Homo sapien
atcactgcattcataaggcctttct

SEQ ID NO: 5772446 - DNA, 25 bp, Homo sapien
cccacattgactgcactcataaggt

SEQ ID NO: 5772447 - DNA, 25 bp, Homo sapien
accaagcagtttccaggctggtgaa

SEQ ID NO: 5772448 - DNA, 25 bp, Homo sapien
cactgtggggaagtgactcatgcac

SEQ ID NO: 5772449 - DNA, 25 bp, Homo sapien
ccacattctctgcattcataaggtc

SEQ ID NO: 5772450 - DNA, 25 bp, Homo sapien
ctttgtctaaaggatttcccgcact

SEQ ID NO: 5772451 - DNA, 25 bp, Homo sapien
cttctctgtcccgtccctcagtcgc

SEQ ID NO: 5772452 - DNA, 25 bp, Homo sapien
caggccaattagagcaatacagaac

SEQ ID NO: 5772453 - DNA, 25 bp, Homo sapien
gtctaaaggatttcccacactcaca

SEQ ID NO: 5772454 - DNA, 25 bp, Homo sapien
gggcattcgaacacaacagtcccta

SEQ ID NO: 5772455 - DNA, 25 bp, Homo sapien
ggcctttctccagtgtgaattatct

SEQ ID NO: 5772456 - DNA, 25 bp, Homo sapien
cactgataaggcctttctccagagt

SEQ ID NO: 5772457 - DNA, 25 bp, Homo sapien
aaaagatttcccacaatcactgcac

SEQ ID NO: 5772458 - DNA, 25 bp, Homo sapien
aggtggtgtcgcagaacctctggcc

SEQ ID NO: 5772459 - DNA, 25 bp, Homo sapien
ttgtaatgcttttgatgctggtgaa

SEQ ID NO: 5772460 - DNA, 25 bp, Homo sapien
gactcatgcacatggtgtgcacctg

SEQ ID NO: 5772461 - DNA, 25 bp, Homo sapien
agcaatacagaacaaagagctgtct

SEQ ID NO: 5772462 - DNA, 25 bp, Homo sapien
aataccccactgtgggtgctcaaag

SEQ ID NO: 5772463 - DNA, 25 bp, Homo sapien
gttggagtaggtccgtgggggctgg

SEQ ID NO: 5772464 - DNA, 25 bp, Homo sapien
gcctgtatatgcttgctgctgctac

SEQ ID NO: 5772465 - DNA, 25 bp, Homo sapien
ggctttctcacatttgctacactca

SEQ ID NO: 5772466 - DNA, 25 bp, Homo sapien
ttcattgtaatgcttttgatgctgg

SEQ ID NO: 5772467 - DNA, 25 bp, Homo sapien
tgtgctacccaagtatgacttttgc

SEQ ID NO: 5772468 - DNA, 25 bp, Homo sapien
gccaggtggtaggggtgaaatgtga

SEQ ID NO: 5772469 - DNA, 25 bp, Homo sapien
ctacactcaaacatcttttgtccag

SEQ ID NO: 5772470 - DNA, 25 bp, Homo sapien
tactgttgaacctgtaatttcacct

SEQ ID NO: 5772471 - DNA, 25 bp, Homo sapien
accacaactgggtcaggtgtatact

SEQ ID NO: 5772472 - DNA, 25 bp, Homo sapien
ggattcctcacattcactacactca

SEQ ID NO: 5772473 - DNA, 25 bp, Homo sapien
cttgcaagtgaaggctttctcacat

SEQ ID NO: 5772474 - DNA, 25 bp, Homo sapien
gaatttctgtatgcactgatcctac

SEQ ID NO: 5772475 - DNA, 25 bp, Homo sapien
tgccatggcacatggctcctttgca

SEQ ID NO: 5772476 - DNA, 25 bp, Homo sapien
gtatgacttttgcacaggggatgtg

SEQ ID NO: 5772477 - DNA, 25 bp, Homo sapien
tttgatgctggtgaaggtcagcact

SEQ ID NO: 5772478 - DNA, 25 bp, Homo sapien
tttgagatctccacaaaatctattc

SEQ ID NO: 5772479 - DNA, 25 bp, Homo sapien
tccggtgttgaatgaggtcagattt

SEQ ID NO: 5772480 - DNA, 25 bp, Homo sapien
aactcttctatgtcgaatgagattg

SEQ ID NO: 5772481 - DNA, 25 bp, Homo sapien
agcatcacatcgcagtacaggaacc

SEQ ID NO: 5772482 - DNA, 25 bp, Homo sapien
ttgaatcaggataaatttgcggcta

SEQ ID NO: 5772483 - DNA, 25 bp, Homo sapien
gtttcccacattgactgcactcata

SEQ ID NO: 5772484 - DNA, 25 bp, Homo sapien
ttctccagtgtgaactctttggtgt

SEQ ID NO: 5772485 - DNA, 25 bp, Homo sapien
atagcacattcccttcacatttaag

SEQ ID NO: 5772486 - DNA, 25 bp, Homo sapien
gtttctgtcccaattactgttgaac

SEQ ID NO: 5772487 - DNA, 25 bp, Homo sapien
aaaatttgtagatgaacttttagaa

SEQ ID NO: 5772488 - DNA, 25 bp, Homo sapien
ccgagtccctcagcgcgactgccgc

SEQ ID NO: 5772489 - DNA, 25 bp, Homo sapien
ggcctttctccagtgtgaactcttt

SEQ ID NO: 5772490 - DNA, 25 bp, Homo sapien
gtggcttcgtgttggagtaggtccg

SEQ ID NO: 5772491 - DNA, 25 bp, Homo sapien
gccttctgggttcaagcgattctcc

SEQ ID NO: 5772492 - DNA, 25 bp, Homo sapien
gaaataattcaacacatggaatctg

SEQ ID NO: 5772493 - DNA, 25 bp, Homo sapien
acttatgaagaataccccactgtgg

SEQ ID NO: 5772494 - DNA, 25 bp, Homo sapien
tttgcttctctgagcactgtgggga

SEQ ID NO: 5772495 - DNA, 25 bp, Homo sapien
ggtctttctccagtgtgaactcttt

SEQ ID NO: 5772496 - DNA, 25 bp, Homo sapien
ttggcctcccaaagtgttaggatta

SEQ ID NO: 5772497 - DNA, 25 bp, Homo sapien
tgctgctactgtgtggctcctcacc

SEQ ID NO: 5772498 - DNA, 25 bp, Homo sapien
ggtgctcaaagtttaaatttacgaa

SEQ ID NO: 5772499 - DNA, 25 bp, Homo sapien
ctcactctgttgcctgggctggagt

SEQ ID NO: 5772500 - DNA, 25 bp, Homo sapien
taggtccgtgggggctgggaaggcc

SEQ ID NO: 5772501 - DNA, 25 bp, Homo sapien
atttgcggctaaaggatttctcaca

SEQ ID NO: 5772502 - DNA, 25 bp, Homo sapien
gacggagtctcactctgttgcctgg

SEQ ID NO: 5772503 - DNA, 25 bp, Homo sapien
ttcacctccacacctatagtctgac

SEQ ID NO: 5772504 - DNA, 25 bp, Homo sapien
ctcagagcttcccacatacctgaaa

SEQ ID NO: 5772505 - DNA, 25 bp, Homo sapien
agatttgccacattcactgcactca

SEQ ID NO: 5772506 - DNA, 25 bp, Homo sapien
acttccgccttctgggttcaagcga

SEQ ID NO: 5772507 - DNA, 25 bp, Homo sapien
attctatgcaatgaatagaacaccc

SEQ ID NO: 5772508 - DNA, 25 bp, Homo sapien
tgaatgaggtcagatttgcgggtaa

SEQ ID NO: 5772509 - DNA, 25 bp, Homo sapien
cattcactacactcaaacatctttt

SEQ ID NO: 5772510 - DNA, 25 bp, Homo sapien
taccccactgtgggtgctcaaagtt

SEQ ID NO: 5772511 - DNA, 25 bp, Homo sapien
atttcacctccacacctatagtctg

SEQ ID NO: 5772512 - DNA, 25 bp, Homo sapien
cccgggcctggcgcagctcacccga

SEQ ID NO: 5772513 - DNA, 25 bp, Homo sapien
gcacctgccaggtggtaggggtgaa

SEQ ID NO: 5772514 - DNA, 25 bp, Homo sapien
gctggtgaaggtcagcactgaagca

SEQ ID NO: 5772515 - DNA, 25 bp, Homo sapien
aatgatctcagcgatagtaaacaga

SEQ ID NO: 5772516 - DNA, 25 bp, Homo sapien
tggtggtgaatgaattcagatttat

SEQ ID NO: 5772517 - DNA, 25 bp, Homo sapien
cacattcactgcattcataaggcct

SEQ ID NO: 5772518 - DNA, 25 bp, Homo sapien
gtctgacaacaaatggcaccagtct

SEQ ID NO: 5772519 - DNA, 25 bp, Homo sapien
ctgcattcataaggcctttctccag

SEQ ID NO: 5772520 - DNA, 25 bp, Homo sapien
atggcaccaggccacaatacaggaa

SEQ ID NO: 5772521 - DNA, 25 bp, Homo sapien
tttacgaagatggctaccacagtct

SEQ ID NO: 5772522 - DNA, 25 bp, Homo sapien
tttctccagtgtgacctctctggtg

SEQ ID NO: 5772523 - DNA, 25 bp, Homo sapien
gtcgcgacctccactgcagaaactg

SEQ ID NO: 5772524 - DNA, 25 bp, Homo sapien
acacaaagcctggcagtctttactt

SEQ ID NO: 5772525 - DNA, 25 bp, Homo sapien
agcctcatccaccttccttttccag

SEQ ID NO: 5772526 - DNA, 25 bp, Homo sapien
agagaattgtctaaaggatttccca

SEQ ID NO: 5772527 - DNA, 25 bp, Homo sapien
gggcagcaggccaattagagcaata

SEQ ID NO: 5772528 - DNA, 25 bp, Homo sapien
attttttgtattttagtagacatgg

SEQ ID NO: 5772529 - DNA, 25 bp, Homo sapien
ttctctggtgttgaatgagttccga

SEQ ID NO: 5772530 - DNA, 25 bp, Homo sapien
tgaaacttatgaagaataccccact

SEQ ID NO: 5772531 - DNA, 25 bp, Homo sapien
ttggtgttgaatcaggataaatttg

SEQ ID NO: 5772532 - DNA, 25 bp, Homo sapien
actcgccacattcataaggcctttc

SEQ ID NO: 5772533 - DNA, 25 bp, Homo sapien
gaagatttgtctaaaggatttccca

SEQ ID NO: 5772534 - DNA, 25 bp, Homo sapien
gtacagaaagtttgagatctccaca

SEQ ID NO: 5772535 - DNA, 25 bp, Homo sapien
aagtgactcatgcacatggtgtgca

SEQ ID NO: 5772536 - DNA, 25 bp, Homo sapien
cacattcactacactcaaacatctt

SEQ ID NO: 5772537 - DNA, 25 bp, Homo sapien
ggcaataacccagggatgttacatg

SEQ ID NO: 5772538 - DNA, 25 bp, Homo sapien
actaggcggggagcggcggccgacc

SEQ ID NO: 5772539 - DNA, 25 bp, Homo sapien
tttatggataaaggctttctcacga

SEQ ID NO: 5772540 - DNA, 25 bp, Homo sapien
aaattcacgttcacagaagcactgg

SEQ ID NO: 5772541 - DNA, 25 bp, Homo sapien
tgttaggattacaccatgcccggcc

SEQ ID NO: 5772542 - DNA, 25 bp, Homo sapien
aatcactgcactgataaggcatttc

SEQ ID NO: 5772543 - DNA, 25 bp, Homo sapien
aagtcagagaaaagacatgaagacc

SEQ ID NO: 5772544 - DNA, 25 bp, Homo sapien
aggccagagcgctgtctaaaagatt

SEQ ID NO: 5772545 - DNA, 25 bp, Homo sapien
gacacacatcttaatctcactgagg

SEQ ID NO: 5772546 - DNA, 25 bp, Homo sapien
gctcaggcaatccgcccgccttggc

SEQ ID NO: 5772547 - DNA, 25 bp, Homo sapien
ccagtctacactgacttatatgcca

SEQ ID NO: 5772548 - DNA, 25 bp, Homo sapien
ctgcggtgtcgaatgaggttagaga

SEQ ID NO: 5772549 - DNA, 25 bp, Homo sapien
cttcgtgttggagtaggtccgtggg

SEQ ID NO: 5772550 - DNA, 25 bp, Homo sapien
gaagcttttctgtattcaccccact

SEQ ID NO: 5772551 - DNA, 25 bp, Homo sapien
aaggatttcccacattcactgcatt

SEQ ID NO: 5772552 - DNA, 25 bp, Homo sapien
accagtgctaggaattatgtggatc

SEQ ID NO: 5772553 - DNA, 25 bp, Homo sapien
gaaataaatggccacatcctcaaag

SEQ ID NO: 5772554 - DNA, 25 bp, Homo sapien
gcagaacctctggcccactttcgcg

SEQ ID NO: 5772555 - DNA, 25 bp, Homo sapien
tatggataaaggctttctcacgatc

SEQ ID NO: 5772556 - DNA, 25 bp, Homo sapien
aaggattttccacattcactgcatt

SEQ ID NO: 5772557 - DNA, 25 bp, Homo sapien
aacaagtgtgttcttgcaagtgaag

SEQ ID NO: 5772558 - DNA, 25 bp, Homo sapien
ctcatccaccttccttttccagggc

SEQ ID NO: 5772559 - DNA, 25 bp, Homo sapien
ataaggcctttctccagtatgaagt

SEQ ID NO: 5772560 - DNA, 25 bp, Homo sapien
tgttgaatcaggataaatttgcggc

SEQ ID NO: 5772561 - DNA, 25 bp, Homo sapien
ggtttggtgctcagccgcaggcaaa

SEQ ID NO: 5772562 - DNA, 25 bp, Homo sapien
atgtgagaccgacaatgttccttaa

SEQ ID NO: 5772563 - DNA, 25 bp, Homo sapien
aattaaagcaatgtgcaccaagcag

SEQ ID NO: 5772564 - DNA, 25 bp, Homo sapien
gacatgggatttcaccatgttgccc

SEQ ID NO: 5772565 - DNA, 25 bp, Homo sapien
aatgaggccagagcgctgtctaaaa

SEQ ID NO: 5772566 - DNA, 25 bp, Homo sapien
tgggtgtattgcccttagaagtcct

SEQ ID NO: 5772567 - DNA, 25 bp, Homo sapien
cttccttttccagggctcttcttca

SEQ ID NO: 5772568 - DNA, 25 bp, Homo sapien
ttagtagacatgggatttcaccatg

SEQ ID NO: 5772569 - DNA, 25 bp, Homo sapien
gctagagctctggctaaaggatttc

SEQ ID NO: 5772570 - DNA, 25 bp, Homo sapien
tcaggcaatccgcccgccttggcct

SEQ ID NO: 5772571 - DNA, 25 bp, Homo sapien
atttgctggtgctgaacaagtgtgt

SEQ ID NO: 5772572 - DNA, 25 bp, Homo sapien
cctggagtttctgtcccaattactg

SEQ ID NO: 5772573 - DNA, 25 bp, Homo sapien
acattataaattaaagcaatgtgca

SEQ ID NO: 5772574 - DNA, 25 bp, Homo sapien
cagaagctatcgcctcattctccat

SEQ ID NO: 5772575 - DNA, 25 bp, Homo sapien
atgctgaacaagtgtgtgtttgtgg

SEQ ID NO: 5772576 - DNA, 25 bp, Homo sapien
tgctacccaagtatgacttttgcac

SEQ ID NO: 5772577 - DNA, 25 bp, Homo sapien
ggcctttcttcagtgtgaactctcc

SEQ ID NO: 5772578 - DNA, 25 bp, Homo sapien
cagtccctatcccgggcctggcgca

SEQ ID NO: 5772579 - DNA, 25 bp, Homo sapien
ttcactacattcataaggcctttct

SEQ ID NO: 5772580 - DNA, 25 bp, Homo sapien
gattctctggaccacaactgggtca

SEQ ID NO: 5772581 - DNA, 25 bp, Homo sapien
cattccatggcaataacccagggat

SEQ ID NO: 5772582 - DNA, 25 bp, Homo sapien
tgcacaggggatgtggtttggtgct

SEQ ID NO: 5772583 - DNA, 25 bp, Homo sapien
cccggccagactattttctgataat

SEQ ID NO: 5772584 - DNA, 25 bp, Homo sapien
ggtaaagggtttcccacattgactg

SEQ ID NO: 5772585 - DNA, 25 bp, Homo sapien
atgtcgaatgaggttagatttgcgg

SEQ ID NO: 5772586 - DNA, 25 bp, Homo sapien
tgacatcactattctgcttacaagt

SEQ ID NO: 5772587 - DNA, 25 bp, Homo sapien
acgttcacagaagcactggggattg

SEQ ID NO: 5772588 - DNA, 25 bp, Homo sapien
cagagaaaagacatgaagaccctac

SEQ ID NO: 5772589 - DNA, 25 bp, Homo sapien
tctgagcactgtggggaagtgactc

SEQ ID NO: 5772590 - DNA, 25 bp, Homo sapien
acattgtcccttctgagtacagaaa

SEQ ID NO: 5772591 - DNA, 25 bp, Homo sapien
aagatcctgagaatttctgtatgca

SEQ ID NO: 5772592 - DNA, 25 bp, Homo sapien
ctccagtgtgaactcttctatgtcg

SEQ ID NO: 5772593 - DNA, 25 bp, Homo sapien
cagtcgcgacctccactgcagaaac

SEQ ID NO: 5772594 - DNA, 25 bp, Homo sapien
atggcacatggctcctttgcaggac

SEQ ID NO: 5772595 - DNA, 25 bp, Homo sapien
cgattctcctgcctcagcctcccaa

SEQ ID NO: 5772596 - DNA, 25 bp, Homo sapien
ccaattagagcaatacagaacaaag

SEQ ID NO: 5772597 - DNA, 25 bp, Homo sapien
ctaaaggatttctcacattcactgc

SEQ ID NO: 5772598 - DNA, 25 bp, Homo sapien
ccctatcccgggcctggcgcagctc

SEQ ID NO: 5772599 - DNA, 25 bp, Homo sapien
ccgccttctgggttcaagcgattct

SEQ ID NO: 5772600 - DNA, 25 bp, Homo sapien
ctcagtcgcgacctccactgcagaa

SEQ ID NO: 5772601 - DNA, 25 bp, Homo sapien
ttctcacgatcactgcattcataag

SEQ ID NO: 5772602 - DNA, 25 bp, Homo sapien
gagactcatcaaggagctcccactc

SEQ ID NO: 5772603 - DNA, 25 bp, Homo sapien
tcaccagtgctaggaattatgtgga

SEQ ID NO: 5772604 - DNA, 25 bp, Homo sapien
catcctcaaaggtcataccctgagc

SEQ ID NO: 5772605 - DNA, 25 bp, Homo sapien
tttctccagtgtgaactctctggtg

SEQ ID NO: 5772606 - DNA, 25 bp, Homo sapien
tcacaaatgtagcctcatccacctt

SEQ ID NO: 5772607 - DNA, 25 bp, Homo sapien
gagcgctgtctaaaagatttgccac

SEQ ID NO: 5772608 - DNA, 25 bp, Homo sapien
ggtcacaaatgtagcctcatccacc

SEQ ID NO: 5772609 - DNA, 25 bp, Homo sapien
agctcacccgaggtggtgtcgcaga

SEQ ID NO: 5772610 - DNA, 25 bp, Homo sapien
aatggccacatcctcaaaggtcata

SEQ ID NO: 5772611 - DNA, 25 bp, Homo sapien
ctccagtgctattatactgaataaa

SEQ ID NO: 5772612 - DNA, 25 bp, Homo sapien
taaaaaggtaatccttagaaagctg

SEQ ID NO: 5772613 - DNA, 25 bp, Homo sapien
ttcccacattgactgcactcataag

SEQ ID NO: 5772614 - DNA, 25 bp, Homo sapien
aggctagcactttggctaaaagact

SEQ ID NO: 5772615 - DNA, 25 bp, Homo sapien
atgttgcccaggctggtcttgaact

SEQ ID NO: 5772616 - DNA, 25 bp, Homo sapien
tctatgtcgaatgagattgaagatt

SEQ ID NO: 5772617 - DNA, 25 bp, Homo sapien
gaagctatcgcctcattctccattc

SEQ ID NO: 5772618 - DNA, 25 bp, Homo sapien
cacattcccttcacatttaaggcct

SEQ ID NO: 5772619 - DNA, 25 bp, Homo sapien
attctctgcattcataaggtctttc

SEQ ID NO: 5772620 - DNA, 25 bp, Homo sapien
ctcacccgaggtggtgtcgcagaac

SEQ ID NO: 5772621 - DNA, 25 bp, Homo sapien
atttaaggcctttcttcagtgtgaa

SEQ ID NO: 5772622 - DNA, 25 bp, Homo sapien
cttcagcctcagaaattggcagtga

SEQ ID NO: 5772623 - DNA, 25 bp, Homo sapien
aatgaggctagcactttggctaaaa

SEQ ID NO: 5772624 - DNA, 25 bp, Homo sapien
catggtgtgcacctgccaggtggta

SEQ ID NO: 5772625 - DNA, 25 bp, Homo sapien
gtgcacctgccaggtggtaggggtg

SEQ ID NO: 5772626 - DNA, 25 bp, Homo sapien
ataaggcctttctccagtgtgaatt

SEQ ID NO: 5772627 - DNA, 25 bp, Homo sapien
aaatagcacattcccttcacattta

SEQ ID NO: 5772628 - DNA, 25 bp, Homo sapien
ctcctgtggacaactgaacaaaatt

SEQ ID NO: 5772629 - DNA, 25 bp, Homo sapien
gttgcctgggctggagtgcagtggt

SEQ ID NO: 5772630 - DNA, 25 bp, Homo sapien
tgaatgaattcagatttatggataa

SEQ ID NO: 5772631 - DNA, 25 bp, Homo sapien
tgtgggtaaagggtttcccacattg

SEQ ID NO: 5772632 - DNA, 25 bp, Homo sapien
gcagctcacccgaggtggtgtcgca

SEQ ID NO: 5772633 - DNA, 25 bp, Homo sapien
atcaccagtgtgaatgctgcggtgt

SEQ ID NO: 5772634 - DNA, 25 bp, Homo sapien
gtgttgaatgaggctagagctctgg

SEQ ID NO: 5772635 - DNA, 25 bp, Homo sapien
gtacaggaacctctgagactcatca

SEQ ID NO: 5772636 - DNA, 25 bp, Homo sapien
tgaagcagaagcctctcatgcttgt

SEQ ID NO: 5772637 - DNA, 25 bp, Homo sapien
gtggtgaatgaattcagatttatgg

SEQ ID NO: 5772638 - DNA, 25 bp, Homo sapien
tctaaaagatttgccacattcactg

SEQ ID NO: 5772639 - DNA, 25 bp, Homo sapien
ccttggcctcccaaagtgttaggat

SEQ ID NO: 5772640 - DNA, 25 bp, Homo sapien
gcctctcatgcttgtgctacccaag

SEQ ID NO: 5772641 - DNA, 25 bp, Homo sapien
gaatcagaatgtggaaaaattcatt

SEQ ID NO: 5772642 - DNA, 25 bp, Homo sapien
tccagggctcttcttcattgtaatg

SEQ ID NO: 5772643 - DNA, 25 bp, Homo sapien
gtatgcactgatcctacacaaccat

SEQ ID NO: 5772644 - DNA, 25 bp, Homo sapien
ccacttgtaataactttttgcattg

SEQ ID NO: 5772645 - DNA, 25 bp, Homo sapien
ttcaccatgttgcccaggctggtct

SEQ ID NO: 5772646 - DNA, 25 bp, Homo sapien
ttcccacattcactgcattcataag

SEQ ID NO: 5772647 - DNA, 25 bp, Homo sapien
tttccacattcactgcattcataag

SEQ ID NO: 5772648 - DNA, 25 bp, Homo sapien
ggatttcaccatgttgcccaggctg

SEQ ID NO: 5772649 - DNA, 25 bp, Homo sapien
aataaggtctgatttgtgggtaaag

SEQ ID NO: 5772650 - DNA, 25 bp, Homo sapien
cctttctccagtatgaagtctccgg

SEQ ID NO: 5772651 - DNA, 25 bp, Homo sapien
aatgtctttcaagactgggacacac

SEQ ID NO: 5772652 - DNA, 25 bp, Homo sapien
cggccgaccggggcgggcattcgaa

SEQ ID NO: 5772653 - DNA, 25 bp, Homo sapien
tgcaatgaatagaacacccaagatt

SEQ ID NO: 5772654 - DNA, 25 bp, Homo sapien
ctccactgtgaattctctggtgttg

SEQ ID NO: 5772655 - DNA, 25 bp, Homo sapien
gtatagatacactctgctcagaagc

SEQ ID NO: 5772656 - DNA, 25 bp, Homo sapien
cacaactgggtcaggtgtatactct

SEQ ID NO: 5772657 - DNA, 25 bp, Homo sapien
tcaccccttcatgctgacatcacta

SEQ ID NO: 5772658 - DNA, 25 bp, Homo sapien
caagtggctgggactataggcgcat

SEQ ID NO: 5772659 - DNA, 25 bp, Homo sapien
tgaaaaatgcctgtatatgcttgct

SEQ ID NO: 5772660 - DNA, 25 bp, Homo sapien
taggaattatgtggatctcctgtgg

SEQ ID NO: 5772661 - DNA, 25 bp, Homo sapien
agtcattctatgcaatgaatagaac

SEQ ID NO: 5772662 - DNA, 25 bp, Homo sapien
tcctcaaaggtcataccctgagccg

SEQ ID NO: 5772663 - DNA, 25 bp, Homo sapien
tgtggcttgaagcttttctgtattc

SEQ ID NO: 5772664 - DNA, 25 bp, Homo sapien
ttaaggcctttcttcagtgtgaact

SEQ ID NO: 5772665 - DNA, 25 bp, Homo sapien
atacagaacaaagagctgtcttctg

SEQ ID NO: 5772666 - DNA, 25 bp, Homo sapien
gattaggtggcactttttgctaaag

SEQ ID NO: 5772667 - DNA, 25 bp, Homo sapien
ctggaccacaactgggtcaggtgta

SEQ ID NO: 5772668 - DNA, 25 bp, Homo sapien
ctgataaggcatttctccagtgtga

SEQ ID NO: 5772669 - DNA, 25 bp, Homo sapien
gcctcggcagattagaaattacaat

SEQ ID NO: 5772670 - DNA, 25 bp, Homo sapien
gccacaatacaggaacacaaagcct

SEQ ID NO: 5772671 - DNA, 25 bp, Homo sapien
tgggcaacagattcccctcaccagt

SEQ ID NO: 5772672 - DNA, 25 bp, Homo sapien
ctcctccagtgtgacgtctctggtg

SEQ ID NO: 5772673 - DNA, 25 bp, Homo sapien
tggctcctttgcaggacctgggcaa

SEQ ID NO: 5772674 - DNA, 25 bp, Homo sapien
tgtctttcaagactgggacacacat

SEQ ID NO: 5772675 - DNA, 25 bp, Homo sapien
tagtctgacaacaaatggcaccagt

SEQ ID NO: 5772676 - DNA, 25 bp, Homo sapien
taaggcatttctccagtgtgaactc

SEQ ID NO: 5772677 - DNA, 25 bp, Homo sapien
tcacagaagcactggggattgtcac

SEQ ID NO: 5772678 - DNA, 25 bp, Homo sapien
gcgatagtaaacagaagatcctgag

SEQ ID NO: 5772679 - DNA, 25 bp, Homo sapien
tccgtgggggctgggaaggcctccc

SEQ ID NO: 5772680 - DNA, 25 bp, Homo sapien
ctatcccgggcctggcgcagctcac

SEQ ID NO: 5772681 - DNA, 25 bp, Homo sapien
agtgaactctctggtgtcgaaaaag

SEQ ID NO: 5772682 - DNA, 25 bp, Homo sapien
cttatatgccatggcacatggctcc

SEQ ID NO: 5772683 - DNA, 25 bp, Homo sapien
gctggtgctgaacaagtgtgttctt

SEQ ID NO: 5772684 - DNA, 25 bp, Homo sapien
cacccaagattaaaggtgcgtaaat

SEQ ID NO: 5772685 - DNA, 25 bp, Homo sapien
ataacccagggatgttacatgtgca

SEQ ID NO: 5772686 - DNA, 25 bp, Homo sapien
tttgtagatgaacttttagaagagt

SEQ ID NO: 5772687 - DNA, 25 bp, Homo sapien
gtgaattatcttgtgtaagattagg

SEQ ID NO: 5772688 - DNA, 25 bp, Homo sapien
ctcccaagtggctgggactataggc

SEQ ID NO: 5772689 - DNA, 25 bp, Homo sapien
acagaaagtttgagatctccacaaa

SEQ ID NO: 5772690 - DNA, 25 bp, Homo sapien
caccatgttgcccaggctggtcttg

SEQ ID NO: 5772691 - DNA, 25 bp, Homo sapien
tggagacggagtctcactctgttgc

SEQ ID NO: 5772692 - DNA, 25 bp, Homo sapien
aaatggcaccagtctacactgactt

SEQ ID NO: 5772693 - DNA, 25 bp, Homo sapien
ttcactgcactcataaggtcttgtg

SEQ ID NO: 5772694 - DNA, 25 bp, Homo sapien
aaatcaggctataggcctcggcaga

SEQ ID NO: 5772695 - DNA, 25 bp, Homo sapien
actcctgagctcaggcaatccgccc

SEQ ID NO: 5772696 - DNA, 25 bp, Homo sapien
gcaatccgcccgccttggcctccca

SEQ ID NO: 5772697 - DNA, 25 bp, Homo sapien
cctggcgcagctcacccgaggtggt

SEQ ID NO: 5772698 - DNA, 25 bp, Homo sapien
acaccatgcccggccagactatttt

SEQ ID NO: 5772699 - DNA, 25 bp, Homo sapien
ggtcataccctgagccgagtccctc

SEQ ID NO: 5772700 - DNA, 25 bp, Homo sapien
gctaaaggatttcccacattcactg

SEQ ID NO: 5772701 - DNA, 25 bp, Homo sapien
gttttctgggtgggtgtattgccct

SEQ ID NO: 5772702 - DNA, 25 bp, Homo sapien
aaggcctttcttcagtgtgaactct

SEQ ID NO: 5772703 - DNA, 25 bp, Homo sapien
agctttgtctaaaggatttcccgca

SEQ ID NO: 5772704 - DNA, 25 bp, Homo sapien
cattcactgcactcataaggtcttg

SEQ ID NO: 5772705 - DNA, 25 bp, Homo sapien
cctgggctggagtgcagtggtgcaa

SEQ ID NO: 5772706 - DNA, 25 bp, Homo sapien
ctcagcctcccaagtggctgggact

SEQ ID NO: 5772707 - DNA, 25 bp, Homo sapien
aggatttcccacactcacagcactg

SEQ ID NO: 5772708 - DNA, 25 bp, Homo sapien
cccaggctggtcttgaactcctgag

SEQ ID NO: 5772709 - DNA, 25 bp, Homo sapien
ggtggtaggggtgaaatgtgaaatg

SEQ ID NO: 5772710 - DNA, 25 bp, Homo sapien
ataccctgagccgagtccctcagcg

SEQ ID NO: 5772711 - DNA, 25 bp, Homo sapien
accctgagccgagtccctcagcgcg

SEQ ID NO: 5772712 - DNA, 25 bp, Homo sapien
aacaagtgtgtgtttgtggcttgaa

SEQ ID NO: 5772713 - DNA, 25 bp, Homo sapien
ttatgaagaataccccactgtgggt

SEQ ID NO: 5772714 - DNA, 25 bp, Homo sapien
tctgcattcataaggtctttctcca

SEQ ID NO: 5772715 - DNA, 25 bp, Homo sapien
gcactgatcctacacaaccatattc

SEQ ID NO: 5772716 - DNA, 25 bp, Homo sapien
tcagaaattggcagtgacataaatc

SEQ ID NO: 5772717 - DNA, 25 bp, Homo sapien
tgcccggccagactattttctgata

SEQ ID NO: 5772718 - DNA, 25 bp, Homo sapien
tagatttgtagctaaaggttttcct

SEQ ID NO: 5772719 - DNA, 25 bp, Homo sapien
acctgtatagatacactctgctcag

SEQ ID NO: 5772720 - DNA, 25 bp, Homo sapien
actgcactgataaggcatttctcca

SEQ ID NO: 5772721 - DNA, 25 bp, Homo sapien
ccttgggcagcaggccaattagagc

SEQ ID NO: 5772722 - DNA, 25 bp, Homo sapien
aggctggtgaatcagaatgtggaaa

SEQ ID NO: 5772723 - DNA, 25 bp, Homo sapien
aaggtctttctccagtgtgaactct

SEQ ID NO: 5772724 - DNA, 25 bp, Homo sapien
tttggtgctcagccgcaggcaaaat

SEQ ID NO: 5772725 - DNA, 25 bp, Homo sapien
aggtgaaataattcaacacatggaa

SEQ ID NO: 5772726 - DNA, 25 bp, Homo sapien
gctgaataaggtctgatttgtgggt

SEQ ID NO: 5772727 - DNA, 25 bp, Homo sapien
attcaacacatggaatctgcagccg

SEQ ID NO: 5772728 - DNA, 25 bp, Homo sapien
gcgcagctcacccgaggtggtgtcg

SEQ ID NO: 5772729 - DNA, 25 bp, Homo sapien
gtgtgaactctctggtgttgaatga

SEQ ID NO: 5772730 - DNA, 25 bp, Homo sapien
tttgtagctaaaggttttcctacat

SEQ ID NO: 5772731 - DNA, 25 bp, Homo sapien
gtggcactttttgctaaaggattcc

SEQ ID NO: 5772732 - DNA, 25 bp, Homo sapien
acaatcactgcactgataaggcatt

SEQ ID NO: 5772733 - DNA, 25 bp, Homo sapien
cagaggtttgcttctctgagcactg

SEQ ID NO: 5772734 - DNA, 25 bp, Homo sapien
tcattacaagcatcatgtgagaccg

SEQ ID NO: 5772735 - DNA, 25 bp, Homo sapien
gtgagaccgacaatgttccttaaaa

SEQ ID NO: 5772736 - DNA, 25 bp, Homo sapien
tgaatgaggccagagcgctgtctaa

SEQ ID NO: 5772737 - DNA, 25 bp, Homo sapien
tccagtgtgaattatcttgtgtaag

SEQ ID NO: 5772738 - DNA, 25 bp, Homo sapien
ttgcggctaaaggatttctcacatt

SEQ ID NO: 5772739 - DNA, 25 bp, Homo sapien
ttgtgccagtatgaattctccggtg

SEQ ID NO: 5772740 - DNA, 25 bp, Homo sapien
tgtcccttctgagtacagaaagttt

SEQ ID NO: 5772741 - DNA, 25 bp, Homo sapien
tcgcgacttctctgtcccgtccctc

SEQ ID NO: 5772742 - DNA, 25 bp, Homo sapien
attttctgataatgatctcagcgat

SEQ ID NO: 5772743 - DNA, 25 bp, Homo sapien
ctccagagtgaactctctggtgtcg

SEQ ID NO: 5772744 - DNA, 25 bp, Homo sapien
ttcataaggtctttctccactgtga

SEQ ID NO: 5772745 - DNA, 25 bp, Homo sapien
gcggcggccgaccggggcgggcatt

SEQ ID NO: 5772746 - DNA, 25 bp, Homo sapien
ctgtatgcactgatcctacacaacc

SEQ ID NO: 5772747 - DNA, 25 bp, Homo sapien
ggtgcaatctcagctcactgcaact

SEQ ID NO: 5772748 - DNA, 25 bp, Homo sapien
tgtattgcccttagaagtcctgacc

SEQ ID NO: 5772749 - DNA, 25 bp, Homo sapien
ggtaaaggattttccacattcactg

SEQ ID NO: 5772750 - DNA, 25 bp, Homo sapien
tgggctggagtgcagtggtgcaatc

SEQ ID NO: 5772751 - DNA, 25 bp, Homo sapien
tttctcacattcactgcactcataa

SEQ ID NO: 5772752 - DNA, 25 bp, Homo sapien
cacattgactgcactcataaggtct

SEQ ID NO: 5772753 - DNA, 25 bp, Homo sapien
aaggctttctcacgatcactgcatt

SEQ ID NO: 5772754 - DNA, 25 bp, Homo sapien
tgttgaatgagttccgatttgcagc

SEQ ID NO: 5772755 - DNA, 25 bp, Homo sapien
gttagatttgcggctaaaggatttc

SEQ ID NO: 5772756 - DNA, 25 bp, Homo sapien
gagaatttctgtatgcactgatcct

SEQ ID NO: 5772757 - DNA, 25 bp, Homo sapien
cacattcactgcactcataaggtct

SEQ ID NO: 5772758 - DNA, 25 bp, Homo sapien
caccagtgtgaatgctgcggtgtcg

SEQ ID NO: 5772759 - DNA, 25 bp, Homo sapien
gctgtcttctgccatcacattgtcc

SEQ ID NO: 5772760 - DNA, 25 bp, Homo sapien
tcaccactgggagtggcttcgtgtt

SEQ ID NO: 5772761 - DNA, 25 bp, Homo sapien
ccccactgtgggtgctcaaagttta

SEQ ID NO: 5772762 - DNA, 25 bp, Homo sapien
aggaacacaaagcctggcagtcttt

SEQ ID NO: 5772763 - DNA, 25 bp, Homo sapien
cacattcactgcattcataaggtct

SEQ ID NO: 5772764 - DNA, 25 bp, Homo sapien
acattctctgcattcataaggtctt

SEQ ID NO: 5772765 - DNA, 25 bp, Homo sapien
gactattttctgataatgatctcag

SEQ ID NO: 5772766 - DNA, 25 bp, Homo sapien
ggctggagtgcagtggtgcaatctc

SEQ ID NO: 5772767 - DNA, 25 bp, Homo sapien
tgtgtgtttgtggcttgaagctttt

SEQ ID NO: 5772768 - DNA, 25 bp, Homo sapien
gttccgatttgcagctaaaagattt

SEQ ID NO: 5772769 - DNA, 25 bp, Homo sapien
gtgtgacgtctctggtggtgaatga

SEQ ID NO: 5772770 - DNA, 25 bp, Homo sapien
actgatcctacacaaccatattcac

SEQ ID NO: 5772771 - DNA, 25 bp, Homo sapien
acagaagatcctgagaatttctgta

SEQ ID NO: 5772772 - DNA, 25 bp, Homo sapien
tctccgatgtcgaatgaggttagat

SEQ ID NO: 5772773 - DNA, 25 bp, Homo sapien
gtcgaatgaggttagatttgcggct

SEQ ID NO: 5772774 - DNA, 25 bp, Homo sapien
atgcactgatcctacacaaccatat

SEQ ID NO: 5772775 - DNA, 25 bp, Homo sapien
attcgaacacaacagtccctatccc

SEQ ID NO: 5772776 - DNA, 25 bp, Homo sapien
gttgaatgaggtcagatttgcgggt

SEQ ID NO: 5772777 - DNA, 25 bp, Homo sapien
ggttagagaattgtctaaaggattt

SEQ ID NO: 5772778 - DNA, 25 bp, Homo sapien
ccttagaaagctgacagcacaactc

SEQ ID NO: 5772779 - DNA, 25 bp, Homo sapien
gatttatggataaaggctttctcac

SEQ ID NO: 5772780 - DNA, 25 bp, Homo sapien
ctgaataaagaaatagcacattccc

SEQ ID NO: 5772781 - DNA, 25 bp, Homo sapien
ctggtgtcgaaaaaggctagagctt

SEQ ID NO: 5772782 - DNA, 25 bp, Homo sapien
ttgctggtgctgaacaagtgtgttc

SEQ ID NO: 5772783 - DNA, 25 bp, Homo sapien
actgaggtgagttttctgggtgggt

SEQ ID NO: 5772784 - DNA, 25 bp, Homo sapien
cacatggctcctttgcaggacctgg

SEQ ID NO: 5772785 - DNA, 25 bp, Homo sapien
tttcccacattctctgcattcataa

SEQ ID NO: 5772786 - DNA, 25 bp, Homo sapien
tggtgttgaatgaggctagcacttt

SEQ ID NO: 5772787 - DNA, 25 bp, Homo sapien
attcataaggcctttctccagtgtg

SEQ ID NO: 5772788 - DNA, 25 bp, Homo sapien
gtgtggctcctcaccactgggagtg

SEQ ID NO: 5772789 - DNA, 25 bp, Homo sapien
caggataaatttgcggctaaaggat

SEQ ID NO: 5772790 - DNA, 25 bp, Homo sapien
agaagtcctgacctgtatagataca

SEQ ID NO: 5772791 - DNA, 25 bp, Homo sapien
gacaacaaatggcaccagtctacac

SEQ ID NO: 5772792 - DNA, 25 bp, Homo sapien
tctctggtgttgaatgaggctagag

SEQ ID NO: 5772793 - DNA, 25 bp, Homo sapien
ggactaggcggggagcggcggccga

SEQ ID NO: 5772794 - DNA, 25 bp, Homo sapien
ttctgccatcacattgtcccttctg

SEQ ID NO: 5772795 - DNA, 25 bp, Homo sapien
attttccacattcactgcattcata

SEQ ID NO: 5772796 - DNA, 25 bp, Homo sapien
actcataaggtctttctccagtgtg

SEQ ID NO: 5772797 - DNA, 25 bp, Homo sapien
actgtgaattctctggtgttgaatg

SEQ ID NO: 5772798 - DNA, 25 bp, Homo sapien
gagaaataaatggccacatcctcaa

SEQ ID NO: 5772799 - DNA, 25 bp, Homo sapien
atttcccacattcactgcattcata

SEQ ID NO: 5772800 - DNA, 25 bp, Homo sapien
aaggcctttctccagtgtgaactct

SEQ ID NO: 5772801 - DNA, 25 bp, Homo sapien
cagtatgaagtctccggtgctgaat

SEQ ID NO: 5772802 - DNA, 25 bp, Homo sapien
tgaatgaggctagcactttggctaa

SEQ ID NO: 5772803 - DNA, 25 bp, Homo sapien
tgtattttagtagacatgggatttc

SEQ ID NO: 5772804 - DNA, 25 bp, Homo sapien
ctctttggtgttgaatcaggataaa

SEQ ID NO: 5772805 - DNA, 25 bp, Homo sapien
tgaataaggtctgatttgtgggtaa

SEQ ID NO: 5772806 - DNA, 25 bp, Homo sapien
attcataaggtctttctccagtgtg

SEQ ID NO: 5772807 - DNA, 25 bp, Homo sapien
cagtgtgacgtctctggtggtgaat

SEQ ID NO: 5772808 - DNA, 25 bp, Homo sapien
cagcactgaagcagaagcctctcat

SEQ ID NO: 5772809 - DNA, 25 bp, Homo sapien
ggtttgcttctctgagcactgtggg

SEQ ID NO: 5772810 - DNA, 25 bp, Homo sapien
cacctatagtctgacaacaaatggc

SEQ ID NO: 5772811 - DNA, 25 bp, Homo sapien
agtctacactgacttatatgccatg

SEQ ID NO: 5772812 - DNA, 25 bp, Homo sapien
accactgggagtggcttcgtgttgg

SEQ ID NO: 5772813 - DNA, 25 bp, Homo sapien
tcagccgcaggcaaaatgtctttca

SEQ ID NO: 5772814 - DNA, 25 bp, Homo sapien
aaaaatgcctgtatatgcttgctgc

SEQ ID NO: 5772815 - DNA, 25 bp, Homo sapien
actcaaacatcttttgtccagtgtg

SEQ ID NO: 5772816 - DNA, 25 bp, Homo sapien
tggtaggggtgaaatgtgaaatggc

SEQ ID NO: 5772817 - DNA, 25 bp, Homo sapien
ccttcagaacagacactctgatgct

SEQ ID NO: 5772818 - DNA, 25 bp, Homo sapien
cactcttcttgggagaaataaatgg

SEQ ID NO: 5772819 - DNA, 25 bp, Homo sapien
ctcacattcactacactcaaacatc

SEQ ID NO: 5772820 - DNA, 25 bp, Homo sapien
gtgccagtatgaattctccggtgtt

SEQ ID NO: 5772821 - DNA, 25 bp, Homo sapien
ctttctccactgtgaattctctggt

SEQ ID NO: 5772822 - DNA, 25 bp, Homo sapien
tcgcagaacctctggcccactttcg

SEQ ID NO: 5772823 - DNA, 25 bp, Homo sapien
tccattccatggcaataacccaggg

SEQ ID NO: 5772824 - DNA, 25 bp, Homo sapien
catgcttgtgctacccaagtatgac

SEQ ID NO: 5772825 - DNA, 25 bp, Homo sapien
tccagtatgaagtctccggtgctga

SEQ ID NO: 5772826 - DNA, 25 bp, Homo sapien
taaagtcagagaaaagacatgaaga

SEQ ID NO: 5772827 - DNA, 25 bp, Homo sapien
catggaatctgcagccggtcacaaa

SEQ ID NO: 5772828 - DNA, 25 bp, Homo sapien
catcttaatctcactgaggtgagtt

SEQ ID NO: 5772829 - DNA, 25 bp, Homo sapien
acaactcagattctctggaccacaa

SEQ ID NO: 5772830 - DNA, 25 bp, Homo sapien
gaagaataccccactgtgggtgctc

SEQ ID NO: 5772831 - DNA, 25 bp, Homo sapien
gccagactattttctgataatgatc

SEQ ID NO: 5772832 - DNA, 25 bp, Homo sapien
ttgaggccttgggcagcaggccaat

SEQ ID NO: 5772833 - DNA, 25 bp, Homo sapien
gctgaacaagtgtgttcttgcaagt

SEQ ID NO: 5772834 - DNA, 25 bp, Homo sapien
cgatgtcgaatgaggttagatttgc

SEQ ID NO: 5772835 - DNA, 25 bp, Homo sapien
tagctaaaggttttcctacattcac

SEQ ID NO: 5772836 - DNA, 25 bp, Homo sapien
tgaacaagtgtgttcttgcaagtga

SEQ ID NO: 5772837 - DNA, 25 bp, Homo sapien
acactctgatgctgaacaagtgtgt

SEQ ID NO: 5772838 - DNA, 25 bp, Homo sapien
gtatgaattctccggtgttgaatga

SEQ ID NO: 5772839 - DNA, 25 bp, Homo sapien
cggtgttgaatgaggtcagatttgc

SEQ ID NO: 5772840 - DNA, 25 bp, Homo sapien
gacctgacaaaaatggcaccaggcc

SEQ ID NO: 5772841 - DNA, 25 bp, Homo sapien
tcctcacattcactacactcaaaca

SEQ ID NO: 5772842 - DNA, 25 bp, Homo sapien
atgacgcactcctccagtgtgacgt

SEQ ID NO: 5772843 - DNA, 25 bp, Homo sapien
tattgcccttagaagtcctgacctg

SEQ ID NO: 5772844 - DNA, 25 bp, Homo sapien
aatgaattcagatttatggataaag

SEQ ID NO: 5772845 - DNA, 25 bp, Homo sapien
tctgctcagaagctatcgcctcatt

SEQ ID NO: 5772846 - DNA, 25 bp, Homo sapien
cggctaaaggatttcccacattcac

SEQ ID NO: 5772847 - DNA, 25 bp, Homo sapien
aaatttgcggctaaaggatttctca

SEQ ID NO: 5772848 - DNA, 25 bp, Homo sapien
tctggtgttgaatgaggctagagct

SEQ ID NO: 5772849 - DNA, 25 bp, Homo sapien
ctttgaggccttgggcagcaggcca

SEQ ID NO: 5772850 - DNA, 25 bp, Homo sapien
aaatgtagcctcatccaccttcctt

SEQ ID NO: 5772851 - DNA, 25 bp, Homo sapien
tgacctctgacctgacaaaaatggc

SEQ ID NO: 5772852 - DNA, 25 bp, Homo sapien
gcagtgacataaatcaggctatagg

SEQ ID NO: 5772853 - DNA, 25 bp, Homo sapien
gggctattaataatttccccaagca

SEQ ID NO: 5772854 - DNA, 25 bp, Homo sapien
cgggtaaaggattttccacattcac

SEQ ID NO: 5772855 - DNA, 25 bp, Homo sapien
ttagaaagctgacagcacaactcag

SEQ ID NO: 5772856 - DNA, 25 bp, Homo sapien
ggcaacagattcccctcaccagtgc

SEQ ID NO: 5772857 - DNA, 25 bp, Homo sapien
gtctttctccactgtgaattctctg

SEQ ID NO: 5772858 - DNA, 25 bp, Homo sapien
tggctaaaggatttcccacattcac

SEQ ID NO: 5772859 - DNA, 25 bp, Homo sapien
agatctccacaaaatctattcaccc

SEQ ID NO: 5772860 - DNA, 25 bp, Homo sapien
tgtagctaaaggttttcctacattc

SEQ ID NO: 5772861 - DNA, 25 bp, Homo sapien
cttttgatgctggtgaaggtcagca

SEQ ID NO: 5772862 - DNA, 25 bp, Homo sapien
gtgtgacctctctggtgttgaatga

SEQ ID NO: 5772863 - DNA, 25 bp, Homo sapien
ctgggacacacatcttaatctcact

SEQ ID NO: 5772864 - DNA, 25 bp, Homo sapien
taggcggggagcggcggccgaccgg

SEQ ID NO: 5772865 - DNA, 25 bp, Homo sapien
gtggtttggtgctcagccgcaggca

SEQ ID NO: 5772866 - DNA, 25 bp, Homo sapien
tgagcactgtggggaagtgactcat

SEQ ID NO: 5772867 - DNA, 25 bp, Homo sapien
tggctaaaagactttccacattcac

SEQ ID NO: 5772868 - DNA, 25 bp, Homo sapien
gcttgaagcttttctgtattcaccc

SEQ ID NO: 5772869 - DNA, 25 bp, Homo sapien
cctttctccagtgtgaattatcttg

SEQ ID NO: 5772870 - DNA, 25 bp, Homo sapien
tgagatctccacaaaatctattcac

SEQ ID NO: 5772871 - DNA, 25 bp, Homo sapien
gcgctgtctaaaagatttgccacat

SEQ ID NO: 5772872 - DNA, 25 bp, Homo sapien
tccggtgctgaatgaggccagagcg

SEQ ID NO: 5772873 - DNA, 25 bp, Homo sapien
gaagagtcattccatctaatttact

SEQ ID NO: 5772874 - DNA, 25 bp, Homo sapien
aaggtcttgtgccagtatgaattct

SEQ ID NO: 5772875 - DNA, 25 bp, Homo sapien
tcaggtgtatactctaaagtcagag

SEQ ID NO: 5772876 - DNA, 25 bp, Homo sapien
taaggtctgatttgtgggtaaaggg

SEQ ID NO: 5772877 - DNA, 25 bp, Homo sapien
tgatttgtgggtaaagggtttccca

SEQ ID NO: 5772878 - DNA, 25 bp, Homo sapien
taattcaacacatggaatctgcagc

SEQ ID NO: 5772879 - DNA, 25 bp, Homo sapien
ctaaaggatttcccacactcacagc

SEQ ID NO: 5772880 - DNA, 25 bp, Homo sapien
ctatcgcctcattctccattccatg

SEQ ID NO: 5772881 - DNA, 25 bp, Homo sapien
tgaacaaaattcacgttcacagaag

SEQ ID NO: 5772882 - DNA, 25 bp, Homo sapien
ctctcatgcttgtgctacccaagta

SEQ ID NO: 5772883 - DNA, 25 bp, Homo sapien
tcagcctcagaaattggcagtgaca

SEQ ID NO: 5772884 - DNA, 25 bp, Homo sapien
gtccctcagtcgcgacctccactgc

SEQ ID NO: 5772885 - DNA, 25 bp, Homo sapien
atgaagaataccccactgtgggtgc

SEQ ID NO: 5772886 - DNA, 25 bp, Homo sapien
caactgaacaaaattcacgttcaca

SEQ ID NO: 5772887 - DNA, 25 bp, Homo sapien
aattctctggtgttgaatgagttcc

SEQ ID NO: 5772888 - DNA, 25 bp, Homo sapien
ttgtctaaaggatttcccacattct

SEQ ID NO: 5772889 - DNA, 25 bp, Homo sapien
tctcacattcactgcactcataagg

SEQ ID NO: 5772890 - DNA, 25 bp, Homo sapien
gaatctgcagccggtcacaaatgta

SEQ ID NO: 5772891 - DNA, 25 bp, Homo sapien
ctatcaccagtgtgaatgctgcggt

SEQ ID NO: 5772892 - DNA, 25 bp, Homo sapien
agcatcatgtgagaccgacaatgtt

SEQ ID NO: 5772893 - DNA, 25 bp, Homo sapien
catgcacatggtgtgcacctgccag

SEQ ID NO: 5772894 - DNA, 25 bp, Homo sapien
ttgaactcctgagctcaggcaatcc

SEQ ID NO: 5772895 - DNA, 25 bp, Homo sapien
tggcagtgacataaatcaggctata

SEQ ID NO: 5772896 - DNA, 25 bp, Homo sapien
aggttagatttgcggctaaaggatt

SEQ ID NO: 5772897 - DNA, 25 bp, Homo sapien
tgcactgataaggcatttctccagt

SEQ ID NO: 5772898 - DNA, 25 bp, Homo sapien
actgaacaaaattcacgttcacaga

SEQ ID NO: 5772899 - DNA, 25 bp, Homo sapien
ctcggcagattagaaattacaatga

SEQ ID NO: 5772900 - DNA, 25 bp, Homo sapien
aggtgtatactctaaagtcagagaa

SEQ ID NO: 5772901 - DNA, 25 bp, Homo sapien
ctttctccagagtgaactctctggt

SEQ ID NO: 5772902 - DNA, 25 bp, Homo sapien
aatgaggttagatttgcggctaaag

SEQ ID NO: 5772903 - DNA, 25 bp, Homo sapien
aggattacaccatgcccggccagac

SEQ ID NO: 5772904 - DNA, 25 bp, Homo sapien
ataaagccctccttcagaacagaca

SEQ ID NO: 5772905 - DNA, 25 bp, Homo sapien
aattagagcaatacagaacaaagag

SEQ ID NO: 5772906 - DNA, 25 bp, Homo sapien
aggtcagatttgcgggtaaaggatt

SEQ ID NO: 5772907 - DNA, 25 bp, Homo sapien
cccgccttggcctcccaaagtgtta

SEQ ID NO: 5772908 - DNA, 25 bp, Homo sapien
cgggcctggcgcagctcacccgagg

SEQ ID NO: 5772909 - DNA, 25 bp, Homo sapien
tgggtcaggtgtatactctaaagtc

SEQ ID NO: 5772910 - DNA, 25 bp, Homo sapien
ttgggcagcaggccaattagagcaa

SEQ ID NO: 5772911 - DNA, 25 bp, Homo sapien
atcgcctcattctccattccatggc

SEQ ID NO: 5772912 - DNA, 25 bp, Homo sapien
tgtcgaatgaggttagagaattgtc

SEQ ID NO: 5772913 - DNA, 25 bp, Homo sapien
ccgtggactaggcggggagcggcgg

SEQ ID NO: 5772914 - DNA, 25 bp, Homo sapien
acaatgaacctcctcagagcttccc

SEQ ID NO: 5772915 - DNA, 25 bp, Homo sapien
tcccgtccctcagtcgcgacctcca

SEQ ID NO: 5772916 - DNA, 25 bp, Homo sapien
aggcaatccgcccgccttggcctcc

SEQ ID NO: 5772917 - DNA, 25 bp, Homo sapien
catcaaggagctcccactcttcttg

SEQ ID NO: 5772918 - DNA, 25 bp, Homo sapien
cctccagtgtgacgtctctggtggt

SEQ ID NO: 5772919 - DNA, 25 bp, Homo sapien
ttagagaattgtctaaaggatttcc

SEQ ID NO: 5772920 - DNA, 25 bp, Homo sapien
ctcttcttgggagaaataaatggcc

SEQ ID NO: 5772921 - DNA, 25 bp, Homo sapien
attatcttgtgtaagattaggtggc

SEQ ID NO: 5772922 - DNA, 25 bp, Homo sapien
tgacaaaaatggcaccaggccacaa

SEQ ID NO: 5772923 - DNA, 25 bp, Homo sapien
caacttccgccttctgggttcaagc

SEQ ID NO: 5772924 - DNA, 25 bp, Homo sapien
gcaggcaaaatgtctttcaagactg

SEQ ID NO: 5772925 - DNA, 25 bp, Homo sapien
gaaggcctccccacaggtgaaataa

SEQ ID NO: 5772926 - DNA, 25 bp, Homo sapien
gacaatgttccttaaaaaggtaatc

SEQ ID NO: 5772927 - DNA, 25 bp, Homo sapien
ctgacaacaaatggcaccagtctac

SEQ ID NO: 5772928 - DNA, 25 bp, Homo sapien
gtccctatcccgggcctggcgcagc

SEQ ID NO: 5772929 - DNA, 25 bp, Homo sapien
atcccgggcctggcgcagctcaccc

SEQ ID NO: 5772930 - DNA, 25 bp, Homo sapien
agctccgtggactaggcggggagcg

SEQ ID NO: 5772931 - DNA, 25 bp, Homo sapien
ttttgctaaaggattcctcacattc

SEQ ID NO: 5772932 - DNA, 25 bp, Homo sapien
cattcaccacactcatgacgcactc

SEQ ID NO: 5772933 - DNA, 25 bp, Homo sapien
atgtggatctcctgtggacaactga

SEQ ID NO: 5772934 - DNA, 25 bp, Homo sapien
tctgataatgatctcagcgatagta

SEQ ID NO: 5772935 - DNA, 25 bp, Homo sapien
tctttactttgaggccttgggcagc

SEQ ID NO: 5772936 - DNA, 25 bp, Homo sapien
atggcaataacccagggatgttaca

SEQ ID NO: 5772937 - DNA, 25 bp, Homo sapien
caatgaatagaacacccaagattaa

SEQ ID NO: 5772938 - DNA, 25 bp, Homo sapien
caagtcattctatgcaatgaataga

SEQ ID NO: 5772939 - DNA, 25 bp, Homo sapien
ctccttcagaacagacactctgatg

SEQ ID NO: 5772940 - DNA, 25 bp, Homo sapien
ccttagaagtcctgacctgtataga

SEQ ID NO: 5772941 - DNA, 25 bp, Homo sapien
ctccagtgtgaactctctggtgttc

SEQ ID NO: 5772942 - DNA, 25 bp, Homo sapien
gcggggagcggcggccgaccggggc

SEQ ID NO: 5772943 - DNA, 25 bp, Homo sapien
gacttttgcacaggggatgtggttt

SEQ ID NO: 5772944 - DNA, 25 bp, Homo sapien
ggtgtcgaaaaaggctagagctttg

SEQ ID NO: 5772945 - DNA, 25 bp, Homo sapien
gaacagacactctgatgctgaacaa

SEQ ID NO: 5772946 - DNA, 25 bp, Homo sapien
agaagcactggggattgtcacaact

SEQ ID NO: 5772947 - DNA, 25 bp, Homo sapien
tctggtggtgaatgaattcagattt

SEQ ID NO: 5772948 - DNA, 25 bp, Homo sapien
cagtgtgaatttgctggtgctgaac

SEQ ID NO: 5772949 - DNA, 25 bp, Homo sapien
caggtggtaggggtgaaatgtgaaa

SEQ ID NO: 5772950 - DNA, 25 bp, Homo sapien
tgcggctaaaggatttcccacattc

SEQ ID NO: 5772951 - DNA, 25 bp, Homo sapien
aggtctttctccactgtgaattctc

SEQ ID NO: 5772952 - DNA, 25 bp, Homo sapien
gtgaatttgctggtgctgaacaagt

SEQ ID NO: 5772953 - DNA, 25 bp, Homo sapien
tgctacactcataaagccctccttc

SEQ ID NO: 5772954 - DNA, 25 bp, Homo sapien
gtaggggtgaaatgtgaaatggctt

SEQ ID NO: 5772955 - DNA, 25 bp, Homo sapien
agtttaaatttacgaagatggctac

SEQ ID NO: 5772956 - DNA, 25 bp, Homo sapien
gagttttctgggtgggtgtattgcc

SEQ ID NO: 5772957 - DNA, 25 bp, Homo sapien
ggtcaggtgtatactctaaagtcag

SEQ ID NO: 5772958 - DNA, 25 bp, Homo sapien
actctgatgctgaacaagtgtgtgt

SEQ ID NO: 5772959 - DNA, 25 bp, Homo sapien
tctggctaaaggatttcccacattc

SEQ ID NO: 5772960 - DNA, 25 bp, Homo sapien
acagacactctgatgctgaacaagt

SEQ ID NO: 5772961 - DNA, 25 bp, Homo sapien
cggccagactattttctgataatga

SEQ ID NO: 5772962 - DNA, 25 bp, Homo sapien
gctgaacaagtgtgtgtttgtggct

SEQ ID NO: 5772963 - DNA, 25 bp, Homo sapien
ctaaaagatttcccacaatcactgc

SEQ ID NO: 5772964 - DNA, 25 bp, Homo sapien
catacctgaaacttatgaagaatac

SEQ ID NO: 5772965 - DNA, 25 bp, Homo sapien
tatgccatggcacatggctcctttg

SEQ ID NO: 5772966 - DNA, 25 bp, Homo sapien
agtgaaggctttctcacatttgcta

SEQ ID NO: 5772967 - DNA, 25 bp, Homo sapien
atatgcttgctgctgctactgtgtg

SEQ ID NO: 5772968 - DNA, 25 bp, Homo sapien
ctgttgcctgggctggagtgcagtg

SEQ ID NO: 5772969 - DNA, 25 bp, Homo sapien
cataaggcctatcaccagtgtgaat

SEQ ID NO: 5772970 - DNA, 25 bp, Homo sapien
aaagtttgagatctccacaaaatct

SEQ ID NO: 5772971 - DNA, 25 bp, Homo sapien
aactctctggtgttcaatgaggtta

SEQ ID NO: 5772972 - DNA, 25 bp, Homo sapien
cactggaaaatttgtagatgaactt

SEQ ID NO: 5772973 - DNA, 25 bp, Homo sapien
cacgatcactgcattcataaggcct

SEQ ID NO: 5772974 - DNA, 25 bp, Homo sapien
tcatgctgacatcactattctgctt

SEQ ID NO: 5772975 - DNA, 25 bp, Homo sapien
ccctccttcagaacagacactctga

SEQ ID NO: 5772976 - DNA, 25 bp, Homo sapien
agaaatagcacattcccttcacatt

SEQ ID NO: 5772977 - DNA, 25 bp, Homo sapien
caactgcctccttttcatggtgacc

SEQ ID NO: 5772978 - DNA, 25 bp, Homo sapien
cactacattcataaggcctttctcc

SEQ ID NO: 5772979 - DNA, 25 bp, Homo sapien
tgttacatgtgcaaagttctccagc

SEQ ID NO: 5772980 - DNA, 25 bp, Homo sapien
tttggctaaaagactttccacattc

SEQ ID NO: 5772981 - DNA, 25 bp, Homo sapien
ttacaccatgcccggccagactatt

SEQ ID NO: 5772982 - DNA, 25 bp, Homo sapien
cacccgaggtggtgtcgcagaacct

SEQ ID NO: 5772983 - DNA, 25 bp, Homo sapien
acaaaaatggcaccaggccacaata

SEQ ID NO: 5772984 - DNA, 25 bp, Homo sapien
aggatttcccgcactcgccacattc

SEQ ID NO: 5772985 - DNA, 25 bp, Homo sapien
tcactgcactgataaggcatttctc

SEQ ID NO: 5772986 - DNA, 25 bp, Homo sapien
ctgagaatttctgtatgcactgatc

SEQ ID NO: 5772987 - DNA, 25 bp, Homo sapien
tcatgtgagaccgacaatgttcctt

SEQ ID NO: 5772988 - DNA, 25 bp, Homo sapien
cactctgttgcctgggctggagtgc

SEQ ID NO: 5772989 - DNA, 25 bp, Homo sapien
gaaattacaatgaacctcctcagag

SEQ ID NO: 5772990 - DNA, 25 bp, Homo sapien
ctagagctttgtctaaaggatttcc

SEQ ID NO: 5772991 - DNA, 25 bp, Homo sapien
tgtaatttcacctccacacctatag

SEQ ID NO: 5772992 - DNA, 25 bp, Homo sapien
tcattccatctaatttactgcagtc

SEQ ID NO: 5772993 - DNA, 25 bp, Homo sapien
cctacacaaccatattcactggaaa

SEQ ID NO: 5772994 - DNA, 25 bp, Homo sapien
acattcactgcactcataaggccta

SEQ ID NO: 5772995 - DNA, 25 bp, Homo sapien
tgaactcttctatgtcgaatgagat

SEQ ID NO: 5772996 - DNA, 25 bp, Homo sapien
acacaacagtccctatcccgggcct

SEQ ID NO: 5772997 - DNA, 25 bp, Homo sapien
tcgtgttggagtaggtccgtggggg

SEQ ID NO: 5772998 - DNA, 25 bp, Homo sapien
tgagccgagtccctcagcgcgactg

SEQ ID NO: 5772999 - DNA, 25 bp, Homo sapien
tccttttcatggtgacctctgacct

SEQ ID NO: 5773000 - DNA, 25 bp, Homo sapien
ctcataaggcctatcaccagtgtga

SEQ ID NO: 5773001 - DNA, 25 bp, Homo sapien
gatttcccgcactcgccacattcat

SEQ ID NO: 5773002 - DNA, 25 bp, Homo sapien
cacattcactacattcataaggcct

SEQ ID NO: 5773003 - DNA, 25 bp, Homo sapien
gataaaggctttctcacgatcactg

SEQ ID NO: 5773004 - DNA, 25 bp, Homo sapien
agaaagtttgagatctccacaaaat

SEQ ID NO: 5773005 - DNA, 25 bp, Homo sapien
ataaatttgcggctaaaggatttct

SEQ ID NO: 5773006 - DNA, 25 bp, Homo sapien
cctgacaaaaatggcaccaggccac

SEQ ID NO: 5773007 - DNA, 25 bp, Homo sapien
aaggcctttctccagtatgaagtct

SEQ ID NO: 5773008 - DNA, 25 bp, Homo sapien
aaacattataaattaaagcaatgtg

SEQ ID NO: 5773009 - DNA, 25 bp, Homo sapien
aggccacaatacaggaacacaaagc

SEQ ID NO: 5773010 - DNA, 25 bp, Homo sapien
cgaccggggcgggcattcgaacaca

SEQ ID NO: 5773011 - DNA, 25 bp, Homo sapien
tacagaggtttgcttctctgagcac

SEQ ID NO: 5773012 - DNA, 25 bp, Homo sapien
caccacactcatgacgcactcctcc

SEQ ID NO: 5773013 - DNA, 25 bp, Homo sapien
gctgggactataggcgcatgctgcc

SEQ ID NO: 5773014 - DNA, 25 bp, Homo sapien
gtgctgaacaagtgtgttcttgcaa

SEQ ID NO: 5773015 - DNA, 25 bp, Homo sapien
ggcctttctccagtatgaagtctcc

SEQ ID NO: 5773016 - DNA, 25 bp, Homo sapien
gcgcgactgccgccattgagctccg

SEQ ID NO: 5773017 - DNA, 25 bp, Homo sapien
ctcagaagctatcgcctcattctcc

SEQ ID NO: 5773018 - DNA, 25 bp, Homo sapien
ttacatgtgcaaagttctccagcat

SEQ ID NO: 5773019 - DNA, 25 bp, Homo sapien
aaggctttctcacatttgctacact

SEQ ID NO: 5773020 - DNA, 25 bp, Homo sapien
cgaggtggtgtcgcagaacctctgg

SEQ ID NO: 5773021 - DNA, 25 bp, Homo sapien
tagatttgcggctaaaggatttccc

SEQ ID NO: 5773022 - DNA, 25 bp, Homo sapien
gatttcccacactcacagcactgat

SEQ ID NO: 5773023 - DNA, 25 bp, Homo sapien
gaaaagacatgaagaccctacatgc

SEQ ID NO: 5773024 - DNA, 25 bp, Homo sapien
agccggtcacaaatgtagcctcatc

SEQ ID NO: 5773025 - DNA, 25 bp, Homo sapien
ttgaagatttgtctaaaggatttcc

SEQ ID NO: 5773026 - DNA, 25 bp, Homo sapien
gatcctgagaatttctgtatgcact

SEQ ID NO: 5773027 - DNA, 25 bp, Homo sapien
cgatttgcagctaaaagatttccca

SEQ ID NO: 5773028 - DNA, 25 bp, Homo sapien
attcctcacattcactacactcaaa

SEQ ID NO: 5773029 - DNA, 25 bp, Homo sapien
atttctccagtgtgaactcttctat

SEQ ID NO: 5773030 - DNA, 25 bp, Homo sapien
acataaatcaggctataggcctcgg

SEQ ID NO: 5773031 - DNA, 25 bp, Homo sapien
gaacacaaagcctggcagtctttac

SEQ ID NO: 5773032 - DNA, 25 bp, Homo sapien
atgtgcaaagttctccagcatcaca

SEQ ID NO: 5773033 - DNA, 25 bp, Homo sapien
gatttcccacaatcactgcactgat

SEQ ID NO: 5773034 - DNA, 25 bp, Homo sapien
aaagacatgaagaccctacatgctt

SEQ ID NO: 5773035 - DNA, 25 bp, Homo sapien
actgtgggtgctcaaagtttaaatt

SEQ ID NO: 5773036 - DNA, 25 bp, Homo sapien
ccagtgtgaactctctggtgttcaa

SEQ ID NO: 5773037 - DNA, 25 bp, Homo sapien
aaattcattacaagcatcatgtgag

SEQ ID NO: 5773038 - DNA, 25 bp, Homo sapien
cttcttcattgtaatgcttttgatg

SEQ ID NO: 5773039 - DNA, 25 bp, Homo sapien
agtgtgaactctttggtgttgaatc

SEQ ID NO: 5773040 - DNA, 25 bp, Homo sapien
ggcaccaggccacaatacaggaaca

SEQ ID NO: 5773041 - DNA, 25 bp, Homo sapien
taaggcctatcaccagtgtgaatgc

SEQ ID NO: 5773042 - DNA, 25 bp, Homo sapien
aagcagaagcctctcatgcttgtgc

SEQ ID NO: 5773043 - DNA, 25 bp, Homo sapien
taataatttccccaagcaaatggga

SEQ ID NO: 5773044 - DNA, 25 bp, Homo sapien
gctgaatgaggccagagcgctgtct

SEQ ID NO: 5773045 - DNA, 25 bp, Homo sapien
gcagcaggccaattagagcaataca

SEQ ID NO: 5773046 - DNA, 25 bp, Homo sapien
caaaggtcataccctgagccgagtc

SEQ ID NO: 5773047 - DNA, 25 bp, Homo sapien
cccaagtggctgggactataggcgc

SEQ ID NO: 5773048 - DNA, 25 bp, Homo sapien
actcataaagccctccttcagaaca

SEQ ID NO: 5773049 - DNA, 25 bp, Homo sapien
gcccactttcgcgacttctctgtcc

SEQ ID NO: 5773050 - DNA, 25 bp, Homo sapien
aggcatttctccagtgtgaactctt

SEQ ID NO: 5773051 - DNA, 25 bp, Homo sapien
acccaagtatgacttttgcacaggg

SEQ ID NO: 5773052 - DNA, 25 bp, Homo sapien
tggtgctgaataaggtctgatttgt

SEQ ID NO: 5773053 - DNA, 25 bp, Homo sapien
cacaactgcctccttttcatggtga

SEQ ID NO: 5773054 - DNA, 25 bp, Homo sapien
cagtgtgacctctctggtgttgaat

SEQ ID NO: 5773055 - DNA, 25 bp, Homo sapien
atttcaccatgttgcccaggctggt

SEQ ID NO: 5773056 - DNA, 25 bp, Homo sapien
cacattcataaggcctttctccagt

SEQ ID NO: 5773057 - DNA, 25 bp, Homo sapien
ttttcctacattcaccacactcatg

SEQ ID NO: 5773058 - DNA, 25 bp, Homo sapien
aatgaggctagagctctggctaaag

SEQ ID NO: 5773059 - DNA, 25 bp, Homo sapien
tgcactcataaggcctatcaccagt

SEQ ID NO: 5773060 - DNA, 25 bp, Homo sapien
cccacatacctgaaacttatgaaga

SEQ ID NO: 5773061 - DNA, 25 bp, Homo sapien
aaggattcctcacattcactacact

SEQ ID NO: 5773062 - DNA, 25 bp, Homo sapien
aatgaggtcagatttgcgggtaaag

SEQ ID NO: 5773063 - DNA, 25 bp, Homo sapien
gccatcacattgtcccttctgagta

SEQ ID NO: 5773064 - DNA, 25 bp, Homo sapien
tttggagacggagtctcactctgtt

SEQ ID NO: 5773065 - DNA, 25 bp, Homo sapien
attccatctaatttactgcagtctt

SEQ ID NO: 5773066 - DNA, 25 bp, Homo sapien
cacacctatagtctgacaacaaatg

SEQ ID NO: 5773067 - DNA, 25 bp, Homo sapien
actttggctaaaagactttccacat

SEQ ID NO: 5773068 - DNA, 25 bp, Homo sapien
aaacttatgaagaataccccactgt

SEQ ID NO: 5773069 - DNA, 25 bp, Homo sapien
aggacctgggcaacagattcccctc

SEQ ID NO: 5773070 - DNA, 25 bp, Homo sapien
cgcactcctccagtgtgacgtctct

SEQ ID NO: 5773071 - DNA, 25 bp, Homo sapien
ctctggtgtcgaaaaaggctagagc

SEQ ID NO: 5773072 - DNA, 25 bp, Homo sapien
gctaaaggatttcccacattcacta

SEQ ID NO: 5773073 - DNA, 25 bp, Homo sapien
tgatcctacacaaccatattcactg

SEQ ID NO: 5773074 - DNA, 25 bp, Homo sapien
cataaggtctttctccactgtgaat

SEQ ID NO: 5773075 - DNA, 25 bp, Homo sapien
aagtcctgacctgtatagatacact

SEQ ID NO: 5773076 - DNA, 25 bp, Homo sapien
cctttctccagtgtgaactctctgg

SEQ ID NO: 5773077 - DNA, 25 bp, Homo sapien
atttctgtatgcactgatcctacac

SEQ ID NO: 5773078 - DNA, 25 bp, Homo sapien
tttgtccagtgtgaatttgctggtg

SEQ ID NO: 5773079 - DNA, 25 bp, Homo sapien
tttgcgggtaaaggattttccacat

SEQ ID NO: 5773080 - DNA, 25 bp, Homo sapien
gattgtcacaactgcctccttttca

SEQ ID NO: 5773081 - DNA, 25 bp, Homo sapien
gctaaaagactttccacattcacta

SEQ ID NO: 5773082 - DNA, 25 bp, Homo sapien
tttgcggctaaaggatttcccacat

SEQ ID NO: 5773083 - DNA, 25 bp, Homo sapien
gatttgcggctaaaggatttcccac

SEQ ID NO: 5773084 - DNA, 25 bp, Homo sapien
tccgatttgcagctaaaagatttcc

SEQ ID NO: 5773085 - DNA, 25 bp, Homo sapien
ataggcctcggcagattagaaatta

SEQ ID NO: 5773086 - DNA, 25 bp, Homo sapien
gactgccgccattgagctccgtgga

SEQ ID NO: 5773087 - DNA, 25 bp, Homo sapien
acactcacagcactgataaggcctt

SEQ ID NO: 5773088 - DNA, 25 bp, Homo sapien
ttccaggctggtgaatcagaatgtg

SEQ ID NO: 5773089 - DNA, 25 bp, Homo sapien
cacacatcttaatctcactgaggtg

SEQ ID NO: 5773090 - DNA, 25 bp, Homo sapien
cccatttacctggagtttctgtccc

SEQ ID NO: 5773091 - DNA, 25 bp, Homo sapien
aaatggcaccaggccacaatacagg

SEQ ID NO: 5773092 - DNA, 25 bp, Homo sapien
gacttatatgccatggcacatggct

SEQ ID NO: 5773093 - DNA, 25 bp, Homo sapien
ctttttgcattgaaaaatgcctgta

SEQ ID NO: 5773094 - DNA, 25 bp, Homo sapien
tgggagagtacagaggtttgcttct

SEQ ID NO: 5773095 - DNA, 25 bp, Homo sapien
tggagtttctgtcccaattactgtt

SEQ ID NO: 5773096 - DNA, 25 bp, Homo sapien
actggggattgtcacaactgcctcc

SEQ ID NO: 5773097 - DNA, 25 bp, Homo sapien
ccaggctggtgaatcagaatgtgga

SEQ ID NO: 5773098 - DNA, 25 bp, Homo sapien
gcactcgccacattcataaggcctt

SEQ ID NO: 5773099 - DNA, 25 bp, Homo sapien
attgaaaaatgcctgtatatgcttg

SEQ ID NO: 5773100 - DNA, 25 bp, Homo sapien
ctgcctcagcctcccaagtggctgg

SEQ ID NO: 5773101 - DNA, 25 bp, Homo sapien
gatgttacatgtgcaaagttctcca

SEQ ID NO: 5773102 - DNA, 25 bp, Homo sapien
ctggaaaatttgtagatgaactttt

SEQ ID NO: 5773103 - DNA, 25 bp, Homo sapien
ggtaatccttagaaagctgacagca

SEQ ID NO: 5773104 - DNA, 25 bp, Homo sapien
gtgttgaatgaggctagcactttgg

SEQ ID NO: 5773105 - DNA, 25 bp, Homo sapien
acagcactgataaggcctttctcca

SEQ ID NO: 5773106 - DNA, 25 bp, Homo sapien
aatgtgaaatggcttcagcctcaga

SEQ ID NO: 5773107 - DNA, 25 bp, Homo sapien
tcacatttaaggcctttcttcagtg

SEQ ID NO: 5773108 - DNA, 25 bp, Homo sapien
ggccttgggcagcaggccaattaga

SEQ ID NO: 5773109 - DNA, 25 bp, Homo sapien
ttgcattgaaaaatgcctgtatatg

SEQ ID NO: 5773110 - DNA, 25 bp, Homo sapien
agtgtgttcttgcaagtgaaggctt

SEQ ID NO: 5773111 - DNA, 25 bp, Homo sapien
gcttgctgctgctactgtgtggctc

SEQ ID NO: 5773112 - DNA, 25 bp, Homo sapien
atagatacactctgctcagaagcta

SEQ ID NO: 5773113 - DNA, 25 bp, Homo sapien
gccacattcataaggcctttctcca

SEQ ID NO: 5773114 - DNA, 25 bp, Homo sapien
tccagtgtgaatttgctggtgctga

SEQ ID NO: 5773115 - DNA, 25 bp, Homo sapien
acctgccaggtggtaggggtgaaat

SEQ ID NO: 5773116 - DNA, 25 bp, Homo sapien
aaaggatttcccgcactcgccacat

SEQ ID NO: 5773117 - DNA, 25 bp, Homo sapien
ggataaatttgcggctaaaggattt

SEQ ID NO: 5773118 - DNA, 25 bp, Homo sapien
gtgaactctttggtgctgaataagg

SEQ ID NO: 5773119 - DNA, 25 bp, Homo sapien
gggaaggcctccccacaggtgaaat

SEQ ID NO: 5773120 - DNA, 25 bp, Homo sapien
gtgacgtctctggtggtgaatgaat

SEQ ID NO: 5773121 - DNA, 25 bp, Homo sapien
cacaggggatgtggtttggtgctca

SEQ ID NO: 5773122 - DNA, 25 bp, Homo sapien
taggcgcatgctgccacgcctggct

SEQ ID NO: 5773123 - DNA, 25 bp, Homo sapien
tgcttgggctattaataatttcccc

SEQ ID NO: 5773124 - DNA, 25 bp, Homo sapien
tctgatgctgaacaagtgtgtgttt

SEQ ID NO: 5773125 - DNA, 25 bp, Homo sapien
tcccacactcacagcactgataagg

SEQ ID NO: 5773126 - DNA, 25 bp, Homo sapien
aaagctgacagcacaactcagattc

SEQ ID NO: 5773127 - DNA, 25 bp, Homo sapien
attgtcccttctgagtacagaaagt

SEQ ID NO: 5773128 - DNA, 25 bp, Homo sapien
tgcagtggtgcaatctcagctcact

SEQ ID NO: 5773129 - DNA, 25 bp, Homo sapien
gagctgtcttctgccatcacattgt

SEQ ID NO: 5773130 - DNA, 25 bp, Homo sapien
gctaaaggttttcctacattcacca

SEQ ID NO: 5773131 - DNA, 25 bp, Homo sapien
acatgaagaccctacatgcttgggc

SEQ ID NO: 5773132 - DNA, 25 bp, Homo sapien
gcctggctaattttttgtattttag

SEQ ID NO: 5773133 - DNA, 25 bp, Homo sapien
tacctgaaacttatgaagaataccc

SEQ ID NO: 5773134 - DNA, 25 bp, Homo sapien
tgtagatgaacttttagaagagtca

SEQ ID NO: 5773135 - DNA, 25 bp, Homo sapien
tagagctctggctaaaggatttccc

SEQ ID NO: 5773136 - DNA, 25 bp, Homo sapien
tttccagggctcttcttcattgtaa

SEQ ID NO: 5773137 - DNA, 25 bp, Homo sapien
tttttgtattttagtagacatggga

SEQ ID NO: 5773138 - DNA, 25 bp, Homo sapien
tcccacaatcactgcactgataagg

SEQ ID NO: 5773139 - DNA, 25 bp, Homo sapien
cctacatgcttgggctattaataat

SEQ ID NO: 5773140 - DNA, 25 bp, Homo sapien
acaggaacacaaagcctggcagtct

SEQ ID NO: 5773141 - DNA, 25 bp, Homo sapien
gggatgttacatgtgcaaagttctc

SEQ ID NO: 5773142 - DNA, 25 bp, Homo sapien
acagaacaaagagctgtcttctgcc

SEQ ID NO: 5773143 - DNA, 25 bp, Homo sapien
ttgcccttagaagtcctgacctgta

SEQ ID NO: 5773144 - DNA, 25 bp, Homo sapien
tgcattcataaggtctttctccact

SEQ ID NO: 5773145 - DNA, 25 bp, Homo sapien
atctcagctcactgcaacttccgcc

SEQ ID NO: 5773146 - DNA, 25 bp, Homo sapien
cagtgtgaactctctggtgttgaat

SEQ ID NO: 5773147 - DNA, 25 bp, Homo sapien
aagtatgacttttgcacaggggatg

SEQ ID NO: 5773148 - DNA, 25 bp, Homo sapien
cttgtgctacccaagtatgactttt

SEQ ID NO: 5773149 - DNA, 25 bp, Homo sapien
aggcctatcaccagtgtgaatgctg

SEQ ID NO: 5773150 - DNA, 25 bp, Homo sapien
tactttgaggccttgggcagcaggc

SEQ ID NO: 5773151 - DNA, 25 bp, Homo sapien
gtgtgaactctttggtgctgaataa

SEQ ID NO: 5773152 - DNA, 25 bp, Homo sapien
tctttctccagtgtgacctctctgg

SEQ ID NO: 5773153 - DNA, 25 bp, Homo sapien
tgttcttgcaagtgaaggctttctc

SEQ ID NO: 5773154 - DNA, 25 bp, Homo sapien
cagagcttcccacatacctgaaact

SEQ ID NO: 5773155 - DNA, 25 bp, Homo sapien
tacaagcatcatgtgagaccgacaa

SEQ ID NO: 5773156 - DNA, 25 bp, Homo sapien
tccatctaatttactgcagtcttct

SEQ ID NO: 5773157 - DNA, 25 bp, Homo sapien
ggttcaagcgattctcctgcctcag

SEQ ID NO: 5773158 - DNA, 25 bp, Homo sapien
tcccacattctctgcattcataagg

SEQ ID NO: 5773159 - DNA, 25 bp, Homo sapien
cctacattcaccacactcatgacgc

SEQ ID NO: 5773160 - DNA, 25 bp, Homo sapien
ctgacttatatgccatggcacatgg

SEQ ID NO: 5773161 - DNA, 25 bp, Homo sapien
cagattctctggaccacaactgggt

SEQ ID NO: 5773162 - DNA, 25 bp, Homo sapien
cacaaccatattcactggaaaattt

SEQ ID NO: 5773163 - DNA, 25 bp, Homo sapien
gttgaatgaggctagagctctggct

SEQ ID NO: 5773164 - DNA, 25 bp, Homo sapien
ggttttcctacattcaccacactca

SEQ ID NO: 5773165 - DNA, 25 bp, Homo sapien
cgcagtacaggaacctctgagactc

SEQ ID NO: 5773166 - DNA, 25 bp, Homo sapien
cacctccacacctatagtctgacaa

SEQ ID NO: 5773167 - DNA, 25 bp, Homo sapien
ttcactgcattcataaggtctttct

SEQ ID NO: 5773168 - DNA, 25 bp, Homo sapien
tcactgcaacttccgccttctgggt

SEQ ID NO: 5773169 - DNA, 25 bp, Homo sapien
cagggatgttacatgtgcaaagttc

SEQ ID NO: 5773170 - DNA, 25 bp, Homo sapien
ccggtcacaaatgtagcctcatcca

SEQ ID NO: 5773171 - DNA, 25 bp, Homo sapien
ttgtctaaaggatttcccacactca

SEQ ID NO: 5773172 - DNA, 25 bp, Homo sapien
gtccctcagcgcgactgccgccatt

SEQ ID NO: 5773173 - DNA, 25 bp, Homo sapien
ggctaaaggatttctcacattcact

SEQ ID NO: 5773174 - DNA, 25 bp, Homo sapien
cactgataaggcatttctccagtgt

SEQ ID NO: 5773175 - DNA, 25 bp, Homo sapien
ttgtaataactttttgcattgaaaa

SEQ ID NO: 5773176 - DNA, 25 bp, Homo sapien
tcccgcactcgccacattcataagg

SEQ ID NO: 5773177 - DNA, 25 bp, Homo sapien
agtacagaggtttgcttctctgagc

SEQ ID NO: 5773178 - DNA, 25 bp, Homo sapien
tgggtaaagggtttcccacattgac

SEQ ID NO: 5773179 - DNA, 25 bp, Homo sapien
ggagctcccactcttcttgggagaa

SEQ ID NO: 5773180 - DNA, 25 bp, Homo sapien
ggctagagctttgtctaaaggattt

SEQ ID NO: 5773181 - DNA, 25 bp, Homo sapien
gtgtatactctaaagtcagagaaaa

SEQ ID NO: 5773182 - DNA, 25 bp, Homo sapien
cagaatgtggaaaaattcattacaa

SEQ ID NO: 5773183 - DNA, 25 bp, Homo sapien
cagtatgaattctccggtgttgaat

SEQ ID NO: 5773184 - DNA, 25 bp, Homo sapien
tttgtattttagtagacatgggatt

SEQ ID NO: 5773185 - DNA, 25 bp, Homo sapien
tgaattctctggtgttgaatgagtt

SEQ ID NO: 5773186 - DNA, 25 bp, Homo sapien
cactcctccagtgtgacgtctctgg

SEQ ID NO: 5773187 - DNA, 25 bp, Homo sapien
tctctggtggtgaatgaattcagat

SEQ ID NO: 5773188 - DNA, 25 bp, Homo sapien
tcttgggagaaataaatggccacat

SEQ ID NO: 5773189 - DNA, 25 bp, Homo sapien
aggcctttctccagagtgaactctc

SEQ ID NO: 5773190 - DNA, 25 bp, Homo sapien
tcttcattgtaatgcttttgatgct

SEQ ID NO: 5773191 - DNA, 25 bp, Homo sapien
tctcctccagtgctattatactgaa

SEQ ID NO: 5773192 - DNA, 25 bp, Homo sapien
atttgcagctaaaagatttcccaca

SEQ ID NO: 5773193 - DNA, 25 bp, Homo sapien
gctagcactttggctaaaagacttt

SEQ ID NO: 5773194 - DNA, 25 bp, Homo sapien
gagtctcactctgttgcctgggctg

SEQ ID NO: 5773195 - DNA, 25 bp, Homo sapien
aaggtcataccctgagccgagtccc

SEQ ID NO: 5773196 - DNA, 25 bp, Homo sapien
tgaacctgtaatttcacctccacac

SEQ ID NO: 5773197 - DNA, 25 bp, Homo sapien
actctttggtgctgaataaggtctg

SEQ ID NO: 5773198 - DNA, 25 bp, Homo sapien
tgggtgggtgtattgcccttagaag

SEQ ID NO: 5773199 - DNA, 25 bp, Homo sapien
gtggctcctcaccactgggagtggc

SEQ ID NO: 5773200 - DNA, 25 bp, Homo sapien
tcatggtgacctctgacctgacaaa

SEQ ID NO: 5773201 - DNA, 25 bp, Homo sapien
ctcagcgcgactgccgccattgagc

SEQ ID NO: 5773202 - DNA, 25 bp, Homo sapien
cattcccttcacatttaaggccttt

SEQ ID NO: 5773203 - DNA, 25 bp, Homo sapien
tctgatttgtgggtaaagggtttcc

SEQ ID NO: 5773204 - DNA, 25 bp, Homo sapien
ttcagtgtgaactctccgatgtcga

SEQ ID NO: 5773205 - DNA, 25 bp, Homo sapien
aaatggcttcagcctcagaaattgg

SEQ ID NO: 5773206 - DNA, 25 bp, Homo sapien
ttgtgtaagattaggtggcactttt

SEQ ID NO: 5773207 - DNA, 25 bp, Homo sapien
agttctccagcatcacatcgcagta

SEQ ID NO: 5773208 - DNA, 25 bp, Homo sapien
agcctcagaaattggcagtgacata

SEQ ID NO: 5773209 - DNA, 25 bp, Homo sapien
tggtgctcagccgcaggcaaaatgt

SEQ ID NO: 5773210 - DNA, 25 bp, Homo sapien
tggcgcagctcacccgaggtggtgt

SEQ ID NO: 5773211 - DNA, 25 bp, Homo sapien
agagtacagaggtttgcttctctga

SEQ ID NO: 5773212 - DNA, 25 bp, Homo sapien
cccagggatgttacatgtgcaaagt

SEQ ID NO: 5773213 - DNA, 25 bp, Homo sapien
aggcctccccacaggtgaaataatt

SEQ ID NO: 5773214 - DNA, 25 bp, Homo sapien
ttgtctaaaggatttcccgcactcg

SEQ ID NO: 5773215 - DNA, 25 bp, Homo sapien
tttttggagacggagtctcactctg

SEQ ID NO: 5773216 - DNA, 25 bp, Homo sapien
taaggcctttctccagagtgaactc

SEQ ID NO: 5773217 - DNA, 25 bp, Homo sapien
tgatgctgaacaagtgtgtgtttgt

SEQ ID NO: 5773218 - DNA, 25 bp, Homo sapien
aggcaaaatgtctttcaagactggg

SEQ ID NO: 5773219 - DNA, 25 bp, Homo sapien
gacgcactcctccagtgtgacgtct

SEQ ID NO: 5773220 - DNA, 25 bp, Homo sapien
agagcaatacagaacaaagagctgt

SEQ ID NO: 5773221 - DNA, 25 bp, Homo sapien
tcataccctgagccgagtccctcag

SEQ ID NO: 5773222 - DNA, 25 bp, Homo sapien
cagagcgctgtctaaaagatttgcc

SEQ ID NO: 5773223 - DNA, 25 bp, Homo sapien
tgaacctcctcagagcttcccacat

SEQ ID NO: 5773224 - DNA, 25 bp, Homo sapien
cggcagattagaaattacaatgaac

SEQ ID NO: 5773225 - DNA, 25 bp, Homo sapien
ctccagcatcacatcgcagtacagg

SEQ ID NO: 5773226 - DNA, 25 bp, Homo sapien
gctcctttgcaggacctgggcaaca

SEQ ID NO: 5773227 - DNA, 25 bp, Homo sapien
gcagattagaaattacaatgaacct

SEQ ID NO: 5773228 - DNA, 25 bp, Homo sapien
ttgactgcactcataaggtctttct

SEQ ID NO: 5773229 - DNA, 25 bp, Homo sapien
tttctccagtgtgaactctttggtg

SEQ ID NO: 5773230 - DNA, 25 bp, Homo sapien
caaccatattcactggaaaatttgt

SEQ ID NO: 5773231 - DNA, 25 bp, Homo sapien
gcactttggctaaaagactttccac

SEQ ID NO: 5773232 - DNA, 25 bp, Homo sapien
tgtcgaatgagattgaagatttgtc

SEQ ID NO: 5773233 - DNA, 25 bp, Homo sapien
aaagaaatagcacattcccttcaca

SEQ ID NO: 5773234 - DNA, 25 bp, Homo sapien
ttctccactgtgaattctctggtgt

SEQ ID NO: 5773235 - DNA, 25 bp, Homo sapien
tgcttctctgagcactgtggggaag

SEQ ID NO: 5773236 - DNA, 25 bp, Homo sapien
ccacactcacagcactgataaggcc

SEQ ID NO: 5773237 - DNA, 25 bp, Homo sapien
tcaagactgggacacacatcttaat

SEQ ID NO: 5773238 - DNA, 25 bp, Homo sapien
gcatttctccagtgtgaactcttct

SEQ ID NO: 5773239 - DNA, 25 bp, Homo sapien
tttctgataatgatctcagcgatag

SEQ ID NO: 5773240 - DNA, 25 bp, Homo sapien
agtctcctccagtgctattatactg

SEQ ID NO: 5773241 - DNA, 25 bp, Homo sapien
caccagtctacactgacttatatgc

SEQ ID NO: 5773242 - DNA, 25 bp, Homo sapien
gcttcccacatacctgaaacttatg

SEQ ID NO: 5773243 - DNA, 25 bp, Homo sapien
aggaacctctgagactcatcaagga

SEQ ID NO: 5773244 - DNA, 25 bp, Homo sapien
tctgggtgggtgtattgcccttaga

SEQ ID NO: 5773245 - DNA, 25 bp, Homo sapien
caattactgttgaacctgtaatttc

SEQ ID NO: 5773246 - DNA, 25 bp, Homo sapien
gacctgggcaacagattcccctcac

SEQ ID NO: 5773247 - DNA, 25 bp, Homo sapien
ttttagtagacatgggatttcacca

SEQ ID NO: 5773248 - DNA, 25 bp, Homo sapien
ttctccagagtgaactctctggtgt

SEQ ID NO: 5773249 - DNA, 25 bp, Homo sapien
cttctctgagcactgtggggaagtg

SEQ ID NO: 5773250 - DNA, 25 bp, Homo sapien
tttacctggagtttctgtcccaatt

SEQ ID NO: 5773251 - DNA, 25 bp, Homo sapien
aacagtccctatcccgggcctggcg

SEQ ID NO: 5773252 - DNA, 25 bp, Homo sapien
caagcagtttccaggctggtgaatc

SEQ ID NO: 5773253 - DNA, 25 bp, Homo sapien
gaagtctccggtgctgaatgaggcc

SEQ ID NO: 5773254 - DNA, 25 bp, Homo sapien
ctcagattctctggaccacaactgg

SEQ ID NO: 5773255 - DNA, 25 bp, Homo sapien
tacctggagtttctgtcccaattac

SEQ ID NO: 5773256 - DNA, 25 bp, Homo sapien
gattgaagatttgtctaaaggattt

SEQ ID NO: 5773257 - DNA, 25 bp, Homo sapien
taaagggtttcccacattgactgca

SEQ ID NO: 5773258 - DNA, 25 bp, Homo sapien
tgtttgtggcttgaagcttttctgt

SEQ ID NO: 5773259 - DNA, 25 bp, Homo sapien
tgtgaaatggcttcagcctcagaaa

SEQ ID NO: 5773260 - DNA, 25 bp, Homo sapien
gtcctgacctgtatagatacactct

SEQ ID NO: 5773261 - DNA, 25 bp, Homo sapien
agcacattcccttcacatttaaggc

SEQ ID NO: 5773262 - DNA, 25 bp, Homo sapien
cggtgctgaatgaggccagagcgct

SEQ ID NO: 5773263 - DNA, 25 bp, Homo sapien
gagtccctcagcgcgactgccgcca

SEQ ID NO: 5773264 - DNA, 25 bp, Homo sapien
acatcttttgtccagtgtgaatttg

SEQ ID NO: 5773265 - DNA, 25 bp, Homo sapien
tcgccacattcataaggcctttctc

SEQ ID NO: 5773266 - DNA, 25 bp, Homo sapien
tgaatgaggctagagctctggctaa

SEQ ID NO: 5773267 - DNA, 25 bp, Homo sapien
acactcatgacgcactcctccagtg

SEQ ID NO: 5773268 - DNA, 25 bp, Homo sapien
ctcatcaaggagctcccactcttct

SEQ ID NO: 5773269 - DNA, 25 bp, Homo sapien
tgctcagaagctatcgcctcattct

SEQ ID NO: 5773270 - DNA, 25 bp, Homo sapien
tgatgctggtgaaggtcagcactga

SEQ ID NO: 5773271 - DNA, 25 bp, Homo sapien
gcattcataaggcctttctccagtg

SEQ ID NO: 5773272 - DNA, 25 bp, Homo sapien
cagtgtgaactctccgatgtcgaat

SEQ ID NO: 5773273 - DNA, 25 bp, Homo sapien
gctaggaattatgtggatctcctgt

SEQ ID NO: 5773274 - DNA, 25 bp, Homo sapien
ttcagaacagacactctgatgctga

SEQ ID NO: 5773275 - DNA, 25 bp, Homo sapien
agagtcattccatctaatttactgc

SEQ ID NO: 5773276 - DNA, 25 bp, Homo sapien
gggagtggcttcgtgttggagtagg

SEQ ID NO: 5773277 - DNA, 25 bp, Homo sapien
atcaggataaatttgcggctaaagg

SEQ ID NO: 5773278 - DNA, 25 bp, Homo sapien
gcattgaaaaatgcctgtatatgct

SEQ ID NO: 5773279 - DNA, 25 bp, Homo sapien
gcactcataaggtctttctccagtg

SEQ ID NO: 5773280 - DNA, 25 bp, Homo sapien
attctccggtgttgaatgaggtcag

SEQ ID NO: 5773281 - DNA, 25 bp, Homo sapien
ggggatgtggtttggtgctcagccg

SEQ ID NO: 5773282 - DNA, 25 bp, Homo sapien
acaggtgaaataattcaacacatgg

SEQ ID NO: 5773283 - DNA, 25 bp, Homo sapien
tctgtcccgtccctcagtcgcgacc

SEQ ID NO: 5773284 - DNA, 25 bp, Homo sapien
tctaaagtcagagaaaagacatgaa

SEQ ID NO: 5773285 - DNA, 25 bp, Homo sapien
tttgcacaggggatgtggtttggtg

SEQ ID NO: 5773286 - DNA, 25 bp, Homo sapien
atgaggttagatttgtagctaaagg

SEQ ID NO: 5773287 - DNA, 25 bp, Homo sapien
gcattcataaggtctttctccagtg

SEQ ID NO: 5773288 - DNA, 25 bp, Homo sapien
gtgcaaagttctccagcatcacatc

SEQ ID NO: 5773289 - DNA, 25 bp, Homo sapien
gcctcagcctcccaagtggctggga

SEQ ID NO: 5773290 - DNA, 25 bp, Homo sapien
caacagattcccctcaccagtgcta

SEQ ID NO: 5773291 - DNA, 25 bp, Homo sapien
ggctcctcaccactgggagtggctt

SEQ ID NO: 5773292 - DNA, 25 bp, Homo sapien
caatacaggaacacaaagcctggca

SEQ ID NO: 5773293 - DNA, 25 bp, Homo sapien
aagatggctaccacagtctcctcca

SEQ ID NO: 5773294 - DNA, 25 bp, Homo sapien
agtgtgtgtttgtggcttgaagctt

SEQ ID NO: 5773295 - DNA, 25 bp, Homo sapien
ctccgtggactaggcggggagcggc

SEQ ID NO: 5773296 - DNA, 25 bp, Homo sapien
catattcactggaaaatttgtagat

SEQ ID NO: 5773297 - DNA, 25 bp, Homo sapien
gctctggctaaaggatttcccacat

SEQ ID NO: 5773298 - DNA, 25 bp, Homo sapien
ggagagtacagaggtttgcttctct

SEQ ID NO: 5773299 - DNA, 25 bp, Homo sapien
tcttgtgtaagattaggtggcactt

SEQ ID NO: 5773300 - DNA, 25 bp, Homo sapien
gcctttctccagagtgaactctctg

SEQ ID NO: 5773301 - DNA, 25 bp, Homo sapien
agccgagtccctcagcgcgactgcc

SEQ ID NO: 5773302 - DNA, 25 bp, Homo sapien
tggaatctgcagccggtcacaaatg

SEQ ID NO: 5773303 - DNA, 25 bp, Homo sapien
agctcccactcttcttgggagaaat

SEQ ID NO: 5773304 - DNA, 25 bp, Homo sapien
atgaggttagagaattgtctaaagg

SEQ ID NO: 5773305 - DNA, 25 bp, Homo sapien
actttcgcgacttctctgtcccgtc

SEQ ID NO: 5773306 - DNA, 25 bp, Homo sapien
attctccattccatggcaataaccc

SEQ ID NO: 5773307 - DNA, 25 bp, Homo sapien
catcacatcgcagtacaggaacctc

SEQ ID NO: 5773308 - DNA, 25 bp, Homo sapien
cagtgtgaactctttggtgctgaat

SEQ ID NO: 5773309 - DNA, 25 bp, Homo sapien
attacaagcatcatgtgagaccgac

SEQ ID NO: 5773310 - DNA, 25 bp, Homo sapien
gctaccacagtctcctccagtgcta

SEQ ID NO: 5773311 - DNA, 25 bp, Homo sapien
aaacagaagatcctgagaatttctg

SEQ ID NO: 5773312 - DNA, 25 bp, Homo sapien
tttcttcagtgtgaactctccgatg

SEQ ID NO: 5773313 - DNA, 25 bp, Homo sapien
cccttcatgctgacatcactattct

SEQ ID NO: 5773314 - DNA, 25 bp, Homo sapien
atgagattgaagatttgtctaaagg

SEQ ID NO: 5773315 - DNA, 25 bp, Homo sapien
gtaaacagaagatcctgagaatttc

SEQ ID NO: 5773316 - DNA, 25 bp, Homo sapien
caaagtttaaatttacgaagatggc

SEQ ID NO: 5773317 - DNA, 25 bp, Homo sapien
cactacactcaaacatcttttgtcc

SEQ ID NO: 5773318 - DNA, 25 bp, Homo sapien
cttcacatttaaggcctttcttcag

SEQ ID NO: 5773319 - DNA, 25 bp, Homo sapien
attctgcttacaagtcattctatgc

SEQ ID NO: 5773320 - DNA, 25 bp, Homo sapien
tttcatggtgacctctgacctgaca

SEQ ID NO: 5773321 - DNA, 25 bp, Homo sapien
gtctcactctgttgcctgggctgga

SEQ ID NO: 5773322 - DNA, 25 bp, Homo sapien
ttcactggaaaatttgtagatgaac

SEQ ID NO: 5773323 - DNA, 25 bp, Homo sapien
gaattctccggtgttgaatgaggtc

SEQ ID NO: 5773324 - DNA, 25 bp, Homo sapien
tagcactttggctaaaagactttcc

SEQ ID NO: 5773325 - DNA, 25 bp, Homo sapien
tttcgcgacttctctgtcccgtccc

SEQ ID NO: 5773326 - DNA, 25 bp, Homo sapien
cctcaccactgggagtggcttcgtg

SEQ ID NO: 5773327 - DNA, 25 bp, Homo sapien
tagaaattacaatgaacctcctcag

SEQ ID NO: 5773328 - DNA, 25 bp, Homo sapien
agaacctctggcccactttcgcgac

SEQ ID NO: 5773329 - DNA, 25 bp, Homo sapien
ctcccactcttcttgggagaaataa

SEQ ID NO: 5773330 - DNA, 25 bp, Homo sapien
gtgctcagccgcaggcaaaatgtct

SEQ ID NO: 5773331 - DNA, 25 bp, Homo sapien
ttcttgcaagtgaaggctttctcac

SEQ ID NO: 5773332 - DNA, 25 bp, Homo sapien
tctgcttacaagtcattctatgcaa

SEQ ID NO: 5773333 - DNA, 25 bp, Homo sapien
accctacatgcttgggctattaata

SEQ ID NO: 5773334 - DNA, 25 bp, Homo sapien
ctgtcccaattactgttgaacctgt

SEQ ID NO: 5773335 - DNA, 25 bp, Homo sapien
aaagcctggcagtctttactttgag

SEQ ID NO: 5773336 - DNA, 25 bp, Homo sapien
cctgggcaacagattcccctcacca

SEQ ID NO: 5773337 - DNA, 25 bp, Homo sapien
atactctaaagtcagagaaaagaca

SEQ ID NO: 5773338 - DNA, 25 bp, Homo sapien
cacatggaatctgcagccggtcaca

SEQ ID NO: 5773339 - DNA, 25 bp, Homo sapien
gcagaagcctctcatgcttgtgcta

SEQ ID NO: 5773340 - DNA, 25 bp, Homo sapien
ccactttcgcgacttctctgtcccg

SEQ ID NO: 5773341 - DNA, 25 bp, Homo sapien
gcaggacctgggcaacagattcccc

SEQ ID NO: 5773342 - DNA, 25 bp, Homo sapien
ttatgtggatctcctgtggacaact

SEQ ID NO: 5773343 - DNA, 25 bp, Homo sapien
tttcaagactgggacacacatctta

SEQ ID NO: 5773344 - DNA, 25 bp, Homo sapien
tttactttgaggccttgggcagcag

SEQ ID NO: 5773345 - DNA, 25 bp, Homo sapien
acactctgctcagaagctatcgcct

SEQ ID NO: 5773346 - DNA, 25 bp, Homo sapien
tctttcaagactgggacacacatct

SEQ ID NO: 5773347 - DNA, 25 bp, Homo sapien
ctgacagcacaactcagattctctg

SEQ ID NO: 5773348 - DNA, 25 bp, Homo sapien
ttcactacactcaaacatcttttgt

SEQ ID NO: 5773349 - DNA, 25 bp, Homo sapien
cgcccgccttggcctcccaaagtgt

SEQ ID NO: 5773350 - DNA, 25 bp, Homo sapien
aacctgtaatttcacctccacacct

SEQ ID NO: 5773351 - DNA, 25 bp, Homo sapien
cgtctctggtggtgaatgaattcag

SEQ ID NO: 5773352 - DNA, 25 bp, Homo sapien
ctctctggtgttcaatgaggttaga

SEQ ID NO: 5773353 - DNA, 25 bp, Homo sapien
ctctgttgcctgggctggagtgcag

SEQ ID NO: 5773354 - DNA, 25 bp, Homo sapien
tttctccagtatgaagtctccggtg

SEQ ID NO: 5773355 - DNA, 25 bp, Homo sapien
tagacatgggatttcaccatgttgc

SEQ ID NO: 5773356 - DNA, 25 bp, Homo sapien
aatttgtagatgaacttttagaaga

SEQ ID NO: 5773357 - DNA, 25 bp, Homo sapien
tgtgggtgctcaaagtttaaattta

SEQ ID NO: 5773358 - DNA, 25 bp, Homo sapien
ctcatgcacatggtgtgcacctgcc

SEQ ID NO: 5773359 - DNA, 25 bp, Homo sapien
tgcctccttttcatggtgacctctg

SEQ ID NO: 5773360 - DNA, 25 bp, Homo sapien
ttttgcattgaaaaatgcctgtata

SEQ ID NO: 5773361 - DNA, 25 bp, Homo sapien
agtttgagatctccacaaaatctat

SEQ ID NO: 5773362 - DNA, 25 bp, Homo sapien
cacatttgctacactcataaagccc

SEQ ID NO: 5773363 - DNA, 25 bp, Homo sapien
ataatttccccaagcaaatgggaga

SEQ ID NO: 5773364 - DNA, 25 bp, Homo sapien
aactctctggtgtcgaaaaaggcta

SEQ ID NO: 5773365 - DNA, 25 bp, Homo sapien
tacactgacttatatgccatggcac

SEQ ID NO: 5773366 - DNA, 25 bp, Homo sapien
ttctgagtacagaaagtttgagatc

SEQ ID NO: 5773367 - DNA, 25 bp, Homo sapien
gagtacagaaagtttgagatctcca

SEQ ID NO: 5773368 - DNA, 25 bp, Homo sapien
atacaggaacacaaagcctggcagt

SEQ ID NO: 5773369 - DNA, 25 bp, Homo sapien
agcaaatgggagagtacagaggttt

SEQ ID NO: 5773370 - DNA, 25 bp, Homo sapien
ccactgtgggtgctcaaagtttaaa

SEQ ID NO: 5773371 - DNA, 25 bp, Homo sapien
tgaggtgagttttctgggtgggtgt

SEQ ID NO: 5773372 - DNA, 25 bp, Homo sapien
actcatgacgcactcctccagtgtg

SEQ ID NO: 5773373 - DNA, 25 bp, Homo sapien
gggattgtcacaactgcctcctttt

SEQ ID NO: 5773374 - DNA, 25 bp, Homo sapien
gcgactgccgccattgagctccgtg

SEQ ID NO: 5773375 - DNA, 25 bp, Homo sapien
cacatggtgtgcacctgccaggtgg

SEQ ID NO: 5773376 - DNA, 25 bp, Homo sapien
ttaatctcactgaggtgagttttct

SEQ ID NO: 5773377 - DNA, 25 bp, Homo sapien
agctaaaagatttcccacaatcact

SEQ ID NO: 5773378 - DNA, 25 bp, Homo sapien
gtgtgcacctgccaggtggtagggg

SEQ ID NO: 5773379 - DNA, 25 bp, Homo sapien
atcagaatgtggaaaaattcattac

SEQ ID NO: 5773380 - DNA, 25 bp, Homo sapien
cactttttgctaaaggattcctcac

SEQ ID NO: 5773381 - DNA, 25 bp, Homo sapien
gagattgaagatttgtctaaaggat

SEQ ID NO: 5773382 - DNA, 25 bp, Homo sapien
aataattcaacacatggaatctgca

SEQ ID NO: 5773383 - DNA, 25 bp, Homo sapien
tctaatttactgcagtcttctccac

SEQ ID NO: 5773384 - DNA, 25 bp, Homo sapien
agagctttgtctaaaggatttcccg

SEQ ID NO: 5773385 - DNA, 25 bp, Homo sapien
atggcaccagtctacactgacttat

SEQ ID NO: 5773386 - DNA, 25 bp, Homo sapien
ggcacatggctcctttgcaggacct

SEQ ID NO: 5773387 - DNA, 25 bp, Homo sapien
cagggctcttcttcattgtaatgct

SEQ ID NO: 5773388 - DNA, 25 bp, Homo sapien
ggcttcagcctcagaaattggcagt

SEQ ID NO: 5773389 - DNA, 25 bp, Homo sapien
agtgtgaactctctggtgttcaatg

SEQ ID NO: 5773390 - DNA, 25 bp, Homo sapien
gctggtgaatcagaatgtggaaaaa

SEQ ID NO: 5773391 - DNA, 25 bp, Homo sapien
gcaaagttctccagcatcacatcgc

SEQ ID NO: 5773392 - DNA, 25 bp, Homo sapien
gacctctctggtgttgaatgaggct

SEQ ID NO: 5773393 - DNA, 25 bp, Homo sapien
cattgactgcactcataaggtcttt

SEQ ID NO: 5773394 - DNA, 25 bp, Homo sapien
ctattatactgaataaagaaatagc

SEQ ID NO: 5773395 - DNA, 25 bp, Homo sapien
ctgccatcacattgtcccttctgag

SEQ ID NO: 5773396 - DNA, 25 bp, Homo sapien
tccccaagcaaatgggagagtacag

SEQ ID NO: 5773397 - DNA, 25 bp, Homo sapien
atctgcagccggtcacaaatgtagc

SEQ ID NO: 5773398 - DNA, 25 bp, Homo sapien
gaactctctggtgttgaatgaggct

SEQ ID NO: 5773399 - DNA, 25 bp, Homo sapien
cttacaagtcattctatgcaatgaa

SEQ ID NO: 5773400 - DNA, 25 bp, Homo sapien
actataggcgcatgctgccacgcct

SEQ ID NO: 5773401 - DNA, 25 bp, Homo sapien
tgaacaagtgtgtgtttgtggcttg

SEQ ID NO: 5773402 - DNA, 25 bp, Homo sapien
gtggatctcctgtggacaactgaac

SEQ ID NO: 5773403 - DNA, 25 bp, Homo sapien
atgtagcctcatccaccttcctttt

SEQ ID NO: 5773404 - DNA, 25 bp, Homo sapien
ccatggcacatggctcctttgcagg

SEQ ID NO: 5773405 - DNA, 25 bp, Homo sapien
ctacccaagtatgacttttgcacag

SEQ ID NO: 5773406 - DNA, 25 bp, Homo sapien
aaagtgttaggattacaccatgccc

SEQ ID NO: 5773407 - DNA, 25 bp, Homo sapien
ctgagctcaggcaatccgcccgcct

SEQ ID NO: 5773408 - DNA, 25 bp, Homo sapien
tctccagtatgaagtctccggtgct

SEQ ID NO: 5773409 - DNA, 25 bp, Homo sapien
tctctgcattcataaggtctttctc

SEQ ID NO: 5773410 - DNA, 25 bp, Homo sapien
ctctggaccacaactgggtcaggtg

SEQ ID NO: 5773411 - DNA, 25 bp, Homo sapien
aagattaggtggcactttttgctaa

SEQ ID NO: 5773412 - DNA, 25 bp, Homo sapien
tctcctgcctcagcctcccaagtgg

SEQ ID NO: 5773413 - DNA, 25 bp, Homo sapien
tgcctgggctggagtgcagtggtgc

SEQ ID NO: 5773414 - DNA, 25 bp, Homo sapien
tggagtaggtccgtgggggctggga

SEQ ID NO: 5773415 - DNA, 25 bp, Homo sapien
cagctcactgcaacttccgccttct

SEQ ID NO: 5773416 - DNA, 25 bp, Homo sapien
ggggaagtgactcatgcacatggtg

SEQ ID NO: 5773417 - DNA, 25 bp, Homo sapien
aaagatttgccacattcactgcact

SEQ ID NO: 5773418 - DNA, 25 bp, Homo sapien
atcttttgtccagtgtgaatttgct

SEQ ID NO: 5773419 - DNA, 25 bp, Homo sapien
ccaaagtgttaggattacaccatgc

SEQ ID NO: 5773420 - DNA, 25 bp, Homo sapien
acagtctcctccagtgctattatac

SEQ ID NO: 5773421 - DNA, 25 bp, Homo sapien
agtgacataaatcaggctataggcc

SEQ ID NO: 5773422 - DNA, 25 bp, Homo sapien
cagcgatagtaaacagaagatcctg

SEQ ID NO: 5773423 - DNA, 25 bp, Homo sapien
gtggtgcaatctcagctcactgcaa

SEQ ID NO: 5773424 - DNA, 25 bp, Homo sapien
ggggctgggaaggcctccccacagg

SEQ ID NO: 5773425 - DNA, 25 bp, Homo sapien
ctttttgctaaaggattcctcacat

SEQ ID NO: 5773426 - DNA, 25 bp, Homo sapien
ctgccaggtggtaggggtgaaatgt

SEQ ID NO: 5773427 - DNA, 25 bp, Homo sapien
ttgaatgagttccgatttgcagcta

SEQ ID NO: 5773428 - DNA, 25 bp, Homo sapien
atgtgcaccaagcagtttccaggct

SEQ ID NO: 5773429 - DNA, 25 bp, Homo sapien
gtaatgcttttgatgctggtgaagg

SEQ ID NO: 5773430 - DNA, 25 bp, Homo sapien
catccaccttccttttccagggctc

SEQ ID NO: 5773431 - DNA, 25 bp, Homo sapien
tccacacctatagtctgacaacaaa

SEQ ID NO: 5773432 - DNA, 25 bp, Homo sapien
ggcaccagtctacactgacttatat

SEQ ID NO: 5773433 - DNA, 25 bp, Homo sapien
ctccagtgtgaactctttggtgttg

SEQ ID NO: 5773434 - DNA, 25 bp, Homo sapien
ataactttttgcattgaaaaatgcc

SEQ ID NO: 5773435 - DNA, 25 bp, Homo sapien
ggaaaatttgtagatgaacttttag

SEQ ID NO: 5773436 - DNA, 25 bp, Homo sapien
cccgaggtggtgtcgcagaacctct

SEQ ID NO: 5773437 - DNA, 25 bp, Homo sapien
gagtggcttcgtgttggagtaggtc

SEQ ID NO: 5773438 - DNA, 25 bp, Homo sapien
tttccccaagcaaatgggagagtac

SEQ ID NO: 5773439 - DNA, 25 bp, Homo sapien
tctccggtgttgaatgaggtcagat

SEQ ID NO: 5773440 - DNA, 25 bp, Homo sapien
atgcctgtatatgcttgctgctgct

SEQ ID NO: 5773441 - DNA, 25 bp, Homo sapien
atgctgacatcactattctgcttac

SEQ ID NO: 5773442 - DNA, 25 bp, Homo sapien
gacaactgaacaaaattcacgttca

SEQ ID NO: 5773443 - DNA, 25 bp, Homo sapien
gaatgagattgaagatttgtctaaa

SEQ ID NO: 5773444 - DNA, 25 bp, Homo sapien
acaggaacctctgagactcatcaag

SEQ ID NO: 5773445 - DNA, 25 bp, Homo sapien
tctgggttcaagcgattctcctgcc

SEQ ID NO: 5773446 - DNA, 25 bp, Homo sapien
ccgcactcgccacattcataaggcc

SEQ ID NO: 5773447 - DNA, 25 bp, Homo sapien
ggaagtgactcatgcacatggtgtg

SEQ ID NO: 5773448 - DNA, 25 bp, Homo sapien
ttccgccttctgggttcaagcgatt

SEQ ID NO: 5773449 - DNA, 25 bp, Homo sapien
ttctctggaccacaactgggtcagg

SEQ ID NO: 5773450 - DNA, 25 bp, Homo sapien
gtggactaggcggggagcggcggcc

SEQ ID NO: 5773451 - DNA, 25 bp, Homo sapien
ctgagactcatcaaggagctcccac

SEQ ID NO: 5773452 - DNA, 25 bp, Homo sapien
actgaagcagaagcctctcatgctt

SEQ ID NO: 5773453 - DNA, 25 bp, Homo sapien
tgtcccgtccctcagtcgcgacctc

SEQ ID NO: 5773454 - DNA, 25 bp, Homo sapien
aaattggcagtgacataaatcaggc

SEQ ID NO: 5773455 - DNA, 25 bp, Homo sapien
ccatgttgcccaggctggtcttgaa

SEQ ID NO: 5773456 - DNA, 25 bp, Homo sapien
ccacactcatgacgcactcctccag

SEQ ID NO: 5773457 - DNA, 25 bp, Homo sapien
gcagtctttactttgaggccttggg

SEQ ID NO: 5773458 - DNA, 25 bp, Homo sapien
atttactgcagtcttctccactccc

SEQ ID NO: 5773459 - DNA, 25 bp, Homo sapien
ttctgtatgcactgatcctacacaa

SEQ ID NO: 5773460 - DNA, 25 bp, Homo sapien
tgaacttttagaagagtcattccat

SEQ ID NO: 5773461 - DNA, 25 bp, Homo sapien
cctcctcagagcttcccacatacct

SEQ ID NO: 5773462 - DNA, 25 bp, Homo sapien
caaaattcacgttcacagaagcact

SEQ ID NO: 5773463 - DNA, 25 bp, Homo sapien
taaaggatttcccacattcactgca

SEQ ID NO: 5773464 - DNA, 25 bp, Homo sapien
tgaactctttggtgttgaatcagga

SEQ ID NO: 5773465 - DNA, 25 bp, Homo sapien
agaacacccaagattaaaggtgcgt

SEQ ID NO: 5773466 - DNA, 25 bp, Homo sapien
gcgggcattcgaacacaacagtccc

SEQ ID NO: 5773467 - DNA, 25 bp, Homo sapien
ctgggagtggcttcgtgttggagta

SEQ ID NO: 5773468 - DNA, 25 bp, Homo sapien
gaatcaggataaatttgcggctaaa

SEQ ID NO: 5773469 - DNA, 25 bp, Homo sapien
tgctgccacgcctggctaatttttt

SEQ ID NO: 5773470 - DNA, 25 bp, Homo sapien
attcattacaagcatcatgtgagac

SEQ ID NO: 5773471 - DNA, 25 bp, Homo sapien
tatgcaatgaatagaacacccaaga

SEQ ID NO: 5773472 - DNA, 25 bp, Homo sapien
gccacattcactgcactcataaggt

SEQ ID NO: 5773473 - DNA, 25 bp, Homo sapien
aagatttcccacaatcactgcactg

SEQ ID NO: 5773474 - DNA, 25 bp, Homo sapien
ctcagcgatagtaaacagaagatcc

SEQ ID NO: 5773475 - DNA, 25 bp, Homo sapien
agctatcgcctcattctccattcca

SEQ ID NO: 5773476 - DNA, 25 bp, Homo sapien
gtagcctcatccaccttccttttcc

SEQ ID NO: 5773477 - DNA, 25 bp, Homo sapien
taaaggattttccacattcactgca

SEQ ID NO: 5773478 - DNA, 25 bp, Homo sapien
taaggtctttctccactgtgaattc

SEQ ID NO: 5773479 - DNA, 25 bp, Homo sapien
cttttagaagagtcattccatctaa

SEQ ID NO: 5773480 - DNA, 25 bp, Homo sapien
gcctatcaccagtgtgaatgctgcg

SEQ ID NO: 5773481 - DNA, 25 bp, Homo sapien
atgaatagaacacccaagattaaag

SEQ ID NO: 5773482 - DNA, 25 bp, Homo sapien
ggtcttgaactcctgagctcaggca

SEQ ID NO: 5773483 - DNA, 25 bp, Homo sapien
gacagcacaactcagattctctgga

SEQ ID NO: 5773484 - DNA, 25 bp, Homo sapien
agaaagctgacagcacaactcagat

SEQ ID NO: 5773485 - DNA, 25 bp, Homo sapien
tctccagtgtgaactctttggtgct

SEQ ID NO: 5773486 - DNA, 25 bp, Homo sapien
tccacattcactgcattcataaggt

SEQ ID NO: 5773487 - DNA, 25 bp, Homo sapien
aagagctgtcttctgccatcacatt

SEQ ID NO: 5773488 - DNA, 25 bp, Homo sapien
atgaagtctccggtgctgaatgagg

SEQ ID NO: 5773489 - DNA, 25 bp, Homo sapien
agtcattccatctaatttactgcag

SEQ ID NO: 5773490 - DNA, 25 bp, Homo sapien
cttctgggttcaagcgattctcctg

SEQ ID NO: 5773491 - DNA, 25 bp, Homo sapien
attcactgcactcataaggcctatc

SEQ ID NO: 5773492 - DNA, 25 bp, Homo sapien
catgcccggccagactattttctga

SEQ ID NO: 5773493 - DNA, 25 bp, Homo sapien
gaggttagatttgtagctaaaggtt

SEQ ID NO: 5773494 - DNA, 25 bp, Homo sapien
ggtgtattgcccttagaagtcctga

SEQ ID NO: 5773495 - DNA, 25 bp, Homo sapien
acatttaaggcctttcttcagtgtg

SEQ ID NO: 5773496 - DNA, 25 bp, Homo sapien
gtgacctctctggtgttgaatgagg

SEQ ID NO: 5773497 - DNA, 25 bp, Homo sapien
tacacaaccatattcactggaaaat

SEQ ID NO: 5773498 - DNA, 25 bp, Homo sapien
gtgaatcagaatgtggaaaaattca

SEQ ID NO: 5773499 - DNA, 25 bp, Homo sapien
aagcactggggattgtcacaactgc

SEQ ID NO: 5773500 - DNA, 25 bp, Homo sapien
atctcctgtggacaactgaacaaaa

SEQ ID NO: 5773501 - DNA, 25 bp, Homo sapien
gcctccccacaggtgaaataattca

SEQ ID NO: 5773502 - DNA, 25 bp, Homo sapien
aaggtctttctccagtgtgacctct

SEQ ID NO: 5773503 - DNA, 25 bp, Homo sapien
ttctccagtgtgaactcttctatgt

SEQ ID NO: 5773504 - DNA, 25 bp, Homo sapien
catgggatttcaccatgttgcccag

SEQ ID NO: 5773505 - DNA, 25 bp, Homo sapien
tcacagcactgataaggcctttctc

SEQ ID NO: 5773506 - DNA, 25 bp, Homo sapien
aacttttagaagagtcattccatct

SEQ ID NO: 5773507 - DNA, 25 bp, Homo sapien
acaaagcctggcagtctttactttg

SEQ ID NO: 5773508 - DNA, 25 bp, Homo sapien
tgggtgctcaaagtttaaatttacg

SEQ ID NO: 5773509 - DNA, 25 bp, Homo sapien
aaaaggtaatccttagaaagctgac

SEQ ID NO: 5773510 - DNA, 25 bp, Homo sapien
acaacagtccctatcccgggcctgg

SEQ ID NO: 5773511 - DNA, 25 bp, Homo sapien
tgtcgcagaacctctggcccacttt

SEQ ID NO: 5773512 - DNA, 25 bp, Homo sapien
ttaggtggcactttttgctaaagga

SEQ ID NO: 5773513 - DNA, 25 bp, Homo sapien
gctgacatcactattctgcttacaa

SEQ ID NO: 5773514 - DNA, 25 bp, Homo sapien
tcacgttcacagaagcactggggat

SEQ ID NO: 5773515 - DNA, 25 bp, Homo sapien
gctcttcttcattgtaatgcttttg

SEQ ID NO: 5773516 - DNA, 25 bp, Homo sapien
cctcaccagtgctaggaattatgtg

SEQ ID NO: 5773517 - DNA, 25 bp, Homo sapien
tctggcccactttcgcgacttctct

SEQ ID NO: 5773518 - DNA, 25 bp, Homo sapien
gatggctaccacagtctcctccagt

SEQ ID NO: 5773519 - DNA, 25 bp, Homo sapien
gccacgcctggctaattttttgtat

SEQ ID NO: 5773520 - DNA, 25 bp, Homo sapien
atacactctgctcagaagctatcgc

SEQ ID NO: 5773521 - DNA, 25 bp, Homo sapien
gtcagcactgaagcagaagcctctc

SEQ ID NO: 5773522 - DNA, 25 bp, Homo sapien
atttgtctaaaggatttcccacact

SEQ ID NO: 5773523 - DNA, 25 bp, Homo sapien
ggaaaaattcattacaagcatcatg

SEQ ID NO: 5773524 - DNA, 25 bp, Homo sapien
taaaggctttctcacgatcactgca

SEQ ID NO: 5773525 - DNA, 25 bp, Homo sapien
tcatgacgcactcctccagtgtgac

SEQ ID NO: 5773526 - DNA, 25 bp, Homo sapien
gccgccattgagctccgtggactag

SEQ ID NO: 5773527 - DNA, 25 bp, Homo sapien
gcattcgaacacaacagtccctatc

SEQ ID NO: 5773528 - DNA, 25 bp, Homo sapien
ataaatcaggctataggcctcggca

SEQ ID NO: 5773529 - DNA, 25 bp, Homo sapien
agatacactctgctcagaagctatc

SEQ ID NO: 5773530 - DNA, 25 bp, Homo sapien
ggctataggcctcggcagattagaa

SEQ ID NO: 5773531 - DNA, 25 bp, Homo sapien
gcaaaatgtctttcaagactgggac

SEQ ID NO: 5773532 - DNA, 25 bp, Homo sapien
gaatgagttccgatttgcagctaaa

SEQ ID NO: 5773533 - DNA, 25 bp, Homo sapien
tcctccagtgctattatactgaata

SEQ ID NO: 5773534 - DNA, 25 bp, Homo sapien
acatcactattctgcttacaagtca

SEQ ID NO: 5773535 - DNA, 25 bp, Homo sapien
ttaggattacaccatgcccggccag

SEQ ID NO: 5773536 - DNA, 25 bp, Homo sapien
gagttccgatttgcagctaaaagat

SEQ ID NO: 5773537 - DNA, 25 bp, Homo sapien
tctccggtgctgaatgaggccagag

SEQ ID NO: 5773538 - DNA, 25 bp, Homo sapien
actctaaagtcagagaaaagacatg

SEQ ID NO: 5773539 - DNA, 25 bp, Homo sapien
gcactcataaggtcttgtgccagta

SEQ ID NO: 5773540 - DNA, 25 bp, Homo sapien
cagatttgcgggtaaaggattttcc

SEQ ID NO: 5773541 - DNA, 25 bp, Homo sapien
aggatttcccacattctctgcattc

SEQ ID NO: 5773542 - DNA, 25 bp, Homo sapien
tattttagtagacatgggatttcac

SEQ ID NO: 5773543 - DNA, 25 bp, Homo sapien
tgatctcagcgatagtaaacagaag

SEQ ID NO: 5773544 - DNA, 25 bp, Homo sapien
gtgaactctctggtgttgaatgagg

SEQ ID NO: 5773545 - DNA, 25 bp, Homo sapien
tgcgggtaaaggattttccacattc

SEQ ID NO: 5773546 - DNA, 25 bp, Homo sapien
cgcgacctccactgcagaaactggc

SEQ ID NO: 5773547 - DNA, 25 bp, Homo sapien
agtagacatgggatttcaccatgtt

SEQ ID NO: 5773548 - DNA, 25 bp, Homo sapien
attcacgttcacagaagcactgggg

SEQ ID NO: 5773549 - DNA, 25 bp, Homo sapien
attactgttgaacctgtaatttcac

SEQ ID NO: 5773550 - DNA, 25 bp, Homo sapien
cctgtggacaactgaacaaaattca

SEQ ID NO: 5773551 - DNA, 25 bp, Homo sapien
acttgtaataactttttgcattgaa

SEQ ID NO: 5773552 - DNA, 25 bp, Homo sapien
caggctggtcttgaactcctgagct

SEQ ID NO: 5773553 - DNA, 25 bp, Homo sapien
gcctcccaagtggctgggactatag

SEQ ID NO: 5773554 - DNA, 25 bp, Homo sapien
tcccttctgagtacagaaagtttga

SEQ ID NO: 5773555 - DNA, 25 bp, Homo sapien
caactgggtcaggtgtatactctaa

SEQ ID NO: 5773556 - DNA, 25 bp, Homo sapien
ccagtgtgaactcttctatgtcgaa

SEQ ID NO: 5773557 - DNA, 25 bp, Homo sapien
agtgttaggattacaccatgcccgg

SEQ ID NO: 5773558 - DNA, 25 bp, Homo sapien
ctttctcacatttgctacactcata

SEQ ID NO: 5773559 - DNA, 25 bp, Homo sapien
taccacagtctcctccagtgctatt

SEQ ID NO: 5773560 - DNA, 25 bp, Homo sapien
agaagatcctgagaatttctgtatg

SEQ ID NO: 5773561 - DNA, 25 bp, Homo sapien
ggcggccgaccggggcgggcattcg

SEQ ID NO: 5773562 - DNA, 25 bp, Homo sapien
gatttgcgggtaaaggattttccac

SEQ ID NO: 5773563 - DNA, 25 bp, Homo sapien
gaactctccgatgtcgaatgaggtt

SEQ ID NO: 5773564 - DNA, 25 bp, Homo sapien
ctgctactgtgtggctcctcaccac

SEQ ID NO: 5773565 - DNA, 25 bp, Homo sapien
atttgccacattcactgcactcata

SEQ ID NO: 5773566 - DNA, 25 bp, Homo sapien
tcctgcctcagcctcccaagtggct

SEQ ID NO: 5773567 - DNA, 25 bp, Homo sapien
tgaaggctttctcacatttgctaca

SEQ ID NO: 5773568 - DNA, 25 bp, Homo sapien
acctctgagactcatcaaggagctc

SEQ ID NO: 5773569 - DNA, 25 bp, Homo sapien
ccagagtgaactctctggtgtcgaa

SEQ ID NO: 5773570 - DNA, 25 bp, Homo sapien
gtcacaactgcctccttttcatggt

SEQ ID NO: 5773571 - DNA, 25 bp, Homo sapien
gaagaccctacatgcttgggctatt

SEQ ID NO: 5773572 - DNA, 25 bp, Homo sapien
ggctgggaaggcctccccacaggtg

SEQ ID NO: 5773573 - DNA, 25 bp, Homo sapien
ccctcagtcgcgacctccactgcag

SEQ ID NO: 5773574 - DNA, 25 bp, Homo sapien
ctgagtacagaaagtttgagatctc

SEQ ID NO: 5773575 - DNA, 25 bp, Homo sapien
agacatgaagaccctacatgcttgg

SEQ ID NO: 5773576 - DNA, 25 bp, Homo sapien
caggggatgtggtttggtgctcagc

SEQ ID NO: 5773577 - DNA, 25 bp, Homo sapien
ctctgagactcatcaaggagctccc

SEQ ID NO: 5773578 - DNA, 25 bp, Homo sapien
aattcagatttatggataaaggctt

SEQ ID NO: 5773579 - DNA, 25 bp, Homo sapien
actgggtcaggtgtatactctaaag

SEQ ID NO: 5773580 - DNA, 25 bp, Homo sapien
acactcaaacatcttttgtccagtg

SEQ ID NO: 5773581 - DNA, 25 bp, Homo sapien
cagtgctaggaattatgtggatctc

SEQ ID NO: 5773582 - DNA, 25 bp, Homo sapien
ataaggcctttctccagtgtgaact

SEQ ID NO: 5773583 - DNA, 25 bp, Homo sapien
tacattcaccacactcatgacgcac

SEQ ID NO: 5773584 - DNA, 25 bp, Homo sapien
tcctcagagcttcccacatacctga

SEQ ID NO: 5773585 - DNA, 25 bp, Homo sapien
aacaaagagctgtcttctgccatca

SEQ ID NO: 5773586 - DNA, 25 bp, Homo sapien
cagtggtgcaatctcagctcactgc

SEQ ID NO: 5773587 - DNA, 25 bp, Homo sapien
ataatgatctcagcgatagtaaaca

SEQ ID NO: 5773588 - DNA, 25 bp, Homo sapien
gcactggggattgtcacaactgcct

SEQ ID NO: 5773589 - DNA, 25 bp, Homo sapien
ataaggtctttctccagtgtgaact

SEQ ID NO: 5773590 - DNA, 25 bp, Homo sapien
gtgttggagtaggtccgtgggggct

SEQ ID NO: 5773591 - DNA, 25 bp, Homo sapien
tcttaacattattcttttatgccgg

SEQ ID NO: 5773592 - DNA, 25 bp, Homo sapien
ccggcataaaagaataatgttaaga

SEQ ID NO: 5773593 - DNA, 25 bp, Homo sapien
aaaggacaagtaatcttgaatatcg

SEQ ID NO: 5773594 - DNA, 25 bp, Homo sapien
cgatattcaagattacttgtccttt

SEQ ID NO: 5773595 - DNA, 25 bp, Homo sapien
cggggcgcgtgtctggaccgccgtc

SEQ ID NO: 5773596 - DNA, 25 bp, Homo sapien
gacggcggtccagacacgcgccccg

SEQ ID NO: 5773597 - DNA, 25 bp, Homo sapien
gggccggggcgcgtgtctggaccgc

SEQ ID NO: 5773598 - DNA, 25 bp, Homo sapien
gcggtccagacacgcgccccggccc

SEQ ID NO: 5773599 - DNA, 25 bp, Homo sapien
gagacggagaaataagcgagagaaa

SEQ ID NO: 5773600 - DNA, 25 bp, Homo sapien
tttctctcgcttatttctccgtctc

SEQ ID NO: 5773601 - DNA, 25 bp, Homo sapien
ggtgggctcggggtgtcaggcctcc

SEQ ID NO: 5773602 - DNA, 25 bp, Homo sapien
ggaggcctgacaccccgagcccacc

SEQ ID NO: 5773603 - DNA, 25 bp, Homo sapien
gcgccggcgagcctcggccctcgta

SEQ ID NO: 5773604 - DNA, 25 bp, Homo sapien
tacgagggccgaggctcgccggcgc

SEQ ID NO: 5773605 - DNA, 25 bp, Homo sapien
agcgccggcgagcctcggccctcgt

SEQ ID NO: 5773606 - DNA, 25 bp, Homo sapien
acgagggccgaggctcgccggcgct

SEQ ID NO: 5773607 - DNA, 25 bp, Homo sapien
gacgtcgtgggaccgtccctccctg

SEQ ID NO: 5773608 - DNA, 25 bp, Homo sapien
cagggagggacggtcccacgacgtc

SEQ ID NO: 5773609 - DNA, 25 bp, Homo sapien
gattggagtatgtcaaattgaaccg

SEQ ID NO: 5773610 - DNA, 25 bp, Homo sapien
cggttcaatttgacatactccaatc

SEQ ID NO: 5773611 - DNA, 25 bp, Homo sapien
agaaataggaatttgtatggtgtta

SEQ ID NO: 5773612 - DNA, 25 bp, Homo sapien
taacaccatacaaattcctatttct

SEQ ID NO: 5773613 - DNA, 25 bp, Homo sapien
tgaagaagggcaatgataactgggc

SEQ ID NO: 5773614 - DNA, 25 bp, Homo sapien
aacggtcgtggcatctgtggtggat

SEQ ID NO: 5773615 - DNA, 25 bp, Homo sapien
gcagctgagcctccacccagaccga

SEQ ID NO: 5773616 - DNA, 25 bp, Homo sapien
gtcgtggcatctgtggtggatcaag

SEQ ID NO: 5773617 - DNA, 25 bp, Homo sapien
tcaagacagtttctctgggtttgcc

SEQ ID NO: 5773618 - DNA, 25 bp, Homo sapien
acgagcatgaagtctgagcccagac

SEQ ID NO: 5773619 - DNA, 25 bp, Homo sapien
ttcaacattggctgcatgtacacta

SEQ ID NO: 5773620 - DNA, 25 bp, Homo sapien
tctcatggtagggttatgagtcagt

SEQ ID NO: 5773621 - DNA, 25 bp, Homo sapien
agaagacagcatgaaggatgcctgg

SEQ ID NO: 5773622 - DNA, 25 bp, Homo sapien
gtttttgttgaagactgcgcaacta

SEQ ID NO: 5773623 - DNA, 25 bp, Homo sapien
acccccactcccggatttgcttcaa

SEQ ID NO: 5773624 - DNA, 25 bp, Homo sapien
gacatcccagctcctcctagttcca

SEQ ID NO: 5773625 - DNA, 25 bp, Homo sapien
tcagaagacagcatgaaggatgcct

SEQ ID NO: 5773626 - DNA, 25 bp, Homo sapien
actataagatcctggggctccagtt

SEQ ID NO: 5773627 - DNA, 25 bp, Homo sapien
aacattgtctttgtcttgaagaagg

SEQ ID NO: 5773628 - DNA, 25 bp, Homo sapien
ctcatctggcccagaaagtgaacac

SEQ ID NO: 5773629 - DNA, 25 bp, Homo sapien
ttagcattggccacgagcatgaagt

SEQ ID NO: 5773630 - DNA, 25 bp, Homo sapien
ttcacaaactacaaagctgaagaaa

SEQ ID NO: 5773631 - DNA, 25 bp, Homo sapien
gctatttgggtttgtgcctgagaca

SEQ ID NO: 5773632 - DNA, 25 bp, Homo sapien
tcagttatgaggctacccaaccaga

SEQ ID NO: 5773633 - DNA, 25 bp, Homo sapien
aaagtgaacaccttgggggccacta

SEQ ID NO: 5773634 - DNA, 25 bp, Homo sapien
cttgattcagcttcgagggaaccag

SEQ ID NO: 5773635 - DNA, 25 bp, Homo sapien
cctgaagaacatgactgaagcagag

SEQ ID NO: 5773636 - DNA, 25 bp, Homo sapien
agtcagttgccaaaaggtggggaca

SEQ ID NO: 5773637 - DNA, 25 bp, Homo sapien
gcccctctgcaaccacaggcagctg

SEQ ID NO: 5773638 - DNA, 25 bp, Homo sapien
aagaacagttagcattggccacgag

SEQ ID NO: 5773639 - DNA, 25 bp, Homo sapien
acgggcagaaggggcttgttccctg

SEQ ID NO: 5773640 - DNA, 25 bp, Homo sapien
gctgtatactgtactgagacattac

SEQ ID NO: 5773641 - DNA, 25 bp, Homo sapien
tcagcttcgagggaaccagctgata

SEQ ID NO: 5773642 - DNA, 25 bp, Homo sapien
ctacctaatcatgtccctggtggag

SEQ ID NO: 5773643 - DNA, 25 bp, Homo sapien
gaacacagtgggtgaccaaggcttt

SEQ ID NO: 5773644 - DNA, 25 bp, Homo sapien
acgagagagtcttccaggtactgat

SEQ ID NO: 5773645 - DNA, 25 bp, Homo sapien
ggtgaatgaagaatggctggaaggg

SEQ ID NO: 5773646 - DNA, 25 bp, Homo sapien
cactcggagagaagtctaggatgtt

SEQ ID NO: 5773647 - DNA, 25 bp, Homo sapien
gcgcaactacagatttggaaagcac

SEQ ID NO: 5773648 - DNA, 25 bp, Homo sapien
tgcccctttcagaagacagcatgaa

SEQ ID NO: 5773649 - DNA, 25 bp, Homo sapien
atgataactgggccacggtcatgtt

SEQ ID NO: 5773650 - DNA, 25 bp, Homo sapien
ttgggggccactaaggcagccctgc

SEQ ID NO: 5773651 - DNA, 25 bp, Homo sapien
ttgtctttgtcttgaagaagggcaa

SEQ ID NO: 5773652 - DNA, 25 bp, Homo sapien
ctctgagtgctagctagccagctgt

SEQ ID NO: 5773653 - DNA, 25 bp, Homo sapien
ctcccctacagccaggtccgggaca

SEQ ID NO: 5773654 - DNA, 25 bp, Homo sapien
aggctttccagatgaacccaaggaa

SEQ ID NO: 5773655 - DNA, 25 bp, Homo sapien
ccacgagcatgaagtctgagcccag

SEQ ID NO: 5773656 - DNA, 25 bp, Homo sapien
gagctccggctggaacaaactaagc

SEQ ID NO: 5773657 - DNA, 25 bp, Homo sapien
gatgtgagtacccaggatgatttcc

SEQ ID NO: 5773658 - DNA, 25 bp, Homo sapien
gatccaccctcagcagcagccccag

SEQ ID NO: 5773659 - DNA, 25 bp, Homo sapien
gttcaagctgtttgcctgtgaggtg

SEQ ID NO: 5773660 - DNA, 25 bp, Homo sapien
tgaagaacagttagcattggccacg

SEQ ID NO: 5773661 - DNA, 25 bp, Homo sapien
acattggctgcatgtacactatcct

SEQ ID NO: 5773662 - DNA, 25 bp, Homo sapien
atcctggtgttatcaaaggtgaatg

SEQ ID NO: 5773663 - DNA, 25 bp, Homo sapien
tgagacaaaagaagagctccaggtc

SEQ ID NO: 5773664 - DNA, 25 bp, Homo sapien
taactgggccacggtcatgttcaac

SEQ ID NO: 5773665 - DNA, 25 bp, Homo sapien
tctctctgcttctttccttttctct

SEQ ID NO: 5773666 - DNA, 25 bp, Homo sapien
atggtagggttatgagtcagttgcc

SEQ ID NO: 5773667 - DNA, 25 bp, Homo sapien
atggtgtctaagaaactggagctcc

SEQ ID NO: 5773668 - DNA, 25 bp, Homo sapien
tctggaaggggaggctcaccgtgtg

SEQ ID NO: 5773669 - DNA, 25 bp, Homo sapien
cttttctgtgtcataccacaaaaaa

SEQ ID NO: 5773670 - DNA, 25 bp, Homo sapien
caaggaaagtgaaaaagctgatgct

SEQ ID NO: 5773671 - DNA, 25 bp, Homo sapien
acccaaccagaggacctggagtttc

SEQ ID NO: 5773672 - DNA, 25 bp, Homo sapien
gctatatgagccagtggtgatccct

SEQ ID NO: 5773673 - DNA, 25 bp, Homo sapien
tgtcttctctctgtctcctggcagc

SEQ ID NO: 5773674 - DNA, 25 bp, Homo sapien
gcttcaacattggctgcatgtacac

SEQ ID NO: 5773675 - DNA, 25 bp, Homo sapien
taagggaggctgggccccattctac

SEQ ID NO: 5773676 - DNA, 25 bp, Homo sapien
gaagtgtctggaaagggcacgagag

SEQ ID NO: 5773677 - DNA, 25 bp, Homo sapien
agagctccaggtcatgccagggaac

SEQ ID NO: 5773678 - DNA, 25 bp, Homo sapien
ctgaagaaaatgaagccctattact

SEQ ID NO: 5773679 - DNA, 25 bp, Homo sapien
gatcaagacagtttctctgggtttg

SEQ ID NO: 5773680 - DNA, 25 bp, Homo sapien
tcccggatttgcttcaacattggct

SEQ ID NO: 5773681 - DNA, 25 bp, Homo sapien
actacaagtacacggtagtcatgaa

SEQ ID NO: 5773682 - DNA, 25 bp, Homo sapien
tacagccaggtccgggacatggtgt

SEQ ID NO: 5773683 - DNA, 25 bp, Homo sapien
cactgagaagttatcttaagggagg

SEQ ID NO: 5773684 - DNA, 25 bp, Homo sapien
tcggcctcgggacagcaatgagctg

SEQ ID NO: 5773685 - DNA, 25 bp, Homo sapien
atcctgaagaacatgactgaagcag

SEQ ID NO: 5773686 - DNA, 25 bp, Homo sapien
gtttcacaaactacaaagctgaaga

SEQ ID NO: 5773687 - DNA, 25 bp, Homo sapien
aaggcagccaagtggaggcactctt

SEQ ID NO: 5773688 - DNA, 25 bp, Homo sapien
ctggtggaggccatcagcctctgga

SEQ ID NO: 5773689 - DNA, 25 bp, Homo sapien
agaggaaaagtggatggaagtgtct

SEQ ID NO: 5773690 - DNA, 25 bp, Homo sapien
gtttgtaagatttagcacccttctg

SEQ ID NO: 5773691 - DNA, 25 bp, Homo sapien
gtgtgctatttgggtttgtgcctga

SEQ ID NO: 5773692 - DNA, 25 bp, Homo sapien
ccacaggcagctgagcctccaccca

SEQ ID NO: 5773693 - DNA, 25 bp, Homo sapien
aaaactactgcctgactctgtggtg

SEQ ID NO: 5773694 - DNA, 25 bp, Homo sapien
acttccaacgagggatgctctacta

SEQ ID NO: 5773695 - DNA, 25 bp, Homo sapien
aaaagctgatgctaataaccagaca

SEQ ID NO: 5773696 - DNA, 25 bp, Homo sapien
gtttctctgggtttgcccctctgca

SEQ ID NO: 5773697 - DNA, 25 bp, Homo sapien
cagccccaggaggaaagctctccgc

SEQ ID NO: 5773698 - DNA, 25 bp, Homo sapien
acaaaaagaagagcctaaggaagtg

SEQ ID NO: 5773699 - DNA, 25 bp, Homo sapien
cagctggccaagaaggattacctag

SEQ ID NO: 5773700 - DNA, 25 bp, Homo sapien
ctcagctggccaagaaggattacct

SEQ ID NO: 5773701 - DNA, 25 bp, Homo sapien
gaagcagagaaggcctttaccagaa

SEQ ID NO: 5773702 - DNA, 25 bp, Homo sapien
ttggctatcaaagaccttaaagaag

SEQ ID NO: 5773703 - DNA, 25 bp, Homo sapien
gggctccagttcaagctgtttgcct

SEQ ID NO: 5773704 - DNA, 25 bp, Homo sapien
ctggggccaggtgaaaaactactgc

SEQ ID NO: 5773705 - DNA, 25 bp, Homo sapien
tgctaggggagacgctccaacctgt

SEQ ID NO: 5773706 - DNA, 25 bp, Homo sapien
gttccaaagcccctggaagacccca

SEQ ID NO: 5773707 - DNA, 25 bp, Homo sapien
cctggcagctctcttggcctcctag

SEQ ID NO: 5773708 - DNA, 25 bp, Homo sapien
gctagctagccagctgtgttcacac

SEQ ID NO: 5773709 - DNA, 25 bp, Homo sapien
tggccaagaaggattacctaggcaa

SEQ ID NO: 5773710 - DNA, 25 bp, Homo sapien
actggagctccggctggaacaaact

SEQ ID NO: 5773711 - DNA, 25 bp, Homo sapien
ggaaagcactcggagagaagtctag

SEQ ID NO: 5773712 - DNA, 25 bp, Homo sapien
gacaatgatgtgagtacccaggatg

SEQ ID NO: 5773713 - DNA, 25 bp, Homo sapien
gggttatgagtcagttgccaaaagg

SEQ ID NO: 5773714 - DNA, 25 bp, Homo sapien
ccccagagatcttcagggctctgga

SEQ ID NO: 5773715 - DNA, 25 bp, Homo sapien
agtgtctggaaagggcacgagagag

SEQ ID NO: 5773716 - DNA, 25 bp, Homo sapien
cctttcagaagacagcatgaaggat

SEQ ID NO: 5773717 - DNA, 25 bp, Homo sapien
gccactaaggcagccctgctagggg

SEQ ID NO: 5773718 - DNA, 25 bp, Homo sapien
tagacaatgatgtgagtacccagga

SEQ ID NO: 5773719 - DNA, 25 bp, Homo sapien
caagctgtacatttggtgcactttt

SEQ ID NO: 5773720 - DNA, 25 bp, Homo sapien
gagagtcttccaggtactgatcctg

SEQ ID NO: 5773721 - DNA, 25 bp, Homo sapien
ttcctgatgcatttgcaacactgag

SEQ ID NO: 5773722 - DNA, 25 bp, Homo sapien
tgctttcatgtatgccaagaaggag

SEQ ID NO: 5773723 - DNA, 25 bp, Homo sapien
actggaagggagccctggatgcctt

SEQ ID NO: 5773724 - DNA, 25 bp, Homo sapien
ccagttgagctgcggatccaccctc

SEQ ID NO: 5773725 - DNA, 25 bp, Homo sapien
ggccacggtcatgttcaacgggcag

SEQ ID NO: 5773726 - DNA, 25 bp, Homo sapien
gaagaaaatgaagccctattacttg

SEQ ID NO: 5773727 - DNA, 25 bp, Homo sapien
tccgcagtccgacatcccagctcct

SEQ ID NO: 5773728 - DNA, 25 bp, Homo sapien
tgagcccagacattccaaaatcgac

SEQ ID NO: 5773729 - DNA, 25 bp, Homo sapien
gaaggaggaatggaaaaaagctgaa

SEQ ID NO: 5773730 - DNA, 25 bp, Homo sapien
gcctggggccaggtgaaaaactact

SEQ ID NO: 5773731 - DNA, 25 bp, Homo sapien
cactcaaggtgcactacaagtacac

SEQ ID NO: 5773732 - DNA, 25 bp, Homo sapien
ggctacccaaccagaggacctggag

SEQ ID NO: 5773733 - DNA, 25 bp, Homo sapien
gcagcagccccaggaggaaagctct

SEQ ID NO: 5773734 - DNA, 25 bp, Homo sapien
ggatgccttcagtgccgtccaggac

SEQ ID NO: 5773735 - DNA, 25 bp, Homo sapien
tgtacactatcctgaagaacatgac

SEQ ID NO: 5773736 - DNA, 25 bp, Homo sapien
gagagagtcttccaggtactgatcc

SEQ ID NO: 5773737 - DNA, 25 bp, Homo sapien
gggacaggtgaatggaggagttagg

SEQ ID NO: 5773738 - DNA, 25 bp, Homo sapien
caaatgagagacaagtggctcagct

SEQ ID NO: 5773739 - DNA, 25 bp, Homo sapien
aagctctccgcagtccgacatccca

SEQ ID NO: 5773740 - DNA, 25 bp, Homo sapien
gcaacggtcgtggcatctgtggtgg

SEQ ID NO: 5773741 - DNA, 25 bp, Homo sapien
tacacactcaaggtgcactacaagt

SEQ ID NO: 5773742 - DNA, 25 bp, Homo sapien
cactaaggcagccctgctaggggag

SEQ ID NO: 5773743 - DNA, 25 bp, Homo sapien
gtgtctggaagcagaagctatatga

SEQ ID NO: 5773744 - DNA, 25 bp, Homo sapien
tccaaagcccctggaagaccccagc

SEQ ID NO: 5773745 - DNA, 25 bp, Homo sapien
ccctggatgccttcagtgccgtcca

SEQ ID NO: 5773746 - DNA, 25 bp, Homo sapien
gcagctctcttggcctcctagtttc

SEQ ID NO: 5773747 - DNA, 25 bp, Homo sapien
aagaccttaaagaagccttgattca

SEQ ID NO: 5773748 - DNA, 25 bp, Homo sapien
gtgagaacacagtgggtgaccaagg

SEQ ID NO: 5773749 - DNA, 25 bp, Homo sapien
acctactagacaatgatgtgagtac

SEQ ID NO: 5773750 - DNA, 25 bp, Homo sapien
gtcaccaggccagaaacaaaaagaa

SEQ ID NO: 5773751 - DNA, 25 bp, Homo sapien
gtgaaaaactactgcctgactctgt

SEQ ID NO: 5773752 - DNA, 25 bp, Homo sapien
gtggggacatttcctgatgcatttg

SEQ ID NO: 5773753 - DNA, 25 bp, Homo sapien
gactgaagcagagaaggcctttacc

SEQ ID NO: 5773754 - DNA, 25 bp, Homo sapien
ggctatcaaagaccttaaagaagcc

SEQ ID NO: 5773755 - DNA, 25 bp, Homo sapien
ctaggggagacgctccaacctgtct

SEQ ID NO: 5773756 - DNA, 25 bp, Homo sapien
gctccggctggaacaaactaagctg

SEQ ID NO: 5773757 - DNA, 25 bp, Homo sapien
gagacgctccaacctgtcttctctc

SEQ ID NO: 5773758 - DNA, 25 bp, Homo sapien
gacagcaatgagctggtgccccttt

SEQ ID NO: 5773759 - DNA, 25 bp, Homo sapien
acattacagtttggaagtgttaact

SEQ ID NO: 5773760 - DNA, 25 bp, Homo sapien
gcccagaaagtgaacaccttggggg

SEQ ID NO: 5773761 - DNA, 25 bp, Homo sapien
atctgtggtggatcaagacagtttc

SEQ ID NO: 5773762 - DNA, 25 bp, Homo sapien
gttatgagtcagttgccaaaaggtg

SEQ ID NO: 5773763 - DNA, 25 bp, Homo sapien
tcgggacagcaatgagctggtgccc

SEQ ID NO: 5773764 - DNA, 25 bp, Homo sapien
tactgatcctgtttcttgctctgag

SEQ ID NO: 5773765 - DNA, 25 bp, Homo sapien
caggatgatttcctggggcacagtg

SEQ ID NO: 5773766 - DNA, 25 bp, Homo sapien
aggcaacggtcgtggcatctgtggt

SEQ ID NO: 5773767 - DNA, 25 bp, Homo sapien
ttcttgctctgagtgctagctagcc

SEQ ID NO: 5773768 - DNA, 25 bp, Homo sapien
cggatccaccctcagcagcagcccc

SEQ ID NO: 5773769 - DNA, 25 bp, Homo sapien
ctgtaaacattcatcaagctgtaca

SEQ ID NO: 5773770 - DNA, 25 bp, Homo sapien
gcagtggcttacttccaacgaggga

SEQ ID NO: 5773771 - DNA, 25 bp, Homo sapien
tgatttggctatcaaagaccttaaa

SEQ ID NO: 5773772 - DNA, 25 bp, Homo sapien
tttgcctgtgaggtgttatataaca

SEQ ID NO: 5773773 - DNA, 25 bp, Homo sapien
cccaaagtttttgttgaagactgcg

SEQ ID NO: 5773774 - DNA, 25 bp, Homo sapien
ctccaacctgtcttctctctgtctc

SEQ ID NO: 5773775 - DNA, 25 bp, Homo sapien
tatatgagccagtggtgatccctgt

SEQ ID NO: 5773776 - DNA, 25 bp, Homo sapien
atgaagtctgagcccagacattcca

SEQ ID NO: 5773777 - DNA, 25 bp, Homo sapien
aggtgcactacaagtacacggtagt

SEQ ID NO: 5773778 - DNA, 25 bp, Homo sapien
agctgagcctccacccagaccgaaa

SEQ ID NO: 5773779 - DNA, 25 bp, Homo sapien
tcaacgggcagaaggggcttgttcc

SEQ ID NO: 5773780 - DNA, 25 bp, Homo sapien
tatttgggtttgtgcctgagacaaa

SEQ ID NO: 5773781 - DNA, 25 bp, Homo sapien
tggggctccagttcaagctgtttgc

SEQ ID NO: 5773782 - DNA, 25 bp, Homo sapien
gggccactaaggcagccctgctagg

SEQ ID NO: 5773783 - DNA, 25 bp, Homo sapien
acccagaccgaaaaccccagagatc

SEQ ID NO: 5773784 - DNA, 25 bp, Homo sapien
tagccagctgtgttcacactgtaaa

SEQ ID NO: 5773785 - DNA, 25 bp, Homo sapien
ccagaggacctggagtttcaggaag

SEQ ID NO: 5773786 - DNA, 25 bp, Homo sapien
ttggaaagcactcggagagaagtct

SEQ ID NO: 5773787 - DNA, 25 bp, Homo sapien
cctgctaggggagacgctccaacct

SEQ ID NO: 5773788 - DNA, 25 bp, Homo sapien
ggcaggctgtttcgaccaaatgaga

SEQ ID NO: 5773789 - DNA, 25 bp, Homo sapien
cctgtcttctctctgtctcctggca

SEQ ID NO: 5773790 - DNA, 25 bp, Homo sapien
acaaagctgaagaaaatgaagccct

SEQ ID NO: 5773791 - DNA, 25 bp, Homo sapien
ctcaccgtgtgctatttgggtttgt

SEQ ID NO: 5773792 - DNA, 25 bp, Homo sapien
atcaaaggtgaatgaagaatggctg

SEQ ID NO: 5773793 - DNA, 25 bp, Homo sapien
caccctcagcagcagccccaggagg

SEQ ID NO: 5773794 - DNA, 25 bp, Homo sapien
tccccaaagtttttgttgaagactg

SEQ ID NO: 5773795 - DNA, 25 bp, Homo sapien
gaccccagctgtcaccaggccagaa

SEQ ID NO: 5773796 - DNA, 25 bp, Homo sapien
tagggttatgagtcagttgccaaaa

SEQ ID NO: 5773797 - DNA, 25 bp, Homo sapien
tatgccaagaaggaggaatggaaaa

SEQ ID NO: 5773798 - DNA, 25 bp, Homo sapien
ggaagtgttaactatttattccctg

SEQ ID NO: 5773799 - DNA, 25 bp, Homo sapien
aatggaaaaaagctgaagaacagtt

SEQ ID NO: 5773800 - DNA, 25 bp, Homo sapien
acctaatcatgtccctggtggaggc

SEQ ID NO: 5773801 - DNA, 25 bp, Homo sapien
cagcctctggaatgaaggggtgctg

SEQ ID NO: 5773802 - DNA, 25 bp, Homo sapien
atttcctgatgcatttgcaacactg

SEQ ID NO: 5773803 - DNA, 25 bp, Homo sapien
caagaaggactggaagggagccctg

SEQ ID NO: 5773804 - DNA, 25 bp, Homo sapien
ctcctggcagctctcttggcctcct

SEQ ID NO: 5773805 - DNA, 25 bp, Homo sapien
ctacaaagctgaagaaaatgaagcc

SEQ ID NO: 5773806 - DNA, 25 bp, Homo sapien
gtgatccctgtgggcaggctgtttc

SEQ ID NO: 5773807 - DNA, 25 bp, Homo sapien
tgtgagtacccaggatgatttcctg

SEQ ID NO: 5773808 - DNA, 25 bp, Homo sapien
agcactcggagagaagtctaggatg

SEQ ID NO: 5773809 - DNA, 25 bp, Homo sapien
cagcaatgagctggtgcccctttca

SEQ ID NO: 5773810 - DNA, 25 bp, Homo sapien
ccgagacaagcacttggcagtggct

SEQ ID NO: 5773811 - DNA, 25 bp, Homo sapien
tgaaccagttgagctgcggatccac

SEQ ID NO: 5773812 - DNA, 25 bp, Homo sapien
cagcttaagaaaggcagccaagtgg

SEQ ID NO: 5773813 - DNA, 25 bp, Homo sapien
aaaagaagagctccaggtcatgcca

SEQ ID NO: 5773814 - DNA, 25 bp, Homo sapien
attctactcatctggcccagaaagt

SEQ ID NO: 5773815 - DNA, 25 bp, Homo sapien
ccggatttgcttcaacattggctgc

SEQ ID NO: 5773816 - DNA, 25 bp, Homo sapien
acattcatcaagctgtacatttggt

SEQ ID NO: 5773817 - DNA, 25 bp, Homo sapien
agtgttaactatttattccctgtta

SEQ ID NO: 5773818 - DNA, 25 bp, Homo sapien
tgttccctgcaactaccttgaacca

SEQ ID NO: 5773819 - DNA, 25 bp, Homo sapien
cttctttccttttctctctcatggt

SEQ ID NO: 5773820 - DNA, 25 bp, Homo sapien
accagacagagaaatatgatttggc

SEQ ID NO: 5773821 - DNA, 25 bp, Homo sapien
atgaaggggtgctggcagcggacaa

SEQ ID NO: 5773822 - DNA, 25 bp, Homo sapien
aaaaccccagagatcttcagggctc

SEQ ID NO: 5773823 - DNA, 25 bp, Homo sapien
gagacaagcacttggcagtggctta

SEQ ID NO: 5773824 - DNA, 25 bp, Homo sapien
tgtgaggtgttatataacattgctt

SEQ ID NO: 5773825 - DNA, 25 bp, Homo sapien
cagagaaatatgatttggctatcaa

SEQ ID NO: 5773826 - DNA, 25 bp, Homo sapien
gtttggaagtgttaactatttattc

SEQ ID NO: 5773827 - DNA, 25 bp, Homo sapien
tggcctcctagtttctacctaatca

SEQ ID NO: 5773828 - DNA, 25 bp, Homo sapien
aaggactggaagggagccctggatg

SEQ ID NO: 5773829 - DNA, 25 bp, Homo sapien
gagctatcggcctcgggacagcaat

SEQ ID NO: 5773830 - DNA, 25 bp, Homo sapien
gagaagtctaggatgtttcacaaac

SEQ ID NO: 5773831 - DNA, 25 bp, Homo sapien
actgcctgactctgtggtgtgagaa

SEQ ID NO: 5773832 - DNA, 25 bp, Homo sapien
gtttgcccctctgcaaccacaggca

SEQ ID NO: 5773833 - DNA, 25 bp, Homo sapien
tccggctggaacaaactaagctgag

SEQ ID NO: 5773834 - DNA, 25 bp, Homo sapien
atgttcaacgggcagaaggggcttg

SEQ ID NO: 5773835 - DNA, 25 bp, Homo sapien
ggcactcttcagttatgaggctacc

SEQ ID NO: 5773836 - DNA, 25 bp, Homo sapien
agaaggattacctaggcaaggcaac

SEQ ID NO: 5773837 - DNA, 25 bp, Homo sapien
taataaccagacaacagaacctcag

SEQ ID NO: 5773838 - DNA, 25 bp, Homo sapien
cttgttccctgcaactaccttgaac

SEQ ID NO: 5773839 - DNA, 25 bp, Homo sapien
gtctggaagcagaagctatatgagc

SEQ ID NO: 5773840 - DNA, 25 bp, Homo sapien
catgtacactatcctgaagaacatg

SEQ ID NO: 5773841 - DNA, 25 bp, Homo sapien
ctactgcctgactctgtggtgtgag

SEQ ID NO: 5773842 - DNA, 25 bp, Homo sapien
aaccacaggcagctgagcctccacc

SEQ ID NO: 5773843 - DNA, 25 bp, Homo sapien
gaaagggcacgagagagtcttccag

SEQ ID NO: 5773844 - DNA, 25 bp, Homo sapien
caacattggctgcatgtacactatc

SEQ ID NO: 5773845 - DNA, 25 bp, Homo sapien
gccttcagtgccgtccaggaccccc

SEQ ID NO: 5773846 - DNA, 25 bp, Homo sapien
ctttgtcttgaagaagggcaatgat

SEQ ID NO: 5773847 - DNA, 25 bp, Homo sapien
aaggattacctaggcaaggcaacgg

SEQ ID NO: 5773848 - DNA, 25 bp, Homo sapien
caggtccgggacatggtgtctaaga

SEQ ID NO: 5773849 - DNA, 25 bp, Homo sapien
cctgtgggcaggctgtttcgaccaa

SEQ ID NO: 5773850 - DNA, 25 bp, Homo sapien
gaacctcagcttaagaaaggcagcc

SEQ ID NO: 5773851 - DNA, 25 bp, Homo sapien
tcaagctgtttgcctgtgaggtgtt

SEQ ID NO: 5773852 - DNA, 25 bp, Homo sapien
caagtggaggcactcttcagttatg

SEQ ID NO: 5773853 - DNA, 25 bp, Homo sapien
tgtttgcctgtgaggtgttatataa

SEQ ID NO: 5773854 - DNA, 25 bp, Homo sapien
acagatttggaaagcactcggagag

SEQ ID NO: 5773855 - DNA, 25 bp, Homo sapien
ttatgaggctacccaaccagaggac

SEQ ID NO: 5773856 - DNA, 25 bp, Homo sapien
aagacagtttctctgggtttgcccc

SEQ ID NO: 5773857 - DNA, 25 bp, Homo sapien
taatcctggtgttatcaaaggtgaa

SEQ ID NO: 5773858 - DNA, 25 bp, Homo sapien
acctcagcttaagaaaggcagccaa

SEQ ID NO: 5773859 - DNA, 25 bp, Homo sapien
gggggccactaaggcagccctgcta

SEQ ID NO: 5773860 - DNA, 25 bp, Homo sapien
gagtcttccaggtactgatcctgtt

SEQ ID NO: 5773861 - DNA, 25 bp, Homo sapien
cttgaagaagggcaatgataactgg

SEQ ID NO: 5773862 - DNA, 25 bp, Homo sapien
tgcctgactctgtggtgtgagaaca

SEQ ID NO: 5773863 - DNA, 25 bp, Homo sapien
tataatcctggtgttatcaaaggtg

SEQ ID NO: 5773864 - DNA, 25 bp, Homo sapien
tcgacaaggcgatggagtgtgtctg

SEQ ID NO: 5773865 - DNA, 25 bp, Homo sapien
ccagaaagtgaacaccttgggggcc

SEQ ID NO: 5773866 - DNA, 25 bp, Homo sapien
gcagaaggggcttgttccctgcaac

SEQ ID NO: 5773867 - DNA, 25 bp, Homo sapien
gccaggtccgggacatggtgtctaa

SEQ ID NO: 5773868 - DNA, 25 bp, Homo sapien
atttggtgcacttttctgtgtcata

SEQ ID NO: 5773869 - DNA, 25 bp, Homo sapien
ttcacactgtaaacattcatcaagc

SEQ ID NO: 5773870 - DNA, 25 bp, Homo sapien
gtggtggatcaagacagtttctctg

SEQ ID NO: 5773871 - DNA, 25 bp, Homo sapien
gcaactaccttgaaccagttgagct

SEQ ID NO: 5773872 - DNA, 25 bp, Homo sapien
aaaaaagctgaagaacagttagcat

SEQ ID NO: 5773873 - DNA, 25 bp, Homo sapien
ggtggatcaagacagtttctctggg

SEQ ID NO: 5773874 - DNA, 25 bp, Homo sapien
gagcctaaggaagtgaagctcagtg

SEQ ID NO: 5773875 - DNA, 25 bp, Homo sapien
aatatgatttggctatcaaagacct

SEQ ID NO: 5773876 - DNA, 25 bp, Homo sapien
aaagctgaagaaaatgaagccctat

SEQ ID NO: 5773877 - DNA, 25 bp, Homo sapien
aaccagaggacctggagtttcagga

SEQ ID NO: 5773878 - DNA, 25 bp, Homo sapien
gatataatcctggtgttatcaaagg

SEQ ID NO: 5773879 - DNA, 25 bp, Homo sapien
cctggtgttatcaaaggtgaatgaa

SEQ ID NO: 5773880 - DNA, 25 bp, Homo sapien
ggatgctctactaccagacagagaa

SEQ ID NO: 5773881 - DNA, 25 bp, Homo sapien
caaagtttttgttgaagactgcgca

SEQ ID NO: 5773882 - DNA, 25 bp, Homo sapien
gtcatgccagggaacattgtctttg

SEQ ID NO: 5773883 - DNA, 25 bp, Homo sapien
ggcaaggcaacggtcgtggcatctg

SEQ ID NO: 5773884 - DNA, 25 bp, Homo sapien
aactactgcctgactctgtggtgtg

SEQ ID NO: 5773885 - DNA, 25 bp, Homo sapien
ccaggtgaaaaactactgcctgact

SEQ ID NO: 5773886 - DNA, 25 bp, Homo sapien
ggaacattgtctttgtcttgaagaa

SEQ ID NO: 5773887 - DNA, 25 bp, Homo sapien
gaaaaactactgcctgactctgtgg

SEQ ID NO: 5773888 - DNA, 25 bp, Homo sapien
gcaatgagctggtgcccctttcaga

SEQ ID NO: 5773889 - DNA, 25 bp, Homo sapien
ggaagaccccagctgtcaccaggcc

SEQ ID NO: 5773890 - DNA, 25 bp, Homo sapien
ggtagggttatgagtcagttgccaa

SEQ ID NO: 5773891 - DNA, 25 bp, Homo sapien
ctagttccaaagcccctggaagacc

SEQ ID NO: 5773892 - DNA, 25 bp, Homo sapien
ctgaagcagagaaggcctttaccag

SEQ ID NO: 5773893 - DNA, 25 bp, Homo sapien
tgcacttttctgtgtcataccacaa

SEQ ID NO: 5773894 - DNA, 25 bp, Homo sapien
ctgcgcaactacagatttggaaagc

SEQ ID NO: 5773895 - DNA, 25 bp, Homo sapien
gaaagtgaaaaagctgatgctaata

SEQ ID NO: 5773896 - DNA, 25 bp, Homo sapien
agaaagtgaacaccttgggggccac

SEQ ID NO: 5773897 - DNA, 25 bp, Homo sapien
agaggacctggagtttcaggaaggg

SEQ ID NO: 5773898 - DNA, 25 bp, Homo sapien
ggtttgtgcctgagacaaaagaaga

SEQ ID NO: 5773899 - DNA, 25 bp, Homo sapien
acatttggtgcacttttctgtgtca

SEQ ID NO: 5773900 - DNA, 25 bp, Homo sapien
ctggaagcagaagctatatgagcca

SEQ ID NO: 5773901 - DNA, 25 bp, Homo sapien
tttctgtgtcataccacaaaaaaaa

SEQ ID NO: 5773902 - DNA, 25 bp, Homo sapien
aagtgaagctcagtgttcccatgcc

SEQ ID NO: 5773903 - DNA, 25 bp, Homo sapien
actagacaatgatgtgagtacccag

SEQ ID NO: 5773904 - DNA, 25 bp, Homo sapien
gggctctggaaggggaggctcaccg

SEQ ID NO: 5773905 - DNA, 25 bp, Homo sapien
ggccccattctactcatctggccca

SEQ ID NO: 5773906 - DNA, 25 bp, Homo sapien
gaaaggcagccaagtggaggcactc

SEQ ID NO: 5773907 - DNA, 25 bp, Homo sapien
ctaaggcagccctgctaggggagac

SEQ ID NO: 5773908 - DNA, 25 bp, Homo sapien
gcctcctagtttctacctaatcatg

SEQ ID NO: 5773909 - DNA, 25 bp, Homo sapien
gtgttcccatgccctacacactcaa

SEQ ID NO: 5773910 - DNA, 25 bp, Homo sapien
accaaggctttccagatgaacccaa

SEQ ID NO: 5773911 - DNA, 25 bp, Homo sapien
tggcagtggcttacttccaacgagg

SEQ ID NO: 5773912 - DNA, 25 bp, Homo sapien
tggcatctgtggtggatcaagacag

SEQ ID NO: 5773913 - DNA, 25 bp, Homo sapien
gaaggggtgctggcagcggacaaga

SEQ ID NO: 5773914 - DNA, 25 bp, Homo sapien
cttttctctctcatggtagggttat

SEQ ID NO: 5773915 - DNA, 25 bp, Homo sapien
gcaacactgagaagttatcttaagg

SEQ ID NO: 5773916 - DNA, 25 bp, Homo sapien
tggaggcactcttcagttatgaggc

SEQ ID NO: 5773917 - DNA, 25 bp, Homo sapien
ctgagctatcggcctcgggacagca

SEQ ID NO: 5773918 - DNA, 25 bp, Homo sapien
tatactgtactgagacattacagtt

SEQ ID NO: 5773919 - DNA, 25 bp, Homo sapien
caaactacaaagctgaagaaaatga

SEQ ID NO: 5773920 - DNA, 25 bp, Homo sapien
gacgctccaacctgtcttctctctg

SEQ ID NO: 5773921 - DNA, 25 bp, Homo sapien
aaactaagctgagctatcggcctcg

SEQ ID NO: 5773922 - DNA, 25 bp, Homo sapien
atgtttcacaaactacaaagctgaa

SEQ ID NO: 5773923 - DNA, 25 bp, Homo sapien
aggggagacgctccaacctgtcttc

SEQ ID NO: 5773924 - DNA, 25 bp, Homo sapien
taggatgtttcacaaactacaaagc

SEQ ID NO: 5773925 - DNA, 25 bp, Homo sapien
tgagagacaagtggctcagctggcc

SEQ ID NO: 5773926 - DNA, 25 bp, Homo sapien
cttccaggtactgatcctgtttctt

SEQ ID NO: 5773927 - DNA, 25 bp, Homo sapien
ctgtggtggatcaagacagtttctc

SEQ ID NO: 5773928 - DNA, 25 bp, Homo sapien
agggcaatgataactgggccacggt

SEQ ID NO: 5773929 - DNA, 25 bp, Homo sapien
tgaacccaaggaaagtgaaaaagct

SEQ ID NO: 5773930 - DNA, 25 bp, Homo sapien
gacattccaaaatcgacaaggcgat

SEQ ID NO: 5773931 - DNA, 25 bp, Homo sapien
ggtgaccaaggctttccagatgaac

SEQ ID NO: 5773932 - DNA, 25 bp, Homo sapien
agagatcttcagggctctggaaggg

SEQ ID NO: 5773933 - DNA, 25 bp, Homo sapien
gaccttaaagaagccttgattcagc

SEQ ID NO: 5773934 - DNA, 25 bp, Homo sapien
aatttaacctactagacaatgatgt

SEQ ID NO: 5773935 - DNA, 25 bp, Homo sapien
cttcagtgccgtccaggacccccac

SEQ ID NO: 5773936 - DNA, 25 bp, Homo sapien
ctgttaaaatttaacctactagaca

SEQ ID NO: 5773937 - DNA, 25 bp, Homo sapien
ggctgtttcgaccaaatgagagaca

SEQ ID NO: 5773938 - DNA, 25 bp, Homo sapien
ggagccctggatgccttcagtgccg

SEQ ID NO: 5773939 - DNA, 25 bp, Homo sapien
ctaccagacagagaaatatgatttg

SEQ ID NO: 5773940 - DNA, 25 bp, Homo sapien
cactgtaaacattcatcaagctgta

SEQ ID NO: 5773941 - DNA, 25 bp, Homo sapien
agacattacagtttggaagtgttaa

SEQ ID NO: 5773942 - DNA, 25 bp, Homo sapien
ctcagcttaagaaaggcagccaagt

SEQ ID NO: 5773943 - DNA, 25 bp, Homo sapien
gcaaagggaaggtgggcattttccc

SEQ ID NO: 5773944 - DNA, 25 bp, Homo sapien
catcccagctcctcctagttccaaa

SEQ ID NO: 5773945 - DNA, 25 bp, Homo sapien
tcccatgccctacacactcaaggtg

SEQ ID NO: 5773946 - DNA, 25 bp, Homo sapien
accagaagcattaaccgagacaagc

SEQ ID NO: 5773947 - DNA, 25 bp, Homo sapien
cagctgatagactataagatcctgg

SEQ ID NO: 5773948 - DNA, 25 bp, Homo sapien
agactataagatcctggggctccag

SEQ ID NO: 5773949 - DNA, 25 bp, Homo sapien
ttacttccaacgagggatgctctac

SEQ ID NO: 5773950 - DNA, 25 bp, Homo sapien
cagccctgctaggggagacgctcca

SEQ ID NO: 5773951 - DNA, 25 bp, Homo sapien
agtctgagcccagacattccaaaat

SEQ ID NO: 5773952 - DNA, 25 bp, Homo sapien
ttatcttaagggaggctgggcccca

SEQ ID NO: 5773953 - DNA, 25 bp, Homo sapien
ggccatcagcctctggaatgaaggg

SEQ ID NO: 5773954 - DNA, 25 bp, Homo sapien
tctactcatctggcccagaaagtga

SEQ ID NO: 5773955 - DNA, 25 bp, Homo sapien
tctctgcttctttccttttctctct

SEQ ID NO: 5773956 - DNA, 25 bp, Homo sapien
gctagccagctgtgttcacactgta

SEQ ID NO: 5773957 - DNA, 25 bp, Homo sapien
cctacacactcaaggtgcactacaa

SEQ ID NO: 5773958 - DNA, 25 bp, Homo sapien
gtgctagctagccagctgtgttcac

SEQ ID NO: 5773959 - DNA, 25 bp, Homo sapien
aggaaggggatataatcctggtgtt

SEQ ID NO: 5773960 - DNA, 25 bp, Homo sapien
cctcctagttccaaagcccctggaa

SEQ ID NO: 5773961 - DNA, 25 bp, Homo sapien
gagaacacagtgggtgaccaaggct

SEQ ID NO: 5773962 - DNA, 25 bp, Homo sapien
tggtgatccctgtgggcaggctgtt

SEQ ID NO: 5773963 - DNA, 25 bp, Homo sapien
tccagttcaagctgtttgcctgtga

SEQ ID NO: 5773964 - DNA, 25 bp, Homo sapien
ctctgcaaccacaggcagctgagcc

SEQ ID NO: 5773965 - DNA, 25 bp, Homo sapien
agaagccttgattcagcttcgaggg

SEQ ID NO: 5773966 - DNA, 25 bp, Homo sapien
tgcctgagacaaaagaagagctcca

SEQ ID NO: 5773967 - DNA, 25 bp, Homo sapien
cagaacctcagcttaagaaaggcag

SEQ ID NO: 5773968 - DNA, 25 bp, Homo sapien
cctcgggacagcaatgagctggtgc

SEQ ID NO: 5773969 - DNA, 25 bp, Homo sapien
acagttagcattggccacgagcatg

SEQ ID NO: 5773970 - DNA, 25 bp, Homo sapien
ccctctgcaaccacaggcagctgag

SEQ ID NO: 5773971 - DNA, 25 bp, Homo sapien
aagctatatgagccagtggtgatcc

SEQ ID NO: 5773972 - DNA, 25 bp, Homo sapien
gctggcagcggacaagaaggactgg

SEQ ID NO: 5773973 - DNA, 25 bp, Homo sapien
gcttacttccaacgagggatgctct

SEQ ID NO: 5773974 - DNA, 25 bp, Homo sapien
tttctctctcatggtagggttatga

SEQ ID NO: 5773975 - DNA, 25 bp, Homo sapien
ctaaggaagtgaagctcagtgttcc

SEQ ID NO: 5773976 - DNA, 25 bp, Homo sapien
agctcctcctagttccaaagcccct

SEQ ID NO: 5773977 - DNA, 25 bp, Homo sapien
ttcagggctctggaaggggaggctc

SEQ ID NO: 5773978 - DNA, 25 bp, Homo sapien
cagtccgacatcccagctcctccta

SEQ ID NO: 5773979 - DNA, 25 bp, Homo sapien
gtggctcagctggccaagaaggatt

SEQ ID NO: 5773980 - DNA, 25 bp, Homo sapien
gttgaagactgcgcaactacagatt

SEQ ID NO: 5773981 - DNA, 25 bp, Homo sapien
tgaccaaggctttccagatgaaccc

SEQ ID NO: 5773982 - DNA, 25 bp, Homo sapien
cagtgttcccatgccctacacactc

SEQ ID NO: 5773983 - DNA, 25 bp, Homo sapien
tctaagaaactggagctccggctgg

SEQ ID NO: 5773984 - DNA, 25 bp, Homo sapien
ctccacccagaccgaaaaccccaga

SEQ ID NO: 5773985 - DNA, 25 bp, Homo sapien
tcagttgccaaaaggtggggacatt

SEQ ID NO: 5773986 - DNA, 25 bp, Homo sapien
tggcttacttccaacgagggatgct

SEQ ID NO: 5773987 - DNA, 25 bp, Homo sapien
ttgttgaagactgcgcaactacaga

SEQ ID NO: 5773988 - DNA, 25 bp, Homo sapien
taagatcctggggctccagttcaag

SEQ ID NO: 5773989 - DNA, 25 bp, Homo sapien
ccactcccggatttgcttcaacatt

SEQ ID NO: 5773990 - DNA, 25 bp, Homo sapien
cattggccacgagcatgaagtctga

SEQ ID NO: 5773991 - DNA, 25 bp, Homo sapien
acccttctgctgtatactgtactga

SEQ ID NO: 5773992 - DNA, 25 bp, Homo sapien
ctacagatttggaaagcactcggag

SEQ ID NO: 5773993 - DNA, 25 bp, Homo sapien
tatgagtcagttgccaaaaggtggg

SEQ ID NO: 5773994 - DNA, 25 bp, Homo sapien
tatgagccagtggtgatccctgtgg

SEQ ID NO: 5773995 - DNA, 25 bp, Homo sapien
atcttaagggaggctgggccccatt

SEQ ID NO: 5773996 - DNA, 25 bp, Homo sapien
ggcaatgataactgggccacggtca

SEQ ID NO: 5773997 - DNA, 25 bp, Homo sapien
caggaggaaagctctccgcagtccg

SEQ ID NO: 5773998 - DNA, 25 bp, Homo sapien
aagaccccagctgtcaccaggccag

SEQ ID NO: 5773999 - DNA, 25 bp, Homo sapien
gaaagctctccgcagtccgacatcc

SEQ ID NO: 5774000 - DNA, 25 bp, Homo sapien
ccccagctgtcaccaggccagaaac

SEQ ID NO: 5774001 - DNA, 25 bp, Homo sapien
gtactgagacattacagtttggaag

SEQ ID NO: 5774002 - DNA, 25 bp, Homo sapien
ttgagctgcggatccaccctcagca

SEQ ID NO: 5774003 - DNA, 25 bp, Homo sapien
aaactggagctccggctggaacaaa

SEQ ID NO: 5774004 - DNA, 25 bp, Homo sapien
gccaagaaggattacctaggcaagg

SEQ ID NO: 5774005 - DNA, 25 bp, Homo sapien
agctggtgcccctttcagaagacag

SEQ ID NO: 5774006 - DNA, 25 bp, Homo sapien
ccctcagcagcagccccaggaggaa

SEQ ID NO: 5774007 - DNA, 25 bp, Homo sapien
ttgcaacactgagaagttatcttaa

SEQ ID NO: 5774008 - DNA, 25 bp, Homo sapien
gccccaggaggaaagctctccgcag

SEQ ID NO: 5774009 - DNA, 25 bp, Homo sapien
gctgcggatccaccctcagcagcag

SEQ ID NO: 5774010 - DNA, 25 bp, Homo sapien
ccttctgctgtatactgtactgaga

SEQ ID NO: 5774011 - DNA, 25 bp, Homo sapien
gctgtttgcctgtgaggtgttatat

SEQ ID NO: 5774012 - DNA, 25 bp, Homo sapien
ctgctgtatactgtactgagacatt

SEQ ID NO: 5774013 - DNA, 25 bp, Homo sapien
agtcatgaagactcagcccgggctc

SEQ ID NO: 5774014 - DNA, 25 bp, Homo sapien
ccacccagaccgaaaaccccagaga

SEQ ID NO: 5774015 - DNA, 25 bp, Homo sapien
gagaagttatcttaagggaggctgg

SEQ ID NO: 5774016 - DNA, 25 bp, Homo sapien
tgtatgccaagaaggaggaatggaa

SEQ ID NO: 5774017 - DNA, 25 bp, Homo sapien
gaagtctgagcccagacattccaaa

SEQ ID NO: 5774018 - DNA, 25 bp, Homo sapien
tggaatgaaggggtgctggcagcgg

SEQ ID NO: 5774019 - DNA, 25 bp, Homo sapien
ctaccttgaaccagttgagctgcgg

SEQ ID NO: 5774020 - DNA, 25 bp, Homo sapien
tgagtacccaggatgatttcctggg

SEQ ID NO: 5774021 - DNA, 25 bp, Homo sapien
gaaggggatataatcctggtgttat

SEQ ID NO: 5774022 - DNA, 25 bp, Homo sapien
gataactgggccacggtcatgttca

SEQ ID NO: 5774023 - DNA, 25 bp, Homo sapien
cattgtctttgtcttgaagaagggc

SEQ ID NO: 5774024 - DNA, 25 bp, Homo sapien
aggggaggctcaccgtgtgctattt

SEQ ID NO: 5774025 - DNA, 25 bp, Homo sapien
ggcctcgggacagcaatgagctggt

SEQ ID NO: 5774026 - DNA, 25 bp, Homo sapien
gtgttatataacattgctttcatgt

SEQ ID NO: 5774027 - DNA, 25 bp, Homo sapien
agcattaaccgagacaagcacttgg

SEQ ID NO: 5774028 - DNA, 25 bp, Homo sapien
ctggaagaccccagctgtcaccagg

SEQ ID NO: 5774029 - DNA, 25 bp, Homo sapien
tgaacaccttgggggccactaaggc

SEQ ID NO: 5774030 - DNA, 25 bp, Homo sapien
gaagggcaatgataactgggccacg

SEQ ID NO: 5774031 - DNA, 25 bp, Homo sapien
gtctttgtcttgaagaagggcaatg

SEQ ID NO: 5774032 - DNA, 25 bp, Homo sapien
gagaaatatgatttggctatcaaag

SEQ ID NO: 5774033 - DNA, 25 bp, Homo sapien
caatgatgtgagtacccaggatgat

SEQ ID NO: 5774034 - DNA, 25 bp, Homo sapien
gaagtctaggatgtttcacaaacta

SEQ ID NO: 5774035 - DNA, 25 bp, Homo sapien
cctgactctgtggtgtgagaacaca

SEQ ID NO: 5774036 - DNA, 25 bp, Homo sapien
aggcgatggagtgtgtctggaagca

SEQ ID NO: 5774037 - DNA, 25 bp, Homo sapien
gggacagcaatgagctggtgcccct

SEQ ID NO: 5774038 - DNA, 25 bp, Homo sapien
gttcaacgggcagaaggggcttgtt

SEQ ID NO: 5774039 - DNA, 25 bp, Homo sapien
gatttagcacccttctgctgtatac

SEQ ID NO: 5774040 - DNA, 25 bp, Homo sapien
gccctacacactcaaggtgcactac

SEQ ID NO: 5774041 - DNA, 25 bp, Homo sapien
gcatttgcaacactgagaagttatc

SEQ ID NO: 5774042 - DNA, 25 bp, Homo sapien
agaagagcctaaggaagtgaagctc

SEQ ID NO: 5774043 - DNA, 25 bp, Homo sapien
cgaccaaatgagagacaagtggctc

SEQ ID NO: 5774044 - DNA, 25 bp, Homo sapien
aagccctattacttgtttgtaagat

SEQ ID NO: 5774045 - DNA, 25 bp, Homo sapien
tgagctggtgcccctttcagaagac

SEQ ID NO: 5774046 - DNA, 25 bp, Homo sapien
agtggaggcactcttcagttatgag

SEQ ID NO: 5774047 - DNA, 25 bp, Homo sapien
aaaatgaagccctattacttgtttg

SEQ ID NO: 5774048 - DNA, 25 bp, Homo sapien
agctcagtgttcccatgccctacac

SEQ ID NO: 5774049 - DNA, 25 bp, Homo sapien
ctcggagagaagtctaggatgtttc

SEQ ID NO: 5774050 - DNA, 25 bp, Homo sapien
atgcatttgcaacactgagaagtta

SEQ ID NO: 5774051 - DNA, 25 bp, Homo sapien
gctctggaaggggaggctcaccgtg

SEQ ID NO: 5774052 - DNA, 25 bp, Homo sapien
gagctgcggatccaccctcagcagc

SEQ ID NO: 5774053 - DNA, 25 bp, Homo sapien
aagctgatgctaataaccagacaac

SEQ ID NO: 5774054 - DNA, 25 bp, Homo sapien
gacagtttctctgggtttgcccctc

SEQ ID NO: 5774055 - DNA, 25 bp, Homo sapien
cattccaaaatcgacaaggcgatgg

SEQ ID NO: 5774056 - DNA, 25 bp, Homo sapien
ccccattctactcatctggcccaga

SEQ ID NO: 5774057 - DNA, 25 bp, Homo sapien
tttgtgcctgagacaaaagaagagc

SEQ ID NO: 5774058 - DNA, 25 bp, Homo sapien
acaaaagaagagctccaggtcatgc

SEQ ID NO: 5774059 - DNA, 25 bp, Homo sapien
aagtggctcagctggccaagaagga

SEQ ID NO: 5774060 - DNA, 25 bp, Homo sapien
ccagctcctcctagttccaaagccc

SEQ ID NO: 5774061 - DNA, 25 bp, Homo sapien
agacaaaagaagagctccaggtcat

SEQ ID NO: 5774062 - DNA, 25 bp, Homo sapien
gagtgctagctagccagctgtgttc

SEQ ID NO: 5774063 - DNA, 25 bp, Homo sapien
ggtggaggccatcagcctctggaat

SEQ ID NO: 5774064 - DNA, 25 bp, Homo sapien
agagacaagtggctcagctggccaa

SEQ ID NO: 5774065 - DNA, 25 bp, Homo sapien
agttatcttaagggaggctgggccc

SEQ ID NO: 5774066 - DNA, 25 bp, Homo sapien
ttgtttgtaagatttagcacccttc

SEQ ID NO: 5774067 - DNA, 25 bp, Homo sapien
aagtgaaaaagctgatgctaataac

SEQ ID NO: 5774068 - DNA, 25 bp, Homo sapien
tgaagaacatgactgaagcagagaa

SEQ ID NO: 5774069 - DNA, 25 bp, Homo sapien
cttggcctcctagtttctacctaat

SEQ ID NO: 5774070 - DNA, 25 bp, Homo sapien
gaacagttagcattggccacgagca

SEQ ID NO: 5774071 - DNA, 25 bp, Homo sapien
ctgagtgctagctagccagctgtgt

SEQ ID NO: 5774072 - DNA, 25 bp, Homo sapien
ccctgcaactaccttgaaccagttg

SEQ ID NO: 5774073 - DNA, 25 bp, Homo sapien
cctagtttctacctaatcatgtccc

SEQ ID NO: 5774074 - DNA, 25 bp, Homo sapien
aggggatataatcctggtgttatca

SEQ ID NO: 5774075 - DNA, 25 bp, Homo sapien
gaacatgactgaagcagagaaggcc

SEQ ID NO: 5774076 - DNA, 25 bp, Homo sapien
ttaaagaagccttgattcagcttcg

SEQ ID NO: 5774077 - DNA, 25 bp, Homo sapien
acaacagaacctcagcttaagaaag

SEQ ID NO: 5774078 - DNA, 25 bp, Homo sapien
aaagtggatggaagtgtctggaaag

SEQ ID NO: 5774079 - DNA, 25 bp, Homo sapien
actcagcccgggctcccctacagcc

SEQ ID NO: 5774080 - DNA, 25 bp, Homo sapien
gaaaagtggatggaagtgtctggaa

SEQ ID NO: 5774081 - DNA, 25 bp, Homo sapien
ggggacatttcctgatgcatttgca

SEQ ID NO: 5774082 - DNA, 25 bp, Homo sapien
atgatgtgagtacccaggatgattt

SEQ ID NO: 5774083 - DNA, 25 bp, Homo sapien
gacaaggcgatggagtgtgtctgga

SEQ ID NO: 5774084 - DNA, 25 bp, Homo sapien
aacagaacctcagcttaagaaaggc

SEQ ID NO: 5774085 - DNA, 25 bp, Homo sapien
agtacacggtagtcatgaagactca

SEQ ID NO: 5774086 - DNA, 25 bp, Homo sapien
ctcaaggtgcactacaagtacacgg

SEQ ID NO: 5774087 - DNA, 25 bp, Homo sapien
gaaggcctttaccagaagcattaac

SEQ ID NO: 5774088 - DNA, 25 bp, Homo sapien
ctcttcagttatgaggctacccaac

SEQ ID NO: 5774089 - DNA, 25 bp, Homo sapien
ccagagatcttcagggctctggaag

SEQ ID NO: 5774090 - DNA, 25 bp, Homo sapien
cagcatgaaggatgcctggggccag

SEQ ID NO: 5774091 - DNA, 25 bp, Homo sapien
gcacgagagagtcttccaggtactg

SEQ ID NO: 5774092 - DNA, 25 bp, Homo sapien
atcaagctgtacatttggtgcactt

SEQ ID NO: 5774093 - DNA, 25 bp, Homo sapien
gacaagaaggactggaagggagccc

SEQ ID NO: 5774094 - DNA, 25 bp, Homo sapien
ccctggaagaccccagctgtcacca

SEQ ID NO: 5774095 - DNA, 25 bp, Homo sapien
ggactggaagggagccctggatgcc

SEQ ID NO: 5774096 - DNA, 25 bp, Homo sapien
gacagagaaatatgatttggctatc

SEQ ID NO: 5774097 - DNA, 25 bp, Homo sapien
accaaatgagagacaagtggctcag

SEQ ID NO: 5774098 - DNA, 25 bp, Homo sapien
agctgtacatttggtgcacttttct

SEQ ID NO: 5774099 - DNA, 25 bp, Homo sapien
tggaaagggcacgagagagtcttcc

SEQ ID NO: 5774100 - DNA, 25 bp, Homo sapien
agtgaacaccttgggggccactaag

SEQ ID NO: 5774101 - DNA, 25 bp, Homo sapien
tgtgcctgagacaaaagaagagctc

SEQ ID NO: 5774102 - DNA, 25 bp, Homo sapien
tagtttctacctaatcatgtccctg

SEQ ID NO: 5774103 - DNA, 25 bp, Homo sapien
tactgtactgagacattacagtttg

SEQ ID NO: 5774104 - DNA, 25 bp, Homo sapien
tcctgtttcttgctctgagtgctag

SEQ ID NO: 5774105 - DNA, 25 bp, Homo sapien
ctgtcaccaggccagaaacaaaaag

SEQ ID NO: 5774106 - DNA, 25 bp, Homo sapien
ctggatgccttcagtgccgtccagg

SEQ ID NO: 5774107 - DNA, 25 bp, Homo sapien
cctaggcaaggcaacggtcgtggca

SEQ ID NO: 5774108 - DNA, 25 bp, Homo sapien
actcccggatttgcttcaacattgg

SEQ ID NO: 5774109 - DNA, 25 bp, Homo sapien
cggtagtcatgaagactcagcccgg

SEQ ID NO: 5774110 - DNA, 25 bp, Homo sapien
ttctacctaatcatgtccctggtgg

SEQ ID NO: 5774111 - DNA, 25 bp, Homo sapien
gtaaacattcatcaagctgtacatt

SEQ ID NO: 5774112 - DNA, 25 bp, Homo sapien
tgtctaagaaactggagctccggct

SEQ ID NO: 5774113 - DNA, 25 bp, Homo sapien
ctcagcagcagccccaggaggaaag

SEQ ID NO: 5774114 - DNA, 25 bp, Homo sapien
ggcagccctgctaggggagacgctc

SEQ ID NO: 5774115 - DNA, 25 bp, Homo sapien
tgaagccctattacttgtttgtaag

SEQ ID NO: 5774116 - DNA, 25 bp, Homo sapien
gtgaagctcagtgttcccatgccct

SEQ ID NO: 5774117 - DNA, 25 bp, Homo sapien
gctgtgttcacactgtaaacattca

SEQ ID NO: 5774118 - DNA, 25 bp, Homo sapien
aggtcatgccagggaacattgtctt

SEQ ID NO: 5774119 - DNA, 25 bp, Homo sapien
tgagtcagttgccaaaaggtgggga

SEQ ID NO: 5774120 - DNA, 25 bp, Homo sapien
taacctactagacaatgatgtgagt

SEQ ID NO: 5774121 - DNA, 25 bp, Homo sapien
taacattgctttcatgtatgccaag

SEQ ID NO: 5774122 - DNA, 25 bp, Homo sapien
cactatcctgaagaacatgactgaa

SEQ ID NO: 5774123 - DNA, 25 bp, Homo sapien
aactacagatttggaaagcactcgg

SEQ ID NO: 5774124 - DNA, 25 bp, Homo sapien
tattacttgtttgtaagatttagca

SEQ ID NO: 5774125 - DNA, 25 bp, Homo sapien
aacaccttgggggccactaaggcag

SEQ ID NO: 5774126 - DNA, 25 bp, Homo sapien
attacctaggcaaggcaacggtcgt

SEQ ID NO: 5774127 - DNA, 25 bp, Homo sapien
agtggcttacttccaacgagggatg

SEQ ID NO: 5774128 - DNA, 25 bp, Homo sapien
tctgtgtcataccacaaaaaaaaaa

SEQ ID NO: 5774129 - DNA, 25 bp, Homo sapien
ggcttgttccctgcaactaccttga

SEQ ID NO: 5774130 - DNA, 25 bp, Homo sapien
gggatataatcctggtgttatcaaa

SEQ ID NO: 5774131 - DNA, 25 bp, Homo sapien
attggctgcatgtacactatcctga

SEQ ID NO: 5774132 - DNA, 25 bp, Homo sapien
gctgcatgtacactatcctgaagaa

SEQ ID NO: 5774133 - DNA, 25 bp, Homo sapien
atgatttcctggggcacagtgggtg

SEQ ID NO: 5774134 - DNA, 25 bp, Homo sapien
ctgtactgagacattacagtttgga

SEQ ID NO: 5774135 - DNA, 25 bp, Homo sapien
ttccaacgagggatgctctactacc

SEQ ID NO: 5774136 - DNA, 25 bp, Homo sapien
cagtttctctgggtttgcccctctg

SEQ ID NO: 5774137 - DNA, 25 bp, Homo sapien
gagcctccacccagaccgaaaaccc

SEQ ID NO: 5774138 - DNA, 25 bp, Homo sapien
ttacttgtttgtaagatttagcacc

SEQ ID NO: 5774139 - DNA, 25 bp, Homo sapien
gtccctggtggaggccatcagcctc

SEQ ID NO: 5774140 - DNA, 25 bp, Homo sapien
actgggccacggtcatgttcaacgg

SEQ ID NO: 5774141 - DNA, 25 bp, Homo sapien
tgatgcatttgcaacactgagaagt

SEQ ID NO: 5774142 - DNA, 25 bp, Homo sapien
gagggaaccagctgatagactataa

SEQ ID NO: 5774143 - DNA, 25 bp, Homo sapien
ctgtctcctggcagctctcttggcc

SEQ ID NO: 5774144 - DNA, 25 bp, Homo sapien
cctgatgcatttgcaacactgagaa

SEQ ID NO: 5774145 - DNA, 25 bp, Homo sapien
ttgccaaaaggtggggacatttcct

SEQ ID NO: 5774146 - DNA, 25 bp, Homo sapien
gaggctcaccgtgtgctatttgggt

SEQ ID NO: 5774147 - DNA, 25 bp, Homo sapien
ccaaccagaggacctggagtttcag

SEQ ID NO: 5774148 - DNA, 25 bp, Homo sapien
actaagctgagctatcggcctcggg

SEQ ID NO: 5774149 - DNA, 25 bp, Homo sapien
acttgtttgtaagatttagcaccct

SEQ ID NO: 5774150 - DNA, 25 bp, Homo sapien
gccctgctaggggagacgctccaac

SEQ ID NO: 5774151 - DNA, 25 bp, Homo sapien
tctactaccagacagagaaatatga

SEQ ID NO: 5774152 - DNA, 25 bp, Homo sapien
gccaaaaggtggggacatttcctga

SEQ ID NO: 5774153 - DNA, 25 bp, Homo sapien
ttaagaaaggcagccaagtggaggc

SEQ ID NO: 5774154 - DNA, 25 bp, Homo sapien
gatggaagtgtctggaaagggcacg

SEQ ID NO: 5774155 - DNA, 25 bp, Homo sapien
caaagcccctggaagaccccagctg

SEQ ID NO: 5774156 - DNA, 25 bp, Homo sapien
ccatgccctacacactcaaggtgca

SEQ ID NO: 5774157 - DNA, 25 bp, Homo sapien
gtgcaaagggaaggtgggcattttc

SEQ ID NO: 5774158 - DNA, 25 bp, Homo sapien
tataacattgctttcatgtatgcca

SEQ ID NO: 5774159 - DNA, 25 bp, Homo sapien
ctcctcctagttccaaagcccctgg

SEQ ID NO: 5774160 - DNA, 25 bp, Homo sapien
gtgttatcaaaggtgaatgaagaat

SEQ ID NO: 5774161 - DNA, 25 bp, Homo sapien
gggcagaaggggcttgttccctgca

SEQ ID NO: 5774162 - DNA, 25 bp, Homo sapien
gccttgattcagcttcgagggaacc

SEQ ID NO: 5774163 - DNA, 25 bp, Homo sapien
ggacatttcctgatgcatttgcaac

SEQ ID NO: 5774164 - DNA, 25 bp, Homo sapien
caggtactgatcctgtttcttgctc

SEQ ID NO: 5774165 - DNA, 25 bp, Homo sapien
cagggctctggaaggggaggctcac

SEQ ID NO: 5774166 - DNA, 25 bp, Homo sapien
ctgagcctccacccagaccgaaaac

SEQ ID NO: 5774167 - DNA, 25 bp, Homo sapien
gatcctgtttcttgctctgagtgct

SEQ ID NO: 5774168 - DNA, 25 bp, Homo sapien
aaagaagccttgattcagcttcgag

SEQ ID NO: 5774169 - DNA, 25 bp, Homo sapien
aatgaagccctattacttgtttgta

SEQ ID NO: 5774170 - DNA, 25 bp, Homo sapien
tctggcccagaaagtgaacaccttg

SEQ ID NO: 5774171 - DNA, 25 bp, Homo sapien
ttccaaaatcgacaaggcgatggag

SEQ ID NO: 5774172 - DNA, 25 bp, Homo sapien
aatgagctggtgcccctttcagaag

SEQ ID NO: 5774173 - DNA, 25 bp, Homo sapien
cacactcaaggtgcactacaagtac

SEQ ID NO: 5774174 - DNA, 25 bp, Homo sapien
tgtgggcaggctgtttcgaccaaat

SEQ ID NO: 5774175 - DNA, 25 bp, Homo sapien
ggaagtgaagctcagtgttcccatg

SEQ ID NO: 5774176 - DNA, 25 bp, Homo sapien
tctggaatgaaggggtgctggcagc

SEQ ID NO: 5774177 - DNA, 25 bp, Homo sapien
tgccagggaacattgtctttgtctt

SEQ ID NO: 5774178 - DNA, 25 bp, Homo sapien
gggaggctcaccgtgtgctatttgg

SEQ ID NO: 5774179 - DNA, 25 bp, Homo sapien
tccttttctctctcatggtagggtt

SEQ ID NO: 5774180 - DNA, 25 bp, Homo sapien
tctgtggtgtgagaacacagtgggt

SEQ ID NO: 5774181 - DNA, 25 bp, Homo sapien
tgaggtgttatataacattgctttc

SEQ ID NO: 5774182 - DNA, 25 bp, Homo sapien
caaggcgatggagtgtgtctggaag

SEQ ID NO: 5774183 - DNA, 25 bp, Homo sapien
agcattggccacgagcatgaagtct

SEQ ID NO: 5774184 - DNA, 25 bp, Homo sapien
tttcctggggcacagtgggtgagga

SEQ ID NO: 5774185 - DNA, 25 bp, Homo sapien
cagttcaagctgtttgcctgtgagg

SEQ ID NO: 5774186 - DNA, 25 bp, Homo sapien
tccctgtgggcaggctgtttcgacc

SEQ ID NO: 5774187 - DNA, 25 bp, Homo sapien
aggcagctgagcctccacccagacc

SEQ ID NO: 5774188 - DNA, 25 bp, Homo sapien
gagtgcaaagggaaggtgggcattt

SEQ ID NO: 5774189 - DNA, 25 bp, Homo sapien
ctttcatgtatgccaagaaggagga

SEQ ID NO: 5774190 - DNA, 25 bp, Homo sapien
gatttcctggggcacagtgggtgag

SEQ ID NO: 5774191 - DNA, 25 bp, Homo sapien
aaaatcgacaaggcgatggagtgtg

SEQ ID NO: 5774192 - DNA, 25 bp, Homo sapien
tgggccacggtcatgttcaacgggc

SEQ ID NO: 5774193 - DNA, 25 bp, Homo sapien
tatgatttggctatcaaagacctta

SEQ ID NO: 5774194 - DNA, 25 bp, Homo sapien
ccaggtcatgccagggaacattgtc

SEQ ID NO: 5774195 - DNA, 25 bp, Homo sapien
ctctgtctcctggcagctctcttgg

SEQ ID NO: 5774196 - DNA, 25 bp, Homo sapien
agttgagctgcggatccaccctcag

SEQ ID NO: 5774197 - DNA, 25 bp, Homo sapien
agcagagaaggcctttaccagaagc

SEQ ID NO: 5774198 - DNA, 25 bp, Homo sapien
cttcagttatgaggctacccaacca

SEQ ID NO: 5774199 - DNA, 25 bp, Homo sapien
aaaaagaagagcctaaggaagtgaa

SEQ ID NO: 5774200 - DNA, 25 bp, Homo sapien
gcagaagctatatgagccagtggtg

SEQ ID NO: 5774201 - DNA, 25 bp, Homo sapien
atgccctacacactcaaggtgcact

SEQ ID NO: 5774202 - DNA, 25 bp, Homo sapien
aagaaaggcagccaagtggaggcac

SEQ ID NO: 5774203 - DNA, 25 bp, Homo sapien
tggcccagaaagtgaacaccttggg

SEQ ID NO: 5774204 - DNA, 25 bp, Homo sapien
tcatggtagggttatgagtcagttg

SEQ ID NO: 5774205 - DNA, 25 bp, Homo sapien
gggtgctggcagcggacaagaagga

SEQ ID NO: 5774206 - DNA, 25 bp, Homo sapien
ccgtgtgctatttgggtttgtgcct

SEQ ID NO: 5774207 - DNA, 25 bp, Homo sapien
tggcagcggacaagaaggactggaa

SEQ ID NO: 5774208 - DNA, 25 bp, Homo sapien
atgccttcagtgccgtccaggaccc

SEQ ID NO: 5774209 - DNA, 25 bp, Homo sapien
gtacatttggtgcacttttctgtgt

SEQ ID NO: 5774210 - DNA, 25 bp, Homo sapien
tgcctgtgaggtgttatataacatt

SEQ ID NO: 5774211 - DNA, 25 bp, Homo sapien
tgattcagcttcgagggaaccagct

SEQ ID NO: 5774212 - DNA, 25 bp, Homo sapien
agggatgctctactaccagacagag

SEQ ID NO: 5774213 - DNA, 25 bp, Homo sapien
gaaaaagctgatgctaataaccaga

SEQ ID NO: 5774214 - DNA, 25 bp, Homo sapien
caggacccccactcccggatttgct

SEQ ID NO: 5774215 - DNA, 25 bp, Homo sapien
gtccgacatcccagctcctcctagt

SEQ ID NO: 5774216 - DNA, 25 bp, Homo sapien
cttggcagtggcttacttccaacga

SEQ ID NO: 5774217 - DNA, 25 bp, Homo sapien
ggctcaccgtgtgctatttgggttt

SEQ ID NO: 5774218 - DNA, 25 bp, Homo sapien
aacgagggatgctctactaccagac

SEQ ID NO: 5774219 - DNA, 25 bp, Homo sapien
tgccgtccaggacccccactcccgg

SEQ ID NO: 5774220 - DNA, 25 bp, Homo sapien
cagccaagtggaggcactcttcagt

SEQ ID NO: 5774221 - DNA, 25 bp, Homo sapien
ggccacgagcatgaagtctgagccc

SEQ ID NO: 5774222 - DNA, 25 bp, Homo sapien
tcatcaagctgtacatttggtgcac

SEQ ID NO: 5774223 - DNA, 25 bp, Homo sapien
aggaaaagtggatggaagtgtctgg

SEQ ID NO: 5774224 - DNA, 25 bp, Homo sapien
aagatttagcacccttctgctgtat

SEQ ID NO: 5774225 - DNA, 25 bp, Homo sapien
ggctcccctacagccaggtccggga

SEQ ID NO: 5774226 - DNA, 25 bp, Homo sapien
gcctccacccagaccgaaaacccca

SEQ ID NO: 5774227 - DNA, 25 bp, Homo sapien
atgaagactcagcccgggctcccct

SEQ ID NO: 5774228 - DNA, 25 bp, Homo sapien
aaacattcatcaagctgtacatttg

SEQ ID NO: 5774229 - DNA, 25 bp, Homo sapien
gtcttccaggtactgatcctgtttc

SEQ ID NO: 5774230 - DNA, 25 bp, Homo sapien
gctggaacaaactaagctgagctat

SEQ ID NO: 5774231 - DNA, 25 bp, Homo sapien
caaaggtgaatgaagaatggctgga

SEQ ID NO: 5774232 - DNA, 25 bp, Homo sapien
tttccagatgaacccaaggaaagtg

SEQ ID NO: 5774233 - DNA, 25 bp, Homo sapien
ctgcaaccacaggcagctgagcctc

SEQ ID NO: 5774234 - DNA, 25 bp, Homo sapien
cccctttcagaagacagcatgaagg

SEQ ID NO: 5774235 - DNA, 25 bp, Homo sapien
aagaagagctccaggtcatgccagg

SEQ ID NO: 5774236 - DNA, 25 bp, Homo sapien
tgactctgtggtgtgagaacacagt

SEQ ID NO: 5774237 - DNA, 25 bp, Homo sapien
gcatgaaggatgcctggggccaggt

SEQ ID NO: 5774238 - DNA, 25 bp, Homo sapien
gcatctgtggtggatcaagacagtt

SEQ ID NO: 5774239 - DNA, 25 bp, Homo sapien
ctcttggcctcctagtttctaccta

SEQ ID NO: 5774240 - DNA, 25 bp, Homo sapien
gcgatggagtgtgtctggaagcaga

SEQ ID NO: 5774241 - DNA, 25 bp, Homo sapien
tggaagtgtctggaaagggcacgag

SEQ ID NO: 5774242 - DNA, 25 bp, Homo sapien
gtctcctggcagctctcttggcctc

SEQ ID NO: 5774243 - DNA, 25 bp, Homo sapien
tcttctctctgtctcctggcagctc

SEQ ID NO: 5774244 - DNA, 25 bp, Homo sapien
aagagcctaaggaagtgaagctcag

SEQ ID NO: 5774245 - DNA, 25 bp, Homo sapien
cacactgtaaacattcatcaagctg

SEQ ID NO: 5774246 - DNA, 25 bp, Homo sapien
tgggtttgtgcctgagacaaaagaa

SEQ ID NO: 5774247 - DNA, 25 bp, Homo sapien
agctctcttggcctcctagtttcta

SEQ ID NO: 5774248 - DNA, 25 bp, Homo sapien
gttcccatgccctacacactcaagg

SEQ ID NO: 5774249 - DNA, 25 bp, Homo sapien
ccagggaacattgtctttgtcttga

SEQ ID NO: 5774250 - DNA, 25 bp, Homo sapien
tggatggaagtgtctggaaagggca

SEQ ID NO: 5774251 - DNA, 25 bp, Homo sapien
aagcccctggaagaccccagctgtc

SEQ ID NO: 5774252 - DNA, 25 bp, Homo sapien
ggacccccactcccggatttgcttc

SEQ ID NO: 5774253 - DNA, 25 bp, Homo sapien
acaagtggctcagctggccaagaag

SEQ ID NO: 5774254 - DNA, 25 bp, Homo sapien
caagaaggattacctaggcaaggca

SEQ ID NO: 5774255 - DNA, 25 bp, Homo sapien
tgctctgagtgctagctagccagct

SEQ ID NO: 5774256 - DNA, 25 bp, Homo sapien
accttgaaccagttgagctgcggat

SEQ ID NO: 5774257 - DNA, 25 bp, Homo sapien
ggtgcacttttctgtgtcataccac

SEQ ID NO: 5774258 - DNA, 25 bp, Homo sapien
gcctttaccagaagcattaaccgag

SEQ ID NO: 5774259 - DNA, 25 bp, Homo sapien
agacaacagaacctcagcttaagaa

SEQ ID NO: 5774260 - DNA, 25 bp, Homo sapien
gctatcggcctcgggacagcaatga

SEQ ID NO: 5774261 - DNA, 25 bp, Homo sapien
gtgctggcagcggacaagaaggact

SEQ ID NO: 5774262 - DNA, 25 bp, Homo sapien
tccaccctcagcagcagccccagga

SEQ ID NO: 5774263 - DNA, 25 bp, Homo sapien
gcagcggacaagaaggactggaagg

SEQ ID NO: 5774264 - DNA, 25 bp, Homo sapien
tcctagttccaaagcccctggaaga

SEQ ID NO: 5774265 - DNA, 25 bp, Homo sapien
tgttcacactgtaaacattcatcaa

SEQ ID NO: 5774266 - DNA, 25 bp, Homo sapien
acatgactgaagcagagaaggcctt

SEQ ID NO: 5774267 - DNA, 25 bp, Homo sapien
gcacccttctgctgtatactgtact

SEQ ID NO: 5774268 - DNA, 25 bp, Homo sapien
cagacagagaaatatgatttggcta

SEQ ID NO: 5774269 - DNA, 25 bp, Homo sapien
gtgctatttgggtttgtgcctgaga

SEQ ID NO: 5774270 - DNA, 25 bp, Homo sapien
agatcttcagggctctggaagggga

SEQ ID NO: 5774271 - DNA, 25 bp, Homo sapien
gcatgaagtctgagcccagacattc

SEQ ID NO: 5774272 - DNA, 25 bp, Homo sapien
ttgtcttgaagaagggcaatgataa

SEQ ID NO: 5774273 - DNA, 25 bp, Homo sapien
cactcttcagttatgaggctaccca

SEQ ID NO: 5774274 - DNA, 25 bp, Homo sapien
gcccctggaagaccccagctgtcac

SEQ ID NO: 5774275 - DNA, 25 bp, Homo sapien
atgaggctacccaaccagaggacct

SEQ ID NO: 5774276 - DNA, 25 bp, Homo sapien
cacggtagtcatgaagactcagccc

SEQ ID NO: 5774277 - DNA, 25 bp, Homo sapien
ggattacctaggcaaggcaacggtc

SEQ ID NO: 5774278 - DNA, 25 bp, Homo sapien
aggtgttatataacattgctttcat

SEQ ID NO: 5774279 - DNA, 25 bp, Homo sapien
tgtatactgtactgagacattacag

SEQ ID NO: 5774280 - DNA, 25 bp, Homo sapien
tcagtgccgtccaggacccccactc

SEQ ID NO: 5774281 - DNA, 25 bp, Homo sapien
atttgcaacactgagaagttatctt

SEQ ID NO: 5774282 - DNA, 25 bp, Homo sapien
attcatcaagctgtacatttggtgc

SEQ ID NO: 5774283 - DNA, 25 bp, Homo sapien
tggaggccatcagcctctggaatga

SEQ ID NO: 5774284 - DNA, 25 bp, Homo sapien
tgtggtgtgagaacacagtgggtga

SEQ ID NO: 5774285 - DNA, 25 bp, Homo sapien
tcagcccgggctcccctacagccag

SEQ ID NO: 5774286 - DNA, 25 bp, Homo sapien
gaggcactcttcagttatgaggcta

SEQ ID NO: 5774287 - DNA, 25 bp, Homo sapien
tgagccagtggtgatccctgtgggc

SEQ ID NO: 5774288 - DNA, 25 bp, Homo sapien
acattgctttcatgtatgccaagaa

SEQ ID NO: 5774289 - DNA, 25 bp, Homo sapien
ataaccagacaacagaacctcagct

SEQ ID NO: 5774290 - DNA, 25 bp, Homo sapien
ttatcaaaggtgaatgaagaatggc

SEQ ID NO: 5774291 - DNA, 25 bp, Homo sapien
gctctccgcagtccgacatcccagc

SEQ ID NO: 5774292 - DNA, 25 bp, Homo sapien
agttgccaaaaggtggggacatttc

SEQ ID NO: 5774293 - DNA, 25 bp, Homo sapien
ctgagaagttatcttaagggaggct

SEQ ID NO: 5774294 - DNA, 25 bp, Homo sapien
ttccctgcaactaccttgaaccagt

SEQ ID NO: 5774295 - DNA, 25 bp, Homo sapien
cggtcgtggcatctgtggtggatca

SEQ ID NO: 5774296 - DNA, 25 bp, Homo sapien
caatgataactgggccacggtcatg

SEQ ID NO: 5774297 - DNA, 25 bp, Homo sapien
caagcacttggcagtggcttacttc

SEQ ID NO: 5774298 - DNA, 25 bp, Homo sapien
gcattttccccaaagtttttgttga

SEQ ID NO: 5774299 - DNA, 25 bp, Homo sapien
gtgtgtctggaagcagaagctatat

SEQ ID NO: 5774300 - DNA, 25 bp, Homo sapien
agggaacattgtctttgtcttgaag

SEQ ID NO: 5774301 - DNA, 25 bp, Homo sapien
tactcatctggcccagaaagtgaac

SEQ ID NO: 5774302 - DNA, 25 bp, Homo sapien
tggagtgtgtctggaagcagaagct

SEQ ID NO: 5774303 - DNA, 25 bp, Homo sapien
cctgagacaaaagaagagctccagg

SEQ ID NO: 5774304 - DNA, 25 bp, Homo sapien
atttggctatcaaagaccttaaaga

SEQ ID NO: 5774305 - DNA, 25 bp, Homo sapien
gccagctgtgttcacactgtaaaca

SEQ ID NO: 5774306 - DNA, 25 bp, Homo sapien
gagtgtgtctggaagcagaagctat

SEQ ID NO: 5774307 - DNA, 25 bp, Homo sapien
tactaccagacagagaaatatgatt

SEQ ID NO: 5774308 - DNA, 25 bp, Homo sapien
tggatcaagacagtttctctgggtt

SEQ ID NO: 5774309 - DNA, 25 bp, Homo sapien
ctaatcatgtccctggtggaggcca

SEQ ID NO: 5774310 - DNA, 25 bp, Homo sapien
atcaaagaccttaaagaagccttga

SEQ ID NO: 5774311 - DNA, 25 bp, Homo sapien
tctgagcccagacattccaaaatcg

SEQ ID NO: 5774312 - DNA, 25 bp, Homo sapien
ccagacaacagaacctcagcttaag

SEQ ID NO: 5774313 - DNA, 25 bp, Homo sapien
ccaaaatcgacaaggcgatggagtg

SEQ ID NO: 5774314 - DNA, 25 bp, Homo sapien
ttaaccgagacaagcacttggcagt

SEQ ID NO: 5774315 - DNA, 25 bp, Homo sapien
gcaaccacaggcagctgagcctcca

SEQ ID NO: 5774316 - DNA, 25 bp, Homo sapien
acaggcagctgagcctccacccaga

SEQ ID NO: 5774317 - DNA, 25 bp, Homo sapien
cccaaggaaagtgaaaaagctgatg

SEQ ID NO: 5774318 - DNA, 25 bp, Homo sapien
atttggaaagcactcggagagaagt

SEQ ID NO: 5774319 - DNA, 25 bp, Homo sapien
cacttttctgtgtcataccacaaaa

SEQ ID NO: 5774320 - DNA, 25 bp, Homo sapien
ctactagacaatgatgtgagtaccc

SEQ ID NO: 5774321 - DNA, 25 bp, Homo sapien
ctgtttcttgctctgagtgctagct

SEQ ID NO: 5774322 - DNA, 25 bp, Homo sapien
attgctttcatgtatgccaagaagg

SEQ ID NO: 5774323 - DNA, 25 bp, Homo sapien
tctttccttttctctctcatggtag

SEQ ID NO: 5774324 - DNA, 25 bp, Homo sapien
gtttcttgctctgagtgctagctag

SEQ ID NO: 5774325 - DNA, 25 bp, Homo sapien
tttaacctactagacaatgatgtga

SEQ ID NO: 5774326 - DNA, 25 bp, Homo sapien
gaggaatggaaaaaagctgaagaac

SEQ ID NO: 5774327 - DNA, 25 bp, Homo sapien
ggatttgcttcaacattggctgcat

SEQ ID NO: 5774328 - DNA, 25 bp, Homo sapien
gtcttgaagaagggcaatgataact

SEQ ID NO: 5774329 - DNA, 25 bp, Homo sapien
agcggacaagaaggactggaaggga

SEQ ID NO: 5774330 - DNA, 25 bp, Homo sapien
tagcacccttctgctgtatactgta

SEQ ID NO: 5774331 - DNA, 25 bp, Homo sapien
ttggccacgagcatgaagtctgagc

SEQ ID NO: 5774332 - DNA, 25 bp, Homo sapien
ggtccgggacatggtgtctaagaaa

SEQ ID NO: 5774333 - DNA, 25 bp, Homo sapien
atgctaataaccagacaacagaacc

SEQ ID NO: 5774334 - DNA, 25 bp, Homo sapien
tttagcacccttctgctgtatactg

SEQ ID NO: 5774335 - DNA, 25 bp, Homo sapien
agttatgaggctacccaaccagagg

SEQ ID NO: 5774336 - DNA, 25 bp, Homo sapien
tctctcatggtagggttatgagtca

SEQ ID NO: 5774337 - DNA, 25 bp, Homo sapien
cctattacttgtttgtaagatttag

SEQ ID NO: 5774338 - DNA, 25 bp, Homo sapien
aagggcacgagagagtcttccaggt

SEQ ID NO: 5774339 - DNA, 25 bp, Homo sapien
caaggcaacggtcgtggcatctgtg

SEQ ID NO: 5774340 - DNA, 25 bp, Homo sapien
gctgatagactataagatcctgggg

SEQ ID NO: 5774341 - DNA, 25 bp, Homo sapien
aagaacatgactgaagcagagaagg

SEQ ID NO: 5774342 - DNA, 25 bp, Homo sapien
gatccctgtgggcaggctgtttcga

SEQ ID NO: 5774343 - DNA, 25 bp, Homo sapien
ggtcatgttcaacgggcagaagggg

SEQ ID NO: 5774344 - DNA, 25 bp, Homo sapien
ccagaccgaaaaccccagagatctt

SEQ ID NO: 5774345 - DNA, 25 bp, Homo sapien
tgcggatccaccctcagcagcagcc

SEQ ID NO: 5774346 - DNA, 25 bp, Homo sapien
ggagaggaaaagtggatggaagtgt

SEQ ID NO: 5774347 - DNA, 25 bp, Homo sapien
ttgcccctctgcaaccacaggcagc

SEQ ID NO: 5774348 - DNA, 25 bp, Homo sapien
ggaagcagaagctatatgagccagt

SEQ ID NO: 5774349 - DNA, 25 bp, Homo sapien
cccaggaggaaagctctccgcagtc

SEQ ID NO: 5774350 - DNA, 25 bp, Homo sapien
tccaggtactgatcctgtttcttgc

SEQ ID NO: 5774351 - DNA, 25 bp, Homo sapien
acatggtgtctaagaaactggagct

SEQ ID NO: 5774352 - DNA, 25 bp, Homo sapien
agcacttggcagtggcttacttcca

SEQ ID NO: 5774353 - DNA, 25 bp, Homo sapien
ctgatcctgtttcttgctctgagtg

SEQ ID NO: 5774354 - DNA, 25 bp, Homo sapien
ctctgggtttgcccctctgcaacca

SEQ ID NO: 5774355 - DNA, 25 bp, Homo sapien
gaggctacccaaccagaggacctgg

SEQ ID NO: 5774356 - DNA, 25 bp, Homo sapien
agggaggctgggccccattctactc

SEQ ID NO: 5774357 - DNA, 25 bp, Homo sapien
aagacagcatgaaggatgcctgggg

SEQ ID NO: 5774358 - DNA, 25 bp, Homo sapien
agactcagcccgggctcccctacag

SEQ ID NO: 5774359 - DNA, 25 bp, Homo sapien
aaggtgaatgaagaatggctggaag

SEQ ID NO: 5774360 - DNA, 25 bp, Homo sapien
ggatgcctggggccaggtgaaaaac

SEQ ID NO: 5774361 - DNA, 25 bp, Homo sapien
cccgggctcccctacagccaggtcc

SEQ ID NO: 5774362 - DNA, 25 bp, Homo sapien
ggccagaaacaaaaagaagagccta

SEQ ID NO: 5774363 - DNA, 25 bp, Homo sapien
agaagctatatgagccagtggtgat

SEQ ID NO: 5774364 - DNA, 25 bp, Homo sapien
gtttctacctaatcatgtccctggt

SEQ ID NO: 5774365 - DNA, 25 bp, Homo sapien
tccgggacatggtgtctaagaaact

SEQ ID NO: 5774366 - DNA, 25 bp, Homo sapien
aaaatttaacctactagacaatgat

SEQ ID NO: 5774367 - DNA, 25 bp, Homo sapien
gctaataaccagacaacagaacctc

SEQ ID NO: 5774368 - DNA, 25 bp, Homo sapien
aggaggaatggaaaaaagctgaaga

SEQ ID NO: 5774369 - DNA, 25 bp, Homo sapien
caaggtgcactacaagtacacggta

SEQ ID NO: 5774370 - DNA, 25 bp, Homo sapien
gaagttatcttaagggaggctgggc

SEQ ID NO: 5774371 - DNA, 25 bp, Homo sapien
cacttggcagtggcttacttccaac

SEQ ID NO: 5774372 - DNA, 25 bp, Homo sapien
cgctccaacctgtcttctctctgtc

SEQ ID NO: 5774373 - DNA, 25 bp, Homo sapien
gtgcactacaagtacacggtagtca

SEQ ID NO: 5774374 - DNA, 25 bp, Homo sapien
gctgggccccattctactcatctgg

SEQ ID NO: 5774375 - DNA, 25 bp, Homo sapien
tcatgtccctggtggaggccatcag

SEQ ID NO: 5774376 - DNA, 25 bp, Homo sapien
gaagcattaaccgagacaagcactt

SEQ ID NO: 5774377 - DNA, 25 bp, Homo sapien
agtggatggaagtgtctggaaaggg

SEQ ID NO: 5774378 - DNA, 25 bp, Homo sapien
atgtccctggtggaggccatcagcc

SEQ ID NO: 5774379 - DNA, 25 bp, Homo sapien
aacccaaggaaagtgaaaaagctga

SEQ ID NO: 5774380 - DNA, 25 bp, Homo sapien
gtgtgagaacacagtgggtgaccaa

SEQ ID NO: 5774381 - DNA, 25 bp, Homo sapien
tggtgtgagaacacagtgggtgacc

SEQ ID NO: 5774382 - DNA, 25 bp, Homo sapien
gaacaaactaagctgagctatcggc

SEQ ID NO: 5774383 - DNA, 25 bp, Homo sapien
aacactgagaagttatcttaaggga

SEQ ID NO: 5774384 - DNA, 25 bp, Homo sapien
agaccgaaaaccccagagatcttca

SEQ ID NO: 5774385 - DNA, 25 bp, Homo sapien
taggcaaggcaacggtcgtggcatc

SEQ ID NO: 5774386 - DNA, 25 bp, Homo sapien
gccaagtggaggcactcttcagtta

SEQ ID NO: 5774387 - DNA, 25 bp, Homo sapien
aaagcactcggagagaagtctagga

SEQ ID NO: 5774388 - DNA, 25 bp, Homo sapien
agacaagtggctcagctggccaaga

SEQ ID NO: 5774389 - DNA, 25 bp, Homo sapien
ggtgcccctttcagaagacagcatg

SEQ ID NO: 5774390 - DNA, 25 bp, Homo sapien
tatcggcctcgggacagcaatgagc

SEQ ID NO: 5774391 - DNA, 25 bp, Homo sapien
ccattctactcatctggcccagaaa

SEQ ID NO: 5774392 - DNA, 25 bp, Homo sapien
atgcctggggccaggtgaaaaacta

SEQ ID NO: 5774393 - DNA, 25 bp, Homo sapien
caggctgtttcgaccaaatgagaga

SEQ ID NO: 5774394 - DNA, 25 bp, Homo sapien
caaggctttccagatgaacccaagg

SEQ ID NO: 5774395 - DNA, 25 bp, Homo sapien
ccagaaacaaaaagaagagcctaag

SEQ ID NO: 5774396 - DNA, 25 bp, Homo sapien
cgggacatggtgtctaagaaactgg

SEQ ID NO: 5774397 - DNA, 25 bp, Homo sapien
actgagacattacagtttggaagtg

SEQ ID NO: 5774398 - DNA, 25 bp, Homo sapien
tccagatgaacccaaggaaagtgaa

SEQ ID NO: 5774399 - DNA, 25 bp, Homo sapien
ttcgaccaaatgagagacaagtggc

SEQ ID NO: 5774400 - DNA, 25 bp, Homo sapien
aaccccagagatcttcagggctctg

SEQ ID NO: 5774401 - DNA, 25 bp, Homo sapien
tacagtttggaagtgttaactattt

SEQ ID NO: 5774402 - DNA, 25 bp, Homo sapien
ttctgctgtatactgtactgagaca

SEQ ID NO: 5774403 - DNA, 25 bp, Homo sapien
ccagtggtgatccctgtgggcaggc

SEQ ID NO: 5774404 - DNA, 25 bp, Homo sapien
ttaaaatttaacctactagacaatg

SEQ ID NO: 5774405 - DNA, 25 bp, Homo sapien
ccagctgtcaccaggccagaaacaa

SEQ ID NO: 5774406 - DNA, 25 bp, Homo sapien
tgggcaggctgtttcgaccaaatga

SEQ ID NO: 5774407 - DNA, 25 bp, Homo sapien
tggaacaaactaagctgagctatcg

SEQ ID NO: 5774408 - DNA, 25 bp, Homo sapien
tgagacattacagtttggaagtgtt

SEQ ID NO: 5774409 - DNA, 25 bp, Homo sapien
ctgtacatttggtgcacttttctgt

SEQ ID NO: 5774410 - DNA, 25 bp, Homo sapien
cagccaggtccgggacatggtgtct

SEQ ID NO: 5774411 - DNA, 25 bp, Homo sapien
cttgaaccagttgagctgcggatcc

SEQ ID NO: 5774412 - DNA, 25 bp, Homo sapien
acatttcctgatgcatttgcaacac

SEQ ID NO: 5774413 - DNA, 25 bp, Homo sapien
caccgtgtgctatttgggtttgtgc

SEQ ID NO: 5774414 - DNA, 25 bp, Homo sapien
tttccttttctctctcatggtaggg

SEQ ID NO: 5774415 - DNA, 25 bp, Homo sapien
ggcagccaagtggaggcactcttca

SEQ ID NO: 5774416 - DNA, 25 bp, Homo sapien
ccacggtcatgttcaacgggcagaa

SEQ ID NO: 5774417 - DNA, 25 bp, Homo sapien
ttggtgcacttttctgtgtcatacc

SEQ ID NO: 5774418 - DNA, 25 bp, Homo sapien
tgtctggaaagggcacgagagagtc

SEQ ID NO: 5774419 - DNA, 25 bp, Homo sapien
ccttgggggccactaaggcagccct

SEQ ID NO: 5774420 - DNA, 25 bp, Homo sapien
gagagaagtctaggatgtttcacaa

SEQ ID NO: 5774421 - DNA, 25 bp, Homo sapien
cggagagaagtctaggatgtttcac

SEQ ID NO: 5774422 - DNA, 25 bp, Homo sapien
ctcctagtttctacctaatcatgtc

SEQ ID NO: 5774423 - DNA, 25 bp, Homo sapien
gactgcgcaactacagatttggaaa

SEQ ID NO: 5774424 - DNA, 25 bp, Homo sapien
ccaggccagaaacaaaaagaagagc

SEQ ID NO: 5774425 - DNA, 25 bp, Homo sapien
catgtatgccaagaaggaggaatgg

SEQ ID NO: 5774426 - DNA, 25 bp, Homo sapien
ctgggtttgcccctctgcaaccaca

SEQ ID NO: 5774427 - DNA, 25 bp, Homo sapien
ccttaaagaagccttgattcagctt

SEQ ID NO: 5774428 - DNA, 25 bp, Homo sapien
agcagccccaggaggaaagctctcc

SEQ ID NO: 5774429 - DNA, 25 bp, Homo sapien
ccaacgagggatgctctactaccag

SEQ ID NO: 5774430 - DNA, 25 bp, Homo sapien
gagcatgaagtctgagcccagacat

SEQ ID NO: 5774431 - DNA, 25 bp, Homo sapien
tgatagactataagatcctggggct

SEQ ID NO: 5774432 - DNA, 25 bp, Homo sapien
cagacattccaaaatcgacaaggcg

SEQ ID NO: 5774433 - DNA, 25 bp, Homo sapien
tgttaactatttattccctgttaaa

SEQ ID NO: 5774434 - DNA, 25 bp, Homo sapien
gggaaccagctgatagactataaga

SEQ ID NO: 5774435 - DNA, 25 bp, Homo sapien
tgggccccattctactcatctggcc

SEQ ID NO: 5774436 - DNA, 25 bp, Homo sapien
gacagcatgaaggatgcctggggcc

SEQ ID NO: 5774437 - DNA, 25 bp, Homo sapien
gaagggagccctggatgccttcagt

SEQ ID NO: 5774438 - DNA, 25 bp, Homo sapien
ggaaaaaagctgaagaacagttagc

SEQ ID NO: 5774439 - DNA, 25 bp, Homo sapien
aaagaagagcctaaggaagtgaagc

SEQ ID NO: 5774440 - DNA, 25 bp, Homo sapien
aggtggggacatttcctgatgcatt

SEQ ID NO: 5774441 - DNA, 25 bp, Homo sapien
gggagacgctccaacctgtcttctc

SEQ ID NO: 5774442 - DNA, 25 bp, Homo sapien
tagctagccagctgtgttcacactg

SEQ ID NO: 5774443 - DNA, 25 bp, Homo sapien
ggacatggtgtctaagaaactggag

SEQ ID NO: 5774444 - DNA, 25 bp, Homo sapien
ttctctgggtttgcccctctgcaac

SEQ ID NO: 5774445 - DNA, 25 bp, Homo sapien
ggatgatttcctggggcacagtggg

SEQ ID NO: 5774446 - DNA, 25 bp, Homo sapien
agtgccgtccaggacccccactccc

SEQ ID NO: 5774447 - DNA, 25 bp, Homo sapien
atttgcttcaacattggctgcatgt

SEQ ID NO: 5774448 - DNA, 25 bp, Homo sapien
gttatataacattgctttcatgtat

SEQ ID NO: 5774449 - DNA, 25 bp, Homo sapien
cccagacattccaaaatcgacaagg

SEQ ID NO: 5774450 - DNA, 25 bp, Homo sapien
tggcagctctcttggcctcctagtt

SEQ ID NO: 5774451 - DNA, 25 bp, Homo sapien
aaaggtggggacatttcctgatgca

SEQ ID NO: 5774452 - DNA, 25 bp, Homo sapien
caccaggccagaaacaaaaagaaga

SEQ ID NO: 5774453 - DNA, 25 bp, Homo sapien
tcgagggaaccagctgatagactat

SEQ ID NO: 5774454 - DNA, 25 bp, Homo sapien
tacactatcctgaagaacatgactg

SEQ ID NO: 5774455 - DNA, 25 bp, Homo sapien
acacagtgggtgaccaaggctttcc

SEQ ID NO: 5774456 - DNA, 25 bp, Homo sapien
catgccagggaacattgtctttgtc

SEQ ID NO: 5774457 - DNA, 25 bp, Homo sapien
ctatcctgaagaacatgactgaagc

SEQ ID NO: 5774458 - DNA, 25 bp, Homo sapien
aggggtgctggcagcggacaagaag

SEQ ID NO: 5774459 - DNA, 25 bp, Homo sapien
gctttccagatgaacccaaggaaag

SEQ ID NO: 5774460 - DNA, 25 bp, Homo sapien
aagactgcgcaactacagatttgga

SEQ ID NO: 5774461 - DNA, 25 bp, Homo sapien
atgactgaagcagagaaggccttta

SEQ ID NO: 5774462 - DNA, 25 bp, Homo sapien
caaaaggtggggacatttcctgatg

SEQ ID NO: 5774463 - DNA, 25 bp, Homo sapien
tggagctccggctggaacaaactaa

SEQ ID NO: 5774464 - DNA, 25 bp, Homo sapien
ggtactgatcctgtttcttgctctg

SEQ ID NO: 5774465 - DNA, 25 bp, Homo sapien
caagtacacggtagtcatgaagact

SEQ ID NO: 5774466 - DNA, 25 bp, Homo sapien
cgagggatgctctactaccagacag

SEQ ID NO: 5774467 - DNA, 25 bp, Homo sapien
accagctgatagactataagatcct

SEQ ID NO: 5774468 - DNA, 25 bp, Homo sapien
gaaggggaggctcaccgtgtgctat

SEQ ID NO: 5774469 - DNA, 25 bp, Homo sapien
aggaaagctctccgcagtccgacat

SEQ ID NO: 5774470 - DNA, 25 bp, Homo sapien
ggggcttgttccctgcaactacctt

SEQ ID NO: 5774471 - DNA, 25 bp, Homo sapien
tccaggacccccactcccggatttg

SEQ ID NO: 5774472 - DNA, 25 bp, Homo sapien
tgcttctttccttttctctctcatg

SEQ ID NO: 5774473 - DNA, 25 bp, Homo sapien
ttgtaagatttagcacccttctgct

SEQ ID NO: 5774474 - DNA, 25 bp, Homo sapien
agatttggaaagcactcggagagaa

SEQ ID NO: 5774475 - DNA, 25 bp, Homo sapien
ggaatggaaaaaagctgaagaacag

SEQ ID NO: 5774476 - DNA, 25 bp, Homo sapien
aactaccttgaaccagttgagctgc

SEQ ID NO: 5774477 - DNA, 25 bp, Homo sapien
tcccagctcctcctagttccaaagc

SEQ ID NO: 5774478 - DNA, 25 bp, Homo sapien
aaggaagtgaagctcagtgttccca

SEQ ID NO: 5774479 - DNA, 25 bp, Homo sapien
ctgtttcgaccaaatgagagacaag

SEQ ID NO: 5774480 - DNA, 25 bp, Homo sapien
agaaaatgaagccctattacttgtt

SEQ ID NO: 5774481 - DNA, 25 bp, Homo sapien
atcctggggctccagttcaagctgt

SEQ ID NO: 5774482 - DNA, 25 bp, Homo sapien
agggagccctggatgccttcagtgc

SEQ ID NO: 5774483 - DNA, 25 bp, Homo sapien
gtgaaaaagctgatgctaataacca

SEQ ID NO: 5774484 - DNA, 25 bp, Homo sapien
gaaatatgatttggctatcaaagac

SEQ ID NO: 5774485 - DNA, 25 bp, Homo sapien
tctggaaagggcacgagagagtctt

SEQ ID NO: 5774486 - DNA, 25 bp, Homo sapien
aggcctttaccagaagcattaaccg

SEQ ID NO: 5774487 - DNA, 25 bp, Homo sapien
tgcatgtacactatcctgaagaaca

SEQ ID NO: 5774488 - DNA, 25 bp, Homo sapien
gctgatgctaataaccagacaacag

SEQ ID NO: 5774489 - DNA, 25 bp, Homo sapien
aaccagacaacagaacctcagctta

SEQ ID NO: 5774490 - DNA, 25 bp, Homo sapien
agatcctggggctccagttcaagct

SEQ ID NO: 5774491 - DNA, 25 bp, Homo sapien
ctctctgtctcctggcagctctctt

SEQ ID NO: 5774492 - DNA, 25 bp, Homo sapien
attcagcttcgagggaaccagctga

SEQ ID NO: 5774493 - DNA, 25 bp, Homo sapien
aaccagttgagctgcggatccaccc

SEQ ID NO: 5774494 - DNA, 25 bp, Homo sapien
ttctctctgtctcctggcagctctc

SEQ ID NO: 5774495 - DNA, 25 bp, Homo sapien
ccaacctgtcttctctctgtctcct

SEQ ID NO: 5774496 - DNA, 25 bp, Homo sapien
gctccagttcaagctgtttgcctgt

SEQ ID NO: 5774497 - DNA, 25 bp, Homo sapien
tttgggtttgtgcctgagacaaaag

SEQ ID NO: 5774498 - DNA, 25 bp, Homo sapien
gcctaaggaagtgaagctcagtgtt

SEQ ID NO: 5774499 - DNA, 25 bp, Homo sapien
atgctctactaccagacagagaaat

SEQ ID NO: 5774500 - DNA, 25 bp, Homo sapien
tataagatcctggggctccagttca

SEQ ID NO: 5774501 - DNA, 25 bp, Homo sapien
aatgagagacaagtggctcagctgg

SEQ ID NO: 5774502 - DNA, 25 bp, Homo sapien
atcagcctctggaatgaaggggtgc

SEQ ID NO: 5774503 - DNA, 25 bp, Homo sapien
aagcagaagctatatgagccagtgg

SEQ ID NO: 5774504 - DNA, 25 bp, Homo sapien
tttcagaagacagcatgaaggatgc

SEQ ID NO: 5774505 - DNA, 25 bp, Homo sapien
ccccactcccggatttgcttcaaca

SEQ ID NO: 5774506 - DNA, 25 bp, Homo sapien
tgatgctaataaccagacaacagaa

SEQ ID NO: 5774507 - DNA, 25 bp, Homo sapien
caccttgggggccactaaggcagcc

SEQ ID NO: 5774508 - DNA, 25 bp, Homo sapien
cagatgaacccaaggaaagtgaaaa

SEQ ID NO: 5774509 - DNA, 25 bp, Homo sapien
gatgaacccaaggaaagtgaaaaag

SEQ ID NO: 5774510 - DNA, 25 bp, Homo sapien
cctacagccaggtccgggacatggt

SEQ ID NO: 5774511 - DNA, 25 bp, Homo sapien
agtctaggatgtttcacaaactaca

SEQ ID NO: 5774512 - DNA, 25 bp, Homo sapien
aagaagggcaatgataactgggcca

SEQ ID NO: 5774513 - DNA, 25 bp, Homo sapien
cgtggcatctgtggtggatcaagac

SEQ ID NO: 5774514 - DNA, 25 bp, Homo sapien
ctcagtgttcccatgccctacacac

SEQ ID NO: 5774515 - DNA, 25 bp, Homo sapien
aaggggcttgttccctgcaactacc

SEQ ID NO: 5774516 - DNA, 25 bp, Homo sapien
gatggagtgtgtctggaagcagaag

SEQ ID NO: 5774517 - DNA, 25 bp, Homo sapien
ctttaccagaagcattaaccgagac

SEQ ID NO: 5774518 - DNA, 25 bp, Homo sapien
agaaggggcttgttccctgcaacta

SEQ ID NO: 5774519 - DNA, 25 bp, Homo sapien
aggctgggccccattctactcatct

SEQ ID NO: 5774520 - DNA, 25 bp, Homo sapien
taagaaactggagctccggctggaa

SEQ ID NO: 5774521 - DNA, 25 bp, Homo sapien
cctgtgaggtgttatataacattgc

SEQ ID NO: 5774522 - DNA, 25 bp, Homo sapien
cagagaaggcctttaccagaagcat

SEQ ID NO: 5774523 - DNA, 25 bp, Homo sapien
aagctgaagaacagttagcattggc

SEQ ID NO: 5774524 - DNA, 25 bp, Homo sapien
tctgcttctttccttttctctctca

SEQ ID NO: 5774525 - DNA, 25 bp, Homo sapien
aggaaagtgaaaaagctgatgctaa

SEQ ID NO: 5774526 - DNA, 25 bp, Homo sapien
agctgagctatcggcctcgggacag

SEQ ID NO: 5774527 - DNA, 25 bp, Homo sapien
gaaccagctgatagactataagatc

SEQ ID NO: 5774528 - DNA, 25 bp, Homo sapien
tcatgaagactcagcccgggctccc

SEQ ID NO: 5774529 - DNA, 25 bp, Homo sapien
aaccgagacaagcacttggcagtgg

SEQ ID NO: 5774530 - DNA, 25 bp, Homo sapien
taagctgagctatcggcctcgggac

SEQ ID NO: 5774531 - DNA, 25 bp, Homo sapien
tctccgcagtccgacatcccagctc

SEQ ID NO: 5774532 - DNA, 25 bp, Homo sapien
gcaactacagatttggaaagcactc

SEQ ID NO: 5774533 - DNA, 25 bp, Homo sapien
cggctggaacaaactaagctgagct

SEQ ID NO: 5774534 - DNA, 25 bp, Homo sapien
cagaagcattaaccgagacaagcac

SEQ ID NO: 5774535 - DNA, 25 bp, Homo sapien
tgggtgaccaaggctttccagatga

SEQ ID NO: 5774536 - DNA, 25 bp, Homo sapien
catctggcccagaaagtgaacacct

SEQ ID NO: 5774537 - DNA, 25 bp, Homo sapien
agcccagacattccaaaatcgacaa

SEQ ID NO: 5774538 - DNA, 25 bp, Homo sapien
gccctattacttgtttgtaagattt

SEQ ID NO: 5774539 - DNA, 25 bp, Homo sapien
tacaagtacacggtagtcatgaaga

SEQ ID NO: 5774540 - DNA, 25 bp, Homo sapien
tggaagggagccctggatgccttca

SEQ ID NO: 5774541 - DNA, 25 bp, Homo sapien
agttagcattggccacgagcatgaa

SEQ ID NO: 5774542 - DNA, 25 bp, Homo sapien
cttgctctgagtgctagctagccag

SEQ ID NO: 5774543 - DNA, 25 bp, Homo sapien
aagccttgattcagcttcgagggaa

SEQ ID NO: 5774544 - DNA, 25 bp, Homo sapien
gggagtgcaaagggaaggtgggcat

SEQ ID NO: 5774545 - DNA, 25 bp, Homo sapien
tggctgcatgtacactatcctgaag

SEQ ID NO: 5774546 - DNA, 25 bp, Homo sapien
gcactacaagtacacggtagtcatg

SEQ ID NO: 5774547 - DNA, 25 bp, Homo sapien
aactacaaagctgaagaaaatgaag

SEQ ID NO: 5774548 - DNA, 25 bp, Homo sapien
acagtgggtgaccaaggctttccag

SEQ ID NO: 5774549 - DNA, 25 bp, Homo sapien
atagactataagatcctggggctcc

SEQ ID NO: 5774550 - DNA, 25 bp, Homo sapien
tcatgttcaacgggcagaaggggct

SEQ ID NO: 5774551 - DNA, 25 bp, Homo sapien
ggtgtctaagaaactggagctccgg

SEQ ID NO: 5774552 - DNA, 25 bp, Homo sapien
gtagtcatgaagactcagcccgggc

SEQ ID NO: 5774553 - DNA, 25 bp, Homo sapien
gctgaagaacagttagcattggcca

SEQ ID NO: 5774554 - DNA, 25 bp, Homo sapien
tctctctcatggtagggttatgagt

SEQ ID NO: 5774555 - DNA, 25 bp, Homo sapien
ctctcttggcctcctagtttctacc

SEQ ID NO: 5774556 - DNA, 25 bp, Homo sapien
agaaacaaaaagaagagcctaagga

SEQ ID NO: 5774557 - DNA, 25 bp, Homo sapien
gctggccaagaaggattacctaggc

SEQ ID NO: 5774558 - DNA, 25 bp, Homo sapien
ctatcaaagaccttaaagaagcctt

SEQ ID NO: 5774559 - DNA, 25 bp, Homo sapien
gaatgaaggggtgctggcagcggac

SEQ ID NO: 5774560 - DNA, 25 bp, Homo sapien
ccgacatcccagctcctcctagttc

SEQ ID NO: 5774561 - DNA, 25 bp, Homo sapien
accgaaaaccccagagatcttcagg

SEQ ID NO: 5774562 - DNA, 25 bp, Homo sapien
agtggtgatccctgtgggcaggctg

SEQ ID NO: 5774563 - DNA, 25 bp, Homo sapien
gaagctcagtgttcccatgccctac

SEQ ID NO: 5774564 - DNA, 25 bp, Homo sapien
aagtttttgttgaagactgcgcaac

SEQ ID NO: 5774565 - DNA, 25 bp, Homo sapien
agccctggatgccttcagtgccgtc

SEQ ID NO: 5774566 - DNA, 25 bp, Homo sapien
cagcagcagccccaggaggaaagct

SEQ ID NO: 5774567 - DNA, 25 bp, Homo sapien
cttaagggaggctgggccccattct

SEQ ID NO: 5774568 - DNA, 25 bp, Homo sapien
gcttaagaaaggcagccaagtggag

SEQ ID NO: 5774569 - DNA, 25 bp, Homo sapien
gaggccatcagcctctggaatgaag

SEQ ID NO: 5774570 - DNA, 25 bp, Homo sapien
gacaagcacttggcagtggcttact

SEQ ID NO: 5774571 - DNA, 25 bp, Homo sapien
ggaggctgggccccattctactcat

SEQ ID NO: 5774572 - DNA, 25 bp, Homo sapien
caaagaccttaaagaagccttgatt

SEQ ID NO: 5774573 - DNA, 25 bp, Homo sapien
tctctctctgcttctttccttttct

SEQ ID NO: 5774574 - DNA, 25 bp, Homo sapien
ggccaggtgaaaaactactgcctga

SEQ ID NO: 5774575 - DNA, 25 bp, Homo sapien
gctctactaccagacagagaaatat

SEQ ID NO: 5774576 - DNA, 25 bp, Homo sapien
tctaggatgtttcacaaactacaaa

SEQ ID NO: 5774577 - DNA, 25 bp, Homo sapien
agcttcgagggaaccagctgataga

SEQ ID NO: 5774578 - DNA, 25 bp, Homo sapien
ggggccaggtgaaaaactactgcct

SEQ ID NO: 5774579 - DNA, 25 bp, Homo sapien
actctgtggtgtgagaacacagtgg

SEQ ID NO: 5774580 - DNA, 25 bp, Homo sapien
gtaagatttagcacccttctgctgt

SEQ ID NO: 5774581 - DNA, 25 bp, Homo sapien
cggacaagaaggactggaagggagc

SEQ ID NO: 5774582 - DNA, 25 bp, Homo sapien
tacctaggcaaggcaacggtcgtgg

SEQ ID NO: 5774583 - DNA, 25 bp, Homo sapien
ctacccaaccagaggacctggagtt

SEQ ID NO: 5774584 - DNA, 25 bp, Homo sapien
ccctggtggaggccatcagcctctg

SEQ ID NO: 5774585 - DNA, 25 bp, Homo sapien
tgtgttcacactgtaaacattcatc

SEQ ID NO: 5774586 - DNA, 25 bp, Homo sapien
ctccaggtcatgccagggaacattg

SEQ ID NO: 5774587 - DNA, 25 bp, Homo sapien
gagaaggcctttaccagaagcatta

SEQ ID NO: 5774588 - DNA, 25 bp, Homo sapien
ggaggaaagctctccgcagtccgac

SEQ ID NO: 5774589 - DNA, 25 bp, Homo sapien
aatcgacaaggcgatggagtgtgtc

SEQ ID NO: 5774590 - DNA, 25 bp, Homo sapien
cagctgtgttcacactgtaaacatt

SEQ ID NO: 5774591 - DNA, 25 bp, Homo sapien
aaggcagccctgctaggggagacgc

SEQ ID NO: 5774592 - DNA, 25 bp, Homo sapien
agaaactggagctccggctggaaca

SEQ ID NO: 5774593 - DNA, 25 bp, Homo sapien
gtttcgaccaaatgagagacaagtg

SEQ ID NO: 5774594 - DNA, 25 bp, Homo sapien
agaaggactggaagggagccctgga

SEQ ID NO: 5774595 - DNA, 25 bp, Homo sapien
tggaaggggaggctcaccgtgtgct

SEQ ID NO: 5774596 - DNA, 25 bp, Homo sapien
cattaaccgagacaagcacttggca

SEQ ID NO: 5774597 - DNA, 25 bp, Homo sapien
aaaagctgaagaacagttagcattg

SEQ ID NO: 5774598 - DNA, 25 bp, Homo sapien
ctggtgcccctttcagaagacagca

SEQ ID NO: 5774599 - DNA, 25 bp, Homo sapien
gaagagctccaggtcatgccaggga

SEQ ID NO: 5774600 - DNA, 25 bp, Homo sapien
cgcagtccgacatcccagctcctcc

SEQ ID NO: 5774601 - DNA, 25 bp, Homo sapien
ttttgttgaagactgcgcaactaca

SEQ ID NO: 5774602 - DNA, 25 bp, Homo sapien
cctggggctccagttcaagctgttt

SEQ ID NO: 5774603 - DNA, 25 bp, Homo sapien
gggtttgcccctctgcaaccacagg

SEQ ID NO: 5774604 - DNA, 25 bp, Homo sapien
ggctcagctggccaagaaggattac

SEQ ID NO: 5774605 - DNA, 25 bp, Homo sapien
agcccgggctcccctacagccaggt

SEQ ID NO: 5774606 - DNA, 25 bp, Homo sapien
ccatcagcctctggaatgaaggggt

SEQ ID NO: 5774607 - DNA, 25 bp, Homo sapien
ttcatgtatgccaagaaggaggaat

SEQ ID NO: 5774608 - DNA, 25 bp, Homo sapien
tacacggtagtcatgaagactcagc

SEQ ID NO: 5774609 - DNA, 25 bp, Homo sapien
cttcgagggaaccagctgatagact

SEQ ID NO: 5774610 - DNA, 25 bp, Homo sapien
ctgcaactaccttgaaccagttgag

SEQ ID NO: 5774611 - DNA, 25 bp, Homo sapien
cccctacagccaggtccgggacatg

SEQ ID NO: 5774612 - DNA, 25 bp, Homo sapien
aatcatgtccctggtggaggccatc

SEQ ID NO: 5774613 - DNA, 25 bp, Homo sapien
acggtcatgttcaacgggcagaagg

SEQ ID NO: 5774614 - DNA, 25 bp, Homo sapien
gaagactcagcccgggctcccctac

SEQ ID NO: 5774615 - DNA, 25 bp, Homo sapien
aggtgaaaaactactgcctgactct

SEQ ID NO: 5774616 - DNA, 25 bp, Homo sapien
gggcacgagagagtcttccaggtac

SEQ ID NO: 5774617 - DNA, 25 bp, Homo sapien
aagctgtttgcctgtgaggtgttat

SEQ ID NO: 5774618 - DNA, 25 bp, Homo sapien
attacagtttggaagtgttaactat

SEQ ID NO: 5774619 - DNA, 25 bp, Homo sapien
agtgggtgaccaaggctttccagat

SEQ ID NO: 5774620 - DNA, 25 bp, Homo sapien
ttggaagtgttaactatttattccc

SEQ ID NO: 5774621 - DNA, 25 bp, Homo sapien
acaaactaagctgagctatcggcct

SEQ ID NO: 5774622 - DNA, 25 bp, Homo sapien
cacaaactacaaagctgaagaaaat

SEQ ID NO: 5774623 - DNA, 25 bp, Homo sapien
cagtttggaagtgttaactatttat

SEQ ID NO: 5774624 - DNA, 25 bp, Homo sapien
ggatgtttcacaaactacaaagctg

SEQ ID NO: 5774625 - DNA, 25 bp, Homo sapien
agctgaagaaaatgaagccctatta

SEQ ID NO: 5774626 - DNA, 25 bp, Homo sapien
aacctgtcttctctctgtctcctgg

SEQ ID NO: 5774627 - DNA, 25 bp, Homo sapien
tatataacattgctttcatgtatgc

SEQ ID NO: 5774628 - DNA, 25 bp, Homo sapien
tggtgttatcaaaggtgaatgaaga

SEQ ID NO: 5774629 - DNA, 25 bp, Homo sapien
agctgtcaccaggccagaaacaaaa

SEQ ID NO: 5774630 - DNA, 25 bp, Homo sapien
cgaaaaccccagagatcttcagggc

SEQ ID NO: 5774631 - DNA, 25 bp, Homo sapien
cgggctcccctacagccaggtccgg

SEQ ID NO: 5774632 - DNA, 25 bp, Homo sapien
agccagtggtgatccctgtgggcag

SEQ ID NO: 5774633 - DNA, 25 bp, Homo sapien
agctccaggtcatgccagggaacat

SEQ ID NO: 5774634 - DNA, 25 bp, Homo sapien
ttgcttcaacattggctgcatgtac

SEQ ID NO: 5774635 - DNA, 25 bp, Homo sapien
ttaccagaagcattaaccgagacaa

SEQ ID NO: 5774636 - DNA, 25 bp, Homo sapien
tgaagactgcgcaactacagatttg

SEQ ID NO: 5774637 - DNA, 25 bp, Homo sapien
ggagccccaggatcttatagtctat

SEQ ID NO: 5774638 - DNA, 25 bp, Homo sapien
tggtgacagctggggtcttccaggg

SEQ ID NO: 5774639 - DNA, 25 bp, Homo sapien
gacagagagaagacaggttggagcg

SEQ ID NO: 5774640 - DNA, 25 bp, Homo sapien
tcttgtccgctgccagcaccccttc

SEQ ID NO: 5774641 - DNA, 25 bp, Homo sapien
gttggaagtaagccactgccaagtg

SEQ ID NO: 5774642 - DNA, 25 bp, Homo sapien
aaatagcacacggtgagcctcccct

SEQ ID NO: 5774643 - DNA, 25 bp, Homo sapien
tgtccccaccttttggcaactgact

SEQ ID NO: 5774644 - DNA, 25 bp, Homo sapien
aacaccaggattatatccccttcct

SEQ ID NO: 5774645 - DNA, 25 bp, Homo sapien
aggatagtgtacatgcagccaatgt

SEQ ID NO: 5774646 - DNA, 25 bp, Homo sapien
agggatcaccactggctcatatagc

SEQ ID NO: 5774647 - DNA, 25 bp, Homo sapien
gcctgcccacagggatcaccactgg

SEQ ID NO: 5774648 - DNA, 25 bp, Homo sapien
gtcatgttcttcaggatagtgtaca

SEQ ID NO: 5774649 - DNA, 25 bp, Homo sapien
ttttgtttctggcctggtgacagct

SEQ ID NO: 5774650 - DNA, 25 bp, Homo sapien
gttcatctggaaagccttggtcacc

SEQ ID NO: 5774651 - DNA, 25 bp, Homo sapien
cagtatacagcagaagggtgctaaa

SEQ ID NO: 5774652 - DNA, 25 bp, Homo sapien
tggggcccagcctcccttaagataa

SEQ ID NO: 5774653 - DNA, 25 bp, Homo sapien
gtagggcatgggaacactgagcttc

SEQ ID NO: 5774654 - DNA, 25 bp, Homo sapien
acttggctgcctttcttaagctgag

SEQ ID NO: 5774655 - DNA, 25 bp, Homo sapien
catgctcgtggccaatgctaactgt

SEQ ID NO: 5774656 - DNA, 25 bp, Homo sapien
atgtctgggctcagacttcatgctc

SEQ ID NO: 5774657 - DNA, 25 bp, Homo sapien
cacccactgtgccccaggaaatcat

SEQ ID NO: 5774658 - DNA, 25 bp, Homo sapien
gacatgattaggtagaaactaggag

SEQ ID NO: 5774659 - DNA, 25 bp, Homo sapien
tacagtgtgaacacagctggctagc

SEQ ID NO: 5774660 - DNA, 25 bp, Homo sapien
tgcagggaacaagccccttctgccc

SEQ ID NO: 5774661 - DNA, 25 bp, Homo sapien
ggccccaggcatccttcatgctgtc

SEQ ID NO: 5774662 - DNA, 25 bp, Homo sapien
cataactgaagagtgcctccacttg

SEQ ID NO: 5774663 - DNA, 25 bp, Homo sapien
cgaagctgaatcaaggcttctttaa

SEQ ID NO: 5774664 - DNA, 25 bp, Homo sapien
gctgaatcaaggcttctttaaggtc

SEQ ID NO: 5774665 - DNA, 25 bp, Homo sapien
agtctatcagctggttccctcgaag

SEQ ID NO: 5774666 - DNA, 25 bp, Homo sapien
ttcacctttgataacaccaggatta

SEQ ID NO: 5774667 - DNA, 25 bp, Homo sapien
attcctccttcttggcatacatgaa

SEQ ID NO: 5774668 - DNA, 25 bp, Homo sapien
gggagcccgggctgagtcttcatga

SEQ ID NO: 5774669 - DNA, 25 bp, Homo sapien
agagaaaaggaaagaagcagagaga

SEQ ID NO: 5774670 - DNA, 25 bp, Homo sapien
catccctcgttggaagtaagccact

SEQ ID NO: 5774671 - DNA, 25 bp, Homo sapien
tttgttccagccggagctccagttt

SEQ ID NO: 5774672 - DNA, 25 bp, Homo sapien
aaatgcccaccttccctttgcactc

SEQ ID NO: 5774673 - DNA, 25 bp, Homo sapien
gacacactccatcgccttgtcgatt

SEQ ID NO: 5774674 - DNA, 25 bp, Homo sapien
tgactaccgtgtacttgtagtgcac

SEQ ID NO: 5774675 - DNA, 25 bp, Homo sapien
cccgaggccgatagctcagcttagt

SEQ ID NO: 5774676 - DNA, 25 bp, Homo sapien
atgacctggagctcttcttttgtct

SEQ ID NO: 5774677 - DNA, 25 bp, Homo sapien
gtgtgaacacagctggctagctagc

SEQ ID NO: 5774678 - DNA, 25 bp, Homo sapien
catgattaggtagaaactaggaggc

SEQ ID NO: 5774679 - DNA, 25 bp, Homo sapien
tggcctccaccagggacatgattag

SEQ ID NO: 5774680 - DNA, 25 bp, Homo sapien
agctcaactggttcaaggtagttgc

SEQ ID NO: 5774681 - DNA, 25 bp, Homo sapien
agaaaaggaaagaagcagagagaga

SEQ ID NO: 5774682 - DNA, 25 bp, Homo sapien
gtgctttccaaatctgtagttgcgc

SEQ ID NO: 5774683 - DNA, 25 bp, Homo sapien
tctcaggcacaaacccaaatagcac

SEQ ID NO: 5774684 - DNA, 25 bp, Homo sapien
cacacggtgagcctccccttccaga

SEQ ID NO: 5774685 - DNA, 25 bp, Homo sapien
ggttccctcgaagctgaatcaaggc

SEQ ID NO: 5774686 - DNA, 25 bp, Homo sapien
cactcagagcaagaaacaggatcag

SEQ ID NO: 5774687 - DNA, 25 bp, Homo sapien
ggccagatgagtagaatggggccca

SEQ ID NO: 5774688 - DNA, 25 bp, Homo sapien
tctatcagctggttccctcgaagct

SEQ ID NO: 5774689 - DNA, 25 bp, Homo sapien
ccactggctcatatagcttctgctt

SEQ ID NO: 5774690 - DNA, 25 bp, Homo sapien
aggcatccttcatgctgtcttctga

SEQ ID NO: 5774691 - DNA, 25 bp, Homo sapien
ctcagcttagtttgttccagccgga

SEQ ID NO: 5774692 - DNA, 25 bp, Homo sapien
agctttcctcctggggctgctgctg

SEQ ID NO: 5774693 - DNA, 25 bp, Homo sapien
catgactaccgtgtacttgtagtgc

SEQ ID NO: 5774694 - DNA, 25 bp, Homo sapien
ggtcttccaggggctttggaactag

SEQ ID NO: 5774695 - DNA, 25 bp, Homo sapien
agcctcccttaagataacttctcag

SEQ ID NO: 5774696 - DNA, 25 bp, Homo sapien
ggttctgttgtctggttattagcat

SEQ ID NO: 5774697 - DNA, 25 bp, Homo sapien
agggcttcattttcttcagctttgt

SEQ ID NO: 5774698 - DNA, 25 bp, Homo sapien
atagctcagcttagtttgttccagc

SEQ ID NO: 5774699 - DNA, 25 bp, Homo sapien
tctgaaaggggcaccagctcattgc

SEQ ID NO: 5774700 - DNA, 25 bp, Homo sapien
ttttggcaactgactcataacccta

SEQ ID NO: 5774701 - DNA, 25 bp, Homo sapien
aactgtcttgatccaccacagatgc

SEQ ID NO: 5774702 - DNA, 25 bp, Homo sapien
gaaagcaatgttatataacacctca

SEQ ID NO: 5774703 - DNA, 25 bp, Homo sapien
ccgtgtacttgtagtgcaccttgag

SEQ ID NO: 5774704 - DNA, 25 bp, Homo sapien
gtagtgcaccttgagtgtgtagggc

SEQ ID NO: 5774705 - DNA, 25 bp, Homo sapien
gctaactgttcttcagcttttttcc

SEQ ID NO: 5774706 - DNA, 25 bp, Homo sapien
ctccatcgccttgtcgattttggaa

SEQ ID NO: 5774707 - DNA, 25 bp, Homo sapien
gtttctggcctggtgacagctgggg

SEQ ID NO: 5774708 - DNA, 25 bp, Homo sapien
cagaggctgatggcctccaccaggg

SEQ ID NO: 5774709 - DNA, 25 bp, Homo sapien
tcaggatagtgtacatgcagccaat

SEQ ID NO: 5774710 - DNA, 25 bp, Homo sapien
tccagccattcttcattcacctttg

SEQ ID NO: 5774711 - DNA, 25 bp, Homo sapien
ttcagtcatgttcttcaggatagtg

SEQ ID NO: 5774712 - DNA, 25 bp, Homo sapien
aagatctctggggttttcggtctgg

SEQ ID NO: 5774713 - DNA, 25 bp, Homo sapien
ggggctgctgctgagggtggatccg

SEQ ID NO: 5774714 - DNA, 25 bp, Homo sapien
ttcagcttttttccattcctccttc

SEQ ID NO: 5774715 - DNA, 25 bp, Homo sapien
tggaagtaagccactgccaagtgct

SEQ ID NO: 5774716 - DNA, 25 bp, Homo sapien
tgcctgtggttgcagaggggcaaac

SEQ ID NO: 5774717 - DNA, 25 bp, Homo sapien
gcctccacttggctgcctttcttaa

SEQ ID NO: 5774718 - DNA, 25 bp, Homo sapien
acgaccgttgccttgcctaggtaat

SEQ ID NO: 5774719 - DNA, 25 bp, Homo sapien
gctgctgagggtggatccgcagctc

SEQ ID NO: 5774720 - DNA, 25 bp, Homo sapien
acttctcagtgttgcaaatgcatca

SEQ ID NO: 5774721 - DNA, 25 bp, Homo sapien
gcccacagggatcaccactggctca

SEQ ID NO: 5774722 - DNA, 25 bp, Homo sapien
cctggacggcactgaaggcatccag

SEQ ID NO: 5774723 - DNA, 25 bp, Homo sapien
aacaggatcagtacctggaagactc

SEQ ID NO: 5774724 - DNA, 25 bp, Homo sapien
ccacagggatcaccactggctcata

SEQ ID NO: 5774725 - DNA, 25 bp, Homo sapien
gtactcacatcattgtctagtaggt

SEQ ID NO: 5774726 - DNA, 25 bp, Homo sapien
cttctgcttccagacacactccatc

SEQ ID NO: 5774727 - DNA, 25 bp, Homo sapien
actaccgtgtacttgtagtgcacct

SEQ ID NO: 5774728 - DNA, 25 bp, Homo sapien
ccaaatagcacacggtgagcctccc

SEQ ID NO: 5774729 - DNA, 25 bp, Homo sapien
ggatcaccactggctcatatagctt

SEQ ID NO: 5774730 - DNA, 25 bp, Homo sapien
aagactctctcgtgccctttccaga

SEQ ID NO: 5774731 - DNA, 25 bp, Homo sapien
gaaactaggaggccaagagagctgc

SEQ ID NO: 5774732 - DNA, 25 bp, Homo sapien
caactgactcataaccctaccatga

SEQ ID NO: 5774733 - DNA, 25 bp, Homo sapien
gtgttcactttctgggccagatgag

SEQ ID NO: 5774734 - DNA, 25 bp, Homo sapien
ttcattcacctttgataacaccagg

SEQ ID NO: 5774735 - DNA, 25 bp, Homo sapien
cccactgtgccccaggaaatcatcc

SEQ ID NO: 5774736 - DNA, 25 bp, Homo sapien
gagtagaatggggcccagcctccct

SEQ ID NO: 5774737 - DNA, 25 bp, Homo sapien
gtagagcatccctcgttggaagtaa

SEQ ID NO: 5774738 - DNA, 25 bp, Homo sapien
atacatgaaagcaatgttatataac

SEQ ID NO: 5774739 - DNA, 25 bp, Homo sapien
gtggcccccaaggtgttcactttct

SEQ ID NO: 5774740 - DNA, 25 bp, Homo sapien
catgggaacactgagcttcacttcc

SEQ ID NO: 5774741 - DNA, 25 bp, Homo sapien
tccttcttggccagctgagccactt

SEQ ID NO: 5774742 - DNA, 25 bp, Homo sapien
ggatcagtacctggaagactctctc

SEQ ID NO: 5774743 - DNA, 25 bp, Homo sapien
tggacggcactgaaggcatccaggg

SEQ ID NO: 5774744 - DNA, 25 bp, Homo sapien
tgcaaatgcatcaggaaatgtcccc

SEQ ID NO: 5774745 - DNA, 25 bp, Homo sapien
accaaatgtacagcttgatgaatgt

SEQ ID NO: 5774746 - DNA, 25 bp, Homo sapien
cccttcattccagaggctgatggcc

SEQ ID NO: 5774747 - DNA, 25 bp, Homo sapien
acatcattgtctagtaggttaaatt

SEQ ID NO: 5774748 - DNA, 25 bp, Homo sapien
tgctaaatcttacaaacaagtaata

SEQ ID NO: 5774749 - DNA, 25 bp, Homo sapien
cctcacaggcaaacagcttgaactg

SEQ ID NO: 5774750 - DNA, 25 bp, Homo sapien
aagacaatgttccctggcatgacct

SEQ ID NO: 5774751 - DNA, 25 bp, Homo sapien
cctctggttgggtagcctcataact

SEQ ID NO: 5774752 - DNA, 25 bp, Homo sapien
gaactaggaggagctgggatgtcgg

SEQ ID NO: 5774753 - DNA, 25 bp, Homo sapien
ttctctgcttcagtcatgttcttca

SEQ ID NO: 5774754 - DNA, 25 bp, Homo sapien
cttaggctcttctttttgtttctgg

SEQ ID NO: 5774755 - DNA, 25 bp, Homo sapien
gcagccaatgttgaagcaaatccgg

SEQ ID NO: 5774756 - DNA, 25 bp, Homo sapien
agagtcaggcagtagtttttcacct

SEQ ID NO: 5774757 - DNA, 25 bp, Homo sapien
ttggctgcctttcttaagctgaggt

SEQ ID NO: 5774758 - DNA, 25 bp, Homo sapien
ggtgctaaatcttacaaacaagtaa

SEQ ID NO: 5774759 - DNA, 25 bp, Homo sapien
gagcgtctcccctagcagggctgcc

SEQ ID NO: 5774760 - DNA, 25 bp, Homo sapien
tagaaactaggaggccaagagagct

SEQ ID NO: 5774761 - DNA, 25 bp, Homo sapien
cacttccaaactgtaatgtctcagt

SEQ ID NO: 5774762 - DNA, 25 bp, Homo sapien
ttctctgtctggtagtagagcatcc

SEQ ID NO: 5774763 - DNA, 25 bp, Homo sapien
ttcatgactaccgtgtacttgtagt

SEQ ID NO: 5774764 - DNA, 25 bp, Homo sapien
cccttcctgaaactccaggtcctct

SEQ ID NO: 5774765 - DNA, 25 bp, Homo sapien
cagctttgtagtttgtgaaacatcc

SEQ ID NO: 5774766 - DNA, 25 bp, Homo sapien
actggctcatatagcttctgcttcc

SEQ ID NO: 5774767 - DNA, 25 bp, Homo sapien
ggggcaaacccagagaaactgtctt

SEQ ID NO: 5774768 - DNA, 25 bp, Homo sapien
gccattcttcattcacctttgataa

SEQ ID NO: 5774769 - DNA, 25 bp, Homo sapien
ttagacaccatgtcccggacctggc

SEQ ID NO: 5774770 - DNA, 25 bp, Homo sapien
aggccgatagctcagcttagtttgt

SEQ ID NO: 5774771 - DNA, 25 bp, Homo sapien
tcaagacaaagacaatgttccctgg

SEQ ID NO: 5774772 - DNA, 25 bp, Homo sapien
ctgtcccgaggccgatagctcagct

SEQ ID NO: 5774773 - DNA, 25 bp, Homo sapien
gacggcactgaaggcatccagggct

SEQ ID NO: 5774774 - DNA, 25 bp, Homo sapien
gatgaatgtttacagtgtgaacaca

SEQ ID NO: 5774775 - DNA, 25 bp, Homo sapien
catcctagacttctctccgagtgct

SEQ ID NO: 5774776 - DNA, 25 bp, Homo sapien
atcagtacctggaagactctctcgt

SEQ ID NO: 5774777 - DNA, 25 bp, Homo sapien
ctgttgtctggttattagcatcagc

SEQ ID NO: 5774778 - DNA, 25 bp, Homo sapien
tggctcatatagcttctgcttccag

SEQ ID NO: 5774779 - DNA, 25 bp, Homo sapien
gtgcaccaaatgtacagcttgatga

SEQ ID NO: 5774780 - DNA, 25 bp, Homo sapien
gtggatccgcagctcaactggttca

SEQ ID NO: 5774781 - DNA, 25 bp, Homo sapien
ctaggtaatccttcttggccagctg

SEQ ID NO: 5774782 - DNA, 25 bp, Homo sapien
acttctctccgagtgctttccaaat

SEQ ID NO: 5774783 - DNA, 25 bp, Homo sapien
tgttccagccggagctccagtttct

SEQ ID NO: 5774784 - DNA, 25 bp, Homo sapien
ttgatgaatgtttacagtgtgaaca

SEQ ID NO: 5774785 - DNA, 25 bp, Homo sapien
ctcagtgttgcaaatgcatcaggaa

SEQ ID NO: 5774786 - DNA, 25 bp, Homo sapien
tgtggttgcagaggggcaaacccag

SEQ ID NO: 5774787 - DNA, 25 bp, Homo sapien
cggcactgaaggcatccagggctcc

SEQ ID NO: 5774788 - DNA, 25 bp, Homo sapien
ctggaaagccttggtcacccactgt

SEQ ID NO: 5774789 - DNA, 25 bp, Homo sapien
tgtttacagtgtgaacacagctggc

SEQ ID NO: 5774790 - DNA, 25 bp, Homo sapien
cagcttagtttgttccagccggagc

SEQ ID NO: 5774791 - DNA, 25 bp, Homo sapien
caatgttccctggcatgacctggag

SEQ ID NO: 5774792 - DNA, 25 bp, Homo sapien
agacaccatgtcccggacctggctg

SEQ ID NO: 5774793 - DNA, 25 bp, Homo sapien
taacagggaataaatagttaacact

SEQ ID NO: 5774794 - DNA, 25 bp, Homo sapien
cagagagaagacaggttggagcgtc

SEQ ID NO: 5774795 - DNA, 25 bp, Homo sapien
gtcctctggttgggtagcctcataa

SEQ ID NO: 5774796 - DNA, 25 bp, Homo sapien
ggctgatggcctccaccagggacat

SEQ ID NO: 5774797 - DNA, 25 bp, Homo sapien
cgatagctcagcttagtttgttcca

SEQ ID NO: 5774798 - DNA, 25 bp, Homo sapien
agctttttcactttccttgggttca

SEQ ID NO: 5774799 - DNA, 25 bp, Homo sapien
accccttcattccagaggctgatgg

SEQ ID NO: 5774800 - DNA, 25 bp, Homo sapien
gtctggtagtagagcatccctcgtt

SEQ ID NO: 5774801 - DNA, 25 bp, Homo sapien
cccctagcagggctgccttagtggc

SEQ ID NO: 5774802 - DNA, 25 bp, Homo sapien
tcatctggaaagccttggtcaccca

SEQ ID NO: 5774803 - DNA, 25 bp, Homo sapien
gagcccgggctgagtcttcatgact

SEQ ID NO: 5774804 - DNA, 25 bp, Homo sapien
ctccacttggctgcctttcttaagc

SEQ ID NO: 5774805 - DNA, 25 bp, Homo sapien
ttggcaactgactcataaccctacc

SEQ ID NO: 5774806 - DNA, 25 bp, Homo sapien
gggctcagacttcatgctcgtggcc

SEQ ID NO: 5774807 - DNA, 25 bp, Homo sapien
ggagctccagtttcttagacaccat

SEQ ID NO: 5774808 - DNA, 25 bp, Homo sapien
ctgttcttcagcttttttccattcc

SEQ ID NO: 5774809 - DNA, 25 bp, Homo sapien
gaaacatcctagacttctctccgag

SEQ ID NO: 5774810 - DNA, 25 bp, Homo sapien
ataaatagttaacacttccaaactg

SEQ ID NO: 5774811 - DNA, 25 bp, Homo sapien
gtgacagctggggtcttccaggggc

SEQ ID NO: 5774812 - DNA, 25 bp, Homo sapien
aaaggggcaccagctcattgctgtc

SEQ ID NO: 5774813 - DNA, 25 bp, Homo sapien
atagggcttcattttcttcagcttt

SEQ ID NO: 5774814 - DNA, 25 bp, Homo sapien
tcattgctgtcccgaggccgatagc

SEQ ID NO: 5774815 - DNA, 25 bp, Homo sapien
gaagggtgctaaatcttacaaacaa

SEQ ID NO: 5774816 - DNA, 25 bp, Homo sapien
ctccaggtcctctggttgggtagcc

SEQ ID NO: 5774817 - DNA, 25 bp, Homo sapien
ccgcagctcaactggttcaaggtag

SEQ ID NO: 5774818 - DNA, 25 bp, Homo sapien
tcaggcacaaacccaaatagcacac

SEQ ID NO: 5774819 - DNA, 25 bp, Homo sapien
ctctctcgtgccctttccagacact

SEQ ID NO: 5774820 - DNA, 25 bp, Homo sapien
cggtgagcctccccttccagagccc

SEQ ID NO: 5774821 - DNA, 25 bp, Homo sapien
gagaaactgtcttgatccaccacag

SEQ ID NO: 5774822 - DNA, 25 bp, Homo sapien
cttgtctctcatttggtcgaaacag

SEQ ID NO: 5774823 - DNA, 25 bp, Homo sapien
cttcattccagaggctgatggcctc

SEQ ID NO: 5774824 - DNA, 25 bp, Homo sapien
ccttcttggcatacatgaaagcaat

SEQ ID NO: 5774825 - DNA, 25 bp, Homo sapien
ggatccgcagctcaactggttcaag

SEQ ID NO: 5774826 - DNA, 25 bp, Homo sapien
ttctggtaaaggccttctctgcttc

SEQ ID NO: 5774827 - DNA, 25 bp, Homo sapien
ttcactttccttgggttcatctgga

SEQ ID NO: 5774828 - DNA, 25 bp, Homo sapien
agcttgaactggagccccaggatct

SEQ ID NO: 5774829 - DNA, 25 bp, Homo sapien
cgtgccctttccagacacttccatc

SEQ ID NO: 5774830 - DNA, 25 bp, Homo sapien
cagtcatgttcttcaggatagtgta

SEQ ID NO: 5774831 - DNA, 25 bp, Homo sapien
tgagtcttcatgactaccgtgtact

SEQ ID NO: 5774832 - DNA, 25 bp, Homo sapien
ctggtaaaggccttctctgcttcag

SEQ ID NO: 5774833 - DNA, 25 bp, Homo sapien
tgaacatgaccgtggcccagttatc

SEQ ID NO: 5774834 - DNA, 25 bp, Homo sapien
ccggagctccagtttcttagacacc

SEQ ID NO: 5774835 - DNA, 25 bp, Homo sapien
gctcatatagcttctgcttccagac

SEQ ID NO: 5774836 - DNA, 25 bp, Homo sapien
aggggctttggaactaggaggagct

SEQ ID NO: 5774837 - DNA, 25 bp, Homo sapien
caaacaagtaatagggcttcatttt

SEQ ID NO: 5774838 - DNA, 25 bp, Homo sapien
gaggttctgttgtctggttattagc

SEQ ID NO: 5774839 - DNA, 25 bp, Homo sapien
gggggtcctggacggcactgaaggc

SEQ ID NO: 5774840 - DNA, 25 bp, Homo sapien
acacagctggctagctagcactcag

SEQ ID NO: 5774841 - DNA, 25 bp, Homo sapien
gacaaagacaatgttccctggcatg

SEQ ID NO: 5774842 - DNA, 25 bp, Homo sapien
tggaatgtctgggctcagacttcat

SEQ ID NO: 5774843 - DNA, 25 bp, Homo sapien
gggacatgattaggtagaaactagg

SEQ ID NO: 5774844 - DNA, 25 bp, Homo sapien
tagtgtacatgcagccaatgttgaa

SEQ ID NO: 5774845 - DNA, 25 bp, Homo sapien
tcctgggtactcacatcattgtcta

SEQ ID NO: 5774846 - DNA, 25 bp, Homo sapien
tcaggcagtagtttttcacctggcc

SEQ ID NO: 5774847 - DNA, 25 bp, Homo sapien
tctgtagttgcgcagtcttcaacaa

SEQ ID NO: 5774848 - DNA, 25 bp, Homo sapien
tttcggtctgggtggaggctcagct

SEQ ID NO: 5774849 - DNA, 25 bp, Homo sapien
ctccaccagggacatgattaggtag

SEQ ID NO: 5774850 - DNA, 25 bp, Homo sapien
caccactggctcatatagcttctgc

SEQ ID NO: 5774851 - DNA, 25 bp, Homo sapien
ccaggggctttggaactaggaggag

SEQ ID NO: 5774852 - DNA, 25 bp, Homo sapien
cttctgaaaggggcaccagctcatt

SEQ ID NO: 5774853 - DNA, 25 bp, Homo sapien
attttggaatgtctgggctcagact

SEQ ID NO: 5774854 - DNA, 25 bp, Homo sapien
cccttccagccattcttcattcacc

SEQ ID NO: 5774855 - DNA, 25 bp, Homo sapien
aatgttatataacacctcacaggca

SEQ ID NO: 5774856 - DNA, 25 bp, Homo sapien
gtctcccctagcagggctgccttag

SEQ ID NO: 5774857 - DNA, 25 bp, Homo sapien
ttagtttgttccagccggagctcca

SEQ ID NO: 5774858 - DNA, 25 bp, Homo sapien
agcactcagagcaagaaacaggatc

SEQ ID NO: 5774859 - DNA, 25 bp, Homo sapien
tgtctagtaggttaaattttaacag

SEQ ID NO: 5774860 - DNA, 25 bp, Homo sapien
aaacccaaatagcacacggtgagcc

SEQ ID NO: 5774861 - DNA, 25 bp, Homo sapien
ctggcctggtgacagctggggtctt

SEQ ID NO: 5774862 - DNA, 25 bp, Homo sapien
acaaacccaaatagcacacggtgag

SEQ ID NO: 5774863 - DNA, 25 bp, Homo sapien
ctttttgtttctggcctggtgacag

SEQ ID NO: 5774864 - DNA, 25 bp, Homo sapien
tccagaggctgatggcctccaccag

SEQ ID NO: 5774865 - DNA, 25 bp, Homo sapien
taatagggcttcattttcttcagct

SEQ ID NO: 5774866 - DNA, 25 bp, Homo sapien
agcaaatccgggagtgggggtcctg

SEQ ID NO: 5774867 - DNA, 25 bp, Homo sapien
agccttggtcacccactgtgttctc

SEQ ID NO: 5774868 - DNA, 25 bp, Homo sapien
ttaacacttccaaactgtaatgtct

SEQ ID NO: 5774869 - DNA, 25 bp, Homo sapien
ctgtctggtagtagagcatccctcg

SEQ ID NO: 5774870 - DNA, 25 bp, Homo sapien
gcaccagctcattgctgtcccgagg

SEQ ID NO: 5774871 - DNA, 25 bp, Homo sapien
gatcttatagtctatcagctggttc

SEQ ID NO: 5774872 - DNA, 25 bp, Homo sapien
aatgtttacagtgtgaacacagctg

SEQ ID NO: 5774873 - DNA, 25 bp, Homo sapien
agcacacggtgagcctccccttcca

SEQ ID NO: 5774874 - DNA, 25 bp, Homo sapien
aaatcatcctgggtactcacatcat

SEQ ID NO: 5774875 - DNA, 25 bp, Homo sapien
caccacagagtcaggcagtagtttt

SEQ ID NO: 5774876 - DNA, 25 bp, Homo sapien
atcgccttgtcgattttggaatgtc

SEQ ID NO: 5774877 - DNA, 25 bp, Homo sapien
attaggtagaaactaggaggccaag

SEQ ID NO: 5774878 - DNA, 25 bp, Homo sapien
aacaagccccttctgcccgttgaac

SEQ ID NO: 5774879 - DNA, 25 bp, Homo sapien
aacagcctgcccacagggatcacca

SEQ ID NO: 5774880 - DNA, 25 bp, Homo sapien
acacagaaaagtgcaccaaatgtac

SEQ ID NO: 5774881 - DNA, 25 bp, Homo sapien
taaaggccttctctgcttcagtcat

SEQ ID NO: 5774882 - DNA, 25 bp, Homo sapien
ctcccctagcagggctgccttagtg

SEQ ID NO: 5774883 - DNA, 25 bp, Homo sapien
tacaaacaagtaatagggcttcatt

SEQ ID NO: 5774884 - DNA, 25 bp, Homo sapien
atagcacacggtgagcctccccttc

SEQ ID NO: 5774885 - DNA, 25 bp, Homo sapien
ccacgaccgttgccttgcctaggta

SEQ ID NO: 5774886 - DNA, 25 bp, Homo sapien
tgctgagggtggatccgcagctcaa

SEQ ID NO: 5774887 - DNA, 25 bp, Homo sapien
tgccctttccagacacttccatcca

SEQ ID NO: 5774888 - DNA, 25 bp, Homo sapien
aaatagttaacacttccaaactgta

SEQ ID NO: 5774889 - DNA, 25 bp, Homo sapien
gtggtatgacacagaaaagtgcacc

SEQ ID NO: 5774890 - DNA, 25 bp, Homo sapien
gtgggggtcctggacggcactgaag

SEQ ID NO: 5774891 - DNA, 25 bp, Homo sapien
cctagcagggctgccttagtggccc

SEQ ID NO: 5774892 - DNA, 25 bp, Homo sapien
tcttggccagctgagccacttgtct

SEQ ID NO: 5774893 - DNA, 25 bp, Homo sapien
ctagacttctctccgagtgctttcc

SEQ ID NO: 5774894 - DNA, 25 bp, Homo sapien
ataacaccaggattatatccccttc

SEQ ID NO: 5774895 - DNA, 25 bp, Homo sapien
aaggccttctctgcttcagtcatgt

SEQ ID NO: 5774896 - DNA, 25 bp, Homo sapien
tcgttggaagtaagccactgccaag

SEQ ID NO: 5774897 - DNA, 25 bp, Homo sapien
aagtgcttgtctcggttaatgcttc

SEQ ID NO: 5774898 - DNA, 25 bp, Homo sapien
tcgaaacagcctgcccacagggatc

SEQ ID NO: 5774899 - DNA, 25 bp, Homo sapien
aatctgtagttgcgcagtcttcaac

SEQ ID NO: 5774900 - DNA, 25 bp, Homo sapien
cagggacatgattaggtagaaacta

SEQ ID NO: 5774901 - DNA, 25 bp, Homo sapien
ccaccagggacatgattaggtagaa

SEQ ID NO: 5774902 - DNA, 25 bp, Homo sapien
ggcatgggaacactgagcttcactt

SEQ ID NO: 5774903 - DNA, 25 bp, Homo sapien
actgaagagtgcctccacttggctg

SEQ ID NO: 5774904 - DNA, 25 bp, Homo sapien
actggttcaaggtagttgcagggaa

SEQ ID NO: 5774905 - DNA, 25 bp, Homo sapien
gccgatagctcagcttagtttgttc

SEQ ID NO: 5774906 - DNA, 25 bp, Homo sapien
cccaggaaatcatcctgggtactca

SEQ ID NO: 5774907 - DNA, 25 bp, Homo sapien
gcttgatgaatgtttacagtgtgaa

SEQ ID NO: 5774908 - DNA, 25 bp, Homo sapien
caaactgtaatgtctcagtacagta

SEQ ID NO: 5774909 - DNA, 25 bp, Homo sapien
gtgtacttgtagtgcaccttgagtg

SEQ ID NO: 5774910 - DNA, 25 bp, Homo sapien
gggtactcacatcattgtctagtag

SEQ ID NO: 5774911 - DNA, 25 bp, Homo sapien
cttccagccattcttcattcacctt

SEQ ID NO: 5774912 - DNA, 25 bp, Homo sapien
gaatgtctgggctcagacttcatgc

SEQ ID NO: 5774913 - DNA, 25 bp, Homo sapien
aaggcatccagggctcccttccagt

SEQ ID NO: 5774914 - DNA, 25 bp, Homo sapien
tgctgtcttctgaaaggggcaccag

SEQ ID NO: 5774915 - DNA, 25 bp, Homo sapien
acagggatcaccactggctcatata

SEQ ID NO: 5774916 - DNA, 25 bp, Homo sapien
attccagaggctgatggcctccacc

SEQ ID NO: 5774917 - DNA, 25 bp, Homo sapien
tggcccagttatcattgcccttctt

SEQ ID NO: 5774918 - DNA, 25 bp, Homo sapien
ccccttctgcccgttgaacatgacc

SEQ ID NO: 5774919 - DNA, 25 bp, Homo sapien
tggggttttcggtctgggtggaggc

SEQ ID NO: 5774920 - DNA, 25 bp, Homo sapien
cccttccagagccctgaagatctct

SEQ ID NO: 5774921 - DNA, 25 bp, Homo sapien
ctctgtctggtagtagagcatccct

SEQ ID NO: 5774922 - DNA, 25 bp, Homo sapien
ctgagccacttgtctctcatttggt

SEQ ID NO: 5774923 - DNA, 25 bp, Homo sapien
aatgtctcagtacagtatacagcag

SEQ ID NO: 5774924 - DNA, 25 bp, Homo sapien
gaaacagcctgcccacagggatcac

SEQ ID NO: 5774925 - DNA, 25 bp, Homo sapien
tgcgcagtcttcaacaaaaactttg

SEQ ID NO: 5774926 - DNA, 25 bp, Homo sapien
aatggggcccagcctcccttaagat

SEQ ID NO: 5774927 - DNA, 25 bp, Homo sapien
gtacctggaagactctctcgtgccc

SEQ ID NO: 5774928 - DNA, 25 bp, Homo sapien
aggtcctctggttgggtagcctcat

SEQ ID NO: 5774929 - DNA, 25 bp, Homo sapien
ctggaagactctctcgtgccctttc

SEQ ID NO: 5774930 - DNA, 25 bp, Homo sapien
aagagagctgccaggagacagagag

SEQ ID NO: 5774931 - DNA, 25 bp, Homo sapien
tgagagagaaaaggaaagaagcaga

SEQ ID NO: 5774932 - DNA, 25 bp, Homo sapien
acacttccatccacttttcctctcc

SEQ ID NO: 5774933 - DNA, 25 bp, Homo sapien
ggatgtcggactgcggagagctttc

SEQ ID NO: 5774934 - DNA, 25 bp, Homo sapien
ttggtcgaaacagcctgcccacagg

SEQ ID NO: 5774935 - DNA, 25 bp, Homo sapien
ctggctgtaggggagcccgggctga

SEQ ID NO: 5774936 - DNA, 25 bp, Homo sapien
tgccacgaccgttgccttgcctagg

SEQ ID NO: 5774937 - DNA, 25 bp, Homo sapien
acatgaaagcaatgttatataacac

SEQ ID NO: 5774938 - DNA, 25 bp, Homo sapien
tcccttaagataacttctcagtgtt

SEQ ID NO: 5774939 - DNA, 25 bp, Homo sapien
aagctgaatcaaggcttctttaagg

SEQ ID NO: 5774940 - DNA, 25 bp, Homo sapien
ggtaaaggccttctctgcttcagtc

SEQ ID NO: 5774941 - DNA, 25 bp, Homo sapien
actcataaccctaccatgagagaga

SEQ ID NO: 5774942 - DNA, 25 bp, Homo sapien
gcccagttatcattgcccttcttca

SEQ ID NO: 5774943 - DNA, 25 bp, Homo sapien
gaggctgatggcctccaccagggac

SEQ ID NO: 5774944 - DNA, 25 bp, Homo sapien
ttgatagccaaatcatatttctctg

SEQ ID NO: 5774945 - DNA, 25 bp, Homo sapien
tcttcatgactaccgtgtacttgta

SEQ ID NO: 5774946 - DNA, 25 bp, Homo sapien
cttagtggcccccaaggtgttcact

SEQ ID NO: 5774947 - DNA, 25 bp, Homo sapien
ccgggctgagtcttcatgactaccg

SEQ ID NO: 5774948 - DNA, 25 bp, Homo sapien
aagataacttctcagtgttgcaaat

SEQ ID NO: 5774949 - DNA, 25 bp, Homo sapien
tgaatcaaggcttctttaaggtctt

SEQ ID NO: 5774950 - DNA, 25 bp, Homo sapien
ctgcccacagggatcaccactggct

SEQ ID NO: 5774951 - DNA, 25 bp, Homo sapien
agggtgctaaatcttacaaacaagt

SEQ ID NO: 5774952 - DNA, 25 bp, Homo sapien
gaaatgtccccaccttttggcaact

SEQ ID NO: 5774953 - DNA, 25 bp, Homo sapien
tcccggacctggctgtaggggagcc

SEQ ID NO: 5774954 - DNA, 25 bp, Homo sapien
tcttatagtctatcagctggttccc

SEQ ID NO: 5774955 - DNA, 25 bp, Homo sapien
ctcgaagctgaatcaaggcttcttt

SEQ ID NO: 5774956 - DNA, 25 bp, Homo sapien
atacagcagaagggtgctaaatctt

SEQ ID NO: 5774957 - DNA, 25 bp, Homo sapien
gagctcttcttttgtctcaggcaca

SEQ ID NO: 5774958 - DNA, 25 bp, Homo sapien
caagccccttctgcccgttgaacat

SEQ ID NO: 5774959 - DNA, 25 bp, Homo sapien
gtctcggttaatgcttctggtaaag

SEQ ID NO: 5774960 - DNA, 25 bp, Homo sapien
catccagggctcccttccagtcctt

SEQ ID NO: 5774961 - DNA, 25 bp, Homo sapien
ttctcacaccacagagtcaggcagt

SEQ ID NO: 5774962 - DNA, 25 bp, Homo sapien
acttcatgctcgtggccaatgctaa

SEQ ID NO: 5774963 - DNA, 25 bp, Homo sapien
cctggcatgacctggagctcttctt

SEQ ID NO: 5774964 - DNA, 25 bp, Homo sapien
cagtcttcaacaaaaactttgggga

SEQ ID NO: 5774965 - DNA, 25 bp, Homo sapien
aactgtaatgtctcagtacagtata

SEQ ID NO: 5774966 - DNA, 25 bp, Homo sapien
ttaagataacttctcagtgttgcaa

SEQ ID NO: 5774967 - DNA, 25 bp, Homo sapien
ttttcactttccttgggttcatctg

SEQ ID NO: 5774968 - DNA, 25 bp, Homo sapien
gttgcaaatgcatcaggaaatgtcc

SEQ ID NO: 5774969 - DNA, 25 bp, Homo sapien
cctcctggggctgctgctgagggtg

SEQ ID NO: 5774970 - DNA, 25 bp, Homo sapien
cgtggcccagttatcattgcccttc

SEQ ID NO: 5774971 - DNA, 25 bp, Homo sapien
tcacccactgtgttctcacaccaca

SEQ ID NO: 5774972 - DNA, 25 bp, Homo sapien
tcatatttctctgtctggtagtaga

SEQ ID NO: 5774973 - DNA, 25 bp, Homo sapien
atgttccctggcatgacctggagct

SEQ ID NO: 5774974 - DNA, 25 bp, Homo sapien
aaccctaccatgagagagaaaagga

SEQ ID NO: 5774975 - DNA, 25 bp, Homo sapien
tcattttcttcagctttgtagtttg

SEQ ID NO: 5774976 - DNA, 25 bp, Homo sapien
tgttcttcaggatagtgtacatgca

SEQ ID NO: 5774977 - DNA, 25 bp, Homo sapien
gagtgcctccacttggctgcctttc

SEQ ID NO: 5774978 - DNA, 25 bp, Homo sapien
aacacctcacaggcaaacagcttga

SEQ ID NO: 5774979 - DNA, 25 bp, Homo sapien
cgtggccaatgctaactgttcttca

SEQ ID NO: 5774980 - DNA, 25 bp, Homo sapien
attcttcattcacctttgataacac

SEQ ID NO: 5774981 - DNA, 25 bp, Homo sapien
tagttgcagggaacaagccccttct

SEQ ID NO: 5774982 - DNA, 25 bp, Homo sapien
ccagttatcattgcccttcttcaag

SEQ ID NO: 5774983 - DNA, 25 bp, Homo sapien
gcactgaaggcatccagggctccct

SEQ ID NO: 5774984 - DNA, 25 bp, Homo sapien
caccttgagtgtgtagggcatggga

SEQ ID NO: 5774985 - DNA, 25 bp, Homo sapien
gggctgagtcttcatgactaccgtg

SEQ ID NO: 5774986 - DNA, 25 bp, Homo sapien
ataacacctcacaggcaaacagctt

SEQ ID NO: 5774987 - DNA, 25 bp, Homo sapien
atttggtcgaaacagcctgcccaca

SEQ ID NO: 5774988 - DNA, 25 bp, Homo sapien
cttacaaacaagtaatagggcttca

SEQ ID NO: 5774989 - DNA, 25 bp, Homo sapien
gagagaagacaggttggagcgtctc

SEQ ID NO: 5774990 - DNA, 25 bp, Homo sapien
ctcgtgccctttccagacacttcca

SEQ ID NO: 5774991 - DNA, 25 bp, Homo sapien
aagcaatgttatataacacctcaca

SEQ ID NO: 5774992 - DNA, 25 bp, Homo sapien
caggaaatcatcctgggtactcaca

SEQ ID NO: 5774993 - DNA, 25 bp, Homo sapien
ctaaatcttacaaacaagtaatagg

SEQ ID NO: 5774994 - DNA, 25 bp, Homo sapien
ggaagactctctcgtgccctttcca

SEQ ID NO: 5774995 - DNA, 25 bp, Homo sapien
tctttaaggtctttgatagccaaat

SEQ ID NO: 5774996 - DNA, 25 bp, Homo sapien
ccttgtcgattttggaatgtctggg

SEQ ID NO: 5774997 - DNA, 25 bp, Homo sapien
ccccaggcatccttcatgctgtctt

SEQ ID NO: 5774998 - DNA, 25 bp, Homo sapien
gatagtgtacatgcagccaatgttg

SEQ ID NO: 5774999 - DNA, 25 bp, Homo sapien
gggtggatccgcagctcaactggtt

SEQ ID NO: 5775000 - DNA, 25 bp, Homo sapien
gctgggatgtcggactgcggagagc

SEQ ID NO: 5775001 - DNA, 25 bp, Homo sapien
gctgcctgtggttgcagaggggcaa

SEQ ID NO: 5775002 - DNA, 25 bp, Homo sapien
agtttgttccagccggagctccagt

SEQ ID NO: 5775003 - DNA, 25 bp, Homo sapien
cgattttggaatgtctgggctcaga

SEQ ID NO: 5775004 - DNA, 25 bp, Homo sapien
aggtctttgatagccaaatcatatt

SEQ ID NO: 5775005 - DNA, 25 bp, Homo sapien
tcactttctgggccagatgagtaga

SEQ ID NO: 5775006 - DNA, 25 bp, Homo sapien
ggaaatcatcctgggtactcacatc

SEQ ID NO: 5775007 - DNA, 25 bp, Homo sapien
tgggtagcctcataactgaagagtg

SEQ ID NO: 5775008 - DNA, 25 bp, Homo sapien
cagcaccccttcattccagaggctg

SEQ ID NO: 5775009 - DNA, 25 bp, Homo sapien
gagaagacaggttggagcgtctccc

SEQ ID NO: 5775010 - DNA, 25 bp, Homo sapien
ggtcacccactgtgttctcacacca

SEQ ID NO: 5775011 - DNA, 25 bp, Homo sapien
gttgccttgcctaggtaatccttct

SEQ ID NO: 5775012 - DNA, 25 bp, Homo sapien
ctcggttaatgcttctggtaaaggc

SEQ ID NO: 5775013 - DNA, 25 bp, Homo sapien
agtccttcttgtccgctgccagcac

SEQ ID NO: 5775014 - DNA, 25 bp, Homo sapien
tgtctctcatttggtcgaaacagcc

SEQ ID NO: 5775015 - DNA, 25 bp, Homo sapien
cagagaaactgtcttgatccaccac

SEQ ID NO: 5775016 - DNA, 25 bp, Homo sapien
taggctcttctttttgtttctggcc

SEQ ID NO: 5775017 - DNA, 25 bp, Homo sapien
gctggggtcttccaggggctttgga

SEQ ID NO: 5775018 - DNA, 25 bp, Homo sapien
tttgtctcaggcacaaacccaaata

SEQ ID NO: 5775019 - DNA, 25 bp, Homo sapien
ctagctagcactcagagcaagaaac

SEQ ID NO: 5775020 - DNA, 25 bp, Homo sapien
ctgggtactcacatcattgtctagt

SEQ ID NO: 5775021 - DNA, 25 bp, Homo sapien
ttcatgctcgtggccaatgctaact

SEQ ID NO: 5775022 - DNA, 25 bp, Homo sapien
actgccaagtgcttgtctcggttaa

SEQ ID NO: 5775023 - DNA, 25 bp, Homo sapien
tcttcttttgtctcaggcacaaacc

SEQ ID NO: 5775024 - DNA, 25 bp, Homo sapien
ctcacaccacagagtcaggcagtag

SEQ ID NO: 5775025 - DNA, 25 bp, Homo sapien
gtgtgtagggcatgggaacactgag

SEQ ID NO: 5775026 - DNA, 25 bp, Homo sapien
taagctgaggttctgttgtctggtt

SEQ ID NO: 5775027 - DNA, 25 bp, Homo sapien
gtttttcacctggccccaggcatcc

SEQ ID NO: 5775028 - DNA, 25 bp, Homo sapien
ccactgtgttctcacaccacagagt

SEQ ID NO: 5775029 - DNA, 25 bp, Homo sapien
agcatcagctttttcactttccttg

SEQ ID NO: 5775030 - DNA, 25 bp, Homo sapien
ttttttgtggtatgacacagaaaag

SEQ ID NO: 5775031 - DNA, 25 bp, Homo sapien
ataaccctaccatgagagagaaaag

SEQ ID NO: 5775032 - DNA, 25 bp, Homo sapien
gcaagaaacaggatcagtacctgga

SEQ ID NO: 5775033 - DNA, 25 bp, Homo sapien
tttaaggtctttgatagccaaatca

SEQ ID NO: 5775034 - DNA, 25 bp, Homo sapien
tttcttagacaccatgtcccggacc

SEQ ID NO: 5775035 - DNA, 25 bp, Homo sapien
tctggggttttcggtctgggtggag

SEQ ID NO: 5775036 - DNA, 25 bp, Homo sapien
tagtttttcacctggccccaggcat

SEQ ID NO: 5775037 - DNA, 25 bp, Homo sapien
caactggttcaaggtagttgcaggg

SEQ ID NO: 5775038 - DNA, 25 bp, Homo sapien
gggctttggaactaggaggagctgg

SEQ ID NO: 5775039 - DNA, 25 bp, Homo sapien
cctcccttaagataacttctcagtg

SEQ ID NO: 5775040 - DNA, 25 bp, Homo sapien
cctgaagatctctggggttttcggt

SEQ ID NO: 5775041 - DNA, 25 bp, Homo sapien
ctggctagctagcactcagagcaag

SEQ ID NO: 5775042 - DNA, 25 bp, Homo sapien
cttcctgaaactccaggtcctctgg

SEQ ID NO: 5775043 - DNA, 25 bp, Homo sapien
ctttccttgggttcatctggaaagc

SEQ ID NO: 5775044 - DNA, 25 bp, Homo sapien
atcaccactggctcatatagcttct

SEQ ID NO: 5775045 - DNA, 25 bp, Homo sapien
actttctgggccagatgagtagaat

SEQ ID NO: 5775046 - DNA, 25 bp, Homo sapien
cgaggccgatagctcagcttagttt

SEQ ID NO: 5775047 - DNA, 25 bp, Homo sapien
gggagtgggggtcctggacggcact

SEQ ID NO: 5775048 - DNA, 25 bp, Homo sapien
agtagtttttcacctggccccaggc

SEQ ID NO: 5775049 - DNA, 25 bp, Homo sapien
cttttgtctcaggcacaaacccaaa

SEQ ID NO: 5775050 - DNA, 25 bp, Homo sapien
gaaactgtcttgatccaccacagat

SEQ ID NO: 5775051 - DNA, 25 bp, Homo sapien
tggccaatgctaactgttcttcagc

SEQ ID NO: 5775052 - DNA, 25 bp, Homo sapien
gatagccaaatcatatttctctgtc

SEQ ID NO: 5775053 - DNA, 25 bp, Homo sapien
atagtctatcagctggttccctcga

SEQ ID NO: 5775054 - DNA, 25 bp, Homo sapien
ccgttgccttgcctaggtaatcctt

SEQ ID NO: 5775055 - DNA, 25 bp, Homo sapien
tcagacttcatgctcgtggccaatg

SEQ ID NO: 5775056 - DNA, 25 bp, Homo sapien
gccaatgctaactgttcttcagctt

SEQ ID NO: 5775057 - DNA, 25 bp, Homo sapien
gagccctgaagatctctggggtttt

SEQ ID NO: 5775058 - DNA, 25 bp, Homo sapien
cagggaataaatagttaacacttcc

SEQ ID NO: 5775059 - DNA, 25 bp, Homo sapien
atgagtagaatggggcccagcctcc

SEQ ID NO: 5775060 - DNA, 25 bp, Homo sapien
tcttagacaccatgtcccggacctg

SEQ ID NO: 5775061 - DNA, 25 bp, Homo sapien
ttttttttgtggtatgacacagaaa

SEQ ID NO: 5775062 - DNA, 25 bp, Homo sapien
ctggggctgctgctgagggtggatc

SEQ ID NO: 5775063 - DNA, 25 bp, Homo sapien
ccttctctgcttcagtcatgttctt

SEQ ID NO: 5775064 - DNA, 25 bp, Homo sapien
cacctttgataacaccaggattata

SEQ ID NO: 5775065 - DNA, 25 bp, Homo sapien
gggcccagcctcccttaagataact

SEQ ID NO: 5775066 - DNA, 25 bp, Homo sapien
aagaaacaggatcagtacctggaag

SEQ ID NO: 5775067 - DNA, 25 bp, Homo sapien
atctggaaagccttggtcacccact

SEQ ID NO: 5775068 - DNA, 25 bp, Homo sapien
ctgtaggggagcccgggctgagtct

SEQ ID NO: 5775069 - DNA, 25 bp, Homo sapien
tccttaggctcttctttttgtttct

SEQ ID NO: 5775070 - DNA, 25 bp, Homo sapien
aactgttcttcagcttttttccatt

SEQ ID NO: 5775071 - DNA, 25 bp, Homo sapien
ttgtagtgcaccttgagtgtgtagg

SEQ ID NO: 5775072 - DNA, 25 bp, Homo sapien
tcctgaaactccaggtcctctggtt

SEQ ID NO: 5775073 - DNA, 25 bp, Homo sapien
aggttggagcgtctcccctagcagg

SEQ ID NO: 5775074 - DNA, 25 bp, Homo sapien
acaccatgtcccggacctggctgta

SEQ ID NO: 5775075 - DNA, 25 bp, Homo sapien
gctgccagcaccccttcattccaga

SEQ ID NO: 5775076 - DNA, 25 bp, Homo sapien
gagacagagagaagacaggttggag

SEQ ID NO: 5775077 - DNA, 25 bp, Homo sapien
ccagatgagtagaatggggcccagc

SEQ ID NO: 5775078 - DNA, 25 bp, Homo sapien
gtgaacacagctggctagctagcac

SEQ ID NO: 5775079 - DNA, 25 bp, Homo sapien
cttcaagacaaagacaatgttccct

SEQ ID NO: 5775080 - DNA, 25 bp, Homo sapien
tggggtcttccaggggctttggaac

SEQ ID NO: 5775081 - DNA, 25 bp, Homo sapien
gcctcataactgaagagtgcctcca

SEQ ID NO: 5775082 - DNA, 25 bp, Homo sapien
tctcatttggtcgaaacagcctgcc

SEQ ID NO: 5775083 - DNA, 25 bp, Homo sapien
agggcatgggaacactgagcttcac

SEQ ID NO: 5775084 - DNA, 25 bp, Homo sapien
aggagacagagagaagacaggttgg

SEQ ID NO: 5775085 - DNA, 25 bp, Homo sapien
aacacttccaaactgtaatgtctca

SEQ ID NO: 5775086 - DNA, 25 bp, Homo sapien
agtgcaccttgagtgtgtagggcat

SEQ ID NO: 5775087 - DNA, 25 bp, Homo sapien
atatagcttctgcttccagacacac

SEQ ID NO: 5775088 - DNA, 25 bp, Homo sapien
ggacctggctgtaggggagcccggg

SEQ ID NO: 5775089 - DNA, 25 bp, Homo sapien
tccagggctcccttccagtccttct

SEQ ID NO: 5775090 - DNA, 25 bp, Homo sapien
gaaaatgcccaccttccctttgcac

SEQ ID NO: 5775091 - DNA, 25 bp, Homo sapien
gaggccaagagagctgccaggagac

SEQ ID NO: 5775092 - DNA, 25 bp, Homo sapien
ttgtggtatgacacagaaaagtgca

SEQ ID NO: 5775093 - DNA, 25 bp, Homo sapien
cagatgccacgaccgttgccttgcc

SEQ ID NO: 5775094 - DNA, 25 bp, Homo sapien
tgggccagatgagtagaatggggcc

SEQ ID NO: 5775095 - DNA, 25 bp, Homo sapien
ttccattcctccttcttggcataca

SEQ ID NO: 5775096 - DNA, 25 bp, Homo sapien
ggctagctagcactcagagcaagaa

SEQ ID NO: 5775097 - DNA, 25 bp, Homo sapien
tgctgtcccgaggccgatagctcag

SEQ ID NO: 5775098 - DNA, 25 bp, Homo sapien
taatgcttctggtaaaggccttctc

SEQ ID NO: 5775099 - DNA, 25 bp, Homo sapien
ggcaactgactcataaccctaccat

SEQ ID NO: 5775100 - DNA, 25 bp, Homo sapien
ggccttctctgcttcagtcatgttc

SEQ ID NO: 5775101 - DNA, 25 bp, Homo sapien
tgggtggaggctcagctgcctgtgg

SEQ ID NO: 5775102 - DNA, 25 bp, Homo sapien
agagcatccctcgttggaagtaagc

SEQ ID NO: 5775103 - DNA, 25 bp, Homo sapien
ttccagccggagctccagtttctta

SEQ ID NO: 5775104 - DNA, 25 bp, Homo sapien
tgccttgcctaggtaatccttcttg

SEQ ID NO: 5775105 - DNA, 25 bp, Homo sapien
cctggtgacagctggggtcttccag

SEQ ID NO: 5775106 - DNA, 25 bp, Homo sapien
gcccgggctgagtcttcatgactac

SEQ ID NO: 5775107 - DNA, 25 bp, Homo sapien
aacatcctagacttctctccgagtg

SEQ ID NO: 5775108 - DNA, 25 bp, Homo sapien
tgccaagtgcttgtctcggttaatg

SEQ ID NO: 5775109 - DNA, 25 bp, Homo sapien
aatgtacagcttgatgaatgtttac

SEQ ID NO: 5775110 - DNA, 25 bp, Homo sapien
accgtggcccagttatcattgccct

SEQ ID NO: 5775111 - DNA, 25 bp, Homo sapien
gctcattgctgtcccgaggccgata

SEQ ID NO: 5775112 - DNA, 25 bp, Homo sapien
agccactgccaagtgcttgtctcgg

SEQ ID NO: 5775113 - DNA, 25 bp, Homo sapien
ccattcctccttcttggcatacatg

SEQ ID NO: 5775114 - DNA, 25 bp, Homo sapien
cattgtctagtaggttaaattttaa

SEQ ID NO: 5775115 - DNA, 25 bp, Homo sapien
gctttccaaatctgtagttgcgcag

SEQ ID NO: 5775116 - DNA, 25 bp, Homo sapien
cttggcatacatgaaagcaatgtta

SEQ ID NO: 5775117 - DNA, 25 bp, Homo sapien
agctccagtttcttagacaccatgt

SEQ ID NO: 5775118 - DNA, 25 bp, Homo sapien
ccaatgttgaagcaaatccgggagt

SEQ ID NO: 5775119 - DNA, 25 bp, Homo sapien
cttcattttcttcagctttgtagtt

SEQ ID NO: 5775120 - DNA, 25 bp, Homo sapien
tccaaactgtaatgtctcagtacag

SEQ ID NO: 5775121 - DNA, 25 bp, Homo sapien
ggaaagccttggtcacccactgtgt

SEQ ID NO: 5775122 - DNA, 25 bp, Homo sapien
tccaaatctgtagttgcgcagtctt

SEQ ID NO: 5775123 - DNA, 25 bp, Homo sapien
agcagaagggtgctaaatcttacaa

SEQ ID NO: 5775124 - DNA, 25 bp, Homo sapien
gagccacttgtctctcatttggtcg

SEQ ID NO: 5775125 - DNA, 25 bp, Homo sapien
cttccagagccctgaagatctctgg

SEQ ID NO: 5775126 - DNA, 25 bp, Homo sapien
gttgtctggttattagcatcagctt

SEQ ID NO: 5775127 - DNA, 25 bp, Homo sapien
taaggtctttgatagccaaatcata

SEQ ID NO: 5775128 - DNA, 25 bp, Homo sapien
agctggttccctcgaagctgaatca

SEQ ID NO: 5775129 - DNA, 25 bp, Homo sapien
cttcttggccagctgagccacttgt

SEQ ID NO: 5775130 - DNA, 25 bp, Homo sapien
tgctcgtggccaatgctaactgttc

SEQ ID NO: 5775131 - DNA, 25 bp, Homo sapien
tgaagagtgcctccacttggctgcc

SEQ ID NO: 5775132 - DNA, 25 bp, Homo sapien
ttcttaagctgaggttctgttgtct

SEQ ID NO: 5775133 - DNA, 25 bp, Homo sapien
tagtagagcatccctcgttggaagt

SEQ ID NO: 5775134 - DNA, 25 bp, Homo sapien
gtgtagggcatgggaacactgagct

SEQ ID NO: 5775135 - DNA, 25 bp, Homo sapien
ctgccttagtggcccccaaggtgtt

SEQ ID NO: 5775136 - DNA, 25 bp, Homo sapien
cacttgtctctcatttggtcgaaac

SEQ ID NO: 5775137 - DNA, 25 bp, Homo sapien
gtatacagcagaagggtgctaaatc

SEQ ID NO: 5775138 - DNA, 25 bp, Homo sapien
gctcttctttttgtttctggcctgg

SEQ ID NO: 5775139 - DNA, 25 bp, Homo sapien
gtcccgaggccgatagctcagctta

SEQ ID NO: 5775140 - DNA, 25 bp, Homo sapien
aggggagcccgggctgagtcttcat

SEQ ID NO: 5775141 - DNA, 25 bp, Homo sapien
gtaggggagcccgggctgagtcttc

SEQ ID NO: 5775142 - DNA, 25 bp, Homo sapien
gtacttgtagtgcaccttgagtgtg

SEQ ID NO: 5775143 - DNA, 25 bp, Homo sapien
gatctctggggttttcggtctgggt

SEQ ID NO: 5775144 - DNA, 25 bp, Homo sapien
ttctgcccgttgaacatgaccgtgg

SEQ ID NO: 5775145 - DNA, 25 bp, Homo sapien
tgggaacactgagcttcacttcctt

SEQ ID NO: 5775146 - DNA, 25 bp, Homo sapien
gctcagacttcatgctcgtggccaa

SEQ ID NO: 5775147 - DNA, 25 bp, Homo sapien
tagcctcataactgaagagtgcctc

SEQ ID NO: 5775148 - DNA, 25 bp, Homo sapien
ggctgccttagtggcccccaaggtg

SEQ ID NO: 5775149 - DNA, 25 bp, Homo sapien
ccggacctggctgtaggggagcccg

SEQ ID NO: 5775150 - DNA, 25 bp, Homo sapien
ttcagctttgtagtttgtgaaacat

SEQ ID NO: 5775151 - DNA, 25 bp, Homo sapien
tttacagtgtgaacacagctggcta

SEQ ID NO: 5775152 - DNA, 25 bp, Homo sapien
ggtctgggtggaggctcagctgcct

SEQ ID NO: 5775153 - DNA, 25 bp, Homo sapien
tgtagttgcgcagtcttcaacaaaa

SEQ ID NO: 5775154 - DNA, 25 bp, Homo sapien
ctctccgagtgctttccaaatctgt

SEQ ID NO: 5775155 - DNA, 25 bp, Homo sapien
ctgcccgttgaacatgaccgtggcc

SEQ ID NO: 5775156 - DNA, 25 bp, Homo sapien
caatgctaactgttcttcagctttt

SEQ ID NO: 5775157 - DNA, 25 bp, Homo sapien
ttccagacacttccatccacttttc

SEQ ID NO: 5775158 - DNA, 25 bp, Homo sapien
acttgtagtgcaccttgagtgtgta

SEQ ID NO: 5775159 - DNA, 25 bp, Homo sapien
aggcaaacagcttgaactggagccc

SEQ ID NO: 5775160 - DNA, 25 bp, Homo sapien
tggttcaaggtagttgcagggaaca

SEQ ID NO: 5775161 - DNA, 25 bp, Homo sapien
ggtcgaaacagcctgcccacaggga

SEQ ID NO: 5775162 - DNA, 25 bp, Homo sapien
atagcttctgcttccagacacactc

SEQ ID NO: 5775163 - DNA, 25 bp, Homo sapien
taggaggagctgggatgtcggactg

SEQ ID NO: 5775164 - DNA, 25 bp, Homo sapien
tttgtagtttgtgaaacatcctaga

SEQ ID NO: 5775165 - DNA, 25 bp, Homo sapien
ggccagctgagccacttgtctctca

SEQ ID NO: 5775166 - DNA, 25 bp, Homo sapien
ctccgagtgctttccaaatctgtag

SEQ ID NO: 5775167 - DNA, 25 bp, Homo sapien
ttggtcacccactgtgttctcacac

SEQ ID NO: 5775168 - DNA, 25 bp, Homo sapien
tccttcttgtccgctgccagcaccc

SEQ ID NO: 5775169 - DNA, 25 bp, Homo sapien
catgctgtcttctgaaaggggcacc

SEQ ID NO: 5775170 - DNA, 25 bp, Homo sapien
tagtttgtgaaacatcctagacttc

SEQ ID NO: 5775171 - DNA, 25 bp, Homo sapien
tcctccttcttggcatacatgaaag

SEQ ID NO: 5775172 - DNA, 25 bp, Homo sapien
gcaatgttatataacacctcacagg

SEQ ID NO: 5775173 - DNA, 25 bp, Homo sapien
ccagacacttccatccacttttcct

SEQ ID NO: 5775174 - DNA, 25 bp, Homo sapien
agtacagtatacagcagaagggtgc

SEQ ID NO: 5775175 - DNA, 25 bp, Homo sapien
tcttctttttgtttctggcctggtg

SEQ ID NO: 5775176 - DNA, 25 bp, Homo sapien
gcctttcttaagctgaggttctgtt

SEQ ID NO: 5775177 - DNA, 25 bp, Homo sapien
ccttgggttcatctggaaagccttg

SEQ ID NO: 5775178 - DNA, 25 bp, Homo sapien
accagggacatgattaggtagaaac

SEQ ID NO: 5775179 - DNA, 25 bp, Homo sapien
aactccaggtcctctggttgggtag

SEQ ID NO: 5775180 - DNA, 25 bp, Homo sapien
gtctttgatagccaaatcatatttc

SEQ ID NO: 5775181 - DNA, 25 bp, Homo sapien
gaagtaagccactgccaagtgcttg

SEQ ID NO: 5775182 - DNA, 25 bp, Homo sapien
ttgtttctggcctggtgacagctgg

SEQ ID NO: 5775183 - DNA, 25 bp, Homo sapien
gtgtacatgcagccaatgttgaagc

SEQ ID NO: 5775184 - DNA, 25 bp, Homo sapien
gtgcctccacttggctgcctttctt

SEQ ID NO: 5775185 - DNA, 25 bp, Homo sapien
tgttatataacacctcacaggcaaa

SEQ ID NO: 5775186 - DNA, 25 bp, Homo sapien
tcttcagcttttttccattcctcct

SEQ ID NO: 5775187 - DNA, 25 bp, Homo sapien
gagtgctttccaaatctgtagttgc

SEQ ID NO: 5775188 - DNA, 25 bp, Homo sapien
ggtatgacacagaaaagtgcaccaa

SEQ ID NO: 5775189 - DNA, 25 bp, Homo sapien
tggcatacatgaaagcaatgttata

SEQ ID NO: 5775190 - DNA, 25 bp, Homo sapien
aaagccttggtcacccactgtgttc

SEQ ID NO: 5775191 - DNA, 25 bp, Homo sapien
gtctgggctcagacttcatgctcgt

SEQ ID NO: 5775192 - DNA, 25 bp, Homo sapien
gagagctgccaggagacagagagaa

SEQ ID NO: 5775193 - DNA, 25 bp, Homo sapien
ttgagtgtgtagggcatgggaacac

SEQ ID NO: 5775194 - DNA, 25 bp, Homo sapien
gacctggagctcttcttttgtctca

SEQ ID NO: 5775195 - DNA, 25 bp, Homo sapien
agccccttctgcccgttgaacatga

SEQ ID NO: 5775196 - DNA, 25 bp, Homo sapien
accatgtcccggacctggctgtagg

SEQ ID NO: 5775197 - DNA, 25 bp, Homo sapien
agtaagccactgccaagtgcttgtc

SEQ ID NO: 5775198 - DNA, 25 bp, Homo sapien
gtaatccttcttggccagctgagcc

SEQ ID NO: 5775199 - DNA, 25 bp, Homo sapien
tgaactggagccccaggatcttata

SEQ ID NO: 5775200 - DNA, 25 bp, Homo sapien
tttgataacaccaggattatatccc

SEQ ID NO: 5775201 - DNA, 25 bp, Homo sapien
tcaaggtagttgcagggaacaagcc

SEQ ID NO: 5775202 - DNA, 25 bp, Homo sapien
aatccttcttggccagctgagccac

SEQ ID NO: 5775203 - DNA, 25 bp, Homo sapien
tcagctttttcactttccttgggtt

SEQ ID NO: 5775204 - DNA, 25 bp, Homo sapien
ttcttcaagacaaagacaatgttcc

SEQ ID NO: 5775205 - DNA, 25 bp, Homo sapien
ttcctcctggggctgctgctgaggg

SEQ ID NO: 5775206 - DNA, 25 bp, Homo sapien
tgaaaggggcaccagctcattgctg

SEQ ID NO: 5775207 - DNA, 25 bp, Homo sapien
cactttccttgggttcatctggaaa

SEQ ID NO: 5775208 - DNA, 25 bp, Homo sapien
aaggtagttgcagggaacaagcccc

SEQ ID NO: 5775209 - DNA, 25 bp, Homo sapien
cacggtgagcctccccttccagagc

SEQ ID NO: 5775210 - DNA, 25 bp, Homo sapien
cagctggggtcttccaggggctttg

SEQ ID NO: 5775211 - DNA, 25 bp, Homo sapien
gatggcctccaccagggacatgatt

SEQ ID NO: 5775212 - DNA, 25 bp, Homo sapien
atgaaagcaatgttatataacacct

SEQ ID NO: 5775213 - DNA, 25 bp, Homo sapien
ttgaagcaaatccgggagtgggggt

SEQ ID NO: 5775214 - DNA, 25 bp, Homo sapien
gagggtggatccgcagctcaactgg

SEQ ID NO: 5775215 - DNA, 25 bp, Homo sapien
gctttggaactaggaggagctggga

SEQ ID NO: 5775216 - DNA, 25 bp, Homo sapien
tctggttgggtagcctcataactga

SEQ ID NO: 5775217 - DNA, 25 bp, Homo sapien
tgcatcaggaaatgtccccaccttt

SEQ ID NO: 5775218 - DNA, 25 bp, Homo sapien
ccctcgaagctgaatcaaggcttct

SEQ ID NO: 5775219 - DNA, 25 bp, Homo sapien
atgcttctggtaaaggccttctctg

SEQ ID NO: 5775220 - DNA, 25 bp, Homo sapien
tagtggcccccaaggtgttcacttt

SEQ ID NO: 5775221 - DNA, 25 bp, Homo sapien
tccctcgttggaagtaagccactgc

SEQ ID NO: 5775222 - DNA, 25 bp, Homo sapien
ccagctgagccacttgtctctcatt

SEQ ID NO: 5775223 - DNA, 25 bp, Homo sapien
gagtgggggtcctggacggcactga

SEQ ID NO: 5775224 - DNA, 25 bp, Homo sapien
gggcaccagctcattgctgtcccga

SEQ ID NO: 5775225 - DNA, 25 bp, Homo sapien
gggtcctggacggcactgaaggcat

SEQ ID NO: 5775226 - DNA, 25 bp, Homo sapien
acagcagaagggtgctaaatcttac

SEQ ID NO: 5775227 - DNA, 25 bp, Homo sapien
aggatcttatagtctatcagctggt

SEQ ID NO: 5775228 - DNA, 25 bp, Homo sapien
atgtcggactgcggagagctttcct

SEQ ID NO: 5775229 - DNA, 25 bp, Homo sapien
tgtctcagtacagtatacagcagaa

SEQ ID NO: 5775230 - DNA, 25 bp, Homo sapien
tattagcatcagctttttcactttc

SEQ ID NO: 5775231 - DNA, 25 bp, Homo sapien
ttgtctcggttaatgcttctggtaa

SEQ ID NO: 5775232 - DNA, 25 bp, Homo sapien
gttttcggtctgggtggaggctcag

SEQ ID NO: 5775233 - DNA, 25 bp, Homo sapien
gagctgggatgtcggactgcggaga

SEQ ID NO: 5775234 - DNA, 25 bp, Homo sapien
gactctctcgtgccctttccagaca

SEQ ID NO: 5775235 - DNA, 25 bp, Homo sapien
catgagagagaaaaggaaagaagca

SEQ ID NO: 5775236 - DNA, 25 bp, Homo sapien
aagagtgcctccacttggctgcctt

SEQ ID NO: 5775237 - DNA, 25 bp, Homo sapien
cagggaacaagccccttctgcccgt

SEQ ID NO: 5775238 - DNA, 25 bp, Homo sapien
atcattgtctagtaggttaaatttt

SEQ ID NO: 5775239 - DNA, 25 bp, Homo sapien
aagacaaagacaatgttccctggca

SEQ ID NO: 5775240 - DNA, 25 bp, Homo sapien
cagtgttgcaaatgcatcaggaaat

SEQ ID NO: 5775241 - DNA, 25 bp, Homo sapien
tgtctcaggcacaaacccaaatagc

SEQ ID NO: 5775242 - DNA, 25 bp, Homo sapien
gacaatgttccctggcatgacctgg

SEQ ID NO: 5775243 - DNA, 25 bp, Homo sapien
tcacatcattgtctagtaggttaaa

SEQ ID NO: 5775244 - DNA, 25 bp, Homo sapien
gcccttcttcaagacaaagacaatg

SEQ ID NO: 5775245 - DNA, 25 bp, Homo sapien
tcggtctgggtggaggctcagctgc

SEQ ID NO: 5775246 - DNA, 25 bp, Homo sapien
ttcacttccttaggctcttcttttt

SEQ ID NO: 5775247 - DNA, 25 bp, Homo sapien
gcgtctcccctagcagggctgcctt

SEQ ID NO: 5775248 - DNA, 25 bp, Homo sapien
catgaccgtggcccagttatcattg

SEQ ID NO: 5775249 - DNA, 25 bp, Homo sapien
ttagcatcagctttttcactttcct

SEQ ID NO: 5775250 - DNA, 25 bp, Homo sapien
aactggagccccaggatcttatagt

SEQ ID NO: 5775251 - DNA, 25 bp, Homo sapien
ggtagaaactaggaggccaagagag

SEQ ID NO: 5775252 - DNA, 25 bp, Homo sapien
gcaccccttcattccagaggctgat

SEQ ID NO: 5775253 - DNA, 25 bp, Homo sapien
ctgatggcctccaccagggacatga

SEQ ID NO: 5775254 - DNA, 25 bp, Homo sapien
gcggagagctttcctcctggggctg

SEQ ID NO: 5775255 - DNA, 25 bp, Homo sapien
ctccttcttggcatacatgaaagca

SEQ ID NO: 5775256 - DNA, 25 bp, Homo sapien
ggagagctttcctcctggggctgct

SEQ ID NO: 5775257 - DNA, 25 bp, Homo sapien
tagttgcgcagtcttcaacaaaaac

SEQ ID NO: 5775258 - DNA, 25 bp, Homo sapien
cacttccttaggctcttctttttgt

SEQ ID NO: 5775259 - DNA, 25 bp, Homo sapien
ctcagctgcctgtggttgcagaggg

SEQ ID NO: 5775260 - DNA, 25 bp, Homo sapien
ctgcctttcttaagctgaggttctg

SEQ ID NO: 5775261 - DNA, 25 bp, Homo sapien
gttgcagaggggcaaacccagagaa

SEQ ID NO: 5775262 - DNA, 25 bp, Homo sapien
ccaccacagatgccacgaccgttgc

SEQ ID NO: 5775263 - DNA, 25 bp, Homo sapien
ctcgtggccaatgctaactgttctt

SEQ ID NO: 5775264 - DNA, 25 bp, Homo sapien
tgccaggagacagagagaagacagg

SEQ ID NO: 5775265 - DNA, 25 bp, Homo sapien
atccgcagctcaactggttcaaggt

SEQ ID NO: 5775266 - DNA, 25 bp, Homo sapien
cccaccttttggcaactgactcata

SEQ ID NO: 5775267 - DNA, 25 bp, Homo sapien
agacttctctccgagtgctttccaa

SEQ ID NO: 5775268 - DNA, 25 bp, Homo sapien
agctagcactcagagcaagaaacag

SEQ ID NO: 5775269 - DNA, 25 bp, Homo sapien
ggaacactgagcttcacttccttag

SEQ ID NO: 5775270 - DNA, 25 bp, Homo sapien
agagctttcctcctggggctgctgc

SEQ ID NO: 5775271 - DNA, 25 bp, Homo sapien
tcctggggctgctgctgagggtgga

SEQ ID NO: 5775272 - DNA, 25 bp, Homo sapien
gttgcagggaacaagccccttctgc

SEQ ID NO: 5775273 - DNA, 25 bp, Homo sapien
aatcatatttctctgtctggtagta

SEQ ID NO: 5775274 - DNA, 25 bp, Homo sapien
gaacacagctggctagctagcactc

SEQ ID NO: 5775275 - DNA, 25 bp, Homo sapien
agccaatgttgaagcaaatccggga

SEQ ID NO: 5775276 - DNA, 25 bp, Homo sapien
cggttaatgcttctggtaaaggcct

SEQ ID NO: 5775277 - DNA, 25 bp, Homo sapien
ccttggtcacccactgtgttctcac

SEQ ID NO: 5775278 - DNA, 25 bp, Homo sapien
agcttctgcttccagacacactcca

SEQ ID NO: 5775279 - DNA, 25 bp, Homo sapien
gtgcttgtctcggttaatgcttctg

SEQ ID NO: 5775280 - DNA, 25 bp, Homo sapien
acaggttggagcgtctcccctagca

SEQ ID NO: 5775281 - DNA, 25 bp, Homo sapien
atccttcatgctgtcttctgaaagg

SEQ ID NO: 5775282 - DNA, 25 bp, Homo sapien
ttctctccgagtgctttccaaatct

SEQ ID NO: 5775283 - DNA, 25 bp, Homo sapien
tcttcattcacctttgataacacca

SEQ ID NO: 5775284 - DNA, 25 bp, Homo sapien
gctgagtcttcatgactaccgtgta

SEQ ID NO: 5775285 - DNA, 25 bp, Homo sapien
aagtgcaccaaatgtacagcttgat

SEQ ID NO: 5775286 - DNA, 25 bp, Homo sapien
gccctgaagatctctggggttttcg

SEQ ID NO: 5775287 - DNA, 25 bp, Homo sapien
ctccagtttcttagacaccatgtcc

SEQ ID NO: 5775288 - DNA, 25 bp, Homo sapien
aactaggaggccaagagagctgcca

SEQ ID NO: 5775289 - DNA, 25 bp, Homo sapien
actgaaggcatccagggctcccttc

SEQ ID NO: 5775290 - DNA, 25 bp, Homo sapien
cttcttgtccgctgccagcacccct

SEQ ID NO: 5775291 - DNA, 25 bp, Homo sapien
ccactgccaagtgcttgtctcggtt

SEQ ID NO: 5775292 - DNA, 25 bp, Homo sapien
tcatatagcttctgcttccagacac

SEQ ID NO: 5775293 - DNA, 25 bp, Homo sapien
ttgtgaaacatcctagacttctctc

SEQ ID NO: 5775294 - DNA, 25 bp, Homo sapien
ctgtaatgtctcagtacagtataca

SEQ ID NO: 5775295 - DNA, 25 bp, Homo sapien
agacttcatgctcgtggccaatgct

SEQ ID NO: 5775296 - DNA, 25 bp, Homo sapien
ccgttgaacatgaccgtggcccagt

SEQ ID NO: 5775297 - DNA, 25 bp, Homo sapien
aacactgagcttcacttccttaggc

SEQ ID NO: 5775298 - DNA, 25 bp, Homo sapien
ttccagtccttcttgtccgctgcca

SEQ ID NO: 5775299 - DNA, 25 bp, Homo sapien
gcagctcaactggttcaaggtagtt

SEQ ID NO: 5775300 - DNA, 25 bp, Homo sapien
ggaggagctgggatgtcggactgcg

SEQ ID NO: 5775301 - DNA, 25 bp, Homo sapien
gaaacaggatcagtacctggaagac

SEQ ID NO: 5775302 - DNA, 25 bp, Homo sapien
ctcacccactgtgccccaggaaatc

SEQ ID NO: 5775303 - DNA, 25 bp, Homo sapien
taagccactgccaagtgcttgtctc

SEQ ID NO: 5775304 - DNA, 25 bp, Homo sapien
cttcaggatagtgtacatgcagcca

SEQ ID NO: 5775305 - DNA, 25 bp, Homo sapien
ccacttggctgcctttcttaagctg

SEQ ID NO: 5775306 - DNA, 25 bp, Homo sapien
agttatcattgcccttcttcaagac

SEQ ID NO: 5775307 - DNA, 25 bp, Homo sapien
tgatccaccacagatgccacgaccg

SEQ ID NO: 5775308 - DNA, 25 bp, Homo sapien
atcatcctgggtactcacatcattg

SEQ ID NO: 5775309 - DNA, 25 bp, Homo sapien
actaggaggagctgggatgtcggac

SEQ ID NO: 5775310 - DNA, 25 bp, Homo sapien
gccaaatcatatttctctgtctggt

SEQ ID NO: 5775311 - DNA, 25 bp, Homo sapien
acctggccccaggcatccttcatgc

SEQ ID NO: 5775312 - DNA, 25 bp, Homo sapien
caaagacaatgttccctggcatgac

SEQ ID NO: 5775313 - DNA, 25 bp, Homo sapien
aggcacaaacccaaatagcacacgg

SEQ ID NO: 5775314 - DNA, 25 bp, Homo sapien
ttctgttgtctggttattagcatca

SEQ ID NO: 5775315 - DNA, 25 bp, Homo sapien
tttaacagggaataaatagttaaca

SEQ ID NO: 5775316 - DNA, 25 bp, Homo sapien
aaatcttacaaacaagtaatagggc

SEQ ID NO: 5775317 - DNA, 25 bp, Homo sapien
ctaggaggccaagagagctgccagg

SEQ ID NO: 5775318 - DNA, 25 bp, Homo sapien
cggactgcggagagctttcctcctg

SEQ ID NO: 5775319 - DNA, 25 bp, Homo sapien
ttccaggggctttggaactaggagg

SEQ ID NO: 5775320 - DNA, 25 bp, Homo sapien
caagtaatagggcttcattttcttc

SEQ ID NO: 5775321 - DNA, 25 bp, Homo sapien
ggtggaggctcagctgcctgtggtt

SEQ ID NO: 5775322 - DNA, 25 bp, Homo sapien
ccgggagtgggggtcctggacggca

SEQ ID NO: 5775323 - DNA, 25 bp, Homo sapien
tccagagccctgaagatctctgggg

SEQ ID NO: 5775324 - DNA, 25 bp, Homo sapien
ccaggcatccttcatgctgtcttct

SEQ ID NO: 5775325 - DNA, 25 bp, Homo sapien
tcttcagctttgtagtttgtgaaac

SEQ ID NO: 5775326 - DNA, 25 bp, Homo sapien
gcttcacttccttaggctcttcttt

SEQ ID NO: 5775327 - DNA, 25 bp, Homo sapien
ccaggtcctctggttgggtagcctc

SEQ ID NO: 5775328 - DNA, 25 bp, Homo sapien
tccagacacactccatcgccttgtc

SEQ ID NO: 5775329 - DNA, 25 bp, Homo sapien
ggaacaagccccttctgcccgttga

SEQ ID NO: 5775330 - DNA, 25 bp, Homo sapien
cagtgtgaacacagctggctagcta

SEQ ID NO: 5775331 - DNA, 25 bp, Homo sapien
ttcttggcatacatgaaagcaatgt

SEQ ID NO: 5775332 - DNA, 25 bp, Homo sapien
gctcttcttttgtctcaggcacaaa

SEQ ID NO: 5775333 - DNA, 25 bp, Homo sapien
ggcccccaaggtgttcactttctgg

SEQ ID NO: 5775334 - DNA, 25 bp, Homo sapien
tctctcatttggtcgaaacagcctg

SEQ ID NO: 5775335 - DNA, 25 bp, Homo sapien
gatgccacgaccgttgccttgccta

SEQ ID NO: 5775336 - DNA, 25 bp, Homo sapien
gcttctggtaaaggccttctctgct

SEQ ID NO: 5775337 - DNA, 25 bp, Homo sapien
gcacaaacccaaatagcacacggtg

SEQ ID NO: 5775338 - DNA, 25 bp, Homo sapien
tttctgggccagatgagtagaatgg

SEQ ID NO: 5775339 - DNA, 25 bp, Homo sapien
aatgtccccaccttttggcaactga

SEQ ID NO: 5775340 - DNA, 25 bp, Homo sapien
tctgggtggaggctcagctgcctgt

SEQ ID NO: 5775341 - DNA, 25 bp, Homo sapien
cctgtggttgcagaggggcaaaccc

SEQ ID NO: 5775342 - DNA, 25 bp, Homo sapien
catcaggaaatgtccccaccttttg

SEQ ID NO: 5775343 - DNA, 25 bp, Homo sapien
ctggtagtagagcatccctcgttgg

SEQ ID NO: 5775344 - DNA, 25 bp, Homo sapien
ggcctggtgacagctggggtcttcc

SEQ ID NO: 5775345 - DNA, 25 bp, Homo sapien
ttccctcgaagctgaatcaaggctt

SEQ ID NO: 5775346 - DNA, 25 bp, Homo sapien
tggaactaggaggagctgggatgtc

SEQ ID NO: 5775347 - DNA, 25 bp, Homo sapien
actgtgttctcacaccacagagtca

SEQ ID NO: 5775348 - DNA, 25 bp, Homo sapien
ttgcctaggtaatccttcttggcca

SEQ ID NO: 5775349 - DNA, 25 bp, Homo sapien
gacagctggggtcttccaggggctt

SEQ ID NO: 5775350 - DNA, 25 bp, Homo sapien
tgaccgtggcccagttatcattgcc

SEQ ID NO: 5775351 - DNA, 25 bp, Homo sapien
tgaagatctctggggttttcggtct

SEQ ID NO: 5775352 - DNA, 25 bp, Homo sapien
tcccttccagtccttcttgtccgct

SEQ ID NO: 5775353 - DNA, 25 bp, Homo sapien
gcaccaaatgtacagcttgatgaat

SEQ ID NO: 5775354 - DNA, 25 bp, Homo sapien
acatgcagccaatgttgaagcaaat

SEQ ID NO: 5775355 - DNA, 25 bp, Homo sapien
cctaactcctccattcacctgtccc

SEQ ID NO: 5775356 - DNA, 25 bp, Homo sapien
atatttctctgtctggtagtagagc

SEQ ID NO: 5775357 - DNA, 25 bp, Homo sapien
agcatccctcgttggaagtaagcca

SEQ ID NO: 5775358 - DNA, 25 bp, Homo sapien
caaatgcatcaggaaatgtccccac

SEQ ID NO: 5775359 - DNA, 25 bp, Homo sapien
aaaagtgcaccaaatgtacagcttg

SEQ ID NO: 5775360 - DNA, 25 bp, Homo sapien
acctggaagactctctcgtgccctt

SEQ ID NO: 5775361 - DNA, 25 bp, Homo sapien
atttctctgtctggtagtagagcat

SEQ ID NO: 5775362 - DNA, 25 bp, Homo sapien
ttcatgctgtcttctgaaaggggca

SEQ ID NO: 5775363 - DNA, 25 bp, Homo sapien
tggagcgtctcccctagcagggctg

SEQ ID NO: 5775364 - DNA, 25 bp, Homo sapien
atcttacaaacaagtaatagggctt

SEQ ID NO: 5775365 - DNA, 25 bp, Homo sapien
ccacagagtcaggcagtagtttttc

SEQ ID NO: 5775366 - DNA, 25 bp, Homo sapien
ctgaggttctgttgtctggttatta

SEQ ID NO: 5775367 - DNA, 25 bp, Homo sapien
agccggagctccagtttcttagaca

SEQ ID NO: 5775368 - DNA, 25 bp, Homo sapien
gctgccaggagacagagagaagaca

SEQ ID NO: 5775369 - DNA, 25 bp, Homo sapien
tttccaaatctgtagttgcgcagtc

SEQ ID NO: 5775370 - DNA, 25 bp, Homo sapien
cagacacactccatcgccttgtcga

SEQ ID NO: 5775371 - DNA, 25 bp, Homo sapien
tctggttattagcatcagctttttc

SEQ ID NO: 5775372 - DNA, 25 bp, Homo sapien
accagctcattgctgtcccgaggcc

SEQ ID NO: 5775373 - DNA, 25 bp, Homo sapien
gagcctccccttccagagccctgaa

SEQ ID NO: 5775374 - DNA, 25 bp, Homo sapien
attttcttcagctttgtagtttgtg

SEQ ID NO: 5775375 - DNA, 25 bp, Homo sapien
gttaatgcttctggtaaaggccttc

SEQ ID NO: 5775376 - DNA, 25 bp, Homo sapien
cccagagaaactgtcttgatccacc

SEQ ID NO: 5775377 - DNA, 25 bp, Homo sapien
cagcttgatgaatgtttacagtgtg

SEQ ID NO: 5775378 - DNA, 25 bp, Homo sapien
agtcttcatgactaccgtgtacttg

SEQ ID NO: 5775379 - DNA, 25 bp, Homo sapien
aggagctgggatgtcggactgcgga

SEQ ID NO: 5775380 - DNA, 25 bp, Homo sapien
tacagcttgatgaatgtttacagtg

SEQ ID NO: 5775381 - DNA, 25 bp, Homo sapien
gataacttctcagtgttgcaaatgc

SEQ ID NO: 5775382 - DNA, 25 bp, Homo sapien
gagcttcacttccttaggctcttct

SEQ ID NO: 5775383 - DNA, 25 bp, Homo sapien
ctttcttaagctgaggttctgttgt

SEQ ID NO: 5775384 - DNA, 25 bp, Homo sapien
ttctggcctggtgacagctggggtc

SEQ ID NO: 5775385 - DNA, 25 bp, Homo sapien
accacagatgccacgaccgttgcct

SEQ ID NO: 5775386 - DNA, 25 bp, Homo sapien
ccttctgcccgttgaacatgaccgt

SEQ ID NO: 5775387 - DNA, 25 bp, Homo sapien
ttatagtctatcagctggttccctc

SEQ ID NO: 5775388 - DNA, 25 bp, Homo sapien
tcatttggtcgaaacagcctgccca

SEQ ID NO: 5775389 - DNA, 25 bp, Homo sapien
ttatataacacctcacaggcaaaca

SEQ ID NO: 5775390 - DNA, 25 bp, Homo sapien
tgtcccggacctggctgtaggggag

SEQ ID NO: 5775391 - DNA, 25 bp, Homo sapien
acccaaatagcacacggtgagcctc

SEQ ID NO: 5775392 - DNA, 25 bp, Homo sapien
agacacttccatccacttttcctct

SEQ ID NO: 5775393 - DNA, 25 bp, Homo sapien
tcagtacagtatacagcagaagggt

SEQ ID NO: 5775394 - DNA, 25 bp, Homo sapien
cagccattcttcattcacctttgat

SEQ ID NO: 5775395 - DNA, 25 bp, Homo sapien
attgctgtcccgaggccgatagctc

SEQ ID NO: 5775396 - DNA, 25 bp, Homo sapien
ttgggttcatctggaaagccttggt

SEQ ID NO: 5775397 - DNA, 25 bp, Homo sapien
cagaagggtgctaaatcttacaaac

SEQ ID NO: 5775398 - DNA, 25 bp, Homo sapien
gagctgccaggagacagagagaaga

SEQ ID NO: 5775399 - DNA, 25 bp, Homo sapien
cttccagacacactccatcgccttg

SEQ ID NO: 5775400 - DNA, 25 bp, Homo sapien
ttcttcaggatagtgtacatgcagc

SEQ ID NO: 5775401 - DNA, 25 bp, Homo sapien
cacactccatcgccttgtcgatttt

SEQ ID NO: 5775402 - DNA, 25 bp, Homo sapien
cccccaaggtgttcactttctgggc

SEQ ID NO: 5775403 - DNA, 25 bp, Homo sapien
ggctcagctgcctgtggttgcagag

SEQ ID NO: 5775404 - DNA, 25 bp, Homo sapien
gggaataaatagttaacacttccaa

SEQ ID NO: 5775405 - DNA, 25 bp, Homo sapien
ctagcactcagagcaagaaacagga

SEQ ID NO: 5775406 - DNA, 25 bp, Homo sapien
gttattagcatcagctttttcactt

SEQ ID NO: 5775407 - DNA, 25 bp, Homo sapien
cagaggggcaaacccagagaaactg

SEQ ID NO: 5775408 - DNA, 25 bp, Homo sapien
catgtcccggacctggctgtagggg

SEQ ID NO: 5775409 - DNA, 25 bp, Homo sapien
gtttgtgaaacatcctagacttctc

SEQ ID NO: 5775410 - DNA, 25 bp, Homo sapien
gctttgtagtttgtgaaacatccta

SEQ ID NO: 5775411 - DNA, 25 bp, Homo sapien
tgggatgtcggactgcggagagctt

SEQ ID NO: 5775412 - DNA, 25 bp, Homo sapien
tgtacagcttgatgaatgtttacag

SEQ ID NO: 5775413 - DNA, 25 bp, Homo sapien
tgcaccttgagtgtgtagggcatgg

SEQ ID NO: 5775414 - DNA, 25 bp, Homo sapien
gaataaatagttaacacttccaaac

SEQ ID NO: 5775415 - DNA, 25 bp, Homo sapien
ttctcagtgttgcaaatgcatcagg

SEQ ID NO: 5775416 - DNA, 25 bp, Homo sapien
tgactcataaccctaccatgagaga

SEQ ID NO: 5775417 - DNA, 25 bp, Homo sapien
ctttttcactttccttgggttcatc

SEQ ID NO: 5775418 - DNA, 25 bp, Homo sapien
ctcaactggttcaaggtagttgcag

SEQ ID NO: 5775419 - DNA, 25 bp, Homo sapien
agctcagcttagtttgttccagccg

SEQ ID NO: 5775420 - DNA, 25 bp, Homo sapien
tgattaggtagaaactaggaggcca

SEQ ID NO: 5775421 - DNA, 25 bp, Homo sapien
tgaatgtttacagtgtgaacacagc

SEQ ID NO: 5775422 - DNA, 25 bp, Homo sapien
ctgaaactccaggtcctctggttgg

SEQ ID NO: 5775423 - DNA, 25 bp, Homo sapien
ccttgcctaggtaatccttcttggc

SEQ ID NO: 5775424 - DNA, 25 bp, Homo sapien
gcccagcctcccttaagataacttc

SEQ ID NO: 5775425 - DNA, 25 bp, Homo sapien
ggtagcctcataactgaagagtgcc

SEQ ID NO: 5775426 - DNA, 25 bp, Homo sapien
atgctaactgttcttcagctttttt

SEQ ID NO: 5775427 - DNA, 25 bp, Homo sapien
taggtagaaactaggaggccaagag

SEQ ID NO: 5775428 - DNA, 25 bp, Homo sapien
ctgggctcagacttcatgctcgtgg

SEQ ID NO: 5775429 - DNA, 25 bp, Homo sapien
agaatggggcccagcctcccttaag

SEQ ID NO: 5775430 - DNA, 25 bp, Homo sapien
ccctttccagacacttccatccact

SEQ ID NO: 5775431 - DNA, 25 bp, Homo sapien
tggttattagcatcagctttttcac

SEQ ID NO: 5775432 - DNA, 25 bp, Homo sapien
ctgcttcagtcatgttcttcaggat

SEQ ID NO: 5775433 - DNA, 25 bp, Homo sapien
ctgagggtggatccgcagctcaact

SEQ ID NO: 5775434 - DNA, 25 bp, Homo sapien
agccccaggatcttatagtctatca

SEQ ID NO: 5775435 - DNA, 25 bp, Homo sapien
aggaaatgtccccaccttttggcaa

SEQ ID NO: 5775436 - DNA, 25 bp, Homo sapien
tggttgggtagcctcataactgaag

SEQ ID NO: 5775437 - DNA, 25 bp, Homo sapien
cagagccctgaagatctctggggtt

SEQ ID NO: 5775438 - DNA, 25 bp, Homo sapien
catcctgggtactcacatcattgtc

SEQ ID NO: 5775439 - DNA, 25 bp, Homo sapien
ctgtcttgatccaccacagatgcca

SEQ ID NO: 5775440 - DNA, 25 bp, Homo sapien
ttggccagctgagccacttgtctct

SEQ ID NO: 5775441 - DNA, 25 bp, Homo sapien
ccatcgccttgtcgattttggaatg

SEQ ID NO: 5775442 - DNA, 25 bp, Homo sapien
atataacacctcacaggcaaacagc

SEQ ID NO: 5775443 - DNA, 25 bp, Homo sapien
ccagcctcccttaagataacttctc

SEQ ID NO: 5775444 - DNA, 25 bp, Homo sapien
gcttcagtcatgttcttcaggatag

SEQ ID NO: 5775445 - DNA, 25 bp, Homo sapien
ttatcattgcccttcttcaagacaa

SEQ ID NO: 5775446 - DNA, 25 bp, Homo sapien
gcctaggtaatccttcttggccagc

SEQ ID NO: 5775447 - DNA, 25 bp, Homo sapien
cttccaaactgtaatgtctcagtac

SEQ ID NO: 5775448 - DNA, 25 bp, Homo sapien
tagcagggctgccttagtggccccc

SEQ ID NO: 5775449 - DNA, 25 bp, Homo sapien
gcttgtctcggttaatgcttctggt

SEQ ID NO: 5775450 - DNA, 25 bp, Homo sapien
tagccaaatcatatttctctgtctg

SEQ ID NO: 5775451 - DNA, 25 bp, Homo sapien
gagcaagaaacaggatcagtacctg

SEQ ID NO: 5775452 - DNA, 25 bp, Homo sapien
gggctcccttccagtccttcttgtc

SEQ ID NO: 5775453 - DNA, 25 bp, Homo sapien
tctctggggttttcggtctgggtgg

SEQ ID NO: 5775454 - DNA, 25 bp, Homo sapien
ccctaccatgagagagaaaaggaaa

SEQ ID NO: 5775455 - DNA, 25 bp, Homo sapien
gtcggactgcggagagctttcctcc

SEQ ID NO: 5775456 - DNA, 25 bp, Homo sapien
ggcttctttaaggtctttgatagcc

SEQ ID NO: 5775457 - DNA, 25 bp, Homo sapien
caaatctgtagttgcgcagtcttca

SEQ ID NO: 5775458 - DNA, 25 bp, Homo sapien
tatcagctggttccctcgaagctga

SEQ ID NO: 5775459 - DNA, 25 bp, Homo sapien
gtgttgcaaatgcatcaggaaatgt

SEQ ID NO: 5775460 - DNA, 25 bp, Homo sapien
cacagatgccacgaccgttgccttg

SEQ ID NO: 5775461 - DNA, 25 bp, Homo sapien
gtgaaacatcctagacttctctccg

SEQ ID NO: 5775462 - DNA, 25 bp, Homo sapien
tatgacacagaaaagtgcaccaaat

SEQ ID NO: 5775463 - DNA, 25 bp, Homo sapien
cactccatcgccttgtcgattttgg

SEQ ID NO: 5775464 - DNA, 25 bp, Homo sapien
ctctcgtgccctttccagacacttc

SEQ ID NO: 5775465 - DNA, 25 bp, Homo sapien
aggggcaccagctcattgctgtccc

SEQ ID NO: 5775466 - DNA, 25 bp, Homo sapien
ccttcatgctgtcttctgaaagggg

SEQ ID NO: 5775467 - DNA, 25 bp, Homo sapien
gtagaatggggcccagcctccctta

SEQ ID NO: 5775468 - DNA, 25 bp, Homo sapien
tcctcacccactgtgccccaggaaa

SEQ ID NO: 5775469 - DNA, 25 bp, Homo sapien
tttggaatgtctgggctcagacttc

SEQ ID NO: 5775470 - DNA, 25 bp, Homo sapien
ctgtcttctgaaaggggcaccagct

SEQ ID NO: 5775471 - DNA, 25 bp, Homo sapien
caaatccgggagtgggggtcctgga

SEQ ID NO: 5775472 - DNA, 25 bp, Homo sapien
cagtacctggaagactctctcgtgc

SEQ ID NO: 5775473 - DNA, 25 bp, Homo sapien
actcacatcattgtctagtaggtta

SEQ ID NO: 5775474 - DNA, 25 bp, Homo sapien
ctttccagacacttccatccacttt

SEQ ID NO: 5775475 - DNA, 25 bp, Homo sapien
acagcttgaactggagccccaggat

SEQ ID NO: 5775476 - DNA, 25 bp, Homo sapien
ggctgctgctgagggtggatccgca

SEQ ID NO: 5775477 - DNA, 25 bp, Homo sapien
agaaaagtgcaccaaatgtacagct

SEQ ID NO: 5775478 - DNA, 25 bp, Homo sapien
gagtgtgtagggcatgggaacactg

SEQ ID NO: 5775479 - DNA, 25 bp, Homo sapien
aggaggccaagagagctgccaggag

SEQ ID NO: 5775480 - DNA, 25 bp, Homo sapien
cagctcattgctgtcccgaggccga

SEQ ID NO: 5775481 - DNA, 25 bp, Homo sapien
gtacatgcagccaatgttgaagcaa

SEQ ID NO: 5775482 - DNA, 25 bp, Homo sapien
gggttttcggtctgggtggaggctc

SEQ ID NO: 5775483 - DNA, 25 bp, Homo sapien
tgacacagaaaagtgcaccaaatgt

SEQ ID NO: 5775484 - DNA, 25 bp, Homo sapien
gtcttctgaaaggggcaccagctca

SEQ ID NO: 5775485 - DNA, 25 bp, Homo sapien
aggcagtagtttttcacctggcccc

SEQ ID NO: 5775486 - DNA, 25 bp, Homo sapien
ccagccggagctccagtttcttaga

SEQ ID NO: 5775487 - DNA, 25 bp, Homo sapien
acagctggctagctagcactcagag

SEQ ID NO: 5775488 - DNA, 25 bp, Homo sapien
atccaccacagatgccacgaccgtt

SEQ ID NO: 5775489 - DNA, 25 bp, Homo sapien
aatgttgaagcaaatccgggagtgg

SEQ ID NO: 5775490 - DNA, 25 bp, Homo sapien
ctaccatgagagagaaaaggaaaga

SEQ ID NO: 5775491 - DNA, 25 bp, Homo sapien
tcagctggttccctcgaagctgaat

SEQ ID NO: 5775492 - DNA, 25 bp, Homo sapien
ctggccccaggcatccttcatgctg

SEQ ID NO: 5775493 - DNA, 25 bp, Homo sapien
tgataacaccaggattatatcccct

SEQ ID NO: 5775494 - DNA, 25 bp, Homo sapien
tggttgcagaggggcaaacccagag

SEQ ID NO: 5775495 - DNA, 25 bp, Homo sapien
agtaatagggcttcattttcttcag

SEQ ID NO: 5775496 - DNA, 25 bp, Homo sapien
ggcatccagggctcccttccagtcc

SEQ ID NO: 5775497 - DNA, 25 bp, Homo sapien
gcagggctgccttagtggcccccaa

SEQ ID NO: 5775498 - DNA, 25 bp, Homo sapien
tgtgttctcacaccacagagtcagg

SEQ ID NO: 5775499 - DNA, 25 bp, Homo sapien
ccagtttcttagacaccatgtcccg

SEQ ID NO: 5775500 - DNA, 25 bp, Homo sapien
cctggagctcttcttttgtctcagg

SEQ ID NO: 5775501 - DNA, 25 bp, Homo sapien
ggctgcctttcttaagctgaggttc

SEQ ID NO: 5775502 - DNA, 25 bp, Homo sapien
cattcacctttgataacaccaggat

SEQ ID NO: 5775503 - DNA, 25 bp, Homo sapien
accatgagagagaaaaggaaagaag

SEQ ID NO: 5775504 - DNA, 25 bp, Homo sapien
ctttcctcctggggctgctgctgag

SEQ ID NO: 5775505 - DNA, 25 bp, Homo sapien
agttaacacttccaaactgtaatgt

SEQ ID NO: 5775506 - DNA, 25 bp, Homo sapien
cattgcccttcttcaagacaaagac

SEQ ID NO: 5775507 - DNA, 25 bp, Homo sapien
aacccagagaaactgtcttgatcca

SEQ ID NO: 5775508 - DNA, 25 bp, Homo sapien
caaggtgttcactttctgggccaga

SEQ ID NO: 5775509 - DNA, 25 bp, Homo sapien
tttcttcagctttgtagtttgtgaa

SEQ ID NO: 5775510 - DNA, 25 bp, Homo sapien
ccaggagacagagagaagacaggtt

SEQ ID NO: 5775511 - DNA, 25 bp, Homo sapien
gttgcgcagtcttcaacaaaaactt

SEQ ID NO: 5775512 - DNA, 25 bp, Homo sapien
acagagtcaggcagtagtttttcac

SEQ ID NO: 5775513 - DNA, 25 bp, Homo sapien
tgcttccagacacactccatcgcct

SEQ ID NO: 5775514 - DNA, 25 bp, Homo sapien
gcatgacctggagctcttcttttgt

SEQ ID NO: 5775515 - DNA, 25 bp, Homo sapien
aggtgttcactttctgggccagatg

SEQ ID NO: 5775516 - DNA, 25 bp, Homo sapien
ccttccagtccttcttgtccgctgc

SEQ ID NO: 5775517 - DNA, 25 bp, Homo sapien
cctttgataacaccaggattatatc

SEQ ID NO: 5775518 - DNA, 25 bp, Homo sapien
ccaggatcttatagtctatcagctg

SEQ ID NO: 5775519 - DNA, 25 bp, Homo sapien
tgttgaagcaaatccgggagtgggg

SEQ ID NO: 5775520 - DNA, 25 bp, Homo sapien
ccgagtgctttccaaatctgtagtt

SEQ ID NO: 5775521 - DNA, 25 bp, Homo sapien
tcttccaggggctttggaactagga

SEQ ID NO: 5775522 - DNA, 25 bp, Homo sapien
tgtctggttattagcatcagctttt

SEQ ID NO: 5775523 - DNA, 25 bp, Homo sapien
ctgagcttcacttccttaggctctt

SEQ ID NO: 5775524 - DNA, 25 bp, Homo sapien
ttttgtggtatgacacagaaaagtg

SEQ ID NO: 5775525 - DNA, 25 bp, Homo sapien
caccttttggcaactgactcataac

SEQ ID NO: 5775526 - DNA, 25 bp, Homo sapien
agctgaggttctgttgtctggttat

SEQ ID NO: 5775527 - DNA, 25 bp, Homo sapien
tgtagtttgtgaaacatcctagact

SEQ ID NO: 5775528 - DNA, 25 bp, Homo sapien
gcctccaccagggacatgattaggt

SEQ ID NO: 5775529 - DNA, 25 bp, Homo sapien
agggctgccttagtggcccccaagg

SEQ ID NO: 5775530 - DNA, 25 bp, Homo sapien
agctgagccacttgtctctcatttg

SEQ ID NO: 5775531 - DNA, 25 bp, Homo sapien
gaagacaggttggagcgtctcccct

SEQ ID NO: 5775532 - DNA, 25 bp, Homo sapien
ggtagtagagcatccctcgttggaa

SEQ ID NO: 5775533 - DNA, 25 bp, Homo sapien
cacaccacagagtcaggcagtagtt

SEQ ID NO: 5775534 - DNA, 25 bp, Homo sapien
actgactcataaccctaccatgaga

SEQ ID NO: 5775535 - DNA, 25 bp, Homo sapien
ttgtccgctgccagcaccccttcat

SEQ ID NO: 5775536 - DNA, 25 bp, Homo sapien
aatgcatcaggaaatgtccccacct

SEQ ID NO: 5775537 - DNA, 25 bp, Homo sapien
gtcttgatccaccacagatgccacg

SEQ ID NO: 5775538 - DNA, 25 bp, Homo sapien
gttccctggcatgacctggagctct

SEQ ID NO: 5775539 - DNA, 25 bp, Homo sapien
gttggagcgtctcccctagcagggc

SEQ ID NO: 5775540 - DNA, 25 bp, Homo sapien
tctgcttccagacacactccatcgc

SEQ ID NO: 5775541 - DNA, 25 bp, Homo sapien
gaggggcaaacccagagaaactgtc

SEQ ID NO: 5775542 - DNA, 25 bp, Homo sapien
ctcagagcaagaaacaggatcagta

SEQ ID NO: 5775543 - DNA, 25 bp, Homo sapien
ccgctgccagcaccccttcattcca

SEQ ID NO: 5775544 - DNA, 25 bp, Homo sapien
aatcaaggcttctttaaggtctttg

SEQ ID NO: 5775545 - DNA, 25 bp, Homo sapien
aacaagtaatagggcttcattttct

SEQ ID NO: 5775546 - DNA, 25 bp, Homo sapien
cagagcaagaaacaggatcagtacc

SEQ ID NO: 5775547 - DNA, 25 bp, Homo sapien
agacaggttggagcgtctcccctag

SEQ ID NO: 5775548 - DNA, 25 bp, Homo sapien
tctcagtacagtatacagcagaagg

SEQ ID NO: 5775549 - DNA, 25 bp, Homo sapien
cttgatccaccacagatgccacgac

SEQ ID NO: 5775550 - DNA, 25 bp, Homo sapien
tacagtatacagcagaagggtgcta

SEQ ID NO: 5775551 - DNA, 25 bp, Homo sapien
ctggttccctcgaagctgaatcaag

SEQ ID NO: 5775552 - DNA, 25 bp, Homo sapien
gcccgttgaacatgaccgtggccca

SEQ ID NO: 5775553 - DNA, 25 bp, Homo sapien
tggcatgacctggagctcttctttt

SEQ ID NO: 5775554 - DNA, 25 bp, Homo sapien
ccttcttcaagacaaagacaatgtt

SEQ ID NO: 5775555 - DNA, 25 bp, Homo sapien
acaggcaaacagcttgaactggagc

SEQ ID NO: 5775556 - DNA, 25 bp, Homo sapien
tccccaccttttggcaactgactca

SEQ ID NO: 5775557 - DNA, 25 bp, Homo sapien
atgcccaccttccctttgcactccc

SEQ ID NO: 5775558 - DNA, 25 bp, Homo sapien
tccctggcatgacctggagctcttc

SEQ ID NO: 5775559 - DNA, 25 bp, Homo sapien
cactgagcttcacttccttaggctc

SEQ ID NO: 5775560 - DNA, 25 bp, Homo sapien
ctcataactgaagagtgcctccact

SEQ ID NO: 5775561 - DNA, 25 bp, Homo sapien
atagttaacacttccaaactgtaat

SEQ ID NO: 5775562 - DNA, 25 bp, Homo sapien
ttcttttgtctcaggcacaaaccca

SEQ ID NO: 5775563 - DNA, 25 bp, Homo sapien
ccaagagagctgccaggagacagag

SEQ ID NO: 5775564 - DNA, 25 bp, Homo sapien
tcaggaaatgtccccaccttttggc

SEQ ID NO: 5775565 - DNA, 25 bp, Homo sapien
ggcaaacccagagaaactgtcttga

SEQ ID NO: 5775566 - DNA, 25 bp, Homo sapien
tgcagaggggcaaacccagagaaac

SEQ ID NO: 5775567 - DNA, 25 bp, Homo sapien
gttcaaggtagttgcagggaacaag

SEQ ID NO: 5775568 - DNA, 25 bp, Homo sapien
atgcagccaatgttgaagcaaatcc

SEQ ID NO: 5775569 - DNA, 25 bp, Homo sapien
caaacccagagaaactgtcttgatc

SEQ ID NO: 5775570 - DNA, 25 bp, Homo sapien
gactgcggagagctttcctcctggg

SEQ ID NO: 5775571 - DNA, 25 bp, Homo sapien
aacatgaccgtggcccagttatcat

SEQ ID NO: 5775572 - DNA, 25 bp, Homo sapien
ggctgtaggggagcccgggctgagt

SEQ ID NO: 5775573 - DNA, 25 bp, Homo sapien
atcattgcccttcttcaagacaaag

SEQ ID NO: 5775574 - DNA, 25 bp, Homo sapien
acagaaaagtgcaccaaatgtacag

SEQ ID NO: 5775575 - DNA, 25 bp, Homo sapien
agtttcttagacaccatgtcccgga

SEQ ID NO: 5775576 - DNA, 25 bp, Homo sapien
gcttagtttgttccagccggagctc

SEQ ID NO: 5775577 - DNA, 25 bp, Homo sapien
gttcttcagcttttttccattcctc

SEQ ID NO: 5775578 - DNA, 25 bp, Homo sapien
tcattccagaggctgatggcctcca

SEQ ID NO: 5775579 - DNA, 25 bp, Homo sapien
caggatcagtacctggaagactctc

SEQ ID NO: 5775580 - DNA, 25 bp, Homo sapien
gtcctggacggcactgaaggcatcc

SEQ ID NO: 5775581 - DNA, 25 bp, Homo sapien
gcaaacagcttgaactggagcccca

SEQ ID NO: 5775582 - DNA, 25 bp, Homo sapien
catgttcttcaggatagtgtacatg

SEQ ID NO: 5775583 - DNA, 25 bp, Homo sapien
ttgtcgattttggaatgtctgggct

SEQ ID NO: 5775584 - DNA, 25 bp, Homo sapien
tctgggccagatgagtagaatgggg

SEQ ID NO: 5775585 - DNA, 25 bp, Homo sapien
ctggagccccaggatcttatagtct

SEQ ID NO: 5775586 - DNA, 25 bp, Homo sapien
ttccttgggttcatctggaaagcct

SEQ ID NO: 5775587 - DNA, 25 bp, Homo sapien
ccccaggatcttatagtctatcagc

SEQ ID NO: 5775588 - DNA, 25 bp, Homo sapien
ttttccattcctccttcttggcata

SEQ ID NO: 5775589 - DNA, 25 bp, Homo sapien
tcctagacttctctccgagtgcttt

SEQ ID NO: 5775590 - DNA, 25 bp, Homo sapien
ccagtccttcttgtccgctgccagc

SEQ ID NO: 5775591 - DNA, 25 bp, Homo sapien
ttctttttgtttctggcctggtgac

SEQ ID NO: 5775592 - DNA, 25 bp, Homo sapien
agagagaaaaggaaagaagcagaga

SEQ ID NO: 5775593 - DNA, 25 bp, Homo sapien
tggagctcttcttttgtctcaggca

SEQ ID NO: 5775594 - DNA, 25 bp, Homo sapien
ctttgatagccaaatcatatttctc

SEQ ID NO: 5775595 - DNA, 25 bp, Homo sapien
ctgctgctgagggtggatccgcagc

SEQ ID NO: 5775596 - DNA, 25 bp, Homo sapien
tcacaggcaaacagcttgaactgga

SEQ ID NO: 5775597 - DNA, 25 bp, Homo sapien
cctcgttggaagtaagccactgcca

SEQ ID NO: 5775598 - DNA, 25 bp, Homo sapien
acctggctgtaggggagcccgggct

SEQ ID NO: 5775599 - DNA, 25 bp, Homo sapien
taactgaagagtgcctccacttggc

SEQ ID NO: 5775600 - DNA, 25 bp, Homo sapien
gggttcatctggaaagccttggtca

SEQ ID NO: 5775601 - DNA, 25 bp, Homo sapien
tcaaggcttctttaaggtctttgat

SEQ ID NO: 5775602 - DNA, 25 bp, Homo sapien
cagctgcctgtggttgcagaggggc

SEQ ID NO: 5775603 - DNA, 25 bp, Homo sapien
tcaacaaaaactttggggaaaatgc

SEQ ID NO: 5775604 - DNA, 25 bp, Homo sapien
cttctttaaggtctttgatagccaa

SEQ ID NO: 5775605 - DNA, 25 bp, Homo sapien
ccttaagataacttctcagtgttgc

SEQ ID NO: 5775606 - DNA, 25 bp, Homo sapien
cttgaactggagccccaggatctta

SEQ ID NO: 5775607 - DNA, 25 bp, Homo sapien
aaacagcttgaactggagccccagg

SEQ ID NO: 5775608 - DNA, 25 bp, Homo sapien
tggaggctcagctgcctgtggttgc

SEQ ID NO: 5775609 - DNA, 25 bp, Homo sapien
ctctgcttcagtcatgttcttcagg

SEQ ID NO: 5775610 - DNA, 25 bp, Homo sapien
gaagcaaatccgggagtgggggtcc

SEQ ID NO: 5775611 - DNA, 25 bp, Homo sapien
cacctcacaggcaaacagcttgaac

SEQ ID NO: 5775612 - DNA, 25 bp, Homo sapien
gccacttgtctctcatttggtcgaa

SEQ ID NO: 5775613 - DNA, 25 bp, Homo sapien
ccaagtgcttgtctcggttaatgct

SEQ ID NO: 5775614 - DNA, 25 bp, Homo sapien
taacttctcagtgttgcaaatgcat

SEQ ID NO: 5775615 - DNA, 25 bp, Homo sapien
ttttttttttgtggtatgacacaga

SEQ ID NO: 5775616 - DNA, 25 bp, Homo sapien
aaggcttctttaaggtctttgatag

SEQ ID NO: 5775617 - DNA, 25 bp, Homo sapien
gaccgttgccttgcctaggtaatcc

SEQ ID NO: 5775618 - DNA, 25 bp, Homo sapien
tttggaactaggaggagctgggatg

SEQ ID NO: 5775619 - DNA, 25 bp, Homo sapien
gaaactccaggtcctctggttgggt

SEQ ID NO: 5775620 - DNA, 25 bp, Homo sapien
caaatgtacagcttgatgaatgttt

SEQ ID NO: 5775621 - DNA, 25 bp, Homo sapien
caaatcatatttctctgtctggtag

SEQ ID NO: 5775622 - DNA, 25 bp, Homo sapien
ggcttcattttcttcagctttgtag

SEQ ID NO: 5775623 - DNA, 25 bp, Homo sapien
ttgcccttcttcaagacaaagacaa

SEQ ID NO: 5775624 - DNA, 25 bp, Homo sapien
tgttctcacaccacagagtcaggca

SEQ ID NO: 5775625 - DNA, 25 bp, Homo sapien
gaggctcagctgcctgtggttgcag

SEQ ID NO: 5775626 - DNA, 25 bp, Homo sapien
gtcgattttggaatgtctgggctca

SEQ ID NO: 5775627 - DNA, 25 bp, Homo sapien
catcagctttttcactttccttggg

SEQ ID NO: 5775628 - DNA, 25 bp, Homo sapien
gttgaacatgaccgtggcccagtta

SEQ ID NO: 5775629 - DNA, 25 bp, Homo sapien
agtcaggcagtagtttttcacctgg

SEQ ID NO: 5775630 - DNA, 25 bp, Homo sapien
gttcactttctgggccagatgagta

SEQ ID NO: 5775631 - DNA, 25 bp, Homo sapien
acccactgtgttctcacaccacaga

SEQ ID NO: 5775632 - DNA, 25 bp, Homo sapien
gcatccttcatgctgtcttctgaaa

SEQ ID NO: 5775633 - DNA, 25 bp, Homo sapien
tgaaggcatccagggctcccttcca

SEQ ID NO: 5775634 - DNA, 25 bp, Homo sapien
cccaaggtgttcactttctgggcca

SEQ ID NO: 5775635 - DNA, 25 bp, Homo sapien
cttaagctgaggttctgttgtctgg

SEQ ID NO: 5775636 - DNA, 25 bp, Homo sapien
gccttagtggcccccaaggtgttca

SEQ ID NO: 5775637 - DNA, 25 bp, Homo sapien
cagcctgcccacagggatcaccact

SEQ ID NO: 5775638 - DNA, 25 bp, Homo sapien
ccttgagtgtgtagggcatgggaac

SEQ ID NO: 5775639 - DNA, 25 bp, Homo sapien
tccccttccagagccctgaagatct

SEQ ID NO: 5775640 - DNA, 25 bp, Homo sapien
cagggctcccttccagtccttcttg

SEQ ID NO: 5775641 - DNA, 25 bp, Homo sapien
gttgggtagcctcataactgaagag

SEQ ID NO: 5775642 - DNA, 25 bp, Homo sapien
gtaatgtctcagtacagtatacagc

SEQ ID NO: 5775643 - DNA, 25 bp, Homo sapien
ggccaagagagctgccaggagacag

SEQ ID NO: 5775644 - DNA, 25 bp, Homo sapien
gtgagcctccccttccagagccctg

SEQ ID NO: 5775645 - DNA, 25 bp, Homo sapien
aggtaatccttcttggccagctgag

SEQ ID NO: 5775646 - DNA, 25 bp, Homo sapien
ggtagttgcagggaacaagcccctt

SEQ ID NO: 5775647 - DNA, 25 bp, Homo sapien
gcagtagtttttcacctggccccag

SEQ ID NO: 5775648 - DNA, 25 bp, Homo sapien
cgcagtcttcaacaaaaactttggg

SEQ ID NO: 5775649 - DNA, 25 bp, Homo sapien
taccgtgtacttgtagtgcaccttg

SEQ ID NO: 5775650 - DNA, 25 bp, Homo sapien
gcatacatgaaagcaatgttatata

SEQ ID NO: 5775651 - DNA, 25 bp, Homo sapien
gtccgctgccagcaccccttcattc

SEQ ID NO: 5775652 - DNA, 25 bp, Homo sapien
gctcccttccagtccttcttgtccg

SEQ ID NO: 5775653 - DNA, 25 bp, Homo sapien
tcataaccctaccatgagagagaaa

SEQ ID NO: 5775654 - DNA, 25 bp, Homo sapien
gggaaaatgcccaccttccctttgc

SEQ ID NO: 5775655 - DNA, 25 bp, Homo sapien
ctgcggagagctttcctcctggggc

SEQ ID NO: 5775656 - DNA, 25 bp, Homo sapien
agctggctagctagcactcagagca

SEQ ID NO: 5775657 - DNA, 25 bp, Homo sapien
cactgtgccccaggaaatcatcctg

SEQ ID NO: 5775658 - DNA, 25 bp, Homo sapien
cgccttgtcgattttggaatgtctg

SEQ ID NO: 5775659 - DNA, 25 bp, Homo sapien
ccttttggcaactgactcataaccc

SEQ ID NO: 5775660 - DNA, 25 bp, Homo sapien
agatgagtagaatggggcccagcct

SEQ ID NO: 5775661 - DNA, 25 bp, Homo sapien
aggcaggctgggagcatggaggaca

SEQ ID NO: 5775662 - DNA, 25 bp, Homo sapien
gccagagttgatgagcagatctgtg

SEQ ID NO: 5775663 - DNA, 25 bp, Homo sapien
tggaggacagcttatggaaaaagtt

SEQ ID NO: 5775664 - DNA, 25 bp, Homo sapien
actttctgctttcatcttcgtatct

SEQ ID NO: 5775665 - DNA, 25 bp, Homo sapien
ccatcatcctctccccagccatgca

SEQ ID NO: 5775666 - DNA, 25 bp, Homo sapien
ctgtggaagaacaatccagggctga

SEQ ID NO: 5775667 - DNA, 25 bp, Homo sapien
ttgaaagggtatggcaagagagtgg

SEQ ID NO: 5775668 - DNA, 25 bp, Homo sapien
gcagacacaaccactggattcctgt

SEQ ID NO: 5775669 - DNA, 25 bp, Homo sapien
ctgctgccctcttcacgctctacaa

SEQ ID NO: 5775670 - DNA, 25 bp, Homo sapien
aaacatggacatacttgttcagatc

SEQ ID NO: 5775671 - DNA, 25 bp, Homo sapien
ccatagtggaagctgtggtcacttt

SEQ ID NO: 5775672 - DNA, 25 bp, Homo sapien
ggagactgacaagcttaaaaccaga

SEQ ID NO: 5775673 - DNA, 25 bp, Homo sapien
cagagccattgtgtggctggctggc

SEQ ID NO: 5775674 - DNA, 25 bp, Homo sapien
cagcattgtcaccaacatggacaag

SEQ ID NO: 5775675 - DNA, 25 bp, Homo sapien
ctggagatctgtgctgagcagcgaa

SEQ ID NO: 5775676 - DNA, 25 bp, Homo sapien
gaggaatataaggtggcctgcctgc

SEQ ID NO: 5775677 - DNA, 25 bp, Homo sapien
agcttatggaaaaagttagggcgtg

SEQ ID NO: 5775678 - DNA, 25 bp, Homo sapien
attgcaaacagtggccagtttcatt

SEQ ID NO: 5775679 - DNA, 25 bp, Homo sapien
gatacagcaataccaccttcagtac

SEQ ID NO: 5775680 - DNA, 25 bp, Homo sapien
tgagtatctttgagctggcatctgc

SEQ ID NO: 5775681 - DNA, 25 bp, Homo sapien
agctgaagaagctggtggtggaaaa

SEQ ID NO: 5775682 - DNA, 25 bp, Homo sapien
tctgcacctgcatgagaaccctgac

SEQ ID NO: 5775683 - DNA, 25 bp, Homo sapien
tcctgcttcgaaatgcctatcggga

SEQ ID NO: 5775684 - DNA, 25 bp, Homo sapien
tggttacaacaacaatattcattgc

SEQ ID NO: 5775685 - DNA, 25 bp, Homo sapien
aatataaggtggcctgcctgctctt

SEQ ID NO: 5775686 - DNA, 25 bp, Homo sapien
aagccggacttgatggcttccctgc

SEQ ID NO: 5775687 - DNA, 25 bp, Homo sapien
ggaagaaccgcagcattgtcaccaa

SEQ ID NO: 5775688 - DNA, 25 bp, Homo sapien
tggctgatgaaccgggactactggg

SEQ ID NO: 5775689 - DNA, 25 bp, Homo sapien
agtatcctctcctctctgaatctca

SEQ ID NO: 5775690 - DNA, 25 bp, Homo sapien
cagacatcaaggtgaccttgagtat

SEQ ID NO: 5775691 - DNA, 25 bp, Homo sapien
tgcttagacaggcaagcagtgggac

SEQ ID NO: 5775692 - DNA, 25 bp, Homo sapien
tgccagtacccactgaagagccctt

SEQ ID NO: 5775693 - DNA, 25 bp, Homo sapien
aggccttcgtcagcctgcccagaga

SEQ ID NO: 5775694 - DNA, 25 bp, Homo sapien
agggccatggcccaagagggacttc

SEQ ID NO: 5775695 - DNA, 25 bp, Homo sapien
aatttgaattctcaggattgaggct

SEQ ID NO: 5775696 - DNA, 25 bp, Homo sapien
atgaggtcacctggctggttcgcca

SEQ ID NO: 5775697 - DNA, 25 bp, Homo sapien
gtggctggctggctacaatgccacg

SEQ ID NO: 5775698 - DNA, 25 bp, Homo sapien
ctggagtcctgtttcccttatgtcc

SEQ ID NO: 5775699 - DNA, 25 bp, Homo sapien
aaccagaaatcgagaatccatttct

SEQ ID NO: 5775700 - DNA, 25 bp, Homo sapien
gaggggattaggtctctggtccgaa

SEQ ID NO: 5775701 - DNA, 25 bp, Homo sapien
aaagacacctgaggactatgctgac

SEQ ID NO: 5775702 - DNA, 25 bp, Homo sapien
tgcactcatgagatgtgcccagagg

SEQ ID NO: 5775703 - DNA, 25 bp, Homo sapien
ttcgtcagtatcctctcctctctga

SEQ ID NO: 5775704 - DNA, 25 bp, Homo sapien
gcaataccaccttcagtacttggca

SEQ ID NO: 5775705 - DNA, 25 bp, Homo sapien
aatccatttctctgctcatgcgctt

SEQ ID NO: 5775706 - DNA, 25 bp, Homo sapien
gcgtggctaaggcccctctgcacct

SEQ ID NO: 5775707 - DNA, 25 bp, Homo sapien
actcccgaatgctggactccgtaga

SEQ ID NO: 5775708 - DNA, 25 bp, Homo sapien
ccactgcactcatgagatgtgccca

SEQ ID NO: 5775709 - DNA, 25 bp, Homo sapien
acaaccactggattcctgtggggaa

SEQ ID NO: 5775710 - DNA, 25 bp, Homo sapien
aaggctctttttgctttcatggccc

SEQ ID NO: 5775711 - DNA, 25 bp, Homo sapien
gagccattgtgtggctggctggcta

SEQ ID NO: 5775712 - DNA, 25 bp, Homo sapien
atggtcttcaccactgcaactcctt

SEQ ID NO: 5775713 - DNA, 25 bp, Homo sapien
aggggagcagaacttcagtgcagag

SEQ ID NO: 5775714 - DNA, 25 bp, Homo sapien
tcaccaacatggacaagctacacct

SEQ ID NO: 5775715 - DNA, 25 bp, Homo sapien
gacaatgaatcatgtatacagtttc

SEQ ID NO: 5775716 - DNA, 25 bp, Homo sapien
cactttgtccactgcactcatgaga

SEQ ID NO: 5775717 - DNA, 25 bp, Homo sapien
ggccatggcccaagagggacttcgg

SEQ ID NO: 5775718 - DNA, 25 bp, Homo sapien
gcatgaccatcattggggttatcct

SEQ ID NO: 5775719 - DNA, 25 bp, Homo sapien
tggcagaactcctgggcccctatgg

SEQ ID NO: 5775720 - DNA, 25 bp, Homo sapien
tggagaaaaatttgaattctcagga

SEQ ID NO: 5775721 - DNA, 25 bp, Homo sapien
tcaacggcggcaatttctgcggatg

SEQ ID NO: 5775722 - DNA, 25 bp, Homo sapien
gtagaaaaattgctggtggaaactt

SEQ ID NO: 5775723 - DNA, 25 bp, Homo sapien
tgagcagcgaaacctgagcgagcag

SEQ ID NO: 5775724 - DNA, 25 bp, Homo sapien
agactcccagaaaaggagagcccga

SEQ ID NO: 5775725 - DNA, 25 bp, Homo sapien
ctgtggaagctgtgtctgcagggct

SEQ ID NO: 5775726 - DNA, 25 bp, Homo sapien
ttttatagcattgagaaggatggtt

SEQ ID NO: 5775727 - DNA, 25 bp, Homo sapien
ggagcatggaggacagcttatggaa

SEQ ID NO: 5775728 - DNA, 25 bp, Homo sapien
agccatgcaggccttcgtcagcctg

SEQ ID NO: 5775729 - DNA, 25 bp, Homo sapien
aaagccaagaacaagaaaaccagga

SEQ ID NO: 5775730 - DNA, 25 bp, Homo sapien
gccttggcagaactcctgggcccct

SEQ ID NO: 5775731 - DNA, 25 bp, Homo sapien
tgtcctcattcgtcagtatcctctc

SEQ ID NO: 5775732 - DNA, 25 bp, Homo sapien
aacgccctcctgcagcagacacaac

SEQ ID NO: 5775733 - DNA, 25 bp, Homo sapien
tctacaacaagaacattgaaactca

SEQ ID NO: 5775734 - DNA, 25 bp, Homo sapien
gaccatcattggggttatcctcagt

SEQ ID NO: 5775735 - DNA, 25 bp, Homo sapien
tgcacaaagtcaccgaggacctgtt

SEQ ID NO: 5775736 - DNA, 25 bp, Homo sapien
ctttcatcttcgtatctttgagaag

SEQ ID NO: 5775737 - DNA, 25 bp, Homo sapien
ggtgcacaaagtcaccgaggacctg

SEQ ID NO: 5775738 - DNA, 25 bp, Homo sapien
ggcaagcagtgggaccatcatcctc

SEQ ID NO: 5775739 - DNA, 25 bp, Homo sapien
cgagcagcttctacctaagcactgt

SEQ ID NO: 5775740 - DNA, 25 bp, Homo sapien
gacaggggctgaaaatgtgctaaag

SEQ ID NO: 5775741 - DNA, 25 bp, Homo sapien
agctggcatctgctgcaggtgtggg

SEQ ID NO: 5775742 - DNA, 25 bp, Homo sapien
ttgcagagctacttttcttgttgga

SEQ ID NO: 5775743 - DNA, 25 bp, Homo sapien
tacatcacccttatccgtgaggatg

SEQ ID NO: 5775744 - DNA, 25 bp, Homo sapien
tcatccaggtgtctgctgccctctt

SEQ ID NO: 5775745 - DNA, 25 bp, Homo sapien
tccctgctgccccagctgacagggg

SEQ ID NO: 5775746 - DNA, 25 bp, Homo sapien
tttgagaagatgtttgccatgacct

SEQ ID NO: 5775747 - DNA, 25 bp, Homo sapien
attgcgtcctggagatctgtgctga

SEQ ID NO: 5775748 - DNA, 25 bp, Homo sapien
tctctgaatctcaaacaagttgata

SEQ ID NO: 5775749 - DNA, 25 bp, Homo sapien
cttgacagaactggcactgacaatg

SEQ ID NO: 5775750 - DNA, 25 bp, Homo sapien
cctggaggccagactcaacagagcc

SEQ ID NO: 5775751 - DNA, 25 bp, Homo sapien
taaggtggcctgcctgctcttgatc

SEQ ID NO: 5775752 - DNA, 25 bp, Homo sapien
atccgtgaggatgtgctgcaggtgc

SEQ ID NO: 5775753 - DNA, 25 bp, Homo sapien
tgacccagccttggtggctgccatt

SEQ ID NO: 5775754 - DNA, 25 bp, Homo sapien
ggaggtgtctcgggccttccaccta

SEQ ID NO: 5775755 - DNA, 25 bp, Homo sapien
ccctgacttagccaaggtgatgaac

SEQ ID NO: 5775756 - DNA, 25 bp, Homo sapien
caagacaaagacacctgaggactat

SEQ ID NO: 5775757 - DNA, 25 bp, Homo sapien
gcgtggggccacatgtgtgaatttt

SEQ ID NO: 5775758 - DNA, 25 bp, Homo sapien
gcccagaggagtacccccacctcaa

SEQ ID NO: 5775759 - DNA, 25 bp, Homo sapien
acatacttgttcagatcagatccaa

SEQ ID NO: 5775760 - DNA, 25 bp, Homo sapien
tctgcagggctccctctacatcacc

SEQ ID NO: 5775761 - DNA, 25 bp, Homo sapien
agcagccacctggaggccagactca

SEQ ID NO: 5775762 - DNA, 25 bp, Homo sapien
tcgtcagcctgcccagagaagggga

SEQ ID NO: 5775763 - DNA, 25 bp, Homo sapien
accaacatggacaagctacacctaa

SEQ ID NO: 5775764 - DNA, 25 bp, Homo sapien
atttcttatgggtcccattgagtgc

SEQ ID NO: 5775765 - DNA, 25 bp, Homo sapien
aagcatacattggtttcatacagtc

SEQ ID NO: 5775766 - DNA, 25 bp, Homo sapien
aaggagagagggtcaggagccagag

SEQ ID NO: 5775767 - DNA, 25 bp, Homo sapien
agggtcaggagccagagttgatgag

SEQ ID NO: 5775768 - DNA, 25 bp, Homo sapien
ggggattaggtctctggtccgaaga

SEQ ID NO: 5775769 - DNA, 25 bp, Homo sapien
agacacaaccactggattcctgtgg

SEQ ID NO: 5775770 - DNA, 25 bp, Homo sapien
agaggcagactcccagaaaaggaga

SEQ ID NO: 5775771 - DNA, 25 bp, Homo sapien
tttcatggccctgtccttcattcgt

SEQ ID NO: 5775772 - DNA, 25 bp, Homo sapien
tagcaagccggacttgatggcttcc

SEQ ID NO: 5775773 - DNA, 25 bp, Homo sapien
ttctcaggattgaggctggactggt

SEQ ID NO: 5775774 - DNA, 25 bp, Homo sapien
agctgttggcaggagtcaaagcata

SEQ ID NO: 5775775 - DNA, 25 bp, Homo sapien
ctcaaggaatttctggtggtggcct

SEQ ID NO: 5775776 - DNA, 25 bp, Homo sapien
tgatgctcttgtgctcagtgacatc

SEQ ID NO: 5775777 - DNA, 25 bp, Homo sapien
gtcaccgaggacctgtttagcagtt

SEQ ID NO: 5775778 - DNA, 25 bp, Homo sapien
tggaaaacatggacatacttgttca

SEQ ID NO: 5775779 - DNA, 25 bp, Homo sapien
atctttctggcagtttccctcccac

SEQ ID NO: 5775780 - DNA, 25 bp, Homo sapien
agccttggtggctgccattgctaat

SEQ ID NO: 5775781 - DNA, 25 bp, Homo sapien
actccagacacagacatcaaggtga

SEQ ID NO: 5775782 - DNA, 25 bp, Homo sapien
aaatgtgctaaagcgcatgaccatc

SEQ ID NO: 5775783 - DNA, 25 bp, Homo sapien
tacttggcaagatttgatgctcttg

SEQ ID NO: 5775784 - DNA, 25 bp, Homo sapien
ttggtggctgccattgctaatctga

SEQ ID NO: 5775785 - DNA, 25 bp, Homo sapien
ctacacaaactggtacctggaaagt

SEQ ID NO: 5775786 - DNA, 25 bp, Homo sapien
acataaaggagagcaaggaacatgt

SEQ ID NO: 5775787 - DNA, 25 bp, Homo sapien
catgtatacagtttctccgtgtttg

SEQ ID NO: 5775788 - DNA, 25 bp, Homo sapien
caccactgcaactccttcctggaag

SEQ ID NO: 5775789 - DNA, 25 bp, Homo sapien
atcctcagtttcagggccatggccc

SEQ ID NO: 5775790 - DNA, 25 bp, Homo sapien
taaacccttgccatagtggaagctg

SEQ ID NO: 5775791 - DNA, 25 bp, Homo sapien
tctgctcatgcgcttggtggtggag

SEQ ID NO: 5775792 - DNA, 25 bp, Homo sapien
aagcagaggcagactcccagaaaag

SEQ ID NO: 5775793 - DNA, 25 bp, Homo sapien
ctctccccagccatgcaggccttcg

SEQ ID NO: 5775794 - DNA, 25 bp, Homo sapien
cgaaatgcctatcgggaggtgtctc

SEQ ID NO: 5775795 - DNA, 25 bp, Homo sapien
actggtacctggaaagtctgcttag

SEQ ID NO: 5775796 - DNA, 25 bp, Homo sapien
aggaggagtccatcatcatgtcctc

SEQ ID NO: 5775797 - DNA, 25 bp, Homo sapien
aggatggttacaacaacaatattca

SEQ ID NO: 5775798 - DNA, 25 bp, Homo sapien
acacaaccactggattcctgtgggg

SEQ ID NO: 5775799 - DNA, 25 bp, Homo sapien
tatctttgagaagatgtttgccatg

SEQ ID NO: 5775800 - DNA, 25 bp, Homo sapien
aaggaacatgtaattgcaaacagtg

SEQ ID NO: 5775801 - DNA, 25 bp, Homo sapien
gttttctcctcccactgcccatttc

SEQ ID NO: 5775802 - DNA, 25 bp, Homo sapien
cgccctcctgcagcagacacaacca

SEQ ID NO: 5775803 - DNA, 25 bp, Homo sapien
gttgatgagcagatctgtggaagaa

SEQ ID NO: 5775804 - DNA, 25 bp, Homo sapien
gctggtggtggaaaacatggacata

SEQ ID NO: 5775805 - DNA, 25 bp, Homo sapien
agggacaagccaggagctgagagtc

SEQ ID NO: 5775806 - DNA, 25 bp, Homo sapien
acaagccaggagctgagagtcaccg

SEQ ID NO: 5775807 - DNA, 25 bp, Homo sapien
gggctgtgacattgacccagccttg

SEQ ID NO: 5775808 - DNA, 25 bp, Homo sapien
ggcaagagagtggcagacataaagg

SEQ ID NO: 5775809 - DNA, 25 bp, Homo sapien
acagcttatggaaaaagttagggcg

SEQ ID NO: 5775810 - DNA, 25 bp, Homo sapien
aactggcactgacaatgaatcatgt

SEQ ID NO: 5775811 - DNA, 25 bp, Homo sapien
gccagaagctgtggaagctgtgtct

SEQ ID NO: 5775812 - DNA, 25 bp, Homo sapien
tctctgctcatgcgcttggtggtgg

SEQ ID NO: 5775813 - DNA, 25 bp, Homo sapien
cctcattgtcttccactcccgaatg

SEQ ID NO: 5775814 - DNA, 25 bp, Homo sapien
agagtcatccgcaacgccctcctgc

SEQ ID NO: 5775815 - DNA, 25 bp, Homo sapien
gggaccatcatcctctccccagcca

SEQ ID NO: 5775816 - DNA, 25 bp, Homo sapien
ctggcatctgctgcaggtgtgggct

SEQ ID NO: 5775817 - DNA, 25 bp, Homo sapien
catcctctccccagccatgcaggcc

SEQ ID NO: 5775818 - DNA, 25 bp, Homo sapien
ggaaagtctgcttagacaggcaagc

SEQ ID NO: 5775819 - DNA, 25 bp, Homo sapien
atcgtagagcagtgaggcaggctgg

SEQ ID NO: 5775820 - DNA, 25 bp, Homo sapien
actgcactcatgagatgtgcccaga

SEQ ID NO: 5775821 - DNA, 25 bp, Homo sapien
cagtggccagtttcattgtcaacgg

SEQ ID NO: 5775822 - DNA, 25 bp, Homo sapien
atccttcctgaccctggacatgctg

SEQ ID NO: 5775823 - DNA, 25 bp, Homo sapien
cacagacatcaaggtgaccttgagt

SEQ ID NO: 5775824 - DNA, 25 bp, Homo sapien
agaactggcactgacaatgaatcat

SEQ ID NO: 5775825 - DNA, 25 bp, Homo sapien
tagggcgtggggccacatgtgtgaa

SEQ ID NO: 5775826 - DNA, 25 bp, Homo sapien
atgcaggccttcgtcagcctgccca

SEQ ID NO: 5775827 - DNA, 25 bp, Homo sapien
tcacgctctacaacaagaacattga

SEQ ID NO: 5775828 - DNA, 25 bp, Homo sapien
ggcagtgaaggagctggagactgtg

SEQ ID NO: 5775829 - DNA, 25 bp, Homo sapien
ctgttggcaggagtcaaagcataca

SEQ ID NO: 5775830 - DNA, 25 bp, Homo sapien
gaagaagctggtggtggaaaacatg

SEQ ID NO: 5775831 - DNA, 25 bp, Homo sapien
tggactccgtagaaaaattgctggt

SEQ ID NO: 5775832 - DNA, 25 bp, Homo sapien
cctaaacccttgccatagtggaagc

SEQ ID NO: 5775833 - DNA, 25 bp, Homo sapien
gaccttggaggaatctgccatgttg

SEQ ID NO: 5775834 - DNA, 25 bp, Homo sapien
cttctgagctgttggcaggagtcaa

SEQ ID NO: 5775835 - DNA, 25 bp, Homo sapien
ctgtggtcactttcgcagggggtgg

SEQ ID NO: 5775836 - DNA, 25 bp, Homo sapien
gactgtgttggctgatgaaccggga

SEQ ID NO: 5775837 - DNA, 25 bp, Homo sapien
gaggagtccatcatcatgtcctcat

SEQ ID NO: 5775838 - DNA, 25 bp, Homo sapien
tacaatcagcaaagccaagaacaag

SEQ ID NO: 5775839 - DNA, 25 bp, Homo sapien
ggagagagggtcaggagccagagtt

SEQ ID NO: 5775840 - DNA, 25 bp, Homo sapien
ttgtgctcagtgacatcattcagaa

SEQ ID NO: 5775841 - DNA, 25 bp, Homo sapien
cagaagctgtggaagctgtgtctgc

SEQ ID NO: 5775842 - DNA, 25 bp, Homo sapien
tctgaatctcaaacaagttgataat

SEQ ID NO: 5775843 - DNA, 25 bp, Homo sapien
caaagcatacattggtttcatacag

SEQ ID NO: 5775844 - DNA, 25 bp, Homo sapien
tcccattgagtgcttgaaggagttt

SEQ ID NO: 5775845 - DNA, 25 bp, Homo sapien
ttatcctcagtttcagggccatggc

SEQ ID NO: 5775846 - DNA, 25 bp, Homo sapien
gtgtgggctgtgacattgacccagc

SEQ ID NO: 5775847 - DNA, 25 bp, Homo sapien
cgggaggttttctcctcccactgcc

SEQ ID NO: 5775848 - DNA, 25 bp, Homo sapien
atgaaccgggactactgggtcctaa

SEQ ID NO: 5775849 - DNA, 25 bp, Homo sapien
ctgaagaagctggtggtggaaaaca

SEQ ID NO: 5775850 - DNA, 25 bp, Homo sapien
tggactggttccgcctacaggcata

SEQ ID NO: 5775851 - DNA, 25 bp, Homo sapien
aaatgcctatcgggaggtgtctcgg

SEQ ID NO: 5775852 - DNA, 25 bp, Homo sapien
ttggaggaatctgccatgttgcgtt

SEQ ID NO: 5775853 - DNA, 25 bp, Homo sapien
ggacagcttatggaaaaagttaggg

SEQ ID NO: 5775854 - DNA, 25 bp, Homo sapien
gtgctaaagcgcatgaccatcattg

SEQ ID NO: 5775855 - DNA, 25 bp, Homo sapien
cagcaaagccaagaacaagaaaacc

SEQ ID NO: 5775856 - DNA, 25 bp, Homo sapien
acatgtgtgaattttacaatgaaaa

SEQ ID NO: 5775857 - DNA, 25 bp, Homo sapien
tccaactttagcaagccggacttga

SEQ ID NO: 5775858 - DNA, 25 bp, Homo sapien
gtgctgagcagcgaaacctgagcga

SEQ ID NO: 5775859 - DNA, 25 bp, Homo sapien
caaagccatcatccaggtgtctgct

SEQ ID NO: 5775860 - DNA, 25 bp, Homo sapien
acacaaactggtacctggaaagtct

SEQ ID NO: 5775861 - DNA, 25 bp, Homo sapien
aagccaggagctgagagtcaccgga

SEQ ID NO: 5775862 - DNA, 25 bp, Homo sapien
actccttcctggaagagttggccaa

SEQ ID NO: 5775863 - DNA, 25 bp, Homo sapien
caaacagtggccagtttcattgtca

SEQ ID NO: 5775864 - DNA, 25 bp, Homo sapien
ttcctgaccctggacatgctggagt

SEQ ID NO: 5775865 - DNA, 25 bp, Homo sapien
taattgcaaacagtggccagtttca

SEQ ID NO: 5775866 - DNA, 25 bp, Homo sapien
ctttccccctgatttgtgctcactt

SEQ ID NO: 5775867 - DNA, 25 bp, Homo sapien
atttctgcggatggcagtgaaggag

SEQ ID NO: 5775868 - DNA, 25 bp, Homo sapien
cttggcaagatttgatgctcttgtg

SEQ ID NO: 5775869 - DNA, 25 bp, Homo sapien
ggttcgccacacagagaatgtcacc

SEQ ID NO: 5775870 - DNA, 25 bp, Homo sapien
agaaatcgtagagcagtgaggcagg

SEQ ID NO: 5775871 - DNA, 25 bp, Homo sapien
tgaatctcaaacaagttgataatgg

SEQ ID NO: 5775872 - DNA, 25 bp, Homo sapien
gtgtccagaggaggagtccatcatc

SEQ ID NO: 5775873 - DNA, 25 bp, Homo sapien
gtggaagctgtgtctgcagggctcc

SEQ ID NO: 5775874 - DNA, 25 bp, Homo sapien
cccagtttttgggtgcagatgcttc

SEQ ID NO: 5775875 - DNA, 25 bp, Homo sapien
ttcgtgatgaggtcacctggctggt

SEQ ID NO: 5775876 - DNA, 25 bp, Homo sapien
gtgtctcgggccttccacctaaact

SEQ ID NO: 5775877 - DNA, 25 bp, Homo sapien
agaaatcgagaatccatttctctgc

SEQ ID NO: 5775878 - DNA, 25 bp, Homo sapien
cccgagagggacaagccaggagctg

SEQ ID NO: 5775879 - DNA, 25 bp, Homo sapien
tacaacaacaatattcattgcttga

SEQ ID NO: 5775880 - DNA, 25 bp, Homo sapien
tcaccaagacaaagacacctgagga

SEQ ID NO: 5775881 - DNA, 25 bp, Homo sapien
aggaggaatataaggtggcctgcct

SEQ ID NO: 5775882 - DNA, 25 bp, Homo sapien
gaaaacatggacatacttgttcaga

SEQ ID NO: 5775883 - DNA, 25 bp, Homo sapien
cagggctccctctacatcaccctta

SEQ ID NO: 5775884 - DNA, 25 bp, Homo sapien
ttggggttatcctcagtttcagggc

SEQ ID NO: 5775885 - DNA, 25 bp, Homo sapien
ttctacctaagcactgtgccactac

SEQ ID NO: 5775886 - DNA, 25 bp, Homo sapien
ggtggtggcctctgtcagcctcttg

SEQ ID NO: 5775887 - DNA, 25 bp, Homo sapien
gagttgatgagcagatctgtggaag

SEQ ID NO: 5775888 - DNA, 25 bp, Homo sapien
gccatgttgcgttatgccattgctt

SEQ ID NO: 5775889 - DNA, 25 bp, Homo sapien
tgagtacctcagcagccacctggag

SEQ ID NO: 5775890 - DNA, 25 bp, Homo sapien
catgcgcttggtggtggaggagtca

SEQ ID NO: 5775891 - DNA, 25 bp, Homo sapien
cctgaggaggaatataaggtggcct

SEQ ID NO: 5775892 - DNA, 25 bp, Homo sapien
tttctcctcccactgcccatttctt

SEQ ID NO: 5775893 - DNA, 25 bp, Homo sapien
aaattgctggtggaaacttctgatc

SEQ ID NO: 5775894 - DNA, 25 bp, Homo sapien
acatcattcagaacttgtctgtgtg

SEQ ID NO: 5775895 - DNA, 25 bp, Homo sapien
gaagacacatcaaagtgatacagca

SEQ ID NO: 5775896 - DNA, 25 bp, Homo sapien
acaatccagggctgagaaatcgtag

SEQ ID NO: 5775897 - DNA, 25 bp, Homo sapien
aactcctgggcccctatggcatgaa

SEQ ID NO: 5775898 - DNA, 25 bp, Homo sapien
catgggtgcctcaactccaatagcc

SEQ ID NO: 5775899 - DNA, 25 bp, Homo sapien
tatctttgagctggcatctgctgca

SEQ ID NO: 5775900 - DNA, 25 bp, Homo sapien
ggctggctacaatgccacgacccag

SEQ ID NO: 5775901 - DNA, 25 bp, Homo sapien
gaaagggtatggcaagagagtggca

SEQ ID NO: 5775902 - DNA, 25 bp, Homo sapien
atgtggcatgtgacctctcagattg

SEQ ID NO: 5775903 - DNA, 25 bp, Homo sapien
gtttccctcccactccttgccactg

SEQ ID NO: 5775904 - DNA, 25 bp, Homo sapien
aaaatttgaattctcaggattgagg

SEQ ID NO: 5775905 - DNA, 25 bp, Homo sapien
aaggcccctctgcacctgcatgaga

SEQ ID NO: 5775906 - DNA, 25 bp, Homo sapien
cttgatggcttccctgctgccccag

SEQ ID NO: 5775907 - DNA, 25 bp, Homo sapien
tgcctgccagtacccactgaagagc

SEQ ID NO: 5775908 - DNA, 25 bp, Homo sapien
cctcttgcagctgggccaggagact

SEQ ID NO: 5775909 - DNA, 25 bp, Homo sapien
ggctaaggcccctctgcacctgcat

SEQ ID NO: 5775910 - DNA, 25 bp, Homo sapien
ccaagaacaagaaaaccaggaagca

SEQ ID NO: 5775911 - DNA, 25 bp, Homo sapien
agacacatcaaagtgatacagcaat

SEQ ID NO: 5775912 - DNA, 25 bp, Homo sapien
aaatcgagaatccatttctctgctc

SEQ ID NO: 5775913 - DNA, 25 bp, Homo sapien
agagggtcaggagccagagttgatg

SEQ ID NO: 5775914 - DNA, 25 bp, Homo sapien
aagttagggcgtggggccacatgtg

SEQ ID NO: 5775915 - DNA, 25 bp, Homo sapien
tccagggctgagaaatcgtagagca

SEQ ID NO: 5775916 - DNA, 25 bp, Homo sapien
agatgtgcccagaggagtaccccca

SEQ ID NO: 5775917 - DNA, 25 bp, Homo sapien
tcaaggtgaccttgagtatctttga

SEQ ID NO: 5775918 - DNA, 25 bp, Homo sapien
gtctcgggccttccacctaaactga

SEQ ID NO: 5775919 - DNA, 25 bp, Homo sapien
gtggcatgtgacctctcagattgtg

SEQ ID NO: 5775920 - DNA, 25 bp, Homo sapien
ggaagctgtgtctgcagggctccct

SEQ ID NO: 5775921 - DNA, 25 bp, Homo sapien
aagcgcatgaccatcattggggtta

SEQ ID NO: 5775922 - DNA, 25 bp, Homo sapien
caggagactgacaagcttaaaacca

SEQ ID NO: 5775923 - DNA, 25 bp, Homo sapien
catcatccaggtgtctgctgccctc

SEQ ID NO: 5775924 - DNA, 25 bp, Homo sapien
tcctaaggctctttttgctttcatg

SEQ ID NO: 5775925 - DNA, 25 bp, Homo sapien
tgatggcttccctgctgccccagct

SEQ ID NO: 5775926 - DNA, 25 bp, Homo sapien
agagaatgtcaccaagacaaagaca

SEQ ID NO: 5775927 - DNA, 25 bp, Homo sapien
agcagaccagcaattgcgtcctgga

SEQ ID NO: 5775928 - DNA, 25 bp, Homo sapien
cctgctcttgatctttctggcagtt

SEQ ID NO: 5775929 - DNA, 25 bp, Homo sapien
gagaaggggagcagaacttcagtgc

SEQ ID NO: 5775930 - DNA, 25 bp, Homo sapien
gcagatgcttccagagtcatccgca

SEQ ID NO: 5775931 - DNA, 25 bp, Homo sapien
caggcaagcagtgggaccatcatcc

SEQ ID NO: 5775932 - DNA, 25 bp, Homo sapien
ggtggggtcactaaggagagagggt

SEQ ID NO: 5775933 - DNA, 25 bp, Homo sapien
actgggtcctaaggctctttttgct

SEQ ID NO: 5775934 - DNA, 25 bp, Homo sapien
gcctatcgggaggtgtctcgggcct

SEQ ID NO: 5775935 - DNA, 25 bp, Homo sapien
attgctggtggaaacttctgatctg

SEQ ID NO: 5775936 - DNA, 25 bp, Homo sapien
tatcttcccttctgagtacctcagc

SEQ ID NO: 5775937 - DNA, 25 bp, Homo sapien
tgaggctggactggttccgcctaca

SEQ ID NO: 5775938 - DNA, 25 bp, Homo sapien
aggagctggagactgtgttggctga

SEQ ID NO: 5775939 - DNA, 25 bp, Homo sapien
gcaagccggacttgatggcttccct

SEQ ID NO: 5775940 - DNA, 25 bp, Homo sapien
tggaagtaatggagcgctggattat

SEQ ID NO: 5775941 - DNA, 25 bp, Homo sapien
ctggtggaaacttctgatctgtcta

SEQ ID NO: 5775942 - DNA, 25 bp, Homo sapien
tcactttcgcagggggtgggaatgg

SEQ ID NO: 5775943 - DNA, 25 bp, Homo sapien
ccaccttcagtacttggcaagattt

SEQ ID NO: 5775944 - DNA, 25 bp, Homo sapien
cccaggagatcgtacggccttctga

SEQ ID NO: 5775945 - DNA, 25 bp, Homo sapien
attgaaactcacctcaaggaatttc

SEQ ID NO: 5775946 - DNA, 25 bp, Homo sapien
atccgcaacgccctcctgcagcaga

SEQ ID NO: 5775947 - DNA, 25 bp, Homo sapien
ttccccctgatttgtgctcactttg

SEQ ID NO: 5775948 - DNA, 25 bp, Homo sapien
tgacctctcagattgtggagctgaa

SEQ ID NO: 5775949 - DNA, 25 bp, Homo sapien
agatctgtggaagaacaatccaggg

SEQ ID NO: 5775950 - DNA, 25 bp, Homo sapien
aacttcagtgcagaggagttctctg

SEQ ID NO: 5775951 - DNA, 25 bp, Homo sapien
ccattgagtgcttgaaggagtttgt

SEQ ID NO: 5775952 - DNA, 25 bp, Homo sapien
gaccttcctaaacccttgccatagt

SEQ ID NO: 5775953 - DNA, 25 bp, Homo sapien
gattgtggagctgaagaagctggtg

SEQ ID NO: 5775954 - DNA, 25 bp, Homo sapien
ctgacaatgaatcatgtatacagtt

SEQ ID NO: 5775955 - DNA, 25 bp, Homo sapien
tgctcactttgtccactgcactcat

SEQ ID NO: 5775956 - DNA, 25 bp, Homo sapien
tgacattgacccagccttggtggct

SEQ ID NO: 5775957 - DNA, 25 bp, Homo sapien
gcttaaaaccagaaatcgagaatcc

SEQ ID NO: 5775958 - DNA, 25 bp, Homo sapien
tcagtacttggcaagatttgatgct

SEQ ID NO: 5775959 - DNA, 25 bp, Homo sapien
tacccactgaagagccctttggacc

SEQ ID NO: 5775960 - DNA, 25 bp, Homo sapien
ggactatgctgactcgagcattgca

SEQ ID NO: 5775961 - DNA, 25 bp, Homo sapien
aaccatggtcttcaccactgcaact

SEQ ID NO: 5775962 - DNA, 25 bp, Homo sapien
ctccgtgtttgaacatactatcttc

SEQ ID NO: 5775963 - DNA, 25 bp, Homo sapien
ccactggattcctgtggggaacaga

SEQ ID NO: 5775964 - DNA, 25 bp, Homo sapien
tctgaaagctgatacttcatctcct

SEQ ID NO: 5775965 - DNA, 25 bp, Homo sapien
cgtgatgaggtcacctggctggttc

SEQ ID NO: 5775966 - DNA, 25 bp, Homo sapien
atcgagaatccatttctctgctcat

SEQ ID NO: 5775967 - DNA, 25 bp, Homo sapien
aagatgtttgccatgaccttggagg

SEQ ID NO: 5775968 - DNA, 25 bp, Homo sapien
ttcagaacttgtctgtgtgtccaga

SEQ ID NO: 5775969 - DNA, 25 bp, Homo sapien
agtacccactgaagagccctttgga

SEQ ID NO: 5775970 - DNA, 25 bp, Homo sapien
tacacctaaacttgacagaactggc

SEQ ID NO: 5775971 - DNA, 25 bp, Homo sapien
actgaatgcctgccagtacccactg

SEQ ID NO: 5775972 - DNA, 25 bp, Homo sapien
ccattgctttccccctgatttgtgc

SEQ ID NO: 5775973 - DNA, 25 bp, Homo sapien
ccttgccactgacccttcttccttt

SEQ ID NO: 5775974 - DNA, 25 bp, Homo sapien
atagcattgagaaggatggttacaa

SEQ ID NO: 5775975 - DNA, 25 bp, Homo sapien
gcgggccttggcagaactcctgggc

SEQ ID NO: 5775976 - DNA, 25 bp, Homo sapien
gcatgaagttcctgagtgaaaacct

SEQ ID NO: 5775977 - DNA, 25 bp, Homo sapien
agctgagagtcaccggaagaaccgc

SEQ ID NO: 5775978 - DNA, 25 bp, Homo sapien
caatgaaaaaaggagtaacgtacaa

SEQ ID NO: 5775979 - DNA, 25 bp, Homo sapien
agtcatccttcctgaccctggacat

SEQ ID NO: 5775980 - DNA, 25 bp, Homo sapien
gtgggctgtgacattgacccagcct

SEQ ID NO: 5775981 - DNA, 25 bp, Homo sapien
ggttccgcctacaggcatacactag

SEQ ID NO: 5775982 - DNA, 25 bp, Homo sapien
gctgcaggtgcacaaagtcaccgag

SEQ ID NO: 5775983 - DNA, 25 bp, Homo sapien
tcagtgacatcattcagaacttgtc

SEQ ID NO: 5775984 - DNA, 25 bp, Homo sapien
gccaggagactgacaagcttaaaac

SEQ ID NO: 5775985 - DNA, 25 bp, Homo sapien
attgtcttccactcccgaatgctgg

SEQ ID NO: 5775986 - DNA, 25 bp, Homo sapien
ttgttcagatcagatccaactttag

SEQ ID NO: 5775987 - DNA, 25 bp, Homo sapien
tacctcagcagccacctggaggcca

SEQ ID NO: 5775988 - DNA, 25 bp, Homo sapien
ctacttttcttgttggaggggatta

SEQ ID NO: 5775989 - DNA, 25 bp, Homo sapien
ggagatctgtgctgagcagcgaaac

SEQ ID NO: 5775990 - DNA, 25 bp, Homo sapien
tcatctcctgaggaggaatataagg

SEQ ID NO: 5775991 - DNA, 25 bp, Homo sapien
cagattgtggagctgaagaagctgg

SEQ ID NO: 5775992 - DNA, 25 bp, Homo sapien
ggcccctatggcatgaagttcctga

SEQ ID NO: 5775993 - DNA, 25 bp, Homo sapien
tgccacgacccaggagatcgtacgg

SEQ ID NO: 5775994 - DNA, 25 bp, Homo sapien
aatagccagtgccagaagctgtgga

SEQ ID NO: 5775995 - DNA, 25 bp, Homo sapien
tacaacaagaacattgaaactcacc

SEQ ID NO: 5775996 - DNA, 25 bp, Homo sapien
tgtcaacggcggcaatttctgcgga

SEQ ID NO: 5775997 - DNA, 25 bp, Homo sapien
gctggactggttccgcctacaggca

SEQ ID NO: 5775998 - DNA, 25 bp, Homo sapien
ctaaactgaatgcctgccagtaccc

SEQ ID NO: 5775999 - DNA, 25 bp, Homo sapien
catgtaattgcaaacagtggccagt

SEQ ID NO: 5776000 - DNA, 25 bp, Homo sapien
cactgaagagccctttggaccttcc

SEQ ID NO: 5776001 - DNA, 25 bp, Homo sapien
cccttgccatagtggaagctgtggt

SEQ ID NO: 5776002 - DNA, 25 bp, Homo sapien
tggaggggattaggtctctggtccg

SEQ ID NO: 5776003 - DNA, 25 bp, Homo sapien
ctcactttgtccactgcactcatga

SEQ ID NO: 5776004 - DNA, 25 bp, Homo sapien
tgtctgcagggctccctctacatca

SEQ ID NO: 5776005 - DNA, 25 bp, Homo sapien
cagcgaaacctgagcgagcagcttc

SEQ ID NO: 5776006 - DNA, 25 bp, Homo sapien
ggacatacttgttcagatcagatcc

SEQ ID NO: 5776007 - DNA, 25 bp, Homo sapien
aagaaaaccaggaagcagaggcaga

SEQ ID NO: 5776008 - DNA, 25 bp, Homo sapien
ctatcgggaggtgtctcgggccttc

SEQ ID NO: 5776009 - DNA, 25 bp, Homo sapien
ttagcagtttgaaagggtatggcaa

SEQ ID NO: 5776010 - DNA, 25 bp, Homo sapien
tgcttgaaggagtttgtcactccag

SEQ ID NO: 5776011 - DNA, 25 bp, Homo sapien
cgtagagcagtgaggcaggctggga

SEQ ID NO: 5776012 - DNA, 25 bp, Homo sapien
agaagatgtttgccatgaccttgga

SEQ ID NO: 5776013 - DNA, 25 bp, Homo sapien
tgctgccccagctgacaggggctga

SEQ ID NO: 5776014 - DNA, 25 bp, Homo sapien
ttgccactgacccttcttcctttta

SEQ ID NO: 5776015 - DNA, 25 bp, Homo sapien
ttctccgtgtttgaacatactatct

SEQ ID NO: 5776016 - DNA, 25 bp, Homo sapien
caccgaggacctgtttagcagtttg

SEQ ID NO: 5776017 - DNA, 25 bp, Homo sapien
ctgatacttcatctcctgaggagga

SEQ ID NO: 5776018 - DNA, 25 bp, Homo sapien
ggcctgcctgctcttgatctttctg

SEQ ID NO: 5776019 - DNA, 25 bp, Homo sapien
atcaaagtgatacagcaataccacc

SEQ ID NO: 5776020 - DNA, 25 bp, Homo sapien
tccttcctggaagagttggccaagc

SEQ ID NO: 5776021 - DNA, 25 bp, Homo sapien
agaatccatttctctgctcatgcgc

SEQ ID NO: 5776022 - DNA, 25 bp, Homo sapien
gggccttggcagaactcctgggccc

SEQ ID NO: 5776023 - DNA, 25 bp, Homo sapien
aacggcggcaatttctgcggatggc

SEQ ID NO: 5776024 - DNA, 25 bp, Homo sapien
attgggtttcttctttgtcatgggt

SEQ ID NO: 5776025 - DNA, 25 bp, Homo sapien
agagcccgagagggacaagccagga

SEQ ID NO: 5776026 - DNA, 25 bp, Homo sapien
agaaaaattgctggtggaaacttct

SEQ ID NO: 5776027 - DNA, 25 bp, Homo sapien
ttccttttatagcattgagaaggat

SEQ ID NO: 5776028 - DNA, 25 bp, Homo sapien
caaagtcaccgaggacctgtttagc

SEQ ID NO: 5776029 - DNA, 25 bp, Homo sapien
ctgtctactttctgctttcatcttc

SEQ ID NO: 5776030 - DNA, 25 bp, Homo sapien
aatccagggctgagaaatcgtagag

SEQ ID NO: 5776031 - DNA, 25 bp, Homo sapien
gctgggagcatggaggacagcttat

SEQ ID NO: 5776032 - DNA, 25 bp, Homo sapien
ggtggaggagtcatccttcctgacc

SEQ ID NO: 5776033 - DNA, 25 bp, Homo sapien
acaaactggtacctggaaagtctgc

SEQ ID NO: 5776034 - DNA, 25 bp, Homo sapien
agatcgtacggccttctgagctgtt

SEQ ID NO: 5776035 - DNA, 25 bp, Homo sapien
gtttttgggtgcagatgcttccaga

SEQ ID NO: 5776036 - DNA, 25 bp, Homo sapien
agaaaaggagagcccgagagggaca

SEQ ID NO: 5776037 - DNA, 25 bp, Homo sapien
cctcagcagccacctggaggccaga

SEQ ID NO: 5776038 - DNA, 25 bp, Homo sapien
tggaaacttctgatctgtctacttt

SEQ ID NO: 5776039 - DNA, 25 bp, Homo sapien
actttagcaagccggacttgatggc

SEQ ID NO: 5776040 - DNA, 25 bp, Homo sapien
catctgctgcaggtgtgggctgtga

SEQ ID NO: 5776041 - DNA, 25 bp, Homo sapien
gtgaggatgtgctgcaggtgcacaa

SEQ ID NO: 5776042 - DNA, 25 bp, Homo sapien
aagcttaaaaccagaaatcgagaat

SEQ ID NO: 5776043 - DNA, 25 bp, Homo sapien
atcagcaaagccaagaacaagaaaa

SEQ ID NO: 5776044 - DNA, 25 bp, Homo sapien
ttcgggaggttttctcctcccactg

SEQ ID NO: 5776045 - DNA, 25 bp, Homo sapien
cttgaaggagtttgtcactccagac

SEQ ID NO: 5776046 - DNA, 25 bp, Homo sapien
ccagtttcattgtcaacggcggcaa

SEQ ID NO: 5776047 - DNA, 25 bp, Homo sapien
ctacaatgccacgacccaggagatc

SEQ ID NO: 5776048 - DNA, 25 bp, Homo sapien
gagagcaaggaacatgtaattgcaa

SEQ ID NO: 5776049 - DNA, 25 bp, Homo sapien
ttctctgacatctctgagatgcggg

SEQ ID NO: 5776050 - DNA, 25 bp, Homo sapien
ccttcctgaccctggacatgctgga

SEQ ID NO: 5776051 - DNA, 25 bp, Homo sapien
aaggagagcccgagagggacaagcc

SEQ ID NO: 5776052 - DNA, 25 bp, Homo sapien
gcggcaatttctgcggatggcagtg

SEQ ID NO: 5776053 - DNA, 25 bp, Homo sapien
gttcagatcagatccaactttagca

SEQ ID NO: 5776054 - DNA, 25 bp, Homo sapien
catcaaggtgaccttgagtatcttt

SEQ ID NO: 5776055 - DNA, 25 bp, Homo sapien
ggtggaaacttctgatctgtctact

SEQ ID NO: 5776056 - DNA, 25 bp, Homo sapien
tgaatgcctgccagtacccactgaa

SEQ ID NO: 5776057 - DNA, 25 bp, Homo sapien
gaggccagactcaacagagccattg

SEQ ID NO: 5776058 - DNA, 25 bp, Homo sapien
attgtcaccaacatggacaagctac

SEQ ID NO: 5776059 - DNA, 25 bp, Homo sapien
cctgccagtacccactgaagagccc

SEQ ID NO: 5776060 - DNA, 25 bp, Homo sapien
tggggaacagacaatcaccacactc

SEQ ID NO: 5776061 - DNA, 25 bp, Homo sapien
tatcctctcctctctgaatctcaaa

SEQ ID NO: 5776062 - DNA, 25 bp, Homo sapien
ccgtgtttgaacatactatcttccc

SEQ ID NO: 5776063 - DNA, 25 bp, Homo sapien
ccctgatttgtgctcactttgtcca

SEQ ID NO: 5776064 - DNA, 25 bp, Homo sapien
aggagccagagttgatgagcagatc

SEQ ID NO: 5776065 - DNA, 25 bp, Homo sapien
ccgtagaaaaattgctggtggaaac

SEQ ID NO: 5776066 - DNA, 25 bp, Homo sapien
ctgtgtgtccagaggaggagtccat

SEQ ID NO: 5776067 - DNA, 25 bp, Homo sapien
tttcattgtcaacggcggcaatttc

SEQ ID NO: 5776068 - DNA, 25 bp, Homo sapien
gcagaggcagactcccagaaaagga

SEQ ID NO: 5776069 - DNA, 25 bp, Homo sapien
tctgcttagacaggcaagcagtggg

SEQ ID NO: 5776070 - DNA, 25 bp, Homo sapien
tggcaagatttgatgctcttgtgct

SEQ ID NO: 5776071 - DNA, 25 bp, Homo sapien
ctacaggcatacactagcgtggcta

SEQ ID NO: 5776072 - DNA, 25 bp, Homo sapien
tccatcatcatgtcctcattcgtca

SEQ ID NO: 5776073 - DNA, 25 bp, Homo sapien
ccactcccgaatgctggactccgta

SEQ ID NO: 5776074 - DNA, 25 bp, Homo sapien
aataccaccttcagtacttggcaag

SEQ ID NO: 5776075 - DNA, 25 bp, Homo sapien
cccctatggcatgaagttcctgagt

SEQ ID NO: 5776076 - DNA, 25 bp, Homo sapien
ctcatgagatgtgcccagaggagta

SEQ ID NO: 5776077 - DNA, 25 bp, Homo sapien
tgtcactccagacacagacatcaag

SEQ ID NO: 5776078 - DNA, 25 bp, Homo sapien
tgtgctcactttgtccactgcactc

SEQ ID NO: 5776079 - DNA, 25 bp, Homo sapien
tgtcaccaagacaaagacacctgag

SEQ ID NO: 5776080 - DNA, 25 bp, Homo sapien
gtcaaagcatacattggtttcatac

SEQ ID NO: 5776081 - DNA, 25 bp, Homo sapien
aaaccaggaagcagaggcagactcc

SEQ ID NO: 5776082 - DNA, 25 bp, Homo sapien
tgagtgaaaacctgatgtggcatgt

SEQ ID NO: 5776083 - DNA, 25 bp, Homo sapien
cggccttctgagctgttggcaggag

SEQ ID NO: 5776084 - DNA, 25 bp, Homo sapien
agatctgtgctgagcagcgaaacct

SEQ ID NO: 5776085 - DNA, 25 bp, Homo sapien
ctctacacaaactggtacctggaaa

SEQ ID NO: 5776086 - DNA, 25 bp, Homo sapien
ccgaagacacatcaaagtgatacag

SEQ ID NO: 5776087 - DNA, 25 bp, Homo sapien
cagatccaactttagcaagccggac

SEQ ID NO: 5776088 - DNA, 25 bp, Homo sapien
gaggatgtgctgcaggtgcacaaag

SEQ ID NO: 5776089 - DNA, 25 bp, Homo sapien
ccccctgatttgtgctcactttgtc

SEQ ID NO: 5776090 - DNA, 25 bp, Homo sapien
ttgctttcatggccctgtccttcat

SEQ ID NO: 5776091 - DNA, 25 bp, Homo sapien
aagctggtggtggaaaacatggaca

SEQ ID NO: 5776092 - DNA, 25 bp, Homo sapien
gctcagtgacatcattcagaacttg

SEQ ID NO: 5776093 - DNA, 25 bp, Homo sapien
cttatgggtcccattgagtgcttga

SEQ ID NO: 5776094 - DNA, 25 bp, Homo sapien
gtggcctgcctgctcttgatctttc

SEQ ID NO: 5776095 - DNA, 25 bp, Homo sapien
caatttctgcggatggcagtgaagg

SEQ ID NO: 5776096 - DNA, 25 bp, Homo sapien
agcctcttgcagctgggccaggaga

SEQ ID NO: 5776097 - DNA, 25 bp, Homo sapien
agctgacaggggctgaaaatgtgct

SEQ ID NO: 5776098 - DNA, 25 bp, Homo sapien
agacaaagacacctgaggactatgc

SEQ ID NO: 5776099 - DNA, 25 bp, Homo sapien
ggattgaggctggactggttccgcc

SEQ ID NO: 5776100 - DNA, 25 bp, Homo sapien
gtctgctgccctcttcacgctctac

SEQ ID NO: 5776101 - DNA, 25 bp, Homo sapien
ctgacaggggctgaaaatgtgctaa

SEQ ID NO: 5776102 - DNA, 25 bp, Homo sapien
tcatccgcaacgccctcctgcagca

SEQ ID NO: 5776103 - DNA, 25 bp, Homo sapien
gtgatacagcaataccaccttcagt

SEQ ID NO: 5776104 - DNA, 25 bp, Homo sapien
ccagaggaggagtccatcatcatgt

SEQ ID NO: 5776105 - DNA, 25 bp, Homo sapien
ccacatgtgtgaattttacaatgaa

SEQ ID NO: 5776106 - DNA, 25 bp, Homo sapien
tgggtgcctcaactccaatagccag

SEQ ID NO: 5776107 - DNA, 25 bp, Homo sapien
gccaagcagaccagcaattgcgtcc

SEQ ID NO: 5776108 - DNA, 25 bp, Homo sapien
catttctctgctcatgcgcttggtg

SEQ ID NO: 5776109 - DNA, 25 bp, Homo sapien
tcagcagccacctggaggccagact

SEQ ID NO: 5776110 - DNA, 25 bp, Homo sapien
actagcgtggctaaggcccctctgc

SEQ ID NO: 5776111 - DNA, 25 bp, Homo sapien
gagagtcaccggaagaaccgcagca

SEQ ID NO: 5776112 - DNA, 25 bp, Homo sapien
cctctgtcagcctcttgcagctggg

SEQ ID NO: 5776113 - DNA, 25 bp, Homo sapien
aaagctgatacttcatctcctgagg

SEQ ID NO: 5776114 - DNA, 25 bp, Homo sapien
aatctcaaacaagttgataatggag

SEQ ID NO: 5776115 - DNA, 25 bp, Homo sapien
atacattggtttcatacagtcactg

SEQ ID NO: 5776116 - DNA, 25 bp, Homo sapien
gcttctacctaagcactgtgccact

SEQ ID NO: 5776117 - DNA, 25 bp, Homo sapien
aatctgaaagctgatacttcatctc

SEQ ID NO: 5776118 - DNA, 25 bp, Homo sapien
ctggttcgccacacagagaatgtca

SEQ ID NO: 5776119 - DNA, 25 bp, Homo sapien
tacaatgaaaaaaggagtaacgtac

SEQ ID NO: 5776120 - DNA, 25 bp, Homo sapien
ttcatacagtcactggcccagtttt

SEQ ID NO: 5776121 - DNA, 25 bp, Homo sapien
tcttcgtatctttgagaagatgttt

SEQ ID NO: 5776122 - DNA, 25 bp, Homo sapien
aggaatctgccatgttgcgttatgc

SEQ ID NO: 5776123 - DNA, 25 bp, Homo sapien
gtatggcaagagagtggcagacata

SEQ ID NO: 5776124 - DNA, 25 bp, Homo sapien
ccctcttcacgctctacaacaagaa

SEQ ID NO: 5776125 - DNA, 25 bp, Homo sapien
ctggctggctacaatgccacgaccc

SEQ ID NO: 5776126 - DNA, 25 bp, Homo sapien
gcaagatttgatgctcttgtgctca

SEQ ID NO: 5776127 - DNA, 25 bp, Homo sapien
caacaacaatattcattgcttgacc

SEQ ID NO: 5776128 - DNA, 25 bp, Homo sapien
cagtttctccgtgtttgaacatact

SEQ ID NO: 5776129 - DNA, 25 bp, Homo sapien
gaacttgtctgtgtgtccagaggag

SEQ ID NO: 5776130 - DNA, 25 bp, Homo sapien
tttgtgctcactttgtccactgcac

SEQ ID NO: 5776131 - DNA, 25 bp, Homo sapien
gtggaagaacaatccagggctgaga

SEQ ID NO: 5776132 - DNA, 25 bp, Homo sapien
agagagtggcagacataaaggagag

SEQ ID NO: 5776133 - DNA, 25 bp, Homo sapien
tctgagctgttggcaggagtcaaag

SEQ ID NO: 5776134 - DNA, 25 bp, Homo sapien
aacagagccattgtgtggctggctg

SEQ ID NO: 5776135 - DNA, 25 bp, Homo sapien
tttctgctttcatcttcgtatcttt

SEQ ID NO: 5776136 - DNA, 25 bp, Homo sapien
tttctctgctcatgcgcttggtggt

SEQ ID NO: 5776137 - DNA, 25 bp, Homo sapien
tgctttcatcttcgtatctttgaga

SEQ ID NO: 5776138 - DNA, 25 bp, Homo sapien
gggaacagacaatcaccacactcta

SEQ ID NO: 5776139 - DNA, 25 bp, Homo sapien
ctgtttagcagtttgaaagggtatg

SEQ ID NO: 5776140 - DNA, 25 bp, Homo sapien
aggtgatgaacctcattgtcttcca

SEQ ID NO: 5776141 - DNA, 25 bp, Homo sapien
attggtttcatacagtcactggccc

SEQ ID NO: 5776142 - DNA, 25 bp, Homo sapien
cagcttctacctaagcactgtgcca

SEQ ID NO: 5776143 - DNA, 25 bp, Homo sapien
gggcgtggggccacatgtgtgaatt

SEQ ID NO: 5776144 - DNA, 25 bp, Homo sapien
cttcagtgcagaggagttctctgac

SEQ ID NO: 5776145 - DNA, 25 bp, Homo sapien
cctctgcacctgcatgagaaccctg

SEQ ID NO: 5776146 - DNA, 25 bp, Homo sapien
gaatttctggtggtggcctctgtca

SEQ ID NO: 5776147 - DNA, 25 bp, Homo sapien
gagcagaacttcagtgcagaggagt

SEQ ID NO: 5776148 - DNA, 25 bp, Homo sapien
tctgatctgtctactttctgctttc

SEQ ID NO: 5776149 - DNA, 25 bp, Homo sapien
gaaccgcagcattgtcaccaacatg

SEQ ID NO: 5776150 - DNA, 25 bp, Homo sapien
gttggccaagcagaccagcaattgc

SEQ ID NO: 5776151 - DNA, 25 bp, Homo sapien
gcaacgccctcctgcagcagacaca

SEQ ID NO: 5776152 - DNA, 25 bp, Homo sapien
tatgggtcccattgagtgcttgaag

SEQ ID NO: 5776153 - DNA, 25 bp, Homo sapien
gccattgtgtggctggctggctaca

SEQ ID NO: 5776154 - DNA, 25 bp, Homo sapien
gtgtgtccagaggaggagtccatca

SEQ ID NO: 5776155 - DNA, 25 bp, Homo sapien
cctgctgccccagctgacaggggct

SEQ ID NO: 5776156 - DNA, 25 bp, Homo sapien
ggctggctggctacaatgccacgac

SEQ ID NO: 5776157 - DNA, 25 bp, Homo sapien
ctacctaagcactgtgccactacaa

SEQ ID NO: 5776158 - DNA, 25 bp, Homo sapien
gtgccagaagctgtggaagctgtgt

SEQ ID NO: 5776159 - DNA, 25 bp, Homo sapien
ctcaagaaccatggtcttcaccact

SEQ ID NO: 5776160 - DNA, 25 bp, Homo sapien
aactccaatagccagtgccagaagc

SEQ ID NO: 5776161 - DNA, 25 bp, Homo sapien
acacatcaaagtgatacagcaatac

SEQ ID NO: 5776162 - DNA, 25 bp, Homo sapien
gatccaactttagcaagccggactt

SEQ ID NO: 5776163 - DNA, 25 bp, Homo sapien
tgagaaatcgtagagcagtgaggca

SEQ ID NO: 5776164 - DNA, 25 bp, Homo sapien
tggcatgaagttcctgagtgaaaac

SEQ ID NO: 5776165 - DNA, 25 bp, Homo sapien
aaccctgacttagccaaggtgatga

SEQ ID NO: 5776166 - DNA, 25 bp, Homo sapien
tcattgtcaacggcggcaatttctg

SEQ ID NO: 5776167 - DNA, 25 bp, Homo sapien
tggcagacataaaggagagcaagga

SEQ ID NO: 5776168 - DNA, 25 bp, Homo sapien
ttgagaaggatggttacaacaacaa

SEQ ID NO: 5776169 - DNA, 25 bp, Homo sapien
tcattgtcttccactcccgaatgct

SEQ ID NO: 5776170 - DNA, 25 bp, Homo sapien
ctgaaaatgtgctaaagcgcatgac

SEQ ID NO: 5776171 - DNA, 25 bp, Homo sapien
ctgcggatggcagtgaaggagctgg

SEQ ID NO: 5776172 - DNA, 25 bp, Homo sapien
cctggacatgctggagtcctgtttc

SEQ ID NO: 5776173 - DNA, 25 bp, Homo sapien
ccacctaaactgaatgcctgccagt

SEQ ID NO: 5776174 - DNA, 25 bp, Homo sapien
ttgggtgcagatgcttccagagtca

SEQ ID NO: 5776175 - DNA, 25 bp, Homo sapien
gtttcccttatgtcctgcttcgaaa

SEQ ID NO: 5776176 - DNA, 25 bp, Homo sapien
tcatggccctgtccttcattcgtga

SEQ ID NO: 5776177 - DNA, 25 bp, Homo sapien
tgacatcattcagaacttgtctgtg

SEQ ID NO: 5776178 - DNA, 25 bp, Homo sapien
tgctgactcgagcattgcagagcta

SEQ ID NO: 5776179 - DNA, 25 bp, Homo sapien
caacatggacaagctacacctaaac

SEQ ID NO: 5776180 - DNA, 25 bp, Homo sapien
ccttttatagcattgagaaggatgg

SEQ ID NO: 5776181 - DNA, 25 bp, Homo sapien
aggaatttctggtggtggcctctgt

SEQ ID NO: 5776182 - DNA, 25 bp, Homo sapien
ttgcgttatgccattgctttccccc

SEQ ID NO: 5776183 - DNA, 25 bp, Homo sapien
gatgaacctcattgtcttccactcc

SEQ ID NO: 5776184 - DNA, 25 bp, Homo sapien
gttggcaggagtcaaagcatacatt

SEQ ID NO: 5776185 - DNA, 25 bp, Homo sapien
attgtcaacggcggcaatttctgcg

SEQ ID NO: 5776186 - DNA, 25 bp, Homo sapien
ccgaatgctggactccgtagaaaaa

SEQ ID NO: 5776187 - DNA, 25 bp, Homo sapien
gaaaaatttgaattctcaggattga

SEQ ID NO: 5776188 - DNA, 25 bp, Homo sapien
tgctggtggaaacttctgatctgtc

SEQ ID NO: 5776189 - DNA, 25 bp, Homo sapien
gtgggaccatcatcctctccccagc

SEQ ID NO: 5776190 - DNA, 25 bp, Homo sapien
atctgtggaagaacaatccagggct

SEQ ID NO: 5776191 - DNA, 25 bp, Homo sapien
caaagtgatacagcaataccacctt

SEQ ID NO: 5776192 - DNA, 25 bp, Homo sapien
ggcatctgctgcaggtgtgggctgt

SEQ ID NO: 5776193 - DNA, 25 bp, Homo sapien
agtctgcttagacaggcaagcagtg

SEQ ID NO: 5776194 - DNA, 25 bp, Homo sapien
cctgagtgaaaacctgatgtggcat

SEQ ID NO: 5776195 - DNA, 25 bp, Homo sapien
tagagcagtgaggcaggctgggagc

SEQ ID NO: 5776196 - DNA, 25 bp, Homo sapien
ggccagactcaacagagccattgtg

SEQ ID NO: 5776197 - DNA, 25 bp, Homo sapien
tgggtcccattgagtgcttgaagga

SEQ ID NO: 5776198 - DNA, 25 bp, Homo sapien
gcattgtcaccaacatggacaagct

SEQ ID NO: 5776199 - DNA, 25 bp, Homo sapien
gtcactggcccagtttttgggtgca

SEQ ID NO: 5776200 - DNA, 25 bp, Homo sapien
tggtacctggaaagtctgcttagac

SEQ ID NO: 5776201 - DNA, 25 bp, Homo sapien
ctctgacatctctgagatgcgggcc

SEQ ID NO: 5776202 - DNA, 25 bp, Homo sapien
acattggtttcatacagtcactggc

SEQ ID NO: 5776203 - DNA, 25 bp, Homo sapien
ggggttatcctcagtttcagggcca

SEQ ID NO: 5776204 - DNA, 25 bp, Homo sapien
cttcacgctctacaacaagaacatt

SEQ ID NO: 5776205 - DNA, 25 bp, Homo sapien
gacttgatggcttccctgctgcccc

SEQ ID NO: 5776206 - DNA, 25 bp, Homo sapien
tcccgaatgctggactccgtagaaa

SEQ ID NO: 5776207 - DNA, 25 bp, Homo sapien
tgggtcctaaggctctttttgcttt

SEQ ID NO: 5776208 - DNA, 25 bp, Homo sapien
tgatgtggcatgtgacctctcagat

SEQ ID NO: 5776209 - DNA, 25 bp, Homo sapien
agcatggaggacagcttatggaaaa

SEQ ID NO: 5776210 - DNA, 25 bp, Homo sapien
gctgagcagcgaaacctgagcgagc

SEQ ID NO: 5776211 - DNA, 25 bp, Homo sapien
tttcttctttgtcatgggtgcctca

SEQ ID NO: 5776212 - DNA, 25 bp, Homo sapien
tgtgacattgacccagccttggtgg

SEQ ID NO: 5776213 - DNA, 25 bp, Homo sapien
gcagacataaaggagagcaaggaac

SEQ ID NO: 5776214 - DNA, 25 bp, Homo sapien
aggctggactggttccgcctacagg

SEQ ID NO: 5776215 - DNA, 25 bp, Homo sapien
ctgacccttcttccttttatagcat

SEQ ID NO: 5776216 - DNA, 25 bp, Homo sapien
tctcctcccactgcccatttcttat

SEQ ID NO: 5776217 - DNA, 25 bp, Homo sapien
agcagcgaaacctgagcgagcagct

SEQ ID NO: 5776218 - DNA, 25 bp, Homo sapien
ctggaaagtctgcttagacaggcaa

SEQ ID NO: 5776219 - DNA, 25 bp, Homo sapien
cactgacaatgaatcatgtatacag

SEQ ID NO: 5776220 - DNA, 25 bp, Homo sapien
ttcgaaatgcctatcgggaggtgtc

SEQ ID NO: 5776221 - DNA, 25 bp, Homo sapien
ggctacaatgccacgacccaggaga

SEQ ID NO: 5776222 - DNA, 25 bp, Homo sapien
cagacacagacatcaaggtgacctt

SEQ ID NO: 5776223 - DNA, 25 bp, Homo sapien
cgtacggccttctgagctgttggca

SEQ ID NO: 5776224 - DNA, 25 bp, Homo sapien
agcagtttgaaagggtatggcaaga

SEQ ID NO: 5776225 - DNA, 25 bp, Homo sapien
gactccgtagaaaaattgctggtgg

SEQ ID NO: 5776226 - DNA, 25 bp, Homo sapien
ccgaggacctgtttagcagtttgaa

SEQ ID NO: 5776227 - DNA, 25 bp, Homo sapien
accgcagcattgtcaccaacatgga

SEQ ID NO: 5776228 - DNA, 25 bp, Homo sapien
ctgtgctgagcagcgaaacctgagc

SEQ ID NO: 5776229 - DNA, 25 bp, Homo sapien
gctgagaaatcgtagagcagtgagg

SEQ ID NO: 5776230 - DNA, 25 bp, Homo sapien
ggagcgctggattatcattgggttt

SEQ ID NO: 5776231 - DNA, 25 bp, Homo sapien
cttcttccttttatagcattgagaa

SEQ ID NO: 5776232 - DNA, 25 bp, Homo sapien
atgtgcccagaggagtacccccacc

SEQ ID NO: 5776233 - DNA, 25 bp, Homo sapien
gacacagacatcaaggtgaccttga

SEQ ID NO: 5776234 - DNA, 25 bp, Homo sapien
ataaaggagagcaaggaacatgtaa

SEQ ID NO: 5776235 - DNA, 25 bp, Homo sapien
cagtttccctcccactccttgccac

SEQ ID NO: 5776236 - DNA, 25 bp, Homo sapien
cacaaagtcaccgaggacctgttta

SEQ ID NO: 5776237 - DNA, 25 bp, Homo sapien
atgcttccagagtcatccgcaacgc

SEQ ID NO: 5776238 - DNA, 25 bp, Homo sapien
tgcccagagaaggggagcagaactt

SEQ ID NO: 5776239 - DNA, 25 bp, Homo sapien
ttccactcccgaatgctggactccg

SEQ ID NO: 5776240 - DNA, 25 bp, Homo sapien
tgcagggctccctctacatcaccct

SEQ ID NO: 5776241 - DNA, 25 bp, Homo sapien
ggacaagccaggagctgagagtcac

SEQ ID NO: 5776242 - DNA, 25 bp, Homo sapien
tgagtgcttgaaggagtttgtcact

SEQ ID NO: 5776243 - DNA, 25 bp, Homo sapien
acctggaaagtctgcttagacaggc

SEQ ID NO: 5776244 - DNA, 25 bp, Homo sapien
atggacaagctacacctaaacttga

SEQ ID NO: 5776245 - DNA, 25 bp, Homo sapien
cttggcagaactcctgggcccctat

SEQ ID NO: 5776246 - DNA, 25 bp, Homo sapien
tggcaggagtcaaagcatacattgg

SEQ ID NO: 5776247 - DNA, 25 bp, Homo sapien
cccactgaagagccctttggacctt

SEQ ID NO: 5776248 - DNA, 25 bp, Homo sapien
tatacagtttctccgtgtttgaaca

SEQ ID NO: 5776249 - DNA, 25 bp, Homo sapien
cccctctgcacctgcatgagaaccc

SEQ ID NO: 5776250 - DNA, 25 bp, Homo sapien
aagccatcatccaggtgtctgctgc

SEQ ID NO: 5776251 - DNA, 25 bp, Homo sapien
gttggctgatgaaccgggactactg

SEQ ID NO: 5776252 - DNA, 25 bp, Homo sapien
tgtgtctgcagggctccctctacat

SEQ ID NO: 5776253 - DNA, 25 bp, Homo sapien
gacttcgggaggttttctcctccca

SEQ ID NO: 5776254 - DNA, 25 bp, Homo sapien
tggggtcactaaggagagagggtca

SEQ ID NO: 5776255 - DNA, 25 bp, Homo sapien
ttcaccactgcaactccttcctgga

SEQ ID NO: 5776256 - DNA, 25 bp, Homo sapien
aaactgaatgcctgccagtacccac

SEQ ID NO: 5776257 - DNA, 25 bp, Homo sapien
cccttcttccttttatagcattgag

SEQ ID NO: 5776258 - DNA, 25 bp, Homo sapien
ctcaggattgaggctggactggttc

SEQ ID NO: 5776259 - DNA, 25 bp, Homo sapien
atcagatccaactttagcaagccgg

SEQ ID NO: 5776260 - DNA, 25 bp, Homo sapien
gtttagcagtttgaaagggtatggc

SEQ ID NO: 5776261 - DNA, 25 bp, Homo sapien
taggtctctggtccgaagacacatc

SEQ ID NO: 5776262 - DNA, 25 bp, Homo sapien
ggggccacatgtgtgaattttacaa

SEQ ID NO: 5776263 - DNA, 25 bp, Homo sapien
tcagtatcctctcctctctgaatct

SEQ ID NO: 5776264 - DNA, 25 bp, Homo sapien
tcttctttgtcatgggtgcctcaac

SEQ ID NO: 5776265 - DNA, 25 bp, Homo sapien
ctaatctgaaagctgatacttcatc

SEQ ID NO: 5776266 - DNA, 25 bp, Homo sapien
tgaggcaggctgggagcatggagga

SEQ ID NO: 5776267 - DNA, 25 bp, Homo sapien
ctgggccaggagactgacaagctta

SEQ ID NO: 5776268 - DNA, 25 bp, Homo sapien
ccactgcaactccttcctggaagag

SEQ ID NO: 5776269 - DNA, 25 bp, Homo sapien
atgctcttgtgctcagtgacatcat

SEQ ID NO: 5776270 - DNA, 25 bp, Homo sapien
cttagacaggcaagcagtgggacca

SEQ ID NO: 5776271 - DNA, 25 bp, Homo sapien
tcacctcaaggaatttctggtggtg

SEQ ID NO: 5776272 - DNA, 25 bp, Homo sapien
caggagatcgtacggccttctgagc

SEQ ID NO: 5776273 - DNA, 25 bp, Homo sapien
agaggaggagtccatcatcatgtcc

SEQ ID NO: 5776274 - DNA, 25 bp, Homo sapien
tctggtccgaagacacatcaaagtg

SEQ ID NO: 5776275 - DNA, 25 bp, Homo sapien
ggccacatgtgtgaattttacaatg

SEQ ID NO: 5776276 - DNA, 25 bp, Homo sapien
ttctgcggatggcagtgaaggagct

SEQ ID NO: 5776277 - DNA, 25 bp, Homo sapien
ttcatcttcgtatctttgagaagat

SEQ ID NO: 5776278 - DNA, 25 bp, Homo sapien
agtgacatcattcagaacttgtctg

SEQ ID NO: 5776279 - DNA, 25 bp, Homo sapien
gtcactaaggagagagggtcaggag

SEQ ID NO: 5776280 - DNA, 25 bp, Homo sapien
atctgtgctgagcagcgaaacctga

SEQ ID NO: 5776281 - DNA, 25 bp, Homo sapien
accaaagccatcatccaggtgtctg

SEQ ID NO: 5776282 - DNA, 25 bp, Homo sapien
agtcatccgcaacgccctcctgcag

SEQ ID NO: 5776283 - DNA, 25 bp, Homo sapien
tgggagcatggaggacagcttatgg

SEQ ID NO: 5776284 - DNA, 25 bp, Homo sapien
tgccattgctaatctgaaagctgat

SEQ ID NO: 5776285 - DNA, 25 bp, Homo sapien
cctgagcgagcagcttctacctaag

SEQ ID NO: 5776286 - DNA, 25 bp, Homo sapien
ttttgggtgcagatgcttccagagt

SEQ ID NO: 5776287 - DNA, 25 bp, Homo sapien
ggtcttcaccactgcaactccttcc

SEQ ID NO: 5776288 - DNA, 25 bp, Homo sapien
atactatcttcccttctgagtacct

SEQ ID NO: 5776289 - DNA, 25 bp, Homo sapien
agcgctggattatcattgggtttct

SEQ ID NO: 5776290 - DNA, 25 bp, Homo sapien
acagaactggcactgacaatgaatc

SEQ ID NO: 5776291 - DNA, 25 bp, Homo sapien
ttcttatgggtcccattgagtgctt

SEQ ID NO: 5776292 - DNA, 25 bp, Homo sapien
cacactctacacaaactggtacctg

SEQ ID NO: 5776293 - DNA, 25 bp, Homo sapien
gaggacagcttatggaaaaagttag

SEQ ID NO: 5776294 - DNA, 25 bp, Homo sapien
tttagcaagccggacttgatggctt

SEQ ID NO: 5776295 - DNA, 25 bp, Homo sapien
cttgccatagtggaagctgtggtca

SEQ ID NO: 5776296 - DNA, 25 bp, Homo sapien
ttctttgtcatgggtgcctcaactc

SEQ ID NO: 5776297 - DNA, 25 bp, Homo sapien
ctgagagtcaccggaagaaccgcag

SEQ ID NO: 5776298 - DNA, 25 bp, Homo sapien
aacttctgatctgtctactttctgc

SEQ ID NO: 5776299 - DNA, 25 bp, Homo sapien
tgatctgtctactttctgctttcat

SEQ ID NO: 5776300 - DNA, 25 bp, Homo sapien
tccatttctctgctcatgcgcttgg

SEQ ID NO: 5776301 - DNA, 25 bp, Homo sapien
agctacttttcttgttggaggggat

SEQ ID NO: 5776302 - DNA, 25 bp, Homo sapien
ccatttcttatgggtcccattgagt

SEQ ID NO: 5776303 - DNA, 25 bp, Homo sapien
tgctcttgatctttctggcagtttc

SEQ ID NO: 5776304 - DNA, 25 bp, Homo sapien
ccagactcaacagagccattgtgtg

SEQ ID NO: 5776305 - DNA, 25 bp, Homo sapien
ccagagtcatccgcaacgccctcct

SEQ ID NO: 5776306 - DNA, 25 bp, Homo sapien
tggagactgtgttggctgatgaacc

SEQ ID NO: 5776307 - DNA, 25 bp, Homo sapien
gcagctgggccaggagactgacaag

SEQ ID NO: 5776308 - DNA, 25 bp, Homo sapien
tgctggagtcctgtttcccttatgt

SEQ ID NO: 5776309 - DNA, 25 bp, Homo sapien
actcccagaaaaggagagcccgaga

SEQ ID NO: 5776310 - DNA, 25 bp, Homo sapien
tgagatgcgggccttggcagaactc

SEQ ID NO: 5776311 - DNA, 25 bp, Homo sapien
gctaaagcgcatgaccatcattggg

SEQ ID NO: 5776312 - DNA, 25 bp, Homo sapien
tcactccagacacagacatcaaggt

SEQ ID NO: 5776313 - DNA, 25 bp, Homo sapien
ctggcccagtttttgggtgcagatg

SEQ ID NO: 5776314 - DNA, 25 bp, Homo sapien
tgcaactccttcctggaagagttgg

SEQ ID NO: 5776315 - DNA, 25 bp, Homo sapien
aaatcgtagagcagtgaggcaggct

SEQ ID NO: 5776316 - DNA, 25 bp, Homo sapien
ctgtgttggctgatgaaccgggact

SEQ ID NO: 5776317 - DNA, 25 bp, Homo sapien
tgaccctggacatgctggagtcctg

SEQ ID NO: 5776318 - DNA, 25 bp, Homo sapien
ttcctaaacccttgccatagtggaa

SEQ ID NO: 5776319 - DNA, 25 bp, Homo sapien
cttgaccaaagccatcatccaggtg

SEQ ID NO: 5776320 - DNA, 25 bp, Homo sapien
gtgcccagaggagtacccccacctc

SEQ ID NO: 5776321 - DNA, 25 bp, Homo sapien
gggccaggagactgacaagcttaaa

SEQ ID NO: 5776322 - DNA, 25 bp, Homo sapien
cgagaatccatttctctgctcatgc

SEQ ID NO: 5776323 - DNA, 25 bp, Homo sapien
atcgtacggccttctgagctgttgg

SEQ ID NO: 5776324 - DNA, 25 bp, Homo sapien
ggcaatttctgcggatggcagtgaa

SEQ ID NO: 5776325 - DNA, 25 bp, Homo sapien
ggtgcctcaactccaatagccagtg

SEQ ID NO: 5776326 - DNA, 25 bp, Homo sapien
tggacatgctggagtcctgtttccc

SEQ ID NO: 5776327 - DNA, 25 bp, Homo sapien
ggggctgaaaatgtgctaaagcgca

SEQ ID NO: 5776328 - DNA, 25 bp, Homo sapien
ccacacagagaatgtcaccaagaca

SEQ ID NO: 5776329 - DNA, 25 bp, Homo sapien
ttccctcccactccttgccactgac

SEQ ID NO: 5776330 - DNA, 25 bp, Homo sapien
aatgtcaccaagacaaagacacctg

SEQ ID NO: 5776331 - DNA, 25 bp, Homo sapien
tggtttcatacagtcactggcccag

SEQ ID NO: 5776332 - DNA, 25 bp, Homo sapien
gaaaaagttagggcgtggggccaca

SEQ ID NO: 5776333 - DNA, 25 bp, Homo sapien
tgaaactcacctcaaggaatttctg

SEQ ID NO: 5776334 - DNA, 25 bp, Homo sapien
tgatgaggtcacctggctggttcgc

SEQ ID NO: 5776335 - DNA, 25 bp, Homo sapien
ctctttttgctttcatggccctgtc

SEQ ID NO: 5776336 - DNA, 25 bp, Homo sapien
ggaatataaggtggcctgcctgctc

SEQ ID NO: 5776337 - DNA, 25 bp, Homo sapien
tggccaagcagaccagcaattgcgt

SEQ ID NO: 5776338 - DNA, 25 bp, Homo sapien
ggagctgagagtcaccggaagaacc

SEQ ID NO: 5776339 - DNA, 25 bp, Homo sapien
tttgccatgaccttggaggaatctg

SEQ ID NO: 5776340 - DNA, 25 bp, Homo sapien
tgtgacctctcagattgtggagctg

SEQ ID NO: 5776341 - DNA, 25 bp, Homo sapien
acactagcgtggctaaggcccctct

SEQ ID NO: 5776342 - DNA, 25 bp, Homo sapien
gcctacaggcatacactagcgtggc

SEQ ID NO: 5776343 - DNA, 25 bp, Homo sapien
gacatcaaggtgaccttgagtatct

SEQ ID NO: 5776344 - DNA, 25 bp, Homo sapien
cagccacctggaggccagactcaac

SEQ ID NO: 5776345 - DNA, 25 bp, Homo sapien
caactccttcctggaagagttggcc

SEQ ID NO: 5776346 - DNA, 25 bp, Homo sapien
cgagagggacaagccaggagctgag

SEQ ID NO: 5776347 - DNA, 25 bp, Homo sapien
ttgaacatactatcttcccttctga

SEQ ID NO: 5776348 - DNA, 25 bp, Homo sapien
gttacaacaacaatattcattgctt

SEQ ID NO: 5776349 - DNA, 25 bp, Homo sapien
ccatggcccaagagggacttcggga

SEQ ID NO: 5776350 - DNA, 25 bp, Homo sapien
tctcaaacaagttgataatggagaa

SEQ ID NO: 5776351 - DNA, 25 bp, Homo sapien
ctggctggttcgccacacagagaat

SEQ ID NO: 5776352 - DNA, 25 bp, Homo sapien
gaaaatgtgctaaagcgcatgacca

SEQ ID NO: 5776353 - DNA, 25 bp, Homo sapien
gctgatgaaccgggactactgggtc

SEQ ID NO: 5776354 - DNA, 25 bp, Homo sapien
agcattgcagagctacttttcttgt

SEQ ID NO: 5776355 - DNA, 25 bp, Homo sapien
ccatgcaggccttcgtcagcctgcc

SEQ ID NO: 5776356 - DNA, 25 bp, Homo sapien
taatggagcgctggattatcattgg

SEQ ID NO: 5776357 - DNA, 25 bp, Homo sapien
cattgtgtggctggctggctacaat

SEQ ID NO: 5776358 - DNA, 25 bp, Homo sapien
cgccacacagagaatgtcaccaaga

SEQ ID NO: 5776359 - DNA, 25 bp, Homo sapien
gacaggcaagcagtgggaccatcat

SEQ ID NO: 5776360 - DNA, 25 bp, Homo sapien
tttgaattctcaggattgaggctgg

SEQ ID NO: 5776361 - DNA, 25 bp, Homo sapien
gagcagatctgtggaagaacaatcc

SEQ ID NO: 5776362 - DNA, 25 bp, Homo sapien
cttctgagtacctcagcagccacct

SEQ ID NO: 5776363 - DNA, 25 bp, Homo sapien
cactccttgccactgacccttcttc

SEQ ID NO: 5776364 - DNA, 25 bp, Homo sapien
gccaaggtgatgaacctcattgtct

SEQ ID NO: 5776365 - DNA, 25 bp, Homo sapien
gtgtttgaacatactatcttccctt

SEQ ID NO: 5776366 - DNA, 25 bp, Homo sapien
acatggacatacttgttcagatcag

SEQ ID NO: 5776367 - DNA, 25 bp, Homo sapien
ctctcagattgtggagctgaagaag

SEQ ID NO: 5776368 - DNA, 25 bp, Homo sapien
agtaatggagcgctggattatcatt

SEQ ID NO: 5776369 - DNA, 25 bp, Homo sapien
actatgctgactcgagcattgcaga

SEQ ID NO: 5776370 - DNA, 25 bp, Homo sapien
ggtcactttcgcagggggtgggaat

SEQ ID NO: 5776371 - DNA, 25 bp, Homo sapien
ctttgtcatgggtgcctcaactcca

SEQ ID NO: 5776372 - DNA, 25 bp, Homo sapien
tgcgcttggtggtggaggagtcatc

SEQ ID NO: 5776373 - DNA, 25 bp, Homo sapien
tgaccttgagtatctttgagctggc

SEQ ID NO: 5776374 - DNA, 25 bp, Homo sapien
ggacctgtttagcagtttgaaaggg

SEQ ID NO: 5776375 - DNA, 25 bp, Homo sapien
ctccccagccatgcaggccttcgtc

SEQ ID NO: 5776376 - DNA, 25 bp, Homo sapien
tagccagtgccagaagctgtggaag

SEQ ID NO: 5776377 - DNA, 25 bp, Homo sapien
ttgcagctgggccaggagactgaca

SEQ ID NO: 5776378 - DNA, 25 bp, Homo sapien
gtggagctgaagaagctggtggtgg

SEQ ID NO: 5776379 - DNA, 25 bp, Homo sapien
tgctttccccctgatttgtgctcac

SEQ ID NO: 5776380 - DNA, 25 bp, Homo sapien
gttggaggggattaggtctctggtc

SEQ ID NO: 5776381 - DNA, 25 bp, Homo sapien
acatcaaagtgatacagcaatacca

SEQ ID NO: 5776382 - DNA, 25 bp, Homo sapien
ggaagcagaggcagactcccagaaa

SEQ ID NO: 5776383 - DNA, 25 bp, Homo sapien
gacccaggagatcgtacggccttct

SEQ ID NO: 5776384 - DNA, 25 bp, Homo sapien
aggcatacactagcgtggctaaggc

SEQ ID NO: 5776385 - DNA, 25 bp, Homo sapien
attgctttccccctgatttgtgctc

SEQ ID NO: 5776386 - DNA, 25 bp, Homo sapien
cctgtggggaacagacaatcaccac

SEQ ID NO: 5776387 - DNA, 25 bp, Homo sapien
ttcattcgtgatgaggtcacctggc

SEQ ID NO: 5776388 - DNA, 25 bp, Homo sapien
cttcgtcagcctgcccagagaaggg

SEQ ID NO: 5776389 - DNA, 25 bp, Homo sapien
aaaagttagggcgtggggccacatg

SEQ ID NO: 5776390 - DNA, 25 bp, Homo sapien
ccctcccactccttgccactgaccc

SEQ ID NO: 5776391 - DNA, 25 bp, Homo sapien
catctctgagatgcgggccttggca

SEQ ID NO: 5776392 - DNA, 25 bp, Homo sapien
ggtcccattgagtgcttgaaggagt

SEQ ID NO: 5776393 - DNA, 25 bp, Homo sapien
gactggttccgcctacaggcataca

SEQ ID NO: 5776394 - DNA, 25 bp, Homo sapien
accctggacatgctggagtcctgtt

SEQ ID NO: 5776395 - DNA, 25 bp, Homo sapien
gtcatgggtgcctcaactccaatag

SEQ ID NO: 5776396 - DNA, 25 bp, Homo sapien
cagtgaaggagctggagactgtgtt

SEQ ID NO: 5776397 - DNA, 25 bp, Homo sapien
agaatgtcaccaagacaaagacacc

SEQ ID NO: 5776398 - DNA, 25 bp, Homo sapien
cctgatgtggcatgtgacctctcag

SEQ ID NO: 5776399 - DNA, 25 bp, Homo sapien
agacacctgaggactatgctgactc

SEQ ID NO: 5776400 - DNA, 25 bp, Homo sapien
ggagtccatcatcatgtcctcattc

SEQ ID NO: 5776401 - DNA, 25 bp, Homo sapien
cattgagaaggatggttacaacaac

SEQ ID NO: 5776402 - DNA, 25 bp, Homo sapien
acctaagcactgtgccactacaatc

SEQ ID NO: 5776403 - DNA, 25 bp, Homo sapien
gtacctggaaagtctgcttagacag

SEQ ID NO: 5776404 - DNA, 25 bp, Homo sapien
gggtgcagatgcttccagagtcatc

SEQ ID NO: 5776405 - DNA, 25 bp, Homo sapien
gccacctggaggccagactcaacag

SEQ ID NO: 5776406 - DNA, 25 bp, Homo sapien
tataaggtggcctgcctgctcttga

SEQ ID NO: 5776407 - DNA, 25 bp, Homo sapien
gaacaatccagggctgagaaatcgt

SEQ ID NO: 5776408 - DNA, 25 bp, Homo sapien
ttgtcatgggtgcctcaactccaat

SEQ ID NO: 5776409 - DNA, 25 bp, Homo sapien
acctcaagaaccatggtcttcacca

SEQ ID NO: 5776410 - DNA, 25 bp, Homo sapien
acctaaactgaatgcctgccagtac

SEQ ID NO: 5776411 - DNA, 25 bp, Homo sapien
tagcgtggctaaggcccctctgcac

SEQ ID NO: 5776412 - DNA, 25 bp, Homo sapien
tcatcatgtcctcattcgtcagtat

SEQ ID NO: 5776413 - DNA, 25 bp, Homo sapien
attgcttgaccaaagccatcatcca

SEQ ID NO: 5776414 - DNA, 25 bp, Homo sapien
ccattgctaatctgaaagctgatac

SEQ ID NO: 5776415 - DNA, 25 bp, Homo sapien
acccttatccgtgaggatgtgctgc

SEQ ID NO: 5776416 - DNA, 25 bp, Homo sapien
atggacatacttgttcagatcagat

SEQ ID NO: 5776417 - DNA, 25 bp, Homo sapien
aggtgtgggctgtgacattgaccca

SEQ ID NO: 5776418 - DNA, 25 bp, Homo sapien
ggtcacctggctggttcgccacaca

SEQ ID NO: 5776419 - DNA, 25 bp, Homo sapien
agactcaacagagccattgtgtggc

SEQ ID NO: 5776420 - DNA, 25 bp, Homo sapien
gaacagacaatcaccacactctaca

SEQ ID NO: 5776421 - DNA, 25 bp, Homo sapien
gcaggctgggagcatggaggacagc

SEQ ID NO: 5776422 - DNA, 25 bp, Homo sapien
agagtggcagacataaaggagagca

SEQ ID NO: 5776423 - DNA, 25 bp, Homo sapien
agaagctggtggtggaaaacatgga

SEQ ID NO: 5776424 - DNA, 25 bp, Homo sapien
tctctgagatgcgggccttggcaga

SEQ ID NO: 5776425 - DNA, 25 bp, Homo sapien
ggccttccacctaaactgaatgcct

SEQ ID NO: 5776426 - DNA, 25 bp, Homo sapien
aagggtatggcaagagagtggcaga

SEQ ID NO: 5776427 - DNA, 25 bp, Homo sapien
cggacttgatggcttccctgctgcc

SEQ ID NO: 5776428 - DNA, 25 bp, Homo sapien
tgaggaggaatataaggtggcctgc

SEQ ID NO: 5776429 - DNA, 25 bp, Homo sapien
tgaaaacctgatgtggcatgtgacc

SEQ ID NO: 5776430 - DNA, 25 bp, Homo sapien
tgtgccactacaatcagcaaagcca

SEQ ID NO: 5776431 - DNA, 25 bp, Homo sapien
tctctggtccgaagacacatcaaag

SEQ ID NO: 5776432 - DNA, 25 bp, Homo sapien
ggattatcattgggtttcttctttg

SEQ ID NO: 5776433 - DNA, 25 bp, Homo sapien
actacaatcagcaaagccaagaaca

SEQ ID NO: 5776434 - DNA, 25 bp, Homo sapien
tggctgccattgctaatctgaaagc

SEQ ID NO: 5776435 - DNA, 25 bp, Homo sapien
ggtttcttctttgtcatgggtgcct

SEQ ID NO: 5776436 - DNA, 25 bp, Homo sapien
atggcccaagagggacttcgggagg

SEQ ID NO: 5776437 - DNA, 25 bp, Homo sapien
tcacccttatccgtgaggatgtgct

SEQ ID NO: 5776438 - DNA, 25 bp, Homo sapien
cagagttgatgagcagatctgtgga

SEQ ID NO: 5776439 - DNA, 25 bp, Homo sapien
atgaccatcattggggttatcctca

SEQ ID NO: 5776440 - DNA, 25 bp, Homo sapien
gccttctgagctgttggcaggagtc

SEQ ID NO: 5776441 - DNA, 25 bp, Homo sapien
ctaagcactgtgccactacaatcag

SEQ ID NO: 5776442 - DNA, 25 bp, Homo sapien
acaacaatattcattgcttgaccaa

SEQ ID NO: 5776443 - DNA, 25 bp, Homo sapien
aagtgatacagcaataccaccttca

SEQ ID NO: 5776444 - DNA, 25 bp, Homo sapien
tgatgagcagatctgtggaagaaca

SEQ ID NO: 5776445 - DNA, 25 bp, Homo sapien
ctggtggtggcctctgtcagcctct

SEQ ID NO: 5776446 - DNA, 25 bp, Homo sapien
tggaggagtcatccttcctgaccct

SEQ ID NO: 5776447 - DNA, 25 bp, Homo sapien
caagcagaccagcaattgcgtcctg

SEQ ID NO: 5776448 - DNA, 25 bp, Homo sapien
atccaggtgtctgctgccctcttca

SEQ ID NO: 5776449 - DNA, 25 bp, Homo sapien
aggtgtctcgggccttccacctaaa

SEQ ID NO: 5776450 - DNA, 25 bp, Homo sapien
atggcagtgaaggagctggagactg

SEQ ID NO: 5776451 - DNA, 25 bp, Homo sapien
ccatgaccttggaggaatctgccat

SEQ ID NO: 5776452 - DNA, 25 bp, Homo sapien
tggtggcctctgtcagcctcttgca

SEQ ID NO: 5776453 - DNA, 25 bp, Homo sapien
atttctggtggtggcctctgtcagc

SEQ ID NO: 5776454 - DNA, 25 bp, Homo sapien
caggaagcagaggcagactcccaga

SEQ ID NO: 5776455 - DNA, 25 bp, Homo sapien
cacctgcatgagaaccctgacttag

SEQ ID NO: 5776456 - DNA, 25 bp, Homo sapien
caggggctgaaaatgtgctaaagcg

SEQ ID NO: 5776457 - DNA, 25 bp, Homo sapien
tcaaacaagttgataatggagaaaa

SEQ ID NO: 5776458 - DNA, 25 bp, Homo sapien
acgacccaggagatcgtacggcctt

SEQ ID NO: 5776459 - DNA, 25 bp, Homo sapien
aagctgtgtctgcagggctccctct

SEQ ID NO: 5776460 - DNA, 25 bp, Homo sapien
cagtgggaccatcatcctctcccca

SEQ ID NO: 5776461 - DNA, 25 bp, Homo sapien
agtcctgtttcccttatgtcctgct

SEQ ID NO: 5776462 - DNA, 25 bp, Homo sapien
tctgctgcaggtgtgggctgtgaca

SEQ ID NO: 5776463 - DNA, 25 bp, Homo sapien
ggaagagttggccaagcagaccagc

SEQ ID NO: 5776464 - DNA, 25 bp, Homo sapien
gcagtgaggcaggctgggagcatgg

SEQ ID NO: 5776465 - DNA, 25 bp, Homo sapien
gctgtgtctgcagggctccctctac

SEQ ID NO: 5776466 - DNA, 25 bp, Homo sapien
gctgccctcttcacgctctacaaca

SEQ ID NO: 5776467 - DNA, 25 bp, Homo sapien
aacaatattcattgcttgaccaaag

SEQ ID NO: 5776468 - DNA, 25 bp, Homo sapien
gcagagctacttttcttgttggagg

SEQ ID NO: 5776469 - DNA, 25 bp, Homo sapien
aattctcaggattgaggctggactg

SEQ ID NO: 5776470 - DNA, 25 bp, Homo sapien
caccggaagaaccgcagcattgtca

SEQ ID NO: 5776471 - DNA, 25 bp, Homo sapien
agacataaaggagagcaaggaacat

SEQ ID NO: 5776472 - DNA, 25 bp, Homo sapien
ccagaaatcgagaatccatttctct

SEQ ID NO: 5776473 - DNA, 25 bp, Homo sapien
acatggacaagctacacctaaactt

SEQ ID NO: 5776474 - DNA, 25 bp, Homo sapien
caacaagaacattgaaactcacctc

SEQ ID NO: 5776475 - DNA, 25 bp, Homo sapien
gtggccagtttcattgtcaacggcg

SEQ ID NO: 5776476 - DNA, 25 bp, Homo sapien
ccggaagaaccgcagcattgtcacc

SEQ ID NO: 5776477 - DNA, 25 bp, Homo sapien
ctggcagtttccctcccactccttg

SEQ ID NO: 5776478 - DNA, 25 bp, Homo sapien
ggttatcctcagtttcagggccatg

SEQ ID NO: 5776479 - DNA, 25 bp, Homo sapien
tcagtgcagaggagttctctgacat

SEQ ID NO: 5776480 - DNA, 25 bp, Homo sapien
catgagaaccctgacttagccaagg

SEQ ID NO: 5776481 - DNA, 25 bp, Homo sapien
ccatggtcttcaccactgcaactcc

SEQ ID NO: 5776482 - DNA, 25 bp, Homo sapien
cattgcagagctacttttcttgttg

SEQ ID NO: 5776483 - DNA, 25 bp, Homo sapien
attatcattgggtttcttctttgtc

SEQ ID NO: 5776484 - DNA, 25 bp, Homo sapien
gaagctgtggtcactttcgcagggg

SEQ ID NO: 5776485 - DNA, 25 bp, Homo sapien
ccttatccgtgaggatgtgctgcag

SEQ ID NO: 5776486 - DNA, 25 bp, Homo sapien
tagacaggcaagcagtgggaccatc

SEQ ID NO: 5776487 - DNA, 25 bp, Homo sapien
ctcatgcgcttggtggtggaggagt

SEQ ID NO: 5776488 - DNA, 25 bp, Homo sapien
aatgcctgccagtacccactgaaga

SEQ ID NO: 5776489 - DNA, 25 bp, Homo sapien
catcttcgtatctttgagaagatgt

SEQ ID NO: 5776490 - DNA, 25 bp, Homo sapien
gctttcatggccctgtccttcattc

SEQ ID NO: 5776491 - DNA, 25 bp, Homo sapien
aacatgtaattgcaaacagtggcca

SEQ ID NO: 5776492 - DNA, 25 bp, Homo sapien
tctttgagaagatgtttgccatgac

SEQ ID NO: 5776493 - DNA, 25 bp, Homo sapien
cagggctgagaaatcgtagagcagt

SEQ ID NO: 5776494 - DNA, 25 bp, Homo sapien
gtggtggaggagtcatccttcctga

SEQ ID NO: 5776495 - DNA, 25 bp, Homo sapien
gcaggtgtgggctgtgacattgacc

SEQ ID NO: 5776496 - DNA, 25 bp, Homo sapien
gctccctctacatcacccttatccg

SEQ ID NO: 5776497 - DNA, 25 bp, Homo sapien
cattcagaacttgtctgtgtgtcca

SEQ ID NO: 5776498 - DNA, 25 bp, Homo sapien
gtacccccacctcaagaaccatggt

SEQ ID NO: 5776499 - DNA, 25 bp, Homo sapien
tcaactccaatagccagtgccagaa

SEQ ID NO: 5776500 - DNA, 25 bp, Homo sapien
gaagttcctgagtgaaaacctgatg

SEQ ID NO: 5776501 - DNA, 25 bp, Homo sapien
tgtcagcctcttgcagctgggccag

SEQ ID NO: 5776502 - DNA, 25 bp, Homo sapien
agctgtggtcactttcgcagggggt

SEQ ID NO: 5776503 - DNA, 25 bp, Homo sapien
gtgtggctggctggctacaatgcca

SEQ ID NO: 5776504 - DNA, 25 bp, Homo sapien
ctgcaggtgtgggctgtgacattga

SEQ ID NO: 5776505 - DNA, 25 bp, Homo sapien
atgtgctaaagcgcatgaccatcat

SEQ ID NO: 5776506 - DNA, 25 bp, Homo sapien
tctttgagctggcatctgctgcagg

SEQ ID NO: 5776507 - DNA, 25 bp, Homo sapien
cgtatctttgagaagatgtttgcca

SEQ ID NO: 5776508 - DNA, 25 bp, Homo sapien
tttgtcactccagacacagacatca

SEQ ID NO: 5776509 - DNA, 25 bp, Homo sapien
tgcaggtgcacaaagtcaccgagga

SEQ ID NO: 5776510 - DNA, 25 bp, Homo sapien
ccgtgaggatgtgctgcaggtgcac

SEQ ID NO: 5776511 - DNA, 25 bp, Homo sapien
acaatgccacgacccaggagatcgt

SEQ ID NO: 5776512 - DNA, 25 bp, Homo sapien
ccagccatgcaggccttcgtcagcc

SEQ ID NO: 5776513 - DNA, 25 bp, Homo sapien
cctatggcatgaagttcctgagtga

SEQ ID NO: 5776514 - DNA, 25 bp, Homo sapien
ctactttctgctttcatcttcgtat

SEQ ID NO: 5776515 - DNA, 25 bp, Homo sapien
tgaaaaaaggagtaacgtacaagta

SEQ ID NO: 5776516 - DNA, 25 bp, Homo sapien
ggcctctgtcagcctcttgcagctg

SEQ ID NO: 5776517 - DNA, 25 bp, Homo sapien
tgaaagctgatacttcatctcctga

SEQ ID NO: 5776518 - DNA, 25 bp, Homo sapien
ctttctggcagtttccctcccactc

SEQ ID NO: 5776519 - DNA, 25 bp, Homo sapien
ctgaggactatgctgactcgagcat

SEQ ID NO: 5776520 - DNA, 25 bp, Homo sapien
caggattgaggctggactggttccg

SEQ ID NO: 5776521 - DNA, 25 bp, Homo sapien
ccttcattcgtgatgaggtcacctg

SEQ ID NO: 5776522 - DNA, 25 bp, Homo sapien
tatgtcctgcttcgaaatgcctatc

SEQ ID NO: 5776523 - DNA, 25 bp, Homo sapien
gcgttatgccattgctttccccctg

SEQ ID NO: 5776524 - DNA, 25 bp, Homo sapien
cttatgtcctgcttcgaaatgccta

SEQ ID NO: 5776525 - DNA, 25 bp, Homo sapien
gagtcaccggaagaaccgcagcatt

SEQ ID NO: 5776526 - DNA, 25 bp, Homo sapien
tcttgtgctcagtgacatcattcag

SEQ ID NO: 5776527 - DNA, 25 bp, Homo sapien
cctctctgaatctcaaacaagttga

SEQ ID NO: 5776528 - DNA, 25 bp, Homo sapien
gcgcatgaccatcattggggttatc

SEQ ID NO: 5776529 - DNA, 25 bp, Homo sapien
agagagggtcaggagccagagttga

SEQ ID NO: 5776530 - DNA, 25 bp, Homo sapien
tcagatcagatccaactttagcaag

SEQ ID NO: 5776531 - DNA, 25 bp, Homo sapien
accttcagtacttggcaagatttga

SEQ ID NO: 5776532 - DNA, 25 bp, Homo sapien
gtccgaagacacatcaaagtgatac

SEQ ID NO: 5776533 - DNA, 25 bp, Homo sapien
catgtgacctctcagattgtggagc

SEQ ID NO: 5776534 - DNA, 25 bp, Homo sapien
gatacttcatctcctgaggaggaat

SEQ ID NO: 5776535 - DNA, 25 bp, Homo sapien
tgagcgagcagcttctacctaagca

SEQ ID NO: 5776536 - DNA, 25 bp, Homo sapien
tcctctccccagccatgcaggcctt

SEQ ID NO: 5776537 - DNA, 25 bp, Homo sapien
gctcttgtgctcagtgacatcattc

SEQ ID NO: 5776538 - DNA, 25 bp, Homo sapien
aaggtgaccttgagtatctttgagc

SEQ ID NO: 5776539 - DNA, 25 bp, Homo sapien
tggaagctgtggtcactttcgcagg

SEQ ID NO: 5776540 - DNA, 25 bp, Homo sapien
gttagggcgtggggccacatgtgtg

SEQ ID NO: 5776541 - DNA, 25 bp, Homo sapien
atgagcagatctgtggaagaacaat

SEQ ID NO: 5776542 - DNA, 25 bp, Homo sapien
gaagctgtggaagctgtgtctgcag

SEQ ID NO: 5776543 - DNA, 25 bp, Homo sapien
cccagctgacaggggctgaaaatgt

SEQ ID NO: 5776544 - DNA, 25 bp, Homo sapien
cagcagacacaaccactggattcct

SEQ ID NO: 5776545 - DNA, 25 bp, Homo sapien
gcagactcccagaaaaggagagccc

SEQ ID NO: 5776546 - DNA, 25 bp, Homo sapien
tatgccattgctttccccctgattt

SEQ ID NO: 5776547 - DNA, 25 bp, Homo sapien
cgcagcattgtcaccaacatggaca

SEQ ID NO: 5776548 - DNA, 25 bp, Homo sapien
cagaccagcaattgcgtcctggaga

SEQ ID NO: 5776549 - DNA, 25 bp, Homo sapien
acaggcatacactagcgtggctaag

SEQ ID NO: 5776550 - DNA, 25 bp, Homo sapien
acagagaatgtcaccaagacaaaga

SEQ ID NO: 5776551 - DNA, 25 bp, Homo sapien
actgacaagcttaaaaccagaaatc

SEQ ID NO: 5776552 - DNA, 25 bp, Homo sapien
gatgtttgccatgaccttggaggaa

SEQ ID NO: 5776553 - DNA, 25 bp, Homo sapien
tgcatgagaaccctgacttagccaa

SEQ ID NO: 5776554 - DNA, 25 bp, Homo sapien
ggctggttcgccacacagagaatgt

SEQ ID NO: 5776555 - DNA, 25 bp, Homo sapien
tgcctcaactccaatagccagtgcc

SEQ ID NO: 5776556 - DNA, 25 bp, Homo sapien
tgaccaaagccatcatccaggtgtc

SEQ ID NO: 5776557 - DNA, 25 bp, Homo sapien
ggaggaatctgccatgttgcgttat

SEQ ID NO: 5776558 - DNA, 25 bp, Homo sapien
ggagatcgtacggccttctgagctg

SEQ ID NO: 5776559 - DNA, 25 bp, Homo sapien
tgccactacaatcagcaaagccaag

SEQ ID NO: 5776560 - DNA, 25 bp, Homo sapien
agtggcagacataaaggagagcaag

SEQ ID NO: 5776561 - DNA, 25 bp, Homo sapien
ggctctttttgctttcatggccctg

SEQ ID NO: 5776562 - DNA, 25 bp, Homo sapien
agtgcagaggagttctctgacatct

SEQ ID NO: 5776563 - DNA, 25 bp, Homo sapien
ggcatgtgacctctcagattgtgga

SEQ ID NO: 5776564 - DNA, 25 bp, Homo sapien
ggatggcagtgaaggagctggagac

SEQ ID NO: 5776565 - DNA, 25 bp, Homo sapien
ggcactgacaatgaatcatgtatac

SEQ ID NO: 5776566 - DNA, 25 bp, Homo sapien
cctgcatgagaaccctgacttagcc

SEQ ID NO: 5776567 - DNA, 25 bp, Homo sapien
ttgtccactgcactcatgagatgtg

SEQ ID NO: 5776568 - DNA, 25 bp, Homo sapien
ggagttctctgacatctctgagatg

SEQ ID NO: 5776569 - DNA, 25 bp, Homo sapien
ccagccttggtggctgccattgcta

SEQ ID NO: 5776570 - DNA, 25 bp, Homo sapien
atggcttccctgctgccccagctga

SEQ ID NO: 5776571 - DNA, 25 bp, Homo sapien
acattgaaactcacctcaaggaatt

SEQ ID NO: 5776572 - DNA, 25 bp, Homo sapien
cgtcctggagatctgtgctgagcag

SEQ ID NO: 5776573 - DNA, 25 bp, Homo sapien
gcagatctgtggaagaacaatccag

SEQ ID NO: 5776574 - DNA, 25 bp, Homo sapien
tcaccacactctacacaaactggta

SEQ ID NO: 5776575 - DNA, 25 bp, Homo sapien
cctaaacttgacagaactggcactg

SEQ ID NO: 5776576 - DNA, 25 bp, Homo sapien
tttgagctggcatctgctgcaggtg

SEQ ID NO: 5776577 - DNA, 25 bp, Homo sapien
gatggttacaacaacaatattcatt

SEQ ID NO: 5776578 - DNA, 25 bp, Homo sapien
acacctgaggactatgctgactcga

SEQ ID NO: 5776579 - DNA, 25 bp, Homo sapien
tgccctcttcacgctctacaacaag

SEQ ID NO: 5776580 - DNA, 25 bp, Homo sapien
aaactggtacctggaaagtctgctt

SEQ ID NO: 5776581 - DNA, 25 bp, Homo sapien
atacactagcgtggctaaggcccct

SEQ ID NO: 5776582 - DNA, 25 bp, Homo sapien
gaatctgccatgttgcgttatgcca

SEQ ID NO: 5776583 - DNA, 25 bp, Homo sapien
atgcctatcgggaggtgtctcgggc

SEQ ID NO: 5776584 - DNA, 25 bp, Homo sapien
agctgtggaagctgtgtctgcaggg

SEQ ID NO: 5776585 - DNA, 25 bp, Homo sapien
gccactgacccttcttccttttata

SEQ ID NO: 5776586 - DNA, 25 bp, Homo sapien
ggagtttgtcactccagacacagac

SEQ ID NO: 5776587 - DNA, 25 bp, Homo sapien
ccctcctgcagcagacacaaccact

SEQ ID NO: 5776588 - DNA, 25 bp, Homo sapien
tttgatgctcttgtgctcagtgaca

SEQ ID NO: 5776589 - DNA, 25 bp, Homo sapien
gatttgtgctcactttgtccactgc

SEQ ID NO: 5776590 - DNA, 25 bp, Homo sapien
ccactacaatcagcaaagccaagaa

SEQ ID NO: 5776591 - DNA, 25 bp, Homo sapien
gctgccattgctaatctgaaagctg

SEQ ID NO: 5776592 - DNA, 25 bp, Homo sapien
ttcccttatgtcctgcttcgaaatg

SEQ ID NO: 5776593 - DNA, 25 bp, Homo sapien
acaaagacacctgaggactatgctg

SEQ ID NO: 5776594 - DNA, 25 bp, Homo sapien
acattgacccagccttggtggctgc

SEQ ID NO: 5776595 - DNA, 25 bp, Homo sapien
ggccctgtccttcattcgtgatgag

SEQ ID NO: 5776596 - DNA, 25 bp, Homo sapien
gcaggccttcgtcagcctgcccaga

SEQ ID NO: 5776597 - DNA, 25 bp, Homo sapien
cttgagtatctttgagctggcatct

SEQ ID NO: 5776598 - DNA, 25 bp, Homo sapien
ctggattatcattgggtttcttctt

SEQ ID NO: 5776599 - DNA, 25 bp, Homo sapien
gaaacttctgatctgtctactttct

SEQ ID NO: 5776600 - DNA, 25 bp, Homo sapien
cagaacttgtctgtgtgtccagagg

SEQ ID NO: 5776601 - DNA, 25 bp, Homo sapien
gggtatggcaagagagtggcagaca

SEQ ID NO: 5776602 - DNA, 25 bp, Homo sapien
gagctggagactgtgttggctgatg

SEQ ID NO: 5776603 - DNA, 25 bp, Homo sapien
gggagcagaacttcagtgcagagga

SEQ ID NO: 5776604 - DNA, 25 bp, Homo sapien
ctcgggccttccacctaaactgaat

SEQ ID NO: 5776605 - DNA, 25 bp, Homo sapien
ctttttgctttcatggccctgtcct

SEQ ID NO: 5776606 - DNA, 25 bp, Homo sapien
ggctgaaaatgtgctaaagcgcatg

SEQ ID NO: 5776607 - DNA, 25 bp, Homo sapien
caatgaatcatgtatacagtttctc

SEQ ID NO: 5776608 - DNA, 25 bp, Homo sapien
tatcattgggtttcttctttgtcat

SEQ ID NO: 5776609 - DNA, 25 bp, Homo sapien
ctcctgcagcagacacaaccactgg

SEQ ID NO: 5776610 - DNA, 25 bp, Homo sapien
caaggaatttctggtggtggcctct

SEQ ID NO: 5776611 - DNA, 25 bp, Homo sapien
catacagtcactggcccagtttttg

SEQ ID NO: 5776612 - DNA, 25 bp, Homo sapien
cgtcagtatcctctcctctctgaat

SEQ ID NO: 5776613 - DNA, 25 bp, Homo sapien
tgtggaagtaatggagcgctggatt

SEQ ID NO: 5776614 - DNA, 25 bp, Homo sapien
aaaggagagcaaggaacatgtaatt

SEQ ID NO: 5776615 - DNA, 25 bp, Homo sapien
caagaaccatggtcttcaccactgc

SEQ ID NO: 5776616 - DNA, 25 bp, Homo sapien
agaaccatggtcttcaccactgcaa

SEQ ID NO: 5776617 - DNA, 25 bp, Homo sapien
tgagctgttggcaggagtcaaagca

SEQ ID NO: 5776618 - DNA, 25 bp, Homo sapien
acacagagaatgtcaccaagacaaa

SEQ ID NO: 5776619 - DNA, 25 bp, Homo sapien
tcaacagagccattgtgtggctggc

SEQ ID NO: 5776620 - DNA, 25 bp, Homo sapien
gtggtcactttcgcagggggtggga

SEQ ID NO: 5776621 - DNA, 25 bp, Homo sapien
tatggcatgaagttcctgagtgaaa

SEQ ID NO: 5776622 - DNA, 25 bp, Homo sapien
ttcctgagtgaaaacctgatgtggc

SEQ ID NO: 5776623 - DNA, 25 bp, Homo sapien
ccatcattggggttatcctcagttt

SEQ ID NO: 5776624 - DNA, 25 bp, Homo sapien
aagagttggccaagcagaccagcaa

SEQ ID NO: 5776625 - DNA, 25 bp, Homo sapien
accttgagtatctttgagctggcat

SEQ ID NO: 5776626 - DNA, 25 bp, Homo sapien
aggtgtctgctgccctcttcacgct

SEQ ID NO: 5776627 - DNA, 25 bp, Homo sapien
ttgtgtggctggctggctacaatgc

SEQ ID NO: 5776628 - DNA, 25 bp, Homo sapien
caactttagcaagccggacttgatg

SEQ ID NO: 5776629 - DNA, 25 bp, Homo sapien
atgaatcatgtatacagtttctccg

SEQ ID NO: 5776630 - DNA, 25 bp, Homo sapien
atctgccatgttgcgttatgccatt

SEQ ID NO: 5776631 - DNA, 25 bp, Homo sapien
caatcagcaaagccaagaacaagaa

SEQ ID NO: 5776632 - DNA, 25 bp, Homo sapien
gaaaaccaggaagcagaggcagact

SEQ ID NO: 5776633 - DNA, 25 bp, Homo sapien
cactaaggagagagggtcaggagcc

SEQ ID NO: 5776634 - DNA, 25 bp, Homo sapien
tgacagaactggcactgacaatgaa

SEQ ID NO: 5776635 - DNA, 25 bp, Homo sapien
ttctggcagtttccctcccactcct

SEQ ID NO: 5776636 - DNA, 25 bp, Homo sapien
gtttctccgtgtttgaacatactat

SEQ ID NO: 5776637 - DNA, 25 bp, Homo sapien
atcatgtcctcattcgtcagtatcc

SEQ ID NO: 5776638 - DNA, 25 bp, Homo sapien
agcattgagaaggatggttacaaca

SEQ ID NO: 5776639 - DNA, 25 bp, Homo sapien
cttagccaaggtgatgaacctcatt

SEQ ID NO: 5776640 - DNA, 25 bp, Homo sapien
tgtcaccaacatggacaagctacac

SEQ ID NO: 5776641 - DNA, 25 bp, Homo sapien
gtgttggctgatgaaccgggactac

SEQ ID NO: 5776642 - DNA, 25 bp, Homo sapien
tgacaagcttaaaaccagaaatcga

SEQ ID NO: 5776643 - DNA, 25 bp, Homo sapien
cccactccttgccactgacccttct

SEQ ID NO: 5776644 - DNA, 25 bp, Homo sapien
acctctcagattgtggagctgaaga

SEQ ID NO: 5776645 - DNA, 25 bp, Homo sapien
aagatttgatgctcttgtgctcagt

SEQ ID NO: 5776646 - DNA, 25 bp, Homo sapien
tgtcttccactcccgaatgctggac

SEQ ID NO: 5776647 - DNA, 25 bp, Homo sapien
ggagtcatccttcctgaccctggac

SEQ ID NO: 5776648 - DNA, 25 bp, Homo sapien
acccagccttggtggctgccattgc

SEQ ID NO: 5776649 - DNA, 25 bp, Homo sapien
aagtcaccgaggacctgtttagcag

SEQ ID NO: 5776650 - DNA, 25 bp, Homo sapien
acctgtttagcagtttgaaagggta

SEQ ID NO: 5776651 - DNA, 25 bp, Homo sapien
ggaggttttctcctcccactgccca

SEQ ID NO: 5776652 - DNA, 25 bp, Homo sapien
ttcctgtggggaacagacaatcacc

SEQ ID NO: 5776653 - DNA, 25 bp, Homo sapien
gcactgtgccactacaatcagcaaa

SEQ ID NO: 5776654 - DNA, 25 bp, Homo sapien
actggattcctgtggggaacagaca

SEQ ID NO: 5776655 - DNA, 25 bp, Homo sapien
gccggacttgatggcttccctgctg

SEQ ID NO: 5776656 - DNA, 25 bp, Homo sapien
cactgacccttcttccttttatagc

SEQ ID NO: 5776657 - DNA, 25 bp, Homo sapien
tgaattctcaggattgaggctggac

SEQ ID NO: 5776658 - DNA, 25 bp, Homo sapien
gaggactatgctgactcgagcattg

SEQ ID NO: 5776659 - DNA, 25 bp, Homo sapien
ccaatagccagtgccagaagctgtg

SEQ ID NO: 5776660 - DNA, 25 bp, Homo sapien
ggtctctggtccgaagacacatcaa

SEQ ID NO: 5776661 - DNA, 25 bp, Homo sapien
aacagtggccagtttcattgtcaac

SEQ ID NO: 5776662 - DNA, 25 bp, Homo sapien
tgggtttcttctttgtcatgggtgc

SEQ ID NO: 5776663 - DNA, 25 bp, Homo sapien
caattgcgtcctggagatctgtgct

SEQ ID NO: 5776664 - DNA, 25 bp, Homo sapien
tgcctgctcttgatctttctggcag

SEQ ID NO: 5776665 - DNA, 25 bp, Homo sapien
cattcgtgatgaggtcacctggctg

SEQ ID NO: 5776666 - DNA, 25 bp, Homo sapien
gagactgtgttggctgatgaaccgg

SEQ ID NO: 5776667 - DNA, 25 bp, Homo sapien
gccttcgtcagcctgcccagagaag

SEQ ID NO: 5776668 - DNA, 25 bp, Homo sapien
aaactcacctcaaggaatttctggt

SEQ ID NO: 5776669 - DNA, 25 bp, Homo sapien
gcagaactcctgggcccctatggca

SEQ ID NO: 5776670 - DNA, 25 bp, Homo sapien
ctctcctctctgaatctcaaacaag

SEQ ID NO: 5776671 - DNA, 25 bp, Homo sapien
gcttccagagtcatccgcaacgccc

SEQ ID NO: 5776672 - DNA, 25 bp, Homo sapien
agtacttggcaagatttgatgctct

SEQ ID NO: 5776673 - DNA, 25 bp, Homo sapien
tacagtttctccgtgtttgaacata

SEQ ID NO: 5776674 - DNA, 25 bp, Homo sapien
gacatgctggagtcctgtttccctt

SEQ ID NO: 5776675 - DNA, 25 bp, Homo sapien
ctgatttgtgctcactttgtccact

SEQ ID NO: 5776676 - DNA, 25 bp, Homo sapien
atcattcagaacttgtctgtgtgtc

SEQ ID NO: 5776677 - DNA, 25 bp, Homo sapien
acctgaggactatgctgactcgagc

SEQ ID NO: 5776678 - DNA, 25 bp, Homo sapien
ttatagcattgagaaggatggttac

SEQ ID NO: 5776679 - DNA, 25 bp, Homo sapien
gtccactgcactcatgagatgtgcc

SEQ ID NO: 5776680 - DNA, 25 bp, Homo sapien
agtgaaaacctgatgtggcatgtga

SEQ ID NO: 5776681 - DNA, 25 bp, Homo sapien
acatactatcttcccttctgagtac

SEQ ID NO: 5776682 - DNA, 25 bp, Homo sapien
aacctgagcgagcagcttctaccta

SEQ ID NO: 5776683 - DNA, 25 bp, Homo sapien
gaaggagctggagactgtgttggct

SEQ ID NO: 5776684 - DNA, 25 bp, Homo sapien
tctacatcacccttatccgtgagga

SEQ ID NO: 5776685 - DNA, 25 bp, Homo sapien
cctcaactccaatagccagtgccag

SEQ ID NO: 5776686 - DNA, 25 bp, Homo sapien
agtgaggcaggctgggagcatggag

SEQ ID NO: 5776687 - DNA, 25 bp, Homo sapien
cttgatctttctggcagtttccctc

SEQ ID NO: 5776688 - DNA, 25 bp, Homo sapien
ccttggtggctgccattgctaatct

SEQ ID NO: 5776689 - DNA, 25 bp, Homo sapien
gtccttcattcgtgatgaggtcacc

SEQ ID NO: 5776690 - DNA, 25 bp, Homo sapien
catcatcatgtcctcattcgtcagt

SEQ ID NO: 5776691 - DNA, 25 bp, Homo sapien
gccagtgccagaagctgtggaagct

SEQ ID NO: 5776692 - DNA, 25 bp, Homo sapien
cccactgcccatttcttatgggtcc

SEQ ID NO: 5776693 - DNA, 25 bp, Homo sapien
aaccactggattcctgtggggaaca

SEQ ID NO: 5776694 - DNA, 25 bp, Homo sapien
cctgcctgctcttgatctttctggc

SEQ ID NO: 5776695 - DNA, 25 bp, Homo sapien
gagcaaggaacatgtaattgcaaac

SEQ ID NO: 5776696 - DNA, 25 bp, Homo sapien
cactggcccagtttttgggtgcaga

SEQ ID NO: 5776697 - DNA, 25 bp, Homo sapien
tcaggagccagagttgatgagcaga

SEQ ID NO: 5776698 - DNA, 25 bp, Homo sapien
aaacaagttgataatggagaaaaat

SEQ ID NO: 5776699 - DNA, 25 bp, Homo sapien
ctgacatctctgagatgcgggcctt

SEQ ID NO: 5776700 - DNA, 25 bp, Homo sapien
aagaacaagaaaaccaggaagcaga

SEQ ID NO: 5776701 - DNA, 25 bp, Homo sapien
tggtggtggaggagtcatccttcct

SEQ ID NO: 5776702 - DNA, 25 bp, Homo sapien
tgagaaccctgacttagccaaggtg

SEQ ID NO: 5776703 - DNA, 25 bp, Homo sapien
ctgcccatttcttatgggtcccatt

SEQ ID NO: 5776704 - DNA, 25 bp, Homo sapien
cctgcagcagacacaaccactggat

SEQ ID NO: 5776705 - DNA, 25 bp, Homo sapien
cacctaaacttgacagaactggcac

SEQ ID NO: 5776706 - DNA, 25 bp, Homo sapien
catggaggacagcttatggaaaaag

SEQ ID NO: 5776707 - DNA, 25 bp, Homo sapien
tcagtttcagggccatggcccaaga

SEQ ID NO: 5776708 - DNA, 25 bp, Homo sapien
atggccctgtccttcattcgtgatg

SEQ ID NO: 5776709 - DNA, 25 bp, Homo sapien
gggtcactaaggagagagggtcagg

SEQ ID NO: 5776710 - DNA, 25 bp, Homo sapien
agcctgcccagagaaggggagcaga

SEQ ID NO: 5776711 - DNA, 25 bp, Homo sapien
tcttcccttctgagtacctcagcag

SEQ ID NO: 5776712 - DNA, 25 bp, Homo sapien
tatggaaaaagttagggcgtggggc

SEQ ID NO: 5776713 - DNA, 25 bp, Homo sapien
ccagaggagtacccccacctcaaga

SEQ ID NO: 5776714 - DNA, 25 bp, Homo sapien
agaaccctgacttagccaaggtgat

SEQ ID NO: 5776715 - DNA, 25 bp, Homo sapien
agtttgtcactccagacacagacat

SEQ ID NO: 5776716 - DNA, 25 bp, Homo sapien
cagtttttgggtgcagatgcttcca

SEQ ID NO: 5776717 - DNA, 25 bp, Homo sapien
atgcgggccttggcagaactcctgg

SEQ ID NO: 5776718 - DNA, 25 bp, Homo sapien
acctggctggttcgccacacagaga

SEQ ID NO: 5776719 - DNA, 25 bp, Homo sapien
aacccttgccatagtggaagctgtg

SEQ ID NO: 5776720 - DNA, 25 bp, Homo sapien
gagttggccaagcagaccagcaatt

SEQ ID NO: 5776721 - DNA, 25 bp, Homo sapien
gcaggagtcaaagcatacattggtt

SEQ ID NO: 5776722 - DNA, 25 bp, Homo sapien
ctcagattgtggagctgaagaagct

SEQ ID NO: 5776723 - DNA, 25 bp, Homo sapien
tggaggccagactcaacagagccat

SEQ ID NO: 5776724 - DNA, 25 bp, Homo sapien
gctacacctaaacttgacagaactg

SEQ ID NO: 5776725 - DNA, 25 bp, Homo sapien
tcccagaaaaggagagcccgagagg

SEQ ID NO: 5776726 - DNA, 25 bp, Homo sapien
ctaaggctctttttgctttcatggc

SEQ ID NO: 5776727 - DNA, 25 bp, Homo sapien
gtttgaaagggtatggcaagagagt

SEQ ID NO: 5776728 - DNA, 25 bp, Homo sapien
gaacattgaaactcacctcaaggaa

SEQ ID NO: 5776729 - DNA, 25 bp, Homo sapien
ctaaggcccctctgcacctgcatga

SEQ ID NO: 5776730 - DNA, 25 bp, Homo sapien
gcagaacttcagtgcagaggagttc

SEQ ID NO: 5776731 - DNA, 25 bp, Homo sapien
gtctgtgtgtccagaggaggagtcc

SEQ ID NO: 5776732 - DNA, 25 bp, Homo sapien
cattcgtcagtatcctctcctctct

SEQ ID NO: 5776733 - DNA, 25 bp, Homo sapien
tctgtcagcctcttgcagctgggcc

SEQ ID NO: 5776734 - DNA, 25 bp, Homo sapien
tcctgtttcccttatgtcctgcttc

SEQ ID NO: 5776735 - DNA, 25 bp, Homo sapien
aaaacctgatgtggcatgtgacctc

SEQ ID NO: 5776736 - DNA, 25 bp, Homo sapien
tcctggaagagttggccaagcagac

SEQ ID NO: 5776737 - DNA, 25 bp, Homo sapien
ctggctacaatgccacgacccagga

SEQ ID NO: 5776738 - DNA, 25 bp, Homo sapien
cggcggcaatttctgcggatggcag

SEQ ID NO: 5776739 - DNA, 25 bp, Homo sapien
tgctgcaggtgtgggctgtgacatt

SEQ ID NO: 5776740 - DNA, 25 bp, Homo sapien
aacctgatgtggcatgtgacctctc

SEQ ID NO: 5776741 - DNA, 25 bp, Homo sapien
acaagcttaaaaccagaaatcgaga

SEQ ID NO: 5776742 - DNA, 25 bp, Homo sapien
gccaggagctgagagtcaccggaag

SEQ ID NO: 5776743 - DNA, 25 bp, Homo sapien
tgatgaaccgggactactgggtcct

SEQ ID NO: 5776744 - DNA, 25 bp, Homo sapien
tggattcctgtggggaacagacaat

SEQ ID NO: 5776745 - DNA, 25 bp, Homo sapien
ggtgaccttgagtatctttgagctg

SEQ ID NO: 5776746 - DNA, 25 bp, Homo sapien
catcacccttatccgtgaggatgtg

SEQ ID NO: 5776747 - DNA, 25 bp, Homo sapien
tgaacctcattgtcttccactcccg

SEQ ID NO: 5776748 - DNA, 25 bp, Homo sapien
atagtggaagctgtggtcactttcg

SEQ ID NO: 5776749 - DNA, 25 bp, Homo sapien
ccacgacccaggagatcgtacggcc

SEQ ID NO: 5776750 - DNA, 25 bp, Homo sapien
ccttccacctaaactgaatgcctgc

SEQ ID NO: 5776751 - DNA, 25 bp, Homo sapien
tgtatacagtttctccgtgtttgaa

SEQ ID NO: 5776752 - DNA, 25 bp, Homo sapien
ttcccttctgagtacctcagcagcc

SEQ ID NO: 5776753 - DNA, 25 bp, Homo sapien
taaagcgcatgaccatcattggggt

SEQ ID NO: 5776754 - DNA, 25 bp, Homo sapien
gcgaaacctgagcgagcagcttcta

SEQ ID NO: 5776755 - DNA, 25 bp, Homo sapien
ctgaagagccctttggaccttccta

SEQ ID NO: 5776756 - DNA, 25 bp, Homo sapien
aagcactgtgccactacaatcagca

SEQ ID NO: 5776757 - DNA, 25 bp, Homo sapien
caaggtgatgaacctcattgtcttc

SEQ ID NO: 5776758 - DNA, 25 bp, Homo sapien
gtccagaggaggagtccatcatcat

SEQ ID NO: 5776759 - DNA, 25 bp, Homo sapien
ggtcctaaggctctttttgctttca

SEQ ID NO: 5776760 - DNA, 25 bp, Homo sapien
ggagtcctgtttcccttatgtcctg

SEQ ID NO: 5776761 - DNA, 25 bp, Homo sapien
ccagtacccactgaagagccctttg

SEQ ID NO: 5776762 - DNA, 25 bp, Homo sapien
ctttgtccactgcactcatgagatg

SEQ ID NO: 5776763 - DNA, 25 bp, Homo sapien
attgctaatctgaaagctgatactt

SEQ ID NO: 5776764 - DNA, 25 bp, Homo sapien
cctgaccctggacatgctggagtcc

SEQ ID NO: 5776765 - DNA, 25 bp, Homo sapien
cgctggattatcattgggtttcttc

SEQ ID NO: 5776766 - DNA, 25 bp, Homo sapien
accacactctacacaaactggtacc

SEQ ID NO: 5776767 - DNA, 25 bp, Homo sapien
atattcattgcttgaccaaagccat

SEQ ID NO: 5776768 - DNA, 25 bp, Homo sapien
ttatccgtgaggatgtgctgcaggt

SEQ ID NO: 5776769 - DNA, 25 bp, Homo sapien
gctggactccgtagaaaaattgctg

SEQ ID NO: 5776770 - DNA, 25 bp, Homo sapien
catgctggagtcctgtttcccttat

SEQ ID NO: 5776771 - DNA, 25 bp, Homo sapien
tgctcatgcgcttggtggtggagga

SEQ ID NO: 5776772 - DNA, 25 bp, Homo sapien
gtgctgcaggtgcacaaagtcaccg

SEQ ID NO: 5776773 - DNA, 25 bp, Homo sapien
ggcccagtttttgggtgcagatgct

SEQ ID NO: 5776774 - DNA, 25 bp, Homo sapien
tgagatgtgcccagaggagtacccc

SEQ ID NO: 5776775 - DNA, 25 bp, Homo sapien
gaatcatgtatacagtttctccgtg

SEQ ID NO: 5776776 - DNA, 25 bp, Homo sapien
atcgggaggtgtctcgggccttcca

SEQ ID NO: 5776777 - DNA, 25 bp, Homo sapien
tgcagcagacacaaccactggattc

SEQ ID NO: 5776778 - DNA, 25 bp, Homo sapien
ctaaggagagagggtcaggagccag

SEQ ID NO: 5776779 - DNA, 25 bp, Homo sapien
gggctgagaaatcgtagagcagtga

SEQ ID NO: 5776780 - DNA, 25 bp, Homo sapien
cagaggagttctctgacatctctga

SEQ ID NO: 5776781 - DNA, 25 bp, Homo sapien
gaggacctgtttagcagtttgaaag

SEQ ID NO: 5776782 - DNA, 25 bp, Homo sapien
tcctctcctctctgaatctcaaaca

SEQ ID NO: 5776783 - DNA, 25 bp, Homo sapien
aagaacattgaaactcacctcaagg

SEQ ID NO: 5776784 - DNA, 25 bp, Homo sapien
agtatctttgagctggcatctgctg

SEQ ID NO: 5776785 - DNA, 25 bp, Homo sapien
cccttatgtcctgcttcgaaatgcc

SEQ ID NO: 5776786 - DNA, 25 bp, Homo sapien
aacctcattgtcttccactcccgaa

SEQ ID NO: 5776787 - DNA, 25 bp, Homo sapien
ttgtctgtgtgtccagaggaggagt

SEQ ID NO: 5776788 - DNA, 25 bp, Homo sapien
attgacccagccttggtggctgcca

SEQ ID NO: 5776789 - DNA, 25 bp, Homo sapien
tgaaggagtttgtcactccagacac

SEQ ID NO: 5776790 - DNA, 25 bp, Homo sapien
ttttgctttcatggccctgtccttc

SEQ ID NO: 5776791 - DNA, 25 bp, Homo sapien
gtctactttctgctttcatcttcgt

SEQ ID NO: 5776792 - DNA, 25 bp, Homo sapien
gtgctcagtgacatcattcagaact

SEQ ID NO: 5776793 - DNA, 25 bp, Homo sapien
tacggccttctgagctgttggcagg

SEQ ID NO: 5776794 - DNA, 25 bp, Homo sapien
gaaggatggttacaacaacaatatt

SEQ ID NO: 5776795 - DNA, 25 bp, Homo sapien
ggattaggtctctggtccgaagaca

SEQ ID NO: 5776796 - DNA, 25 bp, Homo sapien
ggatgtgctgcaggtgcacaaagtc

SEQ ID NO: 5776797 - DNA, 25 bp, Homo sapien
gttatgccattgctttccccctgat

SEQ ID NO: 5776798 - DNA, 25 bp, Homo sapien
cttcatctcctgaggaggaatataa

SEQ ID NO: 5776799 - DNA, 25 bp, Homo sapien
tacagcaataccaccttcagtactt

SEQ ID NO: 5776800 - DNA, 25 bp, Homo sapien
catgtcctcattcgtcagtatcctc

SEQ ID NO: 5776801 - DNA, 25 bp, Homo sapien
cacctggaggccagactcaacagag

SEQ ID NO: 5776802 - DNA, 25 bp, Homo sapien
gagccagagttgatgagcagatctg

SEQ ID NO: 5776803 - DNA, 25 bp, Homo sapien
tcattgggtttcttctttgtcatgg

SEQ ID NO: 5776804 - DNA, 25 bp, Homo sapien
ccgcaacgccctcctgcagcagaca

SEQ ID NO: 5776805 - DNA, 25 bp, Homo sapien
aatgccacgacccaggagatcgtac

SEQ ID NO: 5776806 - DNA, 25 bp, Homo sapien
aggcagactcccagaaaaggagagc

SEQ ID NO: 5776807 - DNA, 25 bp, Homo sapien
atgctggactccgtagaaaaattgc

SEQ ID NO: 5776808 - DNA, 25 bp, Homo sapien
gagtcaaagcatacattggtttcat

SEQ ID NO: 5776809 - DNA, 25 bp, Homo sapien
ctcattcgtcagtatcctctcctct

SEQ ID NO: 5776810 - DNA, 25 bp, Homo sapien
tacttcatctcctgaggaggaatat

SEQ ID NO: 5776811 - DNA, 25 bp, Homo sapien
tcattgcttgaccaaagccatcatc

SEQ ID NO: 5776812 - DNA, 25 bp, Homo sapien
gtcaccggaagaaccgcagcattgt

SEQ ID NO: 5776813 - DNA, 25 bp, Homo sapien
tcttcaccactgcaactccttcctg

SEQ ID NO: 5776814 - DNA, 25 bp, Homo sapien
ggccagtttcattgtcaacggcggc

SEQ ID NO: 5776815 - DNA, 25 bp, Homo sapien
ttgtggagctgaagaagctggtggt

SEQ ID NO: 5776816 - DNA, 25 bp, Homo sapien
tgctaatctgaaagctgatacttca

SEQ ID NO: 5776817 - DNA, 25 bp, Homo sapien
tctgctttcatcttcgtatctttga

SEQ ID NO: 5776818 - DNA, 25 bp, Homo sapien
gctgtgacattgacccagccttggt

SEQ ID NO: 5776819 - DNA, 25 bp, Homo sapien
acaagctacacctaaacttgacaga

SEQ ID NO: 5776820 - DNA, 25 bp, Homo sapien
tctgagatgcgggccttggcagaac

SEQ ID NO: 5776821 - DNA, 25 bp, Homo sapien
cgggaggtgtctcgggccttccacc

SEQ ID NO: 5776822 - DNA, 25 bp, Homo sapien
gcttcgaaatgcctatcgggaggtg

SEQ ID NO: 5776823 - DNA, 25 bp, Homo sapien
atacttgttcagatcagatccaact

SEQ ID NO: 5776824 - DNA, 25 bp, Homo sapien
gggactactgggtcctaaggctctt

SEQ ID NO: 5776825 - DNA, 25 bp, Homo sapien
agcccgagagggacaagccaggagc

SEQ ID NO: 5776826 - DNA, 25 bp, Homo sapien
tcctggagatctgtgctgagcagcg

SEQ ID NO: 5776827 - DNA, 25 bp, Homo sapien
tcttccactcccgaatgctggactc

SEQ ID NO: 5776828 - DNA, 25 bp, Homo sapien
atcatcctctccccagccatgcagg

SEQ ID NO: 5776829 - DNA, 25 bp, Homo sapien
gaagtaatggagcgctggattatca

SEQ ID NO: 5776830 - DNA, 25 bp, Homo sapien
ttccagagtcatccgcaacgccctc

SEQ ID NO: 5776831 - DNA, 25 bp, Homo sapien
tctgagtacctcagcagccacctgg

SEQ ID NO: 5776832 - DNA, 25 bp, Homo sapien
agtccatcatcatgtcctcattcgt

SEQ ID NO: 5776833 - DNA, 25 bp, Homo sapien
ctactgggtcctaaggctctttttg

SEQ ID NO: 5776834 - DNA, 25 bp, Homo sapien
aagaacaatccagggctgagaaatc

SEQ ID NO: 5776835 - DNA, 25 bp, Homo sapien
gtggcctctgtcagcctcttgcagc

SEQ ID NO: 5776836 - DNA, 25 bp, Homo sapien
ccaggtgtctgctgccctcttcacg

SEQ ID NO: 5776837 - DNA, 25 bp, Homo sapien
agtacctcagcagccacctggaggc

SEQ ID NO: 5776838 - DNA, 25 bp, Homo sapien
ggtggaaaacatggacatacttgtt

SEQ ID NO: 5776839 - DNA, 25 bp, Homo sapien
tttggaccttcctaaacccttgcca

SEQ ID NO: 5776840 - DNA, 25 bp, Homo sapien
agctgggccaggagactgacaagct

SEQ ID NO: 5776841 - DNA, 25 bp, Homo sapien
ggcccctctgcacctgcatgagaac

SEQ ID NO: 5776842 - DNA, 25 bp, Homo sapien
gtgcagatgcttccagagtcatccg

SEQ ID NO: 5776843 - DNA, 25 bp, Homo sapien
agagggacaagccaggagctgagag

SEQ ID NO: 5776844 - DNA, 25 bp, Homo sapien
gcatacattggtttcatacagtcac

SEQ ID NO: 5776845 - DNA, 25 bp, Homo sapien
ctcctgggcccctatggcatgaagt

SEQ ID NO: 5776846 - DNA, 25 bp, Homo sapien
aggttttctcctcccactgcccatt

SEQ ID NO: 5776847 - DNA, 25 bp, Homo sapien
acgctctacaacaagaacattgaaa

SEQ ID NO: 5776848 - DNA, 25 bp, Homo sapien
ctgcttcgaaatgcctatcgggagg

SEQ ID NO: 5776849 - DNA, 25 bp, Homo sapien
tgcaaacagtggccagtttcattgt

SEQ ID NO: 5776850 - DNA, 25 bp, Homo sapien
aggctgggagcatggaggacagctt

SEQ ID NO: 5776851 - DNA, 25 bp, Homo sapien
agtttcattgtcaacggcggcaatt

SEQ ID NO: 5776852 - DNA, 25 bp, Homo sapien
agatgcgggccttggcagaactcct

SEQ ID NO: 5776853 - DNA, 25 bp, Homo sapien
caatattcattgcttgaccaaagcc

SEQ ID NO: 5776854 - DNA, 25 bp, Homo sapien
gagcagtgaggcaggctgggagcat

SEQ ID NO: 5776855 - DNA, 25 bp, Homo sapien
gaacatactatcttcccttctgagt

SEQ ID NO: 5776856 - DNA, 25 bp, Homo sapien
gtggtggaaaacatggacatacttg

SEQ ID NO: 5776857 - DNA, 25 bp, Homo sapien
tcctcattcgtcagtatcctctcct

SEQ ID NO: 5776858 - DNA, 25 bp, Homo sapien
attgagtgcttgaaggagtttgtca

SEQ ID NO: 5776859 - DNA, 25 bp, Homo sapien
cattggggttatcctcagtttcagg

SEQ ID NO: 5776860 - DNA, 25 bp, Homo sapien
aggtggcctgcctgctcttgatctt

SEQ ID NO: 5776861 - DNA, 25 bp, Homo sapien
aatcaccacactctacacaaactgg

SEQ ID NO: 5776862 - DNA, 25 bp, Homo sapien
cactgcccatttcttatgggtccca

SEQ ID NO: 5776863 - DNA, 25 bp, Homo sapien
ctggcactgacaatgaatcatgtat

SEQ ID NO: 5776864 - DNA, 25 bp, Homo sapien
ctcttgatctttctggcagtttccc

SEQ ID NO: 5776865 - DNA, 25 bp, Homo sapien
ctgtttcccttatgtcctgcttcga

SEQ ID NO: 5776866 - DNA, 25 bp, Homo sapien
gctctacaacaagaacattgaaact

SEQ ID NO: 5776867 - DNA, 25 bp, Homo sapien
atgaccttggaggaatctgccatgt

SEQ ID NO: 5776868 - DNA, 25 bp, Homo sapien
gtgtctgctgccctcttcacgctct

SEQ ID NO: 5776869 - DNA, 25 bp, Homo sapien
caagagagtggcagacataaaggag

SEQ ID NO: 5776870 - DNA, 25 bp, Homo sapien
gaggtcacctggctggttcgccaca

SEQ ID NO: 5776871 - DNA, 25 bp, Homo sapien
agcaattgcgtcctggagatctgtg

SEQ ID NO: 5776872 - DNA, 25 bp, Homo sapien
ttcgccacacagagaatgtcaccaa

SEQ ID NO: 5776873 - DNA, 25 bp, Homo sapien
gaaggggagcagaacttcagtgcag

SEQ ID NO: 5776874 - DNA, 25 bp, Homo sapien
agcagcttctacctaagcactgtgc

SEQ ID NO: 5776875 - DNA, 25 bp, Homo sapien
tggtggtggaaaacatggacatact

SEQ ID NO: 5776876 - DNA, 25 bp, Homo sapien
acagacaatcaccacactctacaca

SEQ ID NO: 5776877 - DNA, 25 bp, Homo sapien
ctgacttagccaaggtgatgaacct

SEQ ID NO: 5776878 - DNA, 25 bp, Homo sapien
aaaaggagagcccgagagggacaag

SEQ ID NO: 5776879 - DNA, 25 bp, Homo sapien
agaacttcagtgcagaggagttctc

SEQ ID NO: 5776880 - DNA, 25 bp, Homo sapien
aggagtcaaagcatacattggtttc

SEQ ID NO: 5776881 - DNA, 25 bp, Homo sapien
tggaccttcctaaacccttgccata

SEQ ID NO: 5776882 - DNA, 25 bp, Homo sapien
tttcagggccatggcccaagaggga

SEQ ID NO: 5776883 - DNA, 25 bp, Homo sapien
tgcttgaccaaagccatcatccagg

SEQ ID NO: 5776884 - DNA, 25 bp, Homo sapien
atcatgtatacagtttctccgtgtt

SEQ ID NO: 5776885 - DNA, 25 bp, Homo sapien
cttggtggtggaggagtcatccttc

SEQ ID NO: 5776886 - DNA, 25 bp, Homo sapien
tcacctggctggttcgccacacaga

SEQ ID NO: 5776887 - DNA, 25 bp, Homo sapien
agatcagatccaactttagcaagcc

SEQ ID NO: 5776888 - DNA, 25 bp, Homo sapien
tgtcctgcttcgaaatgcctatcgg

SEQ ID NO: 5776889 - DNA, 25 bp, Homo sapien
aaggagtttgtcactccagacacag

SEQ ID NO: 5776890 - DNA, 25 bp, Homo sapien
gtgaaggagctggagactgtgttgg

SEQ ID NO: 5776891 - DNA, 25 bp, Homo sapien
gtggctaaggcccctctgcacctgc

SEQ ID NO: 5776892 - DNA, 25 bp, Homo sapien
acctcaaggaatttctggtggtggc

SEQ ID NO: 5776893 - DNA, 25 bp, Homo sapien
aaaaccagaaatcgagaatccattt

SEQ ID NO: 5776894 - DNA, 25 bp, Homo sapien
gccatcatccaggtgtctgctgccc

SEQ ID NO: 5776895 - DNA, 25 bp, Homo sapien
atcattggggttatcctcagtttca

SEQ ID NO: 5776896 - DNA, 25 bp, Homo sapien
cctgggcccctatggcatgaagttc

SEQ ID NO: 5776897 - DNA, 25 bp, Homo sapien
tcttccttttatagcattgagaagg

SEQ ID NO: 5776898 - DNA, 25 bp, Homo sapien
gagaaaaatttgaattctcaggatt

SEQ ID NO: 5776899 - DNA, 25 bp, Homo sapien
ttccacctaaactgaatgcctgcca

SEQ ID NO: 5776900 - DNA, 25 bp, Homo sapien
ccagcaattgcgtcctggagatctg

SEQ ID NO: 5776901 - DNA, 25 bp, Homo sapien
gattcctgtggggaacagacaatca

SEQ ID NO: 5776902 - DNA, 25 bp, Homo sapien
agtttcagggccatggcccaagagg

SEQ ID NO: 5776903 - DNA, 25 bp, Homo sapien
acttgttcagatcagatccaacttt

SEQ ID NO: 5776904 - DNA, 25 bp, Homo sapien
ggtcaggagccagagttgatgagca

SEQ ID NO: 5776905 - DNA, 25 bp, Homo sapien
agagctacttttcttgttggagggg

SEQ ID NO: 5776906 - DNA, 25 bp, Homo sapien
gagaaggatggttacaacaacaata

SEQ ID NO: 5776907 - DNA, 25 bp, Homo sapien
gaggagttctctgacatctctgaga

SEQ ID NO: 5776908 - DNA, 25 bp, Homo sapien
ggacaagctacacctaaacttgaca

SEQ ID NO: 5776909 - DNA, 25 bp, Homo sapien
cttcagtacttggcaagatttgatg

SEQ ID NO: 5776910 - DNA, 25 bp, Homo sapien
atctcctgaggaggaatataaggtg

SEQ ID NO: 5776911 - DNA, 25 bp, Homo sapien
ttctggtggtggcctctgtcagcct

SEQ ID NO: 5776912 - DNA, 25 bp, Homo sapien
tgtggggaacagacaatcaccacac

SEQ ID NO: 5776913 - DNA, 25 bp, Homo sapien
ggaacatgtaattgcaaacagtggc

SEQ ID NO: 5776914 - DNA, 25 bp, Homo sapien
aaaaattgctggtggaaacttctga

SEQ ID NO: 5776915 - DNA, 25 bp, Homo sapien
agaggagtacccccacctcaagaac

SEQ ID NO: 5776916 - DNA, 25 bp, Homo sapien
tggtccgaagacacatcaaagtgat

SEQ ID NO: 5776917 - DNA, 25 bp, Homo sapien
aaagtctgcttagacaggcaagcag

SEQ ID NO: 5776918 - DNA, 25 bp, Homo sapien
cagtcactggcccagtttttgggtg

SEQ ID NO: 5776919 - DNA, 25 bp, Homo sapien
ccgggactactgggtcctaaggctc

SEQ ID NO: 5776920 - DNA, 25 bp, Homo sapien
gaacaagaaaaccaggaagcagagg

SEQ ID NO: 5776921 - DNA, 25 bp, Homo sapien
tgcgtcctggagatctgtgctgagc

SEQ ID NO: 5776922 - DNA, 25 bp, Homo sapien
gacatctctgagatgcgggccttgg

SEQ ID NO: 5776923 - DNA, 25 bp, Homo sapien
agaactcctgggcccctatggcatg

SEQ ID NO: 5776924 - DNA, 25 bp, Homo sapien
caagcagtgggaccatcatcctctc

SEQ ID NO: 5776925 - DNA, 25 bp, Homo sapien
tgccatagtggaagctgtggtcact

SEQ ID NO: 5776926 - DNA, 25 bp, Homo sapien
attaggtctctggtccgaagacaca

SEQ ID NO: 5776927 - DNA, 25 bp, Homo sapien
tcatccttcctgaccctggacatgc

SEQ ID NO: 5776928 - DNA, 25 bp, Homo sapien
cactctacacaaactggtacctgga

SEQ ID NO: 5776929 - DNA, 25 bp, Homo sapien
tcttgcagctgggccaggagactga

SEQ ID NO: 5776930 - DNA, 25 bp, Homo sapien
gggctccctctacatcacccttatc

SEQ ID NO: 5776931 - DNA, 25 bp, Homo sapien
agatgcttccagagtcatccgcaac

SEQ ID NO: 5776932 - DNA, 25 bp, Homo sapien
tgggcccctatggcatgaagttcct

SEQ ID NO: 5776933 - DNA, 25 bp, Homo sapien
gacttagccaaggtgatgaacctca

SEQ ID NO: 5776934 - DNA, 25 bp, Homo sapien
atggcaagagagtggcagacataaa

SEQ ID NO: 5776935 - DNA, 25 bp, Homo sapien
atggagcgctggattatcattgggt

SEQ ID NO: 5776936 - DNA, 25 bp, Homo sapien
ccagaaaaggagagcccgagaggga

SEQ ID NO: 5776937 - DNA, 25 bp, Homo sapien
caggagctgagagtcaccggaagaa

SEQ ID NO: 5776938 - DNA, 25 bp, Homo sapien
cctctacatcacccttatccgtgag

SEQ ID NO: 5776939 - DNA, 25 bp, Homo sapien
ctccgtagaaaaattgctggtggaa

SEQ ID NO: 5776940 - DNA, 25 bp, Homo sapien
ctcttcacgctctacaacaagaaca

SEQ ID NO: 5776941 - DNA, 25 bp, Homo sapien
ctcctgaggaggaatataaggtggc

SEQ ID NO: 5776942 - DNA, 25 bp, Homo sapien
ctcccactgcccatttcttatgggt

SEQ ID NO: 5776943 - DNA, 25 bp, Homo sapien
cctcagtttcagggccatggcccaa

SEQ ID NO: 5776944 - DNA, 25 bp, Homo sapien
agttctctgacatctctgagatgcg

SEQ ID NO: 5776945 - DNA, 25 bp, Homo sapien
agacaatcaccacactctacacaaa

SEQ ID NO: 5776946 - DNA, 25 bp, Homo sapien
cagcaataccaccttcagtacttgg

SEQ ID NO: 5776947 - DNA, 25 bp, Homo sapien
aagaaccgcagcattgtcaccaaca

SEQ ID NO: 5776948 - DNA, 25 bp, Homo sapien
agtgcttgaaggagtttgtcactcc

SEQ ID NO: 5776949 - DNA, 25 bp, Homo sapien
caggtgcacaaagtcaccgaggacc

SEQ ID NO: 5776950 - DNA, 25 bp, Homo sapien
atgtgctgcaggtgcacaaagtcac

SEQ ID NO: 5776951 - DNA, 25 bp, Homo sapien
cccttctgagtacctcagcagccac

SEQ ID NO: 5776952 - DNA, 25 bp, Homo sapien
ccgcctacaggcatacactagcgtg

SEQ ID NO: 5776953 - DNA, 25 bp, Homo sapien
tgtaattgcaaacagtggccagttt

SEQ ID NO: 5776954 - DNA, 25 bp, Homo sapien
ccttcctaaacccttgccatagtgg

SEQ ID NO: 5776955 - DNA, 25 bp, Homo sapien
atctgtctactttctgctttcatct

SEQ ID NO: 5776956 - DNA, 25 bp, Homo sapien
gtttgaacatactatcttcccttct

SEQ ID NO: 5776957 - DNA, 25 bp, Homo sapien
atgtgtgaattttacaatgaaaaaa

SEQ ID NO: 5776958 - DNA, 25 bp, Homo sapien
actgtgccactacaatcagcaaagc

SEQ ID NO: 5776959 - DNA, 25 bp, Homo sapien
attcattgcttgaccaaagccatca

SEQ ID NO: 5776960 - DNA, 25 bp, Homo sapien
aagctacacctaaacttgacagaac

SEQ ID NO: 5776961 - DNA, 25 bp, Homo sapien
cgggccttccacctaaactgaatgc

SEQ ID NO: 5776962 - DNA, 25 bp, Homo sapien
gcggatggcagtgaaggagctggag

SEQ ID NO: 5776963 - DNA, 25 bp, Homo sapien
acttgtctgtgtgtccagaggagga

SEQ ID NO: 5776964 - DNA, 25 bp, Homo sapien
cttcctggaagagttggccaagcag

SEQ ID NO: 5776965 - DNA, 25 bp, Homo sapien
gacccttcttccttttatagcattg

SEQ ID NO: 5776966 - DNA, 25 bp, Homo sapien
actcacctcaaggaatttctggtgg

SEQ ID NO: 5776967 - DNA, 25 bp, Homo sapien
gaggagtcatccttcctgaccctgg

SEQ ID NO: 5776968 - DNA, 25 bp, Homo sapien
tgatctttctggcagtttccctccc

SEQ ID NO: 5776969 - DNA, 25 bp, Homo sapien
cttccctgctgccccagctgacagg

SEQ ID NO: 5776970 - DNA, 25 bp, Homo sapien
actatcttcccttctgagtacctca

SEQ ID NO: 5776971 - DNA, 25 bp, Homo sapien
catgttgcgttatgccattgctttc

SEQ ID NO: 5776972 - DNA, 25 bp, Homo sapien
tgcacctgcatgagaaccctgactt

SEQ ID NO: 5776973 - DNA, 25 bp, Homo sapien
ccacctcaagaaccatggtcttcac

SEQ ID NO: 5776974 - DNA, 25 bp, Homo sapien
tagccaaggtgatgaacctcattgt

SEQ ID NO: 5776975 - DNA, 25 bp, Homo sapien
ttccgcctacaggcatacactagcg

SEQ ID NO: 5776976 - DNA, 25 bp, Homo sapien
tccctctacatcacccttatccgtg

SEQ ID NO: 5776977 - DNA, 25 bp, Homo sapien
aggagagcaaggaacatgtaattgc

SEQ ID NO: 5776978 - DNA, 25 bp, Homo sapien
gtgatgaacctcattgtcttccact

SEQ ID NO: 5776979 - DNA, 25 bp, Homo sapien
ccttggaggaatctgccatgttgcg

SEQ ID NO: 5776980 - DNA, 25 bp, Homo sapien
tcagggccatggcccaagagggact

SEQ ID NO: 5776981 - DNA, 25 bp, Homo sapien
ctgccatgttgcgttatgccattgc

SEQ ID NO: 5776982 - DNA, 25 bp, Homo sapien
ttcgtatctttgagaagatgtttgc

SEQ ID NO: 5776983 - DNA, 25 bp, Homo sapien
tatgctgactcgagcattgcagagc

SEQ ID NO: 5776984 - DNA, 25 bp, Homo sapien
tacagtcactggcccagtttttggg

SEQ ID NO: 5776985 - DNA, 25 bp, Homo sapien
gagtacccccacctcaagaaccatg

SEQ ID NO: 5776986 - DNA, 25 bp, Homo sapien
tgcagaggagttctctgacatctct

SEQ ID NO: 5776987 - DNA, 25 bp, Homo sapien
catgagatgtgcccagaggagtacc

SEQ ID NO: 5776988 - DNA, 25 bp, Homo sapien
gcatacactagcgtggctaaggccc

SEQ ID NO: 5776989 - DNA, 25 bp, Homo sapien
tgagctggcatctgctgcaggtgtg

SEQ ID NO: 5776990 - DNA, 25 bp, Homo sapien
ggcagtttccctcccactccttgcc

SEQ ID NO: 5776991 - DNA, 25 bp, Homo sapien
gaccatcatcctctccccagccatg

SEQ ID NO: 5776992 - DNA, 25 bp, Homo sapien
attgaggctggactggttccgccta

SEQ ID NO: 5776993 - DNA, 25 bp, Homo sapien
aggagtacccccacctcaagaacca

SEQ ID NO: 5776994 - DNA, 25 bp, Homo sapien
acaatcaccacactctacacaaact

SEQ ID NO: 5776995 - DNA, 25 bp, Homo sapien
ctccttgccactgacccttcttcct

SEQ ID NO: 5776996 - DNA, 25 bp, Homo sapien
tgccattgctttccccctgatttgt

SEQ ID NO: 5776997 - DNA, 25 bp, Homo sapien
ctggaagagttggccaagcagacca

SEQ ID NO: 5776998 - DNA, 25 bp, Homo sapien
ttaaaaccagaaatcgagaatccat

SEQ ID NO: 5776999 - DNA, 25 bp, Homo sapien
atgaagttcctgagtgaaaacctga

SEQ ID NO: 5777000 - DNA, 25 bp, Homo sapien
gaatgctggactccgtagaaaaatt

SEQ ID NO: 5777001 - DNA, 25 bp, Homo sapien
gcaaggaacatgtaattgcaaacag

SEQ ID NO: 5777002 - DNA, 25 bp, Homo sapien
taaacttgacagaactggcactgac

SEQ ID NO: 5777003 - DNA, 25 bp, Homo sapien
agtggaagctgtggtcactttcgca

SEQ ID NO: 5777004 - DNA, 25 bp, Homo sapien
agactgacaagcttaaaaccagaaa

SEQ ID NO: 5777005 - DNA, 25 bp, Homo sapien
ggagctgaagaagctggtggtggaa

SEQ ID NO: 5777006 - DNA, 25 bp, Homo sapien
tcctcccactgcccatttcttatgg

SEQ ID NO: 5777007 - DNA, 25 bp, Homo sapien
cgcttggtggtggaggagtcatcct

SEQ ID NO: 5777008 - DNA, 25 bp, Homo sapien
ctcgagcattgcagagctacttttc

SEQ ID NO: 5777009 - DNA, 25 bp, Homo sapien
gtcagcctgcccagagaaggggagc

SEQ ID NO: 5777010 - DNA, 25 bp, Homo sapien
gtggggccacatgtgtgaattttac

SEQ ID NO: 5777011 - DNA, 25 bp, Homo sapien
actcaacagagccattgtgtggctg

SEQ ID NO: 5777012 - DNA, 25 bp, Homo sapien
aacttgacagaactggcactgacaa

SEQ ID NO: 5777013 - DNA, 25 bp, Homo sapien
cagtttgaaagggtatggcaagaga

SEQ ID NO: 5777014 - DNA, 25 bp, Homo sapien
ctgactcgagcattgcagagctact

SEQ ID NO: 5777015 - DNA, 25 bp, Homo sapien
cagtgccagaagctgtggaagctgt

SEQ ID NO: 5777016 - DNA, 25 bp, Homo sapien
cttctgatctgtctactttctgctt

SEQ ID NO: 5777017 - DNA, 25 bp, Homo sapien
gaccagcaattgcgtcctggagatc

SEQ ID NO: 5777018 - DNA, 25 bp, Homo sapien
tgccatgaccttggaggaatctgcc

SEQ ID NO: 5777019 - DNA, 25 bp, Homo sapien
acaagaaaaccaggaagcagaggca

SEQ ID NO: 5777020 - DNA, 25 bp, Homo sapien
ggaagaacaatccagggctgagaaa

SEQ ID NO: 5777021 - DNA, 25 bp, Homo sapien
ccccacctcaagaaccatggtcttc

SEQ ID NO: 5777022 - DNA, 25 bp, Homo sapien
cgagcattgcagagctacttttctt

SEQ ID NO: 5777023 - DNA, 25 bp, Homo sapien
gtttcatacagtcactggcccagtt

SEQ ID NO: 5777024 - DNA, 25 bp, Homo sapien
ccctgtccttcattcgtgatgaggt

SEQ ID NO: 5777025 - DNA, 25 bp, Homo sapien
cactcatgagatgtgcccagaggag

SEQ ID NO: 5777026 - DNA, 25 bp, Homo sapien
acaagaacattgaaactcacctcaa

SEQ ID NO: 5777027 - DNA, 25 bp, Homo sapien
ccccagccatgcaggccttcgtcag

SEQ ID NO: 5777028 - DNA, 25 bp, Homo sapien
ggagagcccgagagggacaagccag

SEQ ID NO: 5777029 - DNA, 25 bp, Homo sapien
accaggaagcagaggcagactccca

SEQ ID NO: 5777030 - DNA, 25 bp, Homo sapien
ggtggctgccattgctaatctgaaa

SEQ ID NO: 5777031 - DNA, 25 bp, Homo sapien
ctcccactccttgccactgaccctt

SEQ ID NO: 5777032 - DNA, 25 bp, Homo sapien
agcagtgggaccatcatcctctccc

SEQ ID NO: 5777033 - DNA, 25 bp, Homo sapien
taccaccttcagtacttggcaagat

SEQ ID NO: 5777034 - DNA, 25 bp, Homo sapien
agctgatacttcatctcctgaggag

SEQ ID NO: 5777035 - DNA, 25 bp, Homo sapien
ctgtccttcattcgtgatgaggtca

SEQ ID NO: 5777036 - DNA, 25 bp, Homo sapien
agttcctgagtgaaaacctgatgtg

SEQ ID NO: 5777037 - DNA, 25 bp, Homo sapien
acccccacctcaagaaccatggtct

SEQ ID NO: 5777038 - DNA, 25 bp, Homo sapien
tgagaagatgtttgccatgaccttg

SEQ ID NO: 5777039 - DNA, 25 bp, Homo sapien
tccagacacagacatcaaggtgacc

SEQ ID NO: 5777040 - DNA, 25 bp, Homo sapien
gatttgatgctcttgtgctcagtga

SEQ ID NO: 5777041 - DNA, 25 bp, Homo sapien
agcgagcagcttctacctaagcact

SEQ ID NO: 5777042 - DNA, 25 bp, Homo sapien
ctcctctctgaatctcaaacaagtt

SEQ ID NO: 5777043 - DNA, 25 bp, Homo sapien
tgttgcgttatgccattgctttccc

SEQ ID NO: 5777044 - DNA, 25 bp, Homo sapien
gctggagactgtgttggctgatgaa

SEQ ID NO: 5777045 - DNA, 25 bp, Homo sapien
tgtttgccatgaccttggaggaatc

SEQ ID NO: 5777046 - DNA, 25 bp, Homo sapien
gactcgagcattgcagagctacttt

SEQ ID NO: 5777047 - DNA, 25 bp, Homo sapien
gcaaagccaagaacaagaaaaccag

SEQ ID NO: 5777048 - DNA, 25 bp, Homo sapien
ggcttccctgctgccccagctgaca

SEQ ID NO: 5777049 - DNA, 25 bp, Homo sapien
agccaagaacaagaaaaccaggaag

SEQ ID NO: 5777050 - DNA, 25 bp, Homo sapien
gaaacctgagcgagcagcttctacc

SEQ ID NO: 5777051 - DNA, 25 bp, Homo sapien
gcccatttcttatgggtcccattga

SEQ ID NO: 5777052 - DNA, 25 bp, Homo sapien
accaagacaaagacacctgaggact

SEQ ID NO: 5777053 - DNA, 25 bp, Homo sapien
gaagagccctttggaccttcctaaa

SEQ ID NO: 5777054 - DNA, 25 bp, Homo sapien
ctccaatagccagtgccagaagctg

SEQ ID NO: 5777055 - DNA, 25 bp, Homo sapien
tcagcctcttgcagctgggccagga

SEQ ID NO: 5777056 - DNA, 25 bp, Homo sapien
ctggttccgcctacaggcatacact

SEQ ID NO: 5777057 - DNA, 25 bp, Homo sapien
actgcaactccttcctggaagagtt

SEQ ID NO: 5777058 - DNA, 25 bp, Homo sapien
gactactgggtcctaaggctctttt

SEQ ID NO: 5777059 - DNA, 25 bp, Homo sapien
agtggcacagtgcttaggtagaagc

SEQ ID NO: 5777060 - DNA, 25 bp, Homo sapien
aacaagtatgtccatgttttccacc

SEQ ID NO: 5777061 - DNA, 25 bp, Homo sapien
gatgatggactcctcctctggacac

SEQ ID NO: 5777062 - DNA, 25 bp, Homo sapien
gctttgctgattgtagtggcacagt

SEQ ID NO: 5777063 - DNA, 25 bp, Homo sapien
ctaagtcagggttctcatgcaggtg

SEQ ID NO: 5777064 - DNA, 25 bp, Homo sapien
tgttgtagagcgtgaagagggcagc

SEQ ID NO: 5777065 - DNA, 25 bp, Homo sapien
agcccctgtcagctggggcagcagg

SEQ ID NO: 5777066 - DNA, 25 bp, Homo sapien
cacggagaaactgtatacatgattc

SEQ ID NO: 5777067 - DNA, 25 bp, Homo sapien
ccagtttgtgtagagtgtggtgatt

SEQ ID NO: 5777068 - DNA, 25 bp, Homo sapien
gatcaagagcaggcaggccacctta

SEQ ID NO: 5777069 - DNA, 25 bp, Homo sapien
ttgcagtggtgaagaccatggttct

SEQ ID NO: 5777070 - DNA, 25 bp, Homo sapien
cacatcctcacggataagggtgatg

SEQ ID NO: 5777071 - DNA, 25 bp, Homo sapien
aaagatactcaaggtcaccttgatg

SEQ ID NO: 5777072 - DNA, 25 bp, Homo sapien
agaagggaagatagtatgttcaaac

SEQ ID NO: 5777073 - DNA, 25 bp, Homo sapien
gaaactgtatacatgattcattgtc

SEQ ID NO: 5777074 - DNA, 25 bp, Homo sapien
gcagcacatcctcacggataagggt

SEQ ID NO: 5777075 - DNA, 25 bp, Homo sapien
caagtatgtccatgttttccaccac

SEQ ID NO: 5777076 - DNA, 25 bp, Homo sapien
gaaactgccagaaagatcaagagca

SEQ ID NO: 5777077 - DNA, 25 bp, Homo sapien
aggagatgaagtatcagctttcaga

SEQ ID NO: 5777078 - DNA, 25 bp, Homo sapien
aagccatcaagtccggcttgctaaa

SEQ ID NO: 5777079 - DNA, 25 bp, Homo sapien
tgtccctctcgggctctccttttct

SEQ ID NO: 5777080 - DNA, 25 bp, Homo sapien
ttccactatggcaagggtttaggaa

SEQ ID NO: 5777081 - DNA, 25 bp, Homo sapien
tgactctggaagcatctgcacccaa

SEQ ID NO: 5777082 - DNA, 25 bp, Homo sapien
ctcagctcctggcttgtccctctcg

SEQ ID NO: 5777083 - DNA, 25 bp, Homo sapien
atgcaggtgcagaggggccttagcc

SEQ ID NO: 5777084 - DNA, 25 bp, Homo sapien
caaggtcatggcaaacatcttctca

SEQ ID NO: 5777085 - DNA, 25 bp, Homo sapien
cttctctgggcaggctgacgaaggc

SEQ ID NO: 5777086 - DNA, 25 bp, Homo sapien
tggcataacgcaacatggcagattc

SEQ ID NO: 5777087 - DNA, 25 bp, Homo sapien
tcaggagatgaagtatcagctttca

SEQ ID NO: 5777088 - DNA, 25 bp, Homo sapien
gtacgttactccttttttcattgta

SEQ ID NO: 5777089 - DNA, 25 bp, Homo sapien
tggcaagggtttaggaaggtccaaa

SEQ ID NO: 5777090 - DNA, 25 bp, Homo sapien
ccataagaaatgggcagtgggagga

SEQ ID NO: 5777091 - DNA, 25 bp, Homo sapien
tccctcttgggccatggccctgaaa

SEQ ID NO: 5777092 - DNA, 25 bp, Homo sapien
gccaccaccagaaattccttgaggt

SEQ ID NO: 5777093 - DNA, 25 bp, Homo sapien
ttctcaatgctataaaaggaagaag

SEQ ID NO: 5777094 - DNA, 25 bp, Homo sapien
acatgccacatcaggttttcactca

SEQ ID NO: 5777095 - DNA, 25 bp, Homo sapien
agcacaagagcatcaaatcttgcca

SEQ ID NO: 5777096 - DNA, 25 bp, Homo sapien
aggaatccagtggttgtgtctgctg

SEQ ID NO: 5777097 - DNA, 25 bp, Homo sapien
acattttcagcccctgtcagctggg

SEQ ID NO: 5777098 - DNA, 25 bp, Homo sapien
gaaggacagggccatgaaagcaaaa

SEQ ID NO: 5777099 - DNA, 25 bp, Homo sapien
atcttctcaaagatacgaagatgaa

SEQ ID NO: 5777100 - DNA, 25 bp, Homo sapien
agcgtgaagagggcagcagacacct

SEQ ID NO: 5777101 - DNA, 25 bp, Homo sapien
cacacaatggctctgttgagtctgg

SEQ ID NO: 5777102 - DNA, 25 bp, Homo sapien
gactcctgccaacagctcagaaggc

SEQ ID NO: 5777103 - DNA, 25 bp, Homo sapien
accagccaggtgacctcatcacgaa

SEQ ID NO: 5777104 - DNA, 25 bp, Homo sapien
caccttatattcctcctcaggagat

SEQ ID NO: 5777105 - DNA, 25 bp, Homo sapien
ttaggtgtagcttgtccatgttggt

SEQ ID NO: 5777106 - DNA, 25 bp, Homo sapien
attctcgatttctggttttaagctt

SEQ ID NO: 5777107 - DNA, 25 bp, Homo sapien
cagtgggtactggcaggcattcagt

SEQ ID NO: 5777108 - DNA, 25 bp, Homo sapien
cctccaaggtcatggcaaacatctt

SEQ ID NO: 5777109 - DNA, 25 bp, Homo sapien
ctggcttgtccctctcgggctctcc

SEQ ID NO: 5777110 - DNA, 25 bp, Homo sapien
tctgggcaggctgacgaaggcctgc

SEQ ID NO: 5777111 - DNA, 25 bp, Homo sapien
agtgacaaactccttcaagcactca

SEQ ID NO: 5777112 - DNA, 25 bp, Homo sapien
ggacatgatgatggactcctcctct

SEQ ID NO: 5777113 - DNA, 25 bp, Homo sapien
tcagagatgtcagagaactcctctg

SEQ ID NO: 5777114 - DNA, 25 bp, Homo sapien
tggacacacagacaagttctgaatg

SEQ ID NO: 5777115 - DNA, 25 bp, Homo sapien
tggccctgaaactgaggataacccc

SEQ ID NO: 5777116 - DNA, 25 bp, Homo sapien
aaggccgtacgatctcctgggtcgt

SEQ ID NO: 5777117 - DNA, 25 bp, Homo sapien
aaagtagctctgcaatgctcgagtc

SEQ ID NO: 5777118 - DNA, 25 bp, Homo sapien
tcagccaacacagtctccagctcct

SEQ ID NO: 5777119 - DNA, 25 bp, Homo sapien
gtgggagggaaactgccagaaagat

SEQ ID NO: 5777120 - DNA, 25 bp, Homo sapien
tggtgaagaccatggttcttgaggt

SEQ ID NO: 5777121 - DNA, 25 bp, Homo sapien
gctcttcagtgggtactggcaggca

SEQ ID NO: 5777122 - DNA, 25 bp, Homo sapien
tcctggcccagctgcaagaggctga

SEQ ID NO: 5777123 - DNA, 25 bp, Homo sapien
cacatctcatgagtgcagtggacaa

SEQ ID NO: 5777124 - DNA, 25 bp, Homo sapien
agcttcttcagctccacaatctgag

SEQ ID NO: 5777125 - DNA, 25 bp, Homo sapien
gtaaaattcacacatgtggccccac

SEQ ID NO: 5777126 - DNA, 25 bp, Homo sapien
cagcaatttttctacggagtccagc

SEQ ID NO: 5777127 - DNA, 25 bp, Homo sapien
cgtgaagagggcagcagacacctgg

SEQ ID NO: 5777128 - DNA, 25 bp, Homo sapien
tctgaacaagtatgtccatgttttc

SEQ ID NO: 5777129 - DNA, 25 bp, Homo sapien
tccatgttttccaccaccagcttct

SEQ ID NO: 5777130 - DNA, 25 bp, Homo sapien
tctggacacacagacaagttctgaa

SEQ ID NO: 5777131 - DNA, 25 bp, Homo sapien
ttccttgaggtgagtttcaatgttc

SEQ ID NO: 5777132 - DNA, 25 bp, Homo sapien
aggaaggatgactcctccaccacca

SEQ ID NO: 5777133 - DNA, 25 bp, Homo sapien
cctgcgaaagtgaccacagcttcca

SEQ ID NO: 5777134 - DNA, 25 bp, Homo sapien
tgctgcggttcttccggtgactctc

SEQ ID NO: 5777135 - DNA, 25 bp, Homo sapien
gacaaagaagaaacccaatgataat

SEQ ID NO: 5777136 - DNA, 25 bp, Homo sapien
ttctgaatgatgtcactgagcacaa

SEQ ID NO: 5777137 - DNA, 25 bp, Homo sapien
gatgactctggaagcatctgcaccc

SEQ ID NO: 5777138 - DNA, 25 bp, Homo sapien
cttggctttgctgattgtagtggca

SEQ ID NO: 5777139 - DNA, 25 bp, Homo sapien
ccctggattgttcttccacagatct

SEQ ID NO: 5777140 - DNA, 25 bp, Homo sapien
tgtagccagccagccacacaatggc

SEQ ID NO: 5777141 - DNA, 25 bp, Homo sapien
atccagtggttgtgtctgctgcagg

SEQ ID NO: 5777142 - DNA, 25 bp, Homo sapien
attgtctgttccccacaggaatcca

SEQ ID NO: 5777143 - DNA, 25 bp, Homo sapien
tagctctgcaatgctcgagtcagca

SEQ ID NO: 5777144 - DNA, 25 bp, Homo sapien
tgaagagggcagcagacacctggat

SEQ ID NO: 5777145 - DNA, 25 bp, Homo sapien
actgacgaatgaggacatgatgatg

SEQ ID NO: 5777146 - DNA, 25 bp, Homo sapien
tgcctgtaggcggaaccagtccagc

SEQ ID NO: 5777147 - DNA, 25 bp, Homo sapien
accctctctccttagtgaccccacc

SEQ ID NO: 5777148 - DNA, 25 bp, Homo sapien
cttaggtagaagctgctcgctcagg

SEQ ID NO: 5777149 - DNA, 25 bp, Homo sapien
gagaggatgatggtcccactgcttg

SEQ ID NO: 5777150 - DNA, 25 bp, Homo sapien
tgggcagtgggaggagaaaacctcc

SEQ ID NO: 5777151 - DNA, 25 bp, Homo sapien
tgctctacgatttctcagccctgga

SEQ ID NO: 5777152 - DNA, 25 bp, Homo sapien
gtcatggcaaacatcttctcaaaga

SEQ ID NO: 5777153 - DNA, 25 bp, Homo sapien
aggataaccccaatgatggtcatgc

SEQ ID NO: 5777154 - DNA, 25 bp, Homo sapien
tcaggaacttcatgccataggggcc

SEQ ID NO: 5777155 - DNA, 25 bp, Homo sapien
ttccaccagcaatttttctacggag

SEQ ID NO: 5777156 - DNA, 25 bp, Homo sapien
ttcaaacacggagaaactgtataca

SEQ ID NO: 5777157 - DNA, 25 bp, Homo sapien
cacaatggctctgttgagtctggcc

SEQ ID NO: 5777158 - DNA, 25 bp, Homo sapien
tgggagtctgcctctgcttcctggt

SEQ ID NO: 5777159 - DNA, 25 bp, Homo sapien
ataagggaaacaggactccagcatg

SEQ ID NO: 5777160 - DNA, 25 bp, Homo sapien
cctctcgggctctccttttctggga

SEQ ID NO: 5777161 - DNA, 25 bp, Homo sapien
acccatgacaaagaagaaacccaat

SEQ ID NO: 5777162 - DNA, 25 bp, Homo sapien
tggcacagtgcttaggtagaagctg

SEQ ID NO: 5777163 - DNA, 25 bp, Homo sapien
agatgaaagcagaaagtagacagat

SEQ ID NO: 5777164 - DNA, 25 bp, Homo sapien
agtagctctgcaatgctcgagtcag

SEQ ID NO: 5777165 - DNA, 25 bp, Homo sapien
aaacccaatgataatccagcgctcc

SEQ ID NO: 5777166 - DNA, 25 bp, Homo sapien
gggccatggccctgaaactgaggat

SEQ ID NO: 5777167 - DNA, 25 bp, Homo sapien
ctgctcagcacagatctccaggacg

SEQ ID NO: 5777168 - DNA, 25 bp, Homo sapien
gatctgctcatcaactctggctcct

SEQ ID NO: 5777169 - DNA, 25 bp, Homo sapien
agctgctcgctcaggtttcgctgct

SEQ ID NO: 5777170 - DNA, 25 bp, Homo sapien
tatgctttgactcctgccaacagct

SEQ ID NO: 5777171 - DNA, 25 bp, Homo sapien
gcctgtctaagcagactttccaggt

SEQ ID NO: 5777172 - DNA, 25 bp, Homo sapien
cagacacctggatgatggctttggt

SEQ ID NO: 5777173 - DNA, 25 bp, Homo sapien
ctcacggataagggtgatgtagagg

SEQ ID NO: 5777174 - DNA, 25 bp, Homo sapien
gtgactttgtgcacctgcagcacat

SEQ ID NO: 5777175 - DNA, 25 bp, Homo sapien
attagcaatggcagccaccaaggct

SEQ ID NO: 5777176 - DNA, 25 bp, Homo sapien
ggcccagctgcaagaggctgacaga

SEQ ID NO: 5777177 - DNA, 25 bp, Homo sapien
attgctgtatcactttgatgtgtct

SEQ ID NO: 5777178 - DNA, 25 bp, Homo sapien
ggtactcctctgggcacatctcatg

SEQ ID NO: 5777179 - DNA, 25 bp, Homo sapien
gacaaagtgagcacaaatcaggggg

SEQ ID NO: 5777180 - DNA, 25 bp, Homo sapien
gtcagggttctcatgcaggtgcaga

SEQ ID NO: 5777181 - DNA, 25 bp, Homo sapien
ctgacgaaggcctgcatggctgggg

SEQ ID NO: 5777182 - DNA, 25 bp, Homo sapien
cgggagtggaagacaatgaggttca

SEQ ID NO: 5777183 - DNA, 25 bp, Homo sapien
tcagattagcaatggcagccaccaa

SEQ ID NO: 5777184 - DNA, 25 bp, Homo sapien
gctcagaaggccgtacgatctcctg

SEQ ID NO: 5777185 - DNA, 25 bp, Homo sapien
gtccagggtcaggaaggatgactcc

SEQ ID NO: 5777186 - DNA, 25 bp, Homo sapien
agtcccggttcatcagccaacacag

SEQ ID NO: 5777187 - DNA, 25 bp, Homo sapien
aggttttcactcaggaacttcatgc

SEQ ID NO: 5777188 - DNA, 25 bp, Homo sapien
ggaaggagttgcagtggtgaagacc

SEQ ID NO: 5777189 - DNA, 25 bp, Homo sapien
aaactggccactgtttgcaattaca

SEQ ID NO: 5777190 - DNA, 25 bp, Homo sapien
tggtattgctgtatcactttgatgt

SEQ ID NO: 5777191 - DNA, 25 bp, Homo sapien
ggctaagtcagggttctcatgcagg

SEQ ID NO: 5777192 - DNA, 25 bp, Homo sapien
ctttgatgtgtcttcggaccagaga

SEQ ID NO: 5777193 - DNA, 25 bp, Homo sapien
taaccccaatgatggtcatgcgctt

SEQ ID NO: 5777194 - DNA, 25 bp, Homo sapien
gtgccagttctgtcaagtttaggtg

SEQ ID NO: 5777195 - DNA, 25 bp, Homo sapien
atgatggtcatgcgctttagcacat

SEQ ID NO: 5777196 - DNA, 25 bp, Homo sapien
aaaactgggccagtgactgtatgaa

SEQ ID NO: 5777197 - DNA, 25 bp, Homo sapien
gccagaaagatcaagagcaggcagg

SEQ ID NO: 5777198 - DNA, 25 bp, Homo sapien
gccacgctagtgtatgcctgtaggc

SEQ ID NO: 5777199 - DNA, 25 bp, Homo sapien
gaagaccatggttcttgaggtgggg

SEQ ID NO: 5777200 - DNA, 25 bp, Homo sapien
tgcggatgactctggaagcatctgc

SEQ ID NO: 5777201 - DNA, 25 bp, Homo sapien
agtggtgaagaccatggttcttgag

SEQ ID NO: 5777202 - DNA, 25 bp, Homo sapien
tcttcggaccagagacctaatcccc

SEQ ID NO: 5777203 - DNA, 25 bp, Homo sapien
ctgcagacacagcttccacagcttc

SEQ ID NO: 5777204 - DNA, 25 bp, Homo sapien
atgatggtcccactgcttgcctgtc

SEQ ID NO: 5777205 - DNA, 25 bp, Homo sapien
actcaaggtcaccttgatgtctgtg

SEQ ID NO: 5777206 - DNA, 25 bp, Homo sapien
gttgtgtctgctgcaggagggcgtt

SEQ ID NO: 5777207 - DNA, 25 bp, Homo sapien
atcccctccaacaagaaaagtagct

SEQ ID NO: 5777208 - DNA, 25 bp, Homo sapien
gctggggagaggatgatggtcccac

SEQ ID NO: 5777209 - DNA, 25 bp, Homo sapien
ctgtgtctggagtgacaaactcctt

SEQ ID NO: 5777210 - DNA, 25 bp, Homo sapien
atccttctcaatgctataaaaggaa

SEQ ID NO: 5777211 - DNA, 25 bp, Homo sapien
cagccaggtgacctcatcacgaatg

SEQ ID NO: 5777212 - DNA, 25 bp, Homo sapien
gcagactttccaggtaccagtttgt

SEQ ID NO: 5777213 - DNA, 25 bp, Homo sapien
gggggaaagcaatggcataacgcaa

SEQ ID NO: 5777214 - DNA, 25 bp, Homo sapien
gcaattacatgttccttgctctcct

SEQ ID NO: 5777215 - DNA, 25 bp, Homo sapien
tcttcagctccacaatctgagaggt

SEQ ID NO: 5777216 - DNA, 25 bp, Homo sapien
agattagcaatggcagccaccaagg

SEQ ID NO: 5777217 - DNA, 25 bp, Homo sapien
ccttatattcctcctcaggagatga

SEQ ID NO: 5777218 - DNA, 25 bp, Homo sapien
ggacataagggaaacaggactccag

SEQ ID NO: 5777219 - DNA, 25 bp, Homo sapien
ggcactggctattggagttgaggca

SEQ ID NO: 5777220 - DNA, 25 bp, Homo sapien
attatcaacttgtttgagattcaga

SEQ ID NO: 5777221 - DNA, 25 bp, Homo sapien
tgttcttccacagatctgctcatca

SEQ ID NO: 5777222 - DNA, 25 bp, Homo sapien
ctcctttatgtctgccactctcttg

SEQ ID NO: 5777223 - DNA, 25 bp, Homo sapien
gaggtgagtttcaatgttcttgttg

SEQ ID NO: 5777224 - DNA, 25 bp, Homo sapien
aatcctgagaattcaaatttttctc

SEQ ID NO: 5777225 - DNA, 25 bp, Homo sapien
tctggttttaagcttgtcagtctcc

SEQ ID NO: 5777226 - DNA, 25 bp, Homo sapien
ggtgatgtagagggagccctgcaga

SEQ ID NO: 5777227 - DNA, 25 bp, Homo sapien
gtcagagaactcctctgcactgaag

SEQ ID NO: 5777228 - DNA, 25 bp, Homo sapien
atttttctccattatcaacttgttt

SEQ ID NO: 5777229 - DNA, 25 bp, Homo sapien
gagtgcagtggacaaagtgagcaca

SEQ ID NO: 5777230 - DNA, 25 bp, Homo sapien
cagacaagttctgaatgatgtcact

SEQ ID NO: 5777231 - DNA, 25 bp, Homo sapien
caaggctgggtcaatgtcacagccc

SEQ ID NO: 5777232 - DNA, 25 bp, Homo sapien
atgagtgcagtggacaaagtgagca

SEQ ID NO: 5777233 - DNA, 25 bp, Homo sapien
tactcctctgggcacatctcatgag

SEQ ID NO: 5777234 - DNA, 25 bp, Homo sapien
gtccggcttgctaaagttggatctg

SEQ ID NO: 5777235 - DNA, 25 bp, Homo sapien
aatattgttgttgtaaccatccttc

SEQ ID NO: 5777236 - DNA, 25 bp, Homo sapien
tctgcacccaaaaactgggccagtg

SEQ ID NO: 5777237 - DNA, 25 bp, Homo sapien
ttcaaactgctaaacaggtcctcgg

SEQ ID NO: 5777238 - DNA, 25 bp, Homo sapien
ctccttcactgccatccgcagaaat

SEQ ID NO: 5777239 - DNA, 25 bp, Homo sapien
ttgctggtctgcttggccaactctt

SEQ ID NO: 5777240 - DNA, 25 bp, Homo sapien
aggagttctgccaaggcccgcatct

SEQ ID NO: 5777241 - DNA, 25 bp, Homo sapien
atgagcagagaaatggattctcgat

SEQ ID NO: 5777242 - DNA, 25 bp, Homo sapien
tgtgtagagtgtggtgattgtctgt

SEQ ID NO: 5777243 - DNA, 25 bp, Homo sapien
catcaagtccggcttgctaaagttg

SEQ ID NO: 5777244 - DNA, 25 bp, Homo sapien
ggattctcgatttctggttttaagc

SEQ ID NO: 5777245 - DNA, 25 bp, Homo sapien
atgctcccagcctgcctcactgctc

SEQ ID NO: 5777246 - DNA, 25 bp, Homo sapien
ggagttgcagtggtgaagaccatgg

SEQ ID NO: 5777247 - DNA, 25 bp, Homo sapien
aggtcatggcaaacatcttctcaaa

SEQ ID NO: 5777248 - DNA, 25 bp, Homo sapien
atgaaggacagggccatgaaagcaa

SEQ ID NO: 5777249 - DNA, 25 bp, Homo sapien
gttcttgaggtgggggtactcctct

SEQ ID NO: 5777250 - DNA, 25 bp, Homo sapien
gacacctggatgatggctttggtca

SEQ ID NO: 5777251 - DNA, 25 bp, Homo sapien
ctgcggttcttccggtgactctcag

SEQ ID NO: 5777252 - DNA, 25 bp, Homo sapien
cttgtccatgttggtgacaatgctg

SEQ ID NO: 5777253 - DNA, 25 bp, Homo sapien
tcagtttaggtggaaggcccgagac

SEQ ID NO: 5777254 - DNA, 25 bp, Homo sapien
aaccatccttctcaatgctataaaa

SEQ ID NO: 5777255 - DNA, 25 bp, Homo sapien
tgaggttcatcaccttggctaagtc

SEQ ID NO: 5777256 - DNA, 25 bp, Homo sapien
ggtaccagtttgtgtagagtgtggt

SEQ ID NO: 5777257 - DNA, 25 bp, Homo sapien
ggactccagcatgtccagggtcagg

SEQ ID NO: 5777258 - DNA, 25 bp, Homo sapien
ggtagaagctgctcgctcaggtttc

SEQ ID NO: 5777259 - DNA, 25 bp, Homo sapien
gtagtcccggttcatcagccaacac

SEQ ID NO: 5777260 - DNA, 25 bp, Homo sapien
agtctggcctccaggtggctgctga

SEQ ID NO: 5777261 - DNA, 25 bp, Homo sapien
tgaagtatcagctttcagattagca

SEQ ID NO: 5777262 - DNA, 25 bp, Homo sapien
cttgccaagtactgaaggtggtatt

SEQ ID NO: 5777263 - DNA, 25 bp, Homo sapien
tctcagccctggattgttcttccac

SEQ ID NO: 5777264 - DNA, 25 bp, Homo sapien
gattcattgtcagtgccagttctgt

SEQ ID NO: 5777265 - DNA, 25 bp, Homo sapien
aactgggccagtgactgtatgaaac

SEQ ID NO: 5777266 - DNA, 25 bp, Homo sapien
aggcattcagtttaggtggaaggcc

SEQ ID NO: 5777267 - DNA, 25 bp, Homo sapien
tcctcggtgactttgtgcacctgca

SEQ ID NO: 5777268 - DNA, 25 bp, Homo sapien
tggcgaaccagccaggtgacctcat

SEQ ID NO: 5777269 - DNA, 25 bp, Homo sapien
tcacatgccacatcaggttttcact

SEQ ID NO: 5777270 - DNA, 25 bp, Homo sapien
tgtatgcctgtaggcggaaccagtc

SEQ ID NO: 5777271 - DNA, 25 bp, Homo sapien
agactttccaggtaccagtttgtgt

SEQ ID NO: 5777272 - DNA, 25 bp, Homo sapien
cagctcctggcttgtccctctcggg

SEQ ID NO: 5777273 - DNA, 25 bp, Homo sapien
gtgggtactggcaggcattcagttt

SEQ ID NO: 5777274 - DNA, 25 bp, Homo sapien
ggattgttcttccacagatctgctc

SEQ ID NO: 5777275 - DNA, 25 bp, Homo sapien
ggtccaaagggctcttcagtgggta

SEQ ID NO: 5777276 - DNA, 25 bp, Homo sapien
cactttgatgtgtcttcggaccaga

SEQ ID NO: 5777277 - DNA, 25 bp, Homo sapien
tgttttccaccaccagcttcttcag

SEQ ID NO: 5777278 - DNA, 25 bp, Homo sapien
tgagtctggcctccaggtggctgct

SEQ ID NO: 5777279 - DNA, 25 bp, Homo sapien
tatggcaagggtttaggaaggtcca

SEQ ID NO: 5777280 - DNA, 25 bp, Homo sapien
aaggcctgcatggctggggagagga

SEQ ID NO: 5777281 - DNA, 25 bp, Homo sapien
cgccctaactttttccataagctgt

SEQ ID NO: 5777282 - DNA, 25 bp, Homo sapien
tgtttgagattcagagaggagagga

SEQ ID NO: 5777283 - DNA, 25 bp, Homo sapien
gttttaagcttgtcagtctcctggc

SEQ ID NO: 5777284 - DNA, 25 bp, Homo sapien
ttgtaaccatccttctcaatgctat

SEQ ID NO: 5777285 - DNA, 25 bp, Homo sapien
atctgatctgaacaagtatgtccat

SEQ ID NO: 5777286 - DNA, 25 bp, Homo sapien
gaaaagtagctctgcaatgctcgag

SEQ ID NO: 5777287 - DNA, 25 bp, Homo sapien
tcctcctcaggagatgaagtatcag

SEQ ID NO: 5777288 - DNA, 25 bp, Homo sapien
cccaatgatggtcatgcgctttagc

SEQ ID NO: 5777289 - DNA, 25 bp, Homo sapien
tgccaagtactgaaggtggtattgc

SEQ ID NO: 5777290 - DNA, 25 bp, Homo sapien
cttccggtgactctcagctcctggc

SEQ ID NO: 5777291 - DNA, 25 bp, Homo sapien
cagggccatgaaagcaaaaagagcc

SEQ ID NO: 5777292 - DNA, 25 bp, Homo sapien
ccttctcaatgctataaaaggaaga

SEQ ID NO: 5777293 - DNA, 25 bp, Homo sapien
tctgtgtggcgaaccagccaggtga

SEQ ID NO: 5777294 - DNA, 25 bp, Homo sapien
cggtgactctcagctcctggcttgt

SEQ ID NO: 5777295 - DNA, 25 bp, Homo sapien
tccctctcgggctctccttttctgg

SEQ ID NO: 5777296 - DNA, 25 bp, Homo sapien
tgttcaaacacggagaaactgtata

SEQ ID NO: 5777297 - DNA, 25 bp, Homo sapien
gagggcagcagacacctggatgatg

SEQ ID NO: 5777298 - DNA, 25 bp, Homo sapien
aaagttggatctgatctgaacaagt

SEQ ID NO: 5777299 - DNA, 25 bp, Homo sapien
cacagacaagttctgaatgatgtca

SEQ ID NO: 5777300 - DNA, 25 bp, Homo sapien
actcctctgcactgaagttctgctc

SEQ ID NO: 5777301 - DNA, 25 bp, Homo sapien
ccaagtactgaaggtggtattgctg

SEQ ID NO: 5777302 - DNA, 25 bp, Homo sapien
aaccaatgtatgctttgactcctgc

SEQ ID NO: 5777303 - DNA, 25 bp, Homo sapien
aggagtgggagggaaactgccagaa

SEQ ID NO: 5777304 - DNA, 25 bp, Homo sapien
tcctgggtcgtggcattgtagccag

SEQ ID NO: 5777305 - DNA, 25 bp, Homo sapien
ctggctattggagttgaggcaccca

SEQ ID NO: 5777306 - DNA, 25 bp, Homo sapien
agggtcaggaaggatgactcctcca

SEQ ID NO: 5777307 - DNA, 25 bp, Homo sapien
caccaccagaaattccttgaggtga

SEQ ID NO: 5777308 - DNA, 25 bp, Homo sapien
atgctcgagtcagcatagtcctcag

SEQ ID NO: 5777309 - DNA, 25 bp, Homo sapien
gctcaaagatactcaaggtcacctt

SEQ ID NO: 5777310 - DNA, 25 bp, Homo sapien
tagcaatggcagccaccaaggctgg

SEQ ID NO: 5777311 - DNA, 25 bp, Homo sapien
atcagggggaaagcaatggcataac

SEQ ID NO: 5777312 - DNA, 25 bp, Homo sapien
ttccataagctgtcctccatgctcc

SEQ ID NO: 5777313 - DNA, 25 bp, Homo sapien
gtctgtgtctggagtgacaaactcc

SEQ ID NO: 5777314 - DNA, 25 bp, Homo sapien
tataaaaggaagaagggtcagtggc

SEQ ID NO: 5777315 - DNA, 25 bp, Homo sapien
ggagccctgcagacacagcttccac

SEQ ID NO: 5777316 - DNA, 25 bp, Homo sapien
ctctgcactgaagttctgctcccct

SEQ ID NO: 5777317 - DNA, 25 bp, Homo sapien
gcatagtcctcaggtgtctttgtct

SEQ ID NO: 5777318 - DNA, 25 bp, Homo sapien
ttcttccggtgactctcagctcctg

SEQ ID NO: 5777319 - DNA, 25 bp, Homo sapien
accttgatgtctgtgtctggagtga

SEQ ID NO: 5777320 - DNA, 25 bp, Homo sapien
tcctccaccaccaagcgcatgagca

SEQ ID NO: 5777321 - DNA, 25 bp, Homo sapien
gccagctcaaagatactcaaggtca

SEQ ID NO: 5777322 - DNA, 25 bp, Homo sapien
gtagtggcacagtgcttaggtagaa

SEQ ID NO: 5777323 - DNA, 25 bp, Homo sapien
aagtatcagctttcagattagcaat

SEQ ID NO: 5777324 - DNA, 25 bp, Homo sapien
ctcctcaggagatgaagtatcagct

SEQ ID NO: 5777325 - DNA, 25 bp, Homo sapien
cttgttcttggctttgctgattgta

SEQ ID NO: 5777326 - DNA, 25 bp, Homo sapien
gccagccacacaatggctctgttga

SEQ ID NO: 5777327 - DNA, 25 bp, Homo sapien
aggccaccttatattcctcctcagg

SEQ ID NO: 5777328 - DNA, 25 bp, Homo sapien
tccttcaagcactcaatgggaccca

SEQ ID NO: 5777329 - DNA, 25 bp, Homo sapien
cgccgttgacaatgaaactggccac

SEQ ID NO: 5777330 - DNA, 25 bp, Homo sapien
caatggctctgttgagtctggcctc

SEQ ID NO: 5777331 - DNA, 25 bp, Homo sapien
gttcatcaccttggctaagtcaggg

SEQ ID NO: 5777332 - DNA, 25 bp, Homo sapien
cgaaagtgaccacagcttccactat

SEQ ID NO: 5777333 - DNA, 25 bp, Homo sapien
gtcatgcgctttagcacattttcag

SEQ ID NO: 5777334 - DNA, 25 bp, Homo sapien
ccttggctaagtcagggttctcatg

SEQ ID NO: 5777335 - DNA, 25 bp, Homo sapien
ctagtgtatgcctgtaggcggaacc

SEQ ID NO: 5777336 - DNA, 25 bp, Homo sapien
taggtggaaggcccgagacacctcc

SEQ ID NO: 5777337 - DNA, 25 bp, Homo sapien
ggcaaggagtgggagggaaactgcc

SEQ ID NO: 5777338 - DNA, 25 bp, Homo sapien
tccccttctctgggcaggctgacga

SEQ ID NO: 5777339 - DNA, 25 bp, Homo sapien
catccgcagaaattgccgccgttga

SEQ ID NO: 5777340 - DNA, 25 bp, Homo sapien
gtctggagtgacaaactccttcaag

SEQ ID NO: 5777341 - DNA, 25 bp, Homo sapien
aaaggaagaagggtcagtggcaagg

SEQ ID NO: 5777342 - DNA, 25 bp, Homo sapien
ccaccagcaatttttctacggagtc

SEQ ID NO: 5777343 - DNA, 25 bp, Homo sapien
acgcaattgctggtctgcttggcca

SEQ ID NO: 5777344 - DNA, 25 bp, Homo sapien
gaaccagtccagcctcaatcctgag

SEQ ID NO: 5777345 - DNA, 25 bp, Homo sapien
tccttttctgggagtctgcctctgc

SEQ ID NO: 5777346 - DNA, 25 bp, Homo sapien
ggcggaaccagtccagcctcaatcc

SEQ ID NO: 5777347 - DNA, 25 bp, Homo sapien
gtatcagctttcagattagcaatgg

SEQ ID NO: 5777348 - DNA, 25 bp, Homo sapien
gcatgagcagagaaatggattctcg

SEQ ID NO: 5777349 - DNA, 25 bp, Homo sapien
cactggctattggagttgaggcacc

SEQ ID NO: 5777350 - DNA, 25 bp, Homo sapien
atggctctgttgagtctggcctcca

SEQ ID NO: 5777351 - DNA, 25 bp, Homo sapien
aggaacttcatgccataggggccca

SEQ ID NO: 5777352 - DNA, 25 bp, Homo sapien
tttcagattagcaatggcagccacc

SEQ ID NO: 5777353 - DNA, 25 bp, Homo sapien
tagacagatcagaagtttccaccag

SEQ ID NO: 5777354 - DNA, 25 bp, Homo sapien
gagggcgttgcggatgactctggaa

SEQ ID NO: 5777355 - DNA, 25 bp, Homo sapien
acagaggccaccaccagaaattcct

SEQ ID NO: 5777356 - DNA, 25 bp, Homo sapien
cacccaaaaactgggccagtgactg

SEQ ID NO: 5777357 - DNA, 25 bp, Homo sapien
tcactgagcacaagagcatcaaatc

SEQ ID NO: 5777358 - DNA, 25 bp, Homo sapien
ggtgtctttgtcttggtgacattct

SEQ ID NO: 5777359 - DNA, 25 bp, Homo sapien
gaaaccaatgtatgctttgactcct

SEQ ID NO: 5777360 - DNA, 25 bp, Homo sapien
aatgaaactggccactgtttgcaat

SEQ ID NO: 5777361 - DNA, 25 bp, Homo sapien
tgtggcgaaccagccaggtgacctc

SEQ ID NO: 5777362 - DNA, 25 bp, Homo sapien
cccactgcttgcctgtctaagcaga

SEQ ID NO: 5777363 - DNA, 25 bp, Homo sapien
ctggggcagcagggaagccatcaag

SEQ ID NO: 5777364 - DNA, 25 bp, Homo sapien
gtttccaccagcaatttttctacgg

SEQ ID NO: 5777365 - DNA, 25 bp, Homo sapien
tcagaagtttccaccagcaattttt

SEQ ID NO: 5777366 - DNA, 25 bp, Homo sapien
aggccaccaccagaaattccttgag

SEQ ID NO: 5777367 - DNA, 25 bp, Homo sapien
gcacagtgcttaggtagaagctgct

SEQ ID NO: 5777368 - DNA, 25 bp, Homo sapien
ggggtactcctctgggcacatctca

SEQ ID NO: 5777369 - DNA, 25 bp, Homo sapien
tctgggagtctgcctctgcttcctg

SEQ ID NO: 5777370 - DNA, 25 bp, Homo sapien
ctaaagttggatctgatctgaacaa

SEQ ID NO: 5777371 - DNA, 25 bp, Homo sapien
gaacttcatgccataggggcccagg

SEQ ID NO: 5777372 - DNA, 25 bp, Homo sapien
tcaaagatacgaagatgaaagcaga

SEQ ID NO: 5777373 - DNA, 25 bp, Homo sapien
gagatgaagtatcagctttcagatt

SEQ ID NO: 5777374 - DNA, 25 bp, Homo sapien
gggccttagccacgctagtgtatgc

SEQ ID NO: 5777375 - DNA, 25 bp, Homo sapien
gaatgatgtcactgagcacaagagc

SEQ ID NO: 5777376 - DNA, 25 bp, Homo sapien
ctcaggtgtctttgtcttggtgaca

SEQ ID NO: 5777377 - DNA, 25 bp, Homo sapien
ttttccaccaccagcttcttcagct

SEQ ID NO: 5777378 - DNA, 25 bp, Homo sapien
gcacaaatcagggggaaagcaatgg

SEQ ID NO: 5777379 - DNA, 25 bp, Homo sapien
ggctgacgaaggcctgcatggctgg

SEQ ID NO: 5777380 - DNA, 25 bp, Homo sapien
agacacagcttccacagcttctggc

SEQ ID NO: 5777381 - DNA, 25 bp, Homo sapien
ttcttccacagatctgctcatcaac

SEQ ID NO: 5777382 - DNA, 25 bp, Homo sapien
gcagccaccaaggctgggtcaatgt

SEQ ID NO: 5777383 - DNA, 25 bp, Homo sapien
agagcatcaaatcttgccaagtact

SEQ ID NO: 5777384 - DNA, 25 bp, Homo sapien
agtttgtgtagagtgtggtgattgt

SEQ ID NO: 5777385 - DNA, 25 bp, Homo sapien
ctcctgccaacagctcagaaggccg

SEQ ID NO: 5777386 - DNA, 25 bp, Homo sapien
cctcactgctctacgatttctcagc

SEQ ID NO: 5777387 - DNA, 25 bp, Homo sapien
tgagtttcaatgttcttgttgtaga

SEQ ID NO: 5777388 - DNA, 25 bp, Homo sapien
tctgtcaagtttaggtgtagcttgt

SEQ ID NO: 5777389 - DNA, 25 bp, Homo sapien
gccataccctttcaaactgctaaac

SEQ ID NO: 5777390 - DNA, 25 bp, Homo sapien
tccagcatgtccagggtcaggaagg

SEQ ID NO: 5777391 - DNA, 25 bp, Homo sapien
gcagtggacaaagtgagcacaaatc

SEQ ID NO: 5777392 - DNA, 25 bp, Homo sapien
gaaacaggactccagcatgtccagg

SEQ ID NO: 5777393 - DNA, 25 bp, Homo sapien
tgtcagctggggcagcagggaagcc

SEQ ID NO: 5777394 - DNA, 25 bp, Homo sapien
tcgatttctggttttaagcttgtca

SEQ ID NO: 5777395 - DNA, 25 bp, Homo sapien
ggatgatggtcccactgcttgcctg

SEQ ID NO: 5777396 - DNA, 25 bp, Homo sapien
aattcacacatgtggccccacgccc

SEQ ID NO: 5777397 - DNA, 25 bp, Homo sapien
cttccacagatctgctcatcaactc

SEQ ID NO: 5777398 - DNA, 25 bp, Homo sapien
attctctgtgtggcgaaccagccag

SEQ ID NO: 5777399 - DNA, 25 bp, Homo sapien
cacagatctgctcatcaactctggc

SEQ ID NO: 5777400 - DNA, 25 bp, Homo sapien
ttctggcactggctattggagttga

SEQ ID NO: 5777401 - DNA, 25 bp, Homo sapien
agtatgttcaaacacggagaaactg

SEQ ID NO: 5777402 - DNA, 25 bp, Homo sapien
ccgataggcatttcgaagcaggaca

SEQ ID NO: 5777403 - DNA, 25 bp, Homo sapien
ctccaggtggctgctgaggtactca

SEQ ID NO: 5777404 - DNA, 25 bp, Homo sapien
gatttctggttttaagcttgtcagt

SEQ ID NO: 5777405 - DNA, 25 bp, Homo sapien
gaaatgggcagtgggaggagaaaac

SEQ ID NO: 5777406 - DNA, 25 bp, Homo sapien
catgttggtgacaatgctgcggttc

SEQ ID NO: 5777407 - DNA, 25 bp, Homo sapien
cagcagggaagccatcaagtccggc

SEQ ID NO: 5777408 - DNA, 25 bp, Homo sapien
agcccacacctgcagcagatgccag

SEQ ID NO: 5777409 - DNA, 25 bp, Homo sapien
aatgaggttcatcaccttggctaag

SEQ ID NO: 5777410 - DNA, 25 bp, Homo sapien
acataagggaaacaggactccagca

SEQ ID NO: 5777411 - DNA, 25 bp, Homo sapien
atgtcagagaactcctctgcactga

SEQ ID NO: 5777412 - DNA, 25 bp, Homo sapien
tgaacaagtatgtccatgttttcca

SEQ ID NO: 5777413 - DNA, 25 bp, Homo sapien
ctccattatcaacttgtttgagatt

SEQ ID NO: 5777414 - DNA, 25 bp, Homo sapien
gggtcgtggcattgtagccagccag

SEQ ID NO: 5777415 - DNA, 25 bp, Homo sapien
ttcactgccatccgcagaaattgcc

SEQ ID NO: 5777416 - DNA, 25 bp, Homo sapien
tcaatgttcttgttgtagagcgtga

SEQ ID NO: 5777417 - DNA, 25 bp, Homo sapien
ctcatcaactctggctcctgaccct

SEQ ID NO: 5777418 - DNA, 25 bp, Homo sapien
ctctcagctcctggcttgtccctct

SEQ ID NO: 5777419 - DNA, 25 bp, Homo sapien
ccaccaccagcttcttcagctccac

SEQ ID NO: 5777420 - DNA, 25 bp, Homo sapien
cagccacacaatggctctgttgagt

SEQ ID NO: 5777421 - DNA, 25 bp, Homo sapien
ctccaccaccaagcgcatgagcaga

SEQ ID NO: 5777422 - DNA, 25 bp, Homo sapien
gagaggtcacatgccacatcaggtt

SEQ ID NO: 5777423 - DNA, 25 bp, Homo sapien
catgcgctttagcacattttcagcc

SEQ ID NO: 5777424 - DNA, 25 bp, Homo sapien
gagaactcctctgcactgaagttct

SEQ ID NO: 5777425 - DNA, 25 bp, Homo sapien
aagcagaaagtagacagatcagaag

SEQ ID NO: 5777426 - DNA, 25 bp, Homo sapien
gcaatgaatattgttgttgtaacca

SEQ ID NO: 5777427 - DNA, 25 bp, Homo sapien
gatggtcccactgcttgcctgtcta

SEQ ID NO: 5777428 - DNA, 25 bp, Homo sapien
gctcctggcttgtccctctcgggct

SEQ ID NO: 5777429 - DNA, 25 bp, Homo sapien
cacagcttccactatggcaagggtt

SEQ ID NO: 5777430 - DNA, 25 bp, Homo sapien
acaatgaaactggccactgtttgca

SEQ ID NO: 5777431 - DNA, 25 bp, Homo sapien
tgccaacagctcagaaggccgtacg

SEQ ID NO: 5777432 - DNA, 25 bp, Homo sapien
agggaagccatcaagtccggcttgc

SEQ ID NO: 5777433 - DNA, 25 bp, Homo sapien
cccacacctgcagcagatgccagct

SEQ ID NO: 5777434 - DNA, 25 bp, Homo sapien
gaggacatgatgatggactcctcct

SEQ ID NO: 5777435 - DNA, 25 bp, Homo sapien
cttccacagcttctggcactggcta

SEQ ID NO: 5777436 - DNA, 25 bp, Homo sapien
atctgagaggtcacatgccacatca

SEQ ID NO: 5777437 - DNA, 25 bp, Homo sapien
aggtggctgctgaggtactcagaag

SEQ ID NO: 5777438 - DNA, 25 bp, Homo sapien
ggaaggtccaaagggctcttcagtg

SEQ ID NO: 5777439 - DNA, 25 bp, Homo sapien
gctgacagaggccaccaccagaaat

SEQ ID NO: 5777440 - DNA, 25 bp, Homo sapien
tgcttaggtagaagctgctcgctca

SEQ ID NO: 5777441 - DNA, 25 bp, Homo sapien
gtacgatctcctgggtcgtggcatt

SEQ ID NO: 5777442 - DNA, 25 bp, Homo sapien
ttcttgttcttggctttgctgattg

SEQ ID NO: 5777443 - DNA, 25 bp, Homo sapien
tatgtccatgttttccaccaccagc

SEQ ID NO: 5777444 - DNA, 25 bp, Homo sapien
agtttaggtggaaggcccgagacac

SEQ ID NO: 5777445 - DNA, 25 bp, Homo sapien
cattcgggagtggaagacaatgagg

SEQ ID NO: 5777446 - DNA, 25 bp, Homo sapien
agttctgaatgatgtcactgagcac

SEQ ID NO: 5777447 - DNA, 25 bp, Homo sapien
cacctggatgatggctttggtcaag

SEQ ID NO: 5777448 - DNA, 25 bp, Homo sapien
tcctcacggataagggtgatgtaga

SEQ ID NO: 5777449 - DNA, 25 bp, Homo sapien
cagatcagaagtttccaccagcaat

SEQ ID NO: 5777450 - DNA, 25 bp, Homo sapien
tgctctcctttatgtctgccactct

SEQ ID NO: 5777451 - DNA, 25 bp, Homo sapien
ccggttcatcagccaacacagtctc

SEQ ID NO: 5777452 - DNA, 25 bp, Homo sapien
tcctgagaattcaaatttttctcca

SEQ ID NO: 5777453 - DNA, 25 bp, Homo sapien
atattcctcctcaggagatgaagta

SEQ ID NO: 5777454 - DNA, 25 bp, Homo sapien
atcagctttcagattagcaatggca

SEQ ID NO: 5777455 - DNA, 25 bp, Homo sapien
tgctgtatcactttgatgtgtcttc

SEQ ID NO: 5777456 - DNA, 25 bp, Homo sapien
tccaggacgcaattgctggtctgct

SEQ ID NO: 5777457 - DNA, 25 bp, Homo sapien
gtggtgattgtctgttccccacagg

SEQ ID NO: 5777458 - DNA, 25 bp, Homo sapien
cgaaggcctgcatggctggggagag

SEQ ID NO: 5777459 - DNA, 25 bp, Homo sapien
tcccggttcatcagccaacacagtc

SEQ ID NO: 5777460 - DNA, 25 bp, Homo sapien
agttgcagtggtgaagaccatggtt

SEQ ID NO: 5777461 - DNA, 25 bp, Homo sapien
gtctccagctccttcactgccatcc

SEQ ID NO: 5777462 - DNA, 25 bp, Homo sapien
ccaacacagtctccagctccttcac

SEQ ID NO: 5777463 - DNA, 25 bp, Homo sapien
gcaggcattcagtttaggtggaagg

SEQ ID NO: 5777464 - DNA, 25 bp, Homo sapien
gaggatgatggtcccactgcttgcc

SEQ ID NO: 5777465 - DNA, 25 bp, Homo sapien
tcagcccctgtcagctggggcagca

SEQ ID NO: 5777466 - DNA, 25 bp, Homo sapien
aagctgtcctccatgctcccagcct

SEQ ID NO: 5777467 - DNA, 25 bp, Homo sapien
acaagaaaagtagctctgcaatgct

SEQ ID NO: 5777468 - DNA, 25 bp, Homo sapien
tccgcagaaattgccgccgttgaca

SEQ ID NO: 5777469 - DNA, 25 bp, Homo sapien
gtttaggtgtagcttgtccatgttg

SEQ ID NO: 5777470 - DNA, 25 bp, Homo sapien
tgaaggtggtattgctgtatcactt

SEQ ID NO: 5777471 - DNA, 25 bp, Homo sapien
tgctgcaggagggcgttgcggatga

SEQ ID NO: 5777472 - DNA, 25 bp, Homo sapien
ggtgagtttcaatgttcttgttgta

SEQ ID NO: 5777473 - DNA, 25 bp, Homo sapien
gttccttgctctcctttatgtctgc

SEQ ID NO: 5777474 - DNA, 25 bp, Homo sapien
tccatgttggtgacaatgctgcggt

SEQ ID NO: 5777475 - DNA, 25 bp, Homo sapien
ccgaagtccctcttgggccatggcc

SEQ ID NO: 5777476 - DNA, 25 bp, Homo sapien
caatgatggtcatgcgctttagcac

SEQ ID NO: 5777477 - DNA, 25 bp, Homo sapien
ttcattgtcagtgccagttctgtca

SEQ ID NO: 5777478 - DNA, 25 bp, Homo sapien
tttatgtctgccactctcttgccat

SEQ ID NO: 5777479 - DNA, 25 bp, Homo sapien
ccctgcagacacagcttccacagct

SEQ ID NO: 5777480 - DNA, 25 bp, Homo sapien
gtttgcaattacatgttccttgctc

SEQ ID NO: 5777481 - DNA, 25 bp, Homo sapien
gccgccgttgacaatgaaactggcc

SEQ ID NO: 5777482 - DNA, 25 bp, Homo sapien
agtgaccacagcttccactatggca

SEQ ID NO: 5777483 - DNA, 25 bp, Homo sapien
tggcctccaggtggctgctgaggta

SEQ ID NO: 5777484 - DNA, 25 bp, Homo sapien
gttgagtctggcctccaggtggctg

SEQ ID NO: 5777485 - DNA, 25 bp, Homo sapien
aatccagcgctccattacttccaca

SEQ ID NO: 5777486 - DNA, 25 bp, Homo sapien
ccagcctcaatcctgagaattcaaa

SEQ ID NO: 5777487 - DNA, 25 bp, Homo sapien
ctttttccataagctgtcctccatg

SEQ ID NO: 5777488 - DNA, 25 bp, Homo sapien
ttcttgttgtagagcgtgaagaggg

SEQ ID NO: 5777489 - DNA, 25 bp, Homo sapien
catcagccaacacagtctccagctc

SEQ ID NO: 5777490 - DNA, 25 bp, Homo sapien
ataagaaatgggcagtgggaggaga

SEQ ID NO: 5777491 - DNA, 25 bp, Homo sapien
gagttctgccaaggcccgcatctca

SEQ ID NO: 5777492 - DNA, 25 bp, Homo sapien
cagtccagcctcaatcctgagaatt

SEQ ID NO: 5777493 - DNA, 25 bp, Homo sapien
atgaaaccaatgtatgctttgactc

SEQ ID NO: 5777494 - DNA, 25 bp, Homo sapien
gcttgcctgtctaagcagactttcc

SEQ ID NO: 5777495 - DNA, 25 bp, Homo sapien
tcaagagcaggcaggccaccttata

SEQ ID NO: 5777496 - DNA, 25 bp, Homo sapien
gctcagcacagatctccaggacgca

SEQ ID NO: 5777497 - DNA, 25 bp, Homo sapien
agagaggagaggatactgacgaatg

SEQ ID NO: 5777498 - DNA, 25 bp, Homo sapien
agcacagatctccaggacgcaattg

SEQ ID NO: 5777499 - DNA, 25 bp, Homo sapien
ttgccataccctttcaaactgctaa

SEQ ID NO: 5777500 - DNA, 25 bp, Homo sapien
tttctggttttaagcttgtcagtct

SEQ ID NO: 5777501 - DNA, 25 bp, Homo sapien
agcatcaaatcttgccaagtactga

SEQ ID NO: 5777502 - DNA, 25 bp, Homo sapien
ggctctgttgagtctggcctccagg

SEQ ID NO: 5777503 - DNA, 25 bp, Homo sapien
ttgaggtgagtttcaatgttcttgt

SEQ ID NO: 5777504 - DNA, 25 bp, Homo sapien
ctattggagttgaggcacccatgac

SEQ ID NO: 5777505 - DNA, 25 bp, Homo sapien
ccaactcttccaggaaggagttgca

SEQ ID NO: 5777506 - DNA, 25 bp, Homo sapien
ttgttgttgtaaccatccttctcaa

SEQ ID NO: 5777507 - DNA, 25 bp, Homo sapien
ggagtgacaaactccttcaagcact

SEQ ID NO: 5777508 - DNA, 25 bp, Homo sapien
tttaagcttgtcagtctcctggccc

SEQ ID NO: 5777509 - DNA, 25 bp, Homo sapien
tgggaggagaaaacctcccgaagtc

SEQ ID NO: 5777510 - DNA, 25 bp, Homo sapien
cagtgggaggagaaaacctcccgaa

SEQ ID NO: 5777511 - DNA, 25 bp, Homo sapien
ggcacatctcatgagtgcagtggac

SEQ ID NO: 5777512 - DNA, 25 bp, Homo sapien
tgcctctgcttcctggttttcttgt

SEQ ID NO: 5777513 - DNA, 25 bp, Homo sapien
atacgaagatgaaagcagaaagtag

SEQ ID NO: 5777514 - DNA, 25 bp, Homo sapien
ggatactgacgaatgaggacatgat

SEQ ID NO: 5777515 - DNA, 25 bp, Homo sapien
gaagcatctgcacccaaaaactggg

SEQ ID NO: 5777516 - DNA, 25 bp, Homo sapien
cacgctagtgtatgcctgtaggcgg

SEQ ID NO: 5777517 - DNA, 25 bp, Homo sapien
agtccctcttgggccatggccctga

SEQ ID NO: 5777518 - DNA, 25 bp, Homo sapien
ttgtagagcgtgaagagggcagcag

SEQ ID NO: 5777519 - DNA, 25 bp, Homo sapien
atagtatgttcaaacacggagaaac

SEQ ID NO: 5777520 - DNA, 25 bp, Homo sapien
gctcgagtcagcatagtcctcaggt

SEQ ID NO: 5777521 - DNA, 25 bp, Homo sapien
ttttcttgttcttggctttgctgat

SEQ ID NO: 5777522 - DNA, 25 bp, Homo sapien
tctgctgcaggagggcgttgcggat

SEQ ID NO: 5777523 - DNA, 25 bp, Homo sapien
ccagtggttgtgtctgctgcaggag

SEQ ID NO: 5777524 - DNA, 25 bp, Homo sapien
tcctccatgctcccagcctgcctca

SEQ ID NO: 5777525 - DNA, 25 bp, Homo sapien
cacatcaggttttcactcaggaact

SEQ ID NO: 5777526 - DNA, 25 bp, Homo sapien
tggacaaagtgagcacaaatcaggg

SEQ ID NO: 5777527 - DNA, 25 bp, Homo sapien
acgatttctcagccctggattgttc

SEQ ID NO: 5777528 - DNA, 25 bp, Homo sapien
gaaattccttgaggtgagtttcaat

SEQ ID NO: 5777529 - DNA, 25 bp, Homo sapien
ggctcctgaccctctctccttagtg

SEQ ID NO: 5777530 - DNA, 25 bp, Homo sapien
gactttgtgcacctgcagcacatcc

SEQ ID NO: 5777531 - DNA, 25 bp, Homo sapien
tggctttgctgattgtagtggcaca

SEQ ID NO: 5777532 - DNA, 25 bp, Homo sapien
ttggctaagtcagggttctcatgca

SEQ ID NO: 5777533 - DNA, 25 bp, Homo sapien
cacagcttctggcactggctattgg

SEQ ID NO: 5777534 - DNA, 25 bp, Homo sapien
tgtccatgttttccaccaccagctt

SEQ ID NO: 5777535 - DNA, 25 bp, Homo sapien
gtatcactttgatgtgtcttcggac

SEQ ID NO: 5777536 - DNA, 25 bp, Homo sapien
aactcttccaggaaggagttgcagt

SEQ ID NO: 5777537 - DNA, 25 bp, Homo sapien
agattcagagaggagaggatactga

SEQ ID NO: 5777538 - DNA, 25 bp, Homo sapien
ccagcctgcctcactgctctacgat

SEQ ID NO: 5777539 - DNA, 25 bp, Homo sapien
ggcttgctaaagttggatctgatct

SEQ ID NO: 5777540 - DNA, 25 bp, Homo sapien
gtcagcatagtcctcaggtgtcttt

SEQ ID NO: 5777541 - DNA, 25 bp, Homo sapien
catgccataggggcccaggagttct

SEQ ID NO: 5777542 - DNA, 25 bp, Homo sapien
gcacctgcagcacatcctcacggat

SEQ ID NO: 5777543 - DNA, 25 bp, Homo sapien
cagcagatgccagctcaaagatact

SEQ ID NO: 5777544 - DNA, 25 bp, Homo sapien
gcacccatgacaaagaagaaaccca

SEQ ID NO: 5777545 - DNA, 25 bp, Homo sapien
aaggagttgcagtggtgaagaccat

SEQ ID NO: 5777546 - DNA, 25 bp, Homo sapien
tcagctggggcagcagggaagccat

SEQ ID NO: 5777547 - DNA, 25 bp, Homo sapien
tgacgaatgaggacatgatgatgga

SEQ ID NO: 5777548 - DNA, 25 bp, Homo sapien
gagcacaaatcagggggaaagcaat

SEQ ID NO: 5777549 - DNA, 25 bp, Homo sapien
gcagaggggccttagccacgctagt

SEQ ID NO: 5777550 - DNA, 25 bp, Homo sapien
cgctttagcacattttcagcccctg

SEQ ID NO: 5777551 - DNA, 25 bp, Homo sapien
tcgggctctccttttctgggagtct

SEQ ID NO: 5777552 - DNA, 25 bp, Homo sapien
gggcagcagacacctggatgatggc

SEQ ID NO: 5777553 - DNA, 25 bp, Homo sapien
catggcaaacatcttctcaaagata

SEQ ID NO: 5777554 - DNA, 25 bp, Homo sapien
accaccagcttcttcagctccacaa

SEQ ID NO: 5777555 - DNA, 25 bp, Homo sapien
cctcccgaagtccctcttgggccat

SEQ ID NO: 5777556 - DNA, 25 bp, Homo sapien
ccactatggcaagggtttaggaagg

SEQ ID NO: 5777557 - DNA, 25 bp, Homo sapien
gtcccactgcttgcctgtctaagca

SEQ ID NO: 5777558 - DNA, 25 bp, Homo sapien
aggacccagtagtcccggttcatca

SEQ ID NO: 5777559 - DNA, 25 bp, Homo sapien
tatcaacttgtttgagattcagaga

SEQ ID NO: 5777560 - DNA, 25 bp, Homo sapien
gtagcttgtccatgttggtgacaat

SEQ ID NO: 5777561 - DNA, 25 bp, Homo sapien
tctttgtcttggtgacattctctgt

SEQ ID NO: 5777562 - DNA, 25 bp, Homo sapien
ttatattcctcctcaggagatgaag

SEQ ID NO: 5777563 - DNA, 25 bp, Homo sapien
tgacctcatcacgaatgaaggacag

SEQ ID NO: 5777564 - DNA, 25 bp, Homo sapien
agagggagccctgcagacacagctt

SEQ ID NO: 5777565 - DNA, 25 bp, Homo sapien
ataatccagcgctccattacttcca

SEQ ID NO: 5777566 - DNA, 25 bp, Homo sapien
caacaagaaaagtagctctgcaatg

SEQ ID NO: 5777567 - DNA, 25 bp, Homo sapien
ctcggtgactttgtgcacctgcagc

SEQ ID NO: 5777568 - DNA, 25 bp, Homo sapien
aggaagaagggtcagtggcaaggag

SEQ ID NO: 5777569 - DNA, 25 bp, Homo sapien
aatgtatgctttgactcctgccaac

SEQ ID NO: 5777570 - DNA, 25 bp, Homo sapien
gagaggatactgacgaatgaggaca

SEQ ID NO: 5777571 - DNA, 25 bp, Homo sapien
ttcacacatgtggccccacgcccta

SEQ ID NO: 5777572 - DNA, 25 bp, Homo sapien
aatgttcttgttgtagagcgtgaag

SEQ ID NO: 5777573 - DNA, 25 bp, Homo sapien
cggataagggtgatgtagagggagc

SEQ ID NO: 5777574 - DNA, 25 bp, Homo sapien
aagagggcagcagacacctggatga

SEQ ID NO: 5777575 - DNA, 25 bp, Homo sapien
cagccagccacacaatggctctgtt

SEQ ID NO: 5777576 - DNA, 25 bp, Homo sapien
tctgcaatgctcgagtcagcatagt

SEQ ID NO: 5777577 - DNA, 25 bp, Homo sapien
attgtagccagccagccacacaatg

SEQ ID NO: 5777578 - DNA, 25 bp, Homo sapien
acatgatgatggactcctcctctgg

SEQ ID NO: 5777579 - DNA, 25 bp, Homo sapien
actcctccaccaccaagcgcatgag

SEQ ID NO: 5777580 - DNA, 25 bp, Homo sapien
gagcaggcaggccaccttatattcc

SEQ ID NO: 5777581 - DNA, 25 bp, Homo sapien
cctccaacaagaaaagtagctctgc

SEQ ID NO: 5777582 - DNA, 25 bp, Homo sapien
ggcagtgggaggagaaaacctcccg

SEQ ID NO: 5777583 - DNA, 25 bp, Homo sapien
caaaaagagccttaggacccagtag

SEQ ID NO: 5777584 - DNA, 25 bp, Homo sapien
cctgcatggctggggagaggatgat

SEQ ID NO: 5777585 - DNA, 25 bp, Homo sapien
gactctcagctcctggcttgtccct

SEQ ID NO: 5777586 - DNA, 25 bp, Homo sapien
gaactcctctgcactgaagttctgc

SEQ ID NO: 5777587 - DNA, 25 bp, Homo sapien
cagtagtcccggttcatcagccaac

SEQ ID NO: 5777588 - DNA, 25 bp, Homo sapien
aaggtccaaagggctcttcagtggg

SEQ ID NO: 5777589 - DNA, 25 bp, Homo sapien
gcaggagggcgttgcggatgactct

SEQ ID NO: 5777590 - DNA, 25 bp, Homo sapien
aatttttctacggagtccagcattc

SEQ ID NO: 5777591 - DNA, 25 bp, Homo sapien
tgtcctccatgctcccagcctgcct

SEQ ID NO: 5777592 - DNA, 25 bp, Homo sapien
acatcttctcaaagatacgaagatg

SEQ ID NO: 5777593 - DNA, 25 bp, Homo sapien
tctccttttctgggagtctgcctct

SEQ ID NO: 5777594 - DNA, 25 bp, Homo sapien
tgtcacagcccacacctgcagcaga

SEQ ID NO: 5777595 - DNA, 25 bp, Homo sapien
tcaccttgatgtctgtgtctggagt

SEQ ID NO: 5777596 - DNA, 25 bp, Homo sapien
gccagttctgtcaagtttaggtgta

SEQ ID NO: 5777597 - DNA, 25 bp, Homo sapien
cccttctctgggcaggctgacgaag

SEQ ID NO: 5777598 - DNA, 25 bp, Homo sapien
acgaatgaaggacagggccatgaaa

SEQ ID NO: 5777599 - DNA, 25 bp, Homo sapien
caacatggcagattcctccaaggtc

SEQ ID NO: 5777600 - DNA, 25 bp, Homo sapien
tgttggtgacaatgctgcggttctt

SEQ ID NO: 5777601 - DNA, 25 bp, Homo sapien
caggactccagcatgtccagggtca

SEQ ID NO: 5777602 - DNA, 25 bp, Homo sapien
actgaggataaccccaatgatggtc

SEQ ID NO: 5777603 - DNA, 25 bp, Homo sapien
gggcccaggagttctgccaaggccc

SEQ ID NO: 5777604 - DNA, 25 bp, Homo sapien
aagcagactttccaggtaccagttt

SEQ ID NO: 5777605 - DNA, 25 bp, Homo sapien
ggcagattcctccaaggtcatggca

SEQ ID NO: 5777606 - DNA, 25 bp, Homo sapien
ctccagctccttcactgccatccgc

SEQ ID NO: 5777607 - DNA, 25 bp, Homo sapien
tgccataggggcccaggagttctgc

SEQ ID NO: 5777608 - DNA, 25 bp, Homo sapien
ctggcactggctattggagttgagg

SEQ ID NO: 5777609 - DNA, 25 bp, Homo sapien
agatgtcagagaactcctctgcact

SEQ ID NO: 5777610 - DNA, 25 bp, Homo sapien
agcaggacataagggaaacaggact

SEQ ID NO: 5777611 - DNA, 25 bp, Homo sapien
atgttccttgctctcctttatgtct

SEQ ID NO: 5777612 - DNA, 25 bp, Homo sapien
ggtcaggaaggatgactcctccacc

SEQ ID NO: 5777613 - DNA, 25 bp, Homo sapien
cagaaagatcaagagcaggcaggcc

SEQ ID NO: 5777614 - DNA, 25 bp, Homo sapien
tcctcctctggacacacagacaagt

SEQ ID NO: 5777615 - DNA, 25 bp, Homo sapien
cctgccaacagctcagaaggccgta

SEQ ID NO: 5777616 - DNA, 25 bp, Homo sapien
aacgcaacatggcagattcctccaa

SEQ ID NO: 5777617 - DNA, 25 bp, Homo sapien
tcaagtccggcttgctaaagttgga

SEQ ID NO: 5777618 - DNA, 25 bp, Homo sapien
cacggataagggtgatgtagaggga

SEQ ID NO: 5777619 - DNA, 25 bp, Homo sapien
ccaagcgcatgagcagagaaatgga

SEQ ID NO: 5777620 - DNA, 25 bp, Homo sapien
tgacagaggccaccaccagaaattc

SEQ ID NO: 5777621 - DNA, 25 bp, Homo sapien
caccagcttcttcagctccacaatc

SEQ ID NO: 5777622 - DNA, 25 bp, Homo sapien
gctcaggtttcgctgctcagcacag

SEQ ID NO: 5777623 - DNA, 25 bp, Homo sapien
gtattgctgtatcactttgatgtgt

SEQ ID NO: 5777624 - DNA, 25 bp, Homo sapien
tccaggtaccagtttgtgtagagtg

SEQ ID NO: 5777625 - DNA, 25 bp, Homo sapien
ttgtacgttactccttttttcattg

SEQ ID NO: 5777626 - DNA, 25 bp, Homo sapien
gagtgggagggaaactgccagaaag

SEQ ID NO: 5777627 - DNA, 25 bp, Homo sapien
tcgctcaggtttcgctgctcagcac

SEQ ID NO: 5777628 - DNA, 25 bp, Homo sapien
agccctggattgttcttccacagat

SEQ ID NO: 5777629 - DNA, 25 bp, Homo sapien
gacgaaggcctgcatggctggggag

SEQ ID NO: 5777630 - DNA, 25 bp, Homo sapien
ttcctccaaggtcatggcaaacatc

SEQ ID NO: 5777631 - DNA, 25 bp, Homo sapien
caagaggctgacagaggccaccacc

SEQ ID NO: 5777632 - DNA, 25 bp, Homo sapien
accccctgcgaaagtgaccacagct

SEQ ID NO: 5777633 - DNA, 25 bp, Homo sapien
agaaacccaatgataatccagcgct

SEQ ID NO: 5777634 - DNA, 25 bp, Homo sapien
aattacatgttccttgctctccttt

SEQ ID NO: 5777635 - DNA, 25 bp, Homo sapien
ccaccccctgcgaaagtgaccacag

SEQ ID NO: 5777636 - DNA, 25 bp, Homo sapien
catcaaatcttgccaagtactgaag

SEQ ID NO: 5777637 - DNA, 25 bp, Homo sapien
ttggtgacattctctgtgtggcgaa

SEQ ID NO: 5777638 - DNA, 25 bp, Homo sapien
tgtctgttccccacaggaatccagt

SEQ ID NO: 5777639 - DNA, 25 bp, Homo sapien
ccggcttgctaaagttggatctgat

SEQ ID NO: 5777640 - DNA, 25 bp, Homo sapien
aatgataatccagcgctccattact

SEQ ID NO: 5777641 - DNA, 25 bp, Homo sapien
ttttcattgtaaaattcacacatgt

SEQ ID NO: 5777642 - DNA, 25 bp, Homo sapien
tgctttgactcctgccaacagctca

SEQ ID NO: 5777643 - DNA, 25 bp, Homo sapien
cagttctgtcaagtttaggtgtagc

SEQ ID NO: 5777644 - DNA, 25 bp, Homo sapien
tctctgtgtggcgaaccagccaggt

SEQ ID NO: 5777645 - DNA, 25 bp, Homo sapien
tctgccactctcttgccataccctt

SEQ ID NO: 5777646 - DNA, 25 bp, Homo sapien
cttgtttgagattcagagaggagag

SEQ ID NO: 5777647 - DNA, 25 bp, Homo sapien
ttcattgtaaaattcacacatgtgg

SEQ ID NO: 5777648 - DNA, 25 bp, Homo sapien
tggagttgaggcacccatgacaaag

SEQ ID NO: 5777649 - DNA, 25 bp, Homo sapien
gaatgaggacatgatgatggactcc

SEQ ID NO: 5777650 - DNA, 25 bp, Homo sapien
atactgacgaatgaggacatgatga

SEQ ID NO: 5777651 - DNA, 25 bp, Homo sapien
gccaggtgacctcatcacgaatgaa

SEQ ID NO: 5777652 - DNA, 25 bp, Homo sapien
cctctgggcacatctcatgagtgca

SEQ ID NO: 5777653 - DNA, 25 bp, Homo sapien
gaaggatgactcctccaccaccaag

SEQ ID NO: 5777654 - DNA, 25 bp, Homo sapien
taatcccctccaacaagaaaagtag

SEQ ID NO: 5777655 - DNA, 25 bp, Homo sapien
tcgagtcagcatagtcctcaggtgt

SEQ ID NO: 5777656 - DNA, 25 bp, Homo sapien
ctttcaaactgctaaacaggtcctc

SEQ ID NO: 5777657 - DNA, 25 bp, Homo sapien
aatgtcacagcccacacctgcagca

SEQ ID NO: 5777658 - DNA, 25 bp, Homo sapien
cctcttgggccatggccctgaaact

SEQ ID NO: 5777659 - DNA, 25 bp, Homo sapien
aatggcagccaccaaggctgggtca

SEQ ID NO: 5777660 - DNA, 25 bp, Homo sapien
ccatgacaaagaagaaacccaatga

SEQ ID NO: 5777661 - DNA, 25 bp, Homo sapien
tccaaagggctcttcagtgggtact

SEQ ID NO: 5777662 - DNA, 25 bp, Homo sapien
cgcagaaattgccgccgttgacaat

SEQ ID NO: 5777663 - DNA, 25 bp, Homo sapien
tcttgccataccctttcaaactgct

SEQ ID NO: 5777664 - DNA, 25 bp, Homo sapien
aagcaatgaatattgttgttgtaac

SEQ ID NO: 5777665 - DNA, 25 bp, Homo sapien
ctgctaaacaggtcctcggtgactt

SEQ ID NO: 5777666 - DNA, 25 bp, Homo sapien
tcaagcaatgaatattgttgttgta

SEQ ID NO: 5777667 - DNA, 25 bp, Homo sapien
tctggaagcatctgcacccaaaaac

SEQ ID NO: 5777668 - DNA, 25 bp, Homo sapien
tgttccccacaggaatccagtggtt

SEQ ID NO: 5777669 - DNA, 25 bp, Homo sapien
acctgcagcacatcctcacggataa

SEQ ID NO: 5777670 - DNA, 25 bp, Homo sapien
gatttctcagccctggattgttctt

SEQ ID NO: 5777671 - DNA, 25 bp, Homo sapien
acctcatcacgaatgaaggacaggg

SEQ ID NO: 5777672 - DNA, 25 bp, Homo sapien
gggccagtgactgtatgaaaccaat

SEQ ID NO: 5777673 - DNA, 25 bp, Homo sapien
gtatacatgattcattgtcagtgcc

SEQ ID NO: 5777674 - DNA, 25 bp, Homo sapien
cttgctaaagttggatctgatctga

SEQ ID NO: 5777675 - DNA, 25 bp, Homo sapien
agacaatgaggttcatcaccttggc

SEQ ID NO: 5777676 - DNA, 25 bp, Homo sapien
catggctggggagaggatgatggtc

SEQ ID NO: 5777677 - DNA, 25 bp, Homo sapien
gcaattgctggtctgcttggccaac

SEQ ID NO: 5777678 - DNA, 25 bp, Homo sapien
gccatggccctgaaactgaggataa

SEQ ID NO: 5777679 - DNA, 25 bp, Homo sapien
tccaacaagaaaagtagctctgcaa

SEQ ID NO: 5777680 - DNA, 25 bp, Homo sapien
agtatgtccatgttttccaccacca

SEQ ID NO: 5777681 - DNA, 25 bp, Homo sapien
aacaggtcctcggtgactttgtgca

SEQ ID NO: 5777682 - DNA, 25 bp, Homo sapien
tcaggttttcactcaggaacttcat

SEQ ID NO: 5777683 - DNA, 25 bp, Homo sapien
atggattctcgatttctggttttaa

SEQ ID NO: 5777684 - DNA, 25 bp, Homo sapien
tgagattcagagaggagaggatact

SEQ ID NO: 5777685 - DNA, 25 bp, Homo sapien
cagaaattgccgccgttgacaatga

SEQ ID NO: 5777686 - DNA, 25 bp, Homo sapien
agaaatggattctcgatttctggtt

SEQ ID NO: 5777687 - DNA, 25 bp, Homo sapien
tcccgaagtccctcttgggccatgg

SEQ ID NO: 5777688 - DNA, 25 bp, Homo sapien
cattgtaaaattcacacatgtggcc

SEQ ID NO: 5777689 - DNA, 25 bp, Homo sapien
gcttggccaactcttccaggaagga

SEQ ID NO: 5777690 - DNA, 25 bp, Homo sapien
gctgcaagaggctgacagaggccac

SEQ ID NO: 5777691 - DNA, 25 bp, Homo sapien
cagagaactcctctgcactgaagtt

SEQ ID NO: 5777692 - DNA, 25 bp, Homo sapien
cacaagagcatcaaatcttgccaag

SEQ ID NO: 5777693 - DNA, 25 bp, Homo sapien
aacacagtctccagctccttcactg

SEQ ID NO: 5777694 - DNA, 25 bp, Homo sapien
gctgtcctccatgctcccagcctgc

SEQ ID NO: 5777695 - DNA, 25 bp, Homo sapien
gcaggcaggccaccttatattcctc

SEQ ID NO: 5777696 - DNA, 25 bp, Homo sapien
tgaatattgttgttgtaaccatcct

SEQ ID NO: 5777697 - DNA, 25 bp, Homo sapien
gcattcagtttaggtggaaggcccg

SEQ ID NO: 5777698 - DNA, 25 bp, Homo sapien
attcccaccccctgcgaaagtgacc

SEQ ID NO: 5777699 - DNA, 25 bp, Homo sapien
ttgcctgtctaagcagactttccag

SEQ ID NO: 5777700 - DNA, 25 bp, Homo sapien
ttgccgccgttgacaatgaaactgg

SEQ ID NO: 5777701 - DNA, 25 bp, Homo sapien
gtaaccatccttctcaatgctataa

SEQ ID NO: 5777702 - DNA, 25 bp, Homo sapien
gatgtcactgagcacaagagcatca

SEQ ID NO: 5777703 - DNA, 25 bp, Homo sapien
gtggctgctgaggtactcagaaggg

SEQ ID NO: 5777704 - DNA, 25 bp, Homo sapien
tgtgtcttcggaccagagacctaat

SEQ ID NO: 5777705 - DNA, 25 bp, Homo sapien
gcagaaagtagacagatcagaagtt

SEQ ID NO: 5777706 - DNA, 25 bp, Homo sapien
cagatctccaggacgcaattgctgg

SEQ ID NO: 5777707 - DNA, 25 bp, Homo sapien
agaagtttccaccagcaatttttct

SEQ ID NO: 5777708 - DNA, 25 bp, Homo sapien
tgtctgctgcaggagggcgttgcgg

SEQ ID NO: 5777709 - DNA, 25 bp, Homo sapien
atgctataaaaggaagaagggtcag

SEQ ID NO: 5777710 - DNA, 25 bp, Homo sapien
ggtcctcggtgactttgtgcacctg

SEQ ID NO: 5777711 - DNA, 25 bp, Homo sapien
cctcccgataggcatttcgaagcag

SEQ ID NO: 5777712 - DNA, 25 bp, Homo sapien
gagacacctcccgataggcatttcg

SEQ ID NO: 5777713 - DNA, 25 bp, Homo sapien
ctaagcagactttccaggtaccagt

SEQ ID NO: 5777714 - DNA, 25 bp, Homo sapien
ttttctccattatcaacttgtttga

SEQ ID NO: 5777715 - DNA, 25 bp, Homo sapien
aaatggattctcgatttctggtttt

SEQ ID NO: 5777716 - DNA, 25 bp, Homo sapien
cggatgactctggaagcatctgcac

SEQ ID NO: 5777717 - DNA, 25 bp, Homo sapien
ggctttggtcaagcaatgaatattg

SEQ ID NO: 5777718 - DNA, 25 bp, Homo sapien
ccttcactgccatccgcagaaattg

SEQ ID NO: 5777719 - DNA, 25 bp, Homo sapien
aagtgagcacaaatcagggggaaag

SEQ ID NO: 5777720 - DNA, 25 bp, Homo sapien
tctggcctccaggtggctgctgagg

SEQ ID NO: 5777721 - DNA, 25 bp, Homo sapien
caggtaccagtttgtgtagagtgtg

SEQ ID NO: 5777722 - DNA, 25 bp, Homo sapien
ttgggccatggccctgaaactgagg

SEQ ID NO: 5777723 - DNA, 25 bp, Homo sapien
cccagtagtcccggttcatcagcca

SEQ ID NO: 5777724 - DNA, 25 bp, Homo sapien
atgatgtcactgagcacaagagcat

SEQ ID NO: 5777725 - DNA, 25 bp, Homo sapien
actgctctacgatttctcagccctg

SEQ ID NO: 5777726 - DNA, 25 bp, Homo sapien
cggtgactttgtgcacctgcagcac

SEQ ID NO: 5777727 - DNA, 25 bp, Homo sapien
gttttcactcaggaacttcatgcca

SEQ ID NO: 5777728 - DNA, 25 bp, Homo sapien
tctgcctctgcttcctggttttctt

SEQ ID NO: 5777729 - DNA, 25 bp, Homo sapien
aggtgcagaggggccttagccacgc

SEQ ID NO: 5777730 - DNA, 25 bp, Homo sapien
cgcatctcagagatgtcagagaact

SEQ ID NO: 5777731 - DNA, 25 bp, Homo sapien
gggctctccttttctgggagtctgc

SEQ ID NO: 5777732 - DNA, 25 bp, Homo sapien
ctttagcacattttcagcccctgtc

SEQ ID NO: 5777733 - DNA, 25 bp, Homo sapien
tattgttgttgtaaccatccttctc

SEQ ID NO: 5777734 - DNA, 25 bp, Homo sapien
tgactcctccaccaccaagcgcatg

SEQ ID NO: 5777735 - DNA, 25 bp, Homo sapien
caggacataagggaaacaggactcc

SEQ ID NO: 5777736 - DNA, 25 bp, Homo sapien
ggtcaatgtcacagcccacacctgc

SEQ ID NO: 5777737 - DNA, 25 bp, Homo sapien
agctccttcactgccatccgcagaa

SEQ ID NO: 5777738 - DNA, 25 bp, Homo sapien
ttacatgttccttgctctcctttat

SEQ ID NO: 5777739 - DNA, 25 bp, Homo sapien
tcttgaggtgggggtactcctctgg

SEQ ID NO: 5777740 - DNA, 25 bp, Homo sapien
gcactgaagttctgctccccttctc

SEQ ID NO: 5777741 - DNA, 25 bp, Homo sapien
tttctacggagtccagcattcggga

SEQ ID NO: 5777742 - DNA, 25 bp, Homo sapien
aggtttcgctgctcagcacagatct

SEQ ID NO: 5777743 - DNA, 25 bp, Homo sapien
agtgcttaggtagaagctgctcgct

SEQ ID NO: 5777744 - DNA, 25 bp, Homo sapien
tcccgataggcatttcgaagcagga

SEQ ID NO: 5777745 - DNA, 25 bp, Homo sapien
gtatgaaaccaatgtatgctttgac

SEQ ID NO: 5777746 - DNA, 25 bp, Homo sapien
cctcaggagatgaagtatcagcttt

SEQ ID NO: 5777747 - DNA, 25 bp, Homo sapien
gacagggccatgaaagcaaaaagag

SEQ ID NO: 5777748 - DNA, 25 bp, Homo sapien
cctggatgatggctttggtcaagca

SEQ ID NO: 5777749 - DNA, 25 bp, Homo sapien
cctctgcttcctggttttcttgttc

SEQ ID NO: 5777750 - DNA, 25 bp, Homo sapien
gtgcagtggacaaagtgagcacaaa

SEQ ID NO: 5777751 - DNA, 25 bp, Homo sapien
tttgtcttggtgacattctctgtgt

SEQ ID NO: 5777752 - DNA, 25 bp, Homo sapien
aattgctggtctgcttggccaactc

SEQ ID NO: 5777753 - DNA, 25 bp, Homo sapien
tgggggtactcctctgggcacatct

SEQ ID NO: 5777754 - DNA, 25 bp, Homo sapien
cccgcatctcagagatgtcagagaa

SEQ ID NO: 5777755 - DNA, 25 bp, Homo sapien
tgacattctctgtgtggcgaaccag

SEQ ID NO: 5777756 - DNA, 25 bp, Homo sapien
cctttatgtctgccactctcttgcc

SEQ ID NO: 5777757 - DNA, 25 bp, Homo sapien
gatgtgtcttcggaccagagaccta

SEQ ID NO: 5777758 - DNA, 25 bp, Homo sapien
tccaggaaggagttgcagtggtgaa

SEQ ID NO: 5777759 - DNA, 25 bp, Homo sapien
caaacacggagaaactgtatacatg

SEQ ID NO: 5777760 - DNA, 25 bp, Homo sapien
gtgagcacaaatcagggggaaagca

SEQ ID NO: 5777761 - DNA, 25 bp, Homo sapien
ctcctgaccctctctccttagtgac

SEQ ID NO: 5777762 - DNA, 25 bp, Homo sapien
gcagatgccagctcaaagatactca

SEQ ID NO: 5777763 - DNA, 25 bp, Homo sapien
aatgggcagtgggaggagaaaacct

SEQ ID NO: 5777764 - DNA, 25 bp, Homo sapien
gccccacgccctaactttttccata

SEQ ID NO: 5777765 - DNA, 25 bp, Homo sapien
agaggctgacagaggccaccaccag

SEQ ID NO: 5777766 - DNA, 25 bp, Homo sapien
catttcgaagcaggacataagggaa

SEQ ID NO: 5777767 - DNA, 25 bp, Homo sapien
aggcccgagacacctcccgataggc

SEQ ID NO: 5777768 - DNA, 25 bp, Homo sapien
gtcgtggcattgtagccagccagcc

SEQ ID NO: 5777769 - DNA, 25 bp, Homo sapien
agaccatggttcttgaggtgggggt

SEQ ID NO: 5777770 - DNA, 25 bp, Homo sapien
catctcagagatgtcagagaactcc

SEQ ID NO: 5777771 - DNA, 25 bp, Homo sapien
ggctattggagttgaggcacccatg

SEQ ID NO: 5777772 - DNA, 25 bp, Homo sapien
gtagagcgtgaagagggcagcagac

SEQ ID NO: 5777773 - DNA, 25 bp, Homo sapien
gtgcagaggggccttagccacgcta

SEQ ID NO: 5777774 - DNA, 25 bp, Homo sapien
caaactgctaaacaggtcctcggtg

SEQ ID NO: 5777775 - DNA, 25 bp, Homo sapien
ctaactttttccataagctgtcctc

SEQ ID NO: 5777776 - DNA, 25 bp, Homo sapien
aagaaaagtagctctgcaatgctcg

SEQ ID NO: 5777777 - DNA, 25 bp, Homo sapien
acaggaatccagtggttgtgtctgc

SEQ ID NO: 5777778 - DNA, 25 bp, Homo sapien
ggctgctgaggtactcagaagggaa

SEQ ID NO: 5777779 - DNA, 25 bp, Homo sapien
tctcatgagtgcagtggacaaagtg

SEQ ID NO: 5777780 - DNA, 25 bp, Homo sapien
actctggaagcatctgcacccaaaa

SEQ ID NO: 5777781 - DNA, 25 bp, Homo sapien
taggtagaagctgctcgctcaggtt

SEQ ID NO: 5777782 - DNA, 25 bp, Homo sapien
aggagaggatactgacgaatgagga

SEQ ID NO: 5777783 - DNA, 25 bp, Homo sapien
atggactcctcctctggacacacag

SEQ ID NO: 5777784 - DNA, 25 bp, Homo sapien
ctgtatcactttgatgtgtcttcgg

SEQ ID NO: 5777785 - DNA, 25 bp, Homo sapien
accagtccagcctcaatcctgagaa

SEQ ID NO: 5777786 - DNA, 25 bp, Homo sapien
cggaccagagacctaatcccctcca

SEQ ID NO: 5777787 - DNA, 25 bp, Homo sapien
tgatgtctgtgtctggagtgacaaa

SEQ ID NO: 5777788 - DNA, 25 bp, Homo sapien
tcttgggccatggccctgaaactga

SEQ ID NO: 5777789 - DNA, 25 bp, Homo sapien
accagaaattccttgaggtgagttt

SEQ ID NO: 5777790 - DNA, 25 bp, Homo sapien
gttgttgtaaccatccttctcaatg

SEQ ID NO: 5777791 - DNA, 25 bp, Homo sapien
ggttcatcagccaacacagtctcca

SEQ ID NO: 5777792 - DNA, 25 bp, Homo sapien
cacagtctccagctccttcactgcc

SEQ ID NO: 5777793 - DNA, 25 bp, Homo sapien
cataccctttcaaactgctaaacag

SEQ ID NO: 5777794 - DNA, 25 bp, Homo sapien
tttcgaagcaggacataagggaaac

SEQ ID NO: 5777795 - DNA, 25 bp, Homo sapien
tttaggtggaaggcccgagacacct

SEQ ID NO: 5777796 - DNA, 25 bp, Homo sapien
aggacagggccatgaaagcaaaaag

SEQ ID NO: 5777797 - DNA, 25 bp, Homo sapien
gacacacagacaagttctgaatgat

SEQ ID NO: 5777798 - DNA, 25 bp, Homo sapien
aagttctgctccccttctctgggca

SEQ ID NO: 5777799 - DNA, 25 bp, Homo sapien
agaaagtagacagatcagaagtttc

SEQ ID NO: 5777800 - DNA, 25 bp, Homo sapien
cagtggcaaggagtgggagggaaac

SEQ ID NO: 5777801 - DNA, 25 bp, Homo sapien
ggacgcaattgctggtctgcttggc

SEQ ID NO: 5777802 - DNA, 25 bp, Homo sapien
cactgccatccgcagaaattgccgc

SEQ ID NO: 5777803 - DNA, 25 bp, Homo sapien
tggaagacaatgaggttcatcacct

SEQ ID NO: 5777804 - DNA, 25 bp, Homo sapien
tttcaatgttcttgttgtagagcgt

SEQ ID NO: 5777805 - DNA, 25 bp, Homo sapien
gtcagtggcaaggagtgggagggaa

SEQ ID NO: 5777806 - DNA, 25 bp, Homo sapien
tcactcaggaacttcatgccatagg

SEQ ID NO: 5777807 - DNA, 25 bp, Homo sapien
ctggttttcttgttcttggctttgc

SEQ ID NO: 5777808 - DNA, 25 bp, Homo sapien
ggttttcttgttcttggctttgctg

SEQ ID NO: 5777809 - DNA, 25 bp, Homo sapien
ggtggaaggcccgagacacctcccg

SEQ ID NO: 5777810 - DNA, 25 bp, Homo sapien
tgtaggcggaaccagtccagcctca

SEQ ID NO: 5777811 - DNA, 25 bp, Homo sapien
aaaattcacacatgtggccccacgc

SEQ ID NO: 5777812 - DNA, 25 bp, Homo sapien
actccttcaagcactcaatgggacc

SEQ ID NO: 5777813 - DNA, 25 bp, Homo sapien
ggtcaagcaatgaatattgttgttg

SEQ ID NO: 5777814 - DNA, 25 bp, Homo sapien
gtgtggtgattgtctgttccccaca

SEQ ID NO: 5777815 - DNA, 25 bp, Homo sapien
aggtgtagcttgtccatgttggtga

SEQ ID NO: 5777816 - DNA, 25 bp, Homo sapien
gctctccttttctgggagtctgcct

SEQ ID NO: 5777817 - DNA, 25 bp, Homo sapien
aaaagagccttaggacccagtagtc

SEQ ID NO: 5777818 - DNA, 25 bp, Homo sapien
gccctgaaactgaggataaccccaa

SEQ ID NO: 5777819 - DNA, 25 bp, Homo sapien
ccagggtcaggaaggatgactcctc

SEQ ID NO: 5777820 - DNA, 25 bp, Homo sapien
ttgtaaaattcacacatgtggcccc

SEQ ID NO: 5777821 - DNA, 25 bp, Homo sapien
gtttcgctgctcagcacagatctcc

SEQ ID NO: 5777822 - DNA, 25 bp, Homo sapien
atgtagagggagccctgcagacaca

SEQ ID NO: 5777823 - DNA, 25 bp, Homo sapien
accaaggctgggtcaatgtcacagc

SEQ ID NO: 5777824 - DNA, 25 bp, Homo sapien
aggcaggccaccttatattcctcct

SEQ ID NO: 5777825 - DNA, 25 bp, Homo sapien
acccataagaaatgggcagtgggag

SEQ ID NO: 5777826 - DNA, 25 bp, Homo sapien
tcagaaggccgtacgatctcctggg

SEQ ID NO: 5777827 - DNA, 25 bp, Homo sapien
ggcttgtccctctcgggctctcctt

SEQ ID NO: 5777828 - DNA, 25 bp, Homo sapien
ttagcacattttcagcccctgtcag

SEQ ID NO: 5777829 - DNA, 25 bp, Homo sapien
ctgattgtagtggcacagtgcttag

SEQ ID NO: 5777830 - DNA, 25 bp, Homo sapien
atcaccttggctaagtcagggttct

SEQ ID NO: 5777831 - DNA, 25 bp, Homo sapien
tctgccaaggcccgcatctcagaga

SEQ ID NO: 5777832 - DNA, 25 bp, Homo sapien
gacaagttctgaatgatgtcactga

SEQ ID NO: 5777833 - DNA, 25 bp, Homo sapien
ccctaactttttccataagctgtcc

SEQ ID NO: 5777834 - DNA, 25 bp, Homo sapien
gatgactcctccaccaccaagcgca

SEQ ID NO: 5777835 - DNA, 25 bp, Homo sapien
aaagatacgaagatgaaagcagaaa

SEQ ID NO: 5777836 - DNA, 25 bp, Homo sapien
agcattcgggagtggaagacaatga

SEQ ID NO: 5777837 - DNA, 25 bp, Homo sapien
gcccgagacacctcccgataggcat

SEQ ID NO: 5777838 - DNA, 25 bp, Homo sapien
tctcaaagatacgaagatgaaagca

SEQ ID NO: 5777839 - DNA, 25 bp, Homo sapien
agccaacacagtctccagctccttc

SEQ ID NO: 5777840 - DNA, 25 bp, Homo sapien
atgtctgtgtctggagtgacaaact

SEQ ID NO: 5777841 - DNA, 25 bp, Homo sapien
gatctccaggacgcaattgctggtc

SEQ ID NO: 5777842 - DNA, 25 bp, Homo sapien
gcaggtgcagaggggccttagccac

SEQ ID NO: 5777843 - DNA, 25 bp, Homo sapien
tcctcaggtgtctttgtcttggtga

SEQ ID NO: 5777844 - DNA, 25 bp, Homo sapien
ctacgatttctcagccctggattgt

SEQ ID NO: 5777845 - DNA, 25 bp, Homo sapien
aactttttccataagctgtcctcca

SEQ ID NO: 5777846 - DNA, 25 bp, Homo sapien
ttcgctgctcagcacagatctccag

SEQ ID NO: 5777847 - DNA, 25 bp, Homo sapien
ttgatgtgtcttcggaccagagacc

SEQ ID NO: 5777848 - DNA, 25 bp, Homo sapien
agcacattttcagcccctgtcagct

SEQ ID NO: 5777849 - DNA, 25 bp, Homo sapien
actttccaggtaccagtttgtgtag

SEQ ID NO: 5777850 - DNA, 25 bp, Homo sapien
ctgtctaagcagactttccaggtac

SEQ ID NO: 5777851 - DNA, 25 bp, Homo sapien
caccttggctaagtcagggttctca

SEQ ID NO: 5777852 - DNA, 25 bp, Homo sapien
aacttgtttgagattcagagaggag

SEQ ID NO: 5777853 - DNA, 25 bp, Homo sapien
aagaaatgggcagtgggaggagaaa

SEQ ID NO: 5777854 - DNA, 25 bp, Homo sapien
ctgcttgcctgtctaagcagacttt

SEQ ID NO: 5777855 - DNA, 25 bp, Homo sapien
aagggtcagtggcaaggagtgggag

SEQ ID NO: 5777856 - DNA, 25 bp, Homo sapien
actatggcaagggtttaggaaggtc

SEQ ID NO: 5777857 - DNA, 25 bp, Homo sapien
tggtcatgcgctttagcacattttc

SEQ ID NO: 5777858 - DNA, 25 bp, Homo sapien
acgaatgaggacatgatgatggact

SEQ ID NO: 5777859 - DNA, 25 bp, Homo sapien
tagccacgctagtgtatgcctgtag

SEQ ID NO: 5777860 - DNA, 25 bp, Homo sapien
ttgcaattacatgttccttgctctc

SEQ ID NO: 5777861 - DNA, 25 bp, Homo sapien
cctcaatcctgagaattcaaatttt

SEQ ID NO: 5777862 - DNA, 25 bp, Homo sapien
actctcttgccataccctttcaaac

SEQ ID NO: 5777863 - DNA, 25 bp, Homo sapien
agcagacacctggatgatggctttg

SEQ ID NO: 5777864 - DNA, 25 bp, Homo sapien
ggttcttccggtgactctcagctcc

SEQ ID NO: 5777865 - DNA, 25 bp, Homo sapien
catcacgaatgaaggacagggccat

SEQ ID NO: 5777866 - DNA, 25 bp, Homo sapien
gcagtggtgaagaccatggttcttg

SEQ ID NO: 5777867 - DNA, 25 bp, Homo sapien
ataacgcaacatggcagattcctcc

SEQ ID NO: 5777868 - DNA, 25 bp, Homo sapien
cccctccaacaagaaaagtagctct

SEQ ID NO: 5777869 - DNA, 25 bp, Homo sapien
tatgtctgccactctcttgccatac

SEQ ID NO: 5777870 - DNA, 25 bp, Homo sapien
atacatgattcattgtcagtgccag

SEQ ID NO: 5777871 - DNA, 25 bp, Homo sapien
tttgtgtagagtgtggtgattgtct

SEQ ID NO: 5777872 - DNA, 25 bp, Homo sapien
cagtctccagctccttcactgccat

SEQ ID NO: 5777873 - DNA, 25 bp, Homo sapien
actcaatgggacccataagaaatgg

SEQ ID NO: 5777874 - DNA, 25 bp, Homo sapien
ccaccaaggctgggtcaatgtcaca

SEQ ID NO: 5777875 - DNA, 25 bp, Homo sapien
ctggagtgacaaactccttcaagca

SEQ ID NO: 5777876 - DNA, 25 bp, Homo sapien
gaatccagtggttgtgtctgctgca

SEQ ID NO: 5777877 - DNA, 25 bp, Homo sapien
cagcttctggcactggctattggag

SEQ ID NO: 5777878 - DNA, 25 bp, Homo sapien
gttctgtcaagtttaggtgtagctt

SEQ ID NO: 5777879 - DNA, 25 bp, Homo sapien
caaggagtgggagggaaactgccag

SEQ ID NO: 5777880 - DNA, 25 bp, Homo sapien
tttgctgattgtagtggcacagtgc

SEQ ID NO: 5777881 - DNA, 25 bp, Homo sapien
gcggttcttccggtgactctcagct

SEQ ID NO: 5777882 - DNA, 25 bp, Homo sapien
gaagatagtatgttcaaacacggag

SEQ ID NO: 5777883 - DNA, 25 bp, Homo sapien
gcagcagacacctggatgatggctt

SEQ ID NO: 5777884 - DNA, 25 bp, Homo sapien
catggccctgaaactgaggataacc

SEQ ID NO: 5777885 - DNA, 25 bp, Homo sapien
ctgcagcacatcctcacggataagg

SEQ ID NO: 5777886 - DNA, 25 bp, Homo sapien
tctcctggcccagctgcaagaggct

SEQ ID NO: 5777887 - DNA, 25 bp, Homo sapien
taccagtttgtgtagagtgtggtga

SEQ ID NO: 5777888 - DNA, 25 bp, Homo sapien
cagattcctccaaggtcatggcaaa

SEQ ID NO: 5777889 - DNA, 25 bp, Homo sapien
ctgctcgctcaggtttcgctgctca

SEQ ID NO: 5777890 - DNA, 25 bp, Homo sapien
cgctgctcagcacagatctccagga

SEQ ID NO: 5777891 - DNA, 25 bp, Homo sapien
gagaaactgtatacatgattcattg

SEQ ID NO: 5777892 - DNA, 25 bp, Homo sapien
ccttgaggtgagtttcaatgttctt

SEQ ID NO: 5777893 - DNA, 25 bp, Homo sapien
aagtttccaccagcaatttttctac

SEQ ID NO: 5777894 - DNA, 25 bp, Homo sapien
ttggccaactcttccaggaaggagt

SEQ ID NO: 5777895 - DNA, 25 bp, Homo sapien
cttcttcagctccacaatctgagag

SEQ ID NO: 5777896 - DNA, 25 bp, Homo sapien
tcactgctctacgatttctcagccc

SEQ ID NO: 5777897 - DNA, 25 bp, Homo sapien
cacacctgcagcagatgccagctca

SEQ ID NO: 5777898 - DNA, 25 bp, Homo sapien
cgctagtgtatgcctgtaggcggaa

SEQ ID NO: 5777899 - DNA, 25 bp, Homo sapien
gaagaagggtcagtggcaaggagtg

SEQ ID NO: 5777900 - DNA, 25 bp, Homo sapien
agatgccagctcaaagatactcaag

SEQ ID NO: 5777901 - DNA, 25 bp, Homo sapien
tcgaagcaggacataagggaaacag

SEQ ID NO: 5777902 - DNA, 25 bp, Homo sapien
gctctgcaatgctcgagtcagcata

SEQ ID NO: 5777903 - DNA, 25 bp, Homo sapien
gtgactctcagctcctggcttgtcc

SEQ ID NO: 5777904 - DNA, 25 bp, Homo sapien
cggagaaactgtatacatgattcat

SEQ ID NO: 5777905 - DNA, 25 bp, Homo sapien
ctcctctgggcacatctcatgagtg

SEQ ID NO: 5777906 - DNA, 25 bp, Homo sapien
gctgaggtactcagaagggaagata

SEQ ID NO: 5777907 - DNA, 25 bp, Homo sapien
caagttctgaatgatgtcactgagc

SEQ ID NO: 5777908 - DNA, 25 bp, Homo sapien
aacagctcagaaggccgtacgatct

SEQ ID NO: 5777909 - DNA, 25 bp, Homo sapien
aggttcatcaccttggctaagtcag

SEQ ID NO: 5777910 - DNA, 25 bp, Homo sapien
gtgcacctgcagcacatcctcacgg

SEQ ID NO: 5777911 - DNA, 25 bp, Homo sapien
agagcgtgaagagggcagcagacac

SEQ ID NO: 5777912 - DNA, 25 bp, Homo sapien
tgatgtagagggagccctgcagaca

SEQ ID NO: 5777913 - DNA, 25 bp, Homo sapien
caagagcatcaaatcttgccaagta

SEQ ID NO: 5777914 - DNA, 25 bp, Homo sapien
tgacaatgctgcggttcttccggtg

SEQ ID NO: 5777915 - DNA, 25 bp, Homo sapien
ctggctcctgaccctctctccttag

SEQ ID NO: 5777916 - DNA, 25 bp, Homo sapien
cagaaattccttgaggtgagtttca

SEQ ID NO: 5777917 - DNA, 25 bp, Homo sapien
ttgtcagtgccagttctgtcaagtt

SEQ ID NO: 5777918 - DNA, 25 bp, Homo sapien
tgtcttggtgacattctctgtgtgg

SEQ ID NO: 5777919 - DNA, 25 bp, Homo sapien
gcaatggcataacgcaacatggcag

SEQ ID NO: 5777920 - DNA, 25 bp, Homo sapien
gtgtctggagtgacaaactccttca

SEQ ID NO: 5777921 - DNA, 25 bp, Homo sapien
ggtgggggtactcctctgggcacat

SEQ ID NO: 5777922 - DNA, 25 bp, Homo sapien
ccaatgataatccagcgctccatta

SEQ ID NO: 5777923 - DNA, 25 bp, Homo sapien
cttgttgtagagcgtgaagagggca

SEQ ID NO: 5777924 - DNA, 25 bp, Homo sapien
tgtagagtgtggtgattgtctgttc

SEQ ID NO: 5777925 - DNA, 25 bp, Homo sapien
tcatcaccttggctaagtcagggtt

SEQ ID NO: 5777926 - DNA, 25 bp, Homo sapien
tcaaagatactcaaggtcaccttga

SEQ ID NO: 5777927 - DNA, 25 bp, Homo sapien
gcaggccaccttatattcctcctca

SEQ ID NO: 5777928 - DNA, 25 bp, Homo sapien
ccgagacacctcccgataggcattt

SEQ ID NO: 5777929 - DNA, 25 bp, Homo sapien
cttgtcagtctcctggcccagctgc

SEQ ID NO: 5777930 - DNA, 25 bp, Homo sapien
aaagtagacagatcagaagtttcca

SEQ ID NO: 5777931 - DNA, 25 bp, Homo sapien
atgattcattgtcagtgccagttct

SEQ ID NO: 5777932 - DNA, 25 bp, Homo sapien
gtactcagaagggaagatagtatgt

SEQ ID NO: 5777933 - DNA, 25 bp, Homo sapien
catgaaagcaaaaagagccttagga

SEQ ID NO: 5777934 - DNA, 25 bp, Homo sapien
acaaatcagggggaaagcaatggca

SEQ ID NO: 5777935 - DNA, 25 bp, Homo sapien
agcaaaaagagccttaggacccagt

SEQ ID NO: 5777936 - DNA, 25 bp, Homo sapien
tcaactctggctcctgaccctctct

SEQ ID NO: 5777937 - DNA, 25 bp, Homo sapien
tgctaaagttggatctgatctgaac

SEQ ID NO: 5777938 - DNA, 25 bp, Homo sapien
cagtgccagttctgtcaagtttagg

SEQ ID NO: 5777939 - DNA, 25 bp, Homo sapien
gcccaggagttctgccaaggcccgc

SEQ ID NO: 5777940 - DNA, 25 bp, Homo sapien
aagggaagatagtatgttcaaacac

SEQ ID NO: 5777941 - DNA, 25 bp, Homo sapien
atgaaagcagaaagtagacagatca

SEQ ID NO: 5777942 - DNA, 25 bp, Homo sapien
gccatgaaagcaaaaagagccttag

SEQ ID NO: 5777943 - DNA, 25 bp, Homo sapien
tgaaagcaaaaagagccttaggacc

SEQ ID NO: 5777944 - DNA, 25 bp, Homo sapien
tgcacccaaaaactgggccagtgac

SEQ ID NO: 5777945 - DNA, 25 bp, Homo sapien
tcagaagggaagatagtatgttcaa

SEQ ID NO: 5777946 - DNA, 25 bp, Homo sapien
tctcatgcaggtgcagaggggcctt

SEQ ID NO: 5777947 - DNA, 25 bp, Homo sapien
tgacaatgaaactggccactgtttg

SEQ ID NO: 5777948 - DNA, 25 bp, Homo sapien
ggcagcagggaagccatcaagtccg

SEQ ID NO: 5777949 - DNA, 25 bp, Homo sapien
aactgccagaaagatcaagagcagg

SEQ ID NO: 5777950 - DNA, 25 bp, Homo sapien
atgacaaagaagaaacccaatgata

SEQ ID NO: 5777951 - DNA, 25 bp, Homo sapien
tcacagcccacacctgcagcagatg

SEQ ID NO: 5777952 - DNA, 25 bp, Homo sapien
cattgtcagtgccagttctgtcaag

SEQ ID NO: 5777953 - DNA, 25 bp, Homo sapien
atgtccagggtcaggaaggatgact

SEQ ID NO: 5777954 - DNA, 25 bp, Homo sapien
aaagcaaaaagagccttaggaccca

SEQ ID NO: 5777955 - DNA, 25 bp, Homo sapien
cgcaacatggcagattcctccaagg

SEQ ID NO: 5777956 - DNA, 25 bp, Homo sapien
tgccactctcttgccataccctttc

SEQ ID NO: 5777957 - DNA, 25 bp, Homo sapien
aagggaaacaggactccagcatgtc

SEQ ID NO: 5777958 - DNA, 25 bp, Homo sapien
aggtactcagaagggaagatagtat

SEQ ID NO: 5777959 - DNA, 25 bp, Homo sapien
ttcatcagccaacacagtctccagc

SEQ ID NO: 5777960 - DNA, 25 bp, Homo sapien
aactgctaaacaggtcctcggtgac

SEQ ID NO: 5777961 - DNA, 25 bp, Homo sapien
gataagggtgatgtagagggagccc

SEQ ID NO: 5777962 - DNA, 25 bp, Homo sapien
cttgctctcctttatgtctgccact

SEQ ID NO: 5777963 - DNA, 25 bp, Homo sapien
ctctcctttatgtctgccactctct

SEQ ID NO: 5777964 - DNA, 25 bp, Homo sapien
gataaccccaatgatggtcatgcgc

SEQ ID NO: 5777965 - DNA, 25 bp, Homo sapien
tctctgggcaggctgacgaaggcct

SEQ ID NO: 5777966 - DNA, 25 bp, Homo sapien
agcctgcctcactgctctacgattt

SEQ ID NO: 5777967 - DNA, 25 bp, Homo sapien
tgaaactgaggataaccccaatgat

SEQ ID NO: 5777968 - DNA, 25 bp, Homo sapien
tctgcttcctggttttcttgttctt

SEQ ID NO: 5777969 - DNA, 25 bp, Homo sapien
ctctacgatttctcagccctggatt

SEQ ID NO: 5777970 - DNA, 25 bp, Homo sapien
tatgttcaaacacggagaaactgta

SEQ ID NO: 5777971 - DNA, 25 bp, Homo sapien
ggagtctgcctctgcttcctggttt

SEQ ID NO: 5777972 - DNA, 25 bp, Homo sapien
tgggacccataagaaatgggcagtg

SEQ ID NO: 5777973 - DNA, 25 bp, Homo sapien
tgcgaaagtgaccacagcttccact

SEQ ID NO: 5777974 - DNA, 25 bp, Homo sapien
agaggagaggatactgacgaatgag

SEQ ID NO: 5777975 - DNA, 25 bp, Homo sapien
tgggtcaatgtcacagcccacacct

SEQ ID NO: 5777976 - DNA, 25 bp, Homo sapien
cctgcctcactgctctacgatttct

SEQ ID NO: 5777977 - DNA, 25 bp, Homo sapien
tgaggtactcagaagggaagatagt

SEQ ID NO: 5777978 - DNA, 25 bp, Homo sapien
accatggttcttgaggtgggggtac

SEQ ID NO: 5777979 - DNA, 25 bp, Homo sapien
cctgaaactgaggataaccccaatg

SEQ ID NO: 5777980 - DNA, 25 bp, Homo sapien
gcttccactatggcaagggtttagg

SEQ ID NO: 5777981 - DNA, 25 bp, Homo sapien
gcatgtccagggtcaggaaggatga

SEQ ID NO: 5777982 - DNA, 25 bp, Homo sapien
cccctgtcagctggggcagcaggga

SEQ ID NO: 5777983 - DNA, 25 bp, Homo sapien
caaagtgagcacaaatcagggggaa

SEQ ID NO: 5777984 - DNA, 25 bp, Homo sapien
gggagggaaactgccagaaagatca

SEQ ID NO: 5777985 - DNA, 25 bp, Homo sapien
gcataacgcaacatggcagattcct

SEQ ID NO: 5777986 - DNA, 25 bp, Homo sapien
gttgcggatgactctggaagcatct

SEQ ID NO: 5777987 - DNA, 25 bp, Homo sapien
ttgtgcacctgcagcacatcctcac

SEQ ID NO: 5777988 - DNA, 25 bp, Homo sapien
gcagagaaatggattctcgatttct

SEQ ID NO: 5777989 - DNA, 25 bp, Homo sapien
gccatccgcagaaattgccgccgtt

SEQ ID NO: 5777990 - DNA, 25 bp, Homo sapien
tggatgatggctttggtcaagcaat

SEQ ID NO: 5777991 - DNA, 25 bp, Homo sapien
tttaggaaggtccaaagggctcttc

SEQ ID NO: 5777992 - DNA, 25 bp, Homo sapien
aagtcagggttctcatgcaggtgca

SEQ ID NO: 5777993 - DNA, 25 bp, Homo sapien
acttcatgccataggggcccaggag

SEQ ID NO: 5777994 - DNA, 25 bp, Homo sapien
tagagtgtggtgattgtctgttccc

SEQ ID NO: 5777995 - DNA, 25 bp, Homo sapien
ttttttcattgtaaaattcacacat

SEQ ID NO: 5777996 - DNA, 25 bp, Homo sapien
gctataaaaggaagaagggtcagtg

SEQ ID NO: 5777997 - DNA, 25 bp, Homo sapien
caggacgcaattgctggtctgcttg

SEQ ID NO: 5777998 - DNA, 25 bp, Homo sapien
agccctgcagacacagcttccacag

SEQ ID NO: 5777999 - DNA, 25 bp, Homo sapien
cccagctgcaagaggctgacagagg

SEQ ID NO: 5778000 - DNA, 25 bp, Homo sapien
ttgtagtggcacagtgcttaggtag

SEQ ID NO: 5778001 - DNA, 25 bp, Homo sapien
gaagatgaaagcagaaagtagacag

SEQ ID NO: 5778002 - DNA, 25 bp, Homo sapien
aagggctcttcagtgggtactggca

SEQ ID NO: 5778003 - DNA, 25 bp, Homo sapien
aacaggactccagcatgtccagggt

SEQ ID NO: 5778004 - DNA, 25 bp, Homo sapien
actggccactgtttgcaattacatg

SEQ ID NO: 5778005 - DNA, 25 bp, Homo sapien
tcagccctggattgttcttccacag

SEQ ID NO: 5778006 - DNA, 25 bp, Homo sapien
gccacatcaggttttcactcaggaa

SEQ ID NO: 5778007 - DNA, 25 bp, Homo sapien
tctcttgccataccctttcaaactg

SEQ ID NO: 5778008 - DNA, 25 bp, Homo sapien
gaagcaggacataagggaaacagga

SEQ ID NO: 5778009 - DNA, 25 bp, Homo sapien
cagcatagtcctcaggtgtctttgt

SEQ ID NO: 5778010 - DNA, 25 bp, Homo sapien
ctctggctcctgaccctctctcctt

SEQ ID NO: 5778011 - DNA, 25 bp, Homo sapien
gatctgaacaagtatgtccatgttt

SEQ ID NO: 5778012 - DNA, 25 bp, Homo sapien
ccccacaggaatccagtggttgtgt

SEQ ID NO: 5778013 - DNA, 25 bp, Homo sapien
tcttggtgacattctctgtgtggcg

SEQ ID NO: 5778014 - DNA, 25 bp, Homo sapien
ataagctgtcctccatgctcccagc

SEQ ID NO: 5778015 - DNA, 25 bp, Homo sapien
aggagggcgttgcggatgactctgg

SEQ ID NO: 5778016 - DNA, 25 bp, Homo sapien
agatagtatgttcaaacacggagaa

SEQ ID NO: 5778017 - DNA, 25 bp, Homo sapien
ttcggaccagagacctaatcccctc

SEQ ID NO: 5778018 - DNA, 25 bp, Homo sapien
gtctaagcagactttccaggtacca

SEQ ID NO: 5778019 - DNA, 25 bp, Homo sapien
agtagacagatcagaagtttccacc

SEQ ID NO: 5778020 - DNA, 25 bp, Homo sapien
aaactccttcaagcactcaatggga

SEQ ID NO: 5778021 - DNA, 25 bp, Homo sapien
ggcctgcatggctggggagaggatg

SEQ ID NO: 5778022 - DNA, 25 bp, Homo sapien
acgatctcctgggtcgtggcattgt

SEQ ID NO: 5778023 - DNA, 25 bp, Homo sapien
ggtgacctcatcacgaatgaaggac

SEQ ID NO: 5778024 - DNA, 25 bp, Homo sapien
tgaggcacccatgacaaagaagaaa

SEQ ID NO: 5778025 - DNA, 25 bp, Homo sapien
gataggcatttcgaagcaggacata

SEQ ID NO: 5778026 - DNA, 25 bp, Homo sapien
tgcatggctggggagaggatgatgg

SEQ ID NO: 5778027 - DNA, 25 bp, Homo sapien
acccaatgataatccagcgctccat

SEQ ID NO: 5778028 - DNA, 25 bp, Homo sapien
agcttgtcagtctcctggcccagct

SEQ ID NO: 5778029 - DNA, 25 bp, Homo sapien
cacctcccgataggcatttcgaagc

SEQ ID NO: 5778030 - DNA, 25 bp, Homo sapien
cactgcttgcctgtctaagcagact

SEQ ID NO: 5778031 - DNA, 25 bp, Homo sapien
caggctgacgaaggcctgcatggct

SEQ ID NO: 5778032 - DNA, 25 bp, Homo sapien
accacagcttccactatggcaaggg

SEQ ID NO: 5778033 - DNA, 25 bp, Homo sapien
tcaagcactcaatgggacccataag

SEQ ID NO: 5778034 - DNA, 25 bp, Homo sapien
cttagccacgctagtgtatgcctgt

SEQ ID NO: 5778035 - DNA, 25 bp, Homo sapien
ccagcattcgggagtggaagacaat

SEQ ID NO: 5778036 - DNA, 25 bp, Homo sapien
agcttccacagcttctggcactggc

SEQ ID NO: 5778037 - DNA, 25 bp, Homo sapien
tcttcagtgggtactggcaggcatt

SEQ ID NO: 5778038 - DNA, 25 bp, Homo sapien
catcaactctggctcctgaccctct

SEQ ID NO: 5778039 - DNA, 25 bp, Homo sapien
ttcagtgggtactggcaggcattca

SEQ ID NO: 5778040 - DNA, 25 bp, Homo sapien
atcttgccaagtactgaaggtggta

SEQ ID NO: 5778041 - DNA, 25 bp, Homo sapien
tcatgagtgcagtggacaaagtgag

SEQ ID NO: 5778042 - DNA, 25 bp, Homo sapien
tctgttccccacaggaatccagtgg

SEQ ID NO: 5778043 - DNA, 25 bp, Homo sapien
gacacctcccgataggcatttcgaa

SEQ ID NO: 5778044 - DNA, 25 bp, Homo sapien
gtcagtgccagttctgtcaagttta

SEQ ID NO: 5778045 - DNA, 25 bp, Homo sapien
aagatcaagagcaggcaggccacct

SEQ ID NO: 5778046 - DNA, 25 bp, Homo sapien
tcctggttttcttgttcttggcttt

SEQ ID NO: 5778047 - DNA, 25 bp, Homo sapien
tcaagtttaggtgtagcttgtccat

SEQ ID NO: 5778048 - DNA, 25 bp, Homo sapien
ccaccaccaagcgcatgagcagaga

SEQ ID NO: 5778049 - DNA, 25 bp, Homo sapien
tccacaatctgagaggtcacatgcc

SEQ ID NO: 5778050 - DNA, 25 bp, Homo sapien
gagttgaggcacccatgacaaagaa

SEQ ID NO: 5778051 - DNA, 25 bp, Homo sapien
actccagcatgtccagggtcaggaa

SEQ ID NO: 5778052 - DNA, 25 bp, Homo sapien
agcatctgcacccaaaaactgggcc

SEQ ID NO: 5778053 - DNA, 25 bp, Homo sapien
agtttcaatgttcttgttgtagagc

SEQ ID NO: 5778054 - DNA, 25 bp, Homo sapien
acagcttccacagcttctggcactg

SEQ ID NO: 5778055 - DNA, 25 bp, Homo sapien
ttcagctccacaatctgagaggtca

SEQ ID NO: 5778056 - DNA, 25 bp, Homo sapien
gccaccttatattcctcctcaggag

SEQ ID NO: 5778057 - DNA, 25 bp, Homo sapien
ttccccacaggaatccagtggttgt

SEQ ID NO: 5778058 - DNA, 25 bp, Homo sapien
tcaatgggacccataagaaatgggc

SEQ ID NO: 5778059 - DNA, 25 bp, Homo sapien
gagcagagaaatggattctcgattt

SEQ ID NO: 5778060 - DNA, 25 bp, Homo sapien
gaaagatcaagagcaggcaggccac

SEQ ID NO: 5778061 - DNA, 25 bp, Homo sapien
ctgccatccgcagaaattgccgccg

SEQ ID NO: 5778062 - DNA, 25 bp, Homo sapien
tgaccacagcttccactatggcaag

SEQ ID NO: 5778063 - DNA, 25 bp, Homo sapien
cttccaggaaggagttgcagtggtg

SEQ ID NO: 5778064 - DNA, 25 bp, Homo sapien
ccaaggcccgcatctcagagatgtc

SEQ ID NO: 5778065 - DNA, 25 bp, Homo sapien
tggttcttgaggtgggggtactcct

SEQ ID NO: 5778066 - DNA, 25 bp, Homo sapien
ccctttcaaactgctaaacaggtcc

SEQ ID NO: 5778067 - DNA, 25 bp, Homo sapien
aattgccgccgttgacaatgaaact

SEQ ID NO: 5778068 - DNA, 25 bp, Homo sapien
ccataggggcccaggagttctgcca

SEQ ID NO: 5778069 - DNA, 25 bp, Homo sapien
ggtggtattgctgtatcactttgat

SEQ ID NO: 5778070 - DNA, 25 bp, Homo sapien
agggagccctgcagacacagcttcc

SEQ ID NO: 5778071 - DNA, 25 bp, Homo sapien
acgaagatgaaagcagaaagtagac

SEQ ID NO: 5778072 - DNA, 25 bp, Homo sapien
tctgggcacatctcatgagtgcagt

SEQ ID NO: 5778073 - DNA, 25 bp, Homo sapien
tggggagaggatgatggtcccactg

SEQ ID NO: 5778074 - DNA, 25 bp, Homo sapien
cacacagacaagttctgaatgatgt

SEQ ID NO: 5778075 - DNA, 25 bp, Homo sapien
catctcatgagtgcagtggacaaag

SEQ ID NO: 5778076 - DNA, 25 bp, Homo sapien
gctttcagattagcaatggcagcca

SEQ ID NO: 5778077 - DNA, 25 bp, Homo sapien
atgatgatggactcctcctctggac

SEQ ID NO: 5778078 - DNA, 25 bp, Homo sapien
tgtctgccactctcttgccataccc

SEQ ID NO: 5778079 - DNA, 25 bp, Homo sapien
agtggaagacaatgaggttcatcac

SEQ ID NO: 5778080 - DNA, 25 bp, Homo sapien
aagcactcaatgggacccataagaa

SEQ ID NO: 5778081 - DNA, 25 bp, Homo sapien
caggtcctcggtgactttgtgcacc

SEQ ID NO: 5778082 - DNA, 25 bp, Homo sapien
gccttagccacgctagtgtatgcct

SEQ ID NO: 5778083 - DNA, 25 bp, Homo sapien
ctctgttgagtctggcctccaggtg

SEQ ID NO: 5778084 - DNA, 25 bp, Homo sapien
catgtggccccacgccctaactttt

SEQ ID NO: 5778085 - DNA, 25 bp, Homo sapien
tgatggactcctcctctggacacac

SEQ ID NO: 5778086 - DNA, 25 bp, Homo sapien
taagcttgtcagtctcctggcccag

SEQ ID NO: 5778087 - DNA, 25 bp, Homo sapien
cagggttctcatgcaggtgcagagg

SEQ ID NO: 5778088 - DNA, 25 bp, Homo sapien
tcccaccccctgcgaaagtgaccac

SEQ ID NO: 5778089 - DNA, 25 bp, Homo sapien
gcaaacatcttctcaaagatacgaa

SEQ ID NO: 5778090 - DNA, 25 bp, Homo sapien
gctaaacaggtcctcggtgactttg

SEQ ID NO: 5778091 - DNA, 25 bp, Homo sapien
ctcaatgctataaaaggaagaaggg

SEQ ID NO: 5778092 - DNA, 25 bp, Homo sapien
tgtgtggcgaaccagccaggtgacc

SEQ ID NO: 5778093 - DNA, 25 bp, Homo sapien
cacctgcagcagatgccagctcaaa

SEQ ID NO: 5778094 - DNA, 25 bp, Homo sapien
cttttctgggagtctgcctctgctt

SEQ ID NO: 5778095 - DNA, 25 bp, Homo sapien
tgcgctttagcacattttcagcccc

SEQ ID NO: 5778096 - DNA, 25 bp, Homo sapien
taaaaggaagaagggtcagtggcaa

SEQ ID NO: 5778097 - DNA, 25 bp, Homo sapien
ccaacagctcagaaggccgtacgat

SEQ ID NO: 5778098 - DNA, 25 bp, Homo sapien
cctgcagcagatgccagctcaaaga

SEQ ID NO: 5778099 - DNA, 25 bp, Homo sapien
tgtcactgagcacaagagcatcaaa

SEQ ID NO: 5778100 - DNA, 25 bp, Homo sapien
cacatgtggccccacgccctaactt

SEQ ID NO: 5778101 - DNA, 25 bp, Homo sapien
gcagacacagcttccacagcttctg

SEQ ID NO: 5778102 - DNA, 25 bp, Homo sapien
atgccacatcaggttttcactcagg

SEQ ID NO: 5778103 - DNA, 25 bp, Homo sapien
tctgctcatcaactctggctcctga

SEQ ID NO: 5778104 - DNA, 25 bp, Homo sapien
gtctgcttggccaactcttccagga

SEQ ID NO: 5778105 - DNA, 25 bp, Homo sapien
gggaaacaggactccagcatgtcca

SEQ ID NO: 5778106 - DNA, 25 bp, Homo sapien
tggcaggcattcagtttaggtggaa

SEQ ID NO: 5778107 - DNA, 25 bp, Homo sapien
tgcaatgctcgagtcagcatagtcc

SEQ ID NO: 5778108 - DNA, 25 bp, Homo sapien
tcaggaaggatgactcctccaccac

SEQ ID NO: 5778109 - DNA, 25 bp, Homo sapien
aggctgacagaggccaccaccagaa

SEQ ID NO: 5778110 - DNA, 25 bp, Homo sapien
tgcaagaggctgacagaggccacca

SEQ ID NO: 5778111 - DNA, 25 bp, Homo sapien
gcttctggcactggctattggagtt

SEQ ID NO: 5778112 - DNA, 25 bp, Homo sapien
agatactcaaggtcaccttgatgtc

SEQ ID NO: 5778113 - DNA, 25 bp, Homo sapien
gccactgtttgcaattacatgttcc

SEQ ID NO: 5778114 - DNA, 25 bp, Homo sapien
agtggttgtgtctgctgcaggaggg

SEQ ID NO: 5778115 - DNA, 25 bp, Homo sapien
tcaatcctgagaattcaaatttttc

SEQ ID NO: 5778116 - DNA, 25 bp, Homo sapien
gtggcaaggagtgggagggaaactg

SEQ ID NO: 5778117 - DNA, 25 bp, Homo sapien
aagtactgaaggtggtattgctgta

SEQ ID NO: 5778118 - DNA, 25 bp, Homo sapien
gaaagcagaaagtagacagatcaga

SEQ ID NO: 5778119 - DNA, 25 bp, Homo sapien
ctgggccagtgactgtatgaaacca

SEQ ID NO: 5778120 - DNA, 25 bp, Homo sapien
attggagttgaggcacccatgacaa

SEQ ID NO: 5778121 - DNA, 25 bp, Homo sapien
ggtcacatgccacatcaggttttca

SEQ ID NO: 5778122 - DNA, 25 bp, Homo sapien
ttcttggctttgctgattgtagtgg

SEQ ID NO: 5778123 - DNA, 25 bp, Homo sapien
gttgaggcacccatgacaaagaaga

SEQ ID NO: 5778124 - DNA, 25 bp, Homo sapien
gccacacaatggctctgttgagtct

SEQ ID NO: 5778125 - DNA, 25 bp, Homo sapien
tgttcttgttgtagagcgtgaagag

SEQ ID NO: 5778126 - DNA, 25 bp, Homo sapien
caggtgtctttgtcttggtgacatt

SEQ ID NO: 5778127 - DNA, 25 bp, Homo sapien
ggcccgcatctcagagatgtcagag

SEQ ID NO: 5778128 - DNA, 25 bp, Homo sapien
tttccaggtaccagtttgtgtagag

SEQ ID NO: 5778129 - DNA, 25 bp, Homo sapien
acaatgctgcggttcttccggtgac

SEQ ID NO: 5778130 - DNA, 25 bp, Homo sapien
agaggccaccaccagaaattccttg

SEQ ID NO: 5778131 - DNA, 25 bp, Homo sapien
ccaggtggctgctgaggtactcaga

SEQ ID NO: 5778132 - DNA, 25 bp, Homo sapien
ctgcttggccaactcttccaggaag

SEQ ID NO: 5778133 - DNA, 25 bp, Homo sapien
ccatccttctcaatgctataaaagg

SEQ ID NO: 5778134 - DNA, 25 bp, Homo sapien
ctcttccaggaaggagttgcagtgg

SEQ ID NO: 5778135 - DNA, 25 bp, Homo sapien
agaagggtcagtggcaaggagtggg

SEQ ID NO: 5778136 - DNA, 25 bp, Homo sapien
catggttcttgaggtgggggtactc

SEQ ID NO: 5778137 - DNA, 25 bp, Homo sapien
tgctcatcaactctggctcctgacc

SEQ ID NO: 5778138 - DNA, 25 bp, Homo sapien
tttcactcaggaacttcatgccata

SEQ ID NO: 5778139 - DNA, 25 bp, Homo sapien
ctgcactgaagttctgctccccttc

SEQ ID NO: 5778140 - DNA, 25 bp, Homo sapien
cgtggcattgtagccagccagccac

SEQ ID NO: 5778141 - DNA, 25 bp, Homo sapien
tggaagcatctgcacccaaaaactg

SEQ ID NO: 5778142 - DNA, 25 bp, Homo sapien
gcgcatgagcagagaaatggattct

SEQ ID NO: 5778143 - DNA, 25 bp, Homo sapien
tggcattgtagccagccagccacac

SEQ ID NO: 5778144 - DNA, 25 bp, Homo sapien
cttctcaaagatacgaagatgaaag

SEQ ID NO: 5778145 - DNA, 25 bp, Homo sapien
ataggggcccaggagttctgccaag

SEQ ID NO: 5778146 - DNA, 25 bp, Homo sapien
gtagagggagccctgcagacacagc

SEQ ID NO: 5778147 - DNA, 25 bp, Homo sapien
gggcgttgcggatgactctggaagc

SEQ ID NO: 5778148 - DNA, 25 bp, Homo sapien
tccaaggtcatggcaaacatcttct

SEQ ID NO: 5778149 - DNA, 25 bp, Homo sapien
accccaatgatggtcatgcgcttta

SEQ ID NO: 5778150 - DNA, 25 bp, Homo sapien
ctgagaggtcacatgccacatcagg

SEQ ID NO: 5778151 - DNA, 25 bp, Homo sapien
gggccatgaaagcaaaaagagcctt

SEQ ID NO: 5778152 - DNA, 25 bp, Homo sapien
gctccacaatctgagaggtcacatg

SEQ ID NO: 5778153 - DNA, 25 bp, Homo sapien
cacacatgtggccccacgccctaac

SEQ ID NO: 5778154 - DNA, 25 bp, Homo sapien
aatgctgcggttcttccggtgactc

SEQ ID NO: 5778155 - DNA, 25 bp, Homo sapien
actcaggaacttcatgccatagggg

SEQ ID NO: 5778156 - DNA, 25 bp, Homo sapien
aagagccttaggacccagtagtccc

SEQ ID NO: 5778157 - DNA, 25 bp, Homo sapien
ggtcaccttgatgtctgtgtctgga

SEQ ID NO: 5778158 - DNA, 25 bp, Homo sapien
ctgatctgaacaagtatgtccatgt

SEQ ID NO: 5778159 - DNA, 25 bp, Homo sapien
gaagtccctcttgggccatggccct

SEQ ID NO: 5778160 - DNA, 25 bp, Homo sapien
tttttctacggagtccagcattcgg

SEQ ID NO: 5778161 - DNA, 25 bp, Homo sapien
tgtcttcggaccagagacctaatcc

SEQ ID NO: 5778162 - DNA, 25 bp, Homo sapien
tggaaggcccgagacacctcccgat

SEQ ID NO: 5778163 - DNA, 25 bp, Homo sapien
tcagagaggagaggatactgacgaa

SEQ ID NO: 5778164 - DNA, 25 bp, Homo sapien
tgctgattgtagtggcacagtgctt

SEQ ID NO: 5778165 - DNA, 25 bp, Homo sapien
atagtcctcaggtgtctttgtcttg

SEQ ID NO: 5778166 - DNA, 25 bp, Homo sapien
tctccaggacgcaattgctggtctg

SEQ ID NO: 5778167 - DNA, 25 bp, Homo sapien
cctgtcagctggggcagcagggaag

SEQ ID NO: 5778168 - DNA, 25 bp, Homo sapien
gggaaagcaatggcataacgcaaca

SEQ ID NO: 5778169 - DNA, 25 bp, Homo sapien
caaagggctcttcagtgggtactgg

SEQ ID NO: 5778170 - DNA, 25 bp, Homo sapien
tgatggctttggtcaagcaatgaat

SEQ ID NO: 5778171 - DNA, 25 bp, Homo sapien
taaacaggtcctcggtgactttgtg

SEQ ID NO: 5778172 - DNA, 25 bp, Homo sapien
gaagaaacccaatgataatccagcg

SEQ ID NO: 5778173 - DNA, 25 bp, Homo sapien
caaagaagaaacccaatgataatcc

SEQ ID NO: 5778174 - DNA, 25 bp, Homo sapien
gccagccagccacacaatggctctg

SEQ ID NO: 5778175 - DNA, 25 bp, Homo sapien
gccagtgactgtatgaaaccaatgt

SEQ ID NO: 5778176 - DNA, 25 bp, Homo sapien
ccattatcaacttgtttgagattca

SEQ ID NO: 5778177 - DNA, 25 bp, Homo sapien
ggtgacattctctgtgtggcgaacc

SEQ ID NO: 5778178 - DNA, 25 bp, Homo sapien
aatggcataacgcaacatggcagat

SEQ ID NO: 5778179 - DNA, 25 bp, Homo sapien
gaaagcaatggcataacgcaacatg

SEQ ID NO: 5778180 - DNA, 25 bp, Homo sapien
gattcctccaaggtcatggcaaaca

SEQ ID NO: 5778181 - DNA, 25 bp, Homo sapien
gggagaggatgatggtcccactgct

SEQ ID NO: 5778182 - DNA, 25 bp, Homo sapien
tttctgggagtctgcctctgcttcc

SEQ ID NO: 5778183 - DNA, 25 bp, Homo sapien
ccgtacgatctcctgggtcgtggca

SEQ ID NO: 5778184 - DNA, 25 bp, Homo sapien
gaaattgccgccgttgacaatgaaa

SEQ ID NO: 5778185 - DNA, 25 bp, Homo sapien
cggagtccagcattcgggagtggaa

SEQ ID NO: 5778186 - DNA, 25 bp, Homo sapien
aaactgaggataaccccaatgatgg

SEQ ID NO: 5778187 - DNA, 25 bp, Homo sapien
gacagatcagaagtttccaccagca

SEQ ID NO: 5778188 - DNA, 25 bp, Homo sapien
tctgctccccttctctgggcaggct

SEQ ID NO: 5778189 - DNA, 25 bp, Homo sapien
aggatgactcctccaccaccaagcg

SEQ ID NO: 5778190 - DNA, 25 bp, Homo sapien
tctacggagtccagcattcgggagt

SEQ ID NO: 5778191 - DNA, 25 bp, Homo sapien
aaatcttgccaagtactgaaggtgg

SEQ ID NO: 5778192 - DNA, 25 bp, Homo sapien
tcctctgcactgaagttctgctccc

SEQ ID NO: 5778193 - DNA, 25 bp, Homo sapien
acagcccacacctgcagcagatgcc

SEQ ID NO: 5778194 - DNA, 25 bp, Homo sapien
tggtcccactgcttgcctgtctaag

SEQ ID NO: 5778195 - DNA, 25 bp, Homo sapien
gcctccaggtggctgctgaggtact

SEQ ID NO: 5778196 - DNA, 25 bp, Homo sapien
atggcagattcctccaaggtcatgg

SEQ ID NO: 5778197 - DNA, 25 bp, Homo sapien
gagtcagcatagtcctcaggtgtct

SEQ ID NO: 5778198 - DNA, 25 bp, Homo sapien
aaagtgaccacagcttccactatgg

SEQ ID NO: 5778199 - DNA, 25 bp, Homo sapien
gaccagagacctaatcccctccaac

SEQ ID NO: 5778200 - DNA, 25 bp, Homo sapien
taggaaggtccaaagggctcttcag

SEQ ID NO: 5778201 - DNA, 25 bp, Homo sapien
acatggcagattcctccaaggtcat

SEQ ID NO: 5778202 - DNA, 25 bp, Homo sapien
caatctgagaggtcacatgccacat

SEQ ID NO: 5778203 - DNA, 25 bp, Homo sapien
aactgtatacatgattcattgtcag

SEQ ID NO: 5778204 - DNA, 25 bp, Homo sapien
tgaccctctctccttagtgacccca

SEQ ID NO: 5778205 - DNA, 25 bp, Homo sapien
tctcgatttctggttttaagcttgt

SEQ ID NO: 5778206 - DNA, 25 bp, Homo sapien
gcagggaagccatcaagtccggctt

SEQ ID NO: 5778207 - DNA, 25 bp, Homo sapien
tacggagtccagcattcgggagtgg

SEQ ID NO: 5778208 - DNA, 25 bp, Homo sapien
tcaaggtcaccttgatgtctgtgtc

SEQ ID NO: 5778209 - DNA, 25 bp, Homo sapien
gcgaaccagccaggtgacctcatca

SEQ ID NO: 5778210 - DNA, 25 bp, Homo sapien
ggtgattgtctgttccccacaggaa

SEQ ID NO: 5778211 - DNA, 25 bp, Homo sapien
ccaatgtatgctttgactcctgcca

SEQ ID NO: 5778212 - DNA, 25 bp, Homo sapien
aagcgcatgagcagagaaatggatt

SEQ ID NO: 5778213 - DNA, 25 bp, Homo sapien
agcacatcctcacggataagggtga

SEQ ID NO: 5778214 - DNA, 25 bp, Homo sapien
acaatgaggttcatcaccttggcta

SEQ ID NO: 5778215 - DNA, 25 bp, Homo sapien
ccactctcttgccataccctttcaa

SEQ ID NO: 5778216 - DNA, 25 bp, Homo sapien
ccattcccaccccctgcgaaagtga

SEQ ID NO: 5778217 - DNA, 25 bp, Homo sapien
cagcttccactatggcaagggttta

SEQ ID NO: 5778218 - DNA, 25 bp, Homo sapien
gctgggtcaatgtcacagcccacac

SEQ ID NO: 5778219 - DNA, 25 bp, Homo sapien
tgagcacaagagcatcaaatcttgc

SEQ ID NO: 5778220 - DNA, 25 bp, Homo sapien
ccaggagttctgccaaggcccgcat

SEQ ID NO: 5778221 - DNA, 25 bp, Homo sapien
gttgacaatgaaactggccactgtt

SEQ ID NO: 5778222 - DNA, 25 bp, Homo sapien
ctcctctggacacacagacaagttc

SEQ ID NO: 5778223 - DNA, 25 bp, Homo sapien
agtctgcctctgcttcctggttttc

SEQ ID NO: 5778224 - DNA, 25 bp, Homo sapien
cagctccacaatctgagaggtcaca

SEQ ID NO: 5778225 - DNA, 25 bp, Homo sapien
tgaggataaccccaatgatggtcat

SEQ ID NO: 5778226 - DNA, 25 bp, Homo sapien
gcaatggcagccaccaaggctgggt

SEQ ID NO: 5778227 - DNA, 25 bp, Homo sapien
aagtccggcttgctaaagttggatc

SEQ ID NO: 5778228 - DNA, 25 bp, Homo sapien
cacagatctccaggacgcaattgct

SEQ ID NO: 5778229 - DNA, 25 bp, Homo sapien
ttggtgacaatgctgcggttcttcc

SEQ ID NO: 5778230 - DNA, 25 bp, Homo sapien
aaggtggtattgctgtatcactttg

SEQ ID NO: 5778231 - DNA, 25 bp, Homo sapien
aatgggacccataagaaatgggcag

SEQ ID NO: 5778232 - DNA, 25 bp, Homo sapien
ccgttgacaatgaaactggccactg

SEQ ID NO: 5778233 - DNA, 25 bp, Homo sapien
gggttctcatgcaggtgcagagggg

SEQ ID NO: 5778234 - DNA, 25 bp, Homo sapien
tttctcagccctggattgttcttcc

SEQ ID NO: 5778235 - DNA, 25 bp, Homo sapien
agggtgatgtagagggagccctgca

SEQ ID NO: 5778236 - DNA, 25 bp, Homo sapien
aagcaatggcataacgcaacatggc

SEQ ID NO: 5778237 - DNA, 25 bp, Homo sapien
ctttgtgcacctgcagcacatcctc

SEQ ID NO: 5778238 - DNA, 25 bp, Homo sapien
gttctcatgcaggtgcagaggggcc

SEQ ID NO: 5778239 - DNA, 25 bp, Homo sapien
gaggtcacatgccacatcaggtttt

SEQ ID NO: 5778240 - DNA, 25 bp, Homo sapien
tagaagctgctcgctcaggtttcgc

SEQ ID NO: 5778241 - DNA, 25 bp, Homo sapien
tgataatccagcgctccattacttc

SEQ ID NO: 5778242 - DNA, 25 bp, Homo sapien
catcaggttttcactcaggaacttc

SEQ ID NO: 5778243 - DNA, 25 bp, Homo sapien
gttctgccaaggcccgcatctcaga

SEQ ID NO: 5778244 - DNA, 25 bp, Homo sapien
tgtctttgtcttggtgacattctct

SEQ ID NO: 5778245 - DNA, 25 bp, Homo sapien
tcagtctcctggcccagctgcaaga

SEQ ID NO: 5778246 - DNA, 25 bp, Homo sapien
tcaatgtcacagcccacacctgcag

SEQ ID NO: 5778247 - DNA, 25 bp, Homo sapien
acacagcttccacagcttctggcac

SEQ ID NO: 5778248 - DNA, 25 bp, Homo sapien
gattgtagtggcacagtgcttaggt

SEQ ID NO: 5778249 - DNA, 25 bp, Homo sapien
tgtcaagtttaggtgtagcttgtcc

SEQ ID NO: 5778250 - DNA, 25 bp, Homo sapien
caccaagcgcatgagcagagaaatg

SEQ ID NO: 5778251 - DNA, 25 bp, Homo sapien
gggaaactgccagaaagatcaagag

SEQ ID NO: 5778252 - DNA, 25 bp, Homo sapien
atgaggacatgatgatggactcctc

SEQ ID NO: 5778253 - DNA, 25 bp, Homo sapien
tccggtgactctcagctcctggctt

SEQ ID NO: 5778254 - DNA, 25 bp, Homo sapien
cactgtttgcaattacatgttcctt

SEQ ID NO: 5778255 - DNA, 25 bp, Homo sapien
agtcctcaggtgtctttgtcttggt

SEQ ID NO: 5778256 - DNA, 25 bp, Homo sapien
actcctcctctggacacacagacaa

SEQ ID NO: 5778257 - DNA, 25 bp, Homo sapien
ggacccataagaaatgggcagtggg

SEQ ID NO: 5778258 - DNA, 25 bp, Homo sapien
agcttgtccatgttggtgacaatgc

SEQ ID NO: 5778259 - DNA, 25 bp, Homo sapien
gatctcctgggtcgtggcattgtag

SEQ ID NO: 5778260 - DNA, 25 bp, Homo sapien
gtgactgtatgaaaccaatgtatgc

SEQ ID NO: 5778261 - DNA, 25 bp, Homo sapien
tctcagagatgtcagagaactcctc

SEQ ID NO: 5778262 - DNA, 25 bp, Homo sapien
ggccgtacgatctcctgggtcgtgg

SEQ ID NO: 5778263 - DNA, 25 bp, Homo sapien
gctccccttctctgggcaggctgac

SEQ ID NO: 5778264 - DNA, 25 bp, Homo sapien
gaggatactgacgaatgaggacatg

SEQ ID NO: 5778265 - DNA, 25 bp, Homo sapien
ttgaggtgggggtactcctctgggc

SEQ ID NO: 5778266 - DNA, 25 bp, Homo sapien
cacaatctgagaggtcacatgccac

SEQ ID NO: 5778267 - DNA, 25 bp, Homo sapien
gatcagaagtttccaccagcaattt

SEQ ID NO: 5778268 - DNA, 25 bp, Homo sapien
aagagcaggcaggccaccttatatt

SEQ ID NO: 5778269 - DNA, 25 bp, Homo sapien
agaggggccttagccacgctagtgt

SEQ ID NO: 5778270 - DNA, 25 bp, Homo sapien
actgaaggtggtattgctgtatcac

SEQ ID NO: 5778271 - DNA, 25 bp, Homo sapien
ggtgacaatgctgcggttcttccgg

SEQ ID NO: 5778272 - DNA, 25 bp, Homo sapien
tccacagatctgctcatcaactctg

SEQ ID NO: 5778273 - DNA, 25 bp, Homo sapien
cagctcaaagatactcaaggtcacc

SEQ ID NO: 5778274 - DNA, 25 bp, Homo sapien
agtgtatgcctgtaggcggaaccag

SEQ ID NO: 5778275 - DNA, 25 bp, Homo sapien
gaaccagccaggtgacctcatcacg

SEQ ID NO: 5778276 - DNA, 25 bp, Homo sapien
ggcatttcgaagcaggacataaggg

SEQ ID NO: 5778277 - DNA, 25 bp, Homo sapien
ctggcccagctgcaagaggctgaca

SEQ ID NO: 5778278 - DNA, 25 bp, Homo sapien
agttggatctgatctgaacaagtat

SEQ ID NO: 5778279 - DNA, 25 bp, Homo sapien
catctgcacccaaaaactgggccag

SEQ ID NO: 5778280 - DNA, 25 bp, Homo sapien
ctcatcacgaatgaaggacagggcc

SEQ ID NO: 5778281 - DNA, 25 bp, Homo sapien
cccctgcgaaagtgaccacagcttc

SEQ ID NO: 5778282 - DNA, 25 bp, Homo sapien
gaggtgggggtactcctctgggcac

SEQ ID NO: 5778283 - DNA, 25 bp, Homo sapien
tccttgctctcctttatgtctgcca

SEQ ID NO: 5778284 - DNA, 25 bp, Homo sapien
tgcctcactgctctacgatttctca

SEQ ID NO: 5778285 - DNA, 25 bp, Homo sapien
gcaatttttctacggagtccagcat

SEQ ID NO: 5778286 - DNA, 25 bp, Homo sapien
aaggtcaccttgatgtctgtgtctg

SEQ ID NO: 5778287 - DNA, 25 bp, Homo sapien
gcgttgcggatgactctggaagcat

SEQ ID NO: 5778288 - DNA, 25 bp, Homo sapien
aatgaatattgttgttgtaaccatc

SEQ ID NO: 5778289 - DNA, 25 bp, Homo sapien
ctggattgttcttccacagatctgc

SEQ ID NO: 5778290 - DNA, 25 bp, Homo sapien
gaatgaaggacagggccatgaaagc

SEQ ID NO: 5778291 - DNA, 25 bp, Homo sapien
ttctccattatcaacttgtttgaga

SEQ ID NO: 5778292 - DNA, 25 bp, Homo sapien
gctcccagcctgcctcactgctcta

SEQ ID NO: 5778293 - DNA, 25 bp, Homo sapien
tatgcctgtaggcggaaccagtcca

SEQ ID NO: 5778294 - DNA, 25 bp, Homo sapien
tgacaaactccttcaagcactcaat

SEQ ID NO: 5778295 - DNA, 25 bp, Homo sapien
atgccagctcaaagatactcaaggt

SEQ ID NO: 5778296 - DNA, 25 bp, Homo sapien
ctgtatgaaaccaatgtatgctttg

SEQ ID NO: 5778297 - DNA, 25 bp, Homo sapien
gaagctgctcgctcaggtttcgctg

SEQ ID NO: 5778298 - DNA, 25 bp, Homo sapien
tggttgtgtctgctgcaggagggcg

SEQ ID NO: 5778299 - DNA, 25 bp, Homo sapien
cagatctgctcatcaactctggctc

SEQ ID NO: 5778300 - DNA, 25 bp, Homo sapien
cagtgactgtatgaaaccaatgtat

SEQ ID NO: 5778301 - DNA, 25 bp, Homo sapien
tggttttaagcttgtcagtctcctg

SEQ ID NO: 5778302 - DNA, 25 bp, Homo sapien
tcaggtttcgctgctcagcacagat

SEQ ID NO: 5778303 - DNA, 25 bp, Homo sapien
acattctctgtgtggcgaaccagcc

SEQ ID NO: 5778304 - DNA, 25 bp, Homo sapien
aggggccttagccacgctagtgtat

SEQ ID NO: 5778305 - DNA, 25 bp, Homo sapien
tgtatgctttgactcctgccaacag

SEQ ID NO: 5778306 - DNA, 25 bp, Homo sapien
tcccagcctgcctcactgctctacg

SEQ ID NO: 5778307 - DNA, 25 bp, Homo sapien
tggctggggagaggatgatggtccc

SEQ ID NO: 5778308 - DNA, 25 bp, Homo sapien
ttggtcaagcaatgaatattgttgt

SEQ ID NO: 5778309 - DNA, 25 bp, Homo sapien
aattccttgaggtgagtttcaatgt

SEQ ID NO: 5778310 - DNA, 25 bp, Homo sapien
gtccagcattcgggagtggaagaca

SEQ ID NO: 5778311 - DNA, 25 bp, Homo sapien
actcagaagggaagatagtatgttc

SEQ ID NO: 5778312 - DNA, 25 bp, Homo sapien
agaaggccgtacgatctcctgggtc

SEQ ID NO: 5778313 - DNA, 25 bp, Homo sapien
gtgtagcttgtccatgttggtgaca

SEQ ID NO: 5778314 - DNA, 25 bp, Homo sapien
ctgcaggagggcgttgcggatgact

SEQ ID NO: 5778315 - DNA, 25 bp, Homo sapien
gactgtatgaaaccaatgtatgctt

SEQ ID NO: 5778316 - DNA, 25 bp, Homo sapien
gccatcaagtccggcttgctaaagt

SEQ ID NO: 5778317 - DNA, 25 bp, Homo sapien
atcactttgatgtgtcttcggacca

SEQ ID NO: 5778318 - DNA, 25 bp, Homo sapien
accagcaatttttctacggagtcca

SEQ ID NO: 5778319 - DNA, 25 bp, Homo sapien
caatgctcgagtcagcatagtcctc

SEQ ID NO: 5778320 - DNA, 25 bp, Homo sapien
ctttgactcctgccaacagctcaga

SEQ ID NO: 5778321 - DNA, 25 bp, Homo sapien
tgtggccccacgccctaactttttc

SEQ ID NO: 5778322 - DNA, 25 bp, Homo sapien
ccaccagaaattccttgaggtgagt

SEQ ID NO: 5778323 - DNA, 25 bp, Homo sapien
aagtttaggtgtagcttgtccatgt

SEQ ID NO: 5778324 - DNA, 25 bp, Homo sapien
cggaaccagtccagcctcaatcctg

SEQ ID NO: 5778325 - DNA, 25 bp, Homo sapien
gcactcaatgggacccataagaaat

SEQ ID NO: 5778326 - DNA, 25 bp, Homo sapien
cctctggacacacagacaagttctg

SEQ ID NO: 5778327 - DNA, 25 bp, Homo sapien
tcagcacagatctccaggacgcaat

SEQ ID NO: 5778328 - DNA, 25 bp, Homo sapien
tgttgtaaccatccttctcaatgct

SEQ ID NO: 5778329 - DNA, 25 bp, Homo sapien
actgagcacaagagcatcaaatctt

SEQ ID NO: 5778330 - DNA, 25 bp, Homo sapien
tagccagccagccacacaatggctc

SEQ ID NO: 5778331 - DNA, 25 bp, Homo sapien
ctgaatgatgtcactgagcacaaga

SEQ ID NO: 5778332 - DNA, 25 bp, Homo sapien
gagggaaactgccagaaagatcaag

SEQ ID NO: 5778333 - DNA, 25 bp, Homo sapien
taccctttcaaactgctaaacaggt

SEQ ID NO: 5778334 - DNA, 25 bp, Homo sapien
aggcacccatgacaaagaagaaacc

SEQ ID NO: 5778335 - DNA, 25 bp, Homo sapien
cagggggaaagcaatggcataacgc

SEQ ID NO: 5778336 - DNA, 25 bp, Homo sapien
ttccaccaccagcttcttcagctcc

SEQ ID NO: 5778337 - DNA, 25 bp, Homo sapien
tctcctgggtcgtggcattgtagcc

SEQ ID NO: 5778338 - DNA, 25 bp, Homo sapien
ctgggtcgtggcattgtagccagcc

SEQ ID NO: 5778339 - DNA, 25 bp, Homo sapien
aaatcagggggaaagcaatggcata

SEQ ID NO: 5778340 - DNA, 25 bp, Homo sapien
tcacgaatgaaggacagggccatga

SEQ ID NO: 5778341 - DNA, 25 bp, Homo sapien
cctgaccctctctccttagtgaccc

SEQ ID NO: 5778342 - DNA, 25 bp, Homo sapien
tggcaaacatcttctcaaagatacg

SEQ ID NO: 5778343 - DNA, 25 bp, Homo sapien
aggctgggtcaatgtcacagcccac

SEQ ID NO: 5778344 - DNA, 25 bp, Homo sapien
ccagcttcttcagctccacaatctg

SEQ ID NO: 5778345 - DNA, 25 bp, Homo sapien
attcagtttaggtggaaggcccgag

SEQ ID NO: 5778346 - DNA, 25 bp, Homo sapien
tctcgggctctccttttctgggagt

SEQ ID NO: 5778347 - DNA, 25 bp, Homo sapien
aagaagaaacccaatgataatccag

SEQ ID NO: 5778348 - DNA, 25 bp, Homo sapien
tcatgcaggtgcagaggggccttag

SEQ ID NO: 5778349 - DNA, 25 bp, Homo sapien
gtactgaaggtggtattgctgtatc

SEQ ID NO: 5778350 - DNA, 25 bp, Homo sapien
ttgactcctgccaacagctcagaag

SEQ ID NO: 5778351 - DNA, 25 bp, Homo sapien
tgtccatgttggtgacaatgctgcg

SEQ ID NO: 5778352 - DNA, 25 bp, Homo sapien
tgtgtctgctgcaggagggcgttgc

SEQ ID NO: 5778353 - DNA, 25 bp, Homo sapien
agagatgtcagagaactcctctgca

SEQ ID NO: 5778354 - DNA, 25 bp, Homo sapien
atggctttggtcaagcaatgaatat

SEQ ID NO: 5778355 - DNA, 25 bp, Homo sapien
ttaggacccagtagtcccggttcat

SEQ ID NO: 5778356 - DNA, 25 bp, Homo sapien
attcctcctcaggagatgaagtatc

SEQ ID NO: 5778357 - DNA, 25 bp, Homo sapien
attcagagaggagaggatactgacg

SEQ ID NO: 5778358 - DNA, 25 bp, Homo sapien
tgggcaggctgacgaaggcctgcat

SEQ ID NO: 5778359 - DNA, 25 bp, Homo sapien
gggctcttcagtgggtactggcagg

SEQ ID NO: 5778360 - DNA, 25 bp, Homo sapien
ggcaggctgacgaaggcctgcatgg

SEQ ID NO: 5778361 - DNA, 25 bp, Homo sapien
gggtcagtggcaaggagtgggaggg

SEQ ID NO: 5778362 - DNA, 25 bp, Homo sapien
ggatctgatctgaacaagtatgtcc

SEQ ID NO: 5778363 - DNA, 25 bp, Homo sapien
ctgtatacatgattcattgtcagtg

SEQ ID NO: 5778364 - DNA, 25 bp, Homo sapien
ggaagccatcaagtccggcttgcta

SEQ ID NO: 5778365 - DNA, 25 bp, Homo sapien
taggcggaaccagtccagcctcaat

SEQ ID NO: 5778366 - DNA, 25 bp, Homo sapien
gagccttaggacccagtagtcccgg

SEQ ID NO: 5778367 - DNA, 25 bp, Homo sapien
aaacatcttctcaaagatacgaaga

SEQ ID NO: 5778368 - DNA, 25 bp, Homo sapien
gtactggcaggcattcagtttaggt

SEQ ID NO: 5778369 - DNA, 25 bp, Homo sapien
agcctcaatcctgagaattcaaatt

SEQ ID NO: 5778370 - DNA, 25 bp, Homo sapien
tgcttcctggttttcttgttcttgg

SEQ ID NO: 5778371 - DNA, 25 bp, Homo sapien
attgttcttccacagatctgctcat

SEQ ID NO: 5778372 - DNA, 25 bp, Homo sapien
tgttcttggctttgctgattgtagt

SEQ ID NO: 5778373 - DNA, 25 bp, Homo sapien
cagctcagaaggccgtacgatctcc

SEQ ID NO: 5778374 - DNA, 25 bp, Homo sapien
tgaaactggccactgtttgcaatta

SEQ ID NO: 5778375 - DNA, 25 bp, Homo sapien
tttgagattcagagaggagaggata

SEQ ID NO: 5778376 - DNA, 25 bp, Homo sapien
gatgatggctttggtcaagcaatga

SEQ ID NO: 5778377 - DNA, 25 bp, Homo sapien
gggtactggcaggcattcagtttag

SEQ ID NO: 5778378 - DNA, 25 bp, Homo sapien
cttcctggttttcttgttcttggct

SEQ ID NO: 5778379 - DNA, 25 bp, Homo sapien
ggagtggaagacaatgaggttcatc

SEQ ID NO: 5778380 - DNA, 25 bp, Homo sapien
ggggcagcagggaagccatcaagtc

SEQ ID NO: 5778381 - DNA, 25 bp, Homo sapien
cctgtaggcggaaccagtccagcct

SEQ ID NO: 5778382 - DNA, 25 bp, Homo sapien
cttgatgtctgtgtctggagtgaca

SEQ ID NO: 5778383 - DNA, 25 bp, Homo sapien
cagcatgtccagggtcaggaaggat

SEQ ID NO: 5778384 - DNA, 25 bp, Homo sapien
ttttccataagctgtcctccatgct

SEQ ID NO: 5778385 - DNA, 25 bp, Homo sapien
catcctcacggataagggtgatgta

SEQ ID NO: 5778386 - DNA, 25 bp, Homo sapien
tgattgtctgttccccacaggaatc

SEQ ID NO: 5778387 - DNA, 25 bp, Homo sapien
tgcagcagatgccagctcaaagata

SEQ ID NO: 5778388 - DNA, 25 bp, Homo sapien
agccaccaaggctgggtcaatgtca

SEQ ID NO: 5778389 - DNA, 25 bp, Homo sapien
ccacaggaatccagtggttgtgtct

SEQ ID NO: 5778390 - DNA, 25 bp, Homo sapien
gcattgtagccagccagccacacaa

SEQ ID NO: 5778391 - DNA, 25 bp, Homo sapien
tggcagccaccaaggctgggtcaat

SEQ ID NO: 5778392 - DNA, 25 bp, Homo sapien
ctccatgctcccagcctgcctcact

SEQ ID NO: 5778393 - DNA, 25 bp, Homo sapien
gaagacaatgaggttcatcaccttg

SEQ ID NO: 5778394 - DNA, 25 bp, Homo sapien
taggcatttcgaagcaggacataag

SEQ ID NO: 5778395 - DNA, 25 bp, Homo sapien
cttcaagcactcaatgggacccata

SEQ ID NO: 5778396 - DNA, 25 bp, Homo sapien
tgtcagtctcctggcccagctgcaa

SEQ ID NO: 5778397 - DNA, 25 bp, Homo sapien
ctgtttgcaattacatgttccttgc

SEQ ID NO: 5778398 - DNA, 25 bp, Homo sapien
gggaagatagtatgttcaaacacgg

SEQ ID NO: 5778399 - DNA, 25 bp, Homo sapien
agtggacaaagtgagcacaaatcag

SEQ ID NO: 5778400 - DNA, 25 bp, Homo sapien
acaaactccttcaagcactcaatgg

SEQ ID NO: 5778401 - DNA, 25 bp, Homo sapien
gaaggcccgagacacctcccgatag

SEQ ID NO: 5778402 - DNA, 25 bp, Homo sapien
ccataagctgtcctccatgctccca

SEQ ID NO: 5778403 - DNA, 25 bp, Homo sapien
gctcgctcaggtttcgctgctcagc

SEQ ID NO: 5778404 - DNA, 25 bp, Homo sapien
aacacggagaaactgtatacatgat

SEQ ID NO: 5778405 - DNA, 25 bp, Homo sapien
tcaaatcttgccaagtactgaaggt

SEQ ID NO: 5778406 - DNA, 25 bp, Homo sapien
cccaaaaactgggccagtgactgta

SEQ ID NO: 5778407 - DNA, 25 bp, Homo sapien
actggcaggcattcagtttaggtgg

SEQ ID NO: 5778408 - DNA, 25 bp, Homo sapien
tgccaaggcccgcatctcagagatg

SEQ ID NO: 5778409 - DNA, 25 bp, Homo sapien
ggccaactcttccaggaaggagttg

SEQ ID NO: 5778410 - DNA, 25 bp, Homo sapien
caatgctataaaaggaagaagggtc

SEQ ID NO: 5778411 - DNA, 25 bp, Homo sapien
gatggtcatgcgctttagcacattt

SEQ ID NO: 5778412 - DNA, 25 bp, Homo sapien
ctgttgagtctggcctccaggtggc

SEQ ID NO: 5778413 - DNA, 25 bp, Homo sapien
gctggtctgcttggccaactcttcc

SEQ ID NO: 5778414 - DNA, 25 bp, Homo sapien
caggtgacctcatcacgaatgaagg

SEQ ID NO: 5778415 - DNA, 25 bp, Homo sapien
aaggcccgcatctcagagatgtcag

SEQ ID NO: 5778416 - DNA, 25 bp, Homo sapien
gtgaagaccatggttcttgaggtgg

SEQ ID NO: 5778417 - DNA, 25 bp, Homo sapien
ggactcctcctctggacacacagac

SEQ ID NO: 5778418 - DNA, 25 bp, Homo sapien
agatacgaagatgaaagcagaaagt

SEQ ID NO: 5778419 - DNA, 25 bp, Homo sapien
aggggcccaggagttctgccaaggc

SEQ ID NO: 5778420 - DNA, 25 bp, Homo sapien
tggtctgcttggccaactcttccag

SEQ ID NO: 5778421 - DNA, 25 bp, Homo sapien
atactcaaggtcaccttgatgtctg

SEQ ID NO: 5778422 - DNA, 25 bp, Homo sapien
tacttgtacgttactccttttttca

SEQ ID NO: 5778423 - DNA, 25 bp, Homo sapien
caggaaggagttgcagtggtgaaga

SEQ ID NO: 5778424 - DNA, 25 bp, Homo sapien
tcaacttgtttgagattcagagagg

SEQ ID NO: 5778425 - DNA, 25 bp, Homo sapien
acagtgcttaggtagaagctgctcg

SEQ ID NO: 5778426 - DNA, 25 bp, Homo sapien
accaccaagcgcatgagcagagaaa

SEQ ID NO: 5778427 - DNA, 25 bp, Homo sapien
tggccactgtttgcaattacatgtt

SEQ ID NO: 5778428 - DNA, 25 bp, Homo sapien
taagggtgatgtagagggagccctg

SEQ ID NO: 5778429 - DNA, 25 bp, Homo sapien
gacccagtagtcccggttcatcagc

SEQ ID NO: 5778430 - DNA, 25 bp, Homo sapien
catgttttccaccaccagcttcttc

SEQ ID NO: 5778431 - DNA, 25 bp, Homo sapien
acatgttccttgctctcctttatgt

SEQ ID NO: 5778432 - DNA, 25 bp, Homo sapien
gagtgtggtgattgtctgttcccca

SEQ ID NO: 5778433 - DNA, 25 bp, Homo sapien
cttgtccctctcgggctctcctttt

SEQ ID NO: 5778434 - DNA, 25 bp, Homo sapien
tccacagcttctggcactggctatt

SEQ ID NO: 5778435 - DNA, 25 bp, Homo sapien
ttcgggagtggaagacaatgaggtt

SEQ ID NO: 5778436 - DNA, 25 bp, Homo sapien
aactctggctcctgaccctctctcc

SEQ ID NO: 5778437 - DNA, 25 bp, Homo sapien
acatgattcattgtcagtgccagtt

SEQ ID NO: 5778438 - DNA, 25 bp, Homo sapien
agtctcctggcccagctgcaagagg

SEQ ID NO: 5778439 - DNA, 25 bp, Homo sapien
gagtccagcattcgggagtggaaga

SEQ ID NO: 5778440 - DNA, 25 bp, Homo sapien
gtccagcctcaatcctgagaattca

SEQ ID NO: 5778441 - DNA, 25 bp, Homo sapien
ctgccagaaagatcaagagcaggca

SEQ ID NO: 5778442 - DNA, 25 bp, Homo sapien
tgggcacatctcatgagtgcagtgg

SEQ ID NO: 5778443 - DNA, 25 bp, Homo sapien
ccatgctcccagcctgcctcactgc

SEQ ID NO: 5778444 - DNA, 25 bp, Homo sapien
cagctgcaagaggctgacagaggcc

SEQ ID NO: 5778445 - DNA, 25 bp, Homo sapien
caaaaactgggccagtgactgtatg

SEQ ID NO: 5778446 - DNA, 25 bp, Homo sapien
cacgccctaactttttccataagct

SEQ ID NO: 5778447 - DNA, 25 bp, Homo sapien
ttggatctgatctgaacaagtatgt

SEQ ID NO: 5778448 - DNA, 25 bp, Homo sapien
cagctttcagattagcaatggcagc

SEQ ID NO: 5778449 - DNA, 25 bp, Homo sapien
ttcatgccataggggcccaggagtt

SEQ ID NO: 5778450 - DNA, 25 bp, Homo sapien
agctggggcagcagggaagccatca

SEQ ID NO: 5778451 - DNA, 25 bp, Homo sapien
agagaaatggattctcgatttctgg

SEQ ID NO: 5778452 - DNA, 25 bp, Homo sapien
ctgctgaggtactcagaagggaaga

SEQ ID NO: 5778453 - DNA, 25 bp, Homo sapien
ccagctccttcactgccatccgcag

SEQ ID NO: 5778454 - DNA, 25 bp, Homo sapien
gatgaagtatcagctttcagattag

SEQ ID NO: 5778455 - DNA, 25 bp, Homo sapien
tcctggcttgtccctctcgggctct

SEQ ID NO: 5778456 - DNA, 25 bp, Homo sapien
ctttggtcaagcaatgaatattgtt

SEQ ID NO: 5778457 - DNA, 25 bp, Homo sapien
ccgaggccacaagtgacctcggact

SEQ ID NO: 5778458 - DNA, 25 bp, Homo sapien
agtccgaggtcacttgtggcctcgg

SEQ ID NO: 5778459 - DNA, 25 bp, Homo sapien
tcgtcgtccgtgacttcccgaagag

SEQ ID NO: 5778460 - DNA, 25 bp, Homo sapien
ctcttcgggaagtcacggacgacga

SEQ ID NO: 5778461 - DNA, 25 bp, Homo sapien
ctattaagttgaattagacatttcg

SEQ ID NO: 5778462 - DNA, 25 bp, Homo sapien
cgaaatgtctaattcaacttaatag

SEQ ID NO: 5778463 - DNA, 25 bp, Homo sapien
ggtcgggcgctctctacgcggtccc

SEQ ID NO: 5778464 - DNA, 25 bp, Homo sapien
gggaccgcgtagagagcgcccgacc

SEQ ID NO: 5778465 - DNA, 25 bp, Homo sapien
cgaccatcgtccttccttccgcgac

SEQ ID NO: 5778466 - DNA, 25 bp, Homo sapien
gtcgcggaaggaaggacgatggtcg

SEQ ID NO: 5778467 - DNA, 25 bp, Homo sapien
gtcaagggtcgctccaggcggcgac

SEQ ID NO: 5778468 - DNA, 25 bp, Homo sapien
gtcgccgcctggagcgacccttgac

SEQ ID NO: 5778469 - DNA, 25 bp, Homo sapien
gtatatctatattctctttggaaaa

SEQ ID NO: 5778470 - DNA, 25 bp, Homo sapien
ttttccaaagagaatatagatatac

SEQ ID NO: 5778471 - DNA, 25 bp, Homo sapien
ccggtgtcactaccgctcactggcc

SEQ ID NO: 5778472 - DNA, 25 bp, Homo sapien
ggccagtgagcggtagtgacaccgg

SEQ ID NO: 5778473 - DNA, 25 bp, Homo sapien
aatactaaatcagacctagacaaaa

SEQ ID NO: 5778474 - DNA, 25 bp, Homo sapien
ttttgtctaggtctgatttagtatt

SEQ ID NO: 5778475 - DNA, 25 bp, Homo sapien
gactcgagatcgtagtttcggcaac

SEQ ID NO: 5778476 - DNA, 25 bp, Homo sapien
gttgccgaaactacgatctcgagtc

SEQ ID NO: 5778477 - DNA, 25 bp, Homo sapien
ggaaaacgggacacaatcatgtagg

SEQ ID NO: 5778478 - DNA, 25 bp, Homo sapien
cctacatgattgtgtcccgttttcc

SEQ ID NO: 5778479 - DNA, 25 bp, Homo sapien
ccatgtcacccatgacaggaggtgg

SEQ ID NO: 5778480 - DNA, 25 bp, Homo sapien
ccacctcctgtcatgggtgacatgg

SEQ ID NO: 5778481 - DNA, 25 bp, Homo sapien
acgatgcttggaaaaaggatcctcg

SEQ ID NO: 5778482 - DNA, 25 bp, Homo sapien
cgaggatcctttttccaagcatcgt

SEQ ID NO: 5778483 - DNA, 25 bp, Homo sapien
caatatccgaaatcaaggttttacg

SEQ ID NO: 5778484 - DNA, 25 bp, Homo sapien
cgtaaaaccttgatttcggatattg

SEQ ID NO: 5778485 - DNA, 25 bp, Homo sapien
gtagaagaggttatttcttgtttaa

SEQ ID NO: 5778486 - DNA, 25 bp, Homo sapien
ttaaacaagaaataacctcttctac

SEQ ID NO: 5778487 - DNA, 25 bp, Homo sapien
acattaaccgttttcagtgtccgaa

SEQ ID NO: 5778488 - DNA, 25 bp, Homo sapien
ttcggacactgaaaacggttaatgt

SEQ ID NO: 5778489 - DNA, 25 bp, Homo sapien
agaggtggtcaagtgacaggagacc

SEQ ID NO: 5778490 - DNA, 25 bp, Homo sapien
ggtctcctgtcacttgaccacctct

SEQ ID NO: 5778491 - DNA, 25 bp, Homo sapien
gcaccgtcaggggtccgccggcgtc

SEQ ID NO: 5778492 - DNA, 25 bp, Homo sapien
gacgccggcggacccctgacggtgc

SEQ ID NO: 5778493 - DNA, 25 bp, Homo sapien
acattttatttaaagtctatgaaga

SEQ ID NO: 5778494 - DNA, 25 bp, Homo sapien
tcttcatagactttaaataaaatgt

SEQ ID NO: 5778495 - DNA, 25 bp, Homo sapien
tattcaaatctacgaccaagacaag

SEQ ID NO: 5778496 - DNA, 25 bp, Homo sapien
cttgtcttggtcgtagatttgaata

SEQ ID NO: 5778497 - DNA, 25 bp, Homo sapien
cgacaggacaccgtcaatgtgcgtg

SEQ ID NO: 5778498 - DNA, 25 bp, Homo sapien
cacgcacattgacggtgtcctgtcg

SEQ ID NO: 5778499 - DNA, 25 bp, Homo sapien
ggcgtcggggctcctcggccgtgcg

SEQ ID NO: 5778500 - DNA, 25 bp, Homo sapien
cgcacggccgaggagccccgacgcc

SEQ ID NO: 5778501 - DNA, 25 bp, Homo sapien
ggtatccaattacgcttctagttag

SEQ ID NO: 5778502 - DNA, 25 bp, Homo sapien
ctaactagaagcgtaattggatacc

SEQ ID NO: 5778503 - DNA, 25 bp, Homo sapien
aaagacacaactagacttaaattac

SEQ ID NO: 5778504 - DNA, 25 bp, Homo sapien
gtaatttaagtctagttgtgtcttt

SEQ ID NO: 5778505 - DNA, 25 bp, Homo sapien
ataagatacaacgattacactttct

SEQ ID NO: 5778506 - DNA, 25 bp, Homo sapien
agaaagtgtaatcgttgtatcttat

SEQ ID NO: 5778507 - DNA, 25 bp, Homo sapien
catccttcgagagaaaccatataac

SEQ ID NO: 5778508 - DNA, 25 bp, Homo sapien
gttatatggtttctctcgaaggatg

SEQ ID NO: 5778509 - DNA, 25 bp, Homo sapien
gtccaccggagcccagcgggaggcg

SEQ ID NO: 5778510 - DNA, 25 bp, Homo sapien
cgcctcccgctgggctccggtggac

SEQ ID NO: 5778511 - DNA, 25 bp, Homo sapien
gtgttaattgtaatatgacgaacca

SEQ ID NO: 5778512 - DNA, 25 bp, Homo sapien
tggttcgtcatattacaattaacac

SEQ ID NO: 5778513 - DNA, 25 bp, Homo sapien
aatatgacttataaacttctcgaga

SEQ ID NO: 5778514 - DNA, 25 bp, Homo sapien
tctcgagaagtttataagtcatatt

SEQ ID NO: 5778515 - DNA, 25 bp, Homo sapien
aggccgcccggtctggagtgccgcg

SEQ ID NO: 5778516 - DNA, 25 bp, Homo sapien
cgcggcactccagaccgggcggcct

SEQ ID NO: 5778517 - DNA, 25 bp, Homo sapien
gacctgtcgttacacgtcttaatta

SEQ ID NO: 5778518 - DNA, 25 bp, Homo sapien
taattaagacgtgtaacgacaggtc

SEQ ID NO: 5778519 - DNA, 25 bp, Homo sapien
acctctacagaaaccatctgtcgag

SEQ ID NO: 5778520 - DNA, 25 bp, Homo sapien
ctcgacagatggtttctgtagaggt

SEQ ID NO: 5778521 - DNA, 25 bp, Homo sapien
gtttgtgtctagaggccccgacgac

SEQ ID NO: 5778522 - DNA, 25 bp, Homo sapien
gtcgtcggggcctctagacacaaac

SEQ ID NO: 5778523 - DNA, 25 bp, Homo sapien
gggctcgagtgccggcgtcgagccg

SEQ ID NO: 5778524 - DNA, 25 bp, Homo sapien
cggctcgacgccggcactcgagccc

SEQ ID NO: 5778525 - DNA, 25 bp, Homo sapien
tgtctgaactacaaagtctagggta

SEQ ID NO: 5778526 - DNA, 25 bp, Homo sapien
taccctagactttgtagttcagaca

SEQ ID NO: 5778527 - DNA, 25 bp, Homo sapien
ttccctaacgacattgtggaagact

SEQ ID NO: 5778528 - DNA, 25 bp, Homo sapien
agtcttccacaatgtcgttagggaa

SEQ ID NO: 5778529 - DNA, 25 bp, Homo sapien
cgccagtttagccaactataacagg

SEQ ID NO: 5778530 - DNA, 25 bp, Homo sapien
cctgttatagttggctaaactggcg

SEQ ID NO: 5778531 - DNA, 25 bp, Homo sapien
tataaagaccttacattgtctgtaa

SEQ ID NO: 5778532 - DNA, 25 bp, Homo sapien
ttacagacaatgtaaggtctttata

SEQ ID NO: 5778533 - DNA, 25 bp, Homo sapien
tcgaagaaagtgggcgtcgtccctt

SEQ ID NO: 5778534 - DNA, 25 bp, Homo sapien
aagggacgacgcccactttcttcga

SEQ ID NO: 5778535 - DNA, 25 bp, Homo sapien
agtcaaccgagatctagactaagaa

SEQ ID NO: 5778536 - DNA, 25 bp, Homo sapien
ttcttagtctagatctcggttgact

SEQ ID NO: 5778537 - DNA, 25 bp, Homo sapien
ttgtgacttaaatactataaactgt

SEQ ID NO: 5778538 - DNA, 25 bp, Homo sapien
acagtttatagtatttaagtcacaa

SEQ ID NO: 5778539 - DNA, 25 bp, Homo sapien
tttgtgacttaaatactataaactg

SEQ ID NO: 5778540 - DNA, 25 bp, Homo sapien
cagtttatagtatttaagtcacaaa

SEQ ID NO: 5778541 - DNA, 25 bp, Homo sapien
tcgaaggcacaatccgttaccccat

SEQ ID NO: 5778542 - DNA, 25 bp, Homo sapien
atggggtaacggattgtgccttcga

SEQ ID NO: 5778543 - DNA, 25 bp, Homo sapien
tttcgggcccgaagctgagtgagcc

SEQ ID NO: 5778544 - DNA, 25 bp, Homo sapien
ggctcactcagcttcgggcccgaaa

SEQ ID NO: 5778545 - DNA, 25 bp, Homo sapien
acataagtaaactgtagcacatagt

SEQ ID NO: 5778546 - DNA, 25 bp, Homo sapien
actatgtgctacagtttacttatgt

SEQ ID NO: 5778547 - DNA, 25 bp, Homo sapien
tgggtggccccggtcttcgtacgga

SEQ ID NO: 5778548 - DNA, 25 bp, Homo sapien
tccgtacgaagaccggggccaccca

SEQ ID NO: 5778549 - DNA, 25 bp, Homo sapien
tttagactgcatgcctccccatgga

SEQ ID NO: 5778550 - DNA, 25 bp, Homo sapien
gttcaggtggaaaaccaggtacaag

SEQ ID NO: 5778551 - DNA, 25 bp, Homo sapien
ccaggcatggaaggatgcagaaacg

SEQ ID NO: 5778552 - DNA, 25 bp, Homo sapien
aagcctatcagaagctcatttcaga

SEQ ID NO: 5778553 - DNA, 25 bp, Homo sapien
ttgattgtgtttggctcttcgctaa

SEQ ID NO: 5778554 - DNA, 25 bp, Homo sapien
ctggtgaaatagaatcaaaggctgc

SEQ ID NO: 5778555 - DNA, 25 bp, Homo sapien
ttgataaaacagtttcaccatacat

SEQ ID NO: 5778556 - DNA, 25 bp, Homo sapien
atgcagaaacgtgacgagcaatgat

SEQ ID NO: 5778557 - DNA, 25 bp, Homo sapien
ttgatgcgccacagacttttttccc

SEQ ID NO: 5778558 - DNA, 25 bp, Homo sapien
acaatttagactgcatgcctcccca

SEQ ID NO: 5778559 - DNA, 25 bp, Homo sapien
ggagcaggctgcggagcccttgcag

SEQ ID NO: 5778560 - DNA, 25 bp, Homo sapien
agaatcaaaggctgcaaacctcaat

SEQ ID NO: 5778561 - DNA, 25 bp, Homo sapien
tcccagagccgcctccccctgttgc

SEQ ID NO: 5778562 - DNA, 25 bp, Homo sapien
gccccgaggtgcgcccgggaggcgc

SEQ ID NO: 5778563 - DNA, 25 bp, Homo sapien
tattttaacattaccgccatctgtc

SEQ ID NO: 5778564 - DNA, 25 bp, Homo sapien
aaactgtcatctgaaaaacaacgtc

SEQ ID NO: 5778565 - DNA, 25 bp, Homo sapien
gattgctgctggtgatgacagatca

SEQ ID NO: 5778566 - DNA, 25 bp, Homo sapien
ccgtcgaaggaggtgcttctcgcgg

SEQ ID NO: 5778567 - DNA, 25 bp, Homo sapien
tttcaggtggatcaagaagtgaacg

SEQ ID NO: 5778568 - DNA, 25 bp, Homo sapien
atcttctacccctcttgccaggcac

SEQ ID NO: 5778569 - DNA, 25 bp, Homo sapien
tgcggctcggccctggcttttttta

SEQ ID NO: 5778570 - DNA, 25 bp, Homo sapien
cgctgcatttgtctgcctgcaaaac

SEQ ID NO: 5778571 - DNA, 25 bp, Homo sapien
tctctccagtcgccgccggggccct

SEQ ID NO: 5778572 - DNA, 25 bp, Homo sapien
ggaggttttgacgccatgcttcagg

SEQ ID NO: 5778573 - DNA, 25 bp, Homo sapien
ccattgctggtgaaatagaatcaaa

SEQ ID NO: 5778574 - DNA, 25 bp, Homo sapien
gccaaggtgaagacaatagatgtgc

SEQ ID NO: 5778575 - DNA, 25 bp, Homo sapien
gcatttttctcccgtgactttcgtc

SEQ ID NO: 5778576 - DNA, 25 bp, Homo sapien
ttataatacccactgaaaatgaaat

SEQ ID NO: 5778577 - DNA, 25 bp, Homo sapien
gcgagcccgcgtccggaaggcagcc

SEQ ID NO: 5778578 - DNA, 25 bp, Homo sapien
cgccggcgtcccctcccacagatcc

SEQ ID NO: 5778579 - DNA, 25 bp, Homo sapien
tctagaaaaatggcatttttctccc

SEQ ID NO: 5778580 - DNA, 25 bp, Homo sapien
tgggtgttttcacttgttcttggac

SEQ ID NO: 5778581 - DNA, 25 bp, Homo sapien
caggacgctgccgacttgtctttgc

SEQ ID NO: 5778582 - DNA, 25 bp, Homo sapien
gactgcatgcctccccatggataca

SEQ ID NO: 5778583 - DNA, 25 bp, Homo sapien
ctcgcggagaccgcgggacccgccg

SEQ ID NO: 5778584 - DNA, 25 bp, Homo sapien
cgcagacggggctgcaaagctgcaa

SEQ ID NO: 5778585 - DNA, 25 bp, Homo sapien
ctttcgtcttggatttggctcatac

SEQ ID NO: 5778586 - DNA, 25 bp, Homo sapien
cggagaccgcgggacccgccgtgcc

SEQ ID NO: 5778587 - DNA, 25 bp, Homo sapien
ccttgccagccaggacgctgccgac

SEQ ID NO: 5778588 - DNA, 25 bp, Homo sapien
aggtgccttgcgctgggtccagaat

SEQ ID NO: 5778589 - DNA, 25 bp, Homo sapien
tcttcaaatgcagcatcctgtgcca

SEQ ID NO: 5778590 - DNA, 25 bp, Homo sapien
tcttgatagcaaattggcaggcata

SEQ ID NO: 5778591 - DNA, 25 bp, Homo sapien
ctcatacgttgataaaacagtttca

SEQ ID NO: 5778592 - DNA, 25 bp, Homo sapien
gactttcgtcttggatttggctcat

SEQ ID NO: 5778593 - DNA, 25 bp, Homo sapien
ttgttgatgtctcagcatcaatgca

SEQ ID NO: 5778594 - DNA, 25 bp, Homo sapien
gaacgttgtgatattgtttccaatt

SEQ ID NO: 5778595 - DNA, 25 bp, Homo sapien
tcggatggcgaaaagaggctaaaag

SEQ ID NO: 5778596 - DNA, 25 bp, Homo sapien
gtgactacaatttagactgcatgcc

SEQ ID NO: 5778597 - DNA, 25 bp, Homo sapien
tcattggtataaggatcttctaccc

SEQ ID NO: 5778598 - DNA, 25 bp, Homo sapien
ttcatttcaggtggatcaagaagtg

SEQ ID NO: 5778599 - DNA, 25 bp, Homo sapien
atttgtctgcctgcaaaacgaccgg

SEQ ID NO: 5778600 - DNA, 25 bp, Homo sapien
tgcaaacctcaataatttggtagtg

SEQ ID NO: 5778601 - DNA, 25 bp, Homo sapien
agatgccgagcggtgcccgggcccg

SEQ ID NO: 5778602 - DNA, 25 bp, Homo sapien
ggacgctgccgacttgtctttgccc

SEQ ID NO: 5778603 - DNA, 25 bp, Homo sapien
cactgaaaatgaaattaatacccag

SEQ ID NO: 5778604 - DNA, 25 bp, Homo sapien
gcatagtggtgcccaatgacggaaa

SEQ ID NO: 5778605 - DNA, 25 bp, Homo sapien
aggtgaagacaatagatgtgcatct

SEQ ID NO: 5778606 - DNA, 25 bp, Homo sapien
cgatttatctagaaaaatggcattt

SEQ ID NO: 5778607 - DNA, 25 bp, Homo sapien
cagtgaatgtacattagggtggttt

SEQ ID NO: 5778608 - DNA, 25 bp, Homo sapien
aaattggcaggcatagtggtgccca

SEQ ID NO: 5778609 - DNA, 25 bp, Homo sapien
agcaatgatgaagtatgtgggtgtg

SEQ ID NO: 5778610 - DNA, 25 bp, Homo sapien
gtgccgagccgggagggccgtaggg

SEQ ID NO: 5778611 - DNA, 25 bp, Homo sapien
aagtgaaagttcaggtggaaaacca

SEQ ID NO: 5778612 - DNA, 25 bp, Homo sapien
gctccgcagacggggctgcaaagct

SEQ ID NO: 5778613 - DNA, 25 bp, Homo sapien
gagaccgcgggacccgccgtgccga

SEQ ID NO: 5778614 - DNA, 25 bp, Homo sapien
ggatttggctcatacgttgataaaa

SEQ ID NO: 5778615 - DNA, 25 bp, Homo sapien
cagtgactacaatttagactgcatg

SEQ ID NO: 5778616 - DNA, 25 bp, Homo sapien
tgtgcatgttataatacccactgaa

SEQ ID NO: 5778617 - DNA, 25 bp, Homo sapien
gtgaatgtacattagggtggtttcc

SEQ ID NO: 5778618 - DNA, 25 bp, Homo sapien
tgttggcctccctgcccacctgtgg

SEQ ID NO: 5778619 - DNA, 25 bp, Homo sapien
tccagcatcacccagtgaatgtaca

SEQ ID NO: 5778620 - DNA, 25 bp, Homo sapien
gcagaagccccaccggctggagaga

SEQ ID NO: 5778621 - DNA, 25 bp, Homo sapien
tgcatgttataatacccactgaaaa

SEQ ID NO: 5778622 - DNA, 25 bp, Homo sapien
tcggccctggctttttttaccgctg

SEQ ID NO: 5778623 - DNA, 25 bp, Homo sapien
tctttgacagagaacatcactgagt

SEQ ID NO: 5778624 - DNA, 25 bp, Homo sapien
ctggcatcccgagcttcctcccttg

SEQ ID NO: 5778625 - DNA, 25 bp, Homo sapien
cttcaggcagctgtctgtgaaagtc

SEQ ID NO: 5778626 - DNA, 25 bp, Homo sapien
catggaacacccctcactaggccaa

SEQ ID NO: 5778627 - DNA, 25 bp, Homo sapien
agatgggtccagaaagccaggcatg

SEQ ID NO: 5778628 - DNA, 25 bp, Homo sapien
gacggggctgcaaagctgcaactaa

SEQ ID NO: 5778629 - DNA, 25 bp, Homo sapien
ctctgggcagcctgggtgttttcac

SEQ ID NO: 5778630 - DNA, 25 bp, Homo sapien
acaatttcattggtataaggatctt

SEQ ID NO: 5778631 - DNA, 25 bp, Homo sapien
gcatgcctccccatggatacatcca

SEQ ID NO: 5778632 - DNA, 25 bp, Homo sapien
gaaacatagatacaccagaaggagg

SEQ ID NO: 5778633 - DNA, 25 bp, Homo sapien
ccgacttgtctttgcccgctgctcc

SEQ ID NO: 5778634 - DNA, 25 bp, Homo sapien
cgacctcgccggcgtcccctcccac

SEQ ID NO: 5778635 - DNA, 25 bp, Homo sapien
agacagaagatctctggaaacatag

SEQ ID NO: 5778636 - DNA, 25 bp, Homo sapien
agagaaattaatagacaacaacatt

SEQ ID NO: 5778637 - DNA, 25 bp, Homo sapien
ccctggctttttttaccgctgcatt

SEQ ID NO: 5778638 - DNA, 25 bp, Homo sapien
ccggctggagagaaacaaaagctct

SEQ ID NO: 5778639 - DNA, 25 bp, Homo sapien
tatgctgaaagttcatcctctgaag

SEQ ID NO: 5778640 - DNA, 25 bp, Homo sapien
tacaccagaaggaggttttgacgcc

SEQ ID NO: 5778641 - DNA, 25 bp, Homo sapien
ccctgttgctggcatcccgagcttc

SEQ ID NO: 5778642 - DNA, 25 bp, Homo sapien
gatgcgccacagacttttttcccct

SEQ ID NO: 5778643 - DNA, 25 bp, Homo sapien
gcccgggcccgcttacctgcaccgc

SEQ ID NO: 5778644 - DNA, 25 bp, Homo sapien
gggccccgaggtgcgcccgggaggc

SEQ ID NO: 5778645 - DNA, 25 bp, Homo sapien
agaagatctctggaaacatagatac

SEQ ID NO: 5778646 - DNA, 25 bp, Homo sapien
ctgattgatgcgccacagacttttt

SEQ ID NO: 5778647 - DNA, 25 bp, Homo sapien
actaatggtgttggcctccctgccc

SEQ ID NO: 5778648 - DNA, 25 bp, Homo sapien
tggactgggccaaggtgaagacaat

SEQ ID NO: 5778649 - DNA, 25 bp, Homo sapien
ggcatcccgagcttcctcccttgcc

SEQ ID NO: 5778650 - DNA, 25 bp, Homo sapien
gcagctgtctgtgaaagtcatatcg

SEQ ID NO: 5778651 - DNA, 25 bp, Homo sapien
gtcgccgccggggcccttggccgtc

SEQ ID NO: 5778652 - DNA, 25 bp, Homo sapien
gtcatatcggatggcgaaaagaggc

SEQ ID NO: 5778653 - DNA, 25 bp, Homo sapien
aggcgcgagcccgcgtccggaaggc

SEQ ID NO: 5778654 - DNA, 25 bp, Homo sapien
cgggaggcgcgagcccgcgtccgga

SEQ ID NO: 5778655 - DNA, 25 bp, Homo sapien
cagcatcctgtgccaggtgccttgc

SEQ ID NO: 5778656 - DNA, 25 bp, Homo sapien
atttggtagtggaagcctatcagaa

SEQ ID NO: 5778657 - DNA, 25 bp, Homo sapien
caaatgcagcatcctgtgccaggtg

SEQ ID NO: 5778658 - DNA, 25 bp, Homo sapien
ggtgaaatagaatcaaaggctgcaa

SEQ ID NO: 5778659 - DNA, 25 bp, Homo sapien
tatcctgtggatctttattatcttg

SEQ ID NO: 5778660 - DNA, 25 bp, Homo sapien
gcgggctgttttgcattatgtgcgg

SEQ ID NO: 5778661 - DNA, 25 bp, Homo sapien
agctgtctgtgaaagtcatatcgga

SEQ ID NO: 5778662 - DNA, 25 bp, Homo sapien
actgagtttgagaaagcagttcata

SEQ ID NO: 5778663 - DNA, 25 bp, Homo sapien
aggttttgacgccatgcttcaggca

SEQ ID NO: 5778664 - DNA, 25 bp, Homo sapien
gaagcaactgcgctgattgatgcgc

SEQ ID NO: 5778665 - DNA, 25 bp, Homo sapien
catttcagaagtgaaagttcaggtg

SEQ ID NO: 5778666 - DNA, 25 bp, Homo sapien
cctcttgccaggcaccattgctggt

SEQ ID NO: 5778667 - DNA, 25 bp, Homo sapien
tggaaacgatttatctagaaaaatg

SEQ ID NO: 5778668 - DNA, 25 bp, Homo sapien
tgcccgctgctccgcagacggggct

SEQ ID NO: 5778669 - DNA, 25 bp, Homo sapien
gcgcgagcccgcgtccggaaggcag

SEQ ID NO: 5778670 - DNA, 25 bp, Homo sapien
cctgggtgttttcacttgttcttgg

SEQ ID NO: 5778671 - DNA, 25 bp, Homo sapien
caactgcgctgattgatgcgccaca

SEQ ID NO: 5778672 - DNA, 25 bp, Homo sapien
cagtcgccgccggggcccttggccg

SEQ ID NO: 5778673 - DNA, 25 bp, Homo sapien
ccatgtgctgtctttgacagagaac

SEQ ID NO: 5778674 - DNA, 25 bp, Homo sapien
gcttctcgcggagaccgcgggaccc

SEQ ID NO: 5778675 - DNA, 25 bp, Homo sapien
tctggaaacatagatacaccagaag

SEQ ID NO: 5778676 - DNA, 25 bp, Homo sapien
tcagaagtgaaagttcaggtggaaa

SEQ ID NO: 5778677 - DNA, 25 bp, Homo sapien
cccgcctcgttcctctgggcagcct

SEQ ID NO: 5778678 - DNA, 25 bp, Homo sapien
cagacggggctgcaaagctgcaact

SEQ ID NO: 5778679 - DNA, 25 bp, Homo sapien
tgtcccggagcaggctgcggagccc

SEQ ID NO: 5778680 - DNA, 25 bp, Homo sapien
gcatcaatgcacaataatatagaaa

SEQ ID NO: 5778681 - DNA, 25 bp, Homo sapien
gtgaacgttgtgatattgtttccaa

SEQ ID NO: 5778682 - DNA, 25 bp, Homo sapien
tcatctgaaaaacaacgtctatgtc

SEQ ID NO: 5778683 - DNA, 25 bp, Homo sapien
caaagctgcaactaatggtgttggc

SEQ ID NO: 5778684 - DNA, 25 bp, Homo sapien
gaaattaatacccaggtgacaccag

SEQ ID NO: 5778685 - DNA, 25 bp, Homo sapien
tcaatgcagtgactacaatttagac

SEQ ID NO: 5778686 - DNA, 25 bp, Homo sapien
tgcatcttcaaatgcagcatcctgt

SEQ ID NO: 5778687 - DNA, 25 bp, Homo sapien
cctccctgcccacctgtggaagcaa

SEQ ID NO: 5778688 - DNA, 25 bp, Homo sapien
tacccatctgtgcatgttataatac

SEQ ID NO: 5778689 - DNA, 25 bp, Homo sapien
ggtgttttcacttgttcttggactg

SEQ ID NO: 5778690 - DNA, 25 bp, Homo sapien
ggatttcatttcaggtggatcaaga

SEQ ID NO: 5778691 - DNA, 25 bp, Homo sapien
ccggagcaggctgcggagcccttgc

SEQ ID NO: 5778692 - DNA, 25 bp, Homo sapien
ctgtggatctttattatcttgttga

SEQ ID NO: 5778693 - DNA, 25 bp, Homo sapien
aaggatgcagaaacgtgacgagcaa

SEQ ID NO: 5778694 - DNA, 25 bp, Homo sapien
acagagaacatcactgagtttgaga

SEQ ID NO: 5778695 - DNA, 25 bp, Homo sapien
gcccttggccgtcgaaggaggtgct

SEQ ID NO: 5778696 - DNA, 25 bp, Homo sapien
cttttctttgtcccggagcaggctg

SEQ ID NO: 5778697 - DNA, 25 bp, Homo sapien
agagaaacaaaagctcttttctttg

SEQ ID NO: 5778698 - DNA, 25 bp, Homo sapien
ccgcctgctaggcctgcggaaaacg

SEQ ID NO: 5778699 - DNA, 25 bp, Homo sapien
aagttgtttggcgtactttcttaca

SEQ ID NO: 5778700 - DNA, 25 bp, Homo sapien
cgctgggtccagaatgtggatggtg

SEQ ID NO: 5778701 - DNA, 25 bp, Homo sapien
agaagtgaacgttgtgatattgttt

SEQ ID NO: 5778702 - DNA, 25 bp, Homo sapien
aatacccatctgtgcatgttataat

SEQ ID NO: 5778703 - DNA, 25 bp, Homo sapien
gtgcttctcgcggagaccgcgggac

SEQ ID NO: 5778704 - DNA, 25 bp, Homo sapien
aattccgttggaaacgatttatcta

SEQ ID NO: 5778705 - DNA, 25 bp, Homo sapien
ctgctaggcctgcggaaaacgtcct

SEQ ID NO: 5778706 - DNA, 25 bp, Homo sapien
gtttggctcttcgctaagctgattt

SEQ ID NO: 5778707 - DNA, 25 bp, Homo sapien
gttcatcctctgaagaaatatcctg

SEQ ID NO: 5778708 - DNA, 25 bp, Homo sapien
ccctcactaggccaactttcagaga

SEQ ID NO: 5778709 - DNA, 25 bp, Homo sapien
ttagcatccaccccgaaaggattca

SEQ ID NO: 5778710 - DNA, 25 bp, Homo sapien
tcccggagcaggctgcggagccctt

SEQ ID NO: 5778711 - DNA, 25 bp, Homo sapien
tacccctcttgccaggcaccattgc

SEQ ID NO: 5778712 - DNA, 25 bp, Homo sapien
tttcattggtataaggatcttctac

SEQ ID NO: 5778713 - DNA, 25 bp, Homo sapien
ttgcattatgtgcggctcggccctg

SEQ ID NO: 5778714 - DNA, 25 bp, Homo sapien
tcatcctctgaagaaatatcctgtg

SEQ ID NO: 5778715 - DNA, 25 bp, Homo sapien
tgcaactaatggtgttggcctccct

SEQ ID NO: 5778716 - DNA, 25 bp, Homo sapien
gtgccttgcgctgggtccagaatgt

SEQ ID NO: 5778717 - DNA, 25 bp, Homo sapien
tgtgcggctcggccctggctttttt

SEQ ID NO: 5778718 - DNA, 25 bp, Homo sapien
gcctgcaaaacgaccggcgaggtcc

SEQ ID NO: 5778719 - DNA, 25 bp, Homo sapien
gatctctggaaacatagatacacca

SEQ ID NO: 5778720 - DNA, 25 bp, Homo sapien
ttctcgcggagaccgcgggacccgc

SEQ ID NO: 5778721 - DNA, 25 bp, Homo sapien
cttgttcttggactgggccaaggtg

SEQ ID NO: 5778722 - DNA, 25 bp, Homo sapien
agacaatagatgtgcatcttcaaat

SEQ ID NO: 5778723 - DNA, 25 bp, Homo sapien
attgtttccaatttaataagcaaag

SEQ ID NO: 5778724 - DNA, 25 bp, Homo sapien
atccagctgcgtccaggagccgaag

SEQ ID NO: 5778725 - DNA, 25 bp, Homo sapien
cttggactgggccaaggtgaagaca

SEQ ID NO: 5778726 - DNA, 25 bp, Homo sapien
atgggtccagaaagccaggcatgga

SEQ ID NO: 5778727 - DNA, 25 bp, Homo sapien
cgaggtcccgcctcgttcctctggg

SEQ ID NO: 5778728 - DNA, 25 bp, Homo sapien
gtctcatctcgctcttgatagcaaa

SEQ ID NO: 5778729 - DNA, 25 bp, Homo sapien
cagccaggacgctgccgacttgtct

SEQ ID NO: 5778730 - DNA, 25 bp, Homo sapien
tgctgaaagttcatcctctgaagaa

SEQ ID NO: 5778731 - DNA, 25 bp, Homo sapien
taagctgatttatgcagcagaagcc

SEQ ID NO: 5778732 - DNA, 25 bp, Homo sapien
aacctcaataatttggtagtggaag

SEQ ID NO: 5778733 - DNA, 25 bp, Homo sapien
ccagatgggtccagaaagccaggca

SEQ ID NO: 5778734 - DNA, 25 bp, Homo sapien
actgcgctgattgatgcgccacaga

SEQ ID NO: 5778735 - DNA, 25 bp, Homo sapien
ctggtgatgacagatcagacgtctc

SEQ ID NO: 5778736 - DNA, 25 bp, Homo sapien
gacccgccgtgccgagccgggaggg

SEQ ID NO: 5778737 - DNA, 25 bp, Homo sapien
tgacagagaacatcactgagtttga

SEQ ID NO: 5778738 - DNA, 25 bp, Homo sapien
ataatcaatgcagtgactacaattt

SEQ ID NO: 5778739 - DNA, 25 bp, Homo sapien
aatgcagcatcctgtgccaggtgcc

SEQ ID NO: 5778740 - DNA, 25 bp, Homo sapien
atagaatcaaaggctgcaaacctca

SEQ ID NO: 5778741 - DNA, 25 bp, Homo sapien
agaaagccaggcatggaaggatgca

SEQ ID NO: 5778742 - DNA, 25 bp, Homo sapien
gttgtttggcgtactttcttacaga

SEQ ID NO: 5778743 - DNA, 25 bp, Homo sapien
aatacccaggtgacaccaggagaag

SEQ ID NO: 5778744 - DNA, 25 bp, Homo sapien
aatttagactgcatgcctccccatg

SEQ ID NO: 5778745 - DNA, 25 bp, Homo sapien
gcctatcagaagctcatttcagaag

SEQ ID NO: 5778746 - DNA, 25 bp, Homo sapien
gctgctggtgatgacagatcagacg

SEQ ID NO: 5778747 - DNA, 25 bp, Homo sapien
atcacccagtgaatgtacattaggg

SEQ ID NO: 5778748 - DNA, 25 bp, Homo sapien
cgctgattgatgcgccacagacttt

SEQ ID NO: 5778749 - DNA, 25 bp, Homo sapien
catctgtgcatgttataatacccac

SEQ ID NO: 5778750 - DNA, 25 bp, Homo sapien
tgttttcacttgttcttggactggg

SEQ ID NO: 5778751 - DNA, 25 bp, Homo sapien
gccggggcccttggccgtcgaagga

SEQ ID NO: 5778752 - DNA, 25 bp, Homo sapien
taattttatgctgaaagttcatcct

SEQ ID NO: 5778753 - DNA, 25 bp, Homo sapien
tgctggtgaaatagaatcaaaggct

SEQ ID NO: 5778754 - DNA, 25 bp, Homo sapien
agcatccaccccgaaaggattcata

SEQ ID NO: 5778755 - DNA, 25 bp, Homo sapien
gcttcgggctttgtttgggtttgat

SEQ ID NO: 5778756 - DNA, 25 bp, Homo sapien
tcaggtggaaaaccaggtacaaggc

SEQ ID NO: 5778757 - DNA, 25 bp, Homo sapien
atttatctagaaaaatggcattttt

SEQ ID NO: 5778758 - DNA, 25 bp, Homo sapien
tcccctcccacagatccagcatcac

SEQ ID NO: 5778759 - DNA, 25 bp, Homo sapien
gtaggggccctgagatgccgagcgg

SEQ ID NO: 5778760 - DNA, 25 bp, Homo sapien
gaggctaaaagattgctgctggtga

SEQ ID NO: 5778761 - DNA, 25 bp, Homo sapien
aagttcaggtggaaaaccaggtaca

SEQ ID NO: 5778762 - DNA, 25 bp, Homo sapien
tgcttctagggcgctcccagagccg

SEQ ID NO: 5778763 - DNA, 25 bp, Homo sapien
ggatggcgaaaagaggctaaaagat

SEQ ID NO: 5778764 - DNA, 25 bp, Homo sapien
ccggcgaggtcccgcctcgttcctc

SEQ ID NO: 5778765 - DNA, 25 bp, Homo sapien
cgccacagacttttttcccctcgac

SEQ ID NO: 5778766 - DNA, 25 bp, Homo sapien
ctgaaaatgaaattaatacccaggt

SEQ ID NO: 5778767 - DNA, 25 bp, Homo sapien
cgaaaagaggctaaaagattgctgc

SEQ ID NO: 5778768 - DNA, 25 bp, Homo sapien
cggggcgggctgttttgcattatgt

SEQ ID NO: 5778769 - DNA, 25 bp, Homo sapien
gggtttgattgtgtttggctcttcg

SEQ ID NO: 5778770 - DNA, 25 bp, Homo sapien
gggctgcaaagctgcaactaatggt

SEQ ID NO: 5778771 - DNA, 25 bp, Homo sapien
gtgaaagttcaggtggaaaaccagg

SEQ ID NO: 5778772 - DNA, 25 bp, Homo sapien
ctgcctgcaaaacgaccggcgaggt

SEQ ID NO: 5778773 - DNA, 25 bp, Homo sapien
gcaaattggcaggcatagtggtgcc

SEQ ID NO: 5778774 - DNA, 25 bp, Homo sapien
accgctgcatttgtctgcctgcaaa

SEQ ID NO: 5778775 - DNA, 25 bp, Homo sapien
agaagccccaccggctggagagaaa

SEQ ID NO: 5778776 - DNA, 25 bp, Homo sapien
agaatgtggatggtgtgttcaagag

SEQ ID NO: 5778777 - DNA, 25 bp, Homo sapien
tgagtttgagaaagcagttcataga

SEQ ID NO: 5778778 - DNA, 25 bp, Homo sapien
atttcatttcaggtggatcaagaag

SEQ ID NO: 5778779 - DNA, 25 bp, Homo sapien
ataatacccactgaaaatgaaatta

SEQ ID NO: 5778780 - DNA, 25 bp, Homo sapien
gggcagcctgggtgttttcacttgt

SEQ ID NO: 5778781 - DNA, 25 bp, Homo sapien
tagtggaagcctatcagaagctcat

SEQ ID NO: 5778782 - DNA, 25 bp, Homo sapien
aggcatagtggtgcccaatgacgga

SEQ ID NO: 5778783 - DNA, 25 bp, Homo sapien
aaggaggtgcttctcgcggagaccg

SEQ ID NO: 5778784 - DNA, 25 bp, Homo sapien
tgctccgagccgcggggtccgcctg

SEQ ID NO: 5778785 - DNA, 25 bp, Homo sapien
tcgacaaccatggaacacccctcac

SEQ ID NO: 5778786 - DNA, 25 bp, Homo sapien
tggtgtgttcaagaggatttcattt

SEQ ID NO: 5778787 - DNA, 25 bp, Homo sapien
gctcagttgattcaatagaataccc

SEQ ID NO: 5778788 - DNA, 25 bp, Homo sapien
cgaagctaattttatgctgaaagtt

SEQ ID NO: 5778789 - DNA, 25 bp, Homo sapien
gttcatagacagaagatctctggaa

SEQ ID NO: 5778790 - DNA, 25 bp, Homo sapien
tgcagagccctctctccagtcgccg

SEQ ID NO: 5778791 - DNA, 25 bp, Homo sapien
cgcggggcgggctgttttgcattat

SEQ ID NO: 5778792 - DNA, 25 bp, Homo sapien
gagccgcggggtccgcctgctaggc

SEQ ID NO: 5778793 - DNA, 25 bp, Homo sapien
aagaaatatcctgtggatctttatt

SEQ ID NO: 5778794 - DNA, 25 bp, Homo sapien
gatcagacgtctcatctcgctcttg

SEQ ID NO: 5778795 - DNA, 25 bp, Homo sapien
gcaaaacgaccggcgaggtcccgcc

SEQ ID NO: 5778796 - DNA, 25 bp, Homo sapien
gtgacgagcaatgatgaagtatgtg

SEQ ID NO: 5778797 - DNA, 25 bp, Homo sapien
aagaggctaaaagattgctgctggt

SEQ ID NO: 5778798 - DNA, 25 bp, Homo sapien
gacgagcaatgatgaagtatgtggg

SEQ ID NO: 5778799 - DNA, 25 bp, Homo sapien
gacaacaacattaatgtcatctttg

SEQ ID NO: 5778800 - DNA, 25 bp, Homo sapien
ggcctccctgcccacctgtggaagc

SEQ ID NO: 5778801 - DNA, 25 bp, Homo sapien
gccaggcaccattgctggtgaaata

SEQ ID NO: 5778802 - DNA, 25 bp, Homo sapien
ccccctgttgctggcatcccgagct

SEQ ID NO: 5778803 - DNA, 25 bp, Homo sapien
gctgcaaacctcaataatttggtag

SEQ ID NO: 5778804 - DNA, 25 bp, Homo sapien
aacatcactgagtttgagaaagcag

SEQ ID NO: 5778805 - DNA, 25 bp, Homo sapien
gcatcacccagtgaatgtacattag

SEQ ID NO: 5778806 - DNA, 25 bp, Homo sapien
cggtgcccgggcccgcttacctgca

SEQ ID NO: 5778807 - DNA, 25 bp, Homo sapien
gcccgcgggccccgaggtgcgcccg

SEQ ID NO: 5778808 - DNA, 25 bp, Homo sapien
gctaggcctgcggaaaacgtcctag

SEQ ID NO: 5778809 - DNA, 25 bp, Homo sapien
aagtatgtgggtgtgcatttttccc

SEQ ID NO: 5778810 - DNA, 25 bp, Homo sapien
aaggattcataatcaatgcagtgac

SEQ ID NO: 5778811 - DNA, 25 bp, Homo sapien
gtccgcctgctaggcctgcggaaaa

SEQ ID NO: 5778812 - DNA, 25 bp, Homo sapien
tctgaagaaatatcctgtggatctt

SEQ ID NO: 5778813 - DNA, 25 bp, Homo sapien
tttgacagagaacatcactgagttt

SEQ ID NO: 5778814 - DNA, 25 bp, Homo sapien
caggctgcggagcccttgcagagcc

SEQ ID NO: 5778815 - DNA, 25 bp, Homo sapien
ctttgcagttcaaggaaaacaattt

SEQ ID NO: 5778816 - DNA, 25 bp, Homo sapien
aatacccactgaaaatgaaattaat

SEQ ID NO: 5778817 - DNA, 25 bp, Homo sapien
acaacattaatgtcatctttgcagt

SEQ ID NO: 5778818 - DNA, 25 bp, Homo sapien
agaaacgtgacgagcaatgatgaag

SEQ ID NO: 5778819 - DNA, 25 bp, Homo sapien
cacttgttcttggactgggccaagg

SEQ ID NO: 5778820 - DNA, 25 bp, Homo sapien
aagttcatcctctgaagaaatatcc

SEQ ID NO: 5778821 - DNA, 25 bp, Homo sapien
ctaagttgtttggcgtactttctta

SEQ ID NO: 5778822 - DNA, 25 bp, Homo sapien
aaggatcttctacccctcttgccag

SEQ ID NO: 5778823 - DNA, 25 bp, Homo sapien
ggatacatccatgtgctgtctttga

SEQ ID NO: 5778824 - DNA, 25 bp, Homo sapien
tttcagagaaattaatagacaacaa

SEQ ID NO: 5778825 - DNA, 25 bp, Homo sapien
ctgggccaaggtgaagacaatagat

SEQ ID NO: 5778826 - DNA, 25 bp, Homo sapien
atttggctcatacgttgataaaaca

SEQ ID NO: 5778827 - DNA, 25 bp, Homo sapien
tagatgtgcatcttcaaatgcagca

SEQ ID NO: 5778828 - DNA, 25 bp, Homo sapien
tcgttcctctgggcagcctgggtgt

SEQ ID NO: 5778829 - DNA, 25 bp, Homo sapien
agaatacccatctgtgcatgttata

SEQ ID NO: 5778830 - DNA, 25 bp, Homo sapien
acgttgtgatattgtttccaattta

SEQ ID NO: 5778831 - DNA, 25 bp, Homo sapien
ttaataagcaaaggctgctcagttg

SEQ ID NO: 5778832 - DNA, 25 bp, Homo sapien
gcgggacccgccgtgccgagccggg

SEQ ID NO: 5778833 - DNA, 25 bp, Homo sapien
ccatggatacatccatgtgctgtct

SEQ ID NO: 5778834 - DNA, 25 bp, Homo sapien
aatgtcatctttgcagttcaaggaa

SEQ ID NO: 5778835 - DNA, 25 bp, Homo sapien
ccaggtgccttgcgctgggtccaga

SEQ ID NO: 5778836 - DNA, 25 bp, Homo sapien
tgccgacttgtctttgcccgctgct

SEQ ID NO: 5778837 - DNA, 25 bp, Homo sapien
tagatacaccagaaggaggttttga

SEQ ID NO: 5778838 - DNA, 25 bp, Homo sapien
ctgtgaaagtcatatcggatggcga

SEQ ID NO: 5778839 - DNA, 25 bp, Homo sapien
tgcttcaggcagctgtctgtgaaag

SEQ ID NO: 5778840 - DNA, 25 bp, Homo sapien
caggtgacaccaggagaagtgtcta

SEQ ID NO: 5778841 - DNA, 25 bp, Homo sapien
aatagatgtgcatcttcaaatgcag

SEQ ID NO: 5778842 - DNA, 25 bp, Homo sapien
gccgaagctaattttatgctgaaag

SEQ ID NO: 5778843 - DNA, 25 bp, Homo sapien
gcggcgggcgcggggcgggctgttt

SEQ ID NO: 5778844 - DNA, 25 bp, Homo sapien
ccagaatgtggatggtgtgttcaag

SEQ ID NO: 5778845 - DNA, 25 bp, Homo sapien
aagatctctggaaacatagatacac

SEQ ID NO: 5778846 - DNA, 25 bp, Homo sapien
ggctggagagaaacaaaagctcttt

SEQ ID NO: 5778847 - DNA, 25 bp, Homo sapien
ttgtttgggtttgattgtgtttggc

SEQ ID NO: 5778848 - DNA, 25 bp, Homo sapien
gccctctctccagtcgccgccgggg

SEQ ID NO: 5778849 - DNA, 25 bp, Homo sapien
tacccactgaaaatgaaattaatac

SEQ ID NO: 5778850 - DNA, 25 bp, Homo sapien
acgctgccgacttgtctttgcccgc

SEQ ID NO: 5778851 - DNA, 25 bp, Homo sapien
cccacagatccagcatcacccagtg

SEQ ID NO: 5778852 - DNA, 25 bp, Homo sapien
tgttcttggactgggccaaggtgaa

SEQ ID NO: 5778853 - DNA, 25 bp, Homo sapien
cttgcagagccctctctccagtcgc

SEQ ID NO: 5778854 - DNA, 25 bp, Homo sapien
cgagcggtgcccgggcccgcttacc

SEQ ID NO: 5778855 - DNA, 25 bp, Homo sapien
ggctgcggagcccttgcagagccct

SEQ ID NO: 5778856 - DNA, 25 bp, Homo sapien
agctcatttcagaagtgaaagttca

SEQ ID NO: 5778857 - DNA, 25 bp, Homo sapien
gaccgcgggacccgccgtgccgagc

SEQ ID NO: 5778858 - DNA, 25 bp, Homo sapien
ccgcgtccggaaggcagccaggcgg

SEQ ID NO: 5778859 - DNA, 25 bp, Homo sapien
ctttttttaccgctgcatttgtctg

SEQ ID NO: 5778860 - DNA, 25 bp, Homo sapien
gtgtctatccagctgcgtccaggag

SEQ ID NO: 5778861 - DNA, 25 bp, Homo sapien
cttctagggcgctcccagagccgcc

SEQ ID NO: 5778862 - DNA, 25 bp, Homo sapien
caatttaataagcaaaggctgctca

SEQ ID NO: 5778863 - DNA, 25 bp, Homo sapien
ccaggtacaaggcatctattttaac

SEQ ID NO: 5778864 - DNA, 25 bp, Homo sapien
cttctacccctcttgccaggcacca

SEQ ID NO: 5778865 - DNA, 25 bp, Homo sapien
ttaccgccatctgtccagatgggtc

SEQ ID NO: 5778866 - DNA, 25 bp, Homo sapien
cattaatgtcatctttgcagttcaa

SEQ ID NO: 5778867 - DNA, 25 bp, Homo sapien
tttatgcagcagaagccccaccggc

SEQ ID NO: 5778868 - DNA, 25 bp, Homo sapien
gactacaatttagactgcatgcctc

SEQ ID NO: 5778869 - DNA, 25 bp, Homo sapien
agcaactgcgctgattgatgcgcca

SEQ ID NO: 5778870 - DNA, 25 bp, Homo sapien
aaacgtgacgagcaatgatgaagta

SEQ ID NO: 5778871 - DNA, 25 bp, Homo sapien
aggtacaaggcatctattttaacat

SEQ ID NO: 5778872 - DNA, 25 bp, Homo sapien
cccgccgtgccgagccgggagggcc

SEQ ID NO: 5778873 - DNA, 25 bp, Homo sapien
ctcactaggccaactttcagagaaa

SEQ ID NO: 5778874 - DNA, 25 bp, Homo sapien
gaaaggattcataatcaatgcagtg

SEQ ID NO: 5778875 - DNA, 25 bp, Homo sapien
atcctgtgccaggtgccttgcgctg

SEQ ID NO: 5778876 - DNA, 25 bp, Homo sapien
gggtccagaaagccaggcatggaag

SEQ ID NO: 5778877 - DNA, 25 bp, Homo sapien
agctgatttatgcagcagaagcccc

SEQ ID NO: 5778878 - DNA, 25 bp, Homo sapien
gaaaacgtcctagcgacactcggcc

SEQ ID NO: 5778879 - DNA, 25 bp, Homo sapien
taggcctgcggaaaacgtcctagcg

SEQ ID NO: 5778880 - DNA, 25 bp, Homo sapien
gttggaaacgatttatctagaaaaa

SEQ ID NO: 5778881 - DNA, 25 bp, Homo sapien
ctcatttcagaagtgaaagttcagg

SEQ ID NO: 5778882 - DNA, 25 bp, Homo sapien
ccgtaggggccctgagatgccgagc

SEQ ID NO: 5778883 - DNA, 25 bp, Homo sapien
tcataatcaatgcagtgactacaat

SEQ ID NO: 5778884 - DNA, 25 bp, Homo sapien
ccgcgggacccgccgtgccgagccg

SEQ ID NO: 5778885 - DNA, 25 bp, Homo sapien
atgtgctgtctttgacagagaacat

SEQ ID NO: 5778886 - DNA, 25 bp, Homo sapien
tggtataaggatcttctacccctct

SEQ ID NO: 5778887 - DNA, 25 bp, Homo sapien
cttgcgctgggtccagaatgtggat

SEQ ID NO: 5778888 - DNA, 25 bp, Homo sapien
aaagctcttttctttgtcccggagc

SEQ ID NO: 5778889 - DNA, 25 bp, Homo sapien
ggagaagtgtctatccagctgcgtc

SEQ ID NO: 5778890 - DNA, 25 bp, Homo sapien
tgagaaagcagttcatagacagaag

SEQ ID NO: 5778891 - DNA, 25 bp, Homo sapien
ttcttggactgggccaaggtgaaga

SEQ ID NO: 5778892 - DNA, 25 bp, Homo sapien
ctcttcgctaagctgatttatgcag

SEQ ID NO: 5778893 - DNA, 25 bp, Homo sapien
aggccaactttcagagaaattaata

SEQ ID NO: 5778894 - DNA, 25 bp, Homo sapien
acctcgccggcgtcccctcccacag

SEQ ID NO: 5778895 - DNA, 25 bp, Homo sapien
gcattatgtgcggctcggccctggc

SEQ ID NO: 5778896 - DNA, 25 bp, Homo sapien
caaaagctcttttctttgtcccgga

SEQ ID NO: 5778897 - DNA, 25 bp, Homo sapien
aatgtggatggtgtgttcaagagga

SEQ ID NO: 5778898 - DNA, 25 bp, Homo sapien
ggcgtcccctcccacagatccagca

SEQ ID NO: 5778899 - DNA, 25 bp, Homo sapien
cgcgggccccgaggtgcgcccggga

SEQ ID NO: 5778900 - DNA, 25 bp, Homo sapien
attgctggtgaaatagaatcaaagg

SEQ ID NO: 5778901 - DNA, 25 bp, Homo sapien
aaggctgctcagttgattcaataga

SEQ ID NO: 5778902 - DNA, 25 bp, Homo sapien
gccatgcttcaggcagctgtctgtg

SEQ ID NO: 5778903 - DNA, 25 bp, Homo sapien
attggtataaggatcttctacccct

SEQ ID NO: 5778904 - DNA, 25 bp, Homo sapien
aataagcaaaggctgctcagttgat

SEQ ID NO: 5778905 - DNA, 25 bp, Homo sapien
tctttgcccgctgctccgcagacgg

SEQ ID NO: 5778906 - DNA, 25 bp, Homo sapien
ggaaggatgcagaaacgtgacgagc

SEQ ID NO: 5778907 - DNA, 25 bp, Homo sapien
cggcccgcgggccccgaggtgcgcc

SEQ ID NO: 5778908 - DNA, 25 bp, Homo sapien
cctgtgccaggtgccttgcgctggg

SEQ ID NO: 5778909 - DNA, 25 bp, Homo sapien
ttggtagtggaagcctatcagaagc

SEQ ID NO: 5778910 - DNA, 25 bp, Homo sapien
ttaacattaccgccatctgtccaga

SEQ ID NO: 5778911 - DNA, 25 bp, Homo sapien
gccaggacgctgccgacttgtcttt

SEQ ID NO: 5778912 - DNA, 25 bp, Homo sapien
atggaaggatgcagaaacgtgacga

SEQ ID NO: 5778913 - DNA, 25 bp, Homo sapien
gaaacgatttatctagaaaaatggc

SEQ ID NO: 5778914 - DNA, 25 bp, Homo sapien
tcaagaggatttcatttcaggtgga

SEQ ID NO: 5778915 - DNA, 25 bp, Homo sapien
aacattaccgccatctgtccagatg

SEQ ID NO: 5778916 - DNA, 25 bp, Homo sapien
cgcttgctccgagccgcggggtccg

SEQ ID NO: 5778917 - DNA, 25 bp, Homo sapien
actttcagagaaattaatagacaac

SEQ ID NO: 5778918 - DNA, 25 bp, Homo sapien
gatgaagtatgtgggtgtgcatttt

SEQ ID NO: 5778919 - DNA, 25 bp, Homo sapien
gtccagaatgtggatggtgtgttca

SEQ ID NO: 5778920 - DNA, 25 bp, Homo sapien
gcttcctcccttgccagccaggacg

SEQ ID NO: 5778921 - DNA, 25 bp, Homo sapien
ctcgacctcgccggcgtcccctccc

SEQ ID NO: 5778922 - DNA, 25 bp, Homo sapien
ttaatagacaacaacattaatgtca

SEQ ID NO: 5778923 - DNA, 25 bp, Homo sapien
acgtgacgagcaatgatgaagtatg

SEQ ID NO: 5778924 - DNA, 25 bp, Homo sapien
ggagcccttgcagagccctctctcc

SEQ ID NO: 5778925 - DNA, 25 bp, Homo sapien
ttattatcttgttgatgtctcagca

SEQ ID NO: 5778926 - DNA, 25 bp, Homo sapien
ccgcttacctgcaccgcttgctccg

SEQ ID NO: 5778927 - DNA, 25 bp, Homo sapien
gcctccccctgttgctggcatcccg

SEQ ID NO: 5778928 - DNA, 25 bp, Homo sapien
tgcagcatcctgtgccaggtgcctt

SEQ ID NO: 5778929 - DNA, 25 bp, Homo sapien
caaaggctgctcagttgattcaata

SEQ ID NO: 5778930 - DNA, 25 bp, Homo sapien
tttcagaagtgaaagttcaggtgga

SEQ ID NO: 5778931 - DNA, 25 bp, Homo sapien
accatacattagcatccaccccgaa

SEQ ID NO: 5778932 - DNA, 25 bp, Homo sapien
aataatttggtagtggaagcctatc

SEQ ID NO: 5778933 - DNA, 25 bp, Homo sapien
tctattttaacattaccgccatctg

SEQ ID NO: 5778934 - DNA, 25 bp, Homo sapien
tctccagtcgccgccggggcccttg

SEQ ID NO: 5778935 - DNA, 25 bp, Homo sapien
tccagtcgccgccggggcccttggc

SEQ ID NO: 5778936 - DNA, 25 bp, Homo sapien
tgtgatattgtttccaatttaataa

SEQ ID NO: 5778937 - DNA, 25 bp, Homo sapien
gtgtgcatttttcccttttaaaata

SEQ ID NO: 5778938 - DNA, 25 bp, Homo sapien
aaaagattgctgctggtgatgacag

SEQ ID NO: 5778939 - DNA, 25 bp, Homo sapien
attttatgctgaaagttcatcctct

SEQ ID NO: 5778940 - DNA, 25 bp, Homo sapien
gactgggccaaggtgaagacaatag

SEQ ID NO: 5778941 - DNA, 25 bp, Homo sapien
atagtggtgcccaatgacggaaact

SEQ ID NO: 5778942 - DNA, 25 bp, Homo sapien
gggctgttttgcattatgtgcggct

SEQ ID NO: 5778943 - DNA, 25 bp, Homo sapien
acaccaggagaagtgtctatccagc

SEQ ID NO: 5778944 - DNA, 25 bp, Homo sapien
cctagcgacactcggcccgcgggcc

SEQ ID NO: 5778945 - DNA, 25 bp, Homo sapien
cgcggggtccgcctgctaggcctgc

SEQ ID NO: 5778946 - DNA, 25 bp, Homo sapien
ggaagcctatcagaagctcatttca

SEQ ID NO: 5778947 - DNA, 25 bp, Homo sapien
ggcaccattgctggtgaaatagaat

SEQ ID NO: 5778948 - DNA, 25 bp, Homo sapien
cagatcagacgtctcatctcgctct

SEQ ID NO: 5778949 - DNA, 25 bp, Homo sapien
tacgttgataaaacagtttcaccat

SEQ ID NO: 5778950 - DNA, 25 bp, Homo sapien
cttgctccgagccgcggggtccgcc

SEQ ID NO: 5778951 - DNA, 25 bp, Homo sapien
catccaccccgaaaggattcataat

SEQ ID NO: 5778952 - DNA, 25 bp, Homo sapien
gctgccgacttgtctttgcccgctg

SEQ ID NO: 5778953 - DNA, 25 bp, Homo sapien
tctcccgtgactttcgtcttggatt

SEQ ID NO: 5778954 - DNA, 25 bp, Homo sapien
ccgtgactttcgtcttggatttggc

SEQ ID NO: 5778955 - DNA, 25 bp, Homo sapien
agaagtgtctatccagctgcgtcca

SEQ ID NO: 5778956 - DNA, 25 bp, Homo sapien
cgagcaatgatgaagtatgtgggtg

SEQ ID NO: 5778957 - DNA, 25 bp, Homo sapien
cccgctgctccgcagacggggctgc

SEQ ID NO: 5778958 - DNA, 25 bp, Homo sapien
cgccgtgccgagccgggagggccgt

SEQ ID NO: 5778959 - DNA, 25 bp, Homo sapien
gatagcaaattggcaggcatagtgg

SEQ ID NO: 5778960 - DNA, 25 bp, Homo sapien
gacttgtctttgcccgctgctccgc

SEQ ID NO: 5778961 - DNA, 25 bp, Homo sapien
acgtctatgtcaaatcgacaaccat

SEQ ID NO: 5778962 - DNA, 25 bp, Homo sapien
gtgaaagtcatatcggatggcgaaa

SEQ ID NO: 5778963 - DNA, 25 bp, Homo sapien
cttgtctttgcccgctgctccgcag

SEQ ID NO: 5778964 - DNA, 25 bp, Homo sapien
catttcaggtggatcaagaagtgaa

SEQ ID NO: 5778965 - DNA, 25 bp, Homo sapien
gtggatctttattatcttgttgatg

SEQ ID NO: 5778966 - DNA, 25 bp, Homo sapien
cgccgccggggcccttggccgtcga

SEQ ID NO: 5778967 - DNA, 25 bp, Homo sapien
atcagaagctcatttcagaagtgaa

SEQ ID NO: 5778968 - DNA, 25 bp, Homo sapien
tggcgtactttcttacagaaaaaaa

SEQ ID NO: 5778969 - DNA, 25 bp, Homo sapien
gcctgctaggcctgcggaaaacgtc

SEQ ID NO: 5778970 - DNA, 25 bp, Homo sapien
tcaaaggctgcaaacctcaataatt

SEQ ID NO: 5778971 - DNA, 25 bp, Homo sapien
ttcccctcgacctcgccggcgtccc

SEQ ID NO: 5778972 - DNA, 25 bp, Homo sapien
ctgtctgtgaaagtcatatcggatg

SEQ ID NO: 5778973 - DNA, 25 bp, Homo sapien
cattaccgccatctgtccagatggg

SEQ ID NO: 5778974 - DNA, 25 bp, Homo sapien
agcccttgcagagccctctctccag

SEQ ID NO: 5778975 - DNA, 25 bp, Homo sapien
tcccgagcttcctcccttgccagcc

SEQ ID NO: 5778976 - DNA, 25 bp, Homo sapien
agtttgagaaagcagttcatagaca

SEQ ID NO: 5778977 - DNA, 25 bp, Homo sapien
gtgactttcgtcttggatttggctc

SEQ ID NO: 5778978 - DNA, 25 bp, Homo sapien
gataaaacagtttcaccatacatta

SEQ ID NO: 5778979 - DNA, 25 bp, Homo sapien
tgacaccaggagaagtgtctatcca

SEQ ID NO: 5778980 - DNA, 25 bp, Homo sapien
cttcgctaagctgatttatgcagca

SEQ ID NO: 5778981 - DNA, 25 bp, Homo sapien
ctaaaagattgctgctggtgatgac

SEQ ID NO: 5778982 - DNA, 25 bp, Homo sapien
aggtgcttctcgcggagaccgcggg

SEQ ID NO: 5778983 - DNA, 25 bp, Homo sapien
aaatgaaattaatacccaggtgaca

SEQ ID NO: 5778984 - DNA, 25 bp, Homo sapien
gccttgcgctgggtccagaatgtgg

SEQ ID NO: 5778985 - DNA, 25 bp, Homo sapien
gcccgcgtccggaaggcagccaggc

SEQ ID NO: 5778986 - DNA, 25 bp, Homo sapien
tcagttgattcaatagaatacccat

SEQ ID NO: 5778987 - DNA, 25 bp, Homo sapien
gggccaaggtgaagacaatagatgt

SEQ ID NO: 5778988 - DNA, 25 bp, Homo sapien
ggcgaggtcccgcctcgttcctctg

SEQ ID NO: 5778989 - DNA, 25 bp, Homo sapien
ttgtctgcctgcaaaacgaccggcg

SEQ ID NO: 5778990 - DNA, 25 bp, Homo sapien
tcctctgggcagcctgggtgttttc

SEQ ID NO: 5778991 - DNA, 25 bp, Homo sapien
tcactgagtttgagaaagcagttca

SEQ ID NO: 5778992 - DNA, 25 bp, Homo sapien
cctctgaagaaatatcctgtggatc

SEQ ID NO: 5778993 - DNA, 25 bp, Homo sapien
agaaacaaaagctcttttctttgtc

SEQ ID NO: 5778994 - DNA, 25 bp, Homo sapien
tagactgcatgcctccccatggata

SEQ ID NO: 5778995 - DNA, 25 bp, Homo sapien
ggtgttggcctccctgcccacctgt

SEQ ID NO: 5778996 - DNA, 25 bp, Homo sapien
tcgctcttgatagcaaattggcagg

SEQ ID NO: 5778997 - DNA, 25 bp, Homo sapien
cacctgtggaagcaactgcgctgat

SEQ ID NO: 5778998 - DNA, 25 bp, Homo sapien
aagccccaccggctggagagaaaca

SEQ ID NO: 5778999 - DNA, 25 bp, Homo sapien
gggcgctcccagagccgcctccccc

SEQ ID NO: 5779000 - DNA, 25 bp, Homo sapien
tcaggcagctgtctgtgaaagtcat

SEQ ID NO: 5779001 - DNA, 25 bp, Homo sapien
cccaccggctggagagaaacaaaag

SEQ ID NO: 5779002 - DNA, 25 bp, Homo sapien
agttgattcaatagaatacccatct

SEQ ID NO: 5779003 - DNA, 25 bp, Homo sapien
atggatacatccatgtgctgtcttt

SEQ ID NO: 5779004 - DNA, 25 bp, Homo sapien
tagcgacactcggcccgcgggcccc

SEQ ID NO: 5779005 - DNA, 25 bp, Homo sapien
gtcgaaggaggtgcttctcgcggag

SEQ ID NO: 5779006 - DNA, 25 bp, Homo sapien
ggattcataatcaatgcagtgacta

SEQ ID NO: 5779007 - DNA, 25 bp, Homo sapien
ctgtccagatgggtccagaaagcca

SEQ ID NO: 5779008 - DNA, 25 bp, Homo sapien
cagcttcgggctttgtttgggtttg

SEQ ID NO: 5779009 - DNA, 25 bp, Homo sapien
ggtagtggaagcctatcagaagctc

SEQ ID NO: 5779010 - DNA, 25 bp, Homo sapien
ccagaaagccaggcatggaaggatg

SEQ ID NO: 5779011 - DNA, 25 bp, Homo sapien
atgcctccccatggatacatccatg

SEQ ID NO: 5779012 - DNA, 25 bp, Homo sapien
gagcttcctcccttgccagccagga

SEQ ID NO: 5779013 - DNA, 25 bp, Homo sapien
gttcaagaggatttcatttcaggtg

SEQ ID NO: 5779014 - DNA, 25 bp, Homo sapien
aaaacaacgtctatgtcaaatcgac

SEQ ID NO: 5779015 - DNA, 25 bp, Homo sapien
tgaagtatgtgggtgtgcatttttc

SEQ ID NO: 5779016 - DNA, 25 bp, Homo sapien
gaggtgcgcccgggaggcgcgagcc

SEQ ID NO: 5779017 - DNA, 25 bp, Homo sapien
tccgcagacggggctgcaaagctgc

SEQ ID NO: 5779018 - DNA, 25 bp, Homo sapien
ctgcaaaacgaccggcgaggtcccg

SEQ ID NO: 5779019 - DNA, 25 bp, Homo sapien
gcatggaaggatgcagaaacgtgac

SEQ ID NO: 5779020 - DNA, 25 bp, Homo sapien
tatcttgttgatgtctcagcatcaa

SEQ ID NO: 5779021 - DNA, 25 bp, Homo sapien
gaaaatgaaattaatacccaggtga

SEQ ID NO: 5779022 - DNA, 25 bp, Homo sapien
cgcggagaccgcgggacccgccgtg

SEQ ID NO: 5779023 - DNA, 25 bp, Homo sapien
tcttgccaggcaccattgctggtga

SEQ ID NO: 5779024 - DNA, 25 bp, Homo sapien
gtcaaatcgacaaccatggaacacc

SEQ ID NO: 5779025 - DNA, 25 bp, Homo sapien
tatagaaaaattaaattccgttgga

SEQ ID NO: 5779026 - DNA, 25 bp, Homo sapien
catacgttgataaaacagtttcacc

SEQ ID NO: 5779027 - DNA, 25 bp, Homo sapien
tcttggatttggctcatacgttgat

SEQ ID NO: 5779028 - DNA, 25 bp, Homo sapien
gaaaacaatttcattggtataagga

SEQ ID NO: 5779029 - DNA, 25 bp, Homo sapien
aaaggctgcaaacctcaataatttg

SEQ ID NO: 5779030 - DNA, 25 bp, Homo sapien
caatgatgaagtatgtgggtgtgca

SEQ ID NO: 5779031 - DNA, 25 bp, Homo sapien
ggtgatgacagatcagacgtctcat

SEQ ID NO: 5779032 - DNA, 25 bp, Homo sapien
gggccctgagatgccgagcggtgcc

SEQ ID NO: 5779033 - DNA, 25 bp, Homo sapien
gaaaaacaacgtctatgtcaaatcg

SEQ ID NO: 5779034 - DNA, 25 bp, Homo sapien
catgcttcaggcagctgtctgtgaa

SEQ ID NO: 5779035 - DNA, 25 bp, Homo sapien
cggggtccgcctgctaggcctgcgg

SEQ ID NO: 5779036 - DNA, 25 bp, Homo sapien
cgttgataaaacagtttcaccatac

SEQ ID NO: 5779037 - DNA, 25 bp, Homo sapien
ctccgagccgcggggtccgcctgct

SEQ ID NO: 5779038 - DNA, 25 bp, Homo sapien
tgtctttgcccgctgctccgcagac

SEQ ID NO: 5779039 - DNA, 25 bp, Homo sapien
accgccatctgtccagatgggtcca

SEQ ID NO: 5779040 - DNA, 25 bp, Homo sapien
ttcgtcttggatttggctcatacgt

SEQ ID NO: 5779041 - DNA, 25 bp, Homo sapien
tgtgcatcttcaaatgcagcatcct

SEQ ID NO: 5779042 - DNA, 25 bp, Homo sapien
ggatcttctacccctcttgccaggc

SEQ ID NO: 5779043 - DNA, 25 bp, Homo sapien
aagctgcaactaatggtgttggcct

SEQ ID NO: 5779044 - DNA, 25 bp, Homo sapien
acgtcctagcgacactcggcccgcg

SEQ ID NO: 5779045 - DNA, 25 bp, Homo sapien
ctatcagaagctcatttcagaagtg

SEQ ID NO: 5779046 - DNA, 25 bp, Homo sapien
gattgatgcgccacagacttttttc

SEQ ID NO: 5779047 - DNA, 25 bp, Homo sapien
gaaagtcatatcggatggcgaaaag

SEQ ID NO: 5779048 - DNA, 25 bp, Homo sapien
cgggtgcttctagggcgctcccaga

SEQ ID NO: 5779049 - DNA, 25 bp, Homo sapien
tagcaaattggcaggcatagtggtg

SEQ ID NO: 5779050 - DNA, 25 bp, Homo sapien
acccctcactaggccaactttcaga

SEQ ID NO: 5779051 - DNA, 25 bp, Homo sapien
cgccatctgtccagatgggtccaga

SEQ ID NO: 5779052 - DNA, 25 bp, Homo sapien
caaatcgacaaccatggaacacccc

SEQ ID NO: 5779053 - DNA, 25 bp, Homo sapien
tgacggaaactgtcatctgaaaaac

SEQ ID NO: 5779054 - DNA, 25 bp, Homo sapien
tcttgttgatgtctcagcatcaatg

SEQ ID NO: 5779055 - DNA, 25 bp, Homo sapien
gattgtgtttggctcttcgctaagc

SEQ ID NO: 5779056 - DNA, 25 bp, Homo sapien
ctggagagaaacaaaagctcttttc

SEQ ID NO: 5779057 - DNA, 25 bp, Homo sapien
cgtcttggatttggctcatacgttg

SEQ ID NO: 5779058 - DNA, 25 bp, Homo sapien
agcagttcatagacagaagatctct

SEQ ID NO: 5779059 - DNA, 25 bp, Homo sapien
aggggccctgagatgccgagcggtg

SEQ ID NO: 5779060 - DNA, 25 bp, Homo sapien
aaggcatctattttaacattaccgc

SEQ ID NO: 5779061 - DNA, 25 bp, Homo sapien
catcttcaaatgcagcatcctgtgc

SEQ ID NO: 5779062 - DNA, 25 bp, Homo sapien
cactaggccaactttcagagaaatt

SEQ ID NO: 5779063 - DNA, 25 bp, Homo sapien
gtctgcctgcaaaacgaccggcgag

SEQ ID NO: 5779064 - DNA, 25 bp, Homo sapien
tcgctaagctgatttatgcagcaga

SEQ ID NO: 5779065 - DNA, 25 bp, Homo sapien
ggcctgcggaaaacgtcctagcgac

SEQ ID NO: 5779066 - DNA, 25 bp, Homo sapien
ccagctgcgtccaggagccgaagct

SEQ ID NO: 5779067 - DNA, 25 bp, Homo sapien
ttgatagcaaattggcaggcatagt

SEQ ID NO: 5779068 - DNA, 25 bp, Homo sapien
cctgcccacctgtggaagcaactgc

SEQ ID NO: 5779069 - DNA, 25 bp, Homo sapien
gcgacactcggcccgcgggccccga

SEQ ID NO: 5779070 - DNA, 25 bp, Homo sapien
accatggaacacccctcactaggcc

SEQ ID NO: 5779071 - DNA, 25 bp, Homo sapien
ggatcaagaagtgaacgttgtgata

SEQ ID NO: 5779072 - DNA, 25 bp, Homo sapien
catctcgctcttgatagcaaattgg

SEQ ID NO: 5779073 - DNA, 25 bp, Homo sapien
caggcaccattgctggtgaaataga

SEQ ID NO: 5779074 - DNA, 25 bp, Homo sapien
ttggcctccctgcccacctgtggaa

SEQ ID NO: 5779075 - DNA, 25 bp, Homo sapien
tcaggtggatcaagaagtgaacgtt

SEQ ID NO: 5779076 - DNA, 25 bp, Homo sapien
tgccaggtgccttgcgctgggtcca

SEQ ID NO: 5779077 - DNA, 25 bp, Homo sapien
tgaagaaatatcctgtggatcttta

SEQ ID NO: 5779078 - DNA, 25 bp, Homo sapien
ttggctcttcgctaagctgatttat

SEQ ID NO: 5779079 - DNA, 25 bp, Homo sapien
acgtctcatctcgctcttgatagca

SEQ ID NO: 5779080 - DNA, 25 bp, Homo sapien
agacgtctcatctcgctcttgatag

SEQ ID NO: 5779081 - DNA, 25 bp, Homo sapien
gctcccagagccgcctccccctgtt

SEQ ID NO: 5779082 - DNA, 25 bp, Homo sapien
tttctcccgtgactttcgtcttgga

SEQ ID NO: 5779083 - DNA, 25 bp, Homo sapien
gctgcaaagctgcaactaatggtgt

SEQ ID NO: 5779084 - DNA, 25 bp, Homo sapien
tggaagcaactgcgctgattgatgc

SEQ ID NO: 5779085 - DNA, 25 bp, Homo sapien
atggcgaaaagaggctaaaagattg

SEQ ID NO: 5779086 - DNA, 25 bp, Homo sapien
ctgcggagcccttgcagagccctct

SEQ ID NO: 5779087 - DNA, 25 bp, Homo sapien
cgcccgggaggcgcgagcccgcgtc

SEQ ID NO: 5779088 - DNA, 25 bp, Homo sapien
tcccgtgactttcgtcttggatttg

SEQ ID NO: 5779089 - DNA, 25 bp, Homo sapien
ggaaggcagccaggcggcgggcgcg

SEQ ID NO: 5779090 - DNA, 25 bp, Homo sapien
ttcctcccttgccagccaggacgct

SEQ ID NO: 5779091 - DNA, 25 bp, Homo sapien
tttctttgtcccggagcaggctgcg

SEQ ID NO: 5779092 - DNA, 25 bp, Homo sapien
tggcaggcatagtggtgcccaatga

SEQ ID NO: 5779093 - DNA, 25 bp, Homo sapien
tttatgctgaaagttcatcctctga

SEQ ID NO: 5779094 - DNA, 25 bp, Homo sapien
tctacccctcttgccaggcaccatt

SEQ ID NO: 5779095 - DNA, 25 bp, Homo sapien
gtggaaaaccaggtacaaggcatct

SEQ ID NO: 5779096 - DNA, 25 bp, Homo sapien
atgaaattaatacccaggtgacacc

SEQ ID NO: 5779097 - DNA, 25 bp, Homo sapien
catcactgagtttgagaaagcagtt

SEQ ID NO: 5779098 - DNA, 25 bp, Homo sapien
gccccaccggctggagagaaacaaa

SEQ ID NO: 5779099 - DNA, 25 bp, Homo sapien
ttcacttgttcttggactgggccaa

SEQ ID NO: 5779100 - DNA, 25 bp, Homo sapien
ttggctcatacgttgataaaacagt

SEQ ID NO: 5779101 - DNA, 25 bp, Homo sapien
ccgagcttcctcccttgccagccag

SEQ ID NO: 5779102 - DNA, 25 bp, Homo sapien
tggaacacccctcactaggccaact

SEQ ID NO: 5779103 - DNA, 25 bp, Homo sapien
gatgtgcatcttcaaatgcagcatc

SEQ ID NO: 5779104 - DNA, 25 bp, Homo sapien
ctgcatgcctccccatggatacatc

SEQ ID NO: 5779105 - DNA, 25 bp, Homo sapien
ttttgcattatgtgcggctcggccc

SEQ ID NO: 5779106 - DNA, 25 bp, Homo sapien
ggagagaaacaaaagctcttttctt

SEQ ID NO: 5779107 - DNA, 25 bp, Homo sapien
tgtcatctgaaaaacaacgtctatg

SEQ ID NO: 5779108 - DNA, 25 bp, Homo sapien
tcctgtggatctttattatcttgtt

SEQ ID NO: 5779109 - DNA, 25 bp, Homo sapien
taaaacagtttcaccatacattagc

SEQ ID NO: 5779110 - DNA, 25 bp, Homo sapien
cctcgttcctctgggcagcctgggt

SEQ ID NO: 5779111 - DNA, 25 bp, Homo sapien
cctgtggaagcaactgcgctgattg

SEQ ID NO: 5779112 - DNA, 25 bp, Homo sapien
ttttttaccgctgcatttgtctgcc

SEQ ID NO: 5779113 - DNA, 25 bp, Homo sapien
ttcaaatgcagcatcctgtgccagg

SEQ ID NO: 5779114 - DNA, 25 bp, Homo sapien
cgtcccctcccacagatccagcatc

SEQ ID NO: 5779115 - DNA, 25 bp, Homo sapien
ctaggccaactttcagagaaattaa

SEQ ID NO: 5779116 - DNA, 25 bp, Homo sapien
aaggaggttttgacgccatgcttca

SEQ ID NO: 5779117 - DNA, 25 bp, Homo sapien
tcccttgccagccaggacgctgccg

SEQ ID NO: 5779118 - DNA, 25 bp, Homo sapien
gatttatgcagcagaagccccaccg

SEQ ID NO: 5779119 - DNA, 25 bp, Homo sapien
ttacctgcaccgcttgctccgagcc

SEQ ID NO: 5779120 - DNA, 25 bp, Homo sapien
ccccgaaaggattcataatcaatgc

SEQ ID NO: 5779121 - DNA, 25 bp, Homo sapien
cacagatccagcatcacccagtgaa

SEQ ID NO: 5779122 - DNA, 25 bp, Homo sapien
atgtctcagcatcaatgcacaataa

SEQ ID NO: 5779123 - DNA, 25 bp, Homo sapien
ggcgcggggcgggctgttttgcatt

SEQ ID NO: 5779124 - DNA, 25 bp, Homo sapien
tgttttgcattatgtgcggctcggc

SEQ ID NO: 5779125 - DNA, 25 bp, Homo sapien
gctgtctttgacagagaacatcact

SEQ ID NO: 5779126 - DNA, 25 bp, Homo sapien
gtttgggtttgattgtgtttggctc

SEQ ID NO: 5779127 - DNA, 25 bp, Homo sapien
cccgaggtgcgcccgggaggcgcga

SEQ ID NO: 5779128 - DNA, 25 bp, Homo sapien
agcaaaggctgctcagttgattcaa

SEQ ID NO: 5779129 - DNA, 25 bp, Homo sapien
tgtcatctttgcagttcaaggaaaa

SEQ ID NO: 5779130 - DNA, 25 bp, Homo sapien
gatggtgtgttcaagaggatttcat

SEQ ID NO: 5779131 - DNA, 25 bp, Homo sapien
gtgcccgggcccgcttacctgcacc

SEQ ID NO: 5779132 - DNA, 25 bp, Homo sapien
ttgctgctggtgatgacagatcaga

SEQ ID NO: 5779133 - DNA, 25 bp, Homo sapien
tgcgctgggtccagaatgtggatgg

SEQ ID NO: 5779134 - DNA, 25 bp, Homo sapien
gcatttgtctgcctgcaaaacgacc

SEQ ID NO: 5779135 - DNA, 25 bp, Homo sapien
atctgaaaaacaacgtctatgtcaa

SEQ ID NO: 5779136 - DNA, 25 bp, Homo sapien
tgcagcagaagccccaccggctgga

SEQ ID NO: 5779137 - DNA, 25 bp, Homo sapien
cctcccttgccagccaggacgctgc

SEQ ID NO: 5779138 - DNA, 25 bp, Homo sapien
ccgtgccgagccgggagggccgtag

SEQ ID NO: 5779139 - DNA, 25 bp, Homo sapien
agaaggaggttttgacgccatgctt

SEQ ID NO: 5779140 - DNA, 25 bp, Homo sapien
tctctggaaacatagatacaccaga

SEQ ID NO: 5779141 - DNA, 25 bp, Homo sapien
acaatagatgtgcatcttcaaatgc

SEQ ID NO: 5779142 - DNA, 25 bp, Homo sapien
agtggtgcccaatgacggaaactgt

SEQ ID NO: 5779143 - DNA, 25 bp, Homo sapien
gtccagatgggtccagaaagccagg

SEQ ID NO: 5779144 - DNA, 25 bp, Homo sapien
ttgtgtttggctcttcgctaagctg

SEQ ID NO: 5779145 - DNA, 25 bp, Homo sapien
acctgcaccgcttgctccgagccgc

SEQ ID NO: 5779146 - DNA, 25 bp, Homo sapien
tctttgtcccggagcaggctgcgga

SEQ ID NO: 5779147 - DNA, 25 bp, Homo sapien
aatgacggaaactgtcatctgaaaa

SEQ ID NO: 5779148 - DNA, 25 bp, Homo sapien
gcaccgcttgctccgagccgcgggg

SEQ ID NO: 5779149 - DNA, 25 bp, Homo sapien
ctttattatcttgttgatgtctcag

SEQ ID NO: 5779150 - DNA, 25 bp, Homo sapien
gcgtccaggagccgaagctaatttt

SEQ ID NO: 5779151 - DNA, 25 bp, Homo sapien
gcagcctgggtgttttcacttgttc

SEQ ID NO: 5779152 - DNA, 25 bp, Homo sapien
tggcatttttctcccgtgactttcg

SEQ ID NO: 5779153 - DNA, 25 bp, Homo sapien
gccgcggggtccgcctgctaggcct

SEQ ID NO: 5779154 - DNA, 25 bp, Homo sapien
attcataatcaatgcagtgactaca

SEQ ID NO: 5779155 - DNA, 25 bp, Homo sapien
ggctcttcgctaagctgatttatgc

SEQ ID NO: 5779156 - DNA, 25 bp, Homo sapien
aacatagatacaccagaaggaggtt

SEQ ID NO: 5779157 - DNA, 25 bp, Homo sapien
catgttataatacccactgaaaatg

SEQ ID NO: 5779158 - DNA, 25 bp, Homo sapien
gtccaggagccgaagctaattttat

SEQ ID NO: 5779159 - DNA, 25 bp, Homo sapien
aatgcagtgactacaatttagactg

SEQ ID NO: 5779160 - DNA, 25 bp, Homo sapien
gtgtgttcaagaggatttcatttca

SEQ ID NO: 5779161 - DNA, 25 bp, Homo sapien
tagaaaaatggcatttttctcccgt

SEQ ID NO: 5779162 - DNA, 25 bp, Homo sapien
ctcggcccgcgggccccgaggtgcg

SEQ ID NO: 5779163 - DNA, 25 bp, Homo sapien
ggcgaaaagaggctaaaagattgct

SEQ ID NO: 5779164 - DNA, 25 bp, Homo sapien
ctgcgtccaggagccgaagctaatt

SEQ ID NO: 5779165 - DNA, 25 bp, Homo sapien
ggatgcagaaacgtgacgagcaatg

SEQ ID NO: 5779166 - DNA, 25 bp, Homo sapien
atgacagatcagacgtctcatctcg

SEQ ID NO: 5779167 - DNA, 25 bp, Homo sapien
gtataaggatcttctacccctcttg

SEQ ID NO: 5779168 - DNA, 25 bp, Homo sapien
aggaaaacaatttcattggtataag

SEQ ID NO: 5779169 - DNA, 25 bp, Homo sapien
agaacatcactgagtttgagaaagc

SEQ ID NO: 5779170 - DNA, 25 bp, Homo sapien
gtctcagcatcaatgcacaataata

SEQ ID NO: 5779171 - DNA, 25 bp, Homo sapien
tctagggcgctcccagagccgcctc

SEQ ID NO: 5779172 - DNA, 25 bp, Homo sapien
aggtcccgcctcgttcctctgggca

SEQ ID NO: 5779173 - DNA, 25 bp, Homo sapien
ctttgtttgggtttgattgtgtttg

SEQ ID NO: 5779174 - DNA, 25 bp, Homo sapien
ccctcgacctcgccggcgtcccctc

SEQ ID NO: 5779175 - DNA, 25 bp, Homo sapien
ccggaaggcagccaggcggcgggcg

SEQ ID NO: 5779176 - DNA, 25 bp, Homo sapien
ccctcccacagatccagcatcaccc

SEQ ID NO: 5779177 - DNA, 25 bp, Homo sapien
atcctctgaagaaatatcctgtgga

SEQ ID NO: 5779178 - DNA, 25 bp, Homo sapien
gctcggccctggctttttttaccgc

SEQ ID NO: 5779179 - DNA, 25 bp, Homo sapien
agaagtgaaagttcaggtggaaaac

SEQ ID NO: 5779180 - DNA, 25 bp, Homo sapien
caaggaaaacaatttcattggtata

SEQ ID NO: 5779181 - DNA, 25 bp, Homo sapien
ccgttggaaacgatttatctagaaa

SEQ ID NO: 5779182 - DNA, 25 bp, Homo sapien
gggtccagaatgtggatggtgtgtt

SEQ ID NO: 5779183 - DNA, 25 bp, Homo sapien
aagctaattttatgctgaaagttca

SEQ ID NO: 5779184 - DNA, 25 bp, Homo sapien
ttgattcaatagaatacccatctgt

SEQ ID NO: 5779185 - DNA, 25 bp, Homo sapien
gggtccgcctgctaggcctgcggaa

SEQ ID NO: 5779186 - DNA, 25 bp, Homo sapien
ttcgggctttgtttgggtttgattg

SEQ ID NO: 5779187 - DNA, 25 bp, Homo sapien
ttcaatagaatacccatctgtgcat

SEQ ID NO: 5779188 - DNA, 25 bp, Homo sapien
caactaatggtgttggcctccctgc

SEQ ID NO: 5779189 - DNA, 25 bp, Homo sapien
aaagcagttcatagacagaagatct

SEQ ID NO: 5779190 - DNA, 25 bp, Homo sapien
ggctgctcagttgattcaatagaat

SEQ ID NO: 5779191 - DNA, 25 bp, Homo sapien
ctgggcagcctgggtgttttcactt

SEQ ID NO: 5779192 - DNA, 25 bp, Homo sapien
caccattgctggtgaaatagaatca

SEQ ID NO: 5779193 - DNA, 25 bp, Homo sapien
ttgcagttcaaggaaaacaatttca

SEQ ID NO: 5779194 - DNA, 25 bp, Homo sapien
cggaaaacgtcctagcgacactcgg

SEQ ID NO: 5779195 - DNA, 25 bp, Homo sapien
tgacgccatgcttcaggcagctgtc

SEQ ID NO: 5779196 - DNA, 25 bp, Homo sapien
caggagaagtgtctatccagctgcg

SEQ ID NO: 5779197 - DNA, 25 bp, Homo sapien
ctatccagctgcgtccaggagccga

SEQ ID NO: 5779198 - DNA, 25 bp, Homo sapien
tgcaaagctgcaactaatggtgttg

SEQ ID NO: 5779199 - DNA, 25 bp, Homo sapien
cccctcttgccaggcaccattgctg

SEQ ID NO: 5779200 - DNA, 25 bp, Homo sapien
ttaccgctgcatttgtctgcctgca

SEQ ID NO: 5779201 - DNA, 25 bp, Homo sapien
acaaggcatctattttaacattacc

SEQ ID NO: 5779202 - DNA, 25 bp, Homo sapien
agccaggcatggaaggatgcagaaa

SEQ ID NO: 5779203 - DNA, 25 bp, Homo sapien
aagaggatttcatttcaggtggatc

SEQ ID NO: 5779204 - DNA, 25 bp, Homo sapien
acagaagatctctggaaacatagat

SEQ ID NO: 5779205 - DNA, 25 bp, Homo sapien
gacactcggcccgcgggccccgagg

SEQ ID NO: 5779206 - DNA, 25 bp, Homo sapien
tgcccacctgtggaagcaactgcgc

SEQ ID NO: 5779207 - DNA, 25 bp, Homo sapien
gtccagaaagccaggcatggaagga

SEQ ID NO: 5779208 - DNA, 25 bp, Homo sapien
tgatattgtttccaatttaataagc

SEQ ID NO: 5779209 - DNA, 25 bp, Homo sapien
cagttcatagacagaagatctctgg

SEQ ID NO: 5779210 - DNA, 25 bp, Homo sapien
ctcgccggcgtcccctcccacagat

SEQ ID NO: 5779211 - DNA, 25 bp, Homo sapien
gtgttcaagaggatttcatttcagg

SEQ ID NO: 5779212 - DNA, 25 bp, Homo sapien
acacccctcactaggccaactttca

SEQ ID NO: 5779213 - DNA, 25 bp, Homo sapien
caccagaaggaggttttgacgccat

SEQ ID NO: 5779214 - DNA, 25 bp, Homo sapien
catacattagcatccaccccgaaag

SEQ ID NO: 5779215 - DNA, 25 bp, Homo sapien
gaacacccctcactaggccaacttt

SEQ ID NO: 5779216 - DNA, 25 bp, Homo sapien
ggtgacaccaggagaagtgtctatc

SEQ ID NO: 5779217 - DNA, 25 bp, Homo sapien
gcatcctgtgccaggtgccttgcgc

SEQ ID NO: 5779218 - DNA, 25 bp, Homo sapien
aggcatggaaggatgcagaaacgtg

SEQ ID NO: 5779219 - DNA, 25 bp, Homo sapien
ggtgcttctagggcgctcccagagc

SEQ ID NO: 5779220 - DNA, 25 bp, Homo sapien
caacgtctatgtcaaatcgacaacc

SEQ ID NO: 5779221 - DNA, 25 bp, Homo sapien
caacaacattaatgtcatctttgca

SEQ ID NO: 5779222 - DNA, 25 bp, Homo sapien
gtatgtgggtgtgcatttttccctt

SEQ ID NO: 5779223 - DNA, 25 bp, Homo sapien
aaaatggcatttttctcccgtgact

SEQ ID NO: 5779224 - DNA, 25 bp, Homo sapien
aggcagctgtctgtgaaagtcatat

SEQ ID NO: 5779225 - DNA, 25 bp, Homo sapien
aaaaccaggtacaaggcatctattt

SEQ ID NO: 5779226 - DNA, 25 bp, Homo sapien
caatagaatacccatctgtgcatgt

SEQ ID NO: 5779227 - DNA, 25 bp, Homo sapien
gcgctcccagagccgcctccccctg

SEQ ID NO: 5779228 - DNA, 25 bp, Homo sapien
gtacaaggcatctattttaacatta

SEQ ID NO: 5779229 - DNA, 25 bp, Homo sapien
gtcctagcgacactcggcccgcggg

SEQ ID NO: 5779230 - DNA, 25 bp, Homo sapien
atattgtttccaatttaataagcaa

SEQ ID NO: 5779231 - DNA, 25 bp, Homo sapien
tgcgcccgggaggcgcgagcccgcg

SEQ ID NO: 5779232 - DNA, 25 bp, Homo sapien
gagccctctctccagtcgccgccgg

SEQ ID NO: 5779233 - DNA, 25 bp, Homo sapien
ggctttttttaccgctgcatttgtc

SEQ ID NO: 5779234 - DNA, 25 bp, Homo sapien
atctttgcagttcaaggaaaacaat

SEQ ID NO: 5779235 - DNA, 25 bp, Homo sapien
tcaccatacattagcatccaccccg
